United States Patent Application Publication US 2005/0228172 A9 - sequence listing, part 9

SEQ ID NO: 29038 - DNA, 584 bp, Homo sapiens
gaaaattatgaaaatgattaaaataaaatatggtaacatgcaagacaagtaaattatttttatcatggattattctttgcaaagagctcaaagcatcttccacgtgttcagtcttttgtattacttgactatgcaatgtactgacagaagatgagctttgtctactctaacatgaaggatttacataccccttaatagtgactccactggagaacaaaagccactaatgcattttttttgacttcctaattttattttaggttcacacaggttatcaaaaagtaaagggaaatgactaaacaaactcactyattatacttattgatggctatgtattgacttcacagtaaatgataactaaagtctatccaaatttttcaaaaataatgccatgtatttcaaatgactctacaaccccagtgtggatattttatgcttatttgtgcaagaggccaagaccacagattatgaacgaagaaaatttgggtagactttagttattattttccttcaagatcgcaagataaaattatctatgaattaactgttacagttaattacactgtgtcactttttcatgtttt

SEQ ID NO: 29039 - DNA, 1185 bp, Homo sapiens
accctgatgacccaaacacctcccaccaggccccacctccagcactggggattacgtttcaacatgagatttgggtgaggacaaatatccaaactatatcactctctgggttgacattttcattgaaggtgcaaaagcaccagtgggtaaaactgctggaatcctcacacccatcaaggcagtggcaccaaactattgtaataatcatattctttttttttttttctttttcagatggattctcactctgttgcccaggctgaagtgcagtggtgcaatcttggctcactgtaacctctgcctcccgggttcaagtgattctcctgctttagcctccttagtagctgggactacaggcgcatgccaccacaccggtctaatttttgtgtttgtagtacagacggagtttcaccatgttggccaggatggtctcgaactcctgacctcaagtgatccacgcacctcggcttcccaaagtgctgagattacaggcatgagccaccgtacccagccaaatagtcatattcttcactgccatggcactcatgacttaaaaggaaaagaagatgatttctaatatgaggttatagaaaaaaaagtttaaggaaaaagagtttcacttaggaatgtccttgataaagcactaaaaaatgttagttgtcaacctttgagtgtactgttttttaatacagtgttataaaatggagagtcctcgtaaagcacttttsttgcatgctaaagtactgattgacttgaggaaaacaatttgtgtgagtattggagttgcacactgaattagacacttttttcatgcaataccatattttcttgaaaaaacactgactggcaaagtatggttatccagatatgggtactggtggacatttcactttgtattccagtcacttgaaggaaaataacagacagtgtttgttgccagttgtgtcataattttttttttttttgagatagagtttctgtattgtcacaaaggctggagtgcaatggtgtgatctcggctcactgcagcctccacctcccgggttcaagcgattctcctgcctcagtcttgtgagtagctgggattacaggggtgcaccaccatgcccagctaatttttgtatttttagaagagacagggttttgccatgttggccaggctggtcttgaactcctggcctcaag

SEQ ID NO: 29040 - DNA, 470 bp, Homo sapiens
atcctgtgggctctggaccgggaagagagcctggcagcgaggggtgacctggaaaagcccagtcacagagggtggatggctgtttcctgcgtaggaagctgttggcgaccagaatggtttatactttgttcctgggaccaacaggatctgcttggttctcggcgcataagcccactactctccccctgcgtaatgcactgggtggaatgcaagaacaatacagacttcctgcgggcctcggtggcccacgcctgtgatcccagcactttgggaggcccaggcgggcgaatcgcttgagctcaggagttcgagaccagcctgggcaacatagcgagaccgccgtcactaatatatatatatttatatatatatatttcatatataatatatattttatatataatatatatttyatatataatatatttttatatatgatatatattttatacttttatatactatataaa

SEQ ID NO: 29041 - DNA, 470 bp, Homo sapiens
atcctgtgggctctggaccgggaagagagcctggcagcgaggggtgacctggaaaagcccagtcacagagggtggatggctgtttcctgcgtaggaagctgttggcgaccagaatggtttatactttgttcctgggaccaacaggatctgcttggttctcggcgcataagcccactactctccccctgcgtaatgcactgggtggaatgcaagaacaatacagacttcctgcgggcctcggtggcccacgcctgtgatcccagcactttgggaggcccaggcgggcgaatcgcttgagctcaggagttcgagaccagcctgggcaacatagcgagaccgccgtcactaatatatatatatttatatatatatatttcatatataatatatattttatatataatatatattttatatawaatatatttttatatatgatatatattttatacttttatatactatataaa

SEQ ID NO: 29042 - DNA, 823 bp, Homo sapiens
ttttctaataacagtgtcaagatttccttagaatgttcaggagcagagaacaggttccactcctggactttaagggtgaaatatgtgtgcctttctgcagcgggtgcagaggagggtgtggatatcaggaacactgcctagttccagggtcccaaggttgggcagccccgcagagaacggaatcaacacagagagcacagcaggagtcttggagagtaagagtgatgggcagagcttcagcaggcctatgtgtggctggaacagaaacccctggaacttcagtcttagagctgacaaatctcttctgctcttgccagtctcagatagacatttttgaacttgcaaaaaaaagaaagagaaagatcctatctaacaggcatcttgagacactagcattttttaaaataaacatactctttttaaaatggtctattatagtaatatggtaggttaatatgcttctgccactaaactttaataggctacatcctaaatttatacaaatatgtataagaaaaatctcccaaatggcaaatagagagctatattcaaggccatttgaaaatgtgattggcaaaatgatgttcagagtcataaacaattaggatcacctaaatgtccctaaaggggaaatttgsaatgaaatagcctcgcttgccctcccagcttctaatgccgagttgtgtgtcaacttgccaatgcagaatgtgcccggagaggtcctccccagaactcctagggcagcaatggggctccatttgtattctctgaactggcaacttttacctcccagccacagatacaacatatggagaaaaaggtg

SEQ ID NO: 29043 - DNA, 622 bp, Homo sapiens
  misc_feature (1)...(622): n = A,T,C or G
ggtctgtgcatttctcaggtcaaagtgaatattaccctatttctcccatttcacacccactgatcagagaagcaggggactcagaatgtttttctggtgtctgacatagataatctgctgattggtaatcaaatattgactatgttgtgtccagagaaatcaccaagtacaccatcaacaaatagatgtactggacagaaccaatgcaatcattttaaaaagaatgacaaagkttttgcacatgagttgatttaaggttgccattggaatactctacttatgcagaaatgtactactagagctatgggattaaagtatgagcccccccaaatggagaacaactgctttgagtcagacgcagttcattgtatctgctagtggtacnctgttacctgctgttttgcaccccataaccatcttttgaggcagaaatgctgaactcaggtaaaagcaataaagatactctaaaaattcgtgcacacacacacaaaaaaacatggaactgtaaaagacaccctggggctaaagaaagttgatggccacggagcaaaattggtgcaggaagtggtgtgacagtgttaatgttcctgatttattctgaaagttagaaaaacattttcaa

SEQ ID NO: 29044 - DNA, 1113 bp, Homo sapiens
gtttgtgagaaatgtatctctttttttttctttttgggaacctctatgaatgatgttatcccactctgaaatgcttatcaatgatcagtgataacaagacaggagagttccctggttcccctcacagggcatgcaatcccctcacaggggtgctgccctctgttccaccgccgtgagctcaaaccccccttacgggagggggaccacacagacrggaaggtgcaggagctggggtgagagctttgggctctggccccacagtagcatctggggtgggtgcctgcaaccccagtgttacaatgctcttttagctctgccttgcagacggcttaagtgttaaccagctctgtgccccctctgcctttctgcaagggcagagggacagtgtgacaactttctgtatcctgagctcttgtccagcatcctggaagaattgggtcacacagggacttgaagagtggagaatgcgggcgctttattgagtggtggaggtggctctcagtaggatggatggggagctggaagggggatagagtgggatcttctcctagagtttggccacccagcagctaaactcctctctgaccatccacagccaagctcctcttggcattcagagactcctcctcttctctctttctctgttgcatcattttgctgtttatcggcttgtctcctcatcttctcacctgcttctggagcctggggtttggcgtttataagggtataggatagaaggcatggtgggccaaaaggcagctttttgggcacaaaaacaggaatgcctgttctcacttagggccacaggtattcaggcttgagggtggagcctttgccagcaacccaccctcttctatccagtatttccctgtctcctgtctgtatcaatgagaccatgaggatcataaaaacccttacttgcagctaccctgacaccccaaggtacatcctgaaatgctgttgcctccatacggagggaaacgggggtgggtgaactgagcaggcaggaaggcagcactgacataaaatcaaaggcaccagagctgagcatctcctgctcccctggcttggatgcagcaagtaacagaggaaaccagggatcacacttcgtat

SEQ ID NO: 29045 - DNA, 534 bp, Homo sapiens
  misc_feature (1)...(534): n = A,T,C or G
annnnnnnnnnnnnnnnnnnnnnnnnnnnnnnnnnnnnnnnnnnnnnnnnnnnnnnnnnnnnnnnnnnnnnnnnnnnnnnnnnnnnnnnnnnnnnnnnnnngtagcagctctgacttcacaaggtctgtcctcraggatgcaggtgatgccaccgggagtgcgccacttatctcctcttgtcctctgcttgacctaaaatgctttctgagggcntggccagagtccagcaatccacggctcaaccacaagttctaaactggacagtaaaaacaaacgaaaaacaaaacaaatgcctaagttctccatctgaacacagaacaggataatgacagtctgtccatttggcaaagtatgcacttgttagaaacactatgaagacccattcggaatacaaaaaatacttcatgattaagttttaacaagcaggatatattatgtgttcattagcaccgtagctgaaaacatgagtatgtataaaggtagaagaaatgaagagggataggaagatattctagtaataggatgacaggaat

SEQ ID NO: 29046 - DNA, 979 bp, Homo sapiens
atgtgaaatacaatatttgcttttctggctgggaaacgtggctcacgcctgcaatcccagtactttgggaggctgagacgggaggattgcttgagcccaggagtttgagaccagcctagaaaacatagggagaccccgtctctacaaaatatacaaagaaattagctgggcatggtggcatgcaactgtaatcctagctactcaggaggctgaggtgggaggatctcttgagcccaggaagtcaaggctgcagtgagccataattgtgccattgcactccagactgggcaacagagtgagaccctgtctcaaaaaaaaaaaaaaaaaaaagcttttctatgcaaatgacatgagctgtttacttagagaactgcaaactccttagataaaaatgcagcaaggccaggtagccagttggaacaggcccctgagagtgtgccacaggattcaaacttcagcagttttccaggcaattcatctcgcccaagtaactactcttatctcctttcttcctccacccacttaaataatcacttcatcttcttaaatataaaaccaaaccaaacaaaaaccacccccaaatgtaaatcttattttctcagaccagcaatcattgcagtctcgtctttcctatcttgctctggcaatccgacataaggcattgagtttcaagcaaccttttatacgtcctgtgccagctgaagtgttgcttaaggaacgtctaagtgaactgasacctacttgggaagtcccgggctgaggttggggagagagagaagttcagtttgggacagtggggagaaaatgcacaactcagggagctgtggattggcatgtgtggccgcctgctgcgggttggtgccgagaatgaggcagtttctgcatcagcagctctggtctatataacaggaactggtgtctgggaaggcaatgagaacaatgatgtgcaagccagtctgtgctcatgaggatccggagc

SEQ ID NO: 29047 - DNA, 979 bp, Homo sapiens
atgtgaaatacaatatttgcttttctggctgggaaacgtggctcacgcctgcaatcccagtactttgggaggctgagacgggaggattgcttgagcccaggagtttgagaccagcctagaaaacatagggagaccccgtctctacaaaatatacaaagaaattagctgggcatggtggcatgcaactgtaatcctagctactcaggaggctgaggtgggaggatctcttgagcccaggaagtcaaggctgcagtgagccataattgtgccattgcactccagactgggcaacagagtgagaccctgtctcaaaaaaaaaaaaaaaaaaaagcttttctatgcaaatgacatgagctgtttacttagagaactgcaaactccttagataaaaatgcagcaaggccaggtagccagttggaacaggcccctgagagtgtgccacaggattcaaacttcagcagttttccaggcaattcatctcgcccaagtaactactcttatctcctttcttcctccacccacttaaataatcacttcatcttcttaaatataaaaccaaaccaaacaaaaaccacccccaaatgtaaatcttattttctcagaccagcaatcattgcagtctcgtctttcctatcttgctctggcaatccgacataaggcattgagtttcaagcaaccttttatacgtcctgtgccagctgaagtgttgcttaaggaacgtctaagtgaactgagacctacttgggaagtcccgggctgaggttggggagagagagaagttcagtttgggrcagtggggagaaaatgcacaactcagggagctgtggattggcatgtgtggccgcctgctgcgggttggtgccgagaatgaggcagtttctgcatcagcagctctggtctatataacaggaactggtgtctgggaaggcaatgagaacaatgatgtgcaagccagtctgtgctcatgaggatccggagc

SEQ ID NO: 29048 - DNA, 816 bp, Homo sapiens
ggatgttctttcttctcatctttctgttacacttttattgacctgaatttcccaggttgaagaagaaaaacaaaacaaaacaaaacagcctcactgaagccattttgctttcctggtttctacttttgttgccattcatataaatggaacacacaagacaacggcacagaggatgaggcagggaccatggtggggactgcaggygtcattagctgtcacggctgcgaggtggcgtggcatccacagcgactctgcctcctccaggtgtcacgttaggaacaaacgaattggttcttgttccaaacatgttgaagcacagggggacctaacatccttgccggagacaatcaagggttgggggctggattcgctgagaatcttccctctaaattagtctaggcagagaatgatccaaacattttctgggtgcacgttgccttggtctctagaaggtttacggtgttgtgagttcggtggaagttgtctcattagatgggaaagctgggcctttgtgccatcccattgccgaattcacctcccagggtgtcttgctcagtggcgtcgccccgccaggggctggggatgttcaggcaggatgctcagagccaggctcccgctcactgggcagggcccaggcacacacatacctctgggccatgctccagttgcaggtttaaaaccaagcccagagggctggcaagctgcttctctcccagggatgctggaaagacgttgctaacagggtaaggctccagcttcctgaagaagtaagcagaggccagggttgttcagtcgtcaccaaggactgggacctga

SEQ ID NO: 29049 - DNA, 816 bp, Homo sapiens
ggatgttctttcttctcatctttctgttacacttttattgacctgaatttcccaggttgaagaagaaaaacaaaacaaaacaaaacagcctcactgaagccattttgctttcctggtttctacttttgttgccattcatataaatggaacacacaagacaacggcacagaggatgaggcagggaccatggtggggactgcaggcgtcattagctgtcacggctgcgaggtggcgtggcatccacagcgactctgcctcctccaggtgtcacgttaggaacaaacgaattgrttcttgttccaaacatgttgaagcacagggggacctaacatccttgccggagacaatcaagggttgggggctggattcgctgagaatcttccctctaaattagtctaggcagagaatgatccaaacattttctgggtgcacgttgccttggtctctagaaggtttacggtgttgtgagttcggtggaagttgtctcattagatgggaaagctgggcctttgtgccatcccattgccgaattcacctcccagggtgtcttgctcagtggcgtcgccccgccaggggctggggatgttcaggcaggatgctcagagccaggctcccgctcactgggcagggcccaggcacacacatacctctgggccatgctccagttgcaggtttaaaaccaagcccagagggctggcaagctgcttctctcccagggatgctggaaagacgttgctaacagggtaaggctccagcttcctgaagaagtaagcagaggccagggttgttcagtcgtcaccaaggactgggacctga

SEQ ID NO: 29050 - DNA, 557 bp, Homo sapiens
tactattactaacgtaatacaaaatcatctatttttgagatcctgttttaacatcaccttttttcaaataagckattaggaaaataaaaacatgttaacaccagctttttagatacatttgtggttaaacatagcagctgatcattgaattttaattgctgattcttaatgctactgactttttattggaagtcctcacaggagttcagggccccccaggaagggcctccagaattcattgccaagggccgtttcctttaaccttcctgtgtacagagactgcacggcacctcccaaacaatagcttccaaacttatttggtaacagaactctttgttcaaatgaaatcttcagcaccccaacatttaaaacaacccaaaaggaaaagcagcgaacttgttattatcttctcgggtgttttattctgggtttaacagccaatattttattgtttgtagaaacctggaaacactctcgagagccagaggacagtttgaaacctgctgttttactgcatttctctgttatatcaggaatttaaaaaatttcttttttta

SEQ ID NO: 29051 - DNA, 1116 bp, Homo sapiens
tcatttggcaagttttgatacttgtgcttcttgagcttatgggaaagtatcaacagaacagtttagacaacagtacatattccctcctcaggtttatttcaggttctactcagtttcaggtttatttcctgaaacttcaagaagttacatttatccaatgatatcaccaggaactgcaaccaagtaagtgcatgcacaggcaataataataatattatgattatcacatgtctaagaacaactataaaatgcatcccagttcacagttgttaaaatgtgtatgttggggggtagtttgtaggcattgcatgtatgtatgtatgtatgtatgtatatattagagacagggtcttactccgtcacccaggctggagtgcactggtatgatctagctcactgcaaccttgaattcctgggctcaagtgatcctccagcctcagcctcctgagtagctgggaatacaggtgcatgccaccatgcctggctaatttttaaaatttttgtacaggtagagtcttgttatttgctcaggccagtctcaaactcctggcctcaagtgatcccagcctctgaaagtgctaggattagagaggcatgagccaccacaccgggcctcaactgaaattcttccagagaagatagagaccaaataggcatatctctaagtcctaggtcccatcttcagttatgctagtcagttttttcctcttattcctccacataagattttgaaaagaggtttctactgctaaaaaaacaagtgtgaacccctgtcacacttgtatggccatttctagctttagcattctctaagtctataataatgctgcacaggctaagtaactgagtctcgaatttctgggaccttaactggcacaggcttcttccaaagtcttgggaggcatcctagcaatgtattcacaccaccatatggttttgtcaaattcgaaaaatgatatttttgtattttttttcttaaagaactccctcccctcaaattgtataaacttgaggcggcacaaaacctagatcttcctttgatcakacaattttatatcaagacagcacttaagttggccagaagagtcacatacatttgattctcacagaaaccca

SEQ ID NO: 29052 - DNA, 1950 bp, Homo sapiens
ttttttttgacttcctcacattttccaggaccttaactgtgaactcaattttcagacattgcaggatttatgtttatccacactgtctctgagaaattttccctcatgagcttgagttcctctgaaagtcaaaattcctaaatagataacagctttagatttttaaaaaaacatacatggaaatatatggttaaggcaagcacaaaaactggtgtgtgtgtataatcctgccgattctattagcttccacaagtctccaacttttgatagttagcaatattcctgggaaataccctagtgaatcccattacatttttctcatgaatgaattgcacacagacactttgaagaaagaaaacaggaagtaaaatttgggaaggtttgaatgaatgcttctaaaaccatcaactagatttcttgaaaagaaacatgaaacaatgcttttgggaaataatgttgaatataataaaaaaatgctcacttggagtttataaaccaagagaatctttaattcctcaacgatttcatctcatagaaacgatgatactatcctaaatatagtcatttcaggattaatataytttcactatatttatttttattcaaagtttttctgtatccgtagtgagcttatgtaaatatcgaattcaagtttatttcaaagttttctttaacatattgaccagtaaaatttgaatagaatttcaaagacaaggcaaagttcagaaaactgaaatgatgtaaaacctgaagtagatggatttaatactactttgaacattaaatatacctaagaattcagcattttaaaaataactctttggtatttataaaattaaaaaacactcagtcctttattttcttttcaatggctacatatacatgatctgtgaaacatattaaatatggtagccccagtgcatgcattcatcagtcatatcagctagggttccattaggaaagcaagaccactatgtgtaaaaatcactatcatagaaattaagtcttacaccatttaaggagaaactgaagaattagaaaataaggaaatgggaaaaaaagatcattaaacatccctgtgtggatgtaaaagtcagagcttgcaggacgctgctagagcagaaccacgaagcaggtgagtattgttagttctttgttgctgctatctctgagtttatagctaagtatctagttggtccacagggccagaaatagctgaggagaactggtcatggagcaaggaaaagagaacaaattgcaactgcacctgtttcttctcactgccttagacgataagtactttcaaaatgcggtggttttcgtttcatcttctcctcagtctcagaagaatatctcttacagccaatttttacgtaaaaccacacaaggaaggagactctgggaagtatcggatattttcagcctaaactgacgaaatgcaaaattacccaacaaacctgctgctgtccatcttttcagggtgaaatctgccttgtgatcatttagcttaaacaactctctgcacagatgaggaaactgagtggcagagaggatcagataatttcccaaggacataccgagagagttgatgcttcaacaactttatcactttaaatctcagctcaaggtcttctttacaaacacaacaatgttaactttctgcacttaggagtgggactgtagattaattcagtgtcactgtaaaactgatagagaaaaagacagtactaaataaggcactttacagattgtgtggcactaaagtctgcgtaaattttcctgctaactactgtatcttccagaaacaatgtaaaatacctttttttcttctgtcaatcttccatttataacagatcattacaagaattttcttgtaagtcattttaaggcatctcatcattttatattatccttgtccacattgtactgtaaaaattattgaaggttaat

SEQ ID NO: 29053 - DNA, 674 bp, Homo sapiens
acatcgttctccaatttatagcccatgtcatctaaattctccttatcaagcatcactgaggcctctgagcaggtgtcccacgcytgcatttcccgaaatgccctgtaactcatgttgcagatgtggcctgaggcatcaacactactgagaagcctgcagacttaggggaaatggagctgaacaattgttgtttttgcttctctagtacttcatttggacccaattctagcaacaggactttcttgtcgtgaaagtaaatatcatatcccactgtgccctactcagagccccaccagacctgccttgggcagtgcttccagaaagaaccctcccgatatggtttggctgtgtccccacccaaatctcatcttgaaatatagatcccgtaattcctatgtgttgtgggagggacccggtgggagatacttgaatcatgggtgtggtttcctcatactgttctcctggtagtgaataagtctcacaagatctgatggttttataaggggaaacccctttcacttggttctcactctctctttgcctgccatcatccatgtaagacgtgcctttgctactcgtttgccttccaccatgattgtgaggcctccccagccatacagacctatgagtccattaaacctctttcctttgtaaattacccgtcttgggtatgt

SEQ ID NO: 29054 - DNA, 606 bp, Homo sapiens
gcccaggagagtgagtgcagtgagctgagatcacgccactgcactccagcctgggctacggagtgagaccctgtctctagtaaataaataaaaacagcccaaaagcaatttctaagggatgcactttgtttttatttgtatttcttgaattctgtgaagggaaacctaattcccagtgactgctccttaaaactcactctgctttctcttgggcatcacatacacaccctcgttgctccttgcccttctcctcctccctcttttcatcacaaaatcctcaaaaaatcaccaggcaagacgggagcatctgaggggatggggctgcggaaggggaaggactgaggccattcrcatccatcattcttgcgccctcccaggtaagaggctttgcagcaaagcatagagggatgtgtgggtcctgattccccagagcccagcatggacattctcatttcctcctcaaagctgggttcactgcccgagggagcccagtggtaactgagggtgaaggatgacatgagagccacccccttcctcaagatttggccccagtcctagtccactatccaggacttatgtcaaatcggttgcctcagtttctacaaa

SEQ ID NO: 29055 - DNA, 824 bp, Homo sapiens
ttgttgaatcattaagcacaggctagacctgctatatccactactgggcttaagatgtttctttatgaagtagtccagaactctagcaagacgtggggtgctgtgtgcctgccttaaccctaaccatatcacccctattagataagcttcctgaaggttggacgccacgcctgtctgggcccctgccgccaccccayccagagcctgcttggaactagcatgtgatcagggcttagaaacatctattgaaatgaatctgggcattaggccctgggccaggctcataacaaaaccagatccaagatctcactccctgatgctttcagaagcaaatgaaccttccctgcttcttaattgcagcctcagcatcagctgacacagcctgggaggactgcgggtcaccatggcaacccagcagggcaccgcgcagtgaccccctccctcccctccagtgggatggtcaaggcagggaggcggtagcggctcctcctgacctctttcttcttcttggcttcttctaggttgctgagcagtgtcttgcgctcttcgtttgttttttctatgagagtctttatctgtttcaccccgttgacagcattttgaatttccttattgacgtacttacttccctgattggacatttctgcaagagaagtgcaagaggcagaatgaggcgagaggaagaggtggcctcaggaccctggaatgagctggatggccagaaaggcccgttcagttcaggggctgtcaaggctgggacccccactcctgccagcaggcagcagcatggccccagccttgccctggcacaggctcccatcaca

SEQ ID NO: 29056 - DNA, 824 bp, Homo sapiens
ttgttgaatcattaagcacaggctagacctgctatatccactactgggcttaagatgtttctttatgaagtagtccagaactctagcaagacgtggggtgctgtgtgcctgccttaaccctaaccatatcacccctattagataagcttcctgaaggttggacgccacgcctgtctgggcccctgccgccaccccatccagagcctgcttggaactagcaygtgatcagggcttagaaacatctattgaaatgaatctgggcattaggccctgggccaggctcataacaaaaccagatccaagatctcactccctgatgctttcagaagcaaatgaaccttccctgcttcttaattgcagcctcagcatcagctgacacagcctgggaggactgcgggtcaccatggcaacccagcagggcaccgcgcagtgaccccctccctcccctccagtgggatggtcaaggcagggaggcggtagcggctcctcctgacctctttcttcttcttggcttcttctaggttgctgagcagtgtcttgcgctcttcgtttgttttttctatgagagtctttatctgtttcaccccgttgacagcattttgaatttccttattgacgtacttacttccctgattggacatttctgcaagagaagtgcaagaggcagaatgaggcgagaggaagaggtggcctcaggaccctggaatgagctggatggccagaaaggcccgttcagttcaggggctgtcaaggctgggacccccactcctgccagcaggcagcagcatggccccagccttgccctggcacaggctcccatcaca

SEQ ID NO: 29057 - DNA, 824 bp, Homo sapiens
ttgttgaatcattaagcacaggctagacctgctatatccactactgggcttaagatgtttctttatgaagtagtccagaactctagcaagacgtggggtgctgtgtgcctgccttaaccctaaccatatcacccctattagataagcttcctgaaggttggacgccacgcctgtctgggcccctgccgccaccccatccagagcctgcttggaactagcatgtgatcagggcttagaaacatctattgaaatgaatctgggcattaggccctgggccaggctcataacaaaaccagatccaagatctcactccctgatgctttcagaagcaaatgaaccttccctgcttcttaaytgcagcctcagcatcagctgacacagcctgggaggactgcgggtcaccatggcaacccagcagggcaccgcgcagtgaccccctccctcccctccagtgggatggtcaaggcagggaggcggtagcggctcctcctgacctctttcttcttcttggcttcttctaggttgctgagcagtgtcttgcgctcttcgtttgttttttctatgagagtctttatctgtttcaccccgttgacagcattttgaatttccttattgacgtacttacttccctgattggacatttctgcaagagaagtgcaagaggcagaatgaggcgagaggaagaggtggcctcaggaccctggaatgagctggatggccagaaaggcccgttcagttcaggggctgtcaaggctgggacccccactcctgccagcaggcagcagcatggccccagccttgccctggcacaggctcccatcaca

SEQ ID NO: 29058 - DNA, 897 bp, Homo sapiens
ccctagataagcccacataggaattttctgattcctgacttagaaatctatccttcccgctcctttatggagttgtttcctttgcgggagcaaggcctstgctgtgtttgtccatcttcagcttagctctccctactcccgcccctaccccaccctggtgcatcccaagcactctcagcttctcacagatgccctttacaggctgctctgagtggcaagcaaaaggcaattaactacagagctatttattgcacacaccccttgcagtgaatcacagggctgaaactgccacccacccttggtggcagtccttgtttatggcctgccaatggaggtggggggtggtggtgacagaaactaaggatggcctctaagactggtgctgggtctgcaaagcagggtatggcagcagctgccacttcagggcagggaagagaatccatccagagtgcactgaagcacagatgagtgagcaggagagcaaagtcctgctccataagccccctgggatgaactggggtcaccagtggggactgcagcaacattcccaacagggttcacgtcctcctcagggatagcccaagaactttcaccagatccttgaaggaagagaaacagtaatgcaagagatggccttatctctagggtggagcaataaggttggggggacagttttgcatccaagtgctgtgctggcttatggaatgtcagagctgaaagtgaccgcagggaattaaccaatccaatctcactgttaaaagacatagaaactgagtccccaaaagttggaggaacttgatcaaggtcacacagagtcagcagaacagcagggcttgggcacctgcctcccttcccagagtccttgccgttgcaccttgctgagagtttttggttgtg

SEQ ID NO: 29059 - DNA, 558 bp, Homo sapiens
tgtcccagcttgaggagttcctgaaccagagctcgcccttctacttctggatgaatggtgaccgcatcgactccctgctggagaacgaccggcagcagacgcacatgctggatgtcatgcaggaccacttcagccgcgcgtccagcatcatagacgagctcttccaggacaggttcttcacccgggagccccaggatacctaccactacctgcccttcagcctgccccaccggaggcctcacttcttctttcccaagtcccgcatcgtccgcagcttgatgcccttctctccgtacgagcccctgaacttccacgccatgttccagcccttccttgagatgatacacgaggctcagcaggccatggacatccacttccayagcccggccttccagcacccgccaacagaattcatacgaggtgagaaggggtggaagctcatggccttttgagcaactcgttagatgctgagaaccatgccgagggctcagcgggtgtcatctcgatttttctccagcaatatcacaagggtgatattatccttatttaaagaggaaa

SEQ ID NO: 29060 - DNA, 795 bp, Homo sapiens
agaggacaggagtctcaagttccgtggccctgggtggtgggtgggtggtacctcatgcctccattggcccacaccctgctttctgtactgagctgggtttggagtgggtggggatgcgggaagaaggacagggaaagaggatcgggagagggaacaatggagaaggagagggggtgaccttgcagctggagaaagagcccttgtatttgacaccttgacatttgggagctgcaaggtgacacagcacacttgaactattcagagccccagaggcctacctgaagcactgtgtgttgtggagatgggaaagagtgactcactgaccctctgatgggcagcagagcagactgtcggggctgctgtggaaagtcaagaacagcttgcgttggtcacgtgtttgccctaagaaggatcacgctcgcactttgccgaccttgcagggctataaggattgagtgaggtaatatggatagaaaggcattgcagagatgaaaaccaaatcaaaccaaaccaaaccagaaatgtaaacaacaatatcaagtaaagaagagagggatgtagagaaggaatttctccctgagggccttggttcctcatgcacgggccaaggctgtatttattttaggtgtcctggtaaagagctccagtgccctcaacctgcagtccccatgcccagtgagcagatggggctccatggcagcaggggggtgggggatatgcggggcatgtcagcccagcaggttgagagccactttgccacagcaggagcttctgactttcccccacygccaggga

SEQ ID NO: 29061 - DNA, 781 bp, Homo sapiens
tagctgtagctggcagggggcaccaattagtcccctgaccttggccttggcctttcctcagggagctctgacttgttgacaagcttcaattaaagagactgccttcctcggatcacttgaggtcaggagtttgagaccagcctggccaacatggtgaaaccctgtttctactaaaaatacaaatattagccgggcatggtggcgggcacctgtaatcccagctactgggaagctgagacaggagaatcactttaattagggaggcagaggttgcagtgagctgagatcacaccactgcactccagcctgggcaacagagtgagactctgtctctcaaaaataacaaatacaaaatttaaaaaaacgaagagrctgcccttcatgggccagcaacgtgcagggtcatcacagccttagttgaatgaaacctcagaacaaaatgaacagagctcccccgtcctgaatccgtgcgatagaaggtgtgtgcgggtttggcggaggtcaggtttgcctcccagacgctgacaatcatcacaggttgctttgttttgccatcctcagacacggttgttagtagcaatgactcaccccagtgaggaagagccagaaaggaggtgatgggacttaagacctattgaaggttggtactgggacctggagcagatgcaccaagctgcttgcagcaaggtttgagggctgcagggtctgcggttctatgacacccaacgtgctttgtagggggggccttagttcgcccttgtagacttaatatgcaggtagc

SEQ ID NO: 29062 - DNA, 305 bp, Homo sapiens
tgtaatgagcaatttgggtatattcactttctccctctatatatttttttcatctttcacattagtggttaataaatttgattaatctttataaacatccaatttttgcatttgtcaattttatttattttacatttcttcattgattcttcagaattgttttaattattccatcttttaccatttaacttgtcatttttattttctgttactgtagatttagtgacatatttccttgacatattactgtgtaatttactaattttatcactttgcargtaaatacattacaatattgaatacca

SEQ ID NO: 29063 - DNA, 564 bp, Homo sapiens
ccaaaccaaggcaaaacacaacagagcattagaaaaacaactgtagacctagaacttgaccattgccccttctctcacaatgctattctgttsctccttttcctttcctgaacacatttcctgaaataattgctctatgtctacatgttctcacttcaatatcattcttctgcatcctaagatttgacctttttctgcagtgttctattgagttccactttcacaatgcaacagggacctcatataagtaggtacacaggcaacatagagctttctaggaaaatcagatcgttggttcagcttgaccatggcagagagcaagggaattgttgctggaaagtggtatagacatcaaattgtgaaaagctttgcgtttctggttaatattttgaacttcatcttaagaaaatggggatgcatgaagggattttaaacaaatggtggtaggattaggtttgtagtatagaaatgatacagccctctgaccagtatattaatatagatgacactagagagttatcaggtcagaattgtagcaagtttacagaaaaggaacagatgaag

SEQ ID NO: 29064 - DNA, 648 bp, Homo sapiens
tgtttgttgtgtaaacttgtgtatttggccccagtcctttgtggaaaataataagaaaatgaatcattacctcgcagttgggtgatgattaatgattattgatcaatggtctctgtgagaaaatactataaagactggaatcctttcactttcacattgatattttaatgactgattttaaacaagctattaaaaggttaatatttcagaggaaatatacagatgttttttgaaactgtcataccaaaggctgtgtgtttgctatgacagcagaggccataacaaaccttttttctaaagtggctatgkaacacatccactcaaacaaattaatgttcccccgactgtctcctattgccagaatgacatcacaagtcaatttggatggagaggcactttaccactttataacagatgagcacaggcacctcattaaaaaaataaaaagtgggtctgcatcactaatatttaccaaaggggtaggggatgaacggagagtggaaaaatacctggatatttctaagaacagaagaagcccccatgattccaaactgaagcccttgtttcatggtgtggggctcagaacaagaaagctgctaattttttttttttagaaattaataagaataaaaaatgtagtgaaaatat

SEQ ID NO: 29065 - DNA, 1157 bp, Homo sapiens
agtgggaggtaatcggctcatgggggcgggtctttcctgtgctgatcttgtgatagtgaatacatctcacgagatctgatggttttattaagaagagttcccctgcatgactccactgttgcctgccaccatgtaagacgtctctttgctcttccttcgtcttctgccatgattgtgagacctcagccatatggaactgtgagttcattaaactactttttctttataaattacccagtcttgggtatgtctttactaacagtgtgaraacggaccaatacagcaaatgataagaaatgcagtggaggtggctcaagaatgggcttgcaggtcaaagagcctgggtggatttcccagctttcttcctttttcctccccggggattttgcttcccactctccagccccttgatgtgaacattagtcatattaatgtcagagcaaatatgctaatgagtccttacttactaacagtatgatctcaggcaagttccttaatttctttgtgccttagttttctcatcagtaaaatggacataatcatagtgccttcctcatggggttggaaccaggcctaagtgaattgatatttgtaaatctcagaacaatgtctggcagtagtaggtgctacctaaatatttgttaaatgcaataaacaagggacttgtattcagtagtaaagcagcactcctagcccctcacttagggccttggatctcagtcacatcttattcccatgtttttcaatctggggctccaaattgatgcttaaaaaatttcagggttgtagtcatgtgtagctgaagatggatgtgtccagcctgttgcctctttttgaaattgtctagttccagcctatatcaacacattgttggtccagatgggagacaggagatggctagagatcatctagtccaattgttcttatttatagagccctggaggggatgggatttgttcagctcagacagctcttgtctgaagagccagggaaagagatagggggttctttaactagagtaattttcaacacatccctctgagtactttgctgggggtctgatacaagttctgccttgggacttatggaaagactgatggcagaaggcttccacctggctgtctagaacacctacccataaaggtgaaaaggatccc

SEQ ID NO: 29066 - DNA, 552 bp, Homo sapiens
tgaaaaataaattaaaattataagttctatgagaaaacacaaacatttgagtaaaaaaatgagaaaggtttagtggtgmcttcttcccatgttagaaaaaaggattcataatgaacaacttttttttcatgtatttcctacaattgagtaaaataataggactaggtaagtttactggtttgcattttttcatctgggtctggtttttcatttcaattgttagccattgtattaactactttcaccattcaaaggaatgaatgatctgccatagtattttctgcagttccatctcttgttttcagtatcattccaattctgcatctgtctaattttgatctctgttctatttattttcctgattcataacattttgctttgtgctgagctcctaattgtctctctgtcattctcaacattttagccctatggtctaaaagatgcccaaaagaatgtagcatattctagtatatcagtgggacaacatgaacaacttgcttaattgttaatctatttaaaaatgaaacagtgtttttcattttttcaatcaat

SEQ ID NO: 29067 - DNA, 552 bp, Homo sapiens
tgaaaaataaattaaaattataagttctatgagaaaacacaaacatttgagtaaaaaaatgagaaaggtttagtggtgacttcttcccatgtyagaaaaaaggattcataatgaacaacttttttttcatgtatttcctacaattgagtaaaataataggactaggtaagtttactggtttgcattttttcatctgggtctggtttttcatttcaattgttagccattgtattaactactttcaccattcaaaggaatgaatgatctgccatagtattttctgcagttccatctcttgttttcagtatcattccaattctgcatctgtctaattttgatctctgttctatttattttcctgattcataacattttgctttgtgctgagctcctaattgtctctctgtcattctcaacattttagccctatggtctaaaagatgcccaaaagaatgtagcatattctagtatatcagtgggacaacatgaacaacttgcttaattgttaatctatttaaaaatgaaacagtgtttttcattttttcaatcaat

SEQ ID NO: 29068 - DNA, 736 bp, Homo sapiens
tatttcagactggcttactcaggcatattccaaaactctggtagtttgactaagwacttgctcaatttggaacagctaaaaatgatatccccaggcttactcacaattcaggttttacattaaacctatcttctttaaggaaaagagcctgagatagaaggtgccttcctattctttttcctgacaagcagtgtaacaaaaccatttactttcctgtaacgacagtcacaaatgaccaaatgtccagtccttagttctgtggccaacattctgtgttattcaaatatgaaccatggctgagatcctatgatcaagaagcaagcagctatgacagaagtattttaatgcttagagaaaaaaaaaacaaaggtagcaactaactgttaggttagggttagtctgcagatacctggattaagatatcttaagccactgtgtggtccctggctgaccagagtgagttcatttatatctatctcctctatttggataacaataaaaacataacagagagagatggattccataaatatgactgttgaaaatgttatagctacagaggatctaagatgtatgtttggtagttggactaatatattgtttggatcaaataaaatatgtgttagagaatgcaactgtttattcaaagtataggggcacagtttaggcccagatcagtcaggaaggtggcaaactgtttcacacacttcctgccatgtaaatcagaaatgttgtg

SEQ ID NO: 29069 - DNA, 736 bp, Homo sapiens
tatttcagactggcttactcaggcatattccaaaactctggtagtttgactaagtacttgctcaatttggaacagctaaaaatgatatccccaggcttactcacaattcaggttttacattaaacctaycttctttaaggaaaagagcctgagatagaaggtgccttcctattctttttcctgacaagcagtgtaacaaaaccatttactttcctgtaacgacagtcacaaatgaccaaatgtccagtccttagttctgtggccaacattctgtgttattcaaatatgaaccatggctgagatcctatgatcaagaagcaagcagctatgacagaagtattttaatgcttagagaaaaaaaaaacaaaggtagcaactaactgttaggttagggttagtctgcagatacctggattaagatatcttaagccactgtgtggtccctggctgaccagagtgagttcatttatatctatctcctctatttggataacaataaaaacataacagagagagatggattccataaatatgactgttgaaaatgttatagctacagaggatctaagatgtatgtttggtagttggactaatatattgtttggatcaaataaaatatgtgttagagaatgcaactgtttattcaaagtataggggcacagtttaggcccagatcagtcaggaaggtggcaaactgtttcacacacttcctgccatgtaaatcagaaatgttgtg

SEQ ID NO: 29070 - DNA, 736 bp, Homo sapiens
tatttcagactggcttactcaggcatattccaaaactctggtagtttgactaagtacttgctcaatttggaacagctaaaaatgatatccccaggcttactcacaattcaggttttacattaaacctatcttctttaaggaaaagagcctgagatagaaggtgccttcctattctttttcctgacaagcagtgtaacaaaaccatttactttcctgtaacgacagtcacaaatgaccaaatgtccagtccttagttctgtggccaacattctgtgttattcaaatatgaaccatggctgagatcctatgatcaagaagcaagcagctatgacagaagtattttaatgcttagagaaaaaaaaaacaaaggtagcaactmactgttaggttagggttagtctgcagatacctggattaagatatcttaagccactgtgtggtccctggctgaccagagtgagttcatttatatctatctcctctatttggataacaataaaaacataacagagagagatggattccataaatatgactgttgaaaatgttatagctacagaggatctaagatgtatgtttggtagttggactaatatattgtttggatcaaataaaatatgtgttagagaatgcaactgtttattcaaagtataggggcacagtttaggcccagatcagtcaggaaggtggcaaactgtttcacacacttcctgccatgtaaatcagaaatgttgtg

SEQ ID NO: 29071 - DNA, 519 bp, Homo sapiens
tttcctttttttttagactccacttatgagtgagatcatgctgtacttgtctttctgtgtctggcttatttcacttaccacagtgtcctctagattcatctatattgtcataaatggcaagattttactttttatggctaaagagtacttcattgtatacagatagtgcattttctttttgcattcatctgttgccagacacttaggcttattctgtatcttggctatcatacatagtgcgcaataaaaatgactaggtgcatcgcaattagctttaaaaagatggaacggcattgtaaggacagaccatgaatctaagcccttaggctgaatacttaggttgaataaaattgttggaagaagtggctatttgatgtatgtaatgaaagggattcttacatggcaggtattattaggagaaaaaaaaragagaaagaaagttgaaggagaggggaaaactgccacagcaggttaagcaacttgctttgaaataattgggattagtaagtgtgcagagat

SEQ ID NO: 29072 - DNA, 621 bp, Homo sapiens
gcaccccctttcttggcacttgctactctcccattctagttccaatgggacctgcacatcagcattctaccctctggccatggggtggaaaacatccaaattgggccaatcatagttccccaggccatgacacagggccaggtatagagagggacacatgaccaaccctgaccaatgagaggtcttccttgggatttttctagctggagctgataggaaaatgtgttttcctgggtgattataaggctttaaagacaagagtactgagctttttgcagttagacagagagaatgacactaaaatattaagaggagagagggagccgggcaccgtggctyatgcctgtaatccctgtactttggggaggccgaggtaggtggattacttgaggccaggagttggagaccagcctgggtaacatggcaaaaccctatctctgctaaaaacacaaaaattagccaggcatggtggcaggtgcctgtgatcccagctactcgggaggctgaggcaggagaatcactggaacctgggacgtggaggttgcagtgagctgagattgtgccactgtactccagcctggatgacagagtgagactccatcaaaaaataaaaataaaaaa

SEQ ID NO: 29073 - DNA, 1180 bp, Homo sapiens
ttgccatcgaggctcttcccatgtcacgtggtgagaaatggcatgagccagtactaagaaggctgggtaccagcgagggctaacccgagactaatccactgggcttcagcaggagaggccacactgctattgatggtgaagaactggggctttattataggggttagaccttgttcagcagtgggaacatatgggcagtctgtgcaggccgctgtctctgcacctggggttaggcctgagtcactgtaggtcagccaactggccttcaggagggacagctggatggagccagcatgaggacaaactggaacccgtgtctgtctctggtgacctccaacgtcgatgccgctggggtgagctgccacaggggctggsacccttcaccgtggagccacacacacacttggcccaggacttagagaggtggaagggggaggtcttgtggagtggagctcctgccgtcccaagagctgcccctcgtcaaaagatgggccatgacagtgacaatggtgcaccctgccccgaccttcagagcatattcaaaacacatagctgctgctgcttcactcccaccttccgagtcgcatgcaagatgtctcttgctccccacaccaccccagcaccatcctgggaagggtatttcgggagccgttataccagcttagttagttgcactgtgttagctgtgctgacgcagtaggcaacgtggcccagagtgacagggttggggtgttgctttagcctgggtgggtggggaaagccccttggaggatgtggcatttgcaacaagagcctggaagctatagttgggcaagttccagggacaggaagaagggcaggtggctggggcacagaggtgggagacgcgggggagaagaggagatgaagctggccaggcagcaggagctacagggggttgcacctcaccggccatggggtgggggggcattggatctgattctgcttgcgatggggagagttctaagcagggcagggatgtggcaggatttaagcttttgaaagctcacttgtgctgctgggtggatgagggactgtgggagtggaagaggctggaatcaagggggcccacattttggggggcacgttacagtggtctaaagagatgatgaacactagaatggatgtggtggctatgaggagagagaggtgattgaatttt

SEQ ID NO: 29074 - DNA, 1006 bp, Homo sapiens
ttgtgtccagagacaagcagtctatatgaaatgtcataattttgacaagggctgctgatcaagaggacaaggtagggctgttgttcgacaaagcatatggagaggaatatgattgacaacttgatgttacacttgggagcctctttcccagatatgatggtaatgccacaaccctggtctaaaaagagcatagtaaacaggtatctggttgtctcaaaagtgagaaactggtcatatcacctaagtcactgaaactagcagagattgtagttgaggacaagggggatttagaatggataaaagaggaagcaaacgagtataggtttctgctcagagaccagctgcagtggtaggggctgtgggtcatcacagtaatcacagtaactttcctcttctgagtcacccaaggaaaaaaaatctctctggaattttggaggagctgttgcccaaacagatatgaaaaactggatgtgaatagcacagtggatgaaatagggtggacatggagagtatctgcccaatcatcatcaagaatagacttgtggtcccagcaatctgcagacagctgccagataacagatccatcatggtttgtctcagctgcaaagagctaccttgctggaggacacactcttccctgyaaggcctatacccagttacttgagtgggattaattgttggcacaacataaatctttgatgaaaacactttgatacgggagtgactttaactgatacagatcagacagcaagagtgtttcatatgttactcaaaaaatgtggactttgccctggaagtaagagtctattaaaccattttgacatgcttttgtgttagaaaggtcacataacagaaatatagagtaaaatttggaagtgatagaaagcaatagaaagagagactattaggagattggaaataatcctgaaatggagtgtgcttttgccagatgatacagtaaaaatcctattaacctacaagttatgggtaaaatacaggaacttag

SEQ ID NO: 29075 - DNA, 1006 bp, Homo sapiens
ttgtgtccagagacaagcagtctatatgaaatgtcataattttgacaagggctgctgatcaagaggacaaggtagggctgttgttcgacaaagcatatggagaggaatatgattgacaacttgatgttacacttgggagcctctttcccagatatgatggtaatgccacaaccctggtctaaaaagagcatagtaaacaggtatctggttgtctcaaaagtgagaaactggtcatatcacctaagtcactgaaactagcagagattgtagttgaggacaagggggatttagaatggataaaagaggaagcaaacgagtataggtttctgctcagagaccagctgcagtggtaggggctgtgggtcatcacagtaatcacagtaactttcctcttctgagtcacccaaggaaaaaaaatctctctggaattttggaggagctgttgcccaaacagatatgaaaaactggatgtgaatagcacagtggatgaaatagggtggacatggagagtatctgcccaatcatcatcaagaatagacttgtggtcccagcaatctgcagacagctgccagataacagatccatcatggtttgtctcagctgcaaagagctaccttgctggaggacacactcttccctgtaaggcctatacccagttacttgagtgggattaattgttggcacaacataaatctttgatgaaaacactttgatacgggagtgactttaactgatacagatcagacagcaagagtgtttcatatgttactcaaaaaatgtggactttgccctggaagtaagagtctattaaaccattttgacatgcttttgtgttagaaaggtcacataacagaaatatagagtaaaatttggaagtgatagaaagcaatagaaagagagacyattaggagattggaaataatcctgaaatggagtgtgcttttgccagatgatacagtaaaaatcctattaacctacaagttatgggtaaaatacaggaacttag

SEQ ID NO: 29076 - DNA, 1006 bp, Homo sapiens
ttgtgtccagagacaagcagtctatatgaaatgtcataattttgacaagggctgctgatcaagaggacaaggtagggctgttgttcgacaaagcatatggagaggaatatgattgacaacttgatgttacacttgggagcctctttcccagatatgatggtaatgccacaaccctggtctaaaaagagcatagtaaacaggtatctggttgtctcaaaagtgagaaactggtcatatcacctaagtcactgaaactagcagagattgtagttgaggacaagggggatttagaatggataaaagaggaagcaaacgagtataggtttctgctcagagaccagctgcagtggtaggggctgtgggtcatcacagtaatcacagtaactttcctcttctgagtcacccaaggaaaaaaaatctctctggaattttggaggagctgttgcccaaacagatatgaaaaactggatgtgaatagcacagtggatgaaatagggtggacatggagagtatctgcccaatcatcatcaagaatagacttgtggtcccagcaatctgcagacagctgccagataacagatccatcatggtttgtctcagctgcaaagagctaccttgctggaggacacactcttccctgtaaggcctatacccagttacttgagtgggattaattgttggcacaacataaatctttgatgaaaacactttgatacgggagtgactttaactgatacagatcagacagcaagagtgtttcatatgttactcaaaaaatgtggactttgccctggaagtaagagtctattaaaccattttgacatgcttttgtgttagaaaggtcacataacagaaatatagagtaaaatttggaagtgatagaaagcaatagaaagagagactattaggagattggaaataatcctgaaatggagtgtgcttttgccagatgatacagtaaaaatcytattaacctacaagttatgggtaaaatacaggaacttag

SEQ ID NO: 29077 - DNA, 583 bp, Homo sapiens
tcctttcaattttgtgcctgtattgaaagaactcatttcttcagtgggatgacagtctgttttttcagcccagaaggcactgcaatttttcaggggaaaaattacatcttgatcttagagaccactgctggggatttttcttygtatctctcacatctttttctgaaggactttttaagatgtcataattattatctgattaggcagtacttgctctttagcccaaaggaaagctattcactattccatcatgcaactgagagcctttactgtgaacttctcactgttttaggagctgagatacatcaaggaacaaagaagataaagatcccagtattaattgagcttatattctagcaggagggggtggagacacacagaaaacaataaacatgataaataaactatagtgtatagtagagttaatacatgttatggaaaaagaaaagtagaacaagttgaaggggaggaatgagttgtaactttaaagggatagtcagagaagggcctcttttggaagcttaaagtggagctcagcacaccaggatgtatacatgtgtaactaacctgcacaatgtgcaca

SEQ ID NO: 29078 - DNA, 583 bp, Homo sapiens
tcctttcaattttgtgcctgtattgaaagaactcatttcttcagtgggatgacagtctgttttttcagcccagaaggcactgcaatttttcaggggaaaaattacatcttgatcttagagaccactgctggggatttttcttcgtatctctcacatctttttctgaaggactttttaagatgtcataattattatctgattaggcagtacttgctctttagcccaaaggaaagctattcactattccatcatgcaactgagagcctttactgtgaacttctcactgttttaggagctgagatacatcaaggaacaaagaagataaagatcccagtattaattgagcttatattctagcaggagggggtggagacacacagraaacaataaacatgataaataaactatagtgtatagtagagttaatacatgttatggaaaaagaaaagtagaacaagttgaaggggaggaatgagttgtaactttaaagggatagtcagagaagggcctcttttggaagcttaaagtggagctcagcacaccaggatgtatacatgtgtaactaacctgcacaatgtgcaca

SEQ ID NO: 29079 - DNA, 583 bp, Homo sapiens
tcctttcaattttgtgcctgtattgaaagaactcatttcttcagtgggatgacagtctgttttttcagcccagaaggcactgcaatttttcaggggaaaaattacatcttgatcttagagaccactgctggggatttttcttcgtatctctcacatctttttctgaaggactttttaagatgtcataattattatctgattaggcagtacttgctctttagcccaaaggaaagctattcactattccatcatgcaactgagagcctttactgtgaacttctcactgttttaggagctgagatacatcaaggaacaaagaagataaagatcccagtattaattgagcttatattctagcaggagggggtggagacacacagaaaacaataaacatgataaataaactatagtgtatagtagagttaatacatgttatggaaaaagaaaagtagaacaagttgaaggggaggaatgagttgtaactttaaagggatagtcagagaagggcstcttttggaagcttaaagtggagctcagcacaccaggatgtatacatgtgtaactaacctgcacaatgtgcaca

SEQ ID NO: 29080 - DNA, 928 bp, Homo sapiens
actggtcatatcacatgctacaccatctgaaagcagccagcttcacagagcactgaaatggtcttctaaagaaagctgagttgacagcttaatggcaactcttatccttcacaatacggtagatgcatcaaattagaaacctttatgtttcccaatagggagactttatgggtctacttgccattgttctcagtgatcyacttggggggcttcatacttataattcccacagctctgggctggagttctatggccctggggggcacattctttccagaggacacttaatggtcttattgaattgcaagttatggctgttgccagggaactttgaccctttatgcccagggttttgtagacaagaaagacagtcatcactgtggtaggcattaccattctgatctgcaggaggaggtggcactcctaacatagatagcgctttacacatggggataatacgtgtggagcctacatgatctacttgagtgtctctagatactcccttgccccacaataactatgaatgtacatgagcagtaacttcagcctgagaagtgtatgatggccaagggctcaaacccttgagaaataaaggtttgagtcacatcaccaggtaagccacaaagtgatagctagggtaagaaaaatctagatgattagtgcaggatagtaaggattacaactagttgtagcgcccagatcaactgcaaccgcagaagctataggtcctcccactaagcttccttttccaagtttcctctcaggaaaagaagcccataggaattatagaggagctactcccaaacctgcatggagaagtgaatctgtgcagtttaagacagggaactgcagtgagaatgaaaatgcagcacttaggtttcctgctgcaggggacacagttgtgtgttggcctctgctgctgccttct

SEQ ID NO: 29081 - DNA, 1134 bp, Homo sapiens
agagtaaggaagcatctgttagccaagtctttggttaccccaaattagctcaggtcctttactgcttgtttcctctgattatatagtacatatccaaaccctcaattttccagaataaactaggtctgcctattctgtgtggaaaacatttgatggtggttaagattctcttgcctagacgatggtagtgccttagtcgtttaactgcctgtcactttaagattttgaaatactggttctcgttgtgtaagccagacacatcttgagaatattttacggggcaacttgccctttctgaaacctcagtcatcctgaaaagtaactctgtacctccttgactttaatttttctgtcttaattctatttgtatacaatgtttgtggtgtctgattctctgtctcgtattgctgaaactcatggccttgaatttctgggtcactcttaaaaaatagacataacttgattactaatgaaaaagtgactcattttcttccaggcaaaggctgacactgactgtcacagtttgtgacagaagcaaactctctaattaggagacatcacctattcttttctaaattttataagaattgatgatagcatcatgagatgggaagtgagtaagataagcgtttatgcttgtagagaggatgcataaaaatgaaatctggataaagttctatctgaatttaccattttaagtggttgattccctgtgagcttaaatttagtgcttctcttcccagaccgttgtcttacatacacacttcagtcagttttagccttgtataactaatcagcaggtcagattccatagaggctgaaatacctaccaccattctatgctcaagaaaacaggctctcatgttggccagttgtttgggatagaagatggttagacctttctatcccttttaaacacaagattctttttcattccycttatcttatttaaatatattgttccttctgtttggttgttctttgctttcttatgcatctgtgaggggctagctgaaagtgtgagttgtggaacaattcatttacataagtgtatattgaattatctgtgcacctagagggtgatgggcactgtgagggatattaaaaaagagacacagtacagttcttacccta

SEQ ID NO: 29082 - DNA, 573 bp, Homo sapiens
agcagagagagagggttctcagcgaggggaagcaggatggccacctcccttcccttcctgagttctttccaccccagtgttcaacacctgtgttgcgtctcctgccctgtcagcaggagtctaggtcagtgatggcaatcctgttttcaagggaatacacaaacttccctgtatgttccaaattattgggcagatttgctttgttcctgcttgggctgggaagcatcactgagttcagcatccctgaactcaactgtgactgggcccttgattaagcaacagcttgctttcagaccctctaatgaaagggactacgatcgtatgacataaagtgttttattagttaattaactaacaaacattggaacaggaggtgatgaagagttctctgaagaaccttggaaacatatttccctcatcaagagttaaacttttgtctcctgtactggttcttccactcccaaacccacarcaaatgaatgcagatgaagatgactttggtagcacttaaaaaaaaatagtttgtaaaattgtgagggccagtactgctttttttttttttttttttttttt

SEQ ID NO: 29083 - DNA, 865 bp, Homo sapiens
aaactgaagaagatkaagggaaggcttttataggcacccactttcctcccttctttctgattacaaatataattttgatcccttactctcctgagtacattctagctcctaccaatttctcatttctgctcaaaacctttgatgaaaaataggaaagagttccttagaatatatgagaccatagtctagaaatacccttttacatgggtatagcatatgcatgggctattctgctttgagcataggaagggtaccacctgtgactgtcagtgtggacatgtctcatagtgtggaggtccagccacagctggaagatcccatagcttcccaccattctgctctcatttcacatgcagcatgtactgatttcctgctacttagaagagactgttgccgtcactcattattgcccactgtttggtactataaattaccgaaacttgaatttcagaaaaatcctcctaaaagtcctgcaaatttttttcaaaagttttccattgagtatccaggaactgagtggtttcctgttctgctaaatatcttcctcccttcctgattttccaaacgctttcctaagaagaaaagcattgggaaacaattaaaagtcatctattgatcttaaaggttcagatttacctattgctcttaacatctcctttgctaagtgtggttgtaattattcttcgcgggtactgcaagggtgtggtaggcagaataacgagcccccaaagatggtcacagcctacttcatggaacctgtgaatatgtttctaacataataagagaccttgcagatgtgattgccttaagggttttgagatgggaagataaccctgggttatctgggtgggcagcatgtaacaca

SEQ ID NO: 29084 - DNA, 675 bp, Homo sapiens
ctcacaaacagatggtggccttaaactcactttttcattcccagtcccatggcagaagacttccaaatagaaatattccaaaaaggacaaagacctaaggtaacagaataatgatacaagagaaggtattctacgtggaagcaagagctttcaacatctttgattgtccctcctktgtcattatttgcccatagtccttgccattcagcctttacaacctgcatcatatagaagaatgcctaggatgacgtaaaaccaatcattgaacaaagctgccatagcctgtaagagaacagaaaaagcagagaaaaataggtaagagttgtatatctcaaaaattgagcagaaatgtttgattttgtgtccagctaaaattgccttcttgtgttcaagataatacggctaaagaaacccaagaaatattgacaaggtcttcaaacttcagaaaacagttcaattccttcatctctcccttttcaaatctccacactgtactccaacacaaaagaggcatttagaaatacataaagatctatcctcaggaacacacatgtcatctcagtctattgacttggctatttacattagttgatgcagaatcttgaggtcctgaaagtcccccgccccaaatattactaagattccccaggaggtacctgtagtagttatcacaaa

SEQ ID NO: 29085 - DNA, 675 bp, Homo sapiens
ctcacaaacagatggtggccttaaactcactttttcattcccagtcccatggcagaagacttccaaatagaaatattccaaaaaggacaaagacctaaggtaacagaataatgatacaagagaaggtattctacgtggaagcaagagctttcaacatctttgattgtccctcctttgtcattatttgcccatagtccttgccattcarcctttacaacctgcatcatatagaagaatgcctaggatgacgtaaaaccaatcattgaacaaagctgccatagcctgtaagagaacagaaaaagcagagaaaaataggtaagagttgtatatctcaaaaattgagcagaaatgtttgattttgtgtccagctaaaattgccttcttgtgttcaagataatacggctaaagaaacccaagaaatattgacaaggtcttcaaacttcagaaaacagttcaattccttcatctctcccttttcaaatctccacactgtactccaacacaaaagaggcatttagaaatacataaagatctatcctcaggaacacacatgtcatctcagtctattgacttggctatttacattagttgatgcagaatcttgaggtcctgaaagtcccccgccccaaatattactaagattccccaggaggtacctgtagtagttatcacaaa

SEQ ID NO: 29086 - DNA, 1181 bp, Homo sapiens
tgtctgggagaagaagataatctaataaggaagacaggaagaatacatacctactcaagtaactataattcaagacaatgtactacatatcataaggaagatggaagtaagatgtttctgtcaccagagggagaggaaaccatttcagctagcatgtaacagagaaggtttcatggtagagacctttatttttgagacagattctcactctgtcgtctagactggagtggtgcagtggtacaactgtggctcagtgcaacctctgcctcctgggttcaagcgattcttccgcctcagcctcccaagtagctgggattagaggcacgcacagtttcaccatgttggtcaggctggtctcgaactctcggactcaagtgatccacctgcctcggtctcccaaagtgctgggattacaggcatgagccaccatgctcggccagaagagaccatttctaaggtgggctggaagagatgaacaatgatggagttggtggatgcaggggggaccacatgtactacttgaggcacgcaagtackgtgtgtgctgtgctctacctggaaccacaaagtatagggcctgcaatgccagaacagggaacatgaacttgactcaacagtgagggagcactcactcaatgttcttggatgaagcaatgagtgaatattttataaagattaatctagctaaagcatttaggactaattagggtagctggaaaaaggtaacaatgagggagaccagttgggaagctaagagagcatgaacttgtttgaagcaagcgaaattacatgtaaagcactcataaagtttataatgccaagtaagggtaacatcttcttataatagaggtagaagagggaatgaaaagcagtgcacagatatgaaaattaccgcagaaagaaaatcaaaagaggccaggaatggtggcttacgcctgtaatcccagcactttgggatgctgaggcaggaggactgcttgagagcccagtagttcaagaccagcctgagcaacagagtaagaccctgtctctaccaaaagaaaagaaaacaaaacaaaacaaaaaaaaaaagaaagaaacatcaaaagaggctggagataatgctgttgagggggtacgtaggggtgaagactgctggagcaggtcaaagactctcacgtgtattctcggcaggttccaga

SEQ ID NO: 29087 - DNA, 685 bp, Homo sapiens
aacgtaaggctcttccttatgagtctgaaagaattcctctttgtacttcgtggatttccaagaaacccttgaatagccgcctccttttctcatcactttgtgtgggttttatagctgtgtgtgtgtatgtgtgatagtgtgtaaaatatatctgctgtgtgccagtggattatggggaactggctcaatttgcctctttaatattttgtaattgctttataatgagttgtgttataagtggttttcaggaaattcaaagagacggggctaaacagagaggcaggggacacattgtcatattactttcgtgtctggagggcattgatctaagactatttcatcaaatctattccgaacgtggaacatgccatgtatttccacgtaaggtctattaggaaaaaaaggttctgcctctactgtgttttaaaatgactatcgctgtcatttattataaatgaaagattttaaaacttcctwaacaagaagcaggaagataatgagttacggaatggtgtcatttgtacactctaaaattgcaaacctaggtatactttcttttttaattatacaaaattgggattctatctcagttttctaaatccacgattctctttgcagagaattaataacttttctttttttgttcttattttatgtaaacttctaggctagctcttaagccagt

SEQ ID NO: 29088 - DNA, 1268 bp, Homo sapiens
cattcaataggtataaagaataatacaaatgttaatggccataatagatggctgttatgagggactgatcactctggctaacttggagtcgtgtggcatggggaaggtaaatggcagctagcttctattgagcacccactctstgccaggcaccatgcaagcacttcatgtacatgacctcactttacccaaagctacttgagtaattaacccaaagctattcataaagggtcaagctgggaactgttgtcatgtcttattgatttcaaagctcataatatttatctcaacactctgctgtctctttggaacatcagttgtcagtgtacaaaattacctgaaagttagaacatatggttaaaagttctggctgtcaggattcagaaaaactttgaatatttgttatattaaaatcttggctgggcatggtgactcctacctataatctcagcactttgggaggccaaatgggaggattgcttgagcccaggagttcgagaccagcctggacaacatggcaaaaccccatctctacaaaaaaatacaaaaatcagccaggcatggtgctgcatacctgtagtcccagctactcaggaggctgaggtgagaggatcacttgagcctgtgaagtcgaggctacagtgagctgtgatcacaccactgtactccaacctaggcaatagagcaagaccctactgaaaaaaaaaaaaaatctattggcatctttcacattgatgtttatgagacagtcagtccttttacttggagtttaaaggtagatggccctttaataaataacagctttctgccctaaccaagctcacaaccaacagacagacagacctgaatccgagcccagtgaagatcataacacacgtattgttgatcgaagcgaaactgaagggtgtatctccacgttgcagcctcagtagcttccttatgtgccaccccatcatacagccttaccccctaatcactggcatcactctctgtccacagacattgcccagagcagcaacttgcttcatggcagaaaggggatgagaatgcacccttttagtgggctgacagacaggaataaacagacatgcaggagcgtaacagaggatgttcattaatcaaactcattagtcaccaaagtcctgctccaatgagcatgactaaagaggccaagagaacctggaagtattccttcccatatctgccttcctaaggcatggagtaaatttcctgttccttgtgcctgttcctctatggaaatatgatgc

SEQ ID NO: 29089 - DNA, 1268 bp, Homo sapiens
cattcaataggtataaagaataatacaaatgttaatggccataatagatggctgttatgagggactgatcactctggctaacttggagtcgtgtggcatggggaaggtaaatggcagctagcttctattgagcacccactctgtgccaggcaccatgcaagcacttcatgtacatgacctcactttacccaaagctacttgagtaattaacccaaagctattcataaagggtcaagctgggaactgttgtcatgtcttattgatttcaaagctcataatmtttatctcaacactctgctgtctctttggaacatcagttgtcagtgtacaaaattacctgaaagttagaacatatggttaaaagttctggctgtcaggattcagaaaaactttgaatatttgttatattaaaatcttggctgggcatggtgactcctacctataatctcagcactttgggaggccaaatgggaggattgcttgagcccaggagttcgagaccagcctggacaacatggcaaaaccccatctctacaaaaaaatacaaaaatcagccaggcatggtgctgcatacctgtagtcccagctactcaggaggctgaggtgagaggatcacttgagcctgtgaagtcgaggctacagtgagctgtgatcacaccactgtactccaacctaggcaatagagcaagaccctactgaaaaaaaaaaaaaatctattggcatctttcacattgatgtttatgagacagtcagtccttttacttggagtttaaaggtagatggccctttaataaataacagctttctgccctaaccaagctcacaaccaacagacagacagacctgaatccgagcccagtgaagatcataacacacgtattgttgatcgaagcgaaactgaagggtgtatctccacgttgcagcctcagtagcttccttatgtgccaccccatcatacagccttaccccctaatcactggcatcactctctgtccacagacattgcccagagcagcaacttgcttcatggcagaaaggggatgagaatgcacccttttagtgggctgacagacaggaataaacagacatgcaggagcgtaacagaggatgttcattaatcaaactcattagtcaccaaagtcctgctccaatgagcatgactaaagaggccaagagaacctggaagtattccttcccatatctgccttcctaaggcatggagtaaatttcctgttccttgtgcctgttcctctatggaaatatgatgc

SEQ ID NO: 29090 - DNA, 1268 bp, Homo sapiens
cattcaataggtataaagaataatacaaatgttaatggccataatagatggctgttatgagggactgatcactctggctaacttggagtcgtgtggcatggggaaggtaaatggcagctagcttctattgagcacccactctgtgccaggcaccatgcaagcacttcatgtacatgacctcactttacccaaagctacttgagtaattaacccaaagctattcataaagggtcaagctgggaactgttgtcatgtcttattgatttcaaagctcataatatttatctcaacactctgctgtctctttggaacatcagttgtcagtgtacaaaattacctgaaagttagaacatatggttaaaagttctggctgtcaggattcagaaaaactttgaatatttgttatattaaaatcttggctgggcatggtgactcctacctataatctcagcactttgggaggccaaatgggaggattgcttgagcccaggagttcgagaccagcctggacaacatggcaaaaccccatctctacaaaaaaatacaaaaatcagccaggcatggtgctgcatacctgtagtcccagctactcaggaggctgaggtgagaggatcacttgagcctgtgaagtcgaggctacagtgagctgtgatcacaccactgtactccaacctaggcaatagagcaagaccctactgaaaaaaaaaaaaaatctattggcatctttcacattgatgtttatgagacagtcagtccttttacttggagtttaaaggtagatggccctttaataaataacagctttctgccctaaccaagctcacaaccaacagacagacagacctgaatccgagcccagtgaagatcataacacacgtattgttgatcgaagcgaaactgaagggtgtatctccacgttgcagcctcagtagcttccttatgtgccaccccatcatacagccttaccccctaatcactggcatcactckctgtccacagacattgcccagagcagcaacttgcttcatggcagaaaggggatgagaatgcacccttttagtgggctgacagacaggaataaacagacatgcaggagcgtaacagaggatgttcattaatcaaactcattagtcaccaaagtcctgctccaatgagcatgactaaagaggccaagagaacctggaagtattccttcccatatctgccttcctaaggcatggagtaaatttcctgttccttgtgcctgttcctctatggaaatatgatgc

SEQ ID NO: 29091 - DNA, 532 bp, Homo sapiens
acctcactaaatggaggtactggcctcacctcctggactcaatttccttcttcctaatcaaatggtctctgatattacctgcatgcctgagggctgcaagcaggctttatgtatgagtgaccacagggctaaagatcttgccatcgattaaatcccatcattcctttctgcaggcctctaaggactcttctaccctctccacaccaggcacagtgggggctaacccaataatgccagataagagaacaagtgaccaaggtaaaattatcaacaaatatacaaaagggctggcagcatcatatgggagccataataccctcttctttcctgaacccaacamtgcaatatttgaaaatacccacaggctttctttcaaacaagaaaaatgcctcttgagactccaatcccagctgaaaatttagctggcagtgaagagcctatccactaacctcaaggtcagctaaatatctagtcttttttcatagcatgatcaagttttacatcctgtgtttggcaaggaaggatttattta

SEQ ID NO: 29092 - DNA, 515 bp, Homo sapiens
ctttgggcaagtttcttcacctctcttcatctggaaaatggatgcaatactagtaccaatctcacagagctactctgaggagtaattgaaatagtgcatgcaaattgttcacttaccatastgacaagactatatatgttttctgttttttgttttttgttttactagacctccacacggatttctgatgatagcagctggattagctattctctctctctggctatttctcatttctgcagctacttgactgagggaatggccccactcttttttcctgctcccttggtgtcaggctaattgaataaaaataggaatctacaaattaaaagtctcacacatgctgctatagcaacgctctctctcccattcctctgattacatgcatccatcctcttgtaggcttaagacaaatgtaatagtgatttgcaagggctctagggtcaaactagggtgaccaactgctccagtttgcccaggctaaggagttttcagggacatggaactttaaaggc

SEQ ID NO: 29093 - DNA, 765 bp, Homo sapiens
tttttttgttgttgttggtggtgtgtgtgtgtgtatttttgatagagacgcagttttaccatgttgcccaggctagtcttgatctcctgagctcaagtgatccgcctgccttggcctctcaaagtgctgggattacaggtgtgagccaccatgcctggcctgtctgatgtttttcttataattaatgtaagactgggtctttgggttttcagaagggaaaattccacagaggtaaagtttttctcacatcatgtcaagggaggcatatagtatgaacatgacttatcacttgatatagacctcaatcacctggctcaggtagtttgtcagttttctccactgtaaagtttctctttcttccccctctctgcactgtcatctttggaaggaagtcttatacaaggtccacactaacagagtggggagttatacaccatctccttgagggtagagtatctagataaattatttggaattccgcacagggygttttgactttctaattatgtctaccaaattttgaaacattaaaaaataaatccactctttgaatagggaaaatacacccccccaaacacacacacacactgagaagaaaatgactaatagggtcagataatatatgatttctcccagaagagctctgaaggccactatggtggactggaagggactcaagggtaacttgatcctgaataaggcacttaaatttctcttgcctcggctttcacatctgttaaatggagaaaatgggggctattggaa

SEQ ID NO: 29094 - DNA, 765 bp, Homo sapiens
tttttttgttgttgttggtggtgtgtgtgtgtgtatttttgatagagacgcagttttaccatgttgcccaggctagtcttgatctcctgagctcaagtgatccgcctgccttggcctctcaaagtgctgggattacaggtgtgagccaccatgcctggcctgtctgatgtttttcttataattaatgtaagactgggtctttgggttttcagaagggaaaattccacagaggtaaagtttttctcacatcatgtcaagggaggcatatagtatgaacatgacttatcacttgatatagacctcaatcacctggctcaggtagtttgtcagttttctccactgtaaagtttctctttcttccccctctctgcactgtcatctttggaaggaagtcttatacaaggtccacactaacagagtggggagttatacaccatctccttgagggtagagtatctagataaattatttggaattccgcacagggcgttttgactttctaattatgtctaccaaattttgaaacattaaaaaataaatccactctttgaatagggaaaatacacccccccaaacacacacacacactgagaagaaaatgactaayagggtcagataatatatgatttctcccagaagagctctgaaggccactatggtggactggaagggactcaagggtaacttgatcctgaataaggcacttaaatttctcttgcctcggctttcacatctgttaaatggagaaaatgggggctattggaa

SEQ ID NO: 29095 - DNA, 798 bp, Homo sapiens
gcatcttttcattagcttaactatggagatgctattaaccaagatcgagaaaacacccacaagtagccaaaagaacattgtatgtaagatgcacagcgaggaagtatacccaaaccctaatgtaataatgagttttcctgggacaataataaacacatgcatgataaaaataactttacccaaagaaattttaaatgcttaaattcaagccagtgttgctgaaaataatttttaaaaaaaaatgaacaaaaatcaaggtccagaactatcctgtcacaactggcttgaggtagagttagaatgcctgtcttcacattatatcatcataagtcacttcaaaattcttactatctttcaattacttgggattacccattaacacaaatgtttaagactctgaggaatgaaacacagaaatttaagacctgaagtctcataatgccctttagtcctatcttgaaaatcaaaacayccaacagtaaagaagataatcccttaagggccttggaaaaaccctaacaaactatccattcataacagctaaaggatttgaaattctggagaagagaggctgtaactgcttatgaaatggatcactcaagtgtgtccagagtgcttgctctaactgtcttgctaatctaaaagcatgctccaagcctgtaaactttaaactgctgactgtaatcccatttaaagagctttgttttattgggctcttctgctataattcaaataattatgtcaaaatgttctcacatatataataatcttaaaaagggggtctatgaagccaattaa

SEQ ID NO: 29096 - DNA, 798 bp, Homo sapiens
gcatcttttcattagcttaactatggagatgctattaaccaagatcgagaaaacacccacaagtagccaaaagaacattgtatgtaagatgcacagcgaggaagtatacccaaaccctaatgtaataatgagttttcctgggacaataataaacacatgcatgataaaaataactttacccaaagaaattttaaatgcttaaattcaagccagtgttgctgaaaataatttttaaaaaaaaatgaacaaaaatcaaggtccagaactatcctgtcacaactggcttgaggtagagttagaatgcctgtcttcacattatatcatcataagtcacttcaaaattcttactatctttcaattacttgggattacccattaacacaaatgtttaagactctgaggaatgaaacacagaaatttaagacctgaagtctcataatgccctttagtcctatcttgaaaatcaaaacacccaacagtaaagaagataatcccttaagggcmttggaaaaaccctaacaaactatccattcataacagctaaaggatttgaaattctggagaagagaggctgtaactgcttatgaaatggatcactcaagtgtgtccagagtgcttgctctaactgtcttgctaatctaaaagcatgctccaagcctgtaaactttaaactgctgactgtaatcccatttaaagagctttgttttattgggctcttctgctataattcaaataattatgtcaaaatgttctcacatatataataatcttaaaaagggggtctatgaagccaattaa

SEQ ID NO: 29097 - DNA, 798 bp, Homo sapiens
gcatcttttcattagcttaactatggagatgctattaaccaagatcgagaaaacacccacaagtagccaaaagaacattgtatgtaagatgcacagcgaggaagtatacccaaaccctaatgtaataatgagttttcctgggacaataataaacacatgcatgataaaaataactttacccaaagaaattttaaatgcttaaattcaagccagtgttgctgaaaataatttttaaaaaaaaatgaacaaaaatcaaggtccagaactatcctgtcacaactggcttgaggtagagttagaatgcctgtcttcacattatatcatcataagtcacttcaaaattcttactatctttcaattacttgggattacccattaacacaaatgtttaagactctgaggaatgaaacacagaaatttaagacctgaagtctcataatgccctttagtcctatcttgaaaatcaaaacacccaacagtaaagaagataatcccttaagggccttggaaaaaccctaacaaactatccattcataacagctaaaggatttgaaattctggagaagagaggctgtaactgcttatgaaatggatcactcaagtgtgtccagagtgcttgctctaactgtcttgctaatctaaaagcatgctccaagcctgtaaactttaaactgctgactgtaatcccatttaaagagctttgttttattgggctcttctgctataattcaaataattatgtcaaaatgttctcacatatataataatcttaaaaagggggtctatgaagycaattaa

SEQ ID NO: 29098 - DNA, 806 bp, Homo sapiens
tggtctcagcatagatccataggcttccaattaaaccgtgggccccacctaattctaatggttcccttccttttgggagttcacaaataattccctaaggtggtcagtgattgttgctccaaattaaagaaacaaatttgagactggcttgttcactctcttatttttggctgcccccagaagtagactctgagatagagatttgagtaacaagtagttagtttatttgaatggtgatcccaggaaacacgaggatgtgaggaagtaatatggggaaaataaacaggatgttattaagccagktgccactgtgaaccactggagcctgatgccccagggagctctgggggtcggtgcagaacacacagctcagtcatctcacctgaggggaaaggagccatagtgtggtgggcagaataacggctccctgaagatgtccacatccacatccaaatccctagcacctgggaatatggtaccttacatggcaaagagaagttaaggtagcaaatagaattaaggttgctaatcagctgaccttaggataagagattatcctgggttatctgggaaggcccagtgttaatcacaggggtccttaaggatggagaagggaggcagaagaggagtgtcagagttacgaaatatgagaaagactcgatccgccaatttctggctttgaagaaggaagagccatgagccaaggaatgtgggtggcctctcgaggctggaaaaggcaaggaaacatgttctccccagagtctccaaaaaggagcacaacactgccaacaccttgattttagcac

SEQ ID NO: 29099 - DNA, 1480 bp, Homo sapiens
tatatatatatagtaattttattattttttgtagggacagtatcttactatcttgcccaggctggtctcgaattccttgccctaagtgatcctctcaccttggcctctcaaagtgctgggattacaggcctgagccaccgtgcctggcctccttttttctgttttcataattgccatcttaatgggtgtgaagtggtatctcatgtggttttgttctcttctctcttgaagtttcagaattgttttcaaaaagccattcatgagctccctacatggttcagctggactgtgcccctcctatagtcctgagttcttcttccatcaaacctatatatggaactacttgttttcttttttcttttctttttcttttttttttttttttgagatggagtctgctctgttgcccatgctggagtgcagtggcgcaatcttggcccactgcagcctatgcctcctgggttcaagtgattctcctgcttcagcctcctgagtagctgcgattacaggtgcacatcaccatgcctggctaagttttatatttttagtagagacggggtttcatcatattgggcaggctggtctcgaactactgacttcaggtgatccgcctgccttggcctcccaaagtgttaggattacaggctcatccttgtagctctagtgtcttgcaaggtacctggccacctgcacagtagaggccaccaaaggactgcattcaaaataaccacttgaagaccctgacttcagaacatgctgctcattttcccgggaagccaaacccctactctcagtggtctgtatgcatctttagtcagtgggaagcggtgataatatacccacaactgtaaartgagagagaccgacttccttaatcttcagtggggatttttgaaaatggttgattgcactcaaagcagaatttgtattttgcttcattgggtcaccttgggcaacaatttcatttctgtagaaaattaattttggaggaagctgcatgtgccaggggagccctgggtccatccttttgatggtgaggggaagtccagttcctcactcgcccatccctgcttttggttccctgttggtgattttcttttgtattcatgcacgtgcaaatcagctgcttttggtaagggaagccttggaaggatgtctgctaaaggtgcagagaaaatgcagagctccgttcaaggtgaaaaaagtggttgacaactggcagaaagaagctggccttaaggaggaagtcagaagccagggtgctgtaccccttgggctgtgtgttatcctgggtcactggatcatggggatgtccacagggtccctcgagggtgggttcttgacacccagggtggcagggacctgggccagtggctatttactaaggggtatgaatgtgtcccagcatgttaagatctagtggagctggactgatacctattggccgaatgtgacctctgcctgtttcaaaggtgtttaa

SEQ ID NO: 29100 - DNA, 674 bp, Homo sapiens
gaaggccacggcggagcaggtgacaggatggagccagcgccccactgcatgcctggccacttcccactaggccacaggaccccatccctgtagcgatgacgaatctgggcatgatgggaagggctcttcaatgcagtggcctctctagctggctcatgcaacttcactaatttacaggaaaatacaggatggaatccaaaattgtagtaataaaaagattaagctgaaaagcgtcctgttttgactaccaagagcctcaagtttggactctactgcccaaaccctaaaaatctgttcccattgagactaaaatggtggaaataattaaaacagagaaagaagtgtttgggtttttttaagtactctattaggtatcaaaagtccctcgggttttggaaacatgcctcttgactttyttatcagtagatacttgagacacgttttgactctctgtataatcacaacaaacctgtctgtgctacagacaaaaagaaaccagccaggacagtgggatttgtaggatgagagggaagaacaccctaaagtcgtttcggcagcacattttcatcctcatgcataaagaagccatacaggaagcagccgctctttggcttccaattctcgggtcatctctaaaatactccaagtcaccctcagatcttggctgggtgact

SEQ ID NO: 29101 - DNA, 596 bp, Homo sapiens
aaactgatttactagaagaaaggctgccaaaccataagtcttatgatatattctattgctaagttactctacagaaaagatggctgcaatgtatacccttaataatagagtacmcccttcccttcacctttgtggatactgagagtcactgagaaacaagaatgctgccaccaccatcagcgaaaatagttattgtactttacatttctatatgtattaatgactaatagtagaagttgccccatatagtgaccatttgtgattttttaaaacatggatcatgtcttcatggcctctcaatttttcttgtgttaatctgtgaaatttcattaaatactaagattgttgatgctatccaatttcttgatttataatttgtttttaatgtttagtgttgtatttcagcattatgcatctagatgctgttacttgtgcatcttttcttgcattttatccttctacaaagcctttccacacactgacatcagttacttatcaatattttccactagttcttttatcctcttacattttttaaaaaacatttaaccacttttaaatttagtttcatagttgtgaggaagacatcaaacctc

SEQ ID NO: 29102 - DNA, 796 bp, Homo sapiens
agtttcagctttctacatagggctagccagttttcccagcactatttattaartagggaatcctttctgcatttcttgtttttgtcaggtttgtcaaagatcagatggttgtagatgtgtggtattatttctgagggctctgttctgttccattggtctatatgtctgtttcggtagcagtaccaggctgttttggttactgtagccttgtagtatagtttgaagtcaggtagcatgatgcctccagctttgttcattgggcttaggattgtcttggcaatgtgggctcttttttggttccatatgaacattaaagtagtcttttgcaactctcatcagcccagtttaatattacctatttattataatgtaatgctgctcgcacaactgagaaaacactgttgctttaccccctccagctctgtagcagccacgcagaaatcatagaactgtaaacacatgctaattacacaacctatgtagacaatcaatattaagaaaaatttttactgcccagtatttctgtggttgaaaatgtagagtctaattttgatccacagtaacatctaggttaatgttgattcagaaggaaaacgtttgttgttgccatgagaagaggcattgaaatgctgaatcaccatcacaaatgttaccactattaatataaggagatacataggaagatggaattagaccatctcggaccaccaggtttacaattccacctgcagatacatgcaagaagtattgtcacaatacttatgtcacgttattccgttgaggtcatcaccaacta

SEQ ID NO: 29103 - DNA, 796 bp, Homo sapiens
agtttcagctttctacatagggctagccagttttcccagcactatttattaagtagggaatcctttctgcatttcttgtttttgtcaggtttgtcaaagatcagatggttgtagatgtgtggtattatttctgagggctctgttctgttccattggtctatatgtctgtttyggtagcagtaccaggctgttttggttactgtagccttgtagtatagtttgaagtcaggtagcatgatgcctccagctttgttcattgggcttaggattgtcttggcaatgtgggctcttttttggttccatatgaacattaaagtagtcttttgcaactctcatcagcccagtttaatattacctatttattataatgtaatgctgctcgcacaactgagaaaacactgttgctttaccccctccagctctgtagcagccacgcagaaatcatagaactgtaaacacatgctaattacacaacctatgtagacaatcaatattaagaaaaatttttactgcccagtatttctgtggttgaaaatgtagagtctaattttgatccacagtaacatctaggttaatgttgattcagaaggaaaacgtttgttgttgccatgagaagaggcattgaaatgctgaatcaccatcacaaatgttaccactattaatataaggagatacataggaagatggaattagaccatctcggaccaccaggtttacaattccacctgcagatacatgcaagaagtattgtcacaatacttatgtcacgttattccgttgaggtcatcaccaacta

SEQ ID NO: 29104 - DNA, 796 bp, Homo sapiens
agtttcagctttctacatagggctagccagttttcccagcactatttattaagtagggaatcctttctgcatttcttgtttttgtcaggtttgtcaaagatcagatggttgtagatgtgtggtattatttctgagggctctgttctgttccattggtctatatgtctgtttcggtascagtaccaggctgttttggttactgtagccttgtagtatagtttgaagtcaggtagcatgatgcctccagctttgttcattgggcttaggattgtcttggcaatgtgggctcttttttggttccatatgaacattaaagtagtcttttgcaactctcatcagcccagtttaatattacctatttattataatgtaatgctgctcgcacaactgagaaaacactgttgctttaccccctccagctctgtagcagccacgcagaaatcatagaactgtaaacacatgctaattacacaacctatgtagacaatcaatattaagaaaaatttttactgcccagtatttctgtggttgaaaatgtagagtctaattttgatccacagtaacatctaggttaatgttgattcagaaggaaaacgtttgttgttgccatgagaagaggcattgaaatgctgaatcaccatcacaaatgttaccactattaatataaggagatacataggaagatggaattagaccatctcggaccaccaggtttacaattccacctgcagatacatgcaagaagtattgtcacaatacttatgtcacgttattccgttgaggtcatcaccaacta

SEQ ID NO: 29105 - DNA, 796 bp, Homo sapiens
agtttcagctttctacatagggctagccagttttcccagcactatttattaagtagggaatcctttctgcatttcttgtttttgtcaggtttgtcaaagatcagatggttgtagatgtgtggtattatttctgagggctctgttctgttccattggtctatatgtctgtttcggtagcagtaccakgctgttttggttactgtagccttgtagtatagtttgaagtcaggtagcatgatgcctccagctttgttcattgggcttaggattgtcttggcaatgtgggctcttttttggttccatatgaacattaaagtagtcttttgcaactctcatcagcccagtttaatattacctatttattataatgtaatgctgctcgcacaactgagaaaacactgttgctttaccccctccagctctgtagcagccacgcagaaatcatagaactgtaaacacatgctaattacacaacctatgtagacaatcaatattaagaaaaatttttactgcccagtatttctgtggttgaaaatgtagagtctaattttgatccacagtaacatctaggttaatgttgattcagaaggaaaacgtttgttgttgccatgagaagaggcattgaaatgctgaatcaccatcacaaatgttaccactattaatataaggagatacataggaagatggaattagaccatctcggaccaccaggtttacaattccacctgcagatacatgcaagaagtattgtcacaatacttatgtcacgttattccgttgaggtcatcaccaacta

SEQ ID NO: 29106 - DNA, 710 bp, Homo sapiens
ccagggacctccagggacctccaggggtctccagggacctccagggacctccaggggtctccagggatctccagggacctccaggggtctgcagtcaccaacaaagctggcagaggcagggaggaccctcctctagagccttcagagggagcacagccctgccagcatcttgacatcacttctggccttcagaactaggagtgaatacatttctgctggtttaattcacccagttggggataattcgtatggcagtcctgagaaaggaatgctgtcatttacctgcttatcaagctttgaccagaaactctacttatttgaattttttttctggggtgggggtgagtggggcaacccatggcagggtgatagcagtcatagygtttatagagaccacagtgttgacgacttggagagcaaagatggaggggagattactaatgacgagaacttccgatagtgagcccacctggcacacagtgttaggaaggggtgttattatcattcccactttacagatgcaacgctgaggtgcagagacaccaaggcacgtctccagggtctcaagccaggaggtgttggagctggggttcacgcccaacaggggacctggggacccagcgtgggtactgctgagtcctcgccaggggcttggcgggataagtttccattctgttccggcctggtgtggagggatctgggctcacaca

SEQ ID NO: 29107 - DNA, 520 bp, Homo sapiens
accccacctcatcgtgttgacatgaggatgggatgtaggattcctgtaaagcttccataggtgatgaacttgccrttcccatttccctcccgtgtgttactcaggcagtgagtggcacacggagggtgtaggctgtcctggtgtccctgagacagcctcagcaggcctgtgtatctgctgctccctgagctgcacactaaatgaagcctctctgggtgaagccattctctgggcagcctggggctcgccaggtgcccacagaggaagcatgctgttcagggggatgggatgtcatgctctttgatgccaggagctcttcctccaagccaccctcaccacagatcccccaggatctgtccaaaatggaagcctcgcctttctggggctcctcattctctgttccccgtgggttggagtctaaattcctttgcaggtttcactctagtgaaggttcgagtctaaaatgatttgcaggcatccacctctccagcctcgcctccatcctgggattctcacaccc

SEQ ID NO: 29108 - DNA, 520 bp, Homo sapiens
accccacctcatcgtgttgacatgaggatgggatgtaggattcctgtaaagcttccataggtgatgaacttgccattcccatttccctcccgtgtgttactcaggcagtgagtggcacacggagggtgtaggctgtcctggtgtccctgagacagcctcagcaggcctgtgtatctgctgctccctgagctgcacactaaatgaagcctctctgggtgaagccattctctgggcagccyggggctcgccaggtgcccacagaggaagcatgctgttcagggggatgggatgtcatgctctttgatgccaggagctcttcctccaagccaccctcaccacagatcccccaggatctgtccaaaatggaagcctcgcctttctggggctcctcattctctgttccccgtgggttggagtctaaattcctttgcaggtttcactctagtgaaggttcgagtctaaaatgatttgcaggcatccacctctccagcctcgcctccatcctgggattctcacaccc

SEQ ID NO: 29109 - DNA, 1252 bp, Homo sapiens
ttggcagcattgtcctgggctccggaggtggggccgctcaccctctgggtcagcctcttcctttgctccaatgtcccagaattttaggtttagcaaagctccagtcttcctacttactgctcactttgatgctctctacttttgggagttcagaatgaaaataataataatacaaataaaaagaaggaaaggagaaaagaaccaaagaaatctatccatgtgaactggggacgaaatgagaagctgtctcccctctgccacctaaaactcggagagagcattatccttctcaattcaactgctgcagcaggtggaagaggctccctgctctgaggcccagtagatgcaaatgtcctgccttcaatagtgctggcagttctggtgggtggaagagttgtggtgggagaacatcgtttcagcccaactctggcccagagggcctctttggcaaagagtcccagacccagaaggkggggatctttgcagcgcactgctttatttatttatttgtggataggtacttgctctcagtccataacggacatgtgttgattacttactgtgtagtgagctctgaggatgagacagtaaaagattcccatcccctgttattaacagactgtgaccagtgagggagactgatgctcaatgcagtcctgccaaggctgcaacttaggagtggggtcagcacgatctgctgcatttgcagactgagggacatgagctgagtcttgagaggaattagcaaattgttggaaagatgaagtaggaagaaacaaatcccagatagagagaatagtggaggatgtaaaagtgtggaggtgagacagagcttaatatattttgataactcccgctggtaagaatggctgggatgcaggtaactgggggaggggtttgggagtggagaacaatgtttattaaataatttttttaattataaaaataaattgagtgctcaagatcctgggctagaatggattgggagacaagcctctataaggttcttagatcacacaattaacgatggggtacagagacagacatcaacaccaagtcatctcagaatgaccggaaaccacccccaccaccattacccagaagagtggagtcaagaccgtgaagtcttggtcatgttgctgcagaaaagattggtggctcaccttgccccatcttcagcgtcagtttcaagggcgctcctcccacaaagatgggcgtcaactaacagagggagacaccatggatttgcagg

SEQ ID NO: 29110 - DNA, 504 bp, Homo sapiens
gttagtaatttttgtggactccatgcaaagaaaagaatcatytaatgagcccagtcaacccatagaatcatgagaaataataaatctttgtagtttcaaagcgctaagttttgggatggtttgttaaacagcaagagatgaccaatatatcagacctgaaaaatttaaagcaccaggaaaattttaaagtaccaggaaaattttaaagtaccatcctagcacatagtagatgcttaattaaaatgtctatgaagaagaaggggtcaattctgtcacttggcattcagattccctttttgctcactatagccttccactttaagaagagaaccaacatccctgttgaactggattcatctgcaaaccaggccagcaatcctggctcaggcaggccttccaggagggcaaactgtatagttctatagcaaagggggcattgtcctttctgaaatgccagatcctttataagctggagagttacagtcactgtttggtaattgccct

SEQ ID NO: 29111 - DNA, 1152 bp, Homo sapiens
ggatccttctccagatcctgtgatttcccataggccgttccagctcatctccatccagactgtcaatccttctgtaattaggatacatggctaagccctgattccagtttctgaactcatatactgtcaaatttgtaatgaaagaaaacatcacagtctctgaacttaccatcttttgaagagaaggtggttgtcaattagtgtttactaagtgaggggtatttgttgaaatagctcaggcattggactacagcagtaaaatttgcaatgttgagatttcacctctcttccttcttcattagatacccaattctgatgggtttgcttttccctgttcttcatttcctaaacctttccctaaagggagaaaggaagaaggaggatggagaacttggttcctaaatttaatataaatcacagtcaccccaggagcctgctaactgtgcagattatcaggcccaaccccccgagattctgacccagcagctctgggggaagggtgaagagcctgcttgtttaacaagtgctccagatgagtctaatgcaagttgccagyggagggccaccctttgagaaacctctcagagtatttcataactcttgctgaagttatttcttccaagtgcagaaaatgaagcattttctttctaattatagaggcccccagaatgagaagtgacaacaaggaaaatccacaacaggaaggggctaaaggagcaaagccatgtgcagtgtcagctggcagatccaaagggaatggtctgcagaatcctgaaccaagaggggcaaatatgagtgaacctcggttgtcacggaggcaggtcagctccccaaatgctcaaaagccatttgctcactaccagagacattgcagggtggaatacatcagcagccccctaaaaagccacccactgagagagctaaagaaaagcaaaggaggtaaacggagtctgagcaaccgtttgcaacatcttggtcaccagcccacccgctcagcaaagaaaccctacaaatgtgatgactgtgggaaaagcttcacgtggaattcagagctgaagagacacaagagagtccacacaggagagagaccctacacgtgcggagagtgtggaaactgctttgggcggcagtcaaccctgaagctgcaccaga

SEQ ID NO: 29112 - DNA, 536 bp, Homo sapiens
agaattctaaggacttggcttgcatttgtgccttcatccttacaaacaaccccttaaggtcagtctttagaggccaggaaaccaaggcacagggaggtgatgcgatggcccacggtcacagcaaggcagtgtgaagattcctaccacacacacgggacccagagaggcacgctggtcacttagctccatggcccttcagggacaaggacctaagtgaggaaataaatgacgagagtgaggcagtggggcagtaggggaggggaaaagaaggggctatccatccccaccaagaggacagcaaggacagggggcagggtgggtgggcaactgagggcagaggccactcagaggagaccccaggggtcrccaactgcaagagagggagcaggtgacaggagagtgggccctaaggcagacccagccgggacccacatgctgggaacaataaggggtgccgggccccttctggaaggcggcgcagcagctctcagccgcctgaaatggtgcactccctttgaagcagtaattcctcttct

SEQ ID NO: 29113 - DNA, 1294 bp, Homo sapiens
cattaaaatgggcccgatttcaatgaatgactattaccatccccattttacagatgaggaaaccaaggctcagagaggtttaatgacactgagttcaaatcactgccctgtcactcatgagctgcataaccttgaacaaatcactgcacctctctgggctttgactacttaytcactaaatggtatataattcctggttcttgggagatttaaggattaaatgagataatccagggcttgtagacagccctggacatggtgacatggtgctgggcacagcacaggtgctgcccagaagttatctttaatgtttcatgatctaataacaataacccccattctgctaagacatgttgatcaggtatattacacattagcaggtatgctaatcagacaactgacctcaagaaacagaaggggaagtgctctgagtgggactaatagagtgagtgggatggggtgagggagcacagaaggaaatgtgcggtggccaggaggcgacgtgacggtgctgagcccactcttccggggtgggccaagctctgtggtctccagggaggatgatgcagggcatagctggccttgggactggggcacaaactctagggcacagagaaggtgtctgttcatggtctgcagacaggcagggacactggctgccttgtttaccactggtttcccaaggcccagagttgacaaagtgctccataaatatttgtgaatgagtgatatggtctggccgtgtccccacccaaacctaatcttgaattatagcccccatatatccccacaggttgtaggagggacctggtgggtggtaattgaatcatgggagtgggtttttcctgtgctgctctcacaatagtgaataaatctcatgagatctgatggttttataaaggacagttctgtgcacacactgtcttgcctgccaccatgtaagacatgccacctttgctcctcctttgccttccttcatgattgtgatgcctccccagacatgtggaactgttgagtccattaaacctctttttctttataaattgctcaatcttgggtatgtctttattagcagcgtgagaacagactaatagagtgagtgaatacgaggatagtataaaagacatatggcaagagactgccataaagagcccccaaaccagattcagactgcagccattgtgtgggcctcagggtgctggtgcacagctgtgatgggtgaggtcataaatacatgcacgtgcatgcacatacactctcagacacatacatgctcatagagagacatgcatag

SEQ ID NO: 29114 - DNA, 1294 bp, Homo sapiens
cattaaaatgggcccgatttcaatgaatgactattaccatccccattttacagatgaggaaaccaaggctcagagaggtttaatgacactgagttcaaatcactgccctgtcactcatgagctgcataaccttgaacaaatcactgcacctctctgggctttgactacttattcactaaatggtatataattcctggttcttgggagatttaaggattaaatgagataatccagggcttgtagacagcccyggacatggtgacatggtgctgggcacagcacaggtgctgcccagaagttatctttaatgtttcatgatctaataacaataacccccattctgctaagacatgttgatcaggtatattacacattagcaggtatgctaatcagacaactgacctcaagaaacagaaggggaagtgctctgagtgggactaatagagtgagtgggatggggtgagggagcacagaaggaaatgtgcggtggccaggaggcgacgtgacggtgctgagcccactcttccggggtgggccaagctctgtggtctccagggaggatgatgcagggcatagctggccttgggactggggcacaaactctagggcacagagaaggtgtctgttcatggtctgcagacaggcagggacactggctgccttgtttaccactggtttcccaaggcccagagttgacaaagtgctccataaatatttgtgaatgagtgatatggtctggccgtgtccccacccaaacctaatcttgaattatagcccccatatatccccacaggttgtaggagggacctggtgggtggtaattgaatcatgggagtgggtttttcctgtgctgctctcacaatagtgaataaatctcatgagatctgatggttttataaaggacagttctgtgcacacactgtcttgcctgccaccatgtaagacatgccacctttgctcctcctttgccttccttcatgattgtgatgcctccccagacatgtggaactgttgagtccattaaacctctttttctttataaattgctcaatcttgggtatgtctttattagcagcgtgagaacagactaatagagtgagtgaatacgaggatagtataaaagacatatggcaagagactgccataaagagcccccaaaccagattcagactgcagccattgtgtgggcctcagggtgctggtgcacagctgtgatgggtgaggtcataaatacatgcacgtgcatgcacatacactctcagacacatacatgctcatagagagacatgcatag

SEQ ID NO: 29115 - DNA, 1294 bp, Homo sapiens
cattaaaatgggcccgatttcaatgaatgactattaccatccccattttacagatgaggaaaccaaggctcagagaggtttaatgacactgagttcaaatcactgccctgtcactcatgagctgcataaccttgaacaaatcactgcacctctctgggctttgactacttattcactaaatggtatataattcctggttcttgggagatttaaggattaaatgagataatccagggcttgtagacagccctggacatggtgacatggtgctgggcacagcacaggtgctgcccagaagttatctttaatgtttcatgatctaataacaataacccccattctgctaagacatgttgatcaggtatattacacattagcaggtatgctaatcagacaactgacctcaagaaacagaaggggaagtgctctgagtgggactaatagagtgagtgggatggggtgagggagcacagaaggaaatgtgcggtggccaggaggcgacgtgacggtgctgagcccactcttccggggtgggccaagctctgtggtctccagggaggatgatgcagggcatagctggccttgggactggggcacaaactctagggcacagagaaggtgtctgttcatggtctgcagacaggcagggacactggctgccttgtttaccactggtttcccaaggcccagagttgacaaagtgctccataaatatttgtgaatgagtgatatggtctggccgtgtccccacccaaacctaatcttgaattatagcccccatatatccccacaggttgtaggagggacctggtgggtggtaattgaatcatgggagtgggtttttcctgtgctgctctcacratagtgaataaatctcatgagatctgatggttttataaaggacagttctgtgcacacactgtcttgcctgccaccatgtaagacatgccacctttgctcctcctttgccttccttcatgattgtgatgcctccccagacatgtggaactgttgagtccattaaacctctttttctttataaattgctcaatcttgggtatgtctttattagcagcgtgagaacagactaatagagtgagtgaatacgaggatagtataaaagacatatggcaagagactgccataaagagcccccaaaccagattcagactgcagccattgtgtgggcctcagggtgctggtgcacagctgtgatgggtgaggtcataaatacatgcacgtgcatgcacatacactctcagacacatacatgctcatagagagacatgcatag

SEQ ID NO: 29116 - DNA, 1294 bp, Homo sapiens
cattaaaatgggcccgatttcaatgaatgactattaccatccccattttacagatgaggaaaccaaggctcagagaggtttaatgacactgagttcaaatcactgccctgtcactcatgagctgcataaccttgaacaaatcactgcacctctctgggctttgactacttattcactaaatggtatataattcctggttcttgggagatttaaggattaaatgagataatccagggcttgtagacagccctggacatggtgacatggtgctgggcacagcacaggtgctgcccagaagttatctttaatgtttcatgatctaataacaataacccccattctgctaagacatgttgatcaggtatattacacattagcaggtatgctaatcagacaactgacctcaagaaacagaaggggaagtgctctgagtgggactaatagagtgagtgggatggggtgagggagcacagaaggaaatgtgcggtggccaggaggcgacgtgacggtgctgagcccactcttccggggtgggccaagctctgtggtctccagggaggatgatgcagggcatagctggccttgggactggggcacaaactctagggcacagagaaggtgtctgttcatggtctgcagacaggcagggacactggctgccttgtttaccactggtttcccaaggcccagagttgacaaagtgctccataaatatttgtgaatgagtgatatggtctggccgtgtccccacccaaacctaatcttgaattatagcccccatatatccccacaggttgtaggagggacctggtgggtggtaattgaatcatgggagtgggtttttcctgtgctgctctcacaatagtgaataaatctcatgagatctgatggttttataaaggacagttctgtgcacacactgtcttgcctgccaccatgtaagacatgccacctttgctcctcctttgccttccttcatgattgtgatgcctccccagacatgtggaactgttgagtccattaaacctctttttctttataaattgctcaatcttgggtatgtctttattagcagcgtgagaacagactaatrgagtgagtgaatacgaggatagtataaaagacatatggcaagagactgccataaagagcccccaaaccagattcagactgcagccattgtgtgggcctcagggtgctggtgcacagctgtgatgggtgaggtcataaatacatgcacgtgcatgcacatacactctcagacacatacatgctcatagagagacatgcatag

SEQ ID NO: 29117 - DNA, 579 bp, Homo sapiens
cccccatgacaaagaattatgggccccaaaatgtcaatagtgycaaggttgaggaactctgggctagattccggccctttccagagaattcttcccatcaccaatccactcacctgtgcctaccagtatcagtcaggataagctaggttatcttgcagtaacaaacattcccaaatcttaacagcttaactccataaatattaattcatttctttctaatgttctgtgtccagtgcaggttggatgggggactctagttcacatggtccctgaggaccaggctcctttgggacattgcaaattgcagtggtggagggaaagagcatgggagattgctcaccagtgttgcttttgctcatattttattggccaatggaagtcacatggccacatctaacctcaaagagggtggagaagagcagtcttcctttggacctgggaggagagaaacagattcttggtgaagagccctgatgatcacatcacacctagttcagtctcatccttggagattcaccttggatgccatggagaagcctatcccgattgtcctccctgggtgttgggggtacccttgct

SEQ ID NO: 29118 - DNA, 1206 bp, Homo sapiens
cagccacctcggggccaggaaaagatgaagtgtcgcaggcccggcgtccccgccctccgcctgaggcaacggagcatctctcttcgagtagcccattttccagagagtctcctcggctgcgaaagccagacgaagagggacccaaagccaccgcagcggcaagagccggagaaccactgagggacagcgccccctgcagmggcggttgaaccgcttcccacagcgctgggcggggcgtcgcgcagtccctgggcgctgattgggcactccgtgtcccctccccctcggcccggcgctgcctctgtctcctttgacctcgatttcaagccatgcgctgagcttcggttggcccggcttccttgaggcgtaagctcggtctgtccaatgaggagcgagcgtcgcgggggccgtcgggaagggcggccgacccatataagcagcctgcggggcgttccctcgggttgtggttggtgtgcgggtttcggttggaggactcgttggggaggtggcctgcgcttgtagagactgcatccccgagacgatggcggagggagataatcgcagcaccaacctgctggtgagtcctggctgcctgtcccccgggagccgagcgaggcctccagacgtccgtgggctcaaacaccgcggcctcgtccctgtcacccgccgcgggcccggcccttctctccctgggcaggcgacgatgcctggccctcgggcttcttgggtgactcctgggtgtcgaacccttacctttcctggggacggtgcgcgacggggcgaggagggcgcgtgattcatcaccgcgagtaggagtcgaggaggaagtgggaggcagaggggctgcgacactagcctggggtgcgggtgggggcagaaggcctcctggggcctgtccagcgctttcgcggctcaggccccagccgtattcggctttccccgtctttgatcttaacctggatgtgcctgccttcttttccccctaaaacttggacaagggtggagggtcaaagggctactgcccagaatttatcttagagctggtacaacttaaaacgacagggaggctgcgagctcaccgtggggaaccgggagcggggtccagctgaacagacaatgggatgtcttggcgtttgtctggaatttggaagtctggcgggggtggggtcacaggactactggaaacagctttagagtaataagcag

SEQ ID NO: 29119 - DNA, 1234 bp, Homo sapiens
agctccttgaaacgcaattccttccttctcttttgccctctttcagctcaagttcagccagcactttcagcctcccgccctggagagcttccccgagcaggcacactcacccagcagatgggcggcttgcctgtccagctgccatccgccttgcaggtgcggtgctcggagccacccttgagggagaagccctcctggcaggagtagatgagcgtgtagcccatggagggcaaatccagggccccgacgttggcatgcgttggcgtctctggctgcctgcagtggtgggctggatgagaggaaagaccctgttggactggaggagattaggggcttcaggggccctttcgaccattcccctgttcctagatagaatatcctcttcctttcccttccagtccctttcatgccaagcatccccctccctaatcctccaccctaacccaagctctgtgtctagaggaatggccaagatggagatcatgtggatatcggcttggttgactctgagttgggggaacttaagcctgcagcacttcctgaggggtaaaggagtaactgggtcaaaagcttgatatctccatcctgaggcctggccttgcagttgttagtttttgctgctgccactggatagtttttctttgctaaggcatagggattgccttccaatatcagaaaggcttttgtgtggaagtcttctgtgaggccccaaagtgtaaggactacaaagagaccgatgtcggttcgcatggggagttgtgaactccctgtcattcagagcattcaaacatgacccagatgcccagctggggcaagaggaattttcttgggatgtgggtgaagtctgcactcacggacacagtcaggtggggttccactccaggtcaggtttgggaggcaggtcctggtggtggagccctgaagcaggtagcctttttgacaacggaagaggactgtgcttccaacctgcggcaagatacaaagtcccatcagccccttcctttcagcggtgcttcctacgtctgtcccttgaccactttcacatggcccaactcctmccgcactgttgcctgcaaaactctttttctgattctccgcctggttaaattttcttcttcctttgaggcagttgataggatgcctcctccacaaggcctcatctaataccctgaacaaagttgtaatattacactctgttgtggacacggtggctgattcagagtcagaagaccct

SEQ ID NO: 29120 - DNA, 1234 bp, Homo sapiens
agctccttgaaacgcaattccttccttctcttttgccctctttcagctcaagttcagccagcactttcagcctcccgccctggagagcttccccgagcaggcacactcacccagcagatgggcggcttgcctgtccagctgccatccgccttgcaggtgcggtgctcggagccacccttgagggagaagccctcctggcaggagtagatgagcgtgtagcccatggagggcaaatccagggccccgacgttggcatgcgttggcgtctctggctgcctgcagtggtgggctggatgagaggaaagaccctgttggactggaggagattaggggcttcaggggccctttcgaccattcccctgttcctagatagaatatcctcttcctttcccttccagtccctttcatgccaagcatccccctccctaatcctccaccctaacccaagctctgtgtctagaggaatggccaagatggagatcatgtggatatcggcttggttgactctgagttgggggaacttaagcctgcagcacttcctgaggggtaaaggagtaactgggtcaaaagcttgatatctccatcctgaggcctggccttgcagttgttagtttttgctgctgccactggatagtttttctttgctaaggcatagggattgccttccaatatcagaaaggcttttgtgtggaagtcttctgtgaggccccaaagtgtaaggactacaaagagaccgatgtcggttcgcatggggagttgtgaactccctgtcattcagagcattcaaacatgacccagatgcccagctggggcaagaggaattttcttgggatgtgggtgaagtctgcactcacggacacagtcaggtggggttccactccaggtcaggtttgggaggcaggtcctggtggtggagccctgaagcaggtagcctttttgacaacggaagaggactgtgcttccaacctgcggcaagatacaaagtcccatcagccccttcctttcagcggtgcttcctacgtctgtcccttgaccactttcacatggcccaactcctcccgcactgttgcctgcaaaactctttttctgattctccgcctggttaaattttcttcytcctttgaggcagttgataggatgcctcctccacaaggcctcatctaataccctgaacaaagttgtaatattacactctgttgtggacacggtggctgattcagagtcagaagaccct

SEQ ID NO: 29121 - DNA, 758 bp, Homo sapiens
ctcattttcttcctttccacttccttccctctttaatagtgtctttgatgaagctcctccctggttttggggaggggactacctattctgggccttccagccacaaagctccgaggaggcaaggggaaggagctattgaagaggatgcaccaaaggcccttgtaagcaacttacggaaacactgaggcagctctccggtccaggacccatttccctcacaggtgaacacygcgggcagggagagctggtacccctccaggcaggcataagtcacacttgagccccacatgaagtcagaccccaccaccttcccattggggatgagcggaggtggcttgcacatgagagctggagggagaccaaagcaggctgagttctgatgctgtcctgggaaaccagcccccgtcaccatcattgatatcaccgactaccctgcacccacctagagcctgggctaaacaggaagaaccagaatggggccctcttactgtgggagttctgatctttttgcaccttacaatgccctctctcaagtgtgacaacccagtcctctgtttgcgggaccctcccctcaatgttcatggcccaggccttattttggtacttctgattcactcctggcagatgttcaggggccagttttctcaccttgcacatcccctgataagatgttagggctggcctttcacccctctcccttctagagagatgctcagggcctacatctcacttttgtatcttctttggctctctgtcca

SEQ ID NO: 29122 - DNA, 770 bp, Homo sapiens
  misc_feature (1)...(770): n = A,T,C or G
catcatctccaaattaatgtgccccagggatgggatgagtagggmaatttcttacacaatgccacggtccagaggaaaaacatccttgaaaaagattcatctttcaaatcccgatataaatctactcttagatctatattccaaaagagaataagagactctttccccatatgtaagaaacaggtggtaaggcccacaaatgagctctgaagtagaacaaaacgctaaggaagataattatcactgtggacaaatatgatttgtaactatgataaccccatcagccacacgtggaatgtgccttgactgcatgtttggttttcacagaaatagctcttcaagagttgagatgtaatagcaaaaatatgaaaaattacaaaggagtcatgctggaatctcatctaaacaagatctattttgcaagaactaaaagcgcagtcaaaagaagttatactgaatcatcaaggagaacaggctttcaatctaaaatattttgtcaatgtcctctgaccgtaaagacttcacacataaaattataaggacaaaaataacttatcaaaagtttatgcaaaaagagttactttattataggatgatgaatctgtagttacacattgtaaatccaggtatttacctctataactaaccaaaagatattctcattaaaatnnnnnnnnnnnnnnnnnnnnnnnnnnnnnnnnnnnnnnnnnnnnnnnnnnnnnnnnnnnnnnnnnnnnnnnnnnnnnnnnnnnnnnnnnnnnnnnnnnnng

SEQ ID NO: 29123 - DNA, 770 bp, Homo sapiens
  misc_feature (1)...(770): n = A,T,C or G
catcatctccaaattaatgtgccccagggatgggatgagtagggcaatttcttacacaatgccacggtccagaggaaaaacatccttgaaaaagattcatctttcaaatcccgatataaatctactcttagatctatattccaaaagagaataagagactctttccccatatgtaagaaacaggtggtaaggcccacaaatgagctctgaagtagaacaaaacgctaaggaagataattatcactgtggayaaatatgatttgtaactatgataaccccatcagccacacgtggaatgtgccttgactgcatgtttggttttcacagaaatagctcttcaagagttgagatgtaatagcaaaaatatgaaaaattacaaaggagtcatgctggaatctcatctaaacaagatctattttgcaagaactaaaagcgcagtcaaaagaagttatactgaatcatcaaggagaacaggctttcaatctaaaatattttgtcaatgtcctctgaccgtaaagacttcacacataaaattataaggacaaaaataacttatcaaaagtttatgcaaaaagagttactttattataggatgatgaatctgtagttacacattgtaaatccaggtatttacctctataactaaccaaaagatattctcattaaaatnnnnnnnnnnnnnnnnnnnnnnnnnnnnnnnnnnnnnnnnnnnnnnnnnnnnnnnnnnnnnnnnnnnnnnnnnnnnnnnnnnnnnnnnnnnnnnnnnnnng

SEQ ID NO: 29124 - DNA, 802 bp, Homo sapiens
atgctcatggacattcagataacaacaatcccctgagtcccccgcaggcagcaggtgctcacagggtcacattaacatgaatcactcagtttacagtggcttgtgcacccacctgcaaaatacaaatcctctcaacaattcttaccctttccgccagcccccaaaattctcaccaactatgtgggttcttccaggagctggtgtttcaaagttatgacaagcagccttctcagattctgcactccagcyctccacaaagccacttgtaagaagttcacctccacccccgatttctgctccagggacatccaggggaacccagatatccgtgccgaggggtctttctcactgtttccgacgctataggctcagggccaaagaccagtggcaaacggtttatcccacattgcacaaaaacagagaaagtttctgcccagaattgaggagagggtccctctagcctggctcgttatgccctttgccgcaggccccaaggccacatggctcacgtcctccctttctagacttcctgagagagctggcatctccccttcttatgatgaaacttctctccacagttaaacatgaatgggccaagccctcgacagcctctgccgtcctttccttccttgactcttcccctaggtgcccacaggcatttcctctactgtgaacaaataactcatacaggtgcctggtggcactagccctgtgaacagaccagatactctcaggaaggccagagtccaaggttcaggctcaaagacacatttgactatacaatgagcatttactctgtccc

SEQ ID NO: 29125 - DNA, 534 bp, Homo sapiens
ctattaccaatggaaatatttctgttttcctgccactaaaaacttgacaaaggtagyggtcagctgtggtatcgaaatgtgctgtgaatgaaatggagcttaggacgtatcataattaacagttccagtctcacataaagcttctgtaaagcaataattgaagacagcaccttagccagagctattggaaagtgaacttattgctgggggataaggagatgagtattaaactaagatataattaaaatttccaaattgtgggcaagtttcttgtcaaacagtcccaagaaagtagagcaagggcatcccaagtgcatggccacttggggaaaaacagtaaagtatcaacagtggtagactaaatagataagatttgcagtctaaagtcctctaagaggtctcttcacctatgtccagcttttgaagcaatcatgcattatttaccatttaaatattacaatgtaactttgctgtatgtttgttctttaaagatgttatatacatcactctagaaatgttcgtggatataactaa

SEQ ID NO: 29126 - DNA, 586 bp, Homo sapiens
aagcatagcctagcactaggagtggcccaggaattacagtccttgtgtcctagactgcctttaaaatttacctaggaccccacagtacttcagctcatggtggtgtggcttgctgagaaactcaagttttgaccactgaaaagggcaatacccctctggcaagggctgctcctaatgctttcttcatgtatggatgctggctgatcctggcagagattttttctttactatgacagggcagcatagagtttaatgtaaatttcctcagttgctgtactgtcccttccaaaagcacacagattatctctctgcatcactccgctgctgccatggggatcggggaggggtggcatcagtgattcaagactttctcttctgccctcctcaatacctctttcagtgatataaagttaaaacctggtactgtgatcgctcacctgatttttggttcctgtgacagtgcttttctgtgtgcagacagttaagatttggtgttccagcaggggagatgaaaagtgtaggcttctatttcaccatcttgctctgccccyaaaaacatatttttaaaagagtaaatacatatgtc

SEQ ID NO: 29127 - DNA, 1795 bp, Homo sapiens
ccacgtttggctactgagctcttgaaatgagctcagtcagtgtaaaatatacacagtgttgaaagacattatgaaaaaagaatgttaaaaccatcattcatacttttaaattttgattacatgttgaaattcaaattcccaatattggataaaataaggaaggttaaaatcaataaattaatttttaataccactaccaggaaatattaaattgcatacgtagattgtttttctgttggatggtctgggttacagttattaataaaaggaagagtcaaatgtgccctataatagagtgggtgattttatttttaaagcactgtgatgtctaatattcaatttgaacttgttttgagccatagccatgtaaacatcctctttgcctccctccagatctttgcataagtctattccatacttaatttgctctttgtgagtgcattttctgggagcagaaattaagtttcacctctgggtctctggtacagtccagtgacaacacttgtaggacgaggtgatcatgaaaaagacagattttctataccaggaattcataggttccttggtggggggtttaacttctgcaggatgaggatttggagctctgagccaaaatcatctaagtgtcaagaggtagcagtgctcctgcagccatctgggtggcatcgttttgtaggagttgttaagtttataggtgagaagtttagaaggcacctggtctaatccataagaaagatcagcgacgacaggatccaagcccccatgatgagtgggaggaattgtctgcccatcactttaactatctattattggctgacttctgggatactctgagtaagcaaggtggatgagattggggaaggacttagtgaccaaatgcaaacataaatgcgatgtgggaggcagcagagcctttctgttagagcagtttgtggtctgtacacctcctgtgtagagctgatgttttcacactcatccccgacaccctcctgctatttagggctaacgctcgacccatggattattgagggagggaaaatattgctgctgctgagaccctagggtttgatcacccatgccttctgtatctcagttcccatccagacacctgttacacatttttacagcaagcctcacactcacacagcagtagtttcaggagaaaagacttcctggaactattcaaatattttgtcaaagtctctctctctctctctctcattggaggctccattcttttttctaccttctggctttgaggcaagagaagaagattccatgaagctcacattccaacattggagacagcatggagctgtcagtgacctccccacttccaagcagaaatcgtcacatgtaagaaggtacgggtccataatccctcatctgaaatgcttggggccagaagggattcggaattcaggagtttgcagattttagaaaggtaacatggtgcataaatcctataacatgacatcctaggaagacttggggcagcactcataagcaaactcatcgatgtttctgcagtgaaacatacgaagattcactcagtgaaataaataaagactccaaatagcctcatctcagttcaggacaagctttgatgccatatgagtttgttcttcacttacraaaacaaacaaacaaacaaatctctttgattgtcagagctcttggattccctaatacagaggtgcaaatgtgggtgtgctaccaatgccacggctctgttggtgctcagctgagctgggcatgccaatatgagctttactcccactagcagtgctctagt

SEQ ID NO: 29128 - DNA, 497 bp, Homo sapiens
tacaccactgaaaataacttatccatkattcttttggcaaagaccagtttacattagtttattttctcaacagacacttactaggcagttatataacattacctctactcttcaaaacaactttaaaagttaggtattactccaggtaacagaaaattatagaaaaaattataacactaaatctatcaattatttgtaaatcttatttagaaaatatttccaaattgtcaaatatttagatattggaaaagaagaagcaataatcagactgtcctccaatttgagataaatgattagatgtatcctgatgtatcaaaatgcaacatggtactttcattacttgtttgataaactactcattaaaagatcatttttaaatgtaccccactgacctgcaatgtactttcttaaacacattactgttatcaacttttatgatattagaagatgctataatcaattattttagggaggaatataaatcagttgaatttctt

SEQ ID NO: 29129 - DNA, 1118 bp, Homo sapiens
cctgagtcatctttctccatatagttaactccctgccagcgcattcttccaagtttgcccaagctcaaaaggtcaaatgtggtcaattgctgagtgggcagagacctccttggaaaccaagaatggatctgttaatggatctgttaaggcagcagcttttttctaccccagcctgagctgctgaggggtctgctccttcaccagccatttggtctcaaaacaaatgcttcaattacattcatagcttcatgcatcttatcaggttttctgagtttttgcaaagatatccaaagtaggggaaatccagtggtttaaaaaaagatgtcggctgggtgcgatggctcatgcctataaacccagcactttgggaggcagaggcgggcgaatcacttgaggtcaggagttcaagaccaccctaggcaacgtgacgaaaccccatctctactaaaaatacaaaaattagctgggcatggtgacacttgcctgtagtcccagcttcttgggaggctgaggcaggaggatttcttgaatccgggaggtggaggttgcagtgagccgagatcatgccactgcactccagcctgggtgacagagcaagactctgtctcaaaaaaatagaataaaataaaagtaaagtaaagtcaaatattactcagatataaaaaggagtggaattctgatacatgttaccgcatggatgaaccttgaagatattgtgctaagtgacataagccaaacaaaatgacagaygtcttataattccacttagacgaagtagctagaataggcaaattcacagagacaggaagtagattcgagtgtaccaggggctgggggaggaggaatggggagtgattgcttcatggttgctgagtttctgtttgggataataaaaagttttagaaatagatagtgctgatggttgcacaacattatgaatgcaattaatgccagtaaattgcacacttaaaattagttaaaatggcttattttagaaaagtaatgtattactttgaaaaaaattgtcaagaagtaactttaggacttatgattcctccagacttaccttctgggatacagtgagtaaatgcacatcctggggccctgctgtgggatcc

SEQ ID NO: 29130 - DNA, 633 bp, Homo sapiens
tgttttaaaaattgatacaaggggcctcatactaaaaagtataagtatgtggttctgaatcctagagtggcctaatgtcaggcatccactgatggcaacaatcctaaggccctgctgggtagttcaagcagctggattgtctgaagacagaaggaatttaaaaaggcagartaacaactacctccagaaacagtgtcaggctaagaggattgaacaaggaaagacaaggaaacacaactaatgggaaaaattgaaaactgtgcttagaaactgtgcttgcaaatatataatcaaaaaggaggggcccacgtgaaggaatctttgatctgtaggcaaattccctgaatgtggaaacagataaaacaggaaatcaaccaaggctgcccttgctgatgtcacaaggagtacccaggagtaattgagtgattactacacccaggagtaccacagagtaattaagtgagccagtgcatccttctctatcctgataaatatgaatgtaatgagccaggaacaaaatgagttaaccaagaagatactgaatacacattcatgttattacctcaagggcctattaactcattctttgtagctgccataacattatgtgttaagtcttaaaagaagacacgg

SEQ ID NO: 29131 - DNA, 633 bp, Homo sapiens
tgttttaaaaattgatacaaggggcctcatactaaaaagtataagtatgtggttctgaatcctagagtggcctaatgtcaggcatccactgatggcaacaatcctaaggccctgctgggtagttcaagcagctggattgtctgaagacagaaggaatttaaaaaggcagagtaacaactacctccagaaacagtgtcaggctaagaggattgaacaaggaaagacaaggaaacacaactaatgggaaaaattgaaaactgtgcttagaaactgtgcttgcaaatatataatcaaaaaggaggggcccamgtgaaggaatctttgatctgtaggcaaattccctgaatgtggaaacagataaaacaggaaatcaaccaaggctgcccttgctgatgtcacaaggagtacccaggagtaattgagtgattactacacccaggagtaccacagagtaattaagtgagccagtgcatccttctctatcctgataaatatgaatgtaatgagccaggaacaaaatgagttaaccaagaagatactgaatacacattcatgttattacctcaagggcctattaactcattctttgtagctgccataacattatgtgttaagtcttaaaagaagacacgg

SEQ ID NO: 29132 - DNA, 867 bp, Homo sapiens
aaagagataaaggcttttttcaaaagaaaatattttaaagtataaagggatggctccccctgcctctcccaacacacacacacccaccccacaatgtccttcaggggtgattctgccccagcgagatcctgccatttgaaacagcagactctctccatttttaaagtggtctactttacgggggtgggggtgaggggtgttggtcattaggaattaatttatattagtttaacaaaacaaagaatctttcataaaaattttatttttttgagacaggctctggctctgttgcccaggctaaagtgcagtgacataatcacagctcactgcagcctccacctcccgggctcaagccatcctcccacctcagcctcccaagtagcttggactacaggaaggcaccatcatgcctagctaatttttgtatttttttgtagagacrgggtttcgccatgttgccgaggctggcttttaactcctgagctcaaatgatctgcctgcctcggcctcccaaagtgctgggattacaggcacgagccactgtaccacgactaaaataaagaatcttaacactcagttttgctttgggttggacggaggctggcaatttctcatcatgtctgcattattttcataaaacctcctccccttacagagtaaggaggattctttgtttttataaagtgtcatcttacctcggttaagggatcagttattgtacaggaatctttcctaagtattaaaaggtaattctaattagttaaatcctgatgcaggttgcaacatgaatgaaccttggaaacatgctgagtgaaatgagccagctgcaaaaggacaaatcctgtaaggtttcacttacatgaggga

SEQ ID NO: 29133 - DNA, 867 bp, Homo sapiens
aaagagataaaggcttttttcaaaagaaaatattttaaagtataaagggatggctccccctgcctctcccaacacacacacacccaccccacaatgtccttcaggggtgattctgccccagcgagatcctgccatttgaaacagcagactctctccatttttaaagtggtctactttacgggggtgggggtgaggggtgttggtcattaggaattaatttatattagtttaacaaaacaaagaatctttcataaaaattttatttttttgagacaggctctggctctgttgcccaggctaaagtgcagtgacataatcacagctcactgcagcctccacctcccgggctcaagccatcctcccacctcagcctcccaagtagcttggactacaggaaggcaccatcatgcctagctaatttttgtatttttttgtagagacagggtttcgccatgttgccgaggctggcttttaactcctgagctcaaatgatctgcctgcctcggcctcccaaagtgctgggattacaggcacgagccactgtaccacgactaaaataaagaatcttaacactcagttttgctttgggttggacggaggctggcaatttctcatcatgtstgcattattttcataaaacctcctccccttacagagtaaggaggattctttgtttttataaagtgtcatcttacctcggttaagggatcagttattgtacaggaatctttcctaagtattaaaaggtaattctaattagttaaatcctgatgcaggttgcaacatgaatgaaccttggaaacatgctgagtgaaatgagccagctgcaaaaggacaaatcctgtaaggtttcacttacatgaggga

SEQ ID NO: 29134 - DNA, 867 bp, Homo sapiens
aaagagataaaggcttttttcaaaagaaaatattttaaagtataaagggatggctccccctgcctctcccaacacacacacacccaccccacaatgtccttcaggggtgattctgccccagcgagatcctgccatttgaaacagcagactctctccatttttaaagtggtctactttacgggggtgggggtgaggggtgttggtcattaggaattaatttatattagtttaacaaaacaaagaatctttcataaaaattttatttttttgagacaggctctggctctgttgcccaggctaaagtgcagtgacataatcacagctcactgcagcctccacctcccgggctcaagccatcctcccacctcagcctcccaagtagcttggactacaggaaggcaccatcatgcctagctaatttttgtatttttttgtagagacagggtttcgccatgttgccgaggctggcttttaactcctgagctcaaatgatctgcctgcctcggcctcccaaagtgctgggattacaggcacgagccactgtaccacgactaaaataaagaatcttaacactcagttttgctttgggttggacggaggctggcaatttctcatcatgtctgcattattttcataaaacctcctccccttacagagtaaggaggattctttgtttttataaagtgtcatcttacctcggttaagggatcagttattgtacaggaatctttcctaagtattaaaaggtaattctaattagttaaatcctgatgcaggttgcaacatgaatgaaccttggaaacatsctgagtgaaatgagccagctgcaaaaggacaaatcctgtaaggtttcacttacatgaggga

SEQ ID NO: 29135 - DNA, 867 bp, Homo sapiens
aaagagataaaggcttttttcaaaagaaaatattttaaagtataaagggatggctccccctgcctctcccaacacacacacacccaccccacaatgtccttcaggggtgattctgccccagcgagatcctgccatttgaaacagcagactctctccatttttaaagtggtctactttacgggggtgggggtgaggggtgttggtcattaggaattaatttatattagtttaacaaaacaaagaatctttcataaaaattttatttttttgagacaggctctggctctgttgcccaggctaaagtgcagtgacataatcacagctcactgcagcctccacctcccgggctcaagccatcctcccacctcagcctcccaagtagcttggactacaggaaggcaccatcatgcctagctaatttttgtatttttttgtagagacagggtttcgccatgttgccgaggctggcttttaactcctgagctcaaatgatctgcctgcctcggcctcccaaagtgctgggattacaggcacgagccactgtaccacgactaaaataaagaatcttaacactcagttttgctttgggttggacggaggctggcaatttctcatcatgtctgcattattttcataaaacctcctccccttacagagtaaggaggattctttgtttttataaagtgtcatcttacctcggttaagggatcagttattgtacaggaatctttcctaagtattaaaaggtaattctaattagttaaatcctgatgcaggttgcaacatgaatgaaccttggaaacatgctgagtgaaatgagccagctgcaaaaggacaaatcctgtaaggtttcacttacatraggga

SEQ ID NO: 29136 - DNA, 528 bp, Homo sapiens
tatttctaaaggccttttttcaaagtgaaataattttagtggcaagtgagtttgttttcacaaatttaaaaaatacctgtcagtaggccaggcatggtggctcatgcctgtaattctaccactttgggaggctgaggtgggtggatcatttggggccaggagttcgagaccagcctggccaacagtctctactaaaaacacaaaaaattagctgggcaatggtggtgcacgcctgtagtcccagctacttgggaggctgaggcacgagaatcacttgawcctgggaggtggaggttgcagtgagctgagatggcaccactgcactccagcctgggcgacagagtgagactgtctcaaaaaaaaagaaaaaaattctgtcagcaaaagacataggtctaaagcagacaaaagcactcatgtatagaagaaattaaatgaagccatttttcgttagtcctggggtactgaatctaacaatagaaaccaaactagaaatactaaatagttaccaggacttcagtcatccaa

SEQ ID NO: 29137 - DNA, 528 bp, Homo sapiens
tatttctaaaggccttttttcaaagtgaaataattttagtggcaagtgagtttgttttcacaaatttaaaaaatacctgtcagtaggccaggcatggtggctcatgcctgtaattctaccactttgggaggctgaggtgggtggatcatttggggccaggagttcgagaccagcctggccaacagtctctactaaaaacacaaaaaattagctgggcaatggtggtgcacgcctgtagtcccagctacttgggaggctgaggcacgagaatcacttgaacctgggaggtggaggttgcagtgagctgagatggcaccactgcactccagcctgggcracagagtgagactgtctcaaaaaaaaagaaaaaaattctgtcagcaaaagacataggtctaaagcagacaaaagcactcatgtatagaagaaattaaatgaagccatttttcgttagtcctggggtactgaatctaacaatagaaaccaaactagaaatactaaatagttaccaggacttcagtcatccaa

SEQ ID NO: 29138 - DNA, 528 bp, Homo sapiens
tatttctaaaggccttttttcaaagtgaaataattttagtggcaagtgagtttgttttcacaaatttaaaaaatacctgtcagtaggccaggcatggtggctcatgcctgtaattctaccactttgggaggctgaggtgggtggatcatttggggccaggagttcgagaccagcctggccaacagtctctactaaaaacacaaaaaattagctgggcaatggtggtgcacgcctgtagtcccagctacttgggaggctgaggcacgagaatcacttgaacctgggaggtggaggttgcagtgagctgagatggcaccactgcactccagcctgggcgacagagtgagactgtctcaaaaaaaaaraaaaaaattctgtcagcaaaagacataggtctaaagcagacaaaagcactcatgtatagaagaaattaaatgaagccatttttcgttagtcctggggtactgaatctaacaatagaaaccaaactagaaatactaaatagttaccaggacttcagtcatccaa

SEQ ID NO: 29139 - DNA, 584 bp, Homo sapiens
cttacaaattgtctaactacctactggtctcctcttaaagggaaacactgtttgagatttactcccttttaatctacactttaaaggtttcccttcaactcctgtaatcagcttatataggtcagtcgtaagatcccacatctgagcaccagtttcattaaaagatcaacttcataaatcacaatcaatgggaataaacataaaatgaacaaagagcttttttttttttggtggaaataacttcaattgaaagaaatgctgctaaaagatcttgcaacattgctctgttttcctctagaatttactatttcaataagaaatctgatgttgatctgggtatgtctttctgtgactgaaattctccccctgtctcctttctcctttcttttctttcctatttggtgtgtgtgtgtgtgtgtgtgtgtgtgtgtgtgtgtgtgtgtgtgtgwgagagagagagattcagagaaggtagtataaggtttggaattaattggacattagttagagtcccagtaaaaccatttgtgaattttgtgaacaagagaatttagttaatctctctaatccttagttttctcatc

SEQ ID NO: 29140 - DNA, 584 bp, Homo sapiens
cttacaaattgtctaactacctactggtctcctcttaaagggaaacactgtttgagatttactcccttttaatctacactttaaaggtttcccttcaactcctgtaatcagcttatataggtcagtcgtaagatcccacatctgagcaccagtttcattaaaagatcaacttcataaatcacaatcaatgggaataaacataaaatgaacaaagagcttttttttttttggtggaaataacttcaattgaaagaaatgctgctaaaagatcttgcaacattgctctgttttcctctagaatttactatttcaataagaaatctgatgttgatctgggtatgtctttctgtgactgaaattctccccctgtctcctttctcctttcttttctttcctatttggtgtgtgtgtgtgtgtgtgtgtgtgtgtgtgtgtgtgtgtgtgtgtgtgagagagagagattcagagaaggtagtayaaggtttggaattaattggacattagttagagtcccagtaaaaccatttgtgaattttgtgaacaagagaatttagttaatctctctaatccttagttttctcatc

SEQ ID NO: 29141 - DNA, 538 bp, Homo sapiens
ttttaatgctacttttctccctttcagctgttagcacaaggggtgtaccattgtagcacattacacttgaaaacgtctgtctaacacccacagatgacctctgagatgacttttattttccttcaagggaatcattattttcaagaatcttaaacagtttagttgattgaatcaaccatatcattattttaataggtcattaaaataaatgaaaaaaatcaaatgattataaaacctgtgttttctgcaatataatcacagccagaagctccatgtgtatataataaaataaggccgtgacacaactatcacataatgtcactcaaatattctttgaaaccgggagagtataaataaataaattagttagttgaaaaaaaaagtctagctaacacagccaagggatgagagcatgctgtgatggaaagacattaaactaagatttaggaaaacagggcgcttgtctccgctctcccagtctcrgtctgtgactgagttttcctatgctaaatagaaagatttctggctctacctctgg

SEQ ID NO: 29142 - DNA, 512 bp, Homo sapiens
gtgaacatcttttaagttatctaataatayaaatacatacataaaatcacaaagagcgtatgtgcacaaattgtgtgtgtacccaaaacaaaatttagaagactatcactttacccaataaaattcatggtaattatttcatattacagaaaaaatatataaatggtaaatttaagatgaaactatgaatatgaaccctttataaagtataatttattatcgtcctgcctcaacagaataacaactagaaactatcttacgcctattcgactgaacactatgctaagctctctgactttctatactctagagactaaattttgaaagtctaacattatcaaaaagatacagtaagatctcatcaaaacagaattaagctatctacaacaagaatcagaaagcagtcttaggaggtaaaatttgtgtctcagagaataaataagtgagataacagaggcctccatcatcatctccactaaataactgtcatttcatttgttatcaataacaaa

SEQ ID NO: 29143 - DNA, 481 bp, Homo sapiens
tgtccaygctataccaggaataaagagattttcaaaactgtacatgtattatgatcttaccttcttttgatgtatgtaatttagcattttactagagaacaaattggaaggaataaacaacaaaatattaacagtaattacagcgagacttttactatgttcttttatatttttatcatgttttgagctttgtataatcagataagaataacttaaaaagaatacaaacaatcaaaaaagaagtaactcttaaagtaacagcactgaggaataccagtaattaccacgatgagattgagaaggttgcagaaaaccaaattttataatttctgaggttcctgctctaaaattttgtggtttaatggactgttacatgagtccttttgcagaaactattttaaccacactagcacatggaaaatgctggtattatggtttctcctaccccctttattattgcagacatgattatgtcccaaaa

SEQ ID NO: 29144 - DNA, 867 bp, Homo sapiens
cagtgggtccctgcttttaaaggtctgggaaggaatcagaagcctggggcctcaattttaaaatattcattcaaaaacttctagaatatggtgcaggccaaacagggtacatctgtggcccraatctggcctgcgggtcaccagtttgcaatctctgttccaaagttaaggcacccggtatctttatactgcagagttttgaactgtgttgtatggattacgtagcagtcgtggaattaaaactggtcacaacagcaggagagcaggttcaaggccagcatttgttctgagtggctggtgtggagtaccacactgaaagtaggggtttttgaatgttattttgcctacagtcagaacatttacatacttaatggagtgcatagaaattgatactgagaaattaattattgcctgtaatatttggatttagtttgtagtaaatatcctacaaaaatttggaaccctcccatgcaacctgtataaaaacgctccgggtgtagaggagcctcagcagaggagatggatttggcggtacaacgagaatcagtcttgaaggccaggacgcattccccaggggcctaacaggaggctcatgaacatctgcagtgatttattgaaccagtgctggaaggaaaatgacaaaatatttgagtcaacaataaaacaattatgcagatgttttacgaagctctgttccactgtttcgcaatctggggtggtacacatgcaggtttttattttttaattgacttgatttttagagcaagtttaggttcacagcaaaattgtacagaaggtaccaagagttcccacgtacctcttctcgggcacacgcatggcctctcccatgatctctacatcccgcac

SEQ ID NO: 29145 - DNA, 1048 bp, Homo sapiens
tggaataacaaaagatgcaaatatgggggttcctatagtggcttcaacatgacttcttttctcagggctcataggactggagggtaaactgaggctttttttttcttttttgtttggcaggggatgtgttagaaatagagactcttcttcagcccagctggtcaggggaaagcaaagtttagaacccacacagtacctatgctgctacttttttttttttttttttttttttttttggaggcaaagtctcgctgtgtcacccaaactggagtacagtggtgcgaactcggctcactgcaacctcctcctcctgagttcaagtaattccctgcctcagcctcccaagtagctgggattacagtgcccaccaccatgcctggctaatttttgtatttttagtagagacagggtttcaccatcttggccaggctggtcttgaactcctgacctcgtgatccacccgccttggcctcccaaagtgctaggactacaggcatgagccaccacgcccggcctatgctgctactttctatcatgctggtaaggccaagaacagaattaagacctcactgctctccctcaacatgcttagggttcttttgttgtccagctatgttccctccttccctccatttcctgtcccaaaaggacatcagaattctcctggctccctgctgtgaataatgagaggaaggaacactggttcttcacatgcctcgcagatctcatgttccctgtgaagtctcccatgagtccccagcagggttccccttcctcttattgtccttgccactggcttgaacttgtcagtttgatctgtcgtaggataaggagcaggacattagtctatggggaggaaaaaactgggaacaaaggataaaagatagagggagcagattgcagcccaaagctacacgtcaatggaacgggctgtctcctgacgygagcagaagctgaacagtagccgcctcggaggagatttgggcatcaggggctaggtagaaagaggtgatcaccgttgtctatcagatggtaagttcgagggcag

SEQ ID NO: 29146 - DNA, 753 bp, Homo sapiens
gctagaaagccgccgccgctgccgcctccacrggccagcgccccgctctccgcagccgcctccgagtcagtggcgccaccggagcagccgcggcgcctgttgggtaacagtcaccagcggcccgcccaccgcctgtcgggcagtatgaaaagtgcggcactgtgattggcccagcctgtgggcgcgaaagcgcgggaaggaggccgcctgcttgaatgttgcacgacgtagaagagattgtgggcgtctgtcttggagcgcagagcggcccccaagactttcccgctttgcagcctgaaaccctcgtctggaccgcgcagctctgcaaagtcaccatatgaaaatacttggaagcgctgcttctgccagcagaggccagactgcccctcgcttgggtccggtgcaggccgagtcctccgccctcagaggcgggacaggggcccggcctccttgccgaactgtttcccaggccgcgtggtccctcccggggtttggcttgtcctctgcccatcttctagaaataccgttagcagggtcgggccgcgactagggtgaggccagtgaggcatttgtcatgagcacaggatttcagaggctgccaaaatagcaatcaagataaataatattttaatgcagtctctaaaaaaagtcaaaagtaatgaaaaaattcagtcctattttttcctttcgcctcagactcttaaaatggctccacagggtacattgttactggtcctgtctttatttaaaatt

SEQ ID NO: 29147 - DNA, 554 bp, Homo sapiens
cacctttccatctttggaaccccactatatacccttatttctacatgttctgtactttcctgggaaggggaagtagaaaagggaagaggttaatgttctttctggaatgtccatccacaatgtggtkattctattggagaggtaaacaagactcctgtaatcagaagggacagctgatggatctggataagaaattcgaaatctcgaagcttatgaatgtgcaatagatgttatttaatgctcattgtaaattcagattttgggcttctttatacttaaaggaggctttgaattttaaggctaaaatagaatcatgcatcttctttggagtgtttcttaccgaattattttttattttgctggaagcttttattgaagtttaaactaaaaaaaaaaaacttaaaatatgtaccaccactggcctatgttaagctaaatatcaaagtataaatattctaagactaagtataataactgagtaaattaatccaccattgaggtagatctatttgacctgggaatagatctgcaatctaaaaggagtatgttttctg

SEQ ID NO: 29148 - DNA, 554 bp, Homo sapiens
cacctttccatctttggaaccccactatatacccttatttctacatgttctgtactttcctgggaaggggaagtagaaaagggaagaggttaatgttctttctggaatgtccatccacaatgtggtgattctattggagaggtaaacaagactcctgtaatcagaagggacagctgatggatctggataagaaattcgaaatctcgaagcttatgaatgtgcaatagatgttatttaatgctcattgtaaattcagattttgggcttctttatacttaaaggaggctttgaattttaagkctaaaatagaatcatgcatcttctttggagtgtttcttaccgaattattttttattttgctggaagcttttattgaagtttaaactaaaaaaaaaaaacttaaaatatgtaccaccactggcctatgttaagctaaatatcaaagtataaatattctaagactaagtataataactgagtaaattaatccaccattgaggtagatctatttgacctgggaatagatctgcaatctaaaaggagtatgttttctg

SEQ ID NO: 29149 - DNA, 591 bp, Homo sapiens
ctcactccaagactgacccattctttgacctcagataaaacacagcttctcttcagctcagcctcagggcacagtgctgtccatagttgcaactaagcttaataaaagagctttgttactgaggagaagagattctgtaaaagccttaatattcgatggatagcaaaagtgaatggtagagaaygttagctcttttcatgttgactggcacagcgttttctatgtctcttctctggagagaacagagtgatcctctcatgatggatttctcttttgttacagatgacaaaccaaaggaacaactgcagaggagtctccctaaagcaactgagacagactgcaatgacaaatgctcacacaacaccgaggtcggggagacgcggagcagtactccagaaatgcctgccgtgtctgcgttctttagcctcgctgcgctggctgaagtggcagccatggaaaatgtgcacaggttagtggtagaaggtggaaggagaaagcaacatggaaaccagatcaacctctttgatgtgatttgtgacattttttacagggcattggggttcaaacttggttcaagagcactattggtta

SEQ ID NO: 29150 - DNA, 544 bp, Homo sapiens
ttaaaaccagcagtccagcctctgttgcctgtcaagcaagtctgtgtaggccagattgattcaaaccagatctacttccaggccctgtttcacaccgtttccaataggatatgaatcagacaagataccatcaaccaagcattcagtcaggaaacagggccctggtcagacttttggggtgacctgccttacacggccaggatccagctctagtgacagcatctattataatgctgaggaatgggaacacactaaaaactcacaaagtgtgctttggagccaggcggccggcagccatgggaagcgtgctaagtgtggaaattccttcaagcctttcaagcaactcaaagtcataagctaaggagagayttcaaaactccaaagagaaattccactttccttttcctcagctccagtctttccattccaaacacgagtcctgctggtttgagccacttcatgaatgtgggattgttagggtcgttgcagagacttgccactatttttcttaggttaaaaaaaaaaacaaaaaaacaatttggca

SEQ ID NO: 29151 - DNA, 1102 bp, Homo sapiens
cgttgagttgctccatctgcagggtgtaccaggcctccacctccctcaggctgttctccaagctggccttcagatttctcatggagtccaggtcagtctccgaggactgggctgtatgttacagctcatctgttgagagcatcatctcaacagctccaaccttggccaactgcatggtgaccactgtggtactctccttaatctgctgagaccagtatttgtccagcccttctcagttcttccgagccagctcgtcatattgggcccagatgtctgccatgatcttggcaaggtcctgagatttgggggcatctacctccaagatcaaaccagagctgacaatctgggcttgtaggccttttacttcctcttcatggttcttcttcattaagagcagctcctccttgagagtctcgatctctgtcttcagctgcagctgagtgacactggtgtcatcaatgaccttgcagagcccatagatgtcgctctccacagactggcgcatggccagctctgtgtcatacttgactctaaaggcatcagcagcaagatgggcattgtcgatctgcagaacaatgtggacattgtccacagtatttgtgaagatatgagccctcaggtcctcgatggtcttgaaataatggacccagtctctgacctggggtcctgtcttctccaggtgctcccagattttactctccaccttccagttcttggtctctgggctcctcactctgtccaggtagtaggccaggcggtcttcaggctttgcatggtctccttctcattctggatgcctcccattcctgccagacccctagccatccctccggccaggcccctggaccccaagcagccccggaagctggtggagcaggacatggagatccgggaaccagagcccccagtgcctgcatagacgttggttgkgctgctgaccagccaggtgccatagctgggcacctggatggagcccagggatgggtaggtagttggtggacaaggtggagcgagtggtgaagctcatgctgtctggggaagagagcgggaagagaggactcaggctttgctgataaccttgagttttgtatggtgtgagatg

SEQ ID NO: 29152 - DNA, 771 bp, Homo sapiens
acttgcgccttgggactgggcctgagaagggaggagttattcatctccttaagctttcaggccccggggagaatcttataccgcgtagctaggattacagacacatgccaccacacccagctaatttttaaagtttttgtagagatggcatcacactgtgttgcccaagctggtctcaaactcctggcctcaagtaatcctcccacctcagcctcccaaagtgctgggattacaggcatgagccaccacacctggcctcatccattatttaatttaaggctttatatgctacgaagctataggtttttaatagaaagtctgttttacatggttgtaattatataattttgcattctttttccatactataaaatattttaatgttataaattctgtacgtaattttagtgaacatgctataatttacataaaattccttatcattggacacctaacaatagagaattgattgaataaatggtagtgcattcatataataaaatattaatcagccatttaaaaaggtggattagaagtatacttcttaacatataaacatgttcacgattatgtataaaatgaaatgagtgtacctamatatcaactacctctcaagtctgtctggacattttcctacctcagtctcagcaactttcaaactttaatgagcctcccaatcaccaaaggaacttgttaaatgccagtttcacgctttaccccaagagtttgactgagactggggctcaggaattggcacttttacaaggatcc

SEQ ID NO: 29153 - DNA, 528 bp, Homo sapiens
atttgtttatttttttttctttttttttttattggaacattaattaggttttattttcactttttgtttccacagtaacatgtatgggattaggttacagtgtttatttgtccccaatcttttatttatttatttttttattattattttttaattgattgactttttattttttattttatttttttttaaatttatttatttatttatttattttttattgataattcttgggtgtttctcacagagggggatttggcagggtcataggacaatagtggagggaaggtcagcagctaaacaagtgaacaaaggtctctggttttcctaggcagaggaccctgcggccttccgcagtgtttgtgtccctgggtacttgagattagggagtggtgatgactcttaacgagcatgctgccttcaascgtctgtttaacaaagcacatcttgcaccgcccttaatccattcaaccctgagtggacacagcacatgtttcagagagcacagggttgggggtaaggtcatag

SEQ ID NO: 29154 - DNA, 528 bp, Homo sapiens
atttgtttatttttttttctttttttttttattggaacattaattaggttttattttcactttttgtttccacagtaacatgtatgggattaggttacagtgtttatttgtccccaatcttttatttatttatttttttattattattttttaattgattgactttttattttttattttatttttttttaaatttatttatttatttatttattttttattgataattcttgggtgtttctcacagagggggatttggcagggtcataggacaatagtggagggaaggtcagcagctaaacaagtgaacaaaggtctctggttttcctaggcagaggaccctgcggccttccgcagtgtttgtgtccctgggtacttgagattagggagtggtgatgactcttaacgagcatgctgccttcaaccrtctgtttaacaaagcacatcttgcaccgcccttaatccattcaaccctgagtggacacagcacatgtttcagagagcacagggttgggggtaaggtcatag

SEQ ID NO: 29155 - DNA, 528 bp, Homo sapiens
atttgtttatttttttttctttttttttttattggaacattaattaggttttattttcactttttgtttccacagtaacatgtatgggattaggttacagtgtttatttgtccccaatcttttatttatttatttttttattattattttttaattgattgactttttattttttattttatttttttttaaatttatttatttatttatttattttttattgataattcttgggtgtttctcacagagggggatttggcagggtcataggacaatagtggagggaaggtcagcagctaaacaagtgaacaaaggtctctggttttcctaggcagaggaccctgcggccttccgcagtgtttgtgtccctgggtacttgagattagggagtggtgatgactcttaacgagcatgctgccttcaaccgtctgtttaacaaagcacatcttgcacygcccttaatccattcaaccctgagtggacacagcacatgtttcagagagcacagggttgggggtaaggtcatag

SEQ ID NO: 29156 - DNA, 576 bp, Homo sapiens
agagagagagagagagagagagagaggcaggtgactgccgctgacaaatccagccaatcttgtttttactgaccccaagcccagggttctttcaaccatcccagctttgtttctctagggtctgtgtgacatttttgaagggaagagacttggccagaaagggagggaaagcaggacaagattagggcatctgtagtggtgagtaaggcccagagtagtaagctgaataacgaccacccaaagatatcaagtcctaaccctggaatttggaaattttaccttattttgggggtggggaggaaggtctttgcaagaagtaattgaatggaggatcttgagatgaagagatgacccctgggttaacagggtgggccttaaatgtcatcacragtttccttacaaggcagaggcagaggaagataacacagacacacggaggagaaggcaatgagaagatgaggcagagggagatgcaggcactagatgctaaaggatgcgacagtcaccagaagctggaagaagcaaggaatgcattctcccgtagaccctccagacagagcacagctctgccaacac

SEQ ID NO: 29157 - DNA, 531 bp, Homo sapiens
caagaagtggcattttatggggaatgtawcaaccatagttcaaggtctgacctttgttttggcagctttagaaaattttctctgatttaggagaattaacatacactaaccaagttcacaagaaactaatatataaaccaaaatatcaacttattctatttctaggggtatgattgaaaccaactttgcaaagattatgacagtgagataagtctagcatggtttatttcatcttgcttctagcctcagaggctggcgctcattcctgggcatagtccaagctaaccatgggaaaaatttagtttatagtttaactttgaagcaaggatgataacagtccctccttaaaactgatcccttccttgctcccaccgaaaactgcctttgtaaaagtaatgaaaggccatgagattaggattatgggagaggctcaattctgcttacatgcaggcatagtttctataatcccctactgctcagaacctctggccagaggtcacaagatttgtgacttcctcagttgctcctata

SEQ ID NO: 29158 - DNA, 2305 bp, Homo sapiens
tttgacaataacaacatcctggaggtctccaatctaggagagcagcaactatttccacacctggttattattccatttcatattattatgccaagatgggacaagagccaaacttggacaaaggatttagcagccactgtgaacaacactgctgaaaagaaaacttctggcctagtgtgcaatccgtacttagcacactcttctgtgatttttgctacctggcccctgtcctgccttctttcccagcaccacaggaatgatgcagtaccctccaaattgggagtttccaagccagaattagagtttactaagtaaaggccaatatccaccagctgggaaacaactaagtaactttccttaagtgcgtgctactttcctgagtccagcaggttgcctgaaaaagaaaagaaggaaatagccctaaaaattgtgtcagtttcttatttgtggcatatgtaaaatatcatgtgctcttccaaaaaagtttggacctgtcatgatccttttttcatcttgctgcatctgagggatcattggggatgccctgaattttcagttcctttgggcaaacacaaagacaagctcattttttgttccataaatgctttttttttgagacggagtctcactgtcacccaggctagagtgcagtggtagaatctcagctcactgcaacctccacctcctgggttcaagcgattctcctgcctcacctcccgagtagctgggatgacaggcgtgcgttacaacgcccggctaatttttgtatttagtagagacggggtttaactatgttggccaggctggtctcaaacttctgaccttgtgatccgcctgccttggcctcccaaagtgctgtgattacaggcgtaagccactgcgcctggccactttttttttttttttttaagtccagcaggtagaatgtaaatcttatgctggaatacaacgataatgaccgcttgctgaaagctaatgtataccagctactaatccaagtgtttcctgtatgttacctcatttgcttcccacaacactgtttcaaaggtgaggaaatggaagcttaatgaagttaaactacttgcctgaaatcacccagctattaggttgaaacaagatttcaactcaggatcccaaaccaaccttcttaaccactctgttatttccttcctaatgttgccttaaaacatataaaagtgcctggataccactagggtagccagaactatttgtcaattcttactaaatttgaataatctattttgattccacagaaaatctataaacctgcttattaactggcacaacatctgcaccacagggaactgtgttttaacactaactcattctaagtcatttaccatgtacctgactacgaatattactagtggaaatcataatgtctggcagattgctatcatataaattcctggccaccaactcctactgcatgctgttactgctgtgcttcctgttgatgctactgtgttattactgtgtccagggtccatttcaaatcctttccattctgttctgtggcaggcagcgcctatgattgttcccaatgatcatgccttctgctatttrtgcctttgttcattactttcctttgaatgtaggctgcccctggtggcttgcttctaaaatatagaatatggcaagagtgatggaatgtcacttctgagattggaatacgagaaactttggtttctgtcttgctcaccctttcttgccctctctgatggactctagctgccatgtcctgtggagagcctggcatgaacagaggccttgcggagaactgaagccttcagtccaagagccagggaggaactgaattctgtcaagaaccacttgagtgaccttggaagcagatcctttcccattggagccttgagattaaagccaccttacctgacaacttgataggagccttgtgagtgaccctgaaagcccaactatgtgacacttagatttctgacccacagaaagtgtgaaataataatattgttttaagccactaggatttggggtaattggttacatcgccttcgataactaatacatcttccagtctcaaacttcttcatatccaacacataaatactttttctctcctattcttgaatttttagtagatgacctgaccatctatttcaggaagaaaatagaggtcttcagtttgataggaatttccttaacttcttgaaagcaaatctacactcctgataactttcaatccattaatccctctcttgtacaattagctccttttcctcttgtacttttattttcttcctctgct

SEQ ID NO: 29159 - DNA, 2305 bp, Homo sapiens
tttgacaataacaacatcctggaggtctccaatctaggagagcagcaactatttccacacctggttattattccatttcatattattatgccaagatgggacaagagccaaacttggacaaaggatttagcagccactgtgaacaacactgctgaaaagaaaacttctggcctagtgtgcaatccgtacttagcacactcttctgtgatttttgctacctggcccctgtcctgccttctttcccagcaccacaggaatgatgcagtaccctccaaattgggagtttccaagccagaattagagtttactaagtaaaggccaatatccaccagctgggaaacaactaagtaactttccttaagtgcgtgctactttcctgagtccagcaggttgcctgaaaaagaaaagaaggaaatagccctaaaaattgtgtcagtttcttatttgtggcatatgtaaaatatcatgtgctcttccaaaaaagtttggacctgtcatgatccttttttcatcttgctgcatctgagggatcattggggatgccctgaattttcagttcctttgggcaaacacaaagacaagctcattttttgttccataaatgctttttttttgagacggagtctcactgtcacccaggctagagtgcagtggtagaatctcagctcactgcaacctccacctcctgggttcaagcgattctcctgcctcacctcccgagtagctgggatgacaggcgtgcgttacaacgcccggctaatttttgtatttagtagagacggggtttaactatgttggccaggctggtctcaaacttctgaccttgtgatccgcctgccttggcctcccaaagtgctgtgattacaggcgtaagccactgcgcctggccactttttttttttttttttaagtccagcaggtagaatgtaaatcttatgctggaatacaacgataatgaccgcttgctgaaagctaatgtataccagctactaatccaagtgtttcctgtatgttacctcatttgcttcccacaacactgtttcaaaggtgaggaaatggaagcttaatgaagttaaactacttgcctgaaatcacccagctattaggttgaaacaagatttcaactcaggatcccaaaccaaccttcttaaccactctgttatttccttcctaatgttgccttaaaacatataaaagtgcctggataccactagggtagccagaactatttgtcaattcttactaaatttgaataatctattttgattccacagaaaatctataaacctgcttattaactggcacaacatctgcaccacagggaactgtgttttaacactaactcattctaagtcatttaccatgtacctgactacgaatattactagtggaaatcataatgtctggcagattgctatcatataaattcctggccaccaactcctactgcatgctgttactgctgtgcttcctgttgatgctactgtgttattactgtgtccagggtccatttcaaatcctttccattctgttctgtggcaggcagcgcctatgattgttcccaatgatcatgccttctgctatttatgcctttgttcattactttcctttgaatgtaggctgcccctggtggcttgcttctaaaatatagaatatggcaagagtgatggaatgtcacttctgagattggaatacgagaaactttggtttctgtcttgctcaccctttcttgccctctctgatggactctagctgccatgtcctgtggagagcctggcatgaacagaggccttgcggagaactgaagccttcagtccaagagccagggaggaactgaattctgtcaagaaccacttgagtgaccttggaagcagatcctttcccattggagccttgagattaaagccaccttacctgacaacttgataggagccttgtgagtgaccctgaaagccyaactatgtgacacttagatttctgacccacagaaagtgtgaaataataatattgttttaagccactaggatttggggtaattggttacatcgccttcgataactaatacatcttccagtctcaaacttcttcatatccaacacataaatactttttctctcctattcttgaatttttagtagatgacctgaccatctatttcaggaagaaaatagaggtcttcagtttgataggaatttccttaacttcttgaaagcaaatctacactcctgataactttcaatccattaatccctctcttgtacaattagctccttttcctcttgtacttttattttcttcctctgct

SEQ ID NO: 29160 - DNA, 2305 bp, Homo sapiens
tttgacaataacaacatcctggaggtctccaatctaggagagcagcaactatttccacacctggttattattccatttcatattattatgccaagatgggacaagagccaaacttggacaaaggatttagcagccactgtgaacaacactgctgaaaagaaaacttctggcctagtgtgcaatccgtacttagcacactcttctgtgatttttgctacctggcccctgtcctgccttctttcccagcaccacaggaatgatgcagtaccctccaaattgggagtttccaagccagaattagagtttactaagtaaaggccaatatccaccagctgggaaacaactaagtaactttccttaagtgcgtgctactttcctgagtccagcaggttgcctgaaaaagaaaagaaggaaatagccctaaaaattgtgtcagtttcttatttgtggcatatgtaaaatatcatgtgctcttccaaaaaagtttggacctgtcatgatccttttttcatcttgctgcatctgagggatcattggggatgccctgaattttcagttcctttgggcaaacacaaagacaagctcattttttgttccataaatgctttttttttgagacggagtctcactgtcacccaggctagagtgcagtggtagaatctcagctcactgcaacctccacctcctgggttcaagcgattctcctgcctcacctcccgagtagctgggatgacaggcgtgcgttacaacgcccggctaatttttgtatttagtagagacggggtttaactatgttggccaggctggtctcaaacttctgaccttgtgatccgcctgccttggcctcccaaagtgctgtgattacaggcgtaagccactgcgcctggccactttttttttttttttttaagtccagcaggtagaatgtaaatcttatgctggaatacaacgataatgaccgcttgctgaaagctaatgtataccagctactaatccaagtgtttcctgtatgttacctcatttgcttcccacaacactgtttcaaaggtgaggaaatggaagcttaatgaagttaaactacttgcctgaaatcacccagctattaggttgaaacaagatttcaactcaggatcccaaaccaaccttcttaaccactctgttatttccttcctaatgttgccttaaaacatataaaagtgcctggataccactagggtagccagaactatttgtcaattcttactaaatttgaataatctattttgattccacagaaaatctataaacctgcttattaactggcacaacatctgcaccacagggaactgtgttttaacactaactcattctaagtcatttaccatgtacctgactacgaatattactagtggaaatcataatgtctggcagattgctatcatataaattcctggccaccaactcctactgcatgctgttactgctgtgcttcctgttgatgctactgtgttattactgtgtccagggtccatttcaaatcctttccattctgttctgtggcaggcagcgcctatgattgttcccaatgatcatgccttctgctatttatgcctttgttcattactttcctttgaatgtaggctgcccctggtggcttgcttctaaaatatagaatatggcaagagtgatggaatgtcacttctgagattggaatacgagaaactttggtttctgtcttgctcaccctttcttgccctctctgatggactctagctgccatgtcctgtggagagcctggcatgaacagaggccttgcggagaactgaagccttcagtccaagagccagggaggaactgaattctgtcaagaaccacttgagtgaccttggaagcagatcctttcccattggagccttgagattaaagccaccttacctgacaacttgataggagccttgtgagtgaccctgaaagcccaactatgtgacacttagatttctgacccacagaaagtgtgaaataataatattgttttaagccactaggatttggggkaattggttacatcgccttcgataactaatacatcttccagtctcaaacttcttcatatccaacacataaatactttttctctcctattcttgaatttttagtagatgacctgaccatctatttcaggaagaaaatagaggtcttcagtttgataggaatttccttaacttcttgaaagcaaatctacactcctgataactttcaatccattaatccctctcttgtacaattagctccttttcctcttgtacttttattttcttcctctgct

SEQ ID NO: 29161 - DNA, 1222 bp, Homo sapiens
aaaataactaaaaatcatcaagtagtagaacagcctgaaggagaaaaaactatacagtggaaaaatcaccaaaggataagcatttggtcaaaagaatattacagtcacttaaagaatattttaacattttgattattccaatacccgggccagatctgggacctgcctccatcttttttgcagttcagwtagcataaagtgtgagtcaatgcctgataacataataatggtaccatctggtcaggttctacctgactcttgggcacattcttgaaattataatacttcaatttccagttataagttaccatgtgtcatttggttacacaacacaccatactctttttttatggacccacacgtgcattgtcactcatcattcactgaagatgtttacatattttacaattttatttatgttaattattttttccaactcaaatgttattcaatcatcaaataatcttcatccatttcttgttttttcttcccctcttatacctcttgtgaatcttattcactttaaaatcccctaaatcacagctcctagattggtaaaggcatccattgctgggaaggtggtgcaccccacctccatgagaaggaagttcttatgctgaggaatcttcacctggctgttcatttgtgtgcgttaagtgtgttgcagtctccgaattctgagccattgtagtaaattattattgaatttgaggaggaggttgtggaaaccctcaacttatagctggtcagtcagaagtaccataggcacagtcttgcaactggcttctaaatgtgggaaagtggagagggggtagtcctgtgagatttaattctttagctgtgaggtctgtgctaactctgggtagctagtattagaaatgatttaagtgttgaataccagttgacgtctggagaatcagtcaactggtggttggtgctaataatcccacagaacaaagtccacatacattatcaaaatgattacaaagatggaattattcttatgactaaaataagtttaaaacaaaaaaagtactatgggtttaattttatttcatattctctatcctaattttatttttaagcctccaagagttttctatttcttaccttcctaaaaattctgccatcttgacatatccaaaactaaaacagaaaaagacaaaatcttcagtcatgggctgtgcaggattcaggtggtgaatgactgattattgtcaag

SEQ ID NO: 29162 - DNA, 660 bp, Homo sapiens
ttatgagaattattcaagatatagtagcaaataaaaaaaatcagtccgaatactatgtgtatgtgtgcatgtgaatattccttgtttaatggaacaatctgggattggtggggttcagacagaaaatggctttatttttgaccaaccgctaccttcagatctcctttccctgcccctaatgatatcttggaaagatgtcttagcctttctgttatttcctgttgtgagtatggtttccataataacagttcattttcagacattaaaagatcttgtccattttaaatgaaaatgttaacctcacactcaattcaaagttcttcttcccttcatgactttcacccctgactgggacttgccacagggaaggaggtgtgtgtggcctatttttttgttttgttttgttttgtttttcactcatcctcccatcccttctttgctgctttggctcttttgaggctgggagggaaaaggagtattagaggaacaagagtaacggtcttacrggtactatcgtaatctgcctacataacaggcatcaaaagcctggctattaaattgggtacagacatggattctatggatattctgaaaaatttccatggtagatagttctgtgatataagcaacgtattccagtgaactcttacaacaaccctt

SEQ ID NO: 29163 - DNA, 1029 bp, Homo sapiens
tgcagcccactgtgcagggatgggggtgccgtgctgcatcccagggctgaggaggattgtttggctggggggctctgtcagtagaatgcagaggggagggtccctcctgatgttcccaggagtgaaggcagctcttcatagtgagtctagtgttgggccctgcactaacacaagcaggtgcccggcaggcgtttgccgagggaggggaagaatgaagcaatgtatggtggggtttctagaaccctccctggggatggcttctccgtggagggtagtgaatcccacagccccacaaggccctcagctggggtgagtttcaggccacagcggctcactggccctgtgacctgatgtgagggccaccagggcagggcttttagatgcttcccctgtgctgtgttctcggaggcctgaacacagaggctcactaaatacttgcttgttgagaaaggccaatccctaaacaaaccactgtgatgggggcttagcagatgccagttgacttagcttgtccccactgtccttggagcctgaggcaaaaggagcttcccctcatgcaccagagacccttcccttctgtgggaagaggaaagggttacctgggagactctgtcctgttctggcacaggaagggggaaaggacatggctagcaagcttggcgggggccactgcatgtggcttgggctgctgcccataggcaggatgtcctctgtggccaggggctggctgatttccgccttgtgtttttgcctctttgctcttctgggaggaggaagctggatctgggagtggggcaaggggaggctggcggctgcaggagggatgcctgaaacccagccttccttggtccgtggcctgaggtgaggccacacagggtggtgatggcctgcccttgctggagcacgtgcagcttctgcgtcatgagcttggagaccagggccacgctctgtgttgtcatctgtgctgcttccctgtccccagggctacttagccccttygggaactgccccttcctgcaggggtgacag

SEQ ID NO: 29164 - DNA, 1288 bp, Homo sapiens
ctcccccatccatctgcagggtgggaagtggggtgagcccgcccccgggctgacacagtgatgagcaatggcaatttgccttaaaaaccctaacgagtggatcattgctgcagaggaacgggagaaccctccagtcccccggcggctgcatgccacggtcggctgtgcagtaaccaggcagagcacaatgacatcccagcctcgctccccagataaaaatttctctccctccacttttgcaaaggtaatgaggaagtaatgaggcttgacttgaattttttcagccctggctttccctccttccccagcaggtcccccaggatggcataagacgctgggtttctataaaagctgtgctgtggctgggtggaggagcggagtcgggctctgtggcctcagaggccgcttgcaagagttcagataaaccgaggcccctttcagcgcgtccgtctgctctgatcggctccactgaataagacgatttgaggatgtgcaggcccggccgcgcagctccctgtttattttaccacttgatggctagaaagccctgacctttcccggctacctttccgccaccacctcccccagccccagccctgttcctctcctgctttttgtctcttttgcagctttactacattcaactgtgcaaatagtaaaatcccaaaaaggtaggcagaagggctgtttgagatcattagcttaatttgagctgaaaggtctttgttgtaagttggggaggggaaggacccggggaccttagctgagtgttctgctggcaagcttgttgagatatgattgcctttgttgtgataatctgaaattaatttgcacttgaacccatctttcttctgggctcaatttaaacactgttataattatgcgccctgcatgaaattgagaacagaccctgatatgacaaagctgaatrttttaattccccaggtacagacggcttttttcctcacttatctcacaaggtaataaaacaaaatgctgcagtgctcatgcttaagagagaggtatttgcctgaggggaaacagagataatcactgtatcgctccacatttcactctgtactttcgcagtgggtcaatcgctttcttttaaagtgatgttaaacttctgctaatattagttgatttgtacctggaacgctattttaaaaaaaaaatgaaaatggtatgttttattctatttcagccgctcctcatctaagaggctttgtctctaacatccatttcctcagatttttttaaacactattaaaggctgcctcctaatatg

SEQ ID NO: 29165 - DNA, 449 bp, Homo sapiens
ttcagctagaactgttttatgagaagacaaaggggctcaagaactgtccagaagacatacaaaatgaaaatatgggagcctttaagctgtggtttcagatgactacttttggaagaagttgctaactctaactccattgccaagaaaacagaagcacagaggagcttgtgattatgcataaggatgccatattaggagtaaattatctcacagaagtaattggtaatgagaaagtaaatggatctgtcaaaaaaaarttgtattaccaacccttaaaattccctcggccttcaaaatttggaaactaaaggatataaatatgcatcttatgtcttaaatcactcttgagaatgggtttatttgaacatcttagatagaagttaagtaacatacctagttataagatcatattgtttaatgaagaaatatggaaggtcaacttgaagatt

SEQ ID NO: 29166 - DNA, 581 bp, Homo sapiens
caaggagaaaactgggcatggtatatatttatttaaatttatctgagttaaaaggctacagtaaagtgaaataggctgagaaatacatcatcatgccagaaggaagagatcctatagaagattaacttttcaaaaattattgattaaataaagaatttagtcatctaaatgaagtggtgtttcaactttgcccacacttmaacttagttcatataattcaaaaatggaaaacaaccaaaattcccactaacataccaatggataaataaattttgataagctacacaaataaatattaaataaaaatactttatatgtatatgcatatgtatatgtatatgtgttcacatgacaccatgaatgaaattcaaaaatgttattttgagtgatgggggccacaaataaaatagtacatgtttgatgattctatttaattattttcacaaagggtcataacaaattgatacttgtggaagtcagaagagtggttatactgggccaggagctatagactaataatgtgtgccaggaaacctaatgggatgctggaaaatttttttggtaaggattagtaggtagca

SEQ ID NO: 29167 - DNA, 568 bp, Homo sapiens
tgacgagttgacaggtgcagcaaaccaacatggcacatgtatacctatgtaagaaccctgcacattgtgcacatgtaccctagaacttaaagtataataatccaaaatttgaaacagttatgaaaagaaaatggtgggccataaactacttttgctttaggccttcacatcatgtagaacattaggagtagggtgaggttcacatttattatgcctgtgtgatcatgtttctactataaatgtgcctggcattctacagaatcaatttagacctcacaacattgaaagatgggcattttaaccccattttctcaatgagaaaatggagktacaaagatattatataatctgcccacagcttgatattgccagcaaaatttaaacatgggtctctcaactcccagtcactcattaccacactgtctcagagctctcactatgaccaagataatgaggaaatggctggggatctcacaatgtcctaattctctgcagatgcacgcaaccccttggtcctagttcacttatgctactgaaacaaaatatgactgactggatagtataaaaa

SEQ ID NO: 29168 - DNA, 585 bp, Homo sapiens
agtttctacatatttatccccatttttcagatgaggaatcagcctcagaaaatatcttgcctaagggcatgtggttagtctgtggcaggcctatgtgtagtacacagcataatcactttccagctgcttaaattcagagcaccaacataaacttgttcaattctagcctgctttaatgcttttgtataaaacacmtgagaagccaaggcagcctggaggcaaatgccataaagcaaaccaccattggagcaagaaaggaggttgttggaagtcaccactaaaaacaaaaaaatcatcccttcctaagggatgctcaaagagaatcccttagggaggcacacaactctctgtgatgagccatgcttatacctctcccttggcttagtctcttgtctcagcatttgcccttcattctgctttaggccagcaattctcaaacctggctgcacattcaaatcacctggggctgggcatggtggttcatacctgtaatctcagcactttgggaagctgaggtgggaggatcatttgaggccagtagtttgataccagcctgggcaacaaaatgagattgtctttatgaaa

SEQ ID NO: 29169 - DNA, 541 bp, Homo sapiens
cttctaagcactttatttgaatttcccccaaatatcttggcatgtactcataggaggactagactgttttacatgaacatatttatgactgaacatgtgttcttcgcatttcacttatacatatatggaatttttacagaaatgtatggycatatttctcacatatacatagtgacatttaaacactttaggagcctgagtcgattgctttggccacatgaaatatccctgagcagttcatgtaatatgagttaaaatggaagatttcataaatcactgctacgaccagaagcaatctgttctcaatttctggcttcaaaggagttaatattaggtggtgtctgtggaaaataaatgggttcatctgcatgtttggacttgacgtattgggctgctacatgtgtgcagttccctcccatgattctatcttttgatccaggtaaaattgattcactgtaaaaaacttccagtggcttctaatcatttctcagtctttggtttggttttgtttcctttttcttactaagcaattgcctacttg

SEQ ID NO: 29170 - DNA, 630 bp, Homo sapiens
aggcaattcgagagtgggagggctacacttaagagcacgggttctcttgttccatcagaatacataaatgttctgaaagaagtgtctgccaactttcccattgaatgatcaagtgcaaaacaatccagcaagataattttatgatgattagttttggaagattaataactttctcttttacctctgctctttctaagatgttagaattgaygttctcatttacagacacattaaaaatattttacaatgtattaaataatctgctcaatttaaacattttggaaaacaagaatatcataaagaaaaatatgtaaattagctgaaattgtatctctttgatagatccatgttaaaattcccttgaactatttttttttttagtttgaggtataaagatatctcacatatccacacatatacataggtgcatatatatgattatacacatattttggccatgctatataaggagacttttaaattataccttattaatttaaaactaagttgcaacaatttttatttcaactctaattatgctttgctttaaaaaaaaaggcaacagtccaaatgtggggtccaaaatttctattattaattcaggatagattcctagaatcacttggttaa

SEQ ID NO: 29171 - DNA, 559 bp, Homo sapiens
gaagagagcctatacaagattctcctgaccagggaagaggagaaagaagtcaatggccaatttgttggtmcattgaactttaaaacctgtatatcatgtactctctttcagacagtcaagcctgttggccctctttctctgcaatatctgcatgaactgttgctgtcaaagagaggacccaggctctacattgtcagggcgttaactattaatgcaagtaaatatgattgatgtgcttttgaaaggggatttgatccccctggagttatggacattggcctttggtattgattgaatcttgattcagtatagatttattttatttatttatttatttattttgagacagagtctcactctgttgcccaagctggagttcatggcacgatcttggctcactgcagcctctgcctcctgggctcaagtgattctgctgcctcagcctcctgaatagctgggattacagacatgcgccatcatgcccagctaattgtatttctaatagagacggggtttcaccatgttggccaggctggtcttgaactcctgacctcaggtg

SEQ ID NO: 29172 - DNA, 559 bp, Homo sapiens
gaagagagcctatacaagattctcctgaccagggaagaggagaaagaagtcaatggccaatttgttggtccattgaactttaaaacctgtatatcatgtactctctttcagacagtcaagcctgttggccctctttctctgcaatatctgcatgaactgttgctgtcaaagagaggacccaggctstacattgtcagggcgttaactattaatgcaagtaaatatgattgatgtgcttttgaaaggggatttgatccccctggagttatggacattggcctttggtattgattgaatcttgattcagtatagatttattttatttatttatttatttattttgagacagagtctcactctgttgcccaagctggagttcatggcacgatcttggctcactgcagcctctgcctcctgggctcaagtgattctgctgcctcagcctcctgaatagctgggattacagacatgcgccatcatgcccagctaattgtatttctaatagagacggggtttcaccatgttggccaggctggtcttgaactcctgacctcaggtg

SEQ ID NO: 29173 - DNA, 2467 bp, Homo sapiens
atacttccatggaaaataagaatataaaaaataaagtgacttattatggctataaaagtaatcttttgaccgtactcaacttgatcttatctccttaatatggcctactttgaaattaatttatcatgtggactgatcagagagtgtcatgtagaaaagtacacttgataaaaccatgcacaaaggtccatagttcatctctttcttattgaataattctactcattttttaaatcctaaatatgttttctatgttagtaatgagaatagcaatgaatttaggcatgtctgttgaattcaggtgatacctagtcaattagcattttgagtcactaaaggtgttattgttcactttggggttaaaattttctagaaggttttgttttttgtcaaggaagcagaatattttcttttgagagtaattagcaataaacctgtaagtcacattaattttcatgttgtaaatatgatttcttttctctcttgccctgtttgttctcaaattttttatttagttaaaaatggaaatgaaaaaaagtttctgtatttacttcaaatccagtctttccagggcctcagagactgatcctttggttgtttgatgtaaccatgctggctctatgatgactgacctggtattttccagctaaaattacccaccatgcagccagcagggtcagtcattaagacacatgaatcactaggttgtctgacccatggtctggatttcttgtcgttatgaagatgaagcctgagatcactggagactagttccttaacaagaaagacaccaaacttctccttaattcagccttgcatcaagtcacccacatggaatgggaaaatttgtgaagatatagagctcagcttttcctgtgtgtgtccccacagaaggaataggtctaaggccaggctttggaacccttgccagctgggctgcattagcaattctgctcttcttcatttgttgacccttctaactaactataagcaatattagatttcctattcaagtattgcaaatgccttggtgtttagcaggatatcagattcattgcatacttctgtgggaaatattactgcttcactctatcaacaatcaggccagagtgggcagcccaaagagttatggttcatgtttttggcttttggcaaaccccttctcattttctttttgattcactgtctgcttaacttcttttgcttttatgcatgacttgccttgggtgagtaattttatttacagtctggagaaaaggagttttagatataggtcaccagaagcagacccagagaccaagattcatgctaaagtactttattagaaaacgtttctgagaagaaacaataagaaaaaaggaagttggatgggagccaaaggaaccrttttgtggttgatactgccctcttgattcaagagggaggtcgacctcccaggctcaagcacaaagaggcaagcacagtatcaagtacaaagccaccatgggactgcctcaaacctgctgggtagctctggaaaaggtagttgtttcaaacagaggtgaagttgatgtatttatactcttgtgtctataaatcaatggttaaaggccatctcacaaatgtgtaaatatgcccagaatctcctgagttttggggggttttcttgtttgcttatttttgttttgttgtgttgggggggatgagttttttgtttgtttctttgttttctttttttgagatcgagtctcactctgtcgcccaggatgtagtgcagtggtgtgatcttggctcactggggcctcaacctccctggctcaagcaatcctcccacctcagcctccctagtagctaggactacaggcacataccaccatacctggctaatttttgcactttttgtagagatgggggtctcacctttttgcccaggctagtctcaaactcccaagctcaagtgatcctcccacctcggcttctgaaagtgctgggattataggcatgagccaccacttctggcccccagaatcttctggcccttcatacacacaggccaaagtagcttcggtaacctgacgacaatcatctgataaagacactcaggtttggactgttgtgagtgaaatcacctgggagccagtgtgcataaaatatgtggtgtgcaccaaaaggaactcaagaggctattgtcagaggctattgtcagaggctattgtcagaggctattgtcagaggcgtttgaaccagagcaactccatcttgactagggggtaggtaaaataaggctgagacctactgggctacattcccaggagggtaggcattcttagttaaaggatgagataggaggtcagcgcaaggtacaggtcacaaagaccttagtcataaaacagcatgtggtaaagaagccagccaaaacccaccaaaaccaacatgatgacaaaagtgacttctggatgtcctcactgtttattacatgctaatcata

SEQ ID NO: 29174 - DNA, 2467 bp, Homo sapiens
atacttccatggaaaataagaatataaaaaataaagtgacttattatggctataaaagtaatcttttgaccgtactcaacttgatcttatctccttaatatggcctactttgaaattaatttatcatgtggactgatcagagagtgtcatgtagaaaagtacacttgataaaaccatgcacaaaggtccatagttcatctctttcttattgaataattctactcattttttaaatcctaaatatgttttctatgttagtaatgagaatagcaatgaatttaggcatgtctgttgaattcaggtgatacctagtcaattagcattttgagtcactaaaggtgttattgttcactttggggttaaaattttctagaaggttttgttttttgtcaaggaagcagaatattttcttttgagagtaattagcaataaacctgtaagtcacattaattttcatgttgtaaatatgatttcttttctctcttgccctgtttgttctcaaattttttatttagttaaaaatggaaatgaaaaaaagtttctgtatttacttcaaatccagtctttccagggcctcagagactgatcctttggttgtttgatgtaaccatgctggctctatgatgactgacctggtattttccagctaaaattacccaccatgcagccagcagggtcagtcattaagacacatgaatcactaggttgtctgacccatggtctggatttcttgtcgttatgaagatgaagcctgagatcactggagactagttccttaacaagaaagacaccaaacttctccttaattcagccttgcatcaagtcacccacatggaatgggaaaatttgtgaagatatagagctcagcttttcctgtgtgtgtccccacagaaggaataggtctaaggccaggctttggaacccttgccagctgggctgcattagcaattctgctcttcttcatttgttgacccttctaactaactataagcaatattagatttcctattcaagtattgcaaatgccttggtgtttagcaggatatcagattcattgcatacttctgtgggaaatattactgcttcactctatcaacaatcaggccagagtgggcagcccaaagagttatggttcatgtttttggcttttggcaaaccccttctcattttctttttgattcactgtctgcttaacttcttttgcttttatgcatgacttgccttgggtgagtaattttatttacagtctggagaaaaggagttttagatataggtcaccagaagcagacccagagaccaagattcatgctaaagtactttattagaaaacgtttctgagaagaaacaataagaaaaaaggaagttggatgggagccaaaggaaccgttttgtggttgatactgccctcttgattcaagagggaggtcgacctcccaggctcaagcacaaagaggcaagcacagtatcaagtacaaagccaccatgggactgcctcaaacctgctgggtagctctggaaaaggtagttgtttcaaacagaggtgaagttgatgtatttatactcttgtgtctataaatcaatggttaaaggccatctcacaaatgtgtaaatatgcccagaatctcctgagttttggggggttttcttgtttgcttatttttgttttgttgtgttgggggggatgagttttttgtttgtttctttgttttctttttttgagatcgagtctcactctgtcgcccaggatgtagtgcagtggtgtgatcttggctcactggggcctcaacctccctggctcaagcaatcctcccacctcagcctccctagtagctaggactacaggcacataccaccatacctggctaatttttgcactttttgtagagatgggggtctcacctttttgcccaggctagtctcaaactcccaagctcaagtgatcctcccacctcggcttctgaaagtgctgggattayaggcatgagccaccacttctggcccccagaatcttctggcccttcatacacacaggccaaagtagcttcggtaacctgacgacaatcatctgataaagacactcaggtttggactgttgtgagtgaaatcacctgggagccagtgtgcataaaatatgtggtgtgcaccaaaaggaactcaagaggctattgtcagaggctattgtcagaggctattgtcagaggctattgtcagaggcgtttgaaccagagcaactccatcttgactagggggtaggtaaaataaggctgagacctactgggctacattcccaggagggtaggcattcttagttaaaggatgagataggaggtcagcgcaaggtacaggtcacaaagaccttagtcataaaacagcatgtggtaaagaagccagccaaaacccaccaaaaccaacatgatgacaaaagtgacttctggatgtcctcactgtttattacatgctaatcata

SEQ ID NO: 29175 - DNA, 1185 bp, Homo sapiens
aacatcatccacttttgtaccccagcacctcgtgcaatgtctgacacacatactaggtcaacaagtgttttctaatattgtggaatcaactgaattttacagtgcgacttctgagaaatgtaaggaacttcagcatcttccaagagttgccactggggccgaggagaattcaggaagtgtttcagatggggtcgctccctggaccttaggtaacaagcaattcctggcccacacctgcccaaccctcttcaggccccagctggcaagcagagcgggatgttaatggggctgacggttccctctaggtcctccgctttgatctgacctaaggcagcactgggaccatctagcagatcgctccctggcccaagagcttctgatcacagggcagggtatcagtgcttgtttacctgctttgggggtctcagaggacaaacaatgaaggagtctcagtgaaagggaaactctcacagcggggttccgcacacgcagcgcaaggggacgctgcgtcttctgcggcgcaaatctttcgaccctctgcgctctgccggggggtgcgggacagccggctgctgaccggggaaaggactgcagcttgtgggcgcaagcagctgcaaggaaaggcctcaaagcatcaatataatttttaagctatttcccgccagttgtgagcccgggatgtcaagctagcaaaaactccgacgtctccaaggaactaacttaaagatatattataagtgaaaaaagcaaggtggttaataaagtgtataaaagcgtgcagatgggtgggggacagataaagagaaattcaggtgcgcttacgtacttgctggtgcaaacrtaacattatagccccagaaatacacaggagaaactaatagtgattgccttcacttcgaggaattgggaggcgcaagagttggtaatctggtggcttttgggttgctgggtattttttttttaactcatgcaagtacgttaagtatatattgattttatattatataatatatactacatataatgtattgttgatatattcatacatgtatgtaagtgttatcagttgttgcagtcaagatgtctaaattaacctctgccctggacgatgacctaagggtacggagaaacagagaagactctcggcgtcaaggaccaaagagggagggtgagaggaaatatgtg

SEQ ID NO: 29176 - DNA, 1185 bp, Homo sapiens
aacatcatccacttttgtaccccagcacctcgtgcaatgtctgacacacatactaggtcaacaagtgttttctaatattgtggaatcaactgaattttacagtgcgacttctgagaaatgtaaggaacttcagcatcttccaagagttgccactggggccgaggagaattcaggaagtgtttcagatggggtcgctccctggaccttaggtaacaagcaattcctggcccacacctgcccaaccctcttcaggccccagctggcaagcagagcgggatgttaatggggctgacggttccctctaggtcctccgctttgatctgacctaaggcagcactgggaccatctagcagatcgctccctggcccaagagcttctgatcacagggcagggtatcagtgcttgtttacctgctttgggggtctcagaggacaaacaatgaaggagtctcagtgaaagggaaactctcacagcggggttccgcacacgcagcgcaaggggacgctgcgtcttctgcggcgcaaatctttcgaccctctgcgctctgccggggggtgcgggacagccggctgctgaccggggaaaggactgcagcttgtgggcgcaagcagctgcaaggaaaggcctcaaagcatcaatataatttttaagctatttcccgccagttgtgagcccgggatgtcaagctagcaaaaactccgacgtctccaaggaactaacttaaagatatattataagtgaaaaaagcaaggtggttaataaagtgtataaaagcgtgcagatgggtgggggacagataaagagaaattcaggtgcgcttacgtacttgctggtgcaaacataacattatagccccagaaatacacaggagaaactaatagtgattgccttcacttcgaggaattgggaggcgcaagagttggyaatctggtggcttttgggttgctgggtattttttttttaactcatgcaagtacgttaagtatatattgattttatattatataatatatactacatataatgtattgttgatatattcatacatgtatgtaagtgttatcagttgttgcagtcaagatgtctaaattaacctctgccctggacgatgacctaagggtacggagaaacagagaagactctcggcgtcaaggaccaaagagggagggtgagaggaaatatgtg

SEQ ID NO: 29177 - DNA, 903 bp, Homo sapiens
gtagcccaactcaggaagcttctaccaaaatactataaaaaccttgaatttcctggctgacaggggatacaaagtgtccaaaaagaaggctcagattaccctccaatgggtccaatatttatggtatgtcttaaaacccagaaccggcaaatatccatgaaacaagtgcaagctatatgtggtttgccttccctacccccgctaccctccctgccctgccccccacckccaagcagcagctttgttcttttttgggaatggccaggttttgcaggatatgggtaccaaattttgggctcatggcaaagcccctatatgaagcaacaaggtggcctgaaaatgagctaatggaatggatcccagacatgagggaagccttcaccaagccaaaacaggccttaccctggctcctgctcttggcatcccaggcctaacttaagcagagaagaagggaatagctgtgggagtgctagcccagaagttaggatcagaactcagaccaaccacctacttttccaaaaagtttgatggagtggtcttgggatggccaagttgcctgctggcaataccagcccctgctatgttagtggaggaagccacgaaagttgctctgggccaaccaatggaaattaggtaaagtcagtcttagagataaaaggacacatctggatgatgggggaaaggttaaccaactaccaggccatgctcccagacaatccagatgtaacccttacaacctgtaacactttgaatccagcttcattgctacccttaggcccaataaccaatcagtcctatgagcaggtcgttgtaaacacatatgtcagccggcctgatttaaaaagatcagcctctcccacattctgaggatgattgtttcacagacagcagtagttttgtgtc

SEQ ID NO: 29178 - DNA, 531 bp, Homo sapiens
cataaatatgctgagacagttaatctttgattttaattatgtccactgcatagatttggttaggaaaactatttctcatgactgctgttgcatttttattaagcagaatttgatgcaacagatttgagcatatgtggacttctactgaactaggtgtataatcaaagcaagtgtgaaagaggaactcaagccgaagtaagagttggtctctgaaaaatcttagcatttctcaaacgatgtactagaaaacaactgacagaaattctgattcctgattatgctttaaagtttcttaaagctctgctggaattgagcttrtctgtaacattttgttttattttattattttattttattttattttctcacaggatatcacattggagtcactgccaagtcatagccataaatgatgagtcggtcctctttccagtggatcataagacaatggaccctttttgttatgatggttttaaactttcaattgtcactttttatgctatttctgtatataaaggtgcacgaaggtaa

SEQ ID NO: 29179 - DNA, 541 bp, Homo sapiens
aaaaaaggcaatgataacctcaactttaacagtcagatattagttgtgctaagagatagtctgggttaattttaaattatttggatcagtttgaagttacgtggagaaattggcaatggtttaatctacttgaaccagtctataccagataagtacagttagaattaatttgagctggattctgctagtatagacattctggaacacccttggatttttgctaatcctttaacagagatattattggcagttagatagtaattattatgttaagaaaatgtaattatattcttaggttactgaagagtttaatcagaaataattaaatgtttcaaaaatcatgtgggcatctctaacactgctagcgtagcaaaacctcctgtccaaaacctccttccagtcactacctcctccatcttttccaaagaaaagccttaccctgacttaacatgccatagtgtggrcgaaggattacccaggtgctgaggcaagagactgaaggcacaaactgttgcagtataataaggaaaatagttagaat

SEQ ID NO: 29180 - DNA, 944 bp, Homo sapiens
tcaacttctccaacatttgaaaacaaacatacaaactcatctctcgctggaagtcgtcttctggatcaacagctttctggtccttgttctgaggtgctggcgcctcagatccaccgatctccggtaccggacccagtgtcacatcgagcctttcaacccattccagatcccgcttgaattctgccaaacattgcttcaggccattctaggaaatccagacactgagctcacaagaagggaactctgagtttgtctttcccaagcacaggctgttaggcgaagggacaaagtgctaatccccaatacccagacaggtaattgaccctcttggcgaggcgcagggtgcatctttcctgggacaagaatcggtctcccaagcccaacagcgcctgaagcgcatcccatgtccgagtacccccgaccctgtgcccacgctcaccacgtcgttcacggccttcttcggcccctctagcacgacattgaggcctggcttcagaagccctcgggaaaacgcatcctgcaactgcaggacacaatcacggtcactcccaggggtgtaaggccccctctcccacgcccagccccacgagctcggctgacacctacctctctgtctgtgacaagggattcatcggattccgactccgaatccgagagcgggggagtgtccatctcgccgcacgcacgtcccacacctacaggaagaaacggggtatcccgagacccaagcggctagcagrgggcggccctggccgctgctgcctgccttcagccccctactcccacgccgtggctccacgtgccaccgaatcgctccagcgccagcaactcacagctactgctcaacttttgattgggacttccgcttccggcggcaaaccatacttccggtttgtcgttgctataggaaccgctacggcgtttgaaagtgtccgggttgctta

SEQ ID NO: 29181 - DNA, 543 bp, Homo sapiens
acagtctgacaccttgtatagctaactttatcaatgacttagccctacaaggtagatattactatcctcatctatagggaaggaatttgaagttcagagtttctgtgatttgcccaaagcaacacagctaggaagtggcagagccaggattcaaacccaggtctggctggctcctgctccccctaagcacraccccgccaagcctcacccctctgctgcccttggagtggctgctgtggggcctcgttcatccatcagatgaggcgagcttccatcctgcattgatctctcaggacacttgggttgcagttgacagaaactcacctgaacactgcttagaggaagggagaattgattggctcctctcaccaaagtgcagagggaaggagtataatggagcagggtccctcctgaggtcaagaggcaggatcggctaagacagccatggttgtcacgctgctcacagtgctcctcccaggaaggagcatccacgcagccctacttgggtccctgcaggcagggctggacagtgagaggctcacc

SEQ ID NO: 29182 - DNA, 855 bp, Homo sapiens
acagtgcaggcgccggtcggggtcccgggcctcagtttcccccgcgggccagccccgctctgggaagcccgagtggtgcagcagggcttctccccacccagggcggaaccgaggtgacaggaaggaggaggcaccgsgaggggcggagacgcgtgcgacccaggcagactctgcgcggatcccgcgccaaggaggggccgttgcccaggaaccgtccctccctcccgcgcgtgcttgccctcgtgcgcgcgcccgcccaatgctcccgaccactgtttgccagccgacccccaccccaaccggcctgtccatttccccgggagcggagagacccaacgggacacgccgctcgctcccgccctcccgggagcgcgagcgcgccctcggctgcgtctgcatagtaatgaggggcggggaggggcgacggggacgcggtggcctcgcgcccgcgcgtgccgggacgcaccgcggggggcggcgcgattgtgaggtggcgctgacgcacgttccggggttcttaagcggccagggcggctacggcgactgcgacggcggcggcggcggcgatcgccgcgaggggtggtggggccgaagtcggtgccccctggctcagtcacggtgtccctctctcactgactccccctccttccaccacggccgcgcaaccccagcgccggcggcttcctaggtggggcaggggacgaggagcgtctcctcccgctgccggcggcctgataaatgagggatttcgggtttggggtgctgcagaccgccccgctccgaagtagcagtcctgggcccctgttctgcggcgaggcgtatggtccttacgccgtggggtccgtcaacccgctg

SEQ ID NO: 29183 - DNA, 855 bp, Homo sapiens
acagtgcaggcgccggtcggggtcccgggcctcagtttcccccgcgggccagccccgctctgggaagcccgagtggtgcagcagggcttctccccacccagggcggaaccgaggtgacaggaaggaggaggcaccgcgaggggcggagacgcgtgcgacccrggcagactctgcgcggatcccgcgccaaggaggggccgttgcccaggaaccgtccctccctcccgcgcgtgcttgccctcgtgcgcgcgcccgcccaatgctcccgaccactgtttgccagccgacccccaccccaaccggcctgtccatttccccgggagcggagagacccaacgggacacgccgctcgctcccgccctcccgggagcgcgagcgcgccctcggctgcgtctgcatagtaatgaggggcggggaggggcgacggggacgcggtggcctcgcgcccgcgcgtgccgggacgcaccgcggggggcggcgcgattgtgaggtggcgctgacgcacgttccggggttcttaagcggccagggcggctacggcgactgcgacggcggcggcggcggcgatcgccgcgaggggtggtggggccgaagtcggtgccccctggctcagtcacggtgtccctctctcactgactccccctccttccaccacggccgcgcaaccccagcgccggcggcttcctaggtggggcaggggacgaggagcgtctcctcccgctgccggcggcctgataaatgagggatttcgggtttggggtgctgcagaccgccccgctccgaagtagcagtcctgggcccctgttctgcggcgaggcgtatggtccttacgccgtggggtccgtcaacccgctg

SEQ ID NO: 29184 - DNA, 855 bp, Homo sapiens
acagtgcaggcgccggtcggggtcccgggcctcagtttcccccgcgggccagccccgctctgggaagcccgagtggtgcagcagggcttctccccacccagggcggaaccgaggtgacaggaaggaggaggcaccgcgaggggcggagacgcgtgcgacccaggcagactctgcgcggatcccgcgccaaggaggggccgttgcccaggaaccgtccctccctcccgcgcgtgcttgccctcgtgcgcgcgcccgcccaatgctcccgaccactgtttgccagccgacccccaccccaaccggcctgtccatttccccgggagcggagagacccaasgggacacgccgctcgctcccgccctcccgggagcgcgagcgcgccctcggctgcgtctgcatagtaatgaggggcggggaggggcgacggggacgcggtggcctcgcgcccgcgcgtgccgggacgcaccgcggggggcggcgcgattgtgaggtggcgctgacgcacgttccggggttcttaagcggccagggcggctacggcgactgcgacggcggcggcggcggcgatcgccgcgaggggtggtggggccgaagtcggtgccccctggctcagtcacggtgtccctctctcactgactccccctccttccaccacggccgcgcaaccccagcgccggcggcttcctaggtggggcaggggacgaggagcgtctcctcccgctgccggcggcctgataaatgagggatttcgggtttggggtgctgcagaccgccccgctccgaagtagcagtcctgggcccctgttctgcggcgaggcgtatggtccttacgccgtggggtccgtcaacccgctg

SEQ ID NO: 29185 - DNA, 536 bp, Homo sapiens
tccatgcctcacacagtgctgggcactggatacctttcatgaggagcgcgtgatgctgctctcagtcatcagcatctggctgttgaaattaacattaaataggtttcttcccccttttttggtttccagctatattaastagaatgaatttctgaagatctagcttaaatacttgaaagtaaatttagtaacactagtattttggcccatgcacagatttgaaaaacataaaaatcttatggccccgtctcctagattatcccctagaagggccagttaaggattcggtaccaagcgatgccattccttctatgaaactgttggtggcagtttcatgatgagatagacgacacgttgcattttctctcttaaagctatgcgaatatgtcctcacagatttcagtctggaactcatctaatttctgactgtttaaatacattgttatagattagtaaattaggtgttagaagaaaatacttttcaggcttctagaaccaagtaatgaatttaaatgccccccagcaatcctaaccag

SEQ ID NO: 29186 - DNA, 766 bp, Homo sapiens
taaagttgatgtaacacacataagtatataggtttgcaatacattgacatactattaggttggtgcaaagttaattgcggtttttgccgttaaaagtaatggcattaaaagtaatggcaacaatcgcaattacctttgcatcaacctaatatttactggatttctcaaaccaaaaaaacaagtagtatatggatacttccattttcatcaggaaattgtgtctaatgaatctgagactgtttctttcctccttcctctacccagagggcagacaagtctgcatggccattcccacacagtccacaggaagccaagagtaggatggatcattcgctccgtcattatcccctaactttggcaccaatcccttcagccctattcartacaaacgcatcgtgactccacttccaggttaccttctccataaagtcccctatcctggggcaagggaagcctggatagaggcaggaccagaagaacaaagttctgtcatctttgccccaacatgcctctttccaaatcccatagctcaagtgtgtactcctgacataaagccacatgccagagttctctcctcttctaccacacagcattcatcgccctttagttcctagatgacagcaaagatttattagcatgtgaaaatgccccaatccacccacaagtagaattatctttgtcagcccattcgtaaatcttttatgatacagaatcagagaatgggtaagaagtccagagaggtgtgagaaaacagggagactaacca

SEQ ID NO: 29187 - DNA, 1997 bp, Homo sapiens
ctcccagcctgagctccagagactctaggtggctccgagttcacccacacactgagatactgacatgtttctcacctcccccttggctccaactgtctccatgaattgcacatgaagggactgctgcctcccaccacatgcttgactgacttcatgcatgctgtagcactcagaaaaggagttccatcctcaagctgacggaaacttttttcttactcctccaatattcctgtccccagccctcaggatgaggttaaataactcaataataccctgtgcaaataaataacattgttctagcatatttagctgccttttcacctctttcttccactagatgggagttctataagccagtagacagtgatagtgtcttttcatttttatgttgacaacacctaacatagtgattctaaccatacacaatatgtgctcaaaaatattcactgcctgaagaagctaatgaatagatttaaaggactaygtgatgcataacctaattatgaagccatttttaattattcaggagaaagacaatacataaattaagttttattgggacttatttttgattcggccttctaggttggaagcaccacctcacaaaaaaaggacagtcccctcatttatttttctgctacatctcatcgtattaagaggtcattcaattctctatctatcccctaatccacagatatcataccatatggaaaaatttgaggatgggaaagttgtgcttatttttctaagactttcatattaaaaaaaaatgcagctgctaagcatgtttttgttttcatgttaatgcatcccttggtgtaatgcttcttccccaaagagcatgtctttaaaaacgatcagctggccacaagatattataataccctgggtagtaattactcttaacatgtgtatgcacttttctggggatatggttaattctgttgcagagatctactgtgaaactagatatttccaactctgtgaactttattagagaaaactgtacctaaagagtatttaacttagtttctccagctctcacaaataagagggtatacatgaaggaatgactgaaagagggctctggaatcagattgttcaagttgtaatcctggatcctacacttgctgtcaagtgaccttgaactaattcaattgcatctgcctcaaaagtcttttctggaaaatgaggataagattagtatgtgcattagtctgttttcaccctgctgataaagacatacccaagactgggcaatttattaaaaaaaaaaagaggtttattggacttatagttccacatggctgaggaagcctcacaatcatggtggaaggtgaaaggcacatctcacatggcagcagacaagagagcttgtgcagggaaactcccctttttaaaaccatcagatctcatgagactcattcactatcatgagaacagcgcaggatagacccacccccataattcaatcatctcccaccagattcctcccacaacacttgggaattgcgagagttacaattcaagatgagatttgggcggggacacagccaaaccatatcaatatgtaatccataaggttattgtatggattaaatgaaggactttgctctcaaaaatattacttttttttacatttttttttcctgtcttcctatgtgggactccagctccctaaagaattccactacctgccacaaacaagtgaagtgaattggccgtggagctgctctgaagtagccctggcttcttccttctgttccagttccttgacaacttactcattcacttcacagtgttctccagacaccacagtctcccaaaagacatcagtgctgctacggtagctcccagccattgccacccattgcttggggaagtgtggaaggaaatatcaagatcttgatcctggctcttaacgtcttacagaatttctcataaaatagtcttttaggtttcactggtgatacactgccatcacagttccatgcaat

SEQ ID NO: 29188 - DNA, 1997 bp, Homo sapiens
ctcccagcctgagctccagagactctaggtggctccgagttcacccacacactgagatactgacatgtttctcacctcccccttggctccaactgtctccatgaattgcacatgaagggactgctgcctcccaccacatgcttgactgacttcatgcatgctgtagcactcagaaaaggagttccatcctcaagctgacggaaacttttttcttactcctccaatattcctgtccccagccctcaggatgaggttaaataactcaataataccctgtgcaaataaataacattgttctagcatatttagctgccttttcacctctttcttccactagatgggagttctataagccagtagacagtgatagtgtcttttcatttttatgttgacaacacctaacatagtgattctaaccatacacaatatgtgctcaaaaatattcactgcctgaagaagctaatgaatagatttaaaggactacgtgatgcataacctaattatgaagccatttttaattattcaggagaaagacaatacataaattaagttttattgggacttatttttgattcggccttctaggttggaagcaccacctcacaaaaaaaggacagtcccctcatttatttttctgctacatctcatcgtattaagaggtcattcaattctctatctatcccctaatccacagatatcataccatatggaaaaatttgaggatgggaaagttgtgcttatttttctaagactttcatattaaaaaaaaatgcagctgctaagcatgtttttgttttcatgttaatgcatcccttggtgtaatgcttcttccccaaagagcatgtctttaaaaacgatcagctggccacaagatattataataccctgggtagtaattactcttaacatgtgtatgcacttttctggggatatggttaattctgttgcagagatctactgtgaaactagatatttccaactctgtgaactttattagagaaaactgtacctaaagagtatttaacttagtttctccagctctcacaaataagagggtatacatgaaggaatgactgaaagagggctctggaatcagattgttcaagttgtaatcctggatcctacacttgctgtcaagtgaccttgaactaattcaattgcatctgcctcaaaagtcttttctggaaaatgaggataagattagtatgtgcattagtctgttttcaccctgctgataaagacatacccaagactgggcaatttattaaaaaaaaaaagaggtttattggacttatagttccacatggctgaggaagcctcacaatcatggtggaaggtgaaaggcacatctcacatggcagcagacaagagagcttgtgcagggaaactcccctttttaaaaccatcagatctcatgagactcattcactatcatgagaacagcgcaggatagacccacccccataattcaatcatctcccaccagattcctcccacaacacttgggaattgcgagagttacaattcaagatgagatttgggcggggacacagccaaaccatatcartatgtaatccataaggttattgtatggattaaatgaaggactttgctctcaaaaatattacttttttttacatttttttttcctgtcttcctatgtgggactccagctccctaaagaattccactacctgccacaaacaagtgaagtgaattggccgtggagctgctctgaagtagccctggcttcttccttctgttccagttccttgacaacttactcattcacttcacagtgttctccagacaccacagtctcccaaaagacatcagtgctgctacggtagctcccagccattgccacccattgcttggggaagtgtggaaggaaatatcaagatcttgatcctggctcttaacgtcttacagaatttctcataaaatagtcttttaggtttcactggtgatacactgccatcacagttccatgcaat

SEQ ID NO: 29189 - DNA, 618 bp, Homo sapiens
attctgtcttctcactttccccaccctcccccgccaaacatactcatttctcagattttctcatttcagaaaacggcaccaccagttacctaagtgctatgccagatgtctaggaatattccttgagytctttcttttcttcaccctccatatcctatttatcctaaattcttttggttacacttataaaatatatctaggctgtcaagctctcactatcttcactgctgccatcttagcaaattaatgttaatctgacattaatttattggattagacaataaattttgttcatcttcttttgccctataataaaagtttttaaactttgttaatattaaaacgcatgttttgctcataattcttcattggcttctcaatgcactgagaataaaaaaagtgtccttattataaaccatgtttgttcctgcatgagctgctccctgtctacctttccacctgcattttttgtttctctcacaccagcttatactggcttatatttctagttccagtggccttcttgctgtcctttgacctaggcaaacaaaaatctttcctctggatttttaaacaatgtttcttcctctttgagcatctgtacccattttcagcctt

SEQ ID NO: 29190 - DNA, 618 bp, Homo sapiens
attctgtcttctcactttccccaccctcccccgccaaacatactcatttctcagattttctcatttcagaaaacggcaccaccagttacctaagtgctatgccagatgtctaggaatattccttgagctctttcttttcttcaccctccatatcctatttatcctaaattcttttggttacacttataaaatatatctaggctgtcaagctctcactatcttcactgctgccatcttagcaaattaatgttaakctgacattaatttattggattagacaataaattttgttcatcttcttttgccctataataaaagtttttaaactttgttaatattaaaacgcatgttttgctcataattcttcattggcttctcaatgcactgagaataaaaaaagtgtccttattataaaccatgtttgttcctgcatgagctgctccctgtctacctttccacctgcattttttgtttctctcacaccagcttatactggcttatatttctagttccagtggccttcttgctgtcctttgacctaggcaaacaaaaatctttcctctggatttttaaacaatgtttcttcctctttgagcatctgtacccattttcagcctt

SEQ ID NO: 29191 - DNA, 526 bp, Homo sapiens
aaagagaacatatgaaaattgttgaaacttgccagtttttccttgctgctcacaggattcctgaaaatcataaaaaagaaaatggaaataccactttctttatgagtgatattttacctcttatcgccaatgaaaatgttgctaaaggttggaagaacaaagagagttgtgctcaagtttaagtggatctcctagcattcctcatcctccttaatggaatcttaaaaattggttttctttggctagcaacatgtaagaaacaaggtaaagatggggcaacttgtatggyttgtcaaggggcaggtcttaagctagcttactcacagaactacatgaaataaaggaggtggagaagagagaggcatggttgggcacaaatagaggaaacctgtcctggccaagtctgcttattacatggaagtaagaatcactgatttcaagagaagaagcttaatatgtgtttgtaacttttaaagcgtgataccacggcccaccaatatttatagtccatgaaatgttccaggca

SEQ ID NO: 29192 - DNA, 1274 bp, Homo sapiens
taataataatatcacctagtattaaataaaacctatgtgtactagacactccattaggtacctcacatatatttttaattttataacttttcaaggtagctatttttctcccactttaacaatgagaaaataaaggctcacagaggttagaataaacattttaaaattgtttcgctattctgaaaatagtgatgtttttcttattttaaagtgctttaactttcaaggggaaaatgataaatgagcttcaaatatctaaaagataagaaaatcagtagtatttgataatgctaatgtattctcagaaggacttttctgggctgttaaatttttgtaatcaagtgtcaacttaattcaatgatatgtagttctaaaggacactactaaaattaaaagtcaaactgaagtaatgtataaaaatcagaagccaatagcaataatatttgcttgacatgattatctttgcagttaaagaaaagaaaactaaaggaagtgaaaatacattaacaaatctatcaggaacagaaaaaaatcagactttttaagcattttttttctttattttcagacaagcatagtagatgaagattaactttttcctggaaagagtgcatgaagaaaaagtgtaagactatgcacttacaaaagaaccctcacttggaagagaaggagagaaaatggagacatagaacgtccattgcatctaaaaatgccacaaactttccaaaatcttttttgttccaatttattaatgtcagtatttgacttgatcctatagcacataatcccattcagaaaggcaacattgttataaattttctgcctacgaaatatttcctggtactccacagctaatttacccctggaaggggcagattttaaaatgtgctaatgtaactacaacttcagggcagctctttggagacaagaatttatttgagtcataaatatatttttcttttgtgacttattttccaaaataataagaagaaatcatcattaggggtttctccrctcaccaactgctactaaaaaaattatagaaagacattctacgtaaatataggtcatgacttgaactagaatgcagaaatgaaaaatcatgtggactgatgacagaggattgacatctaagaaaaagagatattttggcagaaaagttgtattgtatttaattgtgccagaaatatttggaaacattgttcacagtttttcgacttgcatatgttggcttggagaagtaaaacaaatcaaagattattaaatacataaaa

SEQ ID NO: 29193 - DNA, 580 bp, Homo sapiens
atatataaaccagtttatttttcctcttttctaattactatttgaaataagaagtattgctacaatttattcaggttacacaatttatgtaaatttatactatttattctttggatgttggtggttggttcagcttcttgagtctgtacatttatgtctcttgctaatttgggacgtttttagccattatttcttcaaatatttcttcagtcccacattctttctcttcttctaaaattctaatgacacaaatattatatcttttgtgattgtcccacaagtctctgaagctctgttcatttttcrccaatctatttcttctctgttgttcacactggagaattcctattgatttatcttcaagttctccagttttttcttgttatctccattctcctattgagcccatccagtgagttttcaattttaggtattgtaatcagttttgaaatttccatttagctcttctttatatcttctgtctttttactgaaactttctgttttccatttgttttgacagtagtcataattgcttattagaggctttttttgtgataaccttttaaaaatctttacca

SEQ ID NO: 29194 - DNA, 1205 bp, Homo sapiens
acaagcatggtatatctttccaattatgaagttgttcttcaatttctctcggcaacattttttaggtttcactaaacatatctggcacacattttgttgtatttttcaagtatttcagtttttatgctactgctagagtataagtaacattccttgtccttgtggctttttggaaatatagttgatatacaataaataatttatttaaagtgtataatttgacatgttttggcatctgtatacaccagtaaaaccattaccccaattaaaataatgaacatatccatttcccctaaaagttttttgtacccctctgttattcgtccctcctgccctttacagcctgaccctccccacttaccttccaggcaaccactgatctttctatctctagggttagtttgtactttccagaattttatatatatggaatcataaagtatgttctctttttcatcctgcttcattaacttagcataattactttgaaaactgtccatgttgttgcatgtatcaatagttacttcttacttattactgagccatattctactctatggatgtatcacaatgtttatccagttaactgttgatagacattgttttattttctccaatttttgcctattacaaataaaagctgctttgaatgttagcgtacaaatatttgtgcagacttttgttgtcatttctctagggtaaatccccatgggaagaatggctggtcatatggtagatgtatgtttaacattttaaactccaaactgctttccaaaatggatgtaaccagattatggatcacagtaaagtggaagggcatacaggccagaataatcttttctatatctttcataygtgtgttggtaagggagatttattcattcatcaaatgttactgaattaactactgaatgcaatgaactgggttaggcacagagggcatagcaatgaataagacagccatggttcctgccctttggtgcttacattctagaaggaaaaaaagacactataacaacacagttcacaattatttgctcacaaagaggtacagagtactctgaacccaacctgactgaggattctctgaaagcttctttgagacagcaacagccaagctgagtgttgaaggatgagtagagattaacaagacagatataatcccaagggactgtgataacaccacaaaatagtagttctgggat

SEQ ID NO: 29195 - DNA, 406 bp, Homo sapiens
caggcaygcgccaccatgcccagctaatttttgtatttttggtagagacggggttttaccatgttgcccaggctggtctcgaacccctggcctcaggtgatctgcctgctttggcctcctaaagtgctgggatgacaggcgtgagccaccgtgcccggccggagatgggtataagtaaggggtaggaagggatatgggaaaggcttttggggtggagggaacagcatgaacaaaggccaggagaggagaggagcatgacagctacatcccagagcaaggggagaagacccctcagtgaagtccctgctaatagcccagctacgtgttcaggagactatttggatataggatgctcaggtcatttgcaatgggaagtgtgttcagggtatctagtccttcttgttgc

SEQ ID NO: 29196 - DNA, 563 bp, Homo sapiens
ccttctggtactgcagctaataaacagggaaatggtctacaggtagctggtaaaagaaagagaggaaaggcagagaaaacacaagagccagtttaccagacactaattacaccttcctggatgcttcccttttaaattcccttcataattcataaggaatacggtccttaaattcatttctgggataggcaagagtttagctaggatttttatttttaaacaaatttagacaaatatgagtgacaaacttcattttataagaaatttaattcgtattttataaaatcacagattcractaatacaacattacaatgaaactgcttcatccaggtcccaaataatcataagtgatgcagtggaacaggaataaactggctaagcaccaactgaagatatcagaatatttatgcagcaaaaaccagcagacatcatatagtaagtagtcaaagaaatgtttagcattgcacagttattccagaaacagggagtacacaatgtttggcttatacagtttacagacacacatcaagcatgtaccatttgttcattcatttactttaa

SEQ ID NO: 29197 - DNA, 495 bp, Homo sapiens
tatttgtttaagcctaataaatctagataattcctaattcatggattcaaaaattaagtgaaatgtatagacacgatattatatatttatattaatactaactattgacaagtgattttatgttttactgaaccacgtatgttgtgaaaggagacaagaaaatgcctgtctaatagaaaaaatatataaatayataatccttaggactctacagctaagttaaggctaaaatcaattatttattatagataccaaattaatgctagacaaaataatgataatattaaattatagagaaaatacactgtatttatgaaagctttctgaaaaaatactacgcactgcttcagggatttttggaagtattatggtttttgttctttcctttagagttatatatgtaaccttagactgtaaagcttacgaagttacatgctctctggacttaattacttcatcaaaatgatgagggtggactaaacaaaatataaggtt

SEQ ID NO: 29198 - DNA, 908 bp, Homo sapiens
ttttaatctggcattttctcttactttaccatataatcttacctgaatagacttagcatttttctatgaattattcattttggcacgtaccctgtaaaacatctaaagtttctaaccttttgaaaccacraggcttccccagccagcatttagagtgaaatctctgtggtagcactttaccaatttaccccttagctctttttcagttcttggctcatgtgaataagcaggccaaaatgctcttctgggaatgcacagcatggatatatattttttactatcacagcagaattgttttgaatgcatttcggccatgaggttaaagctctccacaaggaatacttcagcaataattctgctgccctctagctgagcactgaaatccctccggaacgccagtattacccttcaagaatggttctgaaatgactttactcacttccccgtcctttctattcctattgaaattcttctagaatgctcacagtaactttcagccagatgccagaataacttttaagttctagataggtttctgtaacaatttattacacaacgcaacacaagctcactttttaaagaagaggcctgataggcacagctggtcaaaattgtattccagatatcctgtggttagtttatttcagctttattgatgactcagaaattacataaagggattgtgaaaggaccagcacacacgtgcagatgaaagggttggattttcttcttagattctgctgccactactgctactgctactattactttcttttccaattattattttcagagacactaggcatcaagacttggctctgacacttgttaaataaaagccagtgaacttggtcagaaacaaaatgtattctcataagctggccccaaacttgagtaacacacagaaa

SEQ ID NO: 29199 - DNA, 908 bp, Homo sapiens
ttttaatctggcattttctcttactttaccatataatcttacctgaatagacttagcatttttctatgaattattcattttggcacgtaccctgtaaaacatctaaagtttctaaccttttgaaaccacaaggcttccccagccagcatttagagtgaaatctctgtggtagcactttaccaatttaccccttagctctttttcagttcttggctcatgtgaataagcaggccaaaatgctcttctgggaatgcacagcatggatatatattttttactatcacagcagaattgttttgaatgcatttyggccatgaggttaaagctctccacaaggaatacttcagcaataattctgctgccctctagctgagcactgaaatccctccggaacgccagtattacccttcaagaatggttctgaaatgactttactcacttccccgtcctttctattcctattgaaattcttctagaatgctcacagtaactttcagccagatgccagaataacttttaagttctagataggtttctgtaacaatttattacacaacgcaacacaagctcactttttaaagaagaggcctgataggcacagctggtcaaaattgtattccagatatcctgtggttagtttatttcagctttattgatgactcagaaattacataaagggattgtgaaaggaccagcacacacgtgcagatgaaagggttggattttcttcttagattctgctgccactactgctactgctactattactttcttttccaattattattttcagagacactaggcatcaagacttggctctgacacttgttaaataaaagccagtgaacttggtcagaaacaaaatgtattctcataagctggccccaaacttgagtaacacacagaaa

SEQ ID NO: 29200 - DNA, 643 bp, Homo sapiens
ggactacaggcgcccgccaccacacccggctaattttttatatttttagtagagacggggtttcaccgtgttagtaaggatggtctcgatttcctgacctcgtgatccacctgcctcggcctcccaaagtgctgggattacaggcatgagccaccgtgcccaggcaggcctctttttattcatagctggtcaccmcaaccaatttgcatgaactcttgatcttctggagagaaagaaaaacagatcccaaccactgctcctgtgaatttaaagttaaagaagcctgtcaggataggtcagagtggttttgaccaagatctgcaagtataaattgccaccagtaccccaaagggcaacctgacaggagtggagggacagttggggagtctgagactctgagccagtgatccaagctcaaacaacagtcaaagagtcttgagaggaggctgaatctggaatagcatatagctaacattgcaagttcctcaggaccaagccagagggcagagggtcatgctttgaagactaatcactgagcatgcaagaactgggaagctataacctgggagcccaggcaggtgttagcactgccaatggggaaagtttcaacgaacatgggcaccatcacagcagcaggcacaca

SEQ ID NO: 29201 - DNA, 643 bp, Homo sapiens
ggactacaggcgcccgccaccacacccggctaattttttatatttttagtagagacggggtttcaccgtgttagtaaggatggtctcgatttcctgacctcgtgatccacctgcctcggcctcccaaagtgctgggattacaggcatgagccaccgtgcccaggcaggcctctttttattcatagctggtcaccccaaccaatttgcatgaactcttgatcttctrgagagaaagaaaaacagatcccaaccactgctcctgtgaatttaaagttaaagaagcctgtcaggataggtcagagtggttttgaccaagatctgcaagtataaattgccaccagtaccccaaagggcaacctgacaggagtggagggacagttggggagtctgagactctgagccagtgatccaagctcaaacaacagtcaaagagtcttgagaggaggctgaatctggaatagcatatagctaacattgcaagttcctcaggaccaagccagagggcagagggtcatgctttgaagactaatcactgagcatgcaagaactgggaagctataacctgggagcccaggcaggtgttagcactgccaatggggaaagtttcaacgaacatgggcaccatcacagcagcaggcacaca

SEQ ID NO: 29202 - DNA, 643 bp, Homo sapiens
ggactacaggcgcccgccaccacacccggctaattttttatatttttagtagagacggggtttcaccgtgttagtaaggatggtctcgatttcctgacctcgtgatccacctgcctcggcctcccaaagtgctgggattacaggcatgagccaccgtgcccaggcaggcctctttttattcatagctggtcaccccaaccaatttgcatgaactcttgatcttctggagagaaagaaaaacagatcccaaccactgctcctgkgaatttaaagttaaagaagcctgtcaggataggtcagagtggttttgaccaagatctgcaagtataaattgccaccagtaccccaaagggcaacctgacaggagtggagggacagttggggagtctgagactctgagccagtgatccaagctcaaacaacagtcaaagagtcttgagaggaggctgaatctggaatagcatatagctaacattgcaagttcctcaggaccaagccagagggcagagggtcatgctttgaagactaatcactgagcatgcaagaactgggaagctataacctgggagcccaggcaggtgttagcactgccaatggggaaagtttcaacgaacatgggcaccatcacagcagcaggcacaca

SEQ ID NO: 29203 - DNA, 643 bp, Homo sapiens
ggactacaggcgcccgccaccacacccggctaattttttatatttttagtagagacggggtttcaccgtgttagtaaggatggtctcgatttcctgacctcgtgatccacctgcctcggcctcccaaagtgctgggattacaggcatgagccaccgtgcccaggcaggcctctttttattcatagctggtcaccccaaccaatttgcatgaactcttgatcttctggagagaaagaaaaacagatcccaaccactgctcctgtgaatttaaagttaaagaagcctgtcaggataggtcagagtggttttgaccaagatctgcaagtataaattgccaccagtaccccaaagggcaacctgacaggagtggagggacagttggggagtctgagactctgagccagtgatccaagctcaaacaacagtcaaagagtcttgrgaggaggctgaatctggaatagcatatagctaacattgcaagttcctcaggaccaagccagagggcagagggtcatgctttgaagactaatcactgagcatgcaagaactgggaagctataacctgggagcccaggcaggtgttagcactgccaatggggaaagtttcaacgaacatgggcaccatcacagcagcaggcacaca

SEQ ID NO: 29204 - DNA, 969 bp, Homo sapiens
tggcttggacattttaatttcgtaacaataatatgtaagggcatccttcaaaaggacatttaaggtatgcttgctgagaatcctgtagaagactctcaaatagttaccaagtaaatgccattattataaagtttttacaattatgatcataatcaccattaacctccttcccatttgtagtataccttatattttttaaaagtgctgtacatatttttacatttaaactagataatgctttttttttaaaaaaattgttcaacagtggatacactaaggtccagagtgaataatttacccagaattgcacagataaccagcttgataagaaacttggcattggttttaaatgtcagctctgaaacaagcatttagtgaacaattactctgtgctaaacactgtactagctgctttacatacacaatattatttgggtccctccagataagtattatgtcttatattttatagatggggaaactggagcataaaataagtaaatgatttttccaaaatcttgtagcacgttagtgttagagccaagtgctaaaccccaactctgcccgaattcagcatagatgtgctgcactatctactttaagctaataggtccaaacctagatgacatgccctttcctaaagttacttccattagtgagcaaattcacaagagcattgcctgccatgaagaatatatctgtctttctagtaaagtgcttttggaattttttttccctagtgagagatttggaaacttagcatcacaagaaaaaawaaataaataaaaagcaagggaaatatcaaatgaccttagttctctgccctcaaatgctgatgtttggtcaccagtatttctcggtcatgaaaaagtgacctatagacatacactttattcaattggatgaagtttaaaatgcaaacaccagtgtgtctctgcatgacatttagtgtttcattttctactccat

SEQ ID NO: 29205 - DNA, 479 bp, Homo sapiens
accatgatacctgagggtttgcagagcaaccctgagaggctggacaaagaaggtcacaggaacctgttccccaagtaagraaactaaggctcaggatgaaggttccctagaaccacatgctggcaagtggcagacacagaattaggaccctagcctcctgagtctccccactgggaaagagccagcactatcccaccacccatcacctcctcttctccaagccccaggtccccagccctctacactcatgcaaaactgggtgggaagcatgaaagactttcactgtgaaaaggagagatgagagaaggggaggtgggggtcaagggaggcccaagcagggggaggtgaggtggaagtgaagaggcaggtggaggtggaaaggcaggtggaggtggagaggcaggtagaggtggagaggcaggtagaggtggagaggcaggtggagaaggagaaagaggtagaggtggaaaggcatgtgg

SEQ ID NO: 29206 - DNA, 823 bp, Homo sapiens
agccactgtgcttggccagggcctttagaattctgcaggccccagcaggaagggcttgccatgaagctcagcctgcactcaccttggaggtgagctgatggcagtggaggcagccaagtctggagccccccaccaccaatgccaccctgaagcagaagggctgggagggaaggagcattagagagagagagaaggagaactatgtgccaggtcaaaattaaaaagacaaaaaggtgaacagagcaagagagcaaagaaaggatgaataagaagaggggctaggaaatgcctgctgccctctctcgctccctcctgtgctgttcccattatcatacctttttaggccaggaggaagaggcgaggccaaaatatgcttggaaggaatcagaattcagtcaagaagtatacagttatacactgcgaagrcttccccttctgcttctgtttctggccactgggcttggtggcagctgttctcatctggtcaccgcgatgtcctagcatcagaaggctatgattgcaaaggtggaatccaggcttcagggcaacaggcctgagctcaagcctctgcgctgcctcttggcagctgtgtgaacccagatgtggcaattcatctctctgttagtctcccctggtgggaaacggccatgatcatgtccagcgcacagaggcacactaagaactggatgcaaagatgactacaagtgcttggcaaccaacagcaatcggcaagaggtgtcaccatctgcaccacagtgaaaagactcaagagacccaacccaggaggaagactgagcacgcagcctacctctccccagggcct

SEQ ID NO: 29207 - DNA, 1104 bp, Homo sapiens
ctgctctgagcccacatcagagcccctctctaacaaagaggtgccagtgtctggcctgcaggctgggtacctttctacttgctcccactagcctctgccgcacccttgactcccacccttctcagtttaaggatctgagctgtggtagccatctctagctcagggtgagggcatggtgcctgcaacctccctgggaatgaattattgaagacagcattgtgctagctgttcacagctgctgccccttgggcccaccattgcytcttactgtgcttctcactgctgtaagggggtatgagtcttggggcctgggaagagggtattggggagaggcagggactgaataaggttgaggaagtgggccttggagagaagcctcctggggtggagggaggtgggctggcaaagacttgtggcccctcatgatggatcaggagggtagtcataggacagagggagctggcaaccacttggttgcaaccaggttgggaagtgagactggaagacttttgactggagtggtttcccaggattggaggtctggactctcatatgcttctggggtaacacagagccagaaggagtctggatttttccttgaatgacctgaagtcagcaccggtaagtgtcattcagggatgctctgtgcagagaggcctctgtcccttccctgcaaataaggtcttgcatgtgtggtgtgaggagtgcagttagtgtcacggtcctagacaggcctcatctggtaccttggaaagaatgcaggatttagagcctgaagaccagagggcaagtcctaattctgccatttgctggttgtgggcaagccatttattatctcagaaactcagtttcttacttttattttttacttaaaaaaatttttttaagactagttaattgcaatagtgagaaggggggaagagtagaacaaggagtttgatctgactctgaacaatcaattcagattgcttgctacctttgtactagcctcagtttcttttcttttctttttttttttttgagttggagtctcactgtgtctcccaggccggagtgcagtggagtgattttggctcactacaacctccacctcctgggttcaag

SEQ ID NO: 29208 - DNA, 1114 bp, Homo sapiens
tctatttttagttttttgaggaacctccatactcttctccatagtgattatcctaatttatatttccatcagtagtgtataaggatttctctttcttcagatgccccccagctttcattatggcctgtcttttcgataaaagtttgtttaactgcagtgagatgatatctcactgtggttttgatttgcatttttctgatgattagggatgttgagcaccctttcatatgcctgttggccatttacaaatgtcttcttttgagaaatgtctattcagatgttttgcccatttttaaaaatctaattagttagatgttttcttatagagttgtgtgagctccttatatattctggtgactaatctcctggcagaggggtatttcgcaaatattttctcccattctgtgggttgtctcttcactttgctgactgttgcctttgctgtgcaaaatctccaaatttagaattaagcagactaaataggcttcaattaggaaataattgtaccaggatggacagttatttgaccagagccaattagccattgatgtttggtttagcgtttcttttctactgctggatacatctataaatgtattctcttgctctttgaagaaataaatttagtgattatattagtcagggtccaggcagaaaaacaaaaataaccccagttatttccatggagagaatttaatagaaataactgtttgctggttaccaaaaaccaraaaggcagaaagggaggccctgaggtatcaggaagcctgtacccctggggcttgggggtcaaatgggagggtgagattagaacttgttcggagggagtgtcaccaggctggagcaggtacctctgaggggcaagatgaggctggttctggaagtacggggtgacacacagcgggagactggggccgactgagggtccaacgccaagcttagggccacagcaagcacacagcaggtctccgcttcctcccgcatccttccagggtctctctttagcgccacctggttgcggagcctaatggggagctgcaggcgaagcagagtcccagactcagcatcacagagcagagctgagagagggtagcttcataagcagcacagtatc

SEQ ID NO: 29209 - DNA, 644 bp, Homo sapiens
tccaaagtatatttgcttttggtgaatgctggcattttttcttgatgaaatgaagtataaagaagtagcataagaaagtagcattggcaggagcaagtggcaagctttgttggtttagcaatcaaaaagttatctactgtgcagatattttatacatatatataatatgtatacaaatacacacaaacgtgtgtatatatattttgggtatatatatttgcaaaacatttataaagctgttatcatgactttctctttttttaaaccaccaatacatggtaggaaaygttaaatgtttacagcaagctgcttattttattttcctttatttggatgaagtgccttcagactaatccatattctcacctctgccccattcatgaatgtcttcttattaaaaaaagaaacaacaacaagaaattaactgttaaaaatgtacataataattttctgaacaaagggcaattccctgggaaaaaggtgagtcttaacacactgaaggttgttggtagaattaatcacaggagaattaatctgttacatacacccacactaaccatgcccatatacagggaatacttatatgtgaaatatacatatattgcacataagcatttgctatgtttctcctgacatacatgaca

SEQ ID NO: 29210 - DNA, 644 bp, Homo sapiens
tccaaagtatatttgcttttggtgaatgctggcattttttcttgatgaaatgaagtataaagaagtagcataagaaagtagcattggcaggagcaagtggcaagctttgttggtttagcaatcaaaaagttatctactgtgcagatattttatacatatatataatatgtatacaaatacacacaaacgtgtgtatatatattttgggtatatatatttgcaaaacatttataaagctgttatcatgactttctctttttttaaaccaccaatacatggtaggaaacgttaaatgtttacagcaagctgcttattttattttcctttatttggatgaagtgccttcagactaatccatattctcacctctgccccatycatgaatgtcttcttattaaaaaaagaaacaacaacaagaaattaactgttaaaaatgtacataataattttctgaacaaagggcaattccctgggaaaaaggtgagtcttaacacactgaaggttgttggtagaattaatcacaggagaattaatctgttacatacacccacactaaccatgcccatatacagggaatacttatatgtgaaatatacatatattgcacataagcatttgctatgtttctcctgacatacatgaca

SEQ ID NO: 29211 - DNA, 485 bp, Homo sapiens
aataaacatgattttcatctttaatttactgatgttttgagttcaaaaagagaaataaaatcttttatttactgctatttcattgcaagaagaatacagggtagcaatctctatgctgcccagaaaaaaggggattagaccataagaatctgccattgtcttagtcaattgtggactggaataacttatcaaaatttgtcctgtttttagagactaaataaaacagctcttaaaataatctaaaatgcttctagtccagttctctaaatacacaacaytgttagattataaaattggtttcctaattacctgcattataagaaagggatgccctggatggtatatacaaatattttagctactgggatggtgtacctgcactatcaaccaatttattaaccttctagtttacatagtcattcagcaaacatctactgaatgcaaattatttcctggagatttacagagatgtttaagacaccgta

SEQ ID NO: 29212 - DNA, 531 bp, Homo sapiens
tcagcaagatcttaagacagctaaacccaagtttctcagcaagaatttacaattgagctctctttttcttaggctacagaaaaatgaatagaaatttagccaaactgtaacactgaaggcagwcatacaacttcaatatccttgtaccaaacaggacaggaaaaacttcaaagattactctaaaatatatcagagaaaacataaaagtctgaatatatttgcccaggtcaatcacgagcaagatgaaagatgaaaagaaatggcataacaactatgctagtgtacttaaaaacaaaacaaaaataataaaccagaaaaaatgtgcacagcattcacaaagcaaataacccagtatggaaagcagccgcaaatttggacaaagacaaattaagaacaaaggcaaattaaccaaagatgcttcataattaaattaaaatataaatcctataaaagcttaaacataagatcataaaacaattagaaccagatgaaaagcgtgattctagaaaaaaaacagactgagatcaaaca

SEQ ID NO: 29213 - DNA, 1731 bp, Homo sapiens
ctggaacagtccctagctgagaggggagaggtcacactgttaatataagcaacttgtctaagattcaaatccagatcctcctgaccccaatccctggcctttctgccctggcaccctggctctgctaaggctttggtggtttaagaagtcacagtgaattttagtggctaagatgtatttgcattttgtaagtggaactgtaatggggtgagtatgggggaggtagttcttggcggatatgtaggggatggtggtgatcaccacttccataaccctttccctatcctaatgcagacctggaggcaaacaatgagaactggcggtcacaacactctgcttaggagtatgtacatttctaagcctttgctcattgggggtgtagtgtcacagagtgtcatgggttgggagagcatgggggtgcacagcctgcatctcagagataaaccagtgtgaatcacagttggtaagtgttctctattatccctgcttcctgggtgaaacccaccactcaagaattagtagactgatttaaaggtatcattttcgaggaatattttcccaggcagctttgttctgttttcagacctctaaagctcatgtttgtactcctgaagatgggtgtgtgtgtgtgtgtgtgtgtgtgtgtatttaatcttcattccaacaaccatcaggacttttccccccttttggtgcagacatcaaggatcaagcagttactataaagcattaccaccaggatgtagtagctgcatttgtttccagttttagtctccagatctgaaaggtgggctgaggtcaaccaaatgttagatttgtgaatatctgattgctagaaggcactgatctttttctaaagcttttttgctcgttttcagttttctgcccccaggcttactgataatgctctgcattctccactttcatggtccaaaaattcttctatttctaactgctctcacaggataagaatatgtataattatatacacttttttttccattaacctccttgctcttttgtggtgtttagttatttgatgattttcccctctcaagttccctcacattatgcatgctcctatcaggtaaatctcctgcacgttccttctttacctaacagagcgcgacattgttgagggactgagaggaacagttttaatgaataactaatgatcatttgtaattagcatatcaattgtatgaatggaaatgatgccactaaattacttgaggatgattaacagcagtggattcacctagatagttttaaacattcttctaacaagccccatacactattaatttacttggtaaacttttacttcccaaataatataaagaaaacttctacttacaccaaaggcaaaatcatattttgttgctgttgttgtctgtaaacatctaaagccctaagcaacrccattaacaagaaaatagttcaacaaagaactaatgtttgttggacgctttgtaaatcctaggcactgttccaagtgctttatgtatgttaaatttaatgctcataataatcctataaactaagtacactatgatgcccaatttacagacaaggaaagtgaagctttgaaatattaagcagcttgtctgtgttcacagagctggtgagggaagaagctcagattcaaacccaggcaatactggttccttagcctataagactttatattttatattgatgttatattcattgactatttattgagttcat

SEQ ID NO: 29214 - DNA, 1312 bp, Homo sapiens
cctttttatggcagatgggtctgatttatacactagctacttggagagkcgttagggagaactgaggcatagtgggcaacaaggcttggaatccaaatgtacttctcagtcctcctccttggctgcctctggccaatccaatttgctgggctctatgaagcacagccttggaatgagttctgggatgaagaaatggaaaaccagattgaactgatttttgttgggaggagcactgtgtgattcttgatagaaaatgacgctgcgttaatggtaaatgagctggggaaaggggcagataaggaagtagttgaaaggtaaagaagggccccaggtccataaatgggagaattcaggatggctcccctaacactagtggctcatcatacttaccttgcctgtattccaggtaacagggccctgcgaaagagtgggtattactagtttcactatctcccacacatttctaaccaaaagcctttcctgaaaatgaattgttgtttcttcctttagtgtgagaagtgctcagtggtgagagaagaggattcccagaaggaggcatgaaacctgggaagagaagggagtagaggcatctgtctctccagagtgccttagctgagatgtccttacatgagattagggtggacaaggatccctattcttattgattagatcattctggtcttcactcacttcagcagtctggtccttaagaatgctagctttgtacaataaatttacaagtaaaaaataaagctagctacatgtaatataacttacccaaaaaagtacaatctccggattattaattggcaggaatagattcccagtcttacgtccttaaagcagagaaagaccttgaaatcaaggtagatcccaacttgatctatgttgatggcctactggattttgcctttttgaatattggggaggctttgactatcagatgaagggaaataaaaggatttagggctttgctgggtaagaggtgggagtttcccaaccctctcaatgggatggtttctgaataggtgagaaaggagatgttcccccttttaagtggaaataaagatccccctgcccctttggtcaaggtgggaaggggttgctaagtctggaaataggaaatagacatgattatcttaggactgggtactgcttggaaatggaaacatggcatatatacttgtatgtatttatctaactatctatctagattcttctactcaacacatcctattcccccccttctacccttttaatttctaatcaggacatccagactttcttcagggagactaggcctggtgttttt

SEQ ID NO: 29215 - DNA, 636 bp, Homo sapiens
  misc_feature (1)...(636): n = A,T,C or G
tgggtgtgaggtgtagtccccattcctatctccaatgactagccagcagaaagggctattcaaatgattcctggccctcacatcttggtcaataagtgcagcagraaggattaaggttcaatactaggagggcttatctttgctccacttctttcccaaagggagaattcatcatttactggacaatcttttaccaccagtgacttactctaaaggatgccagcatgagacttacaggcatctgcaggctgagtctccgagtgaatttcaccttctggctctgaaaaagaagaggttaaagtcttcagaggtctcaagacagttaatatatgagtttttccctctgtaacccctcctgccccagcattttcaatcttccttaccttgctttacatcctccttagcatttcaaacatactttgtaatttacttaatatgttcaatgtttgttnctttatcatcgcacgtcatttcaatgatgactgagtttctattctattagtgtatccaagtgcttagaactacgtgtctggcacagagttagtgctcagtaagtagctatggaatgaatatgtgtgtacatattgtacagagggaggcacggaagtccacaaaaaggtagtgactntgactgga

SEQ ID NO: 29216 - DNA, 565 bp, Homo sapiens
ttggagaaatggctaataccaggggtaggacagagaaagtacatgataaggctggaatgacttgttgtaccagaaagtaagaaaatgctcaaaaaatgatggagacatatcaaaagaatacaaaatctaatgagaaggttagcttaatcccaataatattgaattatctcagactaacaaaattcagcrgaaaggaaaagtattataaaagattataatagaaagaaagaaaggaaggaaggagaaagaaagaaaatgaatgaaagaaagaaagagagagagaaagaaaaaagaaaagaaagaaggaaggaaggaaaaagaagagaaaaaatgaaggaaggaaaagaaaggaagactataaatcattgaataaatagaaaggaaaggaaaagaaaagaagagaaaaaaggaagaaaggaaaagaaatgaagattataaatcattgaataaataggaagccatgagtccatattgattaaataaatgaatggataagtaaatggggatatgagaaaggtttttcttacagtagaatggtagctaataaattcagaaggaatgattg

SEQ ID NO: 29217 - DNA, 1329 bp, Homo sapiens
  misc_feature (1)...(1329): n = A,T,C or G
tccaaatccttacttgaatccatctataacaaaatataatataaatataaaagcacactttgctttctgatgtattttataatcctctttatcttaaggagatatgtttttacagctaagagtggaagccttgcctaaagagctctgggttataataggaagttcctctaatattttgtactgtaaacatcttcaaagcagggaacgtgtttattcatcttctgttttccaaaaacactttgtgcttttcacaagtaagagctcaataaataattgcggagcaaatgaattcagtcctaagtgggttactccgagactcagttcccttctttatggtgcctgatagtttccgtgtagtcttagtgaccttcaaataggtanaaaaaaaaancaacaaaacccaaaccgcccaaaacctcctgctttgacccagcctagagannnnnnnnnnnnnnnnnnnnnnnnnnnnnnnnnnnnnnnnnnnnnnnnnnnnnnnnnnnnnnnnnnnnnnnnnnnnnnnnnnnnnnnnnnnnnnnnnnnnatcaatagttcatcaccgcagcctgtgggccaggtacaagcccacccacacagaactccacctgttggaacatgccctctccccagacaggcatctgaactatcctaccctaggctctgccggcatccaggagctcaggatgcctgccctctccttttgagaaggtgccaacaagcccccactcataaaaccttcctccacataggggaggatgggaagagacagcaggagggaacgaagctagacctcgaggcttcctgaccacaaggggcacgctgcggcaggaaagaggacactttgcctcataggcctctctagccatggcctgggggccctgtgtcctactgcagattcctgccaccaggctgcccttagagaaggtattcgccccaacaggagacagggtgtggtgggagaagtaagaacagacagtaacagagaaaggacccaataggacgtccctgcgggctctcccccaactctgaatagaygccagacaacgcaaccactgtgtcctccaaaagccgggaaaccatgtacactggggttcccaaaggggccagggctgcagggatggtttgggagtgagatttcaagcgtatgaagacagcagttacagcactgacagcctctgtgttgcggtggcagatagagctcggaaaggctaagagcaaaaaccttggaggaagatgtgctggggagctgggagtcggggttaatgggggtctggtgcagaaggaacctgagcacccattgagggtcatctggtgatgtggaagcctctggga

SEQ ID NO: 29218 - DNA, 820 bp, Homo sapiens
ggttatcaccactgccgtgagtattccttcaacaagggctgacacagagaacaattatacttattgggcatatttatccattttggctggcaataatgcctggatgtaatcactctatgacacagttacacacgctttctgatctcagtatttaccataataaatctgctcctataattgaggcataccaccctcaaaaacctatttgtaaacaaaattgaacctggccagaaataatgaacgtacttgtttaggaagattgcactgcagaacagacagaggtgctacacaacgattcctatggaatcattattaattggtcccctaaggagatgtttagcttaaattgcacctgtcagtctgcatgccacggccacactatgttcagctggtctgaacaaaacsgtcggatggcagaaatgataaaaagtatgacaagagttcctattatctggaaccatggtggtatagtggcacctcaacctcatatgatatggcccgctgtaggagctaaacacaaagatttgtggaaactattaatagctcttaataagatcaaaatttggtaaagaataaaaaagcatctagaaagacactctacaaacttgtctttggctattgcaaaattaaagaacaaatatttaaagtatcccaggcacacctgaccttaatgccaggaactggagtgcttgaaggagctgcagacaaattagcagctagtaacctgttaaaatggataaaaacacttggaagctctgtgatttcaatgacgattgtgcttttaatctgtgttgtttgtctttgtatagtctgcagatgt

SEQ ID NO: 29219 - DNA, 1134 bp, Homo sapiens
aagatagagaaaaatgaagccagagagagagagacaaaggcagggagggaggatgagagaaaggagtttgggggagagagagagagagacagagagagagaaacacacacacgtgcctacacacacacacagagacacagagacagagagagacaaagagagacacacacacacatgtgcatacacacacacacacacacacagagaaacagaaactgcttatttcattgaaaactccactccctagtattatgatccaattggatgtcctcgatttgtgctagacaatctgccttttgtgtgccatatctgaatcttgagctcctcctgcagaaaactgcttaatccaatgacttatctgagaggttactgttccccttaaaggacaaggtaatcacagggtgagatgtcttgtatatgcctttgaaaaagcactgctacgtcgtcatcattgcttttgtatatcttctagacctaggtagtgagcagttcatatttccaagtcacttcataaatatcttttaattattttcttcagaagcctccaaaacataacagaatattcttttaattaaacgtaacccaggacaagatactgcctttattatataatcaggcaaactcctcggctcctcatatcccattattaagttaatcctttgttctcatggagaaatcaaccccttccctcaaaaatgaatctcttcttgttcccccaaagaaattagtgtactcaaggatgtaagaaagtaattcaaaataattgcttttcaattttcctttttcttatttttctcaatatccatgaaaggggcttctctcagcagcctggttggaatctcattctcatctttggcactttctgcctggggyacccatgggtgcatctgtagttccttctgaatctctgaaagtagattaattttactccaactctttcatatacttcgcttttccaaagttccacaggggcaacaagatgcagaggacctcctcaatgcaaagtccatacctgcaacatttgggaaactcaagcacatttcctaaaaacacgtggcaatgcactaatttacaatataggcctgaatccccataaatcaaagcttttcccaggcaaaggtaatttttccagga

SEQ ID NO: 29220 - DNA, 1134 bp, Homo sapiens
aagatagagaaaaatgaagccagagagagagagacaaaggcagggagggaggatgagagaaaggagtttgggggagagagagagagagacagagagagagaaacacacacacgtgcctacacacacacacagagacacagagacagagagagacaaagagagacacacacacacatgtgcatacacacacacacacacacacagagaaacagaaactgcttatttcattgaaaactccactccctagtattatgatccaattggatgtcctcgatttgtgctagacaatctgccttttgtgtgccatatctgaatcttgagctcctcctgcagaaaactgcttaatccaatgacttatctgagaggttactgttccccttaaaggacaaggtaatcacagggtgagatgtcttgtatatgcctttgaaaaagcactgctacgtcgtcatcattgcttttgtatatcttctagacctaggtagtgagcagttcatatttccaagtcacttcataaatatcttttaattattttcttcagaagcctccaaaacataacagaatattcttttaattaaacgtaacccaggacaagatactgcctttattatataatcaggcaaactcctcggctcctcatatcccattattaagttaatcctttgttctcatggagaaatcaaccccttccctcaaaaatgaatctcttcttgttcccccaaagaaattagtgtactcaaggatgtaagaaagtaattcaaaataattgcttttcaattttcctttttcttatttttctcaatatccatgaaaggggcttctctcagcagcctggttggaatctcattctcatctttggcactttctgcctggggcacccatgggtgcatctgtagttccttctgaatctctgaaagtagattaattttactccaactctttcatatacttcgcttttccaaagttccacaggggcaacaagatgcagaggacctcctcaatgcaaagtccatacctgcaacatttgggaaactcaagcacatttcctaaaaacacgtggcaatgcactaatttayaatataggcctgaatccccataaatcaaagcttttcccaggcaaaggtaatttttccagga

SEQ ID NO: 29221 - DNA, 555 bp, Homo sapiens
  misc_feature (1)...(555): n = A,T,C or G
tgtaaacacattatcaaaaatagaccagtttaactgaatttcatcacttaatttgcacagatattaactaggaagttagtcttcacaaggttagaagctgccagcagagttcccaaacactatgatatcttttgagtcatttagctcttttccctcatactgtttctcctttttatgcaataattcttttttcaaggcacacttttcattttctaattcctcatccctttattggcatgccattaaactcataattgatccatatttttcttaacatggggaaatgtaatttctcatttctcatcatatgttccttaaaaaattcatattctcagctcatcctaccctctccacagcttaaaatctgcctggtattcttagattatgttgaggacatgtccattattgtagtgttattctgctgtgttccagtctgtaatgtggtgtgtttcagtaatagttgctgcatagcaaactaccctaaagctggtggcataaaactgcactatttgtgtgtgcrtgtgtgtgtgtgtgtgtgtgtgtnctgactgattc

SEQ ID NO: 29222 - DNA, 581 bp, Homo sapiens
tataatgtatcatattttatcctacagtgaaattattttatatatataatatrtatgttatatgtatatattatatatacttgttttcttaaacaatttggaagtctcattaaaaaaatgaaaacaatataaccctattatacttaggttagtactttggatatagaggtactcaataaagcttgttgtattcaactctgaagttgaggcaaatcataaatgtgattggatattgaatatagaagattgaatggattttcaacatttaaaataccatctgatcttttttggcatctggcacaactttccataagtcttcatttctttttgttggttctactctgcttcctcaccacaactctagaccgttagcccttcctcagtctctgggaaggcctgaaacataccctgcatggatcctggtggggctgttgtgctggcagctgcctggctcacctcaccagccctggaggggcccacacaccctccccagagtggctcctgggaagcctgcacattctcctgccttttagtgctattgggctttttcttttaagatgattcttctatgtctattctcc

SEQ ID NO: 29223 - DNA, 581 bp, Homo sapiens
tataatgtatcatattttatcctacagtgaaattattttatatatataatatgtatgttatatgtatatattatatatacttgttttcttawacaatttggaagtctcattaaaaaaatgaaaacaatataaccctattatacttaggttagtactttggatatagaggtactcaataaagcttgttgtattcaactctgaagttgaggcaaatcataaatgtgattggatattgaatatagaagattgaatggattttcaacatttaaaataccatctgatcttttttggcatctggcacaactttccataagtcttcatttctttttgttggttctactctgcttcctcaccacaactctagaccgttagcccttcctcagtctctgggaaggcctgaaacataccctgcatggatcctggtggggctgttgtgctggcagctgcctggctcacctcaccagccctggaggggcccacacaccctccccagagtggctcctgggaagcctgcacattctcctgccttttagtgctattgggctttttcttttaagatgattcttctatgtctattctcc

SEQ ID NO: 29224 - DNA, 568 bp, Homo sapiens
tccttctttcatattcatctacataaaacagtcatgataaaattcattctctaaggtggtagtaaaaattagttgagatgatgcatgtaatggtgtttacctcaatgactggtacacaatactccatcatagaagttcttttaatgtatatcaatctaaggcttagaatttcacatttaccagtatttattcctcacctctcattcacacagcatttgaaatcatcatcagctcagacctcctgactttcatggaaggcatccatgaaatcaagtcttttaaaaagtcaaaaatgatttctttcgcccagaggattccagtctttgaactacataatttggattttttgttctgttttgttttgtttttcagctaagaaagcaagcacttcatttcttaagcaaccgcacctcagcactaacaaccccarcagactatctttccctcaaaatcacaggactgctcatagaatgctcagagcatcacagaatcttacagaactcttttataaagaaaaatatggctgtcatctttttatgtctctaagaaatgacaataattcagattt

SEQ ID NO: 29225 - DNA, 801 bp, Homo sapiens
tccccccacgaccgtggcagggcagatggcccagcaggcccagggaaggagcctgactcagatgccacaagctggcatcttggcagtgggcccagggtatgaggaagaaaagataaggtgaacctcacagtgcgtggccaacatgcagccgcagcccagagtgtggaggcctcaatctggccccaaacccaaagcccagctctgccgcttgctctgagtgtcaccccaacactggagaggtcaccatcctctcccaggatggtgaaggtgagatgggaactgaatgcggagcgtcaggcatggagcagatgccagtttcccggctttacaaacacacatgacccccgtgagcctggatatggggacaggtctgatttttcattcatgcacctactggggcaacggggagcagggaaagagggaagtcagcctgggcctactctgagcagcagatgaggacgctttagaatgagcacactgggccgggcgcggtggctcacgcctgtaatcccagcactttgggaggctgaggcgggcagattgcctgagctcaggagtttaagaccagcctgggcaacatagtgaaaccccatctytactaaaaaaaaaaatacaaaaaaattagccaggtgtgatggtgggcatctgtactcccagctactcgagaggatgaggcacaagaatcgtttgaacctgggaggcggaggttgcagtgagccgggatcacgccactgcactccagcctgggcgacagagcaagacttggtctcaaaaaaaaaaaagaataagcatattgactgg

SEQ ID NO: 29226 - DNA, 631 bp, Homo sapiens
attgtcacctgttccagcatcattttactgtttgctgtagctctgaactgctttccagtagaactagttcaagataaagagatgacacaaagcagcaattcactaagggagtagactcctgttttgaatatagctagaatcatcaatttacagtgaacaatgatgacttcagttgaattatgaatatttcactttatgcagttaatgctctagagtaattaaatgaaattatctttcagtggtttttctgaaaaactgaattaattttcatgtgaacaaaaggaagtactggcttccatttgacattccaagtgacagtgcagactcagcttgctcctytatacatctctatgagaatttattttctttcttttttcccattggcctgaagtttgcctcttagctgtatcaatatcatgcttctctaatcaggtcctgattagatggagatcttcagaaacataccttgagccaaggagctgattaaaatgtatgctgaattggaggaaaaagaatagatgaaatacagaagagatgaaaacgcttagaagtgacttcctattaaatttatttcaccagtacaaatgttagtccctagaaagcttgagctaaaaaattaaaattattaggc

SEQ ID NO: 29227 - DNA, 604 bp, Homo sapiens
gcctcccaaagtgctgggattacaggcgtgagccaccacgccccgtcctttctctactttttaatcatttccagtatctgttaatataacttggctgtacccctgaaattctcctgaaattgtttttttaaagcaatgttgcctaagttataacctcaaatgaacatttaaatgagcatatgttaattatctataattaataaaatgattatgtaaatgaacttaaatttgaattaattttatttacaagtccacattagtttaaatatctggyattctgttaatagtctattattaccttttttcatataaccatctagatttcatatgaaaattcccttctgattattttcagcatacaatattggtaacataattgtgcatagaccatctcacattcataacagctggctcttaatagaaaaagattcctaaataaaagacatatttgaatcatatattcccacaggaaagaatctgttacagtaatatgtatttcttattctagacttttattaaaatgacaaaattcactgtattggcttaagttttaaaaagatcacatatctctatacaacatattgcatagctcagtaactttata

SEQ ID NO: 29228 - DNA, 535 bp, Homo sapiens
tcaaacaaaagcatactaataaaattattcaaatagtaatccaaattttttcataataatttatataatatttacataaatgacaggctaaaaagatcacraagattatacttaaaaggtgtatactaagttatctagcaagtaattcaaagccaatcaagtgaatattttcacaaattaaaaaagaaatcttaacataagaaactttaaaaattttttttcaagagacagggtctcgttctgtcaccctggctggagtgcagtggtgcaatcatagctcactgcagcctccaactcctgggctcaagtgatcctgccacctcagctggccaaatagctggcattacaggcacgtgccaccatgcctggcctcaagaatttttatctttagtaatttaagttaggagataatattttaaagcagcatttaaaagagggcagactatacagtcatcccttagtacctgcgggagactggttccatgaatccctgaagataccaaaatccaaaccaaagatgcttaagtctcttaca

SEQ ID NO: 29229 - DNA, 1593 bp, Homo sapiens
aatgaaggtcatttgctgcgcactctctggcaacgtccgcctgcattttgcactaggactcaacttccttccgtgtaccccaggcggcccctgcacgggtctggagagcaccccaggttgcgctggagtctggaaacatatcagcaccggaaaatatgttgggtgaagggtgagtatgaggggactgcaggcccaaggacccccgaaggaacggctgcctccccagcacagcacagccgcgctgcaccagccaccgaggacttccttatgtcagagcagaactcagggagggaggtgtgaggtcgcccatgaccacaggggctcgtgacgatgtgacgaagctacactgggagcactcgggccctttcaaagccagaagagaacctggggcttaatgcagaacggagggtccgtgagatgagtcccgggccatgcaggaccacccaaggccccgacccgaactatgtgtcggctgctgatgctctgccgtcggccgtcgtcccttgtccatcccccttcacagctgcaggatgtggtgttatctcatcccacatggataaccacagactggccaggcccagctggacgtgacgtggagtggctcggaggagaagattcggctgtggaggtttttttaaagctcaagtccccaccacctgaagtgtgcacacatcatcaagtcgaacggtcccccacggctggtatgctctgcggagatgagtctgcctgagttccccggcttcttgaaggaaggactgacaggaacacggaagcytcccagcagcctggcctccgaaaaccaggcagaagagctgcgcggagggaagcggtgcggtgccccgtgcagggtgcagctctctggacctgccacgccagcacgtccccagggatgggccgggtccatctgaggtctgcggccacaacctgttggtttttaccaaaagggctttaaaaaatgggatgtggggtgggagaatgacaaggagaggctgcaagacctctcagctcctcagagagaagcctcatttgctgcggcaaagccgcttcatcaagaagagacaaaaatgcattcaagtccatcaacaaaacagtggtattttggactcaatgaaaatatttcctatatgaacataaaacactaacattcagaatcatttatcatttatgaaagagtaccatatgtacaatcccaacaatcctagacacagtagaacactcaaaatatttaagcttcacaagtaccatgcagcgcaaactataaaacagaaaaaaaatcaaactagtggctagcatcggcttgacctgcctcattcccctcgaataactgaagatcctgtacaacaatggagactctcggaacatttatccacagtgcaattacagaaagcagttcgtgatttctctagaaataataaatatggctcactggtgaccattcccctcacgtgtcctctgtggtgcccacacgtgcgccgggatgtgcaggcgtggacgcagagacgcccctgtggaaagcacacatgcggtgcacacagctccacacgcgcgcgcacatggaggctgtgcccctgcctcccccgacggccagcgcat

SEQ ID NO: 29230 - DNA, 1807 bp, Homo sapiens
actgcatgcctgtccccagggccccggtggaaggaaggcagcgcctgctcttccttaactcagcccatcatctgaaaattcagaagtgaaccaagggttagacgccagaggttgggcttctgttagagtggcttcaaaacatgagccttatgggaagtagccttaaaaaaagaatgggtatacgcagtgacttccgatggaaatctccaaaacaatattcctaagtagcaatggggttggctcaagtctttattaacaaagaacattctctttcatctataaagaaattcttaaagatgcattgacagtgttgaattaccaacagcctgtgaagatcagtttgaccggtgtggacacgtgctggttaagcactcaggcctacgtgggccgagcgggatcttgatcatggggctggtgtatggatccaccgtcggattccgtctgcagaggaggacgtagggggccgtcacacccaccaggcctccctgctgtgctttaacacaggcagaagaggttcatggcaatataatagtcaatgaactttcagtttaaattgtgtacatttttaaattgtaagatttttactgtatattgatgcatagtgtgattcaataaattgcttgtaatttaaaaactatttaatattcaaaataaatatagttatatatttataaactctgttggccgcgtttcttctgtgttttgtccaccgtgcaagggccacctgggtgggtggcctggccctgccctgctgtgagcgcccgcagcctgtgttccaggcccctgccctggtccctctggagcttgtgtgacagacctaaactccccgcactcctgaggacataaagctttgtataaccactggaaaaccaaacctgtttagtgttcctgccaccttgaagcatgtctataaaccatgcctttgcactcatgaatttcggaagcattttcatttccaaggacctcatttggcccagcctcaaatgagctttaggccaagagaagaactaactaaccttggctccaagctagcctttctgtgcccgccccccgccccactatggcccctctgagttcccacccagaggtactgagacagagcggcgagacccatgagtgtggagcccaggcctgccagccagcgtgacactcaccgcacccccagcagcgtgcagtcaccgcacccctagcagccccgaatagtccctgagcaagatgctgctttggctgggcgtggtggctcacgcatgtaatcccagcactttgggatgccgaggcgggtggatcacttgaggtcaggagttgaagaccagcctggccaacgtggagaaaccccgtctctactaaaaatacaaaaattagcygggcgtggtggtgcatgcctgtaatcccagctactcgggaggctgaggcaggagaatcgcttgaacccgggaggcggaggttgcggtgagccgagatcatctcgctccattgcacgccagcctgggcagcaagagcgaaactccgtctcaaaaacaaacaaacaaacaaaacaggcgttcccaaggactgcacacctgcccaaggagccccccacccccaccccaactcgggctccgcccccagcccgtaggagccccaggttcccctaaacatcccgggcggcggggcgggggatcccctgggagatgcccgcgttttcgcggagcggctcgtcccggagtgctcctgggacttgggatctgtgtgctgagcctgaatcggggctgcccctccttccggcggctcccagagacctgtttcccattggcggaatgggcccggg

SEQ ID NO: 29231 - DNA, 1807 bp, Homo sapiens
actgcatgcctgtccccagggccccggtggaaggaaggcagcgcctgctcttccttaactcagcccatcatctgaaaattcagaagtgaaccaagggttagacgccagaggttgggcttctgttagagtggcttcaaaacatgagccttatgggaagtagccttaaaaaaagaatgggtatacgcagtgacttccgatggaaatctccaaaacaatattcctaagtagcaatggggttggctcaagtctttattaacaaagaacattctctttcatctataaagaaattcttaaagatgcattgacagtgttgaattaccaacagcctgtgaagatcagtttgaccggtgtggacacgtgctggttaagcactcaggcctacgtgggccgagcgggatcttgatcatggggctggtgtatggatccaccgtcggattccgtctgcagaggaggacgtagggggccgtcacacccaccaggcctccctgctgtgctttaacacaggcagaagaggttcatggcaatataatagtcaatgaactttcagtttaaattgtgtacatttttaaattgtaagatttttactgtatattgatgcatagtgtgattcaataaattgcttgtaatttaaaaactatttaatattcaaaataaatatagttatatatttataaactctgttggccgcgtttcttctgtgttttgtccaccgtgcaagggccacctgggtgggtggcctggccctgccctgctgtgagcgcccgcagcctgtgttccaggcccctgccctggtccctctggagcttgtgtgacagacctaaactccccgcactcctgaggacataaagctttgtataaccactggaaaaccaaacctgtttagtgttcctgccaccttgaagcatgtctataaaccatgcctttgcactcatgaatttcggaagcattttcatttccaaggacctcatttggcccagcctcaaatgagctttaggccaagagaagaactaactaaccttggctccaagctagcctttctgtgcccgccccccgccccactatggcccctctgagttcccacccagaggtactgagacagagcggcgagacccatgagtgtggagcccaggcctgccagccagcgtgacactcaccgcacccccagcagcgtgcagtcaccgcacccctagcagccccgaatagtccctgagcaagatgctgctttggctgggcgtggtggctcacgcatgtaatcccagcactttgggatgccgaggcgggtggatcacttgaggtcaggagttgaagaccagcctggccaacgtggagaaaccccgtctctactaaaaatacaaaaattagctgggcgtggtggtgcatgcctgtaatcccagctactcgggaggctgaggcaggagaatcgcttgaacccgggaggcggaggttgcsgtgagccgagatcatctcgctccattgcacgccagcctgggcagcaagagcgaaactccgtctcaaaaacaaacaaacaaacaaaacaggcgttcccaaggactgcacacctgcccaaggagccccccacccccaccccaactcgggctccgcccccagcccgtaggagccccaggttcccctaaacatcccgggcggcggggcgggggatcccctgggagatgcccgcgttttcgcggagcggctcgtcccggagtgctcctgggacttgggatctgtgtgctgagcctgaatcggggctgcccctccttccggcggctcccagagacctgtttcccattggcggaatgggcccggg

SEQ ID NO: 29232 - DNA, 1807 bp, Homo sapiens
actgcatgcctgtccccagggccccggtggaaggaaggcagcgcctgctcttccttaactcagcccatcatctgaaaattcagaagtgaaccaagggttagacgccagaggttgggcttctgttagagtggcttcaaaacatgagccttatgggaagtagccttaaaaaaagaatgggtatacgcagtgacttccgatggaaatctccaaaacaatattcctaagtagcaatggggttggctcaagtctttattaacaaagaacattctctttcatctataaagaaattcttaaagatgcattgacagtgttgaattaccaacagcctgtgaagatcagtttgaccggtgtggacacgtgctggttaagcactcaggcctacgtgggccgagcgggatcttgatcatggggctggtgtatggatccaccgtcggattccgtctgcagaggaggacgtagggggccgtcacacccaccaggcctccctgctgtgctttaacacaggcagaagaggttcatggcaatataatagtcaatgaactttcagtttaaattgtgtacatttttaaattgtaagatttttactgtatattgatgcatagtgtgattcaataaattgcttgtaatttaaaaactatttaatattcaaaataaatatagttatatatttataaactctgttggccgcgtttcttctgtgttttgtccaccgtgcaagggccacctgggtgggtggcctggccctgccctgctgtgagcgcccgcagcctgtgttccaggcccctgccctggtccctctggagcttgtgtgacagacctaaactccccgcactcctgaggacataaagctttgtataaccactggaaaaccaaacctgtttagtgttcctgccaccttgaagcatgtctataaaccatgcctttgcactcatgaatttcggaagcattttcatttccaaggacctcatttggcccagcctcaaatgagctttaggccaagagaagaactaactaaccttggctccaagctagcctttctgtgcccgccccccgccccactatggcccctctgagttcccacccagaggtactgagacagagcggcgagacccatgagtgtggagcccaggcctgccagccagcgtgacactcaccgcacccccagcagcgtgcagtcaccgcacccctagcagccccgaatagtccctgagcaagatgctgctttggctgggcgtggtggctcacgcatgtaatcccagcactttgggatgccgaggcgggtggatcacttgaggtcaggagttgaagaccagcctggccaacgtggagaaaccccgtctctactaaaaatacaaaaattagctgggcgtggtggtgcatgcctgtaatcccagctactcgggaggctgaggcaggagaatcgcttgaacccgggaggcggaggttgcggtgagccgagatcatctcgctccattgcacgccagcctgggcagcaagagcgaaactccgtctcaaaaacaaacaaacaaacaaaacaggcgttcccaaggactgcacacctgcccaaggagccccccacccccaccccaactcgggctccgcccccagcccgtaggagccccaggttcccctaaacatcccgggcggcggggcgggggatcccctgggagatgcccgcgttttcgcggagcggctcgtcccggagtgctcctgggacttgggatctgtgtgctgagcctgaatcggggctgccyctccttccggcggctcccagagacctgtttcccattggcggaatgggcccggg

SEQ ID NO: 29233 - DNA, 538 bp, Homo sapiens
actgtattagtttgcgagagctgctatagcaaaataacacagactgagttccttatacagctatgagaaatttgttttctcacagttttggaggctagaagtccaagatcaaggtgttggcaaggttaatttcattctgaggactctctccttgccttgcagatggtcaccttcttgttgcatcstcacatggtcttttctttgtgcatgcacctctctggtgtctcattgtgtgtccaaatttcctcttagtatgaggacaccagtcagattagatctgggcctaacttaacagcctcattttaacttcatctctttaaagaccctgtctttaaatatagtcacactctcaggtaccgggggttagggctccaacagttgatttttaggaggacacctttttgatcacctgaaaacaagagatggatttggggccggtcgcagtggctcatgcctgtaatcctagcaatttgggaggtcaaggggggtggatcacctgaggtcaggagtttgagaccagcctgaccaacatggcgaa

SEQ ID NO: 29234 - DNA, 538 bp, Homo sapiens
actgtattagtttgcgagagctgctatagcaaaataacacagactgagttccttatacagctatgagaaatttgttttctcacagttttggaggctagaagtccaagatcaaggtgttggcaaggttaatttcattctgaggactctctccttgccttgcagatggtcaccttcttgttgcatcctcacatggtcttttctttgtgcatgcacctctctggtgtctcattgtgtgtccaaatttcctcttaktatgaggacaccagtcagattagatctgggcctaacttaacagcctcattttaacttcatctctttaaagaccctgtctttaaatatagtcacactctcaggtaccgggggttagggctccaacagttgatttttaggaggacacctttttgatcacctgaaaacaagagatggatttggggccggtcgcagtggctcatgcctgtaatcctagcaatttgggaggtcaaggggggtggatcacctgaggtcaggagtttgagaccagcctgaccaacatggcgaa

SEQ ID NO: 29235 - DNA, 538 bp, Homo sapiens
actgtattagtttgcgagagctgctatagcaaaataacacagactgagttccttatacagctatgagaaatttgttttctcacagttttggaggctagaagtccaagatcaaggtgttggcaaggttaatttcattctgaggactctctccttgccttgcagatggtcaccttcttgttgcatcctcacatggtcttttctttgtgcatgcacctctctggtgtctcattgtgtgtccaaatttcctcttagtatgaggacaccagtcagattagatctgggcctaacttaacagcctcattttaacttcatctctttaaagaccctgtctttaaatatagtcacactctcaggtaccgggggttagggctccaacagtkgatttttaggaggacacctttttgatcacctgaaaacaagagatggatttggggccggtcgcagtggctcatgcctgtaatcctagcaatttgggaggtcaaggggggtggatcacctgaggtcaggagtttgagaccagcctgaccaacatggcgaa

SEQ ID NO: 29236 - DNA, 1615 bp, Homo sapiens
ccgtgcaaggcccctgggtctggtggctgctgcccggcctctgggaccgtctacctgtcccagcccccgtttccccgcttcttcagctggcaccttgaaactccgtgccaggtgagcaggcctrtggctgcaggttcccggaatctgtcgtgggttctgggttgtcccttccagtgcaggcggtggtcaccgcgccaccatgggggtccaggcagcaggatggtcatgtgatgggggccactctgggcttttcattctcctttcatctgtggcctcggaggctccccatgttttctgaggtgcacagaacatggaggggtgctcatctcatgtcagatattggaaggatgtcgtgcaggaaggttcgagggtctcggggtggtcctgagaagccgatgtgataggtgcggcagcttcctcttcccctgagcgggggcttccagagcctccctcccactggtgcccatggggtttgagcctgatagctccgcaggattcagctgctgtgagtcacagccaggatggagaggtctaaggcaggcctgatgccgggcagggcgacatttctagaaaaggtttcatctggtgatctgctaaatggcatgaaaatcacaaaattggcactcagtgaccatcaggctggctgtgtgtggctgctctcctcaacaagcaaatggctgcccccatccagagccccgactcccgctggcctcccccgtgcggggatgtggggaccagggcaggccccagagaccacctgacctctctggcaggaagaagaccacgtcgtgccgtttcctcctcccttgagcccgttagctgtctcggggaaccggtaagcccagggccaccttgtcacgtcctccactgaacgtgggtccacgtagatgccagccccttggtcttgcccagaagttgtgggaggtgctggttgccagggatggctatgcatgtttgtccccatggcagggaggcctctgggggcctggccctccccccgctagctgcttctcacatttttgtctccccgagagccacctgctctcccagggccctcaggcccccgtctgccagtctcctggcacctgggctggggtctgcgccaggcaactcccacagcagggcaggatccaccctccacgttatcattactgccatcccctgtgcctgggttggaggccacgcccacccagtggggcccctctggaaaggagacttgacctcagggtggtggcagggctctgtgggatgcccctggtgacagggaccagaatgttccctaaagtggatgtcaggcccctggctcagatggagctttctgttcttgatgggctttagaaggtgaaaaactaggcttccagaggtgaagttgcactgtgggctttgtggcaggtgagcgctgcctgaccctgaacagctgctaaagactcagacctggagccttcctggtgtcctgtgtgtccacgcaggtgtgccagtgtggcagccctgcgccaggagctgcccctgcatgtcatggcagcatccatgccagccgagcgcccctctggctcccaggcatctcatcctgtctggctctgagggccgtgctgcagtgaaaaccattcaccttgac

SEQ ID NO: 29237 - DNA, 872 bp, Homo sapiens
tctgctaagagtagaggattatccctcccctctgccagagcagcagtgaatcacctttcaggtgttcggggtcaagccattttcaccatgactacctgccagagcctgagggtcccagcaggacatcccagctcctgacctggcccaggacctgcagcctctgcccagacacrcctcccagggcccagaaccagcagccccaacctggacctgcttcccagggcccaggaccagcagcccccacccagacacgctctcagaggccgctccaatcacacccacgtctcagctcttactaaggctcagtttcagttttgcaatgcttctcatgtgcctatcccccaagccttttcaatctgctaattttccagcaaatgagacatgacaaaaagtcttgtttatcttagctaaatatctcaattaaaacactccattctgaaagcatgacgtggcatttggcaccttcgtggtagcacaaaacagctggcgagatgctctgtgctccgaatgtccaccaagagtcagcttccggacacttctggaccctcccacactgtcacaggggagggtgtgggggtatgggtgctcgagttatcctcgtgtgaaccagacgccagtgagggatggggacaaccacggtgccctcagcgctggccatgggtgcttcccaccgagggccctgaggacaacatggacattctgctgtcctgggcacctggcacacctgcatgtccttctagagaccaggggtttggctccaccccactagttcaaatgtgaaagcagaaagctctgcatgtctctgcttagaaacttgctgaaagataaaggtcagtgttaagcaccttctctgtgtgagacagaaacaagga

SEQ ID NO: 29238 - DNA, 872 bp, Homo sapiens
tctgctaagagtagaggattatccctcccctctgccagagcagcagtgaatcacctttcaggtgttcggggtcaagccattttcaccatgactacctgccagagcctgagggtcccagcaggacatcccagctcctgacctggcccaggacctgcagcctctgcccagacacacctcccagggcccagaaccagcagccccaacctggacmtgcttcccagggcccaggaccagcagcccccacccagacacgctctcagaggccgctccaatcacacccacgtctcagctcttactaaggctcagtttcagttttgcaatgcttctcatgtgcctatcccccaagccttttcaatctgctaattttccagcaaatgagacatgacaaaaagtcttgtttatcttagctaaatatctcaattaaaacactccattctgaaagcatgacgtggcatttggcaccttcgtggtagcacaaaacagctggcgagatgctctgtgctccgaatgtccaccaagagtcagcttccggacacttctggaccctcccacactgtcacaggggagggtgtgggggtatgggtgctcgagttatcctcgtgtgaaccagacgccagtgagggatggggacaaccacggtgccctcagcgctggccatgggtgcttcccaccgagggccctgaggacaacatggacattctgctgtcctgggcacctggcacacctgcatgtccttctagagaccaggggtttggctccaccccactagttcaaatgtgaaagcagaaagctctgcatgtctctgcttagaaacttgctgaaagataaaggtcagtgttaagcaccttctctgtgtgagacagaaacaagga

SEQ ID NO: 29239 - DNA, 872 bp, Homo sapiens
tctgctaagagtagaggattatccctcccctctgccagagcagcagtgaatcacctttcaggtgttcggggtcaagccattttcaccatgactacctgccagagcctgagggtcccagcaggacatcccagctcctgacctggcccaggacctgcagcctctgcccagacacacctcccagggcccagaaccagcagccccaacctggacctgcttcccagggcccaggaccagcagcccccacccagacacgctctcagrggccgctccaatcacacccacgtctcagctcttactaaggctcagtttcagttttgcaatgcttctcatgtgcctatcccccaagccttttcaatctgctaattttccagcaaatgagacatgacaaaaagtcttgtttatcttagctaaatatctcaattaaaacactccattctgaaagcatgacgtggcatttggcaccttcgtggtagcacaaaacagctggcgagatgctctgtgctccgaatgtccaccaagagtcagcttccggacacttctggaccctcccacactgtcacaggggagggtgtgggggtatgggtgctcgagttatcctcgtgtgaaccagacgccagtgagggatggggacaaccacggtgccctcagcgctggccatgggtgcttcccaccgagggccctgaggacaacatggacattctgctgtcctgggcacctggcacacctgcatgtccttctagagaccaggggtttggctccaccccactagttcaaatgtgaaagcagaaagctctgcatgtctctgcttagaaacttgctgaaagataaaggtcagtgttaagcaccttctctgtgtgagacagaaacaagga

SEQ ID NO: 29240 - DNA, 1140 bp, Homo sapiens
tgagtggctaaaatagagcccagcggccgtttgctgtctataggtcatacaaacacagagtccccccaaaaccgcacccttgcacctgggatactttctgggctcacctgaaccaaccaatcagagctcacctgatccaaccaatcagagctcacccaatccaaccaatcggagctcactggctttggccaaatcaagacccgactgttatcaactaatcagaactcagctgccttgaccaatcagaactaagcaagtttgaatccttcatttggatacacagacctgactgagacctgggtgggagcttttgctataaaaccggaacgttccctttgttctccaggtacatttgtttacaccaaaggctgcatcttcccggtttgcaaactgtgcactggagtctccttcttccaaactccttttcagaggatgtgtttactctgtatttataacttcaggagcgcaatcgcagccacggtttctcttgttagtgctacattactttgattttataatcagccaaaatattgtgataaaaaaatccccttttcataatctgcgaattttagacgtcacgtggtaygactcaaagtcatacccatttcttcccaagaagaaaatttactcaaaatccataaaagatttggctcggttcggctcagttggccacaggcaggtagcctgttggctggaggaacagaaacgaacgacccccactctgagccggcctcagagacttgtggtctagccgaatgctccctgtagagggagatggctgtttgtgtgtccttggtgcagggatggcagaacaatctgacgtccgttattaacacatttgtcatatcagccacctctttaaacgggtgtcccagagtaacaagatccagaaaaatgccagcagtctagttggaacacagggtcccactggctgagatactggctgtcctcaagtgaggacaggcgctatcagggactgcagccacagcatccacatgtcaggaatcaaaggccaccgttttctccggcgtttacattcaggcacggtccccctcgccccagatcacatcttcagagtctcaacagcccagccactgaagaattgctgcagccctgcataacctcatacctgtctggtac

SEQ ID NO: 29241 - DNA, 1140 bp, Homo sapiens
tgagtggctaaaatagagcccagcggccgtttgctgtctataggtcatacaaacacagagtccccccaaaaccgcacccttgcacctgggatactttctgggctcacctgaaccaaccaatcagagctcacctgatccaaccaatcagagctcacccaatccaaccaatcggagctcactggctttggccaaatcaagacccgactgttatcaactaatcagaactcagctgccttgaccaatcagaactaagcaagtttgaatccttcatttggatacacagacctgactgagacctgggtgggagcttttgctataaaaccggaacgttccctttgttctccaggtacatttgtttacaccaaaggctgcatcttcccggtttgcaaactgtgcactggagtctccttcttccaaactccttttcagaggatgtgtttactctgtatttataacttcaggagcgcaatcgcagccacggtttctcttgttagtgctacattactttgattttataatcagccaaaatattgtgataaaaaaatccccttttcataatctgcgaattttagacgtcacgtggtatgactcaaagtcatacccatttcttcccaagaagaaaatttactcaaaatccataaaagatttggctcggttcggctcagttggccacaggcaggtagcctgttggctggaggaacagaaacgaacgacccccactctgagccggcctcagagacttgtggtctagccgaatgctccctgtagagggagatggctgtttgtgtgtccttggtgcasggatggcagaacaatctgacgtccgttattaacacatttgtcatatcagccacctctttaaacgggtgtcccagagtaacaagatccagaaaaatgccagcagtctagttggaacacagggtcccactggctgagatactggctgtcctcaagtgaggacaggcgctatcagggactgcagccacagcatccacatgtcaggaatcaaaggccaccgttttctccggcgtttacattcaggcacggtccccctcgccccagatcacatcttcagagtctcaacagcccagccactgaagaattgctgcagccctgcataacctcatacctgtctggtac

SEQ ID NO: 29242 - DNA, 774 bp, Homo sapiens
tgataagaatcatcattgtcttacatagtaactgcctcaggggaagacattacagtttcctcagacaatgcagttagtcacttcaaatgcccatggaaaggcccatagcactggcagcagggaaggcatgtctactggcagagaagattcaacaggatttagggactcaatgcccccaacttcatcccaatcaatgccctcactttagcagtagacatcctgtgaagtgggagttcaacttgtgctataatccagccagtttcagaatgaggctctggatcagtttcagttctgtatttacccggtataagagtcaccatcgggaaacacacagaagctttcaggtcacttgtgtagcctacgagcttggaattctggtcrctgagttcatccttgtctttcatcatcttttctagcagcattaggagcaagcatccaacttcattacatctgttagttttccaaaaagatttgaaagtatcatgtccacagtcacccaacttccagaatataataggtggttgagtaaaagtgtccaacagagatattttgcatatgtccattgccggatcatgccatgggactatcagtccatcagtgctcttactactagaaatgggcccatttatactggcgaggtcaattgctttactaagtctaccaagttctaaggttaatttcattgagaaatatcctcacaaacacacccagaatgatgtttaaccaaatatcttgcatggcaccaggtgaatcagtcaaactgactcataaaaa

SEQ ID NO: 29243 - DNA, 1101 bp, Homo sapiens
cagggcctctgatttctcactaaaatattgtgagaaaatatttgaaacagtcactctgggaaaacaattgggagaaaataagaaataaataaaagaatagctgaaaagtagtaaggacttaactgaagctgcttagcatgacataattgtaaatgcattaagaaaatataggtggtgacaggaatcaatggctttgatcatttttttttaaaagacatcttattaacatgtgttaataggaggtataaaatyagatcttggagtctgggcttttttgtataaaataaggaattctagtcaaaagaacttgggcattaacatacacaatctgccatcaccgtggatgacatacaaccagataccataacagagagaaggaacgaagagaaaatggagacctgagtgttacagttatctacagaactagaggggtccttccaaagtcagaagaaataaggacacagatgcggagaaagttctaaaatgtagagtctgactctgtaatgtaacttgacacttcaaaatagtgaatctttcaagtaatcaagaagacacagcagttgaaagtggagcccggtcggaggtgtttgggtcacaggggcagatgtctcatggtttagtgctatgcttgccatagtgagtgagttctcaggagatttggttgtttaaaagtgtgtggcaccacacctgccacaggctccccctgtgccttccatgatgactgtaagctctctgaggccttacccagaagctaagcagatgcctggtaacaggtttcctgaacagcctgcaaagtgtgagccaactaaacctcttttttcaggaattaaaaaaaaacaagaagacagaacagtgatctggaattggcaaacaggggtaggcccattggtcttctcttttggaaatttccagctactggagaaggtgaaccctccctgaggtcaggctctgggaaaagtgtaatttgtggaaagattacagatttcggacagggatatgtgacagactagctgatacgaagagtatttttggaaaagaaatgttttcctagggcagaaggcgaggtatagagaattcagtcatttattataagaaactccc

SEQ ID NO: 29244 - DNA, 550 bp, Homo sapiens
ttgccacctatttcctgtaragaccctgcctgatacaactgtgagtgtgtgaaatttctcatgctttgtaaattctttcgcgttttctacgtagaaaaccgtatcatctgcaaatagtaatattttatttttttcctttctgattcttacactttctactttccttacaccggcttgtgctccagagcactgctggtctgcagcggcaagagcagccacccctgtttcatgcctgatttttaaagagaaggcttttcataattctctactcataagatgttggctgtcggtacagggatttccatcctaaaccttgcttgctaagattttatcatgaatggtttatgaatttcctcaaatgctttttctgaatctattatgatcacaggatttttctcaagactactgatatgaggtatgacatagtacattttataacgctaaatcaatcattctagaaataaacagtacttgttcattgcttgctatggtttgctatttaggattcttgtctttagattggtctggggatctttttttctcctaaatg

SEQ ID NO: 29245 - DNA, 550 bp, Homo sapiens
ttgccacctatttcctgtagagaccctgcctgatacaactgtgagtgtgtgaaatttctcatgctttgtaaattctttcgcgttttctacgtagaaaaccgtatcatctgcaaatagtaatattttatttttttcctttctgattcttacactttctactttccttacaccggcttgtgctccagagcactgctggtctgcagcggcaagagcagccacccctgtttcatgcctgatttttaaagagaaggcttttcataattckctactcataagatgttggctgtcggtacagggatttccatcctaaaccttgcttgctaagattttatcatgaatggtttatgaatttcctcaaatgctttttctgaatctattatgatcacaggatttttctcaagactactgatatgaggtatgacatagtacattttataacgctaaatcaatcattctagaaataaacagtacttgttcattgcttgctatggtttgctatttaggattcttgtctttagattggtctggggatctttttttctcctaaatg

SEQ ID NO: 29246 - DNA, 780 bp, Homo sapiens
tttgtgtaggcctaattaaaatatgaaaaaacaaatttacatttccaacctttagaacttctacaacatggaatagatatactgaaaaagcaacactttcccatttccgtgtgatcagggagatactcgatgatctttcagaaacattggaaaatgaggacagagattagcagtgttctcagtatacgtctgtgtaatttttttcaaagaaaatatttgatattagtatctggcagatcagtaataaatagatttccacatttgtccccctgttctatcatttctgattagcataatagaaattatagaacaaaaattacaagcaagaacaaatagaataaaatataaccatttatattttattgcataatgatataatctgaattagttctggtgcgcctctagtggaaatgtatatacatttttgtatctgaagtcaggtaagttggcaattgaatamaatttctaagacatgtttttgtgttattttgagtttttctttcagtatcttttaaaagaatgggatacttcttagggtaaattaaataattgcgtgctcattgtttggtgctagatccagaatatgatagacaatgaatagcttattaataatacacaatcttaatcagtggcttcccaactacaatataaaatatatatcagtgtgacaggaactcatttttttaaattgcagaatacctacttccccttcagagattctgattctataatttaaaaacccctcaggatttcattgaaaagaatcttaaggattgattt

SEQ ID NO: 29247 - DNA, 559 bp, Homo sapiens
tgtgcactgcctggtctgaggtaaatggagagctcagctaaggcctaaagttgaaaaggggctttacagagtccycagtgtgctggatatctcaccagccatggaaagaatctgtgtccttgtggccacagacaggcaatgatgggagcttgcccacatttcagggccttctggagtcttcatttgagagttcagctctggaaacagaggacacttctggtgtccagagattctcagtgcctctctgatgtaaaactgattgatggcatctgctgtcttctgggagcactgcttggccattcttatctgtgagccccagccaaggtgctgcagaaagcttggtctctggctagcattctggactgtgaggcagcgtggctgcagctagcactggatggagagagtacagtgtggtgaagtggggacagtgggcattctgccacatggcctagagtttcttgtgactctggactgcccaggtgtggtgaccagaaggcaaaccatttctaggccacagctcaaggagggagaacccaggctgagcctggtgttggttctg

SEQ ID NO: 29248 - DNA, 559 bp, Homo sapiens
tgtgcactgcctggtctgaggtaaatggagagctcagctaaggcctaaagttgaaaaggggctttacagagtcctcagtgtgctggatatctcaccagccatggaaagaatctgtgtccttgtggccacagacaggcaatgatgggagcttgcccacatttyagggccttctggagtcttcatttgagagttcagctctggaaacagaggacacttctggtgtccagagattctcagtgcctctctgatgtaaaactgattgatggcatctgctgtcttctgggagcactgcttggccattcttatctgtgagccccagccaaggtgctgcagaaagcttggtctctggctagcattctggactgtgaggcagcgtggctgcagctagcactggatggagagagtacagtgtggtgaagtggggacagtgggcattctgccacatggcctagagtttcttgtgactctggactgcccaggtgtggtgaccagaaggcaaaccatttctaggccacagctcaaggagggagaacccaggctgagcctggtgttggttctg

SEQ ID NO: 29249 - DNA, 559 bp, Homo sapiens
tgtgcactgcctggtctgaggtaaatggagagctcagctaaggcctaaagttgaaaaggggctttacagagtcctcagtgtgctggatatctcaccagccatggaaagaatctgtgtccttgtggccacagacaggcaatgatgggagcttgcccacatttcagggccktctggagtcttcatttgagagttcagctctggaaacagaggacacttctggtgtccagagattctcagtgcctctctgatgtaaaactgattgatggcatctgctgtcttctgggagcactgcttggccattcttatctgtgagccccagccaaggtgctgcagaaagcttggtctctggctagcattctggactgtgaggcagcgtggctgcagctagcactggatggagagagtacagtgtggtgaagtggggacagtgggcattctgccacatggcctagagtttcttgtgactctggactgcccaggtgtggtgaccagaaggcaaaccatttctaggccacagctcaaggagggagaacccaggctgagcctggtgttggttctg

SEQ ID NO: 29250 - DNA, 559 bp, Homo sapiens
tgtgcactgcctggtctgaggtaaatggagagctcagctaaggcctaaagttgaaaaggggctttacagagtcctcagtgtgctggatatctcaccagccatggaaagaatctgtgtccttgtggccacagacaggcaatgatgggagcttgcccacatttcagggccttctggagtcttcatttgagagttcagctctggmaacagaggacacttctggtgtccagagattctcagtgcctctctgatgtaaaactgattgatggcatctgctgtcttctgggagcactgcttggccattcttatctgtgagccccagccaaggtgctgcagaaagcttggtctctggctagcattctggactgtgaggcagcgtggctgcagctagcactggatggagagagtacagtgtggtgaagtggggacagtgggcattctgccacatggcctagagtttcttgtgactctggactgcccaggtgtggtgaccagaaggcaaaccatttctaggccacagctcaaggagggagaacccaggctgagcctggtgttggttctg

SEQ ID NO: 29251 - DNA, 559 bp, Homo sapiens
tgtgcactgcctggtctgaggtaaatggagagctcagctaaggcctaaagttgaaaaggggctttacagagtcctcagtgtgctggatatctcaccagccatggaaagaatctgtgtccttgtggccacagacaggcaatgatgggagcttgcccacatttcagggccttctggagtcttcatttgagagttcagctctggaaacagaggacacttctggtgtccagagattctcagtgcctckctgatgtaaaactgattgatggcatctgctgtcttctgggagcactgcttggccattcttatctgtgagccccagccaaggtgctgcagaaagcttggtctctggctagcattctggactgtgaggcagcgtggctgcagctagcactggatggagagagtacagtgtggtgaagtggggacagtgggcattctgccacatggcctagagtttcttgtgactctggactgcccaggtgtggtgaccagaaggcaaaccatttctaggccacagctcaaggagggagaacccaggctgagcctggtgttggttctg

SEQ ID NO: 29252 - DNA, 2098 bp, Homo sapiens
tcccccgactcggaagggggaggcgcgggccacacagtaggtgacgagccgccctccatccccaccgctgaggccaggggaaccctcgctctccccacctcaccccgtcgagggggaagcagaggagggtcccctgcaagcgagtcactatggcagttctaccataacgcagagagaggcggcaggcaggggaatccggtaccccaaaggcacacctgtcggatcgctagagaaggctttctcaccgagggtgggtcacactccccacccgccaatcacccctcgtcgggcccgcagaggcactcagggacgcctggggaagtgagggggcctgtggtaccaggaaaaatctgcgtgcggcaactttgagccttcgcggtctgggcggggggcctggccactgtacgtgggtgcaatcccccaagtgcccccccatccacctgcctcctttctcccaggcaaagcacctccaagtattcccacacacaacctgtcggaggcagaacggtagcccctcggtggccggccagcgcatgcgtcacctgcccgaacccaccgcgctcgctcacacgacccgcgcgcacacgccagaggggagcacgggacctgcacttgccagaccaggcggcgcccttccctgcgtgggaggggcgcgtctcactcaaccccctcgacccccacaccaacgagctcccccaggacccactctcggacatcacggtggtgaatggaggagggggagctgggggtgggaaccacacaccacagctcggcctctggcacctgaatgataagatggcgggggaagggggggagccggacgtggtacgctcacgcctgtcatccctgcactttgggaggtgagggaaggtggatccctcgatccaagccttggcaacatggtgaaacctcgtctctaaaaaaatacaaaaactaactggtttcataacctggactcaaaattaataaatagataaataggctgggtgcggtggctcacgccagtaatcccagcactttgggaggccgaggtgggcagatcacgggggtcaggagatcgagaccatcctggctaccacagtgaaaccccgtctctactcaaaatacaaaaaattagccagacactgtgatgggtgcctatagtcccagctatttgggaggctgagacaggagaatggcgtgaacccgggaggcagagcttgcagtgagccatcacgccactgcactccagtctgggcaacagagcgagactccgtctcaaaaaataataataataataaatagatggaaatagaaaattaaaaaaaaaaacgtagctggccgggcgcaattgctcacgcctgtcatcccagcactttgggaggccaaggtgggcagatcacctgaggtggccagttcgagacccacctgacccacatagagaaataccgtctttactaacaatacaaaatcagccrggtgtggtgacacatgcctgtaatcccagctactcaggaggctgaggcaggagaatcgcttgaatacgggaggtggaggttgcggctagccgagatggtgccattgcactccagcgtgggcaacaagagtgaaactccgtccaaaaaaaaaaattaagccctgtattctgttatttttacttcctaccctgagaagaacataatacaactgttgtctgtctgcctgcctgcctgcctgcctgcctgcctgcctgcctgcctgcctgcctgtgacagggcctcactctgtctttcacccagactggagtgcactgacaccattatggctcactcattgcagcctcaaactccccagggttaggcgattcctcaagggatcctacggcctcggcctcccaaagtgttggggttacaggcgtgagccaccatcacccggcctgagtaaatacatctggtctcactacgtgttaaccacacacccatgaagaactcaagtcaagagagagtcggtaaaagactctcagcattctctcccgaaagcagtgaggtggatggcggccgtgtgtcccgagctcctgtggtttcaggtgatttccaatgtttccagagaggcgcgagccgcagtcattcggggcatccga

SEQ ID NO: 29253 - DNA, 2098 bp, Homo sapiens
tcccccgactcggaagggggaggcgcgggccacacagtaggtgacgagccgccctccatccccaccgctgaggccaggggaaccctcgctctccccacctcaccccgtcgagggggaagcagaggagggtcccctgcaagcgagtcactatggcagttctaccataacgcagagagaggcggcaggcaggggaatccggtaccccaaaggcacacctgtcggatcgctagagaaggctttctcaccgagggtgggtcacactccccacccgccaatcacccctcgtcgggcccgcagaggcactcagggacgcctggggaagtgagggggcctgtggtaccaggaaaaatctgcgtgcggcaactttgagccttcgcggtctgggcggggggcctggccactgtacgtgggtgcaatcccccaagtgcccccccatccacctgcctcctttctcccaggcaaagcacctccaagtattcccacacacaacctgtcggaggcagaacggtagcccctcggtggccggccagcgcatgcgtcacctgcccgaacccaccgcgctcgctcacacgacccgcgcgcacacgccagaggggagcacgggacctgcacttgccagaccaggcggcgcccttccctgcgtgggaggggcgcgtctcactcaaccccctcgacccccacaccaacgagctcccccaggacccactctcggacatcacggtggtgaatggaggagggggagctgggggtgggaaccacacaccacagctcggcctctggcacctgaatgataagatggcgggggaagggggggagccggacgtggtacgctcacgcctgtcatccctgcactttgggaggtgagggaaggtggatccctcgatccaagccttggcaacatggtgaaacctcgtctctaaaaaaatacaaaaactaactggtttcataacctggactcaaaattaataaatagataaataggctgggtgcggtggctcacgccagtaatcccagcactttgggaggccgaggtgggcagatcacgggggtcaggagatcgagaccatcctggctaccacagtgaaaccccgtctctactcaaaatacaaaaaattagccagacactgtgatgggtgcctatagtcccagctatttgggaggctgagacaggagaatggcgtgaacccgggaggcagagcttgcagtgagccatcacgccactgcactccagtctgggcaacagagcgagactccgtctcaaaaaataataataataataaatagatggaaatagaaaattaaaaaaaaaaacgtagctggccgggcgcaattgctcacgcctgtcatcccagcactttgggaggccaaggtgggcagatcacctgaggtggccagttcgagacccacctgacccacatagagaaataccgtctttactaacaatacaaaatcagccgggtgtggtgrcacatgcctgtaatcccagctactcaggaggctgaggcaggagaatcgcttgaatacgggaggtggaggttgcggctagccgagatggtgccattgcactccagcgtgggcaacaagagtgaaactccgtccaaaaaaaaaaattaagccctgtattctgttatttttacttcctaccctgagaagaacataatacaactgttgtctgtctgcctgcctgcctgcctgcctgcctgcctgcctgcctgcctgcctgcctgtgacagggcctcactctgtctttcacccagactggagtgcactgacaccattatggctcactcattgcagcctcaaactccccagggttaggcgattcctcaagggatcctacggcctcggcctcccaaagtgttggggttacaggcgtgagccaccatcacccggcctgagtaaatacatctggtctcactacgtgttaaccacacacccatgaagaactcaagtcaagagagagtcggtaaaagactctcagcattctctcccgaaagcagtgaggtggatggcggccgtgtgtcccgagctcctgtggtttcaggtgatttccaatgtttccagagaggcgcgagccgcagtcattcggggcatccga

SEQ ID NO: 29254 - DNA, 2098 bp, Homo sapiens
tcccccgactcggaagggggaggcgcgggccacacagtaggtgacgagccgccctccatccccaccgctgaggccaggggaaccctcgctctccccacctcaccccgtcgagggggaagcagaggagggtcccctgcaagcgagtcactatggcagttctaccataacgcagagagaggcggcaggcaggggaatccggtaccccaaaggcacacctgtcggatcgctagagaaggctttctcaccgagggtgggtcacactccccacccgccaatcacccctcgtcgggcccgcagaggcactcagggacgcctggggaagtgagggggcctgtggtaccaggaaaaatctgcgtgcggcaactttgagccttcgcggtctgggcggggggcctggccactgtacgtgggtgcaatcccccaagtgcccccccatccacctgcctcctttctcccaggcaaagcacctccaagtattcccacacacaacctgtcggaggcagaacggtagcccctcggtggccggccagcgcatgcgtcacctgcccgaacccaccgcgctcgctcacacgacccgcgcgcacacgccagaggggagcacgggacctgcacttgccagaccaggcggcgcccttccctgcgtgggaggggcgcgtctcactcaaccccctcgacccccacaccaacgagctcccccaggacccactctcggacatcacggtggtgaatggaggagggggagctgggggtgggaaccacacaccacagctcggcctctggcacctgaatgataagatggcgggggaagggggggagccggacgtggtacgctcacgcctgtcatccctgcactttgggaggtgagggaaggtggatccctcgatccaagccttggcaacatggtgaaacctcgtctctaaaaaaatacaaaaactaactggtttcataacctggactcaaaattaataaatagataaataggctgggtgcggtggctcacgccagtaatcccagcactttgggaggccgaggtgggcagatcacgggggtcaggagatcgagaccatcctggctaccacagtgaaaccccgtctctactcaaaatacaaaaaattagccagacactgtgatgggtgcctatagtcccagctatttgggaggctgagacaggagaatggcgtgaacccgggaggcagagcttgcagtgagccatcacgccactgcactccagtctgggcaacagagcgagactccgtctcaaaaaataataataataataaatagatggaaatagaaaattaaaaaaaaaaacgtagctggccgggcgcaattgctcacgcctgtcatcccagcactttgggaggccaaggtgggcagatcacctgaggtggccagttcgagacccacctgacccacatagagaaataccgtctttactaacaatacaaaatcagccgggtgtggtgacacatgcctgtaatcccagctactcaggaggctgaggcaggagaatcgcttgaatacgggaggtggaggttgcggctagccgagatggtgccattgcactccagcgtgggcaacaagagtgaaactccgtccaaaaaaaaaaawtaagccctgtattctgttatttttacttcctaccctgagaagaacataatacaactgttgtctgtctgcctgcctgcctgcctgcctgcctgcctgcctgcctgcctgcctgcctgtgacagggcctcactctgtctttcacccagactggagtgcactgacaccattatggctcactcattgcagcctcaaactccccagggttaggcgattcctcaagggatcctacggcctcggcctcccaaagtgttggggttacaggcgtgagccaccatcacccggcctgagtaaatacatctggtctcactacgtgttaaccacacacccatgaagaactcaagtcaagagagagtcggtaaaagactctcagcattctctcccgaaagcagtgaggtggatggcggccgtgtgtcccgagctcctgtggtttcaggtgatttccaatgtttccagagaggcgcgagccgcagtcattcggggcatccga

SEQ ID NO: 29255 - DNA, 1217 bp, Homo sapiens
tgggactctcattcttgcccaccaccatctccctgtggctgtcattcttccctggaagtgaatgaatactgagaacacagtaagaggagggtggtcacagctgacttcacaaagcctcatggaggttaagttgttcaagaatttaaaaagtaaacaccccaaatcctccaaaatggaatactgtggaaaataactgaaatttccactgcttaaggcttcatcctattaagacagctgagtacttggcctggcccgattttcacctttccttttacacctcaagaacagcagataggtatgcataaccacagcagaacacaccctccacctctctgactgctgacactggctacaggaataaggctttggttatcatctagcaaaatgccacagagcatggacggactgagtttgttctaaggaaaggagtttcaccagatagtctgaagaggcccagcccagcaaagagatttagagcaggaaagcctttcattaaagtagccacacacccctcgagacaaccataaagacttgactaggaaatcaaaaggtttttattaaacaagacttcctctgaggctattcgagcaagcagatttggctataagtcagatacgcaagatttctgaaccatgtataaatacgttctgcagaatttcgaagtgtgcgtcctttgacttttccagggatgcaccaggsgccaacccgttatgtagacacggttactgttttaggactgggtgacatggggcctgggtaaaaaaataaggccaaaactgagtaagctcaatttatagagcaatatcagtgctggacagatctgccatgcttcgtttacatcatgtttcctacttttgatttcttcatcttatttatagtcttcctcccatcccctgaacacaaacttgactttatcttctaactaagatctttccactcaagggggcgtaggaaaacaattcctggatgcctttctaactaaaaccagcaggactaagtgctcaagattttataatatttcgatttagaggtttctagagttattcctgagacgtgccatagcagtaaatgaattggtgaattgagtagaaggtagttgtgacatctacacccaaattcttactctggtggcttgaataaaactggagaagctcaaggtagggcccagatagaggcccaggaaagcaaataaatgaaagacggtggggacacaggaa

SEQ ID NO: 29256 - DNA, 313 bp, Homo sapiens
ccagccaggtttcctgcagaaaatcatgggaagcttttgagcaggggagtcagaagatgagcggtgagtattagggcttcccgggtcccggtgtgacacagggattggccagctcttcctgtaaagggccaggtgggaagcactcgtaggccctgtggtctctgtcgtgtctgctgaagcctgccgtagtagcgtggaagcagtcagagatgacgtgtaagcaaatggtsccgactgacctccggtaaagcattgattccggaagcatttaacagacctaacaacctttcaaaccgcatggcgtttctttccc

SEQ ID NO: 29257 - DNA, 808 bp, Homo sapiens
tgggccacggccacattctcaggatgctcgtggctgtaaatagtagatgacccaagtaagagcggctgaagccataggcaccagaattgtgtcagcatcgtcgtgtcatgctcatgttttcccttccagctgtgctgtgggcagtgtttagttcatgtctgctttgctggcgggccgagtagcaacagctgcagttggtgtgttctctgaaggcagtatccgaaggctggaggggttgcttttcttcccaggtgtcttttgaagaggcagtcaagtcagcagctcgcggtgaccttctggtaacatcgtatgggctgggttacagcacatgccgactgctaagccggtcactggggaaaaccatgtgattgctgtgatgagcttagaatgatcattcctccttcgggagctggggtgggttgagggagtgataaagatcccgataaccttgcatttctccagcgagaaagaagaaagaaattccgtggatagggagccagccaggtttcctgcagaaaatcatgggaagcttttgagcaggggagtcagaagatgagcggtgagtattagggytttccggtcacggtgtgacacagggattggccagctcttcctgtaaagggccaggtgggaagcactcgtaggccctgtggtctctgtcgtgtctgctgaagcctgccatagtagcgtggaagcagtcagagatgacgtgtaagcaaatggtcccgactgacctccggtaaagcattgattccggaagcatttaacagacctaacaacctttcaaaccgcatggcgtttctttccc

SEQ ID NO: 29258 - DNA, 808 bp, Homo sapiens
tgggccacggccacattctcaggatgctcgtggctgtaaatagtagatgacccaagtaagagcggctgaagccataggcaccagaattgtgtcagcatcgtcgtgtcatgctcatgttttcccttccagctgtgctgtgggcagtgtttagttcatgtctgctttgctggcgggccgagtagcaacagctgcagttggtgtgttctctgaaggcagtatccgaaggctggaggggttgcttttcttcccaggtgtcttttgaagaggcagtcaagtcagcagctcgcggtgaccttctggtaacatcgtatgggctgggttacagcacatgccgactgctaagccggtcactggggaaaaccatgtgattgctgtgatgagcttagaatgatcattcctccttcgggagctggggtgggttgagggagtgataaagatcccgataaccttgcatttctccagcgagaaagaagaaagaaattccgtggatagggagccagccaggtttcctgcagaaaatcatgggaagcttttgagcaggggagtcagaagatgagcggtgagtattagggctttccggtcacggtgtgacacagggattggccagctcttcctgtaaagggccaggtgggaagcactcgtaggcccygtggtctctgtcgtgtctgctgaagcctgccatagtagcgtggaagcagtcagagatgacgtgtaagcaaatggtcccgactgacctccggtaaagcattgattccggaagcatttaacagacctaacaacctttcaaaccgcatggcgtttctttccc

SEQ ID NO: 29259 - DNA, 808 bp, Homo sapiens
tgggccacggccacattctcaggatgctcgtggctgtaaatagtagatgacccaagtaagagcggctgaagccataggcaccagaattgtgtcagcatcgtcgtgtcatgctcatgttttcccttccagctgtgctgtgggcagtgtttagttcatgtctgctttgctggcgggccgagtagcaacagctgcagttggtgtgttctctgaaggcagtatccgaaggctggaggggttgcttttcttcccaggtgtcttttgaagaggcagtcaagtcagcagctcgcggtgaccttctggtaacatcgtatgggctgggttacagcacatgccgactgctaagccggtcactggggaaaaccatgtgattgctgtgatgagcttagaatgatcattcctccttcgggagctggggtgggttgagggagtgataaagatcccgataaccttgcatttctccagcgagaaagaagaaagaaattccgtggatagggagccagccaggtttcctgcagaaaatcatgggaagcttttgagcaggggagtcagaagatgagcggtgagtattagggctttccggtcacggtgtgacacagggattggccagctcttcctgtaaagggccaggtgggaagcactcgtaggccctgtggtctctgtcgtgtctgctgaagcctgccatagtagcgtggaagcagtcagagatgacgtgtaagcaaatggtcccgactgacctccggtaaagcattgattccggaagcatttaacagacctamcaacctttcaaaccgcatggcgtttctttccc

SEQ ID NO: 29260 - DNA, 808 bp, Homo sapiens
tgggccacggccacattctcaggatgctcgtggctgtaaatagtagatgacccaagtaagagcggctgaagccataggcaccagaattgtgtcagcatcgtcgtgtcatgctcatgttttcccttccagctgtgctgtgggcagtgtttagttcatgtctgctttgctggcgggccgagtagcaacagctgcagttggtgtgttctctgaaggcagtatccgaaggctggaggggttgcttttcttcccaggtgtcttttgaagaggcagtcaagtcagcagctcgcggtgaccttctggtaacatcgtatgggctgggttacagcacatgccgactgctaagccggtcactggggaaaaccatgtgattgctgtgatgagcttagaatgatcattcctccttcgggagctggggtgggttgagggagtgataaagatcccgataaccttgcatttctccagcgagaaagaagaaagaaattccgtggatagggagccagccaggtttcctgcagaaaatcatgggaagcttttgagcaggggagtcagaagatgagcggtgagtattagggctttccggtcacggtgtgacacagggattggccagctcttcctgtaaagggccaggtgggaagcactcgtaggccctgtggtctctgtcgtgtctgctgaagcctgccatagtagcgtggaagcagtcagagatgacgtgtaagcaaatggtcccgactgacctccggtaaagcattgattccggaagcatttaacagacctaacamcctttcaaaccgcatggcgtttctttccc

SEQ ID NO: 29261 - DNA, 1152 bp, Homo sapiens
gtggtttggcagaggagacatgcgagaagacggaacgttttgtccgaatagacatctggcagggtggaacggagagaacaggtatggtggagagaacgtctgagaaggtcgcaggattcgcaggagcatcgggaaaagattgcctgcttgcccgaaggaatggcaagttccaaaggtcagaggctcgcgtgaactctgtcgggttcgagagcagctcagtgttgctggtggcaagagtgtggtacgggaatggttgggtgtggtttgaatgtctagaaaaggcgagctgagggtagatttttgagtggtccagagcagaaggggtagaggatatattctgtgggccacggccacattctcaggatgctcgtggctgtaaatagtagatgacccaagtaagagcggctgaagccataggcaccagaattgtgtcagcatcgtcgtgtcatgctcatgttttcccttccagctgtgctgtgggcagtgtttagttcatgtctgctttgctggcgggccgagtagcaacagctgcagttggtgtgttctctgaaggcagtatccgaaggctggaggggttgcttttcttcccaggtgtcttttgaagaggcagtcaagtcagcagctcgcggtgaccttctggtaacatcgtatgggctgggttacagcacatgccgactgctaagccggtcactggggaaaaccatgtgattgctgtgatgagcttagaatgatcattcctccttcgggagctggggtgggttgagggagtgataaagatcccgataaccttgcatttctccagcgagaaagaagaaagaaattccgtggatagggagccagccaggtttcctgcagaaaatcatgggaagcttttgagcaggggagtcagaagatgagcggtgagtattagggctttccggtcacggtgtgacacagggattggccagctcttcctgtaaagggccaggtgggaagcactcgtaggccccgtggtctctgtcgtgtctgctgaagcctgccgtagtagcrtggaagcagtcagagatgacgtgtaagcaaatggtgccgactgacctccggtaaagcattgattccggaagcatttaacagacctaacaacctttcaaaccgcatggcgtttctttcccggat

SEQ ID NO: 29262 - DNA, 1152 bp, Homo sapiens
gtggtttggcagaggagacatgcgagaagacggaacgttttgtccgaatagacatctggcagggtggaacggagagaacaggtatggtggagagaacgtctgagaaggtcgcaggattcgcaggagcatcgggaaaagattgcctgcttgcccgaaggaatggcaagttccaaaggtcagaggctcgcgtgaactctgtcgggttcgagagcagctcagtgttgctggtggcaagagtgtggtacgggaatggttgggtgtggtttgaatgtctagaaaaggcgagctgagggtagatttttgagtggtccagagcagaaggggtagaggatatattctgtgggccacggccacattctcaggatgctcgtggctgtaaatagtagatgacccaagtaagagcggctgaagccataggcaccagaattgtgtcagcatcgtcgtgtcatgctcatgttttcccttccagctgtgctgtgggcagtgtttagttcatgtctgctttgctggcgggccgagtagcaacagctgcagttggtgtgttctctgaaggcagtatccgaaggctggaggggttgcttttcttcccaggtgtcttttgaagaggcagtcaagtcagcagctcgcggtgaccttctggtaacatcgtatgggctgggttacagcacatgccgactgctaagccggtcactggggaaaaccatgtgattgctgtgatgagcttagaatgatcattcctccttcgggagctggggtgggttgagggagtgataaagatcccgataaccttgcatttctccagcgagaaagaagaaagaaattccgtggatagggagccagccaggtttcctgcagaaaatcatgggaagcttttgagcaggggagtcagaagatgagcggtgagtattagggctttccggtcacggtgtgacacagggattggccagctcttcctgtaaagggccaggtgggaagcactcgtaggccccgtggtctctgtcgtgtctgctgaagcctgccgtagtagcgtggaagcagtcagagatgacgtgtaagcaaatggtsccgactgacctccggtaaagcattgattccggaagcatttaacagacctaacaacctttcaaaccgcatggcgtttctttcccggat

SEQ ID NO: 29263 - DNA, 1148 bp, Homo sapiens
gtggtttggcagaggagacatgcgagaagacggaacgttttgtccgaatagacatctggcagggtggaacggagagaacaggtatggtggagagaacgtctgagaaggtcgcaggattcgcaggagcatcgggaaaagattgcctgcttgcccgaaggaatggcaagttccaaaggtcagaggctcgcgtgaactctgtcgggttcgagagcagctcagtgttgctggtggcaagagtgtggyacgggaatggttgggtgtggtttgaatgtctagaaaaggcgagctgagggtagatttttgagcagtccagagcagaaggggtagaggatatattctgtgggccacggccacattctcaggatgctcgtggctgtaaatagtagatgacccaagtaagagcggctgaagccataggcaccaaaattgtgtcagcatcgtcgtgtcatgctcatgttttcccttccagctgtgctgtgggcagtgtttagttcatgtctgctttgctggcgggccgagtagcaacagctgcagttggtgtgttctctgaaggcagtatccgaaggctggaggggttgcttttcttcccaggtgtcttttgaagaggcagtcaagtcagcagctcgcggtgaccttctggtaacatcgtatgggctgggttacagcacatgccgactgctaagccggtcactggggaaaaccatgtgattgctgtgatgagcttagaatgatcattcctccttcaggagctggggtgggttgagggagtgataaagatcccgataaccttgcatttctccagcgagaaagaagaaagaaattccgtggatagggagccagccaggtttcctgcagaaaatcatgggaagcttttgagcaggggagtcagaagatgagcggtgagtattagggctttccggtcacggtgtgacacagggattggccagctcttcctgtaaagggccaggtgggaagcactcgtaggccccgtggtctctgtcgtgtctgctgaagcctgccgtagtagcgtggaagcagtcagagatgacgtgtaagcaaatggtcccgactgacctccggtaaagcattgattccggaagcatttaacagacctaacaacctttcaaaccgcatggcgtttctttccc

SEQ ID NO: 29264 - DNA, 966 bp, Homo sapiens
ttctaaaatcttttgtagataaaactagatgcctttcttgattctatgactggtattaccctgtcataatttctgagccctttactaaaagtgttttactgaacatactaaagcgtattatgtaaaagatagtgagctatggtgcaagatactatgcaacatgccccccaatattgtgactacctctccacctatttatacatagaatttacgtggcataaacagataggcaaatactataattattataaaatgatttttcaaaatctatttttgtatctaacataatgctaaagaagaactctgtcaaaataaaatattagaatttcataagtcttttgtgcctagaaattgctgagatgtaagccttttttcatgaatgctttctctactgactcctcctcctcctgagttgatgagtactctgccccttgctctttgtgctaaacacagacaagagtgagtgctggtggtccctaagaaataactagattacaaacattggccgggcgcggtggctcacgcctgtaatcccagcactttgggaggtcgaggcgggcggatcacgaggtcaggagatcgagaccatcctggctaacacggtgaaaccccgtctctactaaaaaatacaacaaattagcccggcgcggtggcgggcgcctgtagtcccagctacttgggaggctgaggcgggagaatggcgtgaacccaggaggcggagcttgcagtgagccgagatagtgccgctgcactccggcctggcgaaagagcgaractccgtctcaaaagaaaaataaaattattgcattatctttcgtagaagccataacattcaggggatggtaattcataggtaggtataaagtatataaggaaacaacaaagaagacacttctgtagagcttagagagagactaagaagatccgagacaggaggagtataagagaaaacaggaagctgactcg

SEQ ID NO: 29265 - DNA, 520 bp, Homo sapiens
tatggtggtaagaaaaagtggcctttacaatttcttctttggagaatggattgaggtattctttgatacctagtatttaatcgattttgtaaaaccacacaggtattgaaaaaatgtttattcttttcattggctataacattcaagcaagtttgtcaattgtgttattcaaatgttctgtatacaaaattatattctgtccacataaactgtcaccttccgagacttaacagatcgatgtctcctacagagagtgtggctctgtcmggtagtcctcatagtcatcacagtttttgctttgtttcaatgcaagtgtgatgcataaaagtttgtaactattacatcttctcagtgaattttaccttttttaaacctatgcgatttaaaacagcacttcatgttctctttaattattttggccttgctttctattttgccagataatgttgctattccatttacctaacatttctctctccatctctttatattcaacatttgtgtgtcactttatttctgg

SEQ ID NO: 29266 - DNA, 520 bp, Homo sapiens
tatggtggtaagaaaaagtggcctttacaatttcttctttggagaatggattgaggtattctttgatacctagtatttaatcgattttgtaaaaccacacaggtattgaaaaaatgtttattcttttcattggctataacattcaagcaagtttgtcaattgtgttattcaaatgttctgtatacaaaattatattctgtccacataaactgtcaccttccgagacttaacagatcgatgtctcctacagagagtgtggctctgtcaggtagtcctcatagtcatcacagtttttgctttgtttcaatgcaagtgtgatgcataaaagtttgtaactattacatcttctcagtgaattttaccttttttaaacctatgcgatttaaaacagcacttcatgttctctttaattattttggccttgckttctattttgccagataatgttgctattccatttacctaacatttctctctccatctctttatattcaacatttgtgtgtcactttatttctgg

SEQ ID NO: 29267 - DNA, 603 bp, Homo sapiens
taacctttattgaaacctactacgtgtcagatagtcttctgagtgttttgcattgattaacttactaaatcctcccatcaaccctggaattaggtcctactgatattcccgctttacagataaagaaatggaggctcagagagagaaagtaacttgtccagagtcacagagctggtaagggatggagcaggggagattcgaacccaggccgactctctctagagcccactttagtaaccagcacacttcgttgaaaagggagcacagaattctatgattctagaattacctcgggatcccaaggaccgctggctctgcagtcttcaagttcaatggcccccagttccccagaggggccagccttggtcacagctgacattgggtgggcggcagagagtaatgtgaagaagacttagctgggaggcccacattcaaactccagctccacctgttctaggggccttatacctctgcactcagctttctcacctgaaaaatgggcctttattcctgaatagaattyctgggggtgggggtgttaaatttaaaatacgttttgcaataataggttctcaatacgtgggaactgttatctctagttcc

SEQ ID NO: 29268 - DNA, 995 bp, Homo sapiens
cctactttcaggaatggcatttatattctaatggggaggacaaatcataaataaataagcaaacatgaacaaataagtgctatgaataatataaaacagggcaatattacggggagtcaggagaatgagaagagaaggcctctgggaagagacgacatttgccctgcgggaccaagccctgccacatttagaggagaaagtattccaaggggagggcacagcaagtgcaaaggccctgaggcagggacacgctgacacattagaggaacagaagggccactgtgggtggacaggagtgggaaaagggagaatgggaggaaatgcagttggaaacagatgatgctacatcaggaagaacccgtaggctatggacagagctcgggtttgattctgattgcactgggcagccgttggagggtttaaaacatattttctggcttccccaatcaggactcttagtttgacaataggatgaaatacaataccttaagagtttcaaagagggccgggcatggtggcttatgcctgtaatcccagcactttgggaggccaaggcaggcggatcacttgaggtcagaagtttgagaccagcctggccaatatggtgaaatcccatctctactaaaaatacaaaaattrggtgggcgtggtgtcgcatgcctgtaagcctgtaatttcagccactcaggaggctgaggcaggagaatcgcttgaacctgggaggcagaggttgcagtgagccaagatcgcaccactccgtcttaaaaaaaaaaaaggagtttcaaggggggatcactgagaggctacccagagatactgagcagatggaatcatctgcttatagctaccaacaatgtcctaaggcttcttagcagattcaaggtatcgcagggactgttcatccaggtgttctgttccatccaggtttggagtctctggcaagctcccctgactgtgcatccctctggagacgaagaggagggggaggcctgtcc

SEQ ID NO: 29269 - DNA, 491 bp, Homo sapiens
agtttagtgttttccagtaaatgaaatttgttttcatataactaatatttaaaggtgtaaataatatctaggacacataaatttaaggaaccatcataattgtatttaactctgattcattaagggattagttatctagtttgtgaacatgtaaaccccctgtagctctcttcccatttctgaacgaagacaaaatttcaaattccagtttgtggcttattcataaccttcaaaattataaccaaaggctaaaatgagtttctggcactgtttggaagtttctattttgggggctatcctcaccacttaacttgaactggggattatcagtagtactgtacatagtccattaatttcaagtcaaatcatttcacaagtgttaatatttcacgtatacrtgactgcaaggtatggtagaatgcttcataaaagctaccgaaaataaacttcaaaaataaaatgtatcaattagttaaatcatattagcctat

SEQ ID NO: 29270 - DNA, 491 bp, Homo sapiens
agtttagtgttttccagtaaatgaaatttgttttcatataactaatatttaaaggtgtaaataatatctaggacacataaatttaaggaaccatcataattgtatttaactctgattcattaagggattagttatctagtttgtgaacatgtaaaccccctgtagctctcttcccatttctgaacgaagacaaaatttcaaattccagtttgtggcttattcataaccttcaaaattataaccaaaggctaaaatgagtttctggcactgtttggaagtttctattttgggggctatcctcaccacttaacttgaactggggattatcagtagtactgtacatagtccattaatttcaagtcaaatcatttcacaagtgttaatatttcacgtatacatgactgcaaggtatggtagaatgcttcataaaagctacygaaaataaacttcaaaaataaaatgtatcaattagttaaatcatattagcctat

SEQ ID NO: 29271 - DNA, 790 bp, Homo sapiens
gagaccagcctgaccaacatggtgaaacccctgtctctactaaaaatacaaaaatcagctggacgtggtggcgggcacctgtaatcccagctactcaggaggctgaggcaggagaatcgcttgaacccaggagatggagcttgcagtgagccaagattgtgccattgcactccagcctgggcaacagagcaagacttcctcaaaaataaaaaaaaaagttttaaggttctttttaccgtggtttatgaggctttgttctaataactcaaataaattgaagcttatcttaaaagaggataaaactacggtattttcagtgtataccctgtatgtacacatcacatgttggacccgactttccaaatacgattcgccagcattggcaytcacatatgtagctcatgatcaaagggcgatgaataatgttgcttcatcccgagactcaggtggcgttactgaagcatttagcatccccctttcatcagtgccagtgccgcagatgctgcgggcaacaaattgtgcgccctagtggtccacacgagtatttctcattacaatattaattgtaaagtgtaaaaaccaagttacaaaaacccaccgcgtttttatgttgctgggggaagattccacaaatttctgccatctactttctttatactcttttaaagctttttttttttggaaaataaaacataaatacagaaaatcatacaaaaatgaatgtatagcgtaatgaaggcaaacacccttgtaactaccatccaggtcaaggaatagaactttgcaagcc

SEQ ID NO: 29272 - DNA, 566 bp, Homo sapiens
tttttttttttttttttgagacgaattttgctttgtcccccaggctggagttcagtggctcagtctcagctcactgcaacctccgcctcccaggttcaagtgattctcctgcctcaggctcctgagtagctgggattacaggcggccaccaccacgcctggctattttttgtgtttttagtagagatggggtttcaacatgttggccaggctggtctcgaactcctgacctcaggtgatctgcccacctcagcctcccaaagtgctgggattacaggtgtgagccaccactcccgatcttgttttttgttttgttttgttttttttkgggggcgggggggaatgagaatatttaacgtaagatcttaacgggtttttttctttttctttcttttttctttttttttttttttgagacagggtctccctctgtggtccaggttagagtgcagtggtacaatcacggctcactgcagccttgactgccgggggtcaagtgatcctgctacctcagccccttgagtagctcggactacaggcgtaccaccacagccacctaattttaat

SEQ ID NO: 29273 - DNA, 2600 bp, Homo sapiens
tggctgtgtgagcacccactttgtgagaggctccctctggtgccaccctgatggccctttgatcatgtctgagagctgcctcttcccaggacatgcctgtgagcagatgtcctccagctcgaaactgggcttgcttctagtcactagtgaaaaaaggtatagattttaggctgagcactgatgctgcaagaggggaataaagaaaggatcttctttgcttcaggaaaaacaaactacaaccaggcctcaaagccttttgatttcacagagagagttttggcaacttgctctctttctctgatggtacccagggcagaattcccaccaatacaaagcatatcattgcttcagaacccaggggctacaatgagccaaaagaatggtcagtgagaactttagatatctcctggactgatgatttaaacaaaacactccaaagtagtgaaataaggtttaggagccacagaaacaagttgagaccataaataataagaccgattccataggaaagctgggctaattagcataagctgatattgcaaattggtgcctcacaggttaaatgtggcttgcacatatttcatttggtccacatgttgtatttaaaatttagttgccaacattaacaattttgaaaatttcaattaaaatttagatttcatgggccaggcacggtggcatacacctgtaatcccagcattataggaggctgaggtgggtggatcacttgaacccaggagtttgagatcagcctaggcaacatggtgaaacgccatctgtacaaaaaatacaaaaattagccgggtgtggtggtgtgcgcctatagtcccagmtacttgggaggctaaggtgagaggatcacttgagcttgggaggttgaggctgcagtgagctgagattgtgccacctcccccagcctgggcaagagagagcctgtctaaaaaaaaggttggatttctggcttcccttgaaaaatcagaaagaccaggtaacacttcatggtactcattgtctggaagtgagcagcagctgcccctgctttccaactttcacagccccattctctcccttgcattagaacaggcctgtcttgcaacttatgtcacctgtctgtattctgtaggcttttgagtctggatccctgaaatatggtcacatggtatctgcttcagaaatgctgggatgatagattctggcttagtgagcttgagacaagatgggtaaaaggctatgaggcaaccccaattccgatttaagggtttctatggagaaatggggatgaaagaagagtcacccatagctgctggggttggaggagcggggtagtcctatgagactggggaactttagtgggtcgatgggtttatcttggtagcccttatgctggatgcgggaaagactgtttcctagagttgcctggagtgcactgccctgctgcagtgcctgtccaaccagaggctggtgggaggacaggagacagaagattcagatcatgttggcaccttttcctttcatcttgccctacgtaagcttgggcgtttttttttttttctttggcgtcacttcatacggttagatcgtctgacctggctcggctgctggctttgcttagcctgctcaggggtctggcatcatctgttgtcagctctggacagagtgaaggtgtcttctcagctggcagcccttgctttgacaccttctccgactgcggctcttctttttcaccctccttatccactccgggggtctctactttctccccctctggcacggccaccttctcctgctcctccgtggtcagcctctctgcttcctccttcttctctcccacctcgggttcggctccctcctctgcaggcggcccctcgccctccacttcttgtgcccccacctgagcgtaggaaggcagtgtctcttggtagccccgggacaagtcccccaggggtcctgtgctgatcttctcctcgaactgattgaaaggcttggcaggcagtgggctggtctccaccatcccaacctcggtcaaggggaaatagtgggaaacgattttctcttcttctaggagctgatagcccttggctttctggatggaggagacagcaatggagtggagggatttctcaggaatctcccccaggggctgctctacaggcctcttcaaggcagaccggatccccttcaggcccaggtggccaactccatcacgttgaggaatagggacacagaggccacagacaacatgaacaggatgaagatggttttctccgtgggccgggacacgaagcagtccaccacattggggcagggccaccggctgcagcggtacagaggcaggatccggaacccgtacaggaagtagtggcccacgatgaagcccacttcaaagagggtcttgaagatgatgtggcagatgtaggtcctcagcagggtcccctccagccggaacttcttagtgcctttgctgccgctgctcttcttgacgctgccctggtccgggccgccgttagtccccgcctgctggcccagctcctccgcctcgcgcttttgcgcttctcctccatgcggacgtagtgcaccgcgtgccccacgtacatcaggga

SEQ ID NO: 29274 - DNA, 2600 bp, Homo sapiens
tggctgtgtgagcacccactttgtgagaggctccctctggtgccaccctgatggccctttgatcatgtctgagagctgcctcttcccaggacatgcctgtgagcagatgtcctccagctcgaaactgggcttgcttctagtcactagtgaaaaaaggtatagattttaggctgagcactgatgctgcaagaggggaataaagaaaggatcttctttgcttcaggaaaaacaaactacaaccaggcctcaaagccttttgatttcacagagagagttttggcaacttgctctctttctctgatggtacccagggcagaattcccaccaatacaaagcatatcattgcttcagaacccaggggctacaatgagccaaaagaatggtcagtgagaactttagatatctcctggactgatgatttaaacaaaacactccaaagtagtgaaataaggtttaggagccacagaaacaagttgagaccataaataataagaccgattccataggaaagctgggctaattagcataagctgatattgcaaattggtgcctcacaggttaaatgtggcttgcacatatttcatttggtccacatgttgtatttaaaatttagttgccaacattaacaattttgaaaatttcaattaaaatttagatttcatgggccaggcacggtggcatacacctgtaatcccagcattataggaggctgaggtgggtggatcacttgaacccaggagtttgagatcagcctaggcaacatggtgaaacgccatctgtacaaaaaatacaaaaattagccgggtgtggtggtgtgcgcctatagtcccagctacttgggaggctaaggtgagaggatcacttgagcttgggaggttgaggctgcagtgagctgagattgtgccacctcccccagcctgggcaagagagagcctgtctaaaaaaaaggttggatttctggcttcccttgaaaaatcagaaagaccaggtaacacttcatggtactcattgtctggaagtgagcagcagctgcccctgctttccaactttcacagccccattctctcccttgcattagaacaggcctgtcttgcaacttatgtcacctgtctgtattctgtaggcttttgagtctggatccctgaaatatggtcacatggtatctgcttcagaaatgctgggatgatagattctggcttagtgagcttgagacaagatgggtaaaaggctatgaggcaaccccaattccgatttaagggtttctatggagaaatggggatgaaagaagagtcacccatagctgctggggttggaggagcggggtagtcctatgagactggggaactttagtgggtcgatgggtttatcttggtagcccttatgctggatgcgggaaagactgtttcctagagttgcctggagtgcactgccctgctgcagtgcctgtccaaccagaggctggtgggaggacaggagacagaagattcagatcatgttggcacctkttcctttcatcttgccctacgtaagcttgggcgtttttttttttttctttggcgtcacttcatacggttagatcgtctgacctggctcggctgctggctttgcttagcctgctcaggggtctggcatcatctgttgtcagctctggacagagtgaaggtgtcttctcagctggcagcccttgctttgacaccttctccgactgcggctcttctttttcaccctccttatccactccgggggtctctactttctccccctctggcacggccaccttctcctgctcctccgtggtcagcctctctgcttcctccttcttctctcccacctcgggttcggctccctcctctgcaggcggcccctcgccctccacttcttgtgcccccacctgagcgtaggaaggcagtgtctcttggtagccccgggacaagtcccccaggggtcctgtgctgatcttctcctcgaactgattgaaaggcttggcaggcagtgggctggtctccaccatcccaacctcggtcaaggggaaatagtgggaaacgattttctcttcttctaggagctgatagcccttggctttctggatggaggagacagcaatggagtggagggatttctcaggaatctcccccaggggctgctctacaggcctcttcaaggcagaccggatccccttcaggcccaggtggccaactccatcacgttgaggaatagggacacagaggccacagacaacatgaacaggatgaagatggttttctccgtgggccgggacacgaagcagtccaccacattggggcagggccaccggctgcagcggtacagaggcaggatccggaacccgtacaggaagtagtggcccacgatgaagcccacttcaaagagggtcttgaagatgatgtggcagatgtaggtcctcagcagggtcccctccagccggaacttcttagtgcctttgctgccgctgctcttcttgacgctgccctggtccgggccgccgttagtccccgcctgctggcccagctcctccgcctcgcgcttttgcgcttctcctccatgcggacgtagtgcaccgcgtgccccacgtacatcaggga

SEQ ID NO: 29275 - DNA, 1767 bp, Homo sapiens
cttccttacaccttatacaaaaattaatttaagatggaataaagacttamgtgttagaactaaaaccatagaaaccctagaagaaaacctaggcaataccattcaggacataggcatgggcaaggacttcatgtctaaaatcattcttaattaaaacctcttttatctaagcatagctactcctgctctcttttgatttccatttgcataaagtacctttttccatctcctcactttcagtctgtgcatatctttataggtgaactaagtttcttatagacagcttatagtttggtcatttaaaaaaatccattcagccactctatgtcatttaattttagaaattaattcatttatattaaaagttattaatgataggtaagggtttactattggcattttgttacttattttctggttgtttggcagagttttctctctcttcttgtttacctttgtagttaagtggttttttcccatagtatgttttgattttgtgctatttatttgtagtgtatttatgataggtttttgctttttgattaccataaggcctacaaaaacatcttatgttattacaggttatcttaagctgataatgacttaacttcatagcaaagaaaagaaaaataacaataacaaaaacaacaataaaaaaccctctgcagagggtttaacactattctttaacactatttctttaacactatttaacactattttttaacactgtttcctccccattttttgactttttgatgtttcaatttacatttttatattgcctatctcttaaccaattgttttagttattgttttaataaatttttcttttagtctttattcttaaaatataagtgactgactgacttcaattacagttgaagtaagtagacagtctgagtccactcatggacacgtgtgatccagcacaggagaaaatcaaggatcctgccatgggcagtcaagacatttagagtattctgaatttgtctgttttttttttttttcttttagcagtgagtttaattactttagatgttttcttgtacattagcatccatttctttcagattgaagaactccctttagcatttcctgtaagacaggtctgctgttaaggaattctctcagcttttgtttgtctggaaattctttatctcttcttcatgtttgaaggctaacttcgctgggtacagaatttttgtttggcaattccttttttcctttgtcactttgaatatagcatcctgttctctcccggtctgtagagtttctgctgagaattctgctgaaaattgtattggggcttcactgaatatgatatatttcttttcttttgctgctttgagtattcttgctttgtctttaatttttggtaatttaattatgatatgtcttggggatttcctctttgggttgaatttgattagtgacttctgagcatcttgtacttggacggcatcatctttctccagattttggaaactttcagccattatttccttaaatatgctttctaggcccttctcttttttgtctcctgggaattcttgttatatggaggttagttcacttgatgatgtcccataattattataggccactgatgggctgtaactaattcatggtcttctacctctgctaggtccagactgacaatgaatattgacagagactttccccttgacctaactataactagtcaggctcttctgaacccaactagagcccattcttgggaatgtccgcaagagtccagtttta

SEQ ID NO: 29276 - DNA, 1767 bp, Homo sapiens
cttccttacaccttatacaaaaattaatttaagatggaataaagacttaagtgttagaactaaaaccatagaaaccctagaagaaaacctaggcaataccattcaggacataggcatgggcaaggacttcatgtctaaaatcattcttaattaaaacctcttttatctaagcatagctactcctgctctcttttgatttccatttgcataaagtacctttttccatctcctcactttcagtctgtgcatatctttataggtgaactaagtttcttatagacagcytatagtttggtcatttaaaaaaatccattcagccactctatgtcatttaattttagaaattaattcatttatattaaaagttattaatgataggtaagggtttactattggcattttgttacttattttctggttgtttggcagagttttctctctcttcttgtttacctttgtagttaagtggttttttcccatagtatgttttgattttgtgctatttatttgtagtgtatttatgataggtttttgctttttgattaccataaggcctacaaaaacatcttatgttattacaggttatcttaagctgataatgacttaacttcatagcaaagaaaagaaaaataacaataacaaaaacaacaataaaaaaccctctgcagagggtttaacactattctttaacactatttctttaacactatttaacactattttttaacactgtttcctccccattttttgactttttgatgtttcaatttacatttttatattgcctatctcttaaccaattgttttagttattgttttaataaatttttcttttagtctttattcttaaaatataagtgactgactgacttcaattacagttgaagtaagtagacagtctgagtccactcatggacacgtgtgatccagcacaggagaaaatcaaggatcctgccatgggcagtcaagacatttagagtattctgaatttgtctgttttttttttttttcttttagcagtgagtttaattactttagatgttttcttgtacattagcatccatttctttcagattgaagaactccctttagcatttcctgtaagacaggtctgctgttaaggaattctctcagcttttgtttgtctggaaattctttatctcttcttcatgtttgaaggctaacttcgctgggtacagaatttttgtttggcaattccttttttcctttgtcactttgaatatagcatcctgttctctcccggtctgtagagtttctgctgagaattctgctgaaaattgtattggggcttcactgaatatgatatatttcttttcttttgctgctttgagtattcttgctttgtctttaatttttggtaatttaattatgatatgtcttggggatttcctctttgggttgaatttgattagtgacttctgagcatcttgtacttggacggcatcatctttctccagattttggaaactttcagccattatttccttaaatatgctttctaggcccttctcttttttgtctcctgggaattcttgttatatggaggttagttcacttgatgatgtcccataattattataggccactgatgggctgtaactaattcatggtcttctacctctgctaggtccagactgacaatgaatattgacagagactttccccttgacctaactataactagtcaggctcttctgaacccaactagagcccattcttgggaatgtccgcaagagtccagtttta

SEQ ID NO: 29277 - DNA, 545 bp, Homo sapiens
tgctggaaatgcattatcttacctcagactgagcacattcaaatttgaccaaagttgctgcaagttcacttcgagcattttgagccacattccgatagtggtttaactgctcccgcgtgaccgggacttccgaaagatgatcgtaagtttcctggtagaattcccccaaaatacaaaatataaagaagagtgttaaacgatcttttccgtgcagctgcacaaagccagattaarggcagaagcattctttgtattccaaatatgtcaaacatgctacgcagagaagtgttatgttcagaccatttggttctcattctcaaagttcaaagggaagcaggagaaagttcgggaacaaatgatgtgctcctccaggatggtgatgaggtttgtcatttaagaattggcctatggcagagtgtgttggctcacatctatactcctagcccttttggaggccaaggcaggaggattgcttgaggccagaagttccagaccagcctgaccagatagagacagcaagaccctatctctacaaaaagaaaaaa

SEQ ID NO: 29278 - DNA, 592 bp, Homo sapiens
gccttctcctgtgggtaaaatgctatsaaatggcatcatatgctacagaaaaatcttttgtgaaaggaagaatccatcaatgtagcaaactttattggtctcttatgttaccaaattgccacagccaccttaacctttagcaaccaccaccctgatcaatcagtagccaacaccgaggcaagactcttcactagcaaaaatattaagacttgctgaaggctcagaagattagtatttttagcaataaattaaggtatgtacattgtttttatacataatgctactgcacacttaacagaccacagtatagtgtaaacataactttcatatgcactggaaaaccaaaaaattcgtatgactcattttattgaaatatttgctttgttgcagtggtctgaaaccaaacctgcaacgctgttgaggtatgcctgtatttctttggaccttctaggcttattatatttctaccatttaaatttagctttaggaattgttgcattttaacttcagtatcaagtttctattgaataataaatacttcaaaagatcctggagactctgagatttggaatttttaataaaagctacgttt

SEQ ID NO: 29279 - DNA, 2465 bp, Homo sapiens
tgacatacatttcttgtatccccatgatggtggcagcaagaaggaagacactgcaaaacacattcaactcccctctttggggaactgtttattcctgcgaagctgctagtgcagatcgatggttctgatccagtggaacacatcaaaatcatctggagagctttttaaaaagacaaatattatcctccttctagagactctgatccaggaggtccagcacaaggctgggcatgggattcagcctgcactctgggtgtggacctcatgctgatgggcaccaagctatggctgtacatgagaccatgagccatttccttccccgcacccttctctaccctcctgtgcctgccctcgggcccaggtggactgtgatgttccccggtggagatctgatagagatttttctcagaaaattgaatacaaagtaatctctcttcccttttaactgtaattctcactatcactaccacatccctgtttccttggaaactacaaagttaagatggacttgcaatgttgtgtccaaaagtttcctaatctgaaactctgcacctgggctggaaatccaggccagctttctatgtcaagagtgggatgtttcactcttcacgttatgatttcaggtagcaaagtttctgaccctctgtgatgacagagaacaagatttctcagtgagataagaaacagtggtcacaaaaaaagagaactgttaggacaccgtatagctgcattctgaccttggggaaataggcttcccgttagctttgtagctgggcttctctgtgtttgttaccccagcctgctctaggaatagcaggcctgatttttaccttctcactagattcctcacatctgcagacctaacaygctcagttttgatcctgtggtccatgatatgtgttcattggagattttgagaaagtatacaagaatgcccagcattcacatccgacatcttaatgtacctccgaacctgtaaagcactaagaaagtaacttaaggaaaagtgacctgaaaggagaattaaaattaaaactggtattagaaaggtagggaagggaaacaggtataagtaagccatggtttgaagcctttatagtgcttaaaatcctttggcctgctaatatcatgcaaagagagctagtctgaggaaatcactagctgtaaggacaaagatgcatagacagggataagcattatatgtcatggtgaaaaaccaaaaaccacttaaacattaaaggtgtagttatatatccaaaatgaacagcggccacaaggatgctcatgaaataagtgcaaaaaaaacaagatcttaaaatatatagtatgatatcaactaattttttaaattgtataataacatgtatagaaaatgtctataaggaaatgtaccaaaacagtaacgatgatttcagagtgcctggattatgggagattttgtttctttattctttattttctgtaataagcttgtatttttcggaataccacagtgagcatctattacaacaatacagggcagttctaaaataaacatgtattactcagagaaagaaattaattacttttggaaaaaaagtaatggctctttagccagaaaataaaaattgtatgaggataattacatgctgcagagttactcctattcatgggactgtgcaactgtgtttttcctgctatgttcctggtagctggaagaacataatttttaatttttgattggtggtttatgtgctaaacaaggctgaatgaatctgcatcttttttagttgtgtaatttttagcatttaaacctttttttaatcattagtcatttctcctagtaggaataacaactttagtaggcgtttgacgttggttgtttcactcagaaaaatgggttcaaacttcggaccttgttactgtttttatttatttttaaacttttttttttttttagaggcatggtcttgctttgtcacccaggctggagtgcagcggcatgatgatagctcactacagctccaactcttgggctcaagcgatccccacaccccactgccacctcagcctcctgagtagctgcaactataggcgtgcaccaccatgcccggataagtttttaaaattttttgtagagatggggtcttgccgtgttgtccaggctggtctcaaacgcctgggctcaagggatcttccctcctcgacctcccaaagtgctgggaacataggtgtgagctgccacacccatcctaaaacttttcatacctttattttctccagagtaattctaggtatccaacaagtaaatattaaaatactatgtacttataaagagaaatatgtaggaaactattgaaatttagttaagatcaattgagatttatagacaaacttagctttgaatttagatggcctttttgccatttatagcaaaattatctttataaataggaagagtatgtacatatttactcaaaaattta

SEQ ID NO: 29280 - DNA, 782 bp, Homo sapiens
caatccagctgttcctattcctcacttctgtttcactttcatttttctgttcataaatccttttcacgtgagtctgtctgaatctattctggtttggggattgcccagttcatgaaacattctttgctcaattaaactctgttaaatttagtttgtccaaaatttttcttttagcagctgcagatcgcccaactcatcggtggtaggtctaagactcgagcatgggtctttaagcctaaagtctatattcttgccacatagccatgctatcttctgatacatgtagcaaaactgctacagaattggccacctggaaccagttagtggtatcctgctattaaccacatgtattggttacctgatgctgccataacaaatcaccacaaactaggtggcttaaaacaacaaaaaattattatctcagtgttggcagctagtagtctgcaactaaggtgctggcaggktgatgttttcctctgacgcctctagggaaccttccttgcctcttcctagcctctagcagttgcttgccacccttggtgctccctggcttctagatgcatcactgcagtctccacctacgatcttctccctgtctgtgtccctgtgtcccaatgctcctctttttataaggatccagttatattgaatttagggcccattctaatccagtatgacctcgtcttaacttgattacatctgcaaagactgtattttcaaataaggtcatattcacaggctccaggtgaacataagctggggaaaggcacacattcaaccca

SEQ ID NO: 29281 - DNA, 607 bp, Homo sapiens
tgaaggcaaggaagcattcctacaaatgtccaagacctacagataagccaagctctccaggaagcctctaaagcaaccctstttgtggaaataatttatcttatcattgtcctggcaagtctgaataggagagatgaggcccaaatttatagtgcttggctcagggccctaccagagacaagggaaagttgtttgttcatgctactcatcacttacatgcagcagtggctataggaatatccagaaaacgttttgccaagagaagagctatctgaggatccaaataattaaagagacttatccctcagcatcagacaaattctttataatagataaccatctaggatggatttagctaatgagatggctcatacaaacctcagtgcagctagggacttcatagtggaaaaaaaaagtgatttcctttaaatttctggcaattaataccaaatccttgcttgagatgtctggtctcagtcacagccaattctccatgaagggtctgcccaagagtgaatctcttgggaatcaaatggagctagagagcagagaaagtgaattctgctcatgattagaggacttttctaagagtcagagtaatccaaag

SEQ ID NO: 29282 - DNA, 607 bp, Homo sapiens
tgaaggcaaggaagcattcctacaaatgtccaagacctacagataagccaagctctccaggaagcctctaaagcaaccctgtttgtggaaataatttatcttatcattgtcctggcaagtctgaataggagagatgaggcccaaatttatagtgcttggctcagggccctaccagagacaagggaaagwtgtttgttcatgctactcatcacttacatgcagcagtggctataggaatatccagaaaacgttttgccaagagaagagctatctgaggatccaaataattaaagagacttatccctcagcatcagacaaattctttataatagataaccatctaggatggatttagctaatgagatggctcatacaaacctcagtgcagctagggacttcatagtggaaaaaaaaagtgatttcctttaaatttctggcaattaataccaaatccttgcttgagatgtctggtctcagtcacagccaattctccatgaagggtctgcccaagagtgaatctcttgggaatcaaatggagctagagagcagagaaagtgaattctgctcatgattagaggacttttctaagagtcagagtaatccaaag

SEQ ID NO: 29283 - DNA, 607 bp, Homo sapiens
tgaaggcaaggaagcattcctacaaatgtccaagacctacagataagccaagctctccaggaagcctctaaagcaaccctgtttgtggaaataatttatcttatcattgtcctggcaagtctgaataggagagatgaggcccaaatttatagtgcttggctcagggccctaccagagacaagggaaagttgtttgttcatgctactcatcacttacatgcagcagtggctataggaatatccagaaaaygttttgccaagagaagagctatctgaggatccaaataattaaagagacttatccctcagcatcagacaaattctttataatagataaccatctaggatggatttagctaatgagatggctcatacaaacctcagtgcagctagggacttcatagtggaaaaaaaaagtgatttcctttaaatttctggcaattaataccaaatccttgcttgagatgtctggtctcagtcacagccaattctccatgaagggtctgcccaagagtgaatctcttgggaatcaaatggagctagagagcagagaaagtgaattctgctcatgattagaggacttttctaagagtcagagtaatccaaag

SEQ ID NO: 29284 - DNA, 588 bp, Homo sapiens
ggtagtgagcttaatacccaatacgtatcttttcaacccatgtcctcctgggagttgtgaaagtgaaaagactctccttaagaaaggagaaaagatgcctgatatggtttgattctgtgtccccacccaaatctcatctccaattgtaattcccatgtgttgagagagggacctggtgggaggtgattggatcacgggcatggtttcctccatgctgttctcgtgatagtgaggacgttctgacaaaaactgatggttttaaaaattgtttggcagttccccctgtgctcttctttctcacctgctgccatgtaagatgagccttgcttcctcttctccttccaccttccaccatgattgtaagtttcctgaggcctccccagccatgcagagttgtgaatcaattaaacctctttccttcataaattacccagtctcaggtagtatctctatagcagtgtgaggacagactaatataacgctcctttcttaacctatattttccctgccagttgaaatccttttcgcttttccatatatgcaactgatggcaccttcyctgaggtcacttttttcagatcctcagcc

SEQ ID NO: 29285 - DNA, 436 bp, Homo sapiens
aaactccagatgacggaactccagacaatgaactggggtgatcagggaagcctccaggaggagggctttgaaacttacaccttattcagggctttgaaatagatttccaaaaagcatccaagtcctgatccttccatttgatctcaggatcttgttattgcttttagaaaagccagygccatctgtttttggaagctggcacccacacccagctgttaatttggaatcctaaaccactttaaaaattaatggctttataaaaggtctgcaactgcctcttaagagtttaatatcatatttataaactcagtctgtattgagttccagcatattgcaaataatttacagtgttttcctgcacagagcataactaatgtggatccacagctgtgcagataacttttcctatcaacagatgataaactgtaagtggccc

SEQ ID NO: 29286 - DNA, 856 bp, Homo sapiens
tgcattgattcctttagcataattttttcacaaaattgtgtgattgcacaatagggtattctttatttcatatttaacgctctcagtgagaacaaataagagagtcatttttgaaaaatacttaaaggcttcctcattttgccgaagagactcccttaggcatttgatattttaatcattttctctcaaagaagttcaggcatcctcatccttatctgcttcaatttataagggttcttctgattcctgttttgccaatggttcagaccatcctccaatatcaattccctcgacttcatgaaatcctacaccttttgcaatattttcagtttcactttgcaattgattgccattgaatttgcactgcatttgttagacattcatctttcatcaaacatcaagarcctgacacccactcacaaagaccctgagtcatggaaggatgtgtcctggagaactgttggaaaaggtgagtttgttagtgggtattgtcatttgcgaagcttttcctatgcaatttcatagagcccctgtgatttgttgagtaacccagatatctgtcacaggttgctaccaagtcgtgatttcaaaataatctaattctaattaatgggctcctggaaaggggaaagaaggaggctttgtttgggaacttaattaatgaagtatttccaaacatcatgataaattatgacaaatgacatgaccactacccccttcttaatatttgtgatgaacaagaatctcatatgctttgatttaaatgtaagtctgaaaatgcaaatcttattatgaattggaacttgggtggcataaacttgagtgaatgttagagaaacaaatctcaggaacagaa

SEQ ID NO: 29287 - DNA, 856 bp, Homo sapiens
tgcattgattcctttagcataattttttcacaaaattgtgtgattgcacaatagggtattctttatttcatatttaacgctctcagtgagaacaaataagagagtcatttttgaaaaatacttaaaggcttcctcattttgccgaagagactcccttaggcatttgatattttaatcattttctctcaaagaagttcaggcatcctcatccttatctgcttcaatttataagggttcttctgattcctgttttgccaatggttcagaccatcctccaatatcaattccctcgacttcatgaaatcctacaccttttgcaatattttcagtttcactttgcaattgattgccattgaatttgcactgcatttgttagacattcatctttcatcaaacatcaagagcctgacacccactcacaaagaccctgagtcatggaaggatgtgtcctggagaactgttggaaaagrtgagtttgttagtgggtattgtcatttgcgaagcttttcctatgcaatttcatagagcccctgtgatttgttgagtaacccagatatctgtcacaggttgctaccaagtcgtgatttcaaaataatctaattctaattaatgggctcctggaaaggggaaagaaggaggctttgtttgggaacttaattaatgaagtatttccaaacatcatgataaattatgacaaatgacatgaccactacccccttcttaatatttgtgatgaacaagaatctcatatgctttgatttaaatgtaagtctgaaaatgcaaatcttattatgaattggaacttgggtggcataaacttgagtgaatgttagagaaacaaatctcaggaacagaa

SEQ ID NO: 29288 - DNA, 856 bp, Homo sapiens
tgcattgattcctttagcataattttttcacaaaattgtgtgattgcacaatagggtattctttatttcatatttaacgctctcagtgagaacaaataagagagtcatttttgaaaaatacttaaaggcttcctcattttgccgaagagactcccttaggcatttgatattttaatcattttctctcaaagaagttcaggcatcctcatccttatctgcttcaatttataagggttcttctgattcctgttttgccaatggttcagaccatcctccaatatcaattccctcgacttcatgaaatcctacaccttttgcaatattttcagtttcactttgcaattgattgccattgaatttgcactgcatttgttagacattcatctttcatcaaacatcaagagcctgacacccactcacaaagaccctgagtcatggaaggatgtgtcctggagaactgttggaaaaggkgagtttgttagtgggtattgtcatttgcgaagcttttcctatgcaatttcatagagcccctgtgatttgttgagtaacccagatatctgtcacaggttgctaccaagtcgtgatttcaaaataatctaattctaattaatgggctcctggaaaggggaaagaaggaggctttgtttgggaacttaattaatgaagtatttccaaacatcatgataaattatgacaaatgacatgaccactacccccttcttaatatttgtgatgaacaagaatctcatatgctttgatttaaatgtaagtctgaaaatgcaaatcttattatgaattggaacttgggtggcataaacttgagtgaatgttagagaaacaaatctcaggaacagaa

SEQ ID NO: 29289 - DNA, 606 bp, Homo sapiens
ggtcatggtgccacattttgtacagaagtgggaggcagcaaagccgcaagatctaaagacagagttgcaggcccaggtgcggtgctyacgcctgtaatcccaatcagcgtgggaggcccaggcaggcggatgacctgaggtcaggagtttaaggccagcctgagcaacatatgcagcccccatctctactaaaagataacaataaaacattgctgggccgggcgcggtggctcacgcctgtcatcccagcactttgggaggccaagacgggcggatcacgaggtcaggagatcgagaccatcctggctaacatggtgaaaccctgtctctactaaaaaaaatacaaaaagttagccgggcgtggtggtgggcgcctgtggtcccagctacttgagaggctgaggcaggagaatggcatgaacctgggaggcggagcttgcagtgagctgagattgcaccactgcactccagcctgggggactgagcaagactctgactcaaaaaataaataaataaataaataaataataaaacgaagctgtgtgtagtggcgtgcacctagagtcctagctacttggggggctgaggtgggaggatcccttgaac

SEQ ID NO: 29290 - DNA, 631 bp, Homo sapiens
cttgcctctccctgtttataccaccagcttcttcttatttcaaaccatttttcagattgccattgatgctagtttctagaaacaagattgaataatttcatctccattattaaaaatatattttatttcccttctttccatatgataaatttcaaactccttgattcattgatataaatgtgcaaaggcagcagccagtgcaaaataactgtctggattataacaggtatttgatacatatttgtttgctgaattactgaaaaagttaatttatagaattttctcattttattttctaagctgaaacttcccttattttacctctgtctgtgttaagaagacattaaatgtctcacctttcacagaatgcagagccttttaacacatttttttatcttgacacatattcttagctattcctgtaaagccttttctcactttctctgtctcattttttaagatccatcccaaatgtttcctcyagtgtggactcttttatgatacccccaaatatttcagaattcttctatttctctcatgttaatgaccttatgaagttataaattgtataatcatgttagaaaagaagtcctgtcatgtgaccgtgtgcttggtactttgtaaggctata

SEQ ID NO: 29291 - DNA, 635 bp, Homo sapiens
ggacattaggagagttaacatacacagagaaggtgatacgaagatgcagtccagaaagacttgaatatgctcttctagataacttgagtgatgtggccagagtcaaggaatgctgcaactatcagcatttggaagaagaaacgttggattctcccctagagcctctggagagaatgtggccctgttgaaatcttggttttggcccagtaatactgattttggatgtctggcttctagaattgtgaatgaatacgcttctgtkgtttaagacattgaatctgtgatcattacagcagccacaggaaatcaatacacatggaatgaagaaagcaacagataaacgaggtaaacaaggagaaaaattgttttatacattttgacgtagatatgagattggtagtgattctggagaaattctggttttatgacaatctcatgttctcacagctaagactttccaattatgattgtcttagcatgttttctgttgcttataacagaatacctgaaactgggtaatttataaagaaaacaaatttatttcctacagttatggaggctgagaagtctaaggttgagggactgcgtctggtgagggtcttcttgctaatggagaccttctgcaaattctcaag

SEQ ID NO: 29292 - DNA, 1366 bp, Homo sapiens
aagaaataacattctaggtggagggaatagccagtgtaaagtctctgagtgtaccacacagggtctggcatgtaagtagcaagaaggtcagtgtgagtagagcaatgaaagtaaaaaagagagtggtagcagatgaaatcagaaaggtaacaagtagaacagacaggccatgaagaggttcatagactattttaagggcatcagctttaagtctgagtaaatggctagcccagtcacagggaggatttgaatagaggagtaacatgatctgatatatttcaaatgagtcatccctgcctgtcatgttgagaatatacttcctgtttcagttcagaaaaattataaagattaaggatttcctaaccagccaaaaaatagtttctaatatatagataaatatttgattgacaaaaagaattgtctctygatgaaaattcatacaatttgatacctaattttctcttgataaaaatatatacaatttgctacacaattcttaagctgaaacacttgaagtttccaatattcaacaattttttatttgcagaaagaagcaatttcatatgttccaattagtagttattaaattatctaaagataattttatgcatatagattttgctgatcttaataattttttttcataaatgccctgccctttacatctttgcctgcatgtctctgttgacagttgactctgttaatattttttctctatggctgggcatggtggctcacgcctgtaatcccagcactttgggaggccaaggtgggtggatcatgaggtccagagttcaagaccaacctggccaagatgatgaaaccccgtctctactaaaaataaaaaaaattagccgggtgtggtggtgggtgcctgtaatcccagctactcaggagaatcgcttgaacccaggcggcagaggttgcagtgagccaagattgcgccactgcactgcggtctgggtgacagagtgagactccgtctcaaaaaaaaaagaaattatttctactttgcctcctctttggacctataatactgaagtttctaaatgttggtgagaaatataagggtttaagtatagaatgcaatttataatagaatttagaacttcatacaaaaatagtattttccccaccaattagaggaaatgaccaaaacctctatttttagggtctgcttagtttgccctaacttttagatttctgaccttcttaacatatccaaaatgcaataaatgcacctttctctcatgtttaaatggttagtcagaaataaatgaataatgttttaattaaattttaattatggaataaaaattgctgaaataacttacgagatattaaaattgtgatcatgcaattgaac

SEQ ID NO: 29293 - DNA, 769 bp, Homo sapiens
tgcatcagaawaaaatgcaggacaggtgagaggtactcttgtcttccgtcaagtgagagaagaaaggctgagagggaaaaggaggaagaaccagcaaggtgctttcccagactaatgagttttatagacattctgcatctagaagccaattcctttaacctcctagcccatgtgtatacaccctggggaaaaatcttcctgaatcctcaggactgtatgtgagacaggagagttccctggccctccttgcaggaagtgtgacaggggtgtggctttctgttcagcctccatgagctcaaaccccttgcaggagggggagcatgcagacaggcaggtgcaggaaccagggtgagcacatttgggctctggccccacagcagcatctaggtaggggtgggtgtctgtgactcctgaagcgcaagtgggcgtgtgttataatgcgctcttttaaccttgctgtccacaaatggcttaagtgttagacagctcagtggaccctcttggcacccaggtctagtctgtcatccaggaagaatcaggtcacacacggacttgaagagtgaatgcggggattttactgagtggtggaggtagctctcagtgggatggatggggagctaaaagggggatggagtgggaagatgatcttcccctggagtttggctgttcagtggccaatctgttttgtgatcatccctagccaaactcctctcagcattcagatgctccttctcttctctcttgctctgccatgcgttctgctgtttgt

SEQ ID NO: 29294 - DNA, 599 bp, Homo sapiens
gaaatatttgttaacagcaatagataactaatacaacaaacctcacagagtatatatgaatatttggtgtgataatgtctatgaaaatccctgggatagaaatatttagtaatttaaggctttacataaatcttcagtaatcaagatcatctatatatggtggtagctgyagtgacagtagaacagctttaatgctctaggaaatgcgcctataccaagtttttaacccatgaaggcgcagggctgtataaatcctccctcagttccttcagcactgatgccatttctgaaacagagtagcttattactaaagatttgttaagtgaatgaatcaaccaattctgagcaaagcattcatattctctgaacccctgttgtaaattttaaggttgtactaaatggtctcagatatttgtcttggctaaagttattctaaaaggcagtaggcatagaatcatataattacttttttattttttacttattttttttttttagagtcttgttctgttgcccaggctggagcacagtggcacaatcatagctcactgtaacttcaccattctgggctcaggcgatcttcctgccttggcttctca

SEQ ID NO: 29295 - DNA, 559 bp, Homo sapiens
atctagacaatcacttaaagaacataaatgtaagtatatttggagcctcctgagagctggtaagaggtatcagatgctctgtggatggtaaagaagycactagcatagcatctgactgatattcattatttctctggggcctagaaatcaggtacccgcttcccctagcagttccctcttctgcccagagacctcccataaccagcagggccatcgagcaggctggaggaagtcaagtaaatgggctgccacagggtgtcattctcaagtgcaattttgagccttaagaaaacattaagtccttatgatcaagcattggatttttcataaaggctagggagcagggtttgaaggtctgccttctctaaactatcatgcccacagtcatgccaatgacaacacagtcaatcaccaaagtcatcaatcctgacccagctcttgcaggggttgggcgtgggcacaggggatggggtgtacagggcacagctgctgcttctagcacagtctggctgctgtaagattcagaatcaggcaagtgctccacgctactccactcgga

SEQ ID NO: 29296 - DNA, 696 bp, Homo sapiens
tctcatgtcagcctcctgagtagctgggaccacaggcatgtgccaccatgcccagctcatttcttaaattttttgtagagatggggtctcactatgttccccgggctggtcttcaactcctgggctaaaggaattctgcctcagcttcttaaagtgctgggatacaggtgtgagccaccgcactgggccttgaaattattttaggctaagatatttgcaaccccttcatagtgatgaattttaagctcagttgcccttgtagaacaggcccagacctattttttgtttttggttttttgtttgagacrgagtcttgctctgtcgcccaggctggagtgcagtgacatgatcttggctcactgcaacctccgtctcccggtttcaaatgattctcctgcctcagcctcccaggtagctgggactacaggtgcgcatcaccatgcctggctaatttttgtatttttcatacagacagggtttcacttatgttgggcaggctggtctcgaactcctgacctcgtgatgcacccaccttggcctcccaaagtgctgggattacaggcgtgagccacacagttttcccataactgtcttctagggaaaatcttggcaccgttcacaaggactctgtcggcccatctccatgtggatgtggttggttagtcctgcttggattccttacgtgttaataagaag

SEQ ID NO: 29297 - DNA, 1759 bp, Homo sapiens
tatttattgctaagactacttcctaggtggcatggggacttccctctggaggcacataatgttggtaatttctcttgtgatgtcagccacccctgatgtctgatgattagatcctttataagggagttgcaaaatgctgacattccaattctctcatcccttggtcactgctttgtcagaatatttgtgtcaagatatgtcttgcctcagcaatgatttgtttgccaggatggctagaatgggaaaggccccatgtaagttggcccattgtttttccaggctgtcttttacctagtagccagtcttccccatttttgctatttggacacacccttctcagctttgaagaagcagcttatcaaatgagacaggaccagtgtggccctcctggcccatttctgcctggagtcaatcactcctatgctgtcctggctcaatgccacttaccatgtcaggcataataatgtgctctcacgtccttctttcccattagtcagtgagtaaagcaaggctgtctcactcttctttgcatccccactgcatagattggaaccaggcagcctgatacctggggaagagtgcaggctttgcagggagacaaacgtggatccaaattccaaatctgaaaaggagctggtggctaattcaagtgaggcactcaaactttctgtgtttcagtgtgttcattgtcaaaatagaaaaaaagtcatttctctcagttacttttaagggtcaagtcatttggaaacagtgttcatgggattcctactcaatatacacttaaggtattctttcctattgtaatagtagcttctatttacccactcaccatgtgccaagccctactacataaaacccttgtgtgccttctcgtgtgatccccctgcagtgcccacagcctattacaggtaaagcatcaatgtcataggcaaatgatgcctttcaaacaggtaatggtcctaccaggaaggtaatggtttgggctgttaaaagcaacatcaaaataggtaaagaaaatgaggcttaccgaagttaaatatcttttcctaaatttccaagctgatgtgagttgactctgcacttaaactcagaccttactgatggcaaaattcactatatatcctgcctttaattgggtattacaccttgaataaatgaatgaatgactaaattaatagaagaagatgatactaggagtttattagcaaataattatttcctcccagacagttctttttttctgggaagtcagttgaatctggagcttacattttacacgtgggttgaggctacaatgaccagtcagagagagccctgacttcagtgtggacttctgagggaagaggaataccaggtgcccagtctgacttctgctactggttggcggtgtggtttgtataagcctcacatatgctcagacactacctggcacttgtttctaaccagctgttcaccttcctatggtgaggggctcactgggmcacccagtccaatggtgagcacagtttcctggatcccagccttttcatctgtcctctgctattacctgttaaagtgtgagctttctatttgacacctgggcagaccaagctcagctgagccctgacctggctagatgtcagggtgctactggcaggaatttaaactgcctcaacccagggagccagacttttctggaaaagaatgtaggtgggcaagcagttttgtggtttactccagggtttgggaatctcctgtccatggcctctgggaaggaatt

SEQ ID NO: 29298 - DNA, 505 bp, Homo sapiens
ataaaggaactgctgggtcccaggatgatggaaaggctgggggcagatttagatttaggaaaaggtartgtttcctgactctgggaagatggaggtgggaagatgatagaaaaagtatcaaggatattgaacttgcttaaccctgttgaaactgggatcatcagctttagtgtagagtactgcaaaattagatcaggaataagccccatgactatatgcccattcagaataagcgtttgccaggcaaatgacaacagcatggcaggcagatgctcgccttaaaagatgaaactctttccaaacatttggtagttcagcaacatccagagcactaattagaaagttgtttcccaggcagccgggcttgtttctctgctacaatgttactttccatcctttgctgactgattcactgtaactcctctcattcaaaattaggcagtgtttactatcaatttccctataactacagccattcaaatgctactactcattttttctttca

SEQ ID NO: 29299 - DNA, 1085 bp, Homo sapiens
agaaccccagggctacaagctttacaatgggccatctcaattagaattgaaggttatcagatcatggggttacatggctatcagaaggtttttctrtcacttgagcagccaaggaaaattttaggagttttcaatgagtttctattataacgacaacaaaaatactcgagattttcaagtaaatcaattttaagagtagccttttgtaaaccattaagcctcttccctgtttgatttggccttctccgtccttgatgcttcttctctagttagtgtcagtgtggctttcatcaaattctagatatttcttagattccctatgatagcctcttctttccatccttctgtaatcatgaaaagatgaaaaaatgagtgccaggaagcgtcctaaaagaaggctttcacagtgaatataaatctgatgtcagggaatccccaaaagcacatccagcaaaattagttatattgtgaaagcacaactaattttgatagttatcatgaatagagttacccacagagaagctgtaactacatggtgacctacaaacaggtctgtctgactccatccttgcccccacttcactcagccctcaataaacaaactggacaatgcctctctctctctcttttttaaattctttcctgcctctccatttcctatgtatttaactgaaactccatagcttagtgagcaagacattccatgctttactccttgtacactttacctctaccatgtcctttctcttgctaccttaaatcttaagattcagaaacttgaaaccatgtcaagtttctgaaatatgccatgctctcacatgtccatgtgcagggaatttactccccctgtctatccctcctcctttaagtctcactgtacataaagacatctcccaggtgacatctggcctaacatctcagaacatttgggctgccttgtcctagtgctccaggaatactgccctaacctcaatttttcttatcactctgaattctaaccgtataacacatttccttgtctcccactagaatctgagctctgtgaggccagtatcccaacacttaagaaaagtgggttgactaaa

SEQ ID NO: 29300 - DNA, 1085 bp, Homo sapiens
agaaccccagggctacaagctttacaatgggccatctcaattagaattgaaggttatcagatcatggggttacatggctatcagaaggtttttctatcacttgagcagccaaggaaaattttaggagttttcaatgagtttctattataacgacaacaaaaatactcgagattttcaagtaaatcaattttaagagtagccttttgtaaaccatkaagcctcttccctgtttgatttggccttctccgtccttgatgcttcttctctagttagtgtcagtgtggctttcatcaaattctagatatttcttagattccctatgatagcctcttctttccatccttctgtaatcatgaaaagatgaaaaaatgagtgccaggaagcgtcctaaaagaaggctttcacagtgaatataaatctgatgtcagggaatccccaaaagcacatccagcaaaattagttatattgtgaaagcacaactaattttgatagttatcatgaatagagttacccacagagaagctgtaactacatggtgacctacaaacaggtctgtctgactccatccttgcccccacttcactcagccctcaataaacaaactggacaatgcctctctctctctcttttttaaattctttcctgcctctccatttcctatgtatttaactgaaactccatagcttagtgagcaagacattccatgctttactccttgtacactttacctctaccatgtcctttctcttgctaccttaaatcttaagattcagaaacttgaaaccatgtcaagtttctgaaatatgccatgctctcacatgtccatgtgcagggaatttactccccctgtctatccctcctcctttaagtctcactgtacataaagacatctcccaggtgacatctggcctaacatctcagaacatttgggctgccttgtcctagtgctccaggaatactgccctaacctcaatttttcttatcactctgaattctaaccgtataacacatttccttgtctcccactagaatctgagctctgtgaggccagtatcccaacacttaagaaaagtgggttgactaaa

SEQ ID NO: 29301 - DNA, 499 bp, Homo sapiens
ttttcaatgtatacatctttcacctccttaaatttattcctaagtatttcattctttttgacgctattataaataggattgtctattgatttatcagaaagattgtttcatgtgaaaaaattaaatgttagcctcatctaaagaatatcttctcagaaacatttagaataatcttgatcaaatatctggatttcatggcttagcccagttgacacataaaaccaatsatcacagccttcaactgctccaggtttccattattcttcaagctcataatgctatgaaaaaaaaaaagagcacctcttccttgatggttctaacaaagtccaagagaaggttgggctgccttgatgtacatggcaatctctaatcccaatgagcagagattggcatattagtgtttgacatgcctaggtcacacagagtgaggtagaaggggcagccaaaattctgccaacagaatggctttcttaaagaaaaggcatagagaacacggagg

SEQ ID NO: 29302 - DNA, 553 bp, Homo sapiens
gcagagaaattacctgattagacacagctagatggctgccttatttctgcacaatgtgatgaggcatttaccttacttgggcacgttctgatgggaggtttctagttgtataatgaattggctggttgattggtggtgactcgctgaggccccctttttcttttcttagttacaagaaatgttttttaagtgaagtcctggttttgctaatatgagagcttstgctacagagacaatctctgtatgtaatggcctccttcttatttactttaacactaccttgaaactcacatggaggaaaacttccaaagtcatgttcaatcacatccatgaaaaatcatcttccatctagctgtattaaaggttacaaaacatttgaagaagagaaatataagatattgagagaaatataagatagctaatacacaatgaaccttaaaaaaagattttacaagagttctgttacaggataatttataatttttattctatggtaactaacatttaaataaattattgtcaaaatgactacttactatatcaatgaaaagaa

SEQ ID NO: 29303 - DNA, 609 bp, Homo sapiens
aggggagtgcttcctggaggaggtggctcctaagttgagacaggaagggcaagtgagagttatttaggtgtagaggaggaagatctgaagaggcagaggtgtgggcaagttgaaattgctttaggaagctcaatgaaagrgcaaggaaggggggtgataataccatccttcaggccttatgaacagactgcagtggtcacacactgagaagcccactgaaagttaagatctgggtaacctcacaaacagaataatgggagtgacttgtctgcgaggaagatgctggctgcagctgaccagctccagggcaaggtcagacatgggttcaggagtttcaatatggtggcttaaagatgaccactaattctttgtcatccaaaggcggtccctttcctccctccttgaatttgggcacaaaaattgtcttgggacttccaagtgcagactttgagaaagacagttaagctttcttcccttggaggccaatggttacactgtgagatgtccaagtcaaaggagaggccacatagaggtaaatcaaggtgctctgctcaacagccccgaatggacttcaagcccacagccagtatcaactgcaaccatgtgaga

SEQ ID NO: 29304 - DNA, 609 bp, Homo sapiens
aggggagtgcttcctggaggaggtggctcctaagttgagacaggaagggcaagtgagagttatttaggtgtagaggaggaagatctgaagaggcagaggtgtgggcaagttgaaattgctttaggaagctcaatgaaagggcaaggarggggggtgataataccatccttcaggccttatgaacagactgcagtggtcacacactgagaagcccactgaaagttaagatctgggtaacctcacaaacagaataatgggagtgacttgtctgcgaggaagatgctggctgcagctgaccagctccagggcaaggtcagacatgggttcaggagtttcaatatggtggcttaaagatgaccactaattctttgtcatccaaaggcggtccctttcctccctccttgaatttgggcacaaaaattgtcttgggacttccaagtgcagactttgagaaagacagttaagctttcttcccttggaggccaatggttacactgtgagatgtccaagtcaaaggagaggccacatagaggtaaatcaaggtgctctgctcaacagccccgaatggacttcaagcccacagccagtatcaactgcaaccatgtgaga

SEQ ID NO: 29305 - DNA, 584 bp, Homo sapiens
agcaaggagcacttccttactttctggctctccaagatgctctgggttcatcttctatatttcctgctgcagtcctagaatcagccatttctccaaggagctcggttctttttatggtagtttgcatggtcttaaaatccaaaatgtagatactacacgtgttccttgctactgggctaaggttgattcatggccctcgtggttgatagggaaaagaaatgtatgtgtgtatattaacaagtgcacatacacacattgttctatttttctatatttaacccatctttatctattaatatattgaggcaataatgagttcttgctgatgtcttcaactctaattcattatcacatcaatattcaagcctcctcacctatagatctacacatttccactccaacaatgagaaatctgactctcaccatctgccatccgtttacttcattgtacatttccagtgtaaatgtagagcagtatcgggattttagcgtgtacccctgtgctatagaactttrtcaactagagtacaatgcttatgtactgttccttttgcctttagttttacagactgcattcatttcca

SEQ ID NO: 29306 - DNA, 2196 bp, Homo sapiens
tttttggtttaagccagctgggattagatatctgtcacctataatggagaagttcttgcatatgtaggaccaaacctatactgtgttagtttcatctgatgaatatgttttaaatgcaggttcttgatcctaccattactgattctgattttgttggcttggaatcgggcccaggaatatgtatttttagggtactcaagatgactcagatgtcactagcctacacatccactttaggaaactattgccttgaattaggagtctttttatttggtggtcccttcagggctttgtaaggtaccttgcaaaaaaaaaggatgattagcccattacatatttgttgacttgaacacacatttcaagaatatgggcaaagagacagcccagattagttttcctttgaaagtattatttttaatagaaaaataacagttatatacgtttatgggtcacaatgtgatgtttcgatacatgtgtatgttgtggaatgaagaaagtagcctaattagcatattcttyagctcaaatatttattttttgtttgtcgagaacattcaaaattatttttttcttagctatttggaactatacagtaattattcttgacaggaggattgcatgaagttggccagacagccaaaaagaatcagattatctccagaaatttctatgtacctttgggtatgactgcatcttgcggtagctaccttaaattaatgtagcacaggttttaaatgccatttagttttacctttctagttttaaagttttggttatgactcattcatcctatgaccttggacctgtttcctgacataattgaattctgcgctttattgtttgtttcaaattaagacctctttgctacatataaagatttcctgttagggttgccctttatgataaattatattaccactgagtgattgtttaataaaaatttcaatctcattccaaacacatcaaggagttcccagggaccagtttcatatactcaggatcctgataaatgcagtgggaaccctctttattaaagacaggctgtaaaacatgctattgatgaaagtattaacagcatatggtatcaaagtgggagaaaaatcagagtccagctggaatagaactttgcttcatttatttgatgctcacttgggtgatttcatgatcttggccccacaaatattacaattgcttcctctggaggcctatctggatgtatttttaagggttatagactgaagctgagaacgtgaccacagaagatttattctaaagactttctatgaaaaccactcatcatcttcactaaaagggaggcagtttggatgtgagtttagaaagattatttttaaaagtagcaatacatttggtttgaattacagagctgaaggaggccaaatataactaaattagaaacattggaattaaattggaacctagaaattcataagccagaggaatataaccaacatatctactcacatattaggtctccctctgattagatgcacaatagtgtaccagggtgggaggtgccatcccatttaaacatcatgacaaaacctgcagccccacctttttatgtggaacacaagcaactataacatcagagccgtgggttcttctagtataacacatgctaagaatctccagcagggagaaaaatatcccattcctcttgataaactgacattggtaaaatgatattttcagatggatgaaaactttggcattatatagcccatatttcttagacttgatttcatggatctcttgtggagaggggtagtcaggggttgaggtttttggcatcattggacatcatgaaatatgtaaataagatggcatgtttgtgtgtatatgagattttattgtgcagaagtatccgagaaagataaagaaccatctgttttctcccacggactcattttacagatgggagtactaaggaccaggctgacttccacagtgtcccacagcaagtaactgacaggactggctctaaatctttgaattatggctaatagatgggagcctgcttgaggcacagggtcaggggctataaattgaaaaccctagcatgaaattaacctgcagttcagttttgtttgatctgcatagttttttatccattaggaaaagtcacacaaatatccacattcttctgaaaaattgcaagatttagcaacacggatc

SEQ ID NO: 29307 - DNA, 2196 bp, Homo sapiens
tttttggtttaagccagctgggattagatatctgtcacctataatggagaagttcttgcatatgtaggaccaaacctatactgtgttagtttcatctgatgaatatgttttaaatgcaggttcttgatcctaccattactgattctgattttgttggcttggaatcgggcccaggaatatgtatttttagggtactcaagatgactcagatgtcactagcctacacatccactttaggaaactattgccttgaattaggagtctttttatttggtggtcccttcagggctttgtaaggtaccttgcaaaaaaaaaggatgattagcccattacatatttgttgacttgaacacacatttcaagaatatgggcaaagagacagcccagattagttttcctttgaaagtattatttttaatagaaaaataacagttatatacgtttatgggtcacaatgtgatgtttcgatacatgtgtatgttgtggaatgaagaaagtagcctaattagcatattctttagctcaaatatttattttttgtttgtcgagaacattcaaaattatttttttcttagctatttggaactatacagtaattattcttgacaggaggattgcatgaagttggccagacagccaaaaagaatcagattatctccagaaatttctatgtacctttgggtatgactgcatcttgcggtagctaccttaaattaatgtagcacaggttttaaatgccatttagttttacctttctagttttaaagttttggttatgactcattcatcctatgaccttggacctgtttcctgacataattgaattctgcgctttattgtttgtttcaaattaagacctctttgctacatataaagatttcctgttagggttgccctttatgataaattatattaccactgagtgattgtttaataaaaatttcaatctcattccaaacacatcaaggagttcccagggaccagtttcatatactcaggatcctgataaatgcagtgggaaccctctttattaaagacaggctgtaaaacatgctattgatgaaagtattaacagcatatggtatcaaagtgggagaaaaatcagagtccagctggaatagaactttgcttcatttatttgatgctcacttgggtgatttcatgatcttggccccacaaatattacaattgcttcctctggaggcctatctggatgtatttttaagggttatagactgaagctgagaacgtgaccacagaagatttattctaaagactttctatgaaaaccactcatcatcttcactaaaagggaggcagtttggatgtgagtttagaaagattatttttaaaagtagcaatacatttggtttgaattacagagctgaaggaggccaaatataactaaattagaaacattggaattaaattggaacctagaaattcataagccagaggaatataaccaacatatctactcacatattaggtctccctctgattagatgcacaatagtgtacmagggtgggaggtgccatcccatttaaacatcatgacaaaacctgcagccccacctttttatgtggaacacaagcaactataacatcagagccgtgggttcttctagtataacacatgctaagaatctccagcagggagaaaaatatcccattcctcttgataaactgacattggtaaaatgatattttcagatggatgaaaactttggcattatatagcccatatttcttagacttgatttcatggatctcttgtggagaggggtagtcaggggttgaggtttttggcatcattggacatcatgaaatatgtaaataagatggcatgtttgtgtgtatatgagattttattgtgcagaagtatccgagaaagataaagaaccatctgttttctcccacggactcattttacagatgggagtactaaggaccaggctgacttccacagtgtcccacagcaagtaactgacaggactggctctaaatctttgaattatggctaatagatgggagcctgcttgaggcacagggtcaggggctataaattgaaaaccctagcatgaaattaacctgcagttcagttttgtttgatctgcatagttttttatccattaggaaaagtcacacaaatatccacattcttctgaaaaattgcaagatttagcaacacggatc

SEQ ID NO: 29308 - DNA, 2196 bp, Homo sapiens
tttttggtttaagccagctgggattagatatctgtcacctataatggagaagttcttgcatatgtaggaccaaacctatactgtgttagtttcatctgatgaatatgttttaaatgcaggttcttgatcctaccattactgattctgattttgttggcttggaatcgggcccaggaatatgtatttttagggtactcaagatgactcagatgtcactagcctacacatccactttaggaaactattgccttgaattaggagtctttttatttggtggtcccttcagggctttgtaaggtaccttgcaaaaaaaaaggatgattagcccattacatatttgttgacttgaacacacatttcaagaatatgggcaaagagacagcccagattagttttcctttgaaagtattatttttaatagaaaaataacagttatatacgtttatgggtcacaatgtgatgtttcgatacatgtgtatgttgtggaatgaagaaagtagcctaattagcatattctttagctcaaatatttattttttgtttgtcgagaacattcaaaattatttttttcttagctatttggaactatacagtaattattcttgacaggaggattgcatgaagttggccagacagccaaaaagaatcagattatctccagaaatttctatgtacctttgggtatgactgcatcttgcggtagctaccttaaattaatgtagcacaggttttaaatgccatttagttttacctttctagttttaaagttttggttatgactcattcatcctatgaccttggacctgtttcctgacataattgaattctgcgctttattgtttgtttcaaattaagacctctttgctacatataaagatttcctgttagggttgccctttatgataaattatattaccactgagtgattgtttaataaaaatttcaatctcattccaaacacatcaaggagttcccagggaccagtttcatatactcaggatcctgataaatgcagtgggaaccctctttattaaagacaggctgtaaaacatgctattgatgaaagtattaacagcatatggtatcaaagtgggagaaaaatcagagtccagctggaatagaactttgcttcatttatttgatgctcacttgggtgatttcatgatcttggccccacaaatattacaattgcttcctctggaggcctatctggatgtatttttaagggttatagactgaagctgagaacgtgaccacagaagatttattctaaagactttctatgaaaaccactcatcatcttcactaaaagggaggcagtttggatgtgagtttagaaagattatttttaaaagtagcaatacatttggtttgaattacagagctgaaggaggccaaatataactaaattagaaacattggaattaaattggaacctagaaattcataagccagaggaatataaccaacatatctactcacatattaggtctccctctgattagatgcacaatagtgtaccagggtgggaggtgccatcccatttaaacatcatgacaaaacctgcagccccacctttttatgtggaacacaagcaactataacatcagagccgtgggttcttctagtataacacatgctaagaatctccagcagggagaaaaatatcccattcctcttgataaactgacattggtaaaatgatattttcagatggatgaaaactttggcattatatagcccatatttcttagacttgatttcatggatctcttgtggagaggggtagtcaggggttgaggtttttggcatcattggacatcatgaaatatgtaaataagatggcatgtttgtgtgtatatgagattttattgtgcagaagtatccgagaaagataaagaaccatctgttttctcccacggactcattttacagatgggagtactaaggaccaggctgacttccacagtgtcccacagcaagtaactgacaggactggctctaaatctttgaattatggctaatagatgggagcctgcttgaggcasagggtcaggggctataaattgaaaaccctagcatgaaattaacctgcagttcagttttgtttgatctgcatagttttttatccattaggaaaagtcacacaaatatccacattcttctgaaaaattgcaagatttagcaacacggatc

SEQ ID NO: 29309 - DNA, 2196 bp, Homo sapiens
tttttggtttaagccagctgggattagatatctgtcacctataatggagaagttcttgcatatgtaggaccaaacctatactgtgttagtttcatctgatgaatatgttttaaatgcaggttcttgatcctaccattactgattctgattttgttggcttggaatcgggcccaggaatatgtatttttagggtactcaagatgactcagatgtcactagcctacacatccactttaggaaactattgccttgaattaggagtctttttatttggtggtcccttcagggctttgtaaggtaccttgcaaaaaaaaaggatgattagcccattacatatttgttgacttgaacacacatttcaagaatatgggcaaagagacagcccagattagttttcctttgaaagtattatttttaatagaaaaataacagttatatacgtttatgggtcacaatgtgatgtttcgatacatgtgtatgttgtggaatgaagaaagtagcctaattagcatattctttagctcaaatatttattttttgtttgtcgagaacattcaaaattatttttttcttagctatttggaactatacagtaattattcttgacaggaggattgcatgaagttggccagacagccaaaaagaatcagattatctccagaaatttctatgtacctttgggtatgactgcatcttgcggtagctaccttaaattaatgtagcacaggttttaaatgccatttagttttacctttctagttttaaagttttggttatgactcattcatcctatgaccttggacctgtttcctgacataattgaattctgcgctttattgtttgtttcaaattaagacctctttgctacatataaagatttcctgttagggttgccctttatgataaattatattaccactgagtgattgtttaataaaaatttcaatctcattccaaacacatcaaggagttcccagggaccagtttcatatactcaggatcctgataaatgcagtgggaaccctctttattaaagacaggctgtaaaacatgctattgatgaaagtattaacagcatatggtatcaaagtgggagaaaaatcagagtccagctggaatagaactttgcttcatttatttgatgctcacttgggtgatttcatgatcttggccccacaaatattacaattgcttcctctggaggcctatctggatgtatttttaagggttatagactgaagctgagaacgtgaccacagaagatttattctaaagactttctatgaaaaccactcatcatcttcactaaaagggaggcagtttggatgtgagtttagaaagattatttttaaaagtagcaatacatttggtttgaattacagagctgaaggaggccaaatataactaaattagaaacattggaattaaattggaacctagaaattcataagccagaggaatataaccaacatatctactcacatattaggtctccctctgattagatgcacaatagtgtaccagggtgggaggtgccatcccatttaaacatcatgacaaaacctgcagccccacctttttatgtggaacacaagcaactataacatcagagccgtgggttcttctagtataacacatgctaagaatctccagcagggagaaaaatatcccattcctcttgataaactgacattggtaaaatgatattttcagatggatgaaaactttggcattatatagcccatatttcttagacttgatttcatggatctcttgtggagaggggtagtcaggggttgaggtttttggcatcattggacatcatgaaatatgtaaataagatggcatgtttgtgtgtatatgagattttattgtgcagaagtatccgagaaagataaagaaccatctgttttctcccacggactcattttacagatgggagtactaaggaccaggctgacttccacagtgtcccacagcaagtaactgacaggactggctctaaatctttgaattatggctaatagatgggagcctgcttgaggcacagggtcaggggctayaaattgaaaaccctagcatgaaattaacctgcagttcagttttgtttgatctgcatagttttttatccattaggaaaagtcacacaaatatccacattcttctgaaaaattgcaagatttagcaacacggatc

SEQ ID NO: 29310 - DNA, 2196 bp, Homo sapiens
tttttggtttaagccagctgggattagatatctgtcacctataatggagaagttcttgcatatgtaggaccaaacctatactgtgttagtttcatctgatgaatatgttttaaatgcaggttcttgatcctaccattactgattctgattttgttggcttggaatcgggcccaggaatatgtatttttagggtactcaagatgactcagatgtcactagcctacacatccactttaggaaactattgccttgaattaggagtctttttatttggtggtcccttcagggctttgtaaggtaccttgcaaaaaaaaaggatgattagcccattacatatttgttgacttgaacacacatttcaagaatatgggcaaagagacagcccagattagttttcctttgaaagtattatttttaatagaaaaataacagttatatacgtttatgggtcacaatgtgatgtttcgatacatgtgtatgttgtggaatgaagaaagtagcctaattagcatattctttagctcaaatatttattttttgtttgtcgagaacattcaaaattatttttttcttagctatttggaactatacagtaattattcttgacaggaggattgcatgaagttggccagacagccaaaaagaatcagattatctccagaaatttctatgtacctttgggtatgactgcatcttgcggtagctaccttaaattaatgtagcacaggttttaaatgccatttagttttacctttctagttttaaagttttggttatgactcattcatcctatgaccttggacctgtttcctgacataattgaattctgcgctttattgtttgtttcaaattaagacctctttgctacatataaagatttcctgttagggttgccctttatgataaattatattaccactgagtgattgtttaataaaaatttcaatctcattccaaacacatcaaggagttcccagggaccagtttcatatactcaggatcctgataaatgcagtgggaaccctctttattaaagacaggctgtaaaacatgctattgatgaaagtattaacagcatatggtatcaaagtgggagaaaaatcagagtccagctggaatagaactttgcttcatttatttgatgctcacttgggtgatttcatgatcttggccccacaaatattacaattgcttcctctggaggcctatctggatgtatttttaagggttatagactgaagctgagaacgtgaccacagaagatttattctaaagactttctatgaaaaccactcatcatcttcactaaaagggaggcagtttggatgtgagtttagaaagattatttttaaaagtagcaatacatttggtttgaattacagagctgaaggaggccaaatataactaaattagaaacattggaattaaattggaacctagaaattcataagccagaggaatataaccaacatatctactcacatattaggtctccctctgattagatgcacaatagtgtaccagggtgggaggtgccatcccatttaaacatcatgacaaaacctgcagccccacctttttatgtggaacacaagcaactataacatcagagccgtgggttcttctagtataacacatgctaagaatctccagcagggagaaaaatatcccattcctcttgataaactgacattggtaaaatgatattttcagatggatgaaaactttggcattatatagcccatatttcttagacttgatttcatggatctcttgtggagaggggtagtcaggggttgaggtttttggcatcattggacatcatgaaatatgtaaataagatggcatgtttgtgtgtatatgagattttattgtgcagaagtatccgagaaagataaagaaccatctgttttctcccacggactcattttacagatgggagtactaaggaccaggctgacttccacagtgtcccacagcaagtaactgacaggactggctctaaatctttgaattatggctaatagatgggagcctgcttgaggcacagggtcaggggctataaattgaaaaccctarcatgaaattaacctgcagttcagttttgtttgatctgcatagttttttatccattaggaaaagtcacacaaatatccacattcttctgaaaaattgcaagatttagcaacacggatc

SEQ ID NO: 29311 - DNA, 375 bp, Homo sapiens
tgcctgttgtggactaagtgggcccactcaggccagcttgattgtatattggaaagctgatctttccctcttggagggagggagaggacactggttggtgtgtttaaaaactgttctttctgaggcgggcagatcatgaggtcaggagatcgagaccatcctggctaacacggtgaaacgccgtctccactaaaaatacaaaaaaattagccrggcgtggtggcgggcgcctgtagtcccagctactcgggaggctgaggcaggagaatggcgtgaacccgggaggcggagcttgcagtgagccaagatcatgccactgcactccagcctgggcgacagagggagactccgtctcaaaaaaacaaaaacaaaaaa

SEQ ID NO: 29312 - DNA, 608 bp, Homo sapiens
ggtggccattagctgtggtggccagagctgttctccactctacctcccagggcctctatcagcagctgacggttcctgcggcttgtaatgttcctgctgatctgcctcactcactacccgtcaccgctgatgaactttcccaaaagtcagcccagaactccttaagggaaggggcagcctcgttgtggtagttccagcaccctgtaccaagcaggttcttagtaaatgctgactgttgagtggcccctttctgaaataaattccttgttctcaaatatatcctggatctggtccccttgggtccaatcagcgcttgaaccagacagcaatgactgaccacctctactcaagagtttctggtttatttggagcctctaccccacccaaccctaaggctgggaacccttttgccttccttttttcttaaaggaagttaatcccagcacatgtgaaagatggaccatccatcccaatgcctcawgtcctgggcttcatttctccatttctcccagggcaccctgggagtctacatgcaaacagagatactagaaagttaacttccggaaacccccttgataggccaattcgtccccttttctctctctcca

SEQ ID NO: 29313 - DNA, 904 bp, Homo sapiens
aaccattaaaacgtattctaaaattagtgaataaatatttttaaatgtaagaaaaaaaaaataataagagtaccttgcatttatcaatttgcaatttataaaacattttcacctacctgatctcctatataataataattattatcattataggaaagttgccattcactgagtgctatcttttcatgagacactaaatatatactatttactcatcctcacaactgtgtaaggttgttattgttatttctgcctcacaaacaaaaaaactgaagctcaatgaggctgatatatttgcttccaattgtgcaaatagaaggttagagtgagtacatgagaaaaagctgtgtgtagaaggcattttctttttggtattttattcttaccaacatatgacaacattcaatgtgtttttaatctcaaggttcctgattgtcatagaaaaaactcttgggctggaggyacaaaaagtaggatcaaatatcaacactgccaccctgacatgggacttctggcaagtgacaaaatatttcaatttcaatctcctcatttgtgaaatgaaggacgttatattcagtccacacgttgtcatgggaattatgtcaaatactagaaggattaaatgctagtaaaggaagccaagaaagtcatggcaggctgaggttcttgatctttcaataagaagaagaaaaaaaaactagacctgccatttatcactgatcaaaatggcttggttcacataataagtttagcttcaagttacattaaaacaaaataaataaaatgcacttaatcacttttttaaaataaaaaatatatacttttaaaagtaaaaatttaaatctgggccaggcacggtggctcatgcctataatgcccctactttgagaggccaagacaagag

SEQ ID NO: 29314 - DNA, 904 bp, Homo sapiens
aaccattaaaacgtattctaaaattagtgaataaatatttttaaatgtaagaaaaaaaaaataataagagtaccttgcatttatcaatttgcaatttataaaacattttcacctacctgatctcctatataataataattattatcattataggaaagttgccattcactgagtgctatcttttcatgagacactaaatatatactatttactcatcctcacaactgtgtaaggttgttattgttatttctgcctcacaaacaaaaaaactgaagctcaatgaggctgatatatttgcttccaattgtgcaaatagaaggttagagtgagtacatgagaaaaagctgtgtgtagaaggcattttctttttggtattttattcttaccaacatatgacaacattcaatgtgtttttaatctcaaggttcctgattgtcatagaaaaaactcttgggctggaggtacaaaaagtaggatcaaatatcaacactgccaccctgacatgggacttctggcaagtgacaaaatatttcaatttcaatctcctcatttgtgaaatgaaggacgttatattcagtccacamgttgtcatgggaattatgtcaaatactagaaggattaaatgctagtaaaggaagccaagaaagtcatggcaggctgaggttcttgatctttcaataagaagaagaaaaaaaaactagacctgccatttatcactgatcaaaatggcttggttcacataataagtttagcttcaagttacattaaaacaaaataaataaaatgcacttaatcacttttttaaaataaaaaatatatacttttaaaagtaaaaatttaaatctgggccaggcacggtggctcatgcctataatgcccctactttgagaggccaagacaagag

SEQ ID NO: 29315 - DNA, 495 bp, Homo sapiens
ttaaatggcttaaaaccgttgtgtacattatgtttgtttcaacagtgactgaaacagagaaagaactcaatccatgatagccagtaggcaatctggctccagagtccatgctcataacgcctataccctaacaaataggtcagcaattgragataaacattcttttaggcaataagatgcccttgattagtttttcaaggtatgaatttttgaattagggtaaagagataatggatgaatgaggcactttaaaagaagggtggtgattgttaaatcttcgcatgtgtcaggaaaagataaaaggcaaaatttgatttttctcaaagttttgaactcgtgtcaccagaagaatgactttaccatttgtataaatgagatagaaaggtttctcaataatgcaggacctaacttacgaggttattggagccatagcaagataattaatgcaaaggctttagcacagtgacaggtatagtgtaagcattcaatagttat

SEQ ID NO: 29316 - DNA, 629 bp, Homo sapiens
acatgtgcttagtaagtattttacctaactcagttatgtagatttggccaatggagcttgtttcttttagtatttatccagtttcaaatttaatacaacctaccattatgatttcagcagttgatggtaattttgtcaggcattacaattcttatgtgagaattcttatgaaaataaactagatatagatttagataagttcaggttatgcttattgatatataggacttgacaatctaatcaatattttttctctgtaaagatttcaacttgttttatagatccatattgatacattgtagtttttaaataatgcttcaaaaagctgaagaaagtgaaaaaaattgttttgatcatatgtcttttaatatgagatttaaaaattagagttctttaacctggtaacaagtttgyaatttaggtgactaagtttgagccatcctttaaagaactgggtaagtgttaaaattttcaacccctaagtctagttctagttcaagaaagtaaattgggcacacactgtggccaattatattccctgagaatatattgtcgtataacctagaagttttttttgaaaaatgaaacaatggagaaacactatacccaagactgtcctgtcttcaaat

SEQ ID NO: 29317 - DNA, 1098 bp, Homo sapiens
cttttctcagcatctgtttctggagggacacatcccaaaataggaaggactattttcagtagtcactataaagtaggaggtgtaactgtgtgtaactttgtggggttacagggtggaggagttgagagaagaaaacggaggcttttagggtagaaatcctctagaacagtgattctctgtgttggcgtgctagggagtcaccaagtgttttggaagtgaaatggagaggtaggaggagcactggggtggctcaagttagatggctctgggaaggaaatgagccacagcttcaaagttccacctctttcttcaaagcacagttacctggaaacacaaacgaaaaygaatgagaggaagatgaagaataggagcaataagaagaggaggaggaaatcccatctaattttatctaccacattgccaccttattactactttacatttatttccatgggttctttggaagtgaagtccagaatttaggggcacacagggagtctatgattctagtaagcaaggcaggaagcagtgaaggcaaatagaattagtgaatgaaatgggatagatcatgtgacgcaggagaggttccagggaagctagagatgggcttcctgggtggggtgaaggagatgacaggctgtggctgcaaatgggataatagatctcagaaacagagattaccctgagtgttaacgacactgactaaggcaggtcaaaggtggaggtcttcaacccaggaaatacctctggggtaaaggaatctaaaaggttaatgtggattccagagtcaatatagattatggcaaagggcagggcagaggagcaggactgagtccgctgctgaagtaagcttgggaagtgaggatggaatctggtgagtcacagcattgagaactgcacagtcttcaactgggcagagggtgagagtgggtgagggtagttcaagggtgagaaagcacactggagggaggaaagagctggccgctccacctcccccgctgacttgagcagagaagataaggctatcatgctgaaaacagttgggagaacagtgatttcacaggagagcatctttcaggccagacggcagaagaaaga

SEQ ID NO: 29318 - DNA, 1098 bp, Homo sapiens
cttttctcagcatctgtttctggagggacacatcccaaaataggaaggactattttcagtagtcactataaagtaggaggtgtaactgtgtgtaactttgtggggttacagggtggaggagttgagagaagaaaacggaggcttttagggtagaaatcctctagaacagtgattctctgtgttggcgtgctagggagtcaccaagtgttttggaagtgaaatggagaggtaggaggagcactggggtggctcaagttagatggctctgggaaggaaatgagccacagcttcaaagttccacctctttcttcaaagcacagttacctggaaacacaaacgaaaacgaatgagaggaagatgaagaataggagcaataagaagaggaggaggaaatcccatctaattttatctaccacattgccaccttattactactttacatttatttccatgggttctttggaagtgaagtccagaatttaggggcacacagggagtctatgattctagtaagcaaggcaggaagcagtgaaggcaaatagaattagtgaatgaaatgggatagatcatgtgacgcaggagrggttccagggaagctagagatgggcttcctgggtggggtgaaggagatgacaggctgtggctgcaaatgggataatagatctcagaaacagagattaccctgagtgttaacgacactgactaaggcaggtcaaaggtggaggtcttcaacccaggaaatacctctggggtaaaggaatctaaaaggttaatgtggattccagagtcaatatagattatggcaaagggcagggcagaggagcaggactgagtccgctgctgaagtaagcttgggaagtgaggatggaatctggtgagtcacagcattgagaactgcacagtcttcaactgggcagagggtgagagtgggtgagggtagttcaagggtgagaaagcacactggagggaggaaagagctggccgctccacctcccccgctgacttgagcagagaagataaggctatcatgctgaaaacagttgggagaacagtgatttcacaggagagcatctttcaggccagacggcagaagaaaga

SEQ ID NO: 29319 - DNA, 534 bp, Homo sapiens
tttctgtagtctctgaatctgtgttcatatatttttcttcccctcctgttaccacgtatgaactatgtatgttgctaargacatcctctctacttattaatgtgctacatttcaccccctttcacctattcagaaaatatattataaaattattttcttttttgcctgcatttctattgtactttctcccccatagtgtgatagattgcaaactatggctctgttttgtcagacaagtatgatgcagctggtgaggtcaggattattgaggatgttttcagcaaaatgatgctaatctagcctggctaaggagaagagaaaagaactacagaaaaacataataggttcaatacatcagatatctataacattgttagagttgacacattaaagaaaaaagtgattatgtgtaagaattcaaaagtttacatattttagctattgtgaatggtgggagtacagatatctctttgataaacagattttatttcttttggatatatttttcaggagcagaattgcaggatcatatga

SEQ ID NO: 29320 - DNA, 1325 bp, Homo sapiens
gtggatgcaatccacaaatctagcacccaaatttcttttttctgttcttttttttttttwttttgagatggagtcttgctctgtcacccaggctgaagtgtagtggcgcaatctcagctcactgcaacctctgcctcccagattcaagcgatccttctgcctcagcctcccgagtagctggaattacaggcgtgtgccaccacggctggcctaattttggtatttttagtagagatggggtttcaccatgttggccaggctgatatcgaactcctggcctcaagtgatctaccccccttggcctcccaaagtgctgggattacaggtgtgaaccaccatgcccggcctcaaattgcttttacagaggcaagtggccaccgagtctgtgattgggatcctcctgtggagacctgtggagactcgtggctcactacctttgaaggcagtgttagggtaatctctccacatttccctgctgaaagctctgagtgttagtaaattccttctcatattagctaaaatgtattttcctgtgccttttattcactgatggggaatacaagcattctttttgagggtggccaatgctagtaattccctccatacagtcagtgatggatagagttaacccatggttgctgcatgtagtactgtcacttgctgtaccaccaggactcaagttgatgctcaacgcaacattcttttgcagggcccttgtcctcagtttcccttcttttggggtgggctgagagagacagcttattcagcatgaagctgtagtatctacagtttagcaaatgtctgcggagcctttaaagcagtttttatcataataaaaatattttaacttataaccccagaaagagataggcatgggagtctttatacagcacagaaatccagatgagcataatttgaaagtcatttgaattgtaatgagtatttttaatgtaaacaggcaggaggaaaaacttgctgggttctcttgtagcacagacacccagatatatgtcttttgatagtgatattaaagtgtcaagggtgcataggaggctgcagatgtcagcggcatgaatgggcaaggcaatttctgtggttgcaggctggaggttccagcaggaatagaaaggcaatctctgtgctagatggcccagggtcactgcaagtctagctcctaaatgaaaatcagggacaagatgtggcctgtaaccacagtcactgctcttcgtaaggctggtggaaaggtgaactggaaaggtttttagggttagggagatacaggaactcccaaacatcaggcacctgatagcactctccacctaaca

SEQ ID NO: 29321 - DNA, 1325 bp, Homo sapiens
gtggatgcaatccacaaatctagcacccaaatttcttttttctgttctttttttttttttwtttgagatggagtcttgctctgtcacccaggctgaagtgtagtggcgcaatctcagctcactgcaacctctgcctcccagattcaagcgatccttctgcctcagcctcccgagtagctggaattacaggcgtgtgccaccacggctggcctaattttggtatttttagtagagatggggtttcaccatgttggccaggctgatatcgaactcctggcctcaagtgatctaccccccttggcctcccaaagtgctgggattacaggtgtgaaccaccatgcccggcctcaaattgcttttacagaggcaagtggccaccgagtctgtgattgggatcctcctgtggagacctgtggagactcgtggctcactacctttgaaggcagtgttagggtaatctctccacatttccctgctgaaagctctgagtgttagtaaattccttctcatattagctaaaatgtattttcctgtgccttttattcactgatggggaatacaagcattctttttgagggtggccaatgctagtaattccctccatacagtcagtgatggatagagttaacccatggttgctgcatgtagtactgtcacttgctgtaccaccaggactcaagttgatgctcaacgcaacattcttttgcagggcccttgtcctcagtttcccttcttttggggtgggctgagagagacagcttattcagcatgaagctgtagtatctacagtttagcaaatgtctgcggagcctttaaagcagtttttatcataataaaaatattttaacttataaccccagaaagagataggcatgggagtctttatacagcacagaaatccagatgagcataatttgaaagtcatttgaattgtaatgagtatttttaatgtaaacaggcaggaggaaaaacttgctgggttctcttgtagcacagacacccagatatatgtcttttgatagtgatattaaagtgtcaagggtgcataggaggctgcagatgtcagcggcatgaatgggcaaggcaatttctgtggttgcaggctggaggttccagcaggaatagaaaggcaatctctgtgctagatggcccagggtcactgcaagtctagctcctaaatgaaaatcagggacaagatgtggcctgtaaccacagtcactgctcttcgtaaggctggtggaaaggtgaactggaaaggtttttagggttagggagatacaggaactcccaaacatcaggcacctgatagcactctccacctaaca

SEQ ID NO: 29322 - DNA, 2140 bp, Homo sapiens
aatcttcagtttctctgtataccatcaagagattgagtgttttagtcagaagagaaaataggatttcacctgttgtcagctttctctgtcttttcmattccagttcatcctatcttctacatctactttctgctcatccttaaaagcagattggactgcctatttttttaaagctgtgctttccattatggtagcctctaatcacaaatttctgtttacatttaaattagttaacattaaattatgttaaaaatttgatacctcattcacacttgccacatttcaagtgctcaatagcctcatgtgactagtggctactgtactggatccaaaggtaaaaacctttccctcttctcacaaatttttgttggatagtgctgctgaaaccacttccttttctccagcttttaatggaaagattttatcaggagtctgactcaagcttctctcaccacacatctatgcttttaaatgcacaaacatgactgctacaatttttcagaataatctggaggcaagcacagagcttgtaggaaatgtctggggggctattggtgaaggagtagactgatgaaagtgtctgagctatgaccgtgttccacatgtgaatcagctttctctaggacctgtgttatttgagcaattacatgtctaaggctagattgtttgccttctgataaagtcgaggggtcaggtcaaaaaataccatattgctccattcttttcctaggatgtgagggagtgagtgtgaatcatttatgtatttcctataaatattcatggaagattatatatatgtatagacatatgtatatatttactctgtgtatggttaaaattcatctacattatatttgaaagatctgatgtttaccatgctagaacaactgttgtacaactagaaatcactttgaaggaagaacagtaaggaggatgcccttgctaaggaggagcatcctggagtgggcagcttgtgagcaatatgccttttccccagggatattgttttcatcctaatactgctggtatagagcccattgctgtgacattacgggcctggctgtttactctatcagacggtctctcccattgtcaagctgctctctcccacccattcccactatgggaatgagccaaaccacttctttttatccactcatttaaacacaactgcaatgagaaatttttttgttaaaaatggttggttttcaacaagcctttaatttattaatttattgaatgcttactgtatgttgggcccattatggccattagtttatttgatcattggtaataccctgtgagtgcaataccagtaacatacccatttgacagatgaggaaagatatattgaagctgagggaagttaagcatctttcccaaggtcacatagcagataaatttagagactctgattcaacatgaaacacatcatttcaaacagttggaaaagtgggtgaattaggataaaaggaagaggatttcatgttgtatattctagtgatttatgtttgcaacagagctgccactgtctagggatccttccctaatgtggaaaggccattcctgccccagacttgacacttacactatagtgtgcattcttgctatattatttccccatggacatgttcattttccaactacagtcttccttctcagccctgaaactgcacagttgcaggccagcacactaggtttttagattggtgaattccctgtacacttcccttaatttcctcagctttcattttcacacccgtagaatgaggcactgacagatacccaggcagagcaaccaagcacagcaccagctcttgtttcagataagattattcacaaagacaaaagcccgcaacatttaacaaatgcaggtacaagcagccagttcagcctaccaggggcaaggaaaatagattgcagtgtcaacttaatcaatggttcatcactgtactttttcagtgcttgaatcttattaggattgatgctgcattgcccagctgaaaatcaatcttgaatttttcaaatggctccaaactgcagaaatacaattgtaaataatttggcaacttttccaaatgccttggaaaaatccatgcagagctaaatgaggctggtacatgaatgtgcttctgactga

SEQ ID NO: 29323 - DNA, 557 bp, Homo sapiens
tgtatctggcacacagtaagtgctcaataaatgttgctggactgaatggataagtacctactgccgtagtttatagcaagcaacaggagttgagtgcacrtatttaaagtcagaaggcaagagctggaatcttggctttgccatttactctcagtgtaacttgcactaaattaaaccttaagtctcaatttcctcacctgtaatatgggcataaagatagcagctcacttatcattaggattaaatgagatagcacatgtagagaacttagcataataactggtacgtattaagtcatcaataaacattacatattatgttttttattgttgttctttcctgtcctcatgtgtcacctgtattataacatccttccaaccgttctccaagactccaggctcctctcttcaggagaattcccaccctaacatcgtaatcagagtgatctgtccaaatgcaaaatcaagcataatactcccttgctgaaaacccttatggggtttaaactctgccagtagagtcctaattccttagtgtgggcccagcttccccacccc

SEQ ID NO: 29324 - DNA, 557 bp, Homo sapiens
tgtatctggcacacagtaagtgctcaataaatgttgctggactgaatggataagtacctactgccgtagtttatagcaagcaacaggagttgagtgcacatatttaaagtcagaaggcaagagctggaatcttggctttgccatttactctcagtgtaacttgcactaaattaaaccttaagtctcaatttcctcacctgtaatatgggcataaagatagcagctcacttatcattaggattaaatgagatagcacatgtagagaacttagcataataactggtacgtattaagtcatcaataaacattacatattatgtttyttattgttgttctttcctgtcctcatgtgtcacctgtattataacatccttccaaccgttctccaagactccaggctcctctcttcaggagaattcccaccctaacatcgtaatcagagtgatctgtccaaatgcaaaatcaagcataatactcccttgctgaaaacccttatggggtttaaactctgccagtagagtcctaattccttagtgtgggcccagcttccccacccc

SEQ ID NO: 29325 - DNA, 557 bp, Homo sapiens
tgtatctggcacacagtaagtgctcaataaatgttgctggactgaatggataagtacctactgccgtagtttatagcaagcaacaggagttgagtgcacatatttaaagtcagaaggcaagagctggaatcttggctttgccatttactctcagtgtaacttgcactaaattaaaccttaagtctcaatttcctcacctgtaatatgggcataaagatagcagctcacttatcattaggattaaatgagatagcacatgtagagaacttagcataataactggtacgtattaagtcatcaataaacattacatattatgttttttattgttgttctttcctgtcctcatgtgtcacctgtattataacatccttccaaccrttctccaagactccaggctcctctcttcaggagaattcccaccctaacatcgtaatcagagtgatctgtccaaatgcaaaatcaagcataatactcccttgctgaaaacccttatggggtttaaactctgccagtagagtcctaattccttagtgtgggcccagcttccccacccc

SEQ ID NO: 29326 - DNA, 547 bp, Homo sapiens
ctattttcaatatcttttttattttttaatgtaaatatattcattacattatgttgaaatatatgatcttgaaatttggaaataagaaacttgaaacatttccattcaactaaatatactatgtatctgataaatccaataacygctcttaattttgaagactgtgacttaaggctctttgccttcttctgtgttttgattttttttctcctttttaaaaaattttaaatttataaaaattattttattttatgttttctgaggtggggtcttgctattttgcccaggctggtcttgaatgcctggcctcaagtgaccctcccaccttggtctcccagagtgctgggattataggtgtgagccaccacagcaggactttttctccttttttgtgaatgtatcctttgaatattttctgtgggcacacttgaagcctgatttgtgattgtgtattttaacagagaatttaattttgcttctaccaaaaaggtatggctctacaaactcagaattattttcaactttactgtaaacctgagcttttttt

SEQ ID NO: 29327 - DNA, 525 bp, Homo sapiens
aataaaagagactattcaataggcatcatgaaaaaagaaagaagaaataataccagttacctttccccaattatctgtctgcatccctgcctcccacggcagagtgctctcaagatctctttattttttctcaggttgaaagtggataggcacagatgtgatgttaaatatgtttatacgcttttkgaatctcattgatttagttatttagttcaagtagaaagtcaaggttgagttgggtaccaaagtgtcacctgaacaacaatctcagcaaagaaaaggacaaaagaatagacaatgaacaaaggctttgcattttatttgatacatattttgaagtcaaagctgtatatcagattcttcaggatatatcaagatgccacaacatcaaaagttattagaaactgtttgctatataattttatcttataaagtttgattaagaaagctgtttttaacaatttaggttgtcttttggagagagatacatgtggaactataagggaagaggtcatccataatcat

SEQ ID NO: 29328 - DNA, 550 bp, Homo sapiens
taattcccaatttcacataataattccacaggggtgatttctggcatatctcttatctctacagaagaaagcaagcagggtccctctatcagggcccacagatgtgtgctttgaggagctggaaaaaatgtaagctggagtccctcggctttcccagcggcctttaagtcctttcaggaggagcctgccgctccctggcagggatttgcggtctttgcctttgtgaacaactttactgctcacttcaggatggcattgcaacatcttctttcttcgtgctcagaatccctcaagattgaattttgttttaagatcccatcagtgttgagaaatgttggtaaatacaacaacattcatagcaaactttgatggaatatctgctgtttatcacaaactcatctgggaactttacacatattgtttaagttaattttcaggcarcccctatgagtcaattactattattattcccaatctacaaataagtaaaataaagttcagagaatataaggaacatgaaaaggtcatacagctaaaaggtacaagagtc

SEQ ID NO: 29329 - DNA, 1115 bp, Homo sapiens
ctccctggagccttcagagggagcaggaccctgctgcctcctagatttcagacttctgaccctaaggactgcgagagaatatgtttctgttgttttaagccacccagttggggtgatttgtcagagcagccccaggaactaatagcagtcatgagtgtcagcctcccatggcacagagtagggccctgcagtgggggctggaagggtcttaaccaacagtaaccttacagccctctcccaagggaaggaagctactggattgcttccatacattggttgcaagcaacagaaatgaactttggccagtgccaatgaaaggaactaaaagggagcttgcagaattggggaaaaggatgggaaacaagcactggaaataggcagagactcggaaactcaggggcttggatgcaggggctatagggagcagtgctagagyaggaacttgtaggtcaggacgcaaggaccccagaacagccaacatgatcttgtaaaagaacagccaagttggaggactcatagttctcaattccaaagcttataaagctatagcaatcaaaacagtgaggtgctagcatgaatacagacatatagctgctcactggaatgaatggagagcccagattatagactcttatttatggtcagttaactttccacaaggaagcaatgacaagtccatgggggaaacgatcatcctttcagtaaatggggagagacaattagaattccacacgcaaaagaatgaagttggatgcccatcttataccgtattatacaaacattaacaccaaatggaacacagcccccaaattaagagataaaactataaatctcatagaggaaaacataggcataaatcttcatgactttggattaaacaactttttcttagctatgataccaaaagcacaagggagaaaggaaaaaaaatagatatgagtttcatcaaaatttaaaacaggttttgtgcccccaaaatatactgtaaagaaagtggaaagtcaatctacagaagaatatatttgtaaatcatacatgtgataaagggcttgtatccataacatatgaagtactcttacaactcataaaaagcatgccttttgaacatggaaaaa

SEQ ID NO: 29330 - DNA, 1115 bp, Homo sapiens
ctccctggagccttcagagggagcaggaccctgctgcctcctagatttcagacttctgaccctaaggactgcgagagaatatgtttctgttgttttaagccacccagttggggtgatttgtcagagcagccccaggaactaatagcagtcatgagtgtcagcctcccatggcacagagtagggccctgcagtgggggctggaagggtcttaaccaacagtaaccttacagccctctcccaagggaaggaagctactggattgcttccatacattggttgcaagcaacagaaatgaactttggccagtgccaatgaaaggaactaaaagggagcttgcagaattggggaaaaggatgggaaacaagcactggaaataggcagagactcggaaactcaggggcttggatgcaggggctatagggagcagtgctagagcaggaacttgtaggtcaggacgcaaggaccccagaacagccaacatgatcttgtaaaagaacagccaagttggaggactcatagttctcaattccaaagcttataaagctatagcaatcaaaacagtgaggtgctagcatgaatacagacatatagctgctcactggaatgaatggagagcccagattatagactcttatttatggtcagttaactttccacaaggaagcaatgacaagtccatgggggaaacgatcatcctttcagtaaatggggagagacaattagaattccacacgcaaaagaatgaagttggatgcccrtcttataccgtattatacaaacattaacaccaaatggaacacagcccccaaattaagagataaaactataaatctcatagaggaaaacataggcataaatcttcatgactttggattaaacaactttttcttagctatgataccaaaagcacaagggagaaaggaaaaaaaatagatatgagtttcatcaaaatttaaaacaggttttgtgcccccaaaatatactgtaaagaaagtggaaagtcaatctacagaagaatatatttgtaaatcatacatgtgataaagggcttgtatccataacatatgaagtactcttacaactcataaaaagcatgccttttgaacatggaaaaa

SEQ ID NO: 29331 - DNA, 734 bp, Homo sapiens
caatccaaagcaagaaaagatctttctaaggtggaaaacatattttttctttaaaatttaatatgtcttagtattaaagtatattttaatgttaggrtatacaccagaataaacaaacagcaatcttttctacttgtactggtgattagggcaaacagcagtttccaagccattgaaataatttaagagtttaaaaaaagatagaaaactgaagcatgagttcaatctccatttatgaaacacaaacacacattttagtctacttagatattaagtcctttcatgtaaaatttgagatagaaaagtaaatggtatatttcttgacagagctgaatttcatggttttcacctaaaaaaaaaataacatgctcggcttgtttaatgttcaagccatttttcacaaatacttaccatctagcctaagctgcctatcatcaaatcttatatgcctggtatcatctttgatgtagttgatatcagtattgcctaagttgttgaactggaatgtaaacaatcgttttttgtgtcccgtgagttgacctttgcaagtatcctcagtacataatccattttcagaatcattatctcctccaactgaatcttcagactgactgttttcattctttgagggaagttcttgatcctggctggattcatcatctggctcatctgtttccatttcacctaattttagatattagagagctttaaataaacccaatgctatattttta

SEQ ID NO: 29332 - DNA, 969 bp, Homo sapiens
aaacctactccactcagagtctggctaccagccacagacctgggcccatagtcccgtttctagatctctgccctgcagctctgaggaagcctcatgctggagggtaagggctgctgagagcatccctgaggggccacctctgaggaccctcgagggcagtggcggaagrggtcctgtgagacgccagcccacctgacccaccagcatccatgaggtgcttgtgcctgtgaggacagtgctggcgggcacagaaccacaggagccccaggcactctggaaggccaccttgccagcctggggccctgggagtctgggggcgggtgacgtgctgctcaggaagcagaagcacaggcaggtaaactgagcctgaaccagctcctgggtctgcatccccaccccggccctccctgaagccctgtggggactcagctcagaccgcccctgccaccccacgaagggcagacctgggtggggaggagggggaggagcgtgctgctggccggacctagggtggatggggtgacagctggcagagggagagtgggcgttcaattctgacccagaacacggcccgcggagaaccagttcaggaccgcagacaggggcgaggataattctgaggctattttcctcgtccttcctccctccctctctggggcacggaggctgaagcttccaccattaagcatgcccctggagcccctaaatcctgcctgcgtgttctctgccagcttccaccgccggctaatgtcactgcaaaggcatctggctggccccagggagcactcaccaattgcactcaaatgttaagtaagccccaggcccgcctccttccaaatgtcactttctggaaagatgcaatgagcctcgggcccctcccaggacacaggcagtcagacctcctgactgcccttcccagacccaaaccccacccaccatgcagaggcaaagcagggctccagggcatgg

SEQ ID NO: 29333 - DNA, 726 bp, Homo sapiens
tcaccatccagaagaatcagacacctcgagggctgaacacttagcactgcaaagaaacaggaacacagagaccaaagggagagtttccactcctgggcacatggaagcagggcctgtaagggtacagcaaagcaggccccctctcctgctccacctgccttccgcacctgccattacaggctagccagcctctgcatgggcacacacgcacatcacttctattaacaaaagagaataatgatgcatccttggagaagacattaatgaggtgatgacacatttttatttaaatgccttatgtagattattaatccatttctcctggaaagatagacagtgccacattataaatgtgagacaagccagtgtatatctgaaggcacacatggacgcacgcacatgcacacacacatgcccacacagacatcgtttccccaggtcctgatgaggctcttcagtgccaactgcagccctgagacagaagctaaagccgtcatttcttacagcctgaatgttcatctcaaaatctctgttaagtctgggccttattaaagaaaataattattcagtgacactggttaaagcatggtaaggaagactttattcgggaccatcatgataggtaccgggacctatcaatggggtcctgcagtrggggagagagattggactcaactccaaatacagcactggagaatgggaatttatcaccaaggagcagagtgg

SEQ ID NO: 29334 - DNA, 1084 bp, Homo sapiens
ctgttgcaactactcaaccctgccactgcagctgtagacaacatgcaaatgaatgggtatgcctgtgttccagtggaactttatttggaaaacagtcagtgggttagatttggcccacaggccatagtttgttacccctggcctgaaggcctttgaatcacaagcctggtgtaagggtgggagacggagtggaaaggtagtgatggagcacgaggtggtaattgctgcggcaaactgccaagtaggaacttacctctctgtggtggatgttctcaactcccagggtgcccttcctgtaaaagcaacagatcaaaccatgcctctgggtgcaagtcttggagaacctgaactatgcagttcagagtcctgagactccggctgctgccacagcttttctggctatcagtggagaaagtgctggtatccgttagcccactgggggtgggctttcaggttatttcakcagcatttatgtgtgatgggggactattatgcagataatggtctgcattcaacagcactagaatcccaagataaaaccagaacttctcaaactgggttccaaagaacactagtgttccctgggatgccagtgggtgtgccactcaaaaagcgttgtggaaacagatggatttgaaatgtcaggataaatttactatatttctttactaaagaatcttcattttttaaaaaatctttaaagacactcatggttttcaattctcagtttaaataccttgtactcagagaggatttctctgacagcccaattagctaccgggtcactgtatgccccacctctctcatttacttgtctgcatattctctaatatttgtttttgtgctccttttcttcttccatcatggttggaatcttatctgtcttgcttactctttttccatactacctaaagcactgtctggtacatggtaggtgctcaataaatgtttgttgattgactaataaaatgaatgtgcatagtatattaataagtttgagacataatatatgtcattttgaaaccatcttggaaataaaaatttttttggcaaaacccactagtatttcataggacattaggga

SEQ ID NO: 29335 - DNA, 1084 bp, Homo sapiens
ctgttgcaactactcaaccctgccactgcagctgtagacaacatgcaaatgaatgggtatgcctgtgttccagtggaactttatttggaaaacagtcagtgggttagatttggcccacaggccatagtttgttacccctggcctgaaggcctttgaatcacaagcctggtgtaagggtgggagacggagtggaaaggtagtgatggagcacgaggtggtaattgctgcggcaaactgccaagtaggaacttacctctctgtggtggatgttctcaactcccagggtgcccttcctgtaaaagcaacagatcaaaccatgcctctgggtgcaagtcttggagaacctgaactatgcagttcagagtcctgagactccggctgctgccacagcttttctggctatcagtggagaaagtgctggtatccgttagcccactgggggtgggctttcaggttatttcatcagcatttatgtgtgatgggggactattatgcagataatggtctgcattcaacagcactagaatcccaagataaaaccagaacttctcaaactgggttccaaagaacactagtgttccctgggatgccagtgggtgtgscactcaaaaagcgttgtggaaacagatggatttgaaatgtcaggataaatttactatatttctttactaaagaatcttcattttttaaaaaatctttaaagacactcatggttttcaattctcagtttaaataccttgtactcagagaggatttctctgacagcccaattagctaccgggtcactgtatgccccacctctctcatttacttgtctgcatattctctaatatttgtttttgtgctccttttcttcttccatcatggttggaatcttatctgtcttgcttactctttttccatactacctaaagcactgtctggtacatggtaggtgctcaataaatgtttgttgattgactaataaaatgaatgtgcatagtatattaataagtttgagacataatatatgtcattttgaaaccatcttggaaataaaaatttttttggcaaaacccactagtatttcataggacattaggga

SEQ ID NO: 29336 - DNA, 1084 bp, Homo sapiens
ctgttgcaactactcaaccctgccactgcagctgtagacaacatgcaaatgaatgggtatgcctgtgttccagtggaactttatttggaaaacagtcagtgggttagatttggcccacaggccatagtttgttacccctggcctgaaggcctttgaatcacaagcctggtgtaagggtgggagacggagtggaaaggtagtgatggagcacgaggtggtaattgctgcggcaaactgccaagtaggaacttacctctctgtggtggatgttctcaactcccagggtgcccttcctgtaaaagcaacagatcaaaccatgcctctgggtgcaagtcttggagaacctgaactatgcagttcagagtcctgagactccggctgctgccacagcttttctggctatcagtggagaaagtgctggtatccgttagcccactgggggtgggctttcaggttatttcatcagcatttatgtgtgatgggggactattatgcagataatggtctgcattcaacagcactagaatcccaagataaaaccagaacttctcaaactgggttccaaagaacactagtgttccctgggatgccagtgggtgtgccactcaaaaagcgttgtggaaacagatggatttgaaatgtcaggataaatttactatatttctttactaaagaatcttcattttttaaaaaatctttaaagacactcatggttttcaattctcagtttaaataccttgtactcagagaggatttctctgacagcccaattagctaccgggtcactgtatgccccacctctctcatttacytgtctgcatattctctaatatttgtttttgtgctccttttcttcttccatcatggttggaatcttatctgtcttgcttactctttttccatactacctaaagcactgtctggtacatggtaggtgctcaataaatgtttgttgattgactaataaaatgaatgtgcatagtatattaataagtttgagacataatatatgtcattttgaaaccatcttggaaataaaaatttttttggcaaaacccactagtatttcataggacattaggga

SEQ ID NO: 29337 - DNA, 900 bp, Homo sapiens
gggaggaagcagaggtgtgcagcgagattcctgggattgggatcccagctctgctgacatgtctgtacagtcttggaagtgtgatctagcctctttggcctgttcctccaatcctgagagaggtggtggaaacagatcactgcttagcaggccttagggataagttactagggccacacagaatcttstatttttttaaaaaagcaaacacaactctcctccctataattatactacactgccctcaatgccagtgaagttttcctttgccctgtaggtagatttttgtgtgaccttctcagaagcaggaaacagattgaaaagccactaagatgtgggtcaaaaagtatttttcattctcatatgtgtccctttgttgcaaagactgtgacattcctccatggcagaaaggaatgaatttggaagaaaaatcccaacataactattttccaccctaaggaaacagcctctctttgcaatgtgtgaatgcattttccactgcatccccaggggtatgagtgtttcaagaagtttgcactgtgctgctacattcactaagcccccaagccccactccttcccagaccatcctccagagtccctgcaagtttccagaaacaaacaaatcaagagactgacaagagctctgcctggtatgaataatagaaaaatgagccactctgtgcaaggaagttggtggaaggtgggaggcaagcaggggagagaaagagattttcagcagcagaggggacctcagagacccatctacaagacggacacttcgctcagcgttatttctgcatttatgcctctttaatggtcagcggggcaatcaatagattgcctgctacctggttaatcatgggtctgttatggggtggcaatgggcatgctggctgtg

SEQ ID NO: 29338 - DNA, 1527 bp, Homo sapiens
  misc_feature (1)...(1527): n = A,T,C or G
ggggaaattgaagcaagggtaatccagtccaatatatcatccaaactttggaaaaagtaattatttttttaatttacagataaaactgatttaataccatgttttcagacctaatttcaaacaaaataattaagttatctaataagatctgacttactatgaactgggatgctggcaactttcctctctttcagcttctattcctctactgaactctgcgccatgcaactctgtccttatccggaactgcaagctctcttacaatgatttaaaacatgaagacttgttgaatttaggaataaggattgagtgtatgggggctttccagstagcattcaggttgcctacacaaacatttaatctgccaacaaaggaagtgatatatgatacagaaaaatgaaaatcagatacactgcaaaggattctacagttagaattcttgagtttgaatagaaccttcaagacattctgtgacaagatttagctattctaggccttattttcctcattgaaaaatggggatgatactttatagagttgttatgcaacatcaataaaattataaatgtaaatgacttagcacaatgcctggcacacaaacagggctcgaatatattgctattggtatgattatgatttaggcttttatttaggtaaatgagagcgctttcttttnnnnnnnnnnnnnnnnnnnnnnnnnnnnnnnnnnnnnnnnnnnnnnnnnnnnnnnnnnnnnnnnnnnnnnnnnnnnnnnnnnnnnnnnnnnnnnnnnnnnatcttcaaatctgtcgaagacaagttgaatccttctcctactgtatctctctagcgttgcttctgtaatcacatccccttctctcactggtgactctcttccctttcccttctctgctggtaaaaatccttaaaattacatggacccaccccactcatccagaatatcctccaaatccctacttaatcacatctgcaaagtccctcattccatgtagggcaacatatttataggttctgtggattaagatgtggacatattttgggaacattattctgcttcccacagttagtatgcttttctcttgttttttgcttttcttttttcatttttcaggatctgatctaaattgtataagaaaagtttgcattagtcactgcaaaacttgcaagagacagaaaagggcttacatatggacaattattagaataaaaactattttctaggataatataaccctaaaagggcagcaaacgactataggatcttaaaaagaacgaaatagtggaagaattaagtcaatcacagcacctaggacacattctcataatgtgtaaattggagcaaattaactaaccactctgagcctcagtttctttaacctttcagggattttacaagaattaaggggataaactgtatgcagtaggggctaacatggggctggtgcatattcagcatttacttggttgttactgttgttgctgtttttgtgattgtcaacttttttctttcacttgctttctacttcc

SEQ ID NO: 29339 - DNA, 532 bp, Homo sapiens
caaaccatttccctctatgtaaaagccaactttagtgatattaacacttttacacccaaaaggctaatatccatgtttctaatactttaatactctaacacttgtttaatatcagttaggattggagtggtctatatataacagaaaatccaaatattggcttaaacacaccaagttatcctctcatgtaaaagaattcaggcrgattacagctcaaaggtgacacagaggtttcatgaatttgaatgaaacaagacccttcattcttatttttcccctcaaccctcagcatgtgactctcattcacaagattgtgccatggcccaagacagctgctggaaacactgctatcattctgctttccaggcagcgaaaaggaaggacaggaaaagcacagaacggctcccctcttcctgagtcagcactgacgcggccctcagagatggtccacacagtgcttctgcgcgtcgatcatttgccagaactcagacacaggggtcacccctacccacaagactttagaatatgatta

SEQ ID NO: 29340 - DNA, 954 bp, Homo sapiens
ggcactttcgcgggcacacgcgggcagtgtttagcgtggactacaatgataccttggtgagcggctctgcggccttcactgtgaaaggatggactttatctactggggcatgcctgagcacactcactgggcacacgccatgggtcaccaaggtagttctgcagaagwgcaaagtcaagtctctcttgcacacagtcctgaaggatacctcctcttaagtgcagacaaatatgagattaagatttggccaactgggacagaaatcaactgcaagtgcttaaagacatcctcttgtctctgaggttagaagtatccgcctgcagccaagacttcgtgttgatggcaaatacactgtttgtagttcagccctccgtctctagcagcgggactttgccaacagttatgatattctcagggtcatcaagactcctgagatagcaaacttggccttgcttggctttggaaatactgttgccctactgtttggcagctgccacctgtacatcatggacttgcagacccagagcctcattaatcgctggcctcttccagagtacaagaaatcaaagagaggctcaagcttcctggcaggcgaagcatcctggctgaatggagcagatgggcacaatgacacgggcttggcctttgccaccagtattcctgaccacagtattcacctggtgtggaaggaacacagctgacaccatgagcccccaccaccgactgactatgggtgctagggcgggggttttggggtgcaacctctatgccagctgactgcatgaaccaaagttctcacctatggtatcatcacgcagtgcacgtcatttatctgtttgccagggggccagggcttggggtgggggagggcttgttttactgacacacatgtagcatgctaacggggtacatcatggacttcatttgtactcagttaggttggtgagtgtaaaa

SEQ ID NO: 29341 - DNA, 954 bp, Homo sapiens
ggcactttcgcgggcacacgcgggcagtgtttagcgtggactacaatgataccttggtgagcggctctgcggccttcactgtgaaaggatggactttatctactggggcatgcctgagcacactcactgggcacacgccatgggtcaccaaggtagttctgcagaagtgcaaagtcragtctctcttgcacacagtcctgaaggatacctcctcttaagtgcagacaaatatgagattaagatttggccaactgggacagaaatcaactgcaagtgcttaaagacatcctcttgtctctgaggttagaagtatccgcctgcagccaagacttcgtgttgatggcaaatacactgtttgtagttcagccctccgtctctagcagcgggactttgccaacagttatgatattctcagggtcatcaagactcctgagatagcaaacttggccttgcttggctttggaaatactgttgccctactgtttggcagctgccacctgtacatcatggacttgcagacccagagcctcattaatcgctggcctcttccagagtacaagaaatcaaagagaggctcaagcttcctggcaggcgaagcatcctggctgaatggagcagatgggcacaatgacacgggcttggcctttgccaccagtattcctgaccacagtattcacctggtgtggaaggaacacagctgacaccatgagcccccaccaccgactgactatgggtgctagggcgggggttttggggtgcaacctctatgccagctgactgcatgaaccaaagttctcacctatggtatcatcacgcagtgcacgtcatttatctgtttgccagggggccagggcttggggtgggggagggcttgttttactgacacacatgtagcatgctaacggggtacatcatggacttcatttgtactcagttaggttggtgagtgtaaaa

SEQ ID NO: 29342 - DNA, 954 bp, Homo sapiens
ggcactttcgcgggcacacgcgggcagtgtttagcgtggactacaatgataccttggtgagcggctctgcggccttcactgtgaaaggatggactttatctactggggcatgcctgagcacactcactgggcacacgccatgggtcaccaaggtagttctgcagaagtgcaaagtcaagtctctcttgcacacagtcctgaaggatacctcctcttaagtgcagacaaatatgagattaagatttggccaactgggacagaaatcaactgcaagtgcttaaagacatcctcttgtctctgaggttagaagtatccgcctgcagccaagacttcgtgttgatggcaaatacactgtttgtagttcagccctccgtctctagcagcgggactttgccaacagttatgatattctcagggtcatcaagactcctgagatagcaaacttggccttgcttggctttggaaataytgttgccctactgtttggcagctgccacctgtacatcatggacttgcagacccagagcctcattaatcgctggcctcttccagagtacaagaaatcaaagagaggctcaagcttcctggcaggcgaagcatcctggctgaatggagcagatgggcacaatgacacgggcttggcctttgccaccagtattcctgaccacagtattcacctggtgtggaaggaacacagctgacaccatgagcccccaccaccgactgactatgggtgctagggcgggggttttggggtgcaacctctatgccagctgactgcatgaaccaaagttctcacctatggtatcatcacgcagtgcacgtcatttatctgtttgccagggggccagggcttggggtgggggagggcttgttttactgacacacatgtagcatgctaacggggtacatcatggacttcatttgtactcagttaggttggtgagtgtaaaa

SEQ ID NO: 29343 - DNA, 867 bp, Homo sapiens
taaagagtcaaatcaataggcgctctctctatatatctatatacacttttttcctccatgtatatattttttaactcaacatacaaatggagaaaaacattggaaggarccaatgcctatttaatattgctgaggatattaatgcctttaatgattgtaaatttagatctgattaatttggattttcctacaattttacactcatctagtaaaagggttctgtccttgttcttgacacaactaacaaaatccaaatcatgttaggttgtttctgagaatgggcccactgagctttctttgcttgactcctttatcatctgcctcctaaatggagtctttgatgctcaataaaacaatcttattgaattttgctttgcatcttttatgtataaaagtaaatttgtttgaaaaatatgacaatagtgattttaaaaaatatttgataccttcttacaaatacatctcaaatgattggagctgggtcttttatatgtctcagtgtgccatctaagtatcaacattgtatgtggatgtaaagtatcaacatagcatagctttctggtaaaaagagaaaaattcccaactgaacaccatccaactataccgttaccaacaagtcatccaaaaacaggcccaaatccttgtatctatcactgattacatgaatctgttcttatagtattacaacagaaagtctggtcaagaatagaagaaatgacacataaacaagaaaataaacattgataaggttttggttagaggaagcaaaataccaatatacaagatgaaattatccttacaggcacagatattttcacatcattctgtcagaaaaataagagcacatgcttcagctaagtctttgga

SEQ ID NO: 29344 - DNA, 1432 bp, Homo sapiens
gaatgaaataacatgatacccagagtttgcttccaaatattgagtgggcaagtgtagaagtaagaaggagtattagaattctgctactccaagagtaaactaccagctaggatccacatcacctaggagcttgttagaaatgaagaacctcagactcaagcctaaactataaaaaactgtactttaacattcaagttcatcaataggtttattgaagtttgagaatctctagtgtggcaaaacatatttggccattgtttaagcttggtgatagatataataggatattatactttctacatttgtgtgtatctgattttttaaaagaaagccaagttagagagaagggtacctagagtgtgaatagcccaaaagtagaccttttcctttgttctttacctcactttccctaacttagtccctgctcttatacttaaccattagcatgttccctaacttaccctgacatagcacacttcaagcctcttgaactctagggccgttcctattgtgttaccaattctaagccccaagatctccaagtagatgtcataaagtgaacaatttctctgctcccagaatcctaacaacgtctctgaaaaccacattagagactctgcaagagagttaagaagacagtgatgcctcctgccaagaatgatttacaaagctcatgaggagacaatgttttccagctgtctccatgctagggcccagctgcactttttatagcggtcattgttctttctttagtaattaaaaatattttagcactattttgcaaactacaacggggaggtaaagggagatctctctgcatgtagatgcaacattgtattttctgctgtacaaatataaaataatttatgaataaggtccagaggatcaatcagataagaggagaataaataaaaccaatctatgattaaggtccagaggatcaatcagactataggagaataagtaaaacatttcttccttgtatattagacaaggttcttttaatatataaatgcattttcacaatggttcaaaaataaaatctactcaacttcctgcatttatacattgtcccatctcatcagttttctcttttttccaacttatacaaataattgccaagtcattcagaatccaagatcctctgggaattaccctgcccagaaatttaataaggaaagccagtgttagtcaaattccatgctgcatttaaaaagagcaataacctttctttaaacatttgaatgaagttaagttttactggtagtcaaataaatgcaaaggaaaacagtgaagtgtcaccataacctctcagattggcaattaggaatgaggaaargccagcattttcccataatgctaatgggagagtgatgggggaaatcttactaaacggaagtttagcattatgtatcaatagtcttttttatta

SEQ ID NO: 29345 - DNA, 612 bp, Homo sapiens
agtgcagaaaagctcgacaccaagggagtgttgacgctggtacacgcacttacgccccattgggttacgctgtccagctgtaatcttatctccacataaggggggtctaacactcaggcccacagactccaacacgcccacaggctyggacccaatgctcaggccagagtgccactgaggcatgagtgcccacatggagaagcctccatcacacaccgggatggagatgattgccgctatgctccaagctacctagtgtattccaaggggttccctaggatgaggagaagggatgaaaagttcgtaaacacccactgtgtagagtgttttatggtgttgcatttgggaaagggtagctggtagaacataggcaccataaaataaaatacgatgcataaacacacgcttatccattcattcaacaaacaagcactgagtcttgggccagaaggtactgcgctcgaagctgggagtacagtgttgggtgaaaaacagtcttgccatctactgagaaagagctcaaagtagagagcagctgtgctacagagtgattaatgcccactgtaagaacacgcagaaggggcctcacagatacgggaaggcttcatagca

SEQ ID NO: 29346 - DNA, 612 bp, Homo sapiens
agtgcagaaaagctcgacaccaagggagtgttgacgctggtacacgcacttacgccccattgggttacgctgtccagctgtaatcttatctccacataaggggggtctaacactcaggcccacagactccaacacgcccacaggctcggacccaatgctcaggccagagtgccactgaggcatgagtgcccacatggagaagcctccatcacacaccgggatggagatgattgccgctatgctccaagctacctagtgtattccaaggggttccctaggatgaggagaagggatgaaaagttcgtaaacacccactgtgtagagtgttttatggtgttgcatttgggaaagggtagctggtagaacataggcaccataaaataaaataygatgcataaacacacgcttatccattcattcaacaaacaagcactgagtcttgggccagaaggtactgcgctcgaagctgggagtacagtgttgggtgaaaaacagtcttgccatctactgagaaagagctcaaagtagagagcagctgtgctacagagtgattaatgcccactgtaagaacacgcagaaggggcctcacagatacgggaaggcttcatagca

SEQ ID NO: 29347 - DNA, 599 bp, Homo sapiens
ttagctgatcctggatagagtatttgtctttctctttcttgtttctttagcaaatttacttttctaagcttaacctttaaagcccttaactgaaaagcagtaggctttttggaattttccagatgttattgtccaatttccatttttttgtgagttgcccttttccatggcataacaaaataatatcattgcttctcatagatggaaagtttgtattaaacttgctcaagggattactgatgcatataacacacacacacacacacacacacacacaccccgtagcatacatattcaaacagctctcattatgtccagctgaagtgaagtgaataaaatatctgttcttctatagcagaatagaccaattccaactagactgaattgtcactactgttctagtccacataccaaaaacagcagarcatttaaaccaatattccagtctgcttagtcagatgcctaattacattctaggttaccctgctatctacaccgcattcacttgataaaatcaaaggtaatcagtgaagggaagaaaagaggaagcaaattacttactaactgtggagagaaacatgataacaaagccagcaaac

SEQ ID NO: 29348 - DNA, 952 bp, Homo sapiens
aaacgtcagatgagtggggaacaaggaatgggggagcttagtgatttaagttacctttataatctctcttacctgtttgataacctaaactgtcttttctcccttcttttatactataaaacagcttaatcattcagtatccttctctcataaaaaagtggtgtgatgtgtctatttggcaatcatatatttataacatctgccttaattatattagattagggtctgaaacagaagagcttgatgtggtgaaaaacccataggatcagcaattgaaacacctgaattgttgccccaactctaccattagaaatgctatgatgctgagaaagctatcagtcttcagggtattctatagtaagtaggmgagtactggtcttttgatatctaagtttgctagaagctctaaaactatatgaggctaatatctgctctctatctcaattatctccaaaatgtgagatgggttatactttctcaacttttgccacttactatcaaaattcacataaagaaaagtgttccctgtgtgaacctcatttgctgatttttagattgaagttaaaaatctgtttattgatttagtgcaccagccaatttgaacactagaatcagcttcttggaaaatattgccaagaaaagctgaaaaccaagtatatccggctaatctgtgttacaaagtattagaaatgtagttgtaaggaaaatgttttgtggattgtgctatccatcttttctattttgctgatgtcacactgaggtgtcaattaaagatgatatgtgcaaatcatttaaagccctaaagagaaaaaggaaaatgttaccaaatataaggttatgcccaggcaattaaggaagcaataactggaaattataaatggcaggcaaaccaagcctataagaaataattcgggcttcaaatcttagagactcttttttaagtgggctgctt

SEQ ID NO: 29349 - DNA, 523 bp, Homo sapiens
aatggatgatttctctgttttggttaataccgtctctatccaccaccctgaaaaccctaggccagcagtctgaaaactttgtgaggggaaagacagtaaacattttcagctttgagcacagtacagtctgtcacaagtactgaatctgctattgtagcaccaatgtagatatagacagtatgtaaaccartgagtgtggctgtgctccaatacaactttatgtatggacactgacatttctattttcacttgtaacaaaatatttttcttttttttccaaccatttaaaaatgcgtcagcttattggcgttcaaaatgggcagcggcaggccagatttggctcacaggccaggatctgctgccccctgccttagactaaccctgatctctccctttgcttttgccccaccccacctcctccctaggccctttcagggctccctccctggtattcgtattcagcacctttgccactcgctgtccccactgctgcagccttcctttggctttctttacctgggtg

SEQ ID NO: 29350 - DNA, 693 bp, Homo sapiens
gtttatggagcatagcataaattggagtagaaagacctgggtttaaatttcaccacctactgactcttgcctacgaacagtaaacccgtcttaacctcattttcttcattttttaagaaattgaaattgagccaggtgcagtggcttatgcctgtaaccccagcagtttgggrggccgaggtgggcagatcacttgagccccagaattggagaccagcctggccaacatggtgaaactccatctctactaaaaatacaaaaattagccaggtgtggtggcacacacctgtaatcccagctaatcgggaggctgaggcaaaagaatcggttgaacctgagaggcaaaggttgcagtgagtggagattgtgccactgcactccagcctgggcaacagagtgagactatctcaaaaaaaaaaaaaaaagaaattgaaattggtataagctaggtcttctgtaaatgatgactcttacaatagggattccctgcaggtctgttgagttatgtgtatttgcatgcacatgtacacacacggtgtatttgttccatagtaactagctttggacttcctgttgtgccttctattgtttttctgtcaacttaccggttttctctccttgaagctatcagtatgcctgtgtgtagtgcctgctctcataggatttataggtttgttgacatctagttacttg

SEQ ID NO: 29351 - DNA, 1108 bp, Homo sapiens
tgctagctagctctccaactctccaacaatatcacttctttgaaagtttaacctgctttatggttgactgtttgcttttattagttgtgcctgttttgcctttttcttttccgttttcaatgaactctattaaacataataatagtgttggatattatccggctgggtctgcatactcagccctcgattaggaagcctcctcactctacttccttcagaatgtctgtggagaatggggcactcttgagaacagggaggtctgcccctgcttccaaggacacaacagaccyggaagcggccctcactgcccgtgatctctccactatcatggctaatggcacagctcccagggagctgaggaatcagatgggatgaaggagggtttctatttattctgcgaagagtactctagctgcagtgatccttccaggccattagaagatttttctgtaaactactgtgtctgtgcctgctggaagccaaaggagcctggcttggcttcagcctctccagccctttaaaggacagttgagacagaggccttggggacaggctgatcttctgagcattctctcactgttttgtccctctggagagacagcatctttatcagtgttgtttagataaaatcatagtaacaacacccagcagagtcctttaaagagctttatcatctgataagacttttctgtgaatgcaaaaggggttttgaatctaacggtaaataccatccacagcttagttttgtggttgttcttgttgccatttgtttcatccttatttcagaatgtattgtcttctatttatttcaaaatggaaagtctaattaatatatagtaaggtgcaaaattttatcaaacttaccagtctcttccttcatgtgttgtgaaaaagagaaggtataaatgtggcaagctcagggatcacactgaaattaagactttgctttacttgaacacacatgtgcagttcagttttaaaattgaagaagctggaccattatcatcacagagacaaaaatttaaccttttattccattgtaaactttgaattaaaaccaaacctctaaacaccttttagagaaagtttttttttttaagaaagtaaa

SEQ ID NO: 29352 - DNA, 441 bp, Homo sapiens
attcagcttcacccctgaattcttccatgaatttctagtaaaacaacggttttgagatcagacatttttgacagaaaagattgatttttttccttttttattttttttttgagatggtgttattgctctgttgccaatgctggtctcaaagtcccatattcaagcagtcttcctgcctcagcctaccaagtagcgacagggatgcaccattttgccyggccaggattgattttttaagtcttaagctatctttacataccaaaagcattgcttgaatttctatttatttatttttgaatttttcaacaagctcatttaaatgtagctagtgatttttagtttttgttttgttctgttttgttttgttttgtttttttttgttttgttttgagacaggatctagctctgtcacccaggctggagtgcagtgatgcaatcaca

SEQ ID NO: 29353 - DNA, 1108 bp, Homo sapiens
gcagttcgcttgagccttctcacatagaacatgccaattaaagaggctaattaggcttcagttagatcgcagtgggatttattaaaggaaaatctcataaaacattttatcctagaacatgtatttgtataatccagaagagtgatttaattagggaattaaaagcccattgaagtatattccagaatggaattgtttctctgaaaactacatggagatcacagtcctggggcaacaataaagacatactaagcatcctctgtcctactttttaatgggcagatggctgcaatgattcatttattaatcattctagcccaggcacagagcaacttttattgggtctttctgccatgattaagccatattgataaatatagatctcaatttatcctcccagtgttgcaaaactatatcattggggactgaatcccctaacataatccatgttcaaggtcagccttgcactagagttctgtgtatccccttccagatagtgagagaagcacaaggtctgccacataatattaacaccaactcagtgtctggtatattgtgtgataacccagagtttacaactgctccacccttctggttctttgcatgaatcttgcattgtcctaagcttcaaatcctgtttgtgagtgaggatggggtcacagtgaccgtcaaaatccaaattcgacactttctctcttccatctatatatgcaaactcaattcctgcaargtaactgcagagtctttctaagaatccccagaacatatctcacctgtgctcaggaacaaagccgggcaactagcatgtgaggtccacagcctctctcctcttcccacccacttctttctttccaaggaacatagacccagaaccagtgggaactacatgaggagacaaactgaaagagaagacactaccaagtcctccttgctgggtcaagtttattcagcttggcgtctttttccctagggatagaagctttttaggaggttcctcagaccccctgagcaaacagacttctgttgagtgagaccctctatgttagcagatagctgtgcctcctcagactagtttaggctgctgttcctcgggctggaagttcatcac

SEQ ID NO: 29354 - DNA, 339 bp, Homo sapiens
tgtgtcatggtttaaaatgttgtttcagtttgcagcaaaggagaaacgtaacttctaatttacagaaaataaatcctcaaatcatattatctttatatatttagttttaaaaataaacagaaaaaatgtattttttctgtaattttcatattagacttaacatttttacttttaaaccctaatcttyttgttgatttttttttctgatatatctctaggtgtacacatgtagccacagctatagtgaagacaagaaaatccaagagtggttatgtattttgtcattttcagactgccttcttcaccaaatttgatatcattaaaaatttggggacagtt

SEQ ID NO: 29355 - DNA, 550 bp, Homo sapiens
tttttaattttaaaaggaaagttagaaacttactattttttgtaatctagaatctggatgcaaaagaatgcaaaaactttcagagaaataatacattttgttgtcattaaagcgattacccttttcagggggggaaaaaaataactttccaaattagatacctcaataaagacagaaagttggtctgtaaagaacacaagtcttgtttttatgccatcaccgactctgagggtttccggcctaatcgtttttgatttttttcttcccagccaacttaaaagatttcttcacaatcaatgagatcaactatctggtccattcagygtagttattatgaaggcaaaaacaatgaattgactacattttcaatccagttttgttatgggagatatttcaatcagagagacatgcttataaattttctttgagaggaaatctgggtgggaaaagaaacgacggtgttagccaataaatgttgcttttcaaacctgctaaggctctcagatgatttatcactgtttgaaagctgtgggctattttataaaggaaa

SEQ ID NO: 29356 - DNA, 1707 bp, Homo sapiens
tcccatcaaggcccccaaggcagacatctcacagatgtctgtgctggggggtgcgtctgaggctctccttgcttcatgaggctgcttcaccccattcttgtctcccctcacctcctgacaccctgggttccccataggcccccctcccctgcacagattttcacctaggctctgggaggttggtggagtcctgggttctagaagacctcagagacccagggcagagtgaatgtcaggggttrtcagaagcaggggctgcccaagaccaattgctgagggaagaaggagtgatgaatgagatggataaacatgtcagctgtttggctttccacaatcattatctattttcagcctccgtgtcctgatgtttaaaatacagcagctaaaatatctggtggtcttttcttcctcttctgagtgcagccacgacatgccacatctctgcccatggccttcttgcctttgtctctagagggtgccatcagggatggatctgtccatgcaggaaggagcctgaaccccagactcttggacctcagactgggagagggtgtgggtgaaggcacgtggaccagtgattgattaattgattgactgatttatagacagagtctcactctgtcaccaggctggagtgtagtggcacgatctcggcttactgcaacctctgcctcccaggttcaagcgattctcctgcctcagcctcccgagtagctgggactacaggtgcccaccaccacacccagctaatttttgtatttttagtagagacggggtcttgccatgttagccaggctagtctcgatctcttgacctcatgatctgcccaccttggactcccaaagtgctgagcttacaggtatgagagtgcagggccagaggatggcaaagacaggggctggccccaggatcctcaactgttggcatcaggaccggactcagggcctcagtctggcagcatgggcgtcacgctgcctgccgggcagagccctttgccccacctgaaagccctgtggtcacagtgtagaggctggagcggcatgctggggtgggaagtgctgtccttgttgctctgtcccctggctcaggagcccctgagagtggcttctgctccccgagcttcctgcgctccctgaaagttgtgcatccagtgctgagtcctgagggcctgggggtgtcaggcctccttcctggctgtgacatgtgggttggagatttgcctttgttttagtgaaatgccagtggtcaaattcaacaggaaagaggaaaaagaaagcataagcctgagtccagggtggaggatggtggcattgaggaaggacctggggccctgcttctcccactgtctccagtccacacccttctggaaaggtcacatgatggctgctgcagctccaggagtcactgtatggacatgaaaacatccaagaagaggaggcatctcctcctttgcatcacttttactggaaaggaatgctttccccagaagtccccacaccccatgtcccatgcagcagacctgcctccaggtcctgctgttgcagctgagtgccaaaggagatggagacagtgaggacgtggagctcacagattctgcagcactggcaggcctgccggccaggaccaagatcacatgtctgctccagcatcctcgggcttaacccctgagctgtcctgccttactctctcctgaactctctggcctgt

SEQ ID NO: 29357 - DNA, 1130 bp, Homo sapiens
  misc_feature (1)...(1130): n = A,T,C or G
aggtatgagagttatcaatgtgcctgtgagctaactttataaataggtcaacatcacacctgtggctggatctacatatgacattccaactgcggactgtgtccatgtacaagattcaagacctaaccagaggtctctgtccatgtgtgagggtgacactcataacttttggcaggatgagcatacgagatgcttcacctgtgtgctgggtgcagttatatgtcaaaatcccacctgtggaaaagaaacaagctaagagagtcacatattttaaattctaggctaaagatatgttaaaatatgccttgcaggcggggctcaggaaagagagttacatcacctgagtgctgtgacgggtgatatgtcacaatgccttctatgggcatggctcaggcaggagttttacattatttttgtgttggccctatgatatgtaacaatccccctccatttgcatgacctagagaaaatagaagagtcacagcacctaaattatgaccatagagatctatcatgatacctcctgtgggcagagcctaagatagagggtcacatcacctgcaatctgggctcagtacaatgtttcaatctcccctgaggccagagcccaggcagaagaggagagttatatcacctaagtgcttgggcctgtggtatgtcacagttcatttttggggggtggcagaatgcaggcaaagnaggagtgttacatcacctaggtaagggttcagaagtatttcacaatacctactgtgggcagggcccaggcagtacagtcacatcatggagatgctgggctcagtgatatctcacaaagactttgtggacagggcccaggctgaaaataagagtcacatgacctaagtgctgggcccagtgaaatttcacaatascctctgtaggtagggcttaagcaagagagtcacatcacaatcttttctgagagctgggcccaggcagggaagtaaaatcactcaggtgctaggcaaaagtatatgtcacaatcatacctgtgggaagatctagggctaggattcacaattccacacatgtcccagcttcaggtaaaagcgtcaacacctcctgtgagttgcatccaagtacatgagtcacagtatcaatgatgaact

SEQ ID NO: 29358 - DNA, 1130 bp, Homo sapiens
  misc_feature (1)...(1130): n = A,T,C or G
aggtatgagagttatcaatgtgcctgtgagctaactttataaataggtcaacatcacacctgtggctggatctacatatgacattccaactgcggactgtgtccatgtacaagattcaagacctaaccagaggtctctgtccatgtgtgagggtgacactcataacttttggcaggatgagcatacgagatgcttcacctgtgtgctgggtgcagttatatgtcaaaatcccacctgtggaaaagaaacaagctaagagagtcacatattttaaattctaggctaaagatatgttaaaatatgccttgcaggcggggctcaggaaagagagttacatcacctgagtgctgtgacgggtgatatgtcacaatgccttctatgggcatggctcaggcaggagttttacattatttttgtgttggccctatgatatgtaacaatccccctccatttgcatgacctagagaaaatagaagagtcacagcacctaaattatgaccatagagatctatcatgatacctcctgtgggcagagcctaagatagagggtcacatcacctgcaatctgggctcagtacaatgtttcaatctcccctgaggccagagcccaggcagaagaggagagttatatcacctaagtgcttgggcctgtggtatgtcacagttcatttttggggggtggcagaatgcaggcaaagnaggagtgttacatcacctaggtaagggttcagaagtatttcacaatacctactgtgggcagggcccaggcagtacagtcacatcatggagatgctgggctcagtgatatctcacaaagactttgtggacagggcccaggctgaaaataagagtcacatgacctaagtgctgggcccagtgaaatttcacaataccctctgtrggtagggcttaagcaagagagtcacatcacaatcttttctgagagctgggcccaggcagggaagtaaaatcactcaggtgctaggcaaaagtatatgtcacaatcatacctgtgggaagatctagggctaggattcacaattccacacatgtcccagcttcaggtaaaagcgtcaacacctcctgtgagttgcatccaagtacatgagtcacagtatcaatgatgaact

SEQ ID NO: 29359 - DNA, 541 bp, Homo sapiens
ttttatacatatttgtaaatgtcttattaacattcattctaaaaataggttttattgaaataccccatgtattctcrgagtgtcaccagtgtcgtctccctgtagagtgaaactctgatcttctcatcagtgtcagccgtgaataattttacaacctccccagtaggttatatgctttgaaatttttcattggcctgtgaaacatttattatattctgagaacttactaagcatggtataaaacatggaaaagatatagtccctatccagtgccctctccatctaaatagcatgagcgaccaaataaaaatagtatgtcacaaagattggtttcaatttccttcatttctttttaggattatgatgtcatttttcaaagaccatgtctgggagcttcggtctaaggagagcctgtggtcatatgagattagaggatggttcaccaaagaaatgagttttgagcaagactcactgaagcagaatttgggccatacatcagaagaaatgctgaagtaaaacttagcataaaagaaccaaaaca

SEQ ID NO: 29360 - DNA, 596 bp, Homo sapiens
ctttctagcaggtagcctgccctctcacacaggaattgtaagtcccaagagcaagtctttcaagatgccggaagtgaaacttgtcaggctcttaagtccagggcctggaaactggcacagcatccattcagccatatttttgtgctcaaagcagttacatagccccctcagattgaacgggaggagagagagaacacatcacttgatagaagtagagtcaatgartttcttgccatcttgaacctgctgcagtctctgccacagaagaacctccatgcttatttggcctgaatctgatttttatgttacataggaatacgattttatattttaagcacctacagctatgtagggtgtttttcttataatgagtcttttgctatagaggacctctttaatttattactcttaagtactatatcctaattaaatatcaaattcaaatatagactctcttaatttaacgttatgtatttatttctctatctaattcagaccactttgctcattttgtgaactatttttttcaaaagtaaaagtaaattcccagtattttttttcaaagttaaaaagtatatataagtacaatttttcaa

SEQ ID NO: 29361 - DNA, 1207 bp, Homo sapiens
tgaggcctaagtcacccagccattcaaggcaaagaggagggtggactggacttcctaagacacaccctgcctcgcaccaatgcattccttcctcatgtagcyacagaaagagcatgcacatttgcagtcatgaggacttgagttcaaatccaagatatgttttagtataagcttttgtttcctcatttgcgaaacacagaccatacttttcgtgtagggctgtttcaaaacttaaaaatcatatgttaatccctttattattgagagccagccataggctagtgtttgtggataaatgtttagtgtaaatacagaaactgttcctgctctcttgtatgtaaaagcacagcacaggtgtgtaggtcctaaataaatgtgagctaccactattatcttcatcatccttatcatcattaaaataggtgattcccctcaattcttccaagaaagacttttaaggccgtacaaaagtagacttcaatggccttctgtatattgttacaattctagccaagaaacattatgtcattttcatatcacacctctctgggtaggtcagagcccttttatgtttcttccccattcagtactctgatcaaaattaaaaatcagagagggagattgagttgctcaaggtcacaccgcaggtcactgggaagcttgaaatagactgtaaggagattcattcttaagcctacagatgacacttttgtatcacagcaatatcagtttgttcctctgtaaactctctcttcttccaaaatatgtattctggccatccccatctgattctgatggcatatctgatctgaaagttgttgatactctgatcttagaaagtgaagggtttaatcttctcttggaacccctcccagtgaaaattattttgccactttgaaatggcacgggcatccactgtgaactcacatccataaatctaagtctactgctcaggaaagcagatgaggtttgattctgcttctcagcacagtctcacagagaaaattatggaaagaatttgatttatagaaccacctcaaaggctctggagtgagacgcatgttgattcactttattaccatttattttacactatctctttacgctccctgcacatggatttgaaagatgatttggataaatgcttatgacctgtcagattgcatagccctgttgaggcacatggctgccaacatctcgggttggg

SEQ ID NO: 29362 - DNA, 1207 bp, Homo sapiens
tgaggcctaagtcacccagccattcaaggcaaagaggagggtggactggacttcctaagacacaccctgcctcgcaccaatgcattccttcctcatgtagctacagaaagagcatgcacatttgcagtcatgaggacttgagttcaaatccaagatatgttttagtataagcttttgtttcctcatttgcgaaacacagaccatacttttcgtgtagggctgtttcaaaacttaaaaatcatatgttaatccctttattattgagagccagccataggctagtgtttgtggataaatgtttagtgtaaatacagaaactgttcctgctctcttgtatgtaaaagcacagcacaggtgtgtaggtcctaaataaatgtgagytaccactattatcttcatcatccttatcatcattaaaataggtgattcccctcaattcttccaagaaagacttttaaggccgtacaaaagtagacttcaatggccttctgtatattgttacaattctagccaagaaacattatgtcattttcatatcacacctctctgggtaggtcagagcccttttatgtttcttccccattcagtactctgatcaaaattaaaaatcagagagggagattgagttgctcaaggtcacaccgcaggtcactgggaagcttgaaatagactgtaaggagattcattcttaagcctacagatgacacttttgtatcacagcaatatcagtttgttcctctgtaaactctctcttcttccaaaatatgtattctggccatccccatctgattctgatggcatatctgatctgaaagttgttgatactctgatcttagaaagtgaagggtttaatcttctcttggaacccctcccagtgaaaattattttgccactttgaaatggcacgggcatccactgtgaactcacatccataaatctaagtctactgctcaggaaagcagatgaggtttgattctgcttctcagcacagtctcacagagaaaattatggaaagaatttgatttatagaaccacctcaaaggctctggagtgagacgcatgttgattcactttattaccatttattttacactatctctttacgctccctgcacatggatttgaaagatgatttggataaatgcttatgacctgtcagattgcatagccctgttgaggcacatggctgccaacatctcgggttggg

SEQ ID NO: 29363 - DNA, 1207 bp, Homo sapiens
tgaggcctaagtcacccagccattcaaggcaaagaggagggtggactggacttcctaagacacaccctgcctcgcaccaatgcattccttcctcatgtagctacagaaagagcatgcacatttgcagtcatgaggacttgagttcaaatccaagatatgttttagtataagcttttgtttcctcatttgcgaaacacagaccatacttttcgtgtagggctgtttcaaaacttaaaaatcatatgttaatccctttattattgagagccagccataggctagtgtttgtggataaatgtttagtgtaaatacagaaactgttcctgctctcttgtatgtaaaagcacagcacaggtgtgtaggtcctaaataaatgtgagctaccactattatcttcatcatccttatcatcattaaaataggtgattcccctcaattcttccaagaaagacttttaaggccgtacaaaagtagacttcaatggccttctgtatattgttacaattctagccaagaaacattatgtcattttcatatcacacctctctgggtaggtcagagcccttttatgtttcttccccattcagtactctgatcaaaattaaaaatcagagagggagattgagttgctcaaggtcacaccgcaggtcactgggaagcttgaaatagactgtaaggagattcattcttaagcctacagatgacacttttgtatcacagcaatatcagtttgttcctctgtaaactctctcttcttccaaaatatgtattctggccatccccatctgattctgatggcatatctgatctgaaagttgttgatactctgatcttagaaagtgaagggtttaatcttctcttggaacccctcccagtgaaaattattttsccactttgaaatggcacgggcatccactgtgaactcacatccataaatctaagtctactgctcaggaaagcagatgaggtttgattctgcttctcagcacagtctcacagagaaaattatggaaagaatttgatttatagaaccacctcaaaggctctggagtgagacgcatgttgattcactttattaccatttattttacactatctctttacgctccctgcacatggatttgaaagatgatttggataaatgcttatgacctgtcagattgcatagccctgttgaggcacatggctgccaacatctcgggttggg

SEQ ID NO: 29364 - DNA, 1207 bp, Homo sapiens
tgaggcctaagtcacccagccattcaaggcaaagaggagggtggactggacttcctaagacacaccctgcctcgcaccaatgcattccttcctcatgtagctacagaaagagcatgcacatttgcagtcatgaggacttgagttcaaatccaagatatgttttagtataagcttttgtttcctcatttgcgaaacacagaccatacttttcgtgtagggctgtttcaaaacttaaaaatcatatgttaatccctttattattgagagccagccataggctagtgtttgtggataaatgtttagtgtaaatacagaaactgttcctgctctcttgtatgtaaaagcacagcacaggtgtgtaggtcctaaataaatgtgagctaccactattatcttcatcatccttatcatcattaaaataggtgattcccctcaattcttccaagaaagacttttaaggccgtacaaaagtagacttcaatggccttctgtatattgttacaattctagccaagaaacattatgtcattttcatatcacacctctctgggtaggtcagagcccttttatgtttcttccccattcagtactctgatcaaaattaaaaatcagagagggagattgagttgctcaaggtcacaccgcaggtcactgggaagcttgaaatagactgtaaggagattcattcttaagcctacagatgacacttttgtatcacagcaatatcagtttgttcctctgtaaactctctcttcttccaaaatatgtattctggccatccccatctgattctgatggcatatctgatctgaaagttgttgatactctgatcttagaaagtgaagggtttaatcttctcttggaacccctcccagtgaaaattattttgccactttgaaatggcacgggcatccactgtgaactyacatccataaatctaagtctactgctcaggaaagcagatgaggtttgattctgcttctcagcacagtctcacagagaaaattatggaaagaatttgatttatagaaccacctcaaaggctctggagtgagacgcatgttgattcactttattaccatttattttacactatctctttacgctccctgcacatggatttgaaagatgatttggataaatgcttatgacctgtcagattgcatagccctgttgaggcacatggctgccaacatctcgggttggg

SEQ ID NO: 29365 - DNA, 631 bp, Homo sapiens
atcctggaaaatcaatatgggccacattactcggaagtccatatatcagtaggcaggtatgaaagaggctcamgtatgtgaaaaggttgctaatattttcttctgaagtttaaatcttatagctgcagttcacagggctttataaaagcacagatgagttttcggtgactccaaattaggaaaaatggtggaaagaagaagaagaaaaaaactgaagacaatcttttgaagacctgtagccaagaaaaattagaattcagtccaaactgtaaaaattaataaaaatggaaaaacattaggcaagactagaatctaacaacaggtgtactatcattttttgaaacaattcttctctctcccatttaccatttttactaaagacaaatcatggcagagctgatttgctttattatacttgacctgattattgtacacagcacagtcatagtaatagtaataatttttttgcataagcttttaaattctctttgatggaagtgaagcaggatgtttccctgacccttctgtgggacttgtgacagggcctcatttattcagcctgccactctcacctccttgcaggagagagcatgcaagcaaatgaggcaggaactggagtgcatgagtgctg

SEQ ID NO: 29366 - DNA, 514 bp, Homo sapiens
tatttgtataaagatttatcattatatttgtttgtaatgtaactcctttaagagtttaattaatcccacttagtgtttaagtatcctatatatctgccaacaggagttcaatttctagttgctgtttattagcaagataattgggtttattacttaagcatggtagcttcctggcactcagcccagataggatattttatatgtatcatatccaggaaaaaaaatacatttcctcaaaagcagatgtttaaacaatattaaamgcttagaatttttcaaactaccataatacaccatattggggttaaaacaacatagcagaatcaaataaactggaacattttctcctagactattaagtttataattattactttctcaaagagttttttttttttttccggagttttcactcgttgcccaggctggagcgcaatggcacgatcacggttcaccgcaacctccacctcccaggttcaagcaattctcctgcctcagcctcccaagtagctag

SEQ ID NO: 29367 - DNA, 578 bp, Homo sapiens
gagaaagtggcctggactccttttgactcccacatccaactaacacctccttcagctttctgcacagccatgtaattatcttcccagctatcctagccctctccctctccctccaggttggcatcggctcctagttctctaaacagaaggatgtcctgcctcaggccttcgtacatgctgttccttccatctgcacaccattcctgagccccacatgactccctctctcccattgtcctggtctctgttcaaatgtcacctaagggccaccgagctgcacaacctctggagtgccgtgcccatcacccttcaccccctgcctcagctggacccattcctcacaagccagaggaattttactctaatggtggaatttcaggccaagtagaaaaatatatttygtgtgtatgaagaaaggggaaaaagaacccttctctgagacctcaagttattatttaattgattaatttttagtcattgattaaattattaaataacaaatgaaatcaattgtattaatttcttaggagtaaattatttttccactgcactccagcctggacaacagagcaagaccc

SEQ ID NO: 29368 - DNA, 591 bp, Homo sapiens
cctaccccataaagaggcaacctctttcaacaaattgaagccctcttgaaattccttccaaacatagtgtataaaagaagacaaaagaaaagaaaaatgtgtgtgtgtgaatgtctcactgcaaattcccagcattaacaaaaaaataactgtgctctagaagtcaaaaaccatgatcaggtctttaggtggactaatgaccatcttccatcaagttcaaatgcagcttcaaggtcatgagtcacaccagtgactgcccctgactagaagagatggtttttcacaagggaaatttttatttatttatttaacatcagacaccactctgtctgactcaaaatgtggttagcttctgtaacaaaatccatgtaaatagatctcccatgagccattgcaaagattctcagcaacttcatgcataatggaagcttatgtgagtgtgggttgcctcaggcgggcgccttttcagatctcctttgggtttctcttgtgatttttgtgttctccctccttcagatgtttgggttctctgagatgtcatcccacagagataatttcaatcctggattgaagarccggtcaagaaagaaa

SEQ ID NO: 29369 - DNA, 600 bp, Homo sapiens
atatcaaactcatcatttgaactcactcaaactcacctcctgccaaacacctctccattgtggatggagtgggtcacagaactttctcaagtgttttaacatctctaatgggtcaaagtagacatcacagaggaaattagaaatacttgagttgaatgaaaagtaaaacacaacaaaatagatagaatgtaacaaaacagtgctaagaggttaatctatagctgtaaacacctacattagcaaagaagaaagatctcaaatarataaacctaaacctctaccttaagaaactagataagacaggctgaacgcggcggctcccgcctgtaatcccatcactttgggaggccgaggtgggcggatcacctgaggtcaggatttccagaccagccagccaacatggtgaaatcctatccctactaaaagtacaacaattagctgggcatggtggcaggtgcctgtaatcccagctactcaggagactgaggtgagagaatcgcttgagtctgggaggccgaggttgcagtgagccgagatctgccattgcactccagcctgggtgacaagagtgagactccgtctcaaaaaacaaacaaaagg

SEQ ID NO: 29370 - DNA, 600 bp, Homo sapiens
atatcaaactcatcatttgaactcactcaaactcacctcctgccaaacacctctccattgtggatggagtgggtcacagaactttctcaagtgttttaacatctctaatgggtcaaagtagacatcacagaggaaattagaaatacttgagttgaatgaaaagtaaaacacaacaaaatagatagaatgtaacaaaacagtgctaagaggttaatctatagctgtaaacacctacattagcaaagaagaaagatctcaaataaataaacctaaacctctaccttaagaaactagataagacaggctgaacgcggcggctcccgcctgtaatcccatcactttgggaggccgaggtgggcggatcacctgaggtcaggatttccagaccagccagccaacatggtgaaatcctatccctactaaaagtacaacaattagctgggcatggtggcaggtgcctgtaatcccagctactcaggagactgaggtgagagaatcgcttgagtctgggaggccgaggttgcagtgagccgagatctgccattgcactccagcctgggtgacaagagtgagactccrtctcaaaaaacaaacaaaagg

SEQ ID NO: 29371 - DNA, 600 bp, Homo sapiens
atatcaaactcatcatttgaactcactcaaactcacctcctgccaaacacctctccattgtggatggagtgggtcacagaactttctcaagtgttttaacatctctaatgggtcaaagtagacatcacagaggaaattagaaatacttgagttgaatgaaaagtaaaacacaacaaaatagatagaatgtaacaaaacagtgctaagaggttaatctatagctgtaaacacctacattagcaaagaagaaagatctcaaataaataaacctaaacctctaccttaagaaactagataagacaggctgaacgcggcggctcccgcctgtaatcccatcactttgggaggccgaggtgggcggatcacctgaggtcaggatttccagaccagccagccaacatggtgaaatcctatccctactaaaagtacaacaattagctgggcatggtggcaggtgcctgtaatcccagctactcaggagactgaggtgagagaatcgcttgagtctgggaggccgaggttgcagtgagccgagatctgccattgcactccagcctgggtgacaagagtgagactccgtctcaaaaaacaaamaaaagg

SEQ ID NO: 29372 - DNA, 1461 bp, Homo sapiens
taccaacgtgtgatgtcgaccagctttaaaatttctctcttttgtactccgtgcctttatttctcaagccaactgatgctgaggaaaaatagaaaatagcctacgtgagtatcggggcatgtcccccgatcgaacacttgtgtagaaagcaaagctttataaacaatatttttctgagtttggaaatgaagcctacaaaatgcatcagtgtgcaaagatgtgctgcctgtgttattatcagatmtgctctattatgtatttttctctgctttagaaagcctaatacttttaaaggatctctgtaatttctttctatattagtaagaggaaaattattttatcatatccattattatttttaaagaaattttaaaaggctatttaatatataataattttgtatttggtttacagcatgccaagattgctgggaacaaaaagagtgaagaatcttgatatctcattattatgtctaaaatcttgaaaaccaaaacacctattaaaataaattttaaaatgataatttattatctttttaacctgactataatgatgttataaattctggctaattaaaatttttaaagctgggtttaaatcttcaattcactctgattgttacataagaaacttttctgatggttgttatgtagtttcattctgtataatcacattctgcaatgaaaaatttatgatccgtcaattaaatattttttcctctatactttcaccacttctctccataatttcattgattatttcttatatatggtgtataaattataaataattaaatccatagaaatacccatttttcatattcattttagatacacatggtaatactagcaatagttatagtatatgtatatctatgcatatatctcagaaaatatgcagaaaatgtacttccctaaacttattagcatttacgattttaaaagcaccttgaaacaacttgaattttagagttgttcattattttgtaatttgagatttcagggaaggattgcatgagattgtctattaaaaatttacaagtagaattactgtcctttatttattacaatgtttgtattaggatccagtctttgttttggttgattctgctaaaaataatcaaagaaaaaaactgacagagaagaaagtgttcttaaagtcagcaacatttcttgagaaatttagttttaatcactgtaatagcaaagataaagcaacatttaaatacggagtaaactttcagaaaatgctgatatattcatgaacagtggaaaatttatgggggaaaattatactcaaagtctctttatcatacacaaattgcataggaaaatgaactttgaaattttttttaaagaaaatgaaaagactctcagagctctctgtggcattcatgaacaccagagttaatgcacaggttcaacacaagcttctgagctcgtccctctattttgccttagt

SEQ ID NO: 29373 - DNA, 1461 bp, Homo sapiens
taccaacgtgtgatgtcgaccagctttaaaatttctctcttttgtactccgtgcctttatttctcaagccaactgatgctgaggaaaaatagaaaatagcctacgtgagtatcggggcatgtcccccgatcgaacacttgtgtagaaagcaaagctttataaacaatatttttctgagtttggaaatgaagcctacaaaatgcatcagtgtgcaaagatgtgctgcctgtgttattatcagataygctctattatgtatttttctctgctttagaaagcctaatacttttaaaggatctctgtaatttctttctatattagtaagaggaaaattattttatcatatccattattatttttaaagaaattttaaaaggctatttaatatataataattttgtatttggtttacagcatgccaagattgctgggaacaaaaagagtgaagaatcttgatatctcattattatgtctaaaatcttgaaaaccaaaacacctattaaaataaattttaaaatgataatttattatctttttaacctgactataatgatgttataaattctggctaattaaaatttttaaagctgggtttaaatcttcaattcactctgattgttacataagaaacttttctgatggttgttatgtagtttcattctgtataatcacattctgcaatgaaaaatttatgatccgtcaattaaatattttttcctctatactttcaccacttctctccataatttcattgattatttcttatatatggtgtataaattataaataattaaatccatagaaatacccatttttcatattcattttagatacacatggtaatactagcaatagttatagtatatgtatatctatgcatatatctcagaaaatatgcagaaaatgtacttccctaaacttattagcatttacgattttaaaagcaccttgaaacaacttgaattttagagttgttcattattttgtaatttgagatttcagggaaggattgcatgagattgtctattaaaaatttacaagtagaattactgtcctttatttattacaatgtttgtattaggatccagtctttgttttggttgattctgctaaaaataatcaaagaaaaaaactgacagagaagaaagtgttcttaaagtcagcaacatttcttgagaaatttagttttaatcactgtaatagcaaagataaagcaacatttaaatacggagtaaactttcagaaaatgctgatatattcatgaacagtggaaaatttatgggggaaaattatactcaaagtctctttatcatacacaaattgcataggaaaatgaactttgaaattttttttaaagaaaatgaaaagactctcagagctctctgtggcattcatgaacaccagagttaatgcacaggttcaacacaagcttctgagctcgtccctctattttgccttagt

SEQ ID NO: 29374 - DNA, 1461 bp, Homo sapiens
taccaacgtgtgatgtcgaccagctttaaaatttctctcttttgtactccgtgcctttatttctcaagccaactgatgctgaggaaaaatagaaaatagcctacgtgagtatcggggcatgtcccccgatcgaacacttgtgtagaaagcaaagctttataaacaatatttttctgagtttggaaatgaagcctacaaaatgcatcagtgtgcaaagatgtgctgcctgtgttattatcagatatgytctattatgtatttttctctgctttagaaagcctaatacttttaaaggatctctgtaatttctttctatattagtaagaggaaaattattttatcatatccattattatttttaaagaaattttaaaaggctatttaatatataataattttgtatttggtttacagcatgccaagattgctgggaacaaaaagagtgaagaatcttgatatctcattattatgtctaaaatcttgaaaaccaaaacacctattaaaataaattttaaaatgataatttattatctttttaacctgactataatgatgttataaattctggctaattaaaatttttaaagctgggtttaaatcttcaattcactctgattgttacataagaaacttttctgatggttgttatgtagtttcattctgtataatcacattctgcaatgaaaaatttatgatccgtcaattaaatattttttcctctatactttcaccacttctctccataatttcattgattatttcttatatatggtgtataaattataaataattaaatccatagaaatacccatttttcatattcattttagatacacatggtaatactagcaatagttatagtatatgtatatctatgcatatatctcagaaaatatgcagaaaatgtacttccctaaacttattagcatttacgattttaaaagcaccttgaaacaacttgaattttagagttgttcattattttgtaatttgagatttcagggaaggattgcatgagattgtctattaaaaatttacaagtagaattactgtcctttatttattacaatgtttgtattaggatccagtctttgttttggttgattctgctaaaaataatcaaagaaaaaaactgacagagaagaaagtgttcttaaagtcagcaacatttcttgagaaatttagttttaatcactgtaatagcaaagataaagcaacatttaaatacggagtaaactttcagaaaatgctgatatattcatgaacagtggaaaatttatgggggaaaattatactcaaagtctctttatcatacacaaattgcataggaaaatgaactttgaaattttttttaaagaaaatgaaaagactctcagagctctctgtggcattcatgaacaccagagttaatgcacaggttcaacacaagcttctgagctcgtccctctattttgccttagt

SEQ ID NO: 29375 - DNA, 1461 bp, Homo sapiens
taccaacgtgtgatgtcgaccagctttaaaatttctctcttttgtactccgtgcctttatttctcaagccaactgatgctgaggaaaaatagaaaatagcctacgtgagtatcggggcatgtcccccgatcgaacacttgtgtagaaagcaaagctttataaacaatatttttctgagtttggaaatgaagcctacaaaatgcatcagtgtgcaaagatgtgctgcctgtgttattatcagatatgctctattatgtatttttctctgctttagaaagcctaatacttttaaaggatctctgtaatttctttctatattagtaagaggaaaattattttatcatatccattattatttttaaagaaattttaaaaggctatttaatatataataattttgtatttggtttacagcatgccaagattgctgggaacaaaaagagtgaagaatcttgatatctcattattatgtctaaaatcttgaaaaccaaaacacctattaaaataaattttaaaatgataatttattatctttttaacctgactataatgatgttataaattctggctaattaaaatttttaaagctgggtttaaatcttcaattcactctgattgttacataagaaacttttctgatggttgttatgtagtttcattctgtataatcacattctgcaatgaaaaatttatgatccgtcaattaaatattttttcctctatactttcaccacttctctcmataatttcattgattatttcttatatatggtgtataaattataaataattaaatccatagaaatacccatttttcatattcattttagatacacatggtaatactagcaatagttatagtatatgtatatctatgcatatatctcagaaaatatgcagaaaatgtacttccctaaacttattagcatttacgattttaaaagcaccttgaaacaacttgaattttagagttgttcattattttgtaatttgagatttcagggaaggattgcatgagattgtctattaaaaatttacaagtagaattactgtcctttatttattacaatgtttgtattaggatccagtctttgttttggttgattctgctaaaaataatcaaagaaaaaaactgacagagaagaaagtgttcttaaagtcagcaacatttcttgagaaatttagttttaatcactgtaatagcaaagataaagcaacatttaaatacggagtaaactttcagaaaatgctgatatattcatgaacagtggaaaatttatgggggaaaattatactcaaagtctctttatcatacacaaattgcataggaaaatgaactttgaaattttttttaaagaaaatgaaaagactctcagagctctctgtggcattcatgaacaccagagttaatgcacaggttcaacacaagcttctgagctcgtccctctattttgccttagt

SEQ ID NO: 29376 - DNA, 812 bp, Homo sapiens
tatattctcatgattacaaagaatagtttgagtaatggaatgtatttgaattttacatatgtctttcatttactagcagaaataaaatcttagcacttgatytagtaaattcctccatttaaaataagatgttactttagcagaaacaaaatttatcttaatgggataataattcactagtttacctctgatgagcatcagctaatatttaatccattgtgaaattacacagaatcaaaataaaatataatacagttagttaaaatagaaaaattatcttattgattaatttagacatcagaagttagattataaaatcaaggtattttttgtgtttgttttgtttttagtatattagcatatactaccaaacgtgaaccatagtaaaagctgttcagtaacacttaccattccattttcaaataacccgagtttatgtgtcaggttgaaaagcttttagatgagtggtttatgttactgtatgtatccaaatatttgtatatcatgtagacagcccaagaacatatgcacgtatgttagctattgcatagaatggtaaagaatacattcttaaaagaaagaagagagtaagatacattcacttaatgttccaaataggtctctagtatctcaaatgtactattcacccattactttcaaacattatatcagggccaggcaccatggctcatgcctgtaatctcagccctttgggaaattgacgtgggtggatcacttgaggccaagagttccaggccagcctggccaacatggcaaacacctgtcttgactaaaaaaaaaaaaaaaaaaaa

SEQ ID NO: 29377 - DNA, 1475 bp, Homo sapiens
tgcggggccattggcggggatgggcgggggaggggggcctcgacggtttcccatccccctctggcaaccctaatcttccttctccatctgggccctggggcgtcttccaccacccaggccggatgctttaaaaaaaattgctttttaaagtgtctgtcgttgaaagaaattagtcttacccttgaagtcaggggcgcgtcctcgcaatacacatcttgttagggaaagtgttcggctccagctagggttctacaaggcgtttcttgttcaccgccggagggaagcaggctccggagtgactgccttctgaaagtcggtcttgtaacaattggatggatgcctttgaagagcccctgtccctattctatgcttgaaaacagcgtgcagtcctaatgttcaagaaccacgaccacataaaaacattgctycccttctgctgctttgaaaacgacccctaaattccgtgtagaagttgccaggtcgtcttgacgtacacttcgtttgtatgatgtttgtctgtcaaatactgtgatggaagagtgtatgcgggggaggagcagggaatttttaaaagcattttccggtcacctcagactgggagatcatgttctttcctgaaaaaaaaaaaaaaaaaaaaaaaccccctaatgagggcggggatctgtgatacttactttgtggttcctcctgccaaggggttacagcgatgggtgtgtccaggaggcaaggtgacatcttaaacaggagttagggatccttgccaactgaaacctccagcctgtatgggtgtggggagaggatttcaccttaaataaaactagcgttcattgacgtttgatggatttgcttcatcttgatgcttcaaatgttattctgaatttgaatgtgctggttacatttgctttcttaaagatgtagttacaggcatatgtaataaacattacaagttgtggagtaagcttttttttttaaataaacgaagggtaaagttttctttaatcagttttgataattgaatcagtaattcgaatagattttttcttggtagagttggtatctacgcatttgtggtcccttgcccagtgttaagcttttgtagttactgtttgcatcactggtgctttgggggttttctgttaaattgacagctcttactataagagacaaagtcgaaaaaaaaaatcttaataaaaattgacagatatcattatttgtgacagatacagtaaatttgaaaattgccttcacataactttataattagaggactgagattttacattaggaatccaattaaaaaaaattagccggacataatggcctgtgcgtgtagtcctggctagtcaatgggctgaggcaggaggatcatcttgggcccgggagttggagactgtagtgagctatgatcacaccactgcactccctgggcaacagagtgagaccctgtctctcaaaaaataaaaaaaattaggacc

SEQ ID NO: 29378 - DNA, 1305 bp, Homo sapiens
  misc_feature (1)...(1305): n = A,T,C or G
caatttcttcttttcgtctctcagtttccatgactctataccagtgggccttaaactttagagtgcatcagaatcaccagagtttctgtttcagtaggtctgaggtggggcctaagacctgtttccaggttatactgatgtctttgttctggagaccatactttgaaaaccatcattctatactgtcatggacacttcattatctttgtaatttccccattattgatgctactactgtggctacttgtcatcatcctctgtgccagatcagcctccttcctatgatctctaatttctccccagttatcagcctcccattttagtctcagatctatggttgtatccttatgttagtaacgccaacatttttttaaaaagtgctagcatacgcattttgtgtaaaacttcctagtctttaagcctcaatcatctcatggtgttgcaaggactaaattgtgaaccttaattactttggccaacacaaaaatgatactatgataatttataaagcaacagcactgccaccaggtaaccaagcatagaccatatactattttaaagcaggcctttaaaagataaatacagaatttaacatatgtgtagaaacattaaattttatatatgtaannnnnnnnnnnnnnnnnnnnnnnnnnnnnnnnnnnnnnnnnnnnnnnnnnnnnnnnnnnnnnnnnnnnnnnnnnnnnnnnnnnnnnnnnnnnnnnnnnnntaaattttagccaaattgaagcctatctagaaagagctaaatggacatcccagcatattaatctctggcttgtttggtgcagcttgctttgataattacataaaaagattacagtaacaaaaaatcacaccttagttaaaggtgtgttctccattgtaaagcagtattttggttctgtagttcagtcatagcaaacgtgactgaatgaaaatttagacagktcaggcctcaatctagaagaaatgcaagggagaaaaagtcacttgttcatttttactctagaaggagtaatactacaagatgttttaatgttgaatcaacaacttgctttggattatattttctaaaatgtaatccaatacctgtcttttttctttttcttttgaaatagttttagacttacagaagagttgtgaaaatattacagagttcacatattctcttccctcagtttcttctttttacaatttataaaccatgaaacaattatcattcacattattacaataccattaacaaagctacaccccatattcaaatttcactattttggctcctaatatactttttctgtgcta

SEQ ID NO: 29379 - DNA, 899 bp, Homo sapiens
ttctgttagactaaataaagaagagtgaacccatttttatggggaggaaaagaagaaaaaattgttcctaacagtaggggatggcttgagtctaggaacctcaggctgtgtctaaattttatcaaatattcagatgaagctgcacaaaaatttactcaatcatccagatgtttccagaaatacaatattttgatttcatgtagatgaaatcagggaaagattagattttatttttctggcattgtgagacacagtctcagtatctttcttattgtctggtgtgtctccctacttaggactatgttgtggggaccagcacagctgctttctggggttgtcagtccccggcctgggccactcttgaatctataaagggctgtttgwtctgtgtgaaactcactcaggatggagcccagtttgacatttgggtcattggaatgtgccagctgaatttagtatccttgtgatttcaagtcaaaggattaaaatatacaaagccatggaatttaactttcctcctatccctcagatctctctgaaggagatcaaccaacaagggtccttctgatgttcaaagaaattaaataactttacattcacaatgatgctatatcctgtgtcaagaacaggttagcaagaccagttcttcactcaggacaagatcataaagaatgagcaggatgggaatgggtttagtacaacatgggtcacaaagcaggtattccagatgttggcttttgagtgaaagagttggaatagttcaaacacagatagttttgacatgaagatccagatgattaaacacaacttttcaacttcatttatcttatgtagcagagacgtaaatagagcataacctcagtcttctgaaggacatagattcaaattctaagaaaatt

SEQ ID NO: 29380 - DNA, 899 bp, Homo sapiens
ttctgttagactaaataaagaagagtgaacccatttttatggggaggaaaagaagaaaaaattgttcctaacagtaggggatggcttgagtctaggaacctcaggctgtgtctaaattttatcaaatattcagatgaagctgcacaaaaatttactcaatcatccagatgtttccagaaatacaatattttgatttcatgtagatgaaatcagggaaagattagattttatttttctggcattgtgagacacagtctcagtatctttcttattgtctggtgtgtctccctacttaggactatgttgtggggaccagcacagctgctttctggggttgtcagtccccggcctgggccactcttgaatctataaagggctgtttgttctgtgtgaaactcactcaggatggagcccagtttgacatttgggtcattggaatgtgccagctgaatttagtatccttgtgatttcaagtcaaaggattaaaatatacaaagccatggaatttaactttcctcctatccctcagatctctctgaaggagatcaaccaacaagggtccttctgatgttcaaagaaattaaataactttacattcacaatgatgctatatcctgtgtcaagaacaggttagcaagaccagttcttcactcaggacaagatcataaagaatgagcaggatgggaatgggtttagtacaacatgggtcacaaagcaggtattccagatgttggcttttgagtgaaagagttgraatagttcaaacacagatagttttgacatgaagatccagatgattaaacacaacttttcaacttcatttatcttatgtagcagagacgtaaatagagcataacctcagtcttctgaaggacatagattcaaattctaagaaaatt

SEQ ID NO: 29381 - DNA, 904 bp, Homo sapiens
cgcactggggccacaggtggagctgcctgccagtctggcgctgtgtgcccacactcctcagtccttgggcagtggatgggaccgggtgccatggagcagggggcggcttctgtmggggaggttcaggccgcacaggcgcccacggtggcggcggggaggctcaggcatggtgggctgcaggtgccgagccctgccccgctgggaggcagctaaggcccgtgagaaatcgagcacagcgcggtgggccggcactgctgggggacccggcgcaccctccgcagctgcttgcccgggtgctaagctcctcactgcccgggcccggtggggccggccggcccctcggggtgcggggcccgccaagcccacgcccacccagaactctagttggcaggtgcgcagccccagttcccgcccacgcctctccctccacacctccccgcaagctgagggagccgtctccggccttggccagcccagaaaggggctcccacagtgcagcggtgggctgaagggctcctcaagcacggccacagtgggctccaaggccgaggaggcgcccagagtgagccagggctgcgagggctgccagcatgctgtcacctctcagctgcatctcttgaagagcaaaaaaactcttggtacgtgctatacaggatttgttattgtaattattattattatcaatgtatttaaatccacagatacctcccctggaggatcttcttctaacccgcctacaaccctctctctgattaggggcctgagcaaagcctgagaagggacgcgcaggacaaatttgcggggaaagagagaagattgggcaaaaatttggcatgagaacagcctttaacctgtcccttcaatacatttgctgcctcagaaaggaagaggccacaaggagctc

SEQ ID NO: 29382 - DNA, 904 bp, Homo sapiens
cgcactggggccacaggtggagctgcctgccagtctggcgctgtgtgcccacactcctcagtccttgggcagtggatgggaccgggtgccatggagcagggggcggcttctgtcggggaggttcaggccgcacaggcgcccacggtggcggcggggaggctcaggcatggtgggctgcaggtgccgagccctgccccgctgggaggcagctaaggcccgtgagaaatcgagcacagcgcggtgggccggcactgctgggggacccggcgcaccctccgcagctgcttgcccgggtgctaagctcctcactgcccgggcccgrtggggccggccggcccctcggggtgcggggcccgccaagcccacgcccacccagaactctagttggcaggtgcgcagccccagttcccgcccacgcctctccctccacacctccccgcaagctgagggagccgtctccggccttggccagcccagaaaggggctcccacagtgcagcggtgggctgaagggctcctcaagcacggccacagtgggctccaaggccgaggaggcgcccagagtgagccagggctgcgagggctgccagcatgctgtcacctctcagctgcatctcttgaagagcaaaaaaactcttggtacgtgctatacaggatttgttattgtaattattattattatcaatgtatttaaatccacagatacctcccctggaggatcttcttctaacccgcctacaaccctctctctgattaggggcctgagcaaagcctgagaagggacgcgcaggacaaatttgcggggaaagagagaagattgggcaaaaatttggcatgagaacagcctttaacctgtcccttcaatacatttgctgcctcagaaaggaagaggccacaaggagctc

SEQ ID NO: 29383 - DNA, 904 bp, Homo sapiens
cgcactggggccacaggtggagctgcctgccagtctggcgctgtgtgcccacactcctcagtccttgggcagtggatgggaccgggtgccatggagcagggggcggcttctgtcggggaggttcaggccgcacaggcgcccacggtggcggcggggaggctcaggcatggtgggctgcaggtgccgagccctgccccgctgggaggcagctaaggcccgtgagaaatcgagcacagcgcggtgggccggcactgctgggggacccggcgcaccctccgcagctgcttgcccgggtgctaagctcctcactgcccgggcccggtggggccggccggcccctcggggtgcggggcccgccaagcccacgcccacccrgaactctagttggcaggtgcgcagccccagttcccgcccacgcctctccctccacacctccccgcaagctgagggagccgtctccggccttggccagcccagaaaggggctcccacagtgcagcggtgggctgaagggctcctcaagcacggccacagtgggctccaaggccgaggaggcgcccagagtgagccagggctgcgagggctgccagcatgctgtcacctctcagctgcatctcttgaagagcaaaaaaactcttggtacgtgctatacaggatttgttattgtaattattattattatcaatgtatttaaatccacagatacctcccctggaggatcttcttctaacccgcctacaaccctctctctgattaggggcctgagcaaagcctgagaagggacgcgcaggacaaatttgcggggaaagagagaagattgggcaaaaatttggcatgagaacagcctttaacctgtcccttcaatacatttgctgcctcagaaaggaagaggccacaaggagctc

SEQ ID NO: 29384 - DNA, 603 bp, Homo sapiens
caggctgcatattttataacaattgtacaggaaaatgatcctagggacagtagccagagattcaaagtttagaaaaatgctccttccttatcagttggcaggtgacaaatcacagtgagattacttttggcaaggaggatattttcccataacaatctagaagacagagtgcagttgggagcccagtgttacgagtagttgtttggagatttttcttttaatgccatattctcctggtttaccagacgctacttttattcttcaagtctgaaaaattgccactgattttgagagatctgcctgtggcagaaatagtagttgtagtgatatctcycagagtagatgtcctgcttctgagatgcaacattatccaccttctattaatagtttaaacctactttgctttaagacctagcatttggaaggccttaggtctcaagttttgttcttccgtgtctatattttaaatgcagcttttatggatgtgtttcaaaagtaatgcatatttcttttagaaatgttgaaaatacaagaaaagcataaagacagaagttaaaaatctcctctcttctcgccactaagagatcaagatcattaacactg

SEQ ID NO: 29385 - DNA, 945 bp, Homo sapiens
cagatcccctaattctgtcaggtccaaggacatgggaatcttgggactgaaatggcaagtggcccaaccccaggtgtcccggctccactcacactgttgacctggctctaacaggctgtcgggagaaggggatctgtctggacaggcaaggtcccccttgggtggctgagccctgcagacctcttccccttccccagccccccagcatctatgtttcctgaacactgctgcccttctgccttgagtggagaggctgggatggcgcatgtgctgtgcgggaccttccgacccayttcagtcctcacggctccaggtctgcgagagaaggctggctcttcagtggggccataagtttgaattcccagaaacacccgcacacaccagggaaatgagaactcatttccctcctggaccacccccagtcgtgtgtttcctgggcaggggattggtctatttttctcctggaaaattcacccttagaaactctccgtggacctgaatgcccccgaactgtagctgcacccctagactgtgtcccctctagaaattctgttttgcttttcttttgctccagagcactttgtttctgtgacaatactcagattccctgagatgttggggaggctgtttgtttcctggttgatagattcccttatcccgagctcactgtggctcggacaccaatttataaatacaaggccgctttcctcgctcaagaagtgcgttagtcctgcggccaaacgacatctttaaatggtagcgaggcatttagatttctcttctgcccagctgacagtaggtttacagtttataatctggcctttgtaaaagcatttgtcagcctggatatttcatttttaagcccgaccacccatgcagagggccaggcaggaagcggcccttcgtctgcacccagtcagcttagaggttggccgcagaatccca

SEQ ID NO: 29386 - DNA, 945 bp, Homo sapiens
cagatcccctaattctgtcaggtccaaggacatgggaatcttgggactgaaatggcaagtggcccaaccccaggtgtcccggctccactcacactgttgacctggctctaacaggctgtcgggagaaggggatctgtctggacaggcaaggtcccccttgggtggctgagccctgcagacctcttccccttccccagccccccagcatctatgtttcctgaacactgctgcccttctgccttgagtggagaggctgggatggcgcatgtgctgtgcgggaccttccgacccatttcagtcctcacggctccaggtctgcgagagaaggctggctcttyagtggggccataagtttgaattcccagaaacacccgcacacaccagggaaatgagaactcatttccctcctggaccacccccagtcgtgtgtttcctgggcaggggattggtctatttttctcctggaaaattcacccttagaaactctccgtggacctgaatgcccccgaactgtagctgcacccctagactgtgtcccctctagaaattctgttttgcttttcttttgctccagagcactttgtttctgtgacaatactcagattccctgagatgttggggaggctgtttgtttcctggttgatagattcccttatcccgagctcactgtggctcggacaccaatttataaatacaaggccgctttcctcgctcaagaagtgcgttagtcctgcggccaaacgacatctttaaatggtagcgaggcatttagatttctcttctgcccagctgacagtaggtttacagtttataatctggcctttgtaaaagcatttgtcagcctggatatttcatttttaagcccgaccacccatgcagagggccaggcaggaagcggcccttcgtctgcacccagtcagcttagaggttggccgcagaatccca

SEQ ID NO: 29387 - DNA, 945 bp, Homo sapiens
cagatcccctaattctgtcaggtccaaggacatgggaatcttgggactgaaatggcaagtggcccaaccccaggtgtcccggctccactcacactgttgacctggctctaacaggctgtcgggagaaggggatctgtctggacaggcaaggtcccccttgggtggctgagccctgcagacctcttccccttccccagccccccagcatctatgtttcctgaacactgctgcccttctgccttgagtggagaggctgggatggcgcatgtgctgtgcgggaccttccgacccatttcagtcctcacggctccaggtctgcgagagaaggctggctcttcagtggggccataagtttgaattcccagaaacacccgcacacaccagggaaatgagaactcatttccctcctggaccacccccagtcgtgtgtttcctgggcaggggattggtctatttttctcctggaaaattcacccttagaaactctccgtggacctgaatgcccccgaactgtagctgcacccctagactgtgtcccctctagaaattctgttttgcttttcttytgctccagagcactttgtttctgtgacaatactcagattccctgagatgttggggaggctgtttgtttcctggttgatagattcccttatcccgagctcactgtggctcggacaccaatttataaatacaaggccgctttcctcgctcaagaagtgcgttagtcctgcggccaaacgacatctttaaatggtagcgaggcatttagatttctcttctgcccagctgacagtaggtttacagtttataatctggcctttgtaaaagcatttgtcagcctggatatttcatttttaagcccgaccacccatgcagagggccaggcaggaagcggcccttcgtctgcacccagtcagcttagaggttggccgcagaatccca

SEQ ID NO: 29388 - DNA, 841 bp, Homo sapiens
agcatttctggactccagtctctccagggcccagtgagaggtggggacagtggacaggcttgtatgggaggtggcggtccatgctgcagccagatttgtgttcatttcccttctgcaagcaccccgcgctgtgtttgttccaagaccttggtgctttcctgcgttcctggcagcctcctgtgccctagttaggtgggcccacccgcagctgtggcctcacccgggacccaggcctgcctcccaggccacaggcacccaaaggagccccaatgtcctcagtctgccaggatccccagtagcaccccctgcaggcctgcccagaagagagccaggaagcgaccactcactgccctccaggtaaaaaggccatcggatctattccagacatacacctccatttggggagaggagagaggggttggaagacagagttcatgagcctagatggaatttttcagacagggagccaagttgaaagtgagcaaaacagttctcagtgttcctaactgtaaaatagggctgaagctagaacttagcttgaaaggtgaccatgaggacctatcaggcaataaatgcatggctcttaaaaaaaaaaaaaacagggcacagagttagggtgagggctaggagcaggggtagcttatacaataatgaatattgtaaccacagccacaatcaccatctcaataaacccacgtggtgcrgatacagccctggttaatcttcacgtgcctctcaaaaaccatccacagttttcctgggtccttccacagcctcttccgcatcctgtgactgcttcttaactgttgcataattttgctgtttggaggaggaggaattc

SEQ ID NO: 29389 - DNA, 1919 bp, Homo sapiens
cacctcaccctccctctgctctgtcagtgttacagggagactgcagcctctcctggccactggttctgggtcgggtctgggcattcaggcactgatggaggtgagggtggagagaggagccaatctgtttctctgctccccctctgccttgggctgcatcttctctatggctccagctcccaggactggcaggccatggttcaaacttccacttggtggctccactggaggttccaaaataactaaggttctctcctcccttagtccctccagtcaagggatggtgaaactccctgctcttgctcatgactggattaccccattgtctgctgtttggcttataatcttcatcacctgyataaccagttccctgtgctacattccctctattaaacatattcgaaataatttctgtgttcttgttcagaccccaatttatagagtttcatatatttaattatagctgcttttttaatagaagaggaaactgaggatcatactggctaaatgtcacaatattaagctcaatatcacaaatctactatttaaatcaaaaagtcttcatactcctaagctcatacatactttttctgctattatgctttagtgtctttataactgtctagaaaggagaattcttattatggggaaatctttcttggatcattagtatcatgatgggttttcctacagtcctgtgttagtccaactggattgaagacccagaggatgggtttgaaggtcaatatctgacatgtctccagagaaagaattattaggcctcgggcagcagatcagaaagatgctcttttgtatgtctactgaaatttggtctttcaggaaatcctccacagatccatggagccaccaagttctggctactcatttaggacagatgatgaaatcctgaaatagtttgggtgtttgtcccctccaaatctcatgatgaaatgtaatccctagtgttggaggtggggcctggtgagaggtgttttagtcatgggagtggatcccttgtgaatggcttggtgctgcccttgtgatcctgagttcttgtttaaaagtgtgtgacacctccctccttcctctcttgctcccactctcaccatatgacatgctggcacctcttcgccctccacgccgattgtaagcttcctgaggcctcaccagaagcagatgccagtactttgttttgtgtacagccggcaggaccatgagccaattaaacctctttataaattacccagcctcaggtatttctttttagcaacacaaaaatggcctgatacaattccctttgttccaatgtgaatagaaaattgagatgtttctggccaggcgcagtggctcatgcctgtaatcccagcactttgggaggctgaggcaggaggatcacgaggtcaagagattaagaccatcctggccaacatggtgaaaccctgtctctactaaaaatacaaaaattagctgggtgtggtggcgcatgcctgtagtcccagctactcaggaggctgaggcaggagaatcacttgaactgggcaggcggaggttgcagtgagctgagatcatgccactgcattccagcctggtgacagatcgagactctacctcaaaaaaaaaaaaaaattgaggtgtttctgaccttgaattattgaatttgatcaaaatctggagagagatactcttaaattatcatgaaatcccacccacaatcaaatactttggactttatcataattttaggcttaatttttagactcctttcataagaataaatcataggctaaaatgtttttagtctgaacaactgaaggaatgagcatagcattactttacttgtggggactcttgtgaagaagttggcagtcaaagaagaacaaataaaatgttgaaccagcagtagaagaataacctccaat

SEQ ID NO: 29390 - DNA, 1919 bp, Homo sapiens
cacctcaccctccctctgctctgtcagtgttacagggagactgcagcctctcctggccactggttctgggtcgggtctgggcattcaggcactgatggaggtgagggtggagagaggagccaatctgtttctctgctccccctctgccttgggctgcatcttctctatggctccagctcccaggactggcaggccatggttcaaacttccacttggtggctccactggaggttccaaaataactaaggttctctcctcccttagtccctccagtcaagggatggtgaaactccctgctcttgctcatgactggattaccccattgtctgctgtttggcttataatcttcatcacctgtataaccagttccctgtgctacattccctctattaaacatattcgaaataatttctgtgttcttgttcagaccccaatttatagagtttcatatatttaattatagctgcttttttaatagaagaggaaactgaggatcatactggctaaatgtcacaatattaagctcaatatcacaaatctactatttaaatcaaaaagtcttcatactcctaagctcatacatactttttctgctattatgctttagtgtctttataactgtctagaaaggagaattcttattatggggaaatctttcttggatcattagtatcatgatgggttttcctacagtcctgtgttagtccaactggattgaagacccrgaggatgggtttgaaggtcaatatctgacatgtctccagagaaagaattattaggcctcgggcagcagatcagaaagatgctcttttgtatgtctactgaaatttggtctttcaggaaatcctccacagatccatggagccaccaagttctggctactcatttaggacagatgatgaaatcctgaaatagtttgggtgtttgtcccctccaaatctcatgatgaaatgtaatccctagtgttggaggtggggcctggtgagaggtgttttagtcatgggagtggatcccttgtgaatggcttggtgctgcccttgtgatcctgagttcttgtttaaaagtgtgtgacacctccctccttcctctcttgctcccactctcaccatatgacatgctggcacctcttcgccctccacgccgattgtaagcttcctgaggcctcaccagaagcagatgccagtactttgttttgtgtacagccggcaggaccatgagccaattaaacctctttataaattacccagcctcaggtatttctttttagcaacacaaaaatggcctgatacaattccctttgttccaatgtgaatagaaaattgagatgtttctggccaggcgcagtggctcatgcctgtaatcccagcactttgggaggctgaggcaggaggatcacgaggtcaagagattaagaccatcctggccaacatggtgaaaccctgtctctactaaaaatacaaaaattagctgggtgtggtggcgcatgcctgtagtcccagctactcaggaggctgaggcaggagaatcacttgaactgggcaggcggaggttgcagtgagctgagatcatgccactgcattccagcctggtgacagatcgagactctacctcaaaaaaaaaaaaaaattgaggtgtttctgaccttgaattattgaatttgatcaaaatctggagagagatactcttaaattatcatgaaatcccacccacaatcaaatactttggactttatcataattttaggcttaatttttagactcctttcataagaataaatcataggctaaaatgtttttagtctgaacaactgaaggaatgagcatagcattactttacttgtggggactcttgtgaagaagttggcagtcaaagaagaacaaataaaatgttgaaccagcagtagaagaataacctccaat

SEQ ID NO: 29391 - DNA, 1635 bp, Homo sapiens
gactttgacatgtaaagaaattgattatttaattgtgaggacaggaaagagctctagaccaaaattctccttctggctgtatattttattagctatgtagccttgggatagtaactgggccttctaactgtgtctatataacaagaggtctggattggataatctgtaagagacattatcattcttaataactaggaaaccatgrgcttgatgcctatttgcttactgcgggtcagggagaataatatggtgaatgaattgcttataaatcaaaataacacattttgaacagggtttgcttttctgggaatcaataattgacattaaatactgtagagaaagttattgatgacattgattgttagattagtcctttggctctagagtcaaaggaaggcatttcctaatgatcttctataatatacaaactttaagtttcttttctatgtatttcactctaatgtgaactcaaataatctctgacctgctaacagatgtggaagctgacaaatttatttgtaagcagaataattacctcttaatattgatttgtaaatccatgttgccattcattgaatttctccaagtagaaacaagatatatccaggtctacgactgtggatggctacatgtggatccctacttaatattgaatgagacaatgcatatctgtcacaaggtaatatatgatagctgtatctaattgcatataaaagaggaccaagccaattgacatctctctgctctcaagaaaacaatgtgagcaggacatagatgtgtcttgtgttccacacagggggattttggagttgtggtaaatgagatggattctctccagcgaacaaaccaagaaagggttggaaaacaatataaaatggtcagacatcttctggatagagattgtagcggagtttagcataggatatgagccttgctaggtttttctataatgacaagtttaaacaggaccaatttgcatttttataaacagcaatcacttcctagaattctagggtttcccaaatcaaactcctgaatgtcagtctctcccacttcagtcatgggtaactgccctctctctgagcattacccctcatttatcttaaggaaaatgatagaccagtttgtagcatatcctaaattctctacttaaattgtgctgcaatagacacacaatgagacaccatcaactaagcaaccactgaatgactattacatacaagacactgtattggaggctatcaaagggtatattcattcattcattcttcttctttttttttttttttgcttattccatgaacatttctgagtgcctacttaatgacaggctctgtctgttgtgagaaaagattgtagttgtctatctaacaaccatacatcctactccctcacatacacactattccacagaggcaacctggtattcatcttaaaggcaacaactctggggccagatcacctgagttacaaccctgctgtcactactgaataacagtgtgaccttaattaattaattaattaattaattaattaatttatttatttaatacaaggttatcttgctgtctcaccaagggtgaagtgctttggcatgtccatagctcactgcaccctcaaactcttgggttcgaa

SEQ ID NO: 29392 - DNA, 1635 bp, Homo sapiens
gactttgacatgtaaagaaattgattatttaattgtgaggacaggaaagagctctagaccaaaattctccttctggctgtatattttattagctatgtagccttgggatagtaactgggccttctaactgtgtctatataacaagaggtctggattggataatctgtaagagacattatcattcttaataactaggaaaccatgggcttgatgcctatttgcttactgcgggtcagggagaataatatggtgaatgaattgcttataaatcaaaataacacattttgaacagggtttgcttttctgggaatcaataattgacattaaatactgtagagaaagttattgatgacattgattgttagattagtcctttggctctagagtcaaaggaaggcatttcctaatgatcttctataatatacaaactttaagtttcttttctatgtatttcactctaatgtgaactcaaataatctctgacctgctaacagatgtggaagctgacaaatttatttgtaagcagaataattacctcttaatattgatttgtaaatccatgttgccattcattgaatttctccaagtagaaacaagatatatccaggtctacgactgtggatggctacatgtggatccctacttaatattgaatgagacaatgcatatctgtcacaaggtaatatatgatagctgtatctaattgcatataaaagaggaccaagccaattgacatctctctgctctcaagaaaacaatgtgagcaggacatagatgtgtcttgtgttccacacagggggattttggagttgtggtaaatgagatggattctctccagcgaacaaaccaagaaagggttggaaaacaatataaaatggtcagacatcttctggatagagattgtagcggagtttagcataggatatgagccttgctaggtttttctataatgacaagtttaaacaggaccaatttgcatttttataaacagcaatcacttcctagaattctagggtttcccaaatcaaactcctgaatgtcagtctctcccacttcagtcatgggtaactgccctctctctgagcattacccctcatttatcttaaggaaaatgatagaccagtttgtagcatatcctaaattctctacttaaattgtgctgcaatagacacacaatgagacaccatcaactaagcaaccactgaatgactattacatacaagacactgtattggaggctatcaaagggtatattcattcattcattcttcttctttttttttttttttgcttattccatgaacatttctgagtgcctacttaatgacaggctctgtctgttgtgagaaaagattgtagttgtctatctaacaaccatacatcctactccctcacatacacactattccacagaggcaacctggtattcatcttaaaggcaacaactctggggccagatcacctgagttacaaccctgctgtcactactgaataacagtgtgaccttaattaattaattwattaattaattaattaatttatttatttaatacaaggttatcttgctgtctcaccaagggtgaagtgctttggcatgtccatagctcactgcaccctcaaactcttgggttcgaa

SEQ ID NO: 29393 - DNA, 1635 bp, Homo sapiens
gactttgacatgtaaagaaattgattatttaattgtgaggacaggaaagagctctagaccaaaattctccttctggctgtatattttattagctatgtagccttgggatagtaactgggccttctaactgtgtctatataacaagaggtctggattggataatctgtaagagacattatcattcttaataactaggaaaccatgggcttgatgcctatttgcttactgcgggtcagggagaataatatggtgaatgaattgcttataaatcaaaataacacattttgaacagggtttgcttttctgggaatcaataattgacattaaatactgtagagaaagttattgatgacattgattgttagattagtcctttggctctagagtcaaaggaaggcatttcctaatgatcttctataatatacaaactttaagtttcttttctatgtatttcactctaatgtgaactcaaataatctctgacctgctaacagatgtggaagctgacaaatttatttgtaagcagaataattacctcttaatattgatttgtaaatccatgttgccattcattgaatttctccaagtagaaacaagatatatccaggtctacgactgtggatggctacatgtggatccctacttaatattgaatgagacaatgcatatctgtcacaaggtaatatatgatagctgtatctaattgcatataaaagaggaccaagccaattgacatctctctgctctcaagaaaacaatgtgagcaggacatagatgtgtcttgtgttccacacagggggattttggagttgtggtaaatgagatggattctctccagcgaacaaaccaagaaagggttggaaaacaatataaaatggtcagacatcttctggatagagattgtagcggagtttagcataggatatgagccttgctaggtttttctataatgacaagtttaaacaggaccaatttgcatttttataaacagcaatcacttcctagaattctagggtttcccaaatcaaactcctgaatgtcagtctctcccacttcagtcatgggtaactgccctctctctgagcattacccctcatttatcttaaggaaaatgatagaccagtttgtagcatatcctaaattctctacttaaattgtgctgcaatagacacacaatgagacaccatcaactaagcaaccactgaatgactattacatacaagacactgtattggaggctatcaaagggtatattcattcattcattcttcttctttttttttttttttgcttattccatgaacatttctgagtgcctacttaatgacaggctctgtctgttgtgagaaaagattgtagttgtctatctaacaaccatacatcctactccctcacatacacactattccacagaggcaacctggtattcatcttaaaggcaacaactctggggccagatcacctgagttacaaccctgctgtcactactgaataacagtgtgaccttaattaattaattaattwattaattaattaatttatttatttaatacaaggttatcttgctgtctcaccaagggtgaagtgctttggcatgtccatagctcactgcaccctcaaactcttgggttcgaa

SEQ ID NO: 29394 - DNA, 1635 bp, Homo sapiens
gactttgacatgtaaagaaattgattatttaattgtgaggacaggaaagagctctagaccaaaattctccttctggctgtatattttattagctatgtagccttgggatagtaactgggccttctaactgtgtctatataacaagaggtctggattggataatctgtaagagacattatcattcttaataactaggaaaccatgggcttgatgcctatttgcttactgcgggtcagggagaataatatggtgaatgaattgcttataaatcaaaataacacattttgaacagggtttgcttttctgggaatcaataattgacattaaatactgtagagaaagttattgatgacattgattgttagattagtcctttggctctagagtcaaaggaaggcatttcctaatgatcttctataatatacaaactttaagtttcttttctatgtatttcactctaatgtgaactcaaataatctctgacctgctaacagatgtggaagctgacaaatttatttgtaagcagaataattacctcttaatattgatttgtaaatccatgttgccattcattgaatttctccaagtagaaacaagatatatccaggtctacgactgtggatggctacatgtggatccctacttaatattgaatgagacaatgcatatctgtcacaaggtaatatatgatagctgtatctaattgcatataaaagaggaccaagccaattgacatctctctgctctcaagaaaacaatgtgagcaggacatagatgtgtcttgtgttccacacagggggattttggagttgtggtaaatgagatggattctctccagcgaacaaaccaagaaagggttggaaaacaatataaaatggtcagacatcttctggatagagattgtagcggagtttagcataggatatgagccttgctaggtttttctataatgacaagtttaaacaggaccaatttgcatttttataaacagcaatcacttcctagaattctagggtttcccaaatcaaactcctgaatgtcagtctctcccacttcagtcatgggtaactgccctctctctgagcattacccctcatttatcttaaggaaaatgatagaccagtttgtagcatatcctaaattctctacttaaattgtgctgcaatagacacacaatgagacaccatcaactaagcaaccactgaatgactattacatacaagacactgtattggaggctatcaaagggtatattcattcattcattcttcttctttttttttttttttgcttattccatgaacatttctgagtgcctacttaatgacaggctctgtctgttgtgagaaaagattgtagttgtctatctaacaaccatacatcctactccctcacatacacactattccacagaggcaacctggtattcatcttaaaggcaacaactctggggccagatcacctgagttacaaccctgctgtcactactgaataacagtgtgaccttaattaattaattaattaattwattaattaatttatttatttaatacaaggttatcttgctgtctcaccaagggtgaagtgctttggcatgtccatagctcactgcaccctcaaactcttgggttcgaa

SEQ ID NO: 29395 - DNA, 1635 bp, Homo sapiens
gactttgacatgtaaagaaattgattatttaattgtgaggacaggaaagagctctagaccaaaattctccttctggctgtatattttattagctatgtagccttgggatagtaactgggccttctaactgtgtctatataacaagaggtctggattggataatctgtaagagacattatcattcttaataactaggaaaccatgggcttgatgcctatttgcttactgcgggtcagggagaataatatggtgaatgaattgcttataaatcaaaataacacattttgaacagggtttgcttttctgggaatcaataattgacattaaatactgtagagaaagttattgatgacattgattgttagattagtcctttggctctagagtcaaaggaaggcatttcctaatgatcttctataatatacaaactttaagtttcttttctatgtatttcactctaatgtgaactcaaataatctctgacctgctaacagatgtggaagctgacaaatttatttgtaagcagaataattacctcttaatattgatttgtaaatccatgttgccattcattgaatttctccaagtagaaacaagatatatccaggtctacgactgtggatggctacatgtggatccctacttaatattgaatgagacaatgcatatctgtcacaaggtaatatatgatagctgtatctaattgcatataaaagaggaccaagccaattgacatctctctgctctcaagaaaacaatgtgagcaggacatagatgtgtcttgtgttccacacagggggattttggagttgtggtaaatgagatggattctctccagcgaacaaaccaagaaagggttggaaaacaatataaaatggtcagacatcttctggatagagattgtagcggagtttagcataggatatgagccttgctaggtttttctataatgacaagtttaaacaggaccaatttgcatttttataaacagcaatcacttcctagaattctagggtttcccaaatcaaactcctgaatgtcagtctctcccacttcagtcatgggtaactgccctctctctgagcattacccctcatttatcttaaggaaaatgatagaccagtttgtagcatatcctaaattctctacttaaattgtgctgcaatagacacacaatgagacaccatcaactaagcaaccactgaatgactattacatacaagacactgtattggaggctatcaaagggtatattcattcattcattcttcttctttttttttttttttgcttattccatgaacatttctgagtgcctacttaatgacaggctctgtctgttgtgagaaaagattgtagttgtctatctaacaaccatacatcctactccctcacatacacactattccacagaggcaacctggtattcatcttaaaggcaacaactctggggccagatcacctgagttacaaccctgctgtcactactgaataacagtgtgaccttaattaattaattaattaattaattawttaatttatttatttaatacaaggttatcttgctgtctcaccaagggtgaagtgctttggcatgtccatagctcactgcaccctcaaactcttgggttcgaa

SEQ ID NO: 29396 - DNA, 1222 bp, Homo sapiens
taactgaggtttttctcttatgttcgtatggacaaaaataggcagttacctcttattccytcatacaaagaccatataaattggtccctttgtctttctgtgaaatccagtggtacagctaatgatgacattcacctctgcctagtctaccacttatgtctaagtcaactgtcccccagaggaggaagccccacactaaattccataatacacaatacatactcatgggaagggaatagaccagataggtggttgatgctctggccccatgggttcatatagttcttaaatgttatctcctccttaggccaggcttttatcattaagcattaatactacttaaaaaggataaaagattgtcataaactttgaaagatttccagagcaaataaatgctagcttatcaatttcagagtcaaagaatattaaaattaaatttaaaatatacaattaacctaatacattttgaatttggactaattgtttgaaattcaaaaggaccccaggatatttttcacttgaaacacagaaataaaaaatttatactaaacaggcagagtttgccctcaaggttgaaaacattaatcatcatgcatctaactgttaactgtaaaaaatcatttttcttctgatttaaagggaattatttagtgagtgtttttaacttctctgctttctcaagcacaggcagtaacatggggtcaggttccgggctcctatgccccttcacgtcccctttctctacaaggagctgcctttgatatacaagggagcttctggccgaaagaatgcacaaagcccaggaagaaatgaggctgctaggaatgtaattgagatttagttattaaattcaggaaataattggagttgaacagtctttctaagaagaaggtatattttagccccacataaaaatgaacttgaggccacagtcagtagggaaaggttttcacaggactctttgaagctttccacaatattcagaagcccataaagctggacacagctttttttttttcctttaaaaaaaaaaaaaagaaaaagaaaaaaagagttttcttaggttgggtgagaatattgagtcccaggaaggaaataggataacccaatatacattatagtctatttacgtaggtttcaccatggagccaaaccaccacaactacctgactggcctgtaatgttattgttgggctcttcagtattgaaatttccttaggtg

SEQ ID NO: 29397 - DNA, 743 bp, Homo sapiens
tggttcatgggcagccatgggtgggcctggaaaaggaaccacaagtgcccacgcaggtcagcaagactggcagcccaggtcccagccttcaggccctccctggcttgaaggtggggcctaacccaggacccactccgttccacccaagatcctgtctgcctcccattgctgttcatagtgcccaggctgttcatgcggaggggcacctgcaggccagtgccgagatgccctcagcccacccttggcttgtccacccacactcactgtcacctaaattccaaagggtgttgaggcagcaggcgactggmatgtcagcactacctcaagtgtgtgtacccctggcttggctgtgacagcaccagagctcggccccacagtgctctgagattggaatgggcatgacaactctgagtcagatagctgtagccacacctgggagggtggggctgccacatgctcccagatcttgccagctccgtggagcatgcagccccagcagtgcccccttgcagcctggggtggggtctccaggtcctcgctgggcctgggctggtgtctggggcaggggtgacattgttaagagcttcccctttaccccagtgctcaggggcaacccaggacagagcagatcatccctgggcccagccatagggagtgtgaggcttggcggtcacccccgatgtgggttgaccccaggggtatggcctctggtggctccatgcagagcctcctcccaaggcaga

SEQ ID NO: 29398 - DNA, 547 bp, Homo sapiens
tagtaagaaaaattatccctctatgttccatacaggctaatacttttctaccatatattatgttaattttatttgtagagtctttcagaaggcagaaccataaatattttatatagttaaatctatccatcttttccttttatggcatttgagttgtgtgtcatgtcaaaaaagcctttccataaagtcctattcatagcttaaagaaaaaaaaaaaagcctttccatccccaaaactaaataaaaattatttgtatttttgtcttagtatttttctgagtttttctttgaacagtctaatctttaatctctccaccattcttttttgtgtacggtgtaaagtataaccctgacgayatacattttttgtgtttttcaaatggatggccggccaactgtcccaacaccatctggcccttctacctaaaaaatcaatttcaatcattccaagcacctaaactctagcttaatgctgagaggaaactttcatgtctgtattaaggtgatcactttttaagtatattgttcttcaaggggctatgtattc

SEQ ID NO: 29399 - DNA, 536 bp, Homo sapiens
ataatctatgttgaagggcaagctcacccattcacatataaaatgctatacaagccgtgcaaggccctaaaaggtgaaaaacatgaaatgaacattcaaataagccctgataaattcttagggagagagctgaggtgaagcagctcctgtgagccacaccaaacaaaaatggaaaataaatcttcaaagactattaaagcaatttcatacaaacaatctgttataagctccataggcagttaatagaatcaaggttttggtgaatcagtaatttggtaaattggttatttggtgaattgatgagttgctacattttattttagtgactgggatwgcaccgtcttttggaacattagcttgccttcctcgagaagtaatgtggtaggcaggcagggagttggaaataaaagagcaacagaagcaagcatggggtgtgcccaacttagcacggcctgttagagatggtgtccgttctccattctgacctgcatacatgtccccactgtggagacagatgcctcaggctagctcagcca

SEQ ID NO: 29400 - DNA, 536 bp, Homo sapiens
ataatctatgttgaagggcaagctcacccattcacatataaaatgctatacaagccgtgcaaggccctaaaaggtgaaaaacatgaaatgaacattcaaataagccctgataaattcttagggagagagctgaggtgaagcagctcctgtgagccacaccaaacaaaaatggaaaataaatcttcaaagactattaaagcaatttcatacaaacaatctgttataagctccataggcagttaatagaatcaaggttttggtgaatcagtaatttggtaaattggttatttggtgaattgatgagttgctacattttattttagtgactgggatagcaccgtcttttggaacattagcttgccttcctcgagaagtaatgtggtagrcaggcagggagttggaaataaaagagcaacagaagcaagcatggggtgtgcccaacttagcacggcctgttagagatggtgtccgttctccattctgacctgcatacatgtccccactgtggagacagatgcctcaggctagctcagcca

SEQ ID NO: 29401 - DNA, 536 bp, Homo sapiens
ataatctatgttgaagggcaagctcacccattcacatataaaatgctatacaagccgtgcaaggccctaaaaggtgaaaaacatgaaatgaacattcaaataagccctgataaattcttagggagagagctgaggtgaagcagctcctgtgagccacaccaaacaaaaatggaaaataaatcttcaaagactattaaagcaatttcatacaaacaatctgttataagctccataggcagttaatagaatcaaggttttggtgaatcagtaatttggtaaattggttatttggtgaattgatgagttgctacattttattttagtgactgggatagcaccgtcttttggaacattagcttgccttcctcgagaagtaatgtggtaggcaggcagggagttggaaataaaagagcaacagaagcaagcatggggtgtgcccaacttagcacggcctrttagagatggtgtccgttctccattctgacctgcatacatgtccccactgtggagacagatgcctcaggctagctcagcca

SEQ ID NO: 29402 - DNA, 977 bp, Homo sapiens
tcccacctcagcctcttgagtatctgggactacagaacctcatcaccaaaacacccatctaatttatttattttttgtaaagatgaggtctcactttgttgctcaggctgacaagtattatcttaatgttatagaaaaaaagtaattctggccatatataggtattattctttgcagtagaatatcatttcagaaatttgtgccaaacataaaattagttttctagtagtaaaaagtaattaaactctttaaattattawtacccctagtatactggggaatgggtgtgtgttccaaatgaaaaaacttgggatgtctaatgagatgctgttttctgtcgcagaaaatctatgtaaaatgttttttctcacgtgtacactgttgatatttgagacagcacatgttaacacttcaagaagtaaaataaatgtgttgattatatccacagttttcatatttattaactacatatttcgtttttaatgtaatgcctattgaaaaacctgtaaatagttgtttcttaaaattgacaaatactgcctaagatttttctgtatattttcatatttcaattttcctgtgaggttagaatgaacactttagctaagacatttgtgcctccaaatcctaaacctttcagaatgttagtttattatttggtttttacctaaattattttctgcttattcaagaaccttaggtctatccagttacatttttatttttttatttttatttttttattttgaaacaaagtctcgctctgttgccaaagctggagtgcattggcatgatctgggctcactgcaacctctgcctcccaggttcaagtgattctcctgcctcaacctcccgagtagctgggattacaggggcataccaccacacccagctaatttttgcatttttagtagagatggggtttcaccatgctggccaggctggtctcaaactcctgacttcaggtgatctgccca

SEQ ID NO: 29403 - DNA, 555 bp, Homo sapiens
aggttacagctcgagctatttcgacgtaataacgatcccacgtacactttaaaaagcaaacttctcacatacatcacttcctggaagccctagtcagcctttagcccaagcaatgctgagcccaatccttcggccttccgtagtctcgctcggtttcgcgagatcgaggctgagctccgccgcgccgccgtgggggcgaccccagaacacttccgggtgtaactggttgtgctgtctgtgtacttccggcagcctccagacagtttcttccgcttcctgtaccaccckgctcaagtagcggacacggaacagggaactatcagcccgtcggcctccgggccctgcattctctagccatggaccgggaccttttgcggcagtcgctaaattgccacgggtcgtctttgctctctctacttcggagcgaacagcaggacaatccacacttccgtagcctcctggggtcggccgccgagccagcccggggcccgccgccccagcacccgttgcagggcaggtaatgagacgttggtgccactgcgccacggaagaggg

SEQ ID NO: 29404 - DNA, 643 bp, Homo sapiens
tttcttcatttagggtgatatttgctcagatttattataaatgatatgcttatcggaatagggaagttctcttctattttcaatttactgaaagttttatgttaaagagttatttattgtatcagatggcttttctatctaataagatgattatttgttttctcttttgatttgttaatgtgatgaacaatattcatggattttctgatggaaactattcttgtgtacctggaataaacccacttayggtatattgtctctttaaatatacatttgcattcaaattgcaattttgcttaagattttacacaggcctgagctttgtcttttttataacctcttttttttgttgttttgtgataagaattgtactaaccttgaatgagttgggaaatgtttcttcattttctattataaatatttggaggaacaaaaacatatgtcaatgtatacttttttgctggaatttcacaggaaatctattacagtggtcacattggagaggagggataaagacttaggggacagggagtgatgaagagggagagggaggcctctattttcattatagtctcctcaggctgtttgctttattcaccatgttcatgtattacattatttcttttggaaaaattttgaagaa

SEQ ID NO: 29405 - DNA, 643 bp, Homo sapiens
tttcttcatttagggtgatatttgctcagatttattataaatgatatgcttatcggaatagggaagttctcttctattttcaatttactgaaagttttatgttaaagagttatttattgtatcagatggcttttctatctaataagatgattatttgttttctcttttgatttgttaatgtgatgaacaatattcatggattttctgatggaaactattcttgtgtacctggaataaacccacttacggtatattgtctctttaaatatacatttgcattcaaattgcaattttgcttaagattttacacaggcctgagctttgtcttttttataacctcttttttttgttgttttgtgataagaattgtactaaccttgaatgagttgggwaatgtttcttcattttctattataaatatttggaggaacaaaaacatatgtcaatgtatacttttttgctggaatttcacaggaaatctattacagtggtcacattggagaggagggataaagacttaggggacagggagtgatgaagagggagagggaggcctctattttcattatagtctcctcaggctgtttgctttattcaccatgttcatgtattacattatttcttttggaaaaattttgaagaa

SEQ ID NO: 29406 - DNA, 1065 bp, Homo sapiens
cttacttcaaagagatgttacttgagagcaaatgtcccccaagatccacttagaaccagatatcacttgttccccagacatactctctctttttcccttacaagccatctctcccaatacccctacccaaggagattctatcttcaccaagctgctcaaattccaggtgagaggtaaaattccctttcctcaagaatctccagaaccatcgcgtgcagtaagtttttgccttcttactcaggaacttcaattcctacctaccctggaatctactgtgactttgaagcagaggtgtccaatcttttggcgtccttgggccacactggaagaattgtcttgggccacacataaaatacactaacaacagctgatgagcttttttttttttttttttgagacggactcttgctccgtgtagtgcagtgrcacaatctcggctcactgcaagctctgcctcccgggttcacgccattctcctgcctcagcctcccgagtagctgggagtacaggcgcctgccaccacgcccggctacttttttctgttttttagtagagatggggtttcactgtgttagccaggatggtctcgatctcctgacctcgtgatccgcccaccttagcctcccaaagtgccgggattacaactgtgagccaccgcgcctggccagctgatgagctttaaaaaaaaaaaaaaaatcccccaaaaatctcataatgttttaagaaaatttacaaatttatgttgggtcccattcaaagcaatcctgggccacaggttggacaagcttgctttaaaggcgtgaacacctccacatacaaagctgcaactgactctcttatctagcctggactacagcgacaccgatgctccattcgctgtaccacctgtcaagcttctctctggaccagcttctcagtagcagctgatgagtaactgcccttcaataagcttatcacttgtgaataaactgtatttcctactaccttcaaagggtgcttcacaccctttcagtcaccaatctgttatgaaatttcattccagtttcccagtgatccaacagagga

SEQ ID NO: 29407 - DNA, 1065 bp, Homo sapiens
cttacttcaaagagatgttacttgagagcaaatgtcccccaagatccacttagaaccagatatcacttgttccccagacatactctctctttttcccttacaagccatctctcccaatacccctacccaaggagattctatcttcaccaagctgctcaaattccaggtgagaggtaaaattccctttcctcaagaatctccagaaccatcgcgtgcagtaagtttttgccttcttactcaggaacttcaattcctacctaccctggaatctactgtgactttgaagcagaggtgtccaatcttttggcgtccttgggccacactggaagaattgtcttgggccacacataaaatacactaacaacagctgatgagcttttttttttttttttttgagacggactcttgctccgtgtagtgcagtgacacaatctcggctcactgcaagctctgcctcccgggttcacgccattctcctgcctcagcctcccgagtagctgggagtacaggcgcctgccaccacgcccggctacttttttctgttttttagtagagatggggtttcactgtgttagccaggatggtctcgatctcctgacctcgtgatccgcccaccttagcctcccaaagtgccgggattacaactgtgagccaccgcgcctggccagctgatgagctttaaaaaaaaaaaaaaaatcccccaaaaatctcataatgttttaagaaartttacaaatttatgttgggtcccattcaaagcaatcctgggccacaggttggacaagcttgctttaaaggcgtgaacacctccacatacaaagctgcaactgactctcttatctagcctggactacagcgacaccgatgctccattcgctgtaccacctgtcaagcttctctctggaccagcttctcagtagcagctgatgagtaactgcccttcaataagcttatcacttgtgaataaactgtatttcctactaccttcaaagggtgcttcacaccctttcagtcaccaatctgttatgaaatttcattccagtttcccagtgatccaacagagga

SEQ ID NO: 29408 - DNA, 503 bp, Homo sapiens
ttcccacatcccacttcacttcccggtccacacgtaaagcagtgtgtctccaaggaggcagtgagcaattcccaaggtccccrtgttgtgagaagcgcgctgctttctccctttgcaggggaaaaaaaaggctttcctggtgagatcatgagtccttccggcttcatttctcattgtgggtttaacttctaaaacgcaaatggagtttagagaggatgagcagaaccacaggacctgcccccatctctcactcactgcaattgcttctactctgggcacaagtagggtgtctgaagaccatgtttccctctggttctctagtttgcagataacacagaagacactggctagaaccttaagctttctgccaaaaagatgcagagagcagggcagtagctactggcagtggggtgtgaataaagagtcctttcacaaccaagttcactgaggatttggagcaccagcttcccagcagtatcgaggggtggagaggtgtacattca

SEQ ID NO: 29409 - DNA, 612 bp, Homo sapiens
acttgcccctctaggctgtaagtgcagaaggcagggcaggggctggggcaattttgttcgcttcattatccacagtgctttgaccagagcctgggacatcgtaggcacacattaaatgtctgtgatgtaacccatgaatgaatgcaaggatctcccagtcaccagaggggcatgagggggaggaagggcagcgcatactgagctttggtcacagggtggccatggtcaggatgcaggaggtagcagggaagatgggaacagaggaggatatggtggaagaggactcggatacacacggtctcactcaccctcctctgtgcatcagacacctcctgagcaatccccgtgtctcaggccctgagactgagaccctgcccctgccccagaacctcctcccaactcctggaagtggggtgataagctccacagtaggacatgcagtgactacccctgagtcccacgcrgtttgcacattttatttcattgaatgatttcatgggggaagtgttactgtttctttctgacaggtggagaaacgaaggctcatgccttctgaagccagactccacgactccgctccaaacttggctcccatttgggttcttttattta

SEQ ID NO: 29410 - DNA, 607 bp, Homo sapiens
ggcccaagggtcaccagtttgcaagtctatttgaagttcttgtgcgtggttatccatctaaggtgggggagaaggccccccagaatatgccagaaatggacttccctgccaactttggcgtgtgggagccacatgaaatcattttaytaaaaaatacgtgttaggtgacttatgctatactctagcacaacggggcaagtacacaacagctgtgtttatttttcccatttgactgcaggctcctctagggcaagggccattactgaatcttggtgtcccactagtatgtaatatgaaagacagcaaataggagcttggtatggaaggagatgtaaacacatcttttcaaatctcttgaagaactagacactcaaagagaagtcacttgctgttggcctcaatagtgaattagtgcagagctggcactagaacccatatctctaaatgattgctcctagggatagaagggacctgtgtttttcaggaaatatttgctgaattaatgagtccaaggaagaattacagcaaaatcaatgaatgtacgaacgagtgaatacaacctgcaatgaccatttggtttatggaatacattttttagtaagaatta

SEQ ID NO: 29411 - DNA, 532 bp, Homo sapiens
ccataattttaaatttgtcctgaaagtggaaaaactgactgaatacctttgtcacccaagatcaagtgaaggttcaggtctctaaagtaaaaattgttaaagaagtttgacacacattaagatatatgtcatgtgtgtatacatgatttagagttttgtgatctgatttaagtgaactaccttctcttgtactcagaacctggtaagtaatttgtggggccccaaataaatatgcaggacactttgtttgaaataatttttctgagacagggccatgtattactattttaccaaaatcccaagtgtcctgtctaggtctcactgcttgctgcacagaaagccaatcactgagacagtgagcatagtgagtattgccatattggaataaggctttaccaggtactgtagctgagaagatgggagatcagtttcaaatctgtctccctgaacwgactacactttgggggtttatatagtggggaaggaagcaatcatgaagaatgaagcgtctggaatctcattatgtggatgt

SEQ ID NO: 29412 - DNA, 528 bp, Homo sapiens
tgtgtttacacatctggttaatttccagttcactatgtacagagaaacctttaggacaaacttcaaatttgtaaggaggcagctttagactaaacttaacagcaacaagacctgtttaactaaaaggggatggaaagggccaaacaggtgtgrcactgaaattaacaaaataatgctaatgtaggataagactggtgcagtcagtagcaggaagcatagacagggtaagcagacaattcaataaatacttagtgattacttcccatattccagacctcaaaggttggaaatacagactgagaacaaagcaaaggatttttattctgctcacaatagttgtctctacagcacaaacagctttagaatacagacagaggaagaaagaatattgcatgttacttgacacttttctgttcctataaaaaggaaaataggagagattcaatatattaatgagtaaccaaacaggcaagtggagttaagcatggagtcatttagaactttctgaaggtctaagatctaaacttt

SEQ ID NO: 29413 - DNA, 522 bp, Homo sapiens
aaagcaactactgtgagtcaatgtcattagagatggatggatttggtgycgaccccagctcagcagttgttgtgagagctgggtcagggatatgtgtgctccaagagggacttgcctgaaagggctaagtgaacagatggaagaaagacaaatgtttttacagaaatgtgccccgtgctaaataatgagttgattttaatgagctatagcaggaatcaaatgcttttaaaaataagggttttggaaagtctcactggacagggcacacagaaagcaatacagggaggggatggcttggatttttttttttttaaacttgaccaatatatgaatggaagatcttatgttcaagatgtttccatgtaatcatctttcaagtatttttagtatatgtactctcaaagcttcattcccttttcctctaatttcctccttcaatttagttcagttgtagttttctaatactgggcctgatgtcattaaaccagagtactccctgagctatcaagtgtgtacccagca

SEQ ID NO: 29414 - DNA, 1131 bp, Homo sapiens
aagaaaaaacaaggaatctgccccattctccctaacctctccaaataccgtttgtcccgagagaaacttttttgactcaacttccccaccaagaactgtggaattccccgtgaacattcaaaacactaacaggtttagaaaagaaaaactatactgacttttggcctgattcctgtgaggtcaccagacccccatcttttgcaaagtcctgagaaaacagcagcggcaggaggtttatggcaatcccatcctgagtgtcgtattcttccagtccgtacagtgctttcacaggaaatggaaagtcactgcagagaaaaaccagaatctgatgctgcagctcaggaataygcagggctacagggaaaaccactagagcaaaccaatttcaaacacaacatcatggggagaaattagaagaacaaacagtgaaccttttaggaattttggagctaaaggtgcaggggtgctggggttgggaggaaagaagctgtgggactgggcagccgtggctgaggtgaagggtattctgaagtttgtatcagctactgacagaattgatgtaacttcaccagtacaaccaagccagcaggtaaacaatacctacccttccggaacaacacaggagtccactacgaaggcatcctggaaatcattacagatggtatgcccaacccattccttcaggaagcaaacaaacaaaaagggcagtgcagagtgtacttgctgtacagccctagataaattactcttaacctttctaagtctcagttccctcatttctaaaaagaaagtaataataaatatctcactattgtgaagtagaaaagagagagtgcacgaaaagcacttatcacaaggcctagcacagaacagggctctcagacagataatagccatcatcattaacaaagtccatctcttctttactattatgattgttattaagtgaaggaggcctcagagaagagccgtgaggcagggtagggcagaaaagcctttcccagttagaatttaggagaggtcacaggatgatctattttcacactgcaacagaagacttgaagagtgtagtaaagcagctctcatgctttattgctttaagaaaagacaattggctttaccagggctttt

SEQ ID NO: 29415 - DNA, 1131 bp, Homo sapiens
aagaaaaaacaaggaatctgccccattctccctaacctctccaaataccgtttgtcccgagagaaacttttttgactcaacttccccaccaagaactgtggaattccccgtgaacattcaaaacactaacaggtttagaaaagaaaaactatactgacttttggcctgattcctgtgaggtcaccagacccccatcttttgcaaagtcctgagaaaacagcagcggcaggaggtttatggcaatcccatcctgagtgtcgtattcttccagtccgtacagtgctttcacaggaaatggaaagtcactgcagagaaaaaccagaatctgatgctgcagctcaggaatatgcagggctacagggaaawccactagagcaaaccaatttcaaacacaacatcatggggagaaattagaagaacaaacagtgaaccttttaggaattttggagctaaaggtgcaggggtgctggggttgggaggaaagaagctgtgggactgggcagccgtggctgaggtgaagggtattctgaagtttgtatcagctactgacagaattgatgtaacttcaccagtacaaccaagccagcaggtaaacaatacctacccttccggaacaacacaggagtccactacgaaggcatcctggaaatcattacagatggtatgcccaacccattccttcaggaagcaaacaaacaaaaagggcagtgcagagtgtacttgctgtacagccctagataaattactcttaacctttctaagtctcagttccctcatttctaaaaagaaagtaataataaatatctcactattgtgaagtagaaaagagagagtgcacgaaaagcacttatcacaaggcctagcacagaacagggctctcagacagataatagccatcatcattaacaaagtccatctcttctttactattatgattgttattaagtgaaggaggcctcagagaagagccgtgaggcagggtagggcagaaaagcctttcccagttagaatttaggagaggtcacaggatgatctattttcacactgcaacagaagacttgaagagtgtagtaaagcagctctcatgctttattgctttaagaaaagacaattggctttaccagggctttt

SEQ ID NO: 29416 - DNA, 1131 bp, Homo sapiens
aagaaaaaacaaggaatctgccccattctccctaacctctccaaataccgtttgtcccgagagaaacttttttgactcaacttccccaccaagaactgtggaattccccgtgaacattcaaaacactaacaggtttagaaaagaaaaactatactgacttttggcctgattcctgtgaggtcaccagacccccatcttttgcaaagtcctgagaaaacagcagcggcaggaggtttatggcaatcccatcctgagtgtcgtattcttccagtccgtacagtgctttcacaggaaatggaaagtcactgcagagaaaaaccagaatctgatgctgcagctcaggaatatgcagggctacagggaaaaccactaragcaaaccaatttcaaacacaacatcatggggagaaattagaagaacaaacagtgaaccttttaggaattttggagctaaaggtgcaggggtgctggggttgggaggaaagaagctgtgggactgggcagccgtggctgaggtgaagggtattctgaagtttgtatcagctactgacagaattgatgtaacttcaccagtacaaccaagccagcaggtaaacaatacctacccttccggaacaacacaggagtccactacgaaggcatcctggaaatcattacagatggtatgcccaacccattccttcaggaagcaaacaaacaaaaagggcagtgcagagtgtacttgctgtacagccctagataaattactcttaacctttctaagtctcagttccctcatttctaaaaagaaagtaataataaatatctcactattgtgaagtagaaaagagagagtgcacgaaaagcacttatcacaaggcctagcacagaacagggctctcagacagataatagccatcatcattaacaaagtccatctcttctttactattatgattgttattaagtgaaggaggcctcagagaagagccgtgaggcagggtagggcagaaaagcctttcccagttagaatttaggagaggtcacaggatgatctattttcacactgcaacagaagacttgaagagtgtagtaaagcagctctcatgctttattgctttaagaaaagacaattggctttaccagggctttt

SEQ ID NO: 29417 - DNA, 1131 bp, Homo sapiens
aagaaaaaacaaggaatctgccccattctccctaacctctccaaataccgtttgtcccgagagaaacttttttgactcaacttccccaccaagaactgtggaattccccgtgaacattcaaaacactaacaggtttagaaaagaaaaactatactgacttttggcctgattcctgtgaggtcaccagacccccatcttttgcaaagtcctgagaaaacagcagcggcaggaggtttatggcaatcccatcctgagtgtcgtattcttccagtccgtacagtgctttcacaggaaatggaaagtcactgcagagaaaaaccagaatctgatgctgcagctcaggaatatgcagggctacagggaaaaccactagagcaaaccaatttcaaacacaacatcatggggagaaattagaagaacaaacagtgaaccttttaggaattttggagctaarggtgcaggggtgctggggttgggaggaaagaagctgtgggactgggcagccgtggctgaggtgaagggtattctgaagtttgtatcagctactgacagaattgatgtaacttcaccagtacaaccaagccagcaggtaaacaatacctacccttccggaacaacacaggagtccactacgaaggcatcctggaaatcattacagatggtatgcccaacccattccttcaggaagcaaacaaacaaaaagggcagtgcagagtgtacttgctgtacagccctagataaattactcttaacctttctaagtctcagttccctcatttctaaaaagaaagtaataataaatatctcactattgtgaagtagaaaagagagagtgcacgaaaagcacttatcacaaggcctagcacagaacagggctctcagacagataatagccatcatcattaacaaagtccatctcttctttactattatgattgttattaagtgaaggaggcctcagagaagagccgtgaggcagggtagggcagaaaagcctttcccagttagaatttaggagaggtcacaggatgatctattttcacactgcaacagaagacttgaagagtgtagtaaagcagctctcatgctttattgctttaagaaaagacaattggctttaccagggctttt

SEQ ID NO: 29418 - DNA, 1131 bp, Homo sapiens
aagaaaaaacaaggaatctgccccattctccctaacctctccaaataccgtttgtcccgagagaaacttttttgactcaacttccccaccaagaactgtggaattccccgtgaacattcaaaacactaacaggtttagaaaagaaaaactatactgacttttggcctgattcctgtgaggtcaccagacccccatcttttgcaaagtcctgagaaaacagcagcggcaggaggtttatggcaatcccatcctgagtgtcgtattcttccagtccgtacagtgctttcacaggaaatggaaagtcactgcagagaaaaaccagaatctgatgctgcagctcaggaatatgcagggctacagggaaaaccactagagcaaaccaatttcaaacacaacatcatggggagaaattagaagaacaaacagtgaaccttttaggaattttggagctaaaggtgcaggggtgctggggttgggaggaaagaagctgtgggactgggcagcygtggctgaggtgaagggtattctgaagtttgtatcagctactgacagaattgatgtaacttcaccagtacaaccaagccagcaggtaaacaatacctacccttccggaacaacacaggagtccactacgaaggcatcctggaaatcattacagatggtatgcccaacccattccttcaggaagcaaacaaacaaaaagggcagtgcagagtgtacttgctgtacagccctagataaattactcttaacctttctaagtctcagttccctcatttctaaaaagaaagtaataataaatatctcactattgtgaagtagaaaagagagagtgcacgaaaagcacttatcacaaggcctagcacagaacagggctctcagacagataatagccatcatcattaacaaagtccatctcttctttactattatgattgttattaagtgaaggaggcctcagagaagagccgtgaggcagggtagggcagaaaagcctttcccagttagaatttaggagaggtcacaggatgatctattttcacactgcaacagaagacttgaagagtgtagtaaagcagctctcatgctttattgctttaagaaaagacaattggctttaccagggctttt

SEQ ID NO: 29419 - DNA, 453 bp, Homo sapiens
ggagtttcaccatgttggcaaggctggtctcgaactcctgacctcagatgatctgcccgcctcggcctctcaaagtgctgggattacaggagtgacccactgcgcctggccataagatcctgcttctaaataaataaatacattttttgaaaattcacatggaaaaagstgattgccaaaaaagaaaaaaaaactaactacgtgataggccaattacaaacatatcaatatcaacctataaagcacaatggatattcactgaaccaactgtcgcattaggaaatgagaagaaagtgtgtgaggggcttcctgactaacactacagaatgacagtccaccaggatcacattgccgtcaacttctgaaattaatctgcaaaacttacaaagcctgaaaaaaaaaaaaatctcatctaagcactaaaggggaactggaagtttttgttttaaggca

SEQ ID NO: 29420 - DNA, 585 bp, Homo sapiens
tggcttcccaactaaaaagaggtggttctctcttaagttggtgtcatgacagaggtcattccttgaaggtctaggccaggagtctgcaaactatggcttaaggggaaacccagccctctgytattttcataaagaaaagtgtttcccaaacacagccacacccattcctctagggaatgtctatggctgcttcatgtgctgcaacagcagagacaagcagttgagacagagaccttctgacctgcaaacctaaaagatttactctctggccctttacaggagtttgccaactcctgctctaggccgtaagagtcatgtccttcccctcctcaagcagggctaatagaagaagccaataattcagaggtgactggcaccacgaggctttcctgaaagcaactaatgtacctcggccattcagtgccactcctgtcacctaagaatattctaaactctaagctgttcactttgtccacaattcttcctgcatccttcctgaatcactcttgctatggttcactatttgcccaatatgggcaaaatatttcacaactctgtgacttcaggctgggccacatgattcgc

SEQ ID NO: 29421 - DNA, 1794 bp, Homo sapiens
ctgtatctcctcccttcccccaaaatgaacaagacaacagcaaaagcacgagagagaaaaaataaggagaaatggagcatagggggagagctcccatttaggaggcagaggccactgctgctgcagcccaccgttagcaagtaccacccaccagccagaaatggcaccttcccagtggcagattttatttatttatttatttatttatttatttatttatttatttattgagatggagtcttgctttgtcacccaagctggagtgcagtggtgtgatcttgactcactgcaacctccacctcctgggttcaagcaattctcctgcctcagcctcctgagtagctaggattacaggcacccaccaccatgcctggctaatttttgtatttttaatagaggtggagtttcacagtgttggccaggctagtcttgaactgctgacctcaagtgatctaccagcctcagcctcccaaagtgctgggattcaggcatgagccaccgcactcrgcagatattaataaggcattcagcaaatgttagcttggccacaaagccctaggtttccagacatgctcatttcatccttaataaactgcctgtttaacgtctgaggaaactgcaccccagataacacagtggccatgtagctacttaggtggcagaaccaggatttgaacttgaggcttctaaatctactgattgcaccctattgtccaatttttagttataacaaggttctatatgactcagaatatactgttccataatgaaaaagaggtctttggaaagccttgctggtgttactgtctttaacctccatttcctgctaggcacacttacagactgaacactttaactatttcccaacctgtctagctagaggctcttgcctgtgaatgctgactggctaagatgtctttccttggcctacatatgatacactgatctctatttacaagggttcagactttgggagctcaatgttagtgaccccagactggctactttcccaaaaaatgcacttcagaattgaccacagttacctggataaagaataaaaataatgatcccttaaatgacctaaaatgtttagcatcagaagataatttatttctaagaaggaggcagtgaaatgcccagagctgggaatagtaagaattgagatttggatccagctctgttgctgaacagatgggtgacttcaaccaagggacaagctttctgggtctcagatcaatctgttggccataagcctcatggctgcgcaaggacagaatgagaaaacttgagaatgcccagcaaatgaagggcttggcactcctcctctagctatgtgaattatgtatctaaaggtggcctgttggatctcttttgttaggtttggtaagagcaagggtagtgatggaggagagacatcatcaacgctcttctgggggtgtccctgactatggaggcctgccctagaccttacatggttctaaacatggctcctgaactcagcagagacagatacacactgtacctacttcttggtgctccgtggtttggtccttagggtttgtagcgagtcacgcctccttaggaactgcacaaactgaggctcccacgtgggcagcccaccagccatgactatctacacccctgcctggtgtcttctgcttatgccttcctaacccagctccacactaggcacactaggctgggggagtcattctcgatgggatctaagccattcattcgaggatggaagttgtgaagggctggtgggtcacttgcagcactggcagcctccct

SEQ ID NO: 29422 - DNA, 1139 bp, Homo sapiens
ccagatcccttgctctattctctcagacctcttcagctctctgcacctccttcgtgctgacgttggcctgcttgccactctgggccactccaccccacaaatttgaccctccagctacctccctcccagcctccaacacaactctacttcctggcactgacctcatcttcctcccacgactcctgcatcaggctgggctgtgcctcctcagacccagccctagggctcctcccacaagtggcctgcttgaggggcagcctccaccacccatacatcctccacattggtggtggggtctctggtgggcacagcttccatcagcttccatctcctaaggaaagccagggtggccccattgaggccctatctgagggaccttcacagaaatgcccgcccaaaacaatgacaatgaccagaatgggagacacccgcatgtcttatgcaccaaatccaggagaggcagagatgtgtcacaactggagcaggaactagggagctcagacccagaggaaaggattcagaatgagcacactgggatcaaacaggagagaatgggttcccaaaagattacctcgggtgcagctaggactgctgtgggtcagctgagtgtctctggatgaggctagcctgcctccaagggcagatggaagggataagccatcactgtgcccacccaggccttggccaccctactcaaacagcctgggagggcatgcagctgccctgggttcctccagcaaagcctgagatgggccttgctctgccttgtttgccccgttcaccacccccatttcctgtcttccctttgttccttgccacgagtttctctctgactcctcccagatactgcagagggctggacattgacccccacaaccctgccaccagtcacataattgcagctgtgccccttccagctgattatcacccaccgccatcccaccagacgactctggatggcatcacatctatgcactgaaccactgcccctggagacctccatcctgtccrcccacactgccactccatcgtcccagccaaggcttcctccttttcactgggccaagcccctgaagcccctgtgaagttcaaggtcaagtctgcgaccagaggctaatgacttttgtctttggacctca

SEQ ID NO: 29423 - DNA, 1138 bp, Homo sapiens
gatccagccagcctgcagtaaccagaaagagcaggagctgcaggaataaataccccaatttctcttttctcttctcctctagtcttctgatcatatttcccattgactagagggaaagaaagcccactgatgtagtctatacaagttaggcaccagggatagagagccaagtctagagagatggatagaaggccaagtatagagtagtgaagaggcatgggtcagctggcatattggcgtgtgaccttgtttctgcctttagtttgttggagatgggagcaataatttagcacagagaaaaagagtcagtatactgcactgatatactctcagtgcaaaccaggggctgttgcagactgaggaagggctgtgggtaggagaaggcaggtgaacccacccgggtccaaaacagaccaactgataaaaaggagagtccacattaatgaatagattctgccttttggaggaggtgaggttggagttgaggagctggatggtctatctgcagttctgagtggtcttaaacatacaggttgcctgagttcaaattctaactcttctagctgtgcagcttttggagagttacttaaactctctgttcctcagtttcttcatttgtaaaatggaaatcatgctattaccagcctgatggggtagtgctgctgattaaatgagttaaaacattcaaagcacttagaataatatctagtacatattaaatactcactaaatcttagctgcttttattgttattattatcggaaagagtactgaatgaagaatcttcaaacttctataccagtattcattctgccatgacttgcttcatgaccttgggcaagttactttccctctttggctttgtttcctcttctctaaggttaagaggtgggatctgacacattttggctagaaaattctacattctgcaagtcccaagtccattacagattttgcaaaagcccccaaaggcaaagtgtgtttccagggcctctctggcttctgccaaagagagctccggtttcttctgttagcattggctggaggagttcccaataagggaccagtaaggctcctccctrcaggtgtctcaggggctgtgctaatctctttttgatggcctccatctgcagtggat

SEQ ID NO: 29424 - DNA, 544 bp, Homo sapiens
gcatgttaattaagacaagcatttccaacatagagatagcaccagcactatttgttaaatgtgttttctattataggtgcaatgatggtaacatttgatatgagtgaagaacttattacttttaggagcctgttaaagctacatgaatatattcaatattaagcaatctgccattaatgaagcaattactgggacaggatttcactggggtgtagagtaaaacacactgcttgcaggacaacttctaaccaatacacaaggccaggaaatgaaaacaggatctgctttgaaaatgacatttgaacaatacttattgagtggctctttgtcaaattcagaacacaattaactatcgtggtagaaaactgtgactgaagcctcgactttggcaccatctgtgtcctacatgtgtttttatttgatgagtgttttaagaactaagaacgtgggaagtgtacagacttattatttcctatgtgttaaagtagttatacaagaatacagkacaagagtctgatgattactaaattaaaaattgaaacac

SEQ ID NO: 29425 - DNA, 602 bp, Homo sapiens
tttagtttgtttaataagcagacaaagaaggttggtactggtgctagattagcccccagatggaaaaaggtgacattgtattcatttttgtgttgtatgtcccatcgcttcaacttgcaacaaatattgaagaattaccctagttaaagtggctatatgcctacttccttcctttagtaaaccatctgagctttcttctcccccattccacttgtatatgtgaccatgattgacaattatcatgtgatttcaattttcataatataaaaattattctagtattctgttcacatttttgcttcttaaactccaaggtatccaggaagcttatatttttaatgaaaataaaaacaatttaaaaaatatttgttgttgtgtttagtagtgtttaatctctttttaatagaactgactgaagaggattaaatacatgagaaatgaaatgaatattaaacwcttaggaaaaaataaatggctttgtcactggagaacacaaagaataagagtcaatacattaaaatggcaaaaatatatagtgggagttcatatattctttccaactgaacttcagatataagcaattcatgagatgtgatttgtgg

SEQ ID NO: 29426 - DNA, 569 bp, Homo sapiens
cactaaattccaggtgtctagagatgataacataggaagcaatatattgtagtaattaagattcaaactctggagtagactgctcaactccaaattccatctccagcacttaaaagttatatgagctcaggcaagccttttaacttctgtgtcttcgtgtccatcattatctgtaagatggggataataatatctatttcatacagttgttataagaatcaaatgagcttctacatacatatacagtgcttagaggtggacatggyattttactcactcaattattttcagtaattatgtatttcttttagccactatccactgtttctttctgtgtctttctgtgttcctatatctctccctgtcttactgtctctatctttgtctccgtatgcctttctctctctgactcctctctcactccctctgtctgtttttcttccccttcacaatccagttggaggaaagagttgttcattctcattacttctacttcatgacatcccatgcattcctcaaagcacctgatttctgcccacaccattctaatgaaaccattcttgccaaaa

SEQ ID NO: 29427 - DNA, 648 bp, Homo sapiens
ctgctgtatgatactacatttcctcacatcgtaagtccccatcctcaacttttttttttttttctaaaggccaagcagcaattagtaggaaatgttacatctaatatgcctatgatttgcttgaggccaaacaaagcagctcatgatactgcgttgctgctgctatttatgtagacattaggcacaggagcaggtttttaacaataggactgcttgggctttatgttacacatcaagaaacattttgtttatgctttataaatagtgtcacctatttataaccttcagccacgattcttttaatggcattctcaagtggcgtttggtttggttaacatcagccactcatgccttctgttctgttgcttgagaagttaaatgggartatgtgagttttagctggccaatctaataaaactctgggaaatcgttagggtaaaggaagttaagctataattgacatcatataacaaacattgaaaatgttgaaaagaaacagattggatgagttttatattatgaaaatgtcatctgacagatgcagtacagtagtttcatttgaaaagatctctacatacactgagtcttctattccattaaaagaagaaaaaaccctgaggtgacaggagattcctatgggggattagc

SEQ ID NO: 29428 - DNA, 519 bp, Homo sapiens
aaacactatccttcctttctctggggggagatatttttagccaccacactaattagatagctctctggctgataatggggcagacaaagggtgtagcatgttaaagaaaatgagcaaacaggtgcaatcaacttagagaatattaatcaaatgtcttttttttttgagatagggtctcactctgctgcccaggctggagagcagtggcatgatcttggctcactgcagccttgacttcctccacttcccaagctcgggtaatcctcctgcctcagtaccccccgagcagctgggactacaggtgcatgccaccaggcctggctaattttttgtagagacrgggtttcaacatgttgtccagactgaccttgaactccagggctcaaataatctgcccaccttggcctcccaaagtgctaggattacaggcatgagccaatatgcccagccaaatatcttaatcaccatcatcatcatcatcataaactgccggtaggaagtttggcataatgtgtcaca

SEQ ID NO: 29429 - DNA, 1137 bp, Homo sapiens
gatccttgactgacttcatacagtagaattccccctcctctcactgattcccctgggatatcaagaataagcacaatatatacagtttcattctagacattttgtttaaacaacagggtctacatcatagctcactgcagcctcaaactcctgagctcatgcaatcctcctgcctcagcctcccaaataggtaggactacagatgtgtgccgtcatacccagctaatttttaaattttttttataaacatggggtcttgctatgttacccaggctggtctcaaacttctggcctaaagcaatcctcacaccttggcctcccaaagcacacaggtgtgagccaccatgcccagcctggaattgtttattacttcagtataaccaagtctattctaactatatcaatgacaataaagtatcctttaaacttacttatttaatttatatgaggtgatttttggaaatattttaagcaaataataaatagtttggtttactatatgagccagaaattccactttttggaatataccccaaataattgaaatcagggatttaaacagatatatgtacaatcatgtacatagatcatcatttatattagccaaaggtagcaattacccagatgtctatgatggatgaatggatgaacaaaatgtggcatatacgtaacaacaaaatagtattcagcctttaaaaggaaattctgatacatgctaccatataaatgaaacttgaaataagccagacacaaaagaaaaaaacatattgtatgattctgcttatatgaggtaccaagaatagtctaattaatagagacaaaaagtaaaatagtggttactagagcctggcgagaggaggtacttgagaggtactgtttattggatttgcagtttcagtttaggttgatgaaaaagtccagaagatggatgatgatggttgcacaacaatrtgaatgcacttactgccattgaattgaatactttaaaaaggctaaaatattaaattctatgttatgtgcactttatcacaattaaaaaagacagttcaggtgatttctatctacagtagaactcattaagatgataattaaatgttgagaaatattgattgggaataagcatgagttttgggatcc

SEQ ID NO: 29430 - DNA, 538 bp, Homo sapiens
tacctattttaaaaacagttgctgtgagaataaatagtattatatgtaggaagggtgaagtatacaatatgagatttaattaattataagatttattacatatcttatacacattttttctcatcttttacttttttttcctccctacctcccatctttccttrcttcccctttcttccctttatttcttacttctttccttgatatttcaaattgcctggttgttagctggcccgaaatagatgcactttctagggaattaattacatggatgtaagttaatgtttcatctgctttccaattgaccaacactgtgagcaatctaaggtccacagctctgatttctgactcacagaaaatgttccatcattctttaaaaaactttgtcccagaattttgtatttattatcttcttttcttggtttagttcgtttagaataaaccgtatttcttattatgaaaataatatttattgtaaaaaatagcaaaataaagaaaagctgaaataattatatttcataaccttatttgaattaac

SEQ ID NO: 29431 - DNA, 538 bp, Homo sapiens
tacctattttaaaaacagttgctgtgagaataaatagtattatatgtaggaagggtgaagtatacaatatgagatttaattaattataagatttattacatatcttatacacattttttctcatcttttacttttttttcctccctacctcccatctttccttacttcccctttcttccctttatttcttacttctttccttgatatttcaaattgcctggttgttagctggcccsaaatagatgcactttctagggaattaattacatggatgtaagttaatgtttcatctgctttccaattgaccaacactgtgagcaatctaaggtccacagctctgatttctgactcacagaaaatgttccatcattctttaaaaaactttgtcccagaattttgtatttattatcttcttttcttggtttagttcgtttagaataaaccgtatttcttattatgaaaataatatttattgtaaaaaatagcaaaataaagaaaagctgaaataattatatttcataaccttatttgaattaac

SEQ ID NO: 29432 - DNA, 550 bp, Homo sapiens
gacttttttttttttttagatgggaaatatcagagcacgttgtatactgatggaagcccttacacactgtctctttcacgatggaattgggtactgtcctgctctgtccttggccttccctagctcaraaaatggccataaatgctcagggcagggaggctgacatgggcggatcacccgaggtcaggagtttatgattggcctggccaacgtgataaaaccccatctctactaaaaataaaaaaattagccaagtgtggtggcatgtgcctgcagtcccagctactcaggaggctgaggcaggagaatcgcttgaacccaggaggcagaggttgcagtgagccgagagtgcaccgctacactccagcctgggcaacagtgtgagattctgtctcaaaaataaaaataaatgctcaggccagaaagctagagtcatccttgacgctgctctctcactcacactccacattcagtcagttctggcaaatcctctgtctctgcctggaatctgatcacttcttagctccgcaacctttctacccggctgcag

SEQ ID NO: 29433 - DNA, 809 bp, Homo sapiens
gggtttgcttctttccaggcttgataataattgggagagacagaaggaatgttgttagcagggcaagatataatagtatcaaggagtctgttaggaaatataattcattcccacttggttcaaataaagagatgaccttaatgaaggtctgtttcagaagtatgggtgttaagggtaaaaacaaggggtggtaagacacccggaaaacagatgtcagcagcactcctaggcccagcaggacaaggacagaaaattgtgctgcaaaatataagacagagaaggcagggccacagacccagccagagagcagagaagaagtaccttaacctctttctctcctaactctgatctgctggtgctccccattggctgaacacaaccacaagatgcagytgggggctcaggggatgcctccagcctaggaggtcagcgttctagggcagagaactggcagagaagggcagaggatggatctggagagtcagaggatatcagcacaaggccactgtgaaaatgagctcttagcctatcagacagtggtcataaccaactctgtaaatttacaagtctctgtaaatttaaataatttattatttcagttatcatttaataactcttggcagattccttaggcacatgccagttctgtggtctggtcctccctccctcaacatcagaaaataattggagcagaatcaacaccagaacatgagtatgcacggcctgagggtggaagaacgttgcattccagacccatgagtcctggacctctttagtaagcactgtgttatttctaaaattagagcagt

SEQ ID NO: 29434 - DNA, 520 bp, Homo sapiens
tattagttatctgtatatatttcacaaaatgagtttttataattcaaattttcataaaacatttacaaaggttcaacttaaaaacatttaaatagagaactattttcarattttaattacctgatcttcataatcagatcctgtatcaatgatctctccagtgtccaatatcatcgaaggatcaaggtcacttgaacctaagattaggaaagaaaagataagtggatggaggttgtctatgtatgtttctaaagcaaacagtctctcactaggtttccatattttcctatatcacattaaattcacaaacatttctagactgttctcatctgccaggtacaatgttttgctggagattcaaaatgcagagactctggacactgtctgcatccttaagaagaagaaaatactgtgaggaagaataatttgtcaacaagagttattattaaaggttcagcaacccaagagagtgagctactaattctgattagtagtagaggtgatggtggagttaagattc

SEQ ID NO: 29435 - DNA, 523 bp, Homo sapiens
tgggaactttgccccttcctttaaaccaccagcctgacaaagctcytcttaacaatggtgctacatttggcatctgaagacaagatcaaagtgtttcataatcttctagcagagagttgagttgaacacgtatttgagatgatgaaaaaaggaacttagagaaaaacagtgagaaaatttttttctttaaaatttcttattagagacactaatattgcaatttatatgtaagagaagaaaaataccatttctcctagagaactaggtctgttaaagcagtttatatagagaaactgcaatttaatacaactggaaaaagttagcctagcatctaccacatttttttcaactctgtttactcagttatacaagtactttacagcaagcagacctctaattgtgtagttcagtgaatgagaaatgggacttgctgcggaataaattctggggtgtaactaaattacacaccatttcccatactttttttctttcaaattgcccattactttaaatgaaaacatgg

SEQ ID NO: 29436 - DNA, 1393 bp, Homo sapiens
tcttctggctttggaggtctactaggaatgactggtccctgcctgtggtaagctaaataatgccactccccttcccagagaagttcatgtattaatccccagaagctgtgaatatgttactttatgatgtggtttggctctgtgtccccactcaaatctcatcttgtagctcccataattcccatatggtgggacctggtgggagataattgaatcctgggggtgggtcttcccatgctgttctcctgatagtgaatgagtctcacaagatctgatggttttaaaaacaggagtttctctgcacaagctctctctttgcctgctgccatccacataagacgtgacttgctcctccttgccttccgtcatgattgtgaagtttccccagtaatgtggagctgtgagttctccattaaacctctttcctttgtaaattgatcagtctcaggtatgtctttatcagcagcatgaaaatggacgaatacactttacattacaaaagggaatttgcagaggtgattgagttaaggatcttaagatggggagatgatactgactactcaggtttggtgcacaggagggtcactgtcagagaggagacataatgaaagaagcagtgcgagaaagcaaggaagagaggggacaatagaggagtgagagatttgaaaaggctggccttaaagatgacagaaggagccataaagtagggagtgtgtagcctctagaagctgaaaagggcaaggaaatggattttcccctagagcctccagaaggaaccacccctgacatttgttttgttttgccctttttttttttttttttttaagaaatggggcctcatcttgcctctcaagctggagtgaagtggcacaatcatatctcactgcagcctctaactcctaggctccagtgatcctcttgcctcagcctcttgagtagctgggaccacaggggctgggcaccatgcctggtttctgttgacatcttgactttaggacttccagtctccagaactataagatgataaatttgtgttaagtcactaagtttgtggtaatttgttatagcaaataggaagctaatagacggcctaaatatgctggactaaagcccaccactggctgagcctcctactccagtggcccccaggcacacaygaatacaaatgggcagccaggaatctcaaaacttaggagaaaacttttaaatataaaggaaagaggtcccaataaacaaaatccaaaggaaacaaaaataatgcaacagacaaagaaaatttagaaagcaatttaaacattattctcagaaagatacaagaagatattacacccacaaaactaaaaacatatggtttgaaaaaggaacagttaaagaaagaaagagctcttgaaaa

SEQ ID NO: 29437 - DNA, 509 bp, Homo sapiens
cccctaattaggctttatttttaaaaaagaaaaatgtccaaaactttcttccgcctctcatcagtgctcctcagcaatgctaaaagccaagtgaacatgttcttgggggaggctttgttcccatctttaactaatattcatcacaaataaagcaaacagatcwgaccagtgtccatgtgtaatggctggctgtatatttcatatacgtattcaggagctattttcttgagtataaagttctttccttatagcacaaagcaaggagatgatgttggcaagtgctataatagctacacatgtttatagtaatttttaacatctattaagcacttattacatgcaaaacgttgtgccgagtttcttatattaactcagcaattcttcacaacatctctaggaagtaagaattattatctctatatcacagacaaaaaaaaaaaggactagaagagtaatttacccaaggttacataaatagtttcacaataaggatgtgaacttagggcaca

SEQ ID NO: 29438 - DNA, 509 bp, Homo sapiens
cccctaattaggctttatttttaaaaaagaaaaatgtccaaaactttcttccgcctctcatcagtgctcctcagcaatgctaaaagccaagtgaacatgttcttgggggaggctttgttcccatctttaactaatattcatcacaaataaagcaaacagatcagrccagtgtccatgtgtaatggctggctgtatatttcatatacgtattcaggagctattttcttgagtataaagttctttccttatagcacaaagcaaggagatgatgttggcaagtgctataatagctacacatgtttatagtaatttttaacatctattaagcacttattacatgcaaaacgttgtgccgagtttcttatattaactcagcaattcttcacaacatctctaggaagtaagaattattatctctatatcacagacaaaaaaaaaaaggactagaagagtaatttacccaaggttacataaatagtttcacaataaggatgtgaacttagggcaca

SEQ ID NO: 29439 - DNA, 1085 bp, Homo sapiens
aaataaataaataaaaaagatggctgggggcagtggctcatgtctgtaatcccaccactttgagaggctgaggtgggtggatcacctgaggtcaggagttcgagaccagcctgactaacatggtaaaacctcatctctactgaatataaaaaattagccgggcatgatggtgcatgcctgtagttccaggtacctcggaggctgaggcaggagaatcatttgaacctgggaggtggaggttgcaatgatccaagattgtgtcattgcactgcagcctggtcaacaagaacaaaactctgtctcaaaaaaatataagtaaataaaattaaaaataaagatattcactgaacctgttactatgatatatttaagcaagacatggcgaccctaaaaattagagatcattgaagaccaaagtaacaacatgtggtcattatttctcaaattgaagtatataaaataaataaatttaattgcatgcttaggtaagaaaatattgataaaaatgattgaatattttatcttatttcataattctaagcagggctttagcacaatatgaaaactagattattcatgtaatccaaataaaagacaattttcattctaattttaactcagaaattattttgcttatttaacaattttactgaaaggtaaatgagataaataggacagattataattacctaacattgytatggtaacttatgtacaaatagctgttcgtcactgaaagtcaaaaaagtaaccagcgctgcaacttaagatggatcatacaacagaaattagtaccaagttaccttatcttataatattatgttattaaaatgaaattttaaaacaacaccaaaaattaagttggggctatacaaagtgtgcagaaaagatttcatataacaggcaagagactgccatccttagaaaggcctgcatgcaaggctggcccttggctggtgtttaggaaattggaattgggagggtttccaccattccctgagaagagtggctcactgtgtctaaagtttttatagaaaccgccaatgggtgaaatccaaagcagcagcgggtgtatccattaacat

SEQ ID NO: 29440 - DNA, 613 bp, Homo sapiens
tgctatctcaccaaagccacttaatagattttctaagataaagccctccaaatattttaaacaacgtactcaatgtctacccatctactcccaagagtcttctgtctgcttaagcatactcatttattcaaaaacattcattgcatcatttattaaacaagtayttactgaatgggtcatacattacaggtaccattttaaacgttggggaagcaagtcttgacacaagtgtgccagtgtgtgcacatgcatacaagcatgcaagtaagtgcttacatgcacctttgcatctctttggaagaactgagttgactggttatactgatgatagggttagaagggatggaaagttaaggaagagagaggaccaagtttaaagttcctaagacatgaaaatgtttggtgttgtagaaaaccagatagaaggtctatagcacattctcacaaattaggatttaattctagaccaataggatgccagccactatcgatagatgttaagtatgtgacgtaactttaaatcaactgcctgtcctgtctttatcctgtaaaagctctgtaacagtgaaacagtgaaagaactaaccattatgttacctccattttggttaat

SEQ ID NO: 29441 - DNA, 613 bp, Homo sapiens
tgctatctcaccaaagccacttaatagattttctaagataaagccctccaaatattttaaacaacgtactcaatgtctacccatctactcccaagagtcttctgtctgcttaagcatactcatttattcaaaaacattcattgcatcatttattaaacaagtacttactgaatgggtcatacattacaggtaccattttaaacgttggggaagcaagtcttgacacaagtgtgccagtgtgtgcacatgcatacaagcatgcaagtaagtgcttacatgcacctttgcatctctttggaagaactgagttgactggttatactgatgatagggttagaagggatggaaagttaaggaagasagaggaccaagtttaaagttcctaagacatgaaaatgtttggtgttgtagaaaaccagatagaaggtctatagcacattctcacaaattaggatttaattctagaccaataggatgccagccactatcgatagatgttaagtatgtgacgtaactttaaatcaactgcctgtcctgtctttatcctgtaaaagctctgtaacagtgaaacagtgaaagaactaaccattatgttacctccattttggttaat

SEQ ID NO: 29442 - DNA, 842 bp, Homo sapiens
ggctcactgaaatacctcctagaggtactcatggttcactaaatttccatttaagataactgggcatctcaaatgctttggtctaggaggatgctaatccctctttgacattcatcaagtctgcgtccatctagggagattcctttgagggccaaagacccaaggaagagagacagctttataagtgccagtgcagcccacgtagaacagcatcctgagtcaaatggaagatgctggcatggagtggaagggctgcatgagaaagaagctacagagaagaaaggaccagtaagttgctgaaggtcctttgttttgtggataaaggaagtcattggagtgamctctctaatatcccttatctagcatgactatatgcagggttatggaatagggcagcttccaggaaaatggccaatctgttgttagggctgctgttctatcatatctcccgtgatgtttttgatggggaagacagatctggacttgttactgggctatgccttgtagagaatgatacagggttgtggcaggcaaggaaacataatctcagcaattgctccaattgatgaagcttctaacatttcagagtgctttcctccacagccccattaaacctaatcatttctctccaaaagaggcagggcccatgtggaaatctttcaacatagtaaaaaagctaaggtttagaaagattcagtaactttgccaaagccatatggaaggattgtccaaaaacctgtgcaagagctcatagcttcccactccaaataccttacgcttcattgttgtcagattatttttcaatcttttcttagagctcactgcaacattgctcactggaa

SEQ ID NO: 29443 - DNA, 842 bp, Homo sapiens
ggctcactgaaatacctcctagaggtactcatggttcactaaatttccatttaagataactgggcatctcaaatgctttggtctaggaggatgctaatccctctttgacattcatcaagtctgcgtccatctagggagattcctttgagggccaaagacccaaggaagagagacagctttataagtgccagtgcagcccacgtagaacagcatcctgagtcaaatggaagatgctggcatggagtggaagggctgcatgagaaagaagctacagagaagaaaggaccagtaagttgctgaaggtcctttgttttgtggataaaggaagtcattggagtgaactctctaatatcccttatctagcatgactatatgcagggttatggaatagggcagcttccaggaaratggccaatctgttgttagggctgctgttctatcatatctcccgtgatgtttttgatggggaagacagatctggacttgttactgggctatgccttgtagagaatgatacagggttgtggcaggcaaggaaacataatctcagcaattgctccaattgatgaagcttctaacatttcagagtgctttcctccacagccccattaaacctaatcatttctctccaaaagaggcagggcccatgtggaaatctttcaacatagtaaaaaagctaaggtttagaaagattcagtaactttgccaaagccatatggaaggattgtccaaaaacctgtgcaagagctcatagcttcccactccaaataccttacgcttcattgttgtcagattatttttcaatcttttcttagagctcactgcaacattgctcactggaa

SEQ ID NO: 29444 - DNA, 560 bp, Homo sapiens
atttttgccatggtggaagctattgcaggtttatgagcaagaaacaaaaactggaaagctatgttcaaaggttaaaatgttatttttaatatattagttatgggttgatttttgatataattattgttaaataccaaaaaaatctggaagaaaataaaattcttttgttgtatcaattcttattaaaaactaaatgtatttcctttcagaggtttcttattgcctgtatgtttgaataaacatatactcccaaatgatggagtaaatcatccttctttaatggtgaatgtaatttgataaagagtaaaattatctaaatgtatctacagaaaatttcaatgactaaagagcacaagcaataatggagrtaaagctagtttgactttgagcttttagaggagaattctgaaggggttcaacacaatagttttatcctggatgcgtggaagtatgtaacccatttgatgtacaaggcctggcatttttacttaatactcatttattactttacatcctaatatcacataacattttatctttgatgttttctctattaaaat

SEQ ID NO: 29445 - DNA, 534 bp, Homo sapiens
ctagcattgagattcacattaaagtgagaagttatgaacaagcagtgcttataagtatattgcttacaatacactttagaaacgttctacaaagtatagaaacccatgatacagtataagattgttacacagttggggttgtaggtttctgtgctagaaaaatggtcaatttggagaacacaaaagtaattttgttgatgaactgtagtgttagaattgtatataaatcttaaaaatctattaagaatatctcggcygggcatggtggctcacgcctgtaatcccagcactttgggaggctgaggcaggcggatcacaaggtcaggagatcgagaccatcctggctaacacggtgaaacccgtctctactaaaaaatacaaaaaattagccgggtgtgttggcgggtgcctgtagtcctagctactcgggaggctgaggcaggagaatggtgtgagcctgggaggccacgtggtagtgagctgagatcatgccactgcactccagcctgggtgacagagcgagactctgcctca

SEQ ID NO: 29446 - DNA, 534 bp, Homo sapiens
ctagcattgagattcacattaaagtgagaagttatgaacaagcagtgcttataagtatattgcttacaatacactttagaaacgttctacaaagtatagaaacccatgatacagtataagattgttacacagttggggttgtaggtttctgtgctagaaaaatggtcaatttggagaacacaaaagtaattttgttgatgaactgtagtgttagaattgtatataaatcttaaaaatctattaagaatatctcggctgggcayggtggctcacgcctgtaatcccagcactttgggaggctgaggcaggcggatcacaaggtcaggagatcgagaccatcctggctaacacggtgaaacccgtctctactaaaaaatacaaaaaattagccgggtgtgttggcgggtgcctgtagtcctagctactcgggaggctgaggcaggagaatggtgtgagcctgggaggccacgtggtagtgagctgagatcatgccactgcactccagcctgggtgacagagcgagactctgcctca

SEQ ID NO: 29447 - DNA, 2187 bp, Homo sapiens
ctctttaaaaggaagagagttcccttatctgcctcatttgctgcatatttttctcatagagaatttgagaattttcaagtgcctatgcaacttctgagatgattatgtggtttttttctttattatatgaatatagtgcatagcactaattgtattgtatgttgaactaaattttgcttttctgaggtaaatacccttgacatagtgtataatactttttacatgtttctggtttgttttactaatatttccttgatgatttttgcccctgtattcataaggtatattgctcttcattttccatatttgaaatgtctttgtctagttgtggtatcagagtaaactaaatcagtatacartgggaaatcatgccttctccacattatgggaataatttgtaataaattagtattaattgtttaagtgattccaataattcactaatgaattcttcttgatgaggtcagagaggttaatcctaagaacagttacataagcttggaaggagacctttccccagatgggccatagcctgggccatcacctacatctggactgaagaaccagagaaactgtgagtaatatgtgtgtggttttgaaccactcagatgtatagtaatttgttatgcaccaagtcttaagtaatatacctgacagtaattgcaatgtggtattctagattagtcttggaacagatgaatatatcattattagaaattctggtaaaatatgaaggaagtctgtagatcaattaatagttttgaaacatagtgaaattcttagttttcatgaatatactatggttataatagtaacattttagttagctgaagggtatatgaaactgtctgttctacctgtgtatctttttgtaaatctgcaattatttcaaaataaatttgtttgctaaaattattatattttttaaaagaaaacaaagacataaaaaaactggcttccagagatgaatgggcacatagggagagaatagcaaagtagcactctttttatctagtcacctttcaaaacccaggtgcacctgcttcaagagggctccatcaagctccagggactgtcatcctttttctccttctccattacccagtcagcagttggagtgtcagcaaccatctattcagaaaaagctgcctttccttcacatatcccagaaagccccatgtgtagacatcatttagcagtgtatattcaggatcccactgaagcatttttgggagatatgactctcagatattagaagccaggaataagaaatttcagtgacagggaacataaatcatatttctgcattcaggataatgttttcttggtacagggatttcttcttcaagtaatcaaaagacaactgtaccttcaaaccattcagaaaaatatgttctaatttagttcttttcattctacagactccatcaggaatcgtttgggaccgtgggttctgttgacactcacattgtgtaattatgttgcccactgccaaccctaaagccaccaaggtagcaggtaagcagagtacaacaaatgtttctaataaattggtttaggccagtctctacttacagagacctggatatgaatcttttacacaacagaatttttgcagttggatgctagtgtgtggagaaagcagctgatgaagtgctgagcaatgagtcctcagacaaactaactgcatggaagatgtgatttcccacaatatcttaaaccaactgttccttagaggctggcctggacaccacaattctaaaagagatgccatttaaaagaaaccaaattctagaccagatcatgaggcagacatccaactctttgtctccacattctaacctgattagaagttggagttcaatggaagaatgtcttggatatttgagagcatgactttatctttatttaatttagccttgctggaatttaaaactgtagggcaaaattcagtcaacctcctaaattatgtgagtttttgtttttgtatgtgagtttctgcatacacataaagaaactcccatagtttaggaggttgactgaattttgggtgtacagaaactcatactttatgtgtttctccttcaatcagtatattcctgagggaaaaccaataccaatcctcaaatccaagtacccaaattagggttgagcagagtagcaagggggcagattaaaacattttat

SEQ ID NO: 29448 - DNA, 2187 bp, Homo sapiens
ctctttaaaaggaagagagttcccttatctgcctcatttgctgcatatttttctcatagagaatttgagaattttcaagtgcctatgcaacttctgagatgattatgtggtttttttctttattatatgaatatagtgcatagcactaattgtattgtatgttgaactaaattttgcttttctgaggtaaatacccttgacatagtgtataatactttttacatgtttctggtttgttttactaatatttccttgatgatttttgcccctgtattcataaggtatattgctcttcattttccatatttgaaatgtctttgtctagttgtggtatcagagtaaactaaatcagtatacaatgggaaatcatgccttctccacattatgggaataatttgtaataaattagtattaattgtttaagtgattccaataattcactaatgaattcttcttgatgaggtcagagaggttaatcctaagaacagttacataagcttggaaggagacctttccccagatgggccatagcctgggccatcacctacatctggactgaagaaccagagaaactgtgagtaatatgtgtgtggttttgaaccactmagatgtatagtaatttgttatgcaccaagtcttaagtaatatacctgacagtaattgcaatgtggtattctagattagtcttggaacagatgaatatatcattattagaaattctggtaaaatatgaaggaagtctgtagatcaattaatagttttgaaacatagtgaaattcttagttttcatgaatatactatggttataatagtaacattttagttagctgaagggtatatgaaactgtctgttctacctgtgtatctttttgtaaatctgcaattatttcaaaataaatttgtttgctaaaattattatattttttaaaagaaaacaaagacataaaaaaactggcttccagagatgaatgggcacatagggagagaatagcaaagtagcactctttttatctagtcacctttcaaaacccaggtgcacctgcttcaagagggctccatcaagctccagggactgtcatcctttttctccttctccattacccagtcagcagttggagtgtcagcaaccatctattcagaaaaagctgcctttccttcacatatcccagaaagccccatgtgtagacatcatttagcagtgtatattcaggatcccactgaagcatttttgggagatatgactctcagatattagaagccaggaataagaaatttcagtgacagggaacataaatcatatttctgcattcaggataatgttttcttggtacagggatttcttcttcaagtaatcaaaagacaactgtaccttcaaaccattcagaaaaatatgttctaatttagttcttttcattctacagactccatcaggaatcgtttgggaccgtgggttctgttgacactcacattgtgtaattatgttgcccactgccaaccctaaagccaccaaggtagcaggtaagcagagtacaacaaatgtttctaataaattggtttaggccagtctctacttacagagacctggatatgaatcttttacacaacagaatttttgcagttggatgctagtgtgtggagaaagcagctgatgaagtgctgagcaatgagtcctcagacaaactaactgcatggaagatgtgatttcccacaatatcttaaaccaactgttccttagaggctggcctggacaccacaattctaaaagagatgccatttaaaagaaaccaaattctagaccagatcatgaggcagacatccaactctttgtctccacattctaacctgattagaagttggagttcaatggaagaatgtcttggatatttgagagcatgactttatctttatttaatttagccttgctggaatttaaaactgtagggcaaaattcagtcaacctcctaaattatgtgagtttttgtttttgtatgtgagtttctgcatacacataaagaaactcccatagtttaggaggttgactgaattttgggtgtacagaaactcatactttatgtgtttctccttcaatcagtatattcctgagggaaaaccaataccaatcctcaaatccaagtacccaaattagggttgagcagagtagcaagggggcagattaaaacattttat

SEQ ID NO: 29449 - DNA, 544 bp, Homo sapiens
tgacccctgcctgcaccatctctccttcttgactcctagcaccccagaggatgagtacctaaaagaggaggagagataggggtgtgtgcatcttcatcctcctctgcttccaacatttaaaggtcactgctcaggtctgtgctgcaaggacagggtcgggggatgagttttaaatagacttagaaattgaaagttttaaatagacttagaaattgaactggactcataattaaacaaaggtgacaagaaagttatgaaatcagctgaatatggtgttaagaaacaggaaataggggacttatcggagcatagcttatagtggtaattgggaaaataaaactgttatactccactgagttttatcttctcaatacattcattgttaaacctattcctgagccattacctgcatgtattttcctgattaagarctaactttctaatttcaggagtggggttaaatgcaggctgttttttctttaaagtgtgggcattaatttagggaagatggtctggtaaccacaggtaaaacccaaccaagctt

SEQ ID NO: 29450 - DNA, 528 bp, Homo sapiens
tggttcatgcctgtaataccagcactttgggaggctgaggcaggtggatcacctgaggtcaggagtttgtgaccagcctgactaacatggtgaaamccccgtctctacaaaatacaaaaaaaattagccgggcatggtggcgcatgcctgtaatccaagctacttgggaggctgagacaggagaatcacttgtacctgggagatggaggttgtgataagccgagatcgcgccattgcactccagcctgggcaacaagagcgaaactccatctcaaaaaaaaaaaaaaaaaagctttatatactattttaaaataaatgacactagtttaaggttacacttagagaaatttcaagcttactttaaaaaactaaatacttgaacatatacaattcttctaaggactaccaacctcatatctattaaagaaaacacttgtgaattaataggcatggttttcacatgatcacaggatgcttgatcattcattggctagggttatcacatacaaagctacttcaggctacccg

SEQ ID NO: 29451 - DNA, 1895 bp, Homo sapiens
  misc_feature (1)...(1895): n = A,T,C or G
ggtttcaccatgttgggcaggctggtttcaaactcctgacctcaagtgatctgcccgcctcagcctcccaaagttctgggattacaggcttgagcctctatgcccggccacctaaggtctgtaatttttaaatgattgtgttcattgagtcatattttactccactttctaatattttagtatctttttttttttttcactccaggaactagaagatgtgaacaaatggggtcttcatgttttcagaatagcagagttgtctggtaaccggcccttgactgttatcatgcacaccatttttcaggtaaggtggttgagttgtattacatttattttatttaggaacttaatgtccagtctgtagcttatgcatacattttgtcttttttaatattccccaccttttgcttatttttatacttttatccttatttgctcctttgccaagggacaagtaaagatacagaaaggtggagtgtggataaaccacaaataacatcaattttgttattttttttgcatttaagaaaaagatgtgatatagccaaattgaagcaatttattaaaataataatttagacatcatcttagtcatctgaacctgactgcatagagaatggagtactaacttaaaaaaaatgaataaagcccctgctggctactaaccttagaatatagttttttcagtcaytttcttgtgtcctgcttctttcttcatatccatttctctctcttattgaccctttgctccagcttagggtgggatttaaatgagaagttgaggctgctgtagatatctcgggaccgaaatgggaaacttcagccctagagaggacgttgatttttagttggtgtgatgcaggggttgagttaatagtgcttgactggagctgcctccatgataatgggacatagaaacttttagagttggcacctcattcctgacaccatacagctagggcgtagtattcttgggttccagcaggacaacccaactctggttttgtcccagagtccctggatcttctcagaggttcccattttcctcactagacatgtgagagtgcagttgccatttccaggttatccactggcaacactggtgtgtgattttcttttttaaacatactctatggagaaatttttcacataaagacaaaaatgttaagatgattgtttttcctacaggaacgggatttattaaacacatttaacattccagtagatactttaattacatatcttatgactctcgaagaccattaccatgctgatgtggctatcacaacatatccatgctgcagatgttgtcagtctactcatgtgctannnnnnnnnnnnnnnnnnnnnnnnnnnnnnnnnnnnnnnnnnnnnnnnnnnnnnnnnnnnnnnnnnnnnnnnnnnnnnnnnnnnnnnnnnnnnnnnnnnnatgtgtaaaagattatatatttctggaagcatgcctatttacactagttattattactttaggagacagatattctctttgtttaaattgtttccacaaagcataccacgaagtacagaggggacattagtaactattttatgatgattatggtattcatttaggccaatttaagtgaattggagatcctaattttctctataaggagacaatactttttcatacaagattatttttgtggaggcttcatttatgtgaagtttttgcacccatttattgtcatgattattcttcagtgaaacaaaagtctgtagtagatatgctgctgctgctggttttaggtaaattgactaaatagttatacaaaactctgtctctaccatatatgaattcaaactgtatcaacaattacagaatactatgctaacatctaataagagagttagcccatgtagaagagaaatat

SEQ ID NO: 29452 - DNA, 463 bp, Homo sapiens
gaattcataaatcaccttttccttggaaattttatcttaggaagaaatacagtccatagaatgaaggttgtaacagctccatcattgttaaataaatatgatcgggaaacaatcagaaacatggtattttatttttatatgagttattttgcttcatgggaaccagcaatatttcatacgtatgatctttccacttttaatggcattggtcctaagagtttgagataaaagttattttaattattattaggagaaagtggtactaataatagcttatatcagtttatttgcaataacackactagaatgagtaagtggaacagttgactaaccacagtgatttgcatgtgggatcctgtaaaatcatctaatgaaattaacaattaaatgaatttagtagctgttttttttctcgtaaaacttttttgaattttccggtgttttcttcttctacacaggtcgt

SEQ ID NO: 29453 - DNA, 544 bp, Homo sapiens
gatggacagagttttatgtccctgcgaattcgtacagcaaaatcctcaccgtgaaggcgggggtgttgggacgcggggcctttggaaggtggttaagtcatgacggtggagctctcatgagtggcattattgcccttaggaaatgaaccccagaaaggcctgtttttccttccaccgtgtgaaggtacaataagatggttgtctatgaggactcagaccctcactggcctctgagcctgtggcaccttgatcttggacttcccagcctccagaactgcaagaaataaacrtttataaaccacccagtctacggtattttgttaccgcagccccagtggcctaaggcatgcagaatttggccatccaatattaatggagagactgtcaggttatttgtagcctgtgggaggcaggacctgagagtgatttgaaggaaggagagagagagtttgctgatactggaccaaactccagtgtgggaggaagtctgtgtgtggggttcacactgggtgtccactgaagcctccctaaggaatgagcttcc

SEQ ID NO: 29454 - DNA, 544 bp, Homo sapiens
gatggacagagttttatgtccctgcgaattcgtacagcaaaatcctcaccgtgaaggcgggggtgttgggacgcggggcctttggaaggtggttaagtcatgacggtggagctctcatgagtggcattattgcccttaggaaatgaaccccagaaaggcctgtttttccttccaccgtgtgaaggtacaataagatggttgtctatgaggactcagaccctcactggcctctgagcctgtggcaccttgatcttggacttcccagcctccagaactgcaagaaataaacgtttataaaccacccagtctayggtattttgttaccgcagccccagtggcctaaggcatgcagaatttggccatccaatattaatggagagactgtcaggttatttgtagcctgtgggaggcaggacctgagagtgatttgaaggaaggagagagagagtttgctgatactggaccaaactccagtgtgggaggaagtctgtgtgtggggttcacactgggtgtccactgaagcctccctaaggaatgagcttcc

SEQ ID NO: 29455 - DNA, 409 bp, Homo sapiens
  misc_feature (1)...(409): n = A,T,C or G
ggnnnnnnnnnnnnnnnnnnnnnnnnnnnnnnnnnnnnnnnnnnnnnnnnnnnnnnnnnnnnnnnnnnnnnnnnnnnnnnnnnnnnnnnnnnnnnnnnnnnntataatctgttttttaaaaaactactgtaattaaagatgttgcagtgggcctggstatagaaaaaggaaattctgtttggatgcaccaaggaagggtctgcagagaaggaggccactggctggaagggaatgacgcattaggcactgggtagaggaggggtgagagattcccaagctctggagcatcatgtccaaccctgagatagaactatgcagggaggaatagatggtgttccttatgacctgggcaaaagctacttttagaagggggtttagaaataatgccagagccaggtgcagtggctca

SEQ ID NO: 29456 - DNA, 1198 bp, Homo sapiens
ctaaaaaaaataggaatcatcccacccactccaaagccccagatctggttactttattctcagtagcaggatggaagaaagaaggaagagggaaggaaggtaggaaggaagccaaaattaatggatattaattttgaagagtattggtgatgatccttgtcagcaatgtattaatacttcctagattttcttatgactctcctttttttcatataaaatctgatgaatgtgacaagtttatgcctgattgtactggtagagtaataaacttaagtttgtaagtgcatggtgactttcagcaatatccagtaaagggacttgggaaaaaaataggttttaggaaccctatcaataaaacataggtaattaaagaactaaaaatggtgtaactttcgtatggtagttagagaaatttaacaggcatggtgacagtctacattattagtagatgctgtggctatacatatttatactataagtccaaggcaccccatataaaactatgaacaatcaaagagatatcgggtctttgcagatagatgtcctaactacttctcattttccataggtctgttgctaccaggtatgtgattaggaagctgtcataacctaaattactcctttgttgagtctctgttgggtgtaattccattaattgctttacaggagagagaaatagcttgggatagacaagttttgaagagaattaagaacagcagttgtgcttcagagtagaatccaggctagtgacatacaagagcaataatccgaatttgttccattctcaggtagtcctacttctaatctttatattgaagttttatgactactgtaaaattaatttggaaatagcatagaactatccttctccttcagatgacttctgatgagtccattcttagttgtacagtcttacagaaccgggaaaaatgattcagtgaaggcatcacagccttcttgctactttgctttggttcattcaaagcttgctgcttctaaactaagacttccttgggattacccttgctagtctctcccagggtcctgtttcaagggtatgtaggcatggtgttgattccagtgctagagtactgctctacgaakaggccccaaatgatccactgggccaaaatatctttgcatgttctataatgtactttataatctattcatacagcactacatttgtatggtttat

SEQ ID NO: 29457 - DNA, 557 bp, Homo sapiens
taagcacaggataggcatgtgtcaaaatttgtttaactcgatgaaagaaccagaaggaagcatttgagaaactagatatttataaggactgaagttagagaggattggatgttggaagaytgagagattagaaactaagctggctgaagtcctatagggcaataaaaccataacctctgtgtttttcttttttctatcagacagaaatcatttgcatctccaatagacagaaatttaaaggtatcaagcaatatcacagagtgagctctaattaaaataattaacaatgacatattcccctagaaaactaagcaaattttgggttagcctgtgagacaatgctccaggaagacacaaaaggaacacagagccattctcttgctttagttacaagttttcaataatttttgtaacaagaaacggggaaattagaactcctctgcccctcatcagttttaaaggcccactataagattgcaattttgaccatgatctataagatatgtttaacctactgcacgcacatttttcaggcctgagaaagtcactcatgactt

SEQ ID NO: 29458 - DNA, 1042 bp, Homo sapiens
catggtggcaggcscctgtaatcccagctactcgggaggctgaggcaggagaatcgcttgaactcaggaggcagaggttacagtgagctgagatgattgtgccactgcactccagcctgggtaacagagtgagactccatctcaaaaacaaacaaacaaacaaacaaacaaacaaacaaaagtgcaggtagcccagagataggcattccacttgattttcagatagtgactgagtgttatttatctttgtactcaatgggttaaggtactgctagctgctgtaacatttcagactttggtggcttagcacaatggaagtttatttctcactgatgtaaggtccagcttcgggaggaaaagccgcctcactagtcactggggagacacgcagacaggctcttccatcttcagctcagcctcccaggttgctctggctgttggtaggaagaggaggggagaaggtggaagattcccagtaggtttgctggatcctctctctggactgcctttccagacccctgctcccttccgcctggccatccactcctaagcctaaagaatgtgcaggaggctggacgtggtagctggagcctgtaatcccagtgctttgggaggctgaggtaggaggaaggcttgagcccaggagtttgagatcaacctgagcaacacagcgagacccctgtctctacaaaaaacaattttaaaaaaatgagccaggcgtggtagcacacacctgtagtcccagctattcgggaggctgaggtgggaggagcacttgagccccagagttcgaggctgtagtgagctattatcacaccacttcattccagcctgggagacatagggaggccctgtccttattaaaagataaaaataaaataaagaaagaaagaagactgtgcaggtgttgcctcctccctgaacctcgcagccttcctgcagacctgggctcctcccaggcccctggtggtagccctgctcaagggtgctgtgctgcttactctgtccccacccccaaggtcttagaagttgagggctaagt

SEQ ID NO: 29459 - DNA, 1042 bp, Homo sapiens
catggtggcaggcgcctgtaatcccagctactcgggaggctgaggcaggagaatcgcttgaactcaggaggcagaggttacagtgagctgagatgattgtgccactgcactccagcctgggtaacagagtgagactccatctcaaaaacaaacaaacaaacaaacaaacaaacaaacaaaagtgcaggtagcccagagataggcattccacttgattttcagatagtgactgagtgttatttatctttgtactcaatgggttaaggtactgctagctgctgtaacatttcagactttggtggcttagcacaatggaagtttatttctcactgatgtaaggtccagcttcgggaggaaaagccgcctcactagtcactggggagacacgcagacaggctcttccatcttcagctcagcctcccaggttgctctggctgttggtaggaagaggaggggagaaggtggaagattcccagtaggtttgctggatcctctctctggactgcctttccagacccctgctcccttccgcctggccatccactcctaagcctaaagaatgtgcaggaggctggacgtggtagctggagcctgtaawcccagtgctttgggaggctgaggtaggaggaaggcttgagcccaggagtttgagatcaacctgagcaacacagcgagacccctgtctctacaaaaaacaattttaaaaaaatgagccaggcgtggtagcacacacctgtagtcccagctattcgggaggctgaggtgggaggagcacttgagccccagagttcgaggctgtagtgagctattatcacaccacttcattccagcctgggagacatagggaggccctgtccttattaaaagataaaaataaaataaagaaagaaagaagactgtgcaggtgttgcctcctccctgaacctcgcagccttcctgcagacctgggctcctcccaggcccctggtggtagccctgctcaagggtgctgtgctgcttactctgtccccacccccaaggtcttagaagttgagggctaagt

SEQ ID NO: 29460 - DNA, 1042 bp, Homo sapiens
catggtggcaggcgcctgtaatcccagctactcgggaggctgaggcaggagaatcgcttgaactcaggaggcagaggttacagtgagctgagatgattgtgccactgcactccagcctgggtaacagagtgagactccatctcaaaaacaaacaaacaaacaaacaaacaaacaaacaaaagtgcaggtagcccagagataggcattccacttgattttcagatagtgactgagtgttatttatctttgtactcaatgggttaaggtactgctagctgctgtaacatttcagactttggtggcttagcacaatggaagtttatttctcactgatgtaaggtccagcttcgggaggaaaagccgcctcactagtcactggggagacacgcagacaggctcttccatcttcagctcagcctcccaggttgctctggctgttggtaggaagaggaggggagaaggtggaagattcccagtaggtttgctggatcctctctctggactgcctttccagacccctgctcccttccgcctggccatccactcctaagcctaaagaatgtgcaggaggctggacgtggtagctggagcctgtaatcccagtgctttgggargctgaggtaggaggaaggcttgagcccaggagtttgagatcaacctgagcaacacagcgagacccctgtctctacaaaaaacaattttaaaaaaatgagccaggcgtggtagcacacacctgtagtcccagctattcgggaggctgaggtgggaggagcacttgagccccagagttcgaggctgtagtgagctattatcacaccacttcattccagcctgggagacatagggaggccctgtccttattaaaagataaaaataaaataaagaaagaaagaagactgtgcaggtgttgcctcctccctgaacctcgcagccttcctgcagacctgggctcctcccaggcccctggtggtagccctgctcaagggtgctgtgctgcttactctgtccccacccccaaggtcttagaagttgagggctaagt

SEQ ID NO: 29461 - DNA, 540 bp, Homo sapiens
aatataagtacacagaatataagtacaaaaatatttatatacagctacacgtaatataaatacatcagtgtaagatgttttgtgtgtgtgagatggagtctcgctctgttgcccagkctggagtgcagcaacacgatctcggctcactgcaacctctgcctcctgggttcaagcgattctcctgcctcagcctcccgagtagctgggattacaggcatgcaccaccacacccaatcaatttttgtatttttagtagagatggggtttcactgtgttagccaggatggtctcaaactcctgacctcaggtgatccacccgcctcggcctcccaaagtgctgggattacaggcatgagccacagtgtaagatactagctattaaaaaataaatatatatatatactgcaacagctgattagtctggaagagtttggtcagaagacagtgtattaagaagactgtgagtccccagaggaatataagaatatacatcatgttgatatattatatataacataaatagctaactacatctgtgta

SEQ ID NO: 29462 - DNA, 469 bp, Homo sapiens
actaagctgtagcagtgggaaaatgagaaggatggattcaagaaagctaggagacagaatgataggaattggtgctaactgccyatcggggagcagagagctgatctccctatacagtatctgataacatcccatgccatcctcctttcatagagttcttcttccaattcacattgaagaattcctggatatctttttcacattgacggtcataatgcacttacacattttcttttctaaaatactgcttcttttctttaacattttttcacaaatctaggtttcttaactctttaattattgttctgactcttaactaagctctctgtgaagtctcaataatggccataatagctctttgggctcatgtttgggctttcaatatttttcctttgacaaactcattcattcatttttttaaaatgattaagagcttatttgctagaaaagacaaaattctctgtctttg

SEQ ID NO: 29463 - DNA, 952 bp, Homo sapiens
ccggctcccatcccagtgctggactcattgctgaccagtccttggggtcacctgggtgccctttggctcctgagatgtctgggcatggggctgccttcaccagctgcaagagcccaaacccacctcaaccagcctttggcatctccagtctgcaccagctgcaattttgtggcccgggtgggtgaaggcagtggcaggggagtccatgccaagcctggcagtgggaaggaagaggaagaggaagaggacttaactttctcagcagcttcagccttctgagaaactctagaatgccttgctgcactatggcaggcataaccaggtcccggtgacctacataaccttccagacatggggcaagtgggagccctgattcatgtcaggggagcctgacagaggaagggtgggggcagggaggatttacaatcctgagacggtgaaaccacctaaatatttagtgatgactaagtgagtcaccgcatgtccacagggtggaatattatgtaaaagtgattattataataataaagactatttagcaatattgcaagtgtttatgatataatattaagcgaacaaaaggaagatacatacctttacggcacctgaacaagagaagattggaaggggattttaaaaaataacagttgctctgctacagtggtgtgattagggaccttattcttggaaaagaaagcagcagctttacagtcagacagatctggactagtagcttagatctatttyttacttactagaaacgatcttgacaggtggcttaaatgcgattggttttccatctgtaaaatgggtacagtaattcctgctttacaaaattcttgtgaagatgaatctgattgtgcatctcctcccttcttgccttcctttcttcctcctctctctctctacatattttcactaatactgcacaatccagttgcccacaaaggat

SEQ ID NO: 29464 - DNA, 997 bp, Homo sapiens
tcccatttacctagcatggattctgtacccgtacctaaacgagtcatgatcaggagaatgtggtgcttggacagactagtcatattcttcttctggagttgggaggtatayactaggattgagaagagctgagacactatggttgtgattatgtcatttatttctcacaaaaaaccctaggcacattcttttattaacccatgttacagatttaaaaatggaggcttgacaaggtcaggtgacttgctcacagtcatgtagctggtaatgggagagcagggattgaaacaagggaagcttgatttggggaaccacaggtttcactgcctacagtgagcgaaacaattttttttgaacctaggtctctactggctgtgaatctccatagccaattcacaaacagtgaggtgccactctagaagactgtgtgatgtagtagttgtgagcatggattttaagaggcagatggatttgggtccaaatcatgccagttaccgctcaaatgctagctctcttaataagtcacaagtgcttcttggtgaagtatttcctagctttattagcttccttccagagatggaaaagttgagcttggagaaccaaagtgacatgtcaaattgcagacccaaacagtacctccacttctcattggctccaaagcccattctttttccatcttaccagtgccttagaaaatacagtgggacctctgggggagagagatggagacaaataagcatgttctggctttctaacttttgctttgcctagaaggcggggattctaattaaggttttattttttaaaagacttctagccgggcacagtggctcaagcctgtaatcccagcactttggtaagagaaggtgggcagatggcttgagcccaggagttcaagatcagcctgggcaacatggtgagaccctgactctacaaaaaaataaaaataaaaaattagctgggtgtggtggtacatgcctatagtcccagctactca

SEQ ID NO: 29465 - DNA, 997 bp, Homo sapiens
tcccatttacctagcatggattctgtacccgtacctaaacgagtcatgatcaggagaatgtggtgcttggacagactagtcatattcttcttctggagttgggaggtatatactaggattgagaagagctgagacactatggttgtgattatgtcatttatttctcacaaaaaaccctaggcacattcttttattaacccatgttacagatttaaaaatggaggcttgacaaggtcaggtgacttgctcacagtcatgtagctggtaatgggagagcagggattgaaacaagggaagcttgatttggggaaccacaggtttcactgcctacagtgagcgaaacaattttttttgaacctaggtctctactggctgtgaatctccatagccaattcacaaacagtgaggtgccactctagaagactgtgtgatgtagtagttgtsagcatggattttaagaggcagatggatttgggtccaaatcatgccagttaccgctcaaatgctagctctcttaataagtcacaagtgcttcttggtgaagtatttcctagctttattagcttccttccagagatggaaaagttgagcttggagaaccaaagtgacatgtcaaattgcagacccaaacagtacctccacttctcattggctccaaagcccattctttttccatcttaccagtgccttagaaaatacagtgggacctctgggggagagagatggagacaaataagcatgttctggctttctaacttttgctttgcctagaaggcggggattctaattaaggttttattttttaaaagacttctagccgggcacagtggctcaagcctgtaatcccagcactttggtaagagaaggtgggcagatggcttgagcccaggagttcaagatcagcctgggcaacatggtgagaccctgactctacaaaaaaataaaaataaaaaattagctgggtgtggtggtacatgcctatagtcccagctactca

SEQ ID NO: 29466 - DNA, 1126 bp, Homo sapiens
ttgaactcctgtgctctagcaatcctcctgccttagcctccctattagctgggactacaggcatgcaccaccacacccagctaattaatttttttttttttaagagacggggtctcgctatattgaccaggctggtctcaaatttctgggttcaagtgatcctcccgccccagcctcccaagtagctgggattacaggcgtgtgccaccacgtccagctatctgcctttttaaatagagaaagtgaatatcgtgttaaatcattcttaaagacttaactaagattacttatcacactttgtcacaatatatttaaaatacttcattaaattctgaggtgagatagtaaaacatttgcgctaacactaaatagcctttttagtttttagtcttcctatctccagccttttcagatgtcccttcatgtcagaatgtcttcctctactaatccttctctgtgctatatttgatcgctagtaataaagcctgataaataagtaacgcgtttatttcatcaggctctattcaaggcttggagattgattctatacctttcccacattgaaaagtacaagtggaagtgggagcttctgactgacagcttttgagcttacctctgggttcgtaactatagtctttagttaaagctaccaggaatttggctaccagataagtgagacataaaaccaagtatcattactaaagcaatctagtaatatagaatatcactgtgtttaaataacttatcctacataagcaacgaggtagtattaacctcacacccacagttctacacaattttatgacagatacctagaatttaaaaaatggatatagtttgtatccattataattttgttatagggagagagttcaaagttggcatcaagggccaaagtgagaaatgagcttacatagaaaataatctgtataggccaaaaagaccttttatgtacaataccacctattgtaatttggtccacaaaatactgactataagaccataatcaaaatgaaatgctacgaaaggtgtgagagagcttagtwtatgcattgcaataaagctatggatggatgggcatagcgcatctcctgttgcacgcaccctgttgctcgtcaagtgacat

SEQ ID NO: 29467 - DNA, 1040 bp, Homo sapiens
tgcttggttctttttctgtgaactctcggcccagaagcaagagccggagctagttttcacagccttccctgcgtgggttaaggatcacctgtgttactaataattgttgtctttggttacctcttcttgaacagtaacaaaaggtataaatcacccccaaggctcttaattactcccattaacagttgctttgttatcccggatgcagagcagtttcactgcactgtgagtacacacagtgagttcagaggtacaagcctggcattgagccaggagttaaaataagttatgctaagtggatggctcaattgttcccctggactccctctcggtctggggggatgtgggcctgagcgaatgctataggagtctaaggtctgtgcatcttctaggagttccttgggrtgttaatgctgccttttgtcacagtcattttatttttctcttcttctttagttttgcttctagcatcggtgttttcttcctccctccctctcctatcctgccctatgcctctacaaatctttctcccttttcttccatgcattctgtatggaactggcaaaagctatagttgtataactatagcttgttacaactggcaaaagctatagttgtaacattttttgacctaaaaggaagaagctgaggtaaaattaatctaagtagagagtttatttgggccaagcttgagggctgcaacccaagagcatagattcaagttgccctgaatacgcactgcaattagcagcagtgacaagtggatttgtaaaggcaaagaaaaggggaccgggagtggggtgatacaaagttgtttgtcagaaattctcattggtttacaaaagtaacattgattagtgattggctatacacctttaggctatagggtgtgggttacagggttcagtgtgacttcagtaggttaatttatagctatctgtgacaatagcaagccgtttcaagagatgaacacagagctcaaaagtagggaggtagaatgtgtttgctgtctcattttaatgcctctctgatcattaaaa

SEQ ID NO: 29468 - DNA, 1040 bp, Homo sapiens
tgcttggttctttttctgtgaactctcggcccagaagcaagagccggagctagttttcacagccttccctgcgtgggttaaggatcacctgtgttactaataattgttgtctttggttacctcttcttgaacagtaacaaaaggtataaatcacccccaaggctcttaattactcccattaacagttgctttgttatcccggatgcagagcagtttcactgcactgtgagtacacacagtgagttcagaggtacaagcctggcattgagccaggagttaaaataagttatgctaagtggatggctcaattgttcccctggactccctctcggtctggggggatgtgggcctgagcgaatgctataggagtctaaggtctgtgcatcttctaggagttccttgggatgttaatgctgccttttgtcacagtcattttatttttctcttcttctttagttttgcttctagcatcggtgttttcttcctccctccctctcctatcctrccctatgcctctacaaatctttctcccttttcttccatgcattctgtatggaactggcaaaagctatagttgtataactatagcttgttacaactggcaaaagctatagttgtaacattttttgacctaaaaggaagaagctgaggtaaaattaatctaagtagagagtttatttgggccaagcttgagggctgcaacccaagagcatagattcaagttgccctgaatacgcactgcaattagcagcagtgacaagtggatttgtaaaggcaaagaaaaggggaccgggagtggggtgatacaaagttgtttgtcagaaattctcattggtttacaaaagtaacattgattagtgattggctatacacctttaggctatagggtgtgggttacagggttcagtgtgacttcagtaggttaatttatagctatctgtgacaatagcaagccgtttcaagagatgaacacagagctcaaaagtagggaggtagaatgtgtttgctgtctcattttaatgcctctctgatcattaaaa

SEQ ID NO: 29469 - DNA, 1040 bp, Homo sapiens
tgcttggttctttttctgtgaactctcggcccagaagcaagagccggagctagttttcacagccttccctgcgtgggttaaggatcacctgtgttactaataattgttgtctttggttacctcttcttgaacagtaacaaaaggtataaatcacccccaaggctcttaattactcccattaacagttgctttgttatcccggatgcagagcagtttcactgcactgtgagtacacacagtgagttcagaggtacaagcctggcattgagccaggagttaaaataagttatgctaagtggatggctcaattgttcccctggactccctctcggtctggggggatgtgggcctgagcgaatgctataggagtctaaggtctgtgcatcttctaggagttccttgggatgttaatgctgccttttgtcacagtcattttatttttctcttcttctttagttttgcttctagcatcggtgttttcttcctccctccctctcctatcctgccctatgcctctacaaatctttctcccttttcttccatgcattctgtatggaactggcaaaagctatagttgtataactatagcttgttacaactggcaaaagctatagttgtaacattttttgacctaaaaggaagaagctgaggtaaaattaatytaagtagagagtttatttgggccaagcttgagggctgcaacccaagagcatagattcaagttgccctgaatacgcactgcaattagcagcagtgacaagtggatttgtaaaggcaaagaaaaggggaccgggagtggggtgatacaaagttgtttgtcagaaattctcattggtttacaaaagtaacattgattagtgattggctatacacctttaggctatagggtgtgggttacagggttcagtgtgacttcagtaggttaatttatagctatctgtgacaatagcaagccgtttcaagagatgaacacagagctcaaaagtagggaggtagaatgtgtttgctgtctcattttaatgcctctctgatcattaaaa

SEQ ID NO: 29470 - DNA, 1040 bp, Homo sapiens
tgcttggttctttttctgtgaactctcggcccagaagcaagagccggagctagttttcacagccttccctgcgtgggttaaggatcacctgtgttactaataattgttgtctttggttacctcttcttgaacagtaacaaaaggtataaatcacccccaaggctcttaattactcccattaacagttgctttgttatcccggatgcagagcagtttcactgcactgtgagtacacacagtgagttcagaggtacaagcctggcattgagccaggagttaaaataagttatgctaagtggatggctcaattgttcccctggactccctctcggtctggggggatgtgggcctgagcgaatgctataggagtctaaggtctgtgcatcttctaggagttccttgggatgttaatgctgccttttgtcacagtcattttatttttctcttcttctttagttttgcttctagcatcggtgttttcttcctccctccctctcctatcctgccctatgcctctacaaatctttctcccttttcttccatgcattctgtatggaactggcaaaagctatagttgtataactatagcttgttacaactggcaaaagctatagttgtaacattttttgacctaaaaggaagaagctgaggtaaaattaatctwagtagagagtttatttgggccaagcttgagggctgcaacccaagagcatagattcaagttgccctgaatacgcactgcaattagcagcagtgacaagtggatttgtaaaggcaaagaaaaggggaccgggagtggggtgatacaaagttgtttgtcagaaattctcattggtttacaaaagtaacattgattagtgattggctatacacctttaggctatagggtgtgggttacagggttcagtgtgacttcagtaggttaatttatagctatctgtgacaatagcaagccgtttcaagagatgaacacagagctcaaaagtagggaggtagaatgtgtttgctgtctcattttaatgcctctctgatcattaaaa

SEQ ID NO: 29471 - DNA, 1040 bp, Homo sapiens
tgcttggttctttttctgtgaactctcggcccagaagcaagagccggagctagttttcacagccttccctgcgtgggttaaggatcacctgtgttactaataattgttgtctttggttacctcttcttgaacagtaacaaaaggtataaatcacccccaaggctcttaattactcccattaacagttgctttgttatcccggatgcagagcagtttcactgcactgtgagtacacacagtgagttcagaggtacaagcctggcattgagccaggagttaaaataagttatgctaagtggatggctcaattgttcccctggactccctctcggtctggggggatgtgggcctgagcgaatgctataggagtctaaggtctgtgcatcttctaggagttccttgggatgttaatgctgccttttgtcacagtcattttatttttctcttcttctttagttttgcttctagcatcggtgttttcttcctccctccctctcctatcctgccctatgcctctacaaatctttctcccttttcttccatgcattctgtatggaactggcaaaagctatagttgtataactatagcttgttacaactggcaaaagctatagttgtaacattttttgacctaaaaggaagaagctgaggtaaaattaatctaagtagagagtttatttgggccaagcttgagggctgcaacccaagagcatagattcaagttgccctgaatacgcactgcaattagcagcagtgacaagtggatttgtaaaggcaaagaaaaggggaccgggagtggggtgatacaaagttgtttgtcagaaattctcattggtttacaaaagtaacattgattagtgattggctatacacctttaggctatagggtgtgggttacagggttcagygtgacttcagtaggttaatttatagctatctgtgacaatagcaagccgtttcaagagatgaacacagagctcaaaagtagggaggtagaatgtgtttgctgtctcattttaatgcctctctgatcattaaaa

SEQ ID NO: 29472 - DNA, 1155 bp, Homo sapiens
gatccagagacctctcctttttcttctctctctctaaccgccttcccctccatggaaaggctgtgtgaagacatggtgagaaggtggcacctacaaaccaggaataaggtctttagcagaaaacaaactctgctgaacgtcgatctgggatattccaggcaccagaaatgtgaaaattaaattctgtggtttagccatccagccccgtgttacggtgtggcagcggaagctgactcatccatcttccccaccctctgtgagcagatcagcttcaggaggccctcgtggacatggggtcccagctttgctcttcttcctcctgtttttccaactctctggtgaagagggaggactcaagmttcatcatcagtttctgtgcattaaacatgaatgtttccttcaagatgaagtttttagcccattttgctttctcagaatttaatcaaactgaatgaagtatgtacttacaattaatatttggggatgttcatatttgttccccccttatatgacagttgggatattgtgtggtgctcatctccaggcccctccctgtgttccaggagacagggtcactgtcaccagcagagccagtcagggaaataacagtgtctagcctagctccttgtgaaataagggctgacactgagctcctgctggctcccactgctccctggacacgatgcctgcctgggtcaagggggtgagtctggacagacgtcactctggccatcagtaacctaactaccttcatgacctcccactgtgaacagagtcccggaagctgctggagccatgaaagttggacagagaaatcccacatcactgcagtcagaggggggctatgaaaagaccgtgggggggtttcatactatgaccacccagcactgagccatggctgccactctgtctgatgggagcccccaggggaagatccactcacactgtgctctagaggtcgtttttgtcaccatctttgttctagctggtttgggccagtttctgtagtgcatcctgttttgtccagatcctgttctggtcagcgttgtcatgaccagtgttgtgatcagtgctcagaatacaagccctgatgatctcctaccttatactcactgccttctgtgaaccagatgttctgataagggtcctgttgga

SEQ ID NO: 29473 - DNA, 1155 bp, Homo sapiens
gatccagagacctctcctttttcttctctctctctaaccgccttcccctccatggaaaggctgtgtgaagacatggtgagaaggtggcacctacaaaccaggaataaggtctttagcagaaaacaaactctgctgaacgtcgatctgggatattccaggcaccagaaatgtgaaaattaaattctgtggtttagccatccagccccgtgttacggtgtggcagcggaagctgactcatccatcttccccaccctctgtgagcagatcagcttcaggaggccctcgtggacatggggtcccagctttgctcttcttcctcctgtttttccaactctctggtgaagagggaggactcaagattcatcatcagtttctgtgcattaaacatgaatgtttccttcaagatgaagtttttagcccattttgctttctcagaatttaatcaaactgaatgaagtatgtacttacaattaatatttggggatgttcatatttgttccccccttatatgacagttgggatattgtgtggtgctcatctccaggcccctccctgtgttccaggagacagggtcactgtcaccagcagagccagtcagggaaataacagtgtctagcctagctccttgtgaaataagggctgacactgagctcctgctggctcccactgctccctggacacgatgcctgcctgggtcaagggggtgagtctggacagacgtcactctggccatcagtarcctaactaccttcatgacctcccactgtgaacagagtcccggaagctgctggagccatgaaagttggacagagaaatcccacatcactgcagtcagaggggggctatgaaaagaccgtgggggggtttcatactatgaccacccagcactgagccatggctgccactctgtctgatgggagcccccaggggaagatccactcacactgtgctctagaggtcgtttttgtcaccatctttgttctagctggtttgggccagtttctgtagtgcatcctgttttgtccagatcctgttctggtcagcgttgtcatgaccagtgttgtgatcagtgctcagaatacaagccctgatgatctcctaccttatactcactgccttctgtgaaccagatgttctgataagggtcctgttgga

SEQ ID NO: 29474 - DNA, 1155 bp, Homo sapiens
gatccagagacctctcctttttcttctctctctctaaccgccttcccctccatggaaaggctgtgtgaagacatggtgagaaggtggcacctacaaaccaggaataaggtctttagcagaaaacaaactctgctgaacgtcgatctgggatattccaggcaccagaaatgtgaaaattaaattctgtggtttagccatccagccccgtgttacggtgtggcagcggaagctgactcatccatcttccccaccctctgtgagcagatcagcttcaggaggccctcgtggacatggggtcccagctttgctcttcttcctcctgtttttccaactctctggtgaagagggaggactcaagattcatcatcagtttctgtgcattaaacatgaatgtttccttcaagatgaagtttttagcccattttgctttctcagaatttaatcaaactgaatgaagtatgtacttacaattaatatttggggatgttcatatttgttccccccttatatgacagttgggatattgtgtggtgctcatctccaggcccctccctgtgttccaggagacagggtcactgtcaccagcagagccagtcagggaaataacagtgtctagcctagctccttgtgaaataagggctgacactgagctcctgctggctcccactgctccctggacacgatgcctgcctgggtcaagggggtgagtctggacagacgtcactctggccatcagtaacctaactaccttcatgacctcccactgtgaacagagtcccggaagctgctggagccatgaaagttggacagagaaatcccacatcactgcagtcagaggggggctrtgaaaagaccgtgggggggtttcatactatgaccacccagcactgagccatggctgccactctgtctgatgggagcccccaggggaagatccactcacactgtgctctagaggtcgtttttgtcaccatctttgttctagctggtttgggccagtttctgtagtgcatcctgttttgtccagatcctgttctggtcagcgttgtcatgaccagtgttgtgatcagtgctcagaatacaagccctgatgatctcctaccttatactcactgccttctgtgaaccagatgttctgataagggtcctgttgga

SEQ ID NO: 29475 - DNA, 2246 bp, Homo sapiens
gaagaatcatgatatatatgataacaagaagaatctttatatatctgctatataaatttttatatcaaaaacaatttatctgttatagcaagtataggtacaaattatataacaatgtatataacagacaaattctttttgatgtaacagataacaatttatatgctttacatatgttacctattcatcctgaagactctgattcagtaggtctggcataggccctaggaaagtttcggaaataaagcattagaatacattttttttcaactcttttctttgtaatgagctgtacttgtaaatcacgttttcgtttatttgcttgtttttgcctttcacacatattgagggttgttgggtgatccaaaatttagctaaaattcaaaatagctttacttagtatttaattacagatgcataatagataacacctgttgaataattgctaggtactagtgtcataattgtttcttaatgtattatkttaccatcataacaattctgtgagttagctcattatcatgtctattttacagatgagaaaataaaagcacagtgtatacaatgcataaacagaagcttgcaaaactagcaagtgtcagacccgaaattcaaacccaaactcttccttataatacacagattctaatttattttgtctcacttcaaaacgatttggaaagtactcctctgtgacagtgctgccatcatctggcaaagtacccccttcacatgggaagagaggaggtgaagatagattagcagcaattgattcataaggctaagtgttacataagacgtttactcagacccctggacaggtagtatcttggggatgggagaggtaagggacaaaagtaaatttgttatttactcactatttatttccacaggagcatggaaacatgctatggttaaagaacatttaataagcagcaagaatgaagtttttggttcagactttacttagggaccgaattcagagaagcttcttgtatttcatattattataaagggaaattttaaaactttatccaattttataatttgctggaaacatcgaaacttggaattagacaacagtctgtaaatttgcaaaaccacattatacaaatctttcctctacaatgtctaagcagaaaatattcttttataatatggaaagaaaattttgtgtacatgaggactgattatttaggcttcttttgctaatcttactttggcttgttagtcgaaaattgcacaattaaatattctttgaaagcagttccatagcttgaaaatatgcttgtcttggactccctgtaacttcttgcctctatattacattaaatgttgttaaaacattttaagaaaaaaatgaatcgagggtgtgtctagtctttggtgcgaattggtattatttggtctatgaaacagtgagatcaaggaagaagttgagcttccatctgatgcctaggaaagcctacccttccaatttgagtgactttattgatttctagccctggatttgagaagaatgtttgtaacgtgtatattattttcctttggatggagtcattttaagaacattcttgcttcaatagatttgatcagatagatgtccataccctcagttctctgaaagctgtcgtgactggctttttctataaattaattgtggagaatgtcttgacagtgtatatgtcatgctttttatactccactttgccccaccccttcaataatgttttttttccttggcttatctcttgcaatggtctccaagttggtgagaatgtacaatttttgtcaaataaatgctaaatggccaccaatccctctaatgcttgagctcagaatacaaatgaccctgcagtccctctcttttcaagtcaactcttgggctcttttcagattctatctgggcaggttttatgattcacctattttctctcatatcagcctgaaaattcctggcattcacacaattttaacttgattaaaatttggcctaaatatgtcggctgttcttttggcacaatatattaccaaggtggtaagggaaataaaagtactacctgcaatttctcttaagtttgttgaatggtggactgtgtggtatatatctgtgtgagtatgttttttcccaattagcatatacaaatctgatttatttgctcttaaagtgccatagaactgttctgtatgacaactgtttatttggaattatttaattcaatgaatgtaaactgatgcataaaatg

SEQ ID NO: 29476 - DNA, 2150 bp, Homo sapiens
attccactttagagtgctataaatttaaaagccactttttttttttttttttttttgagacagagtctcgctcagtcacccaggctggagtgcagtggtgtgatctgggctcactgcaagctccacctcccaggttcacgccattctcctgcctcagcctcccgagtagctgggactacaggcacccgccaccacgtctggctaattttttgtgtgtgtttttagtagagacggggtttcaccatgttagccaggatggtctcgatctcctgaccttgtgaggcctcccacctcggcctcccaaagtgctgggattacaggcatgagccaccgtgcctggccaaaagccactttyaaaagtgtttctggagcctctctgttggagccttcctccttccttttttttttttgagatggagactcgctctgttacctaggctggaatgcagtggcacaatcttggctcactgcaacctccgcaagcgattctcctgcctcagcctcccgagtagctgggattacaggcatgctccaccatgcccaactaatttttgtatttttgggtggagatggggtttcaccatgttgcccaggctggtctcaaactcctgacctcaaatgatctgcctgcctcggcctcctggagtgctgggattacaagcgtaagccaccccacccagccctccccatttcatttttgggaagaaaattggtagagagatggtcctcacgataggcccaaactgtctccctgtgatctctggttttatcatctaaagtttcaacgagtccccatgttttaacagcagcctccaaagtggctctcatccagttaacctgcacatgtgtttgccatgggctgccggtgaaggtgctgttgactggatgggagagatccacactatgtttggagctaccttctatctagaaaaatggatccatatgggacaccatatgggaaacgtgtataaccagccctgagtaggaggacaacaatcatttgcataagtgtccattctggtacagttggagccaagacaggagtgctggaacagaaggggagttccccaagatgggggagtaaatcctttttttttttttttttcttttttagagatggggcctcactatgttgcccaggctggcctcaaactcctgggctcaagcaatcttccaacctcagccttccaagcagctgggactacaggtgcctaagtaaatctcttttcaaagagaatacagaaaggttttctgaaggaaatgggctataaaccaagggaaggattttagtaaataggacagagaatgtttcagactgggcacatcagaaataaaggtgaggtgagggggatgagagaaacctgagctgtgtttagtaaactctagggtaggatttggacacctgtaggagagaaagagggagaccagagaggaatctgctgcaatagctcaggaaaggtacaagaagaatggttgactgtggggactcagaaagaagggatgaagataagaaatcctgtgaaggtaaactgacccaatgaggcagtcaactgagtggaagtgctgggaaaatggccaacgctatgacccaggctccaggacccagaaaagggcagagcctttaacgggaggggacaggacagggctaggggttcaggcatgtggcttgggagatgctggatgatcgctcagggggaactgcttctaaggaccttcctatttcatggacctcgttttgtagtccattccctttcttatagctctcctctgggcatgctctagttgtcactgaacccaccctttggtgtcacctgttctggccctaatcagtaatataacctcagaattcagagccaagcccacgcagtgacttactctgaccttgcagtcggctgaacttccttggcagtttccacacacgttatcattaagccacatcttccccctccagttctactttttggaacaatgaatatgacttatctctgttaaaaggtgatcttttcttttttccatcatcctagccagttgaactcttctcgcttttctaaatccgcactactatgcaaatacatatcacacctctgattaagtcactgatgggaagactgaacagggtcaaccaaagacagtgcccatggtacttgcag

SEQ ID NO: 29477 - DNA, 2150 bp, Homo sapiens
attccactttagagtgctataaatttaaaagccactttttttttttttttttttttgagacagagtctcgctcagtcacccaggctggagtgcagtggtgtgatctgggctcactgcaagctccacctcccaggttcacgccattctcctgcctcagcctcccgagtagctgggactacaggcacccgccaccacgtctggctaattttttgtgtgtgtttttagtagagacggggtttcaccatgttagccaggatggtctcgatctcctgaccttgtgaggcctcccacctcggcctcccaaagtgctgggattacaggcatgagccaccgtgcctggccaaaagccacttttaaaagtgtttctggagcctctctgttggagccttcctccttccttttttttttttgagatggagactcgctctgttacctaggctggaatgcagtggcacaatcttggctcactgcaacctccgcaagcgattctcctgcctcagcctcccgagtagctgggattacaggcatgctccaccatgcccaactaatttttgtatttttgggtggagatggggtttcaccatgttgcccaggctggtctcaaactcctgacctcaaatgatctgcctgcctcggcctcctggagtgctgggattacaagcgtaagccaccccacccagccctccccatttcatttttgggaagaaaattggtagagagatggtcctcacgataggcccaaactgtctccctgtgatctctggttttatcatctaaagtttcaacgagtccccatgttttaacagcagcctccaaagtggctctcatccagttaacctgcacatgtgtttgccatgggctgccggtgaaggtgctgttgactggatgggagagatccacactatgtttggagctaccttctatctagaaaaatggatccatatgggacaccatatgggaaacgtgtataaccagccctgagtaggaggacaacaatcatttgcataagtgtccattctggtacagttggagccaagacaggagtgctggaacagaaggggagttccccaagatgggggagtaaatcctttttttttttttttttcttttttagagatggggcctcactatgttgcccaggctggcctcaaactcctgggctcaagcaatcttccaacctcagccttccaagcagctgggactacaggtgcctaagtaaatctcttttcaaagagaatacagaaaggttttctgaaggaaatgggctataaaccaagggaaggattttagtaaataggacagagaatgtttcagactgggcacatcagaaataaaggtgaggtgagggggatgagagaaacctgagctgtgtttagtaaactctagggtaggatttggacacctgtaggagagaaagagggagaccagagaggaatctgctgcaatagctcaggaaaggtacaagaagaatggttgactgtggggactcagaaagaagggatgaagrtaagaaatcctgtgaaggtaaactgacccaatgaggcagtcaactgagtggaagtgctgggaaaatggccaacgctatgacccaggctccaggacccagaaaagggcagagcctttaacgggaggggacaggacagggctaggggttcaggcatgtggcttgggagatgctggatgatcgctcagggggaactgcttctaaggaccttcctatttcatggacctcgttttgtagtccattccctttcttatagctctcctctgggcatgctctagttgtcactgaacccaccctttggtgtcacctgttctggccctaatcagtaatataacctcagaattcagagccaagcccacgcagtgacttactctgaccttgcagtcggctgaacttccttggcagtttccacacacgttatcattaagccacatcttccccctccagttctactttttggaacaatgaatatgacttatctctgttaaaaggtgatcttttcttttttccatcatcctagccagttgaactcttctcgcttttctaaatccgcactactatgcaaatacatatcacacctctgattaagtcactgatgggaagactgaacagggtcaaccaaagacagtgcccatggtacttgcag

SEQ ID NO: 29478 - DNA, 2150 bp, Homo sapiens
attccactttagagtgctataaatttaaaagccactttttttttttttttttttttgagacagagtctcgctcagtcacccaggctggagtgcagtggtgtgatctgggctcactgcaagctccacctcccaggttcacgccattctcctgcctcagcctcccgagtagctgggactacaggcacccgccaccacgtctggctaattttttgtgtgtgtttttagtagagacggggtttcaccatgttagccaggatggtctcgatctcctgaccttgtgaggcctcccacctcggcctcccaaagtgctgggattacaggcatgagccaccgtgcctggccaaaagccacttttaaaagtgtttctggagcctctctgttggagccttcctccttccttttttttttttgagatggagactcgctctgttacctaggctggaatgcagtggcacaatcttggctcactgcaacctccgcaagcgattctcctgcctcagcctcccgagtagctgggattacaggcatgctccaccatgcccaactaatttttgtatttttgggtggagatggggtttcaccatgttgcccaggctggtctcaaactcctgacctcaaatgatctgcctgcctcggcctcctggagtgctgggattacaagcgtaagccaccccacccagccctccccatttcatttttgggaagaaaattggtagagagatggtcctcacgataggcccaaactgtctccctgtgatctctggttttatcatctaaagtttcaacgagtccccatgttttaacagcagcctccaaagtggctctcatccagttaacctgcacatgtgtttgccatgggctgccggtgaaggtgctgttgactggatgggagagatccacactatgtttggagctaccttctatctagaaaaatggatccatatgggacaccatatgggaaacgtgtataaccagccctgagtaggaggacaacaatcatttgcataagtgtccattctggtacagttggagccaagacaggagtgctggaacagaaggggagttccccaagatgggggagtaaatcctttttttttttttttttcttttttagagatggggcctcactatgttgcccaggctggcctcaaactcctgggctcaagcaatcttccaacctcagccttccaagcagctgggactacaggtgcctaagtaaatctcttttcaaagagaatacagaaaggttttctgaaggaaatgggctataaaccaagggaaggattttagtaaataggacagagaatgtttcagactgggcacatcagaaataaaggtgaggtgagggggatgagagaaacctgagctgtgtttagtaaactctagggtaggatttggacacctgtaggagagaaagagggagaccagagaggaatctgctgcaatagctcaggaaaggtacaagaagaatggttgactgtggggactcagaaagaagggatgaagataagaaatcctgtgaaggtaaactgacccaatgaggcagtcaactgagtggaagtgctgggaaaatggccaacgctatgacccaggctccaggacccagaaaagggcagagcctttaacgggaggggacaggacagggctaggggttcaggcatgtggcttgggagatgctggatgatcgctcagggggaactgcttctaaggaccttcctatttcatggacctcgttttgtagtccattccctttcttatagctctcctctgggcatgctctagttgtcactgaacccaccctttggtgtcacctgttctggccctaatcagtaatataacctcagaattcagagccaagcccacgcagtgacttactctgaccttgcagtcggctgaacttccttggcagtttccacacacgttatcattaagccacatcttccccctccagttctactttttggaacaatgaatatgacttatctctgttaaaaggtgatcttttcttttttccatcatcctagccagttgaactcttctcgcttttctaaatcckcactactatgcaaatacatatcacacctctgattaagtcactgatgggaagactgaacagggtcaaccaaagacagtgcccatggtacttgcag

SEQ ID NO: 29479 - DNA, 960 bp, Homo sapiens
agcccaacttcctgcttttagtcaccatccatgccaaatttaaagcatccaggataaacgcggatttattccatttaaaaagtgtagcagaagagatcatcccttttgtcttccttgggaaaccatcccagttcagaacaattcacccaataaagaattgctctatccttgagtccactttactcggctagaattttttgagattattatgtataagttacttcagggttccagtcttttttcctgttcctgttttctttgcttcttgcagacatagagtgtagacttggcttagggatggtcgtgacaggaaactccaaggacacactttacaaaagatctaacttagctgctaaactttccagcagcactagaatgattaatgaagggctaagtaacccatttcagtgcattattttctggcagacactagttcatcatctgcagcatatccaacaaaacatcaatgcacacacactcaaagagaagggcaaggtgtggaaagaaaaagaaagaaaagatgataagcagaggaggaggggaagaagagaaggagaagaagaaagaaatggaaagaaacagagtaaaaacatatcacataaggttaagtggaaggatggaaggactgacctgagaaagagcagaagggaagcctgcagaaagtgaaggcgagagaatccttctgctgcaggaggtagggrgagggcagggtggtacttgtgacccaggatggcagagtgaggtcaaggatagagtaaggacagactccaggagacatttggctcatgattacagctctagcaataatgttattccacagattactaggggtgactctttatacactttttatatacaggaatttaaagatacaatggctaagcaaaaataaaaccctagaatgtgtctctgttgccattgccagctcagggcatgctgtggctgtttgctggaggtcca

SEQ ID NO: 29480 - DNA, 960 bp, Homo sapiens
agcccaacttcctgcttttagtcaccatccatgccaaatttaaagcatccaggataaacgcggatttattccatttaaaaagtgtagcagaagagatcatcccttttgtcttccttgggaaaccatcccagttcagaacaattcacccaataaagaattgctctatccttgagtccactttactcggctagaattttttgagattattatgtataagttacttcagggttccagtcttttttcctgttcctgttttctttgcttcttgcagacatagagtgtagacttggcttagggatggtcgtgacaggaaactccaaggacacactttacaaaagatctaacttagctgctaaactttccagcagcactagaatgattaatgaagggctaagtaacccatttcagtgcattattttctggcagacactagttcatcatctgcagcatatccaacaaaacatcaatgcacacacactcaaagagaagggcaaggtgtggaaagaaaaagaaagaaaagatgataagcagaggaggaggggaagaagagaaggagaagaagaaagaaatggaaagaaacagagtaaaaacatatcacataaggttaagtggaaggatggaaggactgacctgagaaagagcagaagggaagcctgcagaaagtgaaggcgagagaatccttctgctgcaggaggtagggagagggcagggtggtacttgtgacccaggatggcagagtgaggtcaaggatagagtaaggacagactccaggagacatttggctcatgattacagctctagcaataatgttattccacagattactaggggtgactctttatacactttttatatamaggaatttaaagatacaatggctaagcaaaaataaaaccctagaatgtgtctctgttgccattgccagctcagggcatgctgtggctgtttgctggaggtcca

SEQ ID NO: 29481 - DNA, 960 bp, Homo sapiens
agcccaacttcctgcttttagtcaccatccatgccaaatttaaagcatccaggataaacgcggatttattccatttaaaaagtgtagcagaagagatcatcccttttgtcttccttgggaaaccatcccagttcagaacaattcacccaataaagaattgctctatccttgagtccactttactcggctagaattttttgagattattatgtataagttacttcagggttccagtcttttttcctgttcctgttttctttgcttcttgcagacatagagtgtagacttggcttagggatggtcgtgacaggaaactccaaggacacactttacaaaagatctaacttagctgctaaactttccagcagcactagaatgattaatgaagggctaagtaacccatttcagtgcattattttctggcagacactagttcatcatctgcagcatatccaacaaaacatcaatgcacacacactcaaagagaagggcaaggtgtggaaagaaaaagaaagaaaagatgataagcagaggaggaggggaagaagagaaggagaagaagaaagaaatggaaagaaacagagtaaaaacatatcacataaggttaagtggaaggatggaaggactgacctgagaaagagcagaagggaagcctgcagaaagtgaaggcgagagaatccttctgctgcaggaggtagggagagggcagggtggtacttgtgacccaggatggcagagtgaggtcaaggatagagtaaggacagactccaggagacatttggctcatgattacagctctagcaataatgttattccacagattactaggggtgactctttatacactttttatatacaggaatttaaagatacaatggctaagcaaaaataaaaccctagaatgtgtctctgttgccrttgccagctcagggcatgctgtggctgtttgctggaggtcca

SEQ ID NO: 29482 - DNA, 535 bp, Homo sapiens
taggcgtcataccactcgttttaatattgaagagtgggccggrtgcggtggcttacacctgtaatctcagcactttgggaggccgaggcaggtggatcacctgaggtcaggggttcgagaccagcctgaccaatatggcgaaaccccgtctctactaaaaatacaaaatcagctgggcgtggtggcgcatgcctgtattccagctactcaggaggctgaggcagaactgcttgaaacctgggaagcgaaggttgcagtgagccaaaatcgagccattgcactccagcctgggtaacaagagcaaaactctgcctcaaaaaaaaaaaaaaatactgaacagagcaaatggaaatgggccgtaagcaagtttttaactatttccttctaaatgaagtgcaatcaatataagaaaagcgccttctcaccagcaagggaagcctgaagaatgagttagtactccttgtcaaaagtaacttcccttggctggaaagattaataaaggcctaaatgaatattgtgattagatggcaacact

SEQ ID NO: 29483 - DNA, 934 bp, Homo sapiens
atttttctagatagaaggtagctccaaacatagtgtggatctctcccatccagtcaacagcaccttcaccggcagcccatggcaaacacatgtgcaggttaactggatgagagccactttggaggctgctgttaaaacatggggactcgttgaaactttagatgataaaaccagagatcacagggagacagtttgggcctatcgtgaggaccatctctctaccaattttcttcccaaaaatgaaatggggagggctgggtggggtggcttacgcttgtaatcccagcactccaggaggccgaggcaggcagatcatttgaggtcaggagtttgagaccagcctgggcaacatggtgaaaccccatctccacccaaaaatacaaaaattagttgggcatggtggagcatgcctgtaatcccagctactcgggaggctgaggcaggagaatcgcttgcggaggttgcagtgagccaagattgtgccactgcattccagcctaggtaacagagcgagtctccatctcaaaaaaaaaaaaggaaggaggaaggctccaacagagaggctccagaaacacttttraaagtggcttttggccaggcacggtggctcatgcctgtaatcccagcactttgggaggccgaggtgggaggcctcacaaggtcaggagatcgagaccatcctggctaacatggtgaaaccccgtctctactaaaaacacacacaaaaaattagccagacgtggtggcgggtgcctgtagtcccagctactcgggaggctgaggcaggagaatggcgtgaacctgggaggtggagcttgcagtgagcccagatcacaccactgcactccagcctgggtgactgagcgagactctgtctcaaaaaaaaaaaaaaaaaaaaagtggcttttaaatttatagcactctaaagtggaat

SEQ ID NO: 29484 - DNA, 549 bp, Homo sapiens
accagaagcttccataaaaatttagccaccaaaagtatatgatgagctctgtgcaagaacttgagatcccaaaattcttcctggtaaggactcagagccagatggctgcattttctttctcttaacttattccccttctaaccatataaatatattaaaattgcaacgttggccacaccaatataaataagtgaataaataatgtaatattgtaaaaaaagacaaaacaacttgcacagtctgatgacagctytgtcacatatgttcattaaaaatgttcaagagagaatttggaaagtataaattttaaaaataaaaataatacttttagtttgtttaaagttaaaaaaaaatgtttgacaataatttgacacatagaaaatttaaatcttagctatcctgaaacttcaagtctctagaatgagtccttctccaaaggttcatgtcactcaaatattattacagtttagtaacttttaatgcaaaaaacttttaatgaataatgcattttatgaaatattatagatttacagagaaaggactaatcac

SEQ ID NO: 29485 - DNA, 757 bp, Homo sapiens
tgttctgcctgcctcctgccctccgtctctacttatgtggaggaattaacagagctgatgacgtgtctgctctgtctccatttaagagaatcagycccatcacacctagcaggtcagctgtgggatcactgcaggcagggaattcacacccacaggggtagctgattatatatttaagacccctgattattaaacttcctttttaacactgagctgatgctgcacctctccagtgaaaaggtaccatagtgattaagcacaagggtttggatgtcctactgacctgggttctgatcctagctccaccacttccttgataaccaggcctttgccaaactgctcaatatatccacacctcagttttctagtctttaaaatggaaatggtagcagtaagcattttacagggatgttgtgaatataaatgaggatgtctataaagcacttggcagcaccgtgactggcatatagagtttcttacatttttttgtcctagctgtgttgctgtttttattctgcttattcctcttaatctttctcattagaatcatgtaataagtccaaatcttccaaataacagcattttattttcttgaagacaaccttcatataccaccaaaggatgagtttcttttatgatgaagatttctaatactttatccatttctgttgtgaaacagatttcaattccttctgtgtaatgtggaggatcatagcatgtgttatagactcagacaaggggagttcaaatataactt

SEQ ID NO: 29486 - DNA, 757 bp, Homo sapiens
tgttctgcctgcctcctgccctccgtctctacttatgtggaggaattaacagagctgatgacgtgtctgctctgtctccatttaagagaatcagtcccatcacacctagyaggtcagctgtgggatcactgcaggcagggaattcacacccacaggggtagctgattatatatttaagacccctgattattaaacttcctttttaacactgagctgatgctgcacctctccagtgaaaaggtaccatagtgattaagcacaagggtttggatgtcctactgacctgggttctgatcctagctccaccacttccttgataaccaggcctttgccaaactgctcaatatatccacacctcagttttctagtctttaaaatggaaatggtagcagtaagcattttacagggatgttgtgaatataaatgaggatgtctataaagcacttggcagcaccgtgactggcatatagagtttcttacatttttttgtcctagctgtgttgctgtttttattctgcttattcctcttaatctttctcattagaatcatgtaataagtccaaatcttccaaataacagcattttattttcttgaagacaaccttcatataccaccaaaggatgagtttcttttatgatgaagatttctaatactttatccatttctgttgtgaaacagatttcaattccttctgtgtaatgtggaggatcatagcatgtgttatagactcagacaaggggagttcaaatataactt

SEQ ID NO: 29487 - DNA, 757 bp, Homo sapiens
tgttctgcctgcctcctgccctccgtctctacttatgtggaggaattaacagagctgatgacgtgtctgctctgtctccatttaagagaatcagtcccatcacacctagcaggtcagctgtgggatcactgcaggcagggaattcacacccacaggggtagctgattatatatttaagacccctgattattaaacttcctttttaacactgagctgatgctgcacctctccagtgaaaaggtaccatagtgattaagcacaagggtttggatgtcctactgacctgggttctgatcctagctccaccacttccttgataaccaggcctttgccaaactgctcaatatatccacacctcagttttctagtctttaaaatggaaatggtagcagtaagcattttacagggatgttgtgaatataaatgaggaygtctataaagcacttggcagcaccgtgactggcatatagagtttcttacatttttttgtcctagctgtgttgctgtttttattctgcttattcctcttaatctttctcattagaatcatgtaataagtccaaatcttccaaataacagcattttattttcttgaagacaaccttcatataccaccaaaggatgagtttcttttatgatgaagatttctaatactttatccatttctgttgtgaaacagatttcaattccttctgtgtaatgtggaggatcatagcatgtgttatagactcagacaaggggagttcaaatataactt

SEQ ID NO: 29488 - DNA, 1171 bp, Homo sapiens
tgcattcttacaaactatttttatatgttatttacataaatgtgtatcctggtccaaggacattattattctaacaatacaattataaaatgatatgtggtttatttaataaactacaaatcacgatttccataatttggcaacttaaaatttttactcaaaattatgttttgaagatctatccatgttggcatatacacctctacttcattttttttttaacagttatgcaataattggtcaaaattgctttatctgtttgctttatctgttcctctaccaacaaacttttcactataataaacaatacttcagtgaacctccttctctaagtcaccttaggagaatttctgtagggttcccgtggcattgctgggccataaaaaacaaaatgagtttagaaacttttatttttgaggtttaggctatgtgatcgggcatcaaaatggaattttaacagtagtcattagtaaacattggcctaaagaaaagataaaatgaagataaagatatccgtttgtagtgatatttctacttcttttttcagctaggggatgaaaatagcactgttcaccaggccrtaaaccaggcaccttgcaatcattatctcatttagttttcacatatacccttcaagagataactgacattcactaatgcctcattgtaggtaatagtttccatctccactataactcccttttcttttaatcagaacaatataacagataggaaattccaactgtttgaagtgtatccttttttaaaatcatcttttccaacgtaaacaaagagtaaagtcactaataaagaaataacgagaaacttgaaggcaacaggaaaagtagaagccgaataatccacaaagtagtcaaaccctggagaaatcaggaactgactctacttgaatccttaaaattaatttgtcctcccaatgagggtttgctggtttgaggcaaaaagatctattcttcaattaactgaagatgtcaaacttgcattagaaaccctcgataactcctgacagtgaaacaaattaggatttaccctagataaacataggccacatttattagaatcctcataataaagctataccatcaggtaaaataaactatatttttccagaacatgatggttttaagacaaaggcaaaacataaaagagaaaa

SEQ ID NO: 29489 - DNA, 999 bp, Homo sapiens
ctgactcaacttttgattgaatactcttagtggcaaagagctcactattgtgtgagccatcgtcttccattatggttgaatcttgctattaaaaattttctttatattgaaccaaatctgtatctgatcagttttaaacagacttctcctagcatatcctttaagtaggctcaaagataccttcctagccctatagtttcaggaatgtggaagaaaaatgactttctttcttctacatctccccatcttatttctttaccttcagaaagcacacaaacaaaaagagtgtgtgtctcaaaagaaagatataaaccaacactaggctaacttaaggtagcatttagtaatacaaaacaaagtggaggaataggtagaggccttatatagtagcacaggtgagatgctaaatttagagtgtccacacaagcattctgctttttttaatagttcacataatgataaaaactgtggttcctggagtatgactatcttggtttacaacccaccttcayaccaaataatgtgtgttattgaaaatttgcttaagaattctgaactttgatttcatcacctggaaaacaaaactaataatagggtttgccaccaagattgtttttaggattgattatgacaataaagttcttagaaccaaaaacagcatatagtaagtggtcaaaaaaaaagtcagccaggcgcggtggctcatgcctgtaatcccagcactttgggaggccgaggtgggcagatcacaaggtcaggagattgagaccatcctggctaacacggtgaaactccgtctctactaaaaatacaaaaaaaaaaaaatagctgggcatggtggtgggtgcctgtagtcccagctacttgggaggctgaggcaggagaatggtgtgaacacaggaggcagagcttgcagtgagccgagatcgtgccactgcattccaacctgggcaacagagcgagataacgtctcaaaaaaaaaaaaaaatgttagtcaca

SEQ ID NO: 29490 - DNA, 999 bp, Homo sapiens
ctgactcaacttttgattgaatactcttagtggcaaagagctcactattgtgtgagccatcgtcttccattatggttgaatcttgctattaaaaattttctttatattgaaccaaatctgtatctgatcagttttaaacagacttctcctagcatatcctttaagtaggctcaaagataccttcctagccctatagtttcaggaatgtggaagaaaaatgactttctttcttctacatctccccatcttatttctttaccttcagaaagcacacaaacaaaaagagtgtgtgtctcaaaagaaagatataaaccaacactaggctaacttaaggtagcatttagtaatacaaaacaaagtggaggaataggtagaggccttatatagtagcacaggtgagatgctaaatttagagtgtccacacaagcattctgctttttttaatagttcacataatgataaaaactgtggttcctggagtatgactatcttggtttacaacccaccttcacaccaaataatgtgtgttattgaaaatttgcttaagaattctgaactttgatttcatcacctggaaaacaaaactaataatagggtttgccaccaagattgtttttaggattgattatgacaataaagttcttagaaccaaaaacagcatatagtaagtggtcaaaaaaaaagtcagccaggcgcggtggctcatgcctgtaatcccagcactttgggaggccgaggtgggcagatcacaaggtcaggagattgagaccatcctggctaacacggtgaaactccgtctctactaaaaatacaaaaaaaaaaaaatagctgggcatggtggtgggtgcctgtagtcccagctactygggaggctgaggcaggagaatggtgtgaacacaggaggcagagcttgcagtgagccgagatcgtgccactgcattccaacctgggcaacagagcgagataacgtctcaaaaaaaaaaaaaaatgttagtcaca

SEQ ID NO: 29491 - DNA, 519 bp, Homo sapiens
caggttttttgctaagacaggttttttgatcagatcaaattcttctgctacagcgctctccctaaaagcataggaaggcatttctgcatttccttcctgggcggaggaaaagccccgcctcctcaggctctgagtcccgcccggtcaccattccsattgacactccagctgaccaatcagcgcgctggctggagcgcgggtctgcccctctggacgcacatgcgcgctgtcctggctcgggagatggacggccgccgtgttttgggccggttctggagtggctggcggcggggcctgggtgtccgcccagtgcccgaggacgcaggctttggcaccgaagcccggtgattaagtaccccctctctcatgcgggacggaggctagggcagggggaaggcacgtgcgggatctggatcaggtagatgttacccgaaaacagccccgttggcctctctgagcctcggtgccctccgctgtagaatgggaccggtcgtacctgaattttcgaggtcagcccag

SEQ ID NO: 29492 - DNA, 835 bp, Homo sapiens
  misc_feature (1)...(835): n = A,T,C or G
tcactccttcctatcctctttacttggctggcgtcactcatgtacaggattctcctgggcactcaatccatttgatctctagggaaacagacttttaccaagtaccaactagaaaaccaagagtcagggtactctagtgacagggaaagaaaatggagcccaagaaacagctcagaggcaggcttaatctgattcagcagtttaacctgtttctgaggtcaattcwaaagcttattttatttgagaagaacactctcttctaggaaccttcatttgcaagacaaaggacagaataaaaatgaaccacctaaacccaaatggctgatttgctatttcctaaggcttttgtaggagctcaaatataaaatgatacctttcccactgtttctattacaaattcacttaacattttaaaatctctttttaatccttcaagactgaaaaaaagagacttccattatcatacacatggttctcagtataggtaactctgcctctttctgttcccanggttgccttcaattgttagtcaattatacaaataagttcttggtgttattaaatggattccatttcagataaaacagattttgtactgctaaaaccactggcattgagtgatagctatgtaaatgaaaaataggagataattactctggctctgttctctgcattaaactgagtataaaaagtgcatgcaaagaataaaaatggccaccacaatcacctcctgatggtaagataccaccaaaggcataaaatgctcatttaaaattaaggctttggtggaacatgagcatataaacttaaaaatgctattaaaaataaaaggtgg

SEQ ID NO: 29493 - DNA, 835 bp, Homo sapiens
  misc_feature (1)...(835): n = A,T,C or G
tcactccttcctatcctctttacttggctggcgtcactcatgtacaggattctcctgggcactcaatccatttgatctctagggaaacagacttttaccaagtaccaactagaaaaccaagagtcagggtactctagtgacagggaaagaaaatggagcccaagaaacagctcagaggcaggcttaatctgattcagcagtttaacctgtttctgaggtcaattctaaagcttattttatttgagaagracactctcttctaggaaccttcatttgcaagacaaaggacagaataaaaatgaaccacctaaacccaaatggctgatttgctatttcctaaggcttttgtaggagctcaaatataaaatgatacctttcccactgtttctattacaaattcacttaacattttaaaatctctttttaatccttcaagactgaaaaaaagagacttccattatcatacacatggttctcagtataggtaactctgcctctttctgttcccanggttgccttcaattgttagtcaattatacaaataagttcttggtgttattaaatggattccatttcagataaaacagattttgtactgctaaaaccactggcattgagtgatagctatgtaaatgaaaaataggagataattactctggctctgttctctgcattaaactgagtataaaaagtgcatgcaaagaataaaaatggccaccacaatcacctcctgatggtaagataccaccaaaggcataaaatgctcatttaaaattaaggctttggtggaacatgagcatataaacttaaaaatgctattaaaaataaaaggtgg

SEQ ID NO: 29494 - DNA, 835 bp, Homo sapiens
  misc_feature (1)...(835): n = A,T,C or G
tcactccttcctatcctctttacttggctggcgtcactcatgtacaggattctcctgggcactcaatccatttgatctctagggaaacagacttttaccaagtaccaactagaaaaccaagagtcagggtactctagtgacagggaaagaaaatggagcccaagaaacagctcagaggcaggcttaatctgattcagcagtttaacctgtttctgaggtcaattctaaagcttattttatttgagaagaacactctcttctaggaaccttcatytgcaagacaaaggacagaataaaaatgaaccacctaaacccaaatggctgatttgctatttcctaaggcttttgtaggagctcaaatataaaatgatacctttcccactgtttctattacaaattcacttaacattttaaaatctctttttaatccttcaagactgaaaaaaagagacttccattatcatacacatggttctcagtataggtaactctgcctctttctgttcccanggttgccttcaattgttagtcaattatacaaataagttcttggtgttattaaatggattccatttcagataaaacagattttgtactgctaaaaccactggcattgagtgatagctatgtaaatgaaaaataggagataattactctggctctgttctctgcattaaactgagtataaaaagtgcatgcaaagaataaaaatggccaccacaatcacctcctgatggtaagataccaccaaaggcataaaatgctcatttaaaattaaggctttggtggaacatgagcatataaacttaaaaatgctattaaaaataaaaggtgg

SEQ ID NO: 29495 - DNA, 1138 bp, Homo sapiens
cattttaaaatctctttttaatccttcaagactgaaaaaaagagacttccattatcatacacatggttctcagtataggtaactctgcctctttctgttcccaggtttgccttcaattgttagtcaattatacaaataagttcttggtgttattaaatggattccatttcagataaaacagattttgtactgctaaaaccactggcattgagtgatagctatgtaaatgaaaaataggagataattactctggctctgttctctgcattaaactgagtataaaaagtgcatgcaaagaataaaaatggccaccacaatcacctcctgatggtaagataccaccaaaggcataaaatgctcatttaaaattaaggcttttggtggaacatgagcatataaacttaaaaatgctattaaaaataaaaggtggcattaagagcatcagggtagagatttaccaattcactaatggtaataaaggttattttcttttatttacagagagctcttctacatataaagtttccacttatgtctacattaataatattgattgctgttattattggtaacattaatgtatgtgccaggtaccattctgacgtgtatatgagtcagctcatttaatttacataacaatttcacaaattatttatgatttttgtcccctgtcccccattatttttgtcaggtaagagatccaaggctgtgagaggacaaaaccttcatatgttgtagagttagccargaggggaaccaggatataaacctaagtattctgactctagtgtcttggcctggatccactgcactgtttctcaagctagttctcaactcatgcactttgagagaactggaagtccctactcttcccccgactctgcttctgcaattcttttcctgactggtcaatgctacaggggaaaaaagatttgtttgcttttttcccattttctggcagttccatggtatcaagctctccatgatcttgcccagacagtttcccacaaaagggactgaaccttggaggatggtttctacactctggctctccaccccatgctgcaagtctctcctggacaaaatcctcatcggcctcctctgaacactcttctcaactagctcctgatttttaggt

SEQ ID NO: 29496 - DNA, 1331 bp, Homo sapiens
tgtgctgacactacaaatcccctttttacatatttaactggaaatgatgacagacattcagctatctcaactgcaaaacagagaaaataataataatgtctgctaagttgtgtgaaaattaagttagatacattataaagagtaaaatgctcaattaatattatttgctattattatttctaaaatgctattattaatcatttctttaaaagaaatgcaataaatattaccttttaaaagtcatatttatttctaagctttacttttagttttaataaaacaaccatgatgagctctgcaaaaaaattagttaagtgccacttcttttattttattcaatgtgactttctccatcactataaggaatttcttaacccacattatctacctcaatagagtgaataaaacagtgaatataaataaactgtacaggaagaaaaaaaggaaaaatttgaggctaaatataaacccatacaaacctgaatagtagttgatattcatcgtgataaagggtgtcaaagtcaaccatttagcaatgcatgatgctatattacactcttttactataaagaacacctttggaacaattggtgaaactggaattgggtctgggatttagacagtagtaatctagaaatatccgtttcttgattttgatggttttattggggttttgtaggagggctatccatgttcataggagctgcactctaaaatatgcagggggtgatgggtattaggtaggcaactaattgggaaattgttcaggaagaaaagttcttcggactgtacttgcaacatttctatgaggttgtaattgtttcaaaataatttttaaaagttaaaatattcagctagttgttgacttttattggtaggtatggcttttaagctactggttttaaaatatgcattctgattagaatcaattagcaaagtgctttgttgttatttttaatttttttttttttgtggaatcatctttgctgcagttttactttcatgttttgcatcctctccctcggtaaatactgtaaaccttaccttaaacatgtgtctagagtccaatcacttcatttcaaatttaaagtttgcactgtggtctgagctgccatcatctctctctcggttttgtttgtttgtttgtttgtttgtttgtttttgagacagagtctcgctctgtggcccaggctggagtgtagtcgtrcgatcttggctcactgcaacctcagcctcccgggttcacgccattctcctgcctcagcctcccgagtagctgggactacaggcgcccgccaccacgcccggctaattttttgtattttgtttag

SEQ ID NO: 29497 - DNA, 595 bp, Homo sapiens
tgaggcctcccagccatgtggaactgtgaatccattaaattcttttgtttctaaattgcgcagtcttgggtatttatcagcagcatgagaatagaccagtacaacgtgctacatgagcccaattatagtatgtggtttggctctacatttatttcaatgagagcataggaatatagtgaactctcaataaacatttgcttaatgaactaacgtgagaggagtgaatggacatgagtgagatgttttgtttcaacattttaatattgattgaatataatttatttaatctctggatgataaataacactatgacaattcacttatgtaacttctagaaatgctttatttttaaccaaggaacaaattcttaaaggaaagagatggcataaacacaggaaaatagaagcagaattgattgaagaagagaacagaatggtggttaccgggggtgaggaagtgttcgtcaaaaaatatgaaattttagacaggaagaataagttcaagagatctattgtacagcatggtgactataggtaaggtattataatcttgaaaattgccaagacagactttaagygttcgtaccacaaagagt

SEQ ID NO: 29498 - DNA, 1836 bp, Homo sapiens
cacctatcagtgataacagccagaaatgacatactcttcccaaaaaaggcttttctctgcagcgtagagggtagaattaggtcagttatgtaagactcatattaaacgagtacactttgggccactttggtgatattgttaatgtttctgccttcaagtggttacaaaaggaaggtgaagttaatttcccttgcttcggaagttctgttttataagtctgaagggtacaatattgaaatgataacctacattcaatattaaccatttgctgccaaagtaaatactatatttcgataatttcataaatatccaagagaaattgtcccaatattcacatatattgaagttagctcatcaggaaaagtcattttagtgatgaggctctgaagaggcccccmaaaattgagataattatatgtgatacgtcaactgcaaaaaccatatttgtgagagatgctcagttatgtctgaataagaatcttagaattatagaatgttccaactggagaggatcttgtctaacacatttatcatagagataaagcaattaagacctggaaatgttaaattatttgcttaggattgcccaagaaatggaagagatggttctgaaccaggtcttttgacttaatttttttctaatgcatttgttatagagataaagcaactaagacaaggagatgttatttgttctgcattgttcagtaagtggaagagacaaaaatatttttcaatcaacaaactcttactgttgatgttaatatggctgacactgcctctctgccttaaagtgtattacaataaaatgcaaagacacctatgaaaacctttcatcataaaagacgaaatttcatttttttcccaaaacccaggttttaacacagaaaactttgagctccaagaattaaaatactctttttgaagctagaatactaaacatccaattttgcatgtagggaaatagaaacaaatattttaaatgttttgaacatagttttcacagctagaaaattacttaaaaaaaggcctctcaatctctgtctatgcttgtttcattcatattttacagcttttctcacctgaattctggtaaatccttatctttctgtcttacctccctatcactcatcctgaatttcatatatttatatttgatttttgttttaactccggggaagattagtatttatctcattttaatattttctctttgtgcatttcagtacattgctttagtattctaatgtcctccaaaatttagatttcttgcaaaagaaactgctgattcttaccaggtttgtatcacaaataaatcttttaaataccgtcttttagtcttccaacaagttgctgacattttattcacgtttgtatccctgtgacttgcaggtagggggtactaaatgctgtctgctaagtgcatgaatgattaatggaacagcacaaaggggagcaccccaggctggggattttttagttctctcactaggtttgccaagatgtttcaatcagtattccttgagtaccacttcagagtcagcctgagtgtgacttattctaccaccatctactttacttcaattttctataactcatttaaaaaaagaatgccaatgaaaattctgtcatatgcttgaaacattttggggctcatgttagtggaatgacttctagttttcccagcttcttccagtgcaagttttctaaacatatctcaaaaagccccagttttatatcacaacagtttcatgagaaagtgaaacagtttcatgagaaagtgaaacagactatgaaccttttgtactgatccatagtatctctagaaattaagcaaag

SEQ ID NO: 29499 - DNA, 571 bp, Homo sapiens
gaactagaacagaaatttaaaaatgtgttggggcagatatagcttaaagtttagaaatagaaaaatcacttgatggcctttcttcctaaatttggaggcaagtggagaaggaagtttgtgtgtgtatgtgtgtgtgtgtgtgtgtgtgtgtgtgtgtgtgtagcataaggggtgtggcagtgggttgagaaacagtcagtggagattggaaaccaggaaacctatactgttaataagtggtttcatttattatttttgaaaggtattactccatctgttataaacaatgaggagagaaagattttgttaaactataatgcaagatatttttaaagtaaggccaaatttaacatttgtaactgtagagtcacataaagtattatattaatttctcactgttagggatttaaaggttyattaaataatagccctttcctcaaattaaataccagcaagaagtcatggaattagtatatattagctaaatgaaaaccaaatctttgatctgtgaccaaatattcttctccatccccacagtcacagacaggactgaacaatcacaggacttgct

SEQ ID NO: 29500 - DNA, 1002 bp, Homo sapiens
tggcattgaatgacatttgtgtaacccctttcctaataatagggattagagctgcagaagatctaggtggtcatgtagttcaatctctgatcatttctaattctagaaaggtgtaataataattatttacatttgcataatactttataaagcactttcatagccattatcttatttgctcctcaaaacaattttctgaaataagcaggaataatatcatcaaaattataaaaaacaattttctgaaataagcaggaataatattatcaaaattattattgcctggaaaaggaaacttaagacggtaggaaatttacattaatggctagagatgataacactagggagtggagtcaaatctgggatccaaatttctaacctcttatccaatgttctttccataataccacctgctttaatttgctaaccaagggagagctgatacttagcaactgggagtctcatatcctctcttggtgactctccaggtatttattgttcctttctatgaagagcctatgaggagagggagaaatcatgttacacagagaaagtccttcaaagtacgacctctctggaacacctatcttagtttctctttggcagtttgtagaaaaggaatgtttctgtccttacctcaggctttctatttgagaatctgtgggtgtraggaatgcatttttaacaagcccatttgggaatattgatgccatctgggaagtgtaaaagtaattacagaactgcttctacagagtgttggtaggctctaccatctaagaccccctaccccagtcagaatagatgaagcagaaacaagacgaggaggaagctccagtcagctcctcttcatgcagaaatggcatcaaggactagtattagagaggatatagcccccgacaaattctatcaaacttctgaaaaggtgcatttaagaacagcgagattgctatgaaaatataccttcaaggagactctcctaggctctccttccaacagaattgc

SEQ ID NO: 29501 - DNA, 623 bp, Homo sapiens
gtcaaagatggatctggaggaataggtagctacgagcacatgtaagtcctcatagattatattaaggatttgaactatctcctaagagagtttaaatttggattttcatttttaaaagggcattctcagtacctattgagtataatgttcactatttaggtaatggatatccaaatagaagcccaatccccagcagtacataatatgcccatatagcaacatgcacatgtactccctgaatctaaaatgaaacaagatttaagaagtaaagaataaataaataaaaagggcatcctggctgccaagtgaacaaagagcctgaagtgatgctacaagagtaagcatgaggttaaagggtcctgatgcctggctaagataaggatcatgctaggagctatgaagagtgatggagtgagtacacaaaggttgacactgctgtttaaaacctcaatgataaggggaaggaatgttccrcagtgaaaagttgttatctagttgcttgagtgttcagaggtttcccacatcttttgtagaactcatgtagcttaatgacctcttccatagtaacaaccatttgtttgagagacaagcaagaaaaaaagcatggagcaacaggaagtctc

SEQ ID NO: 29502 - DNA, 536 bp, Homo sapiens
aggacagatctcatattaagtgttcttaccacaacatcatttttcaaaagtgatcaggtgattatatgattaattattcaaattgcagtcatttttttttcccttggtaagaggtraagtctgctcctcaatcatcttacaccatggaagaatttcattgagaaacctgctttgtgaattgcagtataacttggaaagatgtaatcatctcagaaaaggcagttaagtaatgaaaaaaaatacctagattgtcttgaatctgctatttttagtctatgaagaataaggcaaattacatttgtaggccttcatctcacaaagtaaagagacaagaacattttaagggaaagttgttcatcactcaatctttttcaacttgcaaattcagtgattcacaaaatgggtaacataatttatttaactttggatttagaataaatgtataatcctaaacattcttaattttgcctatatatatatatatatatatacacacacacacacgtatacatatacatactatatatacacacata

SEQ ID NO: 29503 - DNA, 536 bp, Homo sapiens
aggacagatctcatattaagtgttcttaccacaacatcatttttcaaaagtgatcaggtgattatatgattaattattcaaattgcagtcatttttttttcccttggtaagaggtgaagtctgctcctcaatcatcttacaccatggaagaatttcattgagaaacctgctttgtgaattgcagtataacttggaaagatgtaatcatctcagaaaaggcagttaagtaatgaaaaaaaatacctagattgtcttgaatctgctatttttagtctatgaagaataaggcaaattacatttgtaggccttcatctcacaaagtaaagagacaagaacattttaagggaaagttgttcatcactcaatctttttcaacttgcaaattcagtgattcacaaaatgggtaacataatttatttaactttggatttagaataaatgtataatcctaaacattcttaattttgcctatatatatatatatatatayacacacacacacacgtatacatatacatactatatatacacacata

SEQ ID NO: 29504 - DNA, 514 bp, Homo sapiens
tctgagccctcrtttccttattatacaataataatacacgatttacaaaattattgggagagtaaaatgaaatcacatatacaaaattgtctcatacaatgcctggaacacacaggcactcactaaatagcttgcatcttttttctcctttcttctcttgaatgaaaaaacccctatcaaatttacatgataactatgaagatccaagagataatgaatgaaaaagatgcctcgtgaaatggaaaactctcaactcatggaagacttggtgtaactaaaactagtccaggctatcttgatatgttgctaccttgtaatacttcacataggatgtcttttggtcacctaaagaaaaacaaatttactacatctccccctcagaagacactaccacaggtggatgctaaaaaacccctccccgaacaggtacttttcatgtctgtgggcaaaaggctcttcccagtgtcttttcaaacaccatacaaagagaatattatgcctcaaagatgacttt

SEQ ID NO: 29505 - DNA, 542 bp, Homo sapiens
ctccactctcatgttcattgaaacatcagtcacaagagataagatgcagatgttgaaacaatttaagtgttggatgaatggataaagaagatgtgagatatatacacaccaattctctctctctctctctctcacacacacacacacacacacagaatattattcaaccataacagatggatgaatggataaagaaaatgtgagatataaacacacacacagacatacctasacacacacacagggaatattattcagctatgattgatggatgaattggtaaggaatatgtgatatgcacacacacatacacacacacaaaatgttattcagccataaaatgtaagaaaatcttgccatttgcaacaacatggatgaacctggaagacattttgctaaatgaagtaagccagagaccaaaagataaatattgtatgatctcacttatatgtggactctaaaaaagtcaaacctacagaagcagagagttgaaaagcaaccactagggctaggaggtagggggattggggggaagttggtca

SEQ ID NO: 29506 - DNA, 550 bp, Homo sapiens
aagagaaataaagcatttaaccagaaaattaagacccaaccaagtcacaagaagttgattgtagcaaaagcaatgtacmttggttttttctaataactgttgacacataaatctttaattgctaataatgtattgcttatgcactctgctataccatatatatatatacatatatacatacataatctcatttatgcctcacaataatgctccaaggaaggcatttcttatactggttttacaaatgagaagctgaagctgagagtgaagatacggtttgcccaagttattacatacaggaagatagcagaccagaaattcagatcaggtcgagtcaactacaaaacccatgttctggaaccactaaggtatggactcttcctgttctgcatatcttccttgtgttcctccagatcgattctccacccttctctgcccctctttttgtcctaggaggatgatctgcatggattatttttataagttccattttctctggcttcttgttaaatgtgaccaatagaggtcactggcagggttggagggggtt

SEQ ID NO: 29507 - DNA, 550 bp, Homo sapiens
aagagaaataaagcatttaaccagaaaattaagacccaaccaagtcacaagaagttgattgtagcaaaagcaatgtacattggttttttctaataactgttgacacataaatctttaattgctaataatgtattgcttatgcactctgctataccatatatatatatacatatatacatacataatctcatttatgcctcacaataatgctccaaggaaggcatttcttatactggttttacaaatgagaagctgaagctgagagtgaagayacggtttgcccaagttattacatacaggaagatagcagaccagaaattcagatcaggtcgagtcaactacaaaacccatgttctggaaccactaaggtatggactcttcctgttctgcatatcttccttgtgttcctccagatcgattctccacccttctctgcccctctttttgtcctaggaggatgatctgcatggattatttttataagttccattttctctggcttcttgttaaatgtgaccaatagaggtcactggcagggttggagggggtt

SEQ ID NO: 29508 - DNA, 550 bp, Homo sapiens
aagagaaataaagcatttaaccagaaaattaagacccaaccaagtcacaagaagttgattgtagcaaaagcaatgtacattggttttttctaataactgttgacacataaatctttaattgctaataatgtattgcttatgcactctgctataccatatatatatatacatatatacatacataatctcatttatgcctcacaataatgctccaaggaaggcatttcttatactggttttacaaatgagaagctgaagctgagagtgaagatacggtttgcccaagttaytacatacaggaagatagcagaccagaaattcagatcaggtcgagtcaactacaaaacccatgttctggaaccactaaggtatggactcttcctgttctgcatatcttccttgtgttcctccagatcgattctccacccttctctgcccctctttttgtcctaggaggatgatctgcatggattatttttataagttccattttctctggcttcttgttaaatgtgaccaatagaggtcactggcagggttggagggggtt

SEQ ID NO: 29509 - DNA, 604 bp, Homo sapiens
atgaggagctgtttagtaattctatggatgtccattctcctggttcctctgggctsaggcagggtttctgtactgcattggtgaggaagagcaaagtgctccacagtacccctatgcagatgagaggggatagcacacacagggagggcttggtgtggccagcacaaaaaggtcatccacagatgcaggagagaagttggatagaacaggtgcactggctcttacgtgtaatcccagcacgtggagaagccaaggtgggaggatcacatgagcccaggagtttgagaccaatctggggaacctctatccccctgtccctctaaacataggaaggtaggcggggaacggtggctcacgcctgtaatcccagcactttgggaagccgaggcggttggatcacttgaggtcaggagtttgagaccagcctggccaacatggtgaaaccctgtctctactaaaaatacaaaaatcaaccaggcatggtagcaggtgcctgtaatcctagctactcgggaggctgaggcacgagaatttcttgaacccgggaggcagaggttgcagtgagctgagatcgtgccactgcactccagcctgggcaacagag

SEQ ID NO: 29510 - DNA, 604 bp, Homo sapiens
atgaggagctgtttagtaattctatggatgtccattctcctggttcctctgggctgaggcagggtttctgtactgcattggtgaggaagagcaaagtgctccacagtacccctatgcagatgagaggggatagcacacacagggagggcttggtgtggccagcacaaaaaggtcatccacagatgcaggaragaagttggatagaacaggtgcactggctcttacgtgtaatcccagcacgtggagaagccaaggtgggaggatcacatgagcccaggagtttgagaccaatctggggaacctctatccccctgtccctctaaacataggaaggtaggcggggaacggtggctcacgcctgtaatcccagcactttgggaagccgaggcggttggatcacttgaggtcaggagtttgagaccagcctggccaacatggtgaaaccctgtctctactaaaaatacaaaaatcaaccaggcatggtagcaggtgcctgtaatcctagctactcgggaggctgaggcacgagaatttcttgaacccgggaggcagaggttgcagtgagctgagatcgtgccactgcactccagcctgggcaacagag

SEQ ID NO: 29511 - DNA, 604 bp, Homo sapiens
atgaggagctgtttagtaattctatggatgtccattctcctggttcctctgggctgaggcagggtttctgtactgcattggtgaggaagagcaaagtgctccacagtacccctatgcagatgagaggggatagcacacacagggagggcttggtgtggccagcacaaaaaggtcatccacagatgcaggagagaagttggatagaacaggtgcactggctcttacgtgtaatcccagcacgtggagaagccaaggtgggaggatcacatgagcccaggagtttgagaccaatctggggaacctctatccccctgtccctctaaacataggaaggtaggcggggaacggtggctcacgcctgtaatcccagcactttgggaagccgaggcggttggatcacttgaggtcaggagtttgagaccagcctggccaacatggtgaaaccctgtctctactaaaaatacaaaaatcarccaggcatggtagcaggtgcctgtaatcctagctactcgggaggctgaggcacgagaatttcttgaacccgggaggcagaggttgcagtgagctgagatcgtgccactgcactccagcctgggcaacagag

SEQ ID NO: 29512 - DNA, 532 bp, Homo sapiens
atgagcttctcctctgaagcatgaagacccacagaatactgcagagttgctgggggtggccctgcccaaattctcgcctaaaaccccaactttcaatgacattgtggacctgctttcgtgttatyataaggtttacaaatttctatgccacctatcagaccattttttaaggatgaaatcaaagtttctataagttgtgtagttctttccctgtgcattttatcgtaatattgaaaaacgacagtgaaaagcaaccaaggcatctcggcagcatgctgctgactagttcacgcagttaccaccaaagcgcatggacgggacccagagcatgagcgtgtgcccactatcggggacagaaacctaccgcgttcgagttttgacatatttctcgcagttgttgaaaactatgaggcatgaaatccagatttatgactttttaaaaagttatttgtggattcccaagacgattatgttcccatcacttatgtagccttaaaagaaaaaaacctcaaatgatgctttaaaaaaatcc

SEQ ID NO: 29513 - DNA, 921 bp, Homo sapiens
ccaaactcattaagccaaagggaaaagttaagctgggaactgggtcacgcaaaactgccttgcctcttggtttttaaatgagatggctaccagatgaaaagctacacacctcgctcatattttgcccacaaggaaattctcagtgagcgccaagatctttaccataaagtgtttctatkaaaatttaccatggcaatgtaaatagatagcttctgttttcaggtacagtcacccctctgccctcctgacacaaatgcatatctgattgttcccctgccccatttgtctatgttatcttacgtaaaaatgcagattcagattgactaagccagacagaggcatgaatgactattttccccctgctaccctctcacatgaaaactgtatttctcagtatcccaccctttcccctttaaatttggagccctcaaaatcatcttcccagaaaggcatagacctgtcttccccgcgcacgtccttaattttggcaaataaacgtcctaaaatgattgagacttgtctcaacatttttctcaactgacaggcttcacaatttaaacttaagtgtcattatcttcctaagagattatcaggggacggaaaggtcccctccaaggggaaagtccaaataagaaccactacttattaatatttgtggcctcttttctctttgtttctcgctctctatgtctccccttacttcctccttcttcccaccttcctatcatactgagtaccctcaagaagttcctaattcacattgccttcttccaattccaggagaacccagcaacttttcactaagcaaagaactaatcacactcaagtgtgaaggtgatttgcctatccaaaggacactgtattttaaaaaaagtatcttgttaacttaaaattcctaattggtagggtgaaagtgtgctt

SEQ ID NO: 29514 - DNA, 516 bp, Homo sapiens
tgcaacccaccacagatgctgacattttaaatgtttagttattatagctacttgactaattgccgggaccgacggcggcgcttctccttcgcctcccgccggcaggagaggacggggcgggagaggaaggggttagttgtggttgtagccgccactccccggcgcccgggacccgggacgcccagtcgggccctgcagagggtgtcctacctgggcaccagcggcccctcgcctccagccagggcaccgaaggcgcgcccggcggratgcagcgaactgcctcctgccccgggacagtggagcggcagaaggtccaaccttccggttcgcccacgcccgcaaggtggaaaaagtggggtgaaatcggggaaatttagcgaaattggggcgaaagaagagagaccaaagcgtgttactcacgtgccagatggcgaagaagatgagcgcagcgcacagcaccagagacagcatgtagcagaacgcagcgaaagtgaaggccatggccggcggacccca

SEQ ID NO: 29515 - DNA, 577 bp, Homo sapiens
gtacattcaatatttcccaacagatgttttcaatactccagcctatcgtaagggcatagatcttgtctttcttccctcctatatggttcaataccattccaggatggaacacaaccatagamtgttgtccatataaagataaagcttcaccttcaggcaaaaggtccaggaagtgagcaagctgtgctgccatataaggcgtcatgtcccactcagcacctcagggccctacactccttctcgagggatgtctgtgttcttcgcatccattcttgttggcttcgcttgatgcttcagcagtcccgagtcacctcattggcttactggactcacctggcctgagctaactggctgatttgactcacctgggctgcaggggctgtaatctgaaatgacctttaatctagattttatttggggattttttacacagacatacttacaaatgaacattacatagacatactcatataatgctgtatgtgtgcgtttacttatgtgcctatctatatacaaaagaaagccccataaaaaaactaggtcagtggtcatctctcatttcagctgctccagccca

SEQ ID NO: 29516 - DNA, 528 bp, Homo sapiens
tggtgtrgactagtggttcccaacatttgctataccagaaatcccttttactggttctccttccctgtgagggagtttatcaaccaaataaacttcattgttaagtatttattcctctactttcttatctaaaaatatctgccagtgggagttcctgatctgggtcaccaggctgagttgatataattctggccagtatcgaacaaagaagcttgatattttaggtgacaaccgtggtcttattggaaaggaaggtgaaatttctggtagacttcttgacccttcgaaaaatagactgaggacccccgtggaggagtcctgagattggaatcgctggtataaacttttattttgctgtttggaattaagaatttggatcaaatgttgatggaaggtttctttgagctccacatttccctgggagcctccatcctgtcttgtccccttttagcatgagcagtgtcattattcagcatgtatttagtcagtgatcgccacatgcctggcacttccctgggtgtgaggttg

SEQ ID NO: 29517 - DNA, 528 bp, Homo sapiens
tggtgtagactagtggttcccaacatttgctataccagaaatcccttttactggttctccttccctgtgagggagtttatcaaccaaataaacttcattgttaagtatttattcctctactttcttatctaaaaatatctgccagtgggagttcctgatctgggtcaccaggctgagttgatataattctggccagtatcgaacaaagaagcttgatattttaggtgacaaccgtggtcttattggaaaggaaggtgaaatttctggtagacttcttgacccttcgaaaaatagactgaggaccccygtggaggagtcctgagattggaatcgctggtataaacttttattttgctgtttggaattaagaatttggatcaaatgttgatggaaggtttctttgagctccacatttccctgggagcctccatcctgtcttgtccccttttagcatgagcagtgtcattattcagcatgtatttagtcagtgatcgccacatgcctggcacttccctgggtgtgaggttg

SEQ ID NO: 29518 - DNA, 522 bp, Homo sapiens
aatccacaccagctggttggggaatcatccaaagagacaatttctaccctgtgcccacctctcctctagttaacacctttcagtgttccctcccttcctgttgtccttaagttaatgccctaaagtcatggcccttgctcagcctctaaggccctggtgggtgctgcttccccttgtagctgggtgggtttcaggaaatgccccatctggtcatgagagataggcagccatacctcaggggagatggtggctggggagacagtctagccacaaagagcaaaaaagatagggatgagatggctcagagggagtcttggtaaggactttggctctttctctgttgagatgggaccatcggaaactttttrgcaggttctgatttgcattttaatgagatccttctggctgctgtgttgaaagtggactggaagtggcaaagatggaaagacagaccaatcaggaggctattgtggtaatccagggtattgcagtaatcctggcctggtggaagcagaggagatt

SEQ ID NO: 29519 - DNA, 497 bp, Homo sapiens
atatatggagatacactgaagaaattttccatagaaaaagtgacccagtgaagttgattcaaaaaataataaaaggaaggaaggattaacttctggattgaaaaagttattgataaatcacattcctagttgaatttaaggtggttatagatgttatcccccatgagatacaacagggcccatatcagatagtcagacactgacctttgcatgctatgatgacacagttagcattatcagaggagtaatgaagctaggcccatgtcttgagggtcccaagtcataatccacacctttgtttctcactcctagtgcayatctaaattacttgtgcatcttttaacaagtatacatatctcagacatagagaatcagattcttcatgtacattatacattatttctttaatttgtgagagaagatactacagaggtagaaattaaggctctaggagactaagagacatatccactggccaaggtctaagctgatcaggt

SEQ ID NO: 29520 - DNA, 709 bp, Homo sapiens
ttgctttcagttggttaataacgtttattattgagtttattgtgctcttggacagacaaacaagccaaaaaaagaaagagtatactttctgtaaaagttcataattgattactgtgaaaatactaataaattccttgtttgtgtgtgtgtgtgtgttgtgaataagattttctgtcagtgtgtgcatttgtgtatgtgcttttcatgaggttgttcatgtaggtgtatgtctatacacagagagaaaaagagagacttttatatcactattatgtaattttgttttagataaagccaatttgcscctagttgtgccattgtgacatccattaaacaatgacaaatagaaagtatgtgcctgcttgccattttttagaccatgacatacttctatctttaagtgtctgggcgcggtggctcacacctgcaatcccagcactttgggaggccgaggtgggtgaatcacctgaggtcaggagttcgagaccaggctggccaacatggtgaaaccctgtctctagtaaaaatacaaaaattagccaggcgtggcacacacctgtaatcccagctacttgggaggctgaggcaggagaatctcttgaacctggaaggtggaggttgcagtgagctgagatcacgccactccactccagcctgcgttgtagagtaagacttcgtctaaaaaaggaaagaaaggaagaaagaaagg

SEQ ID NO: 29521 - DNA, 709 bp, Homo sapiens
ttgctttcagttggttaataacgtttattattgagtttattgtgctcttggacagacaaacaagccaaaaaaagaaagagtatactttctgtaaaagttcataattgattactgtgaaaatactaataaattccttgtttgtgtgtgtgtgtgtgttgtgaataagattttctgtcagtgtgtgcatttgtgtatgtgcttttcatgaggttgttcatgtaggtgtatgtctatacacagagagaaaaagagagacttttatatcactattatgtaattttgttttagataaagccaatttgcgcctagttgtgccattgtgacatccattaaacaatgacaaatagaaagtatgtgcctgcttgccattttttagaccatgacatacttctatctttaagtgtctgggcgyggtggctcacacctgcaatcccagcactttgggaggccgaggtgggtgaatcacctgaggtcaggagttcgagaccaggctggccaacatggtgaaaccctgtctctagtaaaaatacaaaaattagccaggcgtggcacacacctgtaatcccagctacttgggaggctgaggcaggagaatctcttgaacctggaaggtggaggttgcagtgagctgagatcacgccactccactccagcctgcgttgtagagtaagacttcgtctaaaaaaggaaagaaaggaagaaagaaagg

SEQ ID NO: 29522 - DNA, 1824 bp, Homo sapiens
catattatgtcccagaggtttaatgtttgagttcatttacctctaggctacttaggtttcagaagttggagacaaactattctgagatgtgtttgtcaacacagctatataatgtttttgtcactgtttgggggcaaatttctggcctcatatgtcctgtgaacaactaacaatctactctgagattgtttaggacattctgtttacattagccccgtaaattgggggaaggggtggttagtggtcatgattccaggagaaagtacatcatttctgaaaataacagatctctttttttaactttcactttcaaagtttgtctttcatttttctctaactttcaaagtttgtcttggtgacttaatgccgtatatatatgaaatagggttaaaaacaccccttgaaacaaatcaaaggctgacatattcacaatttttaatagccgcttatttctccaacccttcctcccctaccacatacatactcaacttgttggtaatagctgcagatcaaaatttgcaggtaaaattgatgactgtcttagttcattttctgttgctataacagaatatcacagcctaggtaatttgtaaagaaaagagatttattggttcatggttctggatgctgagaagtgcaagatagaggtgctgtatctggtgactggtgagggccttgttgctgtgtcataacatggcagaaggcatcacatagttagtgaaggtgagaaagagaagaaaagaaggccaaactcccccgtcccttttatcaggatcccactcccatgatagctaacccattcctgtgataatggcactactccattcatgagggcagaacctctacatctaatcatatattaagggcctcattgcaatgtaatagcgatttggcaattaactttcaacacgagttttgaaggggacattcaaaccataataatggtgttatgggawgctcactgttgttattatgaaatccaatctttcgtcagatttcatgtaagaaatacaactcaacttttccaattactgctcagatatttttgctttctttaaaactccttggagttgaagcttagcttttatcagttgacttaatggcctcattaaactttcattaacttctagaaggacactttcatattctttatgcagtttatgactttacctagattataagtattgttagttgtgcatgccttcaaaaggcttatgctaagataaaggctaactctgtccttcaattactattaaattctccataggtaggttggaaggattgtatctgctgcattttggataaataagacaactgtatgcaccttatatcagtttattcttttgcattttccattaagtatttccagaaatgttgaaattttattaacataaagaagcaagactcagttagaaatgtcaaaactatttttattgaagtgataatcaattcctgttggcattgctaaaaacttccaaaaagtttattaattctacaaataataggttaagattatgtgacttgccaaaaaccacattattcttaagaatactacctaatcaaagaggtgcagatcccagctgctgtcttctacaagtacaccaaaaagaacagagaaactgttatttatagtcaaattgcaatttattagagctgttattttgtcaacacgttacttcagtggtttgtttgacattcttctagatggactctctctggtcctgtcaattttttcagtctttcgaagagcctgtcagtaaaaaatataaaaatcatagttgtctaatgaggtcttgccatatgcgtacatgcacatctatgata

SEQ ID NO: 29523 - DNA, 591 bp, Homo sapiens
gatggmttcaagtagaattctcctgtaatgaaaaattacacagcttcttccatggctatgctttgatggaaccagacttttaaaagccatcaccacatgaacaagtctcatttgtgaaaactatttactattctttgttggaaatgagtttttctggtgtcctgcagtgttctagactctcctgctgttgtttgcccacacttgagactttgagaaggcttttctgttgcacatgttgttttcattaacaagacatacatatccaagttctacatatttcttttgatctatatgctgaggaaagatgctaaagtttaaaacagcaaaatccgtctgcataactgtttctgttgcactaaatcttagcaaaaaataaatatgtctttagactgttgcattacataacaaagaagcagtaaggttccttagtgcactaagattgctctaaggaaccttaactgctattgtggaatggcacaaattcttttattagctgtgtaggcttcctaccagagtagctttccccgaagttacccatcattaaggtgttctgtatctttaaacaaaatcaaggattttcagtatggccag

SEQ ID NO: 29524 - DNA, 513 bp, Homo sapiens
cagacagccttcaccttattgcactaatagcacatctgtaatatcaagctacaggacaagtcttaacaagaggtttgtgttcttcaatgtagcacttgtctaccaggcactgtagaggggagtgatgaggaaaagccaggactgcttaggaggtgaaggatgggaggggagggggtcatcatacatccttctgacaattggtttcctcccaggaaggggaacatgcagagcttacttctggattctgggagtgggaagagttgggaggccaagaagcccaatgcaacgctgcagctgagctccttttatttctgagggaagcaaggamtcatcttttgctcatttgtaacaaatcactccagcctagctgatgctttggggtaaacaatggagtaggagtcatcatcagaattagaattagcagcaattaacaggcaatacactgccacagtgaggcgggtgtcatccaggtcctggggacctgcaggctgtgtatcctagggagaggtgcca

SEQ ID NO: 29525 - DNA, 697 bp, Homo sapiens
gagtttatagtcaaaaaggacagatagacattaaatgcataattatacaaataatcacaatagtggtgaacactacaagggtgaagtacaagatgttctgtgaaacttgaccttgtctaggggcacagacaatacatcctaggaaactcagacaagtttaagataaacaaacatggacattgattagtcttctacagggaggtctagttacacaaagtgatggtcctctgacaactctgaaatcaacgcattcaatgcaaacaaagattattattgtcttctggaaaagtttccagatctcattagggaaaaatgaacccaatwtttgttcttaacatataattacttcaaactatggttaaactcacagaaagctggaaagtcagaaagttttctgacatctgtcttctaatgatgcttttcactttcagattaaacaaattctgctataatgaaagaagatgaagagggaccatcatctctatgggaggccaccatgtctcgccttccataataagctattacaatactttggacccatatccataatgccaaaggaccaattattactagaatcttaattctgggaacaagataggtaaagaaaaatgcatcacgttcaagcaaaaatacactcatcaaactgacacctcacaggcacatcaaacaaaacactaaactacaccccaggattcca

SEQ ID NO: 29526 - DNA, 1062 bp, Homo sapiens
tgcattcctaacaagctcccaggcgatgctgctggctccaggtaccacacttccaatagcaaagggccactgtcttgttcactgtgtatctccaatgcccagagaagtgccaggcacacagactactcaataattactgactgaattaataggcagaaatccgagcatgcaattttacttaaatgcacccttaaaatatatgctatyctgaaacctgtttttgctacataatatgttgtgacatcttttcttgtcaataactactggtacacatcatcatttttaatggctaagggtaactttactgtgtctatgtatccataaatcccgttactgatggacatttggggtgttttcaataaacaatgcacagccagatacatatattatttttcccacttgtatattatctcgtgaaagtataactgctaggtcaaaggacatgcatgctttacattttggtatccttttgactgttgactgcctcctccctgaggaactggtattgtcttctggccacagacagctatgagaaaagcctccagcctaggattgtctgcgatgggctgattctctcaagttggcaatgacgctcctagaagcacaaaggctgagatcatcccatggttcctctgcatttttgttaagttgctccttaactgctgctgcgctctattattctccatccatctctgtctcttttcattttaacatctgtgtatttcattattctgcaaagtaggggacactcctgtctggtcaaggaaaccatgactcttctttttatcattctaaatttgcaccgggtacagggcatcgatctttgctggaattggtttctctgggttgcaggaatcatggcaaaatgcagcatcctccttctgtgagatgctccttgagttgactttcctgggctacatggtctcctttgactaaggaccttgacaaagggcaagggcaggctctcgctcttaggactgtcctacttgccagtatttctccagaattccccatcctctggggcagtgttgcagagaacaagtcagtgatccacctgcagca

SEQ ID NO: 29527 - DNA, 1062 bp, Homo sapiens
tgcattcctaacaagctcccaggcgatgctgctggctccaggtaccacacttccaatagcaaagggccactgtcttgttcactgtgtatctccaatgcccagagaagtgccaggcacacagactactcaataattactgactgaattaataggcagaaatccgagcatgcaattttacttaaatgcacccttaaaatatatgctatcctgaaacctgtttttgctacataatatgttgtgacatcttttcttgtcaataactactggtacacatcatcatttttaatggctaagggtaactttactgtgtctatgtatccataaatcccgttactgatggacatttggggtgttttcaataaacaatgcacagccagatacatatattatttttcccacttgtatattatctcgtgaaagtataactgctaggtcaaaggacatgcatgctttacattttggtatccttttgactgttgactgcctcctccctgaggaactggtattgtcttctggccacagacagctatgagaaaagcctccagcctaggattgtctgcgatgggctgattctctcaagttggcaatgacgctcctagaagcacaaaggctgagakcatcccatggttcctctgcatttttgttaagttgctccttaactgctgctgcgctctattattctccatccatctctgtctcttttcattttaacatctgtgtatttcattattctgcaaagtaggggacactcctgtctggtcaaggaaaccatgactcttctttttatcattctaaatttgcaccgggtacagggcatcgatctttgctggaattggtttctctgggttgcaggaatcatggcaaaatgcagcatcctccttctgtgagatgctccttgagttgactttcctgggctacatggtctcctttgactaaggaccttgacaaagggcaagggcaggctctcgctcttaggactgtcctacttgccagtatttctccagaattccccatcctctggggcagtgttgcagagaacaagtcagtgatccacctgcagca

SEQ ID NO: 29528 - DNA, 1062 bp, Homo sapiens
tgcattcctaacaagctcccaggcgatgctgctggctccaggtaccacacttccaatagcaaagggccactgtcttgttcactgtgtatctccaatgcccagagaagtgccaggcacacagactactcaataattactgactgaattaataggcagaaatccgagcatgcaattttacttaaatgcacccttaaaatatatgctatcctgaaacctgtttttgctacataatatgttgtgacatcttttcttgtcaataactactggtacacatcatcatttttaatggctaagggtaactttactgtgtctatgtatccataaatcccgttactgatggacatttggggtgttttcaataaacaatgcacagccagatacatatattatttttcccacttgtatattatctcgtgaaagtataactgctaggtcaaaggacatgcatgctttacattttggtatccttttgactgttgactgcctcctccctgaggaactggtattgtcttctggccacagacagctatgagaaaagcctccagcctaggattgtctgcgatgggctgattctctcaagttggcaatgacgctcctagaagcacaaaggctgagatcatcccatggttcctctgcatttttgttaagttgctccttaactgctgctgcgctctattattctccatccatctctgtctcttttcattttaacatctgtgtatttcattattctgcaaagtaggggacactcctgtctggtcaaggaaaccatgactcttytttttatcattctaaatttgcaccgggtacagggcatcgatctttgctggaattggtttctctgggttgcaggaatcatggcaaaatgcagcatcctccttctgtgagatgctccttgagttgactttcctgggctacatggtctcctttgactaaggaccttgacaaagggcaagggcaggctctcgctcttaggactgtcctacttgccagtatttctccagaattccccatcctctggggcagtgttgcagagaacaagtcagtgatccacctgcagca

SEQ ID NO: 29529 - DNA, 1031 bp, Homo sapiens
atttcataaagtgtggtttgcacaaacttattctctctctatttctgctgtagaggtacaaataaattttcttaaagaaaaaaaggagggtttcaataacagctgacctactgatgcaaatttgagcagcagacacatgataaagggcacaaaatctcaaggaagagaaccaatgggagaagatgggtaagtgtcatttagaggcattccacaaaatgaactaaagatgaaccagactgggccgggcgtggtggctcacgcctgtaaccccaacactttgggaggccgaggcaggtggatcacgaggtcaagagtccaggccagcctggccaagatggcgaaaccccatctctactaaaaacataaaaattagccgggtgtggtggcaggcgcctgtaatcccmgctactcgggagagtgaggcagagaagtgcttgaacccgggaggcggaggatgcagtgagctgagatcgctctactgcactccagcctgggcaacagagtgagactccatctcagagaaagaaaaaaaaaaaaaaaagatgaaacagactgataacatggtgggtttccagagaggaaaacaaggtggaaacaagaaagagctgcttggagtacttgggggatgtgacaagaactgacatatttgcaacacagagcacatttccacctttcactggccacaaagctatcaggaagtcaaactggggccaaaaaaaaagacataactgacctgattgaataacccaggtaagtttttcaagccacttgttggaagcaggagggggaggatatcccttctatggtcactgagcttcccaaactcttctcacccctagaaattcacaggtctacgattccccgattccccaggctcatcctgcctgtaggctagcagggctcagtaagacacaaggataagcagaattctcacggcatgcagtgataacgagctgctcctatgaatttcttttccagggttgaacatctcatttctcctgggtttcttcctctgtctccaccttctcatt

SEQ ID NO: 29530 - DNA, 628 bp, Homo sapiens
ggatcccctaaacgcagactatttttttttaaatataaagctttttccatccatatttggaaaactaaactaaaattagcacttctcctatcacatgccctgcacgacttctgtagaaattatctctgcctgcttagtcacttggttctatttggtgacagaaaaaagcaaagatctctctattccaaaagtataagctcttttactctcaattacccagactagtggggggcctggagcagcaaagtggaaagcaagcacaatcagaaaataatacggcagattctctagttccacaaaattagtatccccatggtgataacgcagcttgctactctcatccagtttgtcatcaaatcttggcgattctagcctgaaatacttcctgaagccatcccccatatgttcccactgcccccaccttcrcgtgtcttatccgtggcttcccacggcccatgggagagagcgcaacatccttcccatggtttcccaggcccccagtccacgcaggccaccacggaccactccagcttccctgcaggctgttcttcccccgtccatgacaaagattctctccttgaccaaactccactccggttcttctgagctctcttctcaaagaagccct

SEQ ID NO: 29531 - DNA, 556 bp, Homo sapiens
agattctcggctaatggcaggaccctttatttctatttcttacctctgttctggagtttgcaggtccaatcctccataatcatagcctttgcgccactawttgggtgtagcaacctttccgttctccacatatcttcctgggaattgccagcattttgccaaaaactgtggcaagagattctggattgaagttttcccctttttcattgtatttcttttttcattgtctgagactctactcagaacgcagagtctgacgcagtatcttttgagctaaagctaaactcaagaacttcagcagccatttaatcttcaggaagccctaaacacaggcaagtctcagtacctttataccaccagggccctgcagagtcagacactgggaacatagacagttacagacaacagtaaggatattgtgcctgatgaatacaaaagtgcagggtggtggaaagtgccctgctgggagtgcctggattctaatttcccctatgtgctagttggctgggtgacctacaacaagctacttttcattcttgggtgtttccttcttacg

SEQ ID NO: 29532 - DNA, 556 bp, Homo sapiens
agattctcggctaatggcaggaccctttatttctatttcttacctctgttctggagtttgcaggtccaatcctccataatcatagcctttgcgccactatttgggtgtagcaacctttccgttctccacatatcttcctgggaattgccagcattytgccaaaaactgtggcaagagattctggattgaagttttcccctttttcattgtatttcttttttcattgtctgagactctactcagaacgcagagtctgacgcagtatcttttgagctaaagctaaactcaagaacttcagcagccatttaatcttcaggaagccctaaacacaggcaagtctcagtacctttataccaccagggccctgcagagtcagacactgggaacatagacagttacagacaacagtaaggatattgtgcctgatgaatacaaaagtgcagggtggtggaaagtgccctgctgggagtgcctggattctaatttcccctatgtgctagttggctgggtgacctacaacaagctacttttcattcttgggtgtttccttcttacg

SEQ ID NO: 29533 - DNA, 1783 bp, Homo sapiens
gggtggagactccagggcacctgtgctctgcttcagtgtggaggcttctgtgttgtgttcggggagcacagtggcttggcctccgccaccagcagcagcttaaagagttcctgctgttccacatgcttgccaacaattggcctcttcagttcttttttttttttaggttttcagtgcctgcctggacttgtgttttcatttagattttggtttcttagaaytttcgttattctcttcacagcttaacaatgcatttgaaaagatttgttttcatgtggagtattcagttttgtaataagagggttgttcaaggcatcagtctgccactctgctagaaacagaattctcccaggcattttttttatataaagtagttaatgaaattttgaaccatcttacatgaatttttattaaaatacacttcaggatgtggtgcccattatccattctactcttttgtaacaagtagatttctctgaattcttgaatttgaaaacaattggggttcctaaacagagaatatggaatattattggggatgatgtctttaataatacatttcaagataggagaaactttttctatatagttgactttaataaaagcctagggcaaaactttcaatatattaacagtatttatgaggcagttaagaatttgggtcatctccgtctccactaaaaatacaaaaaattagccaggtgttgcggcgggcgcctgtagtccctgctacttgggaggctgaggcaggagaatggtgtgaacccaggaggcggaggttgcagtgagccgagatcatgccactgcactttagcctgggcaacagagtgagactccgtatcaaaaaaaaaaaaaaaaaaaagaatttgggtcatctcaattaagcattgaatttaagattacattgaaaattcagtacagagtattttgccttcatctgttgtttgagtctcccttctttcagccatccttccatcagaaatagaataccaagttaaacttcttaattagaatcaggaatcaggactccttggctgctgattgaaggaagaagtgtccttaaatccagagtgggccgggcatggtggctcatgcctgtaatcctagcactttgggaggccaaggcaggtggatcccctgaggtcaggagttcaagagcagcatgaccaacatggtgaaaccccatctctactgaaaatacaaaaattagccgggcgtggtggtgtgtgcctatagtcccagatacttgggaggctgagataggagaattgcttgaacctgggaggtggaggttgtgtgagccaagatcgcgccactgcactctagcctgggcgacagggcgagactccatctcaaaaaaaaacaaaaatccagagtggttggtagtcaagacaaaaagctagattatttttgttagtctgggaactaaaaaaaatggttgtaactttgaagcctttttatggatcaacatgaagattgagggatctcaaatagaaagggcatcctggtggcaaaggataatgattaccagactgcaagagtactttcaatggcaagaaagcaacaacagaatcaatgaaaacaaagcaatgattagaatgccctttccccttctcctcctgacctgtagacgctgattgtcttccttggacttagggaaccctttaagttcttgaaaaattcaatgatcaggctatagtagatagtccccagtacacagcacaagatgttttgataaactggacattttgagacccaaataactaattagaaaaatcaaaca

SEQ ID NO: 29534 - DNA, 802 bp, Homo sapiens
ctgtaatcccagctacttgggaggctgaggcagaggattgcttgaacccaggaggtggagtttacagtgagccaagatcgtgccactgtactccagcttgggtgacagagcaagattccatctcaaaaaagaggaaaatttaaacaaagagatagacaggcatagaaggaagattatggtaagatgcacagggagaagctggtcatgtaactggagtgatgtgtctacaagccagggaacaaaagaagttagaagaggcaaggaagcagtcttccctagagctgtcagagagagctggccctgctgccatcttgatttctgactcctagccttcattactgtgagagaatacattcgtgttgtttaagccacccagattttggcacttcgttatggtgatcctagcacactgatacacccatgatctattatgaaacaaaatatcaagttgtagaccaataaatataatgcaaatttattttgttaaaatgttgccattttaacaatatgtgtagctagaaaactacactgtgcttatttgtagctagaaaagtgcctagaaggatatctaaaggctgtttatcaagactgcccctgaggaggggacttgttgggtcactatgggaaagcctttgctttttgcttcacaaattatctatttattttttttctccagtgggcacatactactttctaaatatattctccttctggaaatccaagttcttgtacaggggccttcttcttaagagggagaagagaaacwagaggtagaggaagaggagaaggaattctacccaga

SEQ ID NO: 29535 - DNA, 594 bp, Homo sapiens
cagatgatcacaatggtatgaagacatgatgtccctgtgtggtttgtgcctggagagaaacattccccagtcttactacactgtgtcacttacctcaacccaaataaaatcaccatgtccaagggataaccacatcacatctttagttcttattgagtctgtctgctactaaaattgatcagattttcttcccatatgtgctgcttagccatctcttcagccttcgtgtctctttctcctcactctgcctgccacctcagagcccaagagctttcaaattgtgtttcacagaaagtcctcaggggccatggagagtggtgccgaggagtaaggagtgggttcccagagcctccattcccacttcaaccagaacaagtttttcttacatatgagaattctggcaagattttatttgatgaaagtattccatggtagtagaatactatgyggccataaaaaagaatgagatcgtgtcttttgcaggggcacagatgaagctggaagccatcatcctcagcaaacttacacaggaacagaaaaccaaacactgcatattctcgcttataagtgggagttgaacaatgagaacacttg

SEQ ID NO: 29536 - DNA, 931 bp, Homo sapiens
  misc_feature (1)...(931): n = A,T,C or G
gaagaaaggtttcccagttccaaagctggacccacaggaatcctgtgaggatttgcaaagacattgatagtgttggttcttggagcatctttctgcctcccgggctttgtctggtctcagcctcggggctgcaatccagggctgtgctgagcagcaagaggagaggagaaatgccactgtcttgcacctcccagtaagtctcccttttcatgaacagcccttgtgccaggtacaatggtctctctgttctctcacaaaactcatccacaaaagatatacagagtcttttgacagacagtcccactgctctggagtcctttatgttcatttctgattgacaattttggaccaaggccaagaggcccctaattcatgttgcttcgtcatgagggttgtccttgtcatctgatgatgcatgaggcatgctaatggcaagagccgggatgccaccccaggcttcgaggctgttagaggtcttgagtgcacacacacacmcaaacacacagagagacacacacacatttgagctcccattaggtcacttgtaactttgcctagcaaaacaggctcccaagacataaggcttgcatcgttgtgaaaagttgtgatggtacagaataatttttttttttttttttttgagatggagtctcgctctgtcacccaggctagagtgcagtggcatgaccttggcttactgcaacctccgcctcctgggttcaagcgattccagaagagagaattcttagagtcagagggaggagtagaaggaaaaagatatttaaaaagctatgcttcaagaggacatttcatgctgtcaaaatgagactnnnnnnnnnnnnnnnnnnnnnnnnnnnnnnnnnnnnnnnnnnnnnnnnnnnnnnnnnnnnnnnnnnnnnnnnnnnnnnnnnnnnnnnnnnnnnnnnnnnnc

SEQ ID NO: 29537 - DNA, 595 bp, Homo sapiens
gcaaagtcttttattttagagctctttttcagacaagaaatgattatactttttcttcaaatcatttattcaatcataatgataaatatggctttcactattctgatgaagcagagctaccatcagtgtgaaataataatagccgttgtttagtgagcatctactacattccagtcaattcagattttttctctagatttttggtgaccttctgattactattaatttacattttttttattgttctctacatgtcaaacaaaacaaagcaacaatatcaaaaacccacatgctttttcttcatactgtctatattattgaatgacagacaaacatctgtccttcaagtcaaatattaattaatcatagactcctttctcttyttcttcaccccgccttatctaattggccactgtcttagcttttttttttttttttttttttaaagatggagtcttaccctgttgcctagtctggagtgcagtggtgtgatctcggttcaccgcaacctccatctcctgggttcaagcaattctcctgcctcagcctcccaagtagctgggattacagacatgcaccaccacacctggctaat

SEQ ID NO: 29538 - DNA, 649 bp, Homo sapiens
tacatggaaacctgatgtttaacctagctggtactgcatgtcattaggacaatcccctaggtttctggactccccacaaatgccaaaatccacagatgcccaaatctctcatataaaatggcacagtmtttacatataacctacatacatcttcccttatactttaaatcatctctagattacttataatacctaacctaacgatgcccacacatcacttcattcacgtagattcaatgtagtattcagcacatggcaagctcaagttgtaattttgggaactctgtggaatttttcccccctgaatgtttttgacctgaggttagttgaatctatggatgtggaacccatggatccaaagtactgactgtatttccatagatggttccgggaaactggtcatctttatagaaaaaatatgaaaatgaatctgcacctcacacaagaaaataaattccatattgattaataaattccagattaacatgaaaagaaatttgttttaagttttggaaaaaacatgggaaactatttttatgacctcagagtatggaagaatttttttacaaaaaattctaaagaaaaagattggtaaatacaagtttaaaacttaaattcatcaaaagatttttcttatttttcttaattc

SEQ ID NO: 29539 - DNA, 939 bp, Homo sapiens
agtagtactagttttaaggaaayatgttattagggtgcacatacagtatatacattctctgaggtccaggggacttgtggctggaggctgcaagggtttgccaaggctggaaaccatcacttatgggaatgcaaagctaacaaataaactactattagaaaacaaattctatgttgtgcaagggaaaaaaggaggcacgtaattcccataatctttaactttactgttaattattcacaagagactggagctgggaaaaaaagactaaagattttttaaccttcccagttctaatgttttatgattctgaaggaagtttctcaaagcctgagtgacacagagattgctttcttagttccacctgtggcatctctagcaggccttctgggtcttttgtctaacaacctaacgcactttctcgatcttccacagtacacacactacataagacctaaaagaaatgcatatacaaatgtgagctctatatacagtatttaacactgctttatagcttttacttgtggcagtggtggtatgtttccatacaagaggctttggctgtcaacagacaccattacaaagaaaataattcaaatataaaagtaaattgtatttgctgctttgggtttgtagacggaaatcagggtcaagtttttggagtgaggtataattaattccactataagaacagccttcaactgtgggattacatagaatacagagatagagaagaaaggagagtttgcctaaattgcttgtgaagtttcaaaaacctaagagattctgagcattggctaaagtgagcaatatgtcatgtttgtcatctgtcctcaggccactcttagctttcttacccttactaagcccagtgccacttcatctgtcaccacggcctcccctatacagtcatctcttggtatccacaggggattgtttcca

SEQ ID NO: 29540 - DNA, 1175 bp, Homo sapiens
cagcactttgggaggccaagacaggcagatcacttgatgccaggagttcaagaccagcctggtcaacatggcgaaacctggtctctactaaaaatacaaaaattagccaggcgttgtggcatgtgcctatagtcccaacttctcaggaggtttaggcaagagaattgcttgaacccaagaggcagaggttgcagtgagccaagatcatgccactgcactccagcctgggcgacagagtgaggctgtctcaaaaaaaacaacaaaaaaaaactatttcatttgtgaatgggctaaaactgagaaactcagaggttagcaacctattctgtaacaaaggccagggtaaatattttaggttgtatgaaccacagtctctgttccaactactcagctctactgctgcagggcaaatgcagccacacaaaacatataaatgattgagcatagtatgttctaataaaactttatttaccaaaatgtatgatagggccaggcgcggtggctcacgtctgtaatcccagcactttgggaggctggggcgagaagattgcctgagctcaggagtttgagaccagcctgggcaacatggtaaaaccccatctctactaaaaatacaaaaattagctgggcatggtggtgcacacctataatcccagctactcaggaggctgaggcaggagaattgcttgaacctgggagacagaggttgcagtgagctgagatcgcaccaatgcactccagcctggtctgggtaacagagcaagactctgtctcaaaaaaaaaaaaaaaaaaaaaaaaaaagggaagggaaaaaaaaaagaaagaaaaaaaaacaccaaaaacacaacaaagagacaaacaaaatgtatgataggccagatttggctkccaggctgtgatttgctaacctctgatttaactaaaatcagtttttaaaaaatagatctttagaccatctccagaaatatgtaccaatgactaaactatgtgcttaacacaacattatgcattatggactctacatttttgctttttctcatagttttcttcaacgtacatacacacacacacacgcacttttttttttttttaagacagggtctttctctgtcacccaggctggagtacagtagcacaatcacggctcactgcagctttgacctcccagactcaag

SEQ ID NO: 29541 - DNA, 468 bp, Homo sapiens
  misc_feature (1)...(468): n = A,T,C or G
tttgacagwataatttacttcagtagcacatactgacaacaatttaactttacacacgtgggatatgatactttcggaaatcctccttttgcttgtttcagattttctctttcatttcattctcaggtaattgggtaccatttcctggatattttgttggtgtatcatttcctgacatcaattctcttcctaatcctctgtagtcactatttttaatctttctaggctaaaaatatatataagcctggttgtaagtcttgtgtctaaaatatctatgggaaaagtacatgagttctctacacagttctttctcactgcagtcagtccttgaccctttccttcacttccctggaatgacagtctggnnnnnnnnnnnnnnnnnnnnnnnnnnnnnnnnnnnnnnnnnnnnnnnnnnnnnnnnnnnnnnnnnnnnnnnnnnnnnnnnnnnnnnnnnnnnnnnnnnnnttt

SEQ ID NO: 29542 - DNA, 835 bp, Homo sapiens
aagcttcctcatcttacactccctcaacaagttctacctctgcactatataccaatcctagaggagtcctcttctctagtctagcagttctagtgcagtggcgcactctcggctcactgcaacctctgcctcctgggttcaattgattctcctgctcatctacccaagtagctgggattacaggcatgcatcaccaccaccagctaattttgtatttttagtagagatggggttttaccatgttggccaggctggcctcaaactcccgacctcaggtgatacacctgcctcagactcccaaagtgctgggattacaggcgtgagccacagcgcccagcatgaagcagttctttatacaaactcacggcatcttaactgaaattcagaaaytgagaaagctctgaataccaaaatgtctctttcataactcatttagaggcaagactttagctgatctgaatataaatatataaactcaaaaatatagaaattcaaaaatatatatattcaaatatatatattttgaacatgtgtattttatatatttatttctattttcatttttttttgagacagagtcttattctgtcgtccaggctggagtgcaatggcacgatcttggctcactgcagtctctgcctcccgggttcaagtgattcttctgcctcagccccccgagtagttgggattacaagcattgccaccatgcctgactaatttttgtatttttagtagagacagggttgcaccatgttggcctggctggtcttgaagtcctgacctcaggtgatcaacctgcctcggcttcccaaagtgctaggattacaggtgtgag

SEQ ID NO: 29543 - DNA, 1058 bp, Homo sapiens
cttgagattaggagtttgagaccagtctggccaacatggtgaaaccctgtctctactaaaaatacaaaaaatcagccagtgtggtggcacacacctgtaatcctgtaatcccagctactagggaggctgaggcagaaaaattgtttgaacctgggargtggaggttgcactgagccaagattttgccactgcactccagcctgggcaacagagagagactcaatcttagaaaataaaacaacaacaaaaaagtattgtttactgtgggccaggaactgtctaaagtggttcacatagaatatttattttcgccgggcacagaggctcacacctgtaatcccagcactttgggaggccgaggtaggtggatcacctgaggttaggagttcaagaccagcctggccaacgtggtgaaacactgtctcttctaaaaatacaaaaattagctgagtgtggtggtgggcgcctgtaatcccagctactcgggagactgaggcaggagaatcacttgaacccgggaggcagaggttgcagtgagccgagattgtgccattgcaatccagcctgggcgacaagagcaaaactccatctcaaaaaaaaaaaaagaatatttattttcattttaccaagtgctccaccagtattaagttcttccttctgctcctctcttctccatggtagaccttcagagttggaaattaaatgtttccctcactccctctgttctgcaatattgaggcactgagcaggatctggggctctctctcttgagttggagcagcaggagctttaccagggacttactggagttggcacgcgcaaaggaggataattgctattaggattttgggcagggatgcacttagcctcagcaagcagggactagccgtaggatggaaaagcactcaggcctttctgtctctgtccttgctgtgattgtgcttcggtcattctcctctcactttttctgaggggcaggctaggttgggcaaaatggcaggtcaagctctcatttttgcattgtctcccatttaatagagcagccagaacataggcga

SEQ ID NO: 29544 - DNA, 1058 bp, Homo sapiens
cttgagattaggagtttgagaccagtctggccaacatggtgaaaccctgtctctactaaaaatacaaaaaatcagccagtgtggtggcacacacctgtaatcctgtaatcccagctactagggaggctgaggcagaaaaattgtttgaacctgggaggtggaggttgcactgagccaagattktgccactgcactccagcctgggcaacagagagagactcaatcttagaaaataaaacaacaacaaaaaagtattgtttactgtgggccaggaactgtctaaagtggttcacatagaatatttattttcgccgggcacagaggctcacacctgtaatcccagcactttgggaggccgaggtaggtggatcacctgaggttaggagttcaagaccagcctggccaacgtggtgaaacactgtctcttctaaaaatacaaaaattagctgagtgtggtggtgggcgcctgtaatcccagctactcgggagactgaggcaggagaatcacttgaacccgggaggcagaggttgcagtgagccgagattgtgccattgcaatccagcctgggcgacaagagcaaaactccatctcaaaaaaaaaaaaagaatatttattttcattttaccaagtgctccaccagtattaagttcttccttctgctcctctcttctccatggtagaccttcagagttggaaattaaatgtttccctcactccctctgttctgcaatattgaggcactgagcaggatctggggctctctctcttgagttggagcagcaggagctttaccagggacttactggagttggcacgcgcaaaggaggataattgctattaggattttgggcagggatgcacttagcctcagcaagcagggactagccgtaggatggaaaagcactcaggcctttctgtctctgtccttgctgtgattgtgcttcggtcattctcctctcactttttctgaggggcaggctaggttgggcaaaatggcaggtcaagctctcatttttgcattgtctcccatttaatagagcagccagaacataggcga

SEQ ID NO: 29545 - DNA, 1058 bp, Homo sapiens
cttgagattaggagtttgagaccagtctggccaacatggtgaaaccctgtctctactaaaaatacaaaaaatcagccagtgtggtggcacacacctgtaatcctgtaatcccagctactagggaggctgaggcagaaaaattgtttgaacctgggaggtggaggttgcactgagccaagattttgccrctgcactccagcctgggcaacagagagagactcaatcttagaaaataaaacaacaacaaaaaagtattgtttactgtgggccaggaactgtctaaagtggttcacatagaatatttattttcgccgggcacagaggctcacacctgtaatcccagcactttgggaggccgaggtaggtggatcacctgaggttaggagttcaagaccagcctggccaacgtggtgaaacactgtctcttctaaaaatacaaaaattagctgagtgtggtggtgggcgcctgtaatcccagctactcgggagactgaggcaggagaatcacttgaacccgggaggcagaggttgcagtgagccgagattgtgccattgcaatccagcctgggcgacaagagcaaaactccatctcaaaaaaaaaaaaagaatatttattttcattttaccaagtgctccaccagtattaagttcttccttctgctcctctcttctccatggtagaccttcagagttggaaattaaatgtttccctcactccctctgttctgcaatattgaggcactgagcaggatctggggctctctctcttgagttggagcagcaggagctttaccagggacttactggagttggcacgcgcaaaggaggataattgctattaggattttgggcagggatgcacttagcctcagcaagcagggactagccgtaggatggaaaagcactcaggcctttctgtctctgtccttgctgtgattgtgcttcggtcattctcctctcactttttctgaggggcaggctaggttgggcaaaatggcaggtcaagctctcatttttgcattgtctcccatttaatagagcagccagaacataggcga

SEQ ID NO: 29546 - DNA, 1058 bp, Homo sapiens
cttgagattaggagtttgagaccagtctggccaacatggtgaaaccctgtctctactaaaaatacaaaaaatcagccagtgtggtggcacacacctgtaatcctgtaatcccagctactagggaggctgaggcagaaaaattgtttgaacctgggaggtggaggttgcactgagccaagattttgccactgcactccagcctgggcaacagagagagactcaatcttagaaaataaaacaacaacaaaaaagtattgtttactgtgggccaggaactgtctaaagtggttcacatagaatatttattttcgccgggcacagaggctcacacctgtaatcccagcactttgggaggccgaggtaggtggatcacctgaggttaggagttcaagaccagcctggccaacgtggtgaaacactgtctcttctaaaaatacaraaattagctgagtgtggtggtgggcgcctgtaatcccagctactcgggagactgaggcaggagaatcacttgaacccgggaggcagaggttgcagtgagccgagattgtgccattgcaatccagcctgggcgacaagagcaaaactccatctcaaaaaaaaaaaaagaatatttattttcattttaccaagtgctccaccagtattaagttcttccttctgctcctctcttctccatggtagaccttcagagttggaaattaaatgtttccctcactccctctgttctgcaatattgaggcactgagcaggatctggggctctctctcttgagttggagcagcaggagctttaccagggacttactggagttggcacgcgcaaaggaggataattgctattaggattttgggcagggatgcacttagcctcagcaagcagggactagccgtaggatggaaaagcactcaggcctttctgtctctgtccttgctgtgattgtgcttcggtcattctcctctcactttttctgaggggcaggctaggttgggcaaaatggcaggtcaagctctcatttttgcattgtctcccatttaatagagcagccagaacataggcga

SEQ ID NO: 29547 - DNA, 564 bp, Homo sapiens
tgaattctgcactgtcagtgatttcttggagccttggtttccctcattatatacctacttcaaatacacataatgttgtttttgtgaacattatcattcacagacactttttttttttttgagtcagagtctcactctgtagcccagactggtgtgatcttggctcactgcaacctccgcctcccggattcaaacaattctcctgcctcagcctcccragtagctgggattacaggtgcctgccaccatgcctggctaatttttgtatttttagtagaaatggggtttcaccatgttggccaggctggtctcgaactcctgaccttgtgatccacctgcctcagcctcccaaagtgctgggattacaggtgtgagccactgtacccagtcatagtcacttattttcttttatttttattttacttttttttttttttttgagacagagtcttgctctgtcgcccaggctggagtgcagtggtgcaatcttggctcactgcaagctctgcctcctaggttcacgccatcctcctgcctcagcctcccaagtagctgggactataa

SEQ ID NO: 29548 - DNA, 445 bp, Homo sapiens
acctccaggacttgacctcagtcttgacctcaagggtcttgggtagctccagggatccctgaagcacagtttgagaacctggccctgtggattccagcttcattgtgccacctcggggacgttatttaatcttctgtgtcttaacttcttcctctttaaaatggggagaaaaacagggcttaactcctagggttcatgtgaggatcaaaggacaattcgtgtgaggcatttagagctgaacctagtacagagaaaactccacagtcatcagtataatgtttaaacaagcacagaagttgattatgacaatttctgtccatgatagagtattgttcacatacaggatttaattttatgctacttccttkgtcaagaatgcaatataatctttttaaaacttataatcttttaagaagtcattacatttttttcatattggtaatct

SEQ ID NO: 29549 - DNA, 558 bp, Homo sapiens
gtttcatgttactagttcctttgtaaatgataaatttgttcaactgctagaagtaatttcctaattgagaaaagttttcctcccattttattagattacagagaatggcaaggtttscttgaccttttagttttggctttttgatttttattaaattgaagactttactaaggtctgtacaatataaaaaattatccgaatgtcttgatcggctggctttttctccctcaagaaacatttagataattctataaatttatttactacttaaccatgctctaaaatttactcagctttcaatatgttacttgcaagacgtaatttttttcacttgttaattggaactgcatataaaaactatgcccatttctgactagtcaattcaaaaatgtttaaaaccactgttgtggtattcttcaaatgtagcttatatcatcttaagaatgattgctttttcttcacatacggctatcggtggagggatgctaaaaatttaaaattttatggaagttggcttgtctctgtacatgcacatatagagagatatatacataatgg

SEQ ID NO: 29550 - DNA, 548 bp, Homo sapiens
caggctggtcttgaactcctgacctcaggtcatcctcccgccttggcctcccaaagtgctgggattacaggcatgagccagcatgcccagccgagatcatacctgttaaatagcactcattgtaggtagtaattgarcagtttgcccatagcttcattgacctactttcttggagtacaatggcgccatctctgctcaccgcaacctctgcctcccaggtttaagcagttctcctgcctcagcctcctgagtagctgggattacaggcatgtgccaccacgccgcctggctgattttgtatttttagtagagatggggcttcgccgttttggtcaggctggtcttgaattcctgacctcaagtgatctgcccgccttggcctcccaaagtgctaggattaccgtgcccggcccattgacctactttttattaatttgttcattaataattagagatgaggtctcaccaagtttcccaggctggtattgaactcctgggctcaaagcatcctgccacctcagcctcccaaagtgttgggattacaggtg

SEQ ID NO: 29551 - DNA, 982 bp, Homo sapiens
tcaggtcccctggacccgccttttaaactctyattctgtctctttctaactcctttgtctccgctggactcggggtaccgccgggtggtgtggggctggtttccctaacactcttcatttgtgaggaatcttgccccgggtagcatcccatatttccatgctagtaaaaagatgcagtctgttatactcaccttatccccttatttattgattacttatgagataattcacacattgaaaaagcactagccaactgttctgtatattcccttaaaaatcgatggacccagaagaggactccaccagggacacgactccttcattcgtcgaatcttggacattttgcaagagaacacctccctctagcttatcttcctgctggcccattccaactattactaataagcataattgaaatcatgttgctggaccacaacttattataataatgatgagaataacactagtaatgtcctagctaacttttatgtatcttttacgcaccatgcactgtgttaaatgcataatacattttaccttatttgatctttactataatcctgggaatttgggtctaataatatcattgctttatcattgatgaagctgaagttttgataggttaaaggatttaccccagttcacaaacctagtgtacattgaggcagggattccaactcagtgatgtgatactgctccaggatcttgagtctttatcgcctgtggacctaccatgctttttacctggttccctttgacagtcttttgcatctgacactcacgctctcaccgcattctttcacttctataagcagctgtgaagtgaatatctttgtatgtagacattggcatacttttttgctataccttcaggaacatttccattgaggaatttggggatgaagaggcatcttcatttacattgttacgtttctccaattatcccccctgaaaatttatataaacctcagtggaacatgaa

SEQ ID NO: 29552 - DNA, 982 bp, Homo sapiens
tcaggtcccctggacccgccttttaaactctcattctgtctctytctaactcctttgtctccgctggactcggggtaccgccgggtggtgtggggctggtttccctaacactcttcatttgtgaggaatcttgccccgggtagcatcccatatttccatgctagtaaaaagatgcagtctgttatactcaccttatccccttatttattgattacttatgagataattcacacattgaaaaagcactagccaactgttctgtatattcccttaaaaatcgatggacccagaagaggactccaccagggacacgactccttcattcgtcgaatcttggacattttgcaagagaacacctccctctagcttatcttcctgctggcccattccaactattactaataagcataattgaaatcatgttgctggaccacaacttattataataatgatgagaataacactagtaatgtcctagctaacttttatgtatcttttacgcaccatgcactgtgttaaatgcataatacattttaccttatttgatctttactataatcctgggaatttgggtctaataatatcattgctttatcattgatgaagctgaagttttgataggttaaaggatttaccccagttcacaaacctagtgtacattgaggcagggattccaactcagtgatgtgatactgctccaggatcttgagtctttatcgcctgtggacctaccatgctttttacctggttccctttgacagtcttttgcatctgacactcacgctctcaccgcattctttcacttctataagcagctgtgaagtgaatatctttgtatgtagacattggcatacttttttgctataccttcaggaacatttccattgaggaatttggggatgaagaggcatcttcatttacattgttacgtttctccaattatcccccctgaaaatttatataaacctcagtggaacatgaa

SEQ ID NO: 29553 - DNA, 982 bp, Homo sapiens
tcaggtcccctggacccgccttttaaactctcattctgtctctttctaactcctttgtctccgctggactcggggtaccgccgggtggtgtggggctggtttccctaacactcttcatttgtgaggaatcttgccccgggtagcatcccatatttccatgctagtaaaaagatgcagtctgttatactcaccttatccccttatttattgattacttatgagataattcacacattgaaaaagcactagccaactgttctgtatattcccttaaaaatcgatggacccagaagaggactccaccagggacacgmctccttcattcgtcgaatcttggacattttgcaagagaacacctccctctagcttatcttcctgctggcccattccaactattactaataagcataattgaaatcatgttgctggaccacaacttattataataatgatgagaataacactagtaatgtcctagctaacttttatgtatcttttacgcaccatgcactgtgttaaatgcataatacattttaccttatttgatctttactataatcctgggaatttgggtctaataatatcattgctttatcattgatgaagctgaagttttgataggttaaaggatttaccccagttcacaaacctagtgtacattgaggcagggattccaactcagtgatgtgatactgctccaggatcttgagtctttatcgcctgtggacctaccatgctttttacctggttccctttgacagtcttttgcatctgacactcacgctctcaccgcattctttcacttctataagcagctgtgaagtgaatatctttgtatgtagacattggcatacttttttgctataccttcaggaacatttccattgaggaatttggggatgaagaggcatcttcatttacattgttacgtttctccaattatcccccctgaaaatttatataaacctcagtggaacatgaa

SEQ ID NO: 29554 - DNA, 982 bp, Homo sapiens
tcaggtcccctggacccgccttttaaactctcattctgtctctttctaactcctttgtctccgctggactcggggtaccgccgggtggtgtggggctggtttccctaacactcttcatttgtgaggaatcttgccccgggtagcatcccatatttccatgctagtaaaaagatgcagtctgttatactcaccttatccccttatttattgattacttatgagataattcacacattgaaaaagcactagccaactgttctgtatattcccttaaaaatcgatggacccagaagaggactccaccagggacacgactccttcattcgtcgaatcttggacattttgcaagagaacacctccctctagcttatcttcctgctggcccattccaactattactaataagcataattgaaatcatgttgctggaccacaacttattataataatgatgagaataacactagtaatgtcctagctaacttttatgtatcttttacgcaccatgcactgtgttaaatgcataatacattttaccttatttgatctttactataatcctgggaatttgggtctaataatatcattgctttatcaktgatgaagctgaagttttgataggttaaaggatttaccccagttcacaaacctagtgtacattgaggcagggattccaactcagtgatgtgatactgctccaggatcttgagtctttatcgcctgtggacctaccatgctttttacctggttccctttgacagtcttttgcatctgacactcacgctctcaccgcattctttcacttctataagcagctgtgaagtgaatatctttgtatgtagacattggcatacttttttgctataccttcaggaacatttccattgaggaatttggggatgaagaggcatcttcatttacattgttacgtttctccaattatcccccctgaaaatttatataaacctcagtggaacatgaa

SEQ ID NO: 29555 - DNA, 982 bp, Homo sapiens
tcaggtcccctggacccgccttttaaactctcattctgtctctttctaactcctttgtctccgctggactcggggtaccgccgggtggtgtggggctggtttccctaacactcttcatttgtgaggaatcttgccccgggtagcatcccatatttccatgctagtaaaaagatgcagtctgttatactcaccttatccccttatttattgattacttatgagataattcacacattgaaaaagcactagccaactgttctgtatattcccttaaaaatcgatggacccagaagaggactccaccagggacacgactccttcattcgtcgaatcttggacattttgcaagagaacacctccctctagcttatcttcctgctggcccattccaactattactaataagcataattgaaatcatgttgctggaccacaacttattataataatgatgagaataacactagtaatgtcctagctaacttttatgtatcttttacgcaccatgcactgtgttaaatgcataatacattttaccttatttgatctttactataatcctgggaatttgggtctaataatatcattgctttatcattgatgaagctgaagttttgataggttaaaggatttaccccagttcacaaacctagtgtacattgaggcagggattccaactcagtgatgtgatactgctccaggatcttgagtctttatcgcctgtggacctaccatgctttttacctggttccctttgacagtctttygcatctgacactcacgctctcaccgcattctttcacttctataagcagctgtgaagtgaatatctttgtatgtagacattggcatacttttttgctataccttcaggaacatttccattgaggaatttggggatgaagaggcatcttcatttacattgttacgtttctccaattatcccccctgaaaatttatataaacctcagtggaacatgaa

SEQ ID NO: 29556 - DNA, 982 bp, Homo sapiens
tcaggtcccctggacccgccttttaaactctcattctgtctctttctaactcctttgtctccgctggactcggggtaccgccgggtggtgtggggctggtttccctaacactcttcatttgtgaggaatcttgccccgggtagcatcccatatttccatgctagtaaaaagatgcagtctgttatactcaccttatccccttatttattgattacttatgagataattcacacattgaaaaagcactagccaactgttctgtatattcccttaaaaatcgatggacccagaagaggactccaccagggacacgactccttcattcgtcgaatcttggacattttgcaagagaacacctccctctagcttatcttcctgctggcccattccaactattactaataagcataattgaaatcatgttgctggaccacaacttattataataatgatgagaataacactagtaatgtcctagctaacttttatgtatcttttacgcaccatgcactgtgttaaatgcataatacattttaccttatttgatctttactataatcctgggaatttgggtctaataatatcattgctttatcattgatgaagctgaagttttgataggttaaaggatttaccccagttcacaaacctagtgtacattgaggcagggattccaactcagtgatgtgatactgctccaggatcttgagtctttatcgcctgtggacctaccatgctttttacctggttccctttgacagtcttttgcatctgacactcacgctctcaccscattctttcacttctataagcagctgtgaagtgaatatctttgtatgtagacattggcatacttttttgctataccttcaggaacatttccattgaggaatttggggatgaagaggcatcttcatttacattgttacgtttctccaattatcccccctgaaaatttatataaacctcagtggaacatgaa

SEQ ID NO: 29557 - DNA, 581 bp, Homo sapiens
agagaagtgcttttgtttgggcagcagaagagaggggaaataaaagtagaacacatggacacaggaaggggaacatcacgcactggggcctgttgaggggtggggggaggggagagggatagcattaggagatatacctaatgctaaatgacgagttaatgggtgcagtacaccaatatggcacatgtatacatatgtaacaaacctgcacgttgtgcaccacatgtaccctaaaacttaaagtataataataataaaattaaaaaaaaaaagaaaaaaaaagattttgaaaagcaattgttgaggagaacaatgagaagtgggaaaaggcaaatgattagttttcaaggcatggatcgaaagttcttttgttttgtttgtttgtttgtttgttctttgaaatggaatctcgctctgtttcccaggctggagtgcaatgccatgatcgagaatcactgcaacctccggctcccgggttcaagtgattctcccacctcagyttcctgagtagctgggattacaggcatgtgccaccatgcctggctaatttttgtatttttcgtagagacgggatttcacca

SEQ ID NO: 29558 - DNA, 663 bp, Homo sapiens
tgtttgctcagttttatatgcaatgattctaattcaacaccacgcctttcaccaagacatttcctcctaagacatacattaggtattctctcaacttcatcctcccagaggaggtgtggcagcttctggccttcttccatgccaaatgtgcttggggggaggtattctctcggtgatgattcctcccttctgtactctgtgctgcctttctggagaatacagaacaggagttggatgtgagacctcccagtcctctgtctcatcttttctatccagttttcmgtcttgccatttatctgccctactttccaagagatttcctcaactttactcaaccttccttcaatcatcatctctgctatcatatctttgaactttgaagagctcttgtttcctgaatgttcatttcttactatattcttgtttcatgtttgcagtcatttggctcttattggtatctccagggtcaatatctttgggtcttttctcctggtctgaccagattctccagagaaatccactcgaatctcctgccagaatggtagagtcctgactataaacatcctgaaactaagaaagcaagagaaagaggctggggcatatgtaatccccatcttttcaaatactgtggtcatgccaggtatccccaggttgaggagcctc

SEQ ID NO: 29559 - DNA, 577 bp, Homo sapiens
tcaaaataacatagtgaaccacaaacactggctacctagtaagccacaaagaacatggcaataatttttttaaaagcagaataaaagtacaatagtctcagatcgcaatgcaacaagcctgtgtgacctccattcctctccctcccaccccagcacctccccagagggcaataatcccccagccccacttcaccaggcatcagctcctgtgtctgttccatgttagatcatgttagatctcatcttggccagacacggtggctcacgcctgtaatcccagcactttcagaggccgaggcaggtggatcacctgaggtcaggagttcaagaccagcctggcctacatggtgaaaccccatctctactaaaagtacaaaaattagctgagcattgtgkcaggcacctgtaatcccagctacttgggaggctgaggcaggagaatcgcttgaactgggaggcggaggttgtgagctaagatcgcgccactgaactccagcctgggcaacagagtgagatgctgtctaaaaaaaaatctcatctcaaacacacaaacatttcactgctttaaaaaaaaaaa

SEQ ID NO: 29560 - DNA, 1027 bp, Homo sapiens
aggaccccccactacctgagtgctctccagaccccaacccaacacaccccaacccaggtgtgatttcactggctcagaatgagcgggatgacggtctcttgttctgaaaagtctatgctatttctattctttttgcctaatattgcattaatattttggcatctatatcacatagttgactcatactgagcttaaagtcaattaaaacccctgtatctttttcacatgtgttattgataaatccccccccccaattattcatgtctgcaattgttagtggttttcatttttaaatctacatttgtgcctgttaaatttcatcatgttgtattgagcccattgttgcagcttttggaacatttttttggactcatttttagctctttttcccagctctgtgtcacgcacaggttgatttggccatatgcaacatccaagttaagaacaaaaatgttgattaaccttaggccaaagccaagattcaagagtgaaattcgtttaaggtagaacctattcattagttatacgtcttygggtcttgtcagtaaaagtggatttgaacgtgaggcatcctgagattggatggcagtgatcctaaatgagaatttccttggaaccattgataacatgaaacaaagcaaatctatgtcatgcgtttaagatatattgttgttgtttgtttgtttaagagagggccctctaatgataattcgtaatataggtcaggcttcagctttttgaggaatggtaactggcgagaataaggattcagtgtagcaaattagagtgggagaggaactacagttattgatggagattggttaaaatagatatagaaattataaagaaagagggatagataaagcccatattggcaatcctgaagagtctatataatactcaggattaatctttggcactgtggctcctgaatccagaaggcagtacagtgtcaattaccaccagatgatgtggctgaatatatctcttgtccctagggataaagttgcagttggacctatagctg

SEQ ID NO: 29561 - DNA, 1049 bp, Homo sapiens
accctatttcaataggacttcatcttaactagttacgccagcaaatatcctatttccaaataaggtcacattctgaggtaccaggaaggacatgcattgggctgsggggtgctattcaactcagtacattagggtaagcaccaggttgagataacctggtgaaggctgagaccaggaatccaggaagacctccagtagggcaaactaggccagaggtcagtgagtcataccatgggtcatatattctaggaagccaaagataatcctaactaagaggtcagtccggagaaaaccggaggttattaatttcttggttattgaccaagcacaaaccaagccagtgatatgggaacttcataaatgtgtgtgtccgtgtgtgttgtgtgtatgtgtacatgtgtgtgttgtatgtgtacatggtgtatgtgttccacgtatgtgtacatatgtgtgtgtgcgcactcatggtgttgggaaaagcagaacagataaaaggagggagggcagccgagagaggaaacttggtactggggacagtgccctctcaagtatgacaaaaaccttttaaagtgttgggtttggggataataaaagtaaaacactgctgattatagaattttaaaaaatatagaagagcagaagaacaaaaatattagcattaattccaccatctaagaatagttcatttttttaattttttatttatatatatattttattacactttaagttctagggtacatgtgcacaatgtgcaggtttgttacatatgtatacatgtgccatgttggtgtgctgcacccattaactcatcatttgctttaggtatatctcctaatgctgtccctccctccaccccacaacaggcctcggtgtgtgagatatagaccaatggaacagaacagaacagggccctcagaaataataccacacatctacaactgtctgatctttgacaaacctgacaaaaacaagaaatggggaaaggattccctatttaacaaatggtgctgggaaaactggctagccatatgtagaaagctgaaact

SEQ ID NO: 29562 - DNA, 1049 bp, Homo sapiens
accctatttcaataggacttcatcttaactagttacgccagcaaatatcctatttccaaataaggtcacattctgaggtaccaggaaggacatgcattgggctggggggtgctattcaactcagtacattagggtaagcaccaggttgagataacctggtgaaggctgagaccaggaatccaggaagacctccagtagggcaaactaggccagaggtcagtgagtcataccatgggtcatatattctaggaagccaaagataatcctaactaagaggtcagtccggagaaaaccggaggttattaatttcttggttattgaccaagcacaaaccaagccagtgatatgggaacttcataaatgtgtgtgtccgtgtgtgttgtgtgtatgtgtacatgtgtgtgttgtatgtgtacatggtgtrtgtgttccacgtatgtgtacatatgtgtgtgtgcgcactcatggtgttgggaaaagcagaacagataaaaggagggagggcagccgagagaggaaacttggtactggggacagtgccctctcaagtatgacaaaaaccttttaaagtgttgggtttggggataataaaagtaaaacactgctgattatagaattttaaaaaatatagaagagcagaagaacaaaaatattagcattaattccaccatctaagaatagttcatttttttaattttttatttatatatatattttattacactttaagttctagggtacatgtgcacaatgtgcaggtttgttacatatgtatacatgtgccatgttggtgtgctgcacccattaactcatcatttgctttaggtatatctcctaatgctgtccctccctccaccccacaacaggcctcggtgtgtgagatatagaccaatggaacagaacagaacagggccctcagaaataataccacacatctacaactgtctgatctttgacaaacctgacaaaaacaagaaatggggaaaggattccctatttaacaaatggtgctgggaaaactggctagccatatgtagaaagctgaaact

SEQ ID NO: 29563 - DNA, 1049 bp, Homo sapiens
accctatttcaataggacttcatcttaactagttacgccagcaaatatcctatttccaaataaggtcacattctgaggtaccaggaaggacatgcattgggctggggggtgctattcaactcagtacattagggtaagcaccaggttgagataacctggtgaaggctgagaccaggaatccaggaagacctccagtagggcaaactaggccagaggtcagtgagtcataccatgggtcatatattctaggaagccaaagataatcctaactaagaggtcagtccggagaaaaccggaggttattaatttcttggttattgaccaagcacaaaccaagccagtgatatgggaacttcataaatgtgtgtgtccgtgtgtgttgtgtgtatgtgtacatgtgtgtgttgtatgtgtacatggtgtatgtgttccacgtatgtgtacatatgtgtgtgtgcgcactcatggtgttgggaaaagcagaacagataaaaggagggagggcagccgagagaggaaacttggtactggggacagtgccctctcaagtatgacaaaaaccttttaaagtgttgggtttggggataataaaagtaaaacactgctgattatagaattttaaaaaatatagaagagcagaagaacaaaaatattagcattaattccaccatctaagaatagttcatttttttaattttttatttatatatatattttattacactttaagttctagggtacatgtgcacaaygtgcaggtttgttacatatgtatacatgtgccatgttggtgtgctgcacccattaactcatcatttgctttaggtatatctcctaatgctgtccctccctccaccccacaacaggcctcggtgtgtgagatatagaccaatggaacagaacagaacagggccctcagaaataataccacacatctacaactgtctgatctttgacaaacctgacaaaaacaagaaatggggaaaggattccctatttaacaaatggtgctgggaaaactggctagccatatgtagaaagctgaaact

SEQ ID NO: 29564 - DNA, 586 bp, Homo sapiens
ttcggaacttgtaacttcttttaataagaataaaataatagttgacatccgtcaggcacttactaggagcttaagtacttgacagatactatttcagttaatcttcacaacacttctacaaggtggatactattattgtcccattttacaaatggcragttctctgtttctagtcagtaaataatcaagaggagccgggatcaagaacccagtccacctagctccagaggcaatgttcttatggcttcagtgacatgtattatcatcagtgtatctttgcaattctgaaccagtgcagaactatttgcagatagagttgctgcagaaaggaaatcaggaagtaaagctgcacacgagctgaggaatcacaagcaaattaaaaaccaatctcctctctatctgtagtgaaatacagcactagccccttcaagtccttgtacccattcacacctcttaaatgtcagtagtcttactaccattcatttattcaacaataaatatttgaataaatatttgaatgcttgctgcattccagtgatggtctcagaagaaatgacattatatttattatcacaaagtgatggaa

SEQ ID NO: 29565 - DNA, 586 bp, Homo sapiens
ttcggaacttgtaacttcttttaataagaataaaataatagttgacatccgtcaggcacttactaggagcttaagtacttgacagatactatttcagttaatcttcacaacacttctacaaggtggatactattattgtcccattttacaaatggcgagttctctgtttctagtcagtaaataatcaagaggagccgggatcaagaacccagtccacctagctccagaggcaatgttcttatggcttcagtgacatgtattatcatcagtgtatctttgcarttctgaaccagtgcagaactatttgcagatagagttgctgcagaaaggaaatcaggaagtaaagctgcacacgagctgaggaatcacaagcaaattaaaaaccaatctcctctctatctgtagtgaaatacagcactagccccttcaagtccttgtacccattcacacctcttaaatgtcagtagtcttactaccattcatttattcaacaataaatatttgaataaatatttgaatgcttgctgcattccagtgatggtctcagaagaaatgacattatatttattatcacaaagtgatggaa

SEQ ID NO: 29566 - DNA, 384 bp, Homo sapiens
ttttctaaatgtcacttattttccaaaagtaaaacattaaattataaatcacaactaattagaaagctgcaaatattgatatataaaatcagtaacttagagcctgcatgttattacagccatctagaaatttacacactatctcagwttaaaaaaaaaaaattcctaaaccaagcacttttatggtgctactgaaatgttataaccatgactataatttataaaaatgcaaaactatttaacaagtttaaggcctgatttaataaaaaatccatccaactcctgtgtttttctggtacacacaccagatgcattttttattaaatctgacctttaatgaggcaacatccctttggaccacacttcaaactagttcacaattca

SEQ ID NO: 29567 - DNA, 1112 bp, Homo sapiens
acaagcaattcctactgccctgaaaaaactatcctaagtccaattcacatctggaggcgagggctggagagccctgaaaaaggtaagcaggttttcaaagacgtcaacgtaaagtcgccaccgccgccgtctccgcctttaaggattaaaaaaaaaaataaaagccgcccctacctcgggcgcaagacctcagagggagagctgcggcagctgcmgtggcctcaggcctttagcgtctaaagactggttgcaccccgactccacctaccgggcaaccacgccgccagccccgcctccgcctccaccaatagcggcccggcggcccgggcacgatgaccaatcgaacgccggaggaggcgtggcgtcgctgggggaccacgcgccgtcccaacaggctggaagggtgccgccacgactggcccctccaggtaggccgccgcccgcgggcgcacagcgctacccggccagctcgctgcggcatcaacggcttctcagcgtcagcgctattatcaggccttgtgaccgtcccaaatctgcccgggtgcccttccacctggcagcctactcgcaccttgtgggggccgcgcgggcacactccccggcacgcgtccagtccaggccccggcaattccgccctttaccgggacatcggccctacagcgcctgcccccagggctggcctgcagctcctggcctctcctcactccctgcccccttctcaattcccttagtcagactcctctcccgccgcatcctaaatcctgagcgcaccctggggcgcggaaaagggtagccgagccttagcaacgccccgaattctccggcccgagcccgcggttcggacccctgcccttccttccccgcagtgccctcaccataagcgtttccaccgtgtctccgacatcttggggttgcagcagcgacggacgtgagttctgaatcattggagatgaggcccgcgagtcctctgggcccagggtgccgtcgacgggcgcttgggcccagccctggaggccttgaagaaggctagggggtggcgctagccaggcgacgcgctttaagccgcgggctctctgacgtctgcgcctataagcacgcagccgccggggttc

SEQ ID NO: 29568 - DNA, 1541 bp, Homo sapiens
gggatccccttaatttccatggccatatgattcagaagtgtcaacaatggaataatctactatgtatatagtttgtagaaaatagttagaatgcacatattttttcatcttttttttcccaacctgcctaggtgaaaatctaacttggacatacttctttatagcaacatctctatagatacaaatgacaatttagatccaatttatcacttactcatgttaactaatgttcactccagtcagctatattgaaaatattaaaataattaaacaaatttctgggagtttgtgataatgggatttgactggttcttcctttggtattttctgtgatgtttctccttcattttattgccaaagtcagagggattgttatagtataggcctgaagcctgctttcaggatctgtgcagaaccaaccaaccaagagagccttttattttgtcccccagttgacctccttccagatatgctgagtccatttccctgaaatgactgagcggggagaggtaactgcagctgtgtttggataccttctttctctcccttggctccagcccagggaaacgcacacactctttcacaatcacacaaaccacttcattatcatatttttgaggatgttggccaggggaaagggcagaccagtcagtaggctggaaagttagaaatgtgtgtgtttatttttccctcccctctccactgtgctattggaactggtatagaaagggaatagtcattcacagttgccccttttcaggagggtgaagttcagaggaagaaatgtttgcatagacatttgataatcataataaaaagaccattagaagctcattgattaaacagttactgcagatttcaactacaacttagaactgttttttttgtttttgtttttgttttttttttttttttagacaaggtctctctctgtttcctaaactgagtgcagtggcatgatcatggctcattgcagcctcaacctcctggcctcttgggctcaagcaatcctcctacctcagcttcccgagtagctggaagcacaagcatgtgctaccatgcctggctaattttttaattttttgtagagatgggagtctccctatgttgcccaggctggtcttgaactmctgggctcaaatgatccttctgcctcggtctcccaaaatgttgggatttataggcatgagccactgcacctcactagatacttaggtactttggaaagaggagcccagatgggcaaatgtattaagggtttgtcatttatgattggcactagagctgtatcacatagtgtggaagaaaattaaattaattctctccctgtaaatgtgctttgtaaaattttaatgtgctatgtaaataagttggtaatgttttcaatgcataaagctgtagcttagattcaatgaatgtttatttttaacttatgaagtgagattgtagctcattttatgaaagaggctaacaaacctttggatgtataaattctgatatatctattgaacaaggtatatgttttattcaatgatccgata

SEQ ID NO: 29569 - DNA, 592 bp, Homo sapiens
tgcattttaaatgttaccacaaagaaatgataagtatctgaggtgatggatatgttgattagcctgatttggtcattccacagtgtacatgtattgaaacatcacattataccccataaatatatacaattattatttgtcaattagaaacaagttaattttttaaataaaattaggttattaaaggcacagtaaaagcataggggaatagtttacatagactagatttattagagaaagtaattgcagggatggaacagatgtaaaacttaatcgggcctggattatgtgactaccttgagctaccaaaccaatgartttaggttttatcggatagtgaggagtgctgactgccttaaaacctaatgctttaggaaagttagtctggagacttttttcagggtgaattggcaagtgagcagcctcagagtcagagaagtgcagctttccagactaagtaagaacctgatatagagggctaacagtgagggcgcagtaggggaagtgaagggagagaagggcattgtctatgcttgaaaaggttaaaaagttaactttgatctgcacttttctctccttagtatgctcgaga

SEQ ID NO: 29570 - DNA, 544 bp, Homo sapiens
ccgcgccccgccaagcaaattcttataataactcaaagacatctccactggcctcagtttacatacctcctggctagtggaagacagctacattgaatgctaccaactttaaggatctgacaacaaaccttctgtaccttagaaatggcttctaaaagatctggaaaacaattttccaggaattaaggaagcaaccaaagttattgtaaaaggtacacctattttccacaacattkatgaagaattaaataatcaatataaaatacctagctcagtgcctgatgctgacatcattcagtgggggtagctcccttctcccttatattcagatgcatatacatcatatataattatattaaacatgcagagttataaataaaaattatacataggcttaattataaatatattgcatatgttaaatgtatagcaacataatacagattgtgcttttggaaacttaactgagaacaaaatctacatgcttttaattatagtaaatatgccatgcattaaggaaaattaacatttctcaaaattcata

SEQ ID NO: 29571 - DNA, 565 bp, Homo sapiens
ggagattggaaggcaaaattaaagcttggttgggttttacctgtggttaccagaccatcttccctaaattaatgcccacactttaaagaaaaaacagcctgcatttaaccccactcctgaaattagaaagttagytcttaatcaggaaaatacatgcaggtaatggctcaggaataggtttaacaatgaatgtattgagaagataaaactcagtggagtataacagttttattttcccaattaccactataagctatgctccgataagtcccctatttcctgtttcttaacaccatattcagctgatttcataactttcttgtcacctttgtttaattatgagtccagttcaatttctaagtctatttaaaactttcaatttctaagtctatttaaaactcatcccccgaccctgtccttgcagcacagacctgagcagtgacctttaaatgttggaagcagaggaggatgaagatgcacacacccctatctctcctcctcttttaggtactcatcctctggggtgctaggagtcaagaaggagagatggtgcaggcaggggtca

SEQ ID NO: 29572 - DNA, 1628 bp, Homo sapiens
ttgaggagctagttaattccagggttggggtagggaaaatacaaaataagcacggagcatcttgtgatggagtaaaaacccaaaacaaaatggggggcggggggcagctctgtagaggcttactgaaaggccacaggaggcaaccccagagagctcccaaatgcccaaagttgagacatcctgagcaagaaaagaagtaacaatagtactggattataatccacagaaggaaatctatatgaatccatactaacatgtatatatgtacccacatgtatatgtgtatatatctacatacataaacaaatgacacctcttccttccggaagatgggtagggctcagcaatctgcgttttaacagtttttaacaggtgctgctgctgccacagcctatagaactcaaatcaggcaactgaaatcttggaagtaaggaggcataggcataggggctacagcaaatttgagcacacaggcctcagctaaaagtggcrggtgctatttgctattaccaggaaagcaagcacagggcgggaagagcttttgagttttcaagggaggcaagaaatcaaagtctttctcagttttaaaattctaaatgggcaaatcaaaacagagctgcagcatctgtcaaggccactgtgcatttgtacatttgtcactctttgcagaaactaagtcccatgtcagtttaggataacaggatttgtttctcaagtgagcagggtgaaaacaatcagaagagatgaaaagaaacttagagggtactctgacttcctcttaaattccttcccaggcatgagtaagtccccataagccccctaaacatcctggggaggaaggctggcctacattctgagtcatggcagcaaagacacacattttcacaataccaaaaggtcaaaacatcactatttagaaggtgctgttatttagaaagattctttatttctcccccagaagagtgagttcaaggctgggtgcagtggttcacacctgttatctcggcacttggggacgctgaggtgggaggatcccttgagcccaggagtttgagacaacccccagcaacatagtgagacctcatttctaccaaaaaattaaaaattggctgagagtggtggtgcacacctatagtctcagctactgggaaggctgaggcagaaggatggctggagcctgggaggtcgaggctgccgtaagccatgatcgcactactgctctccagcctgagtaacagagcaagaccttgtcttaaaaataaaaataaaacacaatttctttaatttaaaaacctaaaaattttactgggatattttactcaagaaattcatgcataggtgacctctagcaaccattattattaccctccctctgatctatcctgaagaaagccaaggaaaagagttgagttggtctttgcctcatctctcttgtgtccacccttgcatactctttctgctcaaatcagtccggagccacatatattagagtccatactttcaaggaacttgcagtctaactggctgaagatacgtagtaaatacaaagaaggtcataagatgaataccttagaggaagcagcagaggagtaaggaaccacattgcagtgggggcatgtcaagacaat

SEQ ID NO: 29573 - DNA, 844 bp, Homo sapiens
tgtgggagcacacttaggatttgggtctttccaaccaacagcaaagtagttggctacatctgttctctgagtctttagtcaaaaatgtagagacacttcagggctgtctgatgacaaaagttcatactcttatcacaactatgtcaaaagtatgcatgcacatgatgagcaacacaagtccataggattgtggataatttaaaaaacattttcttaattacaagtagatgcttgyacaataaataaaaactgaggaggaaccatcatttgactaataaagcttactttcctgggacaaggaagctttcagcctggtgcctgatgcactaaaaatgtttgctgaattgaagtatggagatgacaagaagttacatatgttagagtaaatagatttttctaaatggaacatattattttctttcctctccctctcaaatttcgattcttttctcctgtcccatattttcccagacagcaagagggcttagagtttggaggaaagaaagcaacttccaaatatataatatcttttggtgccaagttaatattttcttattcagaggccacaaggtattggatagcaattatttggtgcacctgagttttctgttgtagtttgaaagacacagagataaaccctaattcattacccacatcagtggctttgccgaaatttgaacccagaccccctaggggacacggaacactatgacacatcaggctcacttcttgctctcctttttcaaaccgtggggggtccatgtgaaagtcaactgaattatttcatgggtaaaatctcttattcattcttagggcatggaaaccatgttgttgaagagagccg

SEQ ID NO: 29574 - DNA, 844 bp, Homo sapiens
tgtgggagcacacttaggatttgggtctttccaaccaacagcaaagtagttggctacatctgttctctgagtctttagtcaaaaatgtagagacacttcagggctgtctgatgacaaaagttcatactcttatcacaactatgtcaaaagtatgcatgcacatgatgagcaacacaagtccataggattgtggataatttaaaaaacattttcttaattacaagtagatgcttgtacaataaataaaaactgaggaggaaccatcatttgactaataaagcttactttcctgggacaaggaagctttcagcctggtgcctgatgcactaaaaatgtttgctgaattgaagtatggagatgacaagaagttacatatgttagagtaaatagatttttctaaatggaacatattattttctttcctctccctctcaaatttcgattcttttctcctgtcccatattttcccagacagcaagagggcttagagtttggaggaaagaaagcaacttccaaatatataatatcttttggtgccaagttaatattttcttattcagaggccacaaggtattggatagcaattatttggtgcacctgagttttctgttgtagtttgaaagacacagagataaaccctaattcattacccacatcagtggctttgccgaaatttgaacycagaccccctaggggacacggaacactatgacacatcaggctcacttcttgctctcctttttcaaaccgtggggggtccatgtgaaagtcaactgaattatttcatgggtaaaatctcttattcattcttagggcatggaaaccatgttgttgaagagagccg

SEQ ID NO: 29575 - DNA, 538 bp, Homo sapiens
tcacgcctgtaatcccagcactttggaaggccggggtgggcagataacctgaggtcaggagttcgagaccagcctgaccaacatggtgaaaccccatctctactaaaataaaaaaattagccaggtgtagtggcgggtgcctgtaatctcagctacttgggaggctgaggcgggagaatcgcttgaaaccaggaggcagagtttgcagtgagccgagattgcaccattgcactccagcctggcaacagagtgagactctgtctcaaaaaaaaaaaaaaaaaaaggtaaacatctgacatctatgatttaccaagataccagggtggcaaattgaaatcttcatcccactaatgggattacaggcacraggcactgtacctggccagacattttcttgtataataaaatcccatttaccacacattagtctgtatgtgacagactaatagtgacacattcattacacccaaacccctttggaattcttcctctgccctgtgcgtccctccctattcccagacaatcactcactaatctg

SEQ ID NO: 29576 - DNA, 558 bp, Homo sapiens
atcaggcctggaccttgaggatggttaacaaagcttttaatcaaggcagaagttcttcagtgggagcacaaactagaattccctagagggcttgggaaacaaatccagctcactgggccccaccccgagtttctgattcagcaggtttgaggtgaggcttgaggatgtgccgttctaacaagttcccaggtgaggccaatgctgctggccctgggaccacactttgagatccaatgagcttagtcagtgctgctaattccatccccatttgcyagtgattgactgggcctaagccagtggaccaacgagatgcaaggcggggcttactctgggctgatgagggtgagcagctcctccttctccccagaggagacaaaggtgcctgagtgagtggtggcagccactttgtgaccatgaggggaatcagccttcacagaagctgatgctgtagactgagaaaacctagactcctaataacatataccatcaagcccacccaactttgggatttttttttttttttaattctggggaaacttttatttttatttccagacc

SEQ ID NO: 29577 - DNA, 558 bp, Homo sapiens
atcaggcctggaccttgaggatggttaacaaagcttttaatcaaggcagaagttcttcagtgggagcacaaactagaattccctagagggcttgggaaacaaatccagctcactgggccccaccccgagtttctgattcagcaggtttgaggtgaggcttgaggatgtgccgttctaacaagttcccaggtgaggccaatgctgctggccctgggaccacactttgagatccaatgagcttagtcagtgctgctaattccatccccatttgctagtgattgactgggcctaagccagtggaccaacgagatgcaaggcggggcttactctgggctgatgagggtgagcagctcctccttctccccagaggagacaaaggtgcctgagtgagtggtggcagccactttgtgaccatgaggggaatcagycttcacagaagctgatgctgtagactgagaaaacctagactcctaataacatataccatcaagcccacccaactttgggatttttttttttttttaattctggggaaacttttatttttatttccagacc

SEQ ID NO: 29578 - DNA, 558 bp, Homo sapiens
atcaggcctggaccttgaggatggttaacaaagcttttaatcaaggcagaagttcttcagtgggagcacaaactagaattccctagagggcttgggaaacaaatccagctcactgggccccaccccgagtttctgattcagcaggtttgaggtgaggcttgaggatgtgccgttctaacaagttcccaggtgaggccaatgctgctggccctgggaccacactttgagatccaatgagcttagtcagtgctgctaattccatccccatttgctagtgattgactgggcctaagccagtggaccaacgagatgcaaggcggggcttactctgggctgatgagggtgagcagctcctccttctccccagaggagacaaaggtgcctgagtgagtggtggcagccactttgtgaccatgaggggaatcagccttcacagaagctgatgctgtagactgagaaaacctagactcctrataacatataccatcaagcccacccaactttgggatttttttttttttttaattctggggaaacttttatttttatttccagacc

SEQ ID NO: 29579 - DNA, 558 bp, Homo sapiens
atcaggcctggaccttgaggatggttaacaaagcttttaatcaaggcagaagttcttcagtgggagcacaaactagaattccctagagggcttgggaaacaaatccagctcactgggccccaccccgagtttctgattcagcaggtttgaggtgaggcttgaggatgtgccgttctaacaagttcccaggtgaggccaatgctgctggccctgggaccacactttgagatccaatgagcttagtcagtgctgctaattccatccccatttgctagtgattgactgggcctaagccagtggaccaacgagatgcaaggcggggcttactctgggctgatgagggtgagcagctcctccttctccccagaggagacaaaggtgcctgagtgagtggtggcagccactttgtgaccatgaggggaatcagccttcacagaagctgatgctgtagactgagaaaacctagactcctaataacatataccatcaagcccacccaactttgggatttttttttttttttaattctggggaaacttttatttttatttcyagacc

SEQ ID NO: 29580 - DNA, 694 bp, Homo sapiens
ggtctcgatctcctgacctcatgatccgcccgcctcagcctcccaaagtgctgggattataggcgtgagccaccgcttccggccgcttctctttactttttaaaagtagctaccagaaaatttaaaatcacatttgtggttcacattatatttctagtagactgtgctgatctagataaatggtccatattctttttttctttttctttgagatggagtctcactctgtagcccaagctagagtgcagtggcgcaatctcggctcactgcaacctctgcctcccgggctcaagtgattctcatgcctcatcctcccgagtagctggtattacaggcgcacaccaccatgcgcacccaattttttgtattttagtagagacggggtttcaccgtgttacccagagtggactcgaactcctgagctcaggccatcagcctcccaaagtgctgggattacagacatgagccactgtgcccggccccatattcatttctttaggactgaatctactccacacctgctgcatttggactgtgcagtgttttaaagacatttgaatctgtcagtgaactttaaaacatcgtcatatttcacatgaaaaccagagctttcagcttctcaaaaaatatccttctgggcataggtctggctcaggcgagtagccaccgtgtgcygtagacaggacatctgctg

SEQ ID NO: 29581 - DNA, 1246 bp, Homo sapiens
ttcacacactgtgaaacacacacccacacccacacactctacgggggtcacacaggcctctccagctgcgccctccctgcaccgtgcagacccccaggtctggcctcagaggggacacgcaagccccactggcagcagacctccggtgtcccgtcccctgtctgggctggcgaaagtgcaggtagctccttggtcgcctgacccagtgccttggatgctgcccgtgtgctgggccggaggacaccrttccctcgcgcacaacaagccctgtgaggcatcacggaggggacgggagctcacacctcaacctagagaccccgtctactcacaaccacttttaaggaatgcagctaaacagggggctcagatccctgttcagggcccttctcacgatcccaccgtaacagcccagccctgcgggtgcctggctgcagtctccttctccccagcacttccagacctggcagcccggcccaataccagcggccgtggggcctgacctggactgaaccccggagcccggacaggctggtcactgcagggcggggcctgaattctgcagctgctcctgaggccaaaagctgttctgagggtggggtgggctgccaggctccaccgacgccctcccgcactgcaggcgcctctctggagcctcacatatgtccaccatcagattccatggtctgcggtctgtggagacggtggggaccgactctctcaacacctctgtgtgaactggatcccctgggggactggggggagtaacagaaaagctcacagagtgcccctgagcccagagctgtttctgatctctccttaaaagcgatctccgtggaaacagcccagatgaccatcagtggacgaatagatacacaactgtggtccatccacacaacagaatatcatccagtcacagaaagggaggaagcgctgatccatgctacaacatgggtgaaccccaaaaacatgataagagacgccggatacaaaaggccacgtagcatgtgattttacctccacggaatgcccagaagaggcaaaatctgcagagacagaaagcagaggagccagggggaggagctgagtgttcgggagaggggagtgagcagtgaccgatcacaggttcaggctttcctttggggcgatgacaatgttaggaagtcgagagaggtgtttacacaaccttgtgaagatattaagtgccactgaactgtgtgctttaaagtcgttcattttatgttacatg

SEQ ID NO: 29582 - DNA, 1246 bp, Homo sapiens
ttcacacactgtgaaacacacacccacacccacacactctacgggggtcacacaggcctctccagctgcgccctccctgcaccgtgcagacccccaggtctggcctcagaggggacacgcaagccccactggcagcagacctccggtgtcccgtcccctgtctgggctggcgaaagtgcaggtagctccttggtcgcctgacccagtgccttggatgctgcccgtgtgctgggccggaggacaccattccctcgcgcacaacaagccctgtgaggcatcacggaggggacgggagctcacacctcaacctagagaccccgtctactcacaaccacttttaaggaatgcagctaaacagggggctcagatccctgttcagggcccttctcacgatcccaccgtaacagcccagccctgcgggtgcctggctgcagtctccttctccccagcacttccagacctggcagcccggcccaataccagcggccgtggggcctgacctggactgaaccccggagcccggacaggctggtcactgcagggcggggcctgaattctgcagctgctcctgaggccaaaagctgttctgagggtggggtgggctgccaggctccaccgacgccctcccgcactgcaggcgcctctctggagcctcacatatgtccaccatcagattccatggtctgcggtctgtggagacggtggggaccgactctctcaacacctctgtgtgaactggatcccctgggggactggggggagtaacagaaaagctcacagagtgcccctgagcccagagctgtttctgatctctccttaaaagcgatctccgtggaaacagcccagatgaccatcagtggacgaatagatacacaactgtggtccatccacacaacagaatatcatccagtcacagaaagggaggaagcgctgatccatgctacaacatgggtgaaccccaaaaacatgataagagacgccggatacaaaaggccacgkagcatgtgattttacctccacggaatgcccagaagaggcaaaatctgcagagacagaaagcagaggagccagggggaggagctgagtgttcgggagaggggagtgagcagtgaccgatcacaggttcaggctttcctttggggcgatgacaatgttaggaagtcgagagaggtgtttacacaaccttgtgaagatattaagtgccactgaactgtgtgctttaaagtcgttcattttatgttacatg

SEQ ID NO: 29583 - DNA, 1106 bp, Homo sapiens
  misc_feature (1)...(1106): n = A,T,C or G
gggacagttagtcaaagatcctagtactccctcaccaaaagtgaacctaaaattcattctagtctatcagctctttctcaactttgagtctttagcagagtgttgcaacaatggaaaatagactcattccagtggccacatcctaagaagatggccggttgtttccttagctcttgtgctctttgaaactgtgttcttacgctttttaactattcagctactttatcacctatctcaggagttcccaaccccctggctatgtactggtattggtccatggcctgttaggaactggattacacagcgggaggtgagtggcaggcaaatgagcattattgcctgagcttttcctcctgtcagatcagtggcagcattaaattctcataggagcacgaaccctactgtgaactgcacatgtgagggatcaaggttgtgtgctccttgtgagaatctaactgcctctgatgatctgtcattgtctcccatcacccctagatgggaccatctagttgtaggaaaacaagctcagggctcctactgtttctacctgatggtgagttgtaaaattatttcattatatattacaatgtaggagtaatagaaataaagtgcccaataaaagtaatgtgcttgaattatcccaaaactatccctgttgccctgatccatggaaaaactatcttctatgaaactggtcccttggtgccaaaaaggttggggaccactgttctatgttctctccttgcttaagttagcccaaatcwgtttctctggtttaccactgaagaatggatacaagaggtcttcccagaggactattgcatctttcagtctttggtaggagtcacaagtagagaactgcttaaagtttangaaaagacagactcatgcactgactgaccagtcatagcaccatgaatgaacaaaagtgagttaagtatgaccatgcctgcccctcgagttggctacactcctgcatgtgctgggatgctgatagcgtggactcctagggcatcctctggggttctggtttttaaaattgggctcttactgaggccttgcgcatcatgggctagacctcaagaagaaagaccacaattggatgg

SEQ ID NO: 29584 - DNA, 1295 bp, Homo sapiens
catactgagcgaggtagggttcttgtcgagggggagacggttgaaggagacactggtggaaatgtgtgtggttcactcatactgcaatctcaaaggggaaaaggagaacccctccactgacgtgagttggatgcagtgacttggtgtttggggagaaaggaggagagttgctgcagaccagtctgtgataaactcagccctcagtatgagggaacttgagtgcaggaaaggagacagcgtcatcaaggcaagaggacaccgatggtttccaggaagataacaaagcaagaaaaatggtgcatgacgacttccattgcccgacattttcttatccctaagatgctctcctttgccctctttccatctacctcagtcttctccctctacctacaggtctgaatcttcattcatgtattttaggcttgaaaggaatagggctgtcggtgagaatcccaatctttctacattgtttcttcgagggctcttgaagttctccttctttagggagcttattgcagtgggatatttcattctaggcagctcagcatctcttcgctttcttttggaagtagcacacgaatttcctcgttgagaacaactgatttaccgagtgatgcagttcagcatccctgtaaacccagtgattgttaacccgttctttccaagtcttttgggagatgaccttccccggaatccaaatcctgaactctttgataaaaagaccaagagaggccaacgttcattcattccagaaagtccctggaacgatgatcaaatattcgctgctcccgggtcctccgggggtgactgtccatacgatgtgcccagtcttcccgctggtcctgcaggcatcccctgatgcctgttccccggactcagtgtactctccctggcacacccttctttatggacaacaggaggaggtagggagtggagcaggagcgggagaaagccacgctgaatggggtctcattagacttccaggtgtcgagatggatgattagaaaatgagtccactgtcagtgtcaagcgttccctcatcaggcaccatgacagtgcagcaaagaggcaaagggaaaatcgtgctggctgctcaaaggtccatccctcaccgaaatgcacctgcgaggctcagctgggtcagctcaggagccccaaacgaaaggctcccagctctttcattyggacccagggtttgaggagagggagacagggaagggttagaagtggaaaaagactggattcaaaggagggaaaagtggtctgctggtgggaggcccccggatgcagatgca

SEQ ID NO: 29585 - DNA, 886 bp, Homo sapiens
attgagcttatagtttagtgtttgataatgatctgctttaacgcatttctctctatgacagagatcacttaatttttgtctgtaaattcagttttttatgggcatcccacatctgagtctaaacataaaagcagtcccaccacagctccctctcttaatctcaacctaatttcaatgaaatgaggtttactatttctatgtgccccaggccctcttttgtattcaaggaacttgtgccctttcttgcttcttctcaccctctttactgttgagttcccatcttcagtcttccaggaaagtaacggtccctgttagctaccagagggcatttgggagcctggaatccttaccctagactctaatgcaggctgagtccccagtcctcactgctggttcttcccagtgacttctgctctgcctatgcctcctccttgctgtcagctgttagaccactaaccatctgcccctaatgttctctccagctgaagctctccctagattgcccagccaaaaaatcaagctwctagggtgtgtggtcattcatacattgcaagttattcagagaaataaagcaattcatttcacaatactattgaaaacatattaatctcaaatactttcagtttgactagggaaattatgttaggtaaagagtgcctcacagaacttaaaccattctccattaagaagaagcatgatgtagtagaaaattcaatggctttgaagtcagaactggatttcaatttaggttttctcatttactacaggatcttggcttaatcatatttttttccctgagcctcagtttcatcatggggtaagataatagtttcaacccactttacctgaaatgtgaaaataaaatcaattatatgtaagtgctgtg

SEQ ID NO: 29586 - DNA, 886 bp, Homo sapiens
attgagcttatagtttagtgtttgataatgatctgctttaacgcatttctctctatgacagagatcacttaatttttgtctgtaaattcagttttttatgggcatcccacatctgagtctaaacataaaagcagtcccaccacagctccctctcttaatctcaacctaatttcaatgaaatgaggtttactatttctatgtgccccaggccctcttttgtattcaaggaacttgtgccctttcttgcttcttctcaccctctttactgttgagttcccatcttcagtcttccaggaaagtaacggtccctgttagctaccagagggcatttgggagcctggaatccttaccctagactctaatgcaggctgagtccccagtcctcactgctggttcttcccagtgacttctgctctgcctatgcctcctccttgctgtcagctgttagaccactaaccatctgcccctaatgttctctccagctgaagctctccctagattgcccagccaaaaaatcaagcttctagggtgtgtggtcattcatacattgcaagttattcagagaaataaagcaattcatttcacaatactattgaaaacatattaatctcaaatactttcagtttgactagggaaattatgttaggtaaagagtgcctcacagaacttaaaccattctccattaagaagaagcatgatgtagtagaaaattcaatggctttgaagtcagaactggatttcaatttaggttttctcatttactacaggatcttggcttaatcatatttttttccctgagcctcagtttcatcatggggtaagataatagtttcwacccactttacctgaaatgtgaaaataaaatcaattatatgtaagtgctgtg

SEQ ID NO: 29587 - DNA, 704 bp, Homo sapiens
agttctgaagaggaaatctgagtagtataccagagcatccaatccagtataggccaatccttgcatcccttggattcacgtgattcacacggtaaatttattccatctgggaagaactccttcaagtttctggttggtctctttttctgggaaactttacaaaagaaagatgagtagcatgaactatatatatagcttttgccaatatagctggttttacagctgaaactgaaactcattttctccctcctctgcaacctattccagattgttttgaccctaatttagcacctctgatgatctagatggcttacctggtggggttacccagacagtcatccctgagtgcctaggcttctggtaaccacaccatactgtggctgctgtacttgtccatttcttgaaaaaatcaggaaagtatcaagacatgatccagtagataacctgacaaccaaacttatgctttccagaccccactgagtacccctaggaggccattaggaggatggcctcctaatggccggaatcaattacctctaccaacattgttttcttttattgcttactggactcttgacatgaagaaacttaaatgaccctacagtagccatagtttaaagtttaatgggactcttactgggccccctggtaaaacaatttccactttagaatccaraacctagtttagaatccacagaaccaaa

SEQ ID NO: 29588 - DNA, 547 bp, Homo sapiens
  misc_feature (1)...(547): n = A,T,C or G
acttcacaccctcaagcccactttccagaagaagaaagtttctctttctccaaacttcctaccaaagtttaggctttattctaattgtatccacttatgccacacgttcacttttagaacgaaaactgtggcaaggaggcatgggatttcgctgattggcttgagccaaccagagccaacctctgtagctgggagcaggatcagccccacccaaaatgctcatcatcatggggtmggagtgggatgtgcgtggaggaagcaaatgtctactaaacagtagaacgttatcntgggtaatccaaataacccctaataaggatagcagatatcagtcactcccatttaccatgtgtcacgtttgctatttaaaatgagactaactgctgtgtgcatcatcaaaaacccccaaaactcagcctgggcaacatagtgagaccctgtctctaacaacaacaaaaaaaaattagctgggcatgacagcacacttctgtagccccacctactcaggaggcttatatgggaggattgtttgaacccaggagtttga

SEQ ID NO: 29589 - DNA, 547 bp, Homo sapiens
  misc_feature (1)...(547): n = A,T,C or G
acttcacaccctcaagcccactttccagaagaagaaagtttctctttctccaaacttcctaccaaagtttaggctttattctaattgtatccacttatgccacacgttcacttttagaacgaaaactgtggcaaggaggcatgggatttcgctgattggcttgagccaaccagagccaacctctgtagctgggagcaggatcagccccacccaaaatgctcatcatcatggggtaggagtgggatgtgcgtggaggaagcaaatgtctactaaacagtagaacgttatcntgggtaatccaaataacccctaataaggatagcagatatcagtcactcccatttaccatgtgtcacgtttgctatttaaaatgagactaactgctgtgtgcatcatcaaaaacccccaaaactcagcctgggcaacatagtgagaccctgtctctaacaacaamaaaaaaaaattagctgggcatgacagcacacttctgtagccccacctactcaggaggcttatatgggaggattgtttgaacccaggagtttga

SEQ ID NO: 29590 - DNA, 815 bp, Homo sapiens
caggtgcctcctctctaattgatcctccccacccagtttcctttgcctctcttccttctaccaggtcatgttttttactctctgccccttctgcctcctagcatttcaaaaactgtagagtgcaccccatagtggacatttttagtccaggccttctaattagcatcaaaaagttcctggattcccaggcacgcctcctgaaaaagctgagagatatgtctctttccagtcttcttgggtgaggctaggttgcagctctgggctgttcaaaggttgccagaatctctccattggagggatagaagcagtgtccctattctgacttgtcagagagtgagcttgtgacccttgaagrtggtgggtatcccttctcatcccctcggacctccacagttgatgcgtatgtctcccaggggaattaggtcacttaactcaagagcaatgtttgcccaggagcaagcaatgctggggagctttcctctagattggaaatggttcttgttgccctaccaggaaaagaattaagaaaacaaccctaaccattgtctcagtactttgtactgattgaagaaaaccacctctctgacaagcgctaatagcatctactacatttaatgtcatagattcttatttagcaagtgagctggattcgttgcaaacattcacaacttccattcagagaggctggcagatgtcagatggaagaaaaaccccggaggccagatctttactggtgctcacttctccatcagtctttctaaacactctaaataatagcttgtacattggttgggggccatggcgggttccacatt

SEQ ID NO: 29591 - DNA, 1924 bp, Homo sapiens
tgggtttattggaacataactctattgtaagctgaagagcatctgtattccattacatagatataccacgttttgtttatctattcatcagttgatgacattgagttgtttctaccttttggctattatgaataatgctgctatgtatattcatgtatgagttttttgtgtggacatattttcatttctcttgagtatatatttaggaatggaattactgcatcaaaatcataactctatgtctaactttttgaggaattgtcatactattttccagattggctgcaccattttacattctcactagcagtgtatcacagttccaatttctccacgtacccaccaacacttgcaattaccttttttgttgatggttattctagcgactatgaaatggtatccagctcactcttaattctccaagttggggcaatggggaaagcaatcattcatactactccatgcttggtccatgtgaggacaccaccctaggagctcagctctgtaagaacttcaggttatttccattgaaaatgtaagtttttttcaaggtaggaaagaatcccagagattacgtcctattggtaactaggttttattttctttttctggttttttttttttttttttttttttttttggcagagtctcactttgtccttcaggctgaaatgctgtggcgcgatctcggctcactgcaacctccacctcctgagttcaagtgattctcgtgcttcagcctcccaagaaactgggattacagccatgtgccaccacatctgcccagtctttctttctttctttctctttctttctttctttctttctttttctttctttctttctttctttttctttctttctttccttctttctttcgttctttccttcgttctttcttttccttttcctttttttttagatggcgttttgccatgttggccaggttggtctcgaactcctggcctcaagtgatccacctgccttggcctcccaaagtgttgggattacaggcgtgagttaccacgcccggccaataattagtttttcaattcacaaacccacatattatgtcaccctctaagaagccattattggcaatatggagatatttttcaaggcactgtaaatatttgcagggcaggttatttaygcagcaggcattaggatgtgatcccttctggagagttccatagacagtattgccccagcctcacctcttacctctcaccctccttctagtgatttatagagaccctaaaggatctttctgacgaagggaggtgacttgaattctgcaaacagtattaagacaaatgcaaacactgaccaaggctaaattgcaaaggagaaaccaggacctctggagaggagttgctgtaaagaaaggagcctcatgagggagtcaggcccagcatcagggcaggagctcagagggaagggtggtttctggtcctgacctgcatggcagctgctaaccagggtagtgctgagattgggatatttgcccctaaagaaactcaatcaagggctatttattgagtgcctactgtatgcctacccctgctgggtattgttcttactgggtgaacatcacaatgtttcaaggtgaggttttcctgttaaacatgctcccaccatatcctgaatgtgtcctttataaaagtactctgcacagttcttgctgcagaaatgatggctctagttcattgctgtatctccagagcctagaacagtgtctgtccctgatagtgctcatggtactctcaagtatttggtgaatgaaggaaaaaccctaaattcaacatattgttgcaagtttcctttgttatcaactataagctgagttttaatggctacacaagacccttctcatgaactcaccaaatttgtcttgaccaagccacaacttttagacatttat

SEQ ID NO: 29592 - DNA, 513 bp, Homo sapiens
tcctccatttattcattcattcattcactcactcattcattcacatctctgtttatttagtaaatattttgcgggccaagtactcagatagatcccagggagtagaagatgaggtagagaagggcatgactgttgagagagtccagtctaaagtaacagttagccacataaagttacaaaatgatgagaaaaacatcaaaacagaggtacgcacagagtgctatggaaggagaaagaaagcaattagttccgcctacagtagcccagaaaggctccacagaggtgtcacttttgatatattttgagggataagcagaaatctgccaaatacagataaaaatggtggatgggctgagagcagaaagcctttgcatgtgcactgaggccctctaccatgatgcccagtgacaggtgacttatagccccaataggatttaaaacrctgctatacggagttactgttttcattgagaaactgtgtcccccttgctgtgtcttaaataaggttatcga

SEQ ID NO: 29593 - DNA, 1253 bp, Homo sapiens
gacatgcagtagggaaattagccttgagttatatgtatcaagagaaacaacaaagcaaatgtgctttgttcttggcaagcttacttaatctctcakatatgtaaagatgaatcagaaaacaatatgatccagctcatcttcttaattggaatcctagaatgaatgttagagtaaaaaagtaccatagagaatacccaatctagatccttcttttcctgtttgagaaaaaggaggtttcaaatgctaaaataactgacccaaggcctacaggcaggtgtctgtcagtatccaaacaatgcaaacaagaaaccagtgcttgatgtttccaatttcattttaccattttactattccagcaccattgcctaatcaataagaatcaaccgggagggtttttagaaacagagatatctaagattctctcttagaagatctgtattaatagttggagtggagtctgagattctgcttttgacaaatgccctgggaaataattaggatacagaaattatagaaaactccacattctatcattctgtcttcagagataaaagatcactactaatcaaataaactgatataggaatttctaaaacatatggctatgaacttattttaaaacatagacttattgtctgtgcttatgtattagaccttagagaagccgtgcatttagacctgtatgatacatccatttataagtcaattgtcctgggatctgattttatgtttatggtgtttacatgtctgtcatctgtaatattggtattttttagagttcatctagatctttgaccattcagtcagcactctgtttagtaagatacggaatccaaagatgcactaaaactatcccaactgtgctataggagatgtgcaataggaattaatgtcaggcagaagcagttaaaacacttggcaactgcctgaactgctatgcttgccgtttcctagagataatgcaaattgtgctttggcaagagattacctgtcgattttttttcttattttgtaattgctccctcacaaaaaacacaggttagactgtaccgtctgctgtccatggtgctaattgtggtctttgctgggaaatggtaccttttacagagccagcttgtgaaatcctttaacagattgtttgcgatccctgtaattctggcagtgccaagcatatttgagtactagattctatgctcagttagttttcccccaagtcacatgagctaagcttacctgcaatcatttagatatgc

SEQ ID NO: 29594 - DNA, 775 bp, Homo sapiens
aatgatttcacctcattgttgatcattttgtagccatgatattttttagagtttgcaaaaatggtgacttttaattatataatttctgctgcgtttattatcaagaatttttttcataaagatcttttcatagtaactaatggtcaacttcaaaayatagtttatatcagaaaaagggaaaaaatgcatgatatttatcaattttcagaatcagatattctcttctaacataagatctaaataagcttacacatataatcaaggatgccagtaaatttttctaaaaaatttttcccttgggaaaattatttatttatttatttatttatttatttatttatttattgagacagagtttcactattgtctcccaggctggagtgcagtggtgcaatcttggctcactgcaacgtctgcctcctgggttcaagtgattctcctggcttagcctcccgagtagctggaattacaggcatgcaccaccatgcccagctaatttttttgtgtgtatttttagtagagatggggtttcatcatattgaccaggctggtcttgaactcctgacctcaaatgatctgcctgccttggcctcccgaagtgctgggattacaggcgtgagccactgcgctcggctgataaattatttgaattgcttctcctaattttttttgattaatatgttttgataacattgttcctatggtaatattatcaaaaaagttttctttccttcctttttgtttatcattaatgtgcctctgtatggttgaattt

SEQ ID NO: 29595 - DNA, 775 bp, Homo sapiens
aatgatttcacctcattgttgatcattttgtagccatgatattttttagagtttgcaaaaatggtgacttttaattatataatttctgctgcgtttattatcaagaatttttttcataaagatcttttcatagtaactaatggtcaacttcaaaacatagtttatatcagaaaaagggaaaaaatgcatgatatttatcaattttcagaatcagatattctcttctaacataagatctaaataagcttacacatataatcaaggatgccagtaaatttttctaaaaaatttttcccttggraaaattatttatttatttatttatttatttatttatttatttattgagacagagtttcactattgtctcccaggctggagtgcagtggtgcaatcttggctcactgcaacgtctgcctcctgggttcaagtgattctcctggcttagcctcccgagtagctggaattacaggcatgcaccaccatgcccagctaatttttttgtgtgtatttttagtagagatggggtttcatcatattgaccaggctggtcttgaactcctgacctcaaatgatctgcctgccttggcctcccgaagtgctgggattacaggcgtgagccactgcgctcggctgataaattatttgaattgcttctcctaattttttttgattaatatgttttgataacattgttcctatggtaatattatcaaaaaagttttctttccttcctttttgtttatcattaatgtgcctctgtatggttgaattt

SEQ ID NO: 29596 - DNA, 577 bp, Homo sapiens
aagccagaatgccaatttactcatttagaactggcgacatggcttggcccaggagttaggccaactgtctgcacattcccttttggtaggtagagctacacagaaaatcaaattacagatccgaagacttcctggtgattttagaaatagaacagaggaggtggatgttatcatgcaatagcagcctgatcaatttctcttctccattccaaggatatttgtgtctaccttccaacctcagagtcccctctcccctagatgctgtttgtcaaattccagtatacagaggggaggggctcggaagataagtctgtctgtcacttgcataaaattattaagccaaacaagttaaatgcaactsagagtgtggcagatttggggaccactccaatcatttcttcttcaggatgtgttccttttgaggatttcagaattactttattagtaatgagtacacatttcttctgcagctggctataaatggaatgtttttagtttacgtttcaaagagagaattcggcctgagtttttctgtaagtcttctgagctcatcttggttggtaattatcagctacca

SEQ ID NO: 29597 - DNA, 1240 bp, Homo sapiens
aaagcatagcccccaaggattagaaataaactctccaaggccgggagcaggggctcatgcctgtaatcccagcactttgggaggctaaggtgggctgatcacctgatgtcaggagttcaaggccagcctggccaacaaggtgaaacctcatatccactaaaaatacaaaaattagctgggtgtggtggtgcatgcctgtaatcccagctactcaggaggctgaggtaggagaatcacttgaacctgggagatggaggttgcagtgagccgagatcacgccactgcactccagcctgggagacagagcaagactccttctcaaaaaaaagaaagaaggaaagaaaactcttccttcagcaaatgtattttgaaaagtactagcctaagttaaatgcccaacagtgttcacagctacattgtttataatagcaaaagactggaaacaatccaatcatccattgtcaagagaatggattattaatatgaagtatatatccagtagactactttataacaatgaaaactacattgatgtagctgcagtttatctactacattaatgtagctgcagctacattaatcagaatgaataaacggaatttaaagttgagttccaaaagcaaattgcaaaagagtgcatatggaaggatttcatcatatgaattttacaaacagtattttactacaatattaaatagcattttatttacagaaacatacatatatggtaaactataaagaaaatggtgatacaaaatgcaggatagtgtttacttggggagtggccraaggtacaatgagagagataggaccaaggaggacagacagaggcctttgaggctagtgggtcttggtcccgttcttaaactataggaattcattttaatgttacattttgtgtttatattttgtcataaattttttgtgcatattcaatatgtaaccacaaaatacaaaaaaactctcaacagttgacaagggagtttattaagcaaatagaggtaccaattacaaaccatcagggttagaaaaaaaatccaggctttaagtaaatataaatctaagtaataggctattgactattatcttagaaaaacttggggtattacaccaggttatcacagaatatttagttgagaagtatggaaaatatgatatgctatttatttgaatgatactcggtaggcatgtaatgtgatgattaaatcagttaagaatatgtgatagattttttttaaaa

SEQ ID NO: 29598 - DNA, 1240 bp, Homo sapiens
aaagcatagcccccaaggattagaaataaactctccaaggccgggagcaggggctcatgcctgtaatcccagcactttgggaggctaaggtgggctgatcacctgatgtcaggagttcaaggccagcctggccaacaaggtgaaacctcatatccactaaaaatacaaaaattagctgggtgtggtggtgcatgcctgtaatcccagctactcaggaggctgaggtaggagaatcacttgaacctgggagatggaggttgcagtgagccgagatcacgccactgcactccagcctgggagacagagcaagactccttctcaaaaaaaagaaagaaggaaagaaaactcttccttcagcaaatgtattttgaaaagtactagcctaagttaaatgcccaacagtgttcacagctacattgtttataatagcaaaagactggaaacaatccaatcatccattgtcaagagaatggattattaatatgaagtatatatccagtagactactttataacaatgaaaactacattgatgtagctgcagtttatctactacattaatgtagctgcagctacattaatcagaatgaataaacggaatttaaagttgagttccaaaagcaaattgcaaaagagtgcatatggaaggatttcatcatatgaattttacaaacagtattttactacaatattaaatagcattttatttacagaaacatacatatatggtaaactataaagaaaatggtgatacaaaatgcaggatagtgtttacttggggagtggccgaaggtacaatgagagagataggaccaaggaggacagacagaggcctttgaggctagtgggtcttggtcccgttcttaaactataggaattcattttaatgttacattttgtgtttatattttgtcataaattttttgtgcatattcaatatgtaaccacaaaatacaaaaaaactctcaacagttgacaagggagtttattaagcaaatagaggtaccaattacaaaccatcagggttagaaaaaaaatccaggctttaagtaaatataaatctaagtaataggctattgactattatcttagaaaaacttggggtattacaccaggttatcacagaatatttagttragaagtatggaaaatatgatatgctatttatttgaatgatactcggtaggcatgtaatgtgatgattaaatcagttaagaatatgtgatagattttttttaaaa

SEQ ID NO: 29599 - DNA, 739 bp, Homo sapiens
atccccgcgggcctgcagcctgctcgccgccgtgggccgcgctcctgccagcgccgccgccctccgccctccgccctccgcggctcccgcccgccgggcccrgcctcgcctctgcgctgcgctgcgatcccgcaggccggcccagccccgaggcgcacgttgccgcccggccctctccgcacctccccggcccgcgcctccttttctaggcgcctcctcctcccccttcctctccccgccccggcctgcgcggtgggcaacagccccggcccggcgcctccgccgaggccctcccgctcctgggcactgcgcgcccagccagcagctggagtcccacgaggcgcgtgtgtcccccactcccggaacaagcaccacactggcgcaccgagggtgccttgtggggtccccaagtcatcccaagacatacgagtaatcatcatcatcctatttcgtggtgctcttggaggttttctccatctcatttgaagtcccaataaaagcagcttgagaaactttattttagagttttctttttctctgtaacttacaatcgatggggaggagggccaccacagccctagtactggcgtctcggttacccgcacacccagggccagctctttgggccttaagggtggaaagcattgggtggaacctgtgggtgggggcggcgggggcgatgagcagcacttccgggaatcccccggcatctggctgttcctgcattttttccaggcag

SEQ ID NO: 29600 - DNA, 739 bp, Homo sapiens
atccccgcgggcctgcagcctgctcgccgccgtgggccgcgctcctgccagcgccgccgccctccgccctccgccctccgcggctcccgcccgccgggcccagcctcgcctctgcgctgcgctgcgatcccgcaggccggcccagccccgaggcgcacgttgccgcccggccctctccgcacctccccggcccgcgcctccttttctaggcgcckcctcctcccccttcctctccccgccccggcctgcgcggtgggcaacagccccggcccggcgcctccgccgaggccctcccgctcctgggcactgcgcgcccagccagcagctggagtcccacgaggcgcgtgtgtcccccactcccggaacaagcaccacactggcgcaccgagggtgccttgtggggtccccaagtcatcccaagacatacgagtaatcatcatcatcctatttcgtggtgctcttggaggttttctccatctcatttgaagtcccaataaaagcagcttgagaaactttattttagagttttctttttctctgtaacttacaatcgatggggaggagggccaccacagccctagtactggcgtctcggttacccgcacacccagggccagctctttgggccttaagggtggaaagcattgggtggaacctgtgggtgggggcggcgggggcgatgagcagcacttccgggaatcccccggcatctggctgttcctgcattttttccaggcag

SEQ ID NO: 29601 - DNA, 1188 bp, Homo sapiens
atccttccattctgcaagcggggcagctgggggtgtccacggactgctttgaaaagcaggaatgtgggagaggctaatagggcgaagagaacagaggtagactccaggaggggtgaaagtgtgcccagacacactcacttccattcagcttacagcagaaagcccaagatcaggggcgggaagccgggtgtcagaatccgctctttggacacccccaaactgagggcagcactttgaagatgttctcaggctcccattccgcacccagccttggccggacctcagaacgggcaggcgtaagacagcaggcccctgccctgtggagggcccagtctgatgagggagcctgtcaatgcaccaggaagctaaggctgtgagtctaagggaaggaacttaatgaggtgctgcaaccaagaatagtcaaagggacaacttaaggctttggagtgttcagggaaggcttcttggaggaggcgattttcaaagataagatctgaatagccaagcagtgagaattagcgcaccatgtggagggaacagcagggcgcaggccctgcagcagcaggagtaaggtgcatgccggacactgacagagggtggggccgcttcctgagagcccacagggtgacaggcatgcacctgtcaccaggtgaatttacagcccatttccatgtcgcccaggaaagaacgctggaagtctgctgcccaaacagaccmaactaaccagaggtttgaatatttggaacattctgggaaaaaaacaatgggactacggattccatttgcttcaattcttaggcaagccaggccctcttcagcccttgggccacttgaccagaatgactggctgaactactgtcactgactaggacgaaagcggtggggggagggggcattctttctggaacacagacacatggaaattcacatttcccaaatgctcacccacccagacccagtagtcttctgcttccctggagaaagtcttcggcaagaactaatttcttcttatctcagggactaatgaccccttggccacaatagctacccagggcagggcaggatgcgggcaaggtggagtctcagaattgcagggttcctctgtctttatttgaaatgttgatattttgaggcctggtgcggtggctcacgcctgtaatcccagcactttgggaagctgaggcgggt

SEQ ID NO: 29602 - DNA, 999 bp, Homo sapiens
  misc_feature (1)...(999): n = A,T,C or G
aaactaactatcctaatttcatcattatacaacaaatacatgtattaaaatgtcaaattgtaccccacaaatatgtatgattacaacttcattaaaaagtaaataaaataataaaggcagctcgtaagtaagagcagagaaaaagggaaaaggaggtgttcccagcacatcaaaatagaatcccaaaatccaaatcaatgtgtaatgaatgtctactttataaaatgattgaggttctgcctagtaatgcttgatttcaaaatgtgcacatgagaattcttaaaattacctgggccattatctacctaatcaagccctgacatgaccaggaattgaatgagtcagaaacacaaagcaaagctgactcatgagaaggtcaggcccatctaccacttccatttctctccttacccgacgttacccttccactttcagaccccttgccaactcctgctactctctcctggcactcactattgcacccaaagtgtcacacatggcttggttttaggtctctgtatttctcctttcatcccacttatgaccttttgatccctacatgcaggcttggttgctgccttctattcctgggatctctcaattacaaaaaattccaagacagatctcttcttaatgttctctctataagccaacagcaacttttgaaagattataagaccatacagcaattttctcatctttatatctttgataaagtcattaactacaggtacrtatgaacttgttggtatatgtgtgagcatacatgccaaaacacacaaatacatatacagaaacatacacacacacctggcataaccagatactagaagtttatgtgtaggttgcaagctctataataaaccattttctggtatcaaatgtctaaaagtattaaatgaccatttattttattggcacagacttgtgatcattattattcatgttggtgagcctatgaccattgcaagatattaatgtacttnctgntatagcaat

SEQ ID NO: 29603 - DNA, 999 bp, Homo sapiens
  misc_feature (1)...(999): n = A,T,C or G
aaactaactatcctaatttcatcattatacaacaaatacatgtattaaaatgtcaaattgtaccccacaaatatgtatgattacaacttcattaaaaagtaaataaaataataaaggcagctcgtaagtaagagcagagaaaaagggaaaaggaggtgttcccagcacatcaaaatagaatcccaaaatccaaatcaatgtgtaatgaatgtctactttataaaatgattgaggttctgcctagtaatgcttgatttcaaaatgtgcacatgagaattcttaaaattacctgggccattatctacctaatcaagccctgacatgaccaggaattgaatgagtcagaaacacaaagcaaagctgactcatgagaaggtcaggcccatctaccacttccatttctctccttacccgacgttacccttccactttcagaccccttgccaactcctgctactctctcctggcactcactattgcacccaaagtgtcacacatggcttggttttaggtctctgtatttctcctttcatcccacttatgaccttttgatccctacatgcaggcttggttgctgccttctattcctgggatctctcaattacaaaaaattccaagacagatctcttcttaatgttctctctataagccaacagcaacttttgaaagattataagaccatacagcaattttctcatctttatatctttgataaagtcattaactacaggtacatatgaacttgttggtatatgtgtgagcatacatgccaaaacacacamatacatatacagaaacatacacacacacctggcataaccagatactagaagtttatgtgtaggttgcaagctctataataaaccattttctggtatcaaatgtctaaaagtattaaatgaccatttattttattggcacagacttgtgatcattattattcatgttggtgagcctatgaccattgcaagatattaatgtacttnctgntatagcaat

SEQ ID NO: 29604 - DNA, 794 bp, Homo sapiens
aggatccagtgccagtgggaagtgtgcatgttcccagcctagatgtcacatgctcccacccaccctggaagcacttgggtatcccctggatgggtaagtctgtgtgtcattgtgccattcctgtctcagaaccaatgctgggcatctctacttgcaggtgctggaaagctttttcatgccagcatacatgcagcacacttctcattttggattcctttatcccacggtgacctttaaactggctgcctgggggcacagaagtactagcacaccattcacttatttattcattcattcattcattcattcattcactcaacaaatatattgttctagtccttaaggcacaactctgagcaagacaggtaaggtctttactctcaagaagctagcatttggtggggagaaacaaaggagaaataactactgtgcacatgtgaggcaattgcagatggtggtctgcagaattgggattgagactgcctgggggtggccactttagactgggtccrcaaggaaaggttctctgagctgagcatgagtatttgttcaagaaggctgagttgcatcccaaggtgacacagcttttaagcccacactgagcagctctgaggtcctaggggctgttcgagaacctgggatatagcactgactatgagacaaaaatccctgtcttcatggagcttacatgatgggggcagattcacattcattcatttgttcattaattcattagttcattcagctatttgagagcctactatgtgccaagcactttctaggcactggagaag

SEQ ID NO: 29605 - DNA, 678 bp, Homo sapiens
catatatctttgtgacataagaatttgtttggcagaagagggaaacgagatggagggaggacagacagaatgactcagtatccccagactcaaacacagcacctgcacaaagtaggtgctcactgatttttttgcggggggaggggtgggcggtgaactacagaaatcctaggagaggttttcctccaagagaaactgtatttagtgtttgctttttttgttgtctagatgtccagtgcccagaaatcccttctgcctatgggcagcaaggttctgttaatgtttggccttctggtgtcactggaagaaaatagaggagggaaaggtgggacatgatgtcaggttgggaccaggatactgaagttaggctcagggagcaaaatcaggagattttggttggggatgttgaatgtgaggtgcctctaagtctaagtctattaagaggtgatgttaagtagacatttagatatctcgctgttcagagatgagttctagactggagatattagcctgggagccattcatgctgggtggtattagaaagcatgggtattagaaggcatggatttcacactgaaacgtgyatcagaagcttatggagggcttttgaaaatacagattgctgggtcctacccccagagtttctcattcagtaggtctgggaggggcctgggaata

SEQ ID NO: 29606 - DNA, 523 bp, Homo sapiens
gctcttccctgtaaaayaggagttcaaatttcgcgagaaatcatgtagaataattttaactgacctttcaaatattttcttataagttttaaaaacttacaagttttataagccaccaatatggcaccactaactatggctactaagtgcttgaaacatagccattatgactcaggaactcaattttgcacttaattttgttttaattaattttaattgaatttaatttttaattaaaatagtcatatgtggctggtcactatcttgctggacagcgcagctgcagaatatacgtgaatttgatatatatgccctcaatggcaagtttattaaagatcccttcattatttgagctataatacataaatttaaaacaattctccatataggtgtaatggtagataccttcccaatacatcaaagcattttaaatgtataaaaggaaaaagaaaatcagcccaatttaatcttgggtcttggcttttacataaaaatctggatgtaaaatttaatttctccccaa

SEQ ID NO: 29607 - DNA, 1122 bp, Homo sapiens
acttccaaggtcactcactggttgctggcaaaattcagttcctggaggggtgttgggctacggtctcaggtcctcgctggctgttggccagaagccgcccttggttccttgccacctgggcctctgccacacgatggcttgcttcccagaggcctgcaagctgagaaagtaatggagagcgcgtgctagcaagatggaagccacagccttatttatgtatttatttatttatttwtttttttttgagacggagtcttgctctgtcgcccaggctggactgcagtggcgcgatctcggctcactgcaagctccgcctcccgggttcacgccattctcctgcctcagcctcccgagtagctgggactacaggcgcccgctaccacgcccggctaattgtttgtatttttagtagagacggggtttcaccgtgttagccacgatggtctccatctcctgacctcgtgatctgcccgcctcggcctcccaaagtggtgggattacaggcgtgagccaccgcgcccagcccaccacagccttatacaacggaatcggaagtgacatcctgtccgcacgtcatatgttgtttgagatagggtcttgctctgtcgcccaggctggggcgcagtggtgtgatgatggttcactgtagccctgaactcttaggctcaagccatcctccagcctcagcctcctcagtagttgggactacaggtgtgccaccacacctggctaattttttaatttttgggggagatgggggtcttaccatgttgcccaggctggtcttgagctcctgggcttaagcaatcctcctgcctcggcttcccaaagtgctaggattataggcgtgagctgctgcacctgacccagccttacataacttaatcagaagtgacatcccgtttacatgttatgttattgattagaagcaagttactcaaggggaggggagcacacggggccatgaataccaggacgtggggttcactgggtccatcttagaaactgtctaccagaatggttatctggaaacatgaaggaggagtctacttgaaattgaaaccaccccacaggtggaaacacaggagggagacagatacctaaggtattaggtaagtccct

SEQ ID NO: 29608 - DNA, 1122 bp, Homo sapiens
acttccaaggtcactcactggttgctggcaaaattcagttcctggaggggtgttgggctacggtctcaggtcctcgctggctgttggccagaagccgcccttggttccttgccacctgggcctctgccacacgatggcttgcttcccagaggcctgcaagctgagaaagtaatggagagcgcgtgctagcaagatggaagccacagccttatttatgtatttatttatttatttttttttttttgagacggagtcttgctctgtcgcccaggctggactgcagtggcgcgatctcggctcactgcaagctccgcctcccgggttcacgccattctcctgcctcagcctcccgagtagctgggactacaggcgcccgctaccacgcccggctaattgtttgtatttttagtagagacggggtttcaccgtgttagccacgatggtctccatctcctgacctcgtgatctgcccgcctcggcctcccaaagtggtgggattacaggcgtgagccaccgcgcccagcccaccacagccttatacaacggaatcggaagtgacatcctgtccgcacgtcatatgttgtttgagatagggtcttgctctgtcgcccaggctggggcgcagtggtgtgatgatggttcactgtagccctgaactcttaggctcaagccatcctccagcctcagcctcctcagtagttgggactacaggtgtgccaccacacctggctaattttttaatttttgggggagatgggggtcttaccatgttgcccaggctggtcttgagctcctgggcttaagcaatcctcctgcctcggcytcccaaagtgctaggattataggcgtgagctgctgcacctgacccagccttacataacttaatcagaagtgacatcccgtttacatgttatgttattgattagaagcaagttactcaaggggaggggagcacacggggccatgaataccaggacgtggggttcactgggtccatcttagaaactgtctaccagaatggttatctggaaacatgaaggaggagtctacttgaaattgaaaccaccccacaggtggaaacacaggagggagacagatacctaaggtattaggtaagtccct

SEQ ID NO: 29609 - DNA, 798 bp, Homo sapiens
ggccttcttcttttaaaataccagtttgtccaggcgcagtggctcatgcctgcaatgccagcactttgagaggccaaggcaggagatcacttgagctcaggaatgtgagaccattaagagccttgtggggctgggactacaggcccatgctactaggcccagctaatttttttttgtattttgtgtagagacagggtctcactatgttgctcaggctggtctcaaactccagagctcaagcgatcctcctaccttggccttacaaagagctgggattacaggtgtgagccaccatgcccggccctacaaagcttttgatggcccctctgtagtctctaagtatcacctccattctatattagctcctaccattcacaacagctgtttctccttaggcactagtgctgattaaaaagtcgaatctgacaatgccatccmcatcaagctaccaatgactttcttcacagaattggaaaaaactactttaaagttcatatggaaccaaaaaagagcctgcattgccaagacaatcttaagcaaaaagaacaaagctggaggcatcacgctacctgacttcaaactatactacaaggctacagtaaccaaaacagcatggtactggtaccaaaacagagatatagaccaatggaacagaacagagccctcagaaataacaccacacatctacaaccatctgatctttgacaaacctatcaaaaacaagaaatggggaaaggatttcctatttaataaatggtgctgggaaaactggctaaccatatgtagaaagctgaaact

SEQ ID NO: 29610 - DNA, 561 bp, Homo sapiens
ttcaacctctcttgctgtattacctgacatctcttcccctggagcacgtggaaatagccccttcccaccacagcacagcctgtgtccagggcctgccgggcagcrtacagttttactcatctttcctccagattgtccttggcactgatgcccaggatctctctaccctaaaaggttttcaagactctttagggaactggtggctactcaagggtccagacacctttaataccagccctctgctttctttgattgctggaatgtgcttggcaagaggtgctgggtgccgacgtcccttgatggcagcactcggccaatgacaacggggttgttgcataaatgccccagcttccctgtcccttgcacgggacaactctgaggcacaccctataccatctccctaagtccccagtgggatcgagccccagtggcccaaagcagtcacttgataattaatgaactctgccatggcttcattctcttctgtgtttcatttccctactcctctacagccctttcctggggtcaccttgtcccaaataaactacttgtgataaaaca

SEQ ID NO: 29611 - DNA, 1147 bp, Homo sapiens
  misc_feature (1)...(1147): n = A,T,C or G
agaatttttacagtgcaaaacggttntatgagcgtaattttccagtgtgaaatgcagtattttcacaatntaaaaaataacaggccaggtgcagtgacttacgcctgtcatcccagcactttgggaggccgaggcaggtggatcacaaggttgggagttcaagaccagcctggctaagatggtgaaacccgatctctactaaaaatacaaaaattagccgggagtggtggcgcgtgcctgtaatcccagctactcgggaggctgaagcagagaattgcttgaacccaggaggcggaggttgcagtgagmcgagatggcaccactgcactccagtctgggcgacagagcgagactacatctcaaaaagcaaaacaaagcaaaacaaaacaaaaaaaaccaaaccaaacaaacaaaaccatacactttcaaaggtctaaaatctaggagtgaaacccttacttacaaacaaatagttcagggattctaagtgatgagaacaagcgcacagttcctgagtgtgttaaccgttgttcctctctcctgctggtggcctcagcatcaactataaancctggtacctacaagagcgtttaaaagnnnnnnnnnnnnnnnnnnnnnnnnnnnnnnnnnnnnnnnnnnnnnnnnnnnnnnnnnnnnnnnnnnnnnnnnnnnnnnnnnnnnnnnnnnnnnnnnnnnnacgtatcttattatttcattctggccaaatctgtcatatttgtttctccaaatgaattatctaaatattattttacccaaactgtttgcagttgggtagatgatgtacatgttaaaccttcctggacgctgatttatttttttcaatgtgttagtatcaaattctagcaaatttatttcttaagcaaagaaatcattcccttttcaaagccttcttttctttaaaaagaaatcaagcaagtatcccagcataccatgagtcaaagaggaaactggaaacttccagggcaaaatcttagacccaagatgaattctgcaaggaaacgtgatgtgaaactgatccagctatttgtaggattacaataaatacacctttgccctcaactccacaatttactgccaagctgcacaagacagggatacaaaaggagccggcggagacactgttagc

SEQ ID NO: 29612 - DNA, 592 bp, Homo sapiens
aaaaaaaaaataaagaaaagaaaaaatgtataacaggtaccactaggctaaatacagaaattcaaccatgagcctctggaacttactccaggattatccttagggtctgtttccccaaattcaattactacataattacctggagtctcctgaaattctcaccaatggatcaggtggagagccagggggcagcaggaccccagagcagctgagcgtgcacatgtctgctctgcccatggtggggagagagggaacagcctctgggatgagagggatgagtctcctaaatgctggggctcctgggggcagccctgggccctgggtttgtgggtgatgttaacggcttgcagagcaggaactggcttctctgcctgaaagccccagtctctctctctctctctctctctctcwcacacacacacacacacacacacacacacacacacacagttctatacagacacaaggcattggattctgaggtttctatttaagaactgtgcaggagctgagggagtgcagaggacaccaagacacactgttttcctttcaggagctccaggctctgtctagttggagaatccaggcccat

SEQ ID NO: 29613 - DNA, 592 bp, Homo sapiens
aaaaaaaaaataaagaaaagaaaaaatgtataacaggtaccactaggctaaatacagaaattcaaccatgagcctctggaacttactccaggattatccttagggtctgtttccccaaattcaattactacataattacctggagtctcctgaaattctcaccaatggatcaggtggagagccagggggcagcaggaccccagagcagctgagcgtgcacatgtctgctctgcccatggtggggagagagggaacagcctctgggatgagagggatgagtctcctaaatgctggggctcctgggggcagccctgggccctgggtttgtgggtgatgttaacggcttgcagagcaggaactggcttctctgcctgaaagccccagtctctctctctctctctctctctctcacwcacacacacacacacacacacacacacacacacacagttctatacagacacaaggcattggattctgaggtttctatttaagaactgtgcaggagctgagggagtgcagaggacaccaagacacactgttttcctttcaggagctccaggctctgtctagttggagaatccaggcccat

SEQ ID NO: 29614 - DNA, 602 bp, Homo sapiens
ggcaaaacccagtctctactaaaaatataaaaaattaggtgggcctggtagagggctcctataatcccagctactcaggaggctgaggcgggagaacgcttgaacccgggaggcagaggttgcagtgagccgagatcgcaccactgtactccagcctgggccacagagtgagactctatctcaaaaaacaaaaaaataaataaaataaataaataaactaaaaaaagtaatgaacatacccactgtagaaaaatacagataagaaaaaaaaatatgtggaaaagataagaaacagattgtatacatctaagaggacatgggtaaattaaaacacaaatacatacatccaccaaatactgtactcactccgtgatacatatgtaactgacacatattaagcatattaaagcgggtgcctggagcatgagggtgagggagagtagaattagaataggaacagaaatggtaaatggagggaaaaatcataaaataataaaacaggaatggggattgtaaagcacaacaacggttcatccaaagatatccatatactaatgctaggaaggtgtgaatacattaccttactagcaaaagggawtcca

SEQ ID NO: 29615 - DNA, 554 bp, Homo sapiens
ggcactcatcactatttgatattgttgcatatttatgaatctattttctgtcttcttggtcgggaacataagctccattaggatggagactttgtctgttttgtttagattatattctcatcatctgaaatagtgcctgtagggcctcaaaaagttcatagcagattaatgagtgaatttaacaagtagacactattgatggtgctgagccacatctgggccctctctcagcgtggagcggaattatgcacacaggcgagtatacagactttgatgcctggtgctgccgttttgcaaaaagacttctccaacccactgtcttctttttgaatttttaaataaatctggccgggtgtcgtggctcacacctgtaatcccagcactttgrgaggccaaggcgggcggatcacgaggtcaggagttcgagaccagcctggccaacatggtgaaaccccatctctactaaatatacaaaaaaattagctgggcgaagtggcaggtgcctgtaatcccagctactcaggagactgaggcaggagaattgcttgaaccca

SEQ ID NO: 29616 - DNA, 702 bp, Homo sapiens
aatcaaaatagccaaagcaccaaaacagaattttcaggataaaatttgaaatagtctcataagaaggaccctagagccatgcctcctgaattgtcacattcacttaagatttggtactgttttagtatcaagtatattctgttttgcagactgggatactgttgtattagtctgttctcacagtgctataaagaaatagctgagactgggtaatttattaaaaaaaagaggtgtattggcttgcagttctgcaggctgtacaggaagcatgatgctggcatctgctcaacttctgaggaggcctcagaaaacttacaataatggcaaaaggtgaaggcggagcaggaacatcttacatggccagaataggaggaagaaagagagggagaaggcactacacactctaaaacaaccagatcacaccagractcactgttgcaacaatagcactaagagggatggtattgaaccatgagaaactgccccatgatcaaaccacctcccaccagaccccacctcctgcagtaatcctgaggattacatttcaacatgagatttgggtgaggacacagatccaaatcatatcactgctagaaaccaaagctttactaaaccaatagcagggcctatcaaactcttttactttttcattattcagtgggaaaaaggtgaaacccacagacagtagaataactccaccat

SEQ ID NO: 29617 - DNA, 1798 bp, Homo sapiens
agactattcgtaggtctaaggttctataaaaataggcaaatagcttgcaggctgtagtttcatgactcctggtatagagaaacatgtaggcaattctaatactgcttgataggtgctatggtagggaaaatactataacatactaagactcttactaagaaaatattttaattaaaattctaatttgttaaaagtatttttgaaaagtaaaaaaatacattattacaagtttatgaacagttacctgaatgtactaaactagatggaataaaataggaaatggcttagtttctccctaaccactgttgtcatctacatcttttattattttcacttcttgactcatgaatgatatcctagtccattttcactgatttcttgtcatgtatctttataagaatagttctgttttctcaatggattgcttttcagatatcaaaatgacccgttcaaattttgatgttcaattttaagctaactcatcacttctttctgcctctctctccctcctagtttcagacttggcacttgactctggatcctcttttgaggaagggaagtagttgttgtttcttcattcttctttcttgcattctcccattcattagctgccccttgctcctctagggttcatgtcaggggaaggaataggaaagggaaaaggcaaaagtcctttatgtgcttttaaatgcttttattgtggaacagttttggttctccagaggcttcatatggacctcttatgtaaatgaaccaatccacctacacatatttctgtacataagtatttatatgcatgcacaagcattaaaagctttggagcatacacatcaaatgaaaagtaatgattctctctgacaagggcaggtgggatggaagacaaggggtatggatatcccaagggatatttttacttcattgtaatactggaattcttattacatgtagcatactttttttgatatttgattaattaaacataaatraaaagctatatatttaaaataacatgaaaatttgccaaaagaaaattatttccttctaaattgaaaaaatatgaagggctttttttttttttttaaaaaaaaaagcttcttaaagctagataggaggaattagttctagttttccataccactgtagggggactatagttaacagtaatgcatagtttcaaatagctagaaggagtatattgaatgttcccaacacaaataaatcataaatgtttgagatgatgcctatgctaattactctgatgtgatcactatatagtatgtgtattgaaacatcaccatgtaccccataaatatgtacaattatatgtcaaataaaacttctaaaataaaatattaagttcattaattgttaaaaaagtggcattagaagaagaaataatcctattagtgggcaaaggacatgaatagacatttttcaaaagaagatacacacatggccaatggcataataaaaaatattcagcatcacaaatcatcagggaaatgcaaattaaaaccacaatgagatatcatctttcttcaatcataatgactgttactaaaaagacaaaaaatcacagatgttggcgaggatacagagaaaagggaactcctatacactgttggtgggaatgtaaattagtacaacctatatggaaaacagtatggagacttctcaaataactgaaaatagaactaccactggatccagcaatctcactactgggtatctacccaaaggaagagaaatccacatgtcaaaaagatgcttgcactcctacatttatggcagcactgtt

SEQ ID NO: 29618 - DNA, 583 bp, Homo sapiens
  misc_feature (1)...(583): n = A,T,C or G
cctagtgcagtgctttgaacctagcaaggatttcagaaatagtgacccctctccctcagtcatctcttttcctctcttccactgaatgggcttcctgagtttcttcttcgtcctcccccctaggttggcttcttcaagcgtcagtacaaggaaatgatggaggaggcaaatggacaaattgccccagaaaacgggacacagacccccagcccgcccagtgagaaatgatcccctctttgccttggacttcttctcccccgcgagttttccccacttacttaccctcacctgtcaggcctgacggggargaaccactgcaccaccgagagaggctgggatgggcctgcttcctgtctttgggagaaaacgtcttgcttgggaaggggcctttgtcttgtcaaggttccaactggaaacccttaggacagggtccctgctgtgttccccaaaggacttgacttgcaatttctacctagaaatacatggacaatacccccaggcctcagtctcccttctcccatgaggcacgaatgatctttctttcctttctttntttgtgtttcccttcccttttttttttttt

SEQ ID NO: 29619 - DNA, 1285 bp, Homo sapiens
acttgtgcatcattagtctgcaatgagccaaaaatccaaatgaactggtagatagctgatagaagcctcatgggctcgatttgagcccttgtgtgtcctagggagaggtgaatgccatggttcttaagaacatgtctttggattcgaattctggctctgaggacaagctatatgacctcggatgagtcatttaacctctctaagccccaacctgttcttctgaacaagaggcacaatgacagtttatggggtggattaaatggcataatgtgtgatgtacctggcctaaggtttatgcttaataaatatgtgtcatcactgcaatgttttgggatgttttctctgtatgtaaaatggtgcccatgtccacctccctgggctattgggggattaactgagacactgcatgacaaaactctttggaagtccagtgcaaatgagtggacttgtgacctctcacattatttctgtttgtaggttcaactggcaagccaatcatgctcatttatagcgacacgcactgaaaacttttttctcacaagaggttattgaaccaagatgagaggaaataccaaggctctttttggtgttttaattccttcacatctatttctttcatcaccagttaatgaggacttagtactcacatcagcagtaagagtagaaaatgggctcatattggtgttcgaatcctgatgtgttctcttactggttttaagatttgtgccaggttactaatcaaatcttaaaccttagttttctcacatataaagttgtaattataatacccacttcgaagggtcattgtaaaaaccacacctgaatgtacccacatatatacagacacaaccactaaagaaaatagattatgtaatatttattcaatgtattttacttgtctgttgtttatagagccctgcytcagttggatgagttatttcagatttggaagtgtctcgttctctagcttgggaatgcagctgaacattgggggcagctgtggccctctttttgtttgttgccaactcggtctaagatcagcctgagtggactcagtcggaatctaccatctcaataccaggtggttaatttctcattggtagagccctctttttacaggcttgggaagtctggctgatcatctcgggttgtttaagcaagaaagttaagctatatccccctgattagtaggattttctcctttagattcctgtgttaatctacaaactgagcagtttatccctggtagacattggaataccaggtgtggtagtcatactgatta

SEQ ID NO: 29620 - DNA, 1233 bp, Homo sapiens
gctaatatggtctggctgtgtccccacccaaatttcatcttgaatcatagctcccataatcccacatgtcatgggagggacccagtgggaggtaagtgaatcatggaggtgggtttttcctgtgctattctcatgatagtgaataagtctcacaagatctgatggttttataaagggcagttcccttgcacatgctctcttgcctgccaccatgtaagacatgcctttgttcctgctttaccttccaccatgattgtgaggcctccccagccatgtggaaatgtgagtccattaaacctctttttctttgtaaattacccagtcttgggtatttcttcatagcagtatgaaaatagactaatacatgtacctactacatttatttatagaattataacacctcattccataactttttacacaaataataggttatgctttttgttctataactgtctgtttttacccaaaaacatgtcttggagacctctccataccagtatgaggctctactttattctactagatgaatctttcccatggtgctcatgtgtcatgggttagccatggcactgcgattgatatttagtccatatctgttgttatataagagtggcatgaacctcgaaaacgtcatgataaacgacaggagccaggcataacactgtatgattccattcacataaaatggccagaataggcaaatccatagagacagaaattagattattggttgccagggagctggaaggatggggcatgttgtgtgaatacttaatagatacagaattttcatttggagtcatgaaaatgttttggaagtagagatcgaaggtccttgcacaacattgtgaatgtacttaatgtcactgaattgtactctttaaaatggttaaaatagtaaactctatgttatgggcactttactgcaataaaaaacatagaactgccagatcacaaagtatgctctttaaatttttataaaaattggcaaattgccttgcaaaatcttactccctttatgtttttgtattactgtatatatctctatgyatctttctcaactaatttcagaatcagtctcactcttctctctctctctccttctccctccctccttttctctcccccttgccttcctctccaactctctaacagttctgacaatagtcacaaatactcctcctccccctcctgcaaaaacttttcaggtcatgtatcagtttcaattac

SEQ ID NO: 29621 - DNA, 554 bp, Homo sapiens
tatttctacactactcctactattacagagaaagaaagtttttttttctcctcctaaaaggaaaataagtagcagtcatgtctcagctatcaagagaaagggtaaaaacctataccctcattccttgaaattcctctaaaattacttaatatattgcttttcttccaccagtgggccacttgttggaagtcctaagcagtgagttatgttctaaagcactattaatagtctatagagtcctttaaggtactttagcatggaataagggaggaaacagaggagagagaacagtgttctgggtaccttggcctaccggatctacactgatttcattgtattaaggaagacaaaaaaacaaagattcttccctatccatcatgcttctttggttttggacagcaccttgtaaatatcattttcctctttctcctttttcttctcttccgctgctgtcttcatttatttayttttctatttctccagaaatgggtgcaatactgcatatcttcagcttcttcagttttgtactcccattactttggtcctagtcttgg

SEQ ID NO: 29622 - DNA, 1309 bp, Homo sapiens
ctgaatgcatataagagaagagagcatttgaatatcaactgtggtcctgagatcaattgcatcaaaactacgtcttccttctgagcttcttgtcaaggagagaggcccatgggggagccactcccacaccctgtgttgtgaagtaaatttacgtgttgcaagaggtagactatggcgaccatcaaattgtgcctttcagagttccagctgacaggagtataattaagcaaggactctagctgctgagctctgaaattcgtcaccactattgtgccaaggcttctctccttattgctttcctcagcatttgcttactgagtgcagcagccgctgggtaggtcattcctggaagatgggggaatcctctgatgggtcacttggctcaagtccttcccgttggccattgaccttgacaaactttcttagaactgccttcttccactcaatcctctctccctctgtcctccacaagggtcagatgagcatctttgtttgagagctctccaaggctttcctggttctctcccaattttccttcatagacattttccctaataaatctattgcccatctaatcctgtcttggcatctgcttttctgagaaactgcagtagcacatgtgtgttggcacaagtcaattcatggagtttaagtaaactatacactgagttgtaatactaatgaagccataagtatttcttgcttcttatatataccaattggctttccttcattcacttatgataacctgtactcctaatccactcagcaacctttcaattatttcttacttaaaacaagacgggaaagattagttaacaagaaagtgtgaagatgtacagaattactattgaaaagcctctcaaaactatgcccttctgacaagagaatatttctgaggcacgatctatattggaaagtgatgtagagatatgcataagcaaaagtagtgaaatcgcttcaacattctgatatgttcactttgtttagtgttttagttggctttaaattctaacaattaagaaagcttacaaatggtttgcagaagaatattagtgaaaggattattgagtacttcatccataagtcctttgaacaggaagcacacatcttataatgcaaactaattttttaaacaaatagatgcctgtgattggatggatctataaattcatgtttacattgctaatggcattattagcataaatcttttatagcatatattatagcagctttcaggtaattgatgcctccaaaaaatatttattgatctgaygtaaaaatatctttgagaaatgactttgattag

SEQ ID NO: 29623 - DNA, 1150 bp, Homo sapiens
acccctttgctattgaagagtacgcagcactactgcattactaatcaatgattggacatcatttttttctttactattcaatttcattaattatctatatcaaaataagcytcaaaatacttctaatatctcttgtatgaatccatttatctcctggtcttttctactctcctgctgggctttcatcagatctcacccaccatagtgagaaaacctactaactattccatcccatcccatcatacttctaaggaattttttttaaagattactttggaaatctaatcatagttgttctctgcatgaaaacctacagttatttccatctctcttgggaaacgttacagtttctaatgtcggtaggctccagccctactcatttttttgtgtgtcttcaaacaaatcttattttcttgccttcctgatcttctgccctctgcatacaatgggccctttggctggaaaatcctcctctctaaccctactgctcgtgctcactttctgcttcttcccaaggctaactcatcctcccggtctcaactgcaaaattcttctttgcagcctagactccaccctctcctcccaagcaggtttagtccccagcccacatttttccatggagtcctctactttccttctcctaggcctttataaaaaaattgcttttgctttttaaaattattattatttttaattggaaaatcaaaattatgtacatttgttggggtacaaagtgatgttttgatatttgtatacaacgtagtatgattaaaccaaattaattaacagatccaccacctcaccttcttatcatttttgtgatgaaacatttgaaatttactcccttagttattttgaattgtacaatacatcataattattggagatagtcactccactacgcaatagactccaaaggtattccatctgtttacctgaaactcttgggccatcatctccccattccctccttccttcccactcccagcctctagttactgtcattctattttctgcttctatgagtttgacattcttagactccacatataagtgaaatcatgtgatatatgcctttctttctgtccctggcttattttgcttagcataatgtcttccaggttcttccatgttacaaatgacaagattt

SEQ ID NO: 29624 - DNA, 1150 bp, Homo sapiens
acccctttgctattgaagagtacgcagcactactgcattactaatcaatgattggacatcatttttttctttactattcaatttcattaattatctatatcaaaataagcctcaaaatacttctaatatctcttgtatgaatccatttatctcctggtcttttctactctcctgctgggctttcatcagatctcacccaccatagtgagaaaacctactaactattccatcccatcccatcatacttctaaggaattttttttaaagattactttggaaatctaaycatagttgttctctgcatgaaaacctacagttatttccatctctcttgggaaacgttacagtttctaatgtcggtaggctccagccctactcatttttttgtgtgtcttcaaacaaatcttattttcttgccttcctgatcttctgccctctgcatacaatgggccctttggctggaaaatcctcctctctaaccctactgctcgtgctcactttctgcttcttcccaaggctaactcatcctcccggtctcaactgcaaaattcttctttgcagcctagactccaccctctcctcccaagcaggtttagtccccagcccacatttttccatggagtcctctactttccttctcctaggcctttataaaaaaattgcttttgctttttaaaattattattatttttaattggaaaatcaaaattatgtacatttgttggggtacaaagtgatgttttgatatttgtatacaacgtagtatgattaaaccaaattaattaacagatccaccacctcaccttcttatcatttttgtgatgaaacatttgaaatttactcccttagttattttgaattgtacaatacatcataattattggagatagtcactccactacgcaatagactccaaaggtattccatctgtttacctgaaactcttgggccatcatctccccattccctccttccttcccactcccagcctctagttactgtcattctattttctgcttctatgagtttgacattcttagactccacatataagtgaaatcatgtgatatatgcctttctttctgtccctggcttattttgcttagcataatgtcttccaggttcttccatgttacaaatgacaagattt

SEQ ID NO: 29625 - DNA, 700 bp, Homo sapiens
tagacttcttttgctgcttgctgcytatctgtaagtaataaatctattttatgtaacttgttgtgtgtgagtgttctgtctcatcggactcaggcaattgataaaactatagcccaaggtgcagtgggcaaaagtgtttggagtcctatttctggtggttggtatagtgataatctttgctattctccatgcagtgggaattctctcttggggttggtaattggagaacctggtccacactacattgtgtatagtagaggctcaacaacttttgaatgaacgtgtacatgaaaataggcacctgacttaagctgagctattcaaatcttgtcacttgaaaattgcaactgagaaatatggttttggtggttacgtcacatcaatagtagagttcaacaggaaaaaatctacaagttgcaatgccaacttacccatgcctggtcaggttcgtatttcactgaagtgtggttgcctagccttactttaattataagagatactccagtgtatgtattaaacaagttactctttcttacagccgcgaactcatgcactgtgcaactaaaccatcactttgatcttctgcaagtgtttatgcatgtgggggtagaaatagatggcacatatgcacataaatatgagcacgtattgtgtttctctaattataactgacacaaatgacaaactaactgtaatatgt

SEQ ID NO: 29626 - DNA, 700 bp, Homo sapiens
tagacttcttttgctgcttgctgcctatctgtaagtaataaatctattttatgtaacttgttgtgtgtgagtgttctgtctcatcggactcaggcaattgataaaactatagcccaaggtgcagtgggcaaaagtgtttggagtcctatttctggtggttggtatagtgataatctttgctattctccatgcagtgggaattctctcttggggttggtaattggagaacctggtccacactrcattgtgtatagtagaggctcaacaacttttgaatgaacgtgtacatgaaaataggcacctgacttaagctgagctattcaaatcttgtcacttgaaaattgcaactgagaaatatggttttggtggttacgtcacatcaatagtagagttcaacaggaaaaaatctacaagttgcaatgccaacttacccatgcctggtcaggttcgtatttcactgaagtgtggttgcctagccttactttaattataagagatactccagtgtatgtattaaacaagttactctttcttacagccgcgaactcatgcactgtgcaactaaaccatcactttgatcttctgcaagtgtttatgcatgtgggggtagaaatagatggcacatatgcacataaatatgagcacgtattgtgtttctctaattataactgacacaaatgacaaactaactgtaatatgt

SEQ ID NO: 29627 - DNA, 1400 bp, Homo sapiens
ctttcatcatgtcagtattatagaggaagcttagttttctgtttatgtgaatatgtgtgttgtatttgttaatttaaaaatcattctgagtaaagaacaacaaaaataacatgaaaaaaccaaggtatttatcacttgtttattcgttacttcttcctctttctcctcctccattagcctcatctgttctgattcattaaactaagcatcttatgtgcaacatctttccatttacaatttcttccacttaaaagaaagaaatattaatctctaatttggatgttytcatttcctttctattatattcttttatatgaaaacattgtagttactttgactaatgccattttgattaatcttttaaaaatattatagaaccttttaagaacagaatattcccagtttgctgattattagatctctaatttctgtttaatttttattaatttctgtttaatttttatatattgggaatgatgaatagatgatagattactgtaaatctgttcttctaaaatggaaacatcttaaaacatttctaaataattataaatatgtaactctgaattataattgatacattttcctgaaattaaggggtgtttttaagatgtgtagataagaaactcaagatttgccaaatttctgttttgcagaaggtcttattccagggttggtaattatcatttaatgtagagaagctttaaggtctggatcccatataccctagaattctaattccaatgttgcaaatttctttatatgaaagttggaaggactacatgagagtatttcaagatttggcatcagaatttttttatctcattttgggaatagtgcaggatgtttgttttttcccaaacctcagaatattctggaaatgattttcagtagggcgaaggtagggtcagttattcagagggtattgactaatgctttattgaggttttgtggaggtagttttaatgttggcaatttttccatttgcatctttctcatctcccaaccttatattcattaattaatgaagagactttagaatttgaaaggacaatgagataaaacaaagggtcacattagactcaggagcaatcacaagacacaggaaaatgcttctttctttgaagaagtccaaaagaagtccaacaccattaacagagctcccagaatgtcctttttcttcaacattgccaaagcctgtcattccccgataaacccataaatcccaggtttttaaaaatgagtaatctaaaaaaaaaaaaaatcaagtgtatcctgctaaaagtattttgtagataagtgctctccatcacatttctgctagtatctttaccaggaagtctagttaagagccaggtttacaatggcattgcctatggtcattatgtattgttttatca

SEQ ID NO: 29628 - DNA, 1400 bp, Homo sapiens
ctttcatcatgtcagtattatagaggaagcttagttttctgtttatgtgaatatgtgtgttgtatttgttaatttaaaaatcattctgagtaaagaacaacaaaaataacatgaaaaaaccaaggtatttatcacttgtttattcgttacttcttcctctttctcctcctccattagcctcatctgttctgattcattaaactaagcatcttatgtgcaacatctttccatttacaatttcttccacttaaaagaaagaaatattaatctctaatttggatgttttcatttcctttctattatattcttttatatgaaaacattgtagttactttgactaatgccattttgattaatcttttaaaaatattatagaaccttttaagaacagaatattcccagtttgctgattattagatctctaatttctgtttaatttttattaatttctgtttaatttttatatattgggaatgatgaatagatgatagattactgtaaatctgttcttctaaaatggaaacatcttaaaacatttctaaataattataaatatgtaactctgaattataattgatacattttcctgaaattaaggggtgtttttaagatgtgtagataagaaactcaagatttgccaaatttctgttttgcagaaggtcttattccagggttggtaattatcatttaatgtagagaagctttaaggtctggatcccatataccctagaattctaattccaatgttgcaaatttctttatatgaaagttggaaggactacatgagagtatttcaagatttggcatcagaatttttttatctcattttgggaatagtgcaggatgtttgttttttcccaaacctcagaatattctggaaatgattttcagtagggcgaaggtagggtcagttattcagagggtattgactaatgctttattgaggttttgtggaggtagttttaatgttggcaatttttccatttgcatctttctcatctcccaaccttatattcattaattaatgaagagactttagaatttgaaaggacaatgagataaaacaaagggtcacattagactcaggagcaatcacaagacacaggaaaatgcttctttctttgaagaagtccaaaagaagtccaacaccattaacagagctcccagartgtcctttttcttcaacattgccaaagcctgtcattccccgataaacccataaatcccaggtttttaaaaatgagtaatctaaaaaaaaaaaaaatcaagtgtatcctgctaaaagtattttgtagataagtgctctccatcacatttctgctagtatctttaccaggaagtctagttaagagccaggtttacaatggcattgcctatggtcattatgtattgttttatca

SEQ ID NO: 29629 - DNA, 1400 bp, Homo sapiens
ctttcatcatgtcagtattatagaggaagcttagttttctgtttatgtgaatatgtgtgttgtatttgttaatttaaaaatcattctgagtaaagaacaacaaaaataacatgaaaaaaccaaggtatttatcacttgtttattcgttacttcttcctctttctcctcctccattagcctcatctgttctgattcattaaactaagcatcttatgtgcaacatctttccatttacaatttcttccacttaaaagaaagaaatattaatctctaatttggatgttttcatttcctttctattatattcttttatatgaaaacattgtagttactttgactaatgccattttgattaatcttttaaaaatattatagaaccttttaagaacagaatattcccagtttgctgattattagatctctaatttctgtttaatttttattaatttctgtttaatttttatatattgggaatgatgaatagatgatagattactgtaaatctgttcttctaaaatggaaacatcttaaaacatttctaaataattataaatatgtaactctgaattataattgatacattttcctgaaattaaggggtgtttttaagatgtgtagataagaaactcaagatttgccaaatttctgttttgcagaaggtcttattccagggttggtaattatcatttaatgtagagaagctttaaggtctggatcccatataccctagaattctaattccaatgttgcaaatttctttatatgaaagttggaaggactacatgagagtatttcaagatttggcatcagaatttttttatctcattttgggaatagtgcaggatgtttgttttttcccaaacctcagaatattctggaaatgattttcagtagggcgaaggtagggtcagttattcagagggtattgactaatgctttattgaggttttgtggaggtagttttaatgttggcaatttttccatttgcatctttctcatctcccaaccttatattcattaattaatgaagagactttagaatttgaaaggacaatgagataaaacaaagggtcacattagactcaggagcaatcacaagacacaggaaaatgcttctttctttgaagaagtccaaaagaagtccaacaccattaacagagctcccagaatgtcctttttcttcaacattgccaaagcctgtcattccccgataaacccataaatcccaggtttttaaaaatgartaatctaaaaaaaaaaaaaatcaagtgtatcctgctaaaagtattttgtagataagtgctctccatcacatttctgctagtatctttaccaggaagtctagttaagagccaggtttacaatggcattgcctatggtcattatgtattgttttatca

SEQ ID NO: 29630 - DNA, 525 bp, Homo sapiens
gacttcactactctgggttcttggtgaaaactgaaagacaacaaaactacttttgtttgaaaataaatgatggatagataccaatactcatatactcatttcccgaggcgatattgctccattttaagagtcagctaagatagaaatattactttatttgagtgaatttgtcagtgatccggtgagcaaaagatagttttgatatatcaaattggcatatgtcatcacaagaagaaagcttttgagatgtgatcagatttgctcattatttgccaggttcacatcgtggaattcccagcttgaatctataaatgcaaaatgacaaaattggcattccataattttgctcaaatattgactaacctgactttgatttcaaaatatttattttaaatgtattctaacaatctttatttatgatatgattgcaaatgattttgaagcaattatttttcattgwcttgctcaactaaatcgacagtgaaaagagatcaataagaatatgaagggaaagagagaatagct

SEQ ID NO: 29631 - DNA, 530 bp, Homo sapiens
tagtggatacttgtgcagtgcagttgttaaatacttttactaccacccaggattttgtgtatcccagcaacttttctaagcattttacatgtattcagacacttaacaatcacaagaactcttatcrtttagtgctacagtcatccccgggtcacagatgggaagaatataagctacatgatctggaggccagggactgaaatgggttgagtcgggccactcagggcatcctacacatcaagagactgaagggtgactcaatcctaaagcccctgcctcacccatcccacccaaccctaccacgtgaggcctctccttccaacaggcccatgtcctgaaactcatctccctgtggtatcgtcagtgcagcctagtgctcccatttgaaattccacagcacaccataaatatccatcaacagaagagcaaagaaataaactgcaccatctccattatagaccaaaaggcaccgggttggaagaatgaattgaagctatacggcacagcacagagaggtccccaaagcaggg

SEQ ID NO: 29632 - DNA, 524 bp, Homo sapiens
ttgtgtgtgtatctgggaccttcctggtggggtgaaataggagggtgcttgcccttcccagcacgagtggagaggacatggggcttgtctttctctgctctaagtgggaaaggagctctgagggctggccctgcacagaggatggcgcacactggagactcattgacccactgctgtaccttcttcmtctcactcactgcccactgcgtttttctcttccttgcagggggctcctgctcctgtgccagctcctgcaagtgcaaagagtgcaaatgaacctcctgcaagaagagtgagtgcggggccatctccaggaatctggggctgtggctaaggttgggagggaactccaggctggcctggagtgcatgcttctggggaacgcctttctttgcccctgttggccatgtcattccctctccaggctttctgctctgagctcgaatgtggcagggcagcctttttcttttgagacacaaactccaaaggtaccacctgcggtcttagaacagagctgtaccaac

SEQ ID NO: 29633 - DNA, 750 bp, Homo sapiens
ccaaccctccagcctcagtgttcccctctgtaaagtgggacctgggtgtgcggggaggggtgtggcactttttcattctctcttttcccaagtctgtctgtctgggtaggtagagcccttctagaaggttggttcagagcagagtccaagacttgggctgaaacccagctctgctctgtactgcataggagagtacagtacatggatgagtgcccagccatgtgagcaatctaattatcttttttcctaatctacttccaggagaatcttggagtcctcttggacttaatcacccatttgtcctgagttctatagacttgcccaacgccacacagcttgtgakgctgcagcccaaaggggcagagatttgccaaagtatgctcataactaatcatcaagtgtcagagccagatagagcccatgggacctagacaggaagagtgacagtcccaaggccacatagtgcagcaggtggctttctggctcccactgctgtcttctgaggcatgcagacagaaacgcactcaccagcccttgtctggacaaaatcggccatgatgttagagatgacgttgatctctttgcagatctggggcagacagagcaggtgctttccaggcaggaaaggaggccagaggcagtgcctccttccagctgcgtggtggtggcagtgctggggaccggcacaggggactggccacatggagaaggtgggagtggcaccttctcagggaaaggcagggaggaaag

SEQ ID NO: 29634 - DNA, 750 bp, Homo sapiens
ccaaccctccagcctcagtgttcccctctgtaaagtgggacctgggtgtgcggggaggggtgtggcactttttcattctctcttttcccaagtctgtctgtctgggtaggtagagcccttctagaaggttggttcagagcagagtccaagacttgggctgaaacccagctctgctctgtactgcataggagagtacagtacatggatgagtgcccagccatgtgagcaatctaattatcttttttcctaatctacttccaggagaatcttggagtcctcttggacttaatcacccatttgtcctgagttctatagacttgcccaacgccacacagcttgtgaggctgcagcccaaaggggcagagatttgccaaagtatgctcataactaatcatcaagtgtcagagccagatagagcccatgggacctagacaggaagagtgacagtcccaaggccacatagtgcagcaggtggctttctggctcccactgctgtcttctgaggcatgcagacagaaacrcactcaccagcccttgtctggacaaaatcggccatgatgttagagatgacgttgatctctttgcagatctggggcagacagagcaggtgctttccaggcaggaaaggaggccagaggcagtgcctccttccagctgcgtggtggtggcagtgctggggaccggcacaggggactggccacatggagaaggtgggagtggcaccttctcagggaaaggcagggaggaaag

SEQ ID NO: 29635 - DNA, 1765 bp, Homo sapiens
cctctgatttgccccttatggcaaccagttgggctggtcttgggctacatcttcatttgcacaggagtaactttgtaacttcacttcagcttctaattggttgctttctgcaatcagtcagactgatagcggaccactacttcttgtacatagagtgtacactaagcaaccaatgagaaacctctagaggatatttaaaccatagaaaattctataaccaggcccttgagccactcgctggggccagctcccaccctgtgcagtatacttttgttttcaataaacctccgcttttgttgcttcctccctcccttactttgtacattttgtcaaattctttgttcaaggtactaagaacctggacaccctgcaccggtaacagtggtactgtgggtctcaatccagtcagcttttcaagggaaagaggtcaagggcaaactttccctttggcctgggtatgtcttcagcacctctttactgcttgaaatctttaaacataaacaaacgtccaggtcaattctggaagtgacagaagggatgtatatgtaattttatggctaccttccatatctgcaagtgtgactgattctttttctcagtagtgtcaaagagtttgcttttcctataaatatattaaagaaatatgattacttaagagaaaatgttaaggaaaataacagcgcaggcgatagcagaaatggcaggaatccttttgcatttgttatgcagacagggactgtcttgctcgtggctttatatatccaatatggatccttatttgtggactagtggaggaccctctctgggccacaagtcacgtgctcctgttattgatgagaacaacatgggacacacagctaagcccaccaggcctggcttatttgtctagaggtagaaaaatatccctatgctatgaataaagattacaatcaaagctattacagactagtcagcacaagccaggcaccattttaagttcttcacatgttttaagtgatttgctcctaccagcagactctattattatgtcaattcacagttgaggagactgagccacagaaaggttgcgtcacccacatataagtgacgcagctgggatttgcactcatgcatgctgactgcatcatggtgccctcaacaaccaccctatgctactgtgtcatgtaaaacccaaggacactgaaaatctggcacagagacagcagtgggaaggacactgagctagcagtcaatccctctgcatagctctgtgacctctcagcctcaacatgccatctcacccatcagaggcacagctgcactaactaaccaaggtcccttctagctctgaattgtgacagacagttctacaaaggaagaaatggaggctcagagaggttgagcaacctgcctaggtctcacagccagtaggtggtgaagtgggcagtwaaacaagactgccctgaccctgaaccccatgctctttgcacagcctgccttctggaaccctctcttcaaaaggagtacctgcaggccagcatggtcctgattcctggcccgcttgaccccttttcttctttgaacatcaaatagcaattcccgcaacaaatagccagaggaactaattgctgccattaattacaagttacctggggccccctactccttcctaatgaacaccaccacactttagaaactgcataatatgccatcacctccgcataggcggactcaaagtacttcatctggaactaatccttctctgtactccagcttgctgggagga

SEQ ID NO: 29636 - DNA, 1181 bp, Homo sapiens
gtcattgtagagaggagactgcttggcaaagagtaaaaaaaaaaaaaaaaaaaaaaaaaaaaaatctagagttagggagatgacccagagccatgatcactccagaaaggtaaaatgtagtacacttgagtggtgtcttctgaggataaaggaagttcacatttcatcaacagagaaggggcagaaactaagcacaaagttcccaaactgcctgataaggatccttgtatagaatactgaaagatcagggatgagctaccaggttatatccctttgggtgttttatttttccatgctgggtgaaaaggtaatttcctaaaaaaccaaaactccgtctcgagaaagaaaaaaaaaatccacatgggcctaatctgattttttttttttcaaatatgtagactcaaactaaaatcttccaaagacttctgcatgatcttggctttgtcccaatattatctgctgaacacactccctattattcttaaaatgtgattctcatgataaattagaaggctaatgtgttcgcgtaaagaacacctgaatatgccgcagcaggtctcattttacagatggatagaacaggccattaggcatggatagagcagactcagctggctctgataattggtagttgacttgaatctgaatagaggtcaatcaaatgatgctacggaagtttagagaactatatcattcacacagagattttccttgtaaaccataccagctcactccgtattctaaattctgtttagagtgatacaaaattgcccactttttgaaagaggagacaaccatttaccaggcctgccaagtaaagctgcgtgggttgtatactgctcaacccaaaggaagttacaatcacatggactacgtacaacgtgtgcaacctgctcagtccacacagcaggcttgtcattagaaatataaatgctatyactcctgattcaggttaagcaagattcaaagagaggagccactggaaggtacttggagggcatttgaactttagcaactttgattagtttgtaaggcatatcattttcccacacagacaagattttactatgtacacaaatgccaggagttttttggtttttctttttaaaaaatgctattattgcccaggcatggtggctcatgcctgtaatcccagcgctttgggaggctgaggcggacgg

SEQ ID NO: 29637 - DNA, 1139 bp, Homo sapiens
cagagctcctggtgtctgcctctctagggatctgcttctcctgaggtggccccagccctgggtagagccctgcggaggagcacmtggcagaggggctgccgtcccagctgctgtcccaggctccacgcctcctgtgcactcctgcgagattgggcgttgggtgagaaggaaggactgggagctccatccacagcagagaggggtgcacagctggttcaggctgcaggagtgaggctgggggcagctcacatatgtgggcctcagctcatacctggccacagcaagcgtgttctgctattgaaaatgtttggttttaggtgattttgagcagctgggaggcaccacagatactcatttctggctcttgtgacaaggttgtccctgctccagcctggccctcccatgaaggtggctctgtctgcccctgccacccacagccgggcttctcacgcagccccctcctgcctggcccacgggcatctgcctgtgtaacctgtgggcccacaggcccagtttaaattccaacactgtcatcttgtagctgtgactctgggcaagtaattgaatgtggtcccagtctctgcattgtgtcccatccagacatggagtgtatccttgtccccagaacctggctggccccggacttgctttgatcattgggatgcggcagatgtcatatgagtctggagacttcgccatcacatgagggagcagaggggagggaggggcccaggcccagcctcagatgactgccaggcaaacacacagagcctcttgggcccagtgggctgcctgccaaactgccagccacatgcagcccctgggtggccaggtgagacctgccgaagcgccaacatcatactctcggaacaggggagaccattgccgtgtgaacctcagcagtggggctgcttgttacgtggcagctgacagtggttaacgtctctatgctgtgttttcttatctgttaaatgaggttaaaaatagatcctgggggggtggtggtttgctgtggggatgaaatgaggcagtgcaggtcagagtgagtgcagacgagtgactgtcgtcctctgctttgtctctgacccatgaaagcaacactttcctcagatctgccctgacctttggtcacggatccc

SEQ ID NO: 29638 - DNA, 1139 bp, Homo sapiens
cagagctcctggtgtctgcctctctagggatctgcttctcctgaggtggccccagccctgggtagagccctgcggaggagcacatggcagaggggctgccgtccyagctgctgtcccaggctccacgcctcctgtgcactcctgcgagattgggcgttgggtgagaaggaaggactgggagctccatccacagcagagaggggtgcacagctggttcaggctgcaggagtgaggctgggggcagctcacatatgtgggcctcagctcatacctggccacagcaagcgtgttctgctattgaaaatgtttggttttaggtgattttgagcagctgggaggcaccacagatactcatttctggctcttgtgacaaggttgtccctgctccagcctggccctcccatgaaggtggctctgtctgcccctgccacccacagccgggcttctcacgcagccccctcctgcctggcccacgggcatctgcctgtgtaacctgtgggcccacaggcccagtttaaattccaacactgtcatcttgtagctgtgactctgggcaagtaattgaatgtggtcccagtctctgcattgtgtcccatccagacatggagtgtatccttgtccccagaacctggctggccccggacttgctttgatcattgggatgcggcagatgtcatatgagtctggagacttcgccatcacatgagggagcagaggggagggaggggcccaggcccagcctcagatgactgccaggcaaacacacagagcctcttgggcccagtgggctgcctgccaaactgccagccacatgcagcccctgggtggccaggtgagacctgccgaagcgccaacatcatactctcggaacaggggagaccattgccgtgtgaacctcagcagtggggctgcttgttacgtggcagctgacagtggttaacgtctctatgctgtgttttcttatctgttaaatgaggttaaaaatagatcctgggggggtggtggtttgctgtggggatgaaatgaggcagtgcaggtcagagtgagtgcagacgagtgactgtcgtcctctgctttgtctctgacccatgaaagcaacactttcctcagatctgccctgacctttggtcacggatccc

SEQ ID NO: 29639 - DNA, 1139 bp, Homo sapiens
cagagctcctggtgtctgcctctctagggatctgcttctcctgaggtggccccagccctgggtagagccctgcggaggagcacatggcagaggggctgccgtcccrgctgctgtcccaggctccacgcctcctgtgcactcctgcgagattgggcgttgggtgagaaggaaggactgggagctccatccacagcagagaggggtgcacagctggttcaggctgcaggagtgaggctgggggcagctcacatatgtgggcctcagctcatacctggccacagcaagcgtgttctgctattgaaaatgtttggttttaggtgattttgagcagctgggaggcaccacagatactcatttctggctcttgtgacaaggttgtccctgctccagcctggccctcccatgaaggtggctctgtctgcccctgccacccacagccgggcttctcacgcagccccctcctgcctggcccacgggcatctgcctgtgtaacctgtgggcccacaggcccagtttaaattccaacactgtcatcttgtagctgtgactctgggcaagtaattgaatgtggtcccagtctctgcattgtgtcccatccagacatggagtgtatccttgtccccagaacctggctggccccggacttgctttgatcattgggatgcggcagatgtcatatgagtctggagacttcgccatcacatgagggagcagaggggagggaggggcccaggcccagcctcagatgactgccaggcaaacacacagagcctcttgggcccagtgggctgcctgccaaactgccagccacatgcagcccctgggtggccaggtgagacctgccgaagcgccaacatcatactctcggaacaggggagaccattgccgtgtgaacctcagcagtggggctgcttgttacgtggcagctgacagtggttaacgtctctatgctgtgttttcttatctgttaaatgaggttaaaaatagatcctgggggggtggtggtttgctgtggggatgaaatgaggcagtgcaggtcagagtgagtgcagacgagtgactgtcgtcctctgctttgtctctgacccatgaaagcaacactttcctcagatctgccctgacctttggtcacggatccc

SEQ ID NO: 29640 - DNA, 1139 bp, Homo sapiens
cagagctcctggtgtctgcctctctagggatctgcttctcctgaggtggccccagccctgggtagagccctgcggaggagcacatggcagaggggctgccgtcccagctgctgtcccaggctccacgcctcctgtgcactcctgcgagattgggcgttgggtgagaaggaaggactgggagctccatccacagcagagaggggtgcacagctggttcaggctgcaggagtgaggctgggggcagctcacatatgtgggcctcagctcatacctggccacagcaagcgtgttctgctattgaaaatgtttggttttaggtgattttgagcagctgggaggcaccacagatactcatttctggctcttgtgacaaggttgtccctgctccagcctggccctcccatgaaggtggctctgtctgcccctgccacccacagccgggcttctcacgcagccccctcctgcctggcccacgggcatctgcytgtgtaacctgtgggcccacaggcccagtttaaattccaacactgtcatcttgtagctgtgactctgggcaagtaattgaatgtggtcccagtctctgcattgtgtcccatccagacatggagtgtatccttgtccccagaacctggctggccccggacttgctttgatcattgggatgcggcagatgtcatatgagtctggagacttcgccatcacatgagggagcagaggggagggaggggcccaggcccagcctcagatgactgccaggcaaacacacagagcctcttgggcccagtgggctgcctgccaaactgccagccacatgcagcccctgggtggccaggtgagacctgccgaagcgccaacatcatactctcggaacaggggagaccattgccgtgtgaacctcagcagtggggctgcttgttacgtggcagctgacagtggttaacgtctctatgctgtgttttcttatctgttaaatgaggttaaaaatagatcctgggggggtggtggtttgctgtggggatgaaatgaggcagtgcaggtcagagtgagtgcagacgagtgactgtcgtcctctgctttgtctctgacccatgaaagcaacactttcctcagatctgccctgacctttggtcacggatccc

SEQ ID NO: 29641 - DNA, 900 bp, Homo sapiens
gtgattgttgttttgcgggacccttgtgtttatgcttttattgtggacctttttaaacatatacaagagcagcgagagacatgtcacagccccacacccccggcacctggctgcaatgggtgctggcccctgggcagcctggcttcatctgtctctgcccccatgcttattcttgctgtgcttttacaagcggattctagataccaggtcatttcgcctgtaaggacttcagcaagagccacagccaggccttgagaggcccggcagactggccctgggcggcgccggcggtgcgtgtgctgttagtgattcaccagcacgagtgagttgctcacctgtgtgattcaaactggagttggttcgaggttgtccacccacatatccctttggccatgttctgttaggccttcgtggtggggagaggaaggggcagctgtcatggctgagccacagtggggatgtcgtctgtgcctgggtggcaggggaagaactgggaggccttggaaaggtggaaggctctagtgcagggtgattgcccacggacgtgctgctatgcaaatgagtgcatgtgctggtgggggcaggcacagagggatgctgcaggaaggaggcaccgaccacccagaggggtgagtgtgagtggcattatgaggagaaaggtagctagggaccacagggctgagtcaggccctcaggacagccagtgcagacgcacagcagacccaggacaaaatcggcacccaactgggtcaccygtgaatccccacctggggtcatgttggtcaggacacttttcagcttcaggaggacagaacgcaactccaaacagacttagcagaaaggagactctattggctcacataaccaggctgtgcagggggacttcaggcatagctggat

SEQ ID NO: 29642 - DNA, 900 bp, Homo sapiens
gtgattgttgttttgcgggacccttgtgtttatgcttttattgtggacctttttaaacatatacaagagcagcgagagacatgtcacagccccacacccccggcacctggctgcaatgggtgctggcccctgggcagcctggcttcatctgtctctgcccccatgcttattcttgctgtgcttttacaagcggattctagataccaggtcatttcgcctgtaaggacttcagcaagagccacagccaggccttgagaggcccggcagactggccctgggcggcgccggcggtgcgtgtgctgttagtgattcaccagcacgagtgagttgctcacctgtgtgattcaaactggagttggttcgaggttgtccacccacatatccctttggccatgttctgttaggccttcgtggtggggagaggaaggggcagctgtcatggctgagccacagtggggatgtcgtctgtgcctgggtggcaggggaagaactgggaggccttggaaaggtggaaggctctagtgcagggtgattgcccacggacgtgctgctatgcaaatgagtgcatgtgctggtgggggcaggcacagagggatgctgcaggaaggaggcaccgaccacccagaggggtgagtgtgagtggcattatgaggagaaaggtagctagggaccacagggctgagtcaggccctcaggacagccagtgcagacgcacagcagacccaggacaaaatcggcacccaactgggtcacccgtgaatccccacctggggtcatgttggtcaggacacttytcagcttcaggaggacagaacgcaactccaaacagacttagcagaaaggagactctattggctcacataaccaggctgtgcagggggacttcaggcatagctggat

SEQ ID NO: 29643 - DNA, 523 bp, Homo sapiens
gtgaaatctccccatttaaaaactttggcaagaattcatgtaaaacaagtaactactatgtgggccgaagccgtcggcatggtttatggtgtgtgagcgttctctctgggctgcacattttccaagctgtccccgccctgacgaggtcccccgttcacccactcgctctttcgggtatattgaccgagtgtggggacatcgctgtgggtgagacagactgccctccctgtcccccatgctgcatgctgctatcccagggcccagtctggggcaactctaggacagaacaaaggtccctggctctatggctgggtctgggctgctgtgcccaggaaaggtcaagggtttctggaaccgccattggagcaggaaaagccttcactggcaaagacctcatgarctccgatgcagcagggcttcagagaggttaagcgaggtgcctgcagtcacacagcagggctcagagaggttaagcgaggtgcctgcggtcacacagtagggctcagagaggttaagcgaggtg

SEQ ID NO: 29644 - DNA, 523 bp, Homo sapiens
acgcccagctaattttttgtattttttttagagacggggtttcaccatgctgcccaggcaggtctcaaactcctgagatcaagcagtccacccagcttggcctcccaaagtgctgggattataggtgtgagtgagctactacgcctggcctggacatgtaatttttaaaagaaaatgtggccacaactctcctagagttaaatgttttttttktttgtttgtttgtttgttttttgagaccatcaacaagatttcaaggctttaaagaaaggagctgcttcaggaagagataaaatgactcgaacgctataaccttcaaatgcagactgggagaagaggtatcagctatgcatgagctggagaggggtgggatagatagagacacaggtgataaagaaaatacagcaaaatgtgaaccctacaatctgggtggtggatgtaaaccctgtagtagcctcacctggggaaagctgccttgcaacaatgaggctgcccattctccaaacccaccccagccaccgag

SEQ ID NO: 29645 - DNA, 523 bp, Homo sapiens
acgcccagctaattttttgtattttttttagagacggggtttcaccatgctgcccaggcaggtctcaaactcctgagatcaagcagtccacccagcttggcctcccaaagtgctgggattataggtgtgagtgagctactacgcctggcctggacatgtaatttttaaaagaaaatgtggccacaactctcctagagttaaatgttttttttgtttgtttgtttgtttgttttttgagaccatcaacaagatttcaaggctttaaagaaaggagctgcttcaggaagagataaaatgactcgaacgctataaccttcaaatgcagactgggagaagagrtatcagctatgcatgagctggagaggggtgggatagatagagacacaggtgataaagaaaatacagcaaaatgtgaaccctacaatctgggtggtggatgtaaaccctgtagtagcctcacctggggaaagctgccttgcaacaatgaggctgcccattctccaaacccaccccagccaccgag

SEQ ID NO: 29646 - DNA, 582 bp, Homo sapiens
gattctgcaggtcagccacttgggttgggctcagcagggaggttttctggtcttggctgggcccactcatacacctgcaatcaactagggggccggctgggagctggctgtgcaaaaaggcctctaatggttcatctctgttccatgaggccttccaaactcctatactgagtttgttcatgyggtgactgagcatggttctatgagaatgagtggaaatggcaaggtctcttaaggcctaggttcaaaatcggctcagtatcacttctgtggcattctggtggccaaaccagttacagagccagccagattcaaggagcaaggaaagagacacctctctttgctgcaaaaagctgcagagtcacatttaaaggagtggcctggtgcaagaaatgaatggttgtggtcaccatgcagtcacaaggcccttgatgttccagtctttttttggctactcccctccacccatcaacaatctcccctcatttcaggtacctcccctctccatccccctctcaactaagaaagccttcctaggccgggcacggtggctcacacctataatcccagcactttgggagg

SEQ ID NO: 29647 - DNA, 582 bp, Homo sapiens
gattctgcaggtcagccacttgggttgggctcagcagggaggttttctggtcttggctgggcccactcatacacctgcaatcaactagggggccggctgggagctggctgtgcaaaaaggcctctaatggttcatctctgttccatgaggccttccaaactcctatactgagtttgttcatgtggtgactgagcatggttctatgagaatgagtggaaatggcaaggtctcttaaggcctaggttcaaaatcggctcagtatcacttctgtggcattctggtggccaaaccagttacagagccagccagattcaaggagcaaggaaagagacacctctctttgctgcaaaaagctgcagagtcacatttaaaggagtggcctrgtgcaagaaatgaatggttgtggtcaccatgcagtcacaaggcccttgatgttccagtctttttttggctactcccctccacccatcaacaatctcccctcatttcaggtacctcccctctccatccccctctcaactaagaaagccttcctaggccgggcacggtggctcacacctataatcccagcactttgggagg

SEQ ID NO: 29648 - DNA, 582 bp, Homo sapiens
gattctgcaggtcagccacttgggttgggctcagcagggaggttttctggtcttggctgggcccactcatacacctgcaatcaactagggggccggctgggagctggctgtgcaaaaaggcctctaatggttcatctctgttccatgaggccttccaaactcctatactgagtttgttcatgtggtgactgagcatggttctatgagaatgagtggaaatggcaaggtctcttaaggcctaggttcaaaatcggctcagtatcacttctgtggcattctggtggccaaaccagttacagagccagccagattcaaggagcaaggaaagagacacctctctttgctgcaaaaagctgcagagtcacatttaaaggagtggcctgstgcaagaaatgaatggttgtggtcaccatgcagtcacaaggcccttgatgttccagtctttttttggctactcccctccacccatcaacaatctcccctcatttcaggtacctcccctctccatccccctctcaactaagaaagccttcctaggccgggcacggtggctcacacctataatcccagcactttgggagg

SEQ ID NO: 29649 - DNA, 1035 bp, Homo sapiens
gatcctctttcctcagcctcccaaagtgttgggattataggcgtaagctaccgcatccggcctaacagtacaactctataacgacaaaatgacacaaagaaaatttaatgaaattagtgaaaacctagagtaggatgtggtgcagatactcattattttgtagtggagaatgggagattagggcccggttggttttgttccttttctttgaaattttacctttagaaccagtaaaaaaaaaaagttttcttttaaataaagttatacatttttctttacacttagaaaaaggatgatgaattggagacttccgaggagttatttcttccacctggtttgtggtttttttggggaggaaggggcttgggggaagtggtgctgaagctttcactcaaacaccaggccacggctctgtgtgcctcattcatctttgtgtccccagcaggacctagaatagtgcctcactgcacgtagtagcagctcaataaatatttgctgagctgaaagagtctcgtgttcctgctcttcattcgccaaaacttctgggtgggtcatgttgctggtttacgttccctggcgccttgactcctgagatgcgataatttgaggaccacagagaagagggggcgccctttatcacagccgccttgtgcttgcaaggtgaaccaccaagagtgtgctggggtcccactgcctgcacagtctctgtggcttcatctgtttttttcttcatgattgatatttctgtgttgaatgcttttcaccgactgttcttttcaaatccttgcagcttttaaggttagtattggaatcagagaagaattgacacataaataagtcttgtttgggaaaagaaggtgtaaagtccgtgtacttcaactctgccasaaaagaatgttacttaccctctaagaataggtaatatctcatttatactaggtgttcaaattcccaagtgattattgaatcttaggattgagtgtctccttgaggacattaggatcactggaatgctgctccttcgacatgggcact

SEQ ID NO: 29650 - DNA, 2666 bp, Homo sapiens
tgaggggttgtttaccatcagcgatcaccattgactgagttggttccattgcaactgcgtgttagaacccgccataaggcgcgccctccctgggtgacgggctgtacttctttcacaaaaggacacagcggctgactccgggacagctgaattcaactcggacagagaccgacttggccttccactcttaagtaatttggcaaaataaatgaatattgccccaaccccttggcatggagacagccacacttaattactggacagggagaggctccctaagagatgcaggactcgggccttatgaatgtgaatgaggccattcttgcactgctataacgaaatacccgagactgggtaatttataaagaataaaaccaaaggttcaattggatctacaggctgggcaggaagcatgatgctggcatccgcttgacttctggggatgcctcaggaaacttatgaacacagcagaaggttaagagggagcagccacgtcctacgtggcaggagctggagcaagagagagaatgaggggaggtgccacacgcttttaaacaaccagatctcatgagaactcgctatctcgaggacagtgccaagggggatggcactaaaccattcatgagaaattcgcccccgtgatacaatcacctcccacctccaacactggagattacaattcgacaggagattgggtggggacgcagaaccaaaccgtatcagaacccaaggtaggtgagggtggaacggaaccaacctccaccgtctttggatttggtgctcagctcccgctggccccatgaagggccaaagctaacagctgtgcactgaggacatccatgcctctatgggaggaaagactgggcaaatcctcctggatccagggatggcctggcgggccacagtgagccttctgctcaagagccactagtgtctgtccctgcctacccgtgacacctgccatctctggctggggcccaaggcgctctgcaatctggagctgcttgtagctgcccacgcagtttggcagggagctaagacagaggggacatggccaccgtgcaaagcaacctcacagaagcactcggtgttggtgtcttcaagaaagaacttctgccctaatcaggccgcttttccctccctctccctctcacacacacactgcacctttgctgaggctttcttaatttccaccacactccccacctccctctgggctgtggccaacccaaaacctgcccctcaatgtggagaaatcggaagattgttattgtgttctactgttttctacaggtcatttgtggtcttctgaaatcctcccttatctggttgatacatgtttaacaatatttgattagtaktattatcatcattagtagaatttggagacacagtctcgttctgtcacccaagctaaggtgcagtggcacaaccttggctcgctgcagccttgaactccagggctcaggcaactctcccacctcagcctcccaaagtgctgggattacaggggtgagccaccacatccagcttcagaaagtcttttaacagagccagaatcattcttgcaataaaagctttgttttttgagaaaaaaaggggggagagggtgagagtgagagaaagagagagagagagagagatctgctttgagacactaaattctttatcaagcccagatccaatcgtgcagcatgaggctctgcacatgggtgactacctggatacagacacttgatatcatgcattaaagactcttgactcttagaaacccctttccatgtctccatcgatacctttctgacactccccgtggaaaggataggctcgcgtgctgacggtcgaagcctttgtctcaacctggaaggcggggtgggtgcagagggcttccctcctccctctgcaaggtgcacatggaaagatgggtgagggagttaggggatgggctccagaggcccacaggatcctgcatatcaggcgcttctgctcactctcacctaatcattcaccctttactttattcctgacttcctcatttctgtttgtaatcccagacgtttctgtttaaggcctttaaaacacatcttctcatttccttatggttctggtttccttatggttactccacagggtaagcaccacccccgccacccttccctgcccactgaatgtggctaaaaggctagacaggcacacaaaggagctactgaggcctctgagaattgaccagtagcaggtagaagggggttgaagaccagaatttgaagtgccaccaaggttgcggtgagtttgccatgtccctgaccctggtatccccagcctggactaaatacaactcgatatccagaggcgagcaagagtgtgcccgggggctccaggagaagcatctagtaacaggaaaggggtcacctggttctgagacagtgggccagatccctgggttttttcctttctccctgtctctctggtgccctggtccccaggaaattccacagcggcagtggtggcaacagtgacagtgccagcagaggggtcagcctgcaggtgtctgaagctctgaggaaaccttcctttccagctggaggaacggtggtccaaagagggtgaaaaacccgctggctttttttctccgtgtcctcttcttgcttggccacaaaagtaagctc

SEQ ID NO: 29651 - DNA, 556 bp, Homo sapiens
cactctagcctgggcaacagagcaggaccctgtctaggaaaaattttaaaaaagaacaaaaataaaaggtttaagttttatttagcaaatatccaggtaccatgctagagggaagaggaaatgcaacgaatgagcaggggcattgacgtgtgagagaggacgaagctggaagaaccggcagggacagaactggctaaatggtgcctgtgtgggcacctcgtaccccagggccttgctagcgtctggtacatgggtgctcagtaaacaactgttgggtgacttttgtctgaacttaactttttaattaaaaaaaaatttttagccrggtgtggtggctcacgcctgtaatcccaacactttgggaggccgaggtgggcagatcacttgatgtcaggggtttgagacgagcctggccaacatggtgaaaccccgtctctactaaaaatacaaaaattagccgggtgtgatggcgggcgcctgtaatcccaggtactctggaggctggggcaggagaaccgcttgaacccgggaggcggaggctgcagtgcgccaagat

SEQ ID NO: 29652 - DNA, 1249 bp, Homo sapiens
tgtggataatgagacacaaatagataastattgtgctttgcttagccaaggccatatacctggtaagtggagagatgggttcgcatataactagaggtcaagttcttaaactgaatgctaattttgcccccttcagatatagcatgcactctccaatttgccatagcccccaaccagcacactgtattctttcatgttatctgcttgacccttgttgaatttaggtttgtaatttcaagctgaaataatagaagacacaaggaaactgtgagagatgaaagacagactagattaggacaggagagagagagagagagagcaaaaaagagaggaaaggtcaaccagttgttttagaggaaatgtagctcaaagctctaaaatatctatgtgtaaatgtgtatctgttgctaccattagtagtattttcagagtttggaaaagacactacaccttcatatccacatgcccacagacttatacacagaactatttctttcccagtgaagctttacttactgtagaagacaaccactgcattcttactggacagagggttttgcatttctcaactagatcacaaattctttctaaattgatgcatgacatcctaaaggctgcttaaattcctttaaattttattacttgattgaaactttctcatgagacattttagctttcattgccctctgcctatgagatcattgttatcttatatctgatagcttgcaaaggagtctaaatctttagtaggttttataagtgaaatatcttacttgacactcattatgatgtaaaactatttacaaatatcatcaaaccacaaataaactactctcaattaatatatagtttctaggaggaggttttataattatgtaattatatatatatgtaatatatatattacatatatacataatttgggagccaattctgtagaatttaagtcatattggtttattgtgaatgaaatgcagagcagtttgttatttttctaatcaatctcagtatgatagatttctactaagcctttgctgtactgtgtggttgcctggagccttgcgtgtgtcatcatcacaacttttttctctttttcatcttgacttaagatagttgtagggtatctgtgaggacaaatatataagatggcttttgttgttcaagtgttctccattctctggtatatgctactagagtagaaagaaaactaattacattcatctaggactgtgctttataatcatatatt

SEQ ID NO: 29653 - DNA, 1063 bp, Homo sapiens
cagggcttggactgagcaactcggtgaatgagggtattacgtaccaaggtggggaggagccattgtgggggcaacagcaagagagttctgtttggaacatgtgaagtttgcagtggccattagacactcaagtgaacctgtgtgaattttacatgtcaacctggctgggttacggtgcccagatatttggtcaaacaccaatctggatgtggctgtgaaggtaattgtttaaagatgagataaacatttaagtcaatagattttgagtaaattagatgatcctctgtaaaacgaatgggccttatccgatcagattagttgaaggccttaagagaaaatgaccgaggtctcccatggaagaaggaattctgccagcagtctccctccagactccagcaacatcacctctttcctgagtctgcaggctgccagcctgcccttcaaatttcagatgtgccaacccctataatcacatggaccaattacctagaataaacctctacacacacacacacacacacacacacacggacgcacacacacgtacatgcacacacactattagttctgtttctctggagaaccctgattagtacaacattctaaaacctagagaccagaggctagagttagaaaatgtaggcgtcatcaccgtatagactagagataatctaaaaatttccagcagccctgttttaaaaaagtagaaagaatcgaaagacatcaattttaacatattctacttagccgaaaatgttatcacttcagcatgtaattaatacaaaaacattactattttacattatcttcccatattaagttgtcaccattgggtgtgttttcacagtgacagcacatctcagttggaccagcctcatttcaagtgctcagtagccacgtgtggctggcagctgccatactgtatagctcagaaatagacrgtgttgaacctctggggctgggcaggagcacttctaacgcatgtgcaggtagaggagagcagggaacacagccaagactgagcctagggctttcaaatgtttagaggttaagaagagaagga

SEQ ID NO: 29654 - DNA, 623 bp, Homo sapiens
atataaatgtaaaacacctgcaatttttaaaatgtaagttatacctcaataaagtggctttttacgaggtcaaaaaatatttttaaaaattaaagaagctaaatcagcaggagattaatttcttcaaggtttatctttttctttttctttattttttatcattgaacttgaaatctttttcgaataagttgctagagaatatgcttcccaaaactatgttttgaaacaaattcacttataaaaataacacgttggaattgggtataattctgtttaactccatataccattttatgacccatagcacagaatttagaataaagtagtttttattctcagaagctgattaaataaggatgatgtcttcatgcacatttctcagtgatatatttaaatcctaaatctttasttatatattaatacaaaatttatacattccaagtaagtatatagccttttctgaaacaaaaggtagtgggaataaagctgtgggcctccaatcactagcatcagtaccattcaaagtaaggtgggatatagcaggttacagagggccaatattcccactgcaataaccaaaattgcaaaaattttattttaaggtatcagagttctctggaggc

SEQ ID NO: 29655 - DNA, 1571 bp, Homo sapiens
catcagatggaacacataggttcctaacaaggcccacagtttmagttttgtggtggcgcctcttgaacctctcttactctagatcaggcgccgcccctgacccccactgctcctcccaccacttgtgatttgttgcagaaaccagatcagctgtcctgcaaatgtgtcgcctatcacgcagctgtttgcctctctgtggtgtcgcctcgccccatgtctcctgcaaatggaagctgtgctgcagaaatgcccttagattcaggctcatctttctttgccagaagccttcgtgggcagagctgtgagagccacatggaagcacctgtgatgctaagtgtgccccgtgggtccaggtggccagagcccgaacccaccctgtgatgcaaagtgtgcccagtgggtccaggtggccatagccctgacctaccctgtaatgctaagtgtgccccgtgggtccaagtggccacagcccgaacccaccctgtgatgctaagtgtggccagtaggtccaggtggtcatagcctgaacccaccctgtgatgcccttgttttgtcattactgatctcatccatgacccttgcgagaaataattatgtcatgagaggtggcaaaattgtggtttctctcatgatctcatctcttcacaatgagtagctgaaattcttctatcaaaaacaacaacaacaaaaatggctgggcacagtggctcacacttgtaatcccagagcttttgtgggccaaggtgagagaggccaggagcttgaatccagcctgggcaacaagaccccatctctacaaaaacataaaacattagccaggtatggtggtgcgtgcctgtagtcttagctactcaggggctaaggcagaaggatcctttgagcccaagaagttaaggctgcagcgggctgtgattacaccactgcacttcagcctgggtgatgcagcgagaccctgtctcttaaataaaacaaacaggctgggtgtggtggcttacacctgtaatcccaccactttgagaggccgaggtgggtggatcacctgaggtcaggagtttgagaccagcctggccaacatggtgaaaccccatctctactaaaaatacaaaaaattagcagggcctggttgtgggcgcctgtaatctcagctactcaggagtctgaggcaggagaatcacttgaacccacgaggcagaggctgcagtgagccgaggttgtgccattgcactccagcctgggcaacagagcaagactccgtctcaaaaaaaaagaaaccaaccaaacaaaacccaaaaaaacttgctgttgtccactagagttattgagttaccctgaaatatagtttaaaagggaaattcttaattcttttcttttaattgacaatgttccgaatagagagttggagccttgtttttccagtggactaccgatgggttttggtttggtttctctctttaaatctatttatagcttttgtgtattcattgtgtattcagcaattacacacaatgaatacacaaaaaattacacaaccaatacacaaaaggtataggcagatttaaaaagcaagatac

SEQ ID NO: 29656 - DNA, 1571 bp, Homo sapiens
catcagatggaacacataggttcctaacaaggcccacagtttcagttttgtggtggcgcctcttgaacctctcttactctagatcaggcgccgccccygacccccactgctcctcccaccacttgtgatttgttgcagaaaccagatcagctgtcctgcaaatgtgtcgcctatcacgcagctgtttgcctctctgtggtgtcgcctcgccccatgtctcctgcaaatggaagctgtgctgcagaaatgcccttagattcaggctcatctttctttgccagaagccttcgtgggcagagctgtgagagccacatggaagcacctgtgatgctaagtgtgccccgtgggtccaggtggccagagcccgaacccaccctgtgatgcaaagtgtgcccagtgggtccaggtggccatagccctgacctaccctgtaatgctaagtgtgccccgtgggtccaagtggccacagcccgaacccaccctgtgatgctaagtgtggccagtaggtccaggtggtcatagcctgaacccaccctgtgatgcccttgttttgtcattactgatctcatccatgacccttgcgagaaataattatgtcatgagaggtggcaaaattgtggtttctctcatgatctcatctcttcacaatgagtagctgaaattcttctatcaaaaacaacaacaacaaaaatggctgggcacagtggctcacacttgtaatcccagagcttttgtgggccaaggtgagagaggccaggagcttgaatccagcctgggcaacaagaccccatctctacaaaaacataaaacattagccaggtatggtggtgcgtgcctgtagtcttagctactcaggggctaaggcagaaggatcctttgagcccaagaagttaaggctgcagcgggctgtgattacaccactgcacttcagcctgggtgatgcagcgagaccctgtctcttaaataaaacaaacaggctgggtgtggtggcttacacctgtaatcccaccactttgagaggccgaggtgggtggatcacctgaggtcaggagtttgagaccagcctggccaacatggtgaaaccccatctctactaaaaatacaaaaaattagcagggcctggttgtgggcgcctgtaatctcagctactcaggagtctgaggcaggagaatcacttgaacccacgaggcagaggctgcagtgagccgaggttgtgccattgcactccagcctgggcaacagagcaagactccgtctcaaaaaaaaagaaaccaaccaaacaaaacccaaaaaaacttgctgttgtccactagagttattgagttaccctgaaatatagtttaaaagggaaattcttaattcttttcttttaattgacaatgttccgaatagagagttggagccttgtttttccagtggactaccgatgggttttggtttggtttctctctttaaatctatttatagcttttgtgtattcattgtgtattcagcaattacacacaatgaatacacaaaaaattacacaaccaatacacaaaaggtataggcagatttaaaaagcaagatac

SEQ ID NO: 29657 - DNA, 2273 bp, Homo sapiens
  misc_feature (1)...(2273): n = A,T,C or G
cttgctgttccccaaacttcctttgatgttctcaaattgctttgttcamactgaactctacccttggccagcttactatgactgttcattgcgtgcttaccaagtgccaagtccgggtttcaggttatgtaactagaggttatataaactcagaagtttgttctggtgagataacacatcctcattacacctaataccctttatgaaccgttagaatgttctttggttaatcattttccccttggaattgagtgacctttactagtgtattgccccacaatttatcaaagcaaagaatccagtgtcaaaaagagaataaggaggaggtgaagagaactcagatctcaaaaaaagtccccccaaaattcatcgtcattatatagcagttctagcggaaataatcactgcatcccatgtttatccccagtgctatacacacggcctgcaagtcttaatggtttcgatacagtaaatagtgctgtatttccttttgtctgagaggatctccctggttgttttagcagtcaagaaaagtgaataacatgcacatttgaccctccatatacttgggcttcacatctgcagattcagccaacagcagattgaaaatatttggggggaacaacaatgaaaaaaaaacagtacaaataatacaaataaaaaaccaatactgtaaaacaactatttacatagcatttacatttattaggtaaaagtaatcaagagatgactagaggtttaaaggaggatatgggtaggttatatacaaatactgtgtcattttataaaaggagcttgagcatctagattttggtatggggaaggagggttgtcctaaactaatcccttcagaataccagggactactctgctagactagcgattctcaaagtatgagccaggaaatcctagggatccccagtaatttttcaggagaattttacaaagtcaaaactatttccgtaataatgttacttgattttctcattgtcattctcccacaagtgtacagtggagttttccagaagctacatgggggatgtgtaatatcacaatagatagaatgcagaagctgacatgagaatccacctctctatagagccaagtactaaagagagagatgcaaaaactgtaaaacgatgccannnnnnnnnnnnnnnnnnnnnnnnnnnnnnnnnnnnnnnnnnnnnnnnnnnnnnnnnnnnnnnnnnnnnnnnnnnnnnnnnnnnnnnnnnnnnnnnnnnngcaaaacctatttaagagccaaaatataactggaggagaggttgttatgtaaggggattttttaaaagacatccttcacagaattgggcagattcagtagagggtcttttaaaagatagaaaaattgcctaggtgtggtggctcgcgcctgtaattccagcactttggcaggctgaggtgagtgaatcacttgagatcaggcatttgagatcagcctggccaatatgatgaaactccatctccataaaaaatacaaaaaaaaagaaaattagctggatgtggtgccatgcgcctgtagttccagctacttgggaggctgaggcaggagaatcagttgaacctgggaggtggaggttgcaatgagccaagatcccaccactgcactccagactgggtgacagagcaagactccatctcaaaagatagaaaaatttaaaagatagaattttagttttatccatggaatatttataaacattcaccatattgttgtcactaactacatatgaatattgagcacttgaaatgtggctattccaaattgagatatactgtaagtgtcaaatatatgctagattttgaagacttaacaacaaaaaaagctacgttaaacagttcacatgttgaaaggataatatttgggatacatctggttaaataaaatgcattattcacattaattttagtggtttctttttgctggtgtttaacatgcccactagaaaagtttaaattatgtatgtggtttacatgatatttctattggacacttcggtattagaccatgaagttaacctagtaagaattttttttaagtagtgtcttcacaagaaacattctcctattacaatccaacactccctctctggaaactgaactctgtgtttcattctctgatcacagacatccattgcacctacattggcccaattccactgaactgagtcaacttctttgaaacctctacttcctctgagtgcttaggtctcctgtggtcacctctctatcttttgcaagatgggaccact

SEQ ID NO: 29658 - DNA, 580 bp, Homo sapiens
tattgaaagctttaattttaaaaagtaataaatattccttaattttaaaatgtactgaattctctatatgaattggaaagrcactagcaattatttccctctacagattactttggaagtgctgtgtgtgtgccatgtattccagcagcccctcttatctgtttcgtaaggagggcatgctgcaactctggtctgccacgtttggatgtgcaaattacgtattacccccctccccagggattccatttatacagacttcataaattagtgtatttagttgccataatattggtcaaattaacaaaaaagtatttggagtgatattatactacaacaatttttttcacagaaaaagagaagactcctttttagacttcgtcaaaattcaaaagtagatgatgatgtgacttcataatctgggagtggtatcagaaaacaaatatgctggtatctaaagagttacagtaaaaataaatggcttagacaactcttctgaaaccaatgatgtttcaactaattgtttaccatagatctgtttgtttagctttgcctactgtttttccttcaggcttctctctct

SEQ ID NO: 29659 - DNA, 627 bp, Homo sapiens
ttactttgtagaaatcttctgtttaattgactgttcaatataacatgtttatcaatttttaaagttaattataaaaatagtgggtttttttgtccctgatagtgtgatgtcataaatttctctcttgtcctcccaagttataattctgaagtattttaccagcaatctcaatgccactctggtttttttaaaaaaactgtactggaagaggaagcaaattttgaatctaataagtcaagcctgttgtgcaatctggatatttttttttttctaatggttcattcttcaatgttcctatagcaacttgtggacagaaaatctgtgcccagctcccatgttctctccactcccatgttgattcaatctttaagtgtgctttctctatcaaactcctcactgaacactcagttcttataaagaccaaaagtattttctgaaccataaatcatatgttgaagaccttgacacttactccagtttcttctggattcttcttcctacacaataaaatcttgttaatattctaaattaattttctctggttcttgcaatattatgraatacataatggatcacagtgttactgctcaccaggctatgcttcccttagcctataacacactgtta

SEQ ID NO: 29660 - DNA, 584 bp, Homo sapiens
atggtacagaaatgatctctgcagtttgcatttcctgagcgggttgtggttcacttactccctttattgaccaaaagagcaggtgattcatgtaaaatcatatgttaggctgcaataactggggcttttgaaaggaccacccgttaagtgcaaataaataacaatgtgaacacacagcagactctaaaaagcatattagactattgacgagaatgaataatgcatgtttcctgatagtgtttgctacatgtggcaggatgtattaaaaaagaagaaaaaaccttctgcattagtgtctatacagtcaacctttacattcaaggagaagcttaactattatctgccacctttatagaagcattatcaagtcagggttttatggttaaatcttgtagaatcaattgggagattcacctttaaaaattggtctctacaatatgcacatagtaacaaaagaaaaaaaaatcttgacaatatcattgtagtgatttctgcattctggtctttaattatgtgctgagtcccggtggcagagagtttgtgatcatggatggcrcctggaacttgaccgcatttcatttaat

SEQ ID NO: 29661 - DNA, 838 bp, Homo sapiens
gaacaagtcaattccatgcatgtttacttagccataaagttttatcacattggtctgattttcccactgacattcgttgtaatattgaaaaagtaattctttcctgaaaaagtcttgcccttagagattcaataaatacaagcaacaatgcaggagcaattcaaaataacctctttaaagtaaggtcattactatttttgaaaggaatggttataatagacaaaaatattagraacaattttgtgctataattgaaagaagtcataaaattaggtcagattccctagcaacagagcctgagtttgggattcatatgcaagtgatttattaaggttgtgcccgcaggagaaacgtgtaggaagtgagagatgaagatagagaagaggaagaagctaagctagaatatgtttttcggtgtaccctggtatctgcctgatctcccagggagctctagagtgtataacttccataacagcatttgtccctcctaggggcaagggagctcagttcctctacctccataccagtcagttattgtctacgtaccatctgatcaggagatgaatgtcaactcccaggcacctctgggagaggcacccttcagtctcccaaaggcagtgccctgggaaagaatccaagtgtgagtccttaacagtaatacagtcaataagcagttggcttatgaatgcacctgataagtaaaagagaccaagcccagggcatctgggagaggcacaaaagaaaagaaagaccactaaggaaagtccaaagaataactgcacaagtttgagagaaagagaatgtggctcagcagctaagtcatataaaaacgtctaag

SEQ ID NO: 29662 - DNA, 547 bp, Homo sapiens
attcagccctgtggggaagacagaaaaaaatggaattcaccgaccttgccctcaaaaaatgagaagaccactgaggcataacaacaccatgtagcgtataattaagtgctggatttcaaagtcaaaaaaaattggaaaagtcagaggtaaatgtagactttcattctcagggaagacttcatgaaaggtgatagggatcaggggattaaacctgggtcttaaaggaggttaggattagaacttggagataaatctggatttgggtgtgggctctgctcttcactaactgggtgacctcggccatatgcctgctctgagtctcagtttcctaatctaccaaatagatcatcacaccccctcagaggactgtagttcctctgctccagtgcccaataaagcgtcagtatgacaacacagttccttagcaacaattctgatasccctaatgctctgagatccaaaactgactttcacaactcattttgcagccacatctgacctgacatgaacacattaggtggtagagcctggcttgcattgatgggaa

SEQ ID NO: 29663 - DNA, 593 bp, Homo sapiens
atggttttgtattacattaatactttagatcatctataatatgagtcaggtttggttaaaaaatatataaaaataaaaatctcagttctatttaaaatactaatgaaaatatcytaccaaagtaagacattagcaatgcattatctgtcacttgatattttgtgtgtttgctcatttcaacaagggaaagagaattagaaaattggaagaaaaatatttaagtaattcttgtaaaattaatatacatattaaatatcatgaagggtagaaacagagttaacatttaaaatgtttataactaatgtgtaaatttaattgaaagccaactgattgctctgaaattttatgaggaataatcacaattgtacagaaaataactgacaccgaaagtatctaccttttcacatttaaatgcaagtgactttttgttcattcattcaaaaattatggattattatactttagcttaaatgtttgtctcccctctaaaagccattttgaaacttaatcctcaatgcaatagtattaagaagtcaggcctttaggagtaattaggccatgacgactctgtactcatagatgggattagtgca

SEQ ID NO: 29664 - DNA, 593 bp, Homo sapiens
atggttttgtattacattaatactttagatcatctataatatgagtcaggtttggttaaaaaatatataaaaataaaaatctcagttctatttaaaatactaatgaaaatatcctaccaaagtaagacattagcaatgcattatctgtcacttgatattttgtgtgtttgctcatttcaacaagggaaagagaattagaaaattggaagaaaaatatttaagtaattcttgtaaaattaatatacatattaaatatcatgaagggtagaaacagagttaacatttaaaatgtttataactaatgtgtaaatttaattgaaagccaactgattgctctgaawttttatgaggaataatcacaattgtacagaaaataactgacaccgaaagtatctaccttttcacatttaaatgcaagtgactttttgttcattcattcaaaaattatggattattatactttagcttaaatgtttgtctcccctctaaaagccattttgaaacttaatcctcaatgcaatagtattaagaagtcaggcctttaggagtaattaggccatgacgactctgtactcatagatgggattagtgca

SEQ ID NO: 29665 - DNA, 593 bp, Homo sapiens
atggttttgtattacattaatactttagatcatctataatatgagtcaggtttggttaaaaaatatataaaaataaaaatctcagttctatttaaaatactaatgaaaatatcctaccaaagtaagacattagcaatgcattatctgtcacttgatattttgtgtgtttgctcatttcaacaagggaaagagaattagaaaattggaagaaaaatatttaagtaattcttgtaaaattaatatacatattaaatatcatgaagggtagaaacagagttaacatttaaaatgtttataactaatgtgtaaatttaattgaaagccaactgattgctctgaaattttatgaggaataatcacaattgtacagaaaataactgacaccgaaagtatctaccttttcacatttaaatgcaagtgactttttgttcattcattcaaaaattatggattattatactttagcttaaatgtttgtctcccctctaaaagccattttgaaacttaatcctcaatgcaatagtattaagaagtcaggcctttaggagtaattaggccatgasgactctgtactcatagatgggattagtgca

SEQ ID NO: 29666 - DNA, 1265 bp, Homo sapiens
atctaaaaacaggatatagtaaggtatatccagggataaactagctgttaaaaaataattgattgagacctgttattattggctaagtaaacttctcttaccttccaaaacatgttccattatttcataagatctagaaatgatatcaagtttgaaatttgttgaaatgttttcctattgacctacttataaatgggttatttacatattcagcgtaattacttgtgcttaaaactgttttcaagataaatttgaactatgtcattgttcatataaaagaaagatgcttcttttcaattaatttgtattagttaataattctacaaattgtgtttatttcaatggagattaaagaatataaaaagaataatgtttctgttttagactatactttattagtaaaccatttggggggtggggcaatgaggataaactccatcaaaggaacataagttagaaaagctgtaacataaacttaggttataagtctgaattaccctagacagttagtctatggaatatgagactgtatgcagcctcagctggaagcactgcccttaagcaaagaccatgaaagagatgctgaaataattattcaggcagaaatttagtataatatttctttgggaatgttctccaatagttggaagtcaaaataacaagtaattctcacttccattctttgtcttctcaatatacatccctatatcttgcaaggcatttagcaaattaaagtacatttaccagcctctttgcactttgatgagtcaatgtaactaatttttggacgataacgtgtgaacagaagcaatatttgcagcatctaaaagaaatgtgtgtgaccttttacccctgttaccatgctttagaattcatagctgttttcagctattttgtatataaaataagcatataaaagcgacaaaataaatcaacatcgtagagctatcgtgacatcactggacttcycctaaaacttttacatgaaaaatatgtgaattatttcaagctgctctacttgtttttcatagactctgtcattaattaattttttatgtaccactaaaaagcattttaaaatgcctctaaactatggcacactgctaaatattttctagatgcctcaaaaaagtttttatatgcagtaattttgttttacatacacatgcacacttaactgatttcaagttttttcaactttcatatgaaattgaaagttgaaaaggcacatgaaatgtctttttgaaattcctaactcaatttaa

SEQ ID NO: 29667 - DNA, 2185 bp, Homo sapiens
tgctattgttgacaatattgytgacaaggctaaatggtcaatgtgcttgacatattgcctggtttttcatgttctattgcatgagctgattctctctctctcttttatttatatttttgaactctgccattatgttatcatggacattatgccaacaatttgatgcatctatgtatatgctttaaatctctgggaataaatttactgagtgctacttatgtgaacaaacttctcttaagcacaaatggaaatccacaaagaaagacagcctcttctatttgttttatgtgaggcaacagatacactgtagacaaaaagaccaagtataattaactcatattggtaactaacaatatctgcatattacatatttttctattatgttttctgagcaacttcgtggcttctgatttggaggggtaggatttcatagttaatacttttttttttttttttggtgagatagagtctagctcttgttgtccaggctggagtgcaatggtgaaatctcagctcactgcaacttccgcctcccaggttcagatgattctcctgactcagcctcccgagtaactgggattacagacacccagcatcatgcctggctaatttttgtatttttagtagagatggggtttcaccatatttgccaggctggtcttgaactcctgacctcaggtgatccgcccgcgttggcctcccaaagtgctgggattacaggcgtgagccactgcgcccggcccatatttaacacttctataaatatttgtgcatattgaaaggaacattactccccacactgcaactgaacaaatgagtgataatgttaatttccttattcttgagcttttcttgaataaaagagggtcgtaggacatggaacaaaatagactagaaaatagggttgataaggtactgattctgccaacactgcttaatgctctccccaagcaattgtcttttagatatgttgatttcccagtgtgaatggtattttttaaatatgtcaagcaattaagaatataagtctattctcatctcagctaaacgtagaatctttacaaagaatttgtggtatccttaaccctaatatgtggagagatatgattaaaaatgttcaccaccttattttcatttatttatttatttatttatttatttatttatttatttattattttgagacagagcctcactccacccagactggagtgctgtggtgtgacctcggctcattgcaacctctgcctcccaagttcaagtgattctcctgcctcagcctctcaagtagctagaattataggaattcaccgccatgcccaactaatttttcttttttttttttttttggtgagacagagtctcactctgttgcctaggctagagggcagtggcaccgttttggctcactgcagcctccgccttctgggttcaagcaattctcctgcctcagcctcctgagtagctgggattacaggcacccgctaccacacccggataattttttgtatttttcgccatgttggccaggttagtattgaactcctgacctcaagtgatctgcctgactcggcctcccaaagtgctgggattacagatgtgagctaccacatccagccatcacctcttgtaaagtgcaataaagaaatagtgggcaatagacaggcaggggatagaggaaaatgttttgggagtgggacaatatgaacttattgtcatgacaggaccaaaaagggaagacgtctgcctatcataattaatactaactctatcagtcaacatttatgttttacaattgttctgtaaaagaaaagccagcaaacattacagattctagtccctaataactgatcaagaaagacactctaagcttgtgcatcagcattctctttttatctaaaagaaaatatattaaatacagggaggaatggcaggagtaaagagacttgaaggaaaagaaaatattgactttttaatgatattttacaatgctaagatctttagaaaccaactattccatatgtcctttaaatattagtttggtgcaaaggtaattacagtttttgtcataaaagtaatggcaaaactacaattacttttgcaccaacctaactgatacattcattccattttggaggtattgcaaatatgctgaatcaatgaatttcttcagtatttttcattg

SEQ ID NO: 29668 - DNA, 464 bp, Homo sapiens
attatagaagaagaaactggatctttgaaaatttatctttgcctaatactattaagcaaacaatgacaacctaatagtttgtgggaaaaactttggggttaaaacataataataataaataattttattaatctagatattaattttcaagtgactcgtggaaaaaaaccttaaatatctaaagtaaggtttatcctatttttctgaccccctttctttgctctatgatattttggttcagttatatattctttttatttaaacttaaataattaattttctcaatcttttccaaattagattccatgaaagycttctcatactggaattagcaaatatttgaagactcttcttacatgtttgatttgagcacggcttaagcatagtgtatattttcatgttatcatactttactctttcttatctgaaagtatatgatttttttaaaataacctaaattatgc

SEQ ID NO: 29669 - DNA, 464 bp, Homo sapiens
attatagaagaagaaactggatctttgaaaatttatctttgcctaatactattaagcaaacaatgacaacctaatagtttgtgggaaaaactttggggttaaaacataataataataaataattttattaatctagatattaattttcaagtgactcgtggaaaaaaaccttaaatatctaaagtaaggtttatcctatttttctgaccccctttctttgctctatgatattttggttcagttatatattctttttatttaaacttaaataattaattttctcaatcttttccaaattagattccatgaaagtcttctcatactggaattagcaaatatttgaagactcttcttacawgtttgatttgagcacggcttaagcatagtgtatattttcatgttatcatactttactctttcttatctgaaagtatatgatttttttaaaataacctaaattatgc

SEQ ID NO: 29670 - DNA, 783 bp, Homo sapiens
tcaaaataatgcagtagtagcttaagaagaaaagtactgacgctcggagttcaagtaggaatttatcaacataagacttgaattaatattatgcttttttgaaattagtgcatcattcttttgtgttcagttatgactatttccatatttccaaaagaagtctggaaatcccctgaaagctaacagatgaaatggtgttatggtgtggtgtttgagtagtgtctatcagaacaaayacagattttacacatcaccgctcgtgttacccttactccagttgaattttgccctctacacagtatttttccttcctgtcctctccctcttttcctccagtgttttttcttcctctgctatcccatgtcttcccattcataaaatgtgaacttggttaacagcagaggtgatcctctcatggccatggctatggactgtgatctgctgagcaactacaggaaataatgtttgctggggtgagctcttcccatagacataaaatttacccccatgaccctcttttgtgatactgctgagaaatttttctctctctagaacatatttttcaaatacttgttcaaactaaatatgcttattttctaaattgttttctactaaatgatgtgacaacattttgtacctgttgagggaagtgaggggtgggacactaatggctaattagcaggataataaagtgtgcttgtatcaagagatttacttaatttggggagcattgttaagccattgaaatgatatttgttaagctgtggtcaccgtatttgctga

SEQ ID NO: 29671 - DNA, 783 bp, Homo sapiens
tcaaaataatgcagtagtagcttaagaagaaaagtactgacgctcggagttcaagtaggaatttatcaacataagacttgaattaatattatgcttttttgaaattagtgcatcattcttttgtgttcagttatgactatttccatatttccaaaagaagtctggaaatcccctgaaagctaacagatgaaatggtgttatggtgtggtgtttgagtagtgtctatcagaacaaatacagattttacacatcaccgctcgtgttacccttactccagttgaattttgccctctacacagtatttttccttcctgtcctctccctcttttcctccagtgttttttcttcctctgctatcccatgycttcccattcataaaatgtgaacttggttaacagcagaggtgatcctctcatggccatggctatggactgtgatctgctgagcaactacaggaaataatgtttgctggggtgagctcttcccatagacataaaatttacccccatgaccctcttttgtgatactgctgagaaatttttctctctctagaacatatttttcaaatacttgttcaaactaaatatgcttattttctaaattgttttctactaaatgatgtgacaacattttgtacctgttgagggaagtgaggggtgggacactaatggctaattagcaggataataaagtgtgcttgtatcaagagatttacttaatttggggagcattgttaagccattgaaatgatatttgttaagctgtggtcaccgtatttgctga

SEQ ID NO: 29672 - DNA, 783 bp, Homo sapiens
tcaaaataatgcagtagtagcttaagaagaaaagtactgacgctcggagttcaagtaggaatttatcaacataagacttgaattaatattatgcttttttgaaattagtgcatcattcttttgtgttcagttatgactatttccatatttccaaaagaagtctggaaatcccctgaaagctaacagatgaaatggtgttatggtgtggtgtttgagtagtgtctatcagaacaaatacagattttacacatcaccgctcgtgttacccttactccagttgaattttgccctctacacagtatttttccttcctgtcctctccctcttttcctccagtgttttttcttcctctgctatcccatgtcttcccattcataaaatgtgaacttggttaacagcagaggtgatcctctcatggccatggctatggactgtgatctgctgagcaactayaggaaataatgtttgctggggtgagctcttcccatagacataaaatttacccccatgaccctcttttgtgatactgctgagaaatttttctctctctagaacatatttttcaaatacttgttcaaactaaatatgcttattttctaaattgttttctactaaatgatgtgacaacattttgtacctgttgagggaagtgaggggtgggacactaatggctaattagcaggataataaagtgtgcttgtatcaagagatttacttaatttggggagcattgttaagccattgaaatgatatttgttaagctgtggtcaccgtatttgctga

SEQ ID NO: 29673 - DNA, 530 bp, Homo sapiens
ggatcttccatgaatattctccggcacatgtttcaactgcagtagtcacgatgagccagcaggacccaaggcagctgtgggattcctggtgttctgactcttggaacaggctactcctaggggaaggaagactgcagccaccaaagcagcacccttgggacaaagaaaatggaagtgtgtgctctcctgtgcctcagaggcccytgcctgtgaaaagaaggtgactgtgaccctttcagtggagacacaggtgctgtactgggctctgtggagaagtatggtttgtccccagcagccaggtggcacaggtgcttgcacacagacatagagagggggattcctcctctacacccacccacctctgcgatgcagccatggctgtatccatgtgggaatgacataaatgtgcctatggatgtccattccatggctaatgggggacctgaacccccactggcagtgtgttcactaggcctgggtttgcacaaagggtggagtccctccctatttctccatggagcagcagcatt

SEQ ID NO: 29674 - DNA, 537 bp, Homo sapiens
agtttccacaaatacacattcctatgtaactggcatgaagatacatgccgtttccgtcactcgaagtttctctattgccctttgctgttaatgcccagaccaaggttatcactgatgctatatctgtcactgtaaactaatttcatcttttctagattttcatagaaatgaaatattatggtgtgaacacttttgtgcccatttccttttgaacatcttactgttttagagataaatckatgggttggcatgttgcaataatttactactttttattagagtattagctcattgtatggatataccacaattcatttattcatttactgatgaatggaattttgagttatttgcagtttgttgtgattaacagcttaaaagtaaatcttctctggatattcaactacaaattttgatgtggatgtgtgtttacatatttttatttttagaactttatataaagttactgtttcattgcctattatcttcatatgtttgaaaataattcagtagtacattttataactgttttattta

SEQ ID NO: 29675 - DNA, 537 bp, Homo sapiens
agtttccacaaatacacattcctatgtaactggcatgaagatacatgccgtttccgtcactcgaagtttctctattgccctttgctgttaatgcccagaccaaggttatcactgatgctatatctgtcactgtaaactaatttcatcttttctagattttcatagaaatgaaatattatggtgtgaacacttttgtgcccatttccttttgaacatcttactgttttagagataaatctatgggttggcatgttgcaataatttactactttttattagagtattagctcattgtatggatataccacaattcatttattcatttactgatgaatggaattttgagttatttgcagtttgttgtgattaacagcttaaaagtaaatcttctctggatattcaactacaaattttgatgtggatgtgtgtttacatwtttttatttttagaactttatataaagttactgtttcattgcctattatcttcatatgtttgaaaataattcagtagtacattttataactgttttattta

SEQ ID NO: 29676 - DNA, 761 bp, Homo sapiens
ccagatttcagctggagtcagccccccacacccaggaatcacctacaaactcacgagcctcacgctgctccacccctgtgtcttgcatctcttcacccccaggcctcagggaccctcctgtggctcccagttactctccagccatccccaggttcctgcgggagtcagccccatgcacccaggagtcccccagagactcacaggtctcgggagaatatgagcggtcccccagccctgactcctcaagattcatgcctgcctcacccagcttctccctctcccctcccagaaactcagacccaaggggcagctcctcaccagggatgtggaagtcctctacatcatcccgcagggcttcascactctcacatccatcatcaacagaattccacaactttacgtttccctttcctaaccaagcaggacagtcactcatgtcattgtgttctcccgtgtcctcctctggagattcttcacagtcacctcattcatcaataatgtaccatatgttcttactgccatcatccagcagctcacccccagccacccatgactctcctgtctgtcccagctactctccaactacgcccagatttcagcgggagtctgtaccccacaccccagaaacacctacaaactcacagacctcagtgagatcctcgccagtctctctcacgtcttcacccccagcccttacggaccctccagtctgtcccagctactctccaaccacgcccacatttcagcgcgggtcagttcca

SEQ ID NO: 29677 - DNA, 761 bp, Homo sapiens
ccagatttcagctggagtcagccccccacacccaggaatcacctacaaactcacgagcctcacgctgctccacccctgtgtcttgcatctcttcacccccaggcctcagggaccctcctgtggctcccagttactctccagccatccccaggttcctgcgggagtcagccccatgcacccaggagtcccccagagactcacaggtctcgggagaatatgagcggtcccccagccctgactcctcaagattcatgcctgcctcacccagcttctccctctcccctcccagaaactcagacccaaggggcagctcctcaccagggatgtggaagtcctctacatcatcccgcagggcttcaccactctcacatccrtcatcaacagaattccacaactttacgtttccctttcctaaccaagcaggacagtcactcatgtcattgtgttctcccgtgtcctcctctggagattcttcacagtcacctcattcatcaataatgtaccatatgttcttactgccatcatccagcagctcacccccagccacccatgactctcctgtctgtcccagctactctccaactacgcccagatttcagcgggagtctgtaccccacaccccagaaacacctacaaactcacagacctcagtgagatcctcgccagtctctctcacgtcttcacccccagcccttacggaccctccagtctgtcccagctactctccaaccacgcccacatttcagcgcgggtcagttcca

SEQ ID NO: 29678 - DNA, 761 bp, Homo sapiens
ccagatttcagctggagtcagccccccacacccaggaatcacctacaaactcacgagcctcacgctgctccacccctgtgtcttgcatctcttcacccccaggcctcagggaccctcctgtggctcccagttactctccagccatccccaggttcctgcgggagtcagccccatgcacccaggagtcccccagagactcacaggtctcgggagaatatgagcggtcccccagccctgactcctcaagattcatgcctgcctcacccagcttctccctctcccctcccagaaactcagacccaaggggcagctcctcaccagggatgtggaagtcctctacatcatcccgcagggcttcaccactctcacatccatcatcaacagaattccacaactttacgtttccctttcctaaccaagcaggacagtcactcatgtcattgtgttctcccgtgwcctcctctggagattcttcacagtcacctcattcatcaataatgtaccatatgttcttactgccatcatccagcagctcacccccagccacccatgactctcctgtctgtcccagctactctccaactacgcccagatttcagcgggagtctgtaccccacaccccagaaacacctacaaactcacagacctcagtgagatcctcgccagtctctctcacgtcttcacccccagcccttacggaccctccagtctgtcccagctactctccaaccacgcccacatttcagcgcgggtcagttcca

SEQ ID NO: 29679 - DNA, 761 bp, Homo sapiens
ccagatttcagctggagtcagccccccacacccaggaatcacctacaaactcacgagcctcacgctgctccacccctgtgtcttgcatctcttcacccccaggcctcagggaccctcctgtggctcccagttactctccagccatccccaggttcctgcgggagtcagccccatgcacccaggagtcccccagagactcacaggtctcgggagaatatgagcggtcccccagccctgactcctcaagattcatgcctgcctcacccagcttctccctctcccctcccagaaactcagacccaaggggcagctcctcaccagggatgtggaagtcctctacatcatcccgcagggcttcaccactctcacatccatcatcaacagaattccacaactttacgtttccctttcctaaccaagcaggacagtcactcatgtcattgtgttctcccgtgtcctcctctggagattcttcacagtcacctcattcatcaataatrtaccatatgttcttactgccatcatccagcagctcacccccagccacccatgactctcctgtctgtcccagctactctccaactacgcccagatttcagcgggagtctgtaccccacaccccagaaacacctacaaactcacagacctcagtgagatcctcgccagtctctctcacgtcttcacccccagcccttacggaccctccagtctgtcccagctactctccaaccacgcccacatttcagcgcgggtcagttcca

SEQ ID NO: 29680 - DNA, 1998 bp, Homo sapiens
tccctcttccaactccatggaccctgtcacactgggagaggcttagcgctaggcctggcttgcacgctggggtaagtgatcggagagaaaccggaccaagagccctgacaacggaaagtcagaaacggttatttttctggacccctgttttccgtgacttgttgaagagaaatattacccctgttcctatggctgttctcccagagcaatagaagagcgtgaagttatgaaattgagggcaccttcactgagcaatcgattagcagccgagagagcttgtgaattggctgtctggacatttccagtaataaattgtgaaatagtccatgaataagtagttggcggagttcagaattaccccctaggaaatgttgcaggtctagagacacattactaaggcgagcaccattttaatgctctgggctttggctgttaaatatgtatgccatccgcaaagcacttcccgaaattaatggcattttacagctgytctgaaggcagcgtatttatatggagatgtatagattctggggctgtggtggcttcacaaatgaagtgctaattttagaggatcaggccagggaggggcgtgaagacagggtcaggaagtgagctatctcagggacctttcctgaaatggttttccactatcagccatgagttttaacctttgatgcattgggtgtggcctctaggctgcaaaggtcactgcagtaacccgccaaatagcatacaagaaaaagataaggatgataatgattaataataataataatattggcagctaacagttgccaggcactattctgagtgcttttcgtagactgactcattttatcctcacaacaaccttgtaaggcaggttctattattttccccattttacagaaggaggtaaattttgcctaggattctgtgtgtggttggtggatcctctgggaaagatggtaccttctctctgatcctttccatcagctaaagtcagggccaccaggtgcagtggtgcgacttgtccattgcacaagagcatcaaccaaaagaccctgctcgccaggccccatgccagggtgcaggagcattgcccagagatgaatttgcatgaaggcagtgcatggaccagccaatgtcctccttcctccagcctcagcacttttcccaggccccacatggactcttctccaaccttgttgagctgcctgcttggttggaaggcgagtgagagaggcactgagattaagcatggcgcctagccgagggtccagcttcctacccagttagactcagaatccctggctagtcgggaatcccttggggattcagagactgccccacccccaccagttctttccctgaagcatcccaagggactgttgaaaagctccagtggatcaagcatggggcaggatgggatttagagaagtagcactgctgggagagagggccaaaggctcaagcttgccgccacagcgggagcccagcaggaggctactggtgagcatctgctcctaggacctctgacaaaggtcttcaccgggtcttccactgcccatcccaccctggggctcatgaggtcaagggaatggccccgccagttgagtgaaggatgaggcacctccatagttaagcatgtgccttaatctgggcatgcagacatgagcttcctggtttcctgcattctgtcagctaaccatggtcacacagccactgaaggcttgagacattctgtcacgttggggtgctgaggcaggtctggggacgtttggctgacagaaagaggcctaggagctataggcaggaacagggcagggggcgaaggaaggaggctcaggggagtcagaagaagactagagttgtccaggaacaggctctgggatggcagccctttacctgatttggggatctggaaaagcagattaactccggaaggtctgaccccagggaacagacaggagagccaagccagagagaggtgcagctgactgggaaggattggaactg

SEQ ID NO: 29681 - DNA, 1998 bp, Homo sapiens
tccctcttccaactccatggaccctgtcacactgggagaggcttagcgctaggcctggcttgcacgctggggtaagtgatcggagagaaaccggaccaagagccctgacaacggaaagtcagaaacggttatttttctggacccctgttttccgtgacttgttgaagagaaatattacccctgttcctatggctgttctcccagagcaatagaagagcgtgaagttatgaaattgagggcaccttcactgagcaatcgattagcagccgagagagcttgtgaattggctgtctggacatttccagtaataaattgtgaaatagtccatgaataagtagttggcggagttcagaattaccccctaggaaatgttgcaggtctagagacacattactaaggcgagcaccattttaatgctctgggctttggctgttaaatatgtatgccatccgcaaagcacttcccgaaattaatggcattttacagctgttctgaaggcagcgtatttatatggagatgtatagattctggggctgtggtggcttcacaaatgaagtgctaattttagaggatcaggccagggaggggcgtgaagacagggtcaggaagtgagctatctcagggacctttcctgaaatggttttccactatcagccatgagttttaacctttgatgcattgggtgtggcctctaggctgcaaaggtcactgcagtaacccgccaaatagcatacaagaaaaagataaggatgataatgattaataataataataatattggcagctaacagttgccaggcactattctgagtgcttttcgtagactgactcattttatcctcacaacaaccttgtaaggcaggttctattattttccccattttacagaaggaggtaaattttgcctaggattctgtgtgtggttggtggatcctctgggaaagatggtaccttctctctgatcctttccatcagctaaagtcagggccaccaggtgcagtggtgcracttgtccattgcacaagagcatcaaccaaaagaccctgctcgccaggccccatgccagggtgcaggagcattgcccagagatgaatttgcatgaaggcagtgcatggaccagccaatgtcctccttcctccagcctcagcacttttcccaggccccacatggactcttctccaaccttgttgagctgcctgcttggttggaaggcgagtgagagaggcactgagattaagcatggcgcctagccgagggtccagcttcctacccagttagactcagaatccctggctagtcgggaatcccttggggattcagagactgccccacccccaccagttctttccctgaagcatcccaagggactgttgaaaagctccagtggatcaagcatggggcaggatgggatttagagaagtagcactgctgggagagagggccaaaggctcaagcttgccgccacagcgggagcccagcaggaggctactggtgagcatctgctcctaggacctctgacaaaggtcttcaccgggtcttccactgcccatcccaccctggggctcatgaggtcaagggaatggccccgccagttgagtgaaggatgaggcacctccatagttaagcatgtgccttaatctgggcatgcagacatgagcttcctggtttcctgcattctgtcagctaaccatggtcacacagccactgaaggcttgagacattctgtcacgttggggtgctgaggcaggtctggggacgtttggctgacagaaagaggcctaggagctataggcaggaacagggcagggggcgaaggaaggaggctcaggggagtcagaagaagactagagttgtccaggaacaggctctgggatggcagccctttacctgatttggggatctggaaaagcagattaactccggaaggtctgaccccagggaacagacaggagagccaagccagagagaggtgcagctgactgggaaggattggaactg

SEQ ID NO: 29682 - DNA, 1998 bp, Homo sapiens
tccctcttccaactccatggaccctgtcacactgggagaggcttagcgctaggcctggcttgcacgctggggtaagtgatcggagagaaaccggaccaagagccctgacaacggaaagtcagaaacggttatttttctggacccctgttttccgtgacttgttgaagagaaatattacccctgttcctatggctgttctcccagagcaatagaagagcgtgaagttatgaaattgagggcaccttcactgagcaatcgattagcagccgagagagcttgtgaattggctgtctggacatttccagtaataaattgtgaaatagtccatgaataagtagttggcggagttcagaattaccccctaggaaatgttgcaggtctagagacacattactaaggcgagcaccattttaatgctctgggctttggctgttaaatatgtatgccatccgcaaagcacttcccgaaattaatggcattttacagctgttctgaaggcagcgtatttatatggagatgtatagattctggggctgtggtggcttcacaaatgaagtgctaattttagaggatcaggccagggaggggcgtgaagacagggtcaggaagtgagctatctcagggacctttcctgaaatggttttccactatcagccatgagttttaacctttgatgcattgggtgtggcctctaggctgcaaaggtcactgcagtaacccgccaaatagcatacaagaaaaagataaggatgataatgattaataataataataatattggcagctaacagttgccaggcactattctgagtgcttttcgtagactgactcattttatcctcacaacaaccttgtaaggcaggttctattattttccccattttacagaaggaggtaaattttgcctaggattctgtgtgtggttggtggatcctctgggaaagatggtaccttctctctgatcctttccatcagctaaagtcagggccaccaggtgcagtggtgcgacttgtccattgcacaagagcatcaaccaaaagaccctgctcgccaggccccatgccagggtgcaggagcattgcccagagatgaatttgcatgaaggcagtgcatggaccagccratgtcctccttcctccagcctcagcacttttcccaggccccacatggactcttctccaaccttgttgagctgcctgcttggttggaaggcgagtgagagaggcactgagattaagcatggcgcctagccgagggtccagcttcctacccagttagactcagaatccctggctagtcgggaatcccttggggattcagagactgccccacccccaccagttctttccctgaagcatcccaagggactgttgaaaagctccagtggatcaagcatggggcaggatgggatttagagaagtagcactgctgggagagagggccaaaggctcaagcttgccgccacagcgggagcccagcaggaggctactggtgagcatctgctcctaggacctctgacaaaggtcttcaccgggtcttccactgcccatcccaccctggggctcatgaggtcaagggaatggccccgccagttgagtgaaggatgaggcacctccatagttaagcatgtgccttaatctgggcatgcagacatgagcttcctggtttcctgcattctgtcagctaaccatggtcacacagccactgaaggcttgagacattctgtcacgttggggtgctgaggcaggtctggggacgtttggctgacagaaagaggcctaggagctataggcaggaacagggcagggggcgaaggaaggaggctcaggggagtcagaagaagactagagttgtccaggaacaggctctgggatggcagccctttacctgatttggggatctggaaaagcagattaactccggaaggtctgaccccagggaacagacaggagagccaagccagagagaggtgcagctgactgggaaggattggaactg

SEQ ID NO: 29683 - DNA, 1998 bp, Homo sapiens
tccctcttccaactccatggaccctgtcacactgggagaggcttagcgctaggcctggcttgcacgctggggtaagtgatcggagagaaaccggaccaagagccctgacaacggaaagtcagaaacggttatttttctggacccctgttttccgtgacttgttgaagagaaatattacccctgttcctatggctgttctcccagagcaatagaagagcgtgaagttatgaaattgagggcaccttcactgagcaatcgattagcagccgagagagcttgtgaattggctgtctggacatttccagtaataaattgtgaaatagtccatgaataagtagttggcggagttcagaattaccccctaggaaatgttgcaggtctagagacacattactaaggcgagcaccattttaatgctctgggctttggctgttaaatatgtatgccatccgcaaagcacttcccgaaattaatggcattttacagctgttctgaaggcagcgtatttatatggagatgtatagattctggggctgtggtggcttcacaaatgaagtgctaattttagaggatcaggccagggaggggcgtgaagacagggtcaggaagtgagctatctcagggacctttcctgaaatggttttccactatcagccatgagttttaacctttgatgcattgggtgtggcctctaggctgcaaaggtcactgcagtaacccgccaaatagcatacaagaaaaagataaggatgataatgattaataataataataatattggcagctaacagttgccaggcactattctgagtgcttttcgtagactgactcattttatcctcacaacaaccttgtaaggcaggttctattattttccccattttacagaaggaggtaaattttgcctaggattctgtgtgtggttggtggatcctctgggaaagatggtaccttctctctgatcctttccatcagctaaagtcagggccaccaggtgcagtggtgcgacttgtccattgcacaagagcatcaaccaaaagaccctgctcgccaggccccatgccagggtgcaggagcattgcccagagatgaatttgcatgaaggcagtgcatggaccagccaatgtcctccttcctccagcctcagcacttttcccaggccccacrtggactcttctccaaccttgttgagctgcctgcttggttggaaggcgagtgagagaggcactgagattaagcatggcgcctagccgagggtccagcttcctacccagttagactcagaatccctggctagtcgggaatcccttggggattcagagactgccccacccccaccagttctttccctgaagcatcccaagggactgttgaaaagctccagtggatcaagcatggggcaggatgggatttagagaagtagcactgctgggagagagggccaaaggctcaagcttgccgccacagcgggagcccagcaggaggctactggtgagcatctgctcctaggacctctgacaaaggtcttcaccgggtcttccactgcccatcccaccctggggctcatgaggtcaagggaatggccccgccagttgagtgaaggatgaggcacctccatagttaagcatgtgccttaatctgggcatgcagacatgagcttcctggtttcctgcattctgtcagctaaccatggtcacacagccactgaaggcttgagacattctgtcacgttggggtgctgaggcaggtctggggacgtttggctgacagaaagaggcctaggagctataggcaggaacagggcagggggcgaaggaaggaggctcaggggagtcagaagaagactagagttgtccaggaacaggctctgggatggcagccctttacctgatttggggatctggaaaagcagattaactccggaaggtctgaccccagggaacagacaggagagccaagccagagagaggtgcagctgactgggaaggattggaactg

SEQ ID NO: 29684 - DNA, 513 bp, Homo sapiens
gaataggacagtaggcatgatagtgcttagtggttaatagttttaaatagsaaatcatttatttcctgatatttctacagggccgcatcagttgtactggacggctaatggtacaggctgtcaaccaaagaggtcgaagtccccggtctccctcaggccatcctcatgtcagaaggtatttaacatgttccttcccagaagtgttacattattttatttattactataaatgtagtactattagaatcatcatatgaccacaaaagtaaacataactggaagatagaataggaatgcaaacctgaagcctgtggctccttgattattatgctcccttgtgatgcagaaagggaatgggaacaaacattcgctaatgtgtgctaagcccattcacatatactattagtttgttaaataagacatattttatagacaaataaatcaagactcagcacttttaaatggcatatgaaaatactactaaatggtacacaaatgttggaaaccaaactt

SEQ ID NO: 29685 - DNA, 1076 bp, Homo sapiens
aaaacataatctgaggttgaggtgagtctggtgccccctctgggttcttcaggactgattataaaatagcctgagattacttacactgttggcagaggcagctggctccctgaattacagtgcaggactggtgatgagacccaagaagtgagtgctcattaggcagcattgaatgaagggggtgggggagagtcccacgcatgtaaagtgccattgtctgtaccaacctaaggcctgaatatgggttgaggcattgttctccaaggaagtaagttactgctaaacggggctgggaggaggaagtattttctggatatatcaggaagagggaaaamcaaaacaaaacaaaccagtatgctctcagatgaacagcctctctagtctagccttggtgttcttatctgttagttgggtattgtggccttgggttgccacagtccctgctgctactgatattctgagtctatgtgtaaaacccatgggaacatgctgggcttgtttccttcttatctccttgtttttgctttccattttctcttatcatgcaggtgtctgataatcacttcctaaaccccgtctcccccatcacatttatcttggggcagtgattctatttcagtctaaggcggcaggaagtcctgtgtcaagactggacaatggagcaatgatgggataaagcagtattaacagcattcttccaagccataactgcagcagtgcttactgcttctcctccgtatccctctttcccagttttcactgagactcactgagtaggcttagtctcctgttagctctactcaggaaggttgaaaagtcctgtggcctgtctctcctagttttcctaataaacttcagtcaggacctcaccatgtaagactgtggggcgtgtgtgtgtgtgtgtatatgtgtgtgcctctgtgtgtgtgtattcccatccttgatttttcaatgaccctcagccaaagtcatacaaaatttaaaatggaagaaaaggttgttatttggtcattaagtaaactgtagctaccgtagctagagcttagtgcagagactaaatataacaagccagattg

SEQ ID NO: 29686 - DNA, 1076 bp, Homo sapiens
aaaacataatctgaggttgaggtgagtctggtgccccctctgggttcttcaggactgattataaaatagcctgagattacttacactgttggcagaggcagctggctccctgaattacagtgcaggactggtgatgagacccaagaagtgagtgctcattaggcagcattgaatgaagggggtgggggagagtcccacgcatgtaaagtgccattgtctgtaccaacctaaggcctgaatatgggttgaggcattgttctccaaggaagtaagttactgctaaacggggctgggaggaggaagtattttctggatatatcaggaagagggaaaaacaaaacaaaacaaaccagtatgctctcagatgaacagcctctctagtctagccttggtgttcttatctgttagttgggtattgtggccttgggttgccacagtccctgctgctactgatattctgagtctatgtgtaaaacccatgggaacatgctgggcttgtttccttcttatctccttgtttttgctttccattttctcttatcatgcaggtgtctgataatcacttcctaaaccccgtctcccccatcacatttatcttggggcagtgattctatttcagtctaaggcggcaggaagtcctgtgtcaagactggacaatggagcaatgatgggataaagcagtattaacagcattcttccaagccataactgcagcagtgcttactgcttctcctccgtatccctctttcccagttttcactgagactcactgagtaggcttagtctcctgttagctctactcaggaaggttgaaaagtcctgtggcctgtctctcctagttttcctaataaacttcagtcaggacctcaccatgtaagactgtggggcgtgtgtgtgtgtgtgtatatgtgtgtgcctctgtgtgtgtgtattcccatccttgatttttcaatgaccctcagccaaagtcatacamaatttaaaatggaagaaaaggttgttatttggtcattaagtaaactgtagctaccgtagctagagcttagtgcagagactaaatataacaagccagattg

SEQ ID NO: 29687 - DNA, 978 bp, Homo sapiens
tccccctccaaccaccggactacaggcgaatgccatggtgccaggccctcactcaaccttttaagaccctactggtaatctccattattaaaaagcttaactgtttcaccataagtgataatcacattagccaaaacacccaggcctaggagattgtaacttctgtaacatcaagacacaagcagaacgtaaataacgcaaatcaaaacttcttttttctttttttgacggagtctcccccccgtcgccctgtctggcgtacagcgtcgcgatctcggctccctgcaacctccccctcctgggttcaaccaattctcgtgcctcagcctcccgagtagctgggattacaggcaccggccaccacgcctggctaaattttgtatttttarcagagacgggttttcaccgtgttggccaggctggtctcaaactcctgacctcaagtgatcccctgcctcagcctcccaaagtgctgggattacaggcgtgagccaccaaaaccggccaagacttctgattaattcagagaaggctatcaaactgcatttgatgaaatctcaaaaacaataccaaataaattgtgtttagtagcttttacatatggatggaaattttcagcagatttgtttgaagctcttctgctgctcctctcagacacctagctgtagtttgaagtaaataattcaaacaggcctggaccagtgggtcacacctgtaaccccaacactttgggaggctgaggtgggaggatcacttgagcccaggagttccagaccagcttggacaacaaggcaagacccttgtctctacaaaaaatttaaaaattagccgggtgtggcggtgcgcctgcaggtgggcgaatccattgagcccaggaggtcgaggctacagtgagttctgttcgtgccactgtactccagcctagacgacacagagagactctgtctctaaataaataaataaataaatccatctcca

SEQ ID NO: 29688 - DNA, 643 bp, Homo sapiens
tattataaaccattaactagaaatttctgtattgcttttacagactcaatgagatttctagaatggatttataggaagatagtttatggaaaarcgttttttcctgttactttttttccctagtatttgaccattttatagggataaatgtcaaggcatatggaccagctaagcttagatgtttcatttattacctataactttaatcctcaaagtgtggtcccagcatcagcacagtagcaccagcattacttcagaacctgttaaaaatgctcattctttgcttttgcccaagatctactgaataagaaactctagggtgttgcttagcaatctatgaatcaccctgctgattattctgaggcatgttaaaatttgagaagcactgctctacatgatgggcttggacaatggaatattatttttcatgaaacactttaataaatgtatcaactttgctggcacactgtgagggatgttctatttgggtgaaggaaatagatttacagatcaccagatttcctttaatttccctatgtcacagaaaataaatgtccattttcaattgatttccaggcagtaattattatgagatttacataaatattttctaaatgtcatgcagatatctaaaattctgatt

SEQ ID NO: 29689 - DNA, 725 bp, Homo sapiens
aatggactttagggactcagaggaaaggttgggagaggggtgagagataaaagtacatattgggtacagtgtacactgctcgggtgatggatgcaccaaaatctcagaagtcaccactaaagaacttattcttgtagccaaacaacacctgttctccaaaaacctaatgaaatttaaaaaagaagtgaggctgctaaatatttttacttatgttttgacaggaatgtcaaatcaactgaatctctggagttctacactagaacaaataataaaagttaaacattttcaccaacataaaagctatgactgcaaatgctaacaatatttcctatcgcttctcttccacattagaatttgaacacattaaataatttttactaatattaaaatttaaatacattaattttactaatatgtaattataagaattctttaatataaatagataatgtcaaaagacattaaatactattaatttagtattctgtacaaacaacagctcaagattttattttttaaccgtttcccccttttattcactttttaaaactcctgcaaaattctggctgtttcacccctagagtacgaatatcatrtactgccatgtttaaataaaattaatttttctatcagaaaatgttaccagtttttttcaacaggtggctttttaatctatcaaaaattagtactgcttttcacatctatgtcttatacatataaaatat

SEQ ID NO: 29690 - DNA, 574 bp, Homo sapiens
tcactgactttctccatgctttctgaagaaacttgaaagagaagtccattcttagcaaaactggaaatcaggtgaaacatttaaaaaactaaggaaaagaaaacaaaacaaaaacccttttttcygtatctccctatttctctgctatattgccaggtagctggacggtgactgcccagtgactttgatgctagatttccaccttcctggctgtgacccagacatctcgtgacctaaatggcagtcatctaaatcccaaccctatgcaatgacctcagaccagagttttcaccttgaaaactgaaaaagagtcagcaggcctgggtgtccataatagctgtccagtccataagcatccaactacattctcttagaggctgttccaccttcactgtctgttcctggaaagcaaggctgtccaaggtgcgggcagcaccagcttttcacctttactaaagctagaagaaatactgattcccatgcttgctgagattgctttttaaaaaactctatgaactaggaattaaggttttataccaaaaaaaaataagagaaataaccaaaaatataacca

SEQ ID NO: 29691 - DNA, 574 bp, Homo sapiens
tcactgactttctccatgctttctgaagaaacttgaaagagaagtccattcttagcaaaactggaaatcaggtgaaacatttaaaaaactaaggaaaagaaaacaaaacaaaaacccttttttctgtatctccctatttctctgctatattgccaggtagctggacggtgactgcccagtgactttgatgctagatttccaccttcctggctgtgacccagacatctcgtgacctaaatggcagtcatctaaatcccaaccctatgcaatgacctcagaccagagttttcaccttgaaaactgaaaaagagtcagcaggcctgggtgtccataatagctgtccagtccataagcatccaactacattctcttagaggctgttccaccttcactgtctgttcctggaaagcaaggctgtccaaggtgcgggcagcaccagcttttcacctttactaaagctagaagaaatactgattcccatgcttgctgagattgctttttaaaaaactstatgaactaggaattaaggttttataccaaaaaaaaataagagaaataaccaaaaatataacca

SEQ ID NO: 29692 - DNA, 586 bp, Homo sapiens
cgcctgtaatcccagcattttgggaggcaaaggcgggtggatcacttgaggtccggagttcaagaccagcctggccaacatggcaaaacctcgtctctactaaaaacacaaaaattagccaggtgtggtgacatgcacctgtaattcttgggaggttgaggcacgacaatcactgaaatccaggaggcagaggttgcagtgagccgagatcacaccactatactccagcttgggcaacaagctgagtgagactctgtctcttaaaaaatgataataataataacaaataataacaatataaattttaaaattgcaagcacatcgctgcctgtcacatataagtaaaagtgtaaaaagggtaatattcataaatttaaacaaagatatgcccaacacatttgtttaaaatcctaattcaatgtttgtgcttacaaatctaaggtcaagctattattgktatcttaaaatcaagaatacaactacaatgagacccaccccaccaaaggcaccttgcaagacagtcttacaaattcatgttcttctcacgattatttataaaacagaatttagaaaaattttaaatatc

SEQ ID NO: 29693 - DNA, 1407 bp, Homo sapiens
aattgccttcttaatgacaagtacagtttcatactcacagatatatctgaaacccctagcatcgtgactagcacagattaggagctatgtaaatattctgcaaatgaatgaattagacgctatttcttttgattttacattttttttaattcagattctctttaggattgagcacaaactgctttgcctaaacttttatatttcttttgccaaggttcatgcagatcctctgaatatctgattttggattgatggtcttctgaattctattaatatagcatgttaattgctgatgcctgccttttccatagccatcacctctaattaatcaatctgctctatagaattgacctcctcaataagtctcaaatccattcactcctttctttctgctgtgtgaccaccatagtctaaacctcttcatttcttttccagactctgcagcaatctcctaactcgtctctctgccttcagcattacaatcttgctcaaatgcatatccggccatgtcacacctatgcttaaaatccttcaacaacagacacatactggggttctggaacatggggatctgagcaaagtgcccttctcagcactcccagaatgatctacttgcttctccagcatctggcaggttctgagatctgtgagtaagaccttgggttctataaagttcttcacacagagctggtgtggaattccctccctttagggctagacagtcaacagcagaccagaggtgatagccaggacctgtagatgtagatatgcaggtgaaaggacttgtcagtcaggggtttgtggatcccaactttgcctccatttcctcaaagttaacatcaaccttgtataagtatgtcagatcttgcagacccttccaaagccaagagaggtagaacaggtgaataaactttcccttctcctaagctgagtgattaaagggagatcataggagtttcttcagggatctcagcagaatgctaacatcctgcctttacactacaggcccacagaccataaacccattttgcttcttacctcctgtaggattcccatcattaaggacacttcaacaaccagacttgagtcttaaagagtggacagggaaaactaacagtccatctaagaggtcccagcaaaccagagaaaggaagatcaggtagaacactcaaaatgagttctcatgaaacagaactgccaaaggaaataggcagragcctgaatagaaaataaggttgctaagctgttctaaaagcagttttaaaatactttacttgcataaaaatataatttttctttgaaaattcagtaaattaaagatgattattattaaggctctaattagtgctctggaagatcaaatgcaagaaatacttcaaagtactgaacaaaaaaaagaaatttaaa

SEQ ID NO: 29694 - DNA, 1407 bp, Homo sapiens
aattgccttcttaatgacaagtacagtttcatactcacagatatatctgaaacccctagcatcgtgactagcacagattaggagctatgtaaatattctgcaaatgaatgaattagacgctatttcttttgattttacattttttttaattcagattctctttaggattgagcacaaactgctttgcctaaacttttatatttcttttgccaaggttcatgcagatcctctgaatatctgattttggattgatggtcttctgaattctattaatatagcatgttaattgctgatgcctgccttttccatagccatcacctctaattaatcaatctgctctatagaattgacctcctcaataagtctcaaatccattcactcctttctttctgctgtgtgaccaccatagtctaaacctcttcatttcttttccagactctgcagcaatctcctaactcgtctctctgccttcagcattacaatcttgctcaaatgcatatccggccatgtcacacctatgcttaaaatccttcaacaacagacacatactggggttctggaacatggggatctgagcaaagtgcccttctcagcactcccagaatgatctacttgcttctccagcatctggcaggttctgagatctgtgagtaagaccttgggttctataaagttcttcacacagagctggtgtggaattccctccctttagggctagacagtcaacagcagaccagaggtgatagccaggacctgtagatgtagatatgcaggtgaaaggacttgtcagtcaggggtttgtggatcccaactttgcctccatttcctcaaagttaacatcaaccttgtataagtatgtcagatcttgcagacccttccaaagccaagagaggtagaacaggtgaataaactttcccttctcctaagctgagtgattaaagggagatcataggagtttcttcagggatctcagcagaatgctaacatcctgcctttacactacaggcccacagaccataaacccattttgcttcttacctcctgtaggattcccatcattaaggacacttcaacaaccagacttgagtcttaaagagtggacagggaaaactaacagtccatctaagaggtcccagcaaaccagagaaaggaagatcaggtagaacactcaaaatgagttctcatgaaacagaactgccaaaggaaataggcaggagcctgaatagaaaataaggttgctaarctgttctaaaagcagttttaaaatactttacttgcataaaaatataatttttctttgaaaattcagtaaattaaagatgattattattaaggctctaattagtgctctggaagatcaaatgcaagaaatacttcaaagtactgaacaaaaaaaagaaatttaaa

SEQ ID NO: 29695 - DNA, 1407 bp, Homo sapiens
aattgccttcttaatgacaagtacagtttcatactcacagatatatctgaaacccctagcatcgtgactagcacagattaggagctatgtaaatattctgcaaatgaatgaattagacgctatttcttttgattttacattttttttaattcagattctctttaggattgagcacaaactgctttgcctaaacttttatatttcttttgccaaggttcatgcagatcctctgaatatctgattttggattgatggtcttctgaattctattaatatagcatgttaattgctgatgcctgccttttccatagccatcacctctaattaatcaatctgctctatagaattgacctcctcaataagtctcaaatccattcactcctttctttctgctgtgtgaccaccatagtctaaacctcttcatttcttttccagactctgcagcaatctcctaactcgtctctctgccttcagcattacaatcttgctcaaatgcatatccggccatgtcacacctatgcttaaaatccttcaacaacagacacatactggggttctggaacatggggatctgagcaaagtgcccttctcagcactcccagaatgatctacttgcttctccagcatctggcaggttctgagatctgtgagtaagaccttgggttctataaagttcttcacacagagctggtgtggaattccctccctttagggctagacagtcaacagcagaccagaggtgatagccaggacctgtagatgtagatatgcaggtgaaaggacttgtcagtcaggggtttgtggatcccaactttgcctccatttcctcaaagttaacatcaaccttgtataagtatgtcagatcttgcagacccttccaaagccaagagaggtagaacaggtgaataaactttcccttctcctaagctgagtgattaaagggagatcataggagtttcttcagggatctcagcagaatgctaacatcctgcctttacactacaggcccacagaccataaacccattttgcttcttacctcctgtaggattcccatcattaaggacacttcaacaaccagacttgagtcttaaagagtggacagggaaaactaacagtccatctaagaggtcccagcaaaccagagaaaggaagatcaggtagaacactcaaaatgagttctcatgaaacagaactgccaaaggaaataggcaggagcctgaatagaaaataaggttgctaagstgttctaaaagcagttttaaaatactttacttgcataaaaatataatttttctttgaaaattcagtaaattaaagatgattattattaaggctctaattagtgctctggaagatcaaatgcaagaaatacttcaaagtactgaacaaaaaaaagaaatttaaa

SEQ ID NO: 29696 - DNA, 787 bp, Homo sapiens
atgagaataaatcaaatgttcttgtattattaaagaaataatacaagaacattatttctttaataatacaaaaatatttcccccaaactgaaagaaataagtttccaaattgaaagcatcaacctagtacccagcttcctgaattaaaattaaaaaaaatgaccgaaggcataccactgcacaattttagaacatgagggatacataatcctaaaaaccttcagagggaagagggaaaggttatagacatgaaacaagtaataagaatgtactggggccgggcatggtggctcatgtctgtaatcccagcactttgggaggcagaggcaggcagatcacctgtggtcaggagttcgagaccagcctggccaacatggtgaaaccttgtctctactaaaaatacaaaaattaactgggtgcagtggcacatgcctgtaatcccagcyactcgggaggctgaggcaggagaatcgcttgaacccatgatgcagaggttgcagtgaaccaagatcgtgctactgccctccagcctgggcaacagagtgagactttgtctcaaaaaaaaaaaaaaaaaaagaatgtattggatgtctaatccacactgaactagaagtcaacagaacagtacctgcaaaatgttaagagtaagttacatttacacctagaattctatacccaaataaactcccagctgaatgtgagggtagcatattttgaggcatgcacgttctcaaaaaatttacctccaatgcaccctcctgcaagaagctactgaaggatgtttttt

SEQ ID NO: 29697 - DNA, 768 bp, Homo sapiens
ttgcccttcccttggtctttggagccatcagcccttaatgggagatgcacgctggcttctcccttctctactgtcatgccccgactttctgttcactccttcctcccacaggcacctgttacgtactggggctgtaggggacctggttatcatcggggaccgccagctttccaagggcactacccgcctgctggccgtcactggggagcaggcccagcaggtcagcatgccagtaggcctgggacttctgggttgagtgggtgcatgggacacacgcaggtgacatgctcaggctcaggggtgcccagcagcagagccagtgttcatacttggacaccaatgtggccatatcagctattggcagctggcatgtgttttgattatttggtgctgstgccttgattggtcctgattgttaaatcttatttgtccctgaccagtaatgagttgagaggccttgtcctggggagatgaatgtaatcctgaccctcctgtcccctccctgcaggcccgagagctaggccagagcctggcccaggaagtgaaagcggccactgagcggctgagtctggggagccgggatgtggcggaggcactgaggctgtccaaggacataggacgactcattgaagtgagggccacgcctaccaccccaccctctcctagccctattacctcccctattcctccctggactccttcagactctccctagcactccaattgggttgggctccagctggcccagatatttgtctgcagggtggg

SEQ ID NO: 29698 - DNA, 1166 bp, Homo sapiens
acttaataaattgcaatattgtatcagttttgtttataataaattactataatattactctaacagaagacaaagaaaaatatagctctatgtttcaaaatgtgggagtggatgaaaggaggagaagatgagagtaaggaggagtgtcccggatcaaatcgatgcctctccagggtctagctgcagatacagctttatcttcaaacatgattttctcagctccccaagggcttaggggctatgctcaacacagtctttcacaagcctcaccagggcatctggggcaggtccattgacctggtcacttccaaatgaacccagagaggctctgacttacccaccggctggaacgttgggaagtaggtgcacaggcttagaggacaaatcctcccccttccccctctccagctcttttgcagttgaatgtttccgtaaagcttctagagagatgtccaaaatgatcaagtgtctagcttgtttcttttgaggttgtagcyggttctgtaacacacacacgcacacacacacacacattttttttttctcttttgcctgcttcacttgtcttttttcctcagtgtgcttgcacaggtattttattcatccaaaaagtattaatatatatgctttgccccaagtttcctttttctatggtatcaaagctaagacaggagtggaagagagaaggatagtgttgaatagaatggaatcaaagctatataaaatgggtttagacaaaaattatttattttgataaagcatatctaacagaaaaaccataattggtttttgtttgtttgcttgtttgttttcttttttctttcttttttttgtgggggacagagtttccctcttgtttcccaggctggagtgaaatggtatggtctcggctcactgcaacctccgcctcctgggttccagtgattctcctgcctcagcctcctgagtagctgggattacaggcacccgccatcatgcccagctaatttttgtatttttagtagagacggggtttcaccatgttggtcaggccggtctcaaactcctgacctcaggtgatcctcccaccttggcctgccaaagtgctaggattactgacatgagccaccatgcccggccataattgttaatcattagaataatttctgaaacacagaaaaaggaaa

SEQ ID NO: 29699 - DNA, 1166 bp, Homo sapiens
acttaataaattgcaatattgtatcagttttgtttataataaattactataatattactctaacagaagacaaagaaaaatatagctctatgtttcaaaatgtgggagtggatgaaaggaggagaagatgagagtaaggaggagtgtcccggatcaaatcgatgcctctccagggtctagctgcagatacagctttatcttcaaacatgattttctcagctccccaagggcttaggggctatgctcaacacagtctttcacaagcctcaccagggcatctggggcaggtccattgacctggtcacttccaaatgaacccagagaggctctgacttacccaccggctggaacgttgggaagtaggtgcacaggcttagaggacaaatcctcccccttccccctctccagctcttttgcagttgaatgtttccgtaaagcttctagagagatgtccaaaatgatcaagtgtctagcttgtttcttttgaggttgtagctggttctgtaacacacacacgcacacacacacacacattttttttttctcttttgcctgcttcacttgtcttttttcctcagtgtgcttgcacaggtattttattcatccaaaaagtattaatatatatgctttgccccaagtttcctttttctatggtatcaaagctaagacaggagtggaagagagaaggayagtgttgaatagaatggaatcaaagctatataaaatgggtttagacaaaaattatttattttgataaagcatatctaacagaaaaaccataattggtttttgtttgtttgcttgtttgttttcttttttctttcttttttttgtgggggacagagtttccctcttgtttcccaggctggagtgaaatggtatggtctcggctcactgcaacctccgcctcctgggttccagtgattctcctgcctcagcctcctgagtagctgggattacaggcacccgccatcatgcccagctaatttttgtatttttagtagagacggggtttcaccatgttggtcaggccggtctcaaactcctgacctcaggtgatcctcccaccttggcctgccaaagtgctaggattactgacatgagccaccatgcccggccataattgttaatcattagaataatttctgaaacacagaaaaaggaaa

SEQ ID NO: 29700 - DNA, 1166 bp, Homo sapiens
acttaataaattgcaatattgtatcagttttgtttataataaattactataatattactctaacagaagacaaagaaaaatatagctctatgtttcaaaatgtgggagtggatgaaaggaggagaagatgagagtaaggaggagtgtcccggatcaaatcgatgcctctccagggtctagctgcagatacagctttatcttcaaacatgattttctcagctccccaagggcttaggggctatgctcaacacagtctttcacaagcctcaccagggcatctggggcaggtccattgacctggtcacttccaaatgaacccagagaggctctgacttacccaccggctggaacgttgggaagtaggtgcacaggcttagaggacaaatcctcccccttccccctctccagctcttttgcagttgaatgtttccgtaaagcttctagagagatgtccaaaatgatcaagtgtctagcttgtttcttttgaggttgtagctggttctgtaacacacacacgcacacacacacacacattttttttttctcttttgcctgcttcacttgtcttttttcctcagtgtgcttgcacaggtattttattcatccaaaaagtattaatatatatgctttgccccaagtttcctttttctatggtatcaaagctaagacaggagtggaagagagaaggatagtgttgaatagaatggaatcaaagctatataaaatgggtttagacaaaaattatttattttgataaagcatatctaacagaaaaaccataattggtttttgtttgtttgcttgtttgttttcttttttctttcttttttttgtgggggacagagtttccctcttgtttcccaggctggagtgaaatggtatggtctcggctcactgcaacctccgcctccygggttccagtgattctcctgcctcagcctcctgagtagctgggattacaggcacccgccatcatgcccagctaatttttgtatttttagtagagacggggtttcaccatgttggtcaggccggtctcaaactcctgacctcaggtgatcctcccaccttggcctgccaaagtgctaggattactgacatgagccaccatgcccggccataattgttaatcattagaataatttctgaaacacagaaaaaggaaa

SEQ ID NO: 29701 - DNA, 1166 bp, Homo sapiens
acttaataaattgcaatattgtatcagttttgtttataataaattactataatattactctaacagaagacaaagaaaaatatagctctatgtttcaaaatgtgggagtggatgaaaggaggagaagatgagagtaaggaggagtgtcccggatcaaatcgatgcctctccagggtctagctgcagatacagctttatcttcaaacatgattttctcagctccccaagggcttaggggctatgctcaacacagtctttcacaagcctcaccagggcatctggggcaggtccattgacctggtcacttccaaatgaacccagagaggctctgacttacccaccggctggaacgttgggaagtaggtgcacaggcttagaggacaaatcctcccccttccccctctccagctcttttgcagttgaatgtttccgtaaagcttctagagagatgtccaaaatgatcaagtgtctagcttgtttcttttgaggttgtagctggttctgtaacacacacacgcacacacacacacacattttttttttctcttttgcctgcttcacttgtcttttttcctcagtgtgcttgcacaggtattttattcatccaaaaagtattaatatatatgctttgccccaagtttcctttttctatggtatcaaagctaagacaggagtggaagagagaaggatagtgttgaatagaatggaatcaaagctatataaaatgggtttagacaaaaattatttattttgataaagcatatctaacagaaaaaccataattggtttttgtttgtttgcttgtttgttttcttttttctttcttttttttgtgggggacagagtttccctcttgtttcccaggctggagtgaaatggtatggtctcggctcactgcaacctccgcctcctgggttccagtgattctcctgcctcagcctcctgagtagctgggattacaggcacccgccatcatgcccagctaatttttgtatttttagtagagacggggtttcaccatgttggtcaggccggtctcaaactcctgacctcaggtgatcctcccaccttggcctgccaaaktgctaggattactgacatgagccaccatgcccggccataattgttaatcattagaataatttctgaaacacagaaaaaggaaa

SEQ ID NO: 29702 - DNA, 1167 bp, Homo sapiens
caggcctggaggactggggagccggccccagctcagagctcggggcagcccactgaacctgcccgcctccaggagcctgaattgtctggccacggtggccgccacactccagcccagcagctgggccctggccaggcgctgggtgaacgcagagagcagcccggtgactcacgtcggctcccggcccaggctgtgtgggcgggaggggctcggaggggccagcagcaagccttcccagacayagctcagcactgcacctttccagccctcctcaaagggacgtgtggatgtggattggaagaaaagacattcacagacaaagaatgaaaagcgaggccccacatgtggacaaaggccattttcggggctccctccattagaaggccccctgagaactcagaaactggtgattcctctgaagctggcccagagagaaggctcagcacagggctggcgtgtacatggatggatgagcacgttagcagtgggtgatgctaggtgcggggctggtttgtagatagatggatgagtgagcgagcaggtgggtgatgctgcaaagtcatttccgtcagaaagcccaggtttctcgaatcctgctctcccctgggaaagccctcccatggttcaacctaccccagagtcatttgtctttgttgaaagctgagcaaacccatctcatgggtttcttgttttgtcttgttttgttttgttttactgggtgagatgaggctgggatcatcaaggatgctatttaaatgccctaattcaatttgggaatgggtgttttctcaccacggagtaccctggctcctggctgacccagtggccccaccatggaggcgtgggtgtcaccaggacctggctgcacagccacgaccatgagtcagcagctgctagactgcttcccctctgcccaggactcctctcaggcaagaaacaaatctgtctgtctctctggcagccagctcttttctctgcagatatgtgccataatccccaccccacggggtggagattaattagtgcgttaaagagcttcccaggttactcgtggagccggcagtgggccagggagcccagatcctcacttaccagctttgcgaggacagagggactcgactctccccagattccccagcaggaaagctaggcctctgagcttcagga

SEQ ID NO: 29703 - DNA, 1167 bp, Homo sapiens
caggcctggaggactggggagccggccccagctcagagctcggggcagcccactgaacctgcccgcctccaggagcctgaattgtctggccacggtggccgccacactccagcccagcagctgggccctggccaggcgctgggtgaacgcagagagcagcccggtgactcacgtcggctcccggcccaggctgtgtgggcgggaggggctcggaggggccagcagcaagccttcccagacatagctcagcactgcacctttccagccctcctcaaagggacgtgtggatgtggattggaagaaaagacattcacagacaaagaatgaaaagcgaggccccacatgtkgacaaaggccattttcggggctccctccattagaaggccccctgagaactcagaaactggtgattcctctgaagctggcccagagagaaggctcagcacagggctggcgtgtacatggatggatgagcacgttagcagtgggtgatgctaggtgcggggctggtttgtagatagatggatgagtgagcgagcaggtgggtgatgctgcaaagtcatttccgtcagaaagcccaggtttctcgaatcctgctctcccctgggaaagccctcccatggttcaacctaccccagagtcatttgtctttgttgaaagctgagcaaacccatctcatgggtttcttgttttgtcttgttttgttttgttttactgggtgagatgaggctgggatcatcaaggatgctatttaaatgccctaattcaatttgggaatgggtgttttctcaccacggagtaccctggctcctggctgacccagtggccccaccatggaggcgtgggtgtcaccaggacctggctgcacagccacgaccatgagtcagcagctgctagactgcttcccctctgcccaggactcctctcaggcaagaaacaaatctgtctgtctctctggcagccagctcttttctctgcagatatgtgccataatccccaccccacggggtggagattaattagtgcgttaaagagcttcccaggttactcgtggagccggcagtgggccagggagcccagatcctcacttaccagctttgcgaggacagagggactcgactctccccagattccccagcaggaaagctaggcctctgagcttcagga

SEQ ID NO: 29704 - DNA, 1167 bp, Homo sapiens
caggcctggaggactggggagccggccccagctcagagctcggggcagcccactgaacctgcccgcctccaggagcctgaattgtctggccacggtggccgccacactccagcccagcagctgggccctggccaggcgctgggtgaacgcagagagcagcccggtgactcacgtcggctcccggcccaggctgtgtgggcgggaggggctcggaggggccagcagcaagccttcccagacatagctcagcactgcacctttccagccctcctcaaagggacgtgtggatgtggattggaagaaaagacattcacagacaaagaatgaaaagcgaggccccacatgtggacaaaggccattttcggggctccctccattagaaggccccctgagaactcagaaactggtgattcctctgaagctggcccagagagaaggctcagcacagggctggcgtgtacatggatggatgagcrcgttagcagtgggtgatgctaggtgcggggctggtttgtagatagatggatgagtgagcgagcaggtgggtgatgctgcaaagtcatttccgtcagaaagcccaggtttctcgaatcctgctctcccctgggaaagccctcccatggttcaacctaccccagagtcatttgtctttgttgaaagctgagcaaacccatctcatgggtttcttgttttgtcttgttttgttttgttttactgggtgagatgaggctgggatcatcaaggatgctatttaaatgccctaattcaatttgggaatgggtgttttctcaccacggagtaccctggctcctggctgacccagtggccccaccatggaggcgtgggtgtcaccaggacctggctgcacagccacgaccatgagtcagcagctgctagactgcttcccctctgcccaggactcctctcaggcaagaaacaaatctgtctgtctctctggcagccagctcttttctctgcagatatgtgccataatccccaccccacggggtggagattaattagtgcgttaaagagcttcccaggttactcgtggagccggcagtgggccagggagcccagatcctcacttaccagctttgcgaggacagagggactcgactctccccagattccccagcaggaaagctaggcctctgagcttcagga

SEQ ID NO: 29705 - DNA, 1221 bp, Homo sapiens
atccggtcgtgaccttggcttttcttctgagtgagatgggaaccactgcacagccactagtcacttacctgtcatttctccagcaacgtgcaagctacttgcgggcaggcactgcgtctgactcctgtctgcacctggcatccctgcaaacgcccaccacacaaatattagagatacaagatggtgcctgcctgtgaggatctcaccatcagaccaggagctcaggtatcacggatgagaccagagacaagaactagtgagcaaaataaaatgtcgtgtcatcaagtgctaagaccggcaagccgggatgcaggtacggacactttggcctacccacccactgcccaaccaggtgggatgctgcctgtgcgtcccggygggacacagaggccactgtaggggacagtgatttttatagaggatgtaggagtgcagcaagagctggaagggaaggagaggcgccatggcactgatgtgtttctctgaatattggatttatccaagaaagagccctgcaggagaacggaaccttagtgttaaccccgtccttccagctcaggagaatgtaatccagaaacatgcagagcgacatcatttgggaggccagcgcagctcatggaaaaaggagagcaattgcccatcttcacctcattttggtagtttcaggaaatgcattttctgctggggccacaaagattcacgacactcagtctgggttgctgaggaacacagagggtttgggccgcccggcttccagctggcagcaggcgccaacctaggcctctgccccgtggggagaagggtcgagggtgctctgcctgccgtgctcccagccaatgtgggcccatactcaggggtcagcccagcgcctgagcgctggactgagttctctggtgcataaagacagctgctgagaactttgtgtgatattgatccgagatcattccttcactcattcatttgagcacacaggtgccctggccaccctcgtccctccctgggcctgtgctgagggtgggtgggcttcagcacctcctcggcagctcccccaccaggctgtggctccatgagagtggcagtgtttctgtttcgatagctgctgtgtcttcaacgtctagcacagtgactggcacataggtggtgctaagcaaaccctggcagaatgaaggaaggaaatgagtggaggaaaagcgactgccaagatcggggctgtgctgtggg

SEQ ID NO: 29706 - DNA, 1221 bp, Homo sapiens
atccggtcgtgaccttggcttttcttctgagtgagatgggaaccactgcacagccactagtcacttacctgtcatttctccagcaacgtgcaagctacttgcgggcaggcactgcgtctgactcctgtctgcacctggcatccctgcaaacgcccaccacacaaatattagagatacaagatggtgcctgcctgtgaggatctcaccatcagaccaggagctcaggtatcacggatgagaccagagacaagaactagtgagcaaaataaaatgtcgtgtcatcaagtgctaagaccggcaagccgggatgcaggtacggacactttggcctacccacccactgcccaaccaggtgggatgctgcctgtgcgtcccggtgggacacagaggccactgtaggggacagtgatttttatagaggatgtaggagtgcagcaagagctggaagggaaggagaggcgccatggcactgatgtgtttctctgaatattggatttatccaagaaagagccctgcaggagaacggaacctwagtgttaaccccgtccttccagctcaggagaatgtaatccagaaacatgcagagcgacatcatttgggaggccagcgcagctcatggaaaaaggagagcaattgcccatcttcacctcattttggtagtttcaggaaatgcattttctgctggggccacaaagattcacgacactcagtctgggttgctgaggaacacagagggtttgggccgcccggcttccagctggcagcaggcgccaacctaggcctctgccccgtggggagaagggtcgagggtgctctgcctgccgtgctcccagccaatgtgggcccatactcaggggtcagcccagcgcctgagcgctggactgagttctctggtgcataaagacagctgctgagaactttgtgtgatattgatccgagatcattccttcactcattcatttgagcacacaggtgccctggccaccctcgtccctccctgggcctgtgctgagggtgggtgggcttcagcacctcctcggcagctcccccaccaggctgtggctccatgagagtggcagtgtttctgtttcgatagctgctgtgtcttcaacgtctagcacagtgactggcacataggtggtgctaagcaaaccctggcagaatgaaggaaggaaatgagtggaggaaaagcgactgccaagatcggggctgtgctgtggg

SEQ ID NO: 29707 - DNA, 1221 bp, Homo sapiens
atccggtcgtgaccttggcttttcttctgagtgagatgggaaccactgcacagccactagtcacttacctgtcatttctccagcaacgtgcaagctacttgcgggcaggcactgcgtctgactcctgtctgcacctggcatccctgcaaacgcccaccacacaaatattagagatacaagatggtgcctgcctgtgaggatctcaccatcagaccaggagctcaggtatcacggatgagaccagagacaagaactagtgagcaaaataaaatgtcgtgtcatcaagtgctaagaccggcaagccgggatgcaggtacggacactttggcctacccacccactgcccaaccaggtgggatgctgcctgtgcgtcccggtgggacacagaggccactgtaggggacagtgatttttatagaggatgtaggagtgcagcaagagctggaagggaaggagaggcgccatggcactgatgtgtttctctgaatattggatttatccaagaaagagccctgcaggagaacggaaccttagtgttaaccccgtccttccagctcaggagaatgtaatccagaaacatgcagagcgacatcatttgggaggccagcgcagctcatggaaaaaggagagcaattgcccatcttcacctcattttggtagtttcaggaaatgcattttctgctggggccacaaagattcacgacactcagtctgggttgctgaggaacacagagggtttgggccgcccggcttccagctggcagcaggcgccaacctaggcctctgccccgtggggagaagggtcgagggtgctctgcctgccgtgctcccagccaatgtgggcccatactcaggggtcagccyagcgcctgagcgctggactgagttctctggtgcataaagacagctgctgagaactttgtgtgatattgatccgagatcattccttcactcattcatttgagcacacaggtgccctggccaccctcgtccctccctgggcctgtgctgagggtgggtgggcttcagcacctcctcggcagctcccccaccaggctgtggctccatgagagtggcagtgtttctgtttcgatagctgctgtgtcttcaacgtctagcacagtgactggcacataggtggtgctaagcaaaccctggcagaatgaaggaaggaaatgagtggaggaaaagcgactgccaagatcggggctgtgctgtggg

SEQ ID NO: 29708 - DNA, 1012 bp, Homo sapiens
ggatcccagcttagccaccgactgggkgggggccccctaccgagggaggctacacaaccccaggctgctctcgggaaagctggtgattccatgatcgcatggggtccttgcggggctcagctgagaggctgtgtgtggagggtgttttgtcagttggagagtgctctacacacgctaaggttccaggccggcaactccttctgcaggtgtacaggtcaccgtgggggggccctgggatggattcagacattataatcaccacaccaggtgcgtgtcctagctgtgtgactttggtcaagttacttaacctctctggacctccaattcctcatctgtaataaagaagatgatgacctttccgtgccagtgtcctgtgagaattgaagacagcatctgtgaagtgcctggcctgccaaaagccttctggaacagtagtgatgatcactgtcatcgtgtgtgaccctgggctgtgtgcctgtcttgtctcattctcagttttctcatctgtgaaaggacagaatttgactagtctattttttaaggtccttgttctttattcgattttattcctctttccgggtgtacactacttttttagtaattataatatttgaagcccaatgctttaatcagactttggcaaaaataactgatcaccttaagaagacaaatgttccagagattggagaattccattcgtggcctgagaaaggctggcttctgtgttaggccagggtatgaggatagctcagggggtgggaaccctgagagcttgtgtctggcactgtagggatggggacttgatgagccattggattaggccagcagggttttagccagaagtatcatgggccccttgatttttactgtaagtcagtttggcactggtatgtgggattatgcagtttgtatcagtcaggataggtagatagtgctgcagtaacaaacagccccaaatctcagtggcttaaaagaatcatattctattatctcatggttatatgggttaact

SEQ ID NO: 29709 - DNA, 1012 bp, Homo sapiens
ggatcccagcttagccaccgactgggggkgggccccctaccgagggaggctacacaaccccaggctgctctcgggaaagctggtgattccatgatcgcatggggtccttgcggggctcagctgagaggctgtgtgtggagggtgttttgtcagttggagagtgctctacacacgctaaggttccaggccggcaactccttctgcaggtgtacaggtcaccgtgggggggccctgggatggattcagacattataatcaccacaccaggtgcgtgtcctagctgtgtgactttggtcaagttacttaacctctctggacctccaattcctcatctgtaataaagaagatgatgacctttccgtgccagtgtcctgtgagaattgaagacagcatctgtgaagtgcctggcctgccaaaagccttctggaacagtagtgatgatcactgtcatcgtgtgtgaccctgggctgtgtgcctgtcttgtctcattctcagttttctcatctgtgaaaggacagaatttgactagtctattttttaaggtccttgttctttattcgattttattcctctttccgggtgtacactacttttttagtaattataatatttgaagcccaatgctttaatcagactttggcaaaaataactgatcaccttaagaagacaaatgttccagagattggagaattccattcgtggcctgagaaaggctggcttctgtgttaggccagggtatgaggatagctcagggggtgggaaccctgagagcttgtgtctggcactgtagggatggggacttgatgagccattggattaggccagcagggttttagccagaagtatcatgggccccttgatttttactgtaagtcagtttggcactggtatgtgggattatgcagtttgtatcagtcaggataggtagatagtgctgcagtaacaaacagccccaaatctcagtggcttaaaagaatcatattctattatctcatggttatatgggttaact

SEQ ID NO: 29710 - DNA, 1012 bp, Homo sapiens
ggatcccagcttagccaccgactggggggggsccccctaccgagggaggctacacaaccccaggctgctctcgggaaagctggtgattccatgatcgcatggggtccttgcggggctcagctgagaggctgtgtgtggagggtgttttgtcagttggagagtgctctacacacgctaaggttccaggccggcaactccttctgcaggtgtacaggtcaccgtgggggggccctgggatggattcagacattataatcaccacaccaggtgcgtgtcctagctgtgtgactttggtcaagttacttaacctctctggacctccaattcctcatctgtaataaagaagatgatgacctttccgtgccagtgtcctgtgagaattgaagacagcatctgtgaagtgcctggcctgccaaaagccttctggaacagtagtgatgatcactgtcatcgtgtgtgaccctgggctgtgtgcctgtcttgtctcattctcagttttctcatctgtgaaaggacagaatttgactagtctattttttaaggtccttgttctttattcgattttattcctctttccgggtgtacactacttttttagtaattataatatttgaagcccaatgctttaatcagactttggcaaaaataactgatcaccttaagaagacaaatgttccagagattggagaattccattcgtggcctgagaaaggctggcttctgtgttaggccagggtatgaggatagctcagggggtgggaaccctgagagcttgtgtctggcactgtagggatggggacttgatgagccattggattaggccagcagggttttagccagaagtatcatgggccccttgatttttactgtaagtcagtttggcactggtatgtgggattatgcagtttgtatcagtcaggataggtagatagtgctgcagtaacaaacagccccaaatctcagtggcttaaaagaatcatattctattatctcatggttatatgggttaact

SEQ ID NO: 29711 - DNA, 1012 bp, Homo sapiens
ggatcccagcttagccaccgactgggggggggccccctaccgagggaggctacacaaccccaggctgctctcgggaaagctggtgattccatgatcgcatggggtccttgcggggctcagctgagaggctgtgtgtggagggtgttttgtcagttggagagtgctctacacacgctaaggttccaggccrgcaactccttctgcaggtgtacaggtcaccgtgggggggccctgggatggattcagacattataatcaccacaccaggtgcgtgtcctagctgtgtgactttggtcaagttacttaacctctctggacctccaattcctcatctgtaataaagaagatgatgacctttccgtgccagtgtcctgtgagaattgaagacagcatctgtgaagtgcctggcctgccaaaagccttctggaacagtagtgatgatcactgtcatcgtgtgtgaccctgggctgtgtgcctgtcttgtctcattctcagttttctcatctgtgaaaggacagaatttgactagtctattttttaaggtccttgttctttattcgattttattcctctttccgggtgtacactacttttttagtaattataatatttgaagcccaatgctttaatcagactttggcaaaaataactgatcaccttaagaagacaaatgttccagagattggagaattccattcgtggcctgagaaaggctggcttctgtgttaggccagggtatgaggatagctcagggggtgggaaccctgagagcttgtgtctggcactgtagggatggggacttgatgagccattggattaggccagcagggttttagccagaagtatcatgggccccttgatttttactgtaagtcagtttggcactggtatgtgggattatgcagtttgtatcagtcaggataggtagatagtgctgcagtaacaaacagccccaaatctcagtggcttaaaagaatcatattctattatctcatggttatatgggttaact

SEQ ID NO: 29712 - DNA, 1012 bp, Homo sapiens
ggatcccagcttagccaccgactgggggggggccccctaccgagggaggctacacaaccccaggctgctctcgggaaagctggtgattccatgatcgcatggggtccttgcggggctcagctgagaggctgtgtgtggagggtgttttgtcagttggagagtgctctacacacgctaaggttccaggccggcaactccttctgcaggtgtacaggtcaccgtgggggggccctgggatggattcagacrttataatcaccacaccaggtgcgtgtcctagctgtgtgactttggtcaagttacttaacctctctggacctccaattcctcatctgtaataaagaagatgatgacctttccgtgccagtgtcctgtgagaattgaagacagcatctgtgaagtgcctggcctgccaaaagccttctggaacagtagtgatgatcactgtcatcgtgtgtgaccctgggctgtgtgcctgtcttgtctcattctcagttttctcatctgtgaaaggacagaatttgactagtctattttttaaggtccttgttctttattcgattttattcctctttccgggtgtacactacttttttagtaattataatatttgaagcccaatgctttaatcagactttggcaaaaataactgatcaccttaagaagacaaatgttccagagattggagaattccattcgtggcctgagaaaggctggcttctgtgttaggccagggtatgaggatagctcagggggtgggaaccctgagagcttgtgtctggcactgtagggatggggacttgatgagccattggattaggccagcagggttttagccagaagtatcatgggccccttgatttttactgtaagtcagtttggcactggtatgtgggattatgcagtttgtatcagtcaggataggtagatagtgctgcagtaacaaacagccccaaatctcagtggcttaaaagaatcatattctattatctcatggttatatgggttaact

SEQ ID NO: 29713 - DNA, 1012 bp, Homo sapiens
ggatcccagcttagccaccgactgggggggggccccctaccgagggaggctacacaaccccaggctgctctcgggaaagctggtgattccatgatcgcatggggtccttgcggggctcagctgagaggctgtgtgtggagggtgttttgtcagttggagagtgctctacacacgctaaggttccaggccggcaactccttctgcaggtgtacaggtcaccgtgggggggccctgggatggattcagacattataatcaccacaccaggtgcgtgtcctagctgtgtgactttggtcaagttacttaacctctctggacctccaattcctcatctgtaataaagaagatgatgacctttccgtgccagtgtcctgtgagaattgaagacagcatctgtgaagtgcctggcctgccaaaagccttctggaacagtagtgatgatcactgtcatcgtgtgtgaccctgggctgtgtgcctgtcttgtctcattctcagttttctcatctgtgaaaggacagaatttgactagtctattttttaaggtccttgttctttattcgattttattcctctttccrggtgtacactacttttttagtaattataatatttgaagcccaatgctttaatcagactttggcaaaaataactgatcaccttaagaagacaaatgttccagagattggagaattccattcgtggcctgagaaaggctggcttctgtgttaggccagggtatgaggatagctcagggggtgggaaccctgagagcttgtgtctggcactgtagggatggggacttgatgagccattggattaggccagcagggttttagccagaagtatcatgggccccttgatttttactgtaagtcagtttggcactggtatgtgggattatgcagtttgtatcagtcaggataggtagatagtgctgcagtaacaaacagccccaaatctcagtggcttaaaagaatcatattctattatctcatggttatatgggttaact

SEQ ID NO: 29714 - DNA, 1163 bp, Homo sapiens
aggtcacagtgacacagcctgggaggacttgccaagcagctgtgggcaggggtggaggcccggaggccctcagccacgggtgaccaggggacaacaggagaggccactgcaccctgactgcccgctgcctgcccatcaatggggctgttcagcagcaagggcgtgctggccttgtgccagcctctccccagccctggagctgccctgtcccacctccggccggcagcgcttcctgccccggacactgggcctgcggaagcttggctggcccctgaccagggcctgggtcacagcgcctccagcctctccgctgtcccaggcttgggagggtgacaagagggtgaaaaggacatcaygccctggcggcgaggctgtcatcactgtggtgtgtacccagcaccaggccggggtccctgctgagcctccacaccccttgggtgcttggcaccagctccaaattgacctggacgaagagattccccaatgttcagttcaggtgatgagtctgcctaagaaaacagacctcggcaaggttcccatgccggcagccccatgcttcacgcttaggcttggggaggggaaggcagatccacggctggggcggcagggctgtgggcaccaggccgggtgtggcatcaccactgcagtctcacaaccaagaggggggcactgctgtacccactttacagacgaggagacagaagcaagcagccacccgatgccagggtcacactatgacctgtggactcaaggactctgtaaaccagatcctgacacccctgctgagcacccccacaccctcctgccagcaggacagaaccctctgtcttaggccctcagtgatcctaactcccctggagcctcccatccccactatttatcttgtgatgtggtcaaacccctatccagaagctcccagaacacagcccctcaccacctgcctctgagcctctgtaaatgctgatctctccatcctgacacccttccctgctgccccattccctgaaatccactggaacatcaaaacatcaaagacccttcccatgagaagccctccctgctcactcccacgccctccactcagggacattgaggttcccactctcttggctccccctgtaccgcgtaccaaccccccaactccgccccgcccgccagtgcat

SEQ ID NO: 29715 - DNA, 562 bp, Homo sapiens
atctgaaagtgtcgcttggaaagaatcagtgatgcttggaacttgtgtgcagtagccattcgagtcctttgagctctccactttaagagccagacttttccgcccttgtgaatcttctctcaggttgagcctccctccttttgtcagtggctttaaatggatctggtttgggaaaagccaccttaataaaggaccatacattcctcctgggataataaaagcttttttgtcttttctcttaagtcctttctgatataaacacaagtatctttttggattgagtacttattgtgtccagaattggtgggttcttggtctcactgacttcaagaatgaagctgyggaccctcacggtgagtgttacagttcttaaagatggtgtgtccagagtttgttccctctgatgttcagacatgttcagagtttcttccttctggtggatttgtggtctcgctggcttcaggagtgaagctgcagaccttcgcagtgagtgttacagctcttaaggtggcatgtctggagttgttcgttcctcccatccggagttgttcattcctcccta

SEQ ID NO: 29716 - DNA, 562 bp, Homo sapiens
atctgaaagtgtcgcttggaaagaatcagtgatgcttggaacttgtgtgcagtagccattcgagtcctttgagctctccactttaagagccagacttttccgcccttgtgaatcttctctcaggttgagcctccctccttttgtcagtggctttaaatggatctggtttgggaaaagccaccttaataaaggaccatacattcctcctgggataataaaagcttttttgtcttttctcttaagtcctttctgatataaacacaagtatctttttggattgagtacttattgtgtccagaattggtgggttcttggtctcactgacttcaagaatgaagctgcggaccctcacggtgagtgttacagttcttaaagatggtgtgtccagagtttgttccytctgatgttcagacatgttcagagtttcttccttctggtggatttgtggtctcgctggcttcaggagtgaagctgcagaccttcgcagtgagtgttacagctcttaaggtggcatgtctggagttgttcgttcctcccatccggagttgttcattcctcccta

SEQ ID NO: 29717 - DNA, 1055 bp, Homo sapiens
  misc_feature (1)...(1055): n = A,T,C or G
aggggtccggagacttgcattctagtcctgactctgactttaactgaacaaaagagccaagttatggcttgtgtttccttttcctcctctgtaaaatggatgatttggagcccatgcctccttccttgttttgacaagtaaatcctttttttttttttttntttttttttntntgagacggagtcttgctctgttgcctaggctggagtgcagtggtgcaatctcagctcactgcaagctctgcctcccaggttcacaccattctcctgcctcagccttcagagtagctgggactacaggtgcccgccaccacgcacaggtaattttttgtatttttagtagagacggtgtttcaccgtgtcagccaggatggtctcgatctcctgacctcgtgatctgccctcctcagcctcccaaagtgcagggattacaggcgtgagccaccgtgcccggccaccattattctttagaactttctgccaatcttcccaacaatgctgtgagtcaacaggggtgtgtccatcttacagatgtggaaccaagactcagaatgcttggactcagaatcatagaatctcagggtcatcatgatccttagagaatgttagttcagtggttctcaaccttctgagaccctttgttcacactctctccttcaatcctactctctcagtggggagtgggggagaawgcttggcctctctttgttgactcttgagagtgtggcagaaaaagtcagctgctatggtagctgatgagttataaagcaggctctgcgatcacatatagatgcaggaatggtgagaaacagcataggatagcaataagaattcaggagcttttagttgatccactgtgttcatggccacgccagcaggaggtacgagttcccaggttcagtaaagccatctatccatcactgagtctccccgcagatgatgttattctccactgtctgcgcaaacgttttcaggttctatcttcattcttcttgtgattttaggactgtcaaatttgcttaatatcctctttctaattctgttaactggattcta

SEQ ID NO: 29718 - DNA, 1320 bp, Homo sapiens
tgcatttgaataagaaatgttgtaatttatttgagtactgatactttttgaagaaaagtatgtttaaagatagatggagagagtctaaaaggagctccttgacatttttcagaatcataaaaagttagagttgaaacttactctttttataactggataaaaccggttcttgaatagatttaatttgactccagaacattggcttcttttggctcctgggatcttagaattgaaaagcaggtgaaaggtgttctagctcactctctttccaaatacaagaaaccccttccacaatgtccttgacaagtggtcagctaagcattacttgagcacttctagggactgggagcttattacttctagagcctgttggattttagtgtaattctaagggctagaatattcctcatatattgcactgaaatccaaacactttctacccacgtctccttctattctcccccgtccgagccccgagtgtaaatccaccagtgctaattattattctccctctccttctgatctgtatctagaagaaagtaatacaatttgcagataaaatgttaaacacttctttcctaagctatataagcctagcaatttctccataaatccttttattaaacgcttagagcagaacaaaatgtttttaattaaattcaacaatcctgacttgtttaaagagattgcttgtgtttatggattaatagtcctttccaatgtccttggatttgagaacttcacagtccatccttacccttgaactttgggcatcccctggtttctcactcacagacacctgatctgttgtcctctctgggcatagagcttagaggcaagtgccttcyactctgagactctctataggctggacttttttcctggttattccctacagtcattcatattgctatttgttctaaagtagcatttttattaccttttattcatgtcttcctgaattacctctaggatcctttccacttctaaaaatgtctgtttttttctctctgcatcaggtaattacctttgttaatttaaagggattaaccaaagtatcctgtgtttattttattttttttctattttttattttggagacagggcctcactctgttgcccaggctggagtgcagtggcaaatagctgggaccacaggtgcttgccaccatccctagctaatttttgtatttttttgtagagatgaggtttcgccatgttgcccaggctggtctcgaactcctgagctcaagcaatctgcctgccttggcctaccaaagtgctgggattacaggtgtgagccactgcacccagccaaag

SEQ ID NO: 29719 - DNA, 795 bp, Homo sapiens
ctggacactgcaaataataaagagcccctaatgttctggtatgtacagttggctttctagaattaaaaaaaattttctgaagcgaattttatcatgaaatagttttaaaatacagaaaaatatagaaaaaaattgacatctatgtactcatcacctagatatagtgtaaacatttttccatatttactccaagttttttaaaaataaaagattacagatatagttgaagccttttatgttgcccagttgcaatcccactctctaattgccctcatcaragttaaattctcttctgaagctagtgtgcatctttcttatccatgttgttaaacatttacttttatgtgaatatagtattattttgtgttttatagtttatataattatcataatgtaggtattactttgcaacttcatttattcaaaattatttgagatttattcatgttcatacatgtagatctagttcattcatgttaattttttttttctttgagacagagtcttactctgttgcctaagctggtgtgcaatggcgtgatctcagctcactgcaacctctgcctcccaagttcaaatgattctcctgcctcaacctctggtgtagctgggattacaggcatgcaccaccacaccctgctaatttttgtatttttagtagagatggtgtttcaccacattggccaggctggtctcaaactcctgacctcaggtgatctggccacctcagcctcccaaagtgctgggattataggtgtgagccaccgtgcccagcctcatgttaattgttgaata

SEQ ID NO: 29720 - DNA, 556 bp, Homo sapiens
ttgccttgacatgttctttttctcaattttgaaatacaaatatcctaaattttcttctaatccatttccctgtctccattttcactagtaccattttggcccaagacaccacaatcatctctcacctatacaactgaagcatgtttcttatctactctggacttcttccaatccattctcaagtctcctttttttgcatcctggtctatctttcctaatttcctcacatctgtctttcaatttactacctctttctgaagctatatctratttgttgtttaactctgaaattgactatttaatttcaatgacaatattcttcttcttttttttttttttttttttttttgagatggaatcttgctttgtcatcaggctggagtgcagtggcatgatctcggctcactgcaacctctgcctcccgggttcaagcaattctcctgcctcagcctcccaagccacggagactacaggcacatgccaccatgcccagctaatttttgtattttagtagagacagggtttcatcatgttggccaggatggtctcaatctct

SEQ ID NO: 29721 - DNA, 589 bp, Homo sapiens
ctatcgtttcctttgtatgtcatatttcatattcattgcacaatattgacttcctgttgctcaaatgtctcctcccaaattctgctaaaattgtccttcttagttaactgagatttgaatctccattcatcagtccgaaaaaagagaatgcattcttgaaacaattcttttcttactgatwccataagtcagataccatttgcaggtctaaactaatatgatcccaaacacagagaaatgcaaactagatggtctcaactggtagaatctgatgttactgctcttgttttgcatttattgccactaaacccaatccagaagattcacatggacactgaaacattttctttgaagcaacatacactgcacacaattacatattttgtactttactagaaaatctagaagtccaaactcttggaatcattacatggggcaaactgacttttctttaaaaagtcagtcccttgctgaggtctaaaataaagtggctcacatttgttttgcctaattctactccagcatgttatataacatgatccaagtatagttgagtgcattttaacaaaatctgtattgagtgttctta

SEQ ID NO: 29722 - DNA, 583 bp, Homo sapiens
cattgttagaagaatatatgaatattatttttgtaccagatattccatcaggagcagaaacgttcacagaaaaggggcacaaattttaggggcagagtaagatgtgaaccatacaatcagctctgagcatcctcctctgcccatttgcctcatatggttttaaggatggtaagtgcagataaagctgtgaatgagaagaggaacagagcagtcatcatggaacatgagagagaagctatgtattcaaggccccagaaccacaagtagaaggagcctggatcccagataattttgtgggtcccatagtcctgaattgcctgcccaggctttaacatgaaagagaacaatttctctatttcatttaaaccacagttattacagggtctctttcaacagccaaacctattacctaactaacacaagtcatgaccaggtagtcttgctaacagaatatctcatattcaattaagtgttttaaatatataccattgttactgcacctgaacaaccgaaaacttctgtgagaagaccaaaartctatacttagtagaaattttccttcttaattttagcatctacagaa

SEQ ID NO: 29723 - DNA, 1446 bp, Homo sapiens
tccacccccaatgacccaaacacctcccactaggcgccacctcccaacacattcaggatcacatttcaatatgaaatgcatattgaaactatagcatagctattatcagttaaaaggagaaaatgggggcttccaattagctgaagataatggtggcagccagatgcccatatcccaatatttcctccccaaatgatatagatcaaaaaagggagaaaggaaaagacacaaaaatcacacccttggcataccttgaggacagagagttaaaaataactttaactaaagagagaaagaataccaaatccaagcacaggaaaactcatgcttccttccagcccaccccactacagggctttgaggcaggcagagagaaagggagctgatctataaggaagagtgaaggagagaactagtatagaggcctataggtgatctaaaaccactcccagccacaagtccacccaaagcctgaaaatacaacacgaggtgtccaggtcgatcatggtgcagtgtacaggrcagtcacaagcccatgcgacttgagaggcagccttcagaatgcacagcttctcaggtgaggagaacaggagaaaggaaggagggagtgccctttggcaactgggtgataagacggtgaaggagcaaaaggggatgattcaagtggccactgttaagagcccacagatacaagttattgtatagaatggggaagcatgagggaaaatgtgccagagagaataccggaaggaatattaaatcagagagcttagaaagaaacaaatcagaaaacgaggcagaggagccatgcggaagggtgagatgatgtaatggaaagggggatggaggacagcagcatgaacaagatctatgagaggtgcatgaaattggggagtgaaggagccggctgggggtgggacttgctgggacacagcagcttcagtggtcaaacttggtgttcatttcaggacaactcttgctcaggggaagtaggtgcataggcacatcgacatagacacacacctgtctcccagcaagcctctgccagaggatcccagggccggcaggcaggcaaagaagtagggcacatccaaggggctctgctgtaaagaaagagtatgcactgggatccagacgacagaagaggaggggacatgtggtgattatggacatcatagaaaagaaatgctgtagaattcagatcagtccaaaacgcaccatgtaaaacaaaagaagagagggcaactttggtaacactgattaacatttaggattttgaaaatttatggtgtttgcaaaacctgcatttgagttaagtattttgcaggggagatgttattggttatttgtagaacatcatatctttccagttacaaaatataaattcattttgcagcacaagatatgatgtctcatctttgaagttcttttttctctatgtatgca

SEQ ID NO: 29724 - DNA, 549 bp, Homo sapiens
gaaagtccagaaaactttaatgagctagcaacatgtcttttatttcttcaccagaattgttggcacctggatggtaaatcttcaagttactgtgaaacaagatcacaaacgaaaaagtaacataggaaatactaaagactgggacattttatcagattttactcagtttcatatacagaaggctataggtaaggatgaaattatacagtgtaatagaatgcatatatgccacagaaactcagtaatgctcctctttcttgtattgtaaaaacaaagatacactatcatgagtgaaacaatgaaatacctccttcagaattgggactgttgcatctgcatttttgtttctggcgcaatgcctgccacacggtagttaataaatgtttctgaattaatataggaaggatgaaattatatagtaccagagtggtatcttatatgaggcctagaaactcagcaatgttcttctttcttgggtagtaaagacaaggagaggaggccctgtcactgagaactttacatttttttaarttttcccaacatttagca

SEQ ID NO: 29725 - DNA, 845 bp, Homo sapiens
atgtaagcctgttctttcaccgtttatcagatagttaatttgtactggggcagttagtgctcagcttttcccattaactgtctgttatctttactcattttacttttcagctgtttcattagaagttatatccccggcagcctccatatattatgctctgaggaagctctcaggatgctgagaggatgcagtgtgaagcatcagattcctgcattaggaatcagttgttctacamttccttaccagctttcttactccataatgcctctgagttatctgtaaattggaaataatacaattctacattattgctagatcagataaatgaattatcaaatgggaagatgtgtgtgtaaaaggactctgaaaaaattcaaagcaccataaaccgtataatatttactgtacccagccaggcatggtggcgcatgcctgtaatcccagtactttgggattctgaggcaggcggatcacctgaggtcaggagttcgagaccagcttggccaacatgaccaaaacccgtctctactaaaaatacaaaaattagctggacgtggtgacttgtgcctgtagtcccatcttctggggagactgaggcaggagagttgcatgaacctgggaggtggaggtttcagtgaaccaagatcatgcctctgcactccagcctgggcaacagaatgagactccatctcaaaaaaaatgagactccatactgtaccctatgtttaatactgtaagtataaagtcattttatttggagttgatatatttggaccacaaagaagggaagtcagatgaactgaagatgtgcatctgaaaccatatcatgtttattaatcacctgg

SEQ ID NO: 29726 - DNA, 845 bp, Homo sapiens
atgtaagcctgttctttcaccgtttatcagatagttaatttgtactggggcagttagtgctcagcttttcccattaactgtctgttatctttactcattttacttttcagctgtttcattagaagttatatccccggcagcctccatatattatgctctgaggaagctctcaggatgctgagaggatgcagtgtgaagcatcagattcctgcattaggaatcagttgttctacaattccttaccagctttcttactccataatgcctctgagttatctgtaaattggaaataatacaattctacattattgctagatcagataaatgaattatcaaatgggaagatgtgtgtgtaaaaggactctgaaaaaattcaaagcaccataaaccgtataatatttactgtacccagccaggcatggtggcgcatgcctgtaatcccagtactttgggattctgaggcaggcggatcacctgaggtcaggagttcgagaccagcttggccaacatgaccaaaacccgtctctactaaaaatacaaaaattagctggacgtggtgacttgtgcctgtagtcccatcttctggggagactgaggcaggagagttgcatgaacctgggaggtggaggtttcagtgaaccaagatcatkcctctgcactccagcctgggcaacagaatgagactccatctcaaaaaaaatgagactccatactgtaccctatgtttaatactgtaagtataaagtcattttatttggagttgatatatttggaccacaaagaagggaagtcagatgaactgaagatgtgcatctgaaaccatatcatgtttattaatcacctgg

SEQ ID NO: 29727 - DNA, 845 bp, Homo sapiens
atgtaagcctgttctttcaccgtttatcagatagttaatttgtactggggcagttagtgctcagcttttcccattaactgtctgttatctttactcattttacttttcagctgtttcattagaagttatatccccggcagcctccatatattatgctctgaggaagctctcaggatgctgagaggatgcagtgtgaagcatcagattcctgcattaggaatcagttgttctacaattccttaccagctttcttactccataatgcctctgagttatctgtaaattggaaataatacaattctacattattgctagatcagataaatgaattatcaaatgggaagatgtgtgtgtaaaaggactctgaaaaaattcaaagcaccataaaccgtataatatttactgtacccagccaggcatggtggcgcatgcctgtaatcccagtactttgggattctgaggcaggcggatcacctgaggtcaggagttcgagaccagcttggccaacatgaccaaaacccgtctctactaaaaatacaaaaattagctggacgtggtgacttgtgcctgtagtcccatcttctggggagactgaggcaggagagttgcatgaacctgggaggtggaggtttcagtgaaccaagatcatgcctctgcactccagcctgggcaacagaatgagactccatctcaaaaaaaatgagactccatactgtaccctatgtttaatactgtaagtataaagtcattttatttggagttgatatatttggaccacaaagaagggaagtcagatgaactgaagatgtgcatctgaaaccatatcrtgtttattaatcacctgg

SEQ ID NO: 29728 - DNA, 991 bp, Homo sapiens
tgcatggctacttttaaaaatattttttgtagagatgggggtctcactttgttgcccacactggtcttgaactcctggcttcaagcaatcctcccaactcaggctcccaaagggctaggattataggtgtaaggcactatgcccagccctcttttattggaatcaatagtatattaagagaggataatctgtaaacaatggagaaagtgtcttgtttaataaattgtgttggaataagtgtttggcactttgccgggaaaaattcacttacatcttatagcaatgacttgtaatttccccagtattcattcccctattcctctttaacaataaacctctgggttttagtagggcacctcaatgcccagctgcattcctcctgctttctggcaggtaggtaaacagtgcaacttcctgggtactttcttaaaaaggaaactgcatggtcttcattctttctgccttcccatggcrgagcacctagaattcagacttgccagtggcaaaccagcagtggccatgacgatgaggacaaaaatctgggagatgacagagcagttagagggaaggggcttggatccctggatgatcttatggaacagagcctcctatcctgccctgacctcctcccttaacaactcttagcatcgtatagcaaagtaattatgaaatggaattaataattgaatataaaaaacagaagccacagacaaaagaaacagacagttcataggaaaggaaacaggaatagctcttaagcatataccagaacattaatttattcttaataagaaatgacaaattaaaatagcattttaacctctcagattggcaaataattaatatgaactgataaaacaaaaacagtaagcttcgagtaaataaatgaggaaaggatacaaataaaaatcatacagaaaaggaaatacatattgaaaacaccatgccaacatttccatatattaattggcaatgttgataataatatggt

SEQ ID NO: 29729 - DNA, 991 bp, Homo sapiens
tgcatggctacttttaaaaatattttttgtagagatgggggtctcactttgttgcccacactggtcttgaactcctggcttcaagcaatcctcccaactcaggctcccaaagggctaggattataggtgtaaggcactatgcccagccctcttttattggaatcaatagtatattaagagaggataatctgtaaacaatggagaaagtgtcttgtttaataaattgtgttggaataagtgtttggcactttgccgggaaaaattcacttacatcttatagcaatgacttgtaatttccccagtattcattcccctattcctctttaacaataaacctctgggttttagtagggcacctcaatgcccagctgcattcctcctgctttctggcaggtaggtaaacagtgcaacttcctgggtactttcttaaaaaggaaactgcatggtcttcattctttctgccttcccatggcagagcacctagaattcagacttgccagtggcaaaccagcagtggccatgacgatgaggacaaaaatstgggagatgacagagcagttagagggaaggggcttggatccctggatgatcttatggaacagagcctcctatcctgccctgacctcctcccttaacaactcttagcatcgtatagcaaagtaattatgaaatggaattaataattgaatataaaaaacagaagccacagacaaaagaaacagacagttcataggaaaggaaacaggaatagctcttaagcatataccagaacattaatttattcttaataagaaatgacaaattaaaatagcattttaacctctcagattggcaaataattaatatgaactgataaaacaaaaacagtaagcttcgagtaaataaatgaggaaaggatacaaataaaaatcatacagaaaaggaaatacatattgaaaacaccatgccaacatttccatatattaattggcaatgttgataataatatggt

SEQ ID NO: 29730 - DNA, 587 bp, Homo sapiens
tgcctaagtttgacccggcaagattcmaacttgcgtctgttggcctccagagcccttgctctactcaaaatggggagaaatgagtagatcttgctgtggtggtctctgggcaaaatggggaagtggatggtcacctgagttaggtcacctgctagaaattccttctgaaatccttttcataaacataaacatacataactagacaaagacaaacaaaaggccctccaaaaccaagttccaactttcagaaatcaagagtatctctcccaagcagtgccctttattctccttccaatttagggtaaatcccctcaaagaaggcccttcctgttgccagggagggtcaacgaaacctcagaaaggtcaaaagacctctgaggaggccagcaaactaggaaagggggaagaggtgctggctgcacagagaaaacttaccaaagatgtctttcaaaaccagaaactatttctttgctgcaagctatttatgcactgaaggtcaccactgtcccattgacaagcaaggcactggagacagcccccagttcaatggaaccaagcaactgcttggacttgtctccaggtctgtc

SEQ ID NO: 29731 - DNA, 587 bp, Homo sapiens
tgcctaagtttgacccggcaagattccaacttgcgtctgttggcctccagagcccttgctctactcaaaatsgggagaaatgagtagatcttgctgtggtggtctctgggcaaaatggggaagtggatggtcacctgagttaggtcacctgctagaaattccttctgaaatccttttcataaacataaacatacataactagacaaagacaaacaaaaggccctccaaaaccaagttccaactttcagaaatcaagagtatctctcccaagcagtgccctttattctccttccaatttagggtaaatcccctcaaagaaggcccttcctgttgccagggagggtcaacgaaacctcagaaaggtcaaaagacctctgaggaggccagcaaactaggaaagggggaagaggtgctggctgcacagagaaaacttaccaaagatgtctttcaaaaccagaaactatttctttgctgcaagctatttatgcactgaaggtcaccactgtcccattgacaagcaaggcactggagacagcccccagttcaatggaaccaagcaactgcttggacttgtctccaggtctgtc

SEQ ID NO: 29732 - DNA, 1009 bp, Homo sapiens
tttttttcccacccgtctgggcctccaacatggcccaggacctcccagtggtggtcccccttggcaggcactggtgccaatggagcctgaggatatcccagactgaaagctaagcaaggttgggtctggctggggcttggatgggggaccacctgggaagactgggagctggaggcttttggcttcctgctgccttcctgctttcccccacttctcagcccccttctcaacagccccctctctggctgcccctttcttgcttacctgcacccccaccgtggcccggtgcctccccgtgggtgtccacctcggcagcttcccaactgccacctgactctctggctccccatttcccgcctacctgcatccccgttgagacctggggattccacctaggggtctgttccagcagccatcagtgccatagcagactgagggcaccccataccggaagctaagcaggatgggacctgtctggttcttggatggggsacaaccttaggagaccaatggctgaaggtgtttggattcctactcccttcctgcttttcctcacatgttggcccacttccaaaccatcccctgactctctggcttcctctttcctgcctacctgtgccactgccatggcccagtgccccccagtgtgggtcccccatggcagtccctggcaccatagcagcctctgggcgtccaagtacaaaagataaacagggttaagcctggctggggcttggatgggataccacctgggaagatctggggtttcaggtttttggcttccattccttttcactttttcctgcttgtcgccctcttcctaactgccccctgactctctggctttcccttttttcccatttccagctcacctgcacccctgctgtggaagaaaacctacctataggggtactccctggcagcccatgaagccatagtagcctgaaagtgctcaagcccagaaaacaatagttacttctgtgagatgaatggaaactatgttccaatg

SEQ ID NO: 29733 - DNA, 572 bp, Homo sapiens
ggattcctttttctttgagccttgaaattacactatataatttttttcttctttttcatggcatttctatacctttactgcaattctagcattatttataatattttacactgtgaagttttattttctcatgtttgtaaacatactcataactttacattttattcttttcactattatatttttgcatattatttcagtttctataaataaaaacttaaatgtctaaataatagtccatcaaaagtactgtctataatttaactactttctaactaktggagttttaagttgttttttgattttagcattataaatgtaaataactttgatcataaaaagcttcagaatgttttgaagaataaaagatctgtcttttcccagaacatacctatttatttaggttaagctgaaaagtcaatttttttttttttgatagcaggcaaagtcttgttgatacttacagactgcagagaaaatataaaacaaaggtacagcctttatgcttgaaggacatacatgttttgttgttcctcttctagagatggcaagcctgtctcatctttattatg

SEQ ID NO: 29734 - DNA, 369 bp, Homo sapiens
aaatgcaacccttaaattatattgtaaagaacagagaggggaaaataatgacaattgtgaactatatagaatacacaggaaaaagagatataaaaagagaaataaaaaaagagatataaaaagagatataaggaaactaatgaaatgggataagcgtcacttaaaatgactggctgaagtaaaatataaaaccttaagttttgtgctcagggagcgctgtatagacacagaataaaggcaagaactaaaagaagcttttcttgaacaattataaacttccatagggcttgatctggaccgtggctattctatttatgttaytgcaggtgaatcatgaatcgatgatgatacacagttatacatttctta

SEQ ID NO: 29735 - DNA, 608 bp, Homo sapiens
tgattgatgtgctatgtagaaatgcgttgtctaatctccaaatgtttgaggattttctagctatctttctgttattgaattttagtttaattctattgtggtytgagaccagacattgtaagatttctgttcttttgaatatgtaaatgtgtgctttatggcccataatgtggtctatcttggtgaatatgtcatgtgagcttcagaagaatgtgcattctgctgttgttggatgaagcagtcttagatgttaattatattcagttggttgatttgtgtttttgaattcaactatgtcctttcaggttttctgctggctagatctatccatttctgatagagagagtgttgaagtgcaattataatcgtggatattcccctttgcagttcagtttttgcctcacatattcttatgctatattaggtacatacacataaaggattgctatatcttcttgaataattgatggccttatccttactcatgatgttgttcagatatgccatttatgatatctgggcgaaagtacttcatgtgtgaaaattgctaaaagtgtaagaaattaatgccacattttgtatataaaattttctattgacattggaca

SEQ ID NO: 29736 - DNA, 608 bp, Homo sapiens
tgattgatgtgctatgtagaaatgcgttgtctaatctccaaatgtttgaggattttctagctatctttctgttattgaattttagtttaattctattgtggtttgagaccagacattgtaagatttctgttcttttgaatatgtaaatgtgtgctttatggcccataatgtggtctatcttggtgaatatgtcatgtgagcttcagaagaatgtgcattctgctgttgttggatgaagcagtcttagatgttaattatattcagttggttgatttgtgtttttgaattcaactatgtcctttcaggttttctgctggctagatctatccatttctgatagagagagtgttgaagtgcaattataatcgtggatattcccctttgcagttcagtttttgcctcacatattcttatgctatrttaggtacatacacataaaggattgctatatcttcttgaataattgatggccttatccttactcatgatgttgttcagatatgccatttatgatatctgggcgaaagtacttcatgtgtgaaaattgctaaaagtgtaagaaattaatgccacattttgtatataaaattttctattgacattggaca

SEQ ID NO: 29737 - DNA, 610 bp, Homo sapiens
tgagacttctcctaccttttctaaatagccccaaatggatctgccaacttgtttacaacatgcttaaacctacactcaccatttgcactactttcatgggtctgtctttgcacgagtagggagaggacaagctgtctccagcacctccacccatgtctctgaggcaggtcatgctctcagaagtctccctctaggcccccacccacatcgctgtgatctgacagtggagcacacactcctttctcactcactkaagcttgcccaaccctccctgcttacgtcagccccccactgctactctcacaattataacgattagaaatatgtacactattttaagttactttgattaatatgtaaacatataacaaataacatgtcattaaattttaagcagcctggtgggagagatgatgtttccaagggacttttcctgaccatctcatatcacccactaaggagtttctcattctaccgaaaaggaatgattcttatgcactttaatttccaatatgtgtataataacattcatgtagtcaattactaagcactgatctccatcttcaccttcaaaaactttcaaaatattaaaaaggtaacagtacacaaa

SEQ ID NO: 29738 - DNA, 535 bp, Homo sapiens
gggcacacttacgttggttctccaaagttgaataaatgttattagctgagcaaaacaggagaaaacagtacatgcggaataatcaccatgtctaaagatgctaaaatgtgaaaccaactggttaagtgccttggataaagtacagcgatgaaaggtagaaaaaaaatattgtctgcaaagataatcttatgtgaacacttgctttggggccaagcatcatagcatatgcctttgtatattatataatttctcataacagcctttgtggtagaatgtcagtgtaggttaagctgtgctgaggtaacaaacaaccctcaaatatcagttgcttcatctaatgaatgtttatttctcatccacacatagtctgctgtggatttgagtcattcctcaggacagttgtcttctgtgtgtagcctcagcattctatctccttaatttctawggaaccctcgtattcctatgttttcacattcagcaaaggaacgtctggagaattcagtaccagtaattaaatatttatacacagaagtga

SEQ ID NO: 29739 - DNA, 535 bp, Homo sapiens
gggcacacttacgttggttctccaaagttgaataaatgttattagctgagcaaaacaggagaaaacagtacatgcggaataatcaccatgtctaaagatgctaaaatgtgaaaccaactggttaagtgccttggataaagtacagcgatgaaaggtagaaaaaaaatattgtctgcaaagataatcttatgtgaacacttgctttggggccaagcatcatagcatatgcctttgtatattatataatttctcataacagcctttgtggtagaatgtcagtgtaggttaagctgtgctgaggtaacaaacaaccctcaaatatcagttgcttcatctaatgaatgtttatttctcatccacacatagtctgctgtggatttgagtcattcctcaggacagttgtcttctgtgtgtagcctcagcattctatctccttaatttctaaggaaccctcgtattcctatgttttcacattcagcaaaggaacgtctggagaattcagtaccagtaattraatatttatacacagaagtga

SEQ ID NO: 29740 - DNA, 782 bp, Homo sapiens
atttgcttgtggaattatttgttagcttccccccgcatgtgcatctgattgctccctggaatgtatgtcccctgaatttagcatgagactacagaactggtagatgtcagtaactgttgattttctacacccgagagacatgcttttgatggaaacaagccagtaaacccaaatcttttcttccttggggatatgtaatcacccaagcagtaaaggtagttacagacttttagaacaggaaagaacctcagggagttactctttattgcatgtaacaggtcatttatatactttatatcttttctttctcataataatattaaaaggtaaatatggccacctgcatatcatgagcaaggaggctaaggctcagagatgttaattctcttgcccaaggtaactcatcttgaagtagtagaagggcttctctttgtcttcaaaatccatgttctactattttattctgcttcttaagggaaatgaagctttgatcatcactagaataccatttagggtaagaaagctgaaagagtcaacattaagtaaaaaaaaaaaaraatcatgaagtggcagttctttacagtgtagaaacagctaaggcatggccactgagcaagtattagatggctaccatctaatgccaaaccagtgttttgctaagatgccaaaggagagaggggcttcatccttaaatggcacgaaaaaaccctgaaacccatacagcaaacaggtttgaataacacagcagcaagtatacagcctctggggccagactgtgggtt

SEQ ID NO: 29741 - DNA, 619 bp, Homo sapiens
tagacacagaagggggacagagagaaagagagagagaacatgtcagtgattgagggagggcattactgtcttgatgacactgttgagttcctagatgcagtatccaggttatgggactataaatcctcttttttacataagttactttgagtttctatgactttccgtcaaaggagtcttgagaagtatagttctatgcaactatttaatcatactgaaatcataattgtagaagaaggcatatgcttatttattaaaggtaaagagtgcttccatcccctctgcctcccctgggcaactctaagagcaggacactctagtgcttawaagatcagattcaggcttctgagacactcctctcatgttgctttaaggcaaggccccctaaactggtagcctgatcctctagggattctatggaagagtgctattatgtctatgcaaacatgtgctcttctggggaaagagtctgtatttcatcacatagtaaagggaatggtaaacaaaaagaggttaaaatcactgttggatgataaaaagtattatgttaaagcctgcatttacacacctcccagtgtcaggtagctagactttttaattagagaatttgaaattatga

SEQ ID NO: 29742 - DNA, 1131 bp, Homo sapiens
tgtttatttgtggcagaattagattagtttttaaggaactgtgtttttcttttcctagaagaggggcccctttctagctatacatctccaccaaagacttgcctttcccttgccagatctaaggacacaggcctggggtctgccacaaactgcaaagtaccatgtctcccagagcatgttccagaacccctgtccacagatgctctgcaaagaaggtttccagggcactgggtttagctgcatgctacgcttctatacaagagcacaccagagtctccacaccactgctaaagtaaaacatccaaactttttgyatttggttggctatttctgaaactttttttttttttaaggaatatctgtccaaggggtatggtttgttatggtcgtgtcatagatactggagaaggagcgatttgtgggtagtgtctcatggtacagtggaaacagctcagtcacagggtgtgaatttgagtcctggctctgctttgtgactgggcttgagaactctgggctgacctataaaaacctgacattgggggttgaattaaaccagtgggtttgtccccatgagaagtcatggctaaactatgcatagaaaacgactggaaagaaacattaacagtgactatctttgcacagtggaacaggagtatgttttattcacctctttatactttcaaaaatattttaaagcagtttctaaaatagcccttaaaatcaagaacaaaagtgttattgaaacaagcaaaaatatcttgaaccatgctatacctaatgggtttgcatctgctgtggctgaggtttccccagcagagtttggtacatggcagcaccaggctgcctaccaggccttgtgccaagggctaccagcaggactcaagctggaaccccgatgggaaaggacccacaggctggtcaaacaggtgttttaaagggcctggggaaaggccagctgcccctggctaggtagttaaaactgtgtatgccttcccttgtacaatgtgggactttggtggaactgcctgggagaacttcataattactaccctgtatgtcatgccccttgcaggtaaaacagaagtggcagagcagaggtcaaaggcacagatcagcaaagggaatcctact

SEQ ID NO: 29743 - DNA, 616 bp, Homo sapiens
acattttccacatacacaccctccttatatgattcagcttcaggattcatgcagagcttgactcttttgaacttatttacaagttttatcattatacttgcccacattatgcaagcagttgcaatctcccctaattctctggctttaattatataattgaataagccaaaagctcatttttcccaggaaacattaaacattaccatcttaatgaaattcttaatgaaatggtccactatgcatgcaaatgaccagtagtggctaggccactagcttttcactgggcaaggcaatagaataaatgctcttttgtcagtyactggaaatggcagttcccacccacacttttggctggaatgataattccataagactagaggatgagcctctgtgagatacatggatataattaagactggatgaaaagagtttaaatgaagtaggaactgatctcaacctataaaaatcaaaacttattttcaagactgaaagagctcacttaaacttctcttgccaattaaaaaaaaagttatcaactatccgccttattctccagagagtagaggtctgaaaaattaacagtattaaacttacttctcaacttactttcaggact

SEQ ID NO: 29744 - DNA, 1147 bp, Homo sapiens
ttcatgaattgtttagcaccatcttcttggtgctgttctttttctccttctccttctccttctcctccacctcctcctcctcctccttcttcttcttttttattttttgagacagagttttgctcttgttgcccaggctggagtgcaatggtgccatctcagctcaccgcaacctccacctcccgggttcaagygattctcctgcctcagcctcccaagtagatgggattacaggcatgtactaccacgcctggctaattttgtatttttagtagagacggggtttctccatgttggtcaggctggtcttgaactcccgacctcaggtgatccacccacctcagcctcccaaagtgctgggattacaggtgtgagccaccagagctggcctcactgctgttcttgtaaaagtgaatgagttatcacaagatatggttgtttaaaagtgtgtagcacctcctccctccctctctctctcttgccctgctctggccatataagacttgactgctttccttttgtattccaccatgagtcaaagctccctgaggactccctagaagcagatgctgccatgctggggaactgtgagccaattaaacctcccttctttataaattacccagtctcagatatttctttacagcagtgtgagaacagactaatacaacgtacttcagattaagcttattggtcttaatgctctactgctaaaaattgccaccttgccaggactcgtctatggttcgtatttcacaacttgcatcttccagcctaaatactcagttccccaagggggctttgagattctgcttcctgagcctgggagctagacagaatgacgtattgattagaaaggacagatatccaagccctacctgtttcatgtattacccacacccaaaacagtaactgcaaatctaaagaattgatgaaaaatgtaattcagaaactttctctccagttttttatatatttcagttttacatatttagaatcgggccctccatgatcaaaaagggaaagtgccttcttggtaccaggaaagtccagcccccaaggatactgcaaaacagcaaccagttgctccaatccccacacgaccccagctttggatggatggaagatgcaggtgcaggttgaaaaa

SEQ ID NO: 29745 - DNA, 1147 bp, Homo sapiens
ttcatgaattgtttagcaccatcttcttggtgctgttctttttctccttctccttctccttctcctccacctcctcctcctcctccttcttcttcttttttattttttgagacagagttttgctcttgttgcccaggctggagtgcaatggtgccatctcagctcaccgcaacctccacctcccgggttcaagcgattctcctgcctcagcctcccaagtagatgggattacaggcatgtactaccacgcctggctaattttgtatttttagtagagacggggtttctccatgttggtcaggctggtctygaactcccgacctcaggtgatccacccacctcagcctcccaaagtgctgggattacaggtgtgagccaccagagctggcctcactgctgttcttgtaaaagtgaatgagttatcacaagatatggttgtttaaaagtgtgtagcacctcctccctccctctctctctcttgccctgctctggccatataagacttgactgctttccttttgtattccaccatgagtcaaagctccctgaggactccctagaagcagatgctgccatgctggggaactgtgagccaattaaacctcccttctttataaattacccagtctcagatatttctttacagcagtgtgagaacagactaatacaacgtacttcagattaagcttattggtcttaatgctctactgctaaaaattgccaccttgccaggactcgtctatggttcgtatttcacaacttgcatcttccagcctaaatactcagttccccaagggggctttgagattctgcttcctgagcctgggagctagacagaatgacgtattgattagaaaggacagatatccaagccctacctgtttcatgtattacccacacccaaaacagtaactgcaaatctaaagaattgatgaaaaatgtaattcagaaactttctctccagttttttatatatttcagttttacatatttagaatcgggccctccatgatcaaaaagggaaagtgccttcttggtaccaggaaagtccagcccccaaggatactgcaaaacagcaaccagttgctccaatccccacacgaccccagctttggatggatggaagatgcaggtgcaggttgaaaaa

SEQ ID NO: 29746 - DNA, 1147 bp, Homo sapiens
ttcatgaattgtttagcaccatcttcttggtgctgttctttttctccttctccttctccttctcctccacctcctcctcctcctccttcttcttcttttttattttttgagacagagttttgctcttgttgcccaggctggagtgcaatggtgccatctcagctcaccgcaacctccacctcccgggttcaagcgattctcctgcctcagcctcccaagtagatgggattacaggcatgtactaccacgcctggctaattttgtatttttagtagagacggggtttctccatgttggtcaggctggtcttgaactcccgacctcaggtgatccacccacctcagcctcccaaagtgctgggattacaggtgtgagccaccagagctggcctcastgctgttcttgtaaaagtgaatgagttatcacaagatatggttgtttaaaagtgtgtagcacctcctccctccctctctctctcttgccctgctctggccatataagacttgactgctttccttttgtattccaccatgagtcaaagctccctgaggactccctagaagcagatgctgccatgctggggaactgtgagccaattaaacctcccttctttataaattacccagtctcagatatttctttacagcagtgtgagaacagactaatacaacgtacttcagattaagcttattggtcttaatgctctactgctaaaaattgccaccttgccaggactcgtctatggttcgtatttcacaacttgcatcttccagcctaaatactcagttccccaagggggctttgagattctgcttcctgagcctgggagctagacagaatgacgtattgattagaaaggacagatatccaagccctacctgtttcatgtattacccacacccaaaacagtaactgcaaatctaaagaattgatgaaaaatgtaattcagaaactttctctccagttttttatatatttcagttttacatatttagaatcgggccctccatgatcaaaaagggaaagtgccttcttggtaccaggaaagtccagcccccaaggatactgcaaaacagcaaccagttgctccaatccccacacgaccccagctttggatggatggaagatgcaggtgcaggttgaaaaa

SEQ ID NO: 29747 - DNA, 1147 bp, Homo sapiens
ttcatgaattgtttagcaccatcttcttggtgctgttctttttctccttctccttctccttctcctccacctcctcctcctcctccttcttcttcttttttattttttgagacagagttttgctcttgttgcccaggctggagtgcaatggtgccatctcagctcaccgcaacctccacctcccgggttcaagcgattctcctgcctcagcctcccaagtagatgggattacaggcatgtactaccacgcctggctaattttgtatttttagtagagacggggtttctccatgttggtcaggctggtcttgaactcccgacctcaggtgatccacccacctcagcctcccaaagtgctgggattacaggtgtgagccaccagagctggcctcactgctgttcttgtaaaagtgaatgagttatcacaagatatggttgtttaaaagtgtgtagcacctcctccctccctctctctctcttgccmtgctctggccatataagacttgactgctttccttttgtattccaccatgagtcaaagctccctgaggactccctagaagcagatgctgccatgctggggaactgtgagccaattaaacctcccttctttataaattacccagtctcagatatttctttacagcagtgtgagaacagactaatacaacgtacttcagattaagcttattggtcttaatgctctactgctaaaaattgccaccttgccaggactcgtctatggttcgtatttcacaacttgcatcttccagcctaaatactcagttccccaagggggctttgagattctgcttcctgagcctgggagctagacagaatgacgtattgattagaaaggacagatatccaagccctacctgtttcatgtattacccacacccaaaacagtaactgcaaatctaaagaattgatgaaaaatgtaattcagaaactttctctccagttttttatatatttcagttttacatatttagaatcgggccctccatgatcaaaaagggaaagtgccttcttggtaccaggaaagtccagcccccaaggatactgcaaaacagcaaccagttgctccaatccccacacgaccccagctttggatggatggaagatgcaggtgcaggttgaaaaa

SEQ ID NO: 29748 - DNA, 1147 bp, Homo sapiens
ttcatgaattgtttagcaccatcttcttggtgctgttctttttctccttctccttctccttctcctccacctcctcctcctcctccttcttcttcttttttattttttgagacagagttttgctcttgttgcccaggctggagtgcaatggtgccatctcagctcaccgcaacctccacctcccgggttcaagcgattctcctgcctcagcctcccaagtagatgggattacaggcatgtactaccacgcctggctaattttgtatttttagtagagacggggtttctccatgttggtcaggctggtcttgaactcccgacctcaggtgatccacccacctcagcctcccaaagtgctgggattacaggtgtgagccaccagagctggcctcactgctgttcttgtaaaagtgaatgagttatcacaagatatggttgtttaaaagtgtgtagcacctcctccctccctctctctctcttgccctgctctggccatataagacttgactgctttccttttgtattccaccatgagtcaaagctccctgaggactccctagaagcagatgctgccatgctggggaactgtgagccaattaaacctcccttctttataaattacccagtctcagatatttctttacagcagtgtgagaacagactaatacaacgtacttcagattaagcttattggtcttaatgctctactgctaaaaattgccaccttgccaggactcgtctatggttcgtatttcacaacttgcatcttccagcctaaatactcagttccccaagggggctttgagattctgcttcctgagcctgggagctagacagaatgacgtattgattagaaaggacagatatccaagccctacctgtttcatgtattacccacacccaaaacagtaactgcaaatctaaagaattgatgaaaaatgtaattcagaaactttctctccagttttttatatatttcagttttacatatttagaatcgggccctccatgatcaaaaagkgaaagtgccttcttggtaccaggaaagtccagcccccaaggatactgcaaaacagcaaccagttgctccaatccccacacgaccccagctttggatggatggaagatgcaggtgcaggttgaaaaa

SEQ ID NO: 29749 - DNA, 851 bp, Homo sapiens
ggaagacttggagacaagtgatcatttcattgtagtgttttctgacctcaaggtgactccccaagaacgtacctgaatgactggggctgtttgttccatttccaattcttcaaaaatttttatccatagttaaattcagaagctcagcaaattaaggcagtaatatcaaaactaataactttatgaaatcttgatgaaaaacagaattcaaaactagaagactcatgtttcatcttgcctttgcattaacttactgtttgatctaggctggtaaggcaatctttttaggcctaaattatctcaggattcaacttacattgctataacctactagattctaccagtagctggaggaatgttggagagattaaagtattgtacaagattcttccctcaagaaattactatctaggagaaaacatagagtatgtgattaatgattatataaatggmagtacaaggtgattaggatgataaatttattctgagattttgggaaggtaacatgagggttacattctgaaatgggtcacaaagacatttaaataagaagtaagtacatagacaagtgggaaggccagtaaaatcacagcacaaaatttactctctcgtattgtttcctcctattccctaagcactaaacatgaccaaattttactcattctttaagacacaagataagaaaatttctacagtgaggctttcctcagtgtctaatttatatccccatgtgaaaatttttgaaagcatcttttccttgctcttttaaacactcatcatattttcatctttagggtctgacttagtcattagaccttaagctctttcagggcaggaagggtgtttacatt

SEQ ID NO: 29750 - DNA, 851 bp, Homo sapiens
ggaagacttggagacaagtgatcatttcattgtagtgttttctgacctcaaggtgactccccaagaacgtacctgaatgactggggctgtttgttccatttccaattcttcaaaaatttttatccatagttaaattcagaagctcagcaaattaaggcagtaatatcaaaactaataactttatgaaatcttgatgaaaaacagaattcaaaactagaagactcatgtttcatcttgcctttgcattaacttactgtttgatctaggctggtaaggcaatctttttaggcctaaattatctcaggattcaacttacattgctataacctactagattctaccagtagctggaggaatgttggagagattaaagtattgtacaagattcttccctcaagaaattactatctaggagaaaacatagagtatgtgattaatgattatataaatggaagtacaaggtgattaggatgataaatttattctgagattttgggaaggtaacatgagggttacattctgaaatgggtcacaaagacatttaaataagaagtaagtacatagacaagtgggaaggccagtaaaatcacagcacaaaatttrctctctcgtattgtttcctcctattccctaagcactaaacatgaccaaattttactcattctttaagacacaagataagaaaatttctacagtgaggctttcctcagtgtctaatttatatccccatgtgaaaatttttgaaagcatcttttccttgctcttttaaacactcatcatattttcatctttagggtctgacttagtcattagaccttaagctctttcagggcaggaagggtgtttacatt

SEQ ID NO: 29751 - DNA, 811 bp, Homo sapiens
aaagacaaattccatattgataaatactattttcagtgtaatagcatcatttccatgtccaacagcaacagttcattattgctctgattgatacaataataaacttacacatgacactctttcaaaggcttatacactatcatcatgatttacctttcttctaccttatctatgagctctcttcttgttgtatttccagcacctagtgcaatacctgacatgcagttggcacttttaactttttactgaataaatgaaagtagtaacaaatgatgaactttcagtaacaaataaaaacacaaccactttctacattattattattggtggtgtggctatactgcctgaaacttaagttattgtaatcattacagttttcgcaaatattatattcatattatataaagggatttcccagaaaggactagatggtggcagctacagggaagagaatagggagattggctacaatgtgaagaagacaaggttaaagacgagagaaataaaggagggtaaccatccaactgacatgaacaatttaataagcagattcccaggaagacagtcaggagataaggaacggagaggagraagagggggcaaataggcctcaggcttgagtctacaatgggaacaaagccagcatactaaataatttgttttgttagagtagcaacaggcctgcatttacaaagttgaccatagctacaaactatcactgtggaattatggagtcgcattctgttaattaacctgagctacctaaggatttgtttgggtggatttttcaggattctaaaaaattcattct

SEQ ID NO: 29752 - DNA, 682 bp, Homo sapiens
aacaaagtatttttgttctgcttcatcataaatgaaatgcaatctgaaattttaagcaagtttttaaaaatatagggtcttttttttttttgaaatggagtgtcactctgttgcccaggttggagtgcagtggcacaatctcagctcaccgtaacctccacctccaaggttcaagcgattctcctgcctcagattcccgagtagcgggattacaggtgcctaccacacccagctaatttttgygtaaaaactatggatatttttaacttatctctgtaactcaggattttcctaacatccagtcaaaatgaaatacagtaataaactgaatactgaaagcgatgagacaatcacccataaactctaacttccagtgtttgtgtttagcagaacagcttcgttggtctgacaaaataatatataaatattgaatatgtaaacataaaatgttttatgctaataaaatacccctttaatctcttttatatgttgaacgccctgatgagactgctgaaaaatagacgtgttaacagagttacagatccagttgggtccactcaggacaaaaacaagctctggtctaatccttagcatcagaggaggtacaggacaagaaatacagcaggaaccctcctcgtctcatcataaggcctggcagtggctaccctggcacacggcttct

SEQ ID NO: 29753 - DNA, 556 bp, Homo sapiens
tatttgacaataaattcatggttggaatttacctgcatggatctcctgatttttctttycttcttgcttcttagccatatggtaacagtttacctctgcaattctcacatgtgtgtacagacatacacacacacacacacacacacacacggggaggcacacatacaactttgctatattaggtgcagaattcttcaatcaagtctagagttccataagattttccttaccaaattaccaagaaatgtattacttccttcctgagacctccatcccacccctgacttccccggaacactggtgccagatccatctcttctgctttcacaaatgaggtggagaaaaaaagtggagtggcagcaattggcttgagaacacctgtttggagtcacctttgcatctactgtctacccgctaagcctttgtccatcatggtggtgactagcttattggctctgtcacctgctctgacccccaaggacctctacgctctggacccagggatgctttcctccaggttgtgtggtgcaggcttcccaaaacacgattgacatgt

SEQ ID NO: 29754 - DNA, 1232 bp, Homo sapiens
cctaggtgatgggttgataggtgcagcaaaccaccatggtacacatttacctatgtaacaaacttgtacatcctgcacatgtaccccagaacttaaaataaaaataaatactagctgggtgtggtggtgcacatctgtagtacaagctactcaggaggctgaggcaggaggatcacttgagcccgggaagtcaaggctgcagtgagacatgatggtgccactgcattccagcctgaagagcagagtgagaccttgtctcaaaaaaaatagtaaataaataaaaaaaccacgggtggggtgcagaccacagcaaaggccatgcctcaccacttccccctctcctgccccttgcctggctccttggccccttctacagtccgttcagcttctggtctgccatgccccctattcacttgccaaaactttgaggacagagctcctttaccctgttcttctgaagcctctacttatggattctcaagcgctatgttaggaaaaaaaggaaaaatgaaacagtattaaattaacaagtttgcatttctcccctaacagttgaattctcctggaggccatggtaatgctcctgggtaaatggaggaagggtcaagaattatggaaaataaagctgaaacttaatatcacaaaagcttaaggcgtcataaaaatgcacacaatatgcagatrtccatgagcataaccccatggcccaaatcaggtttaagctgggtggtttagccccaggttttgtaaagttctataaaacgttttctgagaatcaagttctgttcttaacactgtatggtggaaactgtgcagtttctacttttccctttatcccttattgctcttccctttttatcttgtcttccactttaatcaagaccacaacctaggaggttgcaggctttaagaagacataattatataaaagaatgaagagtcagagaggctgctagtcttcatccattttcaactattgcagctgcccccacctctgcacagatccctccattgctgatcgattttgaggagccaaggatggccagctcacactggagagtggcatttccttcactcagaggccctcatttgacattgactggtcactttatgatgaattttattaatacacctttgatgattaagtcacatattatccttttaaccctctccaataacttctgtattttacagcgattttccatgaaatgcacaccatgctacttcttcca

SEQ ID NO: 29755 - DNA, 1188 bp, Homo sapiens
aaccaacaggtatttatttaatccaacacatatttgtttagcctctcctctgtgccaggcactatggccacagcagtgagagaacaaaagggatgtggtctctgccatcatggggctctcagactagtgggaaagtatattagttaatgagatgaatgattttacatacgttatccatttaaccctgcaaatgaccactagaggtgttttcatagtctatttttcagatatcaaaaatgagaatctgaaaaatacatgtaacagaagctcctcttctcttttctccagcaggtctcctaagaccagggtacatccctatgtccccgtcttccccttatgtctccagctctcaatgagaccacaggaataggctggggacagtgccatgactcctgggagcaatttacctaaggactctgcataaggcccatcagaaaattaagatgggaaaaaaagctgcctttttcaaggatatttttagtctataacaaatatttaattttatattgtactgtaagaaaaaaactagattatatggtcatccttttcaatttgcctgtggattcatttccttctccggcaaaaaactaccagaattttaatagtgagcctgttctatttcttgagagggtaggagtagaaaacttaccttgcagctccacaaatggcatatttccctacatttactcatttgaactttgtacaggtcttcctgaaaacttcaagtccctttcatctccatttatccttggttagatttttattttctgtttcctcataagctcttcatttccagccccatcatttttccccacagcctgcaattctttgttcttttatgcacttgtgacaaccagagacactgctttctcctggctgacagccacaggatttgcaatactttttagcaaaggctcttgcaatttctactcttgtcattttcttcacatctgtggctgatgtggaaagaacaaagctcaggcaatttacttctgcgattggcttatggcaatgtcttccaaattttaacttagcctatccacctccccaaatgctgctaagttgcttccatagcctggrcagtactgctgcactaattggagaactgacttcctaagctttcaaggatttttagcctagcaaatataacttgattcaaaacaggtattttagagtttttcaagcaga

SEQ ID NO: 29756 - DNA, 608 bp, Homo sapiens
ccaaaacagcggctgctggaaggaaactgctgtttttgttcagtggctagggaataggaacgagggggtgtcaatatcttcagtgttttctattttcagatcaatggaaataaggctccatttctgaaagattcccattaaaatagatttaaggcaataaaaagaaaaaaatttctttgacctttacaagataatgtagagtggttatgtgcctgacaaaccaagctcaagatctggctttgcctcttactagctgttgactccaggcaagtttttaatactgkgtcttttttaatgaaaaaatggacagaccatttaaaaaccattaataccattgacagaggtgtagttgagaatatctttgccccatctgaggggcatcactggggaccccattgtctgccagcttctccagtcctaaagcctcatgtttggtggcagtcaagttcccctcaaagctcactgatttgtggagagaagagggtagaggatcagtccccaaataagatctcagccagggccctgcctggtcagctagaacttgtagaagtgaccagagcagctcttctcccatgggaggagaatcccttcaaaaggcagtgagcttc

SEQ ID NO: 29757 - DNA, 608 bp, Homo sapiens
ccaaaacagcggctgctggaaggaaactgctgtttttgttcagtggctagggaataggaacgagggggtgtcaatatcttcagtgttttctattttcagatcaatggaaataaggctccatttctgaaagattcccattaaaatagatttaaggcaataaaaagaaaaaaatttctttgacctttacaagataatgtagagtggttatgtgcctgacaaaccaagctcaagatctggctttgcctcttactagctgttgactccaggcaagtttttaatactgtgtcttttttaatgaaaaaatggacagaccatttaaaaaccattaataccattgacagaggtgtagttgagaatatctttgccccatctgaggkgcatcactggggaccccattgtctgccagcttctccagtcctaaagcctcatgtttggtggcagtcaagttcccctcaaagctcactgatttgtggagagaagagggtagaggatcagtccccaaataagatctcagccagggccctgcctggtcagctagaacttgtagaagtgaccagagcagctcttctcccatgggaggagaatcccttcaaaaggcagtgagcttc

SEQ ID NO: 29758 - DNA, 816 bp, Homo sapiens
gatcctctttagatgacacatacacctatactttagatagtaaaagtatttgaaaaattacagtaacttgtggaagttgttttgtcttattttatcacctttacttaaaagttggcaagcattttgaggaaaggcaaagtagtgttgtgggaaggacatgggctatgtggagagagaacctggccctgcccccttctaggtacatggcattggagaaataacccaagatttttacactctaattttttcttttgtgagaaagtatataatacagtgcctaaaacacagtgacttctccatcaatggttccttccttccctccttcctttcttccttccctgcttttttctttcctttcatcttccacatcttcttcctcttttcccccttcttctcattctccyttcataagtacatgagcttatggtgagcatgtaagttgagagtgtccaaagaaatatatttacagacctttgaagtaagatctcatccactcccgttcctcacttgggaaatactacatacatgtcctacacatacctctgagcttggcaaggactttatgtgcaccagtgcaaaggaagtactgtgtctgcctgatttagcaatgtcagggtctccagaaaactctctctccctcacaaattagatggagcttggcattttcttttttttgagagaaaatttttttatttttatttttattttttattacactttaagttctagggtacatgtgcacaacgtgcaggtttgttacatatgtataccacacaacaggccccagtgtgtgatgttccccttcctgtgtccaaa

SEQ ID NO: 29759 - DNA, 1399 bp, Homo sapiens
cccaaagtgctgggactacaggcatgagccactgcgctcatcctaactagagatattggctctaagttactgcaggataatttctatacaaagaaggattttagttttgttcttattccaacacaccggaaagcttaactgcggttacaattaaggtttaaagaattamggaatgcatttgtagccagtttagagcactttgcaaaagtcaatgttttcttttcctgtagtccatttttctctcccctaaatcccctgcactttctcaatttctcccccactttcacacttctgactttgtttattccttgctatagtcaaaaggtacaatggggcatcattaggaagaggtgatgtgaccaacctggaacaccatgttccagcctagtcactgcacttcaaggactcacaagacctgaagagacagtgatggaggcataaaatgttcaagaggatgaggaagtgggggttgtttaaggacaaatcatgaagatttgaactattctgtctgcaaagataaaagctataacagaatatggttaatacgaagacagatagggacaggataaatagacttacttcccaataccataataatgtaaaatcccttgtaacagaaagagttacaaaagggggagaggatctgctatataacctgatagttaacttaagatacttgcttattgatgttattcacaagtacgctaaataagggaaattttttaagaaatctgtatatgacttgataacagattcatgatgtagtattaatattgagtaaatattcatgaattaaccaaatgttcagataaattcatgtataatatgataccagattcataaaatattaatgtaatattgactgacatattaataggttaaacagatttgaggataaattaatttgtgttattccagcaaatacttggcattaagagagtctagttttattgaaacacagccacattcattcacctatgcattgtctatggctgcttttgtgtgacaagagcagagttgaggaattgtgacagaggctatatggcccaaaaagcctagaaatatttactatctggctctttatgaaaagtattgctgactccggtctagaacacattaggaacatccttaatatttgaggtccacattaagtagatgaatataagttcttctacataatacctcttcgtaggtatacaattggccagggcagccatttctgataatcatgtagagtctgaaaaaatacccattaaccagtcatctgatcatcatgtctttggagattcagcaatcaagttaaagatacttcctgaattttagaaagctggtgagttagcaggtttttggttatatttagctgtttttgatgcctttcaattctgggttccccacctac

SEQ ID NO: 29760 - DNA, 1399 bp, Homo sapiens
cccaaagtgctgggactacaggcatgagccactgcgctcatcctaactagagatattggctctaagttactgcaggataatttctatacaaagaaggattttagttttgttcttattccaacacaccggaaagcttaactgcggttacaattaaggtttaaagaattacggaatgcatttgtagccagtttagagcactttgcaaaagtcaatgttttcttttcctgtagtccatttttctctcccctaaatcccctgcactttctcaatttctcccccactttcacacttctgactttgtttattccttgctatagtcaaaaggtacaatggggcatcattaggaagaggtgatgtgaccaacctggaacaccatgttccagcctagtcwctgcacttcaaggactcacaagacctgaagagacagtgatggaggcataaaatgttcaagaggatgaggaagtgggggttgtttaaggacaaatcatgaagatttgaactattctgtctgcaaagataaaagctataacagaatatggttaatacgaagacagatagggacaggataaatagacttacttcccaataccataataatgtaaaatcccttgtaacagaaagagttacaaaagggggagaggatctgctatataacctgatagttaacttaagatacttgcttattgatgttattcacaagtacgctaaataagggaaattttttaagaaatctgtatatgacttgataacagattcatgatgtagtattaatattgagtaaatattcatgaattaaccaaatgttcagataaattcatgtataatatgataccagattcataaaatattaatgtaatattgactgacatattaataggttaaacagatttgaggataaattaatttgtgttattccagcaaatacttggcattaagagagtctagttttattgaaacacagccacattcattcacctatgcattgtctatggctgcttttgtgtgacaagagcagagttgaggaattgtgacagaggctatatggcccaaaaagcctagaaatatttactatctggctctttatgaaaagtattgctgactccggtctagaacacattaggaacatccttaatatttgaggtccacattaagtagatgaatataagttcttctacataatacctcttcgtaggtatacaattggccagggcagccatttctgataatcatgtagagtctgaaaaaatacccattaaccagtcatctgatcatcatgtctttggagattcagcaatcaagttaaagatacttcctgaattttagaaagctggtgagttagcaggtttttggttatatttagctgtttttgatgcctttcaattctgggttccccacctac

SEQ ID NO: 29761 - DNA, 587 bp, Homo sapiens
tggggaagtgtgccttgaaatggaagggggaaaaatcactgcatcgggtaactaggagggctattgtgtatcccaggggatgctgtaatccatttaaggcatttttagttcttagccctagtgtgtgcctatagcctcatgctctgtggtttaggatgagctgaatggctgctcttagaggttgctctgctcctgcctaagtctccacacccaggagaaacccacaactcacctcaaccacgaagacaaatccatatacrgtggcagcagctcaaagaagcaagtgacaacacagcctgtctagcactaccctgtgcagtatctgttgtgtgccaacccatcagctttgccaaagatgtctctttgtggcacagggagtctaaggtggccattttctccatttctgcttgctatgagatgcagctaaagagttcatcagtgatcaataaagagccacatgcttatgtttgctccttggatctcaaggacacttttttttttctttaaacctcacctggcttttagaggagtccctgctgggagggaaagaacaaaatactcttaaagtagaagagcttctgtagagg

SEQ ID NO: 29762 - DNA, 1201 bp, Homo sapiens
ctgagcttctctgcctgcaactagatggtcccatctcggggtgatgggagacagtgacagatcatcaggcattagattctcataaggagcgcacaacctagatccctcacatgcgcagttcacaataggcttcgtgctcctatgagaatccaatgcagcggctgatctgacaggaggcagggctcaggcggtgatgcgggcgatggggaaagcctgtaaatacagaaacttcactcgcttgcttgcctgccgctcatctcctgtgtgcggcactcgtctgtacccagggggttgtggacccctgcttcaacgcactattttctctcccagacaagatattgagagaaggggaagaattgaatggtctttcttaatcatcaaaagggaccacacattcccaacctgattctgttctcttcatggtctctctgagctttgtagagaaggaaggaaaaggtacgagaagagaaataaggaaaggcaggggaggaagagggggcctcagaagcatcttcaaagggctggatttacaccccaccgcctgtcttggtgcccgggggctgggtgcattcaggctcccagatgagccacagcccttggcctcttgggtccacaccttcatgttagccaaccctgatgtctccatcacccctagataaatggaatcgggcatggaggcatctaatggctaggcagattaatcatatgcttgcttgctttttggaaaccccagaggaaatatctgcagatttaattctcagttaaaggtggaagtgtgggtttgaatcttctatcaggcattgccccttcctactcagcatatctttggaaaggtcaactctgggaaagattggagtgtcggcatcttctacctggtgctgtataaaracttctgacctttcaatggtcctaattccccctcttccttctctctgaatattcccctcctccaccttttttagcacgattatttattaaagttgcaaaggtcttgcattcccacacacacacacatatacacacacacacacacacaaatatatatatatgccacattttcaaataatgagttaccgtaaatggcacatatgagtactcctcaaaattgtcaaggttatcataaacaaagaaagtctgagaaatggttgcagctgagagtctaagaagacatgacaactaaatgtaagtgctatcctcgatg

SEQ ID NO: 29763 - DNA, 494 bp, Homo sapiens
tttttattctcagtaatttttggattcatttggtgataccccagttctcctttacttactgagtcctgtcacttccttctgtgtaatttttccttgcacttctctgtgtctaccaagactactgctccccctgcaataatctggtggcagaccctcccattgttgcctatrgtttgggaagttttgcagcagcagtcactgcctggccgctcagcctacaagtcccccagctaatcaccccatcaggagccctgcccagctgagcatccactgctcctccatggcaattcctgggggtctcttccaggttctgcagcacactcctgaccatggccttctgcatcagctcccatttgcatcctttcctcctaggagtcatcatttctgatccaagaaaggtttccctcttgcttttctttgatgtcctgtccttactcatttatggatccgtttatatcctgattataatttttaaggattggatcagagaaggg

SEQ ID NO: 29764 - DNA, 498 bp, Homo sapiens
tgtactgatctaagaactttaaataatgaacacctgccattttaagatggtttctgattagatgcctctgatcctacctatccctgctttctgctcaaacatttaggacgatccatagaatgcagtgaaatttaaccgtgaaacaaatgatcatttactttcagaatcagggggaaagtttactcactagaaggctaaaggaatttgctatcaggcacacacatgagttggcaaaccatccagacatgctctgccatcagaataggtagactgagcacttgaaaacagaggggcatgctctccctccactactatatcccctcagctaagaaacatgagacatgattgtaccttaaaatgagactgcaaccctttctctaaggtgttaccttggctttccaaggcaaagcaagctgctttacaccctgaastctaccgttcagtacctgccttctcacaatgcttcagagaggcacctcccaaaagctagctggacag

SEQ ID NO: 29765 - DNA, 498 bp, Homo sapiens
tgtactgatctaagaactttaaataatgaacacctgccattttaagatggtttctgattagatgcctctgatcctacctatccctgctttctgctcaaacatttaggacgatccatagaatgcagtgaaatttaaccgtgaaacaaatgatcatttactttcagaatcagggggaaagtttactcactagaaggctaaaggaatttgctatcaggcacacacatgagttggcaaaccatccagacatgctctgccatcagaataggtagactgagcacttgaaaacagaggggcatgctctccctccactactatatcccctcagctaagaaacatgagacatgattgtaccttaaaatgagactgcaaccctttctctaaggtgttaccttggctttccaaggcaaagcaagctgctttacaccctgaagtctaccrttcagtacctgccttctcacaatgcttcagagaggcacctcccaaaagctagctggacag

SEQ ID NO: 29766 - DNA, 698 bp, Homo sapiens
tatttactgaacaccttccacacaccagacattcttctaggcagtagatacacagtagtgaacaaactgagaaaagttgctcttatattctcatgggaagaaatatacaataaacaagatacatgagtaaaatatatattatgttagattttggcagttcctagggagaaaactaaactaagaaagagaaacggagagtaggatggcaatttttcaaagggcgatcaaggaatgcctgtatktaacaatatggatctcagccaatgtaaaatgaagttatgctaggaattacaaacaggaacaatttggggtttgaatcccttaactgcatagacattttgggtaattcagtgaggttctttgcatcttgcatttctcatcccttaagtaagagtggtgaggtcggggtggaggaggtagagtgctcttactagtgaaacaatctgttgtaacatgcacacataatactcaagatcattcttgcctccccctgttctttcccagcctgtcagcaaattctcttggctctaccatcaacacattcagaatcagacccctgctcctgcctcccctgtcactattttggtctgagccaccatgatgtctcctctagatcattgcaataaatacttactgatctctcagctccttgccctacacaagtcagttagagccaggcttcaggaagtcagattgtg

SEQ ID NO: 29767 - DNA, 519 bp, Homo sapiens
gtgagcagactgctgccgtccgggaccggcaccgggatggagtaggggctgtagcgcagccgcgggcgcatggtgttcagattgaggaaggggtggcggtgcaccgagctggaggctgccgcagaggaggcggccgccgctgcggccatgtacgtgtaggggtaagggaacaggcttccgaaaggggacatggccaggccctggggtgagaaaagagacacacagcgagtcagccgggtgggaggagcttatctcatccctctcctctcttctccccctccaacattgggcaagccatgaatccctggtatgttctgttgttgttgttgttgtgttttttttttkggggggggagataggtgggggcaggagagaagtcaacactcagaaatctctaggtacaaatcttagctgtgtcaccctaggccaagagactttgattaacttgtgcctcagcttccttataggaagaaaaaacagggaaatcataagtaattcatatacttattgaggactttg

SEQ ID NO: 29768 - DNA, 3045 bp, Homo sapiens
tgcatatgatttttttcactgggaggaaaaaacacattactattttgacagttggcaccagaatcccactgaggggagagaacagtgagttctagcaacagtaatgtacattcattctgatactcctttcagtgccattttcaaccctccactccattatctctaaatgctcagtaaaagtctagtatcctagtatcctgaagccttggggaatgaaggcaaagatggtgtgagagaggagagcccctgcagatgctggaagaaatggtagaagccaagaaacagcaaagaaacaggtggcagtgtgggcaaactcggaaatgcagacacaggagaaagcttgctgacaggggcagggaatggggaaacagccaaaaggggtagactgccttggttctgatatatgaaaagggctttccaagtggtagacatttgaattcaatgaatattttgcccaagacatctgcaatgataactcatatgtaatctaatacactgacattttgcaaaatataatctcagaagcactttctatgtgaataatattgtaaacatcattttcagtggtgtcataatagtctattgagcagatttgccatggtttatttaatgtttccctattttggacttttaaataaattcaaatgtttagctattaaggataatggtgttatgaacatctttagacagaaagcttttaccacagttaggataacttcctcatgatgaattcccagcaatgaagttcactgggttagatagcatgaaatttttgaacttttgataaatagtgataaagtggttttcatttccatcaatactgataaggatcctagtttctctgcacctgggaatctcagtttctctgcacaagggaaactattaaataccacttattctctggagggagatgttcttaagattaacatgtatttttagaggctacattcttaaaggtaaaattactaagtcaaaaagtatgcatatttgaacttttggtagataatgtcaaattaccatctaaataggctatatcatttaaacttctatcaaccacgtatgaaaatactcattcctccacactatctccaaccatgagttgtatcaaacttaaaataacattttttagtcaatctgatatcaaaaatatctcattattttaatatgcatttccacaatgcctagagaggctaaatgtcttttcatattattagctacctgtgtttttttatctgtgaattgcttgttcatatatcttgctcattattcttagtttgttcctattttacttactgatttgtagaagtggtctattgccagccaggcgcggtggctcacacctgtaatcccagcactttgggaggtcgaggcgggtggaccacctgaggtcaggagttcaagaccagcctggccaacatggtgaaaccccgtctgtactaaaaatacaaaaaaacagtagccagccatcgtggcyggtgcctgtaatcccagctactcagtaggctgaggcagaagaatcgcttgaccccaggaggcagaggttgcggtgagccgagatcacgccattgcactccagcctcggtgccaagagcgaaattccatctcaaaaaaaaaaaaaaaaaagaaaaagaaaaagaaaagaagtggtctcttaccgaaatatattgcctattatgtacattgcaaatatttcccgcattttctttgtttattctagtgccttttattggacagaaaattttaatttgtatatatttagatacatctgtttttcccattttacacctgtttttaatctagtttaggagggttttaaccatcccaaggttataaaaatattctccaatgttttgttctaatagtcttgttttttgtatttatttaatttatatggaatttagctttgcatatgttgtgaggtatgattttgtcccaaaactttagcaattgttcatttatcatgaaataattatagtcttcttggatccagttttctactctctagtcattaacttcataataggttttgttctggtgaagcaagctactcttatttttcttgtttcaaaattttattggttattcttgtccatttattgttccagatgaactttagaatcattttgaaggggatcatttttcaaagttattaattttcattgagattacactgaatttacctattaatttgtgaacacattatgcttttgtaactttataatactaaatctttctatgaagaaaatcacattactctccatttattgatttattggactacttttctgtttcttctatttttattgatatcttcaaatttttcaccttatcttgattaaatttttaataatagctttattaggatacaattcacataccataaagttcgcttttaaaaaaatgtataattcaatggtatttagtatattcacagggatgtgcattgatcactgctatctaattccagaagattttaatcactccaaagggaaaccacgtatctattagcaatcattccccatttcctccttgccctagcctctggcaactactaatctatttcctgtctctatgaatttgcctatcctggagatttcatataaatgaagtcatactgctatgcatgattcatacatgtggccatttatgtctggcttctttcacttaacataattatttcaatgtttatctatgctgtagaatattactaaaacttaacttacttttatggcaaaataatatttcattttatgactgtcacattttgtttatccattcttcagttgatggacattgggttgtttctgcttttaggttattatgaataatactgctatgaatatttgtgtacaagtttttcttagccatgtttttaattctgttgggtatatatgtaggacatagatatacatacttaaatctattcctatatatacctggaagtaatgggtcgtatgataactctataacattttgaggaactgctaaattttccaaacttgcaaagtgggtatactatttcatattcccgccaacaatttatga

SEQ ID NO: 29769 - DNA, 3045 bp, Homo sapiens
tgcatatgatttttttcactgggaggaaaaaacacattactattttgacagttggcaccagaatcccactgaggggagagaacagtgagttctagcaacagtaatgtacattcattctgatactcctttcagtgccattttcaaccctccactccattatctctaaatgctcagtaaaagtctagtatcctagtatcctgaagccttggggaatgaaggcaaagatggtgtgagagaggagagcccctgcagatgctggaagaaatggtagaagccaagaaacagcaaagaaacaggtggcagtgtgggcaaactcggaaatgcagacacaggagaaagcttgctgacaggggcagggaatggggaaacagccaaaaggggtagactgccttggttctgatatatgaaaagggctttccaagtggtagacatttgaattcaatgaatattttgcccaagacatctgcaatgataactcatatgtaatctaatacactgacattttgcaaaatataatctcagaagcactttctatgtgaataatattgtaaacatcattttcagtggtgtcataatagtctattgagcagatttgccatggtttatttaatgtttccctattttggacttttaaataaattcaaatgtttagctattaaggataatggtgttatgaacatctttagacagaaagcttttaccacagttaggataacttcctcatgatgaattcccagcaatgaagttcactgggttagatagcatgaaatttttgaacttttgataaatagtgataaagtggttttcatttccatcaatactgataaggatcctagtttctctgcacctgggaatctcagtttctctgcacaagggaaactattaaataccacttattctctggagggagatgttcttaagattaacatgtatttttagaggctacattcttaaaggtaaaattactaagtcaaaaagtatgcatatttgaacttttggtagataatgtcaaattaccatctaaataggctatatcatttaaacttctatcaaccacgtatgaaaatactcattcctccacactatctccaaccatgagttgtatcaaacttaaaataacattttttagtcaatctgatatcaaaaatatctcattattttaatatgcatttccacaatgcctagagaggctaaatgtcttttcatattattagctacctgtgtttttttatctgtgaattgcttgttcatatatcttgctcattattcttagtttgttcctattttacttactgatttgtagaagtggtctattgccagccaggcgcggtggctcacacctgtaatcccagcactttgggaggtcgaggcgggtggaccacctgaggtcaggagttcaagaccagcctggccaacatggtgaaaccccgtctgtactaaaaatacaaaaaaacagtagccagccatcgtggctggtgcctgtaatcccagctactcagtaggctgaggcagaagaatcgcttgaccccaggaggcagaggttgcggtgagcygagatcacgccattgcactccagcctcggtgccaagagcgaaattccatctcaaaaaaaaaaaaaaaaaagaaaaagaaaaagaaaagaagtggtctcttaccgaaatatattgcctattatgtacattgcaaatatttcccgcattttctttgtttattctagtgccttttattggacagaaaattttaatttgtatatatttagatacatctgtttttcccattttacacctgtttttaatctagtttaggagggttttaaccatcccaaggttataaaaatattctccaatgttttgttctaatagtcttgttttttgtatttatttaatttatatggaatttagctttgcatatgttgtgaggtatgattttgtcccaaaactttagcaattgttcatttatcatgaaataattatagtcttcttggatccagttttctactctctagtcattaacttcataataggttttgttctggtgaagcaagctactcttatttttcttgtttcaaaattttattggttattcttgtccatttattgttccagatgaactttagaatcattttgaaggggatcatttttcaaagttattaattttcattgagattacactgaatttacctattaatttgtgaacacattatgcttttgtaactttataatactaaatctttctatgaagaaaatcacattactctccatttattgatttattggactacttttctgtttcttctatttttattgatatcttcaaatttttcaccttatcttgattaaatttttaataatagctttattaggatacaattcacataccataaagttcgcttttaaaaaaatgtataattcaatggtatttagtatattcacagggatgtgcattgatcactgctatctaattccagaagattttaatcactccaaagggaaaccacgtatctattagcaatcattccccatttcctccttgccctagcctctggcaactactaatctatttcctgtctctatgaatttgcctatcctggagatttcatataaatgaagtcatactgctatgcatgattcatacatgtggccatttatgtctggcttctttcacttaacataattatttcaatgtttatctatgctgtagaatattactaaaacttaacttacttttatggcaaaataatatttcattttatgactgtcacattttgtttatccattcttcagttgatggacattgggttgtttctgcttttaggttattatgaataatactgctatgaatatttgtgtacaagtttttcttagccatgtttttaattctgttgggtatatatgtaggacatagatatacatacttaaatctattcctatatatacctggaagtaatgggtcgtatgataactctataacattttgaggaactgctaaattttccaaacttgcaaagtgggtatactatttcatattcccgccaacaatttatga

SEQ ID NO: 29770 - DNA, 3045 bp, Homo sapiens
tgcatatgatttttttcactgggaggaaaaaacacattactattttgacagttggcaccagaatcccactgaggggagagaacagtgagttctagcaacagtaatgtacattcattctgatactcctttcagtgccattttcaaccctccactccattatctctaaatgctcagtaaaagtctagtatcctagtatcctgaagccttggggaatgaaggcaaagatggtgtgagagaggagagcccctgcagatgctggaagaaatggtagaagccaagaaacagcaaagaaacaggtggcagtgtgggcaaactcggaaatgcagacacaggagaaagcttgctgacaggggcagggaatggggaaacagccaaaaggggtagactgccttggttctgatatatgaaaagggctttccaagtggtagacatttgaattcaatgaatattttgcccaagacatctgcaatgataactcatatgtaatctaatacactgacattttgcaaaatataatctcagaagcactttctatgtgaataatattgtaaacatcattttcagtggtgtcataatagtctattgagcagatttgccatggtttatttaatgtttccctattttggacttttaaataaattcaaatgtttagctattaaggataatggtgttatgaacatctttagacagaaagcttttaccacagttaggataacttcctcatgatgaattcccagcaatgaagttcactgggttagatagcatgaaatttttgaacttttgataaatagtgataaagtggttttcatttccatcaatactgataaggatcctagtttctctgcacctgggaatctcagtttctctgcacaagggaaactattaaataccacttattctctggagggagatgttcttaagattaacatgtatttttagaggctacattcttaaaggtaaaattactaagtcaaaaagtatgcatatttgaacttttggtagataatgtcaaattaccatctaaataggctatatcatttaaacttctatcaaccacgtatgaaaatactcattcctccacactatctccaaccatgagttgtatcaaacttaaaataacattttttagtcaatctgatatcaaaaatatctcattattttaatatgcatttccacaatgcctagagaggctaaatgtcttttcatattattagctacctgtgtttttttatctgtgaattgcttgttcatatatcttgctcattattcttagtttgttcctattttacttactgatttgtagaagtggtctattgccagccaggcgcggtggctcacacctgtaatcccagcactttgggaggtcgaggcgggtggaccacctgaggtcaggagttcaagaccagcctggccaacatggtgaaaccccgtctgtactaaaaatacaaaaaaacagtagccagccatcgtggctggtgcctgtaatcccagctactcagtaggctgaggcagaagaatcgcttgaccccaggaggcagaggttgcggtgagccgagatcacgccattgcactccagcctcggtgccaagagcgaaattccatctcaaaaaaaaaaaaaaaaaagaaaaagaaaaagaaaagaagtggtctcttaccgaaatatattgcctattatgtacattgcaaatatttcccgcattttctttgtttattctagtgccttttattggacagaaaattttaatttgtatatatttagatacatctgtttttcccattttacacctgtttttaatctagtttaggagggttttaaccatcccaaggttataaaaatattctccaatgttttgttctaatagtcttgttttttgtatttatttaatttatatggaatttagctttgcatatgttgtgaggtatgattttgtcccaaaactttagcaattgttcatttatcatgaaataattatagtcttcttggatccagttttctactctctagtcattaacttcataataggttttgttctggtgaagcaagctactcttatttttcttgtttcaaaattttattggttattcttgtccatttattgttccagatgaactttagaatcattttgaaggggatcatttttcaaagttattaattttcattgagattacactgaatttacctattaatttgtgaacacattatgcttttgtaactttataatactaaatctttctatgaagaaaatcacattactctccatttattgatttattggactacttttctgtttcttctatttttattgatatcttcaaatttttcaccttatcttgattaaatttttaataatagctttattaggatacaattcacataccataaagttcgcttttaaaaaaatgtataattcaatggtatttagtatattcacagggatgtgcattgatcactgctatctaattccagaagattttaatcactccaaagggaaaccacgtatctattagcaatcattccccatttcctccttgccctagcctctggcaactactaatctatttcctgtctctatgaatttgcctatcctggagatttcatataaatgaagtcatactgctatgcatgattcatacatgtggccatttatgtctggcttctttcacttaacataattatttcaatgtttatctatgctgtagaatattactaaaactwaacttacttttatggcaaaataatatttcattttatgactgtcacattttgtttatccattcttcagttgatggacattgggttgtttctgcttttaggttattatgaataatactgctatgaatatttgtgtacaagtttttcttagccatgtttttaattctgttgggtatatatgtaggacatagatatacatacttaaatctattcctatatatacctggaagtaatgggtcgtatgataactctataacattttgaggaactgctaaattttccaaacttgcaaagtgggtatactatttcatattcccgccaacaatttatga

SEQ ID NO: 29771 - DNA, 528 bp, Homo sapiens
tagcaaatgaagagaggaaaaaattaaattaaattaaattaaattaaattcaaaattaatttggaatttcatcttttgtaaatctttagaaatgggagatttacccatttgcacatggtcctcacttgttgatgaagaaagtcttacaattacatgctatgacaatggagagaaagggagactcaactaaaatccctctactcaatcactctacacttttacaggcagtatctaygttttactctcctcattcaccagggcctgacagcagagaccagagctagggaggtgggggacagtggagaagtaaagatataacctgctggaatggaggtatagacattagagaatgtgttttcctgtctgtagtggcatttgacagaaaaattagagcaggcaccatcttcacttttatccttcccctcaaataacctcttgttacactatcttcacagggtatggggacagaataaagaggatgcaggatggtagtgatgggggttggacagggtcttgctagagctgcag

SEQ ID NO: 29772 - DNA, 559 bp, Homo sapiens
atgcaggtattacccccctttctcaaaaataacagattgtattctggactgacaatgtgtttcataggggctaaccttatcagcataagaatatcttacaatttttaatgcattgaattttaaacatttcattcaatatgctttttttgcaattttggtataaattataggtccccatatatttaatcaaatttctttaagtgaaaaaatcaaaatgtcccatatgcaattattttaagagaaaaatctgaatggaaaaaaaaaagtctccaaacaactgaccccagccctttggaatttagactgtctagtctcttctgatcttagaatttatgtctccctaataattaaggtgcatctcaagtagacacgctgtcacatacggtattgagtatgaaaatagatacggaattagaagtattcaaagagcaaaagaaaatatatatatatatgcacacatataagacatcaatttctcttttagcctccaccycatacaattcaacaattgctaataaattaggaggaggggcatattgatgtactgcttgactataac

SEQ ID NO: 29773 - DNA, 626 bp, Homo sapiens
aagaaataaaactatcatttttttgcatatggtatgattttcaacgtggaaaaacccaaagaatgtacaaattaatacctggacctaatgcatacatcgaggttgtaggatacaaggtcaaattaaaaagtcaattgctttattatacatcagcaatgagcaattggaatttgcatggaaaaaaaagtaaataacatcccaaatttccaggtccatttgttgagaaactgttcattgaatttgtattgccgttgtcaagattcttgtctacatatgtgtgtgttagtctatctctgagctcttcattatgttctattaatccatgtctattctttcattaatacaataccatcttgattactgttctttataataagttttccaatcagtactgaacgccagcggtcctcaacctttttggcaccagggaccagtttcgtgaaagacaatttttcaatggaccggggatggggtgtgggtgggagtagagatggggtggtaggagtttggttttgggacgacactgttycatctcagatcatcagtcatactcataaggagtatgcaacctaaatcccttgaatgcacagttcacaatagggttcatgctcctatgagaatcgaat

SEQ ID NO: 29774 - DNA, 1044 bp, Homo sapiens
agacttttgcatttattgaacatgtcaggcattcattaagtactgcaccatcagggagaatttccctgctattaagcgtcgactccagccaaatcagattcacctgggcgtttctcaaagaaaagcctgtcagcatgataatggtttgaacagggctgagctgtatggttgaagtgcgacagggcagaagacaggctgtggtgaccccagagttggtctgtaactcacagaggaatcacacagtggagaggcttcrgaaaatcagaaatctgactgtcacaggtagcggggcaagctgcctgatgatgcacttcaggaaggctcagcaggagggtggggaggatggaaaaacccgtaactgagcagctagaaaattaaggcaaggaaaccgtaagtctgccctccagactgccacggttttatgtttgagactgaggtcactcccccagggaaaacaagaggaactgagaggtgagagtaggggagaaacacccctcactcaccccttgaataaaaactttggtgtcagtagcatcctgtactaatgtttattgagcatttattgtgtatcatacttcattccaagaagtgaagatatattctttaatttttacaactattctatgaagtacgcatatctatgttttacaggtgaggaaactgaggccgggaagttaaatggcttgccctaggtcacccagctagtaaggtggaggagctaggattcagggccatgccacgcctccagataccacaaccttagtggctttactatgtggttttccattccactgggctgacacccaagaagccacaggtactcactgtggcccatgcccagctttctgtcaaacattcctcaagttcaagggcaatgccttttcccctcctcccctgcccccaaaacgtgtcctccaaatggcccagctgagaaagcggggaaatttctagaaatatttgcataaactttgggtgaaagtggaaaccccaccaacacccatcctccatcctccccactctgctgcctatgtctgccaggctgag

SEQ ID NO: 29775 - DNA, 1044 bp, Homo sapiens
agacttttgcatttattgaacatgtcaggcattcattaagtactgcaccatcagggagaatttccctgctattaagcgtcgactccagccaaatcagattcacctgggcgtttctcaaagaaaagcctgtcagcatgataatggtttgaacagggctgagctgtatggttgaagtgcgacagggcagaagacaggctgtggtgaccccagagttggtctgtaactcacagaggaatcacacagtggagaggcttcggaaaatcagaaatctgactgtcacaggtagcggggcaagctgcctgatgatgcacttcaggaaggctcagcaggagggtggggaggatggaaaaacccgtaackgagcagctagaaaattaaggcaaggaaaccgtaagtctgccctccagactgccacggttttatgtttgagactgaggtcactcccccagggaaaacaagaggaactgagaggtgagagtaggggagaaacacccctcactcaccccttgaataaaaactttggtgtcagtagcatcctgtactaatgtttattgagcatttattgtgtatcatacttcattccaagaagtgaagatatattctttaatttttacaactattctatgaagtacgcatatctatgttttacaggtgaggaaactgaggccgggaagttaaatggcttgccctaggtcacccagctagtaaggtggaggagctaggattcagggccatgccacgcctccagataccacaaccttagtggctttactatgtggttttccattccactgggctgacacccaagaagccacaggtactcactgtggcccatgcccagctttctgtcaaacattcctcaagttcaagggcaatgccttttcccctcctcccctgcccccaaaacgtgtcctccaaatggcccagctgagaaagcggggaaatttctagaaatatttgcataaactttgggtgaaagtggaaaccccaccaacacccatcctccatcctccccactctgctgcctatgtctgccaggctgag

SEQ ID NO: 29776 - DNA, 1044 bp, Homo sapiens
agacttttgcatttattgaacatgtcaggcattcattaagtactgcaccatcagggagaatttccctgctattaagcgtcgactccagccaaatcagattcacctgggcgtttctcaaagaaaagcctgtcagcatgataatggtttgaacagggctgagctgtatggttgaagtgcgacagggcagaagacaggctgtggtgaccccagagttggtctgtaactcacagaggaatcacacagtggagaggcttcggaaaatcagaaatctgactgtcacaggtagcggggcaagctgcctgatgatgcacttcaggaaggctcagcaggagggtggggaggatggaaaaacccgtaactgagcagctagaaaattaaggcaaggaaaccgtaagtctgccctccagactgccacggttttatgtttgagactgaggtcactcccccagggaaaacaagaggaactgagaggtgagagtaggggagaaacacccctcactcaccccttgaataaaaactttggtgtcagtagcatcctgtactaatgtttattgagcatttattrtgtatcatacttcattccaagaagtgaagatatattctttaatttttacaactattctatgaagtacgcatatctatgttttacaggtgaggaaactgaggccgggaagttaaatggcttgccctaggtcacccagctagtaaggtggaggagctaggattcagggccatgccacgcctccagataccacaaccttagtggctttactatgtggttttccattccactgggctgacacccaagaagccacaggtactcactgtggcccatgcccagctttctgtcaaacattcctcaagttcaagggcaatgccttttcccctcctcccctgcccccaaaacgtgtcctccaaatggcccagctgagaaagcggggaaatttctagaaatatttgcataaactttgggtgaaagtggaaaccccaccaacacccatcctccatcctccccactctgctgcctatgtctgccaggctgag

SEQ ID NO: 29777 - DNA, 539 bp, Homo sapiens
tgaaagtcttcagttatctattaatatttaagagcgaagcacggaaaatctgactgaaaactgaataaggggagcttgtcaactagggttgagggtgagggtgtgtcacagtcaggcgttctagcagcaggcagccttttaatccaaaggtactctaattgtttgaatttgtctcttttttagaagactattttctgtgaaaacgaacaattcattttccakattggaggagtaagcctgactcctggggttctgagaaggatgtggaggggaatgccacactattcacactggtgaaaactttgacttaaatcctctacttttagtctcacacttaactcattttctttctgattgatttacccaagtccagactattgcaacatgagtgaagggtagtcctctgattgcttggctggggagaagtctgaagttctgcccactgcattcacaggttttcgatgaatttcattattttcagcctgtgtctcactcctatcctcctaagtatctggtgccttcaacatctgacccttttg

SEQ ID NO: 29778 - DNA, 1514 bp, Homo sapiens
gaggggtgaggatggagaggtgcatctgttcatctgagcattcccctgtttagctctatagccaggtctgaggctatcatgggcaaaaaaggaaacccagaagggccttgagcttattttaaagtcaaagtgaaagactatagagtcttaattatgagttgatatcatttcagaaacttttctcttgtagcctttttgagcagtggtctctcatgttacaggggaggcctgtacccctaaaagtatgcaagaaaattggatacagatgtattctttaatctgaaaaaaaataaagaagacactaasctttactgatacttacacatgactgagagcaagcagttcacgtgtagagttgataaataagtgtcatactggggatgcctggtcagaaatcttttactgatagggccacatgacccagaaagtttgggctttaatggtgtatcagagagatgagaagcaggcaggctagatagaagcagataggtttttgcaagtgagaggagagggggcagtcgggacagtgagataaagaggaagaggcagaggggatggtatttaggaggtaaattctacaggatttggtgactgatgattgatgaattttgagtgaatctttgataagacaccccgccatgaaaaacaattttgtctccttagtgcttctagagacctgccatcatttctgtgatggcaaaatatctacctagttatttgtcagtcttcttcctctctccaaatgcctttggagttgtatctccagtaatttagtggatactaaatacatgttgctatgtgaatattacatgaaatgttttaacagctcaaaatatggaagataaacttttttttttttttcctgagatagggtcttgatctgtcgcccaggctgtagtgcagtggcgcaatctcagctcacagctcactgcaatttccacctcccggggtcaagcgattctcctgcctcagcctcctgagtagctgggactataggcatgtgccaccatgcctggctaattttttatatttttagtagagatggagtttccccatgttggccaggctgctctcaaactcctgacctcaggtgatccacccacctcggtcccaaagtgctgggattataggtgtgagcctgcacctggcctaagaaacatttttgaattagagagcgttcttggctagactctgtggctcacgcctgtaatcccagcactttgggaggccaaagaggcaggattgcttgagcccaggagttcaagaccagcctgggcaacatggcaagaccctgtccatagaaaaaattttaaaaattagctgagtgtggtggtgcgtgtctatggtcccagctactggaagctgaggcagaagggtcacttgagcctgggaagttgaggctgcagtgaaccatgtttgtgccactgtactccagcctgggtgacagagcaagactctgtctaaaaaaaaaaaagagagagagagagtgtttcatataattgtaggtttttatt

SEQ ID NO: 29779 - DNA, 686 bp, Homo sapiens
tcccattctgccccatgcctctgtaggttatgccttcccatctttttgtggggttaggtgcttaagaacagcttctcctatccctcctgtcccaaagcaaataacctcaggcaaagtaataactgagaatatacctgccttaatttagcttggactgtgatccatcttgaatttttagatattttgggtaaatttttggatgtgcttgagtttcaagtttttgcatatrtatatccaatgatttcagcatatttattgaaaatgcaattctttcttcactgaattgcctttgcacctttgtcagaaatcattgcctgttttgtgggtgtctatttctgaactctgtatctacccccttgatagtttatctatctggaccccaatcccacattgccatgattggtataactttataataaagccttgaaatcaggtagtgtttgttctccaacttcattctttctcaaagttgtttaggttattttaagtcctttgtatttctatgcaaatttgagagtcagtttgttaatttttattaaaaatagtactgggattttgatttggattatgttgaatctatagaccaatttggggagcactgatatgctaatattaggttggtggaaaagcaactgcaccttttgctattacttttaatgatatgtcttttcatttatttagatcct

SEQ ID NO: 29780 - DNA, 1162 bp, Homo sapiens
aaatgcccttgactggtctctaacatgctgggtgggtgaaggaacaatgttccctcccctctgggttctggatttattgagaaatggtcataagagacagaaagggatcagacacatcattcttaagataaaaatcattgcaaacacttatacaaatacttatgagggccaggcattcttctcagatttttaccaactcatttacacaccatggcaagtccatgaattagtgagggttattgtcaccattttactgatgcgggcaccaaggcatggagaggcgagtcactccgtgtagtaggtacagctacggttcccattttgccaatgtgcatgctcaggtacagaggcgtgagtgacttgcccaaggccacaaaggtagagctgggggacctgtcttgcagaactactgctggatctcaaggtcaaagtttgctcccttgacctcttctctcaactactctggtcagaggagacaggtctcagaggctcaaacagggaatgccctgaggttgctaaataaaggagagaagaatgctgcttcttttaggcatacatccaagactctgtgaccacacagtggagctatgcattgtggtgactttattccccatctggacaggtgactttcttttgttggagttttgttgtttttcttataagcactagcatcccatattcaggcagcatatacttttgcatagttttcatggaatatttccatgggcatcaagtcataaagttgagtatggttttaacatcaaacactttatatctggtgttgagaaacagatcaaggcaaatagtgtaaggaggttttcatcatcatgctgtgaggttgtaagttgacccacggaatcgctgactccatgtggaaactggccacctttggaattctgctgcatatttaagagtcacgcttgtgatttaaaatttactcactttcactcttttgtaacatgattcaaaaaatcatgagataaaaaacrtctggcattttaatagtgctgtctgattcgtgagacatatttattatggatctttcttgtatagtcattgcttctacggatttcacaaataaaggtggtggttctcttgatgtgaaactcctgtggtgttgaaggcttacagaggcaaccacactgagcctcctctggagcca

SEQ ID NO: 29781 - DNA, 1126 bp, Homo sapiens
cttataaatggattaatgtcctttggagagggtaagtgagttctcacgccactctcttggttcccctcttgccatgtgatctctgtacccctgatcccctttccttttctgccatgagtggaagcagccagaggcccccaccagatacagctgcccaaccttgaactttccagtcaccagaatcatgagacatataaacctcttttctttatagattccctagcctcaggtattctgttatagcaatgctaaacagaccaaggcactccctcaccttcaccttgggtccctccagctgaggtcttaccatagctctgtgtactactatgaaacctatctgtctatctatctatccatctgtctatctattgttctattgttcctggctcaaaataccaatagcccttgttgtaacattggggcacgttaggcctcagaaaacagaacctctctctctttgaccttctcctgccctccttccatctgctcccttatctctccaaggtaggatttttccctggcttttctttcttggagctggcagtaacaaaattctctgacccactttctaattgtgagtcataaaacccccatttcagaaggagtcctgccccaggccctgggggaaggaatgctgcacagggagaccgagaagaatctgaacagacaggccttgctgggctttcccactcagcttattagtattacatcatactccattcaatcatggtggccaaacatgcctatctaatgacatctccatagaaggcccaagaggacagggttcaggagcttcaggagaggcaaacacrtggaggttcctgagtaggaaatgtctgaggggccatctcagcttcagaactcttctagggtcagctaaggtttggcctggcgtatcctgtcccccgctctggccggtgcttccattccctaaatctcttcactgcatgcatccccctcccactaccttcatgccatccttcatgcagcactacagggcattctttctaggtaatggggctggctgtggcctgggggcatcctttgtcctgcatttgctcatggtcagcactcttgtttgcacacaagagtagagtagccagccccacttgggacagggacttgg

SEQ ID NO: 29782 - DNA, 528 bp, Homo sapiens
aaaataaatttctggtttttttaagcctcccagtctgtgttattttgttatggcagcctaagtagactaatatagctactaagctgcacatgctcagcgaaagactccatgaggacagataaagaacatctattggagaaacaaaaagtactgaggaaagaatatctacagaggaagctgtatattgaataactactgaagctcacacaaggttaaaacacatttgatttttgaacagccagagcgtagagaccttgttgaatatacaggagattcaaaagagaccctcagaaaggctacactttaggcataaggctaatgtaatcctagagtaaagaatactatggactctttcttgtaaaaccttaaaataagcttagaaagaaccaggctgatctgcaagtaaattaactacctggcagaacaaaactagacacccgatttaaggatgacagccaaatctagacacttaataaagwggcatccataatgtccaggatataacacaaaattatcagacatgtgaag

SEQ ID NO: 29783 - DNA, 595 bp, Homo sapiens
tgtaggcaaacctctcctcctttttttccttagtctcctcattggtgccatggaggtgtaggttctgatagcgtcctcagcggacacaggcccttggattctaaatgtgtcccagcccagctgttgtgtgtcagggccccagtgtctgtggggagatggccagagatggactcacagcatcagccattgccttttaccccatggcctgtgtcaccaagtgccatggtaagtggaagtgatggctccccagagatcacattagctctgataatgctccagcctcccatgcacaacttgccctcaggccacctggctgggcaggaagaagggctcccagagaagccacatggccccatggcggtgagtctgggcgagagatggagagagacgccttcccttttagcccagtcccagcctagtgtcctcactgctgacccccggtagtctctgaaaccacagatggagctcccagacttgctgattggcccccrtgatggcgtgcgcattaggaggaaatgcctccctccacccttgtagcaaacacttccagctccatgcccacaccccttatcatccactgttcctgccagtgcag

SEQ ID NO: 29784 - DNA, 532 bp, Homo sapiens
ccacaaaaggtaggggaaggtcttgagggaccaccccatgccctcattaatcaaccagaagcttggcccggagcagcagcggggattccagtagctgtgggcatacaggatgctagggcggccacaacccaggcagctgaggccgagccacctaggaacgcaggctcagagcagaccctcttgggacagacggagaaggggagggggcgggcttctctaagttaagccgatcactgagcacctcactggacacgagagaaggcaagcccctcggaggacagaagggaagagccacagacttggaggctgtgaaagtggagacaggtggacctggggtggcagcaatgcgtgaaatgccaggccgtgcccccgccccaggagcccaacatgacaccrgcccccagggaagctgactgtgccacttcatccagcgcccatcagtcgccttggagcatcaggaatcctgagggctggggtcccggaggatcacagatgctggggcacctcaacctcagggagccgctcgagaagt

SEQ ID NO: 29785 - DNA, 734 bp, Homo sapiens
tggagacaaggcagaagtagaggttctgtgagcttctttctttrcagcttcttcatcgtcctcctcctccacggctggacaacactcccggtgtgatggtggataagagaacttgttaactccctcctcttcagcaactccctcttcctcggctttctcctcccctgggttcttatcagaaccttgcagtgtccttatcagaaggctgggagacaggggagcacgctggccatctgcaaattgacttccctgccctctagggacactggttgcctctcgctcaccatacatgccatcatcatcatccaaaagtccccaggcttcaggaagggaactgctggttttcagccccagtgtttctctgtcctctccagggcctccactgtcttcagcctcctcttcagggcgtctgccccaaggggtatgggggattgccagaggagtcctagcttctccctccaggccagcttctaccagagctgctccttttactgcttccaccagccagggctctagaggtcccaggcccctcaggcggctccaggcgcggctgaggaggcccatcactggggacaggaggaagaaagggtgggcatccctccacggggtagcctgatggggtgcttggcctggggccatgtgtctgggctggaaaagggggagaaaaaaataaagtttaggggccatttagaggatggcatccgggcgtgactatgagtcatagcaacggaaat

SEQ ID NO: 29786 - DNA, 998 bp, Homo sapiens
cctcaaacagtctctgagaaaagaatttctaagcctgttatttacttggagagtaattccagaaagtacagagggttgggggagtgaggcggaaagagwaaagccaatgagaggtagagtaataagtgggggacaacatgaacgctcatcctgccgagaccttctgagagactgtgtgtgtgcactgtctaacccgtagccactcactacatatggctatttaaatttccatttaaattaactaaaatttaaatttcagttcctcattcacactagccacatttcaagtgctcaatagcttcatgtggctagtggctaccattttggacagggtaggtggtggaacatttccactattacataaagttctgttggacagtgctggtgcagatcctggcccagaattgtctcatctgatggggaaggaaactaagatagctatccaccaactcctatcccttattggataagagtcatccatgaagaattaactaccttgtcttttggcttgctccccctgtcagagaccaccctcaggcaaagagatgcacagagccgtcagagtgtgcaggttttgctggcagatgactctggaatggctttaggcatatgtatggatcaccaggcatcggctacagttgcatacaaaatagaagggagggagaaatcatgacacaaagaagattagaaaataaagcctattggacaaagaagaagtgaggagagaaagaaagaaagtaagcaaccatctcagaaaataatcctaggcaaagtataacacactgcctagtcaaaacaacaaggactatctcaagaccaaaaaaagaaaaatgattggcaaatatctgcattacacatttttgctgctgggaaacccaatcttgcacccacacaccccagcctgttcctctctcaaatggaaagttgacctcacttagacctagcccctggccatggtttactactttttttttttaacagtattacaaattggatag

SEQ ID NO: 29787 - DNA, 998 bp, Homo sapiens
cctcaaacagtctctgagaaaagaatttctaagcctgttatttacttggagagtaattccagaaagtacagagggttgggggagtgaggcggaaagagtaaagccaatgagaggtagagtaataagtgggggacaacatgaacgctcatcctgccgagaccttctgagagactgtgtgtgtgcactgtctaacccgtagccactcactacatatggctatttaaatttccatttaaattaactaaaatttaaatttcagttcctcattcacactagccacatttcaagtgctcaatagcttcatgtggctagtggctaccattttggacagggtaggtggtggaacatttccactattacataaagttctgttggacagtgctggtgcagatcctggcccagaattgtctcatctgatggggaaggaaactaagatagctatccaccaactcctatcccttattggataagagtcatccatgaagaattaactaccttgtcttttggcttgctccccctgtcagagaccaccctcaggcaaagagatgcacagagccgtcagagtgtgcaggttttgctggcagatgactctggaatggctttaggcatatgtatggatcaccaggcatcggctacagttgcatacaaaatagaagggagggagaaatcatgacacaaagaagattagaaaataaagcctattggacaaagaagaagtgaggagagaaagaaagaaagtaagcaaccatctcagaaaataatcctaggcaaagtataacacactgcctagtcaaaacaacaaggactatctcaagaccaaaaaaagaaaaatgattggcaaatatctgcattacacatttttgctgctgggaaacccaatcttgcacccrcacaccccagcctgttcctctctcaaatggaaagttgacctcacttagacctagcccctggccatggtttactactttttttttttaacagtattacaaattggatag

SEQ ID NO: 29788 - DNA, 515 bp, Homo sapiens
tccagggttcccataaaactgtacaatttcttgctgatggcacttgaagaagaaagttattaaatcattactcatgtaatacaaattttcaggatgctgaaatacttctcactatggactttgcttactacatagtgtagaaatttagatattgtgtagaaaacttggacaagakcttaacaaccttcagggtttaataattggtcttctgttgctaatgacaaaatacacgaggagataatgttcaaggatgtctgctttccttaactgcaacgttcaaggccttatgccatactacaatgggaaaaagggctggagtcagggaatgtttttattaaatactcttgcttggatatctcatgtagtgggactctcattcagcactgcattctcatggcttggtgctacacacatcacattgtaggtgctcattgtttaatgagatgaattaatgcatagtcattagaaatgatagctgtgacacaaacccatataaagaaagatggttatatttc

SEQ ID NO: 29789 - DNA, 1296 bp, Homo sapiens
atggactaaaaataaaatagcttatcgcaattaaacatttttgttttcttagatttgacctggattaatttaaaatggttagtgttttcctattaaattttaattacttaatttctaaagaatgtaataatttagaatttgggtgaaatacaaaactacctaatttccgtttactgctattgacagggaggatgggcacttctgcagaactgccatctgggacttgatttcatggatgagctgatggacataatcatagaaactgagcttgtacatgatgcgttccgcctctggatgaccaccgaggttcataagcagtttcccattacactccttcagatgtccattaaatttgccaacgatcctccacaaggmctccgggcaggactgaaaagaacatatagtggtgagtccagaaatacttgcgagtctacaggagtttccttacttaaattgttttcctaaaaaaattataaaaggattagctaggatacagttatagcaaatagtactactgtttaacctgatggggaggtgatggtcctcttttgtgaatatgtcccggcagtgtgaaagaatcagagctcatgattcccaccttctagtttcctattttcccagtactgccctatttaagcccatgctgttctccagctagacataattaatatcaaaaatgaacaattttgtcatttatggtctttatgctccatacttaaagtagtacagtagtctcttccaagaggagagtctgaattaaagtcatgcctgcctgcctttcattagggccatatgtcagaaggtagctaagttaaaaatccagtggcagcaaactcaggcccaaatgcccccatcatgactggggctgaggtcgctctcttggccattgcttcctctgcttcatagctttatgtatggggcttgtggtcatgaaaagaacatggaactttcagtcagaaatcctgattctggcccttgctgttgacaattactttgttcttttgggtgtgagtcattcaatctgagtttcaattttctcatatataaaatagggacaagagaatctctccaggagaattgaaataaattgtaactaaaatcatgtatttgataaccataataaatataattattgtatttcaatctggaaaacctgcaaagagacttttggggagttgctaacaaggcccaaattcctgccaatctataagataatgtggggataaaagagaggtggaaggataatggcagtaaaaaataaataaataaatctaattatatatacaatatagtata

SEQ ID NO: 29790 - DNA, 1067 bp, Homo sapiens
cctgaaatgagtgacaccaagccacctactgcaagtgaaggatggaataagtttagactgaaaaatataaaaataggagaggctgcttctgccaatgaagaagttgctgccccatttccagaagctgaagaagttgattaggagaaagtattcaacgcatgtcttcaattatgataaagctaggcttttctggaaggatctgcccaatagaacttacattcacaaaggtgccaaggaggcaccgggggatgagacgtgaaaggacaggttaactctggtaccatgtggcaacatgcatatagggttaaatgctatccttggactcaggcttccaatgggagtgttggaatttatcctcacagttaaagggaaattactgtattatcaatcattgtgccctgatgaactcagtagaaataatatatttctacaacccaccctcaaatcgatcaccacttatgagcacttttgctattgactgtaatctcccctgtttccatttattacctgttttgactatggagtgacttgttagtttttctcatgtttcttgtgcttggagatctgagtttcttacacatgcggrtttatactatcttttccaaatttggaatatattctgccatcatttcttcaatatttttttttcctttccatacctcctcttctttggaagtgctaattattcatatataaggcctcttaaatttgttccacatttcagcctctttttgagttttatttgggagcgtttcttttgtttcaagttcattaaactttttcttccattagtgtcatgtagtgcattttttatgtcagatttttatgatggtcatttctagaagtttgaattactttttaaaaaatctcttcttttgctatgtaacgtaatcaatcattcttccagcttattgaaagtaaagaatacacttagaacacctattttaatatccttgtcagatgatttcaacatctgtgtcagttctgggtcagttttgataaactgatttttctcctcattatgggttgtatttcctgcttttttgcataccttctagttttgtgtt

SEQ ID NO: 29791 - DNA, 565 bp, Homo sapiens
tgtggagccacgctgcttgaggctctggaatgcatcctaccatcarctcatccaactgacaagcccttgcacctgcctctccaggatatctacaaaattgatggtattggtactgttcctgttggctgagtggagactggtgttctcaaaaacggtatggcagtcacctttgctccggtcaatgtcacaactgaagtcaagtctgttgaaatgcaccatgaagttttgagtgaagctcttcctggggacaatgtggacttcgatgtcaagaatgtgtctgtcaaggaggttcatcatggcaacgttgctggtgacagcaaaaacgacccaccaatggaagcagctggcttcactgctcagtgattatcctgaaccatccaggccaaatcagtgctggctgtgctcccgtactggattgccacatggctcacattgcatgcaagtttgctaagctgaagaaaaagactggtagcacttctggtaaaaagctggaagatggccctactttcttgaagtctggtgatgctgccatcgttgatatggttcctggcaagcccatgtgtgt

SEQ ID NO: 29792 - DNA, 505 bp, Homo sapiens
tcctccctggcagtggttatcctctcgcctcagcttcccgagtaactgggactacaggtgagcgacacctcacatgactaatttttgtattttttgcagagatgaggttttgttatgttgtccaggctagtctcaaactcctgggctcaagtgatttacccacctcactctcccaaagtgttaggattacaggcatgagccaccgygcctggctaagactgcatttttttaaaccacgataacctagtatgctcttgagtcaaaaattaacttttagttttagtgttgcacttaaaagaatatagttatttgtttattttctttttggctacgctctgagtggtacctcatttaatagaaacaggctgcttggtgcacacatgcctgagctgacacattagaatacttgataaatctggagaacacattgcctgataagttgagcccagtgaagttttcatcaccttatgagagacggtgagcagaggaggtcagagcaactgct

SEQ ID NO: 29793 - DNA, 1288 bp, Homo sapiens
  misc_feature (1)...(1288): n = A,T,C or G
atatttatactttccccattttaacacaagtgctagctttattctaaacagtttctcaccacacatatatctttttacaactattaaaaggtctacaactatatgttatgtaaattgctttttcactttttattttaccataagcatttctcaygtttttacagagttttcataaatgtcatttgaaatgaccagatagcattatattgtgcatatttacaataatgtacttaaacagtagaagttgcttttgtactctgtaactctttcactcatctccttacactgctggactggaggtatgaccttttaatagttgtaaaaagatacatgtgtggtgagaaactctatagaaactgcagtgtaaggagatgagaaaggattaggttcagttagagttgcagaactacatagagaaagacatgattctgggagagctggagaatgcccattctttaggagcggttggttaggatagccagagttcatgattttcctctcaccgtcttccaatccagtccaatactaaattcagtgatggaaagccaattaagagggggttaaagggaaattgaagctcagattataatgtgatagattgtaactggaagnnnnnnnnnnnnnnnnnnnnnnnnnnnnnnnnnnnnnnnnnnnnnnnnnnnnnnnnnnnnnnnnnnnnnnnnnnnnnnnnnnnnnnnnnnnnnnnnnnnnacccaaacaccctccactaggccccacacttcactggaggtcaaatttcaacatgagatttagtggggacaaacaaaccatacccaaaccacagcaagaagggagatcagaggctgatcatcccaggtattgtgacctgctcggggaagaaaggtaaaagaaagtaagagtagcctaagacaaaatcatacctttgaaagtgaatttgatataaactctgctattaactgacactcgttatttataaataaactcattaaatataaggctatcttcatggtgcttggaatgtacccctacctcaggaaatgagcagtgcttcctacactgggtgctgcagggacaggaagaaaaaaatgatacaatggtcttttcccatgtactcatctgaaatattgtgctttgccttatttttttaaattcctgggcttccgtagctgttactattgaacagaaagcccctctttccttgttatttctccttcctagcacagcaagttctaattcccacctccctttcagcattccaattctagaatattcttctacagttccctacatttacagctgttttttc

SEQ ID NO: 29794 - DNA, 1288 bp, Homo sapiens
  misc_feature (1)...(1288): n = A,T,C or G
atatttatactttccccattttaacacaagtgctagctttattctaaacagtttctcaccacacatatatctttttacaactattaaaaggtctacaactatatgttatgtaaattgctttttcactttttattttaccataagcatttctcacgtttttacagagttttcataaatgtcatttgaaatgaccagatagcattatattgtgcatatttacaataatgtacttaaacagtagaagttgcttttgtactctgtaactctttcactcatctccttacactgctggactggaggtatgaccttttaatagttgtaaaaagatayatgtgtggtgagaaactctatagaaactgcagtgtaaggagatgagaaaggattaggttcagttagagttgcagaactacatagagaaagacatgattctgggagagctggagaatgcccattctttaggagcggttggttaggatagccagagttcatgattttcctctcaccgtcttccaatccagtccaatactaaattcagtgatggaaagccaattaagagggggttaaagggaaattgaagctcagattataatgtgatagattgtaactggaagnnnnnnnnnnnnnnnnnnnnnnnnnnnnnnnnnnnnnnnnnnnnnnnnnnnnnnnnnnnnnnnnnnnnnnnnnnnnnnnnnnnnnnnnnnnnnnnnnnnnacccaaacaccctccactaggccccacacttcactggaggtcaaatttcaacatgagatttagtggggacaaacaaaccatacccaaaccacagcaagaagggagatcagaggctgatcatcccaggtattgtgacctgctcggggaagaaaggtaaaagaaagtaagagtagcctaagacaaaatcatacctttgaaagtgaatttgatataaactctgctattaactgacactcgttatttataaataaactcattaaatataaggctatcttcatggtgcttggaatgtacccctacctcaggaaatgagcagtgcttcctacactgggtgctgcagggacaggaagaaaaaaatgatacaatggtcttttcccatgtactcatctgaaatattgtgctttgccttatttttttaaattcctgggcttccgtagctgttactattgaacagaaagcccctctttccttgttatttctccttcctagcacagcaagttctaattcccacctccctttcagcattccaattctagaatattcttctacagttccctacatttacagctgttttttc

SEQ ID NO: 29795 - DNA, 650 bp, Homo sapiens
tcatcttctcttactttctcacttgctttttcttactgttatccacaacccaataggcactagatggagagacattcggttgctattataacagatttttattttaatatctgtaactattctattatcctactgacattcaaattaatctacacaactccaaaaagtggtcaaacatgaagaacctgaggcaacacagattgacttttggtagtgtggtcatgatgtccccaaagtcaaagtttggattgaattttcactggagccacatctttgctattccactgggtgtccccttcactccaaggtaaagcaccagagccatagctctgtcttctttgcctctcagctcccttggatgactcagatggacatgacgtctgggtgcctacctctgacccagcctgtccccagtgggttgccatggagagaataagctgactataggcccaacttcaccaaaaaagagcattttgaacagtgcttcacagcctgccagagacaagggaaaacagaataaacactttttagtatgcaagacattccttgcaaaaatattaaattttttttaaccatcttctgctactctatggctgggcatgyaaaaaagttaacagatgatctcatggcttgtacacagataacataag

SEQ ID NO: 29796 - DNA, 618 bp, Homo sapiens
tcatgtaataataacacttaattattattatctattgtttatccaatgatctcatggtagcttataaacactaattaattgaagatttacaaaacgctgtgaggttcaagtacaatggccatgttacatttmcccacttatttctctaaatgctgctttgaagtctttaaatatttaattagtgattataactcaagctgctatttgggaaacctaaagtagacacattttgaatctttttgtgtgtgtgtggttttcaaataaagttagtaatgatttctggatacaaaaaaacccagaaattttactaagtaattttgacttagggttgaaactacattcttagaaatattgagatgagagagaaagctatgctgacagtctgctgaaaacgataatagtgaaatagctcattattccactacagcattctccacagcggtcggggatgcactgacttcataaagattttattatgagcctattacctatttttcacacttttctctgattatcttttttgacttttacctcaaattttaagaatagactgttttataatgggaaaaatctatgggctggtaatcctgaggtctaggctcttctacatctgtgatt

SEQ ID NO: 29797 - DNA, 603 bp, Homo sapiens
tgactagttagtgtgaatttaaacttagttcaaaatatccataagcctcaggttactcatctcttacataagaaaaatgctctttttctcacaaacaatcatttacttccatttataaataaggtatgaaatgtaaaagtcccaaagcttccaaagtttccaaagaaactaagtgaaaaattatgtatgtattcatacatatacctatattttgagtcactgtttytatttttatccatgatatttatgctcacagtttgtataccttttatttttatataatgtttaatttacagaaaattttcaaggctactagtacaaagagctatgatatatcctttattaggattcaccagatactaatattttttatttatttagatttgttctctctctctctctgtctctctctctctcatcccctcatcaatggttgatatggtttggctgtgtccccacccaaatctcattttgaattatagttcccacaatccacatctgtcgtgggaaggaccaggtggagataatttaatcatgggggcggttttccccaccctgttctcatgatagtgaattaggtctcacaagatctgatgattttat

SEQ ID NO: 29798 - DNA, 523 bp, Homo sapiens
tgaactaaatgttaaaaatcttcactgaataggagaattagcttatccctctctgtttgaacatctagtattattttacatagaagggaagcttcagtagttcaggcacctaagaaaaaggaggacaaaaagtgtggcctctggtgcctttcctttcaaaagggtcacatatctttatgtgaatagctayggccaatgacattttggcagattttttaaagactaccatgtagcttaacatatttttccattaccagatgacagattgtctttccagtagagactacccagttcatcaaggtttggttaaagacgacaaggaataaagccacaggtgacccacaatggacattgaaagagggagaaataaacctttactcaggtaagcacctgaaacttcagggacatcagttactacagcgtaatataggaaatcctaactaatacagtatggaattggagaaattaggttgatttttagaaagtactttattgaggaataattgacatataaaaagctatt

SEQ ID NO: 29799 - DNA, 534 bp, Homo sapiens
aaaaaaagtaaaaattactattatatcattcaatattgccttacatatccatataaatttcattaaaacatgaaactcatttaaataactttgtcctttgagaaagtggtatgttgactgccaaggagaaggccattcacagcaatcacgttaatgaacaggattaggaaggccaggcatggtggctcatgcctgtaatcccagcactttgggaggccaaggcgggaggtctcttgaaaccaggactttgacatcaggctgggcaacatggcaagaacccatctctacaaaaagtttaaaaattagctgggcatggtggtgcacctctggagtcctagctactcagsaggctgaggcggaaggatcacttgagcccaggaggtcgaggcttcaaggctgcagtgatcttgactgcgccactgcactccagcctgggcgacagaccaagacaatgtctcaaagaaaacaaacaaacaaacaacaaaaaaaaacaagattagaacagctgcatgctctccttttcttcggtgctga

SEQ ID NO: 29800 - DNA, 530 bp, Homo sapiens
gtggaaaagaatgaagagcaacagtaaaagaaatatgtactgaaaaaacaggaagcatattgaagcttggcctagaatttattcttggtattaaagagacaagtttatcacagtatttttttttcctgctgacctwttgctatgccagcgatgttgagtggcattttcttcttagtttttcatttcttaaagaaaatatactctatatctacaactataatatcaaataaagtgattattttttgcaacccacttaaaaaattcctatggagtagaacaaaaagagagatgaaaaagaggaggaaaaatgtatcaaaaattaaaacgagtcctcaaattccagtgtttaactaataggggttaataggggtttcagaaatagaaaacagaggtaaggaattcaccaatgaaataattgaacaaaattttctagaatgaaacgtgaatttcttttttttttttttggagacggagtctcactctgtcgtccaggctggagtgcagtggcacgatcttggctcactgcaagc

SEQ ID NO: 29801 - DNA, 1748 bp, Homo sapiens
  misc_feature (1)...(1748): n = A,T,C or G
ctctgtaactcttgattgactgatggagaaaattggatccttgcaatttctaaatgtctgtgtttatttkggagcaagtgctgtgttgcagctccaggcagggaacagtctgttttgcccacatttaccttcctactttatcctagcctangagcaggggtcaacaaacttttcctgtaaagagccagagagtaaatatttcagcttcgccgttcgtatgcaactactcgactttgctattataacacaaaagaggtgacagacaatgagtaaatgaatggatgtggctgcgttccaataaaactttatatacaaatacaagtgtcaggccaattttgcgcaccttctatgatggtatatctcaacattcctgcatcaaaagaataatctgcaaagcttttaaaataaacacactcaccagcaaatgtgttttaaaaaacacctctgaaaatccttataatctgacaaacttggaaaacctggggaaaacaatgaaccctactgtgtcctcgcactaggggtacctcacagagatgtgaggcaggaatcaaaaatcacatttcttgatagctaggatttctgtgatttcatagggccacatgactcatctaaggactgactattaggtttctcaaaatacacagctgtgtttttcttatgtcagggaagaccaacaatggataaagtcatcacttccccatttcattaaggaaaaattaatgaagagccaagaaaagcccaagaaaagttttggattttccacttggatctgctactttaaagaatgcagtcacactaattactgttcttcttgatgtataattttctgcaaaagataatctctttgtcagattaagattttgaaaatttagaattcaactacatgacatgaaaccacgtgtagagcagaaacacttaaatctgaccaaagagacagctgttatctgcagtgataggctaggatttccaatgtgagatttatctattaaaaataaaattacaactgtaatttttgaaggggttttctatatgcattctaggcctgtcctagtccaatttagctagttatatagtattttaggtaagactgcctctccttttctttttgcatgagtgattttgtttaataatttcagtaaactcaatcaaagaagaaaacgtatcctattaattggccataattctcccacacaaatctttgggtataactatcatagatgtagatgtgtatagagcctggtttaatttcttaacctcaatgatattaacattttcgactagaaagttttttgttgcagagggggctgtcctgtgcatggcagggtgcttggcagcatcccctagcctccacctgctagattcttgtagcaccctcaangttgtgacaatcagaaacacctccagatactgccaaatatctctggggtgaaaggtgggtggggaggcataatcaccgcagttaaaaaatcactgatgtagagagtgtatatatatatatatatatgccctaagaaaagcggagaatagagaccgttttccagtcatcttatgttaagttactgccctcaaatattttcctgaaatagataagcaaaataagagctcgttcaagctataattattcaggcaattgactcaattctcctctttactttacatgtgagagcaccaacagtgatacttagctctcctgggcaaactgtgcagggtgtcaatgcttcaggaacacctgagaaccatcatttgtg

SEQ ID NO: 29802 - DNA, 1748 bp, Homo sapiens
  misc_feature (1)...(1748): n = A,T,C or G
ctctgtaactcttgattgactgatggagaaaattggatccttgcaatttctaaatgtctgtgtttattttggagcaagtgctgtgttgcagctscaggcagggaacagtctgttttgcccacatttaccttcctactttatcctagcctangagcaggggtcaacaaacttttcctgtaaagagccagagagtaaatatttcagcttcgccgttcgtatgcaactactcgactttgctattataacacaaaagaggtgacagacaatgagtaaatgaatggatgtggctgcgttccaataaaactttatatacaaatacaagtgtcaggccaattttgcgcaccttctatgatggtatatctcaacattcctgcatcaaaagaataatctgcaaagcttttaaaataaacacactcaccagcaaatgtgttttaaaaaacacctctgaaaatccttataatctgacaaacttggaaaacctggggaaaacaatgaaccctactgtgtcctcgcactaggggtacctcacagagatgtgaggcaggaatcaaaaatcacatttcttgatagctaggatttctgtgatttcatagggccacatgactcatctaaggactgactattaggtttctcaaaatacacagctgtgtttttcttatgtcagggaagaccaacaatggataaagtcatcacttccccatttcattaaggaaaaattaatgaagagccaagaaaagcccaagaaaagttttggattttccacttggatctgctactttaaagaatgcagtcacactaattactgttcttcttgatgtataattttctgcaaaagataatctctttgtcagattaagattttgaaaatttagaattcaactacatgacatgaaaccacgtgtagagcagaaacacttaaatctgaccaaagagacagctgttatctgcagtgataggctaggatttccaatgtgagatttatctattaaaaataaaattacaactgtaatttttgaaggggttttctatatgcattctaggcctgtcctagtccaatttagctagttatatagtattttaggtaagactgcctctccttttctttttgcatgagtgattttgtttaataatttcagtaaactcaatcaaagaagaaaacgtatcctattaattggccataattctcccacacaaatctttgggtataactatcatagatgtagatgtgtatagagcctggtttaatttcttaacctcaatgatattaacattttcgactagaaagttttttgttgcagagggggctgtcctgtgcatggcagggtgcttggcagcatcccctagcctccacctgctagattcttgtagcaccctcaangttgtgacaatcagaaacacctccagatactgccaaatatctctggggtgaaaggtgggtggggaggcataatcaccgcagttaaaaaatcactgatgtagagagtgtatatatatatatatatatgccctaagaaaagcggagaatagagaccgttttccagtcatcttatgttaagttactgccctcaaatattttcctgaaatagataagcaaaataagagctcgttcaagctataattattcaggcaattgactcaattctcctctttactttacatgtgagagcaccaacagtgatacttagctctcctgggcaaactgtgcagggtgtcaatgcttcaggaacacctgagaaccatcatttgtg

SEQ ID NO: 29803 - DNA, 1748 bp, Homo sapiens
  misc_feature (1)...(1748): n = A,T,C or G
ctctgtaactcttgattgactgatggagaaaattggatccttgcaatttctaaatgtctgtgtttattttggagcaagtgctgtgttgcagctccaggcagggaacagtctgttttgcccacatttaccttcctactttatcctagcctangagcaggggtcaacaaacttttcctgtaaagagccagagagtaaatatttcagcttcgccgttcgtatgcaactactcgactttgctattataacacaaaagaggtgacagacaatgagtaaatgaatggatgtggctgcgttccaataaaactttatatacaaatacaagtgtcaggccamttttgcgcaccttctatgatggtatatctcaacattcctgcatcaaaagaataatctgcaaagcttttaaaataaacacactcaccagcaaatgtgttttaaaaaacacctctgaaaatccttataatctgacaaacttggaaaacctggggaaaacaatgaaccctactgtgtcctcgcactaggggtacctcacagagatgtgaggcaggaatcaaaaatcacatttcttgatagctaggatttctgtgatttcatagggccacatgactcatctaaggactgactattaggtttctcaaaatacacagctgtgtttttcttatgtcagggaagaccaacaatggataaagtcatcacttccccatttcattaaggaaaaattaatgaagagccaagaaaagcccaagaaaagttttggattttccacttggatctgctactttaaagaatgcagtcacactaattactgttcttcttgatgtataattttctgcaaaagataatctctttgtcagattaagattttgaaaatttagaattcaactacatgacatgaaaccacgtgtagagcagaaacacttaaatctgaccaaagagacagctgttatctgcagtgataggctaggatttccaatgtgagatttatctattaaaaataaaattacaactgtaatttttgaaggggttttctatatgcattctaggcctgtcctagtccaatttagctagttatatagtattttaggtaagactgcctctccttttctttttgcatgagtgattttgtttaataatttcagtaaactcaatcaaagaagaaaacgtatcctattaattggccataattctcccacacaaatctttgggtataactatcatagatgtagatgtgtatagagcctggtttaatttcttaacctcaatgatattaacattttcgactagaaagttttttgttgcagagggggctgtcctgtgcatggcagggtgcttggcagcatcccctagcctccacctgctagattcttgtagcaccctcaangttgtgacaatcagaaacacctccagatactgccaaatatctctggggtgaaaggtgggtggggaggcataatcaccgcagttaaaaaatcactgatgtagagagtgtatatatatatatatatatgccctaagaaaagcggagaatagagaccgttttccagtcatcttatgttaagttactgccctcaaatattttcctgaaatagataagcaaaataagagctcgttcaagctataattattcaggcaattgactcaattctcctctttactttacatgtgagagcaccaacagtgatacttagctctcctgggcaaactgtgcagggtgtcaatgcttcaggaacacctgagaaccatcatttgtg

SEQ ID NO: 29804 - DNA, 1748 bp, Homo sapiens
  misc_feature (1)...(1748): n = A,T,C or G
ctctgtaactcttgattgactgatggagaaaattggatccttgcaatttctaaatgtctgtgtttattttggagcaagtgctgtgttgcagctccaggcagggaacagtctgttttgcccacatttaccttcctactttatcctagcctangagcaggggtcaacaaacttttcctgtaaagagccagagagtaaatatttcagcttcgccgttcgtatgcaactactcgactttgctattataacacaaaagaggtgacagacaatgagtaaatgaatggatgtggctgcgttccaataaaactttatatacaaatacaagtgtcaggccaattttgcgcaccttctatgatggtatatctcaacattcctgcatcaaaagaataatctgcaaagcttttaaaataaacacactcaccagcaaatgtgttttaaaaaacacctctgaaaatccttataatctgacaaacttggaaaacctggggaaaacaatgaaccctactgtgtcctcgcactaggggtacctcacagagatgtgaggcaggaatcaaaaatcacatttcttgatagctaggatttctgtgatttcatagggccacatgmctcatctaaggactgactattaggtttctcaaaatacacagctgtgtttttcttatgtcagggaagaccaacaatggataaagtcatcacttccccatttcattaaggaaaaattaatgaagagccaagaaaagcccaagaaaagttttggattttccacttggatctgctactttaaagaatgcagtcacactaattactgttcttcttgatgtataattttctgcaaaagataatctctttgtcagattaagattttgaaaatttagaattcaactacatgacatgaaaccacgtgtagagcagaaacacttaaatctgaccaaagagacagctgttatctgcagtgataggctaggatttccaatgtgagatttatctattaaaaataaaattacaactgtaatttttgaaggggttttctatatgcattctaggcctgtcctagtccaatttagctagttatatagtattttaggtaagactgcctctccttttctttttgcatgagtgattttgtttaataatttcagtaaactcaatcaaagaagaaaacgtatcctattaattggccataattctcccacacaaatctttgggtataactatcatagatgtagatgtgtatagagcctggtttaatttcttaacctcaatgatattaacattttcgactagaaagttttttgttgcagagggggctgtcctgtgcatggcagggtgcttggcagcatcccctagcctccacctgctagattcttgtagcaccctcaangttgtgacaatcagaaacacctccagatactgccaaatatctctggggtgaaaggtgggtggggaggcataatcaccgcagttaaaaaatcactgatgtagagagtgtatatatatatatatatatgccctaagaaaagcggagaatagagaccgttttccagtcatcttatgttaagttactgccctcaaatattttcctgaaatagataagcaaaataagagctcgttcaagctataattattcaggcaattgactcaattctcctctttactttacatgtgagagcaccaacagtgatacttagctctcctgggcaaactgtgcagggtgtcaatgcttcaggaacacctgagaaccatcatttgtg

SEQ ID NO: 29805 - DNA, 520 bp, Homo sapiens
ttcttgagactgaaataaaggtgggttcctgacacaaagaatcaggtacagtggcatagttggaaggtcagtcttgaggagtgccagcagtaagagtgcctccagtgataatactggactccaacgtgtggggctgaaattcttacttaagctcaacaatgacattccaacagtaaataggaattaraggtgggttagggagtaacctccatgtggggagaggagggatgaataggcaataaaccacacagattttgatagtgtgaaacatacgtggcaggttttattcatctttaccttcccactttcacccacccccgacaatgcagaggggtctttattcttatttccaaaatcaatttttaaattagagatgtttatatttgaaatgtttaattcatttcaactatgtagatttatggaattcattctattgatcaaattgagtaaataacttaaaagttctgaaacttctactttgtttctaaatagaaaatctctttcattttagcaagtctat

SEQ ID NO: 29806 - DNA, 551 bp, Homo sapiens
tttcacaaatgaaattttgaagaagatgaaccagagaaaagaggatgtgctatatggttctatttgtacaagttcagaagcaaaacttgggagataaaagcccttttgttacacataattgtagaacaccaggggaagtattcttactgggaaatgggtcctatgagcccagtgaaargtagcaaataaatgaatggagaagtagactgtgaatgtgaaagtgctaatattcaaactgattcaaaccttcccattttctctaatttgtaatagtagtttacttccagtaatacaaaaaccatcagggatagtgtctgtatagttctaaatattatttgtactcaattcaaccactcactgaataacattctacccaacattctgcaaagttttattactgagctgaaggaatacaaaagaatctcccaaaattcccaggtagaagaaaacctatatttgaaccacataattcagggtagcagatgctaaaaacagccggagtacatgactgtttgcaaaatattgaaacatatatttttattttgaggaaa

SEQ ID NO: 29807 - DNA, 594 bp, Homo sapiens
cagtagtcccaaactctttccagtcaatatccacgactttctatacctaggtaacccaccttccgacttccattgctatcacttagttttgcctgttctttaaattcatataaatggtatcagacaggcaccattttgcatctggtttctttcatacagcctaatatctgtgagactgatccacattgttgcatgtatcagtagtttgttttctttggcaagtagtattctgccgtattaatatatcacaattttattgtccactcttttgctgatggacactgaggttgttttcagtcgctggctgtgagattatgtggttatgaatgtccctgtacatgccattcaaacatctctaaggtcccctgttatccacctaagagggcactggtgaaatgatttctccagaggcctttctatattttccagtttttaacaacccgcatgtggctctgacaagatgtttgtttacatctatgaamaaagtctatctataaccaaggtctttggaggaatttgaaaggaaagggggtcaacagtgagaatatcaccaatatgttcccacttaacccccacaactagtctaggctggga

SEQ ID NO: 29808 - DNA, 572 bp, Homo sapiens
tattttctggctgagaccacacagttgagtctcatgtgggaaagccttttcttctttctcacaggactctgaccctactaacagggtagtaattctggcatcagtattygggaagaccagttatttcttctttggtctgtgttcttatgaaggacctcacagtactgcaaggaaccctggacagatggcaccatgcccaaatggatcctgtcttatccccaaattccttttttaagagaagggaagaaagagatgaatagaatctgagtttatcttgccacagtcaagagaaaagttccttggtggatttgtgttaacttcctagggctgccataacaaatgtccacaacttggaagttcacaatgacagacatttcttgtcccacggttctggaagccgaaagtcctaagccaaggtgttggcagggccatgctctctctgaaggccctcgaggaggatccttccttgcctcttttcagtgtctggtgtttgtcagcagttcttggcatatgttggcttatatcacccagtctctcctgtgtcattacatggcattctccttgtctgtctg

SEQ ID NO: 29809 - DNA, 572 bp, Homo sapiens
tattttctggctgagaccacacagttgagtctcatgtgggaaagccttttcttctttctcacaggactctgaccctactaacagggtagtaattctggcatcagtattcgggaagaccagttatttcttctttggtctgtgttcttatgaaggacctcacagtactgcaaggaaccctggacagatggcaccatgcccaaatggatcctgtcttatccccaaattccttttttaagagaagggaagaaagagatgaatagaatctgagtttatcttgccacagtcaagagaaaagttccttggtggatttgtgttaacttcctagggctgccataacaaatgtccacaacttggaagttcacaatgacagacatttcttgtcccacggttctggaagccgaaagtcctaagccaaggtgttrgcagggccatgctctctctgaaggccctcgaggaggatccttccttgcctcttttcagtgtctggtgtttgtcagcagttcttggcatatgttggcttatatcacccagtctctcctgtgtcattacatggcattctccttgtctgtctg

SEQ ID NO: 29810 - DNA, 604 bp, Homo sapiens
ttttttttttttctaattttcttgttatatctccctaaattatgcttcccgggatcatgtatcaaatagggtcttgttttggatcatctcatcctagtacattctaatcaagtgtagctgaagacttggcaaagaataaattagtcctgttataaggcccaatctttttattagtgatatcataatcacaacagctataggtaaaataaccacagagtaatgagagtgagaaagatataatttatttagcatgattttggagaagaatttttggaggggtctggaggggatttgtgcagtgaacaaaggattgaattataagaaggatgaccttggggcatagataaaagtgattgtattgagccttcatgcttgaaaattgaatgtgtactacatacttctcatatctcctgttgactttgtccataatcagtataaataaaatcaacatgttttataactccactgcacacatctgacatgtctgattgctgtttcactgccactgcaatgtggaaagtgaatctagaaggagtataatagatgawtatacattatcaccctgctgcattagtgaagaggtttgcaaaggactgattttgat

SEQ ID NO: 29811 - DNA, 624 bp, Homo sapiens
tctgaaaaatcattttacaaccttttgagcacagaaagtgaatgaagaagagccataaaaaggcagccacaaagaaaagcaaatggttaatttctggaaaagagcattgcgttttgtggaatttaaaactgcttcttctgcctgaggctatttaaaataattttatattttagaagcttgaagagatttaagtacagcaatgtgccccttatccatagctttgtttttcatygtttcagttacaataagaattctgagagaaagacagaaattgctctatcattattgttataattgttctattttgttattagttattgttatcaatctcttattgttcctaatttagaaattaagttttatcataggtatgtatgtataggaaaaaaagcatatatatagggttcagtactatccacagtttcagatatccactgggggtcttggaatgtatccgctgaagatagggcgggatgctttaaccatttagctcaggattatacaactataactagtagagctgagatttaaaagtctaagcccttagccatggtggatagtcagttaatagtgagcttttattttgcttgattgtctgagtttgagctgacaggccgatgcaca

SEQ ID NO: 29812 - DNA, 481 bp, Homo sapiens
gagtcaggtggcggtgggggagggcagacgccacacacacctgggtccactggccgcacggatcctggaaatgctagtgtgactttcctaagggttctttcaaaggacacttttagacctgccttttgtcccaaggattctagttgcttcatctttagtaccacagactggtggctaaacaacgaacatttactctgccaggacaacctcgctgccctcgtggttcccagcacccgcccggacctccacaccaggctactgtttccccaaacgagtgagtgtcctactcccttccggcagccctgaccttctcctgcctcggattctttcattctcttctcggctcctaaattcaagctccccttataaagctcagcccagattcccatgataacgtgctctgcgattatttgccgattccatcaacattttttgagtacctgttgtgtgcctgacacctmcggcactcagagctggaagt

SEQ ID NO: 29813 - DNA, 1163 bp, Homo sapiens
gatccaacagtgtcattttcctaggagtgtccccaattacgacagctcacctcggcagctgaaacttattctttcagatttcaaacgtctccttccctcctccctccagcttggccttcacactcttaataaaacattaaaaaacaccccacactatgctgcctgcacgtgtttcgcgagcttccctgaagtctgaccgtttctctgcatttccatattacagccatctttatccatttgcgtatagaggtgtccgtgcatgaggtctgatttcctgggaagtcagctgtgatgttattgtgttcaaagggaaagacagagaatatttttcactgctgtagaggctctgtgcctgccttttaaacttgaaagatcagtgggttttctgtggaacctgaacacagtattggaaaaagtgtttctgtaagaaaaaaactcattttctttaaagagccctactcattagcttacaggatttaactttctttggggggagggacaaaaaacataaaaatagatcactttattgagcatttgctctgcgccaagcagccttccaagtacttcacacaaatggttttatttaatctcgtaccatctctcctagggctgttgtgaggagtagaygaattaataaacacagagaacttaaagcaatcgagcatgtaatacttgttcaataagcatgagctatttgtgagtgacagtccagtgagataggtaccattatcatgcccattttacagatgaagaaacagaggcaggaaagttctggtatcttgctcaaggtgaagcaatgtgtaagtggttgagtcaaactaaaaaccagctcatagagaaggcaagatatagttcagtcctaaacgatgtttatatctgcacatcctttaagtgtaagatgccagtttgcactccaatctgttatcgttttctgtatttctttctcctccttctgagaaaataatctagaatgtaggataatatctatggcctcaggaatacttcttgatttttctcttctgtttctctgtcttgaaacagcatccccaaagatgctagtggagaatttaaaactatgagctcttggagctgattttaattttgctcgggtagcccaagggttaagttaaagatacagaggctgagttatcacgggcaggagt

SEQ ID NO: 29814 - DNA, 507 bp, Homo sapiens
attcatccaatctttcattcactcaacaaacattagatatttacaatgtgcaagctattgcactgaatgttaaggagaattgaaagacatgaacaatctactcattactcccaagtagcttatgacattgtaaaggaataagtaatctaaaaaaaattactctaatgcaagatgaaatgtgacatgtgttcaataaatacatgatgaatgtgggagcagggcctagcaggaaatatctgacttataactttacgtaccttttacatatctttttytaaaaaaaaagatatgtttttatttctaccttgctttgttttcttgtttgcatttatttgttttcttgttgaactcaactcctccctgctaaatttcttacctggggcaagactttgcatatgtgttttaaaaaatatctttatgtccctcataaaatgtatatgaaaatttgttatatagtgcaagcatggttgaatctcagttggtctggattggacagcatggttacca

SEQ ID NO: 29815 - DNA, 507 bp, Homo sapiens
attcatccaatctttcattcactcaacaaacattagatatttacaatgtgcaagctattgcactgaatgttaaggagaattgaaagacatgaacaatctactcattactcccaagtagcttatgacattgtaaaggaataagtaatctaaaaaaaattactctaatgcaagatgaaatgtgacatgtgttcaataaatacatgatgaatgtgggagcagggcctagcaggaaatatctgacttataactttacgtaccttttacatatctttttctaaaaaaaaagataygtttttatttctaccttgctttgttttcttgtttgcatttatttgttttcttgttgaactcaactcctccctgctaaatttcttacctggggcaagactttgcatatgtgttttaaaaaatatctttatgtccctcataaaatgtatatgaaaatttgttatatagtgcaagcatggttgaatctcagttggtctggattggacagcatggttacca

SEQ ID NO: 29816 - DNA, 675 bp, Homo sapiens
ctttccttgatggtcaggaagaaaggtcaaaagaaaggttgttagagctaaaatctgaaagaggagaaaagtttttcagataaagagagtgtgcgtgtgtattttgtatgtgagtattgtgcgtgttctatgtgtgctgtatgccgtgtgtgtgtgttgtgtgtgtgtgtattgtgttgggatagagcagcaacacaacagtgtccctagcggaagaagtaatgtctgtgatggtaagggaaaagagggtgaaagtgagaaaagagtgagagagaggctyggacaacttaaacaactggaaggccagcaggataatggttatggtagaggtggagagaaatatgaagttggaatgggatgggatcagggacacatcatgccaagtcttctatgccacattgggaatggaaagtcatgaaaagattttaagctggagagttacctaatttatcatagattttaaaaagattcctcttgcagctgggtcttaagaattagtggctcttcattgatgagttcatgtcctttgtagtgacatggatgaagctggaaaccatcattctcagcaaactatcgcaaggacaaaaaaccaaacaccgcatgttctcactcataggtaggaattgaacaatgaaaacacatggacacaggaaggggaacatcacacaccggggc

SEQ ID NO: 29817 - DNA, 1524 bp, Homo sapiens
aataaatattggctcttattattatgttgaggtatgctgaaagttagtggcagaaacaggaccagaacattgatacccaactcactactctggcctttggaaaacatggtgagcctatctctcttcttatttgtcacacccttcatgttttggcaggactcaagagctaacataaggtactgaaatcaaataattacttctaccattacagcgctaagtggtctacttctgcattttgagctctttttcagaattctttaaacatcttatctgcactgcagtctggaaagggaaatcacagagagaagggaaatcatactttggctttccaacaccctctacccaagttgcccaagacaaaactgtgagcaaggttaaacgtctgactcattagtaagaggaagtctttttaggcagttcctctgttgaatagataaagtggatcaaacaaaagagatgacagattagaaactgtctggtggctaatgtactgtttactgcagtataaatgactggtgtttgggaaatgacagatgagagagaatacaaatgtggacgtaaataatttccaggtttctacagtggaggagagtcatggttggttaggatgttgacagggaagggggaagtcattggttggagtttcagggaaatgagaagagcatggagaggacttttgaattaatccattgatccacgagttaccatagcctccgtgctgcatacagaaggtaccaygaaggggtatagttcttttgctcttttctcactgcctgatccattctaaatgtaactcttgttccagaccaagtgcagaaatctttacagagagaaagcattgggatggggatgaggctatgctcagccagtctgggagatctctaggggaaaatgtcataggaaaaaatagtgataaatatgcttaaaagaaggcaaggaagaaagcaaggaaggaagaaataaagaaaaagagagagaggaagaaagagagaatgaaaagaagggggttgggagggaggaaataaaagaaaaaagaatggaaaggaagaaaggaaagagagaggaaatatggtatatcagttattctgcatgatatgtttgagttgagtttgtggtggttacttgccccagggtatcaaaagaagtctccaattaatttgtagccagtgtaaccatatagcatctatttgcttagttttcaataataataatactggttctgattaaataaagcatattgtcaaacttattatttgcaaacatattactgttgtaactggtaattgctcagatctctttcggttcctgccccgacacccaaaagtcaagagggtggaaggtgaccctttctaagactttgacatggaaattctttattctgtttcaggaatggcaaattccagtttacagatggatggaaaagatttcttccttgtgataatagaatgcaggacagtatttctcaatagccatgccaatgacattttttgactggttaattctttgaggggattgtactatgca

SEQ ID NO: 29818 - DNA, 1524 bp, Homo sapiens
aataaatattggctcttattattatgttgaggtatgctgaaagttagtggcagaaacaggaccagaacattgatacccaactcactactctggcctttggaaaacatggtgagcctatctctcttcttatttgtcacacccttcatgttttggcaggactcaagagctaacataaggtactgaaatcaaataattacttctaccattacagcgctaagtggtctacttctgcattttgagctctttttcagaattctttaaacatcttatctgcactgcagtctggaaagggaaatcacagagagaagggaaatcatactttggctttccaacaccctctacccaagttgcccaagacaaaactgtgagcaaggttaaacgtctgactcattagtaagaggaagtctttttaggcagttcctctgttgaatagataaagtggatcaaacaaaagagatgacagattagaaactgtctggtggctaatgtactgtttactgcagtataaatgactggtgtttgggaaatgacagatgagagagaatacaaatgtggacgtaaataatttccaggtttctacagtggaggagagtcatggttggttaggatgttgacagggaagggggaagtcattggttggagtttcagggaaatgagaagagcatggagaggacttttgaattaatccattgatccacgagttaccatagcctccgtgctgcatacagaaggtaccatgaaggggtatagttcttttgctcttttctcactgcctgatccattctaaatgtaactcttgttccagaccaagtgcagaaatctttacagagagaaagcattgggatggggatgaggctatgctcagccagtctgggagatctctaggggaaaatgwcataggaaaaaatagtgataaatatgcttaaaagaaggcaaggaagaaagcaaggaaggaagaaataaagaaaaagagagagaggaagaaagagagaatgaaaagaagggggttgggagggaggaaataaaagaaaaaagaatggaaaggaagaaaggaaagagagaggaaatatggtatatcagttattctgcatgatatgtttgagttgagtttgtggtggttacttgccccagggtatcaaaagaagtctccaattaatttgtagccagtgtaaccatatagcatctatttgcttagttttcaataataataatactggttctgattaaataaagcatattgtcaaacttattatttgcaaacatattactgttgtaactggtaattgctcagatctctttcggttcctgccccgacacccaaaagtcaagagggtggaaggtgaccctttctaagactttgacatggaaattctttattctgtttcaggaatggcaaattccagtttacagatggatggaaaagatttcttccttgtgataatagaatgcaggacagtatttctcaatagccatgccaatgacattttttgactggttaattctttgaggggattgtactatgca

SEQ ID NO: 29819 - DNA, 1524 bp, Homo sapiens
aataaatattggctcttattattatgttgaggtatgctgaaagttagtggcagaaacaggaccagaacattgatacccaactcactactctggcctttggaaaacatggtgagcctatctctcttcttatttgtcacacccttcatgttttggcaggactcaagagctaacataaggtactgaaatcaaataattacttctaccattacagcgctaagtggtctacttctgcattttgagctctttttcagaattctttaaacatcttatctgcactgcagtctggaaagggaaatcacagagagaagggaaatcatactttggctttccaacaccctctacccaagttgcccaagacaaaactgtgagcaaggttaaacgtctgactcattagtaagaggaagtctttttaggcagttcctctgttgaatagataaagtggatcaaacaaaagagatgacagattagaaactgtctggtggctaatgtactgtttactgcagtataaatgactggtgtttgggaaatgacagatgagagagaatacaaatgtggacgtaaataatttccaggtttctacagtggaggagagtcatggttggttaggatgttgacagggaagggggaagtcattggttggagtttcagggaaatgagaagagcatggagaggacttttgaattaatccattgatccacgagttaccatagcctccgtgctgcatacagaaggtaccatgaaggggtatagttcttttgctcttttctcactgcctgatccattctaaatgtaactcttgttccagaccaagtgcagaaatctttacagagagaaagcattgggatggggatgaggctatgctcagccagtctgggagatctctaggggaaaatgtcataggaaaaaatagtgataaatatgcttaaaagaaggcaaggaagaaagcaaggaaggaagaaataaagaaaaagagagagaggaagaaagagagaatgaaaagaagggggttgggagggaggaaataaaagaaaaaagaatggaaaggaagaaaggaaagagagaggaaatatggtatatcagttattctgcatgatatgtttgagttgagtttgtggtggttacttgccccagggtatcaaaagaagtctccaattaatttgtagccagtgtaaccatatagcatctatttgcttagttttcaataataataatactggttctgattaaataargcatattgtcaaacttattatttgcaaacatattactgttgtaactggtaattgctcagatctctttcggttcctgccccgacacccaaaagtcaagagggtggaaggtgaccctttctaagactttgacatggaaattctttattctgtttcaggaatggcaaattccagtttacagatggatggaaaagatttcttccttgtgataatagaatgcaggacagtatttctcaatagccatgccaatgacattttttgactggttaattctttgaggggattgtactatgca

SEQ ID NO: 29820 - DNA, 508 bp, Homo sapiens
aacataattgggctatattatttgtgctagaaagtatttaaagttttgatgaaaaataggagtgcagaaaacacaagggtcaggaaagcaacgttattgtgtgggaggatttgatgtgaaagagaaagacaaaaagccactccaacaggaatgtgaacaactgcttcacctgaccacatgatgctaactttcagagcagagaacttggaaactcgttttatgaaacaaaggaaataaggttgatggcttcgggtcagaatataaaagatctagtgtgccaagattagaaactcttycttgctttgcctggaaagagggagtcttcgcaggctgtttgtaaggtggatgtgataatgaagtttgaagctctacagaggatagagaaaactgaggtcaccgatgctagtgaagaatgtgtcaggaactgtagaacacacatagcatgttaagcataattgtgtaaaaatgaaaaattttacacaatcaattccaataatcagttttaaga

SEQ ID NO: 29821 - DNA, 771 bp, Homo sapiens
gaaatttgtactaaggaaataatcagacctacaacataagcacttagctataggaatactggtcaaagagttgttgatcatactcaaaaattagaaacaatctaaatatgcaataagaaatatttaaaataaattatattgcattcatctgatgtaatattatacagacatttagaaagctcttgtagycaaaggataagtaggttacctttggcatattaaatgagtaaaactgatactaagttgatatacccattgtgatataattttctttggttcttaaatatttttatatacctaaggaaaaagattaaaagcttatgaaaccaaaatattcacagtttagttatcacagtctagtgtgattatgagtaatttttattgttttaatttcatatttttctgttcaaagttccattgcttgtttaattaaaaaaaacttttaaataatattataaaatgaccatcacagaaaaaaatatcattaggcaatattgccatgactatagacctttctccctacactgttattcttacagttggatgctttgaatcgggaagtgatatatcgccttgcttttcgctggagaaggaagcgccagcctttgtgagcatgtgtatcacaagctaactagcacgaagattgcatagctctttctacataaggctactgttcgcagaaatttggtccatggtctccagtctcttggggtctcacgctctgtgaaaatcttcgtgtttttccctagcccccagagtcacctttcacac

SEQ ID NO: 29822 - DNA, 1524 bp, Homo sapiens
gtttctcaccatgtcttctctctctcgttcatcttatttttctaaaattttttccagtttcagtggaccagattataatgttagtgattataacgctaattcaacatcttccacatccttatgtaacaatttcttccaatagatttatatatataaatatatgcatttatgtcattggatatatatattatgcatatttggcatgtatttttaataaaatgtagatatatgctatatacatatctgcatgctcatttcatcaatatctcatgtttagtctatccaattcttttctctcatatgttcatttaatgttgagttttagaatctcctccctcccaaaacaccgcctgtatccagtctgacttccttgcctttgccttatctacctggaaactatttgtgtttattgatcctaaattttttgaatatgtttgtcagttgggatcaccttttcctcctggcaatcttgtcattactgggtgatgcatgaaaaatcaacaatacagaaaataccaaaatgtctttcctggcttccctttacccgttggactttcttattcaaggccactttccttctctgatgatcctcttgggtggaagagaaagtcacagtaagatcatggatgacagtgaacactgttgggtgtggtttcattttcagagctgggttkagagccttcccttgaatgaagaaccctccccagctggaaggtgatgctattgaaggctcagctgacaacatacatgggcatcaagtcattggccacattcatgcctcaagtgtcctaaaaccgaagatgatcaaaagaaaactgctgttcagcaagtggagactggcatgcagattccctggcctgcaagcttagagcaggaaggtaatcacatctatggctcttagctgcactcactccttattcctctctgtctatgatgacagctccttctcccactgcttttttcttctgtatttgttctctccagcagctgctgtcacctctgtctggtattacctctgtgtcccatgggctgccatggtgccaggtccttctgatccccatcccctgtttgctctctgaactctgctctgttcccactgctgttgtcctaagagtccctctcatggccacaggagagcccaacttccttgtccccctccaagtgcatggtgtgagctgctaaacacagggttctttgcctggaattgcacagcttgagtaatttgcctttcctttctgcatcccaaactccattgcccctttctgccaggagcattgctttaatacgtcatttacacacagatttttctcttgggacagcttttgagcaacacaactaagtcaaactgtaaccctcaccttgtacatgggaatgagaagtgttaaaactgagcactaagaactccaaatcaaaaactaaattagaacctgggtcacagacgagagttccctactagcctggagtcaggtgtgtcttcatctctagatgggcaaccttatgccagcgtggatgaagtttccaggg

SEQ ID NO: 29823 - DNA, 1524 bp, Homo sapiens
gtttctcaccatgtcttctctctctcgttcatcttatttttctaaaattttttccagtttcagtggaccagattataatgttagtgattataacgctaattcaacatcttccacatccttatgtaacaatttcttccaatagatttatatatataaatatatgcatttatgtcattggatatatatattatgcatatttggcatgtatttttaataaaatgtagatatatgctatatacatatctgcatgctcatttcatcaatatctcatgtttagtctatccaattcttttctctcatatgttcatttaatgttgagttttagaatctcctccctcccaaaacaccgcctgtatccagtctgacttccttgcctttgccttatctacctggaaactatttgtgtttattgatcctaaattttttgaatatgtttgtcagttgggatcaccttttcctcctggcaatcttgtcattactgggtgatgcatgaaaaatcaacaatacagaaaataccaaaatgtctttcctggcttccctttacccgttggactttcttattcaaggccactttccttctctgatgatcctcttgggtggaagagaaagtcacagtaagatcatggatgacagtgaacactgttgggtgtggtttcattttcagagctgggttgagagccttcccttgaatgaagaaccctccccagctggaaggtgatgctattgaaggctcagctgacaacatacatgggcatcaagtcattggccacattcatgcctcaagtrtcctaaaaccgaagatgatcaaaagaaaactgctgttcagcaagtggagactggcatgcagattccctggcctgcaagcttagagcaggaaggtaatcacatctatggctcttagctgcactcactccttattcctctctgtctatgatgacagctccttctcccactgcttttttcttctgtatttgttctctccagcagctgctgtcacctctgtctggtattacctctgtgtcccatgggctgccatggtgccaggtccttctgatccccatcccctgtttgctctctgaactctgctctgttcccactgctgttgtcctaagagtccctctcatggccacaggagagcccaacttccttgtccccctccaagtgcatggtgtgagctgctaaacacagggttctttgcctggaattgcacagcttgagtaatttgcctttcctttctgcatcccaaactccattgcccctttctgccaggagcattgctttaatacgtcatttacacacagatttttctcttgggacagcttttgagcaacacaactaagtcaaactgtaaccctcaccttgtacatgggaatgagaagtgttaaaactgagcactaagaactccaaatcaaaaactaaattagaacctgggtcacagacgagagttccctactagcctggagtcaggtgtgtcttcatctctagatgggcaaccttatgccagcgtggatgaagtttccaggg

SEQ ID NO: 29824 - DNA, 734 bp, Homo sapiens
gatcctctttgcatatataatagaacacagttcttagcctagcattaaacatgttccgtaatctgagcctagtatgttttttctggctctacttcattcttaagctatctatgcaatacagatacgaatttgaacatgcccaacctctcttgcctcagttatttcatttgtccaattcctttcatctagcatgcagtcaccaggatttgcctgtgctgtaaaccccactgtagctcaaggctccattcagattcaccctcctccatcaagcctactcttgacggttacatttaatccttcctgatagattaagtccttatcttcatggtggaccttctgttctgggtgctgttattcaccttgtggtttctgggctgtcttggccaagtcttcccccataatgttagccatctcccagacttaaagtttacaaagcgtacattgtcctttttttgtttgtttgttttttkttgttgttgttgttttggtttctttttttgagatgaagtgacgctctgtcgccaggctggagtgcagtggcgtgatcttggctcactgcaacctccgcctcccaggttcaagtgagtctcctgcctcagcctcccaagtagctgggactataggcacccgccaccacacccagctaatttttgtactttcagtagagacagggtttcaccatgttggccagaatggtcacaatctcttagcctcacgatctacctgcctcggcc

SEQ ID NO: 29825 - DNA, 599 bp, Homo sapiens
caaaagcaatacaggcttgtagttaaaagtctaactatagagtttttgtatgcacattggtattcccaggaaaacaaatatatatagccatgtttactgttttagactagaagttatgaaggagcttaaactataatgtgtttaataacatgaatgaaaatagcaccttgactcatgcttgctttgctgttaaataggaaagaaatgtggcaatggaacaacttcttttgaaagaaattggcaatgatgttttcacttggtgcctgagagaccaggtatgcctgttcttctctttcgattttctgatattgagccttttgttgtcttgagggacaagtctgagtggagggcaggctctctcagttctggacacatctgtgactgctgatggatcaggcgactactgccttgctgctttttgatcttcatttcggacctgcagagacttcagatgttagcggttgaaytgtcagatgatggagaaccagctcggggcattcaagtggggctgaagggatcctgagataaagtactgagtctggtgtgaatacttgtacagaacaaaaaaaaaagggaaactgaacttcaaatctttcctt

SEQ ID NO: 29826 - DNA, 567 bp, Homo sapiens
gagggcaaagtaatggaagaatacaggatggtattcttcgggtgttggaaatgctccatttcttgacagaggtggtgttcactttacatcagtggttcccaaactttttggcaccagagaccggatttgtggaagacaacttttccacagatcaaagaggtaaagagatagttttgggggatgaaactgttctacctcagatcatcaggctttagattctcayagggagcacacaacctagacccttcgcaggcacagttcacagtaagttcatgctcctatgagaatctaatctgatctgacaggagccagagctcaggcagtaatactcctggccctccgctcacctcctgttgtgcagccaggttcctaacgggccatggatcagtactggtctgcaacctgagggttggggacccctgttttacgtaactcacttaactgtatacttctgatcttagctcaagatgctaatattttgccaaccacaaaatgttgtttcaattggtccaaaaatgtgagtgatctggttcaataggatttttaatgtcttaattatatcaccaa

SEQ ID NO: 29827 - DNA, 1024 bp, Homo sapiens
atttgatcacatactatatcaatgtatcctttgcaatctgtatytgtgatttattttgctcatatgcccattctttgagcttttcactcctgctcctacatactgaaggtctgcaagcctttaaggaatgaacctacataagcaatcttgaaaggatatcaaatcacaaaggaaaagtatgttaaaaaaaaaaagacaccttcatttctaatgcttatccccttgcctgaaacagtatcctccatgaacagaatcctttgagttcatctttgatcacccttccctttgcatgtgccttttccttttgtgttttagcttcttaaaacatttgtagtaatacttccttggtagttaaaggttgtctagtccaggcactacttttacgtaaagtaactcctgtgaggtatatattatcatcagctttctttcacaaagaaaacagtcaagtaatctgcttcaacagtttgcataaggaagtaaggtgatttgctcaaagttgcacagccaataagtggcagacctacaatgtgaatcaggaggatttagctctagagatcatatatcccacaacaacagcatacagtgtgcaacaggctcacgtatagcttaagggaatcaatgtatagtcagcaacgtatgctttgaagcatagttctccctcttaataacatttatgataatggacatattactttgctttttgagcttcagcattgttattggtaaaacaaaactaataatcttgttctaattgtgattttttatggattaaatttaaaaaatgtataaatactacctgtaactttctgatgagaaaaacaagacatggagagattaaaagacaggtatggccatttatttaaatttatgtaaatatatatattcataactatatatatatttttaatatagtattgaataatattttttcttttggctataacttccatttcctggacatacaaaattatcttctccagctaaccccatttcttactcctccaacaaggtcagctcttctctg

SEQ ID NO: 29828 - DNA, 1024 bp, Homo sapiens
atttgatcacatactatatcaatgtatcctttgcaatctgtatctgtgatttattttgctcatatgcccattctttgagcttttcactcctgctcctacatactgaaggtctgcaagcctttaaggaatgaacctacataagcaatcttgaaaggatatcaaatcacaaaggaaaagtatgttaaaaaaaaaaagacaccttcatttctaatgcttatccccttgcctgaaacagtatcctccatgaacagaatcctttgagttcatctttgatcacccttccctttgcatgtgccttttccttttgtgttttagcttcttaaaacatttgtagtaatacttccttggtagttaaaggttgtctagtccaggcactacttttacgtaaagtaactcctgtgaggtatatattatcatcagctttctttcacaaagaaaacagtcaagtaatctgcttcaacagtttgcataaggaagtaaggtgatttgctcaaagttgcacagccaataagtggcagacctacaatgtgaatcaggaggatttagctctagagatcatatatcccacaacaacagcatacagtgtgcaacaggctcacgtatagcttaagggaatcaatgtatagtcagcaacgtatgctttgaagcatagttctccctcttaataacatttatgatartggacatattactttgctttttgagcttcagcattgttattggtaaaacaaaactaataatcttgttctaattgtgattttttatggattaaatttaaaaaatgtataaatactacctgtaactttctgatgagaaaaacaagacatggagagattaaaagacaggtatggccatttatttaaatttatgtaaatatatatattcataactatatatatatttttaatatagtattgaataatattttttcttttggctataacttccatttcctggacatacaaaattatcttctccagctaaccccatttcttactcctccaacaaggtcagctcttctctg

SEQ ID NO: 29829 - DNA, 586 bp, Homo sapiens
  misc_feature (1)...(586): n = A,T,C or G
cattttgttcaaagccgccattcaacaagtctccaggaagctccaaactttcccacattttcctgtcttcttctgggctctccaaactgttccaactactacctgttacccagttccaaagttgcttccacattntcaggtatctntagaacagcaccccaatctatggtatcaatttactgtattagtcagttctcatgctactgataaagacatacccaagacggggtaatttataaagaaaaatatatttaatggactcacagttccacatggctgggaagccctcacaattgtggcagaaggtgaaaggcacgttttacatggcagcagacaagagagaattgagaaccaagtgaaaggggtttcccctattaaaaccatcatatctcatgagacttattcactaccacaacaacagtgtgaggaaaaccacccccatgattcarttgtctcccaccaggtccctctcataacatgtgggaattacgggagctaaaattcaagatgagatttgtgtgagggcacagccaaagcatatcacttgttttggagtatgcattgcataaaggaatagaaatgtaac

SEQ ID NO: 29830 - DNA, 602 bp, Homo sapiens
cctcaaccttccagactcaagcgattctcctacctcagcctcccaagtaactgggactgcaggtgcttgccaccacacccagctgatttttgtattttttgtagaagtgggctttcgccaaatgtggcaggtccattcgagtccaggtaggtctcgaatccctaggctcaagtgatcctcccactttggcctcacaaattgctggaattataggcttgggccactgcgcccggcacagatctgttttttatcccagctttctggctcactacctgtgataccagtgctctctctgcccagyccctctgcttttttggaattgggactcactctgacctgttctcatggttgctgtagaaatgtcatattcttcagaaacctcagctctggccatagttgtttgctggggattggcgggggtgcttgacactgggtcgatcagcatcctttcctggaaatttgaaattgggactcagagattcttatgagatgtaaatttgggagctatttgtttcaggaatattttgtgcagtggttttggaaatagagaaaaatgaggcagacattaagagaaaaggagagacaccaagagaaagaaatgc

SEQ ID NO: 29831 - DNA, 870 bp, Homo sapiens
tgtgtgagtaatatcacttatttttagccacctctaattttccatcttggtcatcacatacaatttcttcttccctctcctccccattcccagctgaacaatgatttccaaattagtggctcattctggctttatcatacaataaatctgtgggcagcgcacttctctcacggaagacatcaagtaagtgagcgcactaaaatgggcccccatcttctgaaagaaagggagattaggggcgcttgtcatctttagcttcatgaccttaagcaagttatktggcctctgggcatcagttttctcatctctaaagtggggatatatatagtggctctctcataaattgatggagattgaaggagttactatgtgtaaagcacctacagtgccaagtacataggattaagtgctccataaatgctacctaagttattaccgtgatggacagcatcctcagctgcagctctgtggctgaactctgcctgtctgaagcacgggctgctcctgggggcacagaaatgctgtctgaatactcttagatttcactcaggatacagactaaagctcaactctcatgcctctggggtttgcatgtgcttttgacccaggactcttttcctccttctccttcttcctctttgaagagctgtgcatcttcaagacctagctcaaatgtcacctgttctaggaagccttcctgacttcccagaccattagtccctctttgctcagtgtacctgtgtcacgttgtgcagaacctttacctaaggaagcagaagggctctctgtgtccaaggtgtggttagtatctgttcagccacttctgtgcagcaggtggtgaatacatgttccctgtgtggagctcaaata

SEQ ID NO: 29832 - DNA, 518 bp, Homo sapiens
cagtggacgggagctggggctggagagggtaacgacctgcccaaggtcacacagcaccgcagtggcacagccaggactggcacccacacctcccgcggaaccttgcaggggcccaaaccacctgggttctagagctccttgaactggcctcttgggctttagggaagagctggggacgagggaatggggtggggccacaccacattagcacggacccttgggtgacttgggcggaagwcggggcgtcagggccgcctgcgcgcgcgtgacctccaagggtccttctggcgctcctccggcgctgcgtgcggcgctgggctgcggctcacccgacacaccggcggcagccgcggctgccccctactggcggaaggaagagtcgccgctccggggcccttggcggccgccgctcttcgcgcctccttggcctggctgccacccttccaccctcgggggagaccccgcgctctgtgctcactcggggaagagaggctcaatcacggcctggaccagcacta

SEQ ID NO: 29833 - DNA, 554 bp, Homo sapiens
ttattgtggcacttgtggaaaactccaaacttcttgatggggcatatgagtctcactcttcacagtctgacccctgcctgctcctcctccattgtctcctacattccttaccggccttgttccctcaacatgccccatacctgcccaattccaggcctttgtccttgctgttctcactgcctgcagtgactgttcctcttaatctagctggctaaaactccaaggcctccaaaatacctcctycttcttcaatagccccagattcatccaagcctgggcactcctccttcactggactctcatagcattttgcatgcagttcttttatagcatttgtctcattgtgtgatgactgcttgcttgtctctcagccttggctccccagcaacccactgggcagtaaattcctggaggacaagagcttgagtctcctttgttgctgtattcaggtctaatagctgggctgtacaaatagagccctgctggttgtcaaaatactgaaatatttttatgttggctggcaaatagctgtcttgtcatctcctctaggatcc

SEQ ID NO: 29834 - DNA, 448 bp, Homo sapiens
atttcagctcctgagagggtcggcagaagagtcacttgaacctgggaggtagaggttgcggggagccaaaatcaagctgctacactccagcctgggtgacagagtgacattctgtcaaaaaaaaaaaagaaaaaatctaatggttttctaaggggcttcccttttgcttggctctatgcttctccttcctgccagcctgtaaagaaggatgtgttttcttccccttccgccatgattgtaagtttcctgaggcttcccwtgccatactgaactatgagtcaattaaatctctttcctttgtaaattacccattctcagatacttccttatagcagcgtgagaacagactaatacaatatcttatcaatggttcttttgtgtggcagctttatactaaatctctcccatatctctcaaactctagcaaatactcatgtcttttccatca

SEQ ID NO: 29835 - DNA, 570 bp, Homo sapiens
atcactgataaattactctaagaacaatgccctagattgcaggcaaattcatttgttagtgctttccagaatctacctgcggtggtcatgattcttcttccactaacgtggttccataaaaatatcacagctatccctttaaatcaagttcaatctgaatgtatgaccctatcctgctgagcaagcaaaaaattgcatctcagtcattttttagactctttacccctacaccagtaagggtcatrtaatagccacggagatttcacgtagcaacatggtatctgaccatctgaacacacatttttctgaaatgcgctttacccaatctgagaatcactctacagttgagaattccattgtttccgtttgacgtggggcacagaatattttgctacatctggaagcaatcagactcagactccaaactccctgtatgcaccctttccagatactgggaaatttccttagggctgacttaaagagaaaagaatcccccccgcccaccataatccaatcatagaactcaagaaaaatttgaaaaatcaagatgggatgattggttgtttgcga

SEQ ID NO: 29836 - DNA, 611 bp, Homo sapiens
cattttctctattactaagtatcatagattagttatttaataggacttgttattttacagaaagtattaagttttattgagctatctgttattcttaaaagatttgaagtacagaagaatgccaagaataaagtaaaacaataacccagaaataattattattaacatttaatgcttatctttctagccacatattttatttgccaaaaaaatggaatttcctacttggtaaactgatttttatcttgatataataaaaatagtttctatgttattaaatatttttcagcagcattattttaatgcatgtgtagtattctatcatttgtctttgccagactttatttaaccaatactacattgctattcatttaggcaaattttactgttaagaaaattaacaatgatttatttatttaaaatttatttagtcattgaactatatactgaatgtttactatgtatctatccttgagcctcatataggatactaaaaatgtattaaatgacaacatccttcctttcatgaatgatgatatgagagttagagacaatgaaagcttaaggaaacattttatcataagtaccataacagaaagtatagggwgttt

SEQ ID NO: 29837 - DNA, 1048 bp, Homo sapiens
ccccacctctctctctctctcacacacacacacacatagtgtgatcccaagtgagagttgcagtggcaaagaccttaacacctactgccaacagcaggacagtttttgcctcaataaaggatgacctattttttaaaattatagccaattacccatgtaggatcctaaccccaaacctgacagtatcacctaaagacagggttacttcaatttcagatattgaaaaacaggaatcagagtataacgaggtctcccagagaatggaaccacaagcctagggactgtagaaactccctctatggcttctggggggaatgcaccttatctccttttctgtttactcaccttcctcatggcctaatatgactgccagtctaagtgtctacatcaggatctctcagtgcaaacacccaatagaatttgctcataacctctggaacttagttcaaattttcatgagagaatctgattggttgttgacctttgggacaagtcagggggtcaatcaatggtggcaaacaagaaagggactttagaatggttaagcaatgtcagacatttgtagcacacaataaaaagaggacaggcaaaagtacttactcagtgtagcttctgactcctaaaactgagcccctgctgctcctcagttttcttgtcttcaaaacaagaatatccatgttgccctccttcagagctggggaatatctgaagcaagtgtatgtgaaacactttaggaaattaaagcatgtcctttccttcactaatttaaggaaaatcttccatccaatcttgagaagacttgaggaagaagtaaccagtcttagaattctggtaagcagacacagtactagattcagcttagacactgtcttacatgagctgggcatcacagaggtgaaatcttaagtacgaaaaygttctgtcatgtctttagctctctctgaattggacacagagtcagctgaccagcagaccaggaaaggacatgaaaaatgcattttcaacctttttttttctttttggactggtgaactttcattacctttgg

SEQ ID NO: 29838 - DNA, 1943 bp, Homo sapiens
  misc_feature (1)...(1943): n = A,T,C or G
tccaccttcttggaaagcaacccattcccaggagaactcactcctgagagatggcatttaatctctccatgagggtccctcgtggaccaaacacctcccaccactcaacaccattacactggggaccaagcctcagtgagttttggtgaggaccaaccataccaaaccatagcaccactggaacaacaagattgagaatggctatcacaacatggaaatcctaacccattttcctagaaatatactctctcattcatcccaatagctctgcagtccccacaacctctacttatcgtcctctgacccacaaccccaccaccaccttcacaaggaagagcaaagcattcatcaagaattttctgaactttgaaccacaaaacctaccgtgtgttcctctctgatttccgttacattcagagggtcccatggatctcaaactaaacactctagctctgttctatatcccgtattctcctaaaagaatttgtttctattaattattccatctctgtctataaattcaactttcctcccaccactgactttttcccatgagtacttaaatatattcaagtctctcccattgttaaaaaatgggagagtgacttccagcatgacagtatgaggactcccagtactctcaaggaaaactgttgaaaattatagacaacaacaaaacatctacagtctctgaaaatggtccattggcaaacagcaaatgaagaaatatctttcaagagaagctacgaaaattcagggagacaagtacctgtgggatttgaaccaagtctgctctctcctatccctcccagctcagaaagtcaagagactccacttgggatgtcttcatttttctgctggagaagcaggacaaaagcagatggttatgggccatcgctagcattcagagccgtggaacacaatctctttccaaaggagccaaacctcatttgcacagaatatgaagaagcttaaacctaagggagctctcgggagcattggaatttgtggtgaaatgcaactgggaagagattcaagacacaggtgaacctgtaggttactggcttgcagggaagaactagggaataagacagctgggaggatccttcttgtgtcaaagcaagtatcaaacaggaacctcaaactattccttcaaagaagccacaatttgattagatttatttgtgaagcaatgtatgcccacaattgcaatnnnnnnnnnnnnnnnnnnnnnnnnnnnnnnnnnnnnnnnnnnnnnnnnnnnnnnnnnnnnnnnnnnnnnnnnnnnnnnnnnnnnnnnnnnnnnnnnnnnngaattctactcagaaactgaggatcatgagatagtttacaaaattaggatcatgctattctataacttgtttttttctcaattttcatacaatgaacaaaacagtccgtcacatgcatgtatattatactttctctattctcctactgctgaaaaacacagcaatcaatgccttccatcatacattgttgtccacatgagataagattaatrtacctccagatagattcctggtctatgaagggttccaaagcgaaattctaaaaatggtgagtcacagtgtgacttgtgggaaggtggcagctttaaaatctatgtgtaagttcttgggggctttctcagaagaaaccagctctactactgtttagatagatgtctgccacgcatattaactcacacttatgattctcctcacttcctcttcaactaggccagcaatcaacacaggctggagaactgagtattaaacagtgaatgatgacgattaacttgagggggtttcattccatggaatattttaaaggctgaaaactactgaacagacaaaaccttctgcaaagatccttttatattcataaggttgataacgaaacttgtctctccatcatgagagaactgagaacaaacagcc

SEQ ID NO: 29839 - DNA, 994 bp, Homo sapiens
cacaaacaaatttctacaaggcgcccaacacagcagccagcctgggaagccaggatggaccagagaccgctgcctgcggcctgagcacggccttaggtcaggcaggcaaataaaaacacgtctgcaccgctacttactaaactagggatggtgatgaacacgctataaaaatgttgaaaagaaggattctgagaaataattttttaacattacattctctagtattctcatcgtgcttcagtttggagtcttggtcaaaactggtgtttaataaattcaatgaaacatttattatgagtcaggaaccacgaaaagtggctggaacacaaagatgaatgacacactccttatccacaaggtgcggccccttcttctgcaggctgcacaggtccgaggactggccaggctgcctcgaacaccaggccgagctcatgccagcagcactgggcacacggcccgcgagatcccgaggcctgagcgcatccgctcccgggatccccgccaggaggaaggcgctgccacccacgtgtcacagatgggaacatggagatgctgggggtagcgccctaaccctgaccaggagatgggacgtggtcgagataggactcgaaccccgggaatctggctccagaatctgtgtttctaaccatgacattatctagccaagtaagagaagaacattgttttcctaccacagaatgttagggtgggatctgctaaggagaacagcagcaggtgtgtgcaygtgcgctggcagagacacgcgaggagaggcagaacggaagcaaaacatgaaaggagacgagcgcagagtctggtatggtccttcggtaaagtgatgagggaaacaaaagatctccgttagatgccatctttaaataagcagcttgttaacgtggtgttcacatgaaacgccctcgtctccttagcaacgcggccctggccccagcagggccctctctccaaagcccttccagggtcaaagggcagcgcc

SEQ ID NO: 29840 - DNA, 1073 bp, Homo sapiens
gtgaagttctagaataggcaaaattaatctgtgatggagaaatcagacaggttgcctggcggaagggctggggcagggcatgagggagatttctggtatgatgtgaatgtgagtgttctgtatcttgatatggacttggattacacaggtgtatggatttgtcacggctcatctcatttgtgcatttcattttacctcaaaagaaaaagaaaaagttgggctggtaggttgagaacctgggccagtgttgcagggagcccttacctccaagcttgacccagaggtatctcaggcatcctgcctcctccgctggggctctcttggccaaacctatgtcagatgatggggagccagagaaaacctacaggggttcttggcatggcaacctgaaagggaacctcatgtgctcaagagtgtcatgtgacagggagagcacaggcccatcacaacactacatcacaatacagaaacatttacacgggcacaggaaggaatgagtggtctttccatctccagacagacacaaatcattgatactttaaaaaaaaatagtggtatattayacataacataaaatttaccatctgcaacatttttaagtgtacacttctaaggcattaagtatattcacactgttgtacaaccatcaacagaactgttttcatcttgtaaaacggaaactctgtccccattaaacaacagctccacattacccccctcatccctcgtcgcccacaattgtactttctgtctctatgaatttgacgactctaggtacctcatgtaagtggaatcatttagtatgtgttttttgtgactggcttatttcacttagcataatgtccttgaggttcatgcatgttgtagcatatgtcagaatttgctttcttacaaaggctgaataatattccattgtatgaatatgccagattttgcttatccattcatagattgagggtcacttgggttgctcccacctttttgctactgctgctataaacacggatgtacagatttctgtccaagtcttcatgttcaattcttttggacatacacccaaaagtgggactgct

SEQ ID NO: 29841 - DNA, 550 bp, Homo sapiens
tggcacagtggttgctattgccttaatttgtgcggcttcttccattgcttcgataccatgaatgtcaacacagcgaaaagcaaatctctccttagaatgatcattgaatgatcatgaaaatagtcttgaccttttggaacctctgctttgggattcctgcatgacattaaaaggtaagcccctagacgggggagagattgtcccctccacactccttcagcagcaagtattggtgttaagctctgattttccatttcttctggtttctaacagctgagaaattctttcctttgttgccagtcttctttaagcattcttttcccttgatctccagaatgccactgctttttggtttcttcccggctcagtggctgttcccttcccttctccttgctggtttrtggtatttccttttctatctgacctttaaatgcaggacttcacaaaggcccagccctgagttgtgttcttttaactcagctcttgttgggtggtctcaagttccacggctttaaataccagttttgtgcaggttccccaagctacacct

SEQ ID NO: 29842 - DNA, 605 bp, Homo sapiens
gaaacagggtagtatatgwccttcacctttgttctttcttgccaggttgttttggctgttgtgggtttcttgcatttccagatgattgcaaagagctgtttctcaatttctgcaacaagtgccagctgaaattttggtaccagtttcattaaatatgtagaacaatttggtaagcattgtcatctttaccccatgaacaccatattttgtagtctctaatatctcttaaaacaaacggcccccaatccatgcccccaaaattgtcaaatacagtccagcatcttcatttatacaaaagaaaagaaattattttgcatcatgctaagaaccggacccagctctgaatcaaactgtgatatgcaatgtaggcctgaataaaatactcagctgctcaggtcagaccatccccaatgaggtcaacagtgacttcacagttttcctgatttcacaagcaaaatggttgtgtatgtgacttccattaatttagtacaagagtgcattcaactcgttttctcagaaaaaaaaaaaaaagcaccaaaaaaaggttttttccccaaaataatatggaatcatctacttctagtaagacaccatgcctgacaatt

SEQ ID NO: 29843 - DNA, 778 bp, Homo sapiens
tgttgaattttttctcactctcctataacaactttgcttatgttaggatattcttaaaataggattttcccaattaagagtccatcaaagatacagaaggtattgtgcctgatcaataactccaaaccattcaatctatataaaaatttggctacaaggtgctagataaactcagctccccatctgtatgctcttcattgattgcacacctctctgggaacctaccagatccaggggtggaggctccatgattccaaaagggtttgctgagttcattcccaactagcctgttgggaacaagttgggagcttcccagtgccattagcaaggcagtcgcccaacagatccagaggcgtcccacctcccaaattcagccaaattcttttcaaaactgactctgtttgtagatatacatgctttaagcacttcccacagaagattatataaaactacaaagaaaatagataactgcattcatttcccatgactgggtgggataacatattcagttttaattgactctggagaatcyaagtcaattagacgaagggtataataggaacaagaagctgtattatttcactcacttgattattttataaaaatagaaagaaataaatgtaaaatttgaatagtcccacagcattgagatgtgccatctataccaagctgttttgagccacttggggtacatatctttattttaaaactagctgaaaagtggatttgaagattcaatagtctgagtcgtgcactcttctgtaaaacattaggtctg

SEQ ID NO: 29844 - DNA, 601 bp, Homo sapiens
agtacttgatggcagtaacccacagtacaatcacgatattcagaaggatgtggtgaggttgagcttattctaatcctgtgctctcctgctgcatgaaataccaagtccaggcagtggaagcattttggttacaaatgaaacatctacatggaacaggagcgcagtcagcatcaaaggctataagttaacagtgtctatctctaaaacagatgggtgttaaggacttggtgagatgtcagtgtctcagcaaagtgtcccaggcttcactagaggaatcagtatctgaatcaagacaccaacgtagcagttcagaaccaaagctccacaaaccaatgatttttgttttgttttgttttgtttttgtttttgttttttaaagtggtgatatggttttgttgtgtccccgcccaaatctcaccttgaattataataatccccatatgtcatgggatgggcccagtgggaggtaattgaataatgagggccaggtctttcccatgctgttctcatgatagtgagtaaatctcatgagatctkatggttttataaagaggcgttcccctgcacacactgttttgcctgttgccatgtaagacatccc

SEQ ID NO: 29845 - DNA, 601 bp, Homo sapiens
agtacttgatggcagtaacccacagtacaatcacgatattcagaaggatgtggtgaggttgagcttattctaatcctgtgctctcctgctgcatgaaataccaagtccaggcagtggaagcattttggttacaaatgaaacatctacatggaacaggagcgcagtcagcatcaaaggctataagttaacagtgtctatctctaaaacagatgggtgttaaggacttggtgagatgtcagtgtctcagcaaagtgtcccaggcttcactagaggaatcagtatctgaatcaagacaccaacgtagcagttcagaaccaaagctccacaaaccaatgatttttgttttgttttgttttgtttttgtttttgttttttaaagtggtgatatggttttgttgtgtccccgcccaaatctcaccttgaattataataatccccatatgtcatgggatgggcccagtgggaggtaattgaataatgagggccaggtctttcccatgctgttctcatgatagtgagtaaatctcatgagatctgatggttttataaagaggcgttcccctgcacacactgttttkcctgttgccatgtaagacatccc

SEQ ID NO: 29846 - DNA, 1205 bp, Homo sapiens
agaatggtggggtcgggagggtgatgtggagtcagttccagacttttgccctgcgggacctccagagtacactgcctgctgggcaaggggaccagagtggggagaggccgtggggggtgctggggcaggaggatcttgcgtgccagggggatgtgtagtggtaagctccctccagggcctcctgaagaactcacatttggcccccaggaggagtggcccttggactctggctaccagaggcatcccagccaactgggaaacttcaacagcttcaggtggatgagagaatgtagtctcctttcctctactacctctaccctctgtcctgaccttgaccactcagaggcagaggtgagcagaggagggtaaaagcagaacatgccatctccttcccctcccacctccttccagcctaggccaggcaaagaccagggcaaggagatgagctctccgttagaytggaaataaacactgaaatctagaccagatgttttcatactaacaggtactcagggagttttgagattttccaagatgccatcgaggaactgaaaagtgctgcccagctgcagtgagggctttttaaaggcagtttcatgtctacaccccactgagttcagactgtccaatgaagcactgacattgttacacatgcgtgttgtggacaacttgagaaaacacttgtctgcaggaagatgaaattaaaatcaagtgtgatcctaccaccgaaagataagtgttactgatattttttgttaataacattccagttttttatgtagttttggggtagcttattattttcatgtgatttcaaacttggagaaagtttccaagatgagtccaaggagctctcatatgttcctcacccagatccaccaactggccacattttgttccatttgctttattattccttctacctctctctctctaaagtattattatatgttaaatatatcttaatataattatagttatgttaaatatatcttaatatagttacaaataattatgttaaatatatcttaatataattatgttaaatgatgttatgaatattaaaaattataatttaaataatattctaatataggcagacatttagtttctgaaccatttgggaccatgctgaaaacatcattttcctttacaccattttccttcagtgccagaggggaacagagcagtgagaggttgtgggg

SEQ ID NO: 29847 - DNA, 1205 bp, Homo sapiens
agaatggtggggtcgggagggtgatgtggagtcagttccagacttttgccctgcgggacctccagagtacactgcctgctgggcaaggggaccagagtggggagaggccgtggggggtgctggggcaggaggatcttgcgtgccagggggatgtgtagtggtaagctccctccagggcctcctgaagaactcacatttggcccccaggaggagtggcccttggactctggctaccagaggcatcccagccaactgggaaacttcaacagcttcaggtggatgagagaatgtagtctcctttcctctactacctctaccctctgtcctgaccttgaccactcagaggcagaggtgagcagaggagggtaaaagcagaacatgccatctccttcccctcccacctccttccagcctaggccaggcaaagaccagggcaaggagatgagctctccgttagattggaaataaacactgaaatctagaccagatgttttcatactaacaggtactcagggagttttgagattttccaagatgccatcgaggaactgaaaagtgctgcccagctgcagtgagggctttttaaaggcagtttcatgtctacaccccactgagttcagactgtccaatgaascactgacattgttacacatgcgtgttgtggacaacttgagaaaacacttgtctgcaggaagatgaaattaaaatcaagtgtgatcctaccaccgaaagataagtgttactgatattttttgttaataacattccagttttttatgtagttttggggtagcttattattttcatgtgatttcaaacttggagaaagtttccaagatgagtccaaggagctctcatatgttcctcacccagatccaccaactggccacattttgttccatttgctttattattccttctacctctctctctctaaagtattattatatgttaaatatatcttaatataattatagttatgttaaatatatcttaatatagttacaaataattatgttaaatatatcttaatataattatgttaaatgatgttatgaatattaaaaattataatttaaataatattctaatataggcagacatttagtttctgaaccatttgggaccatgctgaaaacatcattttcctttacaccattttccttcagtgccagaggggaacagagcagtgagaggttgtgggg

SEQ ID NO: 29848 - DNA, 909 bp, Homo sapiens
attatccagtcacattttccccaaagtctaggccaattagatttgaccagctatgccagggccctgaagatttagagataaaatgtctacaactagtattaaaaatgacctagtttattaagaaaacccattaaagtatttcaaaaacaaagtctggtctgataattttatgctatgaaaaggaatccttcttttaagtggctataaaaattattatgcaacatcaaaaaatataaaatctatttttgtctgaactgcatttgctccttaaatgaagatcaccctgaaggaggcaactgagatttagaaaaaatatttacaataaagccataacctcatgcacattagctaagtaaggctaaaaggaaatagcaaataaaattatagaaatttacctttttttaaaaaaaaagaaaaaggtayagggataacacccattaacactgatttaaataggaatgataaaatttatgagtgggtgtaaaagcagaagatttacaggctaactattgaacatgatactgttttgctagacaacaccataagatggatgagctgtaacagtgacttggtttaactaaaaagcagctgctctctcaagtatgcggtctctccaaacaatgttaaatgctctgattcactgattaaatatgaaatgtttccactccgaaattcacacatgatgtttatgtggaggatgtactcagaattatgacactgtgatgacaggcagagacagtgtgagccccggagtggccgctcagtgcagaggagactgcccactgtgggtctgcacatcacctccccaccaccaagagggtagccctgaccacacgtcttactgctgggggttatacacagggcagtcataaatcatcactgcaatatttataacttcttgccttgaac

SEQ ID NO: 29849 - DNA, 544 bp, Homo sapiens
gaatgccatttttcagttattaaaaaataagtctacmatcgaataactgttcatgtctgaattgagggcatttcatttttctccaaaaataagccgcagtctaagttcaactggtttaggaaacactaaaacatcccattgattgagagctatcatttctccatcgctatcattttcacctaacctttcttttaagtcatccaggcatcgctgaaggtggacttctcctgctgtgactaaaacgtgctctcccgtttcctgaattaaaatctggacacagggatcagcctggtttaacagtttcattccttttacgagctgaggcatttcacctaggttaacaaaacgaaatagattaaatatgatataagaactaacacaattcaaagacaatggctctggctactgaagggaaaattacattgaaataaactcttaaaacaacaatttatttttcttccagatagtgtagtgatgtgaagaaaactaccttctagtaatttttttgtacagatagcaaacatgacacatccgcaagcttacc

SEQ ID NO: 29850 - DNA, 555 bp, Homo sapiens
gtcttgtgagatgcctacatgagagtaacctagagaagatgtatgaaatacaaatttctgggttcacctcttgaaattcgtattcaataattttgggatgagatctggaaaccaacagtttaaaaagttccttatatctgtcaataggggatgatgagttaaagacgtaaatatatactttagatgacttggcaaaatgctgttaaaaagaatgatgcagtgtaatttgtattgatattgcacaatcttcaatatgcattaaaaaattttcccctaattcctgcactgatcaacaatatgtattattaaaaagaaaaaattggccaggcatggtggctcacgcctgtaatcccagcactttgggaggctgagacgggcagatcacgaggtcaagagatggagaccatcctggctaacatggtgaaaccccgtctttacttaaaaaaaaaaaaaaaaattagccgggtgtgkcggcgggtgcctgtagtctcagctactcgggaggctgaggcaggagaatggcatgaacctgggaggcggagcttgcagtgagcc

SEQ ID NO: 29851 - DNA, 993 bp, Homo sapiens
atcccatccaatgtcaactaagggtaaaagtcttagatctcactccctgcctacaaaccttctaacagccctaagaggctctgcaaattgagccctcaacattgtcactactgtcactcagactcaccagcacagcaagcacttagaatcagaggaacaaagacatcttcgatttgtaagcaacttggagatcatctcatttaagctacttgttttgcagaaatgggagcctagctataataaatgtcttgacccagctcacacagcgaactattttggcatacgaagactccaaattctccatttcatgctctttgtcctgcattatgtggtttatgcataaagccaatacatcataattaaagatattcattctttatttctttaatttttatgcattagaagttgccaggccgggcgtgatggctcatgcttgtaatcccagcactttgggaggccgaggtggatggatcacctgaggtcaggagttcaagaccagcctgaccaacatagagaaaccccatctctactaaaaatacaaacttagccgggtgtggtggcgcatgcctgtaaccccagctacccgggaggctgaggcaggagaatggcttgaacccaggaggcggaggttgcggtgagccaagatcacrccattgcactccagcctgggcaacaagagtgaaatccatctcaaaaaaaaaaaaagttgccaaaatttttcagcagctgtaccttgggtcttcattagaaaggtcctgtggaagattatattaacattctcaatcatgtgctctgcctctgtgtaagaagattacactgccccattgatgtcaggtttgatgatgtgacttgctttggccaatgatgtgagtggaattgaagcatgtcacttataagcaaaagcttttaaagtcatttatgtttcctttatctctcttttctccctctgctataaaattagtatgtcccaaatagggactgttccttcagcct

SEQ ID NO: 29852 - DNA, 424 bp, Homo sapiens
gggcggtacccaggggtgggggactccctctcttccctatccgcatctcccactctccctgcactctctggcctccgcccgccccgaggttggagggagctggattgggccaggaattccctatctggatgggttttgcgggaactgtgcatttactgttgctcaaggggccattttttcatctgcatctcaaaggagatcacgaaccacacttcccttttccgaagaagagaaaagcttgaacccttggcttagatggctgtcctgtgcacggagggtagtgacgtgtccaaagtgaggagcgccaacttgggccggagtccagaaatagaaccggrgtcttctagttctctgccctttcttcctcctcatagagtttcattactattttttttttctgatattttaagctggttcatgtttt

SEQ ID NO: 29853 - DNA, 1127 bp, Homo sapiens
cttccccatcttaatgccatcagcacagcctgttcaaatctctgtctctcacctctactttgcttgtttcatcaccttctctcactgaccctcctttgtttcccttgtaaggaccattgtaatcatgtcatctgaccagcctgggtaatccaggatgatctcttgacctcaagatccttaacttaatctcatctgtgaaattctttttgccaagtaaatttacatattcacaggttccagagattagaacctaaacatttttgggaggggtgaggaggtattcagcctaccacagttaatgaagagtgagtggcctgagataaggtcttagagattggcagggaccagatcatgataggtcatgatagggagtctgtttttcagtcatagtgctgagaggtttcagtaggggaatgataggatttgatgtgaaaaagtctccctggccgctggatggcgattagactgttgggatcgagagcagaaggcctcagctttttattcataacatcatacggtggatctcagtcttgctgtacgttatgatcacacctcaaagcaattatatctgaaccactgagggctggacccaagtatcagcctttttttgtttgtttgtttgttttttaagaaaaagagcattctaattgtagccaaggttgagaaccactagtttcatagatctgaatccattttaccttttcagccttagctcagtaggagcttctcgcatccatcacttactgcatgagctacttgaccatttcttagacaaacttcctgtattcccacctgtgcctttcaaaatatacctagtctagggaggcctacgcggactgtcagggcccagctgacaaactctcctccagaaagcttctccagtgccctgtagtaggaatgatttgcttccttccctggctcccatttgcacttagatttctcagccctgatcacagtcagctgtatattatcgtctcctttgcttatttactcatgccttcaacaaatactgtaccacttggctgaatgctctgctagacactaggatttactacaatgcaaagacagtcttggttgggcgtggtggctcacacctataatcccagcactatgggrgggtgaggtgg

SEQ ID NO: 29854 - DNA, 2166 bp, Homo sapiens
tccctccatgaaaattcctctgcacacagaattctgcacgtgatttcaygggtttcagagactcctgactgaaaggggaaaggatgggagatccccctgtattagtccattttcacgctactgataaagacatacccaagactgggcaatttacaaaaggaagaagagatttaatggatttacagttccacgtggctggggaggcctcacaagtaggatggaaggcaaggaggagcaagtcacgtcttacatggatggcagcaggcaaagagagaaagcttgtgcagggaaactcccatttttaaaccataagatctcgtgagactcattccttatcacgagaacagtgcagggaagacccacccccataattcaatcacctcccaccaggttcctcccatgacatgcaggaattgtgggagttacaattcaagatgagatttgggtggggacacagccagaccatatcaccccctttccccacagaggagagcacaggggagtctggtgcttcctcagggcccgtgtgcacagggccccacatcacccagctcctgacatggccagcagcatccggccagtgtgcaggcgatggctgtgtggcgaggctgggatctccgagcctgtaagtgtccacaggctgtctttgttctgcctgcatctcactccatgacagcagtggcccctcaggggcagggatagtaaaggaaccaatgacagacatggcatctgctcttcttctgggggtggaggcagagaggtgagtccacgaggagacctcagccaccctgtagcacacgccaccccttccaagctcacttcagaccttggtgggtgtggtctgcccagcattcccccattcccccaacccccttcttccctaacagcccccagggagcagcctcccccaggctctctaaccactccaaccaaccctcctgctccggggctggaaagccagagccacaggttcagggctggacatataacttagccagagagaggcacagagtaaagcctgggcccttcactccagaaaaacataactaggagtttgaagctagcactgtccttgcactgaggggagagcctgtctgagagcagagctgacaccgaaaaggcagagtaaaaccatggaggggcatgggctcctggcaacagaatctgagcaactggatccagccatgcctgaagacggagtttccccagaaggtatgagaaaccatcacagctgccttctggcttatgctggtttgagctgggtgtgtctgtcccttgcaaacaaaaggcgcccaatagcattggtccagtgaaagtccaacaaatccagtgtgcaaacagaggaccagttcatgtgagctcccagcaagcagaattaaggtggacattttaaatgatgaatcatttaggggaccactgtggggggtcagcaatgtgaacagaagcctgacagctaccctcgaaaatcccaaatttcatagcccactgcacaaggctgacccctcccctgtcccgaactccccacagacacgggccaggactcgctgcacggggagctgcccacgcggcaccctgaccctggcacttgctcttgttccagaggcagagggagagcactgagagaggacgccacccaccccggagcccagagaatcggggcacctccatgcagggcccagccacatggagcctcccgcaggctgatggcccaacagagggaggacagggtccccccaggaaggaaggctggcttggctggagaagagaatgctaattaaagatcccccattctcagctccctgcagagacaggaccctatgggcagagggaaaaggcctgctgaggcaaggccgggtcacttctgtccacatcccatcggccacacccgcaagccgcaggtggacacccctcccatagcgacactgccagtcagatggcgttgggcaggaggggcagcagatgatcagggacagtcctgcagcgcaccacaggggacctgctgcacccagctcttacctggtcagctcaatgcaccttcatggaggagaccaaggcacagagaggcttcagaagcaggaaacagcccagccctgcgccctgagcagggcgagtggttagagagggtgggatggagccaggagaggatgggcctgcaggccccagaga

SEQ ID NO: 29855 - DNA, 584 bp, Homo sapiens
attgccagcttaacttgtttttatgacatcttcaggaagaaaacctctgctgtctatttaatggagatgaattgttaaacttttaccatttgcaactacacgtctctatgagtcagacttttattgatcgtgtacaactaaatgaaacccggaaatgaaggaaatgtaacaagcgattttatgtattttttgtttgctcaaattgcctttataaaatagattgatactctataataagcaaatgttgtgaatttggaattttcaaattgaggcttactaataatgttawctattttatccgagtttatttgggtttcttataaaatgtatttctcaagaagattttgctgccctaaaaaaaaaaaaaagaaaaagaaaaagacaaaaagggaagccactggttgctaatggctcctgcggctctgacgatcctcgatgaagtgttctttgattaagtgtcaagatgagtggtgcagacctttgacagacacatgattgtggttggagaaagcccagcattaactgctgaccttgccatctgtgagcaggtgttgaatgagctcagttccctcccagcccttctt

SEQ ID NO: 29856 - DNA, 574 bp, Homo sapiens
aatagccaagacatggaaacaagccaagtgcccatcagagcctggaggacattatgctgagtgaaatatgctaaacacataaagacaaacactgcacaacttcacttataggtggaatattttcaaaaagtcaaactcaagcccggcgcagtagttcacgcctgtaatcccagcactttgggaggctgaggtgggtggatcacctgaggtcaggagtttgagaccagcctagccaacatggtgaaaccctgtctctactaaaaatacaaaaattagccrggtgtggtagcgagtgcctataatcccagctccttgggaggctgaagcaagagaatatcttgagcccaagaggcagaagttgcagtgagccaagatctcgccactgcactccagcctgggcaacagagcaagactctgtttcaaaaaaaaagaaaaaagacactgaatttttcagcagtaagtaagatgctacccttatcagtttggtaactaccttgctatcccacagcagtagctagaagcacctacctgcatttctttttttctttttcttttttttttttttttttttttt

SEQ ID NO: 29857 - DNA, 574 bp, Homo sapiens
aatagccaagacatggaaacaagccaagtgcccatcagagcctggaggacattatgctgagtgaaatatgctaaacacataaagacaaacactgcacaacttcacttataggtggaatattttcaaaaagtcaaactcaagcccggcgcagtagttcacgcctgtaatcccagcactttgggaggctgaggtgggtggatcacctgaggtcaggagtttgagaccagcctagccaacatggtgaaaccctgtctctactaaaaatacaaaaattagccaggtgtggtagcgagtgcctataatcccagctccttgggaggctgaagcaagagaatatcttgagcccaagaggcagaagttgcagtgagccaagatctcgccactgcactccagcctgggcaacagagcaagactctgtttcaaaaaaaaagaaaaaagacactgaatttttcagcagtaagtaagatgctacccttatcagtttggtaactaccttgctatcccacagcagtagctagaagcacctacctgcatttcttttwttctttttcttttttttttttttttttttttt

SEQ ID NO: 29858 - DNA, 1028 bp, Homo sapiens
tcccccatgaccaaaacacctcccacgaggccctaattccaacactggggatcacatttcaacatgagatgtggaggggacaaacatccaaaccatatcaccatataacccaataattctactcctaagtatattatcaaaagaaatgaaaatatgcatgcaaataaaaacttacacatgaacattcacagaggcattattaaaaataaccaaaaagtggaaacagctcaaatacccaagaactgatgaaagataaacaaaatatagctggccttccacatgtaaaggtttcatatcctcagattcaaccaaccacaaataaaaaatatttggaaaaaaatggatggctgcatttgtacattatatgtacatatttttmttcttgttgttattccctaaacagtacagcataacaactatttatattgtatttacattgtattaggccttataagtgatctagagatgacttgaagtatacaggaggatatgcatagcttatatgcaaatactatgccattttacataaggaacttgagcatccttggattttgttttccatggggcattccagaaccattcccccgtggatatcgagagacagttacactatcaaacatcctagacaggccattctctctaaaggataactgatcaggataaaggcagtctgacagaatatggttctatcatttcagttacttgcagaacagtaacacctcccgttattaccaacaaacacccaaagactcagggctgcccatactcagcaggcagtagcaaaaccctaactgccataggaacagaacacagtcctgctcaccaggccacatcctgctggggagtctattacatccccaaactcaggatgccctccacttgtgacatccaccaaaccccacacccaccccatcccagtcctgtgctaagtggaatggtctttataggctgggctagtcctgtcccatttctgccaagagcataatatcctgttgttgatctcaattaggaaaactcaatttgaaatg

SEQ ID NO: 29859 - DNA, 1028 bp, Homo sapiens
tcccccatgaccaaaacacctcccacgaggccctaattccaacactggggatcacatttcaacatgagatgtggaggggacaaacatccaaaccatatcaccatataacccaataattctactcctaagtatattatcaaaagaaatgaaaatatgcatgcaaataaaaacttacacatgaacattcacagaggcattattaaaaataaccaaaaagtggaaacagctcaaatacccaagaactgatgaaagataaacaaaatatagctggccttccacatgtaaaggtttcatatcctcagattcaaccaaccacaaataaaaaatatttggaaaaaaatggatggctgcatttgtacattatatgtacatatttttcttcttgttgttattccctaaacagtacagcataacaactatttatattgtatttacattgtattaggccttataagtgatctagagatgacttgaagtatacaggaggatatgcatagcttatatgcaaatactatgccattttayataaggaacttgagcatccttggattttgttttccatggggcattccagaaccattcccccgtggatatcgagagacagttacactatcaaacatcctagacaggccattctctctaaaggataactgatcaggataaaggcagtctgacagaatatggttctatcatttcagttacttgcagaacagtaacacctcccgttattaccaacaaacacccaaagactcagggctgcccatactcagcaggcagtagcaaaaccctaactgccataggaacagaacacagtcctgctcaccaggccacatcctgctggggagtctattacatccccaaactcaggatgccctccacttgtgacatccaccaaaccccacacccaccccatcccagtcctgtgctaagtggaatggtctttataggctgggctagtcctgtcccatttctgccaagagcataatatcctgttgttgatctcaattaggaaaactcaatttgaaatg

SEQ ID NO: 29860 - DNA, 730 bp, Homo sapiens
gtccaaggggcccctccacccataagtccttgcacaccccacgtgttgagtcttcattcacacccagtccacattcatgaaacaggggctggaaagagaacatggtctcccctgtcctgaggatgaccgttgggagggtcttcatagatcattgatcccaggggtctcaaccagagatggagtgtccccgagaggacatttggcaatgtctggagacagttttggttgccacgaagggaaggggatgtgatggtgcagtgtctgctgggtacaagccagggctactgctaacttcccacaatgcacagtacatcccccctatgcaccgcccaccacaaacacagaattatccggtaccgaaagtcaatagtgctgaggttgagacaccatgatgaatccaagccrtacagaagaggaaactgaggcagaggaagtgacaggatcaaagtcacactatgcattagataatgtcagaattagaatccaaggctctctaccagccacactagtcttcagctcccaggagtgcagtgatcaactccaaaacaagtggcaagctagtggagtggctgaatttgggactctggggtctagaagctatcatagttggtctctgtgtctctggcaggctccaaatgaatcccaccaaggtgaacctgaccatcttggtcaaagggttcccagataatcagaggaagactgtctgaaggggctgtggtgtgtccaggca

SEQ ID NO: 29861 - DNA, 628 bp, Homo sapiens
ttttctaacaagcaaaacctggtagaatttgtaaccaaaggacacttcctagaaaaaacaatatgatcccagaaggaaggataaagacaatgggaataataaaaagcaaaaaraaaatgataaatatgtaggtaaacctaaagcatatatataaaataataatgcatttgctttgaaatatctagagaatgaaatacagggcaacaaaggtacaagatatgagagggaggtaagtaaatgcagttaaaaggtctgaagatcattaaaggtaaataagaatttacaccagacttcataaataatggattcatgttgtaaactctagggtaactactcaaaatagtaagaaactgtatacgttaaaactattattttagaaaaaaagagcaataaaaatatttaacaaaaaatagtcaaagaaaaggagaaatatagaactgatgttaaaaataaaaaaactaataagaaaatgatacatttttaagcacgagtatatgtgattacattaagtataaaccaattacatactctaaatgaaaagcttggcagactggatttacaaaaataaaaaaatgtaaaatatcttgcaaccttattctgaatctgaaaaatattcagaaaaagtcgt

SEQ ID NO: 29862 - DNA, 628 bp, Homo sapiens
ttttctaacaagcaaaacctggtagaatttgtaaccaaaggacacttcctagaaaaaacaatatgatcccagaaggaaggataaagacaatgggaataataaaaagcaaaaaaaaaatgataaatatgtaggtaaacctaaagcatatatataaaataataatscatttgctttgaaatatctagagaatgaaatacagggcaacaaaggtacaagatatgagagggaggtaagtaaatgcagttaaaaggtctgaagatcattaaaggtaaataagaatttacaccagacttcataaataatggattcatgttgtaaactctagggtaactactcaaaatagtaagaaactgtatacgttaaaactattattttagaaaaaaagagcaataaaaatatttaacaaaaaatagtcaaagaaaaggagaaatatagaactgatgttaaaaataaaaaaactaataagaaaatgatacatttttaagcacgagtatatgtgattacattaagtataaaccaattacatactctaaatgaaaagcttggcagactggatttacaaaaataaaaaaatgtaaaatatcttgcaaccttattctgaatctgaaaaatattcagaaaaagtcgt

SEQ ID NO: 29863 - DNA, 1097 bp, Homo sapiens
tccrcagaggaggacgtgcttctctgagcaagtcccctccatcttgccgtctgtgggattcaggtgcctgtagttgggggactcaccacagggtccccttggtacctcctggagaaccagaggggagccagtgacgcaaagcctgggatgctgacttagggtgtagccctggtgccagagagaagcctggctcatttcttctgcacaggggccggggtaggggcagaggagtgccaggtgggacatgtgggggcttattccttgccagctggtgctccagccccacgccagagtttcaggccacagcctctgtggccaccacaggggagggacagctcgttgcaggcgcaggacggctctgctcctcatgaaacccacgatggcctggcctcacccagcctccttctgtctccaccccctctggagcaggagtcaaaggaagcactaccagaaatgcacccagcactgtcctaggacagcattgtcgttgcttgggaagggcagcttggggtctgtgtcagggtccccaagacggcgattctccaggaggatacaggccacgcaggttgtggtactcacggctgtgatttcccacagagaggacactgagcaaaatcgaccaagggaaaggttcctggggccgagtccaggggcaccaggctcagctttggaggcctctcctggggtgggggtcacgcaggatgcgcctcactcccctgcaagcagctgggacgccacgcctgcgatgttggggatgccctgcccggtgatgtacccggggactggtcacgtgagcagcttctgcctgggctacgccagaattccagactcccagcagggatgtgggtgttcggcctaaagcacatggtacaaacagctcaggcccagtgaggcggggccggggggagcccctcggaaatcccagttcccagacgccagccaagggccagcccggccctcaggatggccgtccccgcccaccgtgtggacccgttctgcacacggccatggggtttcctttctggagccaggggctggacacaacccagtttctggggaggccccaaagcagccccatccagggcaggcgctgctgt

SEQ ID NO: 29864 - DNA, 460 bp, Homo sapiens
tccaggtggaaaggtcagagacaggggtccctcttcttctcttggcctgtctgcttcaccttatatttagttgacagacgcttttctctgcttctttgtgcaaggactagatatatcaccatgaggcatgactccgcagtcctcaaatttagatgtccttaaaagttaaatgtcataagataagtgagtagagtcactgaatcttaactgtaacctcataggwgggaggatctgattaatccggcttaggtcagtatccaccctaattgaactaagagcggcaaaagggacagagagttttagaagtttactgctgaagagggtttaggggaaaggatagaacctggacagccactcacaaatgtctcatttaatgaatatagcagtggttcccaacctttttggcactagggactagtttcgtgtaagataactttttcatggatcgggctagggtggg

SEQ ID NO: 29865 - DNA, 1166 bp, Homo sapiens
aggacccatgtccccacccctcagccccaaacagtcctttctctccttgacatcaactatgcagccacgttcctctcagtgggaaacagactgtagttaagatgcagatctttttgaaagaaaaaagaaaaaaggtatggggctgcaagcatcgactcctcagagtcagctgtgcccggtcaggcagggcagctgctggagggcctcctttgacagtagggggaggctccaagaacccttcccagagacacctggatagggctggaaggtgggagagaggctcaaaaacacgtgccctgttgcctgtacgggctcgggactggcccaggacaggggccagttgtcaggcactcctagtaaactagggatgagctttgccccaagggaagtgggcacctggggcaccctcagcccatggcttcttgacttggccacttctgtttctcttcatctgcattctatccccaagagaggcatgtccccagagttaggggcagagggaggaagcacagaccacatccctgaagccttcaggctcaatcctctttgggtgaggtccagccagtcacctcttcctgcgctgttagccttgtcctgacctcactctgactctggtttcctaagggacactgtgttcttcctctcctctccttccttcttttcttgacacaatgaggtttttcrtcctgactcttttctttgctcttgctatgctctctctctttcttcagatataatctcagcatttacttttctgtttctgcccatctgtctctcctgagttgggagtcctgtgggtatttaagactgatcaaatagccctctgtttggatgcactccccagcagtgatagcccaatacaggggcagcagggagcaggggggctgtcactccagctgagtcatcttcctcctttctcctccccaggcctggctttctggtggcaaggaagcaccaccttggtgatactccagtgtcactccacctcttcgcggccccctccaggaaccgcctcccccgccagccaagactccattgaccatcatctgggctgtccccatcttcttgggacctgcccctgggcctctgcccttcaaatggggacaccaaggacacagcttccagccacaagcccagcccttgtagcactgacatcccaaaaatct

SEQ ID NO: 29866 - DNA, 495 bp, Homo sapiens
aataamtattagcaattataattgctaataaatattagcaattataactactgagattgttggcattattttaggacttgactaaatttcctatcagatctatcctccttctaatattctacagctttgttaattccaatgttactttacaaataaacttttatctttgagtaagtcattctctgagactcaaaaatgataataataataatagtatctggatgacagggtttccctgaaaattatatatgagaaaattcatgtttagcctagcacagtgtctagcatataatgagtgttcaataaatgattagtattattactattactgttttatttttgttacagatcatctaattctcctcattttcatccatgccttcacaattgtgtaacagtgttttatcaattttttgataattgatatatgtattttccttatgtctagatggttattacgttcagtcaaaccccaagatcctctcccattttttc

SEQ ID NO: 29867 - DNA, 495 bp, Homo sapiens
aataaatattagcaattataaytgctaataaatattagcaattataactactgagattgttggcattattttaggacttgactaaatttcctatcagatctatcctccttctaatattctacagctttgttaattccaatgttactttacaaataaacttttatctttgagtaagtcattctctgagactcaaaaatgataataataataatagtatctggatgacagggtttccctgaaaattatatatgagaaaattcatgtttagcctagcacagtgtctagcatataatgagtgttcaataaatgattagtattattactattactgttttatttttgttacagatcatctaattctcctcattttcatccatgccttcacaattgtgtaacagtgttttatcaattttttgataattgatatatgtattttccttatgtctagatggttattacgttcagtcaaaccccaagatcctctcccattttttc

SEQ ID NO: 29868 - DNA, 1060 bp, Homo sapiens
gggtgttgcaatctgacggcttcaaatactaagtttatatggagtagattattcctgttgtggagtgtcaagtctttgttcattcattcagtatttattgggcaaccactatgctaacccagatccctcctacttttaaaactctttgcccctgctctccaagcaaccttctggtggtgactggctcctggggtagatctccctacagggagagaatgcactggtcatgcagacattgtaagggacaggacactttcccagggtgaattaacaaatggacattatgacgttgcatatcaacatcctgagttyggttaaggtgtgtttggccatgagagatgaattcactatcatgtgttgacaaaaattatctaagcctgaaaacctaaggatgaggccatgaccaaggaggctcacccaggtggtaggtctccccttgggatttcgcttggtgcaatgtgttggactaatgtgttctttgtgatactgaatggtgacatgaggcgctgtggcgtcgtgattcagaagaggatctgggatcagaaacacctgggatgggaggctggttttgccttttatgctctggtttctcctaaattacttcacttttctatgcctccttttcttcattcacaaaaccagatgataatacttcagggtttggctctggctcagtgtctaaacaaaagcagcataccagaagacctgttaaattcttaaaaacctgcctccctcccccacccagttccacagcctccaatcctgacttacaggcccatggccattcagctgcccataataggtacacgcagcactcctcacaagactgtctatggaaacccatagaagtgctcttagacacacagctcatctatactgctgtgcttccgtctcttagatttgaaaattgccttcttagcaaactgtctcttagcaaatgtagttacaaatttaagggagccactttagtcattgtccctacggaataattctgtttacttcaaaacagccagcacatcttccccctcctcaaccaacacaaagacatcgtgttcttcaa

SEQ ID NO: 29869 - DNA, 1205 bp, Homo sapiens
ttcttgaagcgtgtgttttcttgaccctttaatgatttgtaaaggggtcagggccaacaatttgcctaagaaaagttccaatagcccagtaacaaaacctacagggtgttggtgtgtggagagcaaatgggaagggcaacacaataagaggccagtagattcaaagaaacggactcacgctgattttgcgagcaaagtcttggcactcagtcaaagcagacaggtagagtttcagaaaataccaaggctcgacctctagtgagtacgtagatgccttgttccccctagagcatacttgattttgtttctaatttctatgaagtgttttaattactggaaaaaatctgcagttgcgatatggtttttctcagaatatgggtggtgggctgcactttttttaagctcttttgatttcagctgattagaaaaacctcatttttctagcataccttagccagtgtttttcaaactgtgagttgcaaatcatgaataggttgccaaatccatctcatagatctagaccatcattttaaaaatgaaatagaatgtagaacatgtccgtgtttgtctcacctaggaaacaatcatttattaggattaatttttattatttcaaatttatacctaaaggccagaactgatggcacctgaggcaaggtcagaatagggatggaagatgtagcgagacggggcacttggctcagaaggaggggagaaggcactttcttatacgaagagccaacctcawatagacctgggttgccagtctcctgggtgtcctgcctcatcaagtatttgtgcagcctactccagcaagggtctgtagagcattgctgttcaaggtgtgtaagcttagagtctggcttttcatcctgtgtacctttcatagctgtgtggtgttgtgaaagttacttaacccccctgagcctcagtttcctctcttttaaaataaagagaatagctgctatgtcttgtggctgtgaggaggaaatgttgttgatgtaactgtttagtcccgagcctgccacatggtaagccttttaaatgtcattgctattactgttatatgaaagatggactgtacaaggtaaaattgaatataaagagagatttattgatttccaatttatatcattcaagcttgcatgacacgcacccatcctattcatccatctaataaactcttaccgcagggaaatccagag

SEQ ID NO: 29870 - DNA, 572 bp, Homo sapiens
tcttttggccaaatgtataaacaatgttgtatacagttgtattatgtaaagaaaatattgtattttaactgcttgctttattttctcacttgtagataaccttaagtaattcctggattgctttttgccagaaaaatctttctgaatactctgagagtaataaagcaatatactgcctctggactcttacagcaataataaaagaaatctttaaagattcatgttcacagaaaacaggtatggattacatggccccataaacaatcatcrtcttgctcctgggagcgttgcatttataatgagaaacaaaacttaatttggaacatctgatctgtcttaaagtaatgaaaaagtcagtctcttccaatatattttgattgaggataacctgttttaaaagaaaaaaaagtataaggaaaaaagtaaagcttttcatgagcacaaatcccttgcattgtttgatgttactgatattcgtaaaatgaatattttttgttttgttttgttttatttttttgagacaagtcttgctttgttgcccaggctggagtgcaatggcatgatcttggctc

SEQ ID NO: 29871 - DNA, 1048 bp, Homo sapiens
gaggaatggggactctgctgcctgaacattctctgcaagaggacagaggggactggaggccaaagaagtggaacaggagtcagaggggagtagccattgtggcacgggtaacaaccagctatgatgccacagttaaaatttcaagacttcaataaaggatggtctagtctctcaagtttcctctccttctacgctaaaagaagactgggaaaaagaaaaaaaattccatctgcccttcccagctctcttcctaacacacgtgcatacatgtgtgcaggcacatgcatagaacacacaacacttgcacattatcgctagtcaccaccttacagcaactgaatggaattttccttttcataaagaatgccgaaagactgctatattcctaaattcttagaaccactttgtccctgtccactggatttaacctttccaaatggataagctactaccatgcccttggattgcaaarctcagctttttctgttttcagttttgtttccaattttagctcttccaatcactggagttggcatggtttgaataaattgcagtgttggtataaatattagctggttttgctggactagctaaggcaaccaccaaaaagttgtatttgtctaatgaaaattgcaaggtaagggtcttattttcttgctaattgtgggtatgagcattaagcccttttaggatagcaaatacttgttctacaggtgaacaattatctacctcagtgatctcttaagtttctaaatgactgggtagttgaagaaaacttaataaatatttagtgaaggcaaatgatacactcttaaccctactttcaaatttaatttgaagcctatctgttctgtgtttcaaatatcctgtttctagtcttgattcttccataaccagctatgtgatcctggaagtaccttaactcttcatctgagaaataaatgtggtgtctaaatgtttcaacaatgtcagcgacatgaaagacaaagaagaggtaagcaactgttccagatgaatgacagctaaatgcaatacgtgatctggagct

SEQ ID NO: 29872 - DNA, 1048 bp, Homo sapiens
gaggaatggggactctgctgcctgaacattctctgcaagaggacagaggggactggaggccaaagaagtggaacaggagtcagaggggagtagccattgtggcacgggtaacaaccagctatgatgccacagttaaaatttcaagacttcaataaaggatggtctagtctctcaagtttcctctccttctacgctaaaagaagactgggaaaaagaaaaaaaattccatctgcccttcccagctctcttcctaacacacgtgcatacatgtgtgcaggcacatgcatagaacacacaacacttgcacattatcgctagtcaccaccttacagcaactgaatggaattttccttttcataaagaatgccgaaagactgctatattcctaaattcttagaaccactttgtccctgtccactggatttaacctttccaaatggataagctactaccatgcccttggattgcaaaactcagctttttctgttttcagttttgtttccaattttagctcttccaatcactggagttggcatggtttgaataaattgcagtgttggtataaatattagctggttttgctggactagctaaggcaaccaccaaaaagttgtatttgtctaatgaaaattgcaaggtaagggtcttattttcttgctaattgtgggtatgagcattaagcccttttaggatagcaaatacttgttctacaggtgaacaattatctacctcagtgatctcttaagtttctaaatgactgggtagttgaagaaaacttaataaatatttagtgaaggcaaatgatacactcttaaccctastttcaaatttaatttgaagcctatctgttctgtgtttcaaatatcctgtttctagtcttgattcttccataaccagctatgtgatcctggaagtaccttaactcttcatctgagaaataaatgtggtgtctaaatgtttcaacaatgtcagcgacatgaaagacaaagaagaggtaagcaactgttccagatgaatgacagctaaatgcaatacgtgatctggagct

SEQ ID NO: 29873 - DNA, 607 bp, Homo sapiens
ttcaaaggactataatgccatttcttgtagaaaatgtcagaaagtagcagcaagagataaacttgctctgggcctcactgatctctttataatgaatctgtgtagaaacttgactacttaagcttgactatctcaaagattaaagtgactgtaggtcacggaattctactgttttaggattacatctaactttgttcctcaatactaggtcaatgaaaattatgctactgaaagaatgaactctgaggaatcatacattaaatataaaagacaatataaaaagaagagtttagccagttgtggtggctcacacctataatcccagcactttggggaggctgaggtggaaggatcatttgaacaggagtttggggccagcctgagcaacacagtgagatctcatctctgccaaaaataaataaacaaacaaataaataagctggacctggtggcacatgcctgtggtcccagctatgcaggaggctgaggyggaagtatcacttgagtctaggaggtacaggctgcagtgagctgggattgcaccactgcaacccagcctgggtgacagaatgagattgtatctctaaataaaaaaaaaaaaaaaaaa

SEQ ID NO: 29874 - DNA, 607 bp, Homo sapiens
ttcaaaggactataatgccatttcttgtagaaaatgtcagaaagtagcagcaagagataaacttgctctgggcctcactgatctctttataatgaatctgtgtagaaacttgactacttaagcttgactatctcaaagattaaagtgactgtaggtcacggaattctactgttttaggattacatctaactttgttcctcaatactaggtcaatgaaaattatgctactgaaagaatgaactctgaggaatcatacattaaatataaaagacaatataaaaagaagagtttagccagttgtggtggctcacacctataatcccagcactttggggaggctgaggtggaaggatcatttgaacaggagtttggggccagcctgagcaacacagtgagatctcatctctgccaaaaataaataaacaaacaaataaataagctggacctggtggcacatgcctgtggtcccagctatgcaggaggctgaggtggaagtatcacttgagtctaggaggtacaggctgcagtgagctgggawtgcaccactgcaacccagcctgggtgacagaatgagattgtatctctaaataaaaaaaaaaaaaaaaaa

SEQ ID NO: 29875 - DNA, 518 bp, Homo sapiens
tgatttmataaattctcaaatccaaaaaaatttatcacttattttatgaaaataagaaactagtatgctgaggatggggaggaagaagggcattcacacacacacacacacacacacacacacacacacacacacacactatgttctttctaagaaataaatataacaaagaatgccaaaagaattatcatttttttttttgagacagagtctcgctgtcacccaggctggagtgcagtggtgcgttcttgtctcactacaacctctgcctcctgggttcatcattctcacgcctcagcctcctgcatactgggattacaggtgcatgccaccatgccaatttaattttttgtatttttagtagagatggggtttcatcatgttggccaagctggtacagaactcctggcctgatatgatccgcccacgttggcctcccaaagggctgggattacaggtgtgagccaccgcacctggcctcaaaagaattatcttaaagatattctatgtaatgcttc

SEQ ID NO: 29876 - DNA, 752 bp, Homo sapiens
tctgggaatcagagccgcagcaaaggcagctgcttgcatcgctggaagcgttttttccttgagtgccgaagggcgtccacagcgactcctgctagtgcagggcagctgctgccagggccgggcccgggaccccacggaggcggggagaccactcttctcccacacgagcccagctctcccttcgagtagcaaccgccttcaagctcacaagcacccgtgggcctggggtgtgcctgcgtctagctggtgagtccctttctttgtctgatggccaatgcagacattagcttttaagatggcatagtgagtggccaaaagccgggccctgtcacttcccagctgtgcgactgtgggcaggtccactcacctctctgtgccccagttaccttatctgaaaacggggggtagtaagagtggctgcctcaaaggtggtcgtgagsctgaagcgaacttgtggtgccctcagcctggctccttggaagcacctgggaggtgagagtggaggttgttgttactggggtttgttcttgttgctcctgcatcagccgtcctcgggggaggaggctgcagctgctgctgagattgctggtgtgtggccggaggttttcagcgtgtcgccctctctgtggagtggacgagcgcagggctgggaagcaggcacactgggtccttgtgctgctgtcctatctctttgttcttcacccctgggttgggaagcccgcagcctactgcctccctttgacagaagggac

SEQ ID NO: 29877 - DNA, 545 bp, Homo sapiens
acctaataccatgaactgcaatttttcccaagatcccaaggttaggattaaagggttaaaagtaaattgatagctagcttgttgggtaaaattagataaatagatgatattagaaagatgagacagtccctgttgacccacattctgtagcttyttatttcctcagattgctctttgctctgacagtgctgcaatgcataaagtctacaaaattttctcacggctgctataatgactgccatttttaacacaaattaaatgctcaccaagaataagtaaatgattaaatgcttcataacctgacccagtaagtggttggaggtttcaatgccaatcaccaatgtatcatctcaatcttttgaaataattagcatatgttatttatttcatggtctcatcagtgattaattttccaggcagtcaattaattatctactaccaaaattaacagtaaatatttttcaacgcttttttttctgctcttcaggatcaaatcatattccttaagtatacaccctatatttgggcatagttaaaattaaaaa

SEQ ID NO: 29878 - DNA, 544 bp, Homo sapiens
aaaaactataaaaaagttactaaatagcaagtaactaaaaaaagttactaaayagcacgttccttgctatttagcaaggatataggtgactgagtactataaaaatatgtagacaataacagaaaaaagagaaattaagagaaatatatcaatatggtaagagtatgcagcatggcatggttgaaatagtcctggtatttgtagttgtaagatgtttcatttttcctatagcctgttaatatgtgtttgtatgatcatgactaaatcatttaaattcactcatatccagacctgaaaattaataatgataataataaaatccctatttattacaatatttgttttaaaaatcaaataagataattcatctgaaaaaattctttggaaagctttatgtaaacattattatttgtccttttacaaatattatcatatgtggcatttaaataatggttaaatataaatatatattatagaaacaaacatttattctaagagcttagaataactgtcaggatagaagacatagttttggcagttgtgt

SEQ ID NO: 29879 - DNA, 544 bp, Homo sapiens
aaaaactataaaaaagttactaaatagcaagtaactaaaaaaagttactaaacagcamgttccttgctatttagcaaggatataggtgactgagtactataaaaatatgtagacaataacagaaaaaagagaaattaagagaaatatatcaatatggtaagagtatgcagcatggcatggttgaaatagtcctggtatttgtagttgtaagatgtttcatttttcctatagcctgttaatatgtgtttgtatgatcatgactaaatcatttaaattcactcatatccagacctgaaaattaataatgataataataaaatccctatttattacaatatttgttttaaaaatcaaataagataattcatctgaaaaaattctttggaaagctttatgtaaacattattatttgtccttttacaaatattatcatatgtggcatttaaataatggttaaatataaatatatattatagaaacaaacatttattctaagagcttagaataactgtcaggatagaagacatagttttggcagttgtgt

SEQ ID NO: 29880 - DNA, 1276 bp, Homo sapiens
tttcctgataggtagaaatggagctcatatttatcttggaggcttgctgggagcattgcataaggcaatgagtgagagactctagtaagggagcagatgggttgtatcagtgtgtgttagctcttcccttctccagggatatgcattttggaagaaagattgctttgcctgcaaaatatatgctctccttttcttcttggaagagcatcttcattttctcttgggaaaccaccacttctccactctgttcttgttcagacatggctgccccacccctccttccctaggagtggagcacctgggcaatcagacacgtggtggttgtttcaaaagggccacatacccaaaggtgtcaggactttagtataaactattgggaaagagaaatctctttctacgtagcttctaagtagctggaacatgcacctggagcygtgcagtccatctcatcatgatgatggaaatatctgctgagcgtgaagcccacgtggtggaatatattgctgaaagatggtaaaaaatgaccgaatcctcgtggcacctcttggaggcctgactctgaccaaaataagaatttctggttacttgggtgaataaatgcttgagttgggttcctgttgcctataacctccaaagtcatagctgatatagcatttgacttcctgaggactatatgctcagctgcaggagctggggaggtagcaagtgtgaggccagggacaagcaggtggcccacagtccacttctattgggtcttggtgtgtttccaccaacctattgattccctcttggaagggatcccaagtcagggaagaccagccacttccaggaaggggtggggaggtagggctgacagttgatggggcctgccttccttccttctttccttcctttcttctttccttccttccttcctcccttccttccttcctctctctctctctctctctctttctttctttctttcttttgacagagtctcactctgtcatccaggctggagtgcagtgggacaatctcagctcactgcaaactctgcctcctgggttcaagtgattctcctgcctcagcctccctagtagctgggattacaggcatgcgttggtgggatctttcttagctgggcagttggtgctgggccccagggttcagggtccatcttcctgcacgggtttggtccaccacactgattagactattctccctcagtataccaggctcttggagtgtctgacccttttactgcagaaaacgtttctgtcccgtgagccctgcc

SEQ ID NO: 29881 - DNA, 852 bp, Homo sapiens
ccacgcccggctgacaatctcttgtaggtgacctggtatcttcattttcctttcagggactgaggacgctgggcaagacaccgtcaacacaaggctcttcaccagcctgggggaaaaccagacatccgcatccacacctgaaacagggcaagccgcctcctgacgaaagccctgtgaaacacaagaagcattccttcaggattcttctaaagataaaagaatctcggagtagggcttctattaggtaaatggcttatgataacctcatgtgagaggttaaacaaaggttacagggcttagaacagcactgaggggactgggcggctactcgagagagatcaaccaaggactgggaggtgagtttttgtcccagacacgtgctyattgcagtgactttgagcaagtcacctcatccccctgtgtcttattttcattacatggcatatgtagaaagaggatcttctagctcggacaattgtttgattgtactgggaagtggttaaggctctggagtcacactttctggatttgatgaccagatccactgtttactaaatgcaggatttggaaaattgctcatctataaaatgagcttgatgaggcaacctacctcgctgaactgtgatgaggattacactcattgggaatattcacaatagtgccaaacatataaaagtgttcaataaatgttcatttttattatgtctataaccttctaatcaaagagagcattgtaaatcttaagggaagactcaggaagaatgtagaacaaaagtgagtgtttcggttgggacataaggcacctgcagaggaaattcttctatgatgaggagaacttgggaaggacttaat

SEQ ID NO: 29882 - DNA, 1100 bp, Homo sapiens
tcagtcgccgcgacgtcttcctctggttctcttattttacttcccaaaagtggaaaagtgagcgccttgtcttccaaaagagcttctccagtccatctttaaaggtttcttccagtgtcggggcatctttgagagaccaggttggggatatcctcaggtattccagggggctctgcagcccagcgcaagggaaggagggagttgcccagacccgactgggtcgcgtctcacacgatcagggagagcctctcagcttgagggcttgatcccagtcggggagaggctcttaccttgtgaatttgattccagaatgrtagaggtgcaggaagggctctcggtgtccaaacctggacacttttcaatcttcagagctaataagagtgagggcatgggtccgaggaaccgctcgttgggaatctatattttgtggtattatctcagcaaaatctacttcagcatttataatcaaaacaacaacagtggcaacatccacaacacacgagtatttactgtggatttgctggaaatgctttgtactcacagtcctgtttaaaacaaacaaaaaaatgatttgaaacagattttatttcatgactattttacagacgagaaaatggagggttgaggtagtggttaaaaaactttgctggggtcactcagcctgaaagtggcagagcaggcacttggagtagtgcactgccaaatggtccactgttttctttctttggactgcctgtcccctgtagaaaggctggggctcagaaaatccaggtcagagcgattgcctcccctttcattcctgcaggttctttgaagccagtgtcaccccaatgttaaccttcaacctgcaggatctctctggcccccgctcccaccatacccccaaatccttgccagtgggtgattggggaggagtggtcttctgggctgagggtcctcaaattgccaaatccttttgaaaacttgccccttaccacactgttccttagcctggagagctgtgtttacatgtgggtagggttcgttcggaggccttcctggaagtggtagccaaactcccacaccagactaaatcccgtcagggctggcgctgaaaagtg

SEQ ID NO: 29883 - DNA, 828 bp, Homo sapiens
acatctgcagactatacaaagacaaacaaaacggattaaaagcacagtcatcattgaaattmcagagcttccaagtgtttttgtccattttaatgggttaatagctgctaatctgtctgcagctccttcaagcactctggttcctggcattaaggtcaggtgtgcctgggatgctttaaatatttattcttttaattttgcaatattcaaaaacaagtttgtagagtgtccttctagatgcttttttattctttcccaaattttgttcttactaagagctattaatagtttccacaaatccttgtatttagctcctacaatgggccatatcatttgaggttgaggtgccactataccaccatgtttccagatacagataacaggaactcttgctgtgcttcttaccatttctaccatctgaccattttgttcagaccagctgaacatagtatgaccatggcatgcagtctgagaggtgcaatttaagctaaacatccccttaggggacgaattaatagtgtttccataggaatcatcgtgcagcacctctgtctgttctgcaatgcgatcttcctaaacaagtacgttcatattttctggccagtttcaattttatttacaaataggtttttgagggtggtatgcctcaattataggagcagatttattatggtaaatactgagatcagaaagcatgtgtaactgtgtcatagaatgattacatccaggcattattgccagccaagattgataaatatgctgaataagtataattgttctctgtgtcagcccttgttgaaggaatactcatggcagtgatgatcactg

SEQ ID NO: 29884 - DNA, 828 bp, Homo sapiens
acatctgcagactatacaaagacaaacaaaacggattaaaagcacagtcatcattgaaattacagagcttccaagtgkttttgtccattttaatgggttaatagctgctaatctgtctgcagctccttcaagcactctggttcctggcattaaggtcaggtgtgcctgggatgctttaaatatttattcttttaattttgcaatattcaaaaacaagtttgtagagtgtccttctagatgcttttttattctttcccaaattttgttcttactaagagctattaatagtttccacaaatccttgtatttagctcctacaatgggccatatcatttgaggttgaggtgccactataccaccatgtttccagatacagataacaggaactcttgctgtgcttcttaccatttctaccatctgaccattttgttcagaccagctgaacatagtatgaccatggcatgcagtctgagaggtgcaatttaagctaaacatccccttaggggacgaattaatagtgtttccataggaatcatcgtgcagcacctctgtctgttctgcaatgcgatcttcctaaacaagtacgttcatattttctggccagtttcaattttatttacaaataggtttttgagggtggtatgcctcaattataggagcagatttattatggtaaatactgagatcagaaagcatgtgtaactgtgtcatagaatgattacatccaggcattattgccagccaagattgataaatatgctgaataagtataattgttctctgtgtcagcccttgttgaaggaatactcatggcagtgatgatcactg

SEQ ID NO: 29885 - DNA, 650 bp, Homo sapiens
tcctaattggtaaaatcattgtcttatttagcttcgcacttccaaaggtagcacacattctacaaagtagatgatgtgccattagtgtttttaaatcaaagttaaaattggaaaaaataattaacattaaagtgagcaaaaaatataatcagttgatgaattctttgacaaggctaaaagataattgatattatacaagttattgagaaatatatttttaaaatttatttatttttgttgaaggaccacttagataaaatgatcattcttcaatagtactgtcagaatgactgtgtacaaactaatattttagtccccacaagcaaaaattaaattttgcaaggtaaaaaagacttggggttaataaataaatttaatactaattaatctaaaaactatcatattgaatttttctcatctcttctagaaggcattcagccagactccttcatgggaaagggaatgggcagcagtcatttcaggtggcaaatggctagcacctartaactattttgggaattactttagacaagaaaaatacagtaactatacaactaggttaaaactaaaccccttgaaaggggtcaaaataactagataagcattacacaaagtctcctgaaatgataatttaatgctataatttccaa

SEQ ID NO: 29886 - DNA, 631 bp, Homo sapiens
ctcagctcccagctgcaggttatctattcatcaaatgtcacagttaacctaagcagctgcttccataacccaaagctccctaccctatatttttttcagtactttgtaatctcatattgtaattctataccaaagaagaagaagaaaaaaaaaaccttgtagaaccaacccttaattgtactgattttatggttagaagaaacagcacaggagataaaggaacaagaagggaagaartcacgatgataaaaatttactctagtgaaacaaatggaaaaatatttaagcatgacaaagaaatcacaaaattgttcctttagttagggtcagcagtcattgccctcggtgatgaatgttgaggcttccaggcaaaggttctcagctctgtctcaggcacagaccgtccatctcctctaaagatggatgtggccctgtcaggctggatgacatttcacagtcccttcaagcctcatgatgccatggttctgtgaacagcgagctacagttcaaagttgaatgaccacgaaaaagtcatctgatgagaaatcggaatgccacgaataatattgaaatgaaaaggaaagcttgatcttgaaaaagttccaataaccctcaaagccaaacagaattt

SEQ ID NO: 29887 - DNA, 423 bp, Homo sapiens
atccaaaactaattgaaagaaaaatatgtaggtggaaaagaataagagattagcagtaccatttacttctttttktttgtttgttttgagacagggtttccttctgtcactcagactgaagtgcagtggtgtgatcatggctcactgtagcctcaacctcccaggctcaagcgatcctcccatctcagcccctcaagtagctgggactacaggagcgcaccatgcctggctaatttttatttttattttttgtagagtcagggcctcactatattgcctaggttggtttctaactcctgggctcaagcgatccttctgcctctgcctcccaaagtgctggaatcacagatgtgagccactgtgcctggccaccatttacttcctaataaatttttactttcttcattgatcacaactggggta

SEQ ID NO: 29888 - DNA, 1330 bp, Homo sapiens
tgagaaagaaatattattcacctgaagttttccccagtctacactagattgaaattttatttcatattaaaatattcaggccgggggcggcggctcatgcctataaacccagcactttgggaggtcgaggtgggtgggtcaccagaggtcaggagttcgagaccagcctagccaacatggtgaaatcctgtctctactaaaaatacaaaaattagctgtgcatggtggcacacgcctgtaatcctagctacyagggaagctgaggcacgagaatcacttgaacccaggagtgagaggttgcagtgagccaagatcatgccgctgcactccagcgagtgcacagagtgagactctgtctaaaaaaaaacaaaaattaacttatctttaatagtagaatcaaagacacatgcctgggtacaaaaatgacgctagtggctgggcaaggtggctcccgcctgtaatcccagcactttgggacgcccaggggggcagatcacaaggtcaggagttcaagaccagcctgaccaacatggtgaaaccatgtctctactaaaaatacaaaattagctgggcatggtggcaggcacctgtagccccagctactcgggaggctgaggcaggagaatcgcttgaacccaggaggtggaggttgcagtgagctgagatctccagcctgggtgacagagtgagactccgtctcaaaacaaaaaacaaaaaacaaaaaacaaaacaaaacaacaacaaaacctagtatcaggagagaaaaagcctttgttaacatcctgctattgctactgttgttgcagtagctttgctatactttttaaaaagaaacttttaaaacaaaaacaaaacaggttaactttctccagctttaagaatttgatatctaaaaattctgaagtctccttgtgcacttcaggtgtgaggtgactaggaataccatcctcttccttctgtcccccaggcggcatattggcaaggcacagtccctattcaaaggtctgtctggtcagtaatggtggtatggcctggggcatgctggggctcactgaggatgttctctaccttagctgtgtcacatgcccacaggtccatctctatttctaaacggtatcacacagtttggagttagatatacagtatttctcatctacttttgggagccataatcagaatgaaatttttctcagactgggatttcttttccctatccaactaggcaactcctctcttgcctggaagaatagagctattttcctagaaaatagtctctccatctaagaatagaacaatttagatggcaggtggtctgtttgatcccacagac

SEQ ID NO: 29889 - DNA, 1330 bp, Homo sapiens
tgagaaagaaatattattcacctgaagttttccccagtctacactagattgaaattttatttcatattaaaatattcaggccgggggcggcggctcatgcctataaacccagcactttgggaggtcgaggtgggtgggtcaccagaggtcaggagttcgagaccagcctagccaacatggtgaaatcctgtctctactaaaaatacaaaaattagctgtgcatggtggcacacgcctgtaatcctagctaccagggaagctgaggcacgagaatcacttgaacccaggagtgagaggttgcagtgagccaagatcatgccgctgcactccagcgagtgcacagagtgagactctgtctaaaaaaaaacaaaaattaacttatctttaatagtagaatcaaagacacatgcctgggtacaaaaatgacgctagtggctgggcaaggtggctcccgcctgtaatcccagcactttgggacgcccaggggggcagatcacaaggtcaggagttcaagaccagcctgaccaacatggtgaaaccatgtctctactaaaaatacaaaattagctgggcatggtggcaggcacctgtagccccagctactcgggaggctgaggcaggagaatcgcttgaacccaggaggtggaggttgcagtgagctgagatctccagcctgggtgacagagtgagactccgtctcaaaacaaaaaacaaaaaacaaaaaacaaaacaaaacaacaacaaaacctagtatcaggagagaaaaagcctttgttaacatcctgctattgctactgttgttgcagtagctttgctatactttttaaaaagaaacttttaaaacaaaaacaaaacaggttaactttctccagctttaagaatttgatatctaaaaattctgaagtctccttgtgcacttcaggtgtgaggtgactaggaataccatcctcttccttctgtcccccaggcggcatattggcaaggcacagtccctattcaaaggtctgtctggtcagtaatggtggtatggcctggggcatgctggggctcactgaggatgttctctaccttagctgtgtcacatgcccacaggtccatctctatttctaaacggtatcacacagtttggagttagatatacagtatttctcatctacttttgggagccataatcagaatgaaatttttctcagactgggatttcttttccctatccaactaggcaactcctctcttgcctggaagaatagagctrttttcctagaaaatagtctctccatctaagaatagaacaatttagatggcaggtggtctgtttgatcccacagac

SEQ ID NO: 29890 - DNA, 587 bp, Homo sapiens
tggaactcaaagaatgctacagtagagatggatatgggtatcyggaggacagaggaaaggcatgtgattcaaggctataggggtacagtggagtcaagaaaggatctgatgtccaagctgagttttaaagaataaacagagttgcccaggaatttgaggcagggctggcctgagaacatatggagtatatggagagtggctacattgtgggtgcctggaatccattattcgctttatttgaaggagtgtggggtggtcagaagacacaggtgtaaggaagctgcatgacctggcctcaggagcagcaggaacatcttcaaggtagttctgtgcttttaaggaaatccagtccccctttaggcatctccacctgacccaacaccaactggcttattcttatcctcactcaccttttctctaccttaccttttaatttctataatcttggtctgctcatactttggttcattttatctgcctgtctagttaacacatcatcaccttataagactcaggtcaagaatcatctcttttatgataaattttctagatcagtcggccccctggtagactcgacctattcttac

SEQ ID NO: 29891 - DNA, 587 bp, Homo sapiens
tggaactcaaagaatgctacagtagagatggatatgggtatccggaggacagaggaaaggcatgtgattcarggctataggggtacagtggagtcaagaaaggatctgatgtccaagctgagttttaaagaataaacagagttgcccaggaatttgaggcagggctggcctgagaacatatggagtatatggagagtggctacattgtgggtgcctggaatccattattcgctttatttgaaggagtgtggggtggtcagaagacacaggtgtaaggaagctgcatgacctggcctcaggagcagcaggaacatcttcaaggtagttctgtgcttttaaggaaatccagtccccctttaggcatctccacctgacccaacaccaactggcttattcttatcctcactcaccttttctctaccttaccttttaatttctataatcttggtctgctcatactttggttcattttatctgcctgtctagttaacacatcatcaccttataagactcaggtcaagaatcatctcttttatgataaattttctagatcagtcggccccctggtagactcgacctattcttac

SEQ ID NO: 29892 - DNA, 587 bp, Homo sapiens
tggaactcaaagaatgctacagtagagatggatatgggtatccggaggacagaggaaaggcatgtgattcaaggctataggggtacagtggagtcaagaaaggatctgatgtccaagctgagttttaaagaataaacagagttgcccaggaatttgaggcagggctggcctgagaacatatggagtatatggagagtggctacattgtgggtgcctggaatccattattckctttatttgaaggagtgtggggtggtcagaagacacaggtgtaaggaagctgcatgacctggcctcaggagcagcaggaacatcttcaaggtagttctgtgcttttaaggaaatccagtccccctttaggcatctccacctgacccaacaccaactggcttattcttatcctcactcaccttttctctaccttaccttttaatttctataatcttggtctgctcatactttggttcattttatctgcctgtctagttaacacatcatcaccttataagactcaggtcaagaatcatctcttttatgataaattttctagatcagtcggccccctggtagactcgacctattcttac

SEQ ID NO: 29893 - DNA, 974 bp, Homo sapiens
aggctggtatcatgagctgagtgcagtgtgccaggctgagtgggtggaatgagtccagtgggtctgagcaaaacttgggcaaaggtaacactgatcacggaggtttccggccagaagagtgacaccccaaaaaccctgcaatggtaggagttgggttggagctggaaatggagatagtttagagatagagccaacagcacttgtagattggatgtgagagatataatagtggcccagctaagactaaaatgaaagtgactttgagcacaatgtgaggcccatttttccatactagggcttgcattctcaaattaatccccaccagattaaaggatgatgggaaaacggggaactaatacatatatatctatctaaatctatctatctatctatgtatctatgtatctatctatctatctatctatctatctatattttgagatagagtcttgctctgttgcctaggctggagtgcagtggtgcaatctcagctcactgcaacctccacttccagggttcaggttgatcctcccaccttagactccagagtagctgggactacaggtgcatgccaccacacccacctaattaattttttgtaaagccagggtttcaccatgttgcccaggttggtctcaaacttctgagctcaagcgatctgcctgcctctgcctccaaagtgctgggatttcaggcatgcaccactgcacccagccatcttcaaattatgtatgtcttaaattaaatttacattcttggaattggggctgggctgagcccaatttagcagggcaagggctaagacgtttgaaatagctgraaattctgtaactctgcaaggcagacagctggaagaaattacttcctgttaaaaattgtagttctcagtcatcgggtaaaacccttgccttatcagctcctgggattaatgattttttttcacactaggccataccacagtgcatttcaacagt

SEQ ID NO: 29894 - DNA, 638 bp, Homo sapiens
cccacggctaggacctgagcccatctttgctaggcctctcccagtggttctcaactctcagctgcatattagaattatctgcaatttgaaaaaacaccagcatrcaggcccctccccagaccaactgaaacagactccctagggatgttattcaggtgattctaatgtgcacccagcagtgagtctaccgactcaatggccaaatccaattgaggaagctagcaggtcctccacctacttttcaatcctgaaacatggctaaaacacaaaatagctcatggcctttcctatgccccatcccctgtaccagagatatcattatggtgttagctttcagattcaagccttggcaccaccgcctacagccatgactgggagaatccccttcctccaggtctaactcttcttctcagtaacctgagcatccttttgtcacacaaaagtaagagactctggatgagattagttagcactaattagttagtggtctctgaggactggttgaccgcatgaattcctcacctacaaaatggagagcctgccactacctatacatttcctaagtcaggtgcttctaaagtgactactgtaaagctttttgggctttttgcatggacgtgtcctcacaggggcgtgca

SEQ ID NO: 29895 - DNA, 606 bp, Homo sapiens
aaggaagaattcagcccattcatatacatttgcttttattctttctttttttttttgagatggagtcttgctcccactgtgcaggctggagtgcagtggtgcaatctcagctcactgcaacctccacctcctgggttcaagggattctccttcttcagcctcctgagtagctgggattacaggtgtgcgccaccatgcccgggtaatttttggatttttagtagagacggggtttcgccatgctggccaggctggtctggaactcttgacctcaggtgatccacctgcctcagcctcccaaagtgttgggattacaggcgtgagccaccgtgcccagcctgcttmtattctttctatctgactttgtgtttctcactgattttacactgttgtttcatctttcttcagcttctcaatttgatcaagttgctgtaaactccctatttcctcttgttattttggaagttttacttaagtttcctgttctatcagcggttaccctccttttcatcatctcaaaagcagacatagatttctttactattatttgaaaacaagataccaattacccccagaataaagtatttcccacatagaacatttccc

SEQ ID NO: 29896 - DNA, 963 bp, Homo sapiens
ggctgggcgcggtggctcacggctataatcccagcactttgggaggccgaggcgggcggatcacgaggtcaggagatcgagaccatcctggctaacacggtgaaaccccatctctactaaaaataaaaaataaattagccgggcgtagtggagggcacctgtagtcccagctactcgggaggctgaggcaggagaatggcgtggacccaggargtggagctttcagcgagcagagatcgcgtcactgcactccagcctgggcaactgagtgagactctgtctcccccccccaaaaaaaattataatacgacctactatattggattaaaagtaggatttgttaatacatgtaaagcatttagtataagtgctcaaaggttaacaattatgatgacataactaaattacaggcatatattttattatcaaggccctgttcttgcctcaaaatagctgttctgcaccctagaccaggtatctaaccttttagtgtttattacccctaacagtatatttctccaaagcaccattaccagtgaccaagaagagagacaaaattgtcaaaccctggaaaggcttccaaattttgattgtagttcgggatgctggaaaatcttgaaaacacattggtggctgggctcagtggctcacgtctgtaatcctagcactttgggaggccgaggcgggtggatcacttgaggttaggagctcaagactagtctggagaacatggtgaaaccccatctctactaaaaatacaaaaaaaaattagccgggtctggtggcaggcgcctgtaatcctagcttctcgggaggccgaggcaggagagttgcttgaatccaggagacggaggttgcagtgagctgagatcacgccattgcactccagcctgggcaacagagcgagactctgtctcaaaaaaaaaaaaaaaaagaaaagaaaatacattggcaaatcagagc

SEQ ID NO: 29897 - DNA, 963 bp, Homo sapiens
ggctgggcgcggtggctcacggctataatcccagcactttgggaggccgaggcgggcggatcacgaggtcaggagatcgagaccatcctggctaacacggtgaaaccccatctctactaaaaataaaaaataaattagccgggcgtagtggagggcacctgtagtcccagctactcgggaggctgaggcaggagaatggcgtggacccaggaggtggagctttcagcgagcagagatcgcgtcactgcactccagcctgggcaactgagtgagactctgtctccccccccmaaaaaaaattataatacgacctactatattggattaaaagtaggatttgttaatacatgtaaagcatttagtataagtgctcaaaggttaacaattatgatgacataactaaattacaggcatatattttattatcaaggccctgttcttgcctcaaaatagctgttctgcaccctagaccaggtatctaaccttttagtgtttattacccctaacagtatatttctccaaagcaccattaccagtgaccaagaagagagacaaaattgtcaaaccctggaaaggcttccaaattttgattgtagttcgggatgctggaaaatcttgaaaacacattggtggctgggctcagtggctcacgtctgtaatcctagcactttgggaggccgaggcgggtggatcacttgaggttaggagctcaagactagtctggagaacatggtgaaaccccatctctactaaaaatacaaaaaaaaattagccgggtctggtggcaggcgcctgtaatcctagcttctcgggaggccgaggcaggagagttgcttgaatccaggagacggaggttgcagtgagctgagatcacgccattgcactccagcctgggcaacagagcgagactctgtctcaaaaaaaaaaaaaaaaagaaaagaaaatacattggcaaatcagagc

SEQ ID NO: 29898 - DNA, 567 bp, Homo sapiens
aagtacccaggtgtgcagtcgtggaaggtgaagctgaggacactcaccgtagaggcccgtgagtaagccaatgttcagaggaagcagaggctatgaacggatggaagttgtcaatgctacagcagatggaaagctggtaaagggaaatctagatgatggacatggcagcaaaactgggaggaccagctgggtcaccaagccttctctcaaagctacactgccccagccaggcgcggtggctcacacctgtaatccgagcactttggaaggccgaggcgggcagattgcctgagctcaggagttcaagaccagcctgggcaacactgtgaaaccccatctccactaaaatacaaaagaaattagctgggcatggcggcatacgcctgtagtcccagctttcgggaggctgaggcaggggaattgcttgaacacgggaggcagaggttgcagtgagcccagatrgcaccactgcactccagcctgggccacaaagcaagactctgtctcaaaaaaaaaaaaaaaaaaaaaaggctagactgtcctgtgttcccattaactttcaggttc

SEQ ID NO: 29899 - DNA, 533 bp, Homo sapiens
ctggagagattaaatgagatgatacatgggcaatgcttaggactgcatttagtacatagtaatccctcggaaatgaatgctattaatataactgttaatattgttgactctttcagatttctgcaaaaggcattatctctatctacaaagaaacacttggggcaactcattctttttctcaaaccagcacatttctgggaataatgtgggatttaagcaataagttgtcatctaagacaaagcaattcagagggtgaattattccaggcatgtcttgcctggaatggccctaaaatgttcctytgtgcccaaagtttattataaaacatccatcagagtcttacaaagtatactccaaaccacaagggctgttaaatctccaatccacccactttcaacctcagaaacttctcaactccatgctccaggcggccagcaccaatcagctgaggttggcaaggggataaaacaaaacctatttgtcatctataacataaaacacaacttgcaaagagggtatgcaatccatttta

SEQ ID NO: 29900 - DNA, 1925 bp, Homo sapiens
tgtatgggggcgggcggkggggggggggaggctgcacatgcctatgccagaaaccagattatcaatttctttttctgacaaaatgttagtccatggaagataaattctgccttctggcatattatgtatataataatatataatatgtacatacatattttttatatgtgtgcatttcaattacttaatttttaatgggaatcatgagatatgtatgatcttttcaaataaggcttaaattaaaatactttaaaggttttaatttaatgatagggactaggaaacttgaacaaggatttaggttaagaaagttgatggagctgttttgagacaagtcattgagtgtaccaaaaaagataaatcgagttaaaaatatacttgcctttaaagaaataccacagaaaagcaccagtttatttctagataatctggtctgggatgcccaattatttaaacaaaaggtaacatatcataagagaaaaacacaaataaataaaatataataattataaataaaacaaaaccctctaggaaaatggctgattcgaacaattgtcaaagcatcttcagactgagcttatcgcgtgcattttttttcagcaattgaaaatgaggtcaggctccagtgagcccagagacctggttttagggatgcacctccacctatcaaaccctgagtgctataccttcatgcctctaattgtttgggtttcttccagtcccaaaggcagtcattcaaatatctctttgactttttaagccttcctgatttccagaagctcaagcactgtatctcttttcatgcccagaacctgaaactgcctttaacagattctctttattttctttaaactcctaaaaatattattcctggtcaagcagcaatactgtgccctccttcaagccaatgtgcaggggcaagggcaccccaggagatgctggaggagtggttgcttttgacctatggaagatgactacctgtagctgtgggattaggatccagtagggtcatgatcacagggcccaaagaaagggacccccggccttgagctcatagcttctcacaattttaactcattaccactgcagcatcaaggttagtataaggaggtcagtaaggggccattcttctcttaaaacctcaagattgtttgctaaacttctgcatgttaaaccctactggttgtgggtggtatcctcaggtgactcccacagatagcttaaacccattcttctttgtaaagttttgtgctttgtgtgtgtatgagtgtgtgtatgtgtgtgtgggctatggaggttgctaactggcggccaccttgctgccctggacatggctgattggatcaggccctttgtgttggacgagagggaagccagtccccactaaactgtattgatgtgaaacctattagcctgacattcagtaagaatgatctgtattgcataacaatgaacaaagtcaatcgaatcctcattttggaaagagcaaatgcaaggtatacacaatggagcagggtttgcttgaattcaagttgcatcctgaatgaatatgaactatagttctggttccctgtgagaagccctggatagttaggatgatggcatcccatggttccagctgtaatagcttcctattgctgctgaaacacatggccacagacttggtggctgaaaacaacactaacatattctcttactgttttagaggtcagaagtctaaaatcaaggtgtctgtggggctgctctcattctggaggctttggaggacaatctggttccctgcctttttcagcttctagaggacacctgtgttccttagcctgtgaccctttcctcacgtcactccaacctcttgcctccatcaccaccttcttgtttctgtggtcacatctattactgtctttgaccctgcctccttcttgaaa

SEQ ID NO: 29901 - DNA, 1925 bp, Homo sapiens
tgtatgggggcgggcggtggggggggggaggctgcacatgcctatgccagaaaccagattatcaatttctttttctgacaaaatgttagtccatggaagataaattctgccttctggcatattatgtatataataatatataatatgtacatacatattttttatatgtgtgcatttcaattacttaatttttaatgggaatcatgagatatgtatgatcttttcaaataaggcttaaattaaaatactttaaaggttttaatttaatgatagggactaggaaacttgaacaaggatttaggttaagaaagttgatggagctgttttgagacaagtcattgagtgtaccaaaaaagataaatcgagttaaaaatatacttgcctttaaagaaataccacagaaaagcaccagtttatttctagataatctggtctgggatgcccaattatttaaacaaaaggtaacatatcataagagaaaaacacaaataaataaaatataataattataaataaaacaaaaccctctaggaaaatggctgattcgaacaattgtcaaagcatcttcagactgagcttatcgcgtgcattttttttcagcaattgaaaatgaggtcaggctccagtgagcccagagacctggttttagggatgcacctccacctatcaaaccctgagtgctataccttcatgcctctaattgtttgggtttcttccagtcccaaaggcagtcattcaaatatctctttgactttttaagccttcctgatttccagaagctcaagcactgtatctcttttcatgcccagaacctgaaactgcctttaacagattctctttattttctttaaactcctaaaaatattattcctggtcaagcagcaatactgtgccctccttcaagccaatgtgcaggggcaagggcaccccaggagatgctggaggagtggttgcttttgacctatggaagatgactacctgtagctgtgggattaggatccagtagggtcatgatcacagggcccaaagaaagggaccccmggccttgagctcatagcttctcacaattttaactcattaccactgcagcatcaaggttagtataaggaggtcagtaaggggccattcttctcttaaaacctcaagattgtttgctaaacttctgcatgttaaaccctactggttgtgggtggtatcctcaggtgactcccacagatagcttaaacccattcttctttgtaaagttttgtgctttgtgtgtgtatgagtgtgtgtatgtgtgtgtgggctatggaggttgctaactggcggccaccttgctgccctggacatggctgattggatcaggccctttgtgttggacgagagggaagccagtccccactaaactgtattgatgtgaaacctattagcctgacattcagtaagaatgatctgtattgcataacaatgaacaaagtcaatcgaatcctcattttggaaagagcaaatgcaaggtatacacaatggagcagggtttgcttgaattcaagttgcatcctgaatgaatatgaactatagttctggttccctgtgagaagccctggatagttaggatgatggcatcccatggttccagctgtaatagcttcctattgctgctgaaacacatggccacagacttggtggctgaaaacaacactaacatattctcttactgttttagaggtcagaagtctaaaatcaaggtgtctgtggggctgctctcattctggaggctttggaggacaatctggttccctgcctttttcagcttctagaggacacctgtgttccttagcctgtgaccctttcctcacgtcactccaacctcttgcctccatcaccaccttcttgtttctgtggtcacatctattactgtctttgaccctgcctccttcttgaaa

SEQ ID NO: 29902 - DNA, 548 bp, Homo sapiens
gctcctggatacgttctccttgtactctgtttcctcctcctagtgtctctgtgtgaagaagccctccgcactcagccctcggcgaccctctggtaccctggacagctccccggggagcagtctaccgctaggcggcggctgctaagagaggaaccctcctgacgcggagtctgccgctccggggctcgctctccsgcaggcccggggagaggtggggtgacaatgggttggggtgcgcgcgtgcctcataggtgcgagacagagcgagccgccggggtgtgagtcagcgcgctgggggctaagaagctgggtgaatagtcacggaatctcactcacgctcggctcctccacccatcccgtctacagcgcgtgtcccagtccagggcgtgcgtgcgctcggtgtccgattccgggctgtgtgtgtccatttggcgagatgtcgagagcggggggagtgtccttgtcggtgtatctgggcccaggttaggggacttctcctccccacccccgcgtgggtgtgggggtgtgtccgggctagggcgcgtgtg

SEQ ID NO: 29903 - DNA, 1027 bp, Homo sapiens
tcactttaggataataacattataatgagaaaatgaaaatgaaataaacaggaagtcaagaaagaactgtgtgtgcctagtgaatgccatcttgggagaagggagataggaaaggagggcaggagggaaaacatttgggttatgtataaaagttaccttgagataacttggcatggcatgtatttttggcatctcccacaaactttagggaaaaaaatgggatggaaataaataatgaacttgcttatccccattgactagtccttttcaacactggcatagcctcctggagaaatgtgttcacaggaaatggtgaaagaccatcttcccggtgatctgtggccttgtacttagctttgaacattggggtcatggttgacctgggatctgagacgcacagcctagagtcaatccttgcctctcagggcaccaccaggcagtgattttgacaatctactgcttaaaattttcttcctgctcttactaacaccagaaggttggacatgtcccaaaggagtaaaggggataagagaggaggtcagcagttcytatgtttgacaccactttatagacaagaaaattgaggttaagaaaggctgagtaatacatgtggtagggctggggttagaatgcaaatgcttctgtctctagttcaagcatatcattctttccagcgtcttagtcaccttctcaaaaccaaagaaacttaaggaggagaaagaataaatagtagattgcttgccaacatttgtcacaattctttcattctctgaatccttttcctatgccatgggactctgaacttctcccatcaagaagcagagtttggctgggtgcagtgggtcacacctataatcccagcactttggagggctgaggtgtgaggattgcttgaggccaggagtttgagaccagtttgggcaagatagcaagacccaatctctacaaaaattaaaaaaaaaaacaaaacagctggacatgatggtgtgcacctttagtctcagctactcaggaggggcaggcagga

SEQ ID NO: 29904 - DNA, 1027 bp, Homo sapiens
tcactttaggataataacattataatgagaaaatgaaaatgaaataaacaggaagtcaagaaagaactgtgtgtgcctagtgaatgccatcttgggagaagggagataggaaaggagggcaggagggaaaacatttgggttatgtataaaagttaccttgagataacttggcatggcatgtatttttggcatctcccacaaactttagggaaaaaaatgggatggaaataaataatgaacttgcttatccccattgactagtccttttcaacactggcatagcctcctggagaaatgtgttcacaggaaatggtgaaagaccatcttcccggtgatctgtggccttgtacttagctttgaacattggggtcatggttgacctgggatctgagacgcacagcctagagtcaatccttgcctctcagggcaccaccaggcagtgattttgacaatctactgcttaaaattttcttcctgctcttactaacaccagaaggttggacatgtcccaaaggagtaaaggggataagagaggaggtcagcagttcttatgtttgacaccactttatagacaagaaaattgaggttaagaaaggctgagtaatacatgtggtagggctggggttagaatgcaartgcttctgtctctagttcaagcatatcattctttccagcgtcttagtcaccttctcaaaaccaaagaaacttaaggaggagaaagaataaatagtagattgcttgccaacatttgtcacaattctttcattctctgaatccttttcctatgccatgggactctgaacttctcccatcaagaagcagagtttggctgggtgcagtgggtcacacctataatcccagcactttggagggctgaggtgtgaggattgcttgaggccaggagtttgagaccagtttgggcaagatagcaagacccaatctctacaaaaattaaaaaaaaaaacaaaacagctggacatgatggtgtgcacctttagtctcagctactcaggaggggcaggcagga

SEQ ID NO: 29905 - DNA, 517 bp, Homo sapiens
attcactgtgctagtcacctggtagactcttttgaactagaaaattatttccttctattgygggaagccaccagcaggttcgtgtgagctggttaatcacattcttttcttccaaggacggaggtatcaaggccctgggaaccttataagtggatgtggggaaagggggcctgaggtgaatccaacaaagctgcagcacccactgagctcatgtcccagggctaggctctgcctgaggacaggagacatgggtgagacccacttcctgcccagtcccatggtggggctcaggacacacatggtccaggaggcccccagccccagctacattgacatgcacctacctgtatgcagcgatcagtgagccacaggacaacttaggggaaggggcagctccagagtgcaggataggagggaagtaaataatcatggggtggggagtggccttgtggggaaggggcaaaggcagggctgtgtgtgtgtgtgtgtgtgtgtgtgtgtgtgtgtgtgtgtgtgt

SEQ ID NO: 29906 - DNA, 333 bp, Homo sapiens
ctgtgatgaaagagtaatagagtcagaagcaggggagatgacttctagggttttgtttttttttaaatcttaaaatttttttgttattttaaaaaaatagatattatacttactgtgtacaaagttttgaagtatacataactgtggaatgactaaatctagctaattaacctaggcatcaccttacatagttatcatttttatggtgagacactttacatccactcttaacatttttcaagaatatagtatattgttaactayagtcaccatgttgtacaatagctcaagatggattctagtttggcctgctactaactctgattttaggca

SEQ ID NO: 29907 - DNA, 624 bp, Homo sapiens
tgctatagtattcccagaagaagaacccaaaagaatagtgaacaatactaatgatcacaaaaccttcttcagcacagttgttcatactataattgaaatcattatttttttgtaaaatataatcctattgtgttacttaaatcatactatcagtaatttctaaagatggctgcaaataccagctgtgtgtcactccatgcttaaactcttttaagtagtcaacactgcctctcaaaaawttttttgcttcttctatgtagcatttatgattattatttttgagacagagtctcgcactgtcgcccaggctggagtgcagtggcgcgatctcggctcactacaagctccgcctcccgggttcacgccgttctcctgcctcagcctcccgagtagctgggactacaggcgcccgccacgcctggctaaattttgtatttttagtagagacggggtttcaccatgttggccgtgatggtctcgatctcttgacctcatgatcctcctgccttggcctcccaaagtgctgggattacaggcgtgagacaccggcgtccggcctggagcatctgttattgaccaagccatatatcaagtgttgaccatgaatgtcttcatttaatcttc

SEQ ID NO: 29908 - DNA, 577 bp, Homo sapiens
aaatggactaagacaactaatattctcctaagcttcattgttacaagcattccctgaattttttacttaggggctcggatgtcaacactaagatagatttttctttccaactattcatgttctaaactaccattatacccacaataaaaactgcattaatgtaaatgggcttcattgcacttcactttatgttgagtacagtctacttgatttctacaaaaataaattacttttatccattccaattcctaaaccactttgtggaagraatatttgaattcatcaattttagagagacattgaatcatccttcagcaatatatgatgacattttgagtacaaatatcaagattattatttttaatattaaatattacctgagtgtttaaagtggctgaagagcatattaatattaaatattatttctgacattttaaaaaggtcaaatatgctgctgttatacaaaaactattagcagaaacatcaaattattataatcattctaaacactaatttggttcaaaagttaacatttagggagtttggactcaatatttcttctcagtgaaggtcaaca

SEQ ID NO: 29909 - DNA, 559 bp, Homo sapiens
acacgtatcccagaacttaaagtataaaaagtataataaatttttttaaaaaaagtaattgtggtttttgccattacttttcatgaccaaaacyacagttacttttgcaccaacataatattccaaatggaatgtgccaaatgttgattctaaatattaatattccaaattgaaggaaaccctgagacagtatacttccattgtgccacatttaacacatggattaagaaatgtggtttgttcttatgtgcagaagttttaaattttcatgtagacgcttccatcaattttttgttgcatgtaatttttaaattatctttatctctgagcagcatttttcttcctgagatcaaattaagccattctgctctgttctgattgattgattattgactatgttttactctctcttccctcctaccttcatccctcctccccattataatttctaatgctggtttctatttaccaaagacttactatagagccaagtattgccctgagaattttacatcttatatcatctacccaccagccctgcatattattattgttctca

SEQ ID NO: 29910 - DNA, 1015 bp, Homo sapiens
tttttggaaaattaatgtgaaaatataaaaatgtaattgctaagcaamctgtgcattaagcatcattttcaattaattttagctaagaattgggttattaattttaatatcttgcaatcacatttataattaattaaagttaatctctttaaaactcactttagagactctgtaaactacagtgtattcttattttttaaggaatttctcttctttaaaaaacataaaataccatatcagctagacaggctttcataataccaggaataaacacctctttttctttaattataactaaaacagtgagactccattattaaaataaaagattagaaagaaaattgtttaacccaacacttcattgtgtggtaaattttatatgtaactcattatttaattgattttaactgttcttgacctaagtagctttcctgaaaggtggcaataagaaatattattcaaatctgataaaattctcaaaggctttatctacagagtgttaaaggaaaggaagtgctgctgatcatgacttagtaagcaatgtagatggtgaacctaggacattttgaccatggtggggccttgattcaactatacaaggaacaagacttttctaaaatgagttaagtaagtcattttaggaaatttctgaaagtagacaactttttggaagtttagagtgaaatttaatcacttctagaattactgatttctgtgtacttttagttttttgtctaattttatattaaatctagtatgaagggcaatttcaggtctgcattatcaataaacacagaatctttttcaaataatctttttaacttactataaaaaggatttcatttcactgaaagctcggacattctccctgaggtcccctgagtcaactccaagtctccacaaatcgggatcataagtgagctacctatatcaaaagtcatgaccaagacaatgaaaaggatgctttctagtcacatagggctttgacacacacttcattgccagtacaaaaata

SEQ ID NO: 29911 - DNA, 1809 bp, Homo sapiens
ggggagaggatatgttggctcctttatctttttatctttcattgtcctaattccttctgggcatggttaaatgagcccaggaaatgcagttggcaggaatcagcttcctgtgacatagacagagtaagagaaggacaaaaataatgaatctgagagcaagcaggcaaatgaccagcacattaagcctagcacacagtatgttatacgggatttggggtagcaaaagatgaaggcaggtcagagaagccacaactaggggatgggcaaggtcaatgaggtatgacgggtattgtatacaggaagagggtcataaacaggagtggagtcaatacaggagactaacatatacacatcataaatattagtagagaagcataaaatagtctcctggagatcagggaaacaggaaattataggttttcaggataattcagccatatccaggaaacacacacagtgaagtaacaaagagtcaataggcttagagtggtacaattcattatgcacatgtaggaattcattccaaataataggctgaaatgtagacatgagaatccaaaaaagatgttttcttagtttttgccaatatcttagctacgttttttttggttcaacaaagtaagttaacagtcatatctgcttggaaattgtatttaggccaggtgcagtgtctcacgcctgtaatcccagcacttggggtggctgaggcaggaggatcccttgagcccaggagttagaggctgcagtgagcgacaactacaccactgcattccagtctgggtgacagaacaaaaacttattaaaaaaagaaaaaaaaaaggtcgggcgcggtggctcacgcctgtaatcccagcactttgggaggtcgaggtgggcggatcacgagtcaagagatggagaccatcttggtcaacatggtgaaaccccatctctactaaaaatacaaaaattagctgggcatggtggcatgcacctgtagtcccacctattcaggaggctgaggcaggagaatcgcttgaacccgggaagcggaggttgcagtgagctgagattgcaccactgcactccatcctgtcgagactctgtctcaaaaagaaaaaaaaggaaaagaaactattgaaatagctgatattagtttgcttacttgtcgttactctttttcatgatggattataaagaaaagttataactatttgaattttctgctgatttgaagtctctataaacagtacattcctttttggtacacagagggcacttatctgcaagaaaggcaaagaaaatggaaaagttaatgaaagaggaatcatccaatccacgaacagaatgaaaccacatacacagtgaagaaacttgtcttacattttcttccttatattacttatcattcatggtagtgactactttggggcttgagtaaagcttctctaatttattccatgtagcatcatatgtgaaaaagacaaatagatactttagacatgataataacactttattttttatttatttgtttattttgagacagagttttgctcttgttgcccaggctggagtgcaatggtgcaatctcagctcactgcaacctctgcctcctgggttcaagcgactctcctgactcagcctcccaagtagctgggattacaggcacgcatcaccacgcccagctaattttttgtaattttagtagagacagggtttctccgtgttggccgggctggcctcaaactcctgacctcaggtgatccacccaccttggtctcccraagtgctgggattataggtgtgagccaccatgcctggcccata

SEQ ID NO: 29912 - DNA, 1335 bp, Homo sapiens
tgcatcaataagccaatgaacccaaagattatctgcaaaccctaaaaactaagaaagaccaaggattctcccccacatattttagagggagcatgggccagattttagacttctagtccccagaattgcaaggtgataaatttctcatgtttgagccacactgtttgtggtactctggtaaggcagccccaggaaactcacacaacaaccaaactcagacggcactggctttcagttgttgctttgccactatttaggctgcctaaatagtttaatttaagtaatacttacattacttaagtatagtaaacctcaagtttttccatctgcaaaatgcaggtaatgccatctactgtgacacagattttgttttaatgaagtaaatgaaaacctctgtactctgcttaatacaattccttgcatcaagtaatcatttaatgaatggtatcttctgctatgatcactctcatggttatcatttcttccccttataaatgaagaaactaggaaacaggttcaaaaccatgcttagggatatggcagagctggggcttcaaaatcaggtctgcctaactccaaatcaagtgtcatattccaccatagccgttaggagacagatgatacttgctcaagaatctgggggtgttctgagaagctgtacatcaagagataacatctggaatatgacacaagaagaaatggatttctaatgtagcacatagggtgatatctgggtgggcatctctataagggagggggaatcaggaatgctaaggtcacaactttgctctaccagctccagctggtgctctcccstgtgttaccctcactccccaccaagttatgttaacagctgctatttcttcaagaggtaatgtttcatcctttcatgtcaccaagtttctggaaggcatccaactgcacaaaagccttctggttccttgggtagtccagcaggctggcttcttttcatccatgtgcacagagtccctgcctgtggcagtgccctgggcagtgtgaagagactcgcagagccatgggtcagccacactctcctaatccaagtcaccttcatttcatacacaaaagctgtcttggctcctcagccagaagccccggtagtgctggggcaaagatgcaagtcggatatgatttaaaaacccttccaaaagcaaaaggattgagttccatgaataacagctcacagattctgcatgtattagatttactttgaagaaaggatagattaaaagaagagactaaagacagggaaataaaagactactacagtaagtattcaagacccctggtttggtccaacccccactaaagttt

SEQ ID NO: 29913 - DNA, 577 bp, Homo sapiens
agttaccttaccaagtagtttacaaaattaaattcattatgaaaataattaacattttagtgctgaaaagaacttcaagaattttctagtggtaccccaccccccaattttamaggtgaaaaaacttaaacctgggaaagttaagtttcttgggaactgtgggatagtgcatggagtaggtggtctggattcgagttctggctctggccattatcactatgacctggggcaagtcacttaatctctgaaccttactttactcaactgcaaaatgggtgtattaattcctgggtaacagaatcatgcatgccaaactagtagagatgtgccttgtaaacagcacctgacaaagagaagaggttgctgttattcacctaggagttgagcctagaagtcaagtgtctctgacttcatatgttaggacccctcccttttactgccgtgggcttctcttcccaaaccctattctgttctcactctctgggctatgtgaacatatctaggaggtcagataatctagagcttctgccaaacttggctcctggaagaaaacaaccaaaagagagaataaatttga

SEQ ID NO: 29914 - DNA, 1106 bp, Homo sapiens
tatggtaattatatatttagtttttttgagaaatctccattctgtcctccatagtggctatgctagcttacattcccaccaacagtgtgtaagaattctctttcttccacatcctcaccagcatttattattattattattatttataatagccatcctaactgaagtaagatgatatctcattgtggttttgatttgcgttaccctgatgattagtgatggtgagcattttgaaaaaaaatgtatctgttggacacttgtatgtcttctcattggcatgcagtaaggtaccactcagaccacaggcacttataataaggtgtgacaaatattttgtaccataaatataatagacataagctaaagatttcctaatccagtagtgtgtgtgtatgtgtgtgtgtctgtgtgtgtatgatggggagagtggtagatatcaatggcaggtcttagttaactaacctaacactctaagcctcagtcttctcatctgtaaaatggcaataataattacttagytcacaggatgatgtggtgataaatgaaacctcatatataaagtactgtagcttgtattcaggggttctcgataattctaattctctttcccttcactggatgtatatccaagaatcagagactgctgagatttcagcgccaaatctgggatgggaaattaggcaaatactctacactcataatgttccctggattttaggtggtggttgtgactcagaaatccctttcatcactgcagtgagcccagagactaaaaccttccaaaagccttagtcaaaactcagaggtgggttagtgtctatgatccatactgagcaggaaataatctttctgttgttacaggtgattattatataaatcaaaagtccaagggcttccccaaagttttgctttacaacctaggcaatgcagtatgcccagtatttatttttaggaaggtttggcagatgttaggtaggctgacttccaggtcagaaaaaaatgttcagagcaatataatagaagtccccgtgggacaaattgaagtgaaacgttatcatctttggaacacattcacctattcatcagttacttagcctctaaactgt

SEQ ID NO: 29915 - DNA, 1106 bp, Homo sapiens
tatggtaattatatatttagtttttttgagaaatctccattctgtcctccatagtggctatgctagcttacattcccaccaacagtgtgtaagaattctctttcttccacatcctcaccagcatttattattattattattatttataatagccatcctaactgaagtaagatgatatctcattgtggttttgatttgcgttaccctgatgattagtgatggtgagcattttgaaaaaaaatgtatctgttggacacttgtatgtcttctcattggcatgcagtaaggtaccactcagaccacaggcacttataataaggtgtgacaaatattttgtaccataaatataatagacataagctaaagatttcctaatccagtagtgtgtgtgtatgtgtgtgtgtctgtgtgtgtatgatggggagagtggtagatatcaatggcaggtcttagttaactaacctaacactctaagcctcagtcttctcatctgtaaaatggcaataataattacttagctcacaggatgatgtggtgataaatgaaacctcatatataaagtactgtagcttgtattcaggggttctcgataattctaattctctttcccttcactggatgtatatccaagaatcagagactgctgagatttcagcgccaratctgggatgggaaattaggcaaatactctacactcataatgttccctggattttaggtggtggttgtgactcagaaatccctttcatcactgcagtgagcccagagactaaaaccttccaaaagccttagtcaaaactcagaggtgggttagtgtctatgatccatactgagcaggaaataatctttctgttgttacaggtgattattatataaatcaaaagtccaagggcttccccaaagttttgctttacaacctaggcaatgcagtatgcccagtatttatttttaggaaggtttggcagatgttaggtaggctgacttccaggtcagaaaaaaatgttcagagcaatataatagaagtccccgtgggacaaattgaagtgaaacgttatcatctttggaacacattcacctattcatcagttacttagcctctaaactgt

SEQ ID NO: 29916 - DNA, 624 bp, Homo sapiens
ggttcttttaactcaagatacaatcgatcctgggagagcaacgagcaaggagccagcaagtctagacacattccagagccacgagccctggagtctatccaagccatgagggattttatgccctgggcttagattatgttgtgccagggcagccttccaccctttagcacagagcttggtgttccaaaggccacaaggagttttagaccatggaccctggacacrttccaagactcttttacattatgtcagacgtgcaagccctgcctcagcttctcccaacactcagcttttcccaacagcaagactccatctcaaaagaaaaaaaaagaaacagaaagttaatgaaggtggaggttgcctctgatgtctatcttgaaagcatccagccatttggtcaactcagcctattcctgtcagtgtctaatgacagagaattgacacttttatggagcccattctcacgtgtaatcactcccatagaatggatgcatatacagttggatatttggataacagctctgaattgcacagatctacttaaccgtggagtttttaccacccattgtggatggaaaatacagcgttcatgagatgcaaacccctgtaaatggaggcctgttt

SEQ ID NO: 29917 - DNA, 624 bp, Homo sapiens
ggttcttttaactcaagatacaatcgatcctgggagagcaacgagcaaggagccagcaagtctagacacattccagagccacgagccctggagtctatccaagccatgagggattttatgccctgggcttagattatgttgtgccagggcagccttccaccctttagcacagagcttggtgttccaaaggccacaaggagttttagaccatggaccctggacacgttccaagactcttttacattatgtcagacgtgcaagccctgcctcagcttctcccaacactcagcttttcccaacagcaagactccatctcaaaagaaaaaaaaagaaacagaaagttaatgaaggtggaggttgcctctgatgtctatcttgaaagcatccagccatttggtcaactcagcctattcctgtcagtgtctaatgacagagaattgacacttttatggagcccattctcacgtgtaatcactcccatagaatggatgcatatacagttggatatttggataacagctctgaattgcacagrtctacttaaccgtggagtttttaccacccattgtggatggaaaatacagcgttcatgagatgcaaacccctgtaaatggaggcctgttt

SEQ ID NO: 29918 - DNA, 561 bp, Homo sapiens
agtggctcayacctgaaattccagcactttgggaggctgaggcaggtggatcacctgaggtcaggagttcgagaccagtctggccaacatggtgaaacccggtccctactaaagatacaattagctgggcacagtggcgggcgcttgtaatcccagctactcaggaagctaaggcaggagaattgcttgaacccaggaggtggaggtgcagtgagccgagatcacgccattgcactccagcctgggcaacaagagcaaaactccgtctcaaaaaaaaccaaccaaccaaacaaccaaacaaaaaaaaccttaaagaaggagggtatgtagttttctgtacctatattacatttcaataaaaaaattaaaatcaaaattaacatcaccaaaaaaggtacaaatcaatatcaagtgcctattgatattgatatgacactgaaaattgatcatttttaattatattccaacaaaataacctcaatattttcatgcaaaaacatcaaacaaacccaatttgaggatatcttactacctaactagttgtcttccttccccctccct

SEQ ID NO: 29919 - DNA, 561 bp, Homo sapiens
agtggctcacrcctgaaattccagcactttgggaggctgaggcaggtggatcacctgaggtcaggagttcgagaccagtctggccaacatggtgaaacccggtccctactaaagatacaattagctgggcacagtggcgggcgcttgtaatcccagctactcaggaagctaaggcaggagaattgcttgaacccaggaggtggaggtgcagtgagccgagatcacgccattgcactccagcctgggcaacaagagcaaaactccgtctcaaaaaaaaccaaccaaccaaacaaccaaacaaaaaaaaccttaaagaaggagggtatgtagttttctgtacctatattacatttcaataaaaaaattaaaatcaaaattaacatcaccaaaaaaggtacaaatcaatatcaagtgcctattgatattgatatgacactgaaaattgatcatttttaattatattccaacaaaataacctcaatattttcatgcaaaaacatcaaacaaacccaatttgaggatatcttactacctaactagttgtcttccttccccctccct

SEQ ID NO: 29920 - DNA, 561 bp, Homo sapiens
agtggctcacacctgaaatwccagcactttgggaggctgaggcaggtggatcacctgaggtcaggagttcgagaccagtctggccaacatggtgaaacccggtccctactaaagatacaattagctgggcacagtggcgggcgcttgtaatcccagctactcaggaagctaaggcaggagaattgcttgaacccaggaggtggaggtgcagtgagccgagatcacgccattgcactccagcctgggcaacaagagcaaaactccgtctcaaaaaaaaccaaccaaccaaacaaccaaacaaaaaaaaccttaaagaaggagggtatgtagttttctgtacctatattacatttcaataaaaaaattaaaatcaaaattaacatcaccaaaaaaggtacaaatcaatatcaagtgcctattgatattgatatgacactgaaaattgatcatttttaattatattccaacaaaataacctcaatattttcatgcaaaaacatcaaacaaacccaatttgaggatatcttactacctaactagttgtcttccttccccctccct

SEQ ID NO: 29921 - DNA, 573 bp, Homo sapiens
tatccccttttcattatttagttggattctttttccagtctcctctcattttatgaatacctttacctctaacactgacctttttggggatcttatttttttctttaattttaattttttcccatttttattaatttttatacaaaggcaatagttgtacataggatcttatttttttagattatgttttctttggtataccakgtttactcattcttcggtgactaatttctctgcttttcaggtaggtctctgtagttcaagagtttggtttaaatgtctaaccattcttagtgtctgtgtatttttgcaaatgaggttcaggttgatcaataatggtcttattggccttttttaaaggctgctatttgatttcccaggcaggcttcccttctgaaaatgacagccacctggccacagggctgtgggagtgagctgcgtcctgaccatagtgagtgggtggggacgctgacagacacgtttcctttttgtgagttttcacaagtacgcacaagtaaggacaggcaagctgctggaactcttttggttgatgaagaagaaagaaaggaattg

SEQ ID NO: 29922 - DNA, 911 bp, Homo sapiens
caaatccttgcagtgactcatgagaccctgcctagtttacagatggcatctatgggcttttctcccaccactctgattctcgcacgctcctcttcatccacactggagtttttgcagtttcactgcacctcaagaatgcaacagccctgaggactttgggattgctttttttttcattctggaatttatattcactatgcacccaagttgccacaggactcattcttttatttttttcaagcccctgtttacatgtaaaactttaaagatgtctatcctgcatgttcaatttgaaataagaagcttcctttcttcctgtattcttaattctgaattcccaattttatagttttcttcatagtttttatcactatctgacatattatgttggtgcttaattattttcttgacagtgagaatgtaagctttacaaatcttgctttctcctacatctactgtggctaaaaatgcctgacactcaagaaatattcattgaatgagtgaatgaacaaatgttgtatcctgagaaaagagtgcaaattagtgagaggggcaatccagtttgagccattagcatttggaaaatattgtagtatatagatgaataccgggaagatggtggcaagggtggcagtttctgaaacttcttaaaattaaaataggcattgcaaggaatatagcaaaaccaaaaactcaaaagacagtatctctgacaaaacttgatgacaatatgtgagtaggcagggcagagcacggcagttacaagccctacgtgctgtgaacatgaggtgtctaatgggtgtgagaagagaagccctcttttgctaagtgtgcacrgacatctctgaaaactggctcacaataatggctgggggtcatgagaatccagctggcaaatggaatggaagggg

SEQ ID NO: 29923 - DNA, 911 bp, Homo sapiens
caaatccttgcagtgactcatgagaccctgcctagtttacagatggcatctatgggcttttctcccaccactctgattctcgcacgctcctcttcatccacactggagtttttgcagtttcactgcacctcaagaatgcaacagccctgaggactttgggattgctttttttttcattctggaatttatattcactatgcacccaagttgccacaggactcattcttttatttttttcaagcccctgtttacatgtaaaactttaaagatgtctatcctgcatgttcaatttgaaataagaagcttcctttcttcctgtattcttaattctgaattcccaattttatagttttcttcatagtttttatcactatctgacatattatgttggtgcttaattattttcttgacagtgagaatgtaagctttacaaatcttgctttctcctacatctactgtggctaaaaatgcctgacactcaagaaatattcattgaatgagtgaatgaacaaatgttgtatcctgagaaaagagtgcaaattagtgagaggggcaatccagtttgagccattagcatttggaaaatattgtagtatatagatgaataccgggaagatggtggcaagggtggcagtttctgaaacttcttaaaattaaaataggcattgcaaggaatatagcaaaaccaaaaactcaaaagacagtatctctgacaaaacttgatgacaatatgtgagtaggcagggcagagcacggcagttacaagccctacgtgctgtgaacatgaggtgtctaatgggtgtgagaagagaagccctcttttgctaagtgtgcacggacatctctgawaactggctcacaataatggctgggggtcatgagaatccagctggcaaatggaatggaagggg

SEQ ID NO: 29924 - DNA, 594 bp, Homo sapiens
acacctattttacaggtgaagaaactggagctctgggagattagggactttgcccaaggtcacttggctaaaaacttactgagctagagttagcctctcttttcacagcccctcaactgtgggtgtctccaccatctccctggccccgcgtgaataggcaaatggtgatttcttcacctgtaagctctgaggtgagcaatcgggtttttttctagccttagcacaaagcagagctttaagatgataaacctactttacccttgacaaaccccaagtgtggtcttgaaggatggagccgatcacctacaggtttaaggagccacatagagaaagggcgagcatggggctccaggccccaggtttaaatccagctctgcctttctccagccgtggaaactcagcacgtttctctgtatcccaacrtcttcatcagtactagggatgttaaatttgtgggaaggattatatcagagcgtccaagcttagggtgtgctgtggcatgcagtcgatgttgaatgaatgactttgttaccatcatcattattactgtgctttctcattacgataccaaatgtattcacgataaaattaaac

SEQ ID NO: 29925 - DNA, 1005 bp, Homo sapiens
tttacactccttatcacattacatttcaagcatttatttgtctccactatatggtgagatccttaaggatagaaattgtgtcttaaacatttttgcaatcttcagcctctagagccatgcrttgtatctagtaaatgctcaggtaaagttaactgaatacatactgcatggtgatttggaaacctctgttgattgcttataagctctgttacattaagctgatagttacctctttgagcctcagtcttcttattcttaaaaattgagaaaatattgtattttacatggatttagaaaaatctgaatataaaacatacggcctagcccataaaatcctatttcccctcccttttcttttctttctgtaaatgaatttcaacaaaaacaatctaggtggagatttttgctccctaaattaaattggttcaataaaaatttatttcaaatatttataaatatcagtactttaaaagaataaatgcatctaagaaaattggtcttactcatattagatatagtggccctgtgttttttaacattaagctttgtcttgaaacttgcagttttcttttcaaattgtatccaaattctgtgttcaactttatatgcgttgttaagtaggtgttaagtgacttatcttgacttctcataatgataatatgtgaaaagatcttctgatttatgtatttgggaattttaagacaattattacttagaacactatatgaccactccataaaaatacacatcaccataaaataactgcatatggagtatttaatcctgaactcctgaagatgaaaagtgaaagtagttacaataatcattattttcaattttatgtagttaagtggttttacacaaaaaaattagccttccaaatgacatagttataatgcgttaatggtagcataacgtgttattacattatgcaacataatttcatgggtattatgtatggcattttagaaactcatgtacttacagttattagaagatactcaa

SEQ ID NO: 29926 - DNA, 1005 bp, Homo sapiens
tttacactccttatcacattacatttcaagcatttatttgtctccactatatggtgagatccttaaggatagaaattgtgtcttaaacatttttgcaatcttcagcctctagagccatgcgttgtatctagtaaatgctcaggtaaagttaactgaatacatactgcatggtgatttggaaacctctgttgattgcttataagctctgttacattaagctgatagttacctctttgagcctcagtcttcttattcttaaaaattgagaaaatattgtattttacatggatttagaaaaatctgaatataaaacatacggcctagcccataaaatcctatttcccctcccttttcttttctttctgtaaatgaatttcaacaaaaacaatctaggtggagatttttgctccctaaattaaattggttcaataaaaatttatttcaaatatttataaatatcagtactttaaaagaataaatgcatctaagaaaattggtcttactcatattagatatagtggccctgtgttttttaacattaagctttgtcttgaaacttgcagttttcttttcaaattktatccaaattctgtgttcaactttatatgcgttgttaagtaggtgttaagtgacttatcttgacttctcataatgataatatgtgaaaagatcttctgatttatgtatttgggaattttaagacaattattacttagaacactatatgaccactccataaaaatacacatcaccataaaataactgcatatggagtatttaatcctgaactcctgaagatgaaaagtgaaagtagttacaataatcattattttcaattttatgtagttaagtggttttacacaaaaaaattagccttccaaatgacatagttataatgcgttaatggtagcataacgtgttattacattatgcaacataatttcatgggtattatgtatggcattttagaaactcatgtacttacagttattagaagatactcaa

SEQ ID NO: 29927 - DNA, 550 bp, Homo sapiens
atcttatgacttgcccaccttaataatcacatgaactgattccttatgataaatgtctttatatattacattttcaggtcatcttttctaatttttctgcatataagtttttcatatattttaacagatttataggttttattggtattataaacagtacctattttataattttaatttatagtttgatgcttgagtatagattccacataaataaattttgaatatttattttcagaaatgtaactgaactctgatatwgtttctaatgctttatgttctcttggacagtctatctagatgaccatattagctgatattaaccattttgtttctactttctaatctttatgtactcccttctcaatctactaaagtgttataacatgtatattgtgttatagcgtgtgtatttgtgaaagtaagctaaatgctataaaaaatagatgaaagctttcagtggcttagtaaaactgaattatcaattatgtagttcaacatatattggcaggagaactctgcttcagcagttagtccctgtattaggctg

SEQ ID NO: 29928 - DNA, 1023 bp, Homo sapiens
ctgggctgcctatactgcctagtctgtggctaagatggactggaactgagatacaaggttgtttcaggtccacagctgagaccaagatcttcaagcttgactcctggatcacaaacattcatgtctcccagtaagttcctgattgaggaagaccgctctcagactgtttcagaagggccacagccaatttatagggctcttttaagatccacagtggaactgagatcagggcatcagcctgcaggatatgcctctttccagacctgcaggcaggcagaacagctctctgtccatcactgagacggggtgagakcaagctccagagccatttaaggatacactgaggtaaagagtcttgcaagcctgccatagagactcatgggtgcatcttccagtgggacctaagcttggcagaaatggttcccagaccacagatagaagggactgaaactgagattgagggctaattgtgaacctgctatgggatggatactggcaagcccaactgtggtactagcagacaagactcccagtagtttcctgtgtttgcaggactgttcatagaccacagctaaataggagtggaggtgagattcagaaccccttcaggaacttctatggtatggaggccagcaagcctgtataaatgcatttccccagagttgtctgcacagtgttggtaactctgggtctgcggcagagaaacagggacccttcaggatctactgtgggatggaagctacaagcctatcatattgcccagcagttccccatgtcattgggattgctcacaggctgcaccaaagagggtctgaagttaagcttcagaacccctttaggagctaatgtgagatggaagctggctaggctgtcatggtggcacagatgaggagttttgcaacagttctctgcatgaatgggataactcccaggctagaaacaagacagagcccctctagaatctactatgggacagaagccagcatatctgttctggtgggacaaatagacaagtctttctct

SEQ ID NO: 29929 - DNA, 1668 bp, Homo sapiens
ttcctaagaactttaggttgaaagtcacctaaaacattagctgagcaggaaaatggaaagagctcaggatatgaccacttaatcaagctgttgaaccagccctgaattatttttccctggacttccgttcatagggtaaagaaaacaaaatctctctttgggtaagccagtgtaattgagtttctcttccatgcagctgaaccagtctttggttcataaagtccctcctttggtcatgtatatctttatttacataataaacactctgaaaagcccctacaatatgaacacccatttaattttatttaatactaatttatcaaagatatttgattatgagatacctgatatttctctatgaacttgcaacctaatgaccacacttcagtaaacatttaactagagatttcacaaagcaaaaaattagcgttctgtaattacataattaaatatctaaaaggctatgttcatagtcataattgtttctgaatctcatatttcttagggagcattgttaccagtgacaattattaacataagccattactcaaagagttagcatcctttgaggagcttaagcaaaatctctgaaaattatctttcttctttactataattcattcaaggtaacagtttgttgaaacttagtgcaggtgatgatctatctaattcttaaagaaacataagcaagacagaatgacacagcttttctttttctttggagtttatgtcccccaacttctaatattatgagcacttggtcaccattctctcttactggtatttgagccacctctcttttttctctaccctacaataaggagagaaaagcactcaaattttctttcatgagccacctctcctttttctctaccttacaataagcagagaaaagcactcaaattttctttcatatacatgaaggaatttacattaatgcatcagcagtgaatgtgacaaactaatagactaaggtactcaacaaatgaaatgcttagaccatactaacatatttcaaataagtatctgcatctaaaagggcaggttgtcttcaccatttatagcatacttcctgttttcagagttgcatattaagcatagatgagtctaaaagggggtagattctttgactcyaatcctatattctaaatgaagaggaagtgtacgccgaaaaattattgatgaaaatggtgcttcatcatttatgtttagaaatgaattgtaaatttctaattttacaataatagatttttaaaggagaaattatatttagaccattatcctttcagtatggttacattttgacacagaattagactagaaatagagtaattgtcagggtgattctgagaatatcttggtgtttattactcaggctgtcttttaggctagactgcaaaagcaggtttctaagccaagcagtttgcaatataagagtaagtaaaacctaaaagagtaaaaacaatgtgcaagcacaagtcattcactacaatggttctagtttctgcaataatggcagatgtgggctaatcattggggcaacaataggaaattgcaccaatgtttcatgaaagattccagagagtgaccttgatgtagatgtcagggtccttgatgtggaacttcagcatagaccaggaacaacagcagaatctttagtaggcatgg

SEQ ID NO: 29930 - DNA, 1668 bp, Homo sapiens
ttcctaagaactttaggttgaaagtcacctaaaacattagctgagcaggaaaatggaaagagctcaggatatgaccacttaatcaagctgttgaaccagccctgaattatttttccctggacttccgttcatagggtaaagaaaacaaaatctctctttgggtaagccagtgtaattgagtttctcttccatgcagctgaaccagtctttggttcataaagtccctcctttggtcatgtatatctttatttacataataaacactctgaaaagcccctacaatatgaacacccatttaattttatttaatactaatttatcaaagatatttgattatgagatacctgatatttctctatgaacttgcaacctaatgaccacacttcagtaaacatttaactagagatttcacaaagcaaaaaattagcgttctgtaattacataattaaatatctaaaaggctatgttcatagtcataattgtttctgaatctcatatttcttagggagcattgttaccagtgacaattattaacataagccattactcaaagagttagcatcctttgaggagcttaagcaaaatctctgaaaattatctttcttctttactataattcattcaaggtaacagtttgttgaaacttagtgcaggtgatgatctatctaattcttaaagaaacataagcaagacagaatgacacagcttttctttttctttggagtttatgtcccccaacttctaatattatgagcacttggtcaccattctctcttactggtatttgagccacctctcttttttctctaccctacaataaggagagaaaagcactcaaattttctttcatgagccacctctcctttttctctaccttacaataagcagagaaaagcactcaaattttctttcatatacatgaaggaatttacattaatgcatcagcagtgaatgtgacaaactaatagactaaggtactcaacaaatgaaatgcttagaccatactaacatatttcaaataagtatctgcatctaaaagggcaggttgtcttcaccatttatagcatacttcctgttttcagagttgcatattaagcatagatgagtctaaaagggggtagattctttgactctaatcctatattctaaatgaagaggaagtgtacgccgaaaaattattgatgaaaatggtgcttcatcatttatgtttagaaatgaattgtaaatttctaattttacaataatagatttttaaaggagaaattatatttagaccattatcctttcagtatggttacattttgacacagaattagactagaaatagagtaattgtcagggtgattctgagaatatcttggtgtttattactcaggctgtcttttaggctagactgcaaaagcaggtttctaagccaagcagtttgcaatataagagtaagtaaaacctaaaagagtaaaaacaatgtgyaagcacaagtcattcactacaatggttctagtttctgcaataatggcagatgtgggctaatcattggggcaacaataggaaattgcaccaatgtttcatgaaagattccagagagtgaccttgatgtagatgtcagggtccttgatgtggaacttcagcatagaccaggaacaacagcagaatctttagtaggcatgg

SEQ ID NO: 29931 - DNA, 615 bp, Homo sapiens
aaaataactacatattcaaagaagtttttaggtacttatgtttagcacattaygttacataaattagtttaatatattctgttccttcctttaattttagtgtttcatatgaaacatttgaatggaaatttaacaaaataataataattttgtgacattgtgatatgtaataaagtaaaatgccataaatgtttaacattaaaacatctaaaataaaaattatatatacacaaataacaccaacataaagtctaaatactacgactaattctattcaagccatcatttggagagtcattagcatatgtaatttaatgtttgttatttttttcttcttttctttaatatgacttctgtgaaacttataggaaaacacaccaataaatgaggacacttgcgaactaattgaatacgagggtatgaagtgaaacaaagctctgatttgttacatttttaaaaatttcgttttcattaagcgtatgctagttgcgaaaataattgaaatattttgcattataaaaggtattaatttcagtattttaaaatctggctaccatagtattcaacagttcaaactggtagatgggtgcaaactatgaatatgcaatttagaaa

SEQ ID NO: 29932 - DNA, 610 bp, Homo sapiens
tgagggcagaatggatactgaatatcaatccacyacataaacaatggactcgctccccaggctcttgagcccagtggttaaagagcagaagaaaaatggttggagccagtggatccttcagtttcctgaagattagctatctagatcctccaaacgccctggttcctgtccttttaggtttctgcttttgtagatttccctttggctctggaagcccccaccatgaccttataattatttcccttttacctctagtcagatttgagttttgatatttataatcaaaccacctcaatggatagccataccacccttaactcgcccgatctcatttgttctctaaagatttcttatagtataagtaagacattaagtaaataaagagtcttcactggaaagagataataacatatggaacagatgagaaagcacacattctaactatgaaaaatgaatagtttaaatattgtgatgaaacataaaatttgaatccaggagctacagttaaaaagataaaacactaggctttatatttctcactatcacaaatgaggatgcccacgtttctcaagggaaaaacactttttcttggaactgatttttaaaatag

SEQ ID NO: 29933 - DNA, 610 bp, Homo sapiens
tgagggcagaatggatactgaatatcaatccactacataaacaatggactcgctccccaggctcttgagcccagtggttaaagagcagaagaaaaatggttggagccagtggatccttcagtttcctgaagattagctatctagatcctccaaacgccctggttcctgtccttttaggtttctgcttttgtagatttccctttggctctggaagcccccaccatgaccttataattatttcccttttacctstagtcagatttgagttttgatatttataatcaaaccacctcaatggatagccataccacccttaactcgcccgatctcatttgttctctaaagatttcttatagtataagtaagacattaagtaaataaagagtcttcactggaaagagataataacatatggaacagatgagaaagcacacattctaactatgaaaaatgaatagtttaaatattgtgatgaaacataaaatttgaatccaggagctacagttaaaaagataaaacactaggctttatatttctcactatcacaaatgaggatgcccacgtttctcaagggaaaaacactttttcttggaactgatttttaaaatag

SEQ ID NO: 29934 - DNA, 610 bp, Homo sapiens
tgagggcagaatggatactgaatatcaatccactacataaacaatggactcgctccccaggctcttgagcccagtggttaaagagcagaagaaaaatggttggagccagtggatccttcagtttcctgaagattagctatctagatcctccaaacgccctggttcctgtccttttaggtttctgcttttgtagatttccctttggctctggaagcccccaccatgaccttataattatttcccttttacctctagtcagatttgagttttgatatttataatcaaaccacctcaatggatagccataccacccttaactcgccygatctcatttgttctctaaagatttcttatagtataagtaagacattaagtaaataaagagtcttcactggaaagagataataacatatggaacagatgagaaagcacacattctaactatgaaaaatgaatagtttaaatattgtgatgaaacataaaatttgaatccaggagctacagttaaaaagataaaacactaggctttatatttctcactatcacaaatgaggatgcccacgtttctcaagggaaaaacactttttcttggaactgatttttaaaatag

SEQ ID NO: 29935 - DNA, 564 bp, Homo sapiens
ttgttagcaattatgatttacttcagtatcactgtaattattgctttctcataaaatattcaaacaaatacatggaatgttatatcaatatatagtactagaaagattttagtatcaatatatagtactagaaagatgcatgttcccaaatcttcactacaatacagctacatcttatatgatgcaacagttaaaatgtagcctataaaacaataaagttgtgtgtaatgaaaagtatttttcactacctgtttctaaattaaaattaagattaattataattaaataaaattaaaaattcagtttctcagttatactagctaatttcaaatgattaaaacctacaagtggctggaggctaccatattgattattcatccttaacagataaggtgagcagccgtcttatggcagctaagctagtgctagccaattataagaaaataagaaattagttcaaaaatcacataaatacactgagagaacatgatacagtgtcatttttctccattgctcctcagcttttgtwattgttcactctttatgatttattttctatgatta

SEQ ID NO: 29936 - DNA, 620 bp, Homo sapiens
ctaaatggacacttgcccgaattagtcccttgcccctccatatcccagtctccttctgctaaggtagttctacctctcagagggcctggttggatagaccccaaatgacctcattttatcggtatcccatgatcctccttgataaaacaggttacacattattgccccgagaagcacaaaaagaccaggcttatcccaacacagatgctctcttttctctcactctctagatttccttgactggtggcttatttctgtatgagtttgcttagaattttttcagacatggasaccagtcctttttgtgtgccaactgcaaaaaatacatcctatagcagggcaatcccattaaagcccaccctactaggctggtgctaaaaggtatcactcttccactactttttcagaaaggctgttagaagggtcctcaccaatctacaagggctctctgaaacgaaatatttccaccagtcttcttttaactctgttcttcttttaaactcttgctgtgcctgaagagtccaaaagtctgtcaacttgaaataaatacatatagagacaaatcttcaagagtaaaggacttgtttgggaagaaacaaagtaataggattttaatccag

SEQ ID NO: 29937 - DNA, 620 bp, Homo sapiens
ctaaatggacacttgcccgaattagtcccttgcccctccatatcccagtctccttctgctaaggtagttctacctctcagagggcctggttggatagaccccaaatgacctcattttatcggtatcccatgatcctccttgataaaacaggttacacattattgccccgagaagcacaaaaagaccaggcttatcccaacacagatgctctcttttctctcactctctagatttccttgactggtggcttatttctgtatgagtttgcttagaattttttcagacatggacaccagtcctttttgtgtgccaactgcaaaaaatacatcctatagcagggcaatcccattaaagcccaccctactaggctggtgctaaaaggtatcactcttccactactttttcagaaaggctgttagaagggtcctcaccaatctacaagggctctctgaaaygaaatatttccaccagtcttcttttaactctgttcttcttttaaactcttgctgtgcctgaagagtccaaaagtctgtcaacttgaaataaatacatatagagacaaatcttcaagagtaaaggacttgtttgggaagaaacaaagtaataggattttaatccag

SEQ ID NO: 29938 - DNA, 633 bp, Homo sapiens
tcataatgaaaatgaggaggatggattacattgtcattatattccttttcagttattttttaaatcttgagtgatttcctttctcttttaaatggtatgtcagtgactctcaaaaattacttacagatgacaaaacatttgagagtatattttgatgttacattttttttaagtcgtacatataattatgagaactaatgtttaggagagctattttgcagctctaattctaaatgagaatcaaatacttttgattctatatggccttaatttaaattacatagtttacatattgtgaatatgtcaacatgtaaaatatttctgtcctaagatgacatttttcatttctgtatttatttttataaaaatcctaggtcatctaaaccgtggttatatagccattgttattkgttgattgtgtaatgtggtagttaaaaccatgactgagaaaacgaatgatttgtccttccttctaggtttaccaaatgactcagtagtagtttttggtttgggtttattttagtcatcctctctctctccctgtttctctgtctctctctacatatcacttgacacacacactatatatatgtgtgtatatatacagacacatatatatcatttggaatatgc

SEQ ID NO: 29939 - DNA, 666 bp, Homo sapiens
cctcagagaagctctagaagcaggcagaattggcccaagggtgagaaccagtagcatctgctgtccatcaaggccctgtgctgcaacagagcccctctgggggactggaatgacctcctgaccactccctcccgggctgctctctccacatctcctggaatcctttgtgagcctccttcagccttttccctgtgcccgatcctcatgtgtcacatgtgaacctgacggacatggacgccctgagctgtgagtccacgtctcatgtgcacgccccggccagctaagcctcgggccgtcagcaatacctctgagtgcccggatgccctccctgcacccttccatttctccaggagcctggcactgcttcctccaccgttttcacagggagaagcaggtctaggactcccctgcacctttgccaccataatggcccacactccctgggtccaggagtgtagaatatgcggctgcttccatttgctgagtgtgtcgattcaatgatgctttcaaactttaataaatgacaatgtgtaggtttgggatgtatcaggcccactcagtcagacctgagtgagaaatccattgttccctgatttccacagkcctttgctgagaatagtggaccaagccccatgttaggcctctcggaatgggggtccctgcaga

SEQ ID NO: 29940 - DNA, 512 bp, Homo sapiens
gacagaaagttccctattgaaaaatatataygttttgcttctagtagcatagcagactagttttacacatgcacacacaaaaaccacacaaacacacataccaactcagtaacaaggaagaactaaaaatggtggaactttttaaaaggcattttcacacagagctgagttattagggaaatgaggagaattccttggaggccagaaatgacaaagggtggacacagagaggtacacagcactgaagccagtgtttactctgggtacatcagccaatcctgagttgactcagagtctagatttttaaagaaaatcaaagaaaaaagttgagggcccaacagataggcagtcagacagaagacctgcagatatgaaactggaagctcccaatggttgagctacaaaaataaaacctcctgtagagagagacagtggggcatgcatatctccttggttttgactctaggtggaaataggggggaaaaaaaattcccaagactttctaactgcaa

SEQ ID NO: 29941 - DNA, 512 bp, Homo sapiens
gacagaaagttccctattgaaaaatatatacgttttgcttctagtagyatagcagactagttttacacatgcacacacaaaaaccacacaaacacacataccaactcagtaacaaggaagaactaaaaatggtggaactttttaaaaggcattttcacacagagctgagttattagggaaatgaggagaattccttggaggccagaaatgacaaagggtggacacagagaggtacacagcactgaagccagtgtttactctgggtacatcagccaatcctgagttgactcagagtctagatttttaaagaaaatcaaagaaaaaagttgagggcccaacagataggcagtcagacagaagacctgcagatatgaaactggaagctcccaatggttgagctacaaaaataaaacctcctgtagagagagacagtggggcatgcatatctccttggttttgactctaggtggaaataggggggaaaaaaaattcccaagactttctaactgcaa

SEQ ID NO: 29942 - DNA, 512 bp, Homo sapiens
gacagaaagttccctattgaaaaatatatacgttttgcttctagtagcatagcagactagttttacacatgcacacacaaaaaccacacaaacacacataccaactcagtaacaaggaagaactaaaaatggtggaactttttaaaaggcattttcacacagagctgagttattagggaaatgaggagaattccttggaggccagaaatgacaaagggtggacacagagaggtacacagcactgaagccagtgtttactctgggtacatcagccaatcctgagttgactcagagyctagatttttaaagaaaatcaaagaaaaaagttgagggcccaacagataggcagtcagacagaagacctgcagatatgaaactggaagctcccaatggttgagctacaaaaataaaacctcctgtagagagagacagtggggcatgcatatctccttggttttgactctaggtggaaataggggggaaaaaaaattcccaagactttctaactgcaa

SEQ ID NO: 29943 - DNA, 512 bp, Homo sapiens
gacagaaagttccctattgaaaaatatatacgttttgcttctagtagcatagcagactagttttacacatgcacacacaaaaaccacacaaacacacataccaactcagtaacaaggaagaactaaaaatggtggaactttttaaaaggcattttcacacagagctgagttattagggaaatgaggagaattccttggaggccagaaatgacaaagggtggacacagagaggtacacagcactgaagccagtgtttactctgggtacatcagccaatcctgagttgactcagagtctagatttttaaagaaaatcaaagaaaaaagttgagggcccaacagataggcagtcagacagaagacctgcagatatgaaactggaagctcccaatggttgagctacaaaaataaaacctcctgtagagagagacagyggggcatgcatatctccttggttttgactctaggtggaaataggggggaaaaaaaattcccaagactttctaactgcaa

SEQ ID NO: 29944 - DNA, 496 bp, Homo sapiens
gacccagaagaagcaagcaatcaaggcacccctgggcagagaggtgcaactttaagagaggtctttctgttagtctccagaagtcccaaatggccaagtcatgccctttgttcatcatcatagcctttgtccaacagcaaaaaaaccaattttcttcccacactaaaggttctgcactgattaagaagctgtagaatcctgaaaactgaaatggcaatacctggaaagaaccataaccagccaagcatgttgtgytgtgccctccttgcctgacaaggaatcaccaacctctccctaccccaccacagtgccatgtgaaagtccccatggcagaagtaacgtagcaggacagagtagccctgccttccctccccagtttcctgctgagccctgggggatgggcagaggctccagagctgccggtaagaggctggagccacatgggcaagggccagcacacctcccataccttcaacattgctggagttggttatta

SEQ ID NO: 29945 - DNA, 1125 bp, Homo sapiens
atcctaatggaatgagacaggctgtatctctgatgcaagtgatccttacggtctcaggtagaggcacattttctttcctgggtggctacatgtatattggcaccaacagccccctgtggaaaggatcactcatggtttgataagcacaactgaaaagtgtcagcagtcaccaaacaagaagttttcccttttgggggaaagatatttggaatcataggaatctctagttttcttactcactgattctgggacaatgcagtttcartgacataatgtaagtggatgctttctacacagtgctgatgctattaaccatacaatagatttcagtgtattttttctcattctgaccactttacctttagctttaatattctgttagagcatcataatatttatgtctagaaggaaccataaaggtcttctactccagcagttcatctgaagctaacctaccaactaagtataaactgtagctttgtcagttttgaacaaccagagagtgagatcttaactattgtcatgatgttgtcaatatcacttttggaaaaatgagacagtatactataacattaacttttcattacttaggccaaagtccattctggggccagttaggaaaaaataataatatcttttagacataacagccttacaaatgttgaagacatctcagatgtttgctgacttttctggcaatcatcttctgctcctttagctaatctttgtataacatgactttgaatctcttcatctttttggtgactctcctttgaatgtactccagtttacctctcttcttgaagtgtgtggcttagatgtggtttgatatagaggcataattgaatggaattattatttcccttgatctggacaaaatattctattaatgtagccaagaattgcattagcttttttggcaaccactgttcagtgcttgatgtatatcaagctccctgtcaattaatcctccagggacttttttatttattctcttgctaagctacgcctttgacgtctatataagtttagttgctgtttggaataaaaagactttactttttttttttcctaattaaatttcatcttgcaagtccagtgttccacccattgggatattttggg

SEQ ID NO: 29946 - DNA, 1125 bp, Homo sapiens
atcctaatggaatgagacaggctgtatctctgatgcaagtgatccttacggtctcaggtagaggcacattttctttcctgggtggctacatgtatattggcaccaacagccccctgtggaaaggatcactcatggtttgataagcacaactgaaaagtgtcagcagtcaccaaacaagaagttttcccttttgggggaaagatatttggaatcataggaatctctagttttcttactcactgattctgggacaatgcagtttcaatracataatgtaagtggatgctttctacacagtgctgatgctattaaccatacaatagatttcagtgtattttttctcattctgaccactttacctttagctttaatattctgttagagcatcataatatttatgtctagaaggaaccataaaggtcttctactccagcagttcatctgaagctaacctaccaactaagtataaactgtagctttgtcagttttgaacaaccagagagtgagatcttaactattgtcatgatgttgtcaatatcacttttggaaaaatgagacagtatactataacattaacttttcattacttaggccaaagtccattctggggccagttaggaaaaaataataatatcttttagacataacagccttacaaatgttgaagacatctcagatgtttgctgacttttctggcaatcatcttctgctcctttagctaatctttgtataacatgactttgaatctcttcatctttttggtgactctcctttgaatgtactccagtttacctctcttcttgaagtgtgtggcttagatgtggtttgatatagaggcataattgaatggaattattatttcccttgatctggacaaaatattctattaatgtagccaagaattgcattagcttttttggcaaccactgttcagtgcttgatgtatatcaagctccctgtcaattaatcctccagggacttttttatttattctcttgctaagctacgcctttgacgtctatataagtttagttgctgtttggaataaaaagactttactttttttttttcctaattaaatttcatcttgcaagtccagtgttccacccattgggatattttggg

SEQ ID NO: 29947 - DNA, 1125 bp, Homo sapiens
atcctaatggaatgagacaggctgtatctctgatgcaagtgatccttacggtctcaggtagaggcacattttctttcctgggtggctacatgtatattggcaccaacagccccctgtggaaaggatcactcatggtttgataagcacaactgaaaagtgtcagcagtcaccaaacaagaagttttcccttttgggggaaagatatttggaatcataggaatctctagttttcttactcactgattctgggacaatgcagtttcaatgacataatgtaagtggatgctttctacacagtgctgatgctattaaccatacaatagatttcagtgtattttttctcattctgaccactttacctttagctttaatattctgttagagcatcataatatttatgtctagaaggaaccataaaggtcttctactccagcagttcatctgaagctaacctaccaactaagtataaactgtagctttgtcagttttgaacaaccagagagtgagatcttaactattgtcatgatgttgtcaatatcacttttggaaaamtgagacagtatactataacattaacttttcattacttaggccaaagtccattctggggccagttaggaaaaaataataatatcttttagacataacagccttacaaatgttgaagacatctcagatgtttgctgacttttctggcaatcatcttctgctcctttagctaatctttgtataacatgactttgaatctcttcatctttttggtgactctcctttgaatgtactccagtttacctctcttcttgaagtgtgtggcttagatgtggtttgatatagaggcataattgaatggaattattatttcccttgatctggacaaaatattctattaatgtagccaagaattgcattagcttttttggcaaccactgttcagtgcttgatgtatatcaagctccctgtcaattaatcctccagggacttttttatttattctcttgctaagctacgcctttgacgtctatataagtttagttgctgtttggaataaaaagactttactttttttttttcctaattaaatttcatcttgcaagtccagtgttccacccattgggatattttggg

SEQ ID NO: 29948 - DNA, 556 bp, Homo sapiens
taaatttattttttaggataaactaaaactagtagagttcatgatgaggaatttatattgaacatgatgtggaacacttgggacactttctatcatatttttaaattagcctcaaatctcaattacctttattttacctggatgatagtggttccttctgctattagtcaatacctccaaaagataccagataccatagtagcacttgaaatagcaatgtgttttctcctaatctccattcttttacatcatgagctctttaagaaaggaaacttgcctaatccatcatctccactaacatcatggttggcatattacatgtatttcatatttgttaaatgattgaatgtgaataaaacattttcgatttatctataacctaatggctataatttttagttkttttatctgtgtttaccttagaaattgatgctacagtgattcacatgtatcagtaagaagaaaataattattcattttttagtataaacaggattattttcattttattactttgtaaaagaggtagccaaaagaatttctaaagatagctaca

SEQ ID NO: 29949 - DNA, 580 bp, Homo sapiens
ttctggtaaaagacagtgactttgaaacactagaactttattttcttccccttccattttgctagatttttatatattatgtaaaaaagttagcaaactaaaaatactataattattgtttaaaaaacttatgayttttaaatatattaagacttttttcttttagtttaaatttaccttggactttgccttgaatattttatgtacactctaatgctgtacatttttcagatattaaatctgcccttaatcaaataattgttccccatataatttatttttgtatttctgatttcaaatgttctctttgttttgtttctattattaattaattaatttattcatttgtagggaccattacccaggctggagtgtagtggtacaatcagagctcactgcagtggtgaactcctgggctcaaacaatcctctcacctgagcgtcaaaaagtgctgacattataagtatgagtcactgcacccagacttaggctacttttgtattaacatccaataaaacatattttccaaagccagttttactggaatttctggcttaatctcctcctaggcttttataca

SEQ ID NO: 29950 - DNA, 580 bp, Homo sapiens
ttctggtaaaagacagtgactttgaaacactagaactttattttcttccccttccattttgctagatttttatatattatgtaaaaaagttagcaaactaaaaatactataattattgtttaaaaaacttatgacttttaaatatattaagacttttttcttttagtttaaatttaccttggactttgccttgaatattttatgtacactctwatgctgtacatttttcagatattaaatctgcccttaatcaaataattgttccccatataatttatttttgtatttctgatttcaaatgttctctttgttttgtttctattattaattaattaatttattcatttgtagggaccattacccaggctggagtgtagtggtacaatcagagctcactgcagtggtgaactcctgggctcaaacaatcctctcacctgagcgtcaaaaagtgctgacattataagtatgagtcactgcacccagacttaggctacttttgtattaacatccaataaaacatattttccaaagccagttttactggaatttctggcttaatctcctcctaggcttttataca

SEQ ID NO: 29951 - DNA, 1172 bp, Homo sapiens
tggctagatgcttacatgtatgagaataacagataaaaagagttgcaatttaactttgagaccagactaattttgagagactgagtcctgaagtactttttttcagtcacaaaagcttcagaagggcagaagaaaggcttgactcagtaacccaggaatgtagcagctgatgttcgaggacaagctggtgtatgcaggagcaccagatgtcccgacagaagaaagcggatgccacagattgggaagagctgtggcaggggagagagccaactcagatttcttcttctgactaattctgattttctgattaatgaatgcttataataaaaaaatcatcatcacagaaaggggaaatacatctacaatacccatgattatactgcaccgaacatcactttaagttttgaagtataattctttgggtattttctctttctgaaaaattctgcttatgccatcattttcataatttttttcaaatagtaaaatgttaaagacacttctataagaccagacataatactctttgcctttctttctactctctctctccacacacacacacacacacacacacacasagagagacagagagagagagacagagagagagagagagagagagaatgtcctaggtactgagctgtgtgctaatttttaataagagcaattttgtgtcagtcttatcacagaattcctcagctgtcagggatagccagagttcatcagcaagcccttctgtgctaggaaggtctcaagtttgcatccacaataatcccacaaagcatacattgcagtatctgtatcactctctgcttctcatcttggaaaactgagcaaggttaaaaataccttcactccaaatgatgttagctgcaaagcagatccaaccatagctctgccccccactcggtcctagccagctgtgaaagggcctaatgagcaggctctgggagagagctgctgggggcgtgtggctggagtcctccacgtccatccactagccgatggtcatcagcaggttggaggaaggtaattgcccttgcaacttcttttagcagccacagtaaaggtcctgcataaatacccaggtctggatgcaggaatagaattgccacactgcaaaagtcaagtgagtttatcaactgggtcagcttctgtctttccctatg

SEQ ID NO: 29952 - DNA, 582 bp, Homo sapiens
gagttaatgctgaaatgagttaagactttgggggactgttgggaaggaatgattggttttgaaatgtaagaccatgagatttgggaggggccggggtggaatgatatggtttggctgtgtcctgacccatatcccatcttaaattatcttgaattgtagctctcacaattcccacatgcaatgggagggacccagtgggagatartggaatcatggcagtaatttcaaccttactgttctcagggtagtgaataaatctcatgagatctgatggttctgtaaggaatttccccttttacttagctctcattttctcttgtctgccaccatgtaagatgtgcctttcaccttctggcatgattgtgagcctccccgcctagtggaactgtgagtccaataaacctctttttctttataaattacccagtttcatgtatgtctttatcagcaatgtaaatttgcaaaaggaacctcatagatttgatcttctcagtagaggtccatgggctttataattaaagacttagagaaatacttgcaaaacatatacttgataagatatgggtattcaaaatatacaaa

SEQ ID NO: 29953 - DNA, 582 bp, Homo sapiens
gagttaatgctgaaatgagttaagactttgggggactgttgggaaggaatgattggttttgaaatgtaagaccatgagatttgggaggggccggggtggaatgatatggtttggctgtgtcctgacccatatcccatcttaaattatcttgaattgtagctctcacaattcccacatgcaatgggagggacccagtgggagatagtggaatcatggcagtaatttcaaccttactgttctcagggtagtgaataaatctcatgagatctgatggttctgtaaggaatttccccttttacttrgctctcattttctcttgtctgccaccatgtaagatgtgcctttcaccttctggcatgattgtgagcctccccgcctagtggaactgtgagtccaataaacctctttttctttataaattacccagtttcatgtatgtctttatcagcaatgtaaatttgcaaaaggaacctcatagatttgatcttctcagtagaggtccatgggctttataattaaagacttagagaaatacttgcaaaacatatacttgataagatatgggtattcaaaatatacaaa

SEQ ID NO: 29954 - DNA, 789 bp, Homo sapiens
cttttgtgcacaggctggtgttcaacttaagcaggttgcttttcaccaattgccactgggccaccccccttagccatggtttctaggaacatatttagacatacaaggggttgcttatgattccctggaaagccctatgctcttatatctgtacattatacctactgtttctctcatatgcccctctctgtctttgctcaggcaacaaaatgcctcagatctcattttgttcaaaactacctaggctgggctgggggcggtggctcatacctctaatcccagcactttgggrggccgaggtgggcagatcacgaggtcaggagatcgagaccatcctggctaacacagtgaaaccccgtctctactaaaaatacaaacaattagctgggcatggtggcaggcgcctgtagtcccagctactcgggaggctgaggcaggagaatggcgtgaacccaggagatggagcttgcagtgagccgagatcacgccactgcactccagcctgggcgacagagcgagactctgtctcaaaaaaacaaaaaaagacaaaacaaaacaaaacaaaaaactacctaggctgaacaaggtacttctcctctgtgctctctcagcccccaaggaaagtattcatcatagtcttatcttatctcttatttgtctctactaagccaaaagctccttgagaacaagaagagggttttattaaattctgtatcttctacacctaccatgttacaagtgctaaaaaaaaaatgtctaaaatgcttctgaaatcattggtaccccaca

SEQ ID NO: 29955 - DNA, 1379 bp, Homo sapiens
gggcattctctctcctggaacttatgatgccaccaggtaacagaaagtctggaggcctgaagaccagttacaacaagttggtaatggtggcaaagaatagaggaggacagaatttgcagattgttaagtgtacatgcttctggcttgaatacctgggcaaagagaagggagcatttaggggacagagtctgagagacaatgcaagatgttcaagagttagaaggagggagaaaaagagagaggcaggaatcctaggcaaccaagacacaagaatggggacaaacctcacaggcaacctcacgcatagagggccctttaggaaataatccccgttaaatcttcaaacagccttgagaagtaaaaagggacatcctcttggtagcacctcacactcagcagtattagcgcagatggaaggtggtactcagacactgaactaacaatgctgtctccgaagtaagaaattccaaattcataataatgtttctggttttttgtttttggtctttttttccagagagtgaggtaagttttccagtgtctgacagctaggaagtaccaggacrctgtatctcaaagactccaagttgagacctttcctgtgtgccacaatgccggaacaaactccctccccgagtacgagattccagaagcagaaccgtggacaatttttaaactcagaaagcctcctgtggagttgggactcacagctcacagccacgaaatcactgtccattaactgtttggtttcctgagagcagagattagggatcctcagtcttgcctgtatatcaataccacctgggaccactcagaccaggtgaatcaatgtccctgcaggttgggcccaggtaatggtttattacgtgttctatgtaagtttagggtataaccaagtggttagaattactaactaaatcaaacctctttactgaccaattacattagaatgtaaattctctccaatatgtatccgtgtttctccaaaaacagccccagctctcaagtccaggattagtatgggaaaaaccaactcacaaaaacccacatgttgtgtccagctctccaccactttgacacaagcaccatccccaatcgatcagtgtgaggtgtgcttatttattctcacttctctggcagataaggattatagggatataaaaagcagagtgtgctataaaacattatttattagtgggccaatggatcttcatgtgaatcaggttttacaggttccattttccattgaaacaatggaatgttacatggctaataataaggcacaggccttgattaaatacccaatccataattcaataaagaggttgtgctgacataatcagcaaagagggacccttatgaatatccaactaaggcca

SEQ ID NO: 29956 - DNA, 637 bp, Homo sapiens
tttttctttttttggcttttgtttttaacatgaagctttgaattaaaatatagatgtaaattttatcaaaatgtttgtatagtttttttatttgttaatttgataaattatgttagtcatttttctgaagttaaactctccttgctttctgaggtgttacttggatagacagataacaggtagagagatagctagacaggtgataggtagatacatagctagataggtgataggtagatagatagctagatatgtgatagagaggtagatagatagatgatagatagataaatagaatcatgaatatattaccatgttcaatctgcaggcctctgtctcagagagaggggagttgtaagggaaagggcacagttttaaaagacaggtgcatttctaagggggctggtgctctctaaactcaatggatgtctagcgctggctttctctgcttggcatttcagggatttctctgagtcctgcccaccccatggggaacttcagctgcaatgcctctggcatggtgatgtcatgactccagctagccatctggccttctctgccagaycctctctgtttgctcccattcctcagagggcagattccttatcctcttccctcttgccctttgataagctca

SEQ ID NO: 29957 - DNA, 1159 bp, Homo sapiens
agaggacagtatgatggcttgggcctatattagtgagggctgggccctgggagaagtaagaaaaggcactcattctaccctgtcataaaattgtcttggaccagttatatgcatgctacttttaaaataactttggtatttgcattaaataaatatgaattaaagaacatgcttttaccaaaagacacagaaagacatttattcatacagatggctggccaaawccacagtcatggctgctaggaaaatacaagcaatttcactaaaatgaatgccttctctctccccttctgcagggctgctgtggccaaaataattattgataacagaatttttgaatcaagagaactactctatccaatgagctaaggcgagaaaacctggcagcaagtacaatgtcctactgtgattatttcaggcaaaccagcaacatggggacagataaaagtaagaagcaggttaccttcgctctctggttttggaaccacacctggacgacacggacactcagccctgtctctgcagccagagtctctctcaccttggaaaaattgaacgagaaatgtagacacactggcatctcagggtaggaggtagaacatctcctatataatacttgaggaggccaaaagactgtatctgctttaggagctgaatagtttttaatgttgagcatacacacaaacacgagaacattgcttcccttcaggtagaaagaaagtccttcaccaggtaaagaaacaaaataataattattaatttacatgtgcattcccaagaggtgtttctggatttctcttgctctggaaattaggccttcaagtggtttagactttagtctattgttgtgctttagctataagccatgcatatgcattgacctacttaaggagatctgagagtgaaaatcactttggaaaaacaaatggctctctcttggtctcctctcttgcctaaattcattgaccttaatttttggttttgtccctcatatctctaggtaactttgggtgtttcatgaatatccatagtgactgctaccccaagtgagccctgcccaaagagaataaaatgagagccatctggaacccggcagagccaggtaggcaactctgaggccagcacatgtgccagggctgtggtggagacaggacaactg

SEQ ID NO: 29958 - DNA, 1159 bp, Homo sapiens
agaggacagtatgatggcttgggcctatattagtgagggctgggccctgggagaagtaagaaaaggcactcattctaccctgtcataaaattgtcttggaccagttatatgcatgctacttttaaaataactttggtatttgcattaaataaatatgaattaaagaacatgcttttaccaaaagacacagaaagacatttattcatacagatggctggccaaaaccacagtcatggctgctaggaaaatacaagcaatttcactaaaatgaatgccttctctctccccttctgcagggctgctgtggccaaaataattattgataacagaatttttgaatcaagagaactactctatccaatgagctaaggcgagaaaacctggcagcaagtacaatgtcctactgtgattatttcaggcaaaccagcaacatggggacagataaaagtaagaagcaggttaccttcgctctctggttttggaaccacacctggacgacacggacactcagccctgtctctgcagccagagtctctctcaccttggaaaaattgaacgagaaatgtagacacactggcatctcagggtaggaggtagaacatctcctatataatacwtgaggaggccaaaagactgtatctgctttaggagctgaatagtttttaatgttgagcatacacacaaacacgagaacattgcttcccttcaggtagaaagaaagtccttcaccaggtaaagaaacaaaataataattattaatttacatgtgcattcccaagaggtgtttctggatttctcttgctctggaaattaggccttcaagtggtttagactttagtctattgttgtgctttagctataagccatgcatatgcattgacctacttaaggagatctgagagtgaaaatcactttggaaaaacaaatggctctctcttggtctcctctcttgcctaaattcattgaccttaatttttggttttgtccctcatatctctaggtaactttgggtgtttcatgaatatccatagtgactgctaccccaagtgagccctgcccaaagagaataaaatgagagccatctggaacccggcagagccaggtaggcaactctgaggccagcacatgtgccagggctgtggtggagacaggacaactg

SEQ ID NO: 29959 - DNA, 535 bp, Homo sapiens
tgttggattttcttgaaatgacattttatgaatgtaaatgaggctttcacaagcgtctgtaaatttttttttgtttcacttagcacactctatgtaattacacatttacttgccctgtttcattgtcacctctaacacattatttgacccatagtatctgattgatttatatgaaactrctgtttttgtaggtcgaaatgtggtcaaatgttttaaatgaatgactggtcattatgagtttttcattttaagaatataagtttttcaaaaatgctccttgaaaaattttaaagcagcttgctttaagcagaatttaaaagatagatacatattagaaggtatagatacagagatcgacgtataacacaataatataaatttttcagattatcttaaaactatgcacagggctttttactaaaactgagaatggacatttaaaatatactttaattcacaaaaatcaaagatttcttagtgtcagaagtgaccttggatatcatacctagtctactttttcagaacaggatacgtc

SEQ ID NO: 29960 - DNA, 535 bp, Homo sapiens
tgttggattttcttgaaatgacattttatgaatgtaaatgaggctttcacaagcgtctgtaaatttttttttgtttcacttagcacactctatgtaattacacatttacttgccctgtttcattgtcacctctaacacattatttgacccatagtatctgattgatttatatgaaactgctgtttttgtaggtcgaaatgtggtcaaatgttttaaatgaatgactggtcattatgagtttttcattttaagaatataagtttttcaaaaatgctccktgaaaaattttaaagcagcttgctttaagcagaatttaaaagatagatacatattagaaggtatagatacagagatcgacgtataacacaataatataaatttttcagattatcttaaaactatgcacagggctttttactaaaactgagaatggacatttaaaatatactttaattcacaaaaatcaaagatttcttagtgtcagaagtgaccttggatatcatacctagtctactttttcagaacaggatacgtc

SEQ ID NO: 29961 - DNA, 535 bp, Homo sapiens
tgttggattttcttgaaatgacattttatgaatgtaaatgaggctttcacaagcgtctgtaaatttttttttgtttcacttagcacactctatgtaattacacatttacttgccctgtttcattgtcacctctaacacattatttgacccatagtatctgattgatttatatgaaactgctgtttttgtaggtcgaaatgtggtcaaatgttttaaatgaatgactggtcattatgagtttttcattttaagaatataagtttttcaaaaatgctccttgaaaaattttaaagcagcttgctttaagcagaatttaaaagatagatacatattagaaggtatagatacagagatcgamgtataacacaataatataaatttttcagattatcttaaaactatgcacagggctttttactaaaactgagaatggacatttaaaatatactttaattcacaaaaatcaaagatttcttagtgtcagaagtgaccttggatatcatacctagtctactttttcagaacaggatacgtc

SEQ ID NO: 29962 - DNA, 581 bp, Homo sapiens
gagaccagcctaagcaacatagcgagaccacatctctaaaaaaaaaatttttttttaacccagaagaaaattagccaggtgtgatggctcacaccccgtggtccccgctgcttgggaggctgaggtgggcagatcgcttgaggctgcaatgagccgagatctcaccacatcaatccagcctgggggacaaaaaaaaaagaggaatcaaagcaatgacccaagttatggcctcagggacttccaaaatcagagccctaatctgaccaacccgccctgacgcctgtaagaaaacgamtctcacttttcattggctgaccctcccggagttgagaccttgcttcattttccttggttgttgctgctgtcacgtcttcccgccacgcccactttcctgccggcgcccagtgagcgttgagggagagtgatttgcagccggtcaggggcgggagttcgcggcagcaaacctgcttccccctcccacgcgccaccgcccccgccccgcccccgtccagaggccccgcccctagccgggcctggccccgcctctctctcccgagagggcgggcaccaggcggcggccg

SEQ ID NO: 29963 - DNA, 581 bp, Homo sapiens
gagaccagcctaagcaacatagcgagaccacatctctaaaaaaaaaatttttttttaacccagaagaaaattagccaggtgtgatggctcacaccccgtggtccccgctgcttgggaggctgaggtgggcagatcgcttgaggctgcaatgagccgagatctcaccacatcaatccagcctgggggacaaaaaaaaaagaggaatcaaagcaatgacccaagttatggcctcagggacttccaaaatcagagccctaatctgaccaacccgccctgacgcctgtaagaaaacgactctcacttttcattggctgaccctcccggagttgagaccttgcttcattttccttggttgttgctrctgtcacgtcttcccgccacgcccactttcctgccggcgcccagtgagcgttgagggagagtgatttgcagccggtcaggggcgggagttcgcggcagcaaacctgcttccccctcccacgcgccaccgcccccgccccgcccccgtccagaggccccgcccctagccgggcctggccccgcctctctctcccgagagggcgggcaccaggcggcggccg

SEQ ID NO: 29964 - DNA, 531 bp, Homo sapiens
tggccaggtgcgatggctcacgcctgtaatcccagcactttgggaggccgaggcggaaaatcacctgaggtcgggagtttgagaccagcctgaccaacatggagaaaccctgtctctactgaaaatacaaaattagctggttgtggtggcacgtgactataatcccagctactagggaggctgaggcaggagaatcacttgaacctgggaggtggaggttgtggtgtgccgagatcrtgccattgcactccagcctgggcaacgagtgaaactccgtctcaacaacaacaacaaaaaaatcatagctccattcctatatgggtctcttagggtcacactgaattacacaatttagcagcacccgagtgacctggctgggatcttaaatgtgggtagcttagtagaaccacattagagagagaaagaagtgctgaaaagaccacatgtctttgcagatgagtgactatataagacaccttcaagtcctgtgaagttatgtcgggctcctctgaataaaaaggagctctttcc

SEQ ID NO: 29965 - DNA, 531 bp, Homo sapiens
tggccaggtgcgatggctcacgcctgtaatcccagcactttgggaggccgaggcggaaaatcacctgaggtcgggagtttgagaccagcctgaccaacatggagaaaccctgtctctactgaaaatacaaaattagctggttgtggtggcacgtgactataatcccagctactagggaggctgaggcaggagaatcacttgaacctgggaggtggaggttgtggtgtgccgagatcgtgccattgcactccagcctgggcaacgagtgaaactccgtytcaacaacaacaacaaaaaaatcatagctccattcctatatgggtctcttagggtcacactgaattacacaatttagcagcacccgagtgacctggctgggatcttaaatgtgggtagcttagtagaaccacattagagagagaaagaagtgctgaaaagaccacatgtctttgcagatgagtgactatataagacaccttcaagtcctgtgaagttatgtcgggctcctctgaataaaaaggagctctttcc

SEQ ID NO: 29966 - DNA, 976 bp, Homo sapiens
ctagcccaacatgactggcgtccttttaaaaaaagaggaagaagagacacagacagacatagagaaagatgtgagcatagaggcagagactggagttattcagctgcaagccaaagactgccaagcatggccagcaacaccagcagccagaagaaaggcatggcacagactctaccttaagagagtacggccctgcccacactttgagctctagttcagatccagcccccagaaccatgaaagaatacatttctgttgttcagggcaccagctatgcttccttatggcaaccctaggaaacgaatgcacaaagtatagctgtggctgagttacttaactttctatgcctcagtatttgcatttggcgagaataaatagtatctgcctttgaggcttgttcagaggttagataatccatggaaacattcagcataaggcctggcacagggtcagtactccataaaagttgccgtcattcctacttacatgttcatttttgtaggaaaagggaccatggattttatttgattctcaaatagatcacgtcccaaaaagagagttaagaagcacagtcctgggtctttctatctacaggagactgcggcaagagatgggcaaaaggccacccctgccaaccagagccttgtggarctccaccctcctccagggctctcaatcctgtgattgtgtgcaaggtcctgctctgccacagaggaaagatgctggaattctctgagcacctcctctgcactggagttgcaggaggtactcatgattcacaaatatggcctcattgcatacttataaccattccaagaggcaagaaaaatcatctccattgtatagatgaagaaatcaagtgatcagtccctcttgctccctcctgctagagatatccgtcacccaccttgcctgggacatatctcagaggaccatgaaacttcacagatttgaccaagtgggtggatagacgtgg

SEQ ID NO: 29967 - DNA, 552 bp, Homo sapiens
aaaagcaccagcgacacgaattcagtaaacctgaatttccatatgccccaactcccaagccaattttacccagtgttatttcctcaaagcactgtagtatttgaaattatcttgtatatccatttgtttacttattgtctctctctcccacccactttagaatggaaggtacataagatcaaggacttttgtcctcattggcatatctccagagccatgggtacatttagacacaaattaatattttctaaatgaataattcagaatgattcttaaaatcaaaatattttggcttatattttgtaactcatctttcccagattttttgcaactcaatcccactttgctgattttccagaaacaccatgtttccttgccattccagtcacattcctccctccaggcctttccatttactgttccctctgcctagaatgttcttttcattagacagycctcatggcttcttccctcacttcattcagatctcttttattgaagagacattattgctttcctttgtccttagtaattatcaccatatgacatacg

SEQ ID NO: 29968 - DNA, 966 bp, Homo sapiens
tcaccatgttggccaggctggtctcaaactcctgacctcaagtgatccccccacctcggcctcccaaagtgccaggattacaggtgtgagccacagtgcccagcctgtgctgataacattctatggctttctctgtgcaccattaggtgagagaggttgggaggcactgcttcaggactacttaggggcatcatcaaaactgttgatctggtggatgtgaaaatgtatctcgttgtggttgcccttaatactgatggggttgaacatcttttcaagtttatagaacattcttattttttccctctggaatattcatgtcttttacttaattttctctctctttttccttttccttattgataagtcattgtggatactatttattgctgtatcgatcagggttctattgcagaaaccactcttaccattttaagcattaagggattctrtatagggttttagtgtttataaaataattggaagagctggagaaatgggctattaattggaccttcagaaatgacataaaaaacaaccctgcagaatcagcccaccccagggtactgtgaactctgccgcaatctgaggctggagaatcctctgtcctaaccgctggctctgagtgacatcactttggccaaggattgggaagctgctattgagagcgttgattccaggaatgcactgccttggctggcgtctgagggatagaaagtcaatgtcaggactgttggctccaaaactggttgtgcctgagcattgcacggcaggacagatgcctcctgcacagctgcccatctcacgggagtgcctctggctggcgggatctaagtcccttgctgtaagcaagtctgggaaacagagtgtttctctttgtagaatctgaagaacaggaaagcacactggaaagagattgggagagatcgtgagttaaccaatttaccacgcctgccgaatcccaccctt

SEQ ID NO: 29969 - DNA, 926 bp, Homo sapiens
tagactcatcgcccagagaaagactatgaacattttagcacgtctccctcccaggtttcctagaatagatgtctgtacatagttaataaaaacatatattcaagttttgcagctttttgttccactttacattttaagttgaacgtttacacttcccattccaagatcttcagaaacatgtttagaaacagaagagtatcccaacaacagtctgtttaacctcttcccctaatgctgaactattgttgctttaagaatacattttctgtgtgtgtttcagatgtagtttccttaggaaagattctctatgctgtgcaacaattccccatgtgtctcttacatttctgcacatcttgtgtcagcttttgttctagaccgtctttataaggatgtttgtatagctaatagcattagaagatagggctagtatagtagaagacagatttatttgctgattaggattataataataatatctcyggaccaggcgcagtggctcatgcctgtaatcccaccaatttgtgaggctgaggcaggcagatgacctgaggttgggagttcgagaccagcctggccaatatggtgaaactgccatctctactacaaacacttaaaaaattagctgggtgtggtggtgggcgcctgtaatcccagctacttgggagacaggtgggagaattgcttgaacccaagaggcaggggttgcaatgagctaagatcattccactgcactccaacattggtgtgacagagcaagactctacctcaaaaaaacaaaaaacaaaaaaagaagaagaaaaagaaaaagaaaggattataatgacaatgtctccctccatccagggtaaaggttgaaaagaccaagattcctaaacttggggttcctcaggtgtgatgcaaatccactgcaggcacagattctacct

SEQ ID NO: 29970 - DNA, 926 bp, Homo sapiens
tagactcatcgcccagagaaagactatgaacattttagcacgtctccctcccaggtttcctagaatagatgtctgtacatagttaataaaaacatatattcaagttttgcagctttttgttccactttacattttaagttgaacgtttacacttcccattccaagatcttcagaaacatgtttagaaacagaagagtatcccaacaacagtctgtttaacctcttcccctaatgctgaactattgttgctttaagaatacattttctgtgtgtgtttcagatgtagtttccttaggaaagattctctatgctgtgcaacaattccccatgtgtctcttacatttctgcacatcttgtgtcagcttttgttctagaccgtctttataaggatgtttgtatagctaatagcattagaagatagggctagtatagtagaagacagatttatttgctgattaggattataataataatatctccggaccaggcgcagtggctcatgcctgtaatcccaccaatttgtgaggctgaggcaggcagatgacctgaggttgggagttcgagaccagcctggccaatatggtgaaactgcyatctctactacaaacacttaaaaaattagctgggtgtggtggtgggcgcctgtaatcccagctacttgggagacaggtgggagaattgcttgaacccaagaggcaggggttgcaatgagctaagatcattccactgcactccaacattggtgtgacagagcaagactctacctcaaaaaaacaaaaaacaaaaaaagaagaagaaaaagaaaaagaaaggattataatgacaatgtctccctccatccagggtaaaggttgaaaagaccaagattcctaaacttggggttcctcaggtgtgatgcaaatccactgcaggcacagattctacct

SEQ ID NO: 29971 - DNA, 926 bp, Homo sapiens
tagactcatcgcccagagaaagactatgaacattttagcacgtctccctcccaggtttcctagaatagatgtctgtacatagttaataaaaacatatattcaagttttgcagctttttgttccactttacattttaagttgaacgtttacacttcccattccaagatcttcagaaacatgtttagaaacagaagagtatcccaacaacagtctgtttaacctcttcccctaatgctgaactattgttgctttaagaatacattttctgtgtgtgtttcagatgtagtttccttaggaaagattctctatgctgtgcaacaattccccatgtgtctcttacatttctgcacatcttgtgtcagcttttgttctagaccgtctttataaggatgtttgtatagctaatagcattagaagatagggctagtatagtagaagacagatttatttgctgattaggattataataataatatctccggaccaggcgcagtggctcatgcctgtaatcccaccaatttgtgaggctgaggcaggcagatgacctgaggttgggagttcgagaccagcctggccaatatggtgaaactgccrtctctactacaaacacttaaaaaattagctgggtgtggtggtgggcgcctgtaatcccagctacttgggagacaggtgggagaattgcttgaacccaagaggcaggggttgcaatgagctaagatcattccactgcactccaacattggtgtgacagagcaagactctacctcaaaaaaacaaaaaacaaaaaaagaagaagaaaaagaaaaagaaaggattataatgacaatgtctccctccatccagggtaaaggttgaaaagaccaagattcctaaacttggggttcctcaggtgtgatgcaaatccactgcaggcacagattctacct

SEQ ID NO: 29972 - DNA, 926 bp, Homo sapiens
tagactcatcgcccagagaaagactatgaacattttagcacgtctccctcccaggtttcctagaatagatgtctgtacatagttaataaaaacatatattcaagttttgcagctttttgttccactttacattttaagttgaacgtttacacttcccattccaagatcttcagaaacatgtttagaaacagaagagtatcccaacaacagtctgtttaacctcttcccctaatgctgaactattgttgctttaagaatacattttctgtgtgtgtttcagatgtagtttccttaggaaagattctctatgctgtgcaacaattccccatgtgtctcttacatttctgcacatcttgtgtcagcttttgttctagaccgtctttataaggatgtttgtatagctaatagcattagaagatagggctagtatagtagaagacagatttatttgctgattaggattataataataatatctccggaccaggcgcagtggctcatgcctgtaatcccaccaatttgtgaggctgaggcaggcagatgacctgaggttgggagttcgagaccagcctggccaatatggtgaaactgccatctctactacaaacacttaaaaaattagctgggtgtggtggtgggcgcctgtaatcccagctacttgggagacaggtgggagaattgcttgaacccaagaggcaggggttgcaatgagctaagatcattccactgcactccaacatkggtgtgacagagcaagactctacctcaaaaaaacaaaaaacaaaaaaagaagaagaaaaagaaaaagaaaggattataatgacaatgtctccctccatccagggtaaaggttgaaaagaccaagattcctaaacttggggttcctcaggtgtgatgcaaatccactgcaggcacagattctacct

SEQ ID NO: 29973 - DNA, 575 bp, Homo sapiens
tttattttaaaattctaggtcagacatttgattcagcaggagatctatagcataaattatgaactatttgataagaaactgaaagaattgaaccaacgcattgggaagacagagtgcagaaataagcatgaaggaatagctgataaacttttggtaagttttgatttcatttgagtcttttttaggggagtagggggtgttgttgctctgttgctcaggctgcagtacggtggctcactgcagcctctgccttctgagctcaagcaatcctmccacctcagtctccagagtagctgagactacaggtgcacaccaccataccctgctaatttttgggttttttttttttttttagagatgaggtttcaccatgttgcccatgcttccctcaaactcctgagctcaagtgattctctagcctcagcctcccaaagtgctgggactacaggcgtgcgtcaccacacctggcccatgtgagtccttttaaaaagaagaatttggtgatatttttcatattagcaaaggaaaacaataagggaagacatacctgattcctggccattagcctaatgtga

SEQ ID NO: 29974 - DNA, 1773 bp, Homo sapiens
cacctttgatttgaggctttagtttgctgatttcctaaatgctaccctttgatcatttcctggccaccatcacaatactaaggggctcagatgtgtcttgtgcccacctcttcctgagaagagatggaagtggagctgtgactagtacaagcagcccaagaaactctgaacggggcccaatggaggcaaacttgagcaaataattgggatgataagaaacaaaaataatcccaactgtttgaaagttcgaaagaggggcattcttttctggtacatggtgagagttcaggctccagagactcaaaacggaatggttttccttggcattttgtaaatgctctcacatctgtagcaataaagctgttattttctgcagtgttctatgtctttatttttaagaaaattactgattcatgagaggaactgcccagtgagttccatttcctactcagagccaggaactcaccctgggattgccatggactagacattcactcactgtgaagcccaaagacgcggcctataaacaagattttggtacccattaccaagtgaacctgcatctgcaaccagtgggccatctggaacgatgatcgatgctcaagtctctagcaaatgagcctttatgatcacaggaagagagagagaggctgacagcaaacctcttaagaggtggtacctcagaaagcattactgtagctggcgcggtggctcacgcctgtaatcccagcactttggaaggccgaggcaggtggatcacgaggtcaggagattgagaccatcctggctaacatggtgaaaccccatctctactaaaattaattacaaaaaaattagctgggcgtggtggcaggcacctgtagtcccagctactcgggaggctgaggcaggagaatggtgtgaacccaggaggcggagcttgcagtgagccaagatcacaccactgcactccagcctgggcgacagagcaagactccatctcaaaaaaaagcattactgttttgccttttggtgaggcggggcaagatcaacagttttgtttgttcatttgttcttgagataggatctctgttacccaggccggagtgcagtggcagcatcagtgcccctgcagcctcgacttcttgggctcaagtgatcctcccaccttagcctctcaagtaggtgggactacaggtgtgcaccaccatgcatggctaatttttttgaattttagtattgatgaggtctcactatgttgcccagcctggtctcgagctcaagggatccttccgcctsggcctcctaaagtgcttggattataggcagatcctcgactgttaacacagcagtgacaccagaaaggagctagccagcctaaggacaaaagtcatgctcgtaacacagtcacacagtacacagaacccacaacctgaccccaccccacaaaatgcttcctatacctccagtgggaaacctttataccttcattaggtaacagaatcaaactgagtgatgactgaaaattgaatacattgagaaaaggctacggagtggcccaaggaatcactaggaatcctacagactcaaggaaaaaatactttgcaacaacccaatgaggtttggaacctgctacagtttatgcaattcacattctacataatgatatgttagacattttatgcccatttgaaagatggagagacgagcccagagagcttaggagacttgtgcaaggtcacagaggcccagggaataattacagccaggattcaaaaccagctacatggttct

SEQ ID NO: 29975 - DNA, 669 bp, Homo sapiens
gggatcctgggaaaatsacagcccactcctgggacattattaacaacagaaacatctttttttcttcttctttgcaaaactttttagtgccaaactgttcttttcagaagacaggccaagagagctggcctccatcctccttgccactctggggacacctggggactttcttctgtgacttgccaagaacatcccatgagccacgctgggttccagacgtttgggtagtaatgactctggtggtggagcacaacccccaccccctgcttcctgttatcctttctaaccgtatttcagggaaattcaaatctgggagagctctgaagctccattcctgtggtgccaaacctcctgatgaaaacagaaccagagtcaagcagccagatgtttctataatgggaaaaaccagggcacagccacttacctttgttctactcacagacatttgcattcatttcatgtgatggctttaggagacacgaaacagcctaaaacagcatggtttggggctgtttctccagaagtttggaaattctgtggttgttgcctttggtgcttagtcaaacctttgtcataagtcaaacggacactatttgtactgttcattcttattgcatttgcaggatgttttatgacagcagtttgtaggtgtttctgtgacagaaatca

SEQ ID NO: 29976 - DNA, 669 bp, Homo sapiens
gggatcctgggaaaatcacagcccactcctgggacattattaacaacagaaacatctttttttcttcttctttgcaaaactttttagtgccaaactgttcttttcagaagacaggccaagagagctggcctccatcctccttgccactctggggacacctggggactttcttctgtgacttgccaagaacatcccatgagccacgctgggttccagacgtttgggtagtaatgactctggtggtggagcacaacccccaccccctgcttcctgttatcctttctraccgtatttcagggaaattcaaatctgggagagctctgaagctccattcctgtggtgccaaacctcctgatgaaaacagaaccagagtcaagcagccagatgtttctataatgggaaaaaccagggcacagccacttacctttgttctactcacagacatttgcattcatttcatgtgatggctttaggagacacgaaacagcctaaaacagcatggtttggggctgtttctccagaagtttggaaattctgtggttgttgcctttggtgcttagtcaaacctttgtcataagtcaaacggacactatttgtactgttcattcttattgcatttgcaggatgttttatgacagcagtttgtaggtgtttctgtgacagaaatca

SEQ ID NO: 29977 - DNA, 519 bp, Homo sapiens
cctcagagaagggagggacacgcttcttcggggcaaagatgacttccagtttacagacttctttgggcttcagtgtgatgttgtggaagggcgccagggtaaggacctgaatgaaatagcacccagagtcagcagctgagggtgggaggcccctaaggcctcggttcccggagttcttgctgctgcgattggaacaggggtcagatctcactcctgctctcccatcagctgtgtatgctttggtaaattacttcaactttctgtgacttactctatgttgaagattaagatcatctctataaaatttgtagcacataatagatatttaataagtatcatttccctttcctgaccctttcctaacttattttgtgtacttccttctttcttcctcctccctgatacaggaaatagtaatgggaaataacaaacagttagagctctggcayttctcaaggagtcttccctgcctcagtttccctgtgtggtttttaaaatgcagattccggttgggtgccg

SEQ ID NO: 29978 - DNA, 684 bp, Homo sapiens
ttctttcatcgtatcttgtctattttttaaatttactcagtgttttctttctattcgatctttttatcataattgctatgttttccttgccctttttctaaagatttttaagcatttgaatttacattgctgcagttattgtaaattgataacaactctatagagaataatttggccttatctatcaaaattatactttgacctagaaatttcatttctaagaatttattctacatacacgttcccacatttgcaaaatgatgtgtttataagattatttcctrtataatctgtaatggcaatagcaaaagaccagaaacaaactaaatgtctatcagtaggaaactagtttttaaaaatatgttaaaactatgtaatggaataatatgtagcaactaaaaaggatggagcagctctagatgtactaatattgaattaatcgtaaaatatattgttaggtaaaatgaaaagaaaaggaagacgaaaaacactctgtatgctaccatctgcatttaaatattatatatatatattgctggattcactcagctaacattttacttacaatttttgcacctttgttaagtgatcgttggttcataaatttccttcttcatgctgcatttgatcagtttggatatcagaataaataaatgggcatttctctctcttctatttcctgaa

SEQ ID NO: 29979 - DNA, 2703 bp, Homo sapiens
ccatgcaggtgagctgggccacggcatgccataaccaactagctaagtgatattacaaagtaactgaagaataaatcaatcaatcaagagtgaagaaactggtcagtggagagagaatggagtagatgggaagagagaaacaggcagtcccaggaggaaagtccaacctcaaaagctgctcctggttctctctgtctcttttttgagctaacctgagtgagtctctttgcaatcaatcaaccaggactgaatgaaagaataacggcatttggccaaaaaagaaccacacaggttaacatgcatggtctataccactgccaggacaatgtgggcaggtgctctggaggtgtgtcacctcaatgatatgactgtcacttaaagaccagcatgactttggatgatggattttggaacttgcctcttggaaccgagctcacatttgaaacatttctgggctgaagygggggccatgatccaggtaggattgtctctatggtggacccagctcctggaccttgtcacatttaactagatggcctgggtactgacattatgcagaggtcaaaaccaggtggagagtctacaaatatgttttgtttggtttgggaattgttaaaaaaaaaaaaaaatgaactagctaccagcatgtaaaatagggcttcacatagaactttggaattttggtcaggcgcagtggctcacacctgtaatcccagcactttgggaggccgagacgggcagatcacgaggtcaggagattgagaccatcctggctaacacggtgaaacactgtctctactaaaaatacaaaaaattagctgggcgtggtggcgggcgcttgtagtccgagctactcggaaggctgagtcaggagaatagcgtgaacccaggaggcggagcatgtagtgagccgagatcgcgccactgcactccagcctgggggacagagcaagactctgtctcaaaaacaaaaacaaaaaaaagaaatttggaattttgtcttttccacagtttgggtgagttggcccccttggcccccgttgtctgcaaagcggtcatctaccagagaagccctgtggccagtggccctggtaccctgtattacccacaaatgtctccttggcccactctattcacttgtgtgaccctcctgagggcacaggaattcttaatttttgtttcacggatttatttctgtcttcaagattctctgcaactggctggacatggggctcacagatccgttttggccagcaagtctgtatttctttaattctgctccatatcatttgtgtaaacatttaggatgaagccatgggacatggctccactctactttgccctttgcctaaccaagtaaaaacacatcgtgtcctttcaccatttttggtccttttgacaaagataactttttatgctactctatgagtcctagggtccccaggcattggtgtccagttaccttttgctgcttaaatgttctcagttttaaaaaattgcaaatattagagctctctgcttctccatggctagccaagagagctcaggtctgtcttgtcatcagcattgcccaatgcatatggcagccattcactaaatacttgttgattgatgcactacaccctcaggcagttcttcctaattccacttactgtctatggcacactttccacacagcaatggctagagtgatctaagccttgggttgagtggttctcatctgcacatacctcggctttcttttcagggtggatgaagcccttttctgtaaggcatgtgaatgctgcagggttctggagactttcaatttcttcagagatccagcagaaggagtaggtgctattggttgggtttaggatggtaaaggtcctggccagggtggagagaattgacagaagagagtgggacaggggattgaggattaagagaaatttcttagaacctggccccaacccagtcccccatctgggaagcagaactgttcagagcactttgttactgtggaaataaaaactccatctcctctagcgatccacagtcagggtagggttctggactttggaataacaatgctgccaagggcacaactgtgccaatgatcctctgtggttaaggaggtggtcagggattatacttttgtgtcttccatattttcctcagtggcaaaactaaggagacagaattcagctttcttaacgtaacagttctctaaagtcaaacctctaaaactcaggtcaaaccccaggatatcgagcctgcttataggaataggtctagctcatctatctgaattcttttagagttctttaggaccgatgtgaattcaatcaatgtaaacctaagcaactcaccggagattcttccctcctatgcccacagtggtgaactcaatcacccgggtgtttggatccagagctcccccactggaccctcggagctctgggttgcgctgatggccacttatgtagtccgagtctttcagatcaaaatggcagatgggcaaggtgctccgcccttttgctaccaggaccggaccttgctctccaggtggcaggttgggaatcctgagaggataaggttatttttatttgttttattttgtcatcagttgttgctttcttagttggttggaaatgaatcttatatccaccagaatgtgagctctatgggagcagaggctgggtctgtcttggtcaatagcat

SEQ ID NO: 29980 - DNA, 2703 bp, Homo sapiens
ccatgcaggtgagctgggccacggcatgccataaccaactagctaagtgatattacaaagtaactgaagaataaatcaatcaatcaagagtgaagaaactggtcagtggagagagaatggagtagatgggaagagagaaacaggcagtcccaggaggaaagtccaacctcaaaagctgctcctggttctctctgtctcttttttgagctaacctgagtgagtctctttgcaatcaatcaaccaggactgaatgaaagaataacggcatttggccaaaaaagaaccacacaggttaacatgcatggtctataccactgccaggacaatgtgggcaggtgctctggaggtgtgtcacctcaatgatatgactgtcacttaaagaccagcatgactttggatgatggattttggaacttgcctcttggaaccgagctcacatttgaaacatttctgggctgaagtgggggccatgatccaggtaggattgtctctatggtggacccagctcctggaccttgtcacatttaactagatggcctgggtactgacattatgcagaggtcaaaaccaggtggagagtctacaaatatgttttgtttggtttgggaattgttaaaaaaaaaaaaaawtgaactagctaccagcatgtaaaatagggcttcacatagaactttggaattttggtcaggcgcagtggctcacacctgtaatcccagcactttgggaggccgagacgggcagatcacgaggtcaggagattgagaccatcctggctaacacggtgaaacactgtctctactaaaaatacaaaaaattagctgggcgtggtggcgggcgcttgtagtccgagctactcggaaggctgagtcaggagaatagcgtgaacccaggaggcggagcatgtagtgagccgagatcgcgccactgcactccagcctgggggacagagcaagactctgtctcaaaaacaaaaacaaaaaaaagaaatttggaattttgtcttttccacagtttgggtgagttggcccccttggcccccgttgtctgcaaagcggtcatctaccagagaagccctgtggccagtggccctggtaccctgtattacccacaaatgtctccttggcccactctattcacttgtgtgaccctcctgagggcacaggaattcttaatttttgtttcacggatttatttctgtcttcaagattctctgcaactggctggacatggggctcacagatccgttttggccagcaagtctgtatttctttaattctgctccatatcatttgtgtaaacatttaggatgaagccatgggacatggctccactctactttgccctttgcctaaccaagtaaaaacacatcgtgtcctttcaccatttttggtccttttgacaaagataactttttatgctactctatgagtcctagggtccccaggcattggtgtccagttaccttttgctgcttaaatgttctcagttttaaaaaattgcaaatattagagctctctgcttctccatggctagccaagagagctcaggtctgtcttgtcatcagcattgcccaatgcatatggcagccattcactaaatacttgttgattgatgcactacaccctcaggcagttcttcctaattccacttactgtctatggcacactttccacacagcaatggctagagtgatctaagccttgggttgagtggttctcatctgcacatacctcggctttcttttcagggtggatgaagcccttttctgtaaggcatgtgaatgctgcagggttctggagactttcaatttcttcagagatccagcagaaggagtaggtgctattggttgggtttaggatggtaaaggtcctggccagggtggagagaattgacagaagagagtgggacaggggattgaggattaagagaaatttcttagaacctggccccaacccagtcccccatctgggaagcagaactgttcagagcactttgttactgtggaaataaaaactccatctcctctagcgatccacagtcagggtagggttctggactttggaataacaatgctgccaagggcacaactgtgccaatgatcctctgtggttaaggaggtggtcagggattatacttttgtgtcttccatattttcctcagtggcaaaactaaggagacagaattcagctttcttaacgtaacagttctctaaagtcaaacctctaaaactcaggtcaaaccccaggatatcgagcctgcttataggaataggtctagctcatctatctgaattcttttagagttctttaggaccgatgtgaattcaatcaatgtaaacctaagcaactcaccggagattcttccctcctatgcccacagtggtgaactcaatcacccgggtgtttggatccagagctcccccactggaccctcggagctctgggttgcgctgatggccacttatgtagtccgagtctttcagatcaaaatggcagatgggcaaggtgctccgcccttttgctaccaggaccggaccttgctctccaggtggcaggttgggaatcctgagaggataaggttatttttatttgttttattttgtcatcagttgttgctttcttagttggttggaaatgaatcttatatccaccagaatgtgagctctatgggagcagaggctgggtctgtcttggtcaatagcat

SEQ ID NO: 29981 - DNA, 2703 bp, Homo sapiens
ccatgcaggtgagctgggccacggcatgccataaccaactagctaagtgatattacaaagtaactgaagaataaatcaatcaatcaagagtgaagaaactggtcagtggagagagaatggagtagatgggaagagagaaacaggcagtcccaggaggaaagtccaacctcaaaagctgctcctggttctctctgtctcttttttgagctaacctgagtgagtctctttgcaatcaatcaaccaggactgaatgaaagaataacggcatttggccaaaaaagaaccacacaggttaacatgcatggtctataccactgccaggacaatgtgggcaggtgctctggaggtgtgtcacctcaatgatatgactgtcacttaaagaccagcatgactttggatgatggattttggaacttgcctcttggaaccgagctcacatttgaaacatttctgggctgaagtgggggccatgatccaggtaggattgtctctatggtggacccagctcctggaccttgtcacatttaactagatggcctgggtactgacattatgcagaggtcaaaaccaggtggagagtctacaaatatgttttgtttggtttgggaattgttaaaaaaaaaaaaaaatgaactagctaccagcatgtaaaatagggcttcacatagaactttggaattttggtcaggcgcagtggctcacacctgtaatcccagcactttgggaggccgagacgggcagatcacgaggtcaggagattgagaccatcctggctaacacggtgaaacactgtctctactaaaaatacaaaaaattagctgggcgtggtggcgggcgcttgtagtccgagctactcggaaggctgagtcaggagaatagcgtgaacccaggaggcggagcatgtagtgagccgagatcgcgccactgcactccagcctgggggacagagcaagactctgtctcaaaaacaaaaacaaaaaaaagaaatttggaattttgtcttttccacagtttgggtgagttggcccccttggcccccgttgtctgcaaagyggtcatctaccagagaagccctgtggccagtggccctggtaccctgtattacccacaaatgtctccttggcccactctattcacttgtgtgaccctcctgagggcacaggaattcttaatttttgtttcacggatttatttctgtcttcaagattctctgcaactggctggacatggggctcacagatccgttttggccagcaagtctgtatttctttaattctgctccatatcatttgtgtaaacatttaggatgaagccatgggacatggctccactctactttgccctttgcctaaccaagtaaaaacacatcgtgtcctttcaccatttttggtccttttgacaaagataactttttatgctactctatgagtcctagggtccccaggcattggtgtccagttaccttttgctgcttaaatgttctcagttttaaaaaattgcaaatattagagctctctgcttctccatggctagccaagagagctcaggtctgtcttgtcatcagcattgcccaatgcatatggcagccattcactaaatacttgttgattgatgcactacaccctcaggcagttcttcctaattccacttactgtctatggcacactttccacacagcaatggctagagtgatctaagccttgggttgagtggttctcatctgcacatacctcggctttcttttcagggtggatgaagcccttttctgtaaggcatgtgaatgctgcagggttctggagactttcaatttcttcagagatccagcagaaggagtaggtgctattggttgggtttaggatggtaaaggtcctggccagggtggagagaattgacagaagagagtgggacaggggattgaggattaagagaaatttcttagaacctggccccaacccagtcccccatctgggaagcagaactgttcagagcactttgttactgtggaaataaaaactccatctcctctagcgatccacagtcagggtagggttctggactttggaataacaatgctgccaagggcacaactgtgccaatgatcctctgtggttaaggaggtggtcagggattatacttttgtgtcttccatattttcctcagtggcaaaactaaggagacagaattcagctttcttaacgtaacagttctctaaagtcaaacctctaaaactcaggtcaaaccccaggatatcgagcctgcttataggaataggtctagctcatctatctgaattcttttagagttctttaggaccgatgtgaattcaatcaatgtaaacctaagcaactcaccggagattcttccctcctatgcccacagtggtgaactcaatcacccgggtgtttggatccagagctcccccactggaccctcggagctctgggttgcgctgatggccacttatgtagtccgagtctttcagatcaaaatggcagatgggcaaggtgctccgcccttttgctaccaggaccggaccttgctctccaggtggcaggttgggaatcctgagaggataaggttatttttatttgttttattttgtcatcagttgttgctttcttagttggttggaaatgaatcttatatccaccagaatgtgagctctatgggagcagaggctgggtctgtcttggtcaatagcat

SEQ ID NO: 29982 - DNA, 2703 bp, Homo sapiens
ccatgcaggtgagctgggccacggcatgccataaccaactagctaagtgatattacaaagtaactgaagaataaatcaatcaatcaagagtgaagaaactggtcagtggagagagaatggagtagatgggaagagagaaacaggcagtcccaggaggaaagtccaacctcaaaagctgctcctggttctctctgtctcttttttgagctaacctgagtgagtctctttgcaatcaatcaaccaggactgaatgaaagaataacggcatttggccaaaaaagaaccacacaggttaacatgcatggtctataccactgccaggacaatgtgggcaggtgctctggaggtgtgtcacctcaatgatatgactgtcacttaaagaccagcatgactttggatgatggattttggaacttgcctcttggaaccgagctcacatttgaaacatttctgggctgaagtgggggccatgatccaggtaggattgtctctatggtggacccagctcctggaccttgtcacatttaactagatggcctgggtactgacattatgcagaggtcaaaaccaggtggagagtctacaaatatgttttgtttggtttgggaattgttaaaaaaaaaaaaaaatgaactagctaccagcatgtaaaatagggcttcacatagaactttggaattttggtcaggcgcagtggctcacacctgtaatcccagcactttgggaggccgagacgggcagatcacgaggtcaggagattgagaccatcctggctaacacggtgaaacactgtctctactaaaaatacaaaaaattagctgggcgtggtggcgggcgcttgtagtccgagctactcggaaggctgagtcaggagaatagcgtgaacccaggaggcggagcatgtagtgagccgagatcgcgccactgcactccagcctgggggacagagcaagactctgtctcaaaaacaaaaacaaaaaaaagaaatttggaattttgtcttttccacagtttgggtgagttggcccccttggcccccgttgtctgcaaagcggtcatctaccagagaagccctgtggccagtggccctggtaccctgtattayccacaaatgtctccttggcccactctattcacttgtgtgaccctcctgagggcacaggaattcttaatttttgtttcacggatttatttctgtcttcaagattctctgcaactggctggacatggggctcacagatccgttttggccagcaagtctgtatttctttaattctgctccatatcatttgtgtaaacatttaggatgaagccatgggacatggctccactctactttgccctttgcctaaccaagtaaaaacacatcgtgtcctttcaccatttttggtccttttgacaaagataactttttatgctactctatgagtcctagggtccccaggcattggtgtccagttaccttttgctgcttaaatgttctcagttttaaaaaattgcaaatattagagctctctgcttctccatggctagccaagagagctcaggtctgtcttgtcatcagcattgcccaatgcatatggcagccattcactaaatacttgttgattgatgcactacaccctcaggcagttcttcctaattccacttactgtctatggcacactttccacacagcaatggctagagtgatctaagccttgggttgagtggttctcatctgcacatacctcggctttcttttcagggtggatgaagcccttttctgtaaggcatgtgaatgctgcagggttctggagactttcaatttcttcagagatccagcagaaggagtaggtgctattggttgggtttaggatggtaaaggtcctggccagggtggagagaattgacagaagagagtgggacaggggattgaggattaagagaaatttcttagaacctggccccaacccagtcccccatctgggaagcagaactgttcagagcactttgttactgtggaaataaaaactccatctcctctagcgatccacagtcagggtagggttctggactttggaataacaatgctgccaagggcacaactgtgccaatgatcctctgtggttaaggaggtggtcagggattatacttttgtgtcttccatattttcctcagtggcaaaactaaggagacagaattcagctttcttaacgtaacagttctctaaagtcaaacctctaaaactcaggtcaaaccccaggatatcgagcctgcttataggaataggtctagctcatctatctgaattcttttagagttctttaggaccgatgtgaattcaatcaatgtaaacctaagcaactcaccggagattcttccctcctatgcccacagtggtgaactcaatcacccgggtgtttggatccagagctcccccactggaccctcggagctctgggttgcgctgatggccacttatgtagtccgagtctttcagatcaaaatggcagatgggcaaggtgctccgcccttttgctaccaggaccggaccttgctctccaggtggcaggttgggaatcctgagaggataaggttatttttatttgttttattttgtcatcagttgttgctttcttagttggttggaaatgaatcttatatccaccagaatgtgagctctatgggagcagaggctgggtctgtcttggtcaatagcat

SEQ ID NO: 29983 - DNA, 2703 bp, Homo sapiens
ccatgcaggtgagctgggccacggcatgccataaccaactagctaagtgatattacaaagtaactgaagaataaatcaatcaatcaagagtgaagaaactggtcagtggagagagaatggagtagatgggaagagagaaacaggcagtcccaggaggaaagtccaacctcaaaagctgctcctggttctctctgtctcttttttgagctaacctgagtgagtctctttgcaatcaatcaaccaggactgaatgaaagaataacggcatttggccaaaaaagaaccacacaggttaacatgcatggtctataccactgccaggacaatgtgggcaggtgctctggaggtgtgtcacctcaatgatatgactgtcacttaaagaccagcatgactttggatgatggattttggaacttgcctcttggaaccgagctcacatttgaaacatttctgggctgaagtgggggccatgatccaggtaggattgtctctatggtggacccagctcctggaccttgtcacatttaactagatggcctgggtactgacattatgcagaggtcaaaaccaggtggagagtctacaaatatgttttgtttggtttgggaattgttaaaaaaaaaaaaaaatgaactagctaccagcatgtaaaatagggcttcacatagaactttggaattttggtcaggcgcagtggctcacacctgtaatcccagcactttgggaggccgagacgggcagatcacgaggtcaggagattgagaccatcctggctaacacggtgaaacactgtctctactaaaaatacaaaaaattagctgggcgtggtggcgggcgcttgtagtccgagctactcggaaggctgagtcaggagaatagcgtgaacccaggaggcggagcatgtagtgagccgagatcgcgccactgcactccagcctgggggacagagcaagactctgtctcaaaaacaaaaacaaaaaaaagaaatttggaattttgtcttttccacagtttgggtgagttggcccccttggcccccgttgtctgcaaagcggtcatctaccagagaagccctgtggccagtggccctggtaccctgtattacccacaaatgtctccttggcccactctattcacttgtgtgaccctcctgagggcacaggaattcwtaatttttgtttcacggatttatttctgtcttcaagattctctgcaactggctggacatggggctcacagatccgttttggccagcaagtctgtatttctttaattctgctccatatcatttgtgtaaacatttaggatgaagccatgggacatggctccactctactttgccctttgcctaaccaagtaaaaacacatcgtgtcctttcaccatttttggtccttttgacaaagataactttttatgctactctatgagtcctagggtccccaggcattggtgtccagttaccttttgctgcttaaatgttctcagttttaaaaaattgcaaatattagagctctctgcttctccatggctagccaagagagctcaggtctgtcttgtcatcagcattgcccaatgcatatggcagccattcactaaatacttgttgattgatgcactacaccctcaggcagttcttcctaattccacttactgtctatggcacactttccacacagcaatggctagagtgatctaagccttgggttgagtggttctcatctgcacatacctcggctttcttttcagggtggatgaagcccttttctgtaaggcatgtgaatgctgcagggttctggagactttcaatttcttcagagatccagcagaaggagtaggtgctattggttgggtttaggatggtaaaggtcctggccagggtggagagaattgacagaagagagtgggacaggggattgaggattaagagaaatttcttagaacctggccccaacccagtcccccatctgggaagcagaactgttcagagcactttgttactgtggaaataaaaactccatctcctctagcgatccacagtcagggtagggttctggactttggaataacaatgctgccaagggcacaactgtgccaatgatcctctgtggttaaggaggtggtcagggattatacttttgtgtcttccatattttcctcagtggcaaaactaaggagacagaattcagctttcttaacgtaacagttctctaaagtcaaacctctaaaactcaggtcaaaccccaggatatcgagcctgcttataggaataggtctagctcatctatctgaattcttttagagttctttaggaccgatgtgaattcaatcaatgtaaacctaagcaactcaccggagattcttccctcctatgcccacagtggtgaactcaatcacccgggtgtttggatccagagctcccccactggaccctcggagctctgggttgcgctgatggccacttatgtagtccgagtctttcagatcaaaatggcagatgggcaaggtgctccgcccttttgctaccaggaccggaccttgctctccaggtggcaggttgggaatcctgagaggataaggttatttttatttgttttattttgtcatcagttgttgctttcttagttggttggaaatgaatcttatatccaccagaatgtgagctctatgggagcagaggctgggtctgtcttggtcaatagcat

SEQ ID NO: 29984 - DNA, 2703 bp, Homo sapiens
ccatgcaggtgagctgggccacggcatgccataaccaactagctaagtgatattacaaagtaactgaagaataaatcaatcaatcaagagtgaagaaactggtcagtggagagagaatggagtagatgggaagagagaaacaggcagtcccaggaggaaagtccaacctcaaaagctgctcctggttctctctgtctcttttttgagctaacctgagtgagtctctttgcaatcaatcaaccaggactgaatgaaagaataacggcatttggccaaaaaagaaccacacaggttaacatgcatggtctataccactgccaggacaatgtgggcaggtgctctggaggtgtgtcacctcaatgatatgactgtcacttaaagaccagcatgactttggatgatggattttggaacttgcctcttggaaccgagctcacatttgaaacatttctgggctgaagtgggggccatgatccaggtaggattgtctctatggtggacccagctcctggaccttgtcacatttaactagatggcctgggtactgacattatgcagaggtcaaaaccaggtggagagtctacaaatatgttttgtttggtttgggaattgttaaaaaaaaaaaaaaatgaactagctaccagcatgtaaaatagggcttcacatagaactttggaattttggtcaggcgcagtggctcacacctgtaatcccagcactttgggaggccgagacgggcagatcacgaggtcaggagattgagaccatcctggctaacacggtgaaacactgtctctactaaaaatacaaaaaattagctgggcgtggtggcgggcgcttgtagtccgagctactcggaaggctgagtcaggagaatagcgtgaacccaggaggcggagcatgtagtgagccgagatcgcgccactgcactccagcctgggggacagagcaagactctgtctcaaaaacaaaaacaaaaaaaagaaatttggaattttgtcttttccacagtttgggtgagttggcccccttggcccccgttgtctgcaaagcggtcatctaccagagaagccctgtggccagtggccctggtaccctgtattacccacaaatgtctccttggcccactctattcacttgtgtgaccctcctgagggcacaggaattcttaatttttgtttcacggatttatttctgtcttcaagattctctgcaactggctggacatggggctcacagatccgttttggccagcaagtctgtatttctttaattctgctccatatcatttgtgtaaacatttaggatgaagccatgggacatggctccactctactttgccctttgcctaaccaagtraaaacacatcgtgtcctttcaccatttttggtccttttgacaaagataactttttatgctactctatgagtcctagggtccccaggcattggtgtccagttaccttttgctgcttaaatgttctcagttttaaaaaattgcaaatattagagctctctgcttctccatggctagccaagagagctcaggtctgtcttgtcatcagcattgcccaatgcatatggcagccattcactaaatacttgttgattgatgcactacaccctcaggcagttcttcctaattccacttactgtctatggcacactttccacacagcaatggctagagtgatctaagccttgggttgagtggttctcatctgcacatacctcggctttcttttcagggtggatgaagcccttttctgtaaggcatgtgaatgctgcagggttctggagactttcaatttcttcagagatccagcagaaggagtaggtgctattggttgggtttaggatggtaaaggtcctggccagggtggagagaattgacagaagagagtgggacaggggattgaggattaagagaaatttcttagaacctggccccaacccagtcccccatctgggaagcagaactgttcagagcactttgttactgtggaaataaaaactccatctcctctagcgatccacagtcagggtagggttctggactttggaataacaatgctgccaagggcacaactgtgccaatgatcctctgtggttaaggaggtggtcagggattatacttttgtgtcttccatattttcctcagtggcaaaactaaggagacagaattcagctttcttaacgtaacagttctctaaagtcaaacctctaaaactcaggtcaaaccccaggatatcgagcctgcttataggaataggtctagctcatctatctgaattcttttagagttctttaggaccgatgtgaattcaatcaatgtaaacctaagcaactcaccggagattcttccctcctatgcccacagtggtgaactcaatcacccgggtgtttggatccagagctcccccactggaccctcggagctctgggttgcgctgatggccacttatgtagtccgagtctttcagatcaaaatggcagatgggcaaggtgctccgcccttttgctaccaggaccggaccttgctctccaggtggcaggttgggaatcctgagaggataaggttatttttatttgttttattttgtcatcagttgttgctttcttagttggttggaaatgaatcttatatccaccagaatgtgagctctatgggagcagaggctgggtctgtcttggtcaatagcat

SEQ ID NO: 29985 - DNA, 2703 bp, Homo sapiens
ccatgcaggtgagctgggccacggcatgccataaccaactagctaagtgatattacaaagtaactgaagaataaatcaatcaatcaagagtgaagaaactggtcagtggagagagaatggagtagatgggaagagagaaacaggcagtcccaggaggaaagtccaacctcaaaagctgctcctggttctctctgtctcttttttgagctaacctgagtgagtctctttgcaatcaatcaaccaggactgaatgaaagaataacggcatttggccaaaaaagaaccacacaggttaacatgcatggtctataccactgccaggacaatgtgggcaggtgctctggaggtgtgtcacctcaatgatatgactgtcacttaaagaccagcatgactttggatgatggattttggaacttgcctcttggaaccgagctcacatttgaaacatttctgggctgaagtgggggccatgatccaggtaggattgtctctatggtggacccagctcctggaccttgtcacatttaactagatggcctgggtactgacattatgcagaggtcaaaaccaggtggagagtctacaaatatgttttgtttggtttgggaattgttaaaaaaaaaaaaaaatgaactagctaccagcatgtaaaatagggcttcacatagaactttggaattttggtcaggcgcagtggctcacacctgtaatcccagcactttgggaggccgagacgggcagatcacgaggtcaggagattgagaccatcctggctaacacggtgaaacactgtctctactaaaaatacaaaaaattagctgggcgtggtggcgggcgcttgtagtccgagctactcggaaggctgagtcaggagaatagcgtgaacccaggaggcggagcatgtagtgagccgagatcgcgccactgcactccagcctgggggacagagcaagactctgtctcaaaaacaaaaacaaaaaaaagaaatttggaattttgtcttttccacagtttgggtgagttggcccccttggcccccgttgtctgcaaagcggtcatctaccagagaagccctgtggccagtggccctggtaccctgtattacccacaaatgtctccttggcccactctattcacttgtgtgaccctcctgagggcacaggaattcttaatttttgtttcacggatttatttctgtcttcaagattctctgcaactggctggacatggggctcacagatccgttttggccagcaagtctgtatttctttaattctgctccatatcatttgtgtaaacatttaggatgaagccatgggacatggctccactctactttgccctttgcctaaccaagtaaaaacacatcgtgtcctttcaccatttttggtccttttgacaaagataactttttatgctactctatgagtcctagggtccccaggcattggtgtccagttaccttttgctgcttaaatgttctcagttttaaaaaattgcaaatattagagctctctgcttctccatggctagccaagagagctcaggtctgtcttgtcatcagcattgcccaatgcatatggcagccattcactaaatacttgttgattgatgcactacaccctcaggcagttcttcctaattccacttactgtctatggcacactttccacacagcaatggctagagtgatctaagccttgggttgagtggttctcatctgcacatacctcggctttcttttcagggtggatgaagcccttttctgtaaggcatgtgaatgctgcagggttctggagactttcaatttcttcagagatccagcagaaggagtaggtgctattggttgggtttaggatggtaaaggtcctggccagggtggagagaattgacagaagagagtgggacaggggattgaggattaagagaaatttcttagaacctggccccaacccagtcccccatctgggaagcagaactgttcagagcactttgttactgtggaaataaaaactccatctcctctagcgatccacagtcagggtagggttctggactttggaataacaatgctgccaagggcacaactgtgccaatgatcctctgtggttaaggaggtggtcagggattatacttttgtgtcttccatattttcctcagtggcaaaactaaggagacagaattcagctttcttaacgtaacagttctctaaagtcaaacctctaaaactcaggtcaaaccccaggatatcgagcctgcttataggaataggtctagctcatctatctgaattcttttagagttctttaggaccgatgtgaattcaatcaatgtaaacctaagcaactcaccggagattcttccctcctatgcccacagtggtgaactcaatcacccgggtgtttggatccagagctcccccactggaccctcggagctctgggttgcgctgatggccacttatgtagtccgagtctttcagatcaaaatggcagatgggcaaggtgctccgcccttttgctaccaggaccggaccttgctctccaggtggcaggttgggaatcctgagaggataaggttatttttatttgttttattttgtcatcagttgttgctttcttagttggttggaaatgaatcttatatccrccagaatgtgagctctatgggagcagaggctgggtctgtcttggtcaatagcat

SEQ ID NO: 29986 - DNA, 510 bp, Homo sapiens
tatttatttatttacttcagagctttatgactaaaaaagccaatagtttataatgccttcattttttagaggaaaagattcagcttaagaatattttatatttttaccacagtttatttagaaatatttctaaactcatttagcaaacttgtttagaaacgtactttgaaatagcagcattttacctttttgttgcacttagttttcgtaactaagaggaaatcattgaagagaaacagataaacatctaggaatctygtgctttctgaggaaaaaaagagaagctgaaatggggacctgaaactgttaagtagaagagtttttctttccctttctttctttctttctttctttctttctttctttctttctttctttctttctttctttcttctttctttctttctttttctttctttcttttcattctctctttccttccttccttccttccttctttctttctttctctcttttttttaatcaatgaattccttagaaaacaaaact

SEQ ID NO: 29987 - DNA, 785 bp, Homo sapiens
tgcatcaaaaaggttaacaggaaaaaaatagaaacatctagttttaaatttgagtgttgaaaatatgtgtactgtgatcacacatactgatcacaacaaaagttgtgatcaaagaaaccaagggttgtctccagaacaggtgcctaaatctaatgttgctttcagcctgttaaggaaccatmtcacaggtgtactgaaagaagcatggaaccaagactgtttcatcattcactcattaaaggagcacagaaaaattattgtaattattgtaatttttgtacccttagggcaaaatgaaaataagattgtctttgctacatcatttagaagttttcatgaaaaataaggagataatgcaagcacaagtactttgtaaaattgttatgccaatgtgagggttggcaattgttttacagaagctgtttgagaaagtctgtagcactatctcacaaagcatcatgatataccatcttaaggttgcctcaattcctaggaaagaaattagctcacaaattacataggaaataggctcgaacatgacaaaaatcaatgaatactggctcaaggggcagaatctggcccttccctacacatacacataaacacattctggtcttataaagtccatttttagccatttggtatttggattttcttttatacctacacaatataacagaattttcctcgttctatagggtctttcagtgaaatttcaagtttggccaattctctttaattcaaaatatttctcatatttttaaaaattttaaatctgttctagc

SEQ ID NO: 29988 - DNA, 785 bp, Homo sapiens
tgcatcaaaaaggttaacaggaaaaaaatagaaacatctagttttaaatttgagtgttgaaaatatgtgtactgtgatcacacatactgatcacaacaaaagttgtgatcaaagaaaccaagggttgtctccagaacaggtgcctaaatctaatgttgctttcagcctgttaaggaaccatctcacaggtgtactgaaagaagcatggaaccaagactgtttcatcattcactcattaaaggagcacagaaaaattattgtaattattgtaatttttgtacccttagggcaaaaygaaaataagattgtctttgctacatcatttagaagttttcatgaaaaataaggagataatgcaagcacaagtactttgtaaaattgttatgccaatgtgagggttggcaattgttttacagaagctgtttgagaaagtctgtagcactatctcacaaagcatcatgatataccatcttaaggttgcctcaattcctaggaaagaaattagctcacaaattacataggaaataggctcgaacatgacaaaaatcaatgaatactggctcaaggggcagaatctggcccttccctacacatacacataaacacattctggtcttataaagtccatttttagccatttggtatttggattttcttttatacctacacaatataacagaattttcctcgttctatagggtctttcagtgaaatttcaagtttggccaattctctttaattcaaaatatttctcatatttttaaaaattttaaatctgttctagc

SEQ ID NO: 29989 - DNA, 628 bp, Homo sapiens
ttgccaggagacagcctgataatccatcaaccccactaatgaattaattagtattcccagtaatcctgacccccaaaggagacctgcctgtgggcccctaagcggggtagaaactgccttcttcagtcagacactgaagacctgaaaccaatgtctgacattaggccccagggtgctaagcctcaagccacggatcctgttgctgatggtccccagatgtctctccttctcacctycccatcggagatcactagcttctgctgaattaaaatcaaatgcgaccaacaaatggagtccagggacatatatcaggaactgtagcgagcaagaaggtggacttccaaggaagaaatgattcgggctgcccatcttcaggttagacttgagcagaacctaaagttgctctccaagttttaggcactggggcctgggatggggttgggatggggtgagggctgggggagaaggtaaataaaacatagtccttgacctcgagaagttcagcgttccagtagggaaataatacaggttcaaaaataattgtgaaacaggttaaaacaaaaagtgatttgtgacatgaacctctcctgcataacgactagagaaaaacacagaggtgtcagttggg

SEQ ID NO: 29990 - DNA, 908 bp, Homo sapiens
tgagtgcccagccccagccaggcatgggcaactcgcctcccagcaacagcccagggaagtggtgactaacccattttcctggtgaggaaactgaggcacagaaggcttatatacttgtctgtacagctaataaggataaaggcagtgttcaaagccaggtctgtctgattccacaacctgtgtccttagtgactctgaacagcccccaggcagttcctcccgtggggaggggctcccagggcaggaggcaggggctgtgactttccccagctcactggcaagcagctgtcctgtcacaagccaggcgtgtcygtctccggggtgtgtaaccccatccccagctgccgacacctgagctgccacctggttcggaagattcctggcaagaagggtggaggcgaagtgactggtgctttcctggcaccaaagaggctgtagacacagagatgcgggggtttctcctgacactgaggaaaccccgggatggggctgagatagggaccctagaagcagagaacacattctgggggaatgggctgccctctcctctttgcgaggaaagacacagtgaggccaaggtgcagccacccgtgtccccaggccctaggctccagatgcccactcagcagagctccagctccccgcacccggcaccctcacaccctcctgcagccgccctgttgaaatctgcaccttctggcatggactggtctctgagggccgggcaccctcagacagtggagtgtttccttatttatcaccctctcccctcacccagcagtcagcaacacgaggggaagcagatcggcctataggtgctgctgaacccccagctcctcaacagtgcctggcatgcaaatgactttcatggcaggagggaggccccaggaatgcagtgtgacggggca

SEQ ID NO: 29991 - DNA, 1021 bp, Homo sapiens; identical to SEQ ID NO: 26360

SEQ ID NO: 29992 - DNA, 1021 bp, Homo sapiens; identical to SEQ ID NO: 26361

SEQ ID NO: 29993 - DNA, 640 bp, Homo sapiens
gtcaacgctggagtcggatgacttgggctccaaatctgactccccaccacttatggctgtgtgaccttgggcactcatctaacctctctaagtcttagctttgtcacctgtgcaatgggacaataagaaaacctaataaaactcagggactaataaacaataataaaacctaataaaactcagggactactatgaggatcagatgcacaaatacaagcaatgtgcttagcacagctcccagcacacaataggtacaccataaatgctagctactggcattgtaattctcaacactgtggtaatacatcaatatctgctatttaaagagtgtgtagtggttctgacagctttactattctcaccctttgtacagtgaggaagtgacatttagctgaagctaaataggtctaagagccrgaacagaacagagaatcaagttaagacaagtttctccatcgcatggtaagctctggattgatgtatttgctgagggaatacaagctcgttgtcaagttagcctaagtaaagcctgtttaagaaagtcaatctattttctaagctgtcttaatcaaatactgcaccatgaagccacaaagtagtgcttttggcattatcatgacaagctgttgtccatcctgaa

SEQ ID NO: 29994 - DNA, 573 bp, Homo sapiens
aaaattatctttttaaattctggaaatccaatgtttatgacttaagccttgttatttttatactattaaaggtttggggtttaaggctttgttttgtgtttttggcaagcctttaaacaaatattgttgttgaataagaacctcttcaaatgttttactcattctttattgacctttcaagatacacacagtagtgacatcacagccaccatgtctagcagtgacactccaaaccatttaccaggcaaacttaaggagtggttcattctctgcacctggtggggatggacagtccctcctggaggggatccattggttacctctaagataatttcaaaagaaggtggaactgggactctctggggctgactactttctcagggagaggcatcaggtgcaaagctatttttatctcttcaaagctctacaacacaggctagtcttcccctcccccaactatttctagaaatttgaaatgttattgtatcagtcaagactaaattgctggcaccaaacccaaattgaagagaagacttttggagggtaaggggtgragtatcctcatttattgga

SEQ ID NO: 29995 - DNA, 668 bp, Homo sapiens
ttttttttttccgtgagcaaaagcaacacagaacagtgtgtcaggtgaataaaacttacagacagcaatggtatagcaactttgcccagaaagtcagcacttcgatcccgatcttcatcataaactgtcacttcaagaactgaatggatatctttaatgttgctgcataataaatatatgtaagaaaaaaagatttcatcagtaggaaacaacaacaagaatagttttgaaaatttagatagctccagctgattttgtgtgtgtttgtaagcatgctatttgcatacacacatatacaaggtagcttggtatctgacagaatttcccataatgcacctaagtcaactatagtgatggttmtattatctgtaactttaaacaccttgtaatttcaagttatcattttttaatgaaatataatttcccatctgaatgggcacagaataagttatttaaaaaatcaagaagtagcactggtggtttttagactttcccttcttctaattatcacaattcataccttcccattatccctacataaaacaccaccaggtttgatatcagcaaaagttacagtatattttatgtaattactcttttttataataataggacatctcctgtttgtttatagctctcactagatcatcgacgtagtttctgttaga

SEQ ID NO: 29996 - DNA, 668 bp, Homo sapiens
ttttttttttccgtgagcaaaagcaacacagaacagtgtgtcaggtgaataaaacttacagacagcaatggtatagcaactttgcccagaaagtcagcacttcgatcccgatcttcatcataaactgtcacttcaagaactgaatggatatctttaatgttgctgcataataaatatatgtaagaaaaaaagatttcatcagtaggaaacaacaacaagaatagttttgaaaatttagatagctccagctgattttgtgtgtgtttgtaagcatgctatttgcatacacacatatacaaggtagcttggtatctgacagaatttcccataatgcacctaagtcaactatagtgatggttctattatctgtaactttaaacaccttgtaatttcaagttatcattttttaatgaaatataatttcccatctgaatgggcacagaataagttatttaaaaaatcaagaagtagcaytggtggtttttagactttcccttcttctaattatcacaattcataccttcccattatccctacataaaacaccaccaggtttgatatcagcaaaagttacagtatattttatgtaattactcttttttataataataggacatctcctgtttgtttatagctctcactagatcatcgacgtagtttctgttaga

SEQ ID NO: 29997 - DNA, 668 bp, Homo sapiens
ttttttttttccgtgagcaaaagcaacacagaacagtgtgtcaggtgaataaaacttacagacagcaatggtatagcaactttgcccagaaagtcagcacttcgatcccgatcttcatcataaactgtcacttcaagaactgaatggatatctttaatgttgctgcataataaatatatgtaagaaaaaaagatttcatcagtaggaaacaacaacaagaatagttttgaaaatttagatagctccagctgattttgtgtgtgtttgtaagcatgctatttgcatacacacatatacaaggtagcttggtatctgacagaatttcccataatgcacctaagtcaactatagtgatggttctattatctgtaactttaaacaccttgtaatttcaagttatcattttttaatgaaatataatttcccatctgaatgggcacagaataagttatttaaaaaatcaagaagtagcactggtggtttttagactttcccttcttctaattatcacaattcataccttcccattatccstacataaaacaccaccaggtttgatatcagcaaaagttacagtatattttatgtaattactcttttttataataataggacatctcctgtttgtttatagctctcactagatcatcgacgtagtttctgttaga

SEQ ID NO: 29998 - DNA, 937 bp, Homo sapiens
acatttctggctccagaactgtaagagaatacatttgtgttttgttaagctagcaaatttgcagtaatttatgacagcgctatgagaaaccaaaacaccaggattatgccccaaggatcctgatgccctccctcctctctgctctgcagtgtgctggagctcacagggctctgctgctgggagttagtatctagtccaacactttacccactcaccccccaagctaagggactcctgaaatcagggaccagatgcataataggtgcccaggaagtgagactcgccttccccagattaagaataaagaagacaaactatccacggctgctgtgagcctctcatcagacctcagcttctagggcagggtccctgcctgtctccagtatgtggcctctgtgtcttcttcgccctccatccccacagtgggacgagaagtcatcaggaaggcaggggatctgcaggcagccatcagggctctaattgcagctggctgggggaccatgggtcagggctgccaccccctggctctgtgccttcacctgtgtaacgaatggggcactcacagcccctctcaagtggtcctggggatgaagtgagaaggtgacatatacaagtgagttatacacgttcctgttctgtcactcaccagtgctcactgggtgggtcactgaactcccctcagcgtttccttctccatctgtaaaccaccagtgcaaacctttcccagatagtgctgacccgaagcaggaaccagtgcccctctgccctcagtaagtctgccagcagrggaagcccatagagggtcttgggaaatgaagccaacagagtcaagagggtcagatgatgagggacttcaagtgccaccttcatcccattctttctgcaaatattcaccacacacctacgtgacctcaggctctgtgtcaggtcctgggga

SEQ ID NO: 29999 - DNA, 937 bp, Homo sapiens
acatttctggctccagaactgtaagagaatacatttgtgttttgttaagctagcaaatttgcagtaatttatgacagcgctatgagaaaccaaaacaccaggattatgccccaaggatcctgatgccctccctcctctctgctctgcagtgtgctggagctcacagggctctgctgctgggagttagtatctagtccaacactttacccactcaccccccaagctaagggactcctgaaatcagggaccagatgcataataggtgcccaggaagtgagactcgccttccccagattaagaataaagaagacaaactatccacggctgctgtgagcctctcatcagacctcagcttctagggcagggtccctgcctgtctccagtatgtggcctctgtgtcttcttcgccctccatccccacagtgggacgagaagtcatcaggaaggcaggggatctgcaggcagccatcagggctctaattgcagctggctgggggaccatgggtcagggctgccaccccctggctctgtgccttcacctgtgtaacgaatggggcactcacagcccctctcaagtggtcctggggatgaagtgagaaggtgacatatacaagtgagttatacacgttcctgttctgtcactcaccagtgctcactgggtgggtcactgaactcccctcagcgtttccttctccatctgtaaaccaccagtgcaaacctttcccagatagtgctgacccgaagcaggaaccagtgcccctctgccctcagtaagtctgccagcagaggaagcccatagagggtcttgggaaatgaagccaacagagtcaagagggtcagatgatgagggacttcaagtgccaccttcatcccattctttctgcaaatwttcaccacacacctacgtgacctcaggctctgtgtcaggtcctgggga

SEQ ID NO: 30000 - DNA, 580 bp, Homo sapiens
tttctatgtttagagtttttattaatatttatttaacattggttacatttgctaaaattackctttgctttctaatcacctagagtttttcctaccaaaattagtttcattatagggctttgggatagataggagggaaaaaaaatcttagaaccttttttttgcttttcaggaaaaatgggattcaagtcctgtgatcattctgcacatacctttgatttcagttttgactgggtaggctatattaaaatgaggtggtagaatatttattagcacagtcgagtttgagcatgacaagctttcttcatggtctgatgtacctgtgatttgccctgtagtaattgttgttcaattttgaaggtcgccaagttatcctccccctggttgtggcaaaagcaaatccaaactgaaatctgagcaggacggaatctccaaaacgcataagctgctgcggaggacttgttccagcacagtcaagactgatgatgtgtgtgtcacaaagtcacacaggacctttggccgctccttgtccagcgatcccagggcggagcaggctatgacagcaattaaatcgcacaaa

SEQ ID NO: 30001 - DNA, 1169 bp, Homo sapiens
atgtttcattaattttttgctgacagatcctttctctctaacgtagctctctgtgtcttcttcttactaactatgtgatcttgaggaactcaggctatgtctcagatttctcatatttaaaaaaggagggaaaatgcctgccctgccaacatcataggtttgttttgatttccaaaatacagggaatatgtaataacatagttttggcctattcatcacatttctttctttgttttttcttcagttttttgttgtttattacagttccctttttttattattatactttaagttctggggtacatgtgcagaacgtgcaggtttgttacataggtatacacgtcccattgtggtttgctgcacccatcaacccgtcatctatattaggtatttttcctaatgctatccctcccctagccccccaccccccaacaggccctggtgtgtgatgttcccctccctgtgtccatgtgttctcattgttcaactcccacttatgagtgtgaacacacagtgtttggttttctgttcttatgttagtttgctgagaatgatggtttccagcttcatctatgtccctattcatcacatttctaatagtaaatgaatgtagagaagaaatgctgattttgtgactatttgtcatgtattgactaatgtaacactttagaagatataattatatttaaattcatcactaaattagccattttgtgttttcaaagaaagttaagaatgacctaaaatgttaactgggcatggtggctcatgcctgtaatcctagcactttgggaggctgaggcagtcggaytgctgagtctaagagtttgagaccagcctgggcaacatggcaaaaccctgtctctacaaaaaatataaaaattaactaggggttgtggtgtgcacctgtagtcctagttacttctgggggtgaggtgggaggatcacgtgaacctaggaggtcagggatacagtggcctgatcacagctcaccgcagcctcaacaaccctgacagagagaccctgtctcattaaaaaaaaaaaaagacctaaaatattgagtgaaggcttttctcatcagaattctgaagctattttactgtactcgtccaactcagaaatgcaattatgtaggtaattatagtttgtatttggagattagaattcat

SEQ ID NO: 30002 - DNA, 573 bp, Homo sapiens
ggaaaatatcacaagttcaatttgggcatgttgagtccaggatgtccatgtgatgttcaagaagtgataacaagttggatttaaggctctaaaatttgacatggagacagaaatttgagaatcatcaacttttacattaaaaggatgagaagtacagtggtatcaaaaagaaccccaagaaactccagcaacctccttcacaaactgccctttccacctctgcttgcacacagcctaatcccaactaaaagctccaacccacctcatattctggggacaatgggctgagcatgagaaagcaatgggtaaagagaaagacatgaatgcagccaggaattagaaactatcagaggcgaccaaaccaaytgcaggaacttggaagcctgtggaaagagagaacaagccagagagaaaggtgacatactgaaattatagccagaaggaaaggagaacccagaggaagagatgtgtctattgttctgtgtctgactcaattggccaccatggtagagaaacatttgaggatatttacaggtatgcagtgagaatcccaaagtgttgagagtgggaaga

SEQ ID NO: 30003 - DNA, 601 bp, Homo sapiens
ggttctttcttctgtgtcattggtctttcttaacaaatttttaagttcataatgtaatgttgttaactataggcactatgctgtatagtgtatctctagaacacattcatctaaaactttatcccattaaacaaccctctctttcttcctccccccagcccctggcaactacccaagaaggaagaagtaaaatgagctctgtttggagattacataattttacaggtagaaaaccctaaagactccaaaaaaaaaaaaaaaactattagaatgaataagtgaatttggtaaagttataggatacaaaatctgcatacaaaaatcagttgtatttctatatactaataatgaacacctaaaaaggaaattaagaaaacaatttcatataatagcatgcttaggtataaagtaaaccaaggaggttaaagacttatacacrgcaactttaattcttttacatctagctccgctatgctacctttgagctccccctgtggtaaatttcctctcttagtttactgcttggctgtgtatccaagaattctatgactgggttgattaaaaatccccacttcgtaagttagaaacaacaaacaacttt

SEQ ID NO: 30004 - DNA, 523 bp, Homo sapiens
aggtctcctgcagaggcagccttgtgttctatsctggtgaagtctacgaagccagcgtctgctcgccaacctgccagggcagccgggcctcccgcctcctctgtcctgccctgccctccagtgcccaggccctgagggtctggctcagcctgcacttgactctgttcccctgcagaccaccttgctgcacctacccaggctccaactcctcccgacctgccctgggcactgccaggcctctcaagtcctcctagtcggacaagagtgctgtgggggctgggcttgggggagacaaagagaggcagcgaggtgggcctttaggggccgggggacacgctgctgctttttttttaatagcccctccctgcaggcgaggacgttaagctttttattattatgcaacatttctaatagccagacatagactagcctaaggaacccccgcgcgcccatcactcacttgcagttggctgtggaacctttttccttcttggctgatgcaggctcaggatgggggctgatt

SEQ ID NO: 30005 - DNA, 707 bp, Homo sapiens
tattaatgcagtttttatgcctcagtaatgacccatttgatttaatcgttcttaaaacttgtaatgaatcaacagtgatggaaagttatactgaatcatttcatatctgttttgattactgtgaattatattctaagagataggctttaaaattgaacttatattaatacattttaaatttaatttggaactagtttagaatcgttgaagctaggactctctgttgactcagaaattgtagaaatgagtggggatggcatttcacatccagcctggaatctccctttattctcaatgtattggcttttcttatctttacccttaaattttcactatcaaatatatttgagaggcagatccttttcctcctgtaatatttgtttcatacacacagaataatactctktgtctgggattcagtttttgaaatgaaacatggagtctgagtgaccccttgttgatgtgacaatgggttggtcaggatcacagcagttgggccccatattgtgacatgtatgcttgtgaaaattctactgtgacatgtcactgacatgatctgatgatgtaggtcttgcctttcattttaactgccactctggcaactgaactttggcagtaaacacagcttagttgtctcagaggattcacaatgggaaatgtttgtagttgctgcctcagaggtatgtatgttcatttccatcttctga

SEQ ID NO: 30006 - DNA, 707 bp, Homo sapiens
tattaatgcagtttttatgcctcagtaatgacccatttgatttaatcgttcttaaaacttgtaatgaatcaacagtgatggaaagttatactgaatcatttcatatctgttttgattactgtgaattatattctaagagataggctttaaaattgaacttatattaatacattttaaatttaatttggaactagtttagaatcgttgaagctaggactctctgttgactcagaaattgtagaaatgagtggggatggcatttcacatccagcctggaatctccctttattctcaatgtattggcttttcttatctttacccttaaattttcactatcaaatatatttgagaggcagatccttttcctcctgtaatatttgtttcatacacacagaataatactctgtgtctgggattcagtttttgaaatgaaacatggagtctgagtgaccccttgttgatgtgacaatgggytggtcaggatcacagcagttgggccccatattgtgacatgtatgcttgtgaaaattctactgtgacatgtcactgacatgatctgatgatgtaggtcttgcctttcattttaactgccactctggcaactgaactttggcagtaaacacagcttagttgtctcagaggattcacaatgggaaatgtttgtagttgctgcctcagaggtatgtatgttcatttccatcttctga

SEQ ID NO: 30007 - DNA, 537 bp, Homo sapiens
agtgtctcatatttcagacaattataaaattgcaatgctatattctttatatcgtgtacatatgtaaatgtgttaagtcaattactagtgctacaactacaggagtaaaggtgtatttccattccaggtttgggtttacttttaatagtaaataacatctcagtgcaaattgtagatattttgctgattgttaaaacattaactaagaaggatctttttctgagacagtgttgccagatttgtaaagcaatggacatcacttcaaaatgtttggaagtaacctaaaaatggaggaagtggtactgaaaatttccatatacccaccttcctcagtgtttttttgtgaacccatcttacatgagtgtgataacgcttgtaacaatgaccgagccaatagtgatacattcttatgaacagaagtccaaggttagcatcagtgactgagccaatagtgacacattcttwtgaacagaagtctagggttagcatcaaggttcactctgtgttgtccagtctttgggttttgacaaactgaca

SEQ ID NO: 30008 - DNA, 602 bp, Homo sapiens
aacactcccaacaaatgtgtttttagtgaatgagtagaaagtgggacaaaacccagtttagktgcaaacaatgttgagtgttctttgggtttaaataatccaaggagtcagcatatgagatgggacaaggctcaatcttttatacatcttgaaatctctgttttttattttattttattttatttttttggttctataggacggtaaagctttatttaaaatacaattaaaggaggaggagacaccatcagcctctctgtcagctcaggtgaggcaaggaatggtaacaaatgttcccagactacaggtaacttacacctgaaaagattaattttgctttttggtactactaccagctctgctcattaaggtcgcttggggatccaggcttactgggaacccaggagtacccagcatttcgaaggtggcatttccatataaacaagaaagcgcccctccagcagctctgttctcagcccatgctgacctgcgtcttcgcagcccactggctgggatggctgcatggagcccacgtaccgacaaggggagcagaaggtacatcctagtgtgtgccagaggcaggagaaccacagaacctggtg

SEQ ID NO: 30009 - DNA, 551 bp, Homo sapiens
catgttggatcaggctggcactcgagctcccgacctcaggtgatctgcctgccttggcctcccatagtgctgggattacaggcatgagccaccgcgtccagccaaaaaggtccttcttctaagccttctgctataagggacgttaagcccacgaattagaaacagccttcctagggaaagcagggttaatgctcccatcccagcctcttagtgaggcccttctttaggaactatgcctagtctggggttattccaatggccccacaataaccacagaaaggaagtggtgagagaaaagatgaggtttaccggaactgagaartattttctagtattccactagcccaaagcatctcagttcagtgctgattttcactatttcattagagaaagcgaggaatgttgagcttgttgttcgagtcttcacttcccgggcaagtcgtgagattatgagaaagatggaaggaaacagaactaaacctaggtgccttattcgttttgttttttctcacagcaaatcagcaaagaatttcttatctcttaaagtaagc

SEQ ID NO: 30010 - DNA, 551 bp, Homo sapiens
catgttggatcaggctggcactcgagctcccgacctcaggtgatctgcctgccttggcctcccatagtgctgggattacaggcatgagccaccgcgtccagccaaaaaggtccttcttctaagccttctgctataagggacgttaagcccacgaattagaaacagccttcctagggaaagcagggttaatgctcccatcccagcctcttagtgaggcccttctttaggaactatgcctagtctggggttattccaatggccccacaataaccacagaaaggaagtggtgagagaaaagatgaggtttaccggaactgagaagtattttctagtattccactagcccaaagcatctcagttcagtgctgattttcactatttcattagagaaagcgaggaatgttgagcttgttgttcgagtcttcacttcccgggcaagtcgtgagattatgagaaagatggaaggaaacagaactaaacctaggtgccttattcrttttgttttttctcacagcaaatcagcaaagaatttcttatctcttaaagtaagc

SEQ ID NO: 30011 - DNA, 528 bp, Homo sapiens
actatcagcagctgatagctcccagcttatgaggtaatgagtgcttcaagggggggatctgtgtggagctacacagtttacagctggggaaagtttatatctgattagtcttctgagaggacttgagatgggtgtcagatcctagggttcaggtccagcccatgctgaagtccgaggggagtgggtggatgaacagaaagaacactygggggtccatatgcaggtgaaagatgacttcattcagcagcagttcttattaacaactttctcacactgtccacctttatctcaactgtgtgctctggctctgtggctcctgccgcccccatgcctgcagctgcatagccggctcacccttggcttcagggtcagcagcttaactttttctctctctgggcaccagtgtgagctgtgttgtgggtcccctctgtccatctgcaaaatggacagctttggctctctttctctgggcaccagcgcctgcactagagccatgttgagttgagccaagccccaaaagtccctgta

SEQ ID NO: 30012 - DNA, 1051 bp, Homo sapiens
tccatgaatatgttggtactgtcttcctgatratgactgaattcttgttctgagtttatatgagatcctggttgttaaaaaatgtagcgcctctcccactttgctcttgcccttgctacctgatgcacctgccacctcttcaccttctgccatgattgtaagctccctgaatccttccccggaagctaagcagatggcagcaccatgcttcctgtgcagtctgcagaaccgtgattcaattaaacctcttttctttataaattacccattctcagatattactttatagtgatacaaaatggactaacacaagtggagaagagccagtgatgctaagctttctataaatgcgcaagacaaaaatcctgcacaaccaagaattcctctagcactaccatgattagcaatacctgtagtgatttctagttgactcccagggcattggcactggcatttgaatgaaactttttctgctcttcctaaatacactggggattatctgctgttacaatttcatatttttgttttctcagactcttcatatcagtcaacaaaaacttgaattccctccctcttccctttactattcttcatctttgttcaccctgttctctttcctccactcttacagaaggaaatctttcatcttctttccaaagataacaacagctccattcaaagctttggtaacatcccactgcatctcatccttgactctgtctcttgcgtctttaataccctgccagtcccttcttctccttagacaagtgcttaagtgtccttatcccaaatatcaaataaaagcaaaaaccaaaactcttaaacctgccacttaactccttaatgttccttatcatttcttcagcagaaggctcagagtctataaactgttttatgcaatcactgcctctagttcctcaccatccgttggattttaaatctcttgtaatctgatttctaccctctaattctgctctcttgagtaatgcccagttgccagaaccactctctctcactcttcaaattccttggatttctctgcaaaattgga

SEQ ID NO: 30013 - DNA, 1051 bp, Homo sapiens
tccatgaatatgttggtactgtcttcctgataatgactgaattcttgttctgagtttatatgagatcctggttgttaaaaaatgtagcgcctctcccactttgctcttgcccttgctacctgatgcacctgccacctcttcaccttctgccatgattgtaagctccctgaatccttccccggaagctaagcagatggcagcaccatgcttcctgtgcagtctgcagaaccgtgattcaattaaacctcttttctttataaattacccattctcagatattactttatagtgatacaaaatggactaacacaagtggagaagagccagtgatgctaagctttctataaatgcgcaagacaaaaatcctgcacaaccaagaattcctctagcactaccatgattagcaatacctgtagtgatttctagttgactcccagggcattggcactggcatttgaatgaaactttttctgctcttcctaaatacactggggattatctgctgttacaatttcatatttttgttttctcagactcttcatatcagtcaacaaaaacttgaattccctccctcttccctttactattcttcatctttgttcaccctgttctctttcctccactcttacagaaggaaatctttcatcttctttccaaagataacaacagctccattcaaagctttggtaacatcccactgcatctcatccttgactctgtctcttgcgtctttaataccctgccagtcccttcttctccttagacaagtgcttaagtgtccttatcccaaatatcaaataaaagcaaaaaccaaaactcttaaacctgccacttaactccttaatgttccttatcatttcttcagcagaaggctcagagtctataaactgttttatgcaatcactgcctctagttcctcaccatccrttggattttaaatctcttgtaatctgatttctaccctctaattctgctctcttgagtaatgcccagttgccagaaccactctctctcactcttcaaattccttggatttctctgcaaaattgga

SEQ ID NO: 30014 - DNA, 540 bp, Homo sapiens
atagcagaggtaaaaagagtggaataaagctatcatattatcccagcactgcttgctaatttgtttatttgtttgtggggttttggtagttgtgttacttttaacatgcgagaataaattctaaggtgtttaaaccaaggtattattattattattttatatgcacctaaacctaatcctcactratgaaaatttccacatattttcatgaatgctctgaattcttttcttgatggggttttaagcagaggtagaattagaaacattaccaaactatttttttattgattatcagaggaccattagttatgttagggagtaactgctaacctctagaacattgctctgaaaagattacacgtgagtatacacaagaacaggctttttttttttttttagcattttcttgaatatctacattgcacataaattaaatgaactgttcacttagatatgtgatatgtacctaattcagattcaaaatattaatatattttgtcaaatggactcttacctagatgttataatctggaaatggcc

SEQ ID NO: 30015 - DNA, 581 bp, Homo sapiens
agcgatgtagaggacaagataatttgattcgataatttaagtacttctctgatgcttctgggcttgttgaaattttataccttgatgcaaaggtcgtggtatctgtacagtctctatgggtagtcaaagcttttgaacacctctcattttgctaaagaaattatttttatcatttgtataagaaaaacaaaacaaagaacaaacaggaaaatgaaactactctggtatacacaacaacaatgtttgaaaagttcaatataataatgcttgggctgtggatttcaaagggtcttcaaataatgagtacccctagggtatggattaaagttgccttctatacaaaataccatgcttataaaggcatgtgttaaagaaaatcattgtataaatgggctaactggaaggaaaacaggttaattaatttcaagacactctctgcttttagttggcttcaatagttgtccaaacagtgtgatagaaaaatgagaaaaaattttcagtgsttcaaaggattatatcatctatttcagtaagagaaacagaggaaataacaagcctctctttcttcttgattaccaaca

SEQ ID NO: 30016 - DNA, 573 bp, Homo sapiens
gactctttgttttatctttggtaaaaataaatactggtgattatatctttgatgacttcttgagtaccctttagccttctagtcttaggcttttaattttttatcatgtatttccttctccagttctttgcacatcattgaaatatttttggcaacaataaacaattagctccacaatatctacaaataccaacaataaaagacttacartaacatctttgttcactaatgctagtggattttttaatgtcatagtttttaatgcactcaagtaaaaatgaaaaacaaaaattacttgattcaaattctaagacttaatagaacctttagccttaaattacagattagagatgaagactgcccagaaaataagtgaatgagaaaatacaccaactctttttttaaaaaaacaaaggatttggtcagaaaaaacaaaagaagtgtagattgtttttatttctttgtgtctttagcaaattaacataaccttctctgttcaatgtgcagcagcttcccatggttcaatgaaagtggacagtaagaatcacacaactgaaaagaataacgagacac

SEQ ID NO: 30017 - DNA, 573 bp, Homo sapiens
gactctttgttttatctttggtaaaaataaatactggtgattatatctttgatgacttcttgagtaccctttagccttctagtcttaggcttttaattttttatcatgtatttccttctccagttctttgcacatcattgaaatatttttggcaacaataaacaattagctccacaatatctacaaataccaacaataaaagacttacaataacatctttgttcactawtgctagtggattttttaatgtcatagtttttaatgcactcaagtaaaaatgaaaaacaaaaattacttgattcaaattctaagacttaatagaacctttagccttaaattacagattagagatgaagactgcccagaaaataagtgaatgagaaaatacaccaactctttttttaaaaaaacaaaggatttggtcagaaaaaacaaaagaagtgtagattgtttttatttctttgtgtctttagcaaattaacataaccttctctgttcaatgtgcagcagcttcccatggttcaatgaaagtggacagtaagaatcacacaactgaaaagaataacgagacac

SEQ ID NO: 30018 - DNA, 774 bp, Homo sapiens
acaatttcccatctcaggcaccctacatttattgtatctgtaaaatccctattgccatgtaagttaatatagtcacatattacaaggattgaggtgtgcccattttggagagccattattctgcctatcacaaggacattgatatagtcatactttttctccccattctgttgcyatttaggttattattgccattgttcttcttctgttgtgtttgaaataaaattctggtttagtggttcttaggatcatgaggcacaccagcatgtcaacatcacctctgaagtgcatagcaagtaatttgtaaccagactttttaaatgattcattcctttttaaacacgttagtgtataggcaaggtcattcccataacttatgctctttctgctaatgccttgaatgggagaaaaaggaatggatattacaataagcttacaaaaattacatatatctcaaacctacaataagtgtctattttggctgtattaatattatagctatatcagtagctataattataaattataatttaaaaatttgtgatagtagggggtgtttatccaagcctggtacctgtccaagaatattttatacctatgaatgtcatttttcatgctgctcatggatcagtgaacagaatttgatactttttgcccttgtgggtcaaaaattaatgcaatgtgaatagctaatatagtctacaaagaagcttaggtaaatacaaataatgacaataaaagcaataataaaaattgtgaaatgtagtcaaacca

SEQ ID NO: 30019 - DNA, 635 bp, Homo sapiens
tctgttctgttcccacctgttgaaaataccttgaatttttactcatgtaacccaggagttctccaccctggctatatgagaatcaaactgggcttgtaagaaatagcaacgtcaggctccagccctagagattagattcatcaggtgtaggatatgtyttaaagtttaaaaacctccttacatgataaaagtgggcagccaggtttgtaaaacagtgatttaacctgttactgcttctgctggcctagtgtcacttacttctgagaaaagcatgttgtctaaatatttatcaagataatttataaaatcttgaatctaacccaatcagaaaaaggttcctgaagtgcctccaatccctttagaaagagaaaaatctatcagtcagtatgctcagatgacaactaactttaagttactttaaaattcaccaacttttccagtgttactgaggatgttctaaaagagtccactgaaatcaaaaaccatctggctgtagatcaatctctgaagttccaccccagtaaccttttccaaaaagcgagttagatgaaggaagttaacagtcatggtggagaaaacaaactgaaagacaaacatttcaacaagggagaaaagagggagtttaagctttgatt

SEQ ID NO: 30020 - DNA, 579 bp, Homo sapiens
atacactgctataaaaaatgcaaagactaaaagaatgaatatcayttgaggtcaaaatataaaacaaaatggacatgcctgtttacatgaataaaattaagatgtttatatcaacttttacaatgtaaaaaggataacaaatgaagtattccagaaaaggagatgtactcaacttaggaatattgtgaaaatgcaaatagtgttgataattcattaggctttataaccagaaatagaaggcaatacacttatttgaactctgcatcaatgaagtaaaatctttattccttctattcactttatttacacatctaaaatcagcacattttgttctatgtatttattcaaataagattaaggcttatcctctttcaacactttttgagtcaaaaactgattttgtatgtctactgcttccctgtgtaagcggcatcattttcaagtgtagaaataaaccctttttttccctcttgaagaagcaataatttgccagggctatcataatcctcaagaactgtaagacagtacattaaacaatagaaatgtactgtcttttaattcttttatatatatatttat

SEQ ID NO: 30021 - DNA, 3240 bp, Homo sapiens
tagtgcattatattaatatcacaattgtccctctacaattgggggagaagtttatagctgctgacaaaattttccatacacttcaatcagaaagaaacaaatgagctgtgtctatgtgtatggtgtgtatgtatgcatgcatgcacatattttgtgtgtctgtgtacctgagtgtaggtgaacatggaccttttttttacatgaatgggtcccctagcgaaggaggcaagacctttaaattttatcttttgaagttatgtaaatttttataacaaataaataatatatatccatgggccaaacaaaaactaaagtaatcacaaattatgagtttcaaaatcaaagcacaattgtatatacaaaacaaaatccaaaattaataagaatattctaaaatattttcatagttaagcaaaatgttattggttcatgttgagaaataaatgttggcttctagagtccaggaggctttctaaagttagaaatctttctttctaacgctacactttaacatatctagggatacttcatgagaaatctaatattcatacttaatttttctattaatattataattaatgtttgataatggtaactccaatatactgcaataactttagatattagaacaattcttatcacaaacatatttttataacagggttttcaatcaagggtcaaagaatcacaattcaaatagaaataatttaatgagcacattttatattttacatactttatttacatgaattaaacatgcaaagtgtcttagtttatttaggctgctataatgaaattgatggaatggcttataaacaacaattgatggaatggcttataaacacttgtcacagctctggaggctaggaagtctaagatcaaggcttccagcaggttcaatatccggtgaagtcccacttcctagttcatagaccagagattttctgattgtattttcacatgttggaaagggcctcttttataagggtattaatcttgttcacaagaactccaccctcatggtcaaaccacttctcaaaatcttcatccccaaatattataacattgagggttacgtttcaacataagaattttgagggaacataaacattcagtttaaagtacaaaagtaaccgtattcaatagtataaaggaaacctaaataatgattcttgtcaaactcatattgtccaactactgaacttcgaaacaaatgagaagtcgtgccttttcattaatgatcaagagaaagttgttagttctgtttcttgatccaaacttttgataacggagaatggattattacaacttaaagttgaagagtatatgtaacaaactttgactgtctcaatgtggcattcaaataggaaccaagagacagccaaaccttagtattcagcttttctccttatgggtccagagcattagaactaaatgcatggagacacacccaaatggaagacagaatctcactttattatttgctgaatgaggggcttataacttattgtatggggctctctggcaaaataaaaagaaaacaaataaaccaataagtagagaaaatttcccctgctttccttcttcttattctgagatggccagttctcagagcagcctcctttcgctttcagatgtaggcagaaagtaaaccacaaggaaagaatcaggctattttaaggtagagtgggcatttggttgtattaaaattgtgtaatattctggaactaaaaactctcctaatgcttcactgctgcacatccctctttccaacaattttcttgaagtaaatggagctcttttctaaaaaaataggaaattttggaaagtacaatttcactgttgttgttacacatttgaaaaatcccacaatagggctctttggtaaaaattagattggagagtgtggtctgtgcctagaaatcaaattgagacttccattttttttcccacccttttcccaaatccaaggtgggtagaagtccagagcaaatccaaagtccgtttagtcaaccagacattgcaaatgggaaaacctgctaggctttaagctgagctctgcctaagcaggtcctctgggctggagtggatttgagagccccatctgacacatgacaamgtaataacacttactgatagaatgtagctttgacaacttctgagttaacgtgggccagttatcagggtacttcttagccagattggtctatagttttagatttcacagaagggatctaaaattgaattctagcccactcagggtttattaagcttgggggaaaatggacagaatgtaattgagttcatcaatgatagtatgaaaaaagttgtcagtttatgatgatgaaatatatagcagcaaagcaattcaatactttgtctactgataaaagcatttgttccctaaaagagtatttgggaaaccaaatattccaaaatagtagaaaaattgctgagtgaagatacctataaacaaaatgtgtttttaaaaatctgctattaagaataacagattgacttaaaattctgacacttaacgaaaaaaatgctgccatttagccattttatcacataatatttatcgcttatgttgtttacatacttgaacttatattttctgcataacattgaagtatgcattttatcattcaacattgtgccaaaagcataattttcttttcaggggaagccttgaggatattatgtaaatagttgtgtagcattctttcgtatatacaagtaccataattgattaaaatatttactttgttgaccatttaagctgttaacattcttttttgctgctacaaacaactctctcctgagaatatttctatttatattttttcaatttcagatcatttcttagagtacatacgatgaataaaattatttggatcagagtctatgaacatttttaggactcaatatacagaatacacaatgttttaaagtttgtatcaatatttatttccttcagtctcttgtgaaactgctaaaattaagtattatcaggtttttaaacctaggctaattcatcaagcaaagaaaaagattgtagaagtatttttaataatatagttatttaattataaataaaataagcattttgacatatttgtttgtcatttgtggtttatctttagtgaactgcttattgtggtactttatctggtttatagaagtatcttttcatttcatcagtatgcaaaaaaattatagactatgtgtatcaatttt

SEQ ID NO: 30022 - DNA, 1540 bp, Homo sapiens
aataatgacataagagtaaatggtttcaatttagaaagatatttttgctggatacagaattctaggttgggagggacttttgctcttgttgctttttggcacagtcttgctttcattatttgtgataaaaagttagcaggatttctcatttttgtttctctttatctctgactgcatttaagagtttctcttaatgtattttcaacaatcttattataatgtgccttgatatgtttttcttagtgtttctcatgcttagggtttgtcaagatttttgatctacaggtatatttttattagaaaggggatcatgagttaaccagacatgagccatgcttgggaagctgttactgctcctgcggctacagacacaatggaaagaggtaaggtttccacatggacaatcacggcgggtttcctgacagaagcagggttcactgaaggtgggtgactgggagaaatactttggtttttccatacctgttcttccctaatcttctgtcagtacctcctatagtcagaatttaccctgtgatgaatagcagagcatgtgaaggctggaaacggagctcagagaaaatcagcagctgcccctcacaaaagcaacgtattctgatttcttcactgttggattcatgccatctggaagaacaactgggcatatatttgttgaatgaatgaatgaaatataactaaactcatgttttattattgagaaaattgaagctcctgcgggcttcacaatttactcaggtggttaagaactaggacttaaatttaggctatttcatattttaacatagcaatcacctctgacttctgtaaattgaatcatattttaaatccatatgagaactttctttccaaagacactctgtattgcgttttttgcaaaactgaaaatcctttatcacctttttaggtagatttttcaaatttcagtttctcttcaagctttctggactatttctttcgctgggaggttttacataacaactctattttaaaagaacagagcatttcaaaagggttatcattttggtaaaagagtcagcataatgtgaaagaaagagcatggtttttgataccagatagtactacattctgatctaggatttgcaagtaatagcaattagacattagagaaaacacttaactttcctggtccttgattccttattctgtgaactggggataataataccttctctaatcatgtcacagaactgtaagaatgaaattagatgatgcgtatgttatgcaaatayatttcttactattgcttagctgtgagtcaccttctctccagattagcttttattactgatactcattgtggacatagagtccagctgatagctggatgggtgggtatggctgaagcagaagcatagaatgtaagagacctgcaatagagacttcattgtctgatgagatctagtgagaacagcaacactcatagcaggtaaaagtgctgcaaaaagttggtaggaggcagtaagaaagtaactgagatgaatctacttattttgcatttcct

SEQ ID NO: 30023 - DNA, 973 bp, Homo sapiens
ccagaaaccacgttactaagagaaaagcagggattttcctggggtcatagcactccaccaaatcccaggtccagaatacaacttccaccacactctaggcctgtaaactaaagcaactagaagctcctagtgccgtgcaatctccgaaatcataaggccaaagaacaagatattcagtggggttaatgaagaaagcctctttctgagcccatcgtgggcctcaatgttcttcctgtaaaatggggctatagcgtagcttgtattgctggtttagtcctgaggacttaggttaaaggcgaaaaaaactcagagcctggtatctagtaggtgcataataaatgataagatgtccattatcgctgctgctggtagtggtgggggagtgcgaactgtcagtctggttaggtccagcctaattccsggtctccctgcaaagcccctgcgggctatgccgggatgcgaatgcgggggggtggaggggagcggcgcgaagggagggtgggggaggaatttctggaaaacaaacttctgggccttcagaccacttacttagcagggcgcagcctaacccgcgcttggcttcggaagccgcgaccagggttgtcccctctccccccagctttggctgccgccgccgcgtaccgggcggcccgccaagcccccagagcccctgcgctctccctccaaagcaggagtgcggtggacatgggatgaggtcgactttcactggccagtcccaggtgcctacgccccgcgctgggggacaggagccgggaggcaccccaggaagggtcctctgcccgccggcccccgcgaagaggaagggactccgcggaagggggcggggaggaggagtggtctggccgctccggccgggatttgcctggacttgaagacgctcaggagcccaaagctcggagagcctccagaaggcttctccctcattggccaggagtccgagggagccgaggaa

SEQ ID NO: 30024 - DNA, 1276 bp, Homo sapiens
aatcttagggtgctccatcaattgatacatagcattgtatacattttaaataaagcattagaaagctgggcctggtggcatgtgcttataatcccagctatttgggaggctgaggcaggaggattcctggagcccaagagttcaaaaccagcctgggcaacacagtgagactccatctcaaaaaaaatgaaaaaagaaagcattataagatcagttataacttagaaatcatcctcagaggctgggcgtggttgcttacgcctataaccctagcactgtaggaggctgaggcaggaagattgcttgagcccagttcaagaccagcctgggcaacatagtgagaccttgcctctacaaatgatttttaaaaattaactgagcatggtggcacagacctgtggtcccagctactcaggaggctgaggtgggaggatcacttgagcccaggaggtcgaggctgcagtgagccatgattccaacccgggtgacagagcaagatctcatctcaaaaaaaaaatgaaagaaagaaattgtcctcagagacaaaagaaaaactttggtaaagagaaaagattggagtcactcagctgtcaggtcggtaccacagtctgtctgatctctgcagcaccagggagttattaaacatttccaagtgagagggtgtcttatgtttaaaatgttagctatcacaaaagaggaaaagatagagcaaactgctacattagatgtatgtcatggggactcaaagaaggggaattttttaaacttcacaggggtagatcttttatctgggccatctgggcctagaggacaaataggattttggtagggtgaggcattccagcatcatgggcaaactggcgtagcacarcaggtcagtgatcttgaaaaatttggcaccttttgtcaagtaggaaagatagattgttactgtttatcttcacttatttcttttttattctttctcttactttctagtatgcttttctcagcatccacagataaaaccgtggctgtgtgggatagtgaaacaggtgagagggttaaaaggctaaagggacatacttcctttgtgaattcctgttatccagccaggagaggccctcagcttgtctgcactggcagtgacgatggcacagttaaggtgggtattgtctctccgtgttccagtttctgaggtgatgtgatgtgaaccttatcttgccttgccacttgtactctagcttcctgtgcaaaacttaattttagcagtcatctcccataacacacttgaaat

SEQ ID NO: 30025 - DNA, 1276 bp, Homo sapiens
aatcttagggtgctccatcaattgatacatagcattgtatacattttaaataaagcattagaaagctgggcctggtggcatgtgcttataatcccagctatttgggaggctgaggcaggaggattcctggagcccaagagttcaaaaccagcctgggcaacacagtgagactccatctcaaaaaaaatgaaaaaagaaagcattataagatcagttataacttagaaatcatcctcagaggctgggcgtggttgcttacgcctataaccctagcactgtaggaggctgaggcaggaagattgcttgagcccagttcaagaccagcctgggcaacatagtgagaccttgcctctacaaatgatttttaaaaattaactgagcatggtggcacagacctgtggtcccagctactcaggaggctgaggtgggaggatcacttgagcccaggaggtcgaggctgcagtgagccatgattccaacccgggtgacagagcaagatctcatctcaaaaaaaaaatgaaagaaagaaattgtcctcagagacaaaagaaaaactttggtaaagagaaaagattggagtcactcagctgtcaggtcggtaccacagtctgtctgatctctgcagcaccagggagttattaaacatttccaagtgagagggtgtcttatgtttaaaatgttagctatcacaaaagaggaaaagatagagcaaactgctacattagatgtatgtcatggggactcaaagaaggggaattttttaaacttcacaggggtagatcttttatctgggccatctgggcctagaggacaaataggattttggtagggtgaggcattccagcatcatgggcaaactggcgtagcacagcaggtcagtgatcttgaaaaatttggcaccttttgtcaagtaggaaagatagattgttactgtttatcttcacttatttcttttttattctttctcttactttctagtatgcttttctcagcatccacagataaaaccgtggctgtgtgggatagtgaaacaggtgagagggttaaaaggctaaagggacatacttcctttgtgaattcctgttatccagccaggagaggccctcagcttgtctgcactggcagtgacgatggcacagttaaggtgggtattgtctctccgtgttccagtttctgaggtgatgtgatgtgaaccttatcttgccttgccacttgtactctagcttcctgtgcaaaacttaattttagcagtcatytcccataacacacttgaaat

SEQ ID NO: 30026 - DNA, 550 bp, Homo sapiens
tcaagaagtcgagactagcctgaccaacatgaagaaaccccatctctactaaaaatacaaaattagctgggcgtggtggcacatgcctgtaatcccagctactcgggaggctgaagcaggagaatcgcttgaccgtgggaagcggaggttttggtgagccaagatcgcgccactgcactccagcctgggcaacaagagcgaaactctgtctcaaaacaaaacaaaacaaaacacgcacacacaaaaacaaaattagccgggygtggtggcacatgcctgtaatcccagctactcgggaggctgaggcaggagaattgcttgaacccggaggcagaggttggggtcagccaagattgtgccattgcactccagcctgggcaacaagatggaaactccgtctcaaaaaaaaaaaaaaggttgtagttcaaaagcaaagttgggagttggggtgggggaagactgagagccagaagatgaaccaagcttctgctctctcaacttcattcaagtgagaagggaaacagaagataatgggttaaaaaaaaatgac

SEQ ID NO: 30027 - DNA, 467 bp, Homo sapiens
tacacaatatatatataacatatatatacacaatatatatataacatatatacacaatatatataacatatatacacaatatatatataacatatatacacaatatatataacatatatataatatattatatatattaatttaagaatatttgggagtaaagaattatgatgtttgagctcagtgtggtggtgttcacctgtagcctcaggtactaaggaggttgagatgggagacttgcttgatcccaagagttcaagtccagtctgggcaacaaagcaagaccctatyttaaaaaaaaaagaaaattagggtcgggcgcagtggctttcacctgtaatcccagcactttgggaggctgaggtgggtggatcacaatatcaggagatcaagaccatcctggccaacatggtgaaaccccatctttactaaaatacaaaaaatcacctgggcgtggtggcacgtgc

SEQ ID NO: 30028 - DNA, 1720 bp, Homo sapiens
gtttgctatgaaaaaataagaaataaaaataggccaggtgcagtggctcatgcctataatcccagcactctgggaggccaaggcaggcagatcacatgaggccaggagtttgagaccagcctggccaacatggtgaaaccccatctctactaaaaatacaaaaattagccgggcgtggtygtgcatgcctgtaatcttggctgctcgggaggctgaggcaccagatcccttgaacccagaaagcataggttgcagtgagccgagatcacaccactgcactccagcctgggtgacagagcaaaactctgtctcaaaacacacaaaaaaaattaaaaataaaacaaaactatttcacccagtactccataccaagcagagttgttgggaaagtcagttccatcatttgttaaatgagccaggccaaatgtggtggctcattcctataatcttagtgctttgggaggccaaggagggaggccaggattttgagaccagcctaggcaacgtagcaagacctcatctccacaaaaactaaaaaaattagcatggcatgctagttcatgcctgtagtcctggctactcaggaggctgaggcaggaggatcacttgagccaaggagtttgaagctgcagtgaaccatgatcacactactgcagtccagcctaggtgacagagtgagaccctatctccaaaaaaaagttggtcgtacaacaagagctgagagagtgaacaagagagtcattataacaggtagataatggaaagtttcagagagtgtcaagttggaggcattcatatgagaagagctaccattctgtaagtcagatgaaacccacttaatcattgttttcttggtcttttccctccactccccaccccctaattttgtagcctcctttgtctgtatgcagtagttaccttgtgcttctcttttgtttagggacctccaagatgttcctcccttcaagccccaatcatgctgctctctggacatgaaggggaagtctactgctgcaagttccaccccaacggatccaccttagcatctgcaggatttgaccgactgatatgtgaggcatagtttttgaatctggaataatttttcctgccagatagtgatttttttttttaaatcttgggtgccacagaaggtatcactctatgttggcaacataacaggctgcatggctaatatgctaaaattggggcatgaacatgctgaatgatcttgggtgtagaacttggagtccatggggtaaatacagaagccattattttactagttggaaagtgagttgttctggtttgagaatgtcttcctcatagaggcaaatctccagctaatttaccaaggcacttagcaatctagacataacaggttaatggcagtaatgaggagagaaataacttttattttcccaaaggtataaggtcctcttaattcacacccagaatcctagctagcatatgggaaggaaggaatcctaaagtggtaactcccttaaataatctacctgtacatcattaggatctactaccagatttccatttttgagaaataagaatttctcatacccatttttgagaagtaagtagaaaaagtcgttttatttatactccagcaaatgaagccagaaggaaaaaaaatcagatgcttctgttgctactttcttgccagattatgagatgaaatgagttatttggctcttttctgttaact

SEQ ID NO: 30029 - DNA, 1720 bp, Homo sapiens
gtttgctatgaaaaaataagaaataaaaataggccaggtgcagtggctcatgcctataatcccagcactctgggaggccaaggcaggcagatcacatgaggccaggagtttgagaccagcctggccaacatggtgaaaccccatctctactaaaaatacaaaaattagccgggcgtggttgtgcatgcctgtaatcttggctgctcgggaggctgaggcaccagatcccttgaacccagaaagcataggttgcagtgagccgagatcacaccactgcactccagcctgggtgacagagcaaaactctgtctcaaaacacacaaaaaaaattaaaaataaaacaaaactatttcacccagtactccataccaagcagagttgttgggaaagtcagttccatcatttgttaaatgagccaggccaaatgtggtggctcattcctataatcttagtgctttgggaggccaaggagggaggccaggattttgagaccagcctaggcaacgtagcaagacctcatctccacaaaaactaaaaaaattagcatggcatgctagttcatgcctgtagtcctggctactcaggaggctgaggcaggaggatcacttgagccaaggagtttgaagctgcagtgaaccatgatcrcactactgcagtccagcctaggtgacagagtgagaccctatctccaaaaaaaagttggtcgtacaacaagagctgagagagtgaacaagagagtcattataacaggtagataatggaaagtttcagagagtgtcaagttggaggcattcatatgagaagagctaccattctgtaagtcagatgaaacccacttaatcattgttttcttggtcttttccctccactccccaccccctaattttgtagcctcctttgtctgtatgcagtagttaccttgtgcttctcttttgtttagggacctccaagatgttcctcccttcaagccccaatcatgctgctctctggacatgaaggggaagtctactgctgcaagttccaccccaacggatccaccttagcatctgcaggatttgaccgactgatatgtgaggcatagtttttgaatctggaataatttttcctgccagatagtgatttttttttttaaatcttgggtgccacagaaggtatcactctatgttggcaacataacaggctgcatggctaatatgctaaaattggggcatgaacatgctgaatgatcttgggtgtagaacttggagtccatggggtaaatacagaagccattattttactagttggaaagtgagttgttctggtttgagaatgtcttcctcatagaggcaaatctccagctaatttaccaaggcacttagcaatctagacataacaggttaatggcagtaatgaggagagaaataacttttattttcccaaaggtataaggtcctcttaattcacacccagaatcctagctagcatatgggaaggaaggaatcctaaagtggtaactcccttaaataatctacctgtacatcattaggatctactaccagatttccatttttgagaaataagaatttctcatacccatttttgagaagtaagtagaaaaagtcgttttatttatactccagcaaatgaagccagaaggaaaaaaaatcagatgcttctgttgctactttcttgccagattatgagatgaaatgagttatttggctcttttctgttaact

SEQ ID NO: 30030 - DNA, 1119 bp, Homo sapiens
cagcaggactgagccccagttgcccacagtgataacctgctcattaatgcaaactttactggcttgctcccttctctgtctcgcttaccccatgtctttcttgtgctttctgaaatcacctcctataaaggctccttgtgcctaggtctttgttttaaggtctgccttagggaaacccaaattaagatagctcagagcagtctccatttttaaagttgttactcaggatattttcactgtgggcaaggaccatacccttcttttgtggctctgtattgcttggcatgttttgaggatctacattcaataactacttgctgaataactgatgttttgaggacagttttagtatttagataccagagaaggaagttctatgatatgtctgatgagattaattttctatttgcattcctgttaggttcaagtttgggacacacatgcataaaagcctgaacttcctttagaaactcgagcccaggaattaaaacttgtgaaaatgcaccaaaaattgggtttatttataaaaataacttcacacctcccttcatggattctactttgttgtggaatcacccatctattgaatgactaatactaacacacagagatgccaaaatataaactgtaagctacaaagttgtatatttttttcagtgatgcaaaaacttcaaactgaaactsaaacaacagatgtcctggtgcagaggtgaaagcagaagaagggaagaaagaaagggcctttgcttccttgaaactaagcaaatgatgagagcaaatcaggaatctagttaagtgaggcttatttcttccgaatatagttagctaggctcctgtttgtttttatcattcccagggatgatttggttactatagactatacaaacaataaaatcatatttaaaaaagtaagacatagaaagatatattaataatgtgtgagattcatattgaagattatatcagttagctattgccatgataatgcagtgtaattaaccacctccaaactcagtggttcaaaaccaccaccatctattcttgctcttatgcttatgggttggttgaagtggctctgcttcatgcatgtccattctaggactcaggatgaagagggat

SEQ ID NO: 30031 - DNA, 519 bp, Homo sapiens
agtgtgtgtgtgtaagcatgtgagagtctgagtgtgggggggagcgagcatgtgcgtgcgtgtgtgtgygcgcgcgcatgtgcgcgtcaaggagcagcaggaggtcaggatgcctcctgcccccccagagggagcagccttctttggctcaggtgccccaaggaaactctccagcaaccatcgtacttcatacccttcagcatgacacgtcctcgtatctgcccctggaaaagccgatgccagtcctgcggtcacaactgagcagcaagagcactgggaagggagaattcagagccttctgcttctagtataagagactttccacaaacaccaagaatacgcatgaactttcaaaatggcttgtgtatcatggaccttgaggaacatccaggctcacgagaattaacaaggaatgagataaacgagggcttattctttattgtggtaaaaggttatgggaagcttgaaactacagttagctcttgaatatctggacagtaatgtattcgttgatctcac

SEQ ID NO: 30032 - DNA, 1487 bp, Homo sapiens
ctcattagaacatctgataggtttcagatcatcagtgtaataacactagcagcaagcctctgaagttaaaacagaaactgacactttaataagtaaagctttcctctaggtaaagatcagaactccaactagcacttaactcactggaaatatcttaagagtctcaaaattcactgctttgaatccctgacaagtataaaaattttatactgaaaacttcatgctattcaaaacatttaaacagaaacatctgacttaaagcttacatttttaaaatcttttttatgcttctaaatttgtttttattcaaatatggataccaacaataacatttatgtcaatgccttctgttcaatattgaacaaatagaattaggaataagaataatatgagtacatccaatcattgaatgtactttatttccagtattccattaaatgtacctgctctcaatgtctgtacatactttctttgtactgctcctttcacagcaggatcttccacttcagtgctaggctgaatgggttttaaaagataacgattcataaatcatatatattttatacaacatggagttagtgattcaaaaatatacataattaattaccttcaaggaaggatgttttgcaggaggccctacaaagcaaaggggatatgtcatcaattatatgtaagtatgacaaggccaaccaaacattcatgcagtgttactgtcgagctgaattctcaggcctggctataaaaataattacttaaggttttgagggttcttcttggcttcttcttttcattgcctaggacagcaacatgacagaaacacaatgaggaaaataggaatataggattcccaaaatgcacagtttatatttcagtagtgagattatgtttcaaatgcctatacttaaaatagaaaagcattgatataaccgtgaacaygtggactgatgaggagaaaagggaccattaaacagaggggcaaatcaaacctgagagaatcaatgtcaaagctgatggtgaatgtacagagtattttaactccacacaccagaggcattgctgccagcacagcacaaataaattccccttgtcttgtcactgaggaaatacgcagttgggatgacagttcaggtgaatgtgtgattcacctctcatcaaagaaagggttctacattgatcagctaggatacacacttatgaaataacagctaatcaaactactcatttttcccatgatcacatgggctactgcagcacctacatttctcctatcccctcatttggccttgaattagagctccttgatccactcatgcaaggtggtccataaaacacatcaaataaaccatgtcgaataagcttctgatatgaaaatatttatcaaaaaagaaaacattgaatgaccacagacttgctggatattaatacatatttatatttcaaaatcagtgcagtatttattgaaaatgataattttggttttcatggaa

SEQ ID NO: 30033 - DNA, 1487 bp, Homo sapiens
ctcattagaacatctgataggtttcagatcatcagtgtaataacactagcagcaagcctctgaagttaaaacagaaactgacactttaataagtaaagctttcctctaggtaaagatcagaactccaactagcacttaactcactggaaatatcttaagagtctcaaaattcactgctttgaatccctgacaagtataaaaattttatactgaaaacttcatgctattcaaaacatttaaacagaaacatctgacttaaagcttacatttttaaaatcttttttatgcttctaaatttgtttttattcaaatatggataccaacaataacatttatgtcaatgccttctgttcaatattgaacaaatagaattaggaataagaataatatgagtacatccaatcattgaatgtactttatttccagtattccattaaatgtacctgctctcaatgtctgtacatactttctttgtactgctcctttcacagcaggatcttccacttcagtgctaggctgaatgggttttaaaagataacgattcataaatcatatatattttatacaacatggagttagtgattcaaaaatatacataattaattaccttcaaggaaggatgttttgcaggaggccctacaaagcaaaggggatatgtcatcaattatatgtaagtatgacaaggccaaccaaacattcatgcagtgttactgtcgagctgaattctcaggcctggctataaaaataattacttaaggttttgagggttcttcttggcttcttcttttcattgcctaggacagcaacatgacagaaacacaatgaggaaaataggaatataggattcccaaaatgcacagtttatatttcagtagtgagattatgtttcaaatgcctatacttaaaatagaaaagcattgatataaccgtgaacatgtggactgatgaggagaaaagggaccattaaacagaggggcaaatcaaacctgagagaatcaatgtcaaagctgatggtgaatgtacagagtattttaactccacacaccagaggcattgctgccagcacagcacaaataaattccccttgtcttgtcactgaggaaatacgcagttgggatgacagttcagrtgaatgtgtgattcacctctcatcaaagaaagggttctacattgatcagctaggatacacacttatgaaataacagctaatcaaactactcatttttcccatgatcacatgggctactgcagcacctacatttctcctatcccctcatttggccttgaattagagctccttgatccactcatgcaaggtggtccataaaacacatcaaataaaccatgtcgaataagcttctgatatgaaaatatttatcaaaaaagaaaacattgaatgaccacagacttgctggatattaatacatatttatatttcaaaatcagtgcagtatttattgaaaatgataattttggttttcatggaa

SEQ ID NO: 30034 - DNA, 1487 bp, Homo sapiens
ctcattagaacatctgataggtttcagatcatcagtgtaataacactagcagcaagcctctgaagttaaaacagaaactgacactttaataagtaaagctttcctctaggtaaagatcagaactccaactagcacttaactcactggaaatatcttaagagtctcaaaattcactgctttgaatccctgacaagtataaaaattttatactgaaaacttcatgctattcaaaacatttaaacagaaacatctgacttaaagcttacatttttaaaatcttttttatgcttctaaatttgtttttattcaaatatggataccaacaataacatttatgtcaatgccttctgttcaatattgaacaaatagaattaggaataagaataatatgagtacatccaatcattgaatgtactttatttccagtattccattaaatgtacctgctctcaatgtctgtacatactttctttgtactgctcctttcacagcaggatcttccacttcagtgctaggctgaatgggttttaaaagataacgattcataaatcatatatattttatacaacatggagttagtgattcaaaaatatacataattaattaccttcaaggaaggatgttttgcaggaggccctacaaagcaaaggggatatgtcatcaattatatgtaagtatgacaaggccaaccaaacattcatgcagtgttactgtcgagctgaattctcaggcctggctataaaaataattacttaaggttttgagggttcttcttggcttcttcttttcattgcctaggacagcaacatgacagaaacacaatgaggaaaataggaatataggattcccaaaatgcacagtttatatttcagtagtgagattatgtttcaaatgcctatacttaaaatagaaaagcattgatataaccgtgaacatgtggactgatgaggagaaaagggaccattaaacagaggggcaaatcaaacctgagagaatcaatgtcaaagctgatggtgaatgtacagagtattttaactccacacaccagaggcattgctgccagcacagcacaaataaattccccttgtcttgtcactgaggaaatacgcagttgggatgacagttcaggtgaatgtgkgattcacctctcatcaaagaaagggttctacattgatcagctaggatacacacttatgaaataacagctaatcaaactactcatttttcccatgatcacatgggctactgcagcacctacatttctcctatcccctcatttggccttgaattagagctccttgatccactcatgcaaggtggtccataaaacacatcaaataaaccatgtcgaataagcttctgatatgaaaatatttatcaaaaaagaaaacattgaatgaccacagacttgctggatattaatacatatttatatttcaaaatcagtgcagtatttattgaaaatgataattttggttttcatggaa

SEQ ID NO: 30035 - DNA, 1487 bp, Homo sapiens
ctcattagaacatctgataggtttcagatcatcagtgtaataacactagcagcaagcctctgaagttaaaacagaaactgacactttaataagtaaagctttcctctaggtaaagatcagaactccaactagcacttaactcactggaaatatcttaagagtctcaaaattcactgctttgaatccctgacaagtataaaaattttatactgaaaacttcatgctattcaaaacatttaaacagaaacatctgacttaaagcttacatttttaaaatcttttttatgcttctaaatttgtttttattcaaatatggataccaacaataacatttatgtcaatgccttctgttcaatattgaacaaatagaattaggaataagaataatatgagtacatccaatcattgaatgtactttatttccagtattccattaaatgtacctgctctcaatgtctgtacatactttctttgtactgctcctttcacagcaggatcttccacttcagtgctaggctgaatgggttttaaaagataacgattcataaatcatatatattttatacaacatggagttagtgattcaaaaatatacataattaattaccttcaaggaaggatgttttgcaggaggccctacaaagcaaaggggatatgtcatcaattatatgtaagtatgacaaggccaaccaaacattcatgcagtgttactgtcgagctgaattctcaggcctggctataaaaataattacttaaggttttgagggttcttcttggcttcttcttttcattgcctaggacagcaacatgacagaaacacaatgaggaaaataggaatataggattcccaaaatgcacagtttatatttcagtagtgagattatgtttcaaatgcctatacttaaaatagaaaagcattgatataaccgtgaacatgtggactgatgaggagaaaagggaccattaaacagaggggcaaatcaaacctgagagaatcaatgtcaaagctgatggtgaatgtacagagtattttaactccacacaccagaggcattgctgccagcacagcacaaataaattccccttgtcttgtcactgaggaaatacgcagttgggatgacagttcaggtgaatgtgtgattcacctctcatcaaagaaagggttctacattgatcagctaggatacacacttatgaaataacagctaatcaaactactcatttttcccatgatcacatgggctactgcagcacctacatttctcctatcccctcatttggccttgaattagagctccttgatccactcatgcaaggtggtccataaaacacatcaaataaaccatgtcgaataagcttctgatatsaaaatatttatcaaaaaagaaaacattgaatgaccacagacttgctggatattaatacatatttatatttcaaaatcagtgcagtatttattgaaaatgataattttggttttcatggaa

SEQ ID NO: 30036 - DNA, 1380 bp, Homo sapiens
atgaacctggtacctcagttggaaatgcagaaatcacccgtcttctgcatcactcacgctgggagctgtagactggagctgttcctattcggccatcttggctccaccctctaatttttaactttcaaaagattagatacatttaccctcttctgaattttaattcctgatggaaagattgtgaaatctcaagaggataatgaatcagcttctgattatattctggaattgcgattttatcacacatccaagaatgcgtattcactttcctttacattacacacatgcataataccatgctgagtgatgctggaaaaagtgagtcttcagtaatgccctcatgaaattacagtctcactacactgaggtattttctttttaaccctttctttcttttctgytgtgaatatgtgtcttctaagaggtgaacaatgggaaaaactgaaaaagaaccttcatctaattcagtaactagcttttgtatcttctaagaatttttatctccagaaagctctaattttcattcctttacaagctttatttctctctcctttccaacaccagactttgctctgtttgttttctatatcttttttagagatgcctacaatagaaaaaaactatgacatattcaatacatctgaaaagtttgcattaccatagataagaatgaattatctgtttataaagaaaaaacaataaaaatatgaaccaagaaagcacagaaggtagtaaccacatttagatgtttatcatggaatcatctttataatccatctgttacaattccacagagcaaattacaagtaattgtgaagtttcccctcattttataggtttggtcttataaggcatacaacacaaattttaattacttttctttttggtatttggatcttaatttggtcaagtggccactgggtagatgatggagcctcttgagacatacagtcttcttctagctttgttgatgtgaatattactgtgtatttttcattcacttattattttacaaggcatacttcattaaaaatatatcagcatctcattgacaaatcacaaaatttaaaaggcaccagaaaaaaacaatttatttaaaacattcctgtgtaaaagtagtcaccactcttactattcttcaaatatttttattatatttaaacacaagcctagttttatctcgagtgtctgaccttgatgatattgtacactttaaacttagaaaaattgaactctattggaaatttcctacagatcagcttttctagatgccaagtgccttgtttcagccatggtgatgacagcaaattgggttctcagggattctggcctctggcatcatctcagttgtttataattgaagttgggtctgatgagaac

SEQ ID NO: 30037 - DNA, 1380 bp, Homo sapiens
atgaacctggtacctcagttggaaatgcagaaatcacccgtcttctgcatcactcacgctgggagctgtagactggagctgttcctattcggccatcttggctccaccctctaatttttaactttcaaaagattagatacatttaccctcttctgaattttaattcctgatggaaagattgtgaaatctcaagaggataatgaatcagcttctgattatattctggaattgcgattttatcacacatccaagaatgcgtattcactttcctttacattacacacatgcataataccatgctgagtgatgctggaaaaagtgagtcttcagtaatgccctcatgaaattacagtctcactacactgaggtattttctttttaaccctttctttcttttctgctgtgamtatgtgtcttctaagaggtgaacaatgggaaaaactgaaaaagaaccttcatctaattcagtaactagcttttgtatcttctaagaatttttatctccagaaagctctaattttcattcctttacaagctttatttctctctcctttccaacaccagactttgctctgtttgttttctatatcttttttagagatgcctacaatagaaaaaaactatgacatattcaatacatctgaaaagtttgcattaccatagataagaatgaattatctgtttataaagaaaaaacaataaaaatatgaaccaagaaagcacagaaggtagtaaccacatttagatgtttatcatggaatcatctttataatccatctgttacaattccacagagcaaattacaagtaattgtgaagtttcccctcattttataggtttggtcttataaggcatacaacacaaattttaattacttttctttttggtatttggatcttaatttggtcaagtggccactgggtagatgatggagcctcttgagacatacagtcttcttctagctttgttgatgtgaatattactgtgtatttttcattcacttattattttacaaggcatacttcattaaaaatatatcagcatctcattgacaaatcacaaaatttaaaaggcaccagaaaaaaacaatttatttaaaacattcctgtgtaaaagtagtcaccactcttactattcttcaaatatttttattatatttaaacacaagcctagttttatctcgagtgtctgaccttgatgatattgtacactttaaacttagaaaaattgaactctattggaaatttcctacagatcagcttttctagatgccaagtgccttgtttcagccatggtgatgacagcaaattgggttctcagggattctggcctctggcatcatctcagttgtttataattgaagttgggtctgatgagaac

SEQ ID NO: 30038 - DNA, 1380 bp, Homo sapiens
atgaacctggtacctcagttggaaatgcagaaatcacccgtcttctgcatcactcacgctgggagctgtagactggagctgttcctattcggccatcttggctccaccctctaatttttaactttcaaaagattagatacatttaccctcttctgaattttaattcctgatggaaagattgtgaaatctcaagaggataatgaatcagcttctgattatattctggaattgcgattttatcacacatccaagaatgcgtattcactttcctttacattacacacatgcataataccatgctgagtgatgctggaaaaagtgagtcttcagtaatgccctcatgaaattacagtctcactacactgaggtattttctttttaaccctttctttcttttctgctgtgaatatgtgycttctaagaggtgaacaatgggaaaaactgaaaaagaaccttcatctaattcagtaactagcttttgtatcttctaagaatttttatctccagaaagctctaattttcattcctttacaagctttatttctctctcctttccaacaccagactttgctctgtttgttttctatatcttttttagagatgcctacaatagaaaaaaactatgacatattcaatacatctgaaaagtttgcattaccatagataagaatgaattatctgtttataaagaaaaaacaataaaaatatgaaccaagaaagcacagaaggtagtaaccacatttagatgtttatcatggaatcatctttataatccatctgttacaattccacagagcaaattacaagtaattgtgaagtttcccctcattttataggtttggtcttataaggcatacaacacaaattttaattacttttctttttggtatttggatcttaatttggtcaagtggccactgggtagatgatggagcctcttgagacatacagtcttcttctagctttgttgatgtgaatattactgtgtatttttcattcacttattattttacaaggcatacttcattaaaaatatatcagcatctcattgacaaatcacaaaatttaaaaggcaccagaaaaaaacaatttatttaaaacattcctgtgtaaaagtagtcaccactcttactattcttcaaatatttttattatatttaaacacaagcctagttttatctcgagtgtctgaccttgatgatattgtacactttaaacttagaaaaattgaactctattggaaatttcctacagatcagcttttctagatgccaagtgccttgtttcagccatggtgatgacagcaaattgggttctcagggattctggcctctggcatcatctcagttgtttataattgaagttgggtctgatgagaac

SEQ ID NO: 30039 - DNA, 1380 bp, Homo sapiens
atgaacctggtacctcagttggaaatgcagaaatcacccgtcttctgcatcactcacgctgggagctgtagactggagctgttcctattcggccatcttggctccaccctctaatttttaactttcaaaagattagatacatttaccctcttctgaattttaattcctgatggaaagattgtgaaatctcaagaggataatgaatcagcttctgattatattctggaattgcgattttatcacacatccaagaatgcgtattcactttcctttacattacacacatgcataataccatgctgagtgatgctggaaaaagtgagtcttcagtaatgccctcatgaaattacagtctcactacactgaggtattttctttttaaccctttctttcttttctgctgtgaatatgtgtcttctaagaggtgaacaaygggaaaaactgaaaaagaaccttcatctaattcagtaactagcttttgtatcttctaagaatttttatctccagaaagctctaattttcattcctttacaagctttatttctctctcctttccaacaccagactttgctctgtttgttttctatatcttttttagagatgcctacaatagaaaaaaactatgacatattcaatacatctgaaaagtttgcattaccatagataagaatgaattatctgtttataaagaaaaaacaataaaaatatgaaccaagaaagcacagaaggtagtaaccacatttagatgtttatcatggaatcatctttataatccatctgttacaattccacagagcaaattacaagtaattgtgaagtttcccctcattttataggtttggtcttataaggcatacaacacaaattttaattacttttctttttggtatttggatcttaatttggtcaagtggccactgggtagatgatggagcctcttgagacatacagtcttcttctagctttgttgatgtgaatattactgtgtatttttcattcacttattattttacaaggcatacttcattaaaaatatatcagcatctcattgacaaatcacaaaatttaaaaggcaccagaaaaaaacaatttatttaaaacattcctgtgtaaaagtagtcaccactcttactattcttcaaatatttttattatatttaaacacaagcctagttttatctcgagtgtctgaccttgatgatattgtacactttaaacttagaaaaattgaactctattggaaatttcctacagatcagcttttctagatgccaagtgccttgtttcagccatggtgatgacagcaaattgggttctcagggattctggcctctggcatcatctcagttgtttataattgaagttgggtctgatgagaac

SEQ ID NO: 30040 - DNA, 1380 bp, Homo sapiens
atgaacctggtacctcagttggaaatgcagaaatcacccgtcttctgcatcactcacgctgggagctgtagactggagctgttcctattcggccatcttggctccaccctctaatttttaactttcaaaagattagatacatttaccctcttctgaattttaattcctgatggaaagattgtgaaatctcaagaggataatgaatcagcttctgattatattctggaattgcgattttatcacacatccaagaatgcgtattcactttcctttacattacacacatgcataataccatgctgagtgatgctggaaaaagtgagtcttcagtaatgccctcatgaaattacagtctcactacactgaggtattttctttttaaccctttctttcttttctgctgtgaatatgtgtcttctaagaggtgaacaatgggaaaaactgaaaaagaaccttcatctaattcagtaactagcttttgtatcttctaagaatttttatctccagaaagctctaattttcattcctttacaagctttatttctctctcctttccaacaccagactttgctctgtttgttttctatatcttttttagagatgcctacaatagaaaaaaactatgacatattcaatacatctgaaaagtttgcattaccatagataagaatgaattatctgtttataaagaaaaaacaataaaaatatgaaccaagaaagcacagaaggtagtaaccacatttagatgtttatcatggaatcatctttataatccatctgttacaattccacagagcaawttacaagtaattgtgaagtttcccctcattttataggtttggtcttataaggcatacaacacaaattttaattacttttctttttggtatttggatcttaatttggtcaagtggccactgggtagatgatggagcctcttgagacatacagtcttcttctagctttgttgatgtgaatattactgtgtatttttcattcacttattattttacaaggcatacttcattaaaaatatatcagcatctcattgacaaatcacaaaatttaaaaggcaccagaaaaaaacaatttatttaaaacattcctgtgtaaaagtagtcaccactcttactattcttcaaatatttttattatatttaaacacaagcctagttttatctcgagtgtctgaccttgatgatattgtacactttaaacttagaaaaattgaactctattggaaatttcctacagatcagcttttctagatgccaagtgccttgtttcagccatggtgatgacagcaaattgggttctcagggattctggcctctggcatcatctcagttgtttataattgaagttgggtctgatgagaac

SEQ ID NO: 30041 - DNA, 677 bp, Homo sapiens
ctacaggtgcacatcaccacgcccagctaatttttgtatttttagtagagatggggtttccccatgttggccaggatggtcacgatctcctgaccttgtgatctgcttgctttggcctccccaagtgctgggattacaggtatgagccaccatgcctggmcattgtttaacctttgtactaataaaacactacctttctaaaatcatgtatatgcaatagatcaatattaactgcatttttgtcagattactctaaacagcattacacatatacatcctctgttatctaaacttaaaataagtagaaattttattttatttatgtgattatttttctatttaagcaaacttcaagtaatgtctagtcactaaaaatactaaaggccacattttgtaagtgatacatgattttcatgataatgtttcttgtttaatttagacattattattatttttacttattttagatggggctggactgtgtagaataaataattagagaaacaaagagaagtacgttgacaaaatttattaattaaatttaggtttattttagaaataaagtgtaaatagcaaatggcattccttttcattcttgggttagtagatactacatcaatattttttcttacacacatctaatgaaagatgtgaaaacaaaaactttcacagagaag

SEQ ID NO: 30042 - DNA, 538 bp, Homo sapiens
ctgaaaaatatagaactaacttaaatttttttataacaaaagctactcatcttgaaaaaatatttgcctatgaacatatatatttgtgctttgggcactgtaaactttaagctactgtttaaaaacatttctgagyggcaaataatgtctacagaaaatagtgtttgcaataatggtgtcattttacagtattttacaaactagcagtcctttcaatttgagggttagtatgcttaaatctaaaaattaaaatggaattctgtaaaataattctatataaattagcttactttaattcactaagattttactgattgttttgttttatagggaaaataaactcatatatgaagttctggctaataattcctcatgagatttgcttaaagaaattgttcagaagactgtgcttaaagtttggtttacttagatatggtgaaaataatttaaaatcaaaacacttcatttgtaataatagttataagagtcccaatgttaagagaagcaatctatttaaaacttgtatatatttttcatg

SEQ ID NO: 30043 - DNA, 519 bp, Homo sapiens
ccaaatcaaatgcacaggcactgcttccttagatgtctatatttcacttaaactgggataaagcaaagaaactggaatattgtctcatcatgcattctaaatcagccagggtagaaaataatggggagttaatcagatcactgaaactctaattcacttggtattgatcgggcagattcctaatgggatggcagaccaatttcaaattacagtaagccgacttgtcctggaataccaatgaccaggctggaggatgagccaagaggactgtgagctctgctctccggatgctcccgccttgctggcaggcataaatgcataatccagtgcrgcgtttagctaattaataggggattgatgaaaggttcagttttgaaagcagccatctcacttgaataaacgtgggaccagatccccatggggaaggctagtgggtccttggaaagtaagtatacaatgaaagctaatggaaagtatgcaattaactcaggcttttaattatattaatcagtgacttca

SEQ ID NO: 30044 - DNA, 1186 bp, Homo sapiens
ccatgctatgaggaagtccaagctgccacatggaaaatctgaacacctgaggctgatgtcccactatcaccagtctctatgtaggtattcagaccaacagccccaactaaggtccaacaagatgtgtgagtgaacaagtctttagatctttccagccctagctggaactatctgcctgtatttaccatcattgctgtacctgttggggsattctcccatctcatgcctcaaccaggatgagagattgcagtgcccttgggtcctgttccttttctgtcttgctgactatgcctcaccaccatcaaacacactaggctacacccaaaccctgtccttcctctcacctgctttgatttgctatgataaactgcactgccttatagctgaatctcaaaatagtacaaacacagtggtgcacaacatgactataattaggcagtaaataaggagaatgaagtcatagtctaatacttgacacttggcaatataatctgttgagatgagcctgagacgtctgattttttttttttttttggcacctaaatctaagcaaattgcactatgtctccatctccacattggtatagtacaaggaccaacgatcaatagatgacaagcttttacaaatctccagcttcacttggtagaaccccaaaccagatacaattgcctcagacccctctgtaggcaatccaggattccctatcaggagggaagtgcagccagcaacaacttcctggtcagtagctaccactcctcccacacactcagtctcctttggacctgagatctcaagccttcaaagaagtgagatgttctccttctcccaaaatgccatctggcacacagcccctaagcctctgctctctacttccttctgccaggcaatgccatcaacgcttttcttactgaaaggccatgtgttacacagtactacaataatcctcaagatactgaaagtaatgccaagtgaaagaccaagggggtgggtggagggctaatgggctggacgaaatagccacttgattgctagttcatacaagatgtggcagcaactccttttctggctggagatcttggatgtcacatcttagaatcaggtggcaaagcatctgtgaagggcaatgtggcatcccagacagtgggtggtgagatcaggaagaaaaaatggaaatcaacagatggt

SEQ ID NO: 30045 - DNA, 1186 bp, Homo sapiens
ccatgctatgaggaagtccaagctgccacatggaaaatctgaacacctgaggctgatgtcccactatcaccagtctctatgtaggtattcagaccaacagccccaactaaggtccaacaagatgtgtgagtgaacaagtctttagatctttccagccctagctggaactatctgcctgtatttaccatcattgctgtacctgttgggggattctcccatctcatgcctcaaccaggatgagagattgcagtgcccttgggtcctgttccttttctgtcttgctgactatgcctcaccaccatcaaacacactaggctacacccaaaccctgtccttcctctcacctgctttgatttgctatgataaactgcactgccttatagctgaatctcaaaatagtacaaacacagtggtgcacaacatgactataattaggcagtaaataaggagaatgaagtcatagtctaatacttgacacttggcaatataatctgttgagatgagcctgagacgtctgattttttttttttttttggcacctaaatctaagcaaattgcactatgtctccatctccacattggtatagtacaaggaccaacgatcaatagatgacaagcttttacaaatctccagcttcacttggtagaaccccaaaccagatacaattgcctcagacccctctgtaggcaatccaggattccctatcaggagggaagtgcagccagcaacaacttcctggtcagtagctaccactcctcccacacactcagtctcctttggacctgagatctcaagccttcaaagaagtgagatgttctccttctcccaaaatgccatctggcacacagcccctaagcctmtgctctctacttccttctgccaggcaatgccatcaacgcttttcttactgaaaggccatgtgttacacagtactacaataatcctcaagatactgaaagtaatgccaagtgaaagaccaagggggtgggtggagggctaatgggctggacgaaatagccacttgattgctagttcatacaagatgtggcagcaactccttttctggctggagatcttggatgtcacatcttagaatcaggtggcaaagcatctgtgaagggcaatgtggcatcccagacagtgggtggtgagatcaggaagaaaaaatggaaatcaacagatggt

SEQ ID NO: 30046 - DNA, 1209 bp, Homo sapiens
ctcaaacatatgctttaggcaattatagttcttctgtttagcacacaggaaaagtgggtcaccagacagatttagtaatgggcccaatgttgcatacttatgatagttcctgtattcaacaggtgagtgcagaaacgtattttattcttcttatgacccttatatcagttgcaaaagtccctgagtcacagtaggtcttcttttctgaaattttattttttatgtttgaatttatatttgtgaaatggaaatacgtttgaaagtccaggagactctcctcttcccaagcattttctctctagctttttattgttgcataaaacccatccaataggcctctattaagtaggattgagtatgattgtctatttatatacaaatatctccaaagaaggtggtgagtttggtaatagatttagctattaaatcttttcatacattaaccaaagccaaagttataagttttcatattaaccggttcaaatgttcatctatgagcattgttctaatgcctgaaacgagcactacttcaagtacttctttgtcactaaaagctattcaattctactgaaggtcagttattcaagcttcatcttatgtactttttttttatcaaagttaattatgactgaaggtttgcctctatgatgtatgaatctggttttgtgctgtgttatcgtacagagaagataaaggcagatcacttggattcaaattctagagtttccactcattatgtgtgatcctaaacaagttatttaaacttctctcaatttcttcatctgtaaagtggagataataatggtaccaaccttatagagttattatgaggttaaaattagttaatatttataaagtgcttagaagtasgtcacagagaagcccacataagcagtcattaattaaatagaccataatgatctaagacctcatcagcacaattgtacatgcttttatttggagagttttataagaactataattttcctactttactaatgggaaaactgaagcctggagaaatattagtgatttgtctaagttaacactgttaattaatcacagaactggacttctggactaatcacagaagtcctaaatcttctgatccttgacacagcttttactcctgtgcacctgtaccaacaaagttaaaatttttacaaccaaataggtctgtagtttcaaatgatagtaatacacatttca

SEQ ID NO: 30047 - DNA, 1101 bp, Homo sapiens
caccaacagggcacaaaggtcacaattttttaacatccttgccaacacctcttatttgtgttttattaataatggccatccaaataagtgtgaagttaattcctttttccagttgttagtgtgtaaaactgcaactgatgtttcagtattgattttgtatcttgcaactttgctgaattcattaattacttccaactgtgtgtgtgtgtttgggtgcaccactcagaatctttaagattttctaggtatgcgatcatatcctttatgaacaaagataaatctatttcttcctttccaatttggatgccttttgatttctttttcttgtgtaattgctctggctaagacttctagcactacgttgaattaaaatggtgaaaatgggcatctttgtcttgttcctgatcagtggggcaattcttctggatgagtaaagtgatttatgtactatgttctgcagaaccccagggttcttggaattttcattagactataatctccagggttgagtgagaagtgtgtgagtgtgccttctaacaccacatcacacagaatagctgtgtttttatcttttgcatattgggtttatttataaaatttaatagagkcaaagaagttcacaactcaagaaactaggaaagccatttgattaaaactgtcatctgagacaggtgtgatgatatatgcctgcagttccagctatttgagagtctgaggcaggaaaatctcttgagtccaggagtttgagtccagccggggcaacataatgagactctatatctatttaaaaacaaaaaccaaaaacaaacgaacattaagaacattgttaactaaaagtctctaaaaactaaagtcttttacccatgaaagaaaaggtatgaaaacattgtctttcattattagagtaaaacattcatgatcagatacctaagttcactcttgcataatagagaacagagtcctgagggatttggacatagacagaagatctggagacacatttctttgctgaatagcatgtgtcactgtaatagggcaagatataaacacacttgacttagagagaccacaaaaaagtattaggaagagcagcaaattaaa

SEQ ID NO: 30048 - DNA, 482 bp, Homo sapiens
gccacttctctytctgcagctgccaccatctttacagcagaaccagcagagctataatgagcagtgttggtgcctggggcaaagctccacagatcaactctgtaataaatgatgtggctcaccgctggggcttcctgcaaacccagccatccgatttcaaccagccattcttgctaactaggtgctaaactcagcagttgctaaaagaagacaagaggtgtcaacttaattgattttttttacaattccaggccttttaaaattattttaaatgtctatgtgcactctaactcgcattccctgaggacagagccccattgcttgcccaagtccttttccagaagaggccagcacagggctctgtgaggagggaggtgggctgagtcaggaccaagtccaggcagagatgctcaggcccagcctagtacttacaggaccagaaaccgtctctgtgctgggaagtcgcctctgagcctctgcca

SEQ ID NO: 30049 - DNA, 721 bp, Homo sapiens
tgctgaagagaatacatccaagttcttcttttacttaattaaaaaataaatgccacggcctgagtacttttaaattaggcttattaaactgcagaccacactctgagtgcatattaacgtgctctcgagctctccattttatttaatatctctaggaataaatgtgatgwaattacacttaatatttcagttgatggcagaggaagttagattaggcaagcttgctggaaattaaaaactaaatagcagcccatgaatcactcccattcaggcacaaatcatttcttttacattttccattttctatctcaatcgcttttcaagttatgaccctctgattttgaaatcactcatctaaaggaataaaaggctgtaaaacccaaatcattccactacctttgacctgtcataatctgtcgtatgcctgtcgagtctgcctgtttggtcacagtgttcggtcagtcagtttccagagactggcatacagcagtgtactctctggggacgcagtggggtgtgtcccacctggatgtccctcgtacttctcttagaagggtccaagtcccacttgcccagcaagaggcattcggttcaccatgtgacactttcgtttctggcctgatatggtaacaataccaaggatctgctcctgctgagctctgtgctggccaccaagaccccagagatgaggagccatccccaccctcaaaggccacaggca

SEQ ID NO: 30050 - DNA, 886 bp, Homo sapiens
atcccgaagttgagcagaggctggcaggacagttagtggggaagaacctgtatccttggtgacagcaatgaaccacctgacgaatcccttggggagccatttcatatccagacttgttgttacaggagataacatatttactttctaaaaaatactttcccttgtgttcttgtgttatcgttctttccctcctcctcctcctcctcctcctttcttcttcttcttcatcctcttcctcttcctcctctccttcttcttcttcttcttcttttcttttctctctctctcctctctctctctctctgtctctgtctctctcaactggaaacattctyacagatacattaatcagttcctttcttagtaaatccagggtagtgagtcagggtataaataacagtgataacaacaacagtagtagtacacactgacattgatcagtcatggatggagcatgatctgtgctaagtgctgcgcatgaactttatctcactcccttccccaagaggtgctcttatcctttcattttccagatgaggaaattggggactagaaagcatacgcagtgtagtgcaggaaaaatatcttttccttctactcctctaagactcatctggggcccctgtaacagaaggcagattaacaagagaaacacatactaatttatttaatatatgtattttacatgacacaggagagtatgagaaagtgaagacccaaagaagttgttaaacctgaatgtatttatgctaggtttgatgaagaatggagattcttgggaaaatgtgacaggacaaaagaaaggtaggaagtaagagtggtcagctggggaagacaacaagcctgcatctaggttcctctacatgtccttgtgacttggagataa

SEQ ID NO: 30051 - DNA, 886 bp, Homo sapiens
atcccgaagttgagcagaggctggcaggacagttagtggggaagaacctgtatccttggtgacagcaatgaaccacctgacgaatcccttggggagccatttcatatccagacttgttgttacaggagataacatatttactttctaaaaaatactttcccttgtgttcttgtgttatcgttctttccctcctcctcctcctcctcctcctttcttcttcttcttcatcctcttcctcttcctcctctccttcttcttcttcttcttcttttcttttctctctctctcctctctctctctctctgtctctgtctctctcaactggaaacattctcacagatacattaatcagttcctttcttagtaaatccagggtagtgagtcagggtataaataacagtgataacaacaacagtagtagtacacactgacattgatcagtcatggatggagcatgatctgtgctaagtgctgcgcatgaactttatctcactcccttccccaagaggtgctcttatcctttcattttccagatgaggaaattggggactagaaagcatacgcagtgtagtgcaggaaaaatatcttttccttctmctcctctaagactcatctggggcccctgtaacagaaggcagattaacaagagaaacacatactaatttatttaatatatgtattttacatgacacaggagagtatgagaaagtgaagacccaaagaagttgttaaacctgaatgtatttatgctaggtttgatgaagaatggagattcttgggaaaatgtgacaggacaaaagaaaggtaggaagtaagagtggtcagctggggaagacaacaagcctgcatctaggttcctctacatgtccttgtgacttggagataa

SEQ ID NO: 30052 - DNA, 605 bp, Homo sapiens
gtctttattaggatatttcwccataaatctaaatttcatcaatctttctttaaatatctctacacaatgtcctcttgtattatattaataattgcagatacacttctttttgctatttctattctttcctattcctattgtctgttagtctcccattttctcccataaaataaataaaaatttttctatcagattctgtgatatattacttcttattcccagccttcaacattttaagaattcatattgaccttttctcccattcttatttcaagttatcagcatgttgatacttgggaaatcccatcaagtgtttaacagtgcataccttactgattcattatttatttcaatttaatctttcttattttcattcaacttttttctcagtaatacaactttttcaagctttttattttctaatgcatttctccaaatagcagccataacccttatatgccctctttcaatgacaacaacaaaagtgtgctaggcttcttggaagaaaataatgataccaattcaagaaggagaaaattgatgtactgataaacaaatgggcatcttaggatcatgtttctcacaagtaaggcagttccagaaat

SEQ ID NO: 30053 - DNA, 605 bp, Homo sapiens
gtctttattaggatatttctccataaatctaaatttcatcaatctttctttaaatatctctacacaatgtcctcttgtattatattaataattgcagatacacttctttttgctatttctattctttcctattcctattgtmtgttagtctcccattttctcccataaaataaataaaaatttttctatcagattctgtgatatattacttcttattcccagccttcaacattttaagaattcatattgaccttttctcccattcttatttcaagttatcagcatgttgatacttgggaaatcccatcaagtgtttaacagtgcataccttactgattcattatttatttcaatttaatctttcttattttcattcaacttttttctcagtaatacaactttttcaagctttttattttctaatgcatttctccaaatagcagccataacccttatatgccctctttcaatgacaacaacaaaagtgtgctaggcttcttggaagaaaataatgataccaattcaagaaggagaaaattgatgtactgataaacaaatgggcatcttaggatcatgtttctcacaagtaaggcagttccagaaat

SEQ ID NO: 30054 - DNA, 605 bp, Homo sapiens
gtctttattaggatatttctccataaatctaaatttcatcaatctttctttaaatatctctacacaatgtcctcttgtattatattaataattgcagatacacttctttttgctatttctattctttcctattcctattgtctgttagtctcccattttctcccataaaataaataaaaatttttctatcagattctgtgatatattacttcttattcccagccttcaacattttaagaattcakattgaccttttctcccattcttatttcaagttatcagcatgttgatacttgggaaatcccatcaagtgtttaacagtgcataccttactgattcattatttatttcaatttaatctttcttattttcattcaacttttttctcagtaatacaactttttcaagctttttattttctaatgcatttctccaaatagcagccataacccttatatgccctctttcaatgacaacaacaaaagtgtgctaggcttcttggaagaaaataatgataccaattcaagaaggagaaaattgatgtactgataaacaaatgggcatcttaggatcatgtttctcacaagtaaggcagttccagaaat

SEQ ID NO: 30055 - DNA, 605 bp, Homo sapiens
gtctttattaggatatttctccataaatctaaatttcatcaatctttctttaaatatctctacacaatgtcctcttgtattatattaataattgcagatacacttctttttgctatttctattctttcctattcctattgtctgttagtctcccattttctcccataaaataaataaaaatttttctatcagattctgtgatatattacttcttattcccagccttcaacattttaagaattcatattgaccttttctcccattcttatttcaagttatcagcatgtygatacttgggaaatcccatcaagtgtttaacagtgcataccttactgattcattatttatttcaatttaatctttcttattttcattcaacttttttctcagtaatacaactttttcaagctttttattttctaatgcatttctccaaatagcagccataacccttatatgccctctttcaatgacaacaacaaaagtgtgctaggcttcttggaagaaaataatgataccaattcaagaaggagaaaattgatgtactgataaacaaatgggcatcttaggatcatgtttctcacaagtaaggcagttccagaaat

SEQ ID NO: 30056 - DNA, 605 bp, Homo sapiens
gtctttattaggatatttctccataaatctaaatttcatcaatctttctttaaatatctctacacaatgtcctcttgtattatattaataattgcagatacacttctttttgctatttctattctttcctattcctattgtctgttagtctcccattttctcccataaaataaataaaaatttttctatcagattctgtgatatattacttcttattcccagccttcaacattttaagaattcatattgaccttttctcccattcttatttcaagttatcagcatgttgatacttgggaaatcycatcaagtgtttaacagtgcataccttactgattcattatttatttcaatttaatctttcttattttcattcaacttttttctcagtaatacaactttttcaagctttttattttctaatgcatttctccaaatagcagccataacccttatatgccctctttcaatgacaacaacaaaagtgtgctaggcttcttggaagaaaataatgataccaattcaagaaggagaaaattgatgtactgataaacaaatgggcatcttaggatcatgtttctcacaagtaaggcagttccagaaat

SEQ ID NO: 30057 - DNA, 571 bp, Homo sapiens
agctgagtgcagaaaaaaatagaaaaagaaactatttttaaacaatgtgaatataaaatgaatatttaaggtacatgtacagttattatttcacatgcctctcagcaatggaatatagtttgagaattatagcttgtgtaattacatttactttcttcctgattatactgctattggtgagccagaaacttgtaaattattcaaacaagcataattttaactttcaagaagtaaagggatttgttggtgttgagatgtgcaagatgagatcagaataatgctgaatttgaggcacaatgctcattttttattgacaktttattaccaacagatggatagatttcttctccttggtttcagaaaccaagtcatatgtatttcccttttaaaaattgttcatttttaaatacagagcacatccccaaatgtaatataaaatataaactgtgtaactatatggtcaacccaatatcaccctcttgaggtaaaatttctgatacaagtattgatagatattactgatctgatatgcctttaattgactataagtaaaatgtgtaagaaatgcaca

SEQ ID NO: 30058 - DNA, 1161 bp, Homo sapiens
acctccattaaccaatcacctctcaccaggccccacttccaacactggaaattacaattcaacatgagaattgggtggggacatagacccaaaccatattacaagcctatgtgtgtgtgtatttttgagagagatatatatatatatgataatatgatatatgatcatatatatatcatacacacacatatgcaatatgaaacaatacactgtaatgttttaaaagtgatcttagggtataaataaggtggggggttttcttattcttatttatctgtatattctaattttccaggatgtttacttgctgcatttgcaataatgaaaattatattttaaagaaaaaataaaatccatttagtactttcattttgagcagtataaaagaatagaccactcccattgaaacaactaaaagtgctagataagacataaaaaccccttttaaaccttgtagtctgttttcacatggctgtaaagaactgcctgagactgggtaatttataaagaaaagtggtttgattcacagctctgcatggctggggaggccttaggaaacttataatcgtggcagaaggtgaaggggaagtaaagaatgtcttacatggcggcaggagggagagagtgatgggggaaactsccaatcactttcaaaccatcagatctcataagcactcactcactatcataagaatagcatggtggaaaccacccccatgatccaatcacttcccgccaggtccctccctccctacaatttgagatgagatttggtggagacacagagccaaaccgtatcaaacatattaatgaaagagaaaaaaaaagacttctctaaagtgaaaaaaaagtaaaaaaggaagccagtaaatttacttcagttgtgggcatgttaaaatttctagagttgacactaaaagcatagaaagagtgtagaacttctaaactagtagagatgaaaaatagaatagggcaggagaatccgaaaaaaaaaagaagaaacaaataacaaagacaaaagtgtatggtaaatatttacccaaatatatgttatgataataacgtaagtgaaccaaaggattcagtaaaaaaatgaagatgaccaaattggattaaaacatctaactacatagtttacaaaaggcacatataaaaggatcc

SEQ ID NO: 30059 - DNA, 1161 bp, Homo sapiens
acctccattaaccaatcacctctcaccaggccccacttccaacactggaaattacaattcaacatgagaattgggtggggacatagacccaaaccatattacaagcctatgtgtgtgtgtatttttgagagagatatatatatatatgataatatgatatatgatcatatatatatcatacacacacatatgcaatatgaaacaatacactgtaatgttttaaaagtgatcttagggtataaataaggtggggggttttcttattcttatttatctgtatattctaattttccaggatgtttacttgctgcatttgcaataatgaaaattatattttaaagaaaaaataaaatccatttagtactttcattttgagcagtataaaagaatagaccactcccattgaaacaactaaaagtgctagataagacataaaaaccccttttaaaccttgtagtctgttttcacatggctgtaaagaactgcctgagactgggtaatttataaagaaaagtggtttgattcacagctctgcatggctggggaggccttaggaaacttataatcgtggcagaaggtgaaggggaagtaaagaatgtcttacatggcggcaggagggagagagtgatgggggaaactcccaatcactttcaaaccatcagatctcataagcactcactcactatcataagaatagcatggtggaaaccacccccatgatccaatcacttcccgccaggtccctccctccctacaatttgagatgagatttggtggagacacagagccaaaccgtatcaaacatattaatgaaagagaaaaaaaaagacttctctaaagtgaaaaaaaagtaaaaaaggaagccagtaaatttacttcagttgtgggcatgttaaaatttctagagttgacactaaaagcatagaaagagtgtagaacttctaaactagtagagatgaaaaatagaatagggcaggagaatccgaaaaaaaaaagaagaaacaaataacaaagacaaaagtgtatggtaaatatttacccaaatatatgytatgataataacgtaagtgaaccaaaggattcagtaaaaaaatgaagatgaccaaattggattaaaacatctaactacatagtttacaaaaggcacatataaaaggatcc

SEQ ID NO: 30060 - DNA, 782 bp, Homo sapiens
ggctttagcagcagctatgttccatgtactgttcccagcactggggatattaggacatgagggcaaggggttgcctcttatgtttttcttttgtcttttgtttcaagctatttccccaagttttttcagtttaattattcacttcatctgccctatggccacagttccatggactggtagcaagtgaccagtacctgctctttgggatcatccatagctttgaaaactattgtctttctttggccaccccacatccctagcaagctacttttcccaggccttacaaagaccaaacctactccgctcctgtgacaggaatgcgtttcactctgtagaagtgggggttcaagatgctggcatctgactatgaacccttttccacctctacttctgctaaaaaacaaaaggactagatcataagatctgctgcgcactttccagaggaaaaaaaaatgttctttgtagcatagagaaccgaccaggaagcattgtgagaccttttccagtcagttctgatttattatacaaactccaggcctccaagagcaccaggtttcatggaactctctgcggtattttgaatccataagccaatgaatagatattatatctaaaccacaggaagcatctacttatctgtggtaagtgttgcgatgtccttcatttaataaaccacttagagacaccgtgtgactgaagtgaggaggactcygtattggagtttaacttgctcaggtgagctaaactcagtggaaattaaagagagatggtattttgtgttt

SEQ ID NO: 30061 - DNA, 499 bp, Homo sapiens
ttaactgggtaatagtttaaaacttttcaacttgattcttctaagattatctaacacgttatacataaagtaatatatattattattagcagaaatataatgagtttatacttcaagagtagggaactacttaaggagataaatgtaacatctgttaatttatttgcagtcagcctaatttaaaattttaaarcataataggtatttattttgttggtggttttgttttctaagaaatagtaagtcaaaactaataaaaaatcaactggttacattttcattataagtagtaatttatatgcaatattagaaacttcaaatattattttgtattggtgtacataaaaagtaattgtagaattaattattgactatttttcctttagtagtcaaaactattcatttatgattttaagtgtgcttggctttaagtatatactgactgcttaggaatttagctcttctcatacttcaaaacactttgaataaatagtaagtg

SEQ ID NO: 30062 - DNA, 499 bp, Homo sapiens
ttaactgggtaatagtttaaaacttttcaacttgattcttctaagattatctaacacgttatacataaagtaatatatattattattagcagaaatataatgagtttatacttcaagagtagggaactacttaaggagataaatgtaacatctgttaatttatttgcagtcagcctaatttaaaattttaaagcataataggtatttattttgttggtggttttgttttctaagaaatagtaagtcaaaactaataaaaaatcaactggttacattttcattataagtagtaatttatatgcaatattagaaacttcaaatattattttgtattggtgtacataaaaagtaattgtagaattaattattgactatttttcytttagtagtcaaaactattcatttatgattttaagtgtgcttggctttaagtatatactgactgcttaggaatttagctcttctcatacttcaaaacactttgaataaatagtaagtg

SEQ ID NO: 30063 - DNA, 1367 bp, Homo sapiens
tttctcttctgtaagtaatagttttcttctgagatggggagaataaaacactttctaagaagcacacgggaaaaaaacatactctgatgccctaagaacatcgtatttgggtatcctgtaatggaactgctgattatatacagtttctgagtgtagttgtcatcaggcaaggataaatctttgggtgctctgtgaccagaaccacacttagccacctgcttctccaggatagcacagcstgtggccatatgtgtgaaaacgccattctgaaaagctgaaagcttactcttttccccagaggacaagatgaaggtcaaaatatttatactaaccgctgcacaaaatactcaaatcgggcagcttcatgtattacatattttatccatttttattataagttaaaataagtaaataacatttgagcaaagtatgtacccaaaaagaaataactgattttttaaaaaatatatcactgttttggaaaagcaatggatggcatatcgatgatttaagaccatttactttctcaggctaaataaaatgttagctttttggttccaaaatagacgataagaagagtaaccattttccttgttctaatttttctgctaattgttaacaatttttaaagtacaaaattttcagagaaatgtgtcagtcaggttcataatggattcatgacaaagtcctacatgtttgaaaccaaatgtaaggagatatattgccccaccatgaggcaggataaggaaaagggaaaagataacactagaccaaaagatgctgaaatgaagatgcttttaagcaaaagttgatttaatttttaatttaaaattgtattgatatttctaagtacattaacccagttacaaataaatctgtgaattaaataatatgtaaaattgctggatcaaagaatatgtatatttgtaacttcaatagatattgccaaattgccctgtagaaatcctgtgcccatttatactcttatcaacagtctataagaaaagattgtttctccacattttctaacaaaaattattaccaagacttcttatgtttgctaatctgaaggataaataatgagagctcaatgtatttaaacttgtcctgctcttgtgagtgaagttgtacctcctttcacatgttgaagaggcacttatatttccttttccactatcttctcatctcttttacttatttttattggctcatcagtctttgccttattgaatgtgggagcttttccctccttttattgatatataataatttatgtatttatgaggtagatgtgtttgtaacatatgttgaatgtgtaatgaccaagtcaggttgtttgggctatccgtcttctcaactgtttatca

SEQ ID NO: 30064 - DNA, 1367 bp, Homo sapiens
tttctcttctgtaagtaatagttttcttctgagatggggagaataaaacactttctaagaagcacacgggaaaaaaacatactctgatgccctaagaacatcgtatttgggtatcctgtaatggaactgctgattatatacagtttctgagtgtagttgtcatcaggcaaggataaatctttgggtgctctgtgaccagaaccacacttagccacctgcttctccaggatagcacagcctgtggccatatgtgtgaaaacgccaytctgaaaagctgaaagcttactcttttccccagaggacaagatgaaggtcaaaatatttatactaaccgctgcacaaaatactcaaatcgggcagcttcatgtattacatattttatccatttttattataagttaaaataagtaaataacatttgagcaaagtatgtacccaaaaagaaataactgattttttaaaaaatatatcactgttttggaaaagcaatggatggcatatcgatgatttaagaccatttactttctcaggctaaataaaatgttagctttttggttccaaaatagacgataagaagagtaaccattttccttgttctaatttttctgctaattgttaacaatttttaaagtacaaaattttcagagaaatgtgtcagtcaggttcataatggattcatgacaaagtcctacatgtttgaaaccaaatgtaaggagatatattgccccaccatgaggcaggataaggaaaagggaaaagataacactagaccaaaagatgctgaaatgaagatgcttttaagcaaaagttgatttaatttttaatttaaaattgtattgatatttctaagtacattaacccagttacaaataaatctgtgaattaaataatatgtaaaattgctggatcaaagaatatgtatatttgtaacttcaatagatattgccaaattgccctgtagaaatcctgtgcccatttatactcttatcaacagtctataagaaaagattgtttctccacattttctaacaaaaattattaccaagacttcttatgtttgctaatctgaaggataaataatgagagctcaatgtatttaaacttgtcctgctcttgtgagtgaagttgtacctcctttcacatgttgaagaggcacttatatttccttttccactatcttctcatctcttttacttatttttattggctcatcagtctttgccttattgaatgtgggagcttttccctccttttattgatatataataatttatgtatttatgaggtagatgtgtttgtaacatatgttgaatgtgtaatgaccaagtcaggttgtttgggctatccgtcttctcaactgtttatca

SEQ ID NO: 30065 - DNA, 1367 bp, Homo sapiens
tttctcttctgtaagtaatagttttcttctgagatggggagaataaaacactttctaagaagcacacgggaaaaaaacatactctgatgccctaagaacatcgtatttgggtatcctgtaatggaactgctgattatatacagtttctgagtgtagttgtcatcaggcaaggataaatctttgggtgctctgtgaccagaaccacacttagccacctgcttctccaggatagcacagcctgtggccatatgtgtgaaaacgccattctgaaaagctgaaagcttactcttttccccagaggacaagatgaaggtcaaaatatttatactaaccgctgcacaaaatactcaaatcgggcagcttcatgtattacatattttatccatttttattataagttaaaataagtaaataacatttgagcaaagtatgtacccaaaaagaaataactgattttttaaaaaatatatcactgttttggaaaagcaatggatggcatatcgatgatttaagaccatttactttctcaggctaaataaaatgttagctttttggttccaaaatagacgataagaagagtaaccattttccttgttctaatttttctgctaattgttaacaatttttaaagtacaaaattttcagagaaatgtgtcagtcaggttcataatggattcatgacaaagtcctacatgtttgaaaccaaatgtaaggagatatattgccccaccatgaggcaggataaggaaaagggaaaagataacactagaccaaaagatgctgaaatgaagatgcttttaagcaaaagttgatttaatttttaatttaaaattgtattgatatttctaagtacattaacccagttacaaataaatctgtgaattaaataatatgtaaaattgctggatcaaagaatatgtatatttgtaacttcaatagatattgccaaattgccctgtagaaatcctgtgcccatttatactcttatcaacagtctataagaaaagattgtttctccacattttctaacaaaaattattaccaagacttcttatgtttgctaatctgaaggataaataatgagagctcaatgtatttaaacttgtcctgctcttgtgagtgaagttgtacctcctttcacatgttgaagaggcacttatatttccttttccactatcttctcatctcttttacttatttttattggctcatcagtctttgccttattgaatgtgggagcttttccctccttttattgatatataataatttatgtatttatgaggtagatgtgtttgtaayatatgttgaatgtgtaatgaccaagtcaggttgtttgggctatccgtcttctcaactgtttatca

SEQ ID NO: 30066 - DNA, 545 bp, Homo sapiens
tggtttcctcctgtcctatgaamtttgtactgatttctgccccaataaatttgattatatgaagaaaaaaatactttttttttaagatagggtttcactcctgttgcccaggctggagtgcagtggcacaatcttggctcactgcaaccttggcctcctcaactcaagagattcttgtgcctcagcctcccgagtaactgggactatgggtgcgccattggtgcccggttaatttttgtatttttttgtagagatgagatctcaccatgttgcccaggctggtatggaactcctgagatcaagtactccacccacctcagcctcccaaagtgctgagattacaggtgtgtagttactgcaccaagacaatgaggcaatcacttctgaataaagtacaagcattagtaacatctcccctggtctctccagattggttatgctgccacaactgaattctaaatgggttaagtgttatacaattagttaagtttctttggtaggtatcaaataaaacatccacctaaattcttaagaaccttgttaaa

SEQ ID NO: 30067 - DNA, 545 bp, Homo sapiens
tggtttcctcctgtcctatgaactttgtactgatttctgccccaataaatttgattakatgaagaaaaaaatactttttttttaagatagggtttcactcctgttgcccaggctggagtgcagtggcacaatcttggctcactgcaaccttggcctcctcaactcaagagattcttgtgcctcagcctcccgagtaactgggactatgggtgcgccattggtgcccggttaatttttgtatttttttgtagagatgagatctcaccatgttgcccaggctggtatggaactcctgagatcaagtactccacccacctcagcctcccaaagtgctgagattacaggtgtgtagttactgcaccaagacaatgaggcaatcacttctgaataaagtacaagcattagtaacatctcccctggtctctccagattggttatgctgccacaactgaattctaaatgggttaagtgttatacaattagttaagtttctttggtaggtatcaaataaaacatccacctaaattcttaagaaccttgttaaa

SEQ ID NO: 30068 - DNA, 545 bp, Homo sapiens
tggtttcctcctgtcctatgaactttgtactgatttctgccccaataaatttgattatatgaagaaaaaaatactttttttttaagatagggtttcactcctgttgcccaggctggagtgcagtggcacaatcttggctcactgcaaccttggcctcctcaactcaagagattcttgtgcctcagcctcccgagtaactgggactaygggtgcgccattggtgcccggttaatttttgtatttttttgtagagatgagatctcaccatgttgcccaggctggtatggaactcctgagatcaagtactccacccacctcagcctcccaaagtgctgagattacaggtgtgtagttactgcaccaagacaatgaggcaatcacttctgaataaagtacaagcattagtaacatctcccctggtctctccagattggttatgctgccacaactgaattctaaatgggttaagtgttatacaattagttaagtttctttggtaggtatcaaataaaacatccacctaaattcttaagaaccttgttaaa

SEQ ID NO: 30069 - DNA, 545 bp, Homo sapiens
tggtttcctcctgtcctatgaactttgtactgatttctgccccaataaatttgattatatgaagaaaaaaatactttttttttaagatagggtttcactcctgttgcccaggctggagtgcagtggcacaatcttggctcactgcaaccttggcctcctcaactcaagagattcttgtgcctcagcctcccgagtaactgggactatgggtgcgccattggtgcccggttaatttttgtatttttttgtagagatgagatctcaccatgttgcccaggctggtatggaactcctgagatcaagtactccacccacctcagcctcccaaagtgctgagattacaggtgtgtagtyactgcaccaagacaatgaggcaatcacttctgaataaagtacaagcattagtaacatctcccctggtctctccagattggttatgctgccacaactgaattctaaatgggttaagtgttatacaattagttaagtttctttggtaggtatcaaataaaacatccacctaaattcttaagaaccttgttaaa

SEQ ID NO: 30070 - DNA, 545 bp, Homo sapiens
tggtttcctcctgtcctatgaactttgtactgatttctgccccaataaatttgattatatgaagaaaaaaatactttttttttaagatagggtttcactcctgttgcccaggctggagtgcagtggcacaatcttggctcactgcaaccttggcctcctcaactcaagagattcttgtgcctcagcctcccgagtaactgggactatgggtgcgccattggtgcccggttaatttttgtatttttttgtagagatgagatctcaccatgttgcccaggctggtatggaactcctgagatcaagtactccacccacctcagcctcccaaagtgctgagattacaggtgtgtagttactgcaccaagmcaatgaggcaatcacttctgaataaagtacaagcattagtaacatctcccctggtctctccagattggttatgctgccacaactgaattctaaatgggttaagtgttatacaattagttaagtttctttggtaggtatcaaataaaacatccacctaaattcttaagaaccttgttaaa

SEQ ID NO: 30071 - DNA, 770 bp, Homo sapiens
tttcaattattttatgtctcattgttatgacacattaaattgtagtgtttccagcaatacgtccagtataatttgaattagcaatggagataatgattacagttttctgttctgaaattatgtttctggtatgtcaaggactacattcaggggatatctaccaattcttacttctttcggtgttttttaaaattttcgacctggaattgagttttgataaaagttttttaatgtttaaaataaggtgtaaagtttttctccttacayctcttatataacagatataataaacataatgtaataaaatgtaattatatattttgtgaatgagtttcctaatattaaacctatgttgtattccaggaatgaatcctatttgcatatggtgtatttttttttattctttgcaggtttagaaattattgttatactatcctcatgaaagtatttgtaaagcttttctttatatgtatgttctgtagtgagttttgtgccatagaatcatctattaacaatgtcatgaaggttggaacagttcccccgtggaactatctgagcactccttctctattccttctgcaattcctctatttaagttttctttctctaatggtcagttttggtaatcaggctttttctgtacaaaattctccactttgtccagtgtttaaagtttatttgcaagagagattttcaagtaatcttattattttttctgttatatttctcctccttggacattcttagtaattaaacgtgtgatctctcca

SEQ ID NO: 30072 - DNA, 617 bp, Homo sapiens
cctaaaagttgtagtaatctgggtagaagcttaaagtgacctatcctgtcatatagttgtcattaactaggatattaattattcttaaaaggatgcaaaatttttccaagggatgtgcatctgcagacagttttaagggactattgtcaagaactgtgaaggatctgagcttacaagttagcctgcttcagttttatggatgytggcagaagacacataactgtttggtcagagacagaaagacttccattatttgcagtacagcacagagttgcacgagcttcatctttgctctggttcctgttttccctcaagtttactggagatgatgacaaggagttcaagttgatgctacacacagtttgtgtcacagatgaagaactccaagtaaaggaaacttaaatctttaataaatgagcagtaagcacacttgtctgatgttttctgtggaggaaacactatcttcattttacttgaaaataaacaaatctgttctctcatccataaataaacaatatcttgatcttccagggctatccactatataaagatctttaaaaaggaaaacctgtaataaatgtgaaactagtgcctttctatttgcaagatgcacagaa

SEQ ID NO: 30073 - DNA, 617 bp, Homo sapiens
cctaaaagttgtagtaatctgggtagaagcttaaagtgacctatcctgtcatatagttgtcattaactaggatattaattattcttaaaaggatgcaaaatttttccaagggatgtgcatctgcagacagttttaagggactattgtcaagaactgtgaaggatctgagcttacaagttagcctgcttcagttttatggatgttggcagaagacacataactstttggtcagagacagaaagacttccattatttgcagtacagcacagagttgcacgagcttcatctttgctctggttcctgttttccctcaagtttactggagatgatgacaaggagttcaagttgatgctacacacagtttgtgtcacagatgaagaactccaagtaaaggaaacttaaatctttaataaatgagcagtaagcacacttgtctgatgttttctgtggaggaaacactatcttcattttacttgaaaataaacaaatctgttctctcatccataaataaacaatatcttgatcttccagggctatccactatataaagatctttaaaaaggaaaacctgtaataaatgtgaaactagtgcctttctatttgcaagatgcacagaa

SEQ ID NO: 30074 - DNA, 617 bp, Homo sapiens
cctaaaagttgtagtaatctgggtagaagcttaaagtgacctatcctgtcatatagttgtcattaactaggatattaattattcttaaaaggatgcaaaatttttccaagggatgtgcatctgcagacagttttaagggactattgtcaagaactgtgaaggatctgagcttacaagttagcctgcttcagttttatggatgttggcagaagacacataactgtttggtcagagacagaaagacttccattatttgcagyacagcacagagttgcacgagcttcatctttgctctggttcctgttttccctcaagtttactggagatgatgacaaggagttcaagttgatgctacacacagtttgtgtcacagatgaagaactccaagtaaaggaaacttaaatctttaataaatgagcagtaagcacacttgtctgatgttttctgtggaggaaacactatcttcattttacttgaaaataaacaaatctgttctctcatccataaataaacaatatcttgatcttccagggctatccactatataaagatctttaaaaaggaaaacctgtaataaatgtgaaactagtgcctttctatttgcaagatgcacagaa

SEQ ID NO: 30075 - DNA, 617 bp, Homo sapiens
cctaaaagttgtagtaatctgggtagaagcttaaagtgacctatcctgtcatatagttgtcattaactaggatattaattattcttaaaaggatgcaaaatttttccaagggatgtgcatctgcagacagttttaagggactattgtcaagaactgtgaaggatctgagcttacaagttagcctgcttcagttttatggatgttggcagaagacacataactgtttggtcagagacagaaagacttccattatttgcagtacagcacagagttgcacgagcttcatctttgctctggttcctgttttccctcaagtttactggagatgatgacaaggagttcaagttgatgctacacacagtttgtgtcacagatgaagaactccaagtaaaggaaacttaaatctttaataaatgagcagtaagcacacttgtctgatgttttctgtggaggaaacactatcttcattttacttgaaaataaacaaatctgttctctcatccataaataaacaatatcttgatcttccagggctatccactatataaagatctttaaaaaggaaaacctgtaataaatgtgaarctagtgcctttctatttgcaagatgcacagaa

SEQ ID NO: 30076 - DNA, 503 bp, Homo sapiens
ccccatgtaaacaccaggccttagatggatacccaatctctaggtagacatcagagctcagattgacacaaagactccagtagacataatgtaccaatgaatatccaggcgcccggtaaatacccaggccccagattgacaccacggtctatgtggacacagaggccctgggtagtaaacaggcccaaggtggacactggactggacatcagatcctaggttgacaaccatgctccaagttgacaccaggccccaagcgaacatctggccccagctggacactagtcccctggtgaatacctagtctcaaggttgacatcagaccctatgtgaacactagaccccagataaacacttatgccctaagtggacatcaggcctcaggtggttacccagtcccaaggtgaacatcaggaccccgatggcaccagttatcaagtggattcctaggccccaggtgaatatcaagccctaggtggatacygagccccaggtggatacct

SEQ ID NO: 30077 - DNA, 754 bp, Homo sapiens
ttatgcataatgtttaccaattattgactaaggtgttttccagtcaccctaatttaaaggacacagccctgccatatgcatactggacattgttcatggatgggagcagcctggtaaccgacagaaaaagaaatgctatatatgtaatggtaacgttttcagaggtcacagaagccaggactttaccactaggaacctctgcacagaaggcagaactgattgcccttacaagagcctgcagttgttccaggtaaacaaggcacttggaataaattgcaractatactcagcatggagaccacagtcttctggacagactgaaaggaaaatccagcactaaaaacagttattgccaaactgtgccaggaaactcaaccaaaatgaattcaggtacttggcattgcattgctctgggtaagaatgacctccccagatgtgggattaggttaagtcctgtgaaatgatacatgagagacccttttgggttactagggtgccccttaataagaagtcaactattaaacattgtgttactcacttgggacaaattcgtaacgttttgcataagcttgctttcaacaacagcattgtgaactcagcagagccacgccactctttccagtcccgtgatcaagtactgctaaagagtagatgggaacgggcccaactcagcagctacaggagaaatggaaagggccctactggtgctgctaactgccaatttcagcactgaaactggcgggcatcaagccat

SEQ ID NO: 30078 - DNA, 635 bp, Homo sapiens
tatctctgaggtattcctgcatataagttggtgaaactgcaccttctcttggctaacctaataactgaatctacaacatgagtcttccctttcatggagktctatcactatcttctgtgccaccttggcatgaattaaaggtcaccctttctgtgggagaaaaatccctgcatcagaatatagcccgaagaggggagcttaggttagattgaccaggtgtgtgtcattgtacagtaaacatcttggtcaaaaagtttgtaatagtccttattccttctcagagttctgaggcacaaagcagctataaaattgagagtctcagatctcatatgcttcctattcctggttaacaacaatattcctccttaataatccatagttagaagagccttaagaagaaaattatgaaaccaggctggttgatagaaatgttgaaaaaagaaacaactgactttgctttttttgtattccctctgtccattactagaaaataaatcccatagaatcttttattctttttccagtgtaatggttctcaactttggttgaatactggaattacctggagaaacttgaaaactcttaatcattgggctctatcccagaccagtgagatcagaaactaagaggacaga

SEQ ID NO: 30079 - DNA, 635 bp, Homo sapiens
tatctctgaggtattcctgcatataagttggtgaaactgcaccttctcttggctaacctaataactgaatctacaacatgagtcttccctttcatggaggtctatcactatcttctgtgccaccttggcatgaattaaaggtcaccctttctgtgggagaaaaatccctgcatcagaatatagcccgaagaggggagcttaggttagattgaccaggtgtgtgtcattgtacagtaaacatcttggtcaaaaagtttgtaatagtccttattccttctcagagttctgaggcacaaagcagctataaaattgagagtctcagatctcatatgcttcctattcctggttaacaacaatattcctccttaataatccatagttagaagagccttaagaagaaaattatgaaaccaggctggttgatagaaatgttgaaaaaagaaacaactgactttgctttttttgtattccctctgtccattactagaaaataaatcccatakaatcttttattctttttccagtgtaatggttctcaactttggttgaatactggaattacctggagaaacttgaaaactcttaatcattgggctctatcccagaccagtgagatcagaaactaagaggacaga

SEQ ID NO: 30080 - DNA, 591 bp, Homo sapiens
gttactgaagaaaacattaggcctcaattagcctttttaacaccattaactataataattagcaaaaggaaaaaagacagttttataacctacagtttccttcaagaaatagctatttaataattcataaacaatccatctgcagaaaatataatggtatagatagcaatgtctttactaggctgcagcactatcatagtgtatcagcaaactgcagttaacagaacaaatatttttggctgtagagggataggcyctccaaacacaaattaatctccttaatggattttccttaccttcatgaaaaatgcattatgggttcttaagtcacactcaacacattgttagggttttttatgatgtggggttggcacaaagatgatttttctttcacactgtgggtaaaaaaacaatgagctgggtggtttggagccagactatttaatcactaggtaaggactgattacccagagaagttgcatattcttaagcaccctctttctgtaagagatccttaaattttgttgagaggtagaaaaaagaaattgcatcgtggggcttaacattcgtgaaattttcaaaatgtcaaaa

SEQ ID NO: 30081 - DNA, 591 bp, Homo sapiens
gttactgaagaaaacattaggcctcaattagcctttttaacaccattaactataataattagcaaaaggaaaaaagacagttttataacctacagtttccttcaagaaatagctatttaataattcataaacaatccatctgcagaaaatataatggtatagatagcaatgtctttactaggctgcagcactatcatagtgtatcagcaaactgcagttaacagaacaaatatttttggctgtagagggataggctctccaaacacaaattaatctccttaatggattttccttaccttcatgaaaaatgcattatgggytcttaagtcacactcaacacattgttagggttttttatgatgtggggttggcacaaagatgatttttctttcacactgtgggtaaaaaaacaatgagctgggtggtttggagccagactatttaatcactaggtaaggactgattacccagagaagttgcatattcttaagcaccctctttctgtaagagatccttaaattttgttgagaggtagaaaaaagaaattgcatcgtggggcttaacattcgtgaaattttcaaaatgtcaaaa

SEQ ID NO: 30082 - DNA, 558 bp, Homo sapiens
atctacctatgacccacaagccccttccccactttgagttgtcccacctttgctttgagttgtcctgccttcctggaccaaaacaatgttcaytttacatatactgactgatgtctcctgtctctctaaaatgtataaaatcaagctgtgctcagaccactttaggcacatgtcttcaggatcgcctgaggctgtgtcacaggtgcatgtctttaactttggcaaaattaactttctaaattgactgagacctgtctcagatattcggggttcacaggacatggtgaaaagatggctatccataaacagggaagcagaccctcatgagaaaacaaatctgctggcacccaatcttcagaattgtgagagaaatggatttctgttgtttgcaaaccacccagtttatggtagtttgttatagcagcccaaacaaactacaacagtgtctttaacagataatgatattttaaagatcatcttacacatcaaaattaaaaatggcctctcagtatcatttaacagctattctgttttaatttttctacaattaccttaaaa

SEQ ID NO: 30083 - DNA, 808 bp, Homo sapiens
tgatcatgtggagattccgccaggtgttctgyggtacctggcagtccatcaggagggctctgtcccctgccctaggacaggctgctgctgtgaccaagccctgtgtctgacatggtgcttacaaacttcagtttgagaactgaaataaccattcacttttgtggttttctaaaacccatgttttccactgcatagtttgccccataaaataggtatctagagaagctatatgaactttgtaagatcattactaaggcaacatttcctccctgccagctttactgaggtataatggacaaataaaaattgtacatgttcaagatgtacagtgtgatgacttgctatacctatacattgtgaaatgattacagtcaaattaatgagcacatccatcactacaattacccaccatttgtatgtatgtgtgtatgtatagtgaggacacttaaaaaatatattcttcacaaatttcaagtaaacagttttattaactataactattaatgaacacaatcttattaactatagtcattatactgtacattagatccccagaacttatccatcttataaatacaacaaaaattccttagagactttgaagtttaggaaactgagaaggggcctttcttctaggctgttggtcacctggttaaatccaatccatagacagagcaaaattggaaagaaattaaaattcaccttattagttttaatgtaccacatccttatcgaaatgattttctcaaagattcctctaatgtaccaaaaataaagtatgtattaatatagcatttcatgattgtat

SEQ ID NO: 30084 - DNA, 808 bp, Homo sapiens
tgatcatgtggagattccgccaggtgttctgtggtacctggcagtccatcaggagggctctgtcccctgccctaggacaggctgctgctgtgaccaagccctgtgtctgacatggtgcttacaaacttcagtttgagaactgaaataaccattcacttttgtggttttctaaaacccatgttttccactgcatagtttgccccataaaataggtatctagagaagctatatgaactttgtaagatcattactaaggcaacatttcctccctgycagctttactgaggtataatggacaaataaaaattgtacatgttcaagatgtacagtgtgatgacttgctatacctatacattgtgaaatgattacagtcaaattaatgagcacatccatcactacaattacccaccatttgtatgtatgtgtgtatgtatagtgaggacacttaaaaaatatattcttcacaaatttcaagtaaacagttttattaactataactattaatgaacacaatcttattaactatagtcattatactgtacattagatccccagaacttatccatcttataaatacaacaaaaattccttagagactttgaagtttaggaaactgagaaggggcctttcttctaggctgttggtcacctggttaaatccaatccatagacagagcaaaattggaaagaaattaaaattcaccttattagttttaatgtaccacatccttatcgaaatgattttctcaaagattcctctaatgtaccaaaaataaagtatgtattaatatagcatttcatgattgtat

SEQ ID NO: 30085 - DNA, 808 bp, Homo sapiens
tgatcatgtggagattccgccaggtgttctgtggtacctggcagtccatcaggagggctctgtcccctgccctaggacaggctgctgctgtgaccaagccctgtgtctgacatggtgcttacaaacttcagtttgagaactgaaataaccattcacttttgtggttttctaaaacccatgttttccactgcatagtttgccccataaaataggtatctagagaagctatatgaactttgtaagatcattactaaggcaacatttcctccctgccarctttactgaggtataatggacaaataaaaattgtacatgttcaagatgtacagtgtgatgacttgctatacctatacattgtgaaatgattacagtcaaattaatgagcacatccatcactacaattacccaccatttgtatgtatgtgtgtatgtatagtgaggacacttaaaaaatatattcttcacaaatttcaagtaaacagttttattaactataactattaatgaacacaatcttattaactatagtcattatactgtacattagatccccagaacttatccatcttataaatacaacaaaaattccttagagactttgaagtttaggaaactgagaaggggcctttcttctaggctgttggtcacctggttaaatccaatccatagacagagcaaaattggaaagaaattaaaattcaccttattagttttaatgtaccacatccttatcgaaatgattttctcaaagattcctctaatgtaccaaaaataaagtatgtattaatatagcatttcatgattgtat

SEQ ID NO: 30086 - DNA, 808 bp, Homo sapiens
tgatcatgtggagattccgccaggtgttctgtggtacctggcagtccatcaggagggctctgtcccctgccctaggacaggctgctgctgtgaccaagccctgtgtctgacatggtgcttacaaacttcagtttgagaactgaaataaccattcacttttgtggttttctaaaacccatgttttccactgcatagtttgccccataaaataggtatctagagaagctatatgaactttgtaagatcattactaaggcaacatttcctccctgccagctttactgaggtataatggacaaataaaaattgtacatgttcaagatgtacagtgtgatgacttgctatacctatacattgtgaaatgattacagtcaaattaatgagcacatccatcactacaattaccyaccatttgtatgtatgtgtgtatgtatagtgaggacacttaaaaaatatattcttcacaaatttcaagtaaacagttttattaactataactattaatgaacacaatcttattaactatagtcattatactgtacattagatccccagaacttatccatcttataaatacaacaaaaattccttagagactttgaagtttaggaaactgagaaggggcctttcttctaggctgttggtcacctggttaaatccaatccatagacagagcaaaattggaaagaaattaaaattcaccttattagttttaatgtaccacatccttatcgaaatgattttctcaaagattcctctaatgtaccaaaaataaagtatgtattaatatagcatttcatgattgtat

SEQ ID NO: 30087 - DNA, 588 bp, Homo sapiens
ggagatgtcaagcatctcttcttgtatcttgtaaagatacatttgtgtatcttctttggagaaatggctttggcaagtcctttatcaatttttttattcagttcggtttgatgctgagttgtagttgttctttatctattctgaatattaacctcttttcagatatatgactgaaaatatcttctcccattctttggcttgccttttaactgtcttgatggtggccttggatgcacagtttttaattttgatctacttgtatttatcttttttcctttcattgcctatgtttttggtgccatatccaagaataacactgttttgtttcagataaaggccaaacttcttatataatcactgcargtcattttcccatattcacaaggctatttctggaacacctggactttataaagacttgccagtcatttgtgtccagtgaaactactagcgttggagtatttatagttgagttgatgtatcttttgccctaaccccaacatatcgctgactaaaattttgatctttgaaaataaagtttccaatatcccccgccccaatgctcattttaggcaaaagctcactcca

SEQ ID NO: 30088 - DNA, 588 bp, Homo sapiens
ggagatgtcaagcatctcttcttgtatcttgtaaagatacatttgtgtatcttctttggagaaatggctttggcaagtcctttatcaatttttttattcagttcggtttgatgctgagttgtagttgttctttatctattctgaatattaacctcttttcagatatatgactgaaaatatcttctcccattctttggcttgccttttaactgtcttgatggtggccttggatgcacagtttttaattttgatctacttgtatttatcttttttcctttcattgcctatgtttttggtgccatatccaagaataacactgttttgtttcagataaaggccaaacttcttatataatcactgcaggtcattttcccatattcacaaggctatttctggaacacctggactttataaagacttgccagtcatttgtgtccagtgaaactactagcgttggagtatttatagttgagttgatgtatcttttgccctaaccccaacatatcgctgactaaaattttgatctttgaaaataaagtttccaatatcccccgccccaatgctcattttaggcaaaagctcamtcca

SEQ ID NO: 30089 - DNA, 637 bp, Homo sapiens
ttggattaaagtctggcacaaggtttttatcagcaggaatgcataacatcacaactcagagaaactcaaagatgtagttcaatatgattcgtaaaacagttgcaaaaattgtaaatagtgctgcagtaaacctatgtatgcatgtgtctttatagtagaatgatttatattcctttgggtatatacccagtaatgggattgctgggtcaaatggtatctctggttccagatccttgaggaattgccatgctgtctcccacaatggttgaactaatttacattcccatcaacagtgtaaagcgttcctgtttctccacaacctcgccagcatctgttgtttcctgacttcttaataattgccattctgactggcatgagatggtatctcactgtggttttgatttgcatttctctgatgaccagtgatgttgagctctttttcatatgtttgttggccaaayaaatgccttcttttgagaagtgtctgttcatatcctttgcccactttttgatagggttgtttgttttttttcttgtaaatatgtttaagttccttgtaaactctggatattagccctttgtcagataggtagatttcaaaaattttctcccattctgtaggttgcctgttcactcc

SEQ ID NO: 30090 - DNA, 627 bp, Homo sapiens
cacgtctggcttataaaatccttggctgcagggatagtctctcagtcacccttagatctcccaaacacgccaggtgcggtggctcatcccagcactttgggaggctgaggcgggcggatcacctgaggtcaggagtttgagaccagcctggccaasatgacgaaaccccgtctctactaaaaatataaaaattagccaggcgtggtggcgcatacctataatcccagctactagggaggctgaggcaggagaatcacttgaacccaggaggcagaggttgtagtgagctgagatcgtgccactgtactccagtctgggctacagagcgagactccatctaaaaaaagaaaaaaatcctaaacaaatattaaatacttactgtatgccaggccttatgctagctgtgggacacagtgctttgtatatggtaagtgttcacagaatgcttattatgtaaatgagtctctgctgattaagttcacatgaatgccagactttttctaggagcttccaggagatactggagtccttgaaaaaagagggaggacacggatattcagggaatctgtatttctctcttcacctattccatcctgcatctctgctctgaaagggatgttctctcca

SEQ ID NO: 30091 - DNA, 605 bp, Homo sapiens
tttttgcccaccctggctcctgcaagttgtgtacaggctgcttcagaaacctgcacagctgtctgctatgggactaggggtgggggwtggatagattatactgtgcaaaactttgtaattaaccaaaattaattataaattaccaaccaagtcttcccctggatgtggcaagacttcaatagactctagaactccaaaatagttatattagacagattttaacactgtcattgtttgtttagataaggagcaagattcctggtgcttcctatgccttcatcttcccagagatccctcttatgtcaatgacattttgaaaatgtttttctgttaagttctttttaattttgagctttttgagaaacttgatttatttcaggaatttataggagttctttttctcttttaagtgtaacaaaagactgggatcaaacaggatgatttctatcacttagtgacatgagcaaacttgacttttacattttttcctgagagcattgaataaagtccgatattttgtatggctgtgacctaaaccaagtttccatgagcaatcatgtgataaagaataactcaatgaatttcttttttcatttttaatgctg

SEQ ID NO: 30092 - DNA, 653 bp, Homo sapiens
gctactgtcttgaaaaagcttaagtgaaactagaaagtaatggtttttggcaagaggttaaagaggtaagggaagcattttcagccaagataaacagattatttaagaatccagaaaaaccatggaaaccccttagaaaacttctagttcagggatgcagtattcccacaggcccatgacagccattactcatcatccacagtactcctgatggctcatttcatgcagaagtgaacttagaatcgcatatggcaccaggaagcaattactaattgattgttgcttgcaatcactatgcttctagttgcagttcatgacctacccgaactgaagaggagactgaggcctggagaagctgcatgatttaccaaatacttgactgctcaaaaacggaagaactgtggctagaaagccatctctcagagctagcacaattctagttttcttgctaatgctatgatattcttgccaataagtgaggttgtttgtccaaatatattgttctgccattttgatctctatggatcatccagagaaatttaaatacctcatattctatttctttatcttttattctttattttttattcattcttttattccttcattcaacttttttttttttwttttttttttttttggtgaatgccaat

SEQ ID NO: 30093 - DNA, 1174 bp, Homo sapiens
aaggytcttgagactttgtgtgttcctcagtggtggctctgcccagactctatatagctctctgtgtcagtctggaggcccagattggtgggaagttacgagtgatctcctgagcccagggttgcaaaagtttgtggcagaagtatgggtcccagggacattcattgactgtttccccatggtgaggggcctcctctggctccacaccactcctcagtgggaagttgccctctctccctcttctccattatctataggtcatgttgcttccttgatgaatctcaatgtgtctacctggatgtagtaattgaagagctagtgtttactcgctattcttcctgctctccagtcagagtggtacacactagggacttctagtcagccatcttggctggaatctaagttttcctagtttctgttttcctagtttctattatccagctgttttcttttaccttcaagaaagaagattaattaaaataaataaaactgtagtcattgtatagccaccctaatcaggttatacacacacagacaaacaaacttatcttttccccaaacttagagacttcagtatttttccaatcacctagaatcaaaatcatatacctattcatcccatccttcaagcatatttcttattgtcatcagtctgtttttagagccttattatatcttttattgtatattgacaattataatgtatgctttttcaaaagcttttcattttatccagtctggtctacacacacgcaaatccagactatgttattccttggtttaacaaacaaacaaaaagacaacctatggattagtttcaacttcaaatgacacaaaacccaatacaatagtggctaaagcagttcagatttctattccataaatttatctgggatttagaccacttccaggtcactgttttgtcatccctacaatttggcttttgtctgcttgttcaagatgaatagtccagacccaggtttctggcccatattacaccctacaagaatgagggaagggcaaaaaagggcatggatactttctttgagaacacttcctgaaatttgcacaaacttctgcctttttctcatcaggagtaacatggtcatataatggcacccaactgcaatgtaagccaggaaatgtagtttttatcctgggtagccaaattttg

SEQ ID NO: 30094 - DNA, 727 bp, Homo sapiens
ttgctagcttcgtcttctgttccttctctttgtctagatgagaaaagtgtttatttaggaatgttctctctgcccttgacttagaaacaagtcataaattttataattcccatagaagccttcaactttttgtgtattttctctttgctacaaactgatggacactctctgaaaatcagccctgaattcacaccacggcttccaatgcatttcagttacataacgtttaacgattctgaatcataattttttggcacagtgatttcatccratagcaagggaagggaaataacatgtttgagctcctgccttacagcaggttctctaccttctactgttttatccttggtccaggacatagcagccctcagtaaataaatgtttaatgaatatatgaataaatgatgttagggcaatagcgtgactctacttattttacttaaattactcaaggtatacccattagaaaattactttcctacataccatgaaaatatttgtaaaagaataaaaccaacatcttcatgcagaatgcgcttttaaaagtaatgagttttagtcttttgttaaaaaaaatcagtctttttaaaaatatttgccagataatagacactgataaaaattcatttcttcccaggcacgttcattatggcatatttataaacctgactgcataaccagtagatagaaaaatagcaaagtatacatcttctaagaattcagtgct

SEQ ID NO: 30095 - DNA, 571 bp, Homo sapiens
tgaataatccactccttgtttagcatatcatcaagaaataaccataacartgggtaaccagcagccctcagggcttctctgtctacagagtagccattcttttattcctctacatttttaataaacttgctttcactttgctctgtggactgaccctgaattctttcttatgcaaaatccaagaaccctctcttggggggatctggatcaagatccctttcctgtaataccaccatgccaagctaattgttttatgtttgtaaagatgatgttttgctatgttgcccaggctggtctcaaattcctgagctcaaataatcctcctgccttggcctcccaatgtgctggattacaggtgtgagccactacacccagccaatattatcaaataaagaatggactctcctactctctctattagattgtttgccttcatcagtaatttagataacagaaagatatgtgttctaagtgaaatctatatattagggttctgcacatgttttgaaaaggcttttaaaaagtaaaaattacacatgcacacaccccaaaaatatattttaagccagct

SEQ ID NO: 30096 - DNA, 571 bp, Homo sapiens
tgaataatccactccttgtttagcatatcatcaagaaataaccataacagtgggtaaccagcagccctcagggcttctctgtctacagagtagccattcttttattcctctacatttttaataaacttgctttcactttgctctgtggactgaccctgaattctttcttatgcaaaatccaagaaccctctcttggggggatctggatcaagayccctttcctgtaataccaccatgccaagctaattgttttatgtttgtaaagatgatgttttgctatgttgcccaggctggtctcaaattcctgagctcaaataatcctcctgccttggcctcccaatgtgctggattacaggtgtgagccactacacccagccaatattatcaaataaagaatggactctcctactctctctattagattgtttgccttcatcagtaatttagataacagaaagatatgtgttctaagtgaaatctatatattagggttctgcacatgttttgaaaaggcttttaaaaagtaaaaattacacatgcacacaccccaaaaatatattttaagccagct

SEQ ID NO: 30097 - DNA, 571 bp, Homo sapiens
tgaataatccactccttgtttagcatatcatcaagaaataaccataacagtgggtaaccagcagccctcagggcttctctgtctacagagtagccattcttttattcctctacatttttaataaacttgctttcactttgctctgtggactgaccctgaattctttcttatgcaaaatccaagaaccctctcttggggggatctggatcaagatccctttcctgtaataccaccatgccaagctaattgttttatgtttgtaaagatgatgttttgctatgttgcccaggctggtctcaaattcctgagctcaaataatcctcctgccttggcctcccaatgtgctggattacaggtgtgagccactacacccagccaatattatcaaataaagaatggactctcctactctctctattagattgtttgccttcatcagtaatttagataacasaaagatatgtgttctaagtgaaatctatatattagggttctgcacatgttttgaaaaggcttttaaaaagtaaaaattacacatgcacacaccccaaaaatatattttaagccagct

SEQ ID NO: 30098 - DNA, 807 bp, Homo sapiens
tgactcttggacaagtcatgtgatctctctgatttacagttttcctatctgtgaaatgggactagcaatgcttacgtcacaggaatatgtaaactgcttagtacagtgcctggcacgtagtaggtgatcagtaactagtagttattcaccatgaccatggaaatgttctaaaggagaagcagcagttgactcttctctcaaactgtcctgaccattctagcctcagctgtccaatcatttggcagagcttaagaaaaaaggccttcaaacaaagacatgggaaggaatgagacttggcatttcacgggaccatgaaacagttaagagygaggcctctggagtcagcgactttggttgagtcctggttcctccacttactctctgggcaagtcactcgttcttctgcctttcgtgtccctatctgtaaagtgggggtaatactagcacttacctcctcctgggtcattagagggctaaatgagttgatacagagtgttcctaccagtgcttgtatgaaacaagccttcgtgatgttgcttttttttttttttttttaagacggagtctcgctctgttgccaggctggagtgcagtggcgtgatcttggctcactgcaagctctgcctcccaggttcacgccattctcctgcctcagcctcccgagtagctgggactacaggcacccaccaccacgcctggctaatttttttgtattttttagtagagacgggatttcaccgtgttagccaggatggtttcgatctcctgacctcatgatccgcctgcctcggcctcccaaagtgctgg

SEQ ID NO: 30099 - DNA, 1000 bp, Homo sapiens
agagatggagtctcactatattgaccaggctggactcaaactcctggcctcaggggatcctcccgaagtactaggattacaggcatgagccactgtgcctggccaggcatcagggtttttgaaactccctggtgatccagtgtgcattatagtttaggaaccactagcttaagaaattctcctctactgttggctgttgatcccagctgctcattagagtcacaaggggaaacatttaaaatattaccagaagccacatccaagagattctgatttgcttggtctggggtggagccttaagtcactctagatgattctaagatgcagccaggtagagactgctgtgccacgttatagggaaagcacccggcactagtaagcagctagagaatgtgggcggttattgaaagtatgtataaaatgaaggtttggttaggatgttcttaaggtcccttcccacttgcatttgtaattccctaggaaaattactattcacctttgtctcagtgtgctggctcaagggaggaatgcaacctgtactttttcaacaagtgtttggaggaaaaaggagtaagtgtaggagcagcatcctgggaatatttagcccagtccttttgcctcatatgmgtagctagttcactagtgagctcaattctactttcatctacctcttagccaaaggaactgaaagtttattttattatgaagtcagagagttgaataagggagaaaaaatctttggagagcttgaaattcttttacctctgttaatgtgaagtggcatttttatatgctgtggaaattctgtcttctgttttgatttctttccctgatgttacttatatatgtatttccatttttttagacagttattcagtcagtattggccaggttatgccgcattaatgaacaattccccaaatctcagtggtgtaacgtagtaagagctcatttttcactcatgcttcataaagtgagtccatgcatcccggtcactgaa

SEQ ID NO: 30100 - DNA, 1026 bp, Homo sapiens
aaatgaacccatgattctctgtactttagtaaccttatctacttactgaacccagtacagtttctgcatgacccarttagacaactgaggcctccctataagaccctgtcctgtttctgttgcaacttctgaacccaggtctgattttttttaaaagctcaaataaactcagatatttcaaaacacaacttcatagagcttgaacctgagacagaactcacccattgccccagttgctgcaagagatcagtgagcacaatgggcctggtgggtacttccacttggtcactcactacttctgacctgagggttgcaggaggtctacttcagaccctacctccaataacaaacttaaaaaaaaaaagtggtgggtaagtgattcacacctataatcccaacactttgggaggctgaagtgagacgatcacttgagtccaagagttggagagcagcctgggcaactagtgaggcctgtcgccacaaaaaattaaaaaacaccaactagccaggcatgacagcgtaggcctgtgctcccagctattcgtgaggctgaggcaggaggactgcttgagccaaggaggtccaggctgcggtgagccttgattgctccgctgcattctaccttgggcatcagagagaaactctgactcaaaaagagaaaagaaagacattaaacaaattaaattctgcaaagtttatatgagcaaaggccaattcataaatctcgcagcactcagaaccttcatgcaatgtagacaggccttctttattaatagaaagaggacgttacatacagaacagctcgattggttacagctcagaatttgccttacatggtcaatgctctgatcagttggcaacctctgattggctaaagctcagctgctttagccaattggcgagactcagctactttttataagaatatactcttagttaagtttctacatatggaagcagtttggggtcaaatttaatttaatttagcagaggaaaagacctttgccactcaagaacaggaatcgt

SEQ ID NO: 30101 - DNA, 1026 bp, Homo sapiens
aaatgaacccatgattctctgtactttagtaaccttatctacttactgaacccagtacagtttctgcatgacccagttagacaactgaggcctccctataagaccctgtcctgtttctgttgcaacttctgaacccaggtctgattttttttaaaagctcaaataaactcagatatttcaaaacacaacttcatagagcttgaacctgagacagaactcacycattgccccagttgctgcaagagatcagtgagcacaatgggcctggtgggtacttccacttggtcactcactacttctgacctgagggttgcaggaggtctacttcagaccctacctccaataacaaacttaaaaaaaaaaagtggtgggtaagtgattcacacctataatcccaacactttgggaggctgaagtgagacgatcacttgagtccaagagttggagagcagcctgggcaactagtgaggcctgtcgccacaaaaaattaaaaaacaccaactagccaggcatgacagcgtaggcctgtgctcccagctattcgtgaggctgaggcaggaggactgcttgagccaaggaggtccaggctgcggtgagccttgattgctccgctgcattctaccttgggcatcagagagaaactctgactcaaaaagagaaaagaaagacattaaacaaattaaattctgcaaagtttatatgagcaaaggccaattcataaatctcgcagcactcagaaccttcatgcaatgtagacaggccttctttattaatagaaagaggacgttacatacagaacagctcgattggttacagctcagaatttgccttacatggtcaatgctctgatcagttggcaacctctgattggctaaagctcagctgctttagccaattggcgagactcagctactttttataagaatatactcttagttaagtttctacatatggaagcagtttggggtcaaatttaatttaatttagcagaggaaaagacctttgccactcaagaacaggaatcgt

SEQ ID NO: 30102 - DNA, 1026 bp, Homo sapiens
aaatgaacccatgattctctgtactttagtaaccttatctacttactgaacccagtacagtttctgcatgacccagttagacaactgaggcctccctataagaccctgtcctgtttctgttgcaacttctgaacccaggtctgattttttttaaaagctcaaataaactcagatatttcaaaacacaacttcatagagcttgaacctgagacagaactcacccattgccccagttgctgcaagagatcagtgagcacaatgggcctggtgggtacttccacttggtcactcactacttctgacctgagggttgcaggaggtctacttcagaccctacctccaataacaaacttaaaaaaaaaaagtggtgggtaagtgattcacacctataatcccaacactttgggaggctgaagtgagacgatcacttgagtccaagagttggagagcagcctgggcaactagtgaggcctgtcgccacaaaaaattaaaaaacaccaactagccaggcatgacagcgtaggcctgtgctcccagctattcgtgaggctgaggcaggaggactgcttgagccaaggaggtccaggctgcggtgagccttgattgctcygctgcattctaccttgggcatcagagagaaactctgactcaaaaagagaaaagaaagacattaaacaaattaaattctgcaaagtttatatgagcaaaggccaattcataaatctcgcagcactcagaaccttcatgcaatgtagacaggccttctttattaatagaaagaggacgttacatacagaacagctcgattggttacagctcagaatttgccttacatggtcaatgctctgatcagttggcaacctctgattggctaaagctcagctgctttagccaattggcgagactcagctactttttataagaatatactcttagttaagtttctacatatggaagcagtttggggtcaaatttaatttaatttagcagaggaaaagacctttgccactcaagaacaggaatcgt

SEQ ID NO: 30103 - DNA, 1026 bp, Homo sapiens
aaatgaacccatgattctctgtactttagtaaccttatctacttactgaacccagtacagtttctgcatgacccagttagacaactgaggcctccctataagaccctgtcctgtttctgttgcaacttctgaacccaggtctgattttttttaaaagctcaaataaactcagatatttcaaaacacaacttcatagagcttgaacctgagacagaactcacccattgccccagttgctgcaagagatcagtgagcacaatgggcctggtgggtacttccacttggtcactcactacttctgacctgagggttgcaggaggtctacttcagaccctacctccaataacaaacttaaaaaaaaaaagtggtgggtaagtgattcacacctataatcccaacactttgggaggctgaagtgagacgatcacttgagtccaagagttggagagcagcctgggcaactagtgaggcctgtcgccacaaaaaattaaaaaacaccaactagccaggcatgacagcgtaggcctgtgctcccagctattcgtgaggctgaggcaggaggactgcttgagccaaggaggtccaggctgcggtgagccttgattgctccgctgcattctaccttgggcatcagagagaaactctgactcaaaaagagaaaagaaagacattaaacaaattaaattctgcaaagtttatatgagcaaaggccaattcataaatctcgcagcactcagaaccttcatgcaatgtagacaggccttctttattratagaaagaggacgttacatacagaacagctcgattggttacagctcagaatttgccttacatggtcaatgctctgatcagttggcaacctctgattggctaaagctcagctgctttagccaattggcgagactcagctactttttataagaatatactcttagttaagtttctacatatggaagcagtttggggtcaaatttaatttaatttagcagaggaaaagacctttgccactcaagaacaggaatcgt

SEQ ID NO: 30104 - DNA, 1076 bp, Homo sapiens
atccccctgcctcagcctcccaaagtgttgggatcataggcgtgagccactgtgcctggtccatagtctatatacgttattttatagtctgtatattatctgatttcttggacgaatacttgtgtggtttctgctgaaatagtgtattttgtgttttaaaatttggggctataagctcaccttgagtgtgactttatctgtgggaatgccataaaactttggtggagaatgaattactccaaagaagattggcgtttatcccctaaaccagtgacaactgtgactaggagccagtttctgcctatgagccaaggacaactgtttattttactttctcagtatgggggaatcccagacctctacagaaagaggtgatgtttgaaatttttcataaccggtatgcattctgcaggggctgtgctcccacaagcactctgggaaggagactctccaggagtgcctgctggcaggtggcagtagactcaggcagcaatatggacactggggggtgggggaatgtgatttcttgtggcaaaaagtacaaagaaaaatcagcaaagggaaaagcctgctggggtgaggtcctgagggagctaggcaggtcttccaagmgtcctctccagtgtcacacaggatgtgtttaattcctttagcaattagttgtgacatgttttttctctgtgtatctcattcattcagcaatcataactttattttctttttgtttttagtaatctcttattctcacccagacctttcatctggaatggttgtttgcaagagggacaaaagcatttttacagaaaaatattttaatacaacctaaccagaataacacatcatattctggaattggtcaggacaaaatcctgaattttcaaaaattttcaaaatggtagttcgggtgtggtggctcgtgtctgtaattccaacatttttggaggctgaggcaggaggatcgcttgaattcaggagtttgagaccagcctgggcaacatagtaagacttcatcaccactatgaagtgcactatggtgcacacctgtagtcccagctactctggaggctgaagtggga

SEQ ID NO: 30105 - DNA, 532 bp, Homo sapiens
tcctgccttgtaaataggctcattatgtttccaagaacccagtcaccccattgctcttttttgtttgttttgtttttgagacagagtcttgcttggtcatcaaggctggagtgcagtggtgcaatcacagctcattgcagcctaaacctaatgggctcaagtgatccttctgcctcagcctcattagtagctgggaayacaggtgtgcaccaccatgcatggctatttttttccacagagacagggctggtcgtcaacttctgggctcaagcacttctccctccttggcctcccaaagcactgggattacaggcgcaagccacagcacccagcccatgccattgctcttgaagctgattcccctgtcaaccagtcaggctgcagcccctaacccctcttacacagccaagtggagcagctcctctctgttgcctcctaacacttcttcctccagtccatgcctttatgggatttgcattttccaaccccaaacagctaacaacctttgtgtaaggaaaagcagagttctgtt

SEQ ID NO: 30106 - DNA, 1119 bp, Homo sapiens
tttagctgaggttgtgtggtgtttggtggtggcattggttcttgacacattgtgcatatgtgcatgtgtgtgtatgttagaacctcataattcaactttaagtttcaattaatgaatttacatttagaatgatgagttggataggcacaaaggagagataaactatgtacaacagaatcaccagcctaaggagcttgtaatcaagtgagacagttaagactaaatagcatatgaagtaatttgagcaaatacctgttgcactggcttctgctcaccaaagagcagatgtcactaactgacaccagtgatcccaaaggccagctcaggatccttcccagcgcagtcacctccagtgggtcacagttaggatgcacaacaaaatctatttctcattcatgaattagggatcactcctcggcatcaagacttttcattccgagtgagttcagtagaatctcaggggacaagagtcactgtggtaggaagagcagttagggaaagcttgagctaaacctgaaggaatggttcttggatttggtcatgccttttgtataaggggtagtctctaccaagggaggaagcagtagggacatgaaggaccagggagagcagcctgcatgggtcacacatgtgtcaccgcgcagagataacctgtgaagctggacctgataatcgacaacctgaagaactcaaaagaagaatcaagacacagtgggaaaattaggaaccattctggggtgtttgagcatggaactcaygtaataccaatggtacttttggaggatttatgtctagagaaagaagcacatcattgggggtgctgcggggaacctgtgatacaactgagatcaggatttgagtgcaagaggtttatttaaaggtggtcccaggaagtactagtcagagaatagggaaggggaacacacagagaaactagtgtgttcataagcaggtcacctttgtgggcagctgggacccaagcccactgggactcctctgtgaggcagtggtcagaacccttcagaattacattacctggcaggtgggcagcaggggtattgatgctcccattcccacttttcattggcagagggctgctcccagggcattggctctcca

SEQ ID NO: 30107 - DNA, 940 bp, Homo sapiens
ttcgggtgccacttcaccagccagagacttccgcagccagcagcacctctgctagagttttgctcatgactgctgagctggctcctcccacttggcccagcaggctgcgctcagctcatgctaccagcccggatctcacacccaccatgggcaagttaggcatggagcagaaaggggtgtgtgagcaagtgagtgagagtggggtctggccatggtacacctgtgctggctgctgtggtggggcaggcagctccaggggccagcacaggcacaagctctgtgcaaggctatggctggacaaggcatgccttaagtggcttccaccttgagcactggcatttggacaaggggaacacatggtgcctgaacacttagagatgccagcaactgcagagccccaaatgggtgttacagcatgtcacagctctggctcagggagtaccaagatctgggctcccataagggtcacagctcttctctcatagtccggcaaacgagagcatgtcaccacccatagctcggcaatctggccagaaacgtgtttcagcttgrttgttttacagcttgtttggtcctgctgccctgctccagcccacagttcctgggctggcctggccctgccctgcttcccatcatgcagagcagctgcccagcgtcagtagaaggcaggagggatacaatgttacagctcctttcgcagctgccattccacgggtgctgggtttttgtcctgtgtccaggaagaatgaggttacatggacaaccagagagtgagcaaggcagagaagagttttactgagcaataaaacagctcttagtggagaagggccccaaagcaggtagcccctacccagaggtgggtagtcccacgtggctgagtccagaggttttatgggctttagccccatcccagacttactgaattagcactctggggaca

SEQ ID NO: 30108 - DNA, 448 bp, Homo sapiens
tcatttctcctgttgtagtgaaaggtgcgccctctggagcctcccagggtgggtgtgcaggtcacaatgatgaatgtatgatcgtgttcccattacccaaagcctttaaatccctcatgctcagtacamcagggcaggtctagcatttcttcatttagtgtatgctgtccattcatgcaaccacctcaggactgctggattctctgcctagttgagctcctgcatgctgcctccttggggaggtgagggagagggcccatggttcaatgggatctgtgcagttgtaacacattaggtgcttaataaacagaagctgtgatgttaaccacgaggggatactgtcttcctgtttgtctgtgtctctctgtgtgtctccagctaccttgttttttctcttcccaattttgtcattgtctatctcagattctgtttcccctgctgtctctcc

SEQ ID NO: 30109 - DNA, 448 bp, Homo sapiens
tcatttctcctgttgtagtgaaaggtgcgccctctggagcctcccagggtgggtgtgcaggtcacaatgatgaatgtatgatcgtgttcccattacccaaagcctttaaatccctcatgctcagtacaacagggcaggtctagcatttcttcatttagtgtatgctgtccattcatgcaaccacctcaggactsctggattctctgcctagttgagctcctgcatgctgcctccttggggaggtgagggagagggcccatggttcaatgggatctgtgcagttgtaacacattaggtgcttaataaacagaagctgtgatgttaaccacgaggggatactgtcttcctgtttgtctgtgtctctctgtgtgtctccagctaccttgttttttctcttcccaattttgtcattgtctatctcagattctgtttcccctgctgtctctcc

SEQ ID NO: 30110 - DNA, 630 bp, Homo sapiens
atatgaacagcttaaatattcacaaatgaacaaccatgaaaccaccactcgggtcaaaaatcttgagagctcccaaaaatccagatagaactctttctcacagcctagagccatctggtggtgtctgctgtggtagaaggaaatgagtggtgtgtccaaattgaagtgtgacgcaaagggcatttgggaaagttttcattaaagcaaaggcttaacataacttgttttagggaaagatgagtgtggagggggtagttattacaaggatatagtcactcttctagtggtgcaggccaggtrggcccaaaactggagcttagccagggagggttcctggctttgtccaggaaataattcaagggcaacccagtggtgttagtgacttttcttgaaacagtactgcacagtagcagaggtactgctctttgcagagcagggctaccccataggcattgagcacaaagtagcagctcagggccagttctgtagtcatatttagtcccattttcaattacatgcaaattaaggggtgggttattcagaaatttctagaaaagggctgataaattttgggtgttgtcatggcagtggcaaactgtcatggtgctggtgtgcacatcttatggagat

SEQ ID NO: 30111 - DNA, 548 bp, Homo sapiens
cgctcgagttgtcccacctttccagaccaaaccaatgttcattttatatatgttgattgatgtctcatgccttcctaaaatgtacraaaccaaactgtgctctgctgaccttgggcacacatcgtcaggacctcctgaggctgtgtcacgggcacacgtcatcaaccttggcaaaataaactttctgaaaaatctgagacctgtctcagattttcaggattcacaacttgtacggactgtattctctcgctccttgagttcatggtgagctcaaggtggagacaataagaatcttccaaagtgttgctgagatgtttaatctatttggaactacaaacgaatcccctatgcttgggtttgcatcatgttttgttaaatatcatttcagatatttgcagaataatattaacaatgacaatgaaagctaacgcttatgaagcacttcctttgcgcctggcagagttctaactgccttgtatgtactaattcatttaatccttctaacattctatgagacaactactgtaactatccccatttcacggata

SEQ ID NO: 30112 - DNA, 548 bp, Homo sapiens
cgctcgagttgtcccacctttccagaccaaaccaatgttcattttatatatgttgattgatgtctcatgccttcctaaaatgtacgaaaccaaactgtgctctgctgaccttgggcayacatcgtcaggacctcctgaggctgtgtcacgggcacacgtcatcaaccttggcaaaataaactttctgaaaaatctgagacctgtctcagattttcaggattcacaacttgtacggactgtattctctcgctccttgagttcatggtgagctcaaggtggagacaataagaatcttccaaagtgttgctgagatgtttaatctatttggaactacaaacgaatcccctatgcttgggtttgcatcatgttttgttaaatatcatttcagatatttgcagaataatattaacaatgacaatgaaagctaacgcttatgaagcacttcctttgcgcctggcagagttctaactgccttgtatgtactaattcatttaatccttctaacattctatgagacaactactgtaactatccccatttcacggata

SEQ ID NO: 30113 - DNA, 548 bp, Homo sapiens
cgctcgagttgtcccacctttccagaccaaaccaatgttcattttatatatgttgattgatgtctcatgccttcctaaaatgtacgaaaccaaactgtgctctgctgaccttgggcacacrtcgtcaggacctcctgaggctgtgtcacgggcacacgtcatcaaccttggcaaaataaactttctgaaaaatctgagacctgtctcagattttcaggattcacaacttgtacggactgtattctctcgctccttgagttcatggtgagctcaaggtggagacaataagaatcttccaaagtgttgctgagatgtttaatctatttggaactacaaacgaatcccctatgcttgggtttgcatcatgttttgttaaatatcatttcagatatttgcagaataatattaacaatgacaatgaaagctaacgcttatgaagcacttcctttgcgcctggcagagttctaactgccttgtatgtactaattcatttaatccttctaacattctatgagacaactactgtaactatccccatttcacggata

SEQ ID NO: 30114 - DNA, 683 bp, Homo sapiens
cgctgcgttgcccaggcttgtctctaactcctgagctcaagtgatcctcttgccttaacctgccaaactgctgtgattacaggtgtgagccactgtgcctgtacaaaatttgtttccttccgctaatttgtttcttctaagccttcgttaattctttttgggatttgtctttcaagtcagtgttaatatgatgaggttggatttgcacctatgttgaagcaaaaaaaaaaaaaaaaaaaatgaagcaaacataaaaataaataaataaataaataaataactagaaggggtcttggactagaaatcaaaagtataagctstaccatttcatagcaatacccttatgctttctgaaatcagctttttcctttgttaaatgagaatcatacatgcctcaaaagcattttctgcaatgcagaacattctgcatacataagtcattgtaattgttgggcagaaatttgaagatagatgaactatttcagattatacagatgaactatgtcagattatacagtataaaaatctaatggctgtttttatagcaagaaagaagcaacaggccgggcgcggtggctcacgcctgtaatcccagcactttgggaggcaaaggcgggcggatcacgaggtcaggagatcgagaccatcctggctaacacagtgaaaccccgtctctactaaaa

SEQ ID NO: 30115 - DNA, 459 bp, Homo sapiens
ctatgagtaactgtgaagtttgtggtttcactcctttttctatctcgtctgcagtgctgtgctccccccttgcagctcctattcttagcagcagcgtggagtgtcctcctgctggctccccatttccttgtattagaatgacgttcagttaactgccagcctgcctggacctgataaattaattttcagcttttaatgtcattcttgtctggcatatttgcatttgaagaaagaccaatcccttgacatttayaggcaaactattttatcagatggcaggattttagttggagtggtgaggatggaagagggtgacaggcattatacaatgatgtgttgggtgatggcaatataaggcaatgaggatactcccaaagacaaagacagaggtagagagagagaataatgagagaaatagaagagacagagagagacaggaacttgtgtggtctcatcaac

SEQ ID NO: 30116 - DNA, 459 bp, Homo sapiens
ctatgagtaactgtgaagtttgtggtttcactcctttttctatctcgtctgcagtgctgtgctccccccttgcagctcctattcttagcagcagcgtggagtgtcctcctgctggctccccatttccttgtattagaatgacgttcagttaactgccagcctgcctggacctgataaattaattttcagcttttaatgtcattcttgtctggcatatttgcatttgaagaaagaccaatcccttgacatttacaggcaaactattttatcagatggcaggattttagttggagtggtgaggatggaagagggtgacaggcattatacaatgatgtgttggrtgatggcaatataaggcaatgaggatactcccaaagacaaagacagaggtagagagagagaataatgagagaaatagaagagacagagagagacaggaacttgtgtggtctcatcaac

SEQ ID NO: 30117 - DNA, 647 bp, Homo sapiens
caaacattaaaaaaggcaacacatatgtagaatgtacaaagactcttgactggtctttatcaattctatttatgttaatgtgtgaaatgtttaaaagactctagcatgtcatcttagccttcagttacttaaatataactaatgggtacataccasctcgcagcactaattggcaaaattgtcagtaaaatgtagtgttaaaaactggcctttggaatttagatagatctaggttcaaattttaatttttccttatatagggtgattagtctctacaagtcatacatctttgtcttttattggggtgggggtgcactttgtctctctctctttttttttatatttttaattttaaaaaaatgtctttgaaatcaggttgctatgtcacttgaaagcaggacactaatatgtacccagtaggattattgttaagactggaatgaattaatatttattatgtgcttaccatatctcctgacacatagtaagtgatctatcagtgctacaaatgtcttataaataaagtagatacttgatttgtactatgtgtctggctttgtggaccaccaagttaaagaagataaatgatttaatcaatcctttcggtgttgaagatgtgtttttaaatttatttttacaaagagttg

SEQ ID NO: 30118 - DNA, 537 bp, Homo sapiens
tatcttgcccaccattctctttaaatgtgaatatgctgagatcaataatgactgagattagttgcttctgtattttatttttgaatacttagtttaattttgttttaaaattaataaatcacaaaattaaaatgaacaagttcatttaactgtcttcccaggtagttattattattattacgttttagttatatgtttaaaagaggagatatttaatatgtcagcctaattggaaaaatgtgtctttggcatwggtgattttcagaacaaaagctcatctttacaagagctttgtcctctgctttgatcttaaaaaacagaacctgggtggagagtgacagagcagaaacatcagatctgtcactgagaaaccaattttctgagaaagactggaatcgatgtaaaaatgcaatccgttttcaaagttggagccagagcaatcgtacttttcttaagaagtagagttctgcttctctctagtctctgctttcactaatagaaaatagccaagttcacagcaagcatacagttgaacat

SEQ ID NO: 30119 - DNA, 965 bp, Homo sapiens
cttcctgaggtatctattcctgacccatacytctaaggttcctggtctagagtagctgggttgtttatggtaattaatataggattgcattctacatttctacagtcaggtgacagggggcccctatacaaatgtattttcttcttaagggtttgtttttggaagaatggctcagcctcgaaattgggtggtccaccagacctcattccagctagcgcagggctttccccaatagcgacctgtttcaggacatagatgtttgtttgcttgtgacagctgcctttggttccctaaattcccacaatgtacgacttaggaggcatcaaactttatggtctagggggtggaggttctagttatgttgactactagtttgattggatattcttctaccgggctccatccaataattgtgtaccctctcacccctggtagtaggattaatcctaaccacatccacccccagtgatggagcctgctcatagcttccttccaggttttccttagagttaattttaagggttccttaggtgatctatacacttcccattcacccttttcccttccttacgggagttcttttaccagtctcttgacctgagtgtaatgtgttcacacctttcagctgttcgtaggctgtgtcagtgattaggagcacccgataggacctccccagcttgggtggagcttgtcttctttccaagtcttaatcagcactgagttgccaggctggaagtggttaaccatgaactcaagaggcagggtttgagtcaggagtcctttgaacctcagggatgacagggaggaggatatgctcagtatataatttcttaaaaattggtctttggtttccatagtagaaaggccagtagtcctacctaaatacgggagtccatataatagctcgtaaggaaaaaatcccaagtctttccttggggccgtcctaatcctaaggagtgctattg

SEQ ID NO: 30120 - DNA, 965 bp, Homo sapiens
cttcctgaggtatctattcctgacccatacctctaaggttcctggtctagagtagctgggttgtttatggtaattaatataggattgcattctacatttctacagtcaggtgacagggggcccctatacaaaygtattttcttcttaagggtttgtttttggaagaatggctcagcctcgaaattgggtggtccaccagacctcattccagctagcgcagggctttccccaatagcgacctgtttcaggacatagatgtttgtttgcttgtgacagctgcctttggttccctaaattcccacaatgtacgacttaggaggcatcaaactttatggtctagggggtggaggttctagttatgttgactactagtttgattggatattcttctaccgggctccatccaataattgtgtaccctctcacccctggtagtaggattaatcctaaccacatccacccccagtgatggagcctgctcatagcttccttccaggttttccttagagttaattttaagggttccttaggtgatctatacacttcccattcacccttttcccttccttacgggagttcttttaccagtctcttgacctgagtgtaatgtgttcacacctttcagctgttcgtaggctgtgtcagtgattaggagcacccgataggacctccccagcttgggtggagcttgtcttctttccaagtcttaatcagcactgagttgccaggctggaagtggttaaccatgaactcaagaggcagggtttgagtcaggagtcctttgaacctcagggatgacagggaggaggatatgctcagtatataatttcttaaaaattggtctttggtttccatagtagaaaggccagtagtcctacctaaatacgggagtccatataatagctcgtaaggaaaaaatcccaagtctttccttggggccgtcctaatcctaaggagtgctattg

SEQ ID NO: 30121 - DNA, 965 bp, Homo sapiens
cttcctgaggtatctattcctgacccatacctctaaggttcctggtctagagtagctgggttgtttatggtaattaatataggattgcattctacatttctacagtcaggtgacagggggcccctatacaaatgtattttcttcttaagggtttgtttttggaagaatggctcagcctcgaaattgggtggtccaccagacctcattccagctagcgcagggctttccccaatagcgacctgtttcaggacatagatgtttgtttgcttgtgacagctgcctttggttccctaaattcccacaatgtacgayttaggaggcatcaaactttatggtctagggggtggaggttctagttatgttgactactagtttgattggatattcttctaccgggctccatccaataattgtgtaccctctcacccctggtagtaggattaatcctaaccacatccacccccagtgatggagcctgctcatagcttccttccaggttttccttagagttaattttaagggttccttaggtgatctatacacttcccattcacccttttcccttccttacgggagttcttttaccagtctcttgacctgagtgtaatgtgttcacacctttcagctgttcgtaggctgtgtcagtgattaggagcacccgataggacctccccagcttgggtggagcttgtcttctttccaagtcttaatcagcactgagttgccaggctggaagtggttaaccatgaactcaagaggcagggtttgagtcaggagtcctttgaacctcagggatgacagggaggaggatatgctcagtatataatttcttaaaaattggtctttggtttccatagtagaaaggccagtagtcctacctaaatacgggagtccatataatagctcgtaaggaaaaaatcccaagtctttccttggggccgtcctaatcctaaggagtgctattg

SEQ ID NO: 30122 - DNA, 965 bp, Homo sapiens
cttcctgaggtatctattcctgacccatacctctaaggttcctggtctagagtagctgggttgtttatggtaattaatataggattgcattctacatttctacagtcaggtgacagggggcccctatacaaatgtattttcttcttaagggtttgtttttggaagaatggctcagcctcgaaattgggtggtccaccagacctcattccagctagcgcagggctttccccaatagcgacctgtttcaggacatagatgtttgtttgcttgtgacagctgcctttggttccctaaattcccacaatgtacgacttaggaggcatcaaactttatggtctagggggtggaggttctagttatgttgactactagtttgattggatattcttctaccgggctccatccaataattgtgtaccctctcacccctggtagtaggattaatcctaaccacatccacccccagtgatggagcctgctcatagcttccttccaggttttccttagagttaattttaagggttccttaggtgatctatacacttcccattcacccttttcccttccttacgggagttcttttaccagtctcttgacctgagtgtaatgtgttcacacctttcagctgttcgtaggctgtgtcagtgattaggagcacccgataggacctccccagcttgggtggagcttgtcttctttccaagtcttaatcagcactgagttgccaggctggaagtggttaaccatgaactcaagaggcagggtttgagtcaggagtcctttgaacctcagggatgacagggwggaggatatgctcagtatataatttcttaaaaattggtctttggtttccatagtagaaaggccagtagtcctacctaaatacgggagtccatataatagctcgtaaggaaaaaatcccaagtctttccttggggccgtcctaatcctaaggagtgctattg

SEQ ID NO: 30123 - DNA, 1567 bp, Homo sapiens
tgggagtgaactagaggggaaagggttctaagtggacacatcatcttttcttgtgaggccttttggtaccatgggcaagagcatgactggaggagggctaaagtagggtccctaaaatgcaagactgccacagggacctggctggtacaggcagtggggtgatcaactcttgccaactttagctgaacgaccttcatcctgggaacaacctccttcccccagtcctgktgaactgtgacagtcgttccccctggaaagttctatgtagataaggctgctctctatcactgggatctgtgttgtctaggtggaaagtgtttttatagataattcttcagccagtttatgttcaagtaaaaagttactccgtgttgtgagacacgtctcatcagttctccttctctctaaatttaactgcaagtttccagttattttatctgggctgttccaacagcccgggttatacctccactctttaccagtcttgacagtggctgtcatattgggagagtgggctgctcctgaactagcagcactgtgtatatgccacaccagacttctcttatccatccatcactttttactctgtagctttttttccaccctcaaacaggtgcttttcacaaagtcggactgtattgtggtggtacattctgctcagcttttatcatttataaattatacattttaaatttagattctctagattgagaatggctgggtgtctaatttctgtacattcccctatggaatcttttgcaatgcctaacacaacatgcagcacaatctggggatactgtgtgcaaaattctcacatccccctcccttgtgtaaagcaaacattctccatccaatgaactgactacagcactgtgaagtctaacctgacatctcacttctgctgcagtgacatatagcgataatttatctgttatcctcggaggtgcttaacatgctgactgcctccagtaatggatccatccattaattcagcactaagtattcttcagaaatcttcctattttaggactttcatctcaaattgggctcagtgctgagcttctctctggtattgcattatattaacttgttgctgcctcttatcatagactaatgaggctaacctgggttgaacccctctttgttcatagaatctcttgcttattgaacattgtagctaggaatatgaattgcctcatgataggatagtatgctttctgtaaaattccatgatctttcctggtgactctgggtttgcttagctttgttccctacaggcatattgcacaatttattttattctgagttagtttgagatgtgtcaggaaacgccacctggagaaaagaagattagcagagttatttatatgcctggcatattatagttgcttcaaaatattatggaactattatcctttcagtttttaccctaacattcttaattggctaataagtcattcagaatacatactgagattatggtaaccatatcttacactacagaagaaatttaagcgctggaaatgtgtgtagtaccatgtacaataaattaacactcaaaaagctt

SEQ ID NO: 30124 - DNA, 1567 bp, Homo sapiens
tgggagtgaactagaggggaaagggttctaagtggacacatcatcttttcttgtgaggccttttggtaccatgggcaagagcatgactggaggagggctaaagtagggtccctaaaatgcaagactgccacagggacctggctggtacaggcagtggggtgatcaactcttgccaactttagctgaacgaccttcatcctgggaacaacctccttcccccagtcctgtkgaactgtgacagtcgttccccctggaaagttctatgtagataaggctgctctctatcactgggatctgtgttgtctaggtggaaagtgtttttatagataattcttcagccagtttatgttcaagtaaaaagttactccgtgttgtgagacacgtctcatcagttctccttctctctaaatttaactgcaagtttccagttattttatctgggctgttccaacagcccgggttatacctccactctttaccagtcttgacagtggctgtcatattgggagagtgggctgctcctgaactagcagcactgtgtatatgccacaccagacttctcttatccatccatcactttttactctgtagctttttttccaccctcaaacaggtgcttttcacaaagtcggactgtattgtggtggtacattctgctcagcttttatcatttataaattatacattttaaatttagattctctagattgagaatggctgggtgtctaatttctgtacattcccctatggaatcttttgcaatgcctaacacaacatgcagcacaatctggggatactgtgtgcaaaattctcacatccccctcccttgtgtaaagcaaacattctccatccaatgaactgactacagcactgtgaagtctaacctgacatctcacttctgctgcagtgacatatagcgataatttatctgttatcctcggaggtgcttaacatgctgactgcctccagtaatggatccatccattaattcagcactaagtattcttcagaaatcttcctattttaggactttcatctcaaattgggctcagtgctgagcttctctctggtattgcattatattaacttgttgctgcctcttatcatagactaatgaggctaacctgggttgaacccctctttgttcatagaatctcttgcttattgaacattgtagctaggaatatgaattgcctcatgataggatagtatgctttctgtaaaattccatgatctttcctggtgactctgggtttgcttagctttgttccctacaggcatattgcacaatttattttattctgagttagtttgagatgtgtcaggaaacgccacctggagaaaagaagattagcagagttatttatatgcctggcatattatagttgcttcaaaatattatggaactattatcctttcagtttttaccctaacattcttaattggctaataagtcattcagaatacatactgagattatggtaaccatatcttacactacagaagaaatttaagcgctggaaatgtgtgtagtaccatgtacaataaattaacactcaaaaagctt

SEQ ID NO: 30125 - DNA, 596 bp, Homo sapiens
taattcaccaacaattgtggggaaatggatacttttaatagatttcagttcaattctcctttattatggttagaaaaggacacagtgatacacacaagaagcagaatcaccactcttcctgcgccagggacgttatcatgtgcagcctggaagaaaggtcctaaacggtccttcaaaatggatcgtaacagtggctggtgatgactaataactaatcacttaagcatacagagctcttctgctccaaagggggctgtgagcaaaaactaattcagaaatagaacaatcagagttgaaatcaaagctaaaatgttttgaaggcatttttattagttagctaaatttagaccttttccactgggattcttgaaagycctgtccagtttctctggcactaacctacacagttctgcctggacacagtatgtgagagacaggaggcccaggtcctattgctaaccatatttttctgagatgctggtcaagctgggtaacttcctatactttggatgctgaacggcatggggaatgactctccctggccggccagtgtgtgtgtgcaactgtggattctcccctggttttatggcgagtta

SEQ ID NO: 30126 - DNA, 310 bp, Homo sapiens
tccaccccccaccccccatactgggcctcttgcgcctggtctccacaggcacatctacatattgctatggttcccatgccatgcygcctgccagggtatggcccaagcagaggctcatggagaccttcagctaaagccacgtagtctaacacggcattgagagtccaccatggaaccaactaataataacaaacagcactttccttccaattccttgtatgtttgtccaccatgtgggcatggcagaaaggtgggtaatgggcaaggaaggagctgcgaatccatgggggcactggccatctactcagca

SEQ ID NO: 30127 - DNA, 789 bp, Homo sapiens
atatatatatatatatatatatayacacacaacaagtagttaatatatgctattaaggaaaataatgtagcaagagaggaatacagtatgataagctggaaggaagtgctactgttttgggtaaacagagagttcctgagcagacacctgaaaagaacaaggcgaaccacacatagatctagggatggacattatgcacacaaagccaagtgcaaagacctgaggtaaagatgtacctggcatagcagaggcccagcaaggctgctgtggctggaacagtgggcatggacaagagagctgagaaataagctcagagcaaaggttaagaaccaggccagggaaggcctagtagaaataatatggtctttggctacttctctaagtataacaggaagtcgatgaaagattttgaggagggcagtgagatactgtgacttacattttaaaaccagtgctctggctactgtgtgaaaaactgtaacaggggattggggaaagaggggaagcaggaaaaccacttcagaggatacataaaaaaatccaggcaggagatggtgatggcctggaccacactgataggaatgcaaaaggtgagaagtgggtggacatttgacatattttgaagacctagtagcatttgtcaatgcgattacaagtttcatttgaaaaagggaggtatcacttgggtgcagtggctcacatctgtaatcccagcactttgagagaccaaggtggaatggaaggattgcttgagcccaggagttggagaccagcctgggcaacatagta

SEQ ID NO: 30128 - DNA, 789 bp, Homo sapiens
atatatatatatatatatatatatacacacaacaagtagttaatatatgctattaaggaaaataatgtagcaagagaggaatacagtatgataagctggaaggaagtgctactgytttgggtaaacagagagttcctgagcagacacctgaaaagaacaaggcgaaccacacatagatctagggatggacattatgcacacaaagccaagtgcaaagacctgaggtaaagatgtacctggcatagcagaggcccagcaaggctgctgtggctggaacagtgggcatggacaagagagctgagaaataagctcagagcaaaggttaagaaccaggccagggaaggcctagtagaaataatatggtctttggctacttctctaagtataacaggaagtcgatgaaagattttgaggagggcagtgagatactgtgacttacattttaaaaccagtgctctggctactgtgtgaaaaactgtaacaggggattggggaaagaggggaagcaggaaaaccacttcagaggatacataaaaaaatccaggcaggagatggtgatggcctggaccacactgataggaatgcaaaaggtgagaagtgggtggacatttgacatattttgaagacctagtagcatttgtcaatgcgattacaagtttcatttgaaaaagggaggtatcacttgggtgcagtggctcacatctgtaatcccagcactttgagagaccaaggtggaatggaaggattgcttgagcccaggagttggagaccagcctgggcaacatagta

SEQ ID NO: 30129 - DNA, 789 bp, Homo sapiens
atatatatatatatatatatatatacacacaacaagtagttaatatatgctattaaggaaaataatgtagcaagagaggaatacagtatgataagctggaaggaagtgctactgttttgggtaaacagagagttcctgagcagacacctgaaaagaacaaggcgaaccacacatagatctagggatggacattatgcacrcaaagccaagtgcaaagacctgaggtaaagatgtacctggcatagcagaggcccagcaaggctgctgtggctggaacagtgggcatggacaagagagctgagaaataagctcagagcaaaggttaagaaccaggccagggaaggcctagtagaaataatatggtctttggctacttctctaagtataacaggaagtcgatgaaagattttgaggagggcagtgagatactgtgacttacattttaaaaccagtgctctggctactgtgtgaaaaactgtaacaggggattggggaaagaggggaagcaggaaaaccacttcagaggatacataaaaaaatccaggcaggagatggtgatggcctggaccacactgataggaatgcaaaaggtgagaagtgggtggacatttgacatattttgaagacctagtagcatttgtcaatgcgattacaagtttcatttgaaaaagggaggtatcacttgggtgcagtggctcacatctgtaatcccagcactttgagagaccaaggtggaatggaaggattgcttgagcccaggagttggagaccagcctgggcaacatagta

SEQ ID NO: 30130 - DNA, 601 bp, Homo sapiens
atactgttgtctaacataagtgtggtggtggtgaggatgcatacagcccagcagaattttagaaactgtccaatccaatttggtcaaaacccaatttattgtgggtttctaccaaaatgtttgaggttttggtcaaarcctacaataaaaatgctgtgtcaagcatgcccagaacacaagagcatatgagagaccctgagagtgtgtctgtgaataaaggcggggcactatcatgtaaacatacgttatgagaagcttgctctctaagctgagttacaatatatcacaataattatgtaaatcacaagcaatgtttctgatgaatctggctctgttttattgattagaatcctaatacctgaagctgatcttcattgcttgttagccacgtggtacggctacctgcttttccaccgtgattaacttcttgccatgtaaatagtgtgttccaacatcagtagtgtatgggcacaaaacaaactgaatcactctaattcttgttctccacctttagctaatttgccactgataaaatccagtgtccaaatgtggacaaatatctttgattatttaatatttggcacatgaatcttgaatagct

SEQ ID NO: 30131 - DNA, 595 bp, Homo sapiens
ttttttaaagacagcacctcactctgtcacccaggctggagtgcagtggcttgatctcagctcacggcaagctccacctcccgggttcacctgccattctcctgcctcagcctcccgagtagctgggactacaggtgcctgccaccatgcccggctaatttttgtatttttagtagagatggggtttcaccatgttaggcaggatggtctygatctcctgacctagtgatctgcccaccttggcctcccaaagtgctgggattacaggtgtgagccaccacgcccggccaagacattttaatcttaagtgaatagtccagagaatcatgtcccctgacacacaagtccagctgtttatttcaggttggcagtttgctttattactttcataccagatgaattgcaaagattaattattattgctaacctcttaaagattaaaagcactacactggtgttaggcattgtttcatgttttctggagccatatgattcagagaaacccccaaagtgtgatttattccctttttcttacaggacagtgcagtggacagagcaagagtttggcatcagacctaccagggtccacattcca

SEQ ID NO: 30132 - DNA, 488 bp, Homo sapiens
gtctctacaaaaaaatacaaaaattagccaggtgtggtggcgtgtacctgtagtcccagctgggaggatcgcttgagcctaggaggttgaggctacagtgagccacgattgtgccactgcactccagcctgggtgacagagcgggaccccgtttctaaaattaataataataattaaaaagcaaattattttctcttggaaaaataattttccaggaacctctcaaagttcaggtttgctagtgtttttaatgtttttattgctgtcattggtaatgacttcagaatttcatgattcagagactccaggaagcagagaatcgaaaccaggaactgagtcaaagtgtttcatcaacaacaagaccattgcttcgacaaatagaaaatttgcaagcaaccctgggatcccagacatcgtcgtgggagaaattagagaagaatctttctsataggcttggtaactgctttagtttttatgctcgatgcaga

SEQ ID NO: 30133 - DNA, 615 bp, Homo sapiens
gattgtcaaatgtggtcccagaataagcagcagcagcattaccagggaatttgtcagaaatgcaaatatttaggccccatccaagacctactgaatcagagactctgtcagtggactcagtaatctgtatttagccctttaggtgattttgatccacaataacatttgagaatcactatatggactttagaaaagtgtataaaaaaccttttttcccactacacatcaaaggcaagcaattctggtttatataattcctggattatacgtgctcttgatgagcttgaaatgttacattgcttttttcctrtggaggctcccttcattagaattgtaacatttccaaagctatgatctatgtttggctttggcttttatagatcatcctggtttctttattggaggtcctaaaaatgggggaggaggggtcgaaggaagaaaaagaagtagaaggtaaccctggagtttcagacctgaatgcgtgacagaatggagataagacagaaaactgggaaccagaagcaaccactaggcctaaaaatgagcagcttggtttggggacagattgaacgtgctaagaaaaccctgagtgatctaaagggaaagggagatttg

SEQ ID NO: 30134 - DNA, 1150 bp, Homo sapiens
tcatatggattcagaagcccaccctgctcgctactcaggcatgacctcatcttaactaattacatctgcagtgaccccattcccagattaggttacattctgagatactgggagctgggactttagtattggaatttgaaaataagacaattcaaccaataacagtatgtgttcaataaattcaagtcagatatatgaaaaaataaaaattgagtataaagataatttttggctacattgactggattccaagaatcttccattctgtctaaagaagatagacacgttaaaaatcaaacgagaaaaaacagtragtgaaggggatgaatgcagccagtgggtagttagactatgcaaaaacaagtgcgccagaatcacaactcaacgtatattaaggctttcatttggtggtgttttgaattagaaatatttaatgtcgatcagcctcagtttccttagcattatctacttcgcagttgttgagacaattaactacaatatcctaagttgcacacaattattgggccagacttctacactgtgagtatctgcaaaaaaaagaaaaaaaaaaaacattgttcactgctgtgcttcttccctctgatttaccaataagggaaacatcttccatatttccaaaaacccctggttttccttgagtacaccttgacatcatgcaaaacatcttcttcctcaagtcagccaggccctgctgtacgctaagctgcaacccactgggctcagcattcaatcaggcagacatccttaaaagatcacacatccttagctatggaagaataatatttatgcactgcttaatcatgtgaagaagcacagactctccagtctcaagtggagacattgggtgatgtataggcttagagatcctcatattgggaaagagtcagttactgatcttggctcttcacttgccaagatggaactgtttggtttcaattctatgaacatacttacaaagtagtaggaacttcaatactgtgtgcttctgcttagttgggttgtactgaatttgtaagtccagtgaggttgtattttccctttgttctgatgagaggtctagccactttgtgtttcaactgttataatgtccatattcagttttcttattcccccataaaagttcatgaga

SEQ ID NO: 30135 - DNA, 1150 bp, Homo sapiens
tcatatggattcagaagcccaccctgctcgctactcaggcatgacctcatcttaactaattacatctgcagtgaccccattcccagattaggttacattctgagatactgggagctgggactttagtattggaatttgaaaataagacaattcaaccaataacagtatgtgttcaataaattcaagtcagatatatgaaaaaataaaaattgagtataaagataatttttggctacattgactggattccaagaatcttccattctgtctaaagaagatagacacgttaaaaatcaaacgagaaaaaacagtaagtgaagrggatgaatgcagccagtgggtagttagactatgcaaaaacaagtgcgccagaatcacaactcaacgtatattaaggctttcatttggtggtgttttgaattagaaatatttaatgtcgatcagcctcagtttccttagcattatctacttcgcagttgttgagacaattaactacaatatcctaagttgcacacaattattgggccagacttctacactgtgagtatctgcaaaaaaaagaaaaaaaaaaaacattgttcactgctgtgcttcttccctctgatttaccaataagggaaacatcttccatatttccaaaaacccctggttttccttgagtacaccttgacatcatgcaaaacatcttcttcctcaagtcagccaggccctgctgtacgctaagctgcaacccactgggctcagcattcaatcaggcagacatccttaaaagatcacacatccttagctatggaagaataatatttatgcactgcttaatcatgtgaagaagcacagactctccagtctcaagtggagacattgggtgatgtataggcttagagatcctcatattgggaaagagtcagttactgatcttggctcttcacttgccaagatggaactgtttggtttcaattctatgaacatacttacaaagtagtaggaacttcaatactgtgtgcttctgcttagttgggttgtactgaatttgtaagtccagtgaggttgtattttccctttgttctgatgagaggtctagccactttgtgtttcaactgttataatgtccatattcagttttcttattcccccataaaagttcatgaga

SEQ ID NO: 30136 - DNA, 1150 bp, Homo sapiens
tcatatggattcagaagcccaccctgctcgctactcaggcatgacctcatcttaactaattacatctgcagtgaccccattcccagattaggttacattctgagatactgggagctgggactttagtattggaatttgaaaataagacaattcaaccaataacagtatgtgttcaataaattcaagtcagatatatgaaaaaataaaaattgagtataaagataatttttggctacattgactggattccaagaatcttccattctgtctaaagaagatagacacgttaaaaatcaaacgagaaaaaacagtaagtgaaggggatgaatgcagccagtgggtagttagactatgcaaaaacaagtgcgccagaatcacaactcaacrtatattaaggctttcatttggtggtgttttgaattagaaatatttaatgtcgatcagcctcagtttccttagcattatctacttcgcagttgttgagacaattaactacaatatcctaagttgcacacaattattgggccagacttctacactgtgagtatctgcaaaaaaaagaaaaaaaaaaaacattgttcactgctgtgcttcttccctctgatttaccaataagggaaacatcttccatatttccaaaaacccctggttttccttgagtacaccttgacatcatgcaaaacatcttcttcctcaagtcagccaggccctgctgtacgctaagctgcaacccactgggctcagcattcaatcaggcagacatccttaaaagatcacacatccttagctatggaagaataatatttatgcactgcttaatcatgtgaagaagcacagactctccagtctcaagtggagacattgggtgatgtataggcttagagatcctcatattgggaaagagtcagttactgatcttggctcttcacttgccaagatggaactgtttggtttcaattctatgaacatacttacaaagtagtaggaacttcaatactgtgtgcttctgcttagttgggttgtactgaatttgtaagtccagtgaggttgtattttccctttgttctgatgagaggtctagccactttgtgtttcaactgttataatgtccatattcagttttcttattcccccataaaagttcatgaga

SEQ ID NO: 30137 - DNA, 1150 bp, Homo sapiens
tcatatggattcagaagcccaccctgctcgctactcaggcatgacctcatcttaactaattacatctgcagtgaccccattcccagattaggttacattctgagatactgggagctgggactttagtattggaatttgaaaataagacaattcaaccaataacagtatgtgttcaataaattcaagtcagatatatgaaaaaataaaaattgagtataaagataatttttggctacattgactggattccaagaatcttccattctgtctaaagaagatagacacgttaaaaatcaaacgagaaaaaacagtaagtgaaggggatgaatgcagccagtgggtagttagactatgcaaaaacaagtgcgccagaatcacaactcaacgtatattaaggctttcatttggtggtgttttgaattagaaatatttaatgtcgatcagcctcagtttccttagcattatctacttcgcagttgttgagacaattaactacaatatcctaagttgcacacaattattgggccagacttctacactgtgagtatctgcaaaaaaaagaaaaaaaaaaaacattgttcactgctgtgcttcttccctctgatttaccaataagggaaacatcttccatatttccaaaaacccctggttttccttgagtacaccttgacatcatgcaaaacatcttcttcctcaagtcagccaggccctgctgtacgctaagctgcaacccactgggctcagcattcaatcaggcagacrtccttaaaagatcacacatccttagctatggaagaataatatttatgcactgcttaatcatgtgaagaagcacagactctccagtctcaagtggagacattgggtgatgtataggcttagagatcctcatattgggaaagagtcagttactgatcttggctcttcacttgccaagatggaactgtttggtttcaattctatgaacatacttacaaagtagtaggaacttcaatactgtgtgcttctgcttagttgggttgtactgaatttgtaagtccagtgaggttgtattttccctttgttctgatgagaggtctagccactttgtgtttcaactgttataatgtccatattcagttttcttattcccccataaaagttcatgaga

SEQ ID NO: 30138 - DNA, 1150 bp, Homo sapiens
tcatatggattcagaagcccaccctgctcgctactcaggcatgacctcatcttaactaattacatctgcagtgaccccattcccagattaggttacattctgagatactgggagctgggactttagtattggaatttgaaaataagacaattcaaccaataacagtatgtgttcaataaattcaagtcagatatatgaaaaaataaaaattgagtataaagataatttttggctacattgactggattccaagaatcttccattctgtctaaagaagatagacacgttaaaaatcaaacgagaaaaaacagtaagtgaaggggatgaatgcagccagtgggtagttagactatgcaaaaacaagtgcgccagaatcacaactcaacgtatattaaggctttcatttggtggtgttttgaattagaaatatttaatgtcgatcagcctcagtttccttagcattatctacttcgcagttgttgagacaattaactacaatatcctaagttgcacacaattattgggccagacttctacactgtgagtatctgcaaaaaaaagaaaaaaaaaaaacattgttcactgctgtgcttcttccctctgatttaccaataagggaaacatcttccatatttccaaaaacccctggttttccttgagtacaccttgacatcatgcaaaacatcttcttcctcaagtcagccaggccctgctgtacgctaagctgcaacccactgggctcagcattcaatcaggcagacatccttaaaagatcacacatccttagctayggaagaataatatttatgcactgcttaatcatgtgaagaagcacagactctccagtctcaagtggagacattgggtgatgtataggcttagagatcctcatattgggaaagagtcagttactgatcttggctcttcacttgccaagatggaactgtttggtttcaattctatgaacatacttacaaagtagtaggaacttcaatactgtgtgcttctgcttagttgggttgtactgaatttgtaagtccagtgaggttgtattttccctttgttctgatgagaggtctagccactttgtgtttcaactgttataatgtccatattcagttttcttattcccccataaaagttcatgaga

SEQ ID NO: 30139 - DNA, 1150 bp, Homo sapiens
tcatatggattcagaagcccaccctgctcgctactcaggcatgacctcatcttaactaattacatctgcagtgaccccattcccagattaggttacattctgagatactgggagctgggactttagtattggaatttgaaaataagacaattcaaccaataacagtatgtgttcaataaattcaagtcagatatatgaaaaaataaaaattgagtataaagataatttttggctacattgactggattccaagaatcttccattctgtctaaagaagatagacacgttaaaaatcaaacgagaaaaaacagtaagtgaaggggatgaatgcagccagtgggtagttagactatgcaaaaacaagtgcgccagaatcacaactcaacgtatattaaggctttcatttggtggtgttttgaattagaaatatttaatgtcgatcagcctcagtttccttagcattatctacttcgcagttgttgagacaattaactacaatatcctaagttgcacacaattattgggccagacttctacactgtgagtatctgcaaaaaaaagaaaaaaaaaaaacattgttcactgctgtgcttcttccctctgatttaccaataagggaaacatcttccatatttccaaaaacccctggttttccttgagtacaccttgacatcatgcaaaacatcttcttcctcaagtcagccaggccctgctgtacgctaagctgcaacccactgggctcagcattcaatcaggcagacatccttaaaagatcacacatccttagctatggaagaataatatttatgcactgcttaatcatgtgaagaagcacagactctccagtctcaagtggagacattgggtgatgtataggcttagagatcctcatattgggaaagagtcagttactgatcttggctcttcacttgccaagatggaactgtttggtttcaattctrtgaacatacttacaaagtagtaggaacttcaatactgtgtgcttctgcttagttgggttgtactgaatttgtaagtccagtgaggttgtattttccctttgttctgatgagaggtctagccactttgtgtttcaactgttataatgtccatattcagttttcttattcccccataaaagttcatgaga

SEQ ID NO: 30140 - DNA, 1278 bp, Homo sapiens
agacaagtaacttgatgttcagctgacttctgtcataccaagatcatctaataagttagtggtagaatatgtgttcgagacaggtttatgaagctccaaaacccacactctttctcctaagactttttcatccacttctaccactaacttattccctgactcagcttckcaatgacacaatagaattcacatatgaaagaaacattctgacaccagtaattcaagacaaatgctacagtaagacctgtgcaccagctgcaaatggcgcattggcataaggtaactgtactcaggtgggaattcttacatcttcgtttgcctagattagtcctggtttatttctgttgtcccatccagttagtggctctgttaactctcaaaagtgtcccagttttcctttctataggaaacatcaggatgacatccatgtacatgaaagtcatggtttgcaccaagaattaatgtcttatgggctaatgtttccactcagttgtcatcattgtcatcaacgtgtttcttgatgtctgtcataaagtgtcactatagatgtttgcatgttcctctatttttctgcagctgaatatgttaaggagaaaatagggtgtttgtgacttttcttaagctgaaaatcattttgaagttgcgagcaactcctttaagaattaatttaacagtctgatcacaagcaaaggattgccactttgcaatcagctttctggagttttgagagatgacatttaaagagctggagatttctcagcactgcagcatttacaggtgcagccaacacattgttatctttgcttctgaaattcaggcagcacatggataattaaaatatatagaaaactcccagccatattttactcttaagagatgcagtagaatattatagttaggcgttcaattggatgtaagattagagatgggaggacatagtattactcggagatggtctctgtaggcaaactgcctgggtttgaatttagattatcccactaaccaatcatgtggccctcttcaaggtatttaatttatttatgaaatatcaattttaataagacacggagactctactgaaaattatatgatagaacatatgcaaagcagttgggatagttccctagcctatagcaaaaatttgatcttatcattgttaacttaaagagagatggaggcagtgcaatacacatctggattctagagatgagggtcaaacactggggaaagtgagtatcaatatctatttttacctttatatctaattatgcagaaatt

SEQ ID NO: 30141 - DNA, 1278 bp, Homo sapiens
agacaagtaacttgatgttcagctgacttctgtcataccaagatcatctaataagttagtggtagaatatgtgttcgagacaggtttatgaagctccaaaacccacactctttctcctaagactttttcatccacttctaccactaacttattccctgactcagcttcgcaatgacacaatagaattcacatatgaaagaaacattctgacaccagtaattcaagacaaatgctacagtaagacctgtgcaccagctgcaaatggcgcattggcataaggtaactgtactcaggtgggaattcttacatcttcgtttgcctagattagtcctggtttatttctgttgtcccatccagttagtggctctgttaactctcaaaagtgtcccagttttcctttctataggaaacatcaggatgacatccatgtacatgaaagtcatggtttgcaccaagaattaatgtcttatgggctaatgtttccactcagttgtcatcattgtcatcaacgtgtttcttgatgtctgtcataaagtgtcactatagatgtttgcatgttcctctatttttctgcagctgaatatgttaaggagaaaatagggtgtttgtgacttttcttaagctgaaaatcattttgaagttgcgagcaactcctttaagaattaatttaacagtctgatcacaagcaaaggattgccactttgcaatcagctttctggagttttgagagatgacatttaaagagctggagatttctcagcactgcagcatttacaggtgcagccaacacattgttatctttgcttctgaaattcaggcagcacatggataattaaaatatatagaaaactcccagccatattttactcttaagagatgcagtagaatattatmgttaggcgttcaattggatgtaagattagagatgggaggacatagtattactcggagatggtctctgtaggcaaactgcctgggtttgaatttagattatcccactaaccaatcatgtggccctcttcaaggtatttaatttatttatgaaatatcaattttaataagacacggagactctactgaaaattatatgatagaacatatgcaaagcagttgggatagttccctagcctatagcaaaaatttgatcttatcattgttaacttaaagagagatggaggcagtgcaatacacatctggattctagagatgagggtcaaacactggggaaagtgagtatcaatatctatttttacctttatatctaattatgcagaaatt

SEQ ID NO: 30142 - DNA, 1278 bp, Homo sapiens
agacaagtaacttgatgttcagctgacttctgtcataccaagatcatctaataagttagtggtagaatatgtgttcgagacaggtttatgaagctccaaaacccacactctttctcctaagactttttcatccacttctaccactaacttattccctgactcagcttcgcaatgacacaatagaattcacatatgaaagaaacattctgacaccagtaattcaagacaaatgctacagtaagacctgtgcaccagctgcaaatggcgcattggcataaggtaactgtactcaggtgggaattcttacatcttcgtttgcctagattagtcctggtttatttctgttgtcccatccagttagtggctctgttaactctcaaaagtgtcccagttttcctttctataggaaacatcaggatgacatccatgtacatgaaagtcatggtttgcaccaagaattaatgtcttatgggctaatgtttccactcagttgtcatcattgtcatcaacgtgtttcttgatgtctgtcataaagtgtcactatagatgtttgcatgttcctctatttttctgcagctgaatatgttaaggagaaaatagggtgtttgtgacttttcttaagctgaaaatcattttgaagttgcgagcaactcctttaagaattaatttaacagtctgatcacaagcaaaggattgccactttgcaatcagctttctggagttttgagagatgacatttaaagagctggagatttctcagcactgcagcatttacaggtgcagccaacacattgttatctttgcttctgaaattcaggcagcacatggataattaaaatatatagaaaactcccagccatattttactcttaagagatgcagtagaatattatagttaggcgttcaattggatgtaagattagagatgggaggacatagtattactcggagatggtctctgtaggcaaactgcctgggtttgaatttagattatcccrctaaccaatcatgtggccctcttcaaggtatttaatttatttatgaaatatcaattttaataagacacggagactctactgaaaattatatgatagaacatatgcaaagcagttgggatagttccctagcctatagcaaaaatttgatcttatcattgttaacttaaagagagatggaggcagtgcaatacacatctggattctagagatgagggtcaaacactggggaaagtgagtatcaatatctatttttacctttatatctaattatgcagaaatt

SEQ ID NO: 30143 - DNA, 1278 bp, Homo sapiens
agacaagtaacttgatgttcagctgacttctgtcataccaagatcatctaataagttagtggtagaatatgtgttcgagacaggtttatgaagctccaaaacccacactctttctcctaagactttttcatccacttctaccactaacttattccctgactcagcttcgcaatgacacaatagaattcacatatgaaagaaacattctgacaccagtaattcaagacaaatgctacagtaagacctgtgcaccagctgcaaatggcgcattggcataaggtaactgtactcaggtgggaattcttacatcttcgtttgcctagattagtcctggtttatttctgttgtcccatccagttagtggctctgttaactctcaaaagtgtcccagttttcctttctataggaaacatcaggatgacatccatgtacatgaaagtcatggtttgcaccaagaattaatgtcttatgggctaatgtttccactcagttgtcatcattgtcatcaacgtgtttcttgatgtctgtcataaagtgtcactatagatgtttgcatgttcctctatttttctgcagctgaatatgttaaggagaaaatagggtgtttgtgacttttcttaagctgaaaatcattttgaagttgcgagcaactcctttaagaattaatttaacagtctgatcacaagcaaaggattgccactttgcaatcagctttctggagttttgagagatgacatttaaagagctggagatttctcagcactgcagcatttacaggtgcagccaacacattgttatctttgcttctgaaattcaggcagcacatggataattaaaatatatagaaaactcccagccatattttactcttaagagatgcagtagaatattatagttaggcgttcaattggatgtaagattagagatgggaggacatagtattactcggagatggtctctgtaggcaaactgcctgggtttgaatttagattatcccactaaccaatcatgtggccctcttcaaggtatttaatttatttatgaaatatmaattttaataagacacggagactctactgaaaattatatgatagaacatatgcaaagcagttgggatagttccctagcctatagcaaaaatttgatcttatcattgttaacttaaagagagatggaggcagtgcaatacacatctggattctagagatgagggtcaaacactggggaaagtgagtatcaatatctatttttacctttatatctaattatgcagaaatt

SEQ ID NO: 30144 - DNA, 1278 bp, Homo sapiens
agacaagtaacttgatgttcagctgacttctgtcataccaagatcatctaataagttagtggtagaatatgtgttcgagacaggtttatgaagctccaaaacccacactctttctcctaagactttttcatccacttctaccactaacttattccctgactcagcttcgcaatgacacaatagaattcacatatgaaagaaacattctgacaccagtaattcaagacaaatgctacagtaagacctgtgcaccagctgcaaatggcgcattggcataaggtaactgtactcaggtgggaattcttacatcttcgtttgcctagattagtcctggtttatttctgttgtcccatccagttagtggctctgttaactctcaaaagtgtcccagttttcctttctataggaaacatcaggatgacatccatgtacatgaaagtcatggtttgcaccaagaattaatgtcttatgggctaatgtttccactcagttgtcatcattgtcatcaacgtgtttcttgatgtctgtcataaagtgtcactatagatgtttgcatgttcctctatttttctgcagctgaatatgttaaggagaaaatagggtgtttgtgacttttcttaagctgaaaatcattttgaagttgcgagcaactcctttaagaattaatttaacagtctgatcacaagcaaaggattgccactttgcaatcagctttctggagttttgagagatgacatttaaagagctggagatttctcagcactgcagcatttacaggtgcagccaacacattgttatctttgcttctgaaattcaggcagcacatggataattaaaatatatagaaaactcccagccatattttactcttaagagatgcagtagaatattatagttaggcgttcaattggatgtaagattagagatgggaggacatagtattactcggagatggtctctgtaggcaaactgcctgggtttgaatttagattatcccactaaccaatcatgtggccctcttcaaggtatttaatttatttatgaaatatcaattttaataagacacggagactctactgaaaattatatgatagaacatatgcaaagcagttgggatagttccctagcctatagcaaaaatttgatcttatcattgttaacttaaagagagatggaggsagtgcaatacacatctggattctagagatgagggtcaaacactggggaaagtgagtatcaatatctatttttacctttatatctaattatgcagaaatt

SEQ ID NO: 30145 - DNA, 562 bp, Homo sapiens
acaaacagggtgcttgatgttcagaaatgcttagcatcaggtgtgagttccaacagctagcaattgatcaacctgaagtttgaatgtattcatcctgtttccaaagcctattcccattctgtctatttgcaccaccttgtccyccaggctgaagaatttgaacttgagctgggagatatttgatagttattgaggcaacaaggtacctgatggaaggttcttaggtttgttgttttgtttgtttgacgttttgtttttaagcaaaattgacctggcaatggtgggcaggaatcattcatctttatatgctttgctaccaaatggtttctcatgcctaaaattatccccatcatgtccaacttgcttaccttccccaataagttcaccctaattatttgaaatggcataaatgatgctctcctctctaatcagaactggttggtaaatatctctatccaatccctcaaaagttggtgtttcaggcagacagcaacaaaattaacatattgataaaccaaccagtgaaatccacctaattttgttgcttcgaaggctgtgaagc

SEQ ID NO: 30146 - DNA, 750 bp, Homo sapiens
gcatagaaaattggtcataaggtgctataaattttcctaaaagaaaagtaggagacatcagagggaaaagagaaacatttctgaggcaaactattgtattttctttctcctgatactgttcccatctggctcccttttcatagaatttgggtgtttctgtagagttaggagaggcacagaattaggaaaagttttgaaagctctgcagtcattcttgtgacctgtgtcagtcttggtcaaaaatgtatacgctgaaacagacaagaggagttgcattaactgtcctgtttgtaattctttcatgaaatgaaaatactaaaatattgtacattaatctcacgtagcttggacttttcctgtgtttcagcctctgggccactcatggtctaacgctttgagacaggatgctggatgctgcctgatattcattcttcccttcgttcttctttcttagtyacagaattctgattctcagctagatacatgacttcccaaccagaagtttactctttttttaacctctttcaaagctagatgtgatgtgtaactaaattctggccaaagggctgtaggtagaagtgtctcaagagtcttctggagagtctccttaaaaaagaatagtgtgttctttctccttcttcttagctggaacttggttgtgatggcaggagctaggtcagctctctggtaccatgaagtcaacatgctgaggttagtggagcaataagattaaaaagcccaggtctctga

SEQ ID NO: 30147 - DNA, 567 bp, Homo sapiens
cacccattctaaatggagaaaattcccaagcatggagtcaatttaatacatttcgagagtttactctacaaaagccaacatctttccagacttggggcaggaggttctctctacccaggagataaatccaaagactgtacagctaatacttggacgtgtctagcatcatgctcagtggtttacctgaatcatctctaattctcacagcaaccattttgcagacaagaaatctgcagcttgtaaaaaataagcccaagatgcaaaccctggtttttctgcctccaaagcccatatggcttccacaacaccaacctaccacttagacgcaatagaagaataccagatctcaagagaagtaggagcctgcatcactacagttgatgtcaggggcaggaatcaagagtgaagaaaaggagatgtcaagatgtctggggagtgtgtctctcctgaacactgaaggaaagagatccataggggtgtgtgtgtgtgtgcgtgtgtgtgtgtgtgtgtgtgtgtgtgtgtgtgacacagaragaggtcttacaaacacacatttttaaattttta

SEQ ID NO: 30148 - DNA, 668 bp, Homo sapiens
tgataaacccactcttccgctagttaaatccatgtcaccttcttgacaagcaatagtgctgaggtcagaactctccccatagccataccctaaaagatggtacatccagacaatagaatattattcaacgcaaaaaggaagtgtgacatcaagccgtgaaaagacattgagggaccttaaatgcayatttctaagtgaaagaagccaatctgaaaaggttacatactgtatgattccaactatatgacattctggaaaaggcaaaactatggagacagtgaaaagatcagtggttgccaggaggtaggggcttagggaagaataaataggtagaacatagatgattttttttcatgaaattactctgtatgtcactatagtggtggatacaagtcattatgcatttgttcaaacccatagaatgtacaacaccaagggtgaattttaatgtatactatggactttaggcgataattttgtgtccatgtaggcctatcagttgtaacaattaatgttgttacaagttggtactattctggtgggggatgtggatcacagggatggctattcatgtgtagggcagggggtatttgggatatctctgtacattctgttcaattttgctgtgaacctaagactgctcttaaaaataaagtctgaaaaatgct

SEQ ID NO: 30149 - DNA, 668 bp, Homo sapiens
tgataaacccactcttccgctagttaaatccatgtcaccttcttgacaagcaatagtgctgaggtcagaactctccccatagccataccctaaaagatggtacatccagacaatagaatattattcaacgcaaaaaggaagtgtgacatcaagccgtgaaaagacattgagggaccttaaatgcacatttctaagtgaaagaagccaatctgaaaaggttacatactgtatgattccaactatatgacattctggaaaaggcaaaactatggagacagtgaaaagatcagtggttgccaggaggtaggggcttagggaagaataaataggtagaacatagatgattttttttcatgaaattactctgtatgtcactatagtggtggatacaagtcattatgcatttgttcaaacccatagaatgtacaacaccaagggtgaattttaatgtatactatggactttaggcgataattttgtgtccatgtaggcctatcagttgtaacaattaatrttgttacaagttggtactattctggtgggggatgtggatcacagggatggctattcatgtgtagggcagggggtatttgggatatctctgtacattctgttcaattttgctgtgaacctaagactgctcttaaaaataaagtctgaaaaatgct

SEQ ID NO: 30150 - DNA, 668 bp, Homo sapiens
tgataaacccactcttccgctagttaaatccatgtcaccttcttgacaagcaatagtgctgaggtcagaactctccccatagccataccctaaaagatggtacatccagacaatagaatattattcaacgcaaaaaggaagtgtgacatcaagccgtgaaaagacattgagggaccttaaatgcacatttctaagtgaaagaagccaatctgaaaaggttacatactgtatgattccaactatatgacattctggaaaaggcaaaactatggagacagtgaaaagatcagtggttgccaggaggtaggggcttagggaagaataaataggtagaacatagatgattttttttcatgaaattactctgtatgtcactatagtggtggatacaagtcattatgcatttgttcaaacccatagaatgtacaacaccaagggtgaattttaatgtatactatggactttaggcgataattttgtgtccatgtaggcctatcagttgtaacaattaatgttgttacaagttggtactattctggtggggkatgtggatcacagggatggctattcatgtgtagggcagggggtatttgggatatctctgtacattctgttcaattttgctgtgaacctaagactgctcttaaaaataaagtctgaaaaatgct

SEQ ID NO: 30151 - DNA, 198 bp, Homo sapiens
ctttatcttcttttctcctcctctgcttccttcccctgctcctccttcttcttctctgtttttcttacaagggttaaacaagkgtctattttgagcttagcacaaagtctgttcccactttctccaagtgtcccacctaagtgctgaagctcagtaaataagcccaattggaagtggatacatgattagttaattgtt

SEQ ID NO: 30152 - DNA, 636 bp, Homo sapiens
aatctaacatatactttgcagtccttttatcctccttgtggcatttcacactgtccacccatcctccttgacactctgcctctgaaggcagccctggtgcctaggtcctgctgtgatgtgcattgcagtatggaggcgttttggctagcaggtaacaggagatttcattagctacctggcacacccttgtggcaggagaaatggttaatgccaggactaaacctcatgcaaagaaaaggaatttcctaaagattttattgcaactttgggttttatcaattcccaaatggattccctctgttgtgtcttcctcccagtacaacactgtgactatgtycatcctcagggcaggaggggtgggaaaatgggtagacatggcttgctgcctgatccttcatccatgggagggggtcttgcacattaatatttccaagaaatatgagcagactctattatggcccatggttaaaaccaactttctttaaaaaaaattgaatgaggacctataattagttggaatcaatatgtatttcagatacttataattaggtgtcagcaaacttggctaaaaaggggacctatagcttcattttttttttctttaaaaacccccaaatttgtaattctgtattttga

SEQ ID NO: 30153 - DNA, 2133 bp, Homo sapiens
ggttctcttattatcacaaaacaaacaaacaaaatctaaatgataatatatttccacctgtgtatgcattgaatcctgctaaagttacgtaaaaatcgattaaacaaaagttctgtatctcgactccttacaaaggaacacagttaagaaagttataggaggagttaatggatcccaagaacaggactagaattaggctgtaaygtgctggaaaaacttagtgatttatttggggctgggaggcataagcaggcaggaacaacactaaaaaaaatcggtgaaatttagttttccttttaggaaaggaatgagaatataatgtatatattttaaatatgcatattaaagactaaattttaaatttccaaccattcattgtgaaacagcaacatagagataccatggacatcccaaaatctaaacaaatccccaaactaagactgcaaatgaaacagagctctacctactttaaagagcactttaacagtgctcttcacagtacattatatagtccaagagaagagaaagtatattcttccccacacaacatgttattggttcttataaaatgctcccttgcaaataaaatttcaaatttgatcatggcctacatataatttccagctttgaaatcttggtagggagagacagacagggaaatggaagataagaaaagttattaatttttttctattttagttcagtaattattgaatataattgatacagaaaattagcatgctacatcctcacccatgtttgtttatctattcattcagtcaacaatgatttatttattgcctactttgtgccaagcactatgtatacatatttatattacaacacacaaacactatgaaaatggtgcaatcttttcccttctttacagtgcagttcaaacgccacttcctctggaaagcctcactaactaacctaagcagagataattcagatttcttctacggcccatgggtctttgtctatatccttactaaagtgctttccaccatgtgctgtgatttaccatgtttttatgcacttagtagagctttaataaatggatactcacttttcagctgttaggccttccatcatattatacattagagcaacaacaaaagaaaccctacttattttgccaaataattggaagtctatggagaaatttctaaggaaatattgacataaaatatcaaagcaacaatttgtgctgattttttaaacataattaacctcttaaggaaaactcaatcatttttgacttactaatgcccgaaatcatggtccaaattgttatgcctcttctgccagagacatggactccaaaggagatgagttctcacaggaatggagaatgaaaagacacataaagtgtaagtggtacaaagactggaaaagacaatggatagtgttggaaagaagagaaacacaaacacctaatttgcttctctcctagaggtatttcattcattatgcatatgtgaatcatagacatatatgaccttgaaagaattggcaaaactgcaagaatgctcacagtaatctcatcctacttccatgtattcagtgtccataaaatgcaagatcaactgtctgcaaatgcccagtgtgaaactgatcctgtagaccctggccaacagtggctgactctgcagccaaaaatttacagtgttctttggattttactggctttttcatgaaatctaacctctcattaccaaatgtaactttttttcctattctttaattttctgggtctgtccttatgttgcaagtacatttatattactatgacaacagatttacaaagcaaaaaattgacttggtttcttatctaagattatattttctaacaaaaatatagatagtttctttcaagttccataaagaattctgtaacttttaaaaggattgtaaatgcctgcaattcttgatattaatataaccataaagctataagtacaagcataaagataaaaagtatgccttaaatatataaaatatctaaatatctcaaaactacagctctaaaatatcattgggactttattcattctacaggcaaagtgaaatgtctcttactcttataatgcttagggagaaggtttagtgtggaatcttcagacttgggaa

SEQ ID NO: 30154 - DNA, 2133 bp, Homo sapiens
ggttctcttattatcacaaaacaaacaaacaaaatctaaatgataatatatttccacctgtgtatgcattgaatcctgctaaagttacgtaaaaatcgattaaacaaaagttctgtatctcgactccttacaaaggaacacagttaagaaagttataggaggagttaatggatcccaagaacaggactagaattaggctgtaacgtgctggaaaaacttagtgatttatttggggctgggaggcataagcaggcaggaacaacaytaaaaaaaatcggtgaaatttagttttccttttaggaaaggaatgagaatataatgtatatattttaaatatgcatattaaagactaaattttaaatttccaaccattcattgtgaaacagcaacatagagataccatggacatcccaaaatctaaacaaatccccaaactaagactgcaaatgaaacagagctctacctactttaaagagcactttaacagtgctcttcacagtacattatatagtccaagagaagagaaagtatattcttccccacacaacatgttattggttcttataaaatgctcccttgcaaataaaatttcaaatttgatcatggcctacatataatttccagctttgaaatcttggtagggagagacagacagggaaatggaagataagaaaagttattaatttttttctattttagttcagtaattattgaatataattgatacagaaaattagcatgctacatcctcacccatgtttgtttatctattcattcagtcaacaatgatttatttattgcctactttgtgccaagcactatgtatacatatttatattacaacacacaaacactatgaaaatggtgcaatcttttcccttctttacagtgcagttcaaacgccacttcctctggaaagcctcactaactaacctaagcagagataattcagatttcttctacggcccatgggtctttgtctatatccttactaaagtgctttccaccatgtgctgtgatttaccatgtttttatgcacttagtagagctttaataaatggatactcacttttcagctgttaggccttccatcatattatacattagagcaacaacaaaagaaaccctacttattttgccaaataattggaagtctatggagaaatttctaaggaaatattgacataaaatatcaaagcaacaatttgtgctgattttttaaacataattaacctcttaaggaaaactcaatcatttttgacttactaatgcccgaaatcatggtccaaattgttatgcctcttctgccagagacatggactccaaaggagatgagttctcacaggaatggagaatgaaaagacacataaagtgtaagtggtacaaagactggaaaagacaatggatagtgttggaaagaagagaaacacaaacacctaatttgcttctctcctagaggtatttcattcattatgcatatgtgaatcatagacatatatgaccttgaaagaattggcaaaactgcaagaatgctcacagtaatctcatcctacttccatgtattcagtgtccataaaatgcaagatcaactgtctgcaaatgcccagtgtgaaactgatcctgtagaccctggccaacagtggctgactctgcagccaaaaatttacagtgttctttggattttactggctttttcatgaaatctaacctctcattaccaaatgtaactttttttcctattctttaattttctgggtctgtccttatgttgcaagtacatttatattactatgacaacagatttacaaagcaaaaaattgacttggtttcttatctaagattatattttctaacaaaaatatagatagtttctttcaagttccataaagaattctgtaacttttaaaaggattgtaaatgcctgcaattcttgatattaatataaccataaagctataagtacaagcataaagataaaaagtatgccttaaatatataaaatatctaaatatctcaaaactacagctctaaaatatcattgggactttattcattctacaggcaaagtgaaatgtctcttactcttataatgcttagggagaaggtttagtgtggaatcttcagacttgggaa

SEQ ID NO: 30155 - DNA, 1024 bp, Homo sapiens
aagtctctcctttcagagcagggctcacctgggccaagcactctggggccctctgggacaacccttgccatttgccctcccctacaggagggactcacagtggctgccgagctcttgcctgtcccatctatccaacagcatgggacctggcaattatggcaagctaggaagttattaaaaggtaaagtctatttttaggaaatcaacagcaaactgaggacaaggtaggagaaaacaatatctgccttctgggactttgcagcttctgaygcatgtgattgagcctcaagatgtaagcagcccaccccagtgaagtgggggaagaggcagccctccacccaccaggcatccccggagcagagcctgctgggaggtgacctctgggagaagaagaagtgccaagggaagtctgcagtggcccaagggaagggggcacagaaggaaagcatctaaaaatggaagtcttagaacataaattattcaaaaacaggattatttaactggaagttaaaaatgagagaatcattacacacccttgcccaaatgttaatgccctggagagaaggcgtattactttcctcgggtcaccataacaaactatcacaagctgggtggcttaaaacaccagacaggtattttctcacagtttggaagccagaaatctgaaatcgaagtgttggcaggactggttccttctggagcctccaaggaagaatccattccacgccctctcccagcaatagctggagttccttggcttgtcgacgcgtcgctcccatctctgccttcatctttttttttttttttttttttttgagaccgagtcttactctgtcacccaggttggagtgaagtggcatgatctcggctcgccacaacctccacctcccaggttcaagtgattctcctgcctcagcctcccaagtagttgggattacaggtgcacaccaccacacccagctaatttttgtatttttagtagagatggggttttgccatgttggccaggctggtttcaaactcc

SEQ ID NO: 30156 - DNA, 1146 bp, Homo sapiens
atggtaacatttcctttgtcatttctaattgtgtttatttggatcttttctcttttctttcttattagtctagccagtggcctctcttaattttttcaaaaaaccaactccaggatttgttgatcttttaaatggctttttgtgtcttggtttccttcaattcagcttagattttggttacttcttgtcttctgctagcattggggttgatttgttcttgcttctctaattctttcagttgtgatgttaggttgttaatttgagatctttctaaatttttgatgtgagcatttagtgctatgaatttcccttttaacactgccttagctgtgtcctggagattctggtatgttgtgtctttgttctcattcgttgcaaaaaatgttttgatttctgccttaatttcattatttatccaaaagtcatttaggagcatgtttttaatttccatgtaattgcatggttttgagcaattttcttagtctcgacttctattttttattgcactgtagtctgagagtgtgtttggtatgatttcagttatttggcatttgctgaggattgttttatgttcaattacgtagttgattttagaatatatggcaaaatttttgaaatacgaattgagaaattaatccatgaaagggggaagagagggacaaactttttttaaagcaaaataaaattatttgtgcagcccatgcattatttaacattgctatgtctttacttatattagaatagttgttacccacatygggagtgttgggatttcctaggccagaaaatataataatactgctatttagcttcacattctaactatcaactattttacataatttgtccaaggaacaaagagaggaggtacaaatgggatttcatcaggtcagaagcctggaaggaatggatagaaagggtgtttttgtctaaacctgagctttacatattgtatgaaatagctgacttggtgttgcaggcctggccaggtaagatgcaaatctatcacaaacagtttccaggacgaagaagatgaaattagtgtattacaacaagagagaagggatagaaaagaaaggaaaaaaatttttgaaaagaggagaatctataaataagaaagaaaatgggaacatgagacagactgca

SEQ ID NO: 30157 - DNA, 572 bp, Homo sapiens
tgaatagagagatggtctgaaaatatggggcatgttttatatgtgcaaagaaaaatgaatcatatgaacattaagcttccaagtttgaatgaaccatgtttaaacaattgcatagctaagttctttgtaaagcactactaatgaccaacttcttttataaattaatgtgcgagtacattttaatagctgggaagaaatcttgttattcataatatagataaacatgtttgactctaagagccaaactttaatatcatgctggtatgtttaacttatgaaccttaaagcttatcaagcggtgcaaagtatatggacttgacttaaggccatgggttgaggtttctttgatttatttttaccatagaagatataaggaatcaaaataaaaagaatatgaatgcagctaccyatagcctcatttaaatatatacaaaatccaccagcattactatcaaacaaatgaactaaaactatagccatgtaaatatcaaacaccaatacttcctgcttatgaaactctatagtcatataaatagttatgtaaatcccaatgtttatgaaattccatccta

SEQ ID NO: 30158 - DNA, 420 bp, Homo sapiens
  misc_feature (1)...(420): n = A,T,C or G
ttccacatgtattagaaaataattgatgcaaaaaaatgttaaccatatttttgtcttgagtaatttctgtaagtgtattgcccacagggttctcattacagctgtggaagttccttytacatcaaagctcctgggaccctcaatcagaaatttaggccaactttggggaaagtcaatttgctctctccttagagtaacaaaattagatacttgaacttgatatcaaggattcagagacacacagcaggctttttataccaaaatcttgcatttatattttgttcatagacaacaagaaggggagagctaagcagtnnnnnnnnnnnnnnnnnnnnnnnnnnnnnnnnnnnnnnnnnnnnnnnnnnnnnnnnnnnnnnnnnnnnnnnnnnnnnnnnnnnnnnnnnnnnnnnnnnnncttta

SEQ ID NO: 30159 - DNA, 533 bp, Homo sapiens
gtcatttaaaataacatgaaatgatttaaaccaggagaaaggaaagtgaatagggatgagggtagggcacatttgaccatagccaaggattgtgagggctgggagataagaatatggaggttcattacactattctatttttgtgcatgttcaaaatttgccatgataacatacacttttaaaagatctttgttgacacatcacctgcttagactgataattctcagggatctcagtgcaccactttcttggagtttctccattcgaccagccttgagtaatgaaatatttttcccttcacaaagctcagaattatttyataaacagctccaaatatttccatatgctaaaggaaagagcattatgaatcaataatgcatatgtccctaagacctcacactactaaatctttaggaaatcaattttcctaactctacttattgcattaccacttttccccttatgtacataactcatttactaattaatatttattcacctgtcagaattgcctttatacaactgatttccat

SEQ ID NO: 30160 - DNA, 548 bp, Homo sapiens
atgaacaagcctctgaatttcctccagcctcagttttctcatctgtaaaatagggatgaagatcaaatgagataataaatgagaatgtgctttgtaaattttaaaactcccatatatttaatggagtatagctaataaaataatgattgttcataaagttattctttctaataaatcctttaccaaagttcattcctggccttccaatggtattgtgaagtcttgaggtttgccggggaaggccagcttgttattctttcagtactgggaaatgagaaaaggatactttaaatcatatcttcatttcattttcaggaaaaaaaatgaattttctatttggacaggatttttattgcagacctgcgcagtaatctgcatgggttcgtcaataacttccaggtgggcttagatacttgcaagctttattgaagtcttgtgtggcaccwgtgctgtatatcagaggggaacataaaagggcttcctaactttgctgagactcctatggctgttagatccacaggtagtaaatctgggtgtgaactgtcaca

SEQ ID NO: 30161 - DNA, 339 bp, Homo sapiens
cactgagtcagcacagcccagcctggcctaatacaggggctaaaastgaaactggagagaccagtgggaagactgtctctctggtcgaggtgagagttaaagtggcctatgaccgaagaggtggaggagtgaggactttccacccatgattaagtctttgtgaagtgtgttcacttgtcagggaggaagaggctgagtgttctcctctctccctgtgagtccgcaggaacaacagagcttatttcctgggattcataggccttggcctttctggctcctctgggctctctctgccacccagagatgcattcccaaagagtctgctctgcttaaagagaa

SEQ ID NO: 30162 - DNA, 537 bp, Homo sapiens
atggcatgaacgtagtaaatctactaataagttagtttacttataaatttactaataaatttattgttaataaattcattgaatttattaacaacaacttcatgttaattatattttgtgcattcacataccacagagatctcagagaaaccgtaccagcaatttcaaactatggctccatgaaggatctaacatctgaggtcagaatgaggtttacttattattaagcttccatttcctttacaaaatgaagtgttttgtacttactgctcccctttgaactctaatggtgaatcgttaaaactaaactacaaagcatattttgtgatgcctgattacactataagctagaggttttcctcagtggctaattttaaatgctcaccaaccccgccaaggacctaaccattagtctgaattgacaaatttggctggcccctaaaagcaaagcaaacagcaccaaatcataataaaattgtcttgttggtgactcmctgttattgacagtggggtccatgaaatccctctgaacactgg

SEQ ID NO: 30163 - DNA, 502 bp, Homo sapiens
tgacgagctgttcttgygggggccaggactcagcctcctcggctcaggtgctctggccctcagggaggcctgtgctgccgctcagatgcctccaagctgcttttctccaagggtctgcaaacctgcatccacagctaggactccgaggggaccacaccaccgcccacctgcatctggggatgttgcagctgttttctctggaagtcagcccccaaccctggaaacacactcgctctccccaccccagccagtcacctccagccttgacgtttcccaccccttccatgaagactcacaggctgcctgccagaggggtgcatcgaccaccgccccccacctgccattttccccgagaaactcagcatgctctgcctaaaaccctatcaaagttgggaggaaaagaacccagccgtcttgggcctgagtcatgccacttcctcatttcagaaaccccaagccctggcgggggggggttccacagggacggtgcctccgcattgac

SEQ ID NO: 30164 - DNA, 502 bp, Homo sapiens
tgacgagctgttcttgtgggggccaggactcagcctcctcggctcaggtgctctggccctcagggaggcctgygctgccgctcagatgcctccaagctgcttttctccaagggtctgcaaacctgcatccacagctaggactccgaggggaccacaccaccgcccacctgcatctggggatgttgcagctgttttctctggaagtcagcccccaaccctggaaacacactcgctctccccaccccagccagtcacctccagccttgacgtttcccaccccttccatgaagactcacaggctgcctgccagaggggtgcatcgaccaccgccccccacctgccattttccccgagaaactcagcatgctctgcctaaaaccctatcaaagttgggaggaaaagaacccagccgtcttgggcctgagtcatgccacttcctcatttcagaaaccccaagccctggcgggggggggttccacagggacggtgcctccgcattgac

SEQ ID NO: 30165 - DNA, 1119 bp, Homo sapiens
attaagcccaggaggcagaggttgcagtgagccttgattgcaccactacactccagcctaggcaacagagcaagaccctgactggaaaaaaaaaaaaaagggagttttagaagaattacttcaaggtgatgtaaatggtaattaccctaacttgaccatcgtacaatgaatatatgcattgaaacctcccactctactccataaacatgtacaattattttgtatcaagtttaaataaaacaattaatgagtaaaaatgaagagattcatttgttctagtcacattcaaaggaaggggactgcacaaaggcatgaacactagtcagtgaaggctatctttgaagtgtttatattcacgtttatgaatgtaatcgtgaattctcctttatgtaaatgtaaagacaaaatacatttaataattcatgagttacaggagaaatcttaatgggacttagtgatttagcaataagcagcaaactaagcaacaataattgttttatataataaaacttgcaaatgtagctgtaagagtatcttttgaatgaaatctaaatggtatatgcttatattagaaaacaaagggctaaaaatgagtgagtaaatacaagctaaaaatttcttacatcaagaatgatttttttaaaaaagggtaaatgaaaacaaaaactaaacaaacaaacaaaaggaataaaaaaacaaacagtagattctctgaaggtatcaggctcagatggtttaccaaagcttaagggaaaaatgtaatctttatatttgcaataattcagaaactaaattagaaagatagccaaatctagcaatgtattaaaaataatttatcacaaacaagtagagtttaacccaggcatgaaagaatggtgcaatgctagaatgtctattgatgtgattactaaattaccagattaaggaaaaacattaaaagctcmatagataaagaaaaaagtcatcatataatattcaaccctattgatgataaaaactttaagttcactataaatggaaagggacttcctaacttggttaaatggtttctattaataccataaaacaagtaaaattcttaagattcaactacttgaaatcaggaacaagacaaggatc

SEQ ID NO: 30166 - DNA, 1022 bp, Homo sapiens
ctttacgtatgccagtcttacccaccagtgttctggggattaaaggtggctactttgactgatatcaaatgatattgtttatatactatgagtcatgctggaattaatgaaatattcatagataacttgttaatagtgcagagtctatctggacacaatgtttattcaagtgataaggaaattgatctgatcaacataagagttgtaagatattcacagttatactcttttttttttttttttttttttttttgagacggagtctcgctttgtcgcccaggctggagtgcagtggcgcgatctctgctcactgcaagctccgccttccaggttcacgccattctcctgcctcagcctctagagtagctgggactacaggcgcccgccactacgcccggctaattttttgtattttttagtagagacggggtttcactgtgttagccaggatggtctcgatctcctgacctcgtgatccgcccgcctcggcctcccagagtgctgtgattacaggcgtgaaccaccgtgcccaacccacagagttgtactcttattagaacacaaatctattcatctgatcagcttagagaattctattcatattttatttcaagagtgatgcatgaacaaagctggtctgttttattatcttataattccatttacagatatctgatcatagcttatgtattacctgtaaatagaattgggggaagatataaaatctgggcaataaagtattatcaactttttctcactgagtttgtcttttgcctaacatstgttttggaattgattagcacccgaaaccacaaagcaatgcctttctctggcccaagtgcaaccatatcatatataagaagaaaagaaattacagaatgattcatcatcaagcaattctaagagtaaggctcctgtaatgatatcacacaagagggaataaccctgtaggaaaatcttaccagtcatttttgaggttgattattggcacataaaactatccctctgaagcatttttggaa

SEQ ID NO: 30167 - DNA, 694 bp, Homo sapiens
aattttggagctaagggtgcaggggtgctggggttggaaggaaagaagctgtgggactgggcagcygtggctgaggtgaagggtattctgaagtttgtatcagctactgacagaattgatgtaacttcaccagtacaaccaagccagcaggtaaaaaatacctacccttccggaacaacacaggagtccactacgaaggcatcctggaaatcattacagatggtatgcccaacccattccttcaggaagcaaacaaacaaaaagggcagtgcagagtgtacttgctgtacagccctagataaattactcttaacctttctaagtctcagttccctcatttctaaaaagaaagtaataataaatatctcactattgtgaagtagaaaagagagagtgcacgaaaagcacttatcacaaggcctagcacagaacagggctctcagacagataatagccatcatcattaacaaagtccatctcttctttactattatgattgttattaagtgaaggaggcctcagagaagagccgtgaggcagggtagggcagaaaagcctttcccagttagaatttaggagaggtcacaggatgatctattttcacactgcaacagaagacttgaagagtgtagtaaagcagctctcatgctttattgctttaagaaaagacaattggctttaccagggcttttgg

SEQ ID NO: 30168 - DNA, 694 bp, Homo sapiens
aattttggagctaagggtgcaggggtgctggggttggaaggaaagaagctgtgggactgggcagccgtggctgaggtgaagggtattctgaagtttgtatcagctactgacagaattgatgtaacttcaccagtacaaccaagccagcaggtaaamaatacctacccttccggaacaacacaggagtccactacgaaggcatcctggaaatcattacagatggtatgcccaacccattccttcaggaagcaaacaaacaaaaagggcagtgcagagtgtacttgctgtacagccctagataaattactcttaacctttctaagtctcagttccctcatttctaaaaagaaagtaataataaatatctcactattgtgaagtagaaaagagagagtgcacgaaaagcacttatcacaaggcctagcacagaacagggctctcagacagataatagccatcatcattaacaaagtccatctcttctttactattatgattgttattaagtgaaggaggcctcagagaagagccgtgaggcagggtagggcagaaaagcctttcccagttagaatttaggagaggtcacaggatgatctattttcacactgcaacagaagacttgaagagtgtagtaaagcagctctcatgctttattgctttaagaaaagacaattggctttaccagggcttttgg

SEQ ID NO: 30169 - DNA, 538 bp, Homo sapiens
aaaaattttccagccacacacaggaggggtatgggtgggggaaggtgtctgtccatctatccctggcccccagcccatgtggttttggcagcaataaggtgtgtggagtratgactcctgaaattaaaatggtgtgtgtatgtgaaggaaaggtgggcaaagctgtggggagcggtggagtggaaggaacaaaggaggtcagtactgggaacgctgaaggtgggaggccatttcataacattacttgttgatgaaattgccatggataccttctttgcccatcagcaggcctagcgtcttggcagtcatggtgacaatgacgttgaaggtgggggctccaccgatgctcttcatacgaagatccgtggtcaattccccatcctgcagcagtgagtccaggaccacagtatatttctggcccccccagtgtcagcccattcatgacaaagcttgaccagtctttgccaaccaggacaccaacctcagctggcgtgatgttgaggaaggttttccctgggacggcggcccagatggaagg

SEQ ID NO: 30170 - DNA, 538 bp, Homo sapiens
aaaaattttccagccacacacaggaggggtatgggtgggggaaggtgtctgtccatctatccctggcccccagcccatgtggttttggcagcaataaggtgtgtggagtgatgactcctgaaattaaaatggtgtgtgtatgtgaaggaaaggygggcaaagctgtggggagcggtggagtggaaggaacaaaggaggtcagtactgggaacgctgaaggtgggaggccatttcataacattacttgttgatgaaattgccatggataccttctttgcccatcagcaggcctagcgtcttggcagtcatggtgacaatgacgttgaaggtgggggctccaccgatgctcttcatacgaagatccgtggtcaattccccatcctgcagcagtgagtccaggaccacagtatatttctggcccccccagtgtcagcccattcatgacaaagcttgaccagtctttgccaaccaggacaccaacctcagctggcgtgatgttgaggaaggttttccctgggacggcggcccagatggaagg

SEQ ID NO: 30171 - DNA, 538 bp, Homo sapiens
aaaaattttccagccacacacaggaggggtatgggtgggggaaggtgtctgtccatctatccctggcccccagcccatgtggttttggcagcaataaggtgtgtggagtgatgactcctgaaattaaaatggtgtgtgtatgtgaaggaaaggtgggcaaagctgtggggagcggtggagtggaaggaacaaaggaggtcagtactgggaacgctgaaggtgggaggccatttcataacattacttgtygatgaaattgccatggataccttctttgcccatcagcaggcctagcgtcttggcagtcatggtgacaatgacgttgaaggtgggggctccaccgatgctcttcatacgaagatccgtggtcaattccccatcctgcagcagtgagtccaggaccacagtatatttctggcccccccagtgtcagcccattcatgacaaagcttgaccagtctttgccaaccaggacaccaacctcagctggcgtgatgttgaggaaggttttccctgggacggcggcccagatggaagg

SEQ ID NO: 30172 - DNA, 1032 bp, Homo sapiens
ttggtggactgctgaagaatgaagcatgtgcacccactttacttctacactttggcagctgtagaacagagacagtggtggtgcaggatacatccttgtatctgggaattaattcctttccgaggtgtatactacttagtttgtgactaaaatctacgggcttcagtttcctagtcttgctaaattggaaacatgttaatatctatgactgtagcacatcacaagtaaagataaatgagaaaatgtatgctttggctgggcatggtggctcacgcctctaatcccagcactttgggaggccgaggcaggtagatcgtgaggccaagagattgtgaccattctggccaacatggtgaaaccctgtctctactgaaagtacaaaaattagctgggtgtggtggcgggtgcctatagtcccagctacttgggaggctgaggcaggagactcacttgaacctgggaggcggaggttgcagtgagccaagatcacgccactgcactccagcctggcgacagagcgtcacttcatctcaaaaaaagaaaccaaaacaacaacaacaacaaaaaamaaacaaacaaaaaaaggacaatgtacgctttgtaaactttaagtctgggagatggctaacattatgggggaagacttggccaagacagcccagaaaccacaaggtgaataacagcacccagaacagaaggtccaccatgaagataaggacttaatctatcaggaaggattaaatgtaaccgtcaagagtaggcttgatggaggagggtgaatctgaatggagccttgagctacagtggggtttacagcacaggcaaatcctggtgactgcatgctagatgaaaggaattggacaaatgaaataactgaggcaagagaggttgggcatgttcaaattcgtatctgtattgcatagatagcttaagaatgaagtagagccagaaaaaacatactaggctcagattacggaacatgtttaatgctaggctaagaactgtgttctattatatatgcaaagaggatcc

SEQ ID NO: 30173 - DNA, 1032 bp, Homo sapiens
ttggtggactgctgaagaatgaagcatgtgcacccactttacttctacactttggcagctgtagaacagagacagtggtggtgcaggatacatccttgtatctgggaattaattcctttccgaggtgtatactacttagtttgtgactaaaatctacgggcttcagtttcctagtcttgctaaattggaaacatgttaatatctatgactgtagcacatcacaagtaaagataaatgagaaaatgtatgctttggctgggcatggtggctcacgcctctaatcccagcactttgggaggccgaggcaggtagatcgtgaggccaagagattgtgaccattctggccaacatggtgaaaccctgtctctactgaaagtacaaaaattagctgggtgtggtggcgggtgcctatagtcccagctacttgggaggctgaggcaggagactcacttgaacctgggaggcggaggttgcagtgagccaagatcacgccactgcactccagcctggcgacagagcgtcacttcatctcaaaaaaagaaaccaaaacaacaacaacaacaaaaaacaaacaaacaaaaaaaggacaatgtacgctttgtaaactttaagtctgggagatggctaacattatgggggaagacttggccaagacagcccagaaaccacaaggtgaataacagcacccagaacagaaggtccaccatgaagataaggacttaatctatcaggaaggattaaatgtaaccgtcaagagtaggcttgatggaggagggtgaatctgaatggagccttgagctacagtggggtttacagcacaggcaaatcctggtgactgcatgctagatgaaaggaattggacaaatgaaataactgaggcaagagaggttgggcatgttcaaattcgtatctgtattgcatagatagcttaagaatgaagtagagccagaaaaaacatactaggctcagattacggaacatgtttaatgctaggctaagaactgtgttctatyatatatgcaaagaggatcc

SEQ ID NO: 30174 - DNA, 581 bp, Homo sapiens
aagggatgaagttaaggcatagaatataagctttctttttgcttgcttgcttgctggcttgtgcaaacagtgttaagttgttatcagcttaaaataatagattataaaataagatttgcaagcctcatagtaacctcaaaccaaaaaccatataattaatgcacacgaaatataaagtgagaaactaaatcctatcaccagagaaaaattaccttcactaaaaggaaaccctacccaacctgtgtatgccaaaatccacgcatcctcaacctgcaaagacaaaaagttggtcctccatattatatgtagatttcacatcctgcaaatgctgtaatttctttcttgcttgcttgcttgcatgcatgctttcagagcatgcatgcaggctctcactctgttgtcctggctggagtgcagtggcgtgatctcagctcactatagccttgaactactggggctcaagccatcctctatcctcarccttcggagtagcaaggactacaccatacacccagctaattttttatattttgtagagacagtgtctcactatgttgtccaggctgggctcaaataactgg

SEQ ID NO: 30175 - DNA, 592 bp, Homo sapiens
tagaatgtttctagctggaaagaaagaaaaatatttaaggtgatattcctaaaaccctaatttgatctttataaattacatgaatatattaaattatcacatgtaccccaaaactatgtacatctgttctgcatcagtacaaatattaccaaataataaaatgaatggcattatgaccttttaatatttttcatattttcaggtataagcctctagacarctattttatcaaacttctaaaactttctttttataactgtttgaagagaagcaggttttatcatctaatgaaacagtcaataaaacgtctttacatttcagccataaagtaataacactgcccttattttttgttaatgagaatatagtaaattccattcagacattttatattctagtaactaaagaggctttcaatcacttaatatctgaataggtcatgatagatatatttttctctgttcactcctcaacagagcttgataaatgattctataacatagagaatgatgtttatattattttcatatgtttatatgatttcttttgtttatttgtttctttaggacaaattgtattcctattattttaa

SEQ ID NO: 30176 - DNA, 545 bp, Homo sapiens
atggaaaatttacaaacatgttattattaatatttgtgataagaggtagtaatgaagaacaacgtaagtgacttaattggcatgtacatttgaactttaaaaatgactgtcagccaggcgtggtggttcacacctgtaatcccagcactttgggaggctgaagtggatcacaaggtcgggagatcaagaccgtgctggctaacacagtgaaaccacgtctctactaaaartacaaaaaatgagccgggcatggtggcaggcacttgtagtcccagctacttgggaggctgaggcaggagaatagcttgaacccagaaggtggaagttgcagggagccgagattgcgccactgcactccagcctggcaacaaaaagatattttgtttaaaaaaaaaaaaaaaaaaaaattgtcactgttggaatcataatgttgccaaaacaaacaaaagataaatgtttcaagtgacagatattccgagtactctgatttgataattacatgttgtatacaagtatcaaaatatcacatgtgcccccaaatatgt

SEQ ID NO: 30177 - DNA, 545 bp, Homo sapiens
atggaaaatttacaaacatgttattattaatatttgtgataagaggtagtaatgaagaacaacgtaagtgacttaattggcatgtacatttgaactttaaaaatgactgtcagccaggcgtggtggttcacacctgtaatcccagcactttgggaggctgaagtggatcacaaggtcgggagatcaagaccgtgctggctaacacagtgaaaccacgtctctactaaaagtacaaaaaatgagccgggcatggtggcaggcacttgtagtcccagctacttgggaggctgaggcaggagaatagcttgaacccagaaggtggaagttgcagggagccgagattgcgccactgcactccagcctggcaacaaaaagatattttgtytaaaaaaaaaaaaaaaaaaaaattgtcactgttggaatcataatgttgccaaaacaaacaaaagataaatgtttcaagtgacagatattccgagtactctgatttgataattacatgttgtatacaagtatcaaaatatcacatgtgcccccaaatatgt

SEQ ID NO: 30178 - DNA, 530 bp, Homo sapiens
catttatttcttccacagttactagcaaagatagaataatttctcaacctttataggtacaattaaaaagaattgtaaaattagtaagccagaatattacatttgactagttaagaaagaaggtaataaaagtacaaaatatatttattatgattttttatttattacaaaaaatgagagaaacatttctgcttccttgtgacactatgccaccctaaccaaacaccaagttcttgtccaagtcccagttcttttcatttcttcccaggcatatcattgtagcccttaataccactttcctagtatttccttcccttaatattcattamcatttagttaatgcttaggccttttccttctttccttccttccttccttctttccttccttctttccttctttccttttctttctttcttcctttttttttttttttttgttcttttcagggtctcgcccaggctagagtgcagtggcacagtctcagcttactgcaacctctaccttccgggttcaaaggatccactcac

SEQ ID NO: 30179 - DNA, 604 bp, Homo sapiens
acaaagttttggacactaggcaggctggaattgaggtgttgcagctgtttactggaattgtctgggaaagcagaagccttcacactggggactttgagacctgtgagatatcatcatccctctaccaagaggagaatgccacctgtcccatgaaaagctaagcttcaatgctgccccttgctggggaaagagagtccccaccatccgagtcctggctcgctcactgtcctggcagtgaggggctgagcaagcactctggtcatgttacaacagccccactcactctctgcaaccctggaacctctgagtgccagtgctttgtcacaggaagaaagtttgattatccagggcttctgggtccctgcctacctctccagcccyaagctagagcctgccaggaggggcatgtgttcaccttggccctcctgatgtccagtagccttcatcccagcctactggcctcaccacccttgcccctctgcagcaggcccagcattccctgacccatttgggttgttcaggtgctcagctcactagggtctccatagtcccacagtagaaggcagagaagaaggagggatcacctgcccctctggagcctccg

SEQ ID NO: 30180 - DNA, 571 bp, Homo sapiens
ctttcagaatggtacttaaaagaaatgttgttatcgttaaacagaaatgtgcactcacgctctgctggaagacctaccatcaaccttttacaagagcaaggtatttcgtttcctgagaaaaataggcctaatgttcaagtttgacaattccagtttatgttctcataaagcaagccatgttttaatctgatttcttgaagggcaggggcaagaaggggggcagaaatcatctaagatgatgttgcaggtcaggctattgtttacaaggttttcagtgtaattatgatatttcccaggcccagakagagtaaatgaaaagttgaatacaataatttatgtcccttaatttaaaaattagcagcttcataaaaaacaaaacaaaacaaaattagcagctccagtttcttttatttatttatttattttttgagacggagtctcactctgttgcccaggctggaatgcagtggcacaatctcagctcactgcaacctctgcctcctgggttcaagcaattatcctgcctcagcctcccatgtagctgagattacaggcacccactatcacatcc

SEQ ID NO: 30181 - DNA, 1017 bp, Homo sapiens
aatgatttctaagtcaagatgttcagctccgggaaatttacttaactttctgaacctaagcgtcttcctttgaataatggagacacttacaatacctactgcatcaaggttgtcatgagatttgatgagttaataattcatctcaccaatatttgttggacacctaatatgtgttggttgctcttctaggtgcctgagctacataaatgatcaaaatagagacacctgccttcctggagctttcatcacagtgaacacaggcagagctgctaccacaatgtaggtgccctaactattactagagtgtgaatgactttcctttccaagtggcagcagcagcagtgtagttggctaagtgccagaccacttcagttgggatgcrttcaccaggtctctttccaaagattccatgtctcctccttctgagcaatgaagttggggtgaacatgtgccttgctttggccaatgcaacatgagcagaaatgacagttgtcctgggtggaaactttaagagctagcacacggcacaccatgattcctccccggagctgcagtactcagggacacgtgggaccagataggtgcctgggtgactgagagccacggagcccccgtgtggaactacagtggacatgtagcctgagtgagaagtagactttcatggtattaaaaccctgagatttgggggttgcttgttattgtcgcataacagagcatctcctggtggataaaactgacctccccaacttgagccttggcagagctttccatggtacaagccttgttgttatatactaacagatcaccagaagcataactgtaggtcactaagcagagagtgcaaatgtaggagccctgtcctgtttcctcactctttgcactaagcacactgggcagtttccacatcttgaatttgctctctgtgtaaacagtggccatcaccccatccccgcctgctccaggatatcagacgactacaggttccagcccaggctggaagcagccggcccgcatcca

SEQ ID NO: 30182 - DNA, 944 bp, Homo sapiens
aatcaacatatgtagttataatatgatacccttagatcaagtttgccttttattttttataagctcacacatctcagtataagaaatatgagcaactttccactttaccctataattcaagtatgaatatttagaagaataaaatttgattgttttctcaaatattatattaaaacccaaagaataaatcaggaaagtccatgaatattcatgggtttcaaacgatgcatctctcagtttcaatttagtgaacattaatattygcttaaacgtatgaacataaaacatacaaatatgtatgaatttcaatacatgatgctaaaggctctatttcattgagttgttaatgacgatataaataaaatgaacacggctagagtatattattttttcaccaaaatgccaaaatgcaaatatatctttctaataagttaaaatgggaatcggtttattacttgtaataaagtggctgacaaacctactaaccctcaagtaatgttaaaatgaataacactttgggtaacacattattcaagctaggattttttcccagctctttctatgtgctttcaaattttttttctttgaaacagatgtcaggttacggtaccattatatccattttatagatggctcaagtaacattgcaggatattaattagaaaacagttctttctgagaataatctcttgtttatattttgtttaactaaaagtaaatgtggtaagatttattccatatatttgatccatttatattcaacatcaaacttttcatctgaatctacacagagagtacttgtaaactgatcagcaattcgagttcattaaataaactataaaatcctattatgttggaactattataggaaaaaaatagaaaatattaaaatataaaaaagtacagaatgaataaaactatttttagtctgtattgaactccaa

SEQ ID NO: 30183 - DNA, 733 bp, Homo sapiens
atatgttcctgggtgagatcccagaactagtagattcagattaccagcctggttagcaccagctggtgcatcagaatggaaggtctgaaaaatatctcaarcaccaatattaggttttataatagtgatgttatccataggagcaaatgaggaggttagggatcttgtggcctctggctgcatgactcttaaaccataatttctaatcttgtgggtaatttgttagttttacaaagacagtcttgtccaaggctaatttgttacttttacaagggctgtctcgtccctttgtgtctggtaagagctaccatctttgtttcaaaactaaactgtaaactaaattcctcctatagttagttcagcttatgcctaggaatgaacaagggcagtttgcaggttaaggcaagatggagtctgttaggtcagatctttttcactgtcataattttctcgttataatttttgcaaaggtggtttcagtaaaattagcatctaggcatctagagtaggtatataaacattgacagtgcctaaccctgccagggtctttttgtcacctataatattaagagaatatgatggagtctatttgcttgaactttcactgcaagatgactgaattctgggtgttatgtgaaaattcctcaaaattcatcatgcttagatttataattgtatttttcatataattagtatcattgaccttgtaatgttatttggtcattgattgatt

SEQ ID NO: 30184 - DNA, 1252 bp, Homo sapiens
tctgtggcccagtgtgcaacctgcagcagccaccacgccggggttgactcccaaagtaaggactgcttgtccttagaccccacctgccctccttgccaagggccctgtgaagcagggtaccccaaaactccaacttgctgctgcccccagccccctagaactgaagtgtttccaggactgaacctctcaccccagaggcctcagaggtgagcaggcctagcagggcccaggcagtcctgcggccactgacgtcggcctgggagggtggacaggcccccggctcagagccatctgtggttctgggttagacccatccctcctcgtctctgggcctcaggtgcctcctctgcagggtgaggttgataaccaccgcgctgcctccctccccacacagaacaaggaaaacggccggggtggctgtcgtgggctgaattcagggaggatctcggtgatgaggatggctcagtccagaagagccaagcagactgtgtccctggaatagggtgagcggcagagactggcccacccacacccacaccgcactgcggggccctgctgtgcaacgggtscacacatcatcagccaggtgcccggcctgcctttgctcttcaacctcgctgccacagccactgagcttatacgagattttggattttgtgctttttgtcatttttatgaatcaacatctgtcaagcatcctggccttgaatgtttaggcgtgtgtgtgtgtgtgtgtgtgtgtgtgtgtgtgtgtgtgtgtgtgtgtgtgtgtgtctgtgtgtctcactctgtcgcccagactagagtgcaatggggcaatctctgctcactgcaacctccacctcccaggttcaagcgattctcctccctcagcctcccaagtagctgggattacaggcgcccgccaccatgcgtggctaatgtttgtatttttagtagagacagggaacgtttaggctttaagtgatttggagctggttggtcttctaggcctaaacacctagagatcagctggccgctggcagcagcatgtgtagttggacacatgagctgatgctattttccactcccatcctgccccatccccatgcttcccctccctctggctgggcatccccactccctggcacccaggggtggcccatacatccctcccatagcctctattcccatcgggtctccacctaagggctttttcctctgtctacccttgcacaagtcctatcaccactcagatgctacttcccctcag

SEQ ID NO: 30185 - DNA, 491 bp, Homo sapiens
ggctctaaatttaataagtaattaattatggtataatgaaatgttcagaagaaaataaayaacatttattttaacacatgggtactgctatggcatgctttgtaagaaaaagaactaccaatatttttggatggaataaataaaatactgcaaccccaaaattttagaaaccaaaacaatgattaatatttaaatgatatattcatacctgaacaccaaagaaaaatgttattccctagatcttctttaaattcatcattaaagaggtaactcgattctggaaatgcttcatggaacgttgcatatatggcttgtgccaaacaatcaggatatatctaccaaaataaaatcaaattagattaattttatatttttaaattttaatatatgtcagctgccaaagaaattattattttttaaatttgccttgcaatttattaaccgaataaaaattcgccattttttaaattctaaaatcacatttatataaa

SEQ ID NO: 30186 - DNA, 1175 bp, Homo sapiens
ctgcttsgatgaaaagtcttcagggactgtctcaggttacactcaggtgccctcagagctaatgtgttcagaggtcttgtctccaggatgaaaatgggaaggagttgtcagaagaggacatataaatggaggctggcatcttcatgagtaccagcggtggtcccggtgtgggtctctccatccagggacatggtggatggacactacatcactccattctgcccttcctttccctcctcccattctcccaagggcctcagtgcatgggcggtgtccaacctctggtgctgaatcagccaagagatccaagcctgcttggctgcctcttaggatatgaaagcacagccactgggctctactgaatcctatgcaacctcagaagacacccaggagtgatgccatcacgtggtgcaagagttctgagggaccgcaatcctgaagacattgaatggtgggtgcagggcctcatggcctgttccacagctcctctcattggctctgctccaggtggtgaagggggataacatttctgtcaattctgccatgattgcctagcaggaaaaggagcagagcccagaagcagggcctggtatgcagcctgcctaacaagggagaatttataggctctgtggacggaaagatctgggagtccatatctatcacgcactagcttgctgagacattagtaaagtcagttttctgaactacatttctgtcatctgtaaattgagaggaatttcttctaccccacgaggcttcttggatagttagtgacagtgtgtgtagagcaggtgccatccagccggcatttggtgtccagaccactcctcttcccccttgattttctgcctaaatttgcattttgttcttaagattttcactccccttaattctgctcttccctctgatttctgccttactgtatatcccatggagtcaccaggatcaaagtgggtaaccgtcatgtatgcatgtatgtgtgtgtacatatacacattgctggggttggagtgtggtgtgtgggtaagtgtgagttggaatcactgactaaaactctccacaccaggctgtgttcctgctcattgctggaggcactgtcaggggccctgtcctcaaccccgggtctgacacttgcagatcaggcaggacattctggaggaatcatgcccttggaa

SEQ ID NO: 30187 - DNA, 1175 bp, Homo sapiens
ctgcttggatgaaaagtcttcagggactgtctcaggttacactcaggtgccctcagagctaatgtgttcagaggtcttgtctccaggatgaaaatgggaaggagttgtcagaagaggacatataaatggaggctggcatcttcatgagtaccagcggtggtcccggtgtgggtctctccatccagggacatggtggatggacactacatcactccattctgcccttcctttccctcctcccattctcccaagggcctcagtgcatgggcggtgtccaacctctggtgctgaatcagccaagagatccaagcctgcttggctgcctcttaggatatgaaagcacagccactgggctctactgaatcctatgcaacctcagaagacacccaggagtgatgccatcacgtggtgcaagagttctgagggaccgcaatcctgaagacattgaatggtgggtgcagggcctcatggcctgttccacagctcctctcattggctctgctccaggtggtgaagggggataacatttctgtcaattctgccatgattgcctagcaggaaaaggagcagagcccaraagcagggcctggtatgcagcctgcctaacaagggagaatttataggctctgtggacggaaagatctgggagtccatatctatcacgcactagcttgctgagacattagtaaagtcagttttctgaactacatttctgtcatctgtaaattgagaggaatttcttctaccccacgaggcttcttggatagttagtgacagtgtgtgtagagcaggtgccatccagccggcatttggtgtccagaccactcctcttcccccttgattttctgcctaaatttgcattttgttcttaagattttcactccccttaattctgctcttccctctgatttctgccttactgtatatcccatggagtcaccaggatcaaagtgggtaaccgtcatgtatgcatgtatgtgtgtgtacatatacacattgctggggttggagtgtggtgtgtgggtaagtgtgagttggaatcactgactaaaactctccacaccaggctgtgttcctgctcattgctggaggcactgtcaggggccctgtcctcaaccccgggtctgacacttgcagatcaggcaggacattctggaggaatcatgcccttggaa

SEQ ID NO: 30188 - DNA, 1175 bp, Homo sapiens
ctgcttggatgaaaagtcttcagggactgtctcaggttacactcaggtgccctcagagctaatgtgttcagaggtcttgtctccaggatgaaaatgggaaggagttgtcagaagaggacatataaatggaggctggcatcttcatgagtaccagcggtggtcccggtgtgggtctctccatccagggacatggtggatggacactacatcactccattctgcccttcctttccctcctcccattctcccaagggcctcagtgcatgggcggtgtccaacctctggtgctgaatcagccaagagatccaagcctgcttggctgcctcttaggatatgaaagcacagccactgggctctactgaatcctatgcaacctcagaagacacccaggagtgatgccatcacgtggtgcaagagttctgagggaccgcaatcctgaagacattgaatggtgggtgcagggcctcatggcctgttccacagctcctctcattggctctgctccaggtggtgaagggggataacatttctgtcaattctgccatgattgcctagcaggaaaaggagcagagcccagaagcagggcctggtatgcagcctgcctaacaagggagaatttataggctctgtggacggaaagatctgggagyccatatctatcacgcactagcttgctgagacattagtaaagtcagttttctgaactacatttctgtcatctgtaaattgagaggaatttcttctaccccacgaggcttcttggatagttagtgacagtgtgtgtagagcaggtgccatccagccggcatttggtgtccagaccactcctcttcccccttgattttctgcctaaatttgcattttgttcttaagattttcactccccttaattctgctcttccctctgatttctgccttactgtatatcccatggagtcaccaggatcaaagtgggtaaccgtcatgtatgcatgtatgtgtgtgtacatatacacattgctggggttggagtgtggtgtgtgggtaagtgtgagttggaatcactgactaaaactctccacaccaggctgtgttcctgctcattgctggaggcactgtcaggggccctgtcctcaaccccgggtctgacacttgcagatcaggcaggacattctggaggaatcatgcccttggaa

SEQ ID NO: 30189 - DNA, 922 bp, Homo sapiens
cttgagcctaggagtttgagactagcctggacaacatagtgggacactgtctttactaaaacattttaaaaatagccaggcatagtggtgtgcatttgtggtcccagctactagggaggctgagatgaaagaatyttttgagcccgggaggtaaaggctgcagtgaaccacgatcatatcactgcactccagcttaggcaacagagcgagaccctatctcaaaaaaaaaaaaaaaaaaaaaaaaaaaaaatgctacttgctatgtcccctaaggatcagaaagattcttcaaaaaatcacagtgaaggaatttcactagttatcaattattctcttctatcaatgggttgagaaaaacaaaatataaattcaatgtaagattctttattcttatagaaaagcatcaaactcaatggacataaaaatagcattaacaaaagagcaatcaatggtgatgataatattgcagcactaaacccccatttgaaatttaaaaattgtccctgtctgtcactgtcttctgtcccaagtttggattatctgatcagtgtttcctgtagcccagggaaacttaccttacacttctagatgttaattgaaaatcacttgaagaaaaagctgacaatgctgagatagaaaaatagatctaaacctggcttagagcattacagctgaaaagtactttaatgtacccagatcttatgacaccaaagcaggaagggagcattgagaccaggtggtccagacagagttggaaagatatttctcagatacgtgtttttttgtttttgtttttttttttaacagcctattagagtggtttttacattttgaattcattggtaacatttacaaactagggagattttacataaagctctagatttctggcttctcttaaaaattcagatcctgcaaaagg

SEQ ID NO: 30190 - DNA, 570 bp, Homo sapiens
cagcccgtaggttaggtggctgggctgattggagggaaggaactgtatgtgaaagaaagccacaccagctcacccaaaggagtgactcagccagaaagaagacttccagagtctcagaaaaccagcttgctatcaaaagcagggctccagtcctggggtgctgcaatttcaagccagacatccacaataaccagttgtccgacatggcttcacaattttaagcatccatccttggcttggcaaatacactgcaaccctcagcaaaaggacagatttgagggtgggaaaaggggctccagtcctcaccccttggatcagactagtctcgggatctggggtgagcacgccagcaggtgtgagccatcaggaaaccaagctccaaggagccggcctgaccctccactgaatggcttgtcctccctttctctgagckcatccattgccttttccatttgtggtttcctgggtggcatctactgcccacattacagctagtttttatggatgaattgactgaaagttcgagaaaatgtaatttaccgtttaagttttaagtgggaggtttaattt

SEQ ID NO: 30191 - DNA, 627 bp, Homo sapiens
taaaaagtgagccatttaaagttttatgctttgaagtggcaaaatgatgtcacacttgaaggtgctggcctcaagtcctgaccttgcagctgtctgcttctcctggctgttcacagggttgtgagacagcaggcccccagaaaattcctcggacacagcctcctcccagcctggctctgctcactgcgctmtccagtgccttgggcctctgatggaagacaacgagtaggactgacctccatactctggtcttcccctcatgacataaacaggcatgcttcagtggcccatcccgttagggtcaacttgctgattgctgatttatctgataaatgaacgtatgctcacagagaagccgagacgggtacattaatagtgtgttacatctcccaagaaggatgttgatacagaattttcaaacagagcaattggagacttagactcacaagaccaaagaatcctagggtatgatggcatgcagggacttaaacaatggtataaaccaatgcattaacttcccagatgggaaagctgaggctcagaaaagggaagtgagtttttcagtcctttgcaactactaagaagtacagccatgcttcctgatttcccagccagtgttcttccaac

SEQ ID NO: 30192 - DNA, 653 bp, Homo sapiens
gggcttggcacatagtagctattgctactattatgaatgttgttttgtctttgtttttgttttgagacagggcctcactctgttgcccaggttggagtacagcagtgccatcatagctcactgaagcctcaacctccctgggtttgagcaatcctcccacctcagcctcccaagtagctgagactacaggtgtgcgccaccaagcccagccaattgtttgtattttcagtagagactggttttgccaagtcgcccaggctggtttcgaactctggggttcaagcaatctgcccacctcagcctcccaaagtgctggcattacaggcgtgtgccactgcgcccagccattatgaatgtcaatattgacatgatcttgtatccttatgcccacactgggagaggtctgattgtccccatgttcctggtgtggaaccacatggaagaggcctatgttatcccaacagtgcagaagcacagcctgagtctcttctttggctgagccaagggcgtgctggagaggcctgacagaagaaggagcggcccttgtgaccagtgcccttttggttcacaaggaacttctcctcttgttgaagtgacttggctgagcttgctmcttctgctttgagagtcaaatatcaggatcaagactttaa

SEQ ID NO: 30193 - DNA, 423 bp, Homo sapiens
gttggtcaggctggtctcaaactcctgacctcgtgattcgcccgtctcagcctcccaaagtgctgagattacagacgtcagccaccacgcctggcctcttgtgcatttttcaatttagtcataaccttgcttaaaacaaaacttgttttgttttaaacaaaacttcaaattcatttccagacatttgaatgttctaaatctaaaataacaaaaacacagatgcyctaaatcacaaagaaatgcttcctgaggcaggtaagtgtagcaagccatgtggaagctgtgcacaaccccttaaaagaaggaggtggtagccatttcttggagccaaagaattatcgctatggtgactggcaggtttagtgctgacagatcttccaatttttttttttttttttgagacggagttttgctcttgttgcc

SEQ ID NO: 30194 - DNA, 2103 bp, Homo sapiens
aggaastaagggcagcctctgggttccatagcccctagtccatgagtcagccacccctctgcgtgctgacaaaccttggctctcatgccccaccccaagccaagcacacagccctgtccccccaccagcattatcaccgcctcctgattttggccctgacagccctgcttcctggtaaccttgccccctcccaccctgctccaggcaagcccaaaggccaggccctccacccacccttcctgggggccactctactatctccttgcccagatgtcttaacctggctttaccaagatagaataaataacagggatgaggccccggaccccgccaggaagatgtgccaaaataccctccatttagaagcgggaacagtgatggggcctatggatgaccccaggattgtcacccaagcagcaagaagggcaaggagcccggtttcctgcccttacctggggaggacgtggccagggctccaaaaggccctggagaggggtgggcaggagagcagatccaccctcctcttgaggaagcagccaccatccccaggaagagcagatgggggcacacaggcagagtccccacgtgctgtagagcagggccagcagaactgtactcagccccagccccaggggagctgcaagatagactgagaccctcacaggttgggctctgtgtccccacccaaatctcatctggaattgtaatcctcctgtgtcaagggaggaacctggtgggaggggatgggatctggggacaggttcccccctgctgctcccctgatagtgcgggagttctcaggagagctgatggtttgaaagtgtggcacttcctgcttctccgctcactccctcctgccgccttgtggagaaggtgcctgcttccccttcgccttctgccatgactgtaagttccctgaactgggagtcgattaaacctctttcctttataaattacctaggctcaagtatttctttatagcagtgtgaaaacaaactaataccccttccctgaggcgccttctccttaggcaacccgctgcccccatgctcctcctctgccccctgttctttcttttcccctcatgaggcccaagtgataaacggggccagccccagtcccagccccagccccagccccatcctactgcaggcctgtgtggctgctggagaggccgtgttcctttcctctccccgagcctgcctgatatgctttctggatcctggaggaaactgaccccctattctcatactggtgcaacatcttccaagacctcaaagctgtaccatttgagccagtcttttttcttatctccacttgctagggctgtcattgggacagtcctagagggtggtgccaatggatgaatggatggatggacagtagtccagggatgatgtccctgtctgtcctgaaccgggcctttcctccaatgagaagccttcctgagtgagtatatacagtcatcccttggtatccatggaggattagttctagggtccccgggaatgccaaaatccatggatgctcaagtctctgatataacgtggcctagtatttacgtataagctatgcacatcctcccgtatacgttagaccgttactagattatttatgatgtgtaatacaatgcagatgctacataaatggtcgtgatactgtattctttagggaatgatgacaagaacaaagtctgcacatgttcaatagaaacataaccgtccaatttattttctgaatattttccatctgctgttgctgaatctacagatgcagagctcctggatacgagagccaagtgtgctttgagagtagggtgggtgaggttgctaatgagtacaggggagcaggtgttgatcaggaggaccctgcactggggcatctggacgtcctgcctcaggacttgagactccagttggatggcacaggtagactcagcccaggtcaaagccgtccccttgaagtttctttttatcccaagctctttctggaccctggaattcggcatcccctaggccctgcgtggaaggacagatgaaccaggttttagataacatgtctagaagagtgagcccctactgtgtgcccggcactttccccaca

SEQ ID NO: 30195 - DNA, 2103 bp, Homo sapiens
aggaactaagggcagcctctgggttccatagcccctagtccatgagtcagccacccctctgcgtgctgacaaaccttggctctcatgccccaccccaagccaagcacacagccctgtccccccaccagcattatcaccgcctcctgattttggccctgacagccctgcttcctggtaaccttgccccctcccaccctgctccaggcwagcccaaaggccaggccctccacccacccttcctgggggccactctactatctccttgcccagatgtcttaacctggctttaccaagatagaataaataacagggatgaggccccggaccccgccaggaagatgtgccaaaataccctccatttagaagcgggaacagtgatggggcctatggatgaccccaggattgtcacccaagcagcaagaagggcaaggagcccggtttcctgcccttacctggggaggacgtggccagggctccaaaaggccctggagaggggtgggcaggagagcagatccaccctcctcttgaggaagcagccaccatccccaggaagagcagatgggggcacacaggcagagtccccacgtgctgtagagcagggccagcagaactgtactcagccccagccccaggggagctgcaagatagactgagaccctcacaggttgggctctgtgtccccacccaaatctcatctggaattgtaatcctcctgtgtcaagggaggaacctggtgggaggggatgggatctggggacaggttcccccctgctgctcccctgatagtgcgggagttctcaggagagctgatggtttgaaagtgtggcacttcctgcttctccgctcactccctcctgccgccttgtggagaaggtgcctgcttccccttcgccttctgccatgactgtaagttccctgaactgggagtcgattaaacctctttcctttataaattacctaggctcaagtatttctttatagcagtgtgaaaacaaactaataccccttccctgaggcgccttctccttaggcaacccgctgcccccatgctcctcctctgccccctgttctttcttttcccctcatgaggcccaagtgataaacggggccagccccagtcccagccccagccccagccccatcctactgcaggcctgtgtggctgctggagaggccgtgttcctttcctctccccgagcctgcctgatatgctttctggatcctggaggaaactgaccccctattctcatactggtgcaacatcttccaagacctcaaagctgtaccatttgagccagtcttttttcttatctccacttgctagggctgtcattgggacagtcctagagggtggtgccaatggatgaatggatggatggacagtagtccagggatgatgtccctgtctgtcctgaaccgggcctttcctccaatgagaagccttcctgagtgagtatatacagtcatcccttggtatccatggaggattagttctagggtccccgggaatgccaaaatccatggatgctcaagtctctgatataacgtggcctagtatttacgtataagctatgcacatcctcccgtatacgttagaccgttactagattatttatgatgtgtaatacaatgcagatgctacataaatggtcgtgatactgtattctttagggaatgatgacaagaacaaagtctgcacatgttcaatagaaacataaccgtccaatttattttctgaatattttccatctgctgttgctgaatctacagatgcagagctcctggatacgagagccaagtgtgctttgagagtagggtgggtgaggttgctaatgagtacaggggagcaggtgttgatcaggaggaccctgcactggggcatctggacgtcctgcctcaggacttgagactccagttggatggcacaggtagactcagcccaggtcaaagccgtccccttgaagtttctttttatcccaagctctttctggaccctggaattcggcatcccctaggccctgcgtggaaggacagatgaaccaggttttagataacatgtctagaagagtgagcccctactgtgtgcccggcactttccccaca

SEQ ID NO: 30196 - DNA, 2103 bp, Homo sapiens
aggaactaagggcagcctctgggttccatagcccctagtccatgagtcagccacccctctgcgtgctgacaaaccttggctctcatgccccaccccaagccaagcacacagccctgtccccccaccagcattatcaccgcctcctgattttggccctgacagccctgcttcctggtaaccttgccccctcccaccctgctccaggcaagcccaaaggccaggccctccacccacccttcctgggggccactctactatctccttgcccagatgtcttaacctggctttaccaagatagaataaataacagggatgaggccccggaccccgccaggaagatgtgccaaaataccctccatttagaagcgggaacagtgatggggcctatggatgaccccaggattgtcacccaagcagcaagaagggcaaggagcccggtttcctgcccttacctggggaggacgtggccagggctccaaaaggccctggagaggggtgggcaggagagcagatccaccctcctcttgaggaagcagccaccatccccaggaagagcagatgggggcacacaggcagagtccccacgtgctgtagagcaggrccagcagaactgtactcagccccagccccaggggagctgcaagatagactgagaccctcacaggttgggctctgtgtccccacccaaatctcatctggaattgtaatcctcctgtgtcaagggaggaacctggtgggaggggatgggatctggggacaggttcccccctgctgctcccctgatagtgcgggagttctcaggagagctgatggtttgaaagtgtggcacttcctgcttctccgctcactccctcctgccgccttgtggagaaggtgcctgcttccccttcgccttctgccatgactgtaagttccctgaactgggagtcgattaaacctctttcctttataaattacctaggctcaagtatttctttatagcagtgtgaaaacaaactaataccccttccctgaggcgccttctccttaggcaacccgctgcccccatgctcctcctctgccccctgttctttcttttcccctcatgaggcccaagtgataaacggggccagccccagtcccagccccagccccagccccatcctactgcaggcctgtgtggctgctggagaggccgtgttcctttcctctccccgagcctgcctgatatgctttctggatcctggaggaaactgaccccctattctcatactggtgcaacatcttccaagacctcaaagctgtaccatttgagccagtcttttttcttatctccacttgctagggctgtcattgggacagtcctagagggtggtgccaatggatgaatggatggatggacagtagtccagggatgatgtccctgtctgtcctgaaccgggcctttcctccaatgagaagccttcctgagtgagtatatacagtcatcccttggtatccatggaggattagttctagggtccccgggaatgccaaaatccatggatgctcaagtctctgatataacgtggcctagtatttacgtataagctatgcacatcctcccgtatacgttagaccgttactagattatttatgatgtgtaatacaatgcagatgctacataaatggtcgtgatactgtattctttagggaatgatgacaagaacaaagtctgcacatgttcaatagaaacataaccgtccaatttattttctgaatattttccatctgctgttgctgaatctacagatgcagagctcctggatacgagagccaagtgtgctttgagagtagggtgggtgaggttgctaatgagtacaggggagcaggtgttgatcaggaggaccctgcactggggcatctggacgtcctgcctcaggacttgagactccagttggatggcacaggtagactcagcccaggtcaaagccgtccccttgaagtttctttttatcccaagctctttctggaccctggaattcggcatcccctaggccctgcgtggaaggacagatgaaccaggttttagataacatgtctagaagagtgagcccctactgtgtgcccggcactttccccaca

SEQ ID NO: 30197 - DNA, 2103 bp, Homo sapiens
aggaactaagggcagcctctgggttccatagcccctagtccatgagtcagccacccctctgcgtgctgacaaaccttggctctcatgccccaccccaagccaagcacacagccctgtccccccaccagcattatcaccgcctcctgattttggccctgacagccctgcttcctggtaaccttgccccctcccaccctgctccaggcaagcccaaaggccaggccctccacccacccttcctgggggccactctactatctccttgcccagatgtcttaacctggctttaccaagatagaataaataacagggatgaggccccggaccccgccaggaagatgtgccaaaataccctccatttagaagcgggaacagtgatggggcctatggatgaccccaggattgtcacccaagcagcaagaagggcaaggagcccggtttcctgcccttacctggggaggacgtggccagggctccaaaaggccctggagaggggtgggcaggagagcagatccaccctcctcttgaggaagcagccaccatccccaggaagagcagatgggggcacacaggcagagtccccacgtgctgtagagcagggccagcagaactgtactcagccccagccccaggggagctgcaagatagactgagaccctcacaggttgggctctgtgtccccacccaaatctcatctggaattgtaatcctcctgtgtcaagggaggaacctggtgggaggggatgggatctggggacaggttcccccctgctgctcccctgatagtgcgggagttctcaggagagctgatggtttgaaagtgtggcacttcctgcttctccgctcactccctcctgccgccttgtggagaaggtgcctgcttccccttcgccttctgccatgactgtaagttccctgaactgggagtcgattaaacctctttcctttataaattacctaggctcaagtatttctttatagcagtgtgaaaacaaactaataccccttccctgaggcgccttctccttaggcaacccgctgcccccatgctcctcctctgccccctgttctttcttttcccctcatgaggcccaagtgataaacggggccagccccagycccagccccagccccagccccatcctactgcaggcctgtgtggctgctggagaggccgtgttcctttcctctccccgagcctgcctgatatgctttctggatcctggaggaaactgaccccctattctcatactggtgcaacatcttccaagacctcaaagctgtaccatttgagccagtcttttttcttatctccacttgctagggctgtcattgggacagtcctagagggtggtgccaatggatgaatggatggatggacagtagtccagggatgatgtccctgtctgtcctgaaccgggcctttcctccaatgagaagccttcctgagtgagtatatacagtcatcccttggtatccatggaggattagttctagggtccccgggaatgccaaaatccatggatgctcaagtctctgatataacgtggcctagtatttacgtataagctatgcacatcctcccgtatacgttagaccgttactagattatttatgatgtgtaatacaatgcagatgctacataaatggtcgtgatactgtattctttagggaatgatgacaagaacaaagtctgcacatgttcaatagaaacataaccgtccaatttattttctgaatattttccatctgctgttgctgaatctacagatgcagagctcctggatacgagagccaagtgtgctttgagagtagggtgggtgaggttgctaatgagtacaggggagcaggtgttgatcaggaggaccctgcactggggcatctggacgtcctgcctcaggacttgagactccagttggatggcacaggtagactcagcccaggtcaaagccgtccccttgaagtttctttttatcccaagctctttctggaccctggaattcggcatcccctaggccctgcgtggaaggacagatgaaccaggttttagataacatgtctagaagagtgagcccctactgtgtgcccggcactttccccaca

SEQ ID NO: 30198 - DNA, 2103 bp, Homo sapiens
aggaactaagggcagcctctgggttccatagcccctagtccatgagtcagccacccctctgcgtgctgacaaaccttggctctcatgccccaccccaagccaagcacacagccctgtccccccaccagcattatcaccgcctcctgattttggccctgacagccctgcttcctggtaaccttgccccctcccaccctgctccaggcaagcccaaaggccaggccctccacccacccttcctgggggccactctactatctccttgcccagatgtcttaacctggctttaccaagatagaataaataacagggatgaggccccggaccccgccaggaagatgtgccaaaataccctccatttagaagcgggaacagtgatggggcctatggatgaccccaggattgtcacccaagcagcaagaagggcaaggagcccggtttcctgcccttacctggggaggacgtggccagggctccaaaaggccctggagaggggtgggcaggagagcagatccaccctcctcttgaggaagcagccaccatccccaggaagagcagatgggggcacacaggcagagtccccacgtgctgtagagcagggccagcagaactgtactcagccccagccccaggggagctgcaagatagactgagaccctcacaggttgggctctgtgtccccacccaaatctcatctggaattgtaatcctcctgtgtcaagggaggaacctggtgggaggggatgggatctggggacaggttcccccctgctgctcccctgatagtgcgggagttctcaggagagctgatggtttgaaagtgtggcacttcctgcttctccgctcactccctcctgccgccttgtggagaaggtgcctgcttccccttcgccttctgccatgactgtaagttccctgaactgggagtcgattaaacctctttcctttataaattacctaggctcaagtatttctttatagcagtgtgaaaacaaactaataccccttccctgaggcgccttctccttaggcaacccgctgcccccatgctcctcctctgccccctgttctttcttttcccctcatgaggcccaagtgataaacggggccagccccagtcccagccccagccccagccccatcctactgcaggcctgtgtggctgctggagaggccgtgttcctttcctctcccygagcctgcctgatatgctttctggatcctggaggaaactgaccccctattctcatactggtgcaacatcttccaagacctcaaagctgtaccatttgagccagtcttttttcttatctccacttgctagggctgtcattgggacagtcctagagggtggtgccaatggatgaatggatggatggacagtagtccagggatgatgtccctgtctgtcctgaaccgggcctttcctccaatgagaagccttcctgagtgagtatatacagtcatcccttggtatccatggaggattagttctagggtccccgggaatgccaaaatccatggatgctcaagtctctgatataacgtggcctagtatttacgtataagctatgcacatcctcccgtatacgttagaccgttactagattatttatgatgtgtaatacaatgcagatgctacataaatggtcgtgatactgtattctttagggaatgatgacaagaacaaagtctgcacatgttcaatagaaacataaccgtccaatttattttctgaatattttccatctgctgttgctgaatctacagatgcagagctcctggatacgagagccaagtgtgctttgagagtagggtgggtgaggttgctaatgagtacaggggagcaggtgttgatcaggaggaccctgcactggggcatctggacgtcctgcctcaggacttgagactccagttggatggcacaggtagactcagcccaggtcaaagccgtccccttgaagtttctttttatcccaagctctttctggaccctggaattcggcatcccctaggccctgcgtggaaggacagatgaaccaggttttagataacatgtctagaagagtgagcccctactgtgtgcccggcactttccccaca

SEQ ID NO: 30199 - DNA, 501 bp, Homo sapiens
atcaagcatatgctaaatttgtacttaaaacggtccaatgtgactttaaaaaaaggttactcttcaagcagctttcaatctagttgggagagtaaattactacacataaaacgtgttatttatgtacatatatatgtaaaaatactcaaatacaaaggatccaaatgtaagaattcaaaggagataagttagttcaggaaagctccaaagaaggtaagatttaggcaaagtccagaaggatagacagaattgaatggaaatgaacccttcataatctaacttcatcttgcctttccaacacattgtacaatacaaaattattagaatagataaaagcagtctatggccataccaacctgaacatgcygatctcatctgatctcagaataaaaacaaattagaaaagaagctgagtgcagtggctcacgcctgtaatcccaacactttgggaggttgcggtgggtggatctcttgagctcaggagttcaagaccagccgggg

SEQ ID NO: 30200 - DNA, 2220 bp, Homo sapiens
tcagctttactagacgttgtcaaattttctccaaagtagctgtaataacatagatcttcacaaataatggggtagcaaaaattggcctctgctcaatctgacttctacatcttgcgtaaggggatctggttagctgaatctgatcacattcattatcccagttgaaaaggagcctgtgatttgtaattatctttctaggttttgtgaatccagaaggcatagtagaagatttacatcttcaactgagttccatatcaaacacaaccatccttccatacatgcctttaagttttaaatttaattctaaaaactgtgtgagctgtatatcaggatttttcagatacagtattgttaactgctattcagttctaaatatcaatactacctattgtaattttcgtcctttacccataaataatttgctactgcatttaagccttaaaatttactaatttttaaattattattaatttatttattttgagactgggtcttgctctgtcaccctgaaagtggtacratcatagctcactgctacctcgaactcctgggctcaagtgattctcctgccttagccttctgagtagctgggactacaggcacacaccaccatatccatctaagcatttttaagtctttaggcatgtttttaaaccttctattgattttctgtttaattgcattatggttagatgtttcagttaaagtaaccttgattttttaaaaatgtgttgcagacttcctgagagatttcttgtatggccgtatggtcagtctttatttagaagccatgtaagagttctacttcatagatacaaggttcaaaatggatattttaaatcaagcacatgaattatatcttccaaattttttgtagacacatatataattaaaatatatcttaacacataatataattaatacaatatgcatatgttcaaaatatactgacatattgcatattaatatattagtattaccatattaatatataaatatgtgctaatttttttctatttttggtctattagatctctcatttttaaataaaaataagttaaaaatcaacttatgctcattttttcttcttgtagctctacatgatgttgttaggttcatataaggtcatgatcatgaatttttttggtggattgttctttataatattgagttatccctttttatttaactggttttgtctttgattctgaattgtctgatcttaatattgctaccatcacttttgtttttattgcatgttttcgttgctcatctgttatcctttaatccagtggatgtgtatatgtctagtatatgtgacttggggaatatctttcttaaggagtatataatctctttacttatctttcattcttctggcttttctcatttgtgccctcaatagcacttatcatacttttggtcataaccattctctcttgtgcattttctgacgtaatctttatttctaaggtaatgtcctctttttctttagtttccttcatgaattttgtcagttcctgctctttttccttctcttctctgagcttttgcatttctgttccttgtgttattttgtagctagaaatgcttttttattatactttaagttttatagaaatgcttcttaaattacatataattcatattgatatcatgtgttacagcttttagccactgtttggtgttgtttcttctgctagaaagttttgtttactgttttctgttctgtgatctgccctgccccatgtggaatcttttattctatcttgtttcattaaagcctttatcatctaaaatgtgtttctttccttcaccatcagctgattctgtcaaactgaagattcatagagcctgggacaaggattctcaaatattttggtatcatgatctctttacactctaaaaaattaatgataactccaaggaactagtttcatgtgggttatatatatattgatatttactacattaaaaaattaaagctgcgaaaaattttaaacataaaaatacacaagcatacattctattagctctcagagtgatgacattaccactccacgtgtagtgtttggaatgcctctttcttgttttcttccaggagcaatgacttcccaagaccactccaccttgtcccatagctgggtaagcccctttctttcttcttctttgccagtgctctgactagccaagtttcagaactgttcccaggagtgccca

SEQ ID NO: 30201 - DNA, 2220 bp, Homo sapiens
tcagctttactagacgttgtcaaattttctccaaagtagctgtaataacatagatcttcacaaataatggggtagcaaaaattggcctctgctcaatctgacttctacatcttgcgtaaggggatctggttagctgaatctgatcacattcattatcccagttgaaaaggagcctgtgatttgtaattatctttctaggttttgtgaatccagaaggcatagtagaagatttacatcttcaactgagttccatatcaaacacaaccatccttccatacatgcctttaagttttaaatttaattctaaaaactgtgtgagctgtatatcaggatttttcagatacagtattgttaactgctattcagttctaaatatcaatactacctattgtaattttcgtcctttacccataaataatttgctactgcatttaagccttaaaatttactaatttttaaattattattaatttatttattttgagactgggtcttgctctgtcaccctgaaagtggtacaatcatagctcactgctacctcgaactcctgggctcaagtgattctcctgccttagccttctgagtagctgggactacaggcacacaccaccatatccatctaagcatttttaagtctttaggcatgtttttaaaccttctattgattttctgtttaattgcattatggttagatgtttcagttaaagtaaccttgattttttaaaaatgtgttgcagacttcctgagagatttcttgtatggccgtatggtcagtctttatttagaagccatgtaagagttctacttcatagatacaaggttcaaaatggatattttaaatcmagcacatgaattatatcttccaaattttttgtagacacatatataattaaaatatatcttaacacataatataattaatacaatatgcatatgttcaaaatatactgacatattgcatattaatatattagtattaccatattaatatataaatatgtgctaatttttttctatttttggtctattagatctctcatttttaaataaaaataagttaaaaatcaacttatgctcattttttcttcttgtagctctacatgatgttgttaggttcatataaggtcatgatcatgaatttttttggtggattgttctttataatattgagttatccctttttatttaactggttttgtctttgattctgaattgtctgatcttaatattgctaccatcacttttgtttttattgcatgttttcgttgctcatctgttatcctttaatccagtggatgtgtatatgtctagtatatgtgacttggggaatatctttcttaaggagtatataatctctttacttatctttcattcttctggcttttctcatttgtgccctcaatagcacttatcatacttttggtcataaccattctctcttgtgcattttctgacgtaatctttatttctaaggtaatgtcctctttttctttagtttccttcatgaattttgtcagttcctgctctttttccttctcttctctgagcttttgcatttctgttccttgtgttattttgtagctagaaatgcttttttattatactttaagttttatagaaatgcttcttaaattacatataattcatattgatatcatgtgttacagcttttagccactgtttggtgttgtttcttctgctagaaagttttgtttactgttttctgttctgtgatctgccctgccccatgtggaatcttttattctatcttgtttcattaaagcctttatcatctaaaatgtgtttctttccttcaccatcagctgattctgtcaaactgaagattcatagagcctgggacaaggattctcaaatattttggtatcatgatctctttacactctaaaaaattaatgataactccaaggaactagtttcatgtgggttatatatatattgatatttactacattaaaaaattaaagctgcgaaaaattttaaacataaaaatacacaagcatacattctattagctctcagagtgatgacattaccactccacgtgtagtgtttggaatgcctctttcttgttttcttccaggagcaatgacttcccaagaccactccaccttgtcccatagctgggtaagcccctttctttcttcttctttgccagtgctctgactagccaagtttcagaactgttcccaggagtgccca

SEQ ID NO: 30202 - DNA, 2220 bp, Homo sapiens
tcagctttactagacgttgtcaaattttctccaaagtagctgtaataacatagatcttcacaaataatggggtagcaaaaattggcctctgctcaatctgacttctacatcttgcgtaaggggatctggttagctgaatctgatcacattcattatcccagttgaaaaggagcctgtgatttgtaattatctttctaggttttgtgaatccagaaggcatagtagaagatttacatcttcaactgagttccatatcaaacacaaccatccttccatacatgcctttaagttttaaatttaattctaaaaactgtgtgagctgtatatcaggatttttcagatacagtattgttaactgctattcagttctaaatatcaatactacctattgtaattttcgtcctttacccataaataatttgctactgcatttaagccttaaaatttactaatttttaaattattattaatttatttattttgagactgggtcttgctctgtcaccctgaaagtggtacaatcatagctcactgctacctcgaactcctgggctcaagtgattctcctgccttagccttctgagtagctgggactacaggcacacaccaccatatccatctaagcatttttaagtctttaggcatgtttttaaaccttctattgattttctgtttaattgcattatggttagatgtttcagttaaagtaaccttgattttttaaaaatgtgttgcagacttcctgagagatttcttgtatggccgtatggtcagtctttatttagaagccatgtaagagttctacttcatagatacaaggttcaaaatggatattttaaatcaagcacatgaattatatcttccaaattttttgtagacacatatataattaaaatatatctyaacacataatataattaatacaatatgcatatgttcaaaatatactgacatattgcatattaatatattagtattaccatattaatatataaatatgtgctaatttttttctatttttggtctattagatctctcatttttaaataaaaataagttaaaaatcaacttatgctcattttttcttcttgtagctctacatgatgttgttaggttcatataaggtcatgatcatgaatttttttggtggattgttctttataatattgagttatccctttttatttaactggttttgtctttgattctgaattgtctgatcttaatattgctaccatcacttttgtttttattgcatgttttcgttgctcatctgttatcctttaatccagtggatgtgtatatgtctagtatatgtgacttggggaatatctttcttaaggagtatataatctctttacttatctttcattcttctggcttttctcatttgtgccctcaatagcacttatcatacttttggtcataaccattctctcttgtgcattttctgacgtaatctttatttctaaggtaatgtcctctttttctttagtttccttcatgaattttgtcagttcctgctctttttccttctcttctctgagcttttgcatttctgttccttgtgttattttgtagctagaaatgcttttttattatactttaagttttatagaaatgcttcttaaattacatataattcatattgatatcatgtgttacagcttttagccactgtttggtgttgtttcttctgctagaaagttttgtttactgttttctgttctgtgatctgccctgccccatgtggaatcttttattctatcttgtttcattaaagcctttatcatctaaaatgtgtttctttccttcaccatcagctgattctgtcaaactgaagattcatagagcctgggacaaggattctcaaatattttggtatcatgatctctttacactctaaaaaattaatgataactccaaggaactagtttcatgtgggttatatatatattgatatttactacattaaaaaattaaagctgcgaaaaattttaaacataaaaatacacaagcatacattctattagctctcagagtgatgacattaccactccacgtgtagtgtttggaatgcctctttcttgttttcttccaggagcaatgacttcccaagaccactccaccttgtcccatagctgggtaagcccctttctttcttcttctttgccagtgctctgactagccaagtttcagaactgttcccaggagtgccca

SEQ ID NO: 30203 - DNA, 2220 bp, Homo sapiens
tcagctttactagacgttgtcaaattttctccaaagtagctgtaataacatagatcttcacaaataatggggtagcaaaaattggcctctgctcaatctgacttctacatcttgcgtaaggggatctggttagctgaatctgatcacattcattatcccagttgaaaaggagcctgtgatttgtaattatctttctaggttttgtgaatccagaaggcatagtagaagatttacatcttcaactgagttccatatcaaacacaaccatccttccatacatgcctttaagttttaaatttaattctaaaaactgtgtgagctgtatatcaggatttttcagatacagtattgttaactgctattcagttctaaatatcaatactacctattgtaattttcgtcctttacccataaataatttgctactgcatttaagccttaaaatttactaatttttaaattattattaatttatttattttgagactgggtcttgctctgtcaccctgaaagtggtacaatcatagctcactgctacctcgaactcctgggctcaagtgattctcctgccttagccttctgagtagctgggactacaggcacacaccaccatatccatctaagcatttttaagtctttaggcatgtttttaaaccttctattgattttctgtttaattgcattatggttagatgtttcagttaaagtaaccttgattttttaaaaatgtgttgcagacttcctgagagatttcttgtatggccgtatggtcagtctttatttagaagccatgtaagagttctacttcatagatacaaggttcaaaatggatattttaaatcaagcacatgaattatatcttccaaattttttgtagacacatatataattaaaatatatcttaacacataatataattaatacaatatgcatatgttcaaaatatactgacatattgcatattaatatattagtattaccatattaatatataaatatgtgctaatttttttctatttttggtctattagatctctcatttttaaataaaaataagttaaaaatcaacttatgctcatttttkcttcttgtagctctacatgatgttgttaggttcatataaggtcatgatcatgaatttttttggtggattgttctttataatattgagttatccctttttatttaactggttttgtctttgattctgaattgtctgatcttaatattgctaccatcacttttgtttttattgcatgttttcgttgctcatctgttatcctttaatccagtggatgtgtatatgtctagtatatgtgacttggggaatatctttcttaaggagtatataatctctttacttatctttcattcttctggcttttctcatttgtgccctcaatagcacttatcatacttttggtcataaccattctctcttgtgcattttctgacgtaatctttatttctaaggtaatgtcctctttttctttagtttccttcatgaattttgtcagttcctgctctttttccttctcttctctgagcttttgcatttctgttccttgtgttattttgtagctagaaatgcttttttattatactttaagttttatagaaatgcttcttaaattacatataattcatattgatatcatgtgttacagcttttagccactgtttggtgttgtttcttctgctagaaagttttgtttactgttttctgttctgtgatctgccctgccccatgtggaatcttttattctatcttgtttcattaaagcctttatcatctaaaatgtgtttctttccttcaccatcagctgattctgtcaaactgaagattcatagagcctgggacaaggattctcaaatattttggtatcatgatctctttacactctaaaaaattaatgataactccaaggaactagtttcatgtgggttatatatatattgatatttactacattaaaaaattaaagctgcgaaaaattttaaacataaaaatacacaagcatacattctattagctctcagagtgatgacattaccactccacgtgtagtgtttggaatgcctctttcttgttttcttccaggagcaatgacttcccaagaccactccaccttgtcccatagctgggtaagcccctttctttcttcttctttgccagtgctctgactagccaagtttcagaactgttcccaggagtgccca

SEQ ID NO: 30204 - DNA, 2220 bp, Homo sapiens
tcagctttactagacgttgtcaaattttctccaaagtagctgtaataacatagatcttcacaaataatggggtagcaaaaattggcctctgctcaatctgacttctacatcttgcgtaaggggatctggttagctgaatctgatcacattcattatcccagttgaaaaggagcctgtgatttgtaattatctttctaggttttgtgaatccagaaggcatagtagaagatttacatcttcaactgagttccatatcaaacacaaccatccttccatacatgcctttaagttttaaatttaattctaaaaactgtgtgagctgtatatcaggatttttcagatacagtattgttaactgctattcagttctaaatatcaatactacctattgtaattttcgtcctttacccataaataatttgctactgcatttaagccttaaaatttactaatttttaaattattattaatttatttattttgagactgggtcttgctctgtcaccctgaaagtggtacaatcatagctcactgctacctcgaactcctgggctcaagtgattctcctgccttagccttctgagtagctgggactacaggcacacaccaccatatccatctaagcatttttaagtctttaggcatgtttttaaaccttctattgattttctgtttaattgcattatggttagatgtttcagttaaagtaaccttgattttttaaaaatgtgttgcagacttcctgagagatttcttgtatggccgtatggtcagtctttatttagaagccatgtaagagttctacttcatagatacaaggttcaaaatggatattttaaatcaagcacatgaattatatcttccaaattttttgtagacacatatataattaaaatatatcttaacacataatataattaatacaatatgcatatgttcaaaatatactgacatattgcatattaatatattagtattaccatattaatatataaatatgtgctaatttttttctatttttggtctattagatctctcatttttaaataaaaataagttaaaaatcaacttatgctcattttttcttcttgtagctctacatgatgttgttagkttcatataaggtcatgatcatgaatttttttggtggattgttctttataatattgagttatccctttttatttaactggttttgtctttgattctgaattgtctgatcttaatattgctaccatcacttttgtttttattgcatgttttcgttgctcatctgttatcctttaatccagtggatgtgtatatgtctagtatatgtgacttggggaatatctttcttaaggagtatataatctctttacttatctttcattcttctggcttttctcatttgtgccctcaatagcacttatcatacttttggtcataaccattctctcttgtgcattttctgacgtaatctttatttctaaggtaatgtcctctttttctttagtttccttcatgaattttgtcagttcctgctctttttccttctcttctctgagcttttgcatttctgttccttgtgttattttgtagctagaaatgcttttttattatactttaagttttatagaaatgcttcttaaattacatataattcatattgatatcatgtgttacagcttttagccactgtttggtgttgtttcttctgctagaaagttttgtttactgttttctgttctgtgatctgccctgccccatgtggaatcttttattctatcttgtttcattaaagcctttatcatctaaaatgtgtttctttccttcaccatcagctgattctgtcaaactgaagattcatagagcctgggacaaggattctcaaatattttggtatcatgatctctttacactctaaaaaattaatgataactccaaggaactagtttcatgtgggttatatatatattgatatttactacattaaaaaattaaagctgcgaaaaattttaaacataaaaatacacaagcatacattctattagctctcagagtgatgacattaccactccacgtgtagtgtttggaatgcctctttcttgttttcttccaggagcaatgacttcccaagaccactccaccttgtcccatagctgggtaagcccctttctttcttcttctttgccagtgctctgactagccaagtttcagaactgttcccaggagtgccca

SEQ ID NO: 30205 - DNA, 959 bp, Homo sapiens
acttccaagctcacgcagttgttggcagaattcagtgccttgcaagctaccagactgaggatcttggtttcttgctggctgtcagctgaaggctgccctcggttccttgccatatagcccttttaaatgggatactcacaacatggcagctggctttttccaatcaacaagggagagaatctcctagaaggatggatattacagtcttatgtacacacaattggttggggggaagtcacacgttctgcccacactcataaggagggaactacataaaaatagaaacaccagaaaataggaatggtgagaatcaccttacactctgttcaccatacacactgaatttttaatgaatgaagtattattattcctgggaataataatgtgtctaggattttctttaaaatgatccagttatggtaggaagtgagagacattgatttaaaattttaatcacacattggcccttgttgaagctaagtacccgattgattgcactcttttcttttgcatctgtttgctaattttcataataaaatgcaaggcaatatcaaatacattatttgggagaaggaactcagaaacaggaggagttacaaggaatatgagcaccctaagaacccttggagatattgagaaggaccccaagtttcctaatgtacataagagggacattcaagcccatttttacttaaatgttaaaagacaagatgacttcaaaaagctggagaacttagggacagtcaggggctgacatttargttatacaaggcttagaagaaccacctggtatatgataggtgttaatagtgggtcactcttgttacttcctacaggctgctattggaggtatagaaataagcccacatgggtcttgttcttcttgaagactctgtccttgctctttctttctctctctgccagcctccatatcatatattattttcatgccatctgta

SEQ ID NO: 30206 - DNA, 579 bp, Homo sapiens
caaaaatagttactcaaattttgaacacgtttgaaatcaaatttgaaccaggttgctttaattgctctgtttgagggttggtggacatgtatgagctttgtatatttctcccctgtgttgtcaaatacaaaccaaactattcaggacacattgcacctcccacttccttcaatgactgcaattgagaagaacagatgaaagctgtctatgaggcgtgtatgcctttctgtgtttcctctgctctttgtttccagtgtttctcttcaaacagctcacagtccatagtcagcrcagaggtcgcatgcacagtgggggttgacttcaagttccttttaccttttgcaactatattgctgactgtgcatttttaaaaaggtcttaaattggtaactgacaaagttatatataaaatagtaagactttgatgttcttgttttcttccttctaaagtatgcagtggcagtgaaagattgggtagactgagtaaccttcccaagggtaacttttattaggaaccaaatgagtcctgccttccacagatgtttttttcaaggctgtatttgtgcaggtaactccaga

SEQ ID NO: 30207 - DNA, 524 bp, Homo sapiens
caaaacaactgatgggaggtttatccacagactctttagtcacatataaataatgaataggagattaaaagcaaaaagcctaggacactgtgtaacatttttgggataaagacattttaattaaataactattactatgaatatcatagtaatttctgcatagcaaatgctatgcagaaatcaatatgtatcaaccactaagaaattttaaaaatattaaatagggtatcctttccccattgcttgtttttctcaggtttgtcaaagatcagatagttgtagaaatgcagcgttatttctgagggctctgttctgtttcattgatctatgtctctgttttggtaccagtaccatgctgttttggttactgtagccttgtagtatagtttgaagtcaggtagtgtgatgcctccagctttgttcttttggcttaggattgccttggygatgcgggctcttttttggttccatatgaactttaaagtagttttttccaattctgtgaagaaaggcattggtagctt

SEQ ID NO: 30208 - DNA, 805 bp, Homo sapiens
aaaaaagaaaaaaagaaacaggaatgggccagccatggtttctcatatctgtaatcccagcacttttggaggccaaggcagggcaaaacacttgaggtcaggagtttgagaccagcctggccaacatagtgaaaccccatctctactaaaaatacaaaaattactgggtgtgatggcgtgcgcctataatcccagctacttgggaggctgaggcaggaaaatcacttgaacctggaggtggaggttgcagtgagccgagattgtgccactgcactccagcctgggcaacagagtgagactctgtctcaaaaataaatacataaataaataaataaacaggcaggaaggtcagagtcagaggagatgtgccaacagaagcagagatcagagtgatgtggagacatgagccaaggaatgcaggcagccttcaraagctggcagagatggctgggcatggtggcttacgcctgtaatcccagcactttgggaggccaaggcaggaggattgcttgaggccaggagtttgagaccagcctgggcaacaaagtgggactgtgtctcaaaaaaagagatgaattctcccctagagcctccagagagaatgtagctctgcaatccgttttagactctgacctctagaacatcctatgagacaaagtgcgccagtctgggaaccagacagcacaaagccacacggaaccaggactggaacccaggtcttcttgactcttaacgcaggccccacccagcccactggccctgctgaactggaggatgtgcaaagaaaggggacagtgtgggggct

SEQ ID NO: 30209 - DNA, 563 bp, Homo sapiens
tgttggaaggcagtggcctagataaagcattgcagtactgtggttcagagaaaagctttgtggaatatcttctctctcagtcagccttagacttagctagagtcttcatctaacttctgtgatctgatggatgcagtatctacgtcatcaatagagtcttctamaatgatctttgcttaagttcttctaaaaagttcttataatgatcttctaaaaagatcattaagtctccttaatgatctttgctgtctttacatttccgaaggtccccaaagtgcctttatgcctatctttctgtttctctcttctctgtttctcccctctttccctcctctctttctttctctctgtcttttacacttatttattgagtaccacgtacagtactgtgcgacaggggactgcttcctcgtaacacgaccctgttacaagatattatttttcccttcttaacacatattgcacctgaagctttgggcagttgagtgctttagtgctgtaatagggttacactgcctggaagttttgcagagccaggtttcaagtcaagttctctctgacat

SEQ ID NO: 30210 - DNA, 966 bp, Homo sapiens
tttcctgccaggctaccactgctgtggaacccacaacactggctctcaatattgcttggtaaacacctgagtgcagacagagggttctcttctgaccacctctttgggccacaaatgttttccctctcgaaactctctattttgctgtctaaaaatttcttagttgttttttgtgaccacaaacataacccaaactattttaaaaaatctaactcttaccaaataattaagracaccagcaacaacaatttggcactgaatttttgtttccattttacaaagtaaagaaataaattgaaccaagaaggtttctctgtggcttgagttttcaatgagcaagtgatctttgccatatttttataccagcaaatttaggtagaaaccaacccatgttcgtggtattcagccatgcccctgaggaatacatggattttctcccatcttgcactctcccagacactcctgaagtaaacgtttatttgggaacttgtagaaatgtttctttaatataaattcttaaaagtaggaatgctggttatatacatacaatggaatattattcagcctttaaaagttaggaaattctgacccctggtacaacagggacgggccttgagggcattatggtaagtgaaataaaccagtcaccaaaggacaaacaacatatgattctacttacatgaggtaatagagtagttaattcacagagacaaagtagaagggtggcttccaggggctgtgggtaaggggaaatgggactggtgttcagtgggtgccgtttccagtttgcaagatggaaaagttctagagatctgtggcacaacaatgcaaacatacgtaacactactgaattgtatacttaaaaatgattaagatggtcaactttatgttatttgtattttaccacaatcaaaactaacaataaaaaagagaaaaggactgcccaaaacaaaaaatgggaatgct

SEQ ID NO: 30211 - DNA, 966 bp, Homo sapiens
tttcctgccaggctaccactgctgtggaacccacaacactggctctcaatattgcttggtaaacacctgagtgcagacagagggttctcttctgaccacctctttgggccacaaatgttttccctctcgaaactctctattttgctgtctaaaaatttcttagttgttttttgtgaccacaaacataacccaaactattttaaaaaatctaactcttaccaaataattaaggacaccagcaacaacaatttggcactgaatttttgtttccattttacaaagtaaagaaataaattgaaccaagaaggtttctctgtggcttgagttttcaatgagcaagtgatctttgccatatttttataccagcaaatttaggtagaaaccaacccatgttcgtggtattcagccatgcccctgaggaatacatggattttctcccatcttgcactctcccagacactcctgaagtaaacgtttatttgggaacttgtagaaatgtttctttaatataaattcttaaaagtaggaatgctggttatatacatacaatggaatattattcagcctttaaaagttaggaaattctgacccctggtacaacagggacgggccttgagggcattatggtaagtgaaataaaccagtcaccaaaggacaaacaacatatgattctacttacatgaggtaatagagtagttaattcacagagacaaagtagaagggtggcttccaggggctgtgggtaaggggaaatgggactggtgttcagtgggtgccgtttccagtttgcaagatggaaaagttctagagatctgtggcacaacaatgcaaacatacgtaacactactgaattgtatacttaaaaatgattaagatggtcaactktatgttatttgtattttaccacaatcaaaactaacaataaaaaagagaaaaggactgcccaaaacaaaaaatgggaatgct

SEQ ID NO: 30212 - DNA, 966 bp, Homo sapiens
tttcctgccaggctaccactgctgtggaacccacaacactggctctcaatattgcttggtaaacacctgagtgcagacagagggttctcttctgaccacctctttgggccacaaatgttttccctctcgaaactctctattttgctgtctaaaaatttcttagttgttttttgtgaccacaaacataacccaaactattttaaaaaatctaactcttaccaaataattaaggacaccagcaacaacaatttggcactgaatttttgtttccattttacaaagtaaagaaataaattgaaccaagaaggtttctctgtggcttgagttttcaatgagcaagtgatctttgccatatttttataccagcaaatttaggtagaaaccaacccatgttcgtggtattcagccatgcccctgaggaatacatggattttctcccatcttgcactctcccagacactcctgaagtaaacgtttatttgggaacttgtagaaatgtttctttaatataaattcttaaaagtaggaatgctggttatatacatacaatggaatattattcagcctttaaaagttaggaaattctgacccctggtacaacagggacgggccttgagggcattatggtaagtgaaataaaccagtcaccaaaggacaaacaacatatgattctacttacatgaggtaatagagtagttaattcacagagacaaagtagaagggtggcttccaggggctgtgggtaaggggaaatgggactggtgttcagtgggtgccgtttccagtttgcaagatggaaaagttctagagatctgtggcacaacaatgcaaacatacgtaacactactgaattgtatacttaaaaatgattaagatggtcaactttatgttattwgtattttaccacaatcaaaactaacaataaaaaagagaaaaggactgcccaaaacaaaaaatgggaatgct

SEQ ID NO: 30213 - DNA, 936 bp, Homo sapiens
ttcatgaatggtttagtaccatccccttggtgacaagtgagttctcactcaggtagttcacttaggatctggttgtttagaagtctgggacctccctctctctctcttgctcccagtcccaccatgtaacatgccggttccctgtcaccttccaccatgagtgtaagcttcttaagcccttatcagaagcagagcagatggctggcaccatgcttgtacagcctgcagaaccctgaaccaactaaacctcttttctttataaattacccagccttcgttatttctatagcaacagaaaaacctgactaatataccaaccaattgtgtttctctctggtccattgaggctagtcttctccatgtctctaacacctgacctcatgcatgttgtcatctcctcatctttttttttttttttttgagatgaagtttcactcttgttgcccaggctggagtgcaatggcacgatcttggctcactgcaaactccacctccccggttcaagcaattctcctgcctcagcctcccgagtagctcagattacaggcatgtgccaccacgcccagctaatttttttgtagttttagtacagacagggtttcaccatgttggccaggatggtttcaaaygcctgacctcaggtgatccacctgcctcagcctcccaaagagctgggattacaggcatgagccaccatccctggccatctcctcatcttaattatcctgatgcttctgctgctgggaaactatccgtccatcccttctccctgtcaccaaccctgcaacccaatgagagtcttcccatcttaccaatggtgggtaaattggtttctcctggagtgccacagtagtcaaatagtcattcatatatttagagccatatcataactattatttcctttttaaatgttttagaaagtttgtcactaaaaca

SEQ ID NO: 30214 - DNA, 2379 bp, Homo sapiens
acatgcactgtaagcaattggagatgggagacaagaagggaggaaaaaccaatgccaggtgcattagttagtaggttactactatgggcaattggggctcaatacttgtaggaacctaggagagactggggaacacacctcacaattgtcccactgaagtgcaaagaagctgagatatttatccaccaactcccattctctttaacctagcattgctcctgggatgttacctctcaggcactttcagcctagccacggggcccacaagttcccacagccagagaacatcctcaggcagacagacacaggaagctttctgagtgcaagagacttttctgcaagtgaatcccagaacagaccaagggatatgaggaaagcgcccaacagcgtctactacaactaatctccccctctttactttatggttgagaaaaggaagacgggagaggttaagaaacttatgcaatgtcacacagagcatgctagggatatatcacggactggttggtttttctaacttccaggtcaacaatcttttccctaagctaagctctcactaacattctctatgtgatggagactgtgccagggattatttctatagtaaccaaaatcacaagtgcttaccttctagctcccataaatacggaaattgtgtaggatcctaaatgtcttgaatctctgacaataaatgcaccttctttagactgcaaaaaaaatcatttattgaataagtctattccttcttagaaagacaaacctacaactcagggatgaaaatcaaagctatattgacttaccataaataagtgacctgctatattattaatatgaagaattagattgtctttacaagtacacaaaatcttatctcccttatagatttagaagtcacacctataaaataaattgtaattgggacatgcatttataatgtactttagaatactgttactgatttttctaagaaaaattctctatttgaaaaccttgtaccctactgcttatttttgttatattgaccagaataatagattaaaaatcactgtagaataggaagaacactaagacagactgaccggattgtactttggaagaagagcaacaaggtgacagggaggaacacagctgggcaagcagggcgtggggaaggacaccagagttcatgggaagtagaaagaaagaacagatatgggggagtctgaaaagaaaagcaaaaggaaccatattagttgcagtaggggtatgggaagataaaaagaagtggtaaaagggagaacatgatagtaaatctgaagttatgttataaattagattcctattaacattctttgggagatgccaataaagctgtaaattgctttcaaagaatcttgaatgttgcattgtttagattcgtttgtttgatattgtaaaatgatttagctttactgagtgtgcttatgctcatgaagagggaaaatacatctcagaatcttgtcaaacccatagaagcttacacttataaagtgctggtattatttacattgtgcttgagaattgcagaacccaaatagcatggtctgaccctcaaggtaaacgtactacattaagtagagtcttctccttctcattccagatattcacccagatataagccttattccctggtcaaattgttttaaccaaagaatctcttgcagccattcgaaataataaaatctagcttttactatattcctacaatgtacaagggtactgttacataccacagaggacacaagatgtaaaagacaaagatgaaaaagtaaagttgaatgtattgtgtatatgtatataatacacacaaacaagtatatataatatgcatataaagttgcatatgtagtgatagctttatagaaacaaagtagaaagggtacaagcaagatttcctgactacaaagcaataaaaccagaaattaatagcaaactgaaaactaaaaaagctcctatcacctaaagatttttaaattttctttctctttctttcttttatttttttgagatggagtctcgcttcrtcacccaggctagagtgcaatggcatgatctcggctcactgcaacctccacctcccaggttcaagccgttctccttttctcctgcctcagcctccccagtagctggaattacaggcacatgccaccatgcctggctaatttttgtattttttgtggagacaaggtttcaccgtgttggccatgctggtctcgaaatcctgacctcaagtgatatgcccacctcagcctcccaaaatgctgggattacaggcgtgagccaccatgcccggccttttaaattctctttcatatagctcaaagaaattcaaataaaagcgaagaatatctagaaagtaat

SEQ ID NO: 30215 - DNA, 553 bp, Homo sapiens
cacccgcatcttcagagtccactgccacaaaccctgacagagttatggctaatttcttaaggtggaaacaaattgaggtaatactggtgactaaatgaataaataaaaatacacatttccggccgggcgcggtggctcacgcctgtaatcccagcactttgggaggccgaggcgggcggatcacgaggtcaggagatcgagaccatcccggctaaaacggtgaaaccccgtctctactaaaaatacaaaaaattagccgggcgtagtggcgggcrcctgtagtcccagctacttgggaggctgaggcaggagaatggcgtgaacccgggaggcggagcttgcagtgagccgagatcccgccactgcactccagcctgggcgacagagcgagactccgtctcaaaaaaaaaaaaaaaaaaatacacatttcctagacaaaatgttttccatttagcccctaccccatccccaatccatatagcaccttgtgaaaattagcaaaagtgtccgttttgggaccaggcagcaaatggggaaaggacagccaagtggg

SEQ ID NO: 30216 - DNA, 510 bp, Homo sapiens
tgttgagtttaaatgatttgaaattgaaatgtttgagttttatattttatattaccatcctttttatttctttgattatttaataaaaatagagaaatagcagtctcraaaattacatataaattatcttatgttgctgtgtctctttttgtaatccatgaacctagctacatttctctatttctagtagtttaatattcaatttcaagaagttataatatttgaaaaaactcctctaggttagttcaacaaacatgtattaagcacttacagtatgccaggcactgtgccatttgctgggaatacagagaagagatatttctctttcctgtataagtatttgtgaaaaatctaagagattcaatattaaactctggtgtatgtgcctttacagtataaacattttgtattagtccattttcacactgctgataaagacatatccaagatgggacaatttacaaaagaaagaggtttattggactcacagttccacctggctggggaggc

SEQ ID NO: 30217 - DNA, 605 bp, Homo sapiens
ttctgatccagaatgagacttcccatgccctagaatgaatatatatatatattcattctaaaataaatatataaaatatattaaaaaatatagttttctataatatgtaatgttayagaaaatgttatagaaaaaatatattaatattatactatatataatattaatattatgctgcatgttcaactgcaaagcacagaatctatgaaagtaaaaatatataaatgtaacttaaagagaaaaaatggcttccataattgagatttggtagtaacccactcatgtgttagggattaatcagccatggaatatggagaaaagagggtcaaagggtgtgtattagatacctattcatgtactcaggttccctcaactgtatccaccatccagacccatggacaccaccagggactgacaagtcacttgaccagagttgctaaccaggccctcctttgtgcctctactgcacagctatggtgagcggcttcagcctggggcttctggcttttcctgctatttccacctttaaatgaagcccactctacagagtgtgaggtttggcatctcaaatgacttccaaagtttccagatgacaaaacccagaa

SEQ ID NO: 30218 - DNA, 1030 bp, Homo sapiens
caagagcgaaactccatctcaaaaaattaaaaaaaaaaagtttaaatgaagggtaagtgataattttatctggtccagaaattcagattttgtatacttgagtagaaatatgagcattttttgcaaaattatttctggtgctgttgttttgcaccattaggttccgttcatcagataaaatttttaaatgacattttatccaaatcagtatgttgtcactataataatgatttactaataagcagatccgtcattttcctatgcgctctaggaagagctgcattagaccttgtctattgtagcaatcttgttctctgaggcataatagacaaaataggcagtcagaccaattaaataaacaagtaaataaaaattaaattcactcagaagcatatgaagagaatgagtctgcaggaaaatgcttgaactagttttgctttttctacatcctagaatcactagtgaaagcagtatcattcctgtttgatggaaagccaagggtcagagaacaacctattctttgtctgcctgaacctagaatcccagagctgtgttgctttatcactaataacttgtaaagatgaagctttaggtgatatacatagctcagaakctcctgtcagcctaacctctatgaactatatactctgatgtcttaagatttctaatttactatggaagtttgggtatggcctaacttaggttaattcttaagtatggtttctttgtacagttgtgctggttgtatagtactcagctgtaccatatctaaggttgtgccatttatagcttagacaatgtagatttgtatatttattaggacaattatacagcagatggcagccaagtgtcttgaataatggaaaggtaccagcaggcaagtatagaccctacttttaagtagtaaaagtttctttcaaaactaaatgagaactctttaaagttgcatttatagatgcaataattttaagtgaatggtctatgtattcattcctttttccctgtgtttattatttctcccacattttcc

SEQ ID NO: 30219 - DNA, 971 bp, Homo sapiens
tttaacttttaaaatcatatttttatgagataggttattaatagattattattatagtcttatcttcaaggtactctagtatgaaaacattaaaataaagctggcaagtgtataaaatgatgtgtgttcctctaagtgaaggtggactaatcaaataacttctagaaatttcctgttcttgctatattttgttatgctgatgttttcattcttcatgctggtgctcaaacagctttattctttggtggttataacgtaagagatactggaacagttatctagcctggtttttaaataacagctactactctcatgcatcggtatgacatataacacattctacagggaaagaggtattcctagttcagtggaaaatcctattccagccatttttttcacttgaaaattcaaatggcgactgatgagagagggtcttgactaataagtggggtaaggtttgccttcagctcctttttctaactctagggagctgtgactacagggacatcttttaaaaacaaacatgccagaatttatttatttatttatttatttaaattttttttgagacagagtcttgctctgacacccaggctggagtgcagtggcacaatcttggttcactgcaacctttgcctcccaggttcaagcgattctcctgcctcaggctcccgagtaactgggattacaggcatgtgccatgatgcccagctaatttttgtaattttagtaaagacagggtttcaccatgttggccaggctggtcttgaactcctggcctcaagtgatctgcccgcctcggcctctcaaagtggtaggattacaggtgtgagtcaccacgccctgccaaacataccagaatttataccattgtctgcctctgaaactcctattggcccttcacgattcagctcaggagtsccttctgagcaggccttagcccatgatatcaagtaattaccctattttaa

SEQ ID NO: 30220 - DNA, 529 bp, Homo sapiens
gaatttcatactgtaaatctccacacaaaacatatgacattaatgacttgtgtctctaaacacacatcctacwagtttgcatctcaaacctcagtgtatcctggatttaacttcagggagacaaagatgcaattattaataaggaaattaattgattatacttatatccttcttggagaaagactacaaatgggaagaaactggctggatagaaatggtagaccaaagattccattcaagcacagaatatgggagaagacggcctctggggacatcagaaccatcctgaattaattctctccctgggcagagcatgcttcagaacccgaaattactcaaactttgagccaggcaaccaactcttccctatgcccaccaagaagactgcttgcagttagccttccgatatactagtgaggtcagggccagcatccaattcacttgatagcactatttctcgttagaaattaataccttacattctggtgattttttttttagtatgaattggcacctcaaagtcagttca

SEQ ID NO: 30221 - DNA, 1523 bp, Homo sapiens
gggcaacccttcccttcccaggcctcagaatggctccatcatcctctacaatcgcaagaaggtgaaatatcggaaggatggttacctctggaagaagcggaaggatgggaagaccacccgagaggaccacatgaagctgaaggtccagggcatggaggtaagagagtcagacattcagctcatcttcccgagcctgccctcctccacccttagctgggctctagcctgacctgggcttggtggcattgtccacctcagtcccctcccagttactcttcccttctcactcactttgggtcggctgacattgctttggccactctccacttcccatttccctccgtgactcaactatccaggccgtaggccatgcctcccttccagaacactgatgcccaggcccctcactgctcttgtgtttccctcagggatcccagcaatgatgctctcagcacaggtttctcttccccaaatcattgcccctcatctcagatgcattcttgctctgccctctggtttctagatagtcccgtatctcaaatctggtcctcactataaggccccagccccactgctcatctatgactcagggtggctgggattcaaaaggggtggggaataggtgggggygagggtgggggaagggttgaagaggaactggtggaaagattgggattcctgcaaagggactgaacagaggaagagttggggagcagactagccctccccccaccccagcctgtctcctggcagtgtctctatggctgctacgttcactcttccatcgtccccacattccatcggcgctgctactggctgctccaggtaaggacggaagagcccagggagccaccctcttcctgactctttgagggacacgggtctgaaagaaggaagtgaaaggatggctgagttctgagtgaggaaaggagcctgggaagaagagaaaggggcttggggatggagagagtcagaaattgggggcgaggttaggagggtgcccaggaagaaagtgaggattaggaagccaagcccctggacctcaggaccccatggctctgtgtgtccccttatactctcagaaccctgacatcgtccttgtgcactacctgaacgtcccagccctggaggactgtggaaagggctgcagccccatcttttgttccatcagcagcgaccgtcgagagtggctgaagtggtcccgggaggagttgttgggacagctgaagcccatgtgtaaggcagcagggtggggatagagctccaaggggagagtagaaacagggctcccagaggggccatggttctggacccaaagcctgagggctgatcatctccctccaagctgggagggtgctaggattcccggtgtgttctcaggtattagaatacggagaaaggactaaagcaacatatctgagcagtcttgaggctgctggcctctgttcacctggccagaagtcttgaagcatgtcaggtgcttggaggagccatcaaggtactctggggcctgtttcgtgggg

SEQ ID NO: 30222 - DNA, 1197 bp, Homo sapiens
aagaagctcaaagaatcgcaagcctagtaaaaatgcatatggctacacaaaggcacaaaataagcaaaattttttaaaaaatgtgatagtggsaaaatcttaaaagtagccagaaaatatacctgtaaaatgaaggcaatattactgtaaaatgaaggcaaaataaagatctttttcaaacaattggaagctcaaagaattatttgctagcagacctgcacttcaatgaatgttagaggaattttctcaggcagaagaaaattggtatcagataaaatttgggtggatgacaataaagattgttttaaattcatggtagaaatctcttaaaagataaaaaaattaaaagcaaaaataggattgtattgtggggtttataacacatgtagaagtaaaatttatggaacacttcacccaacagcagcacagtcacattgttataatacacatgtaaatcagtgcatgtggaaaaagccacagcaatttcaatgaaaattgaacgagagggaggaaatagaagtatactgcaataatggcataaactatagccgttatttttgaagatagactgtaaaaatataaaggtgcctattttaaactatatagtaaaaacaaacccctaaaacaaacaaataaaaatatgtatagaaaataagccactaatggagataggtagaataataaacaaacaatccaaaagaaggaaaagagagaaaaagtaacaaagaacagatgggacaaatagaaaaacaaatggtgaaatagtacatgtaaaatatctgcatttataatcataataaaagtaagtggtctcagcattctaattaaaaatagacaaaggattgtcagattggataaaaaagtaagacaactatattctatctaaaggaacccattttaaatgtaaagagaaaaatagataaaaaggaaaataatggtgaaagatacattatgccaaccatagccaaaaaaaaaaaaaaactgaggtatctcctgtaataacaaaatggacttaagaacaaggaattttaccagagataaaaagtgacatttcataatttaaaaagggtcaattaaatataaacgtgtaactttttgttatagtttggatatttgtccccacccaaatcttatgttgaattctaattcccagtgctggaagtggagcttgtcgggaggtgtttggatcatgggggc

SEQ ID NO: 30223 - DNA, 1197 bp, Homo sapiens
aagaagctcaaagaatcgcaagcctagtaaaaatgcatatggctacacaaaggcacaaaataagcaaaattttttaaaaaatgtgatagtggcaaaatcttaaaagtagccagaaaatatacctgtaaaatgaaggcaatattactgtaaaatgaaggcaaaataaagatctttttcaaacaattggaagctcaaagaattatttgctagcagacctgcacttcaatgaatgttagaggaattttctcaggcagaagaaaattggtatcagataaaatttgggtggatgacaataaagattgttttaaattcatggtagaaatctcttaaaagataaaaaaattaaaagcaaaaataggattgtattgtggggtttataacacatgtagaagtaaaatttatggaacacttcacccaacagcagcacagtcacattgttataatacacatgtaaatcagtgcatgtggaaaaagccacagcaatttcaatgaaaattgaaygagagggaggaaatagaagtatactgcaataatggcataaactatagccgttatttttgaagatagactgtaaaaatataaaggtgcctattttaaactatatagtaaaaacaaacccctaaaacaaacaaataaaaatatgtatagaaaataagccactaatggagataggtagaataataaacaaacaatccaaaagaaggaaaagagagaaaaagtaacaaagaacagatgggacaaatagaaaaacaaatggtgaaatagtacatgtaaaatatctgcatttataatcataataaaagtaagtggtctcagcattctaattaaaaatagacaaaggattgtcagattggataaaaaagtaagacaactatattctatctaaaggaacccattttaaatgtaaagagaaaaatagataaaaaggaaaataatggtgaaagatacattatgccaaccatagccaaaaaaaaaaaaaaactgaggtatctcctgtaataacaaaatggacttaagaacaaggaattttaccagagataaaaagtgacatttcataatttaaaaagggtcaattaaatataaacgtgtaactttttgttatagtttggatatttgtccccacccaaatcttatgttgaattctaattcccagtgctggaagtggagcttgtcgggaggtgtttggatcatgggggc

SEQ ID NO: 30224 - DNA, 502 bp, Homo sapiens
taatggtatccgaaaatatgggatgcttagagaaaatttaacaaaacgtgcaaaaactgtattttttacactgaaagctataaaacatggccaagaaaaaataaagaagatgtaaaaamatggagtcctctactaaaatctctccagattgatttagaaattcaacaaaatcacaataaaaatccaagcagatttttattggtggaaattgacaagctgcttctaaagtttatgtggaaatgcaaagaatctagaataatataattaattgtagtagtcagaattataccttccatcaccaccttcccaaaaaaagatgtccatcctctaattcctggaacctgtgactgtattatcttacatgggcaaaagtgacttcgcaattgtggctaatgatatgaaccttgagacggtgagattgtcctggattatccagatggctctgtgtatatgggttcttaaaggcaggagacctttcaatgttgcatcagatagatgagac

SEQ ID NO: 30225 - DNA, 536 bp, Homo sapiens
ttaacatcttatttccttctcatagtgcttagtacactgccacatatctaggggctctccggacggactgagtgagttcttgtttcttattaaagcagattttctatcaggcagggagacttacacttggggttgtgacctatgacctggagattgtgtcaaaggcgtttcaatagcaagtgaagtatctatggccgcagcagccgtgaaaagcgcaggaccgtatcacgacagccacytctgcgcagcaccaggatgttttatatctgtttataatcccgaatgctacatcaaaattgtttctgtctatttttggtgccctatcaaccatgtctgcccgttagttccatgtattgagagaacgggcagtgcagtcacaccagcaatctacgtgtagggtttctgccgtctcagcagttacgtaggaagaggcacttttggagagacttcggcgggtctggggagacactgtacagaagcttctttgtgaaagagacggccgatagcttctttccccagcacagacagctgcatag

SEQ ID NO: 30226 - DNA, 341 bp, Homo sapiens
ccgcctcccggggtcacgccgttctcctgcctcagcctcccccgagcagctgggactgcaggcgcccgtcaccacgccgggctaatttatttttgtattttatttttgtagagatgggggtggggtgggtctcattttgtgggccaggcaggtctcgaactccgcccgcctcgcttggcaaagcgccgggactacaggctgaaccgcgtgcccggcgggaactgggctcctctctttggcatctctccccactcactccttttctgtcccttttgmtcggctcctcttcttccgacaatcccttaaaggtcaaatgtctcctttcagctgcagcttctctc

SEQ ID NO: 30227 - DNA, 1030 bp, Homo sapiens
tgtgagaaaccagcttggacaaggctgtagccatgtttcagcctcaggtatttatcctctggaaacacaatataaggaccagcaagtcctactttgctaaattccagaactgaaagaagtaagggggccgggtgtggtggctcgcgcctgtcatctcagcactgtgggaggcccagaggcaggtggatcacctgaggtcaggagttcaagaccagcctggctaacatggtgaaaccccatctctactaaaaatacaaaaattagctgggtgtggtagcgcatgcacctgtaatcccagctactcgggaggatgaggcataagaattgcttgatcccgggaggcagaggttgcagtgagccgagatcgcgcgccactgcactccagcctggccaaaagagcgagattctctcaaaaaaaaaaaaaaagaaaagaaaaagaaagaaaggttcttctcccccatcctatcacactctcagcctggaaatagcaaggacacccctgcaggcagaatcctgatgcggcagccccatgagttcagtggcagggatgtcacagttctggacttccagctcctcactgaccagctgagtgatcttgggccaatcacctggcggctttgagcctcggtgttcccrtctgtataatgggctagaataagtacttacttcataggctgttttggagagtaaatgggaggatgcatttaaagcactagcacagtgcttggcccacgtaaacgctgactgagtggaggctgttcagacatattcagttcacaaggttgttacaaggagagaatgcatgggaagctgttttatcaactgtaaagtctgggacacattggctgctagcatggtttttccggggctgtgtgtttgggtgctgtatgtttgcctaggattctgagtttgtgatatgtacatattttgtgtgtgctcacatagatgtgtggctgcgtggatatttgtgtgggtatctatatacgtatcaacctaacaggtgcttcctcatctctctgatgccgcaggg

SEQ ID NO: 30228 - DNA, 466 bp, Homo sapiens
taaaaaatataaaaattagctggatgtggtggtgcaygcctgtaatcctagctacttgggaggctgaagtgagaggaacacttgagctcaggaagctgaggctgtagggagccatgattatgccaccgcactccagtctggtgacagaccaagaccctgtctcacgataaaggtgagttattgcactggccactactggggcaacaggactcaattcactgggaccctctgcagggctggcagaacacgcccaaaatcgtcctcctgagggacagagaaggaaagcattaaccactggctcccagcctctgttgctcaaggtttgcccacgttagccccctcactcttccaggcttgacaggcatgaacaagaagcaggttcctgcaggcatcccatcacatagtcagaggaactccggggcagaaagggccagctatgtggtagagatagggtgaggagctgtca

SEQ ID NO: 30229 - DNA, 657 bp, Homo sapiens
acattgtaggctctgatgcaatacctatgctggggtagtcctcaagctaagaggccgtttctactttagagacttaatgaccatctagtttggtgttttcctcaggtccattatctctgaaaagagacataggaggaagaggattatttatcctcccatccataagcctgtgtttccagttcaaggatttaggtcagcaagacgcagacccaaaaaccattcatttaataacccaagaaagaaggcaagcagggtggcccaaatcttccaactggggcaagatttaatatagtgttccagtggaaagaatcttctaatggtaacttggactctacatgtcctaattctgttgttaatgagattgatgactctgggcttagtttcttctgttaaaaactaggaaattgtagatmatctctcaactccatttcagctccaggatttctcagttcctggagtacccctgccctagaccctccacatgaagaagagagtcttaccaaattggattatcagagcaagactattagcagagaagcctgaaaacatctttctggcccaaacaacagtgaacttttttgatcagcatgtattagggacttttgggcacaattgcaatcaaaggcaattgttcctgtctcttctacattttttttg

SEQ ID NO: 30230 - DNA, 619 bp, Homo sapiens
aggcacgagaaatggttgaaccgagaaggcggaggttgcagtgagcactccagcctgggcaatagagtgagactccatctcaaaacaaaacaaaacaaaaagatatcaggttaaaaggatggacaacaggaactagaaggtcagttaggtggctagtaatatattccagacaagacattacaagggtttgcagatgaaactagtggtaataaagatggagaagtgggcatgggattgagaaatattgagcaagtataatacacaggtccttgtgacttggatataaaagcttacacatacagaggagtttaggataattcacaggtttctggcttataaaggtgggggcaggtgtccctgagattcgctgagtgtctcactgagatagaccacagaggagggaaagcagctaggaagcagcaaacacaacaaatttggttttggaagcattcacgtttgggttcctatggggtgggattgatattccttaggcagcaggctgttcaggtctgaaacacagtgggaggtcrgggcagaagatgtaaatttgaaatccatcagcatcaatgctatggcgaggaagagatcattcctgaccaagatgttacgatacccacac

SEQ ID NO: 30231 - DNA, 1220 bp, Homo sapiens
tttccaaaaagttcctaggtgatgctgatgctgctggtctggggactacattctgagaaccacacgactagaggaaccctctgggctttattagatgtgaaatcctgtaacgatgggcagacatcaagaccaaatataactgtcactgtggttctcgaccaaggcgattttgccctgcgaggaccatttggcaatatctggagacatttttgattgtcacgcttgggaggaggtactactggtatctaagtaaatagaggccagagatgctgctaaacatcctaccatgcacagggcagcctccctgtgatgaagaattaaatgatctggattaaaacatcaatagtgcccaggttgagaaacgctgctttaaatgatccaattcatctagatttgagtttgcaaaagattggtagatgttggaatacaccgactggaaagattgatgctgagttttcattgctctgaggggaaagatctatataaatgacgcaagattctttgagctagattcctctttccagagtttttgctctttgctctgggacctcactcaaggctggacagggtgattacggttcttgagaagtttgcagatttcagatcccagagaagcttcctgacaaaacataagggctggctcccagcagggcacattcccaaagcaacatccatccaggaccgggaaggcctggctgtgttagaatgggactgggtgttgattgcattgtgtttcctttctctgcttgcttccaatccatgggctagaaaacgagggcagcccttgtggattctgattagaagcttcacaaatcaagttgctaaatttgcagaacattgtaagtcagaaagatgtgcgtctgtgtgtgtgtgtgtgtgtgtgwgtgagagagagagagagagagaaattttggattttgtgagtgtgtgcatgtgtgtatggtgagaaccacgtattcaaaccattccctatttcggcacctcatcctgccaattacaatctgcttggtggtgtgaaactgacagccggcagcagtgatggagacaggaggaacggtgaacaagggctttgtgcattctcagctttagagagaatgttcagtggggcggacaggcacgtaactggcaggtttaggaatcagtaaaaaccaagaactggaagtcctaatttatcgtctgtttcaatacaaggctacacacaggctatttaatataatgca

SEQ ID NO: 30232 - DNA, 1220 bp, Homo sapiens
tttccaaaaagttcctaggtgatgctgatgctgctggtctggggactacattctgagaaccacacgactagaggaaccctctgggctttattagatgtgaaatcctgtaacgatgggcagacatcaagaccaaatataactgtcactgtggttctcgaccaaggcgattttgccctgcgaggaccatttggcaatatctggagacatttttgattgtcacgcttgggaggaggtactactggtatctaagtaaatagaggccagagatgctgctaaacatcctaccatgcacagggcagcctccctgtgatgaagaattaaatgatctggattaaaacatcaatagtgcccaggttgagaaacgctgctttaaatgatccaattcatctagatttgagtttgcaaaagattggtagatgttggaatacaccgactggaaagattgatgctgagttttcattgctctgaggggaaagatctatataaatgacgcaagattctttgagctagattcctctttccagagtttttgctctttgctctgggacctcactcaaggctggacagggtgattacggttcttgagaagtttgcagatttcagatcccagagaagcttcctgacaaaacataagggctggctcccagcagggcacattcccaaagcaacatccatccaggaccgggaaggcctggctgtgttagaatgggactgggtgttgattgcattgtgtttcctttctctgcttgcttccaatccatgggctagaaaacgagggcagcccttgtggattctgattagaagcttcacaaatcaagttgctaaatttgcagaacattgtaagtcagaaagatgtgcgtctgtgtgtgtgtgtgtgtgtgtgtgwgagagagagagagagagagaaattttggattttgtgagtgtgtgcatgtgtgtatggtgagaaccacgtattcaaaccattccctatttcggcacctcatcctgccaattacaatctgcttggtggtgtgaaactgacagccggcagcagtgatggagacaggaggaacggtgaacaagggctttgtgcattctcagctttagagagaatgttcagtggggcggacaggcacgtaactggcaggtttaggaatcagtaaaaaccaagaactggaagtcctaatttatcgtctgtttcaatacaaggctacacacaggctatttaatataatgca

SEQ ID NO: 30233 - DNA, 1270 bp, Homo sapiens
gcatcctttatgcagggattcaaagtaggtcagtgtgatggcaaagttatgttctagccaccatagcatgccattgagataatttagacactgtgaattgctatatgagtgttaggtattattattattctcttagtgtttgagagggcataaaactatggttctcagagaagaatgaggctgtattttaaaaatgattttcctatgccttctccaaaagagatttaaattggttcagaataaaagacatagagctaataacactctaaaccattaacccaagagtgagatgacaagaaccaagtcataaaagggagccaggaagtatttctaaatcagaaaatgtaggctagatagccacttgtcctgacccccaagagtccactgtgagtatcttttccaaagtctgtgttcagcaatataacatgagaagtggcaatggtggggctatttacaccacggaaattggcaaatctttcaaactgggttttttttttttctccaggtgagttggttgttagacatttgccagcacaccatttggctaacaaatgctactacaagctagtatgatgcgcttttggcatttggctcwgctgtctaaggggtgctggctcccaactccctgccctcaagaggaatgggttccattgtgattgctggtggcaatggtgatggcatcacccaattgggtgagtagctaagataagaagcattgttacagggactctttgctttcaaggaacattcaactccattcaagttaatttaagcaaaaagagaaagccatcagaaggatacgtgtgtctgtcaaagaacccaaggatacatttctgggtcttatgaatggctggaaccagcaattagaaagccctcagacaggaagactttctctccattctctctctccctctctctctgacctgtgcatattctcatctgcttctctctggctatctgcttcatttttgctttctgcagaccccatttctcagttctacttccatgtggacccgatatagtcttcccagtcttgataagtttccagcttaagtactcccaggaggccagctagaactcctgtatttcaataatcacttcttaaaaaagaatctgattggcccagcttggatcaggtagtcatccctgatccaaccagctgtggttgaggggataaggtcacttgcagggacactgggagaaggctccctgagatagggcaaggcgaggcagaaagatgagttgactaagtatctgtgattagcatgca

SEQ ID NO: 30234 - DNA, 562 bp, Homo sapiens
cactctgaagactccaccctcgtgacctaatcacctcccaaagaccccacctactaatgccatcaccgtgggggttacgatttcaacagaagttttggagggacacagaccacagtatggagaaaatcaaatgagagaatgatgaaacaaagcatacgctgagcatcttataaggggcawggaaaatgttcctcactggagcaggaaagggggacatgatacctagaggctgttttgaacagaaactccttcccttccattcgcttcatctctgtgggctactgtttgcccctgtggaagatgccaggtgggtgttgggtaggaggataaacttagaacagggatgtccttctcagctctaatagtctagagacctgggggcttatttgtttctttctttatttttttagacaaggtcttactctgttgcctcacctagaatgcagtggaaagattccagttcactgcaacctctgcctcctgggttcaagcgattctcttacctcaatctcccaagtagctgggactacaggtgcctgccactacacttggctaatttttt

SEQ ID NO: 30235 - DNA, 1124 bp, Homo sapiens
agatataactggccccaaagactctcctttttccattacaactgcatgctgaagtcttcccagaaggaacaagaataacattatataatgtaaagctgatataaaggatgctaagtatttgtcctgcctcatgtaccaagttgaaataagyagggtgaggctgacagagcagatgaaaaacatcacttaagatcgtttttttcctgctaaactctgttgtacactatgcaaatatgattgcaaaagtggaacattatcaacactttaatgctagttatctttcaaagatgatactcagagtaatcaacataaacttagtatactgtatcctaaataataaaaatgttgccttgcatcattctgatatcctcagtacgacctagaaagccgatcggaatgatatatagtgataatagcattctgcatttaaacagcatcctaacagtcacagcgtttggccacctgggttggggcggaaaagggaggttgggaaattgaggacttagcagcccgtttgggggcacattgcccggagaaattcttggggtggcaggctgtaaatcaggatgaatgtatttctggatgataatcctgtttccagtctcccctaaagccgggctggtaaggcaagacgccctgcttggcaaagatgttccctggtttttggtgcctgggcagataccctgagttgatagtaaacaacagaacacaagggatagaaaaagcaggaagaaatttttttctaaatgatgggaacttcatttttgtgggatttgcttctctgtttaatatatatattttttcttcgaaatgatggagctgccgggggacaggaaaagatggcgttcattacaaattccttactagtcatttgtctacaactagaagattagcaagagagttccctgtccaataaaggagccagcacgctggcaaaacgctatgtggtgtgggactgctggcctgggaggcaggagacctggattctagttctaggtttgccacagacagaaactttgggctaaattattccctcccaggtaaatgaagagtggaggggctctttctgcctaccctgttgctccaccttcctctttgttctgtttcctgctcccccttcatga

SEQ ID NO: 30236 - DNA, 550 bp, Homo sapiens
cttggtgcagagctgagttcaattcctgggtatccttgttaactttctgtctcgttgatctgtctaatgttgacagtggggtgttaaagtatcgcattattttgtgggagtctaagtctctttctaggtctctaacaacttgctttatgaatctgggtgctcctgtattgggtgcatatatatttaggatagttagctcttctcattgaattgatcccygacattttttaaaggtatttgtattggaaatcaaaagtcctgcttactagtccaagttttaaaagagttatcaagctttgtgtaattcatgtaatctttctgagcctaatttttctattccaaaagtgtggtggctttgtaatgtgtcaacttgagaagagggaactggttcctaaaattcatttgcttgtgaattcccagctggggcaggtctcggagattgggagggtagaggtaaggctgcagccatgtggttctcactctcagcaggcaggtgcaggggattaggcagctcccacatgttgtcactcacctgctggctcagttggat

SEQ ID NO: 30237 - DNA, 550 bp, Homo sapiens
cttggtgcagagctgagttcaattcctgggtatccttgttaactttctgtctcgttgatctgtctaatgttgacagtggggtgttaaagtatcgcattattttgtgggagtctaagtctctttctaggtctctaacaacttgctttatgaatctgggtgctcctgtattgggtgcatatatatttaggatagttagctcttctcattgaattgatccccgacattttttaaaggtatttgtattggaaatcaaaagtcctgcttactagtccaagttttaaaagagttatcaagctttgtgtaattcatgtaatctttctgagcctaatttttctattccaaaagtgtggtggctttgtaatgtgtcaacttgagaagagggaactggttcctaaaattcatttgyttgtgaattcccagctggggcaggtctcggagattgggagggtagaggtaaggctgcagccatgtggttctcactctcagcaggcaggtgcaggggattaggcagctcccacatgttgtcactcacctgctggctcagttggat

SEQ ID NO: 30238 - DNA, 647 bp, Homo sapiens
ggcactgcttctgtcttccagaaccttagagtcggtagaatccttcttgcctctctcctacttcaggggtaaccagcaatcctcaacactcgttggcttgcagctgtacaactccagtctctgcttccctcctcacatggccttctccccgccatttcctcacatcatcctcctaggaggttaccactcataccggtaaaaaggcccaccctgctccagtgtgacctcatcttgactaattatgtttgcagcaaccwtattgccaaacaaggccacgttctcaggcactggggatgaggactcctgcatattcttttggagaacacagttccagccgtaacagggagatgaggcagttatctacagcgccttcagtcccctaagcatggactgcacgggccaatgggaaagttcccctggggccttggaaggttcactgaagaatcagcgtgtaaaacacagattaactggagaaaatgcacacaaatttatttaacgtgtatatatggagcctccagactgaagacccagaggtacaagggagattgtccatttttattctcaggttcaacaaagtatggacagccgtgtctgtctagattctcccggcccctctgcacagcgatccttccttctgggtatgaggc

SEQ ID NO: 30239 - DNA, 1205 bp, Homo sapiens
tacagctacagaagcaggaggaggcaaggcaagttccaagaaaatgcagttctacgcaagggcaagaacagctgaccaacccttcctttccccagagccgtacctgaatcctcataggacttccaaaggcccagggccacctttcaactgacaggctacctcaggcccatctctcattgcaccagatacacagggaaaaaaagaaaaacaaaattgaaaagacagtctgaagagcaaaataagtcccacttccctccaaagggtagaaaaaaatgttaacccccttgctcctcccccagaaactccacttcctatcatgatgaccaagttattgatcattgcttttgtggaagaataaggttaagcttagatgtgcaattaacaaggtttatagtcacgcgctttgccagatgaacaactctttgcaaaaatatttaccataaaataaagaaattggcacttccaataaaaatatcactacagacattttattcggccatcctagagaaacatccacagaagtgatcaacacataataacctcccaattatctttctctttaagacttatggtttcttaaagtgcttttttttttttttttttttgagacagagtctcactctgttgcccatgctggaatgcagtggcacaatctcatctcactgcaacttttgccttcctggttctcctatctcagcctcctgagtaggtgggattacaggcgcgcaccaccacgcctggctaatttttctatttttagtagagatggggttgtgccatgttggtcagggtggtctcaaactctctcgacctcaagtgacctgcccgcctcggcctcccaaagtgctgtgattacaggcgtgagccaccacgcccggccacttaaaatgcttttaaccatgcaaattagagaggctagagttaattttataatgcattagayagttgctgggattactattgatttttttcatttcaaatggcattcagttaaggaatatgtacaaatcatcactgcttccatcttgaatggtcatttataaaattttaggggctagaacacataaaatatttttagcttggaagatgtgttgcagggtggaatgtttgtgggaaatgtcctctacatgaaggatttctgctccaaaatgtcttgattaattaacataaacagctttgaggaaaaagagaacagcatctcacgt

SEQ ID NO: 30240 - DNA, 877 bp, Homo sapiens
cagatagttccatttgctgataagagtacattttcaataagatgctatatgattgggtgcaaaatcaacatcctcccaagttttgcttttaaagtacaagcctttgtttcgtatttctgtctgaagcttttttgacctttgtcaaaaatatttttcggttattcagagcacattggcgtgctctcacaagagaccacccaagcacatccctttcagctggcaaattccactccacctgaggagcacagaagcttctcatcactggtgagaacgatagtcatttgaatgtttgaaaaagatttagactcttctgtcagctcacagaggctggtctctgtggctttgtgttgtcatgtttcaaggtgtgacagtggcacagctgtgatccatgttcatcgccagtgtggaagcttggaccagcagtccttagacatgtcagagcttctccccgacgttgttcccatctgtgtcagayaccaaatcgcaaactggccaagcagcaatgagagcactccatggaaaggataaggaacttaaaaggaattttaaggcaccatttgtattttacttgatttttttttttttttgagacagagtcttgctctgtcgccaggatggagtgcggtggcacgatctcggctcactgcaacctccgactccctggttcaagtgatttgcctgcctcagctcctccagtagctgggattagaggcatgtcccaccacgcccaactaatttttgtatttttagtagagacggggtttcaccatgttggtcaggatggcctcaatctcctgaccttgtgattcgcccacctcggcctcccaaagtgctgagattacaggtgtgagcccctgcacccggcctatgtgatttt

SEQ ID NO: 30241 - DNA, 1640 bp, Homo sapiens
ttttctccaacttcatcaggaccttcaggcaattgattcttccttcaagtttgtcttactgcatttatcttccactcttatccaacctagattccattgtccagaatttcaacagccctcttaccagtaatctaaggtcaagtgcctctctttctgtcaccttgtctgctaaaaacaaaatcttgtatgaaaccaattctctgcttcctctgtgcctagagaaaaatcactaaatagttcagattggatcctgtattcattcatgatcaaggttggagtggggtgcttatcatctacttctgatttccatgaagaaagctatttcccttaacattcattacttatgctgccctccctaaggcaagaggatttacttctttgattagaaagtttaaagagagaatctgagtatgcctcctggctcagtctttccctctctcctttcttgttgtgatgtgtmcacctgcagagaacacactttgtgctcagctcctccacactgccaaaatttcagtggatgccttgacataagtagagagatggggaacatttcagagcagagactataatcatggcctgaaggtgccagtcccctggatattattgagaaaggacttttaagattgtaatagcaagaatctataccaaaagcagttggagaaacacctgtactcttttttactgattgtcctttcaagtctcccaacattgcatattgtctgcatcccaaatctagaccacaatcccatcaagagaggaaaagatatatgtatataaaaattcttcacataaagattcttaagctactaggaatcactgagacttctcaagaagatcttgaagatgaggaaaattaagtttcaaaagtgattcagtgacacttgtagaacacaatgcacagaagcagcagaaatggttacactttatttaactagttgtttggcattttattgtttaaaaatacacttatgcatatcatctccttcaagtcttgcaatgccctgtgatgaagaatggattactgccagaattatcaatgatgaaactgaggctcagcagttgttacttgctcaggggaacccaactaaaaattgaattatacttcagatcaatgagttatgccatttactttattcctccaaatcccatccttcttcccaagcctaagatgtgctactgaacctgaagaataaacaatagttatgtaggacctgagtagtataataagattaaaatattttgagaactaatataaagaagaatgaggaaaaaatcaataccaaatttgatactttggccttttaaaggatccttgaggagtgactatgtttggcttaaaggaagaactgtcttttaaatgagagattttaaaacatattaacatatttaagcagattcagaaaattcttgcacgaaataaaaacacccctccttcagccatcctgcacagttattattatgaataatttatatttttctaggggattttgctatttattgctcttaattatgtgcttttcaagtgccactatagactccctggggaaacccttgagagacagtaagttgttatgctaggaagcatcagcctgatggctcgctggtactaaagtctgtggtctgcgggtgacagcaagtac

SEQ ID NO: 30242 - DNA, 534 bp, Homo sapiens
atgtctttgtgtcttttgaaaaatgaaatatttaaaacaaacaaaaaaatataaaaaataacccatcaaaaatccatgctcctatggctcaaggttgtaaaaataaaaataaaaataaaatccatgctcttgccaccagcataagaaagaaaacagtaaattatctttgatgtacttcctaatcccctcctcctaccttccctcaagaggcaaccactctcctgaaccctggcattgactatgcatgggcactctttttaattttttaaatatataaataaatctgataggaaaattgaattgctttacagcgatttgagtccctgtgaagggcttttgggtactctgccagggtgtagatgacgtctgaagaggctacaagggaaccagagagaaaaaagcctgatgaaaggaacagagcctacatgatyggtgacaatatcaactggaataacatacatgtaattagacttggggggcatgaacttttttttttaataatggctaaattgttttaatccaaaataatctagg

SEQ ID NO: 30243 - DNA, 1400 bp, Homo sapiens
tgaaaagcttttatccagcccacagcatttctctctccaaatgcaagatagtttttttttttttttttccagcagtactttggtggggttaaaattagctggcagcattctggtcacatgctagacaacaaaacaaaagggagttgttccccctgccgctcctgaactggcccacgacagagtttcctaatccatggatttctgggaagctggctctccgggccctggtatggaggggctacaccaaggactcccctccggttatcatccytgctataatggggcgacacagacgaggtcaaggctgtttggaatcttggagcttgcctcgatctggaaaggcactcaagggtccaaaatggcttttgtaaatcttctcaccaaagccaacaaagaagcaaacactacaaaaacactgagagagagaagggtaacatctgacacatgaacatgggcatccattgacttgtggggtggtggctgctcttggcatgattaaaaaaaaaatagccgggtgtggtggctcatgcctgtaatcccagaaactttgggaagctgaggagggcagatcgcctgaggtcaggagttcgagaccagcccggccaacatggcaaaaccctgtctctactaaaaatacaaaaaaagtagccaggcatgatagcacgtgcctgtaatcccagctactcgggaggctgaggcaagagaattgcttgaacccgggaggcggaggttgcagtgagctgagactgccccactgcactccagcctgggcgacagaggaagacaccgcctcaaaaaacaaaacaaaacaaaaataaataaatataatacatctgggctagaggtggcgaacatttaggatagattctgtatctcttgaccttgatgacagggacatgtcagggtctgctttgttcatccagcttaaaactgtcaccagaagccctggataaaaatgcagcctctgattcacacacggtcaggaaacatgccttgtgctcagtacagaaacatgtccgtcaacctgggaaaggaatcaccaccacgaaatatgcttttggcttgccaaagcttagcagctgtgagagccaaaaacccagctgcctggactgtctggggaagttggcgggagggaggggggggttgctttctgaatcacctgatttctgcctctaactctagtttaattccaagtcgaaacctatcttgaaatgtctcaagagcctactgctcctaaaaattgtaggttttagctaacccttcagctctgtgcctgctggcaaggtgaagcagatggcgtttgttgattatttatttggaaggggctactttggaatcaggaaattccagcgagacagagtgcatcgccttggccagagctgccgtgacaatcacgagca

SEQ ID NO: 30244 - DNA, 1400 bp, Homo sapiens
tgaaaagcttttatccagcccacagcatttctctctccaaatgcaagatagtttttttttttttttttccagcagtactttggtggggttaaaattagctggcagcattctggtcacatgctagacaacaaaacaaaagggagttgttccccctgccgctcctgaactggcccacgacagagtttcctaatccatggatttctgggaagctggctctccgggccctggtatggaggggctacaccaaggactcccctccggttatcatccttgctataatggggcgacacagacgaggtcaaggctgtttggaatcttggagcttgcctcgatctggaaaggcactcaagggtccaaaatggcttttgtaaatcttctcaccaaagccaacaaagaagcaaacactacaaaaacactgagagagagaagggtaacatctgacacatgaacatgggcatccattgacttgtggggtggtggctgctcttggcatgattaaaaaaaaaatagccgggtgtggtggctcatgcctgtaatcccagaaactttgggaagctgaggagggcagatcgcctgaggtcaggagttcgagaccagcccggccaacatggcaaaaccctgtctctactaaaaatacaaaaaaagtagccaggcatgatagcacgtgcctgtaatcccagctactcgggaggctgaggcaagagaattgcttgaacccgggaggcggaggttgcagtgagctgagactgccccactgcactccagcctgggcgacagaggaagacaccgcctcaaaaaacaaaacaaaacaaaaataaataaatataatacatctgggctagaggtggcgaacatttaggatagattctgtatctcttgaccttgatgacagggacatgtcagggtctgctttgttcatccagcttaaaactgtcaccagaagccctggataaaaatgcagcctctgattcacacacggtcaggaaacatgccttgtgctcagtacagaaacatgtccgtcaacctgggaaaggaatcaccaccacgaaatatgcttttggcttgccaaagcttagcagctgtgagagccaaaaacccagctgcctggactgtctggggaagttggcgggagggaggggggggttgctttctgaatcacctgatttctgcctctaactctagtttaattccaagtcgaaacctatcttgaaatgtctcaagagcctactgctcctaaaaattgtaggttttagctaacccttcagctctgtgcctgctggcaaggtgaagcagatggcgtttgttgattatttatttggaaggggctactttggaatcaggaaattccagygagacagagtgcatcgccttggccagagctgccgtgacaatcacgagca

SEQ ID NO: 30245 - DNA, 1354 bp, Homo sapiens
gcatatatatcttattccctgtgatagagccccttctctccttcagttgaaatcttattgataaaataagaatataggatgtaagaataaagggacaaaatattgtagggttttgagtgacaggtgttctcagaggactctgttgtgaccaggggcatcatttctctagtcaatgtgactgaaaagaggacagccagatgtagggagaccccctgaaactattgctacggaataaaagatgaaatgctcctgattattgtaaatacaaaattgcatgcaggattgtgtaaagacaatgccaggttgggctgccagaacgagccaacagcgcatgatgtgcttccccctgcagacagcctatgaacggacgtgcagtcagggaggttgcacatcaccaacattcctatcccagaaaagcagatgttcatagctctgggaatggaatgcgacccttgtggaaagcctataaacggacacatggggggcgcctgtccatatggataagatagggctataaatgccctcatcttgccacagctcttctaggcctctttagggttaaggcatactcccttctgagaatttctggtctaactgsttgtctagcttcacctcctgtttccatggattgtttgtaaccagcttttgtggcaactgttactgttgattaatatcttgctaatcataggttatggaaagattgtgtttctattttaagattctgttagaaattattgacgcacacactatattgtaaattcttatctctgtacactgtacttctacatacaaatgtactgtacttctacatacaaatgttatgttaaagaattacttcatccccatgtgaccatctcatctcacaatcaaatgaccctaaatctctcactaacctacccccgccctcactaaacttaataataaatgctggtatatccagtgcattgttggcaccgtgggaccagaaggcggtgacacccctggacccagctttcactatcttgtgtgtgtctattatttctcaacctgccaatccgcctgggaacagagagccccgttgcattgcgggctgctggccagatcctgcaatagccagtgtgtcaggcatgcttccttttgcccaaaactgaactaaatgttcatgaacagtatggattaaatcaatagggaacacatcaaaatgaaaaaaagaagggtgttttgccactaaaaatgttaagatacaaaaatgagccacaataatatcaatggcaaataaggatttatatatacacacacatataccacagaagtacatttttacatatctaatatggactcgtaaacacataattatgtaatattaaagctatag

SEQ ID NO: 30246 - DNA, 1354 bp, Homo sapiens
gcatatatatcttattccctgtgatagagccccttctctccttcagttgaaatcttattgataaaataagaatataggatgtaagaataaagggacaaaatattgtagggttttgagtgacaggtgttctcagaggactctgttgtgaccaggggcatcatttctctagtcaatgtgactgaaaagaggacagccagatgtagggagaccccctgaaactattgctacggaataaaagatgaaatgctcctgattattgtaaatacaaaattgcatgcaggattgtgtaaagacaatgccaggttgggctgccagaacgagccaacagcgcatgatgtgcttccccctgcagacagcctatgaacggacgtgcagtcagggaggttgcacatcaccaacattcctatcccagaaaagcagatgttcatagctctgggaatggaatgcgacccttgtggaaagcctataaacggacacatggggggcgcctgtccatatggataagatagggctataaatgccctcatcttgccacagctcttctaggcctctttagggttaaggcatactcccttctgagaatttctggtctaactggttgtctagcttcacctcctgtttccatggattgtttgtaaccagcttttgtggcaactgttactgttgattaatatcttgctaatcataggttatggaaagattgtgtttctattttaagattctgttagaaattattgacgcacacactatattgtaaattcttatctctgtacactgtacttctacatacaaatgtactgtacttctacatacaaatgttatgttaaagaattacttcatccccatgtgaccatctcatctcacaatcaaatgaccctaaatctctcactaacctacccccgccctcactaaacttaataataaatgctggtatatccagtgcattgttggcaccgtgggaccagaargcggtgacacccctggacccagctttcactatcttgtgtgtgtctattatttctcaacctgccaatccgcctgggaacagagagccccgttgcattgcgggctgctggccagatcctgcaatagccagtgtgtcaggcatgcttccttttgcccaaaactgaactaaatgttcatgaacagtatggattaaatcaatagggaacacatcaaaatgaaaaaaagaagggtgttttgccactaaaaatgttaagatacaaaaatgagccacaataatatcaatggcaaataaggatttatatatacacacacatataccacagaagtacatttttacatatctaatatggactcgtaaacacataattatgtaatattaaagctatag

SEQ ID NO: 30247 - DNA, 1354 bp, Homo sapiens
gcatatatatcttattccctgtgatagagccccttctctccttcagttgaaatcttattgataaaataagaatataggatgtaagaataaagggacaaaatattgtagggttttgagtgacaggtgttctcagaggactctgttgtgaccaggggcatcatttctctagtcaatgtgactgaaaagaggacagccagatgtagggagaccccctgaaactattgctacggaataaaagatgaaatgctcctgattattgtaaatacaaaattgcatgcaggattgtgtaaagacaatgccaggttgggctgccagaacgagccaacagcgcatgatgtgcttccccctgcagacagcctatgaacggacgtgcagtcagggaggttgcacatcaccaacattcctatcccagaaaagcagatgttcatagctctgggaatggaatgcgacccttgtggaaagcctataaacggacacatggggggcgcctgtccatatggataagatagggctataaatgccctcatcttgccacagctcttctaggcctctttagggttaaggcatactcccttctgagaatttctggtctaactggttgtctagcttcacctcctgtttccatggattgtttgtaaccagcttttgtggcaactgttactgttgattaatatcttgctaatcataggttatggaaagattgtgtttctattttaagattctgttagaaattattgacgcacacactatattgtaaattcttatctctgtacactgtacttctacatacaaatgtactgtacttctacatacaaatgttatgttaaagaattacttcatccccatgtgaccatctcatctcacaatcaaatgaccctaaatctctcactaacctacccccgccctcactaaacttaataataaatgctggtatatccagtgcattgttggcaccgtgggaccagaaggcggtgacacccctggacccagctttcactatcttgtgtgtgtctattatttctcaacctgccaatccgcctgggaacagagagccccgttgcattgcgggctgctggccagatcctgcaatagccagtgtgtcaggcatgcttccttttgcccaaaactkaactaaatgttcatgaacagtatggattaaatcaatagggaacacatcaaaatgaaaaaaagaagggtgttttgccactaaaaatgttaagatacaaaaatgagccacaataatatcaatggcaaataaggatttatatatacacacacatataccacagaagtacatttttacatatctaatatggactcgtaaacacataattatgtaatattaaagctatag

SEQ ID NO: 30248 - DNA, 1354 bp, Homo sapiens
gcatatatatcttattccctgtgatagagccccttctctccttcagttgaaatcttattgataaaataagaatataggatgtaagaataaagggacaaaatattgtagggttttgagtgacaggtgttctcagaggactctgttgtgaccaggggcatcatttctctagtcaatgtgactgaaaagaggacagccagatgtagggagaccccctgaaactattgctacggaataaaagatgaaatgctcctgattattgtaaatacaaaattgcatgcaggattgtgtaaagacaatgccaggttgggctgccagaacgagccaacagcgcatgatgtgcttccccctgcagacagcctatgaacggacgtgcagtcagggaggttgcacatcaccaacattcctatcccagaaaagcagatgttcatagctctgggaatggaatgcgacccttgtggaaagcctataaacggacacatggggggcgcctgtccatatggataagatagggctataaatgccctcatcttgccacagctcttctaggcctctttagggttaaggcatactcccttctgagaatttctggtctaactggttgtctagcttcacctcctgtttccatggattgtttgtaaccagcttttgtggcaactgttactgttgattaatatcttgctaatcataggttatggaaagattgtgtttctattttaagattctgttagaaattattgacgcacacactatattgtaaattcttatctctgtacactgtacttctacatacaaatgtactgtacttctacatacaaatgttatgttaaagaattacttcatccccatgtgaccatctcatctcacaatcaaatgaccctaaatctctcactaacctacccccgccctcactaaacttaataataaatgctggtatatccagtgcattgttggcaccgtgggaccagaaggcggtgacacccctggacccagctttcactatcttgtgtgtgtctattatttctcaacctgccaatccgcctgggaacagagagccccgttgcattgcgggctgctggccagatcctgcaatagccagtgtgtcaggcatgcttccttttgcccaaaactgaactaaatgttcatgaacagyatggattaaatcaatagggaacacatcaaaatgaaaaaaagaagggtgttttgccactaaaaatgttaagatacaaaaatgagccacaataatatcaatggcaaataaggatttatatatacacacacatataccacagaagtacatttttacatatctaatatggactcgtaaacacataattatgtaatattaaagctatag

SEQ ID NO: 30249 - DNA, 1354 bp, Homo sapiens
gcatatatatcttattccctgtgatagagccccttctctccttcagttgaaatcttattgataaaataagaatataggatgtaagaataaagggacaaaatattgtagggttttgagtgacaggtgttctcagaggactctgttgtgaccaggggcatcatttctctagtcaatgtgactgaaaagaggacagccagatgtagggagaccccctgaaactattgctacggaataaaagatgaaatgctcctgattattgtaaatacaaaattgcatgcaggattgtgtaaagacaatgccaggttgggctgccagaacgagccaacagcgcatgatgtgcttccccctgcagacagcctatgaacggacgtgcagtcagggaggttgcacatcaccaacattcctatcccagaaaagcagatgttcatagctctgggaatggaatgcgacccttgtggaaagcctataaacggacacatggggggcgcctgtccatatggataagatagggctataaatgccctcatcttgccacagctcttctaggcctctttagggttaaggcatactcccttctgagaatttctggtctaactggttgtctagcttcacctcctgtttccatggattgtttgtaaccagcttttgtggcaactgttactgttgattaatatcttgctaatcataggttatggaaagattgtgtttctattttaagattctgttagaaattattgacgcacacactatattgtaaattcttatctctgtacactgtacttctacatacaaatgtactgtacttctacatacaaatgttatgttaaagaattacttcatccccatgtgaccatctcatctcacaatcaaatgaccctaaatctctcactaacctacccccgccctcactaaacttaataataaatgctggtatatccagtgcattgttggcaccgtgggaccagaaggcggtgacacccctggacccagctttcactatcttgtgtgtgtctattatttctcaacctgccaatccgcctgggaacagagagccccgttgcattgcgggctgctggccagatcctgcaatagccagtgtgtcaggcatgcttccttttgcccaaaactgaactaaatgttcatgaacagtatggattaaatcaatagggaacacatcaaaatgaaaaaaagaagggtgytttgccactaaaaatgttaagatacaaaaatgagccacaataatatcaatggcaaataaggatttatatatacacacacatataccacagaagtacatttttacatatctaatatggactcgtaaacacataattatgtaatattaaagctatag

SEQ ID NO: 30250 - DNA, 1354 bp, Homo sapiens
gcatatatatcttattccctgtgatagagccccttctctccttcagttgaaatcttattgataaaataagaatataggatgtaagaataaagggacaaaatattgtagggttttgagtgacaggtgttctcagaggactctgttgtgaccaggggcatcatttctctagtcaatgtgactgaaaagaggacagccagatgtagggagaccccctgaaactattgctacggaataaaagatgaaatgctcctgattattgtaaatacaaaattgcatgcaggattgtgtaaagacaatgccaggttgggctgccagaacgagccaacagcgcatgatgtgcttccccctgcagacagcctatgaacggacgtgcagtcagggaggttgcacatcaccaacattcctatcccagaaaagcagatgttcatagctctgggaatggaatgcgacccttgtggaaagcctataaacggacacatggggggcgcctgtccatatggataagatagggctataaatgccctcatcttgccacagctcttctaggcctctttagggttaaggcatactcccttctgagaatttctggtctaactggttgtctagcttcacctcctgtttccatggattgtttgtaaccagcttttgtggcaactgttactgttgattaatatcttgctaatcataggttatggaaagattgtgtttctattttaagattctgttagaaattattgacgcacacactatattgtaaattcttatctctgtacactgtacttctacatacaaatgtactgtacttctacatacaaatgttatgttaaagaattacttcatccccatgtgaccatctcatctcacaatcaaatgaccctaaatctctcactaacctacccccgccctcactaaacttaataataaatgctggtatatccagtgcattgttggcaccgtgggaccagaaggcggtgacacccctggacccagctttcactatcttgtgtgtgtctattatttctcaacctgccaatccgcctgggaacagagagccccgttgcattgcgggctgctggccagatcctgcaatagccagtgtgtcaggcatgcttccttttgcccaaaactgaactaaatgttcatgaacagtatggattaaatcaatagggaacacatcaaaatgaaaaaaagaagggtgttttgccactaaaaatgttaagatacaaaaatgagccacaataatatcaayggcaaataaggatttatatatacacacacatataccacagaagtacatttttacatatctaatatggactcgtaaacacataattatgtaatattaaagctatag

SEQ ID NO: 30251 - DNA, 565 bp, Homo sapiens
  misc_feature (1)...(565): n = A,T,C or G
atatactttaattagataaatattaatttttatggtcagctaatatggtcatgtcaacaattatatgaataacatgaactggaagataacctctttatctctctgcattagtatgggcagcaaggtaaaaggggaataaatctgggtggtgagaaggtcccctcacctaacaattcaatttccaggattccttcccatttttatcacggtgaagcaatcaagaactgccaactagccagggacctacagtttatatagtgtacatgttgaaaaataaaggrttgaatggaaattacaggtaacttgtatttatatccttaaaaataattacttgacgttaatagatactgagatctgttagaaattactgaaatagccactagaaaggaaagattcagatagtttagggattaaattaactccatggcaatttcctaaaaacaattaactactgctacataacctccatcattaatacctactattgtatatttctaacatcattnagcactgtgagagggtgtagggtaacgtatttgagtttctggtctaacaaatctagtcc

SEQ ID NO: 30252 - DNA, 537 bp, Homo sapiens
  misc_feature (1)...(537): n = A,T,C or G
tacaatgaactcgtacaaattggcaagaaaaagacgcaagatccaatataaaaatggamgagggacgctctttcctcagtgcccagaacaatgactggaacataataggcacaaataatttttggctgaatanaattagacacaaaanatgcttaaactcattgatagtcagaaaaatgcaaattaaaacaatgatatgccattttacatccatcagagagacaaatattagaaagaagttgtgtggtgctgctgttgggagagccaacaggtacaaacactctggaagagtgttgtgaagctaagtatgcacatagccaatggctgtgcaatcccactcctcaacatgtaggcccagggaaaaatgtgcacaagactataagggacatacagtgttacttggccaacggcaagttcaaaacccctggctgttcatcatagggtaataactaaataaaatgcgatagatgcctatgaaatactatgcggtagttagaacaatgaacaagatctagacataatgtaattaaatcttaa

SEQ ID NO: 30253 - DNA, 548 bp, Homo sapiens
ttaatgttgtgaatatatatatctatatatgcaagtagaggtacatgtatttgtagcaaagaatttgaaataatacacactaaaaaggtagtgtctcttggagatatctttatttgtttggtttttttgagatatctagtttttcttcagacttgttttacttgtgttatcataacaaacaatttaactactgaagattttttaaaacatccttctgttggttgtagatgctaatttttatgtttcataatttcaatcattgagtgatgacacaatacattttacaaaacgtaacacggagccttatgaaaataaaattctagcttcaataatttcataacttttctctaattatcttttcaaaaagactttggtaatgtgctctaaacataggaaatgtgaattttgaaagctatagkctgcttaaaaatgaaagtaatggaagtaaaaacatatatcactaagaaaaaataaaagggacttaacagttttgtaattattttattaacaaaagacgttaagcaaattcacatgtgacagtggcttgt

SEQ ID NO: 30254 - DNA, 1216 bp, Homo sapiens
  misc_feature (1)...(1216): n = A,T,C or G
aggaaaacaacggagaggcacttagctgggcctggttggagaaaggatgagggggcgggaggagagggctgagagactggctggtggacgcatagttctccagaagatctcagaggctgaggaggggttattcagtggaagaaggccaaggatggtgtgtcgaaagtggattgctttttatatcattatataataattttccacagatggaatggcttaaacctatttattgatctcacagttggataggtcttaagtccgggcatgacgtagctaggttctctacttacggtctcacaaagctgaaattaaggtgtccccttcgccgtgttctcagctgaggctcgggatccttttccaagctcatgtggttgttggaagaatataatatgatgtggttatnagactaaggtccctcttttctggctagctgtcagccaggagctgttctctgctgctagaaactgcccgtgatctcctgctatgtggctgtctccaaaacatggcagtttgtttctttaaaaccagaaggtgaatcgttttccctacaatctccccctttagaaaggggcacaatcccttttcaggggtcacctgattaggtcagacccacccaggataatctctttttcaagtatatcaaagtcagcttatttgggatcttcacctttttcatgtaatgaagcctaatcatggaatgaaattcatcatatttactacccctcccacgttgaaggtggatggcgttatacgggctgtgtataccacagggcgagaatcttgcaggagtctctctgaattctaccaccgaaggacacaaggacagttcaggcagagacagaaactaggaggaaatcaaagcctcgttgggggcatattttcagtaggaactaagggtggagtggggagggaatagaccagaaaggggagaggaaaattgcccacttcgaaattgtcctgctggctgttccctgagctgccacaccagaccgccccccccaaacaaatcctccaccttaccccactggtgctggcaagcactctaaggatggctcagaggagaggtaagctgtttttcaaatttcgtggaggaactttctggaactgtttcaaaagaaagcgtcagctgtcatggattacttaatttggaaaagagaaaggtcttcccgacctctggcaacaaactgggattcracacgtactccgtctgtgggag

SEQ ID NO: 30255 - DNA, 679 bp, Homo sapiens
tggtttttttctttaaccagctgtagctaattgcatgagggccgcctcttgtgctgaacatgaaaaggaaacctgtaatttattgcaacagaccataccatttctgctgtacaactgtcttttctgtcatgtcaatgagtggatttctcatcgtacattggcagctcaaagactggaaaacagcattagctggagacagagaaaaaaaaaaaagagtttcagaatctcttcatgtactttacacagagctcaattaaggaataaactggaaacagaatttccctttgccatctgccaggggcatttttttttctattgtttatatgtagttctttgattcaactatactgacttactaagatacaagcacatgttacgtgtgacattcagtataagattagtttctgttragcaatcatctttgcatgcccaaggaagtggctgaaggagatcccccactcaaagtagagctgggaccactctatcctctgcaccccatcttccccatgagcctttcgtgatcttgagcatctcaagagttcatctaagcataaaataggcatgaaataactcagtctgaattttgtgcactggatctgcctattgaggtgtttactagaaatttagttcctaatgaactggtctcctccctgccttaaggcacacttgtaaatgcttg

SEQ ID NO: 30256 - DNA, 2490 bp, Homo sapiens
atttcttgtgaagtaggtactaaaatataaagaggcaatgctggctagtgtttaagaaacaaaaccaaaagcagattctggagccacactgccaaatacacacgctggagccagataagcttgctagctgtgtgtcttttgtaggttacttgacctctctgtgcttcatttcctcatgtgaagcgtggttaataatcctcccagtctcacaggattgtaagaagtaaatgagttaataagtatggagtgctagaagagtgctggtatgaagcaagcacttcgtactgcattagttcttattattttccaatttgtcacatttcccccaactgtcctttctcattattcttgagcgcacacaataaagcgactgtagagtcagcagtaacaaacctgaggtgttcccacctccttctttcttctacttctgccccaatttgaaaaggactgttggtcattatgtcttaatcagttctgtaatttcatcacctgtttctaactgatttattttttcagaaaaaggagtgccaagggtacaaaaaaaattagttagaaacaatgaataagacctacaatttagtagcacaagaaggtgatgatagtcaataataatttaattgtacrtttcaaaataactaaaagagtataattggattatttgtaacacaaaggataaatgcttgaggggatggatatcccattctccatgattggattattacacattgcatgcctgtatcaaaacatctcatataccccataaatataggcatctactatgtacccacaaaaattaaaaattaaaattgaataaaaagaaaaaggaatgccagtgaactgaacttgggagaatactgggaatgggaaggtctctcctcctctcccaggtctgtcttcctctggctctaccttttctctactggagaggttcaggtttaaatttcaaagctcgttttcagattgagtttttgaattaatctatcaaaatctgagagagaaggaaagtggtgagtttttcatccttctaagcagatgaaaacatagcaaagaaatcacagcaaagaaaaccattttgcagagttcaatatctcgatctataagtagttggaaggtctcaatggctggcgcttaaaaggagaatgaaatgaacatttctgtattcctatggctttgtttcacaaaatgcatccagtattctggattggaaatgaggtggcaagtaaagcagcacgtactatcttctattgtaattgaattttataccatatctgcggatgagaaagtattggaaaggaggagatcatcataagatttaaaattcaagctcatgagctaaaaatgttttcacccaggttttgatttgttttgttttgttttaattttgtaacatcaagggattttctttttacctatcaaatagcaaatacttcctgtctgggtcctttcaactttgcaactgcacttaaccttttgtagtcagactcaaaagtcccttaaccaagggaaagtcaacctaaccacaccccagaacaggaaaaataaaagacatattattgtgtgagacactttctttgaggcaacgtgtctgttgcgatcaattatttcatttattcatcatgagctggagacagtcatggaccttgtttacaggaagttctttagaaatgagctttcctagcttaactgaacttacagcaaatcgtgtcactcagaactccacctgtattattttctttcatttttacctgaccaggtaaagggggatagggtggggaccctctgaaaaccacatgcttttctcaagaatttctgccggtccaaaaacagatggcagaaatggcataaacatgcctttggattgtaggcaatgtcttgtgtcttctgcacactctgtggctacttctagtgtagtgttgaccctgtgtgatctgttcacctgtcaggcttctcactagatcttgagccccttgaaacctgggtccaggtcttattcaccttttataccctcggtgtctagcatgttgttagagcttactaaattataatagtattacttttttatgccccatcccattctgccagagaacttaagagattcatacacatccttgttgaattaacaaatgttcttgaatcacatgtactttgataccgagaaggcaaaaatcagtctaggcacaccttgatgaaacggcagagatgactcacctcccaactgggggcgggagtgggtggggagagagcatttgtggagtcataggatgatggaggcctctccggcaggaggctttaccgagattccctgttatccctgtttgtgtaattccccctctgactttacatgaacccagacagttgtctggcatcgtccgtgtctgttacacaaccaaaatgtgttttcttgtaagcttttcatttcccttagcaaacaggttttggcttccataccttaaaaaataaaaattaggagaagccttatggaagagctat

SEQ ID NO: 30257 - DNA, 2490 bp, Homo sapiens
atttcttgtgaagtaggtactaaaatataaagaggcaatgctggctagtgtttaagaaacaaaaccaaaagcagattctggagccacactgccaaatacacacgctggagccagataagcttgctagctgtgtgtcttttgtaggttacttgacctctctgtgcttcatttcctcatgtgaagcgtggttaataatcctcccagtctcacaggattgtaagaagtaaatgagttaataagtatggagtgctagaagagtgctggtatgaagcaagcacttcgtactgcattagttcttattattttccaatttgtcacatttcccccaactgtcctttctcattattcttgagcgcacacaataaagcgactgtagagtcagcagtaacaaacctgaggtgttcccacctccttctttcttctacttctgccccaatttgaaaaggactgttggtcattatgtcttaatcagttctgtaatttcatcacctgtttctaactgatttattttttcagaaaaaggagtgccaagggtacaaaaaaaattagttagaaacaatgaataagacctacaatttagtagcacaagaaggtgatgatagtcaataataatttaattgtacgtttcaaaataactaaaagagtataattggattatttgtaacacaaaggataaatgcttgaggggatggatatcccattctccatgattggattattacacattgcatgcctgtatcaaaacatctcatataccccataaatataggcatctactatgtacccacaaaaattaaaaattaaaattgaataaaaagaaaaaggaatgccagtgaactgaacttgggagaatactgggaatgggaaggtctctcctcctctcccaggtctgtcttcctctggctctaccttttctctactggagaggttcaggtttaaatttcaaagctcgttttcagattgagtttttgaattaatctatyaaaatctgagagagaaggaaagtggtgagtttttcatccttctaagcagatgaaaacatagcaaagaaatcacagcaaagaaaaccattttgcagagttcaatatctcgatctataagtagttggaaggtctcaatggctggcgcttaaaaggagaatgaaatgaacatttctgtattcctatggctttgtttcacaaaatgcatccagtattctggattggaaatgaggtggcaagtaaagcagcacgtactatcttctattgtaattgaattttataccatatctgcggatgagaaagtattggaaaggaggagatcatcataagatttaaaattcaagctcatgagctaaaaatgttttcacccaggttttgatttgttttgttttgttttaattttgtaacatcaagggattttctttttacctatcaaatagcaaatacttcctgtctgggtcctttcaactttgcaactgcacttaaccttttgtagtcagactcaaaagtcccttaaccaagggaaagtcaacctaaccacaccccagaacaggaaaaataaaagacatattattgtgtgagacactttctttgaggcaacgtgtctgttgcgatcaattatttcatttattcatcatgagctggagacagtcatggaccttgtttacaggaagttctttagaaatgagctttcctagcttaactgaacttacagcaaatcgtgtcactcagaactccacctgtattattttctttcatttttacctgaccaggtaaagggggatagggtggggaccctctgaaaaccacatgcttttctcaagaatttctgccggtccaaaaacagatggcagaaatggcataaacatgcctttggattgtaggcaatgtcttgtgtcttctgcacactctgtggctacttctagtgtagtgttgaccctgtgtgatctgttcacctgtcaggcttctcactagatcttgagccccttgaaacctgggtccaggtcttattcaccttttataccctcggtgtctagcatgttgttagagcttactaaattataatagtattacttttttatgccccatcccattctgccagagaacttaagagattcatacacatccttgttgaattaacaaatgttcttgaatcacatgtactttgataccgagaaggcaaaaatcagtctaggcacaccttgatgaaacggcagagatgactcacctcccaactgggggcgggagtgggtggggagagagcatttgtggagtcataggatgatggaggcctctccggcaggaggctttaccgagattccctgttatccctgtttgtgtaattccccctctgactttacatgaacccagacagttgtctggcatcgtccgtgtctgttacacaaccaaaatgtgttttcttgtaagcttttcatttcccttagcaaacaggttttggcttccataccttaaaaaataaaaattaggagaagccttatggaagagctat

SEQ ID NO: 30258 - DNA, 598 bp, Homo sapiens
gacttcatcaygttgcctacaccaagatttggtttatctagacagttgtctggagcagacctttgtgttctttccccctgtacataccagtgtttctacaacctcagagaagtaaataaaacccagaattagaaggactgaaagttcagcaattgcccagctgactagctttcagtctttctaccggcttttcagtaccagcttttcccaggagaagcagcgtcgccagggtatgacggcaccactgctgctggaaagggaagggatcatcggtcactcacttgacactcactggtggtttccaatgcacagccaagggatttcaggtttgtggatctaggagtgaatgtttacaagataaggtaggaaaggccaagaggagcccctcttacccttctgggagaatgggcacaaatgaaaacagaatcaagagagccaggaattatgctcagttgtaaagcacttaattcaatggctcacagtaagttctcaataaatgtcagttattattattattattaatgtcagttattattccattaactctgagatgtacttctaatttttttcctgaagcattttaaagcaataccagatg

SEQ ID NO: 30259 - DNA, 446 bp, Homo sapiens
tggtggtatgctgcacccatcaaccgctcatctacattaggtatttctcctaatgctatccctcccctagctccccaccccctgacaggcccrggtgtgtgatgttcccttccctgtgtccaagtgttctcattgttcaattcccaactatgagtgagaacatgtggtgtttggttttctgttcctgtgttagtttgctgagaatgatggtttccagcttcacccatgtccctgcaaaggacgtgaactcatccttttttatggctgcatagtattccatgatgtatatgtgtgaggccacattctctaaatttattttaacagaggagacctctttctcactgagagtacaaaaatataccgtagacttaactacttgttagaatactacactgaattatacatataacacctcacatcttcataatgaccttgtaataaataca

SEQ ID NO: 30260 - DNA, 758 bp, Homo sapiens
tgttttatctggaggggcaaaagacctagaatagccaacacgatattgaaagagaaaaacgtagctgaacttaatataaagcaatggtaatcaagacagtgtggtattggcaaaagaatagacacattgatcaatggaacagaatagagagcccagaaatagactcagataaatatgaacactgtttgctaacactgttagctaacactgtttgctaacagagtaaacatagtacaatggaacaatgatagttttttcaacgaatggtactggaacaactgagcatccacatgtgaaaaaataaatcaagagacagactttacacccttcataaaaattaacttaaaatagattatatacctacatgtaaatcatagaaccataaaagtcgtagaagatcacataggagaaagtcyagatagctttgggtttggtgatgaatttttagatacaacatcagtaacatgaataataaagaaagaattgatgggctggcctccattaaaattaaaaatttttgctctctgaaagatgttctcaaaagaatgaaaggcaaaccacagactggaagaaaacatttgcaaaagacataaaaaaaactgttgtcctaaatatacaaacaattttggaatagaataaagagggaagaatcattccaccccatttaaaatctattgtattgtgaagaggacagacacatagatcagtggaacagcagaacacagaaacagacccacaacagtacagcaaatttattt

SEQ ID NO: 30261 - DNA, 686 bp, Homo sapiens
atgggaacagatggacctgactctatatgccagtgataatacaaccacacagagaagagataagtgacttttgagcaaaatatgctggctctaagaagtgcaaaatatatattaattactaggaatgacatttgcattgtaatttttaaattacataacagtaggataaaaataggagagtatattaaggattttaataaacaagagtctgtcaacaaaaagagtcaaactctgtaaaatatttaaagagatttattctgagccaaatatgagtaaccatggtccatgacacagtcccaggagagtctgagaatgtgtgcccaaggtgattgggacacagcttggctttatacattttagggtaacataagacrtcaatcaatacatgtaatgtatatattggtttggtcctgaaaggtgggacaactaaaaactgagggtggagttgggggccacttcctggtcataggtgtattcatagatgttctgattgacattgcttgacagagctatcatataaagacctggaatcaatagaaaggcctgtctgggttaagataaggggttgtggagaccatagttttgtcatgcagatgaagcctccagtagcacgcttcagagctcttatcagacctataaaggtgccagactcttcattaattctctcctggatgggggaaaagacc

SEQ ID NO: 30262 - DNA, 562 bp, Homo sapiens
ctacagaaaaccccaagccttctttgactctttaagaaaagtgccaatagcaagaatatttcaaaggctttgtgtgtatgtttgaatgaatarctcacatcaaagcaactcacatactaaatatcattccataattataacacatccggaagtaggcaaatttaatattgtttgctctttcataaggcaactgatgattaagtgatgaatcaagtcccaacagtgattaatcggcaaggctaagatttgaacttaagttatctgatccaaagtctaaaatttactaccagacatactaattccccagcatagcaatggctgtcattcttataatatcaaaataatttccacctgctttatagttttatttgtaactcataaacttgaatttacataatataattttgacatagtattttattcaaagaaatgtagtgcaacaataatggataattatgaaatttaaaacatttctgggaggacctcaaagaagatcaaagaaagtagtcatccttccagcctgcatagatattcttgtttattttcattttactattttacc

SEQ ID NO: 30263 - DNA, 562 bp, Homo sapiens
ctacagaaaaccccaagccttctttgactctttaagaaaagtgccaatagcaagaatatttcaaaggctttgtgtgtatgtttgaatgaataactcacatcaaagcaactcacatactaaatatcattccataattataacacatccggaagtaggcaaatttaatattgtttgctctttcataaggcaactgatgattaagtgatgaatcaagtcccaacagtgattaatcggcaaggctaagatttgaacttaagttatctgatccaaagtctaaaatttactaccagacatactaattccccagcatagcaatgrctgtcattcttataatatcaaaataatttccacctgctttatagttttatttgtaactcataaacttgaatttacataatataattttgacatagtattttattcaaagaaatgtagtgcaacaataatggataattatgaaatttaaaacatttctgggaggacctcaaagaagatcaaagaaagtagtcatccttccagcctgcatagatattcttgtttattttcattttactattttacc

SEQ ID NO: 30264 - DNA, 584 bp, Homo sapiens
cacacgtatgtttattgcggcattattcacaatagcaaagacttggaaccaacccaaatgtccaacaatgatagactggattaagaaaatgtggcacatatacaccatggaatactatgcagccataaaaaatgatgagttcatgtcctttgtagggacatggatgaaattggaaatcatcattctcagtaaactatcgcaagaacaaaaaaccaaacaccgcatattytcactcataggtgggaattgaacaatgagatcacatggacacaggaaggggaatatcacactctgaggactgtggtggggtggggggaggggggagggatagcattgggagatatacctaatgctagatgacgagttagtgggtgcagcgcaccagcatggcacatgtatacatatgtaactaacctgcacaatgtgcacatgtaccctaaaacttaaagtataaaaaaaaaaaaaagaaaagaaatgtaagaattaccagcaaaaaataaaaaaaataaaaaaataaaaaaaataaaaactttttacaatcaagctgtaaataaacatacataatataaagcaattaactttta

SEQ ID NO: 30265 - DNA, 663 bp, Homo sapiens
tgcttttgacatattcatcctgaaatctttgcacgtgccaatgtcctgaatggtattgctgaaattgtcttctagggcttttatagttttggatgttccatttaagtctttaatccatcttgagttaatttttgtataaagtgtaaggaaaaggtccagtttcaattttctgtatatggctagccagttctcccagcaccrtttattaaatagggaatccttcccccattgtttgtttttgtcagatttgtcaaagatcagataattaaggttgaatgaggtcatgatcctaatccaacaggactggtgcctttataagaaaaggaaagaaaaggccatgtttgaatgtaggtggccatatggaaagcagaaatagagccttcaccagaatctgaactggaaagaacgtggatcttggacttctagccttcagtactgtgagaaaacaaatttctattgtttaaaccatgtagtctgagatattttgtaatggtagcccaaacagactaatgtaatagacatcttagaaaattcagctttatgtttttcaatacggaaaaacatttataatgctggcagatatacttgaatgaatttggctgcaataaacagggctttataataattaaagtaaatgcattttggaggtatatagatgcaaac

SEQ ID NO: 30266 - DNA, 586 bp, Homo sapiens
ttatcaaagtggctataaaggtaatgtttgtctttgctagtaaaacacaagtatctagagaattaacttcataattcactcatcttaatatgtccattgtatttttcagaatgattaacacatattagtgtttaataaatatttagtaaatggatgaatgaaatgggtaaatttttatttaccatcattttccctcttcctctaaataactagttaaatatttcaaataytaaagtaattattatgcaaagcattttttaaagctctgatttcctaagaaattatattgtttataattaggtaccattgtagcccacattactttggaccaacaggtttctttgtgttatactattctaaagataacattcaataatattccatggatatgtggctttatagcttcttggtaactgaagaagtacaatgaggatatttcagaaatgagaaaaatatccagaattttaaaaacaataagaaccttcaagtttgataatataggtaacattaacagttgaggtgggtcacaggacttagcatacaagtcctgtggccttatttttaacttacggtgtttttaatagtg

SEQ ID NO: 30267 - DNA, 1260 bp, Homo sapiens
tgcatcttgtttttgtgttgcactagttattctccacaaaacaactaaatgtatagtgtaagactgtaaatgcacccatatacaaagaaattagaagagtaaagtcaaatacataatttgaaaacatgcagacatcaatcattcaatgaatacttattgagtacccttttagtgtcagatggcctctggaggagttgggctaaaggaggctgaatccttgctttgttactttgtcacctacatgtacttgaaaaaattactaaaattctctgtgcttcaagttcaactctgtaagtgggcatggtaacaacatccatctcttaggattgttatgaggagaacctagaccagtggcctcacaaaaagaaaaccctgaagaattttttttattattgctatattcctaaaaactaaagtgtgaaaatatattctttaaaacattaaaaaataaaaactctatccagtaactattgctgttgctgctgctggtactactactattattgtcattactattatttctgttgctgctgcttctcctgctatactacatgccagacactataaggtattttcaattattttgattgtcacaaaaaaaattaaacagaaggttttcatttccattttacatggtaaaaaactgtctcaaaaaagttaaatttttcacataaactggtaattcttttttttttttttttttttttttgagatggagtttcactcttgttgccccggctggagtgcaatggcaccatcttggctaactgcaacctctgcctcctgggttcaagcgattctcctgcctcagtctcctgagtagctaggattacaagcatgcaccaccacacccagctaatttttgtaattttttttagtagagacagggtttctccaagttagtcaggstggtctcgaactcccaaactcaggtgatctgcccacctcagcctcccaaagtactgggattacaggcatgagccaccacgcccggtcacaaactagtaattctaaagtattttctttacatcagtattaagaactccaggggatgtaaaaattaatgcaagctatttattaacaaaaaccttccaatacagtaaggagagttatgtgggtatatatccacaaatagctatgacataagataggaatacaatgaaactttccagaggtattaagatatatagggtcaaaggaaaggacttttaggggtgcatctcaggagaacatgactgagtttattctaaggagatcagt

SEQ ID NO: 30268 - DNA, 568 bp, Homo sapiens
attattttaaaatactttgtctaatatcatcaatatgtaacatactactataattcatagaactggtattaactacaacattcaatgaagtgtcacatactttccttctcaaaattttgaatcacaatatgtggttctaacactcaatttcccaaatatttttgtcttcagaccccattacacttttaaaaattatcagaagcccccaaggaccttttgttcatgtggttaatagctgctatttactgtatcaatattaaaactgataaatacataaaaatgcattaattcactagaaataactattamaacttattacatgttaaatcagataacatatctttatgaaaatagctatatttcaccccccaaaaaataggaagagtggcatgttttatatttttttcaaatctatataattttttttttttttgagagggagtctcactctgtcacccagacgagggtgcagtggcgccatctcagctcactgcaacctctgcctcccgggttcaagcaattctcgtgcctcagcctcccgagtagctgggattacaggcacccacca

SEQ ID NO: 30269 - DNA, 568 bp, Homo sapiens
attattttaaaatactttgtctaatatcatcaatatgtaacatactactataattcatagaactggtattaactacaacattcaatgaagtgtcacatactttccttctcaaaattttgaatcacaatatgtggttctaacactcaatttcccaaatatttttgtcttcagaccccattacacttttaaaaattatcagaagcccccaaggaccttttgttcatgtggttaatagctgctatttactgtatcaatattaaaactgataaatacataaaaatgcattaattcactagaaataactattaaaacttattacatgttaaatcagataacatatctttatgaaaatagctatatttcaccccccaaaaaataggaagagtggcatgttttatatttttttcaaatctatataattttttttttttttgagagggagtctcactctgtcacccagacgagrgtgcagtggcgccatctcagctcactgcaacctctgcctcccgggttcaagcaattctcgtgcctcagcctcccgagtagctgggattacaggcacccacca

SEQ ID NO: 30270 - DNA, 600 bp, Homo sapiens
ccaaatacaaaataaaaattgcattgtatttgtcaacaatataaaatgtgaataagtgcatctttagaaaatactctgcaaatgaagcttcatcatccatctccaggtactcatacaacccatgtgttgcccctaagctcttcttacatcaaaattctggaaccttcactggctccacaaatgaatgtcttcttgttcttggcaagttgtctggccacatttagtctcagattctttggctggaaagcaacctcccagggctatagtggggactatagtgagatgacatacaaaccatctgtttgtgcccactccccacttttcctgacagaagcttggtcatggtctagcagaaagtagcctttgctactgtgacttgggagctacaaagcaaaggggaaagtggaacttgctttacctaggtcctcgtttgtctgaatctagcccaatatttggagtagctgagttctcacagctccgtgctttccttgaaagggaagtcactcatctgacctaagaggcagaaaccscaagggcaaaactccgaaactaagctcattaaaatatggatcacaggattacccactttctgccctgtat

SEQ ID NO: 30271 - DNA, 610 bp, Homo sapiens
atctatcccatcatttgcttrtattcattgagtccactttaaaattttacatttagttttttcccccacttgttattgctatcaggcatatcacaacaatcattatttgaatggtttaatagaaaattaaatgtttgctatataccaggtaacctcagcacttgttatgtggctgagaaaaatgcagaaaaagccactgctttcattgagcttgcattttattaggtgatatgatgttaagtaaatcaataaagaagacaaaaatagtaagtaaataaatgagacaaaataataatatgtaggaaggactgatatttgctcagacttttatgcaaattcttatttcctttagtctaaattctgagctttggaaaccccatgtggaaaaatattttaatgtattcaagatattaaatccatgtgtacaaattgcctcctacaagtcatcttaacttatgcggccatcagaagtgtctatgagagtgcctgtatatttacattctgaccaaattaaaatcaaagactacttctcattttaactttctatatacaattttctataagccttagtttacttgaatttttttaatacttcaagttctgggataca

SEQ ID NO: 30272 - DNA, 610 bp, Homo sapiens
atctatcccatcatttgcttgtattcattgagtccactttaaaattttacatttagttttttcccccacttgttmttgctatcaggcatatcacaacaatcattatttgaatggtttaatagaaaattaaatgtttgctatataccaggtaacctcagcacttgttatgtggctgagaaaaatgcagaaaaagccactgctttcattgagcttgcattttattaggtgatatgatgttaagtaaatcaataaagaagacaaaaatagtaagtaaataaatgagacaaaataataatatgtaggaaggactgatatttgctcagacttttatgcaaattcttatttcctttagtctaaattctgagctttggaaaccccatgtggaaaaatattttaatgtattcaagatattaaatccatgtgtacaaattgcctcctacaagtcatcttaacttatgcggccatcagaagtgtctatgagagtgcctgtatatttacattctgaccaaattaaaatcaaagactacttctcattttaactttctatatacaattttctataagccttagtttacttgaatttttttaatacttcaagttctgggataca

SEQ ID NO: 30273 - DNA, 944 bp, Homo sapiens
ttttaattatacaatttttcattgtatagaataattaggttccaaactttcattgacacacgtatcatggagacaaatatttcatcaacacaatgttggatctaagatgttcagtaattgataacattctttctccctatgaagaaaatttggtataagttatattcctaagaytagagagtgtgcatcagcatctaatggtatttgaagaaaatttattttatagaaagaaaaatttaaatataaattaatatcatttcaaaaactcttaagatttggcttagatttcattttatggtagtgaattaaagtagcatgattcattcttttaaaaatttttgtgttaatatttattttgaagaactgagttactcttgactgaggaaaaggatgttgtattcatcaaatctagtaacagatctgcccaacatgacattagtggaataggtaccatttcatttatgattatatttgaaaaatataaataattcaatgaaaattaaaattacaaagataaataccaagtttacagaatcaggctgagtcaactaattgtcataagtacactttacccaatggccataaacatttttaaatacttcatatatagattatatatgatgtattttataataaaagcttagtttgacctatatttgggaaaattttaagtattttgacatggattgctgccaatttatcaagttttggatttgaagaagttgaacaatttggtactatttatgtgggaggtatatgtgtgtatacagaaatttgatatttaaataaaattttgtgttggaaatgtatttatttgagtgcctactctctttggattcatatatgaagatatgttaaaaatttatacaatctgaaatatttagaaccagctagaataactgaagagatatttcatagtctttggcttatcataatatcttacc

SEQ ID NO: 30274 - DNA, 727 bp, Homo sapiens
ggacaagggattcttcctggggcctctcacactgacttttgtcagcccaaccacagggctggcccacatagacctcttcagctttccaagtcagccatctgtccttcagaatagacgaagaccccgaaaaaccttcatggcatgccccaagtcctggcatgggcctgacacagagcagatcctcataggctcacgctgtgttcacgacaccccacacctagcccacttcattccttaatgtgtcctgcctggcccaggtacaaatcctaagagacatgagttccctaagtagaaagcaagctctgttsctccatccttcccctttgagggtctgctctgtgccaagcctgtgctgggacttgggcacagggatgaacaagacgtcggtccttgaggaactcccagtctgtcaccagatcttgacaggttggaagtagcttctcatggtgcaaagcgataatgccagattacaggtgtgtctggtgcattgggcaccctggagatgaaatcaaagggtgatgatcctgggaaatgtgtggtgagagagagagagagaaaggccagtcaagacctttctccagattcctccaccccttccagacaaggagaagagagtcggactagtctctagggaaactggactgtgtagacaagcaatctgaaccatatgccaacttatccgtcaggcagagtaggcatagtgccaagggcccatggtacttgtaga

SEQ ID NO: 30275 - DNA, 727 bp, Homo sapiens
ggacaagggattcttcctggggcctctcacactgacttttgtcagcccaaccacagggctggcccacatagacctcttcagctttccaagtcagccatctgtccttcagaatagacgaagaccccgaaaaaccttcatggcatgccccaagtcctggcatgggcctgacacagagcagatcctcataggctcacgctgtgttcacgacaccccacacctagcccacttcattccttaatgtgtcctgcctggcccaggtacaaatcctaagagacatgagttccctaagtagaaagcaagctctgttcctccatccttcccctttgagggtctgctctrtgccaagcctgtgctgggacttgggcacagggatgaacaagacgtcggtccttgaggaactcccagtctgtcaccagatcttgacaggttggaagtagcttctcatggtgcaaagcgataatgccagattacaggtgtgtctggtgcattgggcaccctggagatgaaatcaaagggtgatgatcctgggaaatgtgtggtgagagagagagagagaaaggccagtcaagacctttctccagattcctccaccccttccagacaaggagaagagagtcggactagtctctagggaaactggactgtgtagacaagcaatctgaaccatatgccaacttatccgtcaggcagagtaggcatagtgccaagggcccatggtacttgtaga

SEQ ID NO: 30276 - DNA, 727 bp, Homo sapiens
ggacaagggattcttcctggggcctctcacactgacttttgtcagcccaaccacagggctggcccacatagacctcttcagctttccaagtcagccatctgtccttcagaatagacgaagaccccgaaaaaccttcatggcatgccccaagtcctggcatgggcctgacacagagcagatcctcataggctcacgctgtgttcacgacaccccacacctagcccacttcattccttaatgtgtcctgcctggcccaggtacaaatcctaagagacatgagttccctaagtagaaagcaagctctgttcctccatccttcccctttgagggtctgctctgtgccaagcctgtgctgggacttgggcacagggatgaacaagacgtcggtcctygaggaactcccagtctgtcaccagatcttgacaggttggaagtagcttctcatggtgcaaagcgataatgccagattacaggtgtgtctggtgcattgggcaccctggagatgaaatcaaagggtgatgatcctgggaaatgtgtggtgagagagagagagagaaaggccagtcaagacctttctccagattcctccaccccttccagacaaggagaagagagtcggactagtctctagggaaactggactgtgtagacaagcaatctgaaccatatgccaacttatccgtcaggcagagtaggcatagtgccaagggcccatggtacttgtaga

SEQ ID NO: 30277 - DNA, 1079 bp, Homo sapiens
aaagataccccatstccaccccgcaccattttacagatgaaggggctaaggcccagggggaggaaggtcaccaggctgggatttgaaccaggtcttgggatgccgttggccctgcttcctgggaggccagcgggggctgaggcagtggtgtgtctgcaggtgcggtgcccatcctgctgcggagccaagcgcaaagccaagcagtcccggagatgtcagctgtgcgcggggtccggcaggcgaaggtaggggcatctccccagcaccgcggtgaagtgctcttgctttctggcttttcattgcctgcccatctggaaggcaaacaggaacccatctgtctcgtcactgctgtgtccccagagctctgcacgtagtaggtgctctgtggttatttgaagagtaggtgagcttttctcaaggcctggcatttctggacaaggctggaactcgtcatgcaatatatgtggaaagagtgtgaagaaagagccactgcagggaggaaacacagggacggggttaccaggaaaggagacctctcccgcccacgggttgggaagtgaatatcaaaaaccacctaaaggccagatttttaactcactgaggatcagttcctgggcaagcccctatttataactcattttggggtctgaatggaggaggagtcaaggaaagttggttgattgactaaacaataaacaaaatttcatcactgctcacagctttgcaaacactgggccattgcattttgtaaatcctatcctttagtgtatttataactttttaagggaaacaggaaaccgtgaggagtaaaaatactcaaggttgggttggttaatgatacttttgcctcattaaagcccaggccatccttctgacaagccagttggagaagctttggtggcaccttccatcgtggttggtagagacagtctctgactgggaaaaagacacttatttttctttcatttgcaagtgaaaggaatccaattcaaattggctttggcaaaaaaagtcgatttacaggcctaggtaagaatgaagtccaggggtatatttcagggatggcttcaggcccagct

SEQ ID NO: 30278 - DNA, 1079 bp, Homo sapiens
aaagataccccatctccaccccgcaccattttacagatgaaggggctaaggcccagggggaggaaggtcaccaggctgggatttgaaccaggtcttgggatgccgttggccctgcttcctgggaggccagcgggggctgaggcagtggtgtgtctgcaggtgcggtgcccatcctgctgcggagccaagcgcaaagccaagcagtcccggagatgtcagctgtgcgcggggtccggcaggcgaaggtaggggcatctccccagcacckcggtgaagtgctcttgctttctggcttttcattgcctgcccatctggaaggcaaacaggaacccatctgtctcgtcactgctgtgtccccagagctctgcacgtagtaggtgctctgtggttatttgaagagtaggtgagcttttctcaaggcctggcatttctggacaaggctggaactcgtcatgcaatatatgtggaaagagtgtgaagaaagagccactgcagggaggaaacacagggacggggttaccaggaaaggagacctctcccgcccacgggttgggaagtgaatatcaaaaaccacctaaaggccagatttttaactcactgaggatcagttcctgggcaagcccctatttataactcattttggggtctgaatggaggaggagtcaaggaaagttggttgattgactaaacaataaacaaaatttcatcactgctcacagctttgcaaacactgggccattgcattttgtaaatcctatcctttagtgtatttataactttttaagggaaacaggaaaccgtgaggagtaaaaatactcaaggttgggttggttaatgatacttttgcctcattaaagcccaggccatccttctgacaagccagttggagaagctttggtggcaccttccatcgtggttggtagagacagtctctgactgggaaaaagacacttatttttctttcatttgcaagtgaaaggaatccaattcaaattggctttggcaaaaaaagtcgatttacaggcctaggtaagaatgaagtccaggggtatatttcagggatggcttcaggcccagct

SEQ ID NO: 30279 - DNA, 762 bp, Homo sapiens
gcgatgggcgtcctgagcaagggggggaagaggggctggctctcagtccctgactcgcggggggtatctctccccgctgcgatgggggtcctaagagccacagggggaagaggggctggctcgcagtccccgcctcctggggggttcctccccccaccgcgatggaggtctcaagagccagggggggaagaggkactggctctcagtccccgcctcacagggggatgccttccccccgtactatgggggtcctaagagccaggggggaaagaggggctggctctctgtccccgcctcacgggggatgcctcctcccctgcgatgggggtcctaagggccaggtggggaagaggggctggctctcagtccccgcctcactgggggtgcctccccccactgcgatgaggtcctgagatccaggtgggaagagggggagagaatgatagtaattccagcatcgcaggctgtgttcacccagcctgtgaaattgttattaatatcctgaaagggagaggatgatattactccccataataggcagatatgactccccataatagagcacgatgtgtacacccacgctgtgatattcttcctaatattcagaggccgagaggttgatattactcccaatatggcagtaagtattcacccccgtgtgagatggtccttaataatattccaaggcagagggggtgatatgactacatgtatggcagaaagtggaaaccccccagggatatttttcccacgatcctggag

SEQ ID NO: 30280 - DNA, 1627 bp, Homo sapiens
cattagatagtcttaagaatagatagtagtagggcaagtgtggaagcaggaagatgagttgggaagcttacaatacccagaaattttaggaaacttggaaaaatgtgtgagatgaacatgtttgagctgatttatcctagattccccatcactgctggtgacctagtagagttagttgcagttgacagaaatggaagtaaaggagaccactaaaataacatcacagatctgaaaccaaatgaccgtaagatattttccttagtataaacagtaagccaaaaatgaattcaggtgaagtcaaccattatttgtgattacattatatataaaaaatattctagatgatgcggtttttaacagatattagcactcccatgatattgatacgataacatgttcagaatgaagcatgtatactgaagagcacatagctaataactggtagagtctggatttcaatccaatggtgttcaactttggggcctaaaataactgctagattatatcactggctctttaatttatagttgctaggggtactgtgaatctctaggtgagaaattcttcaagaatagcctaaataattcaaggaggtttaactggatccaagtggggtaaaaggagaacaccaaaagtaggcaccatatatgaactcactgttttagaatattgttcttagcatctagacaggtgggtaaacaaatgggtgcaatgtacaagcagctcagctgttcccrgtgatttgtgttttgtcaaaataactcagccaagttgtcctcagtaaaaatgttacagcattttttttttttttgcttgttttaaaaacactggcgaacccaaagagacacagcagccaagaattgaggctgccatttgcaactgtgccagggtcaaagtcactgtctgtccttgggccattcattcaaatgttttgagacctcatttgtctcacagataaatggaactcttgctacttatccatttttcctttgagatccttcagataatttgcaatttaatgagaagtatgggcaagatattatcaccttctctctgctaattaaattcttcctttctttacttcccaaacttcaacataacattccaagacttacttgactattcatgatcctcttctttttcaattttatcataaatttgtcatctggcattgagcattcccttcattttaatggtgataatccttttatgcatgtggcctgtctacccagagttactaggagatcctagaaggcagaaccaagattacatatatatttccatgtacacccggtgatcagtgaaatgctgtgcaggaaattagaactggctgagaattcgatgatggtaatgatgactgtaatagcagttactgtttatggagcacatactttgtgccagtcacattatataatgtcttattttatccccacaaaaacttgcaaggcatttattataatatgaatttagaatcaaggaaactgagatgcatagataaactgagatgcataagtagtgcataaaaatcagaaagtcagtggcagaggtatgataaaaatccacactgttataactctcaaatcagtgcagaatggcagaagtgtcatttcagttatatatgtatgta

SEQ ID NO: 30281 - DNA, 1627 bp, Homo sapiens
cattagatagtcttaagaatagatagtagtagggcaagtgtggaagcaggaagatgagttgggaagcttacaatacccagaaattttaggaaacttggaaaaatgtgtgagatgaacatgtttgagctgatttatcctagattccccatcactgctggtgacctagtagagttagttgcagttgacagaaatggaagtaaaggagaccactaaaataacatcacagatctgaaaccaaatgaccgtaagatattttccttagtataaacagtaagccaaaaatgaattcaggtgaagtcaaccattatttgtgattacattatatataaaaaatattctagatgatgcggtttttaacagatattagcactcccatgatattgatacgataacatgttcagaatgaagcatgtatactgaagagcacatagctaataactggtagagtctggatttcaatccaatggtgttcaactttggggcctaaaataactgctagattatatcactggctctttaatttatagttgctaggggtactgtgaatctctaggtgagaaattcttcaagaatagcctaaataattcaaggaggtttaactggatccaagtggggtaaaaggagaacaccaaaagtaggcaccatatatgaactcactgttttagaatattgttcttagcatctagacaggtgggtaaacaaatgggtgcaatgtacaagcagctcagctgttcccagtgatttgtgttttgtcaaaataactcagccaagttgtcctcagtaaaaatgttacagcattttttttttttttgcttgttttaaaaacactggcgaacccaaagagacacagcagccaagaaytgaggctgccatttgcaactgtgccagggtcaaagtcactgtctgtccttgggccattcattcaaatgttttgagacctcatttgtctcacagataaatggaactcttgctacttatccatttttcctttgagatccttcagataatttgcaatttaatgagaagtatgggcaagatattatcaccttctctctgctaattaaattcttcctttctttacttcccaaacttcaacataacattccaagacttacttgactattcatgatcctcttctttttcaattttatcataaatttgtcatctggcattgagcattcccttcattttaatggtgataatccttttatgcatgtggcctgtctacccagagttactaggagatcctagaaggcagaaccaagattacatatatatttccatgtacacccggtgatcagtgaaatgctgtgcaggaaattagaactggctgagaattcgatgatggtaatgatgactgtaatagcagttactgtttatggagcacatactttgtgccagtcacattatataatgtcttattttatccccacaaaaacttgcaaggcatttattataatatgaatttagaatcaaggaaactgagatgcatagataaactgagatgcataagtagtgcataaaaatcagaaagtcagtggcagaggtatgataaaaatccacactgttataactctcaaatcagtgcagaatggcagaagtgtcatttcagttatatatgtatgta

SEQ ID NO: 30282 - DNA, 464 bp, Homo sapiens
aagagagaggggaatatctaattataataaagatgatgctgataggagcaactaacttttacgagcctttaccataagctaagcactgtaccaagaacttatatatgttggttcatttactcctcatcagaaccttataatgggtacaattataktatgttacaaatgtaaaaactgaggcttagaaagattaagtaatttgcccaaggtcacatacctggcaagaaacagatatagaactccaatccagatgtaattccctaatccacatctcaataatttagtaaaagctgttactcttcatctactggaaaggctaagcactctgaaaataattcacaaccgacactatgctattttcctaaccttacagatataaccagactgatgataaagaccaacctaataaacaattcatttgaccaagatcctggaagtgccatttttctatggaaaatcctgtg

SEQ ID NO: 30283 - DNA, 464 bp, Homo sapiens
aagagagaggggaatatctaattataataaagatgatgctgataggagcaactaacttttacgagcctttaccataagctaagcactgtaccaagaacttatatatgttggttcatttactcctcatcagaaccttataatgggtacaattatattatgttacaaatgtaaaaactgaggcttagaaagattaagtaatttgcccaaggtcacatacctggcaagaaacagatatagaactccaatccagatgtaattccctaatccacatctcaataatttagtaaaagctgttactcttcatctactggaaaggctaagcactctgaaaataattcacaaccgacactatgctattttcctaaccttacagatataaccagactgatgwtaaagaccaacctaataaacaattcatttgaccaagatcctggaagtgccatttttctatggaaaatcctgtg

SEQ ID NO: 30284 - DNA, 597 bp, Homo sapiens
cttagtcaagttatttcgcttctctcagccttggttttctcatctgcgggatacagatttattttaaaaaatctatattgagccccttctgtgtatcaggttctgtgctgggtggttgagatacaaaagcaagcaagatggaagggaggtttgctcagagggcctatatatacccagcaccargtataataaacactagctgatatcgtagtattatcacgggactctgttgggtcctgtgggggttcagaccatcatgggtgcttactgatacatctgattgtagttccataaaacacattctttcatttaaccaaatcgtggtattactccatactgctctgcaatttgccttttctagcaagtgtctgagtgtaagagcaaaggtggtgaacacctaatatgatcctggatagaattttcccaagagggtataatagataagcaatcacgtgatttcagagttcagcaagagcatagttgaatgtaccttccacaagttcagtaatactgtctgtgcagatgctccttgacttacgatgggattatgtcctgataaaaccatcataagttgaaaatatcatgaatgaaaatgca

SEQ ID NO: 30285 - DNA, 604 bp, Homo sapiens
aatgttgtttaataacatatcctggttaagagaatgctatattaacgtacaagcatctttatatgccttttcctttattaggagagaattcaaatagaaaatgggacactcatcataacgatgctgaatgtgtcagattctggtgtgtaccaatgtgctgcagaaaacaaatatcagataatttatgcaaatgctgaattgagagttttaggtaagtcgtttatttacaaccaacaaattcaaaatgacgttttaacaagctataattatgcataatcccaacccaattttttttgtaaattagaaattgctgtcccatcaaataatgggaaatgtctaaattarctttttacaaaattcaaggtggtaattattattctgcttgggcaatgcactggggcttcagaaaaaaacccaccattgggtgcatccaaaccggaggaagctcttccaaagctgattctagcatgaatttttgagtataactcaaagaatatctttaggaatattttcagctgcaaattaaaaagtaataaaaaaatcacaattcacagtaactaaaagaagcagtaatttattttatctcttagcaagaggggcattg

SEQ ID NO: 30286 - DNA, 597 bp, Homo sapiens
caactttttaaatggcggctttatgtagctgcatcatagtttacttgaccattccctagtgtggatatccaggctttctcctctgtcttttgaaataaaattaatcctgttaatctgtgtgaaagatggagttagaagggctgtggggagcagctaggctcaaggcttggcaaaccctttgtgtaagtggccagagataaagggttttgagttttgtaggccaagcagtgtctgtggcagcgtggtggttgtggtggtggtggtggggaagcattctggacacataacattgttccagaaatgtaattctctgcaagtcccgttgcagaaactgcctgttgtaacttgataacagttgtatctataactactgaactaacttgccataactctaggaccaactttacccacgactgttgctcaccaaccagagcttgccagcagttccccagaaccttactggtgccaatgaactttctcaaagagcaatrcgtttctcctttaaaaaaaaaaaactccaacctcctctctgttctttggacataccaaagaccacccaggctgtgtgtatgccccagattgcagttctgtcttcac

SEQ ID NO: 30287 - DNA, 2735 bp, Homo sapiens
aaaagaaaagaaaagaaagaaagaaaatgctccaaaaagaacgggagcttgtcaaaggaacatagaagccaacttgaaggagctctcaatgggcaaaccaagagcaatttgagcaacaaaataaatcgtatgttattggattgtaacccaaagtacagaatgaatatacaggagaccatatgtttatttattgatttttaatttattattattattattattattattaktattattattattattattatacctctgaactttttattggcctcctgctccccaaagggtaccctgcttctgctggcttaatgtctcagaactttggtgtcatcggtctcagacaccactttgccatccactatccggcgggtggtggtttttggatggtttgcatggagttgctgctgtccagggcatcaccaagattgaagtcctcgccatcttccagcaggcggcggtaggtggcaatctcagcctccagcttgacattgatgttcagcagggtctcgtaatcctgggcctggctgtccctctgcccaagtcagtgccagctccaggtgcagcaggatcccactgagctgctctatctgcagggtgtagcgggcctccacctccctcaggctgttctccaagctgggcttcagatttctcacggagtccagcttgatctccaaggactggactgtacatctcagctctgtgagcatcatctcagcagctccaacctccacggactgcgtggtgaccactgtggtgctctcctcaatctgctgagaccagtacttgtccagctcctcttggttcttctgagccagcttgtcatattgggcttggatatctgccatgatcttggtgaggtcctgagatttgggggcatctacctccacggtcaacccagagctggcaatctgggcttgtaggccttttacttcctcttcgtggttcttcttcgtgaagagcagctcctccttgagagcctcaatctctgtctctcgctgcagctgagtgacattggtgtcatcaatgaccttgcagagcccatggtgtcgttctccacagactggcgcatggccagctctgtctcatacttgactctaaagtcatcagcagcaagatgggcattgttgatctgcagaacgatgcgggcgttgtccacagtatttgtgaagatctgagccctcaggtcctcgatggtcttgaagcaatggctccagtctctgacctggggtcccttcttctccaggtgctcccagattttgctctccagcctccagttctcggtctccaggctcctcactctgtccaggtaggaggccaggtggttgttcaggctttgcacggtctccttcttgttctggatgcctcccattcctgccagacccccagccatccccgaggccaggcccctggaccccatgccaccccggaagctggtggagcgggacacggagatccgggaaccagagcccccagcgactgcagagacgctgaccatgctgctgaccagctgggcgccatagctggcacctggacagagcccagggaccagtagttggtggagaaggtggagcgactggtgaagctcacgctgtccggggaggagggcgagaagacaggactcagctttgccgacaacctattattattttttaacagagatggggttttgtcatgttgcccaggctggtcttgaactcttaagctcaagtgatcctcccgcctctacctcttcccaaagtgctgggactacagacatgagccactgtgcctggcctagagaccacagatttaaataaataattgaaaaataaataaatgggggagaaatgaccatatcttccttccagaagaattttaataaatgtagaaggtgactggatgcaatggtgcactcctataatcccagcattttgggaggttgagatgggaggatcacttgagctcaggcatttgagaccagcttgggcaacacagtgaaaccctatctctacaaaaaatacaaaaattagccaggcatggtggcacaagcctgtagtcccagctacttaggaggctgaggtgggaggatctcttaagcccaggaggtcgaggctacagtgaactgagatcgcattactgcactctagcctgggtaacagagcaagaccctgtctcaaaaaaagagaaacagggaaatagaaaatcaccattcgacagtaatactcataaaagaaagatccaccaatggatgctaaaattagtaggtggaattttgaggagaaataggatattttggtcatctcaaaaaatctcctccaagatatttatccggtgcaatttctcaagttaataaaatttaaatgcaaatttacaaaaagtataaaattattaattataagagaaacatagtaactttatagtagagaaactcaaccaagacacagtttagctaagtgatcaacattaacaccagcagtaagaagacttagtgacatcacaaagcccctgctctgatgcactgaagaaagcataacactgcttatgctgtactctagccaaaaaatgcataacttcaatctaatcacgagaaaagccttagacaaacccaaattgagggacattctgtaaaatagccaaccagttcttttaaaaagtgtcaaggacattaaaaacaagagaagatggaggaacagtcacagattggaagagactgaagagacctggaaactaaatgtaatgagtaaccctgaact

SEQ ID NO: 30288 - DNA, 2735 bp, Homo sapiens
aaaagaaaagaaaagaaagaaagaaaatgctccaaaaagaacgggagcttgtcaaaggaacatagaagccaacttgaaggagctctcaatgggcaaaccaagagcaatttgagcaacaaaataaatcgtatgttattggattgtaacccaaagtacagaatgaatatacaggagaccatatgtttatttattgatttttaatttattattattattattattattattattattattattattattattatacctctgaactttttattggcctcctgctccccaaagggtaccctgcttctgctggcttaatgtctcagaactttggtgtcatcggtctcagacaccactttgccatccactatccggcgggtggtggtttttggatggtttgcatggagttgctgctgtccagggcatcaccaagattgaagtcctcgccatcttccagcaggcggcggtaggtggcaatctcagcctccagcttgacattgatgttcagcagggtctcgtaatcctgggcctggctgtccctctgcccaagtcagtgccagctccaggtgcagcaggatcccrctgagctgctctatctgcagggtgtagcgggcctccacctccctcaggctgttctccaagctgggcttcagatttctcacggagtccagcttgatctccaaggactggactgtacatctcagctctgtgagcatcatctcagcagctccaacctccacggactgcgtggtgaccactgtggtgctctcctcaatctgctgagaccagtacttgtccagctcctcttggttcttctgagccagcttgtcatattgggcttggatatctgccatgatcttggtgaggtcctgagatttgggggcatctacctccacggtcaacccagagctggcaatctgggcttgtaggccttttacttcctcttcgtggttcttcttcgtgaagagcagctcctccttgagagcctcaatctctgtctctcgctgcagctgagtgacattggtgtcatcaatgaccttgcagagcccatggtgtcgttctccacagactggcgcatggccagctctgtctcatacttgactctaaagtcatcagcagcaagatgggcattgttgatctgcagaacgatgcgggcgttgtccacagtatttgtgaagatctgagccctcaggtcctcgatggtcttgaagcaatggctccagtctctgacctggggtcccttcttctccaggtgctcccagattttgctctccagcctccagttctcggtctccaggctcctcactctgtccaggtaggaggccaggtggttgttcaggctttgcacggtctccttcttgttctggatgcctcccattcctgccagacccccagccatccccgaggccaggcccctggaccccatgccaccccggaagctggtggagcgggacacggagatccgggaaccagagcccccagcgactgcagagacgctgaccatgctgctgaccagctgggcgccatagctggcacctggacagagcccagggaccagtagttggtggagaaggtggagcgactggtgaagctcacgctgtccggggaggagggcgagaagacaggactcagctttgccgacaacctattattattttttaacagagatggggttttgtcatgttgcccaggctggtcttgaactcttaagctcaagtgatcctcccgcctctacctcttcccaaagtgctgggactacagacatgagccactgtgcctggcctagagaccacagatttaaataaataattgaaaaataaataaatgggggagaaatgaccatatcttccttccagaagaattttaataaatgtagaaggtgactggatgcaatggtgcactcctataatcccagcattttgggaggttgagatgggaggatcacttgagctcaggcatttgagaccagcttgggcaacacagtgaaaccctatctctacaaaaaatacaaaaattagccaggcatggtggcacaagcctgtagtcccagctacttaggaggctgaggtgggaggatctcttaagcccaggaggtcgaggctacagtgaactgagatcgcattactgcactctagcctgggtaacagagcaagaccctgtctcaaaaaaagagaaacagggaaatagaaaatcaccattcgacagtaatactcataaaagaaagatccaccaatggatgctaaaattagtaggtggaattttgaggagaaataggatattttggtcatctcaaaaaatctcctccaagatatttatccggtgcaatttctcaagttaataaaatttaaatgcaaatttacaaaaagtataaaattattaattataagagaaacatagtaactttatagtagagaaactcaaccaagacacagtttagctaagtgatcaacattaacaccagcagtaagaagacttagtgacatcacaaagcccctgctctgatgcactgaagaaagcataacactgcttatgctgtactctagccaaaaaatgcataacttcaatctaatcacgagaaaagccttagacaaacccaaattgagggacattctgtaaaatagccaaccagttcttttaaaaagtgtcaaggacattaaaaacaagagaagatggaggaacagtcacagattggaagagactgaagagacctggaaactaaatgtaatgagtaaccctgaact

SEQ ID NO: 30289 - DNA, 570 bp, Homo sapiens
tctaaaaattcctaaaacagtaattttgaatgtgtatgaaaaatgtatgaagaatgtattagtcagggctcaacagagaaatagaatatrtgtgcgcgtatgtgtgtttatgtgtgatatatatatgtgtgtgtgtgtgtgtgtgtgtgtgtgtgtgtgatatatatatatatatatatatatatagacagagagggagagatagagagagattgattttaaagaattggctgaaatgattatggagttttgaaggctggcaagcccaaaatctggagggtaggctggcagactggacacccagagaagagttgcaattggagtcagaagacattctgctggtaaaattccctctgcttcaggggaagtcagtcttttttctctaaagggtttttcaactgattggatgaggctgacccacattatggaggataatctgctttactggaagtctgccaatttacatattaatttcatccaaaagtactttcatagaagcatctagaataatatttgaccaaatatatgggtaccgtagcctagccaagttgacacataaaattaatcacc

SEQ ID NO: 30290 - DNA, 570 bp, Homo sapiens
tctaaaaattcctaaaacagtaattttgaatgtgtatgaaaaatgtatgaagaatgtattagtcagggctcaacagagaaatagaatatatgtgcgcgtatgtgtgtttatgtgtgatatatatatgtgtgtgtgtgtgtgtgtgtgtgtgtgtgtgtgatatatatatatatatatatatatatagacagagagggagagatagagagagattgattttaaagaattggctgamatgattatggagttttgaaggctggcaagcccaaaatctggagggtaggctggcagactggacacccagagaagagttgcaattggagtcagaagacattctgctggtaaaattccctctgcttcaggggaagtcagtcttttttctctaaagggtttttcaactgattggatgaggctgacccacattatggaggataatctgctttactggaagtctgccaatttacatattaatttcatccaaaagtactttcatagaagcatctagaataatatttgaccaaatatatgggtaccgtagcctagccaagttgacacataaaattaatcacc

SEQ ID NO: 30291 - DNA, 1002 bp, Homo sapiens
acactttttgtcactcaaagcacctgctccatcccctgagcctccatctgggttaatgccacttcaggaccagggtgagtttgtacgccacttcccttgttagaccataaactccctgggggcaggagcccaggtctcaccaggatgctgatggagtgtttgttgcgtgactgaatgaccaccgctttttccctctagaatttcagatctgcctagggtggccccttcactcctggtctgtggagagacccagagagagggcagagcagcccmcaggcggagtggcgggcaggagaagcccctggctccaggctgcccccagccacccgctggcacatgctgctcttgtaggctcagcccctttcctcacctgcagtctgggagataagactcgcccggaactctgaggcccaaggtgggtgtgaaagtgctttcaaatgttttatttttaaaagcaccagaaaatatgaggtgtgattaatcaagctattaatgaacccatatatactgagcaaggcctccgtccctgggggcaggggaggggtagggacagggcgtcactcggcctcactcagctgggagaggtgggtgctgcttccccagggcggctgccgccattccttccatcctcccagcggcctggtggcgggcgccgtccgccctgcagaccacacggcgcggttgaggaacacagcgaggggccagggtggcagccccttcctctgcttccctgagagctgttctggatgtgaaatggggtggaggaggaggctggggcacagcagccagcattgcacccctgagccctggatgctggtgcccagcaggccttggggagcccctgggcagcctccccatggaggtttgcccccagtaggtccaccagggcctgggttccccgctctacaggtgctcggatgtccgggcatggggagtgccacaggatgacgtgccacttgtgcctctggctggcatttgaggccctgctggcctcgcctctag

SEQ ID NO: 30292 - DNA, 1002 bp, Homo sapiens
acactttttgtcactcaaagcacctgctccatcccctgagcctccatctgggttaatgccacttcaggaccagggtgagtttgtacgccacttcccttgttagaccataaactccctgggggcaggagcccaggtctcaccaggatgctgatggagtgtttgttgcgtgactgaatgaccaccgctttttccctctagaatttcagatctgcctagggtggccccttcactcctggtctgtggagagacccagagagagggcagagcagcccacaggcggagtggcgggcaggagaagcccctggctccaggctgcccccagccacccgctggcacatgctgctcttgtaggctcagcccctttcctcacctgcagtctgggagataagactcgcccggaactctgaggcccaaggtgggtgtgaaagtgctttcaaatgttttatttttaaaagcaccagaaaatatgaggtgtgattaatcaagctattaatgaacccatatatactgagcaaggcctccgtccctgkgggcaggggaggggtagggacagggcgtcactcggcctcactcagctgggagaggtgggtgctgcttccccagggcggctgccgccattccttccatcctcccagcggcctggtggcgggcgccgtccgccctgcagaccacacggcgcggttgaggaacacagcgaggggccagggtggcagccccttcctctgcttccctgagagctgttctggatgtgaaatggggtggaggaggaggctggggcacagcagccagcattgcacccctgagccctggatgctggtgcccagcaggccttggggagcccctgggcagcctccccatggaggtttgcccccagtaggtccaccagggcctgggttccccgctctacaggtgctcggatgtccgggcatggggagtgccacaggatgacgtgccacttgtgcctctggctggcatttgaggccctgctggcctcgcctctag

SEQ ID NO: 30293 - DNA, 1002 bp, Homo sapiens
acactttttgtcactcaaagcacctgctccatcccctgagcctccatctgggttaatgccacttcaggaccagggtgagtttgtacgccacttcccttgttagaccataaactccctgggggcaggagcccaggtctcaccaggatgctgatggagtgtttgttgcgtgactgaatgaccaccgctttttccctctagaatttcagatctgcctagggtggccccttcactcctggtctgtggagagacccagagagagggcagagcagcccacaggcggagtggcgggcaggagaagcccctggctccaggctgcccccagccacccgctggcacatgctgctcttgtaggctcagcccctttcctcacctgcagtctgggagataagactcgcccggaactctgaggcccaaggtgggtgtgaaagtgctttcaaatgttttatttttaaaagcaccagaaaatatgaggtgtgattaatcaagctattaatgaacccatatatactgagcaaggcctccgtccctgggggcaggggaggggtagggacagggcgtcactcggcctcactcagctgggagaggtgggtgctgcttccccagggcggctgccgccattccttccatcctcccagmggcctggtggcgggcgccgtccgccctgcagaccacacggcgcggttgaggaacacagcgaggggccagggtggcagccccttcctctgcttccctgagagctgttctggatgtgaaatggggtggaggaggaggctggggcacagcagccagcattgcacccctgagccctggatgctggtgcccagcaggccttggggagcccctgggcagcctccccatggaggtttgcccccagtaggtccaccagggcctgggttccccgctctacaggtgctcggatgtccgggcatggggagtgccacaggatgacgtgccacttgtgcctctggctggcatttgaggccctgctggcctcgcctctag

SEQ ID NO: 30294 - DNA, 1002 bp, Homo sapiens
acactttttgtcactcaaagcacctgctccatcccctgagcctccatctgggttaatgccacttcaggaccagggtgagtttgtacgccacttcccttgttagaccataaactccctgggggcaggagcccaggtctcaccaggatgctgatggagtgtttgttgcgtgactgaatgaccaccgctttttccctctagaatttcagatctgcctagggtggccccttcactcctggtctgtggagagacccagagagagggcagagcagcccacaggcggagtggcgggcaggagaagcccctggctccaggctgcccccagccacccgctggcacatgctgctcttgtaggctcagcccctttcctcacctgcagtctgggagataagactcgcccggaactctgaggcccaaggtgggtgtgaaagtgctttcaaatgttttatttttaaaagcaccagaaaatatgaggtgtgattaatcaagctattaatgaacccatatatactgagcaaggcctccgtccctgggggcaggggaggggtagggacagggcgtcactcggcctcactcagctgggagaggtgggtgctgcttccccagggcggctgccgccattccttccatcctcccagcggcctggtggcgggcgccgtccgccctgcagaccacacggcgcggttgaggaacacagcgaggggccagggtggcagccccttcctctgcttccctgagagctgttctggatgtgaaatggggtggaggagraggctggggcacagcagccagcattgcacccctgagccctggatgctggtgcccagcaggccttggggagcccctgggcagcctccccatggaggtttgcccccagtaggtccaccagggcctgggttccccgctctacaggtgctcggatgtccgggcatggggagtgccacaggatgacgtgccacttgtgcctctggctggcatttgaggccctgctggcctcgcctctag

SEQ ID NO: 30295 - DNA, 1002 bp, Homo sapiens
acactttttgtcactcaaagcacctgctccatcccctgagcctccatctgggttaatgccacttcaggaccagggtgagtttgtacgccacttcccttgttagaccataaactccctgggggcaggagcccaggtctcaccaggatgctgatggagtgtttgttgcgtgactgaatgaccaccgctttttccctctagaatttcagatctgcctagggtggccccttcactcctggtctgtggagagacccagagagagggcagagcagcccacaggcggagtggcgggcaggagaagcccctggctccaggctgcccccagccacccgctggcacatgctgctcttgtaggctcagcccctttcctcacctgcagtctgggagataagactcgcccggaactctgaggcccaaggtgggtgtgaaagtgctttcaaatgttttatttttaaaagcaccagaaaatatgaggtgtgattaatcaagctattaatgaacccatatatactgagcaaggcctccgtccctgggggcaggggaggggtagggacagggcgtcactcggcctcactcagctgggagaggtgggtgctgcttccccagggcggctgccgccattccttccatcctcccagcggcctggtggcgggcgccgtccgccctgcagaccacacggcgcggttgaggaacacagcgaggggccagggtggcagccccttcctctgcttccctgagagctgttctggatgtgaaatggggtggaggaggaggctggggcacagcagccagcattgcacccctgagccctggatgctggtgcccagcaggccttggggagcccctgggcagcctccccatggaggtttgcccccagtaggtccrccagggcctgggttccccgctctacaggtgctcggatgtccgggcatggggagtgccacaggatgacgtgccacttgtgcctctggctggcatttgaggccctgctggcctcgcctctag

SEQ ID NO: 30296 - DNA, 491 bp, Homo sapiens
caagataatacaatacaatagcttccttaaagtgaattcagcctcgtagtatagtttgaagtcaggtagcgtgatgcctccagctatacgttctatattggattaggattgactaggcaatgcgggctcttttttggctaccatatgaactttaaatcatcatcactggccatcagagaaatgcaaattaaaaccacaatgagataccatctcacacaggttagaatgacaatcattaaaaagtcaggaaacaacaggtgctggagaggatgtggagaaatagaaacacttttacactgttggtgggattgtaaactagttagttcaacaactgtggaagacagtgtggcaattcctcagggcatctagaactagaaataccatatgacccagacatcccatacactgggtatatacccaaaggattataaaaaatcatgctgctataaagacayatgcacacgtatgtttattgcggcactactcacaat

SEQ ID NO: 30297 - DNA, 576 bp, Homo sapiens
tgcgtggacaatgaatttgggtggggtggggtccagtggagcggggaggcactgatgggccgggccacagttcttggccaagcgaatgatgcgcagggacagggcggggcrgggtggtgcccctgacgaagactgaagtgctgtttccaagaggctgggcaggagaaaaataatagctgtccacttcagggaccaaggcggtgtgtctaaaagcgaatattatgcaaataaaaagcgtaagaaaataaaggaccttctacacctgggacacgtggggctcagtaaatgttgatgaactgaagagctgtaccaggtgtaaactatggagggttgtgcacgccaggcaaatagaaatctcacttcccttctgattcaggaggaggtggaggaagaggcaggaactgtctgctgtggtttcttgaggatgtggcatttgtaaagctgtgatccatgtgccagtgcgagaaaagtcctgtgaacacaaaaccagcagtgtccgtacagcgccgtttctctactgtaattcccagtcaccatcaaggggactgacgccctagcttcgtctcccacctactg

SEQ ID NO: 30298 - DNA, 551 bp, Homo sapiens
caaaaaatgctcatgtcaagtcattcagcagcagcaagggatgygaatgaacaaatgtcctttcgaggaaaagatcaaggctgtgaacaaatctaaatgaatccatttggttgggggcaataacaggggccttatttatttatttatttatttatttatttatttatttattgagagaagatcttgctctgtcacccaggctggcatgtagtgacacgatcatggctcactgtagcttcaacctcctgggctcaagcaatcctcttacctcagcctcccaagtagctgggatcacaggtacgtgcatcacaaccagctaattattttttattttttgtagagatgaggtctcaccatgtttctcaagctggccttgaactcctgggctcaagtgatcctcccaccttggcctcccaaagcatttggattacaggcatgagccactgcactgggcctaatgcaacagatagaatgcataggaagtcctaaaaaggggtgtgcccagcaacataatgggtgaaagatgcacccaagtctcacaaaccaggctc

SEQ ID NO: 30299 - DNA, 1898 bp, Homo sapiens
gagccctcagaaataacaccgcatatctacaactatctgatcttcggcaacatctgccgcacacacaaggcaaattggtgcgaaatggatttccctattataactaaatggtgctggagaaacactggtctagaccactatgtacgcaaagctgaaactggatccttccttacacctatacaaaaatcaattcaagatggattaaagacttaaacgttagacctaaaaccataaaaaccctagaagaaaacctaggcattaccattcaggacataggcatgggcaaggacttcatgtataaaacaccaaaagcaatggcaacaaaagccaaaattgacaaatggggtctaattaaactaaagagcttctgcacggcaaaagaaactaccatcagagtgaacaggcaacctacaaaatgggagaaaattttcgcaacctactcttcggacaaagggctaatatccagaatctaaaaaacacattaataaaagctttgaatccacatagatcactctcaacagaaagatgtctccagatggaagatgcagctggagatcaacagtgaacatcaaaggacatattcagtgacctccaatcttccctctgatcgttcctaggaatgggaggggcacagccagcatccccatatgcagaaaagtgataagagatcccctgatttactacgttcacttccccagagatgactacagcatttctgcaacctgtgttaactttcttcggccatttggacaggaaaatggaaagatactaaaaaataccgtaatgaaatactggccagtgtaatttttgaaattttctccaacctgagcatctcaaatacctttatctgaaattctactcttctataatatgcctaggatagatgtaccccatcctactcagcaytttaaatagaagtaggttattccatcaaaagctcaaatgtgtccaagatacaaaataaatagtgaccatatgaactctctattctatcataacagttcctttcaaggtttcagacaaacatattatttccttgttttttcttcctacagtcactttaggaagggcctgagcataaagagtttgctagcatgcataccacaactactttattttccatataagcataatcagcaagtataactgtttctcaatttgttaaagcctaccataaaatcagttcaagtaactaaccttgactagtacaccatatgtggattacaccattttttccttctttttattgtagtttctctacgtgattttaaatgctagtggatgcccagatttagctagaaatttcacctatttatgaaaatgaatgagtgctttttctcacatagaggtgattttatacttatttgcccaatgatccacccaaaatcccacgtggaaagagggatcctggtataatctggttaagagtgtttcttacctctcttggcttactggcaatggcaacactgccatctttgttgtatttgatgggcgatcctccttcttgtaccagggtcccataccctgttggggtgtaaaatgcaggaactccagccccgcctgcacggatcctctctgcaagtgtgccctgcaagtgagcaaccaacaccccataagttcactaagcacacttctctatgtggacacaaacatttagacgtggttcctactatctagaggcttataattctaaaaagtagctagcattgtacattagcatacttcactaatattgtatgctagaagatcaattttaagaagttactgcccctctagaaccattctaaatccacattcaaaatgtaaccgcttatttgtatagtcatgcattgagcttccatacctctcaatgatctcttgacacatttaaatgtgtctatttttgatattctaagtca

SEQ ID NO: 30300 - DNA, 677 bp, Homo sapiens
ccattcaattcctcactaaagctgcttggtgtacctgtgggtacccacctccccatctctggcatgcagctaatgtaaatccatgcccatatgacttacaggaggaatcattgcttgttcctctcctgtctactttcaagtaaacatcatttagcattggcttcaacaaacaatgctttttctgkataccaaagggaatggatacacattcacattagatttgaataagattctaatcccctagtcaaggttctccttgtcttaaggccacatgatataaaaacagagactttgagcttatttcagctgctttattacttcttcctcccactactctaggctttgggaacagaaagtagatggaggagaaaaggaactggtgctggctggcttgcacttgaaaaggcatcttctcaaacagttgtatagggccggccagctgtgggcttattgacaagggagaatcaggcagctgagatacttctcatggaactccaaacagaggtgaaagttttctgaggagctgctccatttcagggcagctgacctgactctttcatccacttaagtggttacaatcatgatgaatgacagtgacagccagaaacctggactatagctcccagctattgggcgcctctcccatgttgggagtcctatcctgtatgcccaggacc

SEQ ID NO: 30301 - DNA, 1175 bp, Homo sapiens
cattgagatgagcataaggtgagaggacagtgaatagaaaagtgagaacctagcagaaagttgcagaactgagttgtggatttggggaacaactccagtcctagaggtgaaggagttggaattctttttgttttttgtttgtttttggtagaccactgagaatattgaggcattcttagcaaagaagagtttgacttttaacctttttggccaggacctgcagtaagaaatactttcaatttagcaacccaatacatacatatataaaacttctgtaaaacaaaagttttacaaaacacattttaactttacttgatgagattcactctgttttctgtcttacttttctttcttcttttttcttaaatggtggtcccaacccactaagttgatccccagaagcagtaatgtgtctcaatctataatttgaaaaacactgttataaaggggatgatttgggattaatctgctggtgttgtgcaacatgagtcagaaaagcaaagtccctctcattgggtcactcttcctcttgatcatctcataactaatctaaatacagttcactctgaaagtttgaccatttctcatgagcttaatgagttccttagactaaaatctatccctggatggccacaagaacacttccaccaaatattcttagagccacccaggagaaagttacctggctggtgtacggtctcctgtggcagcttttgaagttaccatctctgccacagggcctcttcccactctacygattaaacaatatgaagagtctgaaaaaaatgataactttttttcttaatcctcttaggacctcggaaagataagaatgggaaataatagatccccaaagaaagagagggaggaaacctgggagagggttggcaggttggcttcccaagatggtctcttccctgtcttcctgtgttttcttaactagctgggcacatgccaggatggggaagaaactgctacacagatgtaggctgtctctatgaataaaaatgaaaactgtttggttaaaaaatatatatatgtatctccaagccaagaattgtttaatgtcattgatacataggaggcaggcaactggctaaattttttaacactctaataaattacttggatattgagaagaccaggttgtgaaaagggatgttaggatgatggaa

SEQ ID NO: 30302 - DNA, 1175 bp, Homo sapiens
cattgagatgagcataaggtgagaggacagtgaatagaaaagtgagaacctagcagaaagttgcagaactgagttgtggatttggggaacaactccagtcctagaggtgaaggagttggaattctttttgttttttgtttgtttttggtagaccactgagaatattgaggcattcttagcaaagaagagtttgacttttaacctttttggccaggacctgcagtaagaaatactttcaatttagcaacccaatacatacatatataaaacttctgtaaaacaaaagttttacaaaacacattttaactttacttgatgagattcactctgttttctgtcttacttttctttcttcttttttcttaaatggtggtcccaacccactaagttgatccccagaagcagtaatgtgtctcaatctataatttgaaaaacactgttataaaggggatgatttgggattaatctgctggtgttgtgcaacatgagtcagaaaagcaaagtccctctcattgggtcactcttcctcttgatcatctcataactaatctaaatacagttcactctgaaagtttgaccatttctcatgagcttaatgagttccttagactaaaatctatccctggatggccacaagaacacttccaccaaatattcttagagccacccaggagaaagttacctggctggtgtacggtctcctgtggcagcttttgaagttaccatctctgccacagggcctcttcccactctactgattaaacaatatgaagagtctgaaaaaaatgataaytttttttcttaatcctcttaggacctcggaaagataagaatgggaaataatagatccccaaagaaagagagggaggaaacctgggagagggttggcaggttggcttcccaagatggtctcttccctgtcttcctgtgttttcttaactagctgggcacatgccaggatggggaagaaactgctacacagatgtaggctgtctctatgaataaaaatgaaaactgtttggttaaaaaatatatatatgtatctccaagccaagaattgtttaatgtcattgatacataggaggcaggcaactggctaaattttttaacactctaataaattacttggatattgagaagaccaggttgtgaaaagggatgttaggatgatggaa

SEQ ID NO: 30303 - DNA, 1175 bp, Homo sapiens
cattgagatgagcataaggtgagaggacagtgaatagaaaagtgagaacctagcagaaagttgcagaactgagttgtggatttggggaacaactccagtcctagaggtgaaggagttggaattctttttgttttttgtttgtttttggtagaccactgagaatattgaggcattcttagcaaagaagagtttgacttttaacctttttggccaggacctgcagtaagaaatactttcaatttagcaacccaatacatacatatataaaacttctgtaaaacaaaagttttacaaaacacattttaactttacttgatgagattcactctgttttctgtcttacttttctttcttcttttttcttaaatggtggtcccaacccactaagttgatccccagaagcagtaatgtgtctcaatctataatttgaaaaacactgttataaaggggatgatttgggattaatctgctggtgttgtgcaacatgagtcagaaaagcaaagtccctctcattgggtcactcttcctcttgatcatctcataactaatctaaatacagttcactctgaaagtttgaccatttctcatgagcttaatgagttccttagactaaaatctatccctggatggccacaagaacacttccaccaaatattcttagagccacccaggagaaagttacctggctggtgtacggtctcctgtggcagcttttgaagttaccatctctgccacagggcctcttcccactctactgattaaacaatatgaagagtctgaaaaaaatgataactttttttcttaatcctcttaggacctcrgaaagataagaatgggaaataatagatccccaaagaaagagagggaggaaacctgggagagggttggcaggttggcttcccaagatggtctcttccctgtcttcctgtgttttcttaactagctgggcacatgccaggatggggaagaaactgctacacagatgtaggctgtctctatgaataaaaatgaaaactgtttggttaaaaaatatatatatgtatctccaagccaagaattgtttaatgtcattgatacataggaggcaggcaactggctaaattttttaacactctaataaattacttggatattgagaagaccaggttgtgaaaagggatgttaggatgatggaa

SEQ ID NO: 30304 - DNA, 511 bp, Homo sapiens
agaattatagttttgtaaccatcagtctggatgtagtgtggggactggatgagatagagccgagaggggttatggagaaactcacagtatgtcaggaataagctactgcttttacttggcaatgatgggagtttagatcaggatggtgccagtggagatggatcaaaggaaaaatgatcatgacttgaactggatttgaagaaagaaaagggtatatggaataggcttatgcagtaaaagtaactgcttgttggggcggggggrttaaaacaaccgcaatactccacaaggccaaatactgctcatgactcaggcaactggcattctaagtgtaaataagtctaaagacagaattgtgaatattttatgttgctctgaggcctcacacttgcctcccagagctaatctaagacaaaattctaagaaactatggaagtcctctttctggttaagctatagaaagacataaacattgtcattttcatcataaaaaaagaaaacaataagctaa

SEQ ID NO: 30305 - DNA, 1030 bp, Homo sapiens
atagattcctcatttgaatatctatgtggcatgagaggaaaagacaaggtgcaggatttagcctgtggcagtagtttgctgacacctgtcctagactgttactagatgagaacaaataatacttggcaaaaacgagaagtctggttaaaaatgactgttattcgtgagtgctgggaaaagcgacacacatttgcaaaagtttttgtaacaacgtttacttctatacatttcttaattttatgccaaagagaccatattacacaaagtttttattaagccctgtcttttctactgatactatattgacattaaaaacagcagtctatgcataggtccttttctgctgtgtaccacatggcagtttagtatttgtagcagaaatgatgtggcccacaaagctggaaatatttactaccaggccatttacagtaaaagtatgctgaccctgctctaggacataaagaagcagcagagcaaaatatggagaccctgtttcctaattaataactcggtcatcaaaaatcttaattacagcaattcttaaaaagtggttctaattgacagttatgttctcctcagactcaggatccacaaaggaaccgggtagtggagaaataaaggctctcatagacattaaaaatccattctaaatatgtagatgctatagatcttcaggctactgaccatgayagccactaaccgagacatcactatcacagtggtgcatgaaagtaggactcatataaattggactataggtagaaatgctgtgtgctgactcactgccaagaatctcagaaaagctataaaaatgaacaataatatataaaaataagtcagatctaaaaattactccctatcaatgcctaagatacattcataattgaaatctttaaaagaaattaattgaactttttaatgggccgaatgagaaggaaaagaaactatcctcccaacaagaactgcatgagtgcatgctactttttccttttaatgtatttcttttgaatgccactctaaatttctcctt

SEQ ID NO: 30306 - DNA, 655 bp, Homo sapiens
gacatggaaccaaaccaaatgcccatcaatgatagactggttaaagaaaatgtagtacatatacaccatagaatactatgcagccattaaaaggaatgagaccatatcctttgcaggaacatggatgaagctggaagccatcatcctcagaaactaacactggaacagaaaactgaacaccrcttattctcacccataagtgggggttgaacattgagaacacatggacacagagagggaacaacacacaccagggcctgttctggggaggggattgagtggagggaacttagaggatggtcaataggtgcagaaaaccaccatagcacacatatacctatgtaacaaacctgtatgttctgagcatatatcccgttttttttacaagaaataaaaataaagaaaaaaaagaaaatctcttgcaaccaatgaaaatgaaaacaaaatataccaaaacatatgggatacaactaaagcattgctaagagggaatttcatagtgataaatacctatattagaaaagaagagaggattttaatttagcagactcacctagagagcacaactctgattttgttgagaaagcctatctccacagaacctaaaacacacaaactttcaaggtaggggagattggaatccaagaagaatgca

SEQ ID NO: 30307 - DNA, 655 bp, Homo sapiens
gacatggaaccaaaccaaatgcccatcaatgatagactggttaaagaaaatgtagtacatatacaccatagaatactatgcagccattaaaaggaatgagaccatatcctttgcaggaacatggatgaagctggaagccatcatcctcagaaactaacactggaacagaaaactgaacaccacttattctcacccataagtgggggttgaacattgagaacacatggacacagagagggaacaacacacaccagggcctgttctggggaggggattgagtggagggaacttagaggatggtcaataggtgcagaaaaccaccatagcacacatatacctatgtaacaaacctgtatgttctgagcatatatcccgttttttttacaagaaataaaaataaagaaaaaaaagaaaatctcttgcaaccaatgaaaatgaaaacaaaatataccaaaacatatgggatacaactaaagcattgctaagagggaatttcatagtgataaatrcctatattagaaaagaagagaggattttaatttagcagactcacctagagagcacaactctgattttgttgagaaagcctatctccacagaacctaaaacacacaaactttcaaggtaggggagattggaatccaagaagaatgca

SEQ ID NO: 30308 - DNA, 1186 bp, Homo sapiens
ctaaaagaaatggcagcccataacatttgtctccagacctgcatacatttttcaatgcctggcagtgaataaagtgtgtatatatatatatgtatatatgggcagtaagtgacagcactggcgagaactgcagtcttggatctaggtattacatttcaagttttgttacatttttatttgactacagcaggatttctttagagtagactaatttctttcaggcactgagccaaggtaatttgtgagatggagaaaggttccctctctctctctctcttcctcctacccttcttccctgtccctctccttctttcttcctcattttgtcaagagaatataaagatacatatgaatattatagaacttgcattttattttggcctgaattattgttttttcattctactatgaaatggctattatatgttaagcaaaataaaaatttatcgagcaattttttagtaactgaaagggaggcaatatttcagatacctttttcctctaatggcaaagttcaacaaaatgttcacctgatcctttcattcagggtagaataggttttcctatcattaacacacatctaattttatgtctctgagaaagatgtcttggaggctctcaatttttccagtcatctttagcagacactgaattgcaagaatcatgtgaattactttaccatgcttttttttcataattttaaaaaaagaatttaaacatacaatggcactagggaaacaacattggttctcagcatttgggaaatttttcctgaatccatcaaastgcaatttcctgaccactgtcttatgttaaataaatcagccctctgggtcttaactctccattgctgtaatttaggtggaactggagcaggggaataaaaacaggctgagaccagtcaggaattaatggataccctagttccacattttctcatctcatgatagacttggggtcatttcattgcctgttaatactttcatcagactaggcaaatatatgctctagtaagtcaactgtgttattttcaagatttttgttagctttttaaaagaatttatttattagaaactgtactaaaagtcatcactgaaattacacatcagaactcttccacaattaatttctttgctatccttgtctttaacaaggacccaaagtgtcaaatgctttatatgttatg

SEQ ID NO: 30309 - DNA, 622 bp, Homo sapiens
ttttctcctgcccccaatcctactaagagtctctatccatacctcttttttgcctccactcttgtagtttcagtgaaacaactttctctcctgttaaaggacagtcaattgggatggatcccttttccctgggttctttaggaacagcactgtatgaaacattatcatctctctcttttctatatctttgttggcttttaatgatcatgtgatcatacacttattgtttacgtcagctgggatctttcaactgcaaacagctctggctaatttaagcaaaaaaaaaggggggtggggggcactagatctaagaaaatgcagaaaaggttggcctcaggaagaaaaggcaccaggccagttttatgagctgggtagccacacatcatgaagcagggaccaaccatcagaaactttgctgagctgggggagagagctgaactgccaggtgtcagactagttaaaacaacaagacaaatgtgaaagaggtaagggtgtaatcacttactgtgatkgtatatgcaagaatctaaaaggagattgctgtgagatttaatgagataatgcttgtaaagcatcagaaacaatcctgggtacacagcaaacataacttgataaatgatgg

SEQ ID NO: 30310 - DNA, 1272 bp, Homo sapiens
acaaattaccataagaatgatgttaatgttaggtcccacaaagaatttttcttggcatgtaaaatatgttagtacctaatataaaatatcctgggcacataactaattatcttggtcttcatgatcttttgaatagtaactgatggtaaaaataattaattctcatcattggaagttcaagtaatacagagaaggtaaaaacttacagaaaatctcaccagcctgaaataattgtggacattaaccaaacctaattttagtaatcactgtatgcatatttatatctagatctcaatctatatgctatatatctaatatatgtgatacagatatatagaaatgattttattaaagtggaaaagagaagaaaaaaaactatagaaattgctgtatattaaagagttgtttccttaacaaagagatgtttgtccctaaaatattcctctaagatgggggtcacaaacttaaatgcctttaggcatagggactttatgactcatgcagcaaactataaaaattaagttgcttctattgttttcaaaataagaatctctctggttacattgtctatgtcatcactgagtaggttaaacaaaataagcaagcacagtatttctatagcccatgagccatattcagactagagttctctagagtgccacctctgcaaagttttaaagagattatggaaacatttggggcctggcatggtggctcatgcctgtaatcccagcactttgggaggctgaggcgggcagatcaagaggtcaggagattgagaccatcctggataacatagtgaaaccacatctctactaaaaatacaaaaaattagccaggcgtggtggcrggcacctgtagtcccagctactcaggaggctgaggcaggagaatggcatgaacccaggaggcggagcttgcagtgggtgacagagtgagactccaactcaaaaaaaaaaaaaaagattatggaaacattttaagatgttataatcaatttattttttaaataatgtatttcattttaattttttaaattttgttgggacatagtaggtatagatatttatggggcactgttgtatttctttaagagaatgtttgattcatagcatttgctttgaaagataaagaaataagtactcttaaaactttattccacccaattttgtccatttaaaaatcagttgtctaagctatatgatgattctatattatcaaacattataacatttctacttaatttcataaattaactaaattttagtttta

SEQ ID NO: 30311 - DNA, 779 bp, Homo sapiens
gatcgtttctcagagtctccttcttttttgagtggtctcctgacttttcctggtcttgctaaaaggatgtttggtggataagaaggaggatatgtcctcccccagtgtggctctccatagagtctccttcatcttgtggtcacactcggtgtccctgagctcctccycatggtgggggaccagctccgcatgctgagcatgagcacagctgcttgtgtgtgtggactacacaactgttccatgattgtctagaaattccaatgtttccaggttcagtgtagtaaaaaaaaaacatgcttcagtagatgctttttatccttacagcaccatcagctctccttctaagcagaatttataattctgctaattcatttgtgcatattaaaggaatctttttattcagggcaccactgtaaattccaacacattcttacagactctagatagatgacttcctgctgacaaggaaaaagaaaaaaaagaaattctagactgaattgggtctgtcctcgttacatgctcttgctctaaggaaatataatgtgaaatagctctatttaatcacaacatttttgcatgaaaagggctagaagaaaaataaagtttgtaagtaaagttgtgtttatcataggaagatttccaatataaaatggcattcagctaacaaatcctgacatattctttttaaatttccaattgaaatacttaagaagaaaaaaagataaaaatcaaaattaaagtgaaaactgacaacctacgggcagaagcagggagcatac

SEQ ID NO: 30312 - DNA, 514 bp, Homo sapiens
ccagattcaatctcgatcataccgccggtccactcaggctttttatcaacaaatattaatccaggctctactttcagaggaaaagagccagttaataaagaaggagactttaagagactcagactgtattattattaatcaatgccttttcagaatttacagggcgagttgaactacctcactgcagtgyaattttcttttaaagaaaattgtcttgaattgtttttatgatgttaaagatcttacccaaatttgcttctcgatttaaaggggaaacaatacaaactttactctgagctatacttaatccatgtacatgttggagtacctgacattttgactgatatcagatatttaagatttgagctagtagactttacaatgcaactttttattccattctagattcaataggtggatatagatgcaggaacccaaactgatgccaaatttcaattttcccagtatgctttaaaacaacgaagcaatctattttagagataaataggctatt

SEQ ID NO: 30313 - DNA, 1246 bp, Homo sapiens
attacagaggttcaatttctatgttcccttgttctggtttcaaaaaaataatgttaaatataaggagaatgattctttggagaaggcaaagttcttttctatgagatttataaagcctgggtgttgtttttttcccccactctgggcattgcaaattgcttctgtgatcctagtaaaatatctccagagacttactagcaacaggcatggctaattaacacagccagggaatgtggcgccttccctgggtttctgagcctttaatccagagcaaggcccactcttcttttcgcgtccccaaggccattaagtacttatcagagatccaagaactttagatctgggccaagaggcaaagccaaacaaggaacattgaattggacactgtccctaaaccttcaaaaattaaaatgtgtatgacaactcagaaaacatggtttatggaaaattttgaaaaaggtagacaaaggaaggcctaaggaaaatgaagacagatttatagcatgacttaatagggggtagagggatgataaaatgacctatccaggtcccatctaacctatagctatgcaacaactggggcagagccattattttatttattttttggcctcacataaatttaacttcatcatcctagactcagaggccttgttcctacaagaaatgccataacgagttagtatatgtgaatcttgggtcatatcatgttaacattatatgtgacatacaatattaagctgcaaatagaaactacagaagcactattcctgcctgaatatttgttgaaaatcagaataccattattctagtgaaacgttaaagaaataatctgttgtgtctttattgacagaatagagaacaattcctttgttggatttttgtaggtaatgggacaagttaaacacaaaggcagacataattttgcagtaatccccaaggtgcagtcmccagttccatgcttgctcacctctgtcctctccaacacagaaggccagcttgtcaactttaagaaggcacaaagctgggaagaataataactaagcttgatgacaaaatcagggttttgatgatagggtttgtgttgaaggaggtacttacaaaactgtatttaacaagcctaaatgcaaagacattcagaaagccatcttcacaaggactggttgaagttgatccacttggcatcactgatgtgaaaaggacccatgggcttctgcgttttggttgaggacaagcccaatatgca

SEQ ID NO: 30314 - DNA, 1246 bp, Homo sapiens
attacagaggttcaatttctatgttcccttgttctggtttcaaaaaaataatgttaaatataaggagaatgattctttggagaaggcaaagttcttttctatgagatttataaagcctgggtgttgtttttttcccccactctgggcattgcaaattgcttctgtgatcctagtaaaatatctccagagacttactagcaacaggcatggctaattaacacagccagggaatgtggcgccttccctgggtttctgagcctttaatccagagcaaggcccactcttcttttcgcgtccccaaggccattaagtacttatcagagatccaagaactttagatctgggccaagaggcaaagccaaacaaggaacattgaattggacactgtccctaaaccttcaaaaattaaaatgtgtatgacaactcagaaaacatggtttatggaaaattttgaaaaaggtagacaaaggaaggcctaaggaaaatgaagacagatttatagcatgacttaatagggggtagagggatgataaaatgacctatccaggtcccatctaacctatagctatgcaacaactggggcagagccattattttatttattttttggcctcacataaatttaacttcatcatcctagactcagaggccttgttcctacaagaaatgccataacgagttagtatatgtgaatcttgggtcatatcatgttaacattatatgtgacatacaatattaagctgcaaatagaaactacagaagcactattcctgcctgaatatttgttgaaaatcagaataccattattctagtgaaacgttaaagaaataatctgttgtgtctttattgacagaatagagaacaattcctttgttggatttttgtaggtaatgggacaagttaaacacaaaggcagacataattttgcagtaatccccaaggtgcagtcaccagttcyatgcttgctcacctctgtcctctccaacacagaaggccagcttgtcaactttaagaaggcacaaagctgggaagaataataactaagcttgatgacaaaatcagggttttgatgatagggtttgtgttgaaggaggtacttacaaaactgtatttaacaagcctaaatgcaaagacattcagaaagccatcttcacaaggactggttgaagttgatccacttggcatcactgatgtgaaaaggacccatgggcttctgcgttttggttgaggacaagcccaatatgca

SEQ ID NO: 30315 - DNA, 1246 bp, Homo sapiens
attacagaggttcaatttctatgttcccttgttctggtttcaaaaaaataatgttaaatataaggagaatgattctttggagaaggcaaagttcttttctatgagatttataaagcctgggtgttgtttttttcccccactctgggcattgcaaattgcttctgtgatcctagtaaaatatctccagagacttactagcaacaggcatggctaattaacacagccagggaatgtggcgccttccctgggtttctgagcctttaatccagagcaaggcccactcttcttttcgcgtccccaaggccattaagtacttatcagagatccaagaactttagatctgggccaagaggcaaagccaaacaaggaacattgaattggacactgtccctaaaccttcaaaaattaaaatgtgtatgacaactcagaaaacatggtttatggaaaattttgaaaaaggtagacaaaggaaggcctaaggaaaatgaagacagatttatagcatgacttaatagggggtagagggatgataaaatgacctatccaggtcccatctaacctatagctatgcaacaactggggcagagccattattttatttattttttggcctcacataaatttaacttcatcatcctagactcagaggccttgttcctacaagaaatgccataacgagttagtatatgtgaatcttgggtcatatcatgttaacattatatgtgacatacaatattaagctgcaaatagaaactacagaagcactattcctgcctgaatatttgttgaaaatcagaataccattattctagtgaaacgttaaagaaataatctgttgtgtctttattgacagaatagagaacaattcctttgttggatttttgtaggtaatgggacaagttaaacacaaaggcagacataattttgcagtaatccccaaggtgcagtcaccagttccatgcttgctcacctctgtcctctccaacacagaaggccagcttgtcaactttaagaaggcacaaagctgggaagaataataactaagcttgatgacaaaatcagggttttgatkatagggtttgtgttgaaggaggtacttacaaaactgtatttaacaagcctaaatgcaaagacattcagaaagccatcttcacaaggactggttgaagttgatccacttggcatcactgatgtgaaaaggacccatgggcttctgcgttttggttgaggacaagcccaatatgca

SEQ ID NO: 30316 - DNA, 1246 bp, Homo sapiens
attacagaggttcaatttctatgttcccttgttctggtttcaaaaaaataatgttaaatataaggagaatgattctttggagaaggcaaagttcttttctatgagatttataaagcctgggtgttgtttttttcccccactctgggcattgcaaattgcttctgtgatcctagtaaaatatctccagagacttactagcaacaggcatggctaattaacacagccagggaatgtggcgccttccctgggtttctgagcctttaatccagagcaaggcccactcttcttttcgcgtccccaaggccattaagtacttatcagagatccaagaactttagatctgggccaagaggcaaagccaaacaaggaacattgaattggacactgtccctaaaccttcaaaaattaaaatgtgtatgacaactcagaaaacatggtttatggaaaattttgaaaaaggtagacaaaggaaggcctaaggaaaatgaagacagatttatagcatgacttaatagggggtagagggatgataaaatgacctatccaggtcccatctaacctatagctatgcaacaactggggcagagccattattttatttattttttggcctcacataaatttaacttcatcatcctagactcagaggccttgttcctacaagaaatgccataacgagttagtatatgtgaatcttgggtcatatcatgttaacattatatgtgacatacaatattaagctgcaaatagaaactacagaagcactattcctgcctgaatatttgttgaaaatcagaataccattattctagtgaaacgttaaagaaataatctgttgtgtctttattgacagaatagagaacaattcctttgttggatttttgtaggtaatgggacaagttaaacacaaaggcagacataattttgcagtaatccccaaggtgcagtcaccagttccatgcttgctcacctctgtcctctccaacacagaaggccagcttgtcaactttaagaaggcacaaagctgggaagaataataactaagcttgatgacaaaatcagggttttgatgatagggtttgtgttgaaggaggtacttacaaaactrtatttaacaagcctaaatgcaaagacattcagaaagccatcttcacaaggactggttgaagttgatccacttggcatcactgatgtgaaaaggacccatgggcttctgcgttttggttgaggacaagcccaatatgca

SEQ ID NO: 30317 - DNA, 1246 bp, Homo sapiens
attacagaggttcaatttctatgttcccttgttctggtttcaaaaaaataatgttaaatataaggagaatgattctttggagaaggcaaagttcttttctatgagatttataaagcctgggtgttgtttttttcccccactctgggcattgcaaattgcttctgtgatcctagtaaaatatctccagagacttactagcaacaggcatggctaattaacacagccagggaatgtggcgccttccctgggtttctgagcctttaatccagagcaaggcccactcttcttttcgcgtccccaaggccattaagtacttatcagagatccaagaactttagatctgggccaagaggcaaagccaaacaaggaacattgaattggacactgtccctaaaccttcaaaaattaaaatgtgtatgacaactcagaaaacatggtttatggaaaattttgaaaaaggtagacaaaggaaggcctaaggaaaatgaagacagatttatagcatgacttaatagggggtagagggatgataaaatgacctatccaggtcccatctaacctatagctatgcaacaactggggcagagccattattttatttattttttggcctcacataaatttaacttcatcatcctagactcagaggccttgttcctacaagaaatgccataacgagttagtatatgtgaatcttgggtcatatcatgttaacattatatgtgacatacaatattaagctgcaaatagaaactacagaagcactattcctgcctgaatatttgttgaaaatcagaataccattattctagtgaaacgttaaagaaataatctgttgtgtctttattgacagaatagagaacaattcctttgttggatttttgtaggtaatgggacaagttaaacacaaaggcagacataattttgcagtaatccccaaggtgcagtcaccagttccatgcttgctcacctctgtcctctccaacacagaaggccagcttgtcaactttaagaaggcacaaagctgggaagaataataactaagcttgatgacaaaatcagggttttgatgatagggtttgtgttgaaggaggtacttacaaaactgtatttaacaagcctaaatgcaaagacattcagaaagccatcttcacaaggactgrttgaagttgatccacttggcatcactgatgtgaaaaggacccatgggcttctgcgttttggttgaggacaagcccaatatgca

SEQ ID NO: 30318 - DNA, 1246 bp, Homo sapiens
attacagaggttcaatttctatgttcccttgttctggtttcaaaaaaataatgttaaatataaggagaatgattctttggagaaggcaaagttcttttctatgagatttataaagcctgggtgttgtttttttcccccactctgggcattgcaaattgcttctgtgatcctagtaaaatatctccagagacttactagcaacaggcatggctaattaacacagccagggaatgtggcgccttccctgggtttctgagcctttaatccagagcaaggcccactcttcttttcgcgtccccaaggccattaagtacttatcagagatccaagaactttagatctgggccaagaggcaaagccaaacaaggaacattgaattggacactgtccctaaaccttcaaaaattaaaatgtgtatgacaactcagaaaacatggtttatggaaaattttgaaaaaggtagacaaaggaaggcctaaggaaaatgaagacagatttatagcatgacttaatagggggtagagggatgataaaatgacctatccaggtcccatctaacctatagctatgcaacaactggggcagagccattattttatttattttttggcctcacataaatttaacttcatcatcctagactcagaggccttgttcctacaagaaatgccataacgagttagtatatgtgaatcttgggtcatatcatgttaacattatatgtgacatacaatattaagctgcaaatagaaactacagaagcactattcctgcctgaatatttgttgaaaatcagaataccattattctagtgaaacgttaaagaaataatctgttgtgtctttattgacagaatagagaacaattcctttgttggatttttgtaggtaatgggacaagttaaacacaaaggcagacataattttgcagtaatccccaaggtgcagtcaccagttccatgcttgctcacctctgtcctctccaacacagaaggccagcttgtcaactttaagaaggcacaaagctgggaagaataataactaagcttgatgacaaaatcagggttttgatgatagggtttgtgttgaaggaggtacttacaaaactgtatttaacaagcctaaatgcaaagacattcagaaagccatcttcacaaggactggttgaagktgatccacttggcatcactgatgtgaaaaggacccatgggcttctgcgttttggttgaggacaagcccaatatgca

SEQ ID NO: 30319 - DNA, 398 bp, Homo sapiens
aactgatacgtgcctcayaaaggttggagcgccgtattttcaccctccagcgcctgctccaccagcgcatcactaatcaccggagatgaggtcagcgccacgcactgttcaatcacgttgaccaactggcgcacattacccggccagctcgcggtcatcaggcgtttcatcgcatcggtagagaacgcgcggacaaacggtttatgtcgctctgccgcctggcgcaacaggtgatttgccagtagcggaatgtcttctgtgcgctccgccagtgccggaattttcaggctgacaacgttgaggcggtaatagagatcttcgcggaattccccgcgcgccatcgcttttggcagatcacggtgagtggcagaaataatccgcacattgatatcaatatc

SEQ ID NO: 30320 - DNA, 531 bp, Homo sapiens
tgaacttggattattcttcaatccacaatattcacttaaaaaaaaaaaaagagccagactaatgaaatgaaagytgatgtaaatgtatagcgtgtgtttccagctgcacctgctccgatgcgcaccgaggcaaatgtaagagacagaaagaacccacccagcggggctttctctgcacaccatacccctccctctctccaggggaactaaacattcgcttctgtccaaacccaagggctaatgagagctggtaacagccaacgaacgacagacacaaaagcgaccttcgccacacctggatatctctgatgctcgctatgggacaatgggtggattgggtccacgtcgcagacaaccaatggccttttcagcagcaagaggaagaggaggaagtccctgaacttagtgcgttttgcatttcggggtgccctggtaggcgtgattgacaactaccccctgaggaaaaaaacgtgcgaaattccagaaacagcaatcccagccctaaaaggtcaagaaagtgcttttggcccc

SEQ ID NO: 30321 - DNA, 553 bp, Homo sapiens
tgtgtaagctgttgttggcttgattaattcacactttctttctccactgttgacaagattcaaaccagacaagaatttgcttctttgtctagggttccacaccataatcttttgcaataaatttggaaaggaaggaggcagcctcatagatggcttgtgttttaccagactctagttctgtgactgttaaagactcattcatgtgttaagaaaagaactgctccagttcccactataaaatcaaactaatgaactcactgaaactgacaatccaacaacaaaaaaacaaaacaacaaaacaaaaccaaatacatgcacatttctatataaaaacatatgcagacacatgtttatatgaccaagagataaaatgataaacatgaatttagataatgtcataaaaaatgacaaattaacattctttgtaaatatgaaaamaaacagccttaataaaatgttagtgttttcatcaaaaccagtctgagtttatctcaagaatgcagggctggattttttttttgaaaataaattaatataaatgtacacataaatg

SEQ ID NO: 30322 - DNA, 1951 bp, Homo sapiens
  misc_feature (1)...(1951): n = A,T,C or G
tattaacaaacaaatataacctttaatttcatacttttatacttactagtgataatatttaatatctattttgtgtttgttacctgccagaatcaatgataggcattttacatgtgttatttcatttaaatttaacaggttagtatataattactcccattttaaagatgaagctagtggacagagaagtggtttgcatcgcatagataataagtgaygaggtagaggtgactcaagtcctttgtaaattgccttacacacactaacaataacaatgtgtcagtttataaatgtacttgaacttgtgctcaaaactactatcattttccctttttctttataaatttgggttatctcagagtacaacaagagctcttttgaataacatacccatctagggcccataagagagcagcacacctgagaataaagaagaagacgatgaaccagctgtttccataatctcagcataactgtattgccaaactgtactgaccacccatagaaaatatgaacagctccagggcaattaaaagtttagattccaacaatgaagaatcattcctgatatgtaaggtcagaccctttaaaactgagcagaataaatattattattgctaacatttttaatgtattcatttgactttggggaagaatgaatagatgcaaaagatggtctatcttaatagtctcctgaattaatacattaatttgattcagtctatcagaaacctattagcaactactaaaaacaaccatgggccaggtgtggtggctcacgcctgtaatcccagcactttgggaggccgaggcgggcggatcatgaggtcaggatttcgagaccagcctgaccaacacggtgaaaccccatctctactaaaaatacaaaaattanctgggnnnnnnnnnnnnnnnnnnnnnnnnnnnnnnnnnnnnnnnnnnnnnnnnnnnnnnnnnnnnnnnnnnnnnnnnnnnnnnnnnnnnnnnnnnnnnnnnnnnncccaaataccaatttgacttttactaaactatctcagtttccataatattataagtttttggtagttaaaaaaagcctttggcccaatagactggatttatctcaaaatgtattattgagctctttcgggtattggcccagaaatgtgaacagcaagggaggcagtatggaatcatggttcaccataaaactctggagtctaattttctaggtttgaatccttcctgtgatagttaatagctgtgtgaatttcagcaagtcccataacccctattgttctcagttttctcatttgtgaagttcagttaataataatatgtacctcatggggtccatgtgcccatcaaatgaaatattgtgaataaaatgctgagcaagaagcctggcccatggaaagtaaccagttattgactaatattattattaagtgcttgtgggaggcactttcctatttatcacatgtgatactcctgctcatcttgagagcagtagtgctctggcattactaaatatttaattgaatagacactcttgatttcattaatatccccaagttctttttatgtgctaagagtctccatttaaaattgatattctcatgctttatcaaaattctcttgtggtgaaaagttcatattcataagggagagggaaagttgtttttagctcttgggccaatgagaagaataccccaatcccccatcccatctgcctacagacttattgaagtgcaggtgccagaggaaaaggaatagcaaacatttggcttgcaacgataacaatattaatataatttactagcttaacaactgttgactatcacaatctttttcatctataccagtgaaaaataatttttcagagttgttttaattaattattttaagtactttattgttataggttgaacatattttcaggtttgtattagattattgcctaccacaattt

SEQ ID NO: 30323 - DNA, 1951 bp, Homo sapiens
  misc_feature (1)...(1951): n = A,T,C or G
tattaacaaacaaatataacctttaatttcatacttttatacttactagtgataatatttaatatctattttgtgtttgttacctgccagaatcaatgataggcattttacatgtgttatttcatttaaatttaacaggttagtatataattactcccattttaaagatgaagctagtggacagagaagtggtttgcatcgcatagataataagtgacgaggtagaggtgactcaagtcctttgtaaattgccttacacacactaacaataacaatgtgtcagtttataaatgtacttgaacttgtgctcaaaactactatcattttccctttttctttataaatttgggttatctcagagtacaacaagagctcttttgaataacatacccatctagggcccataagagagcagcacacctgagaataaagaagaagacgatgaascagctgtttccataatctcagcataactgtattgccaaactgtactgaccacccatagaaaatatgaacagctccagggcaattaaaagtttagattccaacaatgaagaatcattcctgatatgtaaggtcagaccctttaaaactgagcagaataaatattattattgctaacatttttaatgtattcatttgactttggggaagaatgaatagatgcaaaagatggtctatcttaatagtctcctgaattaatacattaatttgattcagtctatcagaaacctattagcaactactaaaaacaaccatgggccaggtgtggtggctcacgcctgtaatcccagcactttgggaggccgaggcgggcggatcatgaggtcaggatttcgagaccagcctgaccaacacggtgaaaccccatctctactaaaaatacaaaaattanctgggnnnnnnnnnnnnnnnnnnnnnnnnnnnnnnnnnnnnnnnnnnnnnnnnnnnnnnnnnnnnnnnnnnnnnnnnnnnnnnnnnnnnnnnnnnnnnnnnnnnncccaaataccaatttgacttttactaaactatctcagtttccataatattataagtttttggtagttaaaaaaagcctttggcccaatagactggatttatctcaaaatgtattattgagctctttcgggtattggcccagaaatgtgaacagcaagggaggcagtatggaatcatggttcaccataaaactctggagtctaattttctaggtttgaatccttcctgtgatagttaatagctgtgtgaatttcagcaagtcccataacccctattgttctcagttttctcatttgtgaagttcagttaataataatatgtacctcatggggtccatgtgcccatcaaatgaaatattgtgaataaaatgctgagcaagaagcctggcccatggaaagtaaccagttattgactaatattattattaagtgcttgtgggaggcactttcctatttatcacatgtgatactcctgctcatcttgagagcagtagtgctctggcattactaaatatttaattgaatagacactcttgatttcattaatatccccaagttctttttatgtgctaagagtctccatttaaaattgatattctcatgctttatcaaaattctcttgtggtgaaaagttcatattcataagggagagggaaagttgtttttagctcttgggccaatgagaagaataccccaatcccccatcccatctgcctacagacttattgaagtgcaggtgccagaggaaaaggaatagcaaacatttggcttgcaacgataacaatattaatataatttactagcttaacaactgttgactatcacaatctttttcatctataccagtgaaaaataatttttcagagttgttttaattaattattttaagtactttattgttataggttgaacatattttcaggtttgtattagattattgcctaccacaattt

SEQ ID NO: 30324 - DNA, 1951 bp, Homo sapiens
  misc_feature (1)...(1951): n = A,T,C or G
tattaacaaacaaatataacctttaatttcatacttttatacttactagtgataatatttaatatctattttgtgtttgttacctgccagaatcaatgataggcattttacatgtgttatttcatttaaatttaacaggttagtatataattactcccattttaaagatgaagctagtggacagagaagtggtttgcatcgcatagataataagtgacgaggtagaggtgactcaagtcctttgtaaattgccttacacacactaacaataacaatgtgtcagtttataaatgtacttgaacttgtgctcaaaactactatcattttccctttttctttataaatttgggttatctcagagtacaacaagagctcttttgaataacatacccatctagggcccataagagagcagcacacctgagaataaagaagaagacgatgaaccagctgtttccataatctcagcataactgtattgccaaactgtactgaccacccatagaaaatatgaacagctccagggcaattaaaagtttagattccaacaatgaagaatcattcctgatatgtaaggtcagaccctttaaaactgagcagaataaatattattattgctaacatttttaatgtattcatttgactttggggaagaatgaatagatgcaaaagatggtctatcttaatagtctcctgaattaatacattaatttgattcagtctatcagaaacctattagcaactactaaaaacaaccatgggccaggtgtggtggctcaygcctgtaatcccagcactttgggaggccgaggcgggcggatcatgaggtcaggatttcgagaccagcctgaccaacacggtgaaaccccatctctactaaaaatacaaaaattanctgggnnnnnnnnnnnnnnnnnnnnnnnnnnnnnnnnnnnnnnnnnnnnnnnnnnnnnnnnnnnnnnnnnnnnnnnnnnnnnnnnnnnnnnnnnnnnnnnnnnnncccaaataccaatttgacttttactaaactatctcagtttccataatattataagtttttggtagttaaaaaaagcctttggcccaatagactggatttatctcaaaatgtattattgagctctttcgggtattggcccagaaatgtgaacagcaagggaggcagtatggaatcatggttcaccataaaactctggagtctaattttctaggtttgaatccttcctgtgatagttaatagctgtgtgaatttcagcaagtcccataacccctattgttctcagttttctcatttgtgaagttcagttaataataatatgtacctcatggggtccatgtgcccatcaaatgaaatattgtgaataaaatgctgagcaagaagcctggcccatggaaagtaaccagttattgactaatattattattaagtgcttgtgggaggcactttcctatttatcacatgtgatactcctgctcatcttgagagcagtagtgctctggcattactaaatatttaattgaatagacactcttgatttcattaatatccccaagttctttttatgtgctaagagtctccatttaaaattgatattctcatgctttatcaaaattctcttgtggtgaaaagttcatattcataagggagagggaaagttgtttttagctcttgggccaatgagaagaataccccaatcccccatcccatctgcctacagacttattgaagtgcaggtgccagaggaaaaggaatagcaaacatttggcttgcaacgataacaatattaatataatttactagcttaacaactgttgactatcacaatctttttcatctataccagtgaaaaataatttttcagagttgttttaattaattattttaagtactttattgttataggttgaacatattttcaggtttgtattagattattgcctaccacaattt

SEQ ID NO: 30325 - DNA, 533 bp, Homo sapiens
tttctttcttaaagggattttttatatgaggaaaaatgtcttctatattaactcacattcttgtaagtacaccaaatttccatctggtatgatttttcttagacatgaaggattttatttaacacttattgtagtgctgttaaaaagcctttatttcactttaatttttgaaaggtatttttcttgaggccaggtgcagtgactctcacctgtaatcttatcactttgagaggccaaggtgagagaattgcttgagtccagragtttgagaccagcctgggcaatatagcaagatcctttttctacaaaaaaaatgttaaaaatgagccagatgtggtgatgcatacctgtaatcctagctattccagcagcttagaggggagaatcactggagaacaggagttcaaggctgcagggagctatgatcgtgccactgcatcccagcctgagcaacagagtgagacctgcttctttttgagaaggaaagaaagaaaaatggataaataaaaggtgtttttcttgagccctcggtg

SEQ ID NO: 30326 - DNA, 533 bp, Homo sapiens
tttctttcttaaagggattttttatatgaggaaaaatgtcttctatattaactcacattcttgtaagtacaccaaatttccatctggtatgatttttcttagacatgaaggattttatttaacacttattgtagtgctgttaaaaagcctttatttcactttaatttttgaaaggtatttttcttgaggccaggtgcagtgactctcacctgtaatcttatcactttgagaggccaaggtgagagaattgcttgagtccaggagtttgagaccagcctgggcaatatagcaagatcctttttctacaaaaaaaatgttaaaaatgagccagatgtggtgatgcatacctgtaatcctagctattccagcagcttagakgggagaatcactggagaacaggagttcaaggctgcagggagctatgatcgtgccactgcatcccagcctgagcaacagagtgagacctgcttctttttgagaaggaaagaaagaaaaatggataaataaaaggtgtttttcttgagccctcggtg

SEQ ID NO: 30327 - DNA, 543 bp, Homo sapiens
taactaatcatataaaacaacaagtaaaattccaaattactcttgtaattgtttaggggagagaaaatcttctatcctctgaaggttcaataattgaatctatgaaataaactgamagtagacagtttagtaagagaaaagctattttaattacacacaggagtcccacaaagtagaggacttgaagaggggccagatgatagaagtttttatagcatcctgagctaaagaaaggagtaggggttggtggtttatcgggggtggtgtctatacaagttgcaggggagtaagaggagggaatgcatggagaacaaaggttgtcttgttatacagataacatctctcaggtaataaaagttgtctccaaggatctcatcagaagaagaggtaatggatagtttgtgacaaagtctttctggagtgtggtgtctcctgtgagttaatcttccttcactgatgagattcccagggaggatacctatgacaattgtgtttctttttggaggctctatcttcagccacttaagggagttcagagagagc

SEQ ID NO: 30328 - DNA, 543 bp, Homo sapiens
taactaatcatataaaacaacaagtaaaattccaaattactcttgtaattgtttaggggagagaaaatcttctatcctctgaaggttcaataattgaatctatgaaataaactgacagtagacagtttagtargagaaaagctattttaattacacacaggagtcccacaaagtagaggacttgaagaggggccagatgatagaagtttttatagcatcctgagctaaagaaaggagtaggggttggtggtttatcgggggtggtgtctatacaagttgcaggggagtaagaggagggaatgcatggagaacaaaggttgtcttgttatacagataacatctctcaggtaataaaagttgtctccaaggatctcatcagaagaagaggtaatggatagtttgtgacaaagtctttctggagtgtggtgtctcctgtgagttaatcttccttcactgatgagattcccagggaggatacctatgacaattgtgtttctttttggaggctctatcttcagccacttaagggagttcagagagagc

SEQ ID NO: 30329 - DNA, 759 bp, Homo sapiens
cacaaaaacctctctgaactgtaaagttttgcaagcagatatctcttctgtgtaatgaaggtggcaagaagttacatctagaacaaaagcattgctcatgaagtggaagtgtaattttgtcttgtgacagtaatgcaatagtgtcaaaaactcagatctccataaggaaaaaaagatcatcagaaaaagataaaactattgttctttcttgtaattggactaaatggtaactgttaaagtaacaatattaacaatacattgggtgattatagtttttggataagtgaagtcagtaacagtaatgtcatatgaatcagtcatattgtattggaagatttctgtactacatgtgaaatagtataatgctatttgaaggtggacttcgattatttgtgaatgtatattgcaaactctagggcaagcatacacaaaaattaaaaagaactataattcacatactaagaccaaataaaatatagaatcaaataaaatgcccaattaacaccagaaaaggggaggggcagggccaagatggccaaytagaagcagatgcattcagaggctccaaaaaaaaaaaaaaaaaagaaaagaaaaacataataagtgtgtgaatccttcactggcaaccaaggtatccagattctctcatcaaaattgactagaagggtggcgtgactcacggagagaaggaagatcggtgtggtgtggcagcccacctgagagccaccgcaaccccctacccccagccaggggacgcag

SEQ ID NO: 30330 - DNA, 759 bp, Homo sapiens
cacaaaaacctctctgaactgtaaagttttgcaagcagatatctcttctgtgtaatgaaggtggcaagaagttacatctagaacaaaagcattgctcatgaagtggaagtgtaattttgtcttgtgacagtaatgcaatagtgtcaaaaactcagatctccataaggaaaaaaagatcatcagaaaaagataaaactattgttctttcttgtaattggactaaatggtaactgttaaagtaacaatattaacaatacattgggtgattatagtttttggataagtgaagtcagtaacagtaatgtcatatgaatcagtcatattgtattggaagatttctgtactacatgtgaaatagtataatgctatttgaaggtggacttcgattatttgtgaatgtatattgcaaactctagggcaagcatacacaaaaattaaaaagaactataattcacatactaagaccaaataaaatatagaatcaaataaaatgcccaattaacaccagaaaaggggaggggcagggccaagatggccaattagwagcagatgcattcagaggctccaaaaaaaaaaaaaaaaaagaaaagaaaaacataataagtgtgtgaatccttcactggcaaccaaggtatccagattctctcatcaaaattgactagaagggtggcgtgactcacggagagaaggaagatcggtgtggtgtggcagcccacctgagagccaccgcaaccccctacccccagccaggggacgcag

SEQ ID NO: 30331 - DNA, 561 bp, Homo sapiens
cacaagttcaaaaattaggagtaaaaagtatatgtattcataaatgagaattgtgatattctagttggattttatataaaactttagaagatagcttgtgatttaaataacacaatcaatagacttgtaaagctgtacaatacctaaaaactgaataaacaacatggatttccagagtgtcaaatgacgtggatgaaaatttttggcttacrtgaattttagttgaccaaagaagggagtgagcctttttcttttttttctttttttttttttttttgagaaagagtctcactctgtcgcccaggctggagtgcagtggcacaatcttggcaggagtgagccctttttaattatcaggagccatgccagtaacttcgagggaatatgagtattgtttgtgctgcagaatgtctataatatgtacgagggttgtttgaggagtcagcatgttgatgtttcattgtaaaacatagggattgaatagaagagagaaagctaacaatctgaatgtctacaaaaccaatccagtttttgaaaatggaaactatgctaagatatatg

SEQ ID NO: 30332 - DNA, 605 bp, Homo sapiens
ataatgctaaattaggatttatattttatgttatgtctcatatttcaaaactaaaatacaaattgaattccatttacttaaagtagaatacaaaatgatataatacaaaatgatataaattgataaagtaaaaaagtactttctaatatcaaatgttgaaaatcatttttaaaatcatattactcaaatttatcctctaattatatacacgccttctctttacattaaacaaaaacatatacatgtgattcaagtaaaattttgtgagtgatgattttataatagggtagaaggtgttgaaatgctaaagaatacatcttgtgcctaggaaaggaaaaataaataccaaggaaaatcagatggggtaagacggaactataaaacaagtaagaaaaagagattccaaaatttgtcaactgggacatgtgtttaatccctatagtccttttttttctgtattcataagatacataaatttcccctatttatcaaatatatgattctatwaaaaatggactgaaagattctaggagactcaaataccaactggaaaatgaaaattgctcaatgttaaaaagagtaagaacattctagacaaaggctga

SEQ ID NO: 30333 - DNA, 789 bp, Homo sapiens
atgtaagtaatatactagaatcattctggccatggaagtgagctttttgctcaatgaactggatacttgccttaacttacctattttttaaataaataggctttatattagttagaggagtagagtctttttgcatttccatttttagtgctaaaacacagaaaatagccatgatatggcaagagatatgaagtagttctccacataattcatacaatatagtgaactaagggatatatttaaatttactgaatgggaaattagatcacgactcawcatttaatcagaatagatgattgttgtacaatgcccagatgcacatgagatgtgcctatttcattatgaaaccagaataagaaaggtagagtgagctgcagattgtccagaagtatccacgagagaattgttttattgtttaattgttagatgagttaacattttaaataaccttgatttgtctgaggcaggtaaaataagatatgctccttcctctgcttacagcagcagtccccaggctttctggcaccggggactggtttcgtggaagacaatttttccatggatcggggagggggaatggtttcatgataaatcaagcacgttacatttattgtgcattttatttcgattttgtatcagtatatgcataaataaagcagctgccatgactggatggctttctggtttcactactcgggtagtgaaataattatgcagctcactataatgtagaatcagtgggagccctgagcttgttttcctgcaactagatagtcccatcgggtggtg

SEQ ID NO: 30334 - DNA, 1322 bp, Homo sapiens
aggaccctgcctcatgaaatttgaagccaggtgcagagattaatggaaatagagcatctgccaaatttaaggggcagaactagtctgttgttaatttgagtttcctcccagtcatagtataaattgcttaatcttacttgatttattatcctgaaggaaaaaatgtcaatctagcacaattagatggtataatgaatgtcttagtttagcttctgagtattcttaaaagcagaagtttttgtctctctgaggacaaatacgaattttattcaaactattgatatataaaaaattcttcagatcctgggacatgctacaagcattaggtaatcaggggttttccaattattggctccttctcactcaagaaatttccttggtcatatcaatccagatacctcatccccagtaagctgtttacgtaccactcagcacacaggataggcacataacaatttaaccagtaattaaggaaatgattttggtggaacattaatatcataggactcacttctttaagaacctgttttgctttaaacatcattcctttattcattcattcagtgtgttatgatctattgtgtgtcaggcactgttctaggagtacagggaagaacaaaacagatcagtcccttatgtcttggggcttatgaagtaggtgggtgggcaactgacaatgacatgcaaataaattattcaaaataagatcatcttaaagaaggataagtgctgtaaaaaaataaaactggttaagttgtagatgacagttgcggtggttgcagctagcttattggagtcactttgtttatctgataaatatgtatatagtgtttgctstgtgccagaactatactaagttcttcacaaatattaaatcatttggtcttccaaacgttcctgtgaaggaaatatttttatcattgccatttataaatagggaaactaaggcacagaaaggtcaaatcacatgtgctgggtcactgggaactaggctcagatttgaacccagaatcaataattcagagtctatgctacagccccctctgccatctggattgctggtaacgctgactggcatgaccatgaagtcactggaacccagcctactcaatggctattccctcccataaaaatatctccatataccaggtgaagggcatttatttccaaatgcacatctccattaaagtattcttgacagcccacattgctgtatctaatatcagctgcactcaaatttcataagataaacgttatacgtttttattgaggtataattcatagacagtgaaatcacatacagaccttaaataatttgctga

SEQ ID NO: 30335 - DNA, 2000 bp, Homo sapiens
aaggttttgtttttgcttcttggtgctttctttgatgaactttcagaatgaagaggaaatctgtttatacttcttgtctttggacgaacatctttctccatcgtggaagtttgattttcagcagcttgacttggaagagatgaaggaagaatttctggatttccaacaggaaagtgtttcttaaactctgagtctggacaacatttaccctgcaattgtgaataatatatcaaattttaaaatgacttcagctttaatggtcagaaaatacagtagactagataacacaagaaattcccactgtaaacacttttatatggtgtataaaatgtgacagacattcaatttaatagctggctttgcaggaaagaaagaaaattttgcattccaggaatgaaggtctgactggttgctatggtttgaatgtgtctcctccaaaattcaggtgctgccaatgtgatggtattaagaggtggggccttcgggggtgattagatcatgaaaggtcctccctttttaatgagattagggtccttataaaagaggattcatgaagtatttggctacagccttctactcttttgctttctaccatgctaggaggcagcaagaaggccctcaccagacaccaaatggtggtgccttgatcttgaacttcccagtcttcagaactgttcgaaataaatttgtgttctttattattactctgtctgtggcatcctgttatagcagcacaaatggactggttaagcacaggagttgacactgcttatgggagatgtagggtcaactttgtaactaggggcttggatgacaggaaagtcccatccacacaggtggggatttggaagtaagactctattgatcctgcataaagctggaaactttaaaggataaattatggtgggtaagaggaaaagtatcagctaatgagaaaaggaaagtggcaaggaagcttttctttcttgggtcggtatttgagtgtggagatgaaaacttaygcccctgaaaactcaaaatcacaggtccatgccattcctgtgtgtgggattaggatttactttggcctcatggtctgggaatccctgagcagaagaattaacataaacattgagatgtctggcagaagcaatcacaaaattcctctggagggacaacagcctcaaaataggtcatagaggatcctcataggtagagtcccaccagatagaaactcacaatccaaaattacaaacacacaaggaagcaatccaccttgagtaagagtcacagacacaaaagtagtcagattagcctccaagaagttcaggtaatgcaactataggatagagactgtaaaataaattaattaaaaatgattaaatctgggaaaagaataacatctcatgaaaaacagaacaggtaaatttgaaattttctaatttgtaattaacaaataataactttatatatttatggggtacaatgtgatattttaatatatatatacattgtgggatgattaaatcaagttaattaacatatcaatcacttcacatacctatcttttttttgtagtgagaacaaaaataggcaaatttgaaagaaagataaattgaacttctagacatgaaaaatgcaggtattgaacctaaatggatgggctaaaaacagaaaattagatttggccaagaaagaatgaatgaacttggagataatttcaggaaattacccagaatataagagatagaaatagagaaaatatgaaaggttaagagacataaggcgattaaaagagagaaatgaaaaaaaaggagagtcatgaaaaaaaagagagtcatgaagctagaatgagaatgcttaatatacatgtgttatgttccagaaggagagttgagagaatgtgggagagttggggaatgttgggaattcaaagagataatagatgagaattttcaggcctgattagtgacataaatctttatattaaggaaagagaaatcctgagcaggagaaaagca

SEQ ID NO: 30336 - DNA, 801 bp, Homo sapiens
tcaggaaggagaaatcagcaattcctttaaggaccagaaaacttgggaaaatgccaaaggatgacaaagccagggagcttgggagcttgatcactttagcactcagctttatgacctttggaaactacgtgtcacactattgagtccaaaaccagctttgataaattttgttttggaatctttgtcctcaggcattttaagacactgtagagaggttgtctaatattttccacacatcataatggcataaaactaggagaagaacaaggacagctaggaagaattgcaaatagagactaggaggcagaaaagatggaaaaagttggaaattagagtgacatctgtgggtttaatcagtaacttaatctggcaatgcagaacgtagccagttaagaggaaacagaacccagtaaagttcctrcctcctgaggagtccccatctccgccttgagcttttgtcatccttgggcaacaggcagacatgttagttcctgctggctccagtcctgtctggcctcttgatcactcagcactcaggacttgggaaagtcctgagcctccaaaggctaccggtggcattattgggagttatttgcttgtttgtggatctggaatttacctgctctacccacacctggtccccagatggtggggctggcccaaggcttccaggtgcacactaagctgcagcttccctgtattcatgcctgtctgcctgcctggtttttagcctgggtcctgactttttactgggactagaccccagcccagaagttgtctggggctgccatgctgccacct

SEQ ID NO: 30337 - DNA, 1274 bp, Homo sapiens
ttccaaggtccacctcagaagcacttctgacatgctggctgggtttggcttttcttttttttaacaatatattttcccacatctttgagttttcaaaagtagacccatgtaggactcccttttcagatgcctccttcttaccaaaacactctcctttgtgtgtacatgtctggtgtaagtgcacatgtgtctgtgtgtgcgcatgcttcagctctattcccagagctgggcaagcagggctgaggccatgacaactctggttcacccctgaggttcccttgttatgaagacagcttccgtagagagtcctctgagggcccactgtgcctggggacttcctggacatactcatgaaacagcgcacaagaaagctttcaaattctaccaagtccccattgggtttaagaatgaggccgggcgcgatggctcacgcctgtaattccagcactttgggaggccgaggcgggtggatcatgaggtcaggagatcaagaccatcatggctaacacggtgaaaccccatctctacaaaaaacacaaaaaaaaattagccgggcgcagtggcgggcgcctgtagtcccagctactcaggaggctgaggcaggagaacggcgtgaacccaggaagcggagcttgcagtgagccaagatagygccactgcagtccagcctgggcgaaagagcgagactccgtctcaaaaaaaaaaaaaaaaaaaaaaaaaatgaatggctgataaccggggatagccttgccattccactccctgaaaaatcctgtttccccttaaattcttgccaggccactcgagagtggaggcatggcccgaaggcctggcggacagcagcagcagctgttggggtgatgccgcaggacaatgatcacggccactgctccatgaagtcctgggcaggctgcttgacactctggccttcccagctgcacagtatcaaaccaaatttggatccatctctagccactgtatacaatcctggcttttctttctcacctctgttttccttttgccccaatttcttctggtatctattgaatcctgtggcattgcatgtgttttataagccaactcaaatcctttctagtaatcacttggcaaacccttgccgggtggggtgtgagaggagcagcctcagcacaaggggctctcagcccagaggaccagtagcccaaaggaatccctgtcatttctctgggagcagacttgaagcatactacagccagggccagcggcgtcagcaagacaggaggggccatgaggag

SEQ ID NO: 30338 - DNA, 1274 bp, Homo sapiens
ttccaaggtccacctcagaagcacttctgacatgctggctgggtttggcttttcttttttttaacaatatattttcccacatctttgagttttcaaaagtagacccatgtaggactcccttttcagatgcctccttcttaccaaaacactctcctttgtgtgtacatgtctggtgtaagtgcacatgtgtctgtgtgtgcgcatgcttcagctctattcccagagctgggcaagcagggctgaggccatgacaactctggttcacccctgaggttcccttgttatgaagacagcttccgtagagagtcctctgagggcccactgtgcctggggacttcctggacatactcatgaaacagcgcacaagaaagctttcaaattctaccaagtccccattgggtttaagaatgaggccgggcgcgatggctcacgcctgtaattccagcactttgggaggccgaggcgggtggatcatgaggtcaggagatcaagaccatcatggctaacacggtgaaaccccatctctacaaaaaacacaaaaaaaaattagccgggcgcagtggcgggcgcctgtagtcccagctactcaggaggctgaggcaggagaacggcgtgaacccaggaagcggagcttgcagtgagccaagatagtgccactgcagtccagcctgggcgaaagagcgagactccgtctcaaaaaaaaaaaaaaaaaaaaaaaaaatgaatggctgataaccgkggatagccttgccattccactccctgaaaaatcctgtttccccttaaattcttgccaggccactcgagagtggaggcatggcccgaaggcctggcggacagcagcagcagctgttggggtgatgccgcaggacaatgatcacggccactgctccatgaagtcctgggcaggctgcttgacactctggccttcccagctgcacagtatcaaaccaaatttggatccatctctagccactgtatacaatcctggcttttctttctcacctctgttttccttttgccccaatttcttctggtatctattgaatcctgtggcattgcatgtgttttataagccaactcaaatcctttctagtaatcacttggcaaacccttgccgggtggggtgtgagaggagcagcctcagcacaaggggctctcagcccagaggaccagtagcccaaaggaatccctgtcatttctctgggagcagacttgaagcatactacagccagggccagcggcgtcagcaagacaggaggggccatgaggag

SEQ ID NO: 30339 - DNA, 552 bp, Homo sapiens
ctggtccctgagaggcggcagtggtgtctgaacacttgcagtgctccgcgagaaggaagcagatgttggttttattttatatgtactcatgtatacacaaatctgtgtctatacataaagatgcacatcacagcgttgacacttaacattagatgcactcagatgttttagtttttttgtgtgtgttttttcttttttwaaaaatttttttctctgttttttaaagccagttgtgacccactaaattgattttgtcactccctgtttgaaagtgttttattgcttaagttgggtggtaagtatgtagctgtttgttttattcctttttatacaggactcatccatttatatatgcttctgtcagaaagcagaaaccactcaaagcacatggggagaggatgcctctgtgcctctacagagcctgggccgaggtgggagggctgcctggggccccttgtctgaggagggagcctggattctgtggggagataggtttgtttcagatagtccatcgaagtggggttgagctcaggagccctttgcaagccccct

SEQ ID NO: 30340 - DNA, 1061 bp, Homo sapiens
ttaaaagtggaagtgggaggcagaagagtcagggtcagagagaaaccacgtgggaaagagtggaaaaccgcagctggctttaaagatggaaggagcacgagccaaggaacacaaaaggcctcaagaagttggaaaggcagagaaaacgggttccccccsagagcctccagcaggaaccagctctaactacaccatgaccccagcccattaagacctgtgtcggacttcccgcctatacaactgcattgttttaagccactgcatttgtggcaatttgtcacagcagccataggaaactgacagagcaaccaatttcaatgtttagaaagaggcacaaacaaaacacatctgtgagctcaatccacctaaggaccacttttctagtccagactgggcagagtcaagggcaaggactatttcctgggtgcccagcacggagcctagcacacagcagctctctgacattcaccccaagttaacgcaaggtcccttacctttaccacatggtcataaaattatccagggatttctggaaaatagagctgcttaactgaaaggagttctattcccaagagactgtttaatcacatagacattacccagaggccttgggaaactggcctggagtagaggagggaacatccatctcactgcaaacagaaaaaagtgagggctcttcaggtcctctggaagaaacctccaacctctccctcccagccaccctcagggtgccagcttgctcactgcagctccagataacttcggttgttcttcaacagcagaggaacacttctcaagtgggctctttttagctccccactttcaccagcacagagatgctctgattagaggtggggtggaaggcccacagtcctgcccactcaccgccaaaaggctacgtgaaaaccacagcccatgagtcaaacctcaccaagctcgcctgtcctgcctggagagtctggtcagcaggcagctgggcctctgccacatgtccagctcttcctcctctgcgccctccttgctcagctcaggcctctgcataatgcagctccctcggccag

SEQ ID NO: 30341 - DNA, 517 bp, Homo sapiens
caattggatctcttattctgtattactwctaaaaatatttccttgtaaggccttataacaaatagtgaacctcagaccactgcataaaattgaactttcaaaacagttttataatctctagaagtttgagtgtatcaagatcttctcattactatgtatgctaataaactaacttaactcataacacagtggcaggacatctggaaaatcattaatgtttaaaatttatcaggcatttaacagaatttgaatcctatattaaataactatttcgttttattaatttattacactatattctatacatataatagatgatatgttagagatttttaacatattatactatacatcgtgattttagagaaggaagattaattctttacagggtacaattttcttgatgaaactatctccatttttagctaaagaaactgatcttgattgtcaggaaattacattagtactccgtgcacattttagatgctttgtttgcaatcttaattaatttagttat

SEQ ID NO: 30342 - DNA, 517 bp, Homo sapiens
caattggatctcttattctgtattactactaaaaatatttccttgtaaggccttataacaaatagtgaacctcagaccactgcataaaattgaactttcaaaacagttttataatctctagaagtttgagtgtatcaagatcttctcattactatgtatgctaataaactaacttaactcataacacagtggcaggacatctggaaaatcattaatgtttaaaatttatcaggcatttaacagaatttgaatcctatattaaataactatttcgttttattaatttattacrctatattctatacatataatagatgatatgttagagatttttaacatattatactatacatcgtgattttagagaaggaagattaattctttacagggtacaattttcttgatgaaactatctccatttttagctaaagaaactgatcttgattgtcaggaaattacattagtactccgtgcacattttagatgctttgtttgcaatcttaattaatttagttat

SEQ ID NO: 30343 - DNA, 590 bp, Homo sapiens
tctttccatttacctatatgcatttggaattatatctggaacacattctgtaatgagatggatcaaaagaatttgtttttttgttacattaaaatatgtggaggatatccaaattttctgttataactagccaactctcatatccaccttagaaactaattttactttagagatgtaaatatgttttagggtaatacaaattattacatgaatgtataaatcattttcttggaaagaaatatatattytaaaattcctttaattttctatccggtgtcaatacctcatatgaaggttctctaaaattaaattggctaaaaatataaatttttgatgatatgcagggaattatttggtaaaagtaaagtactaacattttaataagtagaggctatactaaatttctctatattcatgtctaaatttaaaaaatatgtggataacaggaaaaactgtcataatataaatgtgcagttgaagctaagctagtatgacttcctcccacgtttctgaatcttaaaattcagaaagtctcagaaaccatactaggagtactgctttgaacagttcctttgaggtccactgtttga

SEQ ID NO: 30344 - DNA, 754 bp, Homo sapiens
tgggcctgttttggcagaatgaactgacctagaatcagcatggatcagactcacaaaagtatgcctgttccctcagcccccagcctccaccccaccatcattgcctgttattggctgagctcccgggccttttccctggactaaagtgttgtttgcttttcttctgcagctttttccagagatatgagcaaggttcacttaaataaccttatcagtcttaccttcaactcctcccctaggttccccatttgagcagtgtaatttctatgtaatcccttaggcagttcctgtggcctcccttctccaattttagtatgtgctgccgaagctagcacgtggcctctcttttctaagggcctccggggcaggtgtgtgtatgtgcatgcgggagggtggggmgtggtcacatacacatctgataacgtttttctactcctttcttcatcttgggctccactgagctccctcctttccttgcatctctttgtccttgactttgaaacatggaacacctgctatttcttggggggacatttcgagcctgatcgtctctagctccttcccgtctgcgaggcctgggatttgggctatcacacctcctgttctgaggctcgttttagttattttggatttctttgtattgcaatcacctaaagaatcctaggggttcttttccttccttattttctcctccagcccctacctaaattagttgctaaagggctggctttctgggttctgaattcttgccatg

SEQ ID NO: 30345 - DNA, 2271 bp, Homo sapiens
cagctccaactggggaggggaagaggagggtcattcctagctgaagtttgaagggtgccaatcacgggcctctcttccagccaggttaagaagcagtgggcagaaatgcaggagagtgggcactaaacagaagccagcatgcaaagacccagggaagaactcacttgtcatgggaaagagcaagtgccaaggtcatgaggtggcatggagctgggcgtaatacaggaagcggaaggccttgggggctgaacttgggtgaagccagggcagagcggacgtgacggaagctggtgtggacacccagcagggccttgcaggctttggagggcttccagaggcccctcagaggttataggcaggggagcaaatggaaactgtaccatcgcccagcaagttctggcagacaggcctccagggctataaggcaggttgggaagcattgtgtggtaggccgatcctctcagccccctgagcgcctggcccaccaatgcttgctcctggtggagtggccccttctaaggaatccttctttgggcaccttgtggtgctgatgggcactggggctcggcggcaacaagccccaactgctaacttgagaatgaagagcaaatatttgactttttttcacccttttctccctcctctgctgtcattttatacagccctgtttagactggatgctggttaatgggcgacctttgccctttggctaaaagctgtgaccaggaaatcccacctcccattaatgcgggttttgttcaggatcccaggaacgcctagctcacagcttctgctctgcaaacgcattgtctgccaggcttagaaaaagaaaatggaaaagaaaaacaaacaaagaaaaagaaaaaaaaaaaaaaaraaaaaaaacaaccttccactgttgaattaaaacagcaaactccaggcccaaagtaggtttcagtctctattaagataacaaaaggtcctaaatgccaggcctgggcgcaaactgtgcagacaagcgggtggccggagaaggaggggggtcaaggaagagagggaaactcaattgacggttacttttttttcagagttatttccggtggggtctgcccccacccctcaacaaattttgttgctctgagcattccaggcataaaaagtgaggccgtggagggcccttgagaccagcgtcatgcacagtgacatggcacagtgacatggcaacccagaggcaccttgatcttgactattctaatgcaatgcttttcgttcctggctccacatgggtgcccgtgtgttccaatcacatggccacagtctctctcttcctttcttattttctctctcctttgttgatgttgaatatgattatttaaaaggctttatccttttttctgctaagccactctggcccagagccatctctttcaccctaaaaattcgaactcttggcaaacagggctttctgacccattgtccactgggcttagcttgtccacctcttgtgacttacttgagagcatcagtgattgtgcaggctagggagccttccttatggctcccacctggcgtctcttccgcagcacccaggatagctcatggctaaaagcacatgctccaaaaatgtttggtcatgggaggatcaagtattaatatatgttagttattatttatgtcatgttaggcataatggctaatgattgtttctaagctagataggtgtatggaataaaaaattaaaaatagacaacatttattgactgctatttgtgtgttaatgacttaactcttaaaagacccttatcttgaccaggcgcggtggctcacacctgtaatcccagcactttgggaggccgagccaggtggatcaccaggtcaggagttcgagaccagcctgaccaacatggtgaaaccccgtctctactaaaaatacaaaaattagccgggtgtggtggtgcacacatgtagtcccagctactcaggaggctgagtcaggagaatcacttgaacccgggaggtggaggttgcagtgagtggagatccggccactgcactccagcctggtgacagagcaagactccatctcaaaacaaacaaacaaacaaacaaacaaacaacacccttatctcaaatctcaagattatactagggtttttgcaagttcctaaagattatgaaaataaaaaccaaatcaattagaacaaaaaccaaaaacaacccatttctttttttttttcttttttggagagacaaaaaaaattcatttaatttatatacattttattatat

SEQ ID NO: 30346 - DNA, 2271 bp, Homo sapiens
cagctccaactggggaggggaagaggagggtcattcctagctgaagtttgaagggtgccaatcacgggcctctcttccagccaggttaagaagcagtgggcagaaatgcaggagagtgggcactaaacagaagccagcatgcaaagacccagggaagaactcacttgtcatgggaaagagcaagtgccaaggtcatgaggtggcatggagctgggcgtaatacaggaagcggaaggccttgggggctgaacttgggtgaagccagggcagagcggacgtgacggaagctggtgtggacacccagcagggccttgcaggctttggagggcttccagaggcccctcagaggttataggcaggggagcaaatggaaactgtaccatcgcccagcaagttctggcagacaggcctccagggctataaggcaggttgggaagcattgtgtggtaggccgatcctctcagccccctgagcgcctggcccaccaatgcttgctcctggtggagtggccccttctaaggaatccttctttgggcaccttgtggtgctgatgggcactggggctcggcggcaacaagccccaactgctaacttgagaatgaagagcaaatatttgactttttttcacccttttctccctcctctgctgtcattttatacagccctgtttagactggatgctggttaatgggcgacctttgccctttggctaaaagctgtgaccaggaaatcccacctcccattaatgcgggttttgttcaggatcccaggaacgcctagctcacagcttctgctctgcaaacgcattgtctgccaggcttagaaaaagaaaatggaaaagaaaaacaaacaaagaaaaagaaaaaaaaaaaaaaagaaaaaaaacaaccttccactgttgaattaaaacagcaaactccaggcccaaagtaggtttcagtctctattaagataacaaaaggtcctaaatgccaggcctgggcgcaaactgtgcagacaagcgggtggccggagaaggaggggggtcaaggaagagagggaaactcaattgacggttacttttttttcagagttatttccggtggggtctgcccccacccctcaacaaattttgttgctctgagcattccaggcataaaaagtgaggccgtggagggcccttgagaccagcgtcatgcacagtgacatggcacagtgacatggcaacccagaggcaccttgatcttgactattctaatgcaatgcttttcgttcctggctccacatgggtgcccgtgtgttccaatcacatggccacagtctctctcttcctttcttattttctctctcctttgttgatgttgaatatgattatttaaaaggctttatccttttttmtgctaagccactctggcccagagccatctctttcaccctaaaaattcgaactcttggcaaacagggctttctgacccattgtccactgggcttagcttgtccacctcttgtgacttacttgagagcatcagtgattgtgcaggctagggagccttccttatggctcccacctggcgtctcttccgcagcacccaggatagctcatggctaaaagcacatgctccaaaaatgtttggtcatgggaggatcaagtattaatatatgttagttattatttatgtcatgttaggcataatggctaatgattgtttctaagctagataggtgtatggaataaaaaattaaaaatagacaacatttattgactgctatttgtgtgttaatgacttaactcttaaaagacccttatcttgaccaggcgcggtggctcacacctgtaatcccagcactttgggaggccgagccaggtggatcaccaggtcaggagttcgagaccagcctgaccaacatggtgaaaccccgtctctactaaaaatacaaaaattagccgggtgtggtggtgcacacatgtagtcccagctactcaggaggctgagtcaggagaatcacttgaacccgggaggtggaggttgcagtgagtggagatccggccactgcactccagcctggtgacagagcaagactccatctcaaaacaaacaaacaaacaaacaaacaaacaacacccttatctcaaatctcaagattatactagggtttttgcaagttcctaaagattatgaaaataaaaaccaaatcaattagaacaaaaaccaaaaacaacccatttctttttttttttcttttttggagagacaaaaaaaattcatttaatttatatacattttattatat

SEQ ID NO: 30347 - DNA, 516 bp, Homo sapiens
acgtgtgcatgtgtctttataacagcatgatttatactcctttgggtatatacccagtaatgggatggctgggtcaaatggtatttctagttctagatccctgaggaatcaccacactgacttccacaatatttttactttatgtttttttctttactgctgtgtaaatacttttgataataccaggtctctgcttttggagaacttgaagctttgaaggtagtctagatagtctttatttttcttctatttgtaagaattttacaagtggagagctttagtcttctaagttacctatgatttctcatatttagattctttttaaaagctttgctttatattatatatcatgtgttgtttattagttagtatatttcatgttggctgtttgaccacatagtgacataatgaccaagaagttaactttctggagagcrttttatgttagttttacactcaattgcggagacaatcactaccagtaatactaggtacttaagtaattgttagtggtat

SEQ ID NO: 30348 - DNA, 582 bp, Homo sapiens
tgtcttttgctggtgaatataataatgaaaaggcattaacgaaattgattttttaaaaatattgattgtcacaaaggaaatcattgcctctatttcaaaagtcagcaatgcagaaatgagaaaaccaacccayagtaaaactgcagaggtcagaggccaagttttatcttctctgtatgtgccatagcatataattggaagaaaagacctgacaaaggcatatttcccaatggccctactgagaagaaaatatctattgtggctagaactattaagatcaggaggctttatagcaatatttattcaccacagattaaattgtgaaaaatcaatatatttgtttaaaaaggtgaataacaaaaaaagtatattgttttctaaatctctttgaagattttcaataagggtgcaagtttttaccccacccatttccaaacacacacacacacagacacacacacaaacacacacacatctctcctgtttttaagtgcatgattgtcacctactttaatttatgccaatatccatgctagacctaggtgctctaattggatacaaaagcaataattgtaatgggat

SEQ ID NO: 30349 - DNA, 753 bp, Homo sapiens
cagagagctctaaagggcatgagcaacttgggggtctcataaccacagacactctcttttcagtggccagcaggtgctgggtgtagtttgatggagtatgcaaagcaggcaggctgttactggctaaaaatctgattgggctatttttaaaatacttcgatatataaaaatttaagtttgatactagtgaggttttgaactgacaggtctcagcctgcagtggagaaataaacaactcaggagccaatccatagagactatatttggttaatttatataatagctgagaaggggcaagagggaattatttggagtgatgatcactttctaaatcttgttagaggcttagattacacagataagtacatttgtcaaaagtcagtggatatacacctaagatttctacattttgttgtatgtaaatttgatatcaagagaaaaattcaaaataaataattgaactctagttaatgatatgtatgctgaagcattcagggggatgtgtactgcctgtatgtagtttaccctgaaatgccaaaaataaaatgaattattcaatggatggttggataggtatttgrtaaagcaagtatagtaaaatactaatggtagaatctatattgagatacatatacatgtgtttattataaaactatttcaacttttctttgtttcaaaattttcataatgaaatattaaagactactgtgtggtgaatagactcatgaccagttaggatgctataccattgta

SEQ ID NO: 30350 - DNA, 971 bp, Homo sapiens
tagcggaggagaaaagcaaaaggtcaaagttaagaaaaaataatcaaccgsccaggcgcagtggctcacgcctgtaatcccagcactttggaaggccgaggtgggcggattgcctgagctcaggagttcgcgaccagcctgagcaacacggtgaacccccatctctactaaaatacaaaaaattagccgggcgtggcagcgtgggcctgtagtcccagctcctcgggaggccgaggcaggataattgcttgaacctgggaggtggagggtgcagtgagaggagatcacgccactgcactccagcttaggcgacagagccagactccgtctcaaaaaaaaaaaaaaaagaaaaaaagaaaatcagccaggtcccacaggtgaggcagggtcttaaaagagaaagaaaatcacacctcaaaaaagaccagaaacaaactgggcatggtggcttgtgcctgtaatcccagagctttgggaggccaaggcaggaggatggcttcagaccagcagtttgagaccagcctggtcaagatgttgagacccccatctcaatagcaaaattcttaaaatttgccagctattgtggcatgcatctgtcgttcaagctgtgtgggaggctaaggcaggaggattgcttgagtccgcccaggagttcaaggctgcagtgagcctcaaaaaaccaaaaaaaaaaaaaaaaaacaaaaaaattagaaacagactagggatatcagaccaaggaagaaagatagtgccccagtagacaataccagactggctgaggtctgtgttggttatctattgctgtataacaaattactgcaaaattagctgcttaaaggagcaaatatttattttcttatatgctgtctgagggttgggaatctgcgatgacccggctggatggtctgggccagggtttctcaggctgttggctgaggccatactctctgaattcttgacatcgggctgga

SEQ ID NO: 30351 - DNA, 971 bp, Homo sapiens
tagcggaggagaaaagcaaaaggtcaaagttaagaaaaaataatcaaccgcccaggcgcagtggctcacgcctgtaatcccagcactttggaaggccgaggtgggcggattgcctgagctcaggagttcgcgaccagcctgagcaacacggtgaacccccatctctactaaaatacaaaaaattagccgggcgtggcagcgtgggcctgtagtcccagctcctcgggaggccgaggcaggataattgcttgaacctgggaggtggagggtgcagtgagaggagatcacgccactgcactccagcttaggcgacagagccaractccgtctcaaaaaaaaaaaaaaaagaaaaaaagaaaatcagccaggtcccacaggtgaggcagggtcttaaaagagaaagaaaatcacacctcaaaaaagaccagaaacaaactgggcatggtggcttgtgcctgtaatcccagagctttgggaggccaaggcaggaggatggcttcagaccagcagtttgagaccagcctggtcaagatgttgagacccccatctcaatagcaaaattcttaaaatttgccagctattgtggcatgcatctgtcgttcaagctgtgtgggaggctaaggcaggaggattgcttgagtccgcccaggagttcaaggctgcagtgagcctcaaaaaaccaaaaaaaaaaaaaaaaaacaaaaaaattagaaacagactagggatatcagaccaaggaagaaagatagtgccccagtagacaataccagactggctgaggtctgtgttggttatctattgctgtataacaaattactgcaaaattagctgcttaaaggagcaaatatttattttcttatatgctgtctgagggttgggaatctgcgatgacccggctggatggtctgggccagggtttctcaggctgttggctgaggccatactctctgaattcttgacatcgggctgga

SEQ ID NO: 30352 - DNA, 971 bp, Homo sapiens
tagcggaggagaaaagcaaaaggtcaaagttaagaaaaaataatcaaccgcccaggcgcagtggctcacgcctgtaatcccagcactttggaaggccgaggtgggcggattgcctgagctcaggagttcgcgaccagcctgagcaacacggtgaacccccatctctactaaaatacaaaaaattagccgggcgtggcagcgtgggcctgtagtcccagctcctcgggaggccgaggcaggataattgcttgaacctgggaggtggagggtgcagtgagaggagatcacgccactgcactccagcttaggcgacagagccagactccgtctcaaaaaaaaaaaaaaaagaaaaaaagaaaatcagccaggtcccacaggtgaggcagggtcttaaaagagaaagaaaatcacacctcaaaaaagaccagaaacaaactgggcatggtggcttgtgcctgtaatcccagagctttgggaggccaaggcaggaggatggcttcagaccagcagtttgagaccagcctggtcaagatgttgagacccccatctcaatagcaaaattcttaaaatttgccagctattgtggcatgcatctgtcgttcaagctgtgtgggaggctaaggcaggaggattgcttgagtccgcccaggagttcaaggctgcagtgagcctcaaaaaaccaaaaaaaaaaaaaaaaamcaaaaaaattagaaacagactagggatatcagaccaaggaagaaagatagtgccccagtagacaataccagactggctgaggtctgtgttggttatctattgctgtataacaaattactgcaaaattagctgcttaaaggagcaaatatttattttcttatatgctgtctgagggttgggaatctgcgatgacccggctggatggtctgggccagggtttctcaggctgttggctgaggccatactctctgaattcttgacatcgggctgga

SEQ ID NO: 30353 - DNA, 971 bp, Homo sapiens
tagcggaggagaaaagcaaaaggtcaaagttaagaaaaaataatcaaccgcccaggcgcagtggctcacgcctgtaatcccagcactttggaaggccgaggtgggcggattgcctgagctcaggagttcgcgaccagcctgagcaacacggtgaacccccatctctactaaaatacaaaaaattagccgggcgtggcagcgtgggcctgtagtcccagctcctcgggaggccgaggcaggataattgcttgaacctgggaggtggagggtgcagtgagaggagatcacgccactgcactccagcttaggcgacagagccagactccgtctcaaaaaaaaaaaaaaaagaaaaaaagaaaatcagccaggtcccacaggtgaggcagggtcttaaaagagaaagaaaatcacacctcaaaaaagaccagaaacaaactgggcatggtggcttgtgcctgtaatcccagagctttgggaggccaaggcaggaggatggcttcagaccagcagtttgagaccagcctggtcaagatgttgagacccccatctcaatagcaaaattcttaaaatttgccagctattgtggcatgcatctgtcgttcaagctgtgtgggaggctaaggcaggaggattgcttgagtccgcccaggagttcaaggctgcagtgagcctcaaaaaaccaaaaaaaaaaaaaaaaaacaaaaaaattagaaacagactagggatatcagaccaaggaagaaagatagtgccccagtagacaatacyagactggctgaggtctgtgttggttatctattgctgtataacaaattactgcaaaattagctgcttaaaggagcaaatatttattttcttatatgctgtctgagggttgggaatctgcgatgacccggctggatggtctgggccagggtttctcaggctgttggctgaggccatactctctgaattcttgacatcgggctgga

SEQ ID NO: 30354 - DNA, 521 bp, Homo sapiens
gtgaaaaatcagaaattattccatctgcacctgctaaattgcaatcattaacttggcgtgcattaaaaaatacaagaaacttaaagaataaacaaaagaaaagtatgatttcaacaatagaaaacagcatctaaatgttaatttattagaattgtttatcaagagagttattaaataatatttatcaaaaatatacataaatttagctagaaatcctaagmaaatgttgagcctccccaaataaaagctgagagtaaaaatgatattaaatgttgggaaccacattttaagctacatattcactttatccatagattcattcattcagtaaatagttactgggtgactatcatatagtaattactgttttaggtattggacatacagcaatgaacaaaaacagtcttctcatggagcttatattctaggagacaaaaataataagaaacaaataaaaatgtggcatttaatgtcatgtcaaggaatggtaatttccttaaggaaaaattaagcagagtagg

SEQ ID NO: 30355 - DNA, 514 bp, Homo sapiens
attgaggagaaatcagccaaggagactgcaaatatagaccagaaaattaaaagaattggtgagaggtgtcccagaggccaggtgaaatgcttcaagaaggatgatgtgataaattgcaccaactacaactgatatgtcaaataagagaagactgagaaataatgacccagtctttaaatgggagtcacrggtataagtggaaaaaacgtcagtagaaaactgagtacaaagtctgggtgcagtgagttcaagagatagtgagaatggaaagtccaggaagatttgatgtgataaagagaagtgggaagataactgaaggcaggacttgttttctgatttgttctgtgtggaaactggacaatttattgcactgcaataagtgcaagtgtatctcatcaattggataaaaacccaaaccaaatcgactactcttcaactacagtaaagaatatcagaggtattcttttaaatttattttattattaaatctatcaaacagaaaagtgagtatata

SEQ ID NO: 30356 - DNA, 1304 bp, Homo sapiens
  misc_feature (1)...(1304): n = A,T,C or G
gtgtcatgaaagcttctcatcagaggcccagatccttcaggtaccagaccccatgtatccaggcggatcccacctgggagcccaggcagcccagggcttctgaaataacaacacctggcctggcatggtgactcacgcctgtaatcccagcactttgggaggctgaggcgggtggatcacctgaggtcaggagttcgagaccagcctggccaacatggtgaaaccctgtctctactaaaaatacaaaaaaaaaagtagccgggcgtggtggcaggcgcctgtaatcccagctacttgggaaactgaggcaggagaattgctccaacccaagaggtggaggttgcagtgagccgagatcatgccattgcactccagcctgggagacaagagcgagactttatctcaaaaaataaataaataaataaataaataaataaayaaaaacaaaaaaaaaacaaaacaaacagaaatagcaacacctgatagcatgtcccttcagagaccctgccccagccatgaggtcagtggccatacctggcgtatggaatacaagttccatgaggtcagtggccacgcctggcatatagaatataagttctttgaggtcagtgggcacacctggcatatggaagtggcacagtaaacatgtgttgacctcaggctcctctcagggaggatgcctctgggttcaggtcactgagttttgcaggggaggtgcatattgtccttgagtgccgggtaaggtttgggcacctggagcaccaggggtcagtgagagggaggcgagagggcctggaacacaaggctccagggaggtgatggccacaggggaagggaagaaatgctgattgaggactgggccttgaattggggaaagaattgttttatttgccacccatatgagaaaggaggaggggagaggcctgcaggaaaggagagtccaccttgaggatttattgcaaggtgagtggccctatgttctctgtaaatcactactacacacttgggactgaggcacatcgtttttaagacatctgctgacttggacaattatagggagccttgaggtcttttagcaggtggggtctaactggcagaagcaactgagaggctcaaggagaggagaaggcttctcctctgcgctgtgcccagcatggctgggacagggtccctgagcccccagcggacatgctatcaggtgttnnnnnnnnnnnnnnnnnnnnnnnnnnnnnnnnnnnnnnnnnnnnnnnnnnnnnnnnnnnnnnnnnnnnnnnnnnnnnnnnnnnnnnnnnnnnnnnnnnnnc

SEQ ID NO: 30357 - DNA, 937 bp, Homo sapiens
ggatcccttgaggccaggagtttgagaccagtctgggtaatgtagcaagaccctgtctctrtgaaaaaatgaaaaaacaattgctgacatggtagcacacacctatagtcctaactacttgggtggctgaggcagtaggatcacttgagtcctggaggtcagagttacagtgtgctgtggttggaccactgaactccagcctggctcacagagtgaggtcctgtctctaaaaaaatcaaatgtgttaaaaaacttattagaccctctttgtctttatgaagtcaaaggtccaactgagtggaaaatgcaaccttcctgatactctagatcactaaatgactgcgtggttcaattgcacacacactgtcttgtagcttggaccaggcccttgtctttgtcctgaaaaaaggcagccggacctaagtgcagatatctcataggaattggcagccaggagggtgcacgtacaggccctttgaatattcctgagagatgtcacagtagtgaactgcatgcatctcctcggaaaaatccggagggctttgcctcagcagagaaggcaaatccaacccaagatgcatgaacaataaataacaactgttctgagttagcttgaaagctcccagttgcactttgtttcaagttgtttgtgctaaccacaattttttttctccccttctttcccaccagggcttatttcaaaacctttgtccctcagttccaggaggcagcatttgccaatggaaagctctaggaaacaccagtcttgagaggtggccagccagactgcctgtccacatgcgtgtcagcacatacagccgcttcctggaagccgcctggaatgtcttcacggcagcgttttgctcacacagcagcttttgcacgccccaggcagccccgactgctgaaatccaacttgagctggctggtggtccct

SEQ ID NO: 30358 - DNA, 768 bp, Homo sapiens
attataattaataaaagacgtttattttctcacagttatggaggattggaagcccaagatcaaggtgcttggttgctttctcctgaggcctctgtccttggcttgcagagggctgcctttttgctacgtgtttacatggcttttcttctgtgtgcgtacatccctggtatttcttcccttataaggacaccagtcattatgatctcatttaacctgaatttccttcataaaagccctgcctctaaatacagtcatcttgggggttaaggcttcaacatatgaagtttgaggggacacaaatcagttcataacaggggtaaagaaatatctcyataggacagttttgcatgtgcctctgctgtgtttctagtggtttcacccattccagaagaattttatattaatttctgatcttgggggttttctcaccatacccaacttataaattcagatctcacacctccattttgatttatggcgggtggctcttttttccagggaccagagtagacagcaatcttctcgttcttcctcaggcaagtgggaagagtttttcaactcataggttcatgaaaggaatggaatctgagactcaacgttatgcaagagcctcccttcccatggccctgagcctaactctcctgtctcagtccacgtgttaaaactccaactcccagccagtaagaccttcatctggggatggtcccctgtgggccatgctgctgcagctcttaattgcctctctggctttgctctcttttttatttt

SEQ ID NO: 30359 - DNA, 768 bp, Homo sapiens
attataattaataaaagacgtttattttctcacagttatggaggattggaagcccaagatcaaggtgcttggttgctttctcctgaggcctctgtccttggcttgcagagggctgcctttttgctacgtgtttacatggcttttcttctgtgtgcgtacatccctggtatttcttcccttataaggacaccagtcattatgatctcatttaacctgaatttccttcataaaagccctgcctctaaatacagtcatcttgggggttaaggcttcaacatatgaagtttgaggggacacaaatcagttcataacaggggtaaagaaatatctctataggacagttttgcatgtgcctctgctgtgtttctagtggtttcacccattccagaagaattttatattaatttctgatcttgggggttttctcaccatacccaacttataaattcagatctcacacctccattttgatttatggcgggtggctcttttttccagggaccagagtagacagcaatcttctcgttcttcctcaggcaagtgggaagagtttttcaactcataggttcatgaaaggaatggaatctgagactcaacgttatgcaagagcctcccttcccatggccctgagcctaactctcctgtctcagtccacgtgttaaaactccaactcccagccartaagaccttcatctggggatggtcccctgtgggccatgctgctgcagctcttaattgcctctctggctttgctctcttttttatttt

SEQ ID NO: 30360 - DNA, 549 bp, Homo sapiens
tacttccctctattaataatcacctaaaccatacactcagtcttctgragtaaatttctttatctttcacttcacaaataaacatctttgatggatgaaaacaccgcaggaaagccacctaagcagatatgacttctcaacttttttttttaagtgatttccattcatcactaattccaaacaaaacaattacaaactatcataaaattattagaaagtgaaaatgggaagcattggttaaatatgtgtttagtatgcttcaccatgtcctcaaacatatttaaaaagttaatccacacttctttaagtgcattgggggacttgctttagattaagaaatatgttaactatttcaggacactaaggaccttacaaatctgaattagctcagattggctgctatctcctcaattattttctgataaataagaaacaaacagtaaatagcaacttgcagaaaatctaccagtagtacacaagggcagccaaacttcaaaattcttgccactcaaactctagacggttactatttactaaaatgtaaataat

SEQ ID NO: 30361 - DNA, 751 bp, Homo sapiens
agcrgaacattgaattatttggctttacttactaaaaatgtacatgagtagatgggcttctgtctcagtgggatcaggggtcaactaatatcaaccaaggctcattctgtcccttcatttcctatgtcagctctgcttttcaggcaagctgttttgagagagcagcaaaaatggctccataaagttcacatcacttacttccttacaaatagatatgccaataaaaagaaagcacctcattcccagcagtttcatcaaaagttcagggatgacttccatgagcccagcttggatcacatgaccactcctgaatcaattaccctgctgatctgattgcccagggtgggtcagccttcccaaatcacatggactagtattgaaagacaggtcctcccatgaaaaaaaaaaaaaaaaaaaaaaaggaagggtagtggcagaggaatatgagtggggggggcctcatctctatataaaaagtatgagcgtatttgtgctcttttgtacattcatttgtatagtcactgggaaaaaaatgagaaaaacccaaacacggctttctatatgcctctgtgctttgttttcaacactgagctgtgagaaatctagttactaaaatgaaactttgaaaaaatataacaatttgggacaatggggacacttagctgatgcagcacaggtgaacagttcttcttttgtgcccaagaggacacaattcccaggaggctgcatgtggtctcctaggacaagcctg

SEQ ID NO: 30362 - DNA, 751 bp, Homo sapiens
agcggaacattgaattatttggctttacttactaaaaatgtacatgagtagatgggcttctgtctcagtgggatcaggggtcaactaatatcaaccaaggctcattctgtcccttcatttcctatgtcagctctgcttttcaggcaagctgttttgagagagcagcaaaaatggctccataaagttcacatcacttacttccttacaaatagatatgccaataaaaagaaagcacctcattcccagcagtttcatcaaaagttcagggatgacttccatgagcccagcttggatcacatgaccactcctgaatcaattaccctgctgatctgattgcccagggtgggtcagccttcccaaatcacatggactagtattgaaagacaggtcctcccatgaaaaaaaaaaaaaaaaaaaaaaaggaagggtagtggcagargaatatgagtggggggggcctcatctctatataaaaagtatgagcgtatttgtgctcttttgtacattcatttgtatagtcactgggaaaaaaatgagaaaaacccaaacacggctttctatatgcctctgtgctttgttttcaacactgagctgtgagaaatctagttactaaaatgaaactttgaaaaaatataacaatttgggacaatggggacacttagctgatgcagcacaggtgaacagttcttcttttgtgcccaagaggacacaattcccaggaggctgcatgtggtctcctaggacaagcctg

SEQ ID NO: 30363 - DNA, 798 bp, Homo sapiens
ttttgcaactctctgtattgctctttgcctcagttctttcatataacaaccagaagtaaaaacaaggttattgtgaaaattaaatgaattaaagtaagtggagtgcctacaacacccccaggcacacggtcagcactgagcatgtttttcattactactcttaatgaggtaagaatgagaaaacaggcgccagccatgagcctggggtttatctggcaaaggcatcagagaccccacttttaacatcctccattcattcatttgaccctgataaggaaggagtcccatgggagaggagcaagcctccaccttggggccagacatctcatgatcaaagttgaactctaccactgttcagctgggtgactttgggcaagtgactttccctctctgatcctcatgttcctttttgataaaaacagcaaaatgtcaggcctatggggattcaaggagccaaaagaaaaatgtgtgtcttagtctgaatttcctggaagtagatcccgaggcaaagattcaaatacaaaaattttgtttggagataacgctaggatattaattcgactgccagttcttccttagggtgytaatcccaggaaacatcagtggaggagtggggaactgagacaggaaaggaatgcagcagttaaagggaccttcatcaagaaagtttccactgtggcagccaggactcagccctgccaggtacctctgagagacagcacagaacatgtgcttcagagtcatcatacccagagcaagggaccaggggtatttatccaccaatacccaccagtcact

SEQ ID NO: 30364 - DNA, 550 bp, Homo sapiens
caaactcttaggctcaagctgggactacaggaatacaccactgtgcccagcttcaagaaaacatttttaaacacgttcaggccttaataggtctattacatcaaaatcttcaggggaaagcctacaattgtagatttttaacaaaatgtcctcaggtcactgtaatgcacaattctgagaatyagtgcagcagacaatcacttcagtctcacctctcacccacatggctaattcctttatcagttggagatgtggccaaaaagagaaaagagtaagagatagtgtcatttattaaaactccagttaagtttcctggctatgggtagaacagggacaagtaaactcaaaatcccacttgattttgctatttacaagctccttatctcccaccttcccactaagacattctagatttgagaggaggctttaggttcttatctaagtggctgtttctgccaggatgagcaataagtcagttaataatttgttccaccttctgctgaagtgtttctcacttcgtcaccacatattcactgccaatctggtttcc

SEQ ID NO: 30365 - DNA, 549 bp, Homo sapiens
cctgaagtaacatacctcaaaataataaaagccatctatgacaaacccacagcaaacatcataccaaagagaaaaaaaagctggaaggatttcccttaagaactggaagaagatgagaatgccaactctcaagactcctattcaacataaaactgcaagtcttagccagagtaatcagaaaagagaaagaaataaaagacattacatgggaaaagaggaagtcagattatctcacttcactaaggatatgattctataccttagaaaactctaaagactctgacagaagtcttttacaactaataaactatttagtagtttcagaatacaaaatcaagttacaaaaatcagyagcatttctatacaccagtagctttcaagcttacaggcaaatcatgaatgcaatcacatttaaaatagctacaaaaaatacctagaaatacatctaaccaaggaggtgaaaactctctacaagaatttgtagagatggaaaaacattccatgcttgtggatcattaaaatgaccatttctcctacagcaatctagag

SEQ ID NO: 30366 - DNA, 892 bp, Homo sapiens
cacaccccttccctgcgctctcacctggggcccaagccctcccaactggcttttcctgttcctagctttgtgtggtgcaagttccccaattatgcccacattatctcagccactgggcagcctccagcagcctgggggaggggtggggagcacccaattatcctgctggagagggcctagggcttagctgcttgccaactagcccgtcagcaagagtactgggccgtctggcccactgacctcaccatggaactgtatctggagtggggccacagctgcactgggctgtcatgagacagttaggaccaggaggaccactgggactcgggaggccagtctgctgccttacagaggaggaagctagggctcagaaaggggaggtgactggccacggtcccactgcctgctaaaggcagaggcaggctacagcccagccttcccaactcgtggctggatacttctcccatcgtattcccaacccatggggcctctgcccagggagcatcagctccgaagcaccccacaggctggcagagggaacagctggaggagtgagrgtggggataggcctgatggaccttgagggctgtgtggatgtgaatcagcacagagaagggggaacctcagggaaactttcagaacacggtagggcctggcttggtgaagccaaagatagacttattcagcaagcatttcttgagtagctactttatgctgagcaccagggatactgcagtgacctagagacctggcctgtggcctctcgagcggaagagaggggagcaacttactgcactgaccatgggttttggggccctcagaggagcctgtgttgctacaatatccccgtcacgctgaggaggtgagtgagcataagccccaaattcccact

SEQ ID NO: 30367 - DNA, 1169 bp, Homo sapiens
ggatccccacctgttaggaaccaggcaacacagcaggaggtgagcagccagccagtgagcaaagcttcatctgtagaaacagccacttcccatccctcacattactgcatgagccctgccacctgtcagatgagtggtgccattagattctcataggagcatgaaccctactgtgaactgcgcatgccagggatctagattgcgtgctcctaatgagaacctaatgcctgatgatctctgactgtctcccatcacccccaagtgggaccacgtaattacaggaaaacaagctcagggctcccactgattctatgttatggtgagttgtgtaattatttcattatatattacagtgaaataatcatagaaataaagcacacaataaatgtaatgggctcgaatgatctctgcaccatcccttccccttctcccaggtccgtggaagagttgtcttcaagaaaactgctctctggtgccaaaaagtttggggaccgctggtgtaaatgtttctaagaatagttaagcaacttaagcttcacgtgctacgaagaatacagctttaaatgctaataaaaataggtgcaaatgaaaacactctttctgtggtccagggaatcttaaccattctatcagaaagacttgcagcttggagctgcagctgccctcccacatcctgtccactgtaaagccctgcaacacacacatacacgcgcacacacacacacacgcacacatgcacatacatacacatgcatatrcttgcatacacacatgcacacagatgcacatacataaatacattcacatgtatatacctgcacacacacacatgcacacacacatgcatattcctgcaaacacacacagacacacacacacacacacacacgctgtgcttcatgccctcactagggtggcctgggaggaaatgcgtgtttttaggagaaatgaagacaactcaggcccctcattctcctggtgtttgcacaagtgccttctctgcagaccatgcttcagcctctttcttggttctccctcttactgaaagagagaagcagaggcccggcacatactcggctgcttagggctcaagccaagttcgcaagcttcctggggagcctagtgagatgaaggcactgcagagcctccccaaaagagtcgtcggcttt

SEQ ID NO: 30368 - DNA, 545 bp, Homo sapiens
attatattcatttaaatataaattttaatcctaaaaatgtactgcttttagctgcagcccacactttttttggtttgtttgttttgggggaaattctccaggcagtagttatggctgttgttgcttgctgctgctkctttcctatttttgttgatagctttgtgagagtacctgtaatgttgacatactataaagggtacatcttaaaatatgtaatttgataagttttctcatgaatgtaaccaggtaatgagcatattcatcaccctagaacatttcctcatgcccctttataatccttttctccccttttccttgctccttccccaggcaattatgatttgattccgtgttattttttttttgtacagagtctctgtcacccaggctggggtacagtggctctatctcaacttactgctacctccacctcccggcttaaagcaattcttgtgcctcagcctcccgagtagctgggacttcaggtgtacgccaccacacctggctcatttttgtgggtttttatttgtattaattaattaatt

SEQ ID NO: 30369 - DNA, 1736 bp, Homo sapiens
ggtaaaatagttgaacaaggctcttgggtggggcaataatgaaagccaggttgagaaacaccacattgtaagcccttaactgttaaaacttacagcagcagttggaactagaattaatattccttctctagaaaagtcatttgaatgttaaacattaaakgttggtgttggcttacatggtaaatagtgatttttatttgttctttcctctctagagaattgttgtggttagtcatgagaacagtgcttcagaaatcaattgaaaaggttacaagccagtaataacatttggccttgccaattaaatagccaagggaaacttgaacattcacttcagtctttcatcctggggagcgtgaccactctacaaggaggcagaaaacacatggcgtgtggatgtggatgtgggtgtgggttgggggactcaagaatcttagattaggtttttttttttgcttttgttgacagcctagcttcccatctacaaatttggatattttttagaagtctaattttttaaagttagcgtatattacataacttatatgttgtgatcaatacttgaaatttttttttttttttttttttttttgagatggagttttgctcttgttgcccaggctggagtgcaatggcaagatctcggctcactgcaacctccgcctcccaggttcaagcaattctcctgcctcagcctcttgagtagctgagattacaagcacctgccaccacgcccagctaattttttgtattttcagtagagatggggtttcaccatgttagccaggctggtcttgaactcctgacttcaggtgatctgcctgcttcggcctcccaaagcgctggggttacaggtgtgagccaccacgcccggccccgaggaggtggatttcttatacctgggcacagactttgcctggctaagttcacccaaacaccatatagcttaattagtttgaggagtaaaactccagtgataattaggactgtcattttgatagcagatttttcagaagtattctacaaaacatgagatctgttggttgttaataagtttgttatgagaaaaaaagttctgtagcccaataatgtagggaaataatcgggttaaacagagtgaaacagttccttctcataaccatgaatttcttcatctttaatttctgttgttcccaaacctgttttgaccagggagccttttccagggagaaaacccatgagcacttccctgcacacaaatatcccgtcaaagccagcgctagaccatgctaacacttctatcccagcacactggctattgagaatgcatgaaatggactatttgatggtgctgataacaaaagtctgcatataatccttttttttttttttttttgagacggagtctcgctctgtcgccccggctggagtacagtggcgccatctcggctcactgcaagctccgcctcccaggttcacgccattctcctgcctcagcctcccgagtagctgggactacaggcgcccgccaccacgcctggctaatttttttttttttttttttttttttggatttttagtagagacagagtttcaccgtgttagccaggatggtctcgatctcctgaccttttgagccgccgacctcggcctcccaaagtgctgggattacaggcatgagccaccgcgcccggctgtctgcatataatctttcaagttctctaaaataacagaagcttagcctctgtaggagaaaa

SEQ ID NO: 30370 - DNA, 942 bp, Homo sapiens
aaaccctgctctggacccagccacatgccaggctcagggagggaggatcggttttcccacagcccctctgttagggtgacccatcttccaagttggcccaggactgtcctggttttagcactgaaaagcttatgtcctgggaaacttttcagtcctggacaaactaggacagtggctcaccctaagtctaatgcatctcttctgtataaatggagttctgcaaaattcagtgcatccccgaatcctactatccttcctcagtttgaggaagcactccctggtgcacagagttggaggaggaaggtcctgggaattctcaaggtctgaactgttttgcaaaggctgtgacaccagcagatgctgccttgccctggaggcccttaaggagagagcccctccttcctcagggcctgcagcttccctggttgccacttccctgtggtagcttctgagcctgcagccagggcagccctccctcaccttacctaatgttttgcgcaaacagcctggccctcctaggcccagaacttctctggcaatttgcgggaggctaggaaggtgagtcaggtgtagtgttactccggcaagccatgcatatcgatgtcccagtttcccctggtcactctgatttctggttcctagagcccggtgcgggctcagcatgttataggtgctggcttcgagtggttgagcccactcaggaggaggaagagaagggcctgccgcccgtacgggagctggatgggcttcttctcctggcctctgccttccaaagatcatcagagaggagcaaagaagagactgccagactgccagagcccacagggattttgtggggtttgtttttcctcagcastccctgcagaggtgaggacatgaataaaagaatgagggaagatttattgttctcacttcttggcagtgagcctgtatttgtatagt

SEQ ID NO: 30371 - DNA, 965 bp, Homo sapiens
agtggggagtaaatgtgttcctacctttaaggcttccactgcagagagggtcagaagggagatgagacattgaaggaggtagaggggtcagagtgtggcagtctatattaatatatggagcatttgggagccaccacatatttttgagcaagggagagataggacaggaaaggaaggttagtctgggagtgaggggtatgaggtaattgaaggaggtcatttgtgagtctgaaattacagttggtgaaagcccccaaaggcttaaacctgaggagaacaaagctgaagtctgattaatgggttttggcagatttttttccccaatatcccttcaaaggcaaaaaataatagagacactgttttttccattagtaaatacactcaacgtctccttatttgtctgtagctgtttcaaaagaaaatagctttgtttttaagagcaactgtgtaggccccggtgtagctcatgcctgtactcctagtactttgggaatttgaaatcagtctgtgcaacatagaacccatctttacaaaaaattaaaaaaaattagccaggtgtggcggcacatgcctgtagtcctagctacttgggaggctaaggtgggaggatcacttgtgcccaraagttagaggttacagtgagctatggtaatgacactgaactccaccttgggcaacagagcaagatcctgtctcaaaagaaaaaaaaaaaaaagaactacaactatttataagtatttctatatttgataataattcaatataaattcagttatcttgaagacttggcgtaaggagagcctggctaaattactgggttcaattcctatggggagatgatgtcgcagagaagtcaattggttaatatataaggaactcctacaaatgcaagataaaactgtaaacaccccattagaaaaataaggcaaaggcttaaactggcaactctaaaagaagtaattcga

SEQ ID NO: 30372 - DNA, 1105 bp, Homo sapiens
tctcacacaaaaagctaacaatgcttacaattttgttggggtgaagtccctaagctcggtggtagattaccaagagggactaaatggaggaaggcagaatgtcacagaacctattctttggctctttgggtgggtggatgtcctggggtttgtatcacagctacttttttttttttttttttttaaacagctaccaaatccatgaatagtccaaacaatactgaacagttctgtttctgcaggtggtctggggtcttaaccatcttcttcatcatctgtttctctcttcctgttttcaccttttccgctttcttcctcctcttcatcctcatcttcatcctcatccatcttcatctttatcaagtccaaattcttcttcctcctcrctgacttcatctttgtcatcatccccttctacatcttcgtcttcatcttcctcttcatccaactcctcttcttcaccatcctcattctcctagtctttctcatcttctccttcttcatcctcctcctctttatccacaccatccacctgggcatctgagtcaggggcttcctggtcctctgggtcataggtatccaagcaggtcagctgaggcaggagcttgaagacactctcttggtagtcattcaggttaataacctcacagttaaagaggtccaggctttttagacattccaactttttcaaaggttccaaggtgctgatatctttcagtttttttccacttaagtttaaatgtgtgagatttggaagtttttctgcaaacatattcagacctccaaagattctattttcactgagtacaaattttttcaatttaggcagcttggggagatttgaaattgaaatcaaacctacatttattaaacggaggaactctaagttcacaaattcagctgttaagctctcaattttccagtcatttgatttgcagttgtccaagacatgttctcgaaccctctttaaacactcttacatctcagctgaaaaacgtcgagcacgccaggtaaacctgatggacgaattcccacaagttcgcggcttgttaaccacagccacctgagggcacgaaacccggctgcttgtgggaccggagcgggg

SEQ ID NO: 30373 - DNA, 1231 bp, Homo sapiens
aatacatgatgggagtcatcaacatataaacccattgaacaccatatatggatgagagttttctcttcagcagctgtgaggagttgggatgaccacacgcagtgcctccttccttgttcgtgagcactcagtgcagggcaactgacagcaattaggacggggagacacgaagcctccccccgccgcaggaattgctactgcagatcttcccttcttgtggaacactgtggtctctgtgggtgagggagatgctctgattcatcgtccacagggctgtagtattttgatgctgtagtccaataactgtattttctgtccatattaggccgagagtaggggcgtcctccagggttgtataaaccatcagtagccaattcatttgcacctgctacattatccactgatgacttcaatcagctaaggcagccaagcaacaagaggcactacgtgggcaaaacgttgagtcatccgcatatctgccctctgaacacacgaaaatayccccactgtgcatcctgagtaacatttgtgccaggttcccaggcaaacttcctcctgagcttcctcctccactcttccctgctccaggcactgagccctacccactctcagcctctcaggcttaagggccgaatcatccactctcagagcttaaaggaaaaaaaagaggaaggaagcagtgagacttgatttgtaacagccctaactatggagctggaagatctgggttcagatggcagcctgggttccctagttgcatagtagatctcatctttctgagcttacacttcttcagccgtaaaatggagatgataatattaactgctgctgctgatcttttgacaattgagataatgtatttttcaagggcctaccatatactaagagctaacatttttgagtgtttacattttatcggatactcttccaaaccatttacacatttgttaactcatttcatctttataacaccctacgataatcccaaggcacaattatctttattttataagtgaagaaactaagccacaatgaagttaagtaaattgttcaaggccccagaactagaaagtggtagaaccacaattttccgccactcaaaagtgggctgaccctcttcgtatttacatcaggggttctcagaatgtggtcttcaggccagcagcagcagcagcggcagcagtagaaacttgttagaaatgatctcaggacccacccagagctacagaca

SEQ ID NO: 30374 - DNA, 807 bp, Homo sapiens
cagtggtccagggcatgcgggagtggtgggcctcctgtgccatagtccaacgcgcggcggggcgggggtcacctcgtcctgcagtcaccatgcacgagaccccggtcctgctgtgcctcagtccagtgcgcggtgggacggctgttctgctatgctgtagtgcaggacgcggtggggcagcagtaacccagagagcgccgtggcagggggtcctccagtgctggaatccagtgcatggcgggtcaggggtcttaccgtgccgaagtcagtggcaagggtcctcccatgccatagtctagggggcgaccgggcagggttctctagtgcaggtgtccagggtgcggcggggcaggagtcctctggtgcagaagtccaggacgtaatggagtgcgagtcctccagtggcggagtccagggctctgcggggcagggttctcccatgscagagtgtagggcgcgttcaggcgagggtcttggcgtgcagtagtccagggtgcggtggggcaaggacagtccagacctccatggcaggggctcctctgtgcaggagcccagtgcccggcagatcggggtccctccgtgctgtagtccagggcacggcaaggtgtggatcctctgtgccctaaccagggggcggtgggtcacaggttctcccgtgtcttggtctagggcccagcgggactggggtcctggagtccacgcggtagcccaagttgcctcaggaccaggtcctgtggaaccacagtccagagcacagaggggcaggagtagttcagggcgagccacggccgaggtcctcgggagcca

SEQ ID NO: 30375 - DNA, 807 bp, Homo sapiens
cagtggtccagggcatgcgggagtggtgggcctcctgtgccatagtccaacgcgcggcggggcgggggtcacctcgtcctgcagtcaccatgcacgagaccccggtcctgctgtgcctcagtccagtgcgcggtgggacggctgttctgctatgctgtagtgcaggacgcggtggggcagcagtaacccagagagcgccgtggcagggggtcctccagtgctggaatccagtgcatggcgggtcaggggtcttaccgtgccgaagtcagtggcaagggtcctcccatgccatagtctagggggcgaccgggcagggttctctagtgcaggtgtccagggtgcggcggggcaggagtcctctggtgcagaagtccaggacgtaatggagtgcgagtcctccagtggcggagtccagggctctgcggggcagggttctcccatgccagagtgtagggcgcgttcaggcgagggtcttggcgtgcagtagtccagggtgcggtggggcaaggacagtccagacctccatggcaggggctcctctgtgcaggagcccagtgcccggcagatcggggtccctccgtgctgtagtccagggcacggcaaggtgtggatcytctgtgccctaaccagggggcggtgggtcacaggttctcccgtgtcttggtctagggcccagcgggactggggtcctggagtccacgcggtagcccaagttgcctcaggaccaggtcctgtggaaccacagtccagagcacagaggggcaggagtagttcagggcgagccacggccgaggtcctcgggagcca

SEQ ID NO: 30376 - DNA, 572 bp, Homo sapiens
tgggactccaagctgtacggcagatgcaggtcttcccaggaattccagcctgtctttcctgaaggccagcagtattgatcttaggctgcctagccagaccctacaattactactatccagagctcacagcacgatggagtgtccatcatcagctctcctcaaagtcacaggtgacagtccaaactctgtgacagtgtgaaaagcataagatcagctctacatcaatatcccattggagaaaactaggattattccctttgtgattaaggtccgtttcgttttccaaacatctccgttgacagargacagcaggagagtccaggcaagggtgagtgagaaagtcccctcagactacccaggtcctgcagacctgagccctgggattttgactacagataacacatactcagttttcagggcagagaagaagaaagggaattgtgagaatcaagtctacagggaaggaaaatggattagcagaaagagggtcaactgaatcagtctgagtcagacgtgcccagttttacaagacgaggggggatagctgtgaaaaccatgtggttttaaggacc

SEQ ID NO: 30377 - DNA, 2285 bp, Homo sapiens
tggaaaaggttgggaaatctccacctttcgagatcatggagttctggcatgttagacctagaaggaaccttatttcctcatttatagttgggaaactgagtcctttaataaaaaggaaagacaattaaattacctgtcctagatggtttagttactcagcaaccagaagacataatgtcagaccagatgttctcttgggkttcctataaactccactgttctttgatcttgtgattttgtgttggacaccagccaatgaaacccctgagcaatcaggtttatactctcctcaatggccttagagaaagagtatggcctgggtggagacagttgtgtggaagcccacagttctgtcacgtaactattttcttctttagaatcttctctcttttggcatcagctgacacaggaagtggtaaagctattatctgtagattcaaccaaatcaccatttcctgattctaatgttcatcaaccacttttgaatcctccccccacttcccctctattttagtttgaggttcaaaagcacccatgaggtaaattaatactcagccaagcagagtgaggccctgatgctcttgtggttctgccattaatttgctgtaacccagggacatccaggctagtccctcaggtttctctctgtaggtaaaagggtttctaaagttccttccagctctgaaattctgagattccttgttgaatctcattctgcaaggggaatcttatggaccagctccctctgggaagaaaaatgtttcatgcaaccctatgaatctcatcttagtccaaatctttttttgtttgtttgtttggtttttgtttttgttttttagaacactatactggaaaagtgaaagaatcagagaagcaggataactggcaactgaagtcggccagcatctcatgtgaattagaaatggaatcggggtgctagcatccaagtgaccaaagaaactctttgctgaggttgcatggagtttaaggaaagaggctgtggggtcctcctttgatgcagctacatttccctctgagcctctgtctgtttcctgtcagtttagtgcaaaactctagtctactactctgggctggcttagaaaaaatgcatcctggttttgttccaattcaggatagaggtggggaagtcctgctgagcctctcccacagtgagccttcccctcaccactggcagcactgacaccagtgactagcattcatttcttggggtatgagtccactgagggtgggaggatcctcacattaaccattattgggtaccatcttaaattgcggactttggaagcccttggccttccctttcccaggcattttctccttggagtgaagatgttgaaagttggaggttaaatgacttgccctaggtcacaaggttggtggcacagcagggatgaaaaccttggccaatcttctgagtccttggtcagacccttacgccacagctgctctttgtataagggacagtctcacctcccaaggacactgcgcaaggatgccagatattgatatgactgttgtcccagtcctcagtgaccttctacatcctgcagcctgctcagacagtagaggaagcagctctggggcagagggaactgccatatgtagagctgccctggtggagataaacaggttgtctgtcaacgtatgaagcctatgtagggccaggaccacagagcttccattgcaggagaaattaaacctgtcttgcacaccaatcccagtgctctgattacatttacagaggtcatggcctgcattctgtcaccatggaaacctctcaggctgccagggtgttttctgtgcatgtggttgatatttaaaggcaaagtcgcaggccgcattgctgaactatcagctgccaggggcaattgctctcctccaccagcccgcgtcctggtgcttcgtcccagagataagaggaaggggaagagatgaagaaaagggcccacctgtctctaacaggaaggtctttttagtagagccaggtttgtagggagtcaggctatagggtgcaggtgctgggatagcagatgaagggcagtaaaaaagggccccaacattgtcagaatataagcattttctcgcaagaacacaggccctcatgtttagtgcatctcattttttctctgattcctcctccaactcatgagcacatgtcatagtggccatatggagctggggaagccccctttgcctgaatgcccttggtggtttctattttgcacatctggtagctgcatgaattgtgctgataacaatatagc

SEQ ID NO: 30378 - DNA, 1395 bp, Homo sapiens
gtggcgtgggccttgcccgcattacagagtgtcactgcttagtgggcagtgggcatctccagttattccttcttcatgtgatattgttttaaatgcccttagcttttgcgtttttcctccgtggagtggtctagttgatattccccttaactggtcgtgtctgaaactgaattgcaggctctaggtaatggtgtgagcaatgtggactagggcccgggctgttaccttctttctgtgaagacggcctaagatacagtatggccctgcgtctttgaaggccatctgagaacactgcagcttcagactgccctaggtcagagctactggcagtgtcccaaggaggccttggcatgtgttctgcctccccactatttctcttctgtatttgatggctttgatttcaccgcacctaagtgtaagttcaaactatatcctattagacattatcttgttaaacagttcctgttgctccatgcttttgagatgttttttaatctctggtttcatcctgttaatttattctcttggttgtaagcgacacaaatgattgacgagttcccttgtatatttgcatcagcatcattcactgaaacattctcgaaggtagggcatatgtcagagtcctggcagatgtaggctgcttcacactgtgcctccagattgggaaaaggtggcattcctaatcaccgggggaagtaaattcatcaataaatgtggtttaggacagctgaagagctgttagaaaaaaaagggagctggggtccctccaacattccttagataaaaataaactacataacaaagaaagtctcttaaaaaaaaagaaattaaattgtctgaaagatttagacttaaataatgaactcataaaaattattagacgaaacatgagtaaattttaaatatatcttggaatgtagacagaagacttttttccccccaaagcgtgtcacaaaacacagaagctgtaaagaaaaaggctaactttcctaaaagaaaaatttcatgaggaaaatttaaagttctgttgggcaaaaattccataaatgyggtcaaaaaacaagtaatatattggagaaaaatatttgcagcctatgtgtcagagctaattcctttcacatggaaagaagtcttagaagtcaataggaaaaatgaaaaatggaatagttaaaccaatgttcattgctagaagtgagcttgtgaaaacatagtaaacttcactttgtttaaaaatgcaaaggaaaataaagaggtctcattgttttcatctgtgaaattggatgtggctaagtctgataatacccaccttgctggtgaaaggatgagaaaacagacatattgagttgaccagtgctgttgaagggcatttctacaatatccttagactagaattta

SEQ ID NO: 30379 - DNA, 1395 bp, Homo sapiens
gtggcgtgggccttgcccgcattacagagtgtcactgcttagtgggcagtgggcatctccagttattccttcttcatgtgatattgttttaaatgcccttagcttttgcgtttttcctccgtggagtggtctagttgatattccccttaactggtcgtgtctgaaactgaattgcaggctctaggtaatggtgtgagcaatgtggactagggcccgggctgttaccttctttctgtgaagacggcctaagatacagtatggccctgcgtctttgaaggccatctgagaacactgcagcttcagactgccctaggtcagagctactggcagtgtcccaaggaggccttggcatgtgttctgcctccccactatttctcttctgtatttgatggctttgatttcaccgcacctaagtgtaagttcaaactatatcctattagacattatcttgttaaacagttcctgttgctccatgcttttgagatgttttttaatctctggtttcatcctgttaatttattctcttggttgtaagcgacacaaatgattgacgagttcccttgtatatttgcatcagcatcattcactgaaacattctcgaaggtagggcatatgtcagagtcctggcagatgtaggctgcttcacactgtgcctccagattgggaaaaggtggcattcctaatcaccgggggaagtaaattcatcaataaatgtggtttaggacagctgaagagctgttagaaaaaaaagggagctggggtccctccaacattccttagataaaaataaactacataacaaagaaagtctcttaaaaaaaaagaaattaaattgtctgaaagatttagacttaaataatgaactcataaaaattattagacgaaacatgagtaaattttaaatatatcttggaatgtagacagaagacttttttccccccaaagcgtgtcacaaaacacagaagctgtaaagaaaaaggctaactttcctaaaagaaaaatttcatgaggaaaatttaaagttctgttgggcaaaaattccataaatgtggtcaaaaaacaagtaatatattggagaaaaatatttgcagcctatgtgtcagagctaattcctttcacatggaaagaagtcttagaagtcaataggaaaaatgaaaaatggaatagttaaaccaatgttcattgctagaagtgagcttgtgaaaacatagtaaacttcactttgtttaaaaatgcaaaggaaaataaagaggtctcattgttttcatctgtgaaattggatgtggytaagtctgataatacccaccttgctggtgaaaggatgagaaaacagacatattgagttgaccagtgctgttgaagggcatttctacaatatccttagactagaattta

SEQ ID NO: 30380 - DNA, 508 bp, Homo sapiens
gcaaattgcccaaggaaccaaagtaagtatccagccyccatgaatatggcaagtatccccagacaggagctacagggacacgtcctctacatataagggacagcggtaaagcaattaattctcaccaggaatatcttcccttgccggaccctgagatgaccactgagcgtggaatcccagaatcatgccatctttccagcctggaaattcatcacttctcactgcaaacacccacatttattccatgcatcctatgtgcccggcatcttccccatgcattatctcatttattattcacaacaatactatgagataataactctcatcacctctttttacagacaatgaaacaaaccgagtttcagagaaaccaaataacttgtccaaaaaatacagctagtaaatgatagattctgggtttaaacccaaatcttgcagttcaaactcaacaactcttcagagtgtgacatccttgatttattcatggaaaaatcaaccccattgccga

SEQ ID NO: 30381 - DNA, 565 bp, Homo sapiens
ttttttttttttttttttttttttgagatggagtcttgctttgtcacccaggctggagtgcagtggcgtgatctcaactcactacaacctgcatttcccaggttcaaacgattttcctatctcagcctcctgagtagctgggattacaggcatatgccaccatgctcggttaatttttgtattttcagtagagacggggtttcaccatgttggccagagtggtctcaaactcctgaccgcaagagacccacccgcctcagcctcccaaagtgctgggcttataggtgtgagccaccggcccggcctctgaggtctcttttataagaacactaacctcatttacgagggttccacccccatgattagatctgccccataatctaatcrcctcccaaaggccagacgtcctgataccataaccttggtgggcatgaagattttaccatatgaatttgggaaggggtacaaatattcagattatagcatgtgctgtgctgattctgcatttgatggatctgtggagttgatgagggggagtggatgtggagtgagaaggacatggggc

SEQ ID NO: 30382 - DNA, 1080 bp, Homo sapiens
caaggtcaggaaatcgataccatcctggctgacatggtgaaacctcgtctgtactaaaaatacaaaaaattagccaggtgtggtggcacgcacgtgtagtcccagctactcgggaggctgaggctggagaatttcttgaacctgggaggtggaggttgcagtgagccgagactgcgccactgcactccagcctgggtgacagagcaacagagcaagactccttctcaaattaaaaaaaaaaaaaagctttgcccagtacttggctccaacataaccccactggcaccgagtgaacagaagtatgcggcaagagctgtagttactgttgtgctgggcatcggcatctgttgatggcacccagcctgcccagcttattctccgatgtcctccgcaggttgcaacttccaacagcaggacccgacccacacgaccttctcccccatccagtgcccctgtgtattagtctgttctgacgctgctaataaagacagacccgagactggataatttataaaggaaagaggtttaagggactcacagttccacatggctagggaggcctcacaatcatggtgaaaggcaaaggagragagaaggcatgtcttacatggcagcaggcaagaaatcatgtgcaggggaactgccctttataaaaccatcagattttgtgagacttattcactatcacgagaacagcatgggaaagacccgtccccatggttctattacctcccactgagtccctcccacaacaagtgggaattatgggagttacaattcaagatgagatttgggtggggacacagcgaaaccatatcaccctgtgcttgctatttgcctgacatgtctggaatattctcttccctcctctgctgatgctcggcacatccatccttcacggagagcttggctcctccctctcagaaagccctcctggatcatcctggcccatgtcctttcctcctgggcaagccactcacctagggtccatcacagatgctctactgctcccgagagcctggctttcacgtggatctgctctctctgaaaggtagattccataaagatggattctgtggg

SEQ ID NO: 30383 - DNA, 1080 bp, Homo sapiens
caaggtcaggaaatcgataccatcctggctgacatggtgaaacctcgtctgtactaaaaatacaaaaaattagccaggtgtggtggcacgcacgtgtagtcccagctactcgggaggctgaggctggagaatttcttgaacctgggaggtggaggttgcagtgagccgagactgcgccactgcactccagcctgggtgacagagcaacagagcaagactccttctcaaattaaaaaaaaaaaaaagctttgcccagtacttggctccaacataaccccactggcaccgagtgaacagaagtatgcggcaagagctgtagttactgttgtgctgggcatcggcatctgttgatggcacccagcctgcccagcttattctccgatgtcctccgcaggttgcaacttccaacagcaggacccgacccacacgaccttctcccccatccagtgcccctgtgtattagtctgttctgacgctgctaataaagacagacccgagactggataatttataaaggaaagaggtttaagggactcacagttccacatggctagggaggcctcacaatcatggtgaaaggcaaaggagaagmgaaggcatgtcttacatggcagcaggcaagaaatcatgtgcaggggaactgccctttataaaaccatcagattttgtgagacttattcactatcacgagaacagcatgggaaagacccgtccccatggttctattacctcccactgagtccctcccacaacaagtgggaattatgggagttacaattcaagatgagatttgggtggggacacagcgaaaccatatcaccctgtgcttgctatttgcctgacatgtctggaatattctcttccctcctctgctgatgctcggcacatccatccttcacggagagcttggctcctccctctcagaaagccctcctggatcatcctggcccatgtcctttcctcctgggcaagccactcacctagggtccatcacagatgctctactgctcccgagagcctggctttcacgtggatctgctctctctgaaaggtagattccataaagatggattctgtggg

SEQ ID NO: 30384 - DNA, 1080 bp, Homo sapiens
caaggtcaggaaatcgataccatcctggctgacatggtgaaacctcgtctgtactaaaaatacaaaaaattagccaggtgtggtggcacgcacgtgtagtcccagctactcgggaggctgaggctggagaatttcttgaacctgggaggtggaggttgcagtgagccgagactgcgccactgcactccagcctgggtgacagagcaacagagcaagactccttctcaaattaaaaaaaaaaaaaagctttgcccagtacttggctccaacataaccccactggcaccgagtgaacagaagtatgcggcaagagctgtagttactgttgtgctgggcatcggcatctgttgatggcacccagcctgcccagcttattctccgatgtcctccgcaggttgcaacttccaacagcaggacccgacccacacgaccttctcccccatccagtgcccctgtgtattagtctgttctgacgctgctaataaagacagacccgagactggataatttataaaggaaagaggtttaagggactcacagttccacatggctagggaggcctcacaatcatggtgaaaggcaaaggagaagaraaggcatgtcttacatggcagcaggcaagaaatcatgtgcaggggaactgccctttataaaaccatcagattttgtgagacttattcactatcacgagaacagcatgggaaagacccgtccccatggttctattacctcccactgagtccctcccacaacaagtgggaattatgggagttacaattcaagatgagatttgggtggggacacagcgaaaccatatcaccctgtgcttgctatttgcctgacatgtctggaatattctcttccctcctctgctgatgctcggcacatccatccttcacggagagcttggctcctccctctcagaaagccctcctggatcatcctggcccatgtcctttcctcctgggcaagccactcacctagggtccatcacagatgctctactgctcccgagagcctggctttcacgtggatctgctctctctgaaaggtagattccataaagatggattctgtggg

SEQ ID NO: 30385 - DNA, 1080 bp, Homo sapiens
caaggtcaggaaatcgataccatcctggctgacatggtgaaacctcgtctgtactaaaaatacaaaaaattagccaggtgtggtggcacgcacgtgtagtcccagctactcgggaggctgaggctggagaatttcttgaacctgggaggtggaggttgcagtgagccgagactgcgccactgcactccagcctgggtgacagagcaacagagcaagactccttctcaaattaaaaaaaaaaaaaagctttgcccagtacttggctccaacataaccccactggcaccgagtgaacagaagtatgcggcaagagctgtagttactgttgtgctgggcatcggcatctgttgatggcacccagcctgcccagcttattctccgatgtcctccgcaggttgcaacttccaacagcaggacccgacccacacgaccttctcccccatccagtgcccctgtgtattagtctgttctgacgctgctaataaagacagacccgagactggataatttataaaggaaagaggtttaagggactcacagttccacatggctagggaggcctcacaatcatggtgaaaggcaaaggagaagagaaggcatgtcttacatggcagcaggcaagaaatcatgtgcaggggaactgccctttataaaaccatcagattttgtgagacttattcactatcacgagaacagcatgggaaagacccgtccccatggttctattacctcccactgagtccctcccacaacaagtgggaattatgggagytacaattcaagatgagatttgggtggggacacagcgaaaccatatcaccctgtgcttgctatttgcctgacatgtctggaatattctcttccctcctctgctgatgctcggcacatccatccttcacggagagcttggctcctccctctcagaaagccctcctggatcatcctggcccatgtcctttcctcctgggcaagccactcacctagggtccatcacagatgctctactgctcccgagagcctggctttcacgtggatctgctctctctgaaaggtagattccataaagatggattctgtggg

SEQ ID NO: 30386 - DNA, 515 bp, Homo sapiens
aattttctagaaaaaaattactaacattaactcagtgaaaaataaaaattatataataagagaataatttgagaaatttaattattagttaaaagtaatattcttccaaaatcatgatagaaaatcactatcttcatttgaaaatgttttaactaataaaaatttacagcatacgtatgtggaaactgcagaagcagtcccattaaaatcattatcattggaagaatgcctattaccacatctattatttataattttgctgcaggtcctaattaaatttttaaaataatgataggagtaaagaaactttgggagctctcaatatttgccagaaayatgattgaccaaacatgaaatacaagaaaagtgataaatctacaaatgaaggattataactaataaagttgaggaagatttctagacataaaataaatatgaaaggatacaataaatatttaaaattcaattttctgaaaattaaaacatacattgggcatgattcctataaaaatgtc

SEQ ID NO: 30387 - DNA, 515 bp, Homo sapiens
aattttctagaaaaaaattactaacattaactcagtgaaaaataaaaattatataataagagaataatttgagaaatttaattattagttaaaagtaatattcttccaaaatcatgatagaaaatcactatcttcatttgaaaatgttttaactaataaaaatttacagcatacgtatgtggaaactgcagaagcagtcccattaaaatcattatcattggaagaatgcctattaccacatctattatttataattttgctgcaggtcctaattaaatttttaaaataatgataggagtaaagaaactttgggagctctcaatatttgccagaaatatgattgaccaaacatgaaatacaagaaaagtgataaatctacaaatgaaggattataactaataaagttgaggaagatttctagacataaaataaatatgaaaggatacaataaatatttaaaattcaattttctgaaaattaaawcatacattgggcatgattcctataaaaatgtc

SEQ ID NO: 30388 - DNA, 616 bp, Homo sapiens
ggctaatctgatctctgatgagaataacaaagaaaaaagaaggaagataatataaacatactaagattgcaggagggaacttaactgctaacacagtagatgtgtaaatagtaagagactactataattgctttaatagtcttaataaatttggaaacgttgctataayggaaaaattccaactaaacattctcacaaagaaaacatcagatccaaagaatttttaaagtaaattctaacattcaaacttagataaacctagaaaagaagaaaagaggagatacttcccaattaatttcatgatcctaaaactatgatatccctgtcaggcaagacaagtcaaggaataaaaaaactgtaggtcaatctcatttatttataaagatgcaaaaatcctaaatgaaatatcagaaaaccaaactcagtaatctatcaaaaggaaatgaaaaggaagtagtgacacatgctacaacatggatgagccttaaaaacattaagctaagtgaaaagatgccagacacaaacagccacatattgtatgttccatttatatgcagtatacgcaacaggaaaacccataaatacagaacacacattagtggttgccaagaggagg

SEQ ID NO: 30389 - DNA, 616 bp, Homo sapiens
ggctaatctgatctctgatgagaataacaaagaaaaaagaaggaagataatataaacatactaagattgcaggagggaacttaactgctaacacagtagatgtgtaaatagtaagagactactataattgctttaatagtcttaataaatttggaaacgttgctataacggaaaaattccaactaaacattctcacaaagaaaacatcagatccaaagaatttttaaagtaaattctaacattcaaacttagataaacctagaraagaagaaaagaggagatacttcccaattaatttcatgatcctaaaactatgatatccctgtcaggcaagacaagtcaaggaataaaaaaactgtaggtcaatctcatttatttataaagatgcaaaaatcctaaatgaaatatcagaaaaccaaactcagtaatctatcaaaaggaaatgaaaaggaagtagtgacacatgctacaacatggatgagccttaaaaacattaagctaagtgaaaagatgccagacacaaacagccacatattgtatgttccatttatatgcagtatacgcaacaggaaaacccataaatacagaacacacattagtggttgccaagaggagg

SEQ ID NO: 30390 - DNA, 1172 bp, Homo sapiens
cctgcaggggccttcctgcccactacctgtgcccccgaccccaggggcccacttggcaggatagagacctctggttaagcacagggagaaggacaggcagcttccagggctccgcagctaatccagtccaccacccggacacaagtactttgggaggactgggcctcttccaagttggactcaatgtacgttcctggcagaggcccctcccctggcaggacacagctttgttgtcactcttgtcctggctgccagggcagagagcaggctgcaaagtagaagtgcttatataagctcctcggtgcagctccttgtccagtccctgctgttggcccagggatggtcagctggccaaaggccagcctgctccttggctgtaaggcaagccctgggaagctggtgaccccaggctcagggctaggagttgggctgtgcccctcagaccggctctgactctcctggcccccattcttccaccacctgtctccacagcctgtgagyttccccaaggtggaggtggttggacacagtgaccttgtgtaggagggactgctgcagggggtgggggtaggtgcaccccagaccgaggccagctccgaagggccagctccgaagggccagctgaggacagaagggtgcgtctgggtgcaccttgcagctgtgctgcactcagcactctcccaaaataatcgtatctggagaaggaggtctggggagctgcttggggctcagaaaggggtggcctgccccagcagtgcactgggaggaaggggagccggggactgtcgcctgcattcccttggggaacagtcctgccaccaggtgcatgtgggactctggtttgagcctgagtgggcagggagaagaataaaggcggcttgcaacaggctttccaatagctctgctctctgcttctcagaggcgggggtgggagagacgtgccagcaactcaggactcctggcttctgctctgagctctctctggatgctgggaggccactgtgtctccctagaatgcaccacttttccttttcacaaacaagtaaaataattcctgtcaccgtggtgccttgctaaggaatatgagatcatcgctgtaaagtacacgcagctagacctttagagaaactactttcagcatagtctgctttctggctcaattcctgcctcca

SEQ ID NO: 30391 - DNA, 1172 bp, Homo sapiens
cctgcaggggccttcctgcccactacctgtgcccccgaccccaggggcccacttggcaggatagagacctctggttaagcacagggagaaggacaggcagcttccagggctccgcagctaatccagtccaccacccggacacaagtactttgggaggactgggcctcttccaagttggactcaatgtacgttcctggcagaggcccctcccctggcaggacacagctttgttgtcactcttgtcctggctgccagggcagagagcaggctgcaaagtagaagtgcttatataagctcctcggtgcagctccttgtccagtccctgctgttggcccagggatggtcagctggccaaaggccagcctgctccttggctgtaaggcaagccctgggaagctggtgaccccaggctcagggctaggagttgggctgtgcccctcagaccggctctgactctcctggcccccattcttccaccacctgtctccacagcctgtgagcttccccaaggtggaggtggttggacacagtgaccttgtgtaggagggactgctgcagggggtgggggyaggtgcaccccagaccgaggccagctccgaagggccagctccgaagggccagctgaggacagaagggtgcgtctgggtgcaccttgcagctgtgctgcactcagcactctcccaaaataatcgtatctggagaaggaggtctggggagctgcttggggctcagaaaggggtggcctgccccagcagtgcactgggaggaaggggagccggggactgtcgcctgcattcccttggggaacagtcctgccaccaggtgcatgtgggactctggtttgagcctgagtgggcagggagaagaataaaggcggcttgcaacaggctttccaatagctctgctctctgcttctcagaggcgggggtgggagagacgtgccagcaactcaggactcctggcttctgctctgagctctctctggatgctgggaggccactgtgtctccctagaatgcaccacttttccttttcacaaacaagtaaaataattcctgtcaccgtggtgccttgctaaggaatatgagatcatcgctgtaaagtacacgcagctagacctttagagaaactactttcagcatagtctgctttctggctcaattcctgcctcca

SEQ ID NO: 30392 - DNA, 1172 bp, Homo sapiens
cctgcaggggccttcctgcccactacctgtgcccccgaccccaggggcccacttggcaggatagagacctctggttaagcacagggagaaggacaggcagcttccagggctccgcagctaatccagtccaccacccggacacaagtactttgggaggactgggcctcttccaagttggactcaatgtacgttcctggcagaggcccctcccctggcaggacacagctttgttgtcactcttgtcctggctgccagggcagagagcaggctgcaaagtagaagtgcttatataagctcctcggtgcagctccttgtccagtccctgctgttggcccagggatggtcagctggccaaaggccagcctgctccttggctgtaaggcaagccctgggaagctggtgaccccaggctcagggctaggagttgggctgtgcccctcagaccggctctgactctcctggcccccattcttccaccacctgtctccacagcctgtgagcttccccaaggtggaggtggttggacacagtgaccttgtgtaggagggactgctgcagggggtgggggtaggtgcaccccagaccgaggccagctccgaagggccagctccgaagggccagctgaggacagaagggtgcgtctgggtgcaccttgcagctgtgctgmactcagcactctcccaaaataatcgtatctggagaaggaggtctggggagctgcttggggctcagaaaggggtggcctgccccagcagtgcactgggaggaaggggagccggggactgtcgcctgcattcccttggggaacagtcctgccaccaggtgcatgtgggactctggtttgagcctgagtgggcagggagaagaataaaggcggcttgcaacaggctttccaatagctctgctctctgcttctcagaggcgggggtgggagagacgtgccagcaactcaggactcctggcttctgctctgagctctctctggatgctgggaggccactgtgtctccctagaatgcaccacttttccttttcacaaacaagtaaaataattcctgtcaccgtggtgccttgctaaggaatatgagatcatcgctgtaaagtacacgcagctagacctttagagaaactactttcagcatagtctgctttctggctcaattcctgcctcca

SEQ ID NO: 30393 - DNA, 544 bp, Homo sapiens
agtggatgcatgacccaatcttccctacttccattccagtctgagcgcccataattagtcaatcaactagcttgtcttggttctttttccttaggccttccacaatctattcttcacattacagggaaattaatcttttcaaaactgtaaattaaagcagattattctctagcttaatatcctttacttatttcccaatgcactttgagtaaaattcaaatgtttcattgtgcactgcaaggacacctatgttttggaagtttcctatctctctggtatcttcttttgcatctctctgaaatgctgcagctcccgccacccgacctccccgcctttagagttgaggcataagacatttcctttgtcgagaagggtctttgtttaactggcattttaaggtttaatcttaaagattacgcccttagccaggtgcggtagctcatgcctataatcccatcagtttgtgaggtccaggagggcggatcattgagctcmcttgagctcagcagttcaagatcagcataggcaacatggcgaaacccca

SEQ ID NO: 30394 - DNA, 544 bp, Homo sapiens
agtggatgcatgacccaatcttccctacttccattccagtctgagcgcccataattagtcaatcaactagcttgtcttggttctttttccttaggccttccacaatctattcttcacattacagggaaattaatcttttcaaaactgtaaattaaagcagattattctctagcttaatatcctttacttatttcccaatgcactttgagtaaaattcaaatgtttcattgtgcactgcaaggacacctatgttttggaagtttcctatctctctggtatcttcttttgcatctctctgaaatgctgcagctcccgccacccgacctccccgcctttagagttgaggcataagacatttcctttgtcgagaagggtctttgtttaactggcattttaaggtttaatcttaaagattacgcccttagccaggtgcggtagctcatgcctataatcccatcagtttgtgaggtccaggagggcggatcattgagctcamttgagctcagcagttcaagatcagcataggcaacatggcgaaacccca

SEQ ID NO: 30395 - DNA, 584 bp, Homo sapiens
ggtttacctccaccagatgttgctgaaatgtcaatatagaagtaacattccttttaggataagtggcattggatttgggtggctagagtaactttagtgttaaccttggctaaatctttcctgcaattattaatcctttcatgactaccatagaccatgtaagacatgcttaaactttccaacttgtcccaaacatccttctttttaaacaaccaactattctttttaggacaagtatttaccttccttataatcctttcatgacttccatgaaccatctacaacatgtttaraccttctgacttgtcctaaacatgcttcttttaaacaaccaactattgtctttaggacaagtatttatcatacaagatcctttcttacataaaatctctttcctttataaacttcttttcaaagccagggtgtgacatattaccaaacccaataaaaagtttacagttcacaatctaaaacaaagatgataccagccccttcctaagatatacttccctcttacctgggaaccagaccaagaaactagccacaagattagaaaccatggcttaggagtcacacagctagag

SEQ ID NO: 30396 - DNA, 579 bp, Homo sapiens
atgtcatctgttgtacctccccttagttaagtcaggagggcaacactccctttattttttattttattttgtatgtatgtgtgtgtgagatggagtctcrctctgtggcccaggctggagtacagtggcgtgatcttggctcactgcaaccctgcttcccaggttcaagtgattcttgtgcttcagcctcccgagtagctaagattacaggcacaggccaccacctgtggtaatttttgtgtttttagtagagatggggcttcgctattttggccaggctggtctcgaactcctgacctcaggtgatccgcccacctcggccttccaaagtgctgggattacaggtgtgagccacagctctcggcccctctatttatcagacagatgtatagaaagtttattgtgctagcaagagtatgaagaaaaggattctctgagttgaaaaaacaaattggaatataaattggtaccacttctatggaaggcaaatttacagggcttattaattaaaataaaaaatgtgtactgtaaccactatgatacagcagttgcgcttccagaactctaccctatagaaat

SEQ ID NO: 30397 - DNA, 579 bp, Homo sapiens
atgtcatctgttgtacctccccttagttaagtcaggagggcaacactccctttattttttattttattttgtatgtatgtgtgtgtgagatggagtctcactctgtggcccaggctggagtacagtggcgtgatcttggctcactgcaaccctgcttcccaggttcaagtgattcttgtgcttcagcctcccgagtagctaagattacaggcacaggccaccacctgtggtaatttttgtgtttttagtagagatggggcttcgctattttggccaggctggtctcraactcctgacctcaggtgatccgcccacctcggccttccaaagtgctgggattacaggtgtgagccacagctctcggcccctctatttatcagacagatgtatagaaagtttattgtgctagcaagagtatgaagaaaaggattctctgagttgaaaaaacaaattggaatataaattggtaccacttctatggaaggcaaatttacagggcttattaattaaaataaaaaatgtgtactgtaaccactatgatacagcagttgcgcttccagaactctaccctatagaaat

SEQ ID NO: 30398 - DNA, 604 bp, Homo sapiens
agaggtccctaaacagattattggaactatttctctgtatatgtctctcatcttgcattttctaccttgtaaattctagtcacctcagcatcctgtaagtcgaatcctcatgtagtcaacagagcaaaatcactgatttctgtttgggtttcccctccctgtgttgcattctagaaactgtctccaggcataaagatactgcaatttgtttccctaattctaggaataatagccctgccctgcctattgtctaacatctaaaaatgtttattttatataatttgttgggttttctagttgttatagtaggaagagaagtccaaggcctattacttcctgtgtgctgaccactggaaaatcttgagcagaagagtgctgcaaataatggacctgtcccctgcccctcgaaactgcagcctgaaatccagcgcttactatcctgtttatgcctagttgctcacctgtgacttttctttccctgttcttttgattacagctatcatccaatatttgacttctttgtgtcaaagaggctaacagacattttgytccatatttttcacattctccatgacaaagtattgaatatgaaacaagaaataca

SEQ ID NO: 30399 - DNA, 583 bp, Homo sapiens
ccacagtggggtcgaggttgccccacagttcacacactccctgccttctggaaacaaaagcacagataagccacttagggaaggaaaacacgcaggaaagctgacagcatttggaactgggggagaaacgtaaaatggagaacttttttccttctccctcctcttttggggagcgtgtccacccccacctctttccaagatgctccaaagttgagctggggaatgctgtcctggcatgaccgttcccccgacacacacggaggcgcccgcagaaggggcagatgcatcgttgcaacagaaccctgttcttggcttgcccgacttgatggagaagatcgggcaggaccaaggaggaatgcagattccagctacaaatacttccctgagaaaatcctgagccctggatggtggcaaaaggcaaacattccattcatttccctcaaaggaaaaaaaggaagacaaaggtgacccattatcatcatgggtctgtctatagagattgattaaataatgaagattaggatgggggaaaggaaggattcatcaatggctagataggtgaacagataataaatagatscat

SEQ ID NO: 30400 - DNA, 546 bp, Homo sapiens
aatactcaaatatcatagtatgatatattttcactttcccatggtgttctttccctcctttcatatattccttcactcttattttttagcatattcattcatcacccaaaacttcatcttatgtgctaggtgttgggccaaggcttggaggaacaaagtgatgcaaaatactgatagactttttwaaatgcttattgagtcagaggggcatgagattctgcatttctttttatagatatatatactttaggttctgggatacatgtgcagaacgtgcaggtttgttacataggtatacacgtgccatggtgatttgctgcacccatcaaccaatcatctacattaggtatttctcccaatgctatccctcccctagccccccacccctgaaaagcccccagtgtgcaatgttgccctccatgtgtccatgtgttctcattgttcaactcccactgatgagtgagccaacatgcggtgtttggttttttgttcttgtgttagtttgctgagaatgatggtttccagcctcatctatgtccctgaaaa

SEQ ID NO: 30401 - DNA, 942 bp, Homo sapiens
aaaagccttccaactattaatgttatttcttacatgaaaaaaattaagcaaaacaaatgaaaaaagcataacaccaaaaaaaggccaacacattaaaatgagtaacggrgattccaaactttatttcaccatgggcaggtgaaaaccttagaatacattgatagtagtccaaggatgtgtgacatggaaactatagctgactactgcaaaagcttcctttgtctcctggtttctttacatggttatcttccatcaatcccagcaaactataggccacaggacaaatccaatctgccttttggctttgtaaataaagttttataggagctcagtcatgcctgtttgcttacatataatcatggtggctttcacactacaacaacagacaacagcctggttaagtagatatgacagagaccacatagtctaaaatatttcccacctggtcctttacagaaaaagcttgctaacccattttacaccataagcagaatatgccttaatattcaaatttaatcttgtaactcccctgctcaaatttctccaatgagcccctgcagcacacattgttggctcctatcaatagccattccttattctttcttgcagaagaaacacaagtctattgggatatttattatcccaatccccctcctcagcctcagaaagagaaatgtttattctaagctaatcatgtatttgccatcccattgcctggtttgggaatgagcatgtggtgtgacccagccaatgaaatgttacaggaagccccttgcatgcttctaagttttctccctgtttaaaagacacatgtgaagaaaagcagcccttgaaatgttgtgttgtgagaacaagatgtttggagctgctgcggattagccaaccacgaaaggaaacatgaagaaaacactgccaacagcacagctgaaagagggaaaaatg

SEQ ID NO: 30402 - DNA, 942 bp, Homo sapiens
aaaagccttccaactattaatgttatttcttacatgaaaaaaattaagcaaaacaaatgaaaaaagcataacaccaaaaaaaggccaacacattaaaatgagtaacggggattcyaaactttatttcaccatgggcaggtgaaaaccttagaatacattgatagtagtccaaggatgtgtgacatggaaactatagctgactactgcaaaagcttcctttgtctcctggtttctttacatggttatcttccatcaatcccagcaaactataggccacaggacaaatccaatctgccttttggctttgtaaataaagttttataggagctcagtcatgcctgtttgcttacatataatcatggtggctttcacactacaacaacagacaacagcctggttaagtagatatgacagagaccacatagtctaaaatatttcccacctggtcctttacagaaaaagcttgctaacccattttacaccataagcagaatatgccttaatattcaaatttaatcttgtaactcccctgctcaaatttctccaatgagcccctgcagcacacattgttggctcctatcaatagccattccttattctttcttgcagaagaaacacaagtctattgggatatttattatcccaatccccctcctcagcctcagaaagagaaatgtttattctaagctaatcatgtatttgccatcccattgcctggtttgggaatgagcatgtggtgtgacccagccaatgaaatgttacaggaagccccttgcatgcttctaagttttctccctgtttaaaagacacatgtgaagaaaagcagcccttgaaatgttgtgttgtgagaacaagatgtttggagctgctgcggattagccaaccacgaaaggaaacatgaagaaaacactgccaacagcacagctgaaagagggaaaaatg

SEQ ID NO: 30403 - DNA, 942 bp, Homo sapiens
aaaagccttccaactattaatgttatttcttacatgaaaaaaattaagcaaaacaaatgaaaaaagcataacaccaaaaaaaggccaacacattaaaatgagtaacggggattccaaactttatttcaccatgggcaggtgaaaaccttagaatacattgatastagtccaaggatgtgtgacatggaaactatagctgactactgcaaaagcttcctttgtctcctggtttctttacatggttatcttccatcaatcccagcaaactataggccacaggacaaatccaatctgccttttggctttgtaaataaagttttataggagctcagtcatgcctgtttgcttacatataatcatggtggctttcacactacaacaacagacaacagcctggttaagtagatatgacagagaccacatagtctaaaatatttcccacctggtcctttacagaaaaagcttgctaacccattttacaccataagcagaatatgccttaatattcaaatttaatcttgtaactcccctgctcaaatttctccaatgagcccctgcagcacacattgttggctcctatcaatagccattccttattctttcttgcagaagaaacacaagtctattgggatatttattatcccaatccccctcctcagcctcagaaagagaaatgtttattctaagctaatcatgtatttgccatcccattgcctggtttgggaatgagcatgtggtgtgacccagccaatgaaatgttacaggaagccccttgcatgcttctaagttttctccctgtttaaaagacacatgtgaagaaaagcagcccttgaaatgttgtgttgtgagaacaagatgtttggagctgctgcggattagccaaccacgaaaggaaacatgaagaaaacactgccaacagcacagctgaaagagggaaaaatg

SEQ ID NO: 30404 - DNA, 942 bp, Homo sapiens
aaaagccttccaactattaatgttatttcttacatgaaaaaaattaagcaaaacaaatgaaaaaagcataacaccaaaaaaaggccaacacattaaaatgagtaacggggattccaaactttatttcaccatgggcaggtgaaaaccttagaatacattgatagtagtccaaggatgtgtgacatggaaactatagctgactactgcaaaagcttcctttgtctcctggtttctttacatggttatcttccatcaatcccagcaaactataggccacaggacaaatccaatctgccttttggctttgtaaataaagttttataggagctcagtcatgcctgtttgcttacatataatcatggtggctttcacactacaacaacagacaacagcctggttaagtagatatgacagagaccacatagtctaaaatatttcccacctggtcctttacagaaaaagcttgctaacccattttacaccataagcagaatatgccttaatattcaaatttaatcttgtaactcccctgctcaaatttctccaatgagcccctgcagcacacattgttggctcctatcaatagccattccttattctttcttgcagaagaaacacaagtctattgggatatttattatcccaatccccctcctcagcctcagaaagagaaatgtttattctaagctaatcatgtatttgccatcccattgcctggtttgggaatgagcatgtggtgtgacccagccaatgaaatgttacaggaagccccttgcatgcttctaagttttctccctgtttaaaagacacatgtgaagaaaagcagcccttgaaatgttgtgttgtgagaacaagatgtttggagctgctgcggattagccaaccaygaaaggaaacatgaagaaaacactgccaacagcacagctgaaagagggaaaaatg

SEQ ID NO: 30405 - DNA, 942 bp, Homo sapiens
aaaagccttccaactattaatgttatttcttacatgaaaaaaattaagcaaaacaaatgaaaaaagcataacaccaaaaaaaggccaacacattaaaatgagtaacggggattccaaactttatttcaccatgggcaggtgaaaaccttagaatacattgatagtagtccaaggatgtgtgacatggaaactatagctgactactgcaaaagcttcctttgtctcctggtttctttacatggttatcttccatcaatcccagcaaactataggccacaggacaaatccaatctgccttttggctttgtaaataaagttttataggagctcagtcatgcctgtttgcttacatataatcatggtggctttcacactacaacaacagacaacagcctggttaagtagatatgacagagaccacatagtctaaaatatttcccacctggtcctttacagaaaaagcttgctaacccattttacaccataagcagaatatgccttaatattcaaatttaatcttgtaactcccctgctcaaatttctccaatgagcccctgcagcacacattgttggctcctatcaatagccattccttattctttcttgcagaagaaacacaagtctattgggatatttattatcccaatccccctcctcagcctcagaaagagaaatgtttattctaagctaatcatgtatttgccatcccattgcctggtttgggaatgagcatgtggtgtgacccagccaatgaaatgttacaggaagccccttgcatgcttctaagttttctccctgtttaaaagacacatgtgaagaaaagcagcccttgaaatgttgtgttgtgagaacaagatgtttggagctgctgcggattagccaaccacgaaaggaaacatgaagaaaacactgccaacagcacagctgaaagagggamaaatg

SEQ ID NO: 30406 - DNA, 916 bp, Homo sapiens
tccatacacttggaaactcataaaaaggtgttgagagttgattttcagaatcaaggacgataaccagtattatcayatgaacaaaaaagaagcttctcaagatatttacaagatgggtttggggaacacttacagcaaatttaacgtatcagtgacccatatatttatattttttgcacattgattacaataagcacaaaggtagctgagctattgttcaagacaccatattgaagtagaaataatttcattttttaaaaagtgtaaaattatccaccctatcttgaacctcattatggctctgtggaccatcatattcaaaggagatgaattttcagaatttctctcagcctaagttagttaaaaatttacccaccccccaagtaagtaaacatagtattttcatatagaattattagatactaaaaaatttattttcatagaatttctgacaaataaaacattttaaatttctcaacattaaggcttttatttctaagaaatcaatcttcaaggttttcatttggataagaaagtaaagtggttactgacagtccatgatgttaaataaatcacgactacactaggtttttccatttcaaaagccagtttgttactccacaagcaattcgtgactgcaaataaacacaagcctaaactgcaattttatgaaaggattttcccctaatcatttgttgcatggcaaggattacatctgtgttccgtaggctatagatcaatgggttcagcattgggctcaaaaaagtataaaagactgcagttattttggactcctctacagacttctctgatggaggccttacgtacatgcagaagagggttccataaaacaaagtgactattgtcaggtgggaagcacacgtagaaaaggctttgtgcctgccttcagcagaac

SEQ ID NO: 30407 - DNA, 589 bp, Homo sapiens
cctgacctcaggtgatccacccacctcagcctcccaaagtgcttgaattacaggtgtgagccaccacacctagccttaacctgtgttcttaatatcaactgctctttcatactcaagaatattgtctctgctctcattttcttcttcctgactcttgacatcctctgtctgcaaattccactatgcttctttctcttcagagccacactctgccaagcatgtgccatgcttcctgggctattttttcactgaatcactatgtaatctggatatttctttttttgccacgtstctactaaaactattcattctatgtttgccagtctttaaattgccatatctaatggacgcctttccttctttcttattttatctttcagagtatctgatgctgctggaatcttctttcttgtgaattgcctcctctattgacttacaagtcaacacacttctggtgttgctccttcatgtatatcagcatcttctctttcgctcatggactttcctcccgcagcttgctcctcaagtgctaatgttccctagaattactgtgttggttctttatatactctgcctgagaaatctcacc

SEQ ID NO: 30408 - DNA, 499 bp, Homo sapiens
agaagaggaagtctgcaataacttatcttgctgataaaccaatgggcaggtctcatatcttcttatccatgtttttccctacctagtgcctcacttataataaacattcaacaaatgctttgcaaataaatgaggcagataacttttagaagaaacttcacccccaaaaaattcaattcatatgtggagcaatatttcaaagacctaaatgcaatctaagataaagggaatgaatactactatatcatttccagcaaaatgattcactattataagactatccaaatgtaattaactaatttaaaaaatacatgcatctttcaaattttccatttttttmaccagtaatacaagatggtaaatcataaccattgatcattcccaggtaacattttgacttgctaaaacagcagtccttcatattttcaaaggataaaaatccattggtgaaaggaaattcttctataccacaaaatgttgaagaaaagaatattgaggc

SEQ ID NO: 30409 - DNA, 605 bp, Homo sapiens
ccttacctatccacctggtagcagaatacaagaggcatttaatcttgggagttctagggccccacccactgctggtccctctccacgttactatagctgatgctttctggaaagtgtcacctcctggaaggaggccaaccagcacaaaaatagagcattaaaccaccaaagctaaggaccctcacagagtccattgcaccatctgccacctccactgaacaggcactggtgtccatggctgagagacccatagacagttcacatcacaggattctgtgcagacaacccccagtaccagcccggagccggtgcctctagcaaaasaaaatattttcataatgattaatgaataggtcaatattctcattttagtttctttggttcaatcaaggatgtattttaacttctttttctattttgacaattgtttaaacggctgaatggaacctcattagaacttggtttcaaatctagctataagaatttgaattaaaattggcctcaagttatttttagttcctcccatcaagaagtctatttctccaacctgtgactttcttctgaccatgtaatatgccttgaccagtagaatacagaagtgattt

SEQ ID NO: 30410 - DNA, 955 bp, Homo sapiens
actcctaccctgactgaccatcggcaaaatgcttcctgaggacgaggctgtctccatccttctgtcccttcctcagccctgcccttgcctcccctcctcgggaggctgcggaagcctcatgggccttctccagccagccactctggccactccagcattcctttcactgctttcatttgggtcacccctgtggagttagcttcagtgtttcccagtgacctagaagcaaagtccatctgttggcaagcatttattgagcatctatttttatgtgctaggggctggggagcccaagatgaaccaggcataggcccagccttcaatcagcctggcccatatgctgccttggcctggcattcacatttccacctgctcctcctgcccgctacagcgacccaccactgccccaagcagcctacatccacagcgggacacctgcactgctgcttccgcgtgtgctggcctgctggccctgtgtgtgtagtatcctggcccctcctggccccgtcagagcttgtgctgtcttcaatgcccagcgtctgtccctgccctgtactccatccagtgccctgaagtcagcccctccgcatgtgtgcccttctgcagccctctggcctccgtggccgggtggcgagtcctgcttctgtcctgggttaaatgaaggcttggcagctcccttgctgyctcatggggtgttttttggcctctatccctctctccctccactccaccctccctttttgctaccgcctgtctcttttggtttttgctgttgcctggaaggtaggggacgtcacggtgctctgcacagtagaggtagccctgattccgtggcactgacacccccacctcaaacgcagccccccatgatgtttcgtctctggggaagcacagccgtggctgaacagacacaggcgagcccctcagcccaggtgcctgtccccacaccccccca

SEQ ID NO: 30411 - DNA, 955 bp, Homo sapiens
actcctaccctgactgaccatcggcaaaatgcttcctgaggacgaggctgtctccatccttctgtcccttcctcagccctgcccttgcctcccctcctcgggaggctgcggaagcctcatgggccttctccagccagccactctggccactccagcattcctttcactgctttcatttgggtcacccctgtggagttagcttcagtgtttcccagtgacctagaagcaaagtccatctgttggcaagcatttattgagcatctatttttatgtgctaggggctggggagcccaagatgaaccaggcataggcccagccttcaatcagcctggcccatatgctgccttggcctggcattcacatttccacctgctcctcctgcccgctacagcgacccaccactgccccaagcagcctacatccacagcgggacacctgcactgctgcttccgcgtgtgctggcctgctggccctgtgtgtgtagtatcctggcccctcctggccccgtcagagcttgtgctgtcttcaatgcccagcgtctgtccctgccctgtactccatccagtgccctgaagtcagcccctccgcatgtgtgcccttctgcagccctctggcctccgtggccgggtggcgagtcctgcttctgtcctgggttaaatgaaggcttggcagctcccttgctgtctcatggggtgttttttggcctctatccctctctccctccactccaccctccctttttgctaccgcctgtctcttttggtttttgctgttgcctggaaggtaggggacgtcacggtgctytgcacagtagaggtagccctgattccgtggcactgacacccccacctcaaacgcagccccccatgatgtttcgtctctggggaagcacagccgtggctgaacagacacaggcgagcccctcagcccaggtgcctgtccccacaccccccca

SEQ ID NO: 30412 - DNA, 955 bp, Homo sapiens
actcctaccctgactgaccatcggcaaaatgcttcctgaggacgaggctgtctccatccttctgtcccttcctcagccctgcccttgcctcccctcctcgggaggctgcggaagcctcatgggccttctccagccagccactctggccactccagcattcctttcactgctttcatttgggtcacccctgtggagttagcttcagtgtttcccagtgacctagaagcaaagtccatctgttggcaagcatttattgagcatctatttttatgtgctaggggctggggagcccaagatgaaccaggcataggcccagccttcaatcagcctggcccatatgctgccttggcctggcattcacatttccacctgctcctcctgcccgctacagcgacccaccactgccccaagcagcctacatccacagcgggacacctgcactgctgcttccgcgtgtgctggcctgctggccctgtgtgtgtagtatcctggcccctcctggccccgtcagagcttgtgctgtcttcaatgcccagcgtctgtccctgccctgtactccatccagtgccctgaagtcagcccctccgcatgtgtgcccttctgcagccctctggcctccgtggccgggtggcgagtcctgcttctgtcctgggttaaatgaaggcttggcagctcccttgctgtctcatggggtgttttttggcctctatccctctctccctccactccaccctccctttttgctaccgcctgtctcttttggtttttgctgttgcctggaaggtaggggacgtcacggtgctctgyacagtagaggtagccctgattccgtggcactgacacccccacctcaaacgcagccccccatgatgtttcgtctctggggaagcacagccgtggctgaacagacacaggcgagcccctcagcccaggtgcctgtccccacaccccccca

SEQ ID NO: 30413 - DNA, 955 bp, Homo sapiens
actcctaccctgactgaccatcggcaaaatgcttcctgaggacgaggctgtctccatccttctgtcccttcctcagccctgcccttgcctcccctcctcgggaggctgcggaagcctcatgggccttctccagccagccactctggccactccagcattcctttcactgctttcatttgggtcacccctgtggagttagcttcagtgtttcccagtgacctagaagcaaagtccatctgttggcaagcatttattgagcatctatttttatgtgctaggggctggggagcccaagatgaaccaggcataggcccagccttcaatcagcctggcccatatgctgccttggcctggcattcacatttccacctgctcctcctgcccgctacagcgacccaccactgccccaagcagcctacatccacagcgggacacctgcactgctgcttccgcgtgtgctggcctgctggccctgtgtgtgtagtatcctggcccctcctggccccgtcagagcttgtgctgtcttcaatgcccagcgtctgtccctgccctgtactccatccagtgccctgaagtcagcccctccgcatgtgtgcccttctgcagccctctggcctccgtggccgggtggcgagtcctgcttctgtcctgggttaaatgaaggcttggcagctcccttgctgtctcatggggtgttttttggcctctatccctctctccctccactccaccctccctttttgctaccgcctgtctcttttggtttttgctgttgcctggaaggtaggggacgtcacggtgctctgcrcagtagaggtagccctgattccgtggcactgacacccccacctcaaacgcagccccccatgatgtttcgtctctggggaagcacagccgtggctgaacagacacaggcgagcccctcagcccaggtgcctgtccccacaccccccca

SEQ ID NO: 30414 - DNA, 955 bp, Homo sapiens
actcctaccctgactgaccatcggcaaaatgcttcctgaggacgaggctgtctccatccttctgtcccttcctcagccctgcccttgcctcccctcctcgggaggctgcggaagcctcatgggccttctccagccagccactctggccactccagcattcctttcactgctttcatttgggtcacccctgtggagttagcttcagtgtttcccagtgacctagaagcaaagtccatctgttggcaagcatttattgagcatctatttttatgtgctaggggctggggagcccaagatgaaccaggcataggcccagccttcaatcagcctggcccatatgctgccttggcctggcattcacatttccacctgctcctcctgcccgctacagcgacccaccactgccccaagcagcctacatccacagcgggacacctgcactgctgcttccgcgtgtgctggcctgctggccctgtgtgtgtagtatcctggcccctcctggccccgtcagagcttgtgctgtcttcaatgcccagcgtctgtccctgccctgtactccatccagtgccctgaagtcagcccctccgcatgtgtgcccttctgcagccctctggcctccgtggccgggtggcgagtcctgcttctgtcctgggttaaatgaaggcttggcagctcccttgctgtctcatggggtgttttttggcctctatccctctctccctccactccaccctccctttttgctaccgcctgtctcttttggtttttgctgttgcctggaaggtaggggacgtcacggtgctctgcacagtagaggtagccctgattccgtggcactgacacccccacctcaaacgcagccccccatgatgtttcgtctctggggaagcacagccgtggctgaacagacacaggcgagcccctcagcccaggtgcctgtccccacacccmccca

SEQ ID NO: 30415 - DNA, 1301 bp, Homo sapiens
aaacacaagtaatatattctacattattcagaattttttatgttggtaatgaggtttagagagtaaatcaaatcaaagtttatactgctttatttttctatgcagctacttaggtgcataaagcccattaggaatattaataactaatattaataatatggttaatacaagtcaggtactgtggggctttacatgggttatctcatgtcctcgtcacaatagtaacagtaggtccctaataatagatcattctcattttacagttgcagaactagaaattcagaggccgaaggacttgcctgagctcacacagcgagtggcagccggaagacgaactctggctgctgccttactccactttatcccacagcatggcacaaaaccaaatccaatcttaaggccatcacatgaaaccaaatgtaaaaatgttttgcratatatacaatcattaagtttgaacatgtttattaattttttttttttttgagacaaggtcttgctctgtctcccaggctggagtgcagtggtgcaatctcaggtcactgcaactctgcctcccagggtcaagcagtcctcttgtttcagacccccgagtagctgggaccacaggtgtgcgccaccatgctcaactaatttttgcgtattctgtagaggcaggcttttagcatgttgcccaggctggtctcaaactcctggactcaagcaatctgctcacctcagccttccaaagtgctgaggttacaggtgtgagccactgcgcttggactgaatgtggtttattttaatttgtatggaagataaaagcttttaaaaagtcacagatagcacaaccaagcacacagattttactatttagattaaaaaacaaaaatatctgtaggccaggactgataaaaaatgaaaacaagaacaaaaaaaacaaacatcaacgaagagttccactaaagtattctggatctactgcagagtagatggggatgaaaaagtttacccaccgcatggatttaaaaatcctttcgaggctgggcacagtggtcacgcctgaaatcccagcactgcaggaggccaagatgggagaatcatttgaggccaagagttcaaggccaccctggtcaacacagtgagacctcatttctgaaaataacaaaaaaactagccgggtgtggtagtatgagccagtaatctcagctactcgggagattgaggtgggaaggttgcttgagctggggaggtcaaggctacatacagtaagccatgactgtgccactgcacattggcctcgggaacagagcaagaccctg

SEQ ID NO: 30416 - DNA, 575 bp, Homo sapiens
tatattgatggttctgaatgaatattgcatgatggaatgggtgtcacttatttcctgaaaatattttactagcttatctttttacttaatatgtaaagcccttaccatggctcacagggccttccatggactttcccatgactgcttttcttatctcctatagcacgttctcctttattcatactagccttctatccgcaggcatgcggatagccctacctccaggctttttgccctttttgtttgctttttcctcatcctggaatcttctgcctctayatccttccttggtttgctctgtcttttcatgcacatctcaagtcaaatgttacttccttatagaggttttcctagactgccatccaattttaattaatccctttagccaggcactgttgatcacatcacctcaatgtttcctcacaggcctaagcattatctaaaattaccttttccattcattagtttattttctgttttccactactagaatgcaatcttcacatgtctaacgactttataaaatcaaaatttatcacagaatttgtagctcttagggcagagctagtaggtac

SEQ ID NO: 30417 - DNA, 630 bp, Homo sapiens
ttagaaaccgtcaacctcctccaaaaggtaaccacatccctcagatatcaccgtgggattccactgctacaaaaaagaacagaagttagagaagtctcatgtttttcagatggctggtagtgtttttaggcattgcaaatgtggggtgttgtctttcttggtataaagcagggatatccaatcttttgacttccctgcctatattaaaagaagcaaagttgtcttgagccacacataacatacactaacactaacaatagctgatgatctaaaaaaaaaaaattttttttgttttttttttttttgagacagagttctgctccactcagtcgcccaggctggagtgcagtggtgcaatctcggctcrctgcaacctccagctcctgggctcaagccattctcctgcctcagcctcccgagcagctgagattacaggtctctgccaccatgcccgactaatttttgtatttttagtagagatgaggtttcaccatgttgcccagtctggccttgaactcctgacaggcgatctgcctgcctcagcctcccaaagtgctgggattacaggtgtgagccaccgtgcccagccattttttttctttttgtttgttgtttgtttttgagatgggg

SEQ ID NO: 30418 - DNA, 542 bp, Homo sapiens
gagcctttcagtattttattaattcactaatgataaaatgagatcacatctacttaaaatatgacattctcacacgagatgtgatgtacatatggaaagttgattttttggcaatatgtcaaggagggaatgttttcagatttgcaggataacatttattttatgtgcttgatattcactttatgaaattggtgattgatgtcttttcatctrccactggctcttacaatggaaaagagggtcctgattccatttaacttgagtcacatgaacttgagttgagtaaaagaaaatggcgctcaaggttcagtcaacttcacggagaagtcgccatgtgtcacacacagcactaagtatgcaaaacacgccctctcacatgatcccaacaacagctctggaagtttccactctgcagaggaggaaattcaggcacatagcagttaagaagcccgcttgaggtcacacagtcagcaaggaacctggtgttttatttctggtgcatgagcagcaaatccagcatgaccccaacctctcattgtgtg

SEQ ID NO: 30419 - DNA, 542 bp, Homo sapiens
gagcctttcagtattttattaattcactaatgataaaatgagatcacatctacttaaaatatgacattctcacacgagatgtgatgtacatatggaaagttgattttttggcaatatgtcaaggagggaatgttttcagatttgcaggataacatttattttatgtgcttgatattcactttatgaaattggtgattgatgtcttttcatctgccactggctcttacaatggaaaagagggtcctgattccatttaacttgagtcacatgaacttgagttgagtaaaagaaaatggcgctcaaggttcartcaacttcacggagaagtcgccatgtgtcacacacagcactaagtatgcaaaacacgccctctcacatgatcccaacaacagctctggaagtttccactctgcagaggaggaaattcaggcacatagcagttaagaagcccgcttgaggtcacacagtcagcaaggaacctggtgttttatttctggtgcatgagcagcaaatccagcatgaccccaacctctcattgtgtg

SEQ ID NO: 30420 - DNA, 2129 bp, Homo sapiens
atagagaccatctcagatgtgtccttgcaggtctggcttctcttctgggatgatcacaatgacaatgacattaaaaaaaaaaaaaaagccatgcacatgaggagacacagtggtctagggagagtggcagagaaagtctataggcagctgggtgyggtggctcacacctgtaatcccagcattttgggaggctgaggctggcggatcacctgagatcaggagttcgagaccagcctggacaacatggtgaaacctgtctctactaaaaatacaaaaattagccaggtgtggtggtatacacttatagtcctagctacttgggaggctgaggcaagagaattgcctgaatccaggaagcagaggttgcagtgagccaagatcgtgccactgcactccagcctgggtgacagagcaagactccacctcaggaaaaaaaaaaaaaaaaaaaaaaactcaggtctacccaactccaaagccactgccccagcctccgccctactgagggatgcacaccaacctcctttcaaagcctgcattccctgatgctgctggaggcctagaaatttactccaaagctgggagatttatgcagctaatttccattaggactaacggaagaaagaaaaggccatatttcttgtaattagaagagaattcaatcttcacagccaatgcgtctaatatctcagcttatgtaacaaaagaaagagaatgcaaatggagataattaggggacagaaaaaaccatttgcattactggctgcaggagtgatggggtgaaggtataatacaattttggatggaaatagttctccgcagccagtcagggtggactttaaatgcccattatcatcaatgccagcgcttgtagacaggcaacagtgtggtagttctgcacatcacttacactatctcctaacacaaagggaattgtggaggagggactatgattacgcccatttcagagataaagaactaaggttctgaaaagcaatatgcctcaccaattatcacaaaatgcatcccatcactcagcctctatctaacaggcgcctacttcatgccaggcacacagacgatagctcctcagcagcccaggatgatccaggatccaaacctatgtctgtttcacactaaatccacttcccgtcagagcagaaactcattcaatatttgccaaatgaatgaattccttcaaagtttttattctgccgctatttctttgctgctggcaagagttcctagcagaggggcattgggatgaaacatcaaaagaagccggggccttgccagctgccatcagctccctgtgcctctgagatgggctgcttctgccggagccaggcttcaggtcttgtcctgcagccccggtgagcccccaatggtggcctgtgttcagcaactacaaaaggtatgagctaatggagtattgattttgtttttaaagcagcaaaaattgcaggcattgcagcaaagcacagccaaggagagggggagtgaagagtgaaaacccagcccctcaagatcccccagctccgccagtcctctgctttgctccaggggacaagaagaaggagccagaggctggaagggaatgggcacatcgtacaggcaggtgacacactgtgccatcggcatgccttgcctcctggggcctttgcaacagtcctggggcagagttactgatgctattgtacagatgagaaaaccagtgttcagaaaggataggtcccttgcccaatgtcacagaggcactgagtgacacaactgggaattaagtttttataactctagaacttgggttgttggctttgcactaaaagaaaccctaaaacacagactcttagaagaacttaaacacaccatgctaaggaggctgtttttctagttgttgttgtttgtttgttttttgattgagttttgctcttgttgcccaggctggagtgcaatggcacaattttggctcactgcaacctctgcctcccaggttcaagcgattctcctacctcagcctcccaagtagctgggattacaggcgcctgccaccacacctggctaaattttgtatttttagtagagacggggtttcaccatgttggccaggctggtctcgaactcctgacctcaga

SEQ ID NO: 30421 - DNA, 2129 bp, Homo sapiens
atagagaccatctcagatgtgtccttgcaggtctggcttctcttctgggatgatcacaatgacaatgacattaaaaaaaaaaaaaaagccatgcacatgaggagacacagtggtctagggagagtggcagagaaagtctataggcagctgggtgcggtggctcacacctgtaatcccagcattttgggaggctgaggctggcggatcacctgagatcaggagttcgagaccagcctggacaacayggtgaaacctgtctctactaaaaatacaaaaattagccaggtgtggtggtatacacttatagtcctagctacttgggaggctgaggcaagagaattgcctgaatccaggaagcagaggttgcagtgagccaagatcgtgccactgcactccagcctgggtgacagagcaagactccacctcaggaaaaaaaaaaaaaaaaaaaaaaactcaggtctacccaactccaaagccactgccccagcctccgccctactgagggatgcacaccaacctcctttcaaagcctgcattccctgatgctgctggaggcctagaaatttactccaaagctgggagatttatgcagctaatttccattaggactaacggaagaaagaaaaggccatatttcttgtaattagaagagaattcaatcttcacagccaatgcgtctaatatctcagcttatgtaacaaaagaaagagaatgcaaatggagataattaggggacagaaaaaaccatttgcattactggctgcaggagtgatggggtgaaggtataatacaattttggatggaaatagttctccgcagccagtcagggtggactttaaatgcccattatcatcaatgccagcgcttgtagacaggcaacagtgtggtagttctgcacatcacttacactatctcctaacacaaagggaattgtggaggagggactatgattacgcccatttcagagataaagaactaaggttctgaaaagcaatatgcctcaccaattatcacaaaatgcatcccatcactcagcctctatctaacaggcgcctacttcatgccaggcacacagacgatagctcctcagcagcccaggatgatccaggatccaaacctatgtctgtttcacactaaatccacttcccgtcagagcagaaactcattcaatatttgccaaatgaatgaattccttcaaagtttttattctgccgctatttctttgctgctggcaagagttcctagcagaggggcattgggatgaaacatcaaaagaagccggggccttgccagctgccatcagctccctgtgcctctgagatgggctgcttctgccggagccaggcttcaggtcttgtcctgcagccccggtgagcccccaatggtggcctgtgttcagcaactacaaaaggtatgagctaatggagtattgattttgtttttaaagcagcaaaaattgcaggcattgcagcaaagcacagccaaggagagggggagtgaagagtgaaaacccagcccctcaagatcccccagctccgccagtcctctgctttgctccaggggacaagaagaaggagccagaggctggaagggaatgggcacatcgtacaggcaggtgacacactgtgccatcggcatgccttgcctcctggggcctttgcaacagtcctggggcagagttactgatgctattgtacagatgagaaaaccagtgttcagaaaggataggtcccttgcccaatgtcacagaggcactgagtgacacaactgggaattaagtttttataactctagaacttgggttgttggctttgcactaaaagaaaccctaaaacacagactcttagaagaacttaaacacaccatgctaaggaggctgtttttctagttgttgttgtttgtttgttttttgattgagttttgctcttgttgcccaggctggagtgcaatggcacaattttggctcactgcaacctctgcctcccaggttcaagcgattctcctacctcagcctcccaagtagctgggattacaggcgcctgccaccacacctggctaaattttgtatttttagtagagacggggtttcaccatgttggccaggctggtctcgaactcctgacctcaga

SEQ ID NO: 30422 - DNA, 2129 bp, Homo sapiens
atagagaccatctcagatgtgtccttgcaggtctggcttctcttctgggatgatcacaatgacaatgacattaaaaaaaaaaaaaaagccatgcacatgaggagacacagtggtctagggagagtggcagagaaagtctataggcagctgggtgcggtggctcacacctgtaatcccagcattttgggaggctgaggctggcggatcacctgagatcaggagttcgagaccagcctggacaacatggtgaaacctgtctctactaaaaatacaaaaattagccaggtgtggtggtatacacttatagtcctagctacttgggaggctgaggcaagagaattgcctgaatccaggaagcagaggttgcagtgagccaagatcgtgccactgcactccagcctgggtgacagagcaagactccacctcaggaaaaaaaaaaaaaaaaaaaaaaactcaggtctacccaactccaaagccactgccccagcctccgccctactgagggatgcacaccaacctcctttcaaagcctgcattccctgatgctgctggaggcctagaaatttactccaaagctgggagatttatgcagctaatttccattaggactaacggaagaaagaaaaggccatatttcttgtaattagaagagaattcaatcttcacagccaatgcgtctaatatctcagcttatgtaacaaaagaaagagaatgcaaatggagataattaggggacagaaaaaaccatttgsattactggctgcaggagtgatggggtgaaggtataatacaattttggatggaaatagttctccgcagccagtcagggtggactttaaatgcccattatcatcaatgccagcgcttgtagacaggcaacagtgtggtagttctgcacatcacttacactatctcctaacacaaagggaattgtggaggagggactatgattacgcccatttcagagataaagaactaaggttctgaaaagcaatatgcctcaccaattatcacaaaatgcatcccatcactcagcctctatctaacaggcgcctacttcatgccaggcacacagacgatagctcctcagcagcccaggatgatccaggatccaaacctatgtctgtttcacactaaatccacttcccgtcagagcagaaactcattcaatatttgccaaatgaatgaattccttcaaagtttttattctgccgctatttctttgctgctggcaagagttcctagcagaggggcattgggatgaaacatcaaaagaagccggggccttgccagctgccatcagctccctgtgcctctgagatgggctgcttctgccggagccaggcttcaggtcttgtcctgcagccccggtgagcccccaatggtggcctgtgttcagcaactacaaaaggtatgagctaatggagtattgattttgtttttaaagcagcaaaaattgcaggcattgcagcaaagcacagccaaggagagggggagtgaagagtgaaaacccagcccctcaagatcccccagctccgccagtcctctgctttgctccaggggacaagaagaaggagccagaggctggaagggaatgggcacatcgtacaggcaggtgacacactgtgccatcggcatgccttgcctcctggggcctttgcaacagtcctggggcagagttactgatgctattgtacagatgagaaaaccagtgttcagaaaggataggtcccttgcccaatgtcacagaggcactgagtgacacaactgggaattaagtttttataactctagaacttgggttgttggctttgcactaaaagaaaccctaaaacacagactcttagaagaacttaaacacaccatgctaaggaggctgtttttctagttgttgttgtttgtttgttttttgattgagttttgctcttgttgcccaggctggagtgcaatggcacaattttggctcactgcaacctctgcctcccaggttcaagcgattctcctacctcagcctcccaagtagctgggattacaggcgcctgccaccacacctggctaaattttgtatttttagtagagacggggtttcaccatgttggccaggctggtctcgaactcctgacctcaga

SEQ ID NO: 30423 - DNA, 593 bp, Homo sapiens
ttataagtaggttctaagattctggggtcaaggattatgagaattgaggggttggtgcataaagagtttgttttaaatcttactttaggccaggtgcggtggcttttgcctataatcccagyactttgggaggctgaggcggtcggatcatgaggtcaagagattgagaccatcttggccaacatggtgaaaccctgtctctactaaaaatacaaaaattagctgggcgtggtggtgcacgcctgtagtcccagctactcaggaggctgaggcaggagaatcgcttgaacccgggaggcagaggttgcagtgagcggagatcatgccattgcactccagcctgggcaacaggagcgagactccatctcaaaaaaaaaaatcttactttaaatcccctgaaaaatatctaagaaactcaggctacacctgatatggaagacctgggtcaatcagtccatcaacaaatctttattaaatgccactaaatgcagggcaccatgctcagtgctgtgggcagctatctgagtagctcttgtttttaccgtagaattgtgatttgcagattctgatgaaaaggactatttatggcatgc

SEQ ID NO: 30424 - DNA, 577 bp, Homo sapiens
tggaggacagagcaagactccatctcaaaaagagaaaaagacatggagagaagggagacactactttgaaaagtccccccaccctccctttctgttcctcagcctctgatgaaatcccatgaaaatgaaggagaagacgcaagctctaagtcacacacgatctcagaggggtaggggacgaggacgcaggaggcagaggtggctgggactggcagccaccgaggccacatttgtgagcttcgtmatgtaaccagagatggggtagacaaggaggtcagagcgataacaagattcccacaaaatggcagggccaccagagatatttgtggccccattaacaaagaccagaaggccgggttgtcatggaaggaacatttctaaccgagcagcatctcagcacggctgttcagcgccataaacatccattcatctgtgcggggactgtgaggctaatgtgcctgtgggctgtggcactcctggagcagcgctgatgtattagaaggacccaaagcagttttaacgataaaaatatcttgaaagctcatcagtaaaaactgttgtgagctcagatcaagga

SEQ ID NO: 30425 - DNA, 577 bp, Homo sapiens
tggaggacagagcaagactccatctcaaaaagagaaaaagacatggagagaagggagacactactttgaaaagtccccccaccctccctttctgttcctcagcctctgatgaaatcccatgaaaatgaaggagaagacgcaagctctaagtcacacacgatctcagaggggtaggggacgaggacgcaggaggcagaggtggctgggactggcagccaccgaggccacatttgtgagcttcgtcatgtaaccagagatggggtagacaaggaggtcagagcgataacaagattcccacaaaatggcagggccaccagagatatttgtggccccattaacaaagaccagaaggccgggttgtcatggaaggaacatttstaaccgagcagcatctcagcacggctgttcagcgccataaacatccattcatctgtgcggggactgtgaggctaatgtgcctgtgggctgtggcactcctggagcagcgctgatgtattagaaggacccaaagcagttttaacgataaaaatatcttgaaagctcatcagtaaaaactgttgtgagctcagatcaagga

SEQ ID NO: 30426 - DNA, 882 bp, Homo sapiens
tcatcatcctcctgagctcctcccaatagcggaactggcacgcggcagagctcagagggtggatctccagggtaaaggggccaacaggtcccaagcaattcgttaggcttcatggctggacgggcggccacttcttttgttgcagcttttttctaaaaccctgagatttcccctaacagggaagtaaatgtagagaattcagaatgagccctcatgttcaacrtgcagcatcaatggaagacagcctggaggtccctcaaacaaacaaacttagaatcaccctgtgacccagcaattccactcccaggcatatgcccagcagaattgaaaacatctgtgtacacaaaaacttatgcatgagagttcacagcagcatgactggtaacagccaaagaggggcaacaacccagatgtccagagaagtaactggtctgtccacacaatggagtattactcagccattaacaaatgaagtcctagccattaataaacaaacaaaaaaaagacttgctggggctgggcttggtggctcagcactttgggaggtcaaggcgggtgaatcactagcgggcaggagtttgagaccagcctggccaacatgtcaaaaccccgtctctactaaaagaacaaaaattacccaggtgtggtggtgcacacctataatcccagctactctggaggctgaggcagctactctggaggctgaggtgtggtggctcacacctgtaatcccagcactttgggaggccgaggtgggctgatcacttgaggtcaggagtttgagaccagcctggtcaacatggtgaaaccctgtctctactaaaaatacaaaaaattagccaggtgtggtggtgcatgcctgtaatctcagctactgaggag

SEQ ID NO: 30427 - DNA, 616 bp, Homo sapiens
tgctgcctgctatttctactgccactacaatgactattttactacctttgttgttgatgttgcctaacctacttttcccaagattttacatacactcaaatatattcccaagattttacatatactcataatactcatattcatgccatagcagtaaataaagtatgattaaggaggaaaaagtgaatgaataaatatgatctccttacctctgaacatttttcccctgatttttagcatattactatctacataaaccatcccctcctattacagtactagcacaaagatatttctttttactcagtcaggggagttgtatcaggagaggaagagctaatttggtctttttctaaaatccttaagttctcgtatcatctttgttcctgtctgggtgactttagaatcaatgcttttctaaaattaaagtttgtaaataaagagtagaagtaaaaataacatgtgatcttcacttcttcaatggtcaaatgaatgtcaatattatgcaaagcttctggaataacactccaycattatattaataagagttaggctacatcgaaaataagtacagttttcaagataaattcctttaaaaatcacagatagctccaat

SEQ ID NO: 30428 - DNA, 560 bp, Homo sapiens
caacttatgtattagctcatttaacactcacaacttcagtgaaatagctattactmtgcctatcactggaatttgatggcatgttttattttaagagcccctatataatctgtgaaatatttatcctagcatatttggcacactgtgtaccttaagtgttcagaatgtcagcctatcgttcatgacacttgcgtaggtgaattggcagaagtggtggagggaacttattgaggatgggtggcaaggattgttgttgagcaactatcttggctttgaagaagaggacacctggatggacccaagttttgtcctgccaaaagctgatacaattttggtggtgtcttcaagaaaaattattcacatttttaaaaaacaaaactatgcatgggacttggaaagggcacgtaaaactggagtgttctgaaacttaagctctgtggtcttcacagtcacgagatttctgaaaatatggcttaactcatgtgaaaatagttttggtgactgtctaacttttgtaagttagtctcatagctgagggctgcagactaacaccatttcat

SEQ ID NO: 30429 - DNA, 560 bp, Homo sapiens
caacttatgtattagctcatttaacactcacaacttcagtgaaatagctattactatgcctatcactggaatttgatggcatgttttattttaagagcccctatataatctgtgaaatatttatcctagcatatttggcacactgtgtaccttaagtgttcagaatgtcagcctatcgttcatgacacttgcrtaggtgaattggcagaagtggtggagggaacttattgaggatgggtggcaaggattgttgttgagcaactatcttggctttgaagaagaggacacctggatggacccaagttttgtcctgccaaaagctgatacaattttggtggtgtcttcaagaaaaattattcacatttttaaaaaacaaaactatgcatgggacttggaaagggcacgtaaaactggagtgttctgaaacttaagctctgtggtcttcacagtcacgagatttctgaaaatatggcttaactcatgtgaaaatagttttggtgactgtctaacttttgtaagttagtctcatagctgagggctgcagactaacaccatttcat

SEQ ID NO: 30430 - DNA, 1905 bp, Homo sapiens
  misc_feature (1)...(1905): n = A,T,C or G
cnnnnnnnnnnnnnnnnnnnnnnnnnnnnnnnnnnnnnnnnnnnnnnnnnnnnnnnnnnnnnnnnnnnnnnnnnnnnnnnnnnnnnnnnnnnnnnnnnnnntttcatattttcctacatgtctgtgaggctcgcttaattttatatttcactgtttcttcagggtgcgcgtgtctgtgtgtgttagaacttgtgagtttctgcgtgtgtgtgagtatgggtgtgttttcagtgtgtgtgtgtgtgtgtgtgtgtgtgtgtgtagctcattctgtaggttctctagaattgtgtgttgggtaatgttttcctctgaaacgtctaatttgatcagccggccatacagtaatttttttcaattaagacatactttttttatactasctctttaatttaatttggctattctgtactgttaatttctcttgatatgatatctgctttcttgcatgttgtttttttaaatatttgaaatcagttatcatactgatatgtcaaattttcacgcaattctaatcatttctctcattcctgagcctgtttgtattacccgatttatttcctggtcatgggtcacacgaaacgcttttctacatgtagtcagattttaaatttaggactcactctgcggataccgcatagctgaggcaatcgactttgttgtttacttctaaagagagttgagatttcctctcacaggcacttcattgattggaaaccgatttgatgcttggacacttgctttccagctgtgcaaggggttgtctgcagctgactttattctagtaatatactaagtgtacctttaaattacggctgttctggggtctccactgaattggcaatgtgctccgtgaggactctctggtctagctgggaagaactccagtatcccagagtgctatgtgatctctctcttctttattgagcttcctgtgctcttgtacttgctgtttctcagtaaatgttctttgccacactttctcgtggaaccatttcctgtgcacaggcagcgtcatgtcaggccaacgactggaggagacttctatgcgtatttgtagagctcttttcctccacaaaccagttcttatttctagcagacctagaaaaatttcagctaccacagtcatcccaaactccaatccctctcctccattcagcaagatggctacagtctgcttgggctccatctccttgctattcagtgcaggaagggtatccaggaagaaagccaaggcatctgcggagtggagcccatcattgcccctctctcaattctctaggtcctctaccatctgttgtcccacatgtagaaaccatttttccatgtctctggtagtcgcttgtggccaaaatattggccattgggtggtcagacccgggcttctctccatccacccatcccttttacttttcagcatccctctctgtgctgactctcatctgccttccttccttggatcttctcttgctgggaacctgtatcccttcaggccactggtacttaggaacgagtgtttttctgacaatcggaatatacgtagatatagaaacagatcaattcacctgtccataaataagcacctattctttcctcttgaacccagagagaaaaggcaaacgcaaccttcccttcaggaagtggaagccagaataacggaattccaactggaaagtctccattgacgtttagttggtgttgtggaagggtaatctaagtgtctggtcctttgtcattctgactttcttcataatgtgatctcctcacctccagatttcccttctgctcaatagaactaggaggaaggagagggagcttaacatttcccttctctcagacccttagctccaaggcaatcatcctgagacattttgctacgccatctgcatctgtcacaagttgagt

SEQ ID NO: 30431 - DNA, 1824 bp, Homo sapiens
caccaaagcaacagattcctcccattctagaactgtagtaagttcttggaaatatttcacctgacaccttagagaaacacaacagatcagattcctcattggaaagtgagctcacgaggtagcacctttctaggaaactctactgaatcttcatgcaaacggcaccgcatttggcaatgcgggctgcaggtggtaattggctgtcgggggcagagtttgggacagacatggaaattttgcatgtttccctagaccgttgatcatgaaagccaaggcctttggcttccgggccatggggcagaaaacggtcctatgtatctgactgaagacaaagacactttgcttctcagggatgtgtgcacgccaaaagcttcttcccttggasgagagagggaatcctctcatgccctgcatcctgaattgtagtaaagtaggagtctactactctttctctctagacccctcacaggtacaagtgtcatcagaaagaggtttaagaatactgagaaatcactcccttcaaagcctagggctgaagagccttagagcactgggagctcatgtactgctccatagacccagggccacatggaatcaatgcagccctcttaggtttctcgagggtgacaggctccagagccacatttctcagaatctgcaatgctgaagattgctctgaatgctggctacttgaagaaatccccggaaaagcttactggcttggaaagagtgacacacctgacagcatgttacaataaaaattttggctgggacactgaggtagcccgttttacaacaaggtgaattttgaagtcgatccccctggagggtttgtgcccatcctaaagacaaagcccaaccacgttgcaccagaaatcactccgctggctcccccagagagtgcacggaggcttcctcctacatggtagaactcaggcaacactcgagcatccgtttaccattgaaggcggctgcatcagtgggaatttccatggcttttcatcccagcatcgaagcgtgtagatgtctggccacagactccttaccttgttcggaaggagcctctaggcttggaaccggggtaacagtcggaggcgcgacggcagtcccttctgcgtctgagcattgcgtcaggttgcagtactcccacctgacaccgggatccctcgtataacaataaggagctgccacagcatctggattcctgcagtagttcatgatcaagccactggaaattccaaaacgatacacgtcacaagaggtgggacaacatgcaggggcaccccacactctctcctttgtgctgcaacaaggtcattaccggtgcctttctaatattcccattaaaagtaccatatgattgccaccagcaaaaatggctctcgatcactaatcctctctgcacatctctcatacttaatagattattactattttttttaaataaaaaatctaaagtagcaaacgcttcttagaaacactgagataacacacacacgtggccgaaaaacgatcagagtattctccttctgccttctgcccaatccatctctctggaataactggtatgggttttgacgtctgtattgtgggattgtgtattcacatgcaaatgcatctgtatctgtctagtctccgtatctctctcggtaggacttcatattctaatgtgggagttgcaacgaacatgtagttcttcagaaaacacacgtcatccaggaggatagccgttccaggtcaaccctcacactctatgtactcaatacgtagtgaaaaggctctacctttcccacagaaaagcattgtgcaaatagtattactgtc

SEQ ID NO: 30432 - DNA, 1824 bp, Homo sapiens
caccaaagcaacagattcctcccattctagaactgtagtaagttcttggaaatatttcacctgacaccttagagaaacacaacagatcagattcctcattggaaagtgagctcacgaggtagcacctttctaggaaactctactgaatcttcatgcaaacggcaccgcatttggcaatgcgggctgcaggtggtaattggctgtcgggggcagagtttgggacagacatggaaattttgcatgtttccctagaccgttgatcatgaaagccaaggcctttggcttccgggccatggggcagaaaacggtcctatgtatctgactgaagacaaagacactttgcttctcagggatgtgtgcacgccaaaagcttcttcccttggaggagagagggaatcctctcatgccctgcatcctgaattgtagtaaagtaggagtctactactctttctctctagacccctcacaggtacaagtgtcatcagaaagaggtttaagaatactgagaaatcactcccttcaaagcctagggctgaagagccttagagcactgggagctcatgtactgctccatagacccagggccacatggaatcaatgcagccctsttaggtttctcgagggtgacaggctccagagccacatttctcagaatctgcaatgctgaagattgctctgaatgctggctacttgaagaaatccccggaaaagcttactggcttggaaagagtgacacacctgacagcatgttacaataaaaattttggctgggacactgaggtagcccgttttacaacaaggtgaattttgaagtcgatccccctggagggtttgtgcccatcctaaagacaaagcccaaccacgttgcaccagaaatcactccgctggctcccccagagagtgcacggaggcttcctcctacatggtagaactcaggcaacactcgagcatccgtttaccattgaaggcggctgcatcagtgggaatttccatggcttttcatcccagcatcgaagcgtgtagatgtctggccacagactccttaccttgttcggaaggagcctctaggcttggaaccggggtaacagtcggaggcgcgacggcagtcccttctgcgtctgagcattgcgtcaggttgcagtactcccacctgacaccgggatccctcgtataacaataaggagctgccacagcatctggattcctgcagtagttcatgatcaagccactggaaattccaaaacgatacacgtcacaagaggtgggacaacatgcaggggcaccccacactctctcctttgtgctgcaacaaggtcattaccggtgcctttctaatattcccattaaaagtaccatatgattgccaccagcaaaaatggctctcgatcactaatcctctctgcacatctctcatacttaatagattattactattttttttaaataaaaaatctaaagtagcaaacgcttcttagaaacactgagataacacacacacgtggccgaaaaacgatcagagtattctccttctgccttctgcccaatccatctctctggaataactggtatgggttttgacgtctgtattgtgggattgtgtattcacatgcaaatgcatctgtatctgtctagtctccgtatctctctcggtaggacttcatattctaatgtgggagttgcaacgaacatgtagttcttcagaaaacacacgtcatccaggaggatagccgttccaggtcaaccctcacactctatgtactcaatacgtagtgaaaaggctctacctttcccacagaaaagcattgtgcaaatagtattactgtc

SEQ ID NO: 30433 - DNA, 1824 bp, Homo sapiens
caccaaagcaacagattcctcccattctagaactgtagtaagttcttggaaatatttcacctgacaccttagagaaacacaacagatcagattcctcattggaaagtgagctcacgaggtagcacctttctaggaaactctactgaatcttcatgcaaacggcaccgcatttggcaatgcgggctgcaggtggtaattggctgtcgggggcagagtttgggacagacatggaaattttgcatgtttccctagaccgttgatcatgaaagccaaggcctttggcttccgggccatggggcagaaaacggtcctatgtatctgactgaagacaaagacactttgcttctcagggatgtgtgcacgccaaaagcttcttcccttggaggagagagggaatcctctcatgccctgcatcctgaattgtagtaaagtaggagtctactactctttctctctagacccctcacaggtacaagtgtcatcagaaagaggtttaagaatactgagaaatcactcccttcaaagcctagggctgaagagccttagagcactgggagctcatgtactgctccatagacccagggccacatggaatcaatgcagccctcttaggtttctcgagggtgacaggctccagagccacatttctcagaatctgcaatgctgaagattgctctgaatgctggctacttgaagaaatccccggaaaagcttactggcttggaaagagtgacacacctgacagcatgttacaataaaaattttggctgggacactgaggtagcccgttttacaacaaggtgaattttgaagtcgatccccctggagggtttgtgcccatcctaaagacaaagcccaaccacgttgcaccagaaatcactccgctggctcccccagagagtgcacggaggcttcctcctacatggtagaactcaggcaacactcgagcatccgtttaccattgaaggcggctgcatcagtgggaatttccatggcttttcatcccagcatcgaagcgtgtagatgtctggccacagactccttaccttgttcggaaggagcctctaggcttggaaccggggtaacagtcggaggcgcgacggcagtcccttctgcgtctgagcattgcgtcaggttgcagtactcccacctgacaccgggatccctcgtataacaataaggagctgccacagcatctggattcctgcagtagttcatgatcaagccactggaaattccaaaacgatacacgtcacaagaggtgggacaacatgcaggggcaccccacactctctcctttgtgctgcaacaaggtcattaccggtgcctttctaatattcccattaaaagtaccatatgattgccaccagcaaaaatggctctcgatcactaatcctctctgcacatctctcatacttaatagaytattactattttttttaaataaaaaatctaaagtagcaaacgcttcttagaaacactgagataacacacacacgtggccgaaaaacgatcagagtattctccttctgccttctgcccaatccatctctctggaataactggtatgggttttgacgtctgtattgtgggattgtgtattcacatgcaaatgcatctgtatctgtctagtctccgtatctctctcggtaggacttcatattctaatgtgggagttgcaacgaacatgtagttcttcagaaaacacacgtcatccaggaggatagccgttccaggtcaaccctcacactctatgtactcaatacgtagtgaaaaggctctacctttcccacagaaaagcattgtgcaaatagtattactgtc

SEQ ID NO: 30434 - DNA, 1824 bp, Homo sapiens
caccaaagcaacagattcctcccattctagaactgtagtaagttcttggaaatatttcacctgacaccttagagaaacacaacagatcagattcctcattggaaagtgagctcacgaggtagcacctttctaggaaactctactgaatcttcatgcaaacggcaccgcatttggcaatgcgggctgcaggtggtaattggctgtcgggggcagagtttgggacagacatggaaattttgcatgtttccctagaccgttgatcatgaaagccaaggcctttggcttccgggccatggggcagaaaacggtcctatgtatctgactgaagacaaagacactttgcttctcagggatgtgtgcacgccaaaagcttcttcccttggaggagagagggaatcctctcatgccctgcatcctgaattgtagtaaagtaggagtctactactctttctctctagacccctcacaggtacaagtgtcatcagaaagaggtttaagaatactgagaaatcactcccttcaaagcctagggctgaagagccttagagcactgggagctcatgtactgctccatagacccagggccacatggaatcaatgcagccctcttaggtttctcgagggtgacaggctccagagccacatttctcagaatctgcaatgctgaagattgctctgaatgctggctacttgaagaaatccccggaaaagcttactggcttggaaagagtgacacacctgacagcatgttacaataaaaattttggctgggacactgaggtagcccgttttacaacaaggtgaattttgaagtcgatccccctggagggtttgtgcccatcctaaagacaaagcccaaccacgttgcaccagaaatcactccgctggctcccccagagagtgcacggaggcttcctcctacatggtagaactcaggcaacactcgagcatccgtttaccattgaaggcggctgcatcagtgggaatttccatggcttttcatcccagcatcgaagcgtgtagatgtctggccacagactccttaccttgttcggaaggagcctctaggcttggaaccggggtaacagtcggaggcgcgacggcagtcccttctgcgtctgagcattgcgtcaggttgcagtactcccacctgacaccgggatccctcgtataacaataaggagctgccacagcatctggattcctgcagtagttcatgatcaagccactggaaattccaaaacgatacacgtcacaagaggtgggacaacatgcaggggcaccccacactctctcctttgtgctgcaacaaggtcattaccggtgcctttctaatattcccattaaaagtaccatatgattgccaccagcaaaaatggctctcgatcactaatcctctctgcacatctctcatacttaatagattattactattttttttaaataaaaaatctaaagtagcaaacgcttcttagaaacactgagataacacayacacgtggccgaaaaacgatcagagtattctccttctgccttctgcccaatccatctctctggaataactggtatgggttttgacgtctgtattgtgggattgtgtattcacatgcaaatgcatctgtatctgtctagtctccgtatctctctcggtaggacttcatattctaatgtgggagttgcaacgaacatgtagttcttcagaaaacacacgtcatccaggaggatagccgttccaggtcaaccctcacactctatgtactcaatacgtagtgaaaaggctctacctttcccacagaaaagcattgtgcaaatagtattactgtc

SEQ ID NO: 30435 - DNA, 1824 bp, Homo sapiens
caccaaagcaacagattcctcccattctagaactgtagtaagttcttggaaatatttcacctgacaccttagagaaacacaacagatcagattcctcattggaaagtgagctcacgaggtagcacctttctaggaaactctactgaatcttcatgcaaacggcaccgcatttggcaatgcgggctgcaggtggtaattggctgtcgggggcagagtttgggacagacatggaaattttgcatgtttccctagaccgttgatcatgaaagccaaggcctttggcttccgggccatggggcagaaaacggtcctatgtatctgactgaagacaaagacactttgcttctcagggatgtgtgcacgccaaaagcttcttcccttggaggagagagggaatcctctcatgccctgcatcctgaattgtagtaaagtaggagtctactactctttctctctagacccctcacaggtacaagtgtcatcagaaagaggtttaagaatactgagaaatcactcccttcaaagcctagggctgaagagccttagagcactgggagctcatgtactgctccatagacccagggccacatggaatcaatgcagccctcttaggtttctcgagggtgacaggctccagagccacatttctcagaatctgcaatgctgaagattgctctgaatgctggctacttgaagaaatccccggaaaagcttactggcttggaaagagtgacacacctgacagcatgttacaataaaaattttggctgggacactgaggtagcccgttttacaacaaggtgaattttgaagtcgatccccctggagggtttgtgcccatcctaaagacaaagcccaaccacgttgcaccagaaatcactccgctggctcccccagagagtgcacggaggcttcctcctacatggtagaactcaggcaacactcgagcatccgtttaccattgaaggcggctgcatcagtgggaatttccatggcttttcatcccagcatcgaagcgtgtagatgtctggccacagactccttaccttgttcggaaggagcctctaggcttggaaccggggtaacagtcggaggcgcgacggcagtcccttctgcgtctgagcattgcgtcaggttgcagtactcccacctgacaccgggatccctcgtataacaataaggagctgccacagcatctggattcctgcagtagttcatgatcaagccactggaaattccaaaacgatacacgtcacaagaggtgggacaacatgcaggggcaccccacactctctcctttgtgctgcaacaaggtcattaccggtgcctttctaatattcccattaaaagtaccatatgattgccaccagcaaaaatggctctcgatcactaatcctctctgcacatctctcatacttaatagattattactattttttttaaataaaaaatctaaagtagcaaacgcttcttagaaacactgagataacacacacacgtggccgaaaaacgatcagagtattctccttctgccttctgcccaatccatctctctggaataactggtatgggttttgacgtctgtattgtgggattgtgtattcacatgcaaaygcatctgtatctgtctagtctccgtatctctctcggtaggacttcatattctaatgtgggagttgcaacgaacatgtagttcttcagaaaacacacgtcatccaggaggatagccgttccaggtcaaccctcacactctatgtactcaatacgtagtgaaaaggctctacctttcccacagaaaagcattgtgcaaatagtattactgtc

SEQ ID NO: 30436 - DNA, 2020 bp, Homo sapiens
tagttttcaccggagcctgacagccgaactccgaaagcacatgcagaggccagatacctccttatttatataataatattaagaagaagaaaaattaggatacctggaagaaatgtctcttagaaaggaaatacatattctaattcttgacccccttgattagacaaatcagagggaaaaactctggcaaagctgccaacatcaatctggcaaatacgcttttgtggtttagtctcaaaagctgtaaaatcacagaaaaagacactccaatgtcagtaaatatctataaagattaagccttaattcataaattgaagggctaggccgatgaggcatagtggagactcttttataaacaatctaatatccttgaaggaaaaagcatcttaacactatgtctgtcccttgcccatttacccgctatattctgtctatattttcactgaatttgggtcctgcttcttatgctttatgacaatgtgtggtacagccctttgaatcactgtttcttaaacttttttgtaccatagcatctagtatgtaatatgtgaaacaaaaattttacaaaggaaaacttgcttttactatttagataaatggtgattttttattcaacgtatttatgattttatctttttaaaagactgatgacaactcactaaattgatcttgtaatgtgctaggtcacaatatgccttcagagaaaacactagctgtctgtcttctccctggctctgactcacccttgttttataacagatgctgcaatgtacaacaactctgaagccctgcccacctctcctatggcacccacaacctatggtatatgtgattcctaattacacaaattaatttgaagggacttactgggggatgaagaagggtggagagttgcaaagccctggctgtgtgggaggctttacaccagttggctttggatgaagagtagccctggaaaggtaggactgtctacctccaagttatggatccaaatatactctcttcactatggattcatgtgcttcttcagctgaggcagagtctggagttgtcctaatttctccatgaaagtttgggaatttggggtcagaaacagggaaagggacattcctgggtcagacccatagtgggtatttctaaggaggggtggaaatcaaagaaacaaaatgctgatatctccaattggagataaatatgccatgtatgcattgctttaggcagtcattggtgacactagccagcaatgtgggaaacatgtgggattgaatgtgtccaaagaggactttcagctaccttggcatgtctcaaagaatgcagagagtgaaactggttcctcacctgtttttcatgaggtgtgattaagggactacagactcaggccataataatacagagacaaaattttgggaagaatagaaaaactcaccattactctgtctgacacatggagagggggagactactgtcttatggaagagggaaataggataggggaacaaagtaataaacagattgggcgtggtggctcacacctgtaatcccagcactttgggaggcagaggcaggcagatcatgaggtcaggagttcgagaccagactggccaacatggagaaaccccatctctactaaagatacaaaaattagccgggcgtagtggcgcatgcctgtaatcccagctactcaggaggctgaggcagaattscttgaacctgggagggggaggtttcagtgagccaagatcatgccattgcactccatcctgagggacagaacaagactctatctcaggaaaaaaaaaaagtaataaaacagtagcaagaaaacaaaacagtagcaagagcaagaataagcagaagtattaaggtggcatcttccataattatcctcaaggaacagggtctacctccatgtttccagttcagtccctcatacttttacttgacctgtgagatgattgtattctctgccttctctccctggtcacagatccaatgcttaaagttgatgacagcaacactc

SEQ ID NO: 30437 - DNA, 2020 bp, Homo sapiens
tagttttcaccggagcctgacagccgaactccgaaagcacatgcagaggccagatacctccttatttatataataatattaagaagaagaaaaattaggatacctggaagaaatgtctcttagaaaggaaatacatattctaattcttgacccccttgattagacaaatcagagggaaaaactctggcaaagctgccaacatcaatctggcaaatacgcttttgtggtttagtctcaaaagctgtaaaatcacagaaaaagacactccaatgtcagtaaatatctataaagattaagccttaattcataaattgaagggctaggccgatgaggcatagtggagactcttttataaacaatctaatatccttgaaggaaaaagcatcttaacactatgtctgtcccttgcccatttacccgctatattctgtctatattttcactgaatttgggtcctgcttcttatgctttatgacaatgtgtggtacagccctttgaatcactgtttcttaaacttttttgtaccatagcatctagtatgtaatatgtgaaacaaaaattttacaaaggaaaacttgcttttactatttagataaatggtgattttttattcaacgtatttatgattttatctttttaaaagactgatgacaactcactaaattgatcttgtaatgtgctaggtcacaatatgccttcagagaaaacactagctgtctgtcttctccctggctctgactcacccttgttttataacagatgctgcaatgtacaacaactctgaagccctgcccacctctcctatggcacccacaacctatggtatatgtgattcctaattacacaaattaatttgaagggacttactgggggatgaagaagggtggagagttgcaaagccctggctgtgtgggaggctttacaccagttggctttggatgaagagtagccctggaaaggtaggactgtctacctccaagttatggatccaaatatactctcttcactatggattcatgtgcttcttcagctgaggcagagtctggagttgtcctaatttctccatgaaagtttgggaatttggggtcagaaacagggaaagggacattcctgggtcagacccatagtgggtatttctaaggaggggtggaaatcaaagaaacaaaatgctgatatctccaattggagataaatatgccatgtatgcattgctttaggcagtcattggtgacactagccagcaatgtgggaaacatgtgggattgaatgtgtccaaagaggactttcagctaccttggcatgtctcaaagaatgcagagagtgaaactggttcctcacctgtttttcatgaggtgtgattaagggactacagactcaggccataataatacagagacaaaattttgggaagaatagaaaaactcaccattactctgtctgacacatggagagggggagactactgtcttatggaagagggaaataggataggggaacaaagtaataaacagattgggcgtggtggctcacacctgtaatcccagcactttgggaggcagaggcaggcagatcatgaggtcaggagttcgagaccagactggccaacatggagaaaccccatctctactaaagatacaaaaattagccgggcgtagtggcgcatgcctgtaatcccagctactcaggaggctgaggcagaattgcttgaacctgggagggggaggtttcagtgagccaagatcatgccattgcactccatcctgagggacagaacaagactctatctcaggaaaaaaaaaaagtaataaaacagtagcaagaaaamaaaacagtagcaagagcaagaataagcagaagtattaaggtggcatcttccataattatcctcaaggaacagggtctacctccatgtttccagttcagtccctcatacttttacttgacctgtgagatgattgtattctctgccttctctccctggtcacagatccaatgcttaaagttgatgacagcaacactc

SEQ ID NO: 30438 - DNA, 880 bp, Homo sapiens
ataagtttctctattttagctagttttagggcttatcataatttccctgttcttgtgctcttgattttctttcaaactctgaattactacagagtagaaaaactgcaattcgcagtatgcacctctaccagggttctttttttttttttttttttttttttgaggcggagtctggctctgtcacccaggctggagtacagtggcccaatctcgcctcactgcaagctccgcctcctgggttcatgccattctcctgcctgagcctcccaagtaactgggactacaggcaccctccaccacgcctggctaatttttttttttttttttttttgtatttttagtagagacggggtctcamcatgttagccaggatggtctcgatctcctgaccttgtgatccacctgcctcggcctcccaaagtgctgggattacaggcgtgagccactgcacccggcctttaccagggttcttttgtctccattgcctcacttgtggaaatcacatctccggacttacaatatgtgtcatcctgtgccggtacccttactgccagggtcatccatatctgtatgagtgtgcagagatggttgtactggatggtgtgtgtgtttgtgcacgcatgtgtgcaaaggcagaagagcccttactgggcagtgcccaacataggtggagggctagcttcctggctttctggtgatgataaagaaggtacaaatatatcttccttttatttttgttagactctctgttttgagaagcaaagccagatcattccatgagctgaaaactaaagtaaggttatacaatttcttctctgtctgcccatgtctaatatctgttattccaaggttttgtctttttattgtctttgttttcaac

SEQ ID NO: 30439 - DNA, 377 bp, Homo sapiens
  misc_feature (1)...(377): n = A,T,C or G
tnnnnnnnnnnnnnnnnnnnnnnnnnnnnnnnnnnnnnnnnnnnnnnnnnnnnnnnnnnnnnnnnnnnnnnnnnnnnnnnnnnnnnnnnnnnnnnnnnnnnagctgggattacagtcatgcaccaccatacctggctaatttttgtatttttagtagagaygctgtttcaccatgttggccagaatggtctccaactcctgacctcaagtgatccacccgccttggcctcccaaagtgctgggattacaggtgtgagagactatgcccagcctaagaatatttaatcccacagatggtaatacagacaaatctcatgagattggcttatgcaagttcaataaagttgatcagaagagctcctactgtaacagcatat

SEQ ID NO: 30440 - DNA, 628 bp, Homo sapiens
cggtgagccaagattgtgccactgtactccagcctgggtgacagagcgagaccctgtatcaaaaaaaaaattttttttttttttgttaattagccaggcgtggtggcccacatctgcggtcctagctactcagsaggctgaggtgggaggattgcttgagcccgggagttccaggttgcagtgagcatatgatcatgctacctcactgcagcttgggtgacacagcaagatcctgtctctctctctctctctctctcacacacacacacacacacacacacacacacaaattaagtaaataaataaataaacataaggtgtttaagaaagaagaaaaacgcctctttataccataatttccacatctgagaatttacatgaagaaaactatcaaaaaagtagagcaagatttacttttaaaaagatgttcatggaggtgtcataaaagtaataaattctaggccaggtgtggtggctcatgcctgtaatcctagtggcattttgggaggctgaggagggaggatctctcgcttcaacctgggaggttgaggctgcagtgaactgaaataacgtcactgcacccagccctgggggtcagagtgagcttttgtctcaaaaaaaaaaaaaa

SEQ ID NO: 30441 - DNA, 556 bp, Homo sapiens
acaagggacttgagaatccttggattctggcatccacaaagggttcctggagccaatccttcccctactccaggataccgaggacaactgtattctcatggttttcatatcaacattaagaaaatctgaccactctacaaggctggcatttggaagaaagtgaagggattctagcagtttttaggcttgactctgccagttgtggaaagagtgcaatgtgctcccactgtcttcgggtgggggacagctagcagtgtgtggggaaagtgctggtctcatcccagatgcacagcagtcacctgctccctgctgccaagcctcctgtgggcctgtggagggctgccctgcacacctgcagggcgcaagagaccctgtttttcttcctttcctcttccattttccctttcccttgagtgcctgaagcgtgttttaagggtgggaggaaaattcaaaggtttcccaattggctattttgtcatgagaggctttgttctagcygtgttggtcctggcaaacttgaggtcaaagtaggaggtagaatttcctcccaaggtcc

SEQ ID NO: 30442 - DNA, 556 bp, Homo sapiens
acaagggacttgagaatccttggattctggcatccacaaagggttcctggagccaatccttcccctactccaggataccgaggacaactgtattctcatggttttcatatcaacattaagaaaatctgaccactctacaaggctggcatttggaagaaagtgaagggattctagcagtttttaggcttgactctgccagttgtggaaagagtgcaatgtgctcccactgtcttcgggtgggggacagctagcagtgtgtggggaaagtgctggtctcatcccagatgcacagcagtcacctgctccctgctgccaagcctcctgtgggcctgtggagggctgccctgcacacctgcagggcgcaagagaccctgtttttcttcctttcctcttccattttccctttcccttgagtgcctgaagcgtgttttaagggtgggaggaaaattcaaaggtttcccaattggctattttgtcatgagaggctttgttctagctgtgttggtcctggcaaacttgaggtcaaagtaggaggtagaatttsctcccaaggtcc

SEQ ID NO: 30443 - DNA, 1162 bp, Homo sapiens
tgaggtcaagagattgagactatcctggccaacatggtgaaaccccacctctactaaaaatacaaaatttagctgggcgtggtggcacgcacctgtagtcccagctactcaggaggctgaggcaggagaatcgcttgaacccaggaggccgaggttgcagtgagccgagatagcatcactgcactccagcttggtgacagagcaagactccatctcaaaaaacaaaaaacaaacaagcaaaaaaaggaatgaagttctgacacaggctacgacatggatgaacattgattggaaacatgctgctaagcgaaagaagccagacccaaaaaagaaacactgaatgattctgctcatacaaggaacctagaattggcaacttcatagaggcagaaggttgaagagacgttaccagggactgaggggagagagagctgctgtttactggatatggagcttctgtttgggatgatgaaaataatgaaaacatttttggaaatagatggtggcaatggttgcacagcattgtgaatgtaatcaatgccagtgtaccggcctcctaaaagtggttcaaatggcaaattttatgtctatttcatcacaataaaaagtacaaatatgaaaataaatgacgacttggaacaccttgagccatagagttccgcctgggggtctttggctgaaaggacagactagactgtgttcccacggcttttccatcccagagcactcacaagcccatctcctccatctccacggcccctccccmccattctgctggcctgacggctctgcttccgatctcagccccaccaggaaaagcttccagaatcacagaaacacattctgggaaattagttttcttaaagcctttgcttttggttttaataaaaaaaaattaaatatcttgaaagcaaaactgccatctaaagcaggctaaaatataactgcaactttaggaaaacttaattatacatgctatcaatgtactggcccatgatcaatctatctacatttcccttttctctcatttcagaaagtaagaataaagtggctttgcttaaatataaaaacctaatctctcttctcttctcttccacttccttgtattagattgtcttccagaactaaccaagaggtccctaaagctggctccagagacagg

SEQ ID NO: 30444 - DNA, 1131 bp, Homo sapiens
aatcccaggcaatatggctttatagttcatgttcttaaccactattttatactgcctctgtatttctaaactaaaagttgaaacctaccattggagatctttaaaaataaaagtaggtcattagctctttaagacagtctatgtatgtagcgacatttattaaatactgactgaataaagtacctaagagtatgccaggtactcttctagttgctctcatgtattagctcattaatccccacaacactcctgagaggtaagtattattattttcatccccattttgcagaggagaaaactgaggcatggagagggttagtatccacggtcacagagccaggatgtgacaggactggaacccaattgtctggctctagattctaaataaaagtgaaactactagcttatgaaacaaaatttgacaaacctctcaacttggttattctgacggaagaaattctaggaatagagaaccctcctggagttaccgtcttagttactagagctcagtttgtgagactccatagcttttcagaatattttatattctgaataaaaaaatgcacacaacaaaaacaaccagatacatttgttcaaaggaacgatcctcaggatttgtggacagttcacttcgagaccagtgtctcttacaatctcagttttctgtcctgagcagttaccttcaaaacttaggggaagagctcagaggatgtctgagtccattttgcatcttcatcacacagagctctgtggctgagtgcatcatagctcttaggtacagcagacctattggattgatcagcagcagaactgttatgcctggggtaagaacataatgaagtgggggagattccaagctaggaatttggggcccagattctaggggatgcctccagggttttcaggctgcwccttctccattgatctgcccagtttatggagccacaggggaataagtcctgctattgaaggtgatgttggtgcaggtggtattggggtggcaccattgaccatgctgcactgggagtccccaaccctgggctttcccttttgaggttcagtgtaggctcttgattctgcttcataatcttactttacagttggaggaagaggacgggttgcgaaaggaac

SEQ ID NO: 30445 - DNA, 974 bp, Homo sapiens
gatccgtgagaaggagggaggccccactgcatgttccaggtcgaatgttctcatagcacgtcgtttccttacctgcaaggctaggtgtcagtgtcactgggaaaggagcccattggcttgccctycttcactggtactcactgtgtgtgcccatcaagagaaaggcacgtgcacagggatatagggagaaactttcaaaggggtgaaatgcacagaaaactgagagcagtccaggactgtggccctaaacttgctccctggcagctccctacacacaggccttatggttgattcgcttaagccactctctagggactagaggcgtctagaccagaaggcgcaggtgagccatgggaacaggaagtcccagcccacatctcagcacatcttcagcctgtcctactccctcccacagagtaaatcccggacactcctgctggtctgcacttgctccaaagcaacagagaaccagcctgcactacatccacaccctcccagggctgaggccatgggcaatgatgaggcaggaccctgagccgttgttgttcaggacgcagcagctgggagatgggggtgagggtcatccccaacaacgaagcaccctccagaggggcgctgggtgagaaacagacggacttacagtgctggccccaccccttcctcaccttctgctgagcgacctcacgcgcatccagccctcccaatctgagtgtgatcgcccacgcagccctcctcccacccgactgctcagcatccacacccatcgtcctccaccgtgccctgccaatgcccgaatgctgtatgcacaggctaactaaacaccactctgtgatgactgagtgtcaaggtaagatctggggaatgcagtatcggtttgtacttttatttttgggtctcacctgacttttgccaaagccacagatgttgagtttggctcttctgaccaaatggaacacctggatgctgatctaaca

SEQ ID NO: 30446 - DNA, 622 bp, Homo sapiens
tgtgtattagccttttcattcatttgttcaacaagtattcattatatatatatatacatatatatatacacaaatatacatatatatacacatatatacacatatatatatacatatatatacatatatatatrtgtgtatatatatatatatagagagagagagagagagagatggagtcttgctctgtcacccaggctggagtgcagtggcgcgatctcggctcactgcaacctctgcctcccaggttcaagcgattctcctgactcagcctcctgagtagctgggattacaggtacaccaccacgcctggctaatttttgtattttcactagagacggggtttctccatgttggccaggatggtctcagactcctgacctcaatgatccacccgcctcggccacccaaagtgcaacaagtattcattattgcccacaccgtgatggaggcaagcacaaggagatggaaaacaacccatatctccatcattgggaagtcagataattccaagtgctagggtgcatgtggagaaagtggtccctcatgccctgctgctgggcatgtagactgaggcagccgtcatagagtgcagtaactgtatgtattctctccaccccag

SEQ ID NO: 30447 - DNA, 622 bp, Homo sapiens
tgtgtattagccttttcattcatttgttcaacaagtattcattatatatatatatacatatatatatacacaaatatacatatatatacacatatatacacatatatatatacatatatatacatatatatatgtgtgtatatatatatatatakagagagagagagagagagatggagtcttgctctgtcacccaggctggagtgcagtggcgcgatctcggctcactgcaacctctgcctcccaggttcaagcgattctcctgactcagcctcctgagtagctgggattacaggtacaccaccacgcctggctaatttttgtattttcactagagacggggtttctccatgttggccaggatggtctcagactcctgacctcaatgatccacccgcctcggccacccaaagtgcaacaagtattcattattgcccacaccgtgatggaggcaagcacaaggagatggaaaacaacccatatctccatcattgggaagtcagataattccaagtgctagggtgcatgtggagaaagtggtccctcatgccctgctgctgggcatgtagactgaggcagccgtcatagagtgcagtaactgtatgtattctctccaccccag

SEQ ID NO: 30448 - DNA, 622 bp, Homo sapiens
tgtgtattagccttttcattcatttgttcaacaagtattcattatatatatatatacatatatatatacacaaatatacatatatatacacatatatacacatatatatatacatatatatacatatatatatgtgtgtatatatatatatatagagagagagagagagagagatggagtcttgctctgtcacccaggctggagtgcagtggcgcgatctcggctcactgcaacctctgcctcccaggttcaagcgattctcctgactcagcctcctgagtagctgggattacaggtacaccaccacgcctggctaatttttgtattttcactagagacggggtttctccatgttggccaggatggtctcagactcctgacctcaatgatccacccgcctcggccacccaaagtgcaacaagtattcattattgcccacaccgtgatggaggcaagcacaaggagatggaaaacaacccatatctccrtcattgggaagtcagataattccaagtgctagggtgcatgtggagaaagtggtccctcatgccctgctgctgggcatgtagactgaggcagccgtcatagagtgcagtaactgtatgtattctctccaccccag

SEQ ID NO: 30449 - DNA, 733 bp, Homo sapiens
tcctgcctcagcctcccaagtagctgggaccayaggcatgtgctaccacacctggctaatttcttttaaattttttgtagagacagggtctcactgtgttgttcaggctggtctcaaactcctgggctcaagcagtctgcctgccttgacctctcaaagtgctgggattacaggtatgagtcactgcacccggcctatgtgtgcattttaaagagggtcatttaattaatgatgacactgtcttagtgaactcaaaacatatttatgtgttttcaaagaggtatacaaattccgaaattcttttatcaatctttacagatgattccttgttttctaggaagccgacggtttagttctgataaatattgatcatgggagcatcacctactccaagtccacggacgataacgtggacattcctgatgtccccctcctggcagcccagacgtttattcagaggtaacgggaaacattaatggtatgaatttcagaccgtctttgttcagattctgtatttgccacttcgagtatcttttccaattttatataactgatagatgttttatatattatagtttggaaattatttgtgaattttgttttctgagattgagtctcactcttgttgttcaggctggagtgcagtggcgcaatctcggctcactgcaacctctgcctcccacgttcaagcgattctcctgcctcagcctcccaagtagctgggattacaggc

SEQ ID NO: 30450 - DNA, 873 bp, Homo sapiens
atccagagacataagacactttctcgtaatgagactggatgatccagttggagctcccaagggcatagccagagctcagaggagtcacctggaccgcaccaaaaagctcctaaaagagaaccacagtaagaatgtgcaatgagcttacagtgacagtcacatgaggtaattctgcagggaaaaacaacagaaatatcctcagtttaaaaacaaaaattattttaaagtaaaccagagactgggtgcaatggctcacgcctgtaatcccagcactttgggaggctgaggccaggagttcaagaccagcctgggcaacatggtgaaaccctgtctctacaaaaaaatacaaaaattagctgggcatggtggcacatgcctgtagtcctcaagcagctacttggggcaggaggatcactggagcccgggaagttgaggctgcagtgagccatgtttgtaccactgcgctccagcctgrgtaacaaagtgggaccttgtctcagtcaatcaatcaataaagtaaactagaaagttttaaggaaaacagaaagatgatggagatcaactggcagacaaagaaagcaatcctataatatttacttgtcacctgagagcttcagctctcttccatgtccccaggcactcaaggttcacacattaaaagggagagatgaaatattaccaaacagaccaaagactcacacactttggctttcctttttcattttcagttaggtgttaggcccttgttgttcggtactgagtagctctgggcacaggatgacagtaagaaatgggaaggcttatcatttaggtcagagctcaaaagtcacacttgacaaactcttctctcttcccgtttcacccatccaaaat

SEQ ID NO: 30451 - DNA, 540 bp, Homo sapiens
atatacctgttttgtttctttataaacactctgattaaaaataattcccaaatttctatttttaattgctttaatatgaaatcgtttcacagtcttttaagagattttcctcattgataattgtatatgttctttatttgaaccatgaactttaggcagaatatgagtaccattctgatagaaatatgtaaatacctagcactttcaattattaatgacaaatatttctttttaactttatgttttaatttttttggttatatagtaagcatgtatatttatgaggtatgtggaatattttgatacatgcatacaatatgtaataatcacatcaggggaartgaggtatctatctcctcaaacatttaggctttgtgttacaattttctagtgtcattttcatcaaacctttatgtttcaagcaataatatgtcactcattgatattttttggttgaaatagtcaatttggctttcttctgactcttccacatcaccgatattccaggcttttctgacttttgcacactatcaaaaaaaa

SEQ ID NO: 30452 - DNA, 659 bp, Homo sapiens
cataacactatgtggtatgtattataatcactttacatacattctccagttcatcgaattctcacaacatatttatgaaatgtgttttattatccatgcctattttaaagataagtaaactgagatgttaagagataaataacttgcccagggtcacatatccagatggtagaattggacttgaatggagatgtctgactccagagcccaaatccttaaccatcaccctacactttctccctattctcattggagaaaatgataaaccaaaatcttacttgattcattttaatgaractataatttaataatgaaagtataatttataataatgaaactataatgaaagcactctgcaaggataatgagtaaacaccttcagatggaaataggcccaagagaagattctgtagcagatgctgctcacctgattatgaccttagtattttggctgaaatagtcagtgaagacacaccctgtccagaatcctggctctaacaatatttggaacagttgaaaaatattaattttaaaaactggaaaaaagagatctatggagcatgtagaacatataaaaaatagaatagtagagcaaacttacatgtgctcattatccagctttagtaattatcagctcagggcctatttggctttatgta

SEQ ID NO: 30453 - DNA, 577 bp, Homo sapiens
gtttacatacaaattttacatgcatataatacagaatacagcttcctctcaagcactagtttctcttcacaaaaattgattatatattcagtatgaaataatacctcattaatttccttaaagtagaaataatggtaacaacattcttcaatcacagtataacaaaactggaattaaccatgagaaaaaaatggccctttcatctgtgaggaaaaatctctgttatacaaatgtaggggaaaagataaaacagaaataaaatttgtaaataaaaatagtaaaatttccaaaaaataaaaataaccaaccaaggagataaaataaaacacaaaacaagtccaaatttcaaaattagtaagagaaaaataaagcaagtaaatacaaggttttaagaaaaaagtgtaagtacaggattagtgaaagggaaaacaggaaaaaacataattaataaatcaatagactgattttttcaggaaaaaaracagaagacaaacattagctaatttagtaaagaaagaaaatgaaaaagtacaaatttacaaatcgaataggaaaataaccactgaaacaaaaaaaa

SEQ ID NO: 30454 - DNA, 553 bp, Homo sapiens
aaattgtggatttgggataaggctaagaaattattatacagtcaatcatcatctatattagatactggttaatgtattttgatcccaataatttattttgctttgccgataattgatctgaaagcaatgtcaaaaggttctacagtcactgtagggcgtatctctccctatgttagtttcatctgttcagcctgtgttccctgtcctgggttcctgggaaatgtaactcttagaattttaagatacttgattagataaggaactctgcagagcggtttattacctaaaaaaaaacaaaaaaaaaamcccaaaaaaaacaaaaaaaaaaactaggtacagaatggaagaaatgacaaggtcatgatttcttggagacatattccttactttgattacatcagggcagaatgactaagcagtaaacaaaggaccattatttttgaagcttttctcttttagagaaggaatattacagtgggataaatgttcaagaaaggatatgcacaaaaagcttaaaaatctgatcactaggttaaaatggctttcgtctttc

SEQ ID NO: 30455 - DNA, 553 bp, Homo sapiens
aaattgtggatttgggataaggctaagaaattattatacagtcaatcatcatctatattagatactggttaatgtattttgatcccaataatttattttgctttgccgataattgatctgaaagcaatgtcaaaaggttctacagtcactgtagggcgtatctctccctatgttagtttcatctgttcagcctgtgttccctgtcctgggttcctgggaaatgtaactcttagaattttaagatacttgattagataaggaactctgcagagcggtttattacctaaaaaaaaacaaaaaaaaaaccccmaaaaaaacaaaaaaaaaaactaggtacagaatggaagaaatgacaaggtcatgatttcttggagacatattccttactttgattacatcagggcagaatgactaagcagtaaacaaaggaccattatttttgaagcttttctcttttagagaaggaatattacagtgggataaatgttcaagaaaggatatgcacaaaaagcttaaaaatctgatcactaggttaaaatggctttcgtctttc

SEQ ID NO: 30456 - DNA, 2400 bp, Homo sapiens
gatcctcctgcagtggcactcaatgaataggaaagaacatctttgagatttttctaaagaagactttgggatatggatggagattctgggtatgggccaatgcttttggagaagtaatattggctgactcccattcctattcctgctggaataagaatacttgcatttttttttcatcctcacgtgtcaggtatactttacatcagctatgtagacctagcaacctatcagtatgaacagtcrtggtcacctaacaggaaaattatgtacaaccaccttaaatttcaatgcagaagagtttgtacaaccttgtttcttttcctagtatcatcatgatagcctcaaagtcagaaatcattaggcaaaaaagggaaagaatatctcttgatttgtacttcagaaacattccctaaactatgattaagaaactaaaaatataaaacctccaaaactatagtaaatgttgtgcatacttttgccagaagttattatatttagttacatctgagaccagttagatgttttattttctatttcattgttaaataatgtacatctaaaataatacattttgctatcttagcctgaatttaattgtgtagaatatgagaaggactgcaaatatattgaaggaggtttgttcgcttagtctgcatttaaaaagaagaagaaatgccagaatctttgaaaagttctaacacagtacttctttttactttggacttctctgagaaaaaaacattgaaaatgaaaacaaatcaggaaaatgctttttcctttttttttttttgaactgcgagcatagtatacggaagtaagtacagaaatttggcttcaaattctggtactcgctagctatgtgtgttggggatctgttttttaatttgcataaaggagttatcagtacttatctcacaggattactctgattaaatgaaatatcatttttgaaggatcccacaagcgtcatgtagtaaatgctcatcaaatgtgaggttctcttttcttctggaaacttccaccatgtgtgggtaaaagaaaaaagaaaattcttttatttattttttgttgttgttattttctacccttttaaaactgtaaagtatttagggaaaatactacactaaattcagaaatggataaaacactcacatttggtttattaactttctagttaagagatttattctctagctcatttaaatattttgagaaacatactgttacatttaaacaagaaatctgtctcccctatactttatgaagcttttccagtttcctgtcttcaagttaggaaatgaggagattgaatgcattctggcctcaacacaccaacatttctgagctgaccatgaacgttcgttcagattctcacaaatacctcaggaccttcaaatgtaaagcatttgggcaatagacttagtccagggacatgatgccagcctccttcgttgtgccgtttgccagaccctgatttgtagagtacaaactttccaagctggacttttcttcttggatgctgcaagccattcagagtatctcattccctgctgtttgtgttccttcttacttcctatcctgctctgctgtatattgtcatagttattttgcctgtggtttttcttctgctttaagacctttttttctgtcagtatttaaggttgttgaaggaaatataaagtccaactcatttagataggcttcaatttatatttttgacaaatatttgccccaaataatatcagtggagtaccattatcttagtatatctctggttgataatagcctcagttttaacctcttagtataaataaataggatctcatagcttgtaaccatggagaaagcaagagtttacaaacatttatacacagttataaagcttccctggaggaaaatggatgcaacagaagggaagataaattatctttaagtatgtttctcagattggattgttcttaataaataactctgttcaacacattttctccctttgagccaaattctgcctttggttgttggcctgttctgtttgctcacagagggaggtccacatgggaaagcgtgcagttgcctcaactttaaagaatttagaaaaagtaaaaacacgcattgctgtgaaggttcattcatttcagtcaactggtatttattgagttcctactatgtaatcatcactgagtaggaggttattagggaggcaggcacatggaaaaattagacagtgacagggacaacagatataaaagtaccaaatgaccacatattactgtagaacggtggttctcaactgggtgatttttgtcccccagtggcatttggcaatatctgaagacatttttgattgtcacagctagagtggaggtgtcgctggcatctagtaagttgtagcctttgtaa

SEQ ID NO: 30457 - DNA, 845 bp, Homo sapiens
tgggaccatttaaattctgtttttgattttatcctgcctcttcaaattatttgccttgtaagcgctttaactttttggtctttagccctagcttcttagactattaatttttttttttaacctgtgtgaccattgaagcacatttatagaaaatctcactgacagtgagttagctccattctagagaaggaagagaaatgtttggaaggttttcaaatgggagtatttactaaaccttgggtgtgtatatgtgtgtgtgtgtgtgtgtgtgtgtgtgtgtgtgtgtatgtgtttgtgtgtgtcctcttagtgcaggtaaatgaggaaatcatcagctattagagcccattgagtctggtatgtgtagaatgttctctattcaagctttttctctgccacttatttggtgtttggctgccatttcaatgggacggtgtcttagtttcctctaaatccatttgatagagagagaaggagaagaaggaagatgagraaagagagagagagagagaaagacagagagagaactctttagtacaatgtgcattttgaatggcttatgtatgatacatgaacagaccaacatatcacatcatatcacatcatatttgcttggctattgggtgatttgttaaaatatttttatttctttgttttaaattgtggaggaaattctcaaatctcattttatttgcatctgcttctaagtgagacttctgacggttgttcttacaaattccaaaacactttggagacacattttttctggcctttccttaagaagaaagggggcccaaggcaggcagtgctgggcctctgtggtcccagggcccctctgcagcctt

SEQ ID NO: 30458 - DNA, 529 bp, Homo sapiens
acatgtagttaaggttctgctaatggattatgctaataaagaaatacactcaagctttaatcaccaaactgtagcttgtacctcagagcatcaagggccacaagagaagaagtcccaatcaacaactgatttacaagttgggaagtcaggaggaaagagaccacastaaatctctctgcttcatccaaaagaggccatggggtttctctctatttcatctcatctgatttctcactttcagtgctcaggaatagagagaggatttacttgccatgagttgtgattaacacaagttagctttgttgaatgccaccaccctcatcctgacggatggtgtactagtgtaggatggatatcagattggaatgtggataaattctacaatgctaactgagtcataaatctgtgtaaaaataaagggagagctagggaggaaaatcagtcttccccttaccactcccagagaaggagagaaaaatgaaaacaggagaaagaaatgcatgctttacacacagcccaccttttattg

SEQ ID NO: 30459 - DNA, 632 bp, Homo sapiens
tgcatatcacatctgattttaacatctcattcttcactgccgatgacttcgacaaggcctagtgtggaagaccataatggtgcattgtggggtatagtgggcttggtagctaagagcatgggttctagaattaggtatatctgtattcaaatctgcattctgccattattatctgtgacctttgaacaattccctctacctctctaagcaactcttcccatcacaaagtgctgataaagcataaagaagaaaacactctcattatagagttgcaatatttaacacaatgactgttcctagctcttagtagtagctattattttgattatgaggataataacataaaacacttttgcctggcacatagtaagcactggatgaattatacgtattactgtaatatataatataaatatgaatatatatatatatatatwttttttttctgagtttggtgagtttgattgcagattccatgaagcagggaccagacttgcctgatttgtcttttggtccttattgcctagttcagtctgacatataatgggtactcagtaattatttgttatgagtcagtaaacgtgtgtatttttccatgtaaccatcaaaactgtgagatcactgtctgtttt

SEQ ID NO: 30460 - DNA, 627 bp, Homo sapiens
atcaccccacccctttccaccctactgggagagtctctgggtaatagagaatgtttccattgttcctctttctgccttccattttctagccttcatstctcatcactacaatccatcaaaaatgccaatgccaggcaaatctatctctccctccccttggaccacattcttgaatccctgccctggcactccttctccctcagcctacagagcaaatggctcaatcttcagagcctctgacctctccagacccacacacacttttgaatcctcaggaccgctccctgcccttctcctcctcctcctgcgtcatctggtttcccttggaaccaagatacccatctctggttacaggacactttctctttctataggaactctaggtcccctgcaggcagactacctgctttatttccatttttcactttggatgtaattcatcacagccaattatgatttgctttattctgtgtggtccaacaaaataaatgtgttcctaggaagagcttttaattttttcagctattttcacattagtcacgagaatgtaattgagtaaacaccacttttgtgaattgtaatatatttctggttattttatttcattcatgctttcttccgttcctt

SEQ ID NO: 30461 - DNA, 627 bp, Homo sapiens
atcaccccacccctttccaccctactgggagagtctctgggtaatagagaatgtttccattgttcctctttctgccttccattttctagccttcatgtctcatcactacaatccatcaaaaatgccaatgccaggcaaatctatctctccctccccttggaccacattcttgaatccctgccctggcactccttctccctcagcctacagagcaaatggctcaatcttcagagcctctgacctctccagacccacacacacttttgaatcctcaggaccgctccctgcccttctcctcctcctcctgcgtcatctggtttcccttggaaccaagatacccatctctggttacaggacactttctctttctataggaactctaggtcccctgcaggcagactacctgctttatttccatttttcactttggatgtaattcatcacagccaattatgatttgctttaytctgtgtggtccaacaaaataaatgtgttcctaggaagagcttttaattttttcagctattttcacattagtcacgagaatgtaattgagtaaacaccacttttgtgaattgtaatatatttctggttattttatttcattcatgctttcttccgttcctt

SEQ ID NO: 30462 - DNA, 487 bp, Homo sapiens
gggttgaaagcttgaagaatgaatatagatgttgagggaaaatccaagagttgctaggtttctaaagagggtttacttggagrgcacccgcaaagttgccagggtgggtgagggggagggagagagggtgtgagcaggcagaaatatgagagaaggagctgctggatcagctggttggcattctcctttgcctcacagtcaacgtttaaggctgctaaatggtatgtgactcttctccatttccactctagaaccagacaggtcaggagccgtctttttctgagcatataacctttattaaaagcctgaagaattcctaaagcctaaagaaatggtataatatgaccatttctttttggaagtggtagcattttttactgctgtcttccttggtattctgactattgtgtcttctccatccatggaaagtgcaccagatgagtgcagttgtgtgtgtgtgtgtgtgtgtgtgtgtgtgtgcatgtgg

SEQ ID NO: 30463 - DNA, 527 bp, Homo sapiens
tgccccagggagagtgggcagtgtcccctgtgtccccagagggcaaaggaagaagagagttgactcatatggacagttttccaaccttttgccacaatgctttgatatattcaagttttgggggtcatttagtatttattaatgtgtccactatgtagaagatgtcactttgtcagctttcaccccaaaacactctactcttcagaagactagggacagtgggagtaccaaggccagaaatgcactgaattcatgaacatctcttgagaactttgcatgtgcctggctctctgttacgttcagtgggaccacaacaacaacaaaaagtacaacatagtcattatctcttgtgtttttgggccccgaggcaggctatatgaagcagctaggaaacagtgtctgactgtgtagaaatgagcttcacgggaaaatgaatttgcaatattatttaaaaattgcagtgaaactagaaacatcctgatgtccatcagaatgggagtgcttaaaartgatgatatcggccagcc

SEQ ID NO: 30464 - DNA, 570 bp, Homo sapiens
tgcattaaagtccaattctttgtagaagttcaagacagatcatttttcctatcattaagacagagatagttttacttcttaagttattatgacattatgaggaaaagtactttccttgtgctttcattgaaaactactggtgaaaaatcagtactgctataaaattcagtgattaggagcctagcctgtgtagtcagaatgcctggattcaaatcctggctctgtaatttagaaagctatgggactttggacaagtcatttaatttccttgtaccttaatttccttatcygtaaaatggatataataacctacctcatagtactgtagtgaggattaagaaagttaatatggatcaagtgttcaggagatgatctgacactcaaaaagtattagttgctattattatcacacaatatatgctttaaaaaaatgaaaaccaactattataagtaacataacttattaatcaaacttagaaattgaaggcaaaagattcataaaatagaaaacttggcagatacttttccaaacaaactacgattagaacaactttcctatttaaaaatgtt

SEQ ID NO: 30465 - DNA, 966 bp, Homo sapiens
  misc_feature (1)...(966): n = A,T,C or G
tgcatgccacgtccaggcctgggcgtcatgtcctgagtgttctttctcctccctccaccatgacctcggctgtcacatactggagatgagataacacagcccagctcccagagtcaccagttaagaactgcattacaggccgggcgtggtggctaacgcctgtaatcccagcactttaggaggccaaggcaggtggatcacctgagatcaggagttcgagaccagcctgaccaatgtggtgaaaccctgtctctactaaaaatacaaaaattagctgggcatggtggcgcacacctgtaatcccagctactcaggaggctgaggcaggagaatcgctggaagctgggaggcaaggtttgcgtgagctgaaattgggcacagcactccagccaggnnnnnnnnnnnnnnnnnnnnnnnnnnnnnnnnnnnnnnnnnnnnnnnnnnnnnnnnnnnnnnnnnnnnnnnnnnnnnnnnnnnnnnnnnnnnnnnnnnnntctttccatctattttgagaaatctaagccagggaaatgcagtggaattcttcattaaaaattacctttggccaggtgtgggggctcacgcctggctgggtgacagagcgatacttcatctcaaaaaaaaaaaaaaatttctatgattaccagctatttatttgtaaagttgaaataaatgctattcacagtattgatagtaatcagtagttgttttttttttttttttttgagacttttggtcaggagtcttactttcctttaaaaaatacctcacatatgtttgaatgtaattgtaagatttccttcttggaaagataactaaaatgcaagctrttttaaaggtggtactttcatagaattttgtatctagaagctcagaggagaagtggctcacctaaggccccaatccgagtaggtgacagtctccatggtgcccccgccgccacactcatcttctcattttgcacaa

SEQ ID NO: 30466 - DNA, 1275 bp, Homo sapiens
tttcctgctctccctgattgcggagggaaagactgcacttgggtttctaaggctcctcgagtagctgaaaaagaagagggtgatacaaataaacagaagggcgtgctctgtgccagtccgggccagggccctcttggcatggcaattccactaggtctgagaagctgaaagcaaaggttattagctgaaaatgcaccactgagcctgttcgttctccagataatccagtttatgtatctgatraaatgggatcaaaatgagaaacacatttccaaaaggagttggaaacagcattgtccttcctccagagcattttacaactgcaaaatcacggtgattcatgactatttcacatgatcgatcctcaagcagcagcgagtgcagcactgcagttacccagaccaggggtggactccagctccaccacatggaagctgggcagccatgtgggcgagtcacagcttctgtgagccctggttttctcaactatgaaaatggaaataatcatatctgatgagcaatgctactggcatgtaattgaaactcaaagggaacttcagaatgtaagcttatgagagagaagatttggtctatttcgttgtgatacctgcaatgttaaaacagtacttagagcatactaggtgctcattaaaatgttcattgaatgaacagtacacaacagtgctcagcaaatacttgttgaatgaataattgaatagatataatcatataagtatgtctttctagcctcacagcatttcctggagatttttgtttgtttgtgggtttttgtttttgtttgttttttattttggtagctgagacatttcgactcagagaggtgaagtaatgcatcctggtccatgcacctaattaggggctgcctcttacctttgaacccagttgtgtttggtcccatatgccttatattttccattgcatctagaagtttcttggaagttgtatcaattaggaatgctttcaacagtatcttaagctataaagcgtaacagtagcttaagcgataaagatggactcctcttccacgaggagaagtggcagatggcagttcaggactggggcaacagctgagcattggcatcatggaaccaggctatttccagctttctcttctgtcatactccaccagatggctttttgtcctaatggttgttgctttatggtcacaaatggctgctacagctccaggcatcacaaccaagttcaaaggcgggaggcaggaaggaaggagggggtggcgagtttcctgaagtg

SEQ ID NO: 30467 - DNA, 509 bp, Homo sapiens
tgctcagcagatatgattatttccttttcatagatgagaaaaccagggctcacagaagctgtgactcgccccctcggctgcccagcttgcgtgtggtagagccggagtccacccctggcctgggtaactgcagtgctgcactcgctgctgtttgggggtcagtcacatgaaacattcatgaatcacaatgattttgcagccgaaagggaagggaaagggggtatggaagccctgaccacaccstcatttaacaagccaggagaccaaatccagtgtgactgcccaaggacgggatctggaggagatctagctttgtactgatttttggaagcaatctcagtgggcagggttcctagaaggcgccccacatgagagtgttgatgttctctgcgtgctgacacagcattctgcagccaagcaggaagggagagtcccctcattcagtctgctttcagttcttcagatcacatcttggagaaatgatcagtaagtgcaatgagtgatccttg

SEQ ID NO: 30468 - DNA, 509 bp, Homo sapiens
tgctcagcagatatgattatttccttttcatagatgagaaaaccagggctcacagaagctgtgactcgccccctcggctgcccagcttgcgtgtggtagagccggagtccacccctggcctgggtaactgcagtgctgcactcgctgctgtttgggggtcagtcacatgaaacattcatgaatcacaatgattttgcagccgaaagggaagggaaagggggtatggaagccctgaccacaccctcatttaacaakccaggagaccaaatccagtgtgactgcccaaggacgggatctggaggagatctagctttgtactgatttttggaagcaatctcagtgggcagggttcctagaaggcgccccacatgagagtgttgatgttctctgcgtgctgacacagcattctgcagccaagcaggaagggagagtcccctcattcagtctgctttcagttcttcagatcacatcttggagaaatgatcagtaagtgcaatgagtgatccttg

SEQ ID NO: 30469 - DNA, 1240 bp, Homo sapiens
catagagaccctccaggagatcccattatcacccaggacccagccagggcaataaggtaccatggagcctcgggggacttaagcacttaatttccaccatctctctgggcctcctgctggggtgactggaaaacaactccttaaatcaagcagcagctggctccctccctgctgggctctcctccccagcacccaccccctttccctcaagtccctgggttggagaagctgaatttccagccgttatccgcctctccctttcccaaacctcccctgcagcctttcttcccaagccctcgccccaaacaaaagaaacaggaagttgagagggtggggctgctgttcagacccatccaatccctggagcttttccacaaagcctgctgccagattccttttacagcctgggygcttggaaccagtcttagctctcctggccagaatgagggacctcggagtgggctgggagggagtgggggtggaattccccatctgagtgttgtttgttgttgaatttagggtgacacaagaatataaaccccatagtgattttgaagggctggcagttcggtttcaccaggaattcacacaggcctccctggctctcctcctgcagccttctgaggctatctttagagaagggagaggaagaggcctggggtgttccaggcttgagtcaacaaaccccatccaaatccagtcaagccagcaatttcacctaattccaccagcacctactcttcctttggcctttgtcagtagccccccagggctgccacctgcaacagtcttagcctacccttggtccagcctcccagggttgacagagcatctcccatgcccctaggacttcatggacaaaaagggaaaggaagtggtccctacccttgaggatgagctcctggctgtaggagacagagctgtctatgagccaagtatttcaacagagaaaatacagtgttggggtagggacaagggaagtatagtatataaaacaatatgtgggggccacagaatagaggctggcagggccttggatgctgcactaccccagtctactcagtgatatgaaaactgaggcccagagaagtgaggcaccttgtccaaggtcacacagccagtcaggggcagcacaagactcacaccgaagccccctggcttggaaagttaaatgtccaggttgtgaactacgcccagttgtcagtcagtccctcttcctcctcctcccctcactctcctc

SEQ ID NO: 30470 - DNA, 1240 bp, Homo sapiens
catagagaccctccaggagatcccattatcacccaggacccagccagggcaataaggtaccatggagcctcgggggacttaagcacttaatttccaccatctctctgggcctcctgctggggtgactggaaaacaactccttaaatcaagcagcagctggctccctccctgctgggctctcctccccagcacccaccccctttccctcaagtccctgggttggagaagctgaatttccagccgttatccgcctctccctttcccaaacctcccctgcagcctttcttcccaagccctcgccccaaacaaaagaaacaggaagttgagagggtggggctgctgttcagacccatccaatccctggagcttttccacaaagcctgctgccagattccttttacagcctgggtgcttggaaccagkcttagctctcctggccagaatgagggacctcggagtgggctgggagggagtgggggtggaattccccatctgagtgttgtttgttgttgaatttagggtgacacaagaatataaaccccatagtgattttgaagggctggcagttcggtttcaccaggaattcacacaggcctccctggctctcctcctgcagccttctgaggctatctttagagaagggagaggaagaggcctggggtgttccaggcttgagtcaacaaaccccatccaaatccagtcaagccagcaatttcacctaattccaccagcacctactcttcctttggcctttgtcagtagccccccagggctgccacctgcaacagtcttagcctacccttggtccagcctcccagggttgacagagcatctcccatgcccctaggacttcatggacaaaaagggaaaggaagtggtccctacccttgaggatgagctcctggctgtaggagacagagctgtctatgagccaagtatttcaacagagaaaatacagtgttggggtagggacaagggaagtatagtatataaaacaatatgtgggggccacagaatagaggctggcagggccttggatgctgcactaccccagtctactcagtgatatgaaaactgaggcccagagaagtgaggcaccttgtccaaggtcacacagccagtcaggggcagcacaagactcacaccgaagccccctggcttggaaagttaaatgtccaggttgtgaactacgcccagttgtcagtcagtccctcttcctcctcctcccctcactctcctc

SEQ ID NO: 30471 - DNA, 1349 bp, Homo sapiens
tgcatgccaaaattaaagattgcacaattttctcaagtgcatgtgattcatttacaaacaattcatcaagcaccaagcactaaaataatttcaaaaaccaaaagacagttaacatataaagcatattcttgaataataaagcacttcatttatgtgtagttaattttaaaaataacaaaaggcggccaggcgcggtgactcaacccctgtaatcccagtacattgggaggtggaggtgggcggatcacaaggtcagagttcaagactagcctggccaacaggatgaaaccccaccgctactaaaaatacaaaaaaaaaaaaaaaattagctgagcatggtggtgcgcacctgtaatcccagctactcaggaggctgaggcaggagaatcgcttgaacccaggaggtggaagctgcagaaagccaagattgtgctactgcactctagcctgggggacagagcaaaactctgtctcaaaaaaaaaaataaataaaataaaatgaaatataacaacaaaagaagaaacacagttgaaaaagtgagcgggcatggtggctcacatctgtaatcccagcactttgggaggccaaggcaggaggatcacttgatgtcagcagttccaggacagcctgggcaacgtggtgaaaccctgtctctactaaaaacacagaaattagctggttgtgatggcagacgcctacaatcccagctgctagggaggctgagacaggagaatcacttgaacccaggaggtggaggttgcagtgagctgagatcacaccactgcactccagcctgggtgacagtgcgagactctgtctcaaaaaagtgaaagaaaagaaaaatttaaaaagcatttctaaatagatcataactgaaaaagtaacaaattagaataaacttaaaataatcaaatgtgaaaatgctgcatgttaaaacaagtgaaacaagtaagcattacaagtatccttcactacccaactttcttgatgtgaataatccagctaatttcygtattgggtgaaattagtaattttactctacaatttaattggttgtttacgtgatagacaagttctttttatgtacataatacaaatgtcatttatatctgatattgcagcattattgtatagtgagaaatcatagaatggcttctaatgctttctatatatgaaacactgatattaagaaagttttactagtaagtagagaaactggttgagagcattagatggcctaagaatgccatttgtactatttaaaaagtgaaatataataggcatataatatgcaaaaatttgcttttcaacatattttcaggtaaacattaaatatagataacaaagg

SEQ ID NO: 30472 - DNA, 518 bp, Homo sapiens
ttatttgtacttctcttctacgtgttctttacggagctcgtgtatgtcacccctcattaaatcacatacaccctagaacagaccaggaggcttggatgccctcctttctgtcctctcatccacactaagaggatccycacaaccgtgtccaagatctccaatcaacatggcatctccaggcctagccccaaaacccctactcttaagttacaccttggaaagaaagttgctacaaagcctggcaaaagaattcccagtcacttggccccaggaagaatgacaccaatgtatctgccccacccctccaaaggtgcttggctgagatgtggcaggtgcacaacactgggaatgtactaaatgacagggaatagtttactttaaaatggctttttcatattatgtgactttcactcaataggaggaagaggaggaggaagatgaggaagaaaagcagcatcagtcatcagggcttgactcattaagccacatcacccaaaaggcagaatggcacacgcaca

SEQ ID NO: 30473 - DNA, 518 bp, Homo sapiens
ttatttgtacttctcttctacgtgttctttacggagctcgtgtatgtcacccctcattaaatcacatacaccctagaacagaccaggaggcttggatgccctcctttctgtcctctcatccacactaagaggatccccacaaccgtgtccaagatctccaatcaacatggcatctccaggcctagccccaaaacccctactcttaagttacaccttggaaagaaagttrctacaaagcctggcaaaagaattcccagtcacttggccccaggaagaatgacaccaatgtatctgccccacccctccaaaggtgcttggctgagatgtggcaggtgcacaacactgggaatgtactaaatgacagggaatagtttactttaaaatggctttttcatattatgtgactttcactcaataggaggaagaggaggaggaagatgaggaagaaaagcagcatcagtcatcagggcttgactcattaagccacatcacccaaaaggcagaatggcacacgcaca

SEQ ID NO: 30474 - DNA, 1063 bp, Homo sapiens
ggatccctctggaagaagacattgaggatgtcgatgaggcgggtgaggttgtggaagacgtgctccttgagagccggactgtcctcaaagtagagtagcttgccgctctcatgcaggtaggagagggcactctgcagtcggtcctcggtcagacccgcctgcaggcccaagcgcgccgagtcccaccagcttagccacagtcgctgggcctgaggtggctggaaatgcagttcctccagcacctgccaggatcgaggcagtactctgtgtaagttggggaagatctctcggtgctcagcaactgacagcaacttgtcccgaaggcgtcgtaagtggcgcgggtccctgcagctaacaggcaacacgggggagaggatctgcasccggtggttgagcaggtattgaaaatgggccttgcgccgtcgaaggttcttgtccgaaacgccatagtaggctgcgtgggggctggcagagcgcagctcgaagtcccgggccagtgcctcgtccaccaccttggccaagcggctcagtccctccgcgtcgtgcttctcctgcagggcgatctggcggtgaatgtccagacatttctcctccacgtcacgctctccgcacaggtctgcgtgggtgcccacgatgcacaccaccgcgtgggcactctcgccccgacccgatgcaagaaggagcccacggtggtaggaaagtggcgaggctcataggtggccaagttgaccaccagcacgtatagggcccctggggacaggaagaagggctggatcacctcataactttcatccccagctaagtcatacacgatgaaccgcaggccccgggaggcatcggccgtccagctggtcacctcgatgcccttgctcacagggggaggtgacggtgggtagcacttctccttgtcccctcctcctgggcatccctccactctctcctcggtgaggcagtggcgcagcaaagtctttcctgcagccttatgccccatcaggagcagcttgagccggggctgcaccgccggctgggaatgagccagttccttctggtaggctgcgatgta

SEQ ID NO: 30475 - DNA, 2493 bp, Homo sapiens
gcatttatttcagaacgaggttaaaagacccagctgtctagtcataaacttccctgtgagacacttaaattttcattaattatttcattttctgccccagaaaattaaagaaaaatattaaggttttcctaaataagtcttgagaatatatgctcaattctgggcttcaaccaaggtatagaaacctaatgttcttctggccagtagctacaaagaggttaattgatgcctttaaaagaactcctagcttcaaatattctgactcacatggaaaacaatttcctctatttaattctatacatggaatggtgtgtttttgaataatttacaccttaaaaatgaatattttctctggccaactgtcatgagaatggttccttgtactttattaagtcaaatgttgaagcaagcaaattgatgacctttgaaagctgaattaagttattaatgcaaaattattacaactttcttcatgatgatctattggtctaaaataacttgtttctgctcaagaaatggttgacagttgaacgatgcttatatacttttaaatacatcctgcataaaacatgaagaaagaactttattttccaaagagtgagcacatgtctgtccaacataagtctcctcagagccaactctaaccttatcatctcctctagtggctgctcttagttccagacttctggatttgaaaatttttcgggatcctgtgaatattatgtagcaaaatttgggagatggacggaagggtgtggatattaaacttactaaaaacattctcaaggtacccctggaataaggtacaaagttaatttgtcttggatttttaaaaattatcttgaacaatccatgaattttgttagccagctacatgtattcaaaatgatgagcttcattagtcatattcactcaggtacattatatttctaaaaaaacaaaagaaaattcattgccatagaaagttgctgttttctcagacttagaaaagtgaaatcccctgtttatttataacaacatttatagcagtccaagttttagagaccatcatcgccagattttaagttgagcctgaaacagcctacctcaaagacctctcttgggtggcttagtaattttatctttttctactcaggccatctacatagttacgcagaataaactcacatcatttcttttgcacatttggcttcactcctttggggcaaatttactccttgaataaaacagaattgtaatgggtrtctgagatacttgatgatttaaaaggaaacaaaacatacactccatgttcaacatgcattaggtcattggcatttttgcataatgatttcataaaaatatagccatgtgcgggactgaaaataaatttatttaagtttcactcagtaaaaaagcattcaaggaagtaattcaaagagtttaaaataattattttcattttccagtcaaaattactcaaatgtattagaattcgaaatcaaacaagggtaaaacagtcagagaatcttgacgtttgaaagaacctaagagcctgtcttaattcagacagttttagatgtgtgtaataaggaaccaaattgacattgctttaagcaagacagaaaataagttttctcttgtgcaatactgcagaagaaggccaactttgctaacaaggatgctgtgctccattgggtcatccagggacccaggatcctatcatatcgctctgcatcactagtccacaaaatccaggattgctcatcacttcattcctatatcaggcacactctaaatattgcacatatcacttcagctcatatcccacagccgaagggatatgatgcaaaggatgcaaaggaggctgagagatgtattgtttattctaaacagttacatggctaagaaagaaaggcatacaatatttcagaggataagtaaaagtctgtgccctatcggtcattttagatctcactacataaaacaaataaaaaaaaaaaaccctatccatggtttcttcattccccatgaggtttctctaatgactagcactctataaaacacatttagaaacaactactcaagaccaggataggaaactaaaatgtcttaaagggtcgggcaggtaaagtgaataaatgcagcaagttgggtgggacctgtgacaggcagcaggacaatctaaagagaacattcccaggtaggtctaaaggggtccgctgcactctgtaccactaattgctgctttgcagaattctgagtcctgagttaccagatatttcaatttttcaagagaagccagaaatctgtattttagtgaaatctcctagtaaccagcatcatcttgataccaaagccgggcagagacacaaccaaaaaagagaattttagaccaatatccttgatgaacattgatgcaaaagtcctcaataaaatactggcaaaccgaatccagcagcacatcgaaaagcttatccaccatgatcaagtgggcttcatccctgggatgca

SEQ ID NO: 30476 - DNA, 2493 bp, Homo sapiens
gcatttatttcagaacgaggttaaaagacccagctgtctagtcataaacttccctgtgagacacttaaattttcattaattatttcattttctgccccagaaaattaaagaaaaatattaaggttttcctaaataagtcttgagaatatatgctcaattctgggcttcaaccaaggtatagaaacctaatgttcttctggccagtagctacaaagaggttaattgatgcctttaaaagaactcctagcttcaaatattctgactcacatggaaaacaatttcctctatttaattctatacatggaatggtgtgtttttgaataatttacaccttaaaaatgaatattttctctggccaactgtcatgagaatggttccttgtactttattaagtcaaatgttgaagcaagcaaattgatgacctttgaaagctgaattaagttattaatgcaaaattattacaactttcttcatgatgatctattggtctaaaataacttgtttctgctcaagaaatggttgacagttgaacgatgcttatatacttttaaatacatcctgcataaaacatgaagaaagaactttattttccaaagagtgagcacatgtctgtccaacataagtctcctcagagccaactctaaccttatcatctcctctagtggctgctcttagttccagacttctggatttgaaaatttttcgggatcctgtgaatattatgtagcaaaatttgggagatggacggaagggtgtggatattaaacttactaaaaacattctcaaggtacccctggaataaggtacaaagttaatttgtcttggatttttaaaaattatcttgaacaatccatgaattttgttagccagctacatgtattcaaaatgatgagcttcattagtcatattcactcaggtacattatatttctaaaaaaacaaaagaaaattcattgccatagaaagttgctgttttctcagacttagaaaagtgaaatcccctgtttatttataacaacatttatagcagtccaagttttagagaccatcatcgccagattttaagttgagcctgaaacagcctacctcaaagacctctcttgggtggcttagtaattttatctttttctactcaggccatctacatagttacgcagaataaactcacatcatttcttttgcacatttggcttcactcctttggggcaaatttactccttgaataaaacagaattgtaatgggtgtctgagatacttgatgatttaaaaggaaacaaaayatacactccatgttcaacatgcattaggtcattggcatttttgcataatgatttcataaaaatatagccatgtgcgggactgaaaataaatttatttaagtttcactcagtaaaaaagcattcaaggaagtaattcaaagagtttaaaataattattttcattttccagtcaaaattactcaaatgtattagaattcgaaatcaaacaagggtaaaacagtcagagaatcttgacgtttgaaagaacctaagagcctgtcttaattcagacagttttagatgtgtgtaataaggaaccaaattgacattgctttaagcaagacagaaaataagttttctcttgtgcaatactgcagaagaaggccaactttgctaacaaggatgctgtgctccattgggtcatccagggacccaggatcctatcatatcgctctgcatcactagtccacaaaatccaggattgctcatcacttcattcctatatcaggcacactctaaatattgcacatatcacttcagctcatatcccacagccgaagggatatgatgcaaaggatgcaaaggaggctgagagatgtattgtttattctaaacagttacatggctaagaaagaaaggcatacaatatttcagaggataagtaaaagtctgtgccctatcggtcattttagatctcactacataaaacaaataaaaaaaaaaaaccctatccatggtttcttcattccccatgaggtttctctaatgactagcactctataaaacacatttagaaacaactactcaagaccaggataggaaactaaaatgtcttaaagggtcgggcaggtaaagtgaataaatgcagcaagttgggtgggacctgtgacaggcagcaggacaatctaaagagaacattcccaggtaggtctaaaggggtccgctgcactctgtaccactaattgctgctttgcagaattctgagtcctgagttaccagatatttcaatttttcaagagaagccagaaatctgtattttagtgaaatctcctagtaaccagcatcatcttgataccaaagccgggcagagacacaaccaaaaaagagaattttagaccaatatccttgatgaacattgatgcaaaagtcctcaataaaatactggcaaaccgaatccagcagcacatcgaaaagcttatccaccatgatcaagtgggcttcatccctgggatgca

SEQ ID NO: 30477 - DNA, 2493 bp, Homo sapiens
gcatttatttcagaacgaggttaaaagacccagctgtctagtcataaacttccctgtgagacacttaaattttcattaattatttcattttctgccccagaaaattaaagaaaaatattaaggttttcctaaataagtcttgagaatatatgctcaattctgggcttcaaccaaggtatagaaacctaatgttcttctggccagtagctacaaagaggttaattgatgcctttaaaagaactcctagcttcaaatattctgactcacatggaaaacaatttcctctatttaattctatacatggaatggtgtgtttttgaataatttacaccttaaaaatgaatattttctctggccaactgtcatgagaatggttccttgtactttattaagtcaaatgttgaagcaagcaaattgatgacctttgaaagctgaattaagttattaatgcaaaattattacaactttcttcatgatgatctattggtctaaaataacttgtttctgctcaagaaatggttgacagttgaacgatgcttatatacttttaaatacatcctgcataaaacatgaagaaagaactttattttccaaagagtgagcacatgtctgtccaacataagtctcctcagagccaactctaaccttatcatctcctctagtggctgctcttagttccagacttctggatttgaaaatttttcgggatcctgtgaatattatgtagcaaaatttgggagatggacggaagggtgtggatattaaacttactaaaaacattctcaaggtacccctggaataaggtacaaagttaatttgtcttggatttttaaaaattatcttgaacaatccatgaattttgttagccagctacatgtattcaaaatgatgagcttcattagtcatattcactcaggtacattatatttctaaaaaaacaaaagaaaattcattgccatagaaagttgctgttttctcagacttagaaaagtgaaatcccctgtttatttataacaacatttatagcagtccaagttttagagaccatcatcgccagattttaagttgagcctgaaacagcctacctcaaagacctctcttgggtggcttagtaattttatctttttctactcaggccatctacatagttacgcagaataaactcacatcatttcttttgcacatttggcttcactcctttggggcaaatttactccttgaataaaacagaattgtaatgggtgtctgagatacttgatgatttaaaaggaaacaaaacatacactccatgttcaacatgcattaggtcattggcatttttgcataatgatttcataaaaatatagccatgtgcgggactgaaaataaatttatttaagtttcactcagtaaaaaagcattcaaggaagtrattcaaagagtttaaaataattattttcattttccagtcaaaattactcaaatgtattagaattcgaaatcaaacaagggtaaaacagtcagagaatcttgacgtttgaaagaacctaagagcctgtcttaattcagacagttttagatgtgtgtaataaggaaccaaattgacattgctttaagcaagacagaaaataagttttctcttgtgcaatactgcagaagaaggccaactttgctaacaaggatgctgtgctccattgggtcatccagggacccaggatcctatcatatcgctctgcatcactagtccacaaaatccaggattgctcatcacttcattcctatatcaggcacactctaaatattgcacatatcacttcagctcatatcccacagccgaagggatatgatgcaaaggatgcaaaggaggctgagagatgtattgtttattctaaacagttacatggctaagaaagaaaggcatacaatatttcagaggataagtaaaagtctgtgccctatcggtcattttagatctcactacataaaacaaataaaaaaaaaaaaccctatccatggtttcttcattccccatgaggtttctctaatgactagcactctataaaacacatttagaaacaactactcaagaccaggataggaaactaaaatgtcttaaagggtcgggcaggtaaagtgaataaatgcagcaagttgggtgggacctgtgacaggcagcaggacaatctaaagagaacattcccaggtaggtctaaaggggtccgctgcactctgtaccactaattgctgctttgcagaattctgagtcctgagttaccagatatttcaatttttcaagagaagccagaaatctgtattttagtgaaatctcctagtaaccagcatcatcttgataccaaagccgggcagagacacaaccaaaaaagagaattttagaccaatatccttgatgaacattgatgcaaaagtcctcaataaaatactggcaaaccgaatccagcagcacatcgaaaagcttatccaccatgatcaagtgggcttcatccctgggatgca

SEQ ID NO: 30478 - DNA, 572 bp, Homo sapiens
tgcctactctgccccaaatggggattttcaggtatagcaagtgtaaatatagctttttccagaagaagcggggttgggtgggaggggaaaatcacacaattaattttcatgatagagatcccaagaaagaaagtggaggtgcttactgtgatttcagtttaattagaaacacatcctgaatgttaagacaaaaccaaaaktgttggtttcatttgaacttgagaagaattggagactatagacttaattatgtttcccatccccatagtaaacaataaacacctattatgttcttccagagttaaccaagtctatgagccaatgtaatcagtccaatgaatgtgttagaatagatactacacattttgtgggtgctactgcagcttgtatgtgttggcagcagttccgctttatttcctgctgatttttttttttttttgtaccttcactgccatataatgatttaggacttttgcttcctgaggtcagtgagaacattcatatctgatacttaactccagaagaagattcttgtttagttatgagaaagtgaatggctttagtgatgattc

SEQ ID NO: 30479 - DNA, 710 bp, Homo sapiens
agaatttcaacgctcatatgtatttttgtgagtcaccacgaaaacagttaaactgatcaaccgttttccaaactgcagacaccaaattgaaatcacaaagcactttctttttttcccctaagttgactcttctattcctgcctgctgtgctttatgtcagcaagtgaccctttcctgtattataatgcagtatagtatagatgcatcatgtaagaccasagagaaaccgattccaaaaccacctttcctcaagccgccgtttgtaacgaccatatgggcggtttgaaggacacagagagagcctactgacacttcactttcgctacacgtggtgatttttccagtgcttccggagacactgaaatttagttccaaacattgccttagaggattcttcattttattcattctaccgatgatccactcagaaaatcaaacctgagtacggagacattggagaagtcgttaaagtattggaccaagtcggttcgtcacgagtgacaaagttattccacactctacttgtacatactctgctttgccttcatgatggcaaagagtaatttttcgctatagagtaaaaacccgagatttattacggaatcagcgtgaaccttcccagcacagctcacagagcatacgccaaaaattacagtgtgattcagtttcaaaaattgtctgtagtgacctgtgaattcacagctcgtgag

SEQ ID NO: 30480 - DNA, 710 bp, Homo sapiens
agaatttcaacgctcatatgtatttttgtgagtcaccacgaaaacagttaaactgatcaaccgttttccaaactgcagacaccaaattgaaatcacaaagcactttctttttttcccctaagttgactcttctattcctgcctgctgtgctttatgtcagcaagtgaccctttcctgtattataatgcagtatagtatagatgcatcatgtaagaccagagagaaaccgattccaaaaccacctttcctcaagccgccgtttgtaacgaccatatgggcggtttgaaggacacagagagagcctactgacacttcactttcgctacacgtggtgatttttccagtgcttcyggagacactgaaatttagttccaaacattgccttagaggattcttcattttattcattctaccgatgatccactcagaaaatcaaacctgagtacggagacattggagaagtcgttaaagtattggaccaagtcggttcgtcacgagtgacaaagttattccacactctacttgtacatactctgctttgccttcatgatggcaaagagtaatttttcgctatagagtaaaaacccgagatttattacggaatcagcgtgaaccttcccagcacagctcacagagcatacgccaaaaattacagtgtgattcagtttcaaaaattgtctgtagtgacctgtgaattcacagctcgtgag

SEQ ID NO: 30481 - DNA, 642 bp, Homo sapiens
tgagctgagattgagaacagcctagacaatatagcaagaccttatctctacaaaaacaacaaaacaacagtaaaaacagagaaggcttcttccatgtgaccttctacaccctcaaccagtgacttttctgcaggtaaacactgtatargttcattttatctttacacatatttgcatgtgtataatgtgattttatgtacctttagaaatagtattgcatatgtgtttcctggatgacaccatgtgttcagtggttagaagagcaggctcagagtacctgtgtaaccttgggcaagtttctcgacttctccgactcatttgttactcagggataataacatctgagtaaaattagtgctgttctttgaatgtaataataaagtagataaactatttcaagaggagaaaaattttacaaaagacaaaagaggatatttagagatacattcaagattcaaacataatattttttaaaatgtcatgacattaaacttgaaaatttagatgaaattatctattttccagaaaagtatgtgacaaaaattgattgtggaagaaacatgagataaatagaaaaatcaaaaattatgtttttaattttacacccataaaaagcacatatattataaaataacagcttta

SEQ ID NO: 30482 - DNA, 642 bp, Homo sapiens
tgagctgagattgagaacagcctagacaatatagcaagaccttatctctacaaaaacaacaaaacaacagtaaaaacagagaaggcttcttccatgtgaccttctacaccctcaaccagtgacttttctgcaggtaaacactgtataagttcattttatctttacacatatttgcatgtgtataatgtgattttatgtacctttagaaatagtattgcatatgtgtttcctggatgacaccrtgtgttcagtggttagaagagcaggctcagagtacctgtgtaaccttgggcaagtttctcgacttctccgactcatttgttactcagggataataacatctgagtaaaattagtgctgttctttgaatgtaataataaagtagataaactatttcaagaggagaaaaattttacaaaagacaaaagaggatatttagagatacattcaagattcaaacataatattttttaaaatgtcatgacattaaacttgaaaatttagatgaaattatctattttccagaaaagtatgtgacaaaaattgattgtggaagaaacatgagataaatagaaaaatcaaaaattatgtttttaattttacacccataaaaagcacatatattataaaataacagcttta

SEQ ID NO: 30483 - DNA, 635 bp, Homo sapiens
tttacattaaagggctaaagaatgaattactttcaacttcaaattttacataatgcttatcagccaatatacgaagattttcaatttttacttaaaatattgactatgttattaaaagcaacaggccaattaaggcctttgaaataatataaggtacaaaaggagaagaaaagaagaaaaatcacctgattccttaaacaaagtaacaaagtaactagttgacagatgaaatttcctcttctagttaggtattatgtagtctcaaccataaagagcargtgaatttggctgtgttaaaatctaagtaaaaaataccttgttattcacctttaatattacccacttgtccttctttccattgaactacttgagtcatctcccccgtgccgctgtgaactgtgctcatactttagctggccacaaacgttaagtcaagctcttaaatatccgttctagtttcacatatgctactacctagctgtgtagcaaggacaagtggcttaacgttgtggttatcagattctttatctctcaaaaaggggatggattagacttgggctcctctccttgctcccatccccaactaccctccatatcgtactgcagggacaggccctcatccatcataacagcga

SEQ ID NO: 30484 - DNA, 1072 bp, Homo sapiens
gcattgcatcagtgagtcacatatcctggcatccaggtcctttcttgcttttctttttattttttttagagatggtgtctcactgtattgcccaagccggcctcaaattcctggactcaagcaatcctcccacctcagcctcccaaagtgctggaatcacaggcatcagccaccgtgcccagtcccaggtcctttcatagccctctcacacactgactctgagcttagttcatgacctgctttggccaagggaacatcagcaaacacaacagagcagagcctttataagcacttgtccaatggaatttgcccaccatcatgtgaaaaagcccaggggaaagacacaaagagaaagaagtttagtcattccaatctcaactgaggcaccagacacacaagtaagcccatgttagaccatctagtcccaaccaagctaccagctgactacagccacgtgagtgagcataaaggagactaatgaaaatatcacccagtcacattagtgtygttttcacagcgacaaatttagacggtttgttacgcagcaattgataactgatccaacacactctaggataagaaatggcactcattcagcacttactgagttcttagaatgcacaaccctgaaaaaaagacttgcatattaaatcaagataactatggtgtggaaagagctgtaatatttgacaggtaaggacacaaaggaaggagtcctctgctttggttagtcaaagacttcacagaaaagaaaaaacatgaattttgtcttgaaagataatccaactaactaaaaataaaaagattcaaataggtacagaaaacaatgaaggtgtagaggtgagaaatcaacaggatgttcagaagcctgtgtatgatttcatacagtaaaagtaaaggtagctgttggagagaatcaaaagatgaagcattttagactcagataaggattaagtaaattcttagtaccccattttatggattttaggtgagaatgtcagaatagaagtcagtttgtgctcttaagtctacactatactgcctctctaaaatttccaatatatttctgcag

SEQ ID NO: 30485 - DNA, 1136 bp, Homo sapiens
aatggatggtggtggtggtggtggtggtggttgtaaaatatgagtgtacctaattccaccgaactatatatttaaaaatggttcagactgtaaattttatatgtgtattttacsacaactttttttacaaagcattaaaagagatatcagttgatcagaaatcgttgggacagaaaatagctggtgagtggatgggatctgattggtagaaatgaagtcaaccacaacacaaaactgctagagaaaactacagcagatccacaaaaattccacgctcagaagaaataatacaaagattgaggaggggttcctactgcaatctttaggataattaaacaatactaaggaacctagaccacccatacccatactaaaaccctcccccatatcctaagcttcaaggaacagagaaatttttgttgccaacctgaaaaacaagagctgctctctttataaataacagcataccataacataatgttcatcctccccagtaaatcaggaaatccaaagtcagtgagatctctttccacaaacaatttggtcagattttaatcattaattctgtaggtatggaaaaagatactccaatatgttaacatagcctttgttatggtaacttatagtttctatacaatttaaatataaatactcttcaactgagccattttacttctaattatcttatacggcctggatgtgtgtctctccaaatctcatgctgaaatgtctcatgctccaatgttggaggtgggggccttgtaagaggtgttggatcacggaggcagatacctcatgaaaagcttagaaccatccccttgatgatgtgtgatccttgctttatcaccgcttcacacaagagctggtggtttaaaaggagcctggcacctcctctccctcttgctccctctcttgccatgtgacctactagcttcccttccaccatgattgtaagcttcctgaagcttgccctccccagaagcagaagccaacactgtgctttgtgtacagcctgaagaaccatgagctaaataaatctcttttctttataaattacccagccttaggtattccatatagcaatgcaaacagcctaatacattatgtatcacagataaaatactcacatacacata

SEQ ID NO: 30486 - DNA, 596 bp, Homo sapiens
atgagggaaattacaatcacattggctagatgagaggcacccagaaaagaagtagagattgtgaagtatacagttatgggaacctctgttggacccagtgaggacaaataagagggaggagggatgagtgtgggtgagcaggctgggggaacttcatggaggaagtaggattttattccaatatgtgtgtgtatgtatatgtgcacccacaggtawatgtgccagcatatacaaaatacaaagctctgacttggaggacctaatagcttaatgaggggagacatatcaaaagcaaataactggacagatacaataatcgcctggtggtaataagtgctcggagagaaatgaatcatgggaaggtcctattttgcataaggagcttaggtagacttcttggaggaagtggtttttaagccaacatgtaaattaccacaagggtttggccgtgtgaagagccaatttaagagtgatccaggccgaggaaatagcatatgctaagatcctagagcagggatgaacttagtgtgttcaaggaaacaaaaggctgggaccgggtatgtgggcatttgggggagagtcctacatggtgggga

SEQ ID NO: 30487 - DNA, 725 bp, Homo sapiens
tttgatatttaaatcattctccttttgatgcatttgttttgtaaccattcttttcaatgttctcttcttcaaatggtaactggcataactaccaaatcatgacttataaataattttgcatgcaattcagacagctctccaacatcagttgcataaacctcatatactctggcatttttcatatgattaccaattccatgtagcacttttttcagctgttcttgcaccatactactgaaatccatcaaaagacttggccaccacgattctgacaaaggggcttcaataaacactgttttagtaaggaatattttggtgggaacttattttttttgagacggagtcttgctgtgtcaccaggctggagtgcagtggcgcaatctcagctcatagcaaccttcacctcctgggtttaggcgattttcctgcctcagcctcccgagtagctgggactacaggcgtgcaccaccacgcccagctaatttttgtatttttagtagaaatggagtttcaccatgttggccaggatggtctcgatctcttgacctcgtgatctgcctgccttggcctcccaaagtgctgggattacaggtgtgtgccacactgtgcctggcctgggtgggaactttctagaactggtcagttcattaacaaatattttcatattctaacaacttttgctttcacacacaactgwgatgacttggaaaagtaatacttaatga

SEQ ID NO: 30488 - DNA, 536 bp, Homo sapiens
tggagatttaagtaktggctttgtaaaccatgctaaggattgtggtttgtactttcccttggaggaatggaatagggatccacaggagtttctgctgatttccacttcttccagaccactccgtgggtgatgttgactgtagagcccagagagagagggtacagctatagctctacctccatagcatctgcatccacatgcacacatatacttagtccactcacgacccccaaactgcaatactcaagtcttttaatattatcaaaatggaaaagaaagggctgggtctgcccttagctggttggctcaatcatatcatcagtagaaaaggtctgtagagaaattggtccctaagttccgtatattattttctagatggactacagataagtgataaaaaccgaggggctacagaattgggtagctggagaaggaaaagtgtaatgttaaaaatgtaatctgagcattaataaaaaaaaaaactaatgatgctacttaacagagataacaggatgtcctacctaaggttaaattag

SEQ ID NO: 30489 - DNA, 1125 bp, Homo sapiens
ccaatggtgagaaggtgagaagatttatttgagatctatccwaggttaattctgcaagttttagtgaactgtgggactggtgggtaaggaagaggagagaatcaaggatgactctcactcaggtttttagtataggtgtttgtatggatagcataatgtagcttcagagttctgatataagctcagagttatgtgatcaaaacataaacaagaaactataatctctatagagactatgggaggttacaaatggtaaggataaactatgtacagtatcattggatagcctagtttattttctgtttgttttaaataggacagagtcttgctgtgttgcccaggctagtcttgaactcctgggctcaagtgattctcctgcttcagtctccctagtagctgggattacaagagtgagccacagcacctgactctcattgatagtttttaaaatgcgttagcaatcagaaatctcacaaagccatactgtttaaagatttcctctgaaaacacagcaaagggcaaaaactaaggtaataatgtaacaactggaattagatataaataacttttacaatactctttagtatgggctttgattcatagtaattagaatttttaaaccattaatacagtcatgggcacattttttgtttttcttactgtttttgtaaattaatataaaaatattaaaatgttttcaaaacagtatataattgaaattgaatttattggaagcagatacagttttctggggagaaaaataatcttaaaaatgacaaatatttgaactagcaaaatgcatcttatagcaataccttaagaactataatattaaaaactgtttggcagagaactaattatttttcagtcatacatgtaaattaaagtcccacttggttttgcctaaggtaagtcacgcttaactgagtactggctgtttggctttgtgctcatgtggccccaggccctgaagggctttgcatattattggggctctgtaggtgaatcagttatggcctttgtctcaagtccaagtgggaatcaccagaatgtcttaacttttggcacaaaagaggcttcagtttatacagactatcagtttataccccaactattcacaggatc

SEQ ID NO: 30490 - DNA, 1323 bp, Homo sapiens
agtcatgtgaccttgaagtcttttgtatatttgacggacaatatttgattgaaattatagaggaagaaactaaaaattgggagtctttgagccaagtgaaagtgtgatttgatgtcttgttcttgcccatgtttccttttctatagggacacccatcttaaaatactacctgtagaagataagtaaacatgcccattatagaaaaaaatccataagttaaaagaagagaaatattcatccattatcttatcactcagaaataacctgttgtatatccttctagattttttctttatattgcccgaagtgatgggataatatgcaaatattttcttgagtctgctctgtctacttcccattatttcctaaagaactttaaaacgtttaaggagttagtgtttttgtaattatggcagttttctaaaatagatatacatgagtaaagagaaccacacaaaggtattttatttgctatttttatgttttctgtgttgtaggtttcatagaaatttgaattagatttttttcgtgttatagaatgcaatgactttaatttatactcctaattttaggaagcattcaaagctgtggaagatattcacgggctattctccttgtctaaaaaaccacctaaacctcagttgatggcaaattactataacaaagtctcaactgtgttttggaaatctggaaatgctctttttcatgcatctacactccatcgtctttaccatctctctagagaaatgagaaagaatctcacacaagatgagatgcaaaggtaaaaatgttatacttggataatgttgaaattctgtaacaaatatcgtctattatatgacatggtatattttargccatggtttctcagcctctgcactactgacattttgggttggataattcttagtcatggggctgtcttgtgtactgcaggtggtttagcagtttagcagcatcctcagcttctacccattagatgccagtagcaaccaccgccagttgtgactattaagacgtctcaagacattgcccttcctgaacagtattcttggactttagtagttggtcttgaactcctcacctcaggtgataagtaactccgctaaaagcccaattgagaaatttgaatattaggaaaaacacatttaacggatgagctttctatccacatagaggtggagtctattctcagaacaaatagaaaattaagaaaaatacttttttttccttttctttttttttttttttttttgcaagacagagtcttttgttgcccaggctggagtgcagtggcacgatattggctcactgcatcctctg

SEQ ID NO: 30491 - DNA, 531 bp, Homo sapiens
aagtgatttttgtgcctcagcctcctgagtagctggaattacaggtgtgcaccaccatggcccggccaatttttgtattttcagtagagatggggtttygccatgttggccagggtggtctcgaactcctggcctctagtgacccacccgtcttggcctctcaaagtgctggggttacaggcatgagccacgatgcccggctgcttcccattttttggtcctttctccagcctcttggctggccctactttcccctacctgtcaagggaatgggtggagggcttggacaggtagaaaattctggaaatgaagtcacgtgaagaggaaggagtcgtctccatgaaaagccagatactgtttcccggtggtgctgttgcttgggaggccagaagccatcatggtggctgctctgtttctgatcccttcacagaagggcacagctcctgctctaggccctggtccaacagtttgattctttggtgcctctgaagcattgccataagaagctcattgtttgggatttgttaggta

SEQ ID NO: 30492 - DNA, 691 bp, Homo sapiens
tttgagctcagagtttgagaccagcctgaccaaaatggtgaaaccccatctctactaaaaacacaaaaattagctgagcatggtggtatgcgcctgcattcccagctactcgggaggctgaggcacaagaatcacttgaacccaggaggcagaggttgcagtgagccgagatcatgtcactgctctccagcctgggygacagagtgagaccttgtctcaaaaataaataaataaataaataaaacctggtcgctcatcccctgggaaagcagagcacatccattcttactctgcaaacctgtagatttctggtccccaaattctacttaatcttttgagaacatcaagcttttttgtcaaaattgcggggacttgatccaacagttcaatttctgggtgtatatgcaagataattggaagcaggatctgaagagatatttgtatacctatgttcccacatttctaacagtgttactcacaatggccaaaaggtggaagcaacccacatgtccactgatggatgaatggattaaccaaatgtggcctattcatgcaatgtggttttattccacctcaaataagaagaaaattctgacacgcgctaaaaaatgtatgaaacttgaggacattatgctaagtgaaataagccagtcaccaaaaaacaaatactgtgtgattacacttataagag

SEQ ID NO: 30493 - DNA, 542 bp, Homo sapiens
tattaaagtgttagcagacacccagagtaacctaagatcaattctgggctctgtcccagcctgcacacattgggtgtgtatttcccaaacattttctctttggattgcctgtaatcgctggaagacatcctgcaggtaaaatgccactctgttatctaatcaaacacagrttcttggaggatctgggatataataagacactttcaaatagatcctcattcatttcagtgtgcactaggaagatgtggtttgaaatcaacagttctactctctcaggcgattgggcatttagccttcatagtaacctgaactttctgtactcatgtagatggaagaggaaataactttgacctcttcttttacattgaactcacgtgctccaagcaccaactcgtgtcaggccaggccccgagttgcagtacgtaagaagaatctcttctgtttagcagcctggctgcttgggtgagtggctggcctgcactgaggaagtccatctggctcagccgactcacccctctcgggaatctcccttagacctacac

SEQ ID NO: 30494 - DNA, 317 bp, Homo sapiens
gttacttaagtgactgatgttaatgacgtctacatacctttatcaagtatcttgtaggaatttcaagttttggtcttaacttaaaccacaaatatctcaaatacataaatatctctagaacagtatttctctaagtcctgacatgctagagattaagattaaattcaatatgctccacatgtaagtggcaatccctaatcccctttaggaaaccacaaggcaaatcctggcccctttacacgtccagtatcacctttaagcaccgttcccccratcttgccaatccaatcctatcctccactcactgctccttttac

SEQ ID NO: 30495 - DNA, 545 bp, Homo sapiens
gtagcctgcttccagaatgctcagccctcactcttttcaccaaattctctaccaccaaagggacaatggcctgggtaaaaccgcaggtgcrctcgctcatattttgagtcataggagtatgccaagtatggcctctcaaagcattgttgctgtccattaaaagtccatgggttatggttgagggagcctcctaacatcttgtgaactgagtgaaaagaaacaaacatttatttgggcgttggattgacagggtggttctcctgcacatgccttggtcccagtgaagttatggtcgctaaatcctcaggaacattgccttctctgttatcttcgtcgtctttttttttttttttttttttttttttttgagatggtgtcttgctctgttgcccaggctagagtgcagtggcacgatcttggctcactgcaacctccacctcctgggttcaagcaattctccctgcctcagcctcctgagtagctggaattacaggcacctgccaccacgcttggctaatttttgtatttttagtagagacggggtt

SEQ ID NO: 30496 - DNA, 545 bp, Homo sapiens
gtagcctgcttccagaatgctcagccctcactcttttcaccaaattctctaccaccaaagggacaatggcctgggtaaaaccgcaggtgcgctcgctcatattttgagtcataggagtatgccaagtatggcctctcaaagcattgttgctgtccattaaaagtccatgggttatggttgagggagcctcctaacatcttgtgaactgagtgaaaagaaacaaacatttatttgggcgttggattgacagggtggttctcctgcacatgccttggtcccagtgaagttatggtcgctaaatcctcaggaacattgccttctctgttatcttcgtcgtctttttttttttttttttttttttttttttgagatggtgtcttgctctgttgcccaggctagagtgcagtggcaygatcttggctcactgcaacctccacctcctgggttcaagcaattctccctgcctcagcctcctgagtagctggaattacaggcacctgccaccacgcttggctaatttttgtatttttagtagagacggggtt

SEQ ID NO: 30497 - DNA, 1055 bp, Homo sapiens
ggatcccaggagatccagatgctgccatwcagcactcattagtgtctctgggagcttttatgtcacctcagatcctgactgagttggtctgaggtacagccaagaattgatattttccaggctccccaggtgattctgactgcaagtagggctgggaacctcctagttatgttgagaatgtgctgggcaagtcagacagttaatcctgtatcactactttaccaagggctgtgttctttcctgccagaacttggccccattcagtgactttgtctgcaaatcaggatagctacttggtgaaggtgagtgaaagttttgggtttatggcttaaagaatggacaaataggcctggcatagtggttcctgtctgtcatcccaacactttgggaggctgagacgggaggatcacaggagttggaggctgcagtgacctgtgatcacaccactgcatgctagcctgggtaacagagtgagaccccatccgaaaaaagaaaaagagtggacagataaattcaagtggctgacaacttgaggatacttaaatacactttccatttgccgaccactttctttcacttctgcaggaaaatgactttttctctgaatgcagaatatcagcagagattcccaagctttgaacatttgctatactgtcttggcttttccctgtgttgttttgtttgtagcctgctaaataactccctctgacattgctattttgtaacaccctttgagataatggtgcaatatctagtgtatataaacaaatgcaggctcaacagtctcttgggtagaattttaatttcattgatctgcaacgttcttttaacatctaaaaggtgccctctgctaccagtcctgtgagttgttcccctgttatcatgatatcggatcacgttgtgtcctgaaatgagaaggtggggagatgtgtgcagatagctttagaagttctcctgatgggcactttctaggtagtgacacacatttagaaatctgagagctttgttctgtatctaagtttcttctgttttaatctttcagtgcacaagggtct

SEQ ID NO: 30498 - DNA, 2016 bp, Homo sapiens
cagagtggaggagcccccartggggcagctagggaatctgggaggtggggggacagggggcggtcactctgtctccggcccatgatgggctgtttctgtgaagctctagagcccatgactccaggtcaccagtgtcacaggaagcttggggccagagtgggtctctgagagtcatgctgaaagctagatgtggtcttactgtgtccactcctctaggagaagacactgcaatttccaaatgaagcaatgctcatcctatgtgctggtgatgtgaaaatactggggtcactgtgggctttcaggaagtgcctaggtggggctggaggctgtggtgaacagaaggggcggggtggccgggcaggaggactgagggacaaagctaggagagggaactgggcagccagcctggtggggatctcagagctgccaccctgcccagcgtggcacagccatctctgccctgagctcggctgcttctcctgagtccagctgtgacctagcaggaagcccctcggcttgtctgctaggggtcctggctcagtgctgagtcacactttttatggaaatatcaggtgcctgtccctcacacttcttgttgcttcctcaggcccaggacctgcccacctacctgcatgcccgcctggtggacctgtccctcccccagcccaacctggctccctggaaggatgagaagcagtaggggagatgaggcaaaagctggggcagcccctgcaggggaagttgaggcagggatcatctattcacacgcaaaagggatgctgtacggggtgctggggtcccacatagagaagttctagctgcagtgctgggcagccctggagcagcagaactcagcagtgcaaggcggctgctcagagcggccacgataagaaggcgcaggtctgtcccctcccccggcgcctgctgctccctgcctctgcctccctgtccagcttctgctcatgcttcagggtcgctgatgtggatccaaacagccacacataggagtctcttcagtggggggtgctggggggtgtcactgggaatgtggactgcaggtgagcacaccccactaacctcatttaacctatttagtgtcttatgcaatttaagaaaaaccaaaaaccaaacaacaacagcaaaaaaaccccacaccaacccacagtctttgaaagggttgggttccaccaggagactcaggcgtcttagtggaaagaatgatctgggctctggctgggatggcacaggcagctggggggcggtgcccgccgccgggaggcgtgggcctgactcagtggaaggaagtggtgtgtttccattgcagagctcaaaaacaaggtggtttgaggaacgcttgtgtgtcaccggcatttccctgttgtgtttatgaagtgaggtgggaatcaagctctggggttactctaattgtgtcttttacaagaaaccaagaagcccccatggaacacaggcaggggctgaggcggccgggaggggctggggaaacccaggcgcaagcgcgctgggctgggaggacggggccggccacctcacccggctctccagcaccccattttaaggatgggaccaccctctgccagcctgcctcttcccagcgcatgtcctgacctccccgaactgcttccttttctagacgctgtgtgggtgcaaacagcaggtgctcatggatggcacggatgacaaacagcaggtgctcatgggtggcaccgcatgtccaggccagggagaggctgcggggctgggagggcggggctcataagatggacgtgcacacagcagtcgggtgagcctccggtgcccctggaagcctgctgaccacgcagcgcgcagcattgcccctccctagctgaggccatgggggcgggggatgcgggcttttactggcgtggcaattctgtcttctgaggtcactcacagtttccccctggtgaggcgagcactgtgctgaggagcgttccaccatgcagtacaggagagcagtggtctgcatgatggatc

SEQ ID NO: 30499 - DNA, 2016 bp, Homo sapiens
cagagtggaggagcccccagtggggcagctagggaatctgggaggtggggggacagggggcggtcactctgtctccggcccatgatgggctgtttctgtgaagctctagagcccatgactccaggtcaccagtgtcacaggaagcttggggccagagtgggtctctgagagtcatgctgaaagctagatgtggtcttactgtgtccactcctctaggagaagacactgcaatttccaaatgaagcaatgctcatcctatgtgctggtgatgtgaaaatactggggtcactgtgggctttcaggaagtgcctaggtggggctggaggctgtggtgaacagaaggggcggggtggccgggcaggaggactgagggacaaagctaggagagggaactgggcagccagcctggtggggatctcagagctgccaccctgcccagcgtggcacagccatctctgccctgagctcggctgcttctcctgagtccagctgtgacctagcaggaagcccctcggcttgtctgctaggggtcctggctcagtgctgagtcacactttttatggaaatatcaggtgcctgtccctcacacttcttgttgcttcctcaggcccaggacctgcccacctacctgcatgcccgcctggtggacctgtccctcccccagcccaacctggctccctggaaggatgagaagcagtaggggagatgaggcaaaagctggggcagcccctgcaggggaagttgaggcagggatcatctattcacacgcaaaagggatgctgtacggggtgctggggtcccacatagagaagttctagctgcagtgctgggcagccctggagcagcagaactcagcagtgcaaggcggctgctcagagcggccacgataagaaggcgcaggtctgtcccctcccccggcgcctgctgctccctgcctctgcctccctgtccagcttctgctcatgcttcagggtcgctgatgtggatccaaacagccacacataggagtctcttcagtggggggtgctggggggtgtcactgggaatgtggactgcaggtgagcacaccccactaacctcatttaacctatttagtgtcttatgcaatttaagaaaaaccaaaaaccaaacaacaacagcaaaaaaaccccacaccaacccacagtctttgaaagggttgggttccaccaggagactcaggcgtcttagtggaaagaatgatctgggctctggctgggatggcacaggcagctggggggcggtgcccgccgccgggaggcgtgggcctgactcagtggaaggaagtggtgtgtttccattgcagagctcaaaaacaaggtggtttgaggaacgcttgtgtgtcaccggcatttccctgttgtgtttatgaagtgaggtgggaatcaagctctggggttactctaattgtgtcttttacaagaaaccaagaagcccccatggaacacaggcaggggctgaggcggccgggaggggctggggaaacccaggcgcaagcgcgctgggctgggaggacggggccggccacctcacccggctctccagcaccccattttaaggatgggaccaccctctgccagcctgcctcttcccagcgcatgtcctgacctccccgaactgcttccttttctagacgctgtgtgggtgcaaacagcaggtgctcatggatggcacggatgacaaacagcaggtgctcatgggtggcaccgcatgtccaggccagggagaggctgcggggctgggagggcggggctcataagatggacgtgcacacagcagtcgggtgagcctccggtgcccctggaagcctgctgaccacgcagcgcgcagcattgcccctccctagctgaggccatgggggcrggggatgcgggcttttactggcgtggcaattctgtcttctgaggtcactcacagtttccccctggtgaggcgagcactgtgctgaggagcgttccaccatgcagtacaggagagcagtggtctgcatgatggatc

SEQ ID NO: 30500 - DNA, 2016 bp, Homo sapiens
cagagtggaggagcccccagtggggcagctagggaatctgggaggtggggggacagggggcggtcactctgtctccggcccatgatgggctgtttctgtgaagctctagagcccatgactccaggtcaccagtgtcacaggaagcttggggccagagtgggtctctgagagtcatgctgaaagctagatgtggtcttactgtgtccactcctctaggagaagacactgcaatttccaaatgaagcaatgctcatcctatgtgctggtgatgtgaaaatactggggtcactgtgggctttcaggaagtgcctaggtggggctggaggctgtggtgaacagaaggggcggggtggccgggcaggaggactgagggacaaagctaggagagggaactgggcagccagcctggtggggatctcagagctgccaccctgcccagcgtggcacagccatctctgccctgagctcggctgcttctcctgagtccagctgtgacctagcaggaagcccctcggcttgtctgctaggggtcctggctcagtgctgagtcacactttttatggaaatatcaggtgcctgtccctcacacttcttgttgcttcctcaggcccaggacctgcccacctacctgcatgcccgcctggtggacctgtccctcccccagcccaacctggctccctggaaggatgagaagcagtaggggagatgaggcaaaagctggggcagcccctgcaggggaagttgaggcagggatcatctattcacacgcaaaagggatgctgtacggggtgctggggtcccacatagagaagttctagctgcagtgctgggcagccctggagcagcagaactcagcagtgcaaggcggctgctcagagcggccacgataagaaggcgcaggtctgtcccctcccccggcgcctgctgctccctgcctctgcctccctgtccagcttctgctcatgcttcagggtcgctgatgtggatccaaacagccacacataggagtctcttcagtggggggtgctggggggtgtcactgggaatgtggactgcaggtgagcacaccccactaacctcatttaacctatttagtgtcttatgcaatttaagaaaaaccaaaaaccaaacaacaacagcaaaaaaaccccacaccaacccacagtctttgaaagggttgggttccaccaggagactcaggcgtcttagtggaaagaatgatctgggctctggctgggatggcacaggcagctggggggcggtgcccgccgccgggaggcgtgggcctgactcagtggaaggaagtggtgtgtttccattgcagagctcaaaaacaaggtggtttgaggaacgcttgtgtgtcaccggcatttccctgttgtgtttatgaagtgaggtgggaatcaagctctggggttactctaattgtgtcttttacaagaaaccaagaagcccccatggaacacaggcaggggctgaggcggccgggaggggctggggaaacccaggcgcaagcgcgctgggctgggaggacggggccggccacctcacccggctctccagcaccccattttaaggatgggaccaccctctgccagcctgcctcttcccagcgcatgtcctgacctccccgaactgcttccttttctagacgctgtgtgggtgcaaacagcaggtgctcatggatggcacggatgacaaacagcaggtgctcatgggtggcaccgcatgtccaggccagggagaggctgcggggctgggagggcggggctcataagatggacgtgcacacagcagtcgggtgagcctccggtgcccctggaagcctgctgaccacgcagcgcgcagcattgcccctccctagctgaggccatgggggcgggsgatgcgggcttttactggcgtggcaattctgtcttctgaggtcactcacagtttccccctggtgaggcgagcactgtgctgaggagcgttccaccatgcagtacaggagagcagtggtctgcatgatggatc

SEQ ID NO: 30501 - DNA, 2016 bp, Homo sapiens
cagagtggaggagcccccagtggggcagctagggaatctgggaggtggggggacagggggcggtcactctgtctccggcccatgatgggctgtttctgtgaagctctagagcccatgactccaggtcaccagtgtcacaggaagcttggggccagagtgggtctctgagagtcatgctgaaagctagatgtggtcttactgtgtccactcctctaggagaagacactgcaatttccaaatgaagcaatgctcatcctatgtgctggtgatgtgaaaatactggggtcactgtgggctttcaggaagtgcctaggtggggctggaggctgtggtgaacagaaggggcggggtggccgggcaggaggactgagggacaaagctaggagagggaactgggcagccagcctggtggggatctcagagctgccaccctgcccagcgtggcacagccatctctgccctgagctcggctgcttctcctgagtccagctgtgacctagcaggaagcccctcggcttgtctgctaggggtcctggctcagtgctgagtcacactttttatggaaatatcaggtgcctgtccctcacacttcttgttgcttcctcaggcccaggacctgcccacctacctgcatgcccgcctggtggacctgtccctcccccagcccaacctggctccctggaaggatgagaagcagtaggggagatgaggcaaaagctggggcagcccctgcaggggaagttgaggcagggatcatctattcacacgcaaaagggatgctgtacggggtgctggggtcccacatagagaagttctagctgcagtgctgggcagccctggagcagcagaactcagcagtgcaaggcggctgctcagagcggccacgataagaaggcgcaggtctgtcccctcccccggcgcctgctgctccctgcctctgcctccctgtccagcttctgctcatgcttcagggtcgctgatgtggatccaaacagccacacataggagtctcttcagtggggggtgctggggggtgtcactgggaatgtggactgcaggtgagcacaccccactaacctcatttaacctatttagtgtcttatgcaatttaagaaaaaccaaaaaccaaacaacaacagcaaaaaaaccccacaccaacccacagtctttgaaagggttgggttccaccaggagactcaggcgtcttagtggaaagaatgatctgggctctggctgggatggcacaggcagctggggggcggtgcccgccgccgggaggcgtgggcctgactcagtggaaggaagtggtgtgtttccattgcagagctcaaaaacaaggtggtttgaggaacgcttgtgtgtcaccggcatttccctgttgtgtttatgaagtgaggtgggaatcaagctctggggttactctaattgtgtcttttacaagaaaccaagaagcccccatggaacacaggcaggggctgaggcggccgggaggggctggggaaacccaggcgcaagcgcgctgggctgggaggacggggccggccacctcacccggctctccagcaccccattttaaggatgggaccaccctctgccagcctgcctcttcccagcgcatgtcctgacctccccgaactgcttccttttctagacgctgtgtgggtgcaaacagcaggtgctcatggatggcacggatgacaaacagcaggtgctcatgggtggcaccgcatgtccaggccagggagaggctgcggggctgggagggcggggctcataagatggacgtgcacacagcagtcgggtgagcctccggtgcccctggaagcctgctgaccacgcagcgcgcagcattgcccctccctagctgaggccatgggggcggggsatgcgggcttttactggcgtggcaattctgtcttctgaggtcactcacagtttccccctggtgaggcgagcactgtgctgaggagcgttccaccatgcagtacaggagagcagtggtctgcatgatggatc

SEQ ID NO: 30502 - DNA, 2016 bp, Homo sapiens
cagagtggaggagcccccagtggggcagctagggaatctgggaggtggggggacrgggggcggtcactctgtctccggcccatgatgggctgtttctgtgaagctctagagcccatgactccaggtcaccagtgtcacaggaagcttggggccagagtgggtctctgagagtcatgctgaaagctagatgtggtcttactgtgtccactcctctaggagaagacactgcaatttccaaatgaagcaatgctcatcctatgtgctggtgatgtgaaaatactggggtcactgtgggctttcaggaagtgcctaggtggggctggaggctgtggtgaacagaaggggcggggtggccgggcaggaggactgagggacaaagctaggagagggaactgggcagccagcctggtggggatctcagagctgccaccctgcccagcgtggcacagccatctctgccctgagctcggctgcttctcctgagtccagctgtgacctagcaggaagcccctcggcttgtctgctaggggtcctggctcagtgctgagtcacactttttatggaaatatcaggtgcctgtccctcacacttcttgttgcttcctcaggcccaggacctgcccacctacctgcatgcccgcctggtggacctgtccctcccccagcccaacctggctccctggaaggatgagaagcagtaggggagatgaggcaaaagctggggcagcccctgcaggggaagttgaggcagggatcatctattcacacgcaaaagggatgctgtacggggtgctggggtcccacatagagaagttctagctgcagtgctgggcagccctggagcagcagaactcagcagtgcaaggcggctgctcagagcggccacgataagaaggcgcaggtctgtcccctcccccggcgcctgctgctccctgcctctgcctccctgtccagcttctgctcatgcttcagggtcgctgatgtggatccaaacagccacacataggagtctcttcagtggggggtgctggggggtgtcactgggaatgtggactgcaggtgagcacaccccactaacctcatttaacctatttagtgtcttatgcaatttaagaaaaaccaaaaaccaaacaacaacagcaaaaaaaccccacaccaacccacagtctttgaaagggttgggttccaccaggagactcaggcgtcttagtggaaagaatgatctgggctctggctgggatggcacaggcagctggggggcggtgcccgccgccgggaggcgtgggcctgactcagtggaaggaagtggtgtgtttccattgcagagctcaaaaacaaggtggtttgaggaacgcttgtgtgtcaccggcatttccctgttgtgtttatgaagtgaggtgggaatcaagctctggggttactctaattgtgtcttttacaagaaaccaagaagcccccatggaacacaggcaggggctgaggcggccgggaggggctggggaaacccaggcgcaagcgcgctgggctgggaggacggggccggccacctcacccggctctccagcaccccattttaaggatgggaccaccctctgccagcctgcctcttcccagcgcatgtcctgacctccccgaactgcttccttttctagacgctgtgtgggtgcaaacagcaggtgctcatggatggcacggatgacaaacagcaggtgctcatgggtggcaccgcatgtccaggccagggagaggctgcggggctgggagggcggggctcataagatggacgtgcacacagcagtcgggtgagcctccggtgcccctggaagcctgctgaccacgcagcgcgcagcattgcccctccctagctgaggccatgggggcgggggatgcgggcttttactggcgtggcaattctgtcttctgaggtcactcacagtttccccctggtgaggcgagcactgtgctgaggagcgttccaccatgcagtacaggagagcagtggtctgcatgatggatc

SEQ ID NO: 30503 - DNA, 2016 bp, Homo sapiens
cagagtggaggagcccccagtggggcagctagggaatctgggaggtggggggacagggggcggtcactctgtctccggcccatgatgggctgtttctgtgaagctctagagcccatgactccaggtcaccagtgtcacaggaagcttggggccagagtgggtctctgagagtcatgctgaaagctagatgtggtcttactgtgtccactcctctaggagaagacacygcaatttccaaatgaagcaatgctcatcctatgtgctggtgatgtgaaaatactggggtcactgtgggctttcaggaagtgcctaggtggggctggaggctgtggtgaacagaaggggcggggtggccgggcaggaggactgagggacaaagctaggagagggaactgggcagccagcctggtggggatctcagagctgccaccctgcccagcgtggcacagccatctctgccctgagctcggctgcttctcctgagtccagctgtgacctagcaggaagcccctcggcttgtctgctaggggtcctggctcagtgctgagtcacactttttatggaaatatcaggtgcctgtccctcacacttcttgttgcttcctcaggcccaggacctgcccacctacctgcatgcccgcctggtggacctgtccctcccccagcccaacctggctccctggaaggatgagaagcagtaggggagatgaggcaaaagctggggcagcccctgcaggggaagttgaggcagggatcatctattcacacgcaaaagggatgctgtacggggtgctggggtcccacatagagaagttctagctgcagtgctgggcagccctggagcagcagaactcagcagtgcaaggcggctgctcagagcggccacgataagaaggcgcaggtctgtcccctcccccggcgcctgctgctccctgcctctgcctccctgtccagcttctgctcatgcttcagggtcgctgatgtggatccaaacagccacacataggagtctcttcagtggggggtgctggggggtgtcactgggaatgtggactgcaggtgagcacaccccactaacctcatttaacctatttagtgtcttatgcaatttaagaaaaaccaaaaaccaaacaacaacagcaaaaaaaccccacaccaacccacagtctttgaaagggttgggttccaccaggagactcaggcgtcttagtggaaagaatgatctgggctctggctgggatggcacaggcagctggggggcggtgcccgccgccgggaggcgtgggcctgactcagtggaaggaagtggtgtgtttccattgcagagctcaaaaacaaggtggtttgaggaacgcttgtgtgtcaccggcatttccctgttgtgtttatgaagtgaggtgggaatcaagctctggggttactctaattgtgtcttttacaagaaaccaagaagcccccatggaacacaggcaggggctgaggcggccgggaggggctggggaaacccaggcgcaagcgcgctgggctgggaggacggggccggccacctcacccggctctccagcaccccattttaaggatgggaccaccctctgccagcctgcctcttcccagcgcatgtcctgacctccccgaactgcttccttttctagacgctgtgtgggtgcaaacagcaggtgctcatggatggcacggatgacaaacagcaggtgctcatgggtggcaccgcatgtccaggccagggagaggctgcggggctgggagggcggggctcataagatggacgtgcacacagcagtcgggtgagcctccggtgcccctggaagcctgctgaccacgcagcgcgcagcattgcccctccctagctgaggccatgggggcgggggatgcgggcttttactggcgtggcaattctgtcttctgaggtcactcacagtttccccctggtgaggcgagcactgtgctgaggagcgttccaccatgcagtacaggagagcagtggtctgcatgatggatc

SEQ ID NO: 30504 - DNA, 2016 bp, Homo sapiens
cagagtggaggagcccccagtggggcagctagggaatctgggaggtggggggacagggggcggtcactctgtctccggcccatgatgggctgtttctgtgaagctctagagcccatgactccaggtcaccagtgtcacaggaagcttggggccagagtgggtctctgagagtcatgctgaaagctagatgtggtcttactgtgtccactcctctaggagaagacactgcaatttccaaatgaagcaatgctcatcctatgtgctggtgatgtgaaaatactggggtcactgtgggctttcaggaagtgcctaggtggggctggaggctgtggtgaacagaaggggcggggtggccgggcaggaggactgagggacaaagctaggagagggaactgggcagccagcctggtggggatctcagagctgccaccctgcccagcgtggcacagccatctctgccctgagctcggctgcttctcctgagtccagctgtgacctagcaggaagcccctsggcttgtctgctaggggtcctggctcagtgctgagtcacactttttatggaaatatcaggtgcctgtccctcacacttcttgttgcttcctcaggcccaggacctgcccacctacctgcatgcccgcctggtggacctgtccctcccccagcccaacctggctccctggaaggatgagaagcagtaggggagatgaggcaaaagctggggcagcccctgcaggggaagttgaggcagggatcatctattcacacgcaaaagggatgctgtacggggtgctggggtcccacatagagaagttctagctgcagtgctgggcagccctggagcagcagaactcagcagtgcaaggcggctgctcagagcggccacgataagaaggcgcaggtctgtcccctcccccggcgcctgctgctccctgcctctgcctccctgtccagcttctgctcatgcttcagggtcgctgatgtggatccaaacagccacacataggagtctcttcagtggggggtgctggggggtgtcactgggaatgtggactgcaggtgagcacaccccactaacctcatttaacctatttagtgtcttatgcaatttaagaaaaaccaaaaaccaaacaacaacagcaaaaaaaccccacaccaacccacagtctttgaaagggttgggttccaccaggagactcaggcgtcttagtggaaagaatgatctgggctctggctgggatggcacaggcagctggggggcggtgcccgccgccgggaggcgtgggcctgactcagtggaaggaagtggtgtgtttccattgcagagctcaaaaacaaggtggtttgaggaacgcttgtgtgtcaccggcatttccctgttgtgtttatgaagtgaggtgggaatcaagctctggggttactctaattgtgtcttttacaagaaaccaagaagcccccatggaacacaggcaggggctgaggcggccgggaggggctggggaaacccaggcgcaagcgcgctgggctgggaggacggggccggccacctcacccggctctccagcaccccattttaaggatgggaccaccctctgccagcctgcctcttcccagcgcatgtcctgacctccccgaactgcttccttttctagacgctgtgtgggtgcaaacagcaggtgctcatggatggcacggatgacaaacagcaggtgctcatgggtggcaccgcatgtccaggccagggagaggctgcggggctgggagggcggggctcataagatggacgtgcacacagcagtcgggtgagcctccggtgcccctggaagcctgctgaccacgcagcgcgcagcattgcccctccctagctgaggccatgggggcgggggatgcgggcttttactggcgtggcaattctgtcttctgaggtcactcacagtttccccctggtgaggcgagcactgtgctgaggagcgttccaccatgcagtacaggagagcagtggtctgcatgatggatc

SEQ ID NO: 30505 - DNA, 2016 bp, Homo sapiens
cagagtggaggagcccccagtggggcagctagggaatctgggaggtggggggacagggggcggtcactctgtctccggcccatgatgggctgtttctgtgaagctctagagcccatgactccaggtcaccagtgtcacaggaagcttggggccagagtgggtctctgagagtcatgctgaaagctagatgtggtcttactgtgtccactcctctaggagaagacactgcaatttccaaatgaagcaatgctcatcctatgtgctggtgatgtgaaaatactggggtcactgtgggctttcaggaagtgcctaggtggggctggaggctgtggtgaacagaaggggcggggtggccgggcaggaggactgagggacaaagctaggagagggaactgggcagccagcctggtggggatctcagagctgccaccctgcccagcgtggcacagccatctctgccctgagctcggctgcttctcctgagtccagctgtgacctagcaggaagcccctcggcttgtctgctaggggtcctggctcagtgctgagtcacactttttatggaaatatcaggtgcctgtccctcacacttcttgttgcttcctcaggcccaggacctgcccacctacctgcatgcccgcctggtggacctgtccctcccccagcccaacctggctccctggaaggatgagaagcagtaggggagatgaggcamaagctggggcagcccctgcaggggaagttgaggcagggatcatctattcacacgcaaaagggatgctgtacggggtgctggggtcccacatagagaagttctagctgcagtgctgggcagccctggagcagcagaactcagcagtgcaaggcggctgctcagagcggccacgataagaaggcgcaggtctgtcccctcccccggcgcctgctgctccctgcctctgcctccctgtccagcttctgctcatgcttcagggtcgctgatgtggatccaaacagccacacataggagtctcttcagtggggggtgctggggggtgtcactgggaatgtggactgcaggtgagcacaccccactaacctcatttaacctatttagtgtcttatgcaatttaagaaaaaccaaaaaccaaacaacaacagcaaaaaaaccccacaccaacccacagtctttgaaagggttgggttccaccaggagactcaggcgtcttagtggaaagaatgatctgggctctggctgggatggcacaggcagctggggggcggtgcccgccgccgggaggcgtgggcctgactcagtggaaggaagtggtgtgtttccattgcagagctcaaaaacaaggtggtttgaggaacgcttgtgtgtcaccggcatttccctgttgtgtttatgaagtgaggtgggaatcaagctctggggttactctaattgtgtcttttacaagaaaccaagaagcccccatggaacacaggcaggggctgaggcggccgggaggggctggggaaacccaggcgcaagcgcgctgggctgggaggacggggccggccacctcacccggctctccagcaccccattttaaggatgggaccaccctctgccagcctgcctcttcccagcgcatgtcctgacctccccgaactgcttccttttctagacgctgtgtgggtgcaaacagcaggtgctcatggatggcacggatgacaaacagcaggtgctcatgggtggcaccgcatgtccaggccagggagaggctgcggggctgggagggcggggctcataagatggacgtgcacacagcagtcgggtgagcctccggtgcccctggaagcctgctgaccacgcagcgcgcagcattgcccctccctagctgaggccatgggggcgggggatgcgggcttttactggcgtggcaattctgtcttctgaggtcactcacagtttccccctggtgaggcgagcactgtgctgaggagcgttccaccatgcagtacaggagagcagtggtctgcatgatggatc

SEQ ID NO: 30506 - DNA, 2016 bp, Homo sapiens
cagagtggaggagcccccagtggggcagctagggaatctgggaggtggggggacagggggcggtcactctgtctccggcccatgatgggctgtttctgtgaagctctagagcccatgactccaggtcaccagtgtcacaggaagcttggggccagagtgggtctctgagagtcatgctgaaagctagatgtggtcttactgtgtccactcctctaggagaagacactgcaatttccaaatgaagcaatgctcatcctatgtgctggtgatgtgaaaatactggggtcactgtgggctttcaggaagtgcctaggtggggctggaggctgtggtgaacagaaggggcggggtggccgggcaggaggactgagggacaaagctaggagagggaactgggcagccagcctggtggggatctcagagctgccaccctgcccagcgtggcacagccatctctgccctgagctcggctgcttctcctgagtccagctgtgacctagcaggaagcccctcggcttgtctgctaggggtcctggctcagtgctgagtcacactttttatggaaatatcaggtgcctgtccctcacacttcttgttgcttcctcaggcccaggacctgcccacctacctgcatgcccgcctggtggacctgtccctcccccagcccaacctggctccctggaaggatgagaagcagtaggggagatgaggcaaaagctggggcagcccctgcaggggaagttgaggcagggatcatctattcacacgcaaaagggatgctgtacggggtgctggggtcccacatagagaagttctagctgcagtgctgggcagccctggagcagcagaactcagcagtgcaaggcggctgctcagagcggccacgataagaaggcgcaggtctgtcccctcccccggcgcctgctgctccctgcctctgcctccctgtccagcttctgctcatgcttcagggtcgctgatgtggatccaaacagccacacataggagtctcttcagtggggggtgctggggggtgtcactgggaatgtggactgcaggtgagcacaccccactaacctcatttaacctatttagtgtcttatgcaatttaagaaaaaccaaaaaccaaacaacaacagcaaaaaaaccccacaccaacccacagtctttgaaagggttgggttccaccaggagactcaggcgtcttagtggaaagaatgatctgggctctggctgggatggcacaggcagctggggggcggtgcccgccgccgggaggcgtgggcctgactcagtggaaggaagtggtgtgtttccattgcagagctcaaaaacaaggtggtttgaggaacgcttgtgtgtcaccggcatttccctgttgtgtttatgaagtgaggtgggaatcaagctctggggttactctaattgtgtcttttacaagaaaccaagaagcccccatggaacacaggcaggggctgaggcggccgggaggggctggggaaacccaggcgcaagcgcgctgggctgggaggacggggccggccacctcacccggctctccagcaccccattttaaggatgggaccaccctctgccagcctgcctcttcccagcgcatgtcctgacctccccgaactgcttccttttctagacgctgtgtgggtgcaaacagcaggtgctcatggatggcacggatgacaaacagcaggtgctcatgggtggcaccgcatgtccaggccagggagaggctgcggggctgggagggcggggctcataagatggacgtgcacacagcagtcgggtgagcctccggtgcccctggaagcctgctgaccacgcagcgcgcagcattgcccctccctagctgaggccatgggsgcgggggatgcgggcttttactggcgtggcaattctgtcttctgaggtcactcacagtttccccctggtgaggcgagcactgtgctgaggagcgttccaccatgcagtacaggagagcagtggtctgcatgatggatc

SEQ ID NO: 30507 - DNA, 2016 bp, Homo sapiens
cagagtggaggagcccccagtggggcagctagggaatctgggaggtggggggacagggggcggtcactctgtctccggcccatgatgggctgtttctgtgaagctctagagcccatgactccaggtcaccagtgtcacaggaagcttggggccagagtgggtctctgagagtcatgctgaaagctagatgtggtcttactgtgtccactcctctaggagaagacactgcaatttccaaatgaagcaatgctcatcctatgtgctggtgatgtgaaaatactggggtcactgtgggctttcaggaagtgcctaggtggggctggaggctgtggtgaacagaaggggcggggtggccgggcaggaggactgagggacaaagctaggagagggaactgggcagccagcctggtggggatctcagagctgccaccctgcccagcgtggcacagccatctctgccctgagctcggctgcttctcctgagtccagctgtgacctagcaggaagcccctcggcttgtctgctaggggtcctggctcagtgctgagtcacactttttatggaaatatcaggtgcctgtccctcacacttcttgttgcttcctcaggcccaggacctgcccacctacctgcatgcccgcctggtggacctgtccctcccccagcccaacctggctccctggaaggatgagaagcagtaggggagatgaggcaaaagctggggcagcccctgcaggggaagttgaggcagggatcatctattcacacgcaaaagggatgctgtacggggtgctggggtcccacatagagaagttctagctgcagtgctgggcagccctggagcagcagaactcagcagtgcaaggcggctgctcagagcggccacgataagaaggcgcaggtctgtcccctcccccggcgcctgctgctccctgcctctgcctccctgtccagcttctgctcatgcttcagggtcgctgatgtggatccaaacagccacacataggagtctcttcagtggggggtgctggggggtgtcactgggaatgtggactgcaggtgagcacaccccactaacctcatttaacctatttagtgtcttatgcaatttaagaaaaaccaaaaaccaaacaacaacagcaaaaaaaccccacaccaacccacagtctttgaaagggttgggttccaccaggagactcaggcgtcttagtggaaagaatgatctgggctctggctgggatggcacaggcagctggggggcggtgcccgccgccgggaggcgtgggcctgactcagtggaaggaagtggtgtgtttccattgcagagctcaaaaacaaggtggtttgaggaacgcttgtgtgtcaccggcatttccctgttgtgtttatgaagtgaggtgggaatcaagctctggggttactctaattgtgtcttttacaagaaaccaagaagcccccatggaacacaggcaggggctgaggcggccgggaggggctggggaaacccaggcgcaagcgcgctgggctgggaggacggggccggccacctcacccggctctccagcaccccattttaaggatgggaccaccctctgccagcctgcctcttcccagcgcatgtcctgacctccccgaactgcttccttttctagacgctgtgtgggtgcaaacagcaggtgctcatggatggcacggatgacaaacagcaggtgctcatgggtggcaccgcatgtccaggccagggagaggctgcggggctgggagggcggggctcataagatggacgtgcacacagcagtcgggtgagcctccggtgcccctggaagcctgctgaccacgcagcgcgcagcattgcccctccctagctgaggccatggggkcgggggatgcgggcttttactggcgtggcaattctgtcttctgaggtcactcacagtttccccctggtgaggcgagcactgtgctgaggagcgttccaccatgcagtacaggagagcagtggtctgcatgatggatc

SEQ ID NO: 30508 - DNA, 2016 bp, Homo sapiens
cagagtggaggagcccccagtggggcagctagggaatctgggaggtggggggacagggggcggtcactctgtctccggcccatgatgggctgtttctgtgaagctctagagcccatgactccaggtcaccagtgtcacaggaagcttggggccagagtgggtctctgagagtcatgctgaaagctagatgtggtcttactgtgtccactcctctaggagaagacactgcaatttccaaatgaagcaatgctcatcctatgtgctggtgatgtgaaaatactggggtcactgtgggctttcaggaagtgcctaggtggggctggaggctgtggtgaacagaaggggcggggtggccgggcaggaggactgagggacaaagctaggagagggaactgggcagccagcctggtggggatctcagagctgccaccctgcccagcgtggcacagccatctctgccctgagctcggctgcttctcctgagtccagctgtgacctagcaggaagcccctcggcttgtctgctaggggtcctggctcagtgctgagtcacactttttatggaaatatcaggtgcctgtccctcacacttcttgttgcttcctcaggcccaggacctgcccacctacctgcatgcccgcctggtggacctgtccctcccccagcccaacctggctccctggaaggatgagaagcagtaggggagatgaggcaaaagctggggcagcccctgcaggggaagttgaggcagggatcatctattcacacgcaaaagggatgctgtacggggtgctggggtcccacatagagaagttctagctgcagtgctgggcagccctggagcagcagaactcagcagtgcaaggcggctgctcagagcggccacgataagaaggcgcaggtctgtcccctcccccggcgcctgctgctccctgcctctgcctccctgtccagcttctgctcatgcttcagggtcgctgatgtggatccaaacagccacacataggagtctcttcagtggggggtgctggggggtgtcactgggaatgtggactgcaggtgagcacaccccactaacctcatttaacctatttagtgtcttatgcaatttaagaaaaaccaaaaaccaaacaacaacagcaaaaaaaccccacaccaacccacagtctttgaaagggttgggttccaccaggagactcaggcgtcttagtggaaagaatgatctgggctctggctgggatggcacaggcagctggggggcggtgcccgccgccgggaggcgtgggcctgactcagtggaaggaagtggtgtgtttccattgcagagctcaaaaacaaggtggtttgaggaacgcttgtgtgtcaccggcatttccctgttgtgtttatgaagtgaggtgggaatcaagctctggggttactctaattgtgtcttttacaagaaaccaagaagcccccatggaacacaggcaggggctgaggcggccgggaggggctggggaaacccaggcgcaagcgcgctgggctgggaggacggggccggccacctcacccggctctccagcaccccattttaaggatgggaccaccctctgccagcctgcctcttcccagcgcatgtcctgacctccccgaactgcttccttttctagacgctgtgtgggtgcaaacagcaggtgctcatggatggcacggatgacaaacagcaggtgctcatgggtggcaccgcatgtccaggccagggagaggctgcggggctgggagggcggggctcataagatggacgtgcacacagcagtcgggtgagcctccggtgcccctggaagcctgctgaccacgcagcgcgcagcattgcccctccctagctgaggccatgggggsgggggatgcgggcttttactggcgtggcaattctgtcttctgaggtcactcacagtttccccctggtgaggcgagcactgtgctgaggagcgttccaccatgcagtacaggagagcagtggtctgcatgatggatc

SEQ ID NO: 30509 - DNA, 1414 bp, Homo sapiens
tatttttaaaagaacttttttttatagaaaataggcatttttgaccaagatgaarcacagcctaaaaataaaaataaaataaaataagaaaataggtatttgttcaggttataaagtgtgtatgtaaagaaaattgaatttgctcatttgagctgtaaattaactttccagccttatgcttatttatgttccgctatacatgtagatattgttaatctgcctacagaaaagaaaaccttttacctttagctgatagaatcacctatgacacaggtaatccacatgcaatgtgaagttccatctcttagcggctaaacagtaatccagaacaagatctcaaaaacttggtgactctcatattgccttcagatatcatttatcctaaatttatactacaaatcatgtgtcccttcttcacctaacagcagcaaaaatgcattaagcatttactatttgccgagcagtaagaggttcccaggcattatgtcatttgtttctcattgtttcttctggcacttaaaaaggaatccattgagaaatccattccttttcaaaagatacatgttcaagccttagtcttgattccctgctttcttctgaattttgccttatcttttttttccttctcatatgaaagtatctaggtcaaaactatgtgctttattgataagagcttcttgccatctttttacacatttttcaaaacagacaagtgcataggcaggcttgagaggcagagggtattggggaaaaagtactcaggaacttgaaggtggtactagcatgaaagcatccattctatgctctaatgcgatcacttatctgagctatgcggagctggagctagtcaaaatgccccacagtgtgatccagccttggcttactgtagcatttctttctccttgtaacattttaacacattagatatagtgtaagaagaggtcatcagccaggcaacaacatcctttccccaaggatccagtgcacaggcctgcttctctcgaagtgccaatctcattcacgtgctcatgacagcgccgtgcattcactgttcctgtctgtgctgtaggcagttaacagtcgcattcttgcttcttagaggtgtgaggaagaaagatttcaccttacacatattccaattttcagccttttatttattgcgatgatttttaaaatatcggtccatgacttgtgagaaaacttctttacagtcttgattttgagtgaagaaaaggaaacatgaactacaaagcaaggcggtaaaccaaaatgaaatatcttgaaatcgaaataaacctccaaaatgtaagcaaacagaacatgatagagttaaacacgtgatccagagcaaaagcgttaatcacaaaactcagcttcaatgaaccaaactcaaattatccagaaccactgtgat

SEQ ID NO: 30510 - DNA, 1414 bp, Homo sapiens
tatttttaaaagaacttttttttatagaaaataggcatttttgaccaagatgaagcacagcctaaaaataaaaataaaataaaataagaaaataggtatttgttcaggttataaagtgtgtatgtaaagaaaattgaatttgctcatttgagctgtaaattaactttccagccttatgcttatttatgttccgctatacatgtagatattgttaatctgcctacagaaaagaaaaccttttacctttagctgatagaatcacctatgacacaggtaatccacatgcaatgtgaagttccatctcttagcgrctaaacagtaatccagaacaagatctcaaaaacttggtgactctcatattgccttcagatatcatttatcctaaatttatactacaaatcatgtgtcccttcttcacctaacagcagcaaaaatgcattaagcatttactatttgccgagcagtaagaggttcccaggcattatgtcatttgtttctcattgtttcttctggcacttaaaaaggaatccattgagaaatccattccttttcaaaagatacatgttcaagccttagtcttgattccctgctttcttctgaattttgccttatcttttttttccttctcatatgaaagtatctaggtcaaaactatgtgctttattgataagagcttcttgccatctttttacacatttttcaaaacagacaagtgcataggcaggcttgagaggcagagggtattggggaaaaagtactcaggaacttgaaggtggtactagcatgaaagcatccattctatgctctaatgcgatcacttatctgagctatgcggagctggagctagtcaaaatgccccacagtgtgatccagccttggcttactgtagcatttctttctccttgtaacattttaacacattagatatagtgtaagaagaggtcatcagccaggcaacaacatcctttccccaaggatccagtgcacaggcctgcttctctcgaagtgccaatctcattcacgtgctcatgacagcgccgtgcattcactgttcctgtctgtgctgtaggcagttaacagtcgcattcttgcttcttagaggtgtgaggaagaaagatttcaccttacacatattccaattttcagccttttatttattgcgatgatttttaaaatatcggtccatgacttgtgagaaaacttctttacagtcttgattttgagtgaagaaaaggaaacatgaactacaaagcaaggcggtaaaccaaaatgaaatatcttgaaatcgaaataaacctccaaaatgtaagcaaacagaacatgatagagttaaacacgtgatccagagcaaaagcgttaatcacaaaactcagcttcaatgaaccaaactcaaattatccagaaccactgtgat

SEQ ID NO: 30511 - DNA, 518 bp, Homo sapiens
tccacatattccttcaaatttctgttttctrtattaccagctaccatccacagagagtcataaatcccctggaggagtcgtatgtgatcccacgtgattaactttgcatctgttttgcagctgttcactctgcagttttattttgccttttggaaacctcagagcagtgcttctcaaatgttaacgtgcatacgatgaatcacgtgggcatcttgttaaaatgcagagttttgagtcgagggtctggggagggctgagattgtgcacttctaaggagatgccaggtggtgctaattctgctgcactggacaccacacttagagtggcgaggtcactaaataataggagcaaaaggatcgtgagaacaccgacatcagtgagaaggaggctggctgcagagaccatggtaggaggagttttccttggtgattctgctcttctctccgcgccctttcactttccctttccttgtaaatatcctttactgtggtctttctttgattaaagagaaactgtgt

SEQ ID NO: 30512 - DNA, 518 bp, Homo sapiens
tccacatattccttcaaatttctgttttctgtattaccagctaccatccacagagagtcataaatcccctggaggagtcgtatgtgatcccacgtgattaactttgcatctgttttgcagctgttcactctgcagttttattttgccttttggaaacctcagagcagtgcttctcaaatgttaacgtgcatacgatgaatcacgtgggcatcttgttaaaatgcagagttttgagtcgagggtctggggagggctgagattgtgcacttctaaggagatgccaggtggtgctaattctgctgcactggacaccacacttagagtggcgaggtcactaaataataggagcraaaggatcgtgagaacaccgacatcagtgagaaggaggctggctgcagagaccatggtaggaggagttttccttggtgattctgctcttctctccgcgccctttcactttccctttccttgtaaatatcctttactgtggtctttctttgattaaagagaaactgtgt

SEQ ID NO: 30513 - DNA, 544 bp, Homo sapiens
cggagaaagaggcaggggcagaaaaatgacagagacagggacagaaaaatgacagagagacacaggcagacggataccctcattggcaaggctggcaatttatgaacaagatcacttcttaaatgttgggataaagctgtctcccaggtagggggacaggcagggggaaaggatgtagggctctttgggccctaaatacttttaccttatggggcaggaaaacaaagcttaaccagcacgaggcaccaatgagaaatacttgctgagggctggaggaagatggccatctgcctcctggaccagatygtcattgacattccatgaccttatgtcttagttgaattgagattgttttctttggggggttttccttccctttaaatctatctgataaaacagatcttacagggaaagcccagcttctggttgataatttgtagagagggagagactacatcctgatggtcaagtccaggaaggctttctgacctaagcaatctcatttctggactgtctcttaacgtggtttttggggaaaaaaata

SEQ ID NO: 30514 - DNA, 521 bp, Homo sapiens
atgtgtgtaaagtgtccagcacagagtctggccagtgcagattttcatatgatataattatcatagtaattcttttggaaaagattgagctgggggaccaaagttatgaataaactaataaaatgtcttcatgttgttttactaaatgatactaaaaataatagattgcacatacttaggaaaaaatctattttatccatctaatttttatgtagtatatcctatacatttcatctcatacaccaatctttgctacttagaagcactttgggatttccttcctttattgtttcagtgaaatgaccgtgactttgttggcttggttgcaagtgacacataagctgaaagaattttttctgggtctggtccttcaacttaatgttcaattactttgatgttttcacttggagctgttggctstcaccttctgaatgccatcatattcccagagatgaatggttactttgctgatcgagatggaaaaatgctttgggtgacccttattttacctaagttacatc

SEQ ID NO: 30515 - DNA, 659 bp, Homo sapiens
gttaacattataggatgaattaaataaggaatttgactttgtattaatttggtgaaatacaagtgattttgaaaataatgtatttctctctagtaacacttgctattatttttttgtggccamatactattaatatttatagtgataataagaatttattcatatggtatcattaagcacaattaattaattaatttaaaatgagagcaaaactgagcatttcttggctctgaatttttgtctcatgaatatgtttccttgtgaatgtgcagatcgccttggctgtaaagaggactatgcttgtcctcaatgtgaatcgagttttaccagtgaggatattcttgctgagcatctccagacattgcaccagaaacccacagaggagaaagaatttaagtgcaagaactgtgggaagaaattcccagttaagcaggctttgcaaagacagtgcgtatattaaagaaatatctttaaaattataagctaacacagtttattccattcagcttaactcatagtttttaacctgtgtgtgtgtgtgtgcacgcgcgcacgcgcatgttttgtgtgtgaatgagagattaagcattttacattggtattgtcattaactcatcttttcttagtatagtatgttgattattaaaatattcaaatta

SEQ ID NO: 30516 - DNA, 1374 bp, Homo sapiens
ggtttaaatctctgttctgctatttgctaggtaaccttagggaagttgcttaatctctccaaactttagcttctttatctgtaaaatgggttcaaaagagtctctaccttgtaaagctgtgtgaaacttaaataagatgagatatgcaaagtcttagcataccacctggaccatagraagaattttaaaatatcagctagtagtaatagagtaagttgattaatcagattatgtattctaactcactgcttcttaaacttcaatgtgcccgtgattaaattgggggtttccttaaaatgcagattctgatgcaggaggtctggtgtagagccccaattttgcatttccaataagctcctgagtaatgcttctgctgcaggtccaacagccccaccctttgagtaccaaggctctaggtcaattaggagcaggaccttgagagtcaggggcttaaaggggagtggaggtgtattattttggagtcaggggtcctacctgaggtgggatgaaactgtgaatttgggagggggttctgcggtggaccaaaaggcaagtaataagagggcagaagggtgccctgtagaccagtgtcctcagcttttcagattgtggcagaggggcaagaggaaaggaaagaaggattgggacttccttcctgggacctaccctctcacctgcagaggggtgagtcttacaacacatgagcatgtatctagctgccaactgctgcatccatctgtcctcagggaggaatgctggggctacagaatggccaagaggctgggaacaactggtccagaaagcaagtagccctaggttcctgttcactggggagtaatggcccatctctctgccctccatcccagctaggggtatgcaggaggtgtagggaggccctgaatggctgagctcctgaggtctgggtctagtctgactccccgtctgctccccgcaggcagcacatataccccacccagtgaagggcccgcaatttctttctgactttaatagtggccttccagccctggcaccccacctggtcattttgctcaggcctcgcttgatgaagcctaataggggcttcatcctaggcccaccatgtcccaaggtttttggggagggagtgtgaactgcaacagatttctaagggaagcatgtctgtcaataaattttagattctaggaactgcctatgaatggagtgttgtcaaatagcccccaccacaaccaatgtgatgaccaaaaagctcctctggctggctttgggtttttagcatatgcacatggttttttaaaaagtcagggagcacagaagaaattataaaagaaggccccagatatcaccctccctccccaccaactcccagtggggcca

SEQ ID NO: 30517 - DNA, 1374 bp, Homo sapiens
ggtttaaatctctgttctgctatttgctaggtaaccttagggaagttgcttaatctctccaaactttagcttctttatctgtaaaatgggttcaaaagagtctctaccttgtaaagctgtgtgaaacttaaataagatgagatatgcaaagtcttagcataccacctggaccatagaaagaattttaaaatatcagctagtagtaatagagtaagttgattaatcagattatgtattctaactcactgcttcttaaacttcaatgtgcccgtgawtaaattgggggtttccttaaaatgcagattctgatgcaggaggtctggtgtagagccccaattttgcatttccaataagctcctgagtaatgcttctgctgcaggtccaacagccccaccctttgagtaccaaggctctaggtcaattaggagcaggaccttgagagtcaggggcttaaaggggagtggaggtgtattattttggagtcaggggtcctacctgaggtgggatgaaactgtgaatttgggagggggttctgcggtggaccaaaaggcaagtaataagagggcagaagggtgccctgtagaccagtgtcctcagcttttcagattgtggcagaggggcaagaggaaaggaaagaaggattgggacttccttcctgggacctaccctctcacctgcagaggggtgagtcttacaacacatgagcatgtatctagctgccaactgctgcatccatctgtcctcagggaggaatgctggggctacagaatggccaagaggctgggaacaactggtccagaaagcaagtagccctaggttcctgttcactggggagtaatggcccatctctctgccctccatcccagctaggggtatgcaggaggtgtagggaggccctgaatggctgagctcctgaggtctgggtctagtctgactccccgtctgctccccgcaggcagcacatataccccacccagtgaagggcccgcaatttctttctgactttaatagtggccttccagccctggcaccccacctggtcattttgctcaggcctcgcttgatgaagcctaataggggcttcatcctaggcccaccatgtcccaaggtttttggggagggagtgtgaactgcaacagatttctaagggaagcatgtctgtcaataaattttagattctaggaactgcctatgaatggagtgttgtcaaatagcccccaccacaaccaatgtgatgaccaaaaagctcctctggctggctttgggtttttagcatatgcacatggttttttaaaaagtcagggagcacagaagaaattataaaagaaggccccagatatcaccctccctccccaccaactcccagtggggcca

SEQ ID NO: 30518 - DNA, 1374 bp, Homo sapiens
ggtttaaatctctgttctgctatttgctaggtaaccttagggaagttgcttaatctctccaaactttagcttctttatctgtaaaatgggttcaaaagagtctctaccttgtaaagctgtgtgaaacttaaataagatgagatatgcaaagtcttagcataccacctggaccatagaaagaattttaaaatatcagctagtagtaatagagtaagttgattaatcagattatgtattctaactcactgcttcttaaacttcaatgtgcccgtgattaaattgggggtttccttaaaatgcagattctgatgcaggaggtctggtgtagagccccaattttgcatttccaataagctcctgagtaatgcttctgctgcaggtccaacagccccaccctttgagtaccaaggctctaggtcaattaggagcaggaccttgagagtcaggggcttaaaggggagtggaggtgtattattttggagtcaggggtcctacctgaggtgggatgaaactgtgaatttgggagggggttctgcggtggaccaaaaggcaagtaataagagggcagaagggtgccctgtagaccagtgtcctcagcttttcagattgtggcagaggggcaagaggaaaggaaagaaggattgggacttccttcctgggacctaccctctcacctgcagaggggtgagtcttacaacacatgagcatgtatctagctgccaactgctgcatccatctgtcctcagggaggaatgctggggctacagaatggccaagaggctgggaacaactggtccagaaagcaagtagccctaggttcctgttcactggggagtaatggcccatctctctgccctccatcccagctaggggtatgcaggaggtgtagggaggccctgaatggctgagctcctgaggtctgggtctagtctgactccccgtctgctccccgcaggcagcacatataccccacccagtgaagggcccgcaatttctttctgactttaatagtggccttccagccctggcaccccacctggtcattttgctcaggcctcgcttgatgaagcctaataggggcttcatcctaggcccaccatgtcccaaggtttttggggagggagtgtgaactgcaacagatttctaagggaagcatgtctgtcaataaattttagattctaggaactgcctatgaatggagtgttgtcaaatagcccccaccacaaccaatgtgatgaccaaaaagctcctctggctggctttgggtttttagcatatgcacrtggttttttaaaaagtcagggagcacagaagaaattataaaagaaggccccagatatcaccctccctccccaccaactcccagtggggcca

SEQ ID NO: 30519 - DNA, 539 bp, Homo sapiens
cctttcagaaccttgctgaatctctcagtatgtttctactcaagcattttcctgtgcagactaaagacactatcaggaaattaaatgaaacatgtataacttattggtcatattcataatcccatcagtaaatatttaacacaggctatttaccatatatatatctgaaaataaggtgagttttttttctccccaaaattatccctctgcaaacaaaatggcctgatgtttgaaaccttcagcagctctcacattttgcagtgccctcccatttaccttatttggatcaatctttgttgtrtttttactgtttggggaagcttatctgtaaaggctgcacatctgtactggttttggctgcttagagaggttgcctcacagaatcagcattatttaaaagagaaagaggaaatacagactcagtaactctggttttacgagttacaaattcacttgcaaattttataaacaagtcttttaagatcacaaatttgtacatctaaaacaaatttgtaaataaaagtgctagagttcatgtg

SEQ ID NO: 30520 - DNA, 539 bp, Homo sapiens
cctttcagaaccttgctgaatctctcagtatgtttctactcaagcattttcctgtgcagactaaagacactatcaggaaattaaatgaaacatgtataacttattggtcatattcataatcccatcagtaaatatttaacacaggctatttaccatatatatatctgaaaataaggtgagttttttttctccccaaaattatccctctgcaaacaaaatggcctgatgtttgaaaccttcagcagctctcacattttgcagtgccctcccatttaccttatttggatcaatctttgttgtgtttttactgtttggggaagcttatctgtaaaggctgcacatctgtactggttttggctgcttagagaggttgcctcacagaatcagcattatttaaaagagaaagaggaaatacrgactcagtaactctggttttacgagttacaaattcacttgcaaattttataaacaagtcttttaagatcacaaatttgtacatctaaaacaaatttgtaaataaaagtgctagagttcatgtg

SEQ ID NO: 30521 - DNA, 534 bp, Homo sapiens
acactgggaagaactttgccagtagctccttagattaacacccaaaatggaatttctggaaatgtcttaaacattctatgctcattctgtagtcattttgcttggagtatatgtagaatatgtgtaagattagaggacttttataagtaaagttatgagatcttgcactaaatcattcaaaaacatggaatctcaaagataaatcacaaaagtgtgcgttaaaatgtttataagtagttgtattattcattttttaaaagtctcatgtttttggacagtaaaatgtgttttttgttagataatgatcatttcaagttttaaattgtttttaagtaagaaggctgggattggttcacatctggcaaagttgcatgtgatggtgataygcagtgaaactcactgccctctttttggaaattcttaaattcttaaattgcacgttaggaagaaataatgacttgtgtggagaaaccatactagaaaattcagccacactcaaaggaagatttatgtgtgtttaatggcctcgtttcc

SEQ ID NO: 30522 - DNA, 558 bp, Homo sapiens
cccccctcaattcgcacctgtacacaaggctaactggcccaaccaccaccatccctctatttacaacacatccccaaatccctgctctctgccttcagccctgtgaaattctggccccctggggtcctgctacagccccttctaccccagcatatggtctctgactcagtcacacatttccaggaaacatggggaggactctagccagattctagctcagctattccccagttttgtagtttcctacatccgaacctcagtttactcttctgtgaaatgggagaatgtctttgtgactaggttgctgtgaagattaaacagccttttccagaaggtctctggctrtgatgcctgaaaaatcccagcagcaccaaggaggttcacagctctaagatggtcaggaaggctatttgctagaggccaggatagttctcaaccctacaggggatggaaaacccagacagtccctctccctcaacactgggaactctgccccatccctcttacatgggtggggtaagaccacatccttttaaataattaaatacaacataggat

SEQ ID NO: 30523 - DNA, 1036 bp, Homo sapiens
agtttcagctttctacatatggctagccaattttcccagcaccatttattaaatagggaatcctttccccgtgtgtttaaaagaatgtgatgcctcctccccacccacttgctccctcttgctatgtgatacaccagctctccctttgccttctaccatgattgggaagctttgtgaggctttcaacagaagcagatgtcagcaccatgttccctgtacagcctgtagaaacataagtcaaactaaacctcttttctttataaatttcccagcctcaggtattcctttgtagtaatgcaaaatggactaacatactgggggagycacattatcttcttccaaaagctgtttcaagacctctcctcaatcacctcttttatcagagccctggtccagggtgtgcactgcccaccactttgccctacatggaattcatggacagagcctcttctcattccttcccagggacagctaacacaagactatcatatatgaaataattttactaagggtttagagacaatagagaggaattccagcagagaggagaaaacaacactgtgtctgaagcctgcaagccatcttcatagggaatcccctctcggtcagctgtcttcttggtcctggcctgtcactgtattgctatgattcattcctcagaattgaattccttctcctttttttctttacttcctcaggattccatactcctggcttttcctgtattcttcctcagttgttgaggaaaagcagaatattccttagtttttctttttaatcccaaatttctgattcagaaaggtactctcctactttattaagcagggtaatacatctctttattgactatgttttataacaaaagtcttttttaatgaaaaatcagttgtctctgtactcctgataaattctacagccccatcaaatagtttttaaaatataatattttttcacctactcagataattgcctctcagtgtaacaaatactatggtggaggtaagtgcaaagtgaaagctgttagagctggaatata

SEQ ID NO: 30524 - DNA, 605 bp, Homo sapiens
ttacactgaactgaaagtgtaaagaaggagtggaggattaaaaggagaagcatggagaggatgaaagttagaaatggaagtgacaagcacacctgagtgaaggatgagagctccagctgccttttccagttgtattcccatgtagctgagccaaaggctgatctcaagtttattgttacatgcccatttaaggcttctggccattaacacttttgattttttttggcttgttattttattagctattttcataacactttcatagctaaacctattttactcaggttgtatgccttttcaaaaatacaatagatggtccatattccattatctacaaataagccgaagctcatatctaacatttattaagagagatggattatttttgttcattagttatctttgtaaataatttttacatactttaattgactcataaagatgtttctttctgtaattttaatatttgttgaacttcaaaatccctatcacmaggttattgtttaaaagcattggtttttatattatcttaaaagccattatacctgaatgctgaacaacttaaaaacattcagtaattgttttgcatgctatttagtgaattc

SEQ ID NO: 30525 - DNA, 559 bp, Homo sapiens
ggttaactgcagcataacatatcctgttgcaacaataaaaaagaatgcacatttttaggacttgtaatatgtattgcctcaaattgccttccagaaagacagacccaattatactcccacccacagtgtgtgagtgtgtactgcttcctctttaacactggagttaccctggggacagagagctaaaaaaaatatttttttggttaaaatgtaaccctttaaggtgttcagcagtatcattgatttytaagaggtttatttcataaacattgtaaaacaaaattttaagttgcacgtatggctttttaaaaacgtttagacatttaaaaaaacaccttttagtcaagtttatctgttacttttttttttttttttaatggttgctacctatgccgtcatgcttatgcaggtctttccaaatcttttttttttttttttttttttttttttttgagacggggtccaccctggccccccaggctggagtgcagtggcgtgatctcagctcactgcaacctgcgcctcccgggttcaagcgattctcatgtgtcaacctccc

SEQ ID NO: 30526 - DNA, 559 bp, Homo sapiens
ggttaactgcagcataacatatcctgttgcaacaataaaaaagaatgcacatttttaggacttgtaatatgtattgcctcaaattgccttccagaaagacagacccaattatactcccacccacagtgtgtgagtgtgtactgcttcctctttaacactggagttaccctggggacagagagctaaaaaaaatatttttttggttaaaatgtaaccctttaaggtgttcagcagtatcattgatttttaagaggtttatttcataaacattgtaaaacaaaattttaagttgcacgtatggctttttaaaaacgtttagacatttaaaaaaacaccttttagtcaagtttatctgttacttttttttttttttttaatggttgctacctatgcygtcatgcttatgcaggtctttccaaatcttttttttttttttttttttttttttttttgagacggggtccaccctggccccccaggctggagtgcagtggcgtgatctcagctcactgcaacctgcgcctcccgggttcaagcgattctcatgtgtcaacctccc

SEQ ID NO: 30527 - DNA, 1034 bp, Homo sapiens
ggattggatgcaggcaggtgaacagggcagaaagggctagcaaggcacgctggggcctgactgggaaggacagcaaggccaggcgaaggggtctggagcatatctacagccattgggtcagagttgtccctgggaccagtctctggctgccctgtgtgcaggaggggccaggggtgccccttgtcaaggaggccctgctgggctggctgggttctagcwtgtcctggcatctgagggtcaggctggtgctcttctcatagcagccttgtgctgcagaagaaactggaggattcatctgcagaccccatgaggggtgagggggcctctgcagcctggaagggctgctggtgatcagctccacgttcccaggagaagacaactcctgagatggcccccggcctccactctgggcagctcttggccaacatccttttccccggaaatgggactggctgggggggggttacagctggggtagggccccccatactacaataatcaataagccattctttcttaaggagggagggtcagacaacagaagagccccagctgaacatgtgaagatttcaagggaccagggccagcctgacagcacctgtcctgggcatgtggggttgaagtgggattgctggaaagagacttagagatctccattttatggatgaggaaactgagagtcagagagaaagaagctgtctgtgaggacacagtgagttatggcagaacaaggacgtgaatcaggtgtgtaggcgtcctgcctcaagttctgctcattgtaccagaccatgcaggtggagggctgagttccagaagctgaggatggtgtttctgcccaggaaagaaggggaattcttgagaaaagtaagagtaaatttaagtgatgatgagggagggtgagagtggtcagaataaggactaaagaggacatggagaggggcgaggagctttgaaaaggggggttggggactaggaagtcagacttgattaaccccagcttttgccacaaatcaaccctgtcagcaccccctgca

SEQ ID NO: 30528 - DNA, 1034 bp, Homo sapiens
ggattggatgcaggcaggtgaacagggcagaaagggctagcaaggcacgctggggcctgactgggaaggacagcaaggccaggcgaaggggtctggagcatatctacagccattgggtcagagttgtccctgggaccagtctctggctgccctgtgtgcaggaggggccaggggtgccccttgtcaaggaggccctgctgggctggctgggttctagcttgtcctggcatctgagggtcaggctggtgctcttctcatagcagccttgtgctgcagaagaaactggaggattcatctgcagaccccatgaggggtgagggggcctctgcagcctggaagggctgctggtgatcagctccacrttcccaggagaagacaactcctgagatggcccccggcctccactctgggcagctcttggccaacatccttttccccggaaatgggactggctgggggggggttacagctggggtagggccccccatactacaataatcaataagccattctttcttaaggagggagggtcagacaacagaagagccccagctgaacatgtgaagatttcaagggaccagggccagcctgacagcacctgtcctgggcatgtggggttgaagtgggattgctggaaagagacttagagatctccattttatggatgaggaaactgagagtcagagagaaagaagctgtctgtgaggacacagtgagttatggcagaacaaggacgtgaatcaggtgtgtaggcgtcctgcctcaagttctgctcattgtaccagaccatgcaggtggagggctgagttccagaagctgaggatggtgtttctgcccaggaaagaaggggaattcttgagaaaagtaagagtaaatttaagtgatgatgagggagggtgagagtggtcagaataaggactaaagaggacatggagaggggcgaggagctttgaaaaggggggttggggactaggaagtcagacttgattaaccccagcttttgccacaaatcaaccctgtcagcaccccctgca

SEQ ID NO: 30529 - DNA, 1034 bp, Homo sapiens
ggattggatgcaggcaggtgaacagggcagaaagggctagcaaggcacgctggggcctgactgggaaggacagcaaggccaggcgaaggggtctggagcatatctacagccattgggtcagagttgtccctgggaccagtctctggctgccctgtgtgcaggaggggccaggggtgccccttgtcaaggaggccctgctgggctggctgggttctagcttgtcctggcatctgagggtcaggctggtgctcttctcatagcagccttgtgctgcagaagaaactggaggattcatctgcagaccccatgaggggtgagggggcctctgcagcctggaagggctgctggtgatcagctccacgttcccaggagaagacaactcctgagatggcccccggcctccactctgggcagctcttggccaacatccttttccccggaaatgggactggctgggggggggttacagctggggtagggccccccatactacaataatcaataagccattctttcttaaggagggagggtcagacaacagaagagccccagctgaacatgtgaagatttcaagggaccagggccagcctgacagcacctgtcctgggcatgtggggttgaagtgggattgctggaaagagacttagagatctccattttatggatgaggaaactgagastcagagagaaagaagctgtctgtgaggacacagtgagttatggcagaacaaggacgtgaatcaggtgtgtaggcgtcctgcctcaagttctgctcattgtaccagaccatgcaggtggagggctgagttccagaagctgaggatggtgtttctgcccaggaaagaaggggaattcttgagaaaagtaagagtaaatttaagtgatgatgagggagggtgagagtggtcagaataaggactaaagaggacatggagaggggcgaggagctttgaaaaggggggttggggactaggaagtcagacttgattaaccccagcttttgccacaaatcaaccctgtcagcaccccctgca

SEQ ID NO: 30530 - DNA, 745 bp, Homo sapiens
tcagctttctacatatggctagccagttttcccagcaccatttattaaatagcraatcctttccccattgcttgtttttgtcaggtttgtcaaagatcagatagttgtagatatgcggcattatttctgagggctctgttctgttccattggtctatatctctgttttggtaccagtaccatgctgttttggttactgtagtcttgtagtatagtttgaagtcaggtagcgcgatgcctccagctttgttcttttggcttaggattgacttggcgatgcgggctcttttttggttccatatgaactttaaagtagttttttccaattctgtgaagaaagtcattggtagcttcatggggatggcattgaatctataaattacattgggcagtatggccattttcacgatattgattcttcctacccatgagcattgttatcaaaggaaaatctcaggaaaattgaacaaccagtgaaatagcattgccccctatcttcccatcaacctagaacagaagggaactcacctgtaccttggtacttgagagatgagacagctactactgcccccattttactgataaaaaaacaaagtgcctccagaagtcataactagtgaggaatgagcgaaagttgaggtgagggatggagatagttagctcttctccttcattctccatctcatacaaaaggaacttccgctgctgacactggagagggaagtgttaaaaacctttactctttc

SEQ ID NO: 30531 - DNA, 1327 bp, Homo sapiens
tgttgcttgtgttttccaaaatgtgtatttattcaaatctaaagaaagatgtgcatttggtttttaaaactgcagagcgctgaaaatctggcctctgaaaatcttttatctgcaactgtactggttgcggctctctgggctctggcaaatctgcatttcacgccacgtattcccaaacattgcatgtccttgtaaaccacctgggcaactcactgaatctttggattggttctgtctgatcrgttctttcctgatgatgagaagccagggttctggctgggcacggtggctcataccagtaatcctagcactttgggaggctgaggagggcagatggcctgagctcaggagtttgagaccagtgtgggcaacatggtgaaaacctgtctctactaaaacacaaaaaattagccaggcatggtggcggatgcctgtaatcctagctactcgggctgaggcaagaaaattgcttgaaaccgggaggtggaggttgcagtgagccaagatagtgccactgtgctccagcctgggtgacagagccagactctgtctccaacaaccacgaagaagccagtcttctgttctccgtgatatgcgttagttcagtcccaggagcgtggagtaaccctgcccttccctgcatttggagtacgtggagcacgaagcacacaggttagcaaccaggctcaaagagcagatagcctagttcaattgcagagaccccagaaaccacaagctgttgagctgcactgcttgttttccattacacatttagaagttgctgctttaggtcactggaagagtgcaacagtgacaacaaacgaatagctgctgctttggcaggggtaggtgagggtgtgtggagacaaggatcaccatcctttgaatggcaggatttttctctcccacgttcatttccctaggcaataccaactccctggggggctgcttcggctccggcccctccaccaatgatggtggagtccgcctgtccctcctgcagctgtctgtgcgaatctactcctttcacctctaaaagcaactcacagcaggcaccctatgttccatgtaacacctttctctcaaagctgtatcatttgaatttgtccccatcataggaagtagcaaacctcaggaatttcttgccagtttgtgtgctatcttccttagcttcgtttgattggagttgctctcctcccttagtcagcatgtgtgactgcaagtaactctgtagtgggtaggctttgggcgtgtagaagcagcctatgcctcccacctccaccagcgggaagctggccggtcagctcggatgcctgcacagacacac

SEQ ID NO: 30532 - DNA, 1327 bp, Homo sapiens
tgttgcttgtgttttccaaaatgtgtatttattcaaatctaaagaaagatgtgcatttggtttttaaaactgcagagcgctgaaaatctggcctctgaaaatcttttatctgcaactgtactggttgcggctctctgggctctggcaaatctgcatttcacgccacgtattcccaaacattgcatgtccttgtaaaccacctgggcaactcactgaatctttggattggttctgtctgatcagttctttcctgatgatgagaagccagggttctggctgggcacggtggctcataccagtaatcctagcactttgggaggctgaggagggcagatggcctgagctcaggagtttgagaccagtgtgggcaacrtggtgaaaacctgtctctactaaaacacaaaaaattagccaggcatggtggcggatgcctgtaatcctagctactcgggctgaggcaagaaaattgcttgaaaccgggaggtggaggttgcagtgagccaagatagtgccactgtgctccagcctgggtgacagagccagactctgtctccaacaaccacgaagaagccagtcttctgttctccgtgatatgcgttagttcagtcccaggagcgtggagtaaccctgcccttccctgcatttggagtacgtggagcacgaagcacacaggttagcaaccaggctcaaagagcagatagcctagttcaattgcagagaccccagaaaccacaagctgttgagctgcactgcttgttttccattacacatttagaagttgctgctttaggtcactggaagagtgcaacagtgacaacaaacgaatagctgctgctttggcaggggtaggtgagggtgtgtggagacaaggatcaccatcctttgaatggcaggatttttctctcccacgttcatttccctaggcaataccaactccctggggggctgcttcggctccggcccctccaccaatgatggtggagtccgcctgtccctcctgcagctgtctgtgcgaatctactcctttcacctctaaaagcaactcacagcaggcaccctatgttccatgtaacacctttctctcaaagctgtatcatttgaatttgtccccatcataggaagtagcaaacctcaggaatttcttgccagtttgtgtgctatcttccttagcttcgtttgattggagttgctctcctcccttagtcagcatgtgtgactgcaagtaactctgtagtgggtaggctttgggcgtgtagaagcagcctatgcctcccacctccaccagcgggaagctggccggtcagctcggatgcctgcacagacacac

SEQ ID NO: 30533 - DNA, 628 bp, Homo sapiens
ggattagttcatcaggctaatgatttgacagagaaaagattgttacagtggttattttaattgaaatatgaagaaaaggacaatcacgggcagtggagtgaatcctgtttcactgaacacttactgcaatgtgtctagtactttatagctggtcctctttaaccctcaaacgtatgtataagctatgtgctcagtactttcattttgcagatgaaagagatgaaattcaaagaggtaaaatgaccttccaaaagtcatacaattaatgtcgtgcagggacttaggtcctttgatgctcaaatctatgccttttccttttgcatcacaatgcctcccttcatcttaggcttttatttccaaattataaattcaataaaaatattttgaaggtttcttatatttaaatgcaattttatggaaaattcaaagtcaagcaactctgcagtacaaggtctagaasaactgaaggtgatctgagagccttttgagaaggacaccgaaggcatcaggtcagaaagcaaaagagcaagacgccatggtacctggaaagcctgaataattatttaaataagccctgcttctctgctcaaaaaagtcactatagcatggaaaaaactacttgtagtta

SEQ ID NO: 30534 - DNA, 551 bp, Homo sapiens
aggaagagatgaagatgtctgtcactctgactgatgtccccgtatgtgtggaatgcctggagtggagtcctgcctagcacacgcctttcttctgcgttcttgggctcaggacttaatctctgtgcctcagttccctcctctgtgaaatagaagtaatagtggcatgtggctcacgtgcatgaaataaaatgagccatgaaataaaatatgcacaatgccagcagcatagtaaatattcactgaatgctactgttatatttaccattaaatattacggattcagaaagtatatttctatcataccaaaaattgtaaaaaataaaatcaagcaaattttyaaaatttattttcatttttttgagatggagtcttgctctgttgcccaggctagagtgcagtggcacgatctcagctcactgcaacctccgcctcccaggttcaagcgattctcctgcctcagcctcccgagtagctgggattacaagtgtgcaccaccacaccctgctaatttttgtacttttagtagagatgggcttttgccatgttggcca

SEQ ID NO: 30535 - DNA, 551 bp, Homo sapiens
aggaagagatgaagatgtctgtcactctgactgatgtccccgtatgtgtggaatgcctggagtggagtcctgcctagcacacgcctttcttctgcgttcttgggctcaggacttaatctctgtgcctcagttccctcctctgtgaaatagaagtaatagtggcatgtggctcacgtgcatgaaataaaatgagccatgaaataaaatatgcacaatgccagcagcatagtaaatattcactgaatgctactgttatatttaccattaaatattacggattcagaaagtatatttctatcataccaaaaattgtaaaaaataaaatcaagcaaatttttaaaatttattttcatttttttgagatggagtcttgctctgttgcccaggctagagtgcagtggcacgatctcagctcactgcaacctccgcctcccaggttcaagcgattctcctgcctcagcctcccgagtagctgggattacaagtgtgcaccaccacaccckgctaatttttgtacttttagtagagatgggcttttgccatgttggcca

SEQ ID NO: 30536 - DNA, 551 bp, Homo sapiens
aggaagagatgaagatgtctgtcactctgactgatgtccccgtatgtgtggaatgcctggagtggagtcctgcctagcacacgcctttcttctgcgttcttgggctcaggacttaatctctgtgcctcagttccctcctctgtgaaatagaagtaatagtggcatgtggctcacgtgcatgaaataaaatgagccatgaaataaaatatgcacaatgccagcagcatagtaaatattcactgaatgctactgttatatttaccattaaatattacggattcagaaagtatatttctatcataccaaaaattgtaaaaaataaaatcaagcaaatttttaaaatttattttcatttttttgagatggagtcttgctctgttgcccaggctagagtgcagtggcacgatctcagctcactgcaacctccgcctcccaggttcaagcgattctcctgcctcagcctcccgagtagctgggattacaagtgtgcaccaccacaccctgctaatttttgtacttttagtagagaygggcttttgccatgttggcca

SEQ ID NO: 30537 - DNA, 557 bp, Homo sapiens
ggaggctgaagcaggagaatcgcttgaacctgggaggcagaggttgcagtgagccaagattgcaccatagaaccccagcctgggctacagagagagactcagtctttaaaacaaaacaaaacaacaacaacaaaaaagatatatttcactgtaggtattcaaaatacatttgaagaatactgattaaataattctaaatatttaatagtcatcatctctagcgcccattatgtgctaagaactgttctagctattcaacaaacattttctctaatccttaaaacctgcccgacaatttttggaaaaagctcatcagctgtaacttgacgtcccagctgaaygcaaaaccctcatttccagggcttctctgttactctgacacattctttgcacctggtttttcagaagcttacattttattttgtttttgtttttgttttttgtttttgtttgtttggttggtttttttgtttgtttgtttttttgagacacagtctcactctgttgcacaggctggagtgcagtgacgtgatctcggctcattgcaagctccacat

SEQ ID NO: 30538 - DNA, 557 bp, Homo sapiens
ggaggctgaagcaggagaatcgcttgaacctgggaggcagaggttgcagtgagccaagattgcaccatagaaccccagcctgggctacagagagagactcagtctttaaaacaaaacaaaacaacaacaacaaaaaagatatatttcactgtaggtattcaaaatacatttgaagaatactgattaaataattctaaatatttaatagtcatcatctctagcgcccattatgtgctaagaactgttctagctattcaacaaacattttctctaatccttaaaacctgcccgacaatttttggaaaaagctcatcagctgtaacttgacgtcccagctgaacgcaaaaccctcatttccagggcttctctgttactctgacacattctttgcacctggtttttcagaagcttacattttattttktttttgtttttgttttttgtttttgtttgtttggttggtttttttgtttgtttgtttttttgagacacagtctcactctgttgcacaggctggagtgcagtgacgtgatctcggctcattgcaagctccacat

SEQ ID NO: 30539 - DNA, 2332 bp, Homo sapiens
tattctttttttgttgttgccgtttgtaagggagggtcaggaaatcagaaatggttgctgttggcaactatgaggattgggtgtgtagctgctactgacattataggaaacagaataaggagttttgttaggaagaataaatccagctagctagcactgtagctagcaataattatgtacatgtagtgatagtacacacataactgaaatggatgtttaatgatgtgctagcaagtcaactaaaccttttaatggattttgttgtgggtgagttgatataaatggggaaatcttgaagtaaaagaaagtagaagcagctgatagaaagggatattattttcctgtagaaggacatctttttagtctttttctcttaccttctctccccgctccccaccgcccacacacacataaaaaagtatttctaaaggaaagaaataatatttagattagtataaaatagcccaaatatcacaggtgaagaggaaaaataactaagtaaatgacacagaaagtaaccatcagaaagccatcgcaagcagcacaaagaaaaacaatgagtttagttgcacagaaagaaagaaatccgagtagagagaaagaaagcaagccaaagaggcacgataatatagtgaagaatagaaagtaaggacaccggaggaaaaacaacaggtgacaattaatgctagagagaggagactaagttgaaagcagcagaacacccagatggaagccaatccgtgagctgattttagagcatctttctcctttggtcayagtaactctcctcctttatgcaccttctctgcaaatacctgaaatacaaggtagctatgacctgccaggtcctcttgttaacaggttatcaaaatagatatctcatttatgagataagcagatttcatataggtgctgaagttcctaatatcatcaaaatcccattatttttggacatagttaaaaaacagagaggaagcccacctgtttctgtaacggtcagtgaagctattcagatcactcatgccacgtcacagaaatatatagctagacaaacatttttaattaaaaataattttaaatctttcataaaagcattatggaaaggcagtgaggaagagccaagccaaaagtgaagagaaaacaaggatccagactgagaggaaaacattgaagccacttttgccctgagagcatttgctgataacataaaattggactcctagttttctccattttgtgaggtgagagcaacgtaacttagaattcagaaccagcataagatatattttagcagatttagatttgagcatctctattccaagctgggattccctaaaggttgtgccgtcaaggttaaggagaacagaaagtgaggcagttattacatggggaatttgatcccaggtttaactttcttggatcagggaatttcaaaacctaaacttggtttaagtagttactgactagtaatgtgctctggtgcttgacagaaccaaatgatatctcctttggaggaagctgtctacataatacatcacaaatcaatcttgcaatttttcacatgcaatattgaacatatattcaacgataatagggaacacaagaaactggagaacaaaaatgaaagaattagaaccaaagagatgtgaaaaactagaatcatcaaatgcagatgataaagcaacaatgcacataaagaaatgaatgtatttgtttggcagtttttaaacttttaattaatacataactgttatgagagctcttttaacaaatttaagatgcaaggaaaaaataaaaaggaattaattattcctaaaatatataaagtagcatgtattaatatgtatgcattacaatgatttaaaatattgtaaatattatttacaatattttattgtaacaaaaataaaatatttttggacaaatattaacacaatatctttagacaaattaattaggaaaaaagctttaaatcaacaggttttacttgcggtatgggagggtttttggtgagatatctatacagttgagaatatatagcagtgagaatgaaacaatgatctaaatttctattaataaagatggataatttgtcaaacatttattgcttaaagccaaaatgctagcgatctttttctaaaggtaccttattgaattttctaaggctcacctttaaaaagggcttaagtgggaactatggatagatatagggataattttggaataaatataatacaaccttaagcatgtagagaccctctaattagacaatggatctgtctacatgtaatgataattctgtctagagtcatgcttcttaaactttgagaca

SEQ ID NO: 30540 - DNA, 660 bp, Homo sapiens
acagatagaagaagtaggtgaaaatttttagctcactgctgtcttttggtctcttaaccatggggatacattctgagaaatgcatcattgggagattttgtaatgcaaatctcatagagtgtacttctagaaacctaggtggtacagcctaccacacacttaggttatttaggtatagtctgttgctcctaggctacaaacccatacagcatgttactgtgctgagtactataggcagttgtaacacaatggtaagtgtgtatctaaacaaaaaaaaagaacagtaaaaatacctgttataatcttaagagaccaatgttgcatacacagtccctcattgacaaaaatatcatcatatggtstatgactgtacaaactgaaactatgaaatcacagttgatctagcaaaatgtgcatcgttttatccaggattgataagatgaattgggtggaaggttgaagaatgtgtgtattagagaatataatctctactgtcctttctacactatggatatctgtttctattcctgtattattataggtgcagggcaaattcctacttcacagatttgcacccaattactaatatttcaaaaatctatcatttttataatttaattctaaaaagttcttttttctgaaataattacagtaaaatcc

SEQ ID NO: 30541 - DNA, 592 bp, Homo sapiens
tgcctctctctactttttgttgttgtttctttatttgtagatttcttgcttaactctgaaacttcctgagatattttattaaaccctataccctattttggaagctcatttattttctaagaaatcttggcagaatatatgttctcattttaattgcataattatctggagcggtggaaaacagatgtcttatattgatgtaagcactaacaaaaccataggtgttgttttcatatgactcaccttgccacggatttgcacatctcacttactgagccaaaacacaagaatagaaggttatacccagaatcarcatgacctgcctaatgatgcaagtttaatgggaccattattagttctgtccctgctaataataatagaattataaggagttttgtttcccctttttgttgtttacaagtttgtcatatatttagaagtcattgtttcttgcttttcctaaccctcctccccaccctgggtgtagtgaaattattaggaggtggagcacagggtattgttacagcccatgtcatagaaaaaagatatttatttgcttactctgtggtgagtgaagcatttgattcccact

SEQ ID NO: 30542 - DNA, 667 bp, Homo sapiens
ccgcttcccaggttgaagcgattctcctgcctcagcctccagattagctgggactgcagaagcgcaccaccatgcccagctaatttttgtattttgtttttgtttttttttagatggagtctcgctctgtcgcccaggttggagtgcagtggcgcgatctcggctcactgcaagctccgcctcccgggctcacgccattctcctgcctgcgcctcccgaggagctgggactacaggcgcctgccaccacgcccagctaattttttgtatttttttagtagagacggggtttcactgtgttagccagagtagtctcaatctcctgacctcgtgatccgcccgcctccgactcccaaagtgctgggattacaggcatgagccaccgcgcccggccaatttttgtatttttagtagacggggtttcgccatgttggccaggatggtctcgatctcttgatcttgtgatccgcccgcctcagcctcccaaagtgctgggattacaggcgtaaaccaccgcgcccggccgcaactccyttctctctcctctacgaactgtgatgaacaaagcctttcatctcctgcaggaacctcggctcctaccctcgttctccctctgccctccaccctccatctaccctcatagccctcagactgtcttcacatcccaa

SEQ ID NO: 30543 - DNA, 531 bp, Homo sapiens
aacacctattagaagggccaaaattcaaaacactggcaacaccaaatgctggcaaggatgaggaacaacaggaactcacgttcattgctggtgggaatgcaaaatggaacagccactttggaagacagtttggcagtttctttttttctttttttttgagatggagtttcgctcctgttgcccaggctggagtgcaatggtrtgatctagactccctgcaacctctgcctcctgggttcaagcaattctcctgtctcagcctcccgagtagctgggattacaggcacccaccactatacctggctaattttttgtatttttagtagagacagggtttcatcatgttggccagactggtctcgaactcctgacctcaagtgatctgcccgcctctgcctcccaaagtgctggcattacaggcgtgaacaaccatgtcagccatggcagtttcttacaaaactaaatgtactcttaccatatgtattagtcagctcacgcccccataacaaaatactgtttctggcttaaaca

SEQ ID NO: 30544 - DNA, 531 bp, Homo sapiens
aacacctattagaagggccaaaattcaaaacactggcaacaccaaatgctggcaaggatgaggaacaacaggaactcacgttcattgctggtgggaatgcaaaatggaacagccactttggaagacagtttggcagtttctttttttctttttttttgagatggagtttcgctcctgttgcccaggctggagtgcaatggtatgatctagactccctgcaacctctgcctcctgggttcaagcaattctcctgtctcagcctcccgagtagctgggattacaggcacccaccactatacctggctaattttttgtatttttagtagagacagggtttcatcatgttggccagactggtctcgaactcctgacctcaagtgatctgcccgcctctgcctcccaaagtgctggsattacaggcgtgaacaaccatgtcagccatggcagtttcttacaaaactaaatgtactcttaccatatgtattagtcagctcacgcccccataacaaaatactgtttctggcttaaaca

SEQ ID NO: 30545 - DNA, 633 bp, Homo sapiens
taaaatacagattgctggaccacaccctcagtttcagattcgggagatctgggtggagcccccaaatctgcatttctcacagtttcccaggtaatcctggtctagggcccacactttgagaaccactgctctgaagaactgctagagactccagaggcttctacttctctcttcagaattccaagacacacagggctctgttaatattttggcccccttttggaatataatttcctaacagttgctagaaagaaatgaaaataacttcccactagggcctcatgggaacgtggctctttggtctgggcacctatataaaaaatgctttcctctgcgtcacatacaccacgatcttctatttcayggactcagtcggatcacatggttaagccatttggagaacattcggaggggcagtttttgtttttgtcggtccaaatgcactccccatcacttcctccatcctggccacggaggaagttactcacagcctcacacccactctctgtgagaggagtctaaggtagtgaagagcccaggtaatagatgagagttttttccaaaaaaaaaaaaaaattgaaatcttagaaaagagggagccattttatattcaagtccttttttttgagacgg

SEQ ID NO: 30546 - DNA, 1058 bp, Homo sapiens
cacagggattcagacaggcaagtgggcctggccagggcctcaaggagcctaggtcttctaggaccaaggtgagcattggtggaggggaagggaactccaggtgccaagactggctcgagcaggggtctggacgagggactgacatgtgcgggacggtgaggccaccatgctgcggggaggcgatggggacaggttatcggcctatcacagcagcctccaccctgctggtcctgcagcagtgcccctgcctggcacctggccttagtccccttatttagtgtcgcacacccttagctcagctgcccgttgtgtctcacacaaccaggctgtgtctcacttctagcctacgcgcttgctgtccccttttcccggaatgcccacaccccactccccttcttcccctgggaagttctgtttaagtctcagcttagccttcccctcttcgcaaagcctcggggtggagttcagtgcccttctcaccactcagacatctcccctggggactcttgagggggatggtcatgttgagctggttggtttgtttgtcttttggggagggtctgggtcttggagccccaagtgggacacacatggtggggtggtacagtggaggatgtgtgacctcatcgcatcctagaggagaaaaatatctttgtttctttttcaaacacagggtcttgctctgttgcccaagctgaagtgcagcaacttgatcatggctcattgcagccttgaactcctggactcaagatatcctcccacctcagtctcccgagtagccaggacttacaggtgggagtcactgcacccggctcaaataactatcttaactgtgagaaatggtgagctggcaaaagttcacaaccttgactatgcatgccatcgttgccagcgatgactgtgctggmcattcaccatggccagccgtgtgcttcttgttttgccacggtgtaaaagtcatacatttttcatcaagagagaaaatgaaatcagagcaccatcaatttctctaatccaattcccctcgagcagtatttataccttgcccagtgtctagg

SEQ ID NO: 30547 - DNA, 1957 bp, Homo sapiens
caaattacagctttgctgcttaatagcttggtgacctaggacaagttatctaacctctctgtgcctcagtttcctcatttaaaaatagggcaataataatatctaccacataaggtatttgctgatcacaaatacctggcaacccagtagatactcactgtaataattattatttttataatttctgcctaagtacaaagatgattcttgggttaacctaaaggtagattttcttttatttcttcctgtttcttttatttttcttgttcaccttaaagaattaaaaagaaaatcgattccagcattttggaataaaaatttgcatcaaaatcaatttattcattttattgacatatgaacaaaatgtcatttgtttattcaataaacatttgttaaatgcctaatacatttcagacatcatgccaggcacggggatgacagggcatggtggcaggcacctgtaatcccagctacttgggaggctaaggcaggagaattgcttgaacctgggaggcggagattgcagtgagccaagattgcaccactgcactccagcctgggtgacagagtgagactccatctcagaaaaaaaaaaaaaaaaaaaaaatgtggtctctgccctcaaagcgctcatagtccaggagcctgacaagtggacaggtgattacatgcaatgtaaaaaaggctgtgatgtcatacaaaaagacaagtgggagtatggttttgaccagttcctcctcttaaatttattccttcttctttggctataaagcaaaagaattggtcctatttttttttaactgtgcaaattaaaccataaattttaaaaactttataaagataaaagacaagcagccagccgcagtggctcatgccagtaatcctatcagtttgggaggctgaggcaggtagatcacctgaggtcaagagttcaaaaccagcctgaccaacatggtaaaaccccgactctactaaaaatacaaaaattagctgggcgtggtggtgggtgcctgtaatcccagctactcggaaggctgaggcagaacaggagaatcacttgaacctgggaggcggaggttgcagtgagccaagatcgagccattgcactccagcctgggcaacaagagcgagactccatctcaaaaaaaaaaaaaaaaaaaaaatagatgaacaacttgaattatgatgagcaacttgaattatggaggatgctagaaatactgtttcctccacagtcagggcttcctaccaacatagtcacttttagggtttttgacctgaaaagttctgtggcatattttttctttgctatccactttttttttccttgtagttcttccccgcgttctatcctttatcttctagagaccttggtagttcccataggaatagtgctttacggagtctaatggtgatttcttaggtaaagacaggaaacatttttttcttttttacctacaagttccatatcaaaaaatgaatgtaaacttttcatgcagttttacacattgaaaatgcaggttattttaattccattccatttttcagaattctcaatcacaatcctctgacaactgttgaagatccrtatctctttaaattgccagcattaaaatatctgtaagtactatagtactctcatgagtcaagagatgatttatgctttttaaatttttcatcaaagcttaagtattttgcatttaggctaaaatgtcataatttaaattttaactgggttattgaaaaaaagttattggcgaagaaaaaaactaagaggatgtataatggtcaagacagccagcaggggaagagaacagcattgaagaacccatatagatttggaacatgtagacacatggaggaatattatttaaccaagaaagcaaaggggaaaaggtgttcattattctaaaaataaagaaaagagtaaataagatggtgagtgcaatatgaaaat

SEQ ID NO: 30548 - DNA, 530 bp, Homo sapiens
gtagatacggttttggtctttctgtttttacagttttataagagtacaagtgatgctgttttatttgaagcctgagagcttctggttccataaccagaaattgctacctggctcttctaatggaatggagggcttttccattcttagaccatccaactctgaacttgctccgaatctcaaacctttctrttcacagaacaaacgctcaagggctttcaagagtgtttctgtagattaggcttattagcatcaacttcatgacttctaaaatgtgactgctttcatgtccagatagcttgaatacaggtatctaccagtgatatggggtggagaattaataatgcttggttacataaagtcagtgttgcttatttttcaaaactttttttttttttttttttttttaccaattatgttattcccttctccccaagaagtgggcagaaaagctttgttaacctccttttacagatgaggaaaaacaagatcagaggtgctaagtgctgtagcctagtgccaggtcttctggc

SEQ ID NO: 30549 - DNA, 557 bp, Homo sapiens
gccccaagggaggtggaacagccccacacacagcaggggcctgagaagttagcgggaaacgccgtctacaccaagccttccttcacccaagagcataaggcagcagtctctgtgctgaaacccttctccaagggcgcgccttctacctccagccctgcaaaagccctaccacaggtgagagacagatggaaagacttaacccacgctatttccattttagaaagtgcaaaggctagagttacaaatacgaagacgtctaaaccaatcgtacatgccagaaaaaaataccgctttcacaaaactcgctcccacgtgacccacagaacacccaaagtcaaaaagagtccaaaggtcagaaagaaaagttatctgagtagactgatgctcgcaaacaggcttccattctctgcagcgaagagcctcataaattccccttcacaaggggctttttcatccttaggagacctgagtcctcaagaaaacccttttctggaagtatctgctccttcagaacattttatagaaaasaataatacaaaacacacaactgcaagaaa

SEQ ID NO: 30550 - DNA, 796 bp, Homo sapiens
ataggaatagtattgtttaaatcctaatttcaacaatttatttaaagttacatgattgcatgaagaataaagatgatgttttattcatccacatgtacttttatttaaaaggtaattttaatgtcaaagagcaaaatatagctgcattaagacatttatgggaataatttcaaagtcacattgcaagggagtgtgaacataggaaggaaaataattgtagctaattttttaagcaatctacaccatatgggcatgaaaggttgagcttaatgttgaagtgaaaaaaataaaactagctgaaacataaaacaaaagattattcctgtaatatttagaataaatattaatctctataacaaggacacacaaagatacaatggttcaaagaacattgatgtttacttctctcttctataaggttgtcaatggaacccatttatttagctggacaattctctcatgctcactgaacctaaggtaggtattcattttaccacttsacaaacagaaggacacaaaagagaaggcaaaaataagcaaatgtgtctttaaacaaaaataatagtctctagctgagcaatgatgctcctcaacaaaacacacaatttcttttctttttaaaatggcaaaaatggatattgtggggaattagtagtgtccatggaaataacattcatcattaaagccctaatgatcccaaagttgggtttactataaagcagcagcaaaatgttatcttgtgtaatggttccctaggaaattaattgctaataagggggtaaaataccctagggta

SEQ ID NO: 30551 - DNA, 587 bp, Homo sapiens
attaaaatttgacttctaacaggaataggcaaatatgaaactgcacaggacagaagtgcattttatacatttaagcttctattttactattaaccccttaaattgaatgtttatttttacaaatcagccagattggctcctctgctatggactcttaagatccctattgttgaaagatcatcggaaccacagcttttctttccttatttttttttattagtatagcttctgttgactccaagaaaataagtmgtgtccccctatacttttgatgccataattgcagacattcttggtgcccaattcgtatctctttagaattcactattccagtgcctgcctgtatttgggggatatatatcccagctttttccttttttaggcagaataatgttgaagcatcttatacatgtctgccaaatgttcacattaaggtaaagcttcagtttcatacagcggtgatctgttaataacatatccttcattggctttgttcccttccctggcgccttcccgaagtccgtttagtgcttcctgaagtctccattcaaataaattctttgattcaggaatttgatataagtaaa

SEQ ID NO: 30552 - DNA, 587 bp, Homo sapiens
attaaaatttgacttctaacaggaataggcaaatatgaaactgcacaggacagaagtgcattttatacatttaagcttctattttactattaaccccttaaattgaatgtttatttttacaaatcagccagattggctcctctgctatggactcttaagatccctattgttgaaagatcatcggaaccacagcttttctttccttatttttttttattagtatagcttctgttgactccaagaaaataagtcgtgtccccctatacttttgatgccataattgcagacaytcttggtgcccaattcgtatctctttagaattcactattccagtgcctgcctgtatttgggggatatatatcccagctttttccttttttaggcagaataatgttgaagcatcttatacatgtctgccaaatgttcacattaaggtaaagcttcagtttcatacagcggtgatctgttaataacatatccttcattggctttgttcccttccctggcgccttcccgaagtccgtttagtgcttcctgaagtctccattcaaataaattctttgattcaggaatttgatataagtaaa

SEQ ID NO: 30553 - DNA, 589 bp, Homo sapiens
ttcctttctttacccttcatcttcatccttctaagaaatatgtctaaaatcagaaaaaatgagcactaatgaaaataactgtgctaggagctttcgcacacaatatctcaatacataatttcagctactcagtgtggtaggtgatatgtattcattccaatatttattgaacactgatggtgtggcagatatcataccagacacrccaagtgaaataaggaaaacaaacccaattcctgtcctcaaggagctgtagtctaggaaatattcctattatttgttttcaaaaagaaataaactaagacttggaggaattaattagttttttaaatgccatagttcaaactcaaaatcctttatcacactggattttaagctttctcatggcacagaattctggaggagattggaaaaaaaaattgcttcctaaaattcagtctctgcctttagctccctaaacaagaaagaagagaaggcgagacagagacagtgacagagacagaaaagcagatccttggctactcatcctgccgtatctcaaggcaatgaatcactgatgaattctttccttttctatctgggagaaaaa

SEQ ID NO: 30554 - DNA, 589 bp, Homo sapiens
ttcctttctttacccttcatcttcatccttctaagaaatatgtctaaaatcagaaaaaatgagcactaatgaaaataactgtgctaggagctttcgcacacaatatctcaatacataatttcagctactcagtgtggtaggtgatatgtattcattccaatatttattgaacactgatggtgtggcagatatcataccagacacgccaagtgaaataaggaaaacaaacccaattcctgtcctcaaggagctgtagtctaggaaatattcctattatttgttttcaaaaagaaataaactaagacttggaggaattaattagttttttaaatgccatagttcaaactcaaaatcctttatcacactggattttaagctttctcatggcacagaattctggaggagattggaaamaaaaattgcttcctaaaattcagtctctgcctttagctccctaaacaagaaagaagagaaggcgagacagagacagtgacagagacagaaaagcagatccttggctactcatcctgccgtatctcaaggcaatgaatcactgatgaattctttccttttctatctgggagaaaaa

SEQ ID NO: 30555 - DNA, 532 bp, Homo sapiens
tttagaaatgtaaacagtaatcttaaaatcataaaaatagaatatgtaacttccaaatgcatgtgaatgggaggaagggagggtgacaaggagagacgtacataaattaaatttgaacaagatagtagaaagcagaaagagaaaagaggcaaagaaaagaagaagcatggccagtaagaagtacataaaaagataatagaaataaatagagatctatatgactaatcacagtttatgtatacaaatcatactcaatgtttaatgacagatkgtcatgaaacagagattaaattgacagattgtaaaagtgactcaagaaagcaaaattcagctgtatggaatttacaagtgacttacctaaagtctaagaaagacactgatgatcgaaagtaaatagatagaagaaataaataacaggccaataaatggcaaaagaaagttggagttgatatactaatatcagacaaaattgactttatggcaggaataattatcaaagatgaagaggaacactatagaatgagaacaattc

SEQ ID NO: 30556 - DNA, 734 bp, Homo sapiens
agactggagaacctctcacacatgtgcacaaatattcactgcatcattatctgtagtgaaaaattgaaaaggaactgaaaaacaatcagcagaaaatagacaaattaattctgataaggttcatatgactgagtattatacagcagttaaaggagttagagcaacaggtatctgcatggataaatctaaaaacaatcatgagtttcaggaagatagatrcaacaggacagatttccataaaatggaaaacttacaaaccaatactttatattacttaggaatgaatactgtaggaaaatctaaaaaacaggcttgagattaatacacagtaaatttaaggttgtggcatctctgaggagtagggaaagggaatgagatcaaggaggccttcatctgtgtctgtaatgttttatgtgtttttttctaaaggcttgaaacaaatatggcaaaatattaagatctgataaagccatgtgggcgtatgacatttgttatatttctctctatccttattcatgtgtttaaataattctccgaaagcagtttactgagagttcagcatgtctcctgagacatgctaagaagttatgtgcaggagtggagaatatgattcattggaagagttaagtgccctaaatgccagccaggctgtgaccccaggacagaagtagggtgggggggccttcttgcttgctagtgacaatctacaccaaccagcaccacaggagccccag

SEQ ID NO: 30557 - DNA, 561 bp, Homo sapiens
tttcttgcagttctggagtctgggaagtccaaattgaggtgctggcagattctgtgtctggtgagggcccacttcctggttcatagacagcctactcctcgctgtgtcctcacctgaaggaaggggcaaggcagctctttagtgtctcttttatgatagtactaatcttatttgtgagggctccactgtcatgacccgagcacctcccaaaggtcccacctccaggtatcatcccactggggatcaggcttcaacacctgaacttgaagacaaacatttggtctatagcaaacacccaccatataccaagccccgtgcttctctgggcttgggggtgctgggataccaaggtaaattaagcctgggctccatggcaagctggtgtgatggttgagagaaggtctaaggggtcaataaggggttcttgcctggcgyggtggctcatgcctgtaatcctagcactttgggaggctgaggtgggccgatcatgaggtcaggagttcgagaccagcctggccagtatggtgaaaccccatctctaccaaaaatacaaaaaagtag

SEQ ID NO: 30558 - DNA, 2833 bp, Homo sapiens
atccaaacacagcaagaactcacatggagtccaggtatgaatgtagacagcagcaggagtcatgaaatgattttatgtgactcaatatagaatcagagggggaggccatttttattgggcagccagtacctagcattgagtagatgtacaagcatctcgggactttttgcactaactgataggctctggcaaccttatactgcttccttttggtccccaatgtttgctcctccactagcttggttaccccaaagttggagctcatggaaatgyaataattttactccattctaggagagaggttggctcctttttgcaaccctgacatttcatgcagtagacgacaactgatgtgcccacagcatcctcagtggcataggtaagacaggctataggttgtgtgtaattgcctgcaaactagccttttctgccactttttctaccaccagaggaatcccatgaaaatgcaaatatatgagaataatataattttgggccagatttaacaaaattccaatgggttataaatatatgagatttggacatttcatattgtgacattgtgaaatatatttttgattttcaacatggttccctggcatacaactcttaaactccttagaatttccaagtgatgtctttttatatgctaacgagctgactgatgatggctggctgcttctattagctttaggataggggctggtctctggaaggaccatctatcctaaaagattagatccaaggcaggattagagggttgggacttcagccccacccaaaacatctagggaggggacaggagctgaaggttgacctgattaccaatggccaatgattttgtcaatcacgcctatgtaaagaagcctccataaaaacccagaaggacagggtttggagagatcctggacagacgaacacgtggaggtcctggagggtagtgtgctcagggagggcatggaagctcaataccccttcctatacttcatactatgcatcttttcatctatatcttctgtactgtcctttataattaattggtaaataaaagtaagtgtttccctgcattctatcagtcactttagcaaattaatagaacccaaggagggggttgtgggatcctcagtttgtagccagtcagtcagaagcacaggtaaaacaacttggggctgtgactggcatcagaaatggaggccagtcctgtgggactgagccttcaacctgtgggatgcgacattatctccaggtagatgtgtcataatggaattgaattagaggacatccagctggtattcactgcagaattgcttgcttcgtgtgcggggaaaaactcccacacatctggtcacagaagtcttctgtgttgattgttgtatggtgtgggagcagaggaaaaatattttgagtgtgtttttgtccacattcatataccagcatctgaatttctggatagtcctaaaaataagtcagaagaatgtggacatatggctccttaatgagcagcattaagcatggtgccatgcgtggcaacaataggctgagatcaaattctggctactagtgccctgcaatgtgccagggtttctaccttcatcttggtattttaggcactgtaggtggccctgcttaactaacttttgttacctggctagcttctgtaggcttatgtgccttttaggccatgtttgagaactacccttgaaccaattataatgcctttaaaaatttattcacagtcagctgggcctggtggctcatgcctgtaatcccagcactttgggaggccaaggcaggcagatcacaaggtcaagagatcgagacaatcctggccaacatggtgaaatcttgtctctactaaaagtacaacaattagctgggtgtggtgttgcacacctgtagtcccagttactcaggaggttgaggcaggagaatcgcttgaacccaggaggcagagggtgcagtgagctgagattgtgccactgcacttcatcctggtgacagaacaagactctgtttcaaaaaaaaaaaaaaaaaaattattcacagtctttctgaagaagccatttccaacccattccatgatctatggccaatatccatgtgccatggcctcatggctgcaatacaccgtcttatggaaaatttggctgcaagttttcttcatagcatgtcagtctattcttgggttatagcttctctaagcaggtgggaatcagggctggataaacattgcctggtctatcaaagtcagttagggctgggatcctggctttcatatttggtaaccaattattatttcttttaatgatgtaactagctaccagaatgagagcttaaactttttgaaaatgaagcaaactacctaagtaaataaacaaatgagagccacttgtgtaccaatgatgtgagcatgtcatgacatccattgatgtgccctgagctctttcacaaggaaaaaacaatcctgacctattcaacctcaaatctctaaacctttaataggggatatagtaagaggagtgtatgtacaattaatggcctcatctttaatttaaagtgtgaacctgattctatttcatcacttttgtattattcccatgggtagtatgaaataagattccattactgctcccactagtactgagttctcacattccagagtagtgccttttatcatgttttcttgtatttataaactagctggagatggctcgagccctacaattcactaaacacgcagtcttttatttagaaggtagacagctcacaaaaagacatgacacacttctttgtcaagaaaactctaatagcttttgaaatggggctgtcaagc

SEQ ID NO: 30559 - DNA, 2833 bp, Homo sapiens
atccaaacacagcaagaactcacatggagtccaggtatgaatgtagacagcagcaggagtcatgaaatgattttatgtgactcaatatagaatcagagggggaggccatttttattgggcagccagtacctagcattgagtagatgtacaagcatctcgggactttttgcactaactgataggctctggcaaccttatactgcttccttttggtccccaatgtttgctcctccactagcttggttaccccaaagttggagctcatggaaatgtaataattttactccattctaggagagaggttggctcctttttgcaaccctgacatttcatgcagtagacgacaactgatgtgcccacagcatcctcagtggcataggtaagacaggctataggttgtgtgtaattgcctgcaaactagccttttctgccactttttctaccaccagaggaatcccatgaaaatgcaaatatatgagaataatataattttgggccagatttaacaaaattccaatgggttataaatatatgagatttggacatttcatattgtgacattgtgaaatatatttttgattttcaacatggttccctggcatacaactcttaaactccttagaatttccaagtgatgtctttttatatgctaacgagctgactgatgatggctggctgcttctattagctttaggataggggctggtctctggaaggaccatctatcctaaaagattagatccaaggcaggattagagggttgggacttcagccccacccaaaacatctagggaggggacaggagctgaaggttgacctgattaccaatggccaatgattttgtcaatcacgcctatgtaaagaagcctccataaaaacccagaaggacagggtttggagagatcctggacagacgaacacgtggaggtcctggagggtagtgtgctcagggagggcatggaagctcaataccccttcctatacttcatactatgcatcttttcatctatatcttctgtactgtcctttataattaattggtaaataaaagtaagtgtttccctgcattctatcagtcactttagcaaattaatagaacccaaggagggggttgtgggatcctcagtttgtagccagtcagtcagaagcacaggtaaaacaacttggggctgtgactggcatcagaaatggaggccagtcctgtgggactgagccttcaacctgtgggatgcgacattatctccaggtagatgtgtcataatggaattgaattagaggacatccagctggtattcactgcagaattgcttgcttcgtgtgcggggaaaaactcccacacatctggtcacagaagtcttctgtgttgattgttgtatggtgtgggagcagaggaaaaatattttgagtgtgtttttgtccacattcatataccagcatctgaatttctggatagtcctaaaaataagtcagaagaatgtggacatatggctccttaatgagcagcattaagcatggtgccatgcgtggcaacaataggctgagatcaaattctggctactagtgccctgcaatgtgccagggtttctaccttcatcttggtattttaggcactgtaggtggccctgcttaactaacttttgttacctggctagcttctgtaggcttatgtgccttttaggccatgtttgagaactacccttgaaccaattataatgcctttaaaaatttattcacagtcagctgggcctggtggctcatgcctgtaatcccagcactttgggaggccaaggcaggcagatcacaaggtcaagagatcgagacaatcctggccaacatggtgaaatcttgtctctactaaaagtacaacaattagctgggtgtggtgttgcacacctgtagtcccagttactcaggaggttgaggcaggagaatcgcttgaacccaggaggcagagggtgcagtgagcygagattgtgccactgcacttcatcctggtgacagaacaagactctgtttcaaaaaaaaaaaaaaaaaaattattcacagtctttctgaagaagccatttccaacccattccatgatctatggccaatatccatgtgccatggcctcatggctgcaatacaccgtcttatggaaaatttggctgcaagttttcttcatagcatgtcagtctattcttgggttatagcttctctaagcaggtgggaatcagggctggataaacattgcctggtctatcaaagtcagttagggctgggatcctggctttcatatttggtaaccaattattatttcttttaatgatgtaactagctaccagaatgagagcttaaactttttgaaaatgaagcaaactacctaagtaaataaacaaatgagagccacttgtgtaccaatgatgtgagcatgtcatgacatccattgatgtgccctgagctctttcacaaggaaaaaacaatcctgacctattcaacctcaaatctctaaacctttaataggggatatagtaagaggagtgtatgtacaattaatggcctcatctttaatttaaagtgtgaacctgattctatttcatcacttttgtattattcccatgggtagtatgaaataagattccattactgctcccactagtactgagttctcacattccagagtagtgccttttatcatgttttcttgtatttataaactagctggagatggctcgagccctacaattcactaaacacgcagtcttttatttagaaggtagacagctcacaaaaagacatgacacacttctttgtcaagaaaactctaatagcttttgaaatggggctgtcaagc

SEQ ID NO: 30560 - DNA, 607 bp, Homo sapiens
tgccatcactgacacgaacaaaatgaatttcgaagcgtcagtatggaattttattttttacccatgtttgttggcagttggcagattcattctggtttagcgggtttgatattagtgaaattacatatttcaaaatataagaatccttatatcatccttcattttctcatctgctttaaaactcataggtgaaggctctgctatgcttttatrtagttcagtctgcctattttaagtagtgctgagcatagagcaggtggtctataaatattttttctgataggtaaagctaaattcttccaaatagtccagacaattccacaaaaataaccatgctagttgtgtggtattgtataggaaaacaaagctgttgattgttgttttccactttttaagaggtgaaggtcaaaggcatattccagagatattgggaagttcttgccaaatgactgaagtaatcaactatcaaattattttgccatttcaaatatagacacacatcaaattagtttcaagagtgctctatgattaaggagtccatatttcatcttcacatgagagtctagttatgttttttgaagttaattacagcaaacctgaagatatc

SEQ ID NO: 30561 - DNA, 607 bp, Homo sapiens
tgccatcactgacacgaacaaaatgaatttcgaagcgtcagtatggaattttattttttacccatgtttgttggcagttggcagattcattctggtttagcgggtttgatattagtgaaattacatatttcaaaatataagaatccttatatcatccttcattttctcatctgctttaaaactcataggtgaaggctctgctatgcttttatatagttcagtctgcctattttaagtagtgctgagcatagagcaggtggtctataaatattttttctgataggtaaagctaaattcttccaaatagtccagacaattccacaaaaataaccatgctagttgtgtggtattgtataggaaaacaaagctgttgattgttgttttccactttttaagaggtgaaggtcaaaggcatattccagagatrttgggaagttcttgccaaatgactgaagtaatcaactatcaaattattttgccatttcaaatatagacacacatcaaattagtttcaagagtgctctatgattaaggagtccatatttcatcttcacatgagagtctagttatgttttttgaagttaattacagcaaacctgaagatatc

SEQ ID NO: 30562 - DNA, 490 bp, Homo sapiens
aaaaatgtttactgtgcaaatttctaataaatatatatagaaaaaaccgaatttagaacaatcttttataacaatttataaagctattgcataaaaataaaggagacaacctatggatatgagcacagcagtactaaaatatagtatgtgtacctgaccacatagttttgaattatataaaggaaaaatgacagaaaaagtagcaaagctactcactagctttagatttttaacaatatccaaatggaaatatcacgcaaacattataatactaaacttaaaaataaatyctgtaataaaatcagccaatttgtgttctgttttcaaggaagaggcagtaaattctaccctgtttcttctgctaaatgctactctaaaatctgaaaaaaatgcaagacacattaacaagaaaactaggagcatacatactacaaacaggttatacacatacattcaacacctttgataaaatggagagtatattcgatat

SEQ ID NO: 30563 - DNA, 1836 bp, Homo sapiens
cccgagggagtgtccagtgggttttaatggccgtgtctagagaggcactcctgctctgtacaagggctggcttcttccctggatctaggggttgcccctgccttttagaagacagatgcacagccccagagcctagttgcctcccctgaccccctccaagccttccatagaggaaaggggcctcccatagcactggctgatgctcagagccaagagtttgctgcccagggagtaccttgagctagtgctgggtgtcagacttgactttccaactacttccagtgcaattcaaggtgttgattttgactgctggaactgtctcttccttctcagccctttctcaaggctgcctgtgtgcttgttcttattaaccaagcccagaagccagggatctggaagcctggcagtatttccaggaaagtagcttatttctctcagttgcttctccctgctgagcttagaacggcccagctttggacctcttgaaacatcagggcaaatttttccccctctttcaatttgcatctacctgctggtgaaaaaagcagaacagcatcttcatggatttatgaacgctcagagtttttaaaatgttttatagcttgtaagatattttcaagtgaagaatgcagttctaataaatccaatgaacctgtcacagattttctgaaaccaagtgtctatgaaaaactatggtgatgacatgttgaaggtgcttattgaaaaatatggatccttgtagcgaacatttttgcaaagggtgcattttcacataaaaatgcttttagtagtggcttcgtttagttattctgcagctacttggctgtgggttcccagagagccctgaggcaacctttataaaaggcctaggtttgacttctctttggtcacttcagctttagagcaccctaagaaggctcagagaaccccaaatttcttcccagtaaagaggtcatggaataaatctggaggaactcaagaggggcgcctgcttttgaacagtcattagccaaacatgggtagattcctattaatcatgtcaagagggtacttgggaatcaagttcatgtggaattgggagattaaaagggttaggagtccttggagccgtaagacccctgaagttccaactatgctacttgctttctgtgtaatcttggataagaaatcacttgacctttctgagccttgatttccttacctgtaaaatgggaatgctaatcattgtactgcccaccatactgtctttttatgtgaatcaacaaagccacatttgtattggtgctttctttcctttcttttttttgaaatatgagatgcttcatgaatttgcatatcatctttgtgcaagggacatgctaatctctattgttttaattttagtatatgtgctgctgaagtgagcccatattggcactttctaaagtgtaaggtgctgcgtccacattaggcattaagatgatggctgcctttttcacttcacccaccccattgcctccattgtcaatgatgacgttaacatatcattgtttccctactcttgagcggggctgctttctatctcacactctgactcgggtgtctgatttctcccatcactctggcattgactctgggctacccttaggtgctgctccsgatttgggagctgtgtgtgacctttgcttttcctgccttcaggtaagattttctctttccaaacctttgtgctgtgatactgtctaggttcctgaatttctgtgacatcctttgatctgtcatttgcaatctccagctctttcctacctttcaagggtgtgtggtaagcttggtgagtggggagcagagtggagctgg

SEQ ID NO: 30564 - DNA, 466 bp, Homo sapiens
aggctatttgaaaattacatacatatgagaaagcatataatagtgtgcacaggtatgctgctatctaggctagtctgtgcatttagcagtttcagagcatgaagctttatatgcacacaacttcctatatgtgcatcctggaaacttagaattatacttaggaggtgtgatgatgcagaaggaagacatacaaaaccatggatccgatcccttctttagtgtttaagtacatgaccttagggaaatctgttaggttaactgtttcctyccttagagcggaaatgcctaagtgtatggtaggtgctcaataaatgctccaatgatataaaaattctcacttctggttcccacctattgctttacacttctgcattttttatgttcctctttttttctcggtgttccccttctttgcctaactaactgatcttcaaacatcaagattttgttcccccaagaggcctcc

SEQ ID NO: 30565 - DNA, 820 bp, Homo sapiens
ttttggagggtgaccagargagaagggagtaaaactacgcagggagaagcaaatccctagctgaactttgtaacaatttgaactagggtgagaagcctcctggccagaactggggggagggtgcaaatccggtatgcttgcttcacaggctggggaagaaccaagcccttttcttttgcagctgggaggtgggtaccctggggcaagttctcaagccttcgctgcccgcagtctggaaacagactcagcactgttgggggagcacggtgggagtgagaccggccttttagattgcatgggagccaggtgaggcctgtgactgcaggctttcccccacttccctgacaacctgcatgacttggcacagcagccataatcctcctaggtacacaattccattgacctgggaacctcacccccatcccccacagcagctgcagcaagaccagcccaaggaaagtctgagctcagacactcctagccctgcccccacctgatgggccttccctaccctccctggtagctaaagacaaagggcatatactcttgggagttctagggccccacccaccaccagttcctctccatactaccacagttgatactctctggaaagcgccacctcccagcaggaggccaaccagcacaaaaatagaacattaaaccaccaaatctaagaaccctcacagagtccattacacccccctgccacctccaccagcacaagtgctggtatccatggctgagagacccatagatggttcacctcacaggactctatgcagacaacctcctgtaccagcctggagccagatagact

SEQ ID NO: 30566 - DNA, 820 bp, Homo sapiens
ttttggagggtgaccagaggagaagggagtaaaactacgcagggagaagcaaatccctagctgaactttgtaacaatttgaactagggtgagaagcctcctggccagaactggggggagggtgcaaatccggtatgcttgcttcacaggctggggaagaaccaagcccttttcttttgcagctgggaggtgggtaccctggggcaagttctcaagccttcgctgcccgcagtctggaaacagactcagcactgttgggggagcacggtgggagtgagaccggccttttagattgcatgggagccaggtgaggcctgtgactgcaggctttcccccacttccctgacaacctgcatgactyggcacagcagccataatcctcctaggtacacaattccattgacctgggaacctcacccccatcccccacagcagctgcagcaagaccagcccaaggaaagtctgagctcagacactcctagccctgcccccacctgatgggccttccctaccctccctggtagctaaagacaaagggcatatactcttgggagttctagggccccacccaccaccagttcctctccatactaccacagttgatactctctggaaagcgccacctcccagcaggaggccaaccagcacaaaaatagaacattaaaccaccaaatctaagaaccctcacagagtccattacacccccctgccacctccaccagcacaagtgctggtatccatggctgagagacccatagatggttcacctcacaggactctatgcagacaacctcctgtaccagcctggagccagatagact

SEQ ID NO: 30567 - DNA, 1030 bp, Homo sapiens
caagaaaaataaattctccccttgcctaaaccagcctggctaatactgatgaaaattgtgaaatatctcctccactaaatattaaataaaatatcaagatctcggatattggctagttcatgaagagatattaagacaaatcacctctgcttatcttctttttagcatgccycgatttttctatttccagcatcacagtgaattttcgtgaggatgtgcaattcaacccatatggctgaatgtcagctcctgtaaatatcataaccagaaattcctggatatagatgtcatccatcatatgtaactcactccgttctctgaattaaaagatgggtagagcacttttgattgcaaataagaggcaccaactcaagcaagcttatgtaaaagaggagatcggagacggaggactacttcacagaacctgcagagaaactgcagccagaacccaagaaagaacaaccagggcctgcagagtgatcaggactctccctgcatctcccatctccatgtgtcacattcattatcatttctttcttatcccctgcaaattcacaatgctaagaatcagaactctcactggcccaacttggttcaagggccaacccctggtgcagttaaccaatctacaatggaaaaaggggtgaaagtctcgttgaatacatggatgctggggatatatcatttagggtgagggtgggaagaagtggggctgtgggtggagtggacattatgaattgggaagcactccagatgtacccaatagtaataactatcacttacctagtgttttcctatgtgccagatactcttttaagcattttacatctgagaatctaaccctccaacaacctaatgagaaagatgctattattatccccatttcacagatgaggaggctaaagcagagacattagagaatctgaccaaggttctctaatgagtctgcactcttaaccagtatgcatactatcattgcaaaatatattcccagatataggccctcactttccccctcataccaatccaa

SEQ ID NO: 30568 - DNA, 1030 bp, Homo sapiens
caagaaaaataaattctccccttgcctaaaccagcctggctaatactgatgaaaattgtgaaatatctcctccactaaatattaaataaaatatcaagatctcggatattggctagttcatgaagagatattaagacaaatcacctctgcttatcttctttttagcatgccccgatttttctatttccagcatcacagtgaattttcgtgaggatgtgcaattcaacccatatggctgaatgtcagctcctgtaaatatcataaccagaaattcctggatatagatgtcatccatcatatgtaactcactccgttctctgaattaaaagatgggtagagcacttttgattgcaaataagaggcaccaactcaagcaagcttatgtaaaagaggagatcggagayggaggactacttcacagaacctgcagagaaactgcagccagaacccaagaaagaacaaccagggcctgcagagtgatcaggactctccctgcatctcccatctccatgtgtcacattcattatcatttctttcttatcccctgcaaattcacaatgctaagaatcagaactctcactggcccaacttggttcaagggccaacccctggtgcagttaaccaatctacaatggaaaaaggggtgaaagtctcgttgaatacatggatgctggggatatatcatttagggtgagggtgggaagaagtggggctgtgggtggagtggacattatgaattgggaagcactccagatgtacccaatagtaataactatcacttacctagtgttttcctatgtgccagatactcttttaagcattttacatctgagaatctaaccctccaacaacctaatgagaaagatgctattattatccccatttcacagatgaggaggctaaagcagagacattagagaatctgaccaaggttctctaatgagtctgcactcttaaccagtatgcatactatcattgcaaaatatattcccagatataggccctcactttccccctcataccaatccaa

SEQ ID NO: 30569 - DNA, 1030 bp, Homo sapiens
caagaaaaataaattctccccttgcctaaaccagcctggctaatactgatgaaaattgtgaaatatctcctccactaaatattaaataaaatatcaagatctcggatattggctagttcatgaagagatattaagacaaatcacctctgcttatcttctttttagcatgccccgatttttctatttccagcatcacagtgaattttcgtgaggatgtgcaattcaacccatatggctgaatgtcagctcctgtaaatatcataaccagaaattcctggatatagatgtcatccatcatatgtaactcactccgttctctgaattaaaagatgggtagagcacttttgattgcaaataagaggcaccaactcaagcaagcttatgtaaaagaggagatcggagacggaggactacttcacagaacctgcagagaaactgcagccagaacccaagaaagaacaaccagggcctgcagagtgatcaggactctccctgcatctcccatctccatgtgtcacattcattatcatttctttcttatcccctgcaaattcacaatgctaagaatcagaactctcactggcccaacttggttcaagggccaacccctggtgcagttaaccaatctacaatggaaaaaggggtgaaagtctcgttgaatacatggatgctggggatatatcatttagggtgagggtgggaagaagtggggctgtgggtggagtggacattatgaattgggaagcactccagatgtacccaatagtaataactatcacttacctagtgttttcctatgtgccagatactcttttaagcattttacatctgagaatctaaccctccaacaacctaatgagaaagatgctattattatccccatttcacagatgaggaggctaaagcagagacattagagaatctgaccaaggttctctaatgagtctgcactcttaaccagtatgcrtactatcattgcaaaatatattcccagatataggccctcactttccccctcataccaatccaa

SEQ ID NO: 30570 - DNA, 1030 bp, Homo sapiens
caagaaaaataaattctccccttgcctaaaccagcctggctaatactgatgaaaattgtgaaatatctcctccactaaatattaaataaaatatcaagatctcggatattggctagttcatgaagagatattaagacaaatcacctctgcttatcttctttttagcatgccccgatttttctatttccagcatcacagtgaattttcgtgaggatgtgcaattcaacccatatggctgaatgtcagctcctgtaaatatcataaccagaaattcctggatatagatgtcatccatcatatgtaactcactccgttctctgaattaaaagatgggtagagcacttttgattgcaaataagaggcaccaactcaagcaagcttatgtaaaagaggagatcggagacggaggactacttcacagaacctgcagagaaactgcagccagaacccaagaaagaacaaccagggcctgcagagtgatcaggactctccctgcatctcccatctccatgtgtcacattcattatcatttctttcttatcccctgcaaattcacaatgctaagaatcagaactctcactggcccaacttggttcaagggccaacccctggtgcagttaaccaatctacaatggaaaaaggggtgaaagtctcgttgaatacatggatgctggggatatatcatttagggtgagggtgggaagaagtggggctgtgggtggagtggacattatgaattgggaagcactccagatgtacccaatagtaataactatcacttacctagtgttttcctatgtgccagatactcttttaagcattttacatctgagaatctaaccctccaacaacctaatgagaaagatgctattattatccccatttcacagatgaggaggctaaagcagagacattagagaatctgaccaaggttctctaatgagtctgcactcttaaccagtatgcatactatcattrcaaaatatattcccagatataggccctcactttccccctcataccaatccaa

SEQ ID NO: 30571 - DNA, 1170 bp, Homo sapiens
agcccaggggcagaagtccctgtgcataaaacctgtccctgaagtgattaataaccatggtcgcagacagtcattaggagaccttagtcatttgctgcatgatggagacgccaagtctaagaaaactgcctttgaatgttttgctaaactccattgaattgaggaaaaaatctgacatgcataatcagttcttacagacccaagagcaagaagaattcagtgacaaatgtattgagtgtgcctgaggaaacatctatttcacatccacaagaaaccattcattcttatactgcacagcttaggctagacaggagagagattgatgttgattatttttgtagtgggagaaggtcacatgttaggcaagttatgcccaccaaagtcacctatcccctggatacagagtcycgatattcatccctagacagaagggctttgccacatcagttttttccacttcagatccctgatgaaagaatcatggtgggagacaatacttgtgctcctttcaaataggtaacaaatcatgacaaatgtgcacaacgaagaactcttgactggcagacgtcaaagagcatgctaagagataaaattatcatcatgtctcacctccttgctaactccaatctaactcctttaaaatattctgagtttacgacatgtgggacactggacttccaaatcacacgttgtccacgtgattcctttcagggatccgctagtggtgggtggagagtttcataggttttggctttgctaatagctctctgatcacacttccccttgcctggtttgccactttggaggggtcttcaatgaggcttgcgtggttctagtttcacatgcagaaagtgcatttggtcatcaactcaaatgtgtatttcttttgttagataattcactcagtaactagagatgatcaagaagtttaaaactggaagataatcaattgctgacaatgacactcttcagggcaggtgaaccagtgtacagatgacccaggctggctcagtgtacctgtagtgatatagtgatggccaaggacacgcaagtgtgtgacagtaaagccatctctattgttcatgaattgcatcaaagcacagatcatcatatcttattaatgagggccactttactactcaaatgtaagtacaagaaccctaataattc

SEQ ID NO: 30572 - DNA, 1170 bp, Homo sapiens
agcccaggggcagaagtccctgtgcataaaacctgtccctgaagtgattaataaccatggtcgcagacagtcattaggagaccttagtcatttgctgcatgatggagacgccaagtctaagaaaactgcctttgaatgttttgctaaactccattgaattgaggaaaaaatctgacatgcataatcagttcttacagacccaagagcaagaagaattcagtgacaaatgtattgagtgtgcctgaggaaacatctatttcacatccacaagaaaccattcattcttatactgcacagcttaggctagacaggagagagattgatgttgattatttttgtagtgggagaaggtcacatgttaggcaagttatgcccaccaaagtcacctatcccctggatacagagtctcgatattcatccctagacagaagggctttgccacatcagttttttccacttcagatccctgatgaaagaatcatggtgggagacaatacttgtgctcctttcaaataggtaacaaatcatgacaaatgtgcacaacgaagaactcttgactggcagacgtcaaaragcatgctaagagataaaattatcatcatgtctcacctccttgctaactccaatctaactcctttaaaatattctgagtttacgacatgtgggacactggacttccaaatcacacgttgtccacgtgattcctttcagggatccgctagtggtgggtggagagtttcataggttttggctttgctaatagctctctgatcacacttccccttgcctggtttgccactttggaggggtcttcaatgaggcttgcgtggttctagtttcacatgcagaaagtgcatttggtcatcaactcaaatgtgtatttcttttgttagataattcactcagtaactagagatgatcaagaagtttaaaactggaagataatcaattgctgacaatgacactcttcagggcaggtgaaccagtgtacagatgacccaggctggctcagtgtacctgtagtgatatagtgatggccaaggacacgcaagtgtgtgacagtaaagccatctctattgttcatgaattgcatcaaagcacagatcatcatatcttattaatgagggccactttactactcaaatgtaagtacaagaaccctaataattc

SEQ ID NO: 30573 - DNA, 538 bp, Homo sapiens
gtttactaaagatatgattttcatggaagtggccttgggaaagcaacatttttttgaaaacaagctctatcctttagtttgacgacagaaacagggagctaacctgtgtcaccactcgactgcaagtgtcagctgtcccaaaacacacagacatgtatgtgtacacacatacacacacactcttccctactccaaaggaaatagatctatggctgaaataacatactagactcatcaaagggtactagtagttcctagattgtaagcatcatgcagcacttttttgaattcaaaagacttatcaaaaatagatcaggrgcagataaaattaatatttatgaactcaattatatagaaatggacctttagcaagcatgccagctgctaacatttataaggtctcttttctctggctcctggaatataactttaaaaatacataaaagtaattccagcttaattggattgtccttcttcgctgtgctttggcagagttcctacagttggtttagcttaaaagtcagagaggaggaggaag

SEQ ID NO: 30574 - DNA, 538 bp, Homo sapiens
gtttactaaagatatgattttcatggaagtggccttgggaaagcaacatttttttgaaaacaagctctatcctttagtttgacgacagaaacagggagctaacctgtgtcaccactcgactgcaagtgtcagctgtcccaaaacacacagacatgtatgtgtacacacatacacacacactcttccctactccaaaggaaatagatctatggctgaaataacatactagactcatcaaagggtactagtagttcctagattgtaagcatcatgcagcacttttttgaattcaaaagacttatcaaaaatagatcaggagcagataaaattaatatttatgaactcaattatatagaaatggacctttagcaagcatgccagctgctaacatttataaggtctcttttctctggctcctggaatataactttaaaaatacataaaagtaattccagcttaattggattgtccttctwcgctgtgctttggcagagttcctacagttggtttagcttaaaagtcagagaggaggaggaag

SEQ ID NO: 30575 - DNA, 783 bp, Homo sapiens
tgcctgattaatacaatagaatttcatgtaatgataagaaccaaatctaaaattcttagcagacactaagcattttacacaggttatttaatcctcataattatttaaactatgggactactattatcttcgttttatagataaggaacatgaagctagaggagataagttctcattggctgagctggaatttgcatgcatttgcctctaactgcacagactgtcttctgaaccccgtcagactttcacccttccttttttgaagctttacagaccccacgggttaatatcaatcaatactcttattttgtagattagcaaacttaatcatttgaaagttaaatatcttggtaacagtcaaagtctaacacaaatctggcagaattaaaattccattcattttgagtccacaggagaaggctcctttaaaattctaattttcctgggcaatgctgatgttgaactcttagaagctaaatccttcgttgctaattctcactgcaacarcaaccagggcactgtccacatatgagcacacataggacacaggtgaggagggacagcgaagacactggctgccaactgaatttactgagtgctttctgcatgacagccactgtgccagtcattctccacacactggctaatttaatcctcacatctctcctgtgatgtatgtcatgtaaagtatcccattttatggatgagaaaaactgagggtaggtaacttgcccaaggtcagaccactggtagagtgtgcggagggggtcacggggaggggag

SEQ ID NO: 30576 - DNA, 1204 bp, Homo sapiens
tgcatgtgtcctgtgttaattctcaccacttcagggcagtgagaaaatgcaaatggtggaatcccacccaagtcagtctctgctgattctctattcttttttgtttgtttgttttttgtctttttttttttttttgagacagtcttgcttcatcgcccaggccggagggcagtggcacaatctcagctcactgcaacctccacctcctaggttcaagtgattctcctgcctcagcctcccaaatagctggtattacaggcgtgcaccaccatgccaggcttatttgtatatttgtattcttagtagacactgggtttcaccatgttgggcaggctggtttcgaactcctcacctcaagtgattcacctgcctcrgcctcccaaagtgctgggattataggcgtaagccaccacgccaggctgattctctattcttccatgaaagcaaaaactcagatctggctaattttcagaggcatcatggcttaatgaaaagtacatggactttggtgttatagctagtggttaatcctggttctgctacttaacgaagtgtgagaacttgggcgagttactgaacatttcagagcccagtttatcataggaacttgggcaatactgatgtctcttttagaaagttgcagctgtgttgaagtgaataacactgtcaagggacagggttggcatcaagtaaattactcaaaacagtactactttaaaaacacaatcttgacaggggaaatagctcctagtcttatatttaaataagtgatagggattaattttgtttaatttatgcaagtagctcatgaagtataattttctaaatcataaaattatgactctaaaaatacataaaattaaacctgtataaattttcttttaattactacttagagaaccagtaacatggtaggactggtttaaagaacatttttaaagcctaatatataaaagcaacattaatatatgatgtatgagttatatacaaaaactggctaatattcaatatgacatattttggggggtgttctctgttccatcaaatagaagtaatttgtatctctaccaggacaaaaacaaccttactaagtctgggatgcttattcaatagtatcaatgatgagttcacttcctagctgattttgcacatggcatttggcaggagggttcagttcttcactggcttttgataggagtatgca

SEQ ID NO: 30577 - DNA, 1204 bp, Homo sapiens
tgcatgtgtcctgtgttaattctcaccacttcagggcagtgagaaaatgcaaatggtggaatcccacccaagtcagtctctgctgattctctattcttttttgtttgtttgttttttgtctttttttttttttttgagacagtcttgcttcatcgcccaggccggagggcagtggcacaatctcagctcactgcaacctccacctcctaggttcaagtgattctcctgcctcagcctcccaaatagctggtattacaggcgtgcaccaccatgccaggcttatttgtatatttgtattcttagtagacactgggtttcaccatgttgggcaggctggtttcgaactcctcacctcaagtgattcacctgcctcggcctcccaaagtgctgggattataggcgtaagccaccacgccaggctgattctctattcttccatgaaagcaaaaactcagatctggctaattttcagaggcatcatggcttaatgaaaagtacatggactttggtgttatagctagtggttaatcctggttctgctacttaacgaagtgtgagaacttgggcgagttactgaacatttcagagcccagtttatcataggaacttgggcaatactgatgtctcttttagaragttgcagctgtgttgaagtgaataacactgtcaagggacagggttggcatcaagtaaattactcaaaacagtactactttaaaaacacaatcttgacaggggaaatagctcctagtcttatatttaaataagtgatagggattaattttgtttaatttatgcaagtagctcatgaagtataattttctaaatcataaaattatgactctaaaaatacataaaattaaacctgtataaattttcttttaattactacttagagaaccagtaacatggtaggactggtttaaagaacatttttaaagcctaatatataaaagcaacattaatatatgatgtatgagttatatacaaaaactggctaatattcaatatgacatattttggggggtgttctctgttccatcaaatagaagtaatttgtatctctaccaggacaaaaacaaccttactaagtctgggatgcttattcaatagtatcaatgatgagttcacttcctagctgattttgcacatggcatttggcaggagggttcagttcttcactggcttttgataggagtatgca

SEQ ID NO: 30578 - DNA, 1204 bp, Homo sapiens
tgcatgtgtcctgtgttaattctcaccacttcagggcagtgagaaaatgcaaatggtggaatcccacccaagtcagtctctgctgattctctattcttttttgtttgtttgttttttgtctttttttttttttttgagacagtcttgcttcatcgcccaggccggagggcagtggcacaatctcagctcactgcaacctccacctcctaggttcaagtgattctcctgcctcagcctcccaaatagctggtattacaggcgtgcaccaccatgccaggcttatttgtatatttgtattcttagtagacactgggtttcaccatgttgggcaggctggtttcgaactcctcacctcaagtgattcacctgcctcggcctcccaaagtgctgggattataggcgtaagccaccacgccaggctgattctctattcttccatgaaagcaaaaactcagatctggctaattttcagaggcatcatggcttaatgaaaagtacatggactttggtgttatagctagtggttaatcctggttctgctacttaacgaagtgtgagaacttgggcgagttactgaacatttcagagcccagtttatcataggaacttgggcaatactgatgtctcttttagaaagttgcagctgtgttgaagtgaataacactgtcaagggacagggttggcatcaagtaaattactcaaaacagtactactttaaaaacacaatcttgacaggggaaatagctcctagtcttatatttaaataagtgatagggattaattttgtttaatttatgcaagtagctcatgaagtataattttctaaatcataaaattatgactctaaaaatacataaaattaaacctgtataaattttcttttaattactacttagagaaccagtaacatggtaggactggyttaaagaacatttttaaagcctaatatataaaagcaacattaatatatgatgtatgagttatatacaaaaactggctaatattcaatatgacatattttggggggtgttctctgttccatcaaatagaagtaatttgtatctctaccaggacaaaaacaaccttactaagtctgggatgcttattcaatagtatcaatgatgagttcacttcctagctgattttgcacatggcatttggcaggagggttcagttcttcactggcttttgataggagtatgca

SEQ ID NO: 30579 - DNA, 1204 bp, Homo sapiens
tgcatgtgtcctgtgttaattctcaccacttcagggcagtgagaaaatgcaaatggtggaatcccacccaagtcagtctctgctgattctctattcttttttgtttgtttgttttttgtctttttttttttttttgagacagtcttgcttcatcgcccaggccggagggcagtggcacaatctcagctcactgcaacctccacctcctaggttcaagtgattctcctgcctcagcctcccaaatagctggtattacaggcgtgcaccaccatgccaggcttatttgtatatttgtattcttagtagacactgggtttcaccatgttgggcaggctggtttcgaactcctcacctcaagtgattcacctgcctcggcctcccaaagtgctgggattataggcgtaagccaccacgccaggctgattctctattcttccatgaaagcaaaaactcagatctggctaattttcagaggcatcatggcttaatgaaaagtacatggactttggtgttatagctagtggttaatcctggttctgctacttaacgaagtgtgagaacttgggcgagttactgaacatttcagagcccagtttatcataggaacttgggcaatactgatgtctcttttagaaagttgcagctgtgttgaagtgaataacactgtcaagggacagggttggcatcaagtaaattactcaaaacagtactactttaaaaacacaatcttgacaggggaaatagctcctagtcttatatttaaataagtgatagggattaattttgtttaatttatgcaagtagctcatgaagtataattttctaaatcataaaattatgactctaaaaatacataaaattaaacctgtataaattttcttttaattactacttagagaaccagtaacatggtaggactggtttaaagaacatttttaaagsctaatatataaaagcaacattaatatatgatgtatgagttatatacaaaaactggctaatattcaatatgacatattttggggggtgttctctgttccatcaaatagaagtaatttgtatctctaccaggacaaaaacaaccttactaagtctgggatgcttattcaatagtatcaatgatgagttcacttcctagctgattttgcacatggcatttggcaggagggttcagttcttcactggcttttgataggagtatgca

SEQ ID NO: 30580 - DNA, 1204 bp, Homo sapiens
tgcatgtgtcctgtgttaattctcaccacttcagggcagtgagaaaatgcaaatggtggaatcccacccaagtcagtctctgctgattctctattcttttttgtttgtttgttttttgtctttttttttttttttgagacagtcttgcttcatcgcccaggccggagggcagtggcacaatctcagctcactgcaacctccacctcctaggttcaagtgattctcctgcctcagcctcccaaatagctggtattacaggcgtgcaccaccatgccaggcttatttgtatatttgtattcttagtagacactgggtttcaccatgttgggcaggctggtttcgaactcctcacctcaagtgattcacctgcctcggcctcccaaagtgctgggattataggcgtaagccaccacgccaggctgattctctattcttccatgaaagcaaaaactcagatctggctaattttcagaggcatcatggcttaatgaaaagtacatggactttggtgttatagctagtggttaatcctggttctgctacttaacgaagtgtgagaacttgggcgagttactgaacatttcagagcccagtttatcataggaacttgggcaatactgatgtctcttttagaaagttgcagctgtgttgaagtgaataacactgtcaagggacagggttggcatcaagtaaattactcaaaacagtactactttaaaaacacaatcttgacaggggaaatagctcctagtcttatatttaaataagtgatagggattaattttgtttaatttatgcaagtagctcatgaagtataattttctaaatcataaaattatgactctaaaaatacataaaattaaacctgtataaattttcttttaattactacttagagaaccagtaacatggtaggactggtttaaagaacatttttaaagcctaatatataaaagcaacattaatatatgatgtatgagttatatacaaaaactggctwatattcaatatgacatattttggggggtgttctctgttccatcaaatagaagtaatttgtatctctaccaggacaaaaacaaccttactaagtctgggatgcttattcaatagtatcaatgatgagttcacttcctagctgattttgcacatggcatttggcaggagggttcagttcttcactggcttttgataggagtatgca

SEQ ID NO: 30581 - DNA, 1204 bp, Homo sapiens
tgcatgtgtcctgtgttaattctcaccacttcagggcagtgagaaaatgcaaatggtggaatcccacccaagtcagtctctgctgattctctattcttttttgtttgtttgttttttgtctttttttttttttttgagacagtcttgcttcatcgcccaggccggagggcagtggcacaatctcagctcactgcaacctccacctcctaggttcaagtgattctcctgcctcagcctcccaaatagctggtattacaggcgtgcaccaccatgccaggcttatttgtatatttgtattcttagtagacactgggtttcaccatgttgggcaggctggtttcgaactcctcacctcaagtgattcacctgcctcggcctcccaaagtgctgggattataggcgtaagccaccacgccaggctgattctctattcttccatgaaagcaaaaactcagatctggctaattttcagaggcatcatggcttaatgaaaagtacatggactttggtgttatagctagtggttaatcctggttctgctacttaacgaagtgtgagaacttgggcgagttactgaacatttcagagcccagtttatcataggaacttgggcaatactgatgtctcttttagaaagttgcagctgtgttgaagtgaataacactgtcaagggacagggttggcatcaagtaaattactcaaaacagtactactttaaaaacacaatcttgacaggggaaatagctcctagtcttatatttaaataagtgatagggattaattttgtttaatttatgcaagtagctcatgaagtataattttctaaatcataaaattatgactctaaaaatacataaaattaaacctgtataaattttcttttaattactacttagagaaccagtaacatggtaggactggtttaaagaacatttttaaagcctaatatataaaagcaacattaatatatgatgtatgagttatatacaaaaactggctaatattcaatatgacatattttggggggtgttmtctgttccatcaaatagaagtaatttgtatctctaccaggacaaaaacaaccttactaagtctgggatgcttattcaatagtatcaatgatgagttcacttcctagctgattttgcacatggcatttggcaggagggttcagttcttcactggcttttgataggagtatgca

SEQ ID NO: 30582 - DNA, 525 bp, Homo sapiens
cagcagaggactaaattagaagaaacaatctggaagggtgcaggcactggtttggctgccattagtctgaaatccatacaggaattcagaggggagacacatgttgctagagagaccaattcagggctagagagaggcagaagtgaatcttcaaagacaagagctaaattttcagctgtaaggaaggaaagagatattatacyaaggtgccttgattctgatggtcatggtaagtcattcattcattcattcattcattcattcatctgttcgttcatgcagattgtggtggtggcacacaggagtttagtttcagacatattaatttaaagatgcatagtagatatctaactggagacaggtattggtagttggatggaggaatcttgaagtaggaagaaatattcaggctgaagatatgaactctgtgatttttattcttatgtttttaaactattaatatatacctttttctgaaatcaatgaatttccccaagcaactccagacagatgtctggggcctca

SEQ ID NO: 30583 - DNA, 1017 bp, Homo sapiens
ctgcttgggcactctaattgcatggcctcagcctcagcctccttgcctctcctctggcccgaatgcttctccaaatctagcgacatgaaagcggaattakgggttgactagatcccgataggtcatcatccataagatgccagtggaaaaggtgcccattctgggagctgcaggtcactggcttcccattgcagaccagggaggcccttgagccagcagatcacctctgggctcttggcccaccaagtagtggtgggcctgtaaggagggaactttgccgactttccctccaaagctcaaatctcccaacccacaatcacttcagaatatcatccttgctcccaatctgagggccactagagactcggagaagaggccccggcaggccctcgacaatgggcacctgtggtcgatcgacagcccctccaatgtggccgctgtgacggctctacgttgacattcaggcagtgtgattttaggtagcgcctctgcccctctcccaagtgaccccgggacccctgggaatctccaagaaccacaaggaatctctgtgacttgccacgtttcttaatcagtttccttccccacacaagaataataacaacaggaaaagacagaaaaggatgataagaggatagactcacttccacaacaacaacaacaaacaataacaccaccacaacagggaaagacagaaaacgatcgagggataaagagttacttgcgcggttccgccgccacctccgggccgcgccattaagcgcctggaagcgcagggcgccggggaaccgcagcgccccgggtgcgctcggaatccattctgccgcccccgcccccgcccccgccccgggccacctccgctacagcagccgccgaagtcgggcgggtcaccctcccgtgcgtgccctgccgccatttccctggagggagggcagaggtgccccctcctcaccccacccctcgcgcccctcaccgtcctccgggtagaagaacaccaggaagcgggatgggctcctg

SEQ ID NO: 30584 - DNA, 672 bp, Homo sapiens
gattatttatgtaataaagtgaagatgacttgtggaaataggtttgacaaaggtagaggagaaaatagttattcattttttttaaagatattcaacctaaggtgtaaaataagtgattatacaaccaggtatttaagaagacaagaaaacatgagtgaatacactggaaataataaaaatagaattagccttacaagaacaccagactataaatcaactatgtttactgtgttcaacaaaacaaaattcaagcttgagaatgttagcaggamatgggaaagtataaaattgacatagttaatttaggaaaaggaaaaatactacacctaaaaaacatataaaagctaaaattaacaatcaattgtagcattaaataaaggttaggcaaagtaaagagagaattaaaatgtttgcaaataagtgaaaagacaaaatggaaactccaaggtgaaagaatatgtgacagataatagaagatacagtatatttagacaaaatttcaaaagaataggaaaaagagaaaagtgtagaaacagtagctaaagagatgttatagataattatccaaaactaataaaagacaccaatccactgttttgagaacactgtattaaccttttaaaatttatacctgaatagcaaaattaaaaaaagaaacagaaaaaaaatata

SEQ ID NO: 30585 - DNA, 731 bp, Homo sapiens
  misc_feature (1)...(731): n = A,T,C or G
cagtaatgtgtgacgtgcttcattaatattatttgtctaaaataatcccagagataagtattaatatctgacatttactcatcaggaagatgagttacagagagagaaccctacctccccaaagtagtacagttctagtacagagctctatgcaggagaggtatatatcacatcccagctttattacttatttttgtataatgtgtggcaagtacttaaactttctgtaactcagatcttttatctgttaacgatgtataccatttgtacttctgaaagtaagcccaataaccatgtagtattgtttttatatattgctgtactttgttaatgttcatgaaaattattttttatttactgtcttcatttctacatctatttgtctttattatctggcagtttctctgtgatgtgtctrggtaaaatattcttcctttttttcccttcctttccttcttcttccctgtctctttcttcctctctttctctctctctttccctcttttgtctctcttttctcctgcttgagttcaatggagttctttagtgtgtcaatttatgtcattcataaattatgcaagcccattacatgggtgagtatgagttgacttctaattcattctaacgtgagagttctatcaagcctggaacttagggagagtttcctgttactttttcttactntgcagccttttacccctgtatgtcatcaaattaagaactagtatgca

SEQ ID NO: 30586 - DNA, 522 bp, Homo sapiens
acttacctgtctaatctgtcagtcatcattttctttggtgaagtgtctatttagatcttttgcatattttttaattgagttgtttgttttcttattgttgagttttcagagttctttgtatattttagataactgttacttatcaggaatgtgttttgctaatattttctcccattctggggcttgtctgttcattctctaagtgtctttcatagcacaaaatgttttaattttaataaagttcaatttatcacaagtttttagattacaataataaaagcatgatcaaaagcacatttaatcaggcttctgatcatgctttcattattggtaatctgaaaacttgccatcaaatccgaggtcacatagattgtcttttgtggttctttcttgctwttgtatagtttcatatttaacattttggtctatcatctacttggagttatttttggtgtaagttttaagatctatgtctaaatgtttttgtgtatagacaattgttctagcaccatttgttgaaaa

SEQ ID NO: 30587 - DNA, 522 bp, Homo sapiens
acttacctgtctaatctgtcagtcatcattttctttggtgaagtgtctatttagatcttttgcatattttttaattgagttgtttgttttcttattgttgagttttcagagttctttgtatattttagataactgttacttatcaggaatgtgttttgctaatattttctcccattctggggcttgtctgttcattctctaagtgtctttcatagcacaaaatgttttaattttaataaagttcaatttatcacaagtttttagattacaataataaaagcatgatcaaaagcacatttaatcaggcttctgatcatgctttcattattggtaatctgaaaacttgccatcaaatccgaggtcacatagattgtcttttgtggttctttcttgctattgtatagtttcatatttaacattttggtctatcrtctacttggagttatttttggtgtaagttttaagatctatgtctaaatgtttttgtgtatagacaattgttctagcaccatttgttgaaaa

SEQ ID NO: 30588 - DNA, 651 bp, Homo sapiens
agctgttctccaaacattcctcttactgcacttaccacatagagcataattgttattcccttatgaactttaaaagtttatttataataatataaatttggaaactaaaataacctaaagctcaagttgcccgtcttaaaatatgggtagttcctttatcaagatggttcatatgaggaagtggtgaaaatgatagggttgacactcaattattaaatatataaaatctagcttttactttaaagaagtacatagtagggaaagtgtgaaatttaacttcaagacagattgtattttttcggaatcttttacacctccgatttgcctttacgttatctgaaacaaagatcaggcttaaaaaacataaatattaaaatattcatccattttgaaggaataagtaaataaaacacatctctctgaaaaattctgggattccatttgacctgaacatgtatcttattactagagaagatggaaaggtgsaggggcttggagatgggagaaaaaactaaagtgctatgaatgattatacaacagtgccccctgatgggaagaatggggtctgaaattcagatgagatttcttaccaagtcaattacatgacttattcttcgtttttgcttccatttaaagagatttttgtagcga

SEQ ID NO: 30589 - DNA, 550 bp, Homo sapiens
ggaaaaggaaaagaaaggtcattggtacaggacaaagacccagcctcctagaacactgataggccagaacagaaaagggtggaaagtggatctgaagagcaaattgcaaacaacaacaacaaaaaaaagaaaaaaaaaagaactcatttgattaacaactttcctctatgctcatgtcaaactaygtctaaatatcttggcatatattagggaagatgctttttcactttcattgggtaattatttggctaggccacccaatctcccccatataactatagtactgaaaatgtaaaaatagttaaagataaaaatagaattcccattcttttttgttcttagatgatttatgaagtgtcaattggtatatgcataagggtatctattttcctaggtcaggaatttacagaacattaaaaaaaaatgctttcctagttatatagttttctacttcagtccttttttaagaatgaagcatattcaagagactaaaaataaattttaattaaattttatccatgtaaaaaggcttctaattcttttttcaaat

SEQ ID NO: 30590 - DNA, 776 bp, Homo sapiens
cattccttttttaaaaatttgtttaccccattcccctaaggcacttgatcacatcacacacgccgtctgtggaaggtctgggcatattttatgccgattttggaaccagtgattcagcagttttcactgaaaaaataaatgcatcctgaattctgtctgcctgcgttctaagtaaaggtccaattaaatccacacctggcactaacatattccagtttaaaatggcctaccacaaaagcagctgcacttagttaaatttataggggaaggaagaggaggaaagcaggaaggaagcaaaggggagaaagaaggatagaaagaagaaaaggcgcaaraaaggaaggaaggaagtaaaacaggaaggaaagaagagaaacatatttattgagcacctgcagcattcgagattagacatctgtaagatgaacaaacagaataagaaaaagtcaagatcttggctgacatcatcccactagcaagaggcagagtcattatttgaacttggttgtatgtgacttaaaagcatgtgtttcccagttaatcttgtgctgcataataaatctcccctaaacatagtggcttaaagcaacagcaatcattttaattttatctctcaagggtttggaggctggctggactcaggtaagcagcattcactcagagtctctcatgtggtttcaatcagaagggctgggttggaatcacccagaagatgtcctcactcccaggcctggcagttgaggctggggctgtcagccagaatgccttacagtata

SEQ ID NO: 30591 - DNA, 776 bp, Homo sapiens
cattccttttttaaaaatttgtttaccccattcccctaaggcacttgatcacatcacacacgccgtctgtggaaggtctgggcatattttatgccgattttggaaccagtgattcagcagttttcactgaaaaaataaatgcatcctgaattctgtctgcctgcgttctaagtaaaggtccaattaaatccacacctggcactaacatattccagtttaaaatggcctaccacaaaagcagctgcacttagttaaatttataggggaaggaagaggaggaaagcaggaaggaagcaaaggggagaaagaaggatagaaagaagaaaaggcgcaaaaaaggaaggaaggaagtaaaacaggaaggaaagaagagaaacatatttattgagcacctgcagcattcragattagacatctgtaagatgaacaaacagaataagaaaaagtcaagatcttggctgacatcatcccactagcaagaggcagagtcattatttgaacttggttgtatgtgacttaaaagcatgtgtttcccagttaatcttgtgctgcataataaatctcccctaaacatagtggcttaaagcaacagcaatcattttaattttatctctcaagggtttggaggctggctggactcaggtaagcagcattcactcagagtctctcatgtggtttcaatcagaagggctgggttggaatcacccagaagatgtcctcactcccaggcctggcagttgaggctggggctgtcagccagaatgccttacagtata

SEQ ID NO: 30592 - DNA, 776 bp, Homo sapiens
cattccttttttaaaaatttgtttaccccattcccctaaggcacttgatcacatcacacacgccgtctgtggaaggtctgggcatattttatgccgattttggaaccagtgattcagcagttttcactgaaaaaataaatgcatcctgaattctgtctgcctgcgttctaagtaaaggtccaattaaatccacacctggcactaacatattccagtttaaaatggcctaccacaaaagcagctgcacttagttaaatttataggggaaggaagaggaggaaagcaggaaggaagcaaaggggagaaagaaggatagaaagaagaaaaggcgcaaaaaaggaaggaaggaagtaaaacaggaaggaaagaagagaaacatatttattgagcacctgcagcattcgagattagacatctgtaagatgaacaaacagaataagaaaaagtcaagatcttggctgacatcatcccactagcaagaggcagagtcattatttgaacttggttgtatstgacttaaaagcatgtgtttcccagttaatcttgtgctgcataataaatctcccctaaacatagtggcttaaagcaacagcaatcattttaattttatctctcaagggtttggaggctggctggactcaggtaagcagcattcactcagagtctctcatgtggtttcaatcagaagggctgggttggaatcacccagaagatgtcctcactcccaggcctggcagttgaggctggggctgtcagccagaatgccttacagtata

SEQ ID NO: 30593 - DNA, 539 bp, Homo sapiens
agtcagggagtaaaaggaaaaagccatttgattattaagaaagactgtctattgcatggatatagtacaggtcatacattagagttttagttttggttaaacctgtcagttatggtacatccacaaacaagtgtgtgcacaggaattagcagtgacttgggaaattcagttgctcaaattttaccactgcaagctcatggagtttaaccaaacaaatgaatctgcaatcaagaaagtaaaaaaacataaacaagctttaaacaatctttagaaaaaatgttcacatgcaagagacttcccaggcaagaaggttttgattaaaaaaaatttgagtcccgaagtagtgatttaccttcagaaatattctcatctaggattattacactccaaatgcaaagtgagctagagagggagaatgcttgcaagatgtgttcagttcatattaaataaatacaaagtatggctaaatactatgtattaagattttctagcaccmatttatagaagttcagagtatagcaatggagtaaataacttat

SEQ ID NO: 30594 - DNA, 876 bp, Homo sapiens
cttgaatccaggaggtcaaggctgcagtaagccaagatcacgccactgcattccagcctaggcaacagagcaagatcctgtctcttaaaaaaaaaaaaaaaagaatgtatatggaaataagttttttagagggcaactgtagaacactgaaatagtaggaagccatttttataaaaccaaagtgatctatctacgtgtgtgtatgtgcatatgtgcatacgcatacatgtggacgcctaggagcacatgtggaaggacacattagcaccagggcaggcaatgggactctcactctatgctgtttggattttcacaagaaggtattcatttactacttgtgcaattggaatcgtccttctgaataatgcagaagattctgccctggttctaatatggctggtctttctaacagacctgcccagccatggcaggaggtcaagacacacgttttcttcccatctctttccactctgtgtggtgggacctyaaccgcttccctcacctcgctgatacctcagtgacatacctggctgacactccacccatccctgtctgcagagggtgatgaagccccacctcacaccccagtctcactcccaccttgcagagctgctgcagggctgagatcatgaacctggagggctcagcccaaggcccagcaagcaaacccagctccacttgcagagactgctcttctcacttgcgccactgttgctgaagttactaccgtcgcctcacgcaagataattgtgagattccaggggccgcagcccacaggcagtgtggtgtttgtggctgccctgatctctgtcattgcccattgatgcttggcagctcattcatctgcccgcctgccctcctgcatgcaggtaagct

SEQ ID NO: 30595 - DNA, 2074 bp, Homo sapiens
ttgcatctaatagaggctaccaacgcccgagggcgtgatttgttccaggccccaggggacgcttggttgcagttttatctgtcaaatcagtcagagggagtcccctccattagggtcaacagtgacccccaaccccttcccttctgcctcttctatttctaggacctgacagtgacacaagatagacctggtctcagacattggttctgtcacatcagtaggtgactgggcaagacccttaaccataggaacctcagtttcctcatcagaaatatgggggaataacattgtcctcacagggttgtgagaatgacatgaactggctcatgtggggtccaggcccagccaccccctggcagatgctggtggtaccagacatgtccttttcctgccgagcgggcagggctgctggcagcaggcagctttcacactaattgcccacagccttctcctctgtggctctgcgagcaacaagacagcgaatgacccgtgactggaaatctcgaggccaggcttaggcctattagaaaaatatggaacaattatgaatggcaggaaaattgtttttctttgtttgctttggcagagagaagaaaaccctcctggagcctggatttaaggtggggagaagacagggaggagactgcagtgtgtgccaagtgtcctgggaaaagaactcatgttttttgtggccctgctaaggcatggtgcaagacaccttcatcgatgcagcaggggctccccaagcaccttctgcacacctagcgctgatcctgggggcagggacacagccagactgtatgccccaaatctgggttagtccaaagttggagcagacagacaaggtccctgcccccagggaggaggaaaggtaagatgaatgaaagcaaacaataaggaagaatctcagcgatgactgctatgagaaagtggagccaggtgagctgtgagggaggggcatgcmctaggggctggcggggggtacctgagagaggagatctagcctgccattccaaatgggaagagcattttgggtggcaggaactctgccagaatgctcacctgcaccctggcctcttggcctcacccgaagcctaggctctgaattttgttttccccattgtacaggcaaggagactgaggcttagagagagaaagtgctttgcgcaaggcccagggcagtgggaggattggagccagcactctaaggactgcagtcctttctgcgttctaatctttgtgccttggatccagaccaaatgatcgggtaattgacacgtcacttcttcccaggcccagtgaagggggaaagttggtgtgacgttttccagatcctccgcaggaatggcccacaagacccagagcctggcaaactgcatgggcagtgcccaaaattgccaccccaggagcagaggccactgatgtgcagcagttcaaatgttgccctagaaggtgcttctccaggacttcccctgcgagcctgtgtggcaggaagcaagacaggataagggcaggtgtctgtctgcctgagcagcataaaccggggaaccttccgccgtgcacagacctgtctactggagggctcctggctcaaagacggactggccaggatcccaggggatcccccagcacctagtctctgtggtctgagaggtacaggaatatttgggagtggtgagttccccctccctggaggtgaccaagcccaagctgaaggggaaccctgcatagttaatggccaccctcagccctccagccccttttatggggttagtccagagttggaagcatgtgagcccacagggcatggaaatgtgcagagggctctgcagacctgtggattcacactgacgattaggtgatgggaccctggggaagtgctgggatccacggccagagatctcctgaccagtttctgataacttatttatccaaggacagcatgtcctgttacaacataattccacaaaaaaaaaaaaaaccttttaacattccttatgctaatgaagaaaacctaatgtatagataataatttatttattcagaaacattgtatcactattttaagttgaat

SEQ ID NO: 30596 - DNA, 2074 bp, Homo sapiens
ttgcatctaatagaggctaccaacgcccgagggcgtgatttgttccaggccccaggggacgcttggttgcagttttatctgtcaaatcagtcagagggagtcccctccattagggtcaacagtgacccccaaccccttcccttctgcctcttctatttctaggacctgacagtgacacaagatagacctggtctcagacattggttctgtcacatcagtaggtgactgggcaagacccttaaccataggaacctcagtttcctcatcagaaatatgggggaataacattgtcctcacagggttgtgagaatgacatgaactggctcatgtggggtccaggcccagccaccccctggcagatgctggtggtaccagacatgtccttttcctgccgagcgggcagggctgctggcagcaggcagctttcacactaattgcccacagccttctcctctgtggctctgcgagcaacaagacagcgaatgacccgtgactggaaatctcgaggccaggcttaggcctattagaaaaatatggaacaattatgaatggcaggaaaattgtttttctttgtttgctttggcagagagaagaaaaccctcctggagcctggatttaaggtggggagaagacagggaggagactgcagtgtgtgccaagtgtcctgggaaaagaactcatgttttttgtggccctgctaaggcatggtgcaagacaccttcatcgatgcagcaggggctccccaagcaccttctgcacacctagcgctgatcctgggggcagggacacagccagactgtatgccccaaatctgggttagtccaaagttggagcagacagacaaggtccctgcccccagggaggaggaaaggtaagatgaatgaaagcaaacaataaggaagaatctcagcgatgactgctatgagaaagtggagccaggtgagctgtgagggaggggcatgcactaggggctggcggggggtacctgagagaggagatctagcctgccattccaaatgggaagagcattttgggtggcaggaactctgccagaatgctcacctgcaccctggcctcttggcctcacccgaagcctaggctctgaattttgttttccccattgtacaggcaaggagactgaggcttagagagagaaagtgctttgcgcaaggcccagggcagtgggaggattggagccagcactctaaggactgcagtcctttctgcgttctaatctttgtgccttggatccagaccaaatgatcgggtaattgacacgtcacttcttcccaggcccagtgaagggggaaagttggtgtgacgttttccagatcctccgcaggaatggcccacaagacccagagcctggcaaactgcatgggcagtgcccaaaattgccaccccaggagcagaggccactgatgtgcagcagttcaaatgttgccctagaaggtgcttctccaggacttcccctgcgagcctgtgtggcaggaagcaagacaggataagggcaggtgtctgtctgcctgagcagcataaaccggggaaccttccgccgtgcacagacctgtctactggagggctcctggctcaaagacggactggccaggatcccaggggatcccccagcacctagtctctgtggtctgagaggtacaggaatatttgggagtggtgagttccccctccctggaggtgaccaagcccaagctgaaggggaaccctgcatagttaatggccaccctcagccctccagccccttttatggggttagtccagagttggaagcatgtgagcccacagggcatggaaatgtgcagagggctctgcagacctgtggattcacactgacgattaggtgatgggaccctggggaagtgctgggatccacggccagagatctcctgaccagtttctgataacttatttatccaaggacagcatgtcctgttacaacataattccacmaaaaaaaaaaaaaccttttaacattccttatgctaatgaagaaaacctaatgtatagataataatttatttattcagaaacattgtatcactattttaagttgaat

SEQ ID NO: 30597 - DNA, 512 bp, Homo sapiens
tctcctcttctatctatctatttatttctatctatctatctatctatctatctatctatctatctatctacctacctacctacctgtctacctgtctatctatatctcttgttggttctattcccctggagaactctaactaatacaacctctatgctataacatgataggatattattcaacaacattcagaatataagaattaatagccaggcttggtggtacatgcctgtagtcccagctactcaggaggctaaggcaggatgattacttaagcccaggaatttgaggttgcagtgagctatgatcacaccactgcattccagcatggggaacacagtgagactctgtctctgaaaaaaaaaaaatacacacacataaaagcatttagatwgggacaacaactgagacaatttaacgccagttaagtgttttctgtctactagactgtattggaaataagtatgtatgttgccaccatctgcttccccagcttatccccagggtgcctc

SEQ ID NO: 30598 - DNA, 561 bp, Homo sapiens
ttttagggcagtgaaaataccctgtataatactgcaatggtggatacatgtcattatacatatgaccaaacccgcagaatgtacaataccaagagcgaactctaaggtaaactatggattttgtatgataaggatatgtcaatgtaggttcatggattgtaataaatatattattctggtgggggatgttgataatgtgggagatgttcctatagggtagtatgtgggcaatctctaccttcctctagattttgttgtgattctaaaactgttctaaaaaaccagtctttagaaaaatttgagcaagagggacagaagatttaaagcactgacttgtgagagaaatgtttatagcagctattatttttcttatccctaaataacagcagaaagtcatttttgaaaaataatcaagtaataccaaataatataaagtaaaascctaagggtccctctctgtttccaacctctcccaatattctatcccatggtggaatcactattaaggaggcgtgtgtgcgtgcgtgtgtgtgtgtgtgtgtgtgtatacatttaacaaca

SEQ ID NO: 30599 - DNA, 561 bp, Homo sapiens
ttttagggcagtgaaaataccctgtataatactgcaatggtggatacatgtcattatacatatgaccaaacccgcagaatgtacaataccaagagcgaactctaaggtaaactatggattttgtatgataaggatatgtcaatgtaggttcatggattgtaataaatatattattctggtgggggatgttgataatgtgggagatgttcctatagggtagtatgtgggcaatctctaccttcctctagattttgttgtgattctaaaactgttctaaaaaaccagtctttagaaaaatttgagcaagagggacagaagatttaaagcactgacttgtgagagaaatgtttatagcagctattatttttcttatccctaaataacagcagaaagtcatttttgaaaaataatcaagtaataccaaataatataaagtaaaaccctaarggtccctctctgtttccaacctctcccaatattctatcccatggtggaatcactattaaggaggcgtgtgtgcgtgcgtgtgtgtgtgtgtgtgtgtgtatacatttaacaaca

SEQ ID NO: 30600 - DNA, 1161 bp, Homo sapiens
tctgtagggaatgccccactcttcctgcctgcatcctgtcccctgccggaatttttcaaatctcacctcgaacgtccacttctctaggagaacatttttagctttctagatatagccagtagcctccttataatttgcagagatattgaaaacaccatggttaatacaccattgcacattcttgctggtcctacctggaccatagacccttgtgaacagggtcttcatatccactgggcctcactgatgtttgacacatagttgttcacacttgttcaggagggaaggaaggaactaggaagatggaagggcagtgcaggctacaaaggagggaaaggccatttgacactcaacgcatctctgggcctgggcatttggttaaggaaccaggtaatactctgcttcatggctacgtccctttgttcatgcagccaacattgaaggttggctttgagcactgttccttctctgcggtttctgtcctggattaacctgcagacttcaaccccaatgcaccatgtcttacgaccacccccatttgttgggattaccaagctcaagacacacagatgtcttttcaggaccactttgaaagtggagttttaaattagatgagattcttgacaagaacatctcatccaccagtcagagagattcagtgactcttaggtgctgtgagtctgtgtctatttgtttcaggtacaaatctctttacttttcagtaacatagcacctcagatgaagaaagctcttctactattattattattgttttgctctgcctatgaaaatgtgtgattatgtcaggttccccagaaacagatcaaggatttattaaagaaattttcccaggagaaactaaaaaaagagtgagasagctggatagggaaagaagaggctgggtgagggtgtcagcctcagcctgaccctatagtggagctctgtgggaggaattacttctgagtttgtcccgacatggggaagggagctgaacacccccaaattaggtttcagctaagaagagagagggtataaactcctggacacttcagttctttgggcttgagtacaaaatggctctggtagtccaagggcagccctgagaagtgagccccagatgcaggctgttagatgtggagtgcacagataggggcagtgacg

SEQ ID NO: 30601 - DNA, 1161 bp, Homo sapiens
tctgtagggaatgccccactcttcctgcctgcatcctgtcccctgccggaatttttcaaatctcacctcgaacgtccacttctctaggagaacatttttagctttctagatatagccagtagcctccttataatttgcagagatattgaaaacaccatggttaatacaccattgcacattcttgctggtcctacctggaccatagacccttgtgaacagggtcttcatatccactgggcctcactgatgtttgacacatagttgttcacacttgttcaggagggaaggaaggaactaggaagatggaagggcagtgcaggctacaaaggagggaaaggccatttgacactcaacgcatctctgggcctgggcatttggttaaggaaccaggtaatactctgcttcatggctacgtccctttgttcatgcagccaacattgaaggttggctttgagcactgttccttctctgcggtttctgtcctggattaacctgcagacttcaaccccaatgcaccatgtcttacgaccacccccatttgttgggattaccaagctcaagacacacagatgtcttttcaggaccactttgaaagtggagttttaaattagatgagattcttgacaagaacatctcatccaccagtcagagagattcagtgactcttaggtgctgtgagtctgtgtctatttgtttcaggtacaaatctctttacttttcagtaacatagcacctcagatgaagaaagctcttctactattattattattgttttgctctgcctatgaaaatgtgtgattatgtcaggttccccagaaacagatcaaggatttattaaagaaattttcccaggagaaactaaaaaaagagtgagacagctggatagggaaagaagaggctgggtgagggtgtcagcctcagcctgaccctatagtggagctctgtgggaggaattacttctgagtttgtcccgacayggggaagggagctgaacacccccaaattaggtttcagctaagaagagagagggtataaactcctggacacttcagttctttgggcttgagtacaaaatggctctggtagtccaagggcagccctgagaagtgagccccagatgcaggctgttagatgtggagtgcacagataggggcagtgacg

SEQ ID NO: 30602 - DNA, 1161 bp, Homo sapiens
tctgtagggaatgccccactcttcctgcctgcatcctgtcccctgccggaatttttcaaatctcacctcgaacgtccacttctctaggagaacatttttagctttctagatatagccagtagcctccttataatttgcagagatattgaaaacaccatggttaatacaccattgcacattcttgctggtcctacctggaccatagacccttgtgaacagggtcttcatatccactgggcctcactgatgtttgacacatagttgttcacacttgttcaggagggaaggaaggaactaggaagatggaagggcagtgcaggctacaaaggagggaaaggccatttgacactcaacgcatctctgggcctgggcatttggttaaggaaccaggtaatactctgcttcatggctacgtccctttgttcatgcagccaacattgaaggttggctttgagcactgttccttctctgcggtttctgtcctggattaacctgcagacttcaaccccaatgcaccatgtcttacgaccacccccatttgttgggattaccaagctcaagacacacagatgtcttttcaggaccactttgaaagtggagttttaaattagatgagattcttgacaagaacatctcatccaccagtcagagagattcagtgactcttaggtgctgtgagtctgtgtctatttgtttcaggtacaaatctctttacttttcagtaacatagcacctcagatgaagaaagctcttctactattattattattgttttgctctgcctatgaaaatgtgtgattatgtcaggttccccagaaacagatcaaggatttattaaagaaattttcccaggagaaactaaaaaaagagtgagacagctggatagggaaagaagaggctgggtgagggtgtcagcctcagcctgaccctatagtggagctctgtgggaggaattacttctgagtttgtcccgacatggggaagggagmtgaacacccccaaattaggtttcagctaagaagagagagggtataaactcctggacacttcagttctttgggcttgagtacaaaatggctctggtagtccaagggcagccctgagaagtgagccccagatgcaggctgttagatgtggagtgcacagataggggcagtgacg

SEQ ID NO: 30603 - DNA, 512 bp, Homo sapiens
gaaagaaagaaagaaagaaaagaaaagaaaagagagagagaaagaaagaataatatcagttccttgtcaaagcagcaatacttaggagcaactgtatggggactgataacatggatcagcttgaaaaaacagctctccccaaagcccayggtatcagaacacccattcttttccttgtaggaggtgcagcgcgaagttgattgtattttttccatacagagatgggaatagctcggcccaacagttcccaagacaatgtagtgtttaagtgcacagtcaggccagccactctccatcaccgccactcctcagaagcctgaggacacatgccaccacctcccccatgtagcgcgcagaatcacctggaaggatgagagccccagaaagcctgcccagggcctaattagaggacaccctttcacccaacatcaatccctgcaccaacagctgaaggaaaggtgaggagggagggcatttctttcctttgaaatcacctgcttgtccaggagttc

SEQ ID NO: 30604 - DNA, 1061 bp, Homo sapiens
tctgttcaaatattaataggaatttcaagatggcaaagtgcatgaagccaagcacaggacgctatgcagttgcacaggtcaaatgcccatgaagctggccctggaatgaccttcaggcccatctgctgagacgctcctctcagccactgtgctgccaatcctcccctcctgcactggagcccaggaaagctgggggactcgctgctctcctgggcactgctggaggaagggatgcaggttattgctactcctaaatccacgcaaaacttttaggatttgtatcatctccccttcctctggaacaccaggcagcatctcacttcccagcccacctgcagctctcatctgccccccaaatcccaatgtgtgtctgctcaggcccagcagggaacacctgtgctttactcatgccttttcctttgtctgagttgtctcaagaatcttgcttttgcaaaaattgcatctgttcaactcaaattccttttctttgatttttggtgtgatcatctctctccagaagcaataaatgccaatgcctggtggggggaagagcagccaatgcaggaatgctaggataaaacaaggtgacttttctttcttttttttttttttttttttttttttttgagatggagtctcgctgtcacccaggctggagtgcagtggcacaatctcggctcactgcaaactccgcctcccaagttcacgtcattctcctgcctcagcctccgagtagctgggactacaggygcccgccaccatgcccagctaattttttgtatattttttagtagagacggggtttcaccgtgttagtcaggatggtctctaactcctgacctcgtgatccgcctgccttggcctcccaaagtgctgggattacaggcgtgagccactgcacctggctgctaaaacaaggggatttttcaaaaaattattgcacaatgtgcaatgagccctatatcatcatcctttcaaaatattctacacaggttatttccaaagacaaagaaactcagtggggattgcatgggaaaaactgtgttgggcactcctatgaa

SEQ ID NO: 30605 - DNA, 1061 bp, Homo sapiens
tctgttcaaatattaataggaatttcaagatggcaaagtgcatgaagccaagcacaggacgctatgcagttgcacaggtcaaatgcccatgaagctggccctggaatgaccttcaggcccatctgctgagacgctcctctcagccactgtgctgccaatcctcccctcctgcactggagcccaggaaagctgggggactcgctgctctcctgggcactgctggaggaagggatgcaggttattgctactcctaaatccacgcaaaacttttaggatttgtatcatctccccttcctctggaacaccaggcagcatctcacttcccagcccacctgcagctctcatctgccccccaaatcccaatgtgtgtctgctcaggcccagcagggaacacctgtgctttactcatgccttttcctttgtctgagttgtctcaagaatcttgcttttgcaaaaattgcatctgttcaactcaaattccttttctttgatttttggtgtgatcatctctctccagaagcaataaatgccaatgcctggtggggggaagagcagccaatgcaggaatgctaggataaaacaaggtgacttttctttcttttttttttttttttttttttttttttgagatggagtctcgctgtcacccaggctggagtgcagtggcacaatctcggctcactgcaaactccgcctcccaagttcacgtcattctcctgcctcagcctccgagtagctgggactacaggtgcccgccaccatgcccagctaattttttgtatattttttagtagagacggggtttcaccgtgttagtcaggatggtctctaactcctgacctcgtgatccgcctgccttggcctcccaaagtgctgggattacaggcgtgagccactgcacctggctgctaaaacaaggkgatttttcaaaaaattattgcacaatgtgcaatgagccctatatcatcatcctttcaaaatattctacacaggttatttccaaagacaaagaaactcagtggggattgcatgggaaaaactgtgttgggcactcctatgaa

SEQ ID NO: 30606 - DNA, 1061 bp, Homo sapiens
tctgttcaaatattaataggaatttcaagatggcaaagtgcatgaagccaagcacaggacgctatgcagttgcacaggtcaaatgcccatgaagctggccctggaatgaccttcaggcccatctgctgagacgctcctctcagccactgtgctgccaatcctcccctcctgcactggagcccaggaaagctgggggactcgctgctctcctgggcactgctggaggaagggatgcaggttattgctactcctaaatccacgcaaaacttttaggatttgtatcatctccccttcctctggaacaccaggcagcatctcacttcccagcccacctgcagctctcatctgccccccaaatcccaatgtgtgtctgctcaggcccagcagggaacacctgtgctttactcatgccttttcctttgtctgagttgtctcaagaatcttgcttttgcaaaaattgcatctgttcaactcaaattccttttctttgatttttggtgtgatcatctctctccagaagcaataaatgccaatgcctggtggggggaagagcagccaatgcaggaatgctaggataaaacaaggtgacttttctttcttttttttttttttttttttttttttttgagatggagtctcgctgtcacccaggctggagtgcagtggcacaatctcggctcactgcaaactccgcctcccaagttcacgtcattctcctgcctcagcctccgagtagctgggactacaggtgcccgccaccatgcccagctaattttttgtatattttttagtagagacggggtttcaccgtgttagtcaggatggtctctaactcctgacctcgtgatccgcctgccttggcctcccaaagtgctgggattacaggcgtgagccactgcacctggctgctaaaacaaggggatttttcaaaaaattattgcacaatgtgcaatgagccctatatcatcatcctttcaaaatattctacacaggttatttccaaagacaaagaaactcagtggggattgcatgggaraaactgtgttgggcactcctatgaa

SEQ ID NO: 30607 - DNA, 1055 bp, Homo sapiens
acagtttgattttcggggaacaaaatttggcatcagccagacccaggtgccagtcctggcatcttggcttactgggtgactttgtacatgttacctgcttcctgcttaactgtcagtttgttcacctgtaagtgaggataatgacaccttcctcaaaggttgctgtgaggactggccccacacagtatttggaaaacagtaggcatcatgttgttctgattatattgttgttcttgtggattgccgtgctggacagagctctccctgcccaggagcagagcttccctgagggctcctgtgggctacaccttggctgggggcttccaggtgcagcacctcacttcatcctcaccccagtcagcccatttgacagagttgcacatggaggctcagacagagttactagcccatttgacagagttgcacatggaggctcagaagggaaaataacttgcctgaagccatgctttcattagcagtgagatggcagcattttcagtctttttctttctatctcctcactctctttcaccctttatttcctgtccattgccctttctctttactgtagagaagtttgagtgatgcccagttcattacaagccatgccccctcaggcttctcacacccctccctcatatagcccatctgcacccacctcaggtttcaggcatttgctggaaggtgcgtgggggtgcaggaagacactgtgtctgaccaggctcagtgtgtgtgtgtaggggggacaagamtatgacatgcaccagcctcagccctgggtatgatctctctgtaataatattgatgacaatgttggtgttagcttccatggctgagcactgagccagcattcattgtctccttactgcaacatgtgggctccatactactagctccctgctactggctccattttaaacatgaagaaatggaggctgagagaggtgaagtgacttgcccaaagtcacatagtcggtaaacggttacaatttaaacccaagtcttttgcccctgtggtctgtgcccataatcagattctgtatacctctgaactc

SEQ ID NO: 30608 - DNA, 1029 bp, Homo sapiens
tagtgactccagctgccaggcagcctggctctctggtgtcccaaactctagggggaagagatgtgtgggtgagagtccaacctgtgggatggggacacagtgtggctttgggggcctgcatcacaaaagcagctaggcagaggcatgaggtgtgatatggttggggccacagctgttcatgtaggccggtgcacagttgtcttattctacatccatctctcctcattccagctcaagcctctcgctttttctttaaaagtaatgttcggggaggaggatgttacctgaattagccagatattcatctcatctcttcgtttcttttggcccacgtaaacacagacccaaagtactccagtcagcggaaatcttgtagatcttgcttgcaaaagtggccgctaagaccagggctgagcccttgcattatctgtgcatatcagggcctatttacaaagggcctccgagtcagctgttggatgttatctctgactaggttatataaatagctacgagatgcactgacaggattaaaagaagttttccatcacgccacttctgttgttaagtgcaaacatttaaagtctactaccatttttataatcatgtttcccaactataactatttaattaatttatttatttgtggtacatcaggaacctcaaaaaatggatgtgattcagggactctgtctctctctggaaagtccctatttgtatgtgtgtttcctgcttttgagtgtgattcctttgaggttacatgaggtcacatgacggtcaatagatcttgttgaataaaataaagatgctgttaatttctcaatcaacagagcaccagttttattttattttattaacttttactttagattcagggagtaaacatgcaggtttgttacatgggtatgttgtgtgatgctgaggtttggaccacgattgaacttgtcacccaggtagtgaatatagtacccaaccagtagttttgaarcccctgcctcctctcccacccctcttacattccccagtgtccat

SEQ ID NO: 30609 - DNA, 558 bp, Homo sapiens
tgawatttagcatgtacctgacctaaagaaattattagtattggtattgttattatccactttcttaatctaatctatttttaaagttttgtcacccagttctcaattaaccatatttcttttcagttaaataacactacttacttttaattaaaataaaccatagaattttcaaaatttcaattattctaatgtcaccctcccaatatttaccaatctgaatatcacatatacatactattatttactttttaaatacaccttatattgcttttgtttcttaaattgatttttggcaacaatattgattaaatcatggcttcgatttttttctaatataaagtatgtaattattaagtaaacaaatacacacagagacacgtatttcttctttgcttaaacccatctcatcttgtatttacaagtagtacatataatatatttagagaaacattgtcccatattatagtggcaatttggcagttggtcctgtggagtcattttgtggattcaaatcctaaattcaaatgtgtctcagagctcacctaacatttctgt

SEQ ID NO: 30610 - DNA, 558 bp, Homo sapiens
tgaaatttagcatgtacctgacctaaagaaattattagtattggtattgttattatccactttcttaatctaatctatttttaaagttttgtcacccagttctcaattaaccatatttcttttcagttaaataacactacttacttttaattaaaataaaccatagaattttcaaaatttcaattattctaatgtcaccctcccaatatttaccaatctgaatatcacatatacatactattatttactttttaaatacaccttatattgcttttgtttcttaaattgatttttggcaacaatattgattaaatcatggcttygatttttttctaatataaagtatgtaattattaagtaaacaaatacacacagagacacgtatttcttctttgcttaaacccatctcatcttgtatttacaagtagtacatataatatatttagagaaacattgtcccatattatagtggcaatttggcagttggtcctgtggagtcattttgtggattcaaatcctaaattcaaatgtgtctcagagctcacctaacatttctgt

SEQ ID NO: 30611 - DNA, 518 bp, Homo sapiens
tagcctcccaaagtgctggaattacaggcatgagccaccatgcaatgcctgcttctttcatgcctcaagacctttgccctttcccattccctctgtcagaaatactcttctcctggcttttcatgtatctggctccttcttagckgaaatatcccctttttgggttgcctttcctgtctaatgtagtttcctccatcgttctctatcacaacactcctttcctcatagacgaattgcagcttatcattatctatttgaggacttgctgtcttatatcaggctttctaagaatggatcctgagatgaggatacatgggcaagtgatttattaaggaggggcagccagtaagggagtgggggagcaggacaggggtaggcaaggaggaaagtgcgggtgggatttgaggcagagtctcagcttaaacctgatcccacaggggagctctgcagtataaattctgccttggagtttatcccaacttgaagcaaataaactgtgtttttattcctgtagcagt

SEQ ID NO: 30612 - DNA, 1091 bp, Homo sapiens
gacccatgcagacccgacttcttgaggacaggggatccaggaaagatggcagtgaaggcagaagaagggaaggcccatttaagaggctacgtaggtcatttaactctacttctgaaaccttttcctactgagattcacaaattaaaattaatttttttttttttgagatggagttttgctcttgttgcctaggctggagtacaatggcgtgatctcagctcactgcagtctctgcctcctaggttcaagcagttctcctgcctcagcctcccgagtagctgggactacaggcacacgccactaagcccggctaattttttgtattttaatagagacagggtttcaccatgtggcccagggtgttctcgaactcctgaactcaggcaatctgcccacctcagcctcctgaagtgctaggattacaggtgtgagccactgcgcccagcctaaaattattctttgatgagcctattctctggaactactaagagggactgtggccatgaataactagttccatttgtctgctttacttatgaaaatcctcaatgtggctctccaccaaagtatcctgaattagtcttgtgtgtctgcacatgacactatgtgatccaaactaagaagaactattccctgctttatgtctgtcactggtttcctattaaagtttgcattagtagcaactcccatttttgtagtactttacaattcacaaactatcatattgtttcagtttagttttcacactgtagggaccaggggaaaaaattcccctctgccctttaaagagtcactgaaagtcactgacaagaggcaaattgataggagaaaaggcatacaaatgtatttgatcagagttgtatgtgacatgggagacttcagaatgaagacccaaagatacagaagacgctgcccatttttatgatcaggtttgaagtatggacagctgtgtagaaaagtgattggacaaaaaggggtgatctaatgctcacaggcyggggaaactgagccagccctgtctagattcttattggcctctctgtgcagcattccttccttctgggtatggagcagggccctctctggaatga

SEQ ID NO: 30613 - DNA, 402 bp, Homo sapiens
aggaggggatagacaggaaaattgtaattttcatgcagtgagacaagtatcctaacagcatttctgctagctggggctgctgacggcttcaggcaggagatagcatttagactgcttttaaaagatggttaattggctgggtgcggtggctcacgcctgtaatcccagcactttgggaggccgaggtgggtggatcatgaggtcaggagattgagaccatcctggctaacatggtgaaaccccgtctttaccaaaaatacaaaaaattagccgggcatggtggcgggcacctgtagtcccagctactcgggaggctgaggcaggagaatggcrtcaacccgggaggcggagcttgcagtgagccgagatcatgccattgcactccagcctgggcgacagagc

SEQ ID NO: 30614 - DNA, 727 bp, Homo sapiens
tgaacctgtttcctgtaaactccataaaatgggtcaatctgtggggcatatgcagtgcacatacagtgttcagaacagtgcctggtagacagtaagtacacaaatgggtcctattttatttatttatttatttttttgatacagagtctcactctgtcaccccggttggagtgcagtggcacyatctcggctcactgcaacctgtcccaggttcaagcgattctcctacctcagcctcctgagtagctgggattataggcacctgccaccacacccgggtaatttttgtatttttagtagagatggggttttgccatgttggccaggctggtcttgaacgcctgacctcaagtgatccacctacctcggcctcccaaagtgctgggattacaggcatgagccaccgtgcctggccctattttattctttgtttgttctctgttgtcactgatctccacatcgggtctgctgaaaccatgccgatggcttcttccacctttttcttcactgttagcttctgatggctgccacctccttccctcttctgttgttctttgttcctttccctgccacctctcccgtgcatcatagtattagctttgagagctctgatgcatttggctgcaagtgccagaaaacccacctgcagctggcttaacctgtgtggaaatgtgcctgtcatgcaccaggaaggagggcacatctcatgtccccaaaaagccatgaa

SEQ ID NO: 30615 - DNA, 727 bp, Homo sapiens
tgaacctgtttcctgtaaactccataaaatgggtcaatctgtggggcatatgcagtgcacatacagtgttcagaacagtgcctggtagacagtaagtacacaaatgggtcctattttatttatttatttatttttttgatacagagtctcactctgtcaccccggttggagtgcagtggcactatctcggctcactgcaacctgtcccaggttcaagcgattctcctrcctcagcctcctgagtagctgggattataggcacctgccaccacacccgggtaatttttgtatttttagtagagatggggttttgccatgttggccaggctggtcttgaacgcctgacctcaagtgatccacctacctcggcctcccaaagtgctgggattacaggcatgagccaccgtgcctggccctattttattctttgtttgttctctgttgtcactgatctccacatcgggtctgctgaaaccatgccgatggcttcttccacctttttcttcactgttagcttctgatggctgccacctccttccctcttctgttgttctttgttcctttccctgccacctctcccgtgcatcatagtattagctttgagagctctgatgcatttggctgcaagtgccagaaaacccacctgcagctggcttaacctgtgtggaaatgtgcctgtcatgcaccaggaaggagggcacatctcatgtccccaaaaagccatgaa

SEQ ID NO: 30616 - DNA, 727 bp, Homo sapiens
tgaacctgtttcctgtaaactccataaaatgggtcaatctgtggggcatatgcagtgcacatacagtgttcagaacagtgcctggtagacagtaagtacacaaatgggtcctattttatttatttatttatttttttgatacagagtctcactctgtcaccccggttggagtgcagtggcactatctcggctcactgcaacctgtcccaggttcaagcgattctcctacctcagcctcctgagtagctgggattayaggcacctgccaccacacccgggtaatttttgtatttttagtagagatggggttttgccatgttggccaggctggtcttgaacgcctgacctcaagtgatccacctacctcggcctcccaaagtgctgggattacaggcatgagccaccgtgcctggccctattttattctttgtttgttctctgttgtcactgatctccacatcgggtctgctgaaaccatgccgatggcttcttccacctttttcttcactgttagcttctgatggctgccacctccttccctcttctgttgttctttgttcctttccctgccacctctcccgtgcatcatagtattagctttgagagctctgatgcatttggctgcaagtgccagaaaacccacctgcagctggcttaacctgtgtggaaatgtgcctgtcatgcaccaggaaggagggcacatctcatgtccccaaaaagccatgaa

SEQ ID NO: 30617 - DNA, 727 bp, Homo sapiens
tgaacctgtttcctgtaaactccataaaatgggtcaatctgtggggcatatgcagtgcacatacagtgttcagaacagtgcctggtagacagtaagtacacaaatgggtcctattttatttatttatttatttttttgatacagagtctcactctgtcaccccggttggagtgcagtggcactatctcggctcactgcaacctgtcccaggttcaagcgattctcctacctcagcctcctgagtagctgggattataggcacctgccaccacacccgggtaatttttgtatttttagtagagatggggttttgccatgttggccaggctggtcttgaacgcctgacctcaagtgatccacctacctcggcctcccaaagtgctgggattacaggcatgagccaccgtgcctggccctattttattctttgtttgttctctgttgtcactgatctccacatcgggtctgctgaaaccatgcygatggcttcttccacctttttcttcactgttagcttctgatggctgccacctccttccctcttctgttgttctttgttcctttccctgccacctctcccgtgcatcatagtattagctttgagagctctgatgcatttggctgcaagtgccagaaaacccacctgcagctggcttaacctgtgtggaaatgtgcctgtcatgcaccaggaaggagggcacatctcatgtccccaaaaagccatgaa

SEQ ID NO: 30618 - DNA, 551 bp, Homo sapiens
aaattaagaatgtggattaattttagggttaactaataggttcagtctttcctctatttggttgttaagtctccgtactcatactttgaggatgtttgaatctatttgtcacccccatctgtttacatttagatttgaaaactagatagcacttgcgtaatacaatgattcaatttggacagtgccrtattttaaggaagcagttttaagaaactttttttttctccacgaagctaggacaacctcagtatgtctaatctctaacttcttttcctgaaagagaatctaaacaaaccctcttttatggtatattagaaagcagcacgttcctcgttcaccaaggatacttgctaacatctcaggaaaaacaggtgcctacgtataagggtctccgagctcccaaagtcctgctgaatacatataattcctctttcagaaggaaaataacaatacatatagttcctctttcagaaggaaaataacaatacatatatttcctctttcagaaggaaaataacaatacatatagttcctctttcagaaggaaaata

SEQ ID NO: 30619 - DNA, 551 bp, Homo sapiens
aaattaagaatgtggattaattttagggttaactaataggttcagtctttcctctatttggttgttaagtctccgtactcatactttgaggatgtttgaatctatttgtcacccccatctgtttacatttagatttgaaaactagatagcacttgcgtaatacaatgattcaatttggacagtgccatattttaaggaagcagttttaagaaactttttttttctccacgaagctaggacaacctcagtatgtctaatctctaacttcttttcctgaaagagaatctaaacaaaccctcttttatggtatattagaaagcagcacgttcctcgttcaccaaggatacttgctaacatctcaggaaaaacaggtgyctacgtataagggtctccgagctcccaaagtcctgctgaatacatataattcctctttcagaaggaaaataacaatacatatagttcctctttcagaaggaaaataacaatacatatatttcctctttcagaaggaaaataacaatacatatagttcctctttcagaaggaaaata

SEQ ID NO: 30620 - DNA, 575 bp, Homo sapiens
ccgaaagcggtatcatttatttcgtgcaaatagtaactttaaaaagtaaaataaatattaagaatggattattatgtatccttaaatcaaacaatgtgtctaaatgtttcattttataatttagtattatgcaatttcaaggttgaaaactgtaatcatacagaataagtataagcaayatttaacatgcttgtttacccataagtatgccataagaaaaataacttctgaattggatattttcctgatttattcctttatttgctggttaaaattatattgcttcaactaagcaaaacttaaaaatgattattcaaaggctttttttccaagatttagaaagatttcagcattatttttactgtgtttcagaagcagacaggccaatcagccttctaatgtttgcttataataatgagttatccacttcatagcacagcaaaatgtggaccttcgatcaagggaagaaggctaaagtctcaacttggaaacccttaagaaatacgtagtttaaaatttccaacctcctattctcacgactttacatcacaatatcttaatttatatagctttat

SEQ ID NO: 30621 - DNA, 578 bp, Homo sapiens
cagcagtacgttaagcataacctatggatttcttaattaatcctcaaaattgccctatgtggcatgtactattgttattgctattttaaaaataagaaaattgagtttctccttgtttgaactcctaggtcaaatgagccaggatttaaaactcaggtctgtggaacttcaaagcaaaacatcttaatttgtacattattacttcatttcaaggaacaatcattagccttgaatcttgtaatatgaattcatagaccttgacaaagcagagacctcataaacaggtagattaacaaatcagagcacataagcaggtatttgaaatcttccaaaataatcatattaaaagatttaccttttgccaatataagcctttgaaaatattcaaattgcctgaggaactattattaaactttcagtgaggtgaattaatagaaaacatgtwtttttagctttcttaatagtgcacctatatataaatttatccataacacaatattttattatattctgaactgatcccaattaaagagacaatagaagggaatttttaggtaaaagagttttttagtaaaaat

SEQ ID NO: 30622 - DNA, 1024 bp, Homo sapiens
ggatccaattcaagagtaaggagaaaggaagttacaagaaaagacctagaagagtccaaatggaggcagagttacagacaaatacagataaatagagaatgcagcacaaaaggcagtatgctgaagagttggggtgtgggggggctggggtgtaggggaggctataatagaggcatatagtacaagaaaagagggcaatttaagacactaagaaaaacaggaagtcctattcaaaaacttttttaattccaaagttagattttggtcatatccaaatttttttttaatttgatggtcagaattgataaaataaataaagtctactaattctctatattatcaacatgtttcttctggcagcccagggacagaaaaggaataatcatctaagcacattatctggcttagcattaaataatacttacacagtcatggtatcaacactatttattggttttcataatttagagacaacctgtggacatgacagctgagattacaggggaaaaaacgtgtatttgtttaggccaggggtgtccaatcatttggcttccctggaccacactggaagagaagaattgtcttgggccacccataaaatacactaacactaacaatagctgatgagctttaaaaaacaaaaaaatctccttatgttttaagaaagtttatgaatttgtgttgggccgcattcaaaactgtcctgggccgtgcgcagctcaccagccagggattggacaagcttagtctagccaataaaaagtacagctactggtttagaagaaataatcacaaggtaataaatggaaaattcaagtaatttctaaagctgataaagagaaaggtgaatcaacattamggctgggtaccagggttcatgcctgtaatcccaacattttgggaggcaggagttcaaattcagcctatgcaaaatagcgaaaccctgtctgtacaaaaaaaataaagtagccagccacagtggcacaaacctgtagtcctagctactggggaaggtgaggcagga

SEQ ID NO: 30623 - DNA, 794 bp, Homo sapiens
ttcgggggcagggggcagccagaggcatggggggaaatgccacagagagaaggaaatctccagctgaactttgtaacaatttgaactggtcaagaaacctcctggccagaactcaggggagggcacaaatctggcrtgcagactccacaggcagaggaagaactaaaccctactttctttcacagcctgggacaagttctcagccttgcttgcccacttcctgaaaacagaaggtaggccatggtcagaatgagactggcccttttgattgtgtaggaacaaggtgaggtctgtgactgctgggtttcccctactttgctgacaacctacctgactcaacagagccagccataattctagttacataattccattgacctaggaactgcaaccccatttccaacagcagccacaacgagacctgcccaagaagagtctgagctcaggcacacctagccctgcccccacctgatggtccttctctacccaccctagtaactgaacagaaagggcatatatcttgggagttcgagggccctgcccaccgtcggttcctctccatactaccatagcttatgctctctgaaaagtgccacctcccagcaggaggccaaccagcacaaaaatagagcattaaaccaccaaagctaggaaccctacagagtccatttcacccctctgctacctccatcagaacaagcgctggtatccatggctgagataccccatagatggttcacagcacaggactctgtgcagacaacccccagtaccagcccggagccgtgtagaca

SEQ ID NO: 30624 - DNA, 794 bp, Homo sapiens
ttcgggggcagggggcagccagaggcatggggggaaatgccacagagagaaggaaatctccagctgaactttgtaacaatttgaactggtcaagaaacctcctggccagaactcaggggagggcacaaatctggcgtgcagactccacaggcagaggaagaactaaaccctactttctttcacagcctgggacaagttctcagccttgcttgcccacttcctgaaaacagaaggtaggccatggtcagaatgagactggcccttttgattgtgtaggaacaaggtgaggtctgtgactgctgggtttcccctactttgctgacaacctacctgactcaayagagccagccataattctagttacataattccattgacctaggaactgcaaccccatttccaacagcagccacaacgagacctgcccaagaagagtctgagctcaggcacacctagccctgcccccacctgatggtccttctctacccaccctagtaactgaacagaaagggcatatatcttgggagttcgagggccctgcccaccgtcggttcctctccatactaccatagcttatgctctctgaaaagtgccacctcccagcaggaggccaaccagcacaaaaatagagcattaaaccaccaaagctaggaaccctacagagtccatttcacccctctgctacctccatcagaacaagcgctggtatccatggctgagataccccatagatggttcacagcacaggactctgtgcagacaacccccagtaccagcccggagccgtgtagaca

SEQ ID NO: 30625 - DNA, 794 bp, Homo sapiens
ttcgggggcagggggcagccagaggcatggggggaaatgccacagagagaaggaaatctccagctgaactttgtaacaatttgaactggtcaagaaacctcctggccagaactcaggggagggcacaaatctggcgtgcagactccacaggcagaggaagaactaaaccctactttctttcacagcctgggacaagttctcagccttgcttgcccacttcctgaaaacagaaggtaggccatggtcagaatgagactggcccttttgattgtgtaggaacaaggtgaggtctgtgactgctgggtttcccctactttgctgacaacctacctgactcaacagagccagccataattctagttacataattccaytgacctaggaactgcaaccccatttccaacagcagccacaacgagacctgcccaagaagagtctgagctcaggcacacctagccctgcccccacctgatggtccttctctacccaccctagtaactgaacagaaagggcatatatcttgggagttcgagggccctgcccaccgtcggttcctctccatactaccatagcttatgctctctgaaaagtgccacctcccagcaggaggccaaccagcacaaaaatagagcattaaaccaccaaagctaggaaccctacagagtccatttcacccctctgctacctccatcagaacaagcgctggtatccatggctgagataccccatagatggttcacagcacaggactctgtgcagacaacccccagtaccagcccggagccgtgtagaca

SEQ ID NO: 30626 - DNA, 612 bp, Homo sapiens
tacactcccaccaacaccatgacagtttacaaatgccacggcaatgtcagaagttaccttatatggtctaaaacggggaggcatgaataatccaccccttgtttagcatatcatcaagaaataaccataaaagtgggcaaccagcagccttcagctctgctctttgggtctatggagtagccattcttttattcctttacttccttaataaacttgctttcactttgcactgtggactcactgtaaattctttcttgtgtgagatccaagaaccctctcctggggtctggatcaggacccctttcctgtaacagtttttttttttttttctggtaatttgggrcaatcgaaagctaagattttcttaatttagttttgtgcattgagttaattcaaagttaggcttcagtacataaatcacctgcttcctgttcaacgtctctgttagtgtatggtccttcagtgttctgacctatagcttgcagttttgaagaggcctcaactttggaggaccctggagtccaatttttttttttttaatttttagttttgtccctttggcctgttggaagttctgatcagcttcttatacttttagctacctcttcctga

SEQ ID NO: 30627 - DNA, 966 bp, Homo sapiens
attcatgaactgggcagctttaggaccagaagagattcagagagctctgcctcatcagttttggcagtggactttcatarggtgattatagaagcaaagtgaagaaattactgattggcaacagctcagcatttggcttatttgggcattatctgatggaaagtccctagttagaggttagctggaggtttctgattggttaagtctagttttgttttactggttacctcggacttcagtttgtttacacagaaaatcaaagtggtagagctctctcaacctaatgtcttctctattaactttgttaactgtatgtagaaacctaatattagtgaactatccttttagcatgattgattccaaatgtaaaaagtgataagagaacaaaaatcaccagatactttaaaaaccaatattttagagtaatctttccattgatatttgtccactctccttcagatgaaaccatcattctctttacatgtgtgactcccacagaatattgaaaaaacttgaaatgttgtttggaaaactaggcattttctaacaattgggtctttcttttattttcttttccagttactttaaatttcttatatttttgtcattcttttaatctatttcattccaaatttattttcctagtcatttatttttcttttctttctttctgattttcatatttagtgatagtgcttcttcctttcctttctttttgtttcttttcattccactctcttcctttgctttttcttcctcctcattcattcttccactcatttatttatattatttacttattcattttacttattttatgtgtgtataaaaaaacaactgccatgtatgctgtctcactaattttcataaaatgtgacaggatgcaaccttgtagataggaaaggaattgtgtataaccaaagtgttcccacctgcatggtgtccacccaagaggcagcaggatcc

SEQ ID NO: 30628 - DNA, 966 bp, Homo sapiens
attcatgaactgggcagctttaggaccagaagagattcagagagctctgcctcatcagttttggcagtggactttcataaggtgattatagaagcaaagtgaagaaattactgattggcaacagctcagcatttggcttatttgggcattatctgatggaaagtccctagttagaggttagctggaggtttctgattggttaagtctagttttgttttactggttacctcggacttcagtttgtttacacagaaaatcaaagtggtagagctctctcaacctaatgtcttctctattaactttgttaactgtatgtagaaacctaatattagtgaactatccttttagcatgattgattccaaatgtaaaaagtgataagagaacaaaaatcaccagatactttaaaaaccaatattttagagtaatctttccattgatatttgtccactctccttcagatgaaaccatcattctctttacatgtgtgactcccacagaatattgaraaaacttgaaatgttgtttggaaaactaggcattttctaacaattgggtctttcttttattttcttttccagttactttaaatttcttatatttttgtcattcttttaatctatttcattccaaatttattttcctagtcatttatttttcttttctttctttctgattttcatatttagtgatagtgcttcttcctttcctttctttttgtttcttttcattccactctcttcctttgctttttcttcctcctcattcattcttccactcatttatttatattatttacttattcattttacttattttatgtgtgtataaaaaaacaactgccatgtatgctgtctcactaattttcataaaatgtgacaggatgcaaccttgtagataggaaaggaattgtgtataaccaaagtgttcccacctgcatggtgtccacccaagaggcagcaggatcc

SEQ ID NO: 30629 - DNA, 966 bp, Homo sapiens
attcatgaactgggcagctttaggaccagaagagattcagagagctctgcctcatcagttttggcagtggactttcataaggtgattatagaagcaaagtgaagaaattactgattggcaacagctcagcatttggcttatttgggcattatctgatggaaagtccctagttagaggttagctggaggtttctgattggttaagtctagttttgttttactggttacctcggacttcagtttgtttacacagaaaatcaaagtggtagagctctctcaacctaatgtcttctctattaactttgttaactgtatgtagaaacctaatattagtgaactatccttttagcatgattgattccaaatgtaaaaagtgataagagaacaaaaatcaccagatactttaaaaaccaatattttagagtaatctttccattgatatttgtccactctccttcagatgaaaccatcattctctttacatgtgtgactcccacagaatattgaaaaaacttgaaatgttgtttggaaaactaggcattttctaacaattgggtctttcttttattttcttttccagttactttaaatttcttatatttttgtcattcttttaatctatttcattccaaatttattttcctagtcatttatttttcttttctttctttctgattttcatatttagtgatagtgcttcttcctttcctttctttttgtttcttttcattccactctcttcctttgctttttcttcctcctcattcattcttccactcatttatttatattatttacttattcattttacttattttatgtgtgtataaaaaaacaactgccatgtatgctgtcycactaattttcataaaatgtgacaggatgcaaccttgtagataggaaaggaattgtgtataaccaaagtgttcccacctgcatggtgtccacccaagaggcagcaggatcc

SEQ ID NO: 30630 - DNA, 408 bp, Homo sapiens
ccttggtggacataattgaaaacactcaattccaaggagtaacrtcagcttcctaattcagttcctggctgaattaatagtattaacaagggctttgcagttggctgaagaaaaggtgagaaagatatacactgatagcctttatgcttttggagtagcccatgattttgtcatgcaatggaaacagaggtgatttctcaccatattgtggaaatctatgcaaaacaggcaccaaatcttggagctcttagaagcaaatcaaatgccaaagcagtttccactcataaaaattcctgggcgttcaaaagataacattgaagaagtaaagggagataatccagctcatgctgcagcaaagaatgctaccttagaaagatggcctgttctatatgagaatgtatcctttgc

SEQ ID NO: 30631 - DNA, 1030 bp, Homo sapiens
caactctttttctttcaaagaagaattgtaaagtataaatttggtattctcaaatttttggattgttcatctgaattttattttaggcatgccgttagttatattccaagtaaaccctaaaatagattttgtggaccatgaaaagtgaaaagtattggagaataaaaagtggaagggttgtgtagtgtgtgggtcgtacttaaaaatagaatataaaaatcaaactgcagcaaagcatggcatacattcaacaatgccttgtaaagatcaggaagccagaccagaatcaagggccttctgcaaataccagttcgtcctgtccaacatggttgattttcaaatagagtagtcattgctgtcttggtgaggctttaagtacacactgcaaaggaagccatacaagacactacaaagtccagacctggcatctcttcctcattatctcacatcctagacagctctacttttctgtcagattttgctctatcatgcttttccctaccaaatggtttcatttgtttcacatggtgtattatacatcacagctttccctccacccactatctctgccattcattcattctcatcttcctccatccctttcacttgcctccaagaaattttcttataaaacagtgtgcttattttccctaggttttatatgtatgtatgtgtgtttgtgtgcaaatagtctgtttgyttattcttcaagatggtggcatgaagagggacaagcaatgacatcatttgacataaaggatgcttaaaaatctaaatatttaaaacaatgattctgcttaagtatgtcatactttaacttacaaaaattaagcatgtcaatgattttaatagttggagagagattaagcaaggctgaccaagtaagtatatctttctgccaccagagacttaatcacaggcaataggtaagtgaggtttcaaagtaccttggggttgtttctgaaatatgcctagaaaaggaaatccattggttgcttcaaagagctaacatattgctagttatttagtt

SEQ ID NO: 30632 - DNA, 523 bp, Homo sapiens
tattcatatacaaagagtggaaatttttctttaaaaaaacctaccaaacaacaaaaacagtaaagttagttggttactagcagcaacaactgaaaagcagcatcaccaaaacatatgyaattcatgggtttccagcaaaagaggaaatctggaaagagaagatccttaagtattgctttaaagtgagcactgaaggacagccgttaaaacaatcccaatttttagaaaaggtattattccctgacatttacttgttttattcccttctcaatctgaagacacattttggacagatgctcttgtcttacatgaacattcaattcatttgagaaaataatggttatacttaaactcgtgaagtgaaatgtatggaagtctgttgctttataactttaaatagccatgtaacttgttcatggcagaatatagtcaagtcctgggcaaggactttttttctcttctccaataatgctattcaaggggaagctagttattgtgtgacacatgcttgattctcaggagg

SEQ ID NO: 30633 - DNA, 509 bp, Homo sapiens
tttccccagaatgatctatagtttaaatgtacttccaatcagaatcctgacaggttgatcctaaactttatatagaagagggataagactagccaagctcctagatatcaagccttattgtaaaaatataataaagtttamtgtgtggtatttgtgcacagataggcaaatagaataaaggaacagaacaaagaccccagaaacaggcccttacatgtatggaaacatgacaaaattgaaatatttgaataaaggagaagggatggcctattcagtaaatgatccagaaacaatatgtcatctgtatagaaaaaggcataaacagatccttaaactcacactatacaaaatcacacctgtaatcccagcactttgggaggccaaggcaggttacacaaggtcaggagtttgagaccagcctggccaacatggtgaaactccatctctactaaaaatacaaaaattaaccgggcatggtggcatgtgcctgtaatcccagctacttggga

SEQ ID NO: 30634 - DNA, 509 bp, Homo sapiens
tttccccagaatgatctatagtttaaatgtacttccaatcagaatcctgacaggttgatcctaaactttatatagaagagggataagactagccaagctcctagatatcaagccttattgtaaaaatataataaagtttactgtgtggtatttgtgcacagataggcaaatagaataaaggaacagaacaaagaccccagaaacaggcccttacatgtatggaaacatgacaaaattgaaatatttgaataaaggagaagggatggcctattcagtaaatgatccagaaacaatatgtcatctrtatagaaaaaggcataaacagatccttaaactcacactatacaaaatcacacctgtaatcccagcactttgggaggccaaggcaggttacacaaggtcaggagtttgagaccagcctggccaacatggtgaaactccatctctactaaaaatacaaaaattaaccgggcatggtggcatgtgcctgtaatcccagctacttggga

SEQ ID NO: 30635 - DNA, 1274 bp, Homo sapiens
tgcatccaagaagagttagtacctccctcatttgaattccaaaaatgatggtaatcctcaccaaccccacacaagagcagctcacattcattggacatttgctatgaccctggcaccatggggctcattatgtgaactatggctcacagcaatcagatgcggagggttctcttactaacacagcccccaggccccatagtgcacaagtggggaagccggaattcaaacccaagccctctgaccccacagccatgctcagaacccctgtgcactgcctggctccctgctggaacacttctaccctaaagcacagccactcctgtggctctgactctgatccactggcctcttagctccttgaagcaagggttgggtttctcatctttagaatcctacaacactgtagtggattccctaggagagccggagagtgtggttcttgaggtgatttattgagggagggctctcaggagaactataagaaactaagggaagcaagatagggccagaagaaaactaggggaagatgtgatttcagaagtctcacctctgcctgatcccgtggggagctttggagtgtaaattacatcacagtttgtcccactcagagacaaggaggctgggctctcatagctgccacccctatcagtcactccttcctataagtcataccctaatgagagggaaggcagctcagggtgagtgagacatctcccatcaggccagggcaatgctccagaggaaggtacagccacacccacagcacctgggggcatcaccctaatgaagtgcactggcagcatctgctgcagtcatcagttttaaaaaaatattaaacagcatatgcaggcccttcttgtccagctgatttcatcctctgtagtggacrctcccagaagccaagtctaatgaatcaatgaattagaaatcaatgtgtctcctgcagggctgcccacccctgccaccttttcccacaagactacactgcgcagacttcaatgggtgtccagcatccaccatcccatctgcaaagatcatggaagctgcaacacagaacattaactgaaatacaagcttgttcatcagggttttattttagcgccacactgcttccagtgaagaaaggacaggaaagaagtatggtggattgtttttttaactttgtagcacaaaagattgtggtgatccttccccaagagttgaaaataaaacatgaggagggaaaccactgcccccaaagccagtgctgctgatgagcaggtgtctgacatgca

SEQ ID NO: 30636 - DNA, 1274 bp, Homo sapiens
tgcatccaagaagagttagtacctccctcatttgaattccaaaaatgatggtaatcctcaccaaccccacacaagagcagctcacattcattggacatttgctatgaccctggcaccatggggctcattatgtgaactatggctcacagcaatcagatgcggagggttctcttactaacacagcccccaggccccatagtgcacaagtggggaagccggaattcaaacccaagccctctgaccccacagccatgctcagaacccctgtgcactgcctggctccctgctggaacacttctaccctaaagcacagccactcctgtggctctgactctgatccactggcctcttagctccttgaagcaagggttgggtttctcatctttagaatcctacaacactgtagtggattccctaggagagccggagagtgtggttcttgaggtgatttattgagggagggctctcaggagaactataagaaactaagggaagcaagatagggccagaagaaaactaggggaagatgtgatttcagaagtctcacctctgcctgatcccgtggggagctttggagtgtaaattacatcacagtttgtcccactcagagacaaggaggctgggctctcatagctgccacccctatcagtcactccttcctataagtcataccctaatgagagggaaggcagctcagggtgagtgagacatctcccatcaggccagggcaatgctccagaggaaggtacagccacacccacagcacctgggggcatcaccctaatgaagtgcactggcagcatctgctgcagtcatcagttttaaaaaaatattaaacagcatatgcaggcccttcttgtccagctgatttcatcctctgtagtggacactcccagaagccaagtctaatgaatcaatgaattagaaatcartgtgtctcctgcagggctgcccacccctgccaccttttcccacaagactacactgcgcagacttcaatgggtgtccagcatccaccatcccatctgcaaagatcatggaagctgcaacacagaacattaactgaaatacaagcttgttcatcagggttttattttagcgccacactgcttccagtgaagaaaggacaggaaagaagtatggtggattgtttttttaactttgtagcacaaaagattgtggtgatccttccccaagagttgaaaataaaacatgaggagggaaaccactgcccccaaagccagtgctgctgatgagcaggtgtctgacatgca

SEQ ID NO: 30637 - DNA, 1274 bp, Homo sapiens
tgcatccaagaagagttagtacctccctcatttgaattccaaaaatgatggtaatcctcaccaaccccacacaagagcagctcacattcattggacatttgctatgaccctggcaccatggggctcattatgtgaactatggctcacagcaatcagatgcggagggttctcttactaacacagcccccaggccccatagtgcacaagtggggaagccggaattcaaacccaagccctctgaccccacagccatgctcagaacccctgtgcactgcctggctccctgctggaacacttctaccctaaagcacagccactcctgtggctctgactctgatccactggcctcttagctccttgaagcaagggttgggtttctcatctttagaatcctacaacactgtagtggattccctaggagagccggagagtgtggttcttgaggtgatttattgagggagggctctcaggagaactataagaaactaagggaagcaagatagggccagaagaaaactaggggaagatgtgatttcagaagtctcacctctgcctgatcccgtggggagctttggagtgtaaattacatcacagtttgtcccactcagagacaaggaggctgggctctcatagctgccacccctatcagtcactccttcctataagtcataccctaatgagagggaaggcagctcagggtgagtgagacatctcccatcaggccagggcaatgctccagaggaaggtacagccacacccacagcacctgggggcatcaccctaatgaagtgcactggcagcatctgctgcagtcatcagttttaaaaaaatattaaacagcatatgcaggcccttcttgtccagctgatttcatcctctgtagtggacactcccagaagccaagtctaatgaatcaatgaattagaaatcaatgtgtctcctgcagggctgcccacccctgccaccttttcccacaagactacactgcgcagacttcaatgggtgtccagcatccaccatcccatctgcaaagatcatggaagctgcaacacagaacattaactgaaatacaagcttgttcatcagggttttattttagcgccacactgcttccagtgaagaaaggacaggaaagaagtatggtggattktttttttaactttgtagcacaaaagattgtggtgatccttccccaagagttgaaaataaaacatgaggagggaaaccactgcccccaaagccagtgctgctgatgagcaggtgtctgacatgca

SEQ ID NO: 30638 - DNA, 1243 bp, Homo sapiens
cctctattaatgaccatatcattagaagctttggttgtaagcaacggtaatcctgactcaaacttacaaaaaaaaaaaagaaaagaaaamcagaatttgttggttcatgcatctggaaagtctaggttcaggcttcaggcacagcttgatccaggacttgaataacatcacctgcacctagtgtctcttccatcatccctcggctctgccctctgccatattacctccattctcagtcgggtcctatacgcacatggttgcaagatgactcagcagctccagctcttcatatgccaggttcaagtctagtgggaggaagtagagtcctaggaaattttttgctgtaactcactggcactggttgaatcctgtgtccctcaactatggtctggggaactcactgctactcctgagccaggctgaatgtcagagataggctagttcccagagggaaatggaaggtacctgaccaaagaaagggagaatggatgctgggcagcaaagaacaaagattccaccttcatgactgatcaggctcattgcatttctcttgctagtcctaagccaaagagatggacatctaattgtgaaattaggtaccacctgcatggaagggtatttgaggaacaagaccaccttaccaatgccctgagacctgataagctggtttactcctcaggcactgtggaaaagcaactcacaaccagacttcattcccagaatagccccgtcaccatgcagccctaagcaccagctgtgcaggcaccttcccgttttctgtatgaaaggcaacctgcctatttttgaagccttagagtaagaccatcggtacagtgtgaacagttcacatctttacattgggaaaatctcttttaacagctttccagaccacaaagaatatgtccaagtaggaaatatttcctgtagatagatgtatatggccaaatcttcaacatggagctattgggagcaatgaaaggaagctgccgtaatcttgaccaatagcagtaactatgattgagtacccaccatgtgccaggcatcattctaactcattacgtgtcatacagcaaccccagagagtgaggatgaatacccgcttttagggatccaggcacctgagcccacacagcagatcccagaccccatttgtttttgttactcatttcaactttgattttaaattcaggggatacatgtgcagatttgttacaatattgcatgaggctaaagtttggggtat

SEQ ID NO: 30639 - DNA, 1243 bp, Homo sapiens
cctctattaatgaccatatcattagaagctttggttgtaagcaacggtaatcctgactcaaacttacaaaaaaaaaaaagaaaagaaaaccagaatttgttggttcatgcatctggaaagtctaggttcaggcttcaggcacagcttgatccaggacttgaataacatcacctgcacctagtgtctcttccatcatccctcggctctgccctctgccatattacctccattctcagtcgggtcctatacgcacatggttgcaagatgactcagcagctccagctcttcatatgccaggttcaagtctrgtgggaggaagtagagtcctaggaaattttttgctgtaactcactggcactggttgaatcctgtgtccctcaactatggtctggggaactcactgctactcctgagccaggctgaatgtcagagataggctagttcccagagggaaatggaaggtacctgaccaaagaaagggagaatggatgctgggcagcaaagaacaaagattccaccttcatgactgatcaggctcattgcatttctcttgctagtcctaagccaaagagatggacatctaattgtgaaattaggtaccacctgcatggaagggtatttgaggaacaagaccaccttaccaatgccctgagacctgataagctggtttactcctcaggcactgtggaaaagcaactcacaaccagacttcattcccagaatagccccgtcaccatgcagccctaagcaccagctgtgcaggcaccttcccgttttctgtatgaaaggcaacctgcctatttttgaagccttagagtaagaccatcggtacagtgtgaacagttcacatctttacattgggaaaatctcttttaacagctttccagaccacaaagaatatgtccaagtaggaaatatttcctgtagatagatgtatatggccaaatcttcaacatggagctattgggagcaatgaaaggaagctgccgtaatcttgaccaatagcagtaactatgattgagtacccaccatgtgccaggcatcattctaactcattacgtgtcatacagcaaccccagagagtgaggatgaatacccgcttttagggatccaggcacctgagcccacacagcagatcccagaccccatttgtttttgttactcatttcaactttgattttaaattcaggggatacatgtgcagatttgttacaatattgcatgaggctaaagtttggggtat

SEQ ID NO: 30640 - DNA, 1243 bp, Homo sapiens
cctctattaatgaccatatcattagaagctttggttgtaagcaacggtaatcctgactcaaacttacaaaaaaaaaaaagaaaagaaaaccagaatttgttggttcatgcatctggaaagtctaggttcaggcttcaggcacagcttgatccaggacttgaataacatcacctgcacctagtgtctcttccatcatccctcggctctgccctctgccatattacctccattctcagtcgggtcctatacgcacatggttgcaagatgactcagcagctccagctcttcatatgccaggttcaagtctagtgggaggaagtagagtcctaggaaattttttgctgtaactcactggcactggttgaatcctgtgtccctcaactatggtctggggaactcactgctactcctgagccaggctgaatgtcagagataggctagttcccagagggaaatggaaggtacctgaccaaagaaagggagaatggatgctgggcagcaaagaacaaagattccaccttcatgactgatcaggctcattgcatttctcttgctagtcctaagccaaagagatggacatctaattgtgaaattaggtaccacctgcatggaagggtatttgaggaacaagaccaccttaccaatgccctgagacctgataagctggtttactcctcaggcactgtggaaaagcaactcacaaccagacttcattcccagaatagccccgtcaccatgcagccctaagcaccagctgtgcaggcaccttcccgttttctgtrtgaaaggcaacctgcctatttttgaagccttagagtaagaccatcggtacagtgtgaacagttcacatctttacattgggaaaatctcttttaacagctttccagaccacaaagaatatgtccaagtaggaaatatttcctgtagatagatgtatatggccaaatcttcaacatggagctattgggagcaatgaaaggaagctgccgtaatcttgaccaatagcagtaactatgattgagtacccaccatgtgccaggcatcattctaactcattacgtgtcatacagcaaccccagagagtgaggatgaatacccgcttttagggatccaggcacctgagcccacacagcagatcccagaccccatttgtttttgttactcatttcaactttgattttaaattcaggggatacatgtgcagatttgttacaatattgcatgaggctaaagtttggggtat

SEQ ID NO: 30641 - DNA, 1243 bp, Homo sapiens
cctctattaatgaccatatcattagaagctttggttgtaagcaacggtaatcctgactcaaacttacaaaaaaaaaaaagaaaagaaaaccagaatttgttggttcatgcatctggaaagtctaggttcaggcttcaggcacagcttgatccaggacttgaataacatcacctgcacctagtgtctcttccatcatccctcggctctgccctctgccatattacctccattctcagtcgggtcctatacgcacatggttgcaagatgactcagcagctccagctcttcatatgccaggttcaagtctagtgggaggaagtagagtcctaggaaattttttgctgtaactcactggcactggttgaatcctgtgtccctcaactatggtctggggaactcactgctactcctgagccaggctgaatgtcagagataggctagttcccagagggaaatggaaggtacctgaccaaagaaagggagaatggatgctgggcagcaaagaacaaagattccaccttcatgactgatcaggctcattgcatttctcttgctagtcctaagccaaagagatggacatctaattgtgaaattaggtaccacctgcatggaagggtatttgaggaacaagaccaccttaccaatgccctgagacctgataagctggtttactcctcaggcactgtggaaaagcaactcacaaccagacttcattcccagaatagccccgtcaccatgcagccctaagcaccagctgtgcaggcaccttcccgttttctgtatgaaaggcaacctgcctatttttgaagccttagagtaagaccatcggtacagtgtgaacagttcacatctttacattgggaaaatctcttttaacagctttccagaccacaaagaatatgtccaagtaggaaatatttcctgtagayagatgtatatggccaaatcttcaacatggagctattgggagcaatgaaaggaagctgccgtaatcttgaccaatagcagtaactatgattgagtacccaccatgtgccaggcatcattctaactcattacgtgtcatacagcaaccccagagagtgaggatgaatacccgcttttagggatccaggcacctgagcccacacagcagatcccagaccccatttgtttttgttactcatttcaactttgattttaaattcaggggatacatgtgcagatttgttacaatattgcatgaggctaaagtttggggtat

SEQ ID NO: 30642 - DNA, 1243 bp, Homo sapiens
cctctattaatgaccatatcattagaagctttggttgtaagcaacggtaatcctgactcaaacttacaaaaaaaaaaaagaaaagaaaaccagaatttgttggttcatgcatctggaaagtctaggttcaggcttcaggcacagcttgatccaggacttgaataacatcacctgcacctagtgtctcttccatcatccctcggctctgccctctgccatattacctccattctcagtcgggtcctatacgcacatggttgcaagatgactcagcagctccagctcttcatatgccaggttcaagtctagtgggaggaagtagagtcctaggaaattttttgctgtaactcactggcactggttgaatcctgtgtccctcaactatggtctggggaactcactgctactcctgagccaggctgaatgtcagagataggctagttcccagagggaaatggaaggtacctgaccaaagaaagggagaatggatgctgggcagcaaagaacaaagattccaccttcatgactgatcaggctcattgcatttctcttgctagtcctaagccaaagagatggacatctaattgtgaaattaggtaccacctgcatggaagggtatttgaggaacaagaccaccttaccaatgccctgagacctgataagctggtttactcctcaggcactgtggaaaagcaactcacaaccagacttcattcccagaatagccccgtcaccatgcagccctaagcaccagctgtgcaggcaccttcccgttttctgtatgaaaggcaacctgcctatttttgaagccttagagtaagaccatcggtacagtgtgaacagttcacatctttacattgggaaaatctcttttaacagctttccagaccacaaagaatatgtccaagtaggaaatatttcctgtagatagatgtatatggccaaatcttcaacatggagctattgggagcaatgaaaggaagctgccgtaatcttgaccaatagcagtaactatgattgagtacccaccatgtgccaggcatcattctaactcattacrtgtcatacagcaaccccagagagtgaggatgaatacccgcttttagggatccaggcacctgagcccacacagcagatcccagaccccatttgtttttgttactcatttcaactttgattttaaattcaggggatacatgtgcagatttgttacaatattgcatgaggctaaagtttggggtat

SEQ ID NO: 30643 - DNA, 1243 bp, Homo sapiens
cctctattaatgaccatatcattagaagctttggttgtaagcaacggtaatcctgactcaaacttacaaaaaaaaaaaagaaaagaaaaccagaatttgttggttcatgcatctggaaagtctaggttcaggcttcaggcacagcttgatccaggacttgaataacatcacctgcacctagtgtctcttccatcatccctcggctctgccctctgccatattacctccattctcagtcgggtcctatacgcacatggttgcaagatgactcagcagctccagctcttcatatgccaggttcaagtctagtgggaggaagtagagtcctaggaaattttttgctgtaactcactggcactggttgaatcctgtgtccctcaactatggtctggggaactcactgctactcctgagccaggctgaatgtcagagataggctagttcccagagggaaatggaaggtacctgaccaaagaaagggagaatggatgctgggcagcaaagaacaaagattccaccttcatgactgatcaggctcattgcatttctcttgctagtcctaagccaaagagatggacatctaattgtgaaattaggtaccacctgcatggaagggtatttgaggaacaagaccaccttaccaatgccctgagacctgataagctggtttactcctcaggcactgtggaaaagcaactcacaaccagacttcattcccagaatagccccgtcaccatgcagccctaagcaccagctgtgcaggcaccttcccgttttctgtatgaaaggcaacctgcctatttttgaagccttagagtaagaccatcggtacagtgtgaacagttcacatctttacattgggaaaatctcttttaacagctttccagaccacaaagaatatgtccaagtaggaaatatttcctgtagatagatgtatatggccaaatcttcaacatggagctattgggagcaatgaaaggaagctgccgtaatcttgaccaatagcagtaactatgattgagtacccaccatgtgccaggcatcattctaactcattacgtgtcatacagcaaccccagagagtgaggatgaatacccgcttttagggrtccaggcacctgagcccacacagcagatcccagaccccatttgtttttgttactcatttcaactttgattttaaattcaggggatacatgtgcagatttgttacaatattgcatgaggctaaagtttggggtat

SEQ ID NO: 30644 - DNA, 1243 bp, Homo sapiens
cctctattaatgaccatatcattagaagctttggttgtaagcaacggtaatcctgactcaaacttacaaaaaaaaaaaagaaaagaaaaccagaatttgttggttcatgcatctggaaagtctaggttcaggcttcaggcacagcttgatccaggacttgaataacatcacctgcacctagtgtctcttccatcatccctcggctctgccctctgccatattacctccattctcagtcgggtcctatacgcacatggttgcaagatgactcagcagctccagctcttcatatgccaggttcaagtctagtgggaggaagtagagtcctaggaaattttttgctgtaactcactggcactggttgaatcctgtgtccctcaactatggtctggggaactcactgctactcctgagccaggctgaatgtcagagataggctagttcccagagggaaatggaaggtacctgaccaaagaaagggagaatggatgctgggcagcaaagaacaaagattccaccttcatgactgatcaggctcattgcatttctcttgctagtcctaagccaaagagatggacatctaattgtgaaattaggtaccacctgcatggaagggtatttgaggaacaagaccaccttaccaatgccctgagacctgataagctggtttactcctcaggcactgtggaaaagcaactcacaaccagacttcattcccagaatagccccgtcaccatgcagccctaagcaccagctgtgcaggcaccttcccgttttctgtatgaaaggcaacctgcctatttttgaagccttagagtaagaccatcggtacagtgtgaacagttcacatctttacattgggaaaatctcttttaacagctttccagaccacaaagaatatgtccaagtaggaaatatttcctgtagatagatgtatatggccaaatcttcaacatggagctattgggagcaatgaaaggaagctgccgtaatcttgaccaatagcagtaactatgattgagtacccaccatgtgccaggcatcattctaactcattacgtgtcatacagcaaccccagagagtgaggatgaatacccgcttttagggatccaggcacctgagcccacacagcagatcccagaccccatttgtttttgttamtcatttcaactttgattttaaattcaggggatacatgtgcagatttgttacaatattgcatgaggctaaagtttggggtat

SEQ ID NO: 30645 - DNA, 1083 bp, Homo sapiens
ttcctcattttttgaaaacttattcgattatattttcctactgcaaaaaatatcrttataaagagttcttagaaaaattatgaaaacacacatttttattctcttggctcataatgatttgaataataatttattcaatgtgttttattgataatctactaagtgttcagccctttccttcacttggagtatttggaaaacattttgatcttcctagtctattctattctctactgactgtaatggtcaaaggaaggattcacttccaaaaatcagttacttttcatcagccttgtgcttagggaacggtatgaagtaggcaacatttaacttcttcttgcccaagtttctcttcctggactcttagctcttcttatacctatttttaatatctcaataaacctattccctcccaactctctcccataacagtaatcaggctctcttctaatatattgtttccctcaatgttcccctccacctgtaaaggtatttttggggaaagatctgacaaatatattccttcatatatgtaaataattgcaagtatataataatttaataagggaatgtagtgtatcaaacccaaagaaaaaacatgatttaaatctgtctctgagtaggtagaatttgagattttaaaaccaaattgtgagggaacaattctatttattgaaggtacactgtgcaccggatgctgataatggtgatttcatgtatattctctgcttttatctgtatagtaacctcatggttagatattccgctttttgtatatatagatagagaactgtgtttgagaaagattaagcaatatgctaaaggttacaaagtccgtaagtggcaaaactgggattcatatccaggtctgcctgcaaaatgtgcacttttctttttaattgcattgtatctttgtgcttcagaaatgatgttttggaaagagctataaacccctgaggctggtcatgtttaaagccctacagaagtacacttttaactttcattattgccatgtgacactatttaaattttaaaacttctctcacagtttgaaccacattttctcattcagtctggatctca

SEQ ID NO: 30646 - DNA, 1083 bp, Homo sapiens
ttcctcattttttgaaaacttattcgattatattttcctactgcaaaaaatatcgttataaagagttcttagaaaaattatgaaaacacacatttttattctcttggctcataatgatttgaataataatttattcaatgtgttttattgataatctactaagtgttcagccctttccttcacttggagtatttggaaaacattttgatcttcctagtctattctattctctactgactgtaatggtcaaaggaaggattcacttccaaaaatcagttacttttcatcagccttgtgcttagggaacggtatgaagtaggcaacatttaacttcttcttgcccaagtttctcttcctggactcttagctcttcttatacctatttttaatatctcaataaacctattccctcccaactctctcccataacagtaatcaggctctcttctaatatattgtttccctcaatgttcccctccacctgtaaaggtatttttggggaaagatctgacaaatatattccttcatatatgtaaataattgcaagtatataataatttaataagggaatgtagtgtatcaaacccaaagaaaaaacatgatttaaatctgtctctgagtaggtagaatttgagattttaaaaccaaattgtgagggaacaattctatttattgaaggtacactgtgcaccggatgctgataatggtgatttcatgtatattctctgyttttatctgtatagtaacctcatggttagatattccgctttttgtatatatagatagagaactgtgtttgagaaagattaagcaatatgctaaaggttacaaagtccgtaagtggcaaaactgggattcatatccaggtctgcctgcaaaatgtgcacttttctttttaattgcattgtatctttgtgcttcagaaatgatgttttggaaagagctataaacccctgaggctggtcatgtttaaagccctacagaagtacacttttaactttcattattgccatgtgacactatttaaattttaaaacttctctcacagtttgaaccacattttctcattcagtctggatctca

SEQ ID NO: 30647 - DNA, 1083 bp, Homo sapiens
ttcctcattttttgaaaacttattcgattatattttcctactgcaaaaaatatcgttataaagagttcttagaaaaattatgaaaacacacatttttattctcttggctcataatgatttgaataataatttattcaatgtgttttattgataatctactaagtgttcagccctttccttcacttggagtatttggaaaacattttgatcttcctagtctattctattctctactgactgtaatggtcaaaggaaggattcacttccaaaaatcagttacttttcatcagccttgtgcttagggaacggtatgaagtaggcaacatttaacttcttcttgcccaagtttctcttcctggactcttagctcttcttatacctatttttaatatctcaataaacctattccctcccaactctctcccataacagtaatcaggctctcttctaatatattgtttccctcaatgttcccctccacctgtaaaggtatttttggggaaagatctgacaaatatattccttcatatatgtaaataattgcaagtatataataatttaataagggaatgtagtgtatcaaacccaaagaaaaaacatgatttaaatctgtctctgagtaggtagaatttgagattttaaaaccaaattgtgagggaacaattctatttattgaaggtacactgtgcaccggatgctgataatggtgatttcatgtatattctctgcttttatctgtatagtaacctcatggttagatattccgctttttgtatatatagatagagaactgtgtttgagaaagattaagcaatatgctraaggttacaaagtccgtaagtggcaaaactgggattcatatccaggtctgcctgcaaaatgtgcacttttctttttaattgcattgtatctttgtgcttcagaaatgatgttttggaaagagctataaacccctgaggctggtcatgtttaaagccctacagaagtacacttttaactttcattattgccatgtgacactatttaaattttaaaacttctctcacagtttgaaccacattttctcattcagtctggatctca

SEQ ID NO: 30648 - DNA, 471 bp, Homo sapiens
cttctctaattcagtggtctttcatttcatcctgtgtcattcattttctatatctgtcatcaatcaaatttgtctctaatatatacttgctaagtttccctgataatcaccttctctaaagtaccatgccagaacctttaatcttcccaaaagtgtgcctttctttggtcataattaaatgataattktaaagccctacatgatcccagctaagaagatgtgggtaataaaatgaatgtcattttgcttctgatatctgaatttcctgctggactggatataaattaagaaggaaaagaaagtatctttttgtagataaatgtatgaaataaagtttttgatgataattacagttttcctacctgtttctgaagttaaaatttcatatagaaaattgtaatttttgaaaggagacataatgtctctctatataggtaacccagatatcacttatagccttgactgagtggt

SEQ ID NO: 30649 - DNA, 645 bp, Homo sapiens
tcctgccaaatacaagtgtcccatttcagctgccaatttcatgaggcagatgaattactctgagtaacacatgacttgaagggcatccacttctgtgatgacttcaaagatctatcaacaataaactggggcaacatctaccaaaagggctgctggcaacttgcactaactttgcacatctgaaagttttctgccccaaaagaccgwgtcttccaggggccagcgctgtcctaaaataaactttgggctcacctgatcaaatcctcttaatttaaaagtaaccatactgataattagggtgaaaataattaagatattgaatgcagtggttaagagactcccggatgcatattctaagctctgctacttattatgtcattttccaataattaattaacctctctgtgcctgttgcctcatctgtaaaattgatgcaatttagcagtgtctacagtaataagtatttttcaaccatcttccattttagaaaaagtcctccctcgaaaatgggaatgtttgagcaagtatatgggtttgggaaggacatgtttggagaagtgagaaaagaagtgtgcatatacctaactgtagccaaaccagattaatcctggtaataaatgatggaacagtgtcactttctgagat

SEQ ID NO: 30650 - DNA, 645 bp, Homo sapiens
tcctgccaaatacaagtgtcccatttcagctgccaatttcatgaggcagatgaattactctgagtaacacatgacttgaagggcatccacttctgtgatgacttcaaagatctatcaacaataaactggggcaacatctaccaaaagggctgctggcaacttgcactaactttgcacatctgaaagttttctgccccaaaagaccgagtcttccaggggccagcgctgtcctaaaataaactttgggctcacctgatcaaatcctcttaatttaaaagtaaccatactgataattagggtgaaaataattaagatattgaatgcagtggttaagagactcccggatgcatattctaagctctgctacttattatgtcattttccaataattaattaacctctctgtgcctgttgcctcatctgtaaaattgatgcaatttagcagtrtctacagtaataagtatttttcaaccatcttccattttagaaaaagtcctccctcgaaaatgggaatgtttgagcaagtatatgggtttgggaaggacatgtttggagaagtgagaaaagaagtgtgcatatacctaactgtagccaaaccagattaatcctggtaataaatgatggaacagtgtcactttctgagat

SEQ ID NO: 30651 - DNA, 645 bp, Homo sapiens
tcctgccaaatacaagtgtcccatttcagctgccaatttcatgaggcagatgaattactctgagtaacacatgacttgaagggcatccacttctgtgatgacttcaaagatctatcaacaataaactggggcaacatctaccaaaagggctgctggcaacttgcactaactttgcacatctgaaagttttctgccccaaaagaccgagtcttccaggggccagcgctgtcctaaaataaactttgggctcacctgatcaaatcctcttaatttaaaagtaaccatactgataattagggtgaaaataattaagatattgaatgcagtggttaagagactcccggatgcatattctaagctctgctacttattatgtcattttccaataattaattaacctctctgtgcctgttgcctcatctgtaaaattgatgcaatttagcagtgtctacagtaataagtatttttcaaccatcttccattttagaaaaagtcctccctcgaaamtgggaatgtttgagcaagtatatgggtttgggaaggacatgtttggagaagtgagaaaagaagtgtgcatatacctaactgtagccaaaccagattaatcctggtaataaatgatggaacagtgtcactttctgagat

SEQ ID NO: 30652 - DNA, 616 bp, Homo sapiens
tcatccagaaaaagtggccctacataacaccacaacagagagttatgaacttttgcccagttccaaaacctaatccagtttacaaacccaagtctcctcaataagaagtcaagatttccttgagaaaaacatatactataraactttgctctagttttttccagagagacctgcagccacttaccagaaaggactatacattggagaagagaatataggacgaaagtggatactggctcaaaattaatctccaaggatcaaaattttacttcaatccatcagaaattcccctctctgttaagtataaaacaagaccatacttcttgaagaagaaaaatgttttgagctaccatcaaagactgaagaggcgaaggtatggtgtctcctatcacatcatgattcaattctcctatttcaaccgtacagaagagtgatgagtcttgagttatgacagtggcttactataaggacataaattcaaattaacatttatagaaaactgcatccaacaacagcaaaatacattttttcctgtttacatggaataatcacaaagataaaagatgtcatgagtcatgaaaaaaattgtactaaatatgaaagaataaaaatgatg

SEQ ID NO: 30653 - DNA, 555 bp, Homo sapiens
ctggcataaaaagacacaagaactgttaaatactgaagtgatagtgtgcatttttagttttgtattaatttcaacttaattcatgacaatccttaggcacattctctcaggtccttcttatatgttttttttaatgtattttgttttttattttgtttatgggaaataagagcaattcatttctctgtagttatttgaacaaagataaccaggaagttcttcagacctggacatcaccttgtggccggaacaacttgagatctggttygggttttatcacgtgttatccacaagacttccctgagcctcaatttcctcatgcagaaaataaggaaagcatctgcatggcttaccgtcaaaaaaccatcctatgaggaccacagtgaaaagtataaagtgcctaaaaatgggacttttttttgcgtttctgttgaccctgagtcctcacttcttggagcatttattaagtgaaagttttctccaaattttttagtagctatcttgttctggtgtagaatgagtcacctgcataagaaactaaaggagttttgctaa

SEQ ID NO: 30654 - DNA, 403 bp, Homo sapiens
  misc_feature (1)...(403): n = A,T,C or G
ccactgcaatgcctgccttgggggtgggagtgagggtgcaggagagctcctgaccccagctgctcttgtacacaccttccagagcgccccgtgtctaccctagctcagcctgtccagcagagacagctgctccctcagccccctgtttttctggggtctgcagctccaacgagtttgcttctacgcctctcctctatgctggccttcagatgctaacgttctctggtctgtcatagttgaccgtctaccttctgtctttcaggattctatcagcttctntcaactgcagaatctccttgtctctttgaattcattggttaatttttaaaaaaaaaattcctttratgccattttagcagacttttgggagagaatcaagataaagccacgtgttcaatctgca

SEQ ID NO: 30655 - DNA, 1248 bp, Homo sapiens
tgcatccatctactattccagtaggcggcgtcctcacctctccatcagcaccatctttacattggcagccagggctgcagtctctcaccctaatttatacagcaaattaaacagctgaaatccatgtmttcgggcgtctggggcaatcttacggtgtctagaagcaacagataaaagggttagtgcttttcttctgcataaaactgtagtgtatagttcagccctggtcttattttgtagctgaatttagtttgaaggttggattctcttcaatgttagatataatgttgaacttaatgctgaatattttcaaaacactaaaagtactaaaatttgtctttaagttgttttgtttgaattcacatcagtcatttatttgaggggtagggtatagtggctaggagtaccagaaccagacttcccagaattcaaattctgcctctctcaaactaagaattttgtgattctgggcaaattgctcaatagataagattttccatctataaaatggagttgattattaaatgagttaatataaaaaacactgagcacagtacctggtatataaaacgtaataggccgggcacagaggctcatgcctataatcccagcactttggtaggccgaggtgggtggatcacttgggatcaggaatctgagaccagcctggccaacatggcgaaattccatctctactaaaaatacaaaaattagctaggtgtggtggtgcacgcctatagtcccagctactcgggaggctgaggtgggagaattgtttaaacccaggacgtggaggttgcagtgagccaagatcacgccactgcactctatcctgggtgacagagcgagattccatctaaaaaaaaaaaaaagaaaccttaataaacgttagttatcacttgaaggtatttaatgtttttttatatgtgcatttatgtacatacaggattcaaattccgctttatgatcaacagggaattgggactatgttactgacttctgactaatacccgtctaaaattcctttaccctttccacttagacgcagccctcgagttatgcggcccccatttcccaccacaataaagatccacctctctatcccaggttttattccatcatatttaaggcttggatgtaatttttggaacaattgactgctttatttagttggtggggagaggagtaggagagagaagcaaattacagtcaatgacaggaccagggattctgagcatacctgcatgt

SEQ ID NO: 30656 - DNA, 1248 bp, Homo sapiens
tgcatccatctactattccagtaggcggcgtcctcacctctccatcagcaccatctttacattggcagccagggctgcagtctctcaccctaatttatacagcaaattaaacagctgaaatccatgtcttcgggcrtctggggcaatcttacggtgtctagaagcaacagataaaagggttagtgcttttcttctgcataaaactgtagtgtatagttcagccctggtcttattttgtagctgaatttagtttgaaggttggattctcttcaatgttagatataatgttgaacttaatgctgaatattttcaaaacactaaaagtactaaaatttgtctttaagttgttttgtttgaattcacatcagtcatttatttgaggggtagggtatagtggctaggagtaccagaaccagacttcccagaattcaaattctgcctctctcaaactaagaattttgtgattctgggcaaattgctcaatagataagattttccatctataaaatggagttgattattaaatgagttaatataaaaaacactgagcacagtacctggtatataaaacgtaataggccgggcacagaggctcatgcctataatcccagcactttggtaggccgaggtgggtggatcacttgggatcaggaatctgagaccagcctggccaacatggcgaaattccatctctactaaaaatacaaaaattagctaggtgtggtggtgcacgcctatagtcccagctactcgggaggctgaggtgggagaattgtttaaacccaggacgtggaggttgcagtgagccaagatcacgccactgcactctatcctgggtgacagagcgagattccatctaaaaaaaaaaaaaagaaaccttaataaacgttagttatcacttgaaggtatttaatgtttttttatatgtgcatttatgtacatacaggattcaaattccgctttatgatcaacagggaattgggactatgttactgacttctgactaatacccgtctaaaattcctttaccctttccacttagacgcagccctcgagttatgcggcccccatttcccaccacaataaagatccacctctctatcccaggttttattccatcatatttaaggcttggatgtaatttttggaacaattgactgctttatttagttggtggggagaggagtaggagagagaagcaaattacagtcaatgacaggaccagggattctgagcatacctgcatgt

SEQ ID NO: 30657 - DNA, 1248 bp, Homo sapiens
tgcatccatctactattccagtaggcggcgtcctcacctctccatcagcaccatctttacattggcagccagggctgcagtctctcaccctaatttatacagcaaattaaacagctgaaatccatgtcttcgggcgtctggggcaatcttacggtgtctagaagcaacagataaaagggttagtgcttttcttctgcataaaactgtagtgtatagttcagccctggtcttattttgtagctgaatttagtttgaaggttggattctcttcaatgttagatataatgttgaacttaatgctgaatattttcaaaacactaaaagtactaaaatttgtctttaagttgttttgtttgaattcacatcagtcatttatttgaggggtagggtatagtggctaggagtaccagaaccagacttcccagaattcaaattctgcctctctcaaactaagaattttgtgattctgggcaaaytgctcaatagataagattttccatctataaaatggagttgattattaaatgagttaatataaaaaacactgagcacagtacctggtatataaaacgtaataggccgggcacagaggctcatgcctataatcccagcactttggtaggccgaggtgggtggatcacttgggatcaggaatctgagaccagcctggccaacatggcgaaattccatctctactaaaaatacaaaaattagctaggtgtggtggtgcacgcctatagtcccagctactcgggaggctgaggtgggagaattgtttaaacccaggacgtggaggttgcagtgagccaagatcacgccactgcactctatcctgggtgacagagcgagattccatctaaaaaaaaaaaaaagaaaccttaataaacgttagttatcacttgaaggtatttaatgtttttttatatgtgcatttatgtacatacaggattcaaattccgctttatgatcaacagggaattgggactatgttactgacttctgactaatacccgtctaaaattcctttaccctttccacttagacgcagccctcgagttatgcggcccccatttcccaccacaataaagatccacctctctatcccaggttttattccatcatatttaaggcttggatgtaatttttggaacaattgactgctttatttagttggtggggagaggagtaggagagagaagcaaattacagtcaatgacaggaccagggattctgagcatacctgcatgt

SEQ ID NO: 30658 - DNA, 597 bp, Homo sapiens
atttaagaaattatagctgcatatcccttctttcaaaaaatgttgcttttttttttaaaggaattttaatatattcctttaaaagaaagcaatttaatcaattgcaaagcaattatataaaaccacaaagaatgtactgaacctactaaccctttaacatacagtttagggtcctagcgcagagtccttgtttaaaggtcattgactcatcatctgtcagtaatgagaggattggaagaataattttgcatacaaatgaggacttaatttgttgaaatataatctctttaagttccttgaaaatggagttggttttttttgtttctaaatgctatctgcttttaactagtagttgcctacatctggggacttcagagaagaattatattttgttagttaagtagacacagtggttatggaagcatttctttacagtaccctttacrtgtttggtttctgaacttaaaattgccctcatacttaataatatggtctgcatttaatatgaaaggtgttttattgataaatctattgtactatttggatacatttgtgtattccttgcagccaacctgtattcgtgggattggtgtaggg

SEQ ID NO: 30659 - DNA, 690 bp, Homo sapiens
cggttgtgcctcagtcgacatggaagtttggttccaggacctccacatataccaaaattcacgcatactcaagtctcacagttagccttgtggaaccagctgacaaaaagttggccctcagtatatgcaggttttgcatcccacaaatactgtattgtcaatccacatttggttgaaataaatttacatgtaagtggactcctgaagttcaaaccatgttgttgaagkgttaactatacttaactttataaataccatcagcaacaaccatattacctttttcctaggaaaaatatctgatggtatttataaagttaagtatatttaaatcctttatctgtcaaatattaattttagaatctgataaggtttaattatttattaaccagattattcctcttctacaatttgactagttgattatgtggcaaataaggacaccaatcacaccaaggtgggttgatattataacactatagggtacctatgacttacaagagtcctctactgagtatgaaaacttgtatcctgccaagtctgcctgaagtccatcaatctttattatacttattttaaaggaatcatccattttgcaaaacttttaatttccaaaatttgtatgctttaaatttgggaactttgtgcacagtattaaaaaaccatttaggatgatcctttaataagatttat

SEQ ID NO: 30660 - DNA, 1331 bp, Homo sapiens
tttgccacctataattatgtatgtaaaatttatccaggatgattcctgtagttctagttttattttaactgctgaatagtattccattgtataattgtaccaccatttatccattctccagttgctagcaatttmatgattcctgatttctgtcattataacatgagttagttcttgcacacagcttcttagacatatggtaagaatttccttaggataatgtctagaaatggaattgcaaggtggaagggtttgcacagttcaactttgatattgccaaattgttctccagtggttgtactaacttaccctccatcagcaatgtaggagagctgctgttgctccattccatgccaacacaggttatttttttgccccagtttttttgttttgttgtttggttttttttttgctgttaccaactgctgacagtaaattttcttgtacatgtttcctggtacacgtgtgcaagagtttctctgactataaagctaatgcagttattaactctattttgttttcggtatgttttttaaaagcatgtacatgtccccctcatttgagatttctccctgttaatactaacacttaacttattcatagatatatctcactcatttttttctatgtatcatgcttcctgttctctttactgcctttggtttgacagtctttttttccagtttttttcccgcttaagtggtttgaaagttatatttgatttttattctatgaatagtagttactcttctaactcatttaaaggtgtatctttatatatatgtgtgtgtgtgtgtttagaattcatcagtatccatatgaggcagtctgtgtagtggttaagagtggagcctgtgaggccagactgcctggattcagatcctagcactaccacttattagctgagtaacctagagcttattacataaactctctgtgcctcagttgtttcatctgtaaagtggggataatacagcatatacctcatgaggttgttctaagattaatatgttaatatatgtaacattcttaggacagtgcctaatgcttggatctctttaccagatttttcatctatggaatgggcagaagacttgcctatcagagttgttacaaaaattcagtgcattagtgtattcattcattttaatacactgagcacctgctgtgcacttttgaattagacatggttctcggcttcagtggtctcataagggaacagacatgaaatgcaatttcaatacgatttaaccttaatactcttcccatgttctctcttgtcccccttctaatctgtgctccacattaagaggcaaaacattaatcagatc

SEQ ID NO: 30661 - DNA, 543 bp, Homo sapiens
tggtacatgaaaaaataaaataaaacactcatccttctactatattagaaacataatttgtttcaaatcataaaagaataatgcatttacttttacattgtgctgctattgtttcttaaccagctttagcaagtgtgaagaaacactgggcagtgtaactagaagaccctgtttttattctcagttctttcccctctccgttatgaacttgaactcattttccccactcctttggaaacttgtgccattaattatgctgtctctcacttttatcttcaaaatctctccatccactggtttccttccatgtgctttcataaatgtgttccctatgctgaaatatgttccctatgctgaaaacacacaaattaacaaacacacatgcaaactaacacttttttctttgatatcttcttataacccatcatcctgtttctctgtatgtytcaacaatcctgactctttgagatcttcaaaaactctaaggtcttcagaaacaattcgacattatgcaacaatgccaaacatctccatagccaatga

SEQ ID NO: 30662 - DNA, 997 bp, Homo sapiens
atcatcatagttcaagtaagagcaacctaaaagtgttttaattttcattcatatgttagaatgttttcatataaaatagttttaactaaaaagtgaaacatttcactattaatttatccttttatttatgataacaggcagtttccttgaatatttaatcttgggtctccactgtgcacactgatccatataaataccacactttgcgatggggcatcaataatcaaaactttttgattatcaaatattccagaaaatagtgtattttctttcctgtatatcaaattatttttacttttaaaaatatgatagtgatcttaataaagtgtttgaaaacattttttaaatcctatttttgtcaatgaaatcagcatacttaccatcacatatgatttttaaaaatccttagaattaaaataatctttaactgtactgactgcacattctccagatccaatcaatagccaagatgtactggttatacttccctgtagtctcatacatcttatcctcttcctttctattcttactgtcactactatagtttcatttcttgtcatatctgcttaaaacactgtaagaacttcataacctgtgtcctgttctttaatttccctccagtttagtttatccttcacattgctttcagatacatcttcattaaagcacaatcataatcatgtaacttgcattttcaaaatgattctaatactctatttggcctagcaaattacatcactatctcttgagtttgacattagtgtgctggagaaagctcatatcactttccgagactgaatgttaaattttgagaaattttgtgacccaattgttaaatacaagtattaggaaagattaaattatataaacagaattaaacatttttgttaaaaacaaaggtaataaaacttcaaaaktcattactttaaaattattttgccattttaccattatgctcttgaggttattaacatatgttgcatctgtatggtggaaa

SEQ ID NO: 30663 - DNA, 553 bp, Homo sapiens
ctattcacatagattagagctgcctgtttttgaaattcacagaaatggaataatatcttatgtactcttaatgcatctttcactttacacaacacttatgagactgtataagttgttgtgggcatcattagtttgttcttttattgccgagtagtttttcattgtatgaacacaccacaatttatctactctcctgtggatggatatttggagaatttctagtgtttggctgctacaaataaagcttctgtgaagaaaaaactatgggaattgggataatcagaaaagaactagaatacttcaccattaccaaatttttgcatcgaataaacatggttattttaacatgtactctggagtcggccccctacccccccaaaaaaagaattgacatcagatatgtaacactaaatgtcaytgacataaactcttctcccttttgttaatttggacatttttctgtccctagctttctttcaagatagctctaactttccatgatgtctcattaataatttgcaaatacctgaatcacatttcagaatatgacaca

SEQ ID NO: 30664 - DNA, 522 bp, Homo sapiens
tacctggatattgtgagagtttataccctgatagatacatggatattgtgagagtttagagaaatagcaattaaccatgcctagaacaatcaaggaaatcttccaagatgaggcaaggacagatcttggttctaatggaaaagtcagagtcgtccaaggcttccaaggtgtggagaataattttctaggtttagatataaagtttgtgtgtaagaaaggtattggaaagggctagaagaggaaatatgacagtataacctttgcaaaggtggttaacaataaggtattatatattagaaaatagctagatsaaaggcttttgtctgggcacggtggctcacgcctgtagtctcagcagtttgggaggccaaggcaggcagatcacctgaggtcaggaattcaagaccagcctggctaacatggtgaaaccccatctctactaaaaatacaaaaaaatttagctgggtgtggtggtgggtgcctgtaattccagctactcgggaggctgaggcaggagatttg

SEQ ID NO: 30665 - DNA, 522 bp, Homo sapiens
tacctggatattgtgagagtttataccctgatagatacatggatattgtgagagtttagagaaatagcaattaaccatgcctagaacaatcaaggaaatcttccaagatgaggcaaggacagatcttggttctaatggaaaagtcagagtcgtccaaggcttccaaggtgtggagaataattttctaggtttagatataaagtttgtgtgtaagaaaggtattggaaagggctagaagaggaaatatgacagtataacctttgcaaaggtggttaacaataaggtattatatattagaaaatagctagatcaaaggcttttgtctgggcacggtggctcaygcctgtagtctcagcagtttgggaggccaaggcaggcagatcacctgaggtcaggaattcaagaccagcctggctaacatggtgaaaccccatctctactaaaaatacaaaaaaatttagctgggtgtggtggtgggtgcctgtaattccagctactcgggaggctgaggcaggagatttg

SEQ ID NO: 30666 - DNA, 1374 bp, Homo sapiens
tttaggattattttatttatctgacgtatccagttattgttcaatatttgaacataagaaaatatgttaaatatgtactggcaccttgttcttggaaggtatctctgatagaattaatgacttttcagagtagaagcaacttctggaatgtgtcatgataattttaaccttcatatgtatttcctaaagtgtaaagttagtaactaattcctcattgtaggaagcatccaagcctattaggatttatcctttcaaaaatgttttagcaattttttttccatgggacaaacctgagaataggcaacctctaagctctatttcaactccaaccttagaaaaataatttaacttctaccagttttaggcaccttgtctatgaaatgaaggcaataataccaataatacctgctacacagagattgaaaccattcagagcagtacacgaacaaattggatgctctatgtatgttagttctatttgaatctaagtttgaagattctatgatagtattagaaacttcattttagaaagctttgcatttttattatggaaagtggctaccctctaaaagtcactaaatctagaattcaaatagaacacattctaaaggagaccataaatgctccgtttgcttggtattgtttacacatgttttccaacacaatttactagggaatgagatgagataagtggagatgtttgctattaaactatgttccttgaattttagctacatcagtgaaagcaggtttctggattctaagtgctagaaaatgaattgttgaagtgtgaaagcggaactgtgtattgaaaattgcaaaacacgtagagctggctggtctgtcttatcagagaagctggttttgtaagaacttaagtggttacaccttaaaggcacctctaactctttattggacgcactctacccctttatttctacctcttgcccctggaaaaacatatcccatagctaatatgttgtaaatgttaattaattcagtgccatttcttacactatcttttgcattttagttgtcatatagtttaaactggtgactattttttccaaaccccaaacgaggacacakggtctgacactaggctataaactgtgccaggagaaatatacaggctgagtcacaggctgaaaacaaaggactttacaaccgctgagaaaccttatgacatcaaccaagtctcttcattccttgggcaacatcctcatctagaaaatcaggaaaatatacatgacacgtgagattgaaataaagttttaatttttctattcctcttctagatgtatgtgacattctgaaagatatcagttcatagagaaatgttgaagtttctctaatataatatgtataattaga

SEQ ID NO: 30667 - DNA, 675 bp, Homo sapiens
tgcatcccgcagagattctgacccagtatgtgtggggtggggccaagcaagttgcactttaaacaagtacatggggattgtttaaatcagatgttctatagatagtattttttggtaatactggtaggatagactgagctttgaaattaaacaggtgaaatttaaatccttgcttacccattggcttggtaacacctgccagtttcatagaatagatgcacaaattttcaatttcattaatagtcacttcacagagcttccgtgaaggtgcaatgaaaaaacccatcacatatcattacatatatgtaaaggatctggctttatctaatgttggcttccttcctgcttccataaaccagagtcataagtgactgatagaaacgggcttatacaactrtgcaaaatgattgttgctttcttttacctttttttcttgaggccaacctcacctcttctcctgatttcttcattgtgagcatcctgcctcagcccatgagaaatttgaaaaccctctcatttaggtgaactagctgcagctgcaaacctgatagagggaacaaggtactatatatgcccaatgttgattagcatcgctgcaactcattattctgatcagccagaagcaatttacaatcatctttaagcaagtgcacatcattttcctaattgacttgc

SEQ ID NO: 30668 - DNA, 1096 bp, Homo sapiens
ctatgtgttctctatgacacttaaaatatgagtcagtccataaaaatttaatagacaagctatttttcaaagcacctttgttgtgtgaagtgaggtgctagcatattgagctagatagtgttgcacagctgtgagttctttgaatcayatgtgatttttacctgctgtgggtttatagtgcactggaattttcaagtacagcccttttgtttacatttcataagtaatattatattctgtcttgatattgaggaattgccacagctctaacaattctgattaagtatccttgcaaatcaactgcaaaagaacccaaacttattttcccatttgctacccgagcaaaaggaggaaaaagtggcccatttactcctggaataatactatattccccccaactcacagatgaatagatctataatgaagtgcaattttcctcagaaaataaacaccagtgagtggaaaattgaggttacagcatgtgcattgcaaagtaatagtcacttaagcattgaatccagccaaaggacaattggaaaagatgaaggacattcaaataagaagtagaaacctggcaaaggttaaagggggtccagtggaagctttagaaaacagggattgcaagtgtaacaatgaaatgattcagttctgcaagacagaaggggttgagagggcaagatacatcttggttcgcggtctagacaacagttatgtacatgctatggtccaatgggtgacctcacaggagtaaaataaaaaataagaaaagaaaattaattcatggaaatagacaagattaataactcagcacaagacacacaagatcaaaataaactcggtctccaaccatacctatttagggaatttcattgttctgaaaacacctaattccacatagaccatttatttatgcaaccaacatttattaagtggtcaccatgtgccaggcatagaaattcaccagggagagcagtgaagaaaatagatgtaatatcttcgttgcgcatcttcaaactaatgattttcacctgctttcaatgaaatacacggcactttgttactgagattactggtagattgaaccacaataagctgt

SEQ ID NO: 30669 - DNA, 1096 bp, Homo sapiens
ctatgtgttctctatgacacttaaaatatgagtcagtccataaaaatttaatagacaagctatttttcaaagcacctttgttgtgtgaagtgaggtgctagcatattgagctagatagtgttgcacagctgtgagttctttgaatcacatgtgatttttacctgctgtgggtttatagtgcactggaattttcaagtacagcccttttgtttacatttcataagtaatattatattctgtcttgatattgaggaattgccacagctctaacaattctgattaagtatccttgcaaatcaactgcaaaagaacccaaacttattttcccatttgctacccgagcaaaaggaggaaaaagtggcccatttactcctggaataatactatattccccccaactcacagatgaatagatctataatgaagtgcaattttcctcagaaaataaacaccagtgagtggaaaattgaggttacagcatgtgcattgcaaagtaatagtcacttaagcattgaatccagccaaaggacaattggaaaagatgaaggacattcaaataagaagtagaaacctggcaaaggttaaagggsgtccagtggaagctttagaaaacagggattgcaagtgtaacaatgaaatgattcagttctgcaagacagaaggggttgagagggcaagatacatcttggttcgcggtctagacaacagttatgtacatgctatggtccaatgggtgacctcacaggagtaaaataaaaaataagaaaagaaaattaattcatggaaatagacaagattaataactcagcacaagacacacaagatcaaaataaactcggtctccaaccatacctatttagggaatttcattgttctgaaaacacctaattccacatagaccatttatttatgcaaccaacatttattaagtggtcaccatgtgccaggcatagaaattcaccagggagagcagtgaagaaaatagatgtaatatcttcgttgcgcatcttcaaactaatgattttcacctgctttcaatgaaatacacggcactttgttactgagattactggtagattgaaccacaataagctgt

SEQ ID NO: 30670 - DNA, 522 bp, Homo sapiens
ataagattgcagagttctgcagaccaccttcgcatcaatgcactaaatcccctaactggagagggatatgcttacattctaagcattctctgagattcacctagctttctttgtggtcccatttgaagcaatgattctcaaatctgaccgtactttaatcacctgaaaaatgttgaaaactacaggtgactgggcccttctccagatcaattaaatcagaatctaatggtggagcaggaagsggttgttatcctcagacttaacctttgaaaagattgtgaaattgtctatctcccctttccatctccttcttgaggagtcaaggctccattatctacctgggactgcctttcttccatagctgctactatctgaacctgtcactgtcccatcaaagcctacctatctgtcatcctattccctcaattctaacaaataattaatttttttttttttgacagagtctcactctgtggcccaggccggagtacagtggtgccatctcgatcttggctcactgca

SEQ ID NO: 30671 - DNA, 603 bp, Homo sapiens
gatacccatttaatggtagttacttaaatgataactctgtggcttggagtctcaggctacaagtgagtgggctttggaaaatggaataggaagccaaatgtgctggctggggcagtaatagtgagttttttcctccttctcttcctccttcctttcttccttcttctctttcttttcttcctccttttcttctttctatgtgtgtgtgtgtgtgtgktgttttatttatttatttatttatttatttatttatttactttggttacatgaccttgcatgcattgaattggagatcacacgatctctgttcatgtaatgtcccttattttctgggatagggcaaatatttctgggacaggggaaatattaaaagcccacagccagggacctggatctttctgactcaagagtatccctgacaaggattcacaaaggtgaggtcttgctgtggttcatatcctttaaaattacctacaaatatctgaggaaaatctagaagagctactgggatggcatcttattaagtaatacctctgctttataaagacacatcatctaatcaatacaaataaggcatttgttgagtgcttacaatatgctaga

SEQ ID NO: 30672 - DNA, 603 bp, Homo sapiens
gatacccatttaatggtagttacttaaatgataactctgtggcttggagtctcaggctacaagtgagtgggctttggaaaatggaataggaagccaaatgtgctggctggggcagtaatagtgagttttttcctccttctcttcctccttcctttcttccttcttctctttcttttcttcctccttttcttctttctatgtgtgtgtgtgtgtgtggtkttttatttatttatttatttatttatttatttatttactttggttacatgaccttgcatgcattgaattggagatcacacgatctctgttcatgtaatgtcccttattttctgggatagggcaaatatttctgggacaggggaaatattaaaagcccacagccagggacctggatctttctgactcaagagtatccctgacaaggattcacaaaggtgaggtcttgctgtggttcatatcctttaaaattacctacaaatatctgaggaaaatctagaagagctactgggatggcatcttattaagtaatacctctgctttataaagacacatcatctaatcaatacaaataaggcatttgttgagtgcttacaatatgctaga

SEQ ID NO: 30673 - DNA, 550 bp, Homo sapiens
tgttcttggcaccttggtcaaaaatacatttgctgtagatgtatcaatttatttctgggctctctattttgttccattggtcaatgtatctattttaatgccagtatgatgctgttttggttactatagctctgtagcataatttgaagtcaggtaatgtgattcctccagtttattctttttgcttatatatatatatatatwttttttttttttttgagacagagttttgcttctgttgcccaggctggagtgcaatggtgtgatctcatctcactgcaacctctgcttcctgggttcaagcgattctcctgcctcagcctcctgagtagctgggattgcaggtgcccaccaccatgcctggctaatttttgtatttttagtagagacagggtttcaccatgttggctgctcttgaactcctgaccttaggtgatctgcccacctcggcctcccaaaacgttgggattacaggcatgtgccactgtgcccggcctcttttactattcttatagtagttactctataaatcacaacacaaatccttgat

SEQ ID NO: 30674 - DNA, 627 bp, Homo sapiens
atgtaaccacaaacctcctgctaccacttcattctcagtattaactctactgtgtgttgacaccactgaagggtaaattacaactatctagaagggaaatagcatgattcttactataaatgccatgacttatctacgttctaaattttatccactatatttcattcattcaaaattgattcagtggtagaaagcaacagatcccctgaatccctgggcacactttgccctctaccttcagggttcctctgactattgggaactcyctccctctctgcacttaccctgcagtgttgccatgacgtatttacatggtgacttcttctcaaatgataaggagttctttcaggtcagggacagtatctaactcattatgaagtaataggacaaaaaatattatttaaggacaaagctgattgtaccatcttcttacccattaggaaaaatgccattattctattaggcaaaaatgacatttgatgtgctcttttaccctcccagagactttaataagagagagataaaaaaagactgaaattgcaagacctcttccaattcttttgttctgcaacatggtgggaactagagttcccacacgccattgtttagcagaatgccttaagtgtg

SEQ ID NO: 30675 - DNA, 1612 bp, Homo sapiens
catcgattgctccatttgtttaaagaattgtgtctatgtttttaaactgcagcaaatgctgactcagccactttaacaatggagactggagtggctggtactataggccttttaataatcagcacactgaccatctttggcttattcctacttgaagttttgagtctctgatctgggacttctttctgaattcagctaaaaaaattcactttttttttttttttttttttttttttttttttttttttgagacggggtctcactctgtcgcccaggctggagtgcagtggtgcgtctcagctcactgcaagctccgcctcccgggttcatgccattctcctgtctcagcctccggagtagctggaactacaggtgctcaccaacacgcccagctaattatttgtatttttagtagagacggagtttcactgtgttagcgaggatggtcttgatctcctgacctcatgatccgcccacctcggcctcccaaagtgctgagataaaaattcactcttgaatggtactcattttcacttctgtgagtcacaggcactcctctaggaatccgagtccatctgctctgtgtctttcagaaattctttagcatatctggcctgctgatggtatcctttaaggggttgccacaaatagcttgttttattttactgcccaatagtatgcagtggctttgcccttcttggatttctaattccactgtagatttatccttatttttatatttcttccatcatttcagtagaatcatggaaggagaaacagcaaatgagttttcttagttagatatcttaaatcagagttgttgaattatgttttacttgtttatttaactgcttgtctttccccactagattttaagccccttgatgccaaggtctttgtattatttcatttttatatacttgggcctgacagatagaagatacaaaatagagatttatataatgaayaattgattaaattaggtagcatggctataaacagacattttattaaattaagtgtgcataagtaataaaaagtagtcctattttgaacttgacagaaaacaatgggaaaggaaatatctactgtgtaccactgcactctcattgtgcatcagagactcaaaacttcgagtaggaataagccaaagatggtcagtgtgctgattattaaaaggcctatggtaccagctattccagtctccatcctcaaagtggctgagtcagcatttgctgcagtttaaagacacagacacaattctttaaacaaatggagcaattgatgcatgtggaaatccagcatggacatggattccaggcaaagaagtgaaataaggcaatggacaagagctccctggctcagaattataaagaaagcagcattttatggggcactcaaggctgtggagagaggttgggaaggagagaaggtgagaagtaaaggaagaattaactcttgaatactctcctcaacctgtctttacaagagatggactccctttcttgtgccttctacactattgatcatttctcctgttctttgaatttcatgcctagcctcatttctctggctgccccagctccctgatttaggtgacctcattcaaatc

SEQ ID NO: 30676 - DNA, 1340 bp, Homo sapiens
ctgtggagcccccaaccttcccttgctgcaggagccttgctgtctgccatctaaagacctaacatgatgccatccctggacggctcctgcttccacagcatctaccctagatttcttctcaagacttattattgctgtttctgggactcaacttgccaccccattatccttccttccatcaaaatgtcactgccctcaatgagtgggraaaattcccttctatgctcccagatagggtgtcctgttttggagtatggatttgcccttttgaaccacaggaccttgccaagcagactatctgaaggcttatatgtatttgttcctctgacaggggatactgcaggacatcccttcggaacaaaggacccactttacagcagctgcaggcctgatagagcaacggagcagccttggggaggcactgctgaggcaccaccttggagatgatgctcagtgagaagggtgagcatcttccaggatgtagtacctaccttaaaacaatcaccgttatatggttttgtagtcccataggtccaggaagcatggccgggaggtagtagagagccctcatacaattattctaggtgatatgcctgaaaaatttgtactttcaaacactgcagctttaggctgtgtgcatctagaagtactggttcccagaatgggaatgattctatcaggagacttgggtagagccctatttaacattaagctgcagctgtcacacagtttctttgagtcttcagtgccaagagaccagtaggcaaggaaaagggtcattaaatgggcaagagtaactaaccgattataaggaggaggcacaggactgcttttatacaatgaggacaaggaataatatgattggaacccaaataatccactgggcatttcttggtacttacctacccaatttcaatggaaaacagagatgtatatagcacccatagcctgagaaagctatgagaaccaagggctcagagccctgaaggatgaggatatgggtcatcctgccaagtaagccacgttaaattgcagtagtattaaccacggacaaggagaatctaaaataagtactagaggaagaagaagagtatcagtagtgagtttcagaagctactgtggcaagaggctgagttggtcccacaaaccttcctcctttaactttcatagggaaacaaaaacaatcagaatttgggggaagtagttgttttcagatgtggggatcttagtatataaaaccaatggatccaaataacaaactgtggcagatggtgtgatgtcccatctagaccccttcctttaagactgaagcactcattcccctagcttctgagaatgca

SEQ ID NO: 30677 - DNA, 458 bp, Homo sapiens
ggaactttactgtgagaaaaacaacaggtttaaatggcccctgatttaccatgaatttgaaggaaatgcctcaaagatttaaaatgtttaaatttattgaaagcacatttgaatgaacttttagctctctcaaagacaggtaatcagacaaatgatgttcaagaaagctattctttaataggtattgtaaaactaacaccttttttggctttagggtagtttatttctcatcactgatgtttatgaagaggtgggggaggtgtataataagatgtcttgcataatccatttctcagatttatggcttaatcagagtctctttttctaaatacattatgtctacatttttctttttttttttctttttttttttttttagctgttaatatcgcttgcatatatttctttttwttttattttattttattttatttctattttttttttttttattgatc

SEQ ID NO: 30678 - DNA, 1250 bp, Homo sapiens
ctgggactttgttgatgcaggcctatggatggcctgcctgccctcccacctgtgtccagtgaaccctgcatttcgttccaatgccaactatgctgaagcctgctccatttccctggttggaaatcgtcattgaggaatcgggttttgggccttagaggctgacagtcttgggctccatacctggagcaatgcttaccagctgtgtgaccttgggacacctgttaactaagtttcagtttcctcacctatacagtggggataatactccctaccttcaagtgttaatataatgattgagaggaatgtatgtgttcgttttctcccctccaccttttttggttttctggtttgtctccagagcagctatagagtagtggttaagagcttaagtgagcttgagcaaataacctagtctctctgtgtctcagtttcttcatctgtattatggggataatagtacccatctctgcaggtttttagagaagattaaatcagatgctcaatgtaagacctctttttttttctatgaaaatgctttaatagaggtgtcttcacggcatgcaatgtgaagacaygaagaccagcaagtgcacacacaatgacaggtggctaccagagaagagtttgtgggtgaataaagagttctcaccgcttccaccctttgctcagtaacagaaggttgttcctcctcaaactatctctcctcagccaaggtatcctggtactgttggtgcctggcacaagtaggagcacaatccatgttggttcttcttctcttacaggcccttgcatgggtgtccttttattgtcatcagaatgtggctttgcagtggacagtaaggtcttccctgttggctgcctcttggggtctctgtctggtgagcttctgagtaacccaatgcctgggactgggccctttttccctgctagccataccctacagaagactctggtcactcagacatccttgcaatccctgcttgatggataccctggaatggaggagcccttctgaactagtagcctgaaatgggaagaacctccttaaccactgctcagtaactaggtatcaaaccaaagaggaaagtttggctgtgagagaactgccagagaatggattcttttcccggaagatggccctgagaagaaggctctctccaaaagtgccatgtacaatcagctttgtacatagtctcacagtcctttaaaaaaatgcttttacatctgtgtatgtccaaaagaaaaatgca

SEQ ID NO: 30679 - DNA, 696 bp, Homo sapiens
tcatctaatatctgtgtttttctccgttcagttactcttctctggatttcaaatagaatttctaataataaaygtgtaccaattctatcatcaagctgtttatgttctttacatttctgttcttgataattatatgctagtctttgaatatgaagataatgcttctgacccaatattcataatgcatgtgcctcgagttgttattttttgcaagagaaataagtttattttgatctgatgcactttctttcccagtcttcatgtgaccagcagcaccaactgcaagactgtctgtcacctgagtgtggcttgcaaccaagcacatgtgggaattcagtgaagcccctgccttgacctcattatcaacaggaaccagccaaagacagtggtcactctttatccatgtaaatagacaccgtaatttattttcaaaaaaatccaaaggaaaaaatttaaggccattgtaataccagaaatctgcactgtgagtacttggaagatgacagttgataaagctgggaggtttacaatgactagattgtcagaaggggttaaatgtatgttctaataataagagaacaagaaaaaagaatgccctggtgatgtgtaaatttaaaatacagtggtacattttaggaaaaccaaaaatcaatccatgaactttgaaatgaagggagatagttctgagagaactaa

SEQ ID NO: 30680 - DNA, 732 bp, Homo sapiens
tagctattttgaggagcattaataggcattacccaaagaagatgatatattccttagacagcaagaactcttattcttgtttatcttccttttgatgaactctacagtctcttggtagtaaatccagattctgtcggatgtacaaaacaatcccccataaatttaaatttatgcctatgatcatgtgtaatgaaattagccctcaagagccaacttgagaccatgttcagaacagaagcttcagaaacctatggcacatgaatataagaccattttagacacagtccccaaattacctctgaattcrgtaggaaaaaagtgacaaggaacaatatttagggcatctaggatagtgctacattctcatgcctaacataagcaaattaaaacctcatactaatgctctgaagcctaataataactagtaaggttcatgtctgtcaaaaagccactgcaggctactgttaaaaccagctacacaacgatctgaaagccatttgcctccctctagttaaaaacagtcccatgtctactgatgatgtagttaaggctgtatcaagatctatctctcagcagggacatattgcccaaatgctaatgtttgaccaacaaaagttttgcagccagagcttgtgccagtattggtagatagaaaatacaaaatcaaaccatttctcatgaatgattaaacaattaaaaaaatgaatgcaagaagcttgtgtgcatgtgcat

SEQ ID NO: 30681 - DNA, 732 bp, Homo sapiens
tagctattttgaggagcattaataggcattacccaaagaagatgatatattccttagacagcaagaactcttattcttgtttatcttccttttgatgaactctacagtctcttggtagtaaatccagattctgtcggatgtacaaaacaatcccccataaatttaaatttatgcctatgatcatgtgtaatgaaattagccctcaagagccaacttgagaccatgttcagaacagaagcttcagaaacctatggcacatgaatataagaccattttagacacagtccccaaattacctctgaattcagtaggaaaaaagtgacaaggaacaatatttagggcatctaggatagtgctacattctcatgcctaacataagcaaattaaaacctcatactaatgctctgaagcctaataataactagtaaggttcatgtctgtcaaaaagccactgcaggctactgttaaaaccagctacacaacgatctgaaagccatttgcctccctctagttaaaaacagtcccatgtctactgatsatgtagttaaggctgtatcaagatctatctctcagcagggacatattgcccaaatgctaatgtttgaccaacaaaagttttgcagccagagcttgtgccagtattggtagatagaaaatacaaaatcaaaccatttctcatgaatgattaaacaattaaaaaaatgaatgcaagaagcttgtgtgcatgtgcat

SEQ ID NO: 30682 - DNA, 732 bp, Homo sapiens
tagctattttgaggagcattaataggcattacccaaagaagatgatatattccttagacagcaagaactcttattcttgtttatcttccttttgatgaactctacagtctcttggtagtaaatccagattctgtcggatgtacaaaacaatcccccataaatttaaatttatgcctatgatcatgtgtaatgaaattagccctcaagagccaacttgagaccatgttcagaacagaagcttcagaaacctatggcacatgaatataagaccattttagacacagtccccaaattacctctgaattcagtaggaaaaaagtgacaaggaacaatatttagggcatctaggatagtgctacattctcatgcctaacataagcaaattaaaacctcatactaatgctctgaagcctaataataactagtaaggttcatgtctgtcaaaaagccactgcaggctactgttaaaaccagctacacaacgatctgaaagccatttgcctccctctagttaaaaacagtcccatgtctactgatgatgtagttaaggctgtatcaagatctatctctcagcagggacatrttgcccaaatgctaatgtttgaccaacaaaagttttgcagccagagcttgtgccagtattggtagatagaaaatacaaaatcaaaccatttctcatgaatgattaaacaattaaaaaaatgaatgcaagaagcttgtgtgcatgtgcat

SEQ ID NO: 30683 - DNA, 732 bp, Homo sapiens
tagctattttgaggagcattaataggcattacccaaagaagatgatatattccttagacagcaagaactcttattcttgtttatcttccttttgatgaactctacagtctcttggtagtaaatccagattctgtcggatgtacaaaacaatcccccataaatttaaatttatgcctatgatcatgtgtaatgaaattagccctcaagagccaacttgagaccatgttcagaacagaagcttcagaaacctatggcacatgaatataagaccattttagacacagtccccaaattacctctgaattcagtaggaaaaaagtgacaaggaacaatatttagggcatctaggatagtgctacattctcatgcctaacataagcaaattaaaacctcatactaatgctctgaagcctaataataactagtaaggttcatgtctgtcaaaaagccactgcaggctactgttaaaaccagctacacaacgatctgaaagccatttgcctccctctagttaaaaacagtcccatgtctactgatgatgtagttaaggctgtatcaagatctatctctcagcagggacatattgcccaaatgctaatgtttgaccaacaaaagttttgcagccagagcttgtgcmagtattggtagatagaaaatacaaaatcaaaccatttctcatgaatgattaaacaattaaaaaaatgaatgcaagaagcttgtgtgcatgtgcat

SEQ ID NO: 30684 - DNA, 930 bp, Homo sapiens
agtttatggcatttttgtaacaaaaatttctgtaacagcctaaatggactaagataccatctctaagtagaacagtcatcctaaagtagttacaacacarcaaaaacaaggggaagacttaattgaaaaatttcattcatgagatgtaataaaccaggtgaatttagtaatgggaaatgattctgcgagggacttttagcattctcaccctccagaagcatgtcagaaaaatctagcacattattccctgggtgggacagatttgggagaatgcatgctaccttatcagctctctgtccctccctgggagactgatgcttcccaatgcacaactcaattcaaagcagcaatgtactctgaaatttcatctctttctttcttctttctctttctttctttcttttttctttctttcttttctttctctttctttctttctcttccttccttccttcctttcttcctttctttcttttctctttctcttttttctttctttttttccttccttccttccttccttctctttttcttcttcctgagacaggttctcactctgttgcccaggctggagtgcagtggcatgattatagctcatttcagccttgaactcctggcctcaaactatcctcccacctctgcctcctgagtagctgggtctacaggcatccaccaccgtgcttggttaattttttaaagtgtttgtagagataaggtctcactctcttgcacaggttggtcttgaactcttggcctcaagtgatcttcccacctcagcctcccaaagtgttgggattataggtgtgagtcaccgtgctcaacccagaaagtatttttatgtaaaaataaattatgcaatggcattttatgaacttcaaagaaaaatactttatttgtgttgttctcatatctgagaataaaaatgattaa

SEQ ID NO: 30685 - DNA, 930 bp, Homo sapiens
agtttatggcatttttgtaacaaaaatttctgtaacagcctaaatggactaagataccatctctaagtagaacagtcatcctaaagtagttacaacacaacaaaaacaaggggaagacttaattgaaaaatttcattcatgagatgtaataaaccaggtgaatttagtaatgggaaatgattctgcgagggacttttagcattctcaccctccagaagcatgtcagaaaaatctagcacattattccctgggtgggacagatttgggagaatgcatgctaccttatcagctctctgtccctccctgggagactgatgcttcccaatgcacaactcaattcaaagcagcaatgtactctgaaatttcatctctttctttcttctttctctttctttctttcttttttctttctttcttttctttctctttctttctttctcttccttccttccttcctttcttcctttctttcttttctctttctcttttttctttctttttttccttccttccttccttccttctctttttcttcttcctgagacaggttctcactctgttgcccaggctggagtgcagtggcatgattatagctcatttcagccttgaactcctggcctcaaactatcctcccacctctgcctcctgagtagctgggtctacaggcatccaccaccgtgcttggttaattttttaaagtgtttgtagagataaggtctcactctcttgcacaggttggtcttgaactcttggcctcaagtgatcttcccacctcagcctcccaaagtgttgggattataggtgtgagtcaccrtgctcaacccagaaagtatttttatgtaaaaataaattatgcaatggcattttatgaacttcaaagaaaaatactttatttgtgttgttctcatatctgagaataaaaatgattaa

SEQ ID NO: 30686 - DNA, 702 bp, Homo sapiens
cgcagggtcctctgcctaggaaaaccagagacctttgttcacttgtttatctgctgaccttccctccactattgtcctgtgaccctgccaaatccccctctgcgagaaacacccaagaatgatcaattaaaaaaaaaataaaataaataaaataaaataatacttccaatttaaactaaggagctttaattgtttaggaccacaaagatttctatcagagggaggacaaaacgtgaaatattttgttttgtaatttatttgttgcaaaaaacatcactgctgtttggaaattgagaaactgtccaaacaagtacactatggacaacaaatgtcgtgaagtgcctgtccgcactgaggtttgagagccacaggagacttgagacttcttctaagacagtttaaagaagtctcatttatttgtctttttatacaatgtagcaaatcaatatattaaataatataagaacgccaagttttcttacatataaaactagagtaacctatcaaacaaagctgttccaygtaactgagaactcattaaccctgaggtcctaggactatatgaagtcagtgcaatagcaggcgatagcctgtcatgtgcaactagggctgctggtggggaaaagtacaacatcccagattcgtcagtgatgtagctggattgttgggtgtgagaaatgcacagccctgactcagagatgc

SEQ ID NO: 30687 - DNA, 669 bp, Homo sapiens
aacttatctcggtatcttttaattcacctgatgtttctgttggtaacaaaaccaacaaaaacattgtaaatttggtacactgaaatgcaaaataagagtgaaggagaggacactggcagggaaatcaacractataaagcagtttggggcaattcagtttagggacaggcattatatctcaaaaatccagtgagcatcacattataaaagcacagctccaaaggtgatgatttcatgtgaggacccttcagtcacaaagagagaggattagctcacgttcattatttccaaatttccctcaccaaagcacacattattaaggcatttttgcgacatttttatcaaaatgaaaatgtgtttggcaatggagcaaactgagatatatgaaatatttacttgtttgaatatctgaagatactagaaatgtgtccttaatttactctgtcttatatgaaatgtaaaccaatgctatccattagcttctaaacattttccaactgatgcatgttgcaactgttccagccctgctgcataggacaagactcagttttttcagaatgagcagaccaagtaagaccaattacttattgtcattgaagtttgtggtttttgttcaaattttataagggtacaatataatgtgtttaatcatcatggtggccacttttt

SEQ ID NO: 30688 - DNA, 640 bp, Homo sapiens
tatagcagcacaattcgcaattgcaaaattgtggaaccaacccaaatacccatcagtcaacgagtggataaagaaaccatggtatgtatataccatggaatactacacagccataaaaagaatgarttaacagcattcgtggtgacctgggtgagattggagactattattctaagtgatgtaactcaggaataggaagccaaatatcatatattctcactgatatgtgggagctaagctataaggacacaaaggcataagaatgatacgatggactttagggacttggggggaagagtgggagggggacgagggataaaagactacaaatatggtacactgtacactgcttgggtgatgggtgcaccaaaatctcacaaatcaccaataaagaagttactcatgtaaccaaatgccacctgtaccccaataagttatggaaaaaaagaaatataatttgtttgcttgtttataagttctgaaaaggcagagatactgtgtgttatgtttgccctatatcctcactgcctatagcagtaactaacaagaagtagggacgaaacaaatgttgaataaatgccattgagtataagcaaaataatatgatcatctctataaagataacttcacatgacacatt

SEQ ID NO: 30689 - DNA, 640 bp, Homo sapiens
tatagcagcacaattcgcaattgcaaaattgtggaaccaacccaaatacccatcagtcaacgagtggataaagaaaccatggtatgtatataccatggaatactacacagccataaaaagaatgaattaacagcattcgtggtgacctgggtgagattggaractattattctaagtgatgtaactcaggaataggaagccaaatatcatatattctcactgatatgtgggagctaagctataaggacacaaaggcataagaatgatacgatggactttagggacttggggggaagagtgggagggggacgagggataaaagactacaaatatggtacactgtacactgcttgggtgatgggtgcaccaaaatctcacaaatcaccaataaagaagttactcatgtaaccaaatgccacctgtaccccaataagttatggaaaaaaagaaatataatttgtttgcttgtttataagttctgaaaaggcagagatactgtgtgttatgtttgccctatatcctcactgcctatagcagtaactaacaagaagtagggacgaaacaaatgttgaataaatgccattgagtataagcaaaataatatgatcatctctataaagataacttcacatgacacatt

SEQ ID NO: 30690 - DNA, 598 bp, Homo sapiens
tctttttctcaagtatgtctttttatagttggtttgtttgatccggatccataaatttatcttcctaaacaccttccaagctgtcacttaccttagtctacactgcaggactctggtagcttcagggtcaaatctagcctaaatattgtttttcaaaagcctcaaattaagttctrtgtttcaggaaattttacttaaaaatcagaatctttcttgttttggaggagaaaaaaggaaaagaaggcctggaaaccctgggttttccttcccgtatggcaacaacagctggctgactctgagaagtcctctccttggatggggtgcttgtgcactcagtcaccatagcaggtgcctggcctcttcactgatgtgtttgcagccccctctctgtatacatcactgaattagataattatcattgtttctgaaattatttttcttgtctcatctttcttaagtccagtgactcttcgcatgctatgactttcagcctatggtccagtggttttgtcccccctggaatatttggtaacgtctggagacattttgttttgagcagtgggtgctacttgcatcctgtcggttgagtccagggacc

SEQ ID NO: 30691 - DNA, 779 bp, Homo sapiens
atttgagtatcttgtacatgttgtgcactgtgccggtgagttcacatatattattttatctgccataatgaggtagtattcaaggctcagtaagttaagcagtttctcccagatcacccagctagtcagtggcaaaactgggatttcagcctcagttcgtctagcaacagttctaccataataaaggcagatttaacgacctcccttccaaagggcattcggtctcctcttcagcttcaggcacagaggagaaaaagggatgggaggggtcttgcaaacctttcattgtgggtgtgatccttgtcatcttcttccgttgccgtggagacattgccaaagtggactgtgaagggcacagagcacagatgggcgcccgacccttgctctccagacccctcccttgccctctagccccccatgccctccagccccccttgccttcctcctctgccttgccaggcttttggattggagcctggggtaggtgtgagcttcaaaaagtggggtaagaaaacgcctgcttccccaaccacstcgacaatggtgagcaaggagactgtgagtgtgtgtgtgtatgtgagtgtgtgtgtgtggggtgcatgtgtatatgttcactcatgcacatttggggggtagaggtacagggaagcgggagtcaaaaagatcctagagatgggcggcagggttttaaggaataatcccctaatgaatgtgggggttttttgggctgggcttagtgggatgggccagctcaccttgagatgtgggttggggatccg

SEQ ID NO: 30692 - DNA, 597 bp, Homo sapiens
catcataaaaacacaggtgctaactgagcctggtgtgtgcaacactcctacgcagaaaccagcagtgacagagaaccccagagtcagttacaccagcatagtttgcatttttagagggtgggaagggaggacagaaaggatctgagatgcacagagcagtggtttagcccatggattctgctgcacggaggcttcagaacctgaatgttatggaaragataccaccatgttttactgaatttggtatgtcccagattttaacaaacttcccattcccaagacccactgccatccccaattaagaaagatttttaaaaaccaagtaaagttacattttctcattaaaaaaaataaggggctttgtcttcatcttcttgggtcaggaatattttcaaggatgtgatgaaaagtacggaccacactctataacaatgcataggcccacaaagacaaacctttccaaacttttccctaggactttggttttcaacttgtcagctcattagaatcacctggagaactttaaaaattacacacacctggattctattcccaaacaactaaatcagtatagcttagagtagggcttgggcacag

SEQ ID NO: 30693 - DNA, 981 bp, Homo sapiens
tgcatacgtaaaaaacctgcacatgtatcccctgaatttaaactaaaagttgaaattattttttaaaaatgacataatcatcatcatgtgtgctggactgcaataatggccccaatattcatgcctccctctatccttaccctttggtgctagccctccgtgctgactctgggtttggccatgtggtttgctttggctaatgagacaccagcaaaggcttggaaagggatttgcttgtttccactttctttcttggacccccatcagagtatgaccaggctagcctgctggagggatgtgagagccatgttgagaagaactgagttgtctcagccaaggccaatctgcctttaatcccagataaatgagcaagcccagccaagatcagttaagcctaccccagatgagctgagctatgaagccaatccacaggctcataagaaataataaatgttggttgtttttaaccactaaagttttggtgttgttggttacgcaactgtagctagctgatacactgtcttcttaggtgcattaggattttctttgcttgagggaatattttttaagaatctctagaggccatttcggggagcatgctgyagtcttagtataaataacaatcatttgtttcaggcaaaactgtctgccactggactttctcctagaaaggcagcaaacatctgcagggtattacagtagtgttaggagaaagaggaagtagccttgtcaaggcttacaaaatgaatgctcttatttactatagacaaatgattggagggtgttgtaattgggtgagtggcaaatgcagacagactgtggggtggtgacatgagtgatgctagaactcttaggtagaagatggggcttggccgcccctggttttctggagatacagaatcacactgactacataataatgatggtgatgatagctaacgattattaagcactcacttccagtcatactacatgctttac

SEQ ID NO: 30694 - DNA, 648 bp, Homo sapiens
tgctgagcagaacatgagatcatagctgcaatcagaaacaaatatcaggaactcgttttaatgtcctctctatagcaggtgaacacttcaaactgtgtattattttccatctagaaatactttcagcttgtttccctaattagcaattttagtggcattccttttttgccatcccgctgatatattctgtgcacggatttctttctatscttccttatcaaaacttgatctcaaaatatatctggatctaattcactctaatatgtgacttagggatgtaatttgttttctggaaatttgaaagtcatgggggaaaatttgcttggagcatacaaaagttggaagctgggggaaatttaaacatatgtaaaattggtttattgagtagttcaacatgggttataaacatgaaatattttcatttttctcctgttgctttgtcaaatgtcacttccctcttcctgaagcacctcttggaaatgtgccacacctctcactaaaagttcaggcttgtttaagactccgatctcatattggctttctcatttgttccctttcctcccttcacctcttttctctccccagttgtccagccttgtggcttgaaatacttggagtggggagaaggaatggtctcattctggttac

SEQ ID NO: 30695 - DNA, 648 bp, Homo sapiens
tgctgagcagaacatgagatcatagctgcaatcagaaacaaatatcaggaactcgttttaatgtcctctctatagcaggtgaacacttcaaactgtgtattattttccatctagaaatactttcagcttgtttccctaattagcaattttagtggcattccttttttgccatcccgctgatatattctgtgcacggatttctttctatgcttccttatcaaaacttgatctcaaaatatatctggatctaattcactctaatatgtgacttagggatgtaatttgttttctggaaatttgaaagtcatgggggaaaatttgcttggagcatacaaaagttggaagctgggggaaatttaaacatatgtaaaattggtttattgagtagttcaacatgggttataaacatgaaatattttcatttttctcctgttgctttgtcaaatgtcacttccctsttcctgaagcacctcttggaaatgtgccacacctctcactaaaagttcaggcttgtttaagactccgatctcatattggctttctcatttgttccctttcctcccttcacctcttttctctccccagttgtccagccttgtggcttgaaatacttggagtggggagaaggaatggtctcattctggttac

SEQ ID NO: 30696 - DNA, 605 bp, Homo sapiens
aagttcagcccacattcaaggggagagatatcaaattccttctcctggagtaccaaagaatttgtggacatgtgttaaaatgatgagtgtttagtatatattttgtgggagatgtattgagtctattcaaacatcatttttcccctaaaagttttagtcactaattttagcattcattcatggatcttgcctgcagcaattattactgtggcgttcttatggtgattttctattttcctaattccttctacatttattatttggaattctttaataaaaaatatttgtcctcatttatttaatcaatgacttctattagtacaaacttatagatattgttctatgctttggcttattagccagttctatcattatttactgtgttgctcaaattgttacrgcttaggccattagaagttataagaatacaatgtttatatgtaaagttctttttgtccttagcattacagtttcctaacaatattttagagttgagcttttatctttgtttcatgcttcctgggtccacccactgattgttaagtgtatcttcttttctgggaactttgttctagatctccctgaccttaatgtgattaatcacg

SEQ ID NO: 30697 - DNA, 533 bp, Homo sapiens
gtaccacaacacgtcaagcagatatatgaaatccttgacaaaagacatttaaaacaaacaattccatgctttatatgtcaagtggaaaaggaatattttttctacagtgacagagcagacttgacatgtgcacaatcatgtaaaaccaagcgtttgcaaatgctcttacaacgtggagcaaccgggcctagggacaagcaacctttcagctaagagtctcgtcaaaggtgmggaagcccattacagaagaccagataacagtcagtctgacgggttcattcagatattcaagctttaaaaagtacttcgaagactgatacagatgtcctaggcaataaacgtcccaaaaagaatggggaacaatcccagtgccaattacatctttgtcattcagaaatccaggctaatttgatttagagacatacataaacgaactgttatttctcataattgttttttttcagcctctttatttttaatctacatctcttaggtaaaatgcatcaatttaactacatttacttattctgagt

SEQ ID NO: 30698 - DNA, 602 bp, Homo sapiens
agctgtacgacatgtgccaggcattggcgtggtgctttcacatttattagattgtttcagtctcagaacaagcttgttgagcagctgctatcacctycactttacaaacgaggacattgagacttcatagattaggtgactctccaggtcacatagctagtagctagcagcagagcctgggtgggaactgtggctctagacagtatttgagaagtggctcctctggcagacactctttgttgattgactcagtggataatcctgctcccttatgctgggtgtctctttacaaagggcaattgcttcctttctcagtccctggtctgatcacatgacagttctgaccaatgggatgtcagcagaagtccattaggagcttctgggaaggctgttgctttttctgaggaaagggatagatgccattaactccacctcttcccgccttcttcttggtttaatgaggtcacattcctagagtagcaccagccatcttgcaaacttgtaagaaaggccaagagcagtggccctgacatcactgagccaccggaatctacaccgatgcagctgcctagctgtaggcttcttggtattgcaacaaatac

SEQ ID NO: 30699 - DNA, 602 bp, Homo sapiens
agctgtacgacatgtgccaggcattggcgtggtgctttcacatttattagattgtttcagtctcagaacaagcttgttgagcagctgctatcacctccactttacaaacgaggacattgagacttcatagattaggtgactctccaggtcacatagctagtagctagcagcagagcctgggtgggaactgtggctctagacagtatttgagaagtggctcctctggcagacactctttgttgattgactcagtggataatcctgctcccttatgctgggygtctctttacaaagggcaattgcttcctttctcagtccctggtctgatcacatgacagttctgaccaatgggatgtcagcagaagtccattaggagcttctgggaaggctgttgctttttctgaggaaagggatagatgccattaactccacctcttcccgccttcttcttggtttaatgaggtcacattcctagagtagcaccagccatcttgcaaacttgtaagaaaggccaagagcagtggccctgacatcactgagccaccggaatctacaccgatgcagctgcctagctgtaggcttcttggtattgcaacaaatac

SEQ ID NO: 30700 - DNA, 661 bp, Homo sapiens
ctcaaactttgtacctatagcatccttaagtacaccactgtaaaaacattttttttaaatctagttgttgaatacataagttagcaaagggcaaaagccaaatttagaaaacattctcagtctgcagtttttttttttcaacccaggagaacataaaactggttacgtatgacatgcgaagacgtaaactttttttttgttaaatactaaaaataaaacaaaacacgaaaactataactcttatactgaggataaaaatgaattagtaaatatttcgcatggtcttcatttaacagcatcgttcatttttcctgtgaaaatcgaggggttcctgtctggcctttcgaggtgtttagtgggatctgatttgcagagaactcaggtgatattgttcagcagtagctttgatagaattaacttttctcaaagcctttaatttacctgtataaaagttaaggaaactaaatytataataatttagaattacgtatgattagcagtaaaaaatacacacaaaaacaggttattgaggctttccctaaaattttcttttgactaatgaatccaaattttgagcttctctctctatgtatgtgtatatgtccaaatataaatagcatgaaagagaaacatgcaatatgctctacatatattttacaca

SEQ ID NO: 30701 - DNA, 621 bp, Homo sapiens
tgcattgtgctacaatgctatgatggctacgccgtcactaggccagtaggaatttttcagatccagtgtaatctaatggggctatatgtggtccatcgttgactaaaacattgttatgtagagcatgactgtatgacatagtatataaatacaatatataacaaatagagttggttgggcacagtggcttatgcctgtaatcccagcactttgggaggccaaggcgggtggatcacctgagattagcagtttgagaccagcctggccaacatggcaaaaccctgtctctactaaaaatacaaaaattagtcgggcttggtagcaggtgcctataatcccagctaatcgagaggctgaggcaggagaatcgcttgaacccagagggtggagggtgcagtgagccgagattgcgtcactgcactccagcctgggtgaaagagcaaaactccatctcaaaaacaaacaaacaaaaaaaaacaaatagagttaatacctgtattatataaaaaattattggccaggcacagtggctcacgcttgtaatcccagcactttgggaggccaaggcgggcagatcacraggtcaggagtttgagaccagcctgaccaacatggtgaaac

SEQ ID NO: 30702 - DNA, 630 bp, Homo sapiens
tgccttttcactgtagtatttaaatatctgttacaggtttccaaggtggacttgaacagatggccttatattaccaaaacttttatattctagttgtttttgtactttttttgcatacaagccgaacgtttgtgcttcccgtgcatgcagtcaaagactcagcacaggttttagaggaaatagtcaaacatgaactaggaagccaggtgagtctcctttctccagtggaagagccgggaccwtccccctgcacccccgacatccagggacggggtgtgaggaagacgctgcctcccaatggcctggacgggatgtttccaagctcttgttcccctaacgtctcaacaggcgctcactgaagtgtatgaatattttttaaaaaggtttttgcagtaagctagtcttcccctctgctttctcgaaagcttactgagccccgggccccaagcacgggccgggcatagatttcctcttccacaagctgccgcttttctgggcaccttgaagcatcagggcgtgaaatcaaactagatgtgggcagggagagggttgcttacctgccctgctggggcagggtttcctgaaactgggttaattctttatagaaatgtgaacactgaatttatttta

SEQ ID NO: 30703 - DNA, 513 bp, Homo sapiens
ccggagccccagggcgckcctccccgagccacatccatcactggctccttgtgacatgaacgccacttcacagtagagcgaagcccgcttggcattccagcaccacgagttctcttgtcccaagccccctgtccatttgggctggccaaatccacttgtccatcagacccctcccactcccgggagaacgtttcctgaacccagaaccccatccaccctccccgccccccacgcaggagttaaggacccccttgcaaactcacagtcccctgcttgccccatcaggattgctcttagcatcctgagttttcaccgtgtggttgcaggtaggtttccaccgtcagatcttggctccttgagggaagaaatcttaatgcccttgtagccataaagcgcaccccaacgtggcacgtattgattaaaaatctaaaagttggccgggcgcggtggctcacgcctgtaatcccagcactttgggagactgaggtggacgaggtcaggagttcaagacca

SEQ ID NO: 30704 - DNA, 513 bp, Homo sapiens
ccggagccccagggcgcgcctccccgagccacatccatcactggctccttgtgacatgaacgccacttcacagtagagcgaagccckcttggcattccagcaccacgagttctcttgtcccaagccccctgtccatttgggctggccaaatccacttgtccatcagacccctcccactcccgggagaacgtttcctgaacccagaaccccatccaccctccccgccccccacgcaggagttaaggacccccttgcaaactcacagtcccctgcttgccccatcaggattgctcttagcatcctgagttttcaccgtgtggttgcaggtaggtttccaccgtcagatcttggctccttgagggaagaaatcttaatgcccttgtagccataaagcgcaccccaacgtggcacgtattgattaaaaatctaaaagttggccgggcgcggtggctcacgcctgtaatcccagcactttgggagactgaggtggacgaggtcaggagttcaagacca

SEQ ID NO: 30705 - DNA, 2736 bp, Homo sapiens
ttgaaagaccatgaggtccatggggaggagagagcaggctggagcaggctgtcccctctctttctcctgctcctctccccagggctgctctggcagcagaaccagatggaaatgtcacctagtgcagagtgttttattcttcctggtctacaccccrccttaaacagtgaaagctccttggcaacatcatgcagaggttcttttcatttttaattaaatcctaagagatatattttttttcctaaaggtgccagcttaaaataattactagaattcccaacagggctaatcagagacttatagaaaataaaaatgaaggagaatgccctacccaatgggtttctgtcattttgctcagaaggctcttgcagtccagggcagcgatcacagttcttggcattaggggctattaataggagccttgaaataaatccctatccagtgagataaggaaaacttatttcactgcctgagtatctctcctctgatgaccagacaccttccattttcatcagctgtttatcaaaatcagattagtaaaagaataatcagatcagaattgtttatgcctgtctcaatcttgaattacaaatgactttcatgtgctgcctgggcgaagtaccgtgacctatagatgaactagcctttgtatttcctgcaccttgtactgaacttataatttcccaaagaccacaagtcattaagtctcattgttgattattgatctaagtaagataggtgaggctagctccatgggggctgtggatatgtgggcaatagattctctttgtgataagtcataagtcactaatgggttgttttgagctctcccaagtggaagacaatggagcctttagaaggttgtggagttacgtaagacatctctttccaaacaaagaggaggcaggacacccagccaaagggttgagcacaggaggctgtgtggtctggtggttccagggagagacgtggggccagggcttcctgggttcagctaccagccgagactctgagtcaggggggagcagagccaagtctcttggcttgaggcagatagactgtaaaaccaggagagagaaaaccgcaggtctgtgctcaaggactctaggggaaaaacacattctggaaattaaaaaaaaaaagagagagagagagtgagagagagatcaccctgttaagttacaatttgggactttttcaacaagaaatgagcatctttcctgctgattggctgacatgtcctcctctgggcagcactgtgaagcccagccagtatctgagggtgttctgtgtggaatgaatagagaagctcaggggtctgagcaaagccagtcaaccttggtgagttgtcacaaggaatgcttagggagccgggccctgggagcaaagaggttctgcatgaattcttccctttcactcatcctgtcttccacagtaaaatgtcctctgaaatcatgggaggaaaaatcccttcctgccagcttcttctggatacctcccttccaccagtctgagcacagagttgtaaccagcaacctgtttagccacagatccacacaggtttccaagccacagccagggctggggctgatggtccatgttctccaagtcccatgagccctgaaagtctgataattctggtcagacagagtgggtggccacctacatggtgagtttgaaggatgactgggtgggtctccactccttggcagggtgccgcatttctctggatctgaaagtttttctgattgttagaaatagcctgttaaaatgaaaaccatatttatgaagaaatctctgtattcagcatgagcacttgagtcaataatatcttaatagagtcccatagaaatgggacaggaaatgaaggaggggcagattttgctgtggaataaggttgggggaggaagtttcttatctggaggagcagagggatcccaggaggggacagagagatgaatcaggtggagagagcccttctaatagtttctcccggaatgtctggaacaatattaaaatctagtggtgggtgggcgtgaattgtaccaggagcaatgcttttacttgtaattcaagccaggccaaatggaatccacgttttcacttgtgggcaccttgtccagccaccaagtacactcatgatgtcactcctccctgcatttgccagagtgcacattccctgccactggttaaatagccatgctcaatgtcccaagtcctaagcttccccatattaaaatgaagcagtgatctctccttttacaatcttataaccatccttttgtcactttgttgcaatctagggaaaaattaataaaaaattaagtctactcttgcgagcaaaagtatctgaggaaggaacgttatctattttgtaaaaatacctgagtgaaagaatgaaaactaatccactgaggttagtgacagctttaatcacataattttcagactctgcttcctctgcttatgataattcactatggctggcgcaccactttcaggccctccctgggtaaccgtgctctaacaaacacatgtctaggaaaacgtagagagaccacttgggggtggatttcacaagattattctcatcttctctggtcacagtgccactgtcccctgtggtccttgagagtcctcctcctgctctctacaatcacacctggccaagcaaagacaacacagtgagaatttctggggggaaatgtctgggtaggaaatcaaacagagtaaaca

SEQ ID NO: 30706 - DNA, 543 bp, Homo sapiens
tagccactgagcatttgaatggctagtctgaaccggggtgtgctgtggttgtaaaacacatgcaggatttcaaagacttggtaccaaaaaaaaaagaatgtaaaaaatctcattaatacrttttttattgagggcatgctgaagtaataatagtttggatagatcaggtccaataaaaaatactattaaaagtaatcccatttgttttgttttactttttaaaatatgactataagaaaattcagaattacgcagtggcgtacattcatgactttctaaattataattgtattgaacagcaatggtttctattgttttgctaaatgccttttcaaggctatctggatcattggagacaggtcagaactcctaactaagtgctctctcctttccaccatccccacatgattcatttacatggagaggtaattgacagatagaagcttacattaacatccttggggagtttcctttaatttaatgggataagaggaaagaacttgcagacaaaggtaaaggtggggtaggattaggcccatggat

SEQ ID NO: 30707 - DNA, 543 bp, Homo sapiens
tagccactgagcatttgaatggctagtctgaaccggggtgtgctgtggttgtaaaacacatgcaggatttcaaagacttggtaccaaaaaaaaaagaatgtaaaaaatctcattaatacattttttattgagggcatgctgaagtaataatagtttggatagatcaggtccaataaaaaatactattaaaagtaatcccatttgttttgttttactttttaaaatatgactataagaaaattcagaattacgcagtggcgtacattcatgrctttctaaattataattgtattgaacagcaatggtttctattgttttgctaaatgccttttcaaggctatctggatcattggagacaggtcagaactcctaactaagtgctctctcctttccaccatccccacatgattcatttacatggagaggtaattgacagatagaagcttacattaacatccttggggagtttcctttaatttaatgggataagaggaaagaacttgcagacaaaggtaaaggtggggtaggattaggcccatggat

SEQ ID NO: 30708 - DNA, 543 bp, Homo sapiens
tctgcagtgccatctactgaatcggacaggaaataatgcaaagactgtaaaggtaggccagatgacaatgaaggaaaatgttttgcttgttatttaaggccatatattttaatctcataatttgcctgaacttaattatagtgctttgattgagctctttggagaggttctcaaagccatctttaaaaattcagtataaataacagtcattcgtaagtatcttgtcaatacacgttaaatcatttgttttccttttttgggggttgggggtgtttgttttttagaaataggtctcgcagtcttattctgtcrcccagattggagtgcggtggtgtcatcatagctcactgtagcctcaaattcctgggctcaagtcattctcctgcctcagcctccgaagtagctgggatgacaggcttaagccacagtgcctggctgtttcctttcataaaactactattttaaatgatagagtttaaggttaaaatatcaaaacccaaacgtacacttctgatgtcgctgaagtcacaaagaccaacgtgt

SEQ ID NO: 30709 - DNA, 543 bp, Homo sapiens
tctgcagtgccatctactgaatcggacaggaaataatgcaaagactgtaaaggtaggccagatgacaatgaaggaaaatgttttgcttgttatttaaggccatatattttaatctcataatttgcctgaacttaattatagtgctttgattgagctctttggagaggttctcaaagccatctttaaaaattcagtataaataacagtcattcgtaagtatcttgtcaatacacgttaaatcatttgttttccttttttgggggttgggggtgtttgttttttagaaataggtctcgcagtcttattctgtcgcccagattggagtgmggtggtgtcatcatagctcactgtagcctcaaattcctgggctcaagtcattctcctgcctcagcctccgaagtagctgggatgacaggcttaagccacagtgcctggctgtttcctttcataaaactactattttaaatgatagagtttaaggttaaaatatcaaaacccaaacgtacacttctgatgtcgctgaagtcacaaagaccaacgtgt

SEQ ID NO: 30710 - DNA, 543 bp, Homo sapiens
tctgcagtgccatctactgaatcggacaggaaataatgcaaagactgtaaaggtaggccagatgacaatgaaggaaaatgttttgcttgttatttaaggccatatattttaatctcataatttgcctgaacttaattatagtgctttgattgagctctttggagaggttctcaaagccatctttaaaaattcagtataaataacagtcattcgtaagtatcttgtcaatacacgttaaatcatttgttttccttttttgggggttgggggtgtttgttttttagaaataggtctcgcagtcttattctgtcgcccagattggagtgcggtggtgtcatcatagctcactgtagcctcaaattcctgggctcaagtcattctcctgcctcagcctccgaagtagctgggatgacaggcttaagccacagtgcctggctgtttcctttcataaaactactattttaaatgatagagtttaaggttaaaatatcaaaacccaaamgtacacttctgatgtcgctgaagtcacaaagaccaacgtgt

SEQ ID NO: 30711 - DNA, 1013 bp, Homo sapiens
ttggctcaatttcatggctttgtgatggattaaatgtctttctccagttagcaccttctaactatttatccagaagttactaggactctttattttgttttatttttcttctgatatatgccctgggggaaagcacttatattacaagtacttataatagactaaagcttaggagctagcaccctctttcatagtaaatagagtgacagtctaaatggcataagccgagagaacccactgcttttaacaggtagtccataggagtcacttaccttggccagtaaatggaaatgcccatcctcttttgtcatacataatcttgaagattgtgccagttttgaataatgtgagatgtcaagcatcacacttacccaaaatgctacacctctgtaaatggatttaaataagcagaaccatatacaactctccctgcctttcctgcaggctcagcgatatgaggcagcatcgacaatttatggaccgcacacattatctgcttacattcagctcttcagaaaccttgctaaggctattgctacggtaatcaaatattgtttgtgcgtgcatgcgcgcgtgcgtgtgtgtgtgtgtgtgtgtgtatgtctgtatgtgtctgtgtctgggtaagaaaatgcagagggaagtgaaagagaaccttagcttcgagtgttcagtttgacaacctttatattttacaaaatttatagttttgtggtatctctaagaaaataaataaaatttmtttccaaattttggatctagttaacatcctttcatggtggcagcttctttcatatatattttctcactatttttacaaccatcatgtgaaattaaggagatatcatttctccccagttttcagaggagcacataggcttgaagataagtgatgaagcttactacacctgggagttgaacctgtgttctctaatccttgccagattctccccactcactccaaaagttgagtaggtcagcattctaggatgcccattttccacattataata

SEQ ID NO: 30712 - DNA, 1680 bp, Homo sapiens
ccaaaagattggcattatttactctttaaatatttgattggattgaccagcaaggccatatggacctggcttttctttatggcaaaatttttattactaattcaatttctttacttgttatatgaccattcatatgtcctatttttttccttgcatcaattttgtgtctttctaggaatttatctttataggaattggtatcattctaggaattttctcatttcatataagttgtttaatttgttggtgtaatataaaagttgttgttgctcatgataatcccctgtaatccttttaatttctgaagagttgacaatgatatcccctctttctttctaattttggtaatttgtgtcctcaaagaactagcatttagttttattgcttttacctattgcattacctattactaaattttttaggcaggaccagagcagattttcatcttgagcaaatcccttcctcacttcccccagcacccctcatcccctcacacactaatgtaaaattcttttgaattatgaggttttccagtctggcctggtgggaacagaatcttgtcacaactctctatgagcctggggactgttctctgtaattctgttagcccattcttttcctggcttccagtagttcccttatatgcatgcaaacttgaggggagctttctgcaaatctccagatttctgtctctgtgcagctatcctctctatgatgctctgtgctataaactcaagactgtttggcttttgtggacacccagctccatatcctcaacttagactgccagacttggcctgaattctcctccttctgccgtggcccgtaaactctgatgacattgagctggtggattacagggttcttgtttgtctgctgccactcaaatatcactgtctttctttgtcacttgaaaatccattgtttaatatatattttttccagttttttagtcgtttcaggggggaggataaatacacatcctgccactccatctcttataaaaataaaagcttaactataaatgtaagcataaatatgagtcatctgtggaaagttttgactgttctaatttgattcaaatattccctgtatttgtgttgggagggaggtgtgaggaattatcaaggcctgaagaagccattttaatatgctgtcactaatataaactacagctctagatcttcacttgtatctgagtcyaccaaaagcaaactcattggccaaacattcctatgtctattgttgcaagggttaatattcttagaagataacttacttgattaaatagaacaaaatctataaaggcaccctaaattatagaatttataataaataatgtccaaaatatgagtatagcaaaaaaccttttattagaagtcattaaatgaatttttactttcagggggaagttgctgaagttatatttgtaggtgctaacccgaagaattcagtacaaaaccaggtaggtatcaatgattttcttttacaaatgtaaatccactttttagccattcattcatttaaatatccctctagaggttaataacataaagacaaaatgttccaacttgttttccatcttattttgtaggtacgggaaaatattcaataggtagttaatgtggattgagtctgggtaaaagcacacaggaaacataattggcttcacttaggacc

SEQ ID NO: 30713 - DNA, 794 bp, Homo sapiens
tcaggttccccttggcagggcttcatattccccagcaaggaggaaacatgrtacttccacaggaccccactacattttctgctaaaaggtggacactgtttaaagaaaataaaaagcccctcaaagattggaagatctctcttcaatagggtctgtaaagcattctctattcataaacgcatttcctgaaatagaacatattcacatatttaaatgtaaagtgaatcacttacagaaaacactgttattactttctgcaatgcctttctacaatctgaatacaactgtcttctgccttaatttaaaactaggcctaccatttttttttttattttttgagacggagtctctctctttcgcccaggcctgactgcagtggcactatctccgctcactgcaagctccgcctcctgggttcacgccattctcctgcctcagcctcttgagtagctgggactacaggcgccggccaccgcgcccggctaatttttttgtagttttagtagagacggggtttcaccgtgttagccaggatggtctcgatctcctgacctcatgatccacccgcctcggcctcccaaagtgctgggattacaggcgtgaaccaccgcgcctggcctaggcctaccatatttttaaaagtacagcacaattcctttctggttttgcctccatgtaaacagaaagaaggactatacactgacatttcccctatttgctgcagagcttatagtacttgcataataaattagagaggaaaaagaccaactcagttcaactgcaactgagaagaa

SEQ ID NO: 30714 - DNA, 794 bp, Homo sapiens
tcaggttccccttggcagggcttcatattccccagcaaggaggaaacatgatacttccacaggaccccactacattttctgctaaaaggtggacactgtttaaagaaaataaaaagccccycaaagattggaagatctctcttcaatagggtctgtaaagcattctctattcataaacgcatttcctgaaatagaacatattcacatatttaaatgtaaagtgaatcacttacagaaaacactgttattactttctgcaatgcctttctacaatctgaatacaactgtcttctgccttaatttaaaactaggcctaccatttttttttttattttttgagacggagtctctctctttcgcccaggcctgactgcagtggcactatctccgctcactgcaagctccgcctcctgggttcacgccattctcctgcctcagcctcttgagtagctgggactacaggcgccggccaccgcgcccggctaatttttttgtagttttagtagagacggggtttcaccgtgttagccaggatggtctcgatctcctgacctcatgatccacccgcctcggcctcccaaagtgctgggattacaggcgtgaaccaccgcgcctggcctaggcctaccatatttttaaaagtacagcacaattcctttctggttttgcctccatgtaaacagaaagaaggactatacactgacatttcccctatttgctgcagagcttatagtacttgcataataaattagagaggaaaaagaccaactcagttcaactgcaactgagaagaa

SEQ ID NO: 30715 - DNA, 794 bp, Homo sapiens
tcaggttccccttggcagggcttcatattccccagcaaggaggaaacatgatacttccacaggaccccactacattttctgctaaaaggtggacactgtttaaagaaaataaaaagcccctcaaagattggaagatctctcttcaatagggtctgtaaagcattctctattcataaacgcatttcctgaaatagaacatattcacatatttaaatgtaaagtgaatcacttacagaaaacactgttattactttctgcaatgcctttctacaatctgaatacaactgtcttctgccttaatttaaaactaggcctaccatttttttttttattttttgagacggagtctctctctttcgcccaggcctgactgcagtggcactatctccgctcactgcaagctccgcctcctgggttcacgccattctccygcctcagcctcttgagtagctgggactacaggcgccggccaccgcgcccggctaatttttttgtagttttagtagagacggggtttcaccgtgttagccaggatggtctcgatctcctgacctcatgatccacccgcctcggcctcccaaagtgctgggattacaggcgtgaaccaccgcgcctggcctaggcctaccatatttttaaaagtacagcacaattcctttctggttttgcctccatgtaaacagaaagaaggactatacactgacatttcccctatttgctgcagagcttatagtacttgcataataaattagagaggaaaaagaccaactcagttcaactgcaactgagaagaa

SEQ ID NO: 30716 - DNA, 794 bp, Homo sapiens
tcaggttccccttggcagggcttcatattccccagcaaggaggaaacatgatacttccacaggaccccactacattttctgctaaaaggtggacactgtttaaagaaaataaaaagcccctcaaagattggaagatctctcttcaatagggtctgtaaagcattctctattcataaacgcatttcctgaaatagaacatattcacatatttaaatgtaaagtgaatcacttacagaaaacactgttattactttctgcaatgcctttctacaatctgaatacaactgtcttctgccttaatttaaaactaggcctaccatttttttttttattttttgagacggagtctctctctttcgcccaggcctgactgcagtggcactatctccgctcactgcaagctccgcctcctgggttcacgccattctcctgcctcagcctcttgagtagctgggactacaggcgccsgccaccgcgcccggctaatttttttgtagttttagtagagacggggtttcaccgtgttagccaggatggtctcgatctcctgacctcatgatccacccgcctcggcctcccaaagtgctgggattacaggcgtgaaccaccgcgcctggcctaggcctaccatatttttaaaagtacagcacaattcctttctggttttgcctccatgtaaacagaaagaaggactatacactgacatttcccctatttgctgcagagcttatagtacttgcataataaattagagaggaaaaagaccaactcagttcaactgcaactgagaagaa

SEQ ID NO: 30717 - DNA, 794 bp, Homo sapiens
tcaggttccccttggcagggcttcatattccccagcaaggaggaaacatgatacttccacaggaccccactacattttctgctaaaaggtggacactgtttaaagaaaataaaaagcccctcaaagattggaagatctctcttcaatagggtctgtaaagcattctctattcataaacgcatttcctgaaatagaacatattcacatatttaaatgtaaagtgaatcacttacagaaaacactgttattactttctgcaatgcctttctacaatctgaatacaactgtcttctgccttaatttaaaactaggcctaccatttttttttttattttttgagacggagtctctctctttcgcccaggcctgactgcagtggcactatctccgctcactgcaagctccgcctcctgggttcacgccattctcctgcctcagcctcttgagtagctgggactacaggcgccggccaccgcgcccggctaatttttttgtagttttagtagagacggggtttcaccgtgttagccaggatggtctcgatctcctgacctcatgatccacccgcctcggcctcccaaagtgctgggattacaggcgtgaaccaccgcgcctggcctaggcctaccatatttttaaaagtacagcacaattcctttctggttttgcctycatgtaaacagaaagaaggactatacactgacatttcccctatttgctgcagagcttatagtacttgcataataaattagagaggaaaaagaccaactcagttcaactgcaactgagaagaa

SEQ ID NO: 30718 - DNA, 814 bp, Homo sapiens
atctcttttagtaggtgactaaaggggaagacatttaactattgaccagtgtatttatttccaaagcctgccatagcaaagtaacacagatggggtggcctaaacaacagaattgtctcatgattctggaggctagaagtttgagaccaaagtgtcaacagtgctggttccttctgagggctataaaaaagaatctgttccatgtcagcctccttgcttctggtgattgctggcaatctttggcaatcatttgcttgtagaggcatcactttgatctctgccttcctgttcacatttcattcttcctgtatgtgtctctccatgtgacattcttttttataaaaacaccagtcatattggattacggacccactttactccagtatgatgtcatcttaattaatcacatctgcaatgattttatttccaaataaggttgcattctgagatactgagggttaggtcttcaacatatcattttggggatacacatttcaacccataacaactcagagagtcaaaaaaacaaagaggccaccataccawtttccacaggtcaactagtaaagacctgctttctgattgtatgcaaatatgttgacatttgtcctaaccacagtagaaaaagtatataaatggtagccttcatagggctgtaacaggtatgctatttagaatccaggttccagatgctttaacaatgagatgatacagtgaaaaatgagatagaagtttattttcctttcagttaatcatctgagaataagcactttagggatgatttaacagcactgaactattaaggaccctggga

SEQ ID NO: 30719 - DNA, 814 bp, Homo sapiens
atctcttttagtaggtgactaaaggggaagacatttaactattgaccagtgtatttatttccaaagcctgccatagcaaagtaacacagatggggtggcctaaacaacagaattgtctcatgattctggaggctagaagtttgagaccaaagtgtcaacagtgctggttccttctgagggctataaaaaagaatctgttccatgtcagcctccttgcttctggtgattgctggcaatctttggcaatcatttgcttgtagaggcatcactttgatctctgccttcctgttcacatttcattcttcctgtatgtgtctctccatgtgacattcttttttataaaaacaccagtcatattggattacggacccactttactccagtatgatgtcatcttaattaatcacatctgcaatgattttatttccaaataaggttgcattctgagatactgagggttaggtcttcaacatatcattttggggatacacatttcaacccataacaactcagagagtcaaaaaaacaaagaggccaccataccaatttccacaggtcaactagtaaagacctgctttctgattgtatrcaaatatgttgacatttgtcctaaccacagtagaaaaagtatataaatggtagccttcatagggctgtaacaggtatgctatttagaatccaggttccagatgctttaacaatgagatgatacagtgaaaaatgagatagaagtttattttcctttcagttaatcatctgagaataagcactttagggatgatttaacagcactgaactattaaggaccctggga

SEQ ID NO: 30720 - DNA, 814 bp, Homo sapiens
atctcttttagtaggtgactaaaggggaagacatttaactattgaccagtgtatttatttccaaagcctgccatagcaaagtaacacagatggggtggcctaaacaacagaattgtctcatgattctggaggctagaagtttgagaccaaagtgtcaacagtgctggttccttctgagggctataaaaaagaatctgttccatgtcagcctccttgcttctggtgattgctggcaatctttggcaatcatttgcttgtagaggcatcactttgatctctgccttcctgttcacatttcattcttcctgtatgtgtctctccatgtgacattcttttttataaaaacaccagtcatattggattacggacccactttactccagtatgatgtcatcttaattaatcacatctgcaatgattttatttccaaataaggttgcattctgagatactgagggttaggtcttcaacatatcattttggggatacacatttcaacccataacaactcagagagtcaaaaaaacaaagaggccaccataccaatttccacaggtcaactagtaaagacctgctttctgattgtatgyaaatatgttgacatttgtcctaaccacagtagaaaaagtatataaatggtagccttcatagggctgtaacaggtatgctatttagaatccaggttccagatgctttaacaatgagatgatacagtgaaaaatgagatagaagtttattttcctttcagttaatcatctgagaataagcactttagggatgatttaacagcactgaactattaaggaccctggga

SEQ ID NO: 30721 - DNA, 814 bp, Homo sapiens
atctcttttagtaggtgactaaaggggaagacatttaactattgaccagtgtatttatttccaaagcctgccatagcaaagtaacacagatggggtggcctaaacaacagaattgtctcatgattctggaggctagaagtttgagaccaaagtgtcaacagtgctggttccttctgagggctataaaaaagaatctgttccatgtcagcctccttgcttctggtgattgctggcaatctttggcaatcatttgcttgtagaggcatcactttgatctctgccttcctgttcacatttcattcttcctgtatgtgtctctccatgtgacattcttttttataaaaacaccagtcatattggattacggacccactttactccagtatgatgtcatcttaattaatcacatctgcaatgattttatttccaaataaggttgcattctgagatactgagggttaggtcttcaacatatcattttggggatacacatttcaacccataacaactcagagagtcaaaaaaacaaagaggccaccataccaatttccacaggtcaactagtaaagacctgctttctgattgtatgcaaatatgttgacatttgtcctaaccacagtagaaaaagtatataaatggtagccttcatagggctgtaacaggtatgytatttagaatccaggttccagatgctttaacaatgagatgatacagtgaaaaatgagatagaagtttattttcctttcagttaatcatctgagaataagcactttagggatgatttaacagcactgaactattaaggaccctggga

SEQ ID NO: 30722 - DNA, 585 bp, Homo sapiens
tcccagcgctttgggaagctgaggtggttggatcacctgaggtcaggagttcgagactagcctgsccaacatggtgaaaccccgtctctaccaaaaatataaaaattagccgggcgtggtggcgggtgcctgtaatcctagctactcagagggctgaggcaggagaatggcttgaacctaggaggcggaggttgcagtgagccgagatcaccccattgcacttcagcctgggcaaaaagagcgaaactccttctcaaaaataaataaataaataaaaatatttctctagtaagccatttttgatattttaatattctgctttttatattcttgttgttacattcttataaaggatacatttttaggccgggcttggtggctcacgcctgtaatcctagcagtttgggaggctgaggcgggtggatcacctgaagtcaggagttcaagaccagcctagacaacatggtgaaactccatctctactaaaaatacaaaaaatttgctgggcgtggtggtgcatgcgtgtaatcccagctactcggaaggccgaggcaggagaatagcatgaactgggcaggcagaggt

SEQ ID NO: 30723 - DNA, 585 bp, Homo sapiens
tcccagcgctttgggaagctgaggtggttggatcacctgaggtcaggagttcgagactagcctggccaacatggtgaaaccccgtctctaccaaaaatataaaaattagccgggcgtggtggcgggtgcctgtaatcctagctactcagagggctgaggcaggagaatggcttgaacctaggaggcggaggttgcagtgagccgagatcaccccattgcacttcagcctgggcaaaaagagcgaaactccttctcaaaaataaataaataaataaaaatatttctctagtaagccatttttgatattttaatattctgctttttatattcttgttgttacattcttataaaggatacatttttaggccgggcttggtggctcacgcctgtaatcctagcagtttgggaggctgaggcgggtggatcacctgaagtcaggagttcaagaccagcctagacaacatggtgaaacyccatctctactaaaaatacaaaaaatttgctgggcgtggtggtgcatgcgtgtaatcccagctactcggaaggccgaggcaggagaatagcatgaactgggcaggcagaggt

SEQ ID NO: 30724 - DNA, 585 bp, Homo sapiens
tcccagcgctttgggaagctgaggtggttggatcacctgaggtcaggagttcgagactagcctggccaacatggtgaaaccccgtctctaccaaaaatataaaaattagccgggcgtggtggcgggtgcctgtaatcctagctactcagagggctgaggcaggagaatggcttgaacctaggaggcggaggttgcagtgagccgagatcaccccattgcacttcagcctgggcaaaaagagcgaaactccttctcaaaaataaataaataaataaaaatatttctctagtaagccatttttgatattttaatattctgctttttatattcttgttgttacattcttataaaggatacatttttaggccgggcttggtggctcacgcctgtaatcctagcagtttgggaggctgaggcgggtggatcacctgaagtcaggagttcaagaccagcctagacaacatggtgaaactccatctctactaaaaatacaaaaaatttgctgggcgtrgtggtgcatgcgtgtaatcccagctactcggaaggccgaggcaggagaatagcatgaactgggcaggcagaggt

SEQ ID NO: 30725 - DNA, 1544 bp, Homo sapiens
taaaatgacttgttcaggaaaaagtggtttcaaaaggtctgatactagctgtgttttacatygcacgtatttcaggaagaaaatagcaaggaaagttatttcccttgtaaaatggttaccccttgctttctcattctagagtcttcatcatccaaacctggaaagaaaatcccagcaggagctgtttctgtatttttaggtaacataacttaggtttgttttctaaaaactacacaaatactgttttttgcatttcaaaattatcatcttctaaagtccggctggagatgaggaagtacctgggagcttcaaagggctttgagcatcttatagaaagagctcatttactgatattagctcttattctcctagagctcagtggccttggacttttttgtgtttgagctgacctggtgattctccgttgtgagatgttctgtagcagtaatggatggaggctattgggccctgttatgcattttgtggattaactgaaatggaaagtttttggtgggtgataatttttttctgtaaattcaaccggcccacactggctcacagctgtggctgtcttgtctctccacccacaggagacacggatgtgtttggtgctgcctccgttccatcaatgaaggagccacagaagcctgagcagcccactccaaggaaaagcccctatggtccccctcccactggcctctttgatgatgatgatggtgatgatgatgacgactttttctcggcaccccacagcaaaccttctaaaacaggtatgtgttcctgcctccgtttctaggacttcagccagaaaaagaacgttgcctaaaaagaacataagctcacctagttctgtatctcttacagtgccagaatcccttctccagcattcctgtcattgagttgttgtgtctgtacttacataggtgtggtgcctgggaggtctgttttatgacccaatcttttctgctctgtaagctaattactatgattattttccttatagagagctgaaatccttttctgtataatttttgcttgcaatttccagttctgacctttggtattgtaaagttttaatcatcctttcttccagccgaccttagtcaattacatgagcagcaggttgtgtgccggccatttatttcccagcttctcatttctctgccaaaaagctcaggtggccttggtctttcctcagatgatgttttcatccccttggccactttggcattctcctctcttttcctcttaaatgtaagtcctatgtcctgaagtcattcccataaatcatttgtttttaaatgtgcagatgaatcttccaggggcttttgtcaaaatgaagattccgattcagtaggtccagggtggggcctgagaatttacatttccagcaagcttcatggtctgtagatcacacttcgaatagcaagacttagatccattgactgctcttccagaaaagaaaggtagatccctagatccctaaggtgcacatgattttcagcaactttaaaaaataaaaaaggatggcataggaatggatg

SEQ ID NO: 30726 - DNA, 1544 bp, Homo sapiens
taaaatgacttgttcaggaaaaagtggtttcaaaaggtctgatactagctgtgttttacattgcacgtatttcaggaagaaaatagcaaggaaagttatttcccttgtaaaatggttaccccttgctttctcattctagagtcttcatcatccaaacctggaaagaaaatcccagcaggagctgtttctgtatttttaggtaacataacttaggtttgttttctaaaaactacacaaatactgttttttgcatttcaaaattatcatcttctaaagtcyggctggagatgaggaagtacctgggagcttcaaagggctttgagcatcttatagaaagagctcatttactgatattagctcttattctcctagagctcagtggccttggacttttttgtgtttgagctgacctggtgattctccgttgtgagatgttctgtagcagtaatggatggaggctattgggccctgttatgcattttgtggattaactgaaatggaaagtttttggtgggtgataatttttttctgtaaattcaaccggcccacactggctcacagctgtggctgtcttgtctctccacccacaggagacacggatgtgtttggtgctgcctccgttccatcaatgaaggagccacagaagcctgagcagcccactccaaggaaaagcccctatggtccccctcccactggcctctttgatgatgatgatggtgatgatgatgacgactttttctcggcaccccacagcaaaccttctaaaacaggtatgtgttcctgcctccgtttctaggacttcagccagaaaaagaacgttgcctaaaaagaacataagctcacctagttctgtatctcttacagtgccagaatcccttctccagcattcctgtcattgagttgttgtgtctgtacttacataggtgtggtgcctgggaggtctgttttatgacccaatcttttctgctctgtaagctaattactatgattattttccttatagagagctgaaatccttttctgtataatttttgcttgcaatttccagttctgacctttggtattgtaaagttttaatcatcctttcttccagccgaccttagtcaattacatgagcagcaggttgtgtgccggccatttatttcccagcttctcatttctctgccaaaaagctcaggtggccttggtctttcctcagatgatgttttcatccccttggccactttggcattctcctctcttttcctcttaaatgtaagtcctatgtcctgaagtcattcccataaatcatttgtttttaaatgtgcagatgaatcttccaggggcttttgtcaaaatgaagattccgattcagtaggtccagggtggggcctgagaatttacatttccagcaagcttcatggtctgtagatcacacttcgaatagcaagacttagatccattgactgctcttccagaaaagaaaggtagatccctagatccctaaggtgcacatgattttcagcaactttaaaaaataaaaaaggatggcataggaatggatg

SEQ ID NO: 30727 - DNA, 1544 bp, Homo sapiens
taaaatgacttgttcaggaaaaagtggtttcaaaaggtctgatactagctgtgttttacattgcacgtatttcaggaagaaaatagcaaggaaagttatttcccttgtaaaatggttaccccttgctttctcattctagagtcttcatcatccaaacctggaaagaaaatcccagcaggagctgtttctgtatttttaggtaacataacttaggtttgttttctaaaaactacacaaatactgttttttgcatttcaaaattatcatcttctaaagtccggctggagatgaggaagtacctgggagcttcaaagggctttgagcatcttatagaaagagctcatttactgatattagctcttattctcctagagctcagtggccttggacttttttgtgtttgagctgacctggtgattctccgttgtgagatgttctgtagcagtaatggatggaggctattgggccctgttatgcattttgtggattaactgaaatggaaagtttttggtgggtgataatttttttctgtaaattcaacyggcccacactggctcacagctgtggctgtcttgtctctccacccacaggagacacggatgtgtttggtgctgcctccgttccatcaatgaaggagccacagaagcctgagcagcccactccaaggaaaagcccctatggtccccctcccactggcctctttgatgatgatgatggtgatgatgatgacgactttttctcggcaccccacagcaaaccttctaaaacaggtatgtgttcctgcctccgtttctaggacttcagccagaaaaagaacgttgcctaaaaagaacataagctcacctagttctgtatctcttacagtgccagaatcccttctccagcattcctgtcattgagttgttgtgtctgtacttacataggtgtggtgcctgggaggtctgttttatgacccaatcttttctgctctgtaagctaattactatgattattttccttatagagagctgaaatccttttctgtataatttttgcttgcaatttccagttctgacctttggtattgtaaagttttaatcatcctttcttccagccgaccttagtcaattacatgagcagcaggttgtgtgccggccatttatttcccagcttctcatttctctgccaaaaagctcaggtggccttggtctttcctcagatgatgttttcatccccttggccactttggcattctcctctcttttcctcttaaatgtaagtcctatgtcctgaagtcattcccataaatcatttgtttttaaatgtgcagatgaatcttccaggggcttttgtcaaaatgaagattccgattcagtaggtccagggtggggcctgagaatttacatttccagcaagcttcatggtctgtagatcacacttcgaatagcaagacttagatccattgactgctcttccagaaaagaaaggtagatccctagatccctaaggtgcacatgattttcagcaactttaaaaaataaaaaaggatggcataggaatggatg

SEQ ID NO: 30728 - DNA, 1544 bp, Homo sapiens
taaaatgacttgttcaggaaaaagtggtttcaaaaggtctgatactagctgtgttttacattgcacgtatttcaggaagaaaatagcaaggaaagttatttcccttgtaaaatggttaccccttgctttctcattctagagtcttcatcatccaaacctggaaagaaaatcccagcaggagctgtttctgtatttttaggtaacataacttaggtttgttttctaaaaactacacaaatactgttttttgcatttcaaaattatcatcttctaaagtccggctggagatgaggaagtacctgggagcttcaaagggctttgagcatcttatagaaagagctcatttactgatattagctcttattctcctagagctcagtggccttggacttttttgtgtttgagctgacctggtgattctccgttgtgagatgttctgtagcagtaatggatggaggctattgggccctgttatgcattttgtggattaactgaaatggaaagtttttggtgggtgataatttttttctgtaaattcaaccggcccacactggctcacagctgtggctgtcttgtctctccacccacaggagacacggatgtgtttggtgctgcctccgttccatcaatgaaggagccacagaagcctgagcagcccactccaaggaaaagcccctatgrtccccctcccactggcctctttgatgatgatgatggtgatgatgatgacgactttttctcggcaccccacagcaaaccttctaaaacaggtatgtgttcctgcctccgtttctaggacttcagccagaaaaagaacgttgcctaaaaagaacataagctcacctagttctgtatctcttacagtgccagaatcccttctccagcattcctgtcattgagttgttgtgtctgtacttacataggtgtggtgcctgggaggtctgttttatgacccaatcttttctgctctgtaagctaattactatgattattttccttatagagagctgaaatccttttctgtataatttttgcttgcaatttccagttctgacctttggtattgtaaagttttaatcatcctttcttccagccgaccttagtcaattacatgagcagcaggttgtgtgccggccatttatttcccagcttctcatttctctgccaaaaagctcaggtggccttggtctttcctcagatgatgttttcatccccttggccactttggcattctcctctcttttcctcttaaatgtaagtcctatgtcctgaagtcattcccataaatcatttgtttttaaatgtgcagatgaatcttccaggggcttttgtcaaaatgaagattccgattcagtaggtccagggtggggcctgagaatttacatttccagcaagcttcatggtctgtagatcacacttcgaatagcaagacttagatccattgactgctcttccagaaaagaaaggtagatccctagatccctaaggtgcacatgattttcagcaactttaaaaaataaaaaaggatggcataggaatggatg

SEQ ID NO: 30729 - DNA, 1544 bp, Homo sapiens
taaaatgacttgttcaggaaaaagtggtttcaaaaggtctgatactagctgtgttttacattgcacgtatttcaggaagaaaatagcaaggaaagttatttcccttgtaaaatggttaccccttgctttctcattctagagtcttcatcatccaaacctggaaagaaaatcccagcaggagctgtttctgtatttttaggtaacataacttaggtttgttttctaaaaactacacaaatactgttttttgcatttcaaaattatcatcttctaaagtccggctggagatgaggaagtacctgggagcttcaaagggctttgagcatcttatagaaagagctcatttactgatattagctcttattctcctagagctcagtggccttggacttttttgtgtttgagctgacctggtgattctccgttgtgagatgttctgtagcagtaatggatggaggctattgggccctgttatgcattttgtggattaactgaaatggaaagtttttggtgggtgataatttttttctgtaaattcaaccggcccacactggctcacagctgtggctgtcttgtctctccacccacaggagacacggatgtgtttggtgctgcctccgttccatcaatgaaggagccacagaagcctgagcagcccactccaaggaaaagcccctatggkccccctcccactggcctctttgatgatgatgatggtgatgatgatgacgactttttctcggcaccccacagcaaaccttctaaaacaggtatgtgttcctgcctccgtttctaggacttcagccagaaaaagaacgttgcctaaaaagaacataagctcacctagttctgtatctcttacagtgccagaatcccttctccagcattcctgtcattgagttgttgtgtctgtacttacataggtgtggtgcctgggaggtctgttttatgacccaatcttttctgctctgtaagctaattactatgattattttccttatagagagctgaaatccttttctgtataatttttgcttgcaatttccagttctgacctttggtattgtaaagttttaatcatcctttcttccagccgaccttagtcaattacatgagcagcaggttgtgtgccggccatttatttcccagcttctcatttctctgccaaaaagctcaggtggccttggtctttcctcagatgatgttttcatccccttggccactttggcattctcctctcttttcctcttaaatgtaagtcctatgtcctgaagtcattcccataaatcatttgtttttaaatgtgcagatgaatcttccaggggcttttgtcaaaatgaagattccgattcagtaggtccagggtggggcctgagaatttacatttccagcaagcttcatggtctgtagatcacacttcgaatagcaagacttagatccattgactgctcttccagaaaagaaaggtagatccctagatccctaaggtgcacatgattttcagcaactttaaaaaataaaaaaggatggcataggaatggatg

SEQ ID NO: 30730 - DNA, 491 bp, Homo sapiens
aggcacatgtaaaagagatgtattttaaaatagttccctccctatccccaacctgatccttggaatacccaatttaagcytggtgtgtatgctcatttcctgaggctctgaacataaatataagctaacaagtgcatatatttagagctctcctacccttcctgcttatttatttatttatttagagacagagtctagctctgtcacccaggctggagtgcagtggcaggatcttggctcactgcaacctccacctcccaggctcaaatgattctcttgtctcagcctcccgagtagttgggattacaggcgggcaccaccacacccggctaatttgtttttgcccttttttttttttttgagatggagtctcactctgttgccaaggctggagtgcagtggtgcgatctcggctcactgcaagctctgcctcctgggttcacgccattctcctgcctcagcctcccgagtagctgggactacaggtgcct

SEQ ID NO: 30731 - DNA, 677 bp, Homo sapiens
attgattggtatgatgagtgactgagggtcaggctttttaaagttttcccagggcttctaatgggcagtcagggttgagaaagaccattgcagatattactactatactgataagaagaataaaggagtgctggactcaaggaagtttgtgccaaagaagacaaagggcattttsctccaattaaccttatttatacttcttccaataaaaccgtatctcttagtaatggggatagttttttcttatccttgtattatgtaaattcttctctgaagataggagaggaatctccactctctctgaaagatagagtggtccactaataaacttctgatcaactctagaagaatattcaagagagcacatattggctgaactcctcttaggaacaaggcattggcaagtgtaatgagtgggaaagaggccatataaatataatcctggggagagggacttattcattacagaatgttttttatttatgaaaattgcaaaataacctaaatgttcctcaacagggaatggtgttctacacaatggaacactgtagttaacatatatgaactggagctacagctctcaaaataattatcaacatgtgaagcaaaaaggtaagtggaagaagcatatgtactacatgttaataaagtgctctttagataaagtttgataacat

SEQ ID NO: 30732 - DNA, 677 bp, Homo sapiens
attgattggtatgatgagtgactgagggtcaggctttttaaagttttcccagggcttctaatgggcagtcagggttgagaaagaccattgcagatattactactatactgataagaagaataaaggagtgctggactcaaggaagtttgtgccaaagaagacaaagggcattttcctccaattaaccttatttatacttcttccaataaaaccgtatctcttagtaatggggatagttttttcttatccttgtattatgtaaattcttytctgaagataggagaggaatctccactctctctgaaagatagagtggtccactaataaacttctgatcaactctagaagaatattcaagagagcacatattggctgaactcctcttaggaacaaggcattggcaagtgtaatgagtgggaaagaggccatataaatataatcctggggagagggacttattcattacagaatgttttttatttatgaaaattgcaaaataacctaaatgttcctcaacagggaatggtgttctacacaatggaacactgtagttaacatatatgaactggagctacagctctcaaaataattatcaacatgtgaagcaaaaaggtaagtggaagaagcatatgtactacatgttaataaagtgctctttagataaagtttgataacat

SEQ ID NO: 30733 - DNA, 677 bp, Homo sapiens
attgattggtatgatgagtgactgagggtcaggctttttaaagttttcccagggcttctaatgggcagtcagggttgagaaagaccattgcagatattactactatactgataagaagaataaaggagtgctggactcaaggaagtttgtgccaaagaagacaaagggcattttcctccaattaaccttatttatacttcttccaataaaaccgtatctcttagtaatggggatagttttttcttatccttgtattatgtaaattcttctctgaagataggagaggaatctccactctctctgaaagatagagtggtccactaataaacttctgrtcaactctagaagaatattcaagagagcacatattggctgaactcctcttaggaacaaggcattggcaagtgtaatgagtgggaaagaggccatataaatataatcctggggagagggacttattcattacagaatgttttttatttatgaaaattgcaaaataacctaaatgttcctcaacagggaatggtgttctacacaatggaacactgtagttaacatatatgaactggagctacagctctcaaaataattatcaacatgtgaagcaaaaaggtaagtggaagaagcatatgtactacatgttaataaagtgctctttagataaagtttgataacat

SEQ ID NO: 30734 - DNA, 677 bp, Homo sapiens
attgattggtatgatgagtgactgagggtcaggctttttaaagttttcccagggcttctaatgggcagtcagggttgagaaagaccattgcagatattactactatactgataagaagaataaaggagtgctggactcaaggaagtttgtgccaaagaagacaaagggcattttcctccaattaaccttatttatacttcttccaataaaaccgtatctcttagtaatggggatagttttttcttatccttgtattatgtaaattcttctctgaagataggagaggaatctccactctctctgaaagatagagtggtccactaataaacttctgatcaactctagaagaatattcaagagagcacataytggctgaactcctcttaggaacaaggcattggcaagtgtaatgagtgggaaagaggccatataaatataatcctggggagagggacttattcattacagaatgttttttatttatgaaaattgcaaaataacctaaatgttcctcaacagggaatggtgttctacacaatggaacactgtagttaacatatatgaactggagctacagctctcaaaataattatcaacatgtgaagcaaaaaggtaagtggaagaagcatatgtactacatgttaataaagtgctctttagataaagtttgataacat

SEQ ID NO: 30735 - DNA, 615 bp, Homo sapiens
tttccaatcttatgctttggcctcttgatcaagccaaagcccartccaatccaatcccagctcctgtgtgtacctattaggtaattcttgccattcctttgaagtatatataatcctttccctcttatgaagcccagtgtgtcctgagctgggttatgttggatataatcgtacccactggggtggtgtgggagtaagaagaggagatgggagcatgtcttttggaagttacctgttgccttgtggagttaaagcttctgcagtgtcttccacataagtgaagtgctggttcttactgtggtgcagtgggccacctctgcaaggtctggatagtctccagagccaaaatccttgtggccatccactcagatatccccatcccatattctagggttccatcttttcctaaccagagtcctggccttagtataactgacctactttggctgtgtatttaaatgtctctggagttctgcatttctaactattaagttctgaatctgctccttggccatgtcttcttttttattgtaagagataaattaacaaagaggctccgtggtttcctcacttagcttgtagctggttgccagtcatcgtcactttcacatgatg

SEQ ID NO: 30736 - DNA, 1107 bp, Homo sapiens
ctgaatggaggggtgtgggtgggggagactggaggcagtgaggctggtgtggtggtaaagttcagttgagcccactcccacgtcaggagcagagtcagggtttgaaggctgtggcccagcaagggggctcagaactattccacagtgcccacggccctcagaatacaggctcagcttctgtcctgggactcgagctctcccaacctggccccagtcctaccttcagactagcacatcactccagcaagacaccctcggtcatccctgrgcttttgcagaggctaccctcctgcccttgtccctacttacttaggcgacctctcctcacactgcagggctcagcacactggcctccagaaagccttgcttcatcccccacccagcactgacctgcagaccatcagggttgtcggttaaaggaccaaagtccggacaggaggaagaggttttgacatctagcgcacagcagggtgaccagagtcaatgagagtgtgttgcattttgcaaaacaactgagagagtccgtatcaaatgtctctctgcatttagattggagaggatgaaggccctgaggtccaagaacatggaaacctgacagtggacgccaacagctgtggagagaagccgggcgacagctgtggagagaagccgggcgatatgctcacgcttccgtgtgcccagcaatcctgctttatctttttaaataaaggtgattcctgataacactaccgtttcttgcaaattttgtagtagcattggaaaggtggcagatgagtcacaggcaatctgctgctttgcgccctccctgcacagaatgggggctgtgcacaccctagtttaggcagtatgcagtcatgtgatcctctcagttactcagaaaaactgaaaggaaaagagacctcagagaagtatcaggatgaccccacccacagaaaatcattaccagtggctctgaagggctgaggctctgagcaggtgcaaggcagagtcccacacattgtgcatggcctccccacactcacactgcccagtgagcattttcagaaggaccagcggccccttcaggtctcgtctgactgtgttaatcatgctgagaggtctccagga

SEQ ID NO: 30737 - DNA, 562 bp, Homo sapiens
agtaggaccaggtagcaagagctatagaagctgtgggcaacatgttaagggatcagaaagaaggataaagcatccsagtgggatttgttgaaccctttttgtaagatttaactggagcacaaacaaggaaggacagttcttaccaagaagcaatccctgttctttaatttctagtgattttgaatgcaaggggagtgtgaggtgaagtgaggacgaccataatccctgaggtctgtgactattactattttctctgtcttctgagaatgaagaaatgaaaatgaactgaccctattttataatttccggaaatccagctgagacaatccgatggtgtctttgtgctttaaattcttcttttagtcttttacctaaatccattcttatacttaaatataaaggaggcaggatgtaatttgctaaattaaagtttttgtaatgtttatgactgccaactaagaaagtaaaaaaacctattattttaaccttgagagagctcaccaaaacaggttttaatgtgcttttccccatcagacctgttcagtaagaggcttgttggtga

SEQ ID NO: 30738 - DNA, 562 bp, Homo sapiens
agtaggaccaggtagcaagagctatagaagctgtgggcaacatgttaagggatcagaaagaaggataaagcatccgagtgggatttgttgaaccctttttgtaagatttaactggagcacaaacaaggaaggacagttcttaccaagaagcaatccctgttctttaatttctagtgattttgaatgcaaggggagtgtgaggtgaagtgaggacgaccataatccctgaggtctgtgactattactattttctctgtcttctgagaatgaagaaatgaaaatgaactgaccctattttataatttccggaaatccagctgagacaatccgatggtgtctttgtgctttaaattyttcttttagtcttttacctaaatccattcttatacttaaatataaaggaggcaggatgtaatttgctaaattaaagtttttgtaatgtttatgactgccaactaagaaagtaaaaaaacctattattttaaccttgagagagctcaccaaaacaggttttaatgtgcttttccccatcagacctgttcagtaagaggcttgttggtga

SEQ ID NO: 30739 - DNA, 562 bp, Homo sapiens
agtaggaccaggtagcaagagctatagaagctgtgggcaacatgttaagggatcagaaagaaggataaagcatccgagtgggatttgttgaaccctttttgtaagatttaactggagcacaaacaaggaaggacagttcttaccaagaagcaatccctgttctttaatttctagtgattttgaatgcaaggggagtgtgaggtgaagtgaggacgaccataatccctgaggtctgtgactattactattttctctgtcttctgagaatgaagaaatgaaaatgaactgaccctattttataatttccggaaatccagctgagacaatccgatggtgtctttgtgctttaaattcttcttttagtcttttacctaaatccattcttatacttaaatataaaggaggcaggatgtaatttgctaaattaaagtttttktaatgtttatgactgccaactaagaaagtaaaaaaacctattattttaaccttgagagagctcaccaaaacaggttttaatgtgcttttccccatcagacctgttcagtaagaggcttgttggtga

SEQ ID NO: 30740 - DNA, 491 bp, Homo sapiens
cagtaaaacaattactgtgctctttcaaacacaggtcataaggcagcatcattcataaatggcagtctcttcaaatttgatcaaatggagcttactgttggcactcagaattaaaaccaccagaagctgcttgagttttccctaggatgtccctgtgctctctctctttcttcctttctttctttccctttctttctttctctttctttctttctttctctctctctctccttccttccttccttccttcctccttccttccttccttccttccttccttccttccttycttccttccttcctttctttctttctttctttctttctttctttctttctttctttccttccttccttccttccttccttttctctctttctctctctctctttctttctttttttgaggcagagctttgctcttgttgcccaagctagaatgcaatggtgcaatctcggcttgctgcaacctctgtctcgcaggttcaagc

SEQ ID NO: 30741 - DNA, 491 bp, Homo sapiens
cagtaaaacaattactgtgctctttcaaacacaggtcataaggcagcatcattcataaatggcagtctcttcaaatttgatcaaatggagcttactgttggcactcagaattaaaaccaccagaagctgcttgagttttccctaggatgtccctgtgctctctctctttcttcctttctttctttccctttctttctttctctttctttctttctttctctctctctctccttccttccttccttccttcctccttccttccttccttccttccttccttccttccttccttycttccttcctttctttctttctttctttctttctttctttctttctttctttccttccttccttccttccttccttttctctctttctctctctctctttctttctttttttgaggcagagctttgctcttgttgcccaagctagaatgcaatggtgcaatctcggcttgctgcaacctctgtctcgcaggttcaagc

SEQ ID NO: 30742 - DNA, 491 bp, Homo sapiens
cagtaaaacaattactgtgctctttcaaacacaggtcataaggcagcatcattcataaatggcagtctcttcaaatttgatcaaatggagcttactgttggcactcagaattaaaaccaccagaagctgcttgagttttccctaggatgtccctgtgctctctctctttcttcctttctttctttccctttctttctttctctttctttctttctttctctctctctctccttccttccttccttccttcctccttccttccttccttccttccttccttccttccttccttccttycttcctttctttctttctttctttctttctttctttctttctttctttccttccttccttccttccttccttttctctctttctctctctctctttctttctttttttgaggcagagctttgctcttgttgcccaagctagaatgcaatggtgcaatctcggcttgctgcaacctctgtctcgcaggttcaagc

SEQ ID NO: 30743 - DNA, 491 bp, Homo sapiens
cagtaaaacaattactgtgctctttcaaacacaggtcataaggcagcatcattcataaatggcagtctcttcaaatttgatcaaatggagcttactgttggcactcagaattaaaaccaccagaagctgcttgagttttccctaggatgtccctgtgctctctctctttcttcctttctttctttccctttctttctttctctttctttctttctttctctctctctctccttccttccttccttccttcctccttccttccttccttccttccttccttccttccttccttccttccttyctttctttctttctttctttctttctttctttctttctttctttccttccttccttccttccttccttttctctctttctctctctctctttctttctttttttgaggcagagctttgctcttgttgcccaagctagaatgcaatggtgcaatctcggcttgctgcaacctctgtctcgcaggttcaagc

SEQ ID NO: 30744 - DNA, 566 bp, Homo sapiens
gggagagtggcctactgaccaggctttgatttgaaggcccaaggtacaacggaaatggcttagtagctggatggttcctgaagaggttgtcgcagtgcagtggtgaaagaaagaaaaggttactatgggcatgtccctgaggtgtgtatcagtgcaagtctgtgtatacacacacacacacacacacacacagtctctctctctcttacatatatatgtaaatagaacttaaatctgtcttgtgctgtgttttcgccttagtaatactttatttctcttattaaaaatacatggaactcaccatctgataggtagaaaggctaagagaaatgcaaccagagggaggtaatattcctggctatagtcgattggtgttcagagtgttttgattctctgaatgagtcaaaagattgaaaaaaaaatagccactcttatcactaggaaaagaaatgaggaggaagggtcctgaaaatggtgtmtgagcaatgaaagacagtgaatattttaaagatcacaaaatttaatttattcaacctaaatgcataaaagtacaggtggggacatta

SEQ ID NO: 30745 - DNA, 650 bp, Homo sapiens
tatatagaagacatgcctttggggtgtgcttgaataccatcactgaactccagaagaatggattgaaaccgagttttttcatttttgagttgtactactcaagccaatgtagaaaatagtgagccagcctcataagtaatatatttgtgatgcccrcaatccatggaagcctcggatgccacctgcacatatgcttgctctctagggtcccagcctaccccttgcaaagacactgctactggtctttggggacactaagctcctaacactattagaactatcttctttttctgtctgggaattgtagtccttctctacttccaaatcgccttggggtcagtagaaacaaggctaagtcagtattttgtgattagaaaagtaatgggtgacagtcctgtggatgcaacaataaagtattcgccagagcctatgtttgcactctttgatgacttgtgtacagtgtgttctgatttcagaatcgtttggcaaattttacactaaaccagaaaggggagtagcatttttttttaggtgtaacattgaagtaagtatgagttgaaactttagaaacaagaaattaaatttctaaattagttatatcagatataataaatttctggtatattcagttcctaccgatgtctatacag

SEQ ID NO: 30746 - DNA, 650 bp, Homo sapiens
tatatagaagacatgcctttggggtgtgcttgaataccatcactgaactccagaagaatggattgaaaccgagttttttcatttttgagttgtactactcaagccaatgtagaaaatagtgagccagcctcataagtaatatatttgtgatgcccacaatccatggaagcctcggatgccacctgcacatatgcttgctctctagggtcccagcctaccccttgcaaagacactgctactggtctttggggacactaagctcctaacactattagaaytatcttctttttctgtctgggaattgtagtccttctctacttccaaatcgccttggggtcagtagaaacaaggctaagtcagtattttgtgattagaaaagtaatgggtgacagtcctgtggatgcaacaataaagtattcgccagagcctatgtttgcactctttgatgacttgtgtacagtgtgttctgatttcagaatcgtttggcaaattttacactaaaccagaaaggggagtagcatttttttttaggtgtaacattgaagtaagtatgagttgaaactttagaaacaagaaattaaatttctaaattagttatatcagatataataaatttctggtatattcagttcctaccgatgtctatacag

SEQ ID NO: 30747 - DNA, 552 bp, Homo sapiens
ttcttgactaaacgccgccataacacacctggaccttcattctcttccattttttttttggctcatctatggaatgagcatgacacactctggctagaggaaccccttctagtgttttctttccatatcttttcctgcttctaagtggccataattaaaaccttccccattatagacatctgaaccacaagaatcccttcaactcccactttgtttgaggacattcttgtgtatgctatggaacagtttaatgattttgctttatgtactcattaatatccttttttataattattagattaaattagcagtcaagaagtggtaatatagtctcatataggttaactcttctgatatcttcttcctttagcagtttcacggatacctagtgaaacatacagttcatccccstcaggtgcaggctcaacacttcatggtgagtacttggggaagatttagggacactgaagctagtggtcagctttatttggacacaggtgtaaaaacaagaactgataagaagccagcctcagatagatatataaaagtaca

SEQ ID NO: 30748 - DNA, 518 bp, Homo sapiens
acaactccctgagaattgacaaccgatgagccaaacagccaacaggaccacaggaagcccctgaactctgaatgcaagtccagctgcccctcatgagtccaccccacaatcttggcgagtggaagtgaaagttatccgcattttaaccacatttccatctcaagttgttgttttaaaagatttcaaaaatccttacggaaaagggtcacattcaattttccagatactatctagatgctgggccaatcgcaacagctgatgacgaacgcacgaggccccagtggcaggtgctgtccccagcagcaggccccrtgcacaacacttgccctgcatccccacacagttctgtgctagttacttcttgccaaaagtgccagattcatgttatttttgaaatgctctaagtttagaattttaaggggaaaagaccagaatgcagaatgaacacactgcacttgttcatacctccatccaataggaagaaaaaccaccttaaagcagatggaagaattattttg

SEQ ID NO: 30749 - DNA, 1042 bp, Homo sapiens
tattaaatctaacaaatgttataatttttttttttgagaccgagtgtccctcctgtcacccaggctggagtgcagtggcacaatctcagctcactgcaacctctgtctcctgggttcaagcagttctcctgcctcagcttcctgagtagctgagattacaggcaggtgccaccacacccrgctaatttttttttttatttttagtagagacggggtttcagcctgttggtcagtctggtctcgaactcctgacctcatgatccacccgcctcaaatgttataaattttaaataagatattgacccatgtgcaatcacagttgtaggtgaaaagtatattacttaatgggtggaagcatttttagttttaagaaaatttcgcattgaaattgtaccaatttgcaatctcactagctgtgtctaagagtatattttgtgttcatacttttaagacggaagttatgtatcatacttttagttctcaattcaaagacaaaacatcatcaatcatggcactgtacttttttggattttctttttttttggggggggggtggagtctcactctgtctcccaggctggcgatatcttggctcactgcaacctctgcctcccagtttcaagcaattctcctgcctcagcctcccaagtagctgggactatggggatacagatgtccaccaccatgcccagctaatttttgtatttttagtagaaatggggtttcaccatgtgggccaggctggtcttgaactcctgacctcaagcgatccacccaccttggcctcccaaagtgctgggattacaggcatcagccactacaccaagcctatattcaaattctatacaagtttattagaattgagtcaggcataaccaaaatgttacaaaaatcttgattagtcttttctcagtaatttccaagtactatgtaaaaatatacggaaaaatgtggctctttttgatatcatcacaacagtaacaatgaagtctaaaatgggaagaaaaattgctaatttaaaagtaatccttaggtttctttc

SEQ ID NO: 30750 - DNA, 646 bp, Homo sapiens
tgcatacctatggtaaagtttaatttataaattaggcacaagaagatatcaaccacaataattaataataaaatagaacaactctaacaatatactataataaaagttatgtgaacgtctctctctcaaaatagcttaccatgctgtatgcacccttcttcttgtgatgatgtaagatgataaaacgcctacgtgacgagaagtgaggyggatgatgcaggcatcgtgacatagcacttggctattattggcctcgagctcaagccctctgctacttgacagttgacctgataaccaagccaggtactaagtgactgatggcaggcggtgtgtacggtgtggccacactggacaaagcagggttcatgtcccgggtgagacggtgcaagatttcatcatgctactcagaatggcgggcaatttaaaacgtatgaactgtttgtttctggtattttccatttagtattttcggactgtggttgactacgggaaatggaaaccatggaaagtgaaaccgtgggtggcggggtggaagctactgtgttacttcccttgctcaccgcaccaccttcaaatcttaaattcaagaaatgtacagcaatgtgaattgacccaggacttttttctcatcttaataaattattcc

SEQ ID NO: 30751 - DNA, 1595 bp, Homo sapiens
ccagcacgtgggcattcgcagacaaagctatccctgctgacctgctgtgggaaagacatgcactctgatttcaccactgacccggccgcactcttttgtccagtatataacgcctccctaagcatctcctttccttgcaaacaaaaaaaccctggaggaaaactttcaaagccacagtttcttctcagttgcaacccttccttccttccttcttcccaagaaggtctgactgggcttgcaagctggccccaccctgggctgggcctccacacaggcattgtgcgatcctctgccattctgtgtagacggaatacctgcgaactgctgccaacacaggaaggttggcgcctctctggagggaggcctggggagtatccatcgcccaggcgactgcagataagcagctaaggggctagggttctccacacctccatgtgggttccagagcctttctcttgtacttcttttactgtttttgattcatccttaattcattcacttagcaaacctattgagcccctgcccacagcaagccccgtgctggtgttggaggacacagagttgactgagmtagattccagtcctcaaggctctcatgttgctgagacaggccactcatggagcaaccctggcacctgggactcctggagcccccagtgaaaccacctttctgcgatcccagtatcaatcccatcagcagggtcccttagatcacgtcaccagagacaaagccaacggagggtggaagcaacaggagcgtggtgcagatccaccagccccaactccacctcctgggtttcatccctcccttagcaccagcgaggacttccagattcagattgtttttggtcttaagaactttcttgtcacagccaagtggcaggcgggacatggtaattggcctatgttgcgcttggacctagcaaatgagtaaacttttcaagactaaatcatcaatgctacccactctggatcctccaaacacctgctcattatcagcatctgcaatacaacaagtacctacctaggtagtaactaacatacataatggtgattcacaaagaggaatgagggcagtaagaggaaggatcccaggcctggccagaaacccctatccagtagctcataccaagggtccagctagggatacaggcagagggaaagagatcagaaccagaaaaagaggaagaggaaaaagagtcagagtcagaaagggatgggaagaaagaaaaagaaaaaaagacaggagaaacctaataaaggtttgaaatggtccttggggccaggtgcggtggctcatgcctataatcccagccctttgggaggccaagacaggtggactatttgagcccaggagttcgagactagtctgggcaacatgatgaaaccctgtctctacaaaagatacaaaaagatacaggtggtacacacctgtagtcccagctactcaggaggctgacaagtgggagaatcgcttaagcctgggaagttgaggctgcagtaggtcaatatcacaccactgcactctaacctgggtgagagagcaagaccctgtctcaaaaacaaaaataataaaaaaaagaaagccgggtgcg

SEQ ID NO: 30752 - DNA, 703 bp, Homo sapiens
tggtgatctggacagggagactgctctggaaggtaacagcatccttggtcaggctggcttctcctctcctctccccttgttgtccatcctttctctctactagaattgttcaaactaccaggcgaggccctggctgaggaagaaaccttgtctacctcatctggaaacttggccgggttaccyttttggtacccgggtagatcccgctggtccttcagtgcccacctgtgctcaaaccttgctgccctagaacctcaggcactcccagctctctccttccctgagctccttaaatacgtgagggtcagagccagctgccctgctgcccagcccttgaggacacagagtcacactcctctcccaccctcaagtgcctcgtgaacccctctctccaggaggagggcatcatgacgcactagacctggctgcaggtggtgagtgaatgtagctgcgccctgagcagaggggagaggggccatgaggaggctgttttggggcccttctggagcagggccggagaagggtaggagattgaagagggtgagtgagaaaaggctggacaggactagggcagctcctcaacccacccccaggcaccctccccttcgcgctggacctggctttccttgaggggaggagggagtttgtccccttgatctgtgtggcgcctctccccagcacagtgctgcaaggtagacggggc

SEQ ID NO: 30753 - DNA, 593 bp, Homo sapiens
tgcactaaaatctcagaattcaccactgtagaactcatccatgtaaccaaaaaccacctggtaccccaaaaatactgattaaaaaatatagcttaataatagaaaatgaaaaacaaagacaagctatagtttcttcagataactattgtacctgttgcccagttgctacatgaaaaactcataaaatttactcccagaatcacatatgyctaccacttacctggccacaagctcacttgtcctcagatggttttgacttgggcaacaaaaatttcatggcatctttgaagaaggaagctattaaggagtctatggtcttttttttttttttccttttgagatgaagtcttgctctgtcacccaggctggagtgcagtggtacagtctcaactcactgcaacctctgcctcccaggttcaagcaatcctcctgccttagcctcccaagtagctgggattacaagcgcgaaccactacgcctggctaattttcgtatttttagtagagacggggtttcaccatgttggccagattggtctcgaactcctgacctcatgatccacccaccttagcctcccaaagtcctgggattac

SEQ ID NO: 30754 - DNA, 1957 bp, Homo sapiens
  misc_feature (1)...(1957): n = A,T,C or G
ttgagtcaggtgttgacacttacatttgccgaattaaacatcactgttctttcagctgtgtctcacctactatttaacccatcagctttcaaatctgcctgcacattagtatcacccagtgtacttttgatacaatctctgattccaagacccctttccagaagacttgaaaagactctctggggagtctattttgtgggtgtcaggtcttttttttatgcttcccaggcaattctaatatgccattaggatggagagccactggtttactacatctattaagaagtgaattttatttatttatttttcaaccacgctctgggatccatcggtgtagtcagctcacttctgactgtgactctgggctcatgggcaaggtacctattggctactgccacaacattgctgtgtaacaaacaaccacaaaatctgagtgaatacaataataaacctgtgctggccaacctaggccatggtggcttggtggccctcctagattatggagctgggttagccatgctactaactgcaggtgtgtggtagggtgacccgctttcccagttagcccaggactttcttagttttgagtgctgaaagtcccaagtcccaggatatgccttggtcctgggaaaaccgggatggttgaatacccatccatggtcggcctgggtagctctgctccctgtgtctcatcctccttggaccagcaggctagccaggcatgtgcctttcaagatgttggcagagactcgagagagcaagtgggcccaagagagacccagcctcgaatgggctcactgccaccgcccascacaggttagctttgtccaccatgttggccagaagtctccagtcccaattagacttcttccttacagatttagcctggctccaggctctgaccatctttctggatctttcttcaggcatctggcatgttgtccaaagccagttacacagctgagcccaaagtgaaggggcatggaaaaatattccacccacgatgaggccatggcaggcatgtcgatgcagagagggctaaataattggagccaatcattccatctcccacaggcagagaggctctggcttccaacgtggatgaccttaagtccttccttggctgccagctctctctggggagcccagttgcagggccagagaccttcccaactcccactcccacccagctcctaagacacatactgctctggtgnnnnnnnnnnnnnnnnnnnnnnnnnnnnnnnnnnnnnnnnnnnnnnnnnnnnnnnnnnnnnnnnnnnnnnnnnnnnnnnnnnnnnnnnnnnnnnnnnnnnctttcctgggccaaccctcctactactattgcactggagattagggattgacatataaattttggcgaaacacagacattgaaatcgtagtaggagctcagctcagtttcatctgggattcctcttgggccccacctcctatccttttcctacaacttttaacccagagacagagagatgaagagaggccaagaaactgagagtgtgagggaagatatacaaagaagagagacataggataagattttttttgaaatgaagacacaaagagatgagggagaaaaggaatagaaggaaagggagagtgaggagacagagaaagaaaaggaaagaatgccattcagcaggaggagagggaagagcagacccctgggcctgggtggccttgcagccgtggaggggagcccgccagcctggcagccagcgtctgcctcctgcacagggcccagaaagaggcagtagcagctgggccgagcatttggctgtctgctgagcccaagcctctgtgcctgaccttagcccagctgctcaaatcctcctgccctcctgcctgcagctgcccctgcactcccaagacccagaggctggggagtggagagtggagcccgccctcttggtcagctctgtcagagaggcaggag

SEQ ID NO: 30755 - DNA, 566 bp, Homo sapiens
cctggtgtgtagcatacaaaactacacaaggtaatggaaactgccacagaaaacatcagaagcaaacatgagatcttacaagtcattacagcagcacttgtgacaaactcatatgctaagttctaaaaatataaatattttaatatattaaagccaattattttaacagacttgtaatgcagaaacaagtaatgtcatatttggtttgaattaacaagcagaaaaaggttgttgaatattacatttgttttattagtcattaacacattttacaaagtcaaaaagaactgtgttaaaaaaattacaaaaagaattgtgttaattcttttaagttacataaaatgttcaatgacaactttttggagatggccatagacttaactacaacagccaaagaccartcatagctgatactatcacacttgaatatacaggatcaggattattatcaagttgtaagatgtgtatatatacaaagggacctaaaacaaagcttaaatcatgtggaactcaccgtgagccttgtaacttgtgtctgtggatcaattaacctaaaataataattt

SEQ ID NO: 30756 - DNA, 1214 bp, Homo sapiens
accttgctcctccaagcctccacttccttgtgtataaaaacaagagaaatagttgcaagattactgtgaggrtaaaggtgatgttgtctatataatgctcagctgggtgtgtggtgcacagcagccattcagttactggtagtagctgtcattgttatttagaaaggaagggcctttctaaaagggtgtcgaggctcacacctgtattctcagcactttgggaggccaaaatgagaggattgcttgagcccaggagttcgagaccagcctgggcaacatagctagaccaccccccccatctctacaaaaaattaaaaaattggtggagcatggtggcacgtgcctgtagtcccagctactcaggaggctgaagtgggaggatcacttgagcccaagagttcaaggctgcagtgagttatgattgcaccactgcactccagcctgggcaatagaatgaaaccctgtacaaaaaaaaaaaaccctaaataaataaaaaggaaggccaagtccaaggccacctgctccgtctactctcatcccccacaatctcgatgctgcatcttccatggtgctcctggaagaacaggaccacaaccctgttccctcctgtacttgcctcagattggagcaggcacagtggtctcctcacctgttcctctggaagcacaaaaggctacagttgaatggtagacacaataatgacccccaaagatgtctgtgtcctaatccctggaacctgtgaacttgttatcttcatatggcaaaaaggactggtaaggacctctgtagttgggagaacatcctgtattttctgaatgggctcaatttaatcacaagcatccttatgagagggaggcaggagggtcagtcagagaaagaggtgggacaatagacacagcgttggaggggcaatggcagaaggagaccatgagctcaggagtgaaggtggcctcactcctgggctcatggattctcccctagaacacagccttgtcaacgccttgatttgagacccatttcaaacttgtgacctctaaaagtataatacatttgtattttggaagccactaagtttgtggtaatttgttactgcagcaatagaaaacgaatacaagtgtgttatgaaaaatgaccctttcctgggctgatttgcctcttcttgggatgagccaaacctaaatagagaccatgttgcaaaggggcatgtttttctt

SEQ ID NO: 30757 - DNA, 805 bp, Homo sapiens
tgcagggtttttgttgttgttgttttatgagacaaggtctcactctgtcacctaggctggagtgcagtggtgtgatcatggytcactgcagccttgaccttctgggttcaagtgatcctcccatctcagccccctgactagctgggaccacaggtgcatgccactgcacgggcctaatttttaaaatgttttgtagagatcaggactcaccatgttgctcaggctgatcttgaactcctggtctcaagtaatccttctgcctcagcctcccaaagtgctgggattacaggcatgagccaccataccaagcctctgcagttatttttgttgagaattatatagggcccgttcaattgtatttttctcaaattcaagccaatcagaatggcacctttcacctcaattttaacagataccaggaaccaagatcaccacacacacgcaatataatgatgaaatttcatgttcaaatcacataactaaatgctgatttgtgaacatttttagattttcctaggtgataaaaatgatacagtcattagtttttttcaaggacagtctcccacttctcctgagttggatgtgccaccagcccaccttagagccagccctggggaaatgcagagggagacagagggcaaattcggtgtttgttataatcatgtgtgatgctatgtaagagctatctttagctgtgtacctcccttattcttgaggggtagagtaaggtggggtgaccaccaaaggaagccagcaggcttcgttcgcctccagggaatgagattccttgtctccctctctttct

SEQ ID NO: 30758 - DNA, 550 bp, Homo sapiens
agacatgtcataaaatgtaattgttaatttctcttgcaaatagaatagggggataacttctcctgactcaaatcaataattaattaatgttcagaagtaattgtgatcttaaatgattctaaaagtaactcccaccaaagaagactttttctctctctttagcacaaaataattgtcaatggaaaaatgcacatagatccagagaagctgttaattcatgttccagctttatgagatacacatctgaaatcaccaaggctttgacagataggatagaaatcacagaaattactctattaacctatggtaagaattttgcccactgagtttaaccttcatggtcagaggaaagaaccctttaattattttcacgtagaaaaacttttgaaaataacaacagtgtaaacactatacactgacacaaaactttccaaggggaacaatggaaataacaaaaaaagctcctcaggtgaaagaacacatttgttcaaacttcaaatagraaaaagagtaaatgtattggaagagatccaatagccagaagtgaagt

SEQ ID NO: 30759 - DNA, 559 bp, Homo sapiens
tgtatcagactcttgcctagactttgagaatatagggatgaagctctagtgcctatcctacaggaagtcatcatctatttgaagcaggctttctgtgtatataataccaaaataatctgattattgtaaaattgtttagctcttcaatgggattttcttcccgtgtaaatatcagtgtagttgacaccacctttatttatatatcatatatattgtatcattaccttatcacaggtaaatataacattctacagatgctgtttgtaactttccaatgaaaggcatcatttttgcaatttaacctaatgtaattttctcttgtaatttccaattaaaatgtttattgactcccatctgttcagccaactgatattaactagtttatccagkattaatgaagatcccacatgtatttctttaatagtgtttgtacaataatataatcatttgtgatcaccaaactgtgctcttacacttttttttttaatgtttgctcttgtctcagaactcctccttggcttcttaatactttcaatttaaattcaaatctctgtccctt

SEQ ID NO: 30760 - DNA, 694 bp, Homo sapiens
tgaataatccaagctgattatctgccattgctagtgaaaaggcttttcttagaaattycatcaatatttctactaaaataatgccttaatttattttgggcagcactgggccaattatctccaggcatgtttttctccctatgcctgtcattttgtggcattacattaaattgtgtttaaaaatattccataaataatgaattattacaaaaataatttattactcacttaaaagctataaaatattaaatataaaacttaaggacaaagaagtaatttctaattcacattgcttacacaaaataataaggcctgcatcttctgttacactatggaaaagaaaatatttcacttatttcctttcaggctccaaagggcagaaagaagagtgaaaactctttaatcttcaacccccctggactagcaataactaataggaaccccctgaaagtgacatcaaaaaaagtccggaggccagagtgccagaacttctgccaagctaattattctcatggtattgaaaaatcactctcactcttgtgttgtaaaagtgggacaatcgcaatggacaattcctaatgttcttcgtggactggtagctcacatggggctttattactccccactggaacaataatgagagttcgtggtctcatggagaacctttccaccccagtcatagaagaatgaaata

SEQ ID NO: 30761 - DNA, 299 bp, Homo sapiens
tgtatgataagaaatttaactgccttagagaaaattcttccagtttgtcatgagaatttgtctgacttattctaaggcatgcgtttgtcgtaatggaatgcgcccattatgcctcaaaatttttttctttcataacaacacaggaaatcaaattaatgttcyttgggatatatatgtatatctaatatatataatattataatattaaatatatataatattttaagtgcatgagaagtataaaattttttctgtcttttctggttgtttgaggtgacatctgtggcttgcagtggaca

SEQ ID NO: 30762 - DNA, 299 bp, Homo sapiens
tgtatgataagaaatttaactgccttagagaaaattcttccagtttgtcatgagaatttgtctgacttattctaaggcatgcgtttgtcgtaatggaatgcgcccattatgcctcaaaatttttttctttcataacaacacaggaaatcaaattaatgttctttgggatatatatgtatatctaatatatataatattatratattaaatatatataatattttaagtgcatgagaagtataaaattttttctgtcttttctggttgtttgaggtgacatctgtggcttgcagtggaca

SEQ ID NO: 30763 - DNA, 921 bp, Homo sapiens
tcttctgctgagtcctgagcaaactgagatggataaatcactctagttctggttgtaaaactggcagtaggagtgatgggaacagatgggccctggctgcagttctgtgtctgagtcaagctgctgttaactacatgcaccagtggtgctttccatcgtcttggaaaactgaaggtgaatacctaatgaagaagaacatgtaacaattatttaaaaattaacattactatatacttcagaataagccttctgatctagtcatccccttttctttacatattctcagtaaagataaagggtagtcttttagttttagcaaaatagaatgttctctcttatactctacttcaaagaacgtcaggcagcagkgaagcagttgaggacctagtggttgaatgtgtctcagacagatgaggatgcagagtggtatgcgacactttcagcattaatggcttcacttactttgagcatgaagataaatgaatgttcctggcctgagcagacatgatagagtaggcagacatcaggaactagtgggagggagggaaagatggaaaaagaagaaaagacgagaacaatagtagtagattcatgtgtccatcccttgtggattcagaaagagacaaacacgaacagtgaagatatgtttcatagaatcctctgaattccaaataaaattgacttctttctggcaatgaataggtgccttttgcaggtcacaggacagagctatacacaacttaagattacaagcagtgagcttcagaatttcgaatgacaatacctctatctgtgggcccacaaaagtagttgtcttagtctgtttggcttgtaaaacaaattaccttagactggataatttacaaacaacataaatttattgctcatagttctggagagtggaaagtccaatatcaaggt

SEQ ID NO: 30764 - DNA, 515 bp, Homo sapiens
tgttcttttactgtcttattagaacttctgaaatactaaaacataggcaaaaaggaaaaaaaaattcttattctcaaatctctatttctatagacaatgcctttactatcgtttcttgaggattataaatatcttttaaaaaatgaaatgtggctaaagggcatactgttctcttatagtaaaagtaaagcataaattttaaagtcttatataaagctttacacaaaaataccaccaaagagaggctgaagagttaaatgcaagagagaggggcaacatccaatctatacactatagccagggtataaacaaatataagcatgttattttcatgattaaaatatttatttatttatttatttatttatttatttatttattatttatttatgtatttttttgagagtttactctgttgcctaggctggaatgcagtgtcacaatcttggctcgctgcamcctccatctcccgggttcaagcaattttcctgcctcagcctcctgagtagctagga

SEQ ID NO: 30765 - DNA, 671 bp, Homo sapiens
ctggtctggtttccagacacctcctgattcaacagggatgtgttgcattagcactcagagtttytaacatagtagcaaatctacatctttactctatttttccatctcattagtaggaaggaaggaaggtaacttaatagaggaggacgcagagaattttaacagaattgccagctcttttttttttttttttttttttttctgtgtggctttaagcctggtgcttgcagcagaagaaacccttgaaattcttgaagctaggaagctaaggtttctgaaggaatgaatttgcactgcacacataatctataatttattagcctgcttcaatggtcattattgagatttgattgtaatgcttagtggcgttaacatcccttccacatctccctaacaacatttatggtcagtaataatattggttcagtgcttgagctgtgctctgaagaatgaatctgctagagctcatcttgcctcattacttctaacaaggctcctgtagtcatgtcaaactccggtgacatgccagacagaacgacatcttttaaatattatctctgacatacttcatttgaaatgctagcctttcaattagtgctatgcaccaggaagtgacagattctggaggaagcattgcttctctagatgatcataatgagagtagggtgtca

SEQ ID NO: 30766 - DNA, 671 bp, Homo sapiens
ctggtctggtttccagacacctcctgattcaacagggatgtgttgcattagcactcagagtttttaacatagtagcaaatctacatctttactctatttttccatctcattagtaggaaggaaggaaggtaacttaatagaggaggacgcagagaattytaacagaattgccagctcttttttttttttttttttttttttctgtgtggctttaagcctggtgcttgcagcagaagaaacccttgaaattcttgaagctaggaagctaaggtttctgaaggaatgaatttgcactgcacacataatctataatttattagcctgcttcaatggtcattattgagatttgattgtaatgcttagtggcgttaacatcccttccacatctccctaacaacatttatggtcagtaataatattggttcagtgcttgagctgtgctctgaagaatgaatctgctagagctcatcttgcctcattacttctaacaaggctcctgtagtcatgtcaaactccggtgacatgccagacagaacgacatcttttaaatattatctctgacatacttcatttgaaatgctagcctttcaattagtgctatgcaccaggaagtgacagattctggaggaagcattgcttctctagatgatcataatgagagtagggtgtca

SEQ ID NO: 30767 - DNA, 1014 bp, Homo sapiens
accttcttgaagatagataatattttatcggcttgtattctagtatgaacagtggtgtttcaaatgatacctaaacacagcatctcttccccttttctttccctgataatagctgtttgctcaccctttggcatgctcctctacccttaacccaaaccatgggtcagggaaccagaataaaactcaggctgtgacaatgagactctttctttagaaaattcaatctagcaggtccacgtaaggaggatatgtattgaagctgaggttcactgcattcttgaagcctgttcttttaaagcttcaatattgggaacttttcagtatccttcaatcaatattcttttttgtttttcttgaggtaaaacacctgtcataaggaccttgcacactcccaactttcaaaagtttgttgagcggctgaatgaaggcaagaatcctgtaatcactgaccatctttattatgtaagagtagttaagagtgtgctctcttagagtataaatacctttggtttggtctgccctgtagccattctccaggaaytgacacttcccttgtccacaaggttaatggggagccaacaggttattccaaggacaccttaagtcatggccaaagtacagttgataagggtggccagtaaattcccaaaatttgtgaaaaggggactgagggaaaccaaaatatttcaccccaaaatattctgctttgacatattttaagattacctctcagagggctggaaatacaagattagctgagaagctatctttgtggggaagatttgcacctgtaaagcaaatctgcattgatgcagcatggctttctctgaggctcttccttgtccagatctaggaaaggttaactgagtgtctgacatctttaaaggtctaaaagaaacatttgccatctatctctctgaaggctgctgcctgtgaggtttcctctgtgtaacaaggcccccttcgctagccaggcctgctcttctcttcctcctgtaacttggtttaccacca

SEQ ID NO: 30768 - DNA, 1269 bp, Homo sapiens
taaatacaatgtatagtatacatgaaaatgataaatgctatggagaaaaatgaagacgggaggtaggatgcttcttggtattctccaaaagggttcgaatagttatgcacacacagttgggggttcaataaatatttatgaatgtcacgactaagtgtctgaatatacagagtgtgctattcatatgatctttcatttgatatttaatatctatcagtggtctgcctagtagtgtactaggtctctgtggagaatctgagtctttttttatttgaatggtttatttactcactaagaagttttggcagatttatatgtggactgtggagttcagaaaagtagtgaccaattagttgtatttgtaatctctctggagaattattttraggaagaatggttaatacacatacacacacatataaaacctatataaacacatatataaaaacacatttaaatataaagtgcctcaaaaaaaaaagcaatttggtaaaacattagcctgaaaataaaataccaatacagaacaatttctagtttacttaatgaggacatggtgatacctctctacctatttcatgaagcttttatttggtacatttactttaattttttaatgcataatatctcgttaacaattttgacatgggctttctaaacactgaagttataattatataaacatttttgggccgggcatggtggctcacgcctgtaatcccagcactttgggaggccaaggcaggcggatcacgaggtcaggagatcgagaccatcctggctaacatggtgaaaccccatctttactaaaaatacaaaaaatcagccaggcatggtggcgggcgcctgtagtcccagttactcgggagactgaggcaggagaaaggtgtgaccccaggaggcggagcttgcagtgagctgagatcgcaccactgcactccagcctgggtgacagagcaagactccgtttcaaaaaaaaaaaaaaaaaaaaaaatttctggctctgttttagtttcatggtggtggaaattatagccataaaaatcctctaactgtatgtattatagggagaaaaatgacattaatcctgaacaatgggtaataattgagacgtgttgtcaagcagtgcagtgacaaaaaataaccttgctgatctcctctgtatctttgaataattatcagctataaaaaaggaataggttggtgctataatctttttgtttttattgggagaaagactattttaatcttattttgacagtcccttat

SEQ ID NO: 30769 - DNA, 1269 bp, Homo sapiens
taaatacaatgtatagtatacatgaaaatgataaatgctatggagaaaaatgaagacgggaggtaggatgcttcttggtattctccaaaagggttcgaatagttatgcacacacagttgggggttcaataaatatttatgaatgtcacgactaagtgtctgaatatacagagtgtgctattcatatgatctttcatttgatatttaatatctatcagtggtctgcctagtagtgtactaggtctctgtggagaatctgagtctttttttatttgaatggtttatttactcactaagaagttttggcagatttatatgtggactgtggagttcagaaaagtagtgaccaattagttgtatttgtaatctctctggagaattattttgaggaagaatggttaatacacatacacacacatataaaacctatataaacacatatataaaaacacatttaaatataaagtgcctcaaaaaaaaaagcaatttggtaaaacattagcctgaaaataaaataccaatacagaacaatttctagtttacttaatgaggacatggtgatacctctctacctatttcatgaagcttttatttggtacatttactttaattttttaatgcataatatctcgttaacaattttgacatgggctttctaaacactgaagttataattatataaacatttttgggccgggcatggtggctcacgcctgtaatcccagcactttgggaggccaaggcaggcggatcacgaggtcaggagatcgagaccatcctggctaacatggtgaaaccccatctttactaaaaatacaaaaaatcagccaggcatgrtggcgggcgcctgtagtcccagttactcgggagactgaggcaggagaaaggtgtgaccccaggaggcggagcttgcagtgagctgagatcgcaccactgcactccagcctgggtgacagagcaagactccgtttcaaaaaaaaaaaaaaaaaaaaaaatttctggctctgttttagtttcatggtggtggaaattatagccataaaaatcctctaactgtatgtattatagggagaaaaatgacattaatcctgaacaatgggtaataattgagacgtgttgtcaagcagtgcagtgacaaaaaataaccttgctgatctcctctgtatctttgaataattatcagctataaaaaaggaataggttggtgctataatctttttgtttttattgggagaaagactattttaatcttattttgacagtcccttat

SEQ ID NO: 30770 - DNA, 562 bp, Homo sapiens
ccctaattgctccttagacgttggtccactcccgggtgagagtaccagtttgggattgttccaaactcagggtcactgactaaatttaatgacagcctctttgtgactgtaaatctaccagcgacgacagttttgaaaaccatccaactttgcttacccggagttctgtctccagcaggcaggatgctctggaagagcagacactttatccatagtgtagccaactgggttgagcaaactggggccacttgtgggtcagatgttttctgtgtgaatggaaggaatgtgtgctaattttacaaacaattcctgacattccgcatctctcttcttttaataataataataaaaaaaagcagaggtaccgagtaaaaaaccacttctgtttctcaattatattttagtttcacttagaacaaactgtcctgtgttccttcaagggcattcattattcattaaacaccattctatagcagtttaaaatacattttcgtatyatatttaccaggaagtgattgtatctcgaaagaactctcaactctagtccttttcctgttactgc

SEQ ID NO: 30771 - DNA, 524 bp, Homo sapiens
attgtgtatgccactgtaattccttcaggtaagtctggaactggacctgaagaatttttcaattcctcttctgaaacctcagataccagctcaataccccactcggtatattcatggattatctcttcctcttcttgtataacctcatttgggcagtgctgctacctttttcttayattctttctgcaatttctgtcatcacactgaggatttggcttcatggacgtagcaggaaaaaaatcctgcattgcattgtatccaaggtaaaactaacagtaccaaattttaacagaaactttaacatgctgtgtactaagatcccagcaaccacttccacagtggtaggaagaccagcagcacaaacaccaaagcgtgctaaaagtgcacactttggcatctaacaaccctgaggtgttagtttgattgccgcttagtagctgtgagaccttgagaagttatttagacacaaaaggcttcgtttccctacctgtacaggtacctatacctcataaccctcacagggt

SEQ ID NO: 30772 - DNA, 524 bp, Homo sapiens
attgtgtatgccactgtaattccttcaggtaagtctggaactggacctgaagaatttttcaattcctcttctgaaacctcagataccagctcaataccccactcggtatattcatggattatctcttcctcttcttgtataacctcatttgggcagtgctgctacctttttcttatattctttctgcaatttctgtcatcacactgaggatttggcttcatggacgyagcaggaaaaaaatcctgcattgcattgtatccaaggtaaaactaacagtaccaaattttaacagaaactttaacatgctgtgtactaagatcccagcaaccacttccacagtggtaggaagaccagcagcacaaacaccaaagcgtgctaaaagtgcacactttggcatctaacaaccctgaggtgttagtttgattgccgcttagtagctgtgagaccttgagaagttatttagacacaaaaggcttcgtttccctacctgtacaggtacctatacctcataaccctcacagggt

SEQ ID NO: 30773 - DNA, 535 bp, Homo sapiens
gccctctcaggtcaactataaattgagctgagtagctcttatttaccatctatagaatacaygtgtctgttaaaagcaattaataaattttccatgtgctctttgtttactgttaaccctgtattcaaagccaaagcttttaagatacagatacactttgaaaccaaatatttatacaacattttgctacatctataaaccaaaaaaaagctatagaatgaatgacggtatacaaaagaagcagcctcctacccctagggaacattcagtcttctagaggtctcttagagaaatggtgctaggtttggaaggactgtgaaagcatgagaaagtaatggcttgtcctttgaaaatgtaaagttagtacttatttgaaaacattaatagttactttcttccacgacattttttcattaatatttcatcaatttgacatgcttttagaaaggacagccacatgacttaaaattagaaggtattttcaacaaatatttatttaataagcaatgctacttgtcataaacattacaaactc

SEQ ID NO: 30774 - DNA, 648 bp, Homo sapiens
gtcyccctcccatagagaaggccagagcagagaggggcacacagagagcagcagccagcacaggcaggtgttcacaggacacacacacctgcccaccagcccccgcactctggggaaggaggtagggcagagggaggacaggggacagagaaggtcagggaggccaagaaattcgggagcacaggggctacaggtaacagtgcaaccaggggtcagagggttcaggggaacaggcattggggtcagggtgggtactgtgagatgccctgagcagcctgccctgtgtgctgtcaggctcccaaccaaggtctcagggagccccacagctctctggagctccctctggcccagcctctcaggcctccgttgggggctcaaagcagcactcccctgcctggggtgaatgtgagctgtgggacgatgctgccctccgtggagtaggtgatgaaagacagctacattctcaggctggggaggaagcacatggccctgagaagccagaggcactggctgcactggacccaagcatagccagggcggtgaggcccactccccacctcccaccccaactcttccatcttggggccccttgctggacacagggaagtgagataaatgcagtggactctgaggcctgtggagacgagg

SEQ ID NO: 30775 - DNA, 609 bp, Homo sapiens
tgtgccatagacaatcttgactatggattcaaaggtaaggaaaatcacaatccctgccctcaagcagctcatggtctaaagagctcaagaaacagtggatttcaaaactttttgatcaggcaacactttcagctttatatatatgyattcgagtacatagctctgacatatttatatgtatttattcctaaattctatacatgtactatcaaattaatatgtagttttgaaaatgtcaaagtagaaatttttaaagaaagagaaatatttataaattgaagctctcactacccatccagatgaaaataaaattggatccatatattacatcatttaccaaaaaaataaattccaggtgtattaaaaactcaaaccttgaagactacatatatgacctagaagcagagggaaaccttgaacaaaactggaaacccaaaagttaaacaagaaaaaaaatggatacattggacttgttttaaaaagcagctggccaggcgtggcggctcacacctgtaattccagcactttgggaggccgaggtgggtggatcacttgaggtcaggagttccagacaagcctggccgacaatggccaaaccccgtctctgct

SEQ ID NO: 30776 - DNA, 566 bp, Homo sapiens
attagctaggcacagtggtatgcacctgtagtcctagctactcaggaggctgaggcagaaggatcgcttgagcccaggaatttgasgttacaatgagctatcagtgcgccactgtactccactctgggtaacagagtgaaactgtctcaaacacaacacaacacacaaaaaaattgctttaatggaagaactcagtaaattatacctttctccaaggagaaagatgtttagtttttgaaagctggcaagggtattcactgaaacattactgtgaaagagaaaatccaaaggtaatctaaatgaccatcaatagggaaatggttaaaattaattcaataaattaaatatgcccattctaagtttacagccattaaaacaaaaaagatagagccatacatgaaacaattttcataataaaatgctgaatgaaaaaagttacaaatacatattaattccattaaaaataactaaaaaacaataaagtaacagaaacagtggtgaaatagaggaaagatctgaaaacttaccaaaacttaacacttactatatctgagggcttggtggtg

SEQ ID NO: 30777 - DNA, 782 bp, Homo sapiens
tccagaaagagagtcactgaagttgaaacaaaggatagagaaataaaacaaagagaattaaacacatacaaatgaaagtgaccccacattagatgtttctgaattgttcccttccatgggatatttacatggggccagttgcttacagctagcacttagagttgaacttagtttgctctgaaggaagagaggatggttccttgcccttttccagagatcccagctgtccagaggactaaagagtccctgacattagaagggaagttcaagccagatgtagtgactcaatcccataaactcagcactttgggaggggaaggtggaaggatcacttgaggccaggagtttgagaccagcctgggcaacatagtgagaccctgtttctacaaaaataaaaaaaaattaaattagctgagcatgggagcatgcgcctgtagtcccagstactcaagaggctgaaatggaaggatcacttgagcccaggagttcgaggttatagtgagctatgattgtgccactgtacttcagcctgggcaacagagtgagaccctgtctccctctctctctctctctaaaaaacggaatctccatttccgaagtctgcctgcacccactacccccaaccaccaacctcaaacccagattctttgttcttgaaactttagctgttctctaaatagggaaatacacacaaggtacattcctggaaagagaaggtgtcagaagccttggtagagaaaggaacggggagaaaaatatggcacaaatagtgaatggggaga

SEQ ID NO: 30778 - DNA, 782 bp, Homo sapiens
tccagaaagagagtcactgaagttgaaacaaaggatagagaaataaaacaaagagaattaaacacatacaaatgaaagtgaccccacattagatgtttctgaattgttcccttccatgggatatttacatggggccagttgcttacagctagcacttagagttgaacttagtttgctctgaaggaagagaggatggttccttgcccttttccagagatcccagctgtccagaggactaaagagtccctgacattagaagggaagttcaagccagatgtagtgactcaatcccataaactcagcactttgggaggggaaggtggaaggatcacttgaggccaggagtttgagaccagcctgggcaacatagtgagaccctgtttctacaaaaataaaaaaaaattaaattagctgagcatgggagcatgcgcctgtagtcccagctactcaagaggctgaaatggaaggatcacttgagcccaggagttcgaggttatagtgagctatgattgtgccactgyacttcagcctgggcaacagagtgagaccctgtctccctctctctctctctctaaaaaacggaatctccatttccgaagtctgcctgcacccactacccccaaccaccaacctcaaacccagattctttgttcttgaaactttagctgttctctaaatagggaaatacacacaaggtacattcctggaaagagaaggtgtcagaagccttggtagagaaaggaacggggagaaaaatatggcacaaatagtgaatggggaga

SEQ ID NO: 30779 - DNA, 598 bp, Homo sapiens
tgacaaaatcctcctgctataggttgaattatatccccctccaaaaaaaatgatgtcataagtcctagcccctagtatttcasaatatgaccccatttgggagttgggtattcatagagataatcaagttaaaatgaagtaattagggtgggccctaatcctgtagcagagctgtccttatatataggagaactgtagccactgacagacacattcagatgtaaagacacagggaagacaccatctacaagacaacgaatgccaatgctaccagaagctagaagagaggcaggaacaaattctccctcacaaccacgaaggaaccaaccgtgatcttggacttctagcctccagagctgcgagacaataaatttctgttgtttaaggcaacaagcgtgtggtactttgctatgacagctctaccaaactaatataccatcttacatccattttctccagctaactagaggcatggaattgttttagagggaaggggatagtgagggttagtagcagggtagaaaggaaataatagcctcatgacccccacagcaacatgatgcagatcatcttgatttcttcaattgtacattgccag

SEQ ID NO: 30780 - DNA, 598 bp, Homo sapiens
tgacaaaatcctcctgctataggttgaattatatccccctccaaaaaaaatgatgtcataagtcctagcccctagtatttcacaatatgaccccatttgggagttgggtattcatagagataatcaagttaaaatgaagtaattagggtgggccctaatcctgtagcagagctgtccttatatataggagaactgtagccactgacagacacattcagatgtaaagacacagggaagacaccatctacaagacaacraatgccaatgctaccagaagctagaagagaggcaggaacaaattctccctcacaaccacgaaggaaccaaccgtgatcttggacttctagcctccagagctgcgagacaataaatttctgttgtttaaggcaacaagcgtgtggtactttgctatgacagctctaccaaactaatataccatcttacatccattttctccagctaactagaggcatggaattgttttagagggaaggggatagtgagggttagtagcagggtagaaaggaaataatagcctcatgacccccacagcaacatgatgcagatcatcttgatttcttcaattgtacattgccag

SEQ ID NO: 30781 - DNA, 745 bp, Homo sapiens
caatattttaatttttaccccttattgttatatagtaatatccctaaccctgcrtgtggcacaattgctttaataaaaacagttataatgagtggataaagaaaatgtggtatatatacaccatggaacactactcagccattaaaaggaacaacataatgtcttttgcagcaacttggatggagctggagaccattattctaaatgaagtaacacgggagtggaaaaccaaaaatcatatgttctcactcataagtgggagctaagctatgagtacacaaagacatacagagtgatataatggactttagagacacagaaggaggaaggtgggaggggggctagggataaaaacactacacgttaagtacaatgtatactactcaggtgatgggaacactaaaatctcagaattcaccactatataattcatccatgttacaaaaaaccacatgtaccccaaaagctattgaaataaaaaataataaagacacttttacgaagatactagaattagttcatacaaaactagcatgggagcttctttggtagatgatgaactctgtgagggagggacatattcacttttgcatgcccagaatctagcatgatatttggcagacagtgggtgccagagaagtgtttattaatttggattttttaatgtcccttaattgtttaatgtctgtcttccttagcataggtatttcctagtctctacaaactgtgaataatgaggtataaa

SEQ ID NO: 30782 - DNA, 745 bp, Homo sapiens
caatattttaatttttaccccttattgttatatagtaatatccctaaccctgcatgtggcacaattgctttaataaaaacagttataatgagtggataaagaaaatgtggtatatatacaccatggaacactactcagccattaaaaggaacaacataatgtcttttgcagcaacttggatggagctggagaccattattctaaatgaagtaacacgggagtggaaaaccaaaaatcatatgttctcactcataagtgggagctaagctatgagtacacaaagacatacagagtgatataatggactttagagacacagaaggaggaaggtgggaggggggctagggataaaaacactacacgttaagtacaatgtatactactcaggtgaygggaacactaaaatctcagaattcaccactatataattcatccatgttacaaaaaaccacatgtaccccaaaagctattgaaataaaaaataataaagacacttttacgaagatactagaattagttcatacaaaactagcatgggagcttctttggtagatgatgaactctgtgagggagggacatattcacttttgcatgcccagaatctagcatgatatttggcagacagtgggtgccagagaagtgtttattaatttggattttttaatgtcccttaattgtttaatgtctgtcttccttagcataggtatttcctagtctctacaaactgtgaataatgaggtataaa

SEQ ID NO: 30783 - DNA, 562 bp, Homo sapiens
gtgcagagcatgccagacacaccactctcccagcaccaccatgtgttcaccaacctggaaggtctcccagctccattatttcaggggttttatggaggtttcagtatgcaggcttggttgattaaatcactgaccattggtgattgactgaatctccagcctcttttccctcccygggtgtcaggggtggggctgaaaggttcaatcctctaatcatgccttcaagctatcctgaagccatcctgtaccagcccccatcctgaagctataggggcccccaaccactagtcatctctttagcataaaaaatatactcatcactccagagattccaggggtcttcaaagatcttgtggtaggaaccatagactaataccaaatattttaacaaaagattctcctatcaccttgtcactcagaaaattctaagggttttaggagctctgtgccagaaatcgggagtgaagacttaatacatatttcttattatatcacaatatcacatgctctaacttgttctacctttactgaatgtttctgaaatttatcatgaagaatttat

SEQ ID NO: 30784 - DNA, 562 bp, Homo sapiens
gtgcagagcatgccagacacaccactctcccagcaccaccatgtgttcaccaacctggaaggtctcccagctccattatttcaggggttttatggaggtttcagtatgcaggcttggttgattaaatcactgaccattggtgattgactgaatctccagcctcttttccctccctgggtgtcaggggtggggctgaaaggttcaatcctctaatcatgccttcaagctatcctgaagccatcctgtaccagcccccatcctgaagctataggggcccccarccactagtcatctctttagcataaaaaatatactcatcactccagagattccaggggtcttcaaagatcttgtggtaggaaccatagactaataccaaatattttaacaaaagattctcctatcaccttgtcactcagaaaattctaagggttttaggagctctgtgccagaaatcgggagtgaagacttaatacatatttcttattatatcacaatatcacatgctctaacttgttctacctttactgaatgtttctgaaatttatcatgaagaatttat

SEQ ID NO: 30785 - DNA, 561 bp, Homo sapiens
caaatgtaagtcattacccttatcaagttttagaatccttggtctccaggaagccaaatagcctcaggacttatcttgcagggttgtatttcctcaaggctatcaggtaggtgaaacagtgtaaactgaggaaagtgttttaataatgatgtatgaattatccaaagaaagtatattctgagaggtcttctgaaaaagctattctagaatccagaggctcagctgaagacactgatgataatcctcacgaaagaaaataatcagatgtgggctctaaattcccctcaaaccaaatgacaagctccctatatatagctgggcctaattactataaccactgtctcccatgacatttcttttgctttttctacttatcccrtattactttagttagataaaatattccaggtgtcttgcttattgctatattatccactgtaaaggtattttattattatgccaatattaagattttcttctatgaataaagccaacatctttttattagcaaagtgctaacagaactggaccaaagaaattacaattccattctcatttcct

SEQ ID NO: 30786 - DNA, 550 bp, Homo sapiens
atccacctgccttggcctcccaaagtgctgggattacaggcgtgagccaccgcgcctggccacttgtatctcttttatctcacttccttggaagggttttccaaatgcagcaaccctactttgagtaacacattggatctgtttagcatactactgaaactcaatatccacaatggsagtaacagctaacattcaatgttattctgtgccaggccctattataagcccctattatttaaaatccatatgtcaactcgtttacacctcacaaaactctgaggcaggtattacttgtatttaacagatgcgggggttaagtaatttgccgatggtcacacagcagctgcactcctctactgcctctcttcgtgttctactttatgttagtctactgttcatctgctggttccacaaattagatgtatgcttatattctcagtattggttttcacaaaaaatgctgtatgaaagcaaatgacatacatactttgtaagctttcaaatgttacataaacgtcaaatagcttattaaagagaaatactactggca

SEQ ID NO: 30787 - DNA, 550 bp, Homo sapiens
atccacctgccttggcctcccaaagtgctgggattacaggcgtgagccaccgcgcctggccacttgtatctcttttatctcacttccttggaagggttttccaaatgcagcaaccctactttgagtaacacattggatctgtttagcatactactgaaactcaatatccacaatgggagtaacagctaacattcaatgttattctgtgccaggccctattataagcccctattatttaaaatccatatgtcractcgtttacacctcacaaaactctgaggcaggtattacttgtatttaacagatgcgggggttaagtaatttgccgatggtcacacagcagctgcactcctctactgcctctcttcgtgttctactttatgttagtctactgttcatctgctggttccacaaattagatgtatgcttatattctcagtattggttttcacaaaaaatgctgtatgaaagcaaatgacatacatactttgtaagctttcaaatgttacataaacgtcaaatagcttattaaagagaaatactactggca

SEQ ID NO: 30788 - DNA, 550 bp, Homo sapiens
atccacctgccttggcctcccaaagtgctgggattacaggcgtgagccaccgcgcctggccacttgtatctcttttatctcacttccttggaagggttttccaaatgcagcaaccctactttgagtaacacattggatctgtttagcatactactgaaactcaatatccacaatgggagtaacagctaacattcaatgttattctgtgccaggccctattataagcccctattatttaaaatccatatgtcaactcgtttacacctcacaaaactctgaggcaggtattacttgtatttaacagatgsgggggttaagtaatttgccgatggtcacacagcagctgcactcctctactgcctctcttcgtgttctactttatgttagtctactgttcatctgctggttccacaaattagatgtatgcttatattctcagtattggttttcacaaaaaatgctgtatgaaagcaaatgacatacatactttgtaagctttcaaatgttacataaacgtcaaatagcttattaaagagaaatactactggca

SEQ ID NO: 30789 - DNA, 537 bp, Homo sapiens
ctcatcctgagtaagatgaatttttgcaggttagtagcaagagtttcctatggggtatagtaataatgggccaaagtagcctttcaggtttcacagctcaggagattcccccctctattgctacaaaaatgactgttttcttaatacagcccctctgtttgcccatctctcctttgcctctcagaagctggcctgggtcaagagagctctgttgtcttttcttcataaacttgcctcccaagrtgatacactcactcttagttagtgtatttttctaatgcttcctgatatctgccaccttggtgtgcctgtaggtattttctgtaccttctcccgcctcttctctaatcagctgagtcttgttcagctccttctgacagtgtgctctatctttcaggtggtaagtatttgtaggagagtttgaaagctttccactgctggtcctttctagactcctgccccagtgctgatatgatgtctgccgtaagctttccacatcatcctcacctttggcatcacatatgcaaatcagagttt

SEQ ID NO: 30790 - DNA, 637 bp, Homo sapiens
ccccggtcctgtggtcctgtgatctcrccctgcctccacttgccttgtgatattctattaccttgtaaagtacttgatgtctgtgacccacacctattcgcacactccctccccttttgaaaatccctaataaaaacttgctggtttttgtggcttgtggggcatcacggaacctaccgacatgtgatgtctcccccggatgcccagctttaaaatttctctcttttgtactctgtccctttatttctcaagctggccgacacttaaggaaaatagaaaagaacctacgtgaaaatcagggcaggttccccaatagcacagtctaaagattgtacttacagcctttttttttctgtttcttagtactagaaagttaatgttttaaattacatttaaaagatcagatttttctagatctttttaacagtcttctttatagcttgtagaatagtggccttttaaaaagtaagtgataaataactgttcattggggaagaattcttatttgctagttatcctgaagctataaacaaacttgctgtaagtacttatataggatgtggttgtatatcatttatctgtccttgttagaggcataatagcaggaagccagggcacatgaagtctacactgcatt

SEQ ID NO: 30791 - DNA, 1766 bp, Homo sapiens
aagcaaattaatgctatgtcttatcccacaatgtcctaagtcagtggctctcctcatggtttggatcaggcccctcttggtgaaaaaaagttgctcataattttagccatgattatagggctaggtttattctgctgctgtagactctattgcagttacacactcaccatgatgctctagcagatctcttccttaagcccatggactcacaaatattttccactccaagtggtgaggttccattccactgcaccttaactgcaccccgtttcagcaggaagtacctagatggagcacatcaccccctttccatagaaatgaaatggaacttgacagtggggagttgtaaccaagagtgtcagctttaaaatgtattttaaagccttcccactagccttaaagtgtatttaaaaggtttttttcctttttttttctctccttccccctggacactgccttataccatgaccttatgaccaacttatacatgcttatctaactgtatgcttgcttagaaattccaggggctggccgggcgcggtgactcacgcctataatcctagcactttgggaggccgaggtgggcagatcactggagatcaagaccatcctggctaacaccgtgaaaccctgtctctactaaaaatacaaaaaaaaaaaaaaattagctgggcgtggtggcgggcgcctgtagtcccagctgctctggaggctgaggcaggagaatggcatgaacccgggaggtagatcttgcagtgagccgagctgagatcgcaccactgcactccagcctgggggacagggcaaaaaaaaaaaaaaaaagaaaagaaattccaggggctaatcttgaaacagcccaggcctggagacccagctgcagattacctcaaggtggttaatctacaacctggtcacagtcgacatgggaccagctagtactccaggtggacagtaactcaagatagccatcggaacaagacatgcagacctgtactctatacgattcctgcgtgtttcccacaccaggtttcccttttataaaccccttcagtcagccttaaaatttgagttatcattttgagactcgagtccggacatgtcctcaactgctagcattttattaaaactgctttcctttcaccacacttggcatctcatgtatctggcttttcaaactgtgaatagccaracctaagttctgttataggacaatactttcacaaggaaaatgtgttccctacttttaggcaaacgagaggagagcagaggacacttcctgcatctgttgattctcagttgccttcagctcaaataatccttatgccgaagtggcatgtttttgggtggcatgacctgaaccccttcagtccttagtagtttcttagcttctcagaatcacaaatctttttttttttttcctttcctttccgaaatagcctggctcttgcaagtgaaaaccttgctttccagattattgtttctactgcactctttttttttttttttttttttttgcctttggtctactttgaaagtcaaagctaagcaaagacttctttgttctcaccattatttgtgttttccctgaagcagtcaagctataggacaagaattactgggaatgagaagtgtgttggctattatttttaagattctgtattttcacctcagaaaaaaaaattatcccacattctataaatttggatctcccagagatagaaagaccacccagagcgtagagccttccgtcatctcagggagaatcc

SEQ ID NO: 30792 - DNA, 1219 bp, Homo sapiens
tgcatacaatgtatgaagaagtatgttgagccactgcacaaatgctagaaagacttatatacatgccctgatgtaatccttccctgtagaaaggccctataaaacatacccacacactatcctcagggattaacccattcccctttcctttcagtgctgactcccttgtgcgcaagctgaataaaactcttttgttgctatgtttggtgatctctcttgatttctatcatgggagagctcaagaacccagggcaccagtaacaaggtcacggaataaaaatgatgaggtgacagaaagtaaacaacccaaactctaaatttgcaataatcaaaattaaattccattatatgcttgaactgaaaataggaataggtagtgggaatactaattactgaatagcagagaatatcaatggagagagattgttcattttaaactatcaagacagctcacaaagcatccagtcagaaaaagttacacacacacacacacacgatcagtttgtcttcaggttgctttgtagctcaagtgatagaagagactgatgactctccatagattttaagggagaagagttgtaagcaaatgattttatatccacccagcttgttattcttgtgtaaaggcaacagaaaattattgtgtcttatgcaagagttcagagttcagcaatttatcatatcacccatgtaacctacctcaaattaaaaaacaatatataaactctagcagactaaaaactgaaaaacacaagaaactgttagccttgtaaaaaatggcagttagttttaaaaccatttaaatatagatatctaattgtaagtatagctataaaagatatataaaaataagaaatgtaaactataaaaatatgaaakaagaaaaataacttggaaaggaaaagcccttaaaatataagctatgatgatgttttggcaatattgtctgagtatagaaatcccagattatgttaacaaagacccagaatggactgggaaaataaaagcatggtaatgtttttaacgaacatagggagagtgaaaaatgtctaatactttgttctagtattaagttaaaccaaaacaggccgggcatggtggctcatacctgtaatcccggcactttgggaggccaaggggggcagatcacttggggtcaggagttcaagaccagcctggccaacatggtgaaaccccatctcaagtaaaaatagaaaaa

SEQ ID NO: 30793 - DNA, 1219 bp, Homo sapiens
tgcatacaatgtatgaagaagtatgttgagccactgcacaaatgctagaaagacttatatacatgccctgatgtaatccttccctgtagaaaggccctataaaacatacccacacactatcctcagggattaacccattcccctttcctttcagtgctgactcccttgtgcgcaagctgaataaaactcttttgttgctatgtttggtgatctctcttgatttctatcatgggagagctcaagaacccagggcaccagtaacaaggtcacggaataaaaatgatgaggtgacagaaagtaaacaacccaaactctaaatttgcaataatcaaaattaaattccattatatgcttgaactgaaaataggaataggtagtgggaatactaattactgaatagcagagaatatcaatggagagagattgttcattttaaactatcaagacagctcacaaagcatccagtcagaaaaagttacacacacacacacacacgatcagtttgtcttcaggttgctttgtagctcaagtgatagaagagactgatgactctccatagattttaagggagaagagttgtaagcaaatgattttatatccacccagcttgttattcttgtgtaaaggcaacagaaaattattgtgtcttatgcaagagttcagagttcagcaatttatcatatcacccatgtaacctacctcaaattaaaaaacaatatataaactctagcagactaaaaactgaaaaacacaagaaactgttagccttgtaaaaaatggcagttagttttaaaaccatttaaatatagatatctaattgtaagtatagctataaaagatatataaaaataagaaatgtaaactataaaaatatgaaataagaaaaataacttggaaaggaaaagcccttaaaatataagctatgatgatgttttggcaatattgtctgagtatagaaatcccagattatgttaacaaagacccagaatggactgggaaaataaaagcatggtaatgtttttaaygaacatagggagagtgaaaaatgtctaatactttgttctagtattaagttaaaccaaaacaggccgggcatggtggctcatacctgtaatcccggcactttgggaggccaaggggggcagatcacttggggtcaggagttcaagaccagcctggccaacatggtgaaaccccatctcaagtaaaaatagaaaaa

SEQ ID NO: 30794 - DNA, 2537 bp, Homo sapiens
gcatcagagcagggcgaggggctttggaaaggcctgactagatgatggaggttcctaaggcctaggaggaaaagcatctcatctctcagcagatcacacagttgcctctacctggcatttgctatggtacagaaaccccagagactcttctacctcccctgctttctctgtaggaatgaggaagagcaggcatacatatggaagcttcttacacagctcatttgcctcattggtctgttccaacctggggtttcaagggaagacccacaagaacttttctacactgttccagcctttgttcaggccttcctcattggacccagtgtattctgtgtgacatttcagccatgtttccagaatgactgtgaaataccctgttcccatccaccctggaagtgggttcccacatagcacggaggctttcccccctccccagttgtcgtgtgcccttgcaggtcctgttcatgcagaggcctgccaggagccctggctgctgtgtcgtttggtttgagccctccctgtccactggagtttccttgattcacaccttcttccttaacaaggtgtccttttaagaatgacaataaaacatattttattcagaagccaggaaaagactcataaaaacacttcattgaaattcacctttgtgaaagattcatctcccagccccctttaaccagcacagctgtcatgaacaactttttctgtgttttttttttttcttcttgtccctcccaccccatttcctctccctactccagcaagggcttatctttcaactgtggaaaagccaccaattaaactgtactccaaagcttatcaaaatattcagtcagtaaaattatcttataattagcctcactgtaagccagaacgttttaatcccaggaaatgtaaagttatccggcatgtgaaatctgtaaattgctcatcctgaccttctgtctacagtttctacttttatttctttcccaaagtaatttcttccttgttcttcaaattcttgattgtctctgaggcatcttcctcttctgtttgcttaagtttcaaagaaaatttactcctagttgagatagagaattgaaaaattcaggtgattgtgatgtgcaatcaacctgattttatatatttcataccttcactttgaactgttctttttgcaaacgtaagtctctgattgctgatggcttgccctcgttggtcctgtactttggatgcctgcagtggtatgcatggctgaattattctggaaccaagctattcaaacagtatctgggggattctgcaggacgtcgagctgggcagtggcgttggactttttaatttcaaccatttctcttctcatagctctccctcccctttcaccctcccacagcctggggatcctcctatcatcttgcaccacctgggacagcaccatgaatgttacttccccaccccatcctatttggaccaacatcaagggaaccataagtgatgtttggggatcttaagcttaaggtgcaacttagactttggctacagaaatgatattcagatgatgcttaggtttgttgttgttgttgtttgttgttgttgttgtttttgacggagtctcactctgtcacccaggctggagtgcggtggcgcaatctcrgctcactgcaagctccacctccccaggttcaatcgattctcctgcctcagcctcctgagtagccgggattacaggtgcccgccaccgcacctggctaattttttgtattttagtagaaatggggtttcaccatcttggccaggctggtcttgatctcctgacctcgtgaatgggctagtgaaacttacataggcatgtttgacctggtcatcacttgttgtatgatgaaatattttcaaagttcccagaactcattgaaaaattaaattttggaatgtactaacatttcaataaatggagtattgcctgtatatagtgctattagtggtagttattatttatagaatttttcctatcacacaataggcacacgcatacacacacagagataagaacacacaaatacataaaaattgcttcatccttacattaattctgtgagaaagtaataaatttgcccattttacagttgggaaaattaaggctctgacagtttcaataacttgctgatgcagctgaacttgactggctggcctgacccttgtaatcccttctgtgaactagccagggcccctgtcatatgatttgacccccacttatgcctgagagatttcctcatcatccctgcagagtaaagaggaaatcacagcttcacctcaacctccacttgttgctgtgcccagcaattgcatgcaccatatcttgatgtcacacatgaatttcaggcttgatttatttgctgacctcagagctcagagctgaggcttgcccgccttgagcttatgggatcagtgtgaaggctgtgatgatccgcatagggagactctggcccaggtggcctgggctccacttggtgctcctagggtaggagatagaggggggaccagctcccaggatc

SEQ ID NO: 30795 - DNA, 2537 bp, Homo sapiens
gcatcagagcagggcgaggggctttggaaaggcctgactagatgatggaggttcctaaggcctaggaggaaaagcatctcatctctcagcagatcacacagttgcctctacctggcatttgctatggtacagaaaccccagagactcttctacctcccctgctttctctgtaggaatgaggaagagcaggcatacatatggaagcttcttacacagctcatttgcctcattggtctgttccaacctggggtttcaagggaagacccacaagaacttttctacactgttccagcctttgttcaggccttcctcattggacccagtgtattctgtgtgacatttcagccatgtttccagaatgactgtgaaataccctgttcccatccaccctggaagtgggttcccacatagcacggaggctttcccccctccccagttgtcgtgtgcccttgcaggtcctgttcatgcagaggcctgccaggagccctggctgctgtgtcgtttggtttgagccctccctgtccactggagtttccttgattcacaccttcttccttaacaaggtgtccttttaagaatgacaataaaacatattttattcagaagccaggaaaagactcataaaaacacttcattgaaattcacctttgtgaaagattcatctcccagccccctttaaccagcacagctgtcatgaacaactttttctgtgttttttttttttcttcttgtccctcccaccccatttcctctccctactccagcaagggcttatctttcaactgtggaaaagccaccaattaaactgtactccaaagcttatcaaaatattcagtcagtaaaattatcttataattagcctcactgtaagccagaacgttttaatcccaggaaatgtaaagttatccggcatgtgaaatctgtaaattgctcatcctgaccttctgtctacagtttctacttttatttctttcccaaagtaatttcttccttgttcttcaaattcttgattgtctctgaggcatcttcctcttctgtttgcttaagtttcaaagaaaatttactcctagttgagatagagaattgaaaaattcaggtgattgtgatgtgcaatcaacctgattttatatatttcataccttcactttgaactgttctttttgcaaacgtaagtctctgattgctgatggcttgccctcgttggtcctgtactttggatgcctgcagtggtatgcatggctgaattattctggaaccaagctattcaaacagtatctgggggattctgcaggacgtcgagctgggcagtggcgttggactttttaatttcaaccatttctcttctcatagctctccctcccctttcaccctcccacagcctggggatcctcctatcatcttgcaccacctgggacagcaccatgaatgttacttccccaccccatcctatttggaccaacatcaagggaaccataagtgatgtttggggatcttaagcttaaggtgcaacttagactttggctacagaaatgatattcagatgatgcttaggtttgttgttgttgttgtttgttgttgttgttgtttttgacggagtctcactctgtcacccaggctggagtgcggtggcgcaatctcagctcactgcaagctccacctccccaggttcaatcgattctcctgcctcagcctcctgagtagcygggattacaggtgcccgccaccgcacctggctaattttttgtattttagtagaaatggggtttcaccatcttggccaggctggtcttgatctcctgacctcgtgaatgggctagtgaaacttacataggcatgtttgacctggtcatcacttgttgtatgatgaaatattttcaaagttcccagaactcattgaaaaattaaattttggaatgtactaacatttcaataaatggagtattgcctgtatatagtgctattagtggtagttattatttatagaatttttcctatcacacaataggcacacgcatacacacacagagataagaacacacaaatacataaaaattgcttcatccttacattaattctgtgagaaagtaataaatttgcccattttacagttgggaaaattaaggctctgacagtttcaataacttgctgatgcagctgaacttgactggctggcctgacccttgtaatcccttctgtgaactagccagggcccctgtcatatgatttgacccccacttatgcctgagagatttcctcatcatccctgcagagtaaagaggaaatcacagcttcacctcaacctccacttgttgctgtgcccagcaattgcatgcaccatatcttgatgtcacacatgaatttcaggcttgatttatttgctgacctcagagctcagagctgaggcttgcccgccttgagcttatgggatcagtgtgaaggctgtgatgatccgcatagggagactctggcccaggtggcctgggctccacttggtgctcctagggtaggagatagaggggggaccagctcccaggatc

SEQ ID NO: 30796 - DNA, 2537 bp, Homo sapiens
gcatcagagcagggcgaggggctttggaaaggcctgactagatgatggaggttcctaaggcctaggaggaaaagcatctcatctctcagcagatcacacagttgcctctacctggcatttgctatggtacagaaaccccagagactcttctacctcccctgctttctctgtaggaatgaggaagagcaggcatacatatggaagcttcttacacagctcatttgcctcattggtctgttccaacctggggtttcaagggaagacccacaagaacttttctacactgttccagcctttgttcaggccttcctcattggacccagtgtattctgtgtgacatttcagccatgtttccagaatgactgtgaaataccctgttcccatccaccctggaagtgggttcccacatagcacggaggctttcccccctccccagttgtcgtgtgcccttgcaggtcctgttcatgcagaggcctgccaggagccctggctgctgtgtcgtttggtttgagccctccctgtccactggagtttccttgattcacaccttcttccttaacaaggtgtccttttaagaatgacaataaaacatattttattcagaagccaggaaaagactcataaaaacacttcattgaaattcacctttgtgaaagattcatctcccagccccctttaaccagcacagctgtcatgaacaactttttctgtgttttttttttttcttcttgtccctcccaccccatttcctctccctactccagcaagggcttatctttcaactgtggaaaagccaccaattaaactgtactccaaagcttatcaaaatattcagtcagtaaaattatcttataattagcctcactgtaagccagaacgttttaatcccaggaaatgtaaagttatccggcatgtgaaatctgtaaattgctcatcctgaccttctgtctacagtttctacttttatttctttcccaaagtaatttcttccttgttcttcaaattcttgattgtctctgaggcatcttcctcttctgtttgcttaagtttcaaagaaaatttactcctagttgagatagagaattgaaaaattcaggtgattgtgatgtgcaatcaacctgattttatatatttcataccttcactttgaactgttctttttgcaaacgtaagtctctgattgctgatggcttgccctcgttggtcctgtactttggatgcctgcagtggtatgcatggctgaattattctggaaccaagctattcaaacagtatctgggggattctgcaggacgtcgagctgggcagtggcgttggactttttaatttcaaccatttctcttctcatagctctccctcccctttcaccctcccacagcctggggatcctcctatcatcttgcaccacctgggacagcaccatgaatgttacttccccaccccatcctatttggaccaacatcaagggaaccataagtgatgtttggggatcttaagcttaaggtgcaacttagactttggctacagaaatgatattcagatgatgcttaggtttgttgttgttgttgtttgttgttgttgttgtttttgacggagtctcactctgtcacccaggctggagtgcggtggcgcaatctcagctcactgcaagctccacctccccaggttcaatcgattctcctgcctcagcctcctgagtagccgggattacaggtgcccgccaccgcacctggctaattttttgtattttagtagaaatggggtttcaccatcttggccaggctggtcttgatctcctgacctcgtgaatgggctagtgaaacttacataggcatgtttgacctggtcatcacttgttgtatgatgaaatattttcaaagttcccagaactcattgaaaaattaaattttggaatgtactaacatttcaataaatggagtattgcctgtatatagtgctattagtggtagttattatttatagaatttttcctrtcacacaataggcacacgcatacacacacagagataagaacacacaaatacataaaaattgcttcatccttacattaattctgtgagaaagtaataaatttgcccattttacagttgggaaaattaaggctctgacagtttcaataacttgctgatgcagctgaacttgactggctggcctgacccttgtaatcccttctgtgaactagccagggcccctgtcatatgatttgacccccacttatgcctgagagatttcctcatcatccctgcagagtaaagaggaaatcacagcttcacctcaacctccacttgttgctgtgcccagcaattgcatgcaccatatcttgatgtcacacatgaatttcaggcttgatttatttgctgacctcagagctcagagctgaggcttgcccgccttgagcttatgggatcagtgtgaaggctgtgatgatccgcatagggagactctggcccaggtggcctgggctccacttggtgctcctagggtaggagatagaggggggaccagctcccaggatc

SEQ ID NO: 30797 - DNA, 546 bp, Homo sapiens
atgtaatattttcttattcctcatagattattattaaattagtagtacatctttgagagatattttttaaagggagaaratatgacatatgtgttacgtattaacatctgtgcatggcctctctttctctctctttgtctctgttgtttatcgctctttatatggaagctaaataaatttaacattatcagtcaattttcacacttctgccaggtgaactttctaaaagtcgtatctaaatatgtcatatttgaaacctgcaatagaacttacttccaggaaaatgtagtgggtatacttttctctattcctcccacaacaactaaaaagcctggacatcataaatagaacagatctaagaagactttgaaaggtggagacaagaatgatgcaatagagagctctctggttttctttttgtcttatttttcctagacaaggtactggtgaagctgaccacccagaatcaccagtaggaacagaccaaaaaaaaaaaaaagcccaaatgagcctgctttctctagccagaggaccagaaatgggaca

SEQ ID NO: 30798 - DNA, 1030 bp, Homo sapiens
tcacatagcactgaaatgcacagcacacgaaacaaagcacatctagccaccactcgcacactctagaaagctacgctcagaagcagcacaactgccacaaaagccacccagactacacagcgtccggtcaaatggcatcttttcatatcatcagtccattctctttctctttgttttggatttttcaaatatggttatgcaaaaggtttctgtttttaaactcactatgcaaatactaacattttacraagcccaggcagataaaatcagctcaggttgaacgtatcctaaacgcagagctataactgattcaactttgcaatttgacctttaattgtcatatagaaatggagaaacgcatgtagatgagtggcgaattttattgtgttatatacaaaggtaccgcctcgcacgaagcatgcaaactctcttcaaaggattaaatatttcaaaactgaaggaaaatgagaaggcaggcttcctgtttgagacacacagaggaagaggggtcttttaaacctgtaataaaacaggtgggcttaagaaactcagaaaaaggtgtaaggaaatatactctgcctggcaccgtgatattttaaagaaataacatttgtattttgttccataactaaatcgaatcagctaacgccatagggaaagtacatgtgtttgcaacgcagcccagagtcagcttgttacatctgactctctgttctggttacaaacatctctctgttcagcctgctggtgcatacagacactctcacagctgaggacagatgtggctagcaacgccttgtgaagcaaatgtcaggcagcagactgctaccacaggctcacacacctgcaggtgacatcaccgagctttatcttaccccagaaatctattaacatgcagaaacaagtgtcacccaaccaaaacccactcttagaaagcattggcctcatcagcgtgagaagggaaatgacaaacgagatgcggaacttccactcagctccacgtctgtctcggggagtaggaaggatcccc

SEQ ID NO: 30799 - DNA, 1030 bp, Homo sapiens
tcacatagcactgaaatgcacagcacacgaaacaaagcacatctagccaccactcgcacactctagaaagctacgctcagaagcagcacaactgccacaaaagccacccagactacacagcgtccggtcaaatggcatcttttcatatcatcagtccattctctttctctttgttttggatttttcaaatatggttatgcaaaaggtttctgtttttaaactcactatgcaaatactaacattttacaaagcccaggcagataaaatcagctcaggttgaacgtatcctaaacgcagagctataactgattcaactttgcaatttgacctttaattgtcatatagaaatggagaaacgcatgtagatgagtggcgaattttattgtgttatatacaaaggtaccgcctcgcacgaagcatgcaaactctcttcaaaggattaaatatttcaaaactgaaggaaaatgagaaggcaggcttcctgtttgagacacacagaggaagaggggtcttttaaacctgtaataaaacaggtgggcttaagaaactcagaaaaaggtgtaaggaaatatactctgcctggcaccgtgatattttaaagaaataacatttgtattttgttccataactaaatcraatcagctaacgccatagggaaagtacatgtgtttgcaacgcagcccagagtcagcttgttacatctgactctctgttctggttacaaacatctctctgttcagcctgctggtgcatacagacactctcacagctgaggacagatgtggctagcaacgccttgtgaagcaaatgtcaggcagcagactgctaccacaggctcacacacctgcaggtgacatcaccgagctttatcttaccccagaaatctattaacatgcagaaacaagtgtcacccaaccaaaacccactcttagaaagcattggcctcatcagcgtgagaagggaaatgacaaacgagatgcggaacttccactcagctccacgtctgtctcggggagtaggaaggatcccc

SEQ ID NO: 30800 - DNA, 1030 bp, Homo sapiens
tcacatagcactgaaatgcacagcacacgaaacaaagcacatctagccaccactcgcacactctagaaagctacgctcagaagcagcacaactgccacaaaagccacccagactacacagcgtccggtcaaatggcatcttttcatatcatcagtccattctctttctctttgttttggatttttcaaatatggttatgcaaaaggtttctgtttttaaactcactatgcaaatactaacattttacaaagcccaggcagataaaatcagctcaggttgaacgtatcctaaacgcagagctataactgattcaactttgcaatttgacctttaattgtcatatagaaatggagaaacgcatgtagatgagtggcgaattttattgtgttatatacaaaggtaccgcctcgcacgaagcatgcaaactctcttcaaaggattaaatatttcaaaactgaaggaaaatgagaaggcaggcttcctgtttgagacacacagaggaagaggggtcttttaaacctgtaataaaacaggtgggcttaagaaactcagaaaaaggtgtaaggaaatatactctgcctggcaccgtgatattttaaagaaataacatttgtattttgttccataactaaatcgaatcagctaacgccatagggaaagtacatgtgtttgcaacgcagcccagagtcagcttgttacatctgactctctgttctggttacaaacatctctctgttcagcctgctggtgcatacagacactctcacagctgaggacagatgtggctagcaacgccttrtgaagcaaatgtcaggcagcagactgctaccacaggctcacacacctgcaggtgacatcaccgagctttatcttaccccagaaatctattaacatgcagaaacaagtgtcacccaaccaaaacccactcttagaaagcattggcctcatcagcgtgagaagggaaatgacaaacgagatgcggaacttccactcagctccacgtctgtctcggggagtaggaaggatcccc

SEQ ID NO: 30801 - DNA, 1030 bp, Homo sapiens
tcacatagcactgaaatgcacagcacacgaaacaaagcacatctagccaccactcgcacactctagaaagctacgctcagaagcagcacaactgccacaaaagccacccagactacacagcgtccggtcaaatggcatcttttcatatcatcagtccattctctttctctttgttttggatttttcaaatatggttatgcaaaaggtttctgtttttaaactcactatgcaaatactaacattttacaaagcccaggcagataaaatcagctcaggttgaacgtatcctaaacgcagagctataactgattcaactttgcaatttgacctttaattgtcatatagaaatggagaaacgcatgtagatgagtggcgaattttattgtgttatatacaaaggtaccgcctcgcacgaagcatgcaaactctcttcaaaggattaaatatttcaaaactgaaggaaaatgagaaggcaggcttcctgtttgagacacacagaggaagaggggtcttttaaacctgtaataaaacaggtgggcttaagaaactcagaaaaaggtgtaaggaaatatactctgcctggcaccgtgatattttaaagaaataacatttgtattttgttccataactaaatcgaatcagctaacgccatagggaaagtacatgtgtttgcaacgcagcccagagtcagcttgttacatctgactctctgttctggttacaaacatctctctgttcagcctgctggtgcatacagacactctcacagctgaggacagatgtggctagcaacgccttgtgaagcaaatgtcaggcagcagactgctaccacaggctcacacacctgcaggtgacatcaccgagctttatcttaccccagaaatctattaacatgcagaaacaagtgtcacccaaccaaaacccactcttagaaagcattggcctcatcagcgtgagaagggaaatgacaaacgagatgcggaacttccactcagctccacgtctgtctcggggrgtaggaaggatcccc

SEQ ID NO: 30802 - DNA, 509 bp, Homo sapiens
ggtgacatgcaaaagatgaggactcggaatgattctgataactcatcagcagcgctgggacacaagaagacagcaaaggcaaacccaaaatgctggagggacacgctctccaagccgactcctctatccagccaaatactaattatgtatgaggctaaagacacttttagtcgtgcgatattgcaagaaaatttcctcccatgcaacatttctcaagaagctactggagaatgtgctcctccaaactgagagttaacagaagggaagacacaggacataggaaacggcacagccagcatggagaggaggcaaggagcagtccgtaggagggtagtgcaggaggacagcrctgcacaagacagggagggcagctggtccccgagggggtggcacaatgccagcaagaggtacatcgagggctgtcgcagcgtcactgccaccggacagtctttccaacctgaggacaggaggctccggtgagcctggccccagttttgatttgcccttgc

SEQ ID NO: 30803 - DNA, 509 bp, Homo sapiens
ggtgacatgcaaaagatgaggactcggaatgattctgataactcatcagcagcgctgggacacaagaagacagcaaaggcaaacccaaaatgctggagggacacgctctccaagccgactcctctatccagccaaatactaattatgtatgaggctaaagacacttttagtcgtgcgatattgcaagaaaatttcctcccatgcaacatttctcaagaagctactggagaatgtgctcctccaaactgagagttaacagaagggaagacacaggacataggaaacggcacagccagcatggagaggaggcaaggagcagtccgtaggagggtagtgcaggaggacagcactgcacaagacagggagggcagctggtccccgagggggtggcacaatgccagcaagaggtacatcgagggctgtcgcagygtcactgccaccggacagtctttccaacctgaggacaggaggctccggtgagcctggccccagttttgatttgcccttgc

SEQ ID NO: 30804 - DNA, 896 bp, Homo sapiens
gttgtgaagaaaattatcaaaataatgtaattcctcaaagggtatcwtttgttactatgtgatcctgaatgaggaatcaattgatttcttatctgtctatatttgaaactaacattcataaaaggatatttaaccattgaattctggctcttaagacaataaaatctggcctctaaacacctttttgttcctattttttagtggctgcatttcatcttattttacttcatttattttttatgttaattgccttatttgctttttatttttgtcagtataatatagagtaaccacatttacaatgtttgcagtacaaaatagagcaactgatcctgtgggtttatctccaccacctggcctgagtggcccaggagaatgctgtagttattaattttcaaaaagggtgaagaaccaagattctgattcctatttttaaaatgaaagccccctaacttattccagtgccttggcactctcctgcctctagtcctaaaacaaggccaccatgtggccatttgggagattgacctgcccactggctttttctctttgggtagctgctgctccaagcaatggcgcctcccttggcctttcttctctcacctacaaccagatgctcctaaaatagactcttcctggtggcccatctgcagagcaacaaaccactggagtggtgagtaggatttgagccctttgtgtaaagtgtgtgtaaagtgcttgcctaattataaccagaactgtttcccacaatcccccatcccacgcaggcaggaaggggcggggctggagggcagttaatattgctcagggtcattgctttaggggatgggttgcaggggattgaaaagctgctcaaactcactgctctttctttagcaagaacaaatgtgatgagg

SEQ ID NO: 30805 - DNA, 366 bp, Homo sapiens
tggtcacgggaccttcttgcctttttccatggccctaggcagaagtttaccctctgtgtgatgtcrggcagttctactcagttcaccaaattgtgaagtaaggaaatgttccctggtgccctcataccagactctacctcctttttcctcttctctgtcttcggaaatgtatagctgcaggaggggaacaagaaaaacataagtcaagcaggcatgtccccgtgtcccccactctactcccaccctgcaccctgctatagccatctgatcctagtggctttttttaatataagaatcaaggagggaaccagagataagacagaatgaattccctaccttatatgggagattttggtttggaaaaga

SEQ ID NO: 30806 - DNA, 1020 bp, Homo sapiens
ccagctctaaagatgagagtaaaatgtgattagaaatcattcatcttctggaggaaaaaaatggaacaaggaaagtgaaaatagctttcttgttctgtcttggatagttccagattttagagcccatatgttgtttgctataacttcctcgcctcccagggccaatgcattcgaaacgcttcagctagtgtacttcactgagtagtcttggaagttagggctcatttgtatccatagtctttgttcaaatatggattaattttggctaatttcagtgggtgcatataaagtaaaacgcacagaactgaaactactgaaatcaggcctgtgtgtgatcatctaaaaatctacttttcaagctcctttaagttttatttttgaaataaaaacaataaaatgacagtaaaaagtttccaaaagcattgacattatgagcaattgctaaccaaggctattcccagaatgattgagcaaaatttggatataattctagacaagataactgcccggcagtgccagctataaatactccattcagaaggtgatttcactatgatcctatggaatatgtcccttgtctctagggctgggtaaccacgtggatgcatattatgctattgtcactagggctggcattggagggcaaaggcagattcttgtcctcaagctttaatctttatactatggagatgaatgtgtaagacctgccgtaggttgctttaaaaaaccagactgcrtttggatatttagaggaaggggtctcaaaaatgccatagtacatagaaatagcctagaggggtcatgggcacagctggtagtgaatcgggtataagcaagatcaagatctgtgtatttatttgcaactctacttgcttgagccagaaattgtgccagctgcaaatcgagccagcatttctgtccttggctttagacaattagagcagatttgcttgtatacaccaaaatcatttccaacacagcccccacagttctttgtgcttcttacaaaatttcctctat

SEQ ID NO: 30807 - DNA, 598 bp, Homo sapiens
ggagtaaaaaaataaattcatgagagagtgatttataaatcagaataccaatttatgatcagagtttatgctcatactgcttgtcaactatttctggttctttctacttctgggcacattttcagattgtacctctcggcccccatgtagttgggcagaggatacacacaacagggtcttgacattaagttgtgagtagaaatgtgatatgtcacatctgggctacagcraaggtgaccaagtgtcctagtttcctgagactgaggggtttcccaggatgtgagaattacagtgctaaatcaggacagtccccagcaagctaagccaattgtcacattagctggaacatttaattgctggttcaagaccctccacaactcactctgtttccttccggcacagaaactgacaacatttgaggtagtgagtaccctatcatcctaggtccctggatcattacaatgagcatagactgcctactcatgaacctataatggacatgtaagcattagcagtaattaaaactttattccagtatagcatgtagattttagaatttttgttattgcaacagaacctagttgatcctaaccgatac

SEQ ID NO: 30808 - DNA, 506 bp, Homo sapiens
tatgcttttcaaaaccatagttaaatgtgaaatgaagaraaaaacaaagtcttgctctctgtctagcatgatattgcatacctggaatgaatcctgcttgatcacagtgaacgatcttttgaatgttttgttgaatttggtttgctagtaatttgttgagaatttttgtacctattttcattagggatattggcctgtagttttctctttttatattgttgtgttcttgtctgggttttggaatcaacataaatgctggcttcataaaatgagtttggaacaattccctcctttttaattttccagaataatttgaggataattgttttttttttttctttaaatgtttgttagaattcagcagtgaagtcaccaagtcctgggcttttctttgatagaaggctttatatgatttatttaattttctctctagttactggtctgttcaattattttatttcttcatagttaagcctttaaaggtcgttgtatgtatccaggaatta

SEQ ID NO: 30809 - DNA, 878 bp, Homo sapiens
ggatcctctcttcttccttgtcaacactcccactccccccgagaaatgcacgttcccccaaccccgactccccaggaggggacgagggattcaccgcgcccacgcggccaccgaggagggaatcctcccccgccaagccgatgtgatttggggtcgcacccccatgctcccgccctctcctccccctcgcccgcgggccggctgcgcgcgcctcgggagcrggccccagggagcacagcagccgcccccgggatctgctgccgctccgggaggtgaaagcgctccgggtcggcacacaggccgcccttgactgcggagcgccggcaggcagcaatggggacagccctgtggaaggcgagggggagggcagagactaggggaggcccccagtggctcagagactgtgggttcggcgtcctccttctggaactctggcgggcccttcgcaggcagcagtagacagcgactgcgcccgggcctgctgggccctcctgccatcctgtggccacagaggctgcttggaaccgttagggaatttactggggattcagtgcacgtgtttatctatcccttcaacttcattctttcctcttcaccacgaaaaccgcacatcctcgaccccatatggatggggctcttgtctttggcgcaactgctggggtgctccgaatctcctcgccactgcgctcagcctagggtcagcgccgggtcaggggcccagggaggggcaggggcggcgaatcagagtgaagttggcacaaaagttcttgggatattggaccaaggaattctgacaagttgaaacacccccccaaccctgcgcgcacccctccttccccccacaaagggaagcactccctttctcttaatctcggata

SEQ ID NO: 30810 - DNA, 878 bp, Homo sapiens
ggatcctctcttcttccttgtcaacactcccactccccccgagaaatgcacgttcccccaaccccgactccccaggaggggacgagggattcaccgcgcccacgcggccaccgaggagggaatcctcccccgccaagccgatgtgatttggggtcgcacccccatgctcccgccctctcctccccctcgcccgcgggccggctgcgcgcgcctcgggagcgggccccagggagcacagcagccgcccccgggatctgctgccgctccgggaggtgaaagcgctccgggtcggcacacaggccgcccttgactgcggagcgccggcaggcagcaatggggacagccctgtggaaggcgagggggagggcagagactaggggaggcccccagtggctcagagactgtgggttcggcgtcctccttctggaactctggcgggcccttcgcaggcagcagtagacagcgactgcgcccgggcctgctgggccctcctgccatcctgtggccacagaggctgcttggaaccgttagggaatttactggggattcagtgcacgtgtttatctatcccttcaacttcattctttcctcttcaccacgaaaaccgcacatcctcgaccccatatggatggggctcttgtctttggcgcaactgctggggtgctccgaatctcctcgccactgcgctcagcctagrgtcagcgccgggtcaggggcccagggaggggcaggggcggcgaatcagagtgaagttggcacaaaagttcttgggatattggaccaaggaattctgacaagttgaaacacccccccaaccctgcgcgcacccctccttccccccacaaagggaagcactccctttctcttaatctcggata

SEQ ID NO: 30811 - DNA, 491 bp, Homo sapiens
ctagaggtggaatgatgggactgaccaaaggcttccaggctccaacacgctttggtttcctcaaaagccagctggggtcacgttaggtcctccaggctgggcctggactcatctagtttcaaagggcaaaaggatgagctgtgttgggcactgtctagaattttcactttgcaagacttgagtccarttgtctaagggagtttgctaaatcataagtagctgctatggtcagatgtcaaagttgggggctgtaggggagataattacatttaccaaagtcctactattctgtgtcagaagacttaatctcattgaacgctgggaaatagatattatcatgcccattttaatgatgaagaaactgagcctcagaggcttctcctctttgcatatgtaatttcctttttccttgtctccactctgaagagtgaggatttctgtcagtttcacagaggcaaagttgcagtctcagagaggtcaaacaactcgct

SEQ ID NO: 30812 - DNA, 519 bp, Homo sapiens
tccatatgctgaacgctggttccccgggtccccttacttctttctctatactttgtctctgtgtctttttctttcctaagtctctcgttccaccttacgagaaacacccacaggtgtggaggggcaacccaccccctacatcgatacatctgcttacagattacacgggcataatcacgaaccctgtcagacattatcttttgtgtagaaaagggtcaggattaggatcatttatattttaaggaatatagaggctcagacaagagacatggggaacatataytctatcctgttttgtcttcaaagcgttttttggagagctgcacttcatcacggagtcagggaatgtgtgacattatgctgacaagtatacacagcaaacacgatttcttacatttgctgctctgtttcataagttcccccttttggtcataaatcagttgacataaaccaggtctgactgcatttacaggaccaacactgattgtcccatgcagctaggaagactctttcctggaa

SEQ ID NO: 30813 - DNA, 536 bp, Homo sapiens
ccaatgtagtctgtggttgaggacaaagattcagggaaaagggtgaattttatttccctggcacttctagaygacacaatgcacagacagagtgcttgccaaacgtttgggagaaagctgtttaacaagcatatgcagttattagcagatggaaatctaggcttttggggattgggcacactgaaatagcaaggcctgagggatatgagcatgcacagacagctctgacagcaataatagcaaatacaatagcactgtcttggaaagtgaggggttagaataacaaactacaccagactgaagcctctgctgtcaaacctgaaagagaggtgaggcgtatggctagacaatgcattggaatcttcagccacatcaaacattagaagtccacaggaattaataaggttatctgctgttcaagtatttctcccttcaagggtgaagggtttgttccctaagcagataggagtgcaacctaaagatgcccgcgaggcatcagtctccacatatgcttcagttgaagaacactgtgttgt

SEQ ID NO: 30814 - DNA, 763 bp, Homo sapiens
aatgaagttcccatcatttagaaaaaaatttcttcctgctttttctatcccttgtgttctgttgtttactatcaactcagggtatctgcccaggcaccaaaaaccagggaacatctttgccaagcagggcgtcttgccttaccagcccggctttaggggagactggaaacaggattatcatccagaaatacattcatcctgatttacagcctgccaccccaagaatttctccgggcaatgtgcccccaaacgggctgctaagtcctcaatttcccaacctcccttttccgccccaacccaggtggccaaacgctgtgactgttaggatgctgtttaaatgcagaatgctattatcactatatatcattccgatcggctttctaggtcgtactgaggatatcagaatgatgcaaggcaacatttttattatttaggatacagtatactaagtttatgttgattactctgagtatcatctttgaaagataactagcattaaagtgttgataatgttccacttttgcaatcatatttgcatagtgtacaacagagtttagcaggaaaaaaacgatcttaagtgatgtttttcatctgctctgtcagcctcaccctrcttatttcaacttggtacatgaggcaggacaaatacttagcatcctttatatcagctttacattatataatgttattcttgttccttctgggaagacttcagcatgcagttgtaatggaaaaaggagagtctttggggccagttatatct

SEQ ID NO: 30815 - DNA, 559 bp, Homo sapiens
gcgcccggctgattttcaaactcttttaacctccccgcccagtcagggttaccaagcaaacaagaacacatatgcccacgaatatacctgagacagaagtttaaggcattagagatactttctatgggcgatgcattccaataaactcttattatttgtttctttctttgtttttgagacagagtctagctctgtcgcccaggctggagtgcggtggcatgatcttgcctaactgcaacctccgcctcccgggttcaggctattmgcctgcgtcagcctcccaaagagctgggactacaggcgtgcaccaccacacccggctagtgtttggatatttagtagagacaggccaacaccatgttggccatgctggtctcgaactcctgacctcaaaatgatagctcacctctgcctcccaaagtgctgggattacaggcgtgagtcactgcacccggcctgtttgtgttttttgagacagggtctcactcttgcccaggctggagtacagtggcttaattatagttcactgcagcctcaacctcgtgggctcaagggatcc

SEQ ID NO: 30816 - DNA, 559 bp, Homo sapiens
gcgcccggctgattttcaaactcttttaacctccccgcccagtcagggttaccaagcaaacaagaacacatatgcccacgaatatacctgagacagaagtttaaggcattagagatactttctatgggcgatgcattccaataaactcttattatttgtttctttctttgtttttgagacagagtctagctctgtcgcccaggctggagtgcggtggcatgatcttgcctaactgcaacctccgcctcccgggttcaggctattcgcctgcgtcagcctcccaaagagctgggactacaggcgtgcaccaccacrcccggctagtgtttggatatttagtagagacaggccaacaccatgttggccatgctggtctcgaactcctgacctcaaaatgatagctcacctctgcctcccaaagtgctgggattacaggcgtgagtcactgcacccggcctgtttgtgttttttgagacagggtctcactcttgcccaggctggagtacagtggcttaattatagttcactgcagcctcaacctcgtgggctcaagggatcc

SEQ ID NO: 30817 - DNA, 559 bp, Homo sapiens
gcgcccggctgattttcaaactcttttaacctccccgcccagtcagggttaccaagcaaacaagaacacatatgcccacgaatatacctgagacagaagtttaaggcattagagatactttctatgggcgatgcattccaataaactcttattatttgtttctttctttgtttttgagacagagtctagctctgtcgcccaggctggagtgcggtggcatgatcttgcctaactgcaacctccgcctcccgggttcaggctattcgcctgcgtcagcctcccaaagagctgggactacaggcgtgcaccaccacacccggctagtgtttggatatttagtagagacaggccaacaccatgttggccatgctggtctcgmactcctgacctcaaaatgatagctcacctctgcctcccaaagtgctgggattacaggcgtgagtcactgcacccggcctgtttgtgttttttgagacagggtctcactcttgcccaggctggagtacagtggcttaattatagttcactgcagcctcaacctcgtgggctcaagggatcc

SEQ ID NO: 30818 - DNA, 1577 bp, Homo sapiens
tgagtagttaaagatacgcctggttcagagcaggctgaaaattgccctaaaagaaagcactgcaattccctttccctgtgcactgagcaccctcaacagccctgtccagacttgtgggtggccagatccctggaaggaaaggcgggagagctctagctggataaatggcacatttctggcaatgtgattgtgtgtatgcagtaattactcagcgattgcaacttccagcattactatttaggtaaatctgtgtcaagatgctgtctttgttcagtggcctaataccactgttggacacatagttgaataattaagttggaattcatgtttggatatatattaaagggtgttattcgtccatttttgcattgctataaagacatatctgagactgggtaatttataaagaaaagaggtttaatttggctcatggttctgcagactgtatgggaaccatggctggggaggcctcaggaaacttacagtcatgggagaaggcaaaggggaagcaggcaagtcttaaatggctggagcaggaggaggagggagtggggaaggtgctacacacttctaaacatccagatcttgtgagaactctattatgagaacaccagcaaagggatagtgctaaactcttcatgggggatccagccccatgatccagtcacctcccaccaggccccacctctaacaatggaaattatcattgaacatgagatttgggtggggacacagatccaagccatatcaaagggctacttttgttttaaacataccctttcttccattacatgctgattgccaggaagttcattcccgaaagaagtacaactttttttcctgtcattctgtgcttttctgtgctttttcaagactacgaacagttctacaagagaaaaataaacttcagaactgcctgaaacaaaatgttattatgaattggccactcaagaagaagtgatgatgtgaggtttcaggttttattaacttaaaccatttggtagacggattttcttttttttaatgaaacgcagacctgtgactcattgagcttcgcagggataatgatcaagagataactgaatttcttcttccactctgttttccagcttcacatatttctctaaatagatgtccatgttttatttcgtaattttgctttkcctttactcaaaaccaggatgggcatttcttccccaagtgaattttaacgcagctgctgcaggctgcagaataaaaccccgctggagaaagatgctccattaaagtaagattgaagccaaaattgaaaattgagagctaatttttgtgtaccttttgaatggatgcattttttaaattggcaatttgaaaaagaataaaattgttcagaatatacagtgcaatgggagaaagcagattgggcagaattcttgtaattctaattagatgcattcccctgtttgagatttacttacagagcaatcttagttttaatggaaagaaatgcttattgatgaatttgattgctactatggattcttacttgcctttcgtggctacaggatgaagcctcacaaaatgggaagttagggatc

SEQ ID NO: 30819 - DNA, 1118 bp, Homo sapiens
tcagagcaatcattgttgcctaagaatatggtggtataattggcttgcccatgccaacctcacacccagcaacaatcacaacaccagggagtcaaggtcaaattttaaagtgcaactcccttttgcatcctgtattagaccagcagtttcccaaaacagtctcagaaggaagggagagagcttagcaaacaaaacaataaatgctcaccctaggtatgtggcaatcataactctacagtttctaccaggtaagattttgccctggtttgacatttaagataccagagagcaacttaaattactttatatcaaagatgttgtttctctaatataaaattataattgtgtgaattgttagcaatgattcaacatgaaaagaaataattttatagtgacattaagtaaatatattttctccatttctagtattctctgatattcaagtactaggtctttctggacataaaacattgaagtgtcttttcttctctctctctcttcacttacaataggctacactaataattttagagagccatgaatgatctttccacataataataaatgttctagaattgttctaattcagcaatatcagcagtgtccaaaagctaagtgaaaataccataaacgttgagtggagatggccatttccttcatcacatatgcataactgtgcaatcctaggagccaatagaaaggcagcttttccactcagtgttgggtaccacaggcagttgaccagaggagctggaggctagcccagcgccaccactaacagtgttgctgtcactactcaggaccatcgtttccttgcctgtaaaaatgatgggactggccrggcacggtggctcatgcctgtaatcccaacacttgggaggccgaggtgggtggatcacttgaggccagaagtttgagaccagcctggtcatcatggtgaaaccctgtctgtactaaagatacaaaaattagccgggtgtggtggcgggcgcctgtaatcccagctgctcgggaggctgaggcacaagaatcacttgaatctgggaggcggaggttgcagtgagccaagattgtgccactgcattccagcctcagtgacagagtcagctctgtctcaa

SEQ ID NO: 30820 - DNA, 1118 bp, Homo sapiens
tcagagcaatcattgttgcctaagaatatggtggtataattggcttgcccatgccaacctcacacccagcaacaatcacaacaccagggagtcaaggtcaaattttaaagtgcaactcccttttgcatcctgtattagaccagcagtttcccaaaacagtctcagaaggaagggagagagcttagcaaacaaaacaataaatgctcaccctaggtatgtggcaatcataactctacagtttctaccaggtaagattttgccctggtttgacatttaagataccagagagcaacttaaattactttatatcaaagatgttgtttctctaatataaaattataattgtgtgaattgttagcaatgattcaacatgaaaagaaataattttatagtgacattaagtaaatatattttctccatttctagtattctctgatattcaagtactaggtctttctggacataaaacattgaagtgtcttttcttctctctctctcttcacttacaataggctacactaataattttagagagccatgaatgatctttccacataataataaatgttctagaattgttctaattcagcaatatcagcagtgtccaaaagctaagtgaaaataccataaacgttgagtggagatggccatttccttcatcacatatgcataactgtgcaatcctaggagccaatagaaaggcagcttttccactcagtgttgggtaccacaggcagttgaccagaggagctggaggctagcccagcgccaccactaacagtgttgctgtcactactcaggaccatcgtttccttgcctgtaaaaatgatgggactggccaggcacggtggctcatgcctgtaatcccaacacttgggaggccgaggtgggtggatcacttgaggccagaagtttgagaccagcctggtcatcatggtgaaaccctgtctgtactaaagatacaaaaattagccgggygtggtggcgggcgcctgtaatcccagctgctcgggaggctgaggcacaagaatcacttgaatctgggaggcggaggttgcagtgagccaagattgtgccactgcattccagcctcagtgacagagtcagctctgtctcaa

SEQ ID NO: 30821 - DNA, 649 bp, Homo sapiens
caagacttcatttagtttcagtcttcaaagtcatattattaaatatgcttacaattagagtgttctgcaagtacmtataataattcaaaagtcccgtctctgctctcaggtaattcacactctgaatggaacacagcatttgttgtggcactagcatggaatacagttttatattgtcaaactcttgcctttcttccttgttcccccaaatgtaagaaggtcatggggtggaagtgaccaaatgaattgattacaaattgtcagtggaactaagccagggaagtcctgatgatgataaactcaatgcacgtcatatggcagacagaaaaaaacatgtgatctggaaactctgtcctgctcaccagcaaaattaggacacttgattgtaaaaaacagaaactcaacctaagctagttgcttgagcaaaaagggaaacttattagaaggctcacatacccatctggaaggaggaggtgccactggacatcagagacgggatcagagactcgcaagccccagcatgcatcatgctcacatgctcacatgcactctctctctctccctctctctctctttctctgtctctctgtctctctctcctcccctctgcatttctctgtgatttagttttatttctaccagactggct

SEQ ID NO: 30822 - DNA, 596 bp, Homo sapiens
atcatttcagttttaattaatattggggccaaaatgttcattagatactgtttttaatgatcagtttttatgcaaatgatttatataagtcagaacttcaattcaatgtttggtagctgtttgatttttaggacattatatattgaaatgtacactgattatcctaaagttgtaaatatttaagaaactttacagcaaaaagtctaaaataaagatatatttatattatttccaaaacagaaaatttaaattgattccctagtcaaagaaactgtttgtaaataaaatgtaacaaactatatattccttggcccccagacaktttaaagtcacttttcctttttatatacatgttctaatattataaacagtgagctcaggaataccctaatttgtcttttgtatattttcagcagattgtgctgtttcaaattatattattttactccaattcttttgtttacatattgctttttttgctagcgtttttcatattttaaaatatattactatattgtatatagtaatattgtgtttctctttcttcatgttttattttgttccataacctttggcttgtcctttttattccatat

SEQ ID NO: 30823 - DNA, 596 bp, Homo sapiens
atcatttcagttttaattaatattggggccaaaatgttcattagatactgtttttaatgatcagtttttatgcaaatgatttatataagtcagaacttcaattcaatgtttggtagctgtttgatttttaggacattatatattgaaatgtacactgattatcctaaagttgtaaatatttaagaaactttacagcaaaaagtctaaaataaagatatatttatattatttccaaaacagaaaatttaaattgattccctagtcaaagaaactgtttgtaaataaaatgtaacaaactatatattccttggcccccagacagtttaaagtcacttttcctttttatatacatgttctaatattataaacagtgagctcaggaataccctaatttgtcttttgtatattttcagcagattgtgctgtttcaaattmtattattttactccaattcttttgtttacatattgctttttttgctagcgtttttcatattttaaaatatattactatattgtatatagtaatattgtgtttctctttcttcatgttttattttgttccataacctttggcttgtcctttttattccatat

SEQ ID NO: 30824 - DNA, 596 bp, Homo sapiens
atcatttcagttttaattaatattggggccaaaatgttcattagatactgtttttaatgatcagtttttatgcaaatgatttatataagtcagaacttcaattcaatgtttggtagctgtttgatttttaggacattatatattgaaatgtacactgattatcctaaagttgtaaatatttaagaaactttacagcaaaaagtctaaaataaagatatatttatattatttccaaaacagaaaatttaaattgattccctagtcaaagaaactgtttgtaaataaaatgtaacaaactatatattccttggcccccagacagtttaaagtcacttttcctttttatatacatgttctaatattataaacagtgagctcaggaataccctaatttgtcttttgtatattttcagcagattgtgctgtttcaaattatattattttactccaattcttttgtttacatattgctttttttgctagcgtttttyatattttaaaatatattactatattgtatatagtaatattgtgtttctctttcttcatgttttattttgttccataacctttggcttgtcctttttattccatat

SEQ ID NO: 30825 - DNA, 596 bp, Homo sapiens
atcatttcagttttaattaatattggggccaaaatgttcattagatactgtttttaatgatcagtttttatgcaaatgatttatataagtcagaacttcaattcaatgtttggtagctgtttgatttttaggacattatatattgaaatgtacactgattatcctaaagttgtaaatatttaagaaactttacagcaaaaagtctaaaataaagatatatttatattatttccaaaacagaaaatttaaattgattccctagtcaaagaaactgtttgtaaataaaatgtaacaaactatatattccttggcccccagacagtttaaagtcacttttcctttttatatacatgttctaatattataaacagtgagctcaggaataccctaatttgtcttttgtatattttcagcagattgtgctgtttcaaattatattattttactccaattcttttgtttacatattgctttttttgctagcgtttttcrtattttaaaatatattactatattgtatatagtaatattgtgtttctctttcttcatgttttattttgttccataacctttggcttgtcctttttattccatat

SEQ ID NO: 30826 - DNA, 597 bp, Homo sapiens
caggaattgataaggtcagtccttcgtctttatctggccaaacctctcttaccttctaaagccttctctacataccaattaccctatgaataatttccttmtccttctaaattatgcttctttctgagcctgtttcttcatcagtgaaattgggatagtcataccaaacacacagaattgtgctaaggactacattctgtatacaaaacttctggcttagagcttgtcatatagtgggctctcaatacatcttcaaactcctttttttaaccctcatagtcctgtgtggtttctttgttgcacccttgtattttatactttctgaagttacatgtgtgcttgacttaatccccctgtttatccagtaaatatttcagggataataaaattttaaggactaagaccatactgtattcttctttgtatagtatcatcaggccctaatactctgtcattatctgcgtgcttaataaatacttgaattattaacttgaattgagtaactccccagcacaggatgtcttctcagcttccagtcccgagccattgagacttgctggtgaatctgttacacaggggacgagtctgagcccagaa

SEQ ID NO: 30827 - DNA, 1087 bp, Homo sapiens
tctctacccatggaagacacataattgccttaacactctactgccactgctgtggcttcctcctccttggcctgtcccttaatgttggtgttccttagatcttcagttctctttcctttctctctgggctctcctaagtgatcctatcatctcctgtgactccatagacttactgtataatgatgactctaagagctataaatttagacctgatcactcttgacgtccaaacctccatctccattttcacccatccacagcacgtcacactcccagcctgtctaatagtgaaacccatgtcttcctctttcctccttacagctccttcttctctctcagtgtccagatcagggtccttttcctcactctcctactcatcacacagaatatgtcaattcttcttgttactaaactccagcctgtgcacttctccccatccccatagtcacaaacttatttcaaggctttagttctttgtatttgtattactgtatgtgttagcttgctaacggtgctgtaaaaaaataccagagactgggtggcttaaacaatggaaatgcatcttttttcacagttttggagactggaagtccaagaccaaggtgtcagcgaggtttggtttcttctgaggtttccctctttggcttgcaaatggctgccatcgtgccacatcctcacctggtctttcttccatgcacgcacrgtcctgatgtctcctcttgtgtcctagtttcctcttcttatatacgtcagattaggttggggctcaccctaacagcctcatttcaacccctttaaagactctaccttctaatatagtcatattctgaggtattgtaggctaggacttcaacatatcaatctgacagggaacagaggcacaattcagtctgtagcactgtgatagcttccatactggtttcctagggcagccataaaaaataatcacaaacctggtggcttagaacaacagaaattcattgtgtcacagttctgaatgctagaagtataaaatcaaagtgttggcttggccgtgctctttctaaagcctctaggggatgatccttccaacttaaaatctttcagt

SEQ ID NO: 30828 - DNA, 1087 bp, Homo sapiens
tctctacccatggaagacacataattgccttaacactctactgccactgctgtggcttcctcctccttggcctgtcccttaatgttggtgttccttagatcttcagttctctttcctttctctctgggctctcctaagtgatcctatcatctcctgtgactccatagacttactgtataatgatgactctaagagctataaatttagacctgatcactcttgacgtccaaacctccatctccattttcacccatccacagcacgtcacactcccagcctgtctaatagtgaaacccatgtcttcctctttcctccttacagctccttcttctctctcagtgtccagatcagggtccttttcctcactctcctactcatcacacagaatatgtcaattcttcttgttactaaactccagcctgtgcacttctccccatccccatagtcacaaacttatttcaaggctttagttctttgtatttgtattactgtatgtgttagcttgctaacggtgctgtaaaaaaataccagagactgggtggcttaaacaatggaaatgcatcttttttcacagttttggagactggaagtccaagaccaaggtgtcagcgaggtttggtttcttctgaggtttccctctttggcttgcaaatggctgccatcgtgccacatcctcacctggtctttcttccatgcacgcacggtcctgatgtctcctcttgtgtcctagtttcctcttcttatatacgtcagattaggttggggctcaccctaacagcctcatttcaacccctttaaagactctaccttctaatatagtcatattctgaggtattgtaggctaggacttcaacatatcaatctgacagggaacagaggcacaattcagtctgtagcactgtgatagcttccatactggtttcctagggcagccataaaaaataatcacaaacctggtggcttagaacaacagaaattcattgtgtcacagttctgaatgctagaagtataaaatcaaagtgttggcttggccgtgctctttctaaagcctctaggggatgatccttccaacttamaatctttcagt

SEQ ID NO: 30829 - DNA, 638 bp, Homo sapiens
ggcacaatctcagctcactacaacttctgcctcccgggttcaagcggttctcctgcctcagcctcccaagtagttgggactacaggcacatgccaccatgcctggctaatttttgtatgtttagtagtgacgggttttcaccttgttggctaggctggtcttgaactcctgacctcaggtgatccacctgccttggcctcccaaagtgctgggattacaggcgtgagccaccacacccagtctttctttttgttttgttttgttttgtgatagagtctagctctgtcgcccaggctggaatgcagtggcatgatctcagctcattgcaacctctgcctcctgggttcaagcaatttccctgcctcagcttcccaagaaactgggattacaggggtgcatcaccatgccyagctaattttttgtacttttattagaaacagtatttcaccatgttggcgaggctggtcttgaactcctgacccaggtgacccacccgcctcggcctcccaaagtgctgggattacaggcatgagccacccacctggccatggccccaaatcttctgattcaagcatagaatgattatcacttggacattatctgtgttccatgggcaagccttgatcttttcgtggttt

SEQ ID NO: 30830 - DNA, 1148 bp, Homo sapiens
acatattagagtaacaataccaacttctgactgcttttgggtgtgagaatcagaacctcaacagtgggctgtgtctatgtgggagtgtgacaatctttactgttggcagtgtatgcatatgagagtcaaaatctcaacagtgtactgggccttgttatattattactctttgcaccatctgcggcggtakataatatgtgtaagacttgcaatgcactccaaaacatttgtgcctatatgaacccatgatcttactcatttctccaagtctagggatgagattcaccatctcttctattgactggtttagatataagagtcattaccatgcctgtgagctaggtccagcaataagtcaccattttacctgtggccagatccacatatgacagtcaaaattccaactgtaaactgtgtctactagtgacattcaggaccttaactgtgggctctatgtgtgagattgacaattttaactgttggctatgtgctgggctccggaatgacatgctctgtaccaccaaagggcattatagaatatgcataagcttgctcatactttgccatcttaccggaagcaggaggctgaagacattatacattgtcataaatccagctaaaagagtcaaaatctcttctattggttgtgtccatgtatgatagtcatcagcatgcctatgaactggacccaattatatgtcacaataccacctgcaagcagggactaggaaggaaagccacatcacctgaatactgagcctgagtaggtcaatgtcccttctgttggaagagtcctggcaggaaagtcgtatcacctagctgctgagcccactcaatgtcacaatgccctctgtgggaagggccaaggcaggagagtcaaatgacctgggtgctgggtccagcagtatgtcacaaattaccctgtggacagagcccaggaaaaaaaggagagtcacatgacctaggtgatgggcacaaagatatatcacaatgttctctgagaaaagtgtccagaaagaagagttacattacccagatgcttgacccaggtttatgtcactattccaactataggaattgctaagacagaagagccacgtcaccgggatgcttggcccactgatttgtcacaatcctttctgtaggca

SEQ ID NO: 30831 - DNA, 1148 bp, Homo sapiens
acatattagagtaacaataccaacttctgactgcttttgggtgtgagaatcagaacctcaacagtgggctgtgtctatgtgggagtgtgacaatctttactgttggcagtgtatgcatatgagagtcaaaatctcaacagtgtactgggccttgttatattattactctttgcaccatctgcggcggtagataatatgtgtaagacttgcaatgcactccaaaacatttgtgcctatatgaacccatgatcttactcatttctccaagtctagggatgagattcaccatctcttctattgactggtttagatataagagtcattaccatgcctgtgagctaggtccagcaataagtcaccattttacctgtggccagatccacatatgacagtcaaaattccaactgtaaactgtgtctactagtgacattcaggaccttaactgtgggctctatgtgtgagattgacaattttaactgttggctatgtgctgggctccggaatgacatgctctgtaccaccaaaggrcattatagaatatgcataagcttgctcatactttgccatcttaccggaagcaggaggctgaagacattatacattgtcataaatccagctaaaagagtcaaaatctcttctattggttgtgtccatgtatgatagtcatcagcatgcctatgaactggacccaattatatgtcacaataccacctgcaagcagggactaggaaggaaagccacatcacctgaatactgagcctgagtaggtcaatgtcccttctgttggaagagtcctggcaggaaagtcgtatcacctagctgctgagcccactcaatgtcacaatgccctctgtgggaagggccaaggcaggagagtcaaatgacctgggtgctgggtccagcagtatgtcacaaattaccctgtggacagagcccaggaaaaaaaggagagtcacatgacctaggtgatgggcacaaagatatatcacaatgttctctgagaaaagtgtccagaaagaagagttacattacccagatgcttgacccaggtttatgtcactattccaactataggaattgctaagacagaagagccacgtcaccgggatgcttggcccactgatttgtcacaatcctttctgtaggca

SEQ ID NO: 30832 - DNA, 1148 bp, Homo sapiens
acatattagagtaacaataccaacttctgactgcttttgggtgtgagaatcagaacctcaacagtgggctgtgtctatgtgggagtgtgacaatctttactgttggcagtgtatgcatatgagagtcaaaatctcaacagtgtactgggccttgttatattattactctttgcaccatctgcggcggtagataatatgtgtaagacttgcaatgcactccaaaacatttgtgcctatatgaacccatgatcttactcatttctccaagtctagggatgagattcaccatctcttctattgactggtttagatataagagtcattaccatgcctgtgagctaggtccagcaataagtcaccattttacctgtggccagatccacatatgacagtcaaaattccaactgtaaactgtgtctactagtgacattcaggaccttaactgtgggctctatgtgtgagattgacaattttaactgttggctatgtgctgggctccggaatgacatgctctgtaccaccaaagggcattatagaatatgcataagcttgctcatactttgccatcttaccggaagcaggaggctgaagacattatacattgtcataaatccagctaaaagagtcaaaatctcttctattggttgtgtccatgtatgatagtcatcagcatgcctatgaactggacccaattatatgtcacaataccacctgcaagcagggactaggaaggaaagccacatcacctgaatactgagcctgagtaggtcratgtcccttctgttggaagagtcctggcaggaaagtcgtatcacctagctgctgagcccactcaatgtcacaatgccctctgtgggaagggccaaggcaggagagtcaaatgacctgggtgctgggtccagcagtatgtcacaaattaccctgtggacagagcccaggaaaaaaaggagagtcacatgacctaggtgatgggcacaaagatatatcacaatgttctctgagaaaagtgtccagaaagaagagttacattacccagatgcttgacccaggtttatgtcactattccaactataggaattgctaagacagaagagccacgtcaccgggatgcttggcccactgatttgtcacaatcctttctgtaggca

SEQ ID NO: 30833 - DNA, 1148 bp, Homo sapiens
acatattagagtaacaataccaacttctgactgcttttgggtgtgagaatcagaacctcaacagtgggctgtgtctatgtgggagtgtgacaatctttactgttggcagtgtatgcatatgagagtcaaaatctcaacagtgtactgggccttgttatattattactctttgcaccatctgcggcggtagataatatgtgtaagacttgcaatgcactccaaaacatttgtgcctatatgaacccatgatcttactcatttctccaagtctagggatgagattcaccatctcttctattgactggtttagatataagagtcattaccatgcctgtgagctaggtccagcaataagtcaccattttacctgtggccagatccacatatgacagtcaaaattccaactgtaaactgtgtctactagtgacattcaggaccttaactgtgggctctatgtgtgagattgacaattttaactgttggctatgtgctgggctccggaatgacatgctctgtaccaccaaagggcattatagaatatgcataagcttgctcatactttgccatcttaccggaagcaggaggctgaagacattatacattgtcataaatccagctaaaagagtcaaaatctcttctattggttgtgtccatgtatgatagtcatcagcatgcctatgaactggacccaattatatgtcacaataccacctgcaagcagggactaggaaggaaagccacatcacctgaatactgagcctgagtaggtcaatgtcccttctgttggaagagtcctggcaggaaagtcgtatcacctagctgctgagcccactcaatgtcacaatgccctctgtgggaagggccaaggcaggagagtcaaatgacctgggtgctgggtccagcagtatgtcacaaattaccctgtggacagagcccaggaaaaaaaggagagtcacatgacctaggtgatgggcacaaagatatatcwcaatgttctctgagaaaagtgtccagaaagaagagttacattacccagatgcttgacccaggtttatgtcactattccaactataggaattgctaagacagaagagccacgtcaccgggatgcttggcccactgatttgtcacaatcctttctgtaggca

SEQ ID NO: 30834 - DNA, 797 bp, Homo sapiens
gaattcatacccattcctgcagaagttctgtggaatcttgaatgtagcactgaactaagtgatttttgttttttcaaagaggtttcagccaagactttggtctctaacctcagactccctaattaaactatggcttcaaaactgtacctgcctaatttcaagtgctttttcaaaagcaccaaatctagaggatgcttttgacgagtgtgaaaaaatgaaacacaatcacatccttctctttgcagttctctttccctcaccttccacttctattaaacttccttcagaataatcgtgcacagatttagagacaagtatgtatccgggtgggggcgggggggagccctctcatgcacctgtaatcccagctacttgggakgctaaggcaggagaatcacttgaacccgggaggcagagattgcagtgagtcgagatcgcaccactgcactccagcctgggcgacagagcgcaactctgtcaaaacaacaacaacaacaacaacaacaacaacaaaaaccctctcaaatatatgtgagtgcactgaaaactctgcctttgcagaaatcattttaagttaagacagaaatttctcactattttcagcatccttattcaacgggcagtttgtttccattgactttgaaagggctaagcttaaatttaaactcttaaaaacgagagatcaattttctattaataaaaatcccggacaggtttttcaacctatcaaatagttatatttttaattcacccttctatctctctctgcaaccacgatcatcaccacccacaaaaga

SEQ ID NO: 30835 - DNA, 535 bp, Homo sapiens
tcatgtctcttgtgtggtctaaaaagtaaattagtttcagatattataagaatgacaacctttaaatacacattcagatgccctagccctacttctcttaaatataatcataactgtcaatgcyggtactaccttcccacaccgcaagaattagctagaagtcagtgtggctttctcttaagatggatataaattttcctgaatgtcactatctccaccattctgcacttattcttggcctctttaatctgtgactccttcaaccatttgagcttttctcattttttttactttctgaagaagcaaacagtgtggtacatattttataaagtaatgaaaaggcaaataatattggtttgatgtgcctttccttaactgggttaaattgttaactaaaggatgtttacctaagctaaggcaaagccaggtacaaaattgtggtgttttgatacgaaatttgatggtctttgcagttataatattgctactgctatgatgctgataaagacatatccaagactgggcaatttacaaa

SEQ ID NO: 30836 - DNA, 596 bp, Homo sapiens
tgctgtcctgaatcttcktaggaacatctcttgccacaaaagtttaataatttctaataccttgttccttatttccatctgagatctcatcaaaatggtctttactatctgtacttttatcagcattctggttatgagcacttaagtaatctctcaaaaaattcaagctttccctgcagactttttctgagccttcaccagaattgcccttaatattcatcagttcatggcaatacaggctatttctagcctgtccttccaaattattccatccactacccattacccagttccaaagctgcttccacattttcagctatttgttgtagcaacaaagccactcctggtaccaatttccagtcttagtccatttttggctgctataatataatatcatagactaggtagtttataaaaaacagagatcaattttctacagttctggaggctggaatgtccaaggctgaaggactatatctggtgagggcctttttgctgcgtcaaacatgatggaaaagcaggtgggcatacgagacaagagagaaaggcactagcaaccaaactcactttacagcaacccactcttgttataacta

SEQ ID NO: 30837 - DNA, 396 bp, Homo sapiens
tttactttccttcctcatggattttagagtttcaagagtatcccataaaaaaatgcatattcagtagtccccacttacccttaatgtatatgtttcaatatacccagtggatgcctgaaaccacagatagtaccaaaccctatatatattatgtttgttctatccatacatacatatgataaagtttaatttataaacaggcatggtaagatattaacaacaacaaaaataaaatagaacaattataataatatgccagcataactactcttgtgcattggggtcattatgaattaaaacaagggttacttgaacacaagcattgtgatactgccacagtcartctgaaaactgaggaggctactaagtgactagcaagcaggtagagtctatggg

SEQ ID NO: 30838 - DNA, 491 bp, Homo sapiens
cccaggctggtcttgaactcttgggctcaagcaatccacctgcctcagcttcccgaagtgctgggattacaggcgtgagccactgtgcccggcttactgcagggtttttttttgttgttgttttgttttgagatggagtcttgctctgtcgcccaggctagagtgatctcggctcactgcaacctccaactcctgggttcaatcaattctcctgcctcagcctcccaagtagctggactctgtctcaaaaaacaaacaaacaaaaaaacggggccaagcatgctggctcatgcctgtaaacccagcactttsggaggctgaggcaggcaaatcacttgaggtcaggagttcaaaaccagcctggccaacatagtgaaaccccgtctctactaaaaatacaaaaaattagccaggtgtggtggtggtgagccaagatcatgccactgcactccagcctgggcgacagagtaagactgtctcaaaaaaaaaaa

SEQ ID NO: 30839 - DNA, 1619 bp, Homo sapiens
tggacctctgagggtacaggttccagggagacaaggagctgccctatctggccacccccaccgacacagggtcctgtgccaggcaggtgggaaccagcaggtggctttgaacctcagcgctgtcccgaggcagcaggtgccctgcccctgcactggcctccaggctttggcatgtgtgggttccacccttgacagcccctccctctgcactcagaaaccagctcagggctgccaggggcttgcaggagcccagaatgtgtgcagcccaggcctcagtcctccatccagggctattgtcaaatccagcaagtgtctgttgagcgcctactgtacatgcatacagttgagggggactgttgctcggctccgacatagcacactagtctggtctagagagccgaaccagtttaggggcatcggggcccatcccccagggcatcgccacacccactgggctttgcccttgccggctgcccccaccctgcccccagctatgcacgctctccaggccctgggcagccctccctgctggccttctcagaaggtctccctgacctttccactgcacctcacgcctcccacagtggtcctccctcctgaccccctcacatcaccgtaccatttcgtatcagcctcagggggccacccttccttgcactctcccagggcagcacacaggacggcagccgaggggacgtggagtggccaggaacatcatggcctggcccccagtggtctgctctgcccatcctgacccgaagcctgggatgacccctcctcgccggaaggcaagggagggctggattggcagaatccatcacccagggggcagctcccacatgctgactgtaaacagctgttagctttttgaagagcaaaataaattgttttaacagcagagcagtcmcccttctctgcgctgcaagctgagggcctgggagttcctgcaccctgctagctgcccctcagcctgggcctggccccagacagctgcagatgcccatatgcctgaggcccagtcagcctggggacctgggaccagcctgtccggcatccctggactcagatgcctcctccagggagtgatggatccgacccaggcctggcctggggtccccaacaccctcacagggcccaaccagacctggagtgctcctacccccactccaacaagaacacagggcggccctgcacctccaacctccttcttccccatcttcacgtctccactccctgcactgctgctgtgctgggggacctggggatgtgcacggtttgcaggggccaaggcacgtccggccaggcccagcctcagggatcacatggcagagtcccgcaccccacggcccctgcttgggatgctccctgcaggtcccaggaaccactgcaaggtgggggcggggcctcagagccctttcccagagctgggggctggtagccaccctttggctttggagaaggtgagccaggcctgtctaccagggactaattatttctgcagcagccgccttgcctgcctggtgtcctcaccgcaggccccacagcttgttttgagtgtgcttgtgtgtgtgcacgtgtgtctgtgagcatgctgcctcgtgtatgtgtgctgcacatgc

SEQ ID NO: 30840 - DNA, 531 bp, Homo sapiens
accaaagaaatataaatggaggggatgtgtttgtttctgcctaacttccttaagaggatatttttgtccctggacaaatgaatgatgtccagagcaaccctgaaaaccattgttaaagatggaggcgctgtcgtcaccctgggtccccgaaacactgtgtagagtagaactgacctctgacaaaccacgctcacttcagactgtaacttgaaggagaaataaactccttttttctttattaggtgggtgctctgctacagtttggcttgctcattcgttgttgaagaaattacattgtatcaagtaggagttttaaattatttctgatcctcagcgataatttataatacctaatcaatctattctgcttctgtggagtaggtgaaatctacctatagaattggatcgtggtgacatacyacaatctctattcagtgtaagattgtgttgagaagcggaaaaataaaaattgggccattctgtacaagcacccttaaattctctccccatcaaaatttctctttaaatata

SEQ ID NO: 30841 - DNA, 598 bp, Homo sapiens
caaaaaaaaaaaaagaaacagggccatctgtctttgaggcagagggatttacacccttgctaagacactaaagttttttgctaaggcactaaactttttaggcccttcccccagtattacacatgagagatgataatcaagcctttgttgcctatgagtgaaaaggaatctaaaaatcactgaaataaataataatagtttttcaaggaatttcaaagaagttttttcacatgggaaaggactgctaggctggatgtggtggctcacacctgtaatcccrgcaatttgggaggctgcagcaggaggaatgcttgaacccaggagttggagaccagtgtgggcaacatagtgagaccctgtctctaccaaaaaaaaaaaaaaattagccaggtgtggtggtgtgcacctgtggtcccaagctacttaagaggcttaagtaggaagattttttgatcccaggaggtcgaggttgcagtgagccatgactgcgccaccgcactccacccttggtgacagagcaagaccctatctcaaaaaaaaaagaaaaaagtctgctggttgttgttggaaataatcagtcacagtggcatgctgccta

SEQ ID NO: 30842 - DNA, 740 bp, Homo sapiens
aggaatactagacaaaacataagaaacataaccagaagtcagaaatgaaaggaaatctagaacccayagaataagcctctacttactgttgggatgtcctgagaacttgggtttaatgaataaattggaagagaagtccttgggtccatacaaagtggggagttcggcctgacaccctcaaataaaatctttgaaggattacaccttcactgagagagtacaatagaaagagtctgaccaccagcaaagggatatggcacagcatcttgctttctcatattggccctagattggaggaaaagggacagagaaaactctcctctgagagctgataacaattacctaactctaatgcaaatttggcatccaaatttatactacttgaaagctcctagaaaccacaagccaaaaaaaaagaaaaaaaaaaaagaatcagcatgtggacgtggatatacacacaacagtcccaggttaatgcccctgacagaggttaaaacattcttcagaagggttttaaattcaggtcacaaataaattctccaacatgaatctctttcaagctaagtaagtaaataatagaaaaacaaaaactctagagcttgctactggaagaatgacatatggatcagcagcattagcatcaattgagagcttgttagaaattaagaatctaggacttcccctagacctactgaatcaaaatactcactttcatgagatgctgcataattgaactacaa

SEQ ID NO: 30843 - DNA, 625 bp, Homo sapiens
tgcatagtaactaggactccgttcctccatgttttcttctcttatcttacttgtcattgttgtcattgttctgaaaacttattttagaaaaytgatcaagtaacatgttacatgtggcttactctagatatatctaagcccttctgcacagctaaacttagatggagttggtcaaaggggaaacatctgggttgtgccttttttttttagttttctttagaaactgcagcatgttgttgttgaagtgtggagttgtaactctgtacacaattgacagtcaacaatatgtacctaaaacttgcactattgcaaaaggggtgtattatccaggtactcatacactttttttatatatattactggtcctataccagaaacattttgctttattgttacttgctttttaaactttgtttaggcacttaaagaaaatctgcttatggcagaatttgcctcaaatccattccaagttgtatatttgttttccagtataaaataacaatttacctccaaaacccccaaaagacaaaacaaaaacagaatgaagatatgaaagctcagggctcctgaattccaaatcactttgctatgaagccatactatttcgaataaaacaaaatgatgt

SEQ ID NO: 30844 - DNA, 930 bp, Homo sapiens
ccatgggccagcatgcctaccactccacccactgagcagcccaggcaagtggtctgctctccggagtgtacctcagtagctgccactctcggcctgctagcttgccactcttctttccattgccttccctccccctgccttctgggtacccagacttcctgagctctgcccccactcagctcatatcagtctcgctgttcatctttccccagtcctcattcaagtggaactgagcatctcattctaagaacccttttgattttagtatctccatagcttcaaaaaagacctgaacaccagaacaccgctgagcagcagggatgcttcccagggtgctattatcatccccagtttgcacatggggaaactgaggcagagarcgctaaataacctccccaaagtcaaatagctggcaggtggccaagctagcacccaggtgattggctgctggtatggcaagaatgaggaaataggagggcttctccctggctctgctggaaatcccaacttccccaggagtgtggagctgagtggttccatatctctaacattcttgtctttgtgcataagggatttttagcttcccagtgagtgatcaacaagggaaagttgtgggatactgcttattgacttcttcctgaagtcaaggtaccaagagggtgacagaacaaagctgagagccgagagtagacatttttcccaagttacttagaatccatgtcagcaaatgcgtgcagactatggaggggtccacagaagagctgagcctcctcctagcagccaacaccagcttgccggcgatgtgagcggctgccttggaagtggaccccctgccccagcccagccttcagatgatgcagtgccagctgacagcccaactacaaccccatgggagaccctgagctagagggttccagccaagccacatgt

SEQ ID NO: 30845 - DNA, 1901 bp, Homo sapiens
acatggcgaaaccccatctctactaaaaatacaaaaattagccgggcgtgggggtgcaagcctgtaatcccagctacttgggaggctgaggaaggagaattgcttgaacccaggaggtggaggttgcagtgagccaaaatygtgccactgtgccactgcactccagcctgagtgacaggagcaggactccatctcaaaaaaaaaaaaaaaaaggagtgtttcctataaaaaggaagaagccataagcctaaggaaagagcatagagcctacagaaaagcaaactggagcctggagtgctcaggccactggagcgggatcctctgctcttggacagagatatttatgaggtctctgggaacaggtcttgggaaacaacctcaatgtcttctgcttcatttttctataactccatgctcccctgagaccttctcatttccagttgctgtactgtcagagaattacctctttcggcagacatggccatagttccccgggaggaaaggctgtgcgtaggccctccagtgagcatcacacacggcctggtgcagtgcagagctccatctgggtgtctagcatcagatgggcagaactgacagcctgtttgcctgtcctgggcactggtgtgggggcaccatccaccatgagtactctgtggtggtgtttgtggttgattcacacacctggatctgcaatctcctaagtgaaatcttgccaatattttctgcttattgtaaattggctgaattttatgcccctggatcctgaaccatccataaacatgcactagagaggaaaggtctccaggaagaaggcatatctggaaagctccctccttttcatgggctgcttacctgagattctcacagcatccaatttcatctctgacatgctgattggtcaccctttaaagacctttctgagcagacagctagaaaaatgcctgatggcacacttagactgacttcattcaatttcttgccttttctcagctaatcttcaactcgtaatttcttaatggcttttccaggcactgttctggatcactaaaagacatagccagccaagatcctctgcatggggctcctgttgggattttgtcagcattgctttcttaattatgaaccagtgtaagggtctctggatttccagcatttctttaaggtgagcattctctacccaggaattgggtttggtagagaccccagggtataggcatagaggaaactttggatgtccagtgctgtagagcccagagccttcctgccccgtccgcaaggcgctgggctgtctctgttcccttccccatcataacctgcacagcatagtttggaagggacctactcaaccaacacacagctaggctttcaaatatacggccctccactgatctgtactgtttacatccactggcacctgtctccccttgacttttcctgtggccttggtgctaaggaaatgcttcccaagtacattcattaatgtcatactatgaaattgcataagtggtttatcatcctaattgcccatactgcattatttccaagttaatgaggttatgagcctgcagcaggcgtactatattctaataatagactttaggacatgccgttaaaaagtcattactattattattgttatttaattgggagaaggtcctctcgccccctcacctataggcaaaagatgtcttaaataaaaagacacgtgagcagatatatgattccaaggtcaaccctggaccagaaagacatctgagctctacactgctctctgcccctgcacactgggagtccctcttcctttccctccctctccttgatcaataaggaaacacagtattcccatctgctctccacccctgtttgatgcctgccttatcttccaccaggacaagttctat

SEQ ID NO: 30846 - DNA, 582 bp, Homo sapiens
aagaaacttgtaatgtgacctctagggaaggttagcgggtgacaagggaaagttgtggacaagattattggttttcgctgaaccctttttttctctttgtacctttagaatgttcagttgtatttgttaattatttaagaaattcatgttttcaaaatttcttcttcgcataccagccattcagatatttaaagatgaactgtgccctcatggttagtgaaggtcctgatgatcacttgttctccaggaactcttgctgaggcctcctacttgggtttgccctctccagataaagtgaaccttacctgtgttctattcctgtcaaccagataagctaataatatatgccattgtgtaatggggatgaggactttctctagaaaacatctgtgcaccattagaggggcgcatgagatttaggagtgccttaaatcaaaagcataactttctcctccacaacacrttgcctagctgaaaggatattaaaatagtgagtgcactcatgagtttagaagtggaggcagaggactttcaaattgcatgaaagttagaaaataattaaggaggaacaagatgggtata

SEQ ID NO: 30847 - DNA, 618 bp, Homo sapiens
ttgacctatatgccaggctcttggcctgaccccacagccttccacgatgcccaccaccaatatctgcccatgcactgggtgcaaggccttgtctggccttcttaggcctcctgcaaaatttcctctcttcattaaagcacagcttcgtggtgacaacattgtagaggcaagcagaaggactgggaccctggactgaggccacaggaggcaagcgcagagctctggttggccaacatgggccagcttctggccaatgagggctgaggcgggctgaatcgtggcccccmaagaaatacgatcacatcctgctccccagaacctgcagatgtacccttattaggaaaaagcatctttgaagatgtaacgaagttaaagatctcaagatgaaatcatcctgcagtaggatgaagtctaaatccattgacaagagtccttctaggagatgcacagagaagacacacagaggagaagcccaagcgaagtcagggaagagaccggagcactgcggccacaccagggaagcccaggacagccgacagccacccaaagctggagcggggaaggactgacagctttttttaagggaatgcgaccctgccagcactgtgatttgggact

SEQ ID NO: 30848 - DNA, 618 bp, Homo sapiens
ttgacctatatgccaggctcttggcctgaccccacagccttccacgatgcccaccaccaatatctgcccatgcactgggtgcaaggccttgtctggccttcttaggcctcctgcaaaatttcctctcttcattaaagcacagcttcgtggtgacaacattgtagaggcaagcagaaggactgggaccctggactgaggccacaggaggcaagcgcagagctctggttggccaacatgggccagcttctggccaatgagggctgaggcgggctgaatcgtggcccccaaaraaatacgatcacatcctgctccccagaacctgcagatgtacccttattaggaaaaagcatctttgaagatgtaacgaagttaaagatctcaagatgaaatcatcctgcagtaggatgaagtctaaatccattgacaagagtccttctaggagatgcacagagaagacacacagaggagaagcccaagcgaagtcagggaagagaccggagcactgcggccacaccagggaagcccaggacagccgacagccacccaaagctggagcggggaaggactgacagctttttttaagggaatgcgaccctgccagcactgtgatttgggact

SEQ ID NO: 30849 - DNA, 532 bp, Homo sapiens
ttttttggggaaacgtcagtctaaagtactaaataataaaagtcttcatctttgataactttgcatatgtaattttttattaaaatttcattatttttaactcatatttatcgatagacttgctgtgctattactagttttactcagaaggtggactcaataygttgtttggctcttactaaagcatacttcttcttcactcctttttaatggctcctccctactttatagttgatttattttgctcatgtggtagattaagaatttcataaagaaggaagtcatttctagttaattgaaatcattccaagtacatctgttttcaaagaaattttaccaaacaggcccttttccacacaggaacaatggaggaaaaataacaactgctgcctctaaagaacaagaaaattgcaaggttgactaggacaataaggagaaataaataggtgaagaaaatccatacatgcaaatcagagattacatatctcatagattacttatagcattttgaaatgtacagtaggtaatttca

SEQ ID NO: 30850 - DNA, 532 bp, Homo sapiens
ttttttggggaaacgtcagtctaaagtactaaataataaaagtcttcatctttgataactttgcatatgtaattttttattaaaatttcattatttttaactcatatttatcgatagacttgctgtgctattactagttttactcagaaggtggactcaatatgttgtttggctcttactaaagcatacttcttcttcactcctttttaatggctcctccctactttatagttgatttattttgctcatgtggtagattaagaatttcataaagaaggaagtcatttctagttaattgaaatcattccaagtacatctgttttcaaagaaattttaccaaacaggcccttttccacacaggaacaatggaggaaaartaacaactgctgcctctaaagaacaagaaaattgcaaggttgactaggacaataaggagaaataaataggtgaagaaaatccatacatgcaaatcagagattacatatctcatagattacttatagcattttgaaatgtacagtaggtaatttca

SEQ ID NO: 30851 - DNA, 1088 bp, Homo sapiens
attttataactcagacgtaattcatgaattttataattcatataattcatttggctttctttctcccccctagattctgtatactggaattgttatttatgcccctgccctggctttgaatcaaggtacattttagagttgccagttaggtaactcacattttggggttcactttcaacaagccttattttctccttggggagatggggagatggaggaatgcttctagtaacctgcatcagctttacttagcggggcaggatgggttcagtgtctacactagcttctttgggtttttggatggacagctccaaagtgtctgtagaccacagaggtggacttctccaggtggtacttctctgggatgtgcccatcagcccattcactcctttagaattaaagctccctgtagccaaagtcaggattgacggcatcccctcttgtgaatctataacctggagcccatctccaggaagcttccctgtaattctgctcaggcctgttgtaaaatctggcagggagaaaagcttttcttctccacacttctaataaggcccaaaatgaaagagaaagagagccatgtgatttgaatgatcagactgctcctagtgacaaaaggacagatgtctgtagtgcccttacaaataaatttaggaagattgtgctgctcaacaaagtayctatactctctagatttgggaagataaatgcagtgaggctgggatagtttattgaagcaaacgttcatgctagtcatagtttcaaaaggctttggggaaacaccatgccctttgaattcttatctattcgaagtgaatttctctaaaacgtccttgtaaaatggacatgtggactctgtgatgggaagaatgtggtacaattcctggggttaaaatgacatgaagaaaacctactaattccacactctgttttcttgattttatgatagacatgacagtagttaccacctgtttctgaagtgaacaatattattaccaagaggaacttcatgtgtaaggtgctcttgaactctgaattctgggcatgttccacatcggtattaccaacatcacaagtggatcatctca

SEQ ID NO: 30852 - DNA, 1088 bp, Homo sapiens
attttataactcagacgtaattcatgaattttataattcatataattcatttggctttctttctcccccctagattctgtatactggaattgttatttatgcccctgccctggctttgaatcaaggtacattttagagttgccagttaggtaactcacattttggggttcactttcaacaagccttattttctccttggggagatggggagatggaggaatgcttctagtaacctgcatcagctttacttagcggggcaggatgggttcagtgtctacactagcttctttgggtttttggatggacagctccaaagtgtctgtagaccacagaggtggacttctccaggtggtacttctctgggatgtgcccatcagcccattcactcctttagaattaaagctccctgtagccaaagtcaggattgacggcatcccctcttgtgaatctataacctggagcccatctccaggaagcttccctgtaattctgctcaggcctgttgtaaaatctggcagggagaaaagcttttcttctccacacttctaataaggcccaaaatgaaagagaaagagagccatgtgatttgaatgatcagactgctcctagtgacaaaaggacagatgtctgtagtgcccttacaaataaatttaggaagattgtgctgctcaacaaagtatcyatactctctagatttgggaagataaatgcagtgaggctgggatagtttattgaagcaaacgttcatgctagtcatagtttcaaaaggctttggggaaacaccatgccctttgaattcttatctattcgaagtgaatttctctaaaacgtccttgtaaaatggacatgtggactctgtgatgggaagaatgtggtacaattcctggggttaaaatgacatgaagaaaacctactaattccacactctgttttcttgattttatgatagacatgacagtagttaccacctgtttctgaagtgaacaatattattaccaagaggaacttcatgtgtaaggtgctcttgaactctgaattctgggcatgttccacatcggtattaccaacatcacaagtggatcatctca

SEQ ID NO: 30853 - DNA, 598 bp, Homo sapiens
tgaggaagaagtggctgccctgcccaacacgggccgtgtggaggaaggaagtgcacccaggttggcagtgtgtcccagtttcctgctgactgtggcccygtcagcactcctgccctggaggtggggctgctgctggggtaagtgggtccaaggttctggtgacttatcgtgacatccctggggacgaagggctacaacagcctttcaggaggctctctggggacttgtcccgcccagacccctctctgagagtgggggaggccactggctgcctccttgcattggaggccccttccccaccgactccacagggaagctggtgttttctggcctgatcctgctggggcctgtagagggtgggatgttagggccaggtcagcgtcttgctgccgtgcccggagccacagtagagagaaaggtggggtggggttctgagtcacagcgctgctgcagctagctggctggcctggggtggggactaaccagggtggggatggtgctgagccctattcctgtctcaccccagagagctccaggcttccggctgagtcacagggaaggaggacccttacatggggctgagggctgagtattccca

SEQ ID NO: 30854 - DNA, 598 bp, Homo sapiens
tgaggaagaagtggctgccctgcccaacacgggccgtgtggaggaaggaagtgcacccaggttggcagtgtgtcccagtttcctgctgactgtggccccgtcagcactcctgccctggaggtggggctgctgctggggtaagtgggtccaaggttctggtgacttatcgtgacatccctggggacgaagggctacarcagcctttcaggaggctctctggggacttgtcccgcccagacccctctctgagagtgggggaggccactggctgcctccttgcattggaggccccttccccaccgactccacagggaagctggtgttttctggcctgatcctgctggggcctgtagagggtgggatgttagggccaggtcagcgtcttgctgccgtgcccggagccacagtagagagaaaggtggggtggggttctgagtcacagcgctgctgcagctagctggctggcctggggtggggactaaccagggtggggatggtgctgagccctattcctgtctcaccccagagagctccaggcttccggctgagtcacagggaaggaggacccttacatggggctgagggctgagtattccca

SEQ ID NO: 30855 - DNA, 573 bp, Homo sapiens
ccagcctgggcaacaggcaaaaccccatctctaccaaaaatacaaaaataaaaaaatattagccaggcgtagtggtgcatgctttagtcccagcyacttgggaggctgaggcaggaggatctcttgagcctgggaggcagaggccgcagtgagctgagatcacaccactgcactccagcctgggcgacagagggagaccctgtctcagggaagggggaaaaaaaaaggataaggataacaataatcagcagcatttactgagggcttactgtacaacagactccgtgttaagtgcttttatagtattaccccattaaatcctcaagaacagccctgagcagcagatatcccttggttaggacatggagggtcagaaatactaagttcatacagtgagtgcggccagtgatggggaaacccagtggagagcacttagcatactctttgtggctgtccccctgtgcagacaggaaagaccatccccagggtattcttttccaacggaaagattctcctcctgggtctctggaattacctgaaggaagtgtctggtgggtacatcctatctcatta

SEQ ID NO: 30856 - DNA, 573 bp, Homo sapiens
ccagcctgggcaacaggcaaaaccccatctctaccaaaaatacaaaaataaaaaaatattagccaggcgtagtggtgcatgctttagtcccagccacttgggaggctgaggcaggaggatctcttgagcctgggaggcagaggccgcagtgagctgagatcacaccactgcactccagcctgggcgacagagggagaccctgtctcagggaagggggaaaaaaaaaggataaggataacaataatcagcagcatttactgagggcttactgtacaacagactccgtgttaagtgcttttatagtattaccccattaaatcctcaagaacagccctgagcagcagatatcccttggttaggacatggagggtcagaaatactaagttcatacagtgagtgcrgccagtgatggggaaacccagtggagagcacttagcatactctttgtggctgtccccctgtgcagacaggaaagaccatccccagggtattcttttccaacggaaagattctcctcctgggtctctggaattacctgaaggaagtgtctggtgggtacatcctatctcatta

SEQ ID NO: 30857 - DNA, 1403 bp, Homo sapiens
gatttggattctaaaaacatcactcttggagctgcatggaaaaggagttgagaagcatggaaattaagagttaagaagggaagcattgagactaattgaaagacttttgtgattgtccagtcacaacataatggtaacttggattaagttatggtagtgtggaaggaggaggaacttagaaagtatttggagtgatggattggattgggaaagtgcgaaagggagaaatcaagagtgatttctaggacttgagtacctggacagaagatggggcaatttgccgatgtaggaaagaacagaggttgttttttgtttctgggtttttccgtcattgctgcttgtttttattttgttttgctgcaggcattattaagtctgagattcttcatagagacacaagaagaaatggcacataggcgatttctatatctttatattcttttacctttggggaataaatattcaaaaagttaaaataatctcctgcatttagcaaaatgttgttaactgtttcttagatggaatatgtagattcagggaaccaagagaaattagaaagcttaagtgaataaaactaccttgaaatcatagttttttacgtaggagggaatttaaaagtcatctcagccacccctgccaaattttacagataaaaaaactgagacctgaaaattcaagtgacttatcagaatcaacagctaaattggtgatagtgttgatctgaaaaccagatctcaggttcattgtttccgtaaatatatctgaggaagttatcactgtcaaatacataaatgcactgtcattaaatacatttatgcttcagtgtgaataattctgagcacgcaggttttggaatatgttttaaggattttactaaaagctgttcttaagccaacattttgtttaatttgtttaaagaacacaaaaataaaatttacctaattgaaagaacatagagtagaaccaagtgatggaggaaaaactttttacatttttccaagtataaaagctttatttaaaaaaaaaaaagtatgatgtgagggctgggtgcrgtggctcacacctgtaatcccagcattttggggaggctaaggctggaggatcactggagtccaggagttcaagacccaccagagcaacatagggagatcccatctctacaaaaaagtaaaagaattagcctggcgtggtggcacacacctgtaatcccagctactccagaggctgagacttgagcccagaaagtcaaggctgcagtgaactctgatcaggccactgcattccagcctgggtgacagagcaagaagaccctgtctcaaaaaaagaaaaaaaaagtatgtatgtgaataaacattctttattatatttgatttattcttgacattttctctgtagagaagtgt

SEQ ID NO: 30858 - DNA, 648 bp, Homo sapiens
attttgcaaataaggtaagtctagactcccaaaataaaaattcttatgatcaaatattcatagattatgaggttattacatgcgaggcactgctctaagcactttacataggtcatatccttttatgctgagagtggtttttattatgatcccattatataggtgagggaattgaaacacagattaagaaatgggcccagcctagtgtggcagtgcccagtggcagagctcggatcagaccccagtggtctggctgtagagcccgygctctaatcattttgttacactgcctctcagatgcttccactctgctttcttccatgtgcaaactattgtgtgcaatcctgtatatgatgatgatagtattttatttttttctgtctgagaagactgttatttttcataaaagagagttttcttatgtgatatgaattaaggttcataaggttagttttcgaagttgcattctttgtatcaagaatttatttttccattgtttaaattattggatagatgttgctatcggagctccacaagaagatgacttgcaaggtgctatttatatttacaatggccgtgcagatgggatctcgtcaaccttctcacaggtaaggtactattctatttccaaaagaagcattggttata

SEQ ID NO: 30859 - DNA, 1036 bp, Homo sapiens
ctttagctcaggagctggaggctgcagtgagccgtgattgcgccactgcactacagcctgggcgacagagctagttcctgtttcaaaaaagaaaaaattcctcaaatgttaattatgaaatatttcagaagtacgaaaaagtgtaccaccaccggcgctaccacttccaccttggcaagtgaagccccactacaatggaagcgtcgggcgtatcctcccgggcctctttccctccctccccggcccttccctcttccgatttccctcccgccctttcccctccctcccctcctgacctcgacttccttcccttctctgtctaaggggcagggcggaagatcgagcctcaacgctgccccacacccacgctggatttaaagcccacgctgtaggcgtctgtctccgcggtggcagcgttttcctgtcctctccaggactgggagagtgcagcgctcctcgttccctttcctggtgcaggaaagtgagaccgccttcagccttctctctgcgcctcccyagaccctcatctctccagtgattcttatggccctgccctgggagggggtcacccattcagcaaaaagtcaccgagggcccaaaaggttttgccagagaaataggacggctgaaaatgttaccctgatggtacaaacggaataaccccgtaggcacacataattagctgttttctgagggtatcaaaagccactatgggtggagtgcctcacgcctgtaatcccagcactttgggaggccaaggtgagaggatcgcttgaggggagttcaagacgagcgtggacaattctgagggaccccgtagctacaaaaaaaaaaaaaattttagccaaatatggtgagcatgcctgtagtaccagctactgaggagcctgaggtgcgaagatcacatgatcccaggagtttgagaccagcttgggcaacaaagggagacctcctctctacaaaaaagagaaacaaaattagccaggcttggtggccagcgcctgtagtcctaactactcagaaggctgaggtggga

SEQ ID NO: 30860 - DNA, 1071 bp, Homo sapiens
cagtgcactccttgctgtttgccacaacatgctacactacatttctgttcatacagagaaatctgatagtggttactaccatctctgtcagtctgaaaatcagcagaggtcattgctgcacacaaaggaacctgcctcatatccatcaaccctttgacaccatgaggagagaaccacccactccccagtaacttttcccactcccaacycgcatctctgaactacgaccaccaccaacacttccaccttttgattaccactaatcttgagaaataatttactaacccatccatccatgcactccaacaatgtgactagaggacctgccaccttgacccaagaaagacaccaaaatattattgttagaaaaatacatgcataaagaaatttataactgcaccaagacattgtttgcgaccccagctgtctcagaccaggtttcttggctgtcatacaaatgggaaacctatttatgggctggctggcagcgactcttgatacttctacttgtgttcctcctctctactctcacagtaaaatgttttctatatcctttagggcaactgatgtagccacactctgtaaactcttcagcatcaacactccaaaaattccttcacatgacatgaaaccatcagaggttgggttgggttaatcctgtgtccttattctccgtgtttatgatactctgacatcttggagtcttgtggaactggggaggaaaagcctgtcccaggattacttaatttctagaagaaacacttgctggtgagcacacctttcctgtgcaaaccagggcatacgggcccattctccccacctgtttatctgactcacacaacaagccaacatttcctctgccctaaacccccaaggggcaggtacaggacaaggagagatggctccaataggccagagcccatcgcgtttttcagcatcccatgccatgccggttggaagctcgtccacccgcctccctcatcccttcccctggaagctgaagaaggctgtgctgctgccgcctccctgctccccttcagggctttctgggcaaggcttacagttccagga

SEQ ID NO: 30861 - DNA, 1071 bp, Homo sapiens
cagtgcactccttgctgtttgccacaacatgctacactacatttctgttcatacagagaaatctgatagtggttactaccatctctgtcagtctgaaaatcagcagaggtcattgctgcacacaaaggaacctgcctcatatccatcaaccctttgacaccatgaggagagaaccacccactccccagtaacttttcccactcccaacccgcatctctgaactacraccaccaccaacacttccaccttttgattaccactaatcttgagaaataatttactaacccatccatccatgcactccaacaatgtgactagaggacctgccaccttgacccaagaaagacaccaaaatattattgttagaaaaatacatgcataaagaaatttataactgcaccaagacattgtttgcgaccccagctgtctcagaccaggtttcttggctgtcatacaaatgggaaacctatttatgggctggctggcagcgactcttgatacttctacttgtgttcctcctctctactctcacagtaaaatgttttctatatcctttagggcaactgatgtagccacactctgtaaactcttcagcatcaacactccaaaaattccttcacatgacatgaaaccatcagaggttgggttgggttaatcctgtgtccttattctccgtgtttatgatactctgacatcttggagtcttgtggaactggggaggaaaagcctgtcccaggattacttaatttctagaagaaacacttgctggtgagcacacctttcctgtgcaaaccagggcatacgggcccattctccccacctgtttatctgactcacacaacaagccaacatttcctctgccctaaacccccaaggggcaggtacaggacaaggagagatggctccaataggccagagcccatcgcgtttttcagcatcccatgccatgccggttggaagctcgtccacccgcctccctcatcccttcccctggaagctgaagaaggctgtgctgctgccgcctccctgctccccttcagggctttctgggcaaggcttacagttccagga

SEQ ID NO: 30862 - DNA, 1071 bp, Homo sapiens
cagtgcactccttgctgtttgccacaacatgctacactacatttctgttcatacagagaaatctgatagtggttactaccatctctgtcagtctgaaaatcagcagaggtcattgctgcacacaaaggaacctgcctcatatccatcaaccctttgacaccatgaggagagaaccacccactccccagtaacttttcccactcccaacccgcatctctgaactacgaccaccaccaacacttccaccttttgattaccactaatcttgagaaataatttactaacccatccatccatgcactccaacaatgtgactagaggacctgccaccttgacccaagaaagacaccaaaatattattgttagaaaaatacatgcataaagaaatttataactgcaccaagacattgtttgygaccccagctgtctcagaccaggtttcttggctgtcatacaaatgggaaacctatttatgggctggctggcagcgactcttgatacttctacttgtgttcctcctctctactctcacagtaaaatgttttctatatcctttagggcaactgatgtagccacactctgtaaactcttcagcatcaacactccaaaaattccttcacatgacatgaaaccatcagaggttgggttgggttaatcctgtgtccttattctccgtgtttatgatactctgacatcttggagtcttgtggaactggggaggaaaagcctgtcccaggattacttaatttctagaagaaacacttgctggtgagcacacctttcctgtgcaaaccagggcatacgggcccattctccccacctgtttatctgactcacacaacaagccaacatttcctctgccctaaacccccaaggggcaggtacaggacaaggagagatggctccaataggccagagcccatcgcgtttttcagcatcccatgccatgccggttggaagctcgtccacccgcctccctcatcccttcccctggaagctgaagaaggctgtgctgctgccgcctccctgctccccttcagggctttctgggcaaggcttacagttccagga

SEQ ID NO: 30863 - DNA, 1071 bp, Homo sapiens
cagtgcactccttgctgtttgccacaacatgctacactacatttctgttcatacagagaaatctgatagtggttactaccatctctgtcagtctgaaaatcagcagaggtcattgctgcacacaaaggaacctgcctcatatccatcaaccctttgacaccatgaggagagaaccacccactccccagtaacttttcccactcccaacccgcatctctgaactacgaccaccaccaacacttccaccttttgattaccactaatcttgagaaataatttactaacccatccatccatgcactccaacaatgtgactagaggacctgccaccttgacccaagaaagacaccaaaatattattgttagaaaaatacatgcataaagaaatttataactgcaccaagacattgtttgcgaccccagctgtctcagaccaggtttcttggctgtcatacaaatgggaaacctatttatgggctggctggcagcgactcttgatacttctacttgtgttcctcctctctactctcacagtaaaatgttttctatatcctttagggcaactgatgtagccacactctgtaaactcttcagcatcaacactccaaaaattccttcacatgacatgaaaccatcagaggttgggttgggttaatcctgtgtccttattctccgtgtttatgatactctgacatcttggagtcttgtggaactggggaggaaaagcctgtcccaggattacttaatttctagaagaaacacttgctggtgagcacacctttcctgtgcaaaccagggcatacrggcccattctccccacctgtttatctgactcacacaacaagccaacatttcctctgccctaaacccccaaggggcaggtacaggacaaggagagatggctccaataggccagagcccatcgcgtttttcagcatcccatgccatgccggttggaagctcgtccacccgcctccctcatcccttcccctggaagctgaagaaggctgtgctgctgccgcctccctgctccccttcagggctttctgggcaaggcttacagttccagga

SEQ ID NO: 30864 - DNA, 1071 bp, Homo sapiens
cagtgcactccttgctgtttgccacaacatgctacactacatttctgttcatacagagaaatctgatagtggttactaccatctctgtcagtctgaaaatcagcagaggtcattgctgcacacaaaggaacctgcctcatatccatcaaccctttgacaccatgaggagagaaccacccactccccagtaacttttcccactcccaacccgcatctctgaactacgaccaccaccaacacttccaccttttgattaccactaatcttgagaaataatttactaacccatccatccatgcactccaacaatgtgactagaggacctgccaccttgacccaagaaagacaccaaaatattattgttagaaaaatacatgcataaagaaatttataactgcaccaagacattgtttgcgaccccagctgtctcagaccaggtttcttggctgtcatacaaatgggaaacctatttatgggctggctggcagcgactcttgatacttctacttgtgttcctcctctctactctcacagtaaaatgttttctatatcctttagggcaactgatgtagccacactctgtaaactcttcagcatcaacactccaaaaattccttcacatgacatgaaaccatcagaggttgggttgggttaatcctgtgtccttattctccgtgtttatgatactctgacatcttggagtcttgtggaactggggaggaaaagcctgtcccaggattacttaatttctagaagaaacacttgctggtgagcacacctttcctgtgcaaaccagggcatacgggcccattctccccacctgtttatctgactcacacaacaagccaacatttcctctgccctaaacccccaaggggcaggtacaggacaaggagagatggctccaataggccagagcccatcgcgtttttcagcatcccatgccatgccggttggaagctcgtccaccygcctccctcatcccttcccctggaagctgaagaaggctgtgctgctgccgcctccctgctccccttcagggctttctgggcaaggcttacagttccagga

SEQ ID NO: 30865 - DNA, 498 bp, Homo sapiens
ttcaatagacccaaaggagtgggtctggtttctttttcattaagttatatgattcagtaatagatgagaatgttttgtaattagaaataaacacatcatttatttgttgagagcaaaacyctataggctgttcctaatggggagctgtttccttgaattgaaggtgagagtttatcttcggtctgagtcatatggaggaatcatgagaatcataatccctgctaaggtacaaagagtccagaggaaggttaagagtaaattcttgatatttttaaaagatgacttgtgggttccaagcatagcattaacttccattttagaatccaatagaaattgcatcagctaataagctaaatgaggctttttaacagttgcttctcatctctgcacaagagggcagcctttcaccaaaaccaaggaaacacttgggcagaagtgtgctaatgtatatagagaccccctccaatcatagaacttccatgaagagctcccttgaca

SEQ ID NO: 30866 - DNA, 622 bp, Homo sapiens
gttgataatcatctccctaatcaagtctaattgctgctctagaacaaaacccagaaaagatggatggactggcgaataagtggttatagtgccatctagtggcaaagtgacaacatacaccctgaatttattatctmccccccactaattccttagtgagaatccagcgaaaagatttccctgcattatttaaaccgtattattagcaatctcctcatgagattcctgaggctttaggtatgaacagggcagataaatcatcaatttgctcatttactttttaaaaagatttttaaattgaaatattatttgcatatgatgaaattaactttttaaaagtgtacaattcaggggttttagtgtattcactaaattgtgcaaccatcatcactaattctagaacatttttgccacattaaaaagaaactctttacccattagaatcatcttctattcctgcttctcctgcaccccagccctaggcaaccacaaatctactttctacccctacggattcacctcttcaagacatttcatgtaaacgaaatcatgcaatatgtgaccttttgtcttttttcacttagcataatgttttcaaggcttgtctgtgtttcagcatata

SEQ ID NO: 30867 - DNA, 622 bp, Homo sapiens
gttgataatcatctccctaatcaagtctaattgctgctctagaacaaaacccagaaaagatggatggactggcgaataagtggttatagtgccatctagtggcaaagtgacaacatacaccctgaatttattatctcccccccactmattccttagtgagaatccagcgaaaagatttccctgcattatttaaaccgtattattagcaatctcctcatgagattcctgaggctttaggtatgaacagggcagataaatcatcaatttgctcatttactttttaaaaagatttttaaattgaaatattatttgcatatgatgaaattaactttttaaaagtgtacaattcaggggttttagtgtattcactaaattgtgcaaccatcatcactaattctagaacatttttgccacattaaaaagaaactctttacccattagaatcatcttctattcctgcttctcctgcaccccagccctaggcaaccacaaatctactttctacccctacggattcacctcttcaagacatttcatgtaaacgaaatcatgcaatatgtgaccttttgtcttttttcacttagcataatgttttcaaggcttgtctgtgtttcagcatata

SEQ ID NO: 30868 - DNA, 565 bp, Homo sapiens
ttttttgagacagagtctcgctctattgcccaggctggagtgcaaatctcagctcaatgcaacctctgcctcccaggttcaagcgattctcctgcctcagcttctcgagtagctgggattacaggcatgcgccagcatgcccggctaatttttttgtatttttagtagagatggggtttcgccatgttgaccatgctggtctcgaactcctgacctcaggtgatccgcccgcttcggccccccaaagtgctgggattayaggcgtgagcctccgcgcccagcctgtttgcctcccttttctgatcagcttcctctgctcacctttcatttctccttcctcataacttcagcttgcatttggtctcagcttcctgtggccctgactttatctgactcaagttggcatttgtgaaggtaataatctaacaagctcctctccgtttttcagatccacatcatggtcctatcatgtggggaactggcctctggtccaatgagcaaagatgggtcccacaaaatgtagttgcttggagagcagggcctgacagaaggggtggggaggaga

SEQ ID NO: 30869 - DNA, 565 bp, Homo sapiens
ttttttgagacagagtctcgctctattgcccaggctggagtgcaaatctcagctcaatgcaacctctgcctcccaggttcaagcgattctcctgcctcagcttctcgagtagctgggattacaggcatgcgccagcatgcccggctaatttttttgtatttttagtagagatggggtttcgccatgttgaccatgctggtctcgaactcctgacctcaggtgatccgcccgcttcggccccccaaagtgctgggattataggcgtgagcctccgcgcccagcctgtttgcctcccttttctgatcagcttcctctgctcacctttcatttctccttcctcataacttcagcttgcatttggtctcagcttcctgtggccctgactttatctgactcaagttggcatttgtgaaggtaataatctaacaagctcctctccgtttttcagatccacatcatggtcctatcatgtggggaactggcctctggtccaatgagcaaagatggrtcccacaaaatgtagttgcttggagagcagggcctgacagaaggggtggggaggaga

SEQ ID NO: 30870 - DNA, 490 bp, Homo sapiens
atgatgtgaagattagattaaaagatgattttacagccaggggcagtggttcatgcctgtaatcccagcactttgagaggccacgatgggcagatcacctgaggttaggagtttgagagcagcctggccaacatggtaaaactccgtctctactaaaaatatgaaaaaaaaaaaaatagctgggcatgatggcatgcacctgtggtcccatctacttggaaggataagtcaggagaatcacttgaacccatgaggcagaggttgcaacctatgagctgagattgtgccactgcactccaacatgggcgacagagtgagactccttctcaaaatgtgtatatagacagcttaatatgtggatctgagttctttacatttggaaaagaaatgaatttatatcctctaaaacatctgaaatttaattttcataaagtttcctcctctgagtaaaataatgtgagactgtccttgcatctgttstcactcttcc

SEQ ID NO: 30871 - DNA, 743 bp, Homo sapiens
gaatactgttcatttaaaaaaggactgctgatacatgcaacaacctgtatgaatctcaaaaacattaagttgagcaaaacaaaccaaacataacatactatctaattacttttatattaaagccacttccaggcaaaactaatatttgatgatagataccagaacagtggctgcttagagtgagggcagggaattcaaattgaatggaaaaggggcctgaggaaattttcyggggtgattgaaatgttttgtattttgatctggatgatggttatgtagctgcatatatttgtcaacattcctcatgctgtatgtttagatttgtgattttactatatgtaaattaattccttaataaaatactattataaaataagctgtaaattaaatggaattaacttcaagtttacattgagtttatatgtttccattgaacaatcactagtgatggttaaatgtggcttatcgacttactcatttcttatatatgttctctatctaaaaagagagctggtgtaagataaatgctaacttttacaaaaggtattattaagtatcctgactacacatcatggtggcagtgttaggcatcttagataaattgagaaattattcttaaaactgacaatagcaactaattaatttgatatagaaacgatctgcctgttttagatacgaatggcatattttaaataacctaggacgatttatttataaattacctgaataattttataaatgca

SEQ ID NO: 30872 - DNA, 991 bp, Homo sapiens
tgtgcagcctaccacactggagctcttattctcttcttcaaaatgttaatacttgggggcatctgcttctaatagagaccagtttcatcaaaattaaaaatctttctcaaggggtagacttcatcatcaatcttttcctaatacagagagaaatgaccttgtacgttcttcatcaacatctcctcagcttccccctacaccttcagttaatggaaattgtagtaattattaaaggcactaaaatgtcacaatttttcctgaaggaaggcacttcaataaaagttttcatctttttttttcttaagatctttgcatattgctaacgctttcctcttaaattttaagaaagtttacctttgataaattccaaataactactgaaaaaaactctcccatggaccaacagaatctctgcatatatgagtgaaaaacacatacaaagcaattcttattccagagacacatgttgcaggagaacagactggccatgatttgctttatggcctttgatattatctattgatatgctacagagggagatgaaataccatgtcccttcttatcctaaacatagacctccaccaactccatytctttcatcagctcaacatagttttagcagctgtttcacataaaacagtattcagcacttacagtctttagcttatgcaaacttcattacattttctttccatatagttcacttttctaagcccaaattgttttgttccttatatgcttttttgagagaaaacaaatgaactattaatttaacacccaacattatgacagaccgtacaacgtttttcgggtataatcaaattcggtaacatttagtgtagcttatcgcaataggaagtaacctgcgagactactgtttgcttgtcggttttggttttgtttcttgtgagatattccccattgcactctcagccactctgccacagtctgagcggttgccacccagacctgctgcactgccattttgggg

SEQ ID NO: 30873 - DNA, 991 bp, Homo sapiens
tgtgcagcctaccacactggagctcttattctcttcttcaaaatgttaatacttgggggcatctgcttctaatagagaccagtttcatcaaaattaaaaatctttctcaaggggtagacttcatcatcaatcttttcctaatacagagagaaatgaccttgtacgttcttcatcaacatctcctcagcttccccctacaccttcagttaatggaaattgtagtaattattaaaggcactaaaatgtcacaatttttcctgaaggaaggcacttcaataaaagttttcatctttttttttcttaagatctttgcatattgctaacgctttcctcttaaattttaagaaagtttacctttgataaattccaaataactactgaaaaaaactctcccatggaccaacagaatctctgcatatatgagtgaaaaacacatacaaagcaattcttattccagagacacatgttgcaggagaacagactggccatgatttgctttatggcctttgatattatctattgatatgctacagagggagatgaaataccatgtcccttcttatcctaaacatagacctccaccaactccatctctttcatcagctcaacatagttttagcagctgtttcacataaaacagtattcagcacttacagtctttagcttatgcaaacttcattacattttctttccatatagttcacttttctaagcccaaattgttttgttccttatatgcttttttgagagaaaacaaatgaactattaatttaacacccaacattatgacagaccgtacaacgtttttcgggtataatcaaattyggtaacatttagtgtagcttatcgcaataggaagtaacctgcgagactactgtttgcttgtcggttttggttttgtttcttgtgagatattccccattgcactctcagccactctgccacagtctgagcggttgccacccagacctgctgcactgccattttgggg

SEQ ID NO: 30874 - DNA, 1114 bp, Homo sapiens
ctctccttcttacccctcttggcccatctgtccccacctttttgtctttagttcctcttacattctcttcttttctcgtctactctctcccttccttagctttcctttaccaacagtaaatatatattttaaaaacattgtcattcatcattctcaaactactgaagcaattcttcagagtccctgtacgccagaaaactaaggattggattgggagcctgtatggtgtgtttgcatgtgcgtgtgtgtacgtgtatgcacatgtgtgcacacgtgtgtgtcagtgagtgtgcagtgagctggaaagcaggccagtaatttcattccccttgtccttgcagttgtgaaagtgtgacygagtgaggaataagtctgcaaatttccaacacaataaaaataaattaaaagaagagaaaaaaattgtgattttgatttcaaaaaagctgtctcctttccaagtatagtagttatatacttgattctatttgctctatcaacaactgtagtgatttggaaccatgatatacccagctacctaatttcaatggaaaggagggaattcatggagataattactgagaggctagtgatgccgcaaattaatacatataacttgtgcggcataacatgctagggagagagattagcagaatgattctcatttcaaagagaaactgaggaagggctagcacacagcctgcacaaccccagggaggggttagttccaagagctgaccttagttgtcacttttcccaaacctccacaactgcttaagccttatgcaagtttgtgcatcttagatcaggttacttaaatgcttacagtccaagtttccttagctctaagatggagataataatagcacctgttgtaataagattgtggtaaggattaaataaaatgcactttgcacgaggcctgacccttaagaagaagtcaataaatctgggctgcatttgtagcttgaattcctccgctcatctctcggttaacatctccttctccgtcttcccactcctctttgctgttttcttctctctgccccttgatttatcttgtgggctccttcgacgggcacaatccttggctgtcagggtcgggcaggctctgaga

SEQ ID NO: 30875 - DNA, 1114 bp, Homo sapiens
ctctccttcttacccctcttggcccatctgtccccacctttttgtctttagttcctcttacattctcttcttttctcgtctactctctcccttccttagctttcctttaccaacagtaaatatatattttaaaaacattgtcattcatcattctcaaactactgaagcaattcttcagagtccctgtacgccagaaaactaaggattggattgggagcctgtatggtgtgtttgcatgtgcgtgtgtgtacgtgtatgcacatgtgtgcacacgtgtgtgtcagtgagtgtgcagtgagctggaaagcaggccagtaatttcattccccttgtccttgcagttgtgaaagtgtgaccgagtgaggaataagtctgcaaatttccaacacaataaaaataaattaaaagaagagaaaaaaattgtgattttgatttcaaaaaagctgtctcctttccaagtatagtagttatatacttgattctatttgctctatcaacaactgtagtgatttggaaccatgatatacccagctacctaatttcaatggaaaggagggaattcatggagataattactgagaggctagtgatgccgcaaattaatacatataacttgtgcggcataacatgctagggagagagattagcagaatgattctcatttcaaagagaaactgaggaagggctagcacacagcctgcacaaccccagggaggggttagttccaagagctgaccttagttgtcacttttcccaaacctccacaactgcttaagccttatgcaagtttgtgcatcttagatcaggttacttaaatgcttacagtccaagtttccttagctctaagatggagataataatagcacmtgttgtaataagattgtggtaaggattaaataaaatgcactttgcacgaggcctgacccttaagaagaagtcaataaatctgggctgcatttgtagcttgaattcctccgctcatctctcggttaacatctccttctccgtcttcccactcctctttgctgttttcttctctctgccccttgatttatcttgtgggctccttcgacgggcacaatccttggctgtcagggtcgggcaggctctgaga

SEQ ID NO: 30876 - DNA, 1114 bp, Homo sapiens
ctctccttcttacccctcttggcccatctgtccccacctttttgtctttagttcctcttacattctcttcttttctcgtctactctctcccttccttagctttcctttaccaacagtaaatatatattttaaaaacattgtcattcatcattctcaaactactgaagcaattcttcagagtccctgtacgccagaaaactaaggattggattgggagcctgtatggtgtgtttgcatgtgcgtgtgtgtacgtgtatgcacatgtgtgcacacgtgtgtgtcagtgagtgtgcagtgagctggaaagcaggccagtaatttcattccccttgtccttgcagttgtgaaagtgtgaccgagtgaggaataagtctgcaaatttccaacacaataaaaataaattaaaagaagagaaaaaaattgtgattttgatttcaaaaaagctgtctcctttccaagtatagtagttatatacttgattctatttgctctatcaacaactgtagtgatttggaaccatgatatacccagctacctaatttcaatggaaaggagggaattcatggagataattactgagaggctagtgatgccgcaaattaatacatataacttgtgcggcataacatgctagggagagagattagcagaatgattctcatttcaaagagaaactgaggaagggctagcacacagcctgcacaaccccagggaggggttagttccaagagctgaccttagttgtcacttttcccaaacctccacaactgcttaagccttatgcaagtttgtgcatcttagatcaggttacttaaatgcttacagtccaagtttccttagctctaagatggagataataatagcacckgttgtaataagattgtggtaaggattaaataaaatgcactttgcacgaggcctgacccttaagaagaagtcaataaatctgggctgcatttgtagcttgaattcctccgctcatctctcggttaacatctccttctccgtcttcccactcctctttgctgttttcttctctctgccccttgatttatcttgtgggctccttcgacgggcacaatccttggctgtcagggtcgggcaggctctgaga

SEQ ID NO: 30877 - DNA, 1114 bp, Homo sapiens
ctctccttcttacccctcttggcccatctgtccccacctttttgtctttagttcctcttacattctcttcttttctcgtctactctctcccttccttagctttcctttaccaacagtaaatatatattttaaaaacattgtcattcatcattctcaaactactgaagcaattcttcagagtccctgtacgccagaaaactaaggattggattgggagcctgtatggtgtgtttgcatgtgcgtgtgtgtacgtgtatgcacatgtgtgcacacgtgtgtgtcagtgagtgtgcagtgagctggaaagcaggccagtaatttcattccccttgtccttgcagttgtgaaagtgtgaccgagtgaggaataagtctgcaaatttccaacacaataaaaataaattaaaagaagagaaaaaaattgtgattttgatttcaaaaaagctgtctcctttccaagtatagtagttatatacttgattctatttgctctatcaacaactgtagtgatttggaaccatgatatacccagctacctaatttcaatggaaaggagggaattcatggagataattactgagaggctagtgatgccgcaaattaatacatataacttgtgcggcataacatgctagggagagagattagcagaatgattctcatttcaaagagaaactgaggaagggctagcacacagcctgcacaaccccagggaggggttagttccaagagctgaccttagttgtcacttttcccaaacctccacaactgcttaagccttatgcaagtttgtgcatcttagatcaggttacttaaatgcttacagtccaagtttccttagctctaagatggagataataatagcacctrttgtaataagattgtggtaaggattaaataaaatgcactttgcacgaggcctgacccttaagaagaagtcaataaatctgggctgcatttgtagcttgaattcctccgctcatctctcggttaacatctccttctccgtcttcccactcctctttgctgttttcttctctctgccccttgatttatcttgtgggctccttcgacgggcacaatccttggctgtcagggtcgggcaggctctgaga

SEQ ID NO: 30878 - DNA, 604 bp, Homo sapiens
attcttgaatactcctccctgccagaggtaaagagcttaactcttatcctcttaagtgtggactagatttcgcgacttgcttctaatggatagaatatggtagcagtgacagtgtgtgacttctgagaatagctgtaaaaggcatcgtagcttcctcattgctgtttttcttggatcacttgctctggggaagcccagcagccatgccgtgaggacactcaagcagcctttgaaggagctgctggtgaggaactgagtcttcctgctgacattgacatgagcgaagcatcttggaagtggatcctttcatttttcaggtaccgtgccagggcctgtgagggaaccaagacgtgtaagacatggcctctcattagtgtttaagcagtagagaaagctggtgccatctcattgttcaggagatgaagtgtgtggccggggtgatccagagagtctccttgaaagtacagtgttgaaccttggactttgggrtagaattcagacagggtgatggacagctaaagtggttcagaggctggggtacagcatgaggttattaaaatgatggggctgagaagtacaagacctgtaagtgaagaactgggca

SEQ ID NO: 30879 - DNA, 535 bp, Homo sapiens
accaccaccagaggaggtccaaatggaattcacacaactgctcaatatcaatttatgtgaaatctgtggtttctgccccctttaaagtgctgattaaaagcaggtggctacgacacaggcaaatgcactgtcattcccgtcccgtggcctggagaggtaccaacctcctctaagacttcaatctctttagagaggcctgggccacargtgattcttattattgcatggcagaagggagcaacctgctgagctacaccagaccctggctggtatccacccaccctgttatcagtcacagaagcaaatttgcatttcctcactggaaagaagttgagagcccaggctctggacgaaggactgagcatgcatccgagctccacccacacccaatttacaaacttgagcaccttaatccatctctctaagcctcagtttccccctctgtaaaatgaggcaataatggcacctgcatggacttcctgtggttattgtaaaaaaaaaaaaaaaaaactgccataaacttggtagcttaaaa

SEQ ID NO: 30880 - DNA, 578 bp, Homo sapiens
  misc_feature (1)...(578): n = A,T,C or G
taaagagttttttttgagtgatcatgatttatgaatcaggaagcatcaaaccaaagaaaggttcaggctctactgcaggacccaggggcaggctttgcaggtggatgtagacgtcattggagaaaagctttgactggcttcagtttcgcattatttggtctgtcctgctggaaggttcctagttaaacaggttagttggcagtttcggaatggtcgggcttatatttcatttttctttaatccaggcatttgcaaaaaaaaaaaaaaaaatctccagttaagtttctcttctgtttgcaaatcaagcaagatttagatcatgtgtgaggcctactggctttgctcrgggattccccaagcactgtaattcaccctccactgcaatttgctttaaggatgcccacgatgttgcacatggctgaattcatcatcccccctgacgtggaggaggnacgtggggcagggtgggggtgggtggggggtggcccccgggtcgacctccgtagggagagccatcagaatgcacctgaggtctgggtcatggctgacagacagaaggcagcaggcagaaaaggaaa

SEQ ID NO: 30881 - DNA, 589 bp, Homo sapiens
gccctgggaatgtcagctccatggggacagagaacttaccwgtcctgctcatctctgtctcccgatgtctacagttaataaacaaacacttctaaaaggacgaatgaataattaagtcaagcccttacttgaggtgcttgaaacatgccaaagtgcattcaacatcggaactaacttcccattactccccccagggtgcttcctggcactgggctacaattcctgatggctgattctgggtgaagatgctgtctctggaaggcccctgatcaaggcaagccactacccagaggtgggaacaggtgaccccagtgcccccaccctattccatgagcatagggctcagcctcctcagctggggaggctgccgggggaggaaaattctgccttaacggggagctctcagctcttgtgcaagtcgcttctcttctctgggctgcacctgagccccctaaatagagtctgagatctgcactgcacaggatggttgctagggtttgatcaaacaatgggtggggaagagttttgctgaaatcataattccatatttggataacctgacagcccattaatttaacgagcctttcct

SEQ ID NO: 30882 - DNA, 589 bp, Homo sapiens
gccctgggaatgtcagctccatggggacagagaacttaccagtcctgctcatctctgtctcccgatgtctacagttaataaacaaacacttctaaaaggacgaatgaataattaagtcaagcccttacttgaggtgcttgaaacatgycaaagtgcattcaacatcggaactaacttcccattactccccccagggtgcttcctggcactgggctacaattcctgatggctgattctgggtgaagatgctgtctctggaaggcccctgatcaaggcaagccactacccagaggtgggaacaggtgaccccagtgcccccaccctattccatgagcatagggctcagcctcctcagctggggaggctgccgggggaggaaaattctgccttaacggggagctctcagctcttgtgcaagtcgcttctcttctctgggctgcacctgagccccctaaatagagtctgagatctgcactgcacaggatggttgctagggtttgatcaaacaatgggtggggaagagttttgctgaaatcataattccatatttggataacctgacagcccattaatttaacgagcctttcct

SEQ ID NO: 30883 - DNA, 1099 bp, Homo sapiens
tatggggccagagcccccgacgccaaactcttccaccacagtttgacaaaacgatcagaaaagaggttcaaagagatggtgcttgacccctagaaaagcaggcagcatgccagagcactgcaattcagagagaaagctctgagctgacttggcctacccgcgtggatgtcaatcagcccagtttcctgcagggagagggtccaggtgaaatatcctcaaagcctgagatggacacagcagtcaaccggcattacatcatttagtacctacaaccacccattgagatcagaatgataaacctcactgaacagattaggaaactgaggcccagggaggccaagcaatttgtctgaggtcacgcagctaactcctggaggaaytgggcaggaactcaagtccaggggcccatcaacaagataaaatatttgagaatggctggagatctctctctcactgtctgtcttttgggatggaccaggggcagcttcagagcaggaccgatgactccagttgggcaaagcaaacctgagcattccttgcgaagctgtggttaggcctggggcccccacaggaggcctttcccaaccaggtcagctgatggatgacccggggccaaacctgactcccgccgcttcatcaaagcggagctaaaaacagctttgctttggcagtggaaaattgaaactccgagcttcctcttaaggctcttaaacaggtcagcccaccaaaagcccagtccttcaatctgggttctcttaaaaagtagggcaggccaattatgtttgactgtcctgcgctacgtggtgctgaaggcggggaaggtcaggccagggtgcccagggctgccagcagatgagagacagaggagccagccagcttctcctatcagcccctttgtcaaaacaaaattaaaatgcctggactcctgctggcaccaagatccgatccaaggtaataggtatttatcttagcgtgttctgctctgggctcagtgccatggggagatggaaactagaagatatcttgcttccggttctgtctctcacactgagcacagtacccagctctgagaaggcaatagctatctggtcattcatgc

SEQ ID NO: 30884 - DNA, 616 bp, Homo sapiens
tgggttaaagggattctcatgaaatgtcttttaaataaaagtggtgatttttatgtattttttttggmtgtagatgtggtaactgtatctttctccttgcaggtatgagtccccgctgctgcaagtgtctgagcctgtgaatccagagctcagtgcagggcccatcactggactgctggacaggctcagtggattcagaggtgagcgtcagcccattggcagaattcccacagtgtattacttcttgttagaatcatgggggtaatattttacccttcatcaaatctttatttcatttcagcaggaagtgaaccatatgactatgcaacccttttatatctgtgtttctatttatagaccaatttataacatgaagagtaaaacatagtgaaaaacaaatatgttctgggatcacatgtatagagttatatattgggtaaatggaatgacataagaaataaaaaattgaataaatggaacaatgctcagaaggaagcgtaataatccaaggttacataaaaattttggcacatgttctcaggatctcctgagggctgtgtcacagaccatggtcactcatatttggctcagaataaatttctttaaatattttaca

SEQ ID NO: 30885 - DNA, 626 bp, Homo sapiens
ttggttctaataatttggatgtgaaaagtgatagaaacataatagagagttttaagggacccttcagataatatcatcaatattctgagaaactggctttyagataacctgactttgaaaagtgttcttggtgctggccaccagctccacagctccattctacacgtttgaacaatgtttctaaggaaacctcctttagcgaagtctcaacacagctatgattagagtgccaaattagccagcaacattgaaaggacacatttatgtgttatgattgacatggaataatcaccacctccaccatctgcattctcatcaccatcattatcacaggccctcatcattcttatttgggattctgtataattcaaactgccttagaggcatcacgtaccctgcattcctcagcagcccatcctattgggctgtggctgtgagccatgtgctctggtgactcagagcagggcccacagagcaatctcttgtcagcctcacagaagagctccttagtctcctcatggagcacacagatattgtctgagctgttgatgttctgaggtctggtctgtctggctagggaagacagctttttgagtaccacattggtgttgaagttgggcttctct

SEQ ID NO: 30886 - DNA, 626 bp, Homo sapiens
ttggttctaataatttggatgtgaaaagtgatagaaacataatagagagttttaagggacccttcagataatatcatcaatattctgagaaactggctttcagataacctgactttgaaaagtgttcttggtgctggccaccagctccacagctccattctacacgtttgaacaatgtttctaaggaracctcctttagcgaagtctcaacacagctatgattagagtgccaaattagccagcaacattgaaaggacacatttatgtgttatgattgacatggaataatcaccacctccaccatctgcattctcatcaccatcattatcacaggccctcatcattcttatttgggattctgtataattcaaactgccttagaggcatcacgtaccctgcattcctcagcagcccatcctattgggctgtggctgtgagccatgtgctctggtgactcagagcagggcccacagagcaatctcttgtcagcctcacagaagagctccttagtctcctcatggagcacacagatattgtctgagctgttgatgttctgaggtctggtctgtctggctagggaagacagctttttgagtaccacattggtgttgaagttgggcttctct

SEQ ID NO: 30887 - DNA, 626 bp, Homo sapiens
ttggttctaataatttggatgtgaaaagtgatagaaacataatagagagttttaagggacccttcagataatatcatcaatattctgagaaactggctttcagataacctgactttgaaaagtgttcttggtgctggccaccagctccacagctccattctacacgtttgaacaatgtttctaaggaaacctcctttagygaagtctcaacacagctatgattagagtgccaaattagccagcaacattgaaaggacacatttatgtgttatgattgacatggaataatcaccacctccaccatctgcattctcatcaccatcattatcacaggccctcatcattcttatttgggattctgtataattcaaactgccttagaggcatcacgtaccctgcattcctcagcagcccatcctattgggctgtggctgtgagccatgtgctctggtgactcagagcagggcccacagagcaatctcttgtcagcctcacagaagagctccttagtctcctcatggagcacacagatattgtctgagctgttgatgttctgaggtctggtctgtctggctagggaagacagctttttgagtaccacattggtgttgaagttgggcttctct

SEQ ID NO: 30888 - DNA, 626 bp, Homo sapiens
ttggttctaataatttggatgtgaaaagtgatagaaacataatagagagttttaagggacccttcagataatatcatcaatattctgagaaactggctttcagataacctgactttgaaaagtgttcttggtgctggccaccagctccacagctccattctacacgtttgaacaatgtttctaaggaaacctcctttagcgaagtctcaacacagctatgattagagtgccaaattagccagcaacattgaaaggacacattyatgtgttatgattgacatggaataatcaccacctccaccatctgcattctcatcaccatcattatcacaggccctcatcattcttatttgggattctgtataattcaaactgccttagaggcatcacgtaccctgcattcctcagcagcccatcctattgggctgtggctgtgagccatgtgctctggtgactcagagcagggcccacagagcaatctcttgtcagcctcacagaagagctccttagtctcctcatggagcacacagatattgtctgagctgttgatgttctgaggtctggtctgtctggctagggaagacagctttttgagtaccacattggtgttgaagttgggcttctct

SEQ ID NO: 30889 - DNA, 537 bp, Homo sapiens
ttttttatttatccacccttttcaataattttaaaactgaaactttacatatatatgtacataactatctataacaatgttacgtattcatatttttagaattatataataattatgtacacaataataataattattgttactttttttttgacatgcagtctccctctgtcacccaggctggagtgcaatggcacgatctcggctcactgcaacctctgcctcccaggttcaagtgattctcctgcctcagcctcccgagtagctgggattacaggtgtctgccaccgtgaccggctgattttggtatttttagtagagataatgtttcaccaagttggccaggctggtctcgaactcctgacctcaggtgatccgcccatcttggcctcccraagtgctgggattacaggcatgagccatggcacctggctgctatttatacaataattatgtgcataattatctttaatggtgcctgaaagttatttttaacatggttgccatactaaccgattttgttgtcgtttaccatga

SEQ ID NO: 30890 - DNA, 594 bp, Homo sapiens
aaaagaggcttaatattcattgcagagggtgagtagaaaaaaaaatctgtgctgttatttttgaggggttgaaatgcttgttctcaccacygaaggtgttcatctttacaaaaaatggttgctagggagctagccaatttgagggaatatttttgaatgtttataaaactaaagagcagcatcattggcaatacatttattggcagaactgaaccaattagtcagtgctgctaaagtgactgcatacagctgatttcacagagagggcaaatatataatgatgcatgctactggagtacttttttttaaaactacagatttaagtctcagataaaggcaataacactccttctacttcaggaaattttgagtgttcaaatatgtggttataaaaacacataagagagcatttttaggccattctgacacattccacactcattcttaaataaaataaatcacatgatcagctctccttgaggctggagattggtttttgtaataaggaaaggcctagcaatgtctcctcatttcattcattccaactatgcaattcaactacaattctcgttttaatttcctttcatgtatttc

SEQ ID NO: 30891 - DNA, 594 bp, Homo sapiens
aaaagaggcttaatattcattgcagagggtgagtagaaaaaaaaatctgtgctgttatttttgaggggttgaaatgcttgttctcaccaccgaaggtgttcatctttacaaaaaatggttgctagggagctagccaatttgagggaatatttttgaatgtttataaaactaaagagcrgcatcattggcaatacatttattggcagaactgaaccaattagtcagtgctgctaaagtgactgcatacagctgatttcacagagagggcaaatatataatgatgcatgctactggagtacttttttttaaaactacagatttaagtctcagataaaggcaataacactccttctacttcaggaaattttgagtgttcaaatatgtggttataaaaacacataagagagcatttttaggccattctgacacattccacactcattcttaaataaaataaatcacatgatcagctctccttgaggctggagattggtttttgtaataaggaaaggcctagcaatgtctcctcatttcattcattccaactatgcaattcaactacaattctcgttttaatttcctttcatgtatttc

SEQ ID NO: 30892 - DNA, 594 bp, Homo sapiens
aaaagaggcttaatattcattgcagagggtgagtagaaaaaaaaatctgtgctgttatttttgaggggttgaaatgcttgttctcaccaccgaaggtgttcatctttacaaaaaatggttgctagggagctagccaatttgagggaatatttttgaatgtttataaaactaaagagcagcatcattggcaatacatttattggcagaactgaaccaattagtcagtgctgctaaagtgactgcatacagctgatttcacagaragggcaaatatataatgatgcatgctactggagtacttttttttaaaactacagatttaagtctcagataaaggcaataacactccttctacttcaggaaattttgagtgttcaaatatgtggttataaaaacacataagagagcatttttaggccattctgacacattccacactcattcttaaataaaataaatcacatgatcagctctccttgaggctggagattggtttttgtaataaggaaaggcctagcaatgtctcctcatttcattcattccaactatgcaattcaactacaattctcgttttaatttcctttcatgtatttc

SEQ ID NO: 30893 - DNA, 629 bp, Homo sapiens
aaaaatctaaatccttaatcgcacaattttaggtgtcattattatcaccattttactgatgaatcctctccgagggaggtggtaagccttggaaaactgtagaggtgacaaggccaccatttctccgagccccacaagaggaaggtcaggcggaggtcagtgaccctagaggaaggaaagtgggtcagaggaggaaggctgctgtctctccagtttctccactcctggctcagcctttgaggtgctagttgtgaggctcctcaagtcccatctggtctmcaaaagtatttgtcaagctcagggtaggcccagccatctttttaaattttttttctttttttttttttttttgaggagttttgctctcgtcacccaggctggagtgcagtggcgcaatctcggctcactgcaaccttcgcctcccgggttcaggtgattctcctgcctcagcctcccaagtagctgggattacaggcatgagccaccatgcctggctaattttagtatttttggtagagatggggtttcaccacgttggccaggctggtctggaactcctgacctcaagcaatccacccacctcggcctcccaaagtgctgggattacaggtgtgagccaccgtgcctgg

SEQ ID NO: 30894 - DNA, 600 bp, Homo sapiens
cgcaaccgtgaagtcctccacagggcccaggcatcttcctgtatgcagcccgtatcttagagcgccaccatagctgttcatctctatgtcagggagggctgcamaattctcagaacaaaatgaattgaaacccactctgactttaaacaccatttcaccctttatatgtcttttgggagggagagtatgactgggagtaatgcttcctgggttagggcgtttctgctctggaaaagtccaaggtttccgttggccagggatgaaatacgtgtgtgatcttttcccagaattaagaaaaaaaatggcaagctaatcgtaatcataagaggaacctatttctagtgagataattagtgtccttacaaataaagctggcagagctagaagcacatctttaagctgtttgccatctggaatggcactagtcacgactcctgaatagagatttatactccaaaatattttccacagggtcataaagctcatgagaactgtgtcccataaacaaggtgatgtttcagcctgaattacccagtgcagactccagagcttctgttcttgaggcattactcccctccccatgcctcccaccctgggaca

SEQ ID NO: 30895 - DNA, 600 bp, Homo sapiens
cgcaaccgtgaagtcctccacagggcccaggcatcttcctgtatgcagcccgtatcttagagcgccaccatagctgttcatctctatgtcagggagggctgcacaattctcagaacaaaatgaattgaaacccactctgactttraacaccatttcaccctttatatgtcttttgggagggagagtatgactgggagtaatgcttcctgggttagggcgtttctgctctggaaaagtccaaggtttccgttggccagggatgaaatacgtgtgtgatcttttcccagaattaagaaaaaaaatggcaagctaatcgtaatcataagaggaacctatttctagtgagataattagtgtccttacaaataaagctggcagagctagaagcacatctttaagctgtttgccatctggaatggcactagtcacgactcctgaatagagatttatactccaaaatattttccacagggtcataaagctcatgagaactgtgtcccataaacaaggtgatgtttcagcctgaattacccagtgcagactccagagcttctgttcttgaggcattactcccctccccatgcctcccaccctgggaca

SEQ ID NO: 30896 - DNA, 600 bp, Homo sapiens
cgcaaccgtgaagtcctccacagggcccaggcatcttcctgtatgcagcccgtatcttagagcgccaccatagctgttcatctctatgtcagggagggctgcacaattctcagaacaaaatgaattgaaacccactctgactttaaacaccatttcaccctttatatgtcttttgggagggagagtatgactgggagtaatgcttcctgggttagggcgtttctgctctggaaaagtccaaggtttccgttggccagggatgaaatacgtgtgtgatcttttcccagaattaagaaaaaaaatggcaagctaatcrtaatcataagaggaacctatttctagtgagataattagtgtccttacaaataaagctggcagagctagaagcacatctttaagctgtttgccatctggaatggcactagtcacgactcctgaatagagatttatactccaaaatattttccacagggtcataaagctcatgagaactgtgtcccataaacaaggtgatgtttcagcctgaattacccagtgcagactccagagcttctgttcttgaggcattactcccctccccatgcctcccaccctgggaca

SEQ ID NO: 30897 - DNA, 600 bp, Homo sapiens
cgcaaccgtgaagtcctccacagggcccaggcatcttcctgtatgcagcccgtatcttagagcgccaccatagctgttcatctctatgtcagggagggctgcacaattctcagaacaaaatgaattgaaacccactctgactttaaacaccatttcaccctttatatgtcttttgggagggagagtatgactgggagtaatgcttcctgggttagggcgtttctgctctggaaaagtccaaggtttccgttggccagggatgaaatacgtgtgtgatcttttcccagaattaagaaaaaaaatggcaagctaatcgtaatcataagaggaacctatttctagtgagataattagtgtccttacaaataaagctggcagagctagaagcacatctttaagctgtttgccatctggaatggcactagtcaygactcctgaatagagatttatactccaaaatattttccacagggtcataaagctcatgagaactgtgtcccataaacaaggtgatgtttcagcctgaattacccagtgcagactccagagcttctgttcttgaggcattactcccctccccatgcctcccaccctgggaca

SEQ ID NO: 30898 - DNA, 649 bp, Homo sapiens
gaaggttgcacgcagcctcgcctcacttctgtgaccgtactcctggtactcactgtaattatggaattgtgaagtgtcacccactcaggaagccagaagcctttttctcrttgagtgtacgccacaggggactgatgctgtggccctagatgagagggacacagcaggctcttgttgggaggggacccgcttctctgcctctattctctacttttgttgtttaaaggtaaaagtccgaaaatgttgccatagtgacagcaccaaatgttgatcaagtccattagatttgcccagaggtgcgcttagctcacccacagtactttcagaacagttctttgttccctctctccttcgtgcaagaaacgtggcacccccgccggaacctggtgccccgcaggctgcggtgtggccatccgcaaatggcgactcacttcacgtcggtcctggctcctcacgctgcctgctcaaacctttttatcaagcgcaggccagcgaggccccacctcttccccacgtccactgtccacatcatgccctcagcctctcctgaccacctctacgcagtgtttttccaggccgccgttgacggtgcaggggtgatggcaagagaccactcaaattcagaagctgagtcatatcctctgcttat

SEQ ID NO: 30899 - DNA, 462 bp, Homo sapiens
atcacagtagcagaaaatttcagtggtagaaaaattttcccccaagaaaaattactggacttaagctgcacgtccataggcaccaaaaaataaataagcacaagaaaaactgagatgcagtgaaaaagtagaggttgagagaactgggggatattttgtaatttgtcatggtttggcaacattcgaatcttttatatttttaaatatcacatgtattcatcttccatattcatctctctgtctatatatatcatatatatgtgatatatatgatatatatgtgtgcgtatatatgttcgctcctgtatctatatctatatattccttgtttgcttgtgtgagccgtgtatggtttggagtgtgtgtaatgagatggatggagatatatatatatatatakagagagagagagagagagagagaacatatatacacccacatatatcacatgtatctcacaca

SEQ ID NO: 30900 - DNA, 462 bp, Homo sapiens
atcacagtagcagaaaatttcagtggtagaaaaattttcccccaagaaaaattactggacttaagctgcacgtccataggcaccaaaaaataaataagcacaagaaaaactgagatgcagtgaaaaagtagaggttgagagaactgggggatattttgtaatttgtcatggtttggcaacattcgaatcttttatatttttaaatatcacatgtattcatcttccatattcatctctctgtctatatatatcatatatatgtgatatatatgatatatatgtgtgcgtatatatgttcgctcctgtatctatatctatatattccttgtttgcttgtgtgagccgtgtatggtttggagtgtgtgtaatgagatggatggagatatatatatatatatagakagagagagagagagagagagaacatatatacacccacatatatcacatgtatctcacaca

SEQ ID NO: 30901 - DNA, 649 bp, Homo sapiens
ggtctgttactatttagcccatgcccggcctcttccattcctttctgtgttcttcacataatgctttctctaccttatctaggtatgacagcccctatattgaattgtgcatatccccctcatttgtttctttttcttattgtccatagttggattgaatattcttaaacaatacagcaaacacacaatgcaagaatcaagctattatttctccttcttcccaactgaagggtggcatttcaggtrtcttccatttggaccagtattgattgcatctagaagagaatgggaattccgtctcttctgttgaaaaagcataaacatccttcttccccctgttttggttctccctgaaattgcagactgttgagaagcctgagggaactgatgtcctttaaaatggtagctgccaatgagatttcttcatcaagggatagggtgggtttgtttccttctttagcagaagcaaaacaccaatcaattcccacttgtttcgtccaggtaagagccatgttttttttttctttcttttttttcagacaaagtctccttgcccaggctggagtgcagtgacacaatctcagctcaccacaacctctgcctctgggtttaagcgattctcttgcgtcagactcctgagtatctggga

SEQ ID NO: 30902 - DNA, 1934 bp, Homo sapiens
tggaaaacttgagagagaggggtagaaagagtaaagatgttggtcaagagaataagagaaagaagacgaagaaaaactatgttatctctgccaaatgatgctgcttttccaagaagggcagcggttttgccagcactacttgtgatcatgtctgtgagaaatcttgttccttctcctttaagttttgcagtcagagtttctcagcctcagcactgttgacatgttgggcaagattattgtttattgctggggtgggggagtgtcctgtgcagggctagatgccagcagcattttccctgcccacacagttatgacaaccaaaaatgtctccagccattgccaaatgtcccttgggtgcattgagaacctctggtttaaatcctgcccactctgtataaagtacttcctgcatcaaaatattgtcttaaactttttactaggaaataattttaggctttcagaaaagttgcaaaaatagtacaaagagtcttacatacttttcacctagattcctccaaattaacatttaccaggtttgtttatcagtatttttcttaatagctttgtctgaatgtttctctctctctccccctctgtctgcatatctatatctatatctatatctatatctatatctatatctatctgtgtgtgtgtctctaggtgcaatttttctgaattaattattagtaagttacacacattatacctctatcatgtgtattccttaaaataaggcaattctctgatataatcacattggtcaaagtaaaatggcattgctatggtactattatgtatctgcctcctttattcgaatgtttccagttattccattactgttatttaaagccaaagaaaactgattttttctgttggtccagcatctcatgctgtgcttccttgtaatgtctctttgtgtttttttatcagaaacaatttctcagcctttttttgtcttcataactctgacgtgtttgaagagtacaggccaggttttttagaagaatgtccctcaatttgatccgtgttgatttggaggtaatagctgcattcatttcgaattgatctagcccttccggacattgagttctgaattgggatgattgtgtgtttggtgcagtcttaatatcactgttgtccacagttatccctgcaggatcctctcttacttttttttttttttttttctgagatggagttttgctcttgttgcccaggctggagggcaatggcgtgctctcggctcaccgcgacctctgcctcccgggttcaaatgattctcctgccccagcctcctgagtagctgggattacaggcatgtgccaccacgcccagctaattttgtatttttagtggagatggggtttctccatgttggtcaggctggtctcaaactccctacctcaggtaatccgcctgcctcggcctcccaaagtgctaggattacagrcgtgagacaccacgcccagccctctcttacttttaatgtccccattattgtggctgaagggctcagaagccctctgcctctgagtaggacaccctcctctccttccctcccctgcagctgggtctagggctgtcctgttctggcgtgagtggtttcttctggccctgcctctttatctagtagagttctgccactgagttttccctgggacagccacatgggcacagctgtctcccaggcagcactaggggaggagatcaggctcccagctcccccagcatgacacagagctggtgggaatttcaacaggactttctgaacggtgagggacaacaggggccccatgtcactgtggaggctggcactcttatatattcatgggtcaaacccactgtagtctctgaagtctggcacatgctgttgtacctgagtgtcacagtcacaggctaaataagcccttttcttttacaaccttcccttc

SEQ ID NO: 30903 - DNA, 639 bp, Homo sapiens
tatgttaacatatcaacagtgattatcttaaggggaggtttatgtttattatatgccaggctaaaaatcaggaataggatgtaataatcaagccaggtggctatgagggcatcttaaacagtccacttttgaaaatcttgtgaacaaaaacgaagttctggcaactgaactgtgtggaaattttattttttaaatttgtttttgttgactaatctcaccagtagtcttatcttccttctgttatggctccttaaatacccttttttatatgcataaaacattaaactacacaattgcctttgctattaaaaataaaacattcctctttgttcttgcttttaaacgatattccagtctgattttattttattgaagttgtaacatcagygggagatggactgccatgtccccacctgtttagagtttctgatattggacacatcaacaaaaccatttgtaaacacaacttggaatctggcatcatgtaaagaagacagtaattcagtaaatgtcttcttttttctttaccctctcctcaattgctattaatttgtgttaaacctgaaactcatttggtttagcaacctaagatgagaactaaaatatcaagaaaatttaattcatttaatatttataatt

SEQ ID NO: 30904 - DNA, 605 bp, Homo sapiens
tgtgtaagtttctctcatttctgcaatcagataatgcttatcgaatgttttcccactacaaactggtcactcaaatatgacggtagtaaattcttaagtgttagcaatatcttttccttcaagcattggaggataataactgtatataatgaatttattaaatgttctgacttgataatcccatattacagcacaaatctaagtactctaaatctgggtaatcaggtccagatctcaaagagtgcttcccaatgctcaaggttttaaagagacatagctgttctgttctacaattagttgttaaataaatctaagaaagaaaaaaatcaataactctattcaaaagcttagataaaacaacaggtagaatggttaacaatgaggacaaaraaataaaagcttttaaaagttaatactttaaaaaaataattacaactacctaacatttttaagaaatacattcttattcacaaatgtacacgtaaattagaaacaactggaggtaaaaacacctaaaggatactatactgatttaggtttatacacaggatttcagaaggatttagagacaatctaatatgactctcatttttatagatgagaaa

SEQ ID NO: 30905 - DNA, 973 bp, Homo sapiens
ggtgaaagggggatttttctattttcctagaaagcattctgggtactctatattcaaggacaagagaactacaggctgccagggmagccacattccaccagtggggcttgataatagaagcttgttaaacagaacctgcataacaggatcatcccaatatttcaagaccccagtacataagcaggcaactggatggagaaagctagtctttgaaatttagagttccggaaaagagaaatctctcctctcctgaccttcccatgagatgataaacccacaataaagccaagagaggctctgagaataatcacttgagttttaggggaactgaaagacaggaatactgaaatattcaatcattctgtgcttgaatctttgccaaaccaccaggcatgttacaagcgtgggactgttatatggtatgggtctcttccctaaattcctgctccctgagatcctaaaagttacagaagccaaatcacttcctagcaacagacgccagatatgatagccatgaagagtagatgagatgaggagctcacagtggtacaaagaagagtgcatgtcagagggatgtggtgtgatgctgctgcccatgaacacccacatgatgccacagaccctcagggaaccactagtgcccagggaagccggccccacctgtccacatcaagacaagagcttgaacactggctggtcatgaccacaaaggagagtacagaagccacatcatgctgtctctccagccagcccaacctcagagtaaaagcagacggaaggtggtgggtaaggggagtatgaacaagggtagtaatgaaaatctagtctgaaatggggaagggagggtggctttgagctaaatatgaaatttcagtttttaaataaatagaataagccttaaaaaaactgaatgaaacttttttggtagccatgccccaaaagttatggaatcagattttgatgttcttaagga

SEQ ID NO: 30906 - DNA, 973 bp, Homo sapiens
ggtgaaagggggatttttctattttcctagaaagcattctgggtactctatattcaaggacaagagaactacaggctgccagggaagccacattccaccagtggggcttgataatagaagcttgttaaacagaacctgcataacaggatcatcccaatatttcaagaccccagtacataagcaggcaactrgatggagaaagctagtctttgaaatttagagttccggaaaagagaaatctctcctctcctgaccttcccatgagatgataaacccacaataaagccaagagaggctctgagaataatcacttgagttttaggggaactgaaagacaggaatactgaaatattcaatcattctgtgcttgaatctttgccaaaccaccaggcatgttacaagcgtgggactgttatatggtatgggtctcttccctaaattcctgctccctgagatcctaaaagttacagaagccaaatcacttcctagcaacagacgccagatatgatagccatgaagagtagatgagatgaggagctcacagtggtacaaagaagagtgcatgtcagagggatgtggtgtgatgctgctgcccatgaacacccacatgatgccacagaccctcagggaaccactagtgcccagggaagccggccccacctgtccacatcaagacaagagcttgaacactggctggtcatgaccacaaaggagagtacagaagccacatcatgctgtctctccagccagcccaacctcagagtaaaagcagacggaaggtggtgggtaaggggagtatgaacaagggtagtaatgaaaatctagtctgaaatggggaagggagggtggctttgagctaaatatgaaatttcagtttttaaataaatagaataagccttaaaaaaactgaatgaaacttttttggtagccatgccccaaaagttatggaatcagattttgatgttcttaagga

SEQ ID NO: 30907 - DNA, 973 bp, Homo sapiens
ggtgaaagggggatttttctattttcctagaaagcattctgggtactctatattcaaggacaagagaactacaggctgccagggaagccacattccaccagtggggcttgataatagaagcttgttaaacagaacctgcataacaggatcatcccaatatttcaagaccccagtacataagcaggcaactggatggagaaagctagtctttgaaatttagagttccggaaaagagaaatctctcctctcctgaccttccmatgagatgataaacccacaataaagccaagagaggctctgagaataatcacttgagttttaggggaactgaaagacaggaatactgaaatattcaatcattctgtgcttgaatctttgccaaaccaccaggcatgttacaagcgtgggactgttatatggtatgggtctcttccctaaattcctgctccctgagatcctaaaagttacagaagccaaatcacttcctagcaacagacgccagatatgatagccatgaagagtagatgagatgaggagctcacagtggtacaaagaagagtgcatgtcagagggatgtggtgtgatgctgctgcccatgaacacccacatgatgccacagaccctcagggaaccactagtgcccagggaagccggccccacctgtccacatcaagacaagagcttgaacactggctggtcatgaccacaaaggagagtacagaagccacatcatgctgtctctccagccagcccaacctcagagtaaaagcagacggaaggtggtgggtaaggggagtatgaacaagggtagtaatgaaaatctagtctgaaatggggaagggagggtggctttgagctaaatatgaaatttcagtttttaaataaatagaataagccttaaaaaaactgaatgaaacttttttggtagccatgccccaaaagttatggaatcagattttgatgttcttaagga

SEQ ID NO: 30908 - DNA, 973 bp, Homo sapiens
ggtgaaagggggatttttctattttcctagaaagcattctgggtactctatattcaaggacaagagaactacaggctgccagggaagccacattccaccagtggggcttgataatagaagcttgttaaacagaacctgcataacaggatcatcccaatatttcaagaccccagtacataagcaggcaactggatggagaaagctagtctttgaaatttagagttccggaaaagagaaatctctcctctcctgaccttcccatgagatgataaacccacaataaagccaagagaggctctgagaataatcacttgagttttaggggaactgaaagacaggaatactgaaatattcaatcattctgtgcttgaatctttgccaaaccaccaggcatgttacaagcgtgggactgttatatggtatgggtctcttccctaaattcctgctccctgagatcctaaaagttacagaagccaaatcacttcctagcaacagacgccagatatgatagccatgaagagtagatgagatgrggagctcacagtggtacaaagaagagtgcatgtcagagggatgtggtgtgatgctgctgcccatgaacacccacatgatgccacagaccctcagggaaccactagtgcccagggaagccggccccacctgtccacatcaagacaagagcttgaacactggctggtcatgaccacaaaggagagtacagaagccacatcatgctgtctctccagccagcccaacctcagagtaaaagcagacggaaggtggtgggtaaggggagtatgaacaagggtagtaatgaaaatctagtctgaaatggggaagggagggtggctttgagctaaatatgaaatttcagtttttaaataaatagaataagccttaaaaaaactgaatgaaacttttttggtagccatgccccaaaagttatggaatcagattttgatgttcttaagga

SEQ ID NO: 30909 - DNA, 973 bp, Homo sapiens
ggtgaaagggggatttttctattttcctagaaagcattctgggtactctatattcaaggacaagagaactacaggctgccagggaagccacattccaccagtggggcttgataatagaagcttgttaaacagaacctgcataacaggatcatcccaatatttcaagaccccagtacataagcaggcaactggatggagaaagctagtctttgaaatttagagttccggaaaagagaaatctctcctctcctgaccttcccatgagatgataaacccacaataaagccaagagaggctctgagaataatcacttgagttttaggggaactgaaagacaggaatactgaaatattcaatcattctgtgcttgaatctttgccaaaccaccaggcatgttacaagcgtgggactgttatatggtatgggtctcttccctaaattcctgctccctgagatcctaaaagttacagaagccaaatcacttcctagcaacagacgccagatatgatagccatgaagagtagatgagatgaggagctcacagtggtacaaagaagagtgcatgtcagagggatgtggtgtgatgctgctgcccatgaacacccacatgatgccacagaccctcagggaaccactagtgcccagggaagccggccccacctgtccacatcaagacaagagcttgaacactggctggtcatgaccacaaaggagagtacagaagccacatcatgctgtctctccagccagcccaacctcagagtaaaagcagacrgaaggtggtgggtaaggggagtatgaacaagggtagtaatgaaaatctagtctgaaatggggaagggagggtggctttgagctaaatatgaaatttcagtttttaaataaatagaataagccttaaaaaaactgaatgaaacttttttggtagccatgccccaaaagttatggaatcagattttgatgttcttaagga

SEQ ID NO: 30910 - DNA, 574 bp, Homo sapiens
attcaaaataaaacttctccatatcccatcacatcatgaagtcaatgctttcatttgttcgtattttctactgtctatatgtgtgttcaattttcacagatttatatrttaatagataacattttatagtctacattttcacttagcattataccatgaatactttttccactttgtgaaatttgcacccttatactctctttcgtttctcctccctacccactgaaggtaatcagtggtaatatcccaaactgtgtcctccacaattttctctaagttcatacatgtacaagcatatacagacacaaatgtggggaggcaagaaaggtcgttttgttttgtttttcacaaaaaatggaagcatactacttatacatatgctttctctcttttttaagcataccaggtatatacatctcaaatttaatacacacagaattttaagtatgaaaatgaatacaatttactagaccgggtaatatttacatttacaaaagttattattttgtatgtaaactttgaaaagacaaggattttacaacaaaatatggccgcccgatttagttagacctca

SEQ ID NO: 30911 - DNA, 1106 bp, Homo sapiens
agctttagataagagaagtctcccagaaaaggcatgctcagaagcagattgaggacaacgtaaatcactggataaatttattctagttcacatataaataaggataaagagaaaattgtaagccagagagcatttttgtgtcatcaagcattttaaaaattggaaaatgagactaattttaagacttgtaaagaaagcttttctctaattttctcagaatcagaagccaaggtaagsaataggaagttctgttttctgctctctgtacagtagtagtctatggtgtttctataaataagaaagattcattataatgtaggacagattaaaaagacaaaataaaagcctgagaagaaatgagaacaaacaagaataataaaagccagcaaattctgtaaaattttagtaggaagactgaaattctacattaaaagtcaacagaaagcaaatttgacacaaaagaatgtgcaatctgtatttttaaagtcaaaccgaagatggatattgatacaatagaaaatgacaaagtaatcagaattatgagtgataataattgatatgtatatacaaagtagaagtgtaattctcagttatgaggcattaatgaataataatcttaaagaaatagtaggaaagtaataatcaaaattttaattagagaaaaataaatacctgagctgaaaggcaaacaacatgccaaggaaaatttttgaatacaagttaccaaaaatcaatattaaaaaattttaatcttgtctagtgtagtggctcatgcttgtaatcccagtgattctggaagctgaggtggcaggaggattacctgagcccgggagttcaaggcttcagtgagccataaccacgacactgcactccagccaggtaacagaatgagatcttggttctaaaagaaaacaaaaacaacaaaaaacatggaaaggaaaaaataatctaaatttcttttctccatatcttaaaggattcagctaaattatttctaaaatataaatattaaagcaagataaaaagttcataaaataaaatttcatttttcattggtaatattgtaaactactaaaatacaatgataacatatattcagtccttca

SEQ ID NO: 30912 - DNA, 744 bp, Homo sapiens
tcgtccacacaagaatatgagtagttgggaaccagaaaacttggctgaaagacattccctgattctagcatgtattgctcagatccacaaaatttattttacttttagaaagaccctcagtggtatgcagaatattctatttgatggttaatattctgtgtcatcttggccaggctatagtatccagtggtttaaccaaacactaatctagatgtttgccttgaaggtacatggtagatgtggttaacatctacaatcattgaccttaagtaaagataatgtagctgagtctaatccaatcagttgaaggctttaagagcaaaaactaaagttttccagaaaagaaattctgcctcaagactgcaacatcaattccttcctgtgttttcagctgccagcttcmtctacaaatttgggatttgccagcccccacaatcacatgagccaagtccttaaaataaatctctttctctctctccacatatacaatatattaaaagatatatattacatgtataatatacatatgtaatatatgtatatatgtatgtacatattacataatacatactcatgtaatatgtgtatgttatatatatatatttaatatgtacatatcttactggttctgtttctctgcagaatcctggctaatacactacatcaatttaaacttccatcgctctctcaaaattaacttctgcaaccctgaaagaactacttgcacctattttacactcagta

SEQ ID NO: 30913 - DNA, 744 bp, Homo sapiens
tcgtccacacaagaatatgagtagttgggaaccagaaaacttggctgaaagacattccctgattctagcatgtattgctcagatccacaaaatttattttacttttagaaagaccctcagtggtatgcagaatattctatttgatggttaatattctgtgtcatcttggccaggctatagtatccagtggtttaaccaaacactaatctagatgtttgccttgaaggtacatggtagatgtggttaacatctacaatcattgaccttaagtaaagataatgtagctgagtctaatccaatcagttgaaggctttaagagcaaaaactaaagttttccagaaaagaaattctgcctcaagactgcaacatcaattccttcctgtgttttcagctgccagcttcatctacaaatttgggatttgccagcccccacaatcacatgagccaagtccttaaaataaatctctttctctctctccacatatacaatatattaaaagatatatattacatgtataatatacatatgtaatatatgtatatatgtatgtacatattacataatacatactcatgtaatatgtgtatgttatatatatatatttaatatgtacatatmttactggttctgtttctctgcagaatcctggctaatacactacatcaatttaaacttccatcgctctctcaaaattaacttctgcaaccctgaaagaactacttgcacctattttacactcagta

SEQ ID NO: 30914 - DNA, 543 bp, Homo sapiens
agatggccaatgaaaaataatttcctgttttttgtagtcatgggcacgtagtgggctgccagtccaacagcctgtgattagtaaataaagggcacattggaaactcactgtcagggaatgtccttcccatctcccattgtccttctctgtgtcatttacaatgaasccattcccacattgaaatcttcattagcctctcaggaccattgttggagaatccagactctctgacctctaagatcagaacccaacttggcttttcagatgcatctacactgatgctctctcccccatcttcctctgaaccactctaccagcaagtccctgctgttggccatatcctgtatctgtcctttgtgtttgttttcagatttccttaacttgtatcctgtgggctttcatgttttatctttaaacatcttgccattgttccaggtctatcttgattatcattgagaaacctttcttctatttttcttttgttaacagttttataattgacttgtcaaatccagtaactttttatcctctttttctccagtg

SEQ ID NO: 30915 - DNA, 690 bp, Homo sapiens
ctgccccagagacaagtatgaataccacagacaacggtgtcaactgtctgtgtgctatctgtggggacagagcaacaggaaaacactatggggcatccagctgtgatgggtgcaagggtttcttcagacgcagcattcgtaagagtcacgtttattcttgcaggtactttaaatgcccttttaggcaagttatctttacagatgtttcagtttggcacgcaaaaagtaagagaagaaaattcagagttttcgtatatctgtaagtctataaatacaatctctaaactgcggtacaagtaagaacgtgtgggtatgtacacaggatgtattcacataggtgttcttttttatgaaacattttagacttacagaaggtatataaaaaatccacctacctaccacccagcttagaccaatatagttgaagcctttaatggacacctcctctgtcactttttctccctcgtctcctagaggtaactaccattgccatttcatgttatcttttccttgtgtttctttattattttaccacatgttcatatacctctaaacattttaaaatctgcatttaaaaggttttttaatawgagtatttttcttcatgtttattttttaagtgccattacatcctaggtctaaaaacaaaattatgaaagtgcagatgattttggtagtttgttgatatca

SEQ ID NO: 30916 - DNA, 344 bp, Homo sapiens
ctccatgttggtcaggctggtcttgaattcccaacctcaggtgatccacctgcctcaacctctgaaagtgctgggattacaggtgtgagccaccgtgcccggacacattgactttaaagttggaaatgtatgaacaacattgccaaaccacaaatattatttgatgctgagtcacatagtgtactatgttctttgaagtagtttcactctcaggaaacctagggcactcatgggaacaagttcaccatgtgaaaatggattctctctcttttttttttaactcaattgyttgaaatcatttcaaatttacattttctttagatttatatttacttaatataata

SEQ ID NO: 30917 - DNA, 445 bp, Homo sapiens
aagcctaaaaagtaagcaatggaaatatgtattatgccaaaaagaaaaagtagaaagacaacaaaagtatgaaataaaaaacaggagaaaaagaaaactaatttaggaagtacaactagtagaaataagaacaagaaagtgaaagcaaagaaatgggaaagaagaactgatcagaggggaaaaaagaaaaactagaaaatattttcaaagtttaccaggacatgtttcaaaattgaactttcttgactaactcaattctttctttacttattctgcttctaaaccttcctagaatcctccttctattggaaatgaaggaagcagcctgggataatagactcttcactttkttccttcctagtcacaggttatgtgtgtgtgtttgtgtgcatctgatgaaataatatatacagagtaaatatgtatgaaaattaggaaaaggcca

SEQ ID NO: 30918 - DNA, 550 bp, Homo sapiens
ctaatgtagattcattgcatcacatattattaatgtaaactttatccttcaaaccacctagcaacaatatctcatcattaagtataataaatgctgagggcatttcccacctctctgtaaaaccacagcacatttttttctcccttattcatattatgcaggcctaatttgcacagcatccagaagtctttcattaattcacttaaataggttactttttcctaacgagcttacttacacaaaagtacctaggaggtttcctctcctggtgggaagacgtgtgattctgacacatagggtgagaaaaaaagaaaaaaagtaattcacttggggctgatggcctgagaagatgataaatacatgggtggaaatcgtattgtttctatcggcgtctacttgaatttctacaaaagtttggcctttgtttacgccacctgagtttgagcaggacagagacaggctgtggacacatctgtccctaagtatagcctctctytggctcactttcctcttcccatactgcaccctgtccctagtaatctctgctgaa

SEQ ID NO: 30919 - DNA, 776 bp, Homo sapiens
cacatttgggcatgaaagtacaaatgcctgttcccatttagggctgcgggtttccagacttgagggtgggggcgtttgctggggaactgccctcttccacccagtatttccttgactcttgtctgtatcaccaagataacacactacaaatatgggaaggagcttggaaagaaccatgggaagaaacttgatgtgatcacagcacccccagtgagggcaggcgctcagcagggcagctgtctctgagttagcagcatcaggaagcctcccctggaagacactggctgcaggacgaggctgccagcctccaccagggacatctggaagccactcttgctggcttctgtggaggccaagggcagccttcttggcaggctgccagctctctggaggctcttggggcccatcctaccctcaggggacctggcaggaaggtcagctgactgctcctgggtcactcacggatgccccctttttatgccccaaaatgaatctgaagagaagaaatcctagcctctgccaagcgctgtcgcccagcattgcagcctgaacacatccaaggggcctgatgagcagcacctggtcccccactggctcagacgcttgaagctactgaatttacatgtaattaaagactcgagtgcagaccgcatttcaaaacagacacttggtcagagataggaggccttccccatcagatggttttgttttgctttytctctgcatatgggccttataatttgccaaggtaaggttacaggggccacagttgtttt

SEQ ID NO: 30920 - DNA, 1146 bp, Homo sapiens
ttaattttttaaaataatgaagcctctgccataaagtcagtgtcctggctgccagccaccaggcagaacctactagacttctccaaaatagatactggggcctccttcctcaaccatggtcaaggcctaagcttccttctcaaaggcaggcagtcctaggctttagggcaagaagtgcttcctacatgcaaggtgctctggggaagggctgcgtgtggcggccrtgtgtgcaggtcttcaggatttcagctgagccaccttttcttgcagtttaagaagaaaacagccagccattccctccttgtaataaatgcctccgcatatttgaagacagagttaggtcattcttgagctttctcatctccaaacaaaacaactgtggcccctgtaaccttaccttggcaaattataaggcccatatgcagagaaaaagcaaaacaaaaccatctgatggggaaggcctcctatctctgaccaagtgtctgttttgaaatgcggtctgcactcgagtctttaattacatgtaaattcagtagcttcaagcgtctgagccagtgggggaccaggtgctgctcatcaggccccttggatgtgttcaggctgcaatgctgggtgacagcgcttggcagaggctaggatttcttctcttcagattcattttggggcataaaaagggggcatccgtgagtgacccaggagcagtcagctgaccttcctgccaggtcccctgagggtaggatgggccccaagagcctccagagagctggcagcctgccaagaaggctgcccttggcctccacagaagccagcaagagtggcttccagatgtccctggtggaggctggcagcctcgtcctgcagccagtgtcttccaggggaggcttcctgatgctgctaactcagagacagctgccctgctgagcgcctgccctcactgggggtgctgtgatcacatcaagtttcttcccatggttctttccaagctccttcccatatttgtagtgtgttatcttggtgatacagacaagagtcaaggaaatactgggtggaagaggcagttccccagcaaacgcccccaccctcaagtctggaaacccgcagccctaaatgggaacaggcatttgtactttcatgcccaaatgtggg

SEQ ID NO: 30921 - DNA, 1146 bp, Homo sapiens
ttaattttttaaaataatgaagcctctgccataaagtcagtgtcctggctgccagccaccaggcagaacctactagacttctccaaaatagatactggggcctccttcctcaaccatggtcaaggcctaagcttccttctcaaaggcaggcagtcctaggctttagggcaagaagtgcttcctacatgcaaggtgctctggggaagggctgcgtgtggcggccatgtgtgcaggtcttcaggatttcagctgagccaccttttcttgcagtttaagaagaaaacagccagccattccctccttgtaataaatgcctcygcatatttgaagacagagttaggtcattcttgagctttctcatctccaaacaaaacaactgtggcccctgtaaccttaccttggcaaattataaggcccatatgcagagaaaaagcaaaacaaaaccatctgatggggaaggcctcctatctctgaccaagtgtctgttttgaaatgcggtctgcactcgagtctttaattacatgtaaattcagtagcttcaagcgtctgagccagtgggggaccaggtgctgctcatcaggccccttggatgtgttcaggctgcaatgctgggtgacagcgcttggcagaggctaggatttcttctcttcagattcattttggggcataaaaagggggcatccgtgagtgacccaggagcagtcagctgaccttcctgccaggtcccctgagggtaggatgggccccaagagcctccagagagctggcagcctgccaagaaggctgcccttggcctccacagaagccagcaagagtggcttccagatgtccctggtggaggctggcagcctcgtcctgcagccagtgtcttccaggggaggcttcctgatgctgctaactcagagacagctgccctgctgagcgcctgccctcactgggggtgctgtgatcacatcaagtttcttcccatggttctttccaagctccttcccatatttgtagtgtgttatcttggtgatacagacaagagtcaaggaaatactgggtggaagaggcagttccccagcaaacgcccccaccctcaagtctggaaacccgcagccctaaatgggaacaggcatttgtactttcatgcccaaatgtggg

SEQ ID NO: 30922 - DNA, 1146 bp, Homo sapiens
ttaattttttaaaataatgaagcctctgccataaagtcagtgtcctggctgccagccaccaggcagaacctactagacttctccaaaatagatactggggcctccttcctcaaccatggtcaaggcctaagcttccttctcaaaggcaggcagtcctaggctttagggcaagaagtgcttcctacatgcaaggtgctctggggaagggctgcgtgtggcggccatgtgtgcaggtcttcaggatttcagctgagccaccttttcttgcagtttaagaagaaaacagccagccattccctccttgtaataaatgcctccgcatatttgaagacagagttaggtcattcttgagctttctcatctccaaacaaaacaactgtggcccctgtaaccttaccttggcaaattataaggyccatatgcagagaaaaagcaaaacaaaaccatctgatggggaaggcctcctatctctgaccaagtgtctgttttgaaatgcggtctgcactcgagtctttaattacatgtaaattcagtagcttcaagcgtctgagccagtgggggaccaggtgctgctcatcaggccccttggatgtgttcaggctgcaatgctgggtgacagcgcttggcagaggctaggatttcttctcttcagattcattttggggcataaaaagggggcatccgtgagtgacccaggagcagtcagctgaccttcctgccaggtcccctgagggtaggatgggccccaagagcctccagagagctggcagcctgccaagaaggctgcccttggcctccacagaagccagcaagagtggcttccagatgtccctggtggaggctggcagcctcgtcctgcagccagtgtcttccaggggaggcttcctgatgctgctaactcagagacagctgccctgctgagcgcctgccctcactgggggtgctgtgatcacatcaagtttcttcccatggttctttccaagctccttcccatatttgtagtgtgttatcttggtgatacagacaagagtcaaggaaatactgggtggaagaggcagttccccagcaaacgcccccaccctcaagtctggaaacccgcagccctaaatgggaacaggcatttgtactttcatgcccaaatgtggg

SEQ ID NO: 30923 - DNA, 1146 bp, Homo sapiens
ttaattttttaaaataatgaagcctctgccataaagtcagtgtcctggctgccagccaccaggcagaacctactagacttctccaaaatagatactggggcctccttcctcaaccatggtcaaggcctaagcttccttctcaaaggcaggcagtcctaggctttagggcaagaagtgcttcctacatgcaaggtgctctggggaagggctgcgtgtggcggccatgtgtgcaggtcttcaggatttcagctgagccaccttttcttgcagtttaagaagaaaacagccagccattccctccttgtaataaatgcctccgcatatttgaagacagagttaggtcattcttgagctttctcatctccaaacaaaacaactgtggcccctgtaaccttaccttggcaaattataaggcccatatgcagagaraaagcaaaacaaaaccatctgatggggaaggcctcctatctctgaccaagtgtctgttttgaaatgcggtctgcactcgagtctttaattacatgtaaattcagtagcttcaagcgtctgagccagtgggggaccaggtgctgctcatcaggccccttggatgtgttcaggctgcaatgctgggtgacagcgcttggcagaggctaggatttcttctcttcagattcattttggggcataaaaagggggcatccgtgagtgacccaggagcagtcagctgaccttcctgccaggtcccctgagggtaggatgggccccaagagcctccagagagctggcagcctgccaagaaggctgcccttggcctccacagaagccagcaagagtggcttccagatgtccctggtggaggctggcagcctcgtcctgcagccagtgtcttccaggggaggcttcctgatgctgctaactcagagacagctgccctgctgagcgcctgccctcactgggggtgctgtgatcacatcaagtttcttcccatggttctttccaagctccttcccatatttgtagtgtgttatcttggtgatacagacaagagtcaaggaaatactgggtggaagaggcagttccccagcaaacgcccccaccctcaagtctggaaacccgcagccctaaatgggaacaggcatttgtactttcatgcccaaatgtggg

SEQ ID NO: 30924 - DNA, 1146 bp, Homo sapiens
ttaattttttaaaataatgaagcctctgccataaagtcagtgtcctggctgccagccaccaggcagaacctactagacttctccaaaatagatactggggcctccttcctcaaccatggtcaaggcctaagcttccttctcaaaggcaggcagtcctaggctttagggcaagaagtgcttcctacatgcaaggtgctctggggaagggctgcgtgtggcggccatgtgtgcaggtcttcaggatttcagctgagccaccttttcttgcagtttaagaagaaaacagccagccattccctccttgtaataaatgcctccgcatatttgaagacagagttaggtcattcttgagctttctcatctccaaacaaaacaactgtggcccctgtaaccttaccttggcaaattataaggcccatatgcagagaaaaagcaaaacaaaaccatctgatggggaaggcctcctatctctgaccaagtgtctgttttgaaatgcggtctgcactcgagtctttaattacatgtaaattcagtagcttcaagcgtctgagccagtgggggaccaggtgctgctcatcaggccccttggatgtgttcaggctgcaatgctgggygacagcgcttggcagaggctaggatttcttctcttcagattcattttggggcataaaaagggggcatccgtgagtgacccaggagcagtcagctgaccttcctgccaggtcccctgagggtaggatgggccccaagagcctccagagagctggcagcctgccaagaaggctgcccttggcctccacagaagccagcaagagtggcttccagatgtccctggtggaggctggcagcctcgtcctgcagccagtgtcttccaggggaggcttcctgatgctgctaactcagagacagctgccctgctgagcgcctgccctcactgggggtgctgtgatcacatcaagtttcttcccatggttctttccaagctccttcccatatttgtagtgtgttatcttggtgatacagacaagagtcaaggaaatactgggtggaagaggcagttccccagcaaacgcccccaccctcaagtctggaaacccgcagccctaaatgggaacaggcatttgtactttcatgcccaaatgtggg

SEQ ID NO: 30925 - DNA, 555 bp, Homo sapiens
ttttaacaggtaaaatatcatttctcttttttacgtagagtgtgggaagtaagggacaaggtcacaccattgtaaaactgtgatcacactgcctcagatgtttccaccaagaagcatttatagttactgtaagccagcaatattttctatcctttagtrtagtggcagagggataacactattctatgtttcttaaaacaggtgaccagtagcataaaactgccacttgagtttttagcaggagagttcctataagtactctgcttacatggttgtttgcatatggccctgagctttctagtggatcgacacacacacagaaaaaccactgaaaaaaattaagtggcaatggggatcctttaatagatgctggtgataagagagccattgctagaagaggcaattactcttgacagcagccatattgggagccgcagaaggcctctaagagtcaataatagcaagacttaagcccaaaaataaaactgccatatacataagtgggagttactaatactactgatgatgtagggaacaaactgtacctcctctttg

SEQ ID NO: 30926 - DNA, 611 bp, Homo sapiens
tatgcagccataaaaaatgatgagttcatgtcctttgtagggacatagatgaaaytggaaatcatcattctcagtaaactatcgcaagaacaaaaaaccaaacaccgcatattctcactcataggtgggaattgaacaataagaacacatggacacaggaaggggaacatcacactctggggactgttgtagggtggggggaggagggagggatagcactgggagatataactaatgctagatgatgagttagtgggtgcaacgcaccagcgtggcacatgtatacattgtatacatatgtaactaacctgcacactgtgcacatgtaccctaaaacttaaagtataataataattaataaataaataaataaataaaagaaataagggccaagagtgtggaaataggccctaagatttgacaaggagtatgtcattgtttactttggtgactatactttttttgtagttatactgtcataaactgatataaatctttgaaaaataaaaagagattgtgagaacataaaaaaaaatgcctgttgtgaaacaatcattagagtattgtgagctgtattctttggttcagctttgctcacagtgcctaactca

SEQ ID NO: 30927 - DNA, 611 bp, Homo sapiens
tatgcagccataaaaaatgatgagttcatgtcctttgtagggacatagatgaaattggaaatcatcattctcagtaaactatcgcaagaacaaaaaaccaaacaccgcatattctcactcataggtgggaattgaacaataagaacacatggacacaggaaggggaacatcacactctggggactgttgtagggtggggggaggagggagggatagcactgggagatatamctaatgctagatgatgagttagtgggtgcaacgcaccagcgtggcacatgtatacattgtatacatatgtaactaacctgcacactgtgcacatgtaccctaaaacttaaagtataataataattaataaataaataaataaataaaagaaataagggccaagagtgtggaaataggccctaagatttgacaaggagtatgtcattgtttactttggtgactatactttttttgtagttatactgtcataaactgatataaatctttgaaaaataaaaagagattgtgagaacataaaaaaaaatgcctgttgtgaaacaatcattagagtattgtgagctgtattctttggttcagctttgctcacagtgcctaactca

SEQ ID NO: 30928 - DNA, 723 bp, Homo sapiens
gggcaacacagtgagactgtctaaaaaaaaaaaaaaaaaaaaaaaaagatcactgcagtacagggtgggcaggggtgggatggagggattaccaagaagcccaaggaagtttttgacgagatggatgttatcaccattgcagtggagctttcacaggtgtatacatttgttaaagtgtatacacagtggccgggccaggcgcagtggctcacgcctgtaatcccagcactctgggaggccgaggtgggcggatcacaaggtcaggacttcaagaccggcctggccaatatggtgaaaccccatctctactaaaaatacaaaaattagccagtcatggtggcaggtgcctctagtcccagctactcaggacgctgaggcaggagaatcgcttgaacccggtaggcggaggttgcagcgagctgagattgcgccaccgcactccagcctgggcgacagagagagactccctctcaaaacaaaacaaaacaaamcaaacaaacaaaaagactcatcagatatgttctaaataggtgcatcttattatacatcagtgctgccccaataaagtgggaaaatcaagctgggtgagttgatagagggtgacgaggaacatatgcccttttatttagggtgccaattctgtccaagattctgctctgacaattcctcggggatttccattcttctgaccggatgggtggctcccaggtttcctaagcctgg

SEQ ID NO: 30929 - DNA, 1175 bp, Homo sapiens
acattctgcaaggacccatccaaagaggaggagctgttttgtttgcagaagtgggggtggagggccaggtgtggtggctcacacctgtaatcccagcactttgggaggccgaggcaggcggattacccaaggtcagcagttcaaggccagcctggccaacatggtgaaaccccgtctccactaaaaatacaaaaattagcctgggcatgatggtgggtgcctatagtcccagctactcggaaggctgaagcaggagaatcacttgaacccgggaggcagaggttgcagtgagctgagatcacaccactgcactgcagcctgggcaacagagcgagactctgtctcaaaaaaaaaaaaaaaaaaaaaaagtgcgggtggagtggcyggtagagtagcaccattgctttctcagtaacagggctgtcaggagacagagcagggtccggctttcccatcagttctctcctggcctccgtggtatccctccgtccccacccaaatactaccgcagctctgtccctcaccttggctgcctctctggtccttagcctttcgtgatctcagcagtcctggagcttcaaatactatcattcattgcttggcgtatcagaaagcttgccataggttctttttgctttaatatgactgacaaagtaaggctaatggattcagctggccaaaaaaaaaaagcaaaaacagagtcctcatgagactcagacagcaaaagatcagagatgcctgccccctgctccctgcatcctcatcccacaggatgacactgaaataagaggggcccaataaggacagcgtgagcaggaggcaccccgttgctgagctgcagctgtaccctgaggaggacgaggaaggagcctcaaacctcatcagagctgagggccatgagaaactctcataaaggcccccaggaagatgggaggtggggacagggccatgtggcagcaactcacaaacctcccatgctctcatgttctgggaggaccacggggagttctgccaaggcttagaccagcagcggggaagctgggcctctgtggcctctgtggatacgggcaaggactgagggacatcggctctgctccgagcggttcccctacagtgagtgacaaccacccctaatgtctcagtggtttacaatacaaaggtgaatttcctgtctg

SEQ ID NO: 30930 - DNA, 589 bp, Homo sapiens
taacatcctttatagctgggtgttgaatcaaggttaggatgatctttccagaatccaaacttgaacatgtcactttcctgcttagcagttagtggtttccctcaccctgggatacaggccgagccccagcctgaagaaggcaggacccccaggcccctgggcccctgtccctcactcctgccctcctgcctcatagccttttggcttctcarcaggccatcatccttccagacacgagaccttctttgctgtttgctcctcctggaatgttctttgcgccttctcatcctcccatccagttcagccatcatttccccagggcggcccccaggaatccctgaaccagaccctactcctgtcttatctgactccttagaaccctgttcctgccctgaaccccctccttcccctcacagcacccagtttgattcgtgggtgtgacggctctactactctctcactcccccatggcctgcggccctaggagtggagtgtgtctgtctgctcaccagtatagtcccatacctggcccagagctgacacatagtaggtgctccatgaacatatgctgagttagcaaatgcacgag

SEQ ID NO: 30931 - DNA, 589 bp, Homo sapiens
taacatcctttatagctgggtgttgaatcaaggttaggatgatctttccagaatccaaacttgaacatgtcactttcctgcttagcagttagtggtttccctcaccctgggatacaggccgagccccagcctgaagaaggcaggacccccaggcccctgggcccctgtccctcactcctgccctcctgcctcatagccttttggcttctcaacaggccatcatccttccagacacgagaccttctttgctgtttgctcctcctggaatgttctttgcgccttctcatcctcccatccagttcagccatcatttccccagggcggcccccaggaatccctgaaccagaccctactcctgtcttatctgactccttagaaccytgttcctgccctgaaccccctccttcccctcacagcacccagtttgattcgtgggtgtgacggctctactactctctcactcccccatggcctgcggccctaggagtggagtgtgtctgtctgctcaccagtatagtcccatacctggcccagagctgacacatagtaggtgctccatgaacatatgctgagttagcaaatgcacgag

SEQ ID NO: 30932 - DNA, 589 bp, Homo sapiens
taacatcctttatagctgggtgttgaatcaaggttaggatgatctttccagaatccaaacttgaacatgtcactttcctgcttagcagttagtggtttccctcaccctgggatacaggccgagccccagcctgaagaaggcaggacccccaggcccctgggcccctgtccctcactcctgccctcctgcctcatagccttttggcttctcaacaggccatcatccttccagacacgagaccttctttgctgtttgctcctcctggaatgttctttgcgccttctcatcctcccatccagttcagccatcatttccccagggcggcccccaggaatccctgaaccagaccctactcctgtcttatctgactccttagaaccctgttcctgccctgaaccccctccttcccctcacagcacccagtttgattcgtgggtgtgayggctctactactctctcactcccccatggcctgcggccctaggagtggagtgtgtctgtctgctcaccagtatagtcccatacctggcccagagctgacacatagtaggtgctccatgaacatatgctgagttagcaaatgcacgag

SEQ ID NO: 30933 - DNA, 589 bp, Homo sapiens
taacatcctttatagctgggtgttgaatcaaggttaggatgatctttccagaatccaaacttgaacatgtcactttcctgcttagcagttagtggtttccctcaccctgggatacaggccgagccccagcctgaagaaggcaggacccccaggcccctgggcccctgtccctcactcctgccctcctgcctcatagccttttggcttctcaacaggccatcatccttccagacacgagaccttctttgctgtttgctcctcctggaatgttctttgcgccttctcatcctcccatccagttcagccatcatttccccagggcggcccccaggaatccctgaaccagaccctactcctgtcttatctgactccttagaaccctgttcctgccctgaaccccctccttcccctcacagcacccagtttgattcgtgggtgtgacggctctactactctctcactcccccatggcctgcggccctaggagtggagtgtgtctgtctgctcaccagtatagtcccatacctggcccagagctgacacatagtaggtgctccatgaacatrtgctgagttagcaaatgcacgag

SEQ ID NO: 30934 - DNA, 598 bp, Homo sapiens
tatatatctaagctaacttagctagcctttaattgtttttggtcaatggtcagtcatatgtaataaaaactgcctcatctttagaatacacagagtaaattataaaaagttatgagattcctagataatttactgaattggttactaacaaatttaaaaagtagtaatttttaaacaatagtagctaacatgtattgaatgtataatgtatgccaaataacacttttaattgctagatgtgcattttttttctagacatcttcacaaaaatataggggttagttacttttcttccccatttttagatgagacaataaaacttcagagagagtttaagcaacttactcatagcaacactgagtgattttagcattagaattcaaaccttggatgactcacattaaaaccttgcttttttaaacaatgtactaccaaaagaacaatttctactttctgggagctgatcactgtctttggagacagacaaaattgaatttaattctatctctacaaatagcaagctttaagaccctagttatgttactcaatatctctmccacttccttttctcacctcttagatgggtacaatgcctata

SEQ ID NO: 30935 - DNA, 1172 bp, Homo sapiens
ttcttccaccatttgctatcttgggtaaattactcaaattctctgagcctaagtttcatccaatgtaaaattagatgttatatataactttttagcattgttcgaagtctaacaaaatcatgtgaattgaactcttaacacagtgcctgacccaaaagtgtgcctggtaaaggttgttattactgttgctgcaaatttttaaatattwtcccaaatatatacatttacaaattgcataatgtcctcatatatggctacatttgcttcttgaagaaccacatgatattgatgaaataataacttttaacatctatacatgaatagaaattttcagagagattaaattaattagctaagaccattgcagaagtgaggagaaagatcttaaatcccagacagataatccaagttctaaactcttttattactacttttatgatattcaaaattagactagtattaaaatcaggaatcatacgattctcattatagttgtatataaccttagaaataattcagagagttaagtgacttgactaagttctacagggccacagccagtcctagaagcctcgtctgctaaatccaagtgcaggactagaagatgctcatcctatgacataaaagcataagatacaaatgttcttatccagtaacggtgggtgaggagcagtcacgagatgattgcaaatatattcataaggaagttatcatctcctttctagttggttaggaaaaacctttataaaacaaatgaaggttccagagtacctgagattacaattccaatggaaaaaggagtctgagagcacagaagagagagtcccagcctgggaatcatcatttcactctccaacttgtgacagagtccccacataccagaaaacaacctactccctgtgctccttctctttcattcttttttcttgttatttccccatctctcctctagcccacagcaacagataatattcctccttctttatgttaaacacacagttgtagcattatgccaggcctactaggaggtaaactgaacaagcagtatccttgctttatagaataatttaaagtaagaaagccaccagaaaactgagaaagcaagagtaacatagacactgccactgtgggaagctagaacagctgtggggctaggaactggttggcatttt

SEQ ID NO: 30936 - DNA, 1069 bp, Homo sapiens
ggcggcccagctggcgggggcgggcgggacacgcgccggccctcgcttcccctggagaggacgcgcgctcagcggcggcgatcggggagcggccagctttagagcaggcgccgcgtgggtctacgctgtgttttagggggacgattagttcgcccttccgccccaggactttccgaggcgggctggcccctgggttgaaccgtggccgacattccggtcctcctccgtctctacctcccttggcagccttctcggctggtctcaccaacagctgcgcctccgccgctgtccgcacccttcctttcccactttgccagcctcctgtttctcatcggacagggtattttccgacttttgattcagagcagacttttctcccatttgatctttcccaaacctacttcctttagtattaaattcttaccttcaacttctcttgtccgttgaacacatacttttaagcgaattattgcataacttaaactgtggattgaataagcatttttcgaaacgatcctggagtgtaaagttccggtcagtgccccgtacaacctcgaacaaagcgtgcatttcatacctatggcacagtttgctcrtatttgaccttggggatatcgactggtccgcatgccggagaaaatgattattgtgggtaattattggtcttattttggcgtctggttagtattggccttgtcttggggtactttgggagaaaaagccttttgtctgtgttgatagaataacttgacattcaagtgctgttctaagtatttcctgatttttacagtcctaaatggattggcttctttctggtacaataggtcaggctacatgtgaaacacttctgcagttaaaaaaagaaacaagaatgtaaatcatgtgccctgttaaaagcagccagttcctaagatgatttgattttatactcatcaggctagtctttattacttgccgaaatgttttgtgaactgagagggtctctaagctttcttaactagaagtgtcagagactagcttactcagttgtggtccctcagaagggaagggaaattctcattcgtcttgg

SEQ ID NO: 30937 - DNA, 1069 bp, Homo sapiens
ggcggcccagctggcgggggcgggcgggacacgcgccggccctcgcttcccctggagaggacgcgcgctcagcggcggcgatcggggagcggccagctttagagcaggcgccgcgtgggtctacgctgtgttttagggggacgattagttcgcccttccgccccaggactttccgaggcgggctggcccctgggttgaaccgtggccgacattccggtcctcctccgtctctacctcccttggcagccttctcggctggtctcaccaacagctgcgcctccgccgctgtccgcacccttcctttcccactttgccagcctcctgtttctcatcggacagggtattttccgacttttgattcagagcagacttttctcccatttgatctttcccaaacctacttcctttagtattaaattcttaccttcaacttctcttgtccgttgaacacatacttttaagcgaattattgcataacttaaactgtggattgaataagcatttttcgaaacgatcctggagtgtaaagttccggtcagtgccccgtacaacctcgaacaaagcgtgcatttcatacctatggcacagtttgctcatatttgaccttggggatatcgactggtccgcatgccggagaaaatgattattgtgggtaattattggtcttattttggcgtctggttagtattggccttgtcttggggtactttgggagaaaaagccttttgtctgtgttgatagaataacttgacwttcaagtgctgttctaagtatttcctgatttttacagtcctaaatggattggcttctttctggtacaataggtcaggctacatgtgaaacacttctgcagttaaaaaaagaaacaagaatgtaaatcatgtgccctgttaaaagcagccagttcctaagatgatttgattttatactcatcaggctagtctttattacttgccgaaatgttttgtgaactgagagggtctctaagctttcttaactagaagtgtcagagactagcttactcagttgtggtccctcagaagggaagggaaattctcattcgtcttgg

SEQ ID NO: 30938 - DNA, 1491 bp, Homo sapiens
atgaaattatttagtgttagaagtaggctgacttgaaaaattttgtttgctgttccagaattataagacaccgttttgctaattaaacagaaagaaggaacaaaatgacaaggaagatataatcaattaagcatggagaagggtgttaattatggttttataattattatatcttatcacatgataatttctatatgtttgaattttcaagtaccaccttgaaaactgtcactgtctacttatcttttacatatttttttttttttttagagacaggggtcttgctttgctgcccaggctggagtgcagtggcatgattatagctcactctaactacataaaaagagaagttttttttggctcaagtgatcctcctacctcagccttccaaatagctacgactacagctacttggaagtgagccactgtgcccagctaaatttawttttttttttttttaagatataaggatctcactatgttgcccaggctagtcttgaattcttggcctcaagtgatcttcttgcctcaatctcccatagctgggattaaaggcacgagccactgtgccaggtttacttgtcgtttgaaaaggtttttcatgttaagttttgggggtacattccttaacagatctaattttatcagaaaaccaagttttgctgaacctaaatatctatactacatataagtaaaagaagctctgtaggctgggagcctcggatccctgacagttttgcagaacgctgatatctatggactctaaaatagacttcatttatagatacccacggaccactaatggacaaaaacatgaatcaatatgtattgtggcattcaaatcctagcgctttgggagaggagggaggttccaagatggccgaataggaacagctccagtctacagctcccagcgtgagcaacatagaagacgggtgatttctgcatttccaactgagctttgaagagagtagtggatctcccagcacagagtttgagatctgagaatggacagactacctcaagtgggtccctgacccccgagtagcctaactgggagacacctaccagtaggggccgactgacaccggatacggccaggtgcccctctgagacgaagcttccagaggaacgatcaggaagtaacatttgctgttctgcaatatttgcagttctgcagactccactgatgatacccaggcaaacagggtctggagtggacctccagcaaactccaacagacctgcagctgagggtcctgatggttagaaggaaaactaacaaacagaaagggcatctacaccaagaccccatctgtacatcaccatcatcaaagaccaaaggtagataaaatcacaaagatggggagaaaccagagcagaaaagctgaaaattctaaaaatcagagcacctcttctccttcaaaggaacgcagctcctcaccagcaacagaacaaagctggatggagagtgactttgagagttgagaga

SEQ ID NO: 30939 - DNA, 1491 bp, Homo sapiens
atgaaattatttagtgttagaagtaggctgacttgaaaaattttgtttgctgttccagaattataagacaccgttttgctaattaaacagaaagaaggaacaaaatgacaaggaagatataatcaattaagcatggagaagggtgttaattatggttttataattattatatcttatcacatgataatttctatatgtttgaattttcaagtaccaccttgaaaactgtcactgtctacttatcttttacatatttttttttttttttagagacaggggtcttgctttgctgcccaggctggagtgcagtggcatgattatagctcactctaactacataaaaagagaagttttttttggctcaagtgatcctcctacctcagccttccaaatagctacgactacagctacttggaagtgagccactgtgcccagctaaatttaatttttttttyttttaagatataaggatctcactatgttgcccaggctagtcttgaattcttggcctcaagtgatcttcttgcctcaatctcccatagctgggattaaaggcacgagccactgtgccaggtttacttgtcgtttgaaaaggtttttcatgttaagttttgggggtacattccttaacagatctaattttatcagaaaaccaagttttgctgaacctaaatatctatactacatataagtaaaagaagctctgtaggctgggagcctcggatccctgacagttttgcagaacgctgatatctatggactctaaaatagacttcatttatagatacccacggaccactaatggacaaaaacatgaatcaatatgtattgtggcattcaaatcctagcgctttgggagaggagggaggttccaagatggccgaataggaacagctccagtctacagctcccagcgtgagcaacatagaagacgggtgatttctgcatttccaactgagctttgaagagagtagtggatctcccagcacagagtttgagatctgagaatggacagactacctcaagtgggtccctgacccccgagtagcctaactgggagacacctaccagtaggggccgactgacaccggatacggccaggtgcccctctgagacgaagcttccagaggaacgatcaggaagtaacatttgctgttctgcaatatttgcagttctgcagactccactgatgatacccaggcaaacagggtctggagtggacctccagcaaactccaacagacctgcagctgagggtcctgatggttagaaggaaaactaacaaacagaaagggcatctacaccaagaccccatctgtacatcaccatcatcaaagaccaaaggtagataaaatcacaaagatggggagaaaccagagcagaaaagctgaaaattctaaaaatcagagcacctcttctccttcaaaggaacgcagctcctcaccagcaacagaacaaagctggatggagagtgactttgagagttgagaga

SEQ ID NO: 30940 - DNA, 550 bp, Homo sapiens
aataaatgacaccttcctcgatctgctaatttttgcattcatgaaataacagaaaattaaatttcatagaactagcactgctttttctgagacagtttttatttctatagatgactaacggtcttctcagccaacctctctatgagccacagtagtaatcctctaaaaacacctgcatttttcactcttctgtaaactgacaggtctaatttttaaaattatcattactgaatagagaagaaaattgtttctccatttcaaagctaataattccaaaataaaggcaaggcatatagatactttcttttcaactrcccttaaatttgatgcttattttatattattgcctggtaaataaagtgatatttatttagtagataaattgctagcccctggatcacagataaagtggataacagtacgtacagacatcatcatagataatggccttggttatggcaccagctgtgtttgaatcataaataaagaattctgaatttagaaggtcctaactgctcctaataaaagacatgaacacattcaactcaat

SEQ ID NO: 30941 - DNA, 571 bp, Homo sapiens
ttccatctctgagcccccaaatggctgggaatatggatgggcaccaccatgcctagctatttatttatttatttatttgtatagatggtgtctcgttatgttgcctaggctagtattgtacatgtcttgtgatgaacatttacttaaattttaaaattgttggcacaaatgtgacattatatctgccaatttttttaccayctgtaggaactgtaatacagtaaacttacattcctggtgttggacacttgtaccttttcttcaattttgttctcaggtaatcagacttgatggagtatatcaattttataaatttatgaaataaaaaatttatggcttattactaacaaatctacttttgttatccactctgaattttcaccctccatttttatttatttaattatttgagacagagtctcactgtgttgcccaggctggagtgcagtagcatgatctcagctcactgcaacctctgcctcctggattcaagtgattttcctgtctcagcctcccaagtagctgggattataggcacgcaccaccatgcctggctagtttttgtattttt

SEQ ID NO: 30942 - DNA, 571 bp, Homo sapiens
ttccatctctgagcccccaaatggctgggaatatggatgggcaccaccatgcctagctatttatttatttatttatttgtatagatggtgtctcgttatgttgcctaggctagtattgtacatgtcttgtgatgaacatttacttaaattttaaaattgttggcacaaatgtgacattatatctgccaatttttttaccatctgtaggaactgtaatacagtaaacttacattcctggtgttggacacttgtaccttttcttcaattttgttctcaggtaatcagacttgatggagtatatcaattttataaatttatgaaataaaaaatttatggcttattactaacaaatctacttttgttatccactctgaattttcaccctccatttttatttatttaattatttgagacagagtctcactgtgttgcccaggctggagtgcagtagcrtgatctcagctcactgcaacctctgcctcctggattcaagtgattttcctgtctcagcctcccaagtagctgggattataggcacgcaccaccatgcctggctagtttttgtattttt

SEQ ID NO: 30943 - DNA, 627 bp, Homo sapiens
gactctgtctcaaacaaacaaacaaacaaacaaaaaacaagtaccttctattttacaccccaattttaattctctttaaagagacatgtgatgttaagatttacatacattactttttcatgtatttcgtgttaatccatactataaacaccaatatggtgtagctgagaaaaatctataaaatatattttgctcatttcaataaatgggccatattctactttattattttgaattttaagaaactactgataactgaatttcatgctacctacgatcaatttygagaagacactgaaagtcctattgtatgcatttttttttcaaaattatccggttgctttcctatctcaaacctcgtttcacaaaactgggctgccttgactgtgtatgattaatggtaataatttatcttctaattcaaaggtggttccgtttaaaatgggatgttacttataatacaggtaagaattttaactcatactacttatgaagaaacaaaagctctggtaggttccatgacttgcccaaggtcagtaactagcaactggcatagtctaggttcaacccaagatttatctgcctgaaagtcaatacttccacttgaccgcaattatctccttaaaa

SEQ ID NO: 30944 - DNA, 627 bp, Homo sapiens
gactctgtctcaaacaaacaaacaaacaaacaaaaaacaagtaccttctattttacaccccaattttaattctctttaaagagacatgtgatgttaagatttacatacattactttttcatgtatttcgtgttaatccatactataaacaccaatatggtgtagctgagaaaaatctataaaatatattttgctcatttcaataaatgggccatattctactttattattttgaattttaagaaactactgataactgaatttcatgctacctacgatcaatttcgagaagacactgaaagtcctattgtatgcatttttttttcaawattatccggttgctttcctatctcaaacctcgtttcacaaaactgggctgccttgactgtgtatgattaatggtaataatttatcttctaattcaaaggtggttccgtttaaaatgggatgttacttataatacaggtaagaattttaactcatactacttatgaagaaacaaaagctctggtaggttccatgacttgcccaaggtcagtaactagcaactggcatagtctaggttcaacccaagatttatctgcctgaaagtcaatacttccacttgaccgcaattatctccttaaaa

SEQ ID NO: 30945 - DNA, 1117 bp, Homo sapiens
tcccttatagcctccggagggagcagagctctgccaacaccttgatttcagacttctggcctccaaaactgtgtaagaataaaygtctgttggtataagccacccagtttgcttcctagggctgtttggttacaaatcctcatacagtaggggatggtcagagggcaaagttaacaaaaatgagtatagaagaaagtatagctatcagtggctcttcccagtctatccccacctctctccttagcactggatatttttccaacagactgtaagtctccccaaccaattgtcttcaaacatgtcaaatacatgaagtctagagcccttctcatgcctcctccaaccacccctctctatgagcccgccttcctatttctccatctgctcacgtgtccaggctggaagccttagagtcaagctcacctcctctttcccgcacacctcccacatcacacccatcacccagtcctcacctctgcctccaggttcttttctctgatattgagaagtgacagcgtgctggcagtcctcagagccctcgctcgctctccgcgcctcctctgcctgggctcccactttggcggcactggaggagcccttcagcccaccgctgcactgtgggagcccctttctgggctggccaaggcaggagccggctccctcagcttgcagggagatgtggagggagaggcgcgagcgggaaccggggctgcgcgcggcgcttccgggccagctggagttccgggtgggcgtgggcttggcgggccccgcactcggagcagccggccgccctgccagccccgggcaatgaggggcttagcacccaggccagcggcagcggagcatatactgggtcccccagcagtgccagcccaccagcgctgcactcaatttctcaccgggccttagctgccttcccgcgggccagggctcaggacctgcagcccgccgtgcctgagcctcccaccccctccatgggctcctgtgcggcccgagcctccccgacgagcgccaccccctgctccacggcgcccagtcccatcgaccacccaagggctgaggagtgcgggcgcacggcgcgggactggcaggcagctccacctgcagccccggtgca

SEQ ID NO: 30946 - DNA, 1117 bp, Homo sapiens
tcccttatagcctccggagggagcagagctctgccaacaccttgatttcagacttctggcctccaaaactgtgtaagaataaacgtctgttggtataagccacccagtttgcttcctagggctgtttggttacaaatcctcatacagtaggggatggtcagagggcaaagttaacaaaaatgagtatagaagaaagtatagctatcagtggctcttcccagtctatccccacctctctccttagcactggatatttttccaacagactgtaagtctccccaaccaattgtcttcaaacatgtcaaatacatgaagtctagagcccttctcatgcctcctccaaccacccctctctatgagcccgccttcctatttctccatctgctcacgtgtccaggctggaagccttagagtcaagctcacctcctctttcccgcacacctcccacatcacacccatcacccagtcctcacctctgcctccaggttcttttctctgatattgagaagtgacagcgtgctggcagtcctcagagccctcgctcgctctccgcgcctcctctgcctgggctcccactttggcggcactggaggagcccttcagcccaccgctgcactgtgggagcccctttctgggctggccaaggcaggagccggctccctcagcttgcagggagatgtggagggagaggcgcgagcgggaaccggggctgcgcgcggcgcttccgggccagctggagttccgggtgggcgtgggcttggcgggccccgcactcggagcagccggccgccctgccagccccgggcaatgaggggcttagcacccrggccagcggcagcggagcatatactgggtcccccagcagtgccagcccaccagcgctgcactcaatttctcaccgggccttagctgccttcccgcgggccagggctcaggacctgcagcccgccgtgcctgagcctcccaccccctccatgggctcctgtgcggcccgagcctccccgacgagcgccaccccctgctccacggcgcccagtcccatcgaccacccaagggctgaggagtgcgggcgcacggcgcgggactggcaggcagctccacctgcagccccggtgca

SEQ ID NO: 30947 - DNA, 1117 bp, Homo sapiens
tcccttatagcctccggagggagcagagctctgccaacaccttgatttcagacttctggcctccaaaactgtgtaagaataaacgtctgttggtataagccacccagtttgcttcctagggctgtttggttacaaatcctcatacagtaggggatggtcagagggcaaagttaacaaaaatgagtatagaagaaagtatagctatcagtggctcttcccagtctatccccacctctctccttagcactggatatttttccaacagactgtaagtctccccaaccaattgtcttcaaacatgtcaaatacatgaagtctagagcccttctcatgcctcctccaaccacccctctctatgagcccgccttcctatttctccatctgctcacgtgtccaggctggaagccttagagtcaagctcacctcctctttcccgcacacctcccacatcacacccatcacccagtcctcacctctgcctccaggttcttttctctgatattgagaagtgacagcgtgctggcagtcctcagagccctcgctcgctctccgcgcctcctctgcctgggctcccactttggcggcactggaggagcccttcagcccaccgctgcactgtgggagcccctttctgggctggccaaggcaggagccggctccctcagcttgcagggagatgtggagggagaggcgcgagcgggaaccggggctgcgcgcggcgcttccgggccagctggagttccgggtgggcgtgggcttggcgggccccgcactcggagcagccggccgccctgccagccccgggcaatgaggggcttagcacccaggccagcggcagcggagcatatactgggtcccccagcagtgccagcccaccagcgctgcactcaatttctcaccgggccttagctgccttcccgcgggccagggctcrggacctgcagcccgccgtgcctgagcctcccaccccctccatgggctcctgtgcggcccgagcctccccgacgagcgccaccccctgctccacggcgcccagtcccatcgaccacccaagggctgaggagtgcgggcgcacggcgcgggactggcaggcagctccacctgcagccccggtgca

SEQ ID NO: 30948 - DNA, 840 bp, Homo sapiens
tggaggggtcaatgacagtgtccatctgtggcctcaaagagcccgttcccaactctcctgccttttgacagaaggtctgtctggttatggctttaggaagatagatgacttctatatagtcacaggaagagtctgcgtgcctggagctgtgggctagaaaggaggtgagagatgctggcctctccaaggcctcgtccacgtgccccatctccagacaggagcagccagggctccgttaggctgcaaacaatggaaarcctgaatagcagaggcttaaaaaacatgtggtttgcttgtctcacctgaaagaagtctgaaatttggaagtccagggctgggtcagaggttcagagatgctggggttgaggcctagatggctttttggccttttccccaggaaaaaacagaatcaatcagaaggtggctgatgtaggtcaggtgggctggggctggaggggatgggaggctgtgagtctggcgctccctcttgctggtgtggggatgggtaccaggagggcttctctcctccaccttgctctgttgctctgttgctctgttgcccaggcacccattgccaagaagccagactggaattcccaatgggatggggcagtcccaaggcacatggaatctttggtgggacttatacaccctgtactcctgtgagctcctcagtcactctggtcaaaaactctaatattgttccttttacacagtcatcacccaaaaccctgttaaacacccaaatgcacctggggcaacccttgaccttatggagcccactttctttgcaaacaacacagatgttgagatgaagcaggaaggagtggttacatagga

SEQ ID NO: 30949 - DNA, 955 bp, Homo sapiens
cccaaagacatatttaataacttcagtagttcttaggggttggatgccagccccaaggtcttagtaaaagacagtctaatataaaataaaactaagcaaaataaaagatgaggactttctcatatagggagagttccacattctttaaaaaactctagccgcagtggctcacacctgtaatcccagcactttgggaggccaagccgggcagatcacctgaggtcaggagttcgagaccagcttgaccaacatggagaaaccccatctctactaaaaatacaaaattagccgagcatggtggcacatgcctgtaatcctagctactcaggaggctgaggcaggagaatcacttgaacccagcaggtggtttgcggtgactgagatcgtgccattgcactccaacctggtcaacaagagtgaaactccatctgaaaacaaacaaacaaacaaacaaacaacccctagatattgtcatgcatgtccataagaattcctctgctacttttctccttgtaagctacttctattttgacctcagttttacctttattccagatgttacttttgacttattcaatgttactggtttgctatctcttgttatgacacctggtgtattggtcaagaagcttcagaaaacagaatccactctaactagctatattagtcctgtattaactagctgtataaatgaatattcgagactgggtaatttataaagaaaagaagtttatttgactcacggttctgcaggccatacgagcatggtgccagcatctactcagcttctgctgaggcctcaggaagcttacaatcatggtggaaaacaaaaggggagccagcacatcacatggcaagagggagcaagagagcagggaggtgccagsctcttttaaacaactagctctcatgtgaactaatagaatgagagctcactcatcactaaagggatgag

SEQ ID NO: 30950 - DNA, 893 bp, Homo sapiens
cagcatttgcagaatgaatgaactcagggtaccagcccttaacacctcctttctttcatcctccaactccccaccttcagcctcgtgctacctcagtcagcctggaatttctcgctctttctagctcacaagcaatttcacatttaataatcctaccaagaaactatgattttaaaaactggaccgagataactccatccaacatgcttctccttctgcatttctggaacagtttgccatttataaagcacaccattgaatctattgggtgctctatacagtgtttctgatatcttttacagcaactattttcttgctggtctccccaacgtcacgcccagtgagagcttatagggaaggagttgctaaggccactgggcctagggcaacatcacacaaaggcaggtgcaagttagagaggaacagacctgaggtcagctatctttgttctcttcactagaaaagcagggcaagtcttgattgccatttagatatggactgacatatagtactactcatggaaaaggaagattcaggaaatgaaaattgtttttattatttcagggaggataaaagcaaaacaaattgctagctctctcaggatgtttttcttatgttgtttagaaagttcaggctctctcagccttcaatttttatgtcaacttcccaccatgactttgtacatttttttaatgaccaaacgtttgttagcaataaggctaagtgtctaaacatttaatgctgttaaggaaaaaaattactcatgccacttgtgaagaatggtaaggcagactttttcaagaggagccatggtgataggtatagggaccactgcaaatgggtcttgcagtgggagagggagactgractcaattccaactccaaaaaggaca

SEQ ID NO: 30951 - DNA, 1061 bp, Homo sapiens
tatttttaattattaactgcatatcctataccaatatgcatcatgtgctaatcattttgttttaaaacccattcaggctacagttgaaaataaagattctgttctgaatacagccaccaaaatgaaggatgtacaaacatccacaccaggtaaactttgcattgtagatttaactctggaaagaagtacattaatctatttgtaatgctcatagtctttctattctcaattatttcactttttatattttatttcaggatttcatctaaataatgcagctgttataatttttatttatgttttcaaaaatgagatttacatgcataaggaaaatatatttttaaaacataaagttttttctttttttttatttggagacagagctttgctcttgttgcccaggctggagtgcaatggctcaattgtagctcaccgcaacctccgccttcctagttcaagcaattctcctgcctcagcctcccgagtagctgggattacaggcatgcaccaccatgtctcgctaattttgtatttttagtagagacagggtttctccatgttggtcaggctggtcttgaactcccgacctcaggtgatcctcccgcctcgccctcccaaagtgctgggattacaggcgtgaaccaccgtgcctggcctaaaaatataaggttttattcagatgtttctactttcacattttgatactctgaagtttccaatttggaatttcaatagtttttagcgatttaaagagatcaattttgatactgtaaaatatttgttttgctttaaaagtcagttcaaattatggcttttagctaatgaaatgttttwtttggtaacatatttgttttgttttaacttttattggttttggtcaattttgttacgcttattatattaagccaatcagatgttcggattagcacactctgtgcctgtgtgtgtgttactttatttttttgtttttaattttaatgagtaaattgtaggtgtttatgtttatggagtaaataagatattttgatacaggcatacaatgtgtaataatgacatcatgg

SEQ ID NO: 30952 - DNA, 1261 bp, Homo sapiens
aagaaagggatggttatcacacccatgtaaggagttacttcgcaacaaaattaaagaatcatatattttgctcttcagctttgctccttcagatgtgtcagcacaatgtgataaacacaattgargactccacaggattcagcataacatacaaaagaatctgttactgacatcccagaccccagcatccaagttttagaataaaaacgctcacctctgctaggaagtccactccacatcctggcagggctctcaccagcttcaagagcaaccaagttggataaacaaaacttccagtatgtgaccaggataatgcacagcgctaccgagacttggctccagccctgattatctgtgtgacagcaccacgttatatcagtgccgctccaagccttcccagttgctggcttattgcactgctcattgaaaatcctttacatgctggcaacattttagggaaggacaagcacactctgagtcatttgtaaagaaagcagagcaatttcaattctatatctccatgtgtgctgaaaccagaagcactgtcaatgtacaagtctgaggtggatttatgctgagaaacaggcaacctaagccttcattatcaatgcatgaaatcagccactgtgatcaaattcaagcaaaccacaagaaggatgtgattatgaaagtctccacagatttagcaccaaaccttgtggaataaagaatcatctattgaaattgtgtaaatgttaaaaatagctctggcttttcaacaatgagcaggatacagggaagaaatcagtagtctatattacgaggacttataaaggctgcataaatcaaaatagctgtaggttcctgggacttcgctatagacaaatgaaatcactggagactatgacaattataacaaaaataattccatatatttgacatagatgtccattaaagggcaaatcaaacatcctttaactcctaagtgcccatctctaaattaaaataatggtgatagttaaaaatgtgcgatgctatgctagcaccaggacaaaataccatcaattttattctaagataatttcataaacaatagagatttaaatctattctgtgtaacaataaacatgcaagatagatattttaacactataatctttgctcattattttaaaaaatctatagttcattaaacccatgtatttttatcccaactacccccaaatttatacttttgctttttataatcctttctgttttgttactaaaatataagatgcaa

SEQ ID NO: 30953 - DNA, 1261 bp, Homo sapiens
aagaaagggatggttatcacacccatgtaaggagttacttcgcaacaaaattaaagaatcatatattttgctcttcagctttgctccttcagatgtgtcagcacaatgtgataaacacaattgagsactccacaggattcagcataacatacaaaagaatctgttactgacatcccagaccccagcatccaagttttagaataaaaacgctcacctctgctaggaagtccactccacatcctggcagggctctcaccagcttcaagagcaaccaagttggataaacaaaacttccagtatgtgaccaggataatgcacagcgctaccgagacttggctccagccctgattatctgtgtgacagcaccacgttatatcagtgccgctccaagccttcccagttgctggcttattgcactgctcattgaaaatcctttacatgctggcaacattttagggaaggacaagcacactctgagtcatttgtaaagaaagcagagcaatttcaattctatatctccatgtgtgctgaaaccagaagcactgtcaatgtacaagtctgaggtggatttatgctgagaaacaggcaacctaagccttcattatcaatgcatgaaatcagccactgtgatcaaattcaagcaaaccacaagaaggatgtgattatgaaagtctccacagatttagcaccaaaccttgtggaataaagaatcatctattgaaattgtgtaaatgttaaaaatagctctggcttttcaacaatgagcaggatacagggaagaaatcagtagtctatattacgaggacttataaaggctgcataaatcaaaatagctgtaggttcctgggacttcgctatagacaaatgaaatcactggagactatgacaattataacaaaaataattccatatatttgacatagatgtccattaaagggcaaatcaaacatcctttaactcctaagtgcccatctctaaattaaaataatggtgatagttaaaaatgtgcgatgctatgctagcaccaggacaaaataccatcaattttattctaagataatttcataaacaatagagatttaaatctattctgtgtaacaataaacatgcaagatagatattttaacactataatctttgctcattattttaaaaaatctatagttcattaaacccatgtatttttatcccaactacccccaaatttatacttttgctttttataatcctttctgttttgttactaaaatataagatgcaa

SEQ ID NO: 30954 - DNA, 507 bp, Homo sapiens
tttwaaaaaattgttttcagagcaagcattttgtaaacaatttaggagtgggtatatataaaaatttcaaggaactactattttctctactaaattcttcaaaatctttagtggatggacttttaatatctctaataggtttctattgctgcataacaaattactcaagaaaaaatcagtggcttggaacaatacccatttattacctcatagttctgtaggttagaagtctgagtgggtgtgactggattctctgcttaggatgtcacaggcgttgaacaggatagactcttacttacaggctctcaattctttcccctggactactggttctgcttgctgagtcattcatcttttttgaacagtagtttgaaactaagtagttttatcagcctgctttctgcaagtggaattttggtatctaacagcctttttttcactttgtagtctccctgttcctttcagtccaagctggcagttttctgctgatataattttctcaaaaac

SEQ ID NO: 30955 - DNA, 507 bp, Homo sapiens
tttaaaaaaattgttttcagagcaagcattttgtaaacaatttaggagtgggtatatataaaaatttcaaggaactactattttctctactaaattcttcaaaatctttagtggatggacttttaatatctctaataggtttctattgctgcataacaaattactcaagaaaaaatcagtggcttggaacaatacccatttattacctcatagttctgtaggttagaagtctgagtgggtgtgactggattctctgcttaggrtgtcacaggcgttgaacaggatagactcttacttacaggctctcaattctttcccctggactactggttctgcttgctgagtcattcatcttttttgaacagtagtttgaaactaagtagttttatcagcctgctttctgcaagtggaattttggtatctaacagcctttttttcactttgtagtctccctgttcctttcagtccaagctggcagttttctgctgatataattttctcaaaaac

SEQ ID NO: 30956 - DNA, 559 bp, Homo sapiens
cactataaagtttctaaatcyaagtatgataatagtttgcagttttatgttgctagttctactttttcatagctctggcattgtgtataaaatagaacctgatataaaaactaatcttgccttgtgccccagtgacttgaagaatccttcactttcaaattacagttaccacttgaatttgggacactattttagcaatgtatatatttacatttatatatatgagttacttgaaattttgtattaattgcaatgtactcattacaaatattctttgaggtcaataactataaggtcccttaaagaatcaagagagccagcaatattattacactaaaatgtaatgatcaaagaaaaagtttcagcttttaaacaccttttgccccaaatatgccatgaggactatctgaatttctcctgttaaagctatgatctgctatgcttttcactatgacaagctctcagagtcaacaagaaaaagattttaggggcagaattaaaatgattctgtttttactgcttagtaactaacctacaattctcatcacattgatgggaa

SEQ ID NO: 30957 - DNA, 559 bp, Homo sapiens
cactataaagtttctaaatctaagtatgataatagtttgcagttttatgttgctagttctactttttcatagctctggcattgtgtataaaatagaacctgatataaaaactaatcttgccttgtgccccagtgacttgaagaatccttcactttcaaattacagttaccacttgaatttgggacactattttagcaatgtatatatttacatttatatatatgagttacttgaaattttgtattaattgcaatgtactcattacaaatattctttgaggtcaataactataaggtcccttaaagaatcaagagagccagcaatattattacactaaaatgtaawgatcaaagaaaaagtttcagcttttaaacaccttttgccccaaatatgccatgaggactatctgaatttctcctgttaaagctatgatctgctatgcttttcactatgacaagctctcagagtcaacaagaaaaagattttaggggcagaattaaaatgattctgtttttactgcttagtaactaacctacaattctcatcacattgatgggaa

SEQ ID NO: 30958 - DNA, 559 bp, Homo sapiens
cactataaagtttctaaatctaagtatgataatagtttgcagttttatgttgctagttctactttttcatagctctggcattgtgtataaaatagaacctgatataaaaactaatcttgccttgtgccccagtgacttgaagaatccttcactttcaaattacagttaccacttgaatttgggacactattttagcaatgtatatatttacatttatatatatgagttacttgaaattttgtattaattgcaatgtactcattacaaatattctttgaggtcaataactataaggtcccttaaagaatcaagagagccagcaatattattacactaaaatgtaatgatcaaagaaaaagtttcagcttttaaacaccttttgccccaaatatgccatgaggactatctgaatttctcctgttaaagctatgatctgctatgcttttcactatgacaagctctcagartcaacaagaaaaagattttaggggcagaattaaaatgattctgtttttactgcttagtaactaacctacaattctcatcacattgatgggaa

SEQ ID NO: 30959 - DNA, 559 bp, Homo sapiens
cactataaagtttctaaatctaagtatgataatagtttgcagttttatgttgctagttctactttttcatagctctggcattgtgtataaaatagaacctgatataaaaactaatcttgccttgtgccccagtgacttgaagaatccttcactttcaaattacagttaccacttgaatttgggacactattttagcaatgtatatatttacatttatatatatgagttacttgaaattttgtattaattgcaatgtactcattacaaatattctttgaggtcaataactataaggtcccttaaagaatcaagagagccagcaatattattacactaaaatgtaatgatcaaagaaaaagtttcagcttttaaacaccttttgccccaaatatgccatgaggactatctgaatttctcctgttaaagctatgatctgctatgcttttcactatgacaagctctcagagycaacaagaaaaagattttaggggcagaattaaaatgattctgtttttactgcttagtaactaacctacaattctcatcacattgatgggaa

SEQ ID NO: 30960 - DNA, 1173 bp, Homo sapiens
tctccagggatgagggagccgggctggaggggctctgtggggagcggggagacttcgctgggggactctgctcctgctgatagaagagaagaggagcgcgctatgggcgtctagtgacttgaggctgatagaaaagaaggggcccctggccaggctccatgctgagggccgggcgtgtttgctgcttttgaagacagagagcctggggcggggaagctggcggctccttcttcctccctcagcttgtcccttgccctgaccggacacccggtggggctcagagttaatggggtcacaagagatctaccagctcaggaaagaagaaggtgagcaacagggacagcttcggttctcccattcggggcggggtggcctcgggcaggttaccccatggctctgctcctgagcctcctccctgggaaactgggccaacacctcctacctcacgggcaggccgtgagaaccaaacctcggagtcattcgccaccaggaaatgcaaatgaaagccacrgtgagatgccaccacacgcccacggcgacagtgacagacaatcagtgctggccggaacggcagctgcccccctgacctccccactcctctctggcgggaacggaaaacagcatagcccccttggaaaacagtttgaccatttctcagaaagttccacgtcacctccttatactagatgggagaagagtgtgtgaagaatgattccattcagatgtttctagaaaatgcacactcatcacagtgacagaggcagatcagagtctgtctggagagagagggtgggcaggggcaggagggacgggcgacagaggggcacatggcttcagggggcggtttcacaggtgtagacatgtcaaactcatcaaattgtactgcttcattaaatgtcagttatacctgggtaaagctgtagaaaatatctttttggaggcaataaagggtggatttacactgaaaaaaaaaatgcaaggcaagtgaggcacctggcacaggactgttcagtcaatgccgactgctgaacatgtgagcccagtttctcgcaacttccattcattctttcctcccagaacatggaaacggagcaaggggagggacaggagctctcagtcctgccttcaggagcgcccagagacacgcttcacagaactgggtcggggtgctag

SEQ ID NO: 30961 - DNA, 1173 bp, Homo sapiens
tctccagggatgagggagccgggctggaggggctctgtggggagcggggagacttcgctgggggactctgctcctgctgatagaagagaagaggagcgcgctatgggcgtctagtgacttgaggctgatagaaaagaaggggcccctggccaggctccatgctgagggccgggcgtgtttgctgcttttgaagacagagagcctggggcggggaagctggcggctccttcttcctccctcagcttgtcccttgccctgaccggacacccggtggggctcagagttaatggggtcacaagagatctaccagctcaggaaagaagaaggtgagcaacagggacagcttcggttctcccattcggggcggggtggcctcgggcaggttaccccatggctctgctcctgagcctcctccctgggaaactgggccaacacctcctacctcacgggcaggccgtgagaaccaaacctcggagtcattcgccaccaggaaatgcaaatgaaagccacagtgagatgccaccacacgcccacggcgacagtgacagacaatcagtgctggccggaacggcagctgcccccctgacctccccactcctctctggcgggaacggaaaacagcatagcccccttggaaaacagtttgaccatttctcagaaagttccacgtcacctccttatactagatgggagaagagtgtgtgaagaatgattccattcagatgtttctagaaaatgcacactcatcacagtgacagaggcagatcagagtctgtctggagagagagggtgggcaggggcaggagggacgggcgacagaggggcacatggcttcagggggcggtttcacaggtgtagacatgtcaaactcatcaaattgtactgcttcattaaatgtcagttatacctgggtaaagctgtagaaaatatctttttggaggcaataaagggyggatttacactgaaaaaaaaaatgcaaggcaagtgaggcacctggcacaggactgttcagtcaatgccgactgctgaacatgtgagcccagtttctcgcaacttccattcattctttcctcccagaacatggaaacggagcaaggggagggacaggagctctcagtcctgccttcaggagcgcccagagacacgcttcacagaactgggtcggggtgctag

SEQ ID NO: 30962 - DNA, 474 bp, Homo sapiens
tgcaacctccacctcccgggtccaagcaattctcctggctcagcctcccgagtagctgggattacaggcgcccscaccacgtccggatattttgtgcttttagtagaaatggtgtttcaccatgttggccaggctaatctcaaactcctgacctcaggtgatccacccaccaaggcttcccaaagtgctgggacaacaggcgtgagccacagcacccggcctggtcagacagttaatccacacatgctattatgatttcctagtaaactgaagtttgtctataatctataacccagcaatgttcccccatgtgttgaaaaattcatgaactgttagcatgtagagacaaaaccaaaaataacattgtcaacaacatcaaaaaattaacttaaaagtcaagtcctggccaggcgcggtggctcacgcctgtaatcctaacactttgggaggccgaggctggcggatcacgaggtc

SEQ ID NO: 30963 - DNA, 758 bp, Homo sapiens
  misc_feature (1)...(758): n = A,T,C or G
cgcactagggccgcagtggagctgcctgccagtcccatgccgtgcgcccgcactcctcagtccttgggtggtcgatgggactgggcrccgtggagcagggggcggtgctcgtcggggaggctggggccacacaggagcccacggaggtgggggaggcccaggcatggcgggctgcaggtcccgagccctgccctgcgggaaggcagctaaggcccagcgagaaattgagcacagcagctgctggcgcaggtgctaagcccctcactgcccggccgctagagtgcagggcccgccgagcccacgtccacccggaactcgcgctggcccgcaagcaccgcgcgcagccccggttcccgcccgcgcctctccctccacacctccccgcaagctgagggagccagctccagccttggccagcccagaaaggggctcccacagtgcagcggcgggctgaagggctcctcaagtgccgccaaagtgggagcccaggcagaggaggcacggagagcgagcgagggctgtgaggactgccagcacgctgtcacctctcagagggaggagtgaatttaagagttaagagactgatgcaatagtccaagtaggactagtatagggaaagtgagaatggaggggaagtattcggactcaagataannnnnnnnnnnnnnnnnnnnnnnnnnnnnnnnnnnnnnnnnnnnnnnnnnnnnnnnnnnnnnnnnnnnnnnnnnnnnnnnnnnnnnnnnnnnnnnnnnnntttt

SEQ ID NO: 30964 - DNA, 1664 bp, Homo sapiens
ttcctgctgggagcatcagggtctgtcaggaccaaggtgtagagcttccctgaatcaagaccatcccactaaatgctgrtgggtctattcttaacctgggtgggcgtcagcactttgcccagctcgtccaccaccgcccgggcgtaggtgacatgcagcaggtgctgtgaccgctcgtccatttctcgcaggctcaagggcccggaccacttgctgaggtccaccggcatggcaaggccaagcagagcatgcagccgggagtgccgcggtaggccaggtgcgggcggcaacagcgacatggagagctcagcacactggcctgggaaggcgcagaccccactttttgtaactttataattacttaattttatttttttaaagcttattttggtgttattcagtatatagtgttttactgagcttctgcaaatgccatcacaataatagttttgttttcttgaacaaaaaaccaaaataaatttcaaatgttaaagcaatggaatcaataaatttattaatgttacattaacacgaactacaaagagacctttcgtatgtctgataccaaagacataactgaaaagtcatttttccaaaccttgagcttgcattcacctacctgtctaaccctcacatgtgctaattaactgcaaatgccatttctgggcttcacacacattccgtggctttcccttttctgatgtgacttccctcccttaccccacacctccctgcactgtcccctgctgtgcccttggctggaatgccctgcagcctgcttcagcccagcaaagtattcatcttaccagtccatgccctgactcctgatgtcacccttccctgcatcacccttccctgtgtatttggtggataaggcttgattgaggctcaggtactgagtccctgctggcacattgagaaccagctgccaccccgatgataaggaagacagacccgggacttccatatgaattggatatgatcatctgacatgcaccctactaactgatggatcctgctgttaccccaaagctccagaaccacactggccagacacaggcatttcctgtcccctgaagagccactgaacccagcacaaaagagatctagagctctccaaacctatggaatggcaaccaaaaccatgcccagtttttgagttaagcctcattagtctcccttttcccttgacagtgtagaactgtgcagcgtagcactaaatgaatgagagcagaagcctcaggacagaactgaacccaccaggttgagctgacaacactgccaggggttctatccacagatggaatattcgctttgatcactgagttaggaggcatgggtgagggatgcagagcgccgctcgtcatgagacatcaagctatccaagtcaatatcctattagtagggatggcatgttataaaaggcgtaaagatctcacctgccccagctggaagcagtgattccattgccccagattcggaattgtgatttaaactaggcctctcttcaggcatcagaaccaaattagagtgctttatacgtgcaaggaactaatgcagaaagacattatgggtaagtcaagggagatgccccagccattgggcaaattcctctgactcctccctgatggaactaattctttttcttctgtgcccggatccta

SEQ ID NO: 30965 - DNA, 1295 bp, Homo sapiens
tgctcagtcttgcaactgaattttgaaaagtaatgaaatcacaaaaatatttaccagctcaaaatattttcaccagtttgtaaagtaaggagagtcacaatttattctggaaagagatgttattgaaatgccacctacacctttctgagagcatgttcaatgagaaactcaacttcaagtcttttgcacacctcctgcccactcatctatggcactaacaagtgaattacattgtacaaaattgggtattaacatttttgtcagcacaaacatacactggggggcctgatgcttattcacaaatgtagctcattttgaaagcaatcacaaaattcatgaggaatatttgcctgcctcagtatgatcctcatttgaaaatacatcttgtgtttccacataaaactggggtctagtggctcctttagactcgtatattccatttattccattatgtgaatcaggctgttgtttacttaggaagaacaattaaaaacattaaacttagtaagaaaccacttggtttatatttccaagcctaaatcaaaggttccccaaatttactttctgtcctaaaaacacatttgttatagaattcttaaaaacagaatttacagttgataaagtcaaataagcataaaacctctatactgtcacgtttcttttctagtgctctttaacttcaaaaactaacgcagaaatgaatgatgggagggaatgtttcaaatgactccgtttgtaacagacttttttatttttaagagacagaagtcttgttctgtcaccaaggttgaagtgcagtggtgtgattgtgcctcactgtagtctcgaactcctgggctcaaatgaccctccctcctcagcctccccagtagctgggactacaggtgtgtgccaccacgccttgtaataaacttttgatagaaagcgtacttttaccaaaagtgcaaacaattcagtcttccttaagatgaataaatgagacagcttcaaacccggactttgggtatgtggtaggaactaagcaaggtgtcaggtaaacatctgtgcccccagtgggctatttttcttatgtaagactcctgagtccttttttgtgctgttttataaaaacagcagagtaataactattagaaaacaattcttttaaarggaaaataacacaactctgactattggctctaccttcccacttcaaggcaactagtgaaccaccagccagtcaaagggctttgcccacattgtagctgtccacctaggccagcttccacaacacaagagccataatttctgagcca

SEQ ID NO: 30966 - DNA, 633 bp, Homo sapiens
ctctctgtgactgggaaaaatgttacactcacagattatctggtgagccagcaaataaagaatgagaagacaagatcaagacggtgtggatctctgtgggtgtcaactgctggggccaagctgagctggaaagagcaaggtggccctcaatgcagtggaaaggaagcagggaaaagcagagggcactggggttctcctaatgtagactcctattttgcattaattttgtataaatcacatcttttaaactgcaaatctccagaagagaggaaagtgattattaaagtagaagatttggttgtgcatgagagagtgaaaagcctgtttcaatgcagaagcccaaggctggaggcagccactcctttcagatgctggagatttgttgaactcaaacaagaaaagaataggctctggcataacagccacagtacttcattcccaggaaagaagagaaaagagaaaccacagaaaaacaccagttaggggaataaaaccaacagaaggagatgttttccyggaacaaagcacttggctcttcaatgtgtttctgcagatcagaggtgaccacgaggaggacgcagagaaaatcctaccttctatgcaggggtattcatgaaacacccaactaagtag

SEQ ID NO: 30967 - DNA, 564 bp, Homo sapiens
cctagctttccaagcatcctctccatctgacactcagtacggtccggatcaagtgggyggccaaccctaggagtttagactgggctcccttgatgcttctgtgttcccaagagaatgcctggggaagcctggggtagggaagaaaagattctcttttattttggaaacaaatcaaaaggggattagggaatgaagcaccttaagcaatgccgtcttaagacttctttttgagaccttagggtcttcgcaggcataactttggctcaacatttcccttctaaaagccaagaatggccagcaagggaaggggtggggaacagagggtgggaggagggagatcaggggaggtcggtgctgagaggcggttcctgccctcctcagctgctccaccataagaaaacgctgctccggccagcacagggcgcgggagggcccgctccttctccctggtacataggcattatctcttttttaaaatctgtatataatatatatatttatattctgtatatatatatatttatatatatatatttatatggtctatgtacatgtattgcacag

SEQ ID NO: 30968 - DNA, 573 bp, Homo sapiens
tgtgggctggagcgcaggggcatgaccacagctcactgtacccttgacctcctgggctcaagtgatcctcccacctcagcctcccaagtggctgagactataggtgtgcaccaccatactcaggttttttggttgtttttttttttgtattttttgtataracggaatttcactgtgttgcccaaactggtctcaaacaaccgggcttaagtgatccactcaccttgggctcccaaacagttgggattacaagcatgagccacagcacccagctgagttatcctaatttctcttttattttctcagtgtactttctacaaggctttacacatagttggtgctcaaaaagtatttgctggataattgatgacactttgcatttgtatagtatttttgctttttagagttctcttacatatgtcttctctttagtaaattagaattaactaataatgtgaagagaaagttatcagtaatcataatttgtttgactgttgtttttttttaacacaaattatccatgggcattgtataaaaattagaaaatttaaagagccaaaagaaaacgaaatt

SEQ ID NO: 30969 - DNA, 586 bp, Homo sapiens
ggtcttgaactcccggcctcaagtgatcctctgaccttggcctcccaaagtgctggtattacaggcatgagacattgcatctggcctttctctatgtttttaacaaagacatgtaacttgcatttgggatagacagtgctaagggatgctcacaaccggcagtaaatcatttagaaaaaaccttactgcataaatatgtctactatttgcaggtaggtgaaagtatttgtaaaggtgactttgcttggaaattcattgcataatccyactttttctgaaaatgcttaggaaacattttaaagtacaaacatagcttacttttaagcaaaactttgccttatctgggttctagggctataaatatcactggatacatgtgaaagctcatatataatcagcaatctgaactccaaaacagaatggagtcttatagctatgaagttcctggtcctctgaataacactggaaggtaaaaatgacaaaacaccagctgaataagtgaccattttagtttcataaatacattcccttatcttccagggctgcagcagcacaaaagttatacaatagcttcccttcatcatca

SEQ ID NO: 30970 - DNA, 586 bp, Homo sapiens
ggtcttgaactcccggcctcaagtgatcctctgaccttggcctcccaaagtgctggtattacaggcatgagacattgcatctggcctttctctatgtttttaacaaagacatgtaacttgcatttgggatagacagtgctaagggatgctcacaaccggcagtaaatcatttagaaaaaaccttactgcataaatatgtctactatttgcaggtaggtgaaagtatttgtaaaggtgactttgcttggaaattcattgcataatcctactttttctgaaaatgcttaggaaacattttwaagtacaaacatagcttacttttaagcaaaactttgccttatctgggttctagggctataaatatcactggatacatgtgaaagctcatatataatcagcaatctgaactccaaaacagaatggagtcttatagctatgaagttcctggtcctctgaataacactggaaggtaaaaatgacaaaacaccagctgaataagtgaccattttagtttcataaatacattcccttatcttccagggctgcagcagcacaaaagttatacaatagcttcccttcatcatca

SEQ ID NO: 30971 - DNA, 773 bp, Homo sapiens
cagaaataataaaatttgatgcattaaaaagaaattaagcactttgtgtaaatgacagaccttgacatttgtacattgttttcattttaatagaaagagtactttctggcctctgatgctggagggactgggaggtgaggggtctgcagactggctcaggatggaggctgctcagaaggtgagcctggctgtgcggggaccatgcattaactaggatcagcggatgacaggtcgtgactcaaccttctcaggggtgtgccactgtgtgggagctgagaacgctataattctactactgattgttaggaaaaagaaagacaagaagaaagcaagacagaaagtcaaacagtgtaatcagaggagacctcccactgagctayggaatcggctttcctgcctccagctgagcacccagcaggggtgaaagctcctgtctcctcctccaaggccatttctgcagaactcagctccaggtgagacatgaacctgtctcgttcttaatctctccatttcactcctgcctgtacctggcttcctcagctcatcctcaccctgtccctcccagggacaagggaccccggagtggctactccccacttaactgataacagaaaaccaaactgatccctgagctcccaggcagtgttgtgaagctcctcctctggacagagcactggagacatgactcggtcaagggcactgaccctcatggaatgcagcccagggagtggctacagtgcttagccacatcaacatgtcagctcttcccaggt

SEQ ID NO: 30972 - DNA, 773 bp, Homo sapiens
cagaaataataaaatttgatgcattaaaaagaaattaagcactttgtgtaaatgacagaccttgacatttgtacattgttttcattttaatagaaagagtactttctggcctctgatgctggagggactgggaggtgaggggtctgcagactggctcaggatggaggctgctcagaaggtgagcctggctgtgcggggaccatgcattaactaggatcagcggatgacaggtcgtgactcaaccttctcaggggtgtgccactgtgtgggagctgagaacgctataattctactactgattgttaggaaaaagaaagacaagaagaaagcaagacagaaagtcaaacagtgtaatcagaggagacctcccactgagctatggaatcggctttcctgcctccagctgagcacccrgcaggggtgaaagctcctgtctcctcctccaaggccatttctgcagaactcagctccaggtgagacatgaacctgtctcgttcttaatctctccatttcactcctgcctgtacctggcttcctcagctcatcctcaccctgtccctcccagggacaagggaccccggagtggctactccccacttaactgataacagaaaaccaaactgatccctgagctcccaggcagtgttgtgaagctcctcctctggacagagcactggagacatgactcggtcaagggcactgaccctcatggaatgcagcccagggagtggctacagtgcttagccacatcaacatgtcagctcttcccaggt

SEQ ID NO: 30973 - DNA, 773 bp, Homo sapiens
cagaaataataaaatttgatgcattaaaaagaaattaagcactttgtgtaaatgacagaccttgacatttgtacattgttttcattttaatagaaagagtactttctggcctctgatgctggagggactgggaggtgaggggtctgcagactggctcaggatggaggctgctcagaaggtgagcctggctgtgcggggaccatgcattaactaggatcagcggatgacaggtcgtgactcaaccttctcaggggtgtgccactgtgtgggagctgagaacgctataattctactactgattgttaggaaaaagaaagacaagaagaaagcaagacagaaagtcaaacagtgtaatcagaggagacctcccactgagctatggaatcggctttcctgcctccagctgagcacccagcaggggtgaaagctcctgtctcctcctccaaggccatttctgcagaactcagctccaggtgagacatgaacctgtctcgttcttaatctctccatttcactcctgcctgtacctggcttcctcagctcatcctcaccctgtccctcccagggacaagggaccccggagtggctactccccacttaactgataacagaaaaccaaactgatccytgagctcccaggcagtgttgtgaagctcctcctctggacagagcactggagacatgactcggtcaagggcactgaccctcatggaatgcagcccagggagtggctacagtgcttagccacatcaacatgtcagctcttcccaggt

SEQ ID NO: 30974 - DNA, 1025 bp, Homo sapiens
atcctctactgtgagtggtgaccagccctgagaaggggcacggcgtggagagtgagggattttcactgtctgcactatattcttatgtatcccttgaaccttgcactgctgataacaagaatgctgttaatattattcttaaattatttgtgcaattagaaaatacaagtggccaagtgcagtggctcatgcctataatcccagctgcttgggaggccgaggcaggagaatcacttgagcccaggagttcaagaccagcctgagcaacatagggagactccatttctacaaaaagaaatccaaaaaattagccaggygtggtggcccgtgcctgtagtcccagctactcaggaggctgaagtggaaggatcatttaagcccaggagtttgaggccagcctgagcaacatagtgagaccctgtctctaaaaaaagaaaagaaaaaaaacagaaataaataaatgaataaaataaaatgacagcatgaaggcccttcgtggcatgatagttacacaaatctatacatgtgattaaaaaaaaaaaaaaaggtcgattttatggtatcctcttttaaaaaataaaagttaaaaataagaccaaaaaaatgaaaaagactagcaagaatgatgcccaaaagtaaaaaaaaaaaaaaaaaaaaaaaaaagttgttacctctggataatggggattataggtagtttctttccttaatcacctatattttactataccttctagattttctacaaaggttatatattgctttgagaataagacaaaaatacagttaaaagcttaaaaaaaaagatgacagcagaaaatcttgagtctgatggggacctgctgccagaaacagcccggctcctggaaggcagtgcagatacatgctggaggcaagatatggcaaagaaaacatcccatctcagacctgttgctaaggaaaatgggtcgatgagtcagggggtaggcaagggtagagccacgtggtccccaagaagccctgtagcacaggggagaggaagagca

SEQ ID NO: 30975 - DNA, 1025 bp, Homo sapiens
atcctctactgtgagtggtgaccagccctgagaaggggcacggcgtggagagtgagggattttcactgtctgcactatattcttatgtatcccttgaaccttgcactgctgataacaagaatgctgttaatattattcttaaattatttgtgcaattagaaaatacaagtggccaagtgcagtggctcatgcctataatcccagctgcttgggaggccgaggcaggagaatcacttgagcccaggagttcaagaccagcctgagcaacatagggagactccatttctacaaaaagaaatccaaaaaattagccaggcgtggtggcccgtgcctgtagtcccagctactcaggrggctgaagtggaaggatcatttaagcccaggagtttgaggccagcctgagcaacatagtgagaccctgtctctaaaaaaagaaaagaaaaaaaacagaaataaataaatgaataaaataaaatgacagcatgaaggcccttcgtggcatgatagttacacaaatctatacatgtgattaaaaaaaaaaaaaaaggtcgattttatggtatcctcttttaaaaaataaaagttaaaaataagaccaaaaaaatgaaaaagactagcaagaatgatgcccaaaagtaaaaaaaaaaaaaaaaaaaaaaaaaagttgttacctctggataatggggattataggtagtttctttccttaatcacctatattttactataccttctagattttctacaaaggttatatattgctttgagaataagacaaaaatacagttaaaagcttaaaaaaaaagatgacagcagaaaatcttgagtctgatggggacctgctgccagaaacagcccggctcctggaaggcagtgcagatacatgctggaggcaagatatggcaaagaaaacatcccatctcagacctgttgctaaggaaaatgggtcgatgagtcagggggtaggcaagggtagagccacgtggtccccaagaagccctgtagcacaggggagaggaagagca

SEQ ID NO: 30976 - DNA, 1025 bp, Homo sapiens
atcctctactgtgagtggtgaccagccctgagaaggggcacggcgtggagagtgagggattttcactgtctgcactatattcttatgtatcccttgaaccttgcactgctgataacaagaatgctgttaatattattcttaaattatttgtgcaattagaaaatacaagtggccaagtgcagtggctcatgcctataatcccagctgcttgggaggccgaggcaggagaatcacttgagcccaggagttcaagaccagcctgagcaacatagggagactccatttctacaaaaagaaatccaaaaaattagccaggcgtggtggcccgtgcctgtagtcccagctactcaggaggctgaagtggaaggatcatttaagcccaggagtttgaggccagcctgagcaacatagtgagaccctgtctctaaaaaaagaaaagaaaaaaaacagaaataaataaatgaataaaataaaatgacagcatgaaggcccttcgtggcatgatagttacacaaatctatacatgtgattaaaaaaaaaaaaaaaggtcgattttatggtatcctcttttaaaaaataaaagttaaaaataagaccaaaaaaatgaaaaagactagcaagaatgatgccmaaaagtaaaaaaaaaaaaaaaaaaaaaaaaaagttgttacctctggataatggggattataggtagtttctttccttaatcacctatattttactataccttctagattttctacaaaggttatatattgctttgagaataagacaaaaatacagttaaaagcttaaaaaaaaagatgacagcagaaaatcttgagtctgatggggacctgctgccagaaacagcccggctcctggaaggcagtgcagatacatgctggaggcaagatatggcaaagaaaacatcccatctcagacctgttgctaaggaaaatgggtcgatgagtcagggggtaggcaagggtagagccacgtggtccccaagaagccctgtagcacaggggagaggaagagca

SEQ ID NO: 30977 - DNA, 421 bp, Homo sapiens
caaaggctggaacgtgagagtcaggctagcagggagagcaacacgtgtgaaggtccagaggcgggcactggtctgctctttagaaacagcgygaaagccagggtgttacagcagggcatgagaggcaggcagatggtggtgggcagcgcctcaggaggcatgaggcagccaggtggccctgtgacagcatgccgctttactacccaccgaggggctttcaactgggatgcgacatggcggccaggggttccacttcgtgggggcatctgactccttccgtgcagggacaccttagtgaaaagtcaccgccgtactttgggagagatggttgcgcctgcgcgtctatcctttcgcttgggacattgagcatggcgacaagcccgaggcctggagggaacctgtggtgcctttgcccggagcc

SEQ ID NO: 30978 - DNA, 655 bp, Homo sapiens
aaatattcacacattcctctagacttttccttgcctactaacacctcatcttctgcatgttgtgagactagtcatattcagccaattaatattcagccaattcggctaaggaaggtttactcaaacagctgtttaacatcttttctgtacttctcactttattccctgcagggaagaagaacaaacaacaaaccaattgcagtgtgtataagaaaataaaggctgggcacggtggcatatacctataatcccaacactttgggaggctgaggtgggcagatcacaaggtcaggatttcgagaccagcctggccaatatggtgaaacccagtctctactaaaaatacaaaaattagcyaggtgtggtggcgggttcctgtagtcccagctactcgggaggctgaggcaggagaattgcttgaacctggaaggtggaggttacagtgagcaaagatcttgccactacactccagcctgggctacagagcgagactccatctcaaaaaaaaaaaaaaaaaaaagaaggaaaaaaaaagaaaaaaaaaaagaagaagaaaacagggagtcatgcaggctgtggaaacacaaagaaacacacagacacattgtggtttccccccttaaccccttaagtgattactagtttcacagtagaa

SEQ ID NO: 30979 - DNA, 1040 bp, Homo sapiens
  misc_feature (1)...(1040): n = A,T,C or G
ttgtgatgaattctccctgtttgcttatgttagtttgagcaggtctggatttaaacagtcccatttccccttcctctgcccctcattatatactcattactaatggctaataactggatgagagatacatgggggttcctataccctatttctttttctaaagaggaatggttcattgccattgtcttgtttttcttccagtattgtatactgggcgtgttgtgcatggtttaatctgattgcttagtccacaaatggcagctggtgagcattcatatctaggggagcagtgagcctctgcgtgctgcagctcacagattgaatattctcccatcagggatggggaatacagtttgtggcagtcaatgagatggctggtgctattgtttggcttatggttntgaatatgtncccaccnnaaaattcatggcctgaaatntnntgatccnnccaatgggtggtgggtgggtgggaagggtngggggccctaanaanngggaagtgggtttnggggtcaacagngnngggcaggaatcccttcatggaaatggggcttgganntgtcattcttggtgggcannttgagntggaagtntcttcggctttttggtgagaactgggatnntaggtttccatggnggaatgggatcaagttcccttgggacaggtgggttgttataaaagccaggaatrccccctggnggttcatggcctgtctgctttccccttttgaccttcaccatggtaagatgcacacaggaagcccttgccagaaggcagggtcatgcccttgaacttccagcctccaaaactataaactaaagaaacctcttttctttataaattacccagtctcagttctgttatagcaacacaggatgaactaagatagctggttctattgggcagaggcatttctgggtgtataggaaggagggtttacggtaagaggtagaacaaaatatagaaaacaaggtttgagtttcatctcccactccccttccctgagtacttcgtgtggcagccatgtttgtgctgct

SEQ ID NO: 30980 - DNA, 506 bp, Homo sapiens
tgtatttataattggtgagtttttttcctgggtaaaggaaattgtaaatttgtatgttmacaggtgtattaggccattctggcactgctatgaagaaatacctgagactgagtaatttataaggaaagaagtgcagttggctcactgttctgcagtctgtataggaagcagagaggcatatgcttctggggaggcctcaggaagcttttactcatggtagaaggcgaagcagcagcaggcacttcatatggtgaaagcaggaagcaggagcaggagatggggagtgagcaggggtgccacacattttttttttttagacagtttcactctttttgcccaggctggagtgcaatggcgcgatctcggctcactgcaacctctgcctcccgggttcaagcgattctcctgcctcagcctcttgagtagctgggatcagaggtgtgcaccaccatgcctggctaattttgtatttttagtagagatagggtttcaccatgttggccagg

SEQ ID NO: 30981 - DNA, 615 bp, Homo sapiens
gtcctgatccagtttcatgttttctgatttagaattgtgaygctttggcatactgaacgtgggctactttcggggatagatatgtattcactaaagtcacagagactgatgtataaaatcaaaatgccaatgacttgttttacaataagaactaaaaccatcatgaagattatagtaattttatcagtgtaaccacatctttccctgaaagcagatcatataagaaagcaaattatattcagaaatttgcttggtgttcacagtataaagccacaggccttgaataccattagttcttaattctagtcttaagaaaacattcaattgtttaagaatacactcgcgctggatcaaaagcatgtttggatgggggctgccaatggtttcacaagtgttttgttatcctttgtttccaagactgaggccctcctactaattgacatattatttctttgatatgctaatatatcaataaagttataggttgtcttaaaggttttagggccatatttttctttttgagatgactttagtgatctatttttctaatccagagtgtattgaaataccttttaactaagaaagtagtctccttatttccaagttcttaggtat

SEQ ID NO: 30982 - DNA, 992 bp, Homo sapiens
ggatccattccttttatccatctacaatcagtggacagacaactccattttgaagaacaaatacgttagaagaagaatttttttctcctatacaatctacagtgtaactgatacacattcaaatcatcgtaatacagtgatcattataaaatgagagtgttttctgcaaagaggaaaaaaaaaactgagcaaacatctagtgactttgttaggagcttaatgtgctctaaatatgatgtccttcaaatattttatttgaaatatttgataggtcttagaaaattttgctcatggaattctctgagaactgtaacacaccacctattcctttttcgctttgctttcggtcacccaaatttttttagaaatatgtgaacgagggtctgtttgtttccactgaagcaaatatagccacttgctcacactggtggcttcttttactgaagtccgtgaatatgttagaaactcttgtatgaaaatacagcaacccaatttgtccctattgagcctactttgtgatttccatgccctgctgcctggtgtgtatacactgagatccactttgttaaagaacaaaactgggtttgtkacttttttgtaggcttattattaagtctgagcattctggtgtgaggttaggaacgctggtttcagactctggaaaacagagttctaatcctgaccctctgaagaccttctcactttgggcaaatctttcctgagccttgtttccttgaggaaaatgtagagatgtgtgatattcacatttcttacgccctacagttatgtgaggaatactgtatgtttcagttatgcacagataaattagttatttcttctcaaagaatcctctgttaaaaattattccccaaatagctctttttcgacacttgtctcaaggtggtcacattttaatttctgccactgatacacaaatttcagtgataagaaacccctgaatgacttgagagtttcctgagagatgggatccc

SEQ ID NO: 30983 - DNA, 1060 bp, Homo sapiens
aagtattccaaagaacccctaaaaatgacaagaaaaataaaatggaagcgattgaatggacataaacaggctattcacaaaaatggaaaattttcagccttatcagtggtcaggataatacaattaaaacgaagagctattatcattgtgctcataaaattagcaaaacttacgacttgtaacctagaatgctcmgtgggaagataaattaatacagtagtctgactttttttaaaatgaaatgttctttaattcaacaatgtcaattctgggaattgatctcaggagaattcaaaggatctcagcttacaattatacataaatggatatttatagcaacactgtagtagaaaaaccttggaagtaatctgaacacccatcagtgcaggaataattgaataaataatgtgcatctatttttggtattactatgaagctattaaagagaatgagttacgtctgttatcactggtctgtagggatgcccacgatatgcagtttagtaaaaaacacaagctgcagagtaatatacatagtaggtgccatcattgctctgaatgtccttgcttcattgcctttgacgattcttttctcatgaaacttgctaacagtctcttaccatctatatgtctaattcttctttcacattcatattcaccaggagcctcagtttatcagggaagctaaattgaccaacccagattggatacatgtccactacctgtgccttcagtttatcctgagcaggtctcagtcatagacatttattcaactcttggtttcttttagacagcaaactctttgaagccagggatgattgatctcctctcagcatttccaatataatatgtatatgtagtgattgacataagggggtaatttatcaaacttttttgaatgaatgaaaaaaagtgcggtccaaccacattccaaaagcaaatgtataaataaataatggtagagtattagaactggatggaaacatcaccaaatactgaagagtgtcatttgctaagagttttaataccgaagcaacggtttccagcttatgggtcgccaa

SEQ ID NO: 30984 - DNA, 1060 bp, Homo sapiens
aagtattccaaagaacccctaaaaatgacaagaaaaataaaatggaagcgattgaatggacataaacaggctattcacaaaaatggaaaattttcagccttatcagtggtcaggataatacaattaaaacgaagagctattatcattgtgctcataaaattagcaaaacttacgacttgtaacctagaatgctcagtgggaagataaattaatacagtagtctgactttttttaaaatgaaatgttctttaattcaacaatgtcaattytgggaattgatctcaggagaattcaaaggatctcagcttacaattatacataaatggatatttatagcaacactgtagtagaaaaaccttggaagtaatctgaacacccatcagtgcaggaataattgaataaataatgtgcatctatttttggtattactatgaagctattaaagagaatgagttacgtctgttatcactggtctgtagggatgcccacgatatgcagtttagtaaaaaacacaagctgcagagtaatatacatagtaggtgccatcattgctctgaatgtccttgcttcattgcctttgacgattcttttctcatgaaacttgctaacagtctcttaccatctatatgtctaattcttctttcacattcatattcaccaggagcctcagtttatcagggaagctaaattgaccaacccagattggatacatgtccactacctgtgccttcagtttatcctgagcaggtctcagtcatagacatttattcaactcttggtttcttttagacagcaaactctttgaagccagggatgattgatctcctctcagcatttccaatataatatgtatatgtagtgattgacataagggggtaatttatcaaacttttttgaatgaatgaaaaaaagtgcggtccaaccacattccaaaagcaaatgtataaataaataatggtagagtattagaactggatggaaacatcaccaaatactgaagagtgtcatttgctaagagttttaataccgaagcaacggtttccagcttatgggtcgccaa

SEQ ID NO: 30985 - DNA, 1267 bp, Homo sapiens
ggaggaggaagaaatgattttccaaatcaagcctgtatctaaaagagactgaggtaacctcaaatggagattgatctttcatcggcagggtctcctcaccttgcccccayattgccagtggaaattgcaggggtgttggagcaaattgagatctgtctaagaatataaaagaaattttatttttattgcatgtcatggccattgactatatgagtacgtttttgaccctagttcaaaataatgcttacctactctttatatgacaagaaagggcagcagttgtaacagacctagatccccaagcctgtcttgccctctggctagctgtatgacaatcataagtcttttaaaccataggagagcaagagggagagttcataatctcataatcttcagctctgtgagtccaagtattagggacagtcttcattctcttgagcattcatggtaagttttctttattcttcatcctataatgtgatatggagttgaaaccattatttaaaatatgtaactatcagtgatggtgccattagatctcttacttcataaagacaaatcgctttagaatgatttttacctccctccacaagttgtgtgctttaagacattcagagggggaaacaagtccaggatagtaaaaattaaatacagcttccagaggatttatcaggtaaatgttatggattgttgtgatttaatttatgggattagtttgactttcaattaccaagcatcacactgaatcactttgtattttgaactctgtaactgggactccttacactcgatctttcatttggagagggattatcaataattagacactgtggccttattgatcagctaatcaatacccacattaatcaccagtggtctaaaaacaattcagtctttgcactgaaaggaatcagtgtgatcaaattagcatcttttactacaagctgagcagagatatggctttccaaagggaaggcaatgcaggtagggtgtacttacagaattctgagctcagtcacctgttactacacggaagtgatcttgtgatagtcaagttttgattatggccaggcgctgtggctcatgcctgtaatctcagcatttgggaggccaaggtgggcagatcaagaggtcaggagattgagaccatcctggctaacacagtgaaatcccatctccactaaaaatacaaaaaattagccgggcgtggtggcatgtgcctgtagtcccagctacttgggaggctgaggcaggagaatcacttgaa

SEQ ID NO: 30986 - DNA, 1267 bp, Homo sapiens
ggaggaggaagaaatgattttccaaatcaagcctgtatctaaaagagactgaggtaacctcaaatggagattgatctttcatcggcagggtctcctcaccttgcccccacattgccagtggaaattgcaggggtgttggagcaaattgagatctgtctaagaatataaaagaaattttatttttattgcatgtcatggccattgactatatgagtacgtttttgaccctagttcaaaataatgcttacctactctttatatgacaagaaagggcagcagttgtaacagacctagatccccaagcctgtcttgccctctggctagctgtatgacaatcataagtcttttaaaccataggagagcaagagggagagttcataatctcataatcttcagctctgtgagtccaagtattagggacagtcttcattctcttgagcattcatggtaagttttctttattcttcatcctataatgtgatatggagttgaaaccattatttaaaatatgtaactatcagtgatggtgccattagatcycttacttcataaagacaaatcgctttagaatgatttttacctccctccacaagttgtgtgctttaagacattcagagggggaaacaagtccaggatagtaaaaattaaatacagcttccagaggatttatcaggtaaatgttatggattgttgtgatttaatttatgggattagtttgactttcaattaccaagcatcacactgaatcactttgtattttgaactctgtaactgggactccttacactcgatctttcatttggagagggattatcaataattagacactgtggccttattgatcagctaatcaatacccacattaatcaccagtggtctaaaaacaattcagtctttgcactgaaaggaatcagtgtgatcaaattagcatcttttactacaagctgagcagagatatggctttccaaagggaaggcaatgcaggtagggtgtacttacagaattctgagctcagtcacctgttactacacggaagtgatcttgtgatagtcaagttttgattatggccaggcgctgtggctcatgcctgtaatctcagcatttgggaggccaaggtgggcagatcaagaggtcaggagattgagaccatcctggctaacacagtgaaatcccatctccactaaaaatacaaaaaattagccgggcgtggtggcatgtgcctgtagtcccagctacttgggaggctgaggcaggagaatcacttgaa

SEQ ID NO: 30987 - DNA, 1471 bp, Homo sapiens
cccactccactggtccatctcaacctatggctgctcctcctccaatcagaaccttccccttgcactccaatgagtcacctgccattccttactcatgtccttccctaaaggcctttgtgctctggcgcaaagagctctgtctggaacaccatttagtttcattcccatccatcaaactccatcccgtcctcgacagcccagctgaaacatttcttccagggaatttgctcccttgtgagtatacttactgagttgcattgtaatttgtgtaagtgttggtgtcctcacaaaaaaggagcttctttaaggtcagggataaagttgtaatctaacttcagggccatccataaaggagatattcagtgaaaggtggctgagtaaatgaatggatgactccagaaaacttctcccttcaaggcctcagcttcttccactttagaatgaagaagtgggaggagctgaattagagtttcctgcagcattttctgagaagtcctagcactgccagatgcctctaaagaacatattctgaggcctaatgggtttgagagatgctttagaccccctctgggagtcactgtggctctacagagaattcctttagtctctgtttaagtcaacaatgcccagatccattcagccacagaatatctagaggaagaagtcaaccaaagaaggctcattgggtaatgttagctgagacatgactttggctccttccaactcaagaattctataatcatcatcaaactctgatgaagctgaacattacaaatatatgcgtttgattcagaaaaaaaataatatcccagagctctccaaaggtgaggaggcasgaagcttgccaccatgactggggctgttcaaaaagaatggatggtccccagcacttcacgtggaattcaaatatgggcaatatcagggggtcttcatttggggtccacagacatgcttgtgggatgagtatgaacccctgagattatacatgaatttgtgtggatgtacactgtcgctgaataaggactcaatactttcaatgcattctcaaaagggactgtgagtacctaatggccaaggatccctggcctacataagggttcagaagggtagtgcataagaaacgaaacacaaccaaaccccatcagctcgaggatgagggaatacaacaagtcttggaaccatccctctccattgctggaattctgcctccaatactctcactaaagaattatctgcattaacactcattatgcttgttacctcttcaccttggccccatacttgacctctccatatcctcatttccttatctgtctattgggaacagtacagtataattgggagggtcaaatacagtgatgaagcatcacataacttgacagtttaacggtagtggggtacccaaccaaatcacctgccatttaaaaaacaggaaaatcctcactcagtttaaatctaagagggagaaatg

SEQ ID NO: 30988 - DNA, 562 bp, Homo sapiens
acaaaagtgatggcacttgcttcgtgaatcagactgggaaataaaaggaatttagacaagaaatggtatcactgacttgctttatctctcatttttgggagctctagatgttagcaggaacagatagagatgatgctgtaagcacctacatgctatgtacactgtttggacccaagaaacaagggagatacgtagctgggatggatcatgacacattttttcatcaggtttcttctgcctttaccaaaagaaaacactaattatcctatttttggtctgggtggaaaccacaggttgatgtctgtattagtctgtcctcatgctgctaacaaagacatagtcaagactgrgtaatttataaaggaaagtggtttaattgactcacagttccacttgactggggaagtctcacagtaatggcggaaggtgaataaggagcaaagtcacatcttacatggcagcaagcaggagagcttattcaggggaactcccatttataaaaccatcagatctcctgagacttattcactaccatgagaacagtatgggaaaaaccgccccc

SEQ ID NO: 30989 - DNA, 1189 bp, Homo sapiens
tagagaacascaacagtataaatggcccagtactatctaaggtatcactggtctaccgctgcccaggaccaagtctgttttcagtgtggaacgacagcaaaccaatgtaactacagggacaggtgaaggaacaggaagaggctgtttagagactagaaattcctacaagttcctagaagtcaagaccaagccaggatctccagaccaaacacagagttgctactgaaaccaacaaaacacatctcaaaacagtcagtggcctagcctgcctcaaccatgaagcatcctatacttgtcttccctaaactcccttcagtacctctccgcttctaactgctgctgttctggctttgtaaaggtagccctccatttctaaggtgcaggcagttggtatgcagttggcttatagaataagcatggtcatttggataataatctctatcacatgcatcagacaaaattcaaatgatcagcttcatgggatgttgcccatttccacagccactcagctatgggctgctcatcctccctggatgaccaagtccagaactctatgtgggtataacatggagcaacccatgttagatggtggtgccccaggggcctgagcacgtatggatgtgtaggccgtggatctaagaggagtttgtggagccagcattctggggcattttcaggttaatacctgagagttagcagtctgatcttagatcacaaatcaaaatgggacaagcaagaaggggcatcaaaatttgaagccaggaggaggcagagccaagggaaactgctgtgaagggaaggttgatagcaatgtttggaagatatgtcctagaagtgtttcctaatggtcagcattctacttgataagcctagagatttcatcctaaacctagtaaatcagaatttgcaaaagagcagcttgggaacctgtgtagtttttgtttttgtttatcactgtgcaagtttcagaaacattgctagatgaaatggttgtcaaccctggctgcacattagaaccaactagaaagacttgtaaaaaaatactggtgtccagatctcacctcacatcaattaaatcagaatctctgaaggtggaactagacagctatcttttcaaatgttctccaggacattttgatggtatatgaatgacttgagagtcattgtctcagagaaatctccagtgtca

SEQ ID NO: 30990 - DNA, 1189 bp, Homo sapiens
tagagaacagcaacagtataaatggcccagtactatctaaggtatcactggtctaccgctgcccaggaccaagtctgttttcagtgtggaacgacagcaaaccaatgtaactacagggacaggtgaaggaacaggaagaggctgtttagagactagaaattcctacaagttcctagaagtcaagaccaagccaggatctccagaccaaacacagagttgctactgaaaccaacaaaacacatctcaaaacagtcagtggcctagcctgcctcaaccatgaagcatcctatacttgtcttccctaaactcccttcagtacctctccgcttctaactgctgctgttctggctttgtaaaggtagccctccatttctaaggtgcaggcagttggtatgcagttggcttatagaataagcatggtcatttggataataatctctatcacatgcatcagacaaaattcaaatgatcagcttcatgggatgttgcccatttccacagccactcagctatgggctgctcatcctccctggatgaccaagtccagaactctatgtgggtataacatggagcaacccatgttagatggtggtgccccaggggcctgagcacgtatggatgtgtaggccgtggatctaagaggagtttgtggagccagcattctggggcattttcaggttaatacctgagagttagcagtctgatcttagatcacaaatcaaaatgggacaagcaagaaggggcatcaaaatttgaagccaggaggaggcagagccaagggaaactgctgtgaagggaaggttgatagcaatgtttggragatatgtcctagaagtgtttcctaatggtcagcattctacttgataagcctagagatttcatcctaaacctagtaaatcagaatttgcaaaagagcagcttgggaacctgtgtagtttttgtttttgtttatcactgtgcaagtttcagaaacattgctagatgaaatggttgtcaaccctggctgcacattagaaccaactagaaagacttgtaaaaaaatactggtgtccagatctcacctcacatcaattaaatcagaatctctgaaggtggaactagacagctatcttttcaaatgttctccaggacattttgatggtatatgaatgacttgagagtcattgtctcagagaaatctccagtgtca

SEQ ID NO: 30991 - DNA, 1189 bp, Homo sapiens
tagagaacagcaacagtataaatggcccagtactatctaaggtatcactggtctaccgctgcccaggaccaagtctgttttcagtgtggaacgacagcaaaccaatgtaactacagggacaggtgaaggaacaggaagaggctgtttagagactagaaattcctacaagttcctagaagtcaagaccaagccaggatctccagaccaaacacagagttgctactgaaaccaacaaaacacatctcaaaacagtcagtggcctagcctgcctcaaccatgaagcatcctatacttgtcttccctaaactcccttcagtacctctccgcttctaactgctgctgttctggctttgtaaaggtagccctccatttctaaggtgcaggcagttggtatgcagttggcttatagaataagcatggtcatttggataataatctctatcacatgcatcagacaaaattcaaatgatcagcttcatgggatgttgcccatttccacagccactcagctatgggctgctcatcctccctggatgaccaagtccagaactctatgtgggtataacatggagcaacccatgttagatggtggtgccccaggggcctgagcacgtatggatgtgtaggccgtggatctaagaggagtttgtggagccagcattctggggcattttcaggttaatacctgagagttagcagtctgatcttagatcacaaatcaaaatgggacaagcaagaaggggcatcaaaatttgaagccaggaggaggcagagccaagggaaactgctgtgaagggaaggttgatagcaatgtttggaagatatgtcctagaagtgtttcctaatggtcarcattctacttgataagcctagagatttcatcctaaacctagtaaatcagaatttgcaaaagagcagcttgggaacctgtgtagtttttgtttttgtttatcactgtgcaagtttcagaaacattgctagatgaaatggttgtcaaccctggctgcacattagaaccaactagaaagacttgtaaaaaaatactggtgtccagatctcacctcacatcaattaaatcagaatctctgaaggtggaactagacagctatcttttcaaatgttctccaggacattttgatggtatatgaatgacttgagagtcattgtctcagagaaatctccagtgtca

SEQ ID NO: 30992 - DNA, 1386 bp, Homo sapiens
taaagcatcttatttatttaatcctcacaaaaattttattttatatattttttccaaacattactaatcattttagcaaaagcatgttaaaaatgttcctctatctgttgtgttgaagttttaaagactcagaatatgaagtgttagcaaggtttggggataagattaccctcatctacatagggggaataagcacagaatttttggaggacaatttggctgcttggtcactctttaaaatgatcatgacttttgacttagcaattccacttatagaaaattctcctgcataaatacttgcatatatgtattaaaatacatgcataaggataattagagaagtattgtttctgatagaaaaaaatggaacaataatgttgcagtgcattactgttacaaaccaagaataagacagagaaatgtgattactcttttaccttaaattgtttgaaaaaatttgcccaagagttggaaacaggcaaaagaggtttctggatattcttccaatggagtagagttgtccatggtgactctacatgaatgatctgattccataaggtgggtgcaactttttcattctattaagtaagctattttataactgaaatggtagaagttttagaaacagatattaatgcaaatgattcctgttcataggaatgcaaatgaattactccatataaatacaatcgacttgggccttatggaaaaagataatctcaaacataaaatttaattgctccatggaatattaagcagttttacatttattaacaaattatatttcacaatcctgattgcatatatatatataaaatgtttgttcttcaatttggcctttgaacttgttatttaaccattatttaacatattattgactccctgattaatttatgaatttagaacaaactttgatgtgattgttttatatttgcatgagagtcaggataggacttttgtgaaagttatagatcagtacaatactaaagtggttaacttttatgagacaagaagttctttattgcatggtcttggctatggctgtaaccattttttcttatttaaaatcaaaatggattttattatgccctggacaagaattagattctatttagtgatactgttgaactctaggttgggataattatgaggcttatctgttatacatgaaaacaagaaacgttttctggacgttctgtgtcatcttatctcaaggtccttcaacacagatctaagataaaatttatgctaaaagagaaggggattatggacacgaaaaaaattgaggcattctagtgaacttatttaaaaaaacaaaaccaaacaaacctcagcttctgtgaaagttaacrtattaagaatagcccttaaaatattttttaattt

SEQ ID NO: 30993 - DNA, 924 bp, Homo sapiens
acatacycagtgggtcccccagggaataggaagagttctactataattgtattgctgtaatgtgtaatttaagtaacaagagtgctgtgtctcatttgggcttaggcaaaaatagacagtttagtttggttaaaaaagtccaggttggattacaaatgttattatcctgtacccattggcattggcatatccattcagaaatgttagcagggatgattctccaaggtagcccattcctggcggcctccggcagcttgatgcatagccagtgccgactgcagttggcttccgttgcagcagtggctacccagttgttgaactcattcccagcctcagacgtgatgacccaagtactgatttctagcagacagattattcgtaataacaaaactggaggggaacatgacattgtttttcatctttaggaaactgtattatgccttcattttttgctcctatagctacaaggtcaccagccttaggggcgggacctgatggacactgcacccatattttggctcaaggttttaagttgcccacccactccgatggacccaaattttccggttctatatgttgtttctattggggcagaaatttcctcaggggttaattgttgacaaggtaccactaacaattgagcaacccacatctgcagatttatagcaaaagaatctggagtggtattgtataaaatgagctttaactctccccagtaatcactatcaattataccaccataccttataatgcctctcattgtaaggcttgaacgtgttgtaatccattcatccgcattcaaatttgcagttatggtggaagtgttggtctgttgatctgcctgctgattaaatagtctgttaagagaaagcagagatgcttgagcatcagcatggagaacagtgataatggtggtgtgtgcca

SEQ ID NO: 30994 - DNA, 924 bp, Homo sapiens
acatacccagtgggtcccccagggaataggaagagttctactataattgtattgctgtaatgtgtaatttaagtaacaagagtgctgtgtctcatttgggcttaggcaaaaatagacagtttagtttggttaaaaaagtccaggttggattacaaatgttattatcctgtacccattggcattggcatatccattcagaaatgttagcagggatgattctccaaggtagcccattcctggcggcctccggcagcttgatgcatagccagtgccgactgcagttggcttccgttgcagcagtggctacccagttgttgaactcattcccagcctcagacrtgatgacccaagtactgatttctagcagacagattattcgtaataacaaaactggaggggaacatgacattgtttttcatctttaggaaactgtattatgccttcattttttgctcctatagctacaaggtcaccagccttaggggcgggacctgatggacactgcacccatattttggctcaaggttttaagttgcccacccactccgatggacccaaattttccggttctatatgttgtttctattggggcagaaatttcctcaggggttaattgttgacaaggtaccactaacaattgagcaacccacatctgcagatttatagcaaaagaatctggagtggtattgtataaaatgagctttaactctccccagtaatcactatcaattataccaccataccttataatgcctctcattgtaaggcttgaacgtgttgtaatccattcatccgcattcaaatttgcagttatggtggaagtgttggtctgttgatctgcctgctgattaaatagtctgttaagagaaagcagagatgcttgagcatcagcatggagaacagtgataatggtggtgtgtgcca

SEQ ID NO: 30995 - DNA, 498 bp, Homo sapiens
tcacaagcttaccatctatctatgtagtcgaatgtatggacttaacatgtgaactttaagtttgtgaattccttcttgggtttaaaaatcctttctctgagtttctctctctctctttttaattatcagtgttttctatttccttatcttcttcttcyatcttttgttctttatatagtctgggattagaggaggcgtatacgaccttacggcagggaacacaacacaaaaagatcacgagatccttcctgaggatccttcctctctcttattttgcttatttttactgtatttgtactatgtccactttttatttttcatattatttaagaatattattttatttctttgtattatttatggatattatttattcttcatattcttcatatttatattttgtcttcagcagtatagacagaagtatgcctattttattaaatattacaaagtaactaggatattgttgctatcctttgttactttttaattttatgc

SEQ ID NO: 30996 - DNA, 515 bp, Homo sapiens
gtgtaaataataattaaatttaaatttatgtgtttgcagctatattaggctgatggatcttggaaattatattatgaatgaaatatttcatatgtatgaatttctctcactatatctaaacaatgctcctaaaatgacatctatttatgtattattgtagatatgccaactatgtatattctttttcttttttctttcaactttttttgtatttttattttttccaagatttctctactgaatggcgaataggaatatgagatttctttcttttctctccagtggactatttgaaagcacatcaaatttatcatgtcacaaaccaaatacrtgatcttacctcccaaaacctgctgtttcttctttttaataccaagcataattttctacttcctcagaagtcatctaaaatttatttctctggcacggcacagttaattttcagcatatagtattgactttaccttccaaatagattgaaccacttcttaccacttcattagtactctagtcca

SEQ ID NO: 30997 - DNA, 597 bp, Homo sapiens
catacaaaattcattcaaagacacacagataggtctgggctgagacacatgacccaggaatactctaaagagagacttgattccataccccgttcctaaatgtcaaatatcaaaacttccaattgaggtcagcaaaacttataacacagggtcatcaaggctgcacaaatagagcacaatgcagcatgatagaaagtacaarcttactaacaaacagagcagccatcccatacactatatgcagttatttgtacttagtaagtggagagcaagacaagaaagctctcaaagcagtagtggtcatctattagcgcatctttctgggtctgccagacttttgttgttgttgttgttatcctatggaagcagaaatggatccacaactgaaatttggtttggatgtcaaggtggatgatgtttcacacaccaagaacatttgagtgaaagtttattcctcacacaagggatccctggggacagctggtcaggtacaagcaggtttgagcttggttgggccaaactagagggtgtaagttgggtttttatagtgacaagtaggttggaatggggacaagctcccatgcataagaggtttaa

SEQ ID NO: 30998 - DNA, 909 bp, Homo sapiens
  misc_feature (1)...(909): n = A,T,C or G
tgaaaatcttggccttcttcacagatactctctttagtggatttctttataatgagatacatgcttttgttaaatttctcaacttttataaaaagaggtcaaccttactcctaactcagtcaactatcacagctaytgctctgccctttaggaagcatcagaaaatacatatactcaatatgtattatcattctcataacttaagccttagatatgaggtaaaataactaccctttttaaagcaattaatatatacaaggcacaatgttatgtgaattccattcattgtgttcatttaaccctcataataacactatgatttaagacagtatcattttaaagnnnnnnnnnnnnnnnnnnnnnnnnnnnnnnnnnnnnnnnnnnnnnnnnnnnnnnnnnnnnnnnnnnnnnnnnnnnnnnnnnnnnnnnnnnnnnnnnnnnntattttactatatattttgagaattctcgtgtcgtcgtagttttacccatataggtatatggacaatttatttatcaatcatctttccaactatactagtaaattttagtacacatagaaacatcattcttatacaatctcttttatttcctccattttaaagtattatcactttacacattacatctattaaagttacaaagccaacaatacattttagtaattattactttaccatctagagtgattaccttatcacgatacatttttcttccaactacctgctttttgatgttactggaaaatatgttatagacatattacatttctacatgtcaaatactcagcaatacattatgcatatattattattattattattattattatcatcattgagacggagtccccctctgttgcccaggctggagtgcggtggcacagtcttcgctcactgcaagctccat

SEQ ID NO: 30999 - DNA, 909 bp, Homo sapiens
  misc_feature (1)...(909): n = A,T,C or G
tgaaaatcttggccttcttcacagatactctctttagtggatttctttataatgagatacatgcttttgttaaatttctcaacttttataaaaagaggtcaaccttactcctaactcagtcaactatcacagctactgctctgccctttaggaagcatcagaaaatacatatactcaatrtgtattatcattctcataacttaagccttagatatgaggtaaaataactaccctttttaaagcaattaatatatacaaggcacaatgttatgtgaattccattcattgtgttcatttaaccctcataataacactatgatttaagacagtatcattttaaagnnnnnnnnnnnnnnnnnnnnnnnnnnnnnnnnnnnnnnnnnnnnnnnnnnnnnnnnnnnnnnnnnnnnnnnnnnnnnnnnnnnnnnnnnnnnnnnnnnnntattttactatatattttgagaattctcgtgtcgtcgtagttttacccatataggtatatggacaatttatttatcaatcatctttccaactatactagtaaattttagtacacatagaaacatcattcttatacaatctcttttatttcctccattttaaagtattatcactttacacattacatctattaaagttacaaagccaacaatacattttagtaattattactttaccatctagagtgattaccttatcacgatacatttttcttccaactacctgctttttgatgttactggaaaatatgttatagacatattacatttctacatgtcaaatactcagcaatacattatgcatatattattattattattattattattatcatcattgagacggagtccccctctgttgcccaggctggagtgcggtggcacagtcttcgctcactgcaagctccat

SEQ ID NO: 31000 - DNA, 572 bp, Homo sapiens
ttcagcagtttggaaacagactttttgtagaatctgcaaagagatatttgtgagtgctttgagacctatggtgaaaaaggaaatgtcttcacataaaaactagaaagaagctttctgagaagcttctttgtgatgagtgcattcacctcacagagttgaaccattcttttgcttgagcagtttggaaacagtctttttgttgaatctgcaagaggatatttgtgaggcctttgaggcctattgttgaaaaaggaactatcttcacataaaaactagacwgaaagtttctttttttgttgtttctttagtgccctttattataaatcccttctttttttagttttatgacattggttttttttttaagaagacaagttggttttttgtagaatgtccctaaatttctatttgcttgtttcctcatgcttagattttgggaagagtactaactaggtgatgtttagttgctcccctttaaatgacatgtttttaagtcaataaaataaaacaagcaataccacaatgctatctcctccatcttagagacccatcctagcatttcatcatagtca

SEQ ID NO: 31001 - DNA, 572 bp, Homo sapiens
ttcagcagtttggaaacagactttttgtagaatctgcaaagagatatttgtgagtgctttgagacctatggtgaaaaaggaaatgtcttcacataaaaactagaaagaagctttctgagaagcttctttgtgatgagtgcattcacctcacagagttgaaccattcttttgcttgagcagtttggaaacagtctttttgttgaatctgcaagaggatatttgtgaggcctttgaggcctattgttgaaaaaggaactatcttcacataaaaactagacagaaagtttctttttttgttgtttctttagtgccctttattataaatcccttctttttttagttttrtgacattggttttttttttaagaagacaagttggttttttgtagaatgtccctaaatttctatttgcttgtttcctcatgcttagattttgggaagagtactaactaggtgatgtttagttgctcccctttaaatgacatgtttttaagtcaataaaataaaacaagcaataccacaatgctatctcctccatcttagagacccatcctagcatttcatcatagtca

SEQ ID NO: 31002 - DNA, 581 bp, Homo sapiens
tccatatctatcttcttctccttacctgctttctgattttcctgtctcctcaattaacaagtcactttcttgataatatttgtatttataaatgcccttcacccagatgacggtccctaacttatcgtttttttttgttgttgttgttgtttgtttgtttttttgagacagagtctcactctgttgcccaagctggagtgcagtggcgcgatctcagctcactgcaacctgtgcctcccgggttcaagtgagtctcctgcctcagcctcccaaggagctggaattacaggcatgcaccaccatgcccggctaatgtttttgtatttttagtagagacagggtttcaccatgttggccaggctggtattgaactcctgaccycagacgatccacccaccatggccttccaaactgctgggattacaggtgttaaccaccacacctggcccctaacttatcacttgcaggcttaacctgttttgcttaacagcttcgatgagtagagattcctgcctaacatggttctccctcgtcctcctggggcaggccgggagccgtcagggtcactcacctggctcttc

SEQ ID NO: 31003 - DNA, 2411 bp, Homo sapiens
ctccccttttgcaacatcctgtgaggcctgcaggacgggtgtagctggtacattttacccagactcacctagacgcaagtggagatggaaagagggagcaggttcctgcgcaggaaacagagtcctaggggtgctccggcagcttccaggtcaaaccttggcctctgsgactgctgcgggtgagtccagagctacttgccagatttggcttgggatggaactggctcttgcatttcccgtttcctttcagttcaatttcttgtcttcttgtgcccctttctgctcagaaaatccgttctaaagtagagctggaagtgcgtgacctccctgaagagttgtctctatccttcaatgccacctgcctcaacaatgaggtcatccctggcctcaagtcttgtatgggactcaagattggagacacggtgaggtgggctgggcagggcctttgtcctggagcatctgtgggcacccaaccccctttcttccttttgtagtgactaaaaatggcccccttccaccagaaaaaaaatatgggcaagaaaaatacgtttcctgaaagtcattctaagttagatgtaatggatccaccaatcttttcctctgaggcttctgttgcgtaagccatttctgttacgtgaacttcactctcaggaatttgaaaaacttacaatttggttacctttgtttgtgtatgcacagttgattgcaaaggaaaatatttctttaccttcagtccctcaccagtcgccagcctttccaaggtaattaatacctttcttttgtaaaacgacacaagaaagtaaaatctaaaatgtaaaacactccagtctctccacgactttccttattggtcgtttctcctccgcttctgcctaaggggagaggggttggtgggaggggaggaaggaggggaagaaaatagatctttggatacgctgatcctttctattgacctatctgtctctcaggcacttgtgcaaacatcccatgttagaaatattgtcctgaaacatgctttattgcataagctatgaaatgtgtgggaactgaagtagatcctgagcttatgattgaccaccatgtgggattgtgtggtgcaaaatagtgctttgtgcatcttgctgataattataatcaggccaaagcagggtgtttatatgatcacaggttctgttcagtttgagctggtctatttcatatgtggagtgaaaaaacagccttttattatttattgactgtaaaccatgtctctgcatccagctagatatgtcacaacgatactattcccgtgcttgtgtttttgctttgcagaccttcatatagggaaggctgaggaactccagattgcaaaagcataagacacccaatttgggtattccttggcagggcagggaacaactttttttttcctccagagctggagtgttaactgggcccaactgtgtctaaatacaatctttctttccatccaggtgagcttcagcattgaggccaaggtgcgaggctgtccccaggagaaggagaagtcctttaccataaagcccgtgctgtcaaggacagcctgatcgtccaggtcacctttgattgtgactgtgcctgccaggcccaagctgaacctaatagccatcgctgcaacaatggcaatgggacctttgagtgtggggtatgccgttgtgggcctggctggctgggatcccagtgtgagtgctcagaggaggactatcgcccttcccagcaggacgaatgcagcccccgggaggtcagcccgtctgcagccagcgggcgatgtgctctgtggtcaatgtgtctgccacagcagtgactttggcaagatcacgggcaagtactgcgagtgtgacgacttctcctgtgtccgctacaagggggagatgtgctcaggtgaggagaactgcagggccccctgtcctggaacccacaccccctcatatacctgcaaccactggaaacataggtgaaggcctgagatgggtctttgcaggcagaggtgtaagtcagtggttcctaatctttttgagtataaggaccaatccccttttcacgttaaaaaaaaaagttactgatagatggcaattaaatttttagcatttatagacttagaaaacacatgtcagaatatgtagtaaggttagtaataattttacatgagtttatctttgtatcacaagagaccgggaaaagagtagtatatatgcaagacattggagtgtgcttgaacaatgtctggaaaatggtgtaatgctcttgttaatgttagcactattttgttaatcactgttactactattggtgctactgttattttttggattctagatctttgctatccaatatggtaggctttagcacatgtggctatttaaattaaccaaaattgaaaaattaaaaattca

SEQ ID NO: 31004 - DNA, 2411 bp, Homo sapiens
ctccccttttgcaacatcctgtgaggcctgcaggacgggtgtagctggtacattttacccagactcacctagacgcaagtggagatggaaagagggagcaggttcctgcgcaggaaacagagtcctaggggtgctccggcagcttccaggtcaaaccttggcctctgcsactgctgcgggtgagtccagagctacttgccagatttggcttgggatggaactggctcttgcatttcccgtttcctttcagttcaatttcttgtcttcttgtgcccctttctgctcagaaaatccgttctaaagtagagctggaagtgcgtgacctccctgaagagttgtctctatccttcaatgccacctgcctcaacaatgaggtcatccctggcctcaagtcttgtatgggactcaagattggagacacggtgaggtgggctgggcagggcctttgtcctggagcatctgtgggcacccaaccccctttcttccttttgtagtgactaaaaatggcccccttccaccagaaaaaaaatatgggcaagaaaaatacgtttcctgaaagtcattctaagttagatgtaatggatccaccaatcttttcctctgaggcttctgttgcgtaagccatttctgttacgtgaacttcactctcaggaatttgaaaaacttacaatttggttacctttgtttgtgtatgcacagttgattgcaaaggaaaatatttctttaccttcagtccctcaccagtcgccagcctttccaaggtaattaatacctttcttttgtaaaacgacacaagaaagtaaaatctaaaatgtaaaacactccagtctctccacgactttccttattggtcgtttctcctccgcttctgcctaaggggagaggggttggtgggaggggaggaaggaggggaagaaaatagatctttggatacgctgatcctttctattgacctatctgtctctcaggcacttgtgcaaacatcccatgttagaaatattgtcctgaaacatgctttattgcataagctatgaaatgtgtgggaactgaagtagatcctgagcttatgattgaccaccatgtgggattgtgtggtgcaaaatagtgctttgtgcatcttgctgataattataatcaggccaaagcagggtgtttatatgatcacaggttctgttcagtttgagctggtctatttcatatgtggagtgaaaaaacagccttttattatttattgactgtaaaccatgtctctgcatccagctagatatgtcacaacgatactattcccgtgcttgtgtttttgctttgcagaccttcatatagggaaggctgaggaactccagattgcaaaagcataagacacccaatttgggtattccttggcagggcagggaacaactttttttttcctccagagctggagtgttaactgggcccaactgtgtctaaatacaatctttctttccatccaggtgagcttcagcattgaggccaaggtgcgaggctgtccccaggagaaggagaagtcctttaccataaagcccgtgctgtcaaggacagcctgatcgtccaggtcacctttgattgtgactgtgcctgccaggcccaagctgaacctaatagccatcgctgcaacaatggcaatgggacctttgagtgtggggtatgccgttgtgggcctggctggctgggatcccagtgtgagtgctcagaggaggactatcgcccttcccagcaggacgaatgcagcccccgggaggtcagcccgtctgcagccagcgggcgatgtgctctgtggtcaatgtgtctgccacagcagtgactttggcaagatcacgggcaagtactgcgagtgtgacgacttctcctgtgtccgctacaagggggagatgtgctcaggtgaggagaactgcagggccccctgtcctggaacccacaccccctcatatacctgcaaccactggaaacataggtgaaggcctgagatgggtctttgcaggcagaggtgtaagtcagtggttcctaatctttttgagtataaggaccaatccccttttcacgttaaaaaaaaaagttactgatagatggcaattaaatttttagcatttatagacttagaaaacacatgtcagaatatgtagtaaggttagtaataattttacatgagtttatctttgtatcacaagagaccgggaaaagagtagtatatatgcaagacattggagtgtgcttgaacaatgtctggaaaatggtgtaatgctcttgttaatgttagcactattttgttaatcactgttactactattggtgctactgttattttttggattctagatctttgctatccaatatggtaggctttagcacatgtggctatttaaattaaccaaaattgaaaaattaaaaattca

SEQ ID NO: 31005 - DNA, 1292 bp, Homo sapiens
aactgtatgcactaaaaagggtgaattttactgtacataaattatacctgaattatctaacaaaaaaaaaaaaagagtgtttttggtgagactgtgtgtgtggacagaaaggcagatgctatcacttttttgctggagagtctcacgtttcaataaatgccagcagttccacacggggaataggcagttcccctaaacagagtcatttccctgctcccaccttcatttccactagtggcctgagctccatcaggcacaatgaaggtcccactcaggaagggccaaggttcaggaagagggagcagaggcgatggggtggagcagcccactctgtggkcagcagagagggctgggtaaaacgaagcggttcatccctgaagctgctcagtcactccctcggttaattatctgtcttctgattcatgagttgtggttcctgtgggcatgcttcctggagatttctgccaacaagggaagaagggttcttgggactgggaggggatgataacctcagatcccaagtagggtggggagctttagaggagaaatttcgatcaggaaattctaaagtcatagccagactccccctcctcactgtggtgtgcttgccccatcttatggtcttcccaggagacctctgtcactcctcacccttgccccaacacccacacgtccaagggggagaaaggagaatgttgcccttctaacggctcctcccaggagggaaaaaaaggcagacactttacagaggatcccttgagtttttcacactctcagatcacaggtctaaatggtgcaacagtgcagcggcccaaatgcccaaagaattcatgatcttggctatgttttcataccctccagattatccaaacggagcacttgaggatcttgtatgaatgagtgcaaatattcaaatattgggtttcttaaagggaggcacatcatctatagatgcctttacatagcattccacagatatttgttttgctgcctatgtgccaggcagtgggcatagagtattgaacaaaatagacatgtccctcttctcatggaacttgaagtcttatagatccttttatcttcctcttttttcagatacagggcttgaggttttcttatgggtaaagcaaatgtataagcctttttccttcttggcttcttctgtggattcttgccgggttagagtagctgagatatgccaaaccagcaatgaggaacgagttgaaataagagggaccccctctcacatatgtgggggaaagggaccccatcagtttcattctggaagcctg

SEQ ID NO: 31006 - DNA, 707 bp, Homo sapiens
tccgggggcagctgaaatctccgaagaattgcagaggcctggagcgccctccccccgtgtcattccttgcagccttcatgggtcctgctcaccccacagccaaagcatgcactgggctgscctgtgggcacagaacgagcaccgttccaaggctgtcttcctggcaaccacagtctacatttatttgacatttgttcgggagtagctctgtgactgtgcttctgaaacacatcggtggacggcacggggcggggcggggggcgggcggtcgtggccattgctgctttcagataaactccctttcaaagcacagtggtaggagcaaatctaatagcccaccagcaaaacgttagttattttaaggcaagccggtcctcaaccatcctaataaacaaagaacaaggagctttggccactgtgcacagggaagcccggtgcttcagaaacaaacagatttgagcttttcactgatgaggtgcccaatacaaatttcagttcattattggatgacaccatacatggctctccaaagcttttttcttttcctgtctaaaacacaggactagcaaatcttgctcgtatctcaggtgtgtgagaatgctttcagctacagaagaaggaagctcaggtcaaataaacttaagcaaaggctatgttttgactcataactaaatagtccagagattgatctggctttagacgccaag

SEQ ID NO: 31007 - DNA, 707 bp, Homo sapiens
tccgggggcagctgaaatctccgaagaattgcagaggcctggagcgccctccccccgtgtcattccttgcagccttcatgggtcctgctcaccccacagccaaagcatgcactgggctgccctgtgggcacagaacgagcaccgttccaaggctgtcttcctggcaaccacagtctacatttatttgacatttgttcgggagtagctctgtgactgtgcttctgaaacacatcggtggacggcasggggcggggcggggggcgggcggtcgtggccattgctgctttcagataaactccctttcaaagcacagtggtaggagcaaatctaatagcccaccagcaaaacgttagttattttaaggcaagccggtcctcaaccatcctaataaacaaagaacaaggagctttggccactgtgcacagggaagcccggtgcttcagaaacaaacagatttgagcttttcactgatgaggtgcccaatacaaatttcagttcattattggatgacaccatacatggctctccaaagcttttttcttttcctgtctaaaacacaggactagcaaatcttgctcgtatctcaggtgtgtgagaatgctttcagctacagaagaaggaagctcaggtcaaataaacttaagcaaaggctatgttttgactcataactaaatagtccagagattgatctggctttagacgccaag

SEQ ID NO: 31008 - DNA, 707 bp, Homo sapiens
tccgggggcagctgaaatctccgaagaattgcagaggcctggagcgccctccccccgtgtcattccttgcagccttcatgggtcctgctcaccccacagccaaagcatgcactgggctgccctgtgggcacagaacgagcaccgttccaaggctgtcttcctggcaaccacagtctacatttatttgacatttgttcgggagtagctctgtgactgtgcttctgaaacacatcggtggacggcacggggsggggcggggggcgggcggtcgtggccattgctgctttcagataaactccctttcaaagcacagtggtaggagcaaatctaatagcccaccagcaaaacgttagttattttaaggcaagccggtcctcaaccatcctaataaacaaagaacaaggagctttggccactgtgcacagggaagcccggtgcttcagaaacaaacagatttgagcttttcactgatgaggtgcccaatacaaatttcagttcattattggatgacaccatacatggctctccaaagcttttttcttttcctgtctaaaacacaggactagcaaatcttgctcgtatctcaggtgtgtgagaatgctttcagctacagaagaaggaagctcaggtcaaataaacttaagcaaaggctatgttttgactcataactaaatagtccagagattgatctggctttagacgccaag

SEQ ID NO: 31009 - DNA, 707 bp, Homo sapiens
tccgggggcagctgaaatctccgaagaattgcagaggcctggagcgccctccccccgtgtcattccttgcagccttcatgggtcctgctcaccccacagccaaagcatgcactgggctgccctgtgggcacagaacgagcaccgttccaaggctgtcttcctggcaaccacagtctacatttatttgacatttgttcgggagtagctctgtgactgtgcttctgaaacacatcggtggacggcacggggcggggcggggggcgggcggtcgtggccattgctgctttcagataaactccctttcaaagcacastggtaggagcaaatctaatagcccaccagcaaaacgttagttattttaaggcaagccggtcctcaaccatcctaataaacaaagaacaaggagctttggccactgtgcacagggaagcccggtgcttcagaaacaaacagatttgagcttttcactgatgaggtgcccaatacaaatttcagttcattattggatgacaccatacatggctctccaaagcttttttcttttcctgtctaaaacacaggactagcaaatcttgctcgtatctcaggtgtgtgagaatgctttcagctacagaagaaggaagctcaggtcaaataaacttaagcaaaggctatgttttgactcataactaaatagtccagagattgatctggctttagacgccaag

SEQ ID NO: 31010 - DNA, 707 bp, Homo sapiens
tccgggggcagctgaaatctccgaagaattgcagaggcctggagcgccctccccccgtgtcattccttgcagccttcatgggtcctgctcaccccacagccaaagcatgcactgggctgccctgtgggcacagaacgagcaccgttccaaggctgtcttcctggcaaccacagtctacatttatttgacatttgttcgggagtagctctgtgactgtgcttctgaaacacatcggtggacggcacggggcggggcggggggcgggcggtcgtggccattgctgctttcagataaactccctttcaaagcacagtggtaggagcaaatctaatagsccaccagcaaaacgttagttattttaaggcaagccggtcctcaaccatcctaataaacaaagaacaaggagctttggccactgtgcacagggaagcccggtgcttcagaaacaaacagatttgagcttttcactgatgaggtgcccaatacaaatttcagttcattattggatgacaccatacatggctctccaaagcttttttcttttcctgtctaaaacacaggactagcaaatcttgctcgtatctcaggtgtgtgagaatgctttcagctacagaagaaggaagctcaggtcaaataaacttaagcaaaggctatgttttgactcataactaaatagtccagagattgatctggctttagacgccaag

SEQ ID NO: 31011 - DNA, 884 bp, Homo sapiens
aggcatctacacttaacatactacactcgtatacaacacttgcatcgtacaaagtacacatagtaggtgtggcatgtaataagttaccctcctatattttcttctaaaagatttttaaatatttgcatctcaaatttaagtcctttgtccatttagatctggcctttgtgtgatagcgatccatttttgggatagagatccattctgatattttcccatatggataccaactgctcataccatggattatatagaccctttctgactgttctgtaatgttagccagggcatacatcaagatttcacacaagcatacactttcacaatagcaattcctgctgtggtaattataacttcacagtaaatctggtacgtgatagactcacataagctccacctcccaccttcacacactttagtcttctatgggattgtcttagttatactgggcccttttatcttccgtataagctttggaagcagtttagtgacaatggtactcttgtctttttcttgattttaaaaggagtgatttcgatatttttaatcacaaaacatgataggtgctgtaggttatttgttgactccttttatcaggttaaggaaattaccctttattcataggtggaaatatcatgaattatttaatttttgtaaaataattttataggccttttgagacaatcatataacttttgtctttaattcattgataaggagatgatttcagtagattttctaacattgractaaatttgtattactaaccgagcttgttcatggtttttatactttgctaggtatacttcctagtattttgtttacaatatttgtctctgtgtgcatggatgaggtacacaatagcaaggttaccctagtctcaa

SEQ ID NO: 31012 - DNA, 534 bp, Homo sapiens
attttagagttctaaaattatgtcttatactgcctatacaagtgctagaatagtttctgtattaagtggtagatattaatatccaaatatcatacttaccttctttgaccttgcagtttaagacggcattttaagaaagtaaacaaacacattgatttttttttaaaggagacatttttcagtaaaggatataagtatgttaacatgagagatatagaaaaattacagatggacagacaatcctacatagaaacctaaggaagyatttaactcagacacagagattgagaagagtaaagtgggtgaaatctgggaaagaatgcttccagtagaagaaacagaatattgaaggaacagagattgatgtcaagagttcagggaaacaaaccagaataagaatgtttagacaaaaggctgatggtagaaggatattgagactgaaagttatagagagcacaggcttactcgaaaattagtagacaaaagaacatctgtaagttcaatcatgaaggagtgccagaattaaagagaaaa

SEQ ID NO: 31013 - DNA, 534 bp, Homo sapiens
attttagagttctaaaattatgtcttatactgcctatacaagtgctagaatagtttctgtattaagtggtagatattaatatccaaatatcatacttaccttctttgaccttgcagtttaagacggcattttaagaaagtaaacaaacacattgatttttttttaaaggagacatttttcagtaaaggatataagtatgttaacatgagagatatagaaaaattacagatggacagacaatcctacatagaaacctaaggaagcatttaactcagacacagagattgagaagagtaaagtgggtgaaatctgggaaagaatgcttccagtagaagaaacagaatattgaaggaacagagattgatgtcaagagttcagggaaacaaaccagaataagaatgtttagacaaaaggctgatggtagaaggawattgagactgaaagttatagagagcacaggcttactcgaaaattagtagacaaaagaacatctgtaagttcaatcatgaaggagtgccagaattaaagagaaaa

SEQ ID NO: 31014 - DNA, 575 bp, Homo sapiens
cttccgccggctccaaaaacgccgagccgggcctgggctgggcccagcagatgtgctttagtggcccaagacaggatgcagtaaatgcccaccccctttcacatgcagatgcctcccagccataggccagggcccgaggccggcctctgcacccctcgctgtgctgggccctgcctctgaatggctcccctcggaacccaatccgcccatgaaagggcttcaataaagggcctgttggggggacacggccggttacagatgtcctccggcctgtgaccacgcccacccacaagtcctagagcagcaagtgggccctgcctggccagcagcaccagtgtggcctcagaggtttgggcctcctgctccttcatctgggatgctcttagcccagatgcctgcctggctggctcgctcagcatcctccaatcccagctccctcgccatgggatctgcgaggccaggtacccagcccagggctccccacctcactgcgtgtctcagatgctctagccttccygagtgcacgctgtcgcctgctggtcccccatgactgcagcatcggctccacctgttca

SEQ ID NO: 31015 - DNA, 550 bp, Homo sapiens
tggatcaacggaacataatagagcacctagacatagacccacacaaatatggccaagagttttggcaaaggtgcaaaagcaagttaatggatacaggctaatcctttcagcaatggcgttggaacagttcacccctcaccacgctttctgcctgcctggcactgacgggggactccttgctcaaagggcaggtcaccaagagcccctgatatggtttggatttgtgtccccacccccaaatctcatgtcgatttgtaatccccacgtgttggaggaggggcctggtgagaggtgattggatcgtgggggcagatttcccccttgctgttcttgcgatartgagtgagttctcatgagatctgcctgcttgaaagtgtgtagcacttttccccttcgctctctctttttctctctctctctctcctgttgccatggtaaagacatacttgtttccccttcatcttccgcaaggattgtaagtttcctgaggcctcccagccatgtttcctgtacagcccaaggaactgtgagtcaattaaacctcttttct

SEQ ID NO: 31016 - DNA, 942 bp, Homo sapiens
cgtttcaccacttccagctgtaggatcttaggtgattcacttcattgctgtgtgactgagtttctctatctgtaaaatgattatagtacctccctcatagggttgcagggagaaatatattacctgcagagggctgggggtgyctgggggaggtagaactcactgaatctgagctgttagcccaccttgagccttggcactgcggttctgctgttggaatggctttggtgctgctctcaaccaggcggccctggaatgtacagcatcttttcagggtggccctccccaaccccccactccatctcaagacagcctcctctgtgatttcctttctcagcacactctttccgcttccttctgtgcacttatcagggctggtaacttgtttgttagtttacttgaattttgtctgtaaattctggagggcaggggccttgttggtctctttcacagtgaagtccttggagtctaccaaaaatgaacctttgttgagtgagtgagtctagggaggccttgccctgggcctgggttagcaagctgcctggatgctatgataaaagctgccattaggggctgggcgtggtggctcacccctgtaaccccggcttcttcaggcctccggggcttggagtaggggctgttgacattttgaacatggtgctcactcctggcctgggacctgcccagggttcctcaggcggagagggtttggggcttgtgcaaaggagttggctttgaagacctggagagcgaaggccggctttgtcacatgcatactgctgccggtaactgtcacgcacacgtagaggggcgtgaggactcagtggcgccactctgctcttcccaacggccgccctgggcagatggctcttccttttcaggcctctgtttcctccgtagtacatgccaagtagtgtgtgacatgccctgtgcactcaatag

SEQ ID NO: 31017 - DNA, 942 bp, Homo sapiens
cgtttcaccacttccagctgtaggatcttaggtgattcacttcattgctgtgtgactgagtttctctatctgtaaaatgattatagtacctccctcatagggttgcagggagaaatatattacctgcagagggctgggggtgcctgggggaggtagaactcrctgaatctgagctgttagcccaccttgagccttggcactgcggttctgctgttggaatggctttggtgctgctctcaaccaggcggccctggaatgtacagcatcttttcagggtggccctccccaaccccccactccatctcaagacagcctcctctgtgatttcctttctcagcacactctttccgcttccttctgtgcacttatcagggctggtaacttgtttgttagtttacttgaattttgtctgtaaattctggagggcaggggccttgttggtctctttcacagtgaagtccttggagtctaccaaaaatgaacctttgttgagtgagtgagtctagggaggccttgccctgggcctgggttagcaagctgcctggatgctatgataaaagctgccattaggggctgggcgtggtggctcacccctgtaaccccggcttcttcaggcctccggggcttggagtaggggctgttgacattttgaacatggtgctcactcctggcctgggacctgcccagggttcctcaggcggagagggtttggggcttgtgcaaaggagttggctttgaagacctggagagcgaaggccggctttgtcacatgcatactgctgccggtaactgtcacgcacacgtagaggggcgtgaggactcagtggcgccactctgctcttcccaacggccgccctgggcagatggctcttccttttcaggcctctgtttcctccgtagtacatgccaagtagtgtgtgacatgccctgtgcactcaatag

SEQ ID NO: 31018 - DNA, 445 bp, Homo sapiens
aaacatgatgattgtagttaacaacagtatattttattgaaaatctcaaagagaaaacattttaagtgtttgcaccacaaaaaaaatgaataagaatattaggtaatacatcagttacttttctcaactgagccattccacaatgtatacatatttcaaaatatmatttttacatgataaatatatgaaatttttattaaaataatttcaagtatgtaaataatttatatatgaataaataaaaagcatgcatactcaaatttgtttcatatgttctattttaagttccaacctaaaaagtttgacaacgccacttaaagaaacttctcttagttcaaatgatcaaatttggggggaaatattgtttagccagctacaaattatcccagcagtccatactcatttttcctgacagcgatgatatatgagagatttatcaaatatt

SEQ ID NO: 31019 - DNA, 1034 bp, Homo sapiens
ggccaagtttgaggactgcaaccaaggagcacagattcaagttgcctgaatatatgctccaattagcagtagttacaagtgggtttttaaaggaaaagagaagaggcagtttgtaagttgtttatcaagaatttacactaaggtaacataaggtattgattggctaaacattgttctttcttttctcatttcccccttttgatcaaaatttttctcttctgaaggcatcgatgaccaaaattttagatgtttgtctcatgtcattgggaaggctcattcccaggtaatctcatcccatgtctgagggaaagaggacaggtacttatggcttaagaatttagtgatggccaggcactgtggctcacacctgtaatcccagcactttgggaggccgaggtgggaggatcacttgagctcaggagttcaagactagcttgggcaacatagcaagacccccatctctacacaaaaatataaaataaaaaaatttgaaattttaaacttaagaatttagagaggtctcaaggctgaattgactggcaacataaagggacagagcaacaagatctaggccatccacttacagaggagccacagcatgttggatcrtttctttcttgatgttaagacatctagaaatacaaagcataatcaacttaagaaccaaaaatattgagatgggatttttcccctgactttgaccctctttgtggacaggaactagagtggctcatttcactcagcctgcagtccatggatggctaagtgtaacagctcagtgaaggctcagggtgacagcctcctacacctgccttttttgacacctgagttcttgttcagtgtccaggaacaatcaggtcacacaaactatttgaaggatagtgtatttggaatatttattgggcgataaaagtggctctcagtaggatggggaatttgaaaggggatggtgtgggaagaaggtgatgtttccctgaagctgcactgtctgaagttagcagcgtctattcgtaatttctgacactcagctgcat

SEQ ID NO: 31020 - DNA, 1034 bp, Homo sapiens
ggccaagtttgaggactgcaaccaaggagcacagattcaagttgcctgaatatatgctccaattagcagtagttacaagtgggtttttaaaggaaaagagaagaggcagtttgtaagttgtttatcaagaatttacactaaggtaacataaggtattgattggctaaacattgttctttcttttctcatttcccccttttgatcaaaatttttctcttctgaaggcatcgatgaccaaaattttagatgtttgtctcatgtcattgggaaggctcattcccaggtaatctcatcccatgtctgagggaaagaggacaggtacttatggcttaagaatttagtgatggccaggcactgtggctcacacctgtaatcccagcactttgggaggccgaggtgggaggatcacttgagctcaggagttcaagactagcttgggcaacatagcaagacccccatctctacacaaaaatataaaataaaaaaatttgaaattttaaacttaagaatttagagaggtctcaaggctgaattgactggcaacataaagggacagagcaacaagatctaggccatccacttacagaggagccacagcatgttggatcatttctttcttgatgttaagacatctagaaatacaaagcataatcaacttaagaaccaaaaatattgagatgggatttttcccctgactttgaccctctttgtggacaggaactagagtggctcatttcactcagcctgcagtccrtggatggctaagtgtaacagctcagtgaaggctcagggtgacagcctcctacacctgccttttttgacacctgagttcttgttcagtgtccaggaacaatcaggtcacacaaactatttgaaggatagtgtatttggaatatttattgggcgataaaagtggctctcagtaggatggggaatttgaaaggggatggtgtgggaagaaggtgatgtttccctgaagctgcactgtctgaagttagcagcgtctattcgtaatttctgacactcagctgcat

SEQ ID NO: 31021 - DNA, 611 bp, Homo sapiens
ttcgtgaaacaaggaaaaatacagatgaatatctgaatcaagtaacttcttttttcgagacggagtcttgttctgtcacccaggctggagtgcagtggtgtgatctctgctcactgcaacctctgcctcctgggttcaagtgagtctcctgcctcagcctcccaaatagctgggattataggtgtgtgccaccacgcctggctaatttttttatttttagtagagatggggtttcaccatgttggccaggctggttttgaactcctgaccttaggtgatccgcgtgcctcagcctcccaaagtgctgggattacaggtgtgagccactgcgcccggtctttttttttttttttttttttttaagargcagggtcttgttctgttgcccaggctggacttcagtggcccaatcatggctcactgcagcctcagcctcctggactcaagcagtcctttcctcaacctcctgagtagctgggatcacagatgtccaccaccatgcctggctaatttttttttttttttaattttgtcggggctgagtctctctatgttgcctaggctggtctcaaacttctgggctcaaacattcattccacctcagcctccca

SEQ ID NO: 31022 - DNA, 2718 bp, Homo sapiens
tgattttcatttaactatttaatgggtcaataacctcccttctattttcatattccatctacatcatcaaaaaagaaattttaattaccctttggataaataataggaataaaatgtcatgaatcaaaacacagggtttatgtgtattctctatgaaaaacagaactaaaatgttgttaataaattttacacccattaaggaaatgtgtgagtctacctggtagaattaaagtatagttgaaactattgctgtgggatgaagttatgctcactttaatatttccgatatgttttctttgtactagaaaaaaacagatattttaaaaatgctgcatttatctttatctctctgtgcacataaggatttcataccttattttcacttgagtttctttgaacaatgaacactttggaggagtgtatgctatattaggaatttattagatttcatcaaatggcaggtggttatgaattttgtttccaaaaaggagacctgagggatattccatattaacggttttattcccttttggtggaaacatgcaaatcatttgtttttgctaaaaaaactatgaaatatttctttcattatttcccttgggaatggcagctcgctattattcataattgtaaatgcagttgacattttgaagtttatgttcatgggaataagatattttttggacattttagtgatgccaagcccaggaaaatctagttattttttgcaatacacacttatatacagtatgttaattggagtaacagagatggccatttcaaattgggctctgttattcatctttttttttagaggcaaagagtgttggtaagcgaatttaaccagaagagcagtagattcttttggaataatgacatagtggaaaataaaaacacatatacaccaagaaacaatttgtgaactaaaacatgattaaatttaatctattgccataaagtagaaaatgttcgaaacaaggaagactgtgtactttcagctaaactgaaaataaaatgacaacaaaaaagcaggactctccacaattcaagacttgctgcttctatgatgccacactcttgattatttacccctgctatatgaatgagtgagtgttaacactgatgtattacacctaaaagattggaagagcatctttgattccattccagtccaccacgtcgtgctagaaccagcacatctgccctccatagtaaatctccataaaattttactggggagaaaagaatcctctacatatgaggtagagatgtgaatcagacaagtccttaaatgtatgattcatctaactgcctctgaataattggttaacttcagccacctgtatatataagcatgtaggtgttcaatgccaccacacactctccacaaacaacaactgcccagggttgccaaaagataattgcatggtggcaaaatgtgctgcttgaacagtgccaacgtaaaggataaaaaaccaggaaccatattgtaaggaagtgaagactgtattatactaggaattccactttagagtccaatctgaccatctgaatctgaatcggactatagtggatggactgatgctaccctgcagccttacttccttaactttgtttccccaggccctaatataaaccccaggaaaacaggcatacagctgtatgcatttggcagattactatccatttcattgttcagttgttctggaaaggcaccgaatgcaactgtagcctggaaacatttggaaaaatggtactgttcctgatatctttgtttcttcctaggtgacagttgaaggtgactktcctttgtacagttctgcctgctgttagcaattttccaaaattaaataccatattttgtgtttgataggcacagctgtgtctgttaccaagggcaagcccacttgcacaacactctgtgttcatttatatactgagaactttatttagaacccagttttacagaaaaaaatcaagttgggtgaaccaattttgagggcaatgaattcttgaattctacttttgggttatgaaaagggcaaatttatttgcttctgatggaagtaatataggcctagtggatatcttagcagtgcagaaaataggatgtaccatctacctatattaactgtgtgtgcattaatttctgaatctggttttaaaaactccattgtgttctaaacctgatagtttggaaagttgtaagaccgagtctagagactcatgttaaaattctaaattttggtgcaagaggaatagctctcgtttttgcccaagcgactttatttttcaatgtcttcattattttatctgccgattgaacccatcagagtagaggaatgcccagaattatttgaagctctgaaagttctacaatttgggctagagaaatggaatatactaattctaccaattaagacaccaactcttcaggcaaaattaatttaatacttggggtatgatgggttgaccctgaatatttacaagatactaacattggaaaatgttagagtgtgtcacatgggacaagagtctgttaaggtgttctacaagaatgggaggttgtgtggttaaacatttggcatgcttggcacattttttccctcttcctggagagttgtagtttgcattcacatttaaaggatctgagaaatcctgcagaaaagaaaattatgtagctttgtttaacccaatgtttcccaaacttagtggact

SEQ ID NO: 31023 - DNA, 2718 bp, Homo sapiens
tgattttcatttaactatttaatgggtcaataacctcccttctattttcatattccatctacatcatcaaaaaagaaattttaattaccctttggataaataataggaataaaatgtcatgaatcaaaacacagggtttatgtgtattctctatgaaaaacagaactaaaatgttgttaataaattttacacccattaaggaaatgtgtgagtctacctggtagaattaaagtatagttgaaactattgctgtgggatgaagttatgctcactttaatatttccgatatgttttctttgtactagaaaaaaacagatattttaaaaatgctgcatttatctttatctctctgtgcacataaggatttcataccttattttcacttgagtttctttgaacaatgaacactttggaggagtgtatgctatattaggaatttattagatttcatcaaatggcaggtggttatgaattttgtttccaaaaaggagacctgagggatattccatattaacggttttattcccttttggtggaaacatgcaaatcatttgtttttgctaaaaaaactatgaaatatttctttcattatttcccttgggaatggcagctcgctattattcataattgtaaatgcagttgacattttgaagtttatgttcatgggaataagatattttttggacattttagtgatgccaagcccaggaaaatctagttattttttgcaatacacacttatatacagtatgttaattggagtaacagagatggccatttcaaattgggctctgttattcatctttttttttagaggcaaagagtgttggtaagcgaatttaaccagaagagcagtagattcttttggaataatgacatagtggaaaataaaaacacatatacaccaagaaacaatttgtgaactaaaacatgattaaatttaatctattgccataaagtagaaaatgttcgaaacaaggaagactgtgtactttcagctaaactgaaaataaaatgacaacaaaaaagcaggactctccacaattcaagacttgctgcttctatgatgccacactcttgattatttacccctgctatatgaatgagtgagtgttaacactgatgtattacacctaaaagattggaagagcatctttgattccattccagtccaccacgtcgtgctagaaccagcacatctgccctccatagtaaatctccataaaattttactggggagaaaagaatcctctacatatgaggtagagatgtgaatcagacaagtccttaaatgtatgattcatctaactgcctctgaataattggttaacttcagccacctgtatatataagcatgtaggtgttcaatgccaccacacactctccacaaacaacaactgcccagggttgccaaaagataattgcatggtggcaaaatgtgctgcttgaacagtgccaacgtaaaggataaaaaaccaggaaccatattgtaaggaagtgaagactgtattatactaggaattccactttagagtccaatctgaccatctgaatctgaatcggactatagtggatggactgatgctaccctgcagccttacttccttaactttgtttccccaggccctaatataaaccccaggaaaacaggcatacagctgtatgcatttggcagattactatccatttcattgttcagttgttctggaaaggcaccgaatgcaactgtagcctggaaacatttggaaaaatggtactgttcctgatatctttgtttcttcctaggtgacagttgaaggtgactttcctttgtasagttctgcctgctgttagcaattttccaaaattaaataccatattttgtgtttgataggcacagctgtgtctgttaccaagggcaagcccacttgcacaacactctgtgttcatttatatactgagaactttatttagaacccagttttacagaaaaaaatcaagttgggtgaaccaattttgagggcaatgaattcttgaattctacttttgggttatgaaaagggcaaatttatttgcttctgatggaagtaatataggcctagtggatatcttagcagtgcagaaaataggatgtaccatctacctatattaactgtgtgtgcattaatttctgaatctggttttaaaaactccattgtgttctaaacctgatagtttggaaagttgtaagaccgagtctagagactcatgttaaaattctaaattttggtgcaagaggaatagctctcgtttttgcccaagcgactttatttttcaatgtcttcattattttatctgccgattgaacccatcagagtagaggaatgcccagaattatttgaagctctgaaagttctacaatttgggctagagaaatggaatatactaattctaccaattaagacaccaactcttcaggcaaaattaatttaatacttggggtatgatgggttgaccctgaatatttacaagatactaacattggaaaatgttagagtgtgtcacatgggacaagagtctgttaaggtgttctacaagaatgggaggttgtgtggttaaacatttggcatgcttggcacattttttccctcttcctggagagttgtagtttgcattcacatttaaaggatctgagaaatcctgcagaaaagaaaattatgtagctttgtttaacccaatgtttcccaaacttagtggact

SEQ ID NO: 31024 - DNA, 2718 bp, Homo sapiens
tgattttcatttaactatttaatgggtcaataacctcccttctattttcatattccatctacatcatcaaaaaagaaattttaattaccctttggataaataataggaataaaatgtcatgaatcaaaacacagggtttatgtgtattctctatgaaaaacagaactaaaatgttgttaataaattttacacccattaaggaaatgtgtgagtctacctggtagaattaaagtatagttgaaactattgctgtgggatgaagttatgctcactttaatatttccgatatgttttctttgtactagaaaaaaacagatattttaaaaatgctgcatttatctttatctctctgtgcacataaggatttcataccttattttcacttgagtttctttgaacaatgaacactttggaggagtgtatgctatattaggaatttattagatttcatcaaatggcaggtggttatgaattttgtttccaaaaaggagacctgagggatattccatattaacggttttattcccttttggtggaaacatgcaaatcatttgtttttgctaaaaaaactatgaaatatttctttcattatttcccttgggaatggcagctcgctattattcataattgtaaatgcagttgacattttgaagtttatgttcatgggaataagatattttttggacattttagtgatgccaagcccaggaaaatctagttattttttgcaatacacacttatatacagtatgttaattggagtaacagagatggccatttcaaattgggctctgttattcatctttttttttagaggcaaagagtgttggtaagcgaatttaaccagaagagcagtagattcttttggaataatgacatagtggaaaataaaaacacatatacaccaagaaacaatttgtgaactaaaacatgattaaatttaatctattgccataaagtagaaaatgttcgaaacaaggaagactgtgtactttcagctaaactgaaaataaaatgacaacaaaaaagcaggactctccacaattcaagacttgctgcttctatgatgccacactcttgattatttacccctgctatatgaatgagtgagtgttaacactgatgtattacacctaaaagattggaagagcatctttgattccattccagtccaccacgtcgtgctagaaccagcacatctgccctccatagtaaatctccataaaattttactggggagaaaagaatcctctacatatgaggtagagatgtgaatcagacaagtccttaaatgtatgattcatctaactgcctctgaataattggttaacttcagccacctgtatatataagcatgtaggtgttcaatgccaccacacactctccacaaacaacaactgcccagggttgccaaaagataattgcatggtggcaaaatgtgctgcttgaacagtgccaacgtaaaggataaaaaaccaggaaccatattgtaaggaagtgaagactgtattatactaggaattccactttagagtccaatctgaccatctgaatctgaatcggactatagtggatggactgatgctaccctgcagccttacttccttaactttgtttccccaggccctaatataaaccccaggaaaacaggcatacagctgtatgcatttggcagattactatccatttcattgttcagttgttctggaaaggcaccgaatgcaactgtagcctggaaacatttggaaaaatggtactgttcctgatatctttgtttcttcctaggtgacagttgaaggtgactttcctttgtacagttctgcctgctgttagcaattttccaaaattaaataccatattttgtgtttgataggcacagctgtgtctgttaccaagggcaagcccacttgcacaacactctgtgttcatttatatactgagaactttatttagaacccagttttacagaaaaaaatcaagttgggtgaaccaattttgagggcaatgaattcttgaattctacttttgggttatgaaaagggcaartttatttgcttctgatggaagtaatataggcctagtggatatcttagcagtgcagaaaataggatgtaccatctacctatattaactgtgtgtgcattaatttctgaatctggttttaaaaactccattgtgttctaaacctgatagtttggaaagttgtaagaccgagtctagagactcatgttaaaattctaaattttggtgcaagaggaatagctctcgtttttgcccaagcgactttatttttcaatgtcttcattattttatctgccgattgaacccatcagagtagaggaatgcccagaattatttgaagctctgaaagttctacaatttgggctagagaaatggaatatactaattctaccaattaagacaccaactcttcaggcaaaattaatttaatacttggggtatgatgggttgaccctgaatatttacaagatactaacattggaaaatgttagagtgtgtcacatgggacaagagtctgttaaggtgttctacaagaatgggaggttgtgtggttaaacatttggcatgcttggcacattttttccctcttcctggagagttgtagtttgcattcacatttaaaggatctgagaaatcctgcagaaaagaaaattatgtagctttgtttaacccaatgtttcccaaacttagtggact

SEQ ID NO: 31025 - DNA, 2718 bp, Homo sapiens
tgattttcatttaactatttaatgggtcaataacctcccttctattttcatattccatctacatcatcaaaaaagaaattttaattaccctttggataaataataggaataaaatgtcatgaatcaaaacacagggtttatgtgtattctctatgaaaaacagaactaaaatgttgttaataaattttacacccattaaggaaatgtgtgagtctacctggtagaattaaagtatagttgaaactattgctgtgggatgaagttatgctcactttaatatttccgatatgttttctttgtactagaaaaaaacagatattttaaaaatgctgcatttatctttatctctctgtgcacataaggatttcataccttattttcacttgagtttctttgaacaatgaacactttggaggagtgtatgctatattaggaatttattagatttcatcaaatggcaggtggttatgaattttgtttccaaaaaggagacctgagggatattccatattaacggttttattcccttttggtggaaacatgcaaatcatttgtttttgctaaaaaaactatgaaatatttctttcattatttcccttgggaatggcagctcgctattattcataattgtaaatgcagttgacattttgaagtttatgttcatgggaataagatattttttggacattttagtgatgccaagcccaggaaaatctagttattttttgcaatacacacttatatacagtatgttaattggagtaacagagatggccatttcaaattgggctctgttattcatctttttttttagaggcaaagagtgttggtaagcgaatttaaccagaagagcagtagattcttttggaataatgacatagtggaaaataaaaacacatatacaccaagaaacaatttgtgaactaaaacatgattaaatttaatctattgccataaagtagaaaatgttcgaaacaaggaagactgtgtactttcagctaaactgaaaataaaatgacaacaaaaaagcaggactctccacaattcaagacttgctgcttctatgatgccacactcttgattatttacccctgctatatgaatgagtgagtgttaacactgatgtattacacctaaaagattggaagagcatctttgattccattccagtccaccacgtcgtgctagaaccagcacatctgccctccatagtaaatctccataaaattttactggggagaaaagaatcctctacatatgaggtagagatgtgaatcagacaagtccttaaatgtatgattcatctaactgcctctgaataattggttaacttcagccacctgtatatataagcatgtaggtgttcaatgccaccacacactctccacaaacaacaactgcccagggttgccaaaagataattgcatggtggcaaaatgtgctgcttgaacagtgccaacgtaaaggataaaaaaccaggaaccatattgtaaggaagtgaagactgtattatactaggaattccactttagagtccaatctgaccatctgaatctgaatcggactatagtggatggactgatgctaccctgcagccttacttccttaactttgtttccccaggccctaatataaaccccaggaaaacaggcatacagctgtatgcatttggcagattactatccatttcattgttcagttgttctggaaaggcaccgaatgcaactgtagcctggaaacatttggaaaaatggtactgttcctgatatctttgtttcttcctaggtgacagttgaaggtgactttcctttgtacagttctgcctgctgttagcaattttccaaaattaaataccatattttgtgtttgataggcacagctgtgtctgttaccaagggcaagcccacttgcacaacactctgtgttcatttatatactgagaactttatttagaacccagttttacagaaaaaaatcaagttgggtgaaccaattttgagggcaatgaattcttgaattctacttttgggttatgaaaagggcaaatttatttgcttctgatggaagtaatataggcctagtggatatcttagcagtgcagaaaataggatgtaccatctacctatattaactgtgtgtgcattaatttctgaatctggttttaaaaactccattgtgttctaaacctgatagtttggaaagttgtaagaccgagtctagagactcatgttaaaattctaaattttggtgcaagaggaatagctctcgtttttgcccaagcsactttatttttcaatgtcttcattattttatctgccgattgaacccatcagagtagaggaatgcccagaattatttgaagctctgaaagttctacaatttgggctagagaaatggaatatactaattctaccaattaagacaccaactcttcaggcaaaattaatttaatacttggggtatgatgggttgaccctgaatatttacaagatactaacattggaaaatgttagagtgtgtcacatgggacaagagtctgttaaggtgttctacaagaatgggaggttgtgtggttaaacatttggcatgcttggcacattttttccctcttcctggagagttgtagtttgcattcacatttaaaggatctgagaaatcctgcagaaaagaaaattatgtagctttgtttaacccaatgtttcccaaacttagtggact

SEQ ID NO: 31026 - DNA, 2718 bp, Homo sapiens
tgattttcatttaactatttaatgggtcaataacctcccttctattttcatattccatctacatcatcaaaaaagaaattttaattaccctttggataaataataggaataaaatgtcatgaatcaaaacacagggtttatgtgtattctctatgaaaaacagaactaaaatgttgttaataaattttacacccattaaggaaatgtgtgagtctacctggtagaattaaagtatagttgaaactattgctgtgggatgaagttatgctcactttaatatttccgatatgttttctttgtactagaaaaaaacagatattttaaaaatgctgcatttatctttatctctctgtgcacataaggatttcataccttattttcacttgagtttctttgaacaatgaacactttggaggagtgtatgctatattaggaatttattagatttcatcaaatggcaggtggttatgaattttgtttccaaaaaggagacctgagggatattccatattaacggttttattcccttttggtggaaacatgcaaatcatttgtttttgctaaaaaaactatgaaatatttctttcattatttcccttgggaatggcagctcgctattattcataattgtaaatgcagttgacattttgaagtttatgttcatgggaataagatattttttggacattttagtgatgccaagcccaggaaaatctagttattttttgcaatacacacttatatacagtatgttaattggagtaacagagatggccatttcaaattgggctctgttattcatctttttttttagaggcaaagagtgttggtaagcgaatttaaccagaagagcagtagattcttttggaataatgacatagtggaaaataaaaacacatatacaccaagaaacaatttgtgaactaaaacatgattaaatttaatctattgccataaagtagaaaatgttcgaaacaaggaagactgtgtactttcagctaaactgaaaataaaatgacaacaaaaaagcaggactctccacaattcaagacttgctgcttctatgatgccacactcttgattatttacccctgctatatgaatgagtgagtgttaacactgatgtattacacctaaaagattggaagagcatctttgattccattccagtccaccacgtcgtgctagaaccagcacatctgccctccatagtaaatctccataaaattttactggggagaaaagaatcctctacatatgaggtagagatgtgaatcagacaagtccttaaatgtatgattcatctaactgcctctgaataattggttaacttcagccacctgtatatataagcatgtaggtgttcaatgccaccacacactctccacaaacaacaactgcccagggttgccaaaagataattgcatggtggcaaaatgtgctgcttgaacagtgccaacgtaaaggataaaaaaccaggaaccatattgtaaggaagtgaagactgtattatactaggaattccactttagagtccaatctgaccatctgaatctgaatcggactatagtggatggactgatgctaccctgcagccttacttccttaactttgtttccccaggccctaatataaaccccaggaaaacaggcatacagctgtatgcatttggcagattactatccatttcattgttcagttgttctggaaaggcaccgaatgcaactgtagcctggaaayatttggaaaaatggtactgttcctgatatctttgtttcttcctaggtgacagttgaaggtgactttcctttgtacagttctgcctgctgttagcaattttccaaaattaaataccatattttgtgtttgataggcacagctgtgtctgttaccaagggcaagcccacttgcacaacactctgtgttcatttatatactgagaactttatttagaacccagttttacagaaaaaaatcaagttgggtgaaccaattttgagggcaatgaattcttgaattctacttttgggttatgaaaagggcaaatttatttgcttctgatggaagtaatataggcctagtggatatcttagcagtgcagaaaataggatgtaccatctacctatattaactgtgtgtgcattaatttctgaatctggttttaaaaactccattgtgttctaaacctgatagtttggaaagttgtaagaccgagtctagagactcatgttaaaattctaaattttggtgcaagaggaatagctctcgtttttgcccaagcgactttatttttcaatgtcttcattattttatctgccgattgaacccatcagagtagaggaatgcccagaattatttgaagctctgaaagttctacaatttgggctagagaaatggaatatactaattctaccaattaagacaccaactcttcaggcaaaattaatttaatacttggggtatgatgggttgaccctgaatatttacaagatactaacattggaaaatgttagagtgtgtcacatgggacaagagtctgttaaggtgttctacaagaatgggaggttgtgtggttaaacatttggcatgcttggcacattttttccctcttcctggagagttgtagtttgcattcacatttaaaggatctgagaaatcctgcagaaaagaaaattatgtagctttgtttaacccaatgtttcccaaacttagtggact

SEQ ID NO: 31027 - DNA, 2718 bp, Homo sapiens
tgattttcatttaactatttaatgggtcaataacctcccttctattttcatattccatctacatcatcaaaaaagaaattttaattaccctttggataaataataggaataaaatgtcatgaatcaaaacacagggtttatgtgtattctctatgaaaaacagaactaaaatgttgttaataaattttacacccattaaggaaatgtgtgagtctacctggtagaattaaagtatagttgaaactattgctgtgggatgaagttatgctcactttaatatttccgatatgttttctttgtactagaaaaaaacagatattttaaaaatgctgcatttatctttatctctctgtgcacataaggatttcataccttattttcacttgagtttctttgaacaatgaacactttggaggagtgtatgctatattaggaatttattagatttcatcaaatggcaggtggttatgaattttgtttccaaaaaggagacctgagggatattccatattaacggttttattcccttttggtggaaacatgcaaatcatttgtttttgctaaaaaaactatgaaatatttctttcattatttcccttgggaatggcagctcgctattattcataattgtaaatgcagttgacattttgaagtttatgttcatgggaataagatattttttggacattttagtgatgccaagcccaggaaaatctagttattttttgcaatacacacttatatacagtatgttaattggagtaacagagatggccatttcaaattgggctctgttattcatctttttttttagaggcaaagagtgttggtaagcgaatttaaccagaagagcagtagattcttttggaataatgacatagtggaaaataaaaacacatatacaccaagaaacaatttgtgaactaaaacatgattaaatttaatctattgccataaagtagaaaatgttcgaaacaaggaagactgtgtactttcagctaaactgaaaataaaatgacaacaaaaaagcaggactctccacaattcaagacttgctgcttctatgatgccacactcttgattatttacccctgctatatgaatgagtgagtgttaacactgatgtattacacctaaaagattggaagagcatctttgattccattccagtccaccacgtcgtgctagaaccagcacatctgccctccatagtaaatctccataaaattttactggggagaaaagaatcctctacatatgaggtagagatgtgaatcagacaagtccttaaatgtatgattcatctaactgcctctgaataattggttaacttcagccacctgtatatataagcatgtaggtgttcaatgccaccacacactctccacaaacaacaactgcccagggttgccaaaagataattgcatggtggcaaaatgtgctgcttgaacagtgccaacgtaaaggataaaaaaccaggaaccatattgtaaggaagtgaagactgtattatactaggaattccactttagagtccaatctgaccatctgaatctgaatcggactatagtggatggactgatgctaccctgcagccttacttccttaactttgtttccccaggccctaatataaaccccaggaaaacaggcatacagctgtatgcatttggcagattactatccatttcattgttcagttgttctggaaaggcaccgaatgcaactgtagcctggaaacatttggaaaaatggtactgttcctgatatctttgtttcttcctargtgacagttgaaggtgactttcctttgtacagttctgcctgctgttagcaattttccaaaattaaataccatattttgtgtttgataggcacagctgtgtctgttaccaagggcaagcccacttgcacaacactctgtgttcatttatatactgagaactttatttagaacccagttttacagaaaaaaatcaagttgggtgaaccaattttgagggcaatgaattcttgaattctacttttgggttatgaaaagggcaaatttatttgcttctgatggaagtaatataggcctagtggatatcttagcagtgcagaaaataggatgtaccatctacctatattaactgtgtgtgcattaatttctgaatctggttttaaaaactccattgtgttctaaacctgatagtttggaaagttgtaagaccgagtctagagactcatgttaaaattctaaattttggtgcaagaggaatagctctcgtttttgcccaagcgactttatttttcaatgtcttcattattttatctgccgattgaacccatcagagtagaggaatgcccagaattatttgaagctctgaaagttctacaatttgggctagagaaatggaatatactaattctaccaattaagacaccaactcttcaggcaaaattaatttaatacttggggtatgatgggttgaccctgaatatttacaagatactaacattggaaaatgttagagtgtgtcacatgggacaagagtctgttaaggtgttctacaagaatgggaggttgtgtggttaaacatttggcatgcttggcacattttttccctcttcctggagagttgtagtttgcattcacatttaaaggatctgagaaatcctgcagaaaagaaaattatgtagctttgtttaacccaatgtttcccaaacttagtggact

SEQ ID NO: 31028 - DNA, 1049 bp, Homo sapiens
tcccttttctttgtgggtatgaccattggagcactgaaaagatgatataagtgtcaggtgagttccatgttatacatttgatttatgagggaatgcaggctgctttgggaatttcctctggcaccttagccctttttctcctttccttttctccatattccaggaccatctgtaaaaggcagggatgagagagagttcaatgcctttctcctcctcttgataagaaggggtaggattatggataactacaactttgagaattctccctcttaccttctgtagtcctctagatgtggtccaggggattggggttttcagaagttgtgtttttgctgtgccctgtcctagaaggccctgcagaagctgactaaaatgggtaattttctgaacttagaaattggagcacttagtttactctgcttgtcagcattctcacggaagcaagaaacagtcctcaaaggcactttataactgataccatataaaaacaatttttgctacatttgacatgacatactcttacagtgatgtctctggcagaacaatgcacactcagtgagttgaggaacaagttgctgcaaagaagtgataaggcttcatgtaaaggcatgctagtgttaaagaaagatgccctatatgccagaaattgtaagaaatttgcattatgactgtatcagakaatatggtcaggacagtaaagagttttttggttctcctcaaattaaaaacaactaattcaataagtatggaaatatgttttcaatattctataacttttttatactttaattccttcaagagtgtcattaaataatccagtttttttaagtatcctgcaaacaccaaaggttgacaatcaaagttttaagtcaacatgtgaagttgccattgctacttatcagggcaataaagtcaatgactgatatattttttcagttttttaaatttattttttaattaaattttagtgtttattttagatatggggggatacatgtgcaggtttgttacataggtatattgcataatcctgagtttgggggtatgga

SEQ ID NO: 31029 - DNA, 1049 bp, Homo sapiens
tcccttttctttgtgggtatgaccattggagcactgaaaagatgatataagtgtcaggtgagttccatgttatacatttgatttatgagggaatgcaggctgctttgggaatttcctctggcaccttagccctttttctcctttccttttctccatattccaggaccatctgtaaaaggcagggatgagagagagttcaatgcctttctcctcctcttgataagaaggggtaggattatggataactacaactttgagaattctccctcttaccttctgtagtcctctagatgtggtccaggggattggggttttcagaagttgtgtttttgctgtgccctgtcctagaaggccctgcagaagctgactaaaatgggtaattttctgaacttagaaattggagcacttagtttactctgcttgtcagcattctcacggaagcaagaaacagtcctcaaaggcactttataactgataccatataaaaacaatttttgctacatttgacatgacatactcttacagtgatgtctctggcagaacaatgcacactcagtgagttgaggaacaagttgctgcaaagaagtgataaggcttcatgtaaaggcatgctagtgttaaagaaagatgccctatatgccagaaattgtaagaaatttgcattatgactgtatcagagaatatggtcaggacagtaaagagttttttggttctcctcaaattaaaaacaactaattcaataagtatggaaatatgttttcaatattctataacttttttatactttaattccttcaagagtgtcattaaataatccagtttttttaagtatcctgcaaacaccaaaggttgacaatcaaagttttaagtcaacatgtgaagttgccattgctacttatcagggcaataaagtcaatgactgatatattttttcagttttttaaatttattttttaattaaattttagtgtttattttagatatggggggatacatgtgcaggtttgttacataggtatattgcatartcctgagtttgggggtatgga

SEQ ID NO: 31030 - DNA, 573 bp, Homo sapiens
ggacacagtcaaggcagcgctgagaggcaaggctgggctttcagtctcagcgcacagagcaggttccccactactccgcaccctggtgtctcctcccagatgttccacctcattcttgccttaagggctccaagttgttaatgggacagtagccctcttcctttcccagggtttctaagaatttggctctcttttgtgtattgtggggtttgtttgccatctagaggcagctttttggcatagcaacttacaggctttttctacttgtgatagtgaaaataaatacataaataaattcatcataaataataaattgacttaatgcattgaayctgtaaaaaaaaaataaggtcagtttgagagcttaaaaggagcctgatgaggttgaaaagacaaattacctttagtaaagagcagttggagcaatagatgattctttaatcaaggacattttaagagtaatcatcaaatggtaaataaaacttgaaataagatgataaaatataatcttatatgcaaaaaaaatttccaagaaccagagaaatacattttcagattaaaacaaacaaaaaa

SEQ ID NO: 31031 - DNA, 573 bp, Homo sapiens
ggacacagtcaaggcagcgctgagaggcaaggctgggctttcagtctcagcgcacagagcaggttccccactactccgcaccctggtgtctcctcccagatgttccacctcattcttgccttaagggctccaagttgttaatgggacagtagccctcttcctttcccagggtttctaagaatttggctctcttttgtgtattgtggggtttgtttgccatctagaggcagctttttggcatagcaacttacaggctttttctacttgtgatagtgaaaataaatacataaataaattcatcataaataataaattgacttaatgcattgaacctgtaaaaaaaaaataaggtcagtttgagagcttaaaaggagcctgatgaggttgaaaagacaaattacctttagtaaagagcagttggagcaatagatgattctttaatcaaggacattttaagagtaatcatcaaatggtaaataaaacttgaaataagatgataaaatataatcttatatgcaaaaaaaawttccaagaaccagagaaatacattttcagattaaaacaaacaaaaaa

SEQ ID NO: 31032 - DNA, 573 bp, Homo sapiens
ggacacagtcaaggcagcgctgagaggcaaggctgggctttcagtctcagcgcacagagcaggttccccactactccgcaccctggtgtctcctcccagatgttccacctcattcttgccttaagggctccaagttgttaatgggacagtagccctcttcctttcccagggtttctaagaatttggctctcttttgtgtattgtggggtttgtttgccatctagaggcagctttttggcatagcaacttacaggctttttctacttgtgatagtgaaaataaatacataaataaattcatcataaataataaattgacttaatgcattgaacctgtaaaaaaaaaataaggtcagtttgagagcttaaaaggagcctgatgaggttgaaaagacaaattacctttagtaaagagcagttggagcaatagatgattctttaatcaaggacattttaagagtaatcatcaaatggtaaataaaacttgaaataagatgataaaatataatcttatatgcaaaaaaaatktccaagaaccagagaaatacattttcagattaaaacaaacaaaaaa

SEQ ID NO: 31033 - DNA, 923 bp, Homo sapiens
ctgagtgggattcctgtgtgaaaggcattttcacctttttgtgtatcttcagaatcttaactttcatgagagaagaatagaaatgcaacaatggaacaatccactgtatacacgtagctgacaatttaataaacttgaaggaaatgctacagagtcctgtcaatgtctttcttggtccacatgcggcttctgtaggagatcttctatgtgtcaggccagaaattccatgcaaccagtcctagatttcccaatggtggtgctgaatggagcgtttcacttggtgtcattgtcagacagttctgccaagtttgttattaggcctcacgtggcctatgtaacaggttttcccctacatcttgtctaaccaacctagcaaaactttcagttcatccccttctattccaatctgatcaaagcttgagagtgtctcatgaaattttataggtttagttgtctcatttaaattaccaccatgaaaatctcctggatcttaaaattaatgtaaactttaatctacaatgtgatttcttccccacctgtggcctgatttttatttttttttattttttatttttatttttatttttatttatttatttatttttttattgataattcttgggtgtttctcacagagggggatttggcagggtcatgggacaatagtggagggaaggtcagcagataaacaagtgaacaaaggtctctggttttcctaggcagaggaccctgcggccttccgcagtgtttgtgtccctggttacttgagattagggattggtgatgactcttaasgagcatgctgccttcaagcatctgtttaacaaagcacatcttgcactgcccttaatccatttaaccctgagtggacacagcacatgtttcagagagcacagggttgggggtaaggtcacagatcaaca

SEQ ID NO: 31034 - DNA, 1158 bp, Homo sapiens
agcccaatgcctcatacgtagtaggcattcaataaatatttgctgaataaagagatgagtgaatgacacaagttgacactctacaatattcaaggcaagaaacaaggactcgtcgctgaatcctttttttccatgccctccatcagcgggtccaaccagcagcatttccaaaatacgccttacaactgagcactaggctccagttcctgctttagtgtcagggtctgaaccaacgccacctcccgcccagacaactcccacagctcctaactgggtcccagctgccgctctcgcgccccctacagtatactctccacactgcagccagcatgatctcataaarctatgaaataatcagttcatgccctttgcaggctcaccaccctccaaatggcattacatcaaaacccaaaccccctaccatgactggctgctccctgcctcacctgccgtccctctcccgtctcgtgctgggcctccttgctccctttgaaaatgccttgggatctttgcactttctgttcctggaagagagtctggggtcccaggtgagctctcagagcagcagagagcgtctgcttgggaaggaagcagaggaacgggccttctcccgggttggttgcatggctggctcctttatccttcaggtttcggctcaaatgtcacttcccaaccatcccatctaacccagttctccctccatcttcccatctccacagagagccccaggactcggaggaatggcctcaatcctatctgtggtcccgtgacctaacttccctgtgctctgtccccctccctcccctcctcctatctgcttttgtgcacaaagcatcataatgctttgatatattattttatctttttcggttgtttttctttcctcttgttcttccttttccttctcatcaaaacaggcagctgttgcctcaggggagggatatagcagaaggggaacaagaaatagctcatacatctttctggcttttcttctcttttaggagaatttagagagtcctcagaagaactaaggggttggaggggatttgaggtaccaccaagggttttggagccacagtggggagaacagaactcctctcccagttgcagagagacttcctgtggctgggggagagagaagagagagagggagtagtg

SEQ ID NO: 31035 - DNA, 1158 bp, Homo sapiens
agcccaatgcctcatacgtagtaggcattcaataaatatttgctgaataaagagatgagtgaatgacacaagttgacactctacaatattcaaggcaagaaacaaggactcgtcgctgaatcctttttttccatgccctccatcagcgggtccaaccagcagcatttccaaaatacgccttacaactgagcactaggctccagttcctgctttagtgtcagggtctgaaccaacgccacctcccgcccagacaactcccacagctcctaactgggtcccagctgccgctctcgcgccccctacagtatactctccacactgcagccagcatgatctcataaaactatgaaataatcagttcatgccctttgcaggctcaccaccctccaaatggcattacatcaaaacccaaaccccctaccatgactggctgctccctgcctcacctgccgtccctctcccgtctcgtgctgggcctccttgctccctttgaaaatgccttgggatctttgcactttctgttcctggaagagagtctggggtcccaggtgagctctcagagcagcagagagcgtctgcttgggaaggaagcagaggaacgggccttctcccgggttggttgcatggctggctcctttatccttcaggtttcggctcaaatgtcacttcccaaccatcccatctaacccagttctccctccatcttcccatctccacagagagccccaggactcggaggaatggcctcaatcctatctgtggtcccgtgacctaacttccctgtgctctgtccccctccctcccctcctcctatctgcttttgtgcacaaagcatcataatgctttgatawattattttatctttttcggttgtttttctttcctcttgttcttccttttccttctcatcaaaacaggcagctgttgcctcaggggagggatatagcagaaggggaacaagaaatagctcatacatctttctggcttttcttctcttttaggagaatttagagagtcctcagaagaactaaggggttggaggggatttgaggtaccaccaagggttttggagccacagtggggagaacagaactcctctcccagttgcagagagacttcctgtggctgggggagagagaagagagagagggagtagtg

SEQ ID NO: 31036 - DNA, 551 bp, Homo sapiens
aacaatggtcatataagtattttttaaaatttgtttttatctgttgctttatctgctttgtggtatattattgtattctatgtctggacatgtctggacgttttcagttgattcattaatatcaggagtagtgtgagtgtttccttgtcaaggagatactgcattttcttcctagtcccataattagccaaaggaacaaactactcttcttaaatgttcatcaaaacaggtatatgagtctgggcgcagtggctcacgcctgtaattccaacactttgagaggccgaggtgggtgaatcacttgaggccaggagtttgagaccagcctgggcaagayggcgaaaccttgtctctataaaaaatacaaaaattaatcaggtgtggtggtgcacacctgtaatcacagctatttgggtggctatggcatgagaatcacttgaacccagaaggcggggaagttgcagtgagctgagatcgcgccacttcattccagccttcatgcagagcaagactctgtctcaaaatatatatataagattacacatatattt

SEQ ID NO: 31037 - DNA, 1588 bp, Homo sapiens
atcaggaacaattccacattcaagtaagagtataccatcaaacaattgctcggaatcctagcagtttcagagacagtcttgacataacaggccgatgcattttatttaataaacctaatctattctaaattgtcattatgttattaagtcacaacttaataccaaatgtggcgataatacacctagctatagatacttatgtgactaagaaacttcctcctcagcagatctaaagcagaggtctgaaatgaacccaattctgctctttatttaagagtaaactaatagttgtaaaaagtcattaggaaagaacctggaacatcatctgggccaggctygtgaggatacatatgaggatatgcatggggcccagagggattctttccttacaccagcacccacagcaaagaggcaaaactgcgtttgagttgggtagcacacatctcatcaaatcacagtgcttttttcttcttctcttttctcaagcatgatccttcattgtttggcacagccaggggaattattaactaaaaagatgttattttagttaaaatagtttagttttggttttgggaatgattgctgttttagcatttattagtgcttagtgaaatttgtaacttttagtttgaaattaaaactgcccaattaggccaggtgtggtggctcacacctgtaatcccagcactttgggaggctgaggtgggcagattgcttgagctcaggagtttgagatcagcctgggaaacatggaaaaatctcttctctacagaaaacacaaaaaatttgccaggtatggtgcagtgtacctgtagtcctagctacctgggaggctgaagtgggaggatcacctgattctggtggtcgaggctgcagggagctgtgatggtgctactgcactccagcctggatgacagagtgagactctgtctcaaaaacaaaacaaaacaaacaacaaacctgcccagttatatctactgcatgatcaatgtaattgttctgtagtattatgattcctgtagcaatctgtagttctactttgtagctggatgcaaaagatagagcataaatacctcttccctgaatgagttgcattgatttgagagctctgttgaatagtagtccttttagaaatagcaaggagaatcaaactgaactgtgtacaaaaagtaaatgtaacatgacccaattttttgaaattatgtaaaaccttgatttttaaaaatgcacctgtgatttaaaaacaatgtgtctaaaacaaatctggtggacaaattacctctgaaacataatgaagtttaaactagtagcaacctttaaagaaatgaattaaactctaacttggtgcagtataatttcagcagaaattaagctataaataccaaaatgttttctaaaacaaactgaaccaatttgatgatgggaagtgagaggagtttagaacctggttttataaaaagaaattacaagaagcaaaacaattaccaaataagtttgtagcctgcagtaatcacagttagattttgggtggaaacatcacctctgaaatataaaaaagttgcagatatattaaaaaaaagcagaacaa

SEQ ID NO: 31038 - DNA, 1588 bp, Homo sapiens
atcaggaacaattccacattcaagtaagagtataccatcaaacaattgctcggaatcctagcagtttcagagacagtcttgacataacaggccgatgcattttatttaataaacctaatctattctaaattgtcattatgttattaagtcacaacttaataccaaatgtggcgataatacacctagctatagatacttatgtgactaagaaacttcctcctcagcagatctaaagcagaggtctgaaatgaacccaattctgctctttatttaagagtaaactaatagttgtaaaaagtcattaggaaagaacctggaacatcatctgggccaggcttrtgaggatacatatgaggatatgcatggggcccagagggattctttccttacaccagcacccacagcaaagaggcaaaactgcgtttgagttgggtagcacacatctcatcaaatcacagtgcttttttcttcttctcttttctcaagcatgatccttcattgtttggcacagccaggggaattattaactaaaaagatgttattttagttaaaatagtttagttttggttttgggaatgattgctgttttagcatttattagtgcttagtgaaatttgtaacttttagtttgaaattaaaactgcccaattaggccaggtgtggtggctcacacctgtaatcccagcactttgggaggctgaggtgggcagattgcttgagctcaggagtttgagatcagcctgggaaacatggaaaaatctcttctctacagaaaacacaaaaaatttgccaggtatggtgcagtgtacctgtagtcctagctacctgggaggctgaagtgggaggatcacctgattctggtggtcgaggctgcagggagctgtgatggtgctactgcactccagcctggatgacagagtgagactctgtctcaaaaacaaaacaaaacaaacaacaaacctgcccagttatatctactgcatgatcaatgtaattgttctgtagtattatgattcctgtagcaatctgtagttctactttgtagctggatgcaaaagatagagcataaatacctcttccctgaatgagttgcattgatttgagagctctgttgaatagtagtccttttagaaatagcaaggagaatcaaactgaactgtgtacaaaaagtaaatgtaacatgacccaattttttgaaattatgtaaaaccttgatttttaaaaatgcacctgtgatttaaaaacaatgtgtctaaaacaaatctggtggacaaattacctctgaaacataatgaagtttaaactagtagcaacctttaaagaaatgaattaaactctaacttggtgcagtataatttcagcagaaattaagctataaataccaaaatgttttctaaaacaaactgaaccaatttgatgatgggaagtgagaggagtttagaacctggttttataaaaagaaattacaagaagcaaaacaattaccaaataagtttgtagcctgcagtaatcacagttagattttgggtggaaacatcacctctgaaatataaaaaagttgcagatatattaaaaaaaagcagaacaa

SEQ ID NO: 31039 - DNA, 1169 bp, Homo sapiens
catcttaatgaggaatttggctctttttataggaaacagaaaatacctcattctaaggcatatacacagcaaggacctgaggagcttgtgtacttcatagaatcatgaactcaaaggataaaaaggcaaattaaaaattatcctatccaggaaatcccaagtagcagtatgcatactatctacatataagcacttagtcaattgattataaagtcagactgcctcagagtctctgagggtagagcttggcaaacagatttaaggaggataggtaacttgctcaagatgacattgyaaatagagagtggagtcagaattcacattcagatccagctgagtaaaaagcttattctattaacctaattaattggtctgtaaaaaggatttccataagctaactcaaatggggcaaacctgggttaaaaggaaaaaagcacctgacctagcttcaaacatcacttcacctctggaggaagttggaaaatattctagcagaaatacaaaattggtttattggattgctttttgagaaaagaaaacttgagtagcctacaaatataaggggcagattaaccaaatagcagctgcagccatgtagccaaaaaacaaagggcattttctctggctatataatttgcagagcccagtgcaaaatgaaaatgggattctccttgttcaaaatgcagggaaaaagtaccattaaaataattaaaacataaaaaaaaaaaaaagctgctatgcacattcatatacaagtctttgtttggatatatgctttattttctcttgggaaaatacccaggaagggaatggctgggtcacacagtagggataggtttaactttaaaaataaaaaataaataaaacctgccaaatggtttttccaaagtggatattcattttatagttccaccagcagtgtgtgagagttctaacactaggaacagtgagttttttttatcttagccattctagtgagcacgtaatggtatctcattatggttttaatctgtattttcctaatggctaatgatgttgaaaaccttattagatgtatatttgcccaccatgtgtcttctttaactaagggtctattaaaatagttttctgacttttacatgggttgttggtttgcttattactgagttttgaaagattttatacattct

SEQ ID NO: 31040 - DNA, 544 bp, Homo sapiens
atgagcctaggagtttgaggctacagtgagatatgaccaagctactcactgcactccagcctgggtgacagagcaagaccatctgtgaaaacagacacacacacacacagtcattattcttcatctactatttgcaggtccactgtgtgacttttaacaagccactgtataatatttcatatactatgcagttactgtaagtaagctattctcctattgctgaacatttgttagattatttcagttttttactatataatgttacaaagatacattcatttttgcccaattctctatttaggaaaaagttgtggaaaggtacttactaggtcaaaaggtatgaatgattttaagattcgagagaattcccaaattgcttacaaatttatactctaccaacagaatgagttttcawctctccgtacccttgccagtgataggcatcatcacttctttgattaaatattattttaatttatatttctgtttttattaccaaagtggaaaatttttcatgtttattagttatgtttattctacaaaa

SEQ ID NO: 31041 - DNA, 535 bp, Homo sapiens
ttctatttttggccaaaatagaaatgttactaaaaaaagtgcgcatcttaccagattgacataacacagaaacaatgaagttaatggtttggggtgaactctgttgctgaacagctcaagttcaattcaaagtgttaagtcgtgacttgaaaacactgagtggtgaaaatactaatgggacaggaggccagagagagccaaaggggtggtctgaaatgaaaaagcccactcatggtgtattcatgacctggycggagtcaggacccagcttgcttggcctccagacaccatttcatagatgcaacagcaagttcacttctgacttcaaatgccaataaaaatcactaagataatctgcagctggctgaacagttccaataatattaacaaagtgatctttttcaagcaggggccctttgtattgttcaaggcaatcaggcttatgttacctcctaggaaagccctttttggcacactcccacattccccactgtgacagtttggaaacttttcttcccctcctgtctcacagaaa

SEQ ID NO: 31042 - DNA, 509 bp, Homo sapiens
tctggatctctttctattaaccaggtttcactaaagataggctttgggccaaacctgaccactccagttgtttgcatagtggctatttcttttctcatgagtagtcagtagtaatgaggatagtaactttatggcatgctttttacagaaatagtttgcctaactcaatgttaaaccaattcttgaatctcatctttgaggaactattctctaggactactgctattaccaatttctctatcaagcaaggtctagataggggatagtctgactaaacaaagtggagaasctgggattatttaactttagaagcctggagtaagggtactgcaccactgaagctcagctgtctaaaaatgggctaggttggggctgatgtcttcaaaaagtcccatatacataagacctgagatgacggggagtggtctctgagggggtacaattacattagttccacaaatgttggaaaaactgcaaattgaattgaaccactatttatgttatgaaat

SEQ ID NO: 31043 - DNA, 572 bp, Homo sapiens
tgcaccaccacacctagctratttttgtactttttgtagatgcggttttgctatgctgcccagactggtctcaaacacctgaggtgaaggtgttcaccctcctcagcctcccaaagggttaggattataggcatgagacaccacatccggccaagatattcttcatcagaaacacttaggaataagtttgtcttcccctccctatttctacagccccaagttgcagaagttttcaaacccatagtctttcaaaatcccccaatctctccaagcctcccatttctctacagtcattcttacaggagacaccaatacctgtaagggccctggcaaaaccaatcacttggtatgacagcaagtcttgaaaccaggaaggaggagggggcaataaaagtgccagcaagtggagaagcttaccgtattcatccagatctcagctctccacagcccttccccttgctctatggctttctctttatagttactacagaagtcctctacaaggtatagctcagatgtaacacttcagaacacattaaccatcatgacaacctcatggtagatactttttt

SEQ ID NO: 31044 - DNA, 1153 bp, Homo sapiens
aattttttcagataattaatcattatctcagtactatttatgaaatatatttttgtaccactactttggaataatattgtcatctacgaatacagacatatattatgtatataaatggtgtatacccacatacccacacacacatatgcacacatacgtacgtgagtttgtgtttctgacctttcttctctattctatagacattctttttttttgttccagaaccacttcttcactgtgataattattgttatcatttagtatatattttagtagtttgtaataagattcctgtactaattatcttttatcttcagaattccattgtttatattacccaattatttttatttatttatttatttatttttgagacagagactcgcccagtctcccaggttggagtgcactggctggatctcagctcactgaaacctccgcctccccggcccaagcccttctcctgcctccatgtcccgagtagctgagattacaggtgcccgccactacgcccggctaatttttgtatttttagtagagacggggttttaccatgttggccaggctgatcttgaactcctgaccycaggtgatcccccggcctcagcctcccaaagtgctgggattacaggtgtgagccaccatgtccggcctactcattatttttaaataaaattggggacattttcgccaatagataaaagtgttggtttgtttctttattttagacaaggtctcactctgtcacccaggctgcagtgcagtggcatagtcatggctcactggagcctcaacctccctgggctcaggtgatcctcccacctcagctctccagtacctggaagtacaggaacgtgccaccacatctggctaatttttttgtattttttatagagacaatgttttgccatgttgcccagaatggtctcaaattcctggcctcaaacgatccttctgtcttggcttcccaaagtgctgggattataagtgtgagccaccacacctggccaatataaattatttttaattgaaatgaattgattcaaaactaacaagatttgatatcatggtctttccttataaaagcatagacatctttttcatatacttaattttcaatctctcaataaaaatgcagtagttatcttcatat

SEQ ID NO: 31045 - DNA, 1153 bp, Homo sapiens
aattttttcagataattaatcattatctcagtactatttatgaaatatatttttgtaccactactttggaataatattgtcatctacgaatacagacatatattatgtatataaatggtgtatacccacatacccacacacacatatgcacacatacgtacgtgagtttgtgtttctgacctttcttctctattctatagacattctttttttttgttccagaaccacttcttcactgtgataattattgttatcatttagtatatattttagtagtttgtaataagattcctgtactaattatcttttatcttcagaattccattgtttatattacccaattatttttatttatttatttatttatttttgagacagagactcgcccagtctcccaggttggagtgcactggctggatctcagctcactgaaacctccgcctccccggcccaagcccttctcctgcctccatgtcccgagtagctgagattacaggtgcccgccactacgcccggctaatttttgtatttttagtagagacggggttttaccatgttggccaggctgatcttgaactcctgacctcaggtgatcccccggcctcagcctcccaaagtgctgggattacaggtgtgagccaccatgtccggcctactcattatttttaaataaaattggggacattttcgccaatagataaaagtgttkgtttgtttctttattttagacaaggtctcactctgtcacccaggctgcagtgcagtggcatagtcatggctcactggagcctcaacctccctgggctcaggtgatcctcccacctcagctctccagtacctggaagtacaggaacgtgccaccacatctggctaatttttttgtattttttatagagacaatgttttgccatgttgcccagaatggtctcaaattcctggcctcaaacgatccttctgtcttggcttcccaaagtgctgggattataagtgtgagccaccacacctggccaatataaattatttttaattgaaatgaattgattcaaaactaacaagatttgatatcatggtctttccttataaaagcatagacatctttttcatatacttaattttcaatctctcaataaaaatgcagtagttatcttcatat

SEQ ID NO: 31046 - DNA, 1153 bp, Homo sapiens
aattttttcagataattaatcattatctcagtactatttatgaaatatatttttgtaccactactttggaataatattgtcatctacgaatacagacatatattatgtatataaatggtgtatacccacatacccacacacacatatgcacacatacgtacgtgagtttgtgtttctgacctttcttctctattctatagacattctttttttttgttccagaaccacttcttcactgtgataattattgttatcatttagtatatattttagtagtttgtaataagattcctgtactaattatcttttatcttcagaattccattgtttatattacccaattatttttatttatttatttatttatttttgagacagagactcgcccagtctcccaggttggagtgcactggctggatctcagctcactgaaacctccgcctccccggcccaagcccttctcctgcctccatgtcccgagtagctgagattacaggtgcccgccactacgcccggctaatttttgtatttttagtagagacggggttttaccatgttggccaggctgatcttgaactcctgacctcaggtgatcccccggcctcagcctcccaaagtgctgggattacaggtgtgagccaccatgtccggcctactcattatttttaaataaaattggggacattttcgccaatagataaaagtgttggtttgtttctttattttagacaaggtctcactctgtcacccaggctgcagtgcagtggcatagtcatggctcactggagcctcaacctccctgggctcaggtgatcctcccacctcagctctccagtacctggaagtacaggaacgtgccaccacatctggctaatttttttgtattttttatagagacaatgttttgccatgttgcccagaatggtctcaaattcctggcctcaaacgatccttctgtcttggcttcccaaagtgctgggattataagtgtgagccaccacacctggccaatataaattatttttaattgaaatgaattgattcaaaactaacaagatttgatatcatggtctttccwtataaaagcatagacatctttttcatatacttaattttcaatctctcaataaaaatgcagtagttatcttcatat

SEQ ID NO: 31047 - DNA, 1696 bp, Homo sapiens
cccttcctctactatagcacgtattgttcagaggatctcatatggcatcaattagagggcagaccttgggctgaggcatttgttttctgctgacaccttttgaaatccccattcctcattcactggtgctctagtttttactcaaatgttccatactccctttgtccttgatcacttggtgcatactacaaaactgtgtgtgccttctctcatgataaatttgatatatctttgggctaaggctctctctctctctctctctctctctctctgtgtctttctctctccctccatgcctccttcaatttctatacctgtatggggacatggggaagattgccctattctctgtggatgtcaccagacacttctacccacagtatccaccaagtgatccacactgtgctgctctgctacttttgtggcatgggcaaaatctgcaaggccattaccttcatgtacagttgggcaagtaaccacattttgcccaactaccataaaaggtgttagccagcattttatttagactctataacactatgataacttttggccagatcttacagataagaaggacatttaacctctcctttcctacaatttttttgtgaaagttaattaccttttcatttgtaaatcactatgctagatgccaaccaattattattattaataaccatgtgaacattgttaataagctataatagtaacaatatctgaccccctattcttggacatacagattcatatatagagttacatgttttctatgtaatttaattaacatttattgcatacctaagaacttgcttttattatcactgaagacacaaccctgatgcagataaattaaggagtttttcaaagttataatccttgagtgagactgaacacaaattaatcatagtgttaagtctttgccccttgccctgaaattttccatctaattgagcacaggctctggaaccagattggttaggttcaaatcccaactctgccaacttctaactgtgtgatctcaaagaatttacttaacctccctgtctcaatttccccttctttaaatgcaaataataatggtttcaaactcttaggattggtgtgaagattaaattagttaatacaggcaaagtccttactggcacatagtaagcactcaatacatgttagctattagtattacaatcatgtaattgaaagtataactgtataataattatgcaaattgccattatgagtatataattatatttattcatattgctgctaaatcaacgattttgtcatactgtaagtctaatctccatgtgatggaatatttaccggtcctttctcttgcagtttattttaattctgtaaaatagaggttaatctgggcacagagaagacataacaaggtccagttctatgctaaaaacatgaagaatatttaaatagagctttacaatttacaatgcactttcacattcttgcagccgtttacctatatattcccacaagaaattgttgyaataaaatgcttcatgagtgtgttcatttaaagtgaaaatgtacttgagactctggggctcgagaattgtcttttatttattggtccaataaaaaatatcatattatctacttcatctactttatcctcaaggtgcaatattgttatgaatatattctgcatgcatttatggattttatctttatc

SEQ ID NO: 31048 - DNA, 576 bp, Homo sapiens
tggactggacttaaatatggtaagcctttaaaagagagactaggtccttcctgaagaggaaggtttaaagcagcagacactctcctgcttgcctgaaagaaggaagttgccatgttgtaagaggtctayggagggtgccatatggcaaggacctgagagaggcctctggcagctgagagtgctccctggacatcagctggcaagaaaacaagagcttcagtcatagagctgcaaggagttgaattctgccaacaaccatgtgagtttggaagagaatcctgagttacaaagagtaatgctgcctaaatgacactttgtttgcagccttgggaggcatggaggagaggtcccagtgaagccagactccagacctacagaaatgagaaggaataaatatgtgttatcttaatcagcaaagtttgtgataatttgttatgcagccataaaaaactaagacaatcaccacacccaaatgccctttattgttctttttacctgttaatttcatctttctaatctcaccttcttcatgaagctttaaatacaatctccttgcataataatcccacatatctt

SEQ ID NO: 31049 - DNA, 825 bp, Homo sapiens
ccttgaggaatcgcctaaccctggggagtttgaggctgcaatgagtgagccataatggtgtcagtgcactccagtctgggtgaaagacagagtgaggccctgtcacaggcaggcaggcaggcaggcaggcaggcaggcaggcaggcaggcagacagacaacagttgtrttatgttcttctcagggtaggaagtaaaaataacagaatacagggcttaatttttttttttggacggagtttcactcttgttgcccacgctggagtgcaatggcaccatctcggctagccacaacctccacctcccgtattcaagcgattctcctgcctcagcctcctgagtagctgggattacaggcatgtgtcaccacacccggctgattttgtattgttagtagagacggtatttctctatgtgggtcaggtgggtctcgaactggccacctcaggtgatctgcccaccttggcctcccaaagtgctgggatgacaggcgtgagcaattgcgcccggccagctacgtttttttttttaattttctatttccatctatttattattattattattttttgagacggagtctcgctctgttgcccagactggagtacagtggcgtgatggctcactgcaagctctgcctcccgggttcacgccattctcctgtctcagcctcccaaatagctgggactataggcacccatcacagtgtctggctaattttttgtattttgagtagagacggggtttcactgtggtagccaggatggtctcgatctgacccccgtgatctgcccacctcggcctcccaaagtgctgggattactggc

SEQ ID NO: 31050 - DNA, 825 bp, Homo sapiens
ccttgaggaatcgcctaaccctggggagtttgaggctgcaatgagtgagccataatggtgtcagtgcactccagtctgggtgaaagacagagtgaggccctgtcacaggcaggcaggcaggcaggcaggcaggcaggcaggcaggcaggcagacagacaacagttgtattatgttcttctcagggtaggaagtaaaaataacagaatacagggcttaatttttttttttggacggagtttcactcttgttgcccacgctggagtgcaatggcaccatcwcggctagccacaacctccacctcccgtattcaagcgattctcctgcctcagcctcctgagtagctgggattacaggcatgtgtcaccacacccggctgattttgtattgttagtagagacggtatttctctatgtgggtcaggtgggtctcgaactggccacctcaggtgatctgcccaccttggcctcccaaagtgctgggatgacaggcgtgagcaattgcgcccggccagctacgtttttttttttaattttctatttccatctatttattattattattattttttgagacggagtctcgctctgttgcccagactggagtacagtggcgtgatggctcactgcaagctctgcctcccgggttcacgccattctcctgtctcagcctcccaaatagctgggactataggcacccatcacagtgtctggctaattttttgtattttgagtagagacggggtttcactgtggtagccaggatggtctcgatctgacccccgtgatctgcccacctcggcctcccaaagtgctgggattactggc

SEQ ID NO: 31051 - DNA, 825 bp, Homo sapiens
ccttgaggaatcgcctaaccctggggagtttgaggctgcaatgagtgagccataatggtgtcagtgcactccagtctgggtgaaagacagagtgaggccctgtcacaggcaggcaggcaggcaggcaggcaggcaggcaggcaggcaggcagacagacaacagttgtattatgttcttctcagggtaggaagtaaaaataacagaatacagggcttaatttttttttttggacggagtttcactcttgttgcccacgctggagtgcaatggcaccatctcggctagccrcaacctccacctcccgtattcaagcgattctcctgcctcagcctcctgagtagctgggattacaggcatgtgtcaccacacccggctgattttgtattgttagtagagacggtatttctctatgtgggtcaggtgggtctcgaactggccacctcaggtgatctgcccaccttggcctcccaaagtgctgggatgacaggcgtgagcaattgcgcccggccagctacgtttttttttttaattttctatttccatctatttattattattattattttttgagacggagtctcgctctgttgcccagactggagtacagtggcgtgatggctcactgcaagctctgcctcccgggttcacgccattctcctgtctcagcctcccaaatagctgggactataggcacccatcacagtgtctggctaattttttgtattttgagtagagacggggtttcactgtggtagccaggatggtctcgatctgacccccgtgatctgcccacctcggcctcccaaagtgctgggattactggc

SEQ ID NO: 31052 - DNA, 553 bp, Homo sapiens
gaatatggaaacaagagtcttctcctcccacatgggaggaaaattcagtttcagctcagctaaggatttagtcttactaaagttgtgggaggaagttctccagctgaccagctttccccaacatggaaaggaccacagcaaggacacctgagctccccaacagacgttcagcgccaagggagtcacaggtgggtacacctgkgtggaagtaaagctgttgcttattctgggagcagaatccgaggctgaggcaggtgggcgccgggctatttcagcgttggtggagggcgggctgggtagctgtgtgtctgctgctccttctcgcgtttctcctgcctctgtaatcccaccttagccatgagggaaatagtgctcacgcaggccaggcagtacgggaaccagatcggcgccaaggttgtatttgactccataaaaattaaaattttgtatgagagaaaaatgcctcaaagtcaaaagtcaacagactggggaaatagatctgcaacatacatgacagacaaaaagctaatttgggatatatatatatatatat

SEQ ID NO: 31053 - DNA, 553 bp, Homo sapiens
gaatatggaaacaagagtcttctcctcccacatgggaggaaaattcagtttcagctcagctaaggatttagtcttactaaagttgtgggaggaagttctccagctgaccagctttccccaacatggaaaggaccacagcaaggacacctgagctccccaacagacgttcagcgccaagggagtcacaggtgggtacacctgtgtggaagtaaagctgttgcttattctgggagcagaatccgaggctgaggcaggtgggcgccgggctatttcagcgttggtggagggcgggctgggtagctgtgtgtctgctgctccttctcgcgtttctcctgcctctgtaatcccaccttagccatgagggaaatagtgctcacgcaggccaggcagtacgggaaccagatcggcrccaaggttgtatttgactccataaaaattaaaattttgtatgagagaaaaatgcctcaaagtcaaaagtcaacagactggggaaatagatctgcaacatacatgacagacaaaaagctaatttgggatatatatatatatatat

SEQ ID NO: 31054 - DNA, 553 bp, Homo sapiens
gaatatggaaacaagagtcttctcctcccacatgggaggaaaattcagtttcagctcagctaaggatttagtcttactaaagttgtgggaggaagttctccagctgaccagctttccccaacatggaaaggaccacagcaaggacacctgagctccccaacagacgttcagcgccaagggagtcacaggtgggtacacctgtgtggaagtaaagctgttgcttattctgggagcagaatccgaggctgaggcaggtgggcgccgggctatttcagcgttggtggagggcgggctgggtagctgtgtgtctgctgctccttctcgcgtttctcctgcctctgtaatcccaccttagccatgagggaaatagtgctcacgcaggccaggcagtacgggaaccagatcggcgccaaggttgtatttgactccataaaaattaaaattttgtatgagagaaaaatgcctcaaagtcaaaagtcaacagactggggaaatagatctrcaacatacatgacagacaaaaagctaatttgggatatatatatatatatat

SEQ ID NO: 31055 - DNA, 584 bp, Homo sapiens
tttaaattttaccgcatgatctagagctggtgatgagagagaaatatagaggttccacaatctttaagaagctataaaccatcgtgctctctttagcatttatcaatttttaaccactgctacaaggcttgcagcaatcaattattccctggctcagtgagggactcaaagctataccagataaaccagaaatcaattttactgccttgtggctggtttctaaatatgttcctgctcaccacatataaaataaacaatgctagaattctactggttctgtgacaattatttttacatcacatgaaaaagtaaatatttttaaatgggaaggaagaacacattttgatttataaagcctagacttgttttctttttctcaagttaatagtgaaaattgaagagggaagtgtttccccttttatgccttgcatgaaactggtttctaattaatggaagccttrtttatttcagctaagcaatcatctttcttcatctcatttctactggattgctgtcagatactgcacagagggatatttggtacatactaccatttaatatgtttgcctctgccccagccactg

SEQ ID NO: 31056 - DNA, 1201 bp, Homo sapiens
ttccaagacagagatttgcacattttagacttttgattaatgtttgttgagtaagtccccatccctcgttcaagtggagctgaacttcttcaaggcaagccagtgtgctgtgggccttaaagtcaaggaaccctcagttcccgatccttgatttcttggcagggttccacagrataggataaccggattgttaagaatatgagctccagaaagggaatgcctatttaataatcccaggtcctgcaagtgtaaactctatgaacctgggaaatgtgtataatcaatttaatctctatttacttcatttggaaaatatagacagtagtatcaacttcatggagagaattagatgatttaatatatgtaaagagaacattccctgaaacaaactaagaactcaaaatgttagctatattatgatcgctgatcaatctctcaattttcttccctcgattcttatgacacctacctcgcttatgactgggatctgtcggaggctttcttgcctcgtccttccacattctctttggataaactcaaaactttatggcttcaattccatctatatgctaaaaatgcccaaatcgatagcacagaggctctgtctccctcagtggagaggcagagaactagaaaaccagtttcctctcccatagaacatttaactagttgcctaagtttgtatgtatatattaaatggtaatgcattttattttatatgcaaatagcacgtgtacatacttgaaaaagaaaaaaaaaagtgatgtttataataataagaaataaaaacccagaaatctcttttttcccccagaagtaccctaacccttctcccagagactgccacttttacaatttaggcttttccattcatgaattcctcaattttagtcattgtagattgactttctgttctgataaatgaagactttactataaagggcattcaccttcatctcacctgctcctaatagagttatgcaactatcattaattaattgggttgacattatttcaactgtatagatattatatacatcaagtggtattatagaatagcattccctcacagttttggtttggttttgtttatagcagttttggttatttcctggcatttctaattgcactattgtctgcccttagagcctgtatgagttattcagagtttcagggatagtgcaaaatttcatgtgacatt

SEQ ID NO: 31057 - DNA, 1201 bp, Homo sapiens
ttccaagacagagatttgcacattttagacttttgattaatgtttgttgagtaagtccccatccctcgttcaagtggagctgaacttcttcaaggcaagccagtgtgctgtgggccttaaagtcaaggaaccctcagttcccgatccttgatttcttggcagggttccacagaataggataaccggattgttaagaatatgagctccagaaagggaatgcctatttaataatcccaggtcctgcaagtgtaaactctatgaacytgggaaatgtgtataatcaatttaatctctatttacttcatttggaaaatatagacagtagtatcaacttcatggagagaattagatgatttaatatatgtaaagagaacattccctgaaacaaactaagaactcaaaatgttagctatattatgatcgctgatcaatctctcaattttcttccctcgattcttatgacacctacctcgcttatgactgggatctgtcggaggctttcttgcctcgtccttccacattctctttggataaactcaaaactttatggcttcaattccatctatatgctaaaaatgcccaaatcgatagcacagaggctctgtctccctcagtggagaggcagagaactagaaaaccagtttcctctcccatagaacatttaactagttgcctaagtttgtatgtatatattaaatggtaatgcattttattttatatgcaaatagcacgtgtacatacttgaaaaagaaaaaaaaaagtgatgtttataataataagaaataaaaacccagaaatctcttttttcccccagaagtaccctaacccttctcccagagactgccacttttacaatttaggcttttccattcatgaattcctcaattttagtcattgtagattgactttctgttctgataaatgaagactttactataaagggcattcaccttcatctcacctgctcctaatagagttatgcaactatcattaattaattgggttgacattatttcaactgtatagatattatatacatcaagtggtattatagaatagcattccctcacagttttggtttggttttgtttatagcagttttggttatttcctggcatttctaattgcactattgtctgcccttagagcctgtatgagttattcagagtttcagggatagtgcaaaatttcatgtgacatt

SEQ ID NO: 31058 - DNA, 494 bp, Homo sapiens
ctcaaagaacttcatgcattgggattcacaatgatagagacaataaaaatgctatttattcatccatgtatcattataatactattaaaattaatgatgataagttatgtattgaatgaccactgtaatgtagccactccatgggcccttcaaagtgttatagcatttcactgtcagtgatgttaggtcccactttgcaggtcacaaaataagagctcaacaaaaagttatcagcagaggtagagctcagacacttgaattatatttttaatgagccatgcaaaatcttggcctctacatttattccacacaaatgtaatgaagtcttaatatgttctgggttcccaggtaaatataaggatgcagagccaagcagtttggtatrggggagatagcacagccattagtgtcatggagacctggcactttaattcctaagcctgtgaccagaatcaaatttagtagcatttctcaacctctattttctcatttgc

SEQ ID NO: 31059 - DNA, 546 bp, Homo sapiens
aaaagaaagttgcatattctttttaaatatgtgtaatatattcataaaaatggttttaaaaggagtcttagaaacatgctcaaaatgttgataatgtgagagtgaaattcaattatcatgaagcagtagctgtaaaacttgacaaaagaattaacaaaatatctctcaatcataaaatttaagaaaaattaatgcttctaaataagtcttgcatttatagataaaatggatgtagtagttcgttttcatgctgttgataaaaacatacctgagactgggcaatttacaaatgaaagaggtttaattggacttacagttccacttggctggggaarcctcacaatcatggcggaaggcaaggagcagcaagtcatgtcttacatgaatggcagcaggcaaaaagagagcttatgcagggaaactcccatctttcaaaaccatgagctctggtgagacttattcactatcatgagaacagcatgggaaagacgtgcccccatgattcaattaccttccaccagatcccttccataacacgtgggaatt

SEQ ID NO: 31060 - DNA, 369 bp, Homo sapiens
ccattagaaaggaggtccctgcgaggtccccgtgagaggataggaaaatgccatttaaataaaaggtcagcaagagcgagagtctccgaagttagacaggcatccggagaaaggtggatgtggaaagtgaggttgacttctgggcgcatgtgtggaatatccagkcccttagaggctcgggtctagtggtggaggatgaggcccctctgccatagggagagcctgtcttaatcacgccacgcaggtggaacagactctatgcagaaaacttgcggaagcattttgctaacatcacgagaacatgtgattcgttagttggagtggacaggaatgacttcagaaaccagagcagggagtctcgcttaaagt

SEQ ID NO: 31061 - DNA, 369 bp, Homo sapiens
ccattagaaaggaggtccctgcgaggtccccgtgagaggataggaaaatgccatttaaataaaaggtcagcaagagcgagagtctccgaagttagacaggcatccggagaaaggtggatgtggaaagtgaggttgacttctgggcgcatgtgtggaatatccaggcccttagaggctcgggtckagtggtggaggatgaggcccctctgccatagggagagcctgtcttaatcacgccacgcaggtggaacagactctatgcagaaaacttgcggaagcattttgctaacatcacgagaacatgtgattcgttagttggagtggacaggaatgacttcagaaaccagagcagggagtctcgcttaaagt

SEQ ID NO: 31062 - DNA, 1194 bp, Homo sapiens
cttctcaaagtattaggtttaaattcataggattacaaaagaaccaatcatatcaaaatacagtcaccaaaatataagcaacgcctgtggtgggtaataagcacactgctttattaatgcactgagacccagtggcagacctagtaccttccattgccaaacggtgaccagagaaaacaacctattcaattatctgggacaacggcaatgcgctgtgaacatgtctgtgattttgagggtggcaaagtcacaggttctgctaacaaaacaccactgtggatcgttgcctacattcatatctgaaggaaacgttaactttcagtcgaagtcagtggaaatacgaatgaatttccccccagccacattcgcggacccctgaattctatctacagaaccacagtgaagaactcttgctccagagcacggagtctgtgctccagaactaagaaaccaggagcggaggaagcccaacgccagcaggctggggagaggggcagccatggagtgagcctgggcttccaacgagaggccctcctccacatgagcgacatcccgcaggaagcagcaggtgaaaaccttagtatcccagcgtctgcatggagtggtgacggcaagatttcttctaaacacggagacacatcaaagttccttaactcactaatgagcgtgtagggaagacttcccagagcttcaggggaagagagagagcagcrggatacgggtgaggaaacaggaaatcaggaggaaatgcggcctggatgagcctataggcaggaatataacttatgctctcagcaacaaccaaggaaaacagaaactcagagctgtctggaaggaatcgtcccttggtgaaaattaaatgcattcataacataaagccaaattacaatgcctaacatgtacgaagtgtttgacaaatacaggtaattatttatgaattgctaaatgataagctacaatttttcttttttcagacatggtcttgctctctcacagctcacactggagtgcagtggcgagatcacagttcactgcagcctcaacctccctaggctcaggtgatccttctacctcagcctccagagtagctgggaccacaggtgcacaccaccatgcctggctaatctgtttatttgttgtacagatggggcctcactatgttgcccaggctggtatagaactcctggggtcaag

SEQ ID NO: 31063 - DNA, 1503 bp, Homo sapiens
tgtatatcctgagctgtatatcaagggcatttggtgataggaatattcgaggtaggagacattactttgagctgagtaatcaagtgagaaacagaattttaattggctcatgtggaatggataggaataaagcgaaacagtgaggagcacacaggatggaggcagagagggaatattgagaatagcttgaagacagtgaggctgtagaggagcaatgaaaggagcttgagtaaggtcctgtgacgagggtggagatttgtttaaggaaaaatactagaagataagcttattggtcaagtaatttagactctctcctgtaggctaagtaaatactgaagatttttcagcaaaggagtaacatgcagcaattcaccttgaaacttaaaacaactatcttttaatattccagtagctaatattagacctaacttgatttatttaatactctttagagaattttcaggtttaacaatcagtttatttttttgacaaatattattaaataattatttttattatgagtaaaatgccgtagtcaaaaactttttttttctttttttaatttcaagaaaatattttagtttggggaacaggtggtgtttggttacataagtaagtcctttagtggtgatttctaagattttggtgcacccataacccaagcagtgtatactgtacccaatgtgtagtcttttgtcgttcatcccccttctaccctttcccgcgagtccccaaatccattgtatcattcttatgcctttgcttcctcagagcttagttcccacttatgagtgagagcatatgatgtttgactttccgttcctgaattacttctcttagaatgatagtctccaatcccatacaggttgctgtgaatgccattatttcattccttttcatggctgagtagtattccacagtgtgtgtgtgtgtgtgtgtgtgtgtgtgtgtatatatatatatatawaacattttccctatccactcattcatagatgggcatttgggttggttccacatttttgctattgcaaattgtgctgctataaatgtgcaagtatcttttttgtataatgacttattttcctctgggtaggtaactagtaatgagattgctacttttagttctttaaggaattgccacagtgaaacacaatttcttttaaaaccaacttttccttttcttattttaccatatattatataatatttaccaacaatacatgtatctagaactctttaagctgtagttcatgctaatgtggaatagccttcaaaatgacatcatgtagtattttaaaaatttctccttacatggtatttgaaatgcagttctatgagcgacatgaaggtgaaaaaggtttgcatttagaataaaaggacaagtaaaaccttcagcaactctaaaataagaatctattcaagagagttagaatgaacactgctaaatttctctaatgaagtaattatttcaagctgggtttcttaaggaatatttagtaa

SEQ ID NO: 31064 - DNA, 793 bp, Homo sapiens
aggcgatggccagcgtgatggccagtggccagcggatctgacctggcttatccagcccgtccgtcatctgatgcatgttgcgcctggtcaaacagtggagggaggagaaagttacacagagctggtgggagccggagtgacccaggggtgcccagggcatggccacagatgatatccccgccctagaactgtgctgacaccgtcatcaccgtgattcaagaggtagctggggactgtgaggyccattatactaatcagtagaaagtgctgtttggtcaagagatcaaagagaacaggacctgccagggccttagtcagccaccactactgctcatctggatggcccagtggcctcctagtgggaccctgccttcagttttgctctatcccctctccagccccagagagccttctaaattgcaagtctgatcatgtcactcctctgcttactgcgatgaatagcacccgcttgttctcagaatgaagcccaaactccctggccagcctttcaaggcccttgcatctctctctcctctcagcactcactgcagctgtttgccggtgcctggcctgacctcatctgcctcccagccttcacactgtttctctccagcacctgcctgccctgcagttttctcttctagatgccactcccgacctggggtggtccaggggactccctgaggtccccgcagcccagctgcctgggcttccctcctctccgcattggccgcctggtggagccattgcctgtctgcatgtccgtgcctgtcatcagttggcacatattaag

SEQ ID NO: 31065 - DNA, 793 bp, Homo sapiens
aggcgatggccagcgtgatggccagtggccagcggatctgacctggcttatccagcccgtccgtcatctgatgcatgttgcgcctggtcaaacagtggagggaggagaaagttacacagagctggtgggagccggagtgacccaggggtgcccagggcatggccacagatgatatccccgccctagaactgtgctgacaccgtcatcaccgtgattcaagaggtagctggggactgtgaggcccattatactaatcagtagaaagtgctgtttggtcaagagatcaaagagaacaggacctgccagggccttagtcagccaccactactgctcatctggatggcccagtggcctcctagtgggaccctgccttcagttttgctctatcccctctccagccccagagagccttctaaattgcaagtctgatcatgtcactcytctgcttactgcgatgaatagcacccgcttgttctcagaatgaagcccaaactccctggccagcctttcaaggcccttgcatctctctctcctctcagcactcactgcagctgtttgccggtgcctggcctgacctcatctgcctcccagccttcacactgtttctctccagcacctgcctgccctgcagttttctcttctagatgccactcccgacctggggtggtccaggggactccctgaggtccccgcagcccagctgcctgggcttccctcctctccgcattggccgcctggtggagccattgcctgtctgcatgtccgtgcctgtcatcagttggcacatattaag

SEQ ID NO: 31066 - DNA, 2750 bp, Homo sapiens
ccctcatttaaatgcaaaagaaggcaaacagaatctggaagttgacagcatccataaagggacacctgaagcaggataaggatcagttgttagaaaacagcttctcaatgatgcagtccctgtgtgcttcctccaccctgcagacagggctgtccctgggcacagtggctctctgcttccagcatttgtgtatgggtgaaaccctaggccagtgcatgactgagacctccttgaaggaaaagagaagcaaagtcctgaggccagggtcttgttcgtgatagtattctctgtaccagagcagagcctggtacccagcaagtatcaacacatatttgcatgaatgaatgactggctgggctggctggatcaacagatcaaaagatcagtggatcagtgaatatggctgaatggatgggtagatggatggatggacagatgaacagatgggtgggtgggtggataaatgcagggatgggtagatagatgggagaaaggaagagaagaaggcagggagagagggtaaaatgagggaggtacagttctattgcctgtgttctgctgagcatacttggaagtagggagattgctgtaccatcaatcattaaatatttattgagcagttcattatgtgccaggtactatgctaggcaatactacagtgtggaagacatgcaggtcgccgccctcataggatccaaactgtagtagagatacaggcaattacacaagtgatgatcacatggtgggataagtacaatgatgaaggacgtactaggcaccataggaaggcttcccggaggaagtgacatctaaactgaacactgcaggaagagtagctgttagctgggtgagcagggcttgggatgggggtggagtgtcccagacaaagggagcagagtgagcattagcccaggggagcaggaggcaaacaggactggggagcagctgaaaggtggaagaacatcaggtatgtcaggtatgaacatcaggagcaccagccaatggaaccacttcctcattctcctcaagggactcctcctcagtggacacctgttgtttttctctgcccagactcatccagtcttctttctttgggaatagccccctaattttattttgaggaaatcccccaaattcccctccactattctcagtacacgtggttcatgggagtttgacatcaccccacaatcctggggtgggcacgagaccctggcctggccaatccgtaaacttatgttcatctggccataggaagctcagctaggccaattagatgctaccctagggcttcactggaaacactgggaagggagtgttttctttccactggagggtggggagaggctaatgggaggagaatttgcagtgctagggaccatttttgtcaccacatgggagaagcctgccagatcatgaagtccacacagaggaaaacaaaccagaagtgggagagagactgattctcaaaggtggatggatggatggatggatggatggatggatggatggatggatggattggaaagagtggggaaggaaggtaggaagagaaggaaggagggaaaagggtaaaatgggggaggcatagttctactgcctctgatctagtgagtatattggcgggagaacagctacaccttcaattatcaaatatttatttatgtgtcaggtactataccaaatgcactacagtcaaaatacagtatagaagacagttggggtctctggcctcacagagtacacgccgtactggtgagacagacaaatcagtgtgtgagcccctggatccagttagacctgagctacatgttcatgtgattcaacagagtgtcatttttatctaagccagtttgcaccagattccagtcccttgccactaaacaaattgcaaaaggcagacttccttccctttcagcctccccaactacccatatcagtcctgatcccaaccggccaggctcagtgcagtgactcaggagcagtgctgactgggcggaggctccctccagcatcccgggtgctgcttcccaccgcgctaagtgctgctccttctgcccctctctgcacccaggaactgtccactgtcgatcagataccatctcttctctggcaccttcctgatactcagtagatttcatcaccccctcttccatgttcccacacactgtcatatccccactaaggcacctgtcatagtgtgcagccacatctcgtggtctggatatgctgatgatcaatacatgtattcttagtgaatgggtgtctgggcaggacagcagaaagagaagggaaggttacctagagggaaacctcttccattctgcttaggaccagttccgtccctggatgacactgtgcacacaccctggctggcaggctgtgacagccccgcagagctgccctgccctaagtctgagccaggaccctggtctccmttccagggcacagtggcatgaagatcaatgcctggcaggaagcatcagtattcctcaaactccacaccttcatcccacagacgggggaaaccgagtgtcagagccccactatctggcactgggtcagtgttgccacttgtgttagcaaggtgactttcggtgtcatgggaaggaaacactgccaaactggacactagtaacacagcaaccgaggtgacatagggctggaggaagagtcaggagatatgcttctctctgtgtatcttcttgcattgtttactgtactgttcttcacccctttcagctctctga

SEQ ID NO: 31067 - DNA, 2750 bp, Homo sapiens
ccctcatttaaatgcaaaagaaggcaaacagaatctggaagttgacagcatccataaagggacacctgaagcaggataaggatcagttgttagaaaacagcttctcaatgatgcagtccctgtgtgcttcctccaccctgcagacagggctgtccctgggcacagtggctctctgcttccagcatttgtgtatgggtgaaaccctaggccagtgcatgactgagacctccttgaaggaaaagagaagcaaagtcctgaggccagggtcttgttcgtgatagtattctctgtaccagagcagagcctggtacccagcaagtatcaacacatatttgcatgaatgaatgactggctgggctggctggatcaacagatcaaaagatcagtggatcagtgaatatggctgaatggatgggtagatggatggatggacagatgaacagatgggtgggtgggtggataaatgcagggatgggtagatagatgggagaaaggaagagaagaaggcagggagagagggtaaaatgagggaggtacagttctattgcctgtgttctgctgagcatacttggaagtagggagattgctgtaccatcaatcattaaatatttattgagcagttcattatgtgccaggtactatgctaggcaatactacagtgtggaagacatgcaggtcgccgccctcataggatccaaactgtagtagagatacaggcaattacacaagtgatgatcacatggtgggataagtacaatgatgaaggacgtactaggcaccataggaaggcttcccggaggaagtgacatctaaactgaacactgcaggaagagtagctgttagctgggtgagcagggcttgggatgggggtggagtgtcccagacaaagggagcagagtgagcattagcccaggggagcaggaggcaaacaggactggggagcagctgaaaggtggaagaacatcaggtatgtcaggtatgaacatcaggagcaccagccaatggaaccacttcctcattctcctcaagggactcctcctcagtggacacctgttgtttttctctgcccagactcatccagtcttctttctttgggaatagccccctaattttattttgaggaaatcccccaaattcccctccactattctcagtacacgtggttcatgggagtttgacatcaccccacaatcctggggtgggcacgagaccctggcctggccaatccgtaaacttatgttcatctggccataggaagctcagctaggccaattagatgctaccctagggcttcactggaaacactgggaagggagtgttttctttccactggagggtggggagaggctaatgggaggagaatttgcagtgctagggaccatttttgtcaccacatgggagaagcctgccagatcatgaagtccacacagaggaaaacaaaccagaagtgggagagagactgattctcaaaggtggatggatggatggatggatggatggatggatggatggatggatggattggaaagagtggggaaggaaggtaggaagagaaggaaggagggaaaagggtaaaatgggggaggcatagttctactgcctctgatctagtgagtatattggcgggagaacagctacaccttcaattatcaaatatttatttatgtgtcaggtactataccaaatgcactacagtcaaaatacagtatagaagacagttggggtctctggcctcacagagtacacgccgtactggtgagacagacaaatcagtgtgtgagcccctggatccagttagacctgagctacatgttcatgtgattcaacagagtgtcatttttatctaagccagtttgcaccagattccagtcccttgccactaaacaaattgcaaaaggcagacttccttccctttcagcctccccaactacccatatcagtcctgatcccaaccggccaggctcagtgcagtgactcaggagcagtgctgactgggcggaggctccctccagcatcccgggtgctgcttcccaccgcgctaagtgctgctccttctgcccctctctgcacccaggaactgtccactgtcgatcagataccatctcttctctggcaccttcctgatactcagtagatttcatcaccccctcttccatgttcccacacactgtcatatccccactaaggcacctgtcatagtgtgcagccacatctcgtggtctggatatgctgatgatcaatacatgtattcttagtgaatgggtgtctgggcaggacagcagaaagagaagggaaggttacctagagggaaacctcttccattctgcttaggaccagttccgtccctggatgacactgtgcacacaccctggctggcaggctgtgacagccccgcagagctgccctgccctaagtctgagccaggaccctggtctccattccagggcacagtggcatgaagatcaatgcctggcaggaagcmtcagtattcctcaaactccacaccttcatcccacagacgggggaaaccgagtgtcagagccccactatctggcactgggtcagtgttgccacttgtgttagcaaggtgactttcggtgtcatgggaaggaaacactgccaaactggacactagtaacacagcaaccgaggtgacatagggctggaggaagagtcaggagatatgcttctctctgtgtatcttcttgcattgtttactgtactgttcttcacccctttcagctctctga

SEQ ID NO: 31068 - DNA, 600 bp, Homo sapiens
  misc_feature (1)...(600): n = A,T,C or G
agtgtttgtcatcatcattattacattactatagctgtatgcaagtctttcaatagacacataaatgtttctcccaaagcaagggttttggtgatcaggaatgaaacttaatataaaaactaaattaaattgaactttttagaaattgccttgagaaaacctggggtgggaaataaggacttgaaactagactggaagataatcttggattccgaggggacccaagatgattgggagcatgactttggcaggaagtcattttaacatcatggcattgagacataaatgcccacctgaaatagctggtaatatggggactgaagtactcatgttagtgtgacagcagcagggtcactggattgaataactccagggggcaccattcatccattcctttattccaggaagtgttatggaatacaaggtattacacagaagcagcaatttggaaagaccatcttgagagattcttcataaaaacagaaccccrgtctannnnnnnnnnnnnnnnnnnnnnnnnnnnnnnnnnnnnnnnnnnnnnnnnnnnnnnnnnnnnnnnnnnnnnnnnnnnnnnnnnnnnnnnnnnnnnnnnnnnatctt

SEQ ID NO: 31069 - DNA, 506 bp, Homo sapiens
cccatgaggtcactatatgctgtctggaacttttgtcacttgcccgtccacactgtgcacaatgacaatttctgctttgaaaagccaatgtctggcctttatcagggcctccaagcaaagagatgctttggctgaatacaggcctggacactgctgccacgtggccactggcggggggtagctgggatgccccctccaggcccggctgtggctggctgagctgctttctcgcggccccatgcaggtggttccctgcgcctgccgtggctggctgctggctatgctccacactagctctgacagcccccagctcctttcgttgatgagaagaggcaagggtttcgatattgccacaacgacttctttctaattccagayccgggcaggcatctggatgagcaccagatcccttccagatgaccttttagagagggacaattcagtccatgttttcctgccagatctagctctgctcaccccttccttgtgcccttccctccaggaaa

SEQ ID NO: 31070 - DNA, 540 bp, Homo sapiens
tgcctagaatttctctgcttcctgcctctatcattgtatcactactccacaactatgctatataatatagtctattgcttctagactataaacttgcacagcatgtttctgtactgtatattgcaggcaaytgtaacacaatggtgagtattcgtgtatctaaacatatttaaacatagaaaaggtgatacattgtgctacaactttaaaatggctatgccatcactaggcaataggaattttttcagttccatcataatcctatgagatcaccatcatagatatggtacattcattgttgaccaaaatatctttacgcatcacatgactgtatttggttctgcccatcacaaaggtaaaacaacattactcacctgaccacaagggagttaaaaataatacaacaaaagcagcaacaagaaagaaaacttggagacgatgacatatgtagaatagtagaagacactagagctaaatagatttagagagagagcgggttcaggtgttgctttgttttgtgttgtttttctttgtttgttt

SEQ ID NO: 31071 - DNA, 1168 bp, Homo sapiens
actctaaaccatggcactatcctctcttacctgatctaaggtactagcttcccaaatcktttactcacgtccacctttgtgacttgtctaatctccacatcacagccagagatgatgttgtggatggagttttgttctgttttgttttacattctaaaaatctgatattatgcccctacttaaaatttctcaatgactttcacatgcatgttcttagttgaagacaagtacaaaatgcttcaatgtcacctacaaacccctcgatgttctgggcctaacaatgttctggcacctcctcctacatatgctgactcatctcatattttactttgacttcttccatatggaccgcttgttgatttcccctaagtcccgctccatctcccagcacaaggtcttttcatacatggttttctctgcacatgttgttctttccccccattttcactgaactctctcctgtttaccaaatagatttcagctcaatagttaatatctaaagaaaggtttcctctaggctttttgatatcattatattttcttatatagattccaggtacaataaacatgttattctaataacacaatagcaatattgcattgatttctttgattatttgtttagttgtctctctacctaccagactgaggtctatgcatatacactgacatatttttttcactgtagattactaaagcttaatatgtctagatggttcataataaacattctataggtatttttagaagaactatattaaaatattttatttcaaaatgaaaatatgtctcatttgtttcaaacgagtagtaaaaaatagtgaacatcataaaaattcagaagataaagaaataatatcaaattgaaaggataaagactggcatcaccaataatgcaatttttaaggtatgtaatgaatgagaaaaagctttttgaaagacaagaagaatatatacagaattcggataacaagaaaggcaagagccaatatggaaagtttctatattactggtgctcaaggtgacagtggctagaccagattgattaaaagggagcatttttgtaggaaaattatgaacatgaaaagttgagaatcaaattacatctatgttagtaaggaaaatctagaagatggatttagtgaatgcaaaaacttagttcacttag

SEQ ID NO: 31072 - DNA, 1168 bp, Homo sapiens
actctaaaccatggcactatcctctcttacctgatctaaggtactagcttcccaaatcttttactcacgtccacctttgtgacttgtctaatctccacatcacagccagagatgatgttgtggatggagttttgttctgttttgttttacattctaaaaatctgatattatgcccctacttaaaatttctcaatgactttcacatgcatgttcttagttgaagacaagtacaaaatgcttcaatgtcacctacaaacccctcgatgttctgggcctaacaatgttctggcacctcctcctacatatgctgactcatctcatattttactttgacttcttccatatggaccgcttgttgatttcycctaagtcccgctccatctcccagcacaaggtcttttcatacatggttttctctgcacatgttgttctttccccccattttcactgaactctctcctgtttaccaaatagatttcagctcaatagttaatatctaaagaaaggtttcctctaggctttttgatatcattatattttcttatatagattccaggtacaataaacatgttattctaataacacaatagcaatattgcattgatttctttgattatttgtttagttgtctctctacctaccagactgaggtctatgcatatacactgacatatttttttcactgtagattactaaagcttaatatgtctagatggttcataataaacattctataggtatttttagaagaactatattaaaatattttatttcaaaatgaaaatatgtctcatttgtttcaaacgagtagtaaaaaatagtgaacatcataaaaattcagaagataaagaaataatatcaaattgaaaggataaagactggcatcaccaataatgcaatttttaaggtatgtaatgaatgagaaaaagctttttgaaagacaagaagaatatatacagaattcggataacaagaaaggcaagagccaatatggaaagtttctatattactggtgctcaaggtgacagtggctagaccagattgattaaaagggagcatttttgtaggaaaattatgaacatgaaaagttgagaatcaaattacatctatgttagtaaggaaaatctagaagatggatttagtgaatgcaaaaacttagttcacttag

SEQ ID NO: 31073 - DNA, 1168 bp, Homo sapiens
actctaaaccatggcactatcctctcttacctgatctaaggtactagcttcccaaatcttttactcacgtccacctttgtgacttgtctaatctccacatcacagccagagatgatgttgtggatggagttttgttctgttttgttttacattctaaaaatctgatattatgcccctacttaaaatttctcaatgactttcacatgcatgttcttagttgaagacaagtacaaaatgcttcaatgtcacctacaaacccctcgatgttctgggcctaacaatgttctggcacctcctcctacatatgctgactcatctcatattttactttgacttcttccatatggaccgcttgttgatttcccctaagtcccgctccatctcccagcacaaggtcttttcatacrtggttttctctgcacatgttgttctttccccccattttcactgaactctctcctgtttaccaaatagatttcagctcaatagttaatatctaaagaaaggtttcctctaggctttttgatatcattatattttcttatatagattccaggtacaataaacatgttattctaataacacaatagcaatattgcattgatttctttgattatttgtttagttgtctctctacctaccagactgaggtctatgcatatacactgacatatttttttcactgtagattactaaagcttaatatgtctagatggttcataataaacattctataggtatttttagaagaactatattaaaatattttatttcaaaatgaaaatatgtctcatttgtttcaaacgagtagtaaaaaatagtgaacatcataaaaattcagaagataaagaaataatatcaaattgaaaggataaagactggcatcaccaataatgcaatttttaaggtatgtaatgaatgagaaaaagctttttgaaagacaagaagaatatatacagaattcggataacaagaaaggcaagagccaatatggaaagtttctatattactggtgctcaaggtgacagtggctagaccagattgattaaaagggagcatttttgtaggaaaattatgaacatgaaaagttgagaatcaaattacatctatgttagtaaggaaaatctagaagatggatttagtgaatgcaaaaacttagttcacttag

SEQ ID NO: 31074 - DNA, 1168 bp, Homo sapiens
actctaaaccatggcactatcctctcttacctgatctaaggtactagcttcccaaatcttttactcacgtccacctttgtgacttgtctaatctccacatcacagccagagatgatgttgtggatggagttttgttctgttttgttttacattctaaaaatctgatattatgcccctacttaaaatttctcaatgactttcacatgcatgttcttagttgaagacaagtacaaaatgcttcaatgtcacctacaaacccctcgatgttctgggcctaacaatgttctggcacctcctcctacatatgctgactcatctcatattttactttgacttcttccatatggaccgcttgttgatttcccctaagtcccgctccatctcccagcacaaggtcttttcatacatggttttctctgcacatgttgttctttccccccattttcactgaactctctcctgtttaccaaatagatttcagctcaatagttaatatctaaagaaaggtttcctctaggctttttgatatcattatattttcttatatagattccaggtacaawaaacatgttattctaataacacaatagcaatattgcattgatttctttgattatttgtttagttgtctctctacctaccagactgaggtctatgcatatacactgacatatttttttcactgtagattactaaagcttaatatgtctagatggttcataataaacattctataggtatttttagaagaactatattaaaatattttatttcaaaatgaaaatatgtctcatttgtttcaaacgagtagtaaaaaatagtgaacatcataaaaattcagaagataaagaaataatatcaaattgaaaggataaagactggcatcaccaataatgcaatttttaaggtatgtaatgaatgagaaaaagctttttgaaagacaagaagaatatatacagaattcggataacaagaaaggcaagagccaatatggaaagtttctatattactggtgctcaaggtgacagtggctagaccagattgattaaaagggagcatttttgtaggaaaattatgaacatgaaaagttgagaatcaaattacatctatgttagtaaggaaaatctagaagatggatttagtgaatgcaaaaacttagttcacttag

SEQ ID NO: 31075 - DNA, 576 bp, Homo sapiens
agacctaatagttaatagtgcctgtttttctttatcttgtttagggtttgtgaaacaggatctgataatcaacctcttggtaataatcaacaatcaaattgtgaatattttgttgatagcctttttgaggaagctcagaaggttagttccaaatgtgtgtctcccgctgaacagaagaaacaggtaaataaatgtctattacttttctttttytttcagtgtttctcaatatatggacctgttagagggtccctaaggtcaaaattgttttgtttgagacaaggtctttctctgtcacccagactggagtgcagtggctcgatcttagcccactgcaacctcaacctcctgggttcaagcagtcctcctgcctcagcattcgcaggtagcccggacctcagcacacaccaccatgcccagctaatttttttattcttttgtagagacggggtcttgctttgttgcccaggctggtctcaaattcctgggctcaagtagttctcctgccttggtttcccaaagtgctgggattataggtgtgaggccaaaactgttttcataatagatattgtttcc

SEQ ID NO: 31076 - DNA, 1016 bp, Homo sapiens
ctatccaagagataattttttttyccaaaagcttataagaaaaagcttggcttgcaaatgttagtttgcatagataaaggcaaaaaatggggttgagtgaagaagaggaagagagtctttcacaattaaagtagtctcagaaatggtttttgactgtgcgatttaagtagttagccctaaaaagtgtcatgcagagagcttcaatcatctcaaaataaaatctgagaaatattaaatatctaatgtctgatgcagttcctggcatgttagttgctcagcaaatgtgtatctaatggtgaattatgaaatgggctacatatgttgattttcttagtataaaaaagttgttatgaaaaaataattgtagtttttttataattaaaacaataaagcatttctgaataatcatagctatacacacacatgtacacatatataaacttagaatagggctcgtgcatactaggtactatacactcacacacaaacacactcacatacacacacagaaagtaccctcatcacattcttatgaatgtgtactactttcatatgttttttttaaatgagtaaactgatttgtctaagattacacacttggtaaatgccagagccaagatgctaatccaggaagtctggttctggaatccattcttttaatcccaatatattgtgtgaatttaatacccctatgcttttaaatatgtcaaaactatatattcaaataagtggtttcctctttgatggaataattttgagtaactacattttgttcaattttttctcaattacttatttgttcaaaacatattattgtcgtgttcctataggtggaatcattgagggtaggcttaattgtttttaaatgccaaaaacaatttgttgcaagttgtggtttgacattgcatcaaaaaatatgaatacatagtaatgattctgattttttgaatgtctcataaaatgatcctaaaggaaattccatagagtagttccaaaagtgtttttgaaaaatatgt

SEQ ID NO: 31077 - DNA, 1016 bp, Homo sapiens
ctatccaagagataattttttttcccaaaagcttataagaaaaagcttggcttgcaaatgttagtttgcatagataaaggcaaaaaatggggttgagtgaagaagaggaagagagtctttcacaattaaagtagtctcagaaatggtttttgactgtgcgatttaagtagttagccctaaaaagtgtcatgcagagagcttcaatcatctcaaaataaaatctgagaaatattaaatatctaatgtctgatgcagttcctggcatgttagttgctcagcaaatgtgtatctaatggtgaattatgaaatgggctacatatgttgattttcttagtataaaaaagttgttatgaaaaaataattgtagtttttttataattaaaacaataaagcatttctgaataatcatagctatacacacacatgtacacatatataaacttagaatagggctcgtgcatactaggtactatacactcacacacaaacacactcacatacacacacagaaagtaccctcatcacattcttatgaatgtgtactactttcatatgttttttttaaatgagtaaactgatttgtctaagattacacacttggtaaatgmcagagccaagatgctaatccaggaagtctggttctggaatccattcttttaatcccaatatattgtgtgaatttaatacccctatgcttttaaatatgtcaaaactatatattcaaataagtggtttcctctttgatggaataattttgagtaactacattttgttcaattttttctcaattacttatttgttcaaaacatattattgtcgtgttcctataggtggaatcattgagggtaggcttaattgtttttaaatgccaaaaacaatttgttgcaagttgtggtttgacattgcatcaaaaaatatgaatacatagtaatgattctgattttttgaatgtctcataaaatgatcctaaaggaaattccatagagtagttccaaaagtgtttttgaaaaatatgt

SEQ ID NO: 31078 - DNA, 586 bp, Homo sapiens
ttaatatcaaggttgttaacaatggtcttaggagatgcaaagacgaaaaactacttaccttaaaaatctgtattcttgaagatayatactccacttgaataagatactgctcaaggtttaggcttcctggagaactcagaggattttgtagttgtacttaatatactcaatagccaaatttcctaaactttcataattttgctaaccaagggcccttaacaaagttaaaagacaccacagggttcaaaagtgaacaaatatgttgtttttgttttaagacggagtctcattcttgtcacctaggctggagtgcagtggcgcaatctctgctcactgcaacctccatctcccgggtttaagtgattctcacacctcagccttccgagtagctgggattacaggcgcgcgccaccaagcccagctaatttttacatttttagtagaaatggggtttcaccatgttggccacgctggtctcaaactcctgacctcaagagatccgcccgcctcggcctcccaaagtgctgggattacaggcatgcgccactgtgcctggtcacaaatatgttaatgagccaataagatg

SEQ ID NO: 31079 - DNA, 544 bp, Homo sapiens
gtcgcccagactggagtgcagtggcgcaatcttggctcactggaacctccacctccagggttcaagtgattctcctgcttcagcctcctgagtagctgggattacaggcacgtgccaccacgccyggctaatttttatatttttcgtagagacggggtttcaccatgttggccaggctggtttcgaactcctgacctcaggtgatccacttgcctcggcctcccaaagtgctgggattacaggcgtgagccaccacacccggcctaatttaaaatatcttttagaaaactctcagccagagatgaattagggggtaagccaaccactcggtttcctggtagccaatctataaagtccccaggagatcactggaaaagtaacaagatggaaaaatgagattttcagggtgagcactcactatacatgatcgagaagagcactataaaaagccaggtgtgaggaggtaaagctcccataaggacaagatcagagataaacaaagagtctctgaactgctaaagaggcttgccagggtccctgagcc

SEQ ID NO: 31080 - DNA, 544 bp, Homo sapiens
gtcgcccagactggagtgcagtggcgcaatcttggctcactggaacctccacctccagggttcaagtgattctcctgcttcagcctcctgagtagctgggattacaggcacgtgccaccacgcctggctaatttttatatttttcgtagagayggggtttcaccatgttggccaggctggtttcgaactcctgacctcaggtgatccacttgcctcggcctcccaaagtgctgggattacaggcgtgagccaccacacccggcctaatttaaaatatcttttagaaaactctcagccagagatgaattagggggtaagccaaccactcggtttcctggtagccaatctataaagtccccaggagatcactggaaaagtaacaagatggaaaaatgagattttcagggtgagcactcactatacatgatcgagaagagcactataaaaagccaggtgtgaggaggtaaagctcccataaggacaagatcagagataaacaaagagtctctgaactgctaaagaggcttgccagggtccctgagcc

SEQ ID NO: 31081 - DNA, 544 bp, Homo sapiens
gtcgcccagactggagtgcagtggcgcaatcttggctcactggaacctccacctccagggttcaagtgattctcctgcttcagcctcctgagtagctgggattacaggcacgtgccaccacgcctggctaatttttatatttttcgtagagacggggtttcaccatgttggccaggctggtttcgaactcctgacctcaggtgatccacttgcctcggcctcccaaagtgctgggatyacaggcgtgagccaccacacccggcctaatttaaaatatcttttagaaaactctcagccagagatgaattagggggtaagccaaccactcggtttcctggtagccaatctataaagtccccaggagatcactggaaaagtaacaagatggaaaaatgagattttcagggtgagcactcactatacatgatcgagaagagcactataaaaagccaggtgtgaggaggtaaagctcccataaggacaagatcagagataaacaaagagtctctgaactgctaaagaggcttgccagggtccctgagcc

SEQ ID NO: 31082 - DNA, 797 bp, Homo sapiens
tcctaagacgttcatttctttgaagcactattaccagtggagctgacaacaaaaagttaatagacataggactcaggcactcaggctcactctgcttaaactagcggagtggggaagaagagagacgtgtacattccatatccataccagcctggggtcttgggttctaagaggggtggtggcttttccctgagccctaaacccagcagctgcagttagtgccaaagattatgagggtacagaaagtaaagaaagatcagtgttttaaagtctccacccaccatatgatttctcagaaacctcaaatgtcctttgttgttgttgttcgttttgttttgttttgtttttgagatggagttttgctctgtcgcccaggctggagtgcagtggcgcgatcttggctcactgcaagctctgcctcccgggttcaagcaattctcttgcctcagcctcccaagtagctgggactacaggcacccaccaccacacctggctaatttagcaacctcaagtcttaatccatataggaactgtaagaagactactggtttgtttctcatcactaacatggtaactcatgattgccgaacactggctgagcagtcatgctctgcccagtggcattgttttctaagaacttaagtgtatcttctcattatcctcataaaatccccattatcagctccattcyacaagtggagaccttgaaacttagagagcttaaataataataataactaaaattcatgaagggtgcccttctagcccactacacataccaggcactgttctgagtg

SEQ ID NO: 31083 - DNA, 616 bp, Homo sapiens
gctaatttcttcatgtcttccatccagttcctcttcccctcaccatcctcctctctcctcacccagtctctttattcctgaagagccaaaaggaaatttctggaaatgaccttctaatcactcaagctttttctctaaaaaaatttaaygaatcttcccaagaccctaattagcttaacctgggatccaaggactgccctaggcctaaataatccatagatgcgcttcagggaccccatgagctagctgaaattatatgcaaaattgtgggggtgggtgcaaaaaaaatcagaaagaatgaataagacctactatttgatagcacaagagggtgactatagtcaatagtaacttaattgtaccttttaaaattaactgcaagagtgtaattggattgtttgcaacacaaacgataagtgctctaggggatggataccccattctccatgatgtgattattacataataagtgcctgtatcaaaacaggtcatgtatgccacagatatatacacttgctatatacccgcaaaaattaaaaattaaaaacaaacaaaaaattgtgagggtagggtacttcctggctccctgcccacccaagaggtccaattttcatca

SEQ ID NO: 31084 - DNA, 624 bp, Homo sapiens
ccaaaagtatttaaaaagttacctcagcagttaaacatcacattatatctacttaattacctttagaacactggaaatatttttatctcagaaactgataatccactactttatatcttactccaaattgtactatattttagtttttgcagttttacaatggttaaaaacattaaatatttgtattttattgataattagaagaacattctagaataacaataatgttgaataagaataaaaactaagctgggtatggtagtaagcatctgtagtcccagctactcaggaagctgaggtgggagggttgcttgagcccaggagttcaagtttggcctggacaacagagcaagactccatctctacaaaaccataaaaaataaataaataaaaactaatgtaaagtagtgagtcaacrgtatttcatatttgtcagtcatgctatattgctcccaaactgtctgcacaaggagaaattgtacttttcttctacacctagacaaagaacaattacgcaaatagcatgtttgcctgaacaccaaaaatgaaattctgtccctcccaattccttcctgtcagctaaggagagtttaattttttttttttttttttttttttaaagaa

SEQ ID NO: 31085 - DNA, 520 bp, Homo sapiens
atctgccggtctcaaacgcctgacctcataatccgcccacctcggcctcccaaagtgctgggattacaggcgtgagccaccggcatggccctatatagcccttcttaacagttcccctcccacaaccctttcacccacttacccagaggccttccgggaccaacaatgtaacataaattgagacctgaagaacagctgctcaaaattaaaaaattaaaacccatgcctgacaaagaaaacacttctggagacagaataaggactgggtaagttctgagtttgcaacttccgatctattcctttgatccctacccatggtcagagccccatctctctttggtrctcagcctacaaggaactggcatgtagtcattttgccccatgctattcccttgcagggtagacagaggaggcttcattgatctggaatcacttggatagggtcttgaaggatgagtagtagtttgctgaggggagtttcacaagggggaaaagtggattccaggtacagagaaatagc

SEQ ID NO: 31086 - DNA, 482 bp, Homo sapiens
cttcctgaggctgtgtsacagcgcgtcctcaactttggcaaaataaactttctaaattaactgagacctgtctcagatgttctgggttcacaatttctatgactgagttttttagtatcccctatgtatggcatccaaggagtgagaatgtttcactcatcttaccctagtcctgtcctgtctggtgtcttttctcccatattctatttgtggcggtcacaaaatcctgcccagcttcaaggggaagggaaaaaggctgcagctgtcaatgggccccagaaatattactgtggctacttttggagaatacaatctgccacaccttgcaacaagcaactctaaggaatctgacttgtttggcaagtacaatagctaaattgattccaggatccagaagagcaacatgtcaagacaaatatccacaaattcttagaattttccacagccttgtcttagtaaaatttttactgactataggacag

SEQ ID NO: 31087 - DNA, 482 bp, Homo sapiens
cttcctgaggctgtgtgacagcgcgtcctcaactttggcaaaataaactttctaaattaactgagacctgtctcagatgttctgggttcacaatttctatgactgagttttttagtatcccctatgtatggcatccaaggagtgagaatgtttcactcatcttaccctagtcctgtcctgtctggtgtcttttctcccayattctatttgtggcggtcacaaaatcctgcccagcttcaaggggaagggaaaaaggctgcagctgtcaatgggccccagaaatattactgtggctacttttggagaatacaatctgccacaccttgcaacaagcaactctaaggaatctgacttgtttggcaagtacaatagctaaattgattccaggatccagaagagcaacatgtcaagacaaatatccacaaattcttagaattttccacagccttgtcttagtaaaatttttactgactataggacag

SEQ ID NO: 31088 - DNA, 1296 bp, Homo sapiens
atcctcactttaattacaagatcttttaagataactttgtgctgtctatccaaatttgcacacttctttggtgagtttrgttgtctttctactgtgcaaacatatgtagtacttaattttacttctatatttacttatattgtaacccttttctatattggtcagttgtctttttttacctgttggaaagtgtcaagtcccatttttccaggaaagttttaatagcttgtctttctcattaatatgccttcccttgagcatcaattacattagtctatatcacattatctcatgacaaatcattgcttacctcttgctctttcatattctttattggtgcaatgaattgaagctgggtctcacactaaactctaagatgcttggaaggagggaagatatccttcatgtcttctatatttcttcctccacccccactgttcagcctatagttggcataacagcaattcttaaagacaaatacttgctcactactctgagcctactcattacaatgtatgctacgagatttctggttccttaagtgtatttgttcttttcaattagaaaaagtctaaactagtgaaaaaaaaatatgaatgtcttttttttttttaaagtgggggatacatgctattttagcctctattgactattttaagtaggtagtccccaaggatgcctgccatcaattccttccctcataatacgtgcatgctgctctaccctgtaagtcaagtcagccaccccgctccctccaactccttacagtggccttgagacttgctttgacaattagaaatcagtgacactgtgccaattctgggccgaggctttcggagacctggcagcttccactttggctctgggaaagccagccactgtgttgtggagaagctcaggagagactcgagaaggaggagaaaccacagagcagctacttgggggaaaggcactgagctgccagacatgggaatgaagccttgttggattttccagtctggccagcctctagctgaatgcagccatatgtatgacccaaactgatgctacatggagcagaactgcctggccaagccgtgccctaatttctgacccaaagaatcatgaaaaagagtaaaatcatgttgttttgcatgactaaatgctggagggctagttatgcaacaatagatagctgaagtattatcattaaaaataatagaagattcagttatagtaaaataactaacctccgtttggtcaccttcctgatctacactctctcttaactcttgcaagtttatggcctccctttac

SEQ ID NO: 31089 - DNA, 693 bp, Homo sapiens
aacatttttaaacaaatgatgacatatacagaaatgtacaatgaaacataatttggagaactgccaatactttgaaacacttatttttaagatctcttggtacatatttttcttcagaaaaatgaactattatgtcacaaatactgaatacttaaacttacatcactgaatgtgtattgcacataaagtactcccttctttcaatagaatctacaaaacgaacattaactttagaaaataaaggtcaatgttatatttatttttttaaatttagattttkatcaactaagctccaagtccataagttgtcctaggttgtttacttagaatcctctgggggaaatttttttttaattgattaatcactggcctccaacttacatttttcatgatgttctttggaaaataaaaaataaagttaatctgatgaagtagacctcatcatcttaccatactttccactttttcctcattttcttctttcatttttatatggaaaaataagagacaaggagctttgttttagacatgtgttcacactttcatttaacaaggagggatatgggataatgacattggggacaacctcctccctgaagcttctatgttgtccatatttgcaaaccaccaatcacagactgacttgggcatttctctctccactggcatattctttctgatttcattcttgcc

SEQ ID NO: 31090 - DNA, 507 bp, Homo sapiens
taggtctgcagcctaggaacaataggctgtgccacataacctaggtgtgtagtaggctacactatataggtttgtgtaagtgcactctgtgatatttgcacaatgacaaaatgacctatgcatttcctagagcaaactcctgtcattaagtaacatgtaactgttttttktttttgtgtgtgtgtgtgtgtgtaaagcgtgttcatgttcaactattcacttcttgcaagccttttctctctcaaatgtttactcttatgtgaaagaaatgaaaataccatctcaaacaatctttcagttccccattagagattatgaattcctaggtctgtatctctggactccactggctgggtcattttctttcataggtgctgagttttctggatatgccctcttttgacagcccatcagataaaccatcaaagaaatcgtggatgtcatgaaataaccttctctttcattatcaaatttaaaccttctcacttttagacttatttatatata

SEQ ID NO: 31091 - DNA, 507 bp, Homo sapiens
taggtctgcagcctaggaacaataggctgtgccacataacctaggtgtgtagtaggctacactatataggtttgtgtaagtgcactctgtgatatttgcacaatgacaaaatgacctatgcatttcctagagcaaactcctgtcattaagtaacatgtaactgttttttttktttgtgtgtgtgtgtgtgtgtaaagcgtgttcatgttcaactattcacttcttgcaagccttttctctctcaaatgtttactcttatgtgaaagaaatgaaaataccatctcaaacaatctttcagttccccattagagattatgaattcctaggtctgtatctctggactccactggctgggtcattttctttcataggtgctgagttttctggatatgccctcttttgacagcccatcagataaaccatcaaagaaatcgtggatgtcatgaaataaccttctctttcattatcaaatttaaaccttctcacttttagacttatttatatata

SEQ ID NO: 31092 - DNA, 507 bp, Homo sapiens
taggtctgcagcctaggaacaataggctgtgccacataacctaggtgtgtagtaggctacactatataggtttgtgtaagtgcactctgtgatatttgcacaatgacaaaatgacctatgcatttcctagagcaaactcctgtcattaagtaacatgtaactgttttttttttktgtgtgtgtgtgtgtgtgtaaagcgtgttcatgttcaactattcacttcttgcaagccttttctctctcaaatgtttactcttatgtgaaagaaatgaaaataccatctcaaacaatctttcagttccccattagagattatgaattcctaggtctgtatctctggactccactggctgggtcattttctttcataggtgctgagttttctggatatgccctcttttgacagcccatcagataaaccatcaaagaaatcgtggatgtcatgaaataaccttctctttcattatcaaatttaaaccttctcacttttagacttatttatatata

SEQ ID NO: 31093 - DNA, 626 bp, Homo sapiens
gagcatagttgaagatgtgatcagaggtgtaagaggcaggtgcattcggcgacaatttctgcaggggaatgtaagaagtttggcttttactctgtaatgacaaccccatggcagtttttaggacataatggtgaccacagagtagactttgaataaaaaagaaaataaaaattactaataccttcaaatgttcactcatatgaagtactaaaatttggtaattaggcaagtgtgtaaaataagttgatacagctgtataaacgtgtgtatataaaatattttctgtaggacaaatcatctgttatacaatcatgctattcataaatgtcaatagtagccacagatttttagatagactagtcactgaaacagtttgggtaatcatacaagagttacatatccagaagttactgaaggaattcagtggagtcaagacaccaagcagaaagctaaaaatgttatcaaactctgggaacaatttgcattcccccattccttcaaaggatatattgaagtgctaatccccagtgcttcaggatcattgtagatgtaattagctacgatgaactcatactggagtagggtaygcacttaatccaatatgacaggtgtcctcataaaaaagg

SEQ ID NO: 31094 - DNA, 449 bp, Homo sapiens
gtatactgcttgggtgacaggtgcaccaaaatgtcacaaatcaccactaaagaatttatttatgtaaccaaacaccacatgttccccaaaaacctattgaaataaaaaataaattaaaaaaaagagtgagtgaatttcaagaggaggaaaaacattgagaatacagaattaaaaagtggttagattgaatttaaaaaattgtcatatgtagkcttatatctgtctatgagctggcatttatattactattccaggtttctaaaagtaagtgcaattttagagttttgcgatgctaaataaactgaaacatgccatatattttgatatattgtccttgagaggaggctgagtgatactgagtgcaatattacattatgatatcacatggtttggctgtgtctccacccaaatctcaacttgaaatgtatctcccataattgccacgtgta

SEQ ID NO: 31095 - DNA, 572 bp, Homo sapiens
ttatttataaagtatttcttatgattataraatcatattttaaaatttttcagtattttaactgagtgggaaacatttcctgtcaaataaggatatggagaccagtccatggtactttagattaaaagctgaactcactgggaaaaaccttattttgcatgtgtaactagtaaagcagaaacaacagtgtactgttcggcactgtctgaatagtaattatagagtacagctttcatacagaaaaacagaaccaataaggaagtcaaacttggcagaatagttgagtgcaatttataaataagtcagttgaagaaatcatcgaccttttacctgtggctgattcgtgtaatggtgagagtcagcacaaatcttaacatttagcaacagcatgtatgtgaagctaaaacttgtaatgctctcatctttaatgtattttaaggaagttgatgcctaaagtaaatttattaaaaattcagagttaattatttaagatagtaataaattttgtgctctctttggcttggttgttctttatctttaacaattttaagagctctgttcataaatatcag

SEQ ID NO: 31096 - DNA, 572 bp, Homo sapiens
ttatttataaagtatttcttatgattatagaatcatattttaaaatttttcartattttaactgagtgggaaacatttcctgtcaaataaggatatggagaccagtccatggtactttagattaaaagctgaactcactgggaaaaaccttattttgcatgtgtaactagtaaagcagaaacaacagtgtactgttcggcactgtctgaatagtaattatagagtacagctttcatacagaaaaacagaaccaataaggaagtcaaacttggcagaatagttgagtgcaatttataaataagtcagttgaagaaatcatcgaccttttacctgtggctgattcgtgtaatggtgagagtcagcacaaatcttaacatttagcaacagcatgtatgtgaagctaaaacttgtaatgctctcatctttaatgtattttaaggaagttgatgcctaaagtaaatttattaaaaattcagagttaattatttaagatagtaataaattttgtgctctctttggcttggttgttctttatctttaacaattttaagagctctgttcataaatatcag

SEQ ID NO: 31097 - DNA, 572 bp, Homo sapiens
ttatttataaagtatttcttatgattatagaatcatattttaaaatttttcagtattttaactgartgggaaacatttcctgtcaaataaggatatggagaccagtccatggtactttagattaaaagctgaactcactgggaaaaaccttattttgcatgtgtaactagtaaagcagaaacaacagtgtactgttcggcactgtctgaatagtaattatagagtacagctttcatacagaaaaacagaaccaataaggaagtcaaacttggcagaatagttgagtgcaatttataaataagtcagttgaagaaatcatcgaccttttacctgtggctgattcgtgtaatggtgagagtcagcacaaatcttaacatttagcaacagcatgtatgtgaagctaaaacttgtaatgctctcatctttaatgtattttaaggaagttgatgcctaaagtaaatttattaaaaattcagagttaattatttaagatagtaataaattttgtgctctctttggcttggttgttctttatctttaacaattttaagagctctgttcataaatatcag

SEQ ID NO: 31098 - DNA, 1522 bp, Homo sapiens
gaaggcatagaaattagacgaatttcccagattacacagcagtcaaggcagagttgatcttttctgttgaacttatgtggctctaactcctacatccatgctggtacccagtgttctgtgttggggatgggaacatagatcaattgagtggtatgaaagatggaagggtatgactctaagatacttctgataatgtctggatttctgttggaattagtaggacaagctctgcagccaggctgcctggtttcaaacctgtactctgccacttgacagcaaggtgacggtgtctatgctatttcacctgtctaagtttcacttttcccctctacatatagagatataaatagcacctatatcatcagttattgtgttggtgaaataagatgatactttgaagtcttattctccatggcctccaaaatctctccatgatctgctatcctgtttcctcctcaactttctatctgtactatttacttcaccattgtgcatcttgctcaaagatgcttgcttctttttattccacaaacaaatctggctcactggggacatttatctcagaatattcatctgcctggaaaactctcctttcccttcctctcccagactgtaatatggcaatttttttcttatcgaggtgtcagttcacatgtttctcccatagataagttattcctgtacactcaacagaaagtagtcctctatttcctggtcacaatcatattacggttttatctatcttttcataatatgtatcactatctgtatttgtggtgtttgtttactggcttgttattatccctacaactataatttaagatgcataatgtcgcttgttcattaccacagtctgagctcttagaacagtatctgacatgtagagggaactcaatgaaaatttatagacaggaagaaaaagaagggagtgaaggagtgctgtgtatgactaaaaaattcggggaaagaacccacagtgggaatcactagctcctagacctcattaaattcaggacccataaccacatttttaatatctttagaaaatccacatttaactggaaattgtcccatgcactcaactcattttccaaacccatcccagacagagggatcaaacagatggactctgcattgtacctgggagtgcagccaaatctagctgggctggttgcattggaaaatctkacagaaatggagtagaatttacaaatttgaaaggggagtgaggtcctgcatcccacttccaattttggatcacccaggttatggcttttaaatggacatttgtattgtttttctctgcttaatgtttgttccttttctattggggatgatgagacatcatctggcatttctgccaatctcttcaccacaattatctgccaggcagaggatggctgttttggggaaaagactcagcttctccagtgaatcaagtacatgtaccccctcttcttcagggtcgtggacaatggtgagggagcaacaggaaaggttttgtgtgttgaaagatgttttg

SEQ ID NO: 31099 - DNA, 514 bp, Homo sapiens
atatatatatatgtgagagggctgaataaaaagattrcatggtcctctcatatttagaaaatatacaaatgtacagctgatatatgactgcacacttcaagtcttttttggatcaaatgggcttatacatttttacaactgaaaaaaaaactcatactgtcttgttgcgttttttttaagagaatgtaaagcataaagtctgatgcaatatacagctcccaagatgtttgttagaagattacactggatttatgcttcaatgcaatacttctttggaaaatttgtgtcagcagtttgccctttaaagcccttttaaatttcttagcagtcttttcccttgctgaagatagtccttgtattagtccattttcacacagctataaagacctacttgagactgggtaatttatgaagaaaagaggtttaattgaatcacagttctgcatgactggggaggcctcaagaaacttacaatcatggtagaaggcaaagaggaagcaaggcatgtctttcc

SEQ ID NO: 31100 - DNA, 764 bp, Homo sapiens
ccttttctgtgttgtatcatggacattttggaatctcaacagttttgcacaagacatctttgagtccatgtttaagaaacaaatcaaggaaacagaacaactcttggttggctcagttacaaataacactcagatccccttataagtgcagcctcgtaaatgtatttatccataaacatataatatttatataaaactgtgtttttccctccttcacccaccacattcataattaattcccatacattttcctcatttccatgatataagttagaaaaattgttaatcaastatgataaataaatgttatcccagatcaccctaagatttctttccacaaatgtgcaaatggtgcagtaggtgacagtggtgggtcttaagaataggcatgtctttaaggtagccacaatagttaacattattctaagtcttgaggtaaatcagaaatgatctcatcattcatggaagaaaaactaataaatataaacagaaactatgataagggaatattcatctcagtagcaatggctatatagcttgaagtacttttgttttcaactacctagattttgggggttgttaatgaagcatagatagcccattctgactaacacattgattagtatgcatattaggcctttgtctacacagaaaaagggattacaatttttaggacactcacattctctgtacctgtgacaatgtcttgagtagtactttgaaacttgggcttgtttccttttccttttctaaattctctagaa

SEQ ID NO: 31101 - DNA, 676 bp, Homo sapiens
taggccccatgcatacaactattttgttatgttaaataacatgatgaagattaagaagtctaaatactggctcttaacaggcgtcttctcaaataagtatagagagaaccagaacaggataattatcaggcgagggcctgtggctgggctttaggaaggatgttcttggcatggggagcctgtgcctggttccacagggtaattctgcacacacacaaaaccctgggcaggctccccaccrtgcacctgcagcctccagatttctggaattcagggattcctacaggcttacccatgcaggtgggtgagttaaacaatccacaccacccattagtttccattttatataaacactatgctggagaaatggtgaatcttaacaggcctgaaccatccagtccagggattggaaaagtatagcccaggacccaaatcctgcccaccacttgtttttatatgacctgcagctaataacgtttttcacattttttaatggtaaagtggagggaaaataaagaataatactattttttgacatgtgaatatattacatgaaattcaaattttagtgcctgatatagtttggatatttgtccccacccaaatctcatgttgaactgttgtccccagtgtaaaaggtggagcctggtgggaggtgtttaggtgtcatgggagt

SEQ ID NO: 31102 - DNA, 535 bp, Homo sapiens
ggaaggaaatgcatttccagagggaaggagcggatcaagtgctgtcgacgtgcccagccctcacgccactttagggctgagagccagcagggatactccggaccagctgaaccgcttgttaaaacagtgaaatgctttggttccgtgtggcaaatagcggctgtctggagccctcccgtgtcccagtcacctggacctacctcgtgaggtgcctggaccttcccaagcccagctgctgaggattcctatcagggccctccaggaactttgctcgtccctgatgggtcaggcctgtcaatctatcacatgatttttagcagtgcctccttcataaagcctccccacyccccacccaaatccgaattcattgctcctcaagaagtcagatagcatgttgcttacacactgggccttcaccacatcctttcatgttatttatatgcggtgtggctatttactttcacatctgtctccctctttagagaatgcactgttcccaggacccttgtgccgttcgccacagcacctagcacag

SEQ ID NO: 31103 - DNA, 535 bp, Homo sapiens
ggaaggaaatgcatttccagagggaaggagcggatcaagtgctgtcgacgtgcccagccctcacgccactttagggctgagagccagcagggatactccggaccagctgaaccgcttgttaaaacagtgaaatgctttggttccgtgtggcaaatagcggctgtctggagccctcccgtgtcccagtcacctggacctacctcgtgaggtgcctggaccttcccaagcccagctgctgaggattcctatcagggccctccaggaactttgctcgtccctgatgggtcaggcctgtcaatctatcacatgatttttagcagtgcctccttcataaagcctccccactccccacccaaatccgaattcattgctccycaagaagtcagatagcatgttgcttacacactgggccttcaccacatcctttcatgttatttatatgcggtgtggctatttactttcacatctgtctccctctttagagaatgcactgttcccaggacccttgtgccgttcgccacagcacctagcacag

SEQ ID NO: 31104 - DNA, 555 bp, Homo sapiens
taatgaaattctgtcatttgaggcaacatggatagggctggaggkcattatgataagtgaaatgagccaggaacagaaagctaaataccacttgttctcactcacatatggaagctagaaaaaaaaccgttgatctcacagaactaaaagtagaacagatgatactagagattgggaggggtaagggaaatggagagacagtgagagattcgttaaaggagacaaaattacagctagataggaggaataagttctggtgttctatgccactgtaggatgatgatagataaaaataacttagcttcaaaaaatcaaaagaaggatattgaaagtacccaacatgaagaagtaataacaatttgaggtgatgaatatgctaattatgctggtctcattaccgtaaattatatgtattgaaacgtcactatgtaccccatgaatatatgcaattattatttgtcaatttagagataaaattgaaaaataatgacatatctatatttatctttctgtttaggtaattaggatgcatttttgtcaatacaaaaaacctga

SEQ ID NO: 31105 - DNA, 555 bp, Homo sapiens
taatgaaattctgtcatttgaggcaacatggatagggctggaggtcattatgataagtgaaatgagccaggaacagaaagctaaataccacttgttctcactcacatatggaagctagaaaaaaaaccgttgatctcacagaactaaaagtagaacagatgatactagagattgggargggtaagggaaatggagagacagtgagagattcgttaaaggagacaaaattacagctagataggaggaataagttctggtgttctatgccactgtaggatgatgatagataaaaataacttagcttcaaaaaatcaaaagaaggatattgaaagtacccaacatgaagaagtaataacaatttgaggtgatgaatatgctaattatgctggtctcattaccgtaaattatatgtattgaaacgtcactatgtaccccatgaatatatgcaattattatttgtcaatttagagataaaattgaaaaataatgacatatctatatttatctttctgtttaggtaattaggatgcatttttgtcaatacaaaaaacctga

SEQ ID NO: 31106 - DNA, 555 bp, Homo sapiens
taatgaaattctgtcatttgaggcaacatggatagggctggaggtcattatgataagtgaaatgagccaggaacagaaagctaaataccacttgttctcactcacatatggaagctagaaaaaaaaccgttgatctcacagaactaaaagtagaacagatgatactagagattgggaggggtaagggaaatggagagacagtgagagattcgttaaaggagacaaaattacagctagataggaggaataagttctggtgttctatgccactgtaggatgatgatagataaaaataacttagcttcaaaaaatcaaaagaaggatattgaaagtacccaacatgaagaagtaataacaatttgaggtgatgaatatgctaattatgctggtctcattaccgtaaattatatgtattgaaacgtcactatgtaccccatgaatatatgcaattattatttgtcaatttagagataaaattgaaaaatratgacatatctatatttatctttctgtttaggtaattaggatgcatttttgtcaatacaaaaaacctga

SEQ ID NO: 31107 - DNA, 519 bp, Homo sapiens
ttgaaaagttttataagtagtgatacattataagtaaggatcatactcttgcactaaattatttctacaaatacagcctatttaggctttcacaacctcagtggattataagtcttctttatatctcaaaaggtttactagtattatgcattggtaatatatgggggtaatggaacacacaagtaagaatctagaatttctttaatattgatataaagaagaaaaagcaaatagcttaaagcattgcctatttattcattttcttttccattaggaggttttatgatgtttttcttgtttctgtttttctgaaaatatctttattttacttttttaactcatacaatctttattgaaatataaaccacatgctattaaattcacaattttaaagtattttttagtatattcacaaatttgggcaaccatcaccactatctcatttcagaatattttcaacwcctttctagccattagcaataacttcccattgccccctccccacagactctggaagcc

SEQ ID NO: 31108 - DNA, 771 bp, Homo sapiens
tggaactgacccgcgctgaaatgtgggcgtggttggagagtagctgggacagactggagggtccgtaagggctgggggtgaagacgtgagagagactggcgaggatctcactgaggtctgtgagtttgtaggtgtttctggggtgtggggtacagactcccgctgaaatctgggcgtagttggagagtagctgggacagacaggagagtcatgggtggctgggggtgagctgctggatgatggcagtaagaacatatggtayattattgatgaatgaggtgactgtgaagaatctccagaggaggacacgggagaacacaatgacatgagtgactgtcctgcttggttaggaaagggaaacgtaaagttgtggaattctgttgatgatggatgtgagagtggtgaagccctgcgggatgatgtagaggacttccacatccctggtgaggagctgccccttgggtctgagtttctgggaggggagagggagaagctgggtgaggcaggcatgaatcttgaggagtcagggctgggggaccgctcatattctcccgagacctgtgagtctctgggggactcctgggtgcatggggctgactcccgcaggaacctggggatggctggagagtaactgggagccacaggagggtccctgaggcctgggggtgaagagatgcaagacacaggggtggagcagcgtgaggctcgtgagtttgtaggtgattcctgggtgtggggggctgactccagctgaaatctggggttgtttgg

SEQ ID NO: 31109 - DNA, 771 bp, Homo sapiens
tggaactgacccgcgctgaaatgtgggcgtggttggagagtagctgggacagactggagggtccgtaagggctgggggtgaagacgtgagagagactggcgaggatctcactgaggtctgtgagtttgtaggtgtttctggggtgtggggtacagactcccgctgaaatctgggcgtagttggagagtagctgggacagacaggagagtcatgggtggctgggggtgagctgctggatgatggcagtaagaacatatggtacattattgatgaatgaggtgactgtgaagaatctccagaggaggwcacgggagaacacaatgacatgagtgactgtcctgcttggttaggaaagggaaacgtaaagttgtggaattctgttgatgatggatgtgagagtggtgaagccctgcgggatgatgtagaggacttccacatccctggtgaggagctgccccttgggtctgagtttctgggaggggagagggagaagctgggtgaggcaggcatgaatcttgaggagtcagggctgggggaccgctcatattctcccgagacctgtgagtctctgggggactcctgggtgcatggggctgactcccgcaggaacctggggatggctggagagtaactgggagccacaggagggtccctgaggcctgggggtgaagagatgcaagacacaggggtggagcagcgtgaggctcgtgagtttgtaggtgattcctgggtgtggggggctgactccagctgaaatctggggttgtttgg

SEQ ID NO: 31110 - DNA, 771 bp, Homo sapiens
tggaactgacccgcgctgaaatgtgggcgtggttggagagtagctgggacagactggagggtccgtaagggctgggggtgaagacgtgagagagactggcgaggatctcactgaggtctgtgagtttgtaggtgtttctggggtgtggggtacagactcccgctgaaatctgggcgtagttggagagtagctgggacagacaggagagtcatgggtggctgggggtgagctgctggatgatggcagtaagaacatatggtacattattgatgaatgaggtgactgtgaagaatctccagaggaggacacgggagaacacaatgacatgagtgactgtcctgcttggttaggaaagggaaacgtaaagttgtggaattctgttgatgayggatgtgagagtggtgaagccctgcgggatgatgtagaggacttccacatccctggtgaggagctgccccttgggtctgagtttctgggaggggagagggagaagctgggtgaggcaggcatgaatcttgaggagtcagggctgggggaccgctcatattctcccgagacctgtgagtctctgggggactcctgggtgcatggggctgactcccgcaggaacctggggatggctggagagtaactgggagccacaggagggtccctgaggcctgggggtgaagagatgcaagacacaggggtggagcagcgtgaggctcgtgagtttgtaggtgattcctgggtgtggggggctgactccagctgaaatctggggttgtttgg

SEQ ID NO: 31111 - DNA, 771 bp, Homo sapiens
tggaactgacccgcgctgaaatgtgggcgtggttggagagtagctgggacagactggagggtccgtaagggctgggggtgaagacgtgagagagactggcgaggatctcactgaggtctgtgagtttgtaggtgtttctggggtgtggggtacagactcccgctgaaatctgggcgtagttggagagtagctgggacagacaggagagtcatgggtggctgggggtgagctgctggatgatggcagtaagaacatatggtacattattgatgaatgaggtgactgtgaagaatctccagaggaggacacgggagaacacaatgacatgagtgactgtcctgcttggttaggaaagggaaacgtaaagttgtggaattctgttgatgatggatgtgagagtgstgaagccctgcgggatgatgtagaggacttccacatccctggtgaggagctgccccttgggtctgagtttctgggaggggagagggagaagctgggtgaggcaggcatgaatcttgaggagtcagggctgggggaccgctcatattctcccgagacctgtgagtctctgggggactcctgggtgcatggggctgactcccgcaggaacctggggatggctggagagtaactgggagccacaggagggtccctgaggcctgggggtgaagagatgcaagacacaggggtggagcagcgtgaggctcgtgagtttgtaggtgattcctgggtgtggggggctgactccagctgaaatctggggttgtttgg

SEQ ID NO: 31112 - DNA, 869 bp, Homo sapiens
ctgggcttaatacctaggtgacgggttgacaggtgcagcaaaccaccatggcacacgtttaccttagtaacaaatctgcacatcctgcacatataccccagaacttagaaacgaaacgaaacaaaagaaaacgaaaaagcaatagcaaaacgctaaaggcaaaataaagtttcaaactcagaaagtgacagaccaacgtttggttcaaatcatggtcctaaacccaggtgccataaggtcaggataaagaatttgattacatattgtaaatatgacatgcagtaaatgaccagaaagattattctccacatatgtgtgtcttctaattcaatggtgacgctatctaccgggacatagcattagattccaaagggccgagtcccgccagacaggcctcccacaccaataacaatgggaagccctacgttgttttacctgtgcttctcagcaactggctataaatcaggttgccaccactcccagatttagttgcattcatttgctggaagagctcacagcacgcagggaawcacttacatttgccgttgtattttagcggacattgcacaaagttcagaaataaatgtggggcccggcatgcggggaggggtgcactaccttccaggaagtgttatccagaagctctctgaacccagtccttttgggttttgatggagacctcattctataggcatgatgggttaaaccataggctattggtgatcaactccacctgaggctctccaccctccctggaaattggggttgaggctttgccattctcagtctgactaaaagaatttacccaaacggaattttaaaacagatgagcataactggaatcttaattagatgattggattatctgg

SEQ ID NO: 31113 - DNA, 869 bp, Homo sapiens
ctgggcttaatacctaggtgacgggttgacaggtgcagcaaaccaccatggcacacgtttaccttagtaacaaatctgcacatcctgcacatataccccagaacttagaaacgaaacgaaacaaaagaaaacgaaaaagcaatagcaaaacgctaaaggcaaaataaagtttcaaactcagaaagtgacagaccaacgtttggttcaaatcatggtcctaaacccaggtgccataaggtcaggataaagaatttgattacatattgtaaatatgacatgcagtaaatgaccagaaagattattctccacatatgtgtgtcttctaattcaatggtgacgctatctaccgggacatagcattagattccaaagggccgagtcccgccagacaggcctcccacaccaataacaatgggaagccctacgttgttttacctgtgcttctcagcaactggctataaatcaggttgccaccactcccagatttagttgcattcatttgctggaagagctcacagcacgcagggaaacacttacatttgccgttgtattttagcggacattgcacaaagttcagaaataaatgtggggcccgscatgcggggaggggtgcactaccttccaggaagtgttatccagaagctctctgaacccagtccttttgggttttgatggagacctcattctataggcatgatgggttaaaccataggctattggtgatcaactccacctgaggctctccaccctccctggaaattggggttgaggctttgccattctcagtctgactaaaagaatttacccaaacggaattttaaaacagatgagcataactggaatcttaattagatgattggattatctgg

SEQ ID NO: 31114 - DNA, 869 bp, Homo sapiens
ctgggcttaatacctaggtgacgggttgacaggtgcagcaaaccaccatggcacacgtttaccttagtaacaaatctgcacatcctgcacatataccccagaacttagaaacgaaacgaaacaaaagaaaacgaaaaagcaatagcaaaacgctaaaggcaaaataaagtttcaaactcagaaagtgacagaccaacgtttggttcaaatcatggtcctaaacccaggtgccataaggtcaggataaagaatttgattacatattgtaaatatgacatgcagtaaatgaccagaaagattattctccacatatgtgtgtcttctaattcaatggtgacgctatctaccgggacatagcattagattccaaagggccgagtcccgccagacaggcctcccacaccaataacaatgggaagccctacgttgttttacctgtgcttctcagcaactggctataaatcaggttgccaccactcccagatttagttgcattcatttgctggaagagctcacagcacgcagggaaacacttacatttgccgttgtattttagcggacattgcacaaagttcagaaataaatgtggggcccggcatgcggggaggggygcactaccttccaggaagtgttatccagaagctctctgaacccagtccttttgggttttgatggagacctcattctataggcatgatgggttaaaccataggctattggtgatcaactccacctgaggctctccaccctccctggaaattggggttgaggctttgccattctcagtctgactaaaagaatttacccaaacggaattttaaaacagatgagcataactggaatcttaattagatgattggattatctgg

SEQ ID NO: 31115 - DNA, 869 bp, Homo sapiens
ctgggcttaatacctaggtgacgggttgacaggtgcagcaaaccaccatggcacacgtttaccttagtaacaaatctgcacatcctgcacatataccccagaacttagaaacgaaacgaaacaaaagaaaacgaaaaagcaatagcaaaacgctaaaggcaaaataaagtttcaaactcagaaagtgacagaccaacgtttggttcaaatcatggtcctaaacccaggtgccataaggtcaggataaagaatttgattacatattgtaaatatgacatgcagtaaatgaccagaaagattattctccacatatgtgtgtcttctaattcaatggtgacgctatctaccgggacatagcattagattccaaagggccgagtcccgccagacaggcctcccacaccaataacaatgggaagccctacgttgttttacctgtgcttctcagcaactggctataaatcaggttgccaccactcccagatttagttgcattcatttgctggaagagctcacagcacgcagggaaacacttacatttgccgttgtattttagcggacattgcacaaagttcagaaataaatgtggggcccggcatgcggggaggggtgcactaccttccaggaagtgttatccagaagctctctgaacccagtccttttgggttttgatggagaccwcattctataggcatgatgggttaaaccataggctattggtgatcaactccacctgaggctctccaccctccctggaaattggggttgaggctttgccattctcagtctgactaaaagaatttacccaaacggaattttaaaacagatgagcataactggaatcttaattagatgattggattatctgg

SEQ ID NO: 31116 - DNA, 582 bp, Homo sapiens
aaagcagtaataagaccacttacgagctatgttcctctcatactaactatgcctccttggtcatgttacataatcttttcgtgattcagtttcctctactgtaaaatggagataatcagaatcccccactcattggaytgttgtaaagattaagagtctcaggctttacagactgagctagctgggccctcctgactgttataaagattaaatgagtcaacatcccctaacttctggactagaataatgtctggtacaaagtaagcacccaataaatgttagctattactatcattattattattattttattttatttttttgagatggagtctggctctgtcacccaggctggagtgcagtggcgcaatctcggctcactgcaagctctgcctcctgggttcatgccattctcctgcctcagcctcccgagtagctgggaatacaggcacccgccactgttcccggctaattttttgtatttttagtagagacggagtttcaccgtggtctccatctcctcgtgatccacccaccttggcctcccaaagtgccgggattacaggcgtgagccaccgcgcc

SEQ ID NO: 31117 - DNA, 582 bp, Homo sapiens
aaagcagtaataagaccacttacgagctatgttcctctcatactaactatgcctccttggtcatgttacataatcttttcgtgattcagtttcctctactgtaaaatggagataatcagaatcccccactcattggattgttgtaaagattaagagtctcaggctttacagactgagctagctgggccctcctgactgttataaagattaaatgagtcaacatcccctaacttctggactagaataatgtctggtacaaagtaagcacccaataaatgttagctattactatcattattattattattttattttatttttttgagatggagtctggctctgtcacccaggctggagtgcagtggcgcaatctcggctcactgcaagctctgcctcctgggttcatgccattctcctgcctcagcctccygagtagctgggaatacaggcacccgccactgttcccggctaattttttgtatttttagtagagacggagtttcaccgtggtctccatctcctcgtgatccacccaccttggcctcccaaagtgccgggattacaggcgtgagccaccgcgcc

SEQ ID NO: 31118 - DNA, 2079 bp, Homo sapiens
  misc_feature (1)...(2079): n = A,T,C or G
ctcctggcctcaggcaatcctcccacctctgcctccacctcccaaagtgaggacaattcctataacaaccaagaacgtaacatttatttggttgagtaaaataacctctctatgaacttgctctggacaaggaagctgtgtaagctgttgaaatttaaggakatataactcttgacacaattcctccactctaaaaataagaatggcagcttgaggctacagttttgttccaaatgcataaggttaaactgcctttcagatgaattgactagctctctcttcagaatggagccagtggcttagaatgagaccactggtcttacacttcgttggttattttcaggatgaccctggctgtggatagaggcagaatgccttgaggatgggcctgtgtggaacagagatcatgacctttatcctgatggtgaccggccagctatttggctgccagatctgggacatgcctagagccttatgaatgggctgcctcagatgaccaccatcagctgtcctggtttgatactgacctataaattatccataggagtgacaatacaaatggatttgaggactaattcaaagaaaagaatgtacaaaaatgggtcataagatgaaattttttaaaaccgaatctttatttaacaaaataataaatgtaaaatatttgtaaaggaactcattttgcttgctcagaagtggccctttaatgtcttctttggaataatggttagttatttaagttacaataaatagtgcaccggcaatttctaatttttaagaagtataataagggcttggtgaactaaggcctgtaggccaaatcagcccactgcgtgattttgtatggcccctaagcaagaagagtttttacatttttttaacatttcagcaaaaaatcaaaagaagaatgatatatcatacatatgaaaattatatgaaattcagtttctagtatctgtaaataaagttatattggaacaccactttgctcattagctgacatattatctgggactgctttcgtgtttctacagcggaagtgagtagctgcaaccgaaactgcatagaccaccaaggctgaaatgtttgaaatctggtcttttacagaaaaagtttgctaagttccattgcagaacactaattctaactttactctaaaaagtctaacattgtgtgggctctttaagtaaaactgacaaaccaaagggttccaattattttccttttttatatgcataaaataagcaagtggatctatttcatggctctggtcaaatactgcttaaaatatttctgggtgagggttaataagagatgtcatttagaatcttacaccggacagttttaccagttgttgatcccaagatgctcaggagaaaatggatttaccaaaatgattccaaatcaaaataaaattttaaattgataaaaagttaaatatatactgagaaaaatcttaatatatattgataaattgccctccagaatatagtacaatcctaaattgtcctatattacaatcccgccagtaataaaaaaaaagatatatgtaaatccttgtatctatccatttccccatatccttgccaacaactgatctagtgaaaaatgatgcctttaaatttgtagtttcctgcttatatgtgacaataagcatgttttcatgtttactggtaattttttatttcatattctgtgaattccctatgtatatcctttgccaattttttttactgggttgcttttcttattaacatttaattttgtaggatttactattgtttacaggtctcaaagtgcagtcagttttcagaaagcaaacacaatctgataccacaatctaaattaaactcttgtacaagtcagtgctggggttagcatattgcccctagtgtgtgttgtacacctagaataaagcacagaaaatgccaaatgataaagcccataccttgtctttcctctctaataagcagtcnnnnnnnnnnnnnnnnnnnnnnnnnnnnnnnnnnnnnnnnnnnnnnnnnnnnnnnnnnnnnnnnnnnnnnnnnnnnnnnnnnnnnnnnnnnnnnnnnnnntatt

SEQ ID NO: 31119 - DNA, 2054 bp, Homo sapiens
aacataaaatttaccatttaaataattttaaagtgttcagttcaatagcgttaagtatattcacattgctgtgtggccaatctcgaactttttcatcttgtaaaactgaaaccctatacccattaaacaacagtcctgcattttcacctccccctatctcctggcaaccgccattctagttctgtttatatgactgtgactgctctagatatgtcatatcagtggaatcatacagatttgtctttttgtgtatttgttcagttttttttttcttcttgctagtgtttgttatttccctagtgattgttctttgctgggctttatggagttttaccctacatatccatcacattcagccagagtccccaggggtcccttaggcagatttccggagctccctctccgcctagctcccatacatttcagatgtttctcttccacactctgagctctttatctgcagctcacagtgacctctgtactctgtgtggcttcccctccccgtgctggggtctggttagaggactcatctgcttgtttttctcctctctaggatcgtagctctgtactgcctgctgttcagcatctgaaagtatgtttttggccagtattttagttgtttgcagtaggtacagtcgctattagtacctttcttgtgacataaatccatatggcatacaaaaaatctttttcctctggtttcttgaggacaggaactatcgctctcctcctccctttttctacttctcctccttcactgtcttctttattatcttcatagctaccaccgagggagctctttctgcaagcttgtcactgttctatgcagtatttcatttagttcttataacaattctacaaggttgagtattgttttacagataagggacccaaggctcatatagaaataaaatgctcaaggtctcattgcaatatgtagcagagatgaaattcaagcctaagactttctcattccaaagccttaacagttacactagtagctctcattcactgatcacaagatattacatttatgaggatatacccagcagggttcttttaaacaaaataattaattaatgttaaaaattgacaaaatagtatatctttatggtgtacaatatgatgcttggatatatgtaaacattgtagaatgcctaaattatgttaattaacacatgcattatctcacatagctttttgcactgagaacatttaaaacatactcttttggcaatttttaagtagaccgtatatttttagtagccatagtcaccatgctgtaccatcagagttcttgattggaaatgatgaaagccaactcgatcagcgggtattgggttcattcctagaatcaacaagagtagggagaacctggcttgaaagacgggcaggaatgaagcggggccaggtggcaggaaaggcgccagggccctgctccaggacaccgcgcccaggctgctgctgccattgcccttgcatgtttggccagtcccttgcacagcgggtgctgcagctgccactgccagagtgaactctgaactgctctgcctctttgcaattgttggtctagagtgagggctccagttgtctgtggcccagaggtcatgtgtcccagagaacaagcacctcaccttagggcttctgtggagggaactggggccctgccttctatcaagacatctacagtgatgaatttcccaagcacatgaaggtggtttasatgctgggaggccaagaagacaacagttgatggtcactccaaggatcatatacatatttgtagaatgactggtcagcttgaggctggcttctcttttagacttacaaggaaaagaaaaaaaattttttttaggtttgctttcttcttttctgacaaagccagcccagcacttacctcactttttcttctctttttaaagtgcttctcatgttgcaacattgtaagaaagcaatcccataaaaccaaagtcctcacattctttcagctacttttgtctctattatgttacaatagttagatttcaaaaatggtagctaccatatccttggca

SEQ ID NO: 31120 - DNA, 285 bp, Homo sapiens
  misc_feature (1)...(285): n = A,T,C or G
ctatttgaaattcttcataaaagaatctcaattccagcctcastatacttttactaattgtttattttcccacttcaaaatactgtttatgtctaccatgtgtcaacattctggaccctgggaactttctggctaagtagactaaagataatttataaagaggtagtcgaagtctgctacataannnnnnnnnnnnnnnnnnnnnnnnnnnnnnnnnnnnnnnnnnnnnnnnnnnnnnnnnnnnnnnnnnnnnnnnnnnnnnnnnnnnnnnnnnnnnnnnnnnnc

SEQ ID NO: 31121 - DNA, 534 bp, Homo sapiens
tgagattgttaacagctgaagttacacagaatttcaaaggcaagagacattctcaaaatccaaaatctgcagctgactatgcagcaggcattctctgactctcaaaaaagtttacattcattattcattcatctgtttttttcactactctaaggaatttatttttaataatcacacatcagatattatgtttaaatgtattaatgaatgatggaagtaacaagatgttgtaataagttcaaatgacaattcaattcactcatatactgggaggaaaaaaaaagctaaaatgaatttacaaatagatgcaaccctgttcaatatccacagagtgataatgaacagcattttgtcggacaaaatttatttgcattataagggcaastttgcgtaattaatagttttccacaaattacaggttagttaagtagctcaaagacagttaaaggagtgggtccctatagcatcaagtatgctagacaaggcacacagtatcttttttacccctaatgtttcacaatttttgctgatagg

SEQ ID NO: 31122 - DNA, 534 bp, Homo sapiens
tgagattgttaacagctgaagttacacagaatttcaaaggcaagagacattctcaaaatccaaaatctgcagctgactatgcagcaggcattctctgactctcaaaaaagtttacattcattattcattcatctgtttttttcactactctaaggaatttatttttaataatcacacatcagatattatgtttaaatgtattaatgaatgatggaagtaacaagatgttgtaataagttcaaatgacaattcaattcactcatatactgggaggaaaaaaaaagctaaaatgaatttacaaatagatgcaaccctgttcaatatccacagagtgataatgaacagcattttgtcggacaaaatttatttgcattataagggcaagtttgcgtaattaatagttttccacaaattacaggttagttaagtagctcaaagacagttaaaggagtgggtccctatagcatcaagtatgctagacaaggcacacagtatcttttttacccctaatstttcacaatttttgctgatagg

SEQ ID NO: 31123 - DNA, 569 bp, Homo sapiens
tggtaatttttatctttttgatctgtttcattctgcatgttagttatttggaaccattctactgtgctcaaatgaacagtcctatccctagttctcttattcctttttcatttcatattttataccctttttcctcagtctgtcttaaagaataaagtgttttcatttcaaaagcttattatctctgtttttaatcttagcccttctttcctctactatttttcttcctcttaatgctccatgctgggttctctgccttatcagacttaatcttgaaaagtacgttacttccttcccattatctccaaggttgttatagtccrttctaggtgtctccaatttctcaactcttactcaattactttctgaagtttgactattatttctactagtgttcagctttcttaagtgtaagtaaacacatttcttacttaactaggtagataaacattagctggacggatctggccgtaaacatgctattatttccaagataaaactgagttccaaatggctaaatctttgtcttttcacttttcatccattcctgtcttttttagcatttgttt

SEQ ID NO: 31124 - DNA, 435 bp, Homo sapiens
ctcaagcctataatcccatcactttgggaggctgaggcgggcaaatcacgtggtcaggagttcaagaccagcctggccaatacaggtgaaaccccgtctctactaaaaaaaaaaaaaaattaaccgggcatggtggagcacgcctgtagtcccagctactcaggaggctgagacaggagaatcacctgaacccgggaagcggaggttgtggtgagccgagattgcgtcactgcactccagcctggggaatagagggagactccgtctcaraaaaaaaaaagagaggaaaaaaaaaactttggcttttatcaagaggacaaactgaatagacttcataattttcataaataaatagattaagcaaaaaaattttaacaaaaataaataaaaaataatattgtattttaagaatggtatagaaagataatttgatga

SEQ ID NO: 31125 - DNA, 584 bp, Homo sapiens
aatatgtcaaaatgcagggaatcaacctaaatgcccatcaattacagattagataaagaaaatatggtacatatacaccatggaatactatagacagccacaaaaatagatgagatcatgtcttttccaggaatgtggctggagctgaaggccattatccttagcaaactaatgcaggaacagaaaaccaactaccacatgttctcacaagtggaagctaaaagatgggagctcatggacacaaagaagggaacaactgawactggtgcctacttgaaagtgaaggttgggaggagggagagaagcagaaaaaaataactattgagtattaggcttagtacctgggtactaacgacttgagtttacctataaaacaaacctgcgcatgtaccccaaaactaaaataaaagttaaaaaataaaatatgtcaatatgcaacatacctaataaaagcaaaggtatttattaaatgagtttgtttaaaaatgagataactgtgcttacaatgtattgttctgttaaaggcactagcaatctctatgtatttacttaccaccagagatgtccgtaaggaacagccagaa

SEQ ID NO: 31126 - DNA, 572 bp, Homo sapiens
tctttgctcacagacagtatatttcttccaagtctaagaaaacacatgtgctgtgtgaattaattttattgtactttttctaattagtcttcaaaaggcttggctgttttgcttattggtgagctcctgtgacaaaccagggcattcgattgaattgtaaaccaacttatgacattgagcaaagcaaacttccaaacagattgtgattcttcttatcaaagcagttatgaaaaaaaagttgtagaaaaggcatttttcgggcaatttaaaaattaatgtctggtaaatgagaataattctatctatcctcttatttatttcagaagaaaaatttcagagtttttaaggtattttttaaaatgggaaacttaataaggaaatggcattacttctactactactattattattgtaaatatatttaggtattatttaatacttaagtaattttaagtaatwtatttaagtattattagtttttagaattcgtgacctcttatggccaaactggtttttaataagctagaatttagtaataggttttttccattgaattaggttttaatagaacc

SEQ ID NO: 31127 - DNA, 389 bp, Homo sapiens
aagtaacatataaacttctctacaggaagcaagatacacatgtgcacacacacccctcaagagaatcggtctcacagaaatgattggatcaagctctagcttttgaagtctacacctatgtgctacctaaatactgatgaaattgcgggcgagagccctctgggaagactatggtcaagccccatagttctcaaacatgactgcccattaggatcaccaggggagcttttaaaatgtcattgcccaggctttacccacaccmattaagcagaattctgtggagggacctgggcagcagtaattttttttaaactccccaagtgattccaatgggaagtcaagtttgagaacttcagatgtaacccactatgttgacacagcactctaca

SEQ ID NO: 31128 - DNA, 502 bp, Homo sapiens
actaactaacaagggagatggtaacctattcaaaagaagaagaactttcccccaaaaaaccatcttgattagtacagcttttaaacatatttgctatgggttgaacgtgtctcccaaaaagcatgtgttggaaacttaatccccaacacaacagtgttggggggtgtggcctaatgggaggtggttagatcattagggctccaccctctgaatggattaatgccaatgataaaagggtttgagactatgagtccaacctcttgctctctcactctttttggctcttccaccacgggatgacatagcaagaaggacctcgccaagtgatgatccctccatcttagayttcccagcccccagaaccatgagccaataaatttctgttgcatattaattacccagtctccagtattctgttacagtagcacaaaacaggctaagacaatatcataatcctattgccactgctctttaactttgtacagcagctcacctgaacaaa

SEQ ID NO: 31129 - DNA, 1314 bp, Homo sapiens
gtgtcctacattaaaatgaggttgtatttaattttgcttgttatgccttgatttttactcaactcagagattaattctcatcaaccctgttaaaaacaaggtagaggacaactcstacgatggaaccaggtgcaaaatatcacttacatttttatctagttttatcacagtgagttctggtacatttttcatttttaaaaggtgggcattagattctaggagacaagcaatcctagttttatcaacacagctatgggatattggaactaccaaagcagaaatctcatatagaaaccttgtacattcattcgccatgactaacttttctgtcttgtggaattgaaagttataagaatggctttctttaaagcaatatagaaacttttttattgcaaacagctaaataaaggctggcaaaaacaataggttcattttttactgcagatcttcaaattataggaaacttgtctcttggccaatttgggctggcttggagccaaaatagatgtctccattctcatcctcacccttatacttattgtgggcaagataaaaacccttaattttaaaaactcgagccaagtgttgggtatgaggcagagtgactcccttaactatactggtcctgaaaaaaaaaattgtattactttataccagttcacttttttttttcagtttttagaaattgagtactgagaacaagaaactttaacaaaagggagattcaaatattttgatggtctattataaatcaagttttaataactagaggtatatacaagtacaatcaatcaatgagaaatactcactggttaaatacttctgatcaagtccttttctctaggtgagttggccctgagaaaattagcaggcatctttccatttcaaagcacaaaaggcttctcttctgtttttagccatgtcaccctcccgcctttttttaattaacaagatttgagatcatttggcaaattgtaaccataaaagtgaatatcgtgattggatgatgttttataacttgaaaaataaatctcaccgcttttctccctgtgtacttcataaatgtcgcttcctcttcacttcatatttatcttgctttcaaaatccattatgcaattgtcatttcattgaaatcaaaaactgtctcttaattacataagaatggattataaatcagttattcatctctctatatgttccttttataatgattatagctaaatacctatttttatacacaaaaaaacaaagtggattttaccaggttaaaattaggacttgcaaaattctgcagcctagaagacaaaacaaagc

SEQ ID NO: 31130 - DNA, 1150 bp, Homo sapiens
agcacatagtagatgctcaataaatttttgctgaatgcatgagtgagtattgatcctggtcaaagcccttgctgaaggccattgccttgatcccttcctgcctcatcctgggtgaactcagcatgttgggactcagtgtccagccagtcagagaatcaagagagcatccaggctgagctcaggattcaaggcccctatctgagatgggtggggaagcaggaacattcaggcataatatggtcagattatgtgtcaatattgtgttgtgttcatgtgtgttcttttcagtttggaatagaaaaccaggcagtggttgatggccagagagcaaagtttagctgcctccaggagaggaatttgactgatcagggtgacgcagggtaccatgcctcagccattctgctggggttcagggatggcttccaggctcagtgtcaggggacctggattgtaaagtcaggatgtctggtgaggcagggtttgttaggttagtgtgatcctgaggatgattgatttccaagctaggatatattcttttgactttctgacatttctttcttcttggtgctcatagtaggatttatggaaaattatttctatgactcgtaaagctagagctgggggaaggtcatgtcaccagagttgaataaagtggtgaaactaaaaaatagctttagcctagaaactggaaaatggaaaaaattcttagtgacttgaaaatcagaagctttatgttctataccagttctgatactaaactattggtcatttcagggtaccattttattttttcatctaggaatgagcaggatgggcacgttaatcttaaaggatcctttcaattctgagcaaaaatcaacaaytgattattttcaaatcagtaagcatttatcaagaatcctgtatgtgctggggactgtactaggttctggataagtagaagtaaataaattgtagtctaagtgaacttgcaggtaaatgagcacctaggcaccgtgccagagtttcttacccagctttatggaacatagttgaaggagcaagttaattctgcctattgcagtcaggggaaaatacaggaagaggtgctgtttaagttgaaaatattaaggaataatttgatggagagggcaggaagaacaattctggg

SEQ ID NO: 31131 - DNA, 1150 bp, Homo sapiens
agcacatagtagatgctcaataaatttttgctgaatgcatgagtgagtattgatcctggtcaaagcccttgctgaaggccattgccttgatcccttcctgcctcatcctgggtgaactcagcatgttgggactcagtgtccagccagtcagagaatcaagagagcatccaggctgagctcaggattcaaggcccctatctgagatgggtggggaagcaggaacattcaggcataatatggtcagattatgtgtcaatattgtgttgtgttcatgtgtgttcttttcagtttggaatagaaaaccaggcagtggttgatggccagagagcaaagtttagctgcctccaggagaggaatttgactgatcagggtgacgcagggtaccatgcctcagccattctgctggggttcagggatggcttccaggctcagtgtcaggggacctggattgtaaagtcaggatgtctggtgaggcagggtttgttaggttagtgtgatcctgaggatgattgatttccaagctaggatatattcttttgactttctgacatttctttcttcttggtgctcatagtaggatttatggaaaattatttctatgactcgtaaagctagagctgggggaaggtcatgtcaccagagttgaataaagtggtgaaactaaaaaatagctttagcctagaaactggaaaatggaaaaaattcttagtgacttgaaaatcagaagctttatgttctataccagttctgatactaaactattggtcatttcagggtaccattttattttttcatctaggaatgagcaggatgggcacgttaatcttaaaggatcctttcaattctgagcaaaaatcaacaactgattattttcaaatcagtaagcatttatcaagaatcctrtatgtgctggggactgtactaggttctggataagtagaagtaaataaattgtagtctaagtgaacttgcaggtaaatgagcacctaggcaccgtgccagagtttcttacccagctttatggaacatagttgaaggagcaagttaattctgcctattgcagtcaggggaaaatacaggaagaggtgctgtttaagttgaaaatattaaggaataatttgatggagagggcaggaagaacaattctggg

SEQ ID NO: 31132 - DNA, 763 bp, Homo sapiens
tttcctgactttttaatgatcgccattctaactggtgtgagatggtatctcattgtggttttgatttgtatttctctggccagtgatgatgagcattttttcatgtgtctattggctgcataaatgtcttcttttaagaagtgtctgttcatatcttttgcccactttttgatggggttgtttgtttttttcttgtaaatttgtttgagttctttgtaaattctggatattagccctttgtcagaygagtagattgcaaaaattttctcccatgttgtagattgcctgttcactctgatggcagtttcttttggcttttcttcaagtagttttcatcttcttatttaccagcttcaatatatcttccaaaatttccaagacactgttcaagctgggaggggaaataatataaggaccatgcatgagagctttttccatgttagccctgggagtgttgtacagtactctactccatattccattgactagaattcagttatacttaactgcaaggggaaatggaaaataatgagtatcaacgcacattggaagaagagaaagtaagttgactgataagcaagcagtctctaccataggttacaatatggataatgaagctttaaacatcacctcctacaaaattgttttccagggaggaggaaaggggaacagggagagccagaaagctttcctcttgagtttgtatgaatttttgggggaaattttctagaagacttctccttacacgttcctaatcaaaact

SEQ ID NO: 31133 - DNA, 510 bp, Homo sapiens
gcaagtcatagttagtgataaataagtcatatgcatgaaatcaccctgggagagagtatagagtgagtgagaagaaagataccaataaaccacagctacccacagtcaggtgtctaggatgatgaagtccctggaaactacttatcacaggaaatttaaaaatggctggggctgttcagcttaagaagagaagaatcaagtgattataaaaatatctgactgattataaaaatktatgaatactttcatgaagtaaataacaggcttatttcacagacctaaaatgaagctgctaggtaaaagttgcaaaatttggtggtgtacatagaaaactctttgatgtatttgaaatggtcagcactaataccttgtgccatagtgaacactccattaataggatggcttcaacaaaggtggaggcttattcactcaagaagagatagagcagtggctcttaaactttgttaaatccaaccaacttgaggattgttgataaaaaaacgcaaactc

SEQ ID NO: 31134 - DNA, 1855 bp, Homo sapiens
ggatccaacaaaacaaattgaaaaccacatataaaaatgagtcatctattttttattgaatacacattttcacgttaaacatctttaatagttaacatgcattcctgctagctttaraaatcaaacatggtggctgggcgcggtggctcacgcctgtaatcccagcactttgggaggccgagacgggcggatcacgaggtcaggagatcgagaccatcctggctaacacggtgaaaccccgtctctactaaaaatacaaaaattagccgggcatggtggcgcgcgcctgtagtcccagctacacggaaggctgaggcaggagaatggcgtgaacccgggaggcggagcttgcagtgagtcgagatcgcgccactgcactccagcctgggcgacagagcgaaactccgtctcaaaaaaaaaaaaaaaaagaaagaaatcaaacatggtttatggattcaatttaaaacctttcattgaaaggaaatccatttttaatttttattttaatcatttaaatatttaaagatgttgcctgtgttctccaaatttcttttaatcatactgggtaggtctacacaggggcttttgagacaatgtgcagttttattaacaggctgttgtaaagcaaaagcatttttcaacatgggaaatgcatttttcagcttctagttttgcttttgaatttaataaaaggtacaaatgagtcctgctttgatgtgctcatgaggaggctctgttactactgggttggacacagaaggatacaaatgccttaatatttagcattcagtgaaatcatgtttcagcttcgtgctttggctcaacccacctccgttgtctggcatttgccattctctcaagcgataaaattaatctgcagtaattcacttggagtatatcgggctctgaagatctatcagtgaataggatctatcaagtatcttcgcttccagtcagatgagggatccaggttgacctggcatgggcttcaaacaggcttgtgttccaaattcagctctcccatttattatttatttgtgacttgagtagttacttctttgagattccatttcctcatctaaaataaggtttactctgcagagttggtgtgtggctcagagataatacatgtttggcttatacaagttccttggtaaactgtcacacttaaaaaagtcaatttctcctgagaatgagagccccaaaataaggagatgctgtgtggactgaagggaacctcagtttatccttcatctatttcatgtccttgttttaatgtctaaatgcccattatgtatgtaagaggacagctctgtagccatctcagttcttaaagtacagatatttggggattctgaaagaggaagaggctgatttgcctgtgaacaatgagtgagataactgtactctgtactactgtgaacaatgagtgagataactgtactctgtactactaaagtggactcaccttccctttcaagaacagattctggcagagatattctgggacagggatgttgctgtggcccctctgcagcccctaactggactggacattgcacatgctgtttgcacactccgatcagaagaccagtcttacttttgtgatgaggtagagatgagatgtataggtaaatggtgaagtcaagagtgctggtgaaggtcctctgtcacggttaacactatcctatctcctctgcctatcacctttaatattgcctttttacttttaaaagggagagcagggcttttctttcttagttagaagcaaggatgtaaataatttcatccagctaaaaattttaattctactccaacttctcctttttatgcccattgttcttcaaaggaataa

SEQ ID NO: 31135 - DNA, 1026 bp, Homo sapiens
agactcttaataaccactttttaatcctcattcctagagggagaaaaatagctgttattgtgccttgtccttatacaagcctcttttctttggttctaaaaatagagtggtagattttccagactaagcattgagcctatatttttgcctccaggccccctacattggccactagaaagcatttttttaactgtatattattttattccctcatcaatttgattattctttgtcagccagtacagaattttaaaaatcaccagcaatactctttgtcacaggcattctttggagacccaggtctgcttctagaatacattgggaggaagaattggagaagataattctttctttttacctggccttggggtttggcatactgagaatcgcttgggacagtggggatgtctcaactttagcctaaaatggaattcatgtctgcagaagcagtgacggggggttagcggagatcaggaggtgatttgcaggacagctctcccacccttaacacggaggaacyaggggatggggaggagcccttgaagtcagccatgcatttgagtccagtggaaaggaggctcctaaaggaaagaatgagaaactgtttacacaagagtctctgtgactcttgagggcacaaggaggcccttttgaaggtctgggtgaccccatgtgatgctgaggggagagggacaatctcctcacttctgaatggaccagagcggcctgctggcacttagagcagctgtgggagcagtggtaggtagcacccttgccgtggacattggcattcttgtgaaggactggcatccacggccgctgggaggcaagcattgccaactcctgggggccttcagatgcaggcaacataggtgagtgaggtgggagaagagaaaaatccaatggttgcaactggatgcattgtgtctaatggtgacttgttggtttgtgagcacctgagagacacttccaagggatgctgggatacaggagactgagatctcatgggggcgttgatgttcccta

SEQ ID NO: 31136 - DNA, 607 bp, Homo sapiens
gtggccagctgtcattccagggtgtgctgagcccgccttgagactgacccaggttgtttgagttgttggtttgcattctgtgtttgcagatcggctgctgcgcccatagcattcttcccttcctggagctttaaaaaaaaactttcttattaaaatgttcacacctataaaaatagagagaatagtatgacccactcccatgtccccatcatctagatttttaacatttttgcttcatctttttcttgcggaaatattctaaagccaatcccagacatcctaacattcccctccaggcatcctaacattcccctcccaaatatttctgactgcatctccaaaaaaataaagacattttcttgcataaccacaaaaccatgatcacaacaaatccagcaattattcctaagtatcctctaatactcaaaccgtattcagatttycccagttgctcaaaaaggtctttgcagttgaatgaggagatgaacaaggcctatattcacattgcctttgattgctagctacctttccctacaaaatttgcttttgtaggcgtagggggatctgcagtgagctggggctagctagttgcaacaagtgacccaga

SEQ ID NO: 31137 - DNA, 385 bp, Homo sapiens
ttccccatccaaatcaaaggtccctcgctgcaatttaaatgccatggtgtacccgtgactgggctgacgtgcatyggaaggcaaagctgtcctgcatcacacagcatcagctggatcgccatatggaccacaatgcggtgctaggagaggctgccagcatcaagctggctaaggattgaggtgcgaggctgccaggagggaaggatttttctggacagagacctgattgtcaggggcttcagggtctttctacctctggttcgaggttggggagcagcaagactacggcgtagatactgcaagtaatgtagcctgcaagtaatgtggccgggccttggcaaggagggcctggaggcgaggggagtgtgcattgctgaattcctca

SEQ ID NO: 31138 - DNA, 385 bp, Homo sapiens
ttccccatccaaatcaaaggtccctcgctgcaatttaaatgccatggtgtacccgtgactgggctgacgtgcattggaaggcaaagctgtcctgcatcacacagcatcagctggatcgccatatggaccacaatgcggtgctaggagaggctgccagcatcaagctggctaaggattgaggtgcraggctgccaggagggaaggatttttctggacagagacctgattgtcaggggcttcagggtctttctacctctggttcgaggttggggagcagcaagactacggcgtagatactgcaagtaatgtagcctgcaagtaatgtggccgggccttggcaaggagggcctggaggcgaggggagtgtgcattgctgaattcctca

SEQ ID NO: 31139 - DNA, 679 bp, Homo sapiens
tttatattaagatcaatgaggaccatttctggaagatgtctggcatggtacagactgtctgaggccgactgaacacaggcccttaccctgattttatcagtgaaaagctatggractagtttccttacctctaaaatggagagaataatagaatcttccgtctaagacttctgtgagcataagccgagaaaatggaggtaaactgcttagcccaatacttggattatcgtaaatattcagtaaaactagccaccgttgttattgtaattattattttgtattttattatacatttcatggaaacttaaaagttagtgataatcacctcattttcagttgccttgctttcttcctgtaaattttattctctcttatcttgctcactgtctttaagcattgccagtttagtataattattttcccctatcctctataaaatcatatacaggatggatttgttgatctcagacatgttcactgagttttaaaatattaggatgaaacctgaactaggtactcctggaacaaatatgaagaagtgctactttgtgtcaaaggtagcaaacaagaatgctgtcttctaaaaacaggaacttccactagtgttcaccagaaataaaataaaatctgtagatccacaaggatttactcaaatagtttgcagactcactatcaaaac

SEQ ID NO: 31140 - DNA, 679 bp, Homo sapiens
tttatattaagatcaatgaggaccatttctggaagatgtctggcatggtacagactgtctgaggccgactgaacacaggcccttaccctgattttatcagtgaaaagctatgggactagtttccttacctctaaaatggagagaataatagaatcttccgtctaagacttctgtgagcataagccgagaaaatggaggtaaactgcttagcccaatacttggattatcgtaaatattcastaaaactagccaccgttgttattgtaattattattttgtattttattatacatttcatggaaacttaaaagttagtgataatcacctcattttcagttgccttgctttcttcctgtaaattttattctctcttatcttgctcactgtctttaagcattgccagtttagtataattattttcccctatcctctataaaatcatatacaggatggatttgttgatctcagacatgttcactgagttttaaaatattaggatgaaacctgaactaggtactcctggaacaaatatgaagaagtgctactttgtgtcaaaggtagcaaacaagaatgctgtcttctaaaaacaggaacttccactagtgttcaccagaaataaaataaaatctgtagatccacaaggatttactcaaatagtttgcagactcactatcaaaac

SEQ ID NO: 31141 - DNA, 798 bp, Homo sapiens
ggtgcacgcctgtagtcccagctactcagaaggctgaggcaggagaattgcttgaacctgggagacagaggttgcagtgagcagagatcgtgccactgcactccagcctgggtgacagatcgagactctgtctcaaaaataaacaaataaatgaataaataggcttggcgcggtaactcatacctgtaattctagcactttgggaggccgaggtgggtgcatcacgaggtcaggagtttgagaccagcctggccaacatagtgaaaccctggctctactaaaaatacaaaaattagccaggcatggtggcgcacacctgtagtcccagctatgcaggaggctgaggcaggagaattgcttgaacccgggaggtggaggttgcggtgagccagaatcaggccactgcgatccagcctgggcaacagagcgagactccatctcaaaaaataaaaataawaataataataataataaataaatagagccccaatcataggttgtatggactgtagcatggactacacaatgtggtatatggtatgaacaatcaacacagtttccaaagcttgttatgtggctactgaaccattaatatcatacttctcaatatctgccaataaagaggatcaaaatagttagtttttacttggaatgaacaacattcatcacactcactgtcttgccccagaacctctactttctgtcccaacatagcccaccagggtcttgatcttcttggcatctgcagaatgtcacatcagcccactgtttgaggatgtcatgttaactggacctggt

SEQ ID NO: 31142 - DNA, 715 bp, Homo sapiens
tttgaaaaggcatagggtggtgaggtgccatgtatacttggaagtgatggccctacatatctgttacctgagcgaggaagaaaggcaggacatgaatgtcagcagataaactgagccagctcgcagaaagcctagtactctctgctaagacctttgggttttattcaggcctcaaggtatggaaagattccagcaagaggatgctttcaattttattgtagaatcagcactgtatgatattcgggcaacagggcaaaaagmtgtgaatgaatgagctcacatcttagcagtacatcaatgaacagttcattaccattactggtgggtcagtagcatcaacagataactctttactcaggatatagaaaaggatttccagcaaaatcaaagctttaaggcagaatggaataagttatatcaaagtgacattcagtcatttttaaaagtctgagaagattcaaggatttatcacagctggactatgtagaattcatccagatgggtaaatatctgtctgtcccagttgaggtcagaggaggaaatgccacaaccacgggtttgcaacattacacagacctcagtctggcagtccctttggtctagcctaaatttattttcttaaagtttaagctcatttcctcctttccatccttggggaaagtaaagaacagatggtcataaaccaccagatagtgaccctttatagactggagaa

SEQ ID NO: 31143 - DNA, 680 bp, Homo sapiens
cgttgacattgcatgacaattgttattttaccttatattacagccagaagtaattcagattttctgcagctctgcacatctaaagattttacaactctttgcccttttgaaagtatcttggatttctctctatattaggcttctctggagcaggcagagacatctgggaaaggctatccctgccccatccaacatactcacttccaagctccgcaaaagaarcagggatgattgaataatggcatttattgaacacttgctttgggctggacattgggatgggcagagccataacctgaacaatctcatggctgctcttcgggaactcacagtactgggctggagggactttacagggactggacacagctggatatctctgcaatttgaaaattagatgattatgtaagatggggtattattctcaaagttaattggggagcaataaaatgttagatttttacctatattacctcccaataggtttaagtgcatgcctccttactgggtttgttaagaaccataatttaaaaataatttaaactttctaagtattctcttcccataaaatcagtgcttaataacgtattttaactagaggctagttctgggtggaaatagttgaaatatgctaagaaatctgagagcccctatttgactattaactaagtgttgaaaaa

SEQ ID NO: 31144 - DNA, 800 bp, Homo sapiens
cccaaaataaacccgagcccgcgccagcagggcgcattctggggctgaggagctgcgtcccctcccagaggggcgccacgggtcccttcccaagagacttatgacccctcctccggggtaacccttcccccgtcccccgcatacccgtgcattgcttttaccgatttgggtttcttcttgggcgcgaggttgtcgtagaaaatcttggcttcctcccagaccggggccgcagcggtctccgctcctggcccgggctcgcggggctcctggggctcccggggctgcccaggttccatgctccggctctgacccggcccggccagagcaggcggcggcgtagacgcggaggtggctggggctgggctgcaggagggaggcgagtcccggcgagggaagggggcgggcagcggcgaggaggctgtgcgtgtgagctgggctccccgcccgccgggcggggggaggtcacactggccctctcggtcgcccgtgtgtcgctgccgctgctgctgctactgctgtacggtatgagggatagctgggctctccttccccgaccgacccacgccagcagccggttgggtggtgaggggggctctctggctctctgggtttgtgggctgcagcggattggggattgcgaaaatgatgttcttcgcaggcgctgcagggcgcggagacaggagaggcctgacaactttttttttccccmaggatagtgatccccaaaggacaaaatgaaaagctagccgctcccctcccaaaagctagctgcccatctttcctttaggagctaggaccct

SEQ ID NO: 31145 - DNA, 1121 bp, Homo sapiens
ggatcctgcgcgctctcggtcgtgcagggctggggatgctggcagggagggagagttcagctcgggggatcaggtggctagtgggttatcatctatctgttgaagtggcctaggggaggccattggcaggttttccctggagatcttagaaaactctcatagactgatggtactctggcccctgtctggaatctgctgacgatgcagagtaaccccattctttcccaattttaccctagtttggatgcagttttcatgtagtccacaaattatttcaggaagaagaaaatttgtcctcctttgagcaaattggagtttggatttagggacttagtattgaagaaaataataagcgacttgcaagggcctagactctaattccaatgttcctcctatcgygcccccatactgccagtgtctttcagctcctggtagatagtctgacctgcttcaaacctgtcgaacaaactgcgcttgtatagttctgctacctcgcagttctgtaaactgtctaagcttcagtttccttatctgttaaatgagcatgaataatagaaccaacttcatggaagtattgggaaaaccaaatgaggcaaagtatgtcaagggcttagcacagcacatgcctaggtacacaccatgtgattcccagcaccctgaaagagctgcagggctgactgggagtctgcagacctgggtcccagccccaaatctgccaccaactcactatgtggtcttgggccattggtttccctgacagagtctgtcatcagtttccccatcagtaaaacaaagacagcagtggaaaagaaagggatatacttcatctctcttggctcatctagacttgactctctagaacagaattggaggggaattcagttaattctttctttctttctttttgacatggtctcactctgttgcccatgctggagtgcagtggcatgatcatagctcatggcaaccttgatctcctgggcttaagtgatcctcctgccttggcctcccaaagtgttgggattacagacataagccagtgagccaggcccagttaattcttagggatgtttttgaggacattttgtaattttagtgctctccagttttctgagatccaa

SEQ ID NO: 31146 - DNA, 606 bp, Homo sapiens
tttttctaatgctatgaaaaaactggatcgaacacattaaacttttttagagaaagaaacagcaatacctccaacttagctctggccagagcttaactttccataaagacacatcaaattgttttctttttaatctttttaatcttctgttttctctwtttttttatttttgttcatttagatctagctgcttcatccatgatacataagtaattcaatatcatcatagtctgaatagcctggctccctaacttaggaagtctgtatttcctaattattttgctcatcataattgttttaaattaacattttaaattcagagagtgactatttttaaagacatttcaaatgattacatttcttccaggtggcgcttgatttgcacctggcaaaagaacagggaagcgtgtggtccttaacaaagttcctcctctcacctgcaatccatcctcactaaagccagctgccaactattcataagtgtaagcaggatgtggcgttgcctgtaaataaactgtacctgggaaaatcacgttgttcagtgacaaggtatccactctttccactgagggggaaaagccctaaaggagtttgattccagtctcg

SEQ ID NO: 31147 - DNA, 583 bp, Homo sapiens
tgggaatacagagacacaagtggctcagcccatgcaccagggaggcctttccaagacaggcccatgactgctctgtagtgtcattaacacgctcatcagagctgggggctcttatagcccctgggtctgagcagaggcaccatgattatgaaatcagtgctgaagggcactacgaggagggtgctgaatggggcctggctgacattgatcttcctgaaaaccatgcttccctgtgacatggaactcatgggaatttgtggagggtgagaggagcttgagcagcctgagaagagtagcatttgcactagtgttagggtcgagccacagacaccagcagatgtggcttgagttcatgcactggcactgactgtttggctgagggtgctgcttggtgcacccattgcattcaaacwtggtggcagttgcaatggaagtggtcattgttctgtagctatgactgtcattcatctccagtaaaggtggaaaatatatcaagaaaaaaatgcatggatttattcttcgaaggccatttctggtcttctgacactgccagggaaaccagggcagcacgaggatggatttt

SEQ ID NO: 31148 - DNA, 583 bp, Homo sapiens
tgggaatacagagacacaagtggctcagcccatgcaccagggaggcctttccaagacaggcccatgactgctctgtagtgtcattaacacgctcatcagagctgggggctcttatagcccctgggtctgagcagaggcaccatgattatgaaatcagtgctgaagggcactacgaggagggtgctgaatggggcctggctgacattgatcttcctgaaaaccatgcttccctgtgacatggaactcatgggaatttgtggagggtgagaggagcttgagcagcctgagaagagtagcatttgcactagtgttagggtcgagccacagacaccagcagatgtggcttgagttcatgcactggcactgactgtttggctgagggtgctgcttggtgcacccattgcattcaaacttggtggcagttgcaatggaagtggtcatygttctgtagctatgactgtcattcatctccagtaaaggtggaaaatatatcaagaaaaaaatgcatggatttattcttcgaaggccatttctggtcttctgacactgccagggaaaccagggcagcacgaggatggatttt

SEQ ID NO: 31149 - DNA, 639 bp, Homo sapiens
tgcagtgggttctgctgactccacaygggggactgactcccagagaccctgatgtggactttcaaactggcacctgctgaatgcacaccacgggtggtcaggccagtagggtggaggagccgcttcccgaggttccttctgtgcctgcagaggcctgagagccaggtccactctgctttcaatgccacttttgagcgcgttgtgttttcccagcgtctccctccccacatcagcaattcctcacaccacgctgagggaagaatggctcccgatgacaggcctcccaaggaatggaggaggggaagcgtgatttttctcctttcctcatccctccggcatccatcgactctccatgataaatgaggagggcacgacttcttttgtcattggagaaactgactccacattgcacagccagggagaggctatcctggctatttcctcaagaatgaaccttgatggtggctgtgcagatacacacacacatccacatacatatgcacacacacctgtacatacacatccacacacatatgcacacacacctgtacatacacacatccacacacatatgcacacacacctgtacatacagacacacaacacacacacacctgtacatacacacacatccacata

SEQ ID NO: 31150 - DNA, 315 bp, Homo sapiens
ggggcagctgaatgatataggctgatacaggatgggtyacggggaagtgaaggggcacggggtccagctgggagatctcaccagatcctaatacaaaactaagggatactggccaaagggcagccctgaccgaggcagagtcttgggcaaatgtgggaaagtgacagttgttgataatagcatgtggggctgactgttcctggcaataaagaaaaggagtgggggtcactcgggtgagggggacctggtctcatccagactcatggaaagaccgaggatggagccaggaccaccagtgaccgcaaccattcattc

SEQ ID NO: 31151 - DNA, 315 bp, Homo sapiens
ggggcagctgaatgatataggctgatacaggatgggttacggggaagtgaaggggcacggggtccagctgggagatctcaccagatcctaatacaaaactaagggatactggccaaagggcagccctgaccgaggcagagtcttgggcaaatgtgggaaagtgacagttgttgataatagcatgtggggctgactgttcctggcaataaagaaaaggagtgggggtcactcrggtgagggggacctggtctcatccagactcatggaaagaccgaggatggagccaggaccaccagtgaccgcaaccattcattc

SEQ ID NO: 31152 - DNA, 764 bp, Homo sapiens
  misc_feature (1)...(764): n = A,T,C or G
atagagtgaagcctttcttgtgggaagatcaatgcaggctggcatttcaacatggtgccaaggtcaggatctcactttcctaagtgattacctgcatctctgccccgaggggatctgctcaccttactcaatcaggtgatggttagatctttctcaacacctttttctttcaagtaaatctcaagttgctttgcccagaaaacaaggaaaaccgactccttcctacacagagaatagattcctggmttctctgcgattatttaatgtcagtggaaaaacattctcattactgtagctgggaagaaaaaaatgtgttgcacaagtgtgatttctattcaggacgtagtgtgggtttgtgagtagcataaagaagtatataaaacgcctcctttattaactcgttaaaatatgaaacaataaacagaaatgaaatacaatgtaatgaaatcaatatataagttagggttgtttttaattataacttaaattaaccagggtatctccattgtgcaagaatttatttccaaaactaaaatgaagtctataaacgtgcactcaattacaccggggaattgcaaattttctgtcttctggcattcaaaagatttttgtttcattaatggctaaaatgattataaccgcttgtatactcatttcctttacnnnnnnnnnnnnnnnnnnnnnnnnnnnnnnnnnnnnnnnnnnnnnnnnnnnnnnnnnnnnnnnnnnnnnnnnnnnnnnnnnnnnnnnnnnnnnnnnnnnna

SEQ ID NO: 31153 - DNA, 764 bp, Homo sapiens
  misc_feature (1)...(764): n = A,T,C or G
atagagtgaagcctttcttgtgggaagatcaatgcaggctggcatttcaacatggtgccaaggtcaggatctcactttcctaagtgattacctgcatctctgccccgaggggatctgctcaccttactcaatcaggtgatggttagatctttctcaacacctttttctttcaagtaaatctcaagttgctttgcccagaaaacaaggaaaaccgactccttcctacacagagaatagattcctggcttctctgcgattatttaatgtcagtggaaaaacattctcattactgtagctgggaagaaaaaaatgtgttgcacaagtgtgatttctattcaggacgtagtgtgggtttgtgagtagcataaagaartatataaaacgcctcctttattaactcgttaaaatatgaaacaataaacagaaatgaaatacaatgtaatgaaatcaatatataagttagggttgtttttaattataacttaaattaaccagggtatctccattgtgcaagaatttatttccaaaactaaaatgaagtctataaacgtgcactcaattacaccggggaattgcaaattttctgtcttctggcattcaaaagatttttgtttcattaatggctaaaatgattataaccgcttgtatactcatttcctttacnnnnnnnnnnnnnnnnnnnnnnnnnnnnnnnnnnnnnnnnnnnnnnnnnnnnnnnnnnnnnnnnnnnnnnnnnnnnnnnnnnnnnnnnnnnnnnnnnnnna

SEQ ID NO: 31154 - DNA, 521 bp, Homo sapiens
atctggttggattcattctatgattgtgaaatccacttcccctgtgcaatgcacctgccatggagcccttttaccatctctctagcagttgtcatccttttgtggattttcatagcactttacagcttcctctcatgttacctttttctagtatcacagctccaggtgttactggctcctcttagcccacaggtgccttgaggataaagcactgttttcttttttgttctctcctcagaaggcaccagtcatcaattacgacaactaacatcaaatcaaccaattcaatamactgatttctggatggttgagacaattattctcccaccaatctattctagaggttttcataatttgggacttctcaagaacttgtgtaaaagtgtaaaagtttggtattaagaatgtgataattatcatcagctccagtgaaatctggagaatccaacggttttcaattttttttcactttttcagtacaaattctaagatcagaatactgaaaaagaaatccaaatagg

SEQ ID NO: 31155 - DNA, 495 bp, Homo sapiens
cccttaattgttcagttctcctgcaagtacgcatccctctttggttggttgtgccttttgtgatgttctgggagagacacgaagaggagctctgtgatgcggtgctgcttgatgcagcatggaaactcattgctttttgattggttttgtctgcaacttgtcaggaaataattaaaggccctttttacccctaattgtggtaatagattcatatacgttttctgtctgttctgctttcactttgctaaatggctactttcttgtactcatcttgatgatgatgatgatgatgatgatrataatgatgaagattttgccacttgttaggtgctttctaggttccaggcactgcactaaaagctttacatacagtatttctttaatcttcacaatacacttctgaggtggatatttttaatccctttttcacttgcccaaaccaaggcttaactgggtaaagaaatttcacatggctggaggttggcagaaaagaag

SEQ ID NO: 31156 - DNA, 971 bp, Homo sapiens
gtaaagacttaagttccttttatagatgtagacaactgggtatgttttttcatttaaaggatcgaaggcttttttcatttcagtcttgaaagtggtatttttaccagtatcttttcgatactgaaaagattttgaacctgaaatgaaatacaggttaggattaaattttgcttatattcctttgaatggtgtttctataaaaaactgagtttaaagtatttaaacacaataagagccaaagatggcacctgtacacattctttctgttctagtggtatttttagaagtgatgccaaatgaactcttaagatgtaaaagctttgctaaatccacttttttaaatgtaatggaaatctaggtcatttacatatgaaagatttttgtagtatgaaaatgagatcattgaaaatgggtaattcttttatgtggctggttttgtattgtctactctgtgtggtcatgagaaaaaaattttttttttttttttgagatggagtcttactctgttgcccaggctggagtgcagtggtgcgatcttggctcactgcaacctctgctgcctgggttcaagcgattctcttgcctcagcctcccgagtagctgggattacaggcgcctgccaccgtgcccagctaatttttttttgtagttcttagtagagatggagtttcaccatcttggccaggctggttttgaactcctgacctcgtgatccacctgcctctgcctcccaaagtgctgggattacaggtgtgagccaccgctcccggacagtcatgagaaaatttttaaagtgtagaatcagttgaatatcccttagcctagcaaaaacatatgacttgatagatatgaaaaatttgtttataaaaatctggggcaactcctgctgccccccaacacaaccaktgtctagctcagcttggtcatgttgtccgctagaaatttgtaaatcagatctttacaactttaaa

SEQ ID NO: 31157 - DNA, 971 bp, Homo sapiens
gtaaagacttaagttccttttatagatgtagacaactgggtatgttttttcatttaaaggatcgaaggcttttttcatttcagtcttgaaagtggtatttttaccagtatcttttcgatactgaaaagattttgaacctgaaatgaaatacaggttaggattaaattttgcttatattcctttgaatggtgtttctataaaaaactgagtttaaagtatttaaacacaataagagccaaagatggcacctgtacacattctttctgttctagtggtatttttagaagtgatgccaaatgaactcttaagatgtaaaagctttgctaaatccacttttttaaatgtaatggaaatctaggtcatttacatatgaaagatttttgtagtatgaaaatgagatcattgaaaatgggtaattcttttatgtggctggttttgtattgtctactctgtgtggtcatgagaaaaaaattttttttttttttttgagatggagtcttactctgttgcccaggctggagtgcagtggtgcgatcttggctcactgcaacctctgctgcctgggttcaagcgattctcttgcctcagcctcccgagtagctgggattacaggcgcctgccaccgtgcccagctaatttttttttgtagttcttagtagagatggagtttcaccatcttggccaggctggttttgaactcctgacctcgtgatccacctgcctctgcctcccaaagtgctgggattacaggtgtgagccaccgctcccggacagtcatgagaaaatttttaaagtgtagaatcagttgaatatcccttagcctagcaaaaacatatgacttgatagatatgaaaaatttgtttataaaaatctggggcaactcctgctgccccccaacacaaccattgtctagctcagcttggtcatgttgwccgctagaaatttgtaaatcagatctttacaactttaaa

SEQ ID NO: 31158 - DNA, 1115 bp, Homo sapiens
tgtgaactctttgcatctgctttccacttctctcccctcacttgtacctgacatacccaattaatgccatattctatgtggctctgggtatttctcctctgatcacattgcmcaagttatgcccctgctcttttttctttgactcattattactggcaggtgcccagacactacagttgggactttgtgctggatgtgtccgtgttgctgatgttcgctccatattttgcttgtttcctcactaccgtaaagtctctatctatgtcataaggccaatgacatgctgttgggtatactaaacctttcctgagagccaatatgagccaatgtaatcagtgttgtcaatgcatattttggggtggaaagtatctatgtcaccgtaaaacacttcaaaaatccacagaaaaatgataaggcatatgcaaaaaactggaaaatggaacttaggatggtgactcgactttaaaatatatctgcaagaaggtaaacccaaaacaaatgcattctaatggttaactttatctcaatatttcaagctgttttgaagaaaacaccaatactgttaagaatacctcagtatcaaccttgggctgatctagctgatacagtattatccttagtttctaaagaaaacattgattgctttgggtgaggaggaaatcatccctacttaattttattgtgtagagttcgtatgtgtgaatagcatatatgaacacacacacacaatcactcatgtataaatgttgagtcccatacaagaaaatattgccctagcttggaaatacaagataaatatgacataatacatttctctcaagaattttacacataatttagtctgagagatattttattctacacagtgtaggaagtgatataccacaaaaaagtgagaaataaaatgccataggatttcacagaggggtagagttcagatcacgtccatatgagaatatcatgcctaaaacttaagagcctaacaacaatcaccattaatttgctcaaaattctgcaatttcagtaaggctaaataggggtagcttgtctctgcttcaagtcgtgcttactaggattgtttgactaaaactggaggatccaagatttctttactc

SEQ ID NO: 31159 - DNA, 1115 bp, Homo sapiens
tgtgaactctttgcatctgctttccacttctctcccctcacttgtacctgacatacccaattaatgccatattctatgtggctctgggtatttctcctctgatcacattgcacaagttatgcccctgctcttttttctttgactcattattactggcaggtgcccagacactacagttgggactttgtgctggatgtgtccgtgttgctgatgttcgctccatattttgcttgtttcctcactaccgtaaagtctctatctatgtcataaggccaatgacatgctgttgggtatactaaacctttcctgagagccaatatgagccaatgtaatcagtgttgtcaatgcatattttggggtggaaagtatctatgtcaccrtaaaacacttcaaaaatccacagaaaaatgataaggcatatgcaaaaaactggaaaatggaacttaggatggtgactcgactttaaaatatatctgcaagaaggtaaacccaaaacaaatgcattctaatggttaactttatctcaatatttcaagctgttttgaagaaaacaccaatactgttaagaatacctcagtatcaaccttgggctgatctagctgatacagtattatccttagtttctaaagaaaacattgattgctttgggtgaggaggaaatcatccctacttaattttattgtgtagagttcgtatgtgtgaatagcatatatgaacacacacacacaatcactcatgtataaatgttgagtcccatacaagaaaatattgccctagcttggaaatacaagataaatatgacataatacatttctctcaagaattttacacataatttagtctgagagatattttattctacacagtgtaggaagtgatataccacaaaaaagtgagaaataaaatgccataggatttcacagaggggtagagttcagatcacgtccatatgagaatatcatgcctaaaacttaagagcctaacaacaatcaccattaatttgctcaaaattctgcaatttcagtaaggctaaataggggtagcttgtctctgcttcaagtcgtgcttactaggattgtttgactaaaactggaggatccaagatttctttactc

SEQ ID NO: 31160 - DNA, 1115 bp, Homo sapiens
tgtgaactctttgcatctgctttccacttctctcccctcacttgtacctgacatacccaattaatgccatattctatgtggctctgggtatttctcctctgatcacattgcacaagttatgcccctgctcttttttctttgactcattattactggcaggtgcccagacactacagttgggactttgtgctggatgtgtccgtgttgctgatgttcgctccatattttgcttgtttcctcactaccgtaaagtctctatctatgtcataaggccaatgacatgctgttgggtatactaaacctttcctgagagccaatatgagccaatgtaatcagtgttgtcaatgcatattttggggtggaaagtatctatgtcaccgtaaaacacttcaaaaatccacagaaaaatgataaggcatatgcaaaaaactggaaaatggaacttaggatggtgactcgactttaaaatatatctgcaagaaggtaaacccaaaacaaatgcattctaatggttaactttatctcaatatttcaagctgttttgaagaaaacaccaatactgttaagaatacctcagtatcaaccttgggctgatctagctgatacagtattatccttagtttctaaagaaaacattgattgctttgggtgaggaggaaatcatccctacttaattttattgtgtagagttcgtatgtgtgaatagcatatatgaacacacacacacaatcactcatgtataaatgttgagtcccatacaagaaaatattgccctagcttggaaatacaagataaatatgacataatacatttctctcaagaattttacacataatttagtctgagagatattttattctacacagtgtaggaagtgatataccacaaaaaagtgagaaataaaatgccataggatttcacagaggggtagagttcagatcacgtccatatragaatatcatgcctaaaacttaagagcctaacaacaatcaccattaatttgctcaaaattctgcaatttcagtaaggctaaataggggtagcttgtctctgcttcaagtcgtgcttactaggattgtttgactaaaactggaggatccaagatttctttactc

SEQ ID NO: 31161 - DNA, 1223 bp, Homo sapiens
actgatatggtttggctctgtaaccccacccaaatctcagatcgaattgttatcctcaatgttggaagaggggcctgtttggaggtgattggatatgggggtgaacttcccccttgctgttctcatgatagtgattgagttttcatgagatctgatcatttaaaagtgtgtagcactttccccacagctctcttcctcctgctctggctgtatgaagacgtgtctgcttcccctccaccttctgccatgactgtaagtttcctaaggcttcccagccatgcttcctgtacagcctgtggaactgtgagtcaattaaacctcttttcttcataaattacccagtctcaggtagtttttttatagtagtgtgagaatggactaaaacactaatctagttgatttgactggtttttgtaaggggattgatgtgttaaatgtcactaccatcacaytctttttgtcagagtcaacttatgcgctttttaatttaaatggtgtggctggtccatagaagaaaaagtacggcatcccagaatttgatgatgagttcagaaaaaaattgccttcagaagcaaaaattcactaaagtaaatacataatattgaagattagttgtttaatccaatcagagtaatttgttaatggcttttgaggtgtgtgtgtgggggtagttttatcagtatcagtatttgtttttctattcattaaatacacttcctcttcagacaaccatagaccatacttctgaagtagacagctctgttttggcatgctatctgcagtcatgaaacaagataaagatcattggtctgacctttggcctcattagacaataaaattggactgattgacaaaactcaataaagaatagatttaagcacagtgctaatgaggccatgatcacaaattttacacaggaccactgattttattttatcttatggccacaggatgttccccaacactcaaagtgtttcctcttggccataaaaaaaagcctgcataatgagcaggaacagaccacagcaaatccatcacatctactggaaacatgctcggttattggccaaattattggccatcttcatctataagaaacaatgcaaattcaaaggatactagcagataaagtgaagtcagctccaaagccattcactgtgagaaagaaccaagtacaacttgtctgtgagtcagcccaggcacaattcctctgtaccttctga

SEQ ID NO: 31162 - DNA, 1223 bp, Homo sapiens
actgatatggtttggctctgtaaccccacccaaatctcagatcgaattgttatcctcaatgttggaagaggggcctgtttggaggtgattggatatgggggtgaacttcccccttgctgttctcatgatagtgattgagttttcatgagatctgatcatttaaaagtgtgtagcactttccccacagctctcttcctcctgctctggctgtatgaagacgtgtctgcttcccctccaccttctgccatgactgtaagtttcctaaggcttcccagccatgcttcctgtacagcctgtggaactgtgagtcaattaaacctcttttcttcataaattacccagtctcaggtagtttttttatagtagtgtgagaatggactaaaacactaatctagttgatttgactggtttttgtaaggggattgatgtgttaaatgtcactaccatcacattctttttgtcagagtcaacttatgcgctttttaatttaaatggtgtggctggtccatagaagaaaaagtacggcatcccagaatttgatgatgagttcagaaaaaaattgccttcagaagcaaaaattcactaaagtaaatacataatattgaagattagttgtttaatccaatcagagtaatttgttaatggcttttgaggtgtgtgtgtgggggtagttttatcagtatcagtatttgtttttctattcattaaatacacttcctcttcaracaaccatagaccatacttctgaagtagacagctctgttttggcatgctatctgcagtcatgaaacaagataaagatcattggtctgacctttggcctcattagacaataaaattggactgattgacaaaactcaataaagaatagatttaagcacagtgctaatgaggccatgatcacaaattttacacaggaccactgattttattttatcttatggccacaggatgttccccaacactcaaagtgtttcctcttggccataaaaaaaagcctgcataatgagcaggaacagaccacagcaaatccatcacatctactggaaacatgctcggttattggccaaattattggccatcttcatctataagaaacaatgcaaattcaaaggatactagcagataaagtgaagtcagctccaaagccattcactgtgagaaagaaccaagtacaacttgtctgtgagtcagcccaggcacaattcctctgtaccttctga

SEQ ID NO: 31163 - DNA, 706 bp, Homo sapiens
aacagaagagaattttaggctatagccctttagactgaacaggtttaaaatttaactggtatcccaaggtcaagttattcaaattgctcacaaatagtttttcttttcagactttatttatcctaagatagtatcatattttaatgatctctatggtaagcatatgtttttaagatgacataatacatgagttaaaaataatattacttgcaggaaaagaaattgttaaaatacttccctttctcagtgcttgacaaatagtagttactcaatgaggtttcttaaacaaagtggatctttttcatgtggttgtatctaggtatacatgaagcacaccttttacttacatattgcattagttaacataaggactttattctgagttggagaaactatgcaggtttgaagacacagtctccagaagcccactctcacttcagacaccagccacaagcttgagggctcccaggccaccctcrcttcagacaagctggctataagtttcagagtttccatgaccactgtcaggttggataatttactagaaaatctcaaagaactcacgaaagcactctactcatgattaaagttttattatagtgaaaagatacaaattagaatcagccaaattggaagagatgcctggatgccagaatctcagagagggccaaatgtggagtttcaggtcatcttctgtggcatcttg

SEQ ID NO: 31164 - DNA, 706 bp, Homo sapiens
aacagaagagaattttaggctatagccctttagactgaacaggtttaaaatttaactggtatcccaaggtcaagttattcaaattgctcacaaatagtttttcttttcagactttatttatcctaagatagtatcatattttaatgatctctatggtaagcatatgtttttaagatgacataatacatgagttaaaaataatattacttgcaggaaaagaaattgttaaaatacttccctttctcagtgcttgacaaatagtagttactcaatgaggtttcttaaacaaagtggatctttttcatgtggttgtatctaggtatacatgaagcacaccttttacttacatattgcattagttaacataaggactttattctgagttggagaaactatgcaggtttgaagacacagtctccagaagcccactctcacttcagacaccagccacaagcttgagggctcccaggccaccctcacttcagacaagctggctataagtttcagrgtttccatgaccactgtcaggttggataatttactagaaaatctcaaagaactcacgaaagcactctactcatgattaaagttttattatagtgaaaagatacaaattagaatcagccaaattggaagagatgcctggatgccagaatctcagagagggccaaatgtggagtttcaggtcatcttctgtggcatcttg

SEQ ID NO: 31165 - DNA, 543 bp, Homo sapiens
atagtataggtcctgatatatctgtcattatacatctgagagaacaaagcataggaaggttgggtaattggctccagtttacacagctagaaagtggcaaagctaggatttcattctttatcgtctggttcaaataagtagaaaatataattcaaaaaataagatcccatatactaatttaatagagaaaacacagcgacataactgtaacatgaaatgtgagacctttctatgaagaaacaattaatctttactgaaatacatttaattattgaaaaataaaaatatgcaaaataaataacaaatatcattcaattctaaagaacaaaataatgtattgttgagacyttttaaacacatgatcacaattaaaattcatcaagcagagtaagagggcaaaagtagacaaaaatactttaacaaacataatgagaaaataacacaccatttatcagaatgtgtttttaaagtattaaaattaaaactgtgtaatttagcgtataaatggataggtaaagtggttgctggaattaattgattatt

SEQ ID NO: 31166 - DNA, 1013 bp, Homo sapiens
gacgtagacatccaagggaaataattagtgcttaaaatgttaattgtgctcagatatgcctgtgctgtggcggcagcttgccagtgagcaggcataggtaggtcaccttctgccctcaagcagcccccatcaggcaggctggtctccccagggacccagtgtgggcagcccaaggccaagaccctggcagcttttctgatggtggacactggcttaatgatagtgagacgttctgtgaaccccccagcctcctgcctgaccggcccaccgtccccgggcactggcaggcagcatcagagagtggttacagcaaggacatggaatcagacagctcgggcctggacccaccactctgccagcctacctgggcagcagtgtggatgagggtgacccacttaacctctttgagactcagtgagtgccctcatgccaaacagggatagtaaaacctatcgtgctgaagcccccacgggagcgggatcatttctctgtccagcctttaacacccctcagcatggggcctgcggcaccagctcccaaatgaacaatgacagaatgagtgttttccctccaacggcgccaggaggrgtcagggatcggggtagcatcgtggtgtttcccccttctgggcagcggaggggccctgcttggccagccattcagaccccaccaaccctgcacctaggattggatgagatttcctgcccaggggttggagtgagatttgctgccacagctgcctgagccccaggacgaaggggaggctccgcctagcgggtattggacgccccagctgcctgagcccgggagccctgggatgaagtaggggctgcccatgccaaccgcagttcccccaacctgcccgccgcctagggggaagcaccaccccctgcccggggagaggaattcactcccacagggattctcctgctcattactcgacccacgcgtgagccaggcttcgctctctgccaagatgacacgtctaagaggcttagtcttctttatgctgt

SEQ ID NO: 31167 - DNA, 1051 bp, Homo sapiens
gatccacgccaatgcatttaccactctggaactgctagactgagccctcctccttgctcctgaggagcccgtggtctgcctctgctcccctgtccacatcgcacatgggcttgaggtctagcctcactcctctgtggagcccccagggcctctgctgcccctgtgacgtgatttcctcaaaattaaatttcaccggattcttcattatattctaccacccatgtttatttaacattcgactatatttatctatcttcttccaggctattttaaagttgcaccaagaaaattaccatgccacatacttgtttgcatccctgactctaaggggtgtctaagtcctagctggcagcatggggaatgaaagaaaacccagacttgggaacctgacatttctagatgagcatccacgtgctgtctcctgatggctgccatgtgacctcagaaaagtctgtcaatcagctggagcctcagcagtaaaagggaacaactctactcataccacagtgttgttgtgaaaggtacacaggcaacacagggaaagcactttgtgcataattcaacagatattcgattttcaaaaaaatggtagctattatgtggttgaataaataaatgaaagttagatctagtaatttttaaaaatcaagattatgagtcttttgcaggcattcttgaaatataaacatcactgataacatagtatcaaaawtttttttttttttttttttttttattgatcattcttgggtgtttctcgcagaaggggatttggcagggtcataggacaatagtggagggaaggtcagcagataaacaagtgaacaaaggtctctggttttcctaggcagaggaccctgcggccttccgcagtgtttgtgtccctgggtacttaagattagggagtggtgatgactcttaacgagcatgctgccttcaagcatctgtttaacaaagcacatcttgcaccgcccttaatccatttaaccctgagtggacacagcacatgtttcagagagcacagggttgggggtaaggtcatagatcaaca

SEQ ID NO: 31168 - DNA, 580 bp, Homo sapiens
tgggcgacagagcaagactccatctcaaaaaaaaaccagagagaatattcattttgctggtgaagargggacatttgggagccggggacctcctcttggtagattcctgacaagttgtgtaagtcgttaggcccaggggagtttagagaagatcatgaggtttttcacctgcagaatgggtacatgatcccttcgcttcctctcggtaatccttaactaacatactcacacctaggaaaatttaggtcctaaagttaacatcctgtttagacagtcacataagaattgtcaggcagtgacatgatttagacatttttgctctgtgagatattctgaattccttaggttaacacatggataaacatgcaaaggaaaagaccccacatttttcagattttgctcacaatcctcaaagcataacggttctggaggaagctgagcattcctacttgggaagggagggtaggaatcaagattgattgaagtgagtcatcctaactcccctgctgagaggttcccatccccaggaactctgcctgtctgcacggattcattcctcacacactgtcgagcatcttgt

SEQ ID NO: 31169 - DNA, 742 bp, Homo sapiens
attgaaggattttcaacagagagggcaaggtaatctaaaactttaccaagtttgcttgagcaatatgatggataatggattggagggacacaagaagcagctaaaaatactcaaaaatatcttccatacgtgctccagtctgagccaattgttctctagagaagatacacggctttctttgtcgcccttcactctattgtcttcctacattggctttatcttcctcttcctgtccacaccttgttggagtagattctcatgtaaaaatactaaggaaatctgctttataggaaaaatttctgagttcttgtacatctgaactgcctttattctgccctcattcttgatagataatttgactgggtatagaattctaggttgaagctgaaaaaaaaaaaaaaaraaaaagaaaaagaaaagaagaaaaaaagaaaagaaaagaaaaacaaaaagaaatatatctaaccaaagaagtgaaagagttctacgaggaaaactacaaaacactgctgaaagaaatcattgatgacacaaacaaataaaaacacatcccatactcatggataggtagaatcaatgtcgtgaaaatgaccatactgccaaaagcaatctacagatttgttcagttcccctcaaaataccatattgttcttcagagaactagaaaaaacaatcctaaaattcatctgaaaccaaaaaagagcccacatagccaaagaaatactaagcaagaagaacaaat

SEQ ID NO: 31170 - DNA, 1002 bp, Homo sapiens
taacttttttttttttttttgagatggagtctcgctctgacccccaggctgaagtgcagtggcatgatcgcggctaactgtaagctccacctcccgggttcaagccattctcctgcctcagcctcccgagtagctgggactacaggtgcccaccaccatgcccggctaatttttctgtatttttagtagagacggggtttcaccatgttagccaggatggtcttgatctcctgaccctgtgatccgcctgccttggcttcccaaagtgctgggattacaggcgtgagccgccgcgccagcctaattttttttcaaaattttggttttgctttaggagaattgcttgaacctgagaggtggaggttgcagtgagccaagattgcatcagtgcactccagcccaggcaacagtgcaagactatgtcaaaaaaagaaagaaagaaaaaggaaggaaggaagaaaggaaggaaggaaggaaggaaggaaggaaagaaggaaggcaggcaggcagkcaggcaggcaagcagcttatttgggaggtgatccccggaaacactggcagagagagaagtcaggtagggaagtgaaagcagtcaatacagagtgcaatttcaagccagctaccattatgagcttcatcccaataaggagctcaacaactctatccaatgacttctctctcctttcccacaaaacatctgtgaccagacacttggcttaacctccacatttctctgcatctttatatagcttctcctccttttatgataactcagaggagcagatatccccttcctctgaacaaatgcctccacttcaactcttcatctactccctttctacccctccaaaaccttgctccgccagaggccccctgcctttctctactcccgctccctcttcatcctcattccttgataacactttgcaacctgactttcatttccccttcttcctcccatgcactgaggcttgggggctttactaagatgcttttcccaga

SEQ ID NO: 31171 - DNA, 590 bp, Homo sapiens
aggcccacccagctgaggatgggggacctgccaccactctcctggcagttccggactcctgggaaccggcaggtgaggacccaagagtgttttcagtgacccggctgacctggtcatccgtcagtcccaccttggcctaggcctctatacagcacagatcacagctcattccatcctggcattacactggcctgtgccctgtcctcagggtcacatccgtctcccagaagccgtgcaaccctggaaaacccaggtctaacagtcagsttcctcctccgtgcattaacaatggcgttgacgcctgctttgcggcacgctgggaggggagagggaggtgtatgctggagagctccccaggggcaaggcctggctctgcgtcacccactgtcagatcctgagagcctggggctggcccagcacgtggccaccgttccctaagagttggatttcatccctcagtgctgaaggcaggggatagagcttagacagaccccctgcgtcctgtcttctttatctacagctttctcatccttgcccctttcacgtgcacccggcagagcaggtgttcactgagcttgagcaaaattcaa

SEQ ID NO: 31172 - DNA, 2092 bp, Homo sapiens
  misc_feature (1)...(2092): n = A,T,C or G
gagtttggaagcctggaattcactatcctaggccattataggccaggcttgaggattatttggcaaaatgacacccttaaaaagttaacaaggtcctggtctatttgctcctggctaatgccatggagagtacccagagtcagagatcttatcatgtcatactttttgaaacaaaacactccctgggaatatcaacctcctagcatggggcccagtgctctggccatcccctgatcccttcaatttgatgcttctgtcttggcctcaactggagaaaagccaaaataatagggtgggtggggaggactcaaactactcattcctcataataacaacaaaaatattaggagtaacgtgtattgattgcttactacggggcaggcactgttctaaagtctttatatgtattattaactcacttaatcttcataagcagccctgtgagacaggaactgttaccnnnnnnnnnnnnnnnnnnnnnnnnnnnnnnnnnnnnnnnnnnnnnnnnnnnnnnnnnnnnnnnnnnnnnnnnnnnnnnnnnnnnnnnnnnnnnnnnnnnnactttattgcacgcgtagttaggtgatggcgacctacggttttcactggggactgggatcgagagtgayccgacctcctactcatgctcgtctctccctgtctctctctttgccttttgtgtctctctgcctgtctctctcgctccttttcctctcagcctcctctgtctctctccttatctctcatcctctctctctctatctcactcccttctccccatctctctttctctctccttcttttccacttctctcaccctcctcatctctctgcctgccactgttcaggctcctggggccccacgtggatgggcggacacaggactcctaggctacctttcatagcgcaagcagagggctgcaggaccttggtccccacctcccagcatcctcaaaatgaggggtgtggggtgtgccgtgctctcctgagtgggcgccccacactccaggaagcagaaactgcaggtcacagctggctcgagtggtgcccacggggctgccagcttccatcgtgtgatctgctgaggccaaagcagaggacagcagcccaggcccatctctgcagcagggtgggggtagggggtaaanattttcaataaggagttgctaggataaaagtcaaaattctccagcataaattcactgacagggatttctgtttaatcttttcaaaattctaatacccaatttgtttcctctagagaataactcgtgtagaatcataacctctttggtggaccttgatttttccatctgtaaaagtatagaactagttttgacttaacagtcaacaaatgcctaccctctccacatctagctgattagagcgccctcatgtgcgcatttgctgtaatgttttagaaatctgaaaaagacaatattaatctcagcagtaatacaataaataatgtcttcatttgcacatttatagcaaatgctataaatatatagctccaagtattactcagtaaaagctaaaggcaaatgctgtagtaggttaatcttactgtcgttcactatcaaacctttcatatgccaattttatcctaaaacagtgaagttattgttttggtttcaattttaatttaatgacttaaaggattttttcccttaaaacttctaagtatttcattataatattatttcatcattaggcttaaaggaaaatatgtggtcaattgagttgttatttattatacatgatagcttgacatcatctttttagggatggaaaacagctccagggaccaagtctaactcagttttttgatataagaatttacctgtcggccgggcgcaatggctcacacctgtaatcccagcactttgggaggccgaggcgggcggatataggtcagcagatcaagaccaggagttcaagaccagcctggccaagatggtgaaaccccatctgtactaaaactacaaaaattagccaggcgtgatggcaggcacctgtaatcccacctacttgggaggctgaggcaggagaatcacttgaacccggttcaagtgagccggctgcagtgagc

SEQ ID NO: 31173 - DNA, 762 bp, Homo sapiens
tcatgctactgggattgctagcagttacagcaataaaagagctgtttgttgtctttccatttggaaaatggttggtaggagcaagggaagcactcaggaagcaaccgggtttgctaacataaaccacactcgagcatttctgtccagagtttatacactaaccagggatgaaccagctgagaattgtgggaacatgctgtatatactcacagatacgagcagcccaagtgtgaattgtcctgtgttttcaatatttcagtaacagtaataaatatgaagtcaacgatgaggagatagagctgtggaagatatgcgaatagatttcatctgtatttcctgagtattattgtttccattgtttatccataactttatttgaataaaaatgggctattataagaacataaaacttgaggtcttccatgtttccattcaacaaataccttagggcccattttgtgaagtatcctttcttgaagggtgactaagatgagtcatacatagtctctggcttcatggaaatttyagtctagtagaagtggaagaaaggcaggtgcatatctacttgtttgtaccaagcacacagtccatataaatcatcaggccaggcagtgaggatacaacagcagctaataataacacaaaatgccacacaatgtgtggtttgaaacaagagaaatccactctctcatggttctggagactagtagttggaaatcaacatgttgataggaccatgctccctctgaagcctccagtgaa

SEQ ID NO: 31174 - DNA, 1052 bp, Homo sapiens
gtttctagctgtcttcaggataaaatccaaactcatttccaaggctactcaggccattcaaatatggccccacctctcctactccacttctttgacattcagtcatgacaaattcacacctttaactgagggggagaagaccctgcttttagaccttcctgcatttcattctgctctctgctgttcctctatgcctatctacttcttctctggaaactttttttttttgttctccttgacataattagtcacgttcttaacaacttgcactgacccgtgtattaaatgagattggaattactcggtaatatgtmtcttttctctgtagcctgttggcttctcaaggacaaggggtgtcctgctatcatttctgtctacctggttcctaacacagcacctggcacttagttgagaacttattaaatcttgctttcaaaatttgactcattaattaaggcaactccaacttggagaatgttaaagtgtggctttttattttaagtcagttttggatgttttaaggaaaagaccaattgtattctccattgacgtgcattttagattcatacatgcagcaggaggaaaatgagacttacgagaaaaaataaatttgctaaaaaaaaaaaaagaaatgaagaaagaatggaaggggatttttttggcccatagcatttgtccctattgcctcactcttggtggttgcttgacaacttcttattgaatgaaaccttttattctccaactcagacatatggcattttcaacaacacattttgtgtcatgtttgtttgttttacactaaagagagatgcccaacttattcaactaaatctgtaaggaagtcttatgctgctatttcaaatgcattgttttcctgtcctgtcagtcacaaaccattttaaaatatgggcttaatcaccagtattccagggggcttaccgcataagggagctgggctgcaggaaggctcagaatcacagcaagtgtgtgtctgggctcataggcgccaactggcatacgagcagcctccagctggtatgcacctgcacctg

SEQ ID NO: 31175 - DNA, 1048 bp, Homo sapiens
ccgacagaataacccgtggaattccaactctccgtccttcattcttgatgttgaccttgagtgtcagcgcagcctggatccagcaggtcaatgtgccaaatccaaaggtcaaggaagttccgacgttatggatttcttcatcatttgtgagcttagggatgaatggataatgacacatgaaggcccattcagcaaagaagacaggcaagttgaaggaatgaatatatgaggggagaagataggaaaagaaatatcccaataatgggatgatagattgcagaaagattagctcttcgttctattctcaaatggtttgaactctgaggggatgaaggagataaataatacccccaacccttaaaaacatttgtgtagaaaaagtaaaagaaaacagaaggagagttacagaaaaagaaatgtttctacaagcatacaccccaaacttttccaggataagaaaattagaccaggaatttggacatggttttttttgtttgtttgtttttgttttggtttgtttgtttgttttgagacagggtctttactctgtctcccaggctaaaatacagtggcgtgatcacggctccctggctcaaagcgatcctcccacctcagcctctggagtagctgggaccacaggtacatgccaccatgcctggctaatttktttgttttgaaggaaaatttgtattactttaattgttttttaagtacagaaaactcaacagtgtatatttaacccagcttggtggcaagttctttagcctttgcctttttgagcttagcaatgtgagccacagacttgggacccaggacattgcctccccagtgatggcggatctcatcggatctgtttttgtaattggtcctgatagcttccacccgcttagccaaagctcctttgtcttccaagttaacctgtgtgaagacaacagtggtgcaggtcttcctgtggactagacgtcccagtcttgccttcctcttgataatgcagcaagagacccccattttacgacacagggcaggcaggaagacagctagctcgatg

SEQ ID NO: 31176 - DNA, 573 bp, Homo sapiens
ttttggagatctacatatctgagattgactgacgtttttatttgctctcacagatgaatggctactaggctaattataaaattcttactgtggttaattctacattatatatgtatgcaggattatcaaatgtagagttgtaatgtaactaaaaatattatgtttcccacgggcatttttttctgtctggtaggaatactgggggaaatacaaattaaagaaccagatcactgatttctaggaataagtcccaggaagtggtgttcaaactttgcaggcagttttaaaatatatgagcccaaatgcatggtggtgcatgcctgtaatcccakctactcaggaagctgaggcagaagaattgcttgaacccgggagacgggtgttgcggtgagccgaaattgcaccattgcactccagtctgagcaacaagagccaaactctgtctcaaaaaaaaaaaaaaaaaaaggcccattttacaacatttatctctcattcattttgagttaatttttaaattgcatataaaatacccatccagatttattttttcatttggatgttcagttgttcttt

SEQ ID NO: 31177 - DNA, 637 bp, Homo sapiens
ttttgctggttttattttttcacctaaatttattctgtcttgcactatttattgaagtgattttgcaggaggatctctaggtcagcatttttattagaagcattcatgttgttgtatataactgtgctaaatttgttttcatcactgcataaaatttgattgtgtgaatacacagcaatttgtagacatcttctcctcttgatagacattcagattaatttcaattcggaactgtgatagttcagagctatttctgttctgggctattgcaaataatgtttccataacattcttttgcatgtatygtggtttacatacgcaagagttcctccaaggtacacacacatactctacaagtgaagtagctggtttgcagaatatgcaaaccttccagctttccagataactccaaaatgttttcaaaacgactctactaatttatattatcaccagcagatatgagtttctgttgtcaacattcttgtcccaacttattttgttgagactttcctttttaccaatctactaggtaagtggtaatatctgattttaattttcttaataggattatcagtgctattgagaattttttggtatgttttgttatccttatttcttaaaggatcatagatttgcc

SEQ ID NO: 31178 - DNA, 1113 bp, Homo sapiens
aatgcaaggccagctagagtggcccgagttcttcactgcagctttttctagaaaactacaatatactgactgtgcaccagcaccaagtctgatttgggagggcagctttctccccataaggcttgataggcaaagctttgcaattacctatggttgagcttataaaattgtgtatagtattttaacctggagccaggatactaatataaataacaaatatgcacagaaaaacagtgctcgattctaatactccttcataagtgcaatttaaaatgaaattattctattgatattgcctcattaaaatggaaatgttaagtgtggcagtactaggtgcattgtaatgtaaggatgtgaagcaactaaaactcacaagttgcttgatgggaattcaaaatgctatggtttctatgaaagacagtggcaattctctatcatgttaatagtttactcaatgtatgactcattaatgaaacttctatgtagttaactaagataaagaaaatttaaatctacagaaatatttgtacgtgaatgttcacagcagttgtgaacataatagactgaaatttaaaccatgcaatattaatttaatttctttatcttgggaaataagcatatcataagtcatgcttccacaaataacttaagagtctctcttgacactaatatgcaggtgagtgatttaggatgtattagagctttagaaatagaagaatttgatccagaaaaaaaaactgacatgtaatctgttttttcaggcataagtggtaggaatgtcatttggttttagggagtcagtggtggttgggaagaccactaaagcatttttggtgaaccatcattatcattagtaccatcgcagctaagttaggttctgacacttaatatttggtaattctaagagcaaccctttcttcataaggtcagttctattccatttgtttaggacaacatcatgggaattagacatgygcagtcccacaagacactgtgcttagaaggaccccactcctggtttaacgtcctgctcttaccattttgaattcttaatgatttttatctttgaacctgtatttcataactgaagtataatgagataatggaacatgc

SEQ ID NO: 31179 - DNA, 527 bp, Homo sapiens
atttgtaggaacacagtaaagaaaaaacaatcttaaattaacaaaagttcaattaaccagtatattccccattaactgaaatctcttctcaaatcaccatgttgtactaagaagtaaatcaattcaaaaatggattttacacacacacacacacacacacagaaacacaaacacaaattgactcgaacaattcaggggttggggcaccaatctcccacacagttgaatatccaagtataactccccccaaatttagctactaatagcctaccattgaccagaaacctagattaagacatattttgtatattatatgcattatatgctgtatttttataataaaataagctagagaaaagaaaatggtattaagaaaatcgtaaggaagagaaaatatatttactattcattaagtggaagtgggtcagcataaaggtcttcaacctcatcatcttcatgtagagtaggctgtggaggaggaggaagaggagggktttgtcttactgtctcactcaggtcaacttgta

SEQ ID NO: 31180 - DNA, 520 bp, Homo sapiens
gtaatagcagagctagtttgtagcataaagaaaaaataataatattattaggtgacacaaataatgctagccaccatttctaagtgtcatggtaagtacagtgattattttctttttttctgactcttttttattgtattttttattttttttcccataggttattggggtacgctggtatttggttccatgaataacttctttactggttatttgtgagatttgggtgcacctatcacccgaacagtgtacactgcaccttatttgttatcttttatccctcrccccccaccctattaaataatagacaaaaaaataatagggtttagaataaatgagttcaaatgaattgtcaaacgtatgtgagaaaagtggaatcagtttgtgagaaaaagcaaaaaactcaacagaaatgctgataaagcatcatcccttcatggctagagctgccaggacactagaacaccaaaatcagctagggaaattttgtagaagtcccagatgtactaaatgttctgtg

SEQ ID NO: 31181 - DNA, 520 bp, Homo sapiens
gtaatagcagagctagtttgtagcataaagaaaaaataataatattattaggtgacacaaataatgctagccaccatttctaagtgtcatggtaagtacagtgattattttctttttttctgactcttttttattgtattttttattttttttcccataggttattggggtacgctggtatttggttccatgaataacttctttactggttatttgtgagatttgggtgcacctatcacccgaacagtgtacactgcaccttatttgttatcttttatccctcaccccccaccctattaaataatagacaaaaaaataatagggtttagaataaatgagttcaaatgaattgtcaaacgtatgtgagaaaagtggaatcagtttgtgagaaaaagsaaaaaactcaacagaaatgctgataaagcatcatcccttcatggctagagctgccaggacactagaacaccaaaatcagctagggaaattttgtagaagtcccagatgtactaaatgttctgtg

SEQ ID NO: 31182 - DNA, 1015 bp, Homo sapiens
catctattctctcagagttcatcttgtttgatggagcttaatttttagcctgttaattttattgtccacattagacttcttcggaaagaatctgctatattttaggttagatatatgagaattcattgttttctgtaaataaacctgttcatgtcttgttctctggaaagaaatctctttcaactatctgactttggtcacagtcatgtagagcagtagccagtctataatgacataattgaatttccatttccagtgttttgtttttgtgtcttacattgtacagttcagaaatgagcattttattcccaattgtcaaaatgctaagctgtccactgtactgaaatactgtttttgttaatgcttcgtcattcaattttctttaaggtgaacacttttatccaacttttctcaagtcagagtacaggtaagccctggctgcctcgagccactctcagggagaccaaaacccttcatacattccaagttggggtacaaaaaagtggggccatgaaggctaatcattcaaaataaaacaaaatttaaaagtattaaggcaaagatttaaaaaattttgcattacataatttacacaaaagcaatgctatcgcctaccatgtgtgaactcgggagaggactgggccattctccttagagagaagtagggtggcttttaggagggcaaggggcttcctgaaacaatgcatctcacaatatttggaaagactattgaaaagaagaacattgtacaatcaaagtccttggcgacattgtagaactagcgggtgctgacccctgagccacaaccacagttctgggtttggggtttggtaaaacaccccaaggacagagttctggggccgggttttggaggaaccaaggcgcctcccagggatggtgtgtcactcctgcttgccatgaaatgtgcacacaggctgtccccmtgcccatcccatcctgctggacaggatggaggaagtgagggaacaggcagggtggacagctggaattcagg

SEQ ID NO: 31183 - DNA, 792 bp, Homo sapiens
tcctttaaatacacgatgattggcagggtttacataggggaaatcagtgcctgacaattcgccttccaggatatggattgtcattccctctctttgtgggccccagtctcctatacataaaagtagagattgtaatactcatttgacttgcagatacctcaccccgaacccacctactataatgtaaaagccaagaatgcaaaccctttcctcaccccgtgaaggtaaagtmctcagagccaaggagagaaggctcagggatggtacctgggtgtttccaacactaaccatgcattgtagttttagtgttcaagtttaagcttcttatgttaaagttaccccagctttaattatattgtaacaagatttatttttgtaattccatttttggattcttgatttcttggtaaagaaatacagttatttttgtatacaaatcttatatactgttacattccaaaatttgttcatgagtcctaacactttttagtaaatttcttatgattttctaaatgcaagatcatgtcatctgtacataaagataactgtacttcttcctttccaatctagatgccatttatttatttacattgccaagttgtcccagctaccactgttatcaagtaaaagggtctcactacccaaagctctagaagccagtaacatcacactaagtttttgagaagagaaaaactttaaaatcaaaccaaaacctatgggatacaggccagatgcagtggctcatgcctgtaatcccagcactttgggaggccgagttgggtgaatcacaag

SEQ ID NO: 31184 - DNA, 792 bp, Homo sapiens
tcctttaaatacacgatgattggcagggtttacataggggaaatcagtgcctgacaattcgccttccaggatatggattgtcattccctctctttgtgggccccagtctcctatacataaaagtagagattgtaatactcatttgacttgcagatacctcaccccgaacccacctactataatgtaaaagccaagaatgcaaaccctttcctcaccccgtgaaggtaaagtactcagagccaaggagagaaggctcagggatggtacctgggtgtttccaacactaaccatgcattgtagttttagtgttcaagtttaagcttcttatgttaaagttaccccagctttaattatattgtaacaagatttatttttgtaattccatttttggattcttgatttcttggtaaagaaatacagttatttttgtatacmaatcttatatactgttacattccaaaatttgttcatgagtcctaacactttttagtaaatttcttatgattttctaaatgcaagatcatgtcatctgtacataaagataactgtacttcttcctttccaatctagatgccatttatttatttacattgccaagttgtcccagctaccactgttatcaagtaaaagggtctcactacccaaagctctagaagccagtaacatcacactaagtttttgagaagagaaaaactttaaaatcaaaccaaaacctatgggatacaggccagatgcagtggctcatgcctgtaatcccagcactttgggaggccgagttgggtgaatcacaag

SEQ ID NO: 31185 - DNA, 792 bp, Homo sapiens
tcctttaaatacacgatgattggcagggtttacataggggaaatcagtgcctgacaattcgccttccaggatatggattgtcattccctctctttgtgggccccagtctcctatacataaaagtagagattgtaatactcatttgacttgcagatacctcaccccgaacccacctactataatgtaaaagccaagaatgcaaaccctttcctcaccccgtgaaggtaaagtactcagagccaaggagagaaggctcagggatggtacctgggtgtttccaacactaaccatgcattgtagttttagtgttcaagtttaagcttcttatgttaaagttaccccagctttaattatattgtaacaagatttatttttgtaattccatttttggattcttgatttcttggtaaagaaatacagttatttttgtatacaaatcttatatastgttacattccaaaatttgttcatgagtcctaacactttttagtaaatttcttatgattttctaaatgcaagatcatgtcatctgtacataaagataactgtacttcttcctttccaatctagatgccatttatttatttacattgccaagttgtcccagctaccactgttatcaagtaaaagggtctcactacccaaagctctagaagccagtaacatcacactaagtttttgagaagagaaaaactttaaaatcaaaccaaaacctatgggatacaggccagatgcagtggctcatgcctgtaatcccagcactttgggaggccgagttgggtgaatcacaag

SEQ ID NO: 31186 - DNA, 1107 bp, Homo sapiens
ataataccatgctgagtgatgytggaaaaagtgagtcttcagtaatgccctcatgaaattacagtctcactacactgaggtattttctttttaaccactttctttcttttctgctgtgaatatgtgccttctaagaggtgaacaacgggaaaaactgaaaaagaaccttcatctaatttagtaactaacttttgtatcttctaagaatttttatctccagaaagctctaattttcattcctttacaagctttatttctctctcctttccaacaccagactttgctctgtttgttttctataccttttttagagatgcctacaatagaaaaaagctatgacatattcaatacatctgaaaagtttgcattaccatagataagaatgaattatctgtttataaagaaaaaacaataaaaatatgaaccaagaaaacacagaaggtagtaaccacatttagatgtttatcatggaatcatctttataatccatctgttacaattctacagagcaaattacaagtaattgtgaagtttcccctcattttataggtttggtcttataaggcatacaacacaaattttaattacttttatttttggtatttggatcttaatttggtcaagtggccactgggtagatgatggagcctcttgagacatacagtcttcttctagctttgttgatgtgaatattactgtgtatttttcattcacttattattttacaaggcatgcttcattaaaaatatatcagcatctcattgacaaatcacaaaatttaaaaggcaccagaaaaaaacaatttatttaaaacattcctgtgtaaaggtagtcaccgctcttactattcttcaaatatttttattatctttaaacacaagcctagttttatctcgagtgtctgaccttgatgatattgtacactttaaacttagaaaaaatgaactctattggaaatttcctacagatcagcttttctagatgccaagcgccttgtttcagccatggtgatgacagccaattgggttctcagggattctggcctctggcatcatctcaattgtttatcattgaagttgggtctgatgagaacgcagcttagatgca

SEQ ID NO: 31187 - DNA, 1107 bp, Homo sapiens
ataataccatgctgagtgatgctggaaaaagtgagtcttcagtaatgccctcatgaaattacagtctcactacactgaggtattttctttttaaccactttctttcttttctgctgtgaatatgtgccttctaagaggtgaacaacgggaaaaactgaaaaagaaccttcatctaatttagtaactaacttttgtatcttctaagaatttttatctccagaaagctctaattttcattcctttacaagctttatttctctctcctttccaacaccagactttgctctgtttgttttctataccttttttagagatgcctacaatagaaaaaagctatgacatattcaatacatctgaaaagtttgcattaccatagataagaatgaattatctgtttataaagaaaaaacaataaaaatatgaaccaagaaarcacagaaggtagtaaccacatttagatgtttatcatggaatcatctttataatccatctgttacaattctacagagcaaattacaagtaattgtgaagtttcccctcattttataggtttggtcttataaggcatacaacacaaattttaattacttttatttttggtatttggatcttaatttggtcaagtggccactgggtagatgatggagcctcttgagacatacagtcttcttctagctttgttgatgtgaatattactgtgtatttttcattcacttattattttacaaggcatgcttcattaaaaatatatcagcatctcattgacaaatcacaaaatttaaaaggcaccagaaaaaaacaatttatttaaaacattcctgtgtaaaggtagtcaccgctcttactattcttcaaatatttttattatctttaaacacaagcctagttttatctcgagtgtctgaccttgatgatattgtacactttaaacttagaaaaaatgaactctattggaaatttcctacagatcagcttttctagatgccaagcgccttgtttcagccatggtgatgacagccaattgggttctcagggattctggcctctggcatcatctcaattgtttatcattgaagttgggtctgatgagaacgcagcttagatgca

SEQ ID NO: 31188 - DNA, 1107 bp, Homo sapiens
ataataccatgctgagtgatgctggaaaaagtgagtcttcagtaatgccctcatgaaattacagtctcactacactgaggtattttctttttaaccactttctttcttttctgctgtgaatatgtgccttctaagaggtgaacaacgggaaaaactgaaaaagaaccttcatctaatttagtaactaacttttgtatcttctaagaatttttatctccagaaagctctaattttcattcctttacaagctttatttctctctcctttccaacaccagactttgctctgtttgttttctataccttttttagagatgcctacaatagaaaaaagctatgacatattcaatacatctgaaaagtttgcattaccatagataagaatgaattatctgtttataaagaaaaaacaataaaaatatgaaccaagaaaacacagaaggtagtaaccacatttagatgtttatcatggaatcatctttataatccatctgttacaattctacagagcaaattacaagtaattgtgaagtttcccctcattttataggtttggtcttataaggcatacaacacaaattttaattacttttatttttggtatttggatcttaatttggtcaagtggccactgggtagatgatggagcctcttgagacatacagtcttcttctagctttgttgatgtgaatattactgtgtatttttcattcacttattattttacaaggcatgcttcattaaaaatatatcagcatctcattgacaaatcacaaaatttaaaaggcaccagaaaaaaacaatttatttaaaacattcctgtgtaaaggtagtcaccgctcttactattcttcaaatatttttattatctttaaacacaagcctagttttatctcgagtgtctgaccttgatgatattgtacactttaaacttagaaaaaatgaactctattggaaatttcctacagatcagcttttctagatgccaagcgccttgtttcagccatggtgatgacagccaattgggttctcagggattctggcctctggcatcatctcarttgtttatcattgaagttgggtctgatgagaacgcagcttagatgca

SEQ ID NO: 31189 - DNA, 2158 bp, Homo sapiens
acaaccactttctaggaaaactctgaattggaaaaatgttaagttcaggtgtgttggtcatgtgagacacagaggaggccactcaacagagcacatgagataatgtaagcggtgtatttcttacaggtgaggttcactgggcaccatcgtagggtctacctgacacatcaagtattctctaatctgcagatttctcagtcttcacttattttttgtgaacttgacttttttgaaaacacaggtcagatattatgtaggttttcccacaatatgaatttgtctcatgatttctcatgattaaactgggacataaatacattaaaaccatgcatgtgtgtttgaagacaagaaaaataaacattatagatattagaaatataaacatagaggtaaatgtaataaacacaaattagaggataacaaataattcacagtaatagctattttcagtgattaaggaagatggtgaagctcaggagatgcactatgggccatcaaacatattgctcatgttgttttataaggtcaacagtgactttaaagataaagaaaccttataaatttaagaatagttttaggtttacagaacagttgtagtacatagaatttccacatatcctacgaagtttccatttttatgaaattcttacattaatgtaggacatttgtcacaagcaatcagttttataacactataactactcttcatactttattcatttttttttagttttgacttaatgtcctgtttctattccaggatttcatccaggatacctcatcacaggtacatgtcatgtctccttagaattctctgactgtcacagtttctcagagtttccttatttttgatgccattaatattactaatgtgggatttgtctgatgtttctctaatgataagactggatttgtgggtttaggggaggaagatcacgaggaaaagtgtcatttttatttatttatttaattttgagacagtgtctcactctctcgcctagcctggagtgcagtgtcatgagcttggctcactacagcctccatcttctgagcttaaggatccttccctctcaacctccagggtagctgagactacaggtatgtgccaccaggctggactaatttattgttgttgttgtttgttattttttttggtagaggcaaggtttcaccatgttgcccaggccggggtcaaactcatgggctcaagtgatatttattttgttatagagatggggtcttaatgtggtgtccaggctggtctgggattacaggcgtgagccactgtgcctggccaaaaagtgccattctcatcatatcataccaagagtaaaaactgtcaacaagggtagacagtcattattggcagaatgtctacaaattcctttaaaccttcaccgtaaacatgtgcctattctcttccaattatttcatgtgtattaatttattcacttaaacatgcatcttttatttatatcattatctaaatatggagatttattttacaatgcatatgtgctatttttttttttgagacagagcctttctgtgttgccaaggctggagtgcaatggtgcgatctcagctcattgcaacctctgccccctgggttcaagcgattctcgtgcctcaatctcctgagtggctgggattacagrcatgagacactacacctggctaagttttgtatttttagtagagactgagtttcaccatgttggccaggttggtctcaaactccatacctcagatgatccaccctcctcggcctcccaaagtgctgggattacaggcatgagccaccatgctcggctgctattttttttttaattgcacaaattgttccagtgttggctattggaaggtttttaagttgtcccttctatcactttgaaatacctgcataattaaagtttgatgttgtgtggttggttggttttgttgttgtttggcattttcttttgttcagtcactattatatgctccagtctgtgaatttaattctgcttcagggtaatttggtaattttatactttctgctaatgtttccaacaccatatgacctaatccaggaccatataaatggatccactcattctcatttgtatgtgatctagcactccctgcaagcaagttgatgttgttaatttaatcatgc

SEQ ID NO: 31190 - DNA, 2158 bp, Homo sapiens
acaaccactttctaggaaaactctgaattggaaaaatgttaagttcaggtgtgttggtcatgtgagacacagaggaggccactcaacagagcacatgagataatgtaagcggtgtatttcttacaggtgaggttcactgggcaccatcgtagggtctacctgacacatcaagtattctctaatctgcagatttctcagtcttcacttattttttgtgaacttgacttttttgaaaacacaggtcagatattatgtaggttttcccacaatatgaatttgtctcatgatttctcatgattaaactgggacataaatacattaaaaccatgcatgtgtgtttgaagacaagaaaaataaacattatagatattagaaatataaacatagaggtaaatgtaataaacacaaattagaggataacaaataattcacagtaatagctattttcagtgattaaggaagatggtgaagctcaggagatgcactatgggccatcaaacatattgctcatgttgttttataaggtcaacagtgactttaaagataaagaaaccttataaatttaagaatagttttaggtttacagaacagttgtagtacatagaatttccacatatcctacgaagtttccatttttatgaaattcttacattaatgtaggacatttgtcacaagcaatcagttttataacactataactactcttcatactttattcatttttttttagttttgacttaatgtcctgtttctattccaggatttcatccaggatacctcatcacaggtacatgtcatgtctccttagaattctctgactgtcacagtttctcagagtttccttatttttgatgccattaatattactaatgtgggatttgtctgatgtttctctaatgataagactggatttgtgggtttaggggaggaagatcacgaggaaaagtgtcatttttatttatttatttaattttgagacagtgtctcactctctcgcctagcctggagtgcagtgtcatgagcttggctcactacagcctccatcttctgagcttaaggatccttccctctcaacctccagggtagctgagactacaggtatgtgccaccaggctggactaatttattgttgttgttgtttgttattttttttggtagaggcaaggtttcaccatgttgcccaggccggggtcaaactcatgggctcaagtgatatttattttgttatagagatggggtcttaatgtggtgtccaggctggtctgggattacaggcgtgagccactgtgcctggccaaaaagtgccattctcatcatatcataccaagagtaaaaactgtcaacaagggtagacagtcattattggcagaatgtctacaaattcctttaaaccttcaccgtaaacatgtgcctattctcttccaattatttcatgtgtattaatttattcacttaaacatgcatcttttatttatatcattatctaaatatggagatttattttacaatgcatatgtgctatttttttttttgagacagagcctttctgtgttgccaaggctggagtgcaatggtgcgatctcagctcattgcaacctctgccccctgggttcaagcgattctcgtgcctcaatctcctgagtggctgggattacaggcatgagacactacacctggctaagttttgtatttttagtagagactgagtttcaccatgttggccaggttggtctcaaactccatacctcagatgatccaccctcctcggcctcccaaagtgctgggattacaggcatgagccaccatgctcggctgctattttttttttaattgcacaaattgttccagtgttggctattggaaggtttttaagttgtcccttctatcactttgaaatacctgcataattaaagtttgatgttgtgtggttggttggttttgttgttgtttggcattttcttttgttcagtcactattatatgctccagtctgtgaatttaattctgcttcagggtaatttggtaattttatactttctgctaatgtttccaacaccatatgacctaatccagsaccatataaatggatccactcattctcatttgtatgtgatctagcactccctgcaagcaagttgatgttgttaatttaatcatgc

SEQ ID NO: 31191 - DNA, 520 bp, Homo sapiens
ttgaggctgataggaaacaagtaaaattagaaacagattaaactactgcatcagcaacaaattagatgacaacggtatgatcacttccttggaacacagttctagctagatattcagggtacagggctatgtggagaaagaccctaagatgaagggaccagtgggggaggtggccccggcaggtgtcccagcagctttcgccttggcaggtgggagcatgacctatcgtgtgcagttcctggcgggctatacatagccagtcaaagcttcttacaaragaaacctctttcacaccctccacgggtcccacccacaggccacaggactcactgtaaatcccttggacgttgtctcacccgggaagggaaagcagccagcagccctccagccctcttgtgctttccctgggagtgcgccccgtgctcagccatggtggacatgggggccctggacaacctgatcgccaacaccgcctacctgcaggcccggaagccctcggactgcgacagcaaagagctgc

SEQ ID NO: 31192 - DNA, 520 bp, Homo sapiens
ttgaggctgataggaaacaagtaaaattagaaacagattaaactactgcatcagcaacaaattagatgacaacggtatgatcacttccttggaacacagttctagctagatattcagggtacagggctatgtggagaaagaccctaagatgaagggaccagtgggggaggtggccccggcaggtgtcccagcagctttcgccttggcaggtgggagcatgacctatcgtgtgcagttcctggcgggctatacatagccagtcaaagcttcttacaaaagaaacctctttcacaccctccacgggtcccacccacaggccacaggactcactgtaaatcccttggacgttgtctcacccgggaagggaaagcagccagcagccctccagccctcttgtgctttccctgggagtgcgccccgtgytcagccatggtggacatgggggccctggacaacctgatcgccaacaccgcctacctgcaggcccggaagccctcggactgcgacagcaaagagctgc

SEQ ID NO: 31193 - DNA, 520 bp, Homo sapiens
ttgaggctgataggaaacaagtaaaattagaaacagattaaactactgcatcagcaacaaattagatgacaacggtatgatcacttccttggaacacagttctagctagatattcagggtacagggctatgtggagaaagaccctaagatgaagggaccagtgggggaggtggccccggcaggtgtcccagcagctttcgccttggcaggtgggagcatgacctatcgtgtgcagttcctggcgggctatacatagccagtcaaagcttcttacaaaagaaacctctttcacaccctccacgggtcccacccacaggccacaggactcactgtaaatcccttggacgttgtctcacccgggaagggaaagcagccagcagccctccagccctcttgtgctttccctgggagtgcgccccgtgctcagccatggtggacatgggggccctggayaacctgatcgccaacaccgcctacctgcaggcccggaagccctcggactgcgacagcaaagagctgc

SEQ ID NO: 31194 - DNA, 923 bp, Homo sapiens
agaactgctagaaattccagtgggaatttgaattggaaaagtgataattttcagacttgtatttctttcatttaaacaactgactcatagttaagacatactttcagcatactgtgtataattaactttgtttcctgtgaaaacctttatattttgaatcaagataatgcttttgaatgaagaccttttggcacaacattttaagaatcaaaatgatgatttttagtgttaaaatctttacatttcaaagtagtaagagttgtatattgaagctagaattttttaaagccaattcatgtttgggtatttagctcatcttggctttttttttcttgttgtacctcctaattgatagtttatcctgatacaaaagataaaaatttaaacctgtttatgctaatatgcaataactaatttactattgcatcttaatttctgctctcaaaatcttgttttagggatcttctgggttgtggaaatctctgtaagatggttttggtctaagctgcttggttaccaagatgtcagttcaagaactaatgacaattgatattcatgattgtacttgtttcaggcaatccacgctatggttgcttgaaggtcttccaaatggtagccttctctaggcaatattgtccactctgttatgctatcaacgaaagactggcttttctctttggstccacagaaatttattgagataacatcatgagatcattgctatacccagtgcttttagacagggatctgtgagctgcctggaaacacagagccaacaacaggcttcatttgaaatctcacagttgaaatatgtgatatattaaagttcaccttgcaggtgtgagcattcggatcaccaacgctgtgacctcgctgtgtgaacgggagctactacaggaaggaagcttacaaatgagctgcat

SEQ ID NO: 31195 - DNA, 503 bp, Homo sapiens
caattcataaatacattcatatgaatagttttgtaattccagtcattgcattttggtattttttctattttaaatagaagctgattgaaggcaacatcaaaaagtgacatccaagtaccttttcccaaaatcatatatattttgagcctaggagacacttagagttcatgcagtgtaattcaatatcctagtgttagaaatcaggaaactaatgaaggacaagattggtgaaatctattcttcacggcggagccaaggttgaacccaaatcttctaacacctagaagagtgtccattccggtaattaaaaaaaaaattgttgaccatctacgtattctaaaagaaaaaaacgtaaattcataacaaaagatagacatttctaaagtaaatgcagtctcaagggatgagctaatcatgtgtacagaaggtgtcaagtacagtgtaaaagcaattaacaaaattgaaatgtattctttagttatttaartcagataagtgagaac

SEQ ID NO: 31196 - DNA, 336 bp, Homo sapiens
gcttcctccccctagacttcattttcaccagcagaagttctcacctggggtcagtttaagcttctaacctaagtaaactattaccttcacaaaccctttctccaggtgacatgtcagacaaatcttactgagcctgaycttcacagattatctttgtatgtacaaattacagtctgtcgccgggaccctttgcacgtaaaaaccaaacactgcccccgcaaaacgtccctaggctctaggtacagccccagtaaggacagaacctccccccaacccccctacacaaagtgcacctgcacgtgagtctcctgctttccagggctctgtagcttctca

SEQ ID NO: 31197 - DNA, 600 bp, Homo sapiens
ggatcccgctgtgctgagcatgtctggggctgtgggctgcggagcctctggaggctgaggggtgcttcaggcagggaggtgtgcttggtgtggcactgtcacttagctctagagaccctggccagcccccagggacacagaggtgcctgggaaacagtggaagggaggttctgtctagtgccagtccccagctcgtgtctctgacatggctgctgccctggccttgtggctggccgccgagtctgaggaggggacatgaggctgtctttcctacccgaccacagcaggagggggcctgccagcagtggctggggtcactggggcagtccatggagaagggccctgggggtcccacstttggctccgcatcgcacagtcagggaaactgaggcccagggcgagggtctgaggctgagccagcctcacacaccacatggaggcagagctgggacctcgccctgggcccacctctccttctgagcccctttgggtctctgtgcctgcagacactgggggggccgctcctgtgggtgttgccttcgttgtctgtccggcaggggtgggggggcagggccacagctgcgcccgtccggccaccct

SEQ ID NO: 31198 - DNA, 1260 bp, Homo sapiens
tgcattgcagttggttatcatgtgtcgttgtccttagtagcttttattctggaatgttctccctaccttttttccttttctatctttcttttgtgccacggacacacttgaaaagtccagacctgtggccttgtggcatgtcccaccatcaggactggtctgtttcttcatgtctgggtttggctgagcattttggacaagggcctgcctcggtgacrctgggtccttgccactgtgcccatcagaagcgcatgggacgcactggctcccaagtactttcagattttagcacaccttgtgtgcacctagtggagatgaaaattctcacacgtatgtctttgcacccacatgcaaatagacatgtaagggatattcctggaagaggaattgttggatagaaatgccttctgccaagccaccctccccagtggctgtcctgatttgtacctgtaccaaaagggcacaagtccctcgtccctggtccctccgagcccagctcaggacactgtcagtcttttaaatatttgccagaccatgggaaaagggggccttcctggcactgtggagcctgagagcgttttcatacatttccggcacatttgtgtctctgtgaatttcctgtccctttctttgcttatttttctgttggattatttgtctttattgattcaggaggcagacggggcatgtggtctgcattttgcaggcagggagatggatcgctattggttttagcatgcgttcttcttgccgacgggggctgggccgagctgtgtgtggaggggctgtgggtgtggagagggaggggcagcaggagacggcccagtttccggcctgggcgagtgcctccttggggacagaaggcagggagtggtggaggagcggcacctcccaacagggagacgcagcaccatcccctccgatccgccctggtggattttctcactgcatctctgtgctcaccctgccctggggctgcctgagagctcaggaagggagttggcatgcttagtcctggccttcgaggcttccctcatggccgctcaacatcctccgcttgcctttgtttccgcctggcctcggagcctctgtacctccatcccctcttcagctgtgtccttcagtgcttggtgcagatgtcctgtcctcatgaggcccatccgcccgcctgtgcccatggcagccgtagcagctgcagagggcactcacctcgctgttcactgttcgtcacccccccctgcaacctgccagcttcatgca

SEQ ID NO: 31199 - DNA, 1260 bp, Homo sapiens
tgcattgcagttggttatcatgtgtcgttgtccttagtagcttttattctggaatgttctccctaccttttttccttttctatctttcttttgtgccacggacacacttgaaaagtccagacctgtggccttgtggcatgtcccaccatcaggactggtctgtttcttcatgtctgggtttggctgagcattttggacaagggcctgcctcggtgacgctgggtccttgccactgtgcccatcagaagcgcatgggacscactggctcccaagtactttcagattttagcacaccttgtgtgcacctagtggagatgaaaattctcacacgtatgtctttgcacccacatgcaaatagacatgtaagggatattcctggaagaggaattgttggatagaaatgccttctgccaagccaccctccccagtggctgtcctgatttgtacctgtaccaaaagggcacaagtccctcgtccctggtccctccgagcccagctcaggacactgtcagtcttttaaatatttgccagaccatgggaaaagggggccttcctggcactgtggagcctgagagcgttttcatacatttccggcacatttgtgtctctgtgaatttcctgtccctttctttgcttatttttctgttggattatttgtctttattgattcaggaggcagacggggcatgtggtctgcattttgcaggcagggagatggatcgctattggttttagcatgcgttcttcttgccgacgggggctgggccgagctgtgtgtggaggggctgtgggtgtggagagggaggggcagcaggagacggcccagtttccggcctgggcgagtgcctccttggggacagaaggcagggagtggtggaggagcggcacctcccaacagggagacgcagcaccatcccctccgatccgccctggtggattttctcactgcatctctgtgctcaccctgccctggggctgcctgagagctcaggaagggagttggcatgcttagtcctggccttcgaggcttccctcatggccgctcaacatcctccgcttgcctttgtttccgcctggcctcggagcctctgtacctccatcccctcttcagctgtgtccttcagtgcttggtgcagatgtcctgtcctcatgaggcccatccgcccgcctgtgcccatggcagccgtagcagctgcagagggcactcacctcgctgttcactgttcgtcacccccccctgcaacctgccagcttcatgca

SEQ ID NO: 31200 - DNA, 619 bp, Homo sapiens
gactaatggatgagccaaatagggtctgtctgtacaacggaatatttctcagccatcraaaggaaagaggcactgacgcccaccacaccacggacactccctgaaaacatgacgccgagtgaaagaagccagtcgcgaaggaccacgcagtgtgggattccgttcgcatgaaatgcccagagcaggcaaatccacagagacagaccagttgttaccaggggctgcggagggaaaacgggagtgacagtaaaggatgcagcatttctttttggggtgatggaaattttctaaaatggattatggtgatcagcacgcagctctgtgaaataccaaaagccattgagtgtgcattccaaacaggcaaattgtacggctatgtgaattatatctcaatgaagttatgattttcagatgtgtgcaccgagcacttctgcagagctggctaggctctgtggaggtgctgagaatattgtttctgaaagcacatcgaggtgctgccttatgagaagatagatgaattattctaggttgtgatgtcatatcatatgtcccaggtgtgtgagagtgtgtggtttttgtttgtggcctacagaagcacatggtagagcagccgctgagc

SEQ ID NO: 31201 - DNA, 544 bp, Homo sapiens
aggcctgtctggtatgggatgccatctccttccaccttgccatgtgctatataaacaatcgctctggccacctgaaatcaacaggcaacaaaagtaaggcaactgcatggcctcgatccacacctgggtcatcctggaggtgccctgtgtcaggaactgaagacatggacacagcccaaaggaacagggagcctgcagcacacgagggttagacaggctgccctgggctctragccttcggcccatttgggcagctggagactggaccagatgatgctcagccactcctaccagtgctgagctctggaataatgccagcgggtgtggggagggccacaggggacctgcccttgttgcccttgttgatgatggaagctcctgtcctgccagacatacacagtggccggacgttagagcccacatgccaggaacaagggaccatgctgtctgctctcccccactgtgtgggtggaatgcctgctgtgcgcatcatcggctggggacagggctgggcaggggcgacaggtggcccggagagcacaca

SEQ ID NO: 31202 - DNA, 599 bp, Homo sapiens
aggtcaaattgagtgagttaagagttgggtgccatctcccatctttctgctaatgtcgatccctccctttcctggtaacccagtcccatcaccccagactcaccttttacaacaactgggccctctaatcccacattcagccaatggccaagtttccctggtttygccaaggactttttccttcagttcaactaaagcgagggatctgattggtcttttaccaagctgtcgtgaagtaagctatagtaatcagattatctgctacagtcaggcttcagtatttagcaaatattattgtcaagttcaggttatccagtgttcctttaaaacaatgccaactacatttttctagaaggcagaccagatttttaaaagatcttcttttcccattcttaatacttcttaaaaattaaatattcgcaaggaaagtgattgggttctgtaggaaggtgagttcctaagtgaaggggtacaacatccctttgccttttcagggctatgttacccctaggcagaggcagatggtacttagactaccagcaaaacaacaatacttaagaaggagaaaaagagcaagacagaaagagtttaaaacaatc

SEQ ID NO: 31203 - DNA, 610 bp, Homo sapiens
atgccaacagacatggggaatagtaaagtgcacctgtagagttaaaaaatgcatgacctgttccctcaaagagtgaacacaggagaaagacccatcctggagggcggctgctgagtcgtaatacataattcacgggcccatgctgctccatgcagatggcgatattaaatcgtgattgatgctaagagacacacacatctcaggaaggtctccgagaggcttctgaatatttccatgtctcatgtgccttcccagcttctgttctactgtggtatttaagcaaaactccctatttcccaagaatccctgctggggattgcagaactttactcccgaatagatgagattcctcaaatgtcatcacccacctttggagcctttgaaggtggctcccttccctcccaggccacatgaagctgtctgcctccagccaggcactgcaggtacagggagccagcccttcctgcaaacrgccagttatggctggacaaagcagcagcacactctggtggtggtgaccaggcaggagggacagtgggcagacagcgcagaagaaacagatgttcattcaacacaaagcacctttgtcgaaattccaaggctagagcca

SEQ ID NO: 31204 - DNA, 559 bp, Homo sapiens
gggctcaaagaagttaagcaactggcccaaggttctactcccataagtggcagagaagggttttgaagccagataccctagttttcaatctctgctttactcttgtgctgtctgcctccccggcatcatgcatttggcaggggacatgatatggacctgttacgtgggcccacagcatccaggtccagcctaagctgggaagatcaaggaaggctccctggaggaggtgacgcctatackaattctaaagaatttggccaggcagcagggagtgtgtttggctggtgtcataggcagacagcagcatgcccaaagacaagaaggagggagggtttgatgccttcaggaaccaaaataattgaacatgcctgaacccaatttcttaaccagtgagcattgtaagggtagactaaaaggggctgtccttgtgacttgctgacacaaacccttttcccggtgaagaggtgcctgagcaatactatttaattgtatttcctggccagacaacttccaccatctccttaggagacagggtggtcaggaagcaggaaagactaag

SEQ ID NO: 31205 - DNA, 521 bp, Homo sapiens
cctttggtcacttmttaattggttaattcaccaaatcttgatgagtctgacttttgggaaaggttctggtttgatcctgtaagacttgccaaagatggatcagcaaggagtcatgacctcaagttgctggtggctcagtagactggatgaggccctccagaactctcacacatctcagaagatgctaaagagcttcagcctctcagatgcacagaggagaaagaccactcccagtatgggagaggagaaagggcagaggcagcctggagtgagagagtaggtgggatttagagcagggaagggcataccaggggaaggggaaggtgtgagtagagaaatggatgctgggttggtttggggaacactcagaagctgcagtttagaatgtatggtgggaaataattgcaaacaagattagaaataatagcttgggctcaattcaaggcccaaattgctaggcaaagaggtttgggtttcacttgctaaccaatggggagccattaatgtttcaacataagctt

SEQ ID NO: 31206 - DNA, 992 bp, Homo sapiens
agcactgtagtacaacaggctgtgcatggacaatggatggattggtgggtactaaggaccaaccacttgctccatccccagtcctcaccaagcctagattttttccctcctcattgcgaacactcccatctgcattgtttctctacctcctctttttcttccctattcactagctccaggcttacctgcctttggggatggaaaactctagctaaatataggcatgcatcagttttcttttctcctgttaggccaggggctcttaagtatgtttctgcttccgtacagtttgtggaggggaagacagcccccagggcacccatgaaagcagagagagaaagatatgctaaacttggaaaactcacagatgaatactctygagaggtgacagcgtgctggcagtcctcacagccctcgctcgctctcggcgcctcctctgcctgggctcccactttggcggcacttgaggagcccttcagcccactgctgcactgtgggcgcccctttctgggctggccaaggccggagccggctctctcagcttgcagggaggtgtggagggagaggcgcgagcggcaaccggggctgcgcgtggcgcttgcgggccatctggagttccgggtgggcgtgggcttggcgggccccgcactcggagcagccggcaggccctgccggccccgggcaatgagggacttagcacccgggccagcggctgcggagggtgtactgggtccctcagcagtgccagcccaccggcgctgcgctcgatttctcgccggaccttagctgccttcccgcggggcaggcctcgggactgcagcccgccatgcctgagcctccccccgctccgtgggctcctgtgcagccggagcctccccgaccagcgccgccccctgctccacggcgcccagtcccatcgatcacccaagggctgaggagtgcgagcgcatgtcacgggactggcaggcagctccacctgcagccctggtgcg

SEQ ID NO: 31207 - DNA, 992 bp, Homo sapiens
agcactgtagtacaacaggctgtgcatggacaatggatggattggtgggtactaaggaccaaccacttgctccatccccagtcctcaccaagcctagattttttccctcctcattgcgaacactcccatctgcattgtttctctacctcctctttttcttccctattcactagctccaggcttacctgcctttggggatggaaaactctagctaaatataggcatgcatcagttttcttttctcctgttaggccaggggctcttaagtatgtttctgcttccgtacagtttgtggaggggaagacagcccccagggcacccatgaaagcagagagagaaagatatgctaaacttggaaaactcacagatgaatactctcgagaggtgacagcgtgctggcagtcctcacagccctcgctcgctctcggcgcctcctctgcctgggctcccactttggcggcacttgaggagcccttcagcccacygctgcactgtgggcgcccctttctgggctggccaaggccggagccggctctctcagcttgcagggaggtgtggagggagaggcgcgagcggcaaccggggctgcgcgtggcgcttgcgggccatctggagttccgggtgggcgtgggcttggcgggccccgcactcggagcagccggcaggccctgccggccccgggcaatgagggacttagcacccgggccagcggctgcggagggtgtactgggtccctcagcagtgccagcccaccggcgctgcgctcgatttctcgccggaccttagctgccttcccgcggggcaggcctcgggactgcagcccgccatgcctgagcctccccccgctccgtgggctcctgtgcagccggagcctccccgaccagcgccgccccctgctccacggcgcccagtcccatcgatcacccaagggctgaggagtgcgagcgcatgtcacgggactggcaggcagctccacctgcagccctggtgcg

SEQ ID NO: 31208 - DNA, 808 bp, Homo sapiens
gaggagggcatcatgacgcactagacctggctgcaggtggtgagtgaatgtagctgcgccctgagcagaggggagaggggccatgaggaggctgttttggggcccttctggagcagggccggagaagggtaggagattgaagagggtgagtgagaaaaggctggacaggactagggcagctcctcaacccacccccaggcaccctccccttcgcgctggacctggctttccttgaggggaggagggagtttgtccccttgatctgtgtggcgcctctccccagcacagtgctgcaaggtagacggggctcaggaccctttggtagaaggaggaagggggaggaagagagcgagggggagggttagagctgatcktcctgggaagaaggcgactaaggacagcagccagcgctggcgaggagggaaggcgcccggagcactgagtggggggttgggagaggagggttagcccagtgggaagctgggaaggctgggggacttggtgggctgcagtcctgccaaaagccgggtgacaggtagggagccagagcacccgggtgtccccggctgcccgcgccgcacagagcaagggaccccaggcctccgctcgcccttcccgccgccccgcggcctccgcaggccgccccgcaggcctccgcccacattcacctggctcctccgcggagcccctaccctcacgtttgggccacgctgggacccgggccccttggcaccccacgcagacgcggacccgcaccccaagtactggggccaggcccgtgtgccggcgcgcgggtgaccggcggtag

SEQ ID NO: 31209 - DNA, 1029 bp, Homo sapiens
tcagagatggcaccctgcatccttgcttaaggcctgggctcctccctgccgtacagatgtgggaatagaggacaaagggggcttcctggccaaggatggtggaaggtgaggacagagccacaggccctgcctactagttgtggcctccctcggagtgcagcggcatgatcayggctcactgcagcctccacctcccatggctcaagtgatcctcccacttcagcctcccgactagctgggactacaggctgacgccaccatgcccagctaaatttgtacattttttgtagagacaaggtctctgtttgttgccacagggaacacctcttcccaccacagggaggcccttcctccacgagaagcggggcggggaagctgcccagcaagccatctgaccaccagtcaccaatgtaggcagaaatcactgtgtgctcaggggtttaggtggaaaggaccgttgtgctcgggagtttgccgacgtctggaatccttggggttttactcaagggcaaggtgtgtgagaatttgcagcaaagccgtcaagaaacacaaagtgcagcgtctcaatatcaagcacgcccaacttccagggaagacttccgcaaaatcaagggcgctgttgtcctagtcctagggtcaacacatgttctcattttcaaaactttcctggtcactgggacccaaggcctgggagcagcatttaacctgcggtgccactaaatgagagccggccttgagtgagtgtgcctttaacccgggctgccctgggctactgccatatcacctgaccttgcagcttcaggctgcactccgcttccctttgtggggctggcaggggcactctgctctcagccttctagctctgagaggagaaaaccagaagtggccccttcctgtgcctctgtgtgttcctttgcaagccgttgtgtgccttttctgcaggcgcttatggagagtgaggtgtgtttgtaccatctccccgtcagattaggaatcctcaaggtcagagacaagttccctcctccctcc

SEQ ID NO: 31210 - DNA, 746 bp, Homo sapiens
ccggcggcccagctggcgggggcgggcgggacacgcgccggccctcgcttcccctggagaggacgcgcgctcagcggcggcgatcggggagcggccagctttagagcaggcgccgcgtgggtctacgctgtgttttagggggacgattagttcgcccttccgccccaggactttccgaggcgggctggcccctgggttgaaccgtggccgacattccggtcctcctccgtctctacctcccttggcagccttctcggctggtctcaccaacagctgcgcctccgcgcgctgtccgcacccttcctttcccactttgccagcctcctgtttctcatcggacagggtattttccgacttttgattcagagcagacttttctcccatttgatctttcccaaacctacttcctttagtattaaattcttaccttcaacttctcttgtccgttgaacacatacttttaagcgaattattgcataacttaaactgtggattgaataagcatttttcgaaacgatcctggagtgtaaagttccggtcagtgccccgtacaacctcgaacaaagcgtgcatttcatacctatggcacagtttgctcrtatttgaccttggggatatcgactggtccgcatgccggagaaaatgattattgtgggtaattattggtcttattttggcgtctggttagtattggccttgtcttggggtactttgggagaaaaagccttttgtctgtgttgatagaa

SEQ ID NO: 31211 - DNA, 740 bp, Homo sapiens
ccactcaggaaaactacaggagcttatgttaccttgcagaatatgaggcagtttatgacctgggaaatggagaaagtgaatacaaattcctagagaatttttattgctagcacttaggatttctgttatcttaaatagtttatggagaagggtccttttttaattttttttttttttttttttgagatggagtctcactctgtcacatacagtggcctgatcttgggtcactgcatcctctacctcctgggttcaagcgattctcctgcctcagcctcctgagtggctgggcctacagatgtgtgccaccatgcctaatttttatatttttagtagagacggggtttcgccatgttggccaggctggtctcaaactcctkacctcaagtgatccgcccgcctcggcctcccaaagtgctgggattacaggcatgagccaccgcacccagcctctagaagggtgtttatagtattacttcatttgagacatatacagatgtctacctgataatccattctttgactaagaaggattctcagtgaataatcgattgccttatgctttggactgtcatagacctttaatgctttaatatataactcaagtgaaagtgagattgcattgttcctcatgaaaaaaaaattatacttggcactagtaatacctgattatatatgtatatgtattcctctcatttgaattttatttatcacttggtaacaaagctagtgtttgtctc

SEQ ID NO: 31212 - DNA, 1034 bp, Homo sapiens
cttcttacaggcaattcctaactcttgggttttgtagagggtccaaaactctttagaacctataattcaaggaaaggctccactttggttttgcattttgtctggtctctttgggtgacagaatttatgtcacaaggtgcacatgttttggggaggctcatggacagcccatcgctcttgtgctttggtaggaaatatgtgcagttatggggaaggagttagttactcatctagggaacarttgggtagaaagagatggactccctgtatttgaaattcagaactcaagcttggctctaagtgtttccttgctttgctgtgctccacgggaggcactgagcagaaggaagcgagttgcctgagattcctcaaagcccgcagcccttttggaggttacattgttattctcagagcctttatgatacataataaagacctagcttggaccaacattaggatgagttatcttgctattaacattctttcaggtagaagttgcttttaggtagaagttggtcccatcttgctcacaatcctccaaagcttggaagttactttccaggagacttagcttgcactgagagccgccctcccaccctctctccaaatttcctcttgggagtagcctaacaaggtgctgtcccagacccttgccagccacgatgaccccacccagaccatccctctgctgtttcactctttgatattctctggagctctctggggaggggtgagacctgctgtctggtttgtacggtttgcccaagtcttacagtcatggctggctgcctctctctgagaactgggactcctgaacttggtgaaatgcctcagccattgatcatgtgaaattatcggtgacactcatttaaaatccgagtctgctccagatggactctgactctttctgccctgactatgagagagagagatcgtgagagacagagaccatgagaaagaccgtgagagagagacacagagctagagagagagaccgtgtcctgacctgctggacagtggagatgcttgtgggc

SEQ ID NO: 31213 - DNA, 1034 bp, Homo sapiens
cttcttacaggcaattcctaactcttgggttttgtagagggtccaaaactctttagaacctataattcaaggaaaggctccactttggttttgcattttgtctggtctctttgggtgacagaatttatgtcacaaggtgcacatgttttggggaggctcatggacagcccatcgctcttgtgctttggtaggaaatatgtgcagttatggggaaggagttagttactcatctagggaacaattgggtagaaagagatggactccctgtatttgaaattcagaactcaagcttggctctaagtgtttccttgctttgctgtgctccacgggagkcactgagcagaaggaagcgagttgcctgagattcctcaaagcccgcagcccttttggaggttacattgttattctcagagcctttatgatacataataaagacctagcttggaccaacattaggatgagttatcttgctattaacattctttcaggtagaagttgcttttaggtagaagttggtcccatcttgctcacaatcctccaaagcttggaagttactttccaggagacttagcttgcactgagagccgccctcccaccctctctccaaatttcctcttgggagtagcctaacaaggtgctgtcccagacccttgccagccacgatgaccccacccagaccatccctctgctgtttcactctttgatattctctggagctctctggggaggggtgagacctgctgtctggtttgtacggtttgcccaagtcttacagtcatggctggctgcctctctctgagaactgggactcctgaacttggtgaaatgcctcagccattgatcatgtgaaattatcggtgacactcatttaaaatccgagtctgctccagatggactctgactctttctgccctgactatgagagagagagatcgtgagagacagagaccatgagaaagaccgtgagagagagacacagagctagagagagagaccgtgtcctgacctgctggacagtggagatgcttgtgggc

SEQ ID NO: 31214 - DNA, 590 bp, Homo sapiens
acttttgtcattgtgcgaacatcatagaatgtacttactcaaaaccaagatggtacagcctgctacacatctaggctgtatgatatagtctcttgctcctaggctacaaacctttacaccatgttactgtactgaacattgtaggcaattgtaacaaataagtatttctatgtttagatacttactcgtctagatacttttctatgtttagatactttcttgtatctaaacaaagaaaagtacagtagacatagggcataaaagattaaaaaacctatatagggcacttatgaatggagtttacaggagtagaagttgttctgggtgagttagtaagtgagtggtgaagtgaatctgagggcctaggatattactggacacttttatatgactggcagtgcagagatttgtttatatcagcattacctcagacacatgagtagtgcattgccttttgacgttactrtggctacagtgtcactaggctataggaagttttcagcttcattataatcttgtgggaccaattataatcagtcgttgatgtaacatcattatgcacccacgattttatataaatatgttggata

SEQ ID NO: 31215 - DNA, 596 bp, Homo sapiens
aaaggaaaaccctttggttccaagtctaattcttgcttctttcccccacttagctcagaggtgtacagtcaaaacagagagattttctttcgcagggaatgttagcagccactctagactgagcacagtgcagttggcatcagaggcagcactgcgccccatgcagaattttccccaccccccgttgtctttgtaggaacttgtctctttggagagagaatgactttcatgtatgtgttttcacattagaatatagggtttcctttgggagggagattaattttttaatctctttgggcgccacttgggattctatgaaaatactctctacatgctcaagtccatgccatttatgtaatttactgtacttgtttgtttgcacatacaagctcattaatccctagcctattctgagctctgttgaactatttggcttagaaatcttcctaagaaagactgggcccgaacaragctttatgctcatggacaggaggaaaaaaacaccgctggttagcattatatacaggtattcaagcaaaaaatataactccgataaactcataattgaagtagagggtcacaaggatgttcatttt

SEQ ID NO: 31216 - DNA, 486 bp, Homo sapiens
ctggaacttcctcattctgagtggaggatcagatgagggcgtattcatcatcaggaaaactgctccctgatattgtcataaagtcgtgtgagattttatttatttattttttacagtttcagggctgcaaargctatgaagacattttagttccactctctttcaaaaattagcaatttatattgcacccttatttaccatttgatttattttctctggctttcctgcctcatctcgctccagatcctcttgagcacctgcttcacatcacacattatttctcaagaatatcttgtttagtgcatgtcctgcctagcagtcatttcccctaattactaatgctggtaatcagcacctggccatcacctgagacttccatctccccatctgtgtagtgtaggtatgcctaggccaccactggctacattgggtatgtgatccaagttcatgctgctaaactggagcttgagaaatggagagaattag

SEQ ID NO: 31217 - DNA, 486 bp, Homo sapiens
ctggaacttcctcattctgagtggaggatcagatgagggcgtattcatcatcaggaaaactgctccctgatattgtcataaagtcgtgtgagattttatttatttattttttacagtttcagggctgcaaaagctatgaagacattttagttccactctctttcaaaaattagcaatttatattgcacccttatttaccatttgatttattttctctgsctttcctgcctcatctcgctccagatcctcttgagcacctgcttcacatcacacattatttctcaagaatatcttgtttagtgcatgtcctgcctagcagtcatttcccctaattactaatgctggtaatcagcacctggccatcacctgagacttccatctccccatctgtgtagtgtaggtatgcctaggccaccactggctacattgggtatgtgatccaagttcatgctgctaaactggagcttgagaaatggagagaattag

SEQ ID NO: 31218 - DNA, 544 bp, Homo sapiens
taattaatatttgaattattaaaattaaataaatcaaattattatttattaataaatttaattcaataaatttaagttagtatttaataatttattacataaatactaaatttatttaatacatttgataaatttatttatttaaataattaaaattatttaattttaataatttaataattttaaaaatatctttaatttgtttcaacatcatcaggagtgattttattacatatttgtaaggcattttacaccatgatgctcttaaattctgtgtctttttttctattttactctattagcattaaagctcttaaattcygtaggcagctgtgatggttaaatttttgtgtgtcagattggctagaccatgaccatgaccacgatcattggcatgaccatttgtttggacaaataccagtctagacgttgatgtgaagtattttgtagatgcagttaagatataccaccagttgactttaagtaaaggagattacccttgatattgttggtggacctcatacaattagttgagggccttaat

SEQ ID NO: 31219 - DNA, 595 bp, Homo sapiens
aattccatctgtcctgcagtaaacgatatacacagaaaaggatggtgggcaaagaggcaygttctatttagctgggctctggctcaagccccagtgtagagtcttgtgaactggagtagaccacatgcaacttggtgaacgtattttgcctagacgaggctgagctcttaggcttttgtctcaggctctggccctgcaaaagaaaaggcatcctgaagcctacagcatggccacacccttccccgttgggagtgaaatgagaggaagtggagggagcacgaggagctgctaaaatctagtcaactgcatctctgttttttatctttgacccattgttcaataggcttaacatccaggcccatcttctctgatctcttaggataaaaagtgcccaaagagtcagtgtcagcagaacatttttgcacgaactgactggtttaatgttttccactaagactgtaaaccccaagaagggttcagtgacccttcttgcccttgatggtgttcttgagggaagagcaaaggtagcaggaatgtggaactctgagctgcttatggccaacctaggggatgctttatgaagtgatggttgaat

SEQ ID NO: 31220 - DNA, 595 bp, Homo sapiens
aattccatctgtcctgcagtaaacgatatacacagaaaaggatggtgggcaaagaggcacgttctatttagctgggctctggctcaagccccagtgtagagtcttgtgaactggagtagaccacatgcaacttggtgaacgtattttgcctagacgaggctgagctcttaggcttttgtctcaggctctggccctgcaaaagaaaaggcatcctgaagcctacagcatggccacacccttccccgttgggagtgaaatgagaggaagtggagggagcaygaggagctgctaaaatctagtcaactgcatctctgttttttatctttgacccattgttcaataggcttaacatccaggcccatcttctctgatctcttaggataaaaagtgcccaaagagtcagtgtcagcagaacatttttgcacgaactgactggtttaatgttttccactaagactgtaaaccccaagaagggttcagtgacccttcttgcccttgatggtgttcttgagggaagagcaaaggtagcaggaatgtggaactctgagctgcttatggccaacctaggggatgctttatgaagtgatggttgaat

SEQ ID NO: 31221 - DNA, 595 bp, Homo sapiens
aattccatctgtcctgcagtaaacgatatacacagaaaaggatggtgggcaaagaggcacgttctatttagctgggctctggctcaagccccagtgtagagtcttgtgaactggagtagaccacatgcaacttggtgaacgtattttgcctagacgaggctgagctcttaggcttttgtctcaggctctggccctgcaaaagaaaaggcatcctgaagcctacagcatggccacacccttccccgttgggagtgaaatgagaggaagtggagggagcacgaggagctgctaaaatctagtcaactgcatctctgttttttatctttgacccattgttcaataggcttaacatccaggcccatcttctctgatctcttaggataaaaagtgcccaaagagtcagtgtcagcagaacatttttgcaygaactgactggtttaatgttttccactaagactgtaaaccccaagaagggttcagtgacccttcttgcccttgatggtgttcttgagggaagagcaaaggtagcaggaatgtggaactctgagctgcttatggccaacctaggggatgctttatgaagtgatggttgaat

SEQ ID NO: 31222 - DNA, 582 bp, Homo sapiens
gattctcctgaggatgctgtgcctgtgcctcacacctggccttcaaccttcctgctaccatcaaccacttgggctgtccttaaagtcctgtgaagtgggtcccagcccctctcacctactcaagcactcagctcctgcagttgtgccctcttccttcctactgggtaattcccatcagtatttcatatctcttaatctttttttaaaaagaaagaaaaaaaagagaaatattcccttaaatccacatcttcttcaagctaccacccaatttccctgatctcctttaagccaaamttcacaagccatatctttagtttctgtctccagctcctctcatgggtcattgtctcatggatctactccagccaggccatgatgcccacaacttcactgacaatgctattaccatgtgcttccaattgctgagccctatggtcaattcccagcactcatctcacctccttggggccctttctgcaatttccctttgggtcgttgacatgctttggctacactcacttccaaatctcatctcgaattgtaatcgccacatgtcaagggagagacctggtgggaggtgat

SEQ ID NO: 31223 - DNA, 527 bp, Homo sapiens
ttatttcctcctgctagtaggattaaggtttgcgggccaaggttgtctgacaatgtgcaattcgccagagaagggggtggctgagaattgtaggagacaaactctcaggagctggtgggtgggagagggtagggccacgggtcaaagtgctctgaagrggtatcagcaatatccactacacccaccccaccccagcctttctgtctatcttgatcttttggtgcagttcaaggacggtggaacagattcttgaagacatttcctcttaaatgttctaattgggagagggagtgcctgtctcactcactttggtatctgacatctatcatagcgtcccctccatttaaacagaggcaggaggagttccattctaacatcctctcattctgaagtgtgctcaggtttttcttttacactagtgaccataaagctcaatgccttaatcccacaggccagaacccagaaaagtgagtaatctcaattctcaaaacaatgtttagtggtttccctggtcgctatgatagatt

SEQ ID NO: 31224 - DNA, 605 bp, Homo sapiens
cttctagatatctaatgaaaccttcaggcagttttctgcctctgtcccctttttcttctgtggattaggaaggaaagtcatctgctgaatgtgaggtagtatttgatgggtactgaaataaaaaggcaaacagctgaactgacacaggactggggtttgcagcatactcggagaggaagataaggcagtaaggcacttatgaatagagtctaggaaagctatgtgggaagagaaactaaaagagtgagctgatgagatacataaaaaaatatagggaccaagggaataaaaacaattatatgatcaaagatgtgttcacatccagggagtcagaatgaagaatcagagttggaaagaaaaaaagttgagatcacagatcacagagacagagatgttgagttgaagattttaatagtgcaagarttatggcgacaggcagggacccagatggggacatgagagttgtaacgaaggtgaacttggttgttgtcacagacatgtgagatgagtatttgacaagccagctgcatggaccctgaattcatccaggactatactatctgtactgtagtatttgatacatttccatctatatgtggaaatta

SEQ ID NO: 31225 - DNA, 605 bp, Homo sapiens
cttctagatatctaatgaaaccttcaggcagttttctgcctctgtcccctttttcttctgtggattaggaaggaaagtcatctgctgaatgtgaggtagtatttgatgggtactgaaataaaaaggcaaacagctgaactgacacaggactggggtttgcagcatactcggagaggaagataaggcagtaaggcacttatgaatagagtctaggaaagctatgtgggaagagaaactaaaagagtgagctgatgagatacataaaaaaatatagggaccaagggaataaaaacaattatatgatcaaagatgtgttcacatccagggagtcagaatgaagaatcagagttggaaagaaaaaaagttgagatcacagatcacagagacagagatgttgagttgaagattttaatagtgcaagagttatggcgacaggcagggacccagatggggacatgagagttgtaacgaaggtgaacttggttgttgtcacagayatgtgagatgagtatttgacaagccagctgcatggaccctgaattcatccaggactatactatctgtactgtagtatttgatacatttccatctatatgtggaaatta

SEQ ID NO: 31226 - DNA, 616 bp, Homo sapiens
agataccctcaaaatttcttttaaccctggaattataataacatatgattttgtaaaaatcatttccttttttcttgtgtagaatgttttttttctacttgactacatagtcctaaaagctaagaattaggtattgttcatctttgtgtatgtatgagtgcaatgcctaacacatagcaggcactccatagcacttgttgaataaataatgtgattactggtgtaaaaatcagttacttctaaattataatttcctgacttatgtaagtctcaaagatcaattttccaattatatgtttaaatgtatatattaaggttaagtataattgaaagtactgctaaagtggaggcatctcttaataaaataaaggtgttatgaaatgacaaaaatttcctaatgttttgtgcctgaaggaaccatggatgtaaacttaatgctaataaactgaaacatttattaatgcagggaatgctatttttattatagtcaaaaaygatttcaaacagtaatataaatggccaaatttgcaatatctacaaaaatgagccagaggtaaggtgttttgatgtaatggttttaaaaatgcacacctctctctgttttttaccatcttga

SEQ ID NO: 31227 - DNA, 587 bp, Homo sapiens
aaaataaggcagaaaagatgggtaacacattctttccaaattatatgggagaaaaggcaaccaaggattcactggggaaatatacttagttcatctcatttattctagagaaaaggatttcagatttagtatgaagttagctactaactggcagatttggtctgatagaagtgcgagtaatttctgtcaggtgaaacaggtaaccccaacaggtaatttatggcatgttgggtactaaagagttttctatctaactcaataattttattctaacacttctttgtcaaaytgactataaatgctacttaaaatttttttaaccagccatgccatcttctagcttcctcattaatacattaaatgaaatattttaatgtatttattgtttcccttagtagaatcataatttacctttttgagaaaatatacctgaggagacagccaagatggccaaataggaacagctccgttctacagctcccagcctgagcgacgcagaagacgggtgatttctgcatttccatctgaggtaccgggttcatctcactagggagtgccagacagtgggcgcaggacagtgggtgcag

SEQ ID NO: 31228 - DNA, 483 bp, Homo sapiens
caaaattctgtcttttagcgatcacattaaatggaaggcagattcacctacacatttctgtggcattcttggagatttcagttgaaaaaagtttgtgacttttgatctactcagtgtttgattatgaaaaatgaatagtagtaacaattgactgctttatattaagttgttatcagaatttagaatgattcttattttctttttgccatttaaaatttaagcctacatggagtattgttgagatttataattgacaaataactgacagttgattataatctacagcctcgggataaaatacagtaaaatattttaaacactcaggacccagaacaaatacgtttgctgaatgattgtaagaatgcttgatgtttggctgcaaagctatgaatttccttgcctttccacaatttaaaatatctaccttctcacaaatcttaaaagttagacctatcctgctgttatatrtaattcattttctac

SEQ ID NO: 31229 - DNA, 583 bp, Homo sapiens
tactatatattattcaatagggtaaagaactaaaatatatttcaacattcccccattgatgagcatgttaatgtttataarcaaactgctacatattattcaacaggtggaagaactaaaatatgcttaaatattctcccatggatgagcatgttaatgtttataaacaatgttgcaataatcattctttatcaataaatatatccttgttcatagctttaaatatttcttgagatggattctaacatctaatacaaaaaaaacctctaaatgctagcagattgcatttaacagtttttaaagaataatgtcggttttgcttattactgtatcatcagtgctcaaaacatcatctgctatgtagaaggcactaaataaatatgtgtgaaatgaattccaaatgagtgatcaaaaacagactaggagatgcattaatgcaattaaccacgtgaatggattaaagaagaaacaataaatacatatacaaccatcgtgatgaatgtccccacaaatcaggtaaaactccacatctatttctgatttttaagaaaatttattcatcaagaaatagaagaaataacat

SEQ ID NO: 31230 - DNA, 1226 bp, Homo sapiens
taaaactcagtggtaactccgaagagtaaaaatctaccccagagctatacgtgaaagattggaattttacaaggaggtttgcattttaaaactggttgctgagatttcaccaggtgaggacatctctgtgcatctttccgacatctttctatttatttttcctctatcacctttttctttctccttttttttytctctctctctctctcatagttacgtggaagggtaaagcaataagaaaaaaatggatttattcacattttctcttcctcttccaatgaaatgaagtaatttctccacagggccgattatgcccagttaattgattttcttaatcagatattttggaaaaacaattgagctttgtgaacttctggatgtttttctcactggagatttgagaggcacacacccactgttctttgtatttctagactacgtaattggagcatatatcaaggcaattttttcataccttctattttcatgtaattttcctccttgagtgattttttttttctcacttctcgtgtgcttacactaaggcattacagggaatgacaattctgcttggagcctgtgaaacacagcaatttgaggctgtaatgcctaaaactgttattgcaggtccaaatgggactatattatataattgtgatgtctaccaacttagagcaaactctctttttcttaatgtaaaaaaagacatttgatttgctaaccaattatgcgatcatcataatcagcatttattttaacttggctgaaatcatgtccaaaactgaagagaagcaagtatgaagagagtggggataatgaagggaataaataaaacaattttgatatgatgtattaacctaagaaatacagagatgtttttgaattacatttttccttcaaattctctttgaatcatgatgtgatttaaaaaaactatctactagcacttaacatatttaaattttcaagagtattctcctagtctattctttttcctcctagttactattactacaatttggtggcaattacaaggtgacaaattaactctagtgctttggaacaatggtgatgctaaaacatctcagcttccctcttaccaattttcaaaataaaatagttatgctatgcaaggaagtggctgaaagagcacatttatgtatgtatttgtgtatgataaaaagattggggcatgtgttatattattcgattagttatgggtagca

SEQ ID NO: 31231 - DNA, 1288 bp, Homo sapiens
gctgtttacaaactctaacaggttttggtcatgaatgatattgggtggccgtaacatatgctatttttcaaagagtggacagttgactaccaattttctgcacatggattacccggatggtgaggatcactcttccatgtccatctgctggatcctccttaaggtcaggggcatgtggctctccttccagcattattcctcaatcccaagccagcctaaagtttatctctagttttcaaattacccactgacatcgagagctgccttcatcaggagctgactggatatatctccccctgccccggccccaggttcctaccatatcagattaagcgaaaggcaatagaaggtgtagagccatagttattacactgagattcaaagggaacagcatacaccgagcactgtgtcatttaaattggcagatttccactccacgcttcatttgccaaacatttggtgtggatcgagttggccatcagcacgaaccaagtgcctgttgctgttggctgttggcagccacacatccctaggcggctccagctgtggccacygcagcacttcctatcaggcagactatggcaggtagagacaaggtgggcccatcatgggactgaacacaaagctgccttccccactttttccgcattactccatgtgtccggttttaatacttctcctcccccatgcatggttgtcctgattgatgtttaaaaatagtatatgcaaatgtctgtctacctatcatcaactatcatctaatcgatctatatgaatatatatgaacctcaaaaatattctcatcataagtgagactatgagccataattaggacttcatttaaaaaactgttggcgctattatcctattttggctcctgtcaaatgaaatatttgctcttcttacctttgcacatttccacgtgagcaaacacacagctcttcccagaaaatcagaaagattgcatcttagattcacacctgcaggtggtaaggttttctcagaggctatatagaaacactgcatttcccaggggcttggagaaaagcaattttaaaatagtttgagatttttttctgggaggcggcacttggtgaccacacctaaaagtttatttgtcatgtgttgattcatttgttcattcaatgcgttattttctaagagctttatatgtactacctctgacgacacagacaaatcaagtgagacattttcccccaagtatcttacagtacaaacaggggaaagaattttcctagaatcaccttaaatccaccccttggtcctt

SEQ ID NO: 31232 - DNA, 544 bp, Homo sapiens
ggaactgttgyagtatctatgagaagtacttggggcctacttgaggttagaggccatgaatttcaagggagaccattggccagattgaatgttttttccagatgcacacattgtgcagatgaaggctcagagttgataaaaagttgtagttagccatgttcagggttttgctgagagagtgccacaataggagaaagaggccaggatggtaagggagcaatgtcaaggactcaggacagcaatggactgtgggatctcagctgggtgaaaagggagggaagaaatgaaggagctgagggacagtggtagggccacatgaggaccaaagaactctgagatcagcctgccagggtagggagtgagaagaaacctgggaaaccgcacatcctttctaatatgatatgaaggcaaatagaagataggagtgtgtttgcttgttttaatgtccatactaggcaaaataaattattggtactatattagttctcataatgcttttggtcattttaccagtccatgaaagtaaagtctgggaaccacttgt

SEQ ID NO: 31233 - DNA, 1148 bp, Homo sapiens
cctgagacacttttaagtggtggagcagttcatatctgacttctacttcctgatacctctcttgaagttaatggtacacactaaagtaattgaaagatttttttctttttagtaagctataaccaactatatcactgttggctcttaccttagtactaagactgatctttatccagaaacaataaaagtaagaatgccatctagctgctatgacccatatggcatcaagccctatttcaaagttaggtaagaagatatagaacagcagcctggycaacatggtgaaaacgtgttccatctacctttttgcagaaactgacaagctgatcctaaaattcatatgaaaatggacccacagtagctaaaacaataaagaacaacaaacttggaatactcacactctccaatttcaagacttactacaaatgtacagtaattaaggctatgtggtaatagcataagaatagatatataagtcaatagaatagaattgagagctgataaactcacacatttatgaccagttgattttcaataagagtgctaagacaactcaataaggaaagaacagtcttttcaacaaatggttttgggacaattagatatccaagtactatagaatgaagccagacccctacctcataccacataaataattaactcaaaatggaccaagacctaaatgtaagacctatactcttagacaaaaacacagatataaatcttcacgaccttggattaggcaatagttttttagctatgataccaaaaacataagcaaccaaagaaaaaaaaacagataaagtgtacttcagtagaactgaaaactttttttgcatcaaaggacactactaagaaagtgaaaagacgggacaggccatccgtgctctaagcctggcaagggcctgcttgcctgtgtcccacatgctagaactcggcatctgtagggggcctgctaggggcaggaagggactggcacccaaccctgagctgggcactcatgcttccctggagctgggtggaggagctgagggtgtggacaggcatgaggtatggacatgtccgtccctttgaggaccaagatcatgactaccacagagcgagcacccctggggtcctcagataaaaagtctgaccgccactgagga

SEQ ID NO: 31234 - DNA, 329 bp, Homo sapiens
aaaccagcctaggcaacgtggtgaaactctctctaccaaaaatacaaaaattagccaggcttggtggcatgtgcctgttgtgccatctactcargaagctgagatggaaggatcacctgaacccaggaagttgaggctgcagcgagctatgtttgcaccactgcactccagcctgggtgacagagcaagaccctgtctcaaaaaatacatatataaaaatatattttttaaaaatacatatttttaaaaagagaaacatttaaaaaaaaaagttgaaggagaaagggttgaagcatgttttgtagatttagtaattttagaatgggaac

SEQ ID NO: 31235 - DNA, 524 bp, Homo sapiens
ttaaaactgaggtaggtcttgataattcaccttaaatgtcctgtgtgtgatgctgatatagctggttctgggacatccttcctcacccatctcagttcaacaaaatcctatgcacttctcactgccattgtgtgggagacgtttcatctgtcacctgtcagaatgaaccattccacacattgtgttcatgagataggaggcaggactcaaccacagaggcgaggctcagacaccaaaccaaaatgaggactagctaaagcagggacagggcagacctgggcaaagccaaaaggcatcccagtgaggcccgatttggrgtttacctgtcctgtatcactagcagaatgattgaggttttaggtggagccagattgcctggactccgctactaaatacctgagtgaacctgaacaagttccttgatctctggagctgcttttccatcagtaaagttgaactaataacagtacatccagcatatgttgatgtgaggattaaatgaattcctgcatgtgaggcactta

SEQ ID NO: 31236 - DNA, 555 bp, Homo sapiens
tgtctaagggtttcacattttattttggggaaaacctaattatcggacatataggttaaatggtgatccatataaattgtgagtgaaacccacaggtatttatagcaagagaacaaaataatgttgcaaacattcataattggtaatgaagaagtgctttccataatacaaatattctgcacagagcaaaaaaaaaattatccaaatcttcttttgaaaatgatagtgtttggaaaaaagtatcaacactaaattaccaaatatttacatttcacccttcccctgtggtttggctgtgtccccacccaaatctcatcttgaattgtaatccccataatccccatgtgtcatgaaagggacccaatgggaggtaattgaatcttaagggtggtttcccccatgctgttctcctgatagtgagtgagttctcacaagatctgatggttttattagtgtcttggcatttcccatgctggcactcattctctattctgccactctgtraagaggtgccttccaccatgattgtaagtttcctgagactttcccagctat

SEQ ID NO: 31237 - DNA, 1358 bp, Homo sapiens
aaaattagttaatattagactatcttgaaatatctattttttattttttgcattttattaatcttcatttaattaaagctatttctgagaccagttatttctctgctgaggactccaagcctttgactttttatcatatcccttccaccagcatcaaaaattatccgtcatgtgtttgacggattttagtaactcatttatattgttatagacaatgatttttaaaatgtaattcttctttaaagaacaatgaacgttaaggtaggacttggaaaaaataaaatctaatcttttgacttgataaaatattcactagtcaaaatagtccgattcatattttgagttataaaagactttagtgattaatctaatccccttatgtcctagcctattggtcagaaaacaggtccagttgatacaagtgacagaatgaactaataaaattggctacctgtgaacaatgcaaaagcatcttcatcccaagcccaggaatttggataaattatctcatgcttcatagttactagaagacagagaaaaatccatatccagagttatggtacaggacatattaatgagacatcaaaggatttgtttggtgccaagatcatcaagtttttcttagggctagatgtctctaacatattgctatttcaaatttgctggtataaagtgttaatttcaggtatactaaattttatttttcttcaccgagattgcattactggagtcctgaagcagagagtttaataagcctatgcctctaagcaagtgtcaggttaagcagtggtcctgattcaaggtctggttcaaggacctgctccatctgttgcctggctcagatgtgtctagataaggaatagatttcaccttcattaagatttataggtattttaatccacatrttaattaaaatgccttctacctgagttgaaatattacagtatcaacacattatctaataaaacaatttatacacaaagaagattttattctctcatttcagaagatccgcctctaaattttaatgacatgactggatgttggccagtatgactctcactccacagatatcataaatccagatcccttaaagatgatttcactagatgttgatggtatctatgctaacaagctctagctaaaacaaagtaccagtccaggatgattcttcattaaaacaaaaaacaaatgtgcatgtaatttataacaatatattcatgggtgtagactaatatgtatatatgatgaacaaattacaatttaaattatgacaaattctatttgatttcgtctgttaggataaattctaaatttaacattgatggtagtttctcaatcagaggagaaaacatgca

SEQ ID NO: 31238 - DNA, 1396 bp, Homo sapiens
tttttttcaacaataggctttatttttttaagagcagttttagattcacagcaaaattggggtggaaggtacagagatttcctacataccacttgcctcccatatgcagagcctccctaactatcaacaccatgcaccagagtggtacaattgttctagtaatagatcctgacacatcatcatcacccaatgtatattaagtgaacactaatgtaaactgtgtacattctacaggttttgagaaatgcataatgacatgttcccatcattatagtatcatacaggacagtttcactgccctagagatcctgtgcgctctgcccattcagccctttttcttcacccccctggccaccgctggtctttttactgtctccataattttaccttctcctgaatatcatatagttgaaatcatacactatgtagccttttcagattggtttttttacttaataataatcttaaaatctttagcttttaaaatattaagtagtgttgaaatacgttaagaaatatgaatatattaatatagaaatacaaaagcattaagtaatgtaaaataggatttcttgcccaagctgcaggcccactttattttggcctccaccgtaccactaaacatttccctattcatggaatcagtgatgagactaaggtcagggatggaacgaggattggtggtccaccgaggggcaagacaggcacaagatcccatattatacaggataagctgcttatgctgccatggtaacccatccccaaatttcggtggctcgaaacagaaatggtttatttgccactcaagctacatgtccactgattgcagtaactcaagggccagaaatgtagagcagccaccagctagaatctggctgttccctgtgtttgagggaaaaagagcttttgcagggtctggcactctcgatgaaaggtcctggtccagagtggcacacatggctcctcacagctcacagccactggtcatgtggcctgttccaccacacaggggctaacaagtacaatcctacccagaaagcatggggaactggagatatttctaagcagcactagtgaataagtttgtaaatcaaaatgtacacatgacatcaaaatagctgtaaaatatgagggtcagcattttttaaatattatgtgctgtcatcacttcttgagcaatctaattcagactcttaccttcctttaatgttcatcttaaataatgcaaaatgatatatgttgagatataygttttcttaagtcagaaaaattttaagaaccaacgtcatagaacagttttgccacattttaggtatggaagaggtttcaggtactatatagttcaatccagctacttttagctattgtatacatttatatgtaagtatgtatgtac

SEQ ID NO: 31239 - DNA, 1396 bp, Homo sapiens
tttttttcaacaataggctttatttttttaagagcagttttagattcacagcaaaattggggtggaaggtacagagatttcctacataccacttgcctcccatatgcagagcctccctaactatcaacaccatgcaccagagtggtacaattgttctagtaatagatcctgacacatcatcatcacccaatgtatattaagtgaacactaatgtaaactgtgtacattctacaggttttgagaaatgcataatgacatgttcccatcattatagtatcatacaggacagtttcactgccctagagatcctgtgcgctctgcccattcagccctttttcttcacccccctggccaccgctggtctttttactgtctccataattttaccttctcctgaatatcatatagttgaaatcatacactatgtagccttttcagattggtttttttacttaataataatcttaaaatctttagcttttaaaatattaagtagtgttgaaatacgttaagaaatatgaatatattaatatagaaatacaaaagcattaagtaatgtaaaataggatttcttgcccaagctgcaggcccactttattttggcctccaccgtaccactaaacatttccctattcatggaatcagtgatgagactaaggtcagggatggaacgaggattggtggtccaccgaggggcaagacaggcacaagatcccatattatacaggataagctgcttatgctgccatggtaacccatccccaaatttcggtggctcgaaacagaaatggtttatttgccactcaagctacatgtccactgattgcagtaactcaagggccagaaatgtagagcagccaccagctagaatctggctgttccctgtgtttgagggaaaaagagcttttgcagggtctggcactctcgatgaaaggtcctggtccagagtggcacacatggctcctcacagctcacagccactggtcatgtggcctgttccaccacacaggggctaacaagtacaatcctacccagaaagcatggggaactggagatatttctaagcagcactagtgaataagtttgtaaatcaaaatgtacacatgacatcaaaatagctgtaaaatatgagggtcagcattttttaaatattatgtgctgtcatcacttcttgagcaatctaattcagactcttaccttcctttaatgttcatcttaaataatgcaaaatgatatatgttgagatatatgttttcttaagtcagaaaaattttaagaaccaaygtcatagaacagttttgccacattttaggtatggaagaggtttcaggtactatatagttcaatccagctacttttagctattgtatacatttatatgtaagtatgtatgtac

SEQ ID NO: 31240 - DNA, 1396 bp, Homo sapiens
tttttttcaacaataggctttatttttttaagagcagttttagattcacagcaaaattggggtggaaggtacagagatttcctacataccacttgcctcccatatgcagagcctccctaactatcaacaccatgcaccagagtggtacaattgttctagtaatagatcctgacacatcatcatcacccaatgtatattaagtgaacactaatgtaaactgtgtacattctacaggttttgagaaatgcataatgacatgttcccatcattatagtatcatacaggacagtttcactgccctagagatcctgtgcgctctgcccattcagccctttttcttcacccccctggccaccgctggtctttttactgtctccataattttaccttctcctgaatatcatatagttgaaatcatacactatgtagccttttcagattggtttttttacttaataataatcttaaaatctttagcttttaaaatattaagtagtgttgaaatacgttaagaaatatgaatatattaatatagaaatacaaaagcattaagtaatgtaaaataggatttcttgcccaagctgcaggcccactttattttggcctccaccgtaccactaaacatttccctattcatggaatcagtgatgagactaaggtcagggatggaacgaggattggtggtccaccgaggggcaagacaggcacaagatcccatattatacaggataagctgcttatgctgccatggtaacccatccccaaatttcggtggctcgaaacagaaatggtttatttgccactcaagctacatgtccactgattgcagtaactcaagggccagaaatgtagagcagccaccagctagaatctggctgttccctgtgtttgagggaaaaagagcttttgcagggtctggcactctcgatgaaaggtcctggtccagagtggcacacatggctcctcacagctcacagccactggtcatgtggcctgttccaccacacaggggctaacaagtacaatcctacccagaaagcatggggaactggagatatttctaagcagcactagtgaataagtttgtaaatcaaaatgtacacatgacatcaaaatagctgtaaaatatgagggtcagcattttttaaatattatgtgctgtcatcacttcttgagcaatctaattcagactcttaccttcctttaatgttcatcttaaataatgcaaaatgatatatgttgagatatatgttttcttaagtcagaaaaattttaagaaccaacgtcatagaacagttttgccamattttaggtatggaagaggtttcaggtactatatagttcaatccagctacttttagctattgtatacatttatatgtaagtatgtatgtac

SEQ ID NO: 31241 - DNA, 1344 bp, Homo sapiens
tgcatgtgaacacatagagctaccgctagcttgtaagatgtctttatgcaaataagaaaagacactccctctgggcaggcaaatcaggaaagagtctcctggaagtgcacctttgtgtagtgtacaaactatacaacagcacacggtggctccatgaacatattgaaataaggtcttgatgactggcaaggtgtgatatttctttacagactattattagtgttagtcarttccaagaaggtcagaatataattacaaaaactagatttctatttcctttatgaggattcatgggtgacattcattttaagtattgctgcttaggatagctagcacctcctgagaaactagctcattctattgtgtgctttattctggctactaagaagtaagaatccaattttcgatccactccatagtagtcaagatccttggttgcaagtgatagaaatccaactcaaactgacttgaagaaaaagggagatagattggtgcagaaaggctcagaaagcaaccttaacattatcaacattttaggcttgatgattctttgttagaggggtaagaggccatcctgagcattttagaatgtttaggagcatccctggactctactgagtggatgccaatagtaccattcccccagttgtgacaaccaaaaatggctccagacgttaccaaatgtcccttgggggatgaaattgtggtcagctgacagccacgggtttagataactgagaagtccaggtatttaaatagcttcaaacaggatcacattcatattcaaatgtaaaggccccagagcaggctcctattctaccagctcaacaactctgagggttgtggtggggtgagagaatacctctttctgcatacctccagcaaaagccccaggtagcactctagctgtcagggattatatcagaagcctacccaggagccagaggtgtggtcagcccctacttaaactatgtgagaaggggtttacttaaagacaagaagtgcttgtttaaaaaaaataggggatataaggcagctggacaggtaaaatccacaaatgtctactcagaatttacatatttattaaacatatttattgaacaacttattggtcgcgggaatatagtgaaatacagatcacagctcatactaggcattttgcatattatttctcaatcttatcttattttctaatgtcctcattttttatcttgtatatatgtcactaagcttcttaaaaatattttctggaaatagtggactaaattataagtaaatatatgttggagcaaaacactagttttaggaggaagataagtctatcagtcattctcattctgctcc

SEQ ID NO: 31242 - DNA, 1291 bp, Homo sapiens
gcatgcccatacacatatatgtgcaaaaaatattttttgaaacacactaattgggcaccttctgtaagtttcaggtctaatgctagataatgagaaaatcaaaatgactaagacacacctttttttcttgagttcagtgtagtggaggagacagatatctatatggggataggagaaagacattgacattgtaaaaacacacatgagaataaaaattcaaggctaacttttatgtattatcttaattacttcatttctacagatgaaatgtcctctgccctttttgtataaatagtgaaacaaatactaaattctgcttgtccttgtaggtagctggtgagagctctctaagagattacagatcagtgtctttaggtttcctttgaagccaggtttaaacaaaaaaatactagaccatagatagatactacaaatgtttgagaataactgaatactccttttcacatactccccttcccattgttcctgtcttctttccctctgaatggttgcttattatacatatttttatatatctatatatggagaagataggcctgaaagcattttatgaaacataagataccacaaaagccacaagaagagaaaaaaaagcttaaaataaacaaagctagaactaaatgttcatatttcacatacagtaattcaagtgcctcgggtgtgatggaatggtaatagagcaggtgaaaatgcagaggaattgtggctgtcaaagtacagggacttcttgagaaatggaaaacttgcttgtggaaagatcatttagtatgttgttaagataaaagtgctaaaatttcagtatgttcaatgtggggaaatgacaacatatgtttcataaccagttacttctattttatttaacatgatttattgtgatttccaacaacacttttttgcattgccttaataaatcttatgtgatttgaaagaggctatccagtgtgggtttataaaccctctctttccaaagctaccccttttgaactttatttggaggggaytgtgagtgagtgtgtgcagaagggagatggatataaacatgttttgctaagcaatttccctttaattaaaaatgtgttttggatttatatttatttacacttgaattatcaaaatgttcccttggaagaattttttccctttgaggcatcttaactcaccctcccggaagccacattttgccataagtagaaaaactccacaccaagaagctggagttttgttccagactctaaccctgcaattttgtgtgggttttaaacttggcata

SEQ ID NO: 31243 - DNA, 2483 bp, Homo sapiens
aactttctcgggttctctgggccttttggaaagtcaagctcttcattgttaaccacccctgaattaccttaattcacctttgtgagttgccctgtgaaagctgcctgtcattaatttgattccaaatactagaatgaactctgtgaataggcacagtctaaatcttccacccacagatcatgattcagactgtaaaatggattaaccaaagaaacccacacatttgcattatccacttacatacctccaatttatgagattaataatcacaacacatatttagcactcaaggcattcagtattactcagtgggatcccaagaaggaacactggttcctcagcttttaagttgagtgtcctcattggtctaaatatctgaaatggttagtgttgtttcaagttgccagataagccacatgtgcttcttggaaacatctacaaataatatcaaaccagttgtcactgacttcagtgatataagaagagcccaacctgagcagaaattcctaaaaaataacatcagcaaatctggcatcacacaaaggccttaaagattatttgtataaaatttgtgaagccaaggattgaggatgttgtccatagaaactgcacccaagtcaccttctcaccccttatttcacagtgatgtaaactagattcaaaatagtcaaacaatgaagagcccaaggtgttttcctaaagtcttgctacttagggtgtggttggtaggtctgcagtatggcatcacctgggagcccatcagaagtgcaacatctaacaaaaccagaacctgccttgtaacaatctccagtaatccatatgcacattaaagttggagaagcatgttctaaagcatttgttctgaaaatgtgggctgcagaccaccttacccagcaccacctgtgttgctttttaaaaattcctattttattcaccatctgggtcccatttagatctcattcatcaaaatttctgagggtgatgcccaataattagcatttttgaaaagtactgaaggttcttgacactcaaaatgtggtccaaagatggacaggatcagcgttacttggagcttgatggaaatccagactctcaggcccagcctccaacctgccaaatcaggacttgcattttagcaagaaccccaggtgattcctatgcacattacatctggaaattctatgtgcataggtgaatcttatgcatactaaaaagtacttttctaagctacataatattgttatatgaatcggaaaaatgaaacaaaaactttgtgatgttcagtctcctgtatcttcaaatggaaaaaaaaaagaaaagaaaagaaacacactcaacaactaggcccactcttaacaattgcagrgcctcagacacagacaatttaggcccatataccattggtataagtatttaaaggttttaaatcaggcaaaacaactatacaataaaatattctctgtcctcctggaagaccaggttttaaacttttagactccttggtctccagtgcaagaatgtggtagagcagagaaagccatccccagcccttggctgcattctgcttcatttccctttgcagccccagctctgacccacccatgaggcctcaagtacactttctgggacatacaacctacaccttggcgatgcctgggctcagctagaggcttggactctgacaacatggtctttgtccaggagaacagatccagtaaagaggcttgtgcatgccttggaagctggcacaatgtctttcaggaaggcaatttcagcttcaggtactccaagtattcttagaagacatatgcggccgggcacggtggctcatgcctgtaatcccagcactttgggaggccaaggcgggaggatcacgaggtcaggagatcaagaccatcctggctaacacggtgaaaccccgtctctactaaaaatacaaaaaaaaattagccgtgcgtggtggcaggcacctgtagtctgagctacttgggaggctgaggcagtagaatgtggtgaacccggaaggtggagcttgcagtgagccgagatcacacaccactgcactccagcctgggcgacagagcaagactccgtctcaaaaaaaaaaaaaaaaaaagaagaagagaagacatatgctttgggtggcatgtcccctttgcacgcagacagctaaacctgtggggaaggagtagactaggaaatggtatggagccagatgggggctcctcttcctttagtcggagggggtggtgccgctaactggatgtggtgactttgctgctgaccttcctataccagaaggccacatggaatctggctaaaagaatggaatctgaagtaatgcttatctagtttcatatcttagatctaacacttactctctgtgactatgagcgaaagtcactactctcagttttgttggtcagtagatgaggtaatagtgagaagacattataggattattgtgagaattaaaatatgca

SEQ ID NO: 31244 - DNA, 2483 bp, Homo sapiens
aactttctcgggttctctgggccttttggaaagtcaagctcttcattgttaaccacccctgaattaccttaattcacctttgtgagttgccctgtgaaagctgcctgtcattaatttgattccaaatactagaatgaactctgtgaataggcacagtctaaatcttccacccacagatcatgattcagactgtaaaatggattaaccaaagaaacccacacatttgcattatccacttacatacctccaatttatgagattaataatcacaacacatatttagcactcaaggcattcagtattactcagtgggatcccaagaaggaacactggttcctcagcttttaagttgagtgtcctcattggtctaaatatctgaaatggttagtgttgtttcaagttgccagataagccacatgtgcttcttggaaacatctacaaataatatcaaaccagttgtcactgacttcagtgatataagaagagcccaacctgagcagaaattcctaaaaaataacatcagcaaatctggcatcacacaaaggccttaaagattatttgtataaaatttgtgaagccaaggattgaggatgttgtccatagaaactgcacccaagtcaccttctcaccccttatttcacagtgatgtaaactagattcaaaatagtcaaacaatgaagagcccaaggtgttttcctaaagtcttgctacttagggtgtggttggtaggtctgcagtatggcatcacctgggagcccatcagaagtgcaacatctaacaaaaccagaacctgccttgtaacaatctccagtaatccatatgcacattaaagttggagaagcatgttctaaagcatttgttctgaaaatgtgggctgcagaccaccttacccagcaccacctgtgttgctttttaaaaattcctattttattcaccatctgggtcccatttagatctcattcatcaaaatttctgagggtgatgcccaataattagcatttttgaaaagtactgaaggttcttgacactcaaaatgtggtccaaagatggacaggatcagcgttacttggagcttgatggaaatccagactctcaggcccagcctccaacctgccaaatcaggacttgcattttagcaagaaccccaggtgattcctatgcacattacatctggaaattctatgtgcataggtgaatcttatgcatactaaaaagtacttttctaagctacataatattgttatatgaatcggaaaaatgaaacaaaaactttgtgatgttcagtctcctgtatcttcaaatggaaaaaaaaaagaaaagaaaagaaacacactcaacaactaggcccactcttaacaattgcagggcctcagacacagacaatttaggcccatataccattggtataagtatttaaaggttttaaatcaggcaaaacaactatacaataaaatattctctgtcctcctggaagaccaggttttaaacttttagactccttggtctccagtgcaagaatgtggtagagcagagaaagccatccccagcccttggctgcattctgcttcatttccctttgcagccccagctctgacccacccatgaggcctcaagtacactttctgggacatacaacctacaccttggcgatgcctgggctcagctagaggcttggactctgacaacatggtctttgtccaggagaacagatccagtaaagaggcttgtgcatgccttggaagctggcacaatgtctttcaggaaggcaatttcagcttcaggtactccaagtattcttagaagacatatgcggccgggcacggtggctcatgcctgtaatcccagcactttgggaggccaaggcgggaggatcacgaggtcaggagatcaagaccatcctggctaacacggtgaaaccccgtctctactaaaaatacaaaaaaaaattagccgtgcgtggtggcaggcacctgtagtctgagctacttgggaggctgaggcagtagaatgtggtgaacccggaaggtggagcttgcagtgagccgagatcacacaccactgcactccagcctgggcgacagagcaagactccgtctcaaaaaaaaaaaaaaaaaaagaagaagagaagacatatgctttgggtggcatgtcccctttgcacgcagacagctaaacctgtggggaaggagtagactaggaaatggtatggagccagatgggggctcctcttcctttagtcggagggggtggtgccrctaactggatgtggtgactttgctgctgaccttcctataccagaaggccacatggaatctggctaaaagaatggaatctgaagtaatgcttatctagtttcatatcttagatctaacacttactctctgtgactatgagcgaaagtcactactctcagttttgttggtcagtagatgaggtaatagtgagaagacattataggattattgtgagaattaaaatatgca

SEQ ID NO: 31245 - DNA, 532 bp, Homo sapiens
tgcctacctttgctgacctttatctggaagcagagtaggagaatattctgtgcggaaaagagtaaatagrgtggggaaagatagcctatgagaatttgttctagcaaactcaagtagcaagaatgtcaaataccggaaactgtcctcataggtgggctggaggagagctattttgcctgctttccctattacctcttcccaaatcgtctaggtaatatgtccacccagagttggggaaacacatttatggcaacagatctgataacctacatgaaaagtatacattatatgaaaaacacaacttacccaaaaagaaataagaaattagccctgtatgtattaaagaattggaattcattatatatattttaatcccacaaagaaaatgctaggattagctgatgtcaacagtgaattctttccatttaagaaaaagaacaataccaatcttataaaaattattttggaaaatagaggtgaaaaaataattcccaaattattttatgagaacaacataacataaaagcttaat

SEQ ID NO: 31246 - DNA, 532 bp, Homo sapiens
tgcctacctttgctgacctttatctggaagcagagtaggagaatattctgtgcggaaaagagtaaatagagtggggaaagatagcctatgagaatttgttctagcaaactcaagtagcaagaatgtcaaataccggaaactgtcctcataggtgggctggaggagagctattttgcctgctttccctattacctcttcccaaatcgtctaggtaatatgtccacccagarttggggaaacacatttatggcaacagatctgataacctacatgaaaagtatacattatatgaaaaacacaacttacccaaaaagaaataagaaattagccctgtatgtattaaagaattggaattcattatatatattttaatcccacaaagaaaatgctaggattagctgatgtcaacagtgaattctttccatttaagaaaaagaacaataccaatcttataaaaattattttggaaaatagaggtgaaaaaataattcccaaattattttatgagaacaacataacataaaagcttaat

SEQ ID NO: 31247 - DNA, 532 bp, Homo sapiens
tgcctacctttgctgacctttatctggaagcagagtaggagaatattctgtgcggaaaagagtaaatagagtggggaaagatagcctatgagaatttgttctagcaaactcaagtagcaagaatgtcaaataccggaaactgtcctcataggtgggctggaggagagctattttgcctgctttccctattacctcttcccaaatcgtctaggtaatatgtccacccagagttggggaaacacatttatggcaacagatctgataacctacatgaaaagtatacattatatgaaaaacacaacttacccaaaaagaaataagaaattagccctgtatgtattaaagaattggaattcattatatatattttaatcccacaaagaaaatgctaggattagctgatgtcaacagtgaattctttccatttaagaaaaagaacaataccaatcttatamaaattattttggaaaatagaggtgaaaaaataattcccaaattattttatgagaacaacataacataaaagcttaat

SEQ ID NO: 31248 - DNA, 532 bp, Homo sapiens
tgcctacctttgctgacctttatctggaagcagagtaggagaatattctgtgcggaaaagagtaaatagagtggggaaagatagcctatgagaatttgttctagcaaactcaagtagcaagaatgtcaaataccggaaactgtcctcataggtgggctggaggagagctattttgcctgctttccctattacctcttcccaaatcgtctaggtaatatgtccacccagagttggggaaacacatttatggcaacagatctgataacctacatgaaaagtatacattatatgaaaaacacaacttacccaaaaagaaataagaaattagccctgtatgtattaaagaattggaattcattatatatattttaatcccacaaagaaaatgctaggattagctgatgtcaacagtgaattctttccatttaagaaaaagaacaataccaatcttataaaaattmttttggaaaatagaggtgaaaaaataattcccaaattattttatgagaacaacataacataaaagcttaat

SEQ ID NO: 31249 - DNA, 1192 bp, Homo sapiens
gatctgaccagactttaaaccatattttatatttttttctttctgctaattaatgtgtgggaatttggaatgggggtggtggtaattggcgtaagacaacagaattaaatttaggcagaattaaaagtattctcatttttcttcaaatccaagttatagagtgagttaaaatttgtgactccattaaaaaataaataggaaaagtaaagaaaatcctagtacactgatctcataaaacattttcagatgtgagaaaaaaaagaatgaagacagaactttggtgggtggaaatgtgcaaatacaccattaattttagtgtaggctgagtcctaaaatctagaataacagcaattattatttaaattaattcattcatttagttaaaatagtttttaatggctaccatgtgccaggcactatgttaggttctgaggatgcaataatgagcaaaaaagcatagtccctgccttcatggaaattagttttgtgggagagacagatagtagtcaatggtcacacaaatgaatgtaaaattacagcagtgataatgtgcttcaaaagacagctaatagtgacctatgagaatgcaacatggaggaagggatcagggaaagtttacaccctgcagggctaaaagctgaagggctaaagtctcaggacaagactagtaagcaggggataggggaaatccaagggtgaggtcagagcagaatgagaagtgtgcataaaaggtttgtagctggggagcagccacataacaggggtgagagggaggccaggccaaggcagcccaagctaggtgggccctaagaagggaaytggtctttcttctaagaggaatgcaatgccactgaaatgcattaaaggtatttatgcatcttgaaaagacaaacatatcatttctgcttttaaaacttactcccattcacacacgctttgttttaggtggaagtaaggcaatgttttgcagataaattgtgtttaactaacagttttatgtttattattattaattactcagaaagtgccatccagcatcccaaaaaaaggaaaaggtttgcaaattatctgagaatttacttgtatattgaatgatcagtacatcatatcatgtgattatttctcttaaagttacctattttctttcaactgacagattcaactaattagtaatgggccttattaagagact

SEQ ID NO: 31250 - DNA, 1192 bp, Homo sapiens
gatctgaccagactttaaaccatattttatatttttttctttctgctaattaatgtgtgggaatttggaatgggggtggtggtaattggcgtaagacaacagaattaaatttaggcagaattaaaagtattctcatttttcttcaaatccaagttatagagtgagttaaaatttgtgactccattaaaaaataaataggaaaagtaaagaaaatcctagtacactgatctcataaaacattttcagatgtgagaaaaaaaagaatgaagacagaactttggtgggtggaaatgtgcaaatacaccattaattttagtgtaggctgagtcctaaaatctagaataacagcaattattatttaaattaattcattcatttagttaaaatagtttttaatggctaccatgtgccaggcactatgttaggttctgaggatgcaataatgagcaaaaaagcatagtccctgccttcatggaaattagttttgtgggagagacagatagtagtcaatggtcacacaaatgaatgtaaaattacagcagtgataatgtgcttcaaaagacagctaatagtgacctatgagaatgcaacatggaggaagggatcagggaaagtttacaccctgcagggctaaaagctgaagggctaaagtctcaggacaagactagtaagcaggggataggggaaatccaagggtgaggtcagagcagaatgagaagtgtgcataaaaggtttgtagctggggagcagccacataacaggggtgagagggaggccaggccaaggcagcccaagctaggtgggccctaagaagggaattggtctttcttctaagaggaatgcaatgccactgaaatgcattaaaggtatttatgcatcttgaaaagacaaacatatcatttctgcttttaaaacttactcccattcacacacgctttgttttaggtggaagtaaggcaatgttttgcagataaattgtgtttaactaacagttttatgtttattattattaattactcagaaagtgccatccagcatcccaaaaaaaggaaaaggtttgcaaattatctgagaatttacttgtatattgaatgatcagtacatcatatcatgtgattatttctcttaaagttrcctattttctttcaactgacagattcaactaattagtaatgggccttattaagagact

SEQ ID NO: 31251 - DNA, 612 bp, Homo sapiens
tcaatttaaagccatttgtacagctgacagtttggagttcttagaaggtgactgctttaagctgctagtcttttcttggtggcagagctcacctcacggaagctggtaaagtcccactcccattccacctggagaatataggaaaacttgagcagctctgtatccaaagtttggtacattgagttttattttaccaccatctggttaatctacaaagagataatgtatatttataagtgcaagatttatatatttcagttctggctagcatacaaaagaagaaaatctgcttcctactatttaatttctagtgatattagaaacgttatattatcatgtattcaaatacatagcaacttttctaaatcctgttttgatattaaagattttaaatttatcttgctcccttttcaaaaccacaaactcttttcttttttacactatgcaacattcccttattgacacaatattcatgctrtgtatttttatagcaaagtttgcagaagaaagatccaaatgatttcatagagttagattagcagagaactaagtgtaaataaaggctcttgagtttttaaccaaaatatccttttttgacttttattatgagca

SEQ ID NO: 31252 - DNA, 569 bp, Homo sapiens
atgggactccataatatgccaagtggaaaccaaagaaagtgactggacttctacaaatttggcatggggggcctaaaagttgtacaactatgactttttattgaccacgccagttggtaaagtttgtgatattgtatgcaacatggaacattttggtaacttgacttttttgctgaatgaactaaactttatgtaaatatttaccatcatttacaagtattttatgaaatgatttttggctgcagygttgtattctatcatatggatatacaacataatccatttaactaatcttccagatttggaactttaagattgtttctattttttttatattttaaatagtgcctccatgaacacatttgtagatatatatttgtagatatgattttgtgtaaatccccaataatttacctactggaattttatagttttttttttttcatttttgcaagtttctgtaggtcacaagtaataattttaatgtttatttttctttttctattttctgtattttaaaaacacctctttgtaatgagtagtttattttttaaaccatacaaaggaaa

SEQ ID NO: 31253 - DNA, 621 bp, Homo sapiens
agaagcagtcaatgttcagcttttggcccccaaaatagactactgaagtccaagccagaaagtcaaagctttcatctgcaggatttagacttttgtagagcagaatatgttgagaatcaaaaggcaaagtcatgaagaaataggaattaagagatatccattaagaagatgccagaaaccaaccttacccagggagaggagggaatttgaaagggtgaggagagaggtccttgaggtattaagtacctgtgatgacgtgtggggagaagcagtgtgcagcaggggcttcccagtgtctctaaaccaacaccatcctttgctaatactagggacagcctgggaggtgagtcgccactgacccacctccagtatcattcaacacactgtgggacatgcttaagctgtgatggcaactcagctagttgccagacgaacaggrcctgttcaaaatgcttatgggttgtccttcatagctgatacccatctgtgtcctaaaatgcagcccttttgaatcattctacatggtccacctctcttttaaaggcccaggtactgtcagttctctgacagtgagagtggcaaagccccacagcaggaccctggccctgtggctccattgca

SEQ ID NO: 31254 - DNA, 523 bp, Homo sapiens
cagagattgcagcaagctgacattgtgccactgcattccagcctgggtgacagagcaagactccatctcaaaasaaaaaaaagtcccaaatcccacatgcctgctctgaaagttattctcaaattgtttttaaactttaaggtatgtcacaccttctctaaaatgataaaagatgtgggggaaggaaaaaaacccaatcaatcaagcaagtgaagaagcggacaaaaacaggctgaaggttaaggcagcaaaatataataagccaaaggcaaagtatcccccaaaaccagagaagcctaagggcatgcacagctggagagagcaagccagggaggagtctcagcactctctcaccttccatttgtccaatgtggggaacgcagcaccttcacaaagtcctgaatctacaggaggcgaaaagggaaaaacaagggcagggggagaaagagtcgcttaaagagaggcaagaaagtcagggaatgaggaagatataggttcagggaaacgaaatgctgaagaagag

SEQ ID NO: 31255 - DNA, 590 bp, Homo sapiens
attatttttcttcttgacctatatacatttttaattcttaacagaatttaaatattgtcatattacctagttagattttgaattatctgtggttagagaagctctctaataaatctcaggatttgtcaaatcttccactgctttgcatgtgcagatgccctccataaaagttgcaggattaatagaagagtaagattttctgacttatgtggggcaattgatttaatttgccaccctattccctcactcaacaaataaatgcctattcttatgagcactagggatattgaacaggaaacttatcatatattaatggcattaagtaaaaacacaatataatagcaaataattatataagcagtgaagaacaaacaaggcagagtaagggggagataaatgattcccctcttagtgggagtaagaaaagattatcttgagagtgcacccattgagcagtgatccgaatgtcatgaagagagaaacyatatgggtcacagaaagtatttcagacagaatgttccaggaaagcaaggaaggccctgtaacaaatgtagcgtatgtgagcaagagtcacagagagagaggtggca

SEQ ID NO: 31256 - DNA, 590 bp, Homo sapiens
attatttttcttcttgacctatatacatttttaattcttaacagaatttaaatattgtcatattacctagttagattttgaattatctgtggttagagaagctctctaataaatctcaggatttgtcaaatcttccactgctttgcatgtgcagatgccctccataaaagttgcaggattaatagaagagtaagattttctgacttatgtggggcaattgatttaatttgccaccctattccctcactcaacaaataaatgcctattcttatgagcactagggatattgaacaggaaacttatcatatattaatggcattaagtaaaaacacaatataatagcaaataattatataagcagtgaagaacaaacaaggcagagtaagggggagataaatgattcccctcttagtgggagtaagaaaagattatcttgagagtgcacccattgagcagtgatccgaatgtcatgaagagagaaaccatatgggtcacagaaagtatttcagacagaatgttccaggaaagcaaggaaggccctgtaacaaaygtagcgtatgtgagcaagagtcacagagagagaggtggca

SEQ ID NO: 31257 - DNA, 676 bp, Homo sapiens
atgtctaatgagcacataaatgcattattcaratgtctcagaatttaaactgaaattgaacttttttttccaggctctaccaggcaatggtttatatgtaactaaaatttgtctcttcaatagttaatatttcaaacagaaaactttatttcctaacttgatcgtaagaatatataagtgctcaaaaatttgaacaaattcttgagaatattcagtccaatataatatattatctggtttggccatataaactttctagaggttgaaccagaaaaactcggaaaatgtcttctcccatgaatgccaccctttggtttgctgattctgtgttcattattctcatgtactaatagctaacgatggcctcctcaactgaaccaagaattagctgtagccaatttaatgattgcataaaaattaagaaaattaattaggtggtgctgatagacacaaggcagggacagcaacctcctttcaatttcatatacacttgcaaatggcaagatttactagccagtgacatatttttctttaaataattatagggttaagatttgggaggatttggatttcatctgatttgtagttgataaacctggagcagattgttggaactgtagtcattaagagcacatgttctgaagagaattgctgagtttcactcgcaggtgaaatt

SEQ ID NO: 31258 - DNA, 676 bp, Homo sapiens
atgtctaatgagcacataaatgcattattcagatgtctcagaatttmaactgaaattgaacttttttttccaggctctaccaggcaatggtttatatgtaactaaaatttgtctcttcaatagttaatatttcaaacagaaaactttatttcctaacttgatcgtaagaatatataagtgctcaaaaatttgaacaaattcttgagaatattcagtccaatataatatattatctggtttggccatataaactttctagaggttgaaccagaaaaactcggaaaatgtcttctcccatgaatgccaccctttggtttgctgattctgtgttcattattctcatgtactaatagctaacgatggcctcctcaactgaaccaagaattagctgtagccaatttaatgattgcataaaaattaagaaaattaattaggtggtgctgatagacacaaggcagggacagcaacctcctttcaatttcatatacacttgcaaatggcaagatttactagccagtgacatatttttctttaaataattatagggttaagatttgggaggatttggatttcatctgatttgtagttgataaacctggagcagattgttggaactgtagtcattaagagcacatgttctgaagagaattgctgagtttcactcgcaggtgaaatt

SEQ ID NO: 31259 - DNA, 676 bp, Homo sapiens
atgtctaatgagcacataaatgcattattcagatgtctcagaatttaaactgaaattgaacttttttttccaggctctaycaggcaatggtttatatgtaactaaaatttgtctcttcaatagttaatatttcaaacagaaaactttatttcctaacttgatcgtaagaatatataagtgctcaaaaatttgaacaaattcttgagaatattcagtccaatataatatattatctggtttggccatataaactttctagaggttgaaccagaaaaactcggaaaatgtcttctcccatgaatgccaccctttggtttgctgattctgtgttcattattctcatgtactaatagctaacgatggcctcctcaactgaaccaagaattagctgtagccaatttaatgattgcataaaaattaagaaaattaattaggtggtgctgatagacacaaggcagggacagcaacctcctttcaatttcatatacacttgcaaatggcaagatttactagccagtgacatatttttctttaaataattatagggttaagatttgggaggatttggatttcatctgatttgtagttgataaacctggagcagattgttggaactgtagtcattaagagcacatgttctgaagagaattgctgagtttcactcgcaggtgaaatt

SEQ ID NO: 31260 - DNA, 676 bp, Homo sapiens
atgtctaatgagcacataaatgcattattcagatgtctcagaatttaaactgaaattgaacttttttttccaggctctaccaggcaatggtttatatgtaactaaaatttgtctcttcaatagttaatatttcaaacagaaaactttatttcctaacttgatcgtaagaatatataagtgctcaaaaatttgaacaaattcttgagaatattcagtccaatataatatattatctggtttggccatataaactttctagaggttgaaccagaaaaactcggaaaatgtcttctcccatgaatgccaccctttggtttgctgattctgtgttcattattctcatgtactaatagctaacgatggcctcctcaactgaaccaagaattagctgtagccaatttaatgattgcatmaaaattaagaaaattaattaggtggtgctgatagacacaaggcagggacagcaacctcctttcaatttcatatacacttgcaaatggcaagatttactagccagtgacatatttttctttaaataattatagggttaagatttgggaggatttggatttcatctgatttgtagttgataaacctggagcagattgttggaactgtagtcattaagagcacatgttctgaagagaattgctgagtttcactcgcaggtgaaatt

SEQ ID NO: 31261 - DNA, 466 bp, Homo sapiens
aaagaggttaggaaagtgatgttgaggtgcagaggtggaagcaggtgtaagacgttccagcctggctgccaaagtgtttgaattcatctgcaagctatgcgtgcccttagctattgcaggaagcgtggtgaactctgccatatataatgtggatgctgaacacagagttgtcatcttcgacctgttccatggagtacaggacactgtggtaggagaagggactcactttctctcctcatggatacagaaagaaaccaggtatctttgactgcggctctcgaccatgcaatgtgccattcatcactggtagcaaagtagasagaatgtcagcatctctgcgcatcctcttcccacctgtcacaggccagcttcttcacatccttaccagcgctggagaggactgtgatgagcacgtgctgtggtccatatgattcaattatctcccactgggttcctcccacaatgc

SEQ ID NO: 31262 - DNA, 1616 bp, Homo sapiens
tataataagtttaagaaatttgaacagggtcacagagctttaattgtaactaagtttcaaatccaaacagcctgactctgtagatcatggttttagcctctagactcccctcatgcatttcgtttctccctgttaggttgttcctctcctactatcacctcatgctgatatatgatggtggcatatggctacttcagtggtgaggacactgargcctagcaaggtcacgtgttccagggtctcactgatgcccgggaacaagggagagaagagatttgaggagcagtggtcacaactccagaggattacatctaataaaatgttttatttgtgaaggcaatgagagaccttcacagcagatgcaaagatccagcaaaaagataggctgaagagcactggccagctatgggaaaataaaaattccaacagggaactgcctgcagtttctgcctccagcttcatgttcagaagtgggacccatagattatttggctagaacaacattcttcacataaacactaacgaaaaagtactcaacttatgggtccagtgaaaataagaatgtaaaagtaagtaaatcagaggaaaatgcattgcaagtaaataccttattttaaataacagtgggctaaaatagtgtgtagcatattgtaaagctaacttgtaaatttcaacactatttttgaaagaaaggatatatgatgtaagaacaataatgtaacaatatactggtaagaaatgtcacattatcctaattaagaccaaaaggtgtgtgagttagcagaagagataaaagtaataatattttgaactctattaggtaaagaaaaatgaaaatattccattttattctttacttgactaacttctgaaatagagaccataaaaagtattttaaacatttatatttaccatattagtagcaaaaatcaaaaacaaataaatatgttctagaagaattgatgaaagataagaaaacgtaatcaatatggcaaaagtcaaaaacaaactacaaaggtagtaaaactaaaagaacaaaatattaggaaaaaatgtgaaaatacagagcactaaacaaattcatctatttgaaaatcaaagattctcagacgtgttttaaaaaatccaattataggccgggcatggtggctcacacctgtaataccagcactttgggaggctgaagtgagtggatcacgagatcaagagatcaaaaccatcctggccaacatggtgaaatcccatctctactaaaaatataaaaattagctgggtgtggtggcacgtgcctgtagtcccagcccccgggaggctgaggcaggagaatcgcttgaacccaggaggcagaggttgcagtgagctgagatcacgccactgcactccagcctggtgacagagcgagactgcctccaaaaaaaaaaaaaaaaatccaattataatttgtacactaaaaaatatctatgagataattttacacaaatgaataaatgcaattataaagaaatcagggtttctgatttttaaaaaattacacaaattagaaatgaattaggaagaaaacatcaaaaattgacaaggactattatttccaatgaaaatataactatttaaagcta

SEQ ID NO: 31263 - DNA, 1616 bp, Homo sapiens
tataataagtttaagaaatttgaacagggtcacagagctttaattgtaactaagtttcaaatccaaacagcctgactctgtagatcatggttttagcctctagactcccctcatgcatttcgtttctccctgttaggttgttcctctcctactatcacctcatgctgatatatgatggtggcatatggctacttcagtggtgaggacactgaagcctagcaaggtcacgtgttccagggtctcactgatgcccgggaacaagggagagaagagatttgaggagcagtggtcacaactccagaggattacatctaataaaatgttttatttgtgaaggcaatgagagaccttcacagcagatgcaaagatccagcaaaaagataggctgaagagcactggccagctatgggaaaataaaaattccaacagggaactgcctgcagtttctgcctccagcttcatgttcagaagtgggacccatagattatttggctagaacaacattcttcacataaacactaacgaaaaagtactcaacttatgggtccagtgaaaataagaatgtaaaagtaagtaaatcagaggaaaatgcattgcaagtaaataccttattttaaataacagtgggctaaaatagtgtgtagcatattgtaaagctaacttgtaaatttcaacactatttttgaaagaaaggatatatgatgtaagaacaataatgtaacaatatactggtaagaaatgtcacattatcctaattaagaccaaaaggtgtgtgagttagcagaagagataaaagtaataatattttgaactctattaggtaaagaaaaatgaaaatattccattttattctttacttgactaacttctgaaatagagaccataaaaagtattttaaacatttatatttaccatattagtagcaaaaatcaaaaacaaataaatatgttctagaagaattgatgaaagataagaaaacgtaatcaatatggcaaaagtcaaaaacaaactacaaaggtagtaaaactaaaagaacaaaatattaggaaaaaatgtgaaaatacasagcactaaacaaattcatctatttgaaaatcaaagattctcagacgtgttttaaaaaatccaattataggccgggcatggtggctcacacctgtaataccagcactttgggaggctgaagtgagtggatcacgagatcaagagatcaaaaccatcctggccaacatggtgaaatcccatctctactaaaaatataaaaattagctgggtgtggtggcacgtgcctgtagtcccagcccccgggaggctgaggcaggagaatcgcttgaacccaggaggcagaggttgcagtgagctgagatcacgccactgcactccagcctggtgacagagcgagactgcctccaaaaaaaaaaaaaaaaatccaattataatttgtacactaaaaaatatctatgagataattttacacaaatgaataaatgcaattataaagaaatcagggtttctgatttttaaaaaattacacaaattagaaatgaattaggaagaaaacatcaaaaattgacaaggactattatttccaatgaaaatataactatttaaagcta

SEQ ID NO: 31264 - DNA, 1616 bp, Homo sapiens
tataataagtttaagaaatttgaacagggtcacagagctttaattgtaactaagtttcaaatccaaacagcctgactctgtagatcatggttttagcctctagactcccctcatgcatttcgtttctccctgttaggttgttcctctcctactatcacctcatgctgatatatgatggtggcatatggctacttcagtggtgaggacactgaagcctagcaaggtcacgtgttccagggtctcactgatgcccgggaacaagggagagaagagatttgaggagcagtggtcacaactccagaggattacatctaataaaatgttttatttgtgaaggcaatgagagaccttcacagcagatgcaaagatccagcaaaaagataggctgaagagcactggccagctatgggaaaataaaaattccaacagggaactgcctgcagtttctgcctccagcttcatgttcagaagtgggacccatagattatttggctagaacaacattcttcacataaacactaacgaaaaagtactcaacttatgggtccagtgaaaataagaatgtaaaagtaagtaaatcagaggaaaatgcattgcaagtaaataccttattttaaataacagtgggctaaaatagtgtgtagcatattgtaaagctaacttgtaaatttcaacactatttttgaaagaaaggatatatgatgtaagaacaataatgtaacaatatactggtaagaaatgtcacattatcctaattaagaccaaaaggtgtgtgagttagcagaagagataaaagtaataatattttgaactctattaggtaaagaaaaatgaaaatattccattttattctttacttgactaacttctgaaatagagaccataaaaagtattttaaacatttatatttaccatattagtagcaaaaatcaaaaacaaataaatatgttctagaagaattgatgaaagataagaaaacgtaatcaatatggcaaaagtcaaaaacaaactacaaaggtagtaaaactaaaagaacaaaatattaggaaaaaatgtgaaaatacagagcactaaayaaattcatctatttgaaaatcaaagattctcagacgtgttttaaaaaatccaattataggccgggcatggtggctcacacctgtaataccagcactttgggaggctgaagtgagtggatcacgagatcaagagatcaaaaccatcctggccaacatggtgaaatcccatctctactaaaaatataaaaattagctgggtgtggtggcacgtgcctgtagtcccagcccccgggaggctgaggcaggagaatcgcttgaacccaggaggcagaggttgcagtgagctgagatcacgccactgcactccagcctggtgacagagcgagactgcctccaaaaaaaaaaaaaaaaatccaattataatttgtacactaaaaaatatctatgagataattttacacaaatgaataaatgcaattataaagaaatcagggtttctgatttttaaaaaattacacaaattagaaatgaattaggaagaaaacatcaaaaattgacaaggactattatttccaatgaaaatataactatttaaagcta

SEQ ID NO: 31265 - DNA, 1616 bp, Homo sapiens
tataataagtttaagaaatttgaacagggtcacagagctttaattgtaactaagtttcaaatccaaacagcctgactctgtagatcatggttttagcctctagactcccctcatgcatttcgtttctccctgttaggttgttcctctcctactatcacctcatgctgatatatgatggtggcatatggctacttcagtggtgaggacactgaagcctagcaaggtcacgtgttccagggtctcactgatgcccgggaacaagggagagaagagatttgaggagcagtggtcacaactccagaggattacatctaataaaatgttttatttgtgaaggcaatgagagaccttcacagcagatgcaaagatccagcaaaaagataggctgaagagcactggccagctatgggaaaataaaaattccaacagggaactgcctgcagtttctgcctccagcttcatgttcagaagtgggacccatagattatttggctagaacaacattcttcacataaacactaacgaaaaagtactcaacttatgggtccagtgaaaataagaatgtaaaagtaagtaaatcagaggaaaatgcattgcaagtaaataccttattttaaataacagtgggctaaaatagtgtgtagcatattgtaaagctaacttgtaaatttcaacactatttttgaaagaaaggatatatgatgtaagaacaataatgtaacaatatactggtaagaaatgtcacattatcctaattaagaccaaaaggtgtgtgagttagcagaagagataaaagtaataatattttgaactctattaggtaaagaaaaatgaaaatattccattttattctttacttgactaacttctgaaatagagaccataaaaagtattttaaacatttatatttaccatattagtagcaaaaatcaaaaacaaataaatatgttctagaagaattgatgaaagataagaaaacgtaatcaatatggcaaaagtcaaaaacaaactacaaaggtagtaaaactaaaagaacaaaatattaggaaaaaatgtgaaaatacagagcactaaacaaattcatctatttgaaaatcaargattctcagacgtgttttaaaaaatccaattataggccgggcatggtggctcacacctgtaataccagcactttgggaggctgaagtgagtggatcacgagatcaagagatcaaaaccatcctggccaacatggtgaaatcccatctctactaaaaatataaaaattagctgggtgtggtggcacgtgcctgtagtcccagcccccgggaggctgaggcaggagaatcgcttgaacccaggaggcagaggttgcagtgagctgagatcacgccactgcactccagcctggtgacagagcgagactgcctccaaaaaaaaaaaaaaaaatccaattataatttgtacactaaaaaatatctatgagataattttacacaaatgaataaatgcaattataaagaaatcagggtttctgatttttaaaaaattacacaaattagaaatgaattaggaagaaaacatcaaaaattgacaaggactattatttccaatgaaaatataactatttaaagcta

SEQ ID NO: 31266 - DNA, 1616 bp, Homo sapiens
tataataagtttaagaaatttgaacagggtcacagagctttaattgtaactaagtttcaaatccaaacagcctgactctgtagatcatggttttagcctctagactcccctcatgcatttcgtttctccctgttaggttgttcctctcctactatcacctcatgctgatatatgatggtggcatatggctacttcagtggtgaggacactgaagcctagcaaggtcacgtgttccagggtctcactgatgcccgggaacaagggagagaagagatttgaggagcagtggtcacaactccagaggattacatctaataaaatgttttatttgtgaaggcaatgagagaccttcacagcagatgcaaagatccagcaaaaagataggctgaagagcactggccagctatgggaaaataaaaattccaacagggaactgcctgcagtttctgcctccagcttcatgttcagaagtgggacccatagattatttggctagaacaacattcttcacataaacactaacgaaaaagtactcaacttatgggtccagtgaaaataagaatgtaaaagtaagtaaatcagaggaaaatgcattgcaagtaaataccttattttaaataacagtgggctaaaatagtgtgtagcatattgtaaagctaacttgtaaatttcaacactatttttgaaagaaaggatatatgatgtaagaacaataatgtaacaatatactggtaagaaatgtcacattatcctaattaagaccaaaaggtgtgtgagttagcagaagagataaaagtaataatattttgaactctattaggtaaagaaaaatgaaaatattccattttattctttacttgactaacttctgaaatagagaccataaaaagtattttaaacatttatatttaccatattagtagcaaaaatcaaaaacaaataaatatgttctagaagaattgatgaaagataagaaaacgtaatcaatatggcaaaagtcaaaaacaaactacaaaggtagtaaaactaaaagaacaaaatattaggaaaaaatgtgaaaatacagagcactaaacaaattcatctatttgaaaatcaaagattctcagacgtgttttaaaaaatccaattataggccgggcatggtggctcacacctgtaatmccagcactttgggaggctgaagtgagtggatcacgagatcaagagatcaaaaccatcctggccaacatggtgaaatcccatctctactaaaaatataaaaattagctgggtgtggtggcacgtgcctgtagtcccagcccccgggaggctgaggcaggagaatcgcttgaacccaggaggcagaggttgcagtgagctgagatcacgccactgcactccagcctggtgacagagcgagactgcctccaaaaaaaaaaaaaaaaatccaattataatttgtacactaaaaaatatctatgagataattttacacaaatgaataaatgcaattataaagaaatcagggtttctgatttttaaaaaattacacaaattagaaatgaattaggaagaaaacatcaaaaattgacaaggactattatttccaatgaaaatataactatttaaagcta

SEQ ID NO: 31267 - DNA, 1616 bp, Homo sapiens
tataataagtttaagaaatttgaacagggtcacagagctttaattgtaactaagtttcaaatccaaacagcctgactctgtagatcatggttttagcctctagactcccctcatgcatttcgtttctccctgttaggttgttcctctcctactatcacctcatgctgatatatgatggtggcatatggctacttcagtggtgaggacactgaagcctagcaaggtcacgtgttccagggtctcactgatgcccgggaacaagggagagaagagatttgaggagcagtggtcacaactccagaggattacatctaataaaatgttttatttgtgaaggcaatgagagaccttcacagcagatgcaaagatccagcaaaaagataggctgaagagcactggccagctatgggaaaataaaaattccaacagggaactgcctgcagtttctgcctccagcttcatgttcagaagtgggacccatagattatttggctagaacaacattcttcacataaacactaacgaaaaagtactcaacttatgggtccagtgaaaataagaatgtaaaagtaagtaaatcagaggaaaatgcattgcaagtaaataccttattttaaataacagtgggctaaaatagtgtgtagcatattgtaaagctaacttgtaaatttcaacactatttttgaaagaaaggatatatgatgtaagaacaataatgtaacaatatactggtaagaaatgtcacattatcctaattaagaccaaaaggtgtgtgagttagcagaagagataaaagtaataatattttgaactctattaggtaaagaaaaatgaaaatattccattttattctttacttgactaacttctgaaatagagaccataaaaagtattttaaacatttatatttaccatattagtagcaaaaatcaaaaacaaataaatatgttctagaagaattgatgaaagataagaaaacgtaatcaatatggcaaaagtcaaaaacaaactacaaaggtagtaaaactaaaagaacaaaatattaggaaaaaatgtgaaaatacagagcactaaacaaattcatctatttgaaaatcaaagattctcagacgtgttttaaaaaatccaattataggccgggcatggtggctcacacctgtaataccagcactttgggaggctgaagtgagtggatcacgagatcaagagatcaaaaccatcctggccaacatggtgaaatcccatctctactaaaaatataaaaattagctgggtgtggtggcacgtgcctgtagtcccagcccccgggaggctgaggcaggagaatcgcttgaacccaggaggcagaggttgcagtgagctgagatcacgccactgcactccagcctggtgacagagcgagactgcctccaaaaaaaaaaaaaaaaatccaattataatttgtacactaaaaaatatctatgagataattttacacaaatgaataaatgcaattataargaaatcagggtttctgatttttaaaaaattacacaaattagaaatgaattaggaagaaaacatcaaaaattgacaaggactattatttccaatgaaaatataactatttaaagcta

SEQ ID NO: 31268 - DNA, 684 bp, Homo sapiens
tgactagctttattaagtaagcaatccaagcataattgataagaatgtttaaattaggtaaaggtaaatggcagaaaagtttataaatgaatttgtcatagtctcaaacatttttttcagcaatttaaaatcttaaagttacgttaaatagtacttactaaatgtctgagtaatttctaagtacgaaaacattaactagcaagcataaacctaaatacattaacaaattgtttttacatgatatgaataagacaaatatatttgcatgtgctcagaaacataaaaaattgaggaaacattcttctgaaatcataaaatgattttatctgtaaatactgctataacatagtttaaaattgcttacttcctagtttaatactgaacattgaaattacttaaagttaaaattgtcattaatgtatataattaaaactgtgtctggaattggtgggttcttagtcttgctgacttccaaaatgaagctgtggacccttgcggtgagtgatacagttcttaaagatggtatgtccggaatttgttccttctgatgttcagctgtgtccggagtgtcttccttctggtgggttcatggtcttgcaggtttcaggagygaagctgcagaccttcgtggtgagtattacagctcttaaaggcagcgcgtctggagttgttcgttctttctgt

SEQ ID NO: 31269 - DNA, 1766 bp, Homo sapiens
agagaaatttttaggaaaccacaaagtattctcaacagggaatatcttaaaatgaaagtattagttggatgcatgttttttacttttcttttttttctttttatttgtcaagctgcactccatttataactgcttgtgctttgattcaattaagtttgacaagattaatgtctttggggttcagagaggccgagttgtgactacatactgcagctggggcataaaatataaagattgctaataaaaagccagggcttagagaaaaatgtcattccatgtcaatgctttcaggttaggttgggaaacagcaatgatcttgtttacatgactttgtatctgtgttcatagtgatagcatgaaaaagagactgacagagagagagaggaagagagagatacacacattgtactcaaagacagagagacggtacaggatcacatgaataagtctttagagtatgcatattatactctaggccatatggcataacctgagattaaaatggtcctttcaaactaacggtggggaacccagcaaaacaaatatgttttctatacaatatatcatctattctgggaggtgatggtacatggtgaagcaagaaatgcacctaaaatagtctttcaggtgaagaagaggtaggacaccattccagacagatgctgcagcctaagcaagggatccaagctaaaagtaaataaataaataaagaaaaccaaatgcgtgcgcgcacacacacactacattcaagaaactccacataaagtagtgaatgtacctcacaaaagccttaaagactgcttgccaggtcaagggacttcggattatctcagaggttctgaaggccaccatggtgagatttgagcatttgtgctctaataaagtatctggcaagagtgtagagatagagattgagggaatcaatatttgaggcagagattaaagggtgaccacatcttaggcactgagtaaatcagtggtttggaacagttttgcagtgaaggggcctattacaaaaatttaaaatcaatatttatatgtttatcagtcaccaagtgttttccaaacatattcgaccaaataaatatttgtgtgtatttctgtgtatgtattttctaggtaacatatagtagcacaattcttcagaaagacttcaggaattctgatatattagagaactagaggtcaagcttaaaagacaccatggagttgaatttattgcagagggaaattcatcttaccgccggaagcatagttaaaaactatatgctgggattctgggaagatggcagtgtgggaagcaccagaattgtgtctttccatctagatagcaactgcatagggcagaacctgtcttaagtaactattgcattttgggactctcaaatttactaaaggcttgcaacctccaaaggaaagcttggaaggtaaattgtggttaatttggggcactttcagcttttagcacactggcagctacccatcctctattcccagccccatggtaggcagctgtgtgcacgttcctggagcaggctgcacacggcttgtgggaggcaggtgatcaaaaagaaccccacccttaaaatktcagaatctgtgctataatcactgatcacagaggtgcaaagaggcaggcagccacagttattgcaactcccccattcttacaagctcttccctctgtggttgaatagacctccagggaatttaaagggcaagcattctttatcccttactttaatttttctatttttcctcatcta

SEQ ID NO: 31270 - DNA, 551 bp, Homo sapiens
tggagaacctttttaagcacaaagcatggagcttagccctgaagtgcaggcacagcatggccctgtataactgaacctgatgcagaggccgagagcagacagctcacggagcacatgtggtggtgagaagcagcctaagcctcgagatgtaagaagtcacaggccctgcagaggtgagtctcataaatcaatgaccaatccttatgtgtgctcagatgggcattcttgctgagtcattgatctttttatccaaacccaaactgatggcagtaatcattgattgcattgctatatttaaaatgtgcatcttcaaaatwgcaagtttatttaatagaccattttaactatgaaacatcaaaagcattaaatttctcaagatattttcaaatgtatcaaagaaaattaacttacatgaactcggtccaacatttaagactatcttattgagataaaaaactagagaaatactgaaattttgatcagtgttttgttttgtcataggggttactatgagccagcatttaaatactaattagctgcagtaaaatatt

SEQ ID NO: 31271 - DNA, 660 bp, Homo sapiens
atgaatggagtgtaaccacatgaaactgaagtagggagggaagctgatatctcctcagcatcatcagcaatttgaaagtctctgctaaggtgtgctagtgatagggacaggaggcagagaaattctaggcagaaaagggcaggtccctgtgaaaccccatcctcaagctgaaaagcctgaaaccgtggcctaaagtgagaacttatatccctgttttcccactcgaatgttgccttttcctaaaccacccatggccctgcactgtcccatcctatgcctataaaaaccccagactcagtcagtagatgggactatggttggatgtcagagagaagtgacttgacctcagagggacagcttgatggagtaactttggagaaaaatccaaccagaagcagccagacttcaggggaagattactttctcrccccacccccttttcagcttcccttcccactgagagccactttcatcagcaatgaaagccctcacatttaccatccttcagttcattcatgcgacctcatttttcctggatgccagacaagagcttgtgagccacaagtgtggttacaaaaagctgacacactggcacatcgcccttgttggcagagggcagccacctcatgcaaaaaggcagagggcccactgagctgttaa

SEQ ID NO: 31272 - DNA, 620 bp, Homo sapiens
gctagtactaagagttttattctataggaaaagaattaaggttaagagagattatatgacctgtaaaattcacatagatggcaaaatcatggttgattcctggtaagaacatcaactataggaacaaaagtaatttataagcaaactgatcagcattttattatgatagttaatcacacacagagcatgcttcagtagatgagtatttttcacataacataaatttttataatttatcatacatgatgaagmatccttaaaaataacataaaatcacatcatccctatataaagtccttttcaacatgtgttttagttaaaactactttagttgaggagaggccttatgaatataacaactaaaaatcataaaagactatatttcaaatacaactagcaaaaatcaacatgtattgcttcaaaacaaaatagattaaatgtaatctttaaattaggtgaagagatgcagatactgacagggtagagctaatataatttgctaagggtagacttcttttcttctctaattaaaattaatctgctctaaaaatcttttgttctatgaaggacaccatattttaagcaatccatctttttctcccttagcctgatgatgtatt

SEQ ID NO: 31273 - DNA, 565 bp, Homo sapiens
tgaaaatttagattcaaataacagttccttggaattgctatataaacgattatctacaatggttcaaatgaaaaaataatgttttatgacaaacaaactttaagtaatctttacttgtatcactattctgcaatgcttacaagacatcattaggacagtataatgcacattaaggctcctctaatatgacctacctcactcagattttatgaactatacaagaaaatcacttaattggcaattctgaaacwactataaaattagagttcaatacaattagtgtcattataaatacgcatgtttctaagcatttaactttaaaagacaagagattgatggacctttattacatttttttgaaaccatttcctttagggaaatggatagaagagaatttttggtgtgtcttagaaaatccttgctggactctcgaaacaaaatgtgcttacaatttcctctgtccaaatttttcaggaatttcctgttttgaagtgccttttgttgtgtacccctgttgtgaactatatcttgctttagcagttcacttctatgccctcatgccata

SEQ ID NO: 31274 - DNA, 565 bp, Homo sapiens
tgaaaatttagattcaaataacagttccttggaattgctatataaacgattatctacaatggttcaaatgaaaaaataatgttttatgacaaacaaactttaagtaatctttacttgtatcactattctgcaatgcttacaagacatcattaggacagtataatgcacattaaggctcctctaatatgacctacctcactcagattttatgaactatacaagaaaatcacttaattggcaattctgaaacaactataaaattagagttcaatacaattagtgtcattataaatacgcatgtttctaagcatttaactttaaaagacaagagattgatggacctttattacatttttttgaaaccatttcctttagggaaatggatagaagagaatttttggtgtgtcttagaaaatccttgctggactctcraaacaaaatgtgcttacaatttcctctgtccaaatttttcaggaatttcctgttttgaagtgccttttgttgtgtacccctgttgtgaactatatcttgctttagcagttcacttctatgccctcatgccata

SEQ ID NO: 31275 - DNA, 722 bp, Homo sapiens
ggatcctatgtattcttttgtgatttgcatcttttgtccagctttatgtctgtgagattcatttaatctgttgcatattacaactggttatttccattgctgtatacgattccaatcatgaaacaattgactttttatcttctctctttttgtctttttgagacagagtctccctctgtcgcccaggctggagtgcagtggcacgatctcgactcactgcaacctctgcctctcaggttcaagagattctcctgcctcagcctcctgagtagctgggattacaggtgtgcaccaccacacctagctaatttttrtatttttagtagtgatggggtttcaccatgttggtcaggctggtctcgaactcctgacctcatgatctgcccgcctcggcctcccaaagtgctgggattacaggcatgagccaccgtgccctgcgacattttatcttttctgttgtcaatcaacatttggggctgtttccatgtctggctatttaaacaatgccactttgtacacgtttggtgctttcctcctggacatgtgccaagtttctccaggacacctacccaggacagaattgctgtctcgtgggatgtgcacagctcaacattcagaacgctgctcctattggttcctccacttcctgccagctccccagggatggacttttaaatcttggccagtctgggatctgggacacaccccacccagtgtggtct

SEQ ID NO: 31276 - DNA, 563 bp, Homo sapiens
attcagaaaaaattacaaataacctaactagaaaaaatgattaagggagaggatttaggtttagaggagcaactaaggaggagtaaaaaatgatatgagctcagagctggagaagagtggaattattcatggaaattagaaggtcaggaatggggccaatttctagaagatgttaggttttagacgtgatgaatctgaaatgctcatgctgagtctgaaatgctcagactgtaaatcactggcctatactctttactttagtccatgccmtcagttgcaccttgtcttttctagccacctcaaagttctttccaataaaggaaggctctttcacggttctaactccctgaaaaaccaagtaaagtcttctgattcttgacatgttttgtcttcatctggaaagtcagatttaatcaaacctacttcacttgaatcattttttattagtatatcaaaatctcaacagagttgtcaatagtcaattttttatttgtgatcttattgcaaaaaaatctaaaacaaaaaggtaataaaaatgcatgtgaaaatatcaataccaaaac

SEQ ID NO: 31277 - DNA, 758 bp, Homo sapiens
taaacctgcaattgtacccctaaacttaaagtttttagaaaagagaacaactggaaaggagcatgaaaaaattctctgaagtaataaaaatgctctatatattaatagggatggggattacatggctgttagcttttgacaaaattgagttaaagccttcattaatgcatttcatactttgtaaattttatccaaataaaagatagaatagtaaataaatatcaaatttcttttttgtagtaatattttagtaattttgaaactactttctgtgtgttataggcttgaacaaatgaataaaaattttgaaaataatgaaatcccagtttctyacatttgggaatttgaaatatcaatatgaactcatagtttttaagacagatagacataaacaaatagatgaagaaatgatatgacgtatgtcatactccgtttctctgcccactaagaaagagggcctaggagcaatgacaggtagaaaatgagcacacctagtacactgatcttggtttctaaataccattttccattaaagtttgccagggctttatgaagaaaaagctgactccaagcttgagatatgaaagttaataaatgagcctgaaatatcttctactgtgttcaataacaaaatactcaaagaatgatggagacacatcaaaaagaccataattccagatttaagacagtctcactgaacaaatgtaatatacactgggaacaaaaataaacaatgatattttatggatacattgcac

SEQ ID NO: 31278 - DNA, 1185 bp, Homo sapiens
tccaggtctccatgccgctgcctgcatggcctctgctggccccctctgctccttcccgagcctgacctctcataacttctcaatttccccgcttctccttcctcaccagggactcctgggatttcctggctttcctggagtcagtggggagaacggagcctgaggaagctggggatagggagaaggtgtggagggaaaggctggaggggtgtggggggggctctgtggggaggcacgccccgggggatgtccactccattcccaccagggcctgtcaaggaagtcagggcctcgaggagaatggggcctcatggcaagtgcaagggagagaaacagggggctcaaggtccaaatgggtttgggtttttctgacaacaacactcccctctctagggtccacagggtcagccgggtcctcgaggtgccactgggaagtctggagctaaggtcagtggtctctgcagggctccccctgacccctgcccactgagccccagctctccctcaaccacctgaccttggggacaactgaggagcagctcctcccactctgtttcccccatagggaacatcgggggcgaaggcctccatgggccccccagagacagggtgtgtgtggcatgagtgtcctctctctccatgctcccagggagcctgggtgagccagctccttcctcaccccagtgaggaccccagcccctgcccccattctcctgactcagcccacctctgtccctagggtcttcctgattaatgtgtctggtcctctgcctccctttccccaggccataaactctagtcttgtctcaggggccaagagaagcccctttccccaggagggcttcactgtctccctgtagtgaccttggagcacttatcctggcctctgccccagaaatgggcccacctccctaagcaatgacgcctatttctgctcctccytcagggcccacaaagcgccccaggacgcattgggaacctgggtccccctggagagatggtcactgggaagggggtgaatggacaagtatttcaactgagggatgaaagttggttttctgacaactttgattggggagacataaaagaatgagatgtgaggaataccaggattttctgatggggcaaataggtttttgacatcaatctctttgcagggggagccaggagattcaggatctccag

SEQ ID NO: 31279 - DNA, 1185 bp, Homo sapiens
tccaggtctccatgccgctgcctgcatggcctctgctggccccctctgctccttcccgagcctgacctctcataacttctcaatttccccgcttctccttcctcaccagggactcctgggatttcctggctttcctggagtcagtggggagaacggagcctgaggaagctggggatagggagaaggtgtggagggaaaggctggaggggtgtggggggggctctgtggggaggcacgccccgggggatgtccactccattcccaccagggcctgtcaaggaagtcagggcctcgaggagaatggggcctcatggcaagtgcaagggagagaaacagggggctcaaggtccaaatgggtttgggtttttctgacaacaacactcccctctctagggtccacagggtcagccgggtcctcgaggtgccactgggaagtctggagctaaggtcagtggtctctgcagggctccccctgacccctgcccactgagccccagctctccctcaaccacctgaccttggggacaactgaggagcagctcctcccactctgtttcccccatagggaacatcgggggcgaaggcctccatgggccccccagagacagggtgtgtgtggcatgagtgtcctctctctccatgctcccagggagcctgggtgagccagctccttcctcaccccagtgaggaccccagcccctgcccccattctcctgactcagcccacctctgtccctagggtcttcctgattaatgtgtctggtcctctgcctccctttccccaggccataaactctagtcttgtctcaggggccaagagaagcccctttccccaggagggcttcactgtctccctgtagtgaccttggagcacttatcctggcctctgccccagaaatgggcccacctccctaagcaatgacgcctatttctgctcctccttcagggcccacaaagcgccccaggasgcattgggaacctgggtccccctggagagatggtcactgggaagggggtgaatggacaagtatttcaactgagggatgaaagttggttttctgacaactttgattggggagacataaaagaatgagatgtgaggaataccaggattttctgatggggcaaataggtttttgacatcaatctctttgcagggggagccaggagattcaggatctccag

SEQ ID NO: 31280 - DNA, 1564 bp, Homo sapiens
gggcagagtgttggtttgaggggtggtcatttctgtgtcaacgtctactgaacaaaagaatgcggaagtggcatagaagacaggaagggatggccgcaaggacaagggccttaagtctccgctgcgaaggcggctcaatcccatgtccgcagcacccaacgtgcggcctgacaagaaggcggcgtctagaattatttgctgaattttttttgttgtttttttgagacaggatctcgctctgtcgcccaggctggactgccgtggtgcgatctcggcttactgcaacctccacctcccgggctcaagcgactctcctgcctcagcctccggagtagctgggattacaggctctcaccagcacgcctggctaatttttgtatttttagtagagacagggtttcaccatgttaaccaggctggtctccagctgggctcaagtgatccgccctccttggcctcccgaagtgctgggattacaggggtgagccacctgaattaaggtttgattagaggatccaggaaaggcctaactcagaaggcagggcaagccttagaggcagaggcaaggggtaaatgaatcatcttgggataattgaatcatcttggggtgggttcccagagctcaattcgaagaaagggccagcgaacacttggcgaagtgaacaaggaacggactggtgttccaaggatgaagaaggggttagcctgagaaattgggcagggaagaatccggggatggagccgggtacctgaggacccctcctggtgggcggggtatggcgagaagtgcctggggagtccggaggaagagggcatcgtcgtagagtggggcacaattctgaagaaaaacaggaggggaggctcctgagggaggaagctggccaggcctctcaaggggctctgggagaaagcttaagatgggagagcctgataaggatgcctggaggagggcacaggtggatgtcatagtcagtgcctgctcccagtagtcccgggggctggaccctgctcggggtcctggtctctgagggtgctgatggtggacaggagagtgggaaaggagcctctgtacctctttgatgttctggtagtgggggctggcattctggagygtggagcagaacatctgagccaccgtgtggtacaggaacctgtactgctcctgttggggtgagggaccatcaagaagggaaggcaggggcaaatgacagcagtgggccactgtccctgaagattaggagacccagggttcacctctgtctgcacggccgcaggccgctgcttcctcatcttaaggaccacatcaaagagactgaagtcaggtgggatcatctggggcagacagacaaggcacttgagcaggacacgtggtcatgggcagcacactgcacacacaggatgcctgtatcgtacctgggtcaggagcagctgcctcacataatccacggtgcacaggacgcctgttcgcccacaacccgcactgacaagagaatcagagtgtgcctggtcaggtcctgaccacaaccccttttagatggggcatttggggatgggggtgagggtc

SEQ ID NO: 31281 - DNA, 1564 bp, Homo sapiens
gggcagagtgttggtttgaggggtggtcatttctgtgtcaacgtctactgaacaaaagaatgcggaagtggcatagaagacaggaagggatggccgcaaggacaagggccttaagtctccgctgcgaaggcggctcaatcccatgtccgcagcacccaacgtgcggcctgacaagaaggcggcgtctagaattatttgctgaattttttttgttgtttttttgagacaggatctcgctctgtcgcccaggctggactgccgtggtgcgatctcggcttactgcaacctccacctcccgggctcaagcgactctcctgcctcagcctccggagtagctgggattacaggctctcaccagcacgcctggctaatttttgtatttttagtagagacagggtttcaccatgttaaccaggctggtctccagctgggctcaagtgatccgccctccttggcctcccgaagtgctgggattacaggggtgagccacctgaattaaggtttgattagaggatccaggaaaggcctaactcagaaggcagggcaagccttagaggcagaggcaaggggtaaatgaatcatcttgggataattgaatcatcttggggtgggttcccagagctcaattcgaagaaagggccagcgaacacttggcgaagtgaacaaggaacggactggtgttccaaggatgaagaaggggttagcctgagaaattgggcagggaagaatccggggatggagccgggtacctgaggacccctcctggtgggcggggtatggcgagaagtgcctggggagtccggaggaagagggcatcgtcgtagagtggggcacaattctgaagaaaaacaggaggggaggctcctgagggaggaagctggccaggcctctcaaggggctctgggagaaagcttaagatgggagagcctgataaggatgcctggaggagggcacaggtggatgtcatagtcagtgcctgctcccagtagtcccgggggctggaccctgctcggggtcctggtctctgagggtgctgatggtggacaggagagtgggaaaggagcctctgtacctctttgatgttctggtagtgggggctggcattctggagtgtggagcagaacatctgagccaccgtgtggtacaggaacctgtactgctcctgttggggtgagggaccatcaagaagggaaggcaggggcaaatgacagcagtgggccactgtccctgaagattaggagacccagggttcacctctgtctgcacggccgcaggccgctgcttcctcatcttaaggaccacatcaaagagactgaagtcaggtgggatcatctggggcagacagacaaggcacttgagcaggacacgtggtcatgggcagcacactgcacacacaggatgcctgyatcgtacctgggtcaggagcagctgcctcacataatccacggtgcacaggacgcctgttcgcccacaacccgcactgacaagagaatcagagtgtgcctggtcaggtcctgaccacaaccccttttagatggggcatttggggatgggggtgagggtc

SEQ ID NO: 31282 - DNA, 1564 bp, Homo sapiens
gggcagagtgttggtttgaggggtggtcatttctgtgtcaacgtctactgaacaaaagaatgcggaagtggcatagaagacaggaagggatggccgcaaggacaagggccttaagtctccgctgcgaaggcggctcaatcccatgtccgcagcacccaacgtgcggcctgacaagaaggcggcgtctagaattatttgctgaattttttttgttgtttttttgagacaggatctcgctctgtcgcccaggctggactgccgtggtgcgatctcggcttactgcaacctccacctcccgggctcaagcgactctcctgcctcagcctccggagtagctgggattacaggctctcaccagcacgcctggctaatttttgtatttttagtagagacagggtttcaccatgttaaccaggctggtctccagctgggctcaagtgatccgccctccttggcctcccgaagtgctgggattacaggggtgagccacctgaattaaggtttgattagaggatccaggaaaggcctaactcagaaggcagggcaagccttagaggcagaggcaaggggtaaatgaatcatcttgggataattgaatcatcttggggtgggttcccagagctcaattcgaagaaagggccagcgaacacttggcgaagtgaacaaggaacggactggtgttccaaggatgaagaaggggttagcctgagaaattgggcagggaagaatccggggatggagccgggtacctgaggacccctcctggtgggcggggtatggcgagaagtgcctggggagtccggaggaagagggcatcgtcgtagagtggggcacaattctgaagaaaaacaggaggggaggctcctgagggaggaagctggccaggcctctcaaggggctctgggagaaagcttaagatgggagagcctgataaggatgcctggaggagggcacaggtggatgtcatagtcagtgcctgctcccagtagtcccgggggctggaccctgctcggggtcctggtctctgagggtgctgatggtggacaggagagtgggaaaggagcctctgtacctctttgatgttctggtagtgggggctggcattctggagtgtggagcagaacatctgagccaccgtgtggtacaggaacctgtactgctcctgttggggtgagggaccatcaagaagggaaggcaggggcaaatgacagcagtgggccactgtccctgaagattaggagacccagggttcacctctgtctgcacggccgcaggccgctgcttcctcatcttaaggaccacatcaaagagactgaagtcaggtgggatcatctggggcagacagacaaggcacttgagcaggacacgtggtcatgggcagcacactgcacacacaggatgcctgtatygtacctgggtcaggagcagctgcctcacataatccacggtgcacaggacgcctgttcgcccacaacccgcactgacaagagaatcagagtgtgcctggtcaggtcctgaccacaaccccttttagatggggcatttggggatgggggtgagggtc

SEQ ID NO: 31283 - DNA, 781 bp, Homo sapiens
gatttaaaaaaaagttatcccacyagtaaaggctcacaattaaaatcagattctagtatgacatataatgaaaagcaacgtttcacccattccactcctgctggcatgtgaggagaggctggcaaacacatttttaattatttggttcttttctattgcaatgaataaaaaaattatagcactatttcttttatgaaatgaatacatattctactatcttctaatattctaggttaggatttagcaacttacaacactagtttccctctgactttctaatgtaagtataaacatgactgtcagttttttacttgtcatttcttttactaaagggtaagttaattcttcctttcttgttcagttaaacttacttagaatttcttttgtaagatgaagcctttaattctcccaactttccttttacctcttctcctcaccttcaacctcttcattgctgcagctacatctatacttttacattacagccatacctcagagatactggaggtccagttccagaccattgcaataaagtaaatattacaataaagtaagttacacatttttttgtttcctggtgcatattaaagttatatttacactatactacagtctattaaatatgcaatagcactatatctaaagaaacaacatgcatacattaatttaaaaatactttattgctgaaaaattctagtaatcacctaagtctttagcaagccataatctttttaccggtggagggtctggcctctgttgttggctgctgaatgatcagagt

SEQ ID NO: 31284 - DNA, 763 bp, Homo sapiens
taggttcagacttacagaagaatgggaaacagcacaaatccactagtaactaactaacctaacttcacacatcacggttatcattcctaaactagcgaaagagcatggaaaaaagggtgtggacacaaatgccttctctataccagagaaaattagctttcaatttgtgtatcttcaacttctttagaataaacaaaaaccagttagcctaataagatcgaatgtatccaggattcaaatctaactttgaaatttaatacttaagtttcatcaagaagatgaaacatcagggccaaggaaatagttcaaagcaccatggatctcaaaggaaaaagctgctggtaattatacagccaatagtaattacagctaacgttgcgtaacttactatgtgtcaggccctgtcctaggtgctttccatatactaagctaatttaattcakttagtcctcatgacaaacctttgagaaatgtattgtaattatccatattgtacagatgataaaacctaagtagcagagaggttaaataactccttcatgatcatataactaataagaggaaaaaatggtattcaaattaaaagtctggctctataattcagactctgttttattaatttttttgtttccataggttattggggcacaggtggtgtttggttacgataagttctttcgtgatgatttgtgagactttggtgcactcatcgccagagcagtgtacactacatccacttcagcagtcttgttatcgcccaccc

SEQ ID NO: 31285 - DNA, 676 bp, Homo sapiens
aaaaaaaaagtagaagaaaaaaatgtggtcactaaaaaattttaaaggacctacttggctcatattgtatttttttaaataatagtttagcttaattgtatcaaaacaatgcatgcctaagttaaaaaaaaaacatagtactaaaaggcttaacaaaaaaaggcagtcccccatcttaccctctcaactgtgctcttttgaagcaaatactttttaattttttagctgtttgaatatttacctccatacatataaacaacatgcttgcaccctaattcctaacttattatagacattatctattgacgtcctgttttggtacctgatgacctaactcttaccctcccctgctgaagccctttgcctgtactccatcctttcaacagttccactgcattaattgaaaaatctaaatgtgttatgatggaggacagagctcacagctgaaccaagtggtgttccgtgtcctcacacaactatgtacatattgatacttttgtcaaatacctatccataacttttctaaatatcttcaaattacctacaaattatcgatcaggtatctttgggctttgtgtctttttcttgtcgatctctctccctcctgcagaattccatcctgtctctctaactcagactttcctctgccgctcayctgtgtcagatcccgtttcct

SEQ ID NO: 31286 - DNA, 1015 bp, Homo sapiens
tgattacttcttgttttatttttccacttcatttccatgtttttcctcctcctactcagtgtcaaaaaaaagagtgctttttaatatgtttaaaaaaacactttgaaatgataccatctctgtcacttcactctcactttttaaattataaactaaaataaaaattggcatattgatgaaagcttccaaggctgctgcctgctgcttcctggtgattaggtgtgagaaggtggcctttctcagttcagataaaaaaatatgcaaatgatgatatttaaatcaaaatgacagtatagtagaggatggaggggcacatttattccctttcttcccaaccctttctcttttttatatctaaggaggagtttctaactttatggatgagttgaagattaaggaaaagttcatacctgcacaccaagtaccaacttagaaagaaaacattcctgaccttgcttcaaatattctaaattgtccctcttttattcagataacgcatttggtttttgtgacttttctgcattcaaaactatcttacatgttttgagtacttgatgtgggccaacctttatgctgggcttttaaatatgttttcatttaatccatatactcatcctccaaagtaaacatttttatcctcattttcactcatataaaaatctaagtgtggtccaggyacggtggctcatgcttgtaatcccagcactttgggaggccgaggggggcggatcacgagatcaggagttcaagaccagcctggcaaacatggtgaaaccccatctctaggaaaaatacaaaaattagccaggcgtggtggtacatgcctgtaaatgcagctacttaggaggctgaggcaggagaatcgcttgaacccaggaggcagaggttgcagtgagctgagattgtgccattgcactccagcctgggtgacagagcgagactccgtctaaaaaatacaaaaagtaaaaacccaaaaacctaaatgtgatgttgggacgtatctaacactaatgga

SEQ ID NO: 31287 - DNA, 1155 bp, Homo sapiens
ccgggatgcccaggaaggaatggcaggtctccaatgggtggagcctctcaccgggcctagacctagaaggcaggaatccctggccagtgagcccgctggagggggagggaggaagacacaccaatccatagccagccaggtgttagaggtgaaagtgaggccaccgccctgccctgacccgatcccttcccaacacggggtcctgaagctcttccagcagagcccagtattcttcctcgctgaggggtgcttccagcgagacggcctcttccaaggcctccacctcccctggggcctcggtttctaggaaagcttgcgcctgctgctgaaactccgggctcgccaggagctcatccagcagcaggccggaggggagtgcagacgagcgttctggctcctggagcgcctgggagggtgccgggatgccttgcatctgcccctgccacgtggagggctccggtggcgcgggctggcgacgtggaactgcccagacttggggttcccatgacccccggcgacctggggaccccagccccagccccgccacggagtcccctgggacgtgggtgrcacaagcacaccttggccctatggccccccttgagtgggcccaggatgtcccaccgtgcaatgacctggcaggccatagcgctgcgggtcccagtcctcccggcttttgcccaggtgcggaggccaccgaggagcctgagggtgggagagcgccccttatggtggagccggggcggcgtaggcaaaatccccgcatgccggggcaggttgggagatcccctctgccgtcgtggcctggctgggctggagcacggggacggccctggctccctggctcaccaaagcccccctgtgggatagctccaggtgcacagggcacgtggggttcgggaatccccattccccatgtgccagtgtgggcgaaggcgagccacgagggagcagggtgacacacgctgggggctgcgttgtaccggctgcctgcctttgcgggcgccctgccagcctctcccaggtgcctggcccttcgattctgaaacctgatctgaatcctggatcctgggaggcccgtctatctggccaggtcttccctggcagcgatgcctggaaagcgatccttctcaaatgctcggaggagcagggcag

SEQ ID NO: 31288 - DNA, 445 bp, Homo sapiens
atatatggctacaaagaaaaccaaagctaaaatcaaagcatttagatattgccaattttgtactgttccttcgaacattctggtgaaaataagtcagagcttgtctttcatcttggtcgtatcagatggatccaaccacatttaaaaacaaatcatttctctaattactgtgatggttactagaggctgggaagggtgaggggtgataaagcgaagttggttaacaggtacaaaaatacagtctgatagaaggagtaagttctagtattcaatagtacattatygaaattacagttaacaataattgttgtgtatttcaaaatagttagaagagaagaattgtaatgttcctgacacaaagaaaagataaatatttaaagtgatggatatcccaattaccctgacttgatcattacccactttatatatgtatcaatatatcaca

SEQ ID NO: 31289 - DNA, 578 bp, Homo sapiens
tcagagagagtaaactttactttgtttttgggttctatccataaattgtgtgtgtgtgtgtgtgtgtgtgtgtgtgtrtatatatatatatatatatatatatatatatatatatatatatatataaaaaatactgtgtatatataatattacgtgtataatcatgttttaaagacctatatttagttgcactaaataatcaaagctaaggaaatctggatcttgtgaatttcctctagcttcttctccttattctgctctatgatagctcacaaccatagctaaaacatcctgagcatcttctatcagcagtcaggtactacagtaatacattacctatattcactcatttaagatttacaacaactattattactctctttactgcagatgaggaaacagaagcaccataaaactggggaaccagtccaaggtcaaaaagtttatgagtggaggagctgagcttgatcaagggagtgtggcatctgagtctgaatcctgatccctgtctcacatcatcttttctcgagagagacttggaaatggaagacagagggaagcagtgtagtttattttag

SEQ ID NO: 31290 - DNA, 578 bp, Homo sapiens
tcagagagagtaaactttactttgtttttgggttctatccataaattgtgtgtgtgtgtgtgtgtgtgtgtgtgtgtatrtatatatatatatatatatatatatatatatatatatatatatataaaaaatactgtgtatatataatattacgtgtataatcatgttttaaagacctatatttagttgcactaaataatcaaagctaaggaaatctggatcttgtgaatttcctctagcttcttctccttattctgctctatgatagctcacaaccatagctaaaacatcctgagcatcttctatcagcagtcaggtactacagtaatacattacctatattcactcatttaagatttacaacaactattattactctctttactgcagatgaggaaacagaagcaccataaaactggggaaccagtccaaggtcaaaaagtttatgagtggaggagctgagcttgatcaagggagtgtggcatctgagtctgaatcctgatccctgtctcacatcatcttttctcgagagagacttggaaatggaagacagagggaagcagtgtagtttattttag

SEQ ID NO: 31291 - DNA, 807 bp, Homo sapiens
  misc_feature (1)...(807): n = A,T,C or G
cccaaacttccagaaagttgtttgtttatgcctgcactatgtttgctgccttttatgccactccttaacctgccaaaacagtcccaaacactgccatggagaggcctatttggggtagaaatgtattagaggtttggggaaacactaaataaagtacatcgatttcccctttcctcaaagtcaagaaacaaagttacaatcttagtgaagttcaatatttcttcatagactcttggccttgtgcctgcacaatgaatggatcacgtcaggttcccatgtagggatgagagaacaggaagttcattcctatgattcttggagtctttttcagagagtacttaaggataggcaaacagtattctgtaggcacagtgatatatgttgcagaaaaatgtgcattttggtccatcattaatgatttactgttgagtacagtttacaatcttaagtaaaataattcatctccagagatttatttactgcttttggccacacagcaataaaatgatttggttgtactragaagaatttccctttaccaaggccatcacagggagaaggtatggtgttccaggtaaaggatagcataatagaaccatttcagtcaatcaacacagttggtagtcagagagaaggcttctttgtagatgttgatagacatatttatgtatttggaaagaatttccctttatggaaatagagtattcagaagacaaagggtccagctaagtttgggaataagtcgatatacctgagttacttgcacagaaatatctcanaggaattattgtaattatgtaattattg

SEQ ID NO: 31292 - DNA, 2457 bp, Homo sapiens
  misc_feature (1)...(2457): n = A,T,C or G
aaaaaagggctctgtctcaggaaaacaagttgtaatcttggtgctgcctaattgacttactacttcgaatgtcacttcttcattcacaaaatgagtatcctagtctagatcagggatcacaaactcaaatgcttccaggagtcaggtaggtaccctaaatgattgaagtgaggtttgaatgggagggcaacagggcattatagtgacttgtagaaactagaaagcaaatgccccctccaaaggagacaactgtttaaattcagcctactgccatgcatgaatgtgggcacagtgtggccagatctgacttttctaaagaagttggaaatctggacttatttgtgatattacttaacagctaaatccatgtaattgtttaataaagccatgtacaggccgatattatagaggttaagtcaaacacatctgcaggccagatgagacttatggtccaacagtttgccagctctgatctagatgatacgtgtttctggtgaaaaggtctctatgttctctcctctggatgcttactttaaaaactaatgagactttatattttagctatttttcagtaaacttggcggagagttaacatcagacaaaataacttggcagagaaaacatgggatatgaagtcagaagacaaatcaagtccctccttcaccctttagagttgtatggccttaggcaagtggcttaacttcgtagaacctgaagttgttatcagtatgaaatacggatgattccaacccttctagcttgtaaggtgattatgttatttgaataaaattgtgtaaatggaagcactttgtaaactctaaagcaccaaatagctctcaggaatgatgattgtattgtctaactccccaaagatcaattaaggagaaaagcagactttgggatggtagaatattacttattatgaaaaatgaaagacttctcagaacttccagtagaggccagcaattgatctgatgttaaatctatcaaaattattaaattgaagccagactctgtggctcacacctataatcttaacatttgggtaggctgaggcgggaggattgcttgaggccaggagttcaagaccagcctggcgacatagtaagactccatctctacaaaatttaaaaaattaaccaggcattgtggtgcatgactatagtcctagctactcaaaggctgaggtggaaggaccacttgagtacaggagtctgagactgcagtgagctatgatcacactactgcactccagcctgggcaacagggtgagaccctgctctaaaataataatttttaaaaatgattaaattaagtggaatatggcttcagaccttcagtcatttgcannnnnnnnnnnnnnnnnnnnnnnnnnnnnnnnnnnnnnnnnnnnnnnnnnnnnnnnnnnnnnnnnnnnnnnnnnnnnnnnnnnnnnnnnnnnnnnnnnnnttacaggtgaacaggaggctctgcaatagtggcctgggagggagtaacacagtgtctgagaagggcatgttgtttcctcataaataacctggaacatgattcatattgttggaattaagagttggataaagaagcatttatttaaaacgttgtcagggacatggagctcttcccaaggagccaaaataccatttagagttctagagatcctgcattcttgttttgactgcatgctctggacagtttgcagctcaggtaagaacaattccaacttccagatgagattagagcctagaaggggtttaatcttcaaatcatctgctaacttaaaaacaaaatttggaaacagtaatgattaacctgattaaagctgctctcaaggatcaaccagtaaaagaagtgatagcggtgtcaacaataccacataaagtagcaggatttgtatgtcagcagtcccatttttcaagatgccaagtctaaatctatttcctacccatatttaaatgaggagccagttttggaggaattttacttgtcaagtgtgaaagagaggaagagtcagaagacactctttccaagaattctgtggataaaaggagggtttttttttttaaaccaaacctcaaaattttactcttcagaaggagattttttttttttttgaagtccgatggcagcaggatgtgagattcccagttcagtggtgctgggagttaagcagaagaaggtggagatctttcttcttcatagcatgtgctcctttcacagaagcagcttgttaatcgtcaggaaggatttcagacaacctagtgatgatttccarctcaactgcttcccttccatgaggcaccgataccctatttgtgtgtgataaggtgatgatttccctttcatctcaaagctctgactcaagtggttggaggggcttggtgatgcgaaggctgagagagatacagagatgaaggatgatttctttaccaatgacacttctttaggtatctcagttgt

SEQ ID NO: 31293 - DNA, 591 bp, Homo sapiens
ttcaggaaaaaatctaattcttaaaaagctacctgttacctaaaacgttttgatgtaatttgagtcatttgtggcttctgctatatccgtgtcatgtttaactatacgtgacatcttctctgttatatccttgtctgttactattttgtatgttaattattgttgctgctgtgattaggtaacaataactttagtcatgtacatagcttaacygataacttataaaactatacttttactcagttttttaagaaaattgaaatcctagcagtttgcagtaatagcctcatatttacaagcaaataaccttctatttcaattcagttgggatgcatgtggatattaatttataaaactactgcccatttactagaaaatctatttagaaaaatagattaaagaaaacattgatagtgtaaaatatcttgtgcataacatataatttttgaatacatctaattctaatttaccaatatttttataaagaagtataataatgtaaccttaaattaaatatgttttatgagagaaagcatataaaataaatatatatttttaaataaatattttatgacctggtaaaatactaga

SEQ ID NO: 31294 - DNA, 1045 bp, Homo sapiens
cttgcttagaccaactgttcttcattgctttttcccttcctccctataagataggttctatacctagagtgtagcaataactttgtgatcacgaggctataatcctgaggatgaggtccaacaccgctaaagagaacaggatggaaagatggacagccaggtttttggtaatatttttgagctgggcagctgcactatcctggatagtatcttcttgttttccagataattagtgtcactcttagcggagctttattccatgtagttagaggtattccttactgaaggagtgtcctcaactgattgtatatcttcagggaagacttcccatcaagagtaaaggatgaagacagtatagatttagtgaatgagattagctcataatcagtcaatcaatagagacatatcatccccaatttctggtaatctagcttttatacagccagtttccccttctgacttagaaaaagccaatctgcaaggggatggtagattgtgtcatctctgcccgcatttccttgttatcattaggcctgtctttgtacccagataatcttgaaaagaattcatggcaaatggccaaygcattttcttagaacattatctattatatattgatttaggaaaatacattttggaatgtacaagtgaaggaaattccccatacctgatgacttctattcctctgccaaacagttaatgtaatgaaaaacaaataaataaaaacaatgcaaaacaaaatcggagtgcatgagcataaagatgaaggtttcttccccagaagtgtcatagaggagtgtagtgagttggttcatgaaatttttgagagtatatctctaggtacgcattatcagtatctcctgttaaatgagaaatatttgtcttgttggtttcattcatgagtgcctccttttttcaaatgcataacaagtgttcaggtaaaagtacttgagatgtttgtaagagattgaaaaaaaaagcttaggagggaaaaacttctttggtaggaagtagaagacaatataaaagagaatctaaaaaattc

SEQ ID NO: 31295 - DNA, 1045 bp, Homo sapiens
cttgcttagaccaactgttcttcattgctttttcccttcctccctataagataggttctatacctagagtgtagcaataactttgtgatcacgaggctataatcctgaggatgaggtccaacaccgctaaagagaacaggatggaaagatggacagccaggtttttggtaatatttttgagctgggcagctgcactatcctggatagtatcttcttgttttccagataattagtgtcactcttagcggagctttattccatgtagttagaggtattccttactgaaggagtgtcctcaactgattgtatatcttcagggaagacttcccatcaagagtaaaggatgaagacagtatagatttagtgaatgagattagctcataatcagtcaatcaatagagacatatcatccccaatttctggtaatctagcttttatacagccagtttccccttctgacttagaaaaagccaatctgcaaggggatggtagattgtgtcatctctgcccgcatttccttgttatcattaggcctgtctttgtacccagataatcttgaaaagaattcatggcaaatggccaatgcattttcttagaacattatctattatatattgatttaggaaaatacattttggaatgtacaagtgarggaaattccccatacctgatgacttctattcctctgccaaacagttaatgtaatgaaaaacaaataaataaaaacaatgcaaaacaaaatcggagtgcatgagcataaagatgaaggtttcttccccagaagtgtcatagaggagtgtagtgagttggttcatgaaatttttgagagtatatctctaggtacgcattatcagtatctcctgttaaatgagaaatatttgtcttgttggtttcattcatgagtgcctccttttttcaaatgcataacaagtgttcaggtaaaagtacttgagatgtttgtaagagattgaaaaaaaaagcttaggagggaaaaacttctttggtaggaagtagaagacaatataaaagagaatctaaaaaattc

SEQ ID NO: 31296 - DNA, 1045 bp, Homo sapiens
cttgcttagaccaactgttcttcattgctttttcccttcctccctataagataggttctatacctagagtgtagcaataactttgtgatcacgaggctataatcctgaggatgaggtccaacaccgctaaagagaacaggatggaaagatggacagccaggtttttggtaatatttttgagctgggcagctgcactatcctggatagtatcttcttgttttccagataattagtgtcactcttagcggagctttattccatgtagttagaggtattccttactgaaggagtgtcctcaactgattgtatatcttcagggaagacttcccatcaagagtaaaggatgaagacagtatagatttagtgaatgagattagctcataatcagtcaatcaatagagacatatcatccccaatttctggtaatctagcttttatacagccagtttccccttctgacttagaaaaagccaatctgcaaggggatggtagattgtgtcatctctgcccgcatttccttgttatcattaggcctgtctttgtacccagataatcttgaaaagaattcatggcaaatggccaatgcattttcttagaacattatctattatatattgatttaggaaaatacattttggaatgtacaagtgaaggaaattccccatacctgatgacttctattcctctgccaaacagttaatgtaatgaaaaacaaataaataaaaacaatgcaaaacaaaatyggagtgcatgagcataaagatgaaggtttcttccccagaagtgtcatagaggagtgtagtgagttggttcatgaaatttttgagagtatatctctaggtacgcattatcagtatctcctgttaaatgagaaatatttgtcttgttggtttcattcatgagtgcctccttttttcaaatgcataacaagtgttcaggtaaaagtacttgagatgtttgtaagagattgaaaaaaaaagcttaggagggaaaaacttctttggtaggaagtagaagacaatataaaagagaatctaaaaaattc

SEQ ID NO: 31297 - DNA, 1045 bp, Homo sapiens
cttgcttagaccaactgttcttcattgctttttcccttcctccctataagataggttctatacctagagtgtagcaataactttgtgatcacgaggctataatcctgaggatgaggtccaacaccgctaaagagaacaggatggaaagatggacagccaggtttttggtaatatttttgagctgggcagctgcactatcctggatagtatcttcttgttttccagataattagtgtcactcttagcggagctttattccatgtagttagaggtattccttactgaaggagtgtcctcaactgattgtatatcttcagggaagacttcccatcaagagtaaaggatgaagacagtatagatttagtgaatgagattagctcataatcagtcaatcaatagagacatatcatccccaatttctggtaatctagcttttatacagccagtttccccttctgacttagaaaaagccaatctgcaaggggatggtagattgtgtcatctctgcccgcatttccttgttatcattaggcctgtctttgtacccagataatcttgaaaagaattcatggcaaatggccaatgcattttcttagaacattatctattatatattgatttaggaaaatacattttggaatgtacaagtgaaggaaattccccatacctgatgacttctattcctctgccaaacagttaatgtaatgaaaaacaaataaataaaaacaatgcaaaacaaaatcggagtgcatgagcataaagatgaaggtttcttccccagaagtgtcatagaggagtgtagtgagttggttcatgaaatttttgagagtatatctctaggtaygcattatcagtatctcctgttaaatgagaaatatttgtcttgttggtttcattcatgagtgcctccttttttcaaatgcataacaagtgttcaggtaaaagtacttgagatgtttgtaagagattgaaaaaaaaagcttaggagggaaaaacttctttggtaggaagtagaagacaatataaaagagaatctaaaaaattc

SEQ ID NO: 31298 - DNA, 1045 bp, Homo sapiens
cttgcttagaccaactgttcttcattgctttttcccttcctccctataagataggttctatacctagagtgtagcaataactttgtgatcacgaggctataatcctgaggatgaggtccaacaccgctaaagagaacaggatggaaagatggacagccaggtttttggtaatatttttgagctgggcagctgcactatcctggatagtatcttcttgttttccagataattagtgtcactcttagcggagctttattccatgtagttagaggtattccttactgaaggagtgtcctcaactgattgtatatcttcagggaagacttcccatcaagagtaaaggatgaagacagtatagatttagtgaatgagattagctcataatcagtcaatcaatagagacatatcatccccaatttctggtaatctagcttttatacagccagtttccccttctgacttagaaaaagccaatctgcaaggggatggtagattgtgtcatctctgcccgcatttccttgttatcattaggcctgtctttgtacccagataatcttgaaaagaattcatggcaaatggccaatgcattttcttagaacattatctattatatattgatttaggaaaatacattttggaatgtacaagtgaaggaaattccccatacctgatgacttctattcctctgccaaacagttaatgtaatgaaaaacaaataaataaaaacaatgcaaaacaaaatcggagtgcatgagcataaagatgaaggtttcttccccagaagtgtcatagaggagtgtagtgagttggttcatgaaatttttgagagtatatctctaggtacgcattatcagtatctcctgttaaatgagaaatatttgtcttgttggtttcattcatgagtgcctccttttttcaaatgcataacaagtgttcaggtaaaagtacttgagatgtttgtargagattgaaaaaaaaagcttaggagggaaaaacttctttggtaggaagtagaagacaatataaaagagaatctaaaaaattc

SEQ ID NO: 31299 - DNA, 574 bp, Homo sapiens
taaatttctattaatcactttgtaaggtaaaatttattttatcaatgcactttatctaacccaatatattcataatatcaccattttaacatgtaatctctattaaaattattttaaagatattttaaggggtttyttttttggactgtcttcaaaacccactgtgtattttatacttccggcttatctggttatgttttggtaaccatatttcaaggcatcaatagccataaatggttggtggctactgtattgaagagcaccatgaagagccactgacagttttgaatagggctatcacattgtgagggctgtgttttaagaagctgaatctgtcgtaatttccaagatgatttagggaaggaaagcctgaagcaagaggccattcatcgaattatgtaaatgttccaggcaatagtaaaaaaaaaaaccttaaagtgatagaaattgtaattaaatggatatatattaaagactttacaagggtgaaaatctatggaatttgacaaagatttaaaacaagggtgatagagttaagaaatagaagagataacaatgatttaagtttccatta

SEQ ID NO: 31300 - DNA, 574 bp, Homo sapiens
taaatttctattaatcactttgtaaggtaaaatttattttatcaatgcactttatctaacccaatatattcataatatcaccattttaacatgtaatctctattaaaattattttaaagatattttaaggggtttcttttttggactgtcttcaaaacccactgtgtattttatacttccggcttatctggttatgttttggtaaccatatttcaaggcatcaatagccataaatggttggtggctactgtattgaagagcaccatgaagagccactgacagttttgaatagggctatcacattgtgagggctgtgttttaagaagctgaatctgtcgtaatttccaagatgatttagggaaggaaagsctgaagcaagaggccattcatcgaattatgtaaatgttccaggcaatagtaaaaaaaaaaaccttaaagtgatagaaattgtaattaaatggatatatattaaagactttacaagggtgaaaatctatggaatttgacaaagatttaaaacaagggtgatagagttaagaaatagaagagataacaatgatttaagtttccatta

SEQ ID NO: 31301 - DNA, 822 bp, Homo sapiens
actcttttctcatttcatatccttgacacagtgcctttggcctacagctgaaaccagtcctgacttgtcaaaggaattgactgaagccagatagtgcttttttttttttttttttaaatcaaaggatgccacacaaaaactttgagaaactttactctcaggaagtccttaaatgctatgtccaaaataaactaaatgcctcttgccctagcttcagtcatttatttcttcttctgacctaagtggaaattcaaagcagctgataactattatataatcattttcacatatttatttgctgttagcaaagtactccttggttgtcttttttttaaaatgatgaattgttctagttcctttttaagctgtcaccctgaaacaaacacttgttttatttctagaaaataatcccacccatgtctgttgggtggcataagccctgctagatatgcaatggttcagagatgtgttcagaaactccctatacacttttttgtaagaaatatgcatattcctayaacacatctgtaatggttaattttatgtgtcaacttgattaggctaaagggtgcccaaatagttggtaaaacattatttctctctgtttgtgagggtgtttctggaagaggtgagcatttgaataagtagactgaataaagaagatgctctcaccaatgtgcatgggcatcacccaatctattgagggcccaaatagaacaaaaaggcacagaaagggatatatataatgtatgtatgtaaaaatatctgtatgtatgtaaatacaaatatatatgtatatatgttaaatttctccggagacct

SEQ ID NO: 31302 - DNA, 1138 bp, Homo sapiens
acctgccttatcctcccaaagtgctggaattacaggcctagctatgacgcctggccaacttctactgaattttgttgttgytgttgtttgtttgtttgtttggagaccgagtctcactctgttgcccaggctggagtgcaatggtgtgatctcagctcactgcaacccacacctgccgggttcaagtggttcttgtgcctcagcctcccgagtagctgggactacaggtgtgagctaccacgcctggctaatttttgtatttctggtagagatggggtttcaccacgttggccaggctggtcttgaactcctgacctcaggtaatctgcccacctcggcctccaaaagtgctgggattacagacataagccaccatacctggcctttactgagtcttaatctaaacatgatctttttatttttctcttcacctaccctgacctcttttacttccttgaatgtgacttagaacaatatgttccttccttctttccccatgaccaaagcattctgtgcaggctttttatcatttataatattaatattgtaattgtttgcttattgcctctcctccccaagtcaagtgaagaatatgtgtcattcatctttgcacctcaagcatgctgtgacaggtacatagtaggcattcaataaatgtttattgagctagactcccagaaaaccatttactttccttatgataaagatagcaaataagacacaggctgtttcaggatgtgcaagaaaaaaatgttggagcccccaattcatatcacagtttattgtactttaatgacaagataggcagattctgacgtggctccaataatctttgccgcctgatattcatgctggtgggttggacctagtaacttgttcataacagaacatggcaaaaatgatggaatgtcgcctcctagattgttagaaaagaaggtgtgacctctatcttattggcactccctctgtaacttcttggctttgtgtactttgatgaaggaaggtgctatggaactgtctacatgtcaaggaactaaggttggtctcctgtccacagggagctgggaactgaggttctgaatctaacagcccttgaggaactaatcctgccaatcaccacatgagtgaacttggaagt

SEQ ID NO: 31303 - DNA, 1138 bp, Homo sapiens
acctgccttatcctcccaaagtgctggaattacaggcctagctatgacgcctggccaacttctactgaattttgttgttgttgttgtttgtttgtttgtttggagacygagtctcactctgttgcccaggctggagtgcaatggtgtgatctcagctcactgcaacccacacctgccgggttcaagtggttcttgtgcctcagcctcccgagtagctgggactacaggtgtgagctaccacgcctggctaatttttgtatttctggtagagatggggtttcaccacgttggccaggctggtcttgaactcctgacctcaggtaatctgcccacctcggcctccaaaagtgctgggattacagacataagccaccatacctggcctttactgagtcttaatctaaacatgatctttttatttttctcttcacctaccctgacctcttttacttccttgaatgtgacttagaacaatatgttccttccttctttccccatgaccaaagcattctgtgcaggctttttatcatttataatattaatattgtaattgtttgcttattgcctctcctccccaagtcaagtgaagaatatgtgtcattcatctttgcacctcaagcatgctgtgacaggtacatagtaggcattcaataaatgtttattgagctagactcccagaaaaccatttactttccttatgataaagatagcaaataagacacaggctgtttcaggatgtgcaagaaaaaaatgttggagcccccaattcatatcacagtttattgtactttaatgacaagataggcagattctgacgtggctccaataatctttgccgcctgatattcatgctggtgggttggacctagtaacttgttcataacagaacatggcaaaaatgatggaatgtcgcctcctagattgttagaaaagaaggtgtgacctctatcttattggcactccctctgtaacttcttggctttgtgtactttgatgaaggaaggtgctatggaactgtctacatgtcaaggaactaaggttggtctcctgtccacagggagctgggaactgaggttctgaatctaacagcccttgaggaactaatcctgccaatcaccacatgagtgaacttggaagt

SEQ ID NO: 31304 - DNA, 2054 bp, Homo sapiens
tgcacacacacacatttgcaagaagaaaaataggtgaccagaactagtaattgcacataaacctgtcacaccacagcagagcctctgcccctgtcagtggtggcctgcaggtgtcaggcccaccgtagggaaggagcttggagtatgactccaccttgggctgctggatgcacatgatttttacctgaatcactgcttctcagggccagggagtagtctgtggacaggcgaccttctggaggagcagccacaaaaggcccagggctgtctctgctccaggttaacttggttgtgaaaaagaatacaccggaaagctaactagctggaaagctcatcctctaagtgaggaaagtgtcctagcagcacaggaagccatggctgctcttacatacccctctccatttcatgagtctacctttgaatgcctcctcgaggtacccctcccaggctatgacaatggctgtgctaatcaggtctgattcatgagactagcatgctataatgctcaaacaggaggaaaccatgctaacaatatgttcatttattttaaagtctccacttaagtggggtgggttggcctgagcccagggtccctgagagcgcagtcctgtctgtgagggggcctgggagggtgcagggcatctgtactgactgcagacacgatggggtgtgtgtgtgtgtgtgtgtgtgtgtgtgtgtgtgtgtgtggtagagggaggaggatgtgctgggctacctgtgcacacccctctctctcctgcagcccctgcagccgcatgcctgcactccaggaaccaaaagccagctctgtgccagcgtctcccatgactgctcccagatgccttctgtttcagcagttctggctgctcttggctccggatcccttcttgctattcctccttgaatattcccaacgttcaggcttcagtgtccatgccagcccctccctgacccagccccagatgccctagcctggcatggataccaactccaccacagcctctccagtgcatttcatcccactccctctgatgcatcggtggctcctggcttcagagtactatgtcttcatccagggtcttttaacagtgcaacctgaggcagaagcttcagtgctaccaacttactaatgagtgcagcctcagggaaacaggaaggaggagcagtggactgaggtggggaggcagggcgggcagacctgtgtgccatcactgccgggtagcaagtgtcactgctgtgagtatgtccatgtcaggacaggtgagggaaaggagaggaatcgaactccccagctcccctcgggcctgcctctcgctggccagcacctgcctcataggcactgacacgcccctgcccatgcatggcccctgcctgcagcccatggcacacattgcctgccttccaggccaggctcaggagaccaagcctggcggagccagcccagcagcctgcagtggagtcagcagacctgctccagggcctggggcgcctgccctgcagtgaggctgtgggtggaccccttgcttgctttttatggctgcccagggtggaatgcaaagcagagagggctccagaggggctctgaggtggaggaaggatggtctggggtacgatccagaggcgggaggcgggcaaggccctgagacatcgtttagagaagagaagctgacaagggttagaaaagagcctggagtctgagaggagacagggccaagaccaattcatttctgtgaaaaattaggtttcagagcagccctgtacaaagggcaagttcattttatgtttcaccatctgcacttgacgtagttgcaaagtcataaatgcctcaggtctcaatgcgccttccctccgagttcacctcctctgagtcaaacacctctccccacgtagtggccactgattaatgccagtccctaacccctttcctttcctgcccttcaagcacacccgcttgcacgcatatctcccagcactgcccctccctgtctgcacctggagcccaggagaggargcctcagctgagcctgcatctctagggaagaatcctggtcccg

SEQ ID NO: 31305 - DNA, 1340 bp, Homo sapiens
  misc_feature (1)...(1340): n = A,T,C or G
gtacaaatgacagaacatctgtagacataaaaaaacaatgttttcaaaagatactgaatgtcatggaaaaatttattcttatgttaagtgaaaaataggaagataaacatttgtatgtaaggaatcattagaatattgttaaaatgtgtgtatgtccagaagagactagatcactaggttgatgacattagctctgaagagtagaaagtcctgttactatgaggtgctggatccctttattctcttctagacttgtgattttattgttcatccttcccttatattttcaaaagtttctacaatgtaaactttacatttagtaagttacatttagtaagttctacnnnnnnnnnnnnnnnnnnnnnnnnnnnnnnnnnnnnnnnnnnnnnnnnnnnnnnnnnnnnnnnnnnnnnnnnnnnnnnnnnnnnnnnnnnnnnnnnnnnnaaattgcaacgtggtgcctattggggaaaaacttgatctcagggcagtcccctcagaccaaaagtaaactcctctctcctgtctgttgggcagaagtcagaatgaaggctgccttgtctactaccagactaagtagatatattagtttcagtttttgatcctagaatgtcagcagttgcccagatgtaatgcaagaagctgcctggggctgcttttcattcttatttatgcttttaaatacttcagaatatgtaagtataatacttggtgattaggataatttagaaaagactaataagctaaactaagaaaaaaatayttaaactgtgaatcttgtcttccattaatataaggtatagcttgatagtcttaattcaactccatttctttttataaaataatagaacaactgcttatacagtgatggaataaatgagcaatcatgaaattctaggtggtaagacagtctcaattttgttgctttaaaaatccgcatggttgaaaattttggacatttgccttgaattttgaaaaggaaagagctgttcttgacctctgcttgataaaggtttcagacagacgtggaatattcatggtccttgtcctccgctggtacccatgggggtgttgtaatctagaatctgaaagaaagggtatgaggagcatttaaaagccttttccaaattgagtttcttcctggaaattaacaaccatgagggcaaaggtgtatttggatgggctgggcgcaaaacaaggcttttcccactcacaaatctattcctcaggcttcctgatctgcaaagagagaggaagaaaagagagaatgcatgagcaagaaagcccccatatgttgtttatagggcaggccaggaagaggagaaactgttaccggaaag

SEQ ID NO: 31306 - DNA, 1340 bp, Homo sapiens
  misc_feature (1)...(1340): n = A,T,C or G
gtacaaatgacagaacatctgtagacataaaaaaacaatgttttcaaaagatactgaatgtcatggaaaaatttattcttatgttaagtgaaaaataggaagataaacatttgtatgtaaggaatcattagaatattgttaaaatgtgtgtatgtccagaagagactagatcactaggttgatgacattagctctgaagagtagaaagtcctgttactatgaggtgctggatccctttattctcttctagacttgtgattttattgttcatccttcccttatattttcaaaagtttctacaatgtaaactttacatttagtaagttacatttagtaagttctacnnnnnnnnnnnnnnnnnnnnnnnnnnnnnnnnnnnnnnnnnnnnnnnnnnnnnnnnnnnnnnnnnnnnnnnnnnnnnnnnnnnnnnnnnnnnnnnnnnnnaaattgcaacgtggtgcctattggggaaaaacttgatctcagggcagtcccctcagaccaaaagtaaactcctctctcctgtctgttgggcagaagtcagaatgaaggctgccttgtctactaccagactaagtagatatattagtttcagtttttgatcctagaatgtcagcagttgcccagatgtaatgcaagaagctgcctggggctgcttttcattcttatttatgcttttaaatacttcagaatatgtaagtataatacttggtgattaggataatttagaaaagactaataagctaaactaagaaaaaaatatttaaactgtgaatcttgtcttccattaatataaggtatagcttgatagtcttaattcaactccatttctttttataaaataatagaacaactgcttatacagtgatggaataaatgagcaatcatgaaattctaggtggtaagacagtctcaattttgttgctttaaaaatccgcatggttgaaaattttggacatttgccttgaattttgaaaaggaaagagctgttcttgacctctgcttgataaaggtttcagacagacgtggaatattcatggtccttgtcctccgctggtacccatgggggtgttgtaatctagaatctgaaagaaagggtatgaggagcatttaaaagccttttccaaattgagtttcttcctggaaattaacaaccatgagggcaaaggtgtatttggatgggctgggcgcaaaacaaggcttttcccactcacaaatctattcytcaggcttcctgatctgcaaagagagaggaagaaaagagagaatgcatgagcaagaaagcccccatatgttgtttatagggcaggccaggaagaggagaaactgttaccggaaag

SEQ ID NO: 31307 - DNA, 1340 bp, Homo sapiens
  misc_feature (1)...(1340): n = A,T,C or G
gtacaaatgacagaacatctgtagacataaaaaaacaatgttttcaaaagatactgaatgtcatggaaaaatttattcttatgttaagtgaaaaataggaagataaacatttgtatgtaaggaatcattagaatattgttaaaatgtgtgtatgtccagaagagactagatcactaggttgatgacattagctctgaagagtagaaagtcctgttactatgaggtgctggatccctttattctcttctagacttgtgattttattgttcatccttcccttatattttcaaaagtttctacaatgtaaactttacatttagtaagttacatttagtaagttctacnnnnnnnnnnnnnnnnnnnnnnnnnnnnnnnnnnnnnnnnnnnnnnnnnnnnnnnnnnnnnnnnnnnnnnnnnnnnnnnnnnnnnnnnnnnnnnnnnnnnaaattgcaacgtggtgcctattggggaaaaacttgatctcagggcagtcccctcagaccaaaagtaaactcctctctcctgtctgttgggcagaagtcagaatgaaggctgccttgtctactaccagactaagtagatatattagtttcagtttttgatcctagaatgtcagcagttgcccagatgtaatgcaagaagctgcctggggctgcttttcattcttatttatgcttttaaatacttcagaatatgtaagtataatacttggtgattaggataatttagaaaagactaataagctaaactaagaaaaaaatatttaaactgtgaatcttgtcttccattaatataaggtatagcttgatagtcttaattcaactccatttctttttataaaataatagaacaactgcttatacagtgatggaataaatgagcaatcatgaaattctaggtggtaagacagtctcaattttgttgctttaaaaatccgcatggttgaaaattttggacatttgccttgaattttgaaaaggaaagagctgttcttgacctctgcttgataaaggtttcagacagacgtggaatattcatggtccttgtcctccgctggtacccatgggggtgttgtaatctagaatctgaaagaaagggtatgaggagcatttaaaagccttttccaaattgagtttcttcctggaaattaacaaccatgagggcaaaggtgtatttggatgggctgggcgcaaaacaaggcttttcccactcacaaatctattcctcaggcttcctgatctgcaaagagagaggaagaaaagagagaatgcatgagcaagaaagcccccatatgttgtttatagggcaggccaggaagaggagaaactgttacckgaaag

SEQ ID NO: 31308 - DNA, 1060 bp, Homo sapiens
agcgtttacgtatctagcatgtaaatgtctaattgactttatctgaatttgtttgtggcatttcaagattggtggatattattccattcaaatgttctaattaaatagtgataacagtaaaactttatgctgtatcagcaaatccactcttaggtatatacccaagagaaacatatatacccacgaagacataaacaataatgttcctagcagcattacttataacagccaaaaactcaacctaatgatctatcacctgatagatggacaaataaaatgtagtacatccaaacaatcatatattattcagcgatgaaaatgaatgtagtactaattgatgctacaacatggatcagcctcctaaacactaggctaatgaaagggaccacttgcagaaaagcacatattgtataatttcatttatatgaaatgctcagaataggaaaattgatagaaacagattattggctgcatgagatttgatgtgtgtgattatgaaggtgactcaaatggtaaagggtttctcctgaggktgatgaaaatgttataagcttagattatggtaatagttgcacaactctgcgaatatagtagaaaaacggtattgtacaatttaaatgaatgaaattcattttaaatgaagtacattttaacaaacctgtttggaaagtatattgttgataattaaatgattttaaacacttcttttacatctcagctaatgcaattaccattcatttaattatgtgaaatcagtaagttattggattttcccatttttgtcatttttgtcacctcattgttgattttatcttctacacttctcttaatcctgccttcttttctctgcatttacacctccccacaggactaatccctcctttctctgagtttctggttcagaaacctattgctgtgtaagaaatcactacaaaacttacagatataaaacaataaccacttatttactcatgatagcatattgggccagtctcaaaggggaaaaattatttctggtcaattccccagtgttacttagggaagtctggctatagctaaa

SEQ ID NO: 31309 - DNA, 338 bp, Homo sapiens
aaagcaagtggaattaatcaacattctccacacctaccatcactggaacgaataatctcctagcatctcstaccctttctgcattgctccaatcaagactggaagttccaggagcatctgattaaccaagctggagtcacttgcctgcttagtgggtagacaatcccaaaaagaaaatttccagagggagagttaattcttcaaaaggaaattagtgtgtgtgccaaagtaagggaaatgggtgatgggcaaccaaaacagtacatgttcactatcgcaagtgccagctccagaaaatctacatagaaggggtgtagagaagcaatctgattgaaaag

SEQ ID NO: 31310 - DNA, 526 bp, Homo sapiens
tttattttcattaccaggtggaataagatgacaagggcagaggagatagggtatgcaaagacaaggagaagcgaaaatagaactgatagcttttatgtgcacaggcttagaacttgctcctgaacaactactgcctttgcctagtagctcaaatttataaattaagtaatatagagggaatttgcctactacggagaaggccgtccctattcttggagacccacaatcccaaacaagtctgtagattctgctcaaaatgagtggktgcaactataatgtgcatagctggcattaagtaaaaattttaaatgcaagaaaatcagcaaaaactactcaataaaattttcaactgattattgctaataattcttataataggtttaatgagatatagttcacatactatacagttcatccattaaaaatgtacaattcaattatttttaatatattcacacagttgtgcaaccattaccacaatcaatttcagaacattttcatcaccccaaaaagaaaccccgtatcc

SEQ ID NO: 31311 - DNA, 1232 bp, Homo sapiens
gggatccttcgaatattttttctggaagagagtgtggtttgtgatctaattaaatttttagagccggccgtggtggctcacgcctgtaatcccagcactttgagaggctgaggcgggtagatcacagggtcaggaattggagaccagcctggccaacatggtgraaccccgtctctactaaaaatacaaaaattagctgggcgtggtagcgggcgcctgtaatcccagctactccggaggctaaggcaagataatcacttaagcctgggaggtggaggttgcagtgagccaacatcacgccactgtgctccagcctgggtgacagagcaagactctgtcttggaaaaaaaaaatttttattttagaaagagttgggtgagtggattggagaaagaatttgtcatgtgaccaaaaagggaggctgatgtcaatgtccaggtgagagtaaggggacccaaactgagataattgtagtgagtctagaaggtaaaggacagctttaggagatacttagtataattggcatgaccaattgtatagatggctgtagacagggatgggtgggagttatggcacaaaaagtagaaaaaacttgtaagacagtgaacagaagatattgagggtatttttctcagagagaaatgcatgtaaataaaggacttgtattaagtgttctagattgttttctcacctctgaactcctatgatattttgataatttgatttggaaccatgccacttaccattgaactataatttctattctcctggatagtgggaatacaaagatgaatagacagaatccttcatctccagaagctcataatctattggggggggggatggcaatgataagtaaataaataagtgcaaatgagtatgatgggttttcacccaggtatgtgtgaaggacagggatggcagtatgcatttaggacattgcattaagggtctggtgtagaagagtgacatgattagattttgagttttagaaagattatggaagtgtcaaaggtggattaaagtgaggccaatcaagagctggaagaccaatgaggaggcagatgctcagttgaaaaagcagctacaagcaactttgagctacaaggctggccctgtggcactgtggaaaggaactgtgccttctgagttctggagctctcgataagttctagcattgcctcagggatcaatctcattatttaaccttggttttgcctttggtcatttag

SEQ ID NO: 31312 - DNA, 1232 bp, Homo sapiens
gggatccttcgaatattttttctggaagagagtgtggtttgtgatctaattaaatttttagagccggccgtggtggctcacgcctgtaatcccagcactttgagaggctgaggcgggtagatcacagggtcaggaattggagaccagcctggccaacatggtggaaccccgtctctactaaaaatacaaaaattagctgggcgtggtagcgggcgcctgtaatcccagctactccggaggctaaggcaakataatcacttaagcctgggaggtggaggttgcagtgagccaacatcacgccactgtgctccagcctgggtgacagagcaagactctgtcttggaaaaaaaaaatttttattttagaaagagttgggtgagtggattggagaaagaatttgtcatgtgaccaaaaagggaggctgatgtcaatgtccaggtgagagtaaggggacccaaactgagataattgtagtgagtctagaaggtaaaggacagctttaggagatacttagtataattggcatgaccaattgtatagatggctgtagacagggatgggtgggagttatggcacaaaaagtagaaaaaacttgtaagacagtgaacagaagatattgagggtatttttctcagagagaaatgcatgtaaataaaggacttgtattaagtgttctagattgttttctcacctctgaactcctatgatattttgataatttgatttggaaccatgccacttaccattgaactataatttctattctcctggatagtgggaatacaaagatgaatagacagaatccttcatctccagaagctcataatctattggggggggggatggcaatgataagtaaataaataagtgcaaatgagtatgatgggttttcacccaggtatgtgtgaaggacagggatggcagtatgcatttaggacattgcattaagggtctggtgtagaagagtgacatgattagattttgagttttagaaagattatggaagtgtcaaaggtggattaaagtgaggccaatcaagagctggaagaccaatgaggaggcagatgctcagttgaaaaagcagctacaagcaactttgagctacaaggctggccctgtggcactgtggaaaggaactgtgccttctgagttctggagctctcgataagttctagcattgcctcagggatcaatctcattatttaaccttggttttgcctttggtcatttag

SEQ ID NO: 31313 - DNA, 1232 bp, Homo sapiens
gggatccttcgaatattttttctggaagagagtgtggtttgtgatctaattaaatttttagagccggccgtggtggctcacgcctgtaatcccagcactttgagaggctgaggcgggtagatcacagggtcaggaattggagaccagcctggccaacatggtggaaccccgtctctactaaaaatacaaaaattagctgggcgtggtagcgggcgcctgtaatcccagctactccggaggctaaggcaagataatcacttaagcctgggaggtggaggttgcagtgagccaacatcacgccactgtgctccagcctgggtgacagagcaagactctgtcttggaaaaaaaaaatttttattttagaaagagttgggtgagtggattggagaaagaatttgtcatgtgaccaaaaagggaggctgatgtcaatgtccaggtgagagtaaggggacccaaactgagataattgtagtgagtctagaaggtaaaggacagctttaggagatacttagtataattggcatgaccaattgtatagatggctgtagacagggatgggtgggagttatggcacaaaaagtagaaaaaacttgtaagacagtgaacagaagatattgagggtatttttctcagagagaaatgcatgtaaataaaggacttgtattaagtgttctagattgttttctcacctctgaactcctatgatattttgataatttgatttggaaccatgccacttaccattgaactataatttctattctcctggatagtgggaatacaaagatgaatagacagaatccttcatctccagaagctcataatctattggggggggggatggcaatgataagtaaataaataagtgcaaatgagtatgatgggttttcacccaggtatgtgtgaaggacagggatggcagtatgcatttaggacattgcattaagggtctggtgtagaagagtgacatgattagattttgagttttagaaagattatggaagtgtcaaaggtggattaaagtgaggccaatcaagagctggaagaccartgaggaggcagatgctcagttgaaaaagcagctacaagcaactttgagctacaaggctggccctgtggcactgtggaaaggaactgtgccttctgagttctggagctctcgataagttctagcattgcctcagggatcaatctcattatttaaccttggttttgcctttggtcatttag

SEQ ID NO: 31314 - DNA, 539 bp, Homo sapiens
ttgctccaattctgactgtgtcctattctaagacttggaacctcattgggcagagctgccaggaggagcaggacccacatgcagcctccctgtgccctgtctgcctgcgttggcctggtgccctctcaagagagctgttagcagtgcaatttcacatccttatcttacctcatccttcagaggtcatgaatgtttttgtttaaaaagctttgttgatggctaaagcagggcagaktgagaggaagaggaagcacaatatctaatttcagaggggagaagtcacaaggcagacttcctgcccatgtatgttctttgtaagtcaacagaaagtgaggaaaattggcatttttaatgtttaccctttttatttcagtttgctggcttttgactttaattcctcagattgttttatatacaattttctctttctcctattaacatctgaaatattataaggagattagaataaagatctttagtcctgttcttaaaagtctgaaatattttgtaggtcaaagcaacttcttcatatcttttgg

SEQ ID NO: 31315 - DNA, 547 bp, Homo sapiens
tgcactccagcctcggtgacagagcaagactccatctcaaaaaaaaaaaagttatatagtatggggattatcaacattatataataagtttaatgtccagagatgaggttttttaaaaaaatttatttttcattttcatcttttctttccaagacttgtgaatcatagaagtgatgtttttatccccaaactcaaactctttctcatataatctctaagaaycctgttacagctgtaatgtagtgaaactccagtcaacatgagtgtctttcattgaactcagaactgtgctgactcagcatattattacatgaactaattaaataagtgaaggcctgttttgtatttgtcatattttaagtaacttatgatgtgttcattcagttttaacttgaatcaggtgcattaaagactttccagggtttgtatttttcccttctgaacttggagccacaagtgactttttggggggttttcttgagacagggtctcactctgtcacccaggctcactatagcctttgccccccaggctcaagcaattctgc

SEQ ID NO: 31316 - DNA, 572 bp, Homo sapiens
gatcataattaaattaatgctgacacctagtggcaaaaaagaacatctttcttttctaacgttacttgaattgtaccttccaagcaaagacacttccaactccccacaaargattatccatttaatctattcaagaattatccattagccttaagtaaaaaaaatagttccccattactcaaaaatcatatttgcacatgtaaaacggggcagaatcttttcctgggggtgggcagttgtactgaagggactccttatgaaaaatctgagtttgaaattataaatttataaccttaaaaggccagaaaactgcttaaaaattaagaatgcagctgaatatctcacctgacagagatgtcatttattcataagttgtgggatgtgttttaactctagttaggacaggctggttcccccctccccactacatttttttaaaatagtaaaatgatcaacaaacaaataaaactcagtttttctcaacacttacaaaacagaactgtgaatattccaagatttacaaagccattgtctggttgaatggttcaattcaatcaaatgttatatgccca

SEQ ID NO: 31317 - DNA, 572 bp, Homo sapiens
gatcataattaaattaatgctgacacctagtggcaaaaaagaacatctttcttttctaacgttacttgaattgtaccttccaagcaaagacacttccaactccccacaaaggattatccatttaatctattcaagaattatccattagccttaagtaaaaaaaatagttccccattactcaaaaatcatatttgcacatgtaaaacggggcagaatcttttcctgggggtgggcagttgtactgaagggactccttatgaaaaatctgagtttgaaattataaatttataaccttaaaaggccagaaaactgcttaaaaattaagaatgcagctgaatatctcacctgacagagatgtcatttattcataarttgtgggatgtgttttaactctagttaggacaggctggttcccccctccccactacatttttttaaaatagtaaaatgatcaacaaacaaataaaactcagtttttctcaacacttacaaaacagaactgtgaatattccaagatttacaaagccattgtctggttgaatggttcaattcaatcaaatgttatatgccca

SEQ ID NO: 31318 - DNA, 578 bp, Homo sapiens
gtatgcaatggtgaaattttattttggggtaacgatgaccaggcacataacatagatttagaatttgtgggtgaagtggctggagcagaggctgggaaggcagttttagaacagaaatgtaagagcctagatagacactctaaggagttgaaaccctgccttgcagcaaacaagagaccacaattatttttaagcaagtgctttacaggattatcttagtatatttgcatttgtggcttgatttttttcattgtgaaaagaatttacagtttcagtaagaagggacagactttttaaaagaggctctttcttaaaccactgctaatcataggaggtaggaagctgggactatgtgtgtatttaaggctgagatgcaggtcttggctgctccctccrtttatttacattcaccctttgatgacctaaggaaatgaattcatgtgaacttgacagcagaagtgagggagatggaaggcataatttctcatagcaattctacaaatgcctgatgcataaataaatattataaaattggaagcatgttatttctaatgtgccaaaggacagtttcagattgg

SEQ ID NO: 31319 - DNA, 596 bp, Homo sapiens
gaggttaaaatgktttgcttcttaaaacacacgcatacacacacacaccctcgcaacccttttccctaatacacttactgttgagtgtacctccacacacacaaaaataacttttagaggttgaaaagttgattttactggaaaacgttatattcaaattttcttgggcatcttgtgtgatgataaaaggtacaagtacaaaaatagctgaacatcagaaagagtaacatgtttttaagagaaatgtcacatctcgcttatgtcagaaagagaaaaatgtagtaacatttttagtgcctggtagataaccaacaaagcacacacacacacacatacacacacactcacacatgcacaaacaccatttttaaatttaattctcactattaccctatgacctgggggtgtcatctaaaacaaaaatgttcagctttatttgctcataaagataagcatctgtcctgtttgctgtgattaatcaactacaatgtatgaagaatctgagattcagaaaaaagtatataaaaatgaaggttagctatttagtaaatagttgaggcaggacttaaccattcataataataatagttatgctg

SEQ ID NO: 31320 - DNA, 547 bp, Homo sapiens
tgcttccactcttgccctacacaatctattctcccatagcattgagggtgatctttataaaagctagattcgatcgagtttgcacttgaaattaaacctaaatctctcaacacaaagyggcgtttgtctgttttccaacctcatgccacagcactcccactgcccagccagcctggattcctgcctgttcctaacactaggcaagctctttcccacccttggctttgacctttacatatgcagttttctctccctataaagtgttcttcccttctcttcaaataggctcatactcatcctacatatctcagatccccaatgctacctcagagaaaggccttccttgattacctaaagttattatctattatattaccattataggaatgattacttctataggttacatagattttacatcaattataaacatacagcatatatttcttttgtatatgcatatcatcttgattatttttataacccttatgacagcctacaattattttgtttattatttcttattagtccccccaactagactgca

SEQ ID NO: 31321 - DNA, 785 bp, Homo sapiens
gttccattgacaaatctcttttttctgattttgagcttgttgcctccctgttacaaaatcctggttcttatccacccggacaatatgaaataatctaaccatttcaaggtccttaattacatccgcaaagtccattctaccatgtaaagtaacatgtttacaggttctggggattaagtcatgcatatgttgggagacaccattattcagcctcccacactttctgagctaagtatattgatatcactgagtgacttagtgaatgaatgattgaagactttttagcaattcgacaatatttattactaaatccattatgtacttggtcatgtttcatactgttttcagaggatggctaggaaaccagtgtttattctacaaacttgatcctgcttggtctcaaaatgaattttcagttatattaaagtggcagccagttcattgactaccatggaattaaaataagagaaagtggcaagcctattttcatcattctgatgtaaagcatttgactacaataaatacaagcagcaaaataaagacacagatgttcagtggatctgggtctcgactgggccctaatttctcatacccactccccttagcctcttttgcctcagctgactggttcttggcttggtttgcgaggtacacagcaccaattccaggtgaggaattcccagtctttaagtgggggagtagggattggacgggctttgtcatgyagctttttaagccctgtccacagatgcccaaagtgcatgcctcacaattggctggtcatg

SEQ ID NO: 31322 - DNA, 785 bp, Homo sapiens
gttccattgacaaatctcttttttctgattttgagcttgttgcctccctgttacaaaatcctggttcttatccacccggacaatatgaaataatctaaccatttcaaggtccttaattacatccgcaaagtccattctaccatgtaaagtaacatgtttacaggttctggggattaagtcatgcatatgttgggagacaccattattcagcctcccacactttctgagctaagtatattgatatcactgagtgacttagtgaatgaatgattgaagactttttagcaattcgacaatatttattactaaatccattatgtacttggtcatgtttcatactgttttcagaggatggctaggaaaccagtgtttattctacaaacttgatcctgcttggtctcaaaatgaattttcagttatattaaagtggcagccagttcattgactaccatggaattaaaataagagaaagtggcaagcctattttcatcattctgatgtaaagcatttgactacaataaatacaagcagcaaaataaagacacagatgttcagtggatctgggtctcgactgggccctaatttctcatacccactccccttagcctcttttgcctcagctgactggttcttggcttggtttgcgaggtacacagcaccaattccaggtgaggaattcccagtctttaagtgggggagtagggattggacgggctttgtcatgcagctttttaagccctgtccacakatgcccaaagtgcatgcctcacaattggctggtcatg

SEQ ID NO: 31323 - DNA, 525 bp, Homo sapiens
tggtcatattgccacttctgtaactcttttgctacaaattttgycccttggtctaatgtgacattatgtgctatgttagtttgctagggctgtaagagagaatcagtttcctgcctatcacttagcttctagtggtttgctggcaatctttagagttctttggcttgtagaagcgtcaccctaattcttgctttttatcttcacccggtagtctccctgtgtttatatctgtgttcaaatttcccttttttataaggacaccagtaatagcagtaatattggatcgggggccaccggactccagtatgacctcattttaactaattacatcttcaatgaccataatttcaaataaggtcacattctgaggtactaaggtttagctcttcaacatacttttgtttggggggagggggcagaatttagtccattacatgaagcatcctgggcttgcggatcaaatactccacaagtctttggagatttgtgctggccaaagctctacacgcaagaaacacaagccat

SEQ ID NO: 31324 - DNA, 550 bp, Homo sapiens
ctgttattcagcaaggtgtggcctctaaccctgccattctgtctcttttccctatagctgtactgattccacagtggataagacattctcctctcaagaactcatggttttggggtgtgtcagtgggatatcaagtaaagtgaacagcttttggagacmacaaaaggggcaaggtttatttctttatctatgatggatatatagatttgatagtttttaaaaatggctaaactgaactactcgtgagcttttttttccatttttcccatcccctgggagcccactgagcagctccctccctgccttatctcaccagctataataatgagctccagggggaccttgctactgcctttgaagtaacacatttctctgaatgtctttgaaatttctcttcgtacattgtttgtttctggtttactctgtcttcttgtagaggggggtctgacagttgttgcagggagggggaggtccaggatgacagctcaggaatgtgtaaattgaacaaaacaaaaacacaaacaaaacaaaataagaaagaaagagagga

SEQ ID NO: 31325 - DNA, 1016 bp, Homo sapiens
acatagtattcttaggtcggtgcaaaagtaattgcagtttttgccattgaaagtaatggccaataatattacgtgataatggccagtagtattatgtgattacttctaataaaatttcctcacaaaaagtgcttggttaattaaattttgtatgctgtagggttctaacaatttcagaatccattgattcagaatttatgacattttaagcatagcacacctgagtcttattgggtttttaaaagggctgctgatcaaccccctagtgtttattgacatttacttgtccagaactcaaacaaccactctctgggttagaagacaacttctgttctcagagagcctacatcttcattgacgagaaaagtcttactcatatgaaaacacaagaccaagagaacactatgttgagctgccattgcaaaggtttcagaaaagaaaaataaaattgttatgggctggagaactgaatcctgaccccgatttttacatgctaaaagcaataagaagaggaaagaaaagaaacccaaaaagagcaaaaatggatgttctactccatggtttcacattttatgaaaagcagaaatggaagaaaatccaggcaaaaggtgatgtcaaatgggggtaacagaatcggcaaaaagtggaaaggatgctgggaacagaagaaacatttacgacgctctttaaaaaaatatttacggagcacatattatgtgccagacactatagtaggtgttacagattaaggtcaataagatagacatggcctggtcctcatggggcttaagtgagtggaaggggcaataaccaagtaaacaaataaataggcctaaaactataaaatatttagaagaaaacgtagaaataaatctttgtggcgttggttcaggtgatggtttcttagatacaacaccaaagcacaggcaacaaaagaagaaaaagatataytggagttctcaaaaaattaaaaatgtttgtgcttcagagcacactacaaagaaagtaaaaaccca

SEQ ID NO: 31326 - DNA, 580 bp, Homo sapiens
tgagctctaataataatataagaacacttgaccataatttgactatagtaaaattttttaacattttccgaagtcatgtagacaaattttctgagtatttctaatgagtttgcaggaaggaaataaagttagtagagtgagtctactattatcattaaattaaacttagatactttctaacacactcagttatttttccttctaataaataagtaaaatgtcagaatttcatccataatatcttgtggtcaaacagtggttattatgaaagactactttagmagtcttaagtataactaataaagcagagacttttaatatatttgactttgtcagtctgacagtgttatatactagcatttgaatatagttacatattctacatttcagaagctacactctaagagatagaatgcctcacaggaagatagctcatagatacaaccttcctgtttgcactagttcatgataagatgtttgcaattatgatattctcaagtagcattttggaaatgactttattatgacattttaaataacttttaagaaaaaatctaatttatagtttgatcctttgtac

SEQ ID NO: 31327 - DNA, 523 bp, Homo sapiens
actgcctcggcgtgcagttgggctctccattgaagccacgggatcagccctgcttctgcctcccactagcagcatgagctgggacragccacctaatttgcaccctctccccgcttttaaccctactgccatgatgcagtagggttaagagtggggagaagatgcaaataactaccgagccttgcacatagccggcgctcagttacgggagttgctatactagattattgtttattggccgcggtggctcacgcctgtaatcccggcactttagggtgctgacgcgggcggatcacctgaggtcaggagttcgagactagcctggccaacatggtgaaaccccgtctctactaaaaacacaaaaattagccaggtgtggcggcgtccgcctgtaatcccagctactcgggaggctgaggcaggagagtcacttgaacccggatagcagaggttgcagtgagccgacatcgtgctactgcgctccagcctgggatgacagagcaagactcagtctaaataaata

SEQ ID NO: 31328 - DNA, 587 bp, Homo sapiens
ccctgagcaaatgcctgctggctccatggtaaacatgggccttttaataggctggagacagtgacattcggaagaaacaacatgtcgacaatttccttaataaattttgtacgaacacattatttccacctaatggaaatgtagctctcttaaataattgagaggctgtattcatcagtggtgagttcagctggaatctttgtgagctaaggcagccgaaagccccttggaagactgggtaattgataytttgcacaagtggctggaccagttttcagagtatctgtgtgacattccctgcagcccccttggacagctctcctctgtccaagcagtcacaaagcagctctacactggaagctccagttgcagccactgcactgccacgactaagggttagtaattaatcctttttaaaatgggagccaactcaggccatttccccttgctgtggtttcttactgtgtctgctgaccggccactgcattagcacacaaggtcttgattttaataaagagtgatgatattgaatgttcagcatgtagcacatttctgtgtgccagatgatagtagcatgctgctgaaaa

SEQ ID NO: 31329 - DNA, 606 bp, Homo sapiens
ataaaagccttctttggaccgtctcggactagttagctttgctagcaccaacatggtaccttgtaattgccttcattacagcacttatcacacctgatcatattcacctgattgtcttctcktccccctttgatactgagtacaggagcaatgtctgatatttcttaccactataaccctagactccagtatccagcacagagctgacaccaataagggaagtgaacattttttttaaagaactcttcgttggccagtcgcagtggctcacgcctgtaatcccagcaatttgggaggccgaggccgatggatcacctgaagtcaggagttcgagaccagcctggtcagtagagtgaaaccccatttctcctaaaaatacgaaaattagctgggcatggtggcacacgccatagtcccagctactcaggaggctaaggcacaagaatcacttgaaccctggaggtggatgtttcagtgagccgagatcacaccactgcactccagcctaggcgagagagactccatctcaaaacaaaacaaaacaaaacaaaacaaacacctcttcatcaaaggaatgagaacacaagccatagactgggacaaaat

SEQ ID NO: 31330 - DNA, 606 bp, Homo sapiens
ataaaagccttctttggaccgtctcggactagttagctttgctagcaccaacatggtaccttgtaattgccttcattacagcacttatcacacctgatcatattcacctgattgtcttctcgtccccctttgataytgagtacaggagcaatgtctgatatttcttaccactataaccctagactccagtatccagcacagagctgacaccaataagggaagtgaacattttttttaaagaactcttcgttggccagtcgcagtggctcacgcctgtaatcccagcaatttgggaggccgaggccgatggatcacctgaagtcaggagttcgagaccagcctggtcagtagagtgaaaccccatttctcctaaaaatacgaaaattagctgggcatggtggcacacgccatagtcccagctactcaggaggctaaggcacaagaatcacttgaaccctggaggtggatgtttcagtgagccgagatcacaccactgcactccagcctaggcgagagagactccatctcaaaacaaaacaaaacaaaacaaaacaaacacctcttcatcaaaggaatgagaacacaagccatagactgggacaaaat

SEQ ID NO: 31331 - DNA, 606 bp, Homo sapiens
ataaaagccttctttggaccgtctcggactagttagctttgctagcaccaacatggtaccttgtaattgccttcattacagcacttatcacacctgatcatattcacctgattgtcttctcgtccccctttgatactgagtacaggagcaatgtctgatatttcttaccactataaccctagactccagtatccagcacagagctgacaccaataagggaagtgaacattttttttaaagaactcttcgttggccagtcgcagtggctcacgcctgtaatcccagcaatttgggaggccgaggccgatggatcacctgaagtcaggagttcgagaccagcctggtcagtagagtgaawccccatttctcctaaaaatacgaaaattagctgggcatggtggcacacgccatagtcccagctactcaggaggctaaggcacaagaatcacttgaaccctggaggtggatgtttcagtgagccgagatcacaccactgcactccagcctaggcgagagagactccatctcaaaacaaaacaaaacaaaacaaaacaaacacctcttcatcaaaggaatgagaacacaagccatagactgggacaaaat

SEQ ID NO: 31332 - DNA, 606 bp, Homo sapiens
ataaaagccttctttggaccgtctcggactagttagctttgctagcaccaacatggtaccttgtaattgccttcattacagcacttatcacacctgatcatattcacctgattgtcttctcgtccccctttgatactgagtacaggagcaatgtctgatatttcttaccactataaccctagactccagtatccagcacagagctgacaccaataagggaagtgaacattttttttaaagaactcttcgttggccagtcgcagtggctcacgcctgtaatcccagcaatttgggaggccgaggccgatggatcacctgaagtcaggagttcgagaccagcctggtcagtagagtgaaacyccatttctcctaaaaatacgaaaattagctgggcatggtggcacacgccatagtcccagctactcaggaggctaaggcacaagaatcacttgaaccctggaggtggatgtttcagtgagccgagatcacaccactgcactccagcctaggcgagagagactccatctcaaaacaaaacaaaacaaaacaaaacaaacacctcttcatcaaaggaatgagaacacaagccatagactgggacaaaat

SEQ ID NO: 31333 - DNA, 542 bp, Homo sapiens
tgtgacaagtgctrtagttctatttactctgtataaagcgcaactggaaaaatttactattaatagggtaaaagaatatgcaaataataaagaaaatatatgtatggctattttaaattttcagcacatttaaattgcatatgtcactttatattgtgtataaaccatataaaagaaaacccaagccaacttttgtaaacattaagtcccagccaatcatttccctttcaccacatttttgttgaacaaaatgtaactgcttacttcagactgcttgtttgacaacaagaatagtttattggagaaaaaaatgctggatttgggataaatatgatctatactcacagtttaccttcccaaacctctttttctatatattaacaattttctgttcctgctactaaactttattttttaaaacagtttaagtttaaaatgcagcacaccaacatggcacatgtacacatatgtaacaaacctgcatgttgtgcacatgtaccctagaacttaaagtataataaaaaaaaaagcaatttgcaaga

SEQ ID NO: 31334 - DNA, 511 bp, Homo sapiens
aaaataaaataaaataaaataaaaataaaaataaaataaaataaaataaaataaaataaaataaaataaaataaaataaaataaaatatgtattkagtgcctatgccaggcatggcactgaactcgtggatcttagaatttaggggatgggggtgacagaaatgaatcaagtaagtaaaaatcaatgtatactttaaactttagtaagtgcttttgtcaaaggagaagttctaagtgttgaaagaatataggggaatgctttcaaggggtattgatctttgagctaagactgaatgatgagtagagattgattatgcaaaggactgggttggaagaacatggaggtgagagtgagaagctgtgaaggcagaaaactgaggcataaaaagcacacataagtgaagaacttgagtggatagtaggtacagaaataaggaggaatgttgagcttggatagctggacaagaccatatcattcaagaacttaaggaatattttatagttgccagtc

SEQ ID NO: 31335 - DNA, 511 bp, Homo sapiens
aaaataaaataaaataaaataaaaataaaaataaaataaaataaaataaaataaaataaaataaaataaaataaaataaaataaaatatgtatttagtgcctatgccaggcatggcactgaactcgtggatcttagaatttaggggatgggggtgacagaaatgaatcaagtaagtaaaaatcaatgtatactttaaactttagtaagtgcttttgtcaaaggagaagttctaagtgttgaaagaatataggggaatgctttcaaggggtattgatctttgagctaagactgaatgatgagtagagattgattatgcaaaggactgggttggaagaacatggaggtgagagtgagaagctgtgaaggcagaaaactsaggcataaaaagcacacataagtgaagaacttgagtggatagtaggtacagaaataaggaggaatgttgagcttggatagctggacaagaccatatcattcaagaacttaaggaatattttatagttgccagtc

SEQ ID NO: 31336 - DNA, 557 bp, Homo sapiens
catttacatgtgcattgtctgtctccaccttcaaggcagggactgttttgttcactgctgctttcccaaagcctggtatatggtaggtgctcaataaatactcattgaatgaattcacttattgcctcatttcctcactgtgtaacctcaggcaaataacttctctgggcagttggcaagcaggctggtggatggctgttcctgcagggtctcactcacatagttgttagttggccagctgtctgtggggagacggaggtaactgagccacatgtctttcatcctccagcaaagtagcccaggtgatcacataggttgaatagcagcaagaaggcaagctcctccttctcttctgcttgtgtcatgtttgctattgttccattggccaaagcacatcatgtggcccttcccagagtcatggtgagaggtcacagtcaaaaggcaagcatacagggaggcgtgcacaaatcgggggccacgattacracagtctaccccaacagctaatttcagaagagaggactagcttaagtgcagcaaagttgggaggtggcaag

SEQ ID NO: 31337 - DNA, 1222 bp, Homo sapiens
ttattataatagtaactagtgcctatattagttaagatataattttgcctttaattaaccattccttaaacaagrcagaagcttattcctctatcatagaccagtccagaagtagagtggcagctctctgccctatgggattgtcccaggggccccagctccttctcttgttgttccaccatccttgagtaatgtcctctctgtgtggtccagagtggcagatcatggtccatatttcagtcaggaggcagaggggatacaggagaagccagagtatgccaagggaagcaccttgagaattgcacaggatgcttctgctcatatcccattggctaaaacttagtcttgagtcctagctccaagggagactgggaaatgtagtcttcattctgggaggtactatgccccactaaaaatccagagctgtattaagttgagttaggggaaagcgaatatgggggagacggaccaatccctactacagtactattggaatattatttagaacttgaaaattgctaataaaattatttcaaaagaataaataggcaggcacacaacatattttttaagaaaagtgtttttaaattgccatattctctctttttcttttttttttttgatgtaacacttctgcttttaatgtaactttctttttaaacttttttattatataaattttaaccatacacagaagtggggagaattgtgtagtgagccctagacccatctcccaggtttagtaagttatcagcttaaagttagttttatctattctccctggccctccacttatccccttcctgagttcttgaagcagatctcatttttgctatttgatctgtagatatttctgtatgtagctctaaaaggtaaaaggtcctttttaaaaaaaataaactttaaagtttaggataattgtattcacatgcggttgtaaaacataatctggagagattttgtgtatgctttactcattttcccccatgatagcatcctgcaaaactatagtaccatatcacagctggaatctgacatggatacagtcaagatgtagaacatctccatcctcacaagagtccttcgtgttgcccttttatagccatatctacctatctacctccccttccacaacccctgacactcactagtctgttctccctttctataattttgtcattttaagaatgttaaaaatcagccgggtgcagtggctcatgca

SEQ ID NO: 31338 - DNA, 1222 bp, Homo sapiens
ttattataatagtaactagtgcctatattagttaagatataattttgcctttaattaaccattccttaaacaagacagaagcttattcctctatcatagaccagtccagaagtagagtggcagctctctgccctatgggattgtcccaggggccccagctccttctcttgttgttccaccatccttgagtaatgtcctctctgtgtggtccagagtggcagatcatggtccatatttcagtcaggaggcagaggggatacaggagaagccagagtatgccaagggaagcaccttgagaattgcacaggatgcttctgctcatatcccattggctaaaacttagtcttgagtcctagctccaagggagactgggaaatgtagtcttcattctgggaggtactatgccccactaaaaatccagagctgtattaagttgagttaggggaaagcgaatatgggggagacggaccaatccctactacagtactattggaatattatttagaacttgaaaattgctaataaaattatttcaaaagaataaataggcaggcacacaacatattttttaagaaaagtgtttttaaattgccatattctctctttttyttttttttttttgatgtaacacttctgcttttaatgtaactttctttttaaacttttttattatataaattttaaccatacacagaagtggggagaattgtgtagtgagccctagacccatctcccaggtttagtaagttatcagcttaaagttagttttatctattctccctggccctccacttatccccttcctgagttcttgaagcagatctcatttttgctatttgatctgtagatatttctgtatgtagctctaaaaggtaaaaggtcctttttaaaaaaaataaactttaaagtttaggataattgtattcacatgcggttgtaaaacataatctggagagattttgtgtatgctttactcattttcccccatgatagcatcctgcaaaactatagtaccatatcacagctggaatctgacatggatacagtcaagatgtagaacatctccatcctcacaagagtccttcgtgttgcccttttatagccatatctacctatctacctccccttccacaacccctgacactcactagtctgttctccctttctataattttgtcattttaagaatgttaaaaatcagccgggtgcagtggctcatgca

SEQ ID NO: 31339 - DNA, 507 bp, Homo sapiens
cctccaatctcagcctcccaaagtgctgggattataggcgtgaaccactgtgcctggccaggagttgattttaatagcagcttgagacaatcaccattagaaaggcagaagagcatattgcttggaaggattgctggactggacgatgaggggacttcgtttctawactcagctgtgccgataactgcgacctcccgacaatatctagcttctctggggcttgtctttggttgtcaaatgagaacttgggcttgagatacaatcttgaaaactctttctggctctcagtctgttattggctacaagaaaataataatatgtctctatgaacataacgtacgttattttccaagtatgtcagaatcaaaagcaaggctggcctgatgctcagttgttaagcatatgtccttgtgttgctgttgcccaggagccaggctcatccaggtgtggctggaagatgggggttttcgtgtccatagctggctggaggggccaacagccatgcac

SEQ ID NO: 31340 - DNA, 507 bp, Homo sapiens
cctccaatctcagcctcccaaagtgctgggattataggcgtgaaccactgtgcctggccaggagttgattttaatagcagcttgagacaatcaccattagaaaggcagaagagcatattgcttggaaggattgctggactggacgatgaggggacttcgtttctatactcagctgtgccgataactgcgacctcccgacaatatctagcttctctggggcttgtctttggttgtcaaatgagaacttgggcttgagatacaatcttgaaaactctttctggctctcagtctgttattggctacaagaaaataataatatgtctctatgaacataacgtacgttattttccaagtaygtcagaatcaaaagcaaggctggcctgatgctcagttgttaagcatatgtccttgtgttgctgttgcccaggagccaggctcatccaggtgtggctggaagatgggggttttcgtgtccatagctggctggaggggccaacagccatgcac

SEQ ID NO: 31341 - DNA, 507 bp, Homo sapiens
cctccaatctcagcctcccaaagtgctgggattataggcgtgaaccactgtgcctggccaggagttgattttaatagcagcttgagacaatcaccattagaaaggcagaagagcatattgcttggaaggattgctggactggacgatgaggggacttcgtttctatactcagctgtgccgataactgcgacctcccgacaatatctagcttctctggggcttgtctttggttgtcaaatgagaacttgggcttgagatacaatcttgaaaactctttctggctctcagtctgttattggctacaagaaaataataatatgtctctatgaacataacgtacgttattttccaagtatgtcagaatcaaaagcaaggctggcctgatgctcagttgttaagcatatgtccttgtgttgctgttgcccaggagccaggctcatccaggtgtggctggaagatgggggttttcgtgtcyatagctggctggaggggccaacagccatgcac

SEQ ID NO: 31342 - DNA, 594 bp, Homo sapiens
cttccctttctcagtacatcatgctttatctaactagatagaatctaatctttgtgcttctcctcctttctaggtaacttcagggcagggcccagctctgtgccaccatccagagccttgtgctgtaagggtttctttgctagtgggaaagaaatggaattactaaaggtgaattacaaagctaaagaaatctcaggccaggcgccgtggctcatgcctgtaaccccaggactttgggagactgaggcggggggatcacctgaygtcaggcgttcaagaccaacctggccaaaatggtgaaacccctaatacaaaaattagctgggtgtggtggcgggtgcctataatcccagctactcaggaggctgaggcaggagaattgtttgaaccctggaggcggagtttgcagtgagccgagatccccactgtactccagcctggacgacactacgagattctcgcagaagaaaaaaggaaaaaaaaaaaaaaaagctaaagaaatcatctcagtgctcttgccatgacagttaagtcaaatattaaagcaggaaaggccaggagcgatggctcatgcctgtaatcccagcactttgg

SEQ ID NO: 31343 - DNA, 1198 bp, Homo sapiens
ctttcataattccagtggatgagattgtatttaggccagacacctcacacacaaagaactaggagttaattaaaccagggctggatcatggttaacatttttcaaatgtttgagtttaagatccaggaaagatggaaaaattgttcttttatttagtccttcatccatttgtctgctcatacatcccttatttagtaataccttaagtacagaaaggacctgggtgaattacgctaatggaagaaatgaatgagtttgtaatagagcagcaaccttgggatgggagaggtctgcagggggctcaatttcaagccaaaactggccctaggaaacgaccactagagcagtgttttctcacttgcctgccagctggtgaggcagccaaatcactggtcggcagcttggtatttggcagtctcttgaagtgacgcctggagaaatatggtggatgattgacttaggtgaaaaccttttaggtaaaaataaggcatgtcaatttaatgagaccagctttgtgtgtatgatttataaagtgaatttgaaggtaattttaaaagattagtttcagaagaatcggtggaaaaaatwtctcaaacaccaagatatacttgacatgtaaactcaaacctaaatagtagtattacccagggttcttgatagcaagcaatggctctaatataaaaaggaaagaaagagagaaaggaagggagaaagagaaaggagagggaagaagaactgaaacgacattagcaagcacatcacgttgatgaggagtcaagaaaaccagactgggaaaagggcagggcccagggcagctctagagagctcagctgcaggtcggcagccgaagtcactctacagaagcagtgtagctaggaagctgcagccagcacagatgccataccacgtaatgtagcttctgctacccctgaactgtagctcccaaagcaccacaagatttgatctgagatcacccatggtgtctagtgtcctgaggtcagtgagcttaaatcggaatgactctggtatggtgtcatgcccagccctggccatccagggtagatgaaggcactcctccatgtctgtggagggaggcagatgcccagaagtaccctactgccaagtgcctgccccacaccccacaggtcagagtaggagtcaccctcaagaaaatgagagtgctttggggaagggagat

SEQ ID NO: 31344 - DNA, 602 bp, Homo sapiens
ctgtatgaaccttcctgacacactgcacctttagtttttggcctccagctgtcaaacccagaatgcccttatgcctccaagggttttgagataattgaatcaacagtatttaagtgctggcattattttgattcattcttccttctaatatgtagctgttcactcattccaatttaaatatygggatttaaccataacatgttctctgtggggtgctctgaattttcctctacactgacagtccgctgaaagctctagtaagcctctcaggctctcagcttccatttcagaatcagtacctgcttctaagagtaagtgccagtccttctcaaggtctcatttgtacaaatgctttactagacggtagttcacacattattttaaagacaagtcgtgtgtctttaaatgtgtgtttcccatcctacttcacactgaaatcctgacttccaatttcattctgagcgttatgtgaaaaatcacagttttcttacttgacacccatcagagttagtcaaatctcaccaaacttctagccgtatatgtgcacaattgatatatacagcaaatgaaaagctcagatggaccaagtaaacattgggcta

SEQ ID NO: 31345 - DNA, 322 bp, Homo sapiens
  misc_feature (1)...(322): n = A,T,C or G
caaaccanacccttaaatggtttgtcaatggaatgctttattacacagaaagtaataaggtattatttttccctctgactatgaaaaaggagatgtccacaggtccatgtataaactcttaggatgctacactaacwtaaccagaaggatctgggtttatatccaggttctgctaatgtctggtagtgggcttaaacgcgggcgtaaaatggacataatactttattttgcatgaaagttatgaaggtgaagttatatatgtgtgtgtatgcgccaaagttaatttatatatatgtgtgtgtgtgtgtatatatatatatat

SEQ ID NO: 31346 - DNA, 322 bp, Homo sapiens
  misc_feature (1)...(322): n = A,T,C or G
caaaccanacccttaaatggtttgtcaatggaatgctttattacacagaaagtaataaggtattatttttccctctgactatgaaaaaggagatgtccacaggtccatgtataaactcttaggatgctacactaacataaccagaaggatctgggtttatatccaggttctgctaatgtctggtagtgggcttaaacgcgggcgtaaaatggacataatactttattttgcatgaaagttatgaaggtgaagttatatatgtgtgtgtatgcgccaaagttaatttatatatatgtgtgtgtgtgtrtatatatatatatat

SEQ ID NO: 31347 - DNA, 940 bp, Homo sapiens
cctcttcctgctccagttgctggccgaccacgtccctggcgttggcctggtcacaagtaagcagggatggggacgcgatgactgtagtgctggaaggcgcatgcatgcaagcacctccctgactcctctgtctccttgcaatttgattcttggcacagtcaggagaggaagtcgggaagtcaggattgggtgggactgcccctgggcataggccagggtggcctgaggagccagggatggctggaaggagggtgtccaytggtggggggaccacatcagctgccagcttttttctggtcacagtatcctggagcgatacgggaccatctcatcttggggggattcaatggcagagaaggggtccaccgggctgctgagatcctccctcagcagaggcccactgggcttgggttgggtgactggacctgactcaggcccctcagtgtctaccctggctgagcttctctgggcctgagggtctttgtaaatggtgccagagtcccctgcagtgctgcctcctgggggcagggcaagacagccagctgggctggctcctgggccgcaggggtgaggtgctgtatgtggcgccacagtgcagattggggtctggcctgccctgatgtgtccctctcccactgcagggccgctcatggattacttgcccacctggcagaaaatctacttctacagttggggctgacagacctcccggaaggagggtgtggggaggggtggggcagggagcccctcttccctaataaaactgactccggcagcgtcccagcgtgcggcctctccgtgcctaccggccaggccccacacacagccctggtcgccaccagcgttcctcccaggacacccttgactgcgctctcctgtgacgatgccactgcagcccgcaccttgtcactgctgggccaagaagccttcactaggagtg

SEQ ID NO: 31348 - DNA, 1014 bp, Homo sapiens
agcctgcctctttgcagccctctaagtgctgagaacgaagctggctcccagtgagttctcaggacacctgttgactggccgctcaaccctaagtgggttccccatttccctctggttcctctaccagccactctccaccaggtaatgacagcaaagctgacctctgaattacaaatctggtctggtcactcttcccagctcaaagccctttaatagcttcccctggtccttaggagaaggggcccaaattctcatctgtggcctgaaggctctgtaaagcctcctttccctccaaccagtatcatttcccttcattccccccacctcccacctttatctcctccttcaatagcgcagctcccaaagcagtagcatggtctcctctgcaagccttctctgacctctgggaccaagccaaaccgccctgctatgggctctcggagtccctcctggctgtggttccgtatcactgtaattttacctttgggttatgcggcccgcggtggcctccccttggagtcagttaatccatatgggtgggatcatatctgttttgatcaacatgtgtggtgcctaataggtacttgacaaatgctgaatgaattaaccacaggtgtcccagggctctctggatttttgccttggaaatctctaagttagtccacttttccaatcaacttcctgtgtccccacctacaccagagtctgggctaggatgtcaggtcctctgggaagacggtgctggctgaaacggtggggtggggatgagccagacccagcatccctctcaggccctcgctctacccccaccacctggctctgggtgaacatggggttgggctgggtttgttctttgggtcagaattcccttcctgaccacctccatacggrggtcatctccaacgaaaactgaatccaaccaaagaaatgagccccgagggacaaccccacttgcggttataacatgtttgatctgtttaaacatcttcatgctgatacattgcaagaactctg

SEQ ID NO: 31349 - DNA, 765 bp, Homo sapiens
tgtgtcatttctggaggcttgtctgggatctgtgcaagggtaagagtggacctcttacactttcatttctgaggcttcttgccttcacattttttttccaaaaacggatraagcactgggcgtctgtcagccagttaagagcgaatggcacagctgcaaaggacaggcttgctggggaagattttgtcaagcctctgccatcaccctcgggtactgggaatgttggctttgtttcaatccagtctcccttcacagaggtctagccaatgcataggatcggaataaggtcctcgggcaactgaaggcatctggctgaggctacacctcagtgttacctgaaggctcctggactggccccaatccccaacagcccgttcgggtgtcagtcaagacctccagtctttcctatagcattttctttctctcttcctggctcctatctcttcttcatacacaacgttaagggtgttgctgcaaaccacagtgataatattattgagtggaatgagcattttgcttagtcatcagcagtgtaattcagaacaacttggtttttgtctgttcttagaagcaagaaggatgcaatgactgagagttttctttcccctgttgaaggaatccatttgcattgggcaagaggttatttccctcaggcaacttcccctacctgcgtttaagttgtttccgcccccgcaatcatgtcaggagtcagcacagtcctatgactacagggagctttgctatgtaagagactgatttttttcc

SEQ ID NO: 31350 - DNA, 765 bp, Homo sapiens
tgtgtcatttctggaggcttgtctgggatctgtgcaagggtaagagtggacctcttacactttcatttctgaggcttcttgccttcacattttttttccaaaaacggataaagcactgggcstctgtcagccagttaagagcgaatggcacagctgcaaaggacaggcttgctggggaagattttgtcaagcctctgccatcaccctcgggtactgggaatgttggctttgtttcaatccagtctcccttcacagaggtctagccaatgcataggatcggaataaggtcctcgggcaactgaaggcatctggctgaggctacacctcagtgttacctgaaggctcctggactggccccaatccccaacagcccgttcgggtgtcagtcaagacctccagtctttcctatagcattttctttctctcttcctggctcctatctcttcttcatacacaacgttaagggtgttgctgcaaaccacagtgataatattattgagtggaatgagcattttgcttagtcatcagcagtgtaattcagaacaacttggtttttgtctgttcttagaagcaagaaggatgcaatgactgagagttttctttcccctgttgaaggaatccatttgcattgggcaagaggttatttccctcaggcaacttcccctacctgcgtttaagttgtttccgcccccgcaatcatgtcaggagtcagcacagtcctatgactacagggagctttgctatgtaagagactgatttttttcc

SEQ ID NO: 31351 - DNA, 1992 bp, Homo sapiens
tggctttgctgtgtactggctttgggaccttaagaaagtgacataagttctttgagcctcagtttctcatctgtaaaatgggaagaatattgcctatgttaagcattgatgtgaggatttaaataaataattcatttagcacagttcttggtagataaatgacaatgcatactgctagaggatgtagtaaaaatacaggcacaaagtgccgtatatcatcaccatcaaaatcatcatcatcacagtaacaacctcaagctcatattgtgttcaggctgtttaagaatttcccttgaactcacatttaatcttcaaacaacccaactgttattagccttatttaatagatgagaaaacagagagaattagacagactgaaacctacaaaggctaagtggtttgccaaggacaaatagcaagatagtgccaaagtcaggcccaggtccaaaccttccaattcccaggccaatacacttgccaagcaagtttcatctcctctgacaccatatatctatcaagaaaatgggtgtgaagtgaattcctgcagtccagcatctacaaagtattctggggaagttaattggggtcttcggaaagggttctgtgatagagtacaattgggaaatrttcctggataaggcaggattagaaaactctttacccagccgggcgctgtggctcacgcctgtaatcccagcactttgggaggccaaggcaggtggattcacctgaggtaaggagtttgagaccagcccggccaacatggtgaaactccatctctactaaaaatacaaaacaaaattggccaggcgtagtggtgggcacctgtaatctcagctacttgggaggctgaggcagaattgcttgaaccttgaggtaaaggtttgcagtgagccgagatcacaccattgcactccagcctgggcgacaagagtgaaactccatctcaaaaaaaaaaaaaaaaaaagaaaagaacaaaaaaaacctctttactgctcaccttttggaagagattaatatgctaattatgctaataagcatggagattcacccagtcccttcctccatatcatatcggccacagagcccttccttcccaagtatggcgctggctgtccctgaatgtcctggggaggcgctgcaggggccagcctgcagacccaacattgtattttccacgttgccaggatccacaggtcactacttctttgaaattcattacttctcattatgagctctagtttaaaaaaaaaaaaaagagcatttttcagaaacatttctcccaaaccctttaatctgtaaatgccctgtctctaatcaaatatgtacacatacatccctatttctctgctggaatggccgtctaaaaggttcggtaccgagtaaacaagcctggctagtaagcacttgtctcatgctgataagcccatcattggagaagcaggaacaaggccacactaggcaaagcaggtggcctcctccagggagcatctcaagtgggatggagtagagctcccagcgctgcagcccaaacacagctgcccaatcaatcagctgggagtccatcttttgctcacccttgcctgaaatgttcagcattaagtgatcccctgagttagattaagaaaagccattaaaatgcatcacattcagcagtttcacagcactcccaaacctattctctttggccggtctccctatcctgtaacccccttgtttctttgcattgtccatgttacaacttagataacttagattcaccacgtgcaggagatgccactgtagctgactgcagctgctgctcggggggacagttcctgggcaccctgatggcttttcatctcaatgccctctgaggctcaacttttctacctcaacttcctctgaagctaaggaaactggctcagcccgtagcccagcagttcaggagagttaatgtctgcgagaaccaccctcaacgatggggatgagactcactgggttagtccctca

SEQ ID NO: 31352 - DNA, 564 bp, Homo sapiens
caaaagatgattttcccagacagccaacatgaagtggggaggactgtgagctcagagtccacccaccatggttggaattctccatgcaaccagtagagtggtgctggcctgttcccaccctcatgcatcagtttacccacatgtaaaatgggtgctaggtgctgtgaggagacaacatacatgaagcgagttagatgcagctcacacgcatggatggggagtacrtccaaggtgctggctgccactgctttcctcacagctcctgccttaggaggagtaatggcagcatcgtccccgtatccatggatgtgccattttgcctgggatcccaggtctcagccccatcttccttccccagttctcgggttgtcactgacatgagcgtgaatactgggcagttgtagaaagaacaaggaggcacgtgtgactggaatggaatcaacagggtcaaagtgaaggaaaactaagagagcaggaaggaagcaaactccatggccacagagcttggtcagttcagcagctggatttcaaatgcaatgggaaacgcttggcgggtttgcatca

SEQ ID NO: 31353 - DNA, 590 bp, Homo sapiens
ccccaacaatcagaattttaatgagcaaattggtgaaaatgagaatgagatttgtcatcgtaggctgagcctgattatgtcgcccacagctttgggtagaatcactccctttttcaacaatgttaatgggactctcataaaaatattctataaccttgtgaacagcaaccttaaggggttttccttgaggtgagagatctgaaattggccatttgtgatggtagaagttaccttgcattctaaatctaatcagataaattgtgctgattgcctgaaacagatgccttaggcagaagtctcagagcagtacttgaaccaacctgcctgtcatgctagaggattatttctgaaacgactctatcccgtgtttctttgagtaactcactsctgtgcaaataggagctgtgttttacgtttgtgttctcagcaataagaaagagccctactttgctgggtggctgacaggcctggcgtgctaggtggctcatgactcccatgacagaaaattgtcagtacatactgggagaattgtaaacaggttaacagaaggaaggagaaaacaaagcaaagtcagattagcttgaaaggca

SEQ ID NO: 31354 - DNA, 449 bp, Homo sapiens
  misc_feature (1)...(449): n = A,T,C or G
atggaactacccatatctcttaatcaatatgtctttgtactcatattttttaaggccayttcctgcttcttccccttttcacagtgccatttttttttttttttaaagaaaatgctgttaatacattcaaaatctttcctctgctgccatgttgcagttacattgcttactaatttattctcctccttcttaatggtatagctatcctcttctggataaatggagtctaataacatttcatcctctgccatctggcttatcactggcttggagacacagctctgggattttaggtagcctcagtttgagatgacccaaatattgcaagggcagtcaaaacaatagacannnnnnnnnnnnnnnnnnnnnnnnnnnnnnnnnnnnnnnnnnnnnnnnnnnnnnnnnnnnnnnnnnnnnnnnnnnnnnnnnnnnnnnnnnnnnnnnnnnna

SEQ ID NO: 31355 - DNA, 577 bp, Homo sapiens
gaagaaaaataatttaaaatgaaacaaagaagtattatcaaatgtgtatcatagaaacatttattaataaggaaaacaactttcagtaaacactgtatttcatcatcatgagtttgagtccataaaactctgtgcatccattcatagatacaatatattgaagaaaaaactacaaattctttctgctttttgtaatatgtggcttttaaaaataagcctggtgattttatccttttttccctacctttgaatttatactacagctttcaaattaaccctacttcagaaaatagactaattcatgacccaatattcttctgcaatgatttctgaaagattttgtggtttgaataataattcaagtttctggaactatctggccattttgcatatgttcatttcattcttggtcaacgtatgtttctacatcattaatataattttaaagtatccacaaggctatttttgtggctatcttaagagataattccaataaataggaggtggttatatttcaaatgatttgggataaawtaatagttggcttaacccaaaattgtacaattttttaaaatta

SEQ ID NO: 31356 - DNA, 577 bp, Homo sapiens
gaagaaaaataatttaaaatgaaacaaagaagtattatcaaatgtgtatcatagaaacatttattaataaggaaaacaactttcagtaaacactgtatttcatcatcatgagtttgagtccataaaactctgtgcatccattcatagatacaatatattgaagaaaaaactacaaattctttctgctttttgtaatatgtggcttttaaaaataagcctggtgattttatccttttttccctacctttgaatttatactacagctttcaaattaaccctacttcagaaaatagactaattcatgacccaatattcttctgcaatgatttctgaaagattttgtggtttgaataataattcaagtttctggaactatctggccattttgcatatgttcatttcattcttggtcaacgtatgtttctacatcattaatataattttaaagtatccacaaggctatttttgtggctatcttaagagataattccaataaataggaggtggttatatttcaaatgatttgggataaattaatagttggcttaacccaaaattgtacaattttttwaaatta

SEQ ID NO: 31357 - DNA, 911 bp, Homo sapiens
ggtcttctcctctctgtgttcacttctcttcctataaaggaaccagtcattggatttagtgtctactttagtccagtatggccttaactagctacatttgcaaaggccttatttctaaataaggtcacattctgaggtttccagggaatgggaatttgagggagaaagtattcaacccattatgaaaacctataacagcaacttatatctgttattattagttagaaagtctcatcaaacacctcagtgtatctgttagcataacgttcttagaatccatgactatcacagaaaggaaccactgagcaaacctcagaagtggtcacagcaaaggtggagtgagcacaaggaaaaccacttctgcacatgaccacatggatgctgtttcgtggatgaaaagaccatgattccaaattcctgagaatagcagctctttgttgaaggaaatctgccagaaaatctgcctgtgaaatactaatgctgaatgtgattccatgaactctgcgggacacctcgaatgtgctctgagcgtcatcatcacagtcccttcctcactgggtgtgtgacaagctactcaggaaaaggctagggagagaacaggatatgcaagcttctaaacataccaggcctgtctggaccacccgtagagatgccccagctacactaatgacattgcaattcccttttggaagctgcgcctctgctagactttcttatcaagcttagccctgagtttttatgttgcaatgctgcttcggtcagtaaaatgggtaggagcatttctggaagccattcccacactaggattgttagccataaygtatgtgtgtaatggactgtgaaccacacacacacacacacaaatctcactaaatcaaaagtaagtgtttccccaattcagcttcttagtt

SEQ ID NO: 31358 - DNA, 529 bp, Homo sapiens
gaaattcagcaaaaaactatgcttatttttcttttctatagctctgagaattttgccctttacacataaacaaacagttggaagtataagatttgattttttttttttttttttttgtaaatcagtatcactcaattctttgaactgtttctgagttatgtccaaaaacatgtagggctctttcacaaaaaaaaaaaagaaaaattaatgattggtcaactaattttttaaaagtaaacatttagaaatgactgcatggcttgtaaaataatttgttatctagtcattagcactgtttatttttttcagtcaataccaatgttgaaaggtccttttgtgaggagtcctggaagtaggtcagggggtctttgcagaggtaagtaagttaaaatgaggtcattagagtggrccccaattcaatatgaccagtgtccctataagaagagaagagactttttttaatgaagcgggtgaagggtgactgtggggagcgaaatgggaaaggggaacatcacatccattgcaagaa

SEQ ID NO: 31359 - DNA, 591 bp, Homo sapiens
aaaaatagatatatttttagaccatagcaggtcttcaaagggaaataattaagaaatttttggagacagcttctaaccttctgacagggaggtgacagagaaagtgtggaaaaggccaatctgactgggcatggtggctcacacctgtaatgtggctcccagcactttgggaggccgaggtgggaggattgcttgaacccaggagtttgagaccagcctgggcaacataatgagaccccatctttacccaaaacaaaattcagctgggcttggtgttgtgcacctgtagtcccagctactcaggagactgaggggaaaggatcacttgagaccaggaggtcgaggctgcagtgagctaygacggcacactgcagtccagcctgggtggcagagccagactctgtttcaaaataaagaaataaatataaaacaaaagcccaatctttggaccacagccagggattgagttgccactcggtcacttgtttggtaagtcaattaagttttcttggcctcagtttcttcatttgtaaaatggggacaataacatctacctcctagagtacttttgggaattaaaaaggggtaata

SEQ ID NO: 31360 - DNA, 565 bp, Homo sapiens
tcacccctactgaagtgggagctccatgtcagcaggcactgggtcttgttcaccaccatatcctcagctctgctccaaatggctggctccataattactgttgagtgagtgagtgagtgaatgaatgaatctgggggaaagagtgctggcgagaaggtcaggaaacatggttaactggctctgtgagtgaccttggataagcctctacattatccgtggagctctgtttgtcagctgaaatgaagggaacagacccaatgatcccgagtggctcctccatccctgatattctcaggtgtcgttcagaggatagccatgcctttgggcatcttggctttcaagctcagagatacaaagggactgaataagwggtgatacaagaaagtgaggaagagaggcagggaggctgtgcacaaggaaggaggtggtctttcttcccacaccatgtccacccctacccagaggttctagaaaaatcccactgggaagattaacctgttagaaagagcactgactcaggagtaggagacccgcaccttgatcttggctctcctcaaggtgtgac

SEQ ID NO: 31361 - DNA, 534 bp, Homo sapiens
cattagactcaatgcccaggaagtctcctgggggctggttatacaggcactttctgcctggcacatacccagattccagactttcagaaggaaagcaggagtttggcataagccacattgtctgtacacaccatttacacattgtgagccactcttatcagggtggtgagagccctcctgaaacccgagttcccagatgccagacatgggcccactttgcaagcaggtctttgaaggacagcagtctcaggccagctctgctcactctcctctgcaccacctgcttcttttcaaggcaattcttacatactttatggtttgagacttactcactggtccggtggatgaagctggctcagtcaactcaacctctggttactgtatgactcatgataagtgactggatcactctggacctgacttaacaattcgcaacagtgaaagcatgttccctcycaaggaggttaagtcaagtctcaggtaacctcttcctttactaacggaaagggaggaagcccctttttggaggagtcc

SEQ ID NO: 31362 - DNA, 534 bp, Homo sapiens
cattagactcaatgcccaggaagtctcctgggggctggttatacaggcactttctgcctggcacatacccagattccagactttcagaaggaaagcaggagtttggcataagccacattgtctgtacacaccatttacacattgtgagccactcttatcagggtggtgagagccctcctgaaacccgagttcccagatgccagacatgggcccactttgcaagcaggtctttgaaggacagcagtctcaggccagctctgctcactctcctctgcaccacctgcttcttttcaaggcaattcttacatactttatggtttgagacttactcactggtccggtggatgaagctggctcagtcaactcaacctctggttactgtatgactcatgataagtgactggatcactctggacctgacttaacaattcgcaacagtgaaagcatgttccctcccaaggaggttaagtcaagtctcaggtaacctcttcctttactaayggaaagggaggaagcccctttttggaggagtcc

SEQ ID NO: 31363 - DNA, 520 bp, Homo sapiens
caagagagaatgagtaagaagcaaaagcggaagtctctgataaacccatcagatctagtgagacttactcactatcacaagaatagcacgggaaagaccagccctcatgattcaactacctcctcttgagtccctcccacaacacgtggaaattctgggagatacaattgaagttgagatttgaatggggacacagccaaaccatatcaacacccaatattgtacttcttttaacagattcagtatggattagaggaaatgtaatgttaaacattgggtatgtaaaacatgaataatatttctttgctggttaaatattgccagtgagatttcattggattggtaccgaacatgtctaattttatagttgttataatgatttggataaggakgacatagtcacaactaagctcttcagtgaagcaaagtatgcagttttgtagctacatttcagaacgatttgataaggctgtataagtaggtacaataatatgatgaccagttacctaaagtatcatat

SEQ ID NO: 31364 - DNA, 569 bp, Homo sapiens
gagctttgaaaataacctaacagtcaatcaattgctgagcttctattaccagtagtgggacataatgtacatcatgtagataggcaggcttgtcactgacaagggggctgacccctggaaaaccagcacagagccagctcttctgtgtgaatccactctctccagaatataccataagtcatggaaagaaataagagtctcaggaaatgagactcttaccgcgatgagaggtgaaccttgaaatctattttagcaattaggaagagaagtcccatttcgcatcccaaatcaagtagaggcctgctagtccaaacatagtttctgaataacctgagtcacctgggccctgaggaatcctggcctcttmgtccacatttgcagaaatatcaggaggtcaatcaggaagctggttaggcagctcaacacagggtcagaaagctcctaggtatgcaaataaatgtgcacactggaaattgagttctgtaatttttccatgacctagaaaactatgatgatgaaaatgttctacattcatgctgcctagttcagtagccactagccacatgtgg

SEQ ID NO: 31365 - DNA, 1222 bp, Homo sapiens
cacctgcaacgccgtgcgctagactatgctactgaaggacctctaccgcggctcagccctggactaaggcaccggaggatccccgccctgccccgccccgcggtgtcctggactgtgcactgcagaacccccacccttccacaccctggactctggctcccgaggaccttggccccggctcgccctgaactactcctgcccctcagcgccctggactgtggttccagaggacctggtcctggggcaacttgtgctaccgcgtggactccaggaccccagtccttccacgccctagaccaaggcacgggagaacctctgactcgccgcccccgacctagggcaccagaggacccacaccttgccgtgccccggactacagcacggaaggacccccgatccgccgggcactgggctcctgcacagagggacccccgccatggaggtctggactacccctgccccaccgcaccctggactactgcacgccaagaccctcgcctgaacacgccctacactctggcatgggggaacccggccccgcagagccctggactctggcattggaggactcctcggctaggttctggactcctgcaccagaggactcctgccctgccacaccctggacacctgcactagagaaccctgccccgtcgccccctagactatggcacgggaggacccctgccaccgacttcggcacggtaagacccctgacccgccttgcactggattccagcactggaggaccccctgccacggcgctctctggactacccctgcgccaccgcgtcctgcactacagcacagcaggaccgccgtcccaccgcgcactggactgaggcacagcagcacccgggcctcgtggttggtggactgcaggacgaggtgaccccccgccccgctgcgcgttggactatggcacaggaggaccaccattcccgcatgccctggaccactgcaggacaggtcccccactccgcagcggcctggaatatggcactgcaggacccccgccctgctgctccacggactccaccactgaagaccctcgcccccctgcaccctggacaaaggcacgggaggacccggcttcaccgcccagtgggctatcrcataggaaaacccccagcccacccccatcgcgccagagactctgacaagagagaacccctgccccctgctccccggactacagcaaggcaggaaccaccctcctcca

SEQ ID NO: 31366 - DNA, 1349 bp, Homo sapiens
agttaaatgctcttaaatatttgatggtctggtcttagcaaaacggcaggtttttacttttacatttttagctatgttttaaattatttgtaatccagacactgaagttttattttgttgtgaattgaatctgggcagagtgtacaagggatctctctgtattatttttacaactacatgtgaatctataattatctcatcaaaaattcactgaaaaaggtatcacggagcccatgtttgctgttaccgtctttgctcctcccaggttacaatgccccgtgcctctcagtgcacagtgaaaatgcagcagacgtttttgatgtgagctccacggaatggatccagactgtccccttcaacaaggtaatttgaccttaagattatgcaactaatgagttaatgactgaaacgcggaaacagaaataatccattgtacatttactgtaatgggtacttgctagtttggaggcttaacaaagagtataaaaaacaaaaccctacaaaacattatattgattaattgcattactagtactagagccatttgtgacatctagttccattatataaagtagtattgttatagataaatatattatttatttataccatacagcacagcagttatttcccatattcagtttaaagttactttatcagtaatttttacttaccagtataatttgttccttttatacttaccagtataaaaaggaacactttacagggtaaaaggaacatttttacagggtaaaaaaagaaaaaagcatataaccaaggctgtgtttcagattctcartaggatctcacaatggtgatgttttgcaaaacaaggacattgacagtaactccatctacttaccttaggcagattttcctagttttactttcactgtgtgtgtattaatgtctgtataattctaccacctgtgtgaattcatgtatccaccactagtcaatatactgaatggctccagcaccacagtgggtccctcaagagcccttttataatcactccccctccctcccacctccttccgctttcctaacccctggcaatcagtaacctccatttctaaaattttatcatttcaaaaatgtctaacaaatggcgttatatagtattcatgatttttatctgctaagtccaaatttatttttctaaaaaaaacaaactttggattagaaacccaggagaatcccattacaatattcttatcatatagcagctacatcaaaaaatttttggaatatatacagttcaaataaatagacaaaaacaagtgatgcccatcagtcagatgatagagtaacttcaattcatatggtccaagtctgacaaaaatgca

SEQ ID NO: 31367 - DNA, 1349 bp, Homo sapiens
agttaaatgctcttaaatatttgatggtctggtcttagcaaaacggcaggtttttacttttacatttttagctatgttttaaattatttgtaatccagacactgaagttttattttgttgtgaattgaatctgggcagagtgtacaagggatctctctgtattatttttacaactacatgtgaatctataattatctcatcaaaaattcactgaaaaaggtatcacggagcccatgtttgctgttaccgtctttgctcctcccaggttacaatgccccgtgcctctcagtgcacagtgaaaatgcagcagacgtttttgatgtgagctccacggaatggatccagactgtccccttcaacaaggtaatttgaccttaagattatgcaactaatgagttaatgactgaaacgcggaaacagaaataatccattgtacatttactgtaatgggtacttgctagtttggaggcttaacaaagagtataaaaaacaaaaccctacaaaacattatattgattaattgcattactagtactagagccatttgtgacatctagttccattatataaagtagtattgttatagataaatatattatttatttataccatacagcacagcagttatttcccatattcagtttaaagttactttatcagtaatttttacttaccagtataatttgttccttttatacttaccagtataaaaaggaacactttacagggtaaaaggaacatttttacagggtaaaaaaagaaaaaagcatataaccaaggctgtgtttcagattctcagtaggatytcacaatggtgatgttttgcaaaacaaggacattgacagtaactccatctacttaccttaggcagattttcctagttttactttcactgtgtgtgtattaatgtctgtataattctaccacctgtgtgaattcatgtatccaccactagtcaatatactgaatggctccagcaccacagtgggtccctcaagagcccttttataatcactccccctccctcccacctccttccgctttcctaacccctggcaatcagtaacctccatttctaaaattttatcatttcaaaaatgtctaacaaatggcgttatatagtattcatgatttttatctgctaagtccaaatttatttttctaaaaaaaacaaactttggattagaaacccaggagaatcccattacaatattcttatcatatagcagctacatcaaaaaatttttggaatatatacagttcaaataaatagacaaaaacaagtgatgcccatcagtcagatgatagagtaacttcaattcatatggtccaagtctgacaaaaatgca

SEQ ID NO: 31368 - DNA, 1349 bp, Homo sapiens
agttaaatgctcttaaatatttgatggtctggtcttagcaaaacggcaggtttttacttttacatttttagctatgttttaaattatttgtaatccagacactgaagttttattttgttgtgaattgaatctgggcagagtgtacaagggatctctctgtattatttttacaactacatgtgaatctataattatctcatcaaaaattcactgaaaaaggtatcacggagcccatgtttgctgttaccgtctttgctcctcccaggttacaatgccccgtgcctctcagtgcacagtgaaaatgcagcagacgtttttgatgtgagctccacggaatggatccagactgtccccttcaacaaggtaatttgaccttaagattatgcaactaatgagttaatgactgaaacgcggaaacagaaataatccattgtacatttactgtaatgggtacttgctagtttggaggcttaacaaagagtataaaaaacaaaaccctacaaaacattatattgattaattgcattactagtactagagccatttgtgacatctagttccattatataaagtagtattgttatagataaatatattatttatttataccatacagcacagcagttatttcccatattcagtttaaagttactttatcagtaatttttacttaccagtataatttgttccttttatacttaccagtataaaaaggaacactttacagggtaaaaggaacatttttacagggtaaaaaaagaaaaaagcatataaccaaggctgtgtttcagattctcagtaggatctcacaatggtgatgttttgcaaaacaaggacattgacagtaactccatctacttaccttaggcagattttcctagttttactttcactgtgtgtgtattaatgtctgtataattctaccacctgtgtgarttcatgtatccaccactagtcaatatactgaatggctccagcaccacagtgggtccctcaagagcccttttataatcactccccctccctcccacctccttccgctttcctaacccctggcaatcagtaacctccatttctaaaattttatcatttcaaaaatgtctaacaaatggcgttatatagtattcatgatttttatctgctaagtccaaatttatttttctaaaaaaaacaaactttggattagaaacccaggagaatcccattacaatattcttatcatatagcagctacatcaaaaaatttttggaatatatacagttcaaataaatagacaaaaacaagtgatgcccatcagtcagatgatagagtaacttcaattcatatggtccaagtctgacaaaaatgca

SEQ ID NO: 31369 - DNA, 1349 bp, Homo sapiens
agttaaatgctcttaaatatttgatggtctggtcttagcaaaacggcaggtttttacttttacatttttagctatgttttaaattatttgtaatccagacactgaagttttattttgttgtgaattgaatctgggcagagtgtacaagggatctctctgtattatttttacaactacatgtgaatctataattatctcatcaaaaattcactgaaaaaggtatcacggagcccatgtttgctgttaccgtctttgctcctcccaggttacaatgccccgtgcctctcagtgcacagtgaaaatgcagcagacgtttttgatgtgagctccacggaatggatccagactgtccccttcaacaaggtaatttgaccttaagattatgcaactaatgagttaatgactgaaacgcggaaacagaaataatccattgtacatttactgtaatgggtacttgctagtttggaggcttaacaaagagtataaaaaacaaaaccctacaaaacattatattgattaattgcattactagtactagagccatttgtgacatctagttccattatataaagtagtattgttatagataaatatattatttatttataccatacagcacagcagttatttcccatattcagtttaaagttactttatcagtaatttttacttaccagtataatttgttccttttatacttaccagtataaaaaggaacactttacagggtaaaaggaacatttttacagggtaaaaaaagaaaaaagcatataaccaaggctgtgtttcagattctcagtaggatctcacaatggtgatgttttgcaaaacaaggacattgacagtaactccatctacttaccttaggcagattttcctagttttactttcactgtgtgtgtattaatgtctgtataattctaccacctgtgtgaattcatgtatccaccactagtcaatatactgaatggctccagcaccacagtgggtccctcaagagcccttttataatcactccccctccctcccacctccttccgctttcctaacccctggcaatcagtaacctccatttctaaaattttatcatttcaaaamtgtctaacaaatggcgttatatagtattcatgatttttatctgctaagtccaaatttatttttctaaaaaaaacaaactttggattagaaacccaggagaatcccattacaatattcttatcatatagcagctacatcaaaaaatttttggaatatatacagttcaaataaatagacaaaaacaagtgatgcccatcagtcagatgatagagtaacttcaattcatatggtccaagtctgacaaaaatgca

SEQ ID NO: 31370 - DNA, 1349 bp, Homo sapiens
agttaaatgctcttaaatatttgatggtctggtcttagcaaaacggcaggtttttacttttacatttttagctatgttttaaattatttgtaatccagacactgaagttttattttgttgtgaattgaatctgggcagagtgtacaagggatctctctgtattatttttacaactacatgtgaatctataattatctcatcaaaaattcactgaaaaaggtatcacggagcccatgtttgctgttaccgtctttgctcctcccaggttacaatgccccgtgcctctcagtgcacagtgaaaatgcagcagacgtttttgatgtgagctccacggaatggatccagactgtccccttcaacaaggtaatttgaccttaagattatgcaactaatgagttaatgactgaaacgcggaaacagaaataatccattgtacatttactgtaatgggtacttgctagtttggaggcttaacaaagagtataaaaaacaaaaccctacaaaacattatattgattaattgcattactagtactagagccatttgtgacatctagttccattatataaagtagtattgttatagataaatatattatttatttataccatacagcacagcagttatttcccatattcagtttaaagttactttatcagtaatttttacttaccagtataatttgttccttttatacttaccagtataaaaaggaacactttacagggtaaaaggaacatttttacagggtaaaaaaagaaaaaagcatataaccaaggctgtgtttcagattctcagtaggatctcacaatggtgatgttttgcaaaacaaggacattgacagtaactccatctacttaccttaggcagattttcctagttttactttcactgtgtgtgtattaatgtctgtataattctaccacctgtgtgaattcatgtatccaccactagtcaatatactgaatggctccagcaccacagtgggtccctcaagagcccttttataatcactccccctccctcccacctccttccgctttcctaacccctggcaatcagtaacctccatttctaaaattttatcatttcaaaaatgtctaacaaatggcgttatatagtattcatgattttwatctgctaagtccaaatttatttttctaaaaaaaacaaactttggattagaaacccaggagaatcccattacaatattcttatcatatagcagctacatcaaaaaatttttggaatatatacagttcaaataaatagacaaaaacaagtgatgcccatcagtcagatgatagagtaacttcaattcatatggtccaagtctgacaaaaatgca

SEQ ID NO: 31371 - DNA, 555 bp, Homo sapiens
acttttgaatccctttattttcaacatttctttgtcaatttgtttatacatgtgcttcttataattagtaaatttagatttttaccttttgatataatctgattttatttgccttttattgttatcttttaagccatttatattcactatgccaagtcaggtatagtcttattttgscattttattttattctttgtgatttatacttattgttttcttcttccctatacattatatgtcattgtagctcctctttcttcctattagttattttttctacaaattttattctatattcccatttgtagaatgcacatttttgttctacagttatatatatattcacatatgcacattatatgtatataaaaatatacatatacacagagattagcatatatatgtaattttcaaccaattataagaatggaagactattactggttctcctatataagagacttatcacacttttactttcctcttctctactcctgctcaacatgtattaattaattagttttttaggtcaaattcctggtattaaaaatatta

SEQ ID NO: 31372 - DNA, 555 bp, Homo sapiens
acttttgaatccctttattttcaacatttctttgtcaatttgtttatacatgtgcttcttataattagtaaatttagatttttaccttttgatataatctgattttatttgccttttattgttatcttttaagccatttatattcactatgccaagtcaggtatagtcttattttgccattttattttattctttgtgrtttatacttattgttttcttcttccctatacattatatgtcattgtagctcctctttcttcctattagttattttttctacaaattttattctatattcccatttgtagaatgcacatttttgttctacagttatatatatattcacatatgcacattatatgtatataaaaatatacatatacacagagattagcatatatatgtaattttcaaccaattataagaatggaagactattactggttctcctatataagagacttatcacacttttactttcctcttctctactcctgctcaacatgtattaattaattagttttttaggtcaaattcctggtattaaaaatatta

SEQ ID NO: 31373 - DNA, 555 bp, Homo sapiens
acttttgaatccctttattttcaacatttctttgtcaatttgtttatacatgtgcttcttataattagtaaatttagatttttaccttttgatataatctgattttatttgccttttattgttatcttttaagccatttatattcactatgccaagtcaggtatagtcttattttgccattttattttattctttgtgatttatacttaytgttttcttcttccctatacattatatgtcattgtagctcctctttcttcctattagttattttttctacaaattttattctatattcccatttgtagaatgcacatttttgttctacagttatatatatattcacatatgcacattatatgtatataaaaatatacatatacacagagattagcatatatatgtaattttcaaccaattataagaatggaagactattactggttctcctatataagagacttatcacacttttactttcctcttctctactcctgctcaacatgtattaattaattagttttttaggtcaaattcctggtattaaaaatatta

SEQ ID NO: 31374 - DNA, 859 bp, Homo sapiens
tatctttgaaaagtttgcaggtgatgagatcaatgagrataaatgataacttaatggggtgtcacaaaatcaccttaagttggctggtgaagacttgggcagtttttaggaacagattatattaatattaaaaataggaaaaaagagcaaagaaatatattaggacttctagctacatggtaaacaataaactctggttttactaaatatatttgacacatattatagaattttccttgcaaatgttgttacaaattatatgatatttcctcttttccaattttcctcttacaaggtaaattcacctaatttttattatgatatatttgtaaggggaattgaattataagctttctcaggttaaaataaggacaaaacaaaaattttctgataaaattttcttgcagtatgccaccatttgccaaaggaagtcagccattgtagccttttctgtaatcttaagttttttggacagatatctattgtgcaaactaaaatttagttctaattccattcatattagatatatttatttaatacagtattccgcttaatacagactttataaatagaatcacattttatttttaaatgtcatatcctagaggaatgtttgtacaaatcatttaaaaatgaatagtttacaaataacttagctttagtctttaagtatttacatacatttatttatgatttgtcacacataaaaggacattcttcttcttaattatatcttgctgatacttaattttaaagtttttttttgttttaattacacaactggtggtgacaatataaccctagatggctatggtatatttgttcaggtgccttgagaaataccaaaatttttgacaat

SEQ ID NO: 31375 - DNA, 859 bp, Homo sapiens
tatctttgaaaagtttgcaggtgatgagatcaatgagaataaatgataacttaatggggtgtcacaaaatcaccttaagttggctggtgaagacttgggcagtttttaggaacagattatattaatattaaaaataggaaaaaagagcaaagaaatatattaggacttctagctacatggtaaacaataaactctggttttactaaatatatttgacacatattatagaattttccttgcaaatgttgttacaaattatatgatatttcctcttttccaattttcctcttacaaggtaaattcacctaatytttattatgatatatttgtaaggggaattgaattataagctttctcaggttaaaataaggacaaaacaaaaattttctgataaaattttcttgcagtatgccaccatttgccaaaggaagtcagccattgtagccttttctgtaatcttaagttttttggacagatatctattgtgcaaactaaaatttagttctaattccattcatattagatatatttatttaatacagtattccgcttaatacagactttataaatagaatcacattttatttttaaatgtcatatcctagaggaatgtttgtacaaatcatttaaaaatgaatagtttacaaataacttagctttagtctttaagtatttacatacatttatttatgatttgtcacacataaaaggacattcttcttcttaattatatcttgctgatacttaattttaaagtttttttttgttttaattacacaactggtggtgacaatataaccctagatggctatggtatatttgttcaggtgccttgagaaataccaaaatttttgacaat

SEQ ID NO: 31376 - DNA, 572 bp, Homo sapiens
tcaaatgcctagagccttgaccttgtattttccagccactgaaactgtgagaaagtaatttttttttctttataaaatagtctgtggtattttgttataggagcacraatggactaagacaacatgcatgtaattaacaaatgggtcttgggtataggcatgaaggagatagctttccagtttgctaagagatgtctaaactggacatccttaacagctgcccctccacccataaccattgcaccggtttctatataaaaggtcagaactctgccttttacttcgagaacttcttttctgggaaggtctaacagcttactatccaacccattataactagctataatattctgtcaaattccttcaaattgatttctctgtctcagaccaccataacccatcacaattctgaaagctgaaataggatgagcaccctcttctctacagatagccctatatggaacccttggcttctgctgagataagatttgagataggagaaagagaaaagctagtttgccaaccagagggaggatgatgtgttcagtttgcaaatggtaagatttagatgt

SEQ ID NO: 31377 - DNA, 572 bp, Homo sapiens
tcaaatgcctagagccttgaccttgtattttccagccactgaaactgtgagaaagtaatttttttttctttataaaatagtctgtggtattttgttataggagcacgaatggactaagacaacatgcatgtaattaacaaatgggtcttgggtataggcatgaaggagatagctttccagtttgctaagagatgtctaaactggacatccttaacagctgcccctccacccataaccattgcaccggtttctatataaaaggtcagaactctgccttttacttcgagaacttcttttctgggaagrtctaacagcttactatccaacccattataactagctataatattctgtcaaattccttcaaattgatttctctgtctcagaccaccataacccatcacaattctgaaagctgaaataggatgagcaccctcttctctacagatagccctatatggaacccttggcttctgctgagataagatttgagataggagaaagagaaaagctagtttgccaaccagagggaggatgatgtgttcagtttgcaaatggtaagatttagatgt

SEQ ID NO: 31378 - DNA, 1130 bp, Homo sapiens
cttgagaccaggagcttgaggccagcataggcaatataacaaggcctcccatttctattaaacaaacaaaaattaaaacaaaaaggctaaatactgcgtgattttgtttacacrgaattctgaaaagaaaaaaaaaaaagacaagacagaggaaaaaacagatcagtggtggccagagactagaggtaaggaaatgggctgactatggaaaggggcatgaggaaattttttgagaaactaactctatatcttgatcatcatggtggttgcacaactagatgtgtttcccagtcttacagaaccatattcaaatacaccttaataaagataattttcaaccatacatatgatagaatcataattattactcttatactaagaccaaatagatgctgcttaaaccactgaggcaagaacactaaaccttggtctgatctgcctccaagtttgaaaactcccttccattaacattttgcctaaaaattaaacaatatttgtaaattagtcacaaaatcctttaagattaaaatatacatatattcttaaagaaaactacctagtgcttgcaaccaagtcattttaggagaaaattagctttgttaagaagggaataaagcccaagtaataaatattaacatccatcttttccagaatcatgatggtcaaaacaatgagactcttctcctaattttggttcaaaataccaaaatttttacttcaaaaactctctaacagattattataaaatcttaacatttgcctaaaagtctttaagtattttcacataactaggcagtataacaaaaaaagagcacaggcttaggctggatgcagtggctcacacctgtaatcctagcattttgggaggccaaggcagatcgcttgagtccagcagtttgagaccagtctgggaaatgtggcaaaaccccgtctctataaaatacattaaaacgtggcccatacctgtagtcccagctacttcaggggatgaggcaggaggatggcttgagccttagagacagaggctgcagtgagccaagatcacgccactcactccactctgggtgatagagtgggaccctttctcaaaaaaaaaattttttttaaagcacaggctcaagaactcaacc

SEQ ID NO: 31379 - DNA, 1130 bp, Homo sapiens
cttgagaccaggagcttgaggccagcataggcaatataacaaggcctcccatttctattaaacaaacaaaaattaaaacaaaaaggctaaatactgcgtgattttgtttacacggaattctgaaaagaaaaaaaaaaaagacaagacagagraaaaaacagatcagtggtggccagagactagaggtaaggaaatgggctgactatggaaaggggcatgaggaaattttttgagaaactaactctatatcttgatcatcatggtggttgcacaactagatgtgtttcccagtcttacagaaccatattcaaatacaccttaataaagataattttcaaccatacatatgatagaatcataattattactcttatactaagaccaaatagatgctgcttaaaccactgaggcaagaacactaaaccttggtctgatctgcctccaagtttgaaaactcccttccattaacattttgcctaaaaattaaacaatatttgtaaattagtcacaaaatcctttaagattaaaatatacatatattcttaaagaaaactacctagtgcttgcaaccaagtcattttaggagaaaattagctttgttaagaagggaataaagcccaagtaataaatattaacatccatcttttccagaatcatgatggtcaaaacaatgagactcttctcctaattttggttcaaaataccaaaatttttacttcaaaaactctctaacagattattataaaatcttaacatttgcctaaaagtctttaagtattttcacataactaggcagtataacaaaaaaagagcacaggcttaggctggatgcagtggctcacacctgtaatcctagcattttgggaggccaaggcagatcgcttgagtccagcagtttgagaccagtctgggaaatgtggcaaaaccccgtctctataaaatacattaaaacgtggcccatacctgtagtcccagctacttcaggggatgaggcaggaggatggcttgagccttagagacagaggctgcagtgagccaagatcacgccactcactccactctgggtgatagagtgggaccctttctcaaaaaaaaaattttttttaaagcacaggctcaagaactcaacc

SEQ ID NO: 31380 - DNA, 1130 bp, Homo sapiens
cttgagaccaggagcttgaggccagcataggcaatataacaaggcctcccatttctattaaacaaacaaaaattaaaacaaaaaggctaaatactgcgtgattttgtttacacggaattctgaaaagaaaaaaaaaaaagacaagacagaggaaaaaacagatcagtggtggccagagactagaggtaaggaaatgggctgactatggaaagggkcatgaggaaattttttgagaaactaactctatatcttgatcatcatggtggttgcacaactagatgtgtttcccagtcttacagaaccatattcaaatacaccttaataaagataattttcaaccatacatatgatagaatcataattattactcttatactaagaccaaatagatgctgcttaaaccactgaggcaagaacactaaaccttggtctgatctgcctccaagtttgaaaactcccttccattaacattttgcctaaaaattaaacaatatttgtaaattagtcacaaaatcctttaagattaaaatatacatatattcttaaagaaaactacctagtgcttgcaaccaagtcattttaggagaaaattagctttgttaagaagggaataaagcccaagtaataaatattaacatccatcttttccagaatcatgatggtcaaaacaatgagactcttctcctaattttggttcaaaataccaaaatttttacttcaaaaactctctaacagattattataaaatcttaacatttgcctaaaagtctttaagtattttcacataactaggcagtataacaaaaaaagagcacaggcttaggctggatgcagtggctcacacctgtaatcctagcattttgggaggccaaggcagatcgcttgagtccagcagtttgagaccagtctgggaaatgtggcaaaaccccgtctctataaaatacattaaaacgtggcccatacctgtagtcccagctacttcaggggatgaggcaggaggatggcttgagccttagagacagaggctgcagtgagccaagatcacgccactcactccactctgggtgatagagtgggaccctttctcaaaaaaaaaattttttttaaagcacaggctcaagaactcaacc

SEQ ID NO: 31381 - DNA, 1130 bp, Homo sapiens
cttgagaccaggagcttgaggccagcataggcaatataacaaggcctcccatttctattaaacaaacaaaaattaaaacaaaaaggctaaatactgcgtgattttgtttacacggaattctgaaaagaaaaaaaaaaaagacaagacagaggaaaaaacagatcagtggtggccagagactagaggtaaggaaatgggctgactatggaaaggggcatgaggaaattttttgagaaactaactctatatcttgatcatcatggtggttgcacaactagatgtgtttcccagtcttacagaaccatattcaartacaccttaataaagataattttcaaccatacatatgatagaatcataattattactcttatactaagaccaaatagatgctgcttaaaccactgaggcaagaacactaaaccttggtctgatctgcctccaagtttgaaaactcccttccattaacattttgcctaaaaattaaacaatatttgtaaattagtcacaaaatcctttaagattaaaatatacatatattcttaaagaaaactacctagtgcttgcaaccaagtcattttaggagaaaattagctttgttaagaagggaataaagcccaagtaataaatattaacatccatcttttccagaatcatgatggtcaaaacaatgagactcttctcctaattttggttcaaaataccaaaatttttacttcaaaaactctctaacagattattataaaatcttaacatttgcctaaaagtctttaagtattttcacataactaggcagtataacaaaaaaagagcacaggcttaggctggatgcagtggctcacacctgtaatcctagcattttgggaggccaaggcagatcgcttgagtccagcagtttgagaccagtctgggaaatgtggcaaaaccccgtctctataaaatacattaaaacgtggcccatacctgtagtcccagctacttcaggggatgaggcaggaggatggcttgagccttagagacagaggctgcagtgagccaagatcacgccactcactccactctgggtgatagagtgggaccctttctcaaaaaaaaaattttttttaaagcacaggctcaagaactcaacc

SEQ ID NO: 31382 - DNA, 1130 bp, Homo sapiens
cttgagaccaggagcttgaggccagcataggcaatataacaaggcctcccatttctattaaacaaacaaaaattaaaacaaaaaggctaaatactgcgtgattttgtttacacggaattctgaaaagaaaaaaaaaaaagacaagacagaggaaaaaacagatcagtggtggccagagactagaggtaaggaaatgggctgactatggaaaggggcatgaggaaattttttgagaaactaactctatatcttgatcatcatggtggttgcacaactagatgtgtttcccagtcttacagaaccatattcaaatacaccttaataaagataattttcaaccatacatatgatagaatcataattattactcttatactaagaccaaatagatgctgcttaaaccactgaggcaagaacactaaaccttggtctgatctgcctccaagtttgaaaactcccttccattaacattttgcctaaaaattaaacaatatttgtaaattagtcacaaaatcctttaagattaaaatatacatatattcttaaagaaaactacctagtgcttgcaaccaagtcattttaggagaaaattagctttgttaagaagggaataaagcccaagtaataaatattaacatccatcttttccagaatcatgatggtcaaaacaatgagactcttctcctaattttggttcaaaataccaaaatttttacttcaaaaactctctaacagattattataaaatcttaacatttgcctaaaagtctttaagtattttcacataactaggcagtataacaaaaaaagagcacaggcttaggctggatgcagtggctcacacctgtaatcctagcattttgggaggccaaggcagatcgcttgagtccagcagtttgagaccagtctgggaaatgtggcaaaaccccgtctctataaaatacattaaaacrtggcccatacctgtagtcccagctacttcaggggatgaggcaggaggatggcttgagccttagagacagaggctgcagtgagccaagatcacgccactcactccactctgggtgatagagtgggaccctttctcaaaaaaaaaattttttttaaagcacaggctcaagaactcaacc

SEQ ID NO: 31383 - DNA, 1130 bp, Homo sapiens
cttgagaccaggagcttgaggccagcataggcaatataacaaggcctcccatttctattaaacaaacaaaaattaaaacaaaaaggctaaatactgcgtgattttgtttacacggaattctgaaaagaaaaaaaaaaaagacaagacagaggaaaaaacagatcagtggtggccagagactagaggtaaggaaatgggctgactatggaaaggggcatgaggaaattttttgagaaactaactctatatcttgatcatcatggtggttgcacaactagatgtgtttcccagtcttacagaaccatattcaaatacaccttaataaagataattttcaaccatacatatgatagaatcataattattactcttatactaagaccaaatagatgctgcttaaaccactgaggcaagaacactaaaccttggtctgatctgcctccaagtttgaaaactcccttccattaacattttgcctaaaaattaaacaatatttgtaaattagtcacaaaatcctttaagattaaaatatacatatattcttaaagaaaactacctagtgcttgcaaccaagtcattttaggagaaaattagctttgttaagaagggaataaagcccaagtaataaatattaacatccatcttttccagaatcatgatggtcaaaacaatgagactcttctcctaattttggttcaaaataccaaaatttttacttcaaaaactctctaacagattattataaaatcttaacatttgcctaaaagtctttaagtattttcacataactaggcagtataacaaaaaaagagcacaggcttaggctggatgcagtggctcacacctgtaatcctagcattttgggaggccaaggcagatcgcttgagtccagcagtttgagaccagtctgggaaatgtggcaaaaccccgtctctataaaatacattaaaacgtggcccatacctgtagtcccagctacttcaggggatgaggcaggagsatggcttgagccttagagacagaggctgcagtgagccaagatcacgccactcactccactctgggtgatagagtgggaccctttctcaaaaaaaaaattttttttaaagcacaggctcaagaactcaacc

SEQ ID NO: 31384 - DNA, 1144 bp, Homo sapiens
ttactatttaagtgatcacataaggtgctgaatgaatcatcctcagcctcatcatgaggaattaaaaatagaacagttgacatcatcctatagcaggtttctaagggacagaaaaatgccagatagtttaaggaaaagagctgtctgaagtaatggcccagcccacatgtttacagcgtgttggcagtggttctccaacttcagcatgcatccaagaatcacctggaggccttgttaaaacagygctggccccatcccagagtttccgattgagtgggcctgtggcagggtcttagatttttgcattcataccttcccaggtgatgatgttgccggttcggggtctacactttgagaaccactgcgctaaaggaaagaaacacaagtagcttggggatggtttagaaaacagaattttaagattaataccctggtgcttgttaaaattttgatgacaataccaaatttcatttgttatggtgtgcaagtcttgtaaagggaatctgttctttgtgatactgcaaatgaacattaaaaatggttgcaaacctacataagtggtctcccagcatggtttcatcatgtcttggttaaaattttggataagctttggctacaactattatctctgtaatccaagttagtgatggattcagaagtttggctatttttttctcaactgtaaatcaaacatgctgtacctggggaccatttgtaggacagcagtcattttaactaagggcattccaagttgcaagccattaaatcatccttgtcacacctgtctgacaaagtagctatcagcaaaataactgtcaggtagcatcaggcaccacctgctcctatggttccaggcttcgcagtggttctagaactgcctgtttataatcctattaatttattgttgcattaaagcaacagcaaccaaagtaatcataattgctaacatttgtggaaggcgcactgaccctggtgccacacacagactgtgtctcccttgccttggctgtgaatcctcattttcatagtgaggccccatgacgacctctgttttagacacaaaagatgggggggttggagatcacttggttgctgtcacacagtttgacagctggagctttgtatttgagcccaggcagtatta

SEQ ID NO: 31385 - DNA, 1148 bp, Homo sapiens
aaaaatgggatctagcagaagccaactttcatcgcgattgattaaaacactctcccagcaaaccccacagggcctgggctagaaacttgtcaaaacacacacacacacacacacacacacacaaagatttggggtatgtaagagaggsgagattgccctgtttcctctgatgtcaaaaaactcagaggggctcactcacattcaggttgggactcccaagagggctaggaaggagggcttagggggcatgtccaccaccgcctgggcacaagggcagctgctgtgtgaagagccagctagccactgggtggtggggacccctataaacaggcccattttgccaggttctccccctggggatcgttctcttttaacctcatgtaacagctggatgtggtacatgtctataatcccagatattcaggaggctgaagtgggaggactgcttgagtccaagagtttaagatgagcccatgcaacacagggagaccccatctctacaaaataaagtagctaggcatgttggcatgtccctgtagtcccagctgcttgggaggctgaggtaggagaattgcttgaatctgggaattcaaggctgcagtgagtcatgactgcatcactgtactctagcctgggtaacatagcgagaccttgtctcaaaaaaaaaaaaaaataaaaaataaaaataaaaataaagtaacctcacagagccaatcaaaatatcacttttccaagtgaaattactgtttttttctaatagaccaaaatacttgctcaatcacaaaaaatttattaaatactggaaaaccacaaagaaaaatttttttaaacatcattcatcattccactccctacagatggtaaaattttagtatgttccatatatattcccatatatggtatatcatccatacacatatatcacaaaaatacacttatatttatgcttgctttcttacagccttttatatcacaacagattttaaacattttcccatgataaatattttaccacaatttaaaagctaagtagtaattgcatgttttacttaaataatcccacagtactaggcatttaatttgttcaatttttctatttaaaaaagtaataaaaataaaaataaaaaaataaaaaaattttaaaaagt

SEQ ID NO: 31386 - DNA, 1148 bp, Homo sapiens
aaaaatgggatctagcagaagccaactttcatcgcgattgattaaaacactctcccagcaaaccccacagggcctgggctagaaacttgtcaaaacacacacacacacacacacacacacacaaagatttggggtatgtaagagaggggagattgccctgtttcctctgatgtcaaaaaactcagaggggctcactcacattcaggttgggactcccaagagggctaggaaggagggcttagggggcatgtccaccaccgcctgggcacaagggcagctgctgtgtgaagagccagctagccactgggtggtggggacccctataaacaggcccattttgccaggttctccccctggggatcgttctcttttaacctcatgtaacagctggatgtggtacatgtctataatcccagatattcaggaggctgaagtgggaggactgcttgagtccaagagtttaagatgagcccatgcaacacagggagaccccatctctacaaaataaagtagctaggcatgttggcatgtccctgtagtcccagctgcttgggaggctgaggtaggagaattgcttgaatctgggaattcaaggctgcagtgagtcatgactgcatcactgtactctagcctgggtaacayagcgagaccttgtctcaaaaaaaaaaaaaaataaaaaataaaaataaaaataaagtaacctcacagagccaatcaaaatatcacttttccaagtgaaattactgtttttttctaatagaccaaaatacttgctcaatcacaaaaaatttattaaatactggaaaaccacaaagaaaaatttttttaaacatcattcatcattccactccctacagatggtaaaattttagtatgttccatatatattcccatatatggtatatcatccatacacatatatcacaaaaatacacttatatttatgcttgctttcttacagccttttatatcacaacagattttaaacattttcccatgataaatattttaccacaatttaaaagctaagtagtaattgcatgttttacttaaataatcccacagtactaggcatttaatttgttcaatttttctatttaaaaaagtaataaaaataaaaataaaaaaataaaaaaattttaaaaagt

SEQ ID NO: 31387 - DNA, 554 bp, Homo sapiens
atttactaagtattttaacttcacaataaaacgagttaatgcatatatagaattacatatacatttttagaaaattctgcaaaactgaaggtaaataacttgtttagtatcccaccataagtgacagctgggatttgtacccaggcagtcagggtccagagtcagtgatagtgacacgaatatatatccttgacagcacgtttcagtgaaatagttgttcaagtcatgaatctcgttttcaaggctacaactcattgaaagaagctaacataaagtatgtattatgatgagacagcgtggcctaacttcagaaaaatttaaggataygaataaacatgtattcataatgcatgggtccagaaacctggctatcattgcttccccagacccattcttacactatatttagactccagtgactaccgttgaccgacttctgattttcccaaatccctattccctctgtagggaaatattgcccaattttgcttttgtttaatcagggcataaatcttagatatctaatcagttatagattttcttatatcagagtc

SEQ ID NO: 31388 - DNA, 766 bp, Homo sapiens
agactttaaggaacccaaaaagcaactcataggctgagggggtgatgagggaaaatgttaccaaaagccaagcaaattcctctytatcaaaggcttatagtgcatgtggggtagagagaaagggtgtcttttctctaaatgaagattgacatgatttttagaacactttcacgttctgaatttaaacgtgttattacttaatggggcaatagaatcatccatttaataagagtcaggagaaaattcacagggcatgctgacttttcattcaaaggagggtcattatcactggatacactttaaagaaaaagtgacaaaaaataaatcaccttttcgttacattccatgagtcaggctaattcaagattctagtttcatagtgcctgtttatttgaaataggcatccctactatgaatctgctagaaatcatgagggttgtatttcaactcaatttaatatttattttattatacacaacatataaaacaacaacataatgtatcatcagtgtgcacatatgaacaagatgtaacacctgaattctaacacactgcattatgtaggagagataagtacaccaaaataaattaacagaaaatgaaaatggaaacaccataatggtacaaaaacactaaaaccagatgatctcaaacataaatcatagtaagttggaaacacaaatactttttttatagaaataaagagtgaagccaggaaatgcacctgaagcaggaattattgaagagtaagcagggttttgacagg

SEQ ID NO: 31389 - DNA, 766 bp, Homo sapiens
agactttaaggaacccaaaaagcaactcataggctgagggggtgatgagggaaaatgttaccaaaagccaagcaaattcctctctatcaaaggcttatagtgcatgtggggtagagagaaagggtgtcttttctctaaatgaagattgacatgatttttagaacacttwcacgttctgaatttaaacgtgttattacttaatggggcaatagaatcatccatttaataagagtcaggagaaaattcacagggcatgctgacttttcattcaaaggagggtcattatcactggatacactttaaagaaaaagtgacaaaaaataaatcaccttttcgttacattccatgagtcaggctaattcaagattctagtttcatagtgcctgtttatttgaaataggcatccctactatgaatctgctagaaatcatgagggttgtatttcaactcaatttaatatttattttattatacacaacatataaaacaacaacataatgtatcatcagtgtgcacatatgaacaagatgtaacacctgaattctaacacactgcattatgtaggagagataagtacaccaaaataaattaacagaaaatgaaaatggaaacaccataatggtacaaaaacactaaaaccagatgatctcaaacataaatcatagtaagttggaaacacaaatactttttttatagaaataaagagtgaagccaggaaatgcacctgaagcaggaattattgaagagtaagcagggttttgacagg

SEQ ID NO: 31390 - DNA, 766 bp, Homo sapiens
agactttaaggaacccaaaaagcaactcataggctgagggggtgatgagggaaaatgttaccaaaagccaagcaaattcctctctatcaaaggcttatagtgcatgtggggtagagagaaagggtgtcttttctctaaatgaagattgacatgatttttagaacactttcacgttctgaatttaaacgtgttattacttaatggggcaatagaatcatccatttaataagagtcaggagaaaattcacagggcatgctgacttttcattcaaaggagggtcattatcactggatacactttaaagaaaaagtgacaaaaaataaatcaccttttcgttacattccatgagtcaggctaattcamgattctagtttcatagtgcctgtttatttgaaataggcatccctactatgaatctgctagaaatcatgagggttgtatttcaactcaatttaatatttattttattatacacaacatataaaacaacaacataatgtatcatcagtgtgcacatatgaacaagatgtaacacctgaattctaacacactgcattatgtaggagagataagtacaccaaaataaattaacagaaaatgaaaatggaaacaccataatggtacaaaaacactaaaaccagatgatctcaaacataaatcatagtaagttggaaacacaaatactttttttatagaaataaagagtgaagccaggaaatgcacctgaagcaggaattattgaagagtaagcagggttttgacagg

SEQ ID NO: 31391 - DNA, 1393 bp, Homo sapiens
tattatccataagtcaagttggaatttggtgcagaaataatgtttcttaatattattaacagaattaactcaaaatactgtgaaagcaataggttgaaaactttaaagcaagaacaaaaatctcaaaaattgtcttatcaatggcaagactattatcaagtttcacttattaattctattaaagttggtattttaaaatgcttttagtattttaaatatcggaatgtctacaacaggatttctcaacttctgtactattacagtttggagccaaatttgagaattctgattattacttattacagcaactactgtaaaggaggaagggttgtcctgtgcattgtaagatgcttagtagcatccctggcatctattcctgaagtatgcacctgaattgtgacaatttaaagtgtctctagatgttgtcaaatgtcccttagcatgtgtatgtgttggaggggaaagcggttgccctggtttgagaatcactgatctaagtttattaaattataaactattaaacatatgcaattggttttatgattttcgtaagtcatatttccaaatcttcagcaaattttaagacatactcaatatttgtgaaaacatctacctttataattgaatagagtttgctatattttatgagggaaatagtagatgttaatgagtattatatgtgctaaagatcaagtttcaggacagaaaaatagcagagacaataaaaacgttggctctaagacaatggtaatattccctcaaacataatggaaagaaaaaaattatgaatagcatctatacaactgttttttttcataaatacttttataatttatttttggaggtgctgacaaagattgaaacaaacacaattataaaatctattgtttttatatcaacatggctaaaagagatatattatgaattacaaataatagatattgacactaaaacaccactttctgaggcacatacacattttctgctaaagagattatatgaaaatgaaaaaatggcatactgtgccttaaaacatggctaagcaaccaaaattataattcatcacttcaaattaaaattttaaattttttttggagagtgtttccctgcttagtcaccaacctgcttgagaaaaacatatggcagaatctttaaaaaaaggtcaacacagtgrgtgaagagtataattttcaaaacaacagatatgtattattcctgataccacctggtgtacactgaaattttgctttctaaaaacatttttctcttcaaaaaagggaagtatcatgaatataattttgatacttataattttcttatcagtataattcaaatatagactactatacttgtcaattatttacttttcacttgcctttcttacttctgaaca

SEQ ID NO: 31392 - DNA, 1130 bp, Homo sapiens
ctggtctctagtactgaagcagatataggacttagcataaaataagcataaaactagaaaaagtaatgcatttgatccaactactttggtggtaaaaagttaggattgtactttatgatgtgatcaaggtccaggatagtaaaaatggactattcagagtgcacagaagtgtgccagaaaagtgtgacctggtggcttttttaaagtataataaatctaatggacaaaattagcaaagcctcactttaaaaaaagtagcattacaaatcccaaagaaaaaacttaaaaataacaagaaaaaaactcataaaatagaatgatttttaaaagtttgtactgatttacatttcctaatgtctgtgggtgattttatttattcctttgacaatcatttattcagtgtccagtgccaagcactatgctgggcagagaatacaagataagtctcacatgattcctgtgtacgtggagtaaacagcctaggagaaaagatttctctcacaaagtggaggcataatgcagccttacccttcaatgtatggtttgatgcattatggtggtaagtaatcttataagaaagatagacaactgttagaaattatgtgtttaaagaatttagcgacaagttgggtatggtatggtttgatgcattatggtgtatggtttgatgcattatggtggtaagtaatcttataagaaagatagacaactgttagaaattatgtgtttaaagaatttagcgacaagttgggtgcggtggcttatacctgtaaccctagcactttgggaggctgaggactgtggatcacttgaggtcaggaattcgagaccagcctaggcaatatggtgaaamcctgtctctactaaaaatacaaaaattagccgggtttgatggccggcgcctgtaatcccagctactcgggaggctgagacaagagaatcccttgaacctaggagacaggttgcagtgagccaggatggcaccactgcactccaacctgggcaacagagggagactctgtctcaaaaacaacaaaaaacaaaaacaaagaatttagtgacctaagaaaatgttacctacaggttaacgcaaaatggaagttgaaaatggaatggaaaaatcctgttat

SEQ ID NO: 31393 - DNA, 1130 bp, Homo sapiens
ctggtctctagtactgaagcagatataggacttagcataaaataagcataaaactagaaaaagtaatgcatttgatccaactactttggtggtaaaaagttaggattgtactttatgatgtgatcaaggtccaggatagtaaaaatggactattcagagtgcacagaagtgtgccagaaaagtgtgacctggtggcttttttaaagtataataaatctaatggacaaaattagcaaagcctcactttaaaaaaagtagcattacaaatcccaaagaaaaaacttaaaaataacaagaaaaaaactcataaaatagaatgatttttaaaagtttgtactgatttacatttcctaatgtctgtgggtgattttatttattcctttgacaatcatttattcagtgtccagtgccaagcactatgctgggcagagaatacaagataagtctcacatgattcctgtgtacgtggagtaaacagcctaggagaaaagatttctctcacaaagtggaggcataatgcagccttacccttcaatgtatggtttgatgcattatggtggtaagtaatcttataagaaagatagacaactgttagaaattatgtgtttaaagaatttagcgacaagttgggtatggtatggtttgatgcattatggtgtatggtttgatgcattatggtggtaagtaatcttataagaaagatagacaactgttagaaattatgtgtttaaagaatttagcgacaagttgggtgcggtggcttatacctgtaaccctagcactttgggaggctgaggactgtggatcacttgaggtcaggaattcgagaccagcctaggcaatatggtgaaaccctgtctctactaaaaatacaaaaattagccgggtktgatggccggcgcctgtaatcccagctactcgggaggctgagacaagagaatcccttgaacctaggagacaggttgcagtgagccaggatggcaccactgcactccaacctgggcaacagagggagactctgtctcaaaaacaacaaaaaacaaaaacaaagaatttagtgacctaagaaaatgttacctacaggttaacgcaaaatggaagttgaaaatggaatggaaaaatcctgttat

SEQ ID NO: 31394 - DNA, 1130 bp, Homo sapiens
ctggtctctagtactgaagcagatataggacttagcataaaataagcataaaactagaaaaagtaatgcatttgatccaactactttggtggtaaaaagttaggattgtactttatgatgtgatcaaggtccaggatagtaaaaatggactattcagagtgcacagaagtgtgccagaaaagtgtgacctggtggcttttttaaagtataataaatctaatggacaaaattagcaaagcctcactttaaaaaaagtagcattacaaatcccaaagaaaaaacttaaaaataacaagaaaaaaactcataaaatagaatgatttttaaaagtttgtactgatttacatttcctaatgtctgtgggtgattttatttattcctttgacaatcatttattcagtgtccagtgccaagcactatgctgggcagagaatacaagataagtctcacatgattcctgtgtacgtggagtaaacagcctaggagaaaagatttctctcacaaagtggaggcataatgcagccttacccttcaatgtatggtttgatgcattatggtggtaagtaatcttataagaaagatagacaactgttagaaattatgtgtttaaagaatttagcgacaagttgggtatggtatggtttgatgcattatggtgtatggtttgatgcattatggtggtaagtaatcttataagaaagatagacaactgttagaaattatgtgtttaaagaatttagcgacaagttgggtgcggtggcttatacctgtaaccctagcactttgggaggctgaggactgtggatcacttgaggtcaggaattcgagaccagcctaggcaatatggtgaaaccctgtctctactaaaaatacaaaaattagccgggtttgatggccggcgcctgtaatcccagctactcgggaggctgagacaagagaatcccttgaacctaggagacaggttgcagtgagccaggatggcaccactgcactccaacctgggcaacagagggagactctgtctcamaaacaacaaaaaacaaaaacaaagaatttagtgacctaagaaaatgttacctacaggttaacgcaaaatggaagttgaaaatggaatggaaaaatcctgttat

SEQ ID NO: 31395 - DNA, 1228 bp, Homo sapiens
atttgccaaaatcaaagtggacgactgtggaaaaactaagggatgctttaggttggtggaactgcaggttggataactttaaggctaagactgatttacttctcagggtagtatttaaattgcatgcagttccttctaatcagggggcctgagctccttgatcacctcagcagggttatgaagtttcgtaayggccatcccgcttttcagtcttaaaggccttttaactttagtatgtcctgggcccgggaccattcttccatggttcttttctagctgtaccaccattgctccaggtgtctcctactcaccaattgctgatatgcagaagactcatgtgacacagaacgtgtctgtgcttattcagcaggggctgtgggcaggacaggcaatgatagacatgtttagtacccaattccttttttagtaaatagtcctgacctatggatatctgtatgattctaactagtcattaagcattcattgttgctagcttgttatctcaggcatggtgagtctctacatgattattagtagtatcacgacatgacgggctgggctagaaaacagtcatgtggacaatgggcctcccatctagacagctcagcttctttgggaaagcctcctcctttgaaccctttacttcctaaaacaaattgcccctgaataatttgatggtcaggggcaaagttttgatggtcactgtactgaaggttctgattttgctgttgttcagtacttaaggtctaagaaggaaaaattgaatacaggggctttgagctttctttggattacaaggccacttctaaggaatgaataaaaatagccaaaaatgttcttattgaggaagatggtcagcaatgtataaacctggtgattgggggatattttgagaagggagggaattttagtactctactggcttcaaagtgacttgttttcttgtccatttactcctttttttaacttcccttgctccttttcatctttttcaccccagtgccctgttgccttgatcctattatatctcttcctgactgctcgggtatttctgccagcatagtagtacatttctgtcccctcctcaacacttagcacccctgtgccctgttcctttagataccttccatctgcgcgtatattgtcccacccattgcttcaactttctaccattctgcaaatggtgtaatacagtgttcctcaaaccagggcttgccagttctgaaag

SEQ ID NO: 31396 - DNA, 534 bp, Homo sapiens
gggtaagcttacatttcagcatctggattaaacgccagacaccactgtgcttgtgttcattgttaattgaagtcacactgtgtgcacaagagagcgataagcactctggatcatttaaaggaaaaggagatgcgactcctaccttcagaaggttataatggacttattataatggacttattatacggacaaacaaatgaacagttacacacatgcaaagctacagcagtacaagatagtatgtcatgagtgatgtgcttaatgaaacagatcatrtatctgctgtatgtagggctctgttcaattctcacagcattcttatttactcctcaccatgtccttgagaggtataggtattattgtcctgattttagagagattaagaaacttggtcaaggctatacaactaattagtagaagaattaaaattcaatcctaagtctgtctgaccccaaagcccatgaatactcttaactcctatgctgtaaatataaaaagactgaacgggggccagacgtggtggctcatgcctgt

SEQ ID NO: 31397 - DNA, 1225 bp, Homo sapiens
  misc_feature (1)...(1225): n = A,T,C or G
cattgactctccttatatatagattatgagacattttctcagaaaaaaaataccaaatatctcagaccccttatttattcatgtcctcaagaaatattatttgagcacctaataggagttaccaagaggcaaaaataaataaataatagtcctctctctcaagaaaccataataacaatccagtagagaaatacataatgatcatggaagcttttacaaggaaagggagatacctaagagaatgggtgcctaagtttgccatggagagtccacgaaggtttcatggaggaggtggtgtgtaaattgagactatttaaagaaggggaagaagtctgttgagcagaaaatggggggaagtcattctaggagaagagaacagcatatgcagagccatggaagtgtggaagcatgcaatcctggaatctataatagtttataatcactgacacatgagaaaagacagattggcagaaaacgaggatataagtaggcaggacctgagccacgctaaggacgatgaggttgcatcatggagactagtgagaagtactgaggcttttagagagtagatcaatgaggtttgtattctggaaattcacatcaggcagctgtgcagaaggagagtggttggagtcaggtagcccagtggggaggccaatctttaatyaaggcaagatctgatgaggcctatgagggcagtgcaatgccattctgagccaggccagaacctgactttctgtgtgattcaaccattgcccaacacacctgagtgatggtgcagacccatacaagaagcatgaagttatgcacttgagtctccaaactgtgattcacagtcctgacaatatttcctgtgtgtgtaagagaccaccctctccaaagtcaactggaacagtttaagacatcacaagtgacccatggagaagccaagcttccttgcctaacaaagaagctgatacgttgttgaacttctaaaggcacttgggggaggtggtttttaatacaaagtcacttctgagcttgtggtttggtaaatttaagtcttttccaaacaaggcagccaggctggcaaagtgatcctttttcatcccctctaggcactgattcagttctctgaagcctcccntgtttcgctcttcctgttccttctcctgaaatgtctttcatccaccagtctatgattggacattggagtcctatagatccaggttcaaattctagctcc

SEQ ID NO: 31398 - DNA, 1225 bp, Homo sapiens
  misc_feature (1)...(1225): n = A,T,C or G
cattgactctccttatatatagattatgagacattttctcagaaaaaaaataccaaatatctcagaccccttatttattcatgtcctcaagaaatattatttgagcacctaataggagttaccaagaggcaaaaataaataaataatagtcctctctctcaagaaaccataataacaatccagtagagaaatacataatgatcatggaagcttttacaaggaaagggagatacctaagagaatgggtgcctaagtttgccatggagagtccacgaaggtttcatggaggaggtggtgtgtaaattgagactatttaaagaaggggaagaagtctgttgagcagaaaatggggggaagtcattctaggagaagagaacagcatatgcagagccatggaagtgtggaagcatgcaatcctggaatctataatagtttataatcactgacacatgagaaaagacagattggcagaaaacgaggatataagtaggcaggacctgagccacgctaaggacgatgaggttgcatcatggagactagtgagaagtactgaggcttttagagagtagatcaatgaggtttgtattctggaaattcacatcaggcagctgtgcagaaggagagtggttggagtcaggtagcccagtggggaggccaatctttaatcaaggcaagatctgatgaggcctatgagggcagtgcaatgccattctgagccaggccagaacctgactttctgtgtgattcaaccattgcccaacacacctgagtgatggtgcagacccatacaagaagcatgaagttatgcacttgagtctccaaactgtgattcacagtcctgacaatatttcctgtgtgtgtaagagaccaccctctccaaagtcaactggaacagtttaagacatcacaagtgacccatggagaagccaagcttccttgcctaacaaagaagctgatacgttgttgaacttctaaaggcacttgggggaggtggtttttaatacaaagtcacttctgagcttgtggtttggtaaatttaagtcttttccaaacaaggcagccaggctggcaaagtgatcctttttcatcccctctaggcactgattcagttctctgaagcctcccntgtttcgctcttcctgtyccttctcctgaaatgtctttcatccaccagtctatgattggacattggagtcctatagatccaggttcaaattctagctcc

SEQ ID NO: 31399 - DNA, 1225 bp, Homo sapiens
  misc_feature (1)...(1225): n = A,T,C or G
cattgactctccttatatatagattatgagacattttctcagaaaaaaaataccaaatatctcagaccccttatttattcatgtcctcaagaaatattatttgagcacctaataggagttaccaagaggcaaaaataaataaataatagtcctctctctcaagaaaccataataacaatccagtagagaaatacataatgatcatggaagcttttacaaggaaagggagatacctaagagaatgggtgcctaagtttgccatggagagtccacgaaggtttcatggaggaggtggtgtgtaaattgagactatttaaagaaggggaagaagtctgttgagcagaaaatggggggaagtcattctaggagaagagaacagcatatgcagagccatggaagtgtggaagcatgcaatcctggaatctataatagtttataatcactgacacatgagaaaagacagattggcagaaaacgaggatataagtaggcaggacctgagccacgctaaggacgatgaggttgcatcatggagactagtgagaagtactgaggcttttagagagtagatcaatgaggtttgtattctggaaattcacatcaggcagctgtgcagaaggagagtggttggagtcaggtagcccagtggggaggccaatctttaatcaaggcaagatctgatgaggcctatgagggcagtgcaatgccattctgagccaggccagaacctgactttctgtgtgattcaaccattgcccaacacacctgagtgatggtgcagacccatacaagaagcatgaagttatgcacttgagtctccaaactgtgattcacagtcctgacaatatttcctgtgtgtgtaagagaccaccctctccaaagtcaactggaacagtttaagacatcacaagtgacccatggagaagccaagcttccttgcctaacaaagaagctgatacgttgttgaacttctaaaggcacttgggggaggtggtttttaatacaaagtcacttctgagcttgtggtttggtaaatttaagtcttttccaaacaaggcagccaggctggcaaagtgatcctttttcatcccctctaggcactgattcagttctctgaagcctcccntgtttcgctcttcctgttscttctcctgaaatgtctttcatccaccagtctatgattggacattggagtcctatagatccaggttcaaattctagctcc

SEQ ID NO: 31400 - DNA, 1225 bp, Homo sapiens
  misc_feature (1)...(1225): n = A,T,C or G
cattgactctccttatatatagattatgagacattttctcagaaaaaaaataccaaatatctcagaccccttatttattcatgtcctcaagaaatattatttgagcacctaataggagttaccaagaggcaaaaataaataaataatagtcctctctctcaagaaaccataataacaatccagtagagaaatacataatgatcatggaagcttttacaaggaaagggagatacctaagagaatgggtgcctaagtttgccatggagagtccacgaaggtttcatggaggaggtggtgtgtaaattgagactatttaaagaaggggaagaagtctgttgagcagaaaatggggggaagtcattctaggagaagagaacagcatatgcagagccatggaagtgtggaagcatgcaatcctggaatctataatagtttataatcactgacacatgagaaaagacagattggcagaaaacgaggatataagtaggcaggacctgagccacgctaaggacgatgaggttgcatcatggagactagtgagaagtactgaggcttttagagagtagatcaatgaggtttgtattctggaaattcacatcaggcagctgtgcagaaggagagtggttggagtcaggtagcccagtggggaggccaatctttaatcaaggcaagatctgatgaggcctatgagggcagtgcaatgccattctgagccaggccagaacctgactttctgtgtgattcaaccattgcccaacacacctgagtgatggtgcagacccatacaagaagcatgaagttatgcacttgagtctccaaactgtgattcacagtcctgacaatatttcctgtgtgtgtaagagaccaccctctccaaagtcaactggaacagtttaagacatcacaagtgacccatggagaagccaagcttccttgcctaacaaagaagctgatacgttgttgaacttctaaaggcacttgggggaggtggtttttaatacaaagtcacttctgagcttgtggtttggtaaatttaagtcttttccaaacaaggcagccaggctggcaaagtgatcctttttcatcccctctaggcactgattcagttctctgaagcctcccntgtttcgctcttcctgttcctyctcctgaaatgtctttcatccaccagtctatgattggacattggagtcctatagatccaggttcaaattctagctcc

SEQ ID NO: 31401 - DNA, 1225 bp, Homo sapiens
  misc_feature (1)...(1225): n = A,T,C or G
cattgactctccttatatatagattatgagacattttctcagaaaaaaaataccaaatatctcagaccccttatttattcatgtcctcaagaaatattatttgagcacctaataggagttaccaagaggcaaaaataaataaataatagtcctctctctcaagaaaccataataacaatccagtagagaaatacataatgatcatggaagcttttacaaggaaagggagatacctaagagaatgggtgcctaagtttgccatggagagtccacgaaggtttcatggaggaggtggtgtgtaaattgagactatttaaagaaggggaagaagtctgttgagcagaaaatggggggaagtcattctaggagaagagaacagcatatgcagagccatggaagtgtggaagcatgcaatcctggaatctataatagtttataatcactgacacatgagaaaagacagattggcagaaaacgaggatataagtaggcaggacctgagccacgctaaggacgatgaggttgcatcatggagactagtgagaagtactgaggcttttagagagtagatcaatgaggtttgtattctggaaattcacatcaggcagctgtgcagaaggagagtggttggagtcaggtagcccagtggggaggccaatctttaatcaaggcaagatctgatgaggcctatgagggcagtgcaatgccattctgagccaggccagaacctgactttctgtgtgattcaaccattgcccaacacacctgagtgatggtgcagacccatacaagaagcatgaagttatgcacttgagtctccaaactgtgattcacagtcctgacaatatttcctgtgtgtgtaagagaccaccctctccaaagtcaactggaacagtttaagacatcacaagtgacccatggagaagccaagcttccttgcctaacaaagaagctgatacgttgttgaacttctaaaggcacttgggggaggtggtttttaatacaaagtcacttctgagcttgtggtttggtaaatttaagtcttttccaaacaaggcagccaggctggcaaagtgatcctttttcatcccctctaggcactgattcagttctctgaagcctcccntgtttcgctcttcctgttccttytcctgaaatgtctttcatccaccagtctatgattggacattggagtcctatagatccaggttcaaattctagctcc

SEQ ID NO: 31402 - DNA, 989 bp, Homo sapiens
tactacgccagagsgtcaatgcctggcagagtgaacacttagtaagctgcagttgccctgaaatattttcctgttgctgattcatttcctcatctgtggataccatattccaaacttgctgtgccaccctctgaaggggcaagttctttcctaggagtagataccaagagagaggaagcccatgtcatggggacaaccacacaggccaaacacaggtgtcactgcctgcagggacagcctgcaggcatcaggcctcccaggagatagcaggcaggacaggaccatttcagactcatttcagcagtgtgtggacagaaccccactgagaaatgcaagcatgagacctggagtctattcctgtcttgtcctggggttccttccactggatgctcatcaggggaaatcctccctctggatgctgatgtggggaaaatggccaactagttttaaccttaaactcatccaaaacttattttctctccacttgagatagttgtcaggagatctgagttctcaccttccttctgctcttcccttgtatgtgaccttaggcaagttgcttaatccctctgagactcagtttcctctcttgtagctgcaggatgatggctgggctctattctagatcagtgagactcaaacctgccctgtggcatcagtcaggaacagttttgccgagtaggctccagtccagaccaatacatcacgatctgtgggagtgaggcccaggcgattcccaagcactggaagggttggaaattcaggcatatggtttctgccttaaattccatctatgaaagccgaagcgctctctttaccaccaccacctctccttcccacccttgtcttgtttgctgctgatttctcgcctgactcaagaacaaatgtgtttaagccccaagcccctaaaaatgggaagctgtctatttcccttctgtaccagctcccacatgtgtctggacacagactctgccagggaagtcccctcc

SEQ ID NO: 31403 - DNA, 989 bp, Homo sapiens
tactacgccagagcstcaatgcctggcagagtgaacacttagtaagctgcagttgccctgaaatattttcctgttgctgattcatttcctcatctgtggataccatattccaaacttgctgtgccaccctctgaaggggcaagttctttcctaggagtagataccaagagagaggaagcccatgtcatggggacaaccacacaggccaaacacaggtgtcactgcctgcagggacagcctgcaggcatcaggcctcccaggagatagcaggcaggacaggaccatttcagactcatttcagcagtgtgtggacagaaccccactgagaaatgcaagcatgagacctggagtctattcctgtcttgtcctggggttccttccactggatgctcatcaggggaaatcctccctctggatgctgatgtggggaaaatggccaactagttttaaccttaaactcatccaaaacttattttctctccacttgagatagttgtcaggagatctgagttctcaccttccttctgctcttcccttgtatgtgaccttaggcaagttgcttaatccctctgagactcagtttcctctcttgtagctgcaggatgatggctgggctctattctagatcagtgagactcaaacctgccctgtggcatcagtcaggaacagttttgccgagtaggctccagtccagaccaatacatcacgatctgtgggagtgaggcccaggcgattcccaagcactggaagggttggaaattcaggcatatggtttctgccttaaattccatctatgaaagccgaagcgctctctttaccaccaccacctctccttcccacccttgtcttgtttgctgctgatttctcgcctgactcaagaacaaatgtgtttaagccccaagcccctaaaaatgggaagctgtctatttcccttctgtaccagctcccacatgtgtctggacacagactctgccagggaagtcccctcc

SEQ ID NO: 31404 - DNA, 1172 bp, Homo sapiens
acatgttctcacggtatcaaaaacggcaggaagagaaaactaacctggtggagatgaaacttagtgggaacactccgctttcctcccctgctccgtgtgtgagcacttggctcagaaatgcactgtggctgagacagccctatctggcttcacctaagcctacccccgtgttgagttctttaacttagttatcaaagcggcaagggtttcagatctagacaagctgcatcatgcttatttttgctgaggttttctgacaaatggctctacttgaaatttccagatttaaatgtctgttttattaaaactaaagtacttttgagtcatatttgcttttatgtagtagaagcaagtagaagagagtccatgggaaggaatagctggctttgcctcacaggtgtttagggaggactgctgtctccaatgcaagacctggattaccgtttagagatccacctacccctcatgatgctcttgttgctggaatcatggtctgtttcatgctttacgtgacttagcaggaccttgaaagctgtcctgagtgcccatgctggaatggggtagatttcagttccctctccctcactcccgcatgaacctcagcctcactctactcaggtctagggtacttagtgtgttcagtgatgattgtctacatagatggattaatacatatgcacctttataatcatcccagctaccatctaaggttctagctttctctggagacatttttggtggtttacaatgttattttccagtgcgcatagcaggccccagaggcaaggtgatcaccyctttgtttcagttaagaaaactgagttttagtgaggacaatcaatttttcccatatcacaaaactggtcatgtgatgctgcatcccatatttaagtccagagcagtgagcttctccctatccctctattatgctgccattttgtattttgtaggtgtgtaaaatcaaatgtcattcttccttaaaaaggactgtgaatggtaagcaacagttgggaagggtgacaccagacaatggctgaaaacagggcgactggaagttgactgatgggtgctgagcgcttggcatccgttcctgctgcagaccccactggagtctcctcagaaggggacactggtggcttccattggccctgcctcccgccagggctgtgtga

SEQ ID NO: 31405 - DNA, 487 bp, Homo sapiens
tttcaaacatgcagaatagcaaaggaaataatctaatagtgcccagattaaataaatgttagtattatgcctttttgctctcttttattttaaaaaataagatgttacagatctaattgaagctcccttgtaatccttctgatttcattccccccaccaccccctgccaagtgcagatcactttcaaatagaatgagagctactgagtcatcatattgggattattttttatagactttcattggtttttgcttcacatcaaatattaaaaagctttgttaaacaactaccaattggttaaaaaaaaacggtttaaaataaagcaaattctatttcttatataccacaccgtgctcaaatgaaccaaacctggtttatgtaacacttcttagaaaaggtgactcattttacaacygaaaagaaatggagctttagcatgtcttctcctacatatcacccgttatgcctcggaaaagaatctgcccct

SEQ ID NO: 31406 - DNA, 1224 bp, Homo sapiens
agagatgggtcagaaatgttttctgtcttcaaggagttcagtgccttaaatttccattttcttcccccttaagctggatattctmttgtactgtgtttggcacaaagtatgcgcccagccaaagtttgtaaattgacaggcctgcataggagcagatatactaaatctatgttaattgtgtatatttctggtctcacgagcattgcgaaatgaagagcaatttctctttgttttctgtgtgaccttgaacaaatcacttaatgtctttaaatttaattgcttccagtgcacaataatgcagtaccacccatcacacttaagattataggtaaaattaaatgaaagaatgaagcaaaagtgcctcatagagagtatacaaactgaagcatcaccacgatgatcaaggttgcaaagggaccacagaatcaggggactttagaatcagaaaaaccatgaagtcttctcttttagtaatattgaaatatttttttaaagggtagcattccttttcatactaaatgttatcaaaataccaatagcataaaacagaaaaacatggacccaggattatctcctagagactttactttgtaactcactgatggaccaaatctagtctttgtggtttgctgattagaaaactgagttccagacagattatatggtggttccaaggaggcaacacattacatgaatgatgaaagactgaatgctttacccctaagagcaggaacaaggcaaggatgtacatttccatcatttgtatccaagtactggaatttccagccactgcaataaggcaagaaaaataaataaaagcctaacaaattggaaaaacaaaacaaaacaaaaagctattttatttgcagatgatatgattttctctgaagaaaatctcaaggaatctacaaaaattgaaaaacaacaacaacaaccaccaaacaaccccctcttccagtttccagaactaatacatgatttcatcaagtcacaggacacaagatcaacacattaaaaaaaaatcacatttacctatactaataataaaaatgtggaaaacaaattgaaaaagccaatctcaaaagattatatactgtatgattccatgtatagaagattcctgaaatgacaaaattttagaaatggagaacatattcattggccggggttgaggaggggtgggttgggtcggatgcgaatgtagctatccagggcaacaggagg

SEQ ID NO: 31407 - DNA, 1224 bp, Homo sapiens
agagatgggtcagaaatgttttctgtcttcaaggagttcagtgccttaaatttccattttcttcccccttaagctggatattctcttgtactgtgtttggcacaaagtatgcgcccagccaaagtttgtaaattgacaggcctgcataggagcagatatactaaatctatgttaattgtgtatatttctggtctcacgagcattgcgaaatgaagagcaatttctctttgttttctgtgtgaccttgaacaaatcacttaatgtctttaaatttaattgcttmcagtgcacaataatgcagtaccacccatcacacttaagattataggtaaaattaaatgaaagaatgaagcaaaagtgcctcatagagagtatacaaactgaagcatcaccacgatgatcaaggttgcaaagggaccacagaatcaggggactttagaatcagaaaaaccatgaagtcttctcttttagtaatattgaaatatttttttaaagggtagcattccttttcatactaaatgttatcaaaataccaatagcataaaacagaaaaacatggacccaggattatctcctagagactttactttgtaactcactgatggaccaaatctagtctttgtggtttgctgattagaaaactgagttccagacagattatatggtggttccaaggaggcaacacattacatgaatgatgaaagactgaatgctttacccctaagagcaggaacaaggcaaggatgtacatttccatcatttgtatccaagtactggaatttccagccactgcaataaggcaagaaaaataaataaaagcctaacaaattggaaaaacaaaacaaaacaaaaagctattttatttgcagatgatatgattttctctgaagaaaatctcaaggaatctacaaaaattgaaaaacaacaacaacaaccaccaaacaaccccctcttccagtttccagaactaatacatgatttcatcaagtcacaggacacaagatcaacacattaaaaaaaaatcacatttacctatactaataataaaaatgtggaaaacaaattgaaaaagccaatctcaaaagattatatactgtatgattccatgtatagaagattcctgaaatgacaaaattttagaaatggagaacatattcattggccggggttgaggaggggtgggttgggtcggatgcgaatgtagctatccagggcaacaggagg

SEQ ID NO: 31408 - DNA, 1224 bp, Homo sapiens
agagatgggtcagaaatgttttctgtcttcaaggagttcagtgccttaaatttccattttcttcccccttaagctggatattctcttgtactgtgtttggcacaaagtatgcgcccagccaaagtttgtaaattgacaggcctgcataggagcagatatactaaatctatgttaattgtgtatatttctggtctcacgagcattgcgaaatgaagagcaatttctctttgttttctgtgtgaccttgaacaaatcacttaatgtctttaaatttaattgcttccagtgcacaataatgcagtaccacccatcacacttaagattataggtaaaattaaatgaaagaatgaagcaaaagtgcctcatagagagtatacaaactgaagcatcaccaygatgatcaaggttgcaaagggaccacagaatcaggggactttagaatcagaaaaaccatgaagtcttctcttttagtaatattgaaatatttttttaaagggtagcattccttttcatactaaatgttatcaaaataccaatagcataaaacagaaaaacatggacccaggattatctcctagagactttactttgtaactcactgatggaccaaatctagtctttgtggtttgctgattagaaaactgagttccagacagattatatggtggttccaaggaggcaacacattacatgaatgatgaaagactgaatgctttacccctaagagcaggaacaaggcaaggatgtacatttccatcatttgtatccaagtactggaatttccagccactgcaataaggcaagaaaaataaataaaagcctaacaaattggaaaaacaaaacaaaacaaaaagctattttatttgcagatgatatgattttctctgaagaaaatctcaaggaatctacaaaaattgaaaaacaacaacaacaaccaccaaacaaccccctcttccagtttccagaactaatacatgatttcatcaagtcacaggacacaagatcaacacattaaaaaaaaatcacatttacctatactaataataaaaatgtggaaaacaaattgaaaaagccaatctcaaaagattatatactgtatgattccatgtatagaagattcctgaaatgacaaaattttagaaatggagaacatattcattggccggggttgaggaggggtgggttgggtcggatgcgaatgtagctatccagggcaacaggagg

SEQ ID NO: 31409 - DNA, 980 bp, Homo sapiens
cctgccaagagataggtgggtcctctcatcatctctaagttgaggctccacatccgtagttctctccttggccttcacattaacattacaatgatctggagaaggtttagcaaatactgatgactggggttcaccccaaaagtgtgtatgtcatggtctgggatgcatcccaagcattcacagctttttcaatctccccagatgaatctaacatgcagcaagtttgaagacttggggaattctctcatctcccatacagtttgtttgcctaggcacaatttagaggaagagtcacacggtgtcacctttctattttacctgtcaatttcaatgacccttttctcctcatttctggacttattcagtgtcctcttccctcagccttgttcagccagctaatggcacatactaattccatactgggcactaactctttggatttcctaacacagaggatattttttatttaaaaagaggatattgatgtcttaaaaacaacagcagcagcaaaaatcaaatcacaggagatcagtggggycttttgaaggcttctaaaggagtctgtataggaaactcggtgctattgctgtgtgcaagccaatcctacctgggatgcaagcgttccttggaaaacaaccttctgagtctaagtagaagctggtgcctgaatctttaaattactttgtctttgtagttaaagaaggatttgtttttctttagaagcaaggcaacatcacaaatcctagctgaccacaacattcccaaagcctgaaaggcactctccggcaggtgagccagttgatcctggggtcccaggctcagtcacctagttaacactcatggccaaacattaaccacccaggctgcgctgtgctgtgtgctgggtctctgccttcaaagagctgcttccagctgggtggagagaagacagggccacagttacaggacagtaaggtcagtgctctgaaggcatagagaat

SEQ ID NO: 31410 - DNA, 547 bp, Homo sapiens
aattaataaatgaataatttgagttggtaaaaagtccaaaaagaaaatgaaacaaggtaatgggagagactgtcatcaatgaacacatcttccaggagacatttgagctgggatctgaatgaccaaaatgagccagccattcaaatactttggaaatgagtttcccaggaagtaaagagcagctagatcacaggtccaagtaggggaatgagtttgaaatgtccaaaggcctgaagaaggccaggaccatagtgaggaaggatgttattttaattacatggagaaatcataaackcaaacagggcaagaggggtaggaggaaagccaattaggagcctactggaataggcccgggaaataccaatggtggcttaaactagaaggaggcaaaattagaaagatggagagaagaggacaaatcagggatatattttggaagaaaatctgctaggacttgctagaatagatgtaagggatgatgataaggtaaaattactcctagggttatttttttttgcctgaacctcttggtggatggttgtgcctt

SEQ ID NO: 31411 - DNA, 594 bp, Homo sapiens
caagcagtaactgaaaacgtcccacaagatgaacacgaactttctctagacgaaaggcagctgggagcaggacgcgtccacgagtcccgatgggaacgcgcccacgccgcagctgggactcgggagaggctagggggaccgcgtggccttgctgtggaagggacccgcgcgggcccgccgcgaagggggccctgcctggcgcgacctggggagagccggggccggccgggtggagggcgcacggggacacacggacacgcacagacacagacacgcgccccgggctgaggagggtggtgggaggaccgccggccgccccccgcgcggarccccagggaacccggactccagccgcaaagcggagaggcgccagcagcaatcagccacctcaggggcggcggagtccaagcccctctcagccggaccgtaccgcctaaaccctcctcgggtcctccttcctcacgtatgaggtctctgtaccgaggcggctggttccatcgcagccccgagccaacccgccaatcccgcaggacactaaccgctccggccgccgcaggttctcccgggactgccccctccagggggccgctgtcc

SEQ ID NO: 31412 - DNA, 457 bp, Homo sapiens
  misc_feature (1)...(457): n = A,T,C or G
tcctgcctcagcctcccaagtagctgggactacaggtgcatgccatcacacccggctaattttttgtatttttagtagagatggggtttcaccgtgttagccaggttggtcttgaactgctgacctcgtgatccgcccgcctcggcctctcaaagtgntgggattacaggcgtgagccaccgcacccggccttggacggtcactttcaattgggaagcttatgatttaattcagggcatgaagacagatatccagctttgaagcacacaccaaacatgagccctgtttgtgccgacagtgagagaacctcacatgatgaggaggtttgtccagaacatactgaatcagggcccaggcagtcaggcaggccaaaaggattttggatttttgttttagacagaaaaagactttyataccttctagagtcattcatgctctgatttgtttaaacgtatgg

SEQ ID NO: 31413 - DNA, 1137 bp, Homo sapiens
ttcttctcttcctaaactgaacaatggctcagttcttggccctctcctctgcctaccaagcttgtccaacctgccttattttgttgttgttgttttgttttgctctaggcttttagcagcctgaaaccatggctcctaacaactgctttttagtttctgtctccagtgataagcagaaaaaagggatgaggaaggggctttactggccacccagaaacataaactaagaacccatgactgtattctctcccttggataccgctgatccctacaccctcttcttgagtgatctcaataggtcctatggctgtaagtgccatcagtatgctgaaggctttggaaatggagcttccacccttggactctcccttgaactccagactcatagacccaacagcctacctggatgtctgtcagctgtgtcartttaacatgtcagacacagagctcagagaacttcaaccccaatctactccctccagtattcccattctgatagcactgggctcagcataatgcttcagtttctctcataccccacatataatccagcattaaattgtcccccttctccctctcccacctgaatcatgccaccttcattctctcgttccctattcacctccatgtcctaaccaaacatcagctgtaggttgacttcaggagagttcctgaaatagaaagaaatgtcctggaatcctcaatattgacccccccgtgcatgccctccccaaacgcatgatgaaacaagaatgccagaacacagagcacccactcagctgccttcttggtgtgtggaagggaaaatgcctctcatgttttttttttttttttttttttagacaagagtcttgctcttgtctcccaggctggagtgcaatggcgccatcttggctcactgcaacctccgcctcctgggttcaagtgattctcctgcctcagtctcctaagtagatgggattattggcatgtgctgccatacccggctaatttttgtatttttagtagagacggatttcaccatgttggcgaggctggtctcgaactcctgacctcaagtgatctgcccgccttgggctctcaaagtgttgagattacaggcatgagcatcgcacccggcctcctcccatgattttg

SEQ ID NO: 31414 - DNA, 1137 bp, Homo sapiens
ttcttctcttcctaaactgaacaatggctcagttcttggccctctcctctgcctaccaagcttgtccaacctgccttattttgttgttgttgttttgttttgctctaggcttttagcagcctgaaaccatggctcctaacaactgctttttagtttctgtctccagtgataagcagaaaaaagggatgaggaaggggctttactggccacccagaaacataaactaagaacccatgactgtattctctcccttggataccgctgatccctacaccctcttcttgagtgatctcaataggtcctatggctgtaagtgccatcagtatgctgaaggctttggaaatggagcttccacccttggactctcccttgaactccagactcatagacccaacagcctacctggatgtctgtcagctgtgtcaatttaacatgtcagacacagagctcagagaacttcaaccccaatctactccctccagtattcccattctgatagcactgggctcagcamaatgcttcagtttctctcataccccacatataatccagcattaaattgtcccccttctccctctcccacctgaatcatgccaccttcattctctcgttccctattcacctccatgtcctaaccaaacatcagctgtaggttgacttcaggagagttcctgaaatagaaagaaatgtcctggaatcctcaatattgacccccccgtgcatgccctccccaaacgcatgatgaaacaagaatgccagaacacagagcacccactcagctgccttcttggtgtgtggaagggaaaatgcctctcatgttttttttttttttttttttttagacaagagtcttgctcttgtctcccaggctggagtgcaatggcgccatcttggctcactgcaacctccgcctcctgggttcaagtgattctcctgcctcagtctcctaagtagatgggattattggcatgtgctgccatacccggctaatttttgtatttttagtagagacggatttcaccatgttggcgaggctggtctcgaactcctgacctcaagtgatctgcccgccttgggctctcaaagtgttgagattacaggcatgagcatcgcacccggcctcctcccatgattttg

SEQ ID NO: 31415 - DNA, 591 bp, Homo sapiens
  misc_feature (1)...(591): n = A,T,C or G
tgtccgtcagaggtttgtggagtgtgtctgggtgaatgtgtcagagcctggatggggagacctgctcctacctcctaatgatctacagcagcctgcagatctctgagatnnccttgccccttctgaccatgggcccaagragatctggctacctccaggtcgacaaggggaaaggcctttataacagcaaattgccctaaagtggaacttgctgttttgtttttctgacttcccaattgctctgtctcttaatcccatactaatgacggggtacaaagggatgaaggaaaaatataaaacgaggccacaatgagatgaagttgatgacggtagcaatcagctctttaagatgcaaaaagtctgttaaaattcttccgaccagagcagatgcctcccagccccttgccattgcagaaggatgtgtgaactatgatatttgggctgctgtctggctcttctgcatgcaccacaagttcttgctgtagccctggggtctctcaaagcagcaggaaggagtacgagtgcctggagttgggggaaaaggaggcaatgttccatacaaagccttgagccacagatcccccaactggc

SEQ ID NO: 31416 - DNA, 591 bp, Homo sapiens
  misc_feature (1)...(591): n = A,T,C or G
tgtccgtcagaggtttgtggagtgtgtctgggtgaatgtgtcagagcctggatggggagacctgctcctacctcctaatgatctacagcagcctgcagatctctgagatnnccttgccccttctgaccatgggcccaagaagatctggctacctccaggtcgacaaggggaaaggcctttataacagcaaattgccctaaagtggaacttgctgttttgtttttctgacttcccaattgctctgtctcttaatcccatactaatgacggggtacaaagggatgaaggaaaaatataaaacgaggccacaatgagatgaagttgatgacrgtagcaatcagctctttaagatgcaaaaagtctgttaaaattcttccgaccagagcagatgcctcccagccccttgccattgcagaaggatgtgtgaactatgatatttgggctgctgtctggctcttctgcatgcaccacaagttcttgctgtagccctggggtctctcaaagcagcaggaaggagtacgagtgcctggagttgggggaaaaggaggcaatgttccatacaaagccttgagccacagatcccccaactggc

SEQ ID NO: 31417 - DNA, 410 bp, Homo sapiens
attttaagttgaaaagtgaggtattgtgtaatgccaggggggataagaattttatatttgtataaataagcacatgggaatatacaaaagaaataaaagtaccttttattacctgtgtagatagtgtgaccatataatttttcatccaaaccaagataatgtatctctccacatatctaaggtcttctttggtttctttaattagtatcttatagttttcaatatatagatactatattttttttagatttgtgtttaagttttccactttttgttactagtttttttttwaaatttcaaatccattgtttgttgctagtacatagaaatataattgacttttgtattttgagctcttatcctatgaccttgctaaactctcttactagttttaggactagctttagaat

SEQ ID NO: 31418 - DNA, 740 bp, Homo sapiens
tcctctccagccaaacccacctctttattatgtgcggactcatcagaccttctaacttcaggcctttgcacttgctgtttccgtcttctgggcctttctgccctctgatatctatataacaggtctttgctcaaatgttatgaggccttctttgaccaccctgtttaaaatgaaaatctgccctgtagcctccataccatgttctttcctatttcattttcctcctttgcacttatcaccaataaacaaactatgtattttacttagtgtctgtcttcttcagctggaatataagctccacgaaggcagggagttttgttcgtactgttctacccaacccctgccccccgccycattgcctataacagtgtgtggctcatggtaaatgttcaggaaatatttgttagatgtgtgagtgaatgaagacagtgttaccatattattttctagtggttgtgataaacaacattgactccctggactgttattttggaaccaacagcatgtacttgtatacgcttttgccagtgtacacctattgccaggtgtaggaatggagcctgtgtccacagaagcatgtgttctcttttcaaagtcatctggtttttactagtatattacttgtgacattggtctttttcttgccatgctttccataaggttacctgcctagaagctctttggaaatattctccctaaacatcaagacagaattctgttagtttgataataatatatgc

SEQ ID NO: 31419 - DNA, 547 bp, Homo sapiens
ccgcyaggacgcaatgcagggccccgtgcaagctgagagatcaaactgtgagatcaaactgtgagtcacagcagccacaggtgccagttgctataagtggaatcaccagggtgggaccagtcaaccttctgcagtccaggcaacccagatggccactccccatgacaggccggcacgctcaaggatgccatgaggacagctggatccagcaacccagccgctgtcatgcaatcacagaagccaccattgccacctttcctcccagccactagcttgagagtggagacaaatctgggagactgaggcttgcaaactaaacaagttgagaattaatctaaatagaatcctttaaccattatattttttcagccaactaattttatcaggttggctttctttttttagattaaaaaaaagtttttgttaccaagcaggaaagatgaaatcatacacacaaaacaaaatgaaacataagtattaatagtaataatacctttgcagcagaatcataactatatttacattaaactcatatctttgtattagt

SEQ ID NO: 31420 - DNA, 566 bp, Homo sapiens
tgccctactgtgaaactttttttgacacaagctttttgcattctttagatttgttgttaagtcagcttaaggacatggggtgaaagaagctcccttctattaattaactttcatttttttcagttcattcctgaaggaaagacaaagacatgcagatattgatgcagtctctggacacgcaaaatattcgaagtggggytcctctacatttctgggaaaaaaaaaactgatgtggagactcctggtaatgttaccacatgagccagtatagtattcctcaagtagtaaacgaaagagcctctgagtaagcccgtcgggctggatcagctgccataaaccagggctgcagttggtggagccaccaacagcactgggtggggaaaaaatggaggggtaacaatggagaaacacctccattctattttctgtcacctgctgtccagctactgacctagagataaatcatgccaaagatggggagaaaacctagggaaagggtggctaatagggtgtgcgcagacacagctcctttgtcctctctccaaaagaagcagaaaagctcatga

SEQ ID NO: 31421 - DNA, 629 bp, Homo sapiens
ctcggttggtccgggacacttccactgatctgaagttagcttcatcaagggctttcttcagcttaaaacacaagggagaaaattgaaacatttttactttccattaagagaagcttacttagttttggtcttatattttatcatctttggatcttcttttaaaaaggagagtcagtgaggcaataatatgtctgaataagcagatttatggagcaatagaccaagtggttttcatgatttttatcactaaagaacaaaatcttttttggaataaagaatgcaaatgtatattcatcatttgcattttaagagcatgactttggagtcaggcatctgtccaaatatcagcttcagtacttactagctgagtgatctggagcaattaactaccttaagcctcaggttcatcatctgaacagtgtgtgtatagcytacttcatagaatacaaataacaattaaattaaataagatcatataaagaaagaagtagaggctggcacacacaattactctgtgattatcatgctataagctcttctctgtcacttgcaacctcatgtctgaagaaatgaaaatgaattatatggcagtttatataaatatctgtcaggtactgactgccatggca

SEQ ID NO: 31422 - DNA, 746 bp, Homo sapiens
cataaacaggcagcagttyggatttggcacataggctgtagtttgccaactcctgatctagatgttggaaacatcatacaaagactccaaagcagctattataaacatactccacaaggtaaaggtaaacactctctaaatgaattgaaagacagacattctcaactaagaaatagaaactattaaaaagaaagaaatggaatttttaaaacagaaaaataccatatttgaaataactatcaagaaactcagaaaatcttcaaatactcttaggaatgctctgtttctgatgatacccaatagaattaagatgtaccccacaattctaagggtgattatgaggaataaagtagatcattttttaagcagaatgaagttttgcaggggcagaagctcaaatttaaaacttctagatattagatttgttactttattatttcatgtgctgggaaaagggaatggaaaatgtatcatcaactagaaaatacatggaaaagaaaaatattgctgtcagtcattttcttttattatttgtttgtttgttctgtttatattcgttttttcatcacaaaagtaatacatatatggttgggcgcggtggctcacgccggtattcccaacactttgggaggccgaggcaggtggatcacaaggtctggagatcgagaccatcctggctaacgtggtgaaaccccatcgctactaaaaatacaaaaaaattagccaggcgtggtggtgggtgcctg

SEQ ID NO: 31423 - DNA, 551 bp, Homo sapiens
tcctccaaaatgataattttctttgaagagagacttgtgagtatcatctttatgaattagttttaaaatataattcaacatataagaattccatttattcaacttttataatattgtgtcagtgaaacacaagactctgcctgttctccaccccattccattcttctggtctgatatgtctgcttcttgcacattgacagttctaattatacacattcaaaagggttttgaatgccaggtaccacaattcaaatatattagccacaaatttttgaattayattagccacaaaatctcactgttatattcatgagtcatgtccatttggaggcctataagcactagaaaccaaatgagttatctcagtacatttaaatggctacagagtgtatatcattttttgcatgattaaacttaggattgctttttgcaagttttaaagattctctgtaatttttttttttttttttttacaactcatgaccctttttcccccttctggagtatataaatatgtgtaaatatatatgtttaaatgttttattttttaa

SEQ ID NO: 31424 - DNA, 551 bp, Homo sapiens
tcctccaaaatgataattttctttgaagagagacttgtgagtatcatctttatgaattagttttaaaatataattcaacatataagaattccatttattcaacttttataatattgtgtcagtgaaacacaagactctgcctgttctccaccccattccattcttctggtctgatatgtctgcttcttgcacattgacagttctaattatacacattcaaaagggttttgaatgccaggtaccacaattcaaatatattagccacaaatttttgaattacattagccacaaaatctcactgttatattcatgagtcatgtccatttggaggcctataagcactagaaaccaaatgagttatctcagtacatttaaatggctacagagtgtawatcattttttgcatgattaaacttaggattgctttttgcaagttttaaagattctctgtaatttttttttttttttttttacaactcatgaccctttttcccccttctggagtatataaatatgtgtaaatatatatgtttaaatgttttattttttaa

SEQ ID NO: 31425 - DNA, 508 bp, Homo sapiens
aaggaactttatttttcatttttaatcacttcatagttgaattgtcctctgatcaacaaggggattagtgggccacacgtcccctctacgtaaacctatatggtccaagagtgttgtattttgcctcttgggctgagtaaaatcgaacctacctttgcctttcgttgttttttcacacattatgtaaattggtaagaataaaaataatgtgattggaagtacagcttgacagacaatatagtgtaatataatatccaaatacttatgaggtagcaatagtgccttggggcaccacatttattgtgaatgaggatttgcatttacacatttttctctatggtttagattgcatactaaattgctgtgggaaagtagaactgtttttaaaacattctgcttaaccactytacgggtaacaaagaaatgccaaatccagtttcaatctaatttgggaagtaaagtacagaggcacaagaagtcacattacacaagagttaataataaatag

SEQ ID NO: 31426 - DNA, 1382 bp, Homo sapiens
gcatggccaggatctggtgaggactcgcttccgggcttgcagatggccatttctcttggtgtcgtcacctggcctttcctctgtgctcatgtggaaagagagtgagagagggggtggagagggggagagagagatctggtgcctctttctcttaagtccaccaatcctactggattagggttctacccttacgacttcatttaaccttagttacttcataaaagccctttctccaaatactgtcacactgtgggttagcgtttcaacgtatgaattttgaggggacatgattcaacctgtgacagtgagcattctcagacctacctaactcctgttgtagtccttattctgagtggtcctcagttctctgagtggccctgaccaggtgtcatgcccacagtggagcagtcgcctcaatgattgctctcatgggcacataggcgagtcctctggggggcattgcaaggcctctcactgcttagttccccatgggaaagctgaccttaacactactgctttgtctacttcagctcctgccaccagaagtatactacagcaggtggggtgccaacatgatggctcaaactccgctaaattccatgaggtccccttggcctatggaaattttattatttttccccttattctcctcttctgtttttataggctcagcatagatcaacaggtccactacctatacagatatccaaatgggcaatatgatacagtgccccatttttatcatacaaaggcattgtctactctctgtgagagattattctggagtcccttgccgagccaccctttaaactttagaaaaggtacaaaataatttctgagacactcatgtagcatccctatgaggtcaattccaaagataccgatgactcccttttccctctccatgcccaagtctttaaatagatagattggtgtggatagacagattataaatgagaggtaggtggatagacagacaattgaagggyttgctcaattatacatgattcatgatagatgcataaattcatagctataggattgattgatagagggtagatgccagatggatggatgatgagatagataataaatgataatagctagctagctagataactgcatgggttttgcttcttccaattaagccccgaagaagtgagttggtgccccaatgttggtagttcttttgactgagtggtactgagcacatgttgttttgtctgtgtgctgtagagcaggggtcagtaaactatcaggccctggaataaggccaaagaatcatatataatctggggcctgtttttgtatagcctgtgagctaaacatgggttttatatttttgaaggtttgtgaaaaagcaaagtgacaatggcaatggc

SEQ ID NO: 31427 - DNA, 946 bp, Homo sapiens
ctcctgtctcagcctcccaaggtactgggattataggtgtgagccaccatgcccagccatgaatcctacactttaaaatggtgaatttaatgttatgtgaatttcacctcaatacaatgttttaaaaagtacaaagggcttcatagtaaaaattaaattttcctcccacttttctgtccctctccccaccatccttcactcatttcttttctccagagccaccactgttaaaaatttcttttttgcatcattctaraaatatcttggatatatacaaatgctaacatatggcatacacagtttcgtgtcttcttatacttgacaacatttgctggagaacttttcatatttttgcctggagaacttcctggttctctttttgtggggtaggtacagcattccatggaagggctggcccgagatgcatttcaacagctctgtaggatgaacatttaggttgttttcagtcttttgctgttacagatgaagctgtgatgaataatcttatccttgcgtggttcgtacttgagctagtctatctctaggataaattcctagaaatgggacgctaggacttgactaagtttaaacttgaaaatgaccgagtttttgcgaaactcttattgggtcggggggtccttgctcccagagctcccaagatggtggcgggccgcttccaagatggtggcaagccttgtgttctctgacctggggttcttggcctcatggattccaaggaatggaatcttgggccatgtggtgagtgttatcgctctattagaagccgtggatcacggaagagaaccgtggaacccagtgactagcgttcagctggattaggacaaacctgggcacctagctgtgcaggaacaatggcaagcctttagccggatcgggagcggcaatgggtgcctcattggatcaggagcacagtggacaccctgcc

SEQ ID NO: 31428 - DNA, 946 bp, Homo sapiens
ctcctgtctcagcctcccaaggtactgggattataggtgtgagccaccatgcccagccatgaatcctacactttaaaatggtgaatttaatgttatgtgaatttcacctcaatacaatgttttaaaaagtacaaagggcttcatagtaaaaattaaattttcctcccacttttctgtccctctccccaccatccttcactcatttcttttctccagagccaccactgttaaaaatttcttttttgcatcattctagaaatatcttggatatatacaaatgctaacatatggcatacacagtttcgtrtcttcttatacttgacaacatttgctggagaacttttcatatttttgcctggagaacttcctggttctctttttgtggggtaggtacagcattccatggaagggctggcccgagatgcatttcaacagctctgtaggatgaacatttaggttgttttcagtcttttgctgttacagatgaagctgtgatgaataatcttatccttgcgtggttcgtacttgagctagtctatctctaggataaattcctagaaatgggacgctaggacttgactaagtttaaacttgaaaatgaccgagtttttgcgaaactcttattgggtcggggggtccttgctcccagagctcccaagatggtggcgggccgcttccaagatggtggcaagccttgtgttctctgacctggggttcttggcctcatggattccaaggaatggaatcttgggccatgtggtgagtgttatcgctctattagaagccgtggatcacggaagagaaccgtggaacccagtgactagcgttcagctggattaggacaaacctgggcacctagctgtgcaggaacaatggcaagcctttagccggatcgggagcggcaatgggtgcctcattggatcaggagcacagtggacaccctgcc

SEQ ID NO: 31429 - DNA, 946 bp, Homo sapiens
ctcctgtctcagcctcccaaggtactgggattataggtgtgagccaccatgcccagccatgaatcctacactttaaaatggtgaatttaatgttatgtgaatttcacctcaatacaatgttttaaaaagtacaaagggcttcatagtaaaaattaaattttcctcccacttttctgtccctctccccaccatccttcactcatttcttttctccagagccaccactgttaaaaatttcttttttgcatcattctagaaatatcttggatatatacaaatgctaacatatggcatacacagtttcgtgtcttcttatacttgacaacatttgctggagaacttttcatatttttgcctggagaacttcctggttctctttttgtggggtaggtacagcattccatggaagggctggcccgagatgcatttcaacagctctgtaggatgaacatttaggttgttttcagtcttttgctgttacagatgaagctgtgatgaataatcttatccttgcgtggttcgtacttgagctagtctatctctaggataaattcctagaaatgggacgctaggacttgactaagtttaaacttgaaaatgacmgagtttttgcgaaactcttattgggtcggggggtccttgctcccagagctcccaagatggtggcgggccgcttccaagatggtggcaagccttgtgttctctgacctggggttcttggcctcatggattccaaggaatggaatcttgggccatgtggtgagtgttatcgctctattagaagccgtggatcacggaagagaaccgtggaacccagtgactagcgttcagctggattaggacaaacctgggcacctagctgtgcaggaacaatggcaagcctttagccggatcgggagcggcaatgggtgcctcattggatcaggagcacagtggacaccctgcc

SEQ ID NO: 31430 - DNA, 946 bp, Homo sapiens
ctcctgtctcagcctcccaaggtactgggattataggtgtgagccaccatgcccagccatgaatcctacactttaaaatggtgaatttaatgttatgtgaatttcacctcaatacaatgttttaaaaagtacaaagggcttcatagtaaaaattaaattttcctcccacttttctgtccctctccccaccatccttcactcatttcttttctccagagccaccactgttaaaaatttcttttttgcatcattctagaaatatcttggatatatacaaatgctaacatatggcatacacagtttcgtgtcttcttatacttgacaacatttgctggagaacttttcatatttttgcctggagaacttcctggttctctttttgtggggtaggtacagcattccatggaagggctggcccgagatgcatttcaacagctctgtaggatgaacatttaggttgttttcagtcttttgctgttacagatgaagctgtgatgaataatcttatccttgcgtggttcgtacttgagctagtctatctctaggataaattcctagaaatgggacgctaggacttgactaagtttaaacttgaaaatgaccgagtttttgcgaaactcttattgggtcggggggtccttgctcccagagctcccaagatggtggcgggccgcttccaagatggtggcaagccttgtgttctctgacctggggttcttggcctcatggattccaaggaatggaatcttgggccatgtggtgagtgttatcgctctattagaagccgtggatcacggaagagaaccgtggaacccagtgactagcgttcagctggattaggacaaaccygggcacctagctgtgcaggaacaatggcaagcctttagccggatcgggagcggcaatgggtgcctcattggatcaggagcacagtggacaccctgcc

SEQ ID NO: 31431 - DNA, 601 bp, Homo sapiens
agtttcttatgtctgtgtgaattcttaaaatctatttatatcctcttgcgatttcagtgagccaataaataatattctcctgtcctcttcaatagcaaattcagaagtcagtggaaaattagatactggtatcatgtcttagcttgttygggctgctataacaaaaatatcctagactgcatgtcttgtaaacaacaaaaatgtatttctcacatttccagaggctgggaagtccaaggctgaagtgccagccaattcagtgtctggtgagggcagcttcctgggacactgacagccatcttctagttgtgtcctcacatggtaggaagggcaaggggtctctctggagtttattttataagggcactaatcccatccatgatggctctgccttcatgacctaatttcctcccaccagctccatgccctaacaccatcaccattagggtgaaatttcaacatatgaatttgtaaaggacataacatctagtctgcagcagaccttctagattgagagaaaagagtcagttttattgttaaggatgattttggaaccttgctgagaattgtgtcctcagtgggcttcctcaaactctgagtt

SEQ ID NO: 31432 - DNA, 1237 bp, Homo sapiens
tgcatgataggcaaattggaaactagctgttaccgaaggagagctccaggggtgtgacttcctggctttactgtaaaaactccgtcaccagacgagcccccttcctaatacccatggttcaaaatccaccatgtcctggaagacccacctaaaattctctttctgtcaagtggcaaactcttctagctttgctcaccgacagtgacasctcttgcagctccaacctcacttcccttcaggtgtgcaatctgcacctgagtcctggtgtggtggtcgcggtacacttgcctcatatcccctaatggattagaagctgctgaaaggctgcgactgtgtcttagtcatcttcgtgtccctcaagagtccaccactgtgctgtacacatagtagggcctcagaaacctgtgagaaaaaaagtacattgattccctgcaacaatttctgcaattcctgataataagcattttcacaggatagatattttctattcattaaagaaaaatacaatttgatcaggcacaaaggccaggaagggccatggctgcaatattatgcacagtgggggaaaaatcacccccgttggaagacctttataaaaacagagaatgtgttcctggtgtagcagctatttatttttctcatatgtagtatattttaaaaaatgcagtaataatcagaagcaggccgcactgcttcagtttttgccactctcctgattccctgtgcttccctctccccaccctctggtaagatctgtgaaagggcagcccggaccacagtcagatgctgcaaaagtgttttaattatgctggcacgacagctggacatcagcaatgatatacttctgatagctactggagacacacaccagtgacattcaggggaaaccactttgttctgatagacagtgttcattgaaatatcaaataaatgattccctatgcaatcaacataatttattggcatttacaaagtatataatatacaattactcgtaaagttaatcaggacattaatcatttcatattgatagtatttataataacacctactaactttgatatatttattgagcaattcaaagcatgttacaaaaaccctttttattttctatggaagtgtacattgctgctcttactataaataggatacatgtatatagcaccatcccctgcatccttccattagcttagtgaaaaagacagactattaccgttacatacaaaattattatgta

SEQ ID NO: 31433 - DNA, 1237 bp, Homo sapiens
tgcatgataggcaaattggaaactagctgttaccgaaggagagctccaggggtgtgacttcctggctttactgtaaaaactccgtcaccagacgagcccccttcctaatacccatggttcaaaatccaccatgtcctggaagacccacctaaaattctctttctgtcaagtggcaaactcttctagctttgctcaccgacagtgacacctcttgcagctccaacctcacttcccttcaggtgtgcaatctgcwcctgagtcctggtgtggtggtcgcggtacacttgcctcatatcccctaatggattagaagctgctgaaaggctgcgactgtgtcttagtcatcttcgtgtccctcaagagtccaccactgtgctgtacacatagtagggcctcagaaacctgtgagaaaaaaagtacattgattccctgcaacaatttctgcaattcctgataataagcattttcacaggatagatattttctattcattaaagaaaaatacaatttgatcaggcacaaaggccaggaagggccatggctgcaatattatgcacagtgggggaaaaatcacccccgttggaagacctttataaaaacagagaatgtgttcctggtgtagcagctatttatttttctcatatgtagtatattttaaaaaatgcagtaataatcagaagcaggccgcactgcttcagtttttgccactctcctgattccctgtgcttccctctccccaccctctggtaagatctgtgaaagggcagcccggaccacagtcagatgctgcaaaagtgttttaattatgctggcacgacagctggacatcagcaatgatatacttctgatagctactggagacacacaccagtgacattcaggggaaaccactttgttctgatagacagtgttcattgaaatatcaaataaatgattccctatgcaatcaacataatttattggcatttacaaagtatataatatacaattactcgtaaagttaatcaggacattaatcatttcatattgatagtatttataataacacctactaactttgatatatttattgagcaattcaaagcatgttacaaaaaccctttttattttctatggaagtgtacattgctgctcttactataaataggatacatgtatatagcaccatcccctgcatccttccattagcttagtgaaaaagacagactattaccgttacatacaaaattattatgta

SEQ ID NO: 31434 - DNA, 884 bp, Homo sapiens
aataaattctgtaagactttataaagtaaaattagagccaatgagcagaatctggaagaagagaattccaactctcaaggaggaacaactttctaaaagctctgattgtatagttgtgagataaactgaatgaggaggtgtggtagtaggttctttgtttcaagtaactggatgcacrtttgcaatgcattatttcatttaaactttaaaccactttatgagatcattatgattattaatctcattttacatttggggcagctgaggtttagtgactgcacagttagaacatagcagagctacgacatgacttactgtgctctagtctcctgtgaactctgccacctcccttgcttaataaaaaggctgaataaatggtggtcaaacgattccttcaagtaaagaaagggagggtgaactacagagctgtaagggtcttcctaaactttacattgaattattctagttatttctagaatatgagaaatgtaaactaaaaatatccttcaaataacaaaattatagagatggtagcacagatcagctgctgccagggcttggaggatgggtggtaggtgcatgtgcttataaaggggatttttgtggtgatggaattgttctgtattttgattgtggttgtcacaagaatccacacatgtgataaaattgcacagaacttaatacacacatgagtgcatgtaaaactggagataccaaattaaggtggatgaatgtcaatgtttggttgtgatattgtataattatgcaagatgttgctattgagtgagatgacataagggtatatatacctctatgtattatttcttacaactatatgtaaagctataattatctcaaaatataaagttaaaaatgtaaagata

SEQ ID NO: 31435 - DNA, 640 bp, Homo sapiens
cacacacacacayatatatatatataattgactattttcttaagctggaatcttagaaatgcaattcctaggtgtcaaatactacaaactgatttgctgtgtgtagttgttttccctgaaacttcagcaatgctaggtcagcttaattttagttattttgtaaatgacttgcttttgtttgtttttgtttatttttgcctgagtatttttgttggatttttttcatctgagtaactaaaatgtttgctgatattatctacatgtgtccttttttcatgattctaaggtggtggttaagagcattggcctgaagccagactacctagcaatgagtccccgctctgctatttgcttctttgaccttaggcaagttacctaagctttccatgagtcaatttccttatttgtaaagtgaagatcataattttctaaggttatgagtgttaatgaataaaatatttagacaaatgcccacatagtaaatgcccaataactctttcttattgctattacccattattttctattatgttgatccattcttctctcacctataacatttttccttcacccaaaattattttttaccctcatgcacagctccaattgttctagcttgctccttaagaatttctgtaac

SEQ ID NO: 31436 - DNA, 454 bp, Homo sapiens
gccatttccaatattcccctctttctggtgagccccacataatatatttccttactgtccacattctttttttttttttttttttgagacagagtcttgctctgtcgcccaggatggagtgcagtggtgtgatctctgctcaccgcaagctctgcctcccaggttcacaccattctcctgcctcagcctctcaagtagctgggactacaggctcctgccaccacgcccrgctaatttttcgtatttttagtagagatggggtttcatcgtgttagccaagatggtctcgatctcctgacctcgtgatccgcccgcttcggcctcccaaagtgctgggattacaggcatgagccactgtgcccggcccacattcttcttatatggaaataccattcatttctcctctccctgctgtgcctaaatccaactaattttaaatactcaaactatttca

SEQ ID NO: 31437 - DNA, 967 bp, Homo sapiens
caacctcttcctttttagaaagagcctggacaaatgatcttgttctgatcaagcccagtatgtaaatctaaaagcaaatagtgggaaaatggttgtgctgcatggtgtgtatgtgtgtttttaagctgtgtcatgaaaaaagccaggtaggctcttgagcaatcagtatctggtagcaatttggtggtcttccaacctcaagagactatgtctgagttacaggtctagtgccaagaaagaccatccaagacacacaattcaacatcaatagtagcagctgcagaattaaacaaaagcagttctttgaactgtctgattttcactggcatcaccagggcttctggcttgtttcacagcagcagtagtgtggcagcatgttttggaacagacagcatctgattccaatggcatatttctcaagttctaaattgacatatctgcattctggctttaggaatgaaatgaaagcaaaagggagaaaagcttctttaagccaaagacaaaccctgatgagggtaactgatgtgagctctcagcaacccatacttccggaagctgagtgagtgtctccgtactgaatgggggatcagagaagcatatcactttcaatttacttattatactcttatgctgttaattctcttctaatagaatatttggacaaatcaggactccaatttgttttgtttgttaaggaaatttacaggaacaaaaaatagttgaataaactgcagtttctatcttggcagccacaaccgacacctataatctttctaacatgggatcrtgatggcattttggatcaagttataagtgtcaactaggatgttgtgcctaatacttctctaaatgtccaggcagtcctctttctccaataaatgcttatctgagcaagtagccataattcccttcaggaaaaagactggagaaatcattattatacatgatttgtgcagtattttaggat

SEQ ID NO: 31438 - DNA, 990 bp, Homo sapiens
atcccatgaaatcatcaaaatgaagcaacagtactgaaaatacttgggtttgtgaaacaaaactctgacacaaaacaggcattctgtcacagtggcaagaggattgaccgtggatcaccattctccttggaagctcccctggctggttttcagctgggtgccaaatggtaagtcaattctctttgagccccagttacttcattgtacggaggaaacaaagcatgggttacctggcattgagatcttgtgaaaatcaaatgagatgatgcatttgaaaattctaaacaaatgttatttatcataaactttaaaaaggcacagggccaggagggtagaaaagtcgcattctttatacagatggtggatgtgaattttgctcttgatcatgacttcaggtgaatggggctaaggaatgcattgatgctgagtcagcagcggagagagtccagagtatttagcctttctcaaaattgtgcacgtacatgacaaatgtattattatttttattattattattttgagacggaatttcactcttgtcacccaggctggagtgcaatggtgcaatctcggctcacagcaacctccacctcccaggttcaagtgattctcctgcctcagcctcgygagtagttgggattacaggtgcatgccaccatgcacagctcatttttttgtatttttagtagagacacgttttcaccactttcgtcaggctggtcttgaactcctgaccacgggtaatctgcctgcattggcctcccaaagtgctgggattacaggcatgagccactgcacccggctgaagacaaatgtattatatcagtagttggagccgaaatttcccttgcagggcagtgaaccacttttgtttagaaaaatacctttttttccctttttaaaaaaattatttatttgtttgtttttgtagagatgggggggggggtctcactatgttgcccaggctggtcttgaactcctggcctcaag

SEQ ID NO: 31439 - DNA, 990 bp, Homo sapiens
atcccatgaaatcatcaaaatgaagcaacagtactgaaaatacttgggtttgtgaaacaaaactctgacacaaaacaggcattctgtcacagtggcaagaggattgaccgtggatcaccattctccttggaagctcccctggctggttttcagctgggtgccaaatggtaagtcaattctctttgagccccagttacttcattgtacggaggaaacaaagcatgggttacctggcattgagatcttgtgaaaatcaaatgagatgatgcatttgaaaattctaaacaaatgttatttatcataaactttaaaaaggcacagggccaggagggtagaaaagtcgcattctttatacagatggtggatgtgaattttgctcttgatcatgacttcaggtgaatggggctaaggaatgcattgatgctgagtcagcagcggagagagtccagagtatttagcctttctcaaaattgtgcacgtacatgacaaatgtattattatttttattattattattttgagacggaatttcactcttgtcacccaggctggagtgcaatggtgcaatctcggctcacagcaacctccacctcccaggttcaagtgattctcctgcctcagcctcgtgagtagttgggattacaggtgcatgccaccatgcacagctcatttttttgtatttttagtagagacacgttttcaccactttcgtcaggctggtcttgaactcctgaccacgggtaatctgcctgcattggcctcccaaagtgctgggattacaggcatgagccactgcacccggcygaagacaaatgtattatatcagtagttggagccgaaatttcccttgcagggcagtgaaccacttttgtttagaaaaatacctttttttccctttttaaaaaaattatttatttgtttgtttttgtagagatgggggggggggtctcactatgttgcccaggctggtcttgaactcctggcctcaag

SEQ ID NO: 31440 - DNA, 1024 bp, Homo sapiens
ctgccatccccccctgcgtcacgagacaaattagcatctcatcagagagcgctctgatcttcgcacctagtcattcgccacgagtcagctcgtgacatatctgctgcccagctctactgatctaaataagaccagagtgcgcaaggctggctctgtgcgtggaagagaggaggctgggkgcagaccctcttgaccgtttatccaggctgggggagggagaggatgcaggcagatgcaggtcatccatccatctctccatccatttgctcatccagcagatctttattcagcactgtctgtgtgccaagcgtggaggtacagccaccaaggcttcgaggtgctaatattctagtgaggaagacagggtaaatgacagatgtaacagataagtaaaggatgcaacatgttgcgaggtgaaagctgcgaaaaataaacagagcaagtgaggagtaccggagtacagaagttgatgttgccagttacaaaggggctggtccccccagaacccagactctggactctaaattcctttgcccagcaaaaggacccccaggactcctgaaagcaatggatgattgcagggctgaggcagggaaaatgcaatatgagcctttcttgtagtctcagaaagtaaggaagtgttcagggtctgagtgggggaagttgtgaggacacagaagccagctggaggggtctcccaccggccaaatctgggacaacttgaacatcagaaaagaatcatgactacaaaactgcagtgatccatgtgttcctattgattctgaaaagaaaaaaataaaatctggctggttcctttgggggtggttaagataccacatcatttttctatgaacagatacatgaaggtaaagaatgaagcacgtttcctgtgtttcctgtatacgcagtgttttaggaggccctaataagggaaaggcatccttcagagaagaaccacagcagataagtgctgaagaaatgacggaattggaaaaccacctttttgcaatcctagtgaaataaa

SEQ ID NO: 31441 - DNA, 1014 bp, Homo sapiens
atccgggtggagtggtacaagtgagatattttatttatgtgtcatgcatatttattaggaagaggtaaataaattagctgcctgccatctgcaaccaccagtgtacgccaagttccttccctcctcctccatcttgggaggggccacaccagcaaagcccaaaccctgtgaaaaggagggtctcctttctagtcagatytcctccatagtttgagcagccctagaattagaatttttccaagaggaaatggatgccagttgctatcctagaccacttgccaaaatctgatcttcccagcaaccctgaaaggtgggcatattgccatctgccattttatagacaaagacactatcggctcagagagatcaggtcacttgcccaggtcacacagtaggtgaggggagtggctcggctcaagtcgcgggggccttgggaattctgtgaaaagctggagtggaaggctggaacgggaggtgactgcattcttgctttgaagatggttgctgtggggtccaggccggtcccattaatctcttggcccttttctattggaaggggaaattaaaacacaacggaacggattccattggggctgtgtggagaatcaagtcaccattcatccaagtcctgagtatccttcaagcccaccgtggaggctcctgactctgtgaagggccacacgacccccatcgctgccccaggcttgctgcgtgactctgtgcatatcagtggacctcttggagcctcagtttcctcctctgtaacatggaaaaacaacttgcggggaaggtgtgctcgctacaaggaagaggatttcgctgtgtggaaatccttgtaaaacacgtgtccagtgggaggtagcagcagcctgggaccgcggactatgggcggaggagggctccagaatgcccagtggtgctgcaggcccagagagggccataacttgcccaggctcgcacagcaaatagagctgttgggagccctagaacacctgcctctcagacggcagagaa

SEQ ID NO: 31442 - DNA, 997 bp, Homo sapiens
aaatccacgtgactttccccttaagcagcagactcagatcaggatctttctgttttctcctcccttttcatgaaaattttctccatggtagctcttggttggaaggaaactaacatctctgtgtgaatattcaccattgacttataggagattgcacatgttatctttcttggggctagccatacacaaaatgaggggcagtgtctaatgggcctttaatggtagaatttcaggcaacagcaaccttgttctggaggtattttggggcctctcaaattgcccctcctaagcagcatttattgtcgccacaagtaaggctaactgtgcttaaaagaaatcctgttaatttaaagcttttataaaaaacaaaaaataagtatatccagttgtgagtgatacctrtgccaatatataagaatttgctgtaatgttattcacatatctattaggaaaacaggttttcttctctgtctgattaccttgctaagtacaggtaaccaccactgactttggtgattctccggacagtacatagatacactcactcagagaataatggctgcagtgatttaaaactgagcttcctgtcccatgaatacattgtgggctggctggcatgtgtctttctgctaacacacctgtggattaagatgtttcctattgtaggtcataggggctggcgcctacagagctcctggttttagcttaggcttgttttacacattattggggattaaacttgttggtgccagttctatctttcccattagatattcattaataaaactccagatgcccattattcatcacatcataacatactggatggcagttaattcacctaaagttttcatatttgataacttccttattcatgttaattaggttacttggaattttccatcaatcatggcatctcaggctttggctcttctgaaagaattcatttgtgagacatatattatacactagatgtacacaagcaaaattaagtgta

SEQ ID NO: 31443 - DNA, 546 bp, Homo sapiens
taaagattataatcgcacaaactccctctctcatgaggcacacagttaatccaaaatattatttctaacttaccataaagccaacaagtaaatacaatgtagtgtttaaaaataatcataagtatattctagaaatgaaacattaattgatactatttattgaatatctcatatttatttacatagaaacaaaggaatcaaaagcatattatgtaacattgaaatgactaaaaatacttgagatagcattgctacataaatgctatgtaaatgctgacaaaagtaaaaatgccattcgctacatttgctaaacatactgtgacacattataagtattttaaagatatatcactaatgcttgggtcaagtgggcaaaaatgattctaagtatttaattgtggaaaaatttagtrcaggggatagtattcatgtgatggaaaaattttaagtggaactcagagattagaagcagcaggaagttttaataacgtaccaggtgcagtgtataggatacaagacagaactataggtaaagtctgagtcttt

SEQ ID NO: 31444 - DNA, 1474 bp, Homo sapiens
gacctcagaaggcattgcgacatactgttgggttaatcaccaaggtgatgtgggacttctgcctggaccctgcccacactgggcattgtgacatttagggcccatcaactatctggcatggccctcctctcttatctgaccgttgcctataggagagattgtaacacatctctggatttagaatgtagatgatgtgactcttctctcctgactgggccatggccagagaagggagagtgacttaccactggatccagcacacaggttatatgattcttctttgtgatctctgcacaaaggggtcattgtgagatatctcagggtttatcacctagatgatgtgatrctccttttcttcctggaacctgtctacagtgggcattgtgacatatcacttggcccagcacctacatgttgtgactctgatctcatgcctgggccctgcccactggggtgattgtgacatataagctgggcacagccatgaggttatatgacactcctctttttttgagttctactcacagggggcattgtgacatacctctgggctccttacctaggtgatgtgactctttccagggtcctcctgtcagtgggtattgtgcccaagatgtaattgtgatgcatcactggtcctagcacctaactgatgtgactctcctctccttccaaagccctgcatttattgtttattgtgacatattttcaaaacctaggttaggcaactcttttgcatgcgtcctgctaatagggctattatgacatatttttttttcacctaggtgatgtgactctccctttctgcctaaacactgtaaaaaggggagatcgtgacatatcactggacccagcatctaggtgatatggctctcctttttcaccttggcttcttgtattttgggtattatgacatatcactgggtcaaaccaaaggagggggaggctcttgcctaggccctgcccacaggagaccttgagacagatctctgcatccatcactttggaagtgtgactctcctcttctggctgctccatgcccgcacagaagactgtgatatatctccgggttcaccaaccaggtggtgtgtctcccatacctgggcttttcttgcagagataattgtgacaaatcgttgtgcacagcagcccaagtcacgtgactctcctctcatatcaaggctctgcaactagggtaattgtgacatacagctgggcctagcccctaggttctatgactcttttgatgattctgagccctatctacagaggtcattgggaaatatctcttggcccatctactaggtaatggaactcacctgcctgggctctttttttaggaggtattgtgacatagggctggatccagacctaggtaatgtgactctcctctactgcttgggctttactcaaggaggaattgtgatgggtcactgaacccagcacctgggttatgtgttatgtgactttcctc

SEQ ID NO: 31445 - DNA, 1474 bp, Homo sapiens
gacctcagaaggcattgcgacatactgttgggttaatcaccaaggtgatgtgggacttctgcctggaccctgcccacactgggcattgtgacatttagggcccatcaactatctggcatggccctcctctcttatctgaccgttgcctataggagagattgtaacacatctctggatttagaatgtagatgatgtgactcttctctcctgactgggccatggccagagaagggagagtgacttaccactggatccagcacacaggttatatgattcttctttgtgatctctgcacaaaggggtcattgtgagatatctcagggtttatcacctagatgatgtgatgctccttttcttcctggaacctgtctacagtgggcattgtgacatatcacttggcccagcacctacatgttgtgactctgatctcatgcctgggccctgcccactggggtgattgtgacatataagctgggcacagccwtgaggttatatgacactcctctttttttgagttctactcacagggggcattgtgacatacctctgggctccttacctaggtgatgtgactctttccagggtcctcctgtcagtgggtattgtgcccaagatgtaattgtgatgcatcactggtcctagcacctaactgatgtgactctcctctccttccaaagccctgcatttattgtttattgtgacatattttcaaaacctaggttaggcaactcttttgcatgcgtcctgctaatagggctattatgacatatttttttttcacctaggtgatgtgactctccctttctgcctaaacactgtaaaaaggggagatcgtgacatatcactggacccagcatctaggtgatatggctctcctttttcaccttggcttcttgtattttgggtattatgacatatcactgggtcaaaccaaaggagggggaggctcttgcctaggccctgcccacaggagaccttgagacagatctctgcatccatcactttggaagtgtgactctcctcttctggctgctccatgcccgcacagaagactgtgatatatctccgggttcaccaaccaggtggtgtgtctcccatacctgggcttttcttgcagagataattgtgacaaatcgttgtgcacagcagcccaagtcacgtgactctcctctcatatcaaggctctgcaactagggtaattgtgacatacagctgggcctagcccctaggttctatgactcttttgatgattctgagccctatctacagaggtcattgggaaatatctcttggcccatctactaggtaatggaactcacctgcctgggctctttttttaggaggtattgtgacatagggctggatccagacctaggtaatgtgactctcctctactgcttgggctttactcaaggaggaattgtgatgggtcactgaacccagcacctgggttatgtgttatgtgactttcctc

SEQ ID NO: 31446 - DNA, 1474 bp, Homo sapiens
gacctcagaaggcattgcgacatactgttgggttaatcaccaaggtgatgtgggacttctgcctggaccctgcccacactgggcattgtgacatttagggcccatcaactatctggcatggccctcctctcttatctgaccgttgcctataggagagattgtaacacatctctggatttagaatgtagatgatgtgactcttctctcctgactgggccatggccagagaagggagagtgacttaccactggatccagcacacaggttatatgattcttctttgtgatctctgcacaaaggggtcattgtgagatatctcagggtttatcacctagatgatgtgatgctccttttcttcctggaacctgtctacagtgggcattgtgacatatcacttggcccagcacctacatgttgtgactctgatctcatgcctgggccctgcccactggggtgattgtgacatataagctgggcacagccatgaggttatatgacactcctctttttttgagttctactcacagggggcattgtgacatacctctgggctccttacctaggtgatgtgactctttccagggtcctcctgtcagtgggtattgtgcccaagatgtaattgtgatgcatcactggtcctagcacctaactgatgtgactctcctctccttccaaagccctgcatttattgtttattgtgacatattttcaaaacctaggttargcaactcttttgcatgcgtcctgctaatagggctattatgacatatttttttttcacctaggtgatgtgactctccctttctgcctaaacactgtaaaaaggggagatcgtgacatatcactggacccagcatctaggtgatatggctctcctttttcaccttggcttcttgtattttgggtattatgacatatcactgggtcaaaccaaaggagggggaggctcttgcctaggccctgcccacaggagaccttgagacagatctctgcatccatcactttggaagtgtgactctcctcttctggctgctccatgcccgcacagaagactgtgatatatctccgggttcaccaaccaggtggtgtgtctcccatacctgggcttttcttgcagagataattgtgacaaatcgttgtgcacagcagcccaagtcacgtgactctcctctcatatcaaggctctgcaactagggtaattgtgacatacagctgggcctagcccctaggttctatgactcttttgatgattctgagccctatctacagaggtcattgggaaatatctcttggcccatctactaggtaatggaactcacctgcctgggctctttttttaggaggtattgtgacatagggctggatccagacctaggtaatgtgactctcctctactgcttgggctttactcaaggaggaattgtgatgggtcactgaacccagcacctgggttatgtgttatgtgactttcctc

SEQ ID NO: 31447 - DNA, 1474 bp, Homo sapiens
gacctcagaaggcattgcgacatactgttgggttaatcaccaaggtgatgtgggacttctgcctggaccctgcccacactgggcattgtgacatttagggcccatcaactatctggcatggccctcctctcttatctgaccgttgcctataggagagattgtaacacatctctggatttagaatgtagatgatgtgactcttctctcctgactgggccatggccagagaagggagagtgacttaccactggatccagcacacaggttatatgattcttctttgtgatctctgcacaaaggggtcattgtgagatatctcagggtttatcacctagatgatgtgatgctccttttcttcctggaacctgtctacagtgggcattgtgacatatcacttggcccagcacctacatgttgtgactctgatctcatgcctgggccctgcccactggggtgattgtgacatataagctgggcacagccatgaggttatatgacactcctctttttttgagttctactcacagggggcattgtgacatacctctgggctccttacctaggtgatgtgactctttccagggtcctcctgtcagtgggtattgtgcccaagatgtaattgtgatgcatcactggtcctagcacctaactgatgtgactctcctctccttccaaagccctgcatttattgtttattgtgacatattttcaaaacctaggttaggcaactcttttgcatgcgtcctgctaatagggctattatgacatatttttttttcacctaggtgatgtgactctccctttctgcctaaacactgtaaaaaggggagatcgtgacatatcactggacccagcatctaggtgatatrgctctcctttttcaccttggcttcttgtattttgggtattatgacatatcactgggtcaaaccaaaggagggggaggctcttgcctaggccctgcccacaggagaccttgagacagatctctgcatccatcactttggaagtgtgactctcctcttctggctgctccatgcccgcacagaagactgtgatatatctccgggttcaccaaccaggtggtgtgtctcccatacctgggcttttcttgcagagataattgtgacaaatcgttgtgcacagcagcccaagtcacgtgactctcctctcatatcaaggctctgcaactagggtaattgtgacatacagctgggcctagcccctaggttctatgactcttttgatgattctgagccctatctacagaggtcattgggaaatatctcttggcccatctactaggtaatggaactcacctgcctgggctctttttttaggaggtattgtgacatagggctggatccagacctaggtaatgtgactctcctctactgcttgggctttactcaaggaggaattgtgatgggtcactgaacccagcacctgggttatgtgttatgtgactttcctc

SEQ ID NO: 31448 - DNA, 1073 bp, Homo sapiens
cttaagccccggagtttgagtccagcctgggcaacatagaccccatcgctaaaaaataataaaataagtaataaaataatgatagaaatgaagaatatctgtaaagaatactgtcatagtctggccagcaggtcttcatctgtcttctagacattgtaacttgagattacagtgatagaaaaattgctagtaatacatgggtaaagcttactcttaattagaggaaaagttatacagtcttcatgtgtgtttcattttgggagagtgacagcatgtttcctatgtctcattagggcatatttgagaaaagggggtaacagatcctgcttaccaaatgtagaaatatttaaacacacacaccctgatagccatggaaagtaacaaagtctcaagtagaagtggaggggtgatgtctcagtgttgacctgttggggaaaaaatgaggctcatgccatgctgcctttagttccttcctgttttgcattttaaaaaatcatttgctttcctcctcggaagcagatttccagagacaaatggccagttcattcatggctgtcaactgtgaaggtgagaaggctccaggtgcatgtcccacttaattcagtcatacatcctaatacatttggaatgcatgggaaatgtcatcatttcatagtctcctccaaaccatagmcttcgtagtatgtattgacttggcacttgaactcttggcaagatatgaatatgtatttcctattcaaggtcagtggagatgcaatgcctttgagtgagatcactttcttaccttagcaaggtaagcctaatgagacaagtacagttctggccacagtcctgttgcagtaaagtcttcagtatgtgaagtgtatgtttctaaaccaagaaatagtagcagagaatctagaaagacaggttgtttaggaagataacaatctatggtagaaagacttccgggcatcttagtccaaagatttgggctttgctattaacttgctttatgactttgaacaagtcagttaacctaagtctcattttgccctcaagtgagtatcttgccaggtttttaaactcagaat

SEQ ID NO: 31449 - DNA, 582 bp, Homo sapiens
gaaaccacaccttcaagcaacatcctctcctyggaacgagctttaaaggtcttatggtttcactctgggctcatctaactcagtctacatagttcctccagaggatacttacacatgggtgaatgttgcccctttcattcatttattcactgagtatttactgagcacctactatctgccagatactattctaggtgccaagaatacttgtgtgaataagacagaaaggtctctatctcaatgaaatttatattgtgataaaagagatagacaataattaaacaagtagtgagataatttaaatgtttgactagtgctatggacaaaagaaatatagtgattagatagagagtaacacagggtgcaggagaacctgctttagaaagagtgctcagggccaggcaaggtggcttatgcatgtaatctcagcattttgggaagccgagacagggggatcacttgaggccaggagttcaataccagcttggacaccatagcaaggccccatctctacaaaaacataagaaaaattagccaggcctggtggtgtacacctgtagccccagctacttgggaggctga

SEQ ID NO: 31450 - DNA, 505 bp, Homo sapiens
ctggctttattctcacagcacccccttaaggtatatacaactattatctttattttacagatgaagaaacagaggcacaaagaggttaagtaacttgcctagagatacacagctaacaagtggcaagtgggatttggactcaggtctatctaatcctcaaacccaygtcctggacccctacacagactgccctccctcagtcctctgtgtggccttttgaagggtctggacattcaagtttaaaaatccatccaaagaatctatggacccagtggtctctggagtcaatgttctgaggctcagaagggccaggcaggagggagccgcctctacacagtcctgagcagagtgggctgtgtcccggcacagcaggggagatcatagacagaattctgccctgggccctatttaagtaggacctttaggctgccggtgtcatgaccacaggtcccaggtctgcacgattggctgtgtgtggaaaatcttcactccttgcggccttgtc

SEQ ID NO: 31451 - DNA, 554 bp, Homo sapiens
tgcctgtcatattccatcctcagagcctttacgatgactgttccgtctgcctggaatgttccgccctgacgtttccgcatggcttgcccttcatttcattcartctccacatttccactcaaatcctacctctcagccatcactgtcaattgccctccacccgaagaccaccaggatcccacctatagtggagcacttggggtttatggctggttgcagtgaaggggaacgcacgccatggggcactgtgggcgtatcagtgagggggtgtcagaaagaacttgtagggtttgggcttgtttctgtctagttccatcacagccacagagtggccttgtctgatgttgatgttctgtgaaactgtttatgttcaacaggagagcaccatgggcctgcagtgagtgccaggccaaggtctggacagcaagaactgctttactcttcttcaccactgaatccttagtgcatagaacagcagctgcagggagggtggcaggtgtcgaatgaaaacgtatcgaatgaatcgatcaagtctgtctgcctggcaaattctt

SEQ ID NO: 31452 - DNA, 630 bp, Homo sapiens
tctgaatagccaaggcaatcctaggcaaaaggaacaaagctagaggtatcaagttacctgacttcaaactatactatagggagtgtcattttttccccctatttatatctcacccacgccctctaggttttatatatgtgcccccaatagcacatggcagtcacacaattatttccataccttctgtcttctttttcattcccaatatttttttttaattctctctctgagtctggggacgggtgtgtggtgttatttgtcttattcatcttcaaaaattatcagctttttatttacttacctttcattttatttaagtggaaaagtataagccatattttaattttagggaaacactctaatagacatttatttttgtccattatcacattcattctaacagacatttatatacatatatatccaaatatatatatacaccaaactgatggaatataaaatcctatacaattcaccctgtcatgcacatcactgcctgtgacaactgatagggaaaacagtacacatsgaggacacagatctttttgaaccactgcagtagctcagtactgagactgaagattgccttattcggtgcaagctgcacaaaaattagtgaaaagaatttgg

SEQ ID NO: 31453 - DNA, 2196 bp, Homo sapiens
agattaatggttgcctatgattgggtttggaggatggggagaaatgagaagtgactactaatgggtataggatttccttttggcatgaggaaaatcttccaaaattgattgtggcaatggttgcacaactctgaatatattgaaaatcactgaattgcatacttataatgtgttaattttatgggttatgaatatctcggtaaaatggttatattaaaaattaagggcatacttttaatgtgttaattttataggttatgaatatctcagtaaaatggttatattaaaaattcaggctgggtgcagtggctcatgcctgtaatcccagcactttgggaggccgaggcaggtggatcatgagatcaggagtttgagaccagcctggccaacgtggtgaaactccatctctactaaaaatacaaaaattagccgggtgtggtggtgggcacctgtaatcccagctacgcgggaggctgaggcaggagaattgcttgaacctgggagtgggaggttgcggtgagccgagattgtgccactggactccagcctgggcaacagaactagactctgtcyccccgcaaaaaaaaaaaattaagaaattatgttcatcaaaagacattaatagaagtcttaaagtttgtgtgtgtatatatatgtgggtatagacatatgtatactataaaagtttttaaatacatatatacattttcaaatccaaaatataaaaacacctaccaattaatagaagtataggcgaaagactcagaaagacaatttacagaaaaggatattgaaatcatcaaacaatatatgaaaatgtactgtatacatcaggaaaatacaaattaagactattataagatacctgcatatactcgagattatagataaaatgagaaagacataagataccaagtgttggtaaggttttgaatcaacagcacttccataagctctagtttgagaataacttggtaaactacttagcaaaactctttgacattattaagtaaagctaagcatatatgcatacctctgttattatcaatagcacaggtatgtatcaacaggaacacagccatagggccccaaaaaacatgtactagaatattcatagcagcactgtttgtgcccaagactgcaagcagcctaaatccccataacatttttttacttggaaaaatatttatttagtatttattgtttgtttaattatttataagaacatttaatatgtgatctaccctcttagtgaatttttaaatttgcattatttttgactgtaggtacaatgttgtacagcagatctgtggagcttattcaacttgtttgactgaaactttatgccagctgatcagtaactccccatttcctcctccccacagcccttgcaaccatcttttcactctgattctatgaatttgactattttagacaccttatataagtggaaacatacagtatttgttcttccatgagtggcttatttcacttagcccatcaacatgttaatgggtaaatgatttgtggtatattcaaacaatagagtactatacaggaagacagaagcaatgtgaatgaggctcaaaaacataatgttgaacaattgaaaccagatacataggagtatatgctatatgattttatttatttaaaggccaaaactaggcaaaattaatttatgctgttatgtcaaattagtggatacgtcaggaattaaagagagtaaacaaaaggtttctgggatgcgggcaatgttatatttcatgatctgagtgctggttatatggctgtgtttagtttgaaaattaaagaaattatatacttatgtgcacctccagcatgtattaggttggtgcaaaagttattgcggttttgtcattacttttgcaccaataatatattacagtctaatcaaaacaaacaaaaaaatgtgtaaactatgttttctctctacagctacagattagcacctaagtatcatttcccaattcaatttgaagatgtatataatgccttaaggtggttcttacgtaaaaaagttcttgcaaaatatggtgtgaaccctgagagaatcggtatttctggagatagtgcaggagggaatttagctgcagcagtgactcaacaggtatgttcataatttctatgctttttaaaaatagcgtttctacgctgttttaaaaacatatttat

SEQ ID NO: 31454 - DNA, 2196 bp, Homo sapiens
agattaatggttgcctatgattgggtttggaggatggggagaaatgagaagtgactactaatgggtataggatttccttttggcatgaggaaaatcttccaaaattgattgtggcaatggttgcacaactctgaatatattgaaaatcactgaattgcatacttataatgtgttaattttatgggttatgaatatctcggtaaaatggttatattaaaaattaagggcatacttttaatgtgttaattttataggttatgaatatctcagtaaaatggttatattaaaaattcaggctgggtgcagtggctcatgcctgtaatcccagcactttgggaggccgaggcaggtggatcatgagatcaggagtttgagaccagcctggccaacgtggtgaaactccatctctactaaaaatacaaaaattagccgggtgtggtggtgggcacctgtaatcccagctacgcgggaggctgaggcaggagaattgcttgaacctgggagtgggaggttgcggtgagccgagattgtgccactggactccagcctgggcaacagaactagactctgtctccccgcaaaaaaaaaaaattaagaaattatgttcatcaaaagacattaatagaagtcttaaagtttgtgtgtgtatatatatgtgggtatagacatatgtatactataaaagtttttaaatacatatatacattttcaaatccaaaatataaaaacacctaccaattaatagaagtataggcgaaagactcagaaagacaatttacagaaaaggatatygaaatcatcaaacaatatatgaaaatgtactgtatacatcaggaaaatacaaattaagactattataagatacctgcatatactcgagattatagataaaatgagaaagacataagataccaagtgttggtaaggttttgaatcaacagcacttccataagctctagtttgagaataacttggtaaactacttagcaaaactctttgacattattaagtaaagctaagcatatatgcatacctctgttattatcaatagcacaggtatgtatcaacaggaacacagccatagggccccaaaaaacatgtactagaatattcatagcagcactgtttgtgcccaagactgcaagcagcctaaatccccataacatttttttacttggaaaaatatttatttagtatttattgtttgtttaattatttataagaacatttaatatgtgatctaccctcttagtgaatttttaaatttgcattatttttgactgtaggtacaatgttgtacagcagatctgtggagcttattcaacttgtttgactgaaactttatgccagctgatcagtaactccccatttcctcctccccacagcccttgcaaccatcttttcactctgattctatgaatttgactattttagacaccttatataagtggaaacatacagtatttgttcttccatgagtggcttatttcacttagcccatcaacatgttaatgggtaaatgatttgtggtatattcaaacaatagagtactatacaggaagacagaagcaatgtgaatgaggctcaaaaacataatgttgaacaattgaaaccagatacataggagtatatgctatatgattttatttatttaaaggccaaaactaggcaaaattaatttatgctgttatgtcaaattagtggatacgtcaggaattaaagagagtaaacaaaaggtttctgggatgcgggcaatgttatatttcatgatctgagtgctggttatatggctgtgtttagtttgaaaattaaagaaattatatacttatgtgcacctccagcatgtattaggttggtgcaaaagttattgcggttttgtcattacttttgcaccaataatatattacagtctaatcaaaacaaacaaaaaaatgtgtaaactatgttttctctctacagctacagattagcacctaagtatcatttcccaattcaatttgaagatgtatataatgccttaaggtggttcttacgtaaaaaagttcttgcaaaatatggtgtgaaccctgagagaatcggtatttctggagatagtgcaggagggaatttagctgcagcagtgactcaacaggtatgttcataatttctatgctttttaaaaatagcgtttctacgctgttttaaaaacatatttat

SEQ ID NO: 31455 - DNA, 1354 bp, Homo sapiens
aaattggctgttatcccggctgttccattctctcagcataagaaattactatacaaagtgctatacaaagactcagggctttaagggaatagggcatgttgattgggtttyggcagttgatgtttttcatttcattttgttatgctacctgacatttctataattaaaatatccaggctaaaaaataccgaataaaattgcaaacatttctgggaatgttaaatggtatgtaggcatttacatgttagtatgaattaatttaatcagattgtttgccttctaaactcagcaagggccttgacaatatgaatttgtttggagagaagaaatcaaataatgtgaaaacacagaacatgttgttgtagactaggcctggatgggtcacgtggtgagacaggaaagggcactgatctatttcaagaaaagaaatttttagaaaacaaaactatctttgtcctcatcgcaggcacatgtatgtactcacatgtgcatacacacacgcacacacagagaggttatattaaagatttctgggccgggcatggtggctcacacctgtaatcccagcactttgggaggctgaagaggatagatcacttgaggtcaggaattcaagacaagcctggccaacatggtgaaaccccatctctactaaaaaaaaaatacaaaaactagccaggcgtggtggcacatgcctgtaatcccagctactcgggaggatgaggcacaagaatcgcttgaacctgggaggcggaggttgcagtgagctgagatctcaccactgcactccagctgggccacagaagaagactccatctggaaaaacaaaagatttctgtaccattaggacaaagaactcaggaaatactaataccaccataaggaagagctataagtgacttaaacagcttttatgggctggcctataacatctttctgactttcaaattacagacaaaatataataaaccattatattataattaatgtatacattttagaatctctggacaagataaataaaagttctctggataatgttttaaatgataattttttgtttttagaatttcatacccaagaagactttctttcttgaagaataagtttcctttaatcaggtaataagaattttgtacctattttgttctggcctccagcaaattcaaatataagacctaatcacagtaacaaacctgttatgccgctcacgccttcatattactttgattctcaatttctatttaagcagcctaattagaagaagccttaactctctattataaaaatggtaactaagaaaagacacaagaagaaacagaacttttttatgtattatgtggttgtacatgca

SEQ ID NO: 31456 - DNA, 1153 bp, Homo sapiens
cagagaaaatatacacagaggctgctctagcaaaaccyttctgttgacgacttcacgcctttggcactgagaggcagcgtggtgggctagtccggagagtctggtgcctgaagactcctgtggctggaggagttgcccagggcccagaaactagcagccccaggcccacatccttattacaatggacctttagatcttaccacatcctaggaaaggaagggagatcggagatagggaataccaaggacaagagagaaagggtgtctctgaataacccagggcaggactggccaggtgccatccctggactcctaggtcatgaccgagaaactcagaggaggagaaagggtgagaaaaaaaaaaaagttacttaaagtttctcttctcctttggactataatctccctgtgtcttgtttctggtctcctgtgcccagcagaaggtatgggacctagtgactgttcaataaatagtttttgggaaaagagcccgagggggctggagtccaggtatgggaggctgagggaagaggcagttggatcagtaagtctggaagaagtggggagctaaagttcccggagggcaggccactctcagaggcccatgggaatgacatcagatggagactcccagagtgggcctcacggcaccttttttctcaccagtggtcagaatggccccaggactgcagcccaccagattctttgtcaaggacacaaaaaatgagtcagagaagtctcccccagcccctagccccgtgaaccaaccattccaggcaacgtcagtatctctgccccaacaggtgtgtgcccacggtcctaactgcctggtgctggcctgtcctagctgggtatggagctcccctttgagaacagggctgtgccaggtctgcgggagaccaagtactagctctgatggttctcacttggacagcagccagcttagtcctcctaagctgagtccacctgagcaggtagaagggagtttgcctgagccaaggaagaatgctgaattcaggccacaggcagaaagaaacaggacacagaaaagattccaggaaaagaggaaatctgctcccagtacacaccacctccctagtggaagcaaagaggaagaggcagagttctagagccatgtcccaaatgaggtgagc

SEQ ID NO: 31457 - DNA, 1153 bp, Homo sapiens
cagagaaaatatacacagaggctgctctagcaaaacctttctgttgacgacttcacgcctttggcactgagaggcagcgtggtgggctagtccggagagtctggtgcctgaagactcctgtggctggaggagttgcccagggcccagaaactagcagccccaggcccacatccttattacaatggacctttagatcttaccacatcctaggaaaggaagggagatcggagatagggaataccaaggacaagagagaaagggtgtctctgaataacccagggcaggactggccaggtgccatccctggactcctaggtcatgaccgagaaactcagaggaggagaaagggtgagaaaaaaaaaaaagttacttaaagtttctcttctcctttggactataatctccctgtgtcttgtttctggtctcctgtgcccagcagaaggtatgggacctagtgactgttcaataaatagtttttgggaaaagagcccgagggggctggagtccaggtatgggaggctgagggaagaggcagttggatcagtaagtctggaagaagtggggagctaaagttcccggagggcaggccactctcagaggcccatgggaatgacatcagatggagactcccagagtgggcctcayggcaccttttttctcaccagtggtcagaatggccccaggactgcagcccaccagattctttgtcaaggacacaaaaaatgagtcagagaagtctcccccagcccctagccccgtgaaccaaccattccaggcaacgtcagtatctctgccccaacaggtgtgtgcccacggtcctaactgcctggtgctggcctgtcctagctgggtatggagctcccctttgagaacagggctgtgccaggtctgcgggagaccaagtactagctctgatggttctcacttggacagcagccagcttagtcctcctaagctgagtccacctgagcaggtagaagggagtttgcctgagccaaggaagaatgctgaattcaggccacaggcagaaagaaacaggacacagaaaagattccaggaaaagaggaaatctgctcccagtacacaccacctccctagtggaagcaaagaggaagaggcagagttctagagccatgtcccaaatgaggtgagc

SEQ ID NO: 31458 - DNA, 1153 bp, Homo sapiens
cagagaaaatatacacagaggctgctctagcaaaacctttctgttgacgacttcacgcctttggcactgagaggcagcgtggtgggctagtccggagagtctggtgcctgaagactcctgtggctggaggagttgcccagggcccagaaactagcagccccaggcccacatccttattacaatggacctttagatcttaccacatcctaggaaaggaagggagatcggagatagggaataccaaggacaagagagaaagggtgtctctgaataacccagggcaggactggccaggtgccatccctggactcctaggtcatgaccgagaaactcagaggaggagaaagggtgagaaaaaaaaaaaagttacttaaagtttctcttctcctttggactataatctccctgtgtcttgtttctggtctcctgtgcccagcagaaggtatgggacctagtgactgttcaataaatagtttttgggaaaagagcccgagggggctggagtccaggtatgggaggctgagggaagaggcagttggatcagtaagtctggaagaagtggggagctaaagttcccggagggcaggccactctcagaggcccatgggaatgacatcagatggagactcccagagtgggcctcacggcaccttttttctcaccagtggtcagaatggccccaggactgcagcccaccagattctttgtcaaggacacaaaaaatgagtcagagaagtctcccccagcccctagccccgtgaaccaaccattccaggcaacgtcagtatctctgccccaacaggtgtgtgcccacggtcctaactgcctggtgctggcctgtcctagctgggtatggagctcccctttgagaacagggctgtgccaggtctgcgggagaccaagtactagctctgatggttctcacttggacagcagccagcttagtcctcctaagctgagtccacctgagcrggtagaagggagtttgcctgagccaaggaagaatgctgaattcaggccacaggcagaaagaaacaggacacagaaaagattccaggaaaagaggaaatctgctcccagtacacaccacctccctagtggaagcaaagaggaagaggcagagttctagagccatgtcccaaatgaggtgagc

SEQ ID NO: 31459 - DNA, 1534 bp, Homo sapiens
aaaaatatactgggatttttaacagattaagtaaaaatataaaagactgtgaagtttgcttccgcgaattgatagggggagaacacagaatgtcacaatgataggatgggtgttaccatgagggtggaggtaaaggaatagacacaaaaagtgaaagctattagtgtccatggtaatatgaatcttactttcaaattgttcttgaaaatgagtttattttaaaaaatgaaaaggcacaatataatgtgagctaaataactgtcatgtgtgtatatgtatgtccattctgattattataactatttatcagggtactgaccaatgaaaattgatgctggccactgtgccatactgatatatactggctgaataacaatgatgtatttgaaataatccttgatactttcctgatcaatagagagattactcacataaaatgcattttcatctcttattggtcatgtatgaaaaggtcatcttgctccctagagctctttaccctgccagatgaataaaaaataaatgtcataaataatcaagaatgaaagcacttaggaatatatctgtgtattattagtcactcattcgttatgcatgaactataaatgcattttcaaaataatgcaaatgaaaataatacagtccaacaatggataatttgaataaaaaagcatcttttactaaatgtttgatagcaaaatcaatctaatgaaattatgttttcgtagctaattgtgacagcctgaaaagatatatttttttttcttttaaagtaaaattaaaaatttttcaagtccagccaacaaacttcactttggtaggacaaatgtgaaaatgtctctctctgttctctgaagcactgtttactagatgaattaaataaataacataccactttccctacagcttactggcacttggattttctttgaagatggcaaatttagaaacttattttctcatagttctggagtttgagcacttcaatatcaaggtgccagccaattcagaatctgctaaagggctgctatttggttcataggtgattcattgctgtgccctcacttagtggayagagcaaacaaactcctttgggcctctattataaagatactaagctcattcatacaggtggagcctaatcacctccccaaaggccgtaccttctaataccattaacttgggggctagatttttaacatatgaattttagggggacatatagcaaagtcccactagactttccttagaatcaccaagactgctcattcagacagctactaccaaacctaaggaggctgcaaaacaagtgcttttacagcaagtctaaattctctgtgtatttctgatcaaaccccacagagcatttaatgccagttcttaacgagagggatagggaagaaaagtaatgaaatgagaaaaaacaaaatgtcatcccacgctgggctttgttctctggaattctcagacaatttattgtagttttgttctcgggaattagtttgtttaattgggaaagccttgcatgccaaca

SEQ ID NO: 31460 - DNA, 1534 bp, Homo sapiens
aaaaatatactgggatttttaacagattaagtaaaaatataaaagactgtgaagtttgcttccgcgaattgatagggggagaacacagaatgtcacaatgataggatgggtgttaccatgagggtggaggtaaaggaatagacacaaaaagtgaaagctattagtgtccatggtaatatgaatcttactttcaaattgttcttgaaaatgagtttattttaaaaaatgaaaaggcacaatataatgtgagctaaataactgtcatgtgtgtatatgtatgtccattctgattattataactatttatcagggtactgaccaatgaaaattgatgctggccactgtgccatactgatatatactggctgaataacaatgatgtatttgaaataatccttgatactttcctgatcaatagagagattactcacataaaatgcattttcatctcttattggtcatgtatgaaaaggtcatcttgctccctagagctctttaccctgccagatgaataaaaaataaatgtcataaataatcaagaatgaaagcacttaggaatatatctgtgtattattagtcactcattcgttatgcatgaactataaatgcattttcaaaataatgcaaatgaaaataatacagtccaacaatggataatttgaataaaaaagcatcttttactaaatgtttgatagcaaaatcaatctaatgaaattatgttttcgtagctaattgtgacagcctgaaaagatatatttttttttcttttaaagtaaaattaaaaatttttcaagtccagccaacaaacttcactttggtaggacaaatgtgaaaatgtctctctctgttctctgaagcactgtttactagatgaattaaataaataacataccactttccctacagcttactggcacttggattttctttgaagatggcaaatttagaaacttattttctcatagttctggagtttgagcacttcaatatcaaggtgccagccaattcagaatctgctaaagggctgctatttggttcataggtgattcattgctgtgccctcacttagtggatagagcaaacaaactcctttgggcctctattataaagatactaagctcattcatacaggtggagcctaatcacctccccaaaggccgtaccttctaataccattamcttgggggctagatttttaacatatgaattttagggggacatatagcaaagtcccactagactttccttagaatcaccaagactgctcattcagacagctactaccaaacctaaggaggctgcaaaacaagtgcttttacagcaagtctaaattctctgtgtatttctgatcaaaccccacagagcatttaatgccagttcttaacgagagggatagggaagaaaagtaatgaaatgagaaaaaacaaaatgtcatcccacgctgggctttgttctctggaattctcagacaatttattgtagttttgttctcgggaattagtttgtttaattgggaaagccttgcatgccaaca

SEQ ID NO: 31461 - DNA, 586 bp, Homo sapiens
ctgtttttggcagggaggtattatttttatctttgctcatatatttcacactggtaatcatgtgtaacaattttgagactaaactattgaaagtcattctttagcaaataaagtaaaatctctttttaattgattcttaatcattaaaataattttcaaaatattttcaaggaatatgtccaacttcgattcactgtaaataaatgagatttagctaatatactaatgcatgttacttctaatttaattagattaaaaatagaattcatctaacagtctatatacttaaatatattcaagcaaagtgttttacttaaattagtataaagtatgaagtttcttatttcctaagccaatcttcaattccaaattactgattgagttctagctcatgtatataacttctcgtatactccagggagccacagtttaatcttattgacaatttctttgtttgagattttatgtatatgtgtatacctatatatacacacacatacatatgtacatatatgcatatgtgtacaygctatatgttcatatttggtatttaatttatagaataaatattttaaaggttataaag

SEQ ID NO: 31462 - DNA, 564 bp, Homo sapiens
taagtgatcattagaaagttaatctcctttctgctaggaatgataaccagaagaattgcataaatattatcttctgttcatgtaagagtttattaaaataggcctggtatggtggctcattcctgtaatcccagaactttgcaaggctgaagtrtggattgcttgaggtcaggagtttgagaccagctggctaacatggcaaaaacccgtcttgactaaaaatacaaaaattagccaggtatggtaacgcacacctgtcattgaagctactcaggaggctaagacacaagaattgcttgaacccatgaggtggaggttgcagtgagctgagaaaacaccactgcactccagcctgggagacagagtgacacactgtctcaaaaaaatatattattaaaatataccagtatatcaataagctttgccatgaagaagaaggatcacttaatagaggtttctgacatggctttgatgctaaagcgacatgttactttaggagatttgggcaagacttctgtgtgaaatggtctattaacatcatcttttatatcaagtctgttgtgc

SEQ ID NO: 31463 - DNA, 564 bp, Homo sapiens
taagtgatcattagaaagttaatctcctttctgctaggaatgataaccagaagaattgcataaatattatcttctgttcatgtaagagtttattaaaataggcctggtatggtggctcattcctgtaatcccagaactttgcaaggctgaagtgtggattgcttgaggtcaggagttygagaccagctggctaacatggcaaaaacccgtcttgactaaaaatacaaaaattagccaggtatggtaacgcacacctgtcattgaagctactcaggaggctaagacacaagaattgcttgaacccatgaggtggaggttgcagtgagctgagaaaacaccactgcactccagcctgggagacagagtgacacactgtctcaaaaaaatatattattaaaatataccagtatatcaataagctttgccatgaagaagaaggatcacttaatagaggtttctgacatggctttgatgctaaagcgacatgttactttaggagatttgggcaagacttctgtgtgaaatggtctattaacatcatcttttatatcaagtctgttgtgc

SEQ ID NO: 31464 - DNA, 564 bp, Homo sapiens
taagtgatcattagaaagttaatctcctttctgctaggaatgataaccagaagaattgcataaatattatcttctgttcatgtaagagtttattaaaataggcctggtatggtggctcattcctgtaatcccagaactttgcaaggctgaagtgtggattgcttgaggtcaggagtttgagaccagctggctaacatggcaaaaacccgtcttgactaaaaatacaaaaattagccaggtatggtaacgcacacctgtcattgaagctactcaggagkctaagacacaagaattgcttgaacccatgaggtggaggttgcagtgagctgagaaaacaccactgcactccagcctgggagacagagtgacacactgtctcaaaaaaatatattattaaaatataccagtatatcaataagctttgccatgaagaagaaggatcacttaatagaggtttctgacatggctttgatgctaaagcgacatgttactttaggagatttgggcaagacttctgtgtgaaatggtctattaacatcatcttttatatcaagtctgttgtgc

SEQ ID NO: 31465 - DNA, 564 bp, Homo sapiens
taagtgatcattagaaagttaatctcctttctgctaggaatgataaccagaagaattgcataaatattatcttctgttcatgtaagagtttattaaaataggcctggtatggtggctcattcctgtaatcccagaactttgcaaggctgaagtgtggattgcttgaggtcaggagtttgagaccagctggctaacatggcaaaaacccgtcttgactaaaaatacaaaaattagccaggtatggtaacgcacacctgtcattgaagctactcaggaggctragacacaagaattgcttgaacccatgaggtggaggttgcagtgagctgagaaaacaccactgcactccagcctgggagacagagtgacacactgtctcaaaaaaatatattattaaaatataccagtatatcaataagctttgccatgaagaagaaggatcacttaatagaggtttctgacatggctttgatgctaaagcgacatgttactttaggagatttgggcaagacttctgtgtgaaatggtctattaacatcatcttttatatcaagtctgttgtgc

SEQ ID NO: 31466 - DNA, 1265 bp, Homo sapiens
catgccatatcctgtgctccctatgatcatagcaactagaagaccttattgtccttaattacttatgcgtgttcccttatagcacactgtgtgctcccaggtgtatggcaatgccatacctgaatttgtttctccagtttttaacccagtgcctgacatgtgacagatgcacagttagcattggttgaatgaacagaagtatgaatgaataacgttcatgcctttccagtaaggtctgacttttaagttggggaacctgggaaatggccattccttcttcttctttttttttttcaggatgatatacatggccaggtgaagacagtagagagaaaacagaactgaaagtaagtgtctcccataagtagggtaatttgtactttatttacttacaccaaaatttacagaatgccaatacagtcaaaatatagtgtcaggtactgaagaatatttaactaggaatcaaagaactcaagatctcttactctttagatctaagatccaatgtataatgctaccctaaattactttattcttaatagcatcactctatccagagaaaatacacgacattctagcttctctgatttggttttgcagatgggtctacctataaccttcccctcaggggtagagaggagtttagctggcagtttatttctgtttctactcacacgcctagcatatgagaaggctgggattagagccaaaggagaagcctggaacacccaggtgatggcatgtttggatccttataattctctatgaaagagtgaagagactcaaaggctatggctctccagcttgagtgggcatcagaatcacctggaaggcttcctaagacacattattkctgggcccccacccccagagttcctgagtcagtaggtttaagttcagattccagaagttgcattcctaggaagtccccaagcaatgcaaatgctactggtttaggaccagctgaactaaggtaagccctgacactttccaccaaatcaaattctctcattccctcatataatgccacaagatgattccatttgtatggttttgtccaggtagccttggactcaaataaaagaatcagttggaattacttatttcatagctgttttccactgatctggggcaaattttttgtgccagataccttcctttgtggtttaacctgtatttatgggctgcctctcttgtcattagttggaaataaaaacaatgatagtatcaatgaaagcaacctgcaaaagtattgttaacataga

SEQ ID NO: 31467 - DNA, 1715 bp, Homo sapiens
taaactgtaaagctctctgcaaatgaaaagcattattattattccagatacaatataagtgcagctgacatcaaccaccatttatcccagttgcaggtgtaacaaccaacaagggtattgtcctttgttcctttgccacagctgtgagagagcatctgaatccaatacataaataacagctgtgattttaattgagacttttgagtggataagcaaggtgtacactgaacgcatagcaacagataggttttcatttgggcagccacattattatttcctcagactttgaaaagggaaagttttaacagccctcttggaagtgacccttgtttttccccccacctgttcgcagttactgtcacagaatgcgtcatcactctcccacgcgcacagtgggaaaacaagtttgccatccagagcaaagggagtttttatgctgtgtcagggatacaagagtctgtgtatggttcattgtccatttcccaattaggctccctccctaggcgttggagcttcctgcccagagagcctgcctggactccttatcatttcagcagaaataagtcacatgagaagccactgcaaatcagatttttgccagaatgcttgtggtctctgccttgccctttttttcccccaagattttgcaactctgttcttgtcttaggagggtgagaaattatcccatcaatgtaatcaacccagattggtcaaccaaagggaatttgcttgttgaatcacatttgctgctagtatgttcttggacaagggtatctccatgactctgtcccttgactggggtgtctaactattgggtattctctttcttgtactgtgcatagatatgtttcagactttgtatttgccccttaaagctgcccttgtgatagatttagcagctctgtagtaatacacactgaaaactaatctaaacactatatagttgtasagtggaaagagtttcaaagcccagcaaatctgaattggaatcaaaatttatcactatacctgggtgataggcctcagctgccttatctgtaaaatggggataaaaatacctccctagctctgaagatcattgtaaggtcaagagaggcaatgcatgtacacttcccagagagggtctggcccatagtaattgcctcataattagtgagtgagatgattgttccataaactgtacagctggggaagatcccccaatgcagacacatggctagcccaagtttaacagcaacttaatggcagatgtaggagaaaagttaagatccagagcttctttctactacatctaagaattgtttcctcaggtttggggaggagacagcaaagctaaacacttcaaggtaaattatgatgctttgatgatttcttaagctgagtggtctatagttcactggcatagaaggaaggtttttgttttagaaatatcatctctgcttatgtttacagcatatctttcctgttcagccagaggcatccatattgctttgaggagagttagcattgttagattaggacagcaagaagaaagaaactaataaaatagattcttgcaccccacaatagaaacatggattcgaatgctaaagtgttgacttgcaagagccaggttcttaatgagagaggaagaagcttgagaatccaaagagaaggtctttaaggaagcaagttgtccatgacataaagttaggttacaaagagaacaggggaag

SEQ ID NO: 31468 - DNA, 1013 bp, Homo sapiens
tttaataatgtcaggggaaattttcagttaatcccttggactgtgggtacacccaggattcaaaggccagaccaaaacggcacgaagagaaacagagaactggtaattatctggtgaatttgggtcatgtggaaagccaaactaaattactttygccaaggaaaaaatgatttttttttttctcttcaaatgaattcgttttggtgagattttcctagggtcttcccttccttgctttgcattattcaaccaggtatttcctagaaaccagcacagcgtgggtaaaatataaagacaaggacttcgagggaaatgaaaactgcttgtccatggggtatttggggagccctggtcttattcccgatatataacatataaggaaaattgtactaagttgacagtgctaccataaatccagtcagctcgtgggtgctctaattttgaactaaatctaacagcttctgtttatttgtgaaacagatgttttaagttaaacgtttcttatgtctttttgttcagaattatatcatattataattttgcatttctaaggcaaaagcaaatgaagggaacatgcttaatttttaggatatgagtaatttattatacttttaatagaggatttcaatgtattccccatccaggaaatggtaatggaaattgcctacttcaacatgtaatctataagatcttgttaaatagtgtaatgagaatttgtcactttgtcacctagctgaccttttacaaccctgaaactcaaagtgaagtgacacctccctcaattcagatgaaatgcctgcatattttactgtgttttcaccaagaaatcccttcagccaaaatttcagctagtccaagtcaatttttaagcaaagtgcataaccagaaattggcacaaacatttgtgtatcatcctttccatattcaaaagctgtctgagactcatttgattaagcataaaaataactctgtgaatgtcattagaaaggcagcgaacattctatgtctggtcc

SEQ ID NO: 31469 - DNA, 689 bp, Homo sapiens
tagtccctgggtgcctcactatcctttgttggttttcttatcatggctctgacatagtctcttcacaaatcagttctactcttcagaatatgctgtgtttcttctgtgtttcttgccagaaccccttgactgatccactcttacttgcttgtgttttaaattaaagtctatttctgctttcctgtttctcttctctacctctcagacaattaatctggagccttaactggtgacagtctaatgatatttctgcttcattttggcttggattatttatcttgcaggaattaaaagaattaaaaggcaaggaataagctattgcatctggtgcttcctacagttaaaaaaaaaaaaaaaaaaaaaargaaagaaaagaaaagcacaacgcctaatggggctctttggattttggaggcaacatattccccaactgggtgtgtaactccagcccatttgccaagtaactcatcctaccaaacatattatatagttagcttttttatagagctttctctgacttttccctccactcccaagcaggtttaaatgtttccttctctttgctagcagttattacatattccttcatcataatacttatcacattgttctgtgactgtttatatacacctctctccactagactataattcctgtgggactgtgtcctatttatctttctaccccag

SEQ ID NO: 31470 - DNA, 689 bp, Homo sapiens
tagtccctgggtgcctcactatcctttgttggttttcttatcatggctctgacatagtctcttcacaaatcagttctactcttcagaatatgctgtgtttcttctgtgtttcttgccagaaccccttgactgatccactcttacttgcttgtgttttaaattaaagtctatttctgctttcctgtttctcttctctacctctcagacaattaatctggagccttaactggtgacagtctaatgatatttctgcttcattttggcttggattatttatcttgcaggaattaaaagaattaaaaggcaaggaataagctattgcatctggtgcttcctacagttaaaaaaaaaaaaaaaaaaaaaagraaagaaaagaaaagcacaacgcctaatggggctctttggattttggaggcaacatattccccaactgggtgtgtaactccagcccatttgccaagtaactcatcctaccaaacatattatatagttagcttttttatagagctttctctgacttttccctccactcccaagcaggtttaaatgtttccttctctttgctagcagttattacatattccttcatcataatacttatcacattgttctgtgactgtttatatacacctctctccactagactataattcctgtgggactgtgtcctatttatctttctaccccag

SEQ ID NO: 31471 - DNA, 1199 bp, Homo sapiens
ccagcattgcattttatttaaaagcaaatgccgaccaagtagtcagtagcaccctttcagctccaatagttggtgctatattctgtactcagcagtagactcatttcattattttggagtatggacctgaagaaaatgaatatcagacatgggctaagccaaggccagttaataaatattttaggctttgcaaaccgtatagtctctgtagcaactattcaactctgctcttatagcaccaaagtagccacaaataatagtaaacaaatgggcatggctctgttctagtaaacttacttgtggaaacgggacaggctgaatttggcccacagaccctcgtttgccaatccctgggctaagctattgcaggggtactgctgatggatatgcgggctgtgtcctgtgtgacagtgcctagccaagggggcaagtgggacctgaaatacaacccatgctctgcttctccacgccttccaccacaagaggtcctttttgtaattcagacagaggtaccatttgttcacaggctgtctccaaccagaataagcacatttcctaatggattagggtacttaacatggtttgcataagtgggaggaagagggacctgattttcctgtattaggataagggttacctttgatcccaatggctgttattgaaatgactaaagccacatggttcaaacatggctgccttagcccacatctacagactgggagtaggtggtgggagcaattccaacagagatgtagactgggaaagtgccccaggtaagaggaaccccaaagaaggtgagtttattggttagggggcttgttggatattattaccaaagccatagtccctttatgaagtttgttctgtccaaaaatgtgatttaggccactgtatgagtccattctcacattgctgtaaagaaatacctaatgctgggtaatttataaagaaacgaggtttaattgggctcatgttgctggaggctgtgcaggaagcatggtggcatctgcttggcttctggggaggccttgggaaaacttagaatggtggctgaaggtgaaaggaggagcagcacttcacatggccagggcaggagggagggagagaggggagctatcacacactgttaaagaaccagatctcgtgagaactctatcatgagaacagcaccaaasgggtggtgctaaaccgttcacgaa

SEQ ID NO: 31472 - DNA, 664 bp, Homo sapiens
aattgtaggaaatacatcaaagttgctggtctgtctggtttctacatcaagccacatttaattctatgatgaggcatcaaaatgcaaggaaaaaaaatcagaaaaggcattttaagaatgtctttggagagaatatccacaatggagagatgaatctgaaattttcttaataaatttacttcaccagccctaactcatggagtccaatattagtccttacaaaccattcactattgtgttcacaggccaagagctaagyaagaagagttaagctggtcttgctttggaccctcatagactcaaattttggttttggtctaacactgaggatttgaattgaaattgttcttatttcagccttgtatttgggattacatttcccctagatgcccaaccagtcttcaccaaggcttaaaagaagtaaaggaagctagcagatctttctctacactatcacagacaggaacatccttcactcctctcacccccatataactagaataataatgaggaagacatgagatataaaggccaaaggccattcttttcaggtcattgcaagaatatgtaaaatgtgtacctaggagtagatgtgttacatggtttcacatcctatatcctcaattaaacagcaaaaatttacatttacaaaagaactgatcaa

SEQ ID NO: 31473 - DNA, 664 bp, Homo sapiens
aattgtaggaaatacatcaaagttgctggtctgtctggtttctacatcaagccacatttaattctatgatgaggcatcaaaatgcaaggaaaaaaaatcagaaaaggcattttaagaatgtctttggagagaatatccacaatggagagatgaatctgaaattttcttaataaatttacttcaccagccctaactcatggagtccaatattagtccttacaaaccattcactattgtgttcacaggccaagagctaagcragaagagttaagctggtcttgctttggaccctcatagactcaaattttggttttggtctaacactgaggatttgaattgaaattgttcttatttcagccttgtatttgggattacatttcccctagatgcccaaccagtcttcaccaaggcttaaaagaagtaaaggaagctagcagatctttctctacactatcacagacaggaacatccttcactcctctcacccccatataactagaataataatgaggaagacatgagatataaaggccaaaggccattcttttcaggtcattgcaagaatatgtaaaatgtgtacctaggagtagatgtgttacatggtttcacatcctatatcctcaattaaacagcaaaaatttacatttacaaaagaactgatcaa

SEQ ID NO: 31474 - DNA, 664 bp, Homo sapiens
aattgtaggaaatacatcaaagttgctggtctgtctggtttctacatcaagccacatttaattctatgatgaggcatcaaaatgcaaggaaaaaaaatcagaaaaggcattttaagaatgtctttggagagaatatccacaatggagagatgaatctgaaattttcttaataaatttacttcaccagccctaactcatggagtccaatattagtccttacaaaccattcactattgtgttcacaggccaagagctaagcaagaagagttaagctggtcttgctttggaccctcatagactcaaattttggttttggtctaacactgaggatttgaattgaaattgttcttatttcagccttgtatttgggattacakttcccctagatgcccaaccagtcttcaccaaggcttaaaagaagtaaaggaagctagcagatctttctctacactatcacagacaggaacatccttcactcctctcacccccatataactagaataataatgaggaagacatgagatataaaggccaaaggccattcttttcaggtcattgcaagaatatgtaaaatgtgtacctaggagtagatgtgttacatggtttcacatcctatatcctcaattaaacagcaaaaatttacatttacaaaagaactgatcaa

SEQ ID NO: 31475 - DNA, 660 bp, Homo sapiens
aagctcaccattatatcatattatagagctatttaaagaaaagggtagggtacagtatagatgaagtgccttcctatctaggtaatccaagcagtagaacttgtagaagagctcagattcctatgaaaagctcctacactagagctgataaatcagaaaattgggtcagtctaggaatattcaatatatatgtaaagtcttattttttgaaaagtattgatttttttaaagtttcattaatctgttgaatagatttcattaccttggagataactttactaatcttatgtctgtcagtcttaaaagcatttagtgaaatattctggtattcaaaagtaacccacaaaatatttttctcgtagggagtatttaaaaaagaggatgatattgatctgcttggtgaagagttcagraaagtatatcaacaaaggagtgaaatttgtgaagagaaatgatatcatcaaaattgggtaaagcatagattttttgtatgttaccactagatgtcagcataacttttgttttacagttcagtggcattaggtatccattgtctgtttggattttgtaaatcatcactgaatttcataacttgtaaacaattatcagatacaaattaattttaatcaagctgttatttttgtactgataatttcaaaa

SEQ ID NO: 31476 - DNA, 1677 bp, Homo sapiens
gtgtcttctatatcactgattctattatcttcagcatgaatgatagtcttttctcctaatgtagattcaaattactctactgcattttaagtttttctctcaattctttttctcatttcacttgatgtatttctcataactttctgttcccattccttggggaccatattttcatgcatttcagcggagatgacaagcatttttttctaaaatacttttctaagttttgtagaaagtaatttttaggaagtttatttctcttaggcttataatgatatgtcttttctgtgtatgcttctcagtggctagacggaagaaaaccaatatgagaactttcttgactaaagatgmatttaaatgtgttgggtgtattatactgagcctcactcaaatccgcatgtcagatctacagctggaagtgaagcaaccttcatagctccctatccaattgttagtgtttcaaaattttgtctttacctcagttcagtagtgataggaaatgtctcattctaccttcactgcatggttctgggcctttttatattcagggaaatatcacttctatcaaaacactgtaggcaagagaggtgaaaaacccagctggtggaaaatgctgagattacagttgtgtaattgggttccaacacttccatttcctgtcctatcgttttcttggagttacagcttttgaatatttgtggaaagagatactgatgagagggccaagagggacatagtactgataggtaatgctttttaaggcaaagagctgactgattaataatcttgtatatataccttttatctctaccctaggggcagactgtgggggagggttgaggcatatatctacttctatgctggcagattttgtctctaagtagactttgtgcctttataggttttttttattgttgttgtttgtttgtttttttactgggaaattgagaagaactacctcagggactgccagaaatcatctttagtttcttattaccattcaaaaaaactgcttgttctttattcttttcactcacccctacagaacacttccatcattgttcaagttaatctcttcgaagtacgattctgatcacctctttttcaaagcctccagagatatttaggcaccaggtaaacttcttattcttgtattcaatgtcttgtataacagtcttgtataagggaatctctttggagtacttctatattggaacttttgctctggtccagtttgcttacaactcactggaaagtgttaggtgtttttatagcactaataccatttgacacacctagaatggcttctacttttttaccttataaattcttgttaattcttcaatacccattcaaatatcatcttactgtaaaacattatctgagctttatacaactggatgctgctgcccccttcatatttcttttattgtgtttataccaacagttaacctttggacagaaactgaatcttcaactttatcagtatgtctgcattatatctacttagcaatgcctcatatcctataggctttcacagatgctattcagtgcctttgttttttagttccaactacacattgaacagttctagagtctttgcttgtcattgtaactttgagcttgtcatagcccaaaggtctgcattctgtgactaagtgtcttctttccccttaa

SEQ ID NO: 31477 - DNA, 520 bp, Homo sapiens
tgggtgtcaaaattttttttgacatctattgaattttgtcaaatacttttttggcatctattgatatgagcatgtgattttctttaacctactgatgtagygtattacactgaagaagtaacttgtttttagatatctttgaggtattacagcaaaggatacaatattgattgatagcttgtataatgcagagtctgactcaatttttgatatttaactattaatatttttaaagtccctattccttcctttcctatttccttcttgacccacgtctgggatagttaataagaaagcccacatgctccttcttttggtgctggtaggatattgaaaccacacatgcacaagcctatgcctggaaatccacacaccagccttaccctcttaccttaatgaaacccaagccaaccttcccgccctgctttctcaagctattttcagatccatttgggggtcctccctgcttccttcagaaagcctcattatgtgaataataaactttttgtatcctcttagg

SEQ ID NO: 31478 - DNA, 2107 bp, Homo sapiens
tgtttacttagaggaatccaaatgtattcttgttgtactggtattaattattaatattaacaccttccactatcatgtgtcctttcctgggtggtaaattatgattaccctaataggattaccacagcaaaacacagaccaaggttatatggttgagaattcttaccagtccttttctttgattcatcagtctatgaacaaggaaattacgaacaaccagaaaattatgtggatttcatgagctgtactttatcacacaatgctagaacctcatccttaaggtacttttaagtgaaatacctcatatggtcaaatgttaaacacaaaattgatgatgttaagtatcatagggacagctggctcatccacatttgtttctccattggccagtgttagggcaatgcaaacactccactaatagcagcaaaaatcaatgataactttagttgccaataaatgtcactcatgatttttgtttgcttggtttttgccgtgtrtgtgtgtgtgtatgtgtgtgtgtgtgtgtacatgtatgtatgtgtgtattacaatagaactttatttgcaaaaccaggggtagtctgtgggcctatttaatgactgctggtgtagatatcaaaatgatttcactttctattaataatgagtactttctgccaagtatggtttcatagaggactcgctttctgtctgtatataggcagtgctcactttgatttgaattgcctttgtatgttttacttttcttggataccttttatacctctgctctcctctccatgttaattctcttaatctgttccatgccctctcttaagtctgtcatttttgtaaaaagaggagaattctcagtgctatgtttagtctcttttattccttccccaaatcctctttatctctgctgtctcattctctttaatttagattttcattacacgtgtaaggctggccagatcacgtgttctgttttagccatgcattcagatgtatttggtgggatgcagaagcattagctgggatacagtggaggattatttcagtgttattggtaccaagtaaaactgaggtttcaaaaagaagtgtgtctatttaagtgtaaaattcactaaccatctctcataaaagcatataatgggaggagatacaaatatatattttctgttttcatggtggagaatttttgttttaatgtttttacattacaaaggataaagtttaagtatttccaatttactcaaactattgtatgtatgcaaatttgtaagatacacccacctgcctactttctttatctccgtttcttttttccttccttctcattttcttccttattgcctcccttcctttcttttttctttcccactgagaaataatgaaaattggacaaaaatgcaaaagaatacccaaaatttcatcagtatactaccagacactagttattacttggatgataatggcatttgcattattagcaagaaatacttttaatattgggctagaatgaatctaatgagattgcaggtcagggtccagctgatgcagagatgaattattcgctgtgaaactttagccaagcaaccaaactgtcacatgctgtgtctaagaactgatacttgcagtccaaaactcattaccaagtatgtcttctgaaagatatgattcttctgaaagatacgattgccttaatctctttcagatatactatttatttaagcctgcagttcatcgcctaaaaagtgtatgattttacacctaggtatcaaacctggagaaattgacagatcaaatgggaacatctattttaaaagtgtgattcagaagtcattgagttcattcatttgatgacaattttggggcaaatcatggccccttcctcaattgtgtattttgtcttcacttatggaattgatttgaaaatattcaaaggagagtcaaagatttttgtaacttaactacaataaaaatatgatttaaatgataaaaagcttaaaataaaaaagatttttgtaacttaaatatgataaaaatatgataaaccacttatgcctttaaacatgttaatagacatactcagagtagattaatggatttgccatatatattttaa

SEQ ID NO: 31479 - DNA, 1338 bp, Homo sapiens
gtctcatgtgtatcctacacatacttatgttttccacaatactgttttttttctctgcctaacataataaccttgttcactctattttcagttttcttttcttttattatttgagtaggattccaatgcttgaataacattgcgtttgaatagtatwccctttttagttactcgactttaccaggtgtactttctcaaaagaaactaataagaatgctaagataatgagtacaatagccagtaaactttagtagagggagaaattttaaaattccttgctgtttgaatctatgaaaaccgtgaccttagtggaaatgcaaaataatgcagatttgctaaacagttctacaagtgctgggagttactgtggaaacttagccaataaatcatccccacttaaaaggggaaaaacagccaaagaatctatgatcctgaaaatgtcacagcctctgaaacgtgtgtgtggaaagcaatgtttaaaccaaatatgatgtttttttccaacattcttcctttctaatgtgaaataactaataatgtattcacattatctgtaagattttatcttgttttgagtgtccaaatgtatttaagaacattgcaaggttttgttttgcaattttactgtatttgttggtcaattaattgattgccattagaatgtgactttttaaataacctttcatacagaaataattctgttactataaaggaaaaagagtcaataactaacaccagtaaaacaagtaatgaagcttttaaagataaaaaagaaatctctcatacctccaccattctaaacacaacagatttcctttgagcctatcctttttactgacagtagccagaaaacaactgtgaatgaagggctttccagatcaattcttaaatcaaaaagtgttggaaaactcagatttaaaaaagagagaaacattaggagcttgtgtcctggtcaagaaatgaccaatgaactccttgataagcttcacgccctcacctgtaacatggacttaataatagtacccaccgttcatctgtaacatggctgtaataatggcacctactcgttgctgttagcattgaaggagccaacgtatgcaagccaatcacttaacaaatgtccattgttctgcttgtcattctttgcttatacttcctgacaacaagcagaaaccttagaagagtggtctgttcactttagggaaggctaagtcagcattaggtgtcttccatcttaaagcacacaagacagactgggtagagcagcagcgtcactgatcgccactctaatagctctctggctaagtttctcatgtcctttgcggtgttaactacaaa

SEQ ID NO: 31480 - DNA, 582 bp, Homo sapiens
tctataaatttcttattcagaacaaaacacaggaagaaatatatggaaacatgtattagtgcatgttattgttattttgttatgttccatattatagaaaactctttagttaaaaggcagctcagtcagtagcaacatttcaagatatgatttaatactatggtattaggtaaatatgctaacaaaaagtgttttttctctttattcctttcattaatattgttcaaacacctggtgagttttttccagtgtcattcaaaggaaaaagtctaagtaaagcttagttccaaattaaatagracagaccaatcaaacagttaggcaatgtggcttatagtgagttttatttgtttatgcgtttgattgtttacttattatatacatgctatttatgtacatttgtatatatatgataaatatatatacacagatacatgtactatattgtacttatattttaaagttttacaaggtatatatgaatcatgattatcgtttaaggtaaaatagtgaattacacataatttataaattttatttttaagaatactgctacccattttgggtgcaagttctaattgg

SEQ ID NO: 31481 - DNA, 582 bp, Homo sapiens
tctataaatttcttattcagaacaaaacacaggaagaaatatatggaaacatgtattagtgcatgttattgttattttgttatgttccatattatagaaaactctttagttaaaaggcagctcagtcagtagcaacatttcaagatatgatttaatactatggtattaggtaaatatgctaacaaaaagtgttttttctctttattcctttcattaatattgttcaaacacctggtgagttttttccagtgtcattcaaaggaaaaagtctaagtaaagcttagttccaaattaaataggacagaccaatcaaacagttaggcaatgtggcttatagtgagttttatttgtttatgcgtttgattgtttacttattatatacatgctatttatgtacatttgtatatatatgataaatatatatacacagatacatgtactatattgtacttatattttaaagttttacaaggtatatatgaatcatgattatcgtttaaggtaaaatagtgaattacacataatttataaattttatttttaagaatactgctacccattttgggtgcaagtwctaattgg

SEQ ID NO: 31482 - DNA, 642 bp, Homo sapiens
tcatatttggccagtatgaacccctttaatctatctcatcatawgttcctttgttatttccctttggttactttctgaaccatcttgtactttccattaatttgaaaattagactttgttccaaggagcatactttctggaatgtatttctggttcctttttccagggacaagaaagaccaggtgccttgctggaaaaaactagatcctgctgaccatagcattattttggtgagtgagttggccataaggtctttgttattttgttatacatgtatcccaagccccctcttcatcagggaaaagctagaagaaagaaaaaggaaaaatgaaaatcctgtcatgccactctatccttttattgaaattccttagcttttacaaagaaaaaaaattctcattttctgttagggagggaaagaactatgctaccttaaacaccacgaaccacacacgggcttacagagttcaaaccagtctataaatgcactggaatttgctcctcagtttaatctcaaatggggtgaacttgttcctgtatatctttgtcaaataccctaaaacagaggccaaagagaaaatcatgctccctcagaaacacagaaatggaaagaaaaccaagaacatttttttctattttatg

SEQ ID NO: 31483 - DNA, 907 bp, Homo sapiens
ctactgagtttgcagagcctagtgcaaaatgaaaatgcaggcaccttgttaaaaattaagaagttcaagatggtgagcacagagcattaaaccaagcatagggccctgtgccgctgcttctgaagccaactacctagttaccacctgcccccttctcgtggccctggcaaactgtcccgacacctcttgatctgaatggaacccacaccacaccagagggttgcctcctggaactgagacaaaatgagttgggtcatcagggagctgaccacaggctcataatcacaatctcttcattgacacttcaacgtactgactgtctcataaataacctcattccactctttcaataatggcacacatgaaagattattaaatttctaaaattatgttcatgactattttcaacaagaaaaatattaggataggccgggcatggtggctcacgcctgtaatcccagcactttgggaggccgaggcgggcagatcacgaggtcaggagatcgagaccatcctggctaacacagtgaaactccgtctctactaaaaatacaaaacattagccgggcgtggtggcgggcgcctgcagtcccagctrctcgggaggctgaggcaggagaatggtgtgaacccgggaagcggaccttgaagtgagccgagaatatgccactgcactccagcctgggcgacagagcgagactccgtctcaaaaaaaaaaaaaaaagaaaagaaaagaaaaatattaggatatcaaatgaaatagaaatgaaaagaatcgagtaaaaatgacagattgaatgtatgcatgtacttttgctcttctccaaaattccattaaagacaacagtacaggaactttttaggtgccataaaccttgcagaagggcaaagagaaagggaaaggaga

SEQ ID NO: 31484 - DNA, 780 bp, Homo sapiens
tatggcctatgtggcaggactgctttcactgtagcttgcrtctgctgcagaactccttcctgccgtgggctccacccaagctggctgctctttggtcaccagatataggggttggaacaatattccttattcgtgggtgtatggaattttccaattgaactttttacaatggcggaaatatcctatacccacgttgttaatgtggtagccattagcgacttgtggctattaagcaatgtggttagtacaagtgaggaactaaaatttaaatttaaatttaaacttgcatagctgcatgtggccaatggctactgaactggacattgtagatgtagaatatgctgacttcagaacccaaaaaagctcatcaggtgttgtgcttccttctttgtggtagaaagtacaagaggcaataacttatttttaactttagggaagggatgccccaacatgtccttgatctctattctcttaaacttttactaaagtagtggcctctggctttatctcccaacttatggagtgcatatgtcttacaaagtctaagtgatagctacttcttgtgtatgtaatacaatcagcatattatccatgtgatggatcagtgtaatatgagatgtccagatggttcggattttttgatttgtagtatgataaagtacaaagagttaatatagtcatgggggaatatagtaaataaataatgtccatcttacacaaatgcaattgttaatgattctttctattaattcaatcaccaaatcaatagccccagaccac

SEQ ID NO: 31485 - DNA, 1707 bp, Homo sapiens
ttgcctctttgccttttccttctgcccgagagagccgctgagccgcccctccccatgctgcctcttcctggctcagatctctctgttcaatacctgttttcggcagatatccgacattcacctgagcaggtttcgagatccaggcagagcggtagacttagagaaattctgttctgaaactattgacatcattcaaccagctctcgtcctagcaacaggtagggaggcttgccgtgctgtggtggtggtctgtggtccgcatggtagaactctagccagggctgtggcttttcattttggggacgttgggagcagtatagccacagccccaggtgagctctgtgaggtggaagagattggacattctaacccctttgcctatggataactgaatgagtcaagatccaggcaaaatgatttgacgtagcaaggttttgtcaaagcagtagaagcaaggctcctggttctcatgtcagtctgttgtctgatatatttgtatctggtttttgttcttgttgttgttacagttctggttgtgagaattagggaaaagcctgtaaccacgaatcagaagttctcttcttttgctaacttttctattttctttacattattaatcttatattttcagttgtttgaggcttccggtgacccagggcactttttyttcatcctttgatagttttatgacttaagttttctagactcttcaaacactttatttgctttcaaactgtaatggggagaagaagctaaaggagcatctatctatcttgcttactggggaattcatcactcatccaccttattgaagcatctctgctgacatgaaagggtatcagttctgatttaatggatgagcctccataaaaagttttctgtttagttctctataaattttggtattttgttgtccaattccacctgccacattgcttcttgctgtaaaaataatacttggtcaaatcacatattctgattttgtggtttggaaaatatggttgccatagatattaggcagccactcagagtactggaatttcttataaatcattttcattttatcagagtctattgatgcattttgtactgttctctttaaagatttttttaacaacccatttcgaatatcacaggagattgaacaggcatttgctaacctataagaaacaaagtccttgctgagaaaatcttgttagtttagatggctcgatttggacattggtggtctcgtgagcagttatgcttatacacgttgagtgctttaagtatccttgttccttcagtgtacatatctaaaaaaaatggaacccccagtagtttattttgcattgtgattcaattcttgtgtaaacctacaggagacctgacagatgccaaaacaaaggaacagttgggatccaggcagcatgaggtagaatggcaaacctaccagggtattctgaagaagacaagagtcatggaaaaaaccaagtggctggatatcaaaggaaatcatggtaagagccaagagccagatacaataaagacaagagtttttttcccccttcaggaacctagattttccaacttagattgtaaaattataaagtgggacatttacatatactaaaggtcacatctctgaaatacaactatataatgtggttttaaaacttcaaatgtcattgttagcctttgagatgacaattggtatggtcctttttt

SEQ ID NO: 31486 - DNA, 573 bp, Homo sapiens
aacactgtttcttgccttcttccctctaccttctatttcatattcaggattagatgataaataaaattcccaaatgcccatttgataggctctgttctagaaatcatggtgatgggagtttgatcctttgttcctctttaatcaccttcataattctttgaaattcattacttgactctttcttccccaagcactaatttcaaaagccttggatttgttcataaagacttaatggattatagactgtttgttagcctaaggaaataggttttatttaaaacatagccatttcraaaggactggaaccaagatcagcgggtttagttggactacttgtgttgctttatgtggatatacagattaactacatttcttcctttaacttttaaaaataaagaacaatttgaataataaaaagttcagacaaaacaagggcttgatatttatactatgtttttaatatgtacttaatatgatttatttccttaaattttaatacaataaagatgacctactaaatgtaaactaagcagtgagaaaaaacacatgcagacttactaaacttttattatc

SEQ ID NO: 31487 - DNA, 531 bp, Homo sapiens
tatccccaattcattgggatagatacaataaaaatgtrtagctttttgttttgttttgtttttatacaacattttcagcctttattgagagtacagtcatcatgccaaaattcatccatcaacatacaaccttatttcccatctaaagttaatgagaatgtattttattttaaatgggacatagaggcaacatgccaagaattaaagtacaaccataaagttttagttttacactttgaatatcaacaaagcagtaattcctaaaatcatgaaaacatgataaagtatctatacagaaaaaaatgaacatttaagtcatttcatgctttcttaatatcatatagtgaaaacagatgtgcctataatttcagcctacagatagcatacttcataaggtcattattcatttaaaatagtacaaatgtttacaaagaacatttcacttaaatttcacagctgcttataaaatggtacttgcaagactgacctatataaagaaataagagtctcatcaaaagagatggtaaatta

SEQ ID NO: 31488 - DNA, 531 bp, Homo sapiens
tatccccaattcattgggatagatacaataaaaatgtatagctttttgttttgttttgtttttatacaacattttcagcctttattgagagtacagtcatcatgccaaaattcatccatcaacatacaaccttatttcccatctaaagttaatgagaatgtattttattttaaatgggacatagaggcaacatgccaagaattaaagtacaaccataaagttttagttttacactttgaatatcaacaaagcagtaattcctaaaatcatgaaaacatgataaagtatctatacagaaaaaaatgaacatttaagtcatttcatgctttcttaatatcatatagtgaaaacagatgtrcctataatttcagcctacagatagcatacttcataaggtcattattcatttaaaatagtacaaatgtttacaaagaacatttcacttaaatttcacagctgcttataaaatggtacttgcaagactgacctatataaagaaataagagtctcatcaaaagagatggtaaatta

SEQ ID NO: 31489 - DNA, 443 bp, Homo sapiens
aaatgctcttttaattgtagaggaaagggaactcagagatgacctggattaggcctttttggctgcatgtagcaggagtacccacgacccacagctcaagtgtagagtgagaatgggtttcgtggatgctgcgcagtcccgaagagccccaggcggtggctactgctgttcctgggccaggctcagaattggaactgcagtgcaggatgctgggcaaggcctttcctcctgttttcatctctggtttgtctatgcaacggtttccttctctytccctgcagactggctctcaacagagtatggcccactgctgtcatctttggctgggtggcaatgggcccctgctctctatttcatgagcaggacaagtcagccttgctgatttatcacaagcccatgctcccagggctggggttgggggtgagaatctgttggcccagcat

SEQ ID NO: 31490 - DNA, 1260 bp, Homo sapiens
tgcattggaaactgagagccaggctggtttgggagatgatgtgatagctactgattgatcagtgatacctttaaaggtgtctccagaagagccaatccacaagtcaaactaatgtatggagttggcttcccgagactgaggtgttctgaccgtcctagatagaagttccccacccctcaggagggttcaagcagctcatccatatcagactggtctgggccgtggagctaggcaggtggatggcgaagtggagtcctaacttcatgagaacctgaacacagaagctgcacagctgggcctgctggtgacctgctggtctccctagtcatccccactgggaggcagtgctgcagcaggtgtgttctagaacacttccattcttwttcctgatttgctgtgtgacattgggcaaattgcttctctgcgtaaaatgaggacttgcttagtggttgttaacctttgtagcagtggaattccttcttaagagcacagaacccctttttcaaatgaattcttatggtccctatattagttttctagagctgctgcaacaaattagcacacatttagtggcttaaaatgaaagaaatttattctctcccagttctagaagccagaagtctaagattgaggtgtcagcagggccatgctccctctgaaggctctaggggagaatccttcctttcttctattttgcttctaatggttttggtcatccgggctggctctttggcttataactacatcactccagtctcgtcttcatcttcacatggccttctgtttctccgtgtgtccttttctgtctcttttaagggtagtcacattggatttatgacccatcctcatccagtatgatctcatttcaagattcttatctaattgtctgtgcaaagagcctttttccaaataaggtcatcttctaaggttctgggtagacatgattgcctgagtgggagtcacctctcctttctcccttctgagaacaaaaaatgaagccactcctttgtatcctggcttagctgggcttatgtttattgctggcatcctgcttcatagtttattgctaaacaggtgagaagcccaggtcagcgtgatgctttatctgatcatccaggcacccaggagccagagaggcatagcagcatgtccagtgtcacagagcaaagtgatagacctgatctgaagttctgcagggttcctgctgcaacgtttggccctttgtctttcccccatagtacgtgatagggaagagtcaca

SEQ ID NO: 31491 - DNA, 581 bp, Homo sapiens
tacacacatatatacatatacacacacacacacacatatatatatataaagttctgaattttgtcaataaattggatttttttaactcattgtatctatcaggttctccagaaaaagagaagccataagaawattaacagagaaatagagacagagacagagagatataatttatttaaaaaatgggctcacatgattatggaggcttggaaactttgatatcctaagatctgcagctggcaagctgaagacccaggagaactgatgtgtagctcctgtccaaatctgaaggcctgagaatcaggaaagctgatgccataaattccaatctgtgtatgactctgaagacagaatatcaatgtcccagctggagacagtcaggcagagacagagaattatttcttactcagccttttgatattattaaggccgtcaaggaattggatgagacccacccactctagggagggtaatctgccttattcagtttgtcaaatcgaattccatctagaaacaccctcaaaaatacacctagcataatgtttaaccaaagatctgggcaccccatggcccaatcaagt

SEQ ID NO: 31492 - DNA, 528 bp, Homo sapiens
agggacaccataactaataagtatttaatgatttwaaaaaatttggaaaatgctagcaaacatacaggaaaatacgaaatgaatttcccttttaaccccaaaaaataagataaaagtattattacatacatttttataatcagtgtgtttaattatactttataataattaaacactgattaaataatacaaatctctagaaaattaaaatttgccattataagaaaaaagtgtgttaataccactagcatttaccagctattttaacctggcataatgctagatgctggaaatacaaatataaataaaatacagtttctgccctcaaggatccaaagtgtagagacaaggaattgggtcttgcttgcctgaattccaagacttcatttacattttagggtaatgtatttttattttttgtttagtgtgttattgtttatattttaaaagatttttttctgaaatgtgatctttaagttgacgtttagaaagatatccaacatattttagtgtaatttatttaccttc

SEQ ID NO: 31493 - DNA, 894 bp, Homo sapiens
aattaacattgaatgaataaaagagtactcttactactctgtgaatactagatttcagtgggcaaatatttagaaggctattgcaatcatctagatgagagacactggtagtctggtctagagtggtagcagcataatggaaagaagtggaacactccaaatgtagtttgtagatatttatgatgatagattggatgaggagtcaggatgtagaagaaggaaaagaatcaagaataagcttcagatttcctagatgataaactgagtggccggttgtgcaatgggatggttaagaggagaggaaagagataaggggtggatcaacagtccatactgaatggtaaatttcagatacctgtgagccatccaagaagtaatttcaagcaagttgtcagacagaatggtcagattgaagatcttgactatatttagaaatgttagaattatcaatataagactagcaattaaatctacaggaatagtagataaaagggtagatatatttttatcatttcttaaaaagaatctgactctggtgtgtggatttgggtaaaagawaccaagaaggagcagttagtaaggtagaaaaaaagcagagggaagcagcatcatatgagcctagagataaagtgcttcaaaagttgtcaagtgcactttggttttggtaaaacagtcttcatggcatcattggtggaggcaacctcagtggagtggtggggtagaagccaaattatgttccagtatatcactatgcttccttggaattttattaatcccatacctcagcagggagtaaaattctcataagctttcaatcaaatcaggccaatccaactactcacttatccactcgagtaacagactataaggagtggtagacaaagcaagtaatat

SEQ ID NO: 31494 - DNA, 1261 bp, Homo sapiens
cattttacaatcacttcatcatctaatttcaccttgtttactaacatcacatccatattatggctttttattggttcttgagcagtaaaaagcaaagtttgggaatccttcaaatgtctaagggacatactaaggtcaattaagcaatttagtaaatatatgagaaacagaattgacttacataaaaagtatgagatcaaagatactgtttaacagacaaataaaatgtgagattttgagaatgccatcattttagatgtgaaaattttatggtgtaccaactagagagcaacctgtgtgaatctgcagaatatctaaactataaaatatagaaacattatatttgtatatataataactattaataaataggcaagcaggtgagtatactttggtaaagctattttgtgggtatacttaggcatttactgtaatgaagaagtaaaaattaaaattaatgtagcccaaaacataaactggtatttttgaagtgcttaaaaagatttaagacatttcctctctgaatatgttgttgaaattaatgaaagacatcttattgtgactgccctcatgtgaaaaaagtttcttacataacgcaccaaaagctacaaactcaaatcatgaaagcgttcttcctttggttcaaagtgcatgtcattattaaatgatattattgccttaactggagggcactggaaaaaaaacaaacctcctctcttaatgtaaactgttctctgaagttaccattaacactatattcttarcagtagaaaggtagttttggctcagtcctgtctaaattatcgtaaattttgatttacaatgttacctaacaaatgattaaactatgtttgaatttcattatggagctgaaggatttggatgttcgcttacctcggactttaaaatacttcacatgatttgccacagcctctgcaacactttcatctgggcagattttcactccattaggaaacagaatagatctccgccttctgattaaccactgtctttcagtttctctgcggtccagaggctgtttctttttggtagctagagaaaggtctgttgattcttcaggcaggagaaaagaaactgcactcttgggttcttggatctcctctatagataagtaggtttgtgctacagagtgaaagtatagtcaagtcttcgataatgaagatacagtacaaaaggtaacaactaaagaaaaactgacacttgggctacattaagatagagaagccagtgcccaaatcat

SEQ ID NO: 31495 - DNA, 1261 bp, Homo sapiens
cattttacaatcacttcatcatctaatttcaccttgtttactaacatcacatccatattatggctttttattggttcttgagcagtaaaaagcaaagtttgggaatccttcaaatgtctaagggacatactaaggtcaattaagcaatttagtaaatatatgagaaacagaattgacttacataaaaagtatgagatcaaagatactgtttaacagacaaataaaatgtgagattttgagaatgccatcattttagatgtgaaaattttatggtgtaccaactagagagcaacctgtgtgaatctgcagaatatctaaactataaaatatagaaacattatatttgtatatataataactattaataaataggcaagcaggtgagtatactttggtaaagctattttgtgggtatacttaggcatttactgtaatgaagaagtaaaaattaaaattaatgtagcccaaaacataaactggtatttttgaagtgcttaaaaagatttaagacatttcctctctgaatatgttgttgaaattaatgaaagacatcttattgtgactgccctcatgtgaaaaaagtttcttacataacgcaccaaaagctacaaactcaaatcatgaaagcgttcttcctttggttcaaagtgcatgtcattattaaatgatattattgccttaactggagggcactggaaaaaaaacaaacctcctctcttaatgtaaactgttctctgaagttaccattaacactatattcttagcagtagaaaggtagttttggctcagtcctgtctaaattatcrtaaattttgatttacaatgttacctaacaaatgattaaactatgtttgaatttcattatggagctgaaggatttggatgttcgcttacctcggactttaaaatacttcacatgatttgccacagcctctgcaacactttcatctgggcagattttcactccattaggaaacagaatagatctccgccttctgattaaccactgtctttcagtttctctgcggtccagaggctgtttctttttggtagctagagaaaggtctgttgattcttcaggcaggagaaaagaaactgcactcttgggttcttggatctcctctatagataagtaggtttgtgctacagagtgaaagtatagtcaagtcttcgataatgaagatacagtacaaaaggtaacaactaaagaaaaactgacacttgggctacattaagatagagaagccagtgcccaaatcat

SEQ ID NO: 31496 - DNA, 542 bp, Homo sapiens
taagaaaaatacatgcagaagcaggcaactgcaacagacacagacatgaaccactcggatctaccttcaggaacagactctggcccagctgcaggagtgtggtgagctgactgcctctaactgcttcctcctttaggtgtgcctcgcttttaaactggggtcatgctcctttcagggagaccccagtgaatgatagcaaaactgtagtacaagggtctagctatttccggtgaatgtgggactcctctaataggcactttttgtcctgaagctccctactgggctagcaaagacttttcttgtgtctgtatcagggtccaatggctccccttttccaattttgcttccacttttttcctttcrcaagcatttctctccaataaacctttggccctcctaactccctctctgtgtctgattcctggaggactcaactgacacaacagttctctacttgtatgaagaattctccctgtaagaggattacgctatattctaggaaagtcaaagaagaaagaaacttgcccaagtgaccccaggat

SEQ ID NO: 31497 - DNA, 614 bp, Homo sapiens
agaagctacttaaagaactgtgggagtcaagtaaaaaggtccactgagaaaagaattagagattccaactgacagaatctgccagaagctcccagggaataatggtggcgagttccatcaccagcattattatagtgcttcaaaagaaatatttttgatgaacttaaaagacaacaaatttatttaaatggtgcactaaactgtagtgaacagagacatgcacgattcaagaataaaactcggcygggcacggtggacggtgcctcacatctgtaatcccagcactttgggaggccgaggcgggcggatcacttgaggtcaggagtttgagaccagcctggccaacatggtgaaaccccgtctctactaaaaatacaaaaaattagccaggcatggtggcgggcacctgtaatcccagctactcgggaggccgaggcaggagaattgcgtgaacctgggaggcggaggttgcagtgagctgagatcgcgccactgcactcaagcctgggcaacacctgggtgacagagcgagaccccatctcaaaaaaaaaataaaactagttcaagtgcaatgacacacgcctataatcccagcaccttgggaggctaagaca

SEQ ID NO: 31498 - DNA, 614 bp, Homo sapiens
agaagctacttaaagaactgtgggagtcaagtaaaaaggtccactgagaaaagaattagagattccaactgacagaatctgccagaagctcccagggaataatggtggcgagttccatcaccagcattattatagtgcttcaaaagaaatatttttgatgaacttaaaagacaacaaatttatttaaatggtgcactaaactgtagtgaacagagacatgcacgattcaagaataaaactcggctgggcacggtggacggtgcctcacatctgtaatcccagcactttgggaggccgaggcgggcggatcacttgaggtcaggagtttgagaccagcctggccaacatggtgaaaccccgtctctactaaaaatacaaaaaattagccaggcatggtggcgggcacctgtaatcccagctactcgggaggccgaggcaggagaattgcgtgaacctgggaggcggaggttgcagtgagctgagatcgcgccactgcactcaagcctgggcaacacctgggtgacagagcragaccccatctcaaaaaaaaaataaaactagttcaagtgcaatgacacacgcctataatcccagcaccttgggaggctaagaca

SEQ ID NO: 31499 - DNA, 614 bp, Homo sapiens
agaagctacttaaagaactgtgggagtcaagtaaaaaggtccactgagaaaagaattagagattccaactgacagaatctgccagaagctcccagggaataatggtggcgagttccatcaccagcattattatagtgcttcaaaagaaatatttttgatgaacttaaaagacaacaaatttatttaaatggtgcactaaactgtagtgaacagagacatgcacgattcaagaataaaactcggctgggcacggtggacggtgcctcacatctgtaatcccagcactttgggaggccgaggcgggcggatcacttgaggtcaggagtttgagaccagcctggccaacatggtgaaaccccgtctctactaaaaatacaaaaaattagccaggcatggtggcgggcacctgtaatcccagctactcgggaggccgaggcaggagaattgcgtgaacctgggaggcggaggttgcagtgagctgagatcgcgccactgcactcaagcctgggcaacacctgggtgacagagcgagaccccatctcaaaaaaaaaataaaactagktcaagtgcaatgacacacgcctataatcccagcaccttgggaggctaagaca

SEQ ID NO: 31500 - DNA, 763 bp, Homo sapiens
cagagtcctgtgatgtgaaccatctatgggtctctcagccatggctaccagtgcctgttcggtggaggtggcagagggtacaatggagctttggtgggttaatggtctattttttttgctggttggcctcctgccaggaggtggtcctttccagaaagcatcagctgtggtaatatggggaggaaccagcagtgggcggggccctagaactcccaagatttatttgccctttgtcttcctgtcttttgcatagggaaggaccatcaggtgggggtggagctaggcgtgtctgagctcagactctccttgggcgggtcttgctgcggctgctgtagggaatgtgggtgagattcccaggtcactggagtcgtgtacctaggagagttatggctgcctctgctgagtcatgcaggttgtcagggaagtgggggaaagctggcagtcacaggcctcacccagctcccacacaaacccaagggccggtcttactcccaccgtgttcccccacaactgccccgagtctgtttccaggcagagggtgagactggcttgaaaatttgccccaaggctgtgcccctcccagcagcgaaagaaaagggctgtagttcttcccccacctgtgaagtctgcatgctggattcgtgcagttgcccaagttctggccaggaggcttctcaccctgtttaaattgttacgaagttcractagagaattcttctccctgtggagttttatcccttgctcctctggccaccctcccgat

SEQ ID NO: 31501 - DNA, 615 bp, Homo sapiens
tacctctaatctcaatttaaattggggaaatcatacttttcttttactttttttttttttttttttgaaatagagtctccctctgttgctcaggctggagtgcagtgggactacaggcgtgtgccaccatgtccagctaattttttttgtatttttagtagagacaaggtttcaccatgttggccagactggtctcaaactctagacctcaggtgatctgccaaattcagcctcccaaagtgttgggattacaggcgtaagccacctcacctggccatatttttctttttctattttcaattttaaaaaatgtattattaagtagagacaggacctcaccatattgtccaggctggtctccagctcctgggctcagacaatcttccrgcctctgcctaccaaagtcctggaataacagacggcagacatgagccattgaacttgccccatatttttcaaaagtgaaattttgcaggcacctgtagtcccagctactcagaaggctgaggtgggaagatcccttgagcccaggagttcaaatccagcctgacaacacagcaaaatcccatctcaaaaagaaaaaaaaaggccgggtgcggtacggtggctcatgcc

SEQ ID NO: 31502 - DNA, 594 bp, Homo sapiens
tttaggaattgtgttgatacagcttgcactaaaattcaatcagctttttattagaaatgatattaacacacgtaagttcatagcttactactgattacagtaagttcatagcttactattgattacatttacaagaacaataatacaaacagaattcgttgatgtaaaataaatttgctagcaaaaaatttaaatctataattgtgagtcaatgactggaaatgactttacaaatctattacaaatattaaatattttgttacactgaagaaatatgtttcctaaaaaagcatttcattaaacatatgaggtctgattatgcacacattgtggaatttcatgtgtacaaaattgtatgtttccacactggtttaggaaataatattaaaaawttttttaattgaaagaataatttgtttttcctttttttctccttgaaagttatctgtttaaaaagtaatttatcttaatatttcagttatagaaccaaagtattatgctttgcagacttgaaatttcctctgcacagtggtgcgatttctgggcaattgatgtataaaaaatactatttactagacattgtatgaaatagca

SEQ ID NO: 31503 - DNA, 648 bp, Homo sapiens
gagatagattttatccgaggtctttgatttatgtgttttgaaaacatctctaagactattcttgaagagaaggacaagacaaaaacatgttaaaatcttcaagtgggtttcatagttcaaaatcaaaggcactccacacaattacaaagaggaaaatcggaaaatcacagagatatatcaagctagagtggcttaattaaaatgataaaaatatgaaaactttctttttttatattcttagttttaagaaatgtattggtctcatggctgccaaacatgtggtcacatgatcactcatgttttgtcaataatactacgcaatttgagaagctgttaatatccacagctatccactctcctttgaatcctcaattcttcttcccaatattttttatcacaattaagtatctaactctttattcacccattttttacatctatcttaatttaccaaataattttcttttcagagataaattgacatagctatttcctttcattttaagaatatttggcctcaatatggtgatatattcagttyaaaaaacctagaaaaattttctattaaattcaagagatctgcatttactttctttagaaccatcaatgtttaacatttcatgaggatgatgggttcacacagtttta

SEQ ID NO: 31504 - DNA, 597 bp, Homo sapiens
tgggattataggcatgagccaccgcacccggccaagttatttcttaaataacttgcccttatttcacttttctttttcttctagtttagaagattaaagttcccatttacttatgaatcttgttcaaggtttgccttctctgtgaaatcttcttatttatcaaaatatgaaattagacatgtcccaattaatcttcgactttactgctattataacatttttcatgattgatttgaatgcttgcttacaagtttatcttctgtattagtatttgaaattctttggaaaaggggttgagtcatcagtgttgaagttatttcttaaataactgcataattcttaatagtgatccctttcaaatcccaaaagtgtttcaatatggatgataaattatacggcaattctaagtataaatggtaacagtaacagctaatattcattgagtacctatgtacaggggactattataagagttttgyatgtattaagttctccctttttacgtccgacagtttatgtagatactaatattctcactttacgtatgagaaaacggagccactgagagattgagtgactttcccaagactatacagc

SEQ ID NO: 31505 - DNA, 1122 bp, Homo sapiens
ggccacagggtgcctagatcagctctcgtgggtctgtagcttactaggtgaagatcatgggacttctcagycttcataattgtgtaagttaatttcttatataaatctttttctgtctttgtacaaatatgtctatttttcttgtttctctggagaaccctgaccaccacacccccttacaggtcacagctgtattattgttctcattccacatttgattgtgtgtcagtcactttgatttctgtccatctttttgctccatttataagaattatttgagagtcatcataaatggaaactaattgtaacgaaaagaaaaagttttgaaatctcaggtaaatttattaatttatgtaaacttagaacactgccagagatatgccaataaataagtttgcttttaaaattattattatttttgttacctttgtaccattgcaagcacaatgttttgcaaagacaaggtattcaatacatatttgttaaataaatgagaaacaatttgaggacctaattattactggggcacgtttcctttcatttagttaaaatctccgccatcatctctgtaatatagggaaaaaagcctttatatggtagtatctttaagtttacaaaactcacattattcattccctaaaaatagtcttcagttgcagtttgcctcttgccacatttagataggtttcccacatcacacaatgttatagcaactttgtggcttcctattttcattgtacagacttcccaatgattttggaatccaaatcttatgtcaatattttcatacatgagtatggatagaacatatcatttcaatagagattaagaataattcagtggagaaaaacttggcttaggagtcagaaagtggagtatgtgtgtttgagtcccaattccacaactttctaattatgttgttaacctgaaaaacaggaatgacaacatctgctccatgggctgattgtgagggaagaatgggttagttatgaaaaaaagactttgttaactgtaaagcattgtattaatataaatattaataattcaaatatccatgtaattttctgaaatacatgtagaatatgttgcattaaacatcaaagttattcataacaactgcta

SEQ ID NO: 31506 - DNA, 1122 bp, Homo sapiens
ggccacagggtgcctagatcagctctcgtgggtctgtagcttactaggtgaagatcatgggacttctcagtcttcataattgtgtaagttaatttcttatataaatctttttctgtctttgtacaaatatgtctatttttcttgtttctctggagaaccctgaccaccacacccccttacaggtcacagctgtattattgttctcattccacatttgattgtgtgtcagtcactttgatttctgtccatctttttgctccatttataagaattatttgagagtcatcataaatggaaactaattgtaacgaaaagaaaaagttttgaaatctcaggtaaatttattaatttatgtaaacttagaacactgccagagatatgccaataaataagtttgcttttaaaattattattatttttgttacctttgtaccattgcaagcacaatgttttgcaaagacaaggtattcaatacatatttgttaaataaatgagaaacaatttgaggacctaattattactggggcacgtttcctttcatttagttaaaatctccgccatcatctctgtaatatagggaaaaaagcctttatatggtagtatctttaagtttacaaaactcacattattcattccctaaaaatagtcttcarttgcagtttgcctcttgccacatttagataggtttcccacatcacacaatgttatagcaactttgtggcttcctattttcattgtacagacttcccaatgattttggaatccaaatcttatgtcaatattttcatacatgagtatggatagaacatatcatttcaatagagattaagaataattcagtggagaaaaacttggcttaggagtcagaaagtggagtatgtgtgtttgagtcccaattccacaactttctaattatgttgttaacctgaaaaacaggaatgacaacatctgctccatgggctgattgtgagggaagaatgggttagttatgaaaaaaagactttgttaactgtaaagcattgtattaatataaatattaataattcaaatatccatgtaattttctgaaatacatgtagaatatgttgcattaaacatcaaagttattcataacaactgcta

SEQ ID NO: 31507 - DNA, 941 bp, Homo sapiens
tggcttgaataatcagatataaaataatacttttctgatacagctaagaaaatgcattcattgattatttaatgaggtaggtatcttaaattctattagatatgagaactgagatcatgtatttcaacatgacttacctgtttgtttgactttcaaaaaagccttrcctggaaggataagactgtaaaacaataaagaactcattgtttgcttcaggaaaataaaaaaaaaaaaaatttatctaggcaaacaatttgctcacctgggcatatagctctcctctcaacacatggctcaactgggcaaaaagctcacttatcagacaatagtttgcttctcaagacttctctcaagacctccattctgttgtgttcaccaattctaaactatcgtctcatactttttatccaattttattttattttattttattttactttattttattttattttattttattttattttattttattttattttgagatagtgtctcgctctgtcgcccaggctggagtgcagtggcatgatctcggctcactgcaacctccgcctcctaggttctttcctgacctcaggtgacccgcctgcctcagcctcccaaagtgctgggattacaggcgtgagccaccgcacccagccctttgcccaattttagtcagttccttgctttaaagaattacctcaaatacccttacatcattttcccctttgtgacactgttgagacaccaccgaactttgttctcccttgctgcaattggccttataaactcttactttgcgtgatcaatgggtttctctggtagtctttgcaagaaagtcaaccattaatagatacgctgatttcatgacatgtttattttaatttttttattttcttgtaactttatcgtcacagaatgtggcatatttattttttaaaagggagaggctcagc

SEQ ID NO: 31508 - DNA, 941 bp, Homo sapiens
tggcttgaataatcagatataaaataatacttttctgatacagctaagaaaatgcattcattgattatttaatgaggtaggtatcttaaattctattagatatgagaactgagatcatgtatttcaacatgacttacctgtttgtttgactttcaaaaaagccttgcctgraaggataagactgtaaaacaataaagaactcattgtttgcttcaggaaaataaaaaaaaaaaaaatttatctaggcaaacaatttgctcacctgggcatatagctctcctctcaacacatggctcaactgggcaaaaagctcacttatcagacaatagtttgcttctcaagacttctctcaagacctccattctgttgtgttcaccaattctaaactatcgtctcatactttttatccaattttattttattttattttattttactttattttattttattttattttattttattttattttattttattttgagatagtgtctcgctctgtcgcccaggctggagtgcagtggcatgatctcggctcactgcaacctccgcctcctaggttctttcctgacctcaggtgacccgcctgcctcagcctcccaaagtgctgggattacaggcgtgagccaccgcacccagccctttgcccaattttagtcagttccttgctttaaagaattacctcaaatacccttacatcattttcccctttgtgacactgttgagacaccaccgaactttgttctcccttgctgcaattggccttataaactcttactttgcgtgatcaatgggtttctctggtagtctttgcaagaaagtcaaccattaatagatacgctgatttcatgacatgtttattttaatttttttattttcttgtaactttatcgtcacagaatgtggcatatttattttttaaaagggagaggctcagc

SEQ ID NO: 31509 - DNA, 941 bp, Homo sapiens
tggcttgaataatcagatataaaataatacttttctgatacagctaagaaaatgcattcattgattatttaatgaggtaggtatcttaaattctattagatatgagaactgagatcatgtatttcaacatgacttacctgtttgtttgactttcaaaaaagccttgcctggaaggataagactgtaaaacaataaagaactcattgtttgcttcaggaaaataaaaaaaaaaamaatttatctaggcaaacaatttgctcacctgggcatatagctctcctctcaacacatggctcaactgggcaaaaagctcacttatcagacaatagtttgcttctcaagacttctctcaagacctccattctgttgtgttcaccaattctaaactatcgtctcatactttttatccaattttattttattttattttattttactttattttattttattttattttattttattttattttattttattttgagatagtgtctcgctctgtcgcccaggctggagtgcagtggcatgatctcggctcactgcaacctccgcctcctaggttctttcctgacctcaggtgacccgcctgcctcagcctcccaaagtgctgggattacaggcgtgagccaccgcacccagccctttgcccaattttagtcagttccttgctttaaagaattacctcaaatacccttacatcattttcccctttgtgacactgttgagacaccaccgaactttgttctcccttgctgcaattggccttataaactcttactttgcgtgatcaatgggtttctctggtagtctttgcaagaaagtcaaccattaatagatacgctgatttcatgacatgtttattttaatttttttattttcttgtaactttatcgtcacagaatgtggcatatttattttttaaaagggagaggctcagc

SEQ ID NO: 31510 - DNA, 532 bp, Homo sapiens
caaaaataaatgtgttgtgctctttgaccctaaccaacctctttttccagtttgagttgggggctggaaagtcaggccaaggaggtgctttgctgctccatgctgagggcaatggctagtcacagacccagacattggtgggtatttcatttcagcacctctactcacttgctgtgtggccttggggagatgacctaacccctgtgagcccaagtttccttagggggtgttttgggcttaattatgtcaccccgcaattcatatgttcaagccctaagtcacagtaatgtgactgtatctggagtcagggtctttgaagaggtgatttagttaaaatgaggccattagggtgggccctcatccagcatgacgtgggtcctcataagaagaggagattagaggccgggcgcggtggctsacgcctgtaatcccagcactttgggaggctgaggtgggtggaccacgaggtcaggagttcgagaccagcctggccaacagagtgaaaccccgtctctactaaaaatacaaaaat

SEQ ID NO: 31511 - DNA, 1261 bp, Homo sapiens
ttcaatcacattaaaagttacataaagagggtctttatgtgtttctattatatagacattaaagtcatctttaaaaaaaattcccactcaagtggatggaaaaagtcatcttacttaaaaccacggagaaatgctcattatttaatattaagtcagaaagtagaatataaaactaaatatacagagtgattccaattttatttaaagataactaatgcaaagagaaaaggccagatggaaatataccatattgtttatgaatataattttagcctagtgggagtatgtgttgtttaaacatttaaaaaatgctttcctacatttaatgaatttttaataatagatatattttatttattatatacatttatcataagaaaaaagatatctttttttttcctttttgtgcagaacaaagtcttgctatattccccaggtgggtctggcttaagctatcctcctgcttctgcctctgtaaatgctgggattacaggcrtgagccaccacgcccagcagaaaaaaaggtattttaaaggcttctatgccagtttttaatctgtaataatgaatattattaatagtgtttttgtatagccctcagcaattctgtatcatgcagaaatggcctacaaaatgtacagttgactagacaattcaagaattcacttttctaatctttcattcatccccagagcaaaaggcaaaatgtattactcaggaggctgaggtgggaggatcgcttaagccaagtaggtggagattgcaatgagctgagatggtgccactgcactccagcctgggtgacagagaccatgtctcaaaaaaaaaggttgtggggggatgtaaagaatgattccctatgatattattccttcttattctcagtaaccatttgagcgaaacttggaataactcgctctttcctgataaactaatttagcacataaatgtactttggtaaatatagaaacttaaagatgcagctgggggtggtgttcatttagttaataccatggaactaccaaatggtataatcttggaaaaaatcgtgggttgagatatcattgtctgtgttgcagtattttaaactaggacaaaaatagaagtcctacagtttctatttcttcaaacagttactcgctggaagtggtgggaatcataaaaaacaaccaggaccttgcatcctagtatagaagccacaactgtggaagcttaacagccaggcaaatgcccacaaaccaccaccctctgcattggatgc

SEQ ID NO: 31512 - DNA, 2180 bp, Homo sapiens
taaatgtactataggagcataaatcctgatttatttattttaatttacaaatacatcaatctgattaatggagtcatttttctgtcctrtcacattaaattacatccatagtcaaacacctaaagtaaattataggcttattcagggaacatcctgtcaagaaactatttggcacactgtaaacagccaataaatattgaaaatagtaaacatgtattctatcaaggcatatatagtgtagattttcacatacttgtaaattcttcagttgaaacgttaacagtccagtttgtccctcatccaatacacttgagagtttcttctccttccattaattgaaatgcattctggagagagaagctgattaatattaatcaagcttactatgaaagcaaagccatgctattgccatatgataattttagaatcaagaatcaatgcattccttgtttcctcaattcatgctgacatttaatttttatctatttatttttatttattgattgatttttttaattttattattaatatactttaagttttagggtacatgtgcacatttaattgcatgtcctaatgtagaaatattcacttgtcgagaagaatcggggagaatggggctgaagtgcctcctttacatattctgggaaggcttcctaaatgctaattcatactgaatgggaggaagaggattcccctctactaggcactgggtctatacagtggagaaaagaggtacagttcctgtcctcaagaagtttataatctattagaaagaaggtcaaaatcagaatatacagcagagaaaacaggtatagttcctgtcctcaagaagtgtataatctattagaaagattaaaatcagaagtgcaaggaagtattataaatgctgagatagaaaaaatgaaaaaaaagaaagaacttgtcatttcaaagttagttctaagggtgaacggctgggaaacgttctactcttgtgcttgagcacatcagctccctgctgtaaaaggcacctgaaagtcttatctttctgtgcgagatgtaggaaatgttatgaaaaactgaatgaaggaaaaggccccaggccaacttgaggctgattcatgatcaaagcattgtttgcagtaggctagtccctaaccatcaggtatagactcaaatgccagatagcaaatgccagaatgtagcttcctgctgggtgccacccatgggcacacctacatacacgggatatgctgcctcacactagagatatttctttcactttggtgttcattcaacagccttagaaatactcaagggcttagaaccctgactcaccagtaccacagtccccttttccccacccaggtctccaaagagatatgtgtgttctgcgtaaataggattcttggagatatgtcccaaaatcccaaattatctgagttcaaggagctaaagagctcccttctcactatcatcttcctgcagcctccccagcccccactcagcaatggccattcctaggtgaggatgggatctctggcaaggattatgtctcctatttctttttggggatcctccacagttcctgccataacaccttacaggttagttcattaaatgattgataatgatgatggtggtaacaacaaatgcaagaactcctcaaaagtgactagaatggtagaatcccaagattttaccatgagccaaaagttctgtgaaaaatctggttggatagcacaattaaagacattctatgcatttatattctcattctctcttcccccagtatcttaacagagtgttgactgacatctgtgttctttactagtgcacccaggaagaaatgcagaggctcctgttggtgctaaataaggcatcttatttgcttaacacaagtcaccatatggagcaggttctacctgagtcctgcctgggtgaagtgaaattatcatgagaccttatgtccaatttattctgagccctggcgtagtaagcaatgtcccgaggtgctgccacagatgctgggcctgtgttagtagaaccaggcatgggggccctaacctgtgtccagtaaacagagggaggtctttgatctcactgggagggtgcagttttgttgcttgcaccccattctggacccataaagcttatatttgttacaagagcatttatttggaaaattaatagacaaa

SEQ ID NO: 31513 - DNA, 2180 bp, Homo sapiens
taaatgtactataggagcataaatcctgatttatttattttaatttacaaatacatcaatctgattaatggagtcatttttctgtcctgtcacattaaattacatccatagycaaacacctaaagtaaattataggcttattcagggaacatcctgtcaagaaactatttggcacactgtaaacagccaataaatattgaaaatagtaaacatgtattctatcaaggcatatatagtgtagattttcacatacttgtaaattcttcagttgaaacgttaacagtccagtttgtccctcatccaatacacttgagagtttcttctccttccattaattgaaatgcattctggagagagaagctgattaatattaatcaagcttactatgaaagcaaagccatgctattgccatatgataattttagaatcaagaatcaatgcattccttgtttcctcaattcatgctgacatttaatttttatctatttatttttatttattgattgatttttttaattttattattaatatactttaagttttagggtacatgtgcacatttaattgcatgtcctaatgtagaaatattcacttgtcgagaagaatcggggagaatggggctgaagtgcctcctttacatattctgggaaggcttcctaaatgctaattcatactgaatgggaggaagaggattcccctctactaggcactgggtctatacagtggagaaaagaggtacagttcctgtcctcaagaagtttataatctattagaaagaaggtcaaaatcagaatatacagcagagaaaacaggtatagttcctgtcctcaagaagtgtataatctattagaaagattaaaatcagaagtgcaaggaagtattataaatgctgagatagaaaaaatgaaaaaaaagaaagaacttgtcatttcaaagttagttctaagggtgaacggctgggaaacgttctactcttgtgcttgagcacatcagctccctgctgtaaaaggcacctgaaagtcttatctttctgtgcgagatgtaggaaatgttatgaaaaactgaatgaaggaaaaggccccaggccaacttgaggctgattcatgatcaaagcattgtttgcagtaggctagtccctaaccatcaggtatagactcaaatgccagatagcaaatgccagaatgtagcttcctgctgggtgccacccatgggcacacctacatacacgggatatgctgcctcacactagagatatttctttcactttggtgttcattcaacagccttagaaatactcaagggcttagaaccctgactcaccagtaccacagtccccttttccccacccaggtctccaaagagatatgtgtgttctgcgtaaataggattcttggagatatgtcccaaaatcccaaattatctgagttcaaggagctaaagagctcccttctcactatcatcttcctgcagcctccccagcccccactcagcaatggccattcctaggtgaggatgggatctctggcaaggattatgtctcctatttctttttggggatcctccacagttcctgccataacaccttacaggttagttcattaaatgattgataatgatgatggtggtaacaacaaatgcaagaactcctcaaaagtgactagaatggtagaatcccaagattttaccatgagccaaaagttctgtgaaaaatctggttggatagcacaattaaagacattctatgcatttatattctcattctctcttcccccagtatcttaacagagtgttgactgacatctgtgttctttactagtgcacccaggaagaaatgcagaggctcctgttggtgctaaataaggcatcttatttgcttaacacaagtcaccatatggagcaggttctacctgagtcctgcctgggtgaagtgaaattatcatgagaccttatgtccaatttattctgagccctggcgtagtaagcaatgtcccgaggtgctgccacagatgctgggcctgtgttagtagaaccaggcatgggggccctaacctgtgtccagtaaacagagggaggtctttgatctcactgggagggtgcagttttgttgcttgcaccccattctggacccataaagcttatatttgttacaagagcatttatttggaaaattaatagacaaa

SEQ ID NO: 31514 - DNA, 2180 bp, Homo sapiens
taaatgtactataggagcataaatcctgatttatttattttaatttacaaatacatcaatctgattaatggagtcatttttctgtcctgtcacattaaattacatccatagtcaaacmcctaaagtaaattataggcttattcagggaacatcctgtcaagaaactatttggcacactgtaaacagccaataaatattgaaaatagtaaacatgtattctatcaaggcatatatagtgtagattttcacatacttgtaaattcttcagttgaaacgttaacagtccagtttgtccctcatccaatacacttgagagtttcttctccttccattaattgaaatgcattctggagagagaagctgattaatattaatcaagcttactatgaaagcaaagccatgctattgccatatgataattttagaatcaagaatcaatgcattccttgtttcctcaattcatgctgacatttaatttttatctatttatttttatttattgattgatttttttaattttattattaatatactttaagttttagggtacatgtgcacatttaattgcatgtcctaatgtagaaatattcacttgtcgagaagaatcggggagaatggggctgaagtgcctcctttacatattctgggaaggcttcctaaatgctaattcatactgaatgggaggaagaggattcccctctactaggcactgggtctatacagtggagaaaagaggtacagttcctgtcctcaagaagtttataatctattagaaagaaggtcaaaatcagaatatacagcagagaaaacaggtatagttcctgtcctcaagaagtgtataatctattagaaagattaaaatcagaagtgcaaggaagtattataaatgctgagatagaaaaaatgaaaaaaaagaaagaacttgtcatttcaaagttagttctaagggtgaacggctgggaaacgttctactcttgtgcttgagcacatcagctccctgctgtaaaaggcacctgaaagtcttatctttctgtgcgagatgtaggaaatgttatgaaaaactgaatgaaggaaaaggccccaggccaacttgaggctgattcatgatcaaagcattgtttgcagtaggctagtccctaaccatcaggtatagactcaaatgccagatagcaaatgccagaatgtagcttcctgctgggtgccacccatgggcacacctacatacacgggatatgctgcctcacactagagatatttctttcactttggtgttcattcaacagccttagaaatactcaagggcttagaaccctgactcaccagtaccacagtccccttttccccacccaggtctccaaagagatatgtgtgttctgcgtaaataggattcttggagatatgtcccaaaatcccaaattatctgagttcaaggagctaaagagctcccttctcactatcatcttcctgcagcctccccagcccccactcagcaatggccattcctaggtgaggatgggatctctggcaaggattatgtctcctatttctttttggggatcctccacagttcctgccataacaccttacaggttagttcattaaatgattgataatgatgatggtggtaacaacaaatgcaagaactcctcaaaagtgactagaatggtagaatcccaagattttaccatgagccaaaagttctgtgaaaaatctggttggatagcacaattaaagacattctatgcatttatattctcattctctcttcccccagtatcttaacagagtgttgactgacatctgtgttctttactagtgcacccaggaagaaatgcagaggctcctgttggtgctaaataaggcatcttatttgcttaacacaagtcaccatatggagcaggttctacctgagtcctgcctgggtgaagtgaaattatcatgagaccttatgtccaatttattctgagccctggcgtagtaagcaatgtcccgaggtgctgccacagatgctgggcctgtgttagtagaaccaggcatgggggccctaacctgtgtccagtaaacagagggaggtctttgatctcactgggagggtgcagttttgttgcttgcaccccattctggacccataaagcttatatttgttacaagagcatttatttggaaaattaatagacaaa

SEQ ID NO: 31515 - DNA, 611 bp, Homo sapiens
taaagtctgtatatgatctttaactaaaatatcccttttataacgtgatctgaaatacagcatctaatctctgctgttgttatataggaagtttcctgtattacaaatgagcccatttgtaatagttgggtatttctagttatccttggttatctggttatccttggttattcttccatttttcatccagtgttctggcatggttaattctcttgccatttatcccatcaactattgggtggtaaatcttatgttacacattacttttctctttatgtggctgaatatcaccaagttcttaacttcttgtcatctaacaaggtatccagatctctttctatgctggttgcctttttctacarccactacaatgtgttaacatctatctgaaaatttggagccatccatttaaaaatattgcattttttgaatgatcaagaactacatacataggtacatattttattgaatatataggagtgaaattatataaagaaatgcaatgctaatggtttctctaaatattcttttggatttttacatatacgatcatatcatctgtgagtaataacagtactatcatttttctttcattcttttttttttttttt

SEQ ID NO: 31516 - DNA, 629 bp, Homo sapiens
tgccctcactcttccatgccaggttcccacctgcacaaccacrtaactgccctgacagttcttcaaacagctctattcccctcagcagtctttatttctcaacgaaagcaactgaattcaccaaaagacttaagtggtagggttgtaaaattattaaataggccaggtgcagtggctcacgcctgtaatcccagcattttgggaggccgaggcaggcggatcacctgaggtcaggagttcgagaacagtctggccaacatggcgaagtcatgtctttactgaaaatacaaaaattatccgggcgtgatggcatgagcctgaaatgccagctaatcgggaggctgaggcatgagaatcacttgaacccgggcggcagaggttgcagtgagccaagatcgcaccactgcactccagcctgggcgacagagcgagactccatctcagtattaaaaaaaaaaaattatcaaataaaaatacaagatgtctctcaggcaatgtttggaatatacttattattcttctccggccccgcaagttatttgttgtttatctgaaattcaaatttaactgggcactctgtatttatctggcaaccctaataagaggacctgctggtaccactgccatcc

SEQ ID NO: 31517 - DNA, 1184 bp, Homo sapiens
agggaaaattctcgtccgtaataaatgaggatgagagcaccagcaaattggaaagtccagcctcygtaacatcttatctacatctaggctgtgccgcattatctaatgcggcttatctgtctccctcctttcaagtaaggacctgccctgcattcttgattcccatagctttagcagtaaaagatagaaggatacactcgccacagaggtgactgagttcactattgtttaggaattggctcatttattaaagagatgttgtctcacaccaacagcagataacaatattggctccctgtgaacttgctgaggtattgtgtgttcaagattcaagtaaagataggccagtcccttggccaaacactcagcaatgttaccattgctgacattctcaggatggaggaggtaggcattgccatctggatttcagaggactgctgagacttattaccttttcactagaaagcaattctgtttctacatgaatagggccttgtatttgactctctgaaaattgtcctgcaggccgtttactcattcaatgaacatttattgagcatgagacactatgccagatgctgggaagcactgcagtgaatagaaactctcccttgcacagtgtggtgtgggagaaagatctgtaagcagatagttatctagaatgacagtggtggaataaacacagtgcactgctatggaaagagccacgcagaactgggtccagatcccagctccacagcttaccattgcgtaaccttcaataattatgagtcccaacttcctgatcaatataatgaggacatcttgatagatttgttttgagaaatcagtaaggaaatatatgcataaaagcaagtgctgtgcctgagatgtaggagatatttaacaaaaggaagccactgctgctgctttggacatagggactttggagaaaataagacaaaaaatcactctgccccccaaaacagaacaattactgcttggttcccccaagcagtaatatgtgaacaaggtcttgaaggatattgttccagatatttatttctgtgcgacaaacaaaacttacagccttaaaacactcatcttattttgctcctgatgtgttggtgaggaattcaggaagggctcagatgggttgttcatctctgatccacacagtgtccatggaggcagttgaggctgaa

SEQ ID NO: 31518 - DNA, 1184 bp, Homo sapiens
agggaaaattctcgtccgtaataaatgaggatgagagcaccagcaaattggaaagtccagcctccgtaacatcttatctacatctaggctgtgccgcattatctaatgcggcttatctgtctccctcctttcaagtaaggacctgccctgcattcttgattcccatagctttagcagtaaaagatagaaggatacactcgccacagaggtgactgagttcactattgtttaggaattggctcatttattaaagagatgttgtctcacaccaacagcagataacaatattggctccctgtgaacttgctgaggtattgtgtgttcaagattcaagtaaagataggccagtcccttggccaaacactcagcaatgttaccattgctgacattctcaggatggaggaggtaggcattgccatctggatttcagaggactgctgagacttattaccttttcactagaaagcaattctgtttctacatgaatagggccttgtatttgactctctgaaaattgtcctgcaggccgtttactcattcaatgaacatttattgagcatgagacactatgccagatgctgggaagcactgcagtgaatagaaactctcccttgcacagtgtggtgtgggagaaagatctgtaagcagatagttatctagaatgacagtggtggaataaacacagtgcactgctatggaaagagccacgcagaactgggtccagatcccagctccacagcttaccattgcgtaaccttcaataattatgagtcccaacttcctgatcaatataatgaggacatcttgatagatttgttttgagaaatcagtaaggaaatatatgcataaaagcaagtgctgtgcctgagatgtaggagatatttaacaaaaggaagccactgctgctgctttggacatagggactttggagaaaataagacaaaaaatcactctgccccccaaaacagaacaattactgcttggttcccccaagcagtaatatgtgaacaaggtcttgaaggatattgttccagatatttatttctgtgcgacaaacaaaacttacagccttaaaacactcatcttattttgctcctgatgtgttggtgaggaattcaggaagggctcagatgggttgttcatctytgatccacacagtgtccatggaggcagttgaggctgaa

SEQ ID NO: 31519 - DNA, 585 bp, Homo sapiens
tatggagaaaacaaaccgaaaaaggtaaggataccctgagacacaatgcctttcctagaaatgagagataagagtctttattctgggccagtgcctttcaaaataaaacctaaatagaaaattcatagattatgaaagacatctcagaattaataaaaaataagaatcactagaatgctttcgcttgttttatctctgcaagtctctcaatatttattgcatcatccartactctgaaaattgagagtatgtgttgggtagattaactgtttgtacaaagctcaatggaatgttaaaggaacaaagatcgtgcctacaggtgtggttgatgacataccaccaagaaaatgtagaggttaagaactcaaaattcttgggagcttgtttttgccaaggaatgtgggcgcagtatttggaactgccaagttatgcagctgagaggtctgaggttgacttctagttcagtgtgataataacctcataataaaatcccaggttttatctatgagactcagaatgcttatggataaccaaatgcaagccacttaaggtttccctttacctcttaacaaagtgagctttcat

SEQ ID NO: 31520 - DNA, 585 bp, Homo sapiens
tatggagaaaacaaaccgaaaaaggtaaggataccctgagacacaatgcctttcctagaaatgagagataagagtctttattctgggccagtgcctttcaaaataaaacctaaatagaaaattcatagattatgaaagacatctcagaattaataaaaaataagaatcactagaatgctttcgcttgttttatctctgcaagtctctcaatatttattgcatcatccaatactctgaaaattgagagtatgtgttgggtagattaactgtttgtacaaagctcaatggaatgttaaaggaacaaagatcgtgcctacaggtgtggttgatgacataccaccaagaaaatgtagaggttaagaactcaaaattcttgggagcttgtttttgccaaggaatgtgggcgcagtatttggaactgccaagttatgcagctgagaggtctgaggttgacttctagttcagtgtgataataacctcataataaaatcccargttttatctatgagactcagaatgcttatggataaccaaatgcaagccacttaaggtttccctttacctcttaacaaagtgagctttcat

SEQ ID NO: 31521 - DNA, 989 bp, Homo sapiens
catgatagcaagatataattttatatccagctttcattatactaagttttttaaaagaaatcattttaatgggggaaagaaagatacttccagtgatcatgtcaaaggaaactgcatggcaaagatgaaaaagttgatgaggcttgcctggaatatgaatgctttctgtacctagcaacaaacaaacacaaagaaaagaaaaccaacatcatctaatgtattatttccttttacttaagccacaaaattagaaccatatcgatactgagagtgagtgaaggccagcaagtaaagcccagcaagcaatccctgcttttcctgccataagacctttggcttatccaaagttaaatgctagccatctgtgttagattcccagccatccaaacccactaatattcataaaatatccccagagctggtcaagacagtagaccaaaatcaaaagcttctgccaagtaaaaaagrtatatctgtagacaagtgtgatgctggaaggacataaacttcactgttctttgataaacaaaagtgaatgagtccatcagcctgcaccatgtacttggaggagtctgggatttcgtttttgtgtaggttgtgcctatacgacgtgtagccatctgtcccttccaagcaaaataggagctacttgggtaaacattaatatctacaacaccaaaaaaagtgtttaaaagtgagataacaaaatgtgtgttaaaactggctggtgataatgaaggaattcgaaggggagtgaaaaatacctagtgtgggagctgccagggcagcctgcaacaagccatgggaattggtatgaggtccagtcagaattttgacatcttcactaacaatcttgaaaagcaagtgaatggctcattaataaaatgcacagatgaagtgcaatgatggattggatgtaaaaaagcagagacattagtgatgttagcaaaatgagatgcatcttcgggaaatgctcactcatctattta

SEQ ID NO: 31522 - DNA, 989 bp, Homo sapiens
catgatagcaagatataattttatatccagctttcattatactaagttttttaaaagaaatcattttaatgggggaaagaaagatacttccagtgatcatgtcaaaggaaactgcatggcaaagatgaaaaagttgatgaggcttgcctggaatatgaatgctttctgtacctagcaacaaacaaacacaaagaaaagaaaaccaacatcatctaatgtattatttccttttacttaagccacaaaattagaaccatatcgatactgagagtgagtgaaggccagcaagtaaagcccagcaagcaatccctgcttttcctgccataagacctttggcttatccaaagttaaatgctagccatctgtgttagattcccagccatccaaacccactaatattcataaaatatccccagagctggtcaagacagtagaccaaaatcaaaagcttctgccaagtaaaaaagatatatctgtagacaagtgtgatgctggaaggacataaacttcactgttctttgataaacaaaagtgaatgagtccatcagcctgcamcatgtacttggaggagtctgggatttcgtttttgtgtaggttgtgcctatacgacgtgtagccatctgtcccttccaagcaaaataggagctacttgggtaaacattaatatctacaacaccaaaaaaagtgtttaaaagtgagataacaaaatgtgtgttaaaactggctggtgataatgaaggaattcgaaggggagtgaaaaatacctagtgtgggagctgccagggcagcctgcaacaagccatgggaattggtatgaggtccagtcagaattttgacatcttcactaacaatcttgaaaagcaagtgaatggctcattaataaaatgcacagatgaagtgcaatgatggattggatgtaaaaaagcagagacattagtgatgttagcaaaatgagatgcatcttcgggaaatgctcactcatctattta

SEQ ID NO: 31523 - DNA, 989 bp, Homo sapiens
catgatagcaagatataattttatatccagctttcattatactaagttttttaaaagaaatcattttaatgggggaaagaaagatacttccagtgatcatgtcaaaggaaactgcatggcaaagatgaaaaagttgatgaggcttgcctggaatatgaatgctttctgtacctagcaacaaacaaacacaaagaaaagaaaaccaacatcatctaatgtattatttccttttacttaagccacaaaattagaaccatatcgatactgagagtgagtgaaggccagcaagtaaagcccagcaagcaatccctgcttttcctgccataagacctttggcttatccaaagttaaatgctagccatctgtgttagattcccagccatccaaacccactaatattcataaaatatccccagagctggtcaagacagtagaccaaaatcaaaagcttctgccaagtaaaaaagatatatctgtagacaagtgtgatgctggaaggacataaacttcactgttctttgataaacaaaagtgaatgagtccatcagcctgcaccatgtacttggaggagkctgggatttcgtttttgtgtaggttgtgcctatacgacgtgtagccatctgtcccttccaagcaaaataggagctacttgggtaaacattaatatctacaacaccaaaaaaagtgtttaaaagtgagataacaaaatgtgtgttaaaactggctggtgataatgaaggaattcgaaggggagtgaaaaatacctagtgtgggagctgccagggcagcctgcaacaagccatgggaattggtatgaggtccagtcagaattttgacatcttcactaacaatcttgaaaagcaagtgaatggctcattaataaaatgcacagatgaagtgcaatgatggattggatgtaaaaaagcagagacattagtgatgttagcaaaatgagatgcatcttcgggaaatgctcactcatctattta

SEQ ID NO: 31524 - DNA, 989 bp, Homo sapiens
catgatagcaagatataattttatatccagctttcattatactaagttttttaaaagaaatcattttaatgggggaaagaaagatacttccagtgatcatgtcaaaggaaactgcatggcaaagatgaaaaagttgatgaggcttgcctggaatatgaatgctttctgtacctagcaacaaacaaacacaaagaaaagaaaaccaacatcatctaatgtattatttccttttacttaagccacaaaattagaaccatatcgatactgagagtgagtgaaggccagcaagtaaagcccagcaagcaatccctgcttttcctgccataagacctttggcttatccaaagttaaatgctagccatctgtgttagattcccagccatccaaacccactaatattcataaaatatccccagagctggtcaagacagtagaccaaaatcaaaagcttctgccaagtaaaaaagatatatctgtagacaagtgtgatgctggaaggacataaacttcactgttctttgataaacaaaagtgaatgagtccatcagcctgcaccatgtacttggaggagtctgggatttcgtttttgtgtaggttgtgcctatacracgtgtagccatctgtcccttccaagcaaaataggagctacttgggtaaacattaatatctacaacaccaaaaaaagtgtttaaaagtgagataacaaaatgtgtgttaaaactggctggtgataatgaaggaattcgaaggggagtgaaaaatacctagtgtgggagctgccagggcagcctgcaacaagccatgggaattggtatgaggtccagtcagaattttgacatcttcactaacaatcttgaaaagcaagtgaatggctcattaataaaatgcacagatgaagtgcaatgatggattggatgtaaaaaagcagagacattagtgatgttagcaaaatgagatgcatcttcgggaaatgctcactcatctattta

SEQ ID NO: 31525 - DNA, 989 bp, Homo sapiens
catgatagcaagatataattttatatccagctttcattatactaagttttttaaaagaaatcattttaatgggggaaagaaagatacttccagtgatcatgtcaaaggaaactgcatggcaaagatgaaaaagttgatgaggcttgcctggaatatgaatgctttctgtacctagcaacaaacaaacacaaagaaaagaaaaccaacatcatctaatgtattatttccttttacttaagccacaaaattagaaccatatcgatactgagagtgagtgaaggccagcaagtaaagcccagcaagcaatccctgcttttcctgccataagacctttggcttatccaaagttaaatgctagccatctgtgttagattcccagccatccaaacccactaatattcataaaatatccccagagctggtcaagacagtagaccaaaatcaaaagcttctgccaagtaaaaaagatatatctgtagacaagtgtgatgctggaaggacataaacttcactgttctttgataaacaaaagtgaatgagtccatcagcctgcaccatgtacttggaggagtctgggatttcgtttttgtgtaggttgtgcctatacgacgtgtagccatctgtcccttccaagcaaaataggagctacttgggtaaacattaatatctacaacaccaaaaaaagtgtttaaaagtgagataamaaaatgtgtgttaaaactggctggtgataatgaaggaattcgaaggggagtgaaaaatacctagtgtgggagctgccagggcagcctgcaacaagccatgggaattggtatgaggtccagtcagaattttgacatcttcactaacaatcttgaaaagcaagtgaatggctcattaataaaatgcacagatgaagtgcaatgatggattggatgtaaaaaagcagagacattagtgatgttagcaaaatgagatgcatcttcgggaaatgctcactcatctattta

SEQ ID NO: 31526 - DNA, 990 bp, Homo sapiens
agtccctaaataccgcaggttcactaagaccttcccacgtgcccgaagaagatacacttgcagaggagaaatgatgatgcagaggcctgctccgagatgcaggaggaagtttaatttyctgtgaatttgactgggatggaagggatgaaacgaggtttgaaaggaaatagagattgttaaattcctgactaggcgataactgccgtccttctcttctatctgcccctgtgattaggtgataactgccctccttctcttctatctgcccctgtgactaggcgataactgccctccttctctcctatctgcccctaccttgggccccaaaagactcagcactaaagtgccttaagcaggctccagcccaaaagtggcctccatgggcaccacttcctgctctgctgcgctgcctcgctttcctcctcggccttcccggatggatgacagatgtcattcccaggttccctaacactcaagtctagtccctcagtttctagcaagcatcaagcttcactgtgtgtctagcctctcaggagtcagacctcagaagtaaagcttggtgtaaattcagaggcagggaagaaagaaggaaggaaagaagaccctgagctgagttcatacacatcatcgcaattcatccacaccgcagtcctgtgagttatgtgccattgtactcagaaaactgaggctcaaagagattgagcaacttatctaagacctcacaggtcctgagagcagagcctggatttcaaacacctgggagactctgaaatccatgttaactcttctatacatgagcccaaaatgcagctgtacaccagcaagactgacttcctcttgcggcttatcactagctctgaatacaagaatcctcaaaatgctttataagcaacagtagcatcatgggaataagttgacaagttcccagcattactgctttagatgcacttgaactttttctccatgtatagagtcaagaataaggaaaaa

SEQ ID NO: 31527 - DNA, 527 bp, Homo sapiens
cgtctacttttatggcattattccagaatcaatattaataaaaactaatcgctaagaaacttttgatgtggtttcagcacatcggtaagaattaaaaataggaaaagcatgtctttttttcaaaagaagtgcattgcacagtttctagaaggattcttctttaataatagtctatgaccttaaagtataggttctgtaaatccttcatattttgataatctgaaattatatgttttataatttcaacgtttgagcctcatgatatcccagtgaaggagggcttcttgtcctccttttacggatgggaagacaggctcagaaaagttgaataactarctcaagtccatttgagtagtaagtgattgagccagggctcaaatacagcccaagaaagaagtgatggagctgagtttttttttgtttgttttgttttttgtttttttttgtttttgtttttgttttgttttgtttttgttttttttttttttttttttttttgaaacggagtctcgctctgtcgcccaggc

SEQ ID NO: 31528 - DNA, 527 bp, Homo sapiens
cgtctacttttatggcattattccagaatcaatattaataaaaactaatcgctaagaaacttttgatgtggtttcagcacatcggtaagaattaaaaataggaaaagcatgtctttttttcaaaagaagtgcattgcacagtttctagaaggattcttctttaataatagtctatgaccttaaagtataggttctgtaaatccttcatattttgataatctgaaattatatgttttataatttcaacgtttgagcctcatgatatcccagtgaaggagggcttcttgtcctccttttacggatgggaagacaggctcagaaaagttgaataactaactcaagtccatttgagtagtaagtgattgagccagggctcaaatacagcccaagaaagaagtgatggagctgagtttttttttgtttgttttgttttttgttttkttttgtttttgtttttgttttgttttgtttttgttttttttttttttttttttttttgaaacggagtctcgctctgtcgcccaggc

SEQ ID NO: 31529 - DNA, 527 bp, Homo sapiens
cgtctacttttatggcattattccagaatcaatattaataaaaactaatcgctaagaaacttttgatgtggtttcagcacatcggtaagaattaaaaataggaaaagcatgtctttttttcaaaagaagtgcattgcacagtttctagaaggattcttctttaataatagtctatgaccttaaagtataggttctgtaaatccttcatattttgataatctgaaattatatgttttataatttcaacgtttgagcctcatgatatcccagtgaaggagggcttcttgtcctccttttacggatgggaagacaggctcagaaaagttgaataactaactcaagtccatttgagtagtaagtgattgagccagggctcaaatacagcccaagaaagaagtgatggagctgagtttttttttgtttgttttgttttttgtttttttttgttkttgtttttgttttgttttgtttttgttttttttttttttttttttttttgaaacggagtctcgctctgtcgcccaggc

SEQ ID NO: 31530 - DNA, 527 bp, Homo sapiens
cgtctacttttatggcattattccagaatcaatattaataaaaactaatcgctaagaaacttttgatgtggtttcagcacatcggtaagaattaaaaataggaaaagcatgtctttttttcaaaagaagtgcattgcacagtttctagaaggattcttctttaataatagtctatgaccttaaagtataggttctgtaaatccttcatattttgataatctgaaattatatgttttataatttcaacgtttgagcctcatgatatcccagtgaaggagggcttcttgtcctccttttacggatgggaagacaggctcagaaaagttgaataactaactcaagtccatttgagtagtaagtgattgagccagggctcaaatacagcccaagaaagaagtgatggagctgagtttttttttgtttgttttgttttttgtttttttttgtttttgtttttgttttgttttgtttttgttttttttttttttttttttttttgaracggagtctcgctctgtcgcccaggc

SEQ ID NO: 31531 - DNA, 503 bp, Homo sapiens
tagagaacascaacagtataaatggcccagtactatctaaggtatcactggtctaccgctgcccaggaccaagtctgttttcagtgtggaacgacagcaaaccaatgtaactacagggacaggtgaaggaacaggaagaggctgtttagagactagaaattcctacaagttcctagaagtcaagaccaagccaggatctccagaccaaacacagagttgctactgaaaccaacaaaacacatctcaaaacagtcagtggcctagcctgcctcaaccatgaagcatcctatacttgtcttccctaaactcccttcagtacctctccgcttctaactgctgctgttctggctttgtaaaggtagccctccatttctaaggtgcaggcagttggtatgcagttggcttatagaataagcatggtcatttggataataatctctatcacatgcatcagacaaaattcaaatgatcagcttcatgggatgttgcccatttccacagcc

SEQ ID NO: 31532 - DNA, 509 bp, Homo sapiens
tgaagtataacggggtcccatgcttatggaattcactgctcttaccatgttccctatcttcctgaagaagagaggaggtctccactgctgaatctcttggccttgttcagtgtatcacaggttctggagtcagacaaaccagcctgcagtcttggctctgcacctgttacatgtgtgaccttggagaaggcctgaacacatacctctaaacctgtttatccaacygagaacatcaaaggcttctctgcagtgtcaatccgataaagcatgtaaagtataggacacagtcttgcaattgcagtgtaaaagatggcagcgattctagttactattcactggccttccatattccagcagagtttggactgccaccagtgtgtgcctgtattgaggctcttattgtgttgtgtctacctacatatctcgctttctctttagaacaataaacattgtcaaacgacaatgagtgagactaatgtatcttgtgaacagttacacaggacaataga

SEQ ID NO: 31533 - DNA, 509 bp, Homo sapiens
tgaagtataacggggtcccatgcttatggaattcactgctcttaccatgttccctatcttcctgaagaagagaggaggtctccactgctgaatctcttggccttgttcagtgtatcacaggttctggagtcagacaaaccagcctgcagtcttggctctgcacctgttacatgtgtgaccttggagaaggcctgaacacatacctctaaacctgtttatccaaccgagaacatcaaaggcttctctgcagtgtcaatccgataaagcatgtaaagtataggacacagtcttgcaattgcartgtaaaagatggcagcgattctagttactattcactggccttccatattccagcagagtttggactgccaccagtgtgtgcctgtattgaggctcttattgtgttgtgtctacctacatatctcgctttctctttagaacaataaacattgtcaaacgacaatgagtgagactaatgtatcttgtgaacagttacacaggacaataga

SEQ ID NO: 31534 - DNA, 652 bp, Homo sapiens
ggggcatccgagcaagggatggggtttctgacagtgtcttaagggccaggatctgccaaggcctatgtcccacggtggggttgatgcaatccagggtagagggagccattggtcctcagtgagttctagtcctaggccccactgtacagaccaagtcagaaggaacagtccctcatcctacatgccacatccctccactgaagttgagagcagacccgttttccaaacatgaggtgactcgtggtttgaaatggatgacaaggggccggacattcctaaattggcaggataaaggycattctgtggcatagaatgaggtgtggtttgaatctagaatctccagttaaaaccagtgaaggtggctgggtgcagtggctcatgtctgtcatcccagtactttgggaggctgaggcaggcagataacgaggtcatgattgtgagaccagcctggccaacatggtgaaaccccatctctactaaaaatacaaaaattaactgggtgtggtggtgtgtgcctgtaatcttagctactcaggaggctgggcaggagaattgcttgaacccaaaaagcggagccactgtaaatccagcctggtggacagagcgagactccatctcagaaacaaacaaacaagcaaagccaatgaaggtg

SEQ ID NO: 31535 - DNA, 626 bp, Homo sapiens
tgcctgtaatcccaacactttggaaggccaaggcaggtggatcaagaggtcaggagttcaagaccagcctggccaatatggtgaaactccatctctactaaaaatgaaaaaattagctgggcatggtgatgcatgcgtgtagtcccagctgctcgggaagctgaggcaggagaatcccttgaacctgggaggtggaggttgcagtgagccgagatcacgttgcttcactccagtctgggtgacagagtgagacttcatctcaaaaaaaaaaaaaaaaagaaagaaagaaaatgtaatgtcattgtttcatctgtccctgacttgtgtcrtgtcacaggggcttatgagatgaaccagccagctgaaactccagagcttctgcccaatctgtccccattgcgtgagtcccctctagggagctgtcagtgtgacagggggcatccctgggagtggtgcccatttgcttctatctgacctcagggtagcttcttagggcgagaagatcctagagcagatgggagtctcagagaagaagcctatggcagggttctgggcttgatgggctgtgtatctccctcttccctgccttccacaaggtccagcaccacccattctcccaggtcacc

SEQ ID NO: 31536 - DNA, 1737 bp, Homo sapiens
ggcttgttagacacatagatccagagtctccaccccagccactgactctgaatctgcattttcacaagtttcacaggtgacctgtgtgcacatgaatgctgacaagcactgatgtggagagcatctgaggaatacccaggttcaggtgggctgctgctctgaaaagcaagagtggggagaaacgctggggcaaggaagagcacgtggtgctagagtctggtctctaaggggacggccccagctgtgtgtccagcccagttgctccaattatgtctgtttttttatctagtcgggctgaaaagagtcaktcaaatttgcataaggaggcctgaggtaaaggggcttgcgggcatgggtactcatctgacacctcactaagccatcttggtaaatcatctctagaatgcctgttgttattttgggaaacaccacaaagaggatgataattaaaagtaacaccctgagtgggaatttctacttccctccagtggttggcaagtaaagcatagggaattttttggtcagggaattttttggtcaggtaatatttctatatattttcacaggtcacacaacatcaaagcttgagtgtgttgcagattttttccctttcctctcctggtgctttgggtttgcagctttatgctattgccattttcttgtcttcttcttttttttttttctttccactgagcattttctgattttaatttgacttgcaatgggggagggtatttcttctggatgttacattacatccgaagcgtaaaatggtaaacgaagctgcaggtcattttcaggtgaaaagacaattttatgcttcatggttacgaccatgtaaagcattttcatggcagggtatttttcatcttagatctccatcgggatggcatgcagggatttgctgttcagtagaaagttcacctttcagttacccactgtctgtctgcagcctcctagccttgctgctctcctgcacaggtgcaggggcattcctgttagacccgtttccctcctgggactgccagggccctggtgttgccatattcccctggttttcagggccccttgccatgcatcttatccatccctcacgaccctcattgcctacctgctaggcccattgtctaggacctgagccccttagtaacactcattgatctgccttacacactgtcctcctactcctcctctctgataaaaccccaacttcggttcatcccaccatctgccttctctgcttctgactccaccctgccaagagaggagaaagcccacggaagcaccacctgaggccaccacagtttcacggtctcaagccttccctagattcttgcactctctgacaattttagttgtcctaaatcagctcctctccccactccccctgcaaaaaaaaacctattacttggccccacttccctgcatcacagaggagccttatctttttcacagcttgttgacagctctttcaatatcagtccttttgttatctccctgaggcagcttttaggatgctgggacagattccatggccctgtgctaaagcaaatgaacttgaatctctcaggtggggcccagggttctttttatttaattttattatttttttttagagacaggatcttgctgtatcaaccaggctggagtgcagtggtgtgatcatagctcactgtagcccctaactctctgggctcaagagatcctcctgcctcagcctcctgagcagctggtact

SEQ ID NO: 31537 - DNA, 1737 bp, Homo sapiens
ggcttgttagacacatagatccagagtctccaccccagccactgactctgaatctgcattttcacaagtttcacaggtgacctgtgtgcacatgaatgctgacaagcactgatgtggagagcatctgaggaatacccaggttcaggtgggctgctgctctgaaaagcaagagtggggagaaacgctggggcaaggaagagcacgtggtgctagagtctggtctctaaggggacggccccagctgtgtgtccagcccagttgctccaattatgtctgtttttttatctagtcgggctgaaaagagtcattcaaatttgcataaggaggcctgaggtaaaggggcttgcgggcatgggtactcatctgacacctcactaagccatcttggtaaatcatctctagaatgcctgttgttattttgggaaacaccacaaagaggatgataattaaaagtaacaccctgagtgggaatttctacttccctccagtggttggcaartaaagcatagggaattttttggtcagggaattttttggtcaggtaatatttctatatattttcacaggtcacacaacatcaaagcttgagtgtgttgcagattttttccctttcctctcctggtgctttgggtttgcagctttatgctattgccattttcttgtcttcttcttttttttttttctttccactgagcattttctgattttaatttgacttgcaatgggggagggtatttcttctggatgttacattacatccgaagcgtaaaatggtaaacgaagctgcaggtcattttcaggtgaaaagacaattttatgcttcatggttacgaccatgtaaagcattttcatggcagggtatttttcatcttagatctccatcgggatggcatgcagggatttgctgttcagtagaaagttcacctttcagttacccactgtctgtctgcagcctcctagccttgctgctctcctgcacaggtgcaggggcattcctgttagacccgtttccctcctgggactgccagggccctggtgttgccatattcccctggttttcagggccccttgccatgcatcttatccatccctcacgaccctcattgcctacctgctaggcccattgtctaggacctgagccccttagtaacactcattgatctgccttacacactgtcctcctactcctcctctctgataaaaccccaacttcggttcatcccaccatctgccttctctgcttctgactccaccctgccaagagaggagaaagcccacggaagcaccacctgaggccaccacagtttcacggtctcaagccttccctagattcttgcactctctgacaattttagttgtcctaaatcagctcctctccccactccccctgcaaaaaaaaacctattacttggccccacttccctgcatcacagaggagccttatctttttcacagcttgttgacagctctttcaatatcagtccttttgttatctccctgaggcagcttttaggatgctgggacagattccatggccctgtgctaaagcaaatgaacttgaatctctcaggtggggcccagggttctttttatttaattttattatttttttttagagacaggatcttgctgtatcaaccaggctggagtgcagtggtgtgatcatagctcactgtagcccctaactctctgggctcaagagatcctcctgcctcagcctcctgagcagctggtact

SEQ ID NO: 31538 - DNA, 1737 bp, Homo sapiens
ggcttgttagacacatagatccagagtctccaccccagccactgactctgaatctgcattttcacaagtttcacaggtgacctgtgtgcacatgaatgctgacaagcactgatgtggagagcatctgaggaatacccaggttcaggtgggctgctgctctgaaaagcaagagtggggagaaacgctggggcaaggaagagcacgtggtgctagagtctggtctctaaggggacggccccagctgtgtgtccagcccagttgctccaattatgtctgtttttttatctagtcgggctgaaaagagtcattcaaatttgcataaggaggcctgaggtaaaggggcttgcgggcatgggtactcatctgacacctcactaagccatcttggtaaatcatctctagaatgcctgttgttattttgggaaacaccacaaagaggatgataattaaaagtaacaccctgagtgggaatttctacttccctccagtggttggcaagtaaagcatagggaattttttggtcagggaattttttggtcaggtaatatttctatatattttcacaggtcacacaacatcaaagcttgagtgtgttgcagattttttccctttcctctcctggtgctttgggtttgcagctttatgctattgccattttcttgtcttcttcttttttttttttctttccactgagcattttctgattttaatttgacttgcaatgggggagggtatttcttctggatgttacattacatccgaagcgtaaaatggtaaaygaagctgcaggtcattttcaggtgaaaagacaattttatgcttcatggttacgaccatgtaaagcattttcatggcagggtatttttcatcttagatctccatcgggatggcatgcagggatttgctgttcagtagaaagttcacctttcagttacccactgtctgtctgcagcctcctagccttgctgctctcctgcacaggtgcaggggcattcctgttagacccgtttccctcctgggactgccagggccctggtgttgccatattcccctggttttcagggccccttgccatgcatcttatccatccctcacgaccctcattgcctacctgctaggcccattgtctaggacctgagccccttagtaacactcattgatctgccttacacactgtcctcctactcctcctctctgataaaaccccaacttcggttcatcccaccatctgccttctctgcttctgactccaccctgccaagagaggagaaagcccacggaagcaccacctgaggccaccacagtttcacggtctcaagccttccctagattcttgcactctctgacaattttagttgtcctaaatcagctcctctccccactccccctgcaaaaaaaaacctattacttggccccacttccctgcatcacagaggagccttatctttttcacagcttgttgacagctctttcaatatcagtccttttgttatctccctgaggcagcttttaggatgctgggacagattccatggccctgtgctaaagcaaatgaacttgaatctctcaggtggggcccagggttctttttatttaattttattatttttttttagagacaggatcttgctgtatcaaccaggctggagtgcagtggtgtgatcatagctcactgtagcccctaactctctgggctcaagagatcctcctgcctcagcctcctgagcagctggtact

SEQ ID NO: 31539 - DNA, 1737 bp, Homo sapiens
ggcttgttagacacatagatccagagtctccaccccagccactgactctgaatctgcattttcacaagtttcacaggtgacctgtgtgcacatgaatgctgacaagcactgatgtggagagcatctgaggaatacccaggttcaggtgggctgctgctctgaaaagcaagagtggggagaaacgctggggcaaggaagagcacgtggtgctagagtctggtctctaaggggacggccccagctgtgtgtccagcccagttgctccaattatgtctgtttttttatctagtcgggctgaaaagagtcattcaaatttgcataaggaggcctgaggtaaaggggcttgcgggcatgggtactcatctgacacctcactaagccatcttggtaaatcatctctagaatgcctgttgttattttgggaaacaccacaaagaggatgataattaaaagtaacaccctgagtgggaatttctacttccctccagtggttggcaagtaaagcatagggaattttttggtcagggaattttttggtcaggtaatatttctatatattttcacaggtcacacaacatcaaagcttgagtgtgttgcagattttttccctttcctctcctggtgctttgggtttgcagctttatgctattgccattttcttgtcttcttcttttttttttttctttccactgagcattttctgattttaatttgacttgcaatgggggagggtatttcttctggatgttacattacatccgaagcgtaaaatggtaaacgaagctgcaggtcattttcaggtgaaaaracaattttatgcttcatggttacgaccatgtaaagcattttcatggcagggtatttttcatcttagatctccatcgggatggcatgcagggatttgctgttcagtagaaagttcacctttcagttacccactgtctgtctgcagcctcctagccttgctgctctcctgcacaggtgcaggggcattcctgttagacccgtttccctcctgggactgccagggccctggtgttgccatattcccctggttttcagggccccttgccatgcatcttatccatccctcacgaccctcattgcctacctgctaggcccattgtctaggacctgagccccttagtaacactcattgatctgccttacacactgtcctcctactcctcctctctgataaaaccccaacttcggttcatcccaccatctgccttctctgcttctgactccaccctgccaagagaggagaaagcccacggaagcaccacctgaggccaccacagtttcacggtctcaagccttccctagattcttgcactctctgacaattttagttgtcctaaatcagctcctctccccactccccctgcaaaaaaaaacctattacttggccccacttccctgcatcacagaggagccttatctttttcacagcttgttgacagctctttcaatatcagtccttttgttatctccctgaggcagcttttaggatgctgggacagattccatggccctgtgctaaagcaaatgaacttgaatctctcaggtggggcccagggttctttttatttaattttattatttttttttagagacaggatcttgctgtatcaaccaggctggagtgcagtggtgtgatcatagctcactgtagcccctaactctctgggctcaagagatcctcctgcctcagcctcctgagcagctggtact

SEQ ID NO: 31540 - DNA, 1124 bp, Homo sapiens
gctctgggaacattctgtatgtgtgtgtgcattttactcaagagagagctcctaacttttataatattctcaaaggagttcatgaatcaaaaaaatcatttaaaaaccattgttctctgactgggcacagttgctcatgcctgtaatcccagcactttgggaggctgagaagggccattcacctgagaccagcctggccaaaattatgaaaccccctctctactaaaaatacaattagctgggcgtggtggcgcatgtctgtaatcccatctacttgtggggctgaggcaggagaatagctggaatccgggaagcagaggttgcagtgggcagagatcacgccatgacactccagcctgggcaactgagcaagactccatctcaaaaaaaaaaagaagataaaagagaactctcttcagggctcccatctggttttgcagaatcagagaatgtgatcactgmaagggtttaggggagggtgcaggggaccgaaggggcagggccaaaggctggagggacaatagctcaccctggaatgttttcgtttggtgggatgactcaggaaacaagctgactctgaaaatgacacagaattcagggttattgcttctttgaaaggtgggtggtttgtgtttttttcctcaacattcattcatatacttctaggaagtgccgtttagtttcataaagtttacatatacctggtttcgctgcatctggagagattcaggatagttcttgttaatgagaagtcctagggtggagctacaattcactctccattgtgaaccctgataacttgagacagatctcagtgaattaagaaagtttatttggccaaggttgaggacacatacccatgacacagcctcaggaggttctgaggacgtgtgcctaaggtcatcagagcagtttggttttatacattctaggaacaccagagacatgaatcaatttgtgcaagattaatattggttcggtctgcaaaggcgggacaacttgaagcaaaggcaggaattctcaaagcgaggagggcacttccgggtcataggtaattgagaaactaatggttgcattcttttgagtttctgattagcctctccaaaagaggaaattaaatatgc

SEQ ID NO: 31541 - DNA, 1124 bp, Homo sapiens
gctctgggaacattctgtatgtgtgtgtgcattttactcaagagagagctcctaacttttataatattctcaaaggagttcatgaatcaaaaaaatcatttaaaaaccattgttctctgactgggcacagttgctcatgcctgtaatcccagcactttgggaggctgagaagggccattcacctgagaccagcctggccaaaattatgaaaccccctctctactaaaaatacaattagctgggcgtggtggcgcatgtctgtaatcccatctacttgtggggctgaggcaggagaatagctggaatccgggaagcagaggttgcagtgggcagagatcacgccatgacactccagcctgggcaactgagcaagactccatctcaaaaaaaaaaagaagataaaagagaactctcttcagggctcccatctggttttgcagaatcagagaatgtgatcactgaaagggtttaggggagggtgcaggggaccgaaggggcagggccaaaggctggagggacaatagctcaccctggaatgttttcgtttggtgggatgactcaggaaacaagctgactctgaaaatgacacagaattcagggttattgcttctttgaaaggtgggtggtttgtgtttttttcctcaacattcattcatatacttctaggaagtgccgtttagtttcataaagtttacatatacctggtttcgctgcatctggagagattcaggatagttcttgttaatgagaagtcctagggtggagctacaattcactctccattgtgaaccctgataacttgagacagatctcagtgaattaagaaagtttatttggccaaggttgaggacamatacccatgacacagcctcaggaggttctgaggacgtgtgcctaaggtcatcagagcagtttggttttatacattctaggaacaccagagacatgaatcaatttgtgcaagattaatattggttcggtctgcaaaggcgggacaacttgaagcaaaggcaggaattctcaaagcgaggagggcacttccgggtcataggtaattgagaaactaatggttgcattcttttgagtttctgattagcctctccaaaagaggaaattaaatatgc

SEQ ID NO: 31542 - DNA, 688 bp, Homo sapiens
tttctgggaggcctggggaggcagtgggagggtggtgccaagggaagaggaggccagtgctgggccagaggtccaatgccaccggcagctgccagtgtccctctccagttatgtatccccacaccccctccaggccctgggctgtgtgctctatgcctgtgcaccataccacatataataataagaagaaagaaatatttcaggaattgccaaaatgtgacacagtggcatgaagtgagcacttgccgttggaaaaagtggcactgatagccttgtctcttgcagggttgccacaaactttcaatttgtaaaagaggcaatatctgggaagtgcagtaaaataagatgtgcctgtattaggaagtccagacagaaggggaaggagaatgggttgtcgaacgtgtgggtaccaaatgaagctctggccacagcaggccctgcactggaagatagggtgcctgaaatgacagcagaagagatggtgttaaagagccagttccgctcctgcccagcttagctcccctagcccgcatccaggtcctacgtccagctccttgcttatcccccacccccaccctatccatttctccactcaccaatcccaccacccttccccagcagccccctcacctctgccctctgcccttrcccttactaatccacccctctcattcctccccaggtgagg

SEQ ID NO: 31543 - DNA, 708 bp, Homo sapiens
ggttgagatgccccctcctgtgggaagccttccttttgtagccatcaattactatgacccacctgtttctctgtactcacaggcacatcaatgccaccatacttagctcccattacatttgccctggacacatggttggacatctttctgtctctgtctctgtgtgtgtctcacttcaattactctgtgaactcccaatggccctttgagattcatctctatcaccaacatctggcacaaagtgatgccaagtaaatgtacatgaacaaatggatgaataaatgaatgcatgaggccaggcacagtggctcacacctgtaatcmcaacactttgggaggccaaaggaggaggaccgcttgaggccaggagtttgagactagactggacaatatagtgagatctcatctctacaaaaaacttaaaaatagccaggcatggtggctcacacctgtaatcccagcactttgggaggctaaggtgggtggatcacgaggtcaggagatcaagaccatcctggctaacacggtgaaaccccatctctactaaaaatacaaaaaattagccgggcgtggtggcgggcgtctgtagtcccagctactcgggaggctgaggcaggagaatggcatgaacccaggaggcggagcttgcagtgagctgagatcgtgccactgcactccagactgggagagagagactccgtctcaaaa

SEQ ID NO: 31544 - DNA, 708 bp, Homo sapiens
ggttgagatgccccctcctgtgggaagccttccttttgtagccatcaattactatgacccacctgtttctctgtactcacaggcacatcaatgccaccatacttagctcccattacatttgccctggacacatggttggacatctttctgtctctgtctctgtgtgtgtctcacttcaattactctgtgaactcccaatggccctttgagattcatctctatcaccaacatctggcacaaagtgatgccaagtaaatgtacatgaacaaatggatgaataaatgaatgcatgaggccaggcacagtggctcacacctgtaatcccaacactttgggaggccaaaggaggaggaccgcttgaggccaggagttygagactagactggacaatatagtgagatctcatctctacaaaaaacttaaaaatagccaggcatggtggctcacacctgtaatcccagcactttgggaggctaaggtgggtggatcacgaggtcaggagatcaagaccatcctggctaacacggtgaaaccccatctctactaaaaatacaaaaaattagccgggcgtggtggcgggcgtctgtagtcccagctactcgggaggctgaggcaggagaatggcatgaacccaggaggcggagcttgcagtgagctgagatcgtgccactgcactccagactgggagagagagactccgtctcaaaa

SEQ ID NO: 31545 - DNA, 708 bp, Homo sapiens
ggttgagatgccccctcctgtgggaagccttccttttgtagccatcaattactatgacccacctgtttctctgtactcacaggcacatcaatgccaccatacttagctcccattacatttgccctggacacatggttggacatctttctgtctctgtctctgtgtgtgtctcacttcaattactctgtgaactcccaatggccctttgagattcatctctatcaccaacatctggcacaaagtgatgccaagtaaatgtacatgaacaaatggatgaataaatgaatgcatgaggccaggcacagtggctcacacctgtaatcccaacactttgggaggccaaaggaggaggaccgcttgaggccaggagtttgagactagactggacaatatagtgagatctcatctctacaaaaaacttaaaaatagccaggcatggtggctcacacctgtaatcccagcactttgggaggctaaggtgggtggatcacgaggtcaggagatcaagaccatcctggctaacacggtgaaaccccatctctacyaaaaatacaaaaaattagccgggcgtggtggcgggcgtctgtagtcccagctactcgggaggctgaggcaggagaatggcatgaacccaggaggcggagcttgcagtgagctgagatcgtgccactgcactccagactgggagagagagactccgtctcaaaa

SEQ ID NO: 31546 - DNA, 433 bp, Homo sapiens
tagaattttagataaaagaccagatgaccatagtggagatttgggaattattagaatgttgctctgcccatgcactgtccagggctagtagctctcgaatttaaaatctttacataagatgatgtcaggcatgtagaaaaaacacagataattctccaaaacacagttactaatggtttttatcctgttggaaagaatttagatgtggcattttagctacactaacatggatagattaaaggtatactacataaaagttattatcttaataaacaaacaaggactaggaagtctttgaccakaagccataattcttttacatttctagatttccacctagctgtctagtactgaaagttaaatgttcacaactggagttttggctcagcaattgcttaacttttcattgcaatacctcttcatggatgtaaaa

SEQ ID NO: 31547 - DNA, 301 bp, Homo sapiens
tttatgcatgaagaaggaggaaggaaagagagaaagggaggagagggagaactggagaaagacatttggagaatagaaagccgccacccctggactctgcgtagctttacctaccccctccgatcccctgacccgtggagcaagtgcagccagcctagctgcaagatctctcgctggggtcccatcgccgtcgccaccgccgccgctccgcctcgtagactcagcccgcgcctgattgacagctgggagtccgcgtgcccggcaccctgaggcccgmgcaggcccgctcgccgctgccgcc

SEQ ID NO: 31548 - DNA, 1372 bp, Homo sapiens
tgacaatacaaatatttgcaacatctctgtgtctgcttcttcagttttttgtttctgcaaaggacttagaaataagacaacttaattaagttgtcttatttccttgtggatctatttattttttatcgagtgctggccattatgatttaaaatttacctgtagaaacaactttggcttggggtaattaggatgatataaaatttttcccaaagaagctttacatctcttaccagattcccttattcaaattagagcctatgttttttcttacgtcatatatacaacccttagtttgcaaaactcaaagagcagaaggtgcaaaggctgtttacctctgtgtgtgtttgtttaatcctaggaacagcccatcaggcttccagtctataggaactttattaaggtgacatttgtgagccctaatctacaacttaggttgtagtagcaccatgaaactgtgaaagcctttctcagcctttcagctgagtcttctaatttaataaatatccccaaaatttaaaaaaaaaaaagcctcaaatgttaggatcccttctctaaatttctgtcttctgcaagacattgccttgatatctctctgcctctgttcatccttttcagcagacattgttttacatcttacccagcttttctaattgttgccaataaaagcattattcttatttacctggcctactccagctaacattatttaccttcactgatcaaaaaaaccgtacatttaaaattaaggagttactcacatgtatacaaatttaagacttctcaaataagttctattttttcccccaactaaacagtatactaagttgaagaatacagtcatttgaagagatcttcaaaatcaatgtaaagaaatcaaatagcaaatggcagtagattaggttttkggggtatctcttgtttctcaggctagatgataaaaatagtctaagtaagaaaataaagcctggtggttctgcatcccaatgttccatttatccttttggtaagaacattttacatgcttgttgcttttagcatttaagctgtattatggataacttaggatcttgaatgtcttattctctttgtatagttaaaatacatgttcttctatgggcagccagtaagttcatctgaccctttgcaggagtagagacaaagggttactgagctggtggctgtagtttacgtttataatagctgtcagctctccacgtgtcaccctcagtcatcctaaagatgactgcaaaagatctcagtgcaaaaatattatgctttctatgtaaatgtaactttaaaacaagtcccctagccctcaattttaccacattattattccgaaatctcttaatgataaaattccagagccat

SEQ ID NO: 31549 - DNA, 1169 bp, Homo sapiens
tattatttcctacttatgtatctaggtccttttatggatattacttaatttaggttttaaaatgattctatataacagtcattatttttcttcatttctcaagtaagaatactgaggccaaaatatattattgtcagaagaaataatttataagtaaaacttttttcatttcaactctgatttgactaaattgtattttgtaatcattaagagctaagaggtagaaagtgagtttgagagtaagagcaaaagttagaagagagacaagtaggaaggtttttccctaaatgggtaatttcctgtctttagataaagtaccaaagtaattaacctctcagcagatacagacaattgcaagagttgttaacacagagggcatactgaggcattatatgtaagactcatgatgttttacatccttagaatggagtcaggaaaacttaaaattaagaaaatgaacaatagtaattaaacaaaattgaaatgaaaataaggtcccatttagtggaatgtgaaggactcttgaacacctgcaggtctgttttactagttcatatttcctcagttcttagcacagtgcctaggacttgccggacattaaaatatttgttattgcttcatttttaacaatttttcttcatagagggcattttgtttggttttgttcattaacgtgttcttcagtaacctttgagagatacacgtgtaatacaggaatactaaatactactactamtattaataataaaataataatggaacatatagctttattctatgtgtgcattaactgttgattaagatcctttatgttcaaaatttctgacacttgttaaagcagtaaagaagactttattcgggactattgtgatagctgtctatagcaatagaaaagaagcattgggatcaactgtgaatacaagaacaagtgagaatttgtggccagggagcagcttgggaaagttggtgggatgaaaattactaaaaggacataccaaggatagagacattgttgctcaactgacctaagagaaattttgttgaaggcaggcagagttatcagagacagagtttaataagatttacaggttcttcggctatcatggcaggattccctgtaaaccttcttagcaggttctttctaaaactgggctatgcagacccaggaa

SEQ ID NO: 31550 - DNA, 1169 bp, Homo sapiens
tattatttcctacttatgtatctaggtccttttatggatattacttaatttaggttttaaaatgattctatataacagtcattatttttcttcatttctcaagtaagaatactgaggccaaaatatattattgtcagaagaaataatttataagtaaaacttttttcatttcaactctgatttgactaaattgtattttgtaatcattaagagctaagaggtagaaagtgagtttgagagtaagagcaaaagttagaagagagacaagtaggaaggtttttccctaaatgggtaatttcctgtctttagataaagtaccaaagtaattaacctctcagcagatacagacaattgcaagagttgttaacacagagggcatactgaggcattatatgtaagactcatgatgttttacatccttagaatggagtcaggaaaacttaaaattaagaaaatgaacaatagtaattaaacaaaattgaaatgaaaataaggtcccatttagtggaatgtgaaggactcttgaacacctgcaggtctgttttactagttcatatttcctcagttcttagcacagtgcctaggacttgccggacattaaaatatttgttattgcttcatttttaacaatttttcttcatagagggcattttgtttggttttgttcattaacgtgttcttcagtaacctttgagagatacacgtgtaatacaggaatactaaatactactactaatattaataataaaataataatggaacatatagctttattctatgtgtgcattaaytgttgattaagatcctttatgttcaaaatttctgacacttgttaaagcagtaaagaagactttattcgggactattgtgatagctgtctatagcaatagaaaagaagcattgggatcaactgtgaatacaagaacaagtgagaatttgtggccagggagcagcttgggaaagttggtgggatgaaaattactaaaaggacataccaaggatagagacattgttgctcaactgacctaagagaaattttgttgaaggcaggcagagttatcagagacagagtttaataagatttacaggttcttcggctatcatggcaggattccctgtaaaccttcttagcaggttctttctaaaactgggctatgcagacccaggaa

SEQ ID NO: 31551 - DNA, 564 bp, Homo sapiens
caacagattcattttatgtacaatygctttttcttttcatgttaaacgcaaccgtatttttatattacatacactgccttggatagtcactgtatcctctaaggtttagcatagaataatgaggaaaatacattaaatatttcattataaatgagttaatattttttctatagttctatcctaaataagaaatgttttactattatcataaagttttattcttaacagttaaattgactttctatctttattcatgtttatttaaaaaacagattttgtgagagatattttacacctatgggtctatctttgattgaatcatgactttttatatctaccttttttcttgatacactttctacaaaaacactactcttaaaatatttgtcactttacaatctctatgtaattatctagatttatccatgagggctgctcttagatgtcttaattaattatttccttaaaaaataattcgttacttgctacatgtcagccctttgcaaggtattgaaataaaagagacatgactcattataaaagacattacagtttaatgccttt

SEQ ID NO: 31552 - DNA, 564 bp, Homo sapiens
caacagattcattttatgtacaattgctttttcttttcatgttaaacgcaaccgtatttttatattacatacactgccttggatagtcactgtatcctctaaggtttagcatagaataatgaggaaaatacattaaatatttcattataaatgagttaatattttttctrtagttctatcctaaataagaaatgttttactattatcataaagttttattcttaacagttaaattgactttctatctttattcatgtttatttaaaaaacagattttgtgagagatattttacacctatgggtctatctttgattgaatcatgactttttatatctaccttttttcttgatacactttctacaaaaacactactcttaaaatatttgtcactttacaatctctatgtaattatctagatttatccatgagggctgctcttagatgtcttaattaattatttccttaaaaaataattcgttacttgctacatgtcagccctttgcaaggtattgaaataaaagagacatgactcattataaaagacattacagtttaatgccttt

SEQ ID NO: 31553 - DNA, 564 bp, Homo sapiens
caacagattcattttatgtacaattgctttttcttttcatgttaaacgcaaccgtatttttatattacatacactgccttggatagtcactgtatcctctaaggtttagcatagaataatgaggaaaatacattaaatatttcattataaatgagttaatattttttctatagttctatcctaaataagaaatgttttactattatcataaagttttattcttaacagttaaattgactttctatctttattcatgtttatttaaaaaacagattttgtgagagatattttacacctatgggtctatctttgattgaatcatgactttttatatctaccttttttcttgatacactttctacaaaaacrctactcttaaaatatttgtcactttacaatctctatgtaattatctagatttatccatgagggctgctcttagatgtcttaattaattatttccttaaaaaataattcgttacttgctacatgtcagccctttgcaaggtattgaaataaaagagacatgactcattataaaagacattacagtttaatgccttt

SEQ ID NO: 31554 - DNA, 1038 bp, Homo sapiens
ggttacaagtatgctcctcagactggctaagaccaaaggagttcatacacagccttgtcagtttaccttagtgtgaactgctgactgtacaagtagtattgtttctgtggagcccaaaatgagaaaaagaattggaaacactatcagcttaattttcctcatctgttaatatctagtgaatattaatataagacagatgagcataaggtatgaaggatgatgtctgattcccattaaagactctccatgtgttaatatccttctcacattgcctgggctatgcacactgcttgttccttttctgactagatcatttgttccttcctaaatcactagctcctatatccttcctttcctcccttcttccctcccttattccrtatccctccttcccttatcctatattcctcgctttctcccttccttatttccttcctccctcccttcctttcttccttcttctttttttttttccttgaaacagggtcttaccttgtcacctaggctggagttcagcggcacaatatcagttcactgtagcctcaacctcccaagttaaaatgaatctcctgcctcagtccctcaagtagctgggagtatgggcatgtgccaccacgccagctaatttttgtatttttgtagagatggggtttcactatgttgcccaggctggtcttgaatgcctgagttcaagcaatctgcccacttcagccttccaaagtgctaggattacagatgtgagccaccatgcctcctagtattttcctattcatatattgacaccctggttacctttcttttcttcttctaccatctcctcctactcttggattaatagtttattaatcctttaagctcaggaattccggatctacccacatcaagtactgccatgtgctgcataacaatagttcagtcaacaaaagaccatatatagaagggtggttccctaatattataataccgtatttttaccatgccttttctatatttaaatatgttcagatacataaacacttttaattatgttactactgc

SEQ ID NO: 31555 - DNA, 1038 bp, Homo sapiens
ggttacaagtatgctcctcagactggctaagaccaaaggagttcatacacagccttgtcagtttaccttagtgtgaactgctgactgtacaagtagtattgtttctgtggagcccaaaatgagaaaaagaattggaaacactatcagcttaattttcctcatctgttaatatctagtgaatattaatataagacagatgagcataaggtatgaaggatgatgtctgattcccattaaagactctccatgtgttaatatccttctcacattgcctgggctatgcacactgcttgttccttttctgactagatcatttgttccttcctaaatcactagctcctatatccttcctttcctcccttcttccctcccttattccgtatccctccttcccttatcctatattcctygctttctcccttccttatttccttcctccctcccttcctttcttccttcttctttttttttttccttgaaacagggtcttaccttgtcacctaggctggagttcagcggcacaatatcagttcactgtagcctcaacctcccaagttaaaatgaatctcctgcctcagtccctcaagtagctgggagtatgggcatgtgccaccacgccagctaatttttgtatttttgtagagatggggtttcactatgttgcccaggctggtcttgaatgcctgagttcaagcaatctgcccacttcagccttccaaagtgctaggattacagatgtgagccaccatgcctcctagtattttcctattcatatattgacaccctggttacctttcttttcttcttctaccatctcctcctactcttggattaatagtttattaatcctttaagctcaggaattccggatctacccacatcaagtactgccatgtgctgcataacaatagttcagtcaacaaaagaccatatatagaagggtggttccctaatattataataccgtatttttaccatgccttttctatatttaaatatgttcagatacataaacacttttaattatgttactactgc

SEQ ID NO: 31556 - DNA, 520 bp, Homo sapiens
cccggtatctcctatgattgaataaaatcataacagtgaagaagataagctgatcctattgatgacagaatttgacaagaacaacctgccttttctggttttaacattgagggcccatgaaagaagtagacaaggaggaagagataggtagatgcatgggccacataacatggggtgccaccaagcaaatccaaccttgtttttgtggctgtcatgtttgcagcctgcctttagtcgtggccactgcataactcccttggggtggatagtctactaactaggtggaatgttggaatgccacctggtggaatagaccacgctctccttaccagtagagttgataatgtgctgctgacaccaagtcagcctaatacttsccattggctcaggggctgagaaggacatactaacaattacctgtgagcctggtaaggatagcaaaatggttaacatggaatttgaatcagtatttccaggcctctaagtgaccacaaaaataaccagtaggggacttcaaaaa

SEQ ID NO: 31557 - DNA, 391 bp, Homo sapiens
catctttccacacacacacacaaaaaagcacaagaactccaaaggatgacattaaaaagatgaccaaaggcatatctggagttgccaacagaaaagaaataagagcctcctccttaatattagatagggctgaattgcaggggaaaaaatattaaacaaggacacaatgtgaaatgagtttcggatgccgtrtttactatctgtgcaccaaactacataacatcaaaatttataaacaaaaactataggaaaaaggccgggcgtggtggctcatgcatataatcccagcactttgggaggccgaagcgggtggatcacgaggtcgggagatcgagaccatcctggctagtctctaccaaaaatacaaaaaattagcagggcgtggtggcgg

SEQ ID NO: 31558 - DNA, 593 bp, Homo sapiens
tgctgatcttggcaactatggagctattctgtaattgttgatttttttttttgtcttctccactacactgcagactccttaaggacaaatataacttcacagatgcaactatgtctacctatttcctaacacaaatcctgatgacttgttacattaattaatttacttttctgaatctgagtttatcttctgcaaaatgagcctataaccacctagcctatcatgaaacgtattttgtaaaatttgaatgcagtctcatcttggaatctcacttctcttctcttggctgtattggtaatgcttactcaatgaccaatttgctatggacattttcaccagtatgtctcactgacagggattgcttctcccatatctaactgaaaaaaaaaaaaagcatgaattttatatgyatcatctaaggcccctgacttttttaaaaaataaagcattgtataaagttcattacctagtagttttcagctaatatctgtgttctgaaaatgatcaggagaatgttctcactgttctgggttctgtctgttcacagcattcttttttttcttgaaaatggatgggtcaaagtcattgctact

SEQ ID NO: 31559 - DNA, 1071 bp, Homo sapiens
tatgccagaccatcaaggacagtggcatgaaagctcagcaatgctttttctgctcagactgatacccatacataagtccatacagtcaactgatgcagtggtcaratgccatcattacttacccacatcaattacctaccacacatcatttgttgaacctctttaatggagcaaatatgtttactgcttagacactgggtacagtggggacagagagtttgtggggaggagatagatgtgacatctcctcaagggccttcagtctggggagatgcttgccgtcatgattacagtcatagatcttgatttattctcatgtgcactacctttaaaaagtctgccatttcaactggccaatacccacttgacccctcgctgcttaccctttgccacctaaaattaacctgagaaaagacaatgaacttgtggggactcaaggcataagaaaagtgagaagaaacaaaagtgtgtctaaaatgattggttttatcctcttgattcctgaatgactgggtagaaaacaaaaacagtctctgttgtggaaagaaaaatattgcggtgcattttttcaactttttgccagagaaaaaagctacttactaaaaacagctgagtaaatatgctgtttctatttgacagaatcctatggagaaatattttaaataaatgattaatttttactaaacataaaaagatagacattattacattataaaagttatgagaaaacaaattataactcatatttgacaaacattagtttagactctgcattttgcaacagatagttgcccacttacaggattttgtcttgtatgataatgaaggggaactgtgatatagataggaacacattatttctaatttggcttttaaatatatttttataattttctttgaaagacatgtatttgaatgtattccttggagtaatgctaagctgctgtaacaaaaagatccccaagacagtggcttcagaaatgcagacatttgtttctctcttttaacccatctgcagtgggcagtccagttcttgggacagtcctgctccacacaggctgcagacactca

SEQ ID NO: 31560 - DNA, 1071 bp, Homo sapiens
tatgccagaccatcaaggacagtggcatgaaagctcagcaatgctttttctgctcagactgatacccatacataagtccatacagtcaactgatgcagtggtcagatgccatcattacttacccacatcaattacctaccacacatcatttgttgaacctctttaatggagcaaatatgtttactgcttagacactgggtacagtggggacagagagtttgtggggaggagatagatgtgacatctcctcaagggccttcagtctggggagatgcttgcmgtcatgattacagtcatagatcttgatttattctcatgtgcactacctttaaaaagtctgccatttcaactggccaatacccacttgacccctcgctgcttaccctttgccacctaaaattaacctgagaaaagacaatgaacttgtggggactcaaggcataagaaaagtgagaagaaacaaaagtgtgtctaaaatgattggttttatcctcttgattcctgaatgactgggtagaaaacaaaaacagtctctgttgtggaaagaaaaatattgcggtgcattttttcaactttttgccagagaaaaaagctacttactaaaaacagctgagtaaatatgctgtttctatttgacagaatcctatggagaaatattttaaataaatgattaatttttactaaacataaaaagatagacattattacattataaaagttatgagaaaacaaattataactcatatttgacaaacattagtttagactctgcattttgcaacagatagttgcccacttacaggattttgtcttgtatgataatgaaggggaactgtgatatagataggaacacattatttctaatttggcttttaaatatatttttataattttctttgaaagacatgtatttgaatgtattccttggagtaatgctaagctgctgtaacaaaaagatccccaagacagtggcttcagaaatgcagacatttgtttctctcttttaacccatctgcagtgggcagtccagttcttgggacagtcctgctccacacaggctgcagacactca

SEQ ID NO: 31561 - DNA, 1071 bp, Homo sapiens
tatgccagaccatcaaggacagtggcatgaaagctcagcaatgctttttctgctcagactgatacccatacataagtccatacagtcaactgatgcagtggtcagatgccatcattacttacccacatcaattacctaccacacatcatttgttgaacctctttaatggagcaaatatgtttactgcttagacactgggtacagtggggacagagagtttgtggggaggagatagatgtgacatctcctcaagggccttcagtctggggagatgcttgccgtcatgattacagtcatagatcttgatttattctcatgtgcactacctttaaaaagtctgccatttcaactggccaatacccacttgacccctcgytgcttaccctttgccacctaaaattaacctgagaaaagacaatgaacttgtggggactcaaggcataagaaaagtgagaagaaacaaaagtgtgtctaaaatgattggttttatcctcttgattcctgaatgactgggtagaaaacaaaaacagtctctgttgtggaaagaaaaatattgcggtgcattttttcaactttttgccagagaaaaaagctacttactaaaaacagctgagtaaatatgctgtttctatttgacagaatcctatggagaaatattttaaataaatgattaatttttactaaacataaaaagatagacattattacattataaaagttatgagaaaacaaattataactcatatttgacaaacattagtttagactctgcattttgcaacagatagttgcccacttacaggattttgtcttgtatgataatgaaggggaactgtgatatagataggaacacattatttctaatttggcttttaaatatatttttataattttctttgaaagacatgtatttgaatgtattccttggagtaatgctaagctgctgtaacaaaaagatccccaagacagtggcttcagaaatgcagacatttgtttctctcttttaacccatctgcagtgggcagtccagttcttgggacagtcctgctccacacaggctgcagacactca

SEQ ID NO: 31562 - DNA, 603 bp, Homo sapiens
aatgtttcaaagagatcctctaaaatgtatttgttcgatagcagcagtcatttaagaacagctaacttgcaatcatggccaaaagcctaaatctttctttcattctaatcacagatattttgtatcttttggagatatctcagattcagatgtattcatactattctatgatttgggacactgctatagattcttcaaaatgttacaacattccagtggtattttgggaggtatggaaggagaggaaaaacaatgggctcaagtctcccctgacttctcttcttacaacatatttcattgtccagaacttttagaactatattaatacaacattgacagtgggtattcttcttttccttctgattttaataggattgaaggaagtgttttgctatgaaattgctatrtgcgttgtattcagacaaattttgactttgtaaaggcaatattcttctcattaatttaaaatgtttaccaggattcacagtattattttcaattctccccattcaaaggcatatttaaataacttgatgaaaggggaatattatatatgttactctactatggaaacagaaaaaaccaccaccaaattgtattcta

SEQ ID NO: 31563 - DNA, 1301 bp, Homo sapiens
ccctgtctcaaacacatacactcatataaacatatgcacctatatacctacatatctatgtacgaatatatacatggacatgggtatttctcagcaaatatgtatcatgataatcacagatattgcagctaacaaagactaatataaaccatgattgcaagaattttagataccacgttagtgaaacatcagattgagctgctaaatttctcccacccctatgtcattttgtattttctgagcatcctagacgattgtgaytgtatacacaggacagaaacaccatgactcagggtactcctgctaatttccgatgcaggagattttaagggctagattagcaggatgggagtgttgaccctctaagtgaaataaatccctcaattcattatccccatcctaaaacagattttttttttttttgagacagagtctcactctgtcgccatcgctggagtgcagtggtgggatctcagctcactgtaatctctgcctcctgggttcaagagattctcctgcttcagcttcctgagtagctgggattacaggcaagcaccaccatacccagttaatttttgtgtttttagtaaagatggggtttcaccatgttggccaggctagtctcgaacccttgacctcaggtgatccacctgccttggcctcccaaagtgctgggattacaggcgtgacgaccgcactcgaccctaaaacagattcttacttgattatttccacgttccaaggggaaatacaaaagtcagagttgagtgaaaataaaagtggagtaaggcttcagaaggctgtggtgggtgttggagaaacgttgctagggcataaagctaggataataaaatctgagaaatcccagtgtttatctataggtggaaatcatattccacatgtggatggagtcagggatccctgtgttttaaaatcagtgagggaattgaatatctggacttgtgccaattaacatacaaaactccgtgcttttgatgttctcattcacaagatatctgtgttccttgtttattagcaaccatagtcataggcttcctaattttgaccacgggaaaagaggagaggcctctgcgtgtttgtgtctgttggttaggctgtggtgcagctggtgtcacacttcagtgaaagtctggcttttcatcacaggttgatctgaaaattgtgcacaagactggtgtctcacatgttctatctccaacctcagcttttcttagtgcctaaagtgtctgcaagtggaaatccagaggaagacagagagaaactgagttcctgacaatgca

SEQ ID NO: 31564 - DNA, 1301 bp, Homo sapiens
ccctgtctcaaacacatacactcatataaacatatgcacctatatacctacatatctatgtacgaatatatacatggacatgggtatttctcagcaaatatgtatcatgataatcacagatattgcagctaacaaagactaatataaaccatgattgcaagaattttagataccacgttagtgaaacatcagattgagctgctaaatttctcccacccctatgtcattttgtattttctgagcatcctagacgattgtgactgtatacacaggacagaaacaccatgactcagggtactcctgctaatttccgaygcaggagattttaagggctagattagcaggatgggagtgttgaccctctaagtgaaataaatccctcaattcattatccccatcctaaaacagattttttttttttttgagacagagtctcactctgtcgccatcgctggagtgcagtggtgggatctcagctcactgtaatctctgcctcctgggttcaagagattctcctgcttcagcttcctgagtagctgggattacaggcaagcaccaccatacccagttaatttttgtgtttttagtaaagatggggtttcaccatgttggccaggctagtctcgaacccttgacctcaggtgatccacctgccttggcctcccaaagtgctgggattacaggcgtgacgaccgcactcgaccctaaaacagattcttacttgattatttccacgttccaaggggaaatacaaaagtcagagttgagtgaaaataaaagtggagtaaggcttcagaaggctgtggtgggtgttggagaaacgttgctagggcataaagctaggataataaaatctgagaaatcccagtgtttatctataggtggaaatcatattccacatgtggatggagtcagggatccctgtgttttaaaatcagtgagggaattgaatatctggacttgtgccaattaacatacaaaactccgtgcttttgatgttctcattcacaagatatctgtgttccttgtttattagcaaccatagtcataggcttcctaattttgaccacgggaaaagaggagaggcctctgcgtgtttgtgtctgttggttaggctgtggtgcagctggtgtcacacttcagtgaaagtctggcttttcatcacaggttgatctgaaaattgtgcacaagactggtgtctcacatgttctatctccaacctcagcttttcttagtgcctaaagtgtctgcaagtggaaatccagaggaagacagagagaaactgagttcctgacaatgca

SEQ ID NO: 31565 - DNA, 597 bp, Homo sapiens
atgaagctaataaaatagaatatggtttaaatgtgcgggcaagtgaacttccaaatactcatcctcagaactagataaacttacctacccaggtacaaaaagtactggactaccagatgccttctcccaaaaagaaatggggatagaaagaaacwagtttatatgtatctagtttttttcagatttacccatcagattgaatgttgtgtctttttgaagagaagcaaatgaaggggtagagagaggctaagagcatcacactggtgggattcctccacatggaaggcaacattaaaaatgctaaagagccggccgggtgcggtggctcacgcctgtaatcccagcacttggggaggccaaggctgggcagatcatcaggtcaggagattgagaccatcctggctaacacggtgaaaccccgtctctactaaaaatagaaaaagaaattagccaggcttggtggcgggcgcctgtagtcccagctactcgggaggctgaggcaggagaatggcgtgaacctgggaggcagggcttgcagtgagctgagatcgcaccactgcactccagcccgggtaacagagtgagactccgtctcaa

SEQ ID NO: 31566 - DNA, 597 bp, Homo sapiens
atgaagctaataaaatagaatatggtttaaatgtgcgggcaagtgaacttccaaatactcatcctcagaactagataaacttacctacccaggtacaaaaagtactggactaccagatgccttctcccaaaaagaaatggggatagaaagaaacaagtttatatgtatctagtttttttcagatttacccatcagattgaatgttgtgtctttttgaagagaagcaaatgaaggggtagagagaggctaagagcatcacactggtgggattcctccacatggaaggcaacattaaaaatgctaaagagccgrccgggtgcggtggctcacgcctgtaatcccagcacttggggaggccaaggctgggcagatcatcaggtcaggagattgagaccatcctggctaacacggtgaaaccccgtctctactaaaaatagaaaaagaaattagccaggcttggtggcgggcgcctgtagtcccagctactcgggaggctgaggcaggagaatggcgtgaacctgggaggcagggcttgcagtgagctgagatcgcaccactgcactccagcccgggtaacagagtgagactccgtctcaa

SEQ ID NO: 31567 - DNA, 597 bp, Homo sapiens
atgaagctaataaaatagaatatggtttaaatgtgcgggcaagtgaacttccaaatactcatcctcagaactagataaacttacctacccaggtacaaaaagtactggactaccagatgccttctcccaaaaagaaatggggatagaaagaaacaagtttatatgtatctagtttttttcagatttacccatcagattgaatgttgtgtctttttgaagagaagcaaatgaaggggtagagagaggctaagagcatcacactggtgggattcctccacatggaaggcaacattaaaaatgctaaagagccggccgggtgcggtggctcacgcctgtaatcccagcacttkgggaggccaaggctgggcagatcatcaggtcaggagattgagaccatcctggctaacacggtgaaaccccgtctctactaaaaatagaaaaagaaattagccaggcttggtggcgggcgcctgtagtcccagctactcgggaggctgaggcaggagaatggcgtgaacctgggaggcagggcttgcagtgagctgagatcgcaccactgcactccagcccgggtaacagagtgagactccgtctcaa

SEQ ID NO: 31568 - DNA, 577 bp, Homo sapiens
tgaagttcttagtcattcattcaatatcctagagcagttcctagcayatagtaggcactcagtaagtacctgatgagtgaaagaactgattccaatatactgaagattttttcttttactgagtatatcagttttctggggctttgtaacgaactaccacaaactgagtggcttaaacaacagaaattttttgtctcacagttatagaagctagatgttcaagattaaagtatcaacagggtcggctccttctaaggctgtgagttccgtgactcccacccagcttctggtggtttcctggcaatctttggtgttccttggcttatagaagcatcagccccaatctctgccgtcatcgtcacatgatgttctccctgtgtgcatgtctgtgtttaagtttctcttttttataagtacactagtcatattggattgcaggcccactctacagcatgacctcatcttaatcacatcttcaatgaccctattcacacatctattcatattctaaagaattgggggccagaatgtcaacatatgaattttaagggaacataatcaacccataatactaaaa

SEQ ID NO: 31569 - DNA, 588 bp, Homo sapiens
ctcatctatagaatgggatactaagtattctgccttaacaatctcttaacaatgagaattaaatatkataagaaatgggagaagcactgtttaagaatgtaaatagatataaagatattgttataaagctcttttcgctggagagaattactgttacacagaaggatcgaccctacatcttggttcaacagcctctgactaatcaactgagccaacttctatcattcttattactggagagaagtagacaagtataaaatatatacacaagtacccatactcccttgaatattgaatattgagtttggaaaaatacagattattttgtttttgttgttttgtcttcagcaggtaatttttcttgccatgtatcttatttagtttacatacctggaatgcctatcaagtgatggagtagttacataccatgcatttagagtgtgtacagagaagtctatgagccaataagaagtctcatacagttctctgtctagtttgcggcagttatacttggcaaggtccattttcttgacttaaccgtaatcaaggtccaacaaagcccctggtacccacgcctgtgaagcccca

SEQ ID NO: 31570 - DNA, 588 bp, Homo sapiens
ctcatctatagaatgggatactaagtattctgccttaacaatctcttaacaatgagaattaaatattataagaaatgggagaagcactgtttaagaatgtaaatagatataaagatattgttataaagctcttttcgctggagagaattactgttacacagaaggatcgaccctacatcttggttcaacagcctctgactaatcaactgagccaacttctatcattcttattactggagagaagtagacaagtataaaatatatacacaagtacccatactcccttgaatattgaatattgagtttggaaaaatacagattattttgtttttgttgttttgtcttcagcaggtaatttttcttgccatgtatcttatttagtttacayacctggaatgcctatcaagtgatggagtagttacataccatgcatttagagtgtgtacagagaagtctatgagccaataagaagtctcatacagttctctgtctagtttgcggcagttatacttggcaaggtccattttcttgacttaaccgtaatcaaggtccaacaaagcccctggtacccacgcctgtgaagcccca

SEQ ID NO: 31571 - DNA, 602 bp, Homo sapiens
ggacactaaaaataaaatcagtccactgaggggaggaaggagaaaacatagcaactcccaratgctgctctgtgcctttggtcattaggaaatgttaaactagtcacatcatttgcattacatcaagttaatctctaagtctaggtttcttgaatgagtgctaggatttttgctttttctttctctttttagcctgtctccaagagttgaaaagatgctaaaggtaagactgagttttacaaactctctgtcttcaacagagccaaaccaagggcctgccctggaagggacaaactggttagatatctactctccagtctcctgctctagtccaaaaagtgtgttcacaatcactttagtgtgaattgtgctgaagtcccagtcttgtatactactttgcaaaaaaaaattattattattaaaaataaaaaataataatctccaacaatgactactggcatgcagctgagtcccattttccattaacaatgtttacgtccattcagtggttacaggagtggcccttgaggggatcctgaggaacaaaatgaactggccacagctggcagatagttgggatgataatcaaattctcttcccag

SEQ ID NO: 31572 - DNA, 1256 bp, Homo sapiens
ttctgattctctccctccccccactctcccacagatctgggtgtgtgttgttcccctccctgtgtccacgtgttctcattgctcagctcccacttatgagagagaacgcgcggtgtttggttttctgttcctgtgttagtttgctgaggatgatggcttccagcttcatccatatccctgcaaagtacaggatctcattccttcttatgtctgcatagtattccatggtgtatatggaccacattttcttttccagtctatgattgatggtcatttaggttgattccatgtctttgctattgtgaatagtggtgcaataaacatacatgtgcaagtatctttataatagaatgatttacatgcctttgtaaacccacttttaaacgtggagaatgttttttatttgatgtccttcatagaatccttacatagcagtwaaaagtagaaaacatttaaatctgaagattaattataaattttaaaactctgttttgctgactatatacgtggtcagaatatttatataggctgggcacagttgtgcacgcctgtaatcccagcacgtttggaataccaaggtgggtattgggtggattgcttgagctcaggagtttgaggccagcctgggcaatatggtgaaacccctctctcaataaaaacaaaacaaaacaaaacaaactacttatagagcagtttctgctcgtatgaaagaaagacaagtaacaaaatcttgtctctttcccagaaaataatgataattataggaactgccagtttaaaccctagaagaaattttataaggacatgcacctcccctctcaggttccaggagaacactttttgggtagtgccaggcctaggggtgggatgggtttcccagggtgccccagctatgcctgaagaattcaggaatgttagattacactcagttaccaaaacagtcctgtgtcagctaggcctgtgcagaaaggtgaatgaatgcttgtgctttggaattcccccccacccccaccccacccaccagccttctctctcgctcagtaataaaacagagctcatgcttgctatgggtgttattgctcttcaggattacacattaatccatactgtgtaattactttacagcaactttgttctcttaattgtgctgaggcatctgaggaatttgacattgccgtggtgaggttggcatttgtttataccaacaacacacaccattaagaagcttaagctagcaaaagcctaatgcattagag

SEQ ID NO: 31573 - DNA, 604 bp, Homo sapiens
attactttgaattcatttgcataggagatttgtctcttctccttcatttgtttatttatcactggtgactttttactgtttccatgaatcaagtactcaaaagacatattcactgagggcttactataagaaggcattagtagtacattgttactgagcaatattttgttttatttttttcagagacagttcacttaaaaatgaagaacttggatttcttgtcccacctctgacactacgaggaggcttcagacaattaatttcacgcccaagcctcagtttcctcttctggaaaattagatgatggaaaggaatgaattctgacattttttccagcattgaaattgtagggttatataatatattcatagaataggcttcaaatagtctacaaaaggaaattattaatatctgtagtgggcaggcccaactcagtgaaatctgtgtttcaaatcttccttctcattgyctcaggaaatgtatattttgtctgccatattattttcttatgactcagagttaaaatatatatacccaatgaaaatatcaagtggatgaagttaaccttgttagtagcatataatattttatgacaaagaaaaaa

SEQ ID NO: 31574 - DNA, 1168 bp, Homo sapiens
atcctgacctatacaaaggttcatataacaagactccctccatggttagagggtggtcctgaggagagaacacaccacaggctcaccaagctccacactcctagcatcttcccagttcctcaaagtacattaatggactggagacacagagacccttaaaaatattaaaagggtcaatatgtcaggaaaacatgatcattacaaatgtatatgcatctaattacaaacatttaaagtgtggggttaatcactctgtggttctctccatgttacatgttaataaaatattttttaaaaatcaaagtatatgaagcaaaacttgatagaactaaagggagatagacaaataagcaatcatagctgcagatttaaacatacctctcttaaaaatggtataatgactagattaaaaatcagtgaagatatagaagttccacagaactgcctccctttctgtcacaccattgcccataatacctataccaggggatacacctactattgttatttagagataaaaatgatttttaaatgctagcacactgatgcataccagtcaaattgccaataagatatgaaatcccttaaggaggatgtaaaacgtggagggctccttatgacacttagaaagtcatagaaagggggaacttcagagaatgaagaaatccacgtaaaagagagattcgacattcaaaagagagaatctgataaatgattcaatccatttatacaaagttctaaatggcatcaatagggctaggagtcagaatagtggctactcctgagaaataattactggaaggtggcatagaatgaacttgtgggatagaggtcatattctgtaaaccartcttggtgctggtaatactgctgtggtcaatttgtggaaattctttaagatatatgcttataatttgtgcaatttttgaattgcatattgttcttcaagagcaaaacaaaacattttaaaaagacaaactccatgaacttcacacttcaatttcactacttggcttggcttcataaatgttcattggaacagggaaatgacacatgcaaagatatttcatatcccattgtgcttggcatatgtgcattcgagggaaaccttaaccctcattacagtactaaaaatcacaaagctagccctatgtagaaagctgaaact

SEQ ID NO: 31575 - DNA, 1168 bp, Homo sapiens
atcctgacctatacaaaggttcatataacaagactccctccatggttagagggtggtcctgaggagagaacacaccacaggctcaccaagctccacactcctagcatcttcccagttcctcaaagtacattaatggactggagacacagagacccttaaaaatattaaaagggtcaatatgtcaggaaaacatgatcattacaaatgtatatgcatctaattacaaacatttaaagtgtggggttaatcactctgtggttctctccatgttacatgttaataaaatattttttaaaaatcaaagtatatgaagcaaaacttgatagaactaaagggagatagacaaataagcaatcatagctgcagatttaaacatacctctcttaaaaatggtataatgactagattaaaaatcagtgaagatatagaagttccacagaactgcctccctttctgtcacaccattgcccataatacctataccaggggatacacctactattgttatttagagataaaaatgatttttaaatgctagcacactgatgcataccagtcaaattgccaataagatatgaaatcccttaaggaggatgtaaaacgtggagggctccttatgacacttagaaagtcatagaaagggggaacttcagagaatgaagaaatccacgtaaaagagagattcgacattcaaaagagagaatctgataaatgattcaatccatttatacaaagttctaaatggcatcaatagggctaggagtcagaatagtggctactcctgagaaataattactggaaggtggcatagaatgaacttgtgggatagaggtcatattctgtaaaccaatcttggtgctggtaatactgctgtggtcaatttgtggaaattctttaagatatatgcttataatttgtgcaatttttgaattgcatattrttcttcaagagcaaaacaaaacattttaaaaagacaaactccatgaacttcacacttcaatttcactacttggcttggcttcataaatgttcattggaacagggaaatgacacatgcaaagatatttcatatcccattgtgcttggcatatgtgcattcgagggaaaccttaaccctcattacagtactaaaaatcacaaagctagccctatgtagaaagctgaaact

SEQ ID NO: 31576 - DNA, 1168 bp, Homo sapiens
atcctgacctatacaaaggttcatataacaagactccctccatggttagagggtggtcctgaggagagaacacaccacaggctcaccaagctccacactcctagcatcttcccagttcctcaaagtacattaatggactggagacacagagacccttaaaaatattaaaagggtcaatatgtcaggaaaacatgatcattacaaatgtatatgcatctaattacaaacatttaaagtgtggggttaatcactctgtggttctctccatgttacatgttaataaaatattttttaaaaatcaaagtatatgaagcaaaacttgatagaactaaagggagatagacaaataagcaatcatagctgcagatttaaacatacctctcttaaaaatggtataatgactagattaaaaatcagtgaagatatagaagttccacagaactgcctccctttctgtcacaccattgcccataatacctataccaggggatacacctactattgttatttagagataaaaatgatttttaaatgctagcacactgatgcataccagtcaaattgccaataagatatgaaatcccttaaggaggatgtaaaacgtggagggctccttatgacacttagaaagtcatagaaagggggaacttcagagaatgaagaaatccacgtaaaagagagattcgacattcaaaagagagaatctgataaatgattcaatccatttatacaaagttctaaatggcatcaatagggctaggagtcagaatagtggctactcctgagaaataattactggaaggtggcatagaatgaacttgtgggatagaggtcatattctgtaaaccaatcttggtgctggtaatactgctgtggtcaatttgtggaaattctttaagatatatgcttataatttgtgcaatttttgaattgcatattgttcttcaagagcaaaacaaaacattttaaaaagacaaactccatgaacttcacacttcaatttcactwcttggcttggcttcataaatgttcattggaacagggaaatgacacatgcaaagatatttcatatcccattgtgcttggcatatgtgcattcgagggaaaccttaaccctcattacagtactaaaaatcacaaagctagccctatgtagaaagctgaaact

SEQ ID NO: 31577 - DNA, 795 bp, Homo sapiens
caaaatagtacaaacacagtggtgcacaacatgactataattaggcagtaaataaggagaatgaagtcatagtctaatacttgacacttggcaatataatctgttgagatgagcctgagacgtctgattttttttttttttttggcacctaaatctaagcaaattgcactatgtctccatctccacattggtatagtacaaggaccaacgatcaatagatgacaagcttttacaaatctccagcttcacttggtagaaccccaaaccagatacaattgcctcagacccctctgtaggcaatccaggattccctatcaggagggaagtgcagccagcaacaacttcctggtcagtagctaccactcctcccacacactcagtctcctttggacctgagatctcaagccttcaaagaagtgagatgttctccttctcccaaaatgccatctggcacacagcccctaagcctmtgctctctacttccttctgccaggcaatgccatcaacgcttttcttactgaaaggccatgtgttacacagtactacaataatcctcaagatactgaaagtaatgccaagtgaaagaccaagggggtgggtggagggctaatgggctggacgaaatagccacttgattgctagttcatacaagatgtggcagcaactccttttctggctggagatcttggatgtcacatcttagaatcaggtggcaaagcatctgtgaagggcaatgtggcatcccagacagtgggtggtgagatcaggaagaaaaaatggaaatcaacagatggt

SEQ ID NO: 31578 - DNA, 553 bp, Homo sapiens
ataccatgttctattaaatggaattctctattgactgaggtttctacatctttaaaagtgtgaattaatgttaggaaggatgtgaatctsagtagtcatagaaagggttagcactgtggacaacattattttaattccaagagccctctgtttcttgctacttccgtgatacttgacaataataaggggcaattgttttcaaatggttctataagtcctgtactcttcacccaatggtgggaacagtgacaaaacaagaaacaggcacagtcggtggaactcctgcttcattcagagcaattccacttcttacttattttctatactagcatttcatgcacagttttatttgcaaaaaatgttccagtgctaccataattttgaaaaccactgagaaagggcatagatgctaattaactattaacaagaaagatttaattaacaaaacatgccatcttgactcagaaaatagtggatattctaaagattttctatcttttttttaccttctattatgcagaaatgtggatgtatctcatattatataatttct

SEQ ID NO: 31579 - DNA, 553 bp, Homo sapiens
ataccatgttctattaaatggaattctctattgactgaggtttctacatctttaaaagtgtgaattaatgttaggaaggatgtgaatctgagtagtcatagaaagggttagcactgtggacaacattattttaattccaagagccctctgtttcttgctacttccgtgatacttgacaataataaggggcaattgttttcraatggttctataagtcctgtactcttcacccaatggtgggaacagtgacaaaacaagaaacaggcacagtcggtggaactcctgcttcattcagagcaattccacttcttacttattttctatactagcatttcatgcacagttttatttgcaaaaaatgttccagtgctaccataattttgaaaaccactgagaaagggcatagatgctaattaactattaacaagaaagatttaattaacaaaacatgccatcttgactcagaaaatagtggatattctaaagattttctatcttttttttaccttctattatgcagaaatgtggatgtatctcatattatataatttct

SEQ ID NO: 31580 - DNA, 553 bp, Homo sapiens
ataccatgttctattaaatggaattctctattgactgaggtttctacatctttaaaagtgtgaattaatgttaggaaggatgtgaatctgagtagtcatagaaagggttagcactgtggacaacattattttaattccaagagccctctgtttcttgctacttccgtgatacttgacaataataaggggcaattgttttcaaatggttctataagtcctgtactcttcacccaatggtgggaacagtgacaaaacaagaaacaggcacagtcggtggaactcctgcttcattcagagcaattccacttcttacttmttttctatactagcatttcatgcacagttttatttgcaaaaaatgttccagtgctaccataattttgaaaaccactgagaaagggcatagatgctaattaactattaacaagaaagatttaattaacaaaacatgccatcttgactcagaaaatagtggatattctaaagattttctatcttttttttaccttctattatgcagaaatgtggatgtatctcatattatataatttct

SEQ ID NO: 31581 - DNA, 639 bp, Homo sapiens
atcctccacacggtgtcgaagctgtcggtcagcactgcccattccagggccgtcttgccccgaacagggtccactgctgtcaggtcagcacctgggaaggagcacagggggtgacatggggcgggataggggttggtgatttgtggaagggcagattctttaggagcaagactgatgtgggttacattcgaagccatagagtcccatcctgttgaaggtggaatcggggaggccagtgttgcaacctcctgtttaagagagattaagacacttaggtccagagaggggaaaagacttcagagagacctattgtggggctccacctagggcagaatagggatctcctcaatccaaggagctgagcagagcagcggtgcaggctgcccaggacaggcagaggcctgagctgcaccctctggggcaggtgggtggggatgatcggctggttccctctcctggttcttctcttctcaccatctccctctcccatcttggggttgtgggaggagcagtcactctaagacaaaagaaaggstgtagagcgccctcctttttcattcactcctttttcactccaaacccagtggggtgtgtggggaagggaaaaatggaggcaggggtcccccagagtgaccagca

SEQ ID NO: 31582 - DNA, 1054 bp, Homo sapiens
agatctaaatagaccatccagacatagtctaaacaatgcaatgtgccctggacagcctctgctaaaattgggattaaaagaaatcattatctttttctgctcaaaatgttgataggtcctttgatctcagacctaccactaggctgatcatacagtaggtagccaataaaatgtgtctttctttcatccagtcatgataccatggcaacagttagatgaaatatttatctgcatttataagacactgtttataatatcttttacaaacaaatggctagttttgttaatctacaaagagtatgtacagattatttagaaaaacaaaatgatcactcaaagagaaaatggactgaataagtgaagagacaattcacagaaaatgaaagctaaatagcgaataaacatatttgtaatgctcaacctcattagcaatcagataatgaaaataaaacagaaaactgtcaaaaaaaaaaactaaaaagaataccacacagtgttcagaagactgtggagaaataggaagtcttataygttacttacaaaagcatgaattggtacaatctttctggagagcggcctgaccatataaatcaaaaattttaagtggccttgcaattccaataacttctaaaaagttaccttaaagaatgaataggaccagtgtccagagaactgtgtgttcattgcagcaacatttattacagtggaaaaagtagaaataaacatatatgtaaaaaggtgctacatctatataatggaatattatgcagttattaagaaagacgacttggccatgagggtaacaggtggcagggcatggcacctacagctcagtaatcgggggggcggggtgcggggaaggggagggatgcacaggcacagactctgtgggtctcaggctgatgggaggctgcttgccagctcctagatcagggatggatgcagcagcggaagtgacggaagccccagaggaagagagctttgcactacccatctcttccacctctgaagccaaattcaatactgtggttggttctattgaggccatcatcat

SEQ ID NO: 31583 - DNA, 1054 bp, Homo sapiens
agatctaaatagaccatccagacatagtctaaacaatgcaatgtgccctggacagcctctgctaaaattgggattaaaagaaatcattatctttttctgctcaaaatgttgataggtcctttgatctcagacctaccactaggctgatcatacagtaggtagccaataaaatgtgtctttctttcatccagtcatgataccatggcaacagttagatgaaatatttatctgcatttataagacactgtttataatatcttttacaaacaaatggctagttttgttaatctacaaagagtatgtacagattatttagaaaaacaaaatgatcactcaaagagaaaatggactgaataagtgaagagacaattcacagaaaatgaaagctaaatagcgaataaacatatttgtaatgctcaacctcattagcaatcagataatgaaaataaaacagaaaactgtcaaaaaaaaaaactaaaaagaataccacacagtgttcagaagactgtggagaaataggaagtcttatacgttacttacaaaagcatgaattggtacaatctttctggagagcggcctgaccatataaatcaaaaattttaagtggccttgcaattccaataacttctaaaaagttaccttaaagaatgaataggaccagtgtccagagaactgtgtgttcattgcagcaacatttattacagtggaaaaagtagaaataaacatatatgtaaaaaggtgctacatctatataatggaatattatgcagttattaagaaagacgacttggccatgagggtaacaggtggcagggcatggcacctacagctcagtaatcgggggggcrgggtgcggggaaggggagggatgcacaggcacagactctgtgggtctcaggctgatgggaggctgcttgccagctcctagatcagggatggatgcagcagcggaagtgacggaagccccagaggaagagagctttgcactacccatctcttccacctctgaagccaaattcaatactgtggttggttctattgaggccatcatcat

SEQ ID NO: 31584 - DNA, 1054 bp, Homo sapiens
agatctaaatagaccatccagacatagtctaaacaatgcaatgtgccctggacagcctctgctaaaattgggattaaaagaaatcattatctttttctgctcaaaatgttgataggtcctttgatctcagacctaccactaggctgatcatacagtaggtagccaataaaatgtgtctttctttcatccagtcatgataccatggcaacagttagatgaaatatttatctgcatttataagacactgtttataatatcttttacaaacaaatggctagttttgttaatctacaaagagtatgtacagattatttagaaaaacaaaatgatcactcaaagagaaaatggactgaataagtgaagagacaattcacagaaaatgaaagctaaatagcgaataaacatatttgtaatgctcaacctcattagcaatcagataatgaaaataaaacagaaaactgtcaaaaaaaaaaactaaaaagaataccacacagtgttcagaagactgtggagaaataggaagtcttatacgttacttacaaaagcatgaattggtacaatctttctggagagcggcctgaccatataaatcaaaaattttaagtggccttgcaattccaataacttctaaaaagttaccttaaagaatgaataggaccagtgtccagagaactgtgtgttcattgcagcaacatttattacagtggaaaaagtagaaataaacatatatgtaaaaaggtgctacatctatataatggaatattatgcagttattaagaaagacgacttggccatgagggtaacaggtggcagggcatggcacctacagctcagtaatcgggggggcggggtgcggggaaggggagggatgcacaggcrcagactctgtgggtctcaggctgatgggaggctgcttgccagctcctagatcagggatggatgcagcagcggaagtgacggaagccccagaggaagagagctttgcactacccatctcttccacctctgaagccaaattcaatactgtggttggttctattgaggccatcatcat

SEQ ID NO: 31585 - DNA, 1227 bp, Homo sapiens
atgtcttcctccatcattaatctgttgtattgcatgccttttgtgacttcatttttgcaaaccagggaatgaatggggatggctttctgtgaaacaagcaggaaattgatggagatgaatgaaggtaacagaatttagaagtggagggtacctctattttctttgtgatgtggaagacttagtcaaaagtgaaagagaggtgaaggggcataaagaaggaggaaatagaacactatggcttttaactgtcgtatgcaaggaattcccttatctgacagtaggcagagccaygcatgctgatgtgggccctctccaaactagtgtaaagactggaagacacggtttctttatcctggcctgaggagttttccctcccatgggcatcactgaccctcagatcttggaactagggtgacatcagggaagagcagccacttcccggtgccctcagctggcatagttcctttgcactgcttgtttgcaggtttggtagcaaaatggagtgaaaaagccttaaacccagactcagtcatttttgcaaacttcaacctcaactctcctttcttgtttaacctagcttaaaaacttccggaatcatgagaaactcacaatgcttgtttggggcagttgagaaaggaagtggattgtaaaggaaaaggactggaaattacttttgagacctattcacttaaagctcctctttaagtccctaagtcccaggcacctccaacccaacaggtcaaaaaataaactaatctcctttctccagtccactataatttcctctagtgtcttcccgtcaaagtgttaccatccacccaggcatctataccagatacttagcaaagccctctcagttctatccctggaaatcttctgaaataggcaactctctccacctccccatagttaaagtttcaggtgaatcgctaaacagtttccttctcaccggccctctacccccacgcccatccttcacactacatgagttacttctttcatcaagcacagttttcatcaagtcaatctcttactttacaattagcgattgtatgtggcttctccttatttaagcagcactgtctattagtatttggggtgaaatggaaacattctctgtgttatccattatgatagccatgagtcacatgtggctattgagcacttgaaatgtggctagtgcctctgaggaactgaattggtgtatttatttttcattgacattta

SEQ ID NO: 31586 - DNA, 592 bp, Homo sapiens
agggcacaagtggacagagaacccggyctgaggaacgggatccctccaagcctctggaacccggcctccccaccgctcagacagctgcccctgcccttccaagtcggcaggccagtccctctctaaagacagttcaagggcagtgccacagccacacctgtatattccttgggggaagccgtgtctccattcctgaagaacttgatggtgggatagccgcgcacgccgtactgctgggccaggtcagactcctccgtggcgtccaccttggccaacctgatctcggaaccttctgccttcagcttcccagcggctttggcatactcaggggccagagccttgcagtggccacaccaaggggcatctggaagcggaaatgagatgctagaaagcagccttgatccctaaagcagccttgatccctcagcagtgcttccctttttcctctggcatttcccttcataaaaaccttatctactcaccaagataacccctcctaacgcacaaggctgagctgatagcctggtgttcttgggcaatatcaggacagaggccgtgaacgacaaactaccaccaaccaacaccagccccc

SEQ ID NO: 31587 - DNA, 658 bp, Homo sapiens
tttcagtctctgctttcaattatttttggtacatacttagaggtagaactgtgggccgggagtggtggcttatgcctgtaatcttagtgctttgggagcccgaggtggcaaatcatttgaggttggcagttcaagaccagcctggccaacaatggtgaaaccctgtctctactaaaaatacaaaaaatttgcaggtcactgtggcgggtgcctgtaatcccagctactcatgaggctgaggcagaagaatcacttgaacccgggaggcagaggttgcattgagctgagatgtcaccattgcactccagyctgggcaacaagagcaaaactctgtctcaataaaataaaataaaaaataaaaaaataaaaagtagaattgttagatcgtatggtaattctagagaaaacaccatactgttttccacagcagctgcaccattttacattctcaccagcaatgcaaaagggttccaatttctctgcatcctcaccaacacttgttactattttttttcttatagccattataatgaatgtgataaagtgttcctaatggtcctattttgccaggttaacatcatcttacaaatcagaaaagtgaggctcaccaaggttaactggcttttctgcaaatgtaaagttgcctaaatgacaacaa

SEQ ID NO: 31588 - DNA, 542 bp, Homo sapiens
gtcatgagccaaccctgmaaggtggttcctgacccactcaaactccctagactttatgacccacccaaattccctagactttatgctttgaaagtctggagttggatggccctgattctgaatctcagtgctgcttctgacttgtgtgtggcctcaggcatgcacctaaaccttctgaatctgatggccattgaatggaagtgggaacactcatattattacactcctcacaccactgtgtagaattagaatgtaacaggtgatgtgtacatcaccttgcgtaggcctggcccattgctggggctgatagcttctgtttctcctttcttcctggcccttttattcctagtctgtgttggttctcctcattgcctttccttattgaaagtcaagctccactcctgaggacactggacaggtttggggaaggattggtcaagagttttggaggctactctcacggaatatagaaaaatgacatcactgtaccatcccctgggggccttcgaggtgcagtaatattcctggaactcgtaggtaaa

SEQ ID NO: 31589 - DNA, 542 bp, Homo sapiens
gtcatgagccaaccctgaaaggtggttcctgacccactcaaactccctagactttatgacccacccaaattccctagactttatgctttgaaagtctggagttggatggccctgattctgaatctcagtgctgcttctgacttgtgtgtggcctcaggcatgcacctaaaccttctgaatctgatggccattgaatggaagtgggaacactcatattattacmctcctcacaccactgtgtagaattagaatgtaacaggtgatgtgtacatcaccttgcgtaggcctggcccattgctggggctgatagcttctgtttctcctttcttcctggcccttttattcctagtctgtgttggttctcctcattgcctttccttattgaaagtcaagctccactcctgaggacactggacaggtttggggaaggattggtcaagagttttggaggctactctcacggaatatagaaaaatgacatcactgtaccatcccctgggggccttcgaggtgcagtaatattcctggaactcgtaggtaaa

SEQ ID NO: 31590 - DNA, 382 bp, Homo sapiens
aggatatttcttcactgaaagaaaacttacttctacatgtaaacctgccatatacttttccaattaagcaatggatcaaaagttctgaaaatgaaagtaaccagacatattaacttagaacaagaacctgcattttaaaagcgagtcagctgaggccgggcacgtggctcatgcctgtaatcccagcactttgggaggccaaggcggcttggatcacgaggtcaggagaccgagaccatcctgsctaacacagtgaaacctcgtctctgctaataatacagaaaattagctgggcgtggtggccccgggatgtggagcttgagtgagcggtgatcatgtccctgcctacacgccgggcaactgagcgacgattccctctcca

SEQ ID NO: 31591 - DNA, 796 bp, Homo sapiens
caaataatctattcactctattctgaaaaatgtttacacagaagtcctcaaccatctggagaccaaacctcagtaatattgaagaaacaatttattacatattttcacatagctaaaagggcagattttgaatattcccaacacaaagaaataataaatgtttgaggtgatgggtatattaattacctgatttgatcattatgcattgcatatatgtatcaaaatatcacactgtacmccataaatatgtacaattatgactcaatttaaaataatagccaggcacagcagctcatgcctgtaatcccagcattctgggaggccaagatgggtggatcacttgagtccagcagttcaagaccagcctgggaaacatggtgaaacactgtctttaccaaaaaaaaatttaaaaatttgaaattgttgggtgtggtggtatgtgcctgtagtcccggctactcaggaggctgaggtgggaggactgcttaagcctgggaggcagaagtcacagtgagccaagattgagccactgtactccagcttgggtgactgagcaagaccttgtctcaaaataataataaaagaaaataataatattaaagagtacctctattttccagaacctcacttctgttatggctctgttttatggcagactgctcattttcttaccttctccaaaactccccacaggcaaaggagttggctgcagctcttccatgctcccactgcaacttccaaccattcctcttccaccccctgcaccaccccatcaaaagcctcttctctgaagatc

SEQ ID NO: 31592 - DNA, 1122 bp, Homo sapiens
atgcaatgtgagttcaaggtggaatcaggcatyagaagccaggttatttggcccccttggaataaaagacagttgtcctaggaagttgattctagggttttttgcaagtcaaagatgcctccctctgagcagcagcatgaagaaatccaacatattaggtgtttgtgtgtgtgtgtgtgtgtgtgtgtgtgtgtgtgtatgtgtgtttgagacagagtttcactctgtcacccaggctggagtgcagtggcgtgatcatgactcactgcagcctcaacctacgggctcaagcaatgctctcacatcagcacctgtagctgggaccacagctgtgcacgaccacgccttgctaatttttaaagttttttgtagagatgaggtctccctacgttgtccaggctggtctcaaactcctgggctcaagcagtcctcccacttaagcctcccaaagtgctgggattataggcttgagccactaagcctggccgcattgattttttttttttttttgagacagagtctcactctgttgccaggctggagtacagtggcatgatctcagctcactgcaacctccatctcctgggttcaagtgattctctgcctcagcctcccaagtagctgggactacaggtgcgcaccaccacacccagctaatttttgtatttttagtagagatgaggtttcaccatgttggccaggatggtctcaatctcttgacctcgtgatctgccctgctcggcctcccaaagtgctgggattacaggcgtgagccaccgcgccaggctgatattaagaatttttaacaccgagatatttgtggagtagatctgagaataaggaaggttgcagagccagctaacaagaggcagactataaaaataaaggcagtttccctgaagcacgatatgtgctccatgagagaagtgtctggagagtgtgggaatcaaatgcttggagaggaaagcacagcttgcaaagtgaatcttctaaatggaatcacaaatccataaatcctaaggttttaacaagactgctttgtcagctcatgatatacctaataggatagagcatttcatgtggatgcagggaaacaagagaggatggagtaagaaggaagtt

SEQ ID NO: 31593 - DNA, 632 bp, Homo sapiens
gggaatttaataaaatatagttgccagaatcccaccaattgaataaaaatctctgacagagccaagacatcagcatttcaatagatccccaaatgagtgaaagttgcatttactttgaatgaatttgatgacaagtgttgctgattttacttgttgcatgttagggtacttagcagatatcaaaaagccaagaacatgtacaagacggatttgcagattgtagctttcctgttgtactactcatccctattatctctaattgcttagtatttattcatacaactaattttttttgtaaagtcgattgttgccagcagtgtaactgtattacactgtattaggtatgtcttttatgtacttcttaaagtctttttgattgatttattgtgatttaaacaacatccaagtgagagttcagcatcagaaaagkttaaatcataataataactaatacagataagggctttaatattctcaccgaagcctttaactatggcctttaatatttgcaccaaagcctttaggtagttaagtattattgtacactgttcatggcacaactgttattgtacactgttcatattacaacttaaatatctaacaggcatcacaaagtaaacttttataaaact

SEQ ID NO: 31594 - DNA, 560 bp, Homo sapiens
tattatctcctgtgattttcttttccttcttttccagctgagaactttcatttatttattttttattcaatcattctttaacagatattttattggtagctattatgtgccaagccctggctgggtaaaattttggtaaatatggaaaggagcaaaggacagactttgacttgtakaatatagagtcttatgggggagaaaggcatgtaaaaataattaaaatatgataagtactataataaaactatgaaaaaattctatgagaattctacaactccaaaccacttaagacacttctttttaaaaaatttcacatacatgttatttaattctgaacatacaaaggagaaagcaaacaatgaccctactggtgatttttctctctggactttcaaaaagttcatacagaagataatgattctctattctattttttctacacttcgtggcatatttcacacttaatgtcagcgagttctttcctctgcaacccaaatcccttattcagaaggtaaagtggggagggagctcgtgctccactgagtgctaaacacaacaat

SEQ ID NO: 31595 - DNA, 818 bp, Homo sapiens
catgcattgtctgaaaacttggcctccagtgtcagatccagacaaggcccgggtgcctgggaccaggattggggccagtggggccataggcccagggaagggccgttggatgcctggctcccagggtacagggtggctcagactgtgggtgggggtgggtttcagaggtgcaggcctctggaagaaatatgacaagagggctagggtttggaatattgwctgcagattaggccttggtttccccaggttagatttgaggaggctgcaaggcatcttccgcagagagggaggcagcctctagagataccccgcatgcacacgcctttcacagttcaccaggctcacttacacccaacccccaacctcatcatcaatcttaaatttcccctcctctaggaagccttccttgatgtccaggctggatcagggaccctctgggctcccttcacaccaggcttttctgtcacgacctgagcccttggggacctcccaccagcacctgccagagccaggcagagacacagctgacatgcagtctcatgtaatgggcacaagaaatgcttgtggttatgaactactgagaaattgggggtgtttgttactgcagcaaaagccaactaatacagatgcctgcaagggtccccctagggaaggaccgggagccgcaaggcaggaaacctgtgggggctgtgaaggaagccaggagggtaagtggtgctgagggcggggcctcctcatgaggagtgaggggcagctgggagagaggggcctggcagcctgagggcacgggggaggggagactgcccgggaggggaggg

SEQ ID NO: 31596 - DNA, 818 bp, Homo sapiens
catgcattgtctgaaaacttggcctccagtgtcagatccagacaaggcccgggtgcctgggaccaggattggggccagtggggccataggcccagggaagggccgttggatgcctggctcccagggtacagggtggctcagactgtgggtgggggtgggtttcagaggtgcaggcctctggaagaaatatgacaagagggctagggtttggaatattgtctgcagattaggccttggtttccccaggttagatttgaggaggctgcaaggcatcttccgcagagagggaggcagcctctagagataccccgcatgcacacgcctttcacagttcaccaggctcacttacacccaacccccaacctcatcatcaatcttaaatttcccctcctctaggaagccttccttgatgtccaggctggatcagggaccctctgggctcccttcacaccaggcttttctgtcacgacctgagcccttggggacctcccaccagcacctgccagagccaggcagagacacagctgacatgcagtctcatgtaatgggcacaagaaatgcttgtggttatgaactactgagaaattgggggtgtttgttactgcagcaaaagccaactaatacagatgcctgcaagggtccccctagggaaggaccgggagccgcaaggcaggaaacctgtgggggctgygaaggaagccaggagggtaagtggtgctgagggcggggcctcctcatgaggagtgaggggcagctgggagagaggggcctggcagcctgagggcacgggggaggggagactgcccgggaggggaggg

SEQ ID NO: 31597 - DNA, 818 bp, Homo sapiens
catgcattgtctgaaaacttggcctccagtgtcagatccagacaaggcccgggtgcctgggaccaggattggggccagtggggccataggcccagggaagggccgttggatgcctggctcccagggtacagggtggctcagactgtgggtgggggtgggtttcagaggtgcaggcctctggaagaaatatgacaagagggctagggtttggaatattgtctgcagattaggccttggtttccccaggttagatttgaggaggctgcaaggcatcttccgcagagagggaggcagcctctagagataccccgcatgcacacgcctttcacagttcaccaggctcacttacacccaacccccaacctcatcatcaatcttaaatttcccctcctctaggaagccttccttgatgtccaggctggatcagggaccctctgggctcccttcacaccaggcttttctgtcacgacctgagcccttggggacctcccaccagcacctgccagagccaggcagagacacagctgacatgcagtctcatgtaatgggcacaagaaatgcttgtggttatgaactactgagaaattgggggtgtttgttactgcagcaaaagccaactaatacagatgcctgcaagggtccccctagggaaggaccgggagccgcaaggcaggaaacctgtgggggctgtgaaggaagccaggagggtargtggtgctgagggcggggcctcctcatgaggagtgaggggcagctgggagagaggggcctggcagcctgagggcacgggggaggggagactgcccgggaggggaggg

SEQ ID NO: 31598 - DNA, 487 bp, Homo sapiens
cctgtaatcccagcactttgggaggccgaggcgggcggatcacgaggtcaggagtttgagaccagcctggccaacatggtgaaaccccgtctctactaaaaatacaaaaattagctgggcgtggtagcgggtgcctgtaatcccagctactggggaggctgaggcaggagaatcacttgaacctaggaggcggaggctgcagtgagccaaaaatcatgccattgcactccagcctggtctctccatctgtaaaatgggygggctggacccactgctcttcaagggggccttacagccctggggtgggaggggagggcagggcaagggttccagaagggaggccttcagctcaggtttaacaagctgtctgtttggttggaactgatcaaaaccagactggtgctgagccgtgtctctgcttcgcatggagtgaagctgccaagaattcatccctcactgtttccagtaaataactgggctcccacgg

SEQ ID NO: 31599 - DNA, 487 bp, Homo sapiens
cctgtaatcccagcactttgggaggccgaggcgggcggatcacgaggtcaggagtttgagaccagcctggccaacatggtgaaaccccgtctctactaaaaatacaaaaattagctgggcgtggtagcgggtgcctgtaatcccagctactggggaggctgaggcaggagaatcacttgaacctaggaggcggaggctgcagtgagccaaaaatcatgccattgcactccagcctggtctctccatctgtaaaatgggcgggctggacccactgctcttcaagggggccttacagccctggggtgggaggggagggcagggcaasggttccagaagggaggccttcagctcaggtttaacaagctgtctgtttggttggaactgatcaaaaccagactggtgctgagccgtgtctctgcttcgcatggagtgaagctgccaagaattcatccctcactgtttccagtaaataactgggctcccacgg

SEQ ID NO: 31600 - DNA, 890 bp, Homo sapiens
ctgtttttttcaccttcataggagcatcggaaaacttggcccccatgaggagcccgtagctgaggttgtccgcacatcctccccagcggttcccgggcccgggtggctcacctgggacggggccgcaggagcagccrggcaggtcgccggaggtgcaggcccgggcgatggcgtggctgatggcggcggccgacagcgcatacacgaaggccgactcccgggtccctgagggtgggaggggaaggtcagccgacgctgatccagggctaggaccctgcccaggtcagaggtcctccaccttcgcccacaccctgctgtaaccaaggtgacgccagcaggggtcggcactagggccattgagatgtcacccctgcttccccaattccttctgaatataccagctgacagccacactcaggaccccacacccacaggcatgccctcacccacgtcctcctactcacactcacagctctaggcttccacccacttgccctgcactggcattaggggatgctttacagtagtgaggcccaggctctgagctcctgatgcgccagacaaatgcacaaaggacctgctatgcgtggacctgtgtccccccgaaggatgtgttcaagtcctgacccctgtacctgtgagcataatcttatgacgaagtggggtctttgcagatgtaatggggctgagacgaggtcataccggatcagggtgggccctaggccagtggctggtgtccttataagaaaggggaatttcggatacacagacacacaaagagggagcttgccctgtgatgacagaggcagagaccgcagtgacacagctgcaagctaaagaatgccaaggatggcgggccgccaccaggagctagggacgggccaggaagg

SEQ ID NO: 31601 - DNA, 1182 bp, Homo sapiens
taccctttactggacaataaattatataggtatctgagtaagagatatggtcaggaagaggcattgcctcattcagcttttctgtttggtgaacttgcatatgttctcctcacccaccagtcacctctaaaccatattgttccaagacaacaaacagaactcaagtgtgtatctttcaccactggatttgtmtttgctccataaatcttaatgcttaatagggtttctgttagcattttctctatctattttcccataaaatatcacaggccttcttcatatggaattatgggtgatttccttcaatctgcatcatatcaagttgaggttcatgttgatggaaagtaaaacatacgtataaaatatcagtaatgatgttttcccctcctttttagcacatgtgcttgtgagagtcattgtaatacaattctagtctcatgctttgatcatccctaagatgaaaataacatttttagataaaatatctgagttttatgaggccttttgtatatgatgtgatagaatatcagaagaccatacttttttctagttttccatgcaattctatcgtttcatctttactcctaccagagtaattttccagagtagatatcttgtcattcttcctgttgttatcagtaaataagtgaaatgaaaagctagattatataatttatctagaacaagaaagtagaattgaatctatatacattaatgagactaagcagtcaattacacagataggcattttacattttgaagatcatatggacccattgtcagatatattagtatttatgtctacatggacatcacctgtgcatatttatgtagaaatcaataagagctgatttttatttttattatatatattttttgagatagggtcttgctttgttgcccaggctggggtgcagtggtgcaatcactgctcactgtagattcaacctcccaagctcaagcaatccttccaccttggcctcccaaattgctaggacaacaggtgcacatcactatgcccaccttttttttttaacttttgatagagactgggtcttgccatgttgcccaggtttctcttgaactccttgaactcctgggctcaaggaatcctctcatttcagcctcttcaactgctggtattacaagcatgagccaccatatgggctggaagctgatttt

SEQ ID NO: 31602 - DNA, 1182 bp, Homo sapiens
taccctttactggacaataaattatataggtatctgagtaagagatatggtcaggaagaggcattgcctcattcagcttttctgtttggtgaacttgcatatgttctcctcacccaccagtcacctctaaaccatattgttccaagacaacaaacagaactcaagtgtgtatctttcaccactggatttgtatttgctccataaatcttaatgcttaatagggtttctgttagcattttctctatctattttcccataaaatatcacaggccttcttcatatggaattatgggtgatttccttcaatctgcatcatatcaagttgaggttcatgttgatggaaagtaaaacatacgtataaaatatcagtaatgatgttttcccctcctttttagcacatgtgcttgtgagagtcattgtaatacaattctagtctcatgytttgatcatccctaagatgaaaataacatttttagataaaatatctgagttttatgaggccttttgtatatgatgtgatagaatatcagaagaccatacttttttctagttttccatgcaattctatcgtttcatctttactcctaccagagtaattttccagagtagatatcttgtcattcttcctgttgttatcagtaaataagtgaaatgaaaagctagattatataatttatctagaacaagaaagtagaattgaatctatatacattaatgagactaagcagtcaattacacagataggcattttacattttgaagatcatatggacccattgtcagatatattagtatttatgtctacatggacatcacctgtgcatatttatgtagaaatcaataagagctgatttttatttttattatatatattttttgagatagggtcttgctttgttgcccaggctggggtgcagtggtgcaatcactgctcactgtagattcaacctcccaagctcaagcaatccttccaccttggcctcccaaattgctaggacaacaggtgcacatcactatgcccaccttttttttttaacttttgatagagactgggtcttgccatgttgcccaggtttctcttgaactccttgaactcctgggctcaaggaatcctctcatttcagcctcttcaactgctggtattacaagcatgagccaccatatgggctggaagctgatttt

SEQ ID NO: 31603 - DNA, 564 bp, Homo sapiens
aaaaaaaaaaaaaaaaaagagagaccagcctgggcaatatattaagatttcatctccactaaaaagcgaaacaaagtagccagacgtggtagtacatgcatacactcccagctactccaaggcggaggtgggaagaccacttggacccaggatgtccaggctgcagtgagccatgattacacaactgcattccaatctggacaaaagggtaagaccctttctccaaaaaaaaaaggtaaataaaaaatagaaaatacctaagcctgatactttttataataagtactatttccagctacatacccataaaaatagaaaataattatataaataccatgatagtaatataaaaatacaaaactacataattggtactcaatwtttcactataattatgcatatgataggctttttttttttaaagagctggccaggtgcggtggctctcacctgcaatcccagcaatttgggagtccaaggcagacagatcacttgagctcagcagttgaagacaagcctcaccaacattgtgaaaccccatctttagcaaaaaaatacaaaaat

SEQ ID NO: 31604 - DNA, 511 bp, Homo sapiens
acaaaataattgtaggctgtcataagggttataaaaataatcaagatgatatgcatatacaaaagaaatatatgctgtatgtttataattgatgtaaaatctatgtaacctatagaagtaatcattcctataatggtaatataatagatartaactttaggtaatcaaggaaggcctttctctgaggtagcattggggatctgagatatgtaggatgagtatgagcctatttgaagagaagggaagaacactttatagggagagaaaactgcatatgtaaaggtcaaagccaagggtgggaaagagcttgcctagtgttaggaacaggcaggaatccaggctggctgggcagtgggagtgctgtggcatgaggttggaaaacagacaaacgccactttgtgttgagagatttaggtttaatttcaagtgcaaactcgatcgaatctagcttttataaagatcaccctcaatgctatgggagaatagattgtgtagggcaagagtggaagca

SEQ ID NO: 31605 - DNA, 511 bp, Homo sapiens
acaaaataattgtaggctgtcataagggttataaaaataatcaagatgatatgcatatacaaaagaaatatatgctgtatgtttataattgatgtaaaatctatgtaacctatagaagtaatcattcctataatggtaatataatagataataactttaggtaatcaaggaaggcctttctctgaggtagcattggggatctgagatatgtaggatgagtatgagcctatttgaagagaagggaagaacactttatagggagagaaaactgcatatgtaaaggtcaaagccaagggtgggaaagagcttgcctagtgttaggaacaggcaggaatccaggctggctgggcagtgggagtgctgtggcatgaggttggaaaacagacaaacgccrctttgtgttgagagatttaggtttaatttcaagtgcaaactcgatcgaatctagcttttataaagatcaccctcaatgctatgggagaatagattgtgtagggcaagagtggaagca

SEQ ID NO: 31606 - DNA, 908 bp, Homo sapiens
ttacttttaaacataacattgtagctacattagtatattagtattttcatttctatgtttacacaggagcgagaccacatttggcctatcagaaataaggaaaactttttctatccatctttaatatgggaagaatacttttatgtaatttacttgatataaattgacatcataggacatggrgaagaaaggatgctttgaaggtgcaaggtaattactactattttttaaacggctataatttctacttccctacttatcaggtttaattaattactgtgttcactgtgctctctgatttgtagtttatggtgtgtactatataaatgctgtgaatttgccagtgactttatttcaaattgctatttgaagtttcaaattttttttttttccagacggagtctcactctgttgcccaggctggagtgcaatggccgatctcggttcactgcaacctccgcctcctgggttcaagagattctcctgcctcagcctccagagtagctgggattacaggagctcaccaccacgcctggctaatttttatatttttagtagagacagggtttcaccatgttggccaagctggtctcaaattcctgatctcaggcgatccgcccgcatcagcctctcaaagtgctgggattacaggtatgagctgcctcgcttggcttgaagttttaaaattttattccaattagaataaatagagttgagaggcgaagtggtgtcaggataagatattaagcacagtgaataaattgccttaaaagttagaacagctgttttgcaataattacttatactagagtcttatttgatgcttcactcatctgctttccttgacacctaccttttgtgctaggttgctccatctacaaagataaataaggtcaggcctcctgcct

SEQ ID NO: 31607 - DNA, 908 bp, Homo sapiens
ttacttttaaacataacattgtagctacattagtatattagtattttcatttctatgtttacacaggagcgagaccacatttggcctatcagaaataaggaaaactttttctatccatctttaatatgggaagaatacttttatgtaatttacttgatataaattgacatcataggacatggagaagaaaggatgctttgaagrtgcaaggtaattactactattttttaaacggctataatttctacttccctacttatcaggtttaattaattactgtgttcactgtgctctctgatttgtagtttatggtgtgtactatataaatgctgtgaatttgccagtgactttatttcaaattgctatttgaagtttcaaattttttttttttccagacggagtctcactctgttgcccaggctggagtgcaatggccgatctcggttcactgcaacctccgcctcctgggttcaagagattctcctgcctcagcctccagagtagctgggattacaggagctcaccaccacgcctggctaatttttatatttttagtagagacagggtttcaccatgttggccaagctggtctcaaattcctgatctcaggcgatccgcccgcatcagcctctcaaagtgctgggattacaggtatgagctgcctcgcttggcttgaagttttaaaattttattccaattagaataaatagagttgagaggcgaagtggtgtcaggataagatattaagcacagtgaataaattgccttaaaagttagaacagctgttttgcaataattacttatactagagtcttatttgatgcttcactcatctgctttccttgacacctaccttttgtgctaggttgctccatctacaaagataaataaggtcaggcctcctgcct

SEQ ID NO: 31608 - DNA, 1143 bp, Homo sapiens
tgtggatccacagtagatctgaatgcctgggtttggtagcagtcactggggaatggcaagggaaggcgtatgcccgagaccttgtcacctggagaaggaaggatgaaatgctcatgcctatagacccactatgtgctgggctcagcaccaggtgatkcacacacacactgtcccattttacccaacagtggcttaatgtgcagtcacaaaaaaacaacagatatgtgtgaacttagattgtatattcttcattcatttgcatttcctaattttttactatatttatacagcaaaaaaaacctatagaaattagaaattgaaaaatatgcaactgtcaaagaagttatttttctctccgtggcaaggggtgactacggtcagatttcaggaatcagttgcacataatcctaaacagtcctaaattaaggcaaagttaggcggttattataccagctgtatcatccagggactgtgattgtcccaatcgccacgtgtttgatttcaactttgattaactgaaaacaggctcggttggaggcagagagactagtcgcgaggctctggcaataggaaacagtcaaagcgctactgaaccctgttgctatagcaacagcatagcaaagctatttagttgttaactcctgagagaaaaagcaggagaaaaattagtgtaaagttatagcacaatttggactgcaggtatttaacctccttccccccaatgctcctgtgagtatattcagcatgttcccaactagctaaagctgtgctctctctctcttctaggccagaaaccatatctgaaccagcgagactagagttatttgaggatgatccctagaatggagatttcaaatcacactgtgcaaatgaatcccctggggactttgttaaaatgcggaatctgacttgcaagctctcaggtgatgtggatgctgctggtccacaaaccacacttggagtagaaaagccctagtctagactgctaaacttttatgaaggaaggtactggaacaggcatgtcttgttctctgctctatcctccaggtctagcatggtacctgatacagaagtgtggagggggagggcaaggaggctcaatatatgctgtatgaataaatgagtgaatgaataatgaatatt

SEQ ID NO: 31609 - DNA, 791 bp, Homo sapiens
atacattttatgaaaatataaaataaaattttaagaatgtgtattatcatgctcttgttctttatactgttgaataataattctaactagcacactaactaatgtcaataaaaattcaattttttcctgaaccattttttattaaattagctctatatttgctatatgccaatccatttatattttgggtttcttttagaagttatatgaaagtttttatgtcccctttttcctcctaggattttaatacactttactatawtaaaactttcatcctaaaataatttttacagcttctctgcttagaaaaattgtaattgttctgttaataaatccaactaaaattagaaagtgaaaaatttaactaacaaataatttttgttactagttattttgagaaagcatcaaccctaagagtttacaaaactaaatatatgataaggaaaaaaatgttttatcagcgttggggagataatttcttcattgctaccatttacatgaggctggaataaattttctggctagaatctgaaaagattcattctatcataactgtgcttgatctttcgaattatgaaatgcctcattttctgtcaaaaataagtttgaatcattttattgtcacaaaagtaaacaaaaatcactagtattttgtcattcggcatgagaatatctatcctatagaggtaattaggatttgctgaaaacaatgtatttaatgtgtagatatataattttcatatgtaatatttatatattatatcacataaaatatttaataattaaattca

SEQ ID NO: 31610 - DNA, 791 bp, Homo sapiens
atacattttatgaaaatataaaataaaattttaagaatgtgtattatcatgctcttgttctttatactgttgaataataattctaactagcacactaactaatgtcaataaaaattcaattttttcctgaaccattttttattaaattagctctatatttgctatatgccaatccatttatattttgggtttcttttagaagttatatgaaagtttttatgtcccctttttcctcctaggattttaatacactttactatattaaaactttcatcctaaaataatttttacagcttctctgcttagaaaaattgtaattgttctgttaataaatccaactaamattagaaagtgaaaaatttaactaacaaataatttttgttactagttattttgagaaagcatcaaccctaagagtttacaaaactaaatatatgataaggaaaaaaatgttttatcagcgttggggagataatttcttcattgctaccatttacatgaggctggaataaattttctggctagaatctgaaaagattcattctatcataactgtgcttgatctttcgaattatgaaatgcctcattttctgtcaaaaataagtttgaatcattttattgtcacaaaagtaaacaaaaatcactagtattttgtcattcggcatgagaatatctatcctatagaggtaattaggatttgctgaaaacaatgtatttaatgtgtagatatataattttcatatgtaatatttatatattatatcacataaaatatttaataattaaattca

SEQ ID NO: 31611 - DNA, 546 bp, Homo sapiens
aatctgtcttgagttgatttttgtatatggygttaggaagaaatccagtttcgattttctgcatatggctagctagttctcccagcatcattcattaaatagagaatccttcccccattgcttgtttttgtcaggtttgtccaaaatcaaatggttgtaagtgtatgtataaacttatttttttaaatctgaatattattatactatatggatttcctatactttactaattcaattttctgttgataagtaggcaagatttttcttctttgtgaggaatgtatctttattaaaataaatatttttgtacatatttctttacgtactcataccaacatttctatagaataaatttcaaaaattggaagtcctaggtcaaacagtatgtgaacttaaagtcttttagataataaatttcatttcaaaatgaaagcaatgatttgcatattctccaagtataaatgactataccttattcctcacgtctttaccatcactgaatagcatcagaatttaaatactttatctatttataggtaaaattgt

SEQ ID NO: 31612 - DNA, 546 bp, Homo sapiens
aatctgtcttgagttgatttttgtatatggtgttaggaagaaatccagtttcgattttctgcatatggctagctagttctcccagcatcattcattaaatagagaatccttcccccattgcttgtttttgtcaggtttgtccaaaatcaaatggttgtaagtgtatgtataaacttatttttttaaatctgaatattattatactatatggatttcctatactttactaattcaattttctgttgataagtaggcaagatttttcttctttgtgaggartgtatctttattaaaataaatatttttgtacatatttctttacgtactcataccaacatttctatagaataaatttcaaaaattggaagtcctaggtcaaacagtatgtgaacttaaagtcttttagataataaatttcatttcaaaatgaaagcaatgatttgcatattctccaagtataaatgactataccttattcctcacgtctttaccatcactgaatagcatcagaatttaaatactttatctatttataggtaaaattgt

SEQ ID NO: 31613 - DNA, 1274 bp, Homo sapiens
tgcatcaccctattagtatttgtgataaatggtacttttgacattagtttctttaatgtttccacaaatctgatatttttgccagcatttattgttcagaagaaaaccccacatatacaaatttaatttaaaaataatgaccaatgttggaagaaaatgaagtaaagatacctataaaatttctgaagctttcccctcttaacaatgctttctcatttctgtttaaaccaaagggttctttatggactcagttgtgattctgctggggatatcaggtccttttactcaaacttctgctagaatttaatatacatgagaatcaattacagagcaagtttacttctctaatattacattgcccaaaagtccataccaagcttttagattgtatcggaacaaaatttctataaaagtgaatacacagtataaagcagaacactggagaaaatacagactttccttggacttgacgtcgatgctgtgctgaaaggcagtacggtctccacctattagacagagtgagatgagattgcatacagcctccgtgagagggtggagaagtggaaagattcctgcactacgtaacactggggaatgcagctggagtggaattgtcagttcatctctttcacttattgtctattttaccaagtagcaagtggccagtcatgtgatatgggattgcaacagtataaaacatgtcctcaaacttcttcaaatgataattttcctataaaattgattatagttaaaataacagcaggaatccatcccagcggcgtgctttgtttccacraattgctgccacatggagagaggcaatgcagttactttccaagatgtgaatttccaccccttcccacttgaacatggccttccttcccaccttcactgggagggagagcagctcctccctcatcatttcataagcaccacatccagtactctgggccagtatccccctgtggattgtgagtgcacgcaagtagctagaatatctcaaggcaccaagttacccttaaacgtcgtgaaattgaggacacgttgaagtctcctactcctccctgggtctgttagcctttttaaataggaactttgttctcagagggtgttgttaatctagctatcacttagttacataaagataaaatcagaaaatagagaaaaattcaaataaatcaatgcaaattctgctattttcctcctctcctgtcttgtgttttattatctccattcagtttcagccttacccttagaactattcactgagccca

SEQ ID NO: 31614 - DNA, 513 bp, Homo sapiens
gacactttttaagataacagcttaatctgggcattgtgaaacattcaaaaagtataaaatatggagaacctattttttaggtgatggaacacataaagaagtataagtaatagggcaaactcaaagttgtgcacattaaattattactgcaatgcccagcatagactcaaacacgcaattcaactagacaaagatcagagtgtgctagagtatatagatagagaagattttgtgcaatgttgttgttaggtcatgccaagctgcagtaacacattcatcctaatattttaatgattaaagaacmatgtatttgcttatctctcatatagcagtccagggtaggtttggggttagttgagtgacccttttccattatcagaaaagtattcaaactggggatttctttgtctctaccaatgtgtcctcagggcatctatcccagtcagccgaagggaaaagaacacagagaagtatgggaatactcttgggtgagtctactcctaaaaatgcaca

SEQ ID NO: 31615 - DNA, 513 bp, Homo sapiens
taactcattattttagataatagattaagtactacagatgcacctcaatacacggggttacatcctgataaacccattgtacgttgaaaatcctaaattaaaaatgcatttaatacacctaatctaccgatcatcataggtcagcctagcctacctttaatgtgctcagacacatcagcctataactgggtaaaataatctaactcaaagcctattttataataatgtggtgaatatttcatgtcatttattgaatacttcactgaaagtgaaaaacagaatggttgtacgagtactcaaaatgctgtttctactgaatgcgtatggctgttgcaacaycgtaaagtcgaaaaattgtaagttgaaccattgtatatcagggactgtctgtatttatgggacagctgagttgaatgtagagaagggaagttttaaaatgaagcagaatgggttgtgttcccaggattccagacctcagaatatggggtaggagattggggtgaagatgaaatg

SEQ ID NO: 31616 - DNA, 908 bp, Homo sapiens
atatttacggtgatggmtatcccagttaccctgatttgatctttacacattatatgaatgtacttaaatatcacatatactctgaaaatatctacacctattatgtatcaataaagcaaaagagggcatgaaaatttggcgacttatataatgaagatttctgggtagagcagatcagagtttccaagctggtgtaaaatggcttaagaaaccaaggaaagaagactgtttgaggctttatcgtggctagaaggtggggccaggatgagggttcccctatcctgggctgggacctggagagatttgaaattttcataaactccaatggcttttttattggcttgcccacctgcaggggcagaaggggcaaagggactggtgggcttgaaaactgtaaaagaaaaaaataccggcaagaccaaaaacataaaaatgaaaacaaacaaacaaacagaaatggttggttgacatgaactgttcagaacataatcaaaaaaaggaattattttttcctctgagtagttcagattgacaagtgaagacagtatttcagtttatccagtctgagtccagattgtggtgttttttttattaatttgtttatcaggactatagtttccttgaaattcaaggtttctgagagagaactgtacaaatcatgggtgcaaagccggaccataatactaaacatgactagatctctctcaatcatctatctcactctctatatataatttttctaaggtaacaatattttttattgtcactaatagaaaccgataagatataaaatcctttaaaaatagaatgatgctgattctttgccttgggaataaatgtgggtaatacaaacagaagtgttcagtttgaagaaagcaagaatacacagtgaattttaaaaaatgctt

SEQ ID NO: 31617 - DNA, 1102 bp, Homo sapiens
agtttcagctttctacatatggctagccagttttcccagcaccatttattaaatagggaatccttttctcatttctcatttttgtcagatttgtcaaagatcagatggttgtagatgtgtggtgttatttctgaggcctctgttctgttccattggtctawctctctgttttggtaccagtaccatgctgttttggttactgtaggcttgtagtatagtttgaagagaggtagtgtgatgcctccagttttgttctttttgcttaggattgtcttggcaatgtgagctcttttttggttccatatgaactttaaagtagttttctccaattctgtgaagaaagtcattggtagcttgatggggatggcattgaatctataaattaccttgggcagtatggccattttcatgattttgactcttcgtatccatgagcatttcattcactcctcacctgcaccctcctacctggcccttccaagcaccttcagctcctctccctttggctgatctgcctctgcctagaaccatgcagaaatgttccctaggttgtccacgaggctctaatgcagctggaggctgccaccctctcctctagctaatcccttctatagaaagaggagagggtatctggtttgcagaacataatcataaagagggtcatttttttcaaatgttagttttagtaaaaactaacactcctgagtatattctacctgtcaggtgaggttgtaggtattttaattacataacccatacgacaatgctataggtagatactattatctccacttcatacataaagacactgaggaacagagatgttcagtaatttgtccagggtcacagagctaaggagcagtgaagctcaagcagtctgactccagagcctatggtcctaaccactatgtactcatttagttgacagcttttactaatttttcacaaaatctttatttatcctttggaaatctctctctactcaggtgcccattctcctcccttttgatttcctgccattggtcaattattaactgatctaaatagaggcagtgtagagtggtgaggaaatgcatgcagtctagggccaacccgcctggtt

SEQ ID NO: 31618 - DNA, 1102 bp, Homo sapiens
agtttcagctttctacatatggctagccagttttcccagcaccatttattaaatagggaatccttttctcatttctcatttttgtcagatttgtcaaagatcagatggttgtagatgtgtggtgttatttctgaggcctctgttctgttccattggtctatctctctgttttggtaccagtaccatgctgttttggttactgtaggcttgtagtatagtttgaagagaggtagtgtgatgcctccagttttgttctttttgcttaggattgtcttggcaatgtgagctcttttttggttccatatgaactttaaagtagttttctccaattctgtgaagaaagtcattggtagcttgatggggatggcattgaatctataaattaccttgggcagtatggccattttcatgattttgactcttcgtatccatgagcatttcattcactcctcacctgcaccctcctacctggcccttccmagcaccttcagctcctctccctttggctgatctgcctctgcctagaaccatgcagaaatgttccctaggttgtccacgaggctctaatgcagctggaggctgccaccctctcctctagctaatcccttctatagaaagaggagagggtatctggtttgcagaacataatcataaagagggtcatttttttcaaatgttagttttagtaaaaactaacactcctgagtatattctacctgtcaggtgaggttgtaggtattttaattacataacccatacgacaatgctataggtagatactattatctccacttcatacataaagacactgaggaacagagatgttcagtaatttgtccagggtcacagagctaaggagcagtgaagctcaagcagtctgactccagagcctatggtcctaaccactatgtactcatttagttgacagcttttactaatttttcacaaaatctttatttatcctttggaaatctctctctactcaggtgcccattctcctcccttttgatttcctgccattggtcaattattaactgatctaaatagaggcagtgtagagtggtgaggaaatgcatgcagtctagggccaacccgcctggtt

SEQ ID NO: 31619 - DNA, 1102 bp, Homo sapiens
agtttcagctttctacatatggctagccagttttcccagcaccatttattaaatagggaatccttttctcatttctcatttttgtcagatttgtcaaagatcagatggttgtagatgtgtggtgttatttctgaggcctctgttctgttccattggtctatctctctgttttggtaccagtaccatgctgttttggttactgtaggcttgtagtatagtttgaagagaggtagtgtgatgcctccagttttgttctttttgcttaggattgtcttggcaatgtgagctcttttttggttccatatgaactttaaagtagttttctccaattctgtgaagaaagtcattggtagcttgatggggatggcattgaatctataaattaccttgggcagtatggccattttcatgattttgactcttcgtatccatgagcatttcattcactcctcacctgcaccctcctacctggcccttccaagcaccttcagctcctctccctttggctgatctgcctctgcctagaaccatgcagaaatgttccctaggttgtccacgaggctctaatgcagctggaggctgccaccctctcctctagctaatcccttctatagaaagaggagagggtatctggtttgcagaacataatcataaagagggtcatttttttcaaatgttagttttagtaaaaactaacactcctgagtatattctacctgtcaggtgaggttgtaggtattttaattacataacccatacgacaatgctataggtagatactattatctccacttcatacataaagacactgaggaacagagatgttcagtaatttgtccagggtcacagagctaaggagcagtgaagctcaagcagtctgactccagagcctatggtcctaaccactatgtactcatttagttgacagcttttactratttttcacaaaatctttatttatcctttggaaatctctctctactcaggtgcccattctcctcccttttgatttcctgccattggtcaattattaactgatctaaatagaggcagtgtagagtggtgaggaaatgcatgcagtctagggccaacccgcctggtt

SEQ ID NO: 31620 - DNA, 757 bp, Homo sapiens
caagcacagttcccataacaggcccgtgtagaagccaattacccatgaagctggaaaagttcgcacgggcgcctaagatggtaggttgggccgggcgcagtggctcacgcctgtaatcccagcactttgggaggccgaggtgggcggatcacttgaggtcaggagtttaagaccagcctggccaacatggtaaaacaccatctctactaaaaaaaaaatacaaaaattagctgggcattgtggtgggctactgtagtcccagctactcgggaggctgaggcaggagaatcgcttgaaacccgggaggtagaggttgcagtgagccaagatcgtgccactgcactccagcctggtctacagagtgagactctgtcaaaaaaaaaaggcaggtggttactgatagtttagagtgcattcacgagtttattttctttttattaaagagagggcctatataacaggggctttatagaggggcctatataaagccatttaacaggggctttagatttcacaaaacctggaactgcccctgggyccatcatagttatttagtaaatgtttattgagtgaatgaattattgaacaaagttgatatgagtactaaattataaagagcctgtgttttaaaactatgttatttggttagtgcaaactcaaaatgcatttctccacagagatcatgttatatagtggcaatgtcaagaaagtgtatttaaggtggagaaaatatatataatgtgtattctagaaaggg

SEQ ID NO: 31621 - DNA, 525 bp, Homo sapiens
aatttttcagcaaaccttcacaggtgtggctattcttagaataaaataaccacagaaacaaaacacattgaaaatggacaaaggacccaaagataatataaaaggacccaaatgtgayattaaaatggtcaataagtacatggaaaagatgctcagcgccactaattattagggaaatgcaaatgaaaaccataatgagatatcatctcataccaattacagaaaataacgagtgttggtgaggatgtagagaaattgtaaattttgtacattgttggtgagaatgtaaaacgaagaagccactctaaaaatcggtctagtgattcttcaaaatattaaaactagaattatcatatgatccaggaattccacttctggatatatatccccaaataattgaaataatggtgtcagtgttatatttgtatagtcatgatcatagcagcattactcacaatagccaaaaggtaggagtaacccaaatctccattgatgaattcacaggtaaaccaaagtatccagctg

SEQ ID NO: 31622 - DNA, 525 bp, Homo sapiens
aatttttcagcaaaccttcacaggtgtggctattcttagaataaaataaccacagaaacaaaacacattgaaaatggacaaaggacccaaagataatataaaaggacccaaatgtgacattaaaatggtcaataagtacatggaaaagatgctcagcrccactaattattagggaaatgcaaatgaaaaccataatgagatatcatctcataccaattacagaaaataacgagtgttggtgaggatgtagagaaattgtaaattttgtacattgttggtgagaatgtaaaacgaagaagccactctaaaaatcggtctagtgattcttcaaaatattaaaactagaattatcatatgatccaggaattccacttctggatatatatccccaaataattgaaataatggtgtcagtgttatatttgtatagtcatgatcatagcagcattactcacaatagccaaaaggtaggagtaacccaaatctccattgatgaattcacaggtaaaccaaagtatccagctg

SEQ ID NO: 31623 - DNA, 558 bp, Homo sapiens
ggataagttttccctggcttgatatctaaataatctaaaacttttttatttctcatgttcttgtcaaaataaaattaagtaaaagacctagtcagaatgggggggcattcaaaggaatgaacgtaagtgcaaaattgatttgatttagcaarcaaaattatataataaaggatttaaggcatcacatataatacaagaaaaaaatgtgttacgaaatgtcctgcattaacgaatttgaagaagaaagaagagctccatgaaattaaaattgactgcaaaaacataaaaggaactataactataaaagagacacaaattaaaatctataattaaatgtgcttatcaacgctggtttctcacttaaataaaggaacattctatttgatcttcatggttaaaaagataaaatgtccttaaaactgacccttctataaaaatgtagcaaacttggtagccaatttaatgatccgtaaatgaagccaaaaagtcataatctctcattagatgtaacctattgatttctggctattatgacgacaataacatagctgagagagg

SEQ ID NO: 31624 - DNA, 374 bp, Homo sapiens
tatatgtatatgtatacacctaaacacagaagagagagattggaaagtctgctgagccttactggggaatcttgaatttattctgctgtaaatggttaaatattaacaatttttaaagaataaaatgagatcaatagaatgtgtttcagagacataactgcacaaactatatggacaatggattggaataataagagaaagaatacaatagataaatctacaaaaatgtagtcatttgttttcagtttcgagcagatgctatttgcacaaaaatcaataataaaaaaatagctatgagcataaggaagtagatacattaaaaacaaagtggttaracaccttagacatttttttttctaaacaatgtataaaag

SEQ ID NO: 31625 - DNA, 468 bp, Homo sapiens
atatatgcacacatatatatgtgtgtgtgtatatatatayacacacatatatatatgtttctttaaccactccattgatgggcatgaaattatacccacattcttaaaaacaaacatatgaagccctagcttaatattcaggctatcaaatttcaacctctcccgaactagataaaactccgattcttagcatgacatgccaggccctctattatctgtcaaagaacattcattcctttcttctccccacatacaacctgtgttccacccacaccaaacatcaaactcgccgtgcttttttgcagctcccgtggctttggatagtcttctccacttctggaatgccctgccacacctacacaccgcacgtcttaataggaatacgttatgtgcttgactagactcagttctagcacctcagcctctgtaatcgcattctcagtccctggacgcgactaggcaatcatt

SEQ ID NO: 31626 - DNA, 468 bp, Homo sapiens
atatatgcacacatatatatgtgtgtgtgtatatatatacayacacatatatatatgtttctttaaccactccattgatgggcatgaaattatacccacattcttaaaaacaaacatatgaagccctagcttaatattcaggctatcaaatttcaacctctcccgaactagataaaactccgattcttagcatgacatgccaggccctctattatctgtcaaagaacattcattcctttcttctccccacatacaacctgtgttccacccacaccaaacatcaaactcgccgtgcttttttgcagctcccgtggctttggatagtcttctccacttctggaatgccctgccacacctacacaccgcacgtcttaataggaatacgttatgtgcttgactagactcagttctagcacctcagcctctgtaatcgcattctcagtccctggacgcgactaggcaatcatt

SEQ ID NO: 31627 - DNA, 622 bp, Homo sapiens
ctgaccttcatttcatttctttaaaaagtataattggaaatattttttctggataggggtcactgacacttggttaccacagggcacatctgaaaccatcttctcagtcataactgcaaacacatagtttcatctgctttttttcatgttagtgatgggctggtgaactcaagggaatattagatgatcccttttggaggacacatccaaaaggcatgcgtgkggctcacagcttcctgtcatagtggacaagaaataaatgacttcaattcaaatccatttctctctcttgttagacatgtggcctcatcatgtgtctaatgtgtaatccctctagtatctaccccatggaggtagcttcagtacacttaagtgggcataggtgttaaaattttacattaagatctttcttctccagggacatgcctgactcttcattaagaaaaactgttggaagataaggttggataaataggttgcagccacaaatttgaggagggggagggattaaaaaccagacaaagtgcttggatttgataaagaaatatgggagaaatacatgcttttgagccaaagagaagctgtgcttttggaaactgtcttgcaagtgaaaagtagctca

SEQ ID NO: 31628 - DNA, 622 bp, Homo sapiens
ctgaccttcatttcatttctttaaaaagtataattggaaatattttttctggataggggtcactgacacttggttaccacagggcacatctgaaaccatcttctcagtcataactgcaaacacatagtttcatctgctttttttcatgttagtgatgggctggtgaactcaagggaatattagatgatcccttttggaggacacatccaaaaggcatgcgtgtsgctcacagcttcctgtcatagtggacaagaaataaatgacttcaattcaaatccatttctctctcttgttagacatgtggcctcatcatgtgtctaatgtgtaatccctctagtatctaccccatggaggtagcttcagtacacttaagtgggcataggtgttaaaattttacattaagatctttcttctccagggacatgcctgactcttcattaagaaaaactgttggaagataaggttggataaataggttgcagccacaaatttgaggagggggagggattaaaaaccagacaaagtgcttggatttgataaagaaatatgggagaaatacatgcttttgagccaaagagaagctgtgcttttggaaactgtcttgcaagtgaaaagtagctca

SEQ ID NO: 31629 - DNA, 622 bp, Homo sapiens
ctgaccttcatttcatttctttaaaaagtataattggaaatattttttctggataggggtcactgacacttggttaccacagggcacatctgaaaccatcttctcagtcataactgcaaacacatagtttcatctgctttttttcatgttagtgatgggctggtgaactcaagggaatattagatgatcccttttggaggacacatccaaaaggcatgcgtgtggytcacagcttcctgtcatagtggacaagaaataaatgacttcaattcaaatccatttctctctcttgttagacatgtggcctcatcatgtgtctaatgtgtaatccctctagtatctaccccatggaggtagcttcagtacacttaagtgggcataggtgttaaaattttacattaagatctttcttctccagggacatgcctgactcttcattaagaaaaactgttggaagataaggttggataaataggttgcagccacaaatttgaggagggggagggattaaaaaccagacaaagtgcttggatttgataaagaaatatgggagaaatacatgcttttgagccaaagagaagctgtgcttttggaaactgtcttgcaagtgaaaagtagctca

SEQ ID NO: 31630 - DNA, 2693 bp, Homo sapiens
ttgaccttctttcattttgcaactttgtcaaatacagctccagactgtcttctctttctcctctgctctggccacacacatgcccttccaccctgtgtctgcccatagaaatctcgcatcccttccagtattcctgcgcaccgtggcctctgttaggagattcctgtgcagtctcctagcagggcagcccttctgggaattgctccctggtgctcgtgtgcactccatcccagcccttagagctgctttcctggcttttgtctcgtgtcctctgaccacctatcagggcctgtccatggggctgtgtctgcatgggagcagccccaaacacagtccttgtcagcaccccgatctggacctgaattgggcccttgtgctcactacctgtggaccaaagacaaatcaggttctccccatccccagagtggggaaagcagtagtgtgggcctccctggggtccccacgacagtgtaatgagtacgggcacggagcctgctgcatgtctctatggacatttccataacttttctttttttttttttctctgagatggagccttgccctgtcacccaggctggagtgcagtggcacaatcatggctccctgcaacctccacctcccgggttcaagagattctcctgccccagcctctcgagtagctaggattacaggtgcccaccaccaagcctggctaatttttgtatttttagtacagacggggtttcaccaggttggtgagcctggtctcaaactcctgaactcaaattatcctcctgcctcagcctcccaaartgctgggattacaggcatgagccacagcgcccagctaagttttcagtttataaacactaatacctacttgtgtcccatggcctcatctcagccatgtgaggctgatgttgtgcccattgtacagatggcagagcaggctcaggttcaggaagctgctggaagccacccaaccatgaggtgcagagcacaacatctgggacagggtcttcgcgacagctcttgggatcctgtcttctcatgattgtgatctcagagagctttcactgttggatcagaggctgactccagactccaccccagtgttgctggcctgtgagcaccgacagagcagtccttgctggcctgactcatattcctgagtctcaggggttcctgtgccaccagagaatgagctccccaagtgtcagtcacttggttcagtgcctgtatcttaaactgggcaccttcagcaaaagtccagtgtggagctatgtaccctcctgccacagcccaggatctagcacagagctgggtactgtgccatcataagcctccataaagactgctgtaggcatcgcagtgcagatggcaggactgtgcctgggctgcaggcgcacatttgctgggtgtgtgcagtgcagattgcagggctgtgcccgggatgcaggcacacatttaccaggtgtgtgcagtgtggatggcagggctgtgcctgggctgcaggtacacatttaccaggtctgtgcagtgtgggtggcaggactgtgcccaggctgcaggtacacatttaccaggtgcgtgcagtgtgaatggcagggctgtcatgggccgcagctgcacatgtactgggtgtgcacagtgtggatggcagggctgtgcctgggctgccggtacacatttaccaggtgtgtgcagtgtggattgcagggctgtgcctgagctgcaggtgcacatttgccaggtgtgtgcagtgtagatttcaagactcagagaggagacagccagttcctgtcctgcctgagggtcgggcaggggtaaccatctaagaccctgggcatcttccccagcctgggcgattctccaagccatcgcttttcagcaggactgccagcagggcatctgtcatgttcgtccaccagcatcatagcctgttttggggagaagtagtatttccacaccccactcaggctgatagcatttgaggaagaagagaaagaggggcttttgggttttctggtttcctttctgaaggtgaacctgtcactggtgaaaaaaatggtgtttttttttttttttttggaccaagaaagcggccttggcctccagtgccagagcaggctctggctggggcagaggatcctggagaggatgctatgctgtgttgggcgggaagtcacttcctccctccaaacataggtgtccagttctctcttcctccctttgtcaagtaggagctgttatgccaagggcaggcaagaaacaggcccctgagtgctcagtttcatggccgggctttgaagcaggagtttcctcttggccctcaggccacacttctgtagggtgcctctgcagcatttccctccttgggcaggagcctggcttgcagaggacagacagcaggaagaatgctgcctcccccatgccaccagatcctgtcccaaggccagcaggaggggaggggaagcaatctgatcactggagcaggaggggccagctctggagtccacatggctgtggctgggctgtgcttctagaagcagcagctcttgccgcctctctctagggatttttgtctttcttttaaaaacttttttttaaccttcttttttaagacagggtcttgctatgttgcgcaggctggtctcaaattcctaggctcaagtgattctcctgcctcagcctcccaaagtgatgggattgca

SEQ ID NO: 31631 - DNA, 2693 bp, Homo sapiens
ttgaccttctttcattttgcaactttgtcaaatacagctccagactgtcttctctttctcctctgctctggccacacacatgcccttccaccctgtgtctgcccatagaaatctcgcatcccttccagtattcctgcgcaccgtggcctctgttaggagattcctgtgcagtctcctagcagggcagcccttctgggaattgctccctggtgctcgtgtgcactccatcccagcccttagagctgctttcctggcttttgtctcgtgtcctctgaccacctatcagggcctgtccatggggctgtgtctgcatgggagcagccccaaacacagtccttgtcagcaccccgatctggacctgaattgggcccttgtgctcactacctgtggaccaaagacaaatcaggttctccccatccccagagtggggaaagcagtagtgtgggcctccctggggtccccacgacagtgtaatgagtacgggcacggagcctgctgcatgtctctatggacatttccataacttttctttttttttttttctctgagatggagccttgccctgtcacccaggctggagtgcagtggcacaatcatggctccctgcaacctccacctcccgggttcaagagattctcctgccccagcctctcgagtagctaggattacaggtgcccaccaccaagcctggctaatttttgtatttttagtacagacggggtttcaccaggttggtgagcctggtctcaaactcctgaactcaaattatcctcctgcctcagcctcccaaagtgctgggattacaggcatgagccacagcgcccagctaasttttcagtttataaacactaatacctacttgtgtcccatggcctcatctcagccatgtgaggctgatgttgtgcccattgtacagatggcagagcaggctcaggttcaggaagctgctggaagccacccaaccatgaggtgcagagcacaacatctgggacagggtcttcgcgacagctcttgggatcctgtcttctcatgattgtgatctcagagagctttcactgttggatcagaggctgactccagactccaccccagtgttgctggcctgtgagcaccgacagagcagtccttgctggcctgactcatattcctgagtctcaggggttcctgtgccaccagagaatgagctccccaagtgtcagtcacttggttcagtgcctgtatcttaaactgggcaccttcagcaaaagtccagtgtggagctatgtaccctcctgccacagcccaggatctagcacagagctgggtactgtgccatcataagcctccataaagactgctgtaggcatcgcagtgcagatggcaggactgtgcctgggctgcaggcgcacatttgctgggtgtgtgcagtgcagattgcagggctgtgcccgggatgcaggcacacatttaccaggtgtgtgcagtgtggatggcagggctgtgcctgggctgcaggtacacatttaccaggtctgtgcagtgtgggtggcaggactgtgcccaggctgcaggtacacatttaccaggtgcgtgcagtgtgaatggcagggctgtcatgggccgcagctgcacatgtactgggtgtgcacagtgtggatggcagggctgtgcctgggctgccggtacacatttaccaggtgtgtgcagtgtggattgcagggctgtgcctgagctgcaggtgcacatttgccaggtgtgtgcagtgtagatttcaagactcagagaggagacagccagttcctgtcctgcctgagggtcgggcaggggtaaccatctaagaccctgggcatcttccccagcctgggcgattctccaagccatcgcttttcagcaggactgccagcagggcatctgtcatgttcgtccaccagcatcatagcctgttttggggagaagtagtatttccacaccccactcaggctgatagcatttgaggaagaagagaaagaggggcttttgggttttctggtttcctttctgaaggtgaacctgtcactggtgaaaaaaatggtgtttttttttttttttttggaccaagaaagcggccttggcctccagtgccagagcaggctctggctggggcagaggatcctggagaggatgctatgctgtgttgggcgggaagtcacttcctccctccaaacataggtgtccagttctctcttcctccctttgtcaagtaggagctgttatgccaagggcaggcaagaaacaggcccctgagtgctcagtttcatggccgggctttgaagcaggagtttcctcttggccctcaggccacacttctgtagggtgcctctgcagcatttccctccttgggcaggagcctggcttgcagaggacagacagcaggaagaatgctgcctcccccatgccaccagatcctgtcccaaggccagcaggaggggaggggaagcaatctgatcactggagcaggaggggccagctctggagtccacatggctgtggctgggctgtgcttctagaagcagcagctcttgccgcctctctctagggatttttgtctttcttttaaaaacttttttttaaccttcttttttaagacagggtcttgctatgttgcgcaggctggtctcaaattcctaggctcaagtgattctcctgcctcagcctcccaaagtgatgggattgca

SEQ ID NO: 31632 - DNA, 719 bp, Homo sapiens
aaagagaatgaaagcaggtctctactttcagggggctcccagtcctttagaagggatgggcaaggcctggagcaaaggtgctgaccccattggtggyggggcagaagaaaccctgggggctccctggagcgctgacaatggagatgttgcttaagggggagaaggagctgatctggtggaaagtgaaggaagggcctccggtaggagtctgggcaggcacctgtatccatcccacctggtggctcggacctggagggtctctcctgatccccatagacaggcccccacagggacccaggacaggtgtgattcccacctggttcctgatttcaccttgaggctggacccttctcccagccagtaacactcgcagccccccagggctggctgatgttctatgcctgggccctgggctctgctgtctgccctagagccaggctacaggtgagtagagggagaatagggcggggtcatgattccattcacctgggagaaaaacagaggcttccaggcaaagggagtcatgggaagcaacctagccagttctgcatcccaagctgggaggagaaagggagcgggtggaagtaggaaccaagtgagggcagggcatgactgaagggtcggcacagccacactcctggctggactcgctctctgcactttctcagcatgtgaactcctacccatcctttcaaacttttcaattctgtcaccagtgg

SEQ ID NO: 31633 - DNA, 719 bp, Homo sapiens
aaagagaatgaaagcaggtctctactttcagggggctcccagtcctttagaagggatgggcaaggcctggagcaaaggtgctgaccccattggtggtggggcagaagaaaccctgggggctccctggagcgctgacaatggagatgttgcttaagggggagaaggarctgatctggtggaaagtgaaggaagggcctccggtaggagtctgggcaggcacctgtatccatcccacctggtggctcggacctggagggtctctcctgatccccatagacaggcccccacagggacccaggacaggtgtgattcccacctggttcctgatttcaccttgaggctggacccttctcccagccagtaacactcgcagccccccagggctggctgatgttctatgcctgggccctgggctctgctgtctgccctagagccaggctacaggtgagtagagggagaatagggcggggtcatgattccattcacctgggagaaaaacagaggcttccaggcaaagggagtcatgggaagcaacctagccagttctgcatcccaagctgggaggagaaagggagcgggtggaagtaggaaccaagtgagggcagggcatgactgaagggtcggcacagccacactcctggctggactcgctctctgcactttctcagcatgtgaactcctacccatcctttcaaacttttcaattctgtcaccagtgg

SEQ ID NO: 31634 - DNA, 719 bp, Homo sapiens
aaagagaatgaaagcaggtctctactttcagggggctcccagtcctttagaagggatgggcaaggcctggagcaaaggtgctgaccccattggtggtggggcagaagaaaccctgggggctccctggagcgctgacaatggagatgttgcttaagggggagaaggagctgatctggtggaaagtgaaggaagggcctccggtaggagtctgggcaggcacctgtatccatcccacctggtggctcggacctggagggtctctcctgatccccatagacaggcccccacagggacccaggacaggtgtgattcccacctggttcctgatttcaccttgaggctggacccttctcccagccagtaacactcgcagccccccagggctggctgatgtyctatgcctgggccctgggctctgctgtctgccctagagccaggctacaggtgagtagagggagaatagggcggggtcatgattccattcacctgggagaaaaacagaggcttccaggcaaagggagtcatgggaagcaacctagccagttctgcatcccaagctgggaggagaaagggagcgggtggaagtaggaaccaagtgagggcagggcatgactgaagggtcggcacagccacactcctggctggactcgctctctgcactttctcagcatgtgaactcctacccatcctttcaaacttttcaattctgtcaccagtgg

SEQ ID NO: 31635 - DNA, 719 bp, Homo sapiens
aaagagaatgaaagcaggtctctactttcagggggctcccagtcctttagaagggatgggcaaggcctggagcaaaggtgctgaccccattggtggtggggcagaagaaaccctgggggctccctggagcgctgacaatggagatgttgcttaagggggagaaggagctgatctggtggaaagtgaaggaagggcctccggtaggagtctgggcaggcacctgtatccatcccacctggtggctcggacctggagggtctctcctgatccccatagacaggcccccacagggacccaggacaggtgtgattcccacctggttcctgatttcaccttgaggctggacccttctcccagccagtaacactcgcagccccccagggctggctgatgttctatgcctgggccctgggctcygctgtctgccctagagccaggctacaggtgagtagagggagaatagggcggggtcatgattccattcacctgggagaaaaacagaggcttccaggcaaagggagtcatgggaagcaacctagccagttctgcatcccaagctgggaggagaaagggagcgggtggaagtaggaaccaagtgagggcagggcatgactgaagggtcggcacagccacactcctggctggactcgctctctgcactttctcagcatgtgaactcctacccatcctttcaaacttttcaattctgtcaccagtgg

SEQ ID NO: 31636 - DNA, 719 bp, Homo sapiens
aaagagaatgaaagcaggtctctactttcagggggctcccagtcctttagaagggatgggcaaggcctggagcaaaggtgctgaccccattggtggtggggcagaagaaaccctgggggctccctggagcgctgacaatggagatgttgcttaagggggagaaggagctgatctggtggaaagtgaaggaagggcctccggtaggagtctgggcaggcacctgtatccatcccacctggtggctcggacctggagggtctctcctgatccccatagacaggcccccacagggacccaggacaggtgtgattcccacctggttcctgatttcaccttgaggctggacccttctcccagccagtaacactcgcagccccccagggctggctgatgttctatgcctgggccctgggctctgctgtctgccctagagccaggctacaggtgagtagagggagaatagggcggggtcatgattccattcacctgggagaaaaacrgaggcttccaggcaaagggagtcatgggaagcaacctagccagttctgcatcccaagctgggaggagaaagggagcgggtggaagtaggaaccaagtgagggcagggcatgactgaagggtcggcacagccacactcctggctggactcgctctctgcactttctcagcatgtgaactcctacccatcctttcaaacttttcaattctgtcaccagtgg

SEQ ID NO: 31637 - DNA, 600 bp, Homo sapiens
aaagaagaaagaagaaaaaaaactggcatcatggcagatagaatataagagagaacttagaaatgtgattgttcttgcatgtygaatggtgacaaaaattatttttcactggttattcactcagccattacgttatttttacctcaaccctctcaaggcttacctgtctacccgaccactgtcctccagcagagaggttataaacacaggaggtggctggtctgccctgtccccgtgtgatgcaaattcaaagtgaacaggcctcagatacaaatggaactcttcaaaacccatctcccatgccaattctttatagagcctaaaagaaaaaaaagagccaaggacatatgttagtgttttctcctaaaaagaaagcgagtgataagaaaactaagacacctgaacaagaaccaaagtaaagtccaacaaaagcccagatctgtgtgaagtgagcgagtcaaagaggtcttctgctctgcacttgctgtgacagttacagatggtagaaagcagttcaagtaggagatgtgcttgggtgtttactcaactctcattttccacaagctgacttctgtccccagagccctcatgaggtcacca

SEQ ID NO: 31638 - DNA, 600 bp, Homo sapiens
aaagaagaaagaagaaaaaaaactggcatcatggcagatagaatataagagagaacttagaaatgtgattgttcttgcatgttgaatggtgacaaaaattatttttcactggttattcactcagccattacgttatttttacctcaaccctctcaaggcttacctgtctacccgaccactgtcctccagcagagaggttataaacacaggaggtggctggtctgccctgtccccgtgtgatgcaaattcaaagtgaacagrcctcagatacaaatggaactcttcaaaacccatctcccatgccaattctttatagagcctaaaagaaaaaaaagagccaaggacatatgttagtgttttctcctaaaaagaaagcgagtgataagaaaactaagacacctgaacaagaaccaaagtaaagtccaacaaaagcccagatctgtgtgaagtgagcgagtcaaagaggtcttctgctctgcacttgctgtgacagttacagatggtagaaagcagttcaagtaggagatgtgcttgggtgtttactcaactctcattttccacaagctgacttctgtccccagagccctcatgaggtcacca

SEQ ID NO: 31639 - DNA, 614 bp, Homo sapiens
ttgttatatccctttgaggtcagcatagcaagtactgtagactcatttttttttttttctgcagaggaagaaactgaggctaaagaacaaaaacttgctgaaggtcactcagcttgggctgtgggacttgttttcctgccccgagcccagcgtccttcccaccatccaacactgtttcctttcttggtacctccattattagaacacctggatattcttagctaacaatggatgacataaataaacacacggtcatttccccacatttccgcacaggtcctctgcagatggcagagccctttctctaaatgcatggcatgaaaaggcatttcaaaggttggaaagagagcttcagcattaatcatgatgggayagcggaaactggctttgcaagggatggactggacttcagggaagatggacagcctgagctcactttcaggagagctcactttcaggagatcagtcagggctgtcattccagggcctgggtggagggcttctgctgtgccagggaacaggtgtctggactcggtctcccagggtgagcgccgtctgctgccagtccttgcagagactggactgtagctctgagtgcatgatttgtaggccag

SEQ ID NO: 31640 - DNA, 614 bp, Homo sapiens
ttgttatatccctttgaggtcagcatagcaagtactgtagactcatttttttttttttctgcagaggaagaaactgaggctaaagaacaaaaacttgctgaaggtcactcagcttgggctgtgggacttgttttcctgccccgagcccagcgtccttcccaccatccaacactgtttcctttcttggtacctccattattagaacacctggatattcttagctaacaatggatgacataaataaacacacggtcatttccccacatttccgcacaggtcctctgcagatggcagagccctttctctaaatgcatggcatgaaaaggcatttcaaaggttggaaagagagcttcagcattaatcatgatgggatagcggaaactggctttgcaagggatggactggacttcagggaagatggacagcctgagctcactttcaggagagctcactttcaggagatcagtcagggctgtcattccagggcctgggtggagggcttctgctgtgccagggaacaggtgtctggactcggtctcccagggtgagcgccgtctgctgccagtccttgcagagactggactgtagctctgagtgcrtgatttgtaggccag

SEQ ID NO: 31641 - DNA, 441 bp, Homo sapiens
ccctcacccatgtgggtggccatcatccaatctgttgagagcctggacagaacaaaaggcagaggaagggtgaatttgttctccctcttgttggagctgaggcatccatcttctgccctcagacattggcactcctggttctcaggctttcagataattacaccactggctttcctggttctccaacttgcagatagcatatcatgggtcttctcagcctccataatcatgtgagccagttcctattttatatatatatatatcctatttctggggaaacctgacaaatacaaggatgtaaaatgatgagttkgctgtgcttgagcacaagagtcaagaaaacagagtgaaaccctcttttgaatcccaatactccccactcctgggaggagtagaaagccctaagaggatgatcctcctgctccacttagaggatttgag

SEQ ID NO: 31642 - DNA, 1151 bp, Homo sapiens
tggatcccccatcagttgacccaatgcaagaatctcagacacacatgacgcaccagttacaggggttgtttttaaagaaaaaaacaatcccagcaggagggattgctgggattgttttttctttaaagaagaatgttaatattttacttttacagtcattttcctacatcggaatccaagctaatttctaatggccttccataataattctgctttagatgtgtatacagaaaatgaaagaaactagggtccatrtgagggaaaacccaatgtcaagtggcagctcagccaccactcagtgcttctctgtgcaggagccagtcctgattaatatgtgggaattagtgagacatcagggagtaagtgacactttgaactcctcaaggacagagaactgtctttcatttttgaaccctcggtgtacacagaggcgggtctgtaacaggcaatcaacaaacgtttcttgagctagaccaaggtcagatttgaaaagaacagaaggactgaagaccagctgtgtttcttaactaaatttgtctttcaagtgaaaccagcttccttcatctctaaggctaaggatagggaaagggtggatgctctcaggctgagggaggcagaaagggaaagtattagcatgagctttccagttagggctgttgatttatgctttaacttcagagtgagtgtaggggtggtgatgctaccattactgtgaggacctaccagtgtggctggagcagggactctctcccaggccttttactcctcagcacctccctgcatactgattgttgtttttagtttctgtgaaattatattcatgaaatgaaaatagcgcattttactttgctgtagtttcataaggttttatacaaaaaagcaagtaaatatggcagaaaagcactcatttgcccctgctccctcaaaacaccacagaatgacatagaactaaaggcggcaggaatctacaagaatgaagaaaacacagtgatgctacctgcaaaatcttgggagccagaaagcaaatggacaattgataatagagttacaagatgagagaaaacaaaaatgtaacctgttagttgggggagcctagaaacatcctgttttgtaccacagacccctagaaagtttcaagatgtaaaaacact

SEQ ID NO: 31643 - DNA, 1151 bp, Homo sapiens
tggatcccccatcagttgacccaatgcaagaatctcagacacacatgacgcaccagttacaggggttgtttttaaagaaaaaaacaatcccagcaggagggattgctgggattgttttttctttaaagaagaatgttaatattttacttttacagtcattttcctacatcggaatccaagctaatttctaatggccttccataataattctgctttagatgtgtatacagaaaatgaaagaaactagggtccatgtgagggaaaacccaatgtcaagtggcagctcagccaccactcagtgcttctctgtgcaggagccagtcctgattaatatgtgggaattagtgagacatcagggagtaagtgacactttgaactcctcaaggacagagaactgtctttcatttttgaaccctcggtgtacacagaggcgggtctrtaacaggcaatcaacaaacgtttcttgagctagaccaaggtcagatttgaaaagaacagaaggactgaagaccagctgtgtttcttaactaaatttgtctttcaagtgaaaccagcttccttcatctctaaggctaaggatagggaaagggtggatgctctcaggctgagggaggcagaaagggaaagtattagcatgagctttccagttagggctgttgatttatgctttaacttcagagtgagtgtaggggtggtgatgctaccattactgtgaggacctaccagtgtggctggagcagggactctctcccaggccttttactcctcagcacctccctgcatactgattgttgtttttagtttctgtgaaattatattcatgaaatgaaaatagcgcattttactttgctgtagtttcataaggttttatacaaaaaagcaagtaaatatggcagaaaagcactcatttgcccctgctccctcaaaacaccacagaatgacatagaactaaaggcggcaggaatctacaagaatgaagaaaacacagtgatgctacctgcaaaatcttgggagccagaaagcaaatggacaattgataatagagttacaagatgagagaaaacaaaaatgtaacctgttagttgggggagcctagaaacatcctgttttgtaccacagacccctagaaagtttcaagatgtaaaaacact

SEQ ID NO: 31644 - DNA, 1151 bp, Homo sapiens
tggatcccccatcagttgacccaatgcaagaatctcagacacacatgacgcaccagttacaggggttgtttttaaagaaaaaaacaatcccagcaggagggattgctgggattgttttttctttaaagaagaatgttaatattttacttttacagtcattttcctacatcggaatccaagctaatttctaatggccttccataataattctgctttagatgtgtatacagaaaatgaaagaaactagggtccatgtgagggaaaacccaatgtcaagtggcagctcagccaccactcagtgcttctctgtgcaggagccagtcctgattaatatgtgggaattagtgagacatcagggagtaagtgacactttgaactcctcaaggacagagaactgtctttcatttttgaaccctcggtgtacacagaggcgggtctgtaacaggcaatcaacaaacgtttcttgagctagaccaaggtcagatttgaaaagaacagaaggactgaagaccagctgtgtttcttaactaaatttgtctttcaagtgaaaccagcttccttcatctctaaggctaaggatagggaaagggtggatgctctcaggctgagggaggcagaaagggaaagtattagcatgagctttccagttagggctgttgatttatgctttaacttcagagtgagtgtaggggtggtgatgctaccattactgtgaggacctaccagtgtggctggagcagggactctctcccaggccttttactcctcagcacctccctgcatactgattgttgtttttagtttctgtgaaattatattcatgaaatgaaaatagcgcattttactttgctgtagtttcataaggttttatacaaaaaagcaagtaaatatggcagaaaagcactcatttgcccctgctccctcaaaacaccacagaatgacatagaactaaaggcggcaggaatctacaagaatgaagaaaacacagtgatgcyacctgcaaaatcttgggagccagaaagcaaatggacaattgataatagagttacaagatgagagaaaacaaaaatgtaacctgttagttgggggagcctagaaacatcctgttttgtaccacagacccctagaaagtttcaagatgtaaaaacact

SEQ ID NO: 31645 - DNA, 550 bp, Homo sapiens
gaccctttgaggcctcatcccctccacccagtgggcacacaggcctctgaccttcagcgccaagtctcccttgaggtcaccttctcttcatctttcacttcttttctcttcctttcacccctgctggttgcagcgacaaggtccctgccaactgcggtgtgcacactggcgggccttcacctcccttaaaatccagctctcgaaatgyctgcaagggagcagcctgcaatattacctaatttgtctttaatctggtattcctagaataatccagagaatagagtggcctactgtacacactctggattactcaataaagaacatgatgggaaacggcagtatttttctgttttaaaataagtaggtttggagggagctgggaaactgcgggctttagttacaaaatgactataattgtgggagacgtattttctttgaatgttgaaacacattggacaggatatacaatttagaaataatttacagttagagaaaggccctttcatctgagagggggcacatcttctgattggaaaggatggtcccaggg

SEQ ID NO: 31646 - DNA, 547 bp, Homo sapiens
cagtcacattgcacctggtctggaccccagcaagtgctgccctgtgggactccctgcttctccccttgctccacactgtctattctctgtagcctttaagaacaastcaggtcatttcactgtcctgctcaaaaccatcaaatcgtttcccgtttccttcagaatgacattcacagtcctttccgtcacagctctgcgtggcctgtggtgcctctgtatcctcatctctgacttagtttactccaccccattctcctccttcaccagactcccaggcactccttcacgagcagcatgcacctgccccagagccttggcaccagctgctttccctacccagaacactctccttcccacatcttcacagccagctgtttcattccctccaagtcccttatcagagaggctttttcagtcactttgagtaaaacagaaacctaccttttcatcattcttgaccccttaactaaacttgcttgagtttttgttgttgttgtttgctcgttttttacttattaccacttgacatcacttttgtgggaacccc

SEQ ID NO: 31647 - DNA, 547 bp, Homo sapiens
cagtcacattgcacctggtctggaccccagcaagtgctgccctgtgggactccctgcttctccccttgctccacactgtctattctctgtagcctttaagaacaagtcaggtcatttcactgtcctgctcaaaaccatcaaatcgtttcccstttccttcagaatgacattcacagtcctttccgtcacagctctgcgtggcctgtggtgcctctgtatcctcatctctgacttagtttactccaccccattctcctccttcaccagactcccaggcactccttcacgagcagcatgcacctgccccagagccttggcaccagctgctttccctacccagaacactctccttcccacatcttcacagccagctgtttcattccctccaagtcccttatcagagaggctttttcagtcactttgagtaaaacagaaacctaccttttcatcattcttgaccccttaactaaacttgcttgagtttttgttgttgttgtttgctcgttttttacttattaccacttgacatcacttttgtgggaacccc

SEQ ID NO: 31648 - DNA, 547 bp, Homo sapiens
cagtcacattgcacctggtctggaccccagcaagtgctgccctgtgggactccctgcttctccccttgctccacactgtctattctctgtagcctttaagaacaagtcaggtcatttcactgtcctgctcaaaaccatcaaatcgtttcccgtttccttcagaatgacattcacagtcctttccgtcacagctctgcgtggcctgtggtgcctctgtatcctcatctctgacttagtttactccaccccattctcctccttcaccagactcccaggcactccttcacgagcagcatgcacctgccccagagccttggcaccagctgctttccctacccagaacactctccttcccacatcttcacagccagctgtttcattccctccaagtcccttatcagagaggctttttcagtcactttgagtaaaacagaaacctaccttttcatcattcttgaccccttaactaaacttgcttgagtttttgttgttgttgtttgctcrttttttacttattaccacttgacatcacttttgtgggaacccc

SEQ ID NO: 31649 - DNA, 530 bp, Homo sapiens
catatggtaccaaaacaattttctgatccaattaaaatattttaggcaaaatagaaatagaaagcactatggttttacagcataatgcttagagatacttggagattaaaaaccgtatgcatctaaggggagaaattaaaatatagctaaattcaaagcatctgtgctaatggagacatgatggacagtttaaaacgctattatctgttccttctaccttctcctttatcaaatatttaagaggtcatgcagaataattgaaagatcaattataagggcagagtaataagagaagaattggcaccttcaccagcaatcaatgtgcacttgaaggaattcctgacctctctgagacccaacattatcgtcttgaaaatgaaaacaatgacaatggtctcacttgaaaaaaattaatataagaatcaaatgagaatatacattgtattagtctgttttcatgctgctgataaagacatrcctgagactgggcaatttatgaaagaaagaggtttaattggactcccttttcc

SEQ ID NO: 31650 - DNA, 581 bp, Homo sapiens
cgggaatgtacacctcctgagatttgattgcctccttggaactaatgattcttctgtgcttcataagattatcacgggtatgaagtgattttacgaagtcgagagtcattttaaaactttgatggattacacaagcaatagttgttactatataagaaatttccactcaaatctgtaactcctacctgacyttttcttttcaacaatggttatacattttttaaacatgcaatatagttattatccttctagcaacaaaatcagtgagggccagcatgtgaagttctaataaatcctgaactcagtgtgttctaatatgcactgaattagtttttgacacaccctctcccaataccgtgtgatgtaagggttgtgatcagtcttataaattttcatatcatacgcctaagtggtgacagaaattctaagcctaccaattcatttgttcaaaaattcatttgtttctccaaatatgaatttagaagtgtgcttcctaactggcctttaagaagctgtgtatcggctgggtgcagtggctcacgcctgtaatcccagcactttgggaggttgaggcgggtgga

SEQ ID NO: 31651 - DNA, 1191 bp, Homo sapiens
catgaatctaccataacaactacttctccctaggtggactgacctctctgaactttggcactcacattttacatagattacaaagcacctgcttagtctcctcctgtctagtcaaattaccaagaacaattttcaggttttggattttttttttaatcgagtttgtgagacccaatacaaataaattaacatgtacatcaggcactagagcaacagacagacacagaggagagaatgaatatatctgagtgtaggaccccaaagagggctgaactgatcctgacaccagcagggacccaggaaccttctaagccaacttttcccgaggaatattcctcagttacttcctttgtatccacatagcacttatgttagtggcatttagaccaagtcagaggattcctacaaattcagagggctttttttttccttttcttttgttggtaagagaaaaaatatattttaatgattcaatcaaggcaagttttaggggtacaggtcacgtttggccatgtgcttgactgttttagaagtcacaagacggggtcacaatgaatatatcaatcaggatgtctatggacccaagcctcacatgatatgttatagaaggtaactgacaccttccataacaattacacagagtgataaaagaacagagtaataatagtgataacagcagccatgtaagctctggttccagcaaattcaggacatttggaagctcctgaggaggcagtgtggggctggggaccagatcccagmtctagtctgagttcctgctgacctagtctctgcaattccctgaaagccattccaggttttcccattgggccataaacctgccagggttttttgtttggagaagtagtgaattccaggccagatttttctctcaacccatcagctggggctgtgagcccaactgcagccttagcccgcgctttgcttctgctgcactgggttgactcagccaacctcccgggttgcgagcgatgagcagcctcaatacccggtttctctgtctgcagcgggtttacctctctttcaaatggcccgcttgctttggggcttcaatgctggcagagttcctgccactccttcaccctcaatcccagatattagagcagactaccaacagcttggttcctgaactccaggcggcttcagctacccttgggcttgcaggcaccg

SEQ ID NO: 31652 - DNA, 1191 bp, Homo sapiens
catgaatctaccataacaactacttctccctaggtggactgacctctctgaactttggcactcacattttacatagattacaaagcacctgcttagtctcctcctgtctagtcaaattaccaagaacaattttcaggttttggattttttttttaatcgagtttgtgagacccaatacaaataaattaacatgtacatcaggcactagagcaacagacagacacagaggagagaatgaatatatctgagtgtaggaccccaaagagggctgaactgatcctgacaccagcagggacccaggaaccttctaagccaacttttcccgaggaatattcctcagttacttcctttgtatccacatagcacttatgttagtggcatttagaccaagtcagaggattcctacaaattcagagggctttttttttccttttcttttgttggtaagagaaaaaatatattttaatgattcaatcaaggcaagttttaggggtacaggtcacgtttggccatgtgcttgactgttttagaagtcacaagacggggtcacaatgaatatatcaatcaggatgtctatggacccaagcctcacatgatatgttatagaaggtaactgacaccttccataacaattacacagagtgataaaagaacagagtaataatagtgataacagcagccatgtaagctctggttccagcaaattcaggacatttggaagctcctgaggaggcagtgtggggctggggaccagatcccagctctagtctgagttcctgctgacctagtctctgcaattccctgaaagccattccaggttttcccattgggccataaacctgccagggttttttgtttggagaagtagtgaattccaggccagatttttctctcaacccatcagctggggctgtgagcccaactgcagccttagcccgcgctttgcttctgctgcactgggttgactcagccaacctcccgggttgcgagcgatgagcagcctcaatacccggtttctctgtctgcagcgggtttacctctctttcaaatggcccgcttgctttggggcttcaatgctggcagagtycctgccactccttcaccctcaatcccagatattagagcagactaccaacagcttggttcctgaactccaggcggcttcagctacccttgggcttgcaggcaccg

SEQ ID NO: 31653 - DNA, 791 bp, Homo sapiens
  misc_feature (1)...(791): n = A,T,C or G
gggaagtgtgtgtggcaccanccaacacagcaaatgctgccactcgatgccctgttataaaacttgccattcccctctgttcctccctaccttggcctgccacgtatcaacacaaacaggactgcagaaggctccaccgtggagctcagggcatgctcaaaggaacacaaatgcaggtgcatataagggacacagacctagcttgccaagatgcgcccactgagtgctaaagaatgtgaacctgcccatgtgtgcaagtgtgtgagtgcacacacacctgcctgagcagtaagccctgaacagaagccaggcagaactcaggaggattgcggaggagagggcttctattctattgggatgcaaatatcgtggcattcagagaaggtggagaagcagggagcagaggaggagtatggcagagagcttgggggcggagagaagaatcacgagmacacatcatttttctatggctcctttcttcggaggagcccatcgcccctgtaggcgggatgcttcatgccagcatgtgctctgctgatcagagccacgctcctcttaaatcaggactccagggcatggtgcccccagagtttctggaattctgcctcctccagtgaacatttgttgagcacttgtcatgtgccaggtgccaaggataaaggagaacacggattagcagaagaagagacaagttcattcgggtctgagtgtggacttgaggatgatagtcctctcagtgaggcaggtgctaggtacagggtgtgcagtcaggggaggtagcagagggcact

SEQ ID NO: 31654 - DNA, 406 bp, Homo sapiens
gccaatatgacattatcagttcaaagtcacatagcataaaaagttctgtatctactatttttagagtgttttttataagtaattctattgagaaaaatatttacaagttgccctaattgcaacaagtatctcagcagaaatttagttattctcaagacattctcagtgatttaacattttcaacaggctgattaaaatggaaacgctaaaaagttagcattagaataaagaagacaggaagaagaggggtcagataaagyggtaagaccttgcactgcataacaatgttttggtcaacattggactgcatatatgaccaccggtggccctaagattacagtggagctgaaacattcctactgtctagtgatgtcatatctgttgtaatgtcatagatcaatgcatt

SEQ ID NO: 31655 - DNA, 406 bp, Homo sapiens
gccaatatgacattatcagttcaaagtcacatagcataaaaagttctgtatctactatttttagagtgttttttataagtaattctattgagaaaaatatttacaagttgccctaattgcaacaagtatctcagcagaaatttagttattctcaagacattctcagtgatttaacattttcaacaggctgattaaaatggaaacgctaaaaagttagcattagaataaagaagacaggaagaagaggggtcagataaagtggtaagaccttgcactgcataacaatgttttggtcaacattggactgcatatatgaccaccggtggccctaagattacagtggagctgaaacattcctactgtctagtgatgtcatatctgttgtaatgtcatagatcwatgcatt

SEQ ID NO: 31656 - DNA, 2876 bp, Homo sapiens
aagcaattctcatgcctcagcctcccaagtagttgggattacaggcgtgtgccaccacatctggctaatttttatatttttagtagagctggggtttcaccatgttggccaggctggttttgaactcctgacctcaggtgatccgcccacctcagtctcccaaagtgctaggattataagcataagctaccgcgcccagccaaaaaactgaatagttttaatatttatcaagtayttattttgtcccaggccctgttctgagtgctttacatatagcttcacaatgccgacatgagatgactaccgtccggtcttcattttacagatgagggaacttaggcacaaagaggttaagcaacttaattaaagttacacagctagtaagtgggagagcaagatttaaacttgtgctatctgcctctggagtagcgtgagctcttaatcactcgcttggaggattgctggagtaactggcttttctcttgtgctatggacagttgacaatttaacctaagcatataacttttcaatatgtaattgacagtagaagtgtgacaggatggtggtttacacacatgtatgatactcttttctaaataagagtttctgggctgggcaggttggctcacactggtaatcccagcactttaggaggctgaggtgggaggatcacttgagcccagcagtttgagaccaacctgggcaacataggcagaccctgtctctacaaaaaattcaaaaaatgagccaggcatggtgatgcatacctgtggtactagccactgggcagtttgagatgggaggattgcctgggcctggaaggttgagactacagtgagccatgactgcacgactgcactccagcctggacaacagagcaagactttgcctcaaaaaaaaaaaaaaaaattctgtaaatgatttgcgagtgaagtggtgaaactttcttttcaaacctttaaatgcttatgagatcttcttttaccctttcaggagtggtcattcactgtaaccacaggatcccatttggagactggtttgaatatgtttcttcccctaactacttagcagagctgatgatctacgtttccatggccgtcacctttgggttccacaacttaacttggtggctagtggtgacaaatgtcttctttaatcaggccctgtctgcctttctcagccaccaattctacaaaagcaaatttgtctcttacccgaagcataggaaagctttcctaccatttttgttttaagttaacctcagtcatgaagaatgcaaaccaggtgatggtttcaatgcctaaggacagtgaagtctggagcccaaagtacagtttcagcaaagctgtttgaaactctccattccatttctataccccacaagttttcactgaatgagcatggcagtgccactcaagaaaatgaatctccaaagtatcttcaaagaataaatactaatggcagatctgcgatttctgggtccactttctgagatgctttctaaaaccaaccaactgataaaaagtagatgagacttctccaagctgcttcacaagcaaactaaccgaaaaaccgaaaatatacaaacagcttcacacacacacacacacacacacacacacacacacacacacaaaggaagatcatcaatggctgcggtagcctagtaggaatggactatataataatatagcaggtgctcaataactgtttgttgcatttcagtaaaagcagaataacctttcaaaataataacaggctgggtgcaatggctcacacctgttaatcccagcacttcgggaggccaaggtgggcagttcgcttgggcccaagagttcgagaccagcctgggcaacatggtgaaaccctatctccgtgaaaaaatatgaaaattagccaagagtggtggcacatgcctgtagtcccagatacttgggagtgggctgagatgggagaatcgcttgagcccaggaggtcaagggtacagtgagccgaggtcatgccactgcactccagcctggcctgggcaacagagcaagaccctgtctcaaaataataataatatataattttacaccaaaagtttcaggaaaaaacgagtttgttggagttagtttatactttcacatatcaccacaaagatctccagttaaataactatcaatatccatttccattcatctccccctcaaatcatagcctaacagaacactttgaaagctcttttatttaatatttttttacatcctttgaagggagtgcttcaaaaatgaaagcatcagaagataaaatatttttatatttatgcatagcaagccttcgtgaacggaagtgacacactctggattgaataatactgtagcctcattcatatgtagttattcaaattggattaatgtctgtgtgagtttatttgaactagcagaaagtatctgaagatattcaggaataaagtttatacttaaaatagcttatgttaaagaaaatacctgtgattaattcagagggaaataaatgcatggtataaaagaaaaccaaaaacttaaaaaataatactatagcctgagcaacacattaaaactgcacacttgtgcagcgtaagattctctggcttattggctgaggtgttaagtttattccttttatgaagatgtcctattacagtcagctaagcactaaagctttgcatttatatgtactttgctatgggggaaagaaccttatgattaataagacacatatcaaatgcatagtcaatcattcccacccccatccctggagctgtaacccaaaactgttaaactaagattcctttgttttttttgtttttttgagatggagtctcactctgtcgcccagactggagtgcagtggtg

SEQ ID NO: 31657 - DNA, 2876 bp, Homo sapiens
aagcaattctcatgcctcagcctcccaagtagttgggattacaggcgtgtgccaccacatctggctaatttttatatttttagtagagctggggtttcaccatgttggccaggctggttttgaactcctgacctcaggtgatccgcccacctcagtctcccaaagtgctaggattataagcataagctaccgcgcccagccaaaaaactgaatagttttaatatttatcaagtacttattttgtcccaggccctgttctgagtgctttacatatagcttcacaatgccgacatgagatgactaccgtccggtcttcattttacagatgagggaacttaggcacaaagaggttaagcaacttaattaaagttacacagctagtaagtgggagagcaagatttaaacttgtgctatctgcctctggagtagcgtgagctcttaatcactcgcttggaggattgctggagtaactggcttttctcttgtgctatggacagttgacaatttaacctaagcatataacttttcaatatgtaattgacagtagaagtgtgacaggatggtggtttacacacatgtatgatactcttttctaaataagagtttctgggctgggcaggttggctcacactggtaatcccagcactttaggaggctgaggtgggaggatcacttgagcccagcagtttgagaccaacctgggcaacataggcagaccctgtctctacaaaaaattcaaaaaatgagccaggcatgktgatgcatacctgtggtactagccactgggcagtttgagatgggaggattgcctgggcctggaaggttgagactacagtgagccatgactgcacgactgcactccagcctggacaacagagcaagactttgcctcaaaaaaaaaaaaaaaaattctgtaaatgatttgcgagtgaagtggtgaaactttcttttcaaacctttaaatgcttatgagatcttcttttaccctttcaggagtggtcattcactgtaaccacaggatcccatttggagactggtttgaatatgtttcttcccctaactacttagcagagctgatgatctacgtttccatggccgtcacctttgggttccacaacttaacttggtggctagtggtgacaaatgtcttctttaatcaggccctgtctgcctttctcagccaccaattctacaaaagcaaatttgtctcttacccgaagcataggaaagctttcctaccatttttgttttaagttaacctcagtcatgaagaatgcaaaccaggtgatggtttcaatgcctaaggacagtgaagtctggagcccaaagtacagtttcagcaaagctgtttgaaactctccattccatttctataccccacaagttttcactgaatgagcatggcagtgccactcaagaaaatgaatctccaaagtatcttcaaagaataaatactaatggcagatctgcgatttctgggtccactttctgagatgctttctaaaaccaaccaactgataaaaagtagatgagacttctccaagctgcttcacaagcaaactaaccgaaaaaccgaaaatatacaaacagcttcacacacacacacacacacacacacacacacacacacacacaaaggaagatcatcaatggctgcggtagcctagtaggaatggactatataataatatagcaggtgctcaataactgtttgttgcatttcagtaaaagcagaataacctttcaaaataataacaggctgggtgcaatggctcacacctgttaatcccagcacttcgggaggccaaggtgggcagttcgcttgggcccaagagttcgagaccagcctgggcaacatggtgaaaccctatctccgtgaaaaaatatgaaaattagccaagagtggtggcacatgcctgtagtcccagatacttgggagtgggctgagatgggagaatcgcttgagcccaggaggtcaagggtacagtgagccgaggtcatgccactgcactccagcctggcctgggcaacagagcaagaccctgtctcaaaataataataatatataattttacaccaaaagtttcaggaaaaaacgagtttgttggagttagtttatactttcacatatcaccacaaagatctccagttaaataactatcaatatccatttccattcatctccccctcaaatcatagcctaacagaacactttgaaagctcttttatttaatatttttttacatcctttgaagggagtgcttcaaaaatgaaagcatcagaagataaaatatttttatatttatgcatagcaagccttcgtgaacggaagtgacacactctggattgaataatactgtagcctcattcatatgtagttattcaaattggattaatgtctgtgtgagtttatttgaactagcagaaagtatctgaagatattcaggaataaagtttatacttaaaatagcttatgttaaagaaaatacctgtgattaattcagagggaaataaatgcatggtataaaagaaaaccaaaaacttaaaaaataatactatagcctgagcaacacattaaaactgcacacttgtgcagcgtaagattctctggcttattggctgaggtgttaagtttattccttttatgaagatgtcctattacagtcagctaagcactaaagctttgcatttatatgtactttgctatgggggaaagaaccttatgattaataagacacatatcaaatgcatagtcaatcattcccacccccatccctggagctgtaacccaaaactgttaaactaagattcctttgttttttttgtttttttgagatggagtctcactctgtcgcccagactggagtgcagtggtg

SEQ ID NO: 31658 - DNA, 1044 bp, Homo sapiens
tcttactagggcttcaactcaaagcttggaattgagtttggggcaagaaggttcctcaggagggctcatgggctcattaagttccaggttgcccttccagactgcaccagcagctggcagagtcactcctccactgcttccttatcataagtcaaatgctaaggtaaagctgtggagctggrtcctcctcaaacaagggagagaaaagggcatcccatgaattggggtcctggcctagtaaaatgccattcagaaagagaaaacctctcacatagaaaagctccctgtatctgttaactcctgacatggtggagaaaagaaaaaaaaaaaagcttaagtgcagggtggggaaggttcctgggaggaaaaaaactcttgctctatgcaaatgggttccttcaacaagggaaagtctcttaattgctgtaccctccttgcctctaagaacagacagaaatcactttgttctgaactgcatatctggtggctgggccaaatgctcaatctacttagtaatatctctacaatttgcagcaacacgcttaacgttgtaaaagaagaaactggtgccacgacagccttgaagaagaaaaatgccatagaaaagtctggattggaacaaggctgacattcccaacccctcagagcgatgtgggtcagggggtgtcggggtcctctccagcatcctgccctctgtagctgcatcattcattcttaattggctcacgaaaggttcagtgtttcatctaccttcagaaaaatatctgaggacaagaaggctcggaaacaaatgtgaaagaggatttgggtccacatttactcaccctccaggtagtcccatactggccaccaaaatgtcatggtctttctgctctttagctcagctaggtccaagttcttgtctcacaaccaggagtaattagatgcacagacattgaagagtgagtggggtggaatctatcaagcgaaagaaaacctctcagcaaagaggggacacagtggggtggttccctgttcaaaggtgggaaagtccccgatatgcct

SEQ ID NO: 31659 - DNA, 1044 bp, Homo sapiens
tcttactagggcttcaactcaaagcttggaattgagtttggggcaagaaggttcctcaggagggctcatgggctcattaagttccaggttgcccttccagactgcaccagcagctggcagagtcactcctccactgcttccttatcataagtcaaatgctaaggtaaagctgtggagctggatcctcctcaaacaagggagagaaaagggcatcccatgaattggggtcctggcctagtaaaatgccattcagaaagagaaaacctctcacatagaaaagctccctgtatctgttaactcctgacatgrtggagaaaagaaaaaaaaaaaagcttaagtgcagggtggggaaggttcctgggaggaaaaaaactcttgctctatgcaaatgggttccttcaacaagggaaagtctcttaattgctgtaccctccttgcctctaagaacagacagaaatcactttgttctgaactgcatatctggtggctgggccaaatgctcaatctacttagtaatatctctacaatttgcagcaacacgcttaacgttgtaaaagaagaaactggtgccacgacagccttgaagaagaaaaatgccatagaaaagtctggattggaacaaggctgacattcccaacccctcagagcgatgtgggtcagggggtgtcggggtcctctccagcatcctgccctctgtagctgcatcattcattcttaattggctcacgaaaggttcagtgtttcatctaccttcagaaaaatatctgaggacaagaaggctcggaaacaaatgtgaaagaggatttgggtccacatttactcaccctccaggtagtcccatactggccaccaaaatgtcatggtctttctgctctttagctcagctaggtccaagttcttgtctcacaaccaggagtaattagatgcacagacattgaagagtgagtggggtggaatctatcaagcgaaagaaaacctctcagcaaagaggggacacagtggggtggttccctgttcaaaggtgggaaagtccccgatatgcct

SEQ ID NO: 31660 - DNA, 1044 bp, Homo sapiens
tcttactagggcttcaactcaaagcttggaattgagtttggggcaagaaggttcctcaggagggctcatgggctcattaagttccaggttgcccttccagactgcaccagcagctggcagagtcactcctccactgcttccttatcataagtcaaatgctaaggtaaagctgtggagctggatcctcctcaaacaagggagagaaaagggcatcccatgaattggggtcctggcctagtaaaatgccattcagaaagagaaaacctctcacatagaaaagctccctgtatctgttaactcctgacatggtggagaaaagaaaaaaaaaaaagcttaagtgcagggtggggaaggttcctgggaggaaaaaaactcttgctctatgcaaatgggttccttcaacaagggaaagtctcttaattgctgtaccctccttgcctctaagaacagacagaaatcactttgttctgaactgcatatctgrtggctgggccaaatgctcaatctacttagtaatatctctacaatttgcagcaacacgcttaacgttgtaaaagaagaaactggtgccacgacagccttgaagaagaaaaatgccatagaaaagtctggattggaacaaggctgacattcccaacccctcagagcgatgtgggtcagggggtgtcggggtcctctccagcatcctgccctctgtagctgcatcattcattcttaattggctcacgaaaggttcagtgtttcatctaccttcagaaaaatatctgaggacaagaaggctcggaaacaaatgtgaaagaggatttgggtccacatttactcaccctccaggtagtcccatactggccaccaaaatgtcatggtctttctgctctttagctcagctaggtccaagttcttgtctcacaaccaggagtaattagatgcacagacattgaagagtgagtggggtggaatctatcaagcgaaagaaaacctctcagcaaagaggggacacagtggggtggttccctgttcaaaggtgggaaagtccccgatatgcct

SEQ ID NO: 31661 - DNA, 1044 bp, Homo sapiens
tcttactagggcttcaactcaaagcttggaattgagtttggggcaagaaggttcctcaggagggctcatgggctcattaagttccaggttgcccttccagactgcaccagcagctggcagagtcactcctccactgcttccttatcataagtcaaatgctaaggtaaagctgtggagctggatcctcctcaaacaagggagagaaaagggcatcccatgaattggggtcctggcctagtaaaatgccattcagaaagagaaaacctctcacatagaaaagctccctgtatctgttaactcctgacatggtggagaaaagaaaaaaaaaaaagcttaagtgcagggtggggaaggttcctgggaggaaaaaaactcttgctctatgcaaatgggttccttcaacaagggaaagtctcttaattgctgtaccctccttgcctctaagaacagacagaaatcactttgttctgaactgcatatctggtggctgggccaaatgctcaatctacttagtaatatctctacaatttgcagcaacwcgcttaacgttgtaaaagaagaaactggtgccacgacagccttgaagaagaaaaatgccatagaaaagtctggattggaacaaggctgacattcccaacccctcagagcgatgtgggtcagggggtgtcggggtcctctccagcatcctgccctctgtagctgcatcattcattcttaattggctcacgaaaggttcagtgtttcatctaccttcagaaaaatatctgaggacaagaaggctcggaaacaaatgtgaaagaggatttgggtccacatttactcaccctccaggtagtcccatactggccaccaaaatgtcatggtctttctgctctttagctcagctaggtccaagttcttgtctcacaaccaggagtaattagatgcacagacattgaagagtgagtggggtggaatctatcaagcgaaagaaaacctctcagcaaagaggggacacagtggggtggttccctgttcaaaggtgggaaagtccccgatatgcct

SEQ ID NO: 31662 - DNA, 1044 bp, Homo sapiens
tcttactagggcttcaactcaaagcttggaattgagtttggggcaagaaggttcctcaggagggctcatgggctcattaagttccaggttgcccttccagactgcaccagcagctggcagagtcactcctccactgcttccttatcataagtcaaatgctaaggtaaagctgtggagctggatcctcctcaaacaagggagagaaaagggcatcccatgaattggggtcctggcctagtaaaatgccattcagaaagagaaaacctctcacatagaaaagctccctgtatctgttaactcctgacatggtggagaaaagaaaaaaaaaaaagcttaagtgcagggtggggaaggttcctgggaggaaaaaaactcttgctctatgcaaatgggttccttcaacaagggaaagtctcttaattgctgtaccctccttgcctctaagaacagacagaaatcactttgttctgaactgcatatctggtggctgggccaaatgctcaatctacttagtaatatctctacaatttgcagcaacacgcttaacgttgtaaaagaagaaactggtgccacgacagccttgaagaagaaaaatgccatagaaaagtctggattggaacaaggctgacattcccaacccctcagagcgatgtgggtcagggggtgtcggggtcctctccagcatcctgccctctgtagctgcatcattcattcttaattggctcacraaaggttcagtgtttcatctaccttcagaaaaatatctgaggacaagaaggctcggaaacaaatgtgaaagaggatttgggtccacatttactcaccctccaggtagtcccatactggccaccaaaatgtcatggtctttctgctctttagctcagctaggtccaagttcttgtctcacaaccaggagtaattagatgcacagacattgaagagtgagtggggtggaatctatcaagcgaaagaaaacctctcagcaaagaggggacacagtggggtggttccctgttcaaaggtgggaaagtccccgatatgcct

SEQ ID NO: 31663 - DNA, 574 bp, Homo sapiens
ccttataagaaaatgttttaacataatgaaaaacagctaattaagtgaataggacttatgataatgtgtcttctattaaagtctaagtatttctttcaaaaactttgtatgtattctctaaacccaaaatgggagtttcctgtctgtttcagcttcagactacagtcaaatgttcctctttttactctaatagggaattaaactggaatgcacaaagtgacatttttgaacacagaagaatcagatattactaagaaaaatgaacttatttttataactatgtgaatgtcttttaaaaacttggataatagttactattcatgctaaatataataaattggaaagccaaatagcatatttgattttgtcaatctatgctacagaatattataatgagataagaaaaaccctacaaagtttaggagaacatgtttttcagtaatggagtgaactatataacaaaaaatttcaaataaatgggaactttaataagaggtttattttctctcatgtawatgaaacccagagatacaggctattgaagcctaattagttgactgcacaaaatagttca

SEQ ID NO: 31664 - DNA, 770 bp, Homo sapiens
acattcttcccctcatagatcttctaatttttcatagtatttcatgtatcaccacactggcagaaaataaatatccagagtagtatgtatcgcaatagctggcagtgcccacagcaagaacactagataawctttttttctgaagtatttatgtgaactgtgttctaattgaggtcaattttgatatgcaattgatcagacaaattatccatatacattagctggacagcaaaagtgatgaacaagtcttcccttagctcctattatatataatcacacagcaattaaagaagccaaaaggtagcaggaagagatttaaattttgactcaaagaatatggatttgcattctagtcttgctggtttctaattctgtgatcttgaaaaaaatcagattttataaatttctgtttctgacctgagaaatgagaatgatgaacatctataacttactgtgcatatttaatttggcaaagtataggtaatttttaagtgacaaagcatcatgcatatacatacataaggtattgttatctgactagtagagaaaacagaagagcgtagattccttttaggtctaacttccttcagttaatagattcatgaatcattgctcatttttattgaggataactcctgtatttcccttaaaaagtgcctggagggggaggctgaggtgggcggatcatgaggtcaggagatcgagaccatcctggctaacacggtgaaaccccgtctctactaaaaatacaaaaaattagccgggcgcgg

SEQ ID NO: 31665 - DNA, 975 bp, Homo sapiens
ttacccatgcataattctgtacatcatgcaytggtaagttaatatttgtttcctcagttgtgagctcttcaaaatgcttatgtatttcattatccaatactaaaaattccatctattaccactgatctcatcacagaagtctttaaatactgggaagttgtaggccaggcccagtggctcatgcctgtgatcccagcactttgggaggccgagctaggtggatcacctgaggtcaggagttcaagaccagcctggccaacatggtgaaactccatctctactaaaaatataaaaatcagccgggtgtggtggcacatgcctgtaatcccagctacttgggaggctgaggcaggagaactgcttgaacctgggagtcggaggctgcagcgagccgagatcatgccattgcactccagcccagacaagaacgaaaccccatctcaaaaaacaaaaacaaaaacaaaacctgggaagtcatcaagcccaaaaatcttatcactggcaacaaatattatcagtcctttcattttttacaaaatctgccaaatactcaaagctgaataaccatagtttattagttattcttaaaagtaaaaatgtccatgaaaaaagatggttaggtcagcatgtaactcaaccctacaggtgcttttccttaaaacaaccacagtacttcaacacgcagcagaagtgccttgtgtgaccttcccattacatcacacaaagcattaaaaagatgtgcaatctagtgtcaagagttaaccaaaggagtatttttttacgcattcttaagtgaaactgggttaaaaaaataacaaaacaaaactgtagagtgtgtggaatacaatgtctatgagcacactttggtgccactgccttgattcacgcttaggcaccagcagtaccatcaatacaaatgttaacacagagagaaagataacttctcagaaatactatataaaggtttgaccttga

SEQ ID NO: 31666 - DNA, 975 bp, Homo sapiens
ttacccatgcataattctgtacatcatgcactggtaagttaatatttgtttcytcagttgtgagctcttcaaaatgcttatgtatttcattatccaatactaaaaattccatctattaccactgatctcatcacagaagtctttaaatactgggaagttgtaggccaggcccagtggctcatgcctgtgatcccagcactttgggaggccgagctaggtggatcacctgaggtcaggagttcaagaccagcctggccaacatggtgaaactccatctctactaaaaatataaaaatcagccgggtgtggtggcacatgcctgtaatcccagctacttgggaggctgaggcaggagaactgcttgaacctgggagtcggaggctgcagcgagccgagatcatgccattgcactccagcccagacaagaacgaaaccccatctcaaaaaacaaaaacaaaaacaaaacctgggaagtcatcaagcccaaaaatcttatcactggcaacaaatattatcagtcctttcattttttacaaaatctgccaaatactcaaagctgaataaccatagtttattagttattcttaaaagtaaaaatgtccatgaaaaaagatggttaggtcagcatgtaactcaaccctacaggtgcttttccttaaaacaaccacagtacttcaacacgcagcagaagtgccttgtgtgaccttcccattacatcacacaaagcattaaaaagatgtgcaatctagtgtcaagagttaaccaaaggagtatttttttacgcattcttaagtgaaactgggttaaaaaaataacaaaacaaaactgtagagtgtgtggaatacaatgtctatgagcacactttggtgccactgccttgattcacgcttaggcaccagcagtaccatcaatacaaatgttaacacagagagaaagataacttctcagaaatactatataaaggtttgaccttga

SEQ ID NO: 31667 - DNA, 975 bp, Homo sapiens
ttacccatgcataattctgtacatcatgcactggtaagttaatatttgtttcctcagttgtgagctcttcaaaatgcttatgtatttcattatccaatactaaaaattccatctattaccactgatctcatcacagaagtctttaaatactgggaagttgtaggccaggcccagtggctcatgcctgtgatcccagcactttgggaggccgagctaggtggatcacctgaggtcaggagttcaagaccagcctggccaacatggtgaaactccatctctactaaaaatataaaaatcagccgggtgtggtggcacatgcctgtaatcccagctacttgggaggctgaggcaggagaactgcttgaacctgggagtcggaggctgcagcgagccgagatcatgccattgcactccagcccagacaagaacgaaaccccatctcaaaaaacaaaaacaaaaacaaaacctgggaagtcatcaagcccaaaaatcttatcactggyaacaaatattatcagtcctttcattttttacaaaatctgccaaatactcaaagctgaataaccatagtttattagttattcttaaaagtaaaaatgtccatgaaaaaagatggttaggtcagcatgtaactcaaccctacaggtgcttttccttaaaacaaccacagtacttcaacacgcagcagaagtgccttgtgtgaccttcccattacatcacacaaagcattaaaaagatgtgcaatctagtgtcaagagttaaccaaaggagtatttttttacgcattcttaagtgaaactgggttaaaaaaataacaaaacaaaactgtagagtgtgtggaatacaatgtctatgagcacactttggtgccactgccttgattcacgcttaggcaccagcagtaccatcaatacaaatgttaacacagagagaaagataacttctcagaaatactatataaaggtttgaccttga

SEQ ID NO: 31668 - DNA, 1348 bp, Homo sapiens
catgtcctctccagcatctgttgtttcctgactttttaatgatcgccattctaactggtgtgagatggtgtctcattgtggttttgatttgcatttctctaatgaccagtgataagcttttttttcatatgcttgttggccatataaatatcttcttttgagaagtgtctgttcatatctttcgcccactttttgatggggttgtttgatttttctcgtaaatttgtttaagttccttgtagattctagatattagccgtttgtcagatggatagattgcaaaaattttatcccattctatagattgcctgttctttccatagttccattatctctgagcttcaagaatttatgaggaagagaattttgcattgattaagacttttaaatatatgggaaatacctaatttatttataattactttataatttaattatttctcattagctgcacataaaagtatctcaaaacaaataataatgtctccaatatatcactgtctaactttaatcatcttattttaaatatattgttttgctcaaattaaatttatttaattgtacttaattgtatttgctcaaatacaattaaaaattgtatttttttaaatgctacagtaacaaaaagaattttgtttttaatgagtyttaagactaagcattacttagtttgccccagtttttcatacattgtagattctgcttaaaatagctttgccttgtttatacatatgcatttacatggctatttaggcttttaggtcaatttttaaatataaaatttataactagagaaaaataagcaatgtgctcaacttattagggaccagagataattaattactgtacaaaactagattttaattcacagtttatctataagtttataaaaatttacataaatgactaaaaagttttttttttcttttatttcctcatggaatgaaactttttttttttttttagcaaaataacaaaaggatgagtaatcctgtatatctagacttggctagctagagctgcactggagaatttgaccagagtcaagttctagaagactgtgtgtgtcatgctaaaccacttggtcttatgatgtggtcagtgggaaaaccatttggtctttatcatgtggatggtggaaatttgacagagtttttgtttgtttgttttttgttttgtttttttggacagcgtggatgagcagatctggatatcagagatattcttggaatagtgaaggactatttggagggtgaagcttctaaaaggaaaaataaaaataaaaataaaaaaatttaaaaaaatcagttagaaggttgttaccacagtcctcatcggaggaactcca

SEQ ID NO: 31669 - DNA, 1060 bp, Homo sapiens
taataataaaatcagggcatttaggatatccatcaccctgaaaatttctcaattttatgtggtgggaacgttttaagtcctctcttctagttgttaacattttgaaatatatgataaatttttgtttactatagtaatagtcaccccactctgctatggacttttagaacttattccttctatctacctctatgtttgtacccattaatcaacctctctttatctccctctttttacacacacacccttcccagcctctggtaactaccattctactctcaacctccatgaaaggaaaattttagctcacacatatgagtgagaacatgcaatatttgtctttctgtgccttgcttatttcacttaacctaatgacctacatatccatccatgttgctgtaaatgacaggatttcatgtttttatggccaaattgtattctattgtgtatatatgtcacatattctttacccattcgtttttttattttggtaaaaaaactagcaagggagtgataatttaaagacaaatatgatattattgtgcaaatttactaggatgatacagtgacttcaggaaatatatatatatcctgataattcacaaattatcatatatatacacacatttgtatatacacaaatgtgtatatatatatgtagatagatagatatrtagatagatagatagatagatagatagatagatagatagatagatttgtgaatttagaaaccgttacaatcaaagaggagttttggtataacattgataagttctaattcattgttcacatattcataactataaaactatttcttattcagagcaatttttgcatccaaattcagtttctgccccccaaaattcacgaattttcaaaggtggaaaatttcaagttgtggaaaatcactgcagaaagtctgtaactcagtgtaatctaccagcacttaatttggcataaatttgagatcttctaggttgtacttttttaaataacctaggcctaaagaataggataagaaaggcattgaatatacaaactatttaaaaatatatgc

SEQ ID NO: 31670 - DNA, 530 bp, Homo sapiens
  misc_feature (1)...(530): n = A,T,C or G
aaatgagaaagtggaggtccctactccagtccttctaaccacaaagtccctgatcttttctttaaggtgtgcttcctgaggttgacttcagatcgatgtggatgtacacttggaccaagttctacattaggaacactntaagtgattgatctagaggtatgaagtgaatcaagagctttgtgtccttaatatttactaaccggtttgaagggacagaactggattcattcattcattcacaatttatrtagtgccttctttctgatggaagttataatttgaatttggagctacctcaggcttcagtgtctaagggggggatctatcatattgtgcaaatatgagcattgattggaatgcaatttaggagacaactaacagatactaccattgctgtgacctctgcatcataagaaaaataaataagcaggatacaatttcaatttttccctcacatctttctctttctgattaatcatcctttcccctctctcttttatgcctgcccctttaggtctaagtaaattttt

SEQ ID NO: 31671 - DNA, 1047 bp, Homo sapiens
caataaatcaatgttttcttattagtaaataattttaaagtaatttctaatataaacttagtaaagcaaatttttgaaggataagcaatattttatattgctgcagtcactatcatccaaatattccaaaactcctaggtttttagtgagaaaactatgctgttatttctgtaatttgtttgtaaaataaaataaattgagcttgcaaatgtactaaaagctcaatatctttaacaaagtaatacttcacrtttacaagaagatgatatattctttcatctctacgctacaattttgggagggtaagaaatagtatctggtctactgtctctaattttatgtcatttttttcccctttagagagttttctagcatattttagttaagcgaaggccttatagtaatcaaatactaaaaaaactctatctggatgtcagctagttttttaaaggtaaagttgatcctctaggataaaattaattttatagggtaatgaagagtattttttcaattgcattttctaatgacagttttatttattttgggaatttttctcttcaaaatttttaatttgaaaatacgaaaaccataaaaacataaaattacaaacttatacacaaatgttcataaagcttcatttgtaatggtcgcaattggaaaccacccaaatatccattaacgggaatggatgacaaaattgtagtatattagcacaatggaatacaataaaaataagtgaatattgattcacacaacagtgtggatgaatctccagatcattgtgctgaataaaataatttaggcaaaaagaatacatactgtataattccatttatattcaatctagaaaatgcaattgaattcataggaaaagacaaaaagattagtgtttgcctgggaatggggatggagggagggctggattacaaagggttgaggaaatgttggggtgatgcagatgtttatcttgattatagtgatcattttgtgaatgtatagatatgtcaaaactgatcaaagcatatgccttgtgtcatttattagcct

SEQ ID NO: 31672 - DNA, 1047 bp, Homo sapiens
caataaatcaatgttttcttattagtaaataattttaaagtaatttctaatataaacttagtaaagcaaatttttgaaggataagcaatattttatattgctgcagtcactatcatccaaatattccaaaactcctaggtttttagtgagaaaactatgctgttatttctgtaatttgtttgtaaaataaaataaattgagcttgcaaatgtactaaaagctcaatatctttaacaaagtaatacttcacgtttacaagaagatgatatattctttcatctctacgctacaattttgggagggtaagaaatagtatctggtctactgtctctaattttatgtcatttttttyccctttagagagttttctagcatattttagttaagcgaaggccttatagtaatcaaatactaaaaaaactctatctggatgtcagctagttttttaaaggtaaagttgatcctctaggataaaattaattttatagggtaatgaagagtattttttcaattgcattttctaatgacagttttatttattttgggaatttttctcttcaaaatttttaatttgaaaatacgaaaaccataaaaacataaaattacaaacttatacacaaatgttcataaagcttcatttgtaatggtcgcaattggaaaccacccaaatatccattaacgggaatggatgacaaaattgtagtatattagcacaatggaatacaataaaaataagtgaatattgattcacacaacagtgtggatgaatctccagatcattgtgctgaataaaataatttaggcaaaaagaatacatactgtataattccatttatattcaatctagaaaatgcaattgaattcataggaaaagacaaaaagattagtgtttgcctgggaatggggatggagggagggctggattacaaagggttgaggaaatgttggggtgatgcagatgtttatcttgattatagtgatcattttgtgaatgtatagatatgtcaaaactgatcaaagcatatgccttgtgtcatttattagcct

SEQ ID NO: 31673 - DNA, 1118 bp, Homo sapiens
actgtgagccaactaaactaaacctcttttctctatactactcagtctcaggtattcctttttaagtgatgcaagaatggactaaccgttggtacgaaaaataaactactccaaaagtactccacaatgaaccattccaagatggctacaggatcaacccacttaatatttttataagttatctagaacaagaaacaatactgaaatcttctaatatgaagatgaygagaaatgtcaatactaacaaagatcaacaattagaaaaactagggagatatatataaagaaacaaaaatctacaatgaaggtaagcataatataatagatttaatggataataaaactttcaaatcatgatgattaagttcttaaaaatcctcatggtaggagaaatctttctttctttctttctttcttttttgagacggagtctcgctctgttgcccaggctggagtgcagtggcacactcttggctcactgcaacctctgcctcctcggttcaagcgattctcctgcctcagcctccagagtagctgggactacaggcgtgcaccaccacgcccggctaattattgtatttttagtagagacggggtttcaccatattggccaggctggtctcgaactcctgagctcaagtgatccgcccatatcggcctcccaaagtgctgggattacaggcatgagccaccacgcctggccgagaaatcttagataaagaactcataacctaatcttttaatgagattgcaaaacaatctataatggttcacaaatgctttatattccctaaaatgaaatgcggggaacaaagaagacactgaatagctaccaatggtatttctctaccctaaactggtaataagctacactcttaagtagtattagaacttaagatgaaataggtaaatacatggggctaaaataagaaggaaaggatgtagttagttactgggaaggacctgcctcctaccttagctcatagatatttacacttgcatagtcatttaagtttaattctaaaagctgcttgaatatttctgacattagcataaatgtgtccttaaccaggaggtccatggagttttaggacttctgtgaatcctgttaaagaaca

SEQ ID NO: 31674 - DNA, 1118 bp, Homo sapiens
actgtgagccaactaaactaaacctcttttctctatactactcagtctcaggtattcctttttaagtgatgcaagaatggactaaccgttggtacgaaaaataaactactccaaaagtactccacaatgaaccattccaagatggctacaggatcaacccacttaatatttttataagttatctagaacaagaaacaatactgaaatcttctaatatgaagatgatgagaaatgtcaatactaacaaagatcaacaattagaaaaactagggagatatatataaagaaacaaaaatctacaatgaaggtaagcataatataatagatttaatggataataaaactttcaaatcatgatgattaagttcttaaaaatcctcatggtaggagaaatctttctttctttctttctttcttttttgagacggagtctcgctctgttgcccaggctggagtgcagtggcacactcttggctcactgcaacctctgcctcctcggttcaagcgattctcctgcctcagcctccagagtagctgggactacaggcgtgcaccaccacgcccggctaattattgtatttttagtagagacggggtttcaccatattggccaggctggtctcgaactcctgagctcaagtgatccgcccatatcggcctcccaaagtgctgggattacaggcatgagccaccacgcctggccgagaaatcttagataaagaactcataacctaatcttttaatgagattgcaaaacaatctataatggttcacaaatgctttatattccctaaaatgaaatrcggggaacaaagaagacactgaatagctaccaatggtatttctctaccctaaactggtaataagctacactcttaagtagtattagaacttaagatgaaataggtaaatacatggggctaaaataagaaggaaaggatgtagttagttactgggaaggacctgcctcctaccttagctcatagatatttacacttgcatagtcatttaagtttaattctaaaagctgcttgaatatttctgacattagcataaatgtgtccttaaccaggaggtccatggagttttaggacttctgtgaatcctgttaaagaaca

SEQ ID NO: 31675 - DNA, 1272 bp, Homo sapiens
tgcatagtttaaactttaaacaataaattagtttttcatattacatttggatatgaaagggacattcaatacattcacaataaaaataaaatgagttagaataaatgtaacattcatattttccttaaagaaattctcttcttacttcatcttctagtttccagatatccgtttattccagaagtcgaactctacactcatctcaaaactagaggatttccaagaacaaaactacatttaagtctatttctaggctgatcccaacgtactgggcatacttaatcattttctaatagagttgccaaagatttattcctgttcatggacaaattgaaggattacaaataaatgaattctgaaggggatctgactttgttcattgattagaaaacagctgtaaaatttaatagtgcaatacaatgagggtaatatttgagaaaaggaaaaactacaaaaacaaggaaaggatagctcatccagtataaaattaattgtgattctcagayatttactacttagatgttatgtgaatagggatcatgtggtcactgtcacatgaatggaatagcaatcttgcaattttaaagagactaacctaatttttaagttcaaaaaactcagcatttttcaagttgaagaaataacataaagagtactccaatgttaaaatgtagtccaatctttctacccaataatcgagaaaagggtaccagaaaaatatcatcagacacgctgtcctttgttcctcagataaaagcatggagaaatgataattaagccttttttaaaagtctgttaaactactaaaatatgataaattagaagtaaattcacaagtatgttctagtatgtaatacaaagaaataataatttaaatgatctgggtagggtggcacatacctgtaatccctgcacttagtgaggccaaggcagggggatcgcttgagctcaggaatttgagaccagcctgggcaacatggtgaaaccccatctccgccaaaaatacaaaaatcatagttgggtgtggcggtgtgtacctgtagtcccagctacccaggaggttgaggtaggaggataccttgagtgaaggaggtaaaggctacagtgagccaagattgcaccactgcactccagcccaggtgacagagcaacactctgtctcaaatgaataaataaaatataataaaatgacttctaaagaaaacaatagcatttatgctggcctttacagtgtgcaacgtacgttcagtatattattttactagataaatg

SEQ ID NO: 31676 - DNA, 1272 bp, Homo sapiens
tgcatagtttaaactttaaacaataaattagtttttcatattacatttggatatgaaagggacattcaatacattcacaataaaaataaaatgagttagaataaatgtaacattcatattttccttaaagaaattctcttcttacttcatcttctagtttccagatatccgtttattccagaagtcgaactctacactcatctcaaaactagaggatttccaagaacaaaactacatttaagtctatttctaggctgatcccaacgtactgggcatacttaatcattttctaatagagttgccaaagatttattcctgttcatggacaaattgaaggattacaaataaatgaattctgaaggggatctgactttgttcattgattagaaaacagctgtaaaatttaatagtgcaatacaatgagggtaatatttgagaaaaggaaaaactacaaaaacaaggaaaggatagctcatccagtataaaattaattgtgattctcagacatttactacttagatgttatgtgaatagggatcatgtggtcactgtcacatgaatggaatagcaatcttgcaattttaaagagactaacctaatttttaagttcaaaaaactcagcatttttcaagttgaagaaataacataaagagtactccaatgttaaaatgtagtccaatctttctacccaataatcgagaaaagggtaccagaaaaatatcatcagacacgctgtcctttgttcctcagataaaagcatggagaaatgataattaagccttttttaaaagtctgttaaactactaaaatatgataaattagaagtaaattcacaagtatgttctagtatgtaatacaaagaaataataatttaaatgatctgggtagggtggcacatacctgtaatccctgcacttagtgaggccaaggcagggggatcgcttgagctcaggaatttgagaccagcctgggcaacatggtgaaaccccatctccrccaaaaatacaaaaatcatagttgggtgtggcggtgtgtacctgtagtcccagctacccaggaggttgaggtaggaggataccttgagtgaaggaggtaaaggctacagtgagccaagattgcaccactgcactccagcccaggtgacagagcaacactctgtctcaaatgaataaataaaatataataaaatgacttctaaagaaaacaatagcatttatgctggcctttacagtgtgcaacgtacgttcagtatattattttactagataaatg

SEQ ID NO: 31677 - DNA, 619 bp, Homo sapiens
taactaatatatggacaggaagttaatagactgactgtgccaccttaaaactcgtatgttgaagccctaacctccaacgtggtggtattgggagatgggccttttggaaggtaagtgtgtttgaatgaggtgaagaggttggggacttcgtgatgggattattgtccttacaagaaaagacaccagagagcttgttctgtctctttgggcyatgtgaagacatggtgagaaagcagccagctgtaagccagagagtcctcaccagaacctaaccatgctggtgatatcctcatctcagacttctaacctccagaactgtgagaaaataaacttctttgtttaaaccacctagtctggtattttgttacggcagcctgagcagaccaatatagattgtataaatttcagtttgtttaaaaggacaggccgggtgtggtggctcacgcctataatcccagcactttgggaggcagaggcgggcggatcacaaggtcaggagatcgagaccatcctggctaacacagtgaaaccccgtctctactaaaaatacaaaaaattagccgggcgtggtggcgggtgcctgtagtcccagctactcgggaggctgaggcaggagaat

SEQ ID NO: 31678 - DNA, 529 bp, Homo sapiens
acatgcccatcctgatactttgaataatctggaaaattgctgtaaaaagaaagagcaaatattaaaataagytttgaataaaataggtctggtgtctaacaaatatttattaaggtagctgaagaatccaaaggtactcttacatttgcaaatggtacataacttcagtataataagaagtgaagacaggcctgtctgaataaataaaacaatgaaatatccctgagttatttttttatcttagcttcgctgaactttatgtctaagtatccaagagaacttgcagataagtaatcattttacaaagaacttaaagcaccaaagccaacaggtttttccagcatagaattattttggtttataagcatccttttaaggcctggcctgtaacacatgcatgtttcctcattctcacaaagctgaaattcaatcatcttcaggttatataaactgcttggctctcatccatttatcaggaaagcttccaattggtaagtgaagaagaaaggcaaagtgaaacgttaaacag

SEQ ID NO: 31679 - DNA, 529 bp, Homo sapiens
acatgcccatcctgatactttgaataatctggaaaattgctgtaaaaagaaagagcaaatattaaaataagctttgaataaaataggtctggtgtctaacaaatatttattaaggtagctgaagaatccaaaggtactcttacatttgcaaatggtacataacttcagtataataagaagtgaagacaggcctgtctgaataaataaaacaatgaaatatccctgagttatttttttatcttagcttcgctgaactttatgtctaartatccaagagaacttgcagataagtaatcattttacaaagaacttaaagcaccaaagccaacaggtttttccagcatagaattattttggtttataagcatccttttaaggcctggcctgtaacacatgcatgtttcctcattctcacaaagctgaaattcaatcatcttcaggttatataaactgcttggctctcatccatttatcaggaaagcttccaattggtaagtgaagaagaaaggcaaagtgaaacgttaaacag

SEQ ID NO: 31680 - DNA, 1081 bp, Homo sapiens
tcccattatattccctgggacaagcctcttcagagacatggagccaaggtagaattccccaaacaggcttcttctcctccagggctgtgagctttgggttagttggagtggaggttcttaacatgactccatggatggctgtcacaggtcttcagagcctggatgctggtctcaaaattgtattttgggtgtatttttctggagaaagtccatagttttcatcagtgtctccacgggtactttgccatcctaaaggttaaacatctagtaattaaggatagagctaagctgaacctttcatcttttcaagccactggtagcctgcaaactcaagttgtggtcttcaactagtttagcattgcccttgaagagtaaccatagccaggagtcctaatcaagtgcactgtggaagccagtttctgggtgaattgtggactggtgatgagcttgtttagagctaataatcgattagatctgatacttagcatcagatcaagaaccaacggcccatgtgttacttttaacctctaactggctgtctgaccttgaaccagtggcaactcctgtctgggcctcagtttccctttgggaagagacatttctgaagtgtgtacatgtgtgtactgtctttcacagccaagagccttaagggtacatgtaaggaaagaacacgtcatcttgtttttttttgttgtttgtttgtttttgagacagggtctcactctgttgcccaggttggagtacagtggcacattcacagctcactgcagcctcaacctcctgggctccagtgatcttcccacctcagccttcccagtagctagtactacaggcatataccaccaagcctaggtaattatttttaatttttaaattttttgttgaggtggaagtctcatgttgcccaggctggtcttgaactccgggmctcaagtgatcctcccgcctgagcctcccaaagtgctggaattacaggtgtaaaccaccacctggggcctgtaatcttgtaatgttccatcctgcatcgacaactccctgagcttctggtggagaaggatggttcttaacctcagaggaatgt

SEQ ID NO: 31681 - DNA, 761 bp, Homo sapiens
agagtgagaacgaactaatacagaagccagttataaaagaccacatattgcaagattcattcatataaaatgtctagaacaggaaattctatatatagagaaagcagatccctaattgacagggctgggagggacaggggttaggggaatcagctaaagggcacagtgtttctttttgaatgttcaaaaatggaccgtggagatagttgtctgtatctgtaaaaatactgaaaatcattgagttgtacactttcaaggagtgaattgtatgacgtgtgtgatttatatctcaataaatttgtttaaagaaataactcagagttggccaggcatggtcgctcatgcctgtaatcccagcactttgggaggccgaggcaggcagatcacttcaggtcaggagtttgagaccagcctggccaacatggtgaaatcccatctctactaaacaaaaatacaaaaattagccaggcgtggtgctgtgcacctgttatcccagctattcaggacgctgaggcagcagaatcgcttgaacccaggaggcggagkttgctgtgagccgagatcatgccactgcactccagcctgggtgacagagtgagactccatctcaataaaaaaataaataaaataataactcagaggcatgtggggctgcagtcacagaatagcatctaaaccaaggttctgtttgatgggaacagcactaggattcaggtctggggttccagtgtttgtgaacgacaggaaataccaagaggaag

SEQ ID NO: 31682 - DNA, 508 bp, Homo sapiens
actcagtgttctgggggtgcctatttctgtcctgcttgtcagaagaaaagctgacaagtatcgcccaaacaggtttcgtccgcatgcaaaacagtttggggacagactgctcaaccacgagttggctgaaaaaaagaaattcctaacgcatcataatacatgttgtttttcaccagagagagtattctccctaatgctatctttatattttagtttgaaaagtttgcaatggctttccatccattgaaaatatacatgagcagaatcagctaaattttctcataaaatattttggtagcattgagccagagaaagtggtttacttatattaattggaagcactgcgatagaacaggcttcttttgggttgccgatgaatttatcatatggctctkctgtagccttagacaatatagaatccacaaagaatgtcaactgttagccatgtaaagtaagatatcacatatcacatcatacatcaaactgagttctcactattttcttggga

SEQ ID NO: 31683 - DNA, 525 bp, Homo sapiens
cctttttatgttcttaagtaatttagaacattgttattttaataaaaaattaaataggacatatttttgtttacacaaatattttgttaattttttctatcataatttgtatggtagcaaactttaaattatcacaagtaataaaagtaaaatcaattacatttttatacatcaaagatcaccaytgcccttttgccatttatctataataaagcaagactactgagaaaacaatgtatgtaataaattgctgaatatgagtcactatatgtaattcttattctcatcactgttcacttcagctagcacatcagaatttaaaaatcataaaattttaacttagaaacacttttacagctagtttaacgactcactagatatttacattaactctgtaatattcctctcaactgctcagttatattctgaatttttccagtggtagaatttctcaaccagcatttttccagaggtagcatttctaaaccagggttttgttaacttgtttcaggaaactgatttaac

SEQ ID NO: 31684 - DNA, 660 bp, Homo sapiens
aacatcgctgtccaaaccacatcattttttgtctactcactaagcatttcctacttttccaaagtcagcattaaactgattcatactgcaccatgtcttcagaggaagaaaaaaaagacaaagattttaactagatattttttttctccagagatcttaagaagaaccatgctaatcaaatcatgggagcatcctctaagctactattgcttcatcagatctgtttyaaaaccgttagtgttacatgaaccaagaagctggaaataaacagaaggcagtttatcaaagtttaatgaaaaataagtgaccactcttccaaagtccagagaaacaataaaacaagagttgcaattaatacaattgagtaaacacagcatcatgggaattctttgtctaacaggagaactgaaagaaggtgtaatatctttcctttacaggtataaatctaaacctaactctgttttatactcattaaaagaggaaaagggaggctacttttgcaatttaaaccttgggtggctgattaaccaggtgccaatagtatctaagactactcctggaggcaaatgtctaatttatgcctcaaataaaaaaattaccagtcactcaaataagcaatcagggtaatggatcagtccatcaaaaaagcttctggccagg

SEQ ID NO: 31685 - DNA, 646 bp, Homo sapiens
tggactagcacattattctaaccttccatttccatatccctctggcattcacctacttctttcatgtggaccccgtcaggatttcaaaatgaaaagatgcctctcacatcagcttcagactttctctcccccatgcagggctaaggctgtttacaggagcctatgaggttctgcctcatctacttttccttttatatttctttcctactgtttctgccctaactacaagttaaagtccttttttttagaagtctatctcattcattagaggttctcatttcaaagcccaaaacatagttttctattttcctactaaccctgaagccttccttcctgttaactctttttctscaggtccttggtaaagaaaacctgttttatagaggcagagtggtacaagaacttgccttttatttttaaatggagtttcactcttgtcacccctggctcaggtcactgcaacctctgcctcccgggttcaagtgattctcctgtctcagcctcccgagtagctgggattacaagcacccaccacaacccccagataattttcctatttttagtagagatggggtttcatcaagttggccagtctggtctcgaactcctaacctcaggtgatctgcccgcctctgcctccgaagtg

SEQ ID NO: 31686 - DNA, 1145 bp, Homo sapiens
agcctctcttgtgaggccctgggcacatcactgccctctgtgggctctgtttcctcatctggcagatgaacaaaygatgagcctgttgagcagcctcacagcgtcctgatggggttcagtaaggaagggaatttatgggtgcttgtaccttgctcttcccacgaaggatgatggtgagagcactgctgagagccacatgaaactgagtcatcaggaggccctgtgaggaaggcgtggttccatcacacttccttgatgaaaaaatagtctcagggaggtccggccacctgcccaaggtgacacaagcagtaagtgttggagctgggagtgaatctagaatcagggcagagtggagttggtgggagcattgcaacagctcactcaggctggttatctaggacctgaggtcaagggggcttaggtataactgagggaggagagaatagtctccctgaccttgttcctgaccctggcaggtggagacctccaaactggccatgcaggagatgattcctcacacagcacagatgaggctgtggggcagcaggtgagtggatctgtggtgggaggggctccagggagccgaagggcagtcttcttccccaccagctggaggcctccacatcaagagagcagggggtcttcctcccccagccctgccctcctgtggccacagggcctgaaatgcctccattagagggagcagagaaaccaaccgcctgggcaagctgggctcagtgtagatttggggaacagtgagacaggggaccccatgccctcatgacttgttaaaatcccagcatagaagtaactgggggtgtctagtggccttgggggccagccggggagatgggggagaggaggggagggctgggggaggcagctgagggtcctgggctgttccaggttggagaccttgggaaccagtgtccaggcagaagtgggtggtgagatttcaggggacagatcttgggtgggcacctgataatgggagctcaccaccactaccaccccaatggccagggtgacgtgccttctctgggccggtggggggtgggggttcctcattaacctggtgaagctgggcactgccatgaaggactgtgtgggtgggagtgagcctggggcaggcaggttggggacca

SEQ ID NO: 31687 - DNA, 1145 bp, Homo sapiens
agcctctcttgtgaggccctgggcacatcactgccctctgtgggctctgtttcctcatctggcagatgaacaaacgatgagcctgttgagcagcctcacagcgtcctgatggggttcagtaaggaagggaatttatgggtgcttgtaccttgctcttcccacgaaggatgatggtgagagcactgctgagagccacatgaaactgagtcatcaggaggccctgtgaggaaggcgtggttccatcacacttccttgatgaaaaaatagtctcagggaggtccggccacctgcccaaggtgacacaagcagtaagtgttggagctgggagtgaatctagaatcagggcagagtggagttggtgggagcattgcaacagctcactcaggctggttatctaggacctgaggtcaagggggcttaggtataactgagggaggagagaatagtctccctgaccttgttcctgaccctggcaggtggagacctccaaactggccatgcaggagatgattcctcacacagcacagatgaggctgtggggcagcaggtgagtggatctgtggtgggaggggctccagggagccgaagggcagtcttcttccccaccagctggaggcctccacatcaagagagcagggggtcttcctcccccagccctgccctcctgtggccacagggcctgaaatgcctccattagagggagcagagaaaccaaccgcctgggcaagctgggctcagtgtagatttggggaacagtgagacaggggaccccatgccctcatgacttgttaaaatcccagcatagaagtaactgggggtgtctagtggccttgggggccagccggggagatgggggagaggaggggagggctgggggaggcagctgagggtcctgggctgttccaggttggagaccttgggaaccagtgtccaggcagaagtgggtggtgagatttcaggggacagatcttgggtgggcacctgataatgggagctcaccaccactaccaccccaatggccagggtgaygtgccttctctgggccggtggggggtgggggttcctcattaacctggtgaagctgggcactgccatgaaggactgtgtgggtgggagtgagcctggggcaggcaggttggggacca

SEQ ID NO: 31688 - DNA, 429 bp, Homo sapiens
tatttaacttaatcattccagagtctgccctcyttcatatttaccttgcaaaactccccaagggtagtaacagcctctgaccaccctttttccaactttcacttcaaccatactccctaccacagcaaacggtaacagtccctagaaaacaagaatgatatgaattgaattctctagcaccaataaagcttactatattactctcactcctgttataaaaatgacagcgatgacaatattgtaataaatttaattagggatctaccctgtgtctcattttaagacttgacagtatgcgctaattggtttctgtcagcatcagtctcaggctgtgcacacaattggaaactgtctactaagcagagcctaaagcaaggtatcctgctgtaggaaacacaaagaaaaaggatttttagtagacatcatttt

SEQ ID NO: 31689 - DNA, 528 bp, Homo sapiens
gtatattaataagcaaaatctaatattaggacaatttttaaaccatattttaagaagtgcattttttgtcattgaaaaatgtcaaagaacaaaataagacacacttctataacctcatctggattcattaagcagtaacatttatgccatacctgatatctcttcccctatttcctccaaccccctcgctctctctccatatgcacacacacacacacacacacacacacacacacacacacrgacacatagacagaaattcccttttctcaactgtccaaaaattaggctgcagacatcaggacacttcattcctaagtatttcagttctcaagaacaggacattcttctacagaaccacagtaccagtaccacaccttagaaaatcattactagccgggcatggtggcacatgcctgtaataccagctactccggaggctgaggcaggagaatcagttgaacctgggaggcagaggttgcagtgagccgagatcgcgccattgcactccagcctaggcaacaagag

SEQ ID NO: 31690 - DNA, 528 bp, Homo sapiens
gtatattaataagcaaaatctaatattaggacaatttttaaaccatattttaagaagtgcattttttgtcattgaaaaatgtcaaagaacaaaataagacacacttctataacctcatctggattcattaagcagtaacatttatgccatacctgatatctcttcccctatttcctccaaccccctcgctctctctccatatgcacacacacacacacacacacacacacacacacacacacggacacatagacagaaattcccttttctcaactgtccaaaaattaggctgcagacatcaggacacttcattcctaagtatttcagttctcaagaacaggacattcttctacagaaccacagtaccagtaccacaccttagaaaatcattactagccgggcatggtggcacatgcctgtaataccagctactccggaggctgaggcaggagaatcagttgaacctgggaggcagaggttgcagtgagccgagatcgygccattgcactccagcctaggcaacaagag

SEQ ID NO: 31691 - DNA, 916 bp, Homo sapiens
agtgggatgtggcttccccaggttgcaaccccaaggaagtctctggaagcagcaccagtcctgatgggggagcagaagagctgccatcctcagtcagggtccgagtcagggtccgaggagagctgctgctccatagtctcgcacatggcatcctgcagggacgtaagatgaccccggggactcatccccattggctggatgactctgttcctgttggggaaaggtgcagtggggctggggaaggggcccagttggccaggcaggggtcctrctcacccgtggctgctaccttcctctctaccaagtaggctgctcccatttactggggaagcctggttggaccttctgttaactgggcccaaaccctaactgctgcctcctggctttaagcagtttcctattttaaacatctaaattggccttaagcaggctcttaatttggacactgggccatctccaataaatctggcgacattagtctcttttttttttttgagacgaagtctcactctgttgccaggctggagtgcggtggcacaatgtcagctcactgcaagctctgcctcctgggttcaagtgattcccctgcctcaacctcccgagcagctgggactacaggcgcccaccaccacgcccagctaactttttttttgtattttagcagagatggggtttcaccatgttggccaggatggtctcgatctcctgaccttgtgatctacctgcctcagtctcccaaagtgctgggattataggcgtgagctaccacgcccggccttagacagtctcttaatttctctgggcctcagttatcatctgtaaaatggggcacaatactgatctcaatatacccatcccctgggcgatttcctcccgggcaagtgatttcaaacgtgagcaatgcaacctaatacca

SEQ ID NO: 31692 - DNA, 916 bp, Homo sapiens
agtgggatgtggcttccccaggttgcaaccccaaggaagtctctggaagcagcaccagtcctgatgggggagcagaagagctgccatcctcagtcagggtccgagtcagggtccgaggagagctgctgctccatagtctcgcacatggcatcctgcagggacgtaagatgaccccggggactcatccccattggctggatgactctgttcctgttggggaaaggtgcagtggggctggggaaggggcccagttggccaggcaggggtcctactcacycgtggctgctaccttcctctctaccaagtaggctgctcccatttactggggaagcctggttggaccttctgttaactgggcccaaaccctaactgctgcctcctggctttaagcagtttcctattttaaacatctaaattggccttaagcaggctcttaatttggacactgggccatctccaataaatctggcgacattagtctcttttttttttttgagacgaagtctcactctgttgccaggctggagtgcggtggcacaatgtcagctcactgcaagctctgcctcctgggttcaagtgattcccctgcctcaacctcccgagcagctgggactacaggcgcccaccaccacgcccagctaactttttttttgtattttagcagagatggggtttcaccatgttggccaggatggtctcgatctcctgaccttgtgatctacctgcctcagtctcccaaagtgctgggattataggcgtgagctaccacgcccggccttagacagtctcttaatttctctgggcctcagttatcatctgtaaaatggggcacaatactgatctcaatatacccatcccctgggcgatttcctcccgggcaagtgatttcaaacgtgagcaatgcaacctaatacca

SEQ ID NO: 31693 - DNA, 916 bp, Homo sapiens
agtgggatgtggcttccccaggttgcaaccccaaggaagtctctggaagcagcaccagtcctgatgggggagcagaagagctgccatcctcagtcagggtccgagtcagggtccgaggagagctgctgctccatagtctcgcacatggcatcctgcagggacgtaagatgaccccggggactcatccccattggctggatgactctgttcctgttggggaaaggtgcagtggggctggggaaggggcccagttggccaggcaggggtcctactcacccgtggctgctaccttcctctctaccaagtaggctgctcccatttactggggaagcctggttggaccttctgttaactgggcccaaaccctaactgctgcctcctggctttaagcagtttcctattttaaacatctaaattggccttaagcaggctcttaatttggacactgggccatctccaataaatctggcgacattagtctcttttttttttttgagacgaagtctcactctgttgccaggctggagtgcggtggcacaatgtcagctcactgcaagctctgcctcctgggttcaagtgattcccctgcctcaacctcccgagcagctgggactacaggcgcccaccaccacgcccagctaactttttttttgtattttagcagagayggggtttcaccatgttggccaggatggtctcgatctcctgaccttgtgatctacctgcctcagtctcccaaagtgctgggattataggcgtgagctaccacgcccggccttagacagtctcttaatttctctgggcctcagttatcatctgtaaaatggggcacaatactgatctcaatatacccatcccctgggcgatttcctcccgggcaagtgatttcaaacgtgagcaatgcaacctaatacca

SEQ ID NO: 31694 - DNA, 1246 bp, Homo sapiens
gtaaatctgtggattaagtaatgtcttagtaggtattgggaaaatttgaaactagtaacatggaggactattgtcattgtttatttcaaagccagttaaaattctgcaaagcagtgtacataaaaataatttcaagaaatttataaaataccgagattatggtgtataaacaactttagattctttgtttaagaaattctgccagtttgtaatatatgcttcattcaaagtagctaagggctgtacctggcyaatagtaggcacctaatatttgttgaaaaggaatactgagtagctgggacctcctgagtagctgggaccacacacatttaacctgtatttataaaattactgtttagagaataacatttgatggaatcatgcttttactttctgcttacgactcaattgtttgtactgacattaacatcccaaatccttagcatggcctacaaggccctgagcaatgtggcacctgctgaagcctgctgcctcatttaataactctttgtctctttcccagatccagccactctaacattttttagctcctggaccaagacaagctcttcccagaacctgacctttgtacctgttctttattcctggagtatttttcccctgacaaattacttatcatctatcataattcaggttaaatggcactaactcagggaaggcttccctaactgcctcccttctccaaccaaattaggaacaattatatggccacatagtatcgaatcaagtttataattttaaaataattgggagattttgttgtttaacacttgttttcactataagactgtaattacatgcaagtaagaaccatgcctgtttgttcactcctgccacagtcagaatagtgcctggaatatgcagtaagggctgaacaatcactaaataaatgaacaagtgaataaatggatattgtctcatttttagaacagagtactgaatggatcatgaacactatctggtatgtcacgtaggtaatttacaagggctacaatttcagctcagatttaccttttcctggatacaggtcttgataggtctcttgatgtcatttcacttcagattcttctttagaaaacttggacaatagcatttgctgtcttgtccaaattgttactaagaatcaagagagatatctgacatgaaatgacattggaaaacattaaacacgattgaaataatgctagccaatatggttattattagaaaccaattacattttcaa

SEQ ID NO: 31695 - DNA, 1246 bp, Homo sapiens
gtaaatctgtggattaagtaatgtcttagtaggtattgggaaaatttgaaactagtaacatggaggactattgtcattgtttatttcaaagccagttaaaattctgcaaagcagtgtacataaaaataatttcaagaaatttataaaataccgagattatggtgtataaacaactttagattctttgtttaagaaattctgccagtttgtaatatatgcttcattcaaagtagctaagggctgtacctggctaatagtaggcacctaatatttgttgaaaaggaatactgagtagctgggacctcctgagtagctgggaccacacacatttaacctgtatttataaaattactgtttagagaataacatttgatggaatcatgcttttactttctgcttacgactcaattgtttgtactgacattaacatcccaaatccttagcatggcctacaaggccctgagcaatgtggcacctgctgaagcctgctgcctcatttaataactctttgtctctttcccagatccagccactctaacattttttagctcctggaccaagacaagctcttcccagaacctgacctttgtacctgttctttattcctggagtatttttcccctgacaaattacttatcatctatcataattcaggttaaatggcactaactcagggaaggcttccctaactgcctcccttctccaaccaaattaggaacaattatatggccacatagtatcgaatcaagtttataattttaaaataattgggagattttgttgtttaacacttgttttcactataagactgtaattacatgcaagtaagaaccatgcctgtttgttcactcctgccacagtcagaatagtgcctggaatatgcagtaagggctgaacaakcactaaataaatgaacaagtgaataaatggatattgtctcatttttagaacagagtactgaatggatcatgaacactatctggtatgtcacgtaggtaatttacaagggctacaatttcagctcagatttaccttttcctggatacaggtcttgataggtctcttgatgtcatttcacttcagattcttctttagaaaacttggacaatagcatttgctgtcttgtccaaattgttactaagaatcaagagagatatctgacatgaaatgacattggaaaacattaaacacgattgaaataatgctagccaatatggttattattagaaaccaattacattttcaa

SEQ ID NO: 31696 - DNA, 866 bp, Homo sapiens
attgaattttggaatatttccaccattatgtaaatgttttggtaggtaatttatttggagtgagtttctgcgccaagcccgaattttttattttattttccttattatttggtgttaaacaggtttaatgacggtcatggcaactttttggcacaatgaaaaatatcgcccacgatcaacgtgttctgttctggggaagggggcaaaggcagggtgaatcactttcttaaaaagtatagctcaagttgggagtgcagagggaatggggagaaaaccctcccgctgcctgtgtcgaagtgcaggagcccccacccccatactcacctgagtccagcccctctggggaaagaaggggtgcatgaactccccctagtccacaggcgcctccctgtggcccaaggccctcttcacactccatcttgtagccccagcaggagctattttccgaaaagtgaaaagctctgaaggtcccacaattcatggtatgtacaggggctcggaggagggaaactgcccagctttcccccggcacagctgcaggggtagggggtatagataagaggagcaggccttgcgaggcgtggtggctcacgcctgtaatcccagcactttgggagggggaggcaggcagatcacgatgtcaggagatcgaaatcagcctggccaagatgatgaagccccgtctgtactaaaaatacaaaaattagccggacgtggtagcgtccacctgtaatcctagctacccggaaggctgaggcaggagaatggcgtgaacccggcgggaagaggttgcagtgagccaagatcgcaccactgcactccagcctgggcracagagcaagactcggtctcaaaaaaaaaaaaaa

SEQ ID NO: 31697 - DNA, 518 bp, Homo sapiens
ctcagctctcattgtctcttgtctgctcccatgtaatgcatacttttcaccttctgccatgattgtgagcctccccatccacatggaactgtgattccatgaaactctttttattcataaattacccggtcttggatatgtctttatcagcagcatgaaaatggactaatgcaagcagaataagcagaattcttcgatacygactcagcaccccacacacgttggttccaagatgtagaaatggaagcttcaaggcttttaacatctggacatcaaaactggaagttttactttcactgtattttattggtcaaagcagtcaaagagcccacccaggttcaaggagaaagaatatgtccccacgttttcaacaggatggtgccacaaaatttctagtcatcttaattcaccacagatagaaatatgaagagctcatttgttatgttatttgtgaatgcagactaaagatatttgttggtttatatagtagtgggaaaatgagaacttttaaaatattc

SEQ ID NO: 31698 - DNA, 1007 bp, Homo sapiens
tttcaaggaatgcttaatggcacaggcactggctgcaataaaatgtcacaagtgcaggaagcacacaaggctgccagctytgccacagcagtccccacactcggctgcctccatggcacctgcgcacgtgggtgtccgtgagtgcttactggttggctgatagattggctgaatgaatgaacaggggaggaaaggagagaagggagacgtggagatgaaatgcatgccatgttcttggtgctacctctgggtgcaggagtcaaggtctttttcaatggcctctttatactttttgatcagtccccaagctttgcacatgtccagtgtcacagtcaaagagggctgcatgttttaagagtccagtggtcagagcactcacacccatgtactccgcagacccaaacctgaggcccagcagcacagggggccacaagtccacactggggctggccccacagaggcgggagctcagggagggacacaaactccacagggaagccaacaacagatgcctcatttctgaataaagaaatgccagacacgatgtgggagaaaaggaaaccaggcagccagaggggccacatgaccccacagacaaccccagggacacgcagaccacacacagcccaaggacacgctgagaaatgtaaaccggagtccaggctcccaggcatgagccgtgagcgctgacaagtcgggacagagctggggtccaggctcccaggcatgagcgcaggagcactgacaagtcgggacagagctggggtccaggctcccaggcatgagcgcgggagcactgacaagtcgggacagagctggggtccaggctcccaggcatgagcgcgggagcactgacaagtcgggacagagctggggtccaggctcccaggcatgagcgcgggagcactgacaagtcgggacagagctggggtccaggctcccaggcatgagcgcgggagcactgacaagtcgggacagagctggggtccaggctcccaggcatgagc

SEQ ID NO: 31699 - DNA, 1007 bp, Homo sapiens
tttcaaggaatgcttaatggcacaggcactggctgcaataaaatgtcacaagtgcaggaagcacacaaggctgccagctctgccacagcagtccccacactcggctgcctccatggcacctgcgcacgtgggtgtccgtgagtgcttactggttggctgatagattggctgaatgaatgaacaggggaggaaaggagagaagggagacgtggagatgaaatgcatgccatgttcttggtgctacctctgggtgcaggagtcaaggtctttttcaatggcctctttatactttttgatcagtccccaagctttgcacatgtccagtgtcacagtcaaagagggctgcatgttttaagagtccagtggtcagagcactcacacccatgtactccgcagacccaaacctgaggcccagcagcacagggggccacaagtccacactggggctggccccacagaggcgggagctcagggagggacacaaactccacagggaagccaacaacagatgcctcatttctgaataaagaaatgccagacacgatgtgggagaaaaggaaaccaggcagccagaggggccacatgaccccacagacaaccccagggacacgcagaccacacacagcccaaggacacgctgagaaatgtaaaccggagtccaggctcccaggcatgagccgtgagcgctgacaagtcgggacagagctggggtccaggctcccaggcatgagcgcaggagcactgacaagtcgggacagagctggggtccaggctcccaggcatgagcgcrggagcactgacaagtcgggacagagctggggtccaggctcccaggcatgagcgcgggagcactgacaagtcgggacagagctggggtccaggctcccaggcatgagcgcgggagcactgacaagtcgggacagagctggggtccaggctcccaggcatgagcgcgggagcactgacaagtcgggacagagctggggtccaggctcccaggcatgagc

SEQ ID NO: 31700 - DNA, 1007 bp, Homo sapiens
tttcaaggaatgcttaatggcacaggcactggctgcaataaaatgtcacaagtgcaggaagcacacaaggctgccagctctgccacagcagtccccacactcggctgcctccatggcacctgcgcacgtgggtgtccgtgagtgcttactggttggctgatagattggctgaatgaatgaacaggggaggaaaggagagaagggagacgtggagatgaaatgcatgccatgttcttggtgctacctctgggtgcaggagtcaaggtctttttcaatggcctctttatactttttgatcagtccccaagctttgcacatgtccagtgtcacagtcaaagagggctgcatgttttaagagtccagtggtcagagcactcacacccatgtactccgcagacccaaacctgaggcccagcagcacagggggccacaagtccacactggggctggccccacagaggcgggagctcagggagggacacaaactccacagggaagccaacaacagatgcctcatttctgaataaagaaatgccagacacgatgtgggagaaaaggaaaccaggcagccagaggggccacatgaccccacagacaaccccagggacacgcagaccacacacagcccaaggacacgctgagaaatgtaaaccggagtccaggctcccaggcatgagccgtgagcgctgacaagtcgggacagagctggggtccaggctcccaggcatgagcgcaggagcactgacaagtcgggacagagctggggtccaggctcccaggcatgagcgcgggagcactgacaagtcgggacagagctggggtccaggctcccaggcatgagcgcrggagcactgacaagtcgggacagagctggggtccaggctcccaggcatgagcgcgggagcactgacaagtcgggacagagctggggtccaggctcccaggcatgagcgcgggagcactgacaagtcgggacagagctggggtccaggctcccaggcatgagc

SEQ ID NO: 31701 - DNA, 1007 bp, Homo sapiens
tttcaaggaatgcttaatggcacaggcactggctgcaataaaatgtcacaagtgcaggaagcacacaaggctgccagctctgccacagcagtccccacactcggctgcctccatggcacctgcgcacgtgggtgtccgtgagtgcttactggttggctgatagattggctgaatgaatgaacaggggaggaaaggagagaagggagacgtggagatgaaatgcatgccatgttcttggtgctacctctgggtgcaggagtcaaggtctttttcaatggcctctttatactttttgatcagtccccaagctttgcacatgtccagtgtcacagtcaaagagggctgcatgttttaagagtccagtggtcagagcactcacacccatgtactccgcagacccaaacctgaggcccagcagcacagggggccacaagtccacactggggctggccccacagaggcgggagctcagggagggacacaaactccacagggaagccaacaacagatgcctcatttctgaataaagaaatgccagacacgatgtgggagaaaaggaaaccaggcagccagaggggccacatgaccccacagacaaccccagggacacgcagaccacacacagcccaaggacacgctgagaaatgtaaaccggagtccaggctcccaggcatgagccgtgagcgctgacaagtcgggacagagctggggtccaggctcccaggcatgagcgcaggagcactgacaagtcgggacagagctggggtccaggctcccaggcatgagcgcgggagcactgacaagtcgggacagagctggggtccaggctcccaggcatgagcgcgggagcactgacaagtcgggacagagctggggtccaggctcccaggcatgagcgcrggagcactgacaagtcgggacagagctggggtccaggctcccaggcatgagcgcgggagcactgacaagtcgggacagagctggggtccaggctcccaggcatgagc

SEQ ID NO: 31702 - DNA, 1007 bp, Homo sapiens
tttcaaggaatgcttaatggcacaggcactggctgcaataaaatgtcacaagtgcaggaagcacacaaggctgccagctctgccacagcagtccccacactcggctgcctccatggcacctgcgcacgtgggtgtccgtgagtgcttactggttggctgatagattggctgaatgaatgaacaggggaggaaaggagagaagggagacgtggagatgaaatgcatgccatgttcttggtgctacctctgggtgcaggagtcaaggtctttttcaatggcctctttatactttttgatcagtccccaagctttgcacatgtccagtgtcacagtcaaagagggctgcatgttttaagagtccagtggtcagagcactcacacccatgtactccgcagacccaaacctgaggcccagcagcacagggggccacaagtccacactggggctggccccacagaggcgggagctcagggagggacacaaactccacagggaagccaacaacagatgcctcatttctgaataaagaaatgccagacacgatgtgggagaaaaggaaaccaggcagccagaggggccacatgaccccacagacaaccccagggacacgcagaccacacacagcccaaggacacgctgagaaatgtaaaccggagtccaggctcccaggcatgagccgtgagcgctgacaagtcgggacagagctggggtccaggctcccaggcatgagcgcaggagcactgacaagtcgggacagagctggggtccaggctcccaggcatgagcgcgggagcactgacaagtcgggacagagctggggtccaggctcccaggcatgagcgcgggagcactgacaagtcgggacagagctggggtccaggctcccaggcatgagcgcgggagcactgacaagtcgggacagagctggggtccaggctcccaggcatgagcgcgggagcactgacaagtcgggacagagctggggtccaggctccmaggcatgagc

SEQ ID NO: 31703 - DNA, 553 bp, Homo sapiens
agagccagagctgggcctgcctctgctgaatggcaccaaggtccctgccatcagccctgctgaccctgcccagcacagacacaggagcagtgccggctgctgaaggctggggcaggagacgcgctccccgaggggccacgctgatgctgctgggcggggacagggcactctgctggcttctgcttctgggagtgaagggcaggagcctgcatgtcactctgcacatcctgcataagatctccgggctgagacaggcccttaggtaaggcacggacagggtgccccaccgcaagaggagtcctgcattggcgacacacttccctgctcagcccccaggagctggcagcacaggcccccamgccagagtcacccaggctggagaggaaagatcagaggcccctcccaagggctccccagtggaagacccagccggattcctcggagaagcacagggcaaacccaccctggcacaggcagctgggaccaccaaacgcttaaggaaatcatccagaaagaaaagagtaaggtccaacactggcagaaaaacagcaac

SEQ ID NO: 31704 - DNA, 756 bp, Homo sapiens
ccagcccccccaggccctccgcgtgcctccactctgcagggcacccgtagcctccagagaacagtcatgacccagcgtccttgtaggcacggtacccgggcatcacgttcccaagcccgcccattccggccacctccagcccacaggatgtgccaggtcgtgccgagggcctcctaaggagcgtgggattgtcagaacagattgcagcatggatttttggaggattaaagttaattaaagagctcttccttgctttcacgtccttgtgtctgccagctatttacatgctaatgctgccctgacaccgaggatgaggggtgtctgccgcactgcactgcgctgtcaggaggggaaccacaggagaaggaggggagcgcagtgctatgtattaccctgtgcccctccgatgggacaggggcgtggatgcagacacattcgaaagtcagyggcagggtcgttttcttgtatttcctgaagtgtcttcgtggctgacttggatgttctccattcaggcccccccttacactgcataattgaatgcattctgcgtggaaatatcttcgcataagcaattttataaataaagagattgtggagagtagggtctgaagtttctaagtgcagggctgtgttttccagaagcccatccttcttggcgaaggtgactttcagcttcacggggtcggcctgtggcagcgtcctctggccctcagcagcactgccttgatgtggacgtggacgtggatgtggacgtgg

SEQ ID NO: 31705 - DNA, 587 bp, Homo sapiens
tgtmccacaccgcacttgactctgtttatttgggacccatgattatcagaagtgctatttttaacaaatacttctgagaaataatctgaacacttaattggatgcaaaagagtggctatttactattctaccctttaattagcataatcagtgtttccagcagcaaaagcaattggaaaatcgcttgttttgttaggttcattcttctcccttagcgtagtgtggcatcagcatggttattattcttaaattgcctctttaaaacgaagagctggtgcttcttacaggcaattcctaactcttgggttttgtagagggtccaaaactctttagaacctataattcaaggaaaggctccactttggttttgcattttgtctggtctctttgggtgacagaatttatgtcacaaggtgcacatgttttggggaggctcatggacagcccatcgctcttgtgctttggtaggaaatatgtgcagttatggggaaggagttagttactcatctagggaacaattgggtagaaagagatggactccctgtatttgaaattcagaactcaagcttggctctaagtgtttcctt

SEQ ID NO: 31706 - DNA, 587 bp, Homo sapiens
tgtcccacaccgcacttgactctgtttatttgggacccatgattatcagaagtgctatttttaacaaatacttctgagaaataatctgaacacttaattggatgcaaaagagtggctatttactattctaccctttaattagcataatcagtgtttccagcagcaaaagcaatkggaaaatcgcttgttttgttaggttcattcttctcccttagcgtagtgtggcatcagcatggttattattcttaaattgcctctttaaaacgaagagctggtgcttcttacaggcaattcctaactcttgggttttgtagagggtccaaaactctttagaacctataattcaaggaaaggctccactttggttttgcattttgtctggtctctttgggtgacagaatttatgtcacaaggtgcacatgttttggggaggctcatggacagcccatcgctcttgtgctttggtaggaaatatgtgcagttatggggaaggagttagttactcatctagggaacaattgggtagaaagagatggactccctgtatttgaaattcagaactcaagcttggctctaagtgtttcctt

SEQ ID NO: 31707 - DNA, 587 bp, Homo sapiens
tgtcccacaccgcacttgactctgtttatttgggacccatgattatcagaagtgctatttttaacaaatacttctgagaaataatctgaacacttaattggatgcaaaagagtggctatttactattctaccctttaattagcataatcagtgtttccagcagcaaaagcaattggaaaatcgcttgttttgttaggttcattyttctcccttagcgtagtgtggcatcagcatggttattattcttaaattgcctctttaaaacgaagagctggtgcttcttacaggcaattcctaactcttgggttttgtagagggtccaaaactctttagaacctataattcaaggaaaggctccactttggttttgcattttgtctggtctctttgggtgacagaatttatgtcacaaggtgcacatgttttggggaggctcatggacagcccatcgctcttgtgctttggtaggaaatatgtgcagttatggggaaggagttagttactcatctagggaacaattgggtagaaagagatggactccctgtatttgaaattcagaactcaagcttggctctaagtgtttcctt

SEQ ID NO: 31708 - DNA, 587 bp, Homo sapiens
tgtcccacaccgcacttgactctgtttatttgggacccatgattatcagaagtgctatttttaacaaatacttctgagaaataatctgaacacttaattggatgcaaaagagtggctatttactattctaccctttaattagcataatcagtgtttccagcagcaaaagcaattggaaaatcgcttgttttgttaggttcattcttctcccttagcrtagtgtggcatcagcatggttattattcttaaattgcctctttaaaacgaagagctggtgcttcttacaggcaattcctaactcttgggttttgtagagggtccaaaactctttagaacctataattcaaggaaaggctccactttggttttgcattttgtctggtctctttgggtgacagaatttatgtcacaaggtgcacatgttttggggaggctcatggacagcccatcgctcttgtgctttggtaggaaatatgtgcagttatggggaaggagttagttactcatctagggaacaattgggtagaaagagatggactccctgtatttgaaattcagaactcaagcttggctctaagtgtttcctt

SEQ ID NO: 31709 - DNA, 587 bp, Homo sapiens
tgtcccacaccgcacttgactctgtttatttgggacccatgattatcagaagtgctatttttaacaaatacttctgagaaataatctgaacacttaattggatgcaaaagagtggctatttactattctaccctttaattagcataatcagtgtttccagcagcaaaagcaattggaaaatcgcttgttttgttaggttcattcttctcccttagcgtagtgtggcatcagcatggytattattcttaaattgcctctttaaaacgaagagctggtgcttcttacaggcaattcctaactcttgggttttgtagagggtccaaaactctttagaacctataattcaaggaaaggctccactttggttttgcattttgtctggtctctttgggtgacagaatttatgtcacaaggtgcacatgttttggggaggctcatggacagcccatcgctcttgtgctttggtaggaaatatgtgcagttatggggaaggagttagttactcatctagggaacaattgggtagaaagagatggactccctgtatttgaaattcagaactcaagcttggctctaagtgtttcctt

SEQ ID NO: 31710 - DNA, 1335 bp, Homo sapiens
atacacatactttttaaatttagtaagatcatataacttgtctttcttttcatttttctttttattttattattttttttttttttgaggcagagtctcactctgttgtccaggctggagtgcagttacacgatcttggctccctgcagccttcgtctcctgggttcaagcgattctcctgcctcagcctcccaagtagctgggactacaggtgtgcgccaccacaactggctaatttttgcatttttagtagagatggaataggtcaggaccactttctattagarttccatctgatttaagagctgaatgactttgaacaataggtgtctaatttattttaccattgtatttaaattggtgcctttttttttcttgagacagggtcttgctctgttgcccaggctagagtgcagtggtgctatctcagcttattgcaaactccgcctcctgggctcaggtgatcctcctgcctcaaccacccgagtagctagaactacaggcacacaacactacactcagctaatttttgtatttttagtagagacagggtttcaccatattggccatgctggtctcgaactcctgacttcaagtcatccaaccgccttggcctcccaaagtgctgggattacaggcatgagcacccgtgcccggccacatgcctattttattattataaataatgctgcattgaactagtaattctgtaggattaaatcttaaagtagcaatcaaggggtgggttgagggagtgacaatgagcagtcagccctaactgggagaagtgttttattactgaaattgcttagaattgctggtgcatagtggtaatacaaagaagaataacttttggttggttttaatcttattttttttaactctctaccaactccttgattacctatatcctgggcagatcttcccactgacctgcccctggtgggcggttcttaaaatgggtattaattgtttcaaaaagtacacacatttgaaattgatgataccctttccttagtcctctcaccctcaagaggtcataaaaatttgcaaccccaacaatagtatgagaaagtggaagatttattttatcttcaaaaatgctggatattattgcagccatcaaaaggaaagagatcatgtcctttgcagacacatggatggaacggaagccattatcctcagcagactaacacaggaacagaaaaccaaacactgcatgttctcacttataagtgggagttgaataatgagaacaaacggacacatgaacacacactggggcctgttgagggggcggatggagggagagtatctggataaatagctaatgca

SEQ ID NO: 31711 - DNA, 1335 bp, Homo sapiens
atacacatactttttaaatttagtaagatcatataacttgtctttcttttcatttttctttttattttattattttttttttttttgaggcagagtctcactctgttgtccaggctggagtgcagttacacgatcttggctccctgcagccttcgtctcctgggttcaagcgattctcctgcctcagcctcccaagtagctgggactacaggtgtgcgccaccacaactggctaatttttgcatttttagtagagatggaataggtcaggaccactttctattagaattccatctgatttaagagctgaatgactttgaacaataggtgtctaatttattttaccattgtatttaaattggtgcctttttttttcttgagacagggtcttgctctgttgcccaggctagagtgcagtggtgctatctcagcttattgcaaactccgcctcctgggctcaggtgatcctcctgcctcaaccacccgagtagctagaactacaggcacacaacactacactcagctaatttttgtatttttagtagagacagggtttcaccatattggccatgctggtctcgaactcctgacttcaagtcatccaaccgccttggcctcccaaagtgctgggattacaggcatgagcacccgtgcccggccacatgcctattttattattataaataatgctgcattgaactagtaattctgtaggattaaatcttaaagtagcaatcaaggggtgggttgagsgagtgacaatgagcagtcagccctaactgggagaagtgttttattactgaaattgcttagaattgctggtgcatagtggtaatacaaagaagaataacttttggttggttttaatcttattttttttaactctctaccaactccttgattacctatatcctgggcagatcttcccactgacctgcccctggtgggcggttcttaaaatgggtattaattgtttcaaaaagtacacacatttgaaattgatgataccctttccttagtcctctcaccctcaagaggtcataaaaatttgcaaccccaacaatagtatgagaaagtggaagatttattttatcttcaaaaatgctggatattattgcagccatcaaaaggaaagagatcatgtcctttgcagacacatggatggaacggaagccattatcctcagcagactaacacaggaacagaaaaccaaacactgcatgttctcacttataagtgggagttgaataatgagaacaaacggacacatgaacacacactggggcctgttgagggggcggatggagggagagtatctggataaatagctaatgca

SEQ ID NO: 31712 - DNA, 1335 bp, Homo sapiens
atacacatactttttaaatttagtaagatcatataacttgtctttcttttcatttttctttttattttattattttttttttttttgaggcagagtctcactctgttgtccaggctggagtgcagttacacgatcttggctccctgcagccttcgtctcctgggttcaagcgattctcctgcctcagcctcccaagtagctgggactacaggtgtgcgccaccacaactggctaatttttgcatttttagtagagatggaataggtcaggaccactttctattagaattccatctgatttaagagctgaatgactttgaacaataggtgtctaatttattttaccattgtatttaaattggtgcctttttttttcttgagacagggtcttgctctgttgcccaggctagagtgcagtggtgctatctcagcttattgcaaactccgcctcctgggctcaggtgatcctcctgcctcaaccacccgagtagctagaactacaggcacacaacactacactcagctaatttttgtatttttagtagagacagggtttcaccatattggccatgctggtctcgaactcctgacttcaagtcatccaaccgccttggcctcccaaagtgctgggattacaggcatgagcacccgtgcccggccacatgcctattttattattataaataatgctgcattgaactagtaattctgtaggattaaatcttaaagtagcaatcaaggggtgggttgagggagtgacaatgagcagtcagccctaactgggagaagtgttttattactgaaattgcttagaattgctggtgcatagtggtaatacaaagaagaataacttttggttggttttaatcttattttttttaactctctaccaactccttgattacctatatcctgggcagatcttcccactgacctgcccctggtgggcggttcttaaaatgggtattaattgtttcaaaaagtacacacatttgaaattgatgataccctttccttagtcctctcaccctcaagargtcataaaaatttgcaaccccaacaatagtatgagaaagtggaagatttattttatcttcaaaaatgctggatattattgcagccatcaaaaggaaagagatcatgtcctttgcagacacatggatggaacggaagccattatcctcagcagactaacacaggaacagaaaaccaaacactgcatgttctcacttataagtgggagttgaataatgagaacaaacggacacatgaacacacactggggcctgttgagggggcggatggagggagagtatctggataaatagctaatgca

SEQ ID NO: 31713 - DNA, 418 bp, Homo sapiens
tccctgacataaaatatatatgttcatagtacaaatgcacgcaaatatttgtggccgaatctcggaacccgctggaaaggattaaacgtgcggttgccgtgactaaacgcaktcattcaccctacaagatttaggaaaatgtaacgttgcaagggaagcaaggtctctgtgtaaacctcgtaatcgccaccaaaagtcggtagctgggagccttcaaagcccgccaaacacactggaagcatccacagctgttttaaattggttttggtgtctggaaatagcgcactcggtacggcagcatctctggcctccagcggaggttagccctgacctgaacgccctgtttagctgcagcatttcatgattccgcttctctgctccggaatatcgaagaagaccgtgattgccgtcaccgaga

SEQ ID NO: 31714 - DNA, 849 bp, Homo sapiens
cacatctgcagactacacaaagacaacacagattaataacacaatcatcactgaaatcacagagcctccaagtgtttttatctgttttaatgsgttactagctgctaatctgtctgcatctccttcaagcactccagtccctggcattaaggtcaggtgtgcctgggatgcttttaatatttgttctttaaatttggaatatccaaagacaagtttgtagagtgttcttctagatgtttttttattctttcccaaattttgatcttattaagagtcattaatagtttccacaaatccttatgtttagctcctacagcgggccatatcatttgaggttgaggtgccactataccgtcatgtttccagataataggaactcttaccatatttcttactatttctaccatctgaccattttgttcagaccagctgaacatagtgtggccatggtatgcagactgagaggtgcaatttaagctaaacatccccttaggggaccaatcaataatgattccataggaatcattgtgcaacacctctgcctgttctgcaatgcaatcttccaaaacaaatacattcattatttctggccaggtccaattctgtttacaaataggctttgagggcagtatgcctcaattataggagcagatttattatggtaaaatgagatcagaaagcatgtgtaactgtgtcatagagtgattacatccgggcattattgccagccaagattgataaatatgcccaataagtataattacactctgtgtcagcccttgttgaaggaatactcatggcaatggtgatcaccgctatcatagctatcattaaattacttattgtgac

SEQ ID NO: 31715 - DNA, 700 bp, Homo sapiens
cctgtactcacaacaaaacgcttcctacagtcttaaaataagttttgtcaacagccataaaactcattaactttatcagaaaaaggtatgtgaatcattacatttaaaaatttttgtcaaggaatgggaaaaggatatgatcaccaccaaagagaagtttgctggcttttaagagaataaatcttgctatgcttgttgaggcgtaagttgtacattttatgaaacaataacaacaaaaaatactttttgaacattgtctttgtccagtttgagctactataacaaaataccttagactgggtaatttataaacaacataaatttgttggttacaattctggatgctgtagttcgagataaaaccagaagatttcaagtttaagataaattcaagataaaataagcagatttggtgtctggtaagtatccagtctctgcttcaaagacggccctttctagctgtgtcctcatayggcagaagggcaaacaggctccctcaagcctttataaaagcactaatctaatttatgaggtctccacttcccaaagagccccagtttgcctcctaaaagcctcatctctcaatacctgttgcactggaggttagatttcaacatatgaattttggtggtaaaaccatattgagatcatagcatttcaccctgatccccccaaattcatgttcttgtcacatgcaaaa

SEQ ID NO: 31716 - DNA, 1682 bp, Homo sapiens
tgtttttgttaaagtttccactggtgttcctgtttcatctgagatatatagttctgttcccatgagtggaaacccagacttatcttctcaggctatttgagcaaaggagcagaaaataccaagagaagtgagtaaccttctcttctccattaactattctgtcaaaccaaaacttcttatattgaacgtttaactttccactcaattttgatattgtgtttaatgcagttgagtcttgctcacacataactttttgcttttgctgcattgcttcctctgaataaatatctaaaagcttatgagagtcagaatataaatatcgatgtaattcatttcttactacatcaggcttccctcaaaagggttaaactgcagccctcaacttggctaagtgcagagaatgaggattgrctgagatgccatctttttagtccttggacaacgagtgtagtggagtttggtatggctgtcgcctcttctgagtagcctctacagttgactctactatatatttctatagaatatcatttttcatatgtgtcatgattgtggaaaaaaatgagagtgcagtattattatataatgccacctgtagtgatgatagttttttttcatttgaagatatatttttaaaaacgattgtatttaaagaaatccaaaattttcttcaaattagttgaagagtaaatgtaataatagttttcatttttgggggacatcattatatgctaggcattcttctaaagttcttaaatacattatgtcatttaatactcaacagtatgtcactgatatgggtactattctattccagatgaggcacagaaacattgagtagcttgcccaatggacaaaaattaggatttgaacccagacactgtctgtaaagactgatgttaaacactacctttctgtactacagttttatttcactctaaagtctcttatatctaatttttttagcttcttctggcattcttcatttaaagccttgctgtaacatttcttttaggattatcttttcccaactcctttcagaggttggggtaaacagtcctcctcagtaaagccatttttttccccataggttccaaaacttaaagctttcttctttcaacaaattgtttttgttcttgttttggtgcccatagtgcatgagattaatttccactgcacagtagtagcatagtaatggtgatgggaactttggctttatatatgaaaaaatatatataaataaaaatgtgtatatcattttgtgtaagtacattctttgactgcacaacaaaatcacctaacaatgcatttctcaaaaagtatctccattattaagcaatgcatgactgtatttgggggtagtattgatgtgttcatgacatagactttgcagtcaaccacgaaatgggttaaaaattcaactctgccacttagtaaacataagacctggggtgagttaacataattttcttaaacttggtagtctcattgtaaaatagagtgaatactgcctacttaacatagtcattgtaaggattacattagttaatatgtgtacaacccttggtgtagtatccagcacttagtatttaagacattgtagctaaagaaaagtaatggccaacttacattttttagagagaaaaatgtaaaaataatgtttgatgtagaaacaattttaaaag

SEQ ID NO: 31717 - DNA, 847 bp, Homo sapiens
gatcctgaaaggagattgtcactgggtttgctttaatggctgaacagtgtaagaactgagtgcctgtgattctattggcttttgtctyatggccacaaaatggctgccagagcaccaagctacatcaacctgcaagtcaggaggaaggggaaggaatagctgtttctgtctcttttatcaggcaagcaaatttctcctttagtctctctgatcagaatggtatcatctggacacctgatccttagtgcaagagaggctgggaaagtgaatattttttagtctctatagggaagaacataaaaaagaggggattggagatgggcattgggttcactcagagtttctcaatcttagcactagggatattttgggccaggtaattctttaatggagggtggggggaggctgttcagtataatgtaggatatttagtagcattcctggcctccacgaaatagatgccagtagcatccctcccctggtggtaacaaccaaaaatgtctccagatattgccaaatgtctcctgggtggggagggggaaattgcctcaggtcagaaccactgtgttaccccactcacagcatctgccatagattatagggtaactccaagaatcaaagacagaaaaagatccaggcttcagaaatagacagatcagttcctgggttccaggtagcaggacctaagagacagtctctaccaaagcagttaccttgggataaattagttccaaaccttttcagtctgttagggcttaggacaagcattccaagaatttattggccttgggttacaagccatctttggcgaaggaagggcaggtacactgattgtcctaccaagact

SEQ ID NO: 31718 - DNA, 215 bp, Homo sapiens
aaaaataaaatagaacatatttagactgtttgtattcaacgtcaaagttaaaaattggtgtttgttatgtaccaaaacaaackgtaagaatttaaaaaaattggacgtctttcactttttaaattccatatttgccctgtgctaagtaaaacatgggcttgattaattaatttttaacttttttaagttaaaaaattaagactttatttccttga

SEQ ID NO: 31719 - DNA, 610 bp, Homo sapiens
aaactagtgaatatctaaaaatagtgttataataaattcagtgaaaatcagacattggtgcatttatctgtggccttgaatactgaccctcctacatgtacacatacaacttgagctcagctctcatcaaatgmagattatctctcaattttctaaattatcaaccttatttagttagagcaatagaaggttttttgttttaataatagcaatatcatgactgttttctaaaagtagaggactcagttccttcactgtagttagaggttataggaagttgaatgtataatttaatagaaataaagtattgatttttttcctttgtccttggcatgtctcaagatagtggaaaaaccttcctataatatactcctatgattccacctaaccttagagatgcacagcataacagatacatcaagcggtgtgtgaaactgtggtcattcctgactaggaaagctcctgcttgggtaaaataaaccagaagccacgtgatccactttggggaattcaaaagatgtctttatgaagtggcatctcctctcttggccagatagaagttgattaatacttgccacaagtaatttactgttggatatggcactgaagt

SEQ ID NO: 31720 - DNA, 610 bp, Homo sapiens
aaactagtgaatatctaaaaatagtgttataataaattcagtgaaaatcagacattggtgcatttatctgtggccttgaatactgaccctcctacatgtacacatacaacttgagctcagctctcatcaaatgcagattatctctcaattttctaaattatcaaccttatttagttagagcaatagaaggttttttgttttaataatagcaatatcatgactgttttctaaaagtagaggactcagttccttcactgtagttagaggttataggaagttgaatgtataatttaatagaaataaagtattgatttttttcctttgtccttggcatgtctcaagatagtggaaaaacyttcctataatatactcctatgattccacctaaccttagagatgcacagcataacagatacatcaagcggtgtgtgaaactgtggtcattcctgactaggaaagctcctgcttgggtaaaataaaccagaagccacgtgatccactttggggaattcaaaagatgtctttatgaagtggcatctcctctcttggccagatagaagttgattaatacttgccacaagtaatttactgttggatatggcactgaagt

SEQ ID NO: 31721 - DNA, 610 bp, Homo sapiens
aaactagtgaatatctaaaaatagtgttataataaattcagtgaaaatcagacattggtgcatttatctgtggccttgaatactgaccctcctacatgtacacatacaacttgagctcagctctcatcaaatgcagattatctctcaattttctaaattatcaaccttatttagttagagcaatagaaggttttttgttttaataatagcaatatcatgactgttttctaaaagtagaggactcagttccttcactgtagttagaggttataggaagttgaatgtataatttaatagaaataaagtattgatttttttcctttgtccttggcatgtctcaagatagtggaaaaaccttcctataatatactcctatgattccacctaaccttagagatgcacagcataacagatacatcaagcggtgtgtgaaactgtggtcattcctgactaggamagctcctgcttgggtaaaataaaccagaagccacgtgatccactttggggaattcaaaagatgtctttatgaagtggcatctcctctcttggccagatagaagttgattaatacttgccacaagtaatttactgttggatatggcactgaagt

SEQ ID NO: 31722 - DNA, 610 bp, Homo sapiens
aaactagtgaatatctaaaaatagtgttataataaattcagtgaaaatcagacattggtgcatttatctgtggccttgaatactgaccctcctacatgtacacatacaacttgagctcagctctcatcaaatgcagattatctctcaattttctaaattatcaaccttatttagttagagcaatagaaggttttttgttttaataatagcaatatcatgactgttttctaaaagtagaggactcagttccttcactgtagttagaggttataggaagttgaatgtataatttaatagaaataaagtattgatttttttcctttgtccttggcatgtctcaagatagtggaaaaaccttcctataatatactcctatgattccacctaaccttagagatgcacagcataacagatacatcaagcggtgtgtgaaactgtggtcattcctgactaggaaagctcctgcttgggtaaaataaaccagaagccacgtgatccactttggggaattcaaaagatstctttatgaagtggcatctcctctcttggccagatagaagttgattaatacttgccacaagtaatttactgttggatatggcactgaagt

SEQ ID NO: 31723 - DNA, 645 bp, Homo sapiens
agatcattagaagtgagaaagatcaagtacaagaagtcaggatgatggctttccctttctgtctcactcartgcaaactgcaatgtcactattgtgatctacaaggccctatatgccctgcacttccatccccattaacactgtgacttgtctcctcctacccttccttccattcctctgtgagccacactcacctccttgctcttccttaaacctgtcagggacatttgcatctcacattcctttgcgcttgctaccttggcccagaatttccttcccacgttaccatctcattgcagatgtcactaccttatctaaggttgtcccatcacaccccaacactgcctattccccttccttgctttactccattacacttatcacaatctaatgtatacatcttacttaaacatatacagctgttttcttgcttattctctctctctcccagtagcacataagttcctgagagcaacgatttttgtttcttttgtttagtgctataaccccagcaactagaacagtgctttgtacatagtaggtgatcaacaaatatttgctgagtgaatgaaggagagagagatgagtaaggaaaagagtgaacaaagaaatacacagagccctaaaggctttgctgaaactggg

SEQ ID NO: 31724 - DNA, 645 bp, Homo sapiens
agatcattagaagtgagaaagatcaagtacaagaagtcaggatgatggctttccctttctgtctcactcaatgcaaactgcaatgtcmctattgtgatctacaaggccctatatgccctgcacttccatccccattaacactgtgacttgtctcctcctacccttccttccattcctctgtgagccacactcacctccttgctcttccttaaacctgtcagggacatttgcatctcacattcctttgcgcttgctaccttggcccagaatttccttcccacgttaccatctcattgcagatgtcactaccttatctaaggttgtcccatcacaccccaacactgcctattccccttccttgctttactccattacacttatcacaatctaatgtatacatcttacttaaacatatacagctgttttcttgcttattctctctctctcccagtagcacataagttcctgagagcaacgatttttgtttcttttgtttagtgctataaccccagcaactagaacagtgctttgtacatagtaggtgatcaacaaatatttgctgagtgaatgaaggagagagagatgagtaaggaaaagagtgaacaaagaaatacacagagccctaaaggctttgctgaaactggg

SEQ ID NO: 31725 - DNA, 645 bp, Homo sapiens
agatcattagaagtgagaaagatcaagtacaagaagtcaggatgatggctttccctttctgtctcactcaatgcaaactgcaatgtcactattgtgatctacaaggccctatatgccctgcacttccatccccattaasactgtgacttgtctcctcctacccttccttccattcctctgtgagccacactcacctccttgctcttccttaaacctgtcagggacatttgcatctcacattcctttgcgcttgctaccttggcccagaatttccttcccacgttaccatctcattgcagatgtcactaccttatctaaggttgtcccatcacaccccaacactgcctattccccttccttgctttactccattacacttatcacaatctaatgtatacatcttacttaaacatatacagctgttttcttgcttattctctctctctcccagtagcacataagttcctgagagcaacgatttttgtttcttttgtttagtgctataaccccagcaactagaacagtgctttgtacatagtaggtgatcaacaaatatttgctgagtgaatgaaggagagagagatgagtaaggaaaagagtgaacaaagaaatacacagagccctaaaggctttgctgaaactggg

SEQ ID NO: 31726 - DNA, 645 bp, Homo sapiens
agatcattagaagtgagaaagatcaagtacaagaagtcaggatgatggctttccctttctgtctcactcaatgcaaactgcaatgtcactattgtgatctacaaggccctatatgccctgcacttccatccccattaacactgtgacttgtctcctcctacccttccttccattcctctgtgagccacactcacctccttgctcttccttaaacctgtcagggacatttgcatcycacattcctttgcgcttgctaccttggcccagaatttccttcccacgttaccatctcattgcagatgtcactaccttatctaaggttgtcccatcacaccccaacactgcctattccccttccttgctttactccattacacttatcacaatctaatgtatacatcttacttaaacatatacagctgttttcttgcttattctctctctctcccagtagcacataagttcctgagagcaacgatttttgtttcttttgtttagtgctataaccccagcaactagaacagtgctttgtacatagtaggtgatcaacaaatatttgctgagtgaatgaaggagagagagatgagtaaggaaaagagtgaacaaagaaatacacagagccctaaaggctttgctgaaactggg

SEQ ID NO: 31727 - DNA, 564 bp, Homo sapiens
acctgcagcagcagcttgacccgctggatgggcactacagccatcttggagatggctgcggccactccacctgccaggaagtccttggcaaaggacactgtggcatctgtcatgttgaaaggaaagaggaggcaggctgctaagggacgggactgggctgggaactggctttgactcgggctgtgagaaggaccattttaatgtcctacactgctcatatcgggccatggaggtgggatatgcatcctcctcagtgttttgttgatgctgtgagaccctgctccctctctcctacttagactctataagrtctgaatgtcttaacagaccatcactcccactgtccccccgttgagttgtctgctttcccctacttcattgtcccttatttctcaatgatttttgtcaattccagccttttttcttaatttaaaattttaatttttgtgggtacatagtaccagtacatagtatatacactgtcagtcttttaaacaacattcctgggccaggcgcaatggcttacgcctgtaatcccagcactttgggaggcctagatgggcg

SEQ ID NO: 31728 - DNA, 564 bp, Homo sapiens
acctgcagcagcagcttgacccgctggatgggcactacagccatcttggagatggctgcggccactccacctgccaggaagtccttggcaaaggacactgtggcatctgtcatgttgaaaggaaagaggaggcaggctgctaagggacgggactgggctgggaactggctttgactcgggctgtgagaaggaccattttaatgtcctacactgctcatatcgggccatggaggtgggatatgcatcctcctcagtgttttgttgatgctgtgagaccctgctccctctctcctacttagactctataaggtctgaatgtcttaacagaccatcactcccactgtccccccgttgagttgtctgctttccccyacttcattgtcccttatttctcaatgatttttgtcaattccagccttttttcttaatttaaaattttaatttttgtgggtacatagtaccagtacatagtatatacactgtcagtcttttaaacaacattcctgggccaggcgcaatggcttacgcctgtaatcccagcactttgggaggcctagatgggcg

SEQ ID NO: 31729 - DNA, 1276 bp, Homo sapiens
taacttactgaacttcacagcctagcctaacctgctttaagtgtgttcagaccacttacattagcctacagctgggcaaaatcatttaatacaaagcctattttataacaaagtgttgaatatctcatgtaatatgttgaataatatattgaaagtatatcgcttttactccatcaagttgaaaatttgcaagtcgaggactgtctatctaaaaacatgactttaggactgattttttctttgtccatctttactggattgtgtagaaactgtgtaagtggcagagatgcacaactaacagcctctaccttgggtgaactgttctcttggcctctcgagatatttgtagtttaggaagcataaaatttaatatctactaaggatatttctctcaatacaggttcacctgctttaccctggcccaaacactggggttatcagggagggccatcgccacctttattgctgcaaggatctggcttagtttaatctactaaactgttgtaatggccagcacagacccaccctttgccyatttgtctctctttttcaagagacatgtagtgcaataagcatgtgagcttttatctaagagctgccaacgttagaactgtttctaatctgtgaagttcatagtgattatgctatttctgcctaagtgtgagggcaacatttcaaggaagccccattctgtgtggatagtcttagtgctttgatgctacccttatgtgtaggcaaaccctaaaatcacacgtcaaattaacatcaggaaaacatgagcgaatcttcagccttgtaattttctgggtgactgaaattgcttctatgttaagtgtttataattttgtttttcatctgcaggcttatattttctactttctgcattaactaataaattcctgttttctggaatgtactaggccagaatatcacctatgagtggagctgtagtagagacttaggaattagaagggatgttcaactaaatgacttttaggttccctttcatttatgataatttgttattctacttccttggtgactcagaataaaattacatactgattttcctacttgaaaactgtagttgataggaaaaaaaaggagcacaaatattgattgctcatccatcctaccttttgtttaggtttatttgagtgatacattactgaaatttgtcttttgataatgatgatttaattctttagcaactatttatacaatattggccagtgaaaaatttcagatggttctccatgttttagactatcagagc

SEQ ID NO: 31730 - DNA, 1276 bp, Homo sapiens
taacttactgaacttcacagcctagcctaacctgctttaagtgtgttcagaccacttacattagcctacagctgggcaaaatcatttaatacaaagcctattttataacaaagtgttgaatatctcatgtaatatgttgaataatatattgaaagtatatcgcttttactccatcaagttgaaaatttgcaagtcgaggactgtctatctaaaaacatgactttaggactgattttttctttgtccatctttactggattgtgtagaaactgtgtaagtggcagagatgcacaactaacagcctctaccttgggtgaactgttctcttggcctctcgagatatttgtagtttaggaagcataaaatttaatatctactaaggatatttctctcaatacaggttcacctgctttaccctggcccaaacactggggttatcagggagggccatcgccacctttattgctgcaaggatctggcttagtttaatctactaaactgttgtaatggccagcacagacccaccctttgcccatttgtctctctttttcaagagacatgtagtgcaataagcatgtgagcttttatctaagagctgccaacgttagaactgtttctaatctgtgaagttcatagtgattatgctatttctgcctaagtgtgagggcaacatttcaaggaagscccattctgtgtggatagtcttagtgctttgatgctacccttatgtgtaggcaaaccctaaaatcacacgtcaaattaacatcaggaaaacatgagcgaatcttcagccttgtaattttctgggtgactgaaattgcttctatgttaagtgtttataattttgtttttcatctgcaggcttatattttctactttctgcattaactaataaattcctgttttctggaatgtactaggccagaatatcacctatgagtggagctgtagtagagacttaggaattagaagggatgttcaactaaatgacttttaggttccctttcatttatgataatttgttattctacttccttggtgactcagaataaaattacatactgattttcctacttgaaaactgtagttgataggaaaaaaaaggagcacaaatattgattgctcatccatcctaccttttgtttaggtttatttgagtgatacattactgaaatttgtcttttgataatgatgatttaattctttagcaactatttatacaatattggccagtgaaaaatttcagatggttctccatgttttagactatcagagc

SEQ ID NO: 31731 - DNA, 567 bp, Homo sapiens
ctttgaagcatgtgatctttgtacctactccctattcttgcaccccctcccctttttaaaacccttaataaaaacttgctggtttgaggctcaggggggcatcattgtcctaccaatatgtgatgtcacccacggcgrcccagctgtaaaattcctctctttgtactgtctctctttatttctcagccagctgacacttaaggaaaatagaaagaacctacattgaaatattgggggtggtttccccaatagttagggaaacattgtgttcatgagagaagcattctttccttgggaactgaggccaacataacccaaagctgtgggaaagggaagccacaatttcacatggctcattaggatcaatagtgggaagatccattctgatatcaaacattggttctgctctttctatcatagaagtggatacatgccccccggtggccaactgatctccctgggatatggtgttggatcaaaggctcagtgttggtcttagctcttattagtttggtcacttaacagtggctgtagcagcttggcctcagagactgggagtcaaaattg

SEQ ID NO: 31732 - DNA, 567 bp, Homo sapiens
ctttgaagcatgtgatctttgtacctactccctattcttgcaccccctcccctttttaaaacccttaataaaaacttgctggtttgaggctcaggggggcatcattgtcctaccaatatgtgatgtcacccacggcgacccagctgtaaaattcctctctttgtactgtctctctttatttctcagccagctgacacttaaggaaaatagaaagaacctacattgaaatattgggggtggtttccccaatagttagggaaacattgtgttcatgaragaagcattctttccttgggaactgaggccaacataacccaaagctgtgggaaagggaagccacaatttcacatggctcattaggatcaatagtgggaagatccattctgatatcaaacattggttctgctctttctatcatagaagtggatacatgccccccggtggccaactgatctccctgggatatggtgttggatcaaaggctcagtgttggtcttagctcttattagtttggtcacttaacagtggctgtagcagcttggcctcagagactgggagtcaaaattg

SEQ ID NO: 31733 - DNA, 567 bp, Homo sapiens
ctttgaagcatgtgatctttgtacctactccctattcttgcaccccctcccctttttaaaacccttaataaaaacttgctggtttgaggctcaggggggcatcattgtcctaccaatatgtgatgtcacccacggcgacccagctgtaaaattcctctctttgtactgtctctctttatttctcagccagctgacacttaaggaaaatagaaagaacctacattgaaatattgggggtggtttccccaatagttagggaaacattgtgttcatgagagaagcattctttccttgggaactgaggccaacataacccaaagctgtgggaaagggaagccacaatttcacatggctcattaggatcaatagtgggaagatccattctgatatcaaacattggttctgctctttctatcatagaagtggatacatgcccccmggtggccaactgatctccctgggatatggtgttggatcaaaggctcagtgttggtcttagctcttattagtttggtcacttaacagtggctgtagcagcttggcctcagagactgggagtcaaaattg

SEQ ID NO: 31734 - DNA, 1108 bp, Homo sapiens
ttttccataaatgaggtggctctggaaggaggagggagcctggccctgagggtgtgaggcttcagtcagaaaacctggatgcagaggatgtgatgggaaatggatggacactggctgtgacagagctggcccaagtgaccatgtgtccaggaatgagtcttggctagaccgtggggcagcccagggaggagggtccatgctccagaccagcacttcttaccttacaccgcctgcctttgtcaatgagtataaactcacaaaggaaactgaggccacggagtccgacataaaaagggacctccagagcatgttgcttgctgcggcagtcagcacaacagcagccttgctttctcacagacgggaaactgtcggcccttccctcactgcccttcccatttgatctcatttcaactcagctgcgcagttcatcatggtgcccttccatgygtacagtgctgagaacactgttgagaagagacaagctcagtgtcgttggaggaataacacgatgcacaggtcataaataatgcataaaataaggcactcttgcaactaaggacccaaaatagacagaatcaagggctgagggagactagtacgaggaatccaggcagcgggatccatattgggggactggggaggggcgtaggtaggcggtaccctgggaatctcacactgatgctcccttctctcctcccctttcctttaccaaggaagcctgaaggcactcttccctgacctttagcaaggaacactaaacgtaaaaagctgcagttaccactcctaacagctcaaacgtcagtgacgttggctaaatagaccaatgaccctactccattccatgccttccctaatctagtcgcatcctctgtttccccaaaatagttatgtggcctaaattacctttatttcttttgctacttcataaccttctacctacaatttgaaatgaggtagaggaaatttgtgttttatgtgcaatgagacgaggatagttcataacgtctataatgactaagtttatagaatttcaggcatcccgcgcattactggcactactgttcccatcacccgcaatactctcatgccgtatcccccattgtatcca

SEQ ID NO: 31735 - DNA, 1108 bp, Homo sapiens
ttttccataaatgaggtggctctggaaggaggagggagcctggccctgagggtgtgaggcttcagtcagaaaacctggatgcagaggatgtgatgggaaatggatggacactggctgtgacagagctggcccaagtgaccatgtgtccaggaatgagtcttggctagaccgtggggcagcccagggaggagggtccatgctccagaccagcacttcttaccttacaccgcctgcctttgtcaatgagtataaactcacaaaggaaactgaggccacggagtccgacataaaaagggacctccagagcatgttgcttgctgcggcagtcagcacaacagcagccttgctttctcacagacgggaaactgtcggcccttccctcactgcccttcccatttgatctcatttcaactcagctgcgcagttcatcatggtgcccttccatgcgtacagtgctgagaacactgttgagaagagacaagctcagtgtcgttggaggaataacacgatgcacaggtcataaataatgcataaaataaggcactcttgcaactaaggacccaaaatagacagaatcaagggctgagggagactagtacgaggaatccaggcagcgggatccatattgggggactggggaggggcgtaggtaggcggtaccctgggaatctcacactgatgctcccttctctcctcccctttcctttaccaaggaagcctgaaggcactcttccctgacctttagcaaggaacactaaacgtaaaaagctgcagttaccactcctaacagctcaaacgtcagtgacgttggctaaatagaccaatgaccctactccattccatgccttccctaatctagtcgcaycctctgtttccccaaaatagttatgtggcctaaattacctttatttcttttgctacttcataaccttctacctacaatttgaaatgaggtagaggaaatttgtgttttatgtgcaatgagacgaggatagttcataacgtctataatgactaagtttatagaatttcaggcatcccgcgcattactggcactactgttcccatcacccgcaatactctcatgccgtatcccccattgtatcca

SEQ ID NO: 31736 - DNA, 1110 bp, Homo sapiens
actcaacaaagcctgcaaatctccttcctctaaaatcccattggtgcaaagcactgtttctgttagcaatatacccttcctctaggcccagggactaccagggaagaggtggatgcatgagattgtaagggccagttttaagggttcagatccccaaaatcaaggcaggcacacacacatgcttatacagggcgtaaattgatggactttgtctcctgagccattatatgccccctttccatctttctcaatcatgaaaaaaaawttctactttaatataagagcccaaacccaaaggcttggccacattctgggacccatgtgtatttacaattaaatgtaaaacagttttattcctcaaacctagaccaattccccttgtcagcaaacagtagctagaattgccattgccccatatccctcaagattgaggaatgcacaacagaaagggagttgatatagtttgaatatgtgttgctgccaaatttcatgttgaattgtgatccccagtgttggaggtggggtcttgggggaggtgtttgggtcataagggcagactctcatgtcatagtgcattcttttgagatccagttgtttaaatgtgtggaaccttccctacccattctctctctcttgttcctgctctgccatgtgatgtgtctgttcctgcttctatacacagagacttttgctccaattctctatgtttttaaatttaagaatgaagaagagctctttgtgtgaaataatgaagtaaaacagggtatttcaagtagcatctttaccaaagatttgggcagaatcttccactggcttggacctaaaagatctaactgtggcattgtaaatgtcaatattccaatgagcggctggagcattgcaggtgcatttggaggagaaaagcacatttgtggtggcagggcatctggtgatgactcctggaaatagtgcatgagaaggtttacttgtatcatcaactatggtaaggatcttcctctggtgaaaggaatcaagtttcagtaaagttttatggacgaacattgcttaattttaggtgttcctgcagctgtttctgaagaagaaaaaaaaaattaaaattttccctgaata

SEQ ID NO: 31737 - DNA, 801 bp, Homo sapiens
tgcagagcaggcaggagaagcatcttatcaacagcaaagttctgtttgcagaataataaaaataattaacacttagtatgtgctcactgtgtgcctagcagtgctctaaaggcttatttcctttaatcctcacaataaccatacaagtatttggtagtcttctcctcatttaaaagttgagaaaatggatgaacagagaagtaactggctgaaaattgcacagccagtaagtattaatagtaaaggcaggatccaaagacagacatgctggcactggaatctagatggttagccactgggctaaaccataaggatagcaaacatttattgagacctaggctccaggcattgcactaaacatctattttacgtggactatstcatttgatgatcatggtaacccatatggcatcgttaaaccccatgttgcagatgagttaactgaagtttaggtacatcgagtgacttgtcccaggtcccagaggtctacttagtccaggtttacaaagaagaaagctactacgtttaaagaacctttttgccattccataccacaaaccagaagttttggtttgagtagacatgaaacagttttgcagcatctacttcaagggagcttcatttttgttgtttatgggtatcagggtgtatttaaacaaaaagcatctatttcaggagacagagttttcatgatgtgcttttttgtttcactgttcagtaaaaatcccatctgtttatgctgcatcacaccatgatttttttttttttttgagacggagtctctctctgttgcccaggctg

SEQ ID NO: 31738 - DNA, 505 bp, Homo sapiens
tgcaattaggatatactttgatgttaccatggctatggcttcacgttccaaacaatgagttttttcttatgtttgattaaaccaaaataatgttagtataatttccctgtaaattattatttgttgacaatcagtgttaatgccactaaaaattgagtataaatatcaacaaagtacattggtaaatgattaacaggacaaatgaaaagaaaaatagaaattctaaatagaattgctatacttctccagaattcattcctcctagaataactccctcagggtgaatgaaaagtcaggtgggcaaagctgtgagctccacctccttcaactatacaaattttgatttggtaaaggaaattttgacctcattatttcaccctgcyttgaaccaagtttttatgcacctactttattattgctctttgcatgtacattaaaacaaatattttattttgactttaacctagaatgagcactacagttataagcaattgacacaagataa

SEQ ID NO: 31739 - DNA, 1297 bp, Homo sapiens
atgttccttgctgagaaaaagaattcaacgatatttctcccatttgcttttgaaagaagagaaatatggctctgttcygcccggctcaccagcggtcagagtttaaggttacctctcttgttttctgaacgttgctgttatcctgttctttttcaagttgcccagatttcatattgttcaaacacgcatgctctacaaacaatttgtgcagttaacacaatcatcacagggtcctgaggcgacatacatccccctcatcttacgaagatgatgggattaagagattgaagtaaaggcaggcataggaaatcacaagggtattgattggggaagtgataagtgtccatgaaatcttcacaatttatgttcagagattgcagtagagacaggcataagaaattataaaagtattaatttggggaactaataaatgtccatgaaatcttcacaatccatgttcttctgccatggcttcagccggtccctccattcggggttcctgacttcctgcagaaagcagccacccagatcctgcccgaagttgcccataaagcacttttggagaggctagattatggatccaattaagaatccctgtactgcaaattctaaagttctggcctagagtcctgtgagctatcctgcttacaattgttactagcagcacacacatgtctctggaatgcgaagaagaaagaaaaaaagacaaggaacgtgaaaattgggtgatgtcagcctcccttggataaagcccatcagtggttttcattgtcttggggtgaggaacaaatccttgatagaactaatatgatcctccatgatctgcccatgccgccttctccagcatcatctgctactccaactcccttgctgcctgtgcaccagcccctggcctcatttcagtttctcaaacattctgagcttctttccaccagagggtgtttgcatatgacgttcccactcccttgaatgcagctactccctctttttccttagttaatgcttggatatctttcagatctcaggtcaaatttcacttcttcagaaagtcttccttgattgcccctgttaaacacacattcttgtagcaactggtatttccagggtatttcttgcagttgtaattttacatcttttgcagggtccttttactaataatgttcttctccctaccccaccaggctacaatttccatgaatgcagaaaaagagtttatttttgccaaccattgaaatccatgtgcttaaaataaagactggcccacagaagatgctgaataaaatgtttgtggtatgca

SEQ ID NO: 31740 - DNA, 1297 bp, Homo sapiens
atgttccttgctgagaaaaagaattcaacgatatttctcccatttgcttttgaaagaagagaaatatggctctgttctgcccggctcaccagcggtcagagtttaaggttacctctcttgttttctgaacgttgctgttatcctgttctttttcaagttgcccagatttcatattgttcaaacacgcatgctctacaaacaatttgtgcagttaacacaatcatcacagggtcctgaggcgacatacatccccctcatcttacgaagatgatgggattaagagattgaagtaaaggcaggcataggaaatcacaagggtattgattggggaagtgataagtgtccatgaaatcttcacaatttatgttcagagattgcagtagagacaggcataagaaattataaaagtattaatttggggaactaataaatgtccatgaaatcttcacaatccatgttcttctgccatggcttcagccggtccctccattcggggttcctgacttcctgcagaaagcagccacccagatcctgcccgaagttgcccataaagcacttttggagaggctagattatggatccaattaagaatccctgtactgcaaattctaaagttctggcctagagtcctgtgagctatcctgcttacaattgttactagcagcacacacatgtctctggaatgcgaagaagaaagaaaaaaagacaaggaacgtgaaaattgggtgatgtcagcctcccttggataaagcccatcartggttttcattgtcttggggtgaggaacaaatccttgatagaactaatatgatcctccatgatctgcccatgccgccttctccagcatcatctgctactccaactcccttgctgcctgtgcaccagcccctggcctcatttcagtttctcaaacattctgagcttctttccaccagagggtgtttgcatatgacgttcccactcccttgaatgcagctactccctctttttccttagttaatgcttggatatctttcagatctcaggtcaaatttcacttcttcagaaagtcttccttgattgcccctgttaaacacacattcttgtagcaactggtatttccagggtatttcttgcagttgtaattttacatcttttgcagggtccttttactaataatgttcttctccctaccccaccaggctacaatttccatgaatgcagaaaaagagtttatttttgccaaccattgaaatccatgtgcttaaaataaagactggcccacagaagatgctgaataaaatgtttgtggtatgca

SEQ ID NO: 31741 - DNA, 1118 bp, Homo sapiens
ttttatttagaaagacatattgaatagaacaggcaataaatatatttatttgtcccaggcccagactaagtgtttaagactyggagcttatggagaagaatttgaacacatctcataaatgcacatacctccccccaaaagttttaccaatcatttgatcataaattcactgactcccatgagagttcttccgttggatcaagttctgggatacggatgacaatattatttaagagataatcactccttgtcattctatacttaagaccctacacagctgtccaaagagtatatagtaggtgaataagaggttttaaggaatgacttgttgattaatgatatgttttaatttttcaaagtcctttcacacatttaatcttccataatcctagtatttgcaaagcagaaattgtactgacacttcaccctagaggttacggaaattctcttttataataggtatcatgtttctaagacagacctgactgcaaatattctgtcttgtggtcaacacaattatatccacattcaccatagcatgagtgtgatagttaatgctaagtgtcaacttgattggattgggggatacaaagtattaatcctgggtgtgtgtgtgccaaaagggattaacatttgagtcagtgagctggggaaggcagatccacccttaatctgatgggcacaatctaatcagcttccagcaaagctggcaagaccggcctagcctcttagcctacatctttcttccatgctggatgcttcctgccctcgaacactggactccaagttcttcaattttgagactcggactggctctttttgttcctcaagcttgtggacagcctattgtggaacctgtgattgtgtaagttaatacttaataaactattaagtattatgtgtatatgtcctattagttctatctctctagagaatgctgactaatacagatttttgtagcaggagtggttctagaggaactgaatattaaggatggagttcttttgttggttttggggaagttggctgcttaatatgattagaccccaaaatgccaagaactctagttctaatactatggaaaacactgatagtccttggcataaactgtttagaga

SEQ ID NO: 31742 - DNA, 1118 bp, Homo sapiens
ttttatttagaaagacatattgaatagaacaggcaataaatatatttatttgtcccaggcccagactaagtgtttaagactcggagcttatggagaagaatttgaacacatctcataaatgcacatacctccccccaaaagttttaccaatcatttgatcataaattcactgactcccatgagagttcttccgttggatcaagttctgggatacggatgacaatattatttaagagataatcactccttgtcattctatacttaagaccctacacagctgtccaaagagtatatagtaggtgaataagaggttttaaggaatgacttgttgattaatgatatgttttaatttttcaaagtcctttcacacatttaatcttccataatcctagtatttgcaaagcagaaattgtactgacacttcaccctagaggttacggaaattctcttttataataggtatcatgtttctaagacagacctgactgcaaatattctgtcttgtggtcaacacaattatatccacattcaccatagcatgagtgtgatagttaatgctaagtgtcaacttgattggattgggggatacaaagtattaatcctgggtgtgtgtgtgccaaaagggattaacatttgagtcagtgagctggggaaggcagatccacccttaatctgatgggcacaatctaatcagcttccagcaaagctggcaagaccggcctagcctcttagcctacatctttcttccatgctggatgcttcctgccctcgaacactggactccaagttcttcaattttgagactcggactggctctttttgttcctcaagcttgtggacagcctattgtggaacctgtgattgtgtaagttaatacttaataaactattaagtattatgtgtatatgtcctattagttctatctctctagagaatgctgactaatacagatttttgtagcaggartggttctagaggaactgaatattaaggatggagttcttttgttggttttggggaagttggctgcttaatatgattagaccccaaaatgccaagaactctagttctaatactatggaaaacactgatagtccttggcataaactgtttagaga

SEQ ID NO: 31743 - DNA, 1274 bp, Homo sapiens
tatgggaaatagaaaacttcttagttattgccaagagagaaatgagatctctttatatcatatataaatttgtcagtctttccaactattaatagagagaaagtcaagggctttgttttatcaactgttacttgtttaggacctataacagagcccaatacatagtagaggatccttaagtagctgatagatagatgaaatcattgaataaatcattaaaaaaggtaattttcttattttagattagaaatagttattttagatttaattacatgatttttttttccataaaagtgtagatgttttaaaccaagaatatataaataataaaatagtcataaataaagtggaaacattcaggataaagaaaaagataaatagaagtagtatggaaggacagaggcagagttgccaatataagaactccagaaagagacaaacaaaaaggttaaggtagagatgattttaaactagcatsatctcattgatttcatgccagatttgtaactgaggtttttatcataaggagaaatatttttttgaaatttttcttttttgcaaataaatattgaataactcagtggccttctagtagaaagacaagctaatatttattgggtacattttaagcatcagcttactgtacttagtaccttacacacattgttaatctttatgtgaaatcctttgagatagataccatcacttctgttatcttcatttttcaaacgatgaaatggaaattgaaagttgttatgtaacttatctgtggtcataccactatgtgatagaaccatgatttaagaccagatctgcccgattcctaaagtgtatttttccccccactctaccatgttgcctccaagggtgaaagccatgatgataaaggaatggcatgttctggttaagtggatatttttgttaacatgggtcacccatttcaaaacattagaatgtacaagactaaaagatgcactgaacattaaaactaattgaatatagtttataaaatcatttacttgacctataactttttaattacaacgtagaaagcatctttttaacctttatggctacttcagtttcaggtaaagtataacgttctgtgtattccaactcagagcacaagagaaagcttttagtcaattaaaatagcctttacagaaatagaattttagatctaaaagcagagattgctgaaacttactataatccttatgataataaactctacccagatcaaatggaaaaaacagggctaatttttggtggcc

SEQ ID NO: 31744 - DNA, 1274 bp, Homo sapiens
tatgggaaatagaaaacttcttagttattgccaagagagaaatgagatctctttatatcatatataaatttgtcagtctttccaactattaatagagagaaagtcaagggctttgttttatcaactgttacttgtttaggacctataacagagcccaatacatagtagaggatccttaagtagctgatagatagatgaaatcattgaataaatcattaaaaaaggtaattttcttattttagattagaaatagttattttagatttaattacatgatttttttttccataaaagtgtagatgttttaaaccaagaatatataaataataaaatagtcataaataaagtggaaacattcaggataaagaaaaagataaatagaagtagtatggaaggacagaggcagagttgccaatataagaactccagaaagagacaaacaaaaaggttaaggtagagatgattttaaactagcatcatctcattgatttcatgccagatttgtaactgaggtttttatcataaggagaaatatttttttgaaatttttcttttttgcaaataaatattgaataactcagtggccttctagtagaaagacaagctaatatttattgggtacattttaagcatcagcttactgtacttagtaccttacacacattgttaatctttatgtgaaatcctttgagatagataccatcacttctgttatcttcatttttcaaacgatgaaatggaaattgaaagttgttatgtaacttatctgtggtcataccactatgtgatagaaccatgatttaagaccagatctgccygattcctaaagtgtatttttccccccactctaccatgttgcctccaagggtgaaagccatgatgataaaggaatggcatgttctggttaagtggatatttttgttaacatgggtcacccatttcaaaacattagaatgtacaagactaaaagatgcactgaacattaaaactaattgaatatagtttataaaatcatttacttgacctataactttttaattacaacgtagaaagcatctttttaacctttatggctacttcagtttcaggtaaagtataacgttctgtgtattccaactcagagcacaagagaaagcttttagtcaattaaaatagcctttacagaaatagaattttagatctaaaagcagagattgctgaaacttactataatccttatgataataaactctacccagatcaaatggaaaaaacagggctaatttttggtggcc

SEQ ID NO: 31745 - DNA, 1501 bp, Homo sapiens
ttgacaggctaaaacatgaaagaataatgaagtcaggaaaaaatggtttccaaattgccacacatattttcaatagaaatccaagcaataacatgtttcctaaagctaggcatggatgaaacattccttggaaataaatgggtgattactggaagaaggaaaaatctttgagactgtctgcaagaagaaagatgcttaagacagaaagagggcctaacagcttaactaactgtataatgagctttatattctctggctccactgaatcattaccacggattaaagtactggagtacagtgtgttggaagtagaacagggacttgggaatttggaagtaagaagacatattttgataggaaagtggaatggtctggagcttgtgaccagaaaaggtgagggcaggtggggggaggggagggcagtggggaagaccctgtgggcctagggaatggtgccagttggaatgaagagatacagaatgggagtcaggatgtcacaaaccatccctttagtcttacggttaaatgaactgctaacatcaattctataactgagaaagttccaacaaattatttataataaaatgaacaggctgggtgtggtagctcacacctgtaatcccagcactttgagatgccaaggtaggcggatcgcttgagcccaggagctcaagaccagcctggcaatatagtgagacatcatctgtacacaaaaattttaaaaatcagccaggcgcagtggcaygcacttgtagtcctcgctactcgggaggctgaggcacaaagatcatctgagcctgggaggcggaggttgcagtgagccaagattagaccaacggactccagcctgggcaacagactaagagcttgtctgagaaaaaaagaaagacaaacattttcctccctaaaatttatcaaattttaacatcacgctatagaagatagtattataagtaaatataggttaatagtaatacttctgtgagatactgtgtaatacattttcccacagaatgtgaagcataaaattcaaaagaaagcaagcacagctcttgtgacaaaccactttatatagagtattacctaagacattatgtacttggagttgtcttgagtaaatgaattttcactgatctagtaggccttgtggttccctttttatttattattttctttttattattattattattataccttaagttttagggtacatgtgcacaacgtgcaggtttgttacatatatatacatgtgccatgttggtgtgctgcatgcattaactcgtcatttaacattaggtatatctactaatgctatcccttctgatgggatgtatctcaaaataataagagctatttatgacaaacccacagccaatatcatactgaatgggcaaaaactggaagcattccctttgaaaactggcacaagacacggataccctctctcaccactcctattcaacatagtgttggaagttctgaccggggcaatcaggca

SEQ ID NO: 31746 - DNA, 664 bp, Homo sapiens
cccttatcccaaactgccttaatagaaatattatacatccgtatcctttatacctgccatgagggcaaccagcccaccatttctacaagccctttggtgagcaagagttgtttctttataaaaataataaaaaaattagtagtcctgccttacctaaagtaacaattttcaagactcatacatactctctttcatttgaacataacttcatttttaataaaaatacaaataaaaacttttcttagaatagtaataaaatcagttttccatcccagtygcaatcaggatcaagatgtctctccctaagtgtaagtgctacatagaagttcaatatttttcctatgagggtaagaagcagaaattaattagttgttaccctcatattcactttaagtagttcaaataacagcaactttagaagattgttagctgaaaatcaaagttagtaaagttttagttgggggtggtaggagaaggaggagacagcaaatcacttataaatggcttcaaaacaggacccaaagcctaaattccaggaggttgagtgagtgctgtgctttcatgggcctcttcttcatgaaacaaagtgtgtaaaggttgccattaaggacaaacaagtgaaatactttatacattacagtggttggaataaaaattgggatga

SEQ ID NO: 31747 - DNA, 1156 bp, Homo sapiens
atctttttctatggaaaattacaaaagcccaactcaagctggcttatgcaaaacaaaataaagcaagataaaagtggctgactttcataacgagaaagagcagtgctatctttagagacaaatagtctcagatatttagattaggtggcacagattctatcctgtcttctggcattgttttcatttgcattagctttatgcttaggcaaccaaatatggcaaaattggccataacttcaggcttatattctagcagtttagcaactctgtcaggacgagcacgtctcattccagatatttgcaaatggttccagcaaaactcctatggctgattctcactgatctagatttgatcacatccatcatgaaaccaatcagagtagctttgccttatctaggcctaaatcacattcctattcctgtatctggaaagatgartaatattcacaaacatgaactgagggaaatgaaaatgttctcttcagaagaaggctgaatgattgccagctagacaaaaataacaggtatctaagtaatctgatacacagcctaaaatacttagcctgaagagggagcatttttcaaggtgagaagttgtacatggaaagttaaattaaaaccagaagttttttggtgagtgcctttgttcaggcagctacgattaaaaaaaccgtagactgggaggcttataaccaactgaaatttatttctcacagttccagagacacagaagtccaagatcaaggcaccagaagattttgtgtggtgagggccagctttctcagctacagttgtcttctcactctaacctcacaagatggaaaggcaagggatctcctttgagcctattttataaggacactaattgtattctctcctatgtagaggagcatcagactttttgttttatttgggccttcaactgatgagataagggctctcctcatacacattaggggataaggtggtatcacattgtggttttgatttatttgcatttccctgattattagtgatgttgagcagtttttcatatgtttgttggccatttctatatcttcttttgagaactgtctattcatgtcctttgcccactttttaaggggattatttgttttttttcttgttgattagtttgaattccttgtagactctg

SEQ ID NO: 31748 - DNA, 580 bp, Homo sapiens
tgatcaatacactgctcctgtccattcctttggccgtatgctccagctctgtcctttctgagaagagggagtggtatatactctgacctataatgataacaaattactaggttctttaaggattgccagctcttagattttaatgtcttttgaccttttttttttaatgagacagggtcttgctctgtcttccatgctggagtgcagtagcgtgatcacagcttaccgtggcctcaacctcctgagcccaggtagtcctccagcctcccaagtagctgggaccatagtcaagtacgaccacacctgggtaatttggttattttttgtagaaatggggttgctctatgttgcccaggctggtcttgaactcctgggcctgactccagacttggcctcccgaagtgctgagattatgggtgtgagctaccatgcccagccgtttttgactgttttaayacctgtattcttatgtatagattttaggatcagtttaataagttaaagaaaatcctacgtaattttctttctttcttttttttttttgaggcggagtctcgctctgtcgcccaggctggagtgc

SEQ ID NO: 31749 - DNA, 785 bp, Homo sapiens
aaaaaataaataaataaaactaattttaattgcacttgcattttatatgtcaagtattacatctttaagcctactaaatttctgattaaaaaaattgttaaacagtatcaaaagcatagtcatatttgttaagtttcatattggtaattactggttctgaattcatgtaaacatctgcaattggccagtgtaaacaaagaggatagacgatggtaatggaccttaattaaacagccatcactgcaatcccatactattcctttcactttacctactctgcagctttcaaaccaggacaacagatcattgtgcttcaacataggcaggtttctttttttgagtcggtgtctcgctctgtcacccaggctgtggtgcagtggtgcgactctgctctctgcagcctctgcctcctgggctcaagcgattctcctggctcagcctcctgagtagctgggattacaggcgcctgccaccacgctcagctaatttttgtatttttagtagagaaggggtttcaccacattggccgggctggtctcgaactcctgacctcaggtgatccgccgacctcagcctcccaaagtgctgggattactggcatgagccaccacgctcggcccaatrtaggcaggtttcttatttgaaatggtccgtgtagtataacatattgtggatgcttcttccttcctaacccatatgggtttccattgatatttgttcctataagctgcaatgtttgttccaagaaatctgataatggcacggcactaatttccaaaagccta

SEQ ID NO: 31750 - DNA, 1198 bp, Homo sapiens
tgtgcctattggtatttccaggtgactggcttcttcagcactcagtctgggacatatatggcaaaacaaaaatgtagagaattcattgctcagaagtacacatgcttccaattatggaaacatttctttgcttcaaattttaaattggttttcttctgtgctttctctaccctaggggcttaagttttagcattcttaggttttcaaggtcagttcctatttatctgctttccagtttttcaaaattttctgtttagcgtcttcccttaattaccttgtttttatggattcatttaaaaatgtaatgttaatttattaggactttgtgatgaatatgcatgtcatttttgaactccttgcctcaagcaatcttcctgcctcagccttccaaagtgctgtgattacaagcacgtgctgctgcacccaactaactatgcatgttattttaaaggatctgttttaaagtacaattcttcaaaaaaaaaaattcctctgtgtatttgtttatttaaaatattttgagtctactctctccaagtcaatgttttcatgcattgtaaaagtcagtggtcatcaggagacagaaactctatcagttattttaatggagagaattcaatacaagaattattgactagataatttggaactaaaaatagacaacaaaaagaacatgatgatatggaaatagtaattgcagaaagtagctaccattcctacagttgagagaataaaaggaagaggatacaaggattaaaatttagaaggttagaggaggggctcatgaaactgaaatcctgagaagcgtgcttctcaggtggtgctatctgtgggctcagagaaggggtctgtgaggctggtatttagcccactggggagttgggtggtggttagctgtccctgagggtctttgatggcacatgataaggctggttttgcaagtgttggaccactgcaaagtggattcaaccgatgctaggagaacaaattactgycaagccttcagcaaatcttgaaaatataatcgaattctaatatcttctcatgacctctacttctattcctcttacccacaccaccatcatctcttgcctggattattccaaaaacctcctattagaattcctggcttcctctgttgtccctctttagtctattcttttttaaaaatataagcagccaatgtaatcctgccaaa

SEQ ID NO: 31751 - DNA, 548 bp, Homo sapiens
ggagttgaagggttttgcggtaaatctgatacctataattgaaaccttatgattagagttggtgagtggaaaatttctcagtaaaaagggaagtgctgtttctaaaaagaagggaagcgtgcaatagatgtccattataatagcagatcagtaaagatcaatttttctttaccaaggragggacttcctttatagctcgtgtaatagtttggattattcagcaaatattcactgccctctcactagaggactggccatgtgatttgctttgttaaggtgtgtgttaacagatgcagctcaagcagaggcctgaaatgagtttctgtggttggggttgcttgtgcctctgccacctcggttagaaaagtacatcccatggaggccactggtcccacaggacgagagccagagggagcagagccagcccagctaacccgtagctctgcagctcaaaacagaattgccccagccaatcctgcaaactggtgggcatgatactgaatgattattggtgtatggcgctgagttttggggaagtttattatgca

SEQ ID NO: 31752 - DNA, 559 bp, Homo sapiens
gtcaccaaatgaattcacggacaagatgatatagtactatttttaaaagtctatgattcccagaaatcatcctgtttcctcagtttttatgtgagttttaagaccaaggaataccttatcaacttccaaacaacctttctagctttagtttcaacatataactgcctgaactgatcacttcagcaaacagtcttttcactctttctcaaatttcatttttcctacctgtatgcgtttgcactcacaagtcatcctccagcaaaagccctcttcactgtcttggggtggtggggagatttcacataccataaaattcactctttaaagtatacaattcagtggtttttattatattcacaaggttataaaactattaccactatctactttcagaacatttaagtcacattaagggaaaactctgtactcattagcaattrctccccacttcccacggtttctggcaaccactaatctttctgtatgactagcctgttttagacattctatataaataaaatcatacaacatgtagccttttgtacctaacttcttttat

SEQ ID NO: 31753 - DNA, 2024 bp, Homo sapiens
gaataggaatggctgtgtttcaataaaacttttatttacaataaggggtgactagaatggatttggtgagtgggtcatagttggccaattcccgctctagattaatgccaggcacataggaggtactcaaatacatgctggatgaataaatgatttcacaactattttggttagagatattatcaggaaagacatagcaaaattccatgactataagcaagtactttcttttgtcatagctctttgttcaaggatatcttgataaacttatcgtacctatcactccgctagctattaaacactgtaaaagatatttaggacacacagttctgctctcatcaatgtaggtacaagaacagaaatactaatgtctgattttcacgtatctgcacaaacatcacatctaactccaaaattacaactttattagccacaaaaccacaaaatgttaagtatcaaaaccacaaagttttagaatacaccactctcacttcatagaggtatataaaaatggatgccagaaatgattgcaagatacttcagaaactgattttctttcagttaaaacgtaacacaccttgtagggatgactaacaaatgcatcatgaaaggaagtttaactacaaatcactgcaaaacaactgttatatatacagggacaacttgatatgtagtaaaaagaaaaaagaactgactcatcttcaagttggttgtgaatataaacttcctacttagataagtgcttagcctgaagtacttcatttaagatagttatgatgcctgtcctttctaactcatagaattttgagggggtcaactgggacggtgattgtgaaaatactttaacccgtaagttgcaatataaagctcagttcagaattgggtggcttatttaagtcacatatctgcagttcatcatgagagagagaggttcaaactgtccactatttaatagtagctgcagtcataaatccaagactccttatttacccatagctcacaaagggcaggttcataaaagttctccttgccacagagacagtaatcacctgttaggagatctgtgaataggcctcacttccacctgagatgataccgttttttattaaaagtgtgatggaatggtttctaacatcctcctctcaaaagtttataaaatgatgtatcaattactctggataactggcaacaaaaatttactatgtgcttacgctcaatatttataactgtaaaggarggataaaagcaagtatgtggtctaccaggggagacttctgtgtgcctagactacaggatagtgggaaatgatcttagaataaggccacatcacaaaatctgtgtttccatgataaggagtctgaacttaaacccacaagcaacagggaatcccaccaccttagaatgaaaaggggagctttttagaacaagtgctgttcactaaatattactgttttttatatactttaaattgctctgaaaagaattctaggtgactttaaaaatgcatgctgtatgatatcaaaagtaggcaaaaatagtcaatccaagtaaaaatggttaaaaaaaaataagttagaaatactgtcaataaataaaatgtatgcccataaaggcctatttgctaattggaagccattcaactctattctttcaaggagctaatgcaaagaagaatatgactacttaagaaaaacaaaatcagcgactcaagaaaagtacaatgaaatattaccccagataacataagaggatttcatctatagtttacaacaagtaaaacacaaaatgatatggtcaataatacctgaaaagtaaaatgtaagtttctgggatggatggatggatggatggatggattgactgactgactgatttgagacagggtctcactctgtcgcccaggctggagtgcagtggtgcgatctcggctcactgcaacctctacctcccaggatcaagcgattctcctgcctcagcttcccaagtagctgggattacaggcacacaccaccatacctaatttt

SEQ ID NO: 31754 - DNA, 891 bp, Homo sapiens
atgcattcattatgttttcattgattatttattgaactcctgctatgtacctagcactgagctgggtgctgaagatgaagaaaaatcagacaagtcctgccctcaaagagttccccagactagactaagtagcaataagacataaacagaaaaagctatcataaaataaaatagaaagcaatgagtgtaaaaggattatggtaaggtgacgtaagaatttttcttttttttttttttttagacaaagtctcactctgttgcccaggctggagtgcagtggcatgatctcggctcactgcaacctctgcctcccaggttcaagcgattctcagcctcctgagtagttgggactactggtgcgcaccaccatgcccagctaattttttgtattttttgtcttcagtagagacagggtttcaccatatcgtccaggctggtctctaacttctgacctcgtgatccacccgcctcggcctcccaaagtgctgggattacagtcatgaaccaccgcacccagccgtaaggatttttaaaagggaaaaaaaatgaatatttactgaacatctagcatgtgccaggatcgcactgagaattctacaaacctcatctcatttaaagtttgtaaaaggacttattaactgtttcacsgaggaggaacccaagacccagaacttgacaggtcacacagctagtaagtagcagagccaggattaaaacccagggccatctgactccaaaatacatagattaaatgctacttgtaaatttttctgctaggcatggtggctaacgcctgtaatcccaacattttgggaggccaaagcaggaggatcatgtaaggccaggaggtcgagattgcggtgagctataatcacaccactgcaccccagc

SEQ ID NO: 31755 - DNA, 581 bp, Homo sapiens
gtgtgtgtgtgtgtgtatatatatgtatgtatatacactaacacacatataaaatgtgctacaaacttatggactattaaatagacttattaaggtctatttaacaagtagactttaaagttacctttgaagttacaaaactgacatcttccaatttgctagaattaatttatttatttttattttattttattattttattttattttattttattttattgagactgagtctcactctgttgccaggctgaagtgtagtggcgtgatctcagctcactgcaacctccgcctcccaggttcaagtgattctcctgcctcagcctcctgagtagctgggactacaggcgcacaccaccatgcccagctaatttttgtattttactagagatggggtttcaccatgttggccaggatgtctcaatctcctgacctcatgatctgcctcctcggcctcccaaagtgctgcaattatacgcatgagccactgagccctgcctatttatttattttttgagatggagtcatgctctgtcacgaaggctggagtgcagtgcaacctcygcctcctgggttcaaggg

SEQ ID NO: 31756 - DNA, 971 bp, Homo sapiens
cacatttatagagcaaatgtacctaaatgttaatatatgttcatcataaattagattaaaaactaactcargttaattttagtatgtcattatacagtattaactaaacaattaggataaaccactacaaaacagtgagctgtgacatcatagagccatttcctttcaagccctacccttaatccactcttccacctgccaatacacacacatgcacgtgtgcacatacgcacacagaaccccccctccaccaccacctttcatggtgtatttttcaacccctttagagaattgacaaggatagaagacatttaagattaaggtccataaagtattcattattgttgttttctgctttctttaagaactgtctcgtcctatcaggacacacagctatgctagctcagctgtaaacaaaaggatacgaccttgaaggtgtctatagctcactggttttagatgccgactccacatcttcatcacagctcctaggtggtggctgcactgatgtgtacaataagataaactgaatcgctagctgaaataagcattttgaattttcatttgtatgtgagtggattcaaaagattaaagtgctatatccataattacatgctcactactattaaaaatacctaagctaacttctaattaaaagggtggatagtacatgtgtattacctcctctccctcctgaacccctgccaaaaacaatatataaggccacaaagaagaaaagatccaagtgaacaagagatgcaacacttttcagaagatggaaaatgaatacagaagtagttataggatgagaaatagcagaggctacagaggggaagaccacacagaaacaaatttgctctgcaacccaggctccaggcttaggggagcaggacccaaccacaaagggaatagtagggtgggtgtagggctgagaacaggggagtgaatgaatgccagcatatgcaacactt

SEQ ID NO: 31757 - DNA, 971 bp, Homo sapiens
cacatttatagagcaaatgtacctaaatgttaatatatgttcatcataaattagattaaaaactaactcaagttaattttagtatgtcattatacagtattaactaaacaattaggataaaccactacaaaacagtgagctgtgacatcatagagccayttcctttcaagccctacccttaatccactcttccacctgccaatacacacacatgcacgtgtgcacatacgcacacagaaccccccctccaccaccacctttcatggtgtatttttcaacccctttagagaattgacaaggatagaagacatttaagattaaggtccataaagtattcattattgttgttttctgctttctttaagaactgtctcgtcctatcaggacacacagctatgctagctcagctgtaaacaaaaggatacgaccttgaaggtgtctatagctcactggttttagatgccgactccacatcttcatcacagctcctaggtggtggctgcactgatgtgtacaataagataaactgaatcgctagctgaaataagcattttgaattttcatttgtatgtgagtggattcaaaagattaaagtgctatatccataattacatgctcactactattaaaaatacctaagctaacttctaattaaaagggtggatagtacatgtgtattacctcctctccctcctgaacccctgccaaaaacaatatataaggccacaaagaagaaaagatccaagtgaacaagagatgcaacacttttcagaagatggaaaatgaatacagaagtagttataggatgagaaatagcagaggctacagaggggaagaccacacagaaacaaatttgctctgcaacccaggctccaggcttaggggagcaggacccaaccacaaagggaatagtagggtgggtgtagggctgagaacaggggagtgaatgaatgccagcatatgcaacactt

SEQ ID NO: 31758 - DNA, 606 bp, Homo sapiens
aaaggatgatgaatgcccagtggttaatgcatatgctactttgatcgaaaatgattgatttgaatccagaacttagacaggcagtgttatcatgtattgcaccatcagcaaagactttgccaaaaattgtagggtgcaccaaggatgtgaaagaggctgtcagaaagctggcttatccggtgttagctgaaaaggttcgtatgagagctatgtccattgctcagacagtaatgctccctcaacaaggttttaatgagagatsagatgctgtgaaacaagctatgtggaagcatcttctccaaagctggttatggttctctgagggaaatatcttcgagtggcttcagcagttggatgtagaaaattctgaagtggcagtctctgtcctcaatgccatgttttcaatgactcctctcagtgaactggtggcaatctgtaaaaacaatgatggcaggtacataaaggattcattctttgaaatgtaatactgattaacttctacaattaatttgttttttttcctccccatagcttaagattatattaatatctttaatcttacctcccttttgttttcttttagtctgatgaatatcttctttccct

SEQ ID NO: 31759 - DNA, 1172 bp, Homo sapiens
taaatatccactcagtatctgttgaaacaataatagtaacagaataagggcccttcatagtgaggttaaatgagatataaacacctagcatagtgattgtgcagcagtactgagcttcagtttgcatattggcagttcatgatgctgtcagagtacacaggcaaagtgtgtggttgtccagctgctcatgaaaggaagggagaagggtggtgaatggcatccatatactacaggatatctaagtattatttgtgtagcaacgtataagcggaagaaagcaacactttaaaatagattagcatagttcccagttaagttgtacttgatgacttttgctttaattttataatctgaactattgttactggtggagggtgtccaggttcttggcgttttgaacaaagaatcagacaaratgtacaaacaaagcaaggaaagaatgaagcaacaaatgcagagatttattgaaaatgaaattacactctacaggtgagagtgagcccgagcaagcagctcaagagtgctgcttacagaattttctgggatttaattccctctagaagttttccattggttacttggtgtatcccatatgtaaatgaagaggatgaagtacagttacaaagttatttacttggtgtacaccctatgcaaatgaagattatgtttcctgcagtagctgatatgaaattataaaattatttacatgggcttacaaggtttgggtttttccaactgggcccagtggctctcatgcctgtaatcccagcactttgggaggccaaggcaggtggatcacttgaggtcaagagttcaagaccagcctggccaacatggtgaaaccttgtctctactaaagatacaaaaattagccgggcgtggtcgtgcacacctgtaatcccagctacttgggaggctgagacaaaaagaatcgcttgaacccaggaggcagaggttgcagtgagcctagatcaaaccactgcactccagcctgaatgacagagcaatactctgtctcataaaaaaaaataaaaaaaaaaaaaagaagaagaagaaggttcgggtttttccttagttgagttctaggaggtccttaggttccctgcctccagacccttttcctgcttcactatgaaacacctctacatttgttgctaccacattatggtggc

SEQ ID NO: 31760 - DNA, 599 bp, Homo sapiens
aggggatagatttcacactgttcctcctaccttcctttgcaggcacatcagtggagctgagatttctggttagaaaaatcaataggaatttacagcaaagcttggaggagggcattctgatgtgactaagaaactctgaaggcaatcgttactcaatgcagaagcaactcctttctattgctgcgggaggggatgagtggataaaaaaaaaaaattgagtgatgtgaggaccctagctgaatagtgatagagaaattctcagtaattctttttcttttacttttwcttttttttttccagtcgtttatttaaccacttcattaattcaaaggtttattgcatgcctaccatagatcagactctctaagggcatgtgtaatcaagaaataaatgaggcacaacccctagccctaaggatctcaaggtgtagagagggaggcaaacaagaaaagtaatcattaaaatgcaaggtgatgattaccatcacagagatgatgtacctgccgagtcttgcctggcctatggaactcaggaaggaatccataggaggcaatacttggactgcatccacatagaaaatggtagaaatcttctgtgaa

SEQ ID NO: 31761 - DNA, 599 bp, Homo sapiens
aggggatagatttcacactgttcctcctaccttcctttgcaggcacatcagtggagctgagatttctggttagaaaaatcaataggaatttacagcaaagcttggaggagggcattctgatgtgactaagaaactctgaaggcaatcgttactcaatgcagaagcaactcctttctattgctgcgggaggggatgagtggataaaaaaaaaaaattgagtgatgtgaggaccctagctgaatagtgatagagaaattctcagtaattctttttcttttacttttacttttttttttccagtygtttatttaaccacttcattaattcaaaggtttattgcatgcctaccatagatcagactctctaagggcatgtgtaatcaagaaataaatgaggcacaacccctagccctaaggatctcaaggtgtagagagggaggcaaacaagaaaagtaatcattaaaatgcaaggtgatgattaccatcacagagatgatgtacctgccgagtcttgcctggcctatggaactcaggaaggaatccataggaggcaatacttggactgcatccacatagaaaatggtagaaatcttctgtgaa

SEQ ID NO: 31762 - DNA, 599 bp, Homo sapiens
aggggatagatttcacactgttcctcctaccttcctttgcaggcacatcagtggagctgagatttctggttagaaaaatcaataggaatttacagcaaagcttggaggagggcattctgatgtgactaagaaactctgaaggcaatcgttactcaatgcagaagcaactcctttctattgctgcgggaggggatgagtggataaaaaaaaaaaattgagtgatgtgaggaccctagctgaatagtgatagagaaattctcagtaattctttttcttttacttttacttttttttttccagtcgtttatttaaccacttcattaattcaaaggtttattgcatgcctaccatagaycagactctctaagggcatgtgtaatcaagaaataaatgaggcacaacccctagccctaaggatctcaaggtgtagagagggaggcaaacaagaaaagtaatcattaaaatgcaaggtgatgattaccatcacagagatgatgtacctgccgagtcttgcctggcctatggaactcaggaaggaatccataggaggcaatacttggactgcatccacatagaaaatggtagaaatcttctgtgaa

SEQ ID NO: 31763 - DNA, 2666 bp, Homo sapiens
ttattggttagtaaaaaataatttcatagctgatcttaaaatatgtatgcagttgaaaacgtatgagcccctattttcatagtacccaatataaatcataaacttagataccactgagtcaggatttgtgatatgacagagaaaagctgatgtttatgtataaattatgctagacaaagagctgttagcaagtttgtttaatattgttagagcagtgattaaattgcttaggttaaggtttgatttgtccacttagctaaaatactagttttgaagaaaagctacttatgtttgagttcaggtctgtctcttagtaactgtatcttgtgataaccttatgggtttaattgagcattaacttattcctctgtaaaatgggaatgatactagtaactttgcatgcctcagagaaacataaattgggtaatgtatgtgcattgtcaatgaaaagatacctatcatatcacaggatcagtcataattatcagcaataataatgagataatgattacaaatgatgatctctcaccaagcatctagccatgccatatgcttttgcttgttttatgctcttgatatacatgaaaatatcaaatctaaattatgtgtaattttcaacataatgcttaacgcagagttgtctaatttatactagcctattttctcatgagtagtgagatttccccatattcagaatatgccccagcatgatctgtgctcatggtatttgctgcccttccccaatgtctttgtccctgcacaaggattatacaactgtgttctcatggatgtaaaagtggccatgtgatttgcttcagccaataaaatgtggatgaaagtaacctattgtcgtttctagagtacaagctcatggtttctaatgtctctcttttattctctgcctctgaactactagtgccccagatagaggctgctttgtcagttttggtctcatggaaaggataaacagagctgtacataccccacaatgagcacttgatattaggcactactgctttcacaatcttaagtcattcagatcctggggttattgttatcacagcataagtcagcctaaggtgactgaaacagctgtataagatacagaactatcatgcgtacctcctccttaaaagactccatcgttatctgtggtataatgtccaaattcygtagcatggcacttaaaaattctcatgccctgattcctgccaagcttccccagcctcattgcctgtgactgctctccctcacactacaccatgcagcaatttcagactgcggctagtgctcagaaaccttcatgctgaaacatgcttctatgcatgcatgcaccttactttaagtaatcttggaagatctctgaaaggatttttcctaaaaaaacccggttcaaatcattctttttcaggaagttgatgctgtacctcttgatcttaatagagataaacagcccattttctatattctttctgcttctgttttcttctataaatatacttagcacaagatagcaaaagtgtaatgatttaacttcttgagagcagacttaggatcacatttattactctgttcctgacaatgcctagtacaatgtggacagtcaagaaatattgatttacacttccttcatttatcttaaggtgagataaaaaacacaagttatatgtttgaaataaatagatcctactttatggcctgaggatgttcccatgtctttccatgtctgagtttctgtctcagtaacagcaatttcttatacgagaaagccctttgaaatcatcaaatgaagcattaaaagtagaagctattaatcaccttcaacatgatttacaaacatattttattagttctccttaagtcccactgggcaagtattaataggagtttattgacataaatcttttaaaacagagttttctcatttgaaaaccaaattaatgtgtcagaatgcagttgaaatgttctgaccttttctatttaatctatgttagttcagtgacatcctctcacccttataattccctcctgaaccctgtactcatgtgaacaactttccagagttgaattagtcatatatttggggagaaatatgagaattttccaagtcacagtcttgtaggaaccttgaagccaaggattactttccagccttcattgagaatccctccttaacgtataactgacagcgctgcacattcctaaaacatttctatcaaagacaggcattatgaggcccactttctaaatgaaaattatgaggcctggttgctctttcttggtgcccaacatggcaagccacgtgtacaacgggacaagttaggtgacagacacaagggattaacagagtggcactgaacttaaagctctgccctcagaaacatccagaccagtgggaagagtgcctcaaaagaatgagaaaacaattattttgcccagcgttataacaaactgtgcaaatcaagtggtgggggacagagcagagagagcaaactattgtgcctgcgattagggtagagaaagggagagaagtagatgagggaaaggtaaaggcatgtgatatcgaactggactttgatggattaatattaccatggggatgtgacagaagataccgcatgtgcaaaggcatgagaatatacaaaggatagtatatttgcaaacaa

SEQ ID NO: 31764 - DNA, 645 bp, Homo sapiens
catacttcttagagttggtgtgaagatacagtgagagaatatatgtaagtgcttaataagatgtctgcatagagaagagtgctttataaatattagccatttagtggtcactttatttgccttacttcttgactttcataatatttaccactttgcaaacactataatcatccataagtatatcaatatatatgcccatctctaatactatctgatatacaagaggcccttagtaaagatttttgtatgaagaaatgaatgaatgagctccctgtctcaattctgtaaagcattgcggtttggcaatgtcaaacctcaggctggcaatgtcaagcactgagactcctgaagtagaatttttagatctagcaaataaaaatacagggacttagctaaatttgaacctcacgtgaaaagcaaattatttttagtgaaagtatgacccatacaacattcaagatatacttatataaaaatttatttgttgttagcagagattccagtgtaactrtctcacactttaattggcaacccttaacagaagccaatttcaaatccatatgtctttgtgttcccataccatgaatgagaacgggattcaagtccatctatgtgacatccagttaagttcatgataaacataaa

SEQ ID NO: 31765 - DNA, 1920 bp, Homo sapiens
gggtttttgtggatgatagcaggatactcagcttacttttgctgcaaggcgaggtagtttacctaaggcttaagaggaggaatatgaatgtctttggagatggtggtttcaccatgttggccaggctggtctcgaactcctgacctcaagtgatccacctgccttggcctcccagagtgctgggattacaggcatgagccaccgcgcatagtctttattggttctgagttggagtctagctctgtcacccagagtggagtgcagtggtgcgttcttggctcaccgcaacatccgcttcctgggttcaagtgattcttgtgcctcagcctcccaagtaggtgggattacagacgcacaccaccacacccggctaatttttttgtattttttagtagagacggggtttcaccgtgttagccaggatggtctcgatctcctgacctcgtgatccacccacctcagcctcccaaaatgctgggattacaggcgtgagccactgcgccctgcctaatttttttrtttttagtagagacggagttttgccatgttgcccaggcttgtctctaacccctgagctcaggcaatccacccacacctcagcctcccagagtgctagaatatgaatgtttgaggtaataataacaatgattaaagaccagctcagtaaaatgtttgccataagctggagtagagcctttagttagattttactttatttttgcgtataaacataggcacctataacacagatgacccaaagttagtaatgtttcattataagaaccacttgataacaaactataaattatgtagcacagttaaatttactatatgcataattaatacatagcatctgaataaaactcggtgtgccgagcacggtggctcatgcctatcactttgggaggctaaggcaggaggcttgcttgagcccaggagttggagaccagcctggacaacatagggaaaccttgtctctacaaaaaataaaaaaagttagaccagcattgtggcacacacctgtcgtcccagctactcaggaggctaaggcagacggattgcttgagcccaggaggtcgaggctgcagtgagctaaggtcacgctactgcactccagcctaggagatagagtgagtctctgaaaatcagtcaatttcttagtgtaaaatgctaaaagaattgtgataattgtcttttcttttctttcgagatggagttttgctcttgttgcccaggctggagtgcaatggcaccatctaggctcactgcaacctccgcctcccaggttcaagtgattctcctgcctctgcctcccaagtagctgggattacaagcatgcgccaccatgcctggctaattttgtatttttagtagagacggggtttctccatggtggtcaggctggtctcgaactcccaacctcaggtgatccacccgcctcaccctcccaaagtgctgggattacaggcctgagccaccacgtccagcaggaactgtgagaattttctcaggcagaaagatgcttgctatgctttgctttttttttattattttttgaaacagagtctcactctgttgcccaggctggaatgcagtggcctgatcttggctcactgcaccctccacctcccatgtttaaacaactgttatgcctcagcctctcctgagtagctggtattacaggtgtgcgccaccatgcccggataattttttatttttagtagagaccaggtttcgccaggctggtcttacactcctggccttaagtgatctggcctccttggacttccaaagtgttgggatgacaggtgtgagccaccgcaccaggccagaaagaaggttcttgaaggaaatagatgtattttccccacgtatttggagatggtggtggtttaatgtttacagatgaaaaggagagaa

SEQ ID NO: 31766 - DNA, 911 bp, Homo sapiens
tttttgcagttcagttatactcccccatccactttcctcctacagatttttttcactttagcatccatcactttatataattgagtacttcattgggtttatttgtttcatcccacagaatgtacactctatgagataattttttttgcactgatctttgctgtcccttgcacctagawtaatgcctggcacatgtaaatatttaatacacttttgttaaatgaaccaactgagccaaatttacacagtacttaggtgaacctggggttcctttggaaaagatcagaaagcaatacagtgttcaaattctagaagccagaggtaaatcttgatgttcagtggtagttgagtaggaaaaggataaaaatgagagaagctcggccaggtgcggtggctcacgcctgtaatcccagcactttgggaggctgaggtgggtggatcacgaggtcaggagttcaagaccagcctggccaagatggtgaaaccccgtctctactcaaataaagaaaattagcctggcgtggtgacgggtgcctgtaatcccagctactcaggaggctgaggcaggagaatcgcttaaacccaggaggtggaggttgcactgagccgagatagcaccattgtactctagcctgggtgacagactgagactccatctcaaaaaaaaaaaaaaaaaaaaaaagagagcagctcagtaataaataattggtagaagagtgtccagatttattgctatggggagaagtggttatttctggcttcccttttttggttcttagaaacctgatagataaacttctcttaaaggactgaggcaacatggaaggatggtaaagtctagttgctagccatgcattggctttggagcatttctaagccttactcagggagagccagaggaggagctgtta

SEQ ID NO: 31767 - DNA, 911 bp, Homo sapiens
tttttgcagttcagttatactcccccatccactttcctcctacagatttttttcactttagcatccatcactttatataattgagtacttcattgggtttatttgtttcatcccacagaatgtacactctatgagataattttttttgcactgatctttgctgtcccttgcacctagattaatgcctggcacatgtaaatatttaatacacttttgttaaatgarccaactgagccaaatttacacagtacttaggtgaacctggggttcctttggaaaagatcagaaagcaatacagtgttcaaattctagaagccagaggtaaatcttgatgttcagtggtagttgagtaggaaaaggataaaaatgagagaagctcggccaggtgcggtggctcacgcctgtaatcccagcactttgggaggctgaggtgggtggatcacgaggtcaggagttcaagaccagcctggccaagatggtgaaaccccgtctctactcaaataaagaaaattagcctggcgtggtgacgggtgcctgtaatcccagctactcaggaggctgaggcaggagaatcgcttaaacccaggaggtggaggttgcactgagccgagatagcaccattgtactctagcctgggtgacagactgagactccatctcaaaaaaaaaaaaaaaaaaaaaaagagagcagctcagtaataaataattggtagaagagtgtccagatttattgctatggggagaagtggttatttctggcttcccttttttggttcttagaaacctgatagataaacttctcttaaaggactgaggcaacatggaaggatggtaaagtctagttgctagccatgcattggctttggagcatttctaagccttactcagggagagccagaggaggagctgtta

SEQ ID NO: 31768 - DNA, 2301 bp, Homo sapiens
catttggtcaccacatcaaaccctggaggaaaaatgagtggctaagcccttacactttccaatgtgagctgactagccaccttcctgtaaatataagagtctctcaggactgtgctatgataccttaagtccctgtttagctcagttacattaaaaaggttttccaaatttattcagctactttgatcactctttagaattcatccttctagaacttgtaggcattaaggaagggattactagttactgaatgccrattacaggtattgttttatttaatattcatatctaccctgtgaaataatgctagtatcttcgttttatataaaaggaactgaggcacagtgggataaagcaccttgtccaggattcacaacagaaaatggttgtgagcaggattcacgccagcactgtcttgactccacagctgttgctgtctttaccattacatacccctcagctttcccatgcaacaaggctggcaatgccttcaaatgtactcatagaatgaatgtaagttgcaggccccgtgcctagactcaccatacgaggagaagttccttgaaggcagagaatgtctggtgcttcactgatctatgcctatagttctgcaggcagacggtagcccgtacatatccatgactccctgacaaaccagcaatagctttcctgtggtttacatcaattcacttgaatttaaaattccagggaaagaaaatgtggcccttcccagaaatccttgaagtatgctaactccagtaacttctatatatcattaagaaagagtgtgttttatggactgaaatttgaaaacaattgagcatctggtaaaaagtgtaggatactaagttcaaaaattctagaacaaaacctaacttcacaagaactagtaattatatgcctacatttcctaaaatggcaaatatactgtttttttgtatgcatcataaagatattgcaaattaacattgcatacatagatatatccactgtacctgacttgactatgtccttgaatagaaaaaggactcattttctaatttttctcatatttaatactaaatgttctatattatatatgtgtataatgtgtacacatatattaaaataaatatatatagatatgtgtatatcataatgataaacaggtctgttccaaaggatatacctatttgaaatttacatctaatgcttttttaatgatctgaagtagacagttacagtatttttctgttatgaagaatgattttaagaatatctccacaatgtgcattcatcagacaatttaaaatgttgttaataagcaattaaagtatctttggtatttagatgctgaatccatttgtcgaagataagttcatcttaatgttttagagtgtgcattatatctacctcattcttattccaggaactatgccaaaattctctcttcaaagaagaaaaataagaggcataaatattggcttgaaatacgatagaatgcaagaacttttgctttggcagtagaacagttttataagaattgaggctaatttcataatctttagcaatgcagatatgtatctttagtctcatgaagattgtaattccttgccaaggtgagcacttcaggtacgttttaattttttgacaaaattaaaaaaaataaatttttggttaagaaagcctacaggccgggcgcggtggctcacgcctgtaatcccagcactttgggaggccgaggcgggtggatcacgaggtcaggagatcgagaccatcccggctaaaacggtgaaaccccgtctctactaaaaatacaaaaaaattagccgggcgtagtggcgggcgcctgtagtcccagctacttgggaggctgaggcaggagaatggcgtgaacccgggaggcggagcttgcagtgagccgagatcccgccaccgcactccagcctgggcgacagagcgagactccatctccaaaaaaaaaaaaaaaaaaaaaaaaaaaaagaaagcctacaatggacacacagatataaataaacagtactagattttcatcacataaataatttgaagaagagcacgttagtagaaaattgttatattgaaatattattccctattgaatattttaaaattactccttaagaggagcatttcatagtgtaaccattttcaaggggaaaaacctcccacaaaattcatgttcaactgactcaaataatagtgttaaatattcattcattttaattctaccatgaaaaaagttggtcccagtgtaatgaaccaccactatttatttatttcaaatgcaatttattaaaa

SEQ ID NO: 31769 - DNA, 2301 bp, Homo sapiens
catttggtcaccacatcaaaccctggaggaaaaatgagtggctaagcccttacactttccaatgtgagctgactagccaccttcctgtaaatataagagtctctcaggactgtgctatgataccttaagtccctgtttagctcagttacattaaaaaggttttccaaatttattcagctactttgatcactctttagaattcatccttctagaacttgtaggcattaaggaagggattactagttactgaatgccgattacaggtattgttttatttaatattcatatctaccctgtgaaataatgctagtatcttcgttttatataaaaggaactgaggcacagtgggataaagcaccttgtccaggattcacaacagaaaatggttgtgagcaggattcacgccagcactgtcttgactccacagctgttgctgtctttaccattacatacccctcarctttcccatgcaacaaggctggcaatgccttcaaatgtactcatagaatgaatgtaagttgcaggccccgtgcctagactcaccatacgaggagaagttccttgaaggcagagaatgtctggtgcttcactgatctatgcctatagttctgcaggcagacggtagcccgtacatatccatgactccctgacaaaccagcaatagctttcctgtggtttacatcaattcacttgaatttaaaattccagggaaagaaaatgtggcccttcccagaaatccttgaagtatgctaactccagtaacttctatatatcattaagaaagagtgtgttttatggactgaaatttgaaaacaattgagcatctggtaaaaagtgtaggatactaagttcaaaaattctagaacaaaacctaacttcacaagaactagtaattatatgcctacatttcctaaaatggcaaatatactgtttttttgtatgcatcataaagatattgcaaattaacattgcatacatagatatatccactgtacctgacttgactatgtccttgaatagaaaaaggactcattttctaatttttctcatatttaatactaaatgttctatattatatatgtgtataatgtgtacacatatattaaaataaatatatatagatatgtgtatatcataatgataaacaggtctgttccaaaggatatacctatttgaaatttacatctaatgcttttttaatgatctgaagtagacagttacagtatttttctgttatgaagaatgattttaagaatatctccacaatgtgcattcatcagacaatttaaaatgttgttaataagcaattaaagtatctttggtatttagatgctgaatccatttgtcgaagataagttcatcttaatgttttagagtgtgcattatatctacctcattcttattccaggaactatgccaaaattctctcttcaaagaagaaaaataagaggcataaatattggcttgaaatacgatagaatgcaagaacttttgctttggcagtagaacagttttataagaattgaggctaatttcataatctttagcaatgcagatatgtatctttagtctcatgaagattgtaattccttgccaaggtgagcacttcaggtacgttttaattttttgacaaaattaaaaaaaataaatttttggttaagaaagcctacaggccgggcgcggtggctcacgcctgtaatcccagcactttgggaggccgaggcgggtggatcacgaggtcaggagatcgagaccatcccggctaaaacggtgaaaccccgtctctactaaaaatacaaaaaaattagccgggcgtagtggcgggcgcctgtagtcccagctacttgggaggctgaggcaggagaatggcgtgaacccgggaggcggagcttgcagtgagccgagatcccgccaccgcactccagcctgggcgacagagcgagactccatctccaaaaaaaaaaaaaaaaaaaaaaaaaaaaagaaagcctacaatggacacacagatataaataaacagtactagattttcatcacataaataatttgaagaagagcacgttagtagaaaattgttatattgaaatattattccctattgaatattttaaaattactccttaagaggagcatttcatagtgtaaccattttcaaggggaaaaacctcccacaaaattcatgttcaactgactcaaataatagtgttaaatattcattcattttaattctaccatgaaaaaagttggtcccagtgtaatgaaccaccactatttatttatttcaaatgcaatttattaaaa

SEQ ID NO: 31770 - DNA, 2301 bp, Homo sapiens
catttggtcaccacatcaaaccctggaggaaaaatgagtggctaagcccttacactttccaatgtgagctgactagccaccttcctgtaaatataagagtctctcaggactgtgctatgataccttaagtccctgtttagctcagttacattaaaaaggttttccaaatttattcagctactttgatcactctttagaattcatccttctagaacttgtaggcattaaggaagggattactagttactgaatgccgattacaggtattgttttatttaatattcatatctaccctgtgaaataatgctagtatcttcgttttatataaaaggaactgaggcacagtgggataaagcaccttgtccaggattcacaacagaaaatggttgtgagcaggattcacgccagcactgtcttgactccacagctgttgctgtctttaccattacatacccctcagctttcycatgcaacaaggctggcaatgccttcaaatgtactcatagaatgaatgtaagttgcaggccccgtgcctagactcaccatacgaggagaagttccttgaaggcagagaatgtctggtgcttcactgatctatgcctatagttctgcaggcagacggtagcccgtacatatccatgactccctgacaaaccagcaatagctttcctgtggtttacatcaattcacttgaatttaaaattccagggaaagaaaatgtggcccttcccagaaatccttgaagtatgctaactccagtaacttctatatatcattaagaaagagtgtgttttatggactgaaatttgaaaacaattgagcatctggtaaaaagtgtaggatactaagttcaaaaattctagaacaaaacctaacttcacaagaactagtaattatatgcctacatttcctaaaatggcaaatatactgtttttttgtatgcatcataaagatattgcaaattaacattgcatacatagatatatccactgtacctgacttgactatgtccttgaatagaaaaaggactcattttctaatttttctcatatttaatactaaatgttctatattatatatgtgtataatgtgtacacatatattaaaataaatatatatagatatgtgtatatcataatgataaacaggtctgttccaaaggatatacctatttgaaatttacatctaatgcttttttaatgatctgaagtagacagttacagtatttttctgttatgaagaatgattttaagaatatctccacaatgtgcattcatcagacaatttaaaatgttgttaataagcaattaaagtatctttggtatttagatgctgaatccatttgtcgaagataagttcatcttaatgttttagagtgtgcattatatctacctcattcttattccaggaactatgccaaaattctctcttcaaagaagaaaaataagaggcataaatattggcttgaaatacgatagaatgcaagaacttttgctttggcagtagaacagttttataagaattgaggctaatttcataatctttagcaatgcagatatgtatctttagtctcatgaagattgtaattccttgccaaggtgagcacttcaggtacgttttaattttttgacaaaattaaaaaaaataaatttttggttaagaaagcctacaggccgggcgcggtggctcacgcctgtaatcccagcactttgggaggccgaggcgggtggatcacgaggtcaggagatcgagaccatcccggctaaaacggtgaaaccccgtctctactaaaaatacaaaaaaattagccgggcgtagtggcgggcgcctgtagtcccagctacttgggaggctgaggcaggagaatggcgtgaacccgggaggcggagcttgcagtgagccgagatcccgccaccgcactccagcctgggcgacagagcgagactccatctccaaaaaaaaaaaaaaaaaaaaaaaaaaaaagaaagcctacaatggacacacagatataaataaacagtactagattttcatcacataaataatttgaagaagagcacgttagtagaaaattgttatattgaaatattattccctattgaatattttaaaattactccttaagaggagcatttcatagtgtaaccattttcaaggggaaaaacctcccacaaaattcatgttcaactgactcaaataatagtgttaaatattcattcattttaattctaccatgaaaaaagttggtcccagtgtaatgaaccaccactatttatttatttcaaatgcaatttattaaaa

SEQ ID NO: 31771 - DNA, 2301 bp, Homo sapiens
catttggtcaccacatcaaaccctggaggaaaaatgagtggctaagcccttacactttccaatgtgagctgactagccaccttcctgtaaatataagagtctctcaggactgtgctatgataccttaagtccctgtttagctcagttacattaaaaaggttttccaaatttattcagctactttgatcactctttagaattcatccttctagaacttgtaggcattaaggaagggattactagttactgaatgccgattacaggtattgttttatttaatattcatatctaccctgtgaaataatgctagtatcttcgttttatataaaaggaactgaggcacagtgggataaagcaccttgtccaggattcacaacagaaaatggttgtgagcaggattcacgccagcactgtcttgactccacagctgttgctgtctttaccattacatacccctcagctttcccatgcaacaaggctggcaatgccttcaaatgtactcatagaatgaatgtaagttgcaggcccygtgcctagactcaccatacgaggagaagttccttgaaggcagagaatgtctggtgcttcactgatctatgcctatagttctgcaggcagacggtagcccgtacatatccatgactccctgacaaaccagcaatagctttcctgtggtttacatcaattcacttgaatttaaaattccagggaaagaaaatgtggcccttcccagaaatccttgaagtatgctaactccagtaacttctatatatcattaagaaagagtgtgttttatggactgaaatttgaaaacaattgagcatctggtaaaaagtgtaggatactaagttcaaaaattctagaacaaaacctaacttcacaagaactagtaattatatgcctacatttcctaaaatggcaaatatactgtttttttgtatgcatcataaagatattgcaaattaacattgcatacatagatatatccactgtacctgacttgactatgtccttgaatagaaaaaggactcattttctaatttttctcatatttaatactaaatgttctatattatatatgtgtataatgtgtacacatatattaaaataaatatatatagatatgtgtatatcataatgataaacaggtctgttccaaaggatatacctatttgaaatttacatctaatgcttttttaatgatctgaagtagacagttacagtatttttctgttatgaagaatgattttaagaatatctccacaatgtgcattcatcagacaatttaaaatgttgttaataagcaattaaagtatctttggtatttagatgctgaatccatttgtcgaagataagttcatcttaatgttttagagtgtgcattatatctacctcattcttattccaggaactatgccaaaattctctcttcaaagaagaaaaataagaggcataaatattggcttgaaatacgatagaatgcaagaacttttgctttggcagtagaacagttttataagaattgaggctaatttcataatctttagcaatgcagatatgtatctttagtctcatgaagattgtaattccttgccaaggtgagcacttcaggtacgttttaattttttgacaaaattaaaaaaaataaatttttggttaagaaagcctacaggccgggcgcggtggctcacgcctgtaatcccagcactttgggaggccgaggcgggtggatcacgaggtcaggagatcgagaccatcccggctaaaacggtgaaaccccgtctctactaaaaatacaaaaaaattagccgggcgtagtggcgggcgcctgtagtcccagctacttgggaggctgaggcaggagaatggcgtgaacccgggaggcggagcttgcagtgagccgagatcccgccaccgcactccagcctgggcgacagagcgagactccatctccaaaaaaaaaaaaaaaaaaaaaaaaaaaaagaaagcctacaatggacacacagatataaataaacagtactagattttcatcacataaataatttgaagaagagcacgttagtagaaaattgttatattgaaatattattccctattgaatattttaaaattactccttaagaggagcatttcatagtgtaaccattttcaaggggaaaaacctcccacaaaattcatgttcaactgactcaaataatagtgttaaatattcattcattttaattctaccatgaaaaaagttggtcccagtgtaatgaaccaccactatttatttatttcaaatgcaatttattaaaa

SEQ ID NO: 31772 - DNA, 2301 bp, Homo sapiens
catttggtcaccacatcaaaccctggaggaaaaatgagtggctaagcccttacactttccaatgtgagctgactagccaccttcctgtaaatataagagtctctcaggactgtgctatgataccttaagtccctgtttagctcagttacattaaaaaggttttccaaatttattcagctactttgatcactctttagaattcatccttctagaacttgtaggcattaaggaagggattactagttactgaatgccgattacaggtattgttttatttaatattcatatctaccctgtgaaataatgctagtatcttcgttttatataaaaggaactgaggcacagtgggataaagcaccttgtccaggattcacaacagaaaatggttgtgagcaggattcacgccagcactgtcttgactccacagctgttgctgtctttaccattacatacccctcagctttcccatgcaacaaggctggcaatgccttcaaatgtactcatagaatgaatgtaagttgcaggccccgtgcctagactcaccatacraggagaagttccttgaaggcagagaatgtctggtgcttcactgatctatgcctatagttctgcaggcagacggtagcccgtacatatccatgactccctgacaaaccagcaatagctttcctgtggtttacatcaattcacttgaatttaaaattccagggaaagaaaatgtggcccttcccagaaatccttgaagtatgctaactccagtaacttctatatatcattaagaaagagtgtgttttatggactgaaatttgaaaacaattgagcatctggtaaaaagtgtaggatactaagttcaaaaattctagaacaaaacctaacttcacaagaactagtaattatatgcctacatttcctaaaatggcaaatatactgtttttttgtatgcatcataaagatattgcaaattaacattgcatacatagatatatccactgtacctgacttgactatgtccttgaatagaaaaaggactcattttctaatttttctcatatttaatactaaatgttctatattatatatgtgtataatgtgtacacatatattaaaataaatatatatagatatgtgtatatcataatgataaacaggtctgttccaaaggatatacctatttgaaatttacatctaatgcttttttaatgatctgaagtagacagttacagtatttttctgttatgaagaatgattttaagaatatctccacaatgtgcattcatcagacaatttaaaatgttgttaataagcaattaaagtatctttggtatttagatgctgaatccatttgtcgaagataagttcatcttaatgttttagagtgtgcattatatctacctcattcttattccaggaactatgccaaaattctctcttcaaagaagaaaaataagaggcataaatattggcttgaaatacgatagaatgcaagaacttttgctttggcagtagaacagttttataagaattgaggctaatttcataatctttagcaatgcagatatgtatctttagtctcatgaagattgtaattccttgccaaggtgagcacttcaggtacgttttaattttttgacaaaattaaaaaaaataaatttttggttaagaaagcctacaggccgggcgcggtggctcacgcctgtaatcccagcactttgggaggccgaggcgggtggatcacgaggtcaggagatcgagaccatcccggctaaaacggtgaaaccccgtctctactaaaaatacaaaaaaattagccgggcgtagtggcgggcgcctgtagtcccagctacttgggaggctgaggcaggagaatggcgtgaacccgggaggcggagcttgcagtgagccgagatcccgccaccgcactccagcctgggcgacagagcgagactccatctccaaaaaaaaaaaaaaaaaaaaaaaaaaaaagaaagcctacaatggacacacagatataaataaacagtactagattttcatcacataaataatttgaagaagagcacgttagtagaaaattgttatattgaaatattattccctattgaatattttaaaattactccttaagaggagcatttcatagtgtaaccattttcaaggggaaaaacctcccacaaaattcatgttcaactgactcaaataatagtgttaaatattcattcattttaattctaccatgaaaaaagttggtcccagtgtaatgaaccaccactatttatttatttcaaatgcaatttattaaaa

SEQ ID NO: 31773 - DNA, 2301 bp, Homo sapiens
catttggtcaccacatcaaaccctggaggaaaaatgagtggctaagcccttacactttccaatgtgagctgactagccaccttcctgtaaatataagagtctctcaggactgtgctatgataccttaagtccctgtttagctcagttacattaaaaaggttttccaaatttattcagctactttgatcactctttagaattcatccttctagaacttgtaggcattaaggaagggattactagttactgaatgccgattacaggtattgttttatttaatattcatatctaccctgtgaaataatgctagtatcttcgttttatataaaaggaactgaggcacagtgggataaagcaccttgtccaggattcacaacagaaaatggttgtgagcaggattcacgccagcactgtcttgactccacagctgttgctgtctttaccattacatacccctcagctttcccatgcaacaaggctggcaatgccttcaaatgtactcatagaatgaatgtaagttgcaggccccgtgcctagactcaccatacgaggagaagttccttgaaggcagagaatgtctggtgcttcactgatctatgcctatagttctgcaggcagacggtagcccgtacatatccatgactccctgacaaaccagcaatagctttcctgtggtttacatcaattcacttgaatttaaaattccagggaaagaaaatgtggcccttcccagaaatccttgaagtatgctaactccagtaacttctatatatcattaagaaagagtgtgttttatggactgaaatttgaaaacaattgagcatctggtaaaaagtgtaggatactaagttcaaaaattctagaacaaaacctaacttcacaagaactagtaattatatgcctacatttcctaaaatggcaaatatactgtttttttgtatgcatcataaagatattgcaaattaacattgcatacatagatatatccactgtacctgacttgactatgtccttgaatagaaaaaggactcattttctaatttttctcatatttaatactaaatgttctatattatatatgtgtataatgtgtacacatatattaaaataaatatatatagatatgtgtatatcataatgataaacaggtctgttccaaaggatatacctatttgaaatttacatctaatgcytttttaatgatctgaagtagacagttacagtatttttctgttatgaagaatgattttaagaatatctccacaatgtgcattcatcagacaatttaaaatgttgttaataagcaattaaagtatctttggtatttagatgctgaatccatttgtcgaagataagttcatcttaatgttttagagtgtgcattatatctacctcattcttattccaggaactatgccaaaattctctcttcaaagaagaaaaataagaggcataaatattggcttgaaatacgatagaatgcaagaacttttgctttggcagtagaacagttttataagaattgaggctaatttcataatctttagcaatgcagatatgtatctttagtctcatgaagattgtaattccttgccaaggtgagcacttcaggtacgttttaattttttgacaaaattaaaaaaaataaatttttggttaagaaagcctacaggccgggcgcggtggctcacgcctgtaatcccagcactttgggaggccgaggcgggtggatcacgaggtcaggagatcgagaccatcccggctaaaacggtgaaaccccgtctctactaaaaatacaaaaaaattagccgggcgtagtggcgggcgcctgtagtcccagctacttgggaggctgaggcaggagaatggcgtgaacccgggaggcggagcttgcagtgagccgagatcccgccaccgcactccagcctgggcgacagagcgagactccatctccaaaaaaaaaaaaaaaaaaaaaaaaaaaaagaaagcctacaatggacacacagatataaataaacagtactagattttcatcacataaataatttgaagaagagcacgttagtagaaaattgttatattgaaatattattccctattgaatattttaaaattactccttaagaggagcatttcatagtgtaaccattttcaaggggaaaaacctcccacaaaattcatgttcaactgactcaaataatagtgttaaatattcattcattttaattctaccatgaaaaaagttggtcccagtgtaatgaaccaccactatttatttatttcaaatgcaatttattaaaa

SEQ ID NO: 31774 - DNA, 506 bp, Homo sapiens
cgggctgaagtacaacgacacaatctcggctcaccgcaacctccacctcccaggttcaagtgattctcctgcctcagccttggaggattcttaaacctacagttctgaagagtgtttagcatgacttaagatttcacacttgaaccaaagatccctttgattgaaatggcagcratattgttcataaaaagaaaacaggcagtctacaaaaccgaagagccattagttgttggaaattttacaacctacagttcaaaatatttctagtttctgacatctccaggagatttaccaaacatcctcaagggaatacactgattattcagagagtttatagccataggaaattaagtccagtgataaaccataatgagaaatgttttgttcagtgggatcaaggggccagctttaaagaaatatcttaaatattgctatataatgttatagttaaatttttcacacatgttataaagagttgaatagtagtagaacataccaccccaaaa

SEQ ID NO: 31775 - DNA, 506 bp, Homo sapiens
cgggctgaagtacaacgacacaatctcggctcaccgcaacctccacctcccaggttcaagtgattctcctgcctcagccttggaggattcttaaacctacagttctgaagagtgtttagcatgacttaagatttcacacttgaaccaaagatccctttgattgaaatggcagcaatattgttcataaaaagaaaacaggcagtctacaaaacmgaagagccattagttgttggaaattttacaacctacagttcaaaatatttctagtttctgacatctccaggagatttaccaaacatcctcaagggaatacactgattattcagagagtttatagccataggaaattaagtccagtgataaaccataatgagaaatgttttgttcagtgggatcaaggggccagctttaaagaaatatcttaaatattgctatataatgttatagttaaatttttcacacatgttataaagagttgaatagtagtagaacataccaccccaaaa

SEQ ID NO: 31776 - DNA, 674 bp, Homo sapiens
ctcctcatattagcccagggctgctttgtgtgcaagtctagttgaaaacacaagcaaacctatctaatgcaaaaatggcaacttacaggctcgtgtaattgcaaagacctggggcagaactagcttaggtgcaacttgaagtaggagaaaaaacaggacctggatcctgtctatcacagttcttaggagtagttccttgatgttagttcccctgtcattcacayacatgttaaaacggccacatctttatgtagtcagtcactgcatatcttcctaattccaggaccaacaccaaaatttattgttcttccttgtgtcttaagcaaaagtcctaatcatgattaaattgttaggttacatgcttgctgttgaaccaattactatggctgtgggtgatgaaatatgctgattgcctaaggaccagtcacattcctactcctgacatcttagatagtgacagtttgattcaaagcaaattgactaacatgggagaggaatgagtcttccaaagccaaatcaaggcaattttattgtagtaccagaaagcagatgatgatccagaaaacactgtaagctttgtaggggcagggttcatatctcttgttcctcataatatccctagtgtctaacataacacccagacgaaagaaaattcctgaaatcgctgaatgaat

SEQ ID NO: 31777 - DNA, 584 bp, Homo sapiens
actcaacactggctacagataggcagctctgggtttagagactctccagctttttactatctcccagagctagccagaaggtcatttatataaactagtcaaatatttgttaggttctcactgagtttacagagcttgatactacaaaatggaagtagcagtgtgctatatcttaaggagaaagagaatgtttagaaaatagaaagaatttaaaatacagttcattgcctgcttttaaataattttattgttgttcaactgatattccttttaaggtctttcactactttaagaatcycatgaatacttaagaacctggagaacataatgttaagtaaaataagtcagtcacaacaagacaaatatctcgtgatcacacgcaggaaatctgacaaagttgaattcatagaagtagaaaccaaaatggtgattatcaggggagcggttggggagatgttggtgaaagaatatacaatttcaattagaaagaaggaataagttaagcaatctgttgcacaacatgtattctttaaaattactaagagtaaattttaagtgtactcagcacaaaaagttgataaata

SEQ ID NO: 31778 - DNA, 583 bp, Homo sapiens
atctgcataaagatagcacataacatggtgtgtgtttgtttgacacagagtcttgctctgtggcccaggctggagtgcagtggtacaatctctgcccacagcagcctctgcctcctgggttcaaatgattcttgtgcctcagcctcccaagtagctgggattacaggcgcgcaacaccacacctggataattttatttttagtagagacggggtttcaccatgttggccatgctggtctcaaactcctgacctcaggtgatttgctcgccttgacctcccaaacttctgggattacaggcgtgagccaccgtgccaggtctggcataacattttcagaggccttgccttctcatcacttcagctcttgtccaggctacttactccccatgtctcagaatccattacctcccacttaacccatcagtgtttagaaaagctgattattcccccaaattttacttttcagcttttatgttcccyggcttaatcaattttattttctttctccttcccccctactctccttcttcacctccagcttttcttcttcttttcagcctctaaatattacagtgcatttga

SEQ ID NO: 31779 - DNA, 1189 bp, Homo sapiens
tgcattcaagacatacttttaaaatttttttctcaatatttctaggctatgcaattcatagttttttttcaaatggttgtgagtctccaaagtatatagcaataattaattgaaaaaaaaattcacatataaatggaactgtgccattaaaagccatgttgttcaagggtcaactgtattgctagattaaagggaaggagtgcagggagataaagatgtgcctggcagtttaggtgagagggacatactaaagagattgtggattttattcagtgggccataatgcaaccctggaacttttaaagagtgacacggttagacctgcattgtagaaagatcatttgggttactgtgttggaaatatattagaggacttggaactgaaagccatgtctgtacattctcacttgtctggatackttgcaggtatcagaatgagtgaagtacattttaagaaatacctgtccgcagcatacaaatttttcaaatgaagactattagaaaatctttaaatatactttgtctagaattgtttattatgtgaatgaagctcaaatatgaattaagatgatctaaagacaatacaatttttggtccgaaatgtaatgtattgtgttcatattcatagcattttccaatgaaggtcaaagttctattctctgttcttgttcttttgctgcaacagagatacagcaacgcagggaacacataaaatgaaacccaagacaggcatactgttcacattccaagtgtttagctatataatttctttgcaataagtatgataattctatattaatctctgacagtaaaaataaaaagtaaaaattgcaagactatcagggatttccctactatacgtgtcaataaaagctgcctacctttgcacagttactgactctatctgaggtttagctacttcagctctaaaaatctctcttggaagtggtggtatcaaagttatatttagttctttaattttaagagagtttagacaattaattttgcctacagatactacattcatatataggatttagttatgccaagaccagagatagaaaagtatgaggttgcccaaatttgtcaattacacctttctctcaaaatggaaatttctttccatttgaagtaaaatgtcaatgataaaaacactagtactatcttttttgactgtatgtccacattt

SEQ ID NO: 31780 - DNA, 1189 bp, Homo sapiens
tgcattcaagacatacttttaaaatttttttctcaatatttctaggctatgcaattcatagttttttttcaaatggttgtgagtctccaaagtatatagcaataattaattgaaaaaaaaattcacatataaatggaactgtgccattaaaagccatgttgttcaagggtcaactgtattgctagattaaagggaaggagtgcagggagataaagatgtgcctggcagtttaggtgagagggacatactaaagagattgtggattttattcagtgggccataatgcaaccctggaacttttaaagagtgacacggttagacctgcattgtagaaagatcatttgggttactgtgttggaaatatattagaggacttggaactgaaagccatgtctgtacattctcacttgtctggatacgttgcaggtatcagaatgagtgaagtacattttaagaaatacctgtccgcagcatacaaatttttcaaatgaagactattagaaaatctttaaatatactttgtctagaattgtttattatgtgaatgaagctcaaatatgaattaagatgatctaaagacaatacaatttttggtccgaaatgtaatgtattgtgttcatattcatagcattttccaatgaaggtcaaagttctattctctgttcttgttcttttgctgyaacagagatacagcaacgcagggaacacataaaatgaaacccaagacaggcatactgttcacattccaagtgtttagctatataatttctttgcaataagtatgataattctatattaatctctgacagtaaaaataaaaagtaaaaattgcaagactatcagggatttccctactatacgtgtcaataaaagctgcctacctttgcacagttactgactctatctgaggtttagctacttcagctctaaaaatctctcttggaagtggtggtatcaaagttatatttagttctttaattttaagagagtttagacaattaattttgcctacagatactacattcatatataggatttagttatgccaagaccagagatagaaaagtatgaggttgcccaaatttgtcaattacacctttctctcaaaatggaaatttctttccatttgaagtaaaatgtcaatgataaaaacactagtactatcttttttgactgtatgtccacattt

SEQ ID NO: 31781 - DNA, 1189 bp, Homo sapiens
tgcattcaagacatacttttaaaatttttttctcaatatttctaggctatgcaattcatagttttttttcaaatggttgtgagtctccaaagtatatagcaataattaattgaaaaaaaaattcacatataaatggaactgtgccattaaaagccatgttgttcaagggtcaactgtattgctagattaaagggaaggagtgcagggagataaagatgtgcctggcagtttaggtgagagggacatactaaagagattgtggattttattcagtgggccataatgcaaccctggaacttttaaagagtgacacggttagacctgcattgtagaaagatcatttgggttactgtgttggaaatatattagaggacttggaactgaaagccatgtctgtacattctcacttgtctggatacgttgcaggtatcagaatgagtgaagtacattttaagaaatacctgtccgcagcatacaaatttttcaaatgaagactattagaaaatctttaaatatactttgtctagaattgtttattatgtgaatgaagctcaaatatgaattaagatgatctaaagacaatacaatttttggtccgaaatgtaatgtattgtgttcatattcatagcattttccaatgaaggtcaaagttctattctctgttcttgttcttttgctgcaacagagatacagcaaygcagggaacacataaaatgaaacccaagacaggcatactgttcacattccaagtgtttagctatataatttctttgcaataagtatgataattctatattaatctctgacagtaaaaataaaaagtaaaaattgcaagactatcagggatttccctactatacgtgtcaataaaagctgcctacctttgcacagttactgactctatctgaggtttagctacttcagctctaaaaatctctcttggaagtggtggtatcaaagttatatttagttctttaattttaagagagtttagacaattaattttgcctacagatactacattcatatataggatttagttatgccaagaccagagatagaaaagtatgaggttgcccaaatttgtcaattacacctttctctcaaaatggaaatttctttccatttgaagtaaaatgtcaatgataaaaacactagtactatcttttttgactgtatgtccacattt

SEQ ID NO: 31782 - DNA, 1189 bp, Homo sapiens
tgcattcaagacatacttttaaaatttttttctcaatatttctaggctatgcaattcatagttttttttcaaatggttgtgagtctccaaagtatatagcaataattaattgaaaaaaaaattcacatataaatggaactgtgccattaaaagccatgttgttcaagggtcaactgtattgctagattaaagggaaggagtgcagggagataaagatgtgcctggcagtttaggtgagagggacatactaaagagattgtggattttattcagtgggccataatgcaaccctggaacttttaaagagtgacacggttagacctgcattgtagaaagatcatttgggttactgtgttggaaatatattagaggacttggaactgaaagccatgtctgtacattctcacttgtctggatacgttgcaggtatcagaatgagtgaagtacattttaagaaatacctgtccgcagcatacaaatttttcaaatgaagactattagaaaatctttaaatatactttgtctagaattgtttattatgtgaatgaagctcaaatatgaattaagatgatctaaagacaatacaatttttggtccgaaatgtaatgtattgtgttcatattcatagcattttccaatgaaggtcaaagttctattctctgttcttgttcttttgctgcaacagagatacagcaacgcagggaacacataaaatgaaacccaagacaggcatactgttcacattccaagtgtttagctayataatttctttgcaataagtatgataattctatattaatctctgacagtaaaaataaaaagtaaaaattgcaagactatcagggatttccctactatacgtgtcaataaaagctgcctacctttgcacagttactgactctatctgaggtttagctacttcagctctaaaaatctctcttggaagtggtggtatcaaagttatatttagttctttaattttaagagagtttagacaattaattttgcctacagatactacattcatatataggatttagttatgccaagaccagagatagaaaagtatgaggttgcccaaatttgtcaattacacctttctctcaaaatggaaatttctttccatttgaagtaaaatgtcaatgataaaaacactagtactatcttttttgactgtatgtccacattt

SEQ ID NO: 31783 - DNA, 568 bp, Homo sapiens
atttttattctgtcttcatttatgttcttaaatgatttttgggattacaaccttaagaataaccaaaattttttattttttccaattctcctaaagtttttaggttgattttaaaaaggaaggcatataataataaataattttaagatacatattttcatagaatcaaacatttattgagtacctggaatgtgttggcattatagacataaygtatatttgttcaaaaattttccttaccattctgtagcctatgatctatttaagaataaagagaatatgtacagcacagggcaagtccctaatgagtgactctgatgattggacagaatgtcagggaatagcatgctcaccttgcatctgttcactgaagagatgaggttgaacagtttttagaccaatagaatgtttgaagttgagtatttgacataaaagaaacatttactaagatattcgcctcagtacttcacacttaccatagaaatgaaaatttgaaatagctgaatcagcttctaaacatttcctcattaatcaggaacaaataatttgattacaggagtaagtatgt

SEQ ID NO: 31784 - DNA, 624 bp, Homo sapiens
tcctcatctctgaggttggaaaactaatggtccccaccccactgcattgctgtgagccatatacgcattaattagtgtaaaaatggtgcctccatgtaataagtgccgtgatgcacaagctctcatttattgatttttcactgtatgtgaggccttactctaaataccttacatccaataattcgtttttcctaagcaaagtgaaatagagacagaaggatcattttataattcyaatttaaattatcattaatatttattgcataagttccatcaacaggagttgaaatgcattgttgaaattcatcacaatatttgctactttaaagaatcaaactgtttttacttttttttcttgtgctctctctcctggccttgtaaggtttatgcataataaatattcatatctggtcaaaaaataaactaagttgtaaaaggttagagaatttccctatctgaacacgcaaacccagtgtgtaaagatgacaaaaataaaccacccaggggacagaaactcccagtagtgcccctcctatggatacaggcctgtatcatagtatgacatagtacaggcacaattctgtatgtatctcttttttttagaaacaggttctcactgtgtca

SEQ ID NO: 31785 - DNA, 624 bp, Homo sapiens
tcctcatctctgaggttggaaaactaatggtccccaccccactgcattgctgtgagccatatacgcattaattagtgtaaaaatggtgcctccatgtaataagtgccgtgatgcacaagctctcatttattgatttttcactgtatgtgaggccttactctaaataccttacatccaataattcgtttttcctaagcaaagtgaaatagagacagaaggatcattttataattctaatttaaattatcattaatatttattgcataagttccatcaacaggagttgaaatgcattgttgaaattcatcacaatatttgctactttaaagaatcaaactgtttttacttttttttcttgtgctctctctcctggccttgtaaggtttatgcataataaatattcatatctggtcaaaaaataaactaagttgtaaaaggttagagaatttccctmtctgaacacgcaaacccagtgtgtaaagatgacaaaaataaaccacccaggggacagaaactcccagtagtgcccctcctatggatacaggcctgtatcatagtatgacatagtacaggcacaattctgtatgtatctcttttttttagaaacaggttctcactgtgtca

SEQ ID NO: 31786 - DNA, 546 bp, Homo sapiens
agctgtgctactaaagtcattactgtgccctgcctggctccttcactagactagaactgtccctagaccccaaagactgggagaacagcccacctacttcagagcccttgctaggtggctgccagccaggtaagcacatcaacagtaactaaaggtctgtccagggaacgtgcctcaacacaccctaaggacccaatctgcaggaatgccacccctcccctctcccagcagttccatcrtcagatgctcctgggaggcatagggagagctcaggtcccccacacggtgggactctgacctctgccacggcagagctgtgtgagggccaggcctctctgaccttccagatggcaggagggcctcccctctgaccccctgcggctccagggcaactgctcaggaaagcagcccaagggcagagactgtacctaccacagttcccaacatcgcctcccagcacagcctgactctgcacctaccacagttgccaacatcacctcccccagcaaagcctgatggtcaaagtccttcagcccctttctccac

SEQ ID NO: 31787 - DNA, 836 bp, Homo sapiens
tcctgccttggcttctcaaagtgctgggattataggagtgagccactgcacctggccagaactttcttttttaaatgaattactatgcacaagccctttgctatacatgtaatttcaggtaatccttttgatatagtatctcatactcccataaatcctatgaggactcattacttcaatttacagctgaaaaaygaagaaacaaagaaacggaggctccaggacatttgggtacgggttccatgaaaaactaggtgtccatagcaccaagcatatgctttgctcctttgtgtgatgcagaaaaatataattttgtagtcaagattcccaaagggaacaaaaaagtcacattcacttcacctattatagtccttgaagacagaaacaaatcaattatcacctcatttctgacaaagaatcatagagtgtgtctctagatatgttggtctgatgctgactgatttatgctgtgtgggattgggcagggcacaagcaaaaggtaccatgactctggggaagtggtgggtggagaaagaaagggcacattgcaagatagctgatacggaatattccgaaaagttgtgtttcagtttcctctgaatttgtctcatttttttcagtaagtattcttccctaaactgtactgtctaaatgtcataggtagaatttgttcagctatgagggtatcccttctagtaaaagtttggagatgtgttagttatctagagctgaaaaaagaatcaccccaaaatgaaatgtgttaaaataacatttattatttcatggtttctatagaccaggaatccagacatggcttagctgggttccctgcttta

SEQ ID NO: 31788 - DNA, 836 bp, Homo sapiens
tcctgccttggcttctcaaagtgctgggattataggagtgagccactgcacctggccagaactttcttttttaaatgaattactatgcacaagccctttgctatacatgtaatttcaggtaatccttttgatatagtatctcatactcccataaatcctatgaggactcattacttcaatttacagctgaaaaatgaagaaacaaagaaacggaggctccaggacatttgggtacgggktccatgaaaaactaggtgtccatagcaccaagcatatgctttgctcctttgtgtgatgcagaaaaatataattttgtagtcaagattcccaaagggaacaaaaaagtcacattcacttcacctattatagtccttgaagacagaaacaaatcaattatcacctcatttctgacaaagaatcatagagtgtgtctctagatatgttggtctgatgctgactgatttatgctgtgtgggattgggcagggcacaagcaaaaggtaccatgactctggggaagtggtgggtggagaaagaaagggcacattgcaagatagctgatacggaatattccgaaaagttgtgtttcagtttcctctgaatttgtctcatttttttcagtaagtattcttccctaaactgtactgtctaaatgtcataggtagaatttgttcagctatgagggtatcccttctagtaaaagtttggagatgtgttagttatctagagctgaaaaaagaatcaccccaaaatgaaatgtgttaaaataacatttattatttcatggtttctatagaccaggaatccagacatggcttagctgggttccctgcttta

SEQ ID NO: 31789 - DNA, 836 bp, Homo sapiens
tcctgccttggcttctcaaagtgctgggattataggagtgagccactgcacctggccagaactttcttttttaaatgaattactatgcacaagccctttgctatacatgtaatttcaggtaatccttttgatatagtatctcatactcccataaatcctatgaggactcattacttcaatttacagctgaaaaatgaagaaacaaagaaacggaggctccaggacatttgggtacgggttccatgaaaaactaggtgtccatagcrccaagcatatgctttgctcctttgtgtgatgcagaaaaatataattttgtagtcaagattcccaaagggaacaaaaaagtcacattcacttcacctattatagtccttgaagacagaaacaaatcaattatcacctcatttctgacaaagaatcatagagtgtgtctctagatatgttggtctgatgctgactgatttatgctgtgtgggattgggcagggcacaagcaaaaggtaccatgactctggggaagtggtgggtggagaaagaaagggcacattgcaagatagctgatacggaatattccgaaaagttgtgtttcagtttcctctgaatttgtctcatttttttcagtaagtattcttccctaaactgtactgtctaaatgtcataggtagaatttgttcagctatgagggtatcccttctagtaaaagtttggagatgtgttagttatctagagctgaaaaaagaatcaccccaaaatgaaatgtgttaaaataacatttattatttcatggtttctatagaccaggaatccagacatggcttagctgggttccctgcttta

SEQ ID NO: 31790 - DNA, 836 bp, Homo sapiens
tcctgccttggcttctcaaagtgctgggattataggagtgagccactgcacctggccagaactttcttttttaaatgaattactatgcacaagccctttgctatacatgtaatttcaggtaatccttttgatatagtatctcatactcccataaatcctatgaggactcattacttcaatttacagctgaaaaatgaagaaacaaagaaacggaggctccaggacatttgggtacgggttccatgaaaaactaggtgtccatagcaccaagcatatgctttgctcctttgtgtgatgcagaaaaatataattttgtagtcaagattcccaaagggaacaaaaaagtcacattcacttcacctattatagtccttgaagacagaaacaaatcaattatcacctcatttctgacaaagaatcatagagtgtgtctctagatatgttggtctgatgctgactgatttatgctgtgtgggattgggcagggcacaagcaaaaggtaccatgactctggggaagtggtgggtggagaaagaaagggcacattgcaagatagctgatacggaatattccgaaaagttgtgtttcagtttcctctgaatttgtctcatttttttcagtaagtattcttccctaamctgtactgtctaaatgtcataggtagaatttgttcagctatgagggtatcccttctagtaaaagtttggagatgtgttagttatctagagctgaaaaaagaatcaccccaaaatgaaatgtgttaaaataacatttattatttcatggtttctatagaccaggaatccagacatggcttagctgggttccctgcttta

SEQ ID NO: 31791 - DNA, 647 bp, Homo sapiens
gtatttgataatagactttctaactagggagagatgatatctcattgtggttttgatttacatttccttgatgtttagtgatgttgrgtaattttttatatacttgttgacaatttctatgtctttttttgataaatttctacttagatcttttgcttatttttaaattatgttattttattttttgctgttgagttgtttgagttccttatctattttggatattaaccgcttatcaaatgtatagtttacaaatattttctctcattctgtaggttgtcacttattctttaacaacactgtctttaggtatttgtatttacactgagtacaaactgaaattgatgttgtttggctaaatagtagaaattatttctcatatccaagaatgcttgctgagaatcagttctcacagataattttgcaaaatgacaagactataatgattctaagtaaaatagcattaaatgactctgaagcatccactgtttccagttttgaactgaaacgaagccaacagaaacaaacaagtttattacaggcttctgccaaatgaatagcaaaaaataatccattgcaaaaaacgaaaagcccccattatttttgctcatgtcccttacagtgtgccatcaatgtataacaaaact

SEQ ID NO: 31792 - DNA, 647 bp, Homo sapiens
gtatttgataatagactttctaactagggagagatgatatctcattgtggttttgatttacatttccttgatgtttagtgatgttgaktaattttttatatacttgttgacaatttctatgtctttttttgataaatttctacttagatcttttgcttatttttaaattatgttattttattttttgctgttgagttgtttgagttccttatctattttggatattaaccgcttatcaaatgtatagtttacaaatattttctctcattctgtaggttgtcacttattctttaacaacactgtctttaggtatttgtatttacactgagtacaaactgaaattgatgttgtttggctaaatagtagaaattatttctcatatccaagaatgcttgctgagaatcagttctcacagataattttgcaaaatgacaagactataatgattctaagtaaaatagcattaaatgactctgaagcatccactgtttccagttttgaactgaaacgaagccaacagaaacaaacaagtttattacaggcttctgccaaatgaatagcaaaaaataatccattgcaaaaaacgaaaagcccccattatttttgctcatgtcccttacagtgtgccatcaatgtataacaaaact

SEQ ID NO: 31793 - DNA, 1290 bp, Homo sapiens
gccttgtgtgccatgccagggagtttgaatttacagtaaacaacattttacccactgcaggatttttttttttttttttttgagatgaaatctcactctgtcacccaggctggagtgcagtggcatgatctcggctcactgcaacctccgcctcccggttcaagtgattcttgtgcctcagcctcttgagtacctgggactacaggtgcgcaccatgcccacctaattttttatatttttagtagagacggggtttcatcatgttggccaggctggtctcgaacttctgacctcaagtgatctgtccacctccgccttccaaagtgctgtgattacaggagtgagccaccgtgcccggcccccactgcaggattttaagcagaaatgtgacactgttagatttgtattgtattgtattgtatttatttatttaattatttttgagacagagtctcgctctgtcacccaggcttgaggagtgcagtggcacaatctcagctcacttcaacttctacctcccaggttcaartgattctcctgcatcagcctcctgagtagctgggattacaggcatgtgccaccatgactggctaatttttgtatttttattagagatggagtttcaccatgttggccaggctggtctcaaactccttggttcaagtgatcctcccgcctcagactcccaaagggcttacagttgtgagcaccaggcatggctaggtttgcattttagagagacctttgtagccactatgctgaacatgcaataagggctgtatgtctggtgggctacgtgcctcatgaggaggctcaaaggctagtgagtagtgagtatctgaagtgggagcagatggtggaggagatgggtgggactggatccattcacctgggtatctatgagaacatgagtattgaagtaaggagtagaggaaagaaattgtgattcctgggtttccctgactggagtgtctgaaagggtggtggctcatttatttaaatagaacatataagaggaggagagagttttagggaaaacacgatgatttcatttttttcattaaatccccattatgagaaatttagagaatggaaattgctaaacggctgttctgtcttttggaattagctgtgtaagaccaaattacagtaattcataactataatcattctaaatccacttgattttaatatgtttcaaatattttttactgtgtaatttacaagaaaattgttctatattaaaatggtcattttctgtaattgcatattaccaaatcaggatagact

SEQ ID NO: 31794 - DNA, 514 bp, Homo sapiens
caccatggctcatgcctataatcccagcattctgggaggccgagtcaggtagatgaagtcaggagttcgagaccagcctggccaacatggtgaaaccccatctctactaaaaatacaaaattggcygggcttggtggtgcacgcctgtagttccagcttcttgggaggctgaggcaggagaatcacttgaacctgcgagacgggggttgcagtgagccaggatcgcaccattgcactccagcttgggcaataagagagaaactccatctcaaaaataaataaataaataaataaataaataagaaaagaaaaaagaaaagaaaagaaattaagtaacttaaccttaaaaaataaataaataaaatgtcaaaaaaaaaaacttgaaacaagaaaatgtatagagcagatttcaggtttcatgcttggggactcagtcatttgaagatgctataaaaacaggagaaaggaaagacaaaagagggaaggagaaaaggaatgtgaaggaaagaaaaaa

SEQ ID NO: 31795 - DNA, 1219 bp, Homo sapiens
gaagagtttgaggttttcaagcaccatatcagctacaatgataaagacatttgcgcttgtaccccctctgtctagtccttaatcattcttgccttttcagcccagacccatacccactattctagggcaagaacttgcctttctatccctatattgtcaccaaaacttgactgcaatcgcttcgaaggcaaggatccacttttatgcttctttggaattccttaagattccttggacatttgttcatgggaagaatgggaggagtttagagctggaatgttacactaccaatagcagagtcatatccagcaacatggctttaaaactgcctgccagagcggttagctgtcttgtggttgttgttttctgttgttttctgtcttctcaacagttatgctggatgcaaaggcgtaagaatgacacagtggactctggggactcagggggaaaaagtgggaagggggtgagggataaaagactgcaaattggatgtagtgtatactgctctggtgatgagtgcaccaaagtctcacaaatcatcacgaaagaacttacgtaaccaaacaccacctgttccccaataacctatggaaacaaaaaaattaataaaacagagtctgaattatagagccagacttttaatttgaataccattttttcctcttattagttatatgatcatgaaggagttatttaacctctctgctacttagttttatcatctgtacaatatggataattacaatacatttctcaaaggtttgtcatgaggactaamtgaattaaattagttagtatatggaaagcacctaggacagggcctgacacatagtaagttacgcaacgttagctgtaattactattggctgtataattaccagcagctttttcctttgagatccatggtgctttgaactatttccttggccctgatgtttcatcttcttgatgaaacttaagtattaaatttcaaagttagatttgaatcctggatacattcgatcttattaggctaactggtttttgtttattctaaagaagttgaagatacacaaattgaaagctaattttctctggtatagagaaggcatttgtgtccacacccttttttccatgctctttcgctagtttaggaatgataaccgtgatgtgtgaagttaggttagttagttactagtggatttgtgctgtttcccattcttctgtaagtctgaaccta

SEQ ID NO: 31796 - DNA, 538 bp, Homo sapiens
actgttgtagacatgattcaacacttcttttcaagtgactttcatacaggatttaatatgaatatagaagttagcaaggtagtatgatcaaaagcctaatcacgtattgccatgtaacaatgaaatttgcattaaaaatatagtgaaatcattaagggcctatgttgaaacatttcaaacaaagatttacttcccaaattatgagtaatagtatttcaaaaartatgtgaatgcagaagccttgttctagtagtaagttgatgtgtgatttctaattttagtaattaaactattttaagtggcagacataaaatgtgttagattttgtcaaaatactgatcctatccaaaatagtactttacttttttaaaaataagaaagctttgcatagctgagactcttttctgtataaaatttacattgattccttcgaaaaattaacaatcttcatatttagacgttagaatggatactgaaatggaaattgcggctacagataaagtagccacactggcatatatgcaattgacttgatata

SEQ ID NO: 31797 - DNA, 615 bp, Homo sapiens
ataatctatgatcatgtctacaggcacacactgcactgttattgagttaaactgaattgaaaggctatagatcaaggtcaatgtgaaggctgaagagaagcataaagaggccaaggagtaactcttgtaatctcagaaacgggctccttgacaaggacctctgtgtgaactgtacagacactgggtggattgcccgatagtgacaacagtccttattaagcttgtcttgttcatttgcttttaargcatgtgctattatttattagcaatgcttatgaaggagtctccttaacattggattaacaacacctttccctggagtattttctgtgtctagagctgtagagaggggtgaaaattagttcaacgcagcgatctgggactggcttgcagtgtgaccttgcacaagtcactttatcaccatgattctatttccaccctgtaaaaataatagtgctaatacttgccctctttctaactctcaaagataaatcaatgtctgaaaagtgcattgagtttttggatataaaggcaagcattccttaccatcattaattaacatttattaatagaaagaatagtgcagaaaacccaaaggtgatccaaaatagtgat

SEQ ID NO: 31798 - DNA, 1003 bp, Homo sapiens
tgcatgaaatggtggtgtttttttcagggtgtgttgtcgctaatgggtaaatagttctgtttctcttgcagaggatgaaaaacacatatccagaatttttgcaggcagtgagttttcttccatcataatatgaacagttttgtaatggtaaacatgagagcagcayataaataaatgaaaaatcccccttgaaaatctgaatgggtttttagcacccaagtacctaatattcaatttctggtacaaccagagccaggtgttaaatttctctagttactgtcactaatgcaaattagattctttttctgctcgtaaaaaatcaaatccacattagaaattagctataaaatgtaatgacttaaatgctatagtgttttacaaatctctctgcatttctatggtagataatgctgtaaaacagagagaagataataaaatatggtaggaagttatttaaaggtcttttgtgactgcttacttaaaaatctgatgtattcttttgctcttcttcctgtctgtcccccctccactgtgggaaatgagcatatttatgattctatttttttacagcttagaagtaatcaaatccatttttaagtgatgttataagagctagaaagatcatttgcgttattgaaaaaaagaatatcgcccagagaagtttacacctttgcaacttttaatcattggtattgtaaaacatcctgaggaaagtttggactggttaaacaaggagcttaattagcattttaaactctttattaacagtatcaccaaatttacctagaagattgtttgataatcctcacccaccaccctaccccctttctcctgcacaagaatatccaaacgcaaaagagaaacccctctttaatatggagtattaaaaaaaaaatcctacaatacacagcagagcacaattgaactgggaagaacatgaaagctatgtatttattcacatttaaatcctagcagcatcccatttgctcagctatggaatgca

SEQ ID NO: 31799 - DNA, 1271 bp, Homo sapiens
gatttcactggtgtatcatatttcaggccactgaaagaaggaaagaatgtgaaaagaaagtgtcactgcttatatcgggaaaacaagagcatcccagaaatccccagccaactttgatttacatttcatgggccagactgtgccacatggccactcctaacttcaagagagtctgagaatgtgaattttagctttctagattttaaaggttagggagacctgagaaaaaggtatagaaatgggtgttggataaattaacctacagtatttggcacacaagtaacaaccagaactaaggcaatagcagtaaggatggagaaaaggggagaagacttaagccggactcagtaatggcttttgggtaactgagcgtaggtatcatggggagaacayaggtcaggaaccgcatcttatcttttcagtagcttcctaaagggtctaataaagttatcaagacaaaatagactgtcaagagagattgtccccaaatgatgttcagagttgtgattctgtggaagcatgggatggctccagacacctcttcaaggagccagtactggtagaataataggtactatttattagaccttgtttggttttttagccaaagtttttgccaaactattttgttagagactttttcctgttttagtttcacggttttttgttagtgactaagtcaaacaaaaattcaatcactttgtattaaaagccactttcagggcataaacgggatagacacagagcatactaacttctgaaatcctgtcagagccattggtgagtgagcttgatttccataagagctattcggtcagtccttcagagccccttttacatgggtatcttattttttaacaggcactttaaattgagaccagcatcctgattttcaagcagcacggcttttattggaagtctctgccacgtttaaacatctttaatacattttaaaaatagaattgtaaaaggcagaaaccagacttcaaagcatagacatgttggccagaattgcgacgtggcgacaattttcactggttgtaaagctcatggaacttctttcaatccccagaacaactgagggagaaggggttcagcatgcattcctcctgagtgtctcctggatgggcccaggcagaccaggtgtggatgaccaagttggcagaaagagaaccaacgcaccgcagggtggatgtagaaagcaccaaccacagcaatcaggccaaacatagagccaaaagcaaccaggccaaaccaaaagaaatgaggac

SEQ ID NO: 31800 - DNA, 1271 bp, Homo sapiens
gatttcactggtgtatcatatttcaggccactgaaagaaggaaagaatgtgaaaagaaagtgtcactgcttatatcgggaaaacaagagcatcccagaaatccccagccaactttgatttacatttcatgggccagactgtgccacatggccactcctaacttcaagagagtctgagaatgtgaattttagctttctagattttaaaggttagggagacctgagaaaaaggtatagaaatgggtgttggataaattaacctacagtatttggcacacaagtaacaaccagaactaaggcaatagcagtaaggatggagaaaaggggagaagacttaagccggactcagtaatggcttttgggtaactgagcgtaggtatcatggggagaacataggtcaggaaccgcatcttatcttttcagtagcttcctaaagggtctaataaagttatcaagacaaaatagactgtcaagagagattgtccccaaatgatgttcagagttgtgattctgtggaagcatgggatgrctccagacacctcttcaaggagccagtactggtagaataataggtactatttattagaccttgtttggttttttagccaaagtttttgccaaactattttgttagagactttttcctgttttagtttcacggttttttgttagtgactaagtcaaacaaaaattcaatcactttgtattaaaagccactttcagggcataaacgggatagacacagagcatactaacttctgaaatcctgtcagagccattggtgagtgagcttgatttccataagagctattcggtcagtccttcagagccccttttacatgggtatcttattttttaacaggcactttaaattgagaccagcatcctgattttcaagcagcacggcttttattggaagtctctgccacgtttaaacatctttaatacattttaaaaatagaattgtaaaaggcagaaaccagacttcaaagcatagacatgttggccagaattgcgacgtggcgacaattttcactggttgtaaagctcatggaacttctttcaatccccagaacaactgagggagaaggggttcagcatgcattcctcctgagtgtctcctggatgggcccaggcagaccaggtgtggatgaccaagttggcagaaagagaaccaacgcaccgcagggtggatgtagaaagcaccaaccacagcaatcaggccaaacatagagccaaaagcaaccaggccaaaccaaaagaaatgaggac

SEQ ID NO: 31801 - DNA, 611 bp, Homo sapiens
tgatcagcacattaatattaacaaaatttatattttggaagtatctgcaattttaccccaaatgaattgcaaataaatactttgtaagactcttgtatgatgaatgccagtttttaatttttgaagtttttattattggttaagatttagctatgcctctcctaggaatagcttgtatatttccatggcgtcatggtaattggagaatcactggtctatataaataagtttcataaactagtggagtttttcctggagatcaaggaaagaagtgtgagtaatgtgcaccatactgtgaataaaatatattagggaccaaggagtcatggattcaaatttccacacttttaraaattacagctctaacattttaatccataattctataatcccaaatccctgaaaatagtaagcatttccataactccttcggaagccaatttgacctgaacctctatgatgttatttgtggtcctgaaaactcctttccgtgtcactgttcgtgcattttagtgccgaaatgttaatgtgtttgattactgggttgtgcccaggccctgatgtagatgtcatatgatataaaatatgtatagagtattaacttttcaaaa

SEQ ID NO: 31802 - DNA, 569 bp, Homo sapiens
ctgtaataaaaatactcttagaatgatccttcttgaaaggacgtgattctaaggaagtcactgaacataaataactaagtaaagaaggagggggagggcattccagagaggtttctcatcactgctattygcatggatttttacctgggggcagccagttactaactctgagctgctttcaggaacttccaagtacacggagttcagggatctcctttttcctattaacttggttataatggtttccaggattaataaacaaactcaaagtttggcccaggaagcagctctcatgttataaatcatagcacccacaactttaccatctaaatagataatgatatccaagtcaagtatttccatgggagggtttttcattgtcctagcagaatgaaagttttaaggaactttgtctttcaggtattataaactttgggggcctcttccagtttttcctacacgcagacgaaaaaatgtcacagctctagggatgcttaagtctcacccagtgacctgcaagttcttcaacagacgggaaattgagaaccaggattatagcactcagaccc

SEQ ID NO: 31803 - DNA, 569 bp, Homo sapiens
ctgtaataaaaatactcttagaatgatccttcttgaaaggacgtgattctaaggaagtcactgaacataaataactaagtaaagaaggagggggagggcattccagagaggtttctcatcactgctatttgcatggatttttacctgggggcagccagttactaactctgagcygctttcaggaacttccaagtacacggagttcagggatctcctttttcctattaacttggttataatggtttccaggattaataaacaaactcaaagtttggcccaggaagcagctctcatgttataaatcatagcacccacaactttaccatctaaatagataatgatatccaagtcaagtatttccatgggagggtttttcattgtcctagcagaatgaaagttttaaggaactttgtctttcaggtattataaactttgggggcctcttccagtttttcctacacgcagacgaaaaaatgtcacagctctagggatgcttaagtctcacccagtgacctgcaagttcttcaacagacgggaaattgagaaccaggattatagcactcagaccc

SEQ ID NO: 31804 - DNA, 569 bp, Homo sapiens
ctgtaataaaaatactcttagaatgatccttcttgaaaggacgtgattctaaggaagtcactgaacataaataactaagtaaagaaggagggggagggcattccagagaggtttctcatcactgctatttgcatggatttttacctgggggcagccagttactaactctgagctgctttcaggaacttccaagtacacggagttcagggatctcctttttcctattaacttkgttataatggtttccaggattaataaacaaactcaaagtttggcccaggaagcagctctcatgttataaatcatagcacccacaactttaccatctaaatagataatgatatccaagtcaagtatttccatgggagggtttttcattgtcctagcagaatgaaagttttaaggaactttgtctttcaggtattataaactttgggggcctcttccagtttttcctacacgcagacgaaaaaatgtcacagctctagggatgcttaagtctcacccagtgacctgcaagttcttcaacagacgggaaattgagaaccaggattatagcactcagaccc

SEQ ID NO: 31805 - DNA, 1134 bp, Homo sapiens
tgaggtttgagaagcctgacctagatagacacagggcggaagagaatgaccaagggtggggaaatgccagctctgggcttcatacaaggccaagcatggtttttgttgacaccttatttagctgatacatcatgatggttcttgattctcaatgctctcctagaaattttccctgtgacccaagggaagtccctttaaatggtgtttttcctgtcccccatcttacatttcttgggaaagayggttgcaagtgtgtttgctgctggtggtagttggccttattaagctcactcttaccccctatgtctaattatatataatacagttaaataactattacattaatatgcccacggatactgaaaccaggaaatttcagagcacataggatagactaaaagcaaacaatacattttctcaagagacagtatacacaggagttagaagtgtattccaaaattgcctgaaggtatttatgaatcacagttccagaagaagtggccaatatgagaaagggaagggtaatggtcaaagctgaaaactgccacttaccacttgggtaactctttgagcttttattttctcacctgtaaaacacataatagtatgcagccaacctcaaaggattgttttaagaatccagagagaaagtaaatctgaaaaattttgtaaagtgtaaagtgcttcacacgcataaaaaattgttgtggctcttattattaaatctaaattctttggaaagcattccttagggaggacaattccgtcttcctaaaatgtggcctggagcctcctttgacttttgaacctggacctgacccagtgtgacagttctcatgtccctaaaaaatataaccatgatgttggtcccaggaaaacttctgtatatatctgtttaataaattggaaatagaatacatatgtaatttgattttcctgctttttttccgacaacatttcagtttcccactaatcattaacatttttccatgttgttaaatattatctgaaaacattttaaattaccctaaagtatttcatattctaaaatttgttttttcttgtattatgggacacattaggtctctaattttgactcttataagtaataatactgtagtaagtatcattaaa

SEQ ID NO: 31806 - DNA, 1134 bp, Homo sapiens
tgaggtttgagaagcctgacctagatagacacagggcggaagagaatgaccaagggtggggaaatgccagctctgggcttcatacaaggccaagcatggtttttgttgacaccttatttagctgatacatcatgatggttcttgattctcaatgctctcctagaaattttccctgtgacccaagggaagtccctttaaatggtgtttttcctgtcccccatcttacatttcttgggaaagatggttgcaagtgtgtttgctgctggtggtagttggccttattaagctcactcttaccccctatgtctaattatatataatacagttaaataactattacattaatatgcccacggatactgaaaccaggaaatttcagagcacataggatagactaaaagcaaacaatacattttctcaagagacagtatacacaggagttagaagtgtattccaaaattgcctgaaggtatttatgaatcacagttccagaagaagtggccaatatgagaaagggaagggtaatggtcaaagctgaaaactgccacttaccacttgggtaactctttgagcttttattttctcacctgtaaaacacataatartatgcagccaacctcaaaggattgttttaagaatccagagagaaagtaaatctgaaaaattttgtaaagtgtaaagtgcttcacacgcataaaaaattgttgtggctcttattattaaatctaaattctttggaaagcattccttagggaggacaattccgtcttcctaaaatgtggcctggagcctcctttgacttttgaacctggacctgacccagtgtgacagttctcatgtccctaaaaaatataaccatgatgttggtcccaggaaaacttctgtatatatctgtttaataaattggaaatagaatacatatgtaatttgattttcctgctttttttccgacaacatttcagtttcccactaatcattaacatttttccatgttgttaaatattatctgaaaacattttaaattaccctaaagtatttcatattctaaaatttgttttttcttgtattatgggacacattaggtctctaattttgactcttataagtaataatactgtagtaagtatcattaaa

SEQ ID NO: 31807 - DNA, 1134 bp, Homo sapiens
tgaggtttgagaagcctgacctagatagacacagggcggaagagaatgaccaagggtggggaaatgccagctctgggcttcatacaaggccaagcatggtttttgttgacaccttatttagctgatacatcatgatggttcttgattctcaatgctctcctagaaattttccctgtgacccaagggaagtccctttaaatggtgtttttcctgtcccccatcttacatttcttgggaaagatggttgcaagtgtgtttgctgctggtggtagttggccttattaagctcactcttaccccctatgtctaattatatataatacagttaaataactattacattaatatgcccacggatactgaaaccaggaaatttcagagcacataggatagactaaaagcaaacaatacattttctcaagagacagtatacacaggagttagaagtgtattccaaaattgcctgaaggtatttatgaatcacagttccagaagaagtggccaatatgagaaagggaagggtaatggtcaaagctgaaaactgccacttaccacttgggtaactctttgagcttttattttctcacctgtaaaacacataatagtatgcagccaacctcaaaggattgttttaagaatccagagagaaagtaaatctgaaaaattttgtaaagtgtaaagtgcttcacacgcataaaaaattgttgtggctcttattattaaatctaaattctttggaaagcrttccttagggaggacaattccgtcttcctaaaatgtggcctggagcctcctttgacttttgaacctggacctgacccagtgtgacagttctcatgtccctaaaaaatataaccatgatgttggtcccaggaaaacttctgtatatatctgtttaataaattggaaatagaatacatatgtaatttgattttcctgctttttttccgacaacatttcagtttcccactaatcattaacatttttccatgttgttaaatattatctgaaaacattttaaattaccctaaagtatttcatattctaaaatttgttttttcttgtattatgggacacattaggtctctaattttgactcttataagtaataatactgtagtaagtatcattaaa

SEQ ID NO: 31808 - DNA, 1134 bp, Homo sapiens
tgaggtttgagaagcctgacctagatagacacagggcggaagagaatgaccaagggtggggaaatgccagctctgggcttcatacaaggccaagcatggtttttgttgacaccttatttagctgatacatcatgatggttcttgattctcaatgctctcctagaaattttccctgtgacccaagggaagtccctttaaatggtgtttttcctgtcccccatcttacatttcttgggaaagatggttgcaagtgtgtttgctgctggtggtagttggccttattaagctcactcttaccccctatgtctaattatatataatacagttaaataactattacattaatatgcccacggatactgaaaccaggaaatttcagagcacataggatagactaaaagcaaacaatacattttctcaagagacagtatacacaggagttagaagtgtattccaaaattgcctgaaggtatttatgaatcacagttccagaagaagtggccaatatgagaaagggaagggtaatggtcaaagctgaaaactgccacttaccacttgggtaactctttgagcttttattttctcacctgtaaaacacataatagtatgcagccaacctcaaaggattgttttaagaatccagagagaaagtaaatctgaaaaattttgtaaagtgtaaagtgcttcacacgcataaaaaattgttgtggctcttattattaaatctaaattctttggaaagcattccttagggaggacaattccgtcttcctaaaatgtggcctggagcctcctttgacttttgaacctggacctgacccagtgtgacagttctcatgtccctaaaaaatataaccaygatgttggtcccaggaaaacttctgtatatatctgtttaataaattggaaatagaatacatatgtaatttgattttcctgctttttttccgacaacatttcagtttcccactaatcattaacatttttccatgttgttaaatattatctgaaaacattttaaattaccctaaagtatttcatattctaaaatttgttttttcttgtattatgggacacattaggtctctaattttgactcttataagtaataatactgtagtaagtatcattaaa

SEQ ID NO: 31809 - DNA, 611 bp, Homo sapiens
ggtgtgatggcccacgcctgtaaccccagcactttgggaggccgaggtgtgtgcatcacctgaggtcaggagttcaagaccagcctggacaacatggtgaaaacccatcgctactaaaaatacaaacaaacaaacaaacaaaaaagctgggcatggtggtgggcgcttgtaatctcagccacttgggaggctgaggcaggagaattgcttgaacctgggaggcggaggtcgcagtgacccgagatcacgccactgcacttcagcctgggtgacagagtgagagtccatctmaaaaaaaaaaaaagaaaaataaaaaaacaagatgagagtggagtatcttgtagcatcagaaagtgaggaaatgctcaaagaacagcaataacagtaacattaatgaagatatgtcaaaagactgcaggagcactctcaaaggtcaacttgagcaacagtttttcttctcatattcatttttaaattttcattcatttttattgtagtgcttaaaaatattacaagattagaacaaatcttttttcaagtcagtcttggagtatacaaaaatattagtcatctctctaccttctaataccacatagcgaagaatggatgtt

SEQ ID NO: 31810 - DNA, 683 bp, Homo sapiens
ctcaggtgatccgcccgcctcggcctcccaaagtgctgggattacaggtgtgagccgccacgcctggccaatttgtcttcttgaagacaactctgtcagagcctccgaacctgtgccaatctgggtttctggctctctgggtttgccgtatacctgtcgccttatgctgtctcttggccaacatttgggaatgatcgttgcttctttctctctttagttgcatggatctcgtatcttsctttctctgggtatatttctggcatatctagcttcctgagaaaagagtaaaaggaaggtgtggtgttatgatatatatcggtttttgtccccagttcctggctcataagtcccatagcccttgttagtcatttgttataattctggtttgtgttaggcctcaggaaacagaatctctccaaccttctcctgccctcctttcatctgccccaaggcaggactctaatcttccccacctttctgatgtgggtctttagattctcctcagaaagggtcccacccaataccccgggggaaggcctgctgacatgaagtttgacgaaaaatccaagaagacagggttcagtgagcttctgggtggctgaacacagggaattttctggagggtggcacccagggagggcatggaagctctgcaccccttctgtcctacctcaccctatgca

SEQ ID NO: 31811 - DNA, 1219 bp, Homo sapiens
tgcatgaggatagagtgagggcttcagggctggggttgtgggaggtatgtgtggggaaaacaatctcaccttggctcagagacaggaacatcaggcaggagatcagcatgaagcatgagttggtctgagccatgctgagcagcagtgaatctcttgcttaaggagcaaatcagcaatctctataggaaaacacagggaagagggtttgagagaatgagagcagagcacctattaccttccttatttcctcctctgaattcctgacagcaggaaggtcctctgagatatctacattcccatatatttctcttgagaatctggaaactatacaggctcagtaatccaaaataactttggcttctactgaggcttcgttactgctgacacctcttggacagatgacgctgtatcttccccaagattttagattacagcccttgtgaaaggtacccttctcctgtaatgcccacttacttgttggctgaatctgaggtggcttttcaggctaggtaatggtagagatgtataacaggatctgagagaagagccacagtatttaagccggggtggagcaaggagtgagagacagcggttctacagagggcattgacagtaagaggttctggcatcaagaggagctcttcctggcatatcctgggaatggccacagatgaagtcccttcccctaaactggaaacctttccaagttcaaggcagaccttgcccttgctcagcagaaaccagatgtcctatcctgcagccctgaagatccagcaagcagctgagaccttccaggaatcttggcagctgttatgcaggctaggccagcagtagtagaggcagagagagtgagaacctggagtagggccgtctttgagacacagggagaagggagctgctgaatggttatggagcatccctgtttggagcagtggggcaaatagagtttaaaatattggtaacttaattgacttwtccaatactgtactatggaagaaagcagagctaaaactcaattcttctttttttctccttcgtagtctaatatactgttgttgttgctgttgttgttgttgtttgtttgttttggtctctgagcaccctccacttgcaggttctgtcagtccatgtatggtcagtccttctgcactgtccatttcctgacaagaccactgcctgcatcaccctgttataacctttatgtacttctcaaaccatt

SEQ ID NO: 31812 - DNA, 505 bp, Homo sapiens
ctccagcctgcataacaaagcaagactccatctcaaaaaaacaaacaaamaaaaaaaaggtttttcactacccaaacattcttgaaagatagtctagaaaaaatggcagtaagtgcctctgcttgcaagaagtggagaaacgtgagacaattgtctctcaactcttctctgaacattattttctctctccataaaacaagagggctcttcacacttagagtagtcaatgacttttagaaaaagatgatttgtgtggatttaattgtctgaggaaaggtctgtgggaagttggcagcagagagatgataagcttttgaaaatctttaaaatgatggaattgaagaaggaatgcaccaaaagcattatacaactggaaaacttttctcatccctatgataaatttcaagtagcacctaagacattacatgcacattctacagacagcatctctggctaacattttcttgatagaatacctcttggtttctaaatacctcaactccac

SEQ ID NO: 31813 - DNA, 583 bp, Homo sapiens
aatcagaatcagcactttctaaagcctccactctttttaaatgggaaaacaatctaatttaaaactttgtgaaaatggaaatgttttatttcgcaccgtcctatagagtagccactgccctcatgtgactattgagttcttgatatgtggctggtgcaactgaggaattaattctttttattttaccttagtttaataaatttaaatttaaatagccatatgtggctagtgactactttatttgttaaacttgtgaggttaaggtcactttaaggatctgcttgtacgcaggaataccgccatcttgtggcctgttagaatatggcctcgaaaattgaaaccaaagtgcatttacacctgcaagcaccctggaagtggtaaatccatgatattcgtggatcataaaagctcaattcgtagcttatataaagtatctgcaagcttaaagattgcagttgctaaaacacaccatggaacagggcaaatgaatttgcagaggwgaaacagtgagtgcctgggctaactctgagaataagtgtgtctttgccatttgggatagagacatccttttggtgaccctttc

SEQ ID NO: 31814 - DNA, 1073 bp, Homo sapiens
ggggatccaataaaaggtgccagcaaatgcagtgtctgctgagagcctactcatcataaatggtgccttttcactgcatcctcccacggtggagatggctaattagtttctggggtcttttttatcatgacacttatctcatctaatcacttctccaaagccacatccctcaatactgtcacacggggattagttacattgtattaattttgggaggatgcaaacattcagaccgtagcatatttgaaaataaaattctgagaaaaaagaaacaaattgaaatatataacacaaccctatttgtacaaaataaaatacatgaaaaccaaccaagcccatatattttataagaacatatcaagaaaatgatatatgttgaatatatgaaaatggttgactatgggagtgggggaggaaaacaggaattgagaaggaggaatggtgtaaaaaaaataggattaaagatgtcaatattctctgtgaactgaggagtataatttcctgacctctgctccttccatctaataaaatctgtcccagcctccagcctcctgtttcttctgccaaatacagaaagtagatcaaataaacaaaaaagcaaagcttgagtgtatagagtatgtgttctttrtaaatttagcttcttgcaaagtgattttgatctattcattcttgtttaaatgtgcttatgtttatgtaaacatccatgttaatagttcttcagtaacaaactttacttctctttttgaggttgaaaagtttttaaaaagactagtctgaagcacctcttttcctgacgcaaaaagtcttgaagcaatattcaagactgaatgcttgaaaacactgccttctgtgttctcttgtgccgaggatctcccctatgtctcaaccgtgctcaaggctgtctcagctgaatatttccttataacaccactcttaactgacatttcttcatcatgatgcactagtgcctgattccaatgttgctttgctttagttgataccaatcaaatacttcaaactgcagatggcgaaggacattgccagttagaaacttaggggctcatacttcg

SEQ ID NO: 31815 - DNA, 1257 bp, Homo sapiens
gcatgtggaattatatactttcttaagaaattgagcaattataattgtttcagcttaggcccaaaagtccaagacttttagggtattttttttttaatgtttgaatggtcaaatattacacattttctctagtaagcttgattaatctctgrcagattaaggtatcacacaaaatttcatcttttttttttttttttttttttttttgagacagggtctcatttagtcacccaggctggagtgcagtggcatgatcatggctcactgcagcctcaacctcctggcctcaagccattctgccacctcagtccctcaagtagctggaatcacaagcttgtgccaccacacccagctaatttttttattttttgtagagatgaggtctcactatgttgtccaagctggtattgaactcctacactcaagagatcctcctgcctcagcttcccaaagtgctgagattacaggcctgagccactatgcctggcccaaagtttcatctttatgtgcagctgtaactggcacatttatttactactttaaacatacttaatgtttattctggttagggggatgatgactacaaattcatgaagtttatgatattttgctaaaattgtctcactatggtgcatctgagaaaatgtcctaccatattaactaaaaaggctacgtttatatgctattactgatatatactagatagtagcaaagaactttcaatcaaattaaggttgaatttaacacaatctactatttcacgatcatgtcaaagaagacttagtttggacccagccctctcacagatttcctgcagtggcagttaactaaactaggcaaataaattacttaatttaattaaatcactactgggtcactgtcacgttcatcacagctaaaagaaaataattcaaaatgcaaaaagaaattgcatttttaaaaatgtgagatgaatcctagcaatacaatgttaaatgagagacaacaagtccaaacattacacacagcaaaatgccttttaaaaaaggtaaaaacaacaaagaagtacatatttcttaaggaatacatacaaatgcaataaaaccatattaaaggggaagaaagaaatggtgatcacagaaatcatttgggaagaagtagagataccagatggttgtgggggaccatatgcttagtttggggcctgtgttcgtagtgcttataatattattttaaataaaaataaataaatgtatgaatgaataaaagcagggagcc

SEQ ID NO: 31816 - DNA, 1083 bp, Homo sapiens
tttctaattttgtagagatggtgtctcaccgtgtggcccaggctggtctcaaactcctggactccagcaatcctcccacctctgtctcccaaagtgctagaattacaggtgtgagccacttagcttacagttttataaaatacttgtttatactttctaacatatcctttatatctaatttatcggttttcttattcrtttatcttatcttactttacatgataagatatattttgtctgaactgctttcctgtaggcacccagggaaggtgaaagccttaaataacagtatggttgtttcagtgttgctcctaactttctgaggtagaaggtcttgaaatcttctgttaaggttttctgatcgtggattgagcactgagcatttactagtgagctgtcttgaacttattctttcttttatttcgatcccgcatgtgctttatatagcaacaattcttcaaaactggtaaaagtgcatcacaagtttgctagttttcagtgctgatataaggttttacttatttttatattcacttgttttcctcaagcattggtggtggtcggggggagttggagttatagtgggggtttggtcatgagtgtcagatgcttttcctacattgccattttatcagaatttccacatttaacttttcacaactattcaaaccaatttttgatagcagtgtcaaactcaatttttttccctagtactcaattttcccagcccaatttcttcaataatcgacaatttttgggttgattgatgatgcttcttatatcatgtggtaatttagtatgtagtaggttccattcagaacttttcctgtttgtgttatttttgtactaggcatatgatatctttataatgtgtattacatatgcagcctgatttccagactcctctctgtttttataacaaattttgttatgtcatgttccaaacatgattctctctatcagcttctaagccccaggagggcttactcaatctagacttctttatgctagcccagtgccttttaagtcatggatgttatgatggtcagatttattcatcatcatggctaagctatagtactc

SEQ ID NO: 31817 - DNA, 742 bp, Homo sapiens
ttttcgcaccgttgataaagacatacccgagactggataaattataatgagaaagaggttttaatgtactcacagttccacatggctgaggaggcctcacaatcaaggcagaaggcaaaaggcatgtcttacatggcagcaggcaagacagagaatgagaaccaagcaaaaggggtttcctcttataaagccatcagacctcgtgagacttattcactaccacaagaacagtatggagcaaaccacccccatgattcagttatctcccactgggtccctcccacaacacgtgggaattatatgggagctacaattcaagatgagatttgggtggggacccagccaacccacatcaatccccattttacagatgagtaaactgagactcagcgaggtgaagcaatttgcccagtcaagtagctacaagaggctaaggctaagcttccaattctggtttatgtgactccagagccttgagttctcctctctaaatagtggttcttaacctttttcgggktcaccaaccccacatagaatctgacatctatggacactctccccagaaaaacacatgcagtcacaaaccttttctgggattcacggactccctattctagcacaaaaccccacaattccatcctggcactatccacccagagttagtgcagaccccacaggtgaagagcttccacatctaaatcagatcccacaagaccgccctgatttagatgccagtcgaact

SEQ ID NO: 31818 - DNA, 742 bp, Homo sapiens
ttttcgcaccgttgataaagacatacccgagactggataaattataatgagaaagaggttttaatgtactcacagttccacatggctgaggaggcctcacaatcaaggcagaaggcaaaaggcatgtcttacatggcagcaggcaagacagagaatgagaaccaagcaaaaggggtttcctcttataaagccatcagacctcgtgagacttattcactaccacaagaacagtatggagcaaaccacccccatgattcagttatctcccactgggtccctcccacaacacgtgggaattatatgggagctacaattcaagatgagatttgggtggggacccagccaacccacatcaatccccattttacagatgagtaaactgagactcagcgaggtgaagcaatttgcccagtcaagtagctacaagaggctaaggctaagcttccaattctggtttatgtgactccagagccttgagttctcctctctaaatagtggttcttaacctttttcgggttcaccaaccccacatagaatctgacatctatggacactctccccagaaaaacacatgcagtcacaaaccttttctgggattcacggactccctattctagcacaaaaccccacaattccatcctggcactatccacccagagttagtgcagaccccacaggtgaagagcttccacatctaaatcagatcccacaaraccgccctgatttagatgccagtcgaact

SEQ ID NO: 31819 - DNA, 585 bp, Homo sapiens
cttcattaagtctaaaatttgcttaagggttaggagtacataaacccagataatttatagtactactttgttatgtcttttaactaatstaaaacaaggctgctccatcaaccggtaatactcatgctaaacaaattaaagaataaatagaaagtggtaagctcaggtatttttcttggagcttgttcataatggaatagaaatatatattggcaagtattctgaggagtcaatattgcaaaatggaaaaaagcacagatttcaaagtcagtgattttagttcaaatccagtcattgccattttaaagctttatacctgaagcaagtataatcagttaggattcatttagctgccagtgacaggcagccacttcaaaaatggtttacataaaatgataatttattgcattatttatttctgttgttcataaaattatatatatttaacatgtacaacatcgtgttttgatatacatgtacataaggatgattattatagtcaagcaaatgaacatatttcctcacatagttacctttttatcatgctagcttctgaaaactattcttttagagcatttccagtgt

SEQ ID NO: 31820 - DNA, 585 bp, Homo sapiens
cttcattaagtctaaaatttgcttaagggttaggagtacataaacccagataatttatagtactactttgttatgtcttttaactaatctaaaacaaggctgctccatcaaccggtaatactcatgctaaacaaattaaagaataaatagaaagtggtaagctcaggtatttttcttggagcttgttcataatggaatagaaatatatattggcaagtatkctgaggagtcaatattgcaaaatggaaaaaagcacagatttcaaagtcagtgattttagttcaaatccagtcattgccattttaaagctttatacctgaagcaagtataatcagttaggattcatttagctgccagtgacaggcagccacttcaaaaatggtttacataaaatgataatttattgcattatttatttctgttgttcataaaattatatatatttaacatgtacaacatcgtgttttgatatacatgtacataaggatgattattatagtcaagcaaatgaacatatttcctcacatagttacctttttatcatgctagcttctgaaaactattcttttagagcatttccagtgt

SEQ ID NO: 31821 - DNA, 585 bp, Homo sapiens
cttcattaagtctaaaatttgcttaagggttaggagtacataaacccagataatttatagtactactttgttatgtcttttaactaatctaaaacaaggctgctccatcaaccggtaatactcatgctaaacaaattaaagaataaatagaaagtggtaagctcaggtatttttcttggagcttgttcataatggaatagaaatatatattggcaagtattctgaggagtcaatattgcaaaatggaaaaaagcacagatttcaaagtcagtgattttagttcaaatccagtcattgccattttaaagctttatacctgaagcaagtataatcagttaggattcatttagctgccagtgacaggcagccacttcaaaaatggtttacataaaatgataatttattgcattatttatttctgttgttcataaaattatatatatttaasatgtacaacatcgtgttttgatatacatgtacataaggatgattattatagtcaagcaaatgaacatatttcctcacatagttacctttttatcatgctagcttctgaaaactattcttttagagcatttccagtgt

SEQ ID NO: 31822 - DNA, 817 bp, Homo sapiens
aattgctgtatcactatttgttgaaaaaactaccttttcctcattgaattgtcatctttgccataaatcaattgactacatatttatataaggtcttgtttctagactctgttctatatgcttatatgtctatccttctgccagtattatgytttcttaattactgtagctttatgacatgctttgaaatcaggtgctatgacttcccaaacttttttaattgttttggttattctagatacttttggttattctagataaattttagtattgacttttcaatatatgcaaacaaatctttatcagtataacattaaatgtatagatatatttgcagaaaacacacccaatactaagtctttcaatccatgaatttggtagaggtcttgtattcctgttaaatttattttaaatactttattttttatgttatttatcaagaatgagctttggattttgtaaaatgcttgttctgtattggctgagatggtcattttgcaattttctgggtaaagtttatgtatagcttttcttactagagttttttttaaaaacagccttctgactgtataaatagaacatagaagtttgaaacaatactctttttagttgttgatatataaagtatacagtttttatacattgtatacattaagttcagtgaacttaataaacccacttaataattctattataataatttatctatagattcttttagattttctgtgtatatgatcttatgtgtaaaattatgtaacaaataatgagagctttatttattttgtgttgttaagtgttttatttctccttattt

SEQ ID NO: 31823 - DNA, 1340 bp, Homo sapiens
  misc_feature (1)...(1340): n = A,T,C or G
attttcaaagtataatgtgacatatttcatatttcattagtgtctaaattgtggacttcttagaccagaaaaagccctttgtaaatggctaagaaatgtctgtttactatctttgcaagattctattcagagaactgggcaaagaaagggtgtactatgtgaatgaaaaaataaaaatttatatagcaaattcatgtagtggagaagagcccagaatgnnnnnnnnnnnnnnnnnnnnnnnnnnnnnnnnnnnnnnnnnnnnnnnnnnnnnnnnnnnnnnnnnnnnnnnnnnnnnnnnnnnnnnnnnnnnnnnnnnnntctcatttacatactcagtgaagctgggagatagattacagtaattagtaggaatccaaatcttatagcacattacagttgttaatgggtcattttaattttcacacctaaccacatgggacttattttagaaacattaaaaatgtccctagcccaagctaagaaaagcatagagtaatcaatggactattctctcctataatggtagtgatctaacaataaaatagattgtagaggcagagctcatagtgaaagcatttggtcagtgtgagtaaccgggagaactctacacaggaacgaaagtatcaggtggaaccctgaagaatgctgtatagccatgtatgtgccttcaccaaccagacgagaaggtgacaagtgagtcttttgttcagtatagcttttggcattaagagatattcatgtttttgtcagctcctctggatccctcttgctggttttgtgtgtccatacagcagcctctacgtgttagctgttacagcttactccagcaacacttactccagcaacattcctcagaggacttggacttggactcttagtgccactttcctggaagcatcttagaatttacgtagcatctggggaggtctgtagctattgactgacagaagacagggtacaawtatctgattccttgccctggcaggaaggaggagggggaagcctctgtagtctttaatctctagagctcccatgagatcaggctgaggttagggtagcacttctcctgatccaacatctcccactgccttacctgtttctactggcaccattcttctaataaatcatttgtgtacaaatcttgtctagcatccgcttctgggaaacttggcctaacatagaggtggtatattcatatctaccctctcattgccttccattcaaggatcctcaaaataatttttaacaccgtgcagagtgtggttaaagcaaactaaatatggcctgagaaagactccgtacttctatatttgagtccttgtggatcaatggtaacgtaa

SEQ ID NO: 31824 - DNA, 1340 bp, Homo sapiens
  misc_feature (1)...(1340): n = A,T,C or G
attttcaaagtataatgtgacatatttcatatttcattagtgtctaaattgtggacttcttagaccagaaaaagccctttgtaaatggctaagaaatgtctgtttactatctttgcaagattctattcagagaactgggcaaagaaagggtgtactatgtgaatgaaaaaataaaaatttatatagcaaattcatgtagtggagaagagcccagaatgnnnnnnnnnnnnnnnnnnnnnnnnnnnnnnnnnnnnnnnnnnnnnnnnnnnnnnnnnnnnnnnnnnnnnnnnnnnnnnnnnnnnnnnnnnnnnnnnnnnntctcatttacatactcagtgaagctgggagatagattacagtaattagtaggaatccaaatcttatagcacattacagttgttaatgggtcattttaattttcacacctaaccacatgggacttattttagaaacattaaaaatgtccctagcccaagctaagaaaagcatagagtaatcaatggactattctctcctataatggtagtgatctaacaataaaatagattgtagaggcagagctcatagtgaaagcatttggtcagtgtgagtaaccgggagaactctacacaggaacgaaagtatcaggtggaaccctgaagaatgctgtatagccatgtatgtgccttcaccaaccagacgagaaggtgacaagtgagtcttttgttcagtatagcttttggcattaagagatattcatgtttttgtcagctcctctggatccctcttgctggttttgtgtgtccatacagcagcctctacgtgttagctgttacagcttactccagcaacacttactccagcaacattcctcagaggacttggacttggactcttagtgccactttcctggaagcatcttagaatttacgtagcatctggggaggtctgtagctattgactgacagaagacagggtacaaatatctgattccttgccctggcaggaaggaggagggggaagcctctgtagtctttaatctctagagctcccatgagatcaggctgaggttagggtagcacttctcctgatccaacatctcccactgccttacctgtttctactggcaccattcttctaataaatcatttgtgtacaaatcttgtctagcatcygcttctgggaaacttggcctaacatagaggtggtatattcatatctaccctctcattgccttccattcaaggatcctcaaaataatttttaacaccgtgcagagtgtggttaaagcaaactaaatatggcctgagaaagactccgtacttctatatttgagtccttgtggatcaatggtaacgtaa

SEQ ID NO: 31825 - DNA, 667 bp, Homo sapiens
aacaaaagactcacttgtcaccttctcgtctggttggtgaaggcacatacatggctatacagcattcttcaggttccacctgatactttcgttcctgtgtagagttctcccggttactcacactgaccaaatgctttcactatgagctctgcctctacaatctattttattgttagatcactaccattataggagagaatagtccattgattactctatgcttttcttagcttgggctagggacatttttaatgtttctaaaataagtcccatgtggttaggtgtgaaaattaaaatgacccattaacaactgtaatgtgctataagatttggattcctactaattactgtaatctatctcccagcttcactgagtatgtaaatgagaaaaattattacacagcttctttactgaaactgcgactattctctaacatctaatatgcagtctgagatggatttctaaaaatgacagagtaaggatgccaatcttagcataagtatactaacatctgttctacatttctttaattmttttgacattcttattactatttataaaaaagtaatgtttttcttcagaaatgaaactttgtttagttttatctttcacttagaagcaacaatggtcatataattataacctctttatatatcataatatgca

SEQ ID NO: 31826 - DNA, 1369 bp, Homo sapiens
gaataggakaaatagaagaaagtggttcaatctccagatcaggcatatgactcagggtaagtggggttggcaactattttcagctgttaggagttctgaaattcttgcctatttcaaacctgcctctcaaatttcccactcattcaagacaactctcttttccaggaggaggcactcattaaacagtcattgttttattatctcttgatcaatggcaaggttggagggaatgggacttctgtcaggtaaaccttgataagggggaatcatcagacccttgggctgtggcctctttaaccagctttgtagatactttagggacatcttgaagtcatgtgaacccatttttccttgaaaaattttatgttaccagaacattttcacaagccagatttctagcttagccatatcctctgtggaagttcagctcctcacctcatcacttccccactaacatcctcccccagtcactaagtgccaagctagatcctacacacagcctccaccagtgcctagttttactttgaagctaccttcacccatctcctttttcctcaaggtcttgaacaggcagctggtcttttcctatttcatagctcataatccttattgcgatgctcactacactgccatctcctagtaaaagaacatcctctcagcattcttcaagcaacggtgatgatgccacttgaaggcaatgacatgaagcccatcagattccaaaatttttaaaaaagaaaaatctggtttttagttagtcagagggaaagcattgacaatatagctgtgccttgagctacatgcagcaggacagagactcctagcagacttaactgacctacaaacacaaatgaaaaacatttcaaaaatttcagaaacactggtggcatggagggagtgcaagaccctgaagagaatatgctgaggtcctgaagtgtgcagctggggcttaatgagctaggtaaggcttaatgttcacttgacctcactggcactgggctactcatgcctaggaatcttgggtttaccacaactacgtggcttccctgggtatagaatctagttttcttcttgaaaaatatgagactactcatgagctcctgaaaccactttaatttctacagtgtccacaagaaaagaatattgacaaaggtcttctaggtttattttaataagtgaaccaattcaataattagtctctgagaacctctgtgagcctgaatcctgcttttgtttggcttcaaaaaagataggtagatggccgggtgtggtggctcacgcctgtaatcccagcactttgggaggcctaggcaggcagatcacgaggtcaggagttcaagaccatccttgccaacatagtgaaacccca

SEQ ID NO: 31827 - DNA, 1369 bp, Homo sapiens
gaataggataaatagaagaaagtggttcaatctccagatcaggcatatgactcagggtaagtggggttggcaactattttcagctgttaggagttctgaaattcttgcctatttcaaacctgcctctcaaatttcccactcattcaagacaactctcttttccaggaggaggcactcattaaacagtcattgttttattatctcttgatcaatggcaaggttggagggaatgggacttctgtcaggtaaaccttgataagggggaatcatcagacccttgggctgtggcctctttaaccagctttgtagatactttagggacatcttgaagtcatgtgaacccatttttccttgaaaaattttatgttaccagaacattttcacaagccagatttctagcttagccatatcctctgtggaagttcagctcctcacctcatcacttccccactaacatcctcccccagtcactaagtgccaagctagatcctacacacagcctccaccagtgcctagttttactttgaagctaccttcacccatctcctttttcctcaaggtcttgaacaggcagctggtcttttcctatttcatagctcataatccttattgcgatgctcactacactgccatctcctagtaaaagaacatcctctcagcattcttcaagcaacggtgatgatgccacttgaaggcaatgacatgaagcccatcagattccaaaatttttaaaaaagaaaaatctggtttttagttagtcagagggaaagcattgacaatatagctgtgccttgagctacatgcagcaggacagagactcctagcagacttaactgacctacaaacacaaatgaaaaacatttcaaaaatttcagaaacactggtggcatggagggagtgcaagaccctgaagagaatatgctgaggtcctgaagtgtgcagytggggcttaatgagctaggtaaggcttaatgttcacttgacctcactggcactgggctactcatgcctaggaatcttgggtttaccacaactacgtggcttccctgggtatagaatctagttttcttcttgaaaaatatgagactactcatgagctcctgaaaccactttaatttctacagtgtccacaagaaaagaatattgacaaaggtcttctaggtttattttaataagtgaaccaattcaataattagtctctgagaacctctgtgagcctgaatcctgcttttgtttggcttcaaaaaagataggtagatggccgggtgtggtggctcacgcctgtaatcccagcactttgggaggcctaggcaggcagatcacgaggtcaggagttcaagaccatccttgccaacatagtgaaacccca

SEQ ID NO: 31828 - DNA, 544 bp, Homo sapiens
aaaaatctaggtacgatcaacagctggccaccactgttctgtgaagtctagagtgacccaactcatgaatgacccaggacccaatccaaactatcagaatgttctgcatttaagatgcacaaataaacaagagcagcagcaaaactcctaaggaaatacacattgttgagtaaaagatgcccatctgaaaagactaccaattgtatgattccaaatgtatgacattctgagaaaggcaaaactatggagacagtaacaatatttaactgccagagcgtgggtagagagagatgagcaggttcagcacaggagatttttaggtcagtgaagctattctgtatgacactgtaatggtgggcacatgtgattatacatttgtcagaacctagactgaactctaatgtaaactataaactttagtaataatggatcgatattgactcatcagttgtaacaaatgtatccacactaagtgcgaagatgtttacaggtaggggaaatcagtgtgkgtgtgtgtgtgtgtgtgtgtgtgagggggagagag

SEQ ID NO: 31829 - DNA, 518 bp, Homo sapiens
actcttcaccctctaaataatctaagtagcagagatgatatatttcactagaataacctcctgaactttgtgttgactcttgtcatactcttaagtttgtttttaaataaacaaaagttcctcgcttctaccccgggcaacacaggcagaccccatctctacaacaacaataaaattagccaggtgtggtggtgcaygcctgtggtcccagatacacaggaggcttcagtgggaggattgcctgagcccaggaggtcaaggctgcagtaagccatgcctgcattccagcctgggtgacagagtgagaccctgtctcaaaaaataaagaagaaaaaaaaagttcctcacttctcatagagctaagtttcttttagaaaaattgggttaccattttctatgtctatttaaaacattatattgttgtttcaattaattcattatttattattctcagatgtctatgctcctacgttaaatcagtgattaattcttctctgataactcttccaatgtcactg

SEQ ID NO: 31830 - DNA, 1233 bp, Homo sapiens
ccctgttttttacaggaaaattgcaacttgatctgtggtgatgaatatggtccagaaacaaggttgagcaggtctcaattgaacgaaaaggaaactcccttttaaytcatcaaagctctacttaagtacattgaaactcttaacgtttccggagctgttgttttgttttgttttgttttgttttgtttttttgcctgtctggaatttgatttatactgtgaagaagcatttggaaatgaatccacattttggtatgagtctttaaattctcacatatttgagagtgaaaatgaatgtttttgctagtgccttagccagtatgtgaaaacaaaattttgtgttgtcaatactttcgaagaaaaaaaatatgtacaacggagagctgtttgaaaccagttcctatttttagtccctgattgttctgtactgttatatatgggaagccatcagtaccagattctacttctgcattctcagattcctccagagcaacagcgcaaagtgttggatccagtaccagttggagtaaccaaggtaaatattaaacattacaatgatgggattggaagtgatgttgatattaaacaaatgttacaggtcttcaaagagctacccaaaaaattgtaacccatctaaattgaggaagaaaaaaggagtcttctctttctgagcttagtagattgttcattaattggttattgggtgattttcttaggacttctgtaattttcttgtcatttgttacatacataagcaaaccagtcgtttcaagtacataataagaatattatctggagtgtaatttttctttcttcacaggttattttttccacaaatattgctgaaacaagcattaccataaatgatgttgtttatgtcattggctcctgccagttagttactgggaaacctatttacctgttccagtattaccaactggaaacttcttaccagttaacagaatgaaaaacatcttatttttaaactcctgtgttcttatatctccaaaactattgtgcatctacatagaattataggtaattgataattaagagtaattatttgtgttgattactgcaaataagttatggtagaaagtgacaaagcttgaaatggtaactgatgattacttctcattgttcttggctgctggtatttcacttatttcccattgggtgtttccattgatcactgccatactatagcatgctgtttgatgaataaagatgacca

SEQ ID NO: 31831 - DNA, 789 bp, Homo sapiens
tacccagtagtcattcaggagcaggttgttcagttaccatgtagttgtacagttttgagtgagtttcttaatcctgagttctaatttgattgcactgtggtctgagagactgtttgttatgatttccgttctttttgtttttgttttgttgaaacgcagtctcactctgtcacccaggctggagtgcagtggtgatatcttggctcactgcaatctctgcctcccaggttcaagggattctcttgcctcagcctacccagtagctggagttacaggtacccacaacsacacccggctaatttttgtatttttaggagagatgaggtttcgccatgttggccaggttggtctcgaactcctgacctcaagtgatccgcccacctccgcctcccaacgtgctgggcttacaagcatgagccactgcgcccggttgccaagagtttacaattattgagcgcttgctatgtttcaagcactatttaagcactttacaatattacttcttgtaatgttcacaatgaactcattatatgggcaccattgtgttaccattttacacatgaagagattgaagcacagaatatgagctcttaaacactatgccattctgctacctgtagcaacctctgaccttccttctaattggctttttatagatttctgtggacttaaaaataaaataaggaaacgggagaaagttatgtgtcaaatatgcacaaatatacattaagtgagagatgaagcctgataaggttttctatgaatgccatgtacaaattgcatggcatg

SEQ ID NO: 31832 - DNA, 789 bp, Homo sapiens
tacccagtagtcattcaggagcaggttgttcagttaccatgtagttgtacagttttgagtgagtttcttaatcctgagttctaatttgattgcactgtggtctgagagactgtttgttatgatttccgttctttttgtttttgttttgttgaaacgcagtctcactctgtcacccaggctggagtgcagtggtgatatcttggctcactgcaatctctgcctcccaggttcaagggattctcttgcctcagcctacccagtagctggagttacaggtacccacaacgacacccggctaatttttgtatttttaggagagatgaggtttcgccatgttggccaggttggtctcgaactcctgacctcaagtgatccgcccacctccgcctcccaacgtgctgggcttacaagcatgagccactgcgcccggytgccaagagtttacaattattgagcgcttgctatgtttcaagcactatttaagcactttacaatattacttcttgtaatgttcacaatgaactcattatatgggcaccattgtgttaccattttacacatgaagagattgaagcacagaatatgagctcttaaacactatgccattctgctacctgtagcaacctctgaccttccttctaattggctttttatagatttctgtggacttaaaaataaaataaggaaacgggagaaagttatgtgtcaaatatgcacaaatatacattaagtgagagatgaagcctgataaggttttctatgaatgccatgtacaaattgcatggcatg

SEQ ID NO: 31833 - DNA, 789 bp, Homo sapiens
tacccagtagtcattcaggagcaggttgttcagttaccatgtagttgtacagttttgagtgagtttcttaatcctgagttctaatttgattgcactgtggtctgagagactgtttgttatgatttccgttctttttgtttttgttttgttgaaacgcagtctcactctgtcacccaggctggagtgcagtggtgatatcttggctcactgcaatctctgcctcccaggttcaagggattctcttgcctcagcctacccagtagctggagttacaggtacccacaacgacacccggctaatttttgtatttttaggagagatgaggtttcgccatgttggccaggttggtctcgaactcctgacctcaagtgatccgcccacctccgcctcccaacgtgctgggcttacaagcatgagccactgcgcccggttgccaagagtttacaattattgagcgcttgctatgtttcaagcactatttaagcactttacaatattacttcttgtaatgttcacaaygaactcattatatgggcaccattgtgttaccattttacacatgaagagattgaagcacagaatatgagctcttaaacactatgccattctgctacctgtagcaacctctgaccttccttctaattggctttttatagatttctgtggacttaaaaataaaataaggaaacgggagaaagttatgtgtcaaatatgcacaaatatacattaagtgagagatgaagcctgataaggttttctatgaatgccatgtacaaattgcatggcatg

SEQ ID NO: 31834 - DNA, 1336 bp, Homo sapiens
tccaaaactatacagaactgggtcaaatgccactgtagtaatacaaaacataagtctttacaaaaaatctaattaaacataaattattttaagaaaatatactatgataaaatatcaatcatgatagcttatgcttatttcttaaagtgcatataaatcttttgttgttgttgttattgttgattggttgatcagaaaccagaatctcatctccctcattgacaaaacttctaggtcacagtaggcttcaactggtataataaaaatttctcacagacgtaaaatgtaaaggtagctttgaaggtgaagtaaatgagaagttaccaggggaagaatttactttaggatagccttatctattgacattttgacaatattaaactgtgagaacccttgaggtatcttcaagacacactgaataagtgcacctccttcaacagaaacacattgaaccccacaaatatggaagtgaaatgctcatcttttctagagaagaagatttatttataacttcattgcttatggaaaattattccaaataaaattaaataccttctaatttggtctaaacccattttgtcatgttctgtgcacatcagagtttgaaagcagatggccagtactcactgaataaagtctctttatgcatttaaaaattggcatgaaatgacttttgggtcttttcttcatcaaattgtatagttccagctttgttaacctctcaatgttaaccttagtttccagtcctttagtcatcttcgggatcatctctaaagctgttcatggtctttcattagtcagctgtacttcagtaagccctccaacaactaccaagaaatatgtcagaacttgtttagttgtcatagcattttatatctcttagtctatatttcttgcacatttggggcacaaggataaaatgaatgcagctttcagaggtacagmtatgctttttttcttaatttttgtatgataatatttttgatagctttgccaatgagccagagatttttttatctaagataatgaaatttaactagaggcaggaataaaattacattgaagtcccgagattctaggtagccatggttttccaatgagctgagtgttttcttctttgagaaccttaactttattaattactatatggattaaaacttccaaaaatacatcacactttctttctctcttacatagttcatatggaatatgttttggcatttttatttgacaacataatttaattcaatatatttattgagcacctacaaaattaagaaatatgctagaagatatggagacaaggtgaatcagaacttaagggcttgcaatctga

SEQ ID NO: 31835 - DNA, 569 bp, Homo sapiens
ataaccaatgctttccatcatctgacccagccccttctctcctctttccccatctcaccttcccatgacaccaggtactccagttatacggaagccctcactccatcctcttcagctgggtccctctcacctcccggactttaaacactggggagaagaggtagatgcttctgtaataagtcaaactgagttccttcaggaggtcagggaattcagcacactcaacaagggagaataaatgaatggatgactgaaggatcatttaaaaaaaactttgtgtagcactagccacttktaacatactatcactctttttaatcagtgattaaaattattataagccataaaactaaggaaatcttctagtgggttgtactcagggatggtcccattcactgtcagctatgtagaagggcctgaggagccccaggacaggcaacctgcctaaaatatttcccccgcgtgtttggcaaaagttttgaatctctgctctcagaatagaaccggtttacccacttgttaaactgtgaacacccctgaaaaagatattaaaatattgatattttcac

SEQ ID NO: 31836 - DNA, 1799 bp, Homo sapiens
  misc_feature (1)...(1799): n = A,T,C or G
tgccctctgcctcagacactatccattctcctcttggccatctgacagatgcacactcctcctccaagtcacagtttggtcataatatatttgtggtgcttttcctgcctgtctatggtgaatctgggggaaacttgtcagtatcccactgcagcctaggaacagttccactgtgcagatggactttcgagtctagacttgtctggagacctaattgcttagcttcatttcgtgtgtgtgtgtgtgtgtgtgtgtgtgtgtgtgtgtgtgcatgtgtatgtacaagctgcccatcaaagntactcaaagaatgannnnnnnnnnnnnnnnnnnnnnnnnnnnnnnnnnnnnnnnnnnnnnnnnnnnnnnnnnnnnnnnnnnnnnnnnnnnnnnnnnnnnnnnnnnnnnnnnnnnaattcagcaaagcagaatgtgagggagctgcccccacaggtttggggaaggtctgcagcaggacaggtcagaggtctggctgggccagcccttttacgtcccgacacgactgtttctcaaaagccctgatccctttccatattgtaaagccactaaagatcactcttggtttctgtcttacacccagaaactcttgcttttacatggcttattgtcagggactcagcttccccaaatgaacaatacatttgactgcactgttccaccgtgattacttgtttctaatttatttatcaatcgataagcataacctttgcccaaaacctcactcatctttctcactgattctagtatttaatctctctttagacttagtctgcccaagaggcttatgactcggaggctgcaagacatatgagttgtaagaggcaggatctagaggtgtgtggatcctagaaagtggcttgtttgggccccaaagcccacatgcctgagtactgggatttctccagatcttggggtgagcgaaccagggaacagttcctcccatgactatttatgtatcctgtagaacatgagctccgtgaaagcagcaagaatgggcttgcttttctcacctatgctgcttacgacaggtgctcagtaagtagttgccraatgaataaacaggtgatgttacccagaattttaagttcaaagtcccagccagcaggtggagtgatgaaagtcatagcaaataataactgtatttgctgatacagaagacatcttgttatttcccccaaaaatgtatccaaatattaccctgcatctaatgcatctgaattacatcaaatcactaaggatagaagcagacgtatcgctcagtgtcaaaaagcaaaatcactgtctctcctctacagtcaggaaccagacagccctctttccttttcaaaacttcaccagaattcctttcaatacactattaggaaaagtactaagtttttcttccaccacccccaccctcaacaaatgtccctattaaatagatgcccagcgtggggccttatattctgcaagaaataagtattttgtttaacctcagagttactgcctcatggtcctaatgggtcctcagaactcattttgcctcacactccttccccaaaagtgtcatagatataacaactctgagtcccagagtggacacccgaggcattggtagtgagaaggggggtttttacagcaacttatgtgaacgtatgtggtgtaacatactctcatctcctctcctaatgaccctggaatgaggtagtattagtcccattttaaagatggagagggtgaggctagtagactcgtaacaggcgctgaagccagaccccatgactcatctcacagccttt

SEQ ID NO: 31837 - DNA, 1136 bp, Homo sapiens
attaattatgtctttttataaggcaattatcctaacagaaagtaaataggttgtagtgttaagacagatataaatctgaattcagatgctataatgctataatattttaaaatatgtgtggtcttctgcatttacttaactttgatgttccagtttttattatcttttgaataggaataatgatatctactgcacagtactggtagaaagattctatctctacatagtgcctgacacatggaagatgattaatgaacagtgcctacttttaaaaataacataatctctgtctttaagatgatgagcatcttctcactgtgtcttcacatggcagaaaggggaagggagctctctggggtctctttcacaaggacactaatcccattcatgggggttctaccctcatgacttaattacttcccaaaggccccacatccaaatatcatcactttgggtatcaggtttcaacacatgaatttgggggagggggaataccaacattcaatctacagcagaaggaatgctagaattgatttaaagatagtcatctgtattctgtgaatcccaccaccatctctcatgggaaggctctactcttctccctcccatcttcttcaacaagaccacttgagagctcgatatttaccagagtctagaccagcaagtgactcacacttgaaaatgtcrctaagcagaagtctgtctgtacctctctgtgatggccaagcagaagcaagatgcactccacgggagcagattcattcccaccattctgcctgatcaggccgtgtgactttcctttgggccacatgagcatcccagaatgtaaccaggctgacaccatttaggaaaacccctgccccaatgggaagcctgctaaatcaaagtaacccagaaggaagagtctctggggtataaaccatttaggatatttctaggggagtaggagagtaggatgtgatggttggttgagagttcgctgtctgcatcatggacctgtcagtaaaaagggctattataaagtttcagtcaaaccaaaccaaacaagatggcacaaaacaaaacccataggcatgctttcaaaaagagtagtcaacactaaacatcaatgaagcccaggaaatatcagttttaaa

SEQ ID NO: 31838 - DNA, 1136 bp, Homo sapiens
attaattatgtctttttataaggcaattatcctaacagaaagtaaataggttgtagtgttaagacagatataaatctgaattcagatgctataatgctataatattttaaaatatgtgtggtcttctgcatttacttaactttgatgttccagtttttattatcttttgaataggaataatgatatctactgcacagtactggtagaaagattctatctctacatagtgcctgacacatggaagatgattaatgaacagtgcctacttttaaaaataacataatctctgtctttaagatgatgagcatcttctcactgtgtcttcacatggcagaaaggggaagggagctctctggggtctctttcacaaggacactaatcccattcatgggggttctaccctcatgacttaattacttcccaaaggccccacatccaaatatcatcactttgggtatcaggtttcaacacatgaatttgggggagggggaataccaacattcaatctacagcagaaggaatgctagaattgatttaaagatagtcatctgtattctgtgaatcccaccaccatctctcatgggaaggctctactcttctccctcccatcttcttcaacaagaccacttgagagctcgatatttaccagagtctagaccagcaagtgactcacacttgaaaatgtcgctaagcagaagtctgtctgtacctctctgtgatggccaagcagaagcaagatgcactccacgggagcagattcattcccaccattctgcctgatcaggccgtgtgactttcctttgggccacatgagcatcccagaatgtaaccaggctgacaccatttaggaaaacccctgccccaatgggaagcctgctaaatcaaagtaacccagaaggaagagtctctggggtataaaccatttaggatatttctaggggagtaggagastaggatgtgatggttggttgagagttcgctgtctgcatcatggacctgtcagtaaaaagggctattataaagtttcagtcaaaccaaaccaaacaagatggcacaaaacaaaacccataggcatgctttcaaaaagagtagtcaacactaaacatcaatgaagcccaggaaatatcagttttaaa

SEQ ID NO: 31839 - DNA, 1136 bp, Homo sapiens
attaattatgtctttttataaggcaattatcctaacagaaagtaaataggttgtagtgttaagacagatataaatctgaattcagatgctataatgctataatattttaaaatatgtgtggtcttctgcatttacttaactttgatgttccagtttttattatcttttgaataggaataatgatatctactgcacagtactggtagaaagattctatctctacatagtgcctgacacatggaagatgattaatgaacagtgcctacttttaaaaataacataatctctgtctttaagatgatgagcatcttctcactgtgtcttcacatggcagaaaggggaagggagctctctggggtctctttcacaaggacactaatcccattcatgggggttctaccctcatgacttaattacttcccaaaggccccacatccaaatatcatcactttgggtatcaggtttcaacacatgaatttgggggagggggaataccaacattcaatctacagcagaaggaatgctagaattgatttaaagatagtcatctgtattctgtgaatcccaccaccatctctcatgggaaggctctactcttctccctcccatcttcttcaacaagaccacttgagagctcgatatttaccagagtctagaccagcaagtgactcacacttgaaaatgtcgctaagcagaagtctgtctgtacctctctgtgatggccaagcagaagcaagatgcactccacgggagcagattcattcccaccattctgcctgatcaggccgtgtgactttcctttgggccacatgagcatcccagaatgtaaccaggctgacaccatttaggaaaacccctgccccaatgggaagcctgctaaatcaaagtaacccagaaggaagagtctctggggtataaaccatttaggatatttctaggggagtaggagagtaggatgtgatggttggttgagagttcgctgtctgcatcatggacctgtcagtaaaaagggctattataaagtttcagtcaaaccaaaccaaacaagatggcacaaaacaaaacccataggcatgctttcaaaaagagtagtcaacactaaacatcaatgaagcccaggaaatatcagtttkaaa

SEQ ID NO: 31840 - DNA, 559 bp, Homo sapiens
aaataaataaataaattacagcaccagttttcctgattctccagatcacagagagcatattgtaggacttcatggcctccataatctcacgagccaattttcgtaaaaaattccttcttatatatctctccatatatcctattgggtctgtttttctggagaaccttgattaatagagaaggcaaacaaatattaatttgtaactctaattaataggatacataaatttataataaaaatgtttgtattatacacttattaaattatttattatctgttttcttctgctagaatgtaagttccaagaggccaggatctttgtttggttcatgtcttccccaagtgcctaggagactgccagatataaagtaggtaatcagtcaataattgtttaatgagtgctatatcactaatcaagacttatgctcaacacaattctttgaacctgagatgtataaaaaaaagacaactaggktataagttttgagtcaattagggtacaagagcatcccgtgatatcagaagagtcactttatttatttatttatttatttattta

SEQ ID NO: 31841 - DNA, 552 bp, Homo sapiens
gtctaactagccatattcaagtgttcaataaccacatgtggctagcagctaccatactagacaatgcagttctagaagtttttctcataagccagaatcttcctccacctgtatttaactcattatttctactgttgtactctgggacaaaaactgcatctccaacttatatctattatcaggcaatttgtaaagaacaaagkagaaatacttttaaagaagctcactataagtttaatgagaataccattaaaagcttagaccaaatgttgtcaattactgaattatttagaatactgttcaagaaccccaggtaatttacatggcatttatcaaaagttattctcaataaatatgtttctttacaagtcattctttctaaatatgcacatactttttaactagcaaatttaggaaattaattatgcagatctctaccgatagagagtccctaaataagctacaaaatcacaagccttaagaaaaaaagacaacacctgacctgatgtaaattacggtagaaccatagttgaaatgtctgtgggtatcttg

SEQ ID NO: 31842 - DNA, 552 bp, Homo sapiens
gtctaactagccatattcaagtgttcaataaccacatgtggctagcagctaccatactagacaatgcagttctagaagtttttctcataagccagaatcttcctccacctgtatttaactcattatttctactgttgtactctgggacaaaaactgcatctccaacttatatctattatcaggcaatttgtaaagaacaaaggagaaatacttttaaagaagctcactataagtttaatgagaataccattaaaagcttagaccaaatgttgtcaattactgaattatttagaatactgttcaagaaccccaggtaatttacatggcatttatcaaaagttattctcaatraatatgtttctttacaagtcattctttctaaatatgcacatactttttaactagcaaatttaggaaattaattatgcagatctctaccgatagagagtccctaaataagctacaaaatcacaagccttaagaaaaaaagacaacacctgacctgatgtaaattacggtagaaccatagttgaaatgtctgtgggtatcttg

SEQ ID NO: 31843 - DNA, 552 bp, Homo sapiens
gggattaacagtggaagcagggtttgaccatgaaggagttttgggggtgacaagatactctggtttttttttttttcttgagacagagtctcgctttgtcgcccaggctggagtgcagtggcacgatctcagctcattgcaaaaactggaaacgaagtaaatatggcarcatgctaattacatgtgacattatcagtatttgctttattattgtacttgtatattttaattggtcgacatacaaacaaggcaaaatatatcccccttagagaaaatttggaaaagacagaaaaggagatagaacaagtcaccagttgtctttatttatttattgaaacggagtctcgctctgtcgcccaggctggagtccggtggcgccatctccgcttactgcaagctctgcctctcgggttcatgccattctcccgcctcagcctcccgagtagctgggactacaggcgcccaccaccatgcccggctaattttgtttttgtatttttagtggagacagggtttcactgggttagccaggatggtcttgatctcttgacc

SEQ ID NO: 31844 - DNA, 612 bp, Homo sapiens
ggcaaaccacctcacaggaaaaaatgggcaaagttataaacaaatattttatagaatatgataaacaagcaataaatatgtagatttcaagcacgctagtaaacaggtaaatgctaattaaaatatatgatatattgacaaaaatttaagtctgaaagtgtcaagtttcaacaaaaagtaaaaacaagtggaattcttttatactgctatgaaaggtaaattgagtatgaccatttggaaaacaatttggttacctaataaatttcaagctgcttatgtcagttttctaaaattgccaaaataaattatctcaagtttagcagctaaaataatgctatctcacagttaggaagtcagaagttgagcgagctcagctgggaattctgcttaggatctcacaatgctgaaatcaaggtgtcggccagcttgtgttcttatctggaggctcaggttgatagcaaacataatttaattccttctcacggtttccacgtggcctccatgtcttcaagtcagcaacaagtaggttgagtgcctctcactctacaagtgtctaactttctcwtgcattgcatctcttctgcctttaaagggtcacatgattatattagg

SEQ ID NO: 31845 - DNA, 519 bp, Homo sapiens
tgcttactctaaataggcagattatgtgtatctgcagattcccatgattctctgctctactcagatattccagtagtgacaactaaagtcatacagatgaagaactcttctggatggaaaggattgtaaaggatatgaccagtcatgagagatataggtaaaatgaatgagttttttacaaaatagcctttaatgtcattgtcagagacaagcctcagaatgattggttggttgttctgacttggtgtgacatgtgtcttgttcctatgagacttgtgtgcaartaagccctttgggcatcccagtttaggaaagaaaaacaaaaggaaaaattattttacgaatggtaactttatagagcaaataatttactgacagattctggtagatagaatctgagtataatagaggttttagggattgtgttttttaaaaataatatattcaacaaatctttactaggaattgattatggatcagaaactgttaggtactaagtatacaatgatgaatatgcaa

SEQ ID NO: 31846 - DNA, 597 bp, Homo sapiens
ccaaaccctcaaaaacataaatgttcaagacacacatatttatatctaatgtgctgggcaaacataagattttaaaataccaaaataaaagtcttctttttttttttttaaaagaaacttggaaccaacccaaatgtccaacaatgatagactggattaagaaaatgtggcacatatacaccatggaatactatgcagccataaaaaatgatgagttcatatcctttgtagggacatggatgaaattggaaaccatcattctcagtaaactatcgcaagaacaaaaaaccaaacaccgcatattctcactcataggtgggaattgaacaatgagatcacatggacacaggaaggggaatatcacactctggggactgtggtggggtcgggggaggggggagggatagcattgggagatatacctaatgctagatgacacattagtgggtgcagcacaccagyatggcacatgtatacatatgtaactaacctgcacaatgtgcacatgtaccctaaaacttagagtataataaaaaaaaaaaaaaaaaaagaaagatatgatacatatgaataaaggaaatatatttctttcttggt

SEQ ID NO: 31847 - DNA, 2116 bp, Homo sapiens
cctggttgcagccatgtcaagactgatgctgaggaggaccccaactatcatgagcaacagctgtcgaacacagccacctacctggggacagatcaagaagctgtcacagatggtggaagaaaacctgaggaaagtgggacaaccagtcacaatgagtaatttaatgatagatatgatagtggtgatcaccattgccatgagtattccttcaacaaggaacaacacagagaacagttatacttattgggcatatttatcaatcttggctggcaataatgcctggatgtaatcactgtgtgacacagttacacatgctttctgctcttaatatttaccataataaatctgctcctataattgaggcaaagcaaaggcagctcaaaacctatttgtaaatagaattagacctggccagaaataatgaatgtacttgtttgggaagattgcattgcagaacaggtagaggtgctgcrcaacgattcctatggaatcattattgattggtcccctaaggggatgtttagcttaaattacacctctcagtctgtgtgccacagccacactatgttcagctggtctaaacaaaacagtcagatggtagaaatggtaagaaatacagcaagagttcccattatctggaaacgtggcggtatagtggcacctcaacctcaaatgatatggtccactgtagaagctaaacataaggatttgtggaaactattaatgtctgttaataagatcaaaatttgggaaagaataaaaaagcatctagaaggacactctacaaacttgtctttgcatattgcaaaattaaaagaacaaatatttaaagcatcccaggcacacttgaccttaatgccaggaactggagtgcttgaaggagctgcagacagattagcagatattaacccattaaagtggataaagacacttggaagctctgtgatttcaatgatgattgtgcttttaatctgtgttgtttgtctttgtatagtctgcaggtgcggatcctgactcctgtgagaattagctcaccatgacaaagctgcctttgcttttatcactttggaaaacaaaaaggggaacgtgttgggaacaggcccccaaatctggccataaactggccccaaaactggccataaacaaaatctctgcagtactgtgacatgttcatgatggccatgatgcccaaactgaaggttgtgggtttatcagaataagggcaaggaacacctggcccacccagggtggaaaaccgcttaaagcattcctaagccacaaataatagtatgagctatctgtgctttaaggacatgttcctgctgcagataactagccagagcccatccctttgtttcggcccatccctttgtttcctgtaaggaatacttttagtttatctataatctatagaaacaatgcttatcactggcttgctgtcaataaatatgtgggtcaaactccgttcagggctctcagctctgaagtctgtgagtcccctgatttcccactccacactctatatttctatgtgtgtgtctttaattcctctagcaccactgggttagggtctccatgaccaagctggtctcggcaatctgccaacccccaggcaacagaaagaggcttatccaacaacagagtgatggaaccactctgtaaatgacatgagttttgagtgaccagcaactggcctcaggtccctggagtttagtggcttgtcaccacactcacactgtctgttcaccatcatgccttggcatgggctctgagttcaatccctggcattctggaacaggtctggagtgagtctgatgccagggcagcctttgttctggtggacagtgggatggccccagggccctcctaccctctctgatgcctgaatgtctgctttcaggctcctaacaagttcactccacggagtcttcctccaccacctgggacctggtgaccccttcccttctctgatcctctgaccccggctgcctaattctgtgattggactgaactgaaccaggctgcaaacctcctcaaggcaaggaccctggaatgttcacattttttgagtctacaagatagaacctaataaaaatatagggatgacagtgatgct

SEQ ID NO: 31848 - DNA, 2116 bp, Homo sapiens
cctggttgcagccatgtcaagactgatgctgaggaggaccccaactatcatgagcaacagctgtcgaacacagccacctacctggggacagatcaagaagctgtcacagatggtggaagaaaacctgaggaaagtgggacaaccagtcacaatgagtaatttaatgatagatatgatagtggtgatcaccattgccatgagtattccttcaacaaggaacaacacagagaacagttatacttattgggcatatttatcaatcttggctggcaataatgcctggatgtaatcactgtgtgacacagttacacatgctttctgctcttaatatttaccataataaatctgctcctataattgaggcaaagcaaaggcagctcaaaacctatttgtaaatagaattagacctggccagaaataatgaatgtacttgtttgggaagattgcattgcagaacaggtagaggtgctgcacaacgattcctatggaatcattattgattggtcccctaaggggatgtttagcttaaattacacctctcagtctgtgtgccacagccacactatgttcagctggtctaaacaaaacagtcagatggtagaaatggtaagaaatacagcaagagttcccattatctggaaacgtggcggtatagtggcacctcaacctcaaatgatatggtccactgtagaagctaaacataaggatttgtggaaactattaatgtctgttaataagatcaaaatttgggaaagaataaaaaagcatctagaaggacactctacaaacttgtctttgcatattgcaaaattaaaagaacaaatatttaaagcatcccaggcacacttgaccttaatgccaggaactggagtgcttgaaggagctgcagacagattagcagatattaacccattaaagtggataaagacacttggaagctctgtgatttcaatgatgattgtgcttttaatctgtgttgtttgtctttgtatagtctgcaggtgcggatcctgactcctgtgagaattagctcaccatgacaaagctgcctttgcttttatcactttggaaaacaaaaaggggaacgtgttgggaacaggcccccaaatctggccataaactggccccaaaactggccataaacaaaatctctgcagtactgtgacatgttcatgatggccatgatgcccaaactgaaggttgtgggtttatcagaataagggcaaggaacacctggcccacccagggtggaaaaccgcttaaagcattcctaagccacaaataatagtatgagctatctgtgctttaaggacatgttcctgctgcagataactagccagagcccatccctttgtttcggcccatccctttgtttcctgtaaggaatacttttagtttatctataatctatagaaacaatgcttatcactggcttgctgtcaataaatatgtgggtcaaactccgttcagggctctcagctctgaagtctgtgagtcccctgatttcccactccacactctatatttctatgtgtgtgtctttaattcctctagcaccactgggttagggtctccatgaccaagctggtctcggcaatctgccaacccccaggcaacagaaagaggcttatccaacaacagagtgatggaaccactctgtaaatgacatgagtttkgagtgaccagcaactggcctcaggtccctggagtttagtggcttgtcaccacactcacactgtctgttcaccatcatgccttggcatgggctctgagttcaatccctggcattctggaacaggtctggagtgagtctgatgccagggcagcctttgttctggtggacagtgggatggccccagggccctcctaccctctctgatgcctgaatgtctgctttcaggctcctaacaagttcactccacggagtcttcctccaccacctgggacctggtgaccccttcccttctctgatcctctgaccccggctgcctaattctgtgattggactgaactgaaccaggctgcaaacctcctcaaggcaaggaccctggaatgttcacattttttgagtctacaagatagaacctaataaaaatatagggatgacagtgatgct

SEQ ID NO: 31849 - DNA, 2116 bp, Homo sapiens
cctggttgcagccatgtcaagactgatgctgaggaggaccccaactatcatgagcaacagctgtcgaacacagccacctacctggggacagatcaagaagctgtcacagatggtggaagaaaacctgaggaaagtgggacaaccagtcacaatgagtaatttaatgatagatatgatagtggtgatcaccattgccatgagtattccttcaacaaggaacaacacagagaacagttatacttattgggcatatttatcaatcttggctggcaataatgcctggatgtaatcactgtgtgacacagttacacatgctttctgctcttaatatttaccataataaatctgctcctataattgaggcaaagcaaaggcagctcaaaacctatttgtaaatagaattagacctggccagaaataatgaatgtacttgtttgggaagattgcattgcagaacaggtagaggtgctgcacaacgattcctatggaatcattattgattggtcccctaaggggatgtttagcttaaattacacctctcagtctgtgtgccacagccacactatgttcagctggtctaaacaaaacagtcagatggtagaaatggtaagaaatacagcaagagttcccattatctggaaacgtggcggtatagtggcacctcaacctcaaatgatatggtccactgtagaagctaaacataaggatttgtggaaactattaatgtctgttaataagatcaaaatttgggaaagaataaaaaagcatctagaaggacactctacaaacttgtctttgcatattgcaaaattaaaagaacaaatatttaaagcatcccaggcacacttgaccttaatgccaggaactggagtgcttgaaggagctgcagacagattagcagatattaacccattaaagtggataaagacacttggaagctctgtgatttcaatgatgattgtgcttttaatctgtgttgtttgtctttgtatagtctgcaggtgcggatcctgactcctgtgagaattagctcaccatgacaaagctgcctttgcttttatcactttggaaaacaaaaaggggaacgtgttgggaacaggcccccaaatctggccataaactggccccaaaactggccataaacaaaatctctgcagtactgtgacatgttcatgatggccatgatgcccaaactgaaggttgtgggtttatcagaataagggcaaggaacacctggcccacccagggtggaaaaccgcttaaagcattcctaagccacaaataatagtatgagctatctgtgctttaaggacatgttcctgctgcagataactagccagagcccatccctttgtttcggcccatccctttgtttcctgtaaggaatacttttagtttatctataatctatagaaacaatgcttatcactggcttgctgtcaataaatatgtgggtcaaactccgttcagggctctcagctctgaagtctgtgagtcccctgatttcccactccacactctatatttctatgtgtgtgtctttaattcctctagcaccactgggttagggtctccatgaccaagctggtctcggcaatctgccaacccccaggcaacagaaagaggcttatccaacaacagagtgatggaaccactctgtaaatgacatgagttttgagtgaccagcaactggcctcaggtccctggagtttagtggcttgtcaccacactcacactgtctgttcaccatcatgccttggcatgggctctgagttcaatccctggcattctggaacaggtctggagtragtctgatgccagggcagcctttgttctggtggacagtgggatggccccagggccctcctaccctctctgatgcctgaatgtctgctttcaggctcctaacaagttcactccacggagtcttcctccaccacctgggacctggtgaccccttcccttctctgatcctctgaccccggctgcctaattctgtgattggactgaactgaaccaggctgcaaacctcctcaaggcaaggaccctggaatgttcacattttttgagtctacaagatagaacctaataaaaatatagggatgacagtgatgct

SEQ ID NO: 31850 - DNA, 2116 bp, Homo sapiens
cctggttgcagccatgtcaagactgatgctgaggaggaccccaactatcatgagcaacagctgtcgaacacagccacctacctggggacagatcaagaagctgtcacagatggtggaagaaaacctgaggaaagtgggacaaccagtcacaatgagtaatttaatgatagatatgatagtggtgatcaccattgccatgagtattccttcaacaaggaacaacacagagaacagttatacttattgggcatatttatcaatcttggctggcaataatgcctggatgtaatcactgtgtgacacagttacacatgctttctgctcttaatatttaccataataaatctgctcctataattgaggcaaagcaaaggcagctcaaaacctatttgtaaatagaattagacctggccagaaataatgaatgtacttgtttgggaagattgcattgcagaacaggtagaggtgctgcacaacgattcctatggaatcattattgattggtcccctaaggggatgtttagcttaaattacacctctcagtctgtgtgccacagccacactatgttcagctggtctaaacaaaacagtcagatggtagaaatggtaagaaatacagcaagagttcccattatctggaaacgtggcggtatagtggcacctcaacctcaaatgatatggtccactgtagaagctaaacataaggatttgtggaaactattaatgtctgttaataagatcaaaatttgggaaagaataaaaaagcatctagaaggacactctacaaacttgtctttgcatattgcaaaattaaaagaacaaatatttaaagcatcccaggcacacttgaccttaatgccaggaactggagtgcttgaaggagctgcagacagattagcagatattaacccattaaagtggataaagacacttggaagctctgtgatttcaatgatgattgtgcttttaatctgtgttgtttgtctttgtatagtctgcaggtgcggatcctgactcctgtgagaattagctcaccatgacaaagctgcctttgcttttatcactttggaaaacaaaaaggggaacgtgttgggaacaggcccccaaatctggccataaactggccccaaaactggccataaacaaaatctctgcagtactgtgacatgttcatgatggccatgatgcccaaactgaaggttgtgggtttatcagaataagggcaaggaacacctggcccacccagggtggaaaaccgcttaaagcattcctaagccacaaataatagtatgagctatctgtgctttaaggacatgttcctgctgcagataactagccagagcccatccctttgtttcggcccatccctttgtttcctgtaaggaatacttttagtttatctataatctatagaaacaatgcttatcactggcttgctgtcaataaatatgtgggtcaaactccgttcagggctctcagctctgaagtctgtgagtcccctgatttcccactccacactctatatttctatgtgtgtgtctttaattcctctagcaccactgggttagggtctccatgaccaagctggtctcggcaatctgccaacccccaggcaacagaaagaggcttatccaacaacagagtgatggaaccactctgtaaatgacatgagttttgagtgaccagcaactggcctcaggtccctggagtttagtggcttgtcaccacactcacactgtctgttcaccatcatgccttggcatgggctctgagttcaatccctggcattctggaacaggtctggagtgagtctgatgccagggcagcctttgttctggtggacagtgggatggccccagggccctcctaccctctctgatgcctgaatgtctgctttcaggctcctaacaagktcactccacggagtcttcctccaccacctgggacctggtgaccccttcccttctctgatcctctgaccccggctgcctaattctgtgattggactgaactgaaccaggctgcaaacctcctcaaggcaaggaccctggaatgttcacattttttgagtctacaagatagaacctaataaaaatatagggatgacagtgatgct

SEQ ID NO: 31851 - DNA, 2116 bp, Homo sapiens
cctggttgcagccatgtcaagactgatgctgaggaggaccccaactatcatgagcaacagctgtcgaacacagccacctacctggggacagatcaagaagctgtcacagatggtggaagaaaacctgaggaaagtgggacaaccagtcacaatgagtaatttaatgatagatatgatagtggtgatcaccattgccatgagtattccttcaacaaggaacaacacagagaacagttatacttattgggcatatttatcaatcttggctggcaataatgcctggatgtaatcactgtgtgacacagttacacatgctttctgctcttaatatttaccataataaatctgctcctataattgaggcaaagcaaaggcagctcaaaacctatttgtaaatagaattagacctggccagaaataatgaatgtacttgtttgggaagattgcattgcagaacaggtagaggtgctgcacaacgattcctatggaatcattattgattggtcccctaaggggatgtttagcttaaattacacctctcagtctgtgtgccacagccacactatgttcagctggtctaaacaaaacagtcagatggtagaaatggtaagaaatacagcaagagttcccattatctggaaacgtggcggtatagtggcacctcaacctcaaatgatatggtccactgtagaagctaaacataaggatttgtggaaactattaatgtctgttaataagatcaaaatttgggaaagaataaaaaagcatctagaaggacactctacaaacttgtctttgcatattgcaaaattaaaagaacaaatatttaaagcatcccaggcacacttgaccttaatgccaggaactggagtgcttgaaggagctgcagacagattagcagatattaacccattaaagtggataaagacacttggaagctctgtgatttcaatgatgattgtgcttttaatctgtgttgtttgtctttgtatagtctgcaggtgcggatcctgactcctgtgagaattagctcaccatgacaaagctgcctttgcttttatcactttggaaaacaaaaaggggaacgtgttgggaacaggcccccaaatctggccataaactggccccaaaactggccataaacaaaatctctgcagtactgtgacatgttcatgatggccatgatgcccaaactgaaggttgtgggtttatcagaataagggcaaggaacacctggcccacccagggtggaaaaccgcttaaagcattcctaagccacaaataatagtatgagctatctgtgctttaaggacatgttcctgctgcagataactagccagagcccatccctttgtttcggcccatccctttgtttcctgtaaggaatacttttagtttatctataatctatagaaacaatgcttatcactggcttgctgtcaataaatatgtgggtcaaactccgttcagggctctcagctctgaagtctgtgagtcccctgatttcccactccacactctatatttctatgtgtgtgtctttaattcctctagcaccactgggttagggtctccatgaccaagctggtctcggcaatctgccaacccccaggcaacagaaagaggcttatccaacaacagagtgatggaaccactctgtaaatgacatgagttttgagtgaccagcaactggcctcaggtccctggagtttagtggcttgtcaccacactcacactgtctgttcaccatcatgccttggcatgggctctgagttcaatccctggcattctggaacaggtctggagtgagtctgatgccagggcagcctttgttctggtggacagtgggatggccccagggccctcctaccctctctgatgcctgaatgtctgctttcaggctcctaacaagttcactccacrgagtcttcctccaccacctgggacctggtgaccccttcccttctctgatcctctgaccccggctgcctaattctgtgattggactgaactgaaccaggctgcaaacctcctcaaggcaaggaccctggaatgttcacattttttgagtctacaagatagaacctaataaaaatatagggatgacagtgatgct

SEQ ID NO: 31852 - DNA, 2116 bp, Homo sapiens
cctggttgcagccatgtcaagactgatgctgaggaggaccccaactatcatgagcaacagctgtcgaacacagccacctacctggggacagatcaagaagctgtcacagatggtggaagaaaacctgaggaaagtgggacaaccagtcacaatgagtaatttaatgatagatatgatagtggtgatcaccattgccatgagtattccttcaacaaggaacaacacagagaacagttatacttattgggcatatttatcaatcttggctggcaataatgcctggatgtaatcactgtgtgacacagttacacatgctttctgctcttaatatttaccataataaatctgctcctataattgaggcaaagcaaaggcagctcaaaacctatttgtaaatagaattagacctggccagaaataatgaatgtacttgtttgggaagattgcattgcagaacaggtagaggtgctgcacaacgattcctatggaatcattattgattggtcccctaaggggatgtttagcttaaattacacctctcagtctgtgtgccacagccacactatgttcagctggtctaaacaaaacagtcagatggtagaaatggtaagaaatacagcaagagttcccattatctggaaacgtggcggtatagtggcacctcaacctcaaatgatatggtccactgtagaagctaaacataaggatttgtggaaactattaatgtctgttaataagatcaaaatttgggaaagaataaaaaagcatctagaaggacactctacaaacttgtctttgcatattgcaaaattaaaagaacaaatatttaaagcatcccaggcacacttgaccttaatgccaggaactggagtgcttgaaggagctgcagacagattagcagatattaacccattaaagtggataaagacacttggaagctctgtgatttcaatgatgattgtgcttttaatctgtgttgtttgtctttgtatagtctgcaggtgcggatcctgactcctgtgagaattagctcaccatgacaaagctgcctttgcttttatcactttggaaaacaaaaaggggaacgtgttgggaacaggcccccaaatctggccataaactggccccaaaactggccataaacaaaatctctgcagtactgtgacatgttcatgatggccatgatgcccaaactgaaggttgtgggtttatcagaataagggcaaggaacacctggcccacccagggtggaaaaccgcttaaagcattcctaagccacaaataatagtatgagctatctgtgctttaaggacatgttcctgctgcagataactagccagagcccatccctttgtttcggcccatccctttgtttcctgtaaggaatacttttagtttatctataatctatagaaacaatgcttatcactggcttgctgtcaataaatatgtgggtcaaactccgttcagggctctcagctctgaagtctgtgagtcccctgatttcccactccacactctatatttctatgtgtgtgtctttaattcctctagcaccactgggttagggtctccatgaccaagctggtctcggcaatctgccaacccccaggcaacagaaagaggcttatccaacaacagagtgatggaaccactctgtaaatgacatgagttttgagtgaccagcaactggcctcaggtccctggagtttagtggcttgtcaccacactcacactgtctgttcaccatcatgccttggcatgggctctgagttcaatccctggcattctggaacaggtctggagtgagtctgatgccagggcagcctttgttctggtggacagtgggatggccccagggccctcctaccctctctgatgcctgaatgtctgctttcaggctcctaacaagttcactccacggagtcttcctccaccacctgggacctggtgaccccttcccttctctgatcctctgaccccggctgcctaattctgtgattggactgaactgaaccaggctgcaaacctcctcaaggcaaggaccctggaatgttcacattttttgagtctacaagatagaacctaataaaaatrtagggatgacagtgatgct

SEQ ID NO: 31853 - DNA, 568 bp, Homo sapiens
ttaaattatgrgtatttcaaaaaattatatataaatttcaaaaaaatgtcagattggcagagaagcaacatcctaaaaagtgaaaactacagcactttaaagttgtgtataaacaaatgaaacaatgaatgaaaacaagttttagtagcttccaattatttattgattatgatggggcaagctatgtatcaaagacattatatactttcataggttgaattctgtaactaatctgtaggataagtgtcagacacatactttcacatatacattttataaataaagatacagactcagtttaagtagcatgctcaggaaaatatgggtagtaaattggagcttcaaaattttaactcagatttactgatttcaaagcctttcattataaatctaagaggcagatgcacagaaatatgtttgtctgcaaagagttatgcatttttatgactgtatttaaagaagtaatacattgccaaagacataaaggttgtatacctaatgtgttgtgattcattgtatatttaatctatttgtaacagtccttggtgcacagtaaaaactcaaaaaa

SEQ ID NO: 31854 - DNA, 568 bp, Homo sapiens
ttaaattatgggtatttcaaaaaattatatataaatttcaaaaaaatgtcagattggcagagaagcaacatcctaaaaagtgaaaactacagcactttaaagttgtgtataaacaaatgaaacaatgaatgaaaacaagttttagtagcttccaattatttattgattatgatggggcaagctatgtatyaaagacattatatactttcataggttgaattctgtaactaatctgtaggataagtgtcagacacatactttcacatatacattttataaataaagatacagactcagtttaagtagcatgctcaggaaaatatgggtagtaaattggagcttcaaaattttaactcagatttactgatttcaaagcctttcattataaatctaagaggcagatgcacagaaatatgtttgtctgcaaagagttatgcatttttatgactgtatttaaagaagtaatacattgccaaagacataaaggttgtatacctaatgtgttgtgattcattgtatatttaatctatttgtaacagtccttggtgcacagtaaaaactcaaaaaa

SEQ ID NO: 31855 - DNA, 624 bp, Homo sapiens
tgacatgcctgcttctgcttccctgaggtttacccagaagcccagtagatgccagtaccatgcctcctctacagcctgcaggaccatgagtcaattaactcacttttctttataaattacccagtttttgttattattttttttttggtaaagtaaaaaagtcctaacacacctattcagatgttaatttctggtttcctcacttagactgaaattagagtgcaagaaaacaattatttttctaaataactgtttaagaaaagaagcactatgtttatttctttgttcccaagtrcttgtctcagtgccttacatgtaataggcatattataaaagagtttataatatgatagaagtaacctgaaaactttgaaattaaagcatgtaaaacaaacttattttgctgagccataatatggagatatgctctttcatttatttaataagagttcaaccaatgttatcagtatgaagaactctacagagaaattagatatttaggagaggtctaaattctatcataattcaattattaatttattctcaaatatttataacccatcttctctgacacattggagatagaactataaacagaacaaagccctgtcctcagtttaatat

SEQ ID NO: 31856 - DNA, 473 bp, Homo sapiens
  misc_feature (1)...(473): n = A,T,C or G
tggataaacagacaaaatgcaaaaacaggctgaaaaataagtagggaatttaaatagaccaatacttattaaagaaattaaaattatagccaaagactcccgtgtccaacaaaacctggaaaaggttgtcatgaaaagggaatctatcacactttggaggagcagataatccctgaagcaagctgttccggactgtgtttgcagacacatgcagcgtcctgtgttttmtcagctgctgcctcagaaactaagacttcaaaagcacaaagcatttgtattaattttctgtagctgctgtaaccaatgaccacaaacttggtggccggacacaacactaatttattcatttacaggtccagacatcagaattcnnnnnnnnnnnnnnnnnnnnnnnnnnnnnnnnnnnnnnnnnnnnnnnnnnnnnnnnnnnnnnnnnnnnnnnnnnnnnnnnnnnnnnnnnnnnnnnnnnnntt

SEQ ID NO: 31857 - DNA, 684 bp, Homo sapiens
gcgtcggcagccccggtgctggtgaggacctgcttcctggtttagagaagtgccttcctgctgtgtcctcaggtggcagaagctctccgaggcctcctttatggcagcactaactccattaatgaaacttctgctccatggcttcatcaccatccaaaggcccgccttgtaaaaccatcatctgggggctggggtttcaacacagacattctggggggacacaaacattcagtccactgcagccaaggagaaccagcagagaaccagtcagcctcagaaagaacacttgctgtccagctgcaccggtcttgctgtctgcgcatgaaccttgctcacccaatctgacctaagggtgtctgctaagccctgctcacccctgcctataggggaacaggccttttctgtatgattttgagatgcttgcagattctgagtgttcagccttttggcataaagtttctccttttccatttggatttgtttaatttgacrtaatctgggaggggaagatggcatcgcatgggcacctgaggccctcatagaaaagctggagccccagccttcctgtaggactgcatttctgtctctcttcctagtgtaaaaggggcacttcccagggcctgggtcctcctgcctgtctccaacaggagccgtccccagagaggtgcatgtcgtctctgccct

SEQ ID NO: 31858 - DNA, 684 bp, Homo sapiens
gcgtcggcagccccggtgctggtgaggacctgcttcctggtttagagaagtgccttcctgctgtgtcctcaggtggcagaagctctccgaggcctcctttatggcagcactaactccattaatgaaacttctgctccatggcttcatcaccatccaaaggcccgccttgtaaaaccatcatctgggggctggggtttcaacacagacattctggggggacacaaacattcagtccactgcagccaaggagaaccagcagagaaccagtcagcctcagaaagaacacttgctgtccagctgcaccggtcttgctgtctgcgcatgaaccttgctcacccaatctgacctaagggtgtctgctaagccctgctcacccctgcctataggggaacaggccttttctgtatgattttgagatgcttgcagattctgagtgttcagccttttggcataaagtttctccttttccatttggatttgtttaatttgacataatctgggaggggaagatggcatcgcatgggcacctgaggccctcatagaaaagctggagccccagccttcctgtaggactgcatttctgtctctcttcctagtgtaaaaggggcacttcccagggcctgggtcctcctgcctgtctccaacaggagccrtccccagagaggtgcatgtcgtctctgccct

SEQ ID NO: 31859 - DNA, 1134 bp, Homo sapiens
tgtcacccaggaagtcgagtccacatacagaagcagtgagcaggagcacagagccaatgacaaggccgaacccaaagcctgcacagctcctggtgggtttgaaagaggggattggaaggctggtacccatgtaggagagaaaggagaagcacatctgcacgcccagcctcccccgcggggctgcctcctgcgagccagcaatacctcccggtaggaggcaggcaccccaggggaagctgctgccacacctgccttccttcaaggcaaactggtgagacccgcgaggggcctgggaaaggggagcccagggagccaggttccaggtcagaaggtaagaccgacagaaagacccttgccaggatggctaaccaaccactccccaaagcttgtgggggtgtggaggatgcagctttgaatttaggagaaaaatacaaaagcccaaaaaagaacacaggctagcaaatgggcaaaaaaagcataaatacatgaattcatgtatcattgggttctacttaaaatattaccgcaggctgagatgagggggaaaaattaagcctatgcacagaacygtgcggtttcctggtgacctgccactgttgatccttcgggcatgagatttccatgcctttcatcagacactcctacattttcatatgcacagtcctatagctgcctcattcactctttgcttctcattaaaacccgtgcttggctggttcttcagataaggtctaataaaaacaatatcttagtttaacagctaatgggcagcaggcatcaaaatctgctgggctctcctcttctcagacaccaactggatatttaatcagagaagcatacaggtggttttgtctcggtcatactgtcagaagaacgcagagaacctggtccgtaacagggtttagaatgcatgcaggtattcagaatttgcacccacttttcagtgctcatcagcagagcattgcaagtcttggagaagagtcacaggagggctttctagggcccatctttgggtgtagctggctctgacctgtagtgcctggggtgaagaggtcctcttgggctgggcagtgtcagcctctgctggcctcaggctgctgggccacctctctgtgatgtgggcatcagaaggaa

SEQ ID NO: 31860 - DNA, 1041 bp, Homo sapiens
cccatttcaaatgaagattcttactgctgatcatggagatttcaaaaatttggagcataggtgacgatatgtcagacaccagtaaaagaaagagcatggcatccatatctcagtgcacattccagttctttattttacctgatcaggatagacttgctgtattccactctttctcattcaaagggataaaaagataagtgacaggtgagggctctgtggagactgttgtaacatgaggttcaaaagagaagcaggaccatcagctcagatttgaaactagtgcagggtgtagaaagacctttcattacaggtaactggggtcataaaagtccagtccaatgctggccaacagaaccttctgcgtaatgaaaaggttctacatctgtacatttgacacagtagccattagccacgygtagctattgagcacttgaaatatgccagaattactaagaaactgtatttttaattttctttaaatttaattaatttttatttaaatagccaaatatattggaaaacaaagtccaagtcaaatcattgactttagtcaatattccttttctaaaatccaacctctgcccacaaattatccccaagaaccagtgagggcttacatcaaggagggtttaatgcaaatattatttttctaagaaattttcctaagatatatcactctagatcttaaaggaccttttttgtgtgtgttaaggaaggtatggaagacttaaggtaacatttgccttttccctctgggatttctgggtctcgctttacaggccacatcttatggcaaaatgtgagtcagctggagaactcgggaaccttggatgcttgatgtcttttggaaagaagcaggcaatttgattctcaccttttctttcctcctccctctggagtcccttccatccacagagttccatgatcaatgatcatatcaatgagctcagtggttctcatgctccgttctcaggaaatggcaagatttgttctcataaaatcaaacacccaaagctcatgctgattttttcaaacctgtga

SEQ ID NO: 31861 - DNA, 649 bp, Homo sapiens
ttgagacagggtctcgytctgttgcccaggctggagttcagtggcgtgatcatggctcactgcaagctccaactccaactcccagattcaagcgattcttctgcctcagcctcccaaatagctggagctacaggtgcctgccaccacacccggctaatttttgtatttttagtagagacgggtttctccaatatattggccaggctggtctcgaactcctgacctcgtgatctgcctgcctcagcctcccaaagtcctgggattacaggtgtgagccactgtgcccggccattcaattttttttttttttttttttttacgaaaggaatcatgttagaaacaaccttggctgaactgtaggagactcgttaaatcaatcgtggtacattcattcaatgaaatcggatgcaacaattacagggaataaggtggttcttcacagactaacatggggtgatcttgcagaatactaacacttaacatatgtcaatatcgccaagatatatatatatatatatatatatatatatatatatatatatatatatatatatgaaagatgcaggatacgtgagcctcaccaccagtggtaagcaaaggatgtgtgtgtgtgtgcatgctctgtatgtgcatgcgtgtatttacatgc

SEQ ID NO: 31862 - DNA, 649 bp, Homo sapiens
ttgagacagggtctcgctctgtygcccaggctggagttcagtggcgtgatcatggctcactgcaagctccaactccaactcccagattcaagcgattcttctgcctcagcctcccaaatagctggagctacaggtgcctgccaccacacccggctaatttttgtatttttagtagagacgggtttctccaatatattggccaggctggtctcgaactcctgacctcgtgatctgcctgcctcagcctcccaaagtcctgggattacaggtgtgagccactgtgcccggccattcaattttttttttttttttttttttacgaaaggaatcatgttagaaacaaccttggctgaactgtaggagactcgttaaatcaatcgtggtacattcattcaatgaaatcggatgcaacaattacagggaataaggtggttcttcacagactaacatggggtgatcttgcagaatactaacacttaacatatgtcaatatcgccaagatatatatatatatatatatatatatatatatatatatatatatatatatatatgaaagatgcaggatacgtgagcctcaccaccagtggtaagcaaaggatgtgtgtgtgtgtgcatgctctgtatgtgcatgcgtgtatttacatgc

SEQ ID NO: 31863 - DNA, 649 bp, Homo sapiens
ttgagacagggtctcgctctgttrcccaggctggagttcagtggcgtgatcatggctcactgcaagctccaactccaactcccagattcaagcgattcttctgcctcagcctcccaaatagctggagctacaggtgcctgccaccacacccggctaatttttgtatttttagtagagacgggtttctccaatatattggccaggctggtctcgaactcctgacctcgtgatctgcctgcctcagcctcccaaagtcctgggattacaggtgtgagccactgtgcccggccattcaattttttttttttttttttttttacgaaaggaatcatgttagaaacaaccttggctgaactgtaggagactcgttaaatcaatcgtggtacattcattcaatgaaatcggatgcaacaattacagggaataaggtggttcttcacagactaacatggggtgatcttgcagaatactaacacttaacatatgtcaatatcgccaagatatatatatatatatatatatatatatatatatatatatatatatatatatatgaaagatgcaggatacgtgagcctcaccaccagtggtaagcaaaggatgtgtgtgtgtgtgcatgctctgtatgtgcatgcgtgtatttacatgc

SEQ ID NO: 31864 - DNA, 649 bp, Homo sapiens
ttgagacagggtctcgctctgttgcccaggctrgagttcagtggcgtgatcatggctcactgcaagctccaactccaactcccagattcaagcgattcttctgcctcagcctcccaaatagctggagctacaggtgcctgccaccacacccggctaatttttgtatttttagtagagacgggtttctccaatatattggccaggctggtctcgaactcctgacctcgtgatctgcctgcctcagcctcccaaagtcctgggattacaggtgtgagccactgtgcccggccattcaattttttttttttttttttttttacgaaaggaatcatgttagaaacaaccttggctgaactgtaggagactcgttaaatcaatcgtggtacattcattcaatgaaatcggatgcaacaattacagggaataaggtggttcttcacagactaacatggggtgatcttgcagaatactaacacttaacatatgtcaatatcgccaagatatatatatatatatatatatatatatatatatatatatatatatatatatatgaaagatgcaggatacgtgagcctcaccaccagtggtaagcaaaggatgtgtgtgtgtgtgcatgctctgtatgtgcatgcgtgtatttacatgc

SEQ ID NO: 31865 - DNA, 639 bp, Homo sapiens
atgcttcatagttaccctccccacctaacactacatatccctgatcaccaactttgaatatgcctcatttacactgatcaaccaaaagcctcctggaaatggtaacacggcctatttatcctgggctttactgggagggtgggggatgaagagggtttataggaattaagagagtctatttttaattatttcatctgtgaaacatatgaaattcctttggccaaaaatgcaatataaaactcagattatcaagggccttttcgtgggaccagtgaaatggagaaaaaagtctccatgacaaaatagaggacttttgggaatccttttttttctgaggtttgcatgtgtgtgtttctagcttggctctcacctgaactgctctttcataatctactgtagtcattgggtacctggaatctgggaaaactccaaccttactccagcacttgtgcaataacacagtaaggcacatggagtcaagtttaagcacttagtccagggttctttgcaccctgtgggccttcagtaagcacttgttgattgactgaatgygtggctcactatcaatgtgaattaactatatacatactgcattaaaatccaacaacccaaatactttctagctttcaggaagtaatg

SEQ ID NO: 31866 - DNA, 524 bp, Homo sapiens
gaggatgtccackgcccagtggcgagggcacatgtgggtgcgtcactgcacagctgtgctgtacagcgctgggagcgtgcgaggaggatcacctggcatgcaccgtgtgcagtttcaccagagccagtgggaggagtcacacacaacagacgtcaaataggaacgctgcaaaacacacaaatagcatctccacagctaatgtaaaatagttttctggataggttcccttcagttaatgatgaaaggtgatgcagctatcggcaatggctggagactagctctgcggtctgctcgtggataaccgcgctccctcgctgccgggccacccgcacagccgggcaaaccaaaaggcccactttttcatgctgtacccaccacttctgtttccccgcaggcatcctactttctaaactaacaccttttcactcccgagaattctaacaaatattatacaattcctacccgcatctaccctccacctggacgtagaacccgtgtgggaggcagtcctgcagggtttgggg

SEQ ID NO: 31867 - DNA, 500 bp, Homo sapiens
tttaccattccatttgttagaatgcaggtatactgctaatcggatccactagaccaagaatccacgtgggatagcctaagaagacagaagaacctgggtattttcagatgtccctcaacagaaacacctattctcacataaacttgctgttaaaactctaaaatatccatgtagacaaataactctgggtaaataacagaataagcattcctataamccctttaataattatcttagttattaatttcatttcaaattgcctgattttccatatatactgctaatcatcttatagaagaattttgtttttgaccaaaaaaactctgaatatcgatatttaataaacatgactgcttcaaaaaacacaagtgcaaaaaaaaaaagaaaaaaggtgaaataggccatgtggtccagccttagcagagagaaaaatcacaaaagctggacaaatataaacacatcttcttgatgacactactaagttaaaaaaaaacagtgaa

SEQ ID NO: 31868 - DNA, 893 bp, Homo sapiens
taattaactattagaagatgagcagatagatggaaggggagggggatggcgccgcaagtcggtcagaaagaccacacggcacacgcatcgccattgcttcagagcttttggaggcaggtctgtagccattsccaccaaaacatactaccgaaccgtgcatgcccttccaggagagccagaccttcctaactctccccagcccaccacctccccgggtcctccgcacaggcggcggcgctagccttactgcgcaggcgccaggtacacctcggaggcctcaggagggggagccagtaactccgggtcgttcactagggctccgctctagctgccaagcttccgtttctctactgctccccgtaatagttgcctgcgcgagcttggagccgggtagagggcgggccttccgggacgagggcgcgtgggtgaggaaggtcaggtctaggtaaggctgtcggtgactttgggggtctgcagcaaggggcgatggctgcgaagtctacgggggtctccaaccttgtagagtcgccaggaatagggcgaatccacttcattagtgaccagctcgggcggttcacgtgcatcacacaaataacttggcctttttctgcctcagttgggggatttcttaaacgtagaatacccgcgtttccgctgccgtaatttcctctcaggcgcaattactctcttccatattggttaacagtagaaggctcagtttctctgctcatcacacggccttcggcactgtagctttgggtggtgggctgcagattaattttgtaaccaccttaagaaaaatacggtaaggtgatatttaagaaaaatatttgcgaaatgcgctgccgagtcaaacatcggttgacttgacaatactacagtttccatcacag

SEQ ID NO: 31869 - DNA, 680 bp, Homo sapiens
tggctatcataacaacatcatagtagcaccccatttctcagggtctaactgtaacacctagcatagtatcttttaaacagtgtgcatcagtgaaatggtaggtagtgattcacattctctctaaaagagccaaatagtcactatgtgatcatttagtcctaatgctttcattttacacacctgaaaatgttaaatactgtgtaaaagtcaacacacatgtatagaaatacacatatgtatatattttaatattaaattgtaattgtggccaggcagagagactcacgcctgtaatcccagcactttsggaggctgaggcgggcagacaacttgaggtcaggagttcaaaaccagcctggccaacatggtgaaaccccatctccactaaaaatgcaaaaaaaaaaaaaataattagccaggcttggtggcatgcacctgtactcccagctacttgggaggctaagccaggagaatctcgaacttgggaggtggaggttgcagtgagctgagatgacgccactgcactccagcctgggtgacagagtaagacaccatctcaaaaagaaaaaaaaaatgtaattgttacaaaaaacacatggcaattctccggttaaataagcacctaataatagggaaacagcaatatcttgggggtcagtaagttacatttaaagttcaag

SEQ ID NO: 31870 - DNA, 1093 bp, Homo sapiens
catttatatggccatgggtctaaatatataacattaaacagacaacattcaaaagagatcatctgccaataaaatctaaattactgaatagattcacctatagtttggcaatgcctgatgtgtataggtatcaagcaaataatgctgcttttttcaacaggaaacagcagtcactgtgctttgggaagcagaacatttttccaagaacaggtggaaaagcacggcacgtaaaataaaagatttttacaatacaataacaaatgtgtgatcaatgtactgctgggaaatgaattattattaagcgtcaaatgatatgttgtaaaatttcttaacacctcatattttaaccattttcacattgctatggaacagaataaattctctgctctctatttgagctaagacccgaaaccaatcatatctttctggtaaaatgaaacaattacgcatgtaagttatttactctgaaatggaatatatcgtataaaatgagattcaaaaataaaaggaaccatagtgtctttgttcttatttaagaggaatgatggaaactttggtgacatcatccgctgatgttaatcgacactggtagatgtcatatttaggataaagttttttgtttaaaacaattaaatcttttatctgatacatcatattaacaaagtacagcaaaatgtccaaaattacctttttttaaaaacattttatttgccaatattctttattatcatatagcaaacaccaatgagaaatttaacagaaactctgaatcaaatgattttctacttgtgtatttggaactgaacaaagttttttttataaattatgctastgtttcagagaacaggtggcatttattttcatctttatgtttgatataaatgaacgctcctattaaaagtgctgacgaagaatgcacctcagctttcctaatggaatacataatattatatcctgatttgacaaaaacaagttctagggactattatgaaagcctatagagtatctaaatccttcagagtcattgatctgattcttctttggaagaattaagaatcaacaagggctatgaaacatgataaaactaatttct

SEQ ID NO: 31871 - DNA, 1270 bp, Homo sapiens
tttggacttaactggagctgccacccttaaccacatctattccatgtctctgttcttgtattctcccaaatatccagagcccagtttctttcctttcttctctcttaagatttattctccaagcttcagccttacaaatctgccctagccagaatcttctggggacacaataaaaacacaaacagttcttcacttgaggctttctcttggcaaccatgtgtaaagactcccaaacaacagataaaataagttaatctggtatttaggacattgtctgaacatggaactggaccaactggagaggcagggtgtgtccagaaggacacaggcagggtgtgtccagaaggtggtcaagaacctgccttctactcttctctctgctactacccaggtgggcttgggcaactcattttgcctatttgtgcttcaatgtctccagttatgaaataaatgagtgagttggatagagttggataatttctaacgtcctaaatatctaggattctctgacatactggttcatcctcatatataagttatcacttacataaggaagaaatctatatcatgggtgttactcttgtcccaagcctctggcagacatcactggttgacaacagcattctttccttctaagacagacccagcctcagaagctttctctacagagcactccagtagctactaccaaccaaccagtacaaataaatacaactatttgtattagaaacattcaagaccctaaaagcttgtcctcatcaggatcctccaatactgccccacccaggtgtggggcctgctggggctctgcagtgtctctgaggctggatttcaggactcactcgtctcccacagatgtctggaccatcaggcaagctggacctgtcctggtcactccataactccctggcatctggtgcccacaacccaggacccacagaagccttggaagatgtctcagaagcagaaacttctgtcctaaggaaaaattccagagaagtggaggcacaaagtgtgggccagggcattgccagacccaccccagggctgcccaacacacacacgcacaccacacccacgctctctgtccagctcaggtattcacgcgtgcacacacacacacacccggagaagagctcckgggtgaaaacgtcctgcaacagtgccatctagtgggagccggggtctgtcctgccctcacaggtttcctccgcgagccccagggagatggtcttaagatccagagatgtgaaagttgtggctgcttctt

SEQ ID NO: 31872 - DNA, 628 bp, Homo sapiens
acccatcaacttacgttataaaggagcaggttcaaagtgctgacaaatgtgccattgttctctctcacagaaatagccgctgaggacctaaaacacatttagaaaaaggaaagcactgatgagattttagagtaaaagtgatacctagatgttagacttaaagcactaaaactcctgaataattctgacatactgttaattatacctggagttgctatactgtttaaatctctgaacagataaaatactaaaaaagcaagagggaacaagtaaagacaagctattctttatgatcattttatttttaaagcaatcttttttgtttgttttgcattacttttaacaggcttttggcagataagggcttgaatctaatgcaaatacactttcatcaattccattagaatagaagtttcatgagatcagggaatctggtttactttgttcattgctagaacattggatggtaaatagtaggtaaatgataaattgaataatcaatgaatttccatggaattgaaactcaagaatgtgttcagtgtgtggactgggggcagagtgagagatgcttccctgtacacccataytgttttgactcgaggcctttcctttctcattttccatgtca

SEQ ID NO: 31873 - DNA, 627 bp, Homo sapiens
atttcctaccaaatgacttctgagaagatgcatcaacatttcctcattgcatgtgcaggctcaacgaattggggatctttcgcactcagtaaatgcaggagcgtattgagttagatagtggtgttgcatgttccggcggtctrtgatggagcgccatgttattttctagtcttctattcatttttcagtaaaaagaatatccaaggaatgtgccagaaagcccggcaagaaaatatgtagaaaaggaggtatgtataaaagtggaaattaaaaatgggggaaaaagcttgcagaggaagaacaagatactctccctaaggatgatttgctgatgctgggaagtaaatggttaggtgatgtttggaatctgatgaaggctgtcaaggaatataaaggtgtttaaggagagctctagctgagtagattacattggcaaagctcattggttgtgccttgtgttctggtgctggtagcatcggcaagagttgaatcttggctttgagtttgtgtttagtggaatatgtacttaggctattatgatacctgcaaggaaccaaaacaatgctgtcttaggaactggtaactttgatctctgaactcttttctacagatatatatttgtgttcc

SEQ ID NO: 31874 - DNA, 942 bp, Homo sapiens
ctacraattatttagccaatcttgtttcctggttttgctggcattttccccatggtgcacatcagtaaatgttcatgtaattatgagagatgatagaatagaaaccctctgtgcacactgaataattagattaaaactctcaactaaaacactatgaccacttgtatttttacccttacagttagttcccttcacatctaaggggagcaatgaaaaaaagacatgttgtaactttgggaaataaaagatctgttcctctattattctgttattcttgttttaacgcacttgttcattatctgatcaaacaattattgagtgtttaatgagtcctaggggctatgctggaccccgaagataaaaacaggaagacttggtacttgtcataggggacaatcaagcaaggactcacaaaaatcattattataatagctacaatttgtatagtgcctaccacaggccaagcattgttttaatggctttatatattaacttacttaatcttcacaataaacttatgaaaaagttactattagtatttccactttactaaggagaaatatgaggcacagataggttactgtgcaaggttccacagttagaaagtggcagaaccaggattcaatgccagatggtttagctccattgactgtgcccttagccactcactataacaaacattagagatgctatgggaaataagtaaaatttacatatggtagaatgctacccaaggcagggaatggacatctctatcttggatgggagctggagagaaaacacttcatcatggtaatgatacttgaaatgactgcagaacaagaggaagtgcccatccactgagcacaggatgtgcagggatgagtgggagagggcttctttaggtagagaacagcttgtgatcagagagtacagtgagagatgagcctggagctctaggtg

SEQ ID NO: 31875 - DNA, 683 bp, Homo sapiens
taattttgtgtcttttatttgtttctacttctaggttaaatgtggtttgagaaaagtgttttagaaaactttgaaaaatcactggcttgttagaatgcaygttctattaaaagatatgagtcctatctccaggttacttaaaatattagttttactccaaattgtattctagtttccctatctttaaaatatgttcatgaaacatttctcttctcttatgaagttaaatgttcttttaagtttgaaatttattagagaactctgatatatgatttttaaaaaataacactctgaattactttctaaaatggaaagcaaccctacaacaaaaagatattaccaatattcagttttacctctggcttcaacttatttttctctcaagatcttattattctcttctccagctacccaaggtgcgaaaaggaaagaaggccgaagggaagaaggtggtgcccacccttgctgtcttgaaaaagcaggagaccatgaaagtggtgaatcttccatttgagaaatttggcactggacaggacattttggcattggacagaacatccagcccaaaagggacctcacttactttgtcaaatggccccattatactaggttgcagcagcagagagccatcctctataaacagctagaagtgccttctgtgattaatcagttcaccagggcct

SEQ ID NO: 31876 - DNA, 683 bp, Homo sapiens
taattttgtgtcttttatttgtttctacttctaggttaaatgtggtttgagaaaagtgttttagaaaactttgaaaaatcactggcttgttagaatgcatgttctattaaaagatatgagtcctatctccaggttacttaaaatattagttttactccaaattgtattctagtttccctatctttaaaatatgttcatgaaacatttctcttctcttatgaagttaaatgttcttttaagtttgaaatttattagagaactctgatatatgatttttaaaaaataacactctgaattactttctaaaatggaaagcaaccctacaacaaaaagatattaccaatattcagttttacctctggcttcaacttatttttctctcaagatcttattattctcttctccagctacccaaggtgcgaaaaggaaagaaggccgaagggaaraaggtggtgcccacccttgctgtcttgaaaaagcaggagaccatgaaagtggtgaatcttccatttgagaaatttggcactggacaggacattttggcattggacagaacatccagcccaaaagggacctcacttactttgtcaaatggccccattatactaggttgcagcagcagagagccatcctctataaacagctagaagtgccttctgtgattaatcagttcaccagggcct

SEQ ID NO: 31877 - DNA, 518 bp, Homo sapiens
gactacaaactacagcatatgaataaaatctgcctggatcatatgcaggccgtatcacctctgtattcaggtacctataatcaccagtaaattagcaaattcagtgtttcaccatcttccaaatactgactatgctgttccaactgatccagaattccaggctattcagaagcaagttttagaaaatgtatctcaaactctcccatctaggagagtaatatgaagatttcccccttctctctcccagccaccacttcttgacactgtgttattgccacattgmatgctttagaaaaccttgggagaatagaaagttctgggtataatccagtgtttctttaagagccttgcccaagcattatgaattttaactcaagtgcttgttaaagaggggcagaaggcatttacagagaaccagccccaactgaatattcttattattaggcttctccttgttaaaaaaaaaaaaaaaaaaggaggggggtaatgagacaaacttctatttatataaaaatatg

SEQ ID NO: 31878 - DNA, 2045 bp, Homo sapiens
tttgtatacagtatattcacagcaatttttaaaaatatattctttgtagaaaatagactggatgtaaataatagtacacaattgacaaaaatatttacagtagctctcttacagtagtaggattatgaacgcttttctcggctttattctttttttatcttccaaaatgcttaatatctattatctatctatcgatctgtctatctatctatctatctatctatctatcccacaaacacacactcaagaaataaaaagccgtaattgaagccttttaaatgcaaacaattagtcccgttattcacaggtttgaatatctgacttaaagytgaagccacctacatgtttagggactacagcaaaagtcgaaagtatccacacacgcttggagaagacctttcactttaggagacatttgtctccatgccaacaaaatgtcactctttctgaacacattgaccataatgagatgcagtagactctgtaggtcttgcaccctttatcatactgtgattatcttgttttttggtgtttcatggcatttgcaaatgttaaaggttttcctggttattatatgaggccactcatgagctctccttgtagatagaactttttggggtctataagtgactttttaacatttttataatgtttggtcagtgaatgctgaggaaaaaaatttcaagtgaactatctcaatgtttttttcatcagagaatcaatcacagagctgataagaagacccattcattgggtctctggtcttaaagaagggcataaaggtaggcatcagaatctaaaggctatggtaaaagaaaagtgtgagcaaaaaaaagaaaaagaaagaaaagaaaggaaaagaaaagaagaggagaggggaggagagaagagagaaggggaggggaagagaggagaggagaagagaggagaggagaggagagggcaaaagaatctaagggcgagggtaagaagcatatgggcctgataaggcccttctcccttcaactgctgatgggattctgcatgctcaggtcactgtcttcactctcacattcactcgttcaaacaacatgcatttcactgactgctgcttgtgaggtagacactgtgctagatgctagtgaaacaaatacgaataaaatacgggcccctgactccacagggcacatagtctactgaggaaacaacagcccagaaaggttctgaaacttgctttaggttttgcaaaagatagtccttgagccatgattggcctccaaatgtccggactctgctcccagtaaaactctatagccccttctcagaggctgttccctgaccccaatcccccatcagggtgaggcattgagtccttccctgtgcagtttcagccactttgagtggttcatctagtatttattggaatgacggataacccagccacgtcaacataccattgattggcaaccaacacctaatgcaggaagatctgcaaacaggaagacacaacagaacctcagctttctctacaccatcatcaccatgttgtctcagcctttggaccggagccttactgcaagaatgctcattcccccagtgagactagagccctgtattggactgcaggcctctactcctgcttaacttttgtcagccctctcattggagagcctggatcctgattttgatagcttcttgtgtttggtacccatcaggttctcccatgagcagacagatcacccagcattatgctattccaaagcacacaacctcaattaatgtccacagtctggactccagaaccaaacactacccctagcagggacttgacatatagtagatcctgatgcctactcaactaagaccaagttcacctcagctctctgggcattccagacctttgggtgatagactgacaacaggtaatatctccaggtgccaggtctgcacccagaccaatttccacagcatcctattttccatggcccatcctgcctcagggttgggtctgtctgccagaagttgtaaccacttattttctgtggccaggcaagggcaagatgaca

SEQ ID NO: 31879 - DNA, 1329 bp, Homo sapiens
tgcattacactattgccttcattttatagatggtaaaaggaaagcacagggaggttaaatgatacagaatcagggatctctattgctatttgaaaacttatccaacatctactctaagcacctgatttttaatagtggaaataacagaggcttatggagatataaaaataatagataatgtttagtgaatgcttactatatgccaggcatcattctatatcctttacatttttattcttgccacaacactataaggtagacatgattgttcctcctactttgaagatgagtaaagcaagatgcagagaagctaaatatcttacccaaagttgcatagctacttggtggaagtctggctcacttctggcaacccactcagaaaaagtagaatcaagaatcaagatgatagctcagaattcttctttacaattgagtactctttccaccaccagacagcatggcacctggaggcattgcttggggtttgagttgggtcttcaaggaataacagaccctctgttaatctatggactttgataaaagcagtagagtatagatgtaggcatatttttatttatttgtcattcatagccaaattctaaaaagagatagaattttaaaaataagtgtaaatgcaatggaacaagaaggaatgcttatgacaaaggtagactaagaatagttactgcaaaggggctaaatttaactctggtaatctgtacagttaagactaaaaggaaaacaggccctgtgactttaagaatattcacttaacccccctgatcttagttcccctatttgtaaaggcagagagtgatagtacctaccttgcagsgttgtaaggagcaaacgataatgtatgtaaggtgcttaatgactcctgacatttggtaagctctccataaatagcagctattattaattaccgtagaagttctggaggtaggcccaggggaaaggggctgagtatcagtgctgactgtaagggatcacagattcgatatgtctactatagtgggacatttgtttgttttacagtggcctgttctatagcatctttacagaccagttgaaatgcaaccttagtgtgatcaatctagatcctgagatcaaccctgagggattctgcatcctcctggacttcatgtacacatctcggctcaatttgcgggagggcaacatcatggctgtgatggccacggctatgtacctgcagatggagcatgttgtggacacttgccggaagtttattaaggccaggtgagttgctacccgggtggaagcgtcggagatggaagagatagtccccgatcagaaacctttgataat

SEQ ID NO: 31880 - DNA, 715 bp, Homo sapiens
ccatgcacacggagggctgtgtggtaaaggtagaaatcttacagaggctcaaaggaaaacaaggattattttcatccttgagagattcagaaatgccttaatcattagaagagtttgcatctaactgcacttttggataagactcaaacttgtggagttaaggcagggaaggacgtctctagcaagggagaggcagaagcaacacttgggaaagcagggaacggacatttgcacaacgctagcttatctgtcggcagaagcccggatgcatatgggttcttcacctggccttgkagaggcaagagctgccccagtccctcgtagggagaatcttcctctctgggtctttgagcaatgacatctttcttgggttgatgacagctaacagtttgcctctgatatccctgcagtgtgagaagtgtaggctgcatttccgtcacaaaagccagctgcgacttcacttgcgccagaagcatggcgccatcaccaacaccaaggtgcaataccgcgtgtcagccactgacctgcctccggagctccccaaagcctgctgaagcatggagtgttgatgctttcgtctccagccccttctcagaatctacccaaaggatactgtaacactttacaatgttcatcccatgatgtagtgcctctttcatccactagtgcaaatcatagctgggggttgggggtggtgggggtcggggcctggggg

SEQ ID NO: 31881 - DNA, 480 bp, Homo sapiens
tgataacctcagtcagttataaattcaacaagtaacttttccagtttttaattgctgaatcatatgtttttgttgtaagatgatacacaatgaaaaactgtccaaaccaccatcattttcttctttcctcaccaaaccaacttgccgcagatctctatttagcagacaaagtaataattttaaaacagaaattatggcagggcgtggtggctcacgcctgtaatcccagcactttgggaggccraggtgggtggattgcctgaactcaggagtttgagaccagcctgggtaacacagtgaaaccccacctctactaaaatatgaaaaattagccaggtgtggtggcgggcgcctgtagtcccagctattcaggaggctgaggcaggagaattgcttgaacccaggaggtggaggttgcagtgagctgagatcgcgccactacactccagcctgggcaacagagcgagactccagctacaa

SEQ ID NO: 31882 - DNA, 603 bp, Homo sapiens
gcatagcacacccctcatattggtggtgaaatgaaatggttaaacagtaacactgtgaccagtgcccttgtgaacgttttatggtgtaatgcaaaaaaggtcatgcagtccgtatttctgttctgttttgtggtagttactcttctcatcaaaaggcatgtggcaggaagtggggagaattctctgagccttaggactatttaaataggagggagaggggccgggcggagtggctcacgcctgtaatcccagcactttgggaggccgaggcaggtggatcacgaggtcaggagatggagaccatcctggctaacacggtgagaccccgactctactaaaaatacaaaaaaaaaaaaaaaaaaaaaaaattagccaggcgtggtggcgggcacctgtagtcccagctactcgggaggctgaggcaggagaatggcgtgaacccggaaggtggaacttgcggtgagccgagatcgcgccwttgcactctagcctgggcgacagaagaagactctgtctcaaaaaataaaaaataaataaataataaataaataaacagtaaaaataaacaggagggagaaggcactgggagctaataagctcagc

SEQ ID NO: 31883 - DNA, 575 bp, Homo sapiens
agagagaaaaacaataaatttgtcaagtactgatagtggaaaaaatcagttcagaccaggatgtctgatttcatctgcagtgcgctattcactataatttagttgtccaaatttagcttgccttggtggtaacttaaaaatggagagactcttgggcattttagagtcagactgtcatgggttctgtatttactggttgtgtmaacaagtcatttgagctatcttaactttatattcttcatctttttttaaaaaagaattcctttactatcaagatgctagggtttaaaaggtggattaaataaactaaaacatgtaaaacaacaagacaatgtctttgtaagtgttagttccctttcactatttcatttttctttctgaaaaatattaagggaaggcttttggattcatggtctaagaaatatgtgagtagaatttataaaattgttaattaaaaattcatctattccctttcaaaagttttgtattttttacagaatggacactatagttagcatacttaggagctatcatgtccacaaaccttattcagatatggtgacaactctatatta

SEQ ID NO: 31884 - DNA, 593 bp, Homo sapiens
gcaatgacacttytaggagtttgcactgcagacacaccttcacaaatcaaaaggaacataagcacaagatgattcattctgacattgtttgtaacattgaaagattagaaacaatcgagatgcccatcattagaggactagttgaagaaactatggtacagtcacacaatggggcactgtccagccataccaaaaaagtgagaagcctcgctatatatggagtgattgccaggagatacaactaaatgagaaaagcaaggtgcagggccgcatatattagtgtgtgtgcatgtgtgtgtgtgtgtggtgtatgtattgcaaaaagaaagactggaaggtagaacagggtagatgagacagggataggattgagacttctctacatacactttttaatacaggatatgttgtatgtgttcaaaaataaaattaaattaaaaaacaaaattagccttaatgttgaatataaacatgaataaatgaccctaatgatatatcaaattggtaatatgaaaacaaagaaaaaattatttaaatgagtttaatatactattctaacttcacatacatagatatgtttgaaggataaaaat

SEQ ID NO: 31885 - DNA, 578 bp, Homo sapiens
gtctaatttatatctggtgactcaagtgctagctgaactattaagaaaactggaaaccccaactgcaatcaagaaagcctgcacctcagtaagatgcattgaagacccttggaaagacagcacaaaactgcacatgatgaattttactgcaacatacacaagacatccccttccctgaccaaatggcaaagttcttttttatactacatcttcccctttaccaggagatataaaggttttatcagagaaagcagtcctccaatcacggacagataatgagagagccattcctaatgagggcacacactcttatggcagaaattctctggaagatcattttgagtattcccaatccctcctgactcaagtgagacagcatttaggaaaattaaaagtaaaattttgccttttaacaaatgtgccactactgcattacttggatcaacatagtcaaaatttcctttataagacttaactctgaagagattcatcatttgatcaaaaggacactgtctctcagtggttctctcaagaaattcttaacaaactaaacrtagattttgattaaaattttgtag

SEQ ID NO: 31886 - DNA, 873 bp, Homo sapiens
ttctagacccactccttctgcttgtctggaaagcccaggcctgccagcatcagcggcgacatttcaattctgccagtttgatcagaccacgtggattttctctctccaatacaccagctgataatgaagagacaaatgttagctaaggcagccctggtcaatcccaaagtccttagatgcaaaagacagggaaggtgctaatcatctcaggaggagaccccagacgggctcattaaaaccattataagaaatccctatctcccccaccacacctccaaggaaaccctgaccctggtgagtgagcagggattgcaggggcttcccttgcaccagttcttttggcttaggagggaggacatggcccagctcacccaccacctgcagcagcaacagcagcagccattacctttgaaataatcctcgctcgcacaccaagtatttgttatgagtctgtgcctggaagtaaatatcacttctgtttaggtgaccatgtgtcctgggtttcccaggacagtctggtttatgcctgttgtgctgacacacatatgattagtacctactgccatgctgaaaagcgtcttgtttgggcaataatgtaygtggttacctaagctctaccaagttgtttcaaaactgattggagggaaaaaaaaaaaaaaaacctatagcgccaccaacaattaaattataagattatttttccaagatcacagtgactcaaagttttccctcatagatgttatatatttagtttgaggtactggtggggagggggtcgtaaatgcaattcagtgttataagattagacaagcaagaatggtattctgtagccttacgaaatcacaaacacatgtcagtcgtcagtttaacaaa

SEQ ID NO: 31887 - DNA, 969 bp, Homo sapiens
gcataccaaaaaacttcaagtgcttcagcatgaaactactgatccataaattgcagaggtcccaccacccaccccctctcccaaagtgctggactattttgaaatggaaagcatgagcttctgatcaagctcttctgccatacttacttgtccttggcattggttacttaacagtgtaggtaatagctgtctatttacaatattcttattatgttaagctcagctctttcttggatagtggtaacatttccaagttgaaaaagtaccctgcaggtctctgagaaatggctaaatctgtgcattcttctagcatgtgtcatgtcccaagtattcttcctcaggcacttcacatatgggatctcactgaccttcataacattattgtggggaaggtattactgtcccccttttatagactggctaagaaacttacaaagcaagttaacgacctgggatcggctgggcacagcggctcactcctgtaatcccagcactttgagaggccaaggtcggtggattacctgaggtcaggagttcaagaccagcctggccaacatggtgaaaccccatctctactaagaatacaaaaattagccaggcatgcatggtggcagatgcctgtaatcctggctactctggaggctgaggcaggagaattgcttgaacccagggggcggaggttgcagtgagctaagatcrcgccactgcactccaacctgggtgacagagcaagactctccatctcaaaaaaaaaaaaaaaaaaaaaagacctgggatctaccttaaatgttgtagatacattgttatgatcagtaccgcatttaattctcattcaaccagtccaactcctttttctaaggaacctaactgcaatcttttaaaccatcagcaaaatcatttggtattcttagacacccacaaacagtgctactagtagcttggataaagacaatttagggggtggatccc

SEQ ID NO: 31888 - DNA, 1179 bp, Homo sapiens
gcatctgtcttatgtaaaactattcagagtacatatatatttttgactatgtaatattaaagcacagtcatcctttctttgctgtttgctatgtgtcaaaaatagatttctgcttctgttagtattttctaaaaataaacagttaagcagtatttcatgatattccttaaggtagctattgctgccctgatatctaagtgctattctatttttgctcacactcactactgaattcagcaaatagatactaagtacctactgtgcacctataggcattctgctaaatgttgtggagatgcaaacatgcttttaaagagatttttaactgactaatcaggaatcgcttagaaaatatcctcatctggctgggcacggtggctcatgcctataatctcagcactcggaggccgaggtaggcgggtcatttgagttcaggagttcaacatcagcctggccaacatggtgaaaccccatctctactaaaaaaaattaaaaatgcaaaaattaaatgggcatggtggtgcatgctgtaatcccagctatttggagtggctgaggcaggagaatcacttgaatccaggaggcagagctgcagtgagccgagaccacaccactgcactccagcctgagcracagagtgagactccatctcaagaaaaaaaaaaatcatgatccaaccaagctgagtaccagagagccctgctatggtggctggttgacacactgctatacataaggacacatggatttgtgatcctgtctctacttggcttttcactgtggcttctgggggttattctttaaccattccagatgttgaaagtggtgcctgtggcagacccaagaataggtgtcacctggtatgtttaccatcacaatatattgctaaacttgagcttggtctgcaaaaattgattccactttgggatgttggcactcaaatcagtgtgacaaggaacaaacagaacatcccttttttggattcttagcttttctttcatgtcttcttgtacagctaagtcatcacaatcttaattgcctcaccaaggggttcacagtaagtttctaaggcaagtttataacactcacctaattaacactgaagcacacattatatgtaatcatttcagaagaatattgcatagtgacccaacagagatatgcagcagagcatttaag

SEQ ID NO: 31889 - DNA, 720 bp, Homo sapiens
tgtcatggagaataatggcactcatagacgtgtccttctatattttccactatctrtcaacataatattttcaataattagatagataataacatacattgaagtgatattaaaaacatataacctgcagtgtggggctgagtaggagttctgggagactgagacccagtcccagctctgtttcttgccaggcaggagatctttggcaggttacgttacctcctgtgtgcctcagtttcttctcctgtaaaatggagacgataatggtatgtacattatatgattcttgtgagaattaaatgagtttccatgctcagcagtgcctggctcactataaatgcttaataacttttggtttaagatgttccctataaaatggaagagagaagaaatatgtgtgcagcttcctttaccttcataggtctgtagggcttgcgagagagacacaaatgatgtctttctttctgagaagatggtggtgttgattggcggtggttgaaggaaagaggcacagggaaaggaatggggagcagagcagggaagggtcattgtgacgacatcaccaagacaatggtgttgaaaaggagccgatactgcaacttcttgaggctcaaacttgatgcctgtggagcagagatggggccaagccttctcttcacataactcctgtgctctcaggctagcacagcctgcctgatggttccaccatctctctttatg

SEQ ID NO: 31890 - DNA, 591 bp, Homo sapiens
agtgtatgaggtacaaacagtaaacatcaactgcacagaggcaaagtaacagcactctggaaggtagtaagtgatgagacattttagcgtaatatctggatctaaaattatggaaaacgagagagtaaagaccagtatgtctaaacaatggttttcaaacgttggtgagtctcagaggtacctagttaaatatattgaatttgccgcctctcgcactctttcccaacacactcttcatgtcaatttcatatgtttagggtagrgtccaaacttcaggatttttagttagctatctgttctctacacttttagaatcattactttttaatgccaccatattgtcatgaaagaagagtcataccacagagaccacagaagacaaattttataattgtgttttacatctgagaatgaatggggtgaagctccccactctcctttgaactacagggtctttgcttctagtttaagagtccttttcaggtgaattttctcaggcttttccaggggcccaaagctattttgaattcaaagtctcattttaaatgtcttgctttcattcactttctgataaaagaatatctatcaaca

SEQ ID NO: 31891 - DNA, 1824 bp, Homo sapiens
  misc_feature (1)...(1824): n = A,T,C or G
aagggattagaggttatgatagctgagcctgttacttggcgggacgaagacacaagaagtaactcttgacaagtcagagcaagtgtgatctcaacgatagcagctctcctgttgcactttcctaacaaatgagattggggcccctaaacattttttggaagaataagtcttctgttttatgttttaaccrgtcactgcaattcaacagaaataaatgaattcaaatcaaagatgtttttgggtacttcaaaaaatatacttgtaaaccgctttcaaagtacttctttttttttaatttagaaacacaagctggtcactttttttataatcccagcactttgggaggctgaggtgggaggatcgcttgagcccaggagtttgagaccagcctgggcaacataaggagatcttgtctctacagaaatttttttaaaattagccaggcgtggtggcacatgcctgttctagctactcagaaggctgaggttggaggatcgcttgagcccaggaatttgaggctgcggtgaagtatgattgcatcagcacaccccagcctgggcaacagagtgaggctttgtctctaatcttttatttttatttttagaagtggagtcttgttttgtcgcccaggccggtgtgatcatagcacaccataacctcgaactcttgagctcaagcgatcatcctgcttcaacctcccaagtggctgagactacgggtacatgccatcatcaaagtacattttactttatacgataaattaagaaattttagaattgcacgttggtggacacacattttatcctttataatagctgcagccaagtataatttttttttgagacaggatctctctgttacccaggctggagggcagtggtacaatctcagctcactgcaacctctgcccccagactcaagccattttctcacttcagcctcccaagtagctgggactacaggcacatgccactatgcccagctaattttttgtatttttgcagagacaagatttccccatgttgcccaggctggtctcaaacctctgacctcaaaggatccacccacctcggccgtaaaccactgtgtacagccccaagtgtaatttttttttcttttttttttttttgagacagagtttcactcttgttgtccaggctggagtgcaatggcgtgatcttggctcactgcaacctccgcctaccaggttcaagcgattctcctgcctcagcctcctgagtagctgggattacaggcatgtgccaccatgcctggctaactttatatttttagtagagatggggttttaccttgttggccaggctggtctcaaactcccgacttcaggtgatccccctgcctcggcctcccaaagtgctgggattataggcatgaaccactgtgcccggcccccaagtataatttttaactctcttttatgcctcactatgtgtctcttaagttctgaaattcagtccactgatgaaagctcaaggggaagtgtggtatggtggaaggagtaaaaggctaagagtcagatgaagctctggctctgccatttgtaagtcatattcatttaatctctctttggttcggtttccacagctgtgaaatggcaagaatgatagctgcctcgcttatttttacaaagttcttgtaaaaatactggataacataaatgaataatctgagccagtatatgaagtaggtactaatattacntattttacagaagaggtaactaaaggttgaagggcttaagtgacttgctcaacatcactcacaatatacctgactgagtttgtgccccatccagactcactt

SEQ ID NO: 31892 - DNA, 1824 bp, Homo sapiens
  misc_feature (1)...(1824): n = A,T,C or G
aagggattagaggttatgatagctgagcctgttacttggcgggacgaagacacaagaagtaactcttgacaagtcagagcaagtgtgatctcaacgatagcagctctcctgttgcactttcctaacaaatgagattggggcccctaaacattttttggaagaataagtcttctgttttatgttttaaccagtcactgcaattcaacagaaataaatgaattcaaatcaaagatgtttttgggtacttcaaaaaatatacttgtaaaccgctttcaaagtacttctttttttttaatttagaaacacaagctggtcactttttttataatcccagcactttgggaggctgaggtgggaggatcgcttgagcccaggagtttgagaccagcctgggcaacataaggagatcttgtctctacagaaatttttttaaaattagccaggcgtggtggcacatgcctgttctagctactcagaaggctraggttggaggatcgcttgagcccaggaatttgaggctgcggtgaagtatgattgcatcagcacaccccagcctgggcaacagagtgaggctttgtctctaatcttttatttttatttttagaagtggagtcttgttttgtcgcccaggccggtgtgatcatagcacaccataacctcgaactcttgagctcaagcgatcatcctgcttcaacctcccaagtggctgagactacgggtacatgccatcatcaaagtacattttactttatacgataaattaagaaattttagaattgcacgttggtggacacacattttatcctttataatagctgcagccaagtataatttttttttgagacaggatctctctgttacccaggctggagggcagtggtacaatctcagctcactgcaacctctgcccccagactcaagccattttctcacttcagcctcccaagtagctgggactacaggcacatgccactatgcccagctaattttttgtatttttgcagagacaagatttccccatgttgcccaggctggtctcaaacctctgacctcaaaggatccacccacctcggccgtaaaccactgtgtacagccccaagtgtaatttttttttcttttttttttttttgagacagagtttcactcttgttgtccaggctggagtgcaatggcgtgatcttggctcactgcaacctccgcctaccaggttcaagcgattctcctgcctcagcctcctgagtagctgggattacaggcatgtgccaccatgcctggctaactttatatttttagtagagatggggttttaccttgttggccaggctggtctcaaactcccgacttcaggtgatccccctgcctcggcctcccaaagtgctgggattataggcatgaaccactgtgcccggcccccaagtataatttttaactctcttttatgcctcactatgtgtctcttaagttctgaaattcagtccactgatgaaagctcaaggggaagtgtggtatggtggaaggagtaaaaggctaagagtcagatgaagctctggctctgccatttgtaagtcatattcatttaatctctctttggttcggtttccacagctgtgaaatggcaagaatgatagctgcctcgcttatttttacaaagttcttgtaaaaatactggataacataaatgaataatctgagccagtatatgaagtaggtactaatattacntattttacagaagaggtaactaaaggttgaagggcttaagtgacttgctcaacatcactcacaatatacctgactgagtttgtgccccatccagactcactt

SEQ ID NO: 31893 - DNA, 492 bp, Homo sapiens
ccatctgttgatttccattttttcttcctgatctcaccacccactgtctgggatgccacattgcccttcacagatgctttgccacctgattctaagatgtgacatccaagatctccagccagaaaaggagttgctgccacatcttgtatgaactagcaatcaagtggctatttcgtccagcccattagccctccacccacccccttggtctttcacttggcattactttcagtatcttgaggattattgtagtactgtgtaacacatggcctttcagtaagaaaagcgttgatggcattgcctggcagaaggaagtagagagcakaggcttaggggctgtgtgccagatggcattttgggagaaggagaacatctcacttctttgaaggcttgagatctcaggtccaaaggagactgagtgtgtgggaggagtggtagctactgaccaggaagttgttgctggctgcacttccctcctgatagggaatcctg

SEQ ID NO: 31894 - DNA, 665 bp, Homo sapiens
ccccaccacagagggtgtggactttggattgggtgacatcaaggttcacatccgagttttctgacttgaatgcttaaaacaaggtaagatccacaacctccatgaatatcaggtttcccatttgtgagacggattatgaccaataaaagaaaaatttctggtaagcacttttatcatgcaggaatatggatttaatatgaaaatggyaaaatacaagtctaaatgggttcagaattcaagagcaattaatatttacaaaatatctgttatcaggcactgtcacaggcccttattatactaagaacaaagctccatctcatgaggctcactctgccggggacagtgggagggtgatgggagagtggctggggcaggtgagggggtgacgggagagtggccagggcaggtaaggtggcggggctgtgtggggaggcaggatgacacgtgctgggtgtcactgaacagagctgggggaggcagcgcgtgtgggaagcaacaggagggtgcctggcacagtgccagcactacaagggaccagcgcagatgacaagtaaatggcaggaggactggccagggacaggaaggggaaaaaaggcccagtcacatagggactgaggttcttggaggaaggaaagcagaggcatatggaggtgtctgagcgaagg

SEQ ID NO: 31895 - DNA, 830 bp, Homo sapiens
atttaacacacaatataatggagttactagcactttaacactgctttagtttacaaagccaaatattgactcaatttttataatagccttgttacataataatacagtttatggtttactacaatttccaagtcttgactaggctgaatttgtttcattatgaattagttttaattgtgccatcacctcccttgaattcaatgcagttttgtttgttaaatccaagtgtagttttcacagttttcctgttacatttcactttcttaaatgtagcctattttatcattttatttgaaatctttctgagtcacaatgctgtagtgcatcacattagggattctttgctagcttttggtcattcatctgtttgattcaagtaacctatttagagcatatggtaaagagaaattgatcattatgtctatattccaagcattgtgttaaaaatgcatagagctttttctaacatatctaatccctctgccatcttctctggagttcccatgattttgaaaagccatctatgtctttatataattactgagtaaaacaggacatttttgcacaattctgcaaggtatcccaccccaatgatgatcagacattccttgattcagtaaatatttaataaacactgtatgccagtaggtgtagagtcaaagttattacattaaaaacaagtcctgatatttgtggtagagacaaataacttcataatggtagatactgtctagtgctgtgtagaaataaaaatctatggtaatgcaaattgagcataagtgtgcgtattytaaataagtgatcagggaagaccttcctaaggtaatatt

SEQ ID NO: 31896 - DNA, 1098 bp, Homo sapiens
ttcttattttytcctaagattatcaaaattcaactctcctacctccccacttccaccccgttgccaccgtctctataactgacatcctgtaaaacactgggttccaaactctagcatcgtcagaatcacctggagggtttttttaaaacacacattgctgggaaccacccccagagtttctgatttagaaaggcatttccaggaagttcccaagtgaggctgttttagcagggtatttccaggaagttcctaggtgatgctgatgatgctggtctaggcgcgattttgagaattactacctataaggtatttacacactcattagtatttatccattaaaggacaatgataataccccatggtccctttaaatgtattttgtaaatgtacatagtataattaataccaatgactgtacctttcagaacatgaatgcctagcacataatagttgttcgataatattttattaaatgaatctgagtgcaaaataataaatatataatacatttgtaccactaatttcaagattaggcagtaacttgagagggaagagcctttcctctagacagtcgcctgctctgtgatataggaaaagcacaagagctcacaatggtaatgacaatgatagtaataatacaaaacatttccataaggagaattttgaagattttaaaatattttcatagccttcatatactggacacgaaagagttaaacaacacatccgaggctgcagcatactagagaaatgtgtgcagcacagcacagtacgtgtcctaaagtcattgacatctacactgcagggaaggctttctcaggctgtgaccagctgaaagttattcacttacaaccaaatccaaaacaacccaggtgtcccttccctactagaaaaggctgctacttctggctttacaggtaggcacttcacagagcatatattaaaagagaacacacattcttaaagttgcagcggatctaaaattctagtcagaaccaaattagaaacagcgagaatcagagcaatacaaatccatgaatgtaggaggtatcatttaagaacatgcagatagaaaaaagagggctccctaaaggtaat

SEQ ID NO: 31897 - DNA, 618 bp, Homo sapiens
ttttaattatatcgggttcctaggcctctatgagggccagagatagaatgagcttctgaagcattctctagctattttagcatttaactgcatggaaggatgttatgacccaaagaacagagtcctctggggaaaaatgatttttaattctttactctgaaaacctaggactrtaattgtgaacctacctataccgcatgccttagggaagcagcacccatctaattctgctcctcatgctcgggccgctggctcctgtctgtaagcccagttctatctatactgtacctgcttctgatgagctgtctgtgtgcatgtgttgtggttttgtcttggctttgtattgtgaggactgggtggaaaagcagcaaggatttagactacagtggagactgtagtcagagaaaatgaagacgggagtgcaatgtggagatgtatttacccaaatgtgtgtgggaaggtggggaagtcgggtcattgaaaatgctcttttccacccatcctgaaagttcacagctggttaactgttcctcttccttggggaccaataatacgacactttgcccgggagggggatattgctcaaggggagaatactccttccccttttttgggtgg

SEQ ID NO: 31898 - DNA, 618 bp, Homo sapiens
ttttaattatatcgggttcctaggcctctatgagggccagagatagaatgagcttctgaagcattctctagctattttagcatttaactgcatggaaggatgttatgacccaaagaacagagtcctctggggaaaaatgatttttaattctttactctgaaaacctaggactataattgtgaacctacctataccgcatgccttagggaagcagcacccatctaattctgctcctcatgctcgggccgctggctcctgtctgtaagcccagttctatctatactgtacctgcttctgatgagctgtctgtgtgcatgtgttgtggttttgtcttggctttgtattgtgaggactgggtggaaaagcagcaaggatttagactacagyggagactgtagtcagagaaaatgaagacgggagtgcaatgtggagatgtatttacccaaatgtgtgtgggaaggtggggaagtcgggtcattgaaaatgctcttttccacccatcctgaaagttcacagctggttaactgttcctcttccttggggaccaataatacgacactttgcccgggagggggatattgctcaaggggagaatactccttccccttttttgggtgg

SEQ ID NO: 31899 - DNA, 618 bp, Homo sapiens
ttttaattatatcgggttcctaggcctctatgagggccagagatagaatgagcttctgaagcattctctagctattttagcatttaactgcatggaaggatgttatgacccaaagaacagagtcctctggggaaaaatgatttttaattctttactctgaaaacctaggactataattgtgaacctacctataccgcatgccttagggaagcagcacccatctaattctgctcctcatgctcgggccgctggctcctgtctgtaagcccagttctatctatactgtacctgcttctgatgagctgtctgtgtgcatgtgttgtggttttgtcttggctttgtattgtgaggactgggtggaaaagcagcaaggatttagactacagtggagactgtagtcagagaaaatgaagacgggagtgcaatgtggagatgyatttacccaaatgtgtgtgggaaggtggggaagtcgggtcattgaaaatgctcttttccacccatcctgaaagttcacagctggttaactgttcctcttccttggggaccaataatacgacactttgcccgggagggggatattgctcaaggggagaatactccttccccttttttgggtgg

SEQ ID NO: 31900 - DNA, 618 bp, Homo sapiens
ttttaattatatcgggttcctaggcctctatgagggccagagatagaatgagcttctgaagcattctctagctattttagcatttaactgcatggaaggatgttatgacccaaagaacagagtcctctggggaaaaatgatttttaattctttactctgaaaacctaggactataattgtgaacctacctataccgcatgccttagggaagcagcacccatctaattctgctcctcatgctcgggccgctggctcctgtctgtaagcccagttctatctatactgtacctgcttctgatgagctgtctgtgtgcatgtgttgtggttttgtcttggctttgtattgtgaggactgggtggaaaagcagcaaggatttagactacagtggagactgtagtcagagaaaatgaagacgggagtgcaatgtggagatgtatttacccaaatgtgtgtgggaaggtggggaagtcgggtcattgaaaatgctcttttccacccatcctgaaagttcacagctggttaactgttcctcttccttggggaccaataataygacactttgcccgggagggggatattgctcaaggggagaatactccttccccttttttgggtgg

SEQ ID NO: 31901 - DNA, 551 bp, Homo sapiens
ttaccccataaatgtttaggattttaaatatatatgtataaagtatttatttatagatctaaaagtatcaactattactgctttgcccttatttatgttccccacaagctggccaactacaaacttttaaaaggaatttggcttaaaagattttgtgtgtttggcactgactatgggtgttaatcatttctgagctcacttctttttctcttctgtttataatattctttgggaacttcaaaacagaaacctgtttccttatagattctgcttcctctctggtactgtgcaaattaatttgtcctggattgttgactgtactgtacagttgatagcgccaatcatttctatttcatttttgtagggaaaaacataaacatagcaacaatgtgttgaggtttttctgttttggtgggagggaaaaatatgttaggaaacactgacataaccaaaaaaaaagttagaaaaatatataaagccaattaaatttaaacaagagggaaatcgctattgttgggaaccaaattcattgaaaaattagrtgaataaca

SEQ ID NO: 31902 - DNA, 733 bp, Homo sapiens
tgagaccgctcctgggtaggtrtttgtcctggtagaactcctcgtcagagtggtgcatggcaggcccccgcagatgatcaatgcaatgtctgaacactgggaaggaaccattgcttggagtccagacatctggaatacagaaggaccggtcctgggaacttgcccactgcatttgagtggaagcgtggcctgatcacccactgtgtgcccttatgggcactttggtctcagtattgattttgatttggcttgacctgtttgcaaaaaggaaagtgaaagtgagtgagtgcttgagttttagatgtgcgaggtgagcgagtgacctctttaccctttccttcttgtggtgtgagtgttgttttgtctcgggaggaaaatgggtgttatgcaaagtaagcccactctgctaggaactatgttgaaaaatttcaaggaaggatttaatggagactatggagttactatacaccaggaaaacttaggactttgtgtgaaatagactggccagcattggaagtgggttgggcatcagaaggaaacctagatgggtcccttgtttttaaatgtatggcacaaagtaactggtaagccaagacacccagaccagtttccgtaaatagacacttggttacagctggttttagagccaccacagtggttaagaggacaggcagcagtagtactagtggcaaagggacagacagccaaggaagaatcctgctccaccaaccta

SEQ ID NO: 31903 - DNA, 733 bp, Homo sapiens
tgagaccgctcctgggtaggtgtttgtcctggtagaactcctcgtcagagtggtgcatggcaggcccccgcagatkatcaatgcaatgtctgaacactgggaaggaaccattgcttggagtccagacatctggaatacagaaggaccggtcctgggaacttgcccactgcatttgagtggaagcgtggcctgatcacccactgtgtgcccttatgggcactttggtctcagtattgattttgatttggcttgacctgtttgcaaaaaggaaagtgaaagtgagtgagtgcttgagttttagatgtgcgaggtgagcgagtgacctctttaccctttccttcttgtggtgtgagtgttgttttgtctcgggaggaaaatgggtgttatgcaaagtaagcccactctgctaggaactatgttgaaaaatttcaaggaaggatttaatggagactatggagttactatacaccaggaaaacttaggactttgtgtgaaatagactggccagcattggaagtgggttgggcatcagaaggaaacctagatgggtcccttgtttttaaatgtatggcacaaagtaactggtaagccaagacacccagaccagtttccgtaaatagacacttggttacagctggttttagagccaccacagtggttaagaggacaggcagcagtagtactagtggcaaagggacagacagccaaggaagaatcctgctccaccaaccta

SEQ ID NO: 31904 - DNA, 733 bp, Homo sapiens
tgagaccgctcctgggtaggtgtttgtcctggtagaactcctcgtcagagtggtgcatggcaggcccccgcagatgawcaatgcaatgtctgaacactgggaaggaaccattgcttggagtccagacatctggaatacagaaggaccggtcctgggaacttgcccactgcatttgagtggaagcgtggcctgatcacccactgtgtgcccttatgggcactttggtctcagtattgattttgatttggcttgacctgtttgcaaaaaggaaagtgaaagtgagtgagtgcttgagttttagatgtgcgaggtgagcgagtgacctctttaccctttccttcttgtggtgtgagtgttgttttgtctcgggaggaaaatgggtgttatgcaaagtaagcccactctgctaggaactatgttgaaaaatttcaaggaaggatttaatggagactatggagttactatacaccaggaaaacttaggactttgtgtgaaatagactggccagcattggaagtgggttgggcatcagaaggaaacctagatgggtcccttgtttttaaatgtatggcacaaagtaactggtaagccaagacacccagaccagtttccgtaaatagacacttggttacagctggttttagagccaccacagtggttaagaggacaggcagcagtagtactagtggcaaagggacagacagccaaggaagaatcctgctccaccaaccta

SEQ ID NO: 31905 - DNA, 602 bp, Homo sapiens
tactgatacggaattaccaaccacattgcttcaaatcaagagatccattaggttggagcaaaggtaattcccgtttttgccattacttttaaagtattccatgtgccgcactttacattcccttattttatcttttgtctgatttgccaatgtataaattgacagtaccttgactcacatgcagtacatgggtcactacttttaatggcaaaaaccgcaattatttttgcaycaacctaggatttttttggaattgtgacaaagcgtgcatgaccatgggatccactgcttctatcataaatgacatcaccctgaagcagccactccagtacaatatgtaaatgatctgctaaagtcttggtgaaggtgccggctcaagggaagaaaatcctgttgtgttggagacttgtcctccaggatgcagtatatgcagtgaagccaatctatggtgtccccaagaaactccaatgcctggggccaggaaccaagcagtgaaagtgggtttggatcctctcactatcactcttcatgacgcatttaaaatatttatgactcttcttcccaaaactttagtccctgatggaaaagaagttctggtttct

SEQ ID NO: 31906 - DNA, 829 bp, Homo sapiens
ggagattgcttgaggtcaggagttcaagaccagcctgagcaacacagcaagacactgtctctgcaaaaaaacaaaaaccaaaaaccacacagctgggaggtcagaggagctgcctggaattccagcctggaccctcaccagcatgtgacccagggcaggccatgtgctctctcctcaggaagcctcaattttctcatctggagacagggacaatgaatcccttccaggatcaccatgagaatacaggtggagcatctctaattcgcaaatctgaaatccgaaatgctcccaaatccgaaactttttgagtgccgacctgacgccgtaagtgaaggcccacggttgtctgttgtccctgttgtttcacggctgagctccgtatctgctgatattgctgttctgcttgatcatcttgaactccttatttttccactgtattaatgctatgtcataccttttaccatgggtacttatgtgtgagtaagtgtaaggcaatgattgcttattgatagcatataaattcagagtcaggaayaagggtgatgccaaacaaccacagattgtccacatgggtaactgagataggcgtgggatgcctttctttctgatggtgcaatgtacacaacatttgtttcatgcacaaaattattaaaaattgtatacaattgcattcaagctgtgtgtataaggtgtgtatgaaacataagtaaatgtcatgttcagacttgggctccatccctaagatatctcattgtgtatatgcaaatattccaaaatttggaaaatatagaaatccaaaacacttctggtcctaagcattttggataaa

SEQ ID NO: 31907 - DNA, 1225 bp, Homo sapiens
cacagaccctgaccccagcagagtttatttgtattgcccccctgctacaagaaatccagaggcatccagagctgatggggtgactcaagggtgctaccaggggctcagattctttcccagttttkttgttgttgttgttgtttttattgttgttttgcgacagtctcactctgtcgcccaggctggagggcaattgtgcgatcttggctcactgcaacctctgcctcctgggctcaagaaattctcctgcctcagccttccaggtagctgagagtacaggcgcccaccaccacacctggctaattttcatattttgagtagagacgtggttttgccatgttggtgaggctggtcttgagctcctgacctcaagtgatctgcccatcttagcctcccaaagtgctggaattactggcatgagctgctgcacctggccactttcccagtttttgctcagccatctcgaacatgtggcttctgtcctcatggttggccataattgcagcatgaccattccaccctcagctcatatccacattacaggccagaagagggggcaagggctgagcagtgtgtccaccatgtttgtctctttttagaaagctcttccggggccccacggggcaaatgtggcttccatatcattggtcatactggatcatgtggccactcctggctgcaaggcagtctaggagagtgagtgccttttgctggctcattgccatcccaataaagtcagggttctgtcaacaaggaagaaaaggagtgagggcattgggcaggcactgagcagtgtctgccccagtagttcaagaattgttgatacaatggctgaaagacatcttccaatacctgtgttctctttctttttccattctaccaacctcagtgtgtgggcttctgtgctgagacttgttttatcctctcagtttcaggagggggtcccttccttgaaggcatatgctgatgccccctcaaacaaaagagggttctcctaccagcgaggagagttgaaaagagctgtggttgggcagttgacaatgtctgttccacctctattcactgaaacttcttctgtcccatcctcttttcagttcagctccctgcaatttcatttccatctcaccgcatggatcagtcacctatgcctacaggaatgctgcctgagaaaccacccccaaccttttattatcttgaatagggagttggctgcaggttggtggac

SEQ ID NO: 31908 - DNA, 646 bp, Homo sapiens
gtggctggcagaggcacatgcggaccctgcctggagcctgccctagtgacgctgggtgggtcagtctccttgcaagatgtgagcagcatccctggcctctatccatgaggtgccagtagcatgcgcgggtacatacacgtgcatgcacacacagttatgacacctagaactgtctcaggatgtcacaatgtgtccctggaggcagaagtgtccctggttgagaatgagccccagaggaaacaaccacactaggcctcaggattttgtgttgatcaagttccaaggaaaatgaatatctcagtcggccgcggtcgtcacgcctggaatcccagcacctgaggccaggagttyggagccagcctggccaatgtagtgagagaccccccgcatatctacaaaaaaaaaaaaaaagaaaaaagaaagaaggaaggaaagagaaaagaaaagaaaatgtgatctcctgttttaaaattcataaacaccacaagaaaacaatacactatgagacccagcagaaacaacaggtagactctgtagacacagatactggaattatcagagagaatataaagtaacagtgttttatatatctaaagaaataaaaaagttttctggaaatatgaaaaaaaaatcttgttttatcaca

SEQ ID NO: 31909 - DNA, 1023 bp, Homo sapiens
cgctgcctctggctcaggcttgtggtggaatctgcctggacctcaggggctccaggctgccagctgcctatccaggctctgggtgcctcctccagacctcagatacctcagctgtctgagaggactgatagggcatgatatggcaggggtgtttcaggattgagccagatgatcccctgtaatctcttattactcactcccacccttccactttcgtgcaccctgcctccttttttttttctttccctattctgagtttgtcatgagacgttgtggaatgtttctggtggggaggtaggaaaggtgaaacccttacccttggcttcagagttcctcccaggcaccccctcctcttaggcttttttaaagcacagacctggcaccatgtcctgtacttgggagagctgcagagaacttcatgtgtttccaaaaccagaacacttgattgctgactccagatccttatctcaccccaaaacccaaatgccttggggcggccagcttcagacatgagtgaatttgatgctttttctctgggactgactgaaggcttatataatggagcacgcctgcccctgtgttttgggggagttactagtagtgacccagaactgtgagcaccattccccacacagagcacagggaacacagccctctccagcaggctgggctggccgtggcctgatgcacatcagtcccaaggcaagagacccaaggcagggaatgtctcttgcccccgctttcacaatgcagacatttaactgggggtggtggcctcttcgggtccccagccttcagagtgggattgttaccctgtgccaccaagggaaatggaagcacagggccagtgggtggcagttagagactctgtgattgggaaatattaccttagacccagcatggccygttcaggtcatagcgcctcttgggctccatccatgggctgttctttccatggggcactttggttgtagtcagcaccctgtggggtgggggtggggcaccaggaggagcaagtgttat

SEQ ID NO: 31910 - DNA, 1023 bp, Homo sapiens
cgctgcctctggctcaggcttgtggtggaatctgcctggacctcaggggctccaggctgccagctgcctatccaggctctgggtgcctcctccagacctcagatacctcagctgtctgagaggactgatagggcatgatatggcaggggtgtttcaggattgagccagatgatcccctgtaatctcttattactcactcccacccttccactttcgtgcaccctgcctccttttttttttctttccctattctgagtttgtcatgagacgttgtggaatgtttctggtggggaggtaggaaaggtgaaacccttacccttggcttcagagttcctcccaggcaccccctcctcttaggcttttttaaagcacagacctggcaccatgtcctgtacttgggagagctgcagagaacttcatgtgtttccaaaaccagaacacttgattgctgactccagatccttatctcaccccaaaacccaaatgccttggggcggccagcttcagacatgagtgaatttgatgctttttctctgggactgactgaaggcttatataatggagcacgcctgcccctgtgttttgggggagttactagtagtgacccagaactgtgagcaccattccccacacagagcacagggaacacagccctctccagcaggctgggctggccgtggcctgatgcacatcagtcccaaggcaagagacccaaggcagggaatgtctcttgcccccgctttcacaatgcagacatttaactgggggtggtggcctcttcgggtccccagccttcagagtgggattgttaccctgtgccaccaagggaaatggaagcacagggccagtgggtggcagttagagactctgtgattgggaaatattaccttagacccagcatggcctgttcaggwcatagcgcctcttgggctccatccatgggctgttctttccatggggcactttggttgtagtcagcaccctgtggggtgggggtggggcaccaggaggagcaagtgttat

SEQ ID NO: 31911 - DNA, 774 bp, Homo sapiens
cctctgccattgaggcctggcccctctatactgggccctgagcatgtacctggctcccccagtgtacccgagggccttgctgtcactggatggattgaacaactcaaccgagtgtgcatgctcatgctaaccaacattcagtcacttcccctcacattcatggaccagttggttccttctcatttctcaggggacaccatgacccttcctgtgaactctccatgatgcaggcaagaatctgagtcacccagagttagcaacctgatgcaagtttgtctcccaatcccytggcctggctctcagatgaaaacaaataataataataataataataataataataataataatgaatacagccactaattcccacagtgtcctgagagctttacaggtacctgcactgactttcaggtatttacatgcttgtcctcattttctaggtgaggagactgagtcccagagaagttgagtaacttgcttataaggaggagtcgcgatctgaagctaagcagtagggtagatacattcaagcatgtttgattagacatttagcaaaacacctttgctgaaaaaaaagttttgaaaaaaagttatggaaaaaaatattggaaactctatttttaaatgtatcaccagcttgggaggccaaggcgggcagatcacctgaggccaggagttcaagaccagcctggccaacgtggtaaaaccgcgtctctactaaaaatacaaaaaaaattagccaggcatggtggcaggcacctgtaatcccag

SEQ ID NO: 31912 - DNA, 553 bp, Homo sapiens
cattattcttcattacctttattctgttgtttaaaactacttttaaaaatacattatgatgaggctttttgaagttttttcaaagtggtctaactttaagacgattgtatatttagaattcctgtactttaaaaatatttattgagaatgaggggtgggaagagggagaggatcaggaaaagtagctagtggatgctgggcttaatacctgggtgatgggatgatatgtgcatcaaaccactgtggcacatgtttacctatgtaacaaamctgcacatcctgcacatgtacccctgaacttaagataaaagttggaaatttaaaaaaaagagaatgaacttttttttttttaagatcactttgataaggagaaagtcaatatattgacagaattttacagctgaagctaccagaaatggcatgtggccatctctgaacccttcctgcattcttttctctataccaggctgcctggcatgcttttaaatcaccaccagtacaacctctgcagagatcttcagctatattctccagcagcttaatttttctccca

SEQ ID NO: 31913 - DNA, 643 bp, Homo sapiens
tgggcttttgaaactatgatgatgaaacagagttttttttttaaggtgtgttattaaaggctgtaaacaaccaaattatgtttctagtgctaaattataaatggaaattaaacttatctatggatatccctgttctcctctctgtacctcttcccccttaagtgtctccaggtcccttcaagaatctgagctttcagattgwctcaactctcaagtttttgaagaaagagagaagacagactcagatttcagtgttaggccaagtagagtgctcccctccaaagtctatttgcattgacaaagtggacttcaaggaactaacaaacttgtcaaaagttaatacaattccaggaatcaacaaagaaatgattttcatttcagttgtttgcaggggaatataacttacctaacaagtaaaattagcctgttatagcatcttacacagacacacacacacacagatacacacacacacacacacacacacacacgacacacagacacatactactagggaaaatccaagatggaaattaaaaggggcctaacagtttctaggttgagtccaaagtcttatttcatctgtaggtaccattaaagtttagataaacttccagcctaacctacagaatggccatgtgtt

SEQ ID NO: 31914 - DNA, 570 bp, Homo sapiens
  misc_feature (1)...(570): n = A,T,C or G
accaagagaatgtggtggaagtgatgcttcgtaactttttaggtgaggtcagaaaaggtcatacagcatctacctgactctcttagaaagctcacttttaagatcctccctcttgaaacccagacgccantctgtaataaccccanccacttggaaagcccatatgtaggtgtttcagttgacagtgcatgcgaggccagcctttaagccagtcatggacgtgtgagtgatggatgtgtgagtgatgagtctccggattcctgctcctgggattttggtcactccagcattggagtcctcccagctgaggaccaagacatggtggagcagagacatctccattggccctgcccaaattcctgactcacaaaagctgttataatgaaatgttattgttttacaccactaagtttggggtggtttgtggaacaacaagaataactagaacatagacccaaccacagatttgagctaaaaacaaaatcctcattttgcttcctttttcayatttgtccaaagtccagtttactctcaattaatattttccagccctttccttgaatatcttaa

SEQ ID NO: 31915 - DNA, 902 bp, Homo sapiens
ttgcagtgacaatgatccctcagcttctgaatcatctcctcattctgtgatgtacccctgggttctgagtttcatttctttggcagtcagtcacatgctgaatatagagcacctctaatttgttcagtgtctcatggatcactgagaaagaatagggccttatgacaaactccactggtcagagcgcccggatctaggtgtgtgatcacagcctttaacacttgaccaggaactcatatttcatggagtgagaattgtgagaccttgcactagggttttgtgattctgagaaagatgctgggtttggctgtatttatcaaggaatgtggataccaagagaaggggctgagttgggaagaagggggtaaagagaattctaggcaaattaaacctctcagcaacgagtatcccataggccagaaagagtgtgaagggattcagtcatatgtgaaagaagttctgtggtttttgtcttgtctttcttgaaaacctctggccctggaatgtttgatatcgattttccctggtctaaaaagagaattagagaatttcaaatgaagtgtatgtgacacaaagtgagaagagaaggagggagggagaaaagagaggcagaatcggawatgttaataggaaaaaggaagaaaatggtgtgtcctgtaattacttatataagaaaggcagctaataagtgttccagggtagaacttctatttcttgaattcattaaaagtaattttgagactcctggattggtggcagtggaggcaagactttgctaaggagaactttgtttaaatgtctctttccaaagcaaatacacatcataccaagatatacaacctatgtgtagcttcactgtgctgctggaaactctgcctcactaggtgattcttctttactga

SEQ ID NO: 31916 - DNA, 585 bp, Homo sapiens
ggaaaaaatgaaccccataaaaaagtgggcaaaggacttgatagacacttttcaaaagaagacatacatgcggccaamaatcgtgtgcaaaaaagctcaacatcactgatcattagagaaatgcaaatcaacaccgcaatgagataccatctcacaccagtcagaatggctactattaacaagctaaaaaagtaacagacgctagtgaggttgtggagaaaaaagaatgtttatacacctttggtgggagtgtaaattagttcaaccattatggaagatagtgtagtgattcctcaaagacctaaagacagaaatatcatttggtccagtaatctgataatcccattggtattttttgggtatataataccaatgggatttttttgggtatctaataccagtgggattatggaaaaatcttggctatatacctgaaggagtataaatcattgtgttataaacacacatgcatgcatatgttcattgcaacactattcacaatagcaaagatatggaatcaacctaaatgcctatcaatgatagactgggtaaagaaaaggtggtacatatacaccattaaatact

SEQ ID NO: 31917 - DNA, 725 bp, Homo sapiens
attgccatattaaatatcttcagctaactaaatcttttgctgacagtggaggcgaatgctgttccatactttttaagaggttttagaaataatttattatgctaagtttgagggcacagttaaaaataaagtctttaggtaagtgatttctagaaaaaaacatgagacaatagaacaaatcttaatcttagtacttcaattccaatagacctatttatactgagcatgctttttttttttttttcttttttttttttctagatagggtcttgctctgtcacccaggctggaatgcagtggtgcaatcacatctcactgcagccttgacctcctgggctcaagcaatcctccttcctcagcctccacagtagatgggactacaggtgggtaacaccatgcacagctgactttttttgttttttgtagagatgaggtatccctatgttgcccaggctggtcttgaactcctggcctcaagcaatcttctcaccttttcctctcaaagtgctgggattataggtgtgaggcactgcacctgggccctgctctttattttttgaaagtaaataaactcctccaaatgagaaagcgactcacctttgaaatttcaccttcatgaccttccagtttggcaatgcattttcttgtggcagcactgaaaattcttgctgttcctttttgagaggggtgkggatatatataaattcatcttaaatacagaactt

SEQ ID NO: 31918 - DNA, 848 bp, Homo sapiens
catcctaacgtactttcttatactttaacacttttgaaatataggtgaaatcttatagttgttatatacatttaatgtgattgtggttttaacaaaaacctattcaattgaaagctttaattaaaatttgtagtatcatagactgtgagcagtatgataattatagcagtaacagtaaaattttttctttcctatttttactgcaatacctctgatagttctatatttaagtatagtaatactaaaagcttgcatttatagataacttaatatgtagcaaggattatcctaagagcattatatttattaacttatttaatcctggagaaaacccttagaggaggtactgtttttatgaacatatttctgatgaaggaactgcaatatggtaatttgctaaggcttacccaactggtccatggtagaacgtgagaaggaaaggatcagtgtctatcttcagagaccaagcttaatcctttgctatccaaacgtcttagtatagcagttagctgaccgttttaacagctaatagtgatcattattctgttaaacttacaatgcttcatatctaatttttaaatgaaatttttttaatgaggaaagggctttagcttttattgaatcaattccaagtgctgaaataatcatataaatgttatttgtcatacaaatatattttgcctatttctcttttataaactgaataaactatcttataagattwaaaaaacctcattttagatagaaatatagaaatatgcttaatataaagcttttaaaagctggggtgttttattgacaatatgaatattttttgttattatttatggtgtgtttttaccttaatt

SEQ ID NO: 31919 - DNA, 848 bp, Homo sapiens
catcctaacgtactttcttatactttaacacttttgaaatataggtgaaatcttatagttgttatatacatttaatgtgattgtggttttaacaaaaacctattcaattgaaagctttaattaaaatttgtagtatcatagactgtgagcagtatgataattatagcagtaacagtaaaattttttctttcctatttttactgcaatacctctgatagttctatatttaagtatagtaatactaaaagcttgcatttatagataacttaatatgtagcaaggattatcctaagagcattatatttattaacttatttaatcctggagaaaacccttagaggaggtactgtttttatgaacatatttctgatgaaggaactgcaatatggtaatttgctaaggcttacccaactggtccatggtagaacgtgagaaggaaaggatcagtgtctatcttcagagaccaagcttaatcctttgctatccaaacgtcttagtatagcagttagctgaccgttttaacagctaatagtgatcattattctgttaaacttacaatgcttcatatctaatttttaaatgaaatttttttaatgaggaaagggctttagcttttattgaatcaattccaagtgctgaaataatcatataaatgttatttgtcatacaaatatattttgcctatttctcttttataaactgaataaactatcttataagattaaaaaaacctcattttagatagaaatatagaaatatgcttaatataaagcttttaaaagctggggtgttttattgacaatatgaataytttttgttattatttatggtgtgtttttaccttaatt

SEQ ID NO: 31920 - DNA, 522 bp, Homo sapiens
tgaacttatttttaatggcatgtatagtacatgaattcactctcattcttaggttcaagcaatagtgatacggtgaaggtctcctttaaactttcatcaagccccttgactctctgaggtgaccccacaggatgcctttgctctcccctgggctaagtagccctttctgtttgyacagtcttcttgagaaccactgctagtttatgtaagagtctagtcctgtctcctaaatacactctaaccatctgaatgattctgaggcttttggtcatatattttccaaaagtctcttgtgtaagactgctgatgtctggccataccataggccctatgtgtggatttgacttgctgtattctcagagttgtctccaagttcttcggtgcctccctggtgctttccattagtgtcatcttaagaggtaagtaagataaggatggaataatgtcttgcccctggcaatctgtaggtcattggtaactgtaagagtattcagtgaggtagtgtaggagagagaatcccaa

SEQ ID NO: 31921 - DNA, 1257 bp, Homo sapiens
acgtggcctttcagaaataatcaatactataaacaatatgtcctccttcctcaaatataccctctttgggctttttataaaatctcttctttctctttttccaatcactttgttattttttattctcctttgtcctcttttgcctgacctttaaacactaagcatctttaaacttcaggtctacagattcttctcgtctcaccttacattaaattcatcggtaccatgtctttaattaccatcaacatgctaagtattaattgcaaatctccagtctatatctcctctgagttccagatacatagatgtctccctatcacctcaaagagttcaggatcttctccttcaacactgcttctcctctggagtttcctgctcagtgttggacatcactacccactcagctgcacagctatgatctctcagagggaatttttctcaaccctgtcttgctgcgcggatgtgctgaaacctaaacaggtaatctaagcagctgttgcgtaatgaactgcaagattttagaacagaaaagtaattaaaaatgcttttagtgactcaagaaactgcccagaacactacagcacagcaagcaaatgctagttagaggatagtttggcataattttgttttgttgttttccccccaagaagtagttcttttgtactaaagacctgaaaccaaactctaggatcaaaagcaaactaaaaagaaaaaaagaaagattctgtggagagccaaccagtacttatttccctagagtaaaaaaaaaaaaaaaagactgtttgtgtcatattaaacttttcagcaaaatatggacattacagcattgttaaaatatttttaaacctagctgtatgccacatgytataaaaaagatttaaggtgcttacaaaagataaatagaatacaaaaagctaagactggaagaagataagaaagagatactgtatccattgaagatacagttaatggcaagaccacatttaattgcaaagaaaattactgaatatctaaatatagaattaacaagaaatgtgcaaatcctaaatgtactattgaatataaaagaaaattgtgataaacgaggagacacatttctggatgagaaaacccaatgctgtaaagatgtcatatttacgaagttaatgtaattataatgattttactttttgaaatgtgaaaatttactctaccagacattacaatgaactataaaacaataaagtgtggttttgatacaaaattagatcaatataa

SEQ ID NO: 31922 - DNA, 556 bp, Homo sapiens
cccactctgtcccatttgggaagcgaatcatccctttgaccagcatgtgactgtagacactacctgccctccgtcacttagtagctgagggaaaagacagatcacattcacataatttttattacagtatattgtgatagcttttctaactgttctattttattattaattatcattgttagtctcttactgtgcctaatttataaattaaacttcatcatagtatgcatgtacaggaaaaacatagtatatacagggctcaatattatatatataggtttcaggcatccactggcgactggaacatatcctgtaaggataagagagggtaacttaatgtggattcctgaatatctagtaagctctcacactatgagagttattaggttaagtgcagaaatataaaaccaaacaggctagatattactaatgttmatcagtatctatttttcttcaacttccatgtactcaaaggattacattcctccccaccttttttatagagacaaggtctcactctgttgcccagattgaagtgcagtggcacaatcatagc

SEQ ID NO: 31923 - DNA, 2240 bp, Homo sapiens
ccttctcaaataagatatttaatatacttgaagcaattcaaattgttttactacatcacaattccttcaaatttggaaaatccaaaactagaaattttaaaaattaccaactattttttgtaaattaatatcttaattttatatcatctttgaaatctgttaatgttacaatggatatctgacacagtaaagagtatagacacaatataaagcaaagatatttatttattttgctcaccttgcaggttttgtccatagagccagttaatattagagagcaatcccaattgaatgaggcactgctaatctcagcacaatgaccaattaagatatttaccttcctacaacacaaaaataattaatactagtgaaagatatcttacttcagtatatgcacatgaataatgagccaagcccatctgtgtaagctaatctaaaatctggtttttacaaaataatatatttgatgacaaatatggctctactattgctcaaaaagaagctaccaataatttcatttcagccgggcacggtgcgtcacgcttgtaaccccagcactctgtgaggccgaggcaggtggatccacgagatcaggagatagagaccatcctggctaacacagtgaagccccgtctctactaaaaatacaaaaaattagccaggcgtggtggtgggcgcctgtagtccctgctamtcgggaggctgaagcaggagaatggcgtgaacccaggaagcggagcttgcagtgagccgagatcacgccactgcactccagcctgggcaacagagcgagactccgtctcaaaaactaactaactaaataaataatttcatttcaacaaaaatgtacttagattttaaactatcaaaataatgctacttaaggcaacatttcaaaaagacatgggtaacaaatagtaaaggccgtaagaagtagtcttacaccgggtgagtgcacccctggttgttcagaaactacacatcaagtaactgaaaggtccttcttcctctatcatttcttgttgcatacatcttggttggcacccctgataattagcccctctattaaatcacagacaaatccaagagtagagttttccaacacaaatatgctaatttagttaacttcctagcaactaggaccaaaaatcattaggaaggaaattgaagttcttggactaaattaatttgggaaattaactaagagtttttatttatacatgatattcctgcctaacataatgacaagccattgaaatctgattatccatgaaataaataatagctatataaccagactattgctaacattctccttttatgttgctgtttgtcattatttgctcagaattcaaagaatgcacatattttgtgaatcagaaatatcattaaagaatgaattaatttacattttcaatatgtcctatttttatggaatccaaagcagagttaatagatagtagcttaaactaaaaaataacagagggttttctgaaccccctgatccaggttaaaacaattcttaagaactaagaattaccttccagtatcagcgtcccacactacaacggtatgatcaaaagaccccgtgatgattctgtctcctgaggtgttaaatgacaaggagatgatttcggcagaatgtccctagaaaaagagcagatactgtcaagtatacctgcagataaaacaatttctgcaagcgtacaatatcatagtctaaaaggaaatgctggagaaggccgagctctaggaacggaggtcagcggttggctggggtgaggatggggagtgtctgcacgtgggcacagggttctttttggggtgatggaaaggtttgaaaactaggttttggtaatggctgcacaatactgtgagtttactaaaaattagtgacttacacacagctagttcatttaacttaataatattgattaaaaacaaaagaaagaggttgtatttggggaaactagaggacgtcctttacactgccttggaaacactacagagcaggggatgccatgggctaataacacatggtatgcaaaagtaaacagtgtatgaaataaaactaattacttttaaaaaggaaattattaagataacttgacatgaaatcgattgataaattcctgcctttggctgactttcagctggttactgtctagtgttagtgaatcaaactgtaagataatgggaagaaaccactctccacagcagattctggaactctgataagg

SEQ ID NO: 31924 - DNA, 2240 bp, Homo sapiens
ccttctcaaataagatatttaatatacttgaagcaattcaaattgttttactacatcacaattccttcaaatttggaaaatccaaaactagaaattttaaaaattaccaactattttttgtaaattaatatcttaattttatatcatctttgaaatctgttaatgttacaatggatatctgacacagtaaagagtatagacacaatataaagcaaagatatttatttattttgctcaccttgcaggttttgtccatagagccagttaatattagagagcaatcccaattgaatgaggcactgctaatctcagcacaatgaccaattaagatatttaccttcctacaacacaaaaataattaatactagtgaaagatatcttacttcagtatatgcacatgaataatgagccaagcccatctgtgtaagctaatctaaaatctggtttttacaaaataatatatttgatgacaaatatggctctactattgctcaaaaagaagctaccaataatttcatttcagccgggcacggtgcgtcacgcttgtaaccccagcactctgtgaggccgaggcaggtggatccacgagatcaggagatagagaccatcctggctaacacagtgaagccccgtctctactaaaaatacaaaaaattagccaggcgtggtggtgggcgcctgtagtccctgctaatygggaggctgaagcaggagaatggcgtgaacccaggaagcggagcttgcagtgagccgagatcacgccactgcactccagcctgggcaacagagcgagactccgtctcaaaaactaactaactaaataaataatttcatttcaacaaaaatgtacttagattttaaactatcaaaataatgctacttaaggcaacatttcaaaaagacatgggtaacaaatagtaaaggccgtaagaagtagtcttacaccgggtgagtgcacccctggttgttcagaaactacacatcaagtaactgaaaggtccttcttcctctatcatttcttgttgcatacatcttggttggcacccctgataattagcccctctattaaatcacagacaaatccaagagtagagttttccaacacaaatatgctaatttagttaacttcctagcaactaggaccaaaaatcattaggaaggaaattgaagttcttggactaaattaatttgggaaattaactaagagtttttatttatacatgatattcctgcctaacataatgacaagccattgaaatctgattatccatgaaataaataatagctatataaccagactattgctaacattctccttttatgttgctgtttgtcattatttgctcagaattcaaagaatgcacatattttgtgaatcagaaatatcattaaagaatgaattaatttacattttcaatatgtcctatttttatggaatccaaagcagagttaatagatagtagcttaaactaaaaaataacagagggttttctgaaccccctgatccaggttaaaacaattcttaagaactaagaattaccttccagtatcagcgtcccacactacaacggtatgatcaaaagaccccgtgatgattctgtctcctgaggtgttaaatgacaaggagatgatttcggcagaatgtccctagaaaaagagcagatactgtcaagtatacctgcagataaaacaatttctgcaagcgtacaatatcatagtctaaaaggaaatgctggagaaggccgagctctaggaacggaggtcagcggttggctggggtgaggatggggagtgtctgcacgtgggcacagggttctttttggggtgatggaaaggtttgaaaactaggttttggtaatggctgcacaatactgtgagtttactaaaaattagtgacttacacacagctagttcatttaacttaataatattgattaaaaacaaaagaaagaggttgtatttggggaaactagaggacgtcctttacactgccttggaaacactacagagcaggggatgccatgggctaataacacatggtatgcaaaagtaaacagtgtatgaaataaaactaattacttttaaaaaggaaattattaagataacttgacatgaaatcgattgataaattcctgcctttggctgactttcagctggttactgtctagtgttagtgaatcaaactgtaagataatgggaagaaaccactctccacagcagattctggaactctgataagg

SEQ ID NO: 31925 - DNA, 2240 bp, Homo sapiens
ccttctcaaataagatatttaatatacttgaagcaattcaaattgttttactacatcacaattccttcaaatttggaaaatccaaaactagaaattttaaaaattaccaactattttttgtaaattaatatcttaattttatatcatctttgaaatctgttaatgttacaatggatatctgacacagtaaagagtatagacacaatataaagcaaagatatttatttattttgctcaccttgcaggttttgtccatagagccagttaatattagagagcaatcccaattgaatgaggcactgctaatctcagcacaatgaccaattaagatatttaccttcctacaacacaaaaataattaatactagtgaaagatatcttacttcagtatatgcacatgaataatgagccaagcccatctgtgtaagctaatctaaaatctggtttttacaaaataatatatttgatgacaaatatggctctactattgctcaaaaagaagctaccaataatttcatttcagccgggcacggtgcgtcacgcttgtaaccccagcactctgtgaggccgaggcaggtggatccacgagatcaggagatagagaccatcctggctaacacagtgaagccccgtctctactaaaaatacaaaaaattagccaggcgtggtggtgggcgcctgtagtccctgctaatcgggaggctgargcaggagaatggcgtgaacccaggaagcggagcttgcagtgagccgagatcacgccactgcactccagcctgggcaacagagcgagactccgtctcaaaaactaactaactaaataaataatttcatttcaacaaaaatgtacttagattttaaactatcaaaataatgctacttaaggcaacatttcaaaaagacatgggtaacaaatagtaaaggccgtaagaagtagtcttacaccgggtgagtgcacccctggttgttcagaaactacacatcaagtaactgaaaggtccttcttcctctatcatttcttgttgcatacatcttggttggcacccctgataattagcccctctattaaatcacagacaaatccaagagtagagttttccaacacaaatatgctaatttagttaacttcctagcaactaggaccaaaaatcattaggaaggaaattgaagttcttggactaaattaatttgggaaattaactaagagtttttatttatacatgatattcctgcctaacataatgacaagccattgaaatctgattatccatgaaataaataatagctatataaccagactattgctaacattctccttttatgttgctgtttgtcattatttgctcagaattcaaagaatgcacatattttgtgaatcagaaatatcattaaagaatgaattaatttacattttcaatatgtcctatttttatggaatccaaagcagagttaatagatagtagcttaaactaaaaaataacagagggttttctgaaccccctgatccaggttaaaacaattcttaagaactaagaattaccttccagtatcagcgtcccacactacaacggtatgatcaaaagaccccgtgatgattctgtctcctgaggtgttaaatgacaaggagatgatttcggcagaatgtccctagaaaaagagcagatactgtcaagtatacctgcagataaaacaatttctgcaagcgtacaatatcatagtctaaaaggaaatgctggagaaggccgagctctaggaacggaggtcagcggttggctggggtgaggatggggagtgtctgcacgtgggcacagggttctttttggggtgatggaaaggtttgaaaactaggttttggtaatggctgcacaatactgtgagtttactaaaaattagtgacttacacacagctagttcatttaacttaataatattgattaaaaacaaaagaaagaggttgtatttggggaaactagaggacgtcctttacactgccttggaaacactacagagcaggggatgccatgggctaataacacatggtatgcaaaagtaaacagtgtatgaaataaaactaattacttttaaaaaggaaattattaagataacttgacatgaaatcgattgataaattcctgcctttggctgactttcagctggttactgtctagtgttagtgaatcaaactgtaagataatgggaagaaaccactctccacagcagattctggaactctgataagg

SEQ ID NO: 31926 - DNA, 2240 bp, Homo sapiens
ccttctcaaataagatatttaatatacttgaagcaattcaaattgttttactacatcacaattccttcaaatttggaaaatccaaaactagaaattttaaaaattaccaactattttttgtaaattaatatcttaattttatatcatctttgaaatctgttaatgttacaatggatatctgacacagtaaagagtatagacacaatataaagcaaagatatttatttattttgctcaccttgcaggttttgtccatagagccagttaatattagagagcaatcccaattgaatgaggcactgctaatctcagcacaatgaccaattaagatatttaccttcctacaacacaaaaataattaatactagtgaaagatatcttacttcagtatatgcacatgaataatgagccaagcccatctgtgtaagctaatctaaaatctggtttttacaaaataatatatttgatgacaaatatggctctactattgctcaaaaagaagctaccaataatttcatttcagccgggcacggtgcgtcacgcttgtaaccccagcactctgtgaggccgaggcaggtggatccacgagatcaggagatagagaccatcctggctaacacagtgaagccccgtctctactaaaaatacaaaaaattagccaggcgtggtggtgggcgcctgtagtccctgctaatcgggaggctgaagcaggagaatggcgtgaacccrggaagcggagcttgcagtgagccgagatcacgccactgcactccagcctgggcaacagagcgagactccgtctcaaaaactaactaactaaataaataatttcatttcaacaaaaatgtacttagattttaaactatcaaaataatgctacttaaggcaacatttcaaaaagacatgggtaacaaatagtaaaggccgtaagaagtagtcttacaccgggtgagtgcacccctggttgttcagaaactacacatcaagtaactgaaaggtccttcttcctctatcatttcttgttgcatacatcttggttggcacccctgataattagcccctctattaaatcacagacaaatccaagagtagagttttccaacacaaatatgctaatttagttaacttcctagcaactaggaccaaaaatcattaggaaggaaattgaagttcttggactaaattaatttgggaaattaactaagagtttttatttatacatgatattcctgcctaacataatgacaagccattgaaatctgattatccatgaaataaataatagctatataaccagactattgctaacattctccttttatgttgctgtttgtcattatttgctcagaattcaaagaatgcacatattttgtgaatcagaaatatcattaaagaatgaattaatttacattttcaatatgtcctatttttatggaatccaaagcagagttaatagatagtagcttaaactaaaaaataacagagggttttctgaaccccctgatccaggttaaaacaattcttaagaactaagaattaccttccagtatcagcgtcccacactacaacggtatgatcaaaagaccccgtgatgattctgtctcctgaggtgttaaatgacaaggagatgatttcggcagaatgtccctagaaaaagagcagatactgtcaagtatacctgcagataaaacaatttctgcaagcgtacaatatcatagtctaaaaggaaatgctggagaaggccgagctctaggaacggaggtcagcggttggctggggtgaggatggggagtgtctgcacgtgggcacagggttctttttggggtgatggaaaggtttgaaaactaggttttggtaatggctgcacaatactgtgagtttactaaaaattagtgacttacacacagctagttcatttaacttaataatattgattaaaaacaaaagaaagaggttgtatttggggaaactagaggacgtcctttacactgccttggaaacactacagagcaggggatgccatgggctaataacacatggtatgcaaaagtaaacagtgtatgaaataaaactaattacttttaaaaaggaaattattaagataacttgacatgaaatcgattgataaattcctgcctttggctgactttcagctggttactgtctagtgttagtgaatcaaactgtaagataatgggaagaaaccactctccacagcagattctggaactctgataagg

SEQ ID NO: 31927 - DNA, 462 bp, Homo sapiens
tttcgctcttgttgcccaggctggagtgcagtggcgcgatctcggctcactgcagcctctgcctcctgggttcaagtgattctcttgcctcagcctcctaagtagctgggattacaggcatgcaccaccgcacctggctcattttgtattttcagtagagatggggtttctccatgttggtcaggctagtctcgaactcctgacctcaggtgatccgcctgcctcagcctcccaaaatgctggrattacaggcgtgagccactgcgcctggcctcaatgttttaatcttgctcctactccacctttgtatgttgggtaagttgggggcagttaactcatttttaagttttttgattgctggaccatgagatgctgtctgtaccagatggaaggtacatatttcccagagttcctgaactttgacctggatgcagtatctggatgaaatttgagaactgtatc

SEQ ID NO: 31928 - DNA, 1166 bp, Homo sapiens
tgcaggcttcttcagagcttcctactccatgcaccctcgctgggctcagtccagccccctgcctttgtctgagggtcctcctgcctccctgtttgaggattcaactccagcccctccctgccctcacccttcttcctgtcccttgtccatggagatcctgggctctggttttatttggccacagtggcatctgtcacgagctgaccagctgggtatgagtcctgtccctccttccggagagacggagagctcctagaagcagcgcctcccagcagaagcagaatcttgcyctggggaggagtacagctcagaacccgcagactcggggtcaaatcccagctctgtgactttcttgatgcgtgaccttgggaggcagctttgctgccctgagccctgtttcctccccggaaaacccataataataactgtacctcttccagtgaggagacaaggtggaatagaacgcagagcccacgtgtgcctggcacttggcaagtacaccgggaagaaggaattgggaagggcaggagttacatcattcacctgtttacagctgagcaaactagcggaggctcggcgaggtgaagccagtcccccaaggtcacacagccggccggccgcaggacaggggccgaagacgtagttgtctgacctgtgctctaaccactgtgctctctggcctcaagccggctcccacactacccttccctgttctccgtggccctccagcgcctgaaagccgcttgggggccgcggaggcaggtggcatggccagggcagagtccgcggggcggaaagggttaacgggctccgccgcattgggctgtccttcaaggggggagccagccaatgagcgcgccgcgatgaggtaatgccgggaccacgcggagtgggcggggctgacggggaccccgcagagctcagcgcttcttctctccccacctacccctcacctttgaccttgatgtacaccctcccctcccccaaccttacccctgcagaggcgcccgaactgaaagtcggctgcagggccgcggggctcccttagtctgggacaggaactgagagacgtcccggcctcagtcacaccctctggcctcagtttccctttctgcaagaagcagagtgggtgatcgctaaagaccctaccagctgtggacgtcctt

SEQ ID NO: 31929 - DNA, 1166 bp, Homo sapiens
tgcaggcttcttcagagcttcctactccatgcaccctcgctgggctcagtccagccccctgcctttgtctgagggtcctcctgcctccctgtttgaggattcaactccagcccctccctgccctcacccttcttcctgtcccttgtccatggagatcctgggctctggttttatttggccacagtggcatctgtcacgagctgaccagctgggtatgagtcctgtccctccttccggagagacggagagctcctagaagcagcgcctcccagcagaagcagaatcttgctctggggaggagtacagctcagaacccgcagactcggggtcaaatcccagctctgtgactttcttgatgcgtgaccttgggaggcagctttgctgccctgagccctgtttcctccccggaaaacccataataataactgtacctcttccagtgaggagacaaggtggaatagaacgcagagcccacgtgtgcctggcacttggcaagtacaccgggaagaaggaattgggaagggcaggagttacatcattcacctgtttacagctgagcaaactagcggaggctcggcgaggtgaagccagtcccccaaggtcacacagccggccggccgcaggacaggggccgaagacgtagttgtctgacctgtgctctaaccactgtgctctctggcctcaagccggctcccacactacccttccctgttctccgtggccctccagcgcctgaaagccgcttgggggccgcggaggcaggtggcatggccagggcagagtccgcggggcggaaagggttaacgggctccgccgcattgggctgtccttcaaggggggagccagccaatgagcgcgccgcgatgaggtaatgccgggaccacgcggagtgggcggggctgacggggaccccgcagagctcagcgcttcttctctccccacctacccctcacctttgaccttgatgtacaccctccccycccccaaccttacccctgcagaggcgcccgaactgaaagtcggctgcagggccgcggggctcccttagtctgggacaggaactgagagacgtcccggcctcagtcacaccctctggcctcagtttccctttctgcaagaagcagagtgggtgatcgctaaagaccctaccagctgtggacgtcctt

SEQ ID NO: 31930 - DNA, 1260 bp, Homo sapiens
tgcatttaaaaggatagttgttatagtttggccaccatttccaagtagtatgttgtagcaggagggttttctgctgtctagcctgcaatatggctggaaatggaagtccagggttttgtttggctattttttggtttccttaaaaatgctttttgttacaaaaattagctgggcgtggtggcatgtgcttgtagtcccagctactcaggaggctgaggcaggagactcactggaacccgggaggcagaggttgctgtgagctgagattgcaccactgtactctagcctgagcaacagagcaagactctgtctcaaaaaaataaaaaataaaaataaaaatgctttttgcatctctgtattccctgcagcagaccatcaatagtggyccatgaatattggggaaatggaatggaattgccccatttctacctaattggcaattgtgcaagcagtcctgctgtttggagcaggagtcttagagaacaaaggaccatattcatactcttgaacctggtattgaaggccaccctggcctggacccaacctgcctcgggtcccatctcacggctggccagtctctctggcattctgccatccagccacacacctgatcagaggctccgtgcaccctgctttgaacttcctgctcccaccgtctggcccaggctcgaacgtccacccacacacattgccgacgcgtcccctgcaggccctggcacttcactgtggctgtttacttgctgtcttctctgctgcaccagacttgcactccctgggggcgaggcggcctcctctcctctctgtatctccagcatcctcacagtagctgcataaacatccaaggcgctggagagatgtgtgtctaatgcgccaacgagcaagccgcattcccactccaccagctccaagcaccaactttgcactttacaacattaaagcagccgtggaggccccttactaaacccaaccttaacctcactcccctgtcccagatggtcccagatactgcaggagcagaactgtcgtctggcattttaatagggaggtgacaggtcatttgggttaaaatggactctaattagtcctcgtaagagctcagccctgggggagggtgagaaggagcagacctttgacgaagtgagagagcctcacctgttttgacacactaaaaaaaagggcagagaatgttgggtgataatgatgtgtcagtgtgggttctcaactaacacatctggtagggacattgataatgggaggcta

SEQ ID NO: 31931 - DNA, 1260 bp, Homo sapiens
tgcatttaaaaggatagttgttatagtttggccaccatttccaagtagtatgttgtagcaggagggttttctgctgtctagcctgcaatatggctggaaatggaagtccagggttttgtttggctattttttggtttccttaaaaatgctttttgttacaaaaattagctgggcgtggtggcatgtgcttgtagtcccagctactcaggaggctgaggcaggagactcactggaacccgggaggcagaggttgctgtgagctgagattgcaccactgtactctagcctgagcaacagagcaagactctgtctcaaaaaaataaaaaataaaaataaaaatgctttttgcatctctgtattccctgcagcagaccatcaatagtggcccatgaatattggggaaatggaatggaattgccccatttctacctaattggcaattgtgcaagcagtcctgctgtttggagcaggagtcttagagaacaaaggaccatattcatactcttgaacctggtattgaaggccaccctggcctggacccaacctgcctcgggtcccatctcacggctggccagtctctctggcattctgccatccagccacacacctgatcagaggctccgtgcaccctgctttgaacttcctgctcccaccgtctggcccaggctcgaacgtccacccacacacattgccsacgcgtcccctgcaggccctggcacttcactgtggctgtttacttgctgtcttctctgctgcaccagacttgcactccctgggggcgaggcggcctcctctcctctctgtatctccagcatcctcacagtagctgcataaacatccaaggcgctggagagatgtgtgtctaatgcgccaacgagcaagccgcattcccactccaccagctccaagcaccaactttgcactttacaacattaaagcagccgtggaggccccttactaaacccaaccttaacctcactcccctgtcccagatggtcccagatactgcaggagcagaactgtcgtctggcattttaatagggaggtgacaggtcatttgggttaaaatggactctaattagtcctcgtaagagctcagccctgggggagggtgagaaggagcagacctttgacgaagtgagagagcctcacctgttttgacacactaaaaaaaagggcagagaatgttgggtgataatgatgtgtcagtgtgggttctcaactaacacatctggtagggacattgataatgggaggcta

SEQ ID NO: 31932 - DNA, 563 bp, Homo sapiens
acctgtaatcccagcactttgggaggctgaggcgggcagatcacttgaggtcagtctggccaacatgatgaaaccccatttatactaaaaatacaaaaattagctgggcacggtggcagaagcgtgtaatcccagctactcgggaggctgaggcaggggaattgcttgaacccaggaggcagaagttgtagtgagcagagatcrcaccattgcactccagcctgggtgacagaacgagactctgtctcaaaacaaaacaaaaacaaaaacaaaacaaatcaaatcagctctctgtgcaagtgatgggaggagcccagagaggtgcggggacttgcccaaggccacacaagctagtccaggacatagcactggctcctacagctctgcctgaagacaagagtcccctctgccaaggtgcttgttttggctctgtgtcagtgacctctgccacttcagagggggactgtccccatcaataccaggtgttttgatttcttcctatttgggttgttgttgaaagcctgttgagtgtcacccaagctgaccccttccactcaatcagg

SEQ ID NO: 31933 - DNA, 554 bp, Homo sapiens
atataattttggttgtttgttattatgaaagttgtcacacttctacatttctgcttacccattctatattttcctctggagtaaataacaaagaatcagaggtgccttgctgatggcagtggtcatggtgatggtgatgatgataatgatgstgatgatgataatgatgctgatgatgataatgatggtgatgatgatggtttatttagaagttccaagtttgctagagctacccattaagtttctttcaaataaaaaggtccactctattaagtttcagctgtccctctggaagccttattcactaaacaaacacaaacctaaccactccttttggtgatttgataaaataggcaaactctctaggtcacaatgtgcccatattgttatggaaaagacaagtgttcagctttctagatatagagcctgaaactaggaaaataatttttttttatcgtctactgcccatcacctgcctcttagccaattgctctctctgcttaaacagcctcatggttgaaggaaagtcacttaacagaattattaaatacttt

SEQ ID NO: 31934 - DNA, 554 bp, Homo sapiens
atataattttggttgtttgttattatgaaagttgtcacacttctacatttctgcttacccattctatattttcctctggagtaaataacaaagaatcagaggtgccttgctgatggcagtggtcatggtgatggtgatgatgataatgatggtgatgatgataatgatgctgatgatgataatgatggtgatgatgatggtttatttagaagttccaagtttgctagagctacccattaagtttctttcaaataaaaaggtccactctattaagtttcagctgtccctctggaagccttattcactaaacaaacacaaacctaaccactccttttggtgatttgataaaataggcaaactctctaggtcacaatgtgcccrtattgttatggaaaagacaagtgttcagctttctagatatagagcctgaaactaggaaaataatttttttttatcgtctactgcccatcacctgcctcttagccaattgctctctctgcttaaacagcctcatggttgaaggaaagtcacttaacagaattattaaatacttt

SEQ ID NO: 31935 - DNA, 547 bp, Homo sapiens
tctcacactgactacccactttggcacaatttcctacaaaactttgacaattcattccttggtgactttagctgtcactcattataatgtgatgatttgtcacagttagctgttcctagcagacatacattgctatgaatagttttatttattcatctggaaaaattgtaagtgtcatgagatccaaagaataaccacttctttagaatccaaaccctctaacatcaaagatacttgcacccttttctccaaatcttttccacatttttagaaaatayttccaataacttggtcttccagttccttgtcctcctgttctccaatggccttgacttctggtctatctcagccactcattcctatctttataccataacatttaatgcctattttttttagaactctgaagtgtctattattatttataaatcttttatatagatatagacacagaaaaaaacacaaatctatagatacagacataaatagaatttgaggaaacttcttgaggacctcctctctcattggccaccaacaaaattaggca

SEQ ID NO: 31936 - DNA, 856 bp, Homo sapiens
ccacccatgctagaaagtaaaatgaatggatttagaacatttgtactttttaaagtactttagaaaggtattgaattgtaatttcacagcaaattatgagactgctatttccccatacggtagcagatatgaaataatacaattgatattgatttttgccagtttgatagatgaaatagcactaatttttgtttgtatttttaaatagcaaagtttgactctttttcttttctttctttcttttctttttttttttttttttgagacagagtcttgctctgtcgccaggctggagtgcaatggtgcgatcttggctcactgcaacctccgcctcccccgttcaagcaattcccctgcctcagcctcccgagtagctgggactacaggcatgcgcaccacacccagctaatttttttgtattttagtagagacttggtttcaccatgttgaccaggatggtctcgatctcctgacctcatgatctgccctccttggcctcccaaagtgctgggattacaggtgtgagccaccgcgcccagccractctttttcatatacttaatggccagtttatattctttgctcattaaaaaatgggatattagaatatttattaaaaataaccatttgtctgtcttatacatgttacatacattttcccagttaattttcaaattttgttttaaattaaatttaaacaatcatatttttgcatttccctttaaaaagtgaaaaaaatatttttaaaggggaaatgatacatgtatcatgatgctgcagagagctttgactgaaggaaacttggaggtaggtggctaagtgggacagattagaaccctgggttgagtatgcagag

SEQ ID NO: 31937 - DNA, 554 bp, Homo sapiens
tccaaagaaagctggagcaatttcaggcctggccaccgagtaaagtcaatggggtagaacaacaggtaaagggcaacttgtgtgagctaagcataaaggctgttgctttgctcccccttccaaatccctcaccagaatttttcttagggatatcctaaccagaaacttataggaacactrggaaatgtagtttagcctagccaagtgacacattgcaaagccaccacaactgttttatattatttcatgtattccatattttggaattacaaacatatttatactcctttaatgactaccctaacaattagtttgtatgaatactttattctgaaaggccaatattatttgcacttttacgctgatcccagttaatactcctattttaactccatttaccccctccaacatatacgctattgttgtggtatattttcattctctctctattaaaactcacaagtaagtcactgctaggttagatttcactaaaatttaccattttgtacctcttcatttcttcctgcatcctaagttcctatctgggaatattt

SEQ ID NO: 31938 - DNA, 554 bp, Homo sapiens
tccaaagaaagctggagcaatttcaggcctggccaccgagtaaagtcaatggggtagaacaacaggtaaagggcaacttgtgtgagctaagcataaaggctgttgctttgctcccccttccaaatccctcaccagaatttttcttagggatatcctaaccagaaacttataggaacactgggaaatgtagtttagcctagccaagtgacacattgcaaagccaccacaactgttttatattatttcatgtattccatattttggaattacamacatatttatactcctttaatgactaccctaacaattagtttgtatgaatactttattctgaaaggccaatattatttgcacttttacgctgatcccagttaatactcctattttaactccatttaccccctccaacatatacgctattgttgtggtatattttcattctctctctattaaaactcacaagtaagtcactgctaggttagatttcactaaaatttaccattttgtacctcttcatttcttcctgcatcctaagttcctatctgggaatattt

SEQ ID NO: 31939 - DNA, 1150 bp, Homo sapiens
tagctttgtctattgcattaccttcacrtcaatcctatatgtagtcagagaaatggggcatcaatgaggtaaatagagtagaaaaagcttcacagattttaaagtttaaaaatctagttatgaattaaccttatagaacaaattcaaaagcaaccaaaaatcttataaaacataatggcaagtttaaaaatgttttccaccttcaaccatacaactttagggccaatttaatgtgtataagttaaaaacaaaacaaaaggtcttattctctatggtactggataagtgaactgaaggcatctcacactaaggacgtgcttctatttgaaagccttaaccagtctcagtagcttctgtctttttggagtttcttctctctttgcttcatgaattgtgtgaggcttttgctgaatataaacagtgcatctctcattagtgccacagacaatagctgcctgcatcaatattacaggctaacattctccttagtgtcttgtactcaggcatctctgcttccactctttgtgaccaacctactcctgttaaccaggcaggtgctacttgatgtcctactgccagacatgctttcaacataaccagtccaaaagagcagagttagcccaggattttatatacatgtagcaacttattggaaatgtaagtcactgtaaaataaaacccaacaaaatggagagatgatcaaatcaaagcagacacactgaaagcatttgacactaccaaattacaatatacccctcctggtcagtttaaagaaaacaatagacagcaacagaatctaaaaagaaagtattactccctgtaagtggtttggccaattctcagatacaagaaaagtctctttgaaggtgcaacttcaaatgatgaaataggttataactgcaaaatctaacacaaaacagacagaatttagtcccttgagaaattgaagttgaagagagtcacagtgtaaaccacaaatgaaggatgtggaaaatggtcaccatcaatttcagcggctttggaaggcatttggcagcctgtgcagaaacaccaaataataccaagtgatggatttagccctgctgtcactgctgagctgatggatacaaatcactcaccttttaaactccaagttgcaaaactaggatgc

SEQ ID NO: 31940 - DNA, 608 bp, Homo sapiens
tcagtaaagattgatgagaactttaaggcaatgtctgggaagatggaaaggaaataatgtactttggaaataatatgtttcagttgcaggaaaataatcataacttcctggttctggaytataaaccattaatttcaagagggattacatgaggaaaacatctggggacaatgatggcttcctttttggaaattctgcttagggacccgcagagtactcaagtaaatatgcaaataaagtgatagggaatcagtttaaaatttaggagacagagttgaagattcaagacagaattttccatttgctctgtatgacaactcatggtctccacttgtatctttcctcagcatagatccccacattcataattatcataacttccttgtgaataacctcaactcctctgtcttccctcctccttttctttttctcttcctcctcctcctctctctctctatctccgtctctctgcttctctctctctcactcatcctgcaaaacaaagtgcactaacacagaaaacactttgcactcctcacatctgtaccagagacttccttctcctttaacctttcttctcctgctcccgactgaactaattcctctcc

SEQ ID NO: 31941 - DNA, 608 bp, Homo sapiens
tcagtaaagattgatgagaactttaaggcaatgtctgggaagatggaaaggaaataatgtactttggaaataatatgtttcagttgcaggaaaataatcataacttcctggttctggattataaaccattaatttcaagagggattacatgaggaaaacatctggggacaatgatggcttcctttttggaaattctgcttagggacccgcagagtactcaagtaaataygcaaataaagtgatagggaatcagtttaaaatttaggagacagagttgaagattcaagacagaattttccatttgctctgtatgacaactcatggtctccacttgtatctttcctcagcatagatccccacattcataattatcataacttccttgtgaataacctcaactcctctgtcttccctcctccttttctttttctcttcctcctcctcctctctctctctatctccgtctctctgcttctctctctctcactcatcctgcaaaacaaagtgcactaacacagaaaacactttgcactcctcacatctgtaccagagacttccttctcctttaacctttcttctcctgctcccgactgaactaattcctctcc

SEQ ID NO: 31942 - DNA, 1100 bp, Homo sapiens
ttctattaacttaggggcatgcaaagatcctttatatgtttttgtgaataggtatatgggcctcggacaaggataagtatgtttacaatgttggctgccgagtcctttatatgtctatgagttcaggttgttaattaaattgtctacttgatcaaagtgtattaaaaaatattcccatcagaattcagtttgggaaagtttgggtaattctgccaattttttcctcatatgtttgaggctacattgttggattaataaattcaggactcaagattgttataacttcatagagaactgttatttttattaagtgataatcctcattattcccagcaacacatttgtctttgagtccatccattctgataatattgctacatcaaatttttttggattggattttttatttttcaatcacttacctttcaactttctataccatcatattaaagagacatatcttgcaaaatgcttatagctggatttaatttttgcttttgtagtctctctytctctttctctctctccttcccccgcccccggaagaaactctcaacatgaaatattcttatatttacaattgttgtgatagctgatatatgtaaatttatttttcttttaaatgtttaattcctttttaagtatatactgtctttagcttgtaatatttatctctagttatatttgttacagaactgtgatttttcatttgaagctcttttttaagaagtcttttctaaaaatacatatcaaaagaggggtaaaaaggcaccagttaatgtctgtttcttaattgaaattaccagcctttcttccaataggaaggtgacatatttgtgagaattttggatctagaaggaaacttaagagaggctgacactcattttacatgtgagaaaactgaagcctggagtgtgtagatgttcaatgtcacagagtgagtaatcacgatctgattgaactgaagtcacctaactctttgtctagtattctttccatggtgtccttttagatttatgttgtacagactgttgaatatcatcagttctgcaatacaatagtagcacatgtcttcctgaaggagcttgtaaattgaatca

SEQ ID NO: 31943 - DNA, 1100 bp, Homo sapiens
ttctattaacttaggggcatgcaaagatcctttatatgtttttgtgaataggtatatgggcctcggacaaggataagtatgtttacaatgttggctgccgagtcctttatatgtctatgagttcaggttgttaattaaattgtctacttgatcaaagtgtattaaaaaatattcccatcagaattcagtttgggaaagtttgggtaattctgccaattttttcctcatatgtttgaggctacattgttggattaataaattcaggactcaagattgttataacttcatagagaactgttatttttattaagtgataatcctcattattcccagcaacacatttgtctttgagtccatccattctgataatattgctacatcaaatttttttggattggattttttatttttcaatcacttacctttcaactttctataccatcatattaaagagacatatcttgcaaaatgcttatagctggatttaatttttgcttttgtagtctctctttctctttctctctctccttcccccgcccccggaagaaactctcaacatgaaatattcttatatttacaattgttgtgatagctgatatatgtaaatttatttttcttttaaatgtttaattcctttttaagtatatactgtctttagcttgtaatatttatctctagttrtatttgttacagaactgtgatttttcatttgaagctcttttttaagaagtcttttctaaaaatacatatcaaaagaggggtaaaaaggcaccagttaatgtctgtttcttaattgaaattaccagcctttcttccaataggaaggtgacatatttgtgagaattttggatctagaaggaaacttaagagaggctgacactcattttacatgtgagaaaactgaagcctggagtgtgtagatgttcaatgtcacagagtgagtaatcacgatctgattgaactgaagtcacctaactctttgtctagtattctttccatggtgtccttttagatttatgttgtacagactgttgaatatcatcagttctgcaatacaatagtagcacatgtcttcctgaaggagcttgtaaattgaatca

SEQ ID NO: 31944 - DNA, 1100 bp, Homo sapiens
ttctattaacttaggggcatgcaaagatcctttatatgtttttgtgaataggtatatgggcctcggacaaggataagtatgtttacaatgttggctgccgagtcctttatatgtctatgagttcaggttgttaattaaattgtctacttgatcaaagtgtattaaaaaatattcccatcagaattcagtttgggaaagtttgggtaattctgccaattttttcctcatatgtttgaggctacattgttggattaataaattcaggactcaagattgttataacttcatagagaactgttatttttattaagtgataatcctcattattcccagcaacacatttgtctttgagtccatccattctgataatattgctacatcaaatttttttggattggattttttatttttcaatcacttacctttcaactttctataccatcatattaaagagacatatcttgcaaaatgcttatagctggatttaatttttgcttttgtagtctctctttctctttctctctctccttcccccgcccccggaagaaactctcaacatgaaatattcttatatttacaattgttgtgatagctgatatatgtaaatttatttttcttttaaatgtttaattcctttttaagtatatactgtctttagcttgtaatatttatctctagttatatttgttacagaactgtgatttttcatttgaagctcttttttaagaagtcttttctaaaaatacatatcaaaagaggggtaaaaaggcaccagttaaygtctgtttcttaattgaaattaccagcctttcttccaataggaaggtgacatatttgtgagaattttggatctagaaggaaacttaagagaggctgacactcattttacatgtgagaaaactgaagcctggagtgtgtagatgttcaatgtcacagagtgagtaatcacgatctgattgaactgaagtcacctaactctttgtctagtattctttccatggtgtccttttagatttatgttgtacagactgttgaatatcatcagttctgcaatacaatagtagcacatgtcttcctgaaggagcttgtaaattgaatca

SEQ ID NO: 31945 - DNA, 1100 bp, Homo sapiens
ttctattaacttaggggcatgcaaagatcctttatatgtttttgtgaataggtatatgggcctcggacaaggataagtatgtttacaatgttggctgccgagtcctttatatgtctatgagttcaggttgttaattaaattgtctacttgatcaaagtgtattaaaaaatattcccatcagaattcagtttgggaaagtttgggtaattctgccaattttttcctcatatgtttgaggctacattgttggattaataaattcaggactcaagattgttataacttcatagagaactgttatttttattaagtgataatcctcattattcccagcaacacatttgtctttgagtccatccattctgataatattgctacatcaaatttttttggattggattttttatttttcaatcacttacctttcaactttctataccatcatattaaagagacatatcttgcaaaatgcttatagctggatttaatttttgcttttgtagtctctctttctctttctctctctccttcccccgcccccggaagaaactctcaacatgaaatattcttatatttacaattgttgtgatagctgatatatgtaaatttatttttcttttaaatgtttaattcctttttaagtatatactgtctttagcttgtaatatttatctctagttatatttgttacagaactgtgatttttcatttgaagctcttttttaagaagtcttttctaaaaatacatatcaaaagaggggtaaaaaggcaccagttaatgtctgtttcttaattgaaattaccagcctttcttccaataggaaggtgacatatttgtgagaattttggatctagaaggaaacttaagagaggctgacactcattttayatgtgagaaaactgaagcctggagtgtgtagatgttcaatgtcacagagtgagtaatcacgatctgattgaactgaagtcacctaactctttgtctagtattctttccatggtgtccttttagatttatgttgtacagactgttgaatatcatcagttctgcaatacaatagtagcacatgtcttcctgaaggagcttgtaaattgaatca

SEQ ID NO: 31946 - DNA, 1100 bp, Homo sapiens
ttctattaacttaggggcatgcaaagatcctttatatgtttttgtgaataggtatatgggcctcggacaaggataagtatgtttacaatgttggctgccgagtcctttatatgtctatgagttcaggttgttaattaaattgtctacttgatcaaagtgtattaaaaaatattcccatcagaattcagtttgggaaagtttgggtaattctgccaattttttcctcatatgtttgaggctacattgttggattaataaattcaggactcaagattgttataacttcatagagaactgttatttttattaagtgataatcctcattattcccagcaacacatttgtctttgagtccatccattctgataatattgctacatcaaatttttttggattggattttttatttttcaatcacttacctttcaactttctataccatcatattaaagagacatatcttgcaaaatgcttatagctggatttaatttttgcttttgtagtctctctttctctttctctctctccttcccccgcccccggaagaaactctcaacatgaaatattcttatatttacaattgttgtgatagctgatatatgtaaatttatttttcttttaaatgtttaattcctttttaagtatatactgtctttagcttgtaatatttatctctagttatatttgttacagaactgtgatttttcatttgaagctcttttttaagaagtcttttctaaaaatacatatcaaaagaggggtaaaaaggcaccagttaatgtctgtttcttaattgaaattaccagcctttcttccaataggaaggtgacatatttgtgagaattttggatctagaaggaaacttaagagaggctgacactcattttacatgtgagaaaactgaagcctggagtgtktagatgttcaatgtcacagagtgagtaatcacgatctgattgaactgaagtcacctaactctttgtctagtattctttccatggtgtccttttagatttatgttgtacagactgttgaatatcatcagttctgcaatacaatagtagcacatgtcttcctgaaggagcttgtaaattgaatca

SEQ ID NO: 31947 - DNA, 746 bp, Homo sapiens
tagacttacttggttttgtatttccatttgccaaactgatgctttgccaaatctcccttcctttctggaagagcagatttgcgcagccacctacctctgcaagtgggggtccctggagattcctccatgttaaagccaaatgaggaaaggtctcagatatatctgtaaatttgtggccaggtgcggtggctcacacctgtaatcccagcactttgggaggctgaggcaagcagatcacctgagattgggagttcaagaccagcctgaccaacatggagaaaccccgtctctactaaaaatacaaaattatcccggcatgatggtgcatgcctgtaatcccggctactcaggaggctgaggcaggagaatcacttgaacccgggaggcagaggttgcagtgrgccgagatcatgccattgcactccatcctgggcaacaagagtgaaactctgtctcaaaaaaaaaaaaaaaaaaaaattgtaagacattttatgtaaagtgttatttatctttttatgggtttatttggttgttgttatcatttattgggtgagcatggaagctgaactcttgtcttccctgccttgcattgtccttaatttattaaaaaaaaaaaaaaaagaaaaaagaaaaaaaaactattttcaatgaagccatttcttccttctcctaatagtgaaaatcactggattcttaggaggcatgaggcacagaccaggcttcctacgcaggatgtgctggggtct

SEQ ID NO: 31948 - DNA, 755 bp, Homo sapiens
ttgacaccccctgcttcaagctctgtgtgatgacagtgaagtgagagtgagccgctcctctgaatggagagattaaaagcagttgtttgactgaggcaaggaggaagaagaaagcccagacaagccaagtgggactgtgatcttaacagatgttaggatcttacctcattagggcacctcagaggcttgccgcggaggtgagaaacaatagatgaggtgatggctttatggaattgtcagtgttatcagttccctgtcctcaatctgatcygcacaatcacagcctctgttgtcacctgtccaatttccaatcttgtggtagctgcgtttattacatgcgcaaatgcagccagcagccagaatgacattagcgatagtagctgctgtgggctcattattatgcaagccaggaaaggaactctaggcaggtgattaaacatgcctttggcaacagagcaaagaacagatgcttgggaggacacaccttgaaattgcaggtaggaacctgggtttaggaccatcactcctgtgcaggtctttgcaggggaagcagacacagcgttgtgtagtagttaagtggagggagtggggtctggagctggactgcctggattcaagtctcactctgccccttaccagctctgtgaccttgagtatgcttcccaccttctctgtttacattagtctgcccatctctaaaataggataatgatgctaatgatagtaccaaaaattggtatgcttttgaggatcca

SEQ ID NO: 31949 - DNA, 600 bp, Homo sapiens
ccaaagcaaaacggccctgggtgatctgtcaatatcacaatccagcartatcagatgctgtttggctctgatttcaggatcagaaatggcctacgaatagactcgttggctcagattgacttaaagcttcattctgaaaaatctacaccacagatttgggcccagggaattacccctagtggagaccaactgggctccagaatgaaggcttcgaatacaatttgaattgtgtgactatgcgagaatgtagaccgtcccccacagcatggacatgcctaagacacagtcgggttcaatcttgtcatcatggaggtagtgaccaccatcgaatggtccccaaatatgagctaccatgttaagtacattttgtgcattatctcattaatcctcacaacaacgtcataagggggctatgaccaactccttgttatgaacaaggaaaagaaggctcacaaagattgaattcaagtcaagaatctcaaggcaaataacagtggagctgaacttctgggcttctcagacacatgctcactgtagaccacatcatcggcacaggagatgaaggtctgatttggctttaggatgaggttctgtcgtatg

SEQ ID NO: 31950 - DNA, 526 bp, Homo sapiens
ttagcccggcatggtagcacgcacctgtaatcccagctactkggaaggctgaggcaggagaatcgcttgaacccaggaggcagagtttgcagtgagccaaggccgcgtcattacactccagtctgggcaacagggcaagactccacctcaaagagcaaaaaaaaaaaaaaaaaaaaaaaagaaaagaaaaagaaatgcacctcctatgcaaacttggaccatgcttaaagtgtgttccttcattttagtaattgaagaggcctataaaagcaataataaatatacctaagtttctatggaaacaattatctaattaggttttccctttaatcaaaggagtcccaatctaggaactcttagtatgtttcctgattaaggccatttgtggttttcctgagtcgctggaggaatcccagggtagaggcatccccccaacctcgctgcaaatgttttcattacagattatagcagcaggcctggcggcatctgtagagggctaatttttcctgacagtcctgctgacctt

SEQ ID NO: 31951 - DNA, 514 bp, Homo sapiens
catcctaggtgtattaaaataaataagagcttctagaaacagcgttttaagctaaactaccatggtgtgtatgatattagctgaatgggggttatatttttagctgactgctcttttgatgtgccctgtacttcctgcactgttgatgcagaaagccaactcaggggtggtgggcattgtggacccagcttcagtctctgcaagtscgcaatctactttgatggaatctctcacatacattttgtttagtaaaaagaagtctcatgacaaaatgggagaaaggcttgaaataacattcagcaccctaaaaatctcatttttaggtacacctctatatctagtctggtatttttccttttatcctatcttttctctttcagctaatcgatgagagactcagaaaagctcttagtggttctgagttataagcaatggattcaatacttcctttatcataaaaaaaatcttgtagtcatgagagtaacatagagagaaggaagaaaaatttcctccc

SEQ ID NO: 31952 - DNA, 753 bp, Homo sapiens
tgcatcaaaagcatgaaaaggaataggatcaaatgtaataaaagagctataaaactgcaccgcaaaccacaaaacagtgtggaaataagcaatactaaagtaaataaataagcactctgttcatggatagaacaactaaaaattaagttgttaattctgccctaaataaaaaatccaataattgtagaaattgggtaggctgatactaaaatttacttgggaatacaaataacacaaataagccacaccgggtttaaaaggagagaataaatggggcaaggttaatacatttttctattraaaaaacttactatagagctactgaaatcaagatattagagataagagcagaaaactagatcaatggaatagaacacaaagtccaggaaaaagaaaaataggtgcagttagatgatatttgactaagactttaaagcaattcagtaaagaatagtattttaactggtgataatgggcaagtacacacacacacacacacacacacacacacacacacacacgtgggggaatgaccatctccagctgacagtatacacaaaccttaatttgagctagacaatacacttaaaagttaaaaaaatttttctagaaaaaaacataagagaatgggtttgtggtcttgcgggtagacataatttttagagacaaaaaagttgacaaattgaaatcaattattttaaaacacacaacttctgcccttcataaaaattagttaagaaaattaaagcacaa

SEQ ID NO: 31953 - DNA, 753 bp, Homo sapiens
tgcatcaaaagcatgaaaaggaataggatcaaatgtaataaaagagctataaaactgcaccgcaaaccacaaaacagtgtggaaataagcaatactaaagtaaataaataagcactctgttcatggatagaacaactaaaaattaagttgttaattctgccctaaataaaaaatccaataattgtagaaattgggtaggctgatactaaaatttacttgggaatacaaataacacaaataagccacaccgggtttaaaaggagagaataaatggggcaaggttaatacatttttctattaaaaaaacttactatagagctactgaaatcaagatattagagataagagcagaaaactagatcaatggaatagaacacaaagtccaggaaaaagaaaaataggtgcagttagatgatatttgacwaagactttaaagcaattcagtaaagaatagtattttaactggtgataatgggcaagtacacacacacacacacacacacacacacacacacacacacgtgggggaatgaccatctccagctgacagtatacacaaaccttaatttgagctagacaatacacttaaaagttaaaaaaatttttctagaaaaaaacataagagaatgggtttgtggtcttgcgggtagacataatttttagagacaaaaaagttgacaaattgaaatcaattattttaaaacacacaacttctgcccttcataaaaattagttaagaaaattaaagcacaa

SEQ ID NO: 31954 - DNA, 722 bp, Homo sapiens
ggttactgaaagacaattatagctgatttgactatgaaatggaactccttgcaggctctttgaaatgtttgtcaacacttgagagtgaactcctcccaaaaaaccatctgcttataatttacttgaattccattaccagcaatttgtaccgaatctatacaagaagcgaaagtatttatgtgatcttcctaagatattgttaactaatatttcttaaacaaataatcttttaatgatcacatagcttatttttattgatgatatagctgtgcctttttatctagaaaatcagtatcatagcactatggattcgtattataaattcatgccatattatgcaaaatggtacattattttcactgtatggtgcccaggtacatttgaactttgtcagctggtccattctgaaccaggatgacaatccccttacccatctcatactctcttagcgtttgtctggcatttccatatctgtattgaccaagaccttcattgatggccattcctcaaaattgatcatgaagaaggtcatcagagaaatgcaratcaaaaccacaatgagataccatctcatgccagttagaatggcaataattaaaaagtcaggaaacaacagatactggagaggatgtggagaaataggaatgcttttacactgctggtgggagtataggttagttcaaccattgtggaacacagtgtagtgattcctcaatgatcta

SEQ ID NO: 31955 - DNA, 738 bp, Homo sapiens
tcccgagtagctcggactacaggcgcctgccgccacactgcccggctaatttttttgtatttttagtagagacagggtttcaccttgttagccaggatgttctcgatttcctgacctcgtgatccacccaccttggcctcccaaagtgctgggattacaggcataagccaccgcgctaggcctatgctgggtcttaaagcaagtctcaacaaatgtccaaggactaaaatagcaacgaaagtgatttttaaccacagaattaaggtaaaaattgatgataaatatatgccttccacacataaaactataacttattattgatagaaattaagagaactaaatacatgaaggtatataaaataatcatggactagaaaaactaatattataaaaatatctatttaaacrtatctgtagatattatattaatgtaaaaattactgtgtttttggtagaaattgatgagttgattttaaaatttatatggaaatacaaaggggcaggaataggcatgacgactcttgaggaacaaagttgggggacttaagccaatagaagtcagtaagttatttattctgataaagttttttattcataaagttatttattctgataataaactcacctcattggctctaattctatttttttcactttaaatatctgatagttgtctacctaatgtttcattgattttatctgaaagaaatattctatgtcttttcagtcaactatgca

SEQ ID NO: 31956 - DNA, 1272 bp, Homo sapiens
gcatcttatagttgaagaaaaattggttttcaaattctcactttttcttgaagctcctagggacaagctaaataggctattttgttgcatgataatttttctttttctttcttctgttttgtttgtgggttttttgtttatttttcaaataacccaatagatcttttctttttcaactatttatctatgatagccacctaatagttctgacagaattatttatgttttttgatattaacctatttgtcccagatgatcacagaatttaacaatacttcaatttacattacaaccagtaagaattcaggattacttaataatctataagcatttatgttgtggcttctatacgtatattttgagtactacttttttgatgtgctgttttgcatccttttgtagcagttgatgcaatatcacaatattatcaaccagagcaagtgtgctgcttgaaataaaaacaatgaattttttaaaagggtcagattaaataccagtaaaatatttaaagcattcacaatgaaaaaagaagagttaaaaagggaaaaagaataaagaaatacagaatgcttttaattgctttgagtttaaatttcccttgctcatgagcctcactgtggcttagcagacgatagttactttctcaactttatttgagaaattaactgaagagtgtgtgaatcttatatttatattttgtacactggctagcacattacaggtccttgggagaggctgaggagattatcaataaatatgagaataacattgttctctaattgttagaaacacaggcagcagacttcacctaaagccaaacaaatacaagaagaagaattaggtgctttggtcaaacaactggttaatggaatctaaaacaaacaaacaaaaacacactaaatgtagtttgactgaattcgttttgtatggttagcctagccataatgtgttactagtaatactyaagctaaagaaagtagttgcatttttaaaatgactaacatttgtcaacaacaaaaatttctcaagcctcgacttacatgcaagaacttggatattgatctcataaagcttaatatcactctaaagagacaaagcctaatactgactcaaaagaaaaaataatcaaagagcctagtagtgtctgtaccaagaactttagtgttcagaaaatcggttggggctagaaagctcaatggctgaagaaaagacaagtgctgagctgcaaagcttacgggaaggataaatgcagggtacgattgagggtatgca

SEQ ID NO: 31957 - DNA, 1118 bp, Homo sapiens
ctgtattctgggagatagtattaaattttccctagatgtcatgattccatgttccacagcatcaacttttctatttaattctttatatatggatttaaattgtgccaytggtgttttatttttctagcaatattttcttttcttaccatctctcattttatctattgtcttcttctctcaattgcctttttatctcaggcgattctcttaatatggcttctagtttctattttaaaacgtgctcttttcttttattttattgacctaacagtgcctgaaatgttgtcctgaaactgtaattgctgtttttcagaagtgaattcttcctctagtcttgcaactattattccctttccatgattttgttcgtttttctcaagtcagttgttttcctctttcttatttttaaaacgattacttatcaccaataaggcaggatcatgtgtttgtcaaccaaaaataatttgaaactttctttaccttaatggctgtttcattgtgttaaggcaatcttaacctcagatttagtgctagacagactgattcctcttccatttctgaatgttaccacgatctaagatatttttctttgttgttatgctttacattatcctatcctcacttcctggctaaaagattctctgtagtggtaagtcactgaaaataataataataacagaattgcatggttatgcttctttcaaagctcttcattccaactgtagagctttccatgtaggtactttatcttgaaggaagaaaacataagccttcagaagataggctagcatacaaccacaggtgaactaaagccagttattcgattatacaaaaaaatatgtgactaaaggtattttgtgtatcaaacatgataaaggttctagaaattatgaagttgagtaaaaaaattgggggagcaatgaaactggcagaagatatctggaatctcacattatccttaaggttatacacagcctgagaataacaaattgtgataccactctatcaaaaagccatgagattgctttagattctaaaaaattatgaaaacagaataggggaacgggtctgtgagaaatagaccatgagcatttcctgttagaaatttaagatatact

SEQ ID NO: 31958 - DNA, 926 bp, Homo sapiens
tgcatgcctgtaatcccagctactggggaggctgaggtaggagaatcacttgaacccaggaagcggaggttgcagtgagccgagatcgtgccatggtactccagtctgggcgacacagtgagactctgtctccaaaaaatagatagatagatagatagatagatagatagatagatagatagatagacagacagacagacagacagacagacagayagataaaaatacaaaaatttagctgggcatagtggcaggcacctgtaatcccagctacttggaaagctgaggcaggagaatcgcttgaacccaggagccggaggttgcagtgagccaagatcgcactattgcactccagcctgggtgacagagtgagactctgtctcaaaaaaaaaaatacggcttttcttcataaacaataaacatgttacgtgagtctgtgttgaactatctagtctgggcttcagcctcggtggcagatgtcttgtgtatgacacatctgagaagctgctgttaccccataaatatttatgggcaaccgtaatcctctcacattacaaggatttctgtactcattttacaaccctggtcgatgttctgtgctgggttagaagtcatttcaccaaagtgtgtttctaacactccagaaaaccctctcctcactctcgtctctgaatgaagaacagagttacaaccaatgcgggtcagtaacaatgtttaaacccctccaacaccgggcagccgggccagatggtgccagcgacgctgctgacatggccacgttggtctggtgcccagttcaaaggtatctggtaggccttcctttgttggtgagattttcacaagaatgcgtgcaatttctagctccagccaacttggccccaaatgtaagactgtaggaaaaaatccgctgttaatacggtctcact

SEQ ID NO: 31959 - DNA, 683 bp, Homo sapiens
  misc_feature (1)...(683): n = A,T,C or G
tcaaagcgctgggattacaggtgtgagccactgcgtncgccaaggcctatttttaaaataacagctttattgagatatcactggcaccatcacatccatccttttaaagcatacaattcggcatctgtatatacatccccagagctgcgtcaccaccacccctatccagttctggaacattttcatcaccccgaaaagagacctggcacccattagcagtcactctccgtccccagctccctcccccagcccccggcaaccactaatccactttctgtctccatggattaggcgaggataattttgcaagaagagatcctaccgtctggaaaggagtataaaatgaggaaacggggggtgaggactgaaaatactttctcctgtgatcaacacgagagaaagaaacaagggaasaaatgctacctgggaactggaggcggggaaggaccaggagctgagctctgcgtccctgtgtcctcagcccccgccatatggtttaaacatcagcactcttgtttttttcagagtctacagacatgttctcatatctccccagccccttctgctggcagtgtctgcattctgtgggcgcagggtggctgccagcatgctgaaggtcacaactgtcctctcagtccggcccctcctgtgtggccagctcggccccgaggggtccctgggga

SEQ ID NO: 31960 - DNA, 650 bp, Homo sapiens
cacgatccaaactaacccggagaccctgcacctcatcagccaactcaagggctcccccgaaactcagcggaaaccccaaacccaatgatatttataggagtcatttcaaaacagccgttcaaatatgacaccttgttacccaggcaagggggctggcacgggagaagacgcggcagcttgggtttttgttttccttttctttaaatcatggtcttatttttttaaataaaatgatagctcgagtccttgactgggaagctcagtccagtctttcaatccagcacctaatcccctaatgccctttatcaaacgcctggwcgtttaaagtgttattaaatgcctttttttggattataatttttattcttcactatatgctggctatataatcaaatattcattggataatgatgattaaaatatttaatcccccaaaagatgtttagaacaatttaggctaccattgacttaattaagggagttacgggattagtgatgaaatgaaggggtaatttttttagaactacttttgtggtttttgtggctctgaaaccagggaggaggggttcgaaggcagggagagacaggagccaaggcgcagggccaccccaccttggggacccccaggcccctgtgaagatgaggagtgg

SEQ ID NO: 31961 - DNA, 650 bp, Homo sapiens
cacgatccaaactaacccggagaccctgcacctcatcagccaactcaagggctcccccgaaactcagcggaaaccccaaacccaatgatatttataggagtcatttcaaaacagccgttcaaatatgacaccttgttacccaggcaagggggctggcacgggagaagacgcggcagcttgggtttttgttttccttttctttaaatcatggtcttatttttttaaataaaatgatagctcgagtccttgactgggaagctcagtccagtctttcaatccagcacctaatcccctaatgccctttatcaaacgcctggtcgtttaaagtgttattaaatgcctttttttggattataatttttattcttcactatatgctggctatataatcaaatattcattggataatgatgattaaaatatttaatcccccaaaagatgtttagaacaatttaggctaccattgacttaattaagggagttacgggattagtgatgaaatgaaggggtaatttttttagaactacttttgtggtttttgtggctctgaaaccagggaggaggggttcgaaggcrgggagagacaggagccaaggcgcagggccaccccaccttggggacccccaggcccctgtgaagatgaggagtgg

SEQ ID NO: 31962 - DNA, 650 bp, Homo sapiens
cacgatccaaactaacccggagaccctgcacctcatcagccaactcaagggctcccccgaaactcagcggaaaccccaaacccaatgatatttataggagtcatttcaaaacagccgttcaaatatgacaccttgttacccaggcaagggggctggcacgggagaagacgcggcagcttgggtttttgttttccttttctttaaatcatggtcttatttttttaaataaaatgatagctcgagtccttgactgggaagctcagtccagtctttcaatccagcacctaatcccctaatgccctttatcaaacgcctggtcgtttaaagtgttattaaatgcctttttttggattataatttttattcttcactatatgctggctatataatcaaatattcattggataatgatgattaaaatatttaatcccccaaaagatgtttagaacaatttaggctaccattgacttaattaagggagttacgggattagtgatgaaatgaaggggtaatttttttagaactacttttgtggtttttgtggctctgaaaccagggaggaggggttcgaaggcagggagagacaggagccaaggsgcagggccaccccaccttggggacccccaggcccctgtgaagatgaggagtgg

SEQ ID NO: 31963 - DNA, 650 bp, Homo sapiens
cacgatccaaactaacccggagaccctgcacctcatcagccaactcaagggctcccccgaaactcagcggaaaccccaaacccaatgatatttataggagtcatttcaaaacagccgttcaaatatgacaccttgttacccaggcaagggggctggcacgggagaagacgcggcagcttgggtttttgttttccttttctttaaatcatggtcttatttttttaaataaaatgatagctcgagtccttgactgggaagctcagtccagtctttcaatccagcacctaatcccctaatgccctttatcaaacgcctggtcgtttaaagtgttattaaatgcctttttttggattataatttttattcttcactatatgctggctatataatcaaatattcattggataatgatgattaaaatatttaatcccccaaaagatgtttagaacaatttaggctaccattgacttaattaagggagttacgggattagtgatgaaatgaaggggtaatttttttagaactacttttgtggtttttgtggctctgaaaccagggaggaggggttcgaaggcagggagagacaggagccaaggcscagggccaccccaccttggggacccccaggcccctgtgaagatgaggagtgg

SEQ ID NO: 31964 - DNA, 1196 bp, Homo sapiens
tcaggtacataatgaaaataagattcaatcagaagtcttatactgctaaatgttttaataaacttaatttgtgtgtatctatgtacatatatatttaatagtctgaatgagctacaagaatttataaaggagacagattccggacttcagagagaattaaatgaaggtgatcatgatggtttagttgacatcatggtgcatcttctggctgtaagaagccgacagagagctactgatgaactctttgaacctctaaaagaaacgatcaccctcttggaaagctatggccagaagatgcctgagcaggtctatattcagctagaggtaagtgcagaggtgaaataatcataattaccataaattgagcatctcttttattaaagtactttacatgtactctcttatgatgtccttataacaatctatactgtacacatttgatgttttcaatttacaggttaggaatctgatacttaaggagatttaataactttctcaaggtcatgcaaatagtaaagccagccaacactctcggtgtgttttatgacaaaatacttaaccactgtgctccactgccttcttattagaaagaatgtagattgtaaagaacctatgagttgcttttttgagttcagttttaccatcatttttcacacatgaaatatatccatacttttttttttcattcaaaaaaactacctgtcagtcaagaagtgccctagtcttgcaaacgtatcatggatttgttaataaagaataaataggccaggcgtggtggctcatgtctgtaatcccagcactgtgagaggctgaggcaggcagatcacctgaggttcggagttcaagaccagcctggccaacatgctgaaaccccatctctactaaaaatacaaaaattagctgggcatggtggcacgcacctgtagtccacctactcaggaggctgaggcagaagaatcgtttgaactcgggaggtgaaggttgcagtgagctgagatcacaccactgcactctagcatggggacaaagcgagactccttctcaaaataataataatactaataataaataaatgaaactcaatttggatggggaaatcactgtgctttctaaatagatttctatgccatccacctgtttccatgctgtggaaagatttgggggctttttaacawcaaagtctctttaattagaac

SEQ ID NO: 31965 - DNA, 586 bp, Homo sapiens
ggtccatattttctctccaacttaaaaaaatagatttgccactagatggtgctaaatatcacgaggccaatttggacaggctccattaaagccagtgagcatccgggatttgctggtacagtcttgatttttgtttttttgccgtatgaatacttggacttcatgtttttattttttaacgaggacactaaagaggttgaagttaagtcttcacttgtccttagagtgcttacaaagcgatgataaagatatatgtatacttaatagctactagatgaaaagtcaaaggacaaaccaaaatcatacctaaaataatcccaagcccttgcatttgtgtrtctgactttttttgtaagactgactctaatcatgcctcaagaattccgcacctcctgcttaatttctctttcaacatatttctcaagtgcctttggccataacttctaagatagctctagttctgaaatgatactgttgatgatatgctaattaggtattgggatgttgacagcattctaaatatgcttagtgtcactttgaagccatcaaataagcttctgtgtaggacatattgaaacaaaacatt

SEQ ID NO: 31966 - DNA, 560 bp, Homo sapiens
cggggcatagtcagagctttaaaagaaagatcaatatgtcagcaattgtgaaataaaatgtcatcattactatatagcaaataaaaatggaaacattagaattccaataggtaagatcccagaatacaatgattcttaagtaagatattcacctttcccaattattgcttttttttttaagttttttttcttttattattatactttaagttttagggtacatgtgcacattgtgcaggttagttacatatgtatacatgtgccatgctggtgcgctgcacctactaactcgtcatctagcattaggtatatctcccagtgctatccctccccccttcccccaccccataacagtccccagagtgtgatgttccccttcctgtgtccatgtgatctcattgttcaattcccacctatgagtgacaatatgcggtgtttggttttttgttcttgtgatagtttactgagaatgatgatttccaatttcatccatgtccctacaaaggaygagaactcatcattttttatggctgcatagtattccatggagtatatgtgcc

SEQ ID NO: 31967 - DNA, 740 bp, Homo sapiens
aaatctgttaaatgttatgttccaagaatagtatctcctatggcaagcaaatggacagaaatatattgggctttaaattgtaatttcacttctttttggccagtgaaatgtgagaaacagggaaagcaatatctgagatggttttcttattcatatattaaccaacatatttcttacacatattttaactcttccttgtggaaaataaaacacatgcaaaagtagagaatagtataagcctctcttcttcccacaatgtacccataacccagctccagaaatgttgcacacatggctgatcctgcttccattctaccgcaacccacttcctacccactctcccgtcactggattatttcaaaccaagtcacatcatgtgaccgactaatttaatgtatatttaatctaaattaatacatttaatctaatactttggtataagctctaaaaataggtatccttttagtttttataacagcatagctatgaaacattatcatttacatctaaaacattcaataatttcttaatattagtgtacaaatttcctttagtgtttcatgagtgattttttttcttaacttgatttgtcaggatccaaacaaggtccacccattgcttttggctgatataactcaagtcccatttaatttgtaaatattatctttcttttttgtgkgggggggtacatgaggcaaattaatacatttatataatttgtaaaggtcaaatcagtgtaa

SEQ ID NO: 31968 - DNA, 1083 bp, Homo sapiens
tggggaatttctctgtaatttgagtggttagtaaagactttctgaggagatgatgttcaagttgagtcttgaatggtaaacagaagctagctatgtgaagacygggagaataaattcaggtagaggcaacagctagtgggaaggctctaaaacacaagtgagctttgttgtgtttgcagaatagagagaaagccagtaggagtgaaccacagtgagaaagtagaaatgtggcatgaaatgaagtctgagaggggattagggagaggtggagagccttgtaggccattttaagatgtctggattttattctaacattatggaaaactgttgcagaattttatggataggagtgacatttcgatttgcctctcttttaacatttctcattcttgaaatcttgaaattcacttcagatagatcgactctttccctcactcctccatttagcacatacaggtatacctctctttattgggctttgcagatattgtatttttttaataaattgagagattgcggcaaccatgcattgagcaagtctatcagtgccatttttccaatagcatgtgctcactttatgtctgtgtcacattttggtaattcttgcaatatttcaaactttttcattattacatctgttacagtgatctgtgatcagtgatctttgatgttactgttgtaattgctttgggatgccacaaactgtgcctgtataagatggcaaacttagtaagtgtgtgtgttctgagtgttctgctaactggccattcccagcctctctcttagcctttcttcttagcctgtcctttttcctagttgcaaaaaggctcttgtaccttcagcatcatgattgagtcccagataggatggaaaaggaaggttaaagaagaaaggggataaagctactgcctctggtcctttatcaataaaatgaaagatatttcaggaatttcatccaaaaaacttccacatactttgttacatggccaccctagatgggaaggtggctggggagaaggggatggtagatagaggctgagtctgctaaccaacagtaactactattattattactttttttta

SEQ ID NO: 31969 - DNA, 1083 bp, Homo sapiens
tggggaatttctctgtaatttgagtggttagtaaagactttctgaggagatgatgttcaagttgagtcttgaatggtaaacagaagctagctatgtgaagaccgggagaataamttcaggtagaggcaacagctagtgggaaggctctaaaacacaagtgagctttgttgtgtttgcagaatagagagaaagccagtaggagtgaaccacagtgagaaagtagaaatgtggcatgaaatgaagtctgagaggggattagggagaggtggagagccttgtaggccattttaagatgtctggattttattctaacattatggaaaactgttgcagaattttatggataggagtgacatttcgatttgcctctcttttaacatttctcattcttgaaatcttgaaattcacttcagatagatcgactctttccctcactcctccatttagcacatacaggtatacctctctttattgggctttgcagatattgtatttttttaataaattgagagattgcggcaaccatgcattgagcaagtctatcagtgccatttttccaatagcatgtgctcactttatgtctgtgtcacattttggtaattcttgcaatatttcaaactttttcattattacatctgttacagtgatctgtgatcagtgatctttgatgttactgttgtaattgctttgggatgccacaaactgtgcctgtataagatggcaaacttagtaagtgtgtgtgttctgagtgttctgctaactggccattcccagcctctctcttagcctttcttcttagcctgtcctttttcctagttgcaaaaaggctcttgtaccttcagcatcatgattgagtcccagataggatggaaaaggaaggttaaagaagaaaggggataaagctactgcctctggtcctttatcaataaaatgaaagatatttcaggaatttcatccaaaaaacttccacatactttgttacatggccaccctagatgggaaggtggctggggagaaggggatggtagatagaggctgagtctgctaaccaacagtaactactattattattactttttttta

SEQ ID NO: 31970 - DNA, 1083 bp, Homo sapiens
tggggaatttctctgtaatttgagtggttagtaaagactttctgaggagatgatgttcaagttgagtcttgaatggtaaacagaagctagctatgtgaagaccgggagaataaattcaggtagaggcaacagctagtgggaaggctctaaaayacaagtgagctttgttgtgtttgcagaatagagagaaagccagtaggagtgaaccacagtgagaaagtagaaatgtggcatgaaatgaagtctgagaggggattagggagaggtggagagccttgtaggccattttaagatgtctggattttattctaacattatggaaaactgttgcagaattttatggataggagtgacatttcgatttgcctctcttttaacatttctcattcttgaaatcttgaaattcacttcagatagatcgactctttccctcactcctccatttagcacatacaggtatacctctctttattgggctttgcagatattgtatttttttaataaattgagagattgcggcaaccatgcattgagcaagtctatcagtgccatttttccaatagcatgtgctcactttatgtctgtgtcacattttggtaattcttgcaatatttcaaactttttcattattacatctgttacagtgatctgtgatcagtgatctttgatgttactgttgtaattgctttgggatgccacaaactgtgcctgtataagatggcaaacttagtaagtgtgtgtgttctgagtgttctgctaactggccattcccagcctctctcttagcctttcttcttagcctgtcctttttcctagttgcaaaaaggctcttgtaccttcagcatcatgattgagtcccagataggatggaaaaggaaggttaaagaagaaaggggataaagctactgcctctggtcctttatcaataaaatgaaagatatttcaggaatttcatccaaaaaacttccacatactttgttacatggccaccctagatgggaaggtggctggggagaaggggatggtagatagaggctgagtctgctaaccaacagtaactactattattattactttttttta

SEQ ID NO: 31971 - DNA, 2079 bp, Homo sapiens
tttttttttgagacagagtcttgctttgttgcccaggctggagtgcagtggcatgattttggctcactgtaaccttcacctcctgggttcaagcagttctcttgcctcagcctcccagtacctgggattacaggtgcacaccaccatgctggctaatttttgtatttttagaagagatggggtttcaccatgttggcccggctggtcttgagctcctgaccttgtgatcagcctgccttagtctcccaaagtgctgagattacaggtgtgaaccactgtgcctggccctcagcatgcgtttgatttagccaaagaatcaaagcattggtgaagaattgaagattggaagttacacattttttgctaagggaagtaatagagaaagaaaaatattcctggaggtaaatcttcagtttggattaatgtgaacatgaagaaacctgtagaaaccttcatttctcaagacaaagctcaaattcaaggttgtgaggaatgcagtcactgcttttgttaggggcagttgtgacagtgattgcagaaactgagactgcaaagcccgtattatataaagaatgtgcaagtgccatagaagacactgcaaggattgggtgctggagcagtgctggacctgccatcatcaccagagtgcagcagagagaatctcctctcttgccatcactaacccagcacttgactttgtcccactcctaaaagatcttggaaggaattaaaggtgcttggtggtttctcattccagcataaccttacttggcctgaccatgaaccatgcattagtctttggacagggcaattcaaatcacagaccacataacaaaagaattttgtggccatcagaactgtctccttaaacacaccatgggtgcactgtgtcctcagcttggtgaaaggtagatgtcacacacgagaaggtggtggagccaggcatgtgatggagcctcgaagagtgggaggtggcagctggctctgtgaggagggtgtgaagtcctccctgggaggagcagatgccagaaaaggaggtgagggtgggcagaagaggaggctgagcagcaagtgaatagacgtgctcgacctcagaggaggagagtcccatgtctttattggtaatattctaatgtggttgataccggagttattttctgtggctgaatggttcaactactctgaaatccatggggaaaaacaaaacaaaacaaaaaaaaactcatactaaaaacccttgagatgctaagttttaaagtaaaggaaatgttacaagattttctgaaaccaccaacctttagcagtattttcagaccttctccaacattttccactgcctttgtcagcaatcagagatgaccttcacactgaggcaatcttccacttcccttacccttttccttttctctctctttctctcctttcctcatccagtaactccagtcagactccattgtctccaggtcgactttcgtcatcatccacaactcctccacacaagccctgaacacgtgtccatgtaagtgacatcctttgtctttatttttttattttattttattttattttattttattattttattttatttttttattttattttatttattttattttattttagagatggagtctccctctgttgccctggctggagtgcagtggcacaatcttggcttactgcaacctccacctcccgggttccagcatttctctgcctcagcctcctgagtagctgggattacaggcacccaccaccacacctggctaatttttgtatttttagtagagacggggtttcaccatgttggccaggctggtcttgarctcctgacctcgtgatccacccgcctcagcctcccaaagtgctgggatcacaggcgtgagccactgtgcccggcccatgatttactatttataagaacatgggcttactacttgtgtaatacttatccctgtattttaggtgggagttgctgaggtttggtgactacatctggcctctcagggaaatggccaagttgttcacatctcacctgtataatgtgaagttgtttgtcagcttcattggttacta

SEQ ID NO: 31972 - DNA, 2079 bp, Homo sapiens
tttttttttgagacagagtcttgctttgttgcccaggctggagtgcagtggcatgattttggctcactgtaaccttcacctcctgggttcaagcagttctcttgcctcagcctcccagtacctgggattacaggtgcacaccaccatgctggctaatttttgtatttttagaagagatggggtttcaccatgttggcccggctggtcttgagctcctgaccttgtgatcagcctgccttagtctcccaaagtgctgagattacaggtgtgaaccactgtgcctggccctcagcatgcgtttgatttagccaaagaatcaaagcattggtgaagaattgaagattggaagttacacattttttgctaagggaagtaatagagaaagaaaaatattcctggaggtaaatcttcagtttggattaatgtgaacatgaagaaacctgtagaaaccttcatttctcaagacaaagctcaaattcaaggttgtgaggaatgcagtcactgcttttgttaggggcagttgtgacagtgattgcagaaactgagactgcaaagcccgtattatataaagaatgtgcaagtgccatagaagacactgcaaggattgggtgctggagcagtgctggacctgccatcatcaccagagtgcagcagagagaatctcctctcttgccatcactaacccagcacttgactttgtcccactcctaaaagatcttggaaggaattaaaggtgcttggtggtttctcattccagcataaccttacttggcctgaccatgaaccatgcattagtctttggacagggcaattcaaatcacagaccacataacaaaagaattttgtggccatcagaactgtctccttaaacacaccatgggtgcactgtgtcctcagcttggtgaaaggtagatgtcacacacgagaaggtggtggagccaggcatgtgatggagcctcgaagagtgggaggtggcagctggctctgtgaggagggtgtgaagtcctccctgggaggagcagatgccagaaaaggaggtgagggtgggcagaagaggaggctgagcagcaagtgaatagacgtgctcgacctcagaggaggagagtcccatgtctttattggtaatattctaatgtggttgataccggagttattttctgtggctgaatggttcaactactctgaaatccatggggaaaaacaaaacaaaacaaaaaaaaactcatactaaaaacccttgagatgctaagttttaaagtaaaggaaatgttacaagattttctgaaaccaccaacctttagcagtattttcagaccttctccaacattttccactgcctttgtcagcaatcagagatgaccttcacactgaggcaatcttccacttcccttacccttttccttttctctctctttctctcctttcctcatccagtaactccagtcagactccattgtctccaggtcgactttcgtcatcatccacaactcctccacacaagccctgaacacgtgtccatgtaagtgacatcctttgtctttatttttttattttattttattttattttattttattattttattttatttttttattttattttatttattttattttattttagagatggagtctccctctgttgccctggctggagtgcagtggcacaatcttggcttactgcaacctccacctcccgggttccagcatttctctgcctcagcctcctgagtagctgggattacaggcacccaccaccacacctggctaatttttgtatttttagtagagacggggtttcaccatgttggccaggctggtcttgagctcytgacctcgtgatccacccgcctcagcctcccaaagtgctgggatcacaggcgtgagccactgtgcccggcccatgatttactatttataagaacatgggcttactacttgtgtaatacttatccctgtattttaggtgggagttgctgaggtttggtgactacatctggcctctcagggaaatggccaagttgttcacatctcacctgtataatgtgaagttgtttgtcagcttcattggttacta

SEQ ID NO: 31973 - DNA, 652 bp, Homo sapiens
ttcataaaattaatggcaaaattaatttattctcagttatcactaaatttcagtttacaactaactttttgcagaatacttaatttgattatctatagtttggaagtgatcttgtagatagcactttgaagataataaaatacaatacaaatacatgctctctgttgttcatgattatttcaaatatttacttctgtaagactgccaatttttcaaatattgcttttaatgataaactttcaaatactcagtgtaataacaccaatgtcacgacacctaggcaatttggtgggtacagttctaaattgctgcttatgactataatgaagtattattggtctttgttcagtgcaggcagtccattaatcctatttcctgtttttttgtcttttttttccccttatttgactgctcatatggagttgtttgcrtaggtacctcatcaagactaataaaggtttttctaaactaatctgatacttccaactttcttttgaataagcacgtttcctctcattttattttattagcacaaagaaacggtttccactatctttataaattaaatttaagttaggtttactttctagtggaactactattttctaccttttcccataaaataactatcagaaaatacctagaatcatta

SEQ ID NO: 31974 - DNA, 1107 bp, Homo sapiens
ctctggatgtaaacactccatgtaagacaatacaacaaaaatgacaaattaagatttcaccgtctcctttcactatatttattgatgcagtgcaagcatttatagagtacaatatctccaatctcttgcttttagtcttacacttaaataatttctaccatttaatgtaaaagcttgggagctaaaatgtaattatgagagattcttgatcttacaagaagcttagaatgagaaatcaattttctttgccactagcttgaaaaatattaataattcatgagaaataaaatgaatgtgttttgaaatgggatgagtatatataaatacacacatatatatgtctatgtatgtgtatatacatacacaataatacaacaatataacagttaaggaatgtaaggttgtatttcttgttttgtatgtaaattataaaattaaggttatagaaatatcaaatatttatgtaaaaacctggaagacacaataaaatgtattttcatgagattgaaaattatttctgcacttctctactaccatgtaaaaatagtttgcaaaaatttagaaatgtgtggtcaaaaattaaaataagatttaataattttagatttatatcttatactgaatttaagaactgacatctgtaaagaacatgtttttaaatgtgaaatttcattcaatcatggaaaatctttgtcttgctttaatttataatcttgaaatcttttttctacattacaggatacatttaatatctgtctgtagctgcattgttttttgacctttsgcagaaatatattcatttcatattttaaacacctaagctacttacagttcctggccgtggataggggactcttccttgataaggcacccattgatagttgggtccatccctgtgggcatatggaccaaggaacacccttctcacatcactcatgctatacatacacacggctgatcccttgaaaatgttactgaacaagacagcaagaataaaaacagaagttcatctttatacaatggtaagagaaatattgatactgagttcttacattttagatatgatttattaaaatatgaatataaattcttagcaataatgtttgg

SEQ ID NO: 31975 - DNA, 589 bp, Homo sapiens
ttcccattgtcctgtgaaactacaagaaattcaataacttgccttgtcatcaaaaactccctacggaaaaggtttaccaatatctattcagattgacctactttattaattcccctcggtaacctaagaaagttcatgatattcacaaaggaagctattctatgtccagtcactcccattaaatggcaagcagaaatgaaaaactcaaatctaataattaggttttctttttaaacctgtgtcctgtggcccattaaagtagagaatacctattttcagcctgcagatagaaattattgatttcactgtggccactgaaactwaatgacacaaatacagatctttaataatgtatacagcgaccctggatatctttccacgtgaaaatgttatctactctgttcacaaaatgccatctaacaatagtgtaagaaaatatttttgaaatttgaaaagatttcttgctttgtgaagcagaaagtcattgtgaatgtatattaaaagctgaacatcaaaaggaagtggcaatatccattttagcaagatcaaagtgcactaatctcactgccataaaactgcaatgtaaaca

SEQ ID NO: 31976 - DNA, 712 bp, Homo sapiens
aacgtatatttcactggggtggcaggggagacagacaataagcaaaggaagattagatagataaatggagagattaatcaataaattgtttaggatatgtatcataccagacaataaatccaattgagagtttggagaaggagtgagagagcggaggttcattctggctgtcgtgtggagacaagggttggtaaggtagaaactaagaaactagttaggaatctattttaataattcagattggcaatagtttcctgaaggaaggtggtattgaagaatgtggtaagaaatsatgataaataaggatatgctgatagatagaatgttgggtgtgagagaaagggagaattcaagggtggccagggttttttcctgtgtatctagtggaatgacactgccatttacaggaaaggggaatgacaggagaggatttattttgttttatacggatttcacttttccctgcccacctagtctttgctgaaaactgaaatagaccaattaatattttgatttaaattcttatgcttaaaagaaagaataacaatggtgacagcaataagtaatatttgatagtacttatagtttgcaaaatattttaatatccagtaacgcatctgcaatgtatgatcaccctaaagatttctttctgcacctactcctaaccttcagaacaaaatgaatacatttttctagagatataaggtatttt

SEQ ID NO: 31977 - DNA, 1173 bp, Homo sapiens
tatgtaaaagctcagcaaataaggcttttggtttacagcatataaaataaggctgttgattagacacatttataagtcaactagcttaatggagacttcctcaggggaaagttcaatatcattgagaagaaaatgtagaagtttttggctagtattcatacaatacttgtcatgaatagattaaaatagagttattatctatcttatcaccgtaggaggcataattctatttggaaaagtaggtgactaatggtgaaaaggtgattccttggttaagactagtatttctcctctgataattactcctggcctagaccctaaacctgaatgagtttgtgaacattctgtggtggctgggagtttactttatttgaaaggcataatacaatgtaggtgtcatataaacatttttcaattgaatgaataaaatattaaacttacaatacacatttccacaatattgacgattattgtagaaataaatggcttctaatctccgaaataagtgtctacaaaaatagaggaaattaaggatatggaaaagcacattgtatatttgatgagtatcaaaactgtctggagcaggataaatgtggacaattgtaagggatggatttggggaggtagcctggatcctggtcatccagggtcttgtatgccaaggtagaaagatagcattttattgagtgtagaatagaaatccaccatggggtttttgagtagaagagtggtataatattaaaaagattttcaaaagatcgtctgggctacttcatgaagtaacattattaaggccaaaatatgagtggagagactttgcaggagactattagagtaggccagggggtaacaagattgtagtgagaaggatccaattggkatattttgaagggagagttaacagggtttgaaaaaaatgtattgataaataatatgaaaaaatagagaagtgaagtagagtgtaaaatttttagtataaacaataacgtggtaggtagtaacatttaatgtaatgaaaataagaaatgggttaatttggaaaattaaaaattgatatcatttgaacacatcagttgttgtcacctacaaaagatccactcataattagctcttctcactttaaaaatgtaagttatcttaagtggtttcttgagtattatacatctgtgaatt

SEQ ID NO: 31978 - DNA, 593 bp, Homo sapiens
ttgagaggccaaggcacgcggatcacttgaggccaggagtttgagcccagcctggccaacatggcgaaaccttgtctttactaaaaatacaaaaattagccaggtatggtgatgtgcaactgtgattccagctacttgggtggctgaggcacgagaattgcttgaacccatgagatggaggttacagtgtgccaagatcatgccactgcacttcagcttgggtgacagagcgagactgtgtcaaaaaaaaaaggctgggcgtggtggctcacacctgtaatcccagcactttgggaggccaaggcaggcagatcacaggtcaggagatcgagatcatcctggctaacatggtgaaaccccatctctactaaaaatacaaaacattagctgggygtggtggcgggcacctgtagtcctagctactcaggaagctgaggcaggagaattgcttgaacccggaaggtggaagttgcagtgagccgagatcatgccactgcactccaccctgggcgacagagcgagactctgtgtcaaaaaaaagaaaataaataaatccttaaaaggcagatgagggcacagacttaacagaattc

SEQ ID NO: 31979 - DNA, 574 bp, Homo sapiens
catcaaaatgaaaaccttgtgtgtcaaagaacatgataaagaaagtaaagacttcactttttgcctgtatgtactgggagggcaagaaaaatgccagcaattaaatgagttgttgaaatggccaacaagccttggaaaggtattatgttggatcaggtggcctgaaagctgtacttgtagttttgtacctactgtacttgtaggatatttttgaagacagaggaactattgtaattagtcctatgttcagagaggtaaaagcaactagaaaagaaaagtggcagcacagaaaagtagtagaaatatagaatcaattttctgagcatacagagaaagaacaaatgacttgtttaaaagggtccattttaatgttcttcctttttatactggtaaatactttctagtccaagaaatctggctccgaatttcctaaaatttttacttatttgatctattcccctgtatgtacccatctcccattgcctgcacacctttcccccccttacccacctctttttctgacattscacacaggccagtctctcatcccacagacttgttctcaaagaagaca

SEQ ID NO: 31980 - DNA, 513 bp, Homo sapiens
gagactgtttaaagcagtttttgagtgtcacagtgggcaggtgggaggtagtgtcaagaagtctgccaacacataacaggagaaaaatagaatacttagcagcattgagaaatgatttataggaaaggagtgagtcaaacacatttttagacatgaaggaataaatcaatagaaagaaagaaatttaagatcataggaccagggaaggcatgggaaagagcaagttggcagttctctcctgtttaatgttaccttgtagtgcaataaaaggagggctgtctttggaacataaaacacggactcttgagttaattgataaattgcttcaatgcaaatcacaagccacctgaaacagatggtaaactgctaaaataaattaggttccaccaaccattccaatggaacattgtatgrtatggaaagaaaaatacttaacaagacaggaagcatgagtcaggaataagtggtgcgcagtgtgagtcatgcctgtaagatcaataaagaagctggctc

SEQ ID NO: 31981 - DNA, 565 bp, Homo sapiens
acggtgtgggggaggctcaggcatggcggactgcaggtcctgagccctgccccacgggaaggcagctaaagcccagcgagaaattgagcacagcagctgctggcccaggtgctaagcccctcactgcccggggccagtggggccggctggccgctctgagtgcggggtccgctgagcccacgcccacccggaactcccgctggcccgcaagcacagtgggcagccccagttcccacccacgcctttccctccacacctcctcgcaagctgagggagccggttccggccttggccagcccagaaaggggmtcccacagtgcagtggcaggctgaaaggctcctaaagtgccgccaaagtgggagcccaggcagaggaggcgccgagagcgaacgagggctgcgagggctgccagcacactgtcacctctcagcatgtcccccactactgtacagcacacagagtacaaggccatcaaatttaatgtgactttaaattttgcaaacttaaactaatgtgatacaaaatatattacaaaagtcttacattatgccagtttttgaaaaa

SEQ ID NO: 31982 - DNA, 1413 bp, Homo sapiens
tctatactttaaaaagagacagtgcatctgaacccaaatgataaaatactagggtacaataaaaccttaaaaattctgcaaaagcaggaatagcacagataaatttttgtgactgcagtgaaatgaaactggaacgtggtggtgaaagtggaaaacaaaacaaacgaatgaaaaaaaccctctaccactcaaaattaaagacatctctatttaacaatttttacatcaaagaggaagtcaaaacaaatcattacatcagtgcaatggaatgctcttgtttattaaaaacaatgagtacctttacgtgcactgctaaggatgaatcatgttgacccaaaaattcatctgttgaccctaaccacagtatggctgtatttggagatggggcctctaaggaaggaattacagtcaaatgaggtcaggaggatggggccccgatccaatagaattgatggccttataagaagagaaacagatgagagtgtcctctctttactcccccccaccatctctttctctctttgtgtttgtttctctgtcttttacccccacctccctgagtttgtacaaggtgaggtcaggtgaacacacaatgagatagtggccacctattatacaagccacaaaaatagacctcaggataaaaacctaccttactgacaccttgatcttggatgctcagactccagaattgagagaaataaatttctgttgtttatgccactcagtctatggcattttgttattgcagcctgaactaagatgcacacagcagtccccccttagctgtggttttgctttccatggtttcagttacctgagctcagtcccagtctgaaaatagccaagtacagtacagtaatacatttagagagagagagaggtcacactcacataacttttattacaatattttgtgataattgttctattttattattagttatcattactgatctcttactgtgcctaatttataaattcaaccttatcataggtatgtatgtatagaaaaaaacatagtgtgtatatatagggtttggtactatctgtggttttcggcatatactaggggtcttgcaacagaactctgttgaataagggagagccactgtattatggttcagggcttggactcatcaaaagtgccagaagatcattaatatccagctttagtgagcrggcttcacatcagccagattaagagaagcctactagactctcaaaaatttgaaaaggtatttttcaaacagataatatgtggatatgtacaaactcaaaatgtcctgaaggatagaagggaagaagaaaaatctcccttcccagaggcatctcatggtagctgagagatagataactagagagaggataggcaggtggataaagatagacaaatcccttgagaaattgtat

SEQ ID NO: 31983 - DNA, 1413 bp, Homo sapiens
tctatactttaaaaagagacagtgcatctgaacccaaatgataaaatactagggtacaataaaaccttaaaaattctgcaaaagcaggaatagcacagataaatttttgtgactgcagtgaaatgaaactggaacgtggtggtgaaagtggaaaacaaaacaaacgaatgaaaaaaaccctctaccactcaaaattaaagacatctctatttaacaatttttacatcaaagaggaagtcaaaacaaatcattacatcagtgcaatggaatgctcttgtttattaaaaacaatgagtacctttacgtgcactgctaaggatgaatcatgttgacccaaaaattcatctgttgaccctaaccacagtatggctgtatttggagatggggcctctaaggaaggaattacagtcaaatgaggtcaggaggatggggccccgatccaatagaattgatggccttataagaagagaaacagatgagagtgtcctctctttactcccccccaccatctctttctctctttgtgtttgtttctctgtcttttacccccacctccctgagtttgtacaaggtgaggtcaggtgaacacacaatgagatagtggccacctattatacaagccacaaaaatagacctcaggataaaaacctaccttactgacaccttgatcttggatgctcagactccagaattgagagaaataaatttctgttgtttatgccactcagtctatggcattttgttattgcagcctgaactaagatgcacacagcagtccccccttagctgtggttttgctttccatggtttcagttacctgagctcagtcccagtctgaaaatagccaagtacagtacagtaatacatttagagagagagagaggtcacactcacataacttttattacaatattttgtgataattgttctattttattattagttatcattactgatctcttactgtgcctaatttataaattcaaccttatcataggtatgtatgtatagaaaaaaacatagtgtgtatatatagggtttggtactatctgtggttttcggcatatactaggggtcttgcaacagaactctgttgaataagggagagccactgtattatggttcagggcttggactcatcaaaagtgccagaagatcattaatatccagctttagtgagcgggcttcacatcagccagattaagagaagcctactagactctcaaaaatttgaaaaggtatttttcaaacagataatatgtggatatgtacaaactcaaaatgtcctgaaggatagaagggaagaagaaaaayctcccttcccagaggcatctcatggtagctgagagatagataactagagagaggataggcaggtggataaagatagacaaatcccttgagaaattgtat

SEQ ID NO: 31984 - DNA, 1523 bp, Homo sapiens
tacccgggtagacacatttccagtttggcaaccttttatcatctcttatttgccctcttgttgcgggatttctgcacagctataatagacatgacttatttatatgttataaatgctaggataagttaccaagcaagcttttaggacagtctgtcagctttattctgataagttctaatgcatggctggtgatagtttcaagtcccaaaatatgtaactgcaaaaccctgctttttatatgaagaactgttaggggtggtgccacagtttgaaagtcccctccaaaacttttgttgaaattgaatcccccatgtggcagtattgacaggtggggccttgaagaggtgattgcatcatgagggttctgcccttgggaatggattaatctattcataggttcatgggtgaatgggttaacctgggagtgggtattggtggctttgtaagaagaggaagagagacctgagccagcacactcagcctccaagttgtgtgatgccctgggccacctctggattctgcagagacctcccaccagcaagaaggccctcatcagatgtggccccttgacctgggacttctcagcctccataactgtaagaaataaactccttttctttacaagtgactcagtttcagatattctgttataagcgacagaaaatggaccaagacaggtgggaagaaagagtgaagagcagggcagccccatctggctgaactgttgaacactgcataagcctgggagcatcattctcacagactccgatgtgaacggccacccctgcagttctgtagtgcacctctacgtcagagacaccggcaggggtgagggtgtactgtgcagcctgcacatccacgtcagggaccccggcaggggcaagagtgctctgtacagcctgcacctccatgtcagagaccatggcaggggtgagggtactctgtgcagcctgcacctccacatcagaggccccagcaggggcaagggtgttctgtgcggccttcacctccatgtcagagaccctggtgggggcgagggtgttgccaactgcagaagcggggagctgttgtgcccagyggcttcatcacaccccatgcctacagggaggggttcaaggtagcctttgagataattcccaaaccagcttccattcacactttaagccttgccttcctccatttcccaccccaaacctgtagaattcccaaatctcctcctttggctctgaacttccttctctccccacccagtgcaggcccgttcctgagacatctccccgactccggagcgagctgcttcctcccctgtgcccttacctgtgtgcaagtgcatgattgcctgaccacatggatcagtagtgaattcccaaatgggctgtgagttctgaggggaccgggctctcggttcagctgcttctttccagccctttacacaggttgcgtgcatggctggcaatcagtttgttgaatgaatgtttgaaaagacaacattctctattcttctttcttttctcttatccgtg

SEQ ID NO: 31985 - DNA, 1523 bp, Homo sapiens
tacccgggtagacacatttccagtttggcaaccttttatcatctcttatttgccctcttgttgcgggatttctgcacagctataatagacatgacttatttatatgttataaatgctaggataagttaccaagcaagcttttaggacagtctgtcagctttattctgataagttctaatgcatggctggtgatagtttcaagtcccaaaatatgtaactgcaaaaccctgctttttatatgaagaactgttaggggtggtgccacagtttgaaagtcccctccaaaacttttgttgaaattgaatcccccatgtggcagtattgacaggtggggccttgaagaggtgattgcatcatgagggttctgcccttgggaatggattaatctattcataggttcatgggtgaatgggttaacctgggagtgggtattggtggctttgtaagaagaggaagagagacctgagccagcacactcagcctccaagttgtgtgatgccctgggccacctctggattctgcagagacctcccaccagcaagaaggccctcatcagatgtggccccttgacctgggacttctcagcctccataactgtaagaaataaactccttttctttacaagtgactcagtttcagatattctgttataagcgacagaaaatggaccaagacaggtgggaagaaagagtgaagagcagggcagccccatctggctgaactgttgaacactgcataagcctgggagcatcattctcacagactccgatgtgaacggccacccctgcagttctgtagtgcacctctacgtcagagacaccggcaggggtgagggtgtactgtgcagcctgcacatccacgtcagggaccccggcaggggcaagagtgctctgtacagcctgcacctccatgtcagagaccatggcaggggtgagggtactctgtgcagcctgcacctccacatcagaggccccagcaggggcaagggtgttctgtgcggccttcacctccatgtcagagaccctggtgggggcgagggtgttgccaactgcagaagcggggagctgttgtgcccagtggcttcatcacaccccatgcctacagggaggggttcaaggtagcctttgagataattcccaaaccagcttccattcacactttaagccttgccttcctccatttcccaccccaaacctgtagaattcccaaatctcctcctttggctctgaacttccttctctccscacccagtgcaggcccgttcctgagacatctccccgactccggagcgagctgcttcctcccctgtgcccttacctgtgtgcaagtgcatgattgcctgaccacatggatcagtagtgaattcccaaatgggctgtgagttctgaggggaccgggctctcggttcagctgcttctttccagccctttacacaggttgcgtgcatggctggcaatcagtttgttgaatgaatgtttgaaaagacaacattctctattcttctttcttttctcttatccgtg

SEQ ID NO: 31986 - DNA, 1523 bp, Homo sapiens
tacccgggtagacacatttccagtttggcaaccttttatcatctcttatttgccctcttgttgcgggatttctgcacagctataatagacatgacttatttatatgttataaatgctaggataagttaccaagcaagcttttaggacagtctgtcagctttattctgataagttctaatgcatggctggtgatagtttcaagtcccaaaatatgtaactgcaaaaccctgctttttatatgaagaactgttaggggtggtgccacagtttgaaagtcccctccaaaacttttgttgaaattgaatcccccatgtggcagtattgacaggtggggccttgaagaggtgattgcatcatgagggttctgcccttgggaatggattaatctattcataggttcatgggtgaatgggttaacctgggagtgggtattggtggctttgtaagaagaggaagagagacctgagccagcacactcagcctccaagttgtgtgatgccctgggccacctctggattctgcagagacctcccaccagcaagaaggccctcatcagatgtggccccttgacctgggacttctcagcctccataactgtaagaaataaactccttttctttacaagtgactcagtttcagatattctgttataagcgacagaaaatggaccaagacaggtgggaagaaagagtgaagagcagggcagccccatctggctgaactgttgaacactgcataagcctgggagcatcattctcacagactccgatgtgaacggccacccctgcagttctgtagtgcacctctacgtcagagacaccggcaggggtgagggtgtactgtgcagcctgcacatccacgtcagggaccccggcaggggcaagagtgctctgtacagcctgcacctccatgtcagagaccatggcaggggtgagggtactctgtgcagcctgcacctccacatcagaggccccagcaggggcaagggtgttctgtgcggccttcacctccatgtcagagaccctggtgggggcgagggtgttgccaactgcagaagcggggagctgttgtgcccagtggcttcatcacaccccatgcctacagggaggggttcaaggtagcctttgagataattcccaaaccagcttccattcacactttaagccttgccttcctccatttcccaccccaaacctgtagaattcccaaatctcctcctttggctctgaacttccttctctccccacccagtgcaggcccgttcctgagacatctccccgactccggagcgagctgcttcctcccctgtgcccttacctgtktgcaagtgcatgattgcctgaccacatggatcagtagtgaattcccaaatgggctgtgagttctgaggggaccgggctctcggttcagctgcttctttccagccctttacacaggttgcgtgcatggctggcaatcagtttgttgaatgaatgtttgaaaagacaacattctctattcttctttcttttctcttatccgtg

SEQ ID NO: 31987 - DNA, 523 bp, Homo sapiens
atcagtggcagatcagacactctggctgtcgtgtgggaatgggctgcagagagtgtggtccatcctacacaaccaggacctactgccgggggggcaggtgagaagcggcggtgtctcggatgggggtgggagaagggccgaggcaaatgtrtggagtgtggaaaaagcacaggcacaggggaaagcccgatgggacgttggtagcagcttgcgtttgattttggggatgaaatggaaagtgtgtcaaggagtgtgccctggtttttggtgtgtgtagctggtggcgctgagacagggaccctcaaggaggccggggtgcaggggaatcgccgcctgggtgtagagccttcaggacccgtggaggggctggcagctggacctgccggtctagaagggagggctgttgcgacctcagcttgggcttgggaggcatcagcgtcgatttcctcactgacttttccactgggcaagtgccaggggcctttaaggatctcatcgtttagtcagtaatgatttttgaaca

SEQ ID NO: 31988 - DNA, 523 bp, Homo sapiens
atcagtggcagatcagacactctggctgtcgtgtgggaatgggctgcagagagtgtggtccatcctacacaaccaggacctactgccgggggggcaggtgagaagcggcggtgtctcggatgggggtgggagaagggccgaggcaaatgtgwggagtgtggaaaaagcacaggcacaggggaaagcccgatgggacgttggtagcagcttgcgtttgattttggggatgaaatggaaagtgtgtcaaggagtgtgccctggtttttggtgtgtgtagctggtggcgctgagacagggaccctcaaggaggccggggtgcaggggaatcgccgcctgggtgtagagccttcaggacccgtggaggggctggcagctggacctgccggtctagaagggagggctgttgcgacctcagcttgggcttgggaggcatcagcgtcgatttcctcactgacttttccactgggcaagtgccaggggcctttaaggatctcatcgtttagtcagtaatgatttttgaaca

SEQ ID NO: 31989 - DNA, 523 bp, Homo sapiens
atcagtggcagatcagacactctggctgtcgtgtgggaatgggctgcagagagtgtggtccatcctacacaaccaggacctactgccgggggggcaggtgagaagcggcggtgtctcggatgggggtgggagaagggccgaggcaaatgtgtkgagtgtggaaaaagcacaggcacaggggaaagcccgatgggacgttggtagcagcttgcgtttgattttggggatgaaatggaaagtgtgtcaaggagtgtgccctggtttttggtgtgtgtagctggtggcgctgagacagggaccctcaaggaggccggggtgcaggggaatcgccgcctgggtgtagagccttcaggacccgtggaggggctggcagctggacctgccggtctagaagggagggctgttgcgacctcagcttgggcttgggaggcatcagcgtcgatttcctcactgacttttccactgggcaagtgccaggggcctttaaggatctcatcgtttagtcagtaatgatttttgaaca

SEQ ID NO: 31990 - DNA, 1262 bp, Homo sapiens
ctatgccttctttgtgcagctgcggaaagataattagcaacatatagaaagtattttgaaagtagagacgtgacaagcaatcactcatacttctgccgaactgtctcaggctgtttataagtggggtcaacaacatgttgacgacatggttgaatgctttatttgaagtaaagatgtgtgatctttgaatgaagttattaatgatgtgacagaaatcttgaaaacctctcatttcaatgggaaacgacagtcaaagccttgtactaacaagtcagttgccaggacgcagcttggagcacaagatattgcacctgtggatgttggctgcagcaatatgaagtaggaaaagcattaacgctgcgaatctcagtctttctgcctagaaccttatcagggtaatgtagtacatggctaatggttttcctaatcaagttagaactttctttttctagttttgcactgaatcagtatagatacaattgtgctagagaacaatcaaaagatttcatttcatgttaaatcttgttcttaccactcccacagtacaggggacctgatggagaaagggtaggcgcagatgtgtgggccaggccgaggggactaggcaaaactggggcacctagcagagtccccaaaggttggagggtggcacaaagagaaaataaccatttattcctgaaattccagtattcttaaatagaattctaggtcccacatctcccctcaagaaaaacatttcaggtggactaaaaacgagggaaccactcccttaaaacaaagagaaagtttcctcccaggaagtgaggaagtgatgtggaagctccgtccaccgagttgtgggtgcagctggacagtgaatggtgactggcccgttagtcccggggtcactgcaggaggaacggaggctcctccctcttctccttctgctctgtcgggccacgatgtcactgagagtgactgtccttatgttcctacataatcagatcatgcaggtaataggagctctggtccttttaaaaataatttgagggaaatgtttttaggagaggattggaacaaacgcttcttgggtttcttctagtttactgcacagaaaccatttactactagcagcttaatgaatcccgattgatcrcgaaccgtaatgtcagggtaaccgtcctcattttctctgttttcagatttattttggttactcagatatttacctctgctcctcagaggtagtgagctgatagtgtatttttcatcaatttagaaca

SEQ ID NO: 31991 - DNA, 595 bp, Homo sapiens
acaatttcccgatcctcgcatgggccctgggcctggccttccattggctctcacatgccgctgccactggaggattttctgggagggtgcgtgtctgcattttattttgttggatgaagattacacgtgcaaggtattccagccttaatctgggaatgcaatacatgacctgggaatgcaataaacacacaaacacaacaaatgaaacaaaccttaacatgacctgggcatttctattcacatcgtggttgactaacatgaggcatgttagatggctgagtaattgtttttgttcttctttataatccatgctgaagaagaagtytgtctttagaaaatgtggctcagatagagatggaattcatttgcttcaattgtgtgaacatctgaaatcggcacctgtctaggtattaatgttccgagtttagaaggtgtttagctggctgtgtgtttgtatacacgtaaacccggtattgatttgaaatacacgtgcacatcagcaagtcgcggtggagtttggtggcacaccttgcaatgctgatgggatgctgggagagagggcttatgcctcccagggagcttgcaatttgcatgg

SEQ ID NO: 31992 - DNA, 557 bp, Homo sapiens
tgtgagggaggctgtgtgagggaggctgtgtgaaggaggctgtgtgagggaggcatgtgagagaggctgtgtaccagaggcccatgagggaggccatgtgggagactttgtgaggaaggcccgtgaggaaggctgtgtgagggaggctgtgtgagggaggcatgtgaggggggcgtgtaagggaagctgtgtattgcaggcccatgagggaggctgtgtgggagactgtaygagtgaggctgtgtgagggaggctcaccaacaagcacacctctgacggattctgcctgtggggcaggcaggaggccatgtccttgtgatggccgcagtcaccacgttcatggcggtgctattcacaatggccacatgtctgtcagcagaggaacacacaggcaaatggtggctctccacaccatccatctcagacatcaataacagaatattttatgaatgtaatggcctggtggacaccccagagggacttcagagccataatgagctcttggattaaaatgaccaggaaaaatgaacttcagatgaaatacttgttgtagttga

SEQ ID NO: 31993 - DNA, 557 bp, Homo sapiens
tgtgagggaggctgtgtgagggaggctgtgtgaaggaggctgtgtgagggaggcatgtgagagaggctgtgtaccagaggcccatgagggaggccatgtgggagactttgtgaggaaggcccgtgaggaaggctgtgtgagggaggctgtgtgagggaggcatgtgaggggggcgtgtaagggaagctgtgtattgcaggcccatgagggaggctgtgtgggagactgtacgagtgaggctgtgtgagggaggctcaccaacaagcacacctctgamggattctgcctgtggggcaggcaggaggccatgtccttgtgatggccgcagtcaccacgttcatggcggtgctattcacaatggccacatgtctgtcagcagaggaacacacaggcaaatggtggctctccacaccatccatctcagacatcaataacagaatattttatgaatgtaatggcctggtggacaccccagagggacttcagagccataatgagctcttggattaaaatgaccaggaaaaatgaacttcagatgaaatacttgttgtagttga

SEQ ID NO: 31994 - DNA, 283 bp, Homo sapiens
ctctccccttcttccccctccacccagcaacacacacacaacgtctcagtctctgctctgcttggtgaatccactctrgtcctgagtgtctctcttcagaccagcttctcggcttgctcgaggtgtctgcttctctgtgaatttagttggcacggggatttgatttgttgtggtccattttcccaccaactctgcatgaattttcacctccgtgccacgcccccccaccatcaccactgaactagcctgtatagtctctgtgtctcttcattcaaattcagca

SEQ ID NO: 31995 - DNA, 482 bp, Homo sapiens
tagccccactttcatccctcctcttggcccattgggagacttggtgcttcctcttcttgccactgttcatctgatggaataaacctaataagaaataatactaataataacaacgaacatttacttagtgactactggtattagattctttttaactaatttccatgtattcagaagagaatggccatgaataaacatgacattttaaaaaagaaagggtggtgaggagacacaaatgctacaaaayattaaagcctctataaaggtggtaatcaaacatttgtggtatcttcaaggctagttctagtcccccaagagtgagaattcttgctagtggtcatagctggggtcctactggatgataggccaacagctccctctgtgccatttttgcacaggctggcagagactctcgagctgtgcggcagctgtgggaccttgtgcctccagcctccttcctcatcctgcagcaggtcaggtct

SEQ ID NO: 31996 - DNA, 528 bp, Homo sapiens
ggcccagctaattttttgtatttttagtagagccggggtttcaccatgttagccaggatggtctcgatctcctgaccttgtgatccacccgcctcggcctcccaaagtgctgggattacaggcgtgagccaccgcgcccggctccaagtgcatgttcaaagttgggtcaggaagaccccgcttcctcctggggcacatggcagggcattggaagtggcctttgggagaccacactttacttggggagtagctaatgatgtagtcagcaggccagggtccggggccttcagatcactcactggagaggtttcaggagccaggatccctgccttggtttacatcccagcttcattctttttttgagacggagtcttgctgtgtcgccaggctgkagtgcagtggcataatctcggcccactgcaacctccacctcctgggttcaagcgattcttgtgcctcagcctcccaagtagctgggattacaggcaagcaccaccacacccagctattttttgttttgtattttta

SEQ ID NO: 31997 - DNA, 1222 bp, Homo sapiens
ttccctcctcctacacacatatacatcctgcgccacaacagactttttctttcccaaaaggaaggttcttttttttgttttgttttcactttgaactcctgagattcgtttctggcaaggttcctttcctctctctctaccaaacggttttgaaacagtcatcatttccctgagatgataaacagtgagagattgcttttacttttgaaggcaatgaaaacacgtctatggtttcactttgaaacacatcaggaaaaacactcctatcacatttagcacgtgtaaaggaattctccattcatgggccacctgtgtgtctgatgatcgtttaatactgcttcccaagtttcagcaatcgctggaagccactcaatcacatccagcctcgcgatgtgagacccgatatgttttcagcagttacccagcgtcctgcgggtctctccgccactcccgttacatgtgtttttgggtaatcgccagtcttttcacagatgaatgccagaacatggaacaaaggcttgaatgcaacgaaagcacgtcgcggtttttttatttttctacaaaagtgtcagcatcacaaattgcaaaggacaatggtccccgatgtgcctgcacagaccccgttattccaccttgtacaatactgcggtgcagccagggttccccacagatgtgtccacccttctgttgcgaattcggccacccatgtgacaaattccactttgattagcagataataatttgttactgacagtttcattagggagtyaatatcttcgtctcgcccaaactgcaatgatttcagatgtgctttacttcttttgtattttcagaatttttacagagattttatttttcaaagcagaaactcctgtgctatgtgaatgagtctatatatatatatatatatatatctttatatatatatatacaactttatatatatatatatacacgactttatatatatatatatacacacaactttataatatatgggcaacttatatatgtctttttttttagatggagtccccctctgtcacccaatctggtgtgtaatggttcaatctcggcttactgcaacctctgcctcctgggttcaagcgattctcctgcctcaacctctcatgtagctgggattacaggcacctgccaccatgcccagctaatttttgtatttttattagtgatggggtttcaccatgttggccgggctggt

SEQ ID NO: 31998 - DNA, 1292 bp, Homo sapiens
tgcattacttgtttttacgctatagttattctatattacgtataaattataatcttctaacctgagtataaatttttgaggtttagcattatagttaagagcatggactctggagctgactgccctgctcaaatcctagttctactacttactaactagaggatctcagacaagttcctgagccctggttaaggagatgataacagggttgttgatgtttaaatatgttgataaattaaagttttcagaatattcctagcatttgggaggtactgaaaaatgtcaactattctttaaaaattattatgatattttaacaccaataatgcctaacacttcaacagagtatatacttaatgtattaaacttaaatccttctggagagtcatatgtatatggagacataaaggttaatttatcattcctgaaattgcatagaaagtatttagtagatagacatttaataaagcagttttctgtaatcctcattacatgtaaaaatcaaagaaaaggaaaaaatggtggtaagaagaacaaatgactctgcattccttttgaaaatttggtatttctcttccagttgacattgtacccctcaaagttattgtatattttctttcctttcctggagttcatacttttctcatctcctttccctccgattttcttttatctcttccagtttctctctcttaatatacctacatttctttctctttctgtgttcaatcagtaagagccataaactatatcatctttcatattttatattaataactatttccacatacacaaacacattcacaattctaacatccctgaagtcatgaatataaaatgcactatattcatctcctaaaaacagaaatcctttcccctaaaattaatataacaccagataccattattagcagtaccactaatcaaagccagaatggacaaagtttttaagttttttcctttctaactcaagaactatctgggtgatatttagctcctcagttttgaagggtaaacatatactagtaacataagcaagatatttagggtaaggagagtgattatcagagamataattgcatatgttctccaacaaggagagaaataaccactccatatttgttcatatgatgtgctatgttcacactcaattcctgaaacgatgaacaaggaaaaaaaaacaaaaaaattatatttttctaccacattattaatgtatccactcacactaaaagctgaagtgttttgcatgaatgttgttttatcagtaaaacaggaaagatcttaaatgc

SEQ ID NO: 31999 - DNA, 528 bp, Homo sapiens
tttccgggggggtgcaggaggggatgcatttggcctgatttatgtacrtgctggcttagtctcacttttgaccaactataagcattttaaagtgcagctggttatgtttaaagatgccatctgtagccatgacaaaagagtcttccctgatgaagatttaattggtccataaatgtttcacaaacacaacctttgtttcttagtacagtgtgtttgttctattttgttttatttttcagtctatgaagcatggatttgaagtcagataaacccatggttcaaaccctatttgttccatttattaagctgtgtgcctccaagaaaagcttcctccaaactttccaaacctttgtttcctcatctattgaataagaatgataatatctacctcaaacagctgcaaaggttcaatgccatagtgcatctgaagttcctaccctggggcttggcataaccaagttctctataaatggcatttccctttctccttgtcaactgtttaggagacactctttaagagttaggtgt

SEQ ID NO: 32000 - DNA, 1155 bp, Homo sapiens
gactacgcaggcagccttccctggagatggctacagagaaagagggcaagttgtcttttcccacaaagtcgcagggcaagttttttttccattccccctcacctgttttccctgtgccgggatgggttttggggaaggtgaggagatggagggaacattgcgtgaagcctttgagattttagaagggtttgcttaccatggatgggagtagcagatcagtgaaattggattagaggagagatgaatagcatgccttgcattttggtccatgcatgagggtgctaaagatatgagatgtgggatctgctagtgtccagtcacatggcttaggcttagtaagtgttcgggctcaagagaaccagcagatgcctttgatcagcagttcatcaggacattggggaaaatacatcataagatctcaaatatatcttacttcaggtgggctaagagtgaatttatctccccaggaatgtcagttcttctggggaaaggaacagccctagtctggaagggaactccctgccgttccagagggatgttgccatgccagaatcatcacgttttgagagatcattgctaacttactggaaatggcagtagcccagcggaaaggggaggaattgggtctctttggaaggagctatgtgctggagggagtaattgcatattttaaaatttaggtgggcatttaaaattgtttagacagagaagggaagaattctttcatctcagagaaataattccatggggtcaatagaagtaggtaagatttaaagacacagatcagctcaaatagtccaattcagtattgctttaaaaatacagcaatatcacatttaaaatgagaaatattactcattcttttgtggacaaataattctgtaaggaatgaagtgggtgyccagaggaatagataatgagaaactgtgatcaggcaggaggaaaaaccaagaacatcataatgattccggttagttactctagcacctcatgaaaagttaagtaaattttttgaattgtgtactaagcatatttactttgcacacgtatgaacaagaaaattcctactaaatatattgttgcactcaattgagaactatgacaatctactctggagtttggcgcttccttttgaagtctccaacaaaatgattc

SEQ ID NO: 32001 - DNA, 1678 bp, Homo sapiens
cagcatcaccaataccctaggctcattctattttttctgcctatggttgcttcatggccacaagatggctgctcattctcaggcttacattcatattctaagcagaaagaggaaacagagtgatcaagaaaaagtggcatcaggaaaggaaaacttttctagaactccctagctggtgttcacttacatttctttgactagaactatgtctcctgactccttttagctatgagagactgggaaatcaatttttttaatgctgggcacattactccaacaaaatacaggtttttctgctaaaaggaagaaaggagaatgggtatggcgtaggtacctaaggcagtcagctcaggacttgagcttacctaatgcaattctttgccttctcctctccccagccttcaccattttgtaatgagaaatctagatcaagtgacttagtgtcacacagccggttcatgaatgttgaaacattatttgcatgggtatatatatgctaaaatatatttttattaataaattgaacacaacatctcagtctgaagtacccaagtttagatgacattatagcatatagaactataaacagataaatactttgcatttaaaagtaacgtcyaacatggtacctcctagaatggaggaacagccaagtctccagctgaggtggtgaaagttgtttataatatttcaaactaagattgagtttcacaagtactagaaaaataacattctccctaaataaaaagtaaagcattctagatagagctaaagcctccttgacatccactgccagtccaggaacacattctccagtccaggaacacattctacagtccaggaacactaccgtcatccagatttccttttattctcttaacagagacatacctgttcccacaaaatcaatatttagtacattgttgattgagtgaacacacacgtacacgtgtgtatttcagatagcatgaattgttctataacttttggatattttcttacccatatgtcttgaaaatatctccatgttacttagtccatttagatttatccttatacatatcccttatgtttttctagagtagacccagaaggctccagggttgcagagtctctgcactttttattttagtataaactgctctccaaagcaactgaattaacttgcactcccattagcaatgtataatggtaactgcttctcattgctccctctaacatttcatataaaaatatttttgcaaaatgaatcatgacacttttttctggccttataaaagatccagtctccactaaaaataaatggttggatagatatcacacacatacacgggtatactaacaagtatcatttatagatgtttatttagactacatctccccacattataataaactttgtggttttttattgctttattataataagcactttaatacaaatcatttttctaattttagtcagtatcttaaactccatgcttagtcataaattaagaaatgaaaatatgtacactgaatcaagattttaagttcactcacccccaccattcctcttgttccttaatatcctggacctttttgtatgagatctgggaatctgaggttaggacagttgagaatatgagagaatgtaaccacaaattgctgattagaaccagagttacacagcaaagaa

SEQ ID NO: 32002 - DNA, 1678 bp, Homo sapiens
cagcatcaccaataccctaggctcattctattttttctgcctatggttgcttcatggccacaagatggctgctcattctcaggcttacattcatattctaagcagaaagaggaaacagagtgatcaagaaaaagtggcatcaggaaaggaaaacttttctagaactccctagctggtgttcacttacatttctttgactagaactatgtctcctgactccttttagctatgagagactgggaaatcaatttttttaatgctgggcacattactccaacaaaatacaggtttttctgctaaaaggaagaaaggagaatgggtatggcgtaggtacctaaggcagtcagctcaggacttgagcttacctaatgcaattctttgccttctcctctccccagccttcaccattttgtaatgagaaatctagatcaagtgacttagtgtcacacagccggttcatgaatgttgaaacattatttgcatgggtatatatatgctaaaatatatttttattaataaattgaacacaacatctcagtctgaagtacccaagtttagatgacattatagcatatagaactataaacagataaatactttgcatttaaaagtaacgtctaacatggtacctcctagaatggaggaacagccaagtctccagctgaggtggtgaaagttgtttataatatttcaaactaagattgagtttcacaagtactagaaaaataacattctccctaaataaaaagtaaagcattctagatagagctaaagcctccttgacatccactgccagtccaggaacacattctccagtccaggaacacattctacagtccaggaacactaccgtcatccagatttccttttattctcttaacagagacatacctgttcccacaaaatcaatatttagtacattgttgattgagtgaacacacacgtacaygtgtgtatttcagatagcatgaattgttctataacttttggatattttcttacccatatgtcttgaaaatatctccatgttacttagtccatttagatttatccttatacatatcccttatgtttttctagagtagacccagaaggctccagggttgcagagtctctgcactttttattttagtataaactgctctccaaagcaactgaattaacttgcactcccattagcaatgtataatggtaactgcttctcattgctccctctaacatttcatataaaaatatttttgcaaaatgaatcatgacacttttttctggccttataaaagatccagtctccactaaaaataaatggttggatagatatcacacacatacacgggtatactaacaagtatcatttatagatgtttatttagactacatctccccacattataataaactttgtggttttttattgctttattataataagcactttaatacaaatcatttttctaattttagtcagtatcttaaactccatgcttagtcataaattaagaaatgaaaatatgtacactgaatcaagattttaagttcactcacccccaccattcctcttgttccttaatatcctggacctttttgtatgagatctgggaatctgaggttaggacagttgagaatatgagagaatgtaaccacaaattgctgattagaaccagagttacacagcaaagaa

SEQ ID NO: 32003 - DNA, 577 bp, Homo sapiens
tgcaagaatgtatcacttgctgctagagatgatttccttccttagtagcaggattccctcctattgaaagaagttgttatagtggacaaaattgggagaaagttgatttaggagctctggatttagttttaatggccaaagatagactggtttgaaaatcttattttaaaagcacattacagctatttggcaaaactggatctttttyttttcactttgcctatgtattgatctcaatataccattttcaataacatcagccattaaacttttgaatgattgtatttttttaattcttaaattgatttctattttttaggaaatagtttaactgtaagatacaacctagaattaaatctgttgcttaagaaagaaaaaataattattctaattaggaaaaataaaaatttctacagtggtcattgaatgagaattaactttaaggaaaatatttcagattgcattttatgatatgtaaacaatttaaaaaaatttatcctaccttattttagcaaggaattatgacaacttatactttaacactaatattgaaaatatagatgtttttgtcttctta

SEQ ID NO: 32004 - DNA, 1069 bp, Homo sapiens
gtattttaaataaatgagtgtaataagaaattataactggaccattataaatcttttagaatttctcttttcagattaaccttagagtcatcccagccttcaaggatctcttcatctgagccagaaaacataggctcttgggtagctaattaggatatggtatgaaaagtgttgtcatagagaagtggacaaaccatggttgtcaatttatgggttgtgaaccattagtgggttgtaaaattttagtaggagtgatcaacattttttaaaaaagaacaggatgaaatcagaatcacatgtagtaagggtaatagctcacagaactgttaaatgtgtgaaaggtatttcttagtatgagtcatgataaaacaagttggagaaatagagataaattgcctgtgggaaaatgaggaataatggcaatagctaatatttattgagttttactgtgttctagcctctgggctaaatgctttacaggtattatttcatgaaatcctcacagtaggtctgtgagataggtatttttatctttattttacagattaggtttttaatgtgtgaggaagttaattaccttgcccattgtcaaacacctagaaaatggcgaggccagcattttatcccaggcattttgattctagagccctttttctgtactcttcccagagaagggaaaatccttctcatcagagatggcttcctagaagaggcgtggcatttcagctgcactgtgtgagtaagattcactcaacagatactcaggtatgaakaagatactttaggcagagggaaaggtgtaaaagtaatggaagtgaaaagtaaagtagtttggtgtgttctgtaagagtctttcagtttggctagtgtgaaaacatagaaaagacaaactgggtccaaattctgcaggggtttggatatttggttagtaggtagtggagaaccatgaactaagttttttggttttttgtttttttttttttttgagacctggtcttactctgtcacccatgctggagtgcagtggtgcaatcttgactcactgcaacctctacctcccgggcacaag

SEQ ID NO: 32005 - DNA, 712 bp, Homo sapiens
attttcacaacaaccactaggacagaattgcaatccaacttgaatgcttatgagctattggagacacaagggtgaggttataatttatctcttctttttctttagaaaaagatcacagaagttctagtgtccrttgctttctgctcaggcttcctttacaaggtgaaaatgagactctcaaaaaggctgtaagctaagatgagtatgtgttgtctcttcccagggccccttctcatgcctggtagacgttctccttgaggaggttgtgagaggaaaggcaagcggtcttcataactacttttagctctagttttatttacatttgctttaaggggcatttatctcctgacaaagccatagggctcaagagggaagtaaacagttaaggagtgtttgtagggaagtttattcctgtgagggttcaataaataaatgttgaccaattacgataattcctagtagatggttattttatacaattagagcactgaggcaaaacagcttcttaatccattcatagcatgatcagtaatgagcaatggtacagagctatgtgaggtgacagaaagagcatgggactggatggcaggagggagagctggcttctagggctcttctgcacctaatcagggagttgggcaacttaattcacttttctggatctcaaagttctcatttgctaaactggggatgaagggaggtggagagtgaa

SEQ ID NO: 32006 - DNA, 712 bp, Homo sapiens
attttcacaacaaccactaggacagaattgcaatccaacttgaatgcttatgagctattggagacacaagggtgaggttataatttatctcttctttttctttagaaaaagatcacagaagttctagtgtccgttgctttctgctcaggcttcctttacaaggtgaaaatgagactctcaaaaaggctgtaagctaagatgagtatgtgttgtctcttcccagggccccttctcatgcctggtagacgttctccttgaggaggttgtgagaggaamggcaagcggtcttcataactacttttagctctagttttatttacatttgctttaaggggcatttatctcctgacaaagccatagggctcaagagggaagtaaacagttaaggagtgtttgtagggaagtttattcctgtgagggttcaataaataaatgttgaccaattacgataattcctagtagatggttattttatacaattagagcactgaggcaaaacagcttcttaatccattcatagcatgatcagtaatgagcaatggtacagagctatgtgaggtgacagaaagagcatgggactggatggcaggagggagagctggcttctagggctcttctgcacctaatcagggagttgggcaacttaattcacttttctggatctcaaagttctcatttgctaaactggggatgaagggaggtggagagtgaa

SEQ ID NO: 32007 - DNA, 712 bp, Homo sapiens
attttcacaacaaccactaggacagaattgcaatccaacttgaatgcttatgagctattggagacacaagggtgaggttataatttatctcttctttttctttagaaaaagatcacagaagttctagtgtccgttgctttctgctcaggcttcctttacaaggtgaaaatgagactctcaaaaaggctgtaagctaagatgagtatgtgttgtctcttcccagggccccttctcatgcctggtagacgttctccttgaggaggttgtgagaggaaaggcaagcggtcttcayaactacttttagctctagttttatttacatttgctttaaggggcatttatctcctgacaaagccatagggctcaagagggaagtaaacagttaaggagtgtttgtagggaagtttattcctgtgagggttcaataaataaatgttgaccaattacgataattcctagtagatggttattttatacaattagagcactgaggcaaaacagcttcttaatccattcatagcatgatcagtaatgagcaatggtacagagctatgtgaggtgacagaaagagcatgggactggatggcaggagggagagctggcttctagggctcttctgcacctaatcagggagttgggcaacttaattcacttttctggatctcaaagttctcatttgctaaactggggatgaagggaggtggagagtgaa

SEQ ID NO: 32008 - DNA, 712 bp, Homo sapiens
attttcacaacaaccactaggacagaattgcaatccaacttgaatgcttatgagctattggagacacaagggtgaggttataatttatctcttctttttctttagaaaaagatcacagaagttctagtgtccgttgctttctgctcaggcttcctttacaaggtgaaaatgagactctcaaaaaggctgtaagctaagatgagtatgtgttgtctcttcccagggccccttctcatgcctggtagacgttctccttgaggaggttgtgagaggaaaggcaagcggtcttcataactacttttagctctagttttatttacatttgctttaaggggcatttatcycctgacaaagccatagggctcaagagggaagtaaacagttaaggagtgtttgtagggaagtttattcctgtgagggttcaataaataaatgttgaccaattacgataattcctagtagatggttattttatacaattagagcactgaggcaaaacagcttcttaatccattcatagcatgatcagtaatgagcaatggtacagagctatgtgaggtgacagaaagagcatgggactggatggcaggagggagagctggcttctagggctcttctgcacctaatcagggagttgggcaacttaattcacttttctggatctcaaagttctcatttgctaaactggggatgaagggaggtggagagtgaa

SEQ ID NO: 32009 - DNA, 673 bp, Homo sapiens
tgaaaactgtaaagtttaactttttggaattgtaactatccmaagtgggaatgtaaactatattgaacaaaatttatttagcctgttaaaaagtcaacctaaaactatggttaattagtttatattattacatcacttttagtagagactcaacaatcagtgcagagtaagaggagctattatcaggtgagctgactgctacccatatggggctttaagataatgatgagtttaaatttcctcttagagctaagtgagaataaaactggaggcaataaatactcttggccaaagccattaaatgaaaaagctgggaattctccagctcttgacttaaattgtttgtttatcagctggcgcctagtctggagtcaagagctggagatttctatctgtgacagaactttgaaactcttgcaggacactttcatttcaacttaaggtaacttgagtttatagctttggctttaaagattactaatgatttactcatttccttaccatttaaccagagtggactttttcccaggaagggatctgtgtttatttagggcctttgtctgcggagggattaaaaggcagcccaccagcattgtgaacttgatggtcataaaaggtcaccaaaacacaccataaaaacattcttaccatggaattaattatacagtgtaat

SEQ ID NO: 32010 - DNA, 596 bp, Homo sapiens
gccacccagctcagaggacacaaatgcacacaggcatatcaactctagggagaaggagcctaggctgagtgtgtttgctcttttatctccatgattaaacagtgccttgcatttagaataagtgatcagtaaatttttgaagtgaacattgccttgtcatttcaaaaacaaaatgatagatctctgggttgtttacatggctgttgaccaaaacagctgttgagttacaacatcctaaatagtcatttccttcttttgctcaactaggaaagcatatgcacagcagtgtactcctttgcccctgtgggaaatgtatatttacaagaggagaaaaattgccacctggctgggagtgctcatggtgtttgcctctgggaaacaatcagtgcatgggcaaccaatcaatgggaggagtgccgttcttctcgggggaatccgcccgccctgagcatgtgccragattgctttgtttctatcagggggaatggctgactgcctctgtgacacaacgaatcagccatcatttcgccctggctgtgcagggaccaaggcagtgacgtccccctttatggtggcaggggcagctatggagaggc

SEQ ID NO: 32011 - DNA, 692 bp, Homo sapiens
  misc_feature (1)...(692): n = A,T,C or G
aatgttttgcatttaatatcaaggagttttagaccttcccctatcaactactgccttacgttctttttgtaagaggagtgcaaaagttcttctgactggatgattgtcaaataattgaacctggtcttaatgggcaacataaaattcccaaattctagttcctcacagagagggaaaaaaaaaagatgtgaattgtatgtctgaattatcaaaattgcactgcggagaaatagcttttacaaaagattggtttaaagcagtctatcatccctctaaattttcccttttcaggccatgagagctttacgcaatcatgtttgtggccctctcagaacagtttcctctgaatttggatgtcagccttatgccatcaacccacagtgaagcayactgtggggggagctgtgcagattattattaccagttatgaaaatgttggacttctcttctggatactcacgtactttacaaaacgcttattcaaacacacaaaaaaaatctggcttttcttaagtctatgattttttttttttttttatcttatgggcaccataaaacttttaggnaaaaggttttctccttctgcttttcccccctctgaagctaaagaggtaacttggcttgccttttcttctagcacctgggactgggacaactagaattcatttatgggaatcaatggttaacagccc

SEQ ID NO: 32012 - DNA, 692 bp, Homo sapiens
  misc_feature (1)...(692): n = A,T,C or G
aatgttttgcatttaatatcaaggagttttagaccttcccctatcaactactgccttacgttctttttgtaagaggagtgcaaaagttcttctgactggatgattgtcaaataattgaacctggtcttaatgggcaacataaaattcccaaattctagttcctcacagagagggaaaaaaaaaagatgtgaattgtatgtctgaattatcaaaattgcactgcggagaaatagcttttacaaaagattggtttaaagcagtctatcatccctctaaattttcccttttcaggccatgagagctttacgcaatcatgtttgtggccctctcagaacagtttcctctgaatttggatgtcagccttatgccatcaacccacagtgaagcatactgtggggggagctgtgcagattattattaccagttatgaaaatgttggacttctcttctggatactcacgtactttacaaaacgcttattcaaacacacaaawaaaatctggcttttcttaagtctatgattttttttttttttttatcttatgggcaccataaaacttttaggnaaaaggttttctccttctgcttttcccccctctgaagctaaagaggtaacttggcttgccttttcttctagcacctgggactgggacaactagaattcatttatgggaatcaatggttaacagccc

SEQ ID NO: 32013 - DNA, 692 bp, Homo sapiens
  misc_feature (1)...(692): n = A,T,C or G
aatgttttgcatttaatatcaaggagttttagaccttcccctatcaactactgccttacgttctttttgtaagaggagtgcaaaagttcttctgactggatgattgtcaaataattgaacctggtcttaatgggcaacataaaattcccaaattctagttcctcacagagagggaaaaaaaaaagatgtgaattgtatgtctgaattatcaaaattgcactgcggagaaatagcttttacaaaagattggtttaaagcagtctatcatccctctaaattttcccttttcaggccatgagagctttacgcaatcatgtttgtggccctctcagaacagtttcctctgaatttggatgtcagccttatgccatcaacccacagtgaagcatactgtggggggagctgtgcagattattattaccagttatgaaaatgttggacttctcttctggatactcacgtactttacaaaacgcttattcaaacacacaaaaaaaatctggcttttcttaagtstatgattttttttttttttttatcttatgggcaccataaaacttttaggnaaaaggttttctccttctgcttttcccccctctgaagctaaagaggtaacttggcttgccttttcttctagcacctgggactgggacaactagaattcatttatgggaatcaatggttaacagccc

SEQ ID NO: 32014 - DNA, 509 bp, Homo sapiens
  misc_feature (1)...(509): n = A,T,C or G
ggatgtccctaggtcagactagcagtgaaattgtctgcacagtccatccccttggctgtcctcaggggagcagggctgctgaggagcaagaccagctggccatgaaaggacacccaggsgtcttgctttggccttggactggtgcccacagcccaggcctgggcctcagggttttagctccaaatgtctcattttatatcttccccagaggtgacccatgcccatcttcccatccaggttcccagaaagcagtgccagctctactatgagcagtgaaggagcacaatgtcaaaaggaccccaaagctcaggttgactggtcggcatttccattcccgtcaggacagccacaggagactccagaattgtggccagggcaggcagtcagcaaatgaccttaatgcaccatgatggctcttgcaccatgttcacaaaggacagaccaccagtcagacctgagcaaactggcagctnggcagtcctccctggggcagggctggagacatccac

SEQ ID NO: 32015 - DNA, 509 bp, Homo sapiens
  misc_feature (1)...(509): n = A,T,C or G
ggatgtccctaggtcagactagcagtgaaattgtctgcacagtccatccccttggctgtcctcaggggagcagggctgctgaggagcaagaccagctggccatgaaaggacacccaggggtcttgctttggccttggactggtgcccacagcccaggcctgggcctcagggttttagctccaaatgtctcattttatatcttccccagaggtgacccatgcccatcttcccatccaggttcccagaaarcagtgccagctctactatgagcagtgaaggagcacaatgtcaaaaggaccccaaagctcaggttgactggtcggcatttccattcccgtcaggacagccacaggagactccagaattgtggccagggcaggcagtcagcaaatgaccttaatgcaccatgatggctcttgcaccatgttcacaaaggacagaccaccagtcagacctgagcaaactggcagctnggcagtcctccctggggcagggctggagacatccac

SEQ ID NO: 32016 - DNA, 573 bp, Homo sapiens
gaggggcaaaagaattcttcataagtgttttctcaggaaggaaaaggaagcccaagggaaagaatcagaatgtctttacacttgagtgagcaaaccctgctggtcaataagcctgttccacagaagactaaaccttcccaccacaggatgccacactgcaggggcaggtacacggagccatgcacaaagggtggggtttctatgaaaggactagaggtgggatacatggggagtcaaacctggaggaggaaaacctgctcctttaatccgtttcaaattacttttcagttgacagagaaccaaattcacaatattctgattctcctctctttcgcaaaattaataatattatttattacgaccaatgtgagaacatcagtcagcaccttaaattatttaaatgaaactattccacttgatttggcactaatgctcaaatggttttaagaggtaataatarctattgggggattttaaatgcagagttagaaaatctctgctggtactgtgctttctattaaacagaggtacaggcgcctgctgtccccatcataactgtaactcaccatgagg

SEQ ID NO: 32017 - DNA, 585 bp, Homo sapiens
tggggactctgggcagtataagcaattctatgaggtgatatggctgacttcatacacaaggtaccacactgcagggccccttcagcaccacaagagtagtgagcttcccactyataagtgagaaggtgtcaggcctgattcagcaggaggaacaataacgtgaaggatgtccctcggacaaaagtcagaatgaggccaggtgtggttgattcacagctataatcccagcactttacgaggctgaggcaagaggattgcttgagctcaggagttccagaccagcctggccaacatattgagaccttgtctctaccaaaaaacaaaattaggccgggtgcagtggctcacgcctgtcatcccagcactttgggaggctgaggcgagaggactgcttgagcccaggagtttgagaccagcctggccaacatagtgaggcccagtctctataaaaaattaaaaaaattgtccaggcgtgttgatgcacacctatagtcctagttacttgggaggctaagaggggaggatcacttgagcccaataggtcaaggctgcagttagctgtgatcatgccactgtactccaacc

SEQ ID NO: 32018 - DNA, 530 bp, Homo sapiens
cactatcatttaaccccaatttatacaatatcacagcaagaatggtcaagtcagatgagtagccctgactgacaaggtcccaacggatactaactagatcctttcrtcaataaacactgctcatcagttaataaaatggaatttacctagatgtatccctaccatatccccagaattctcaaaagcctaagaaacaaaagatcatgaaatcacgttgtggggccaaaataaaacctccaacataaactgaggagaaaatgaggattacagctattccataaccatatcttcttaagaacaaacaaaagaaacttgcatcaacataaactaaaataacaacaatgtgaagatgaatatctagcaatataatctgatatcagtaaataatggttacatgtatactgaataaaaaaaagtaaaatcaaacactaacttgcagctaatttgcctaataagtatataccacctgttagatttatttattcatttgtttattaatattgataacattctttttactagatgcaatg

SEQ ID NO: 32019 - DNA, 585 bp, Homo sapiens
gttcaactggaggaatctggctgagtagcatttctttgtttttgctctttgaattttggtcttagaaatactttaggtgaaattacttgacagtccatatttgttgtccctgtgtctggtctggacttggcagcaaaagtagaaagactgatgtgtttgagaaatgactttctttccagactctctggaaatatttaatgtctaaaatatttggattgttagaatttacaactttaatggacatgcagagagtaacaaggacttccttactatcgaatctgatctttcaaagttttattttcatttgctttattgagaaatataataaaaacacagaaaagtatataaaatatacatgtacaatttaaaaataataaagcagggaatgaacaaactatttctgcatgcaacaaaatgagtcaatttcataaacaaaatattgaggaaaggcagccagattaaaaaaaragtgcatactgtgtaattccattaatataaagttcaaaagcaggaaaaactgatctatagtgttgaaagtcagaatagcagctacctttgagagagggttagtgacttgccattcct

SEQ ID NO: 32020 - DNA, 668 bp, Homo sapiens
tagcctgagttgatatttggagtcaagaactcagtcaagatttaggttattggttgagatacaaattggggttcatcaaggataaagcagaatttgaggttcaggattgggtacagattaaggtttggggttaagactggggcttactaaagagtcaaaaaaacaatagatgttggcatggatgtgatgaaaagggaacacttatacactgctggtgggaatgtaaagtagtacaacctctgtggaaaacagtatggtgatttctcaaagaactaaaagtagatctacaattcaatccagcaatcccactactgggtatctacccaaaggaaaagaagtcactatatcaaaaagacacatacacacgtatgtttatcgcagtacaattcacaattgcaaagatatggaaccaaagtaagtgcccatcaactgatgagtggataaagaaaatgtgatgtgtatgcaccayggaatactactcaaccatagaaagaatcaaataatgtcttttgaagcaacttggatggagttggaagccattattctaagtgaagtaactcaggaatggaaaaccaaatgccttacgttctcatgtgtaagtgggagctaagcagtgggtaccaagtggtataatggacactggagactcagaagggggagggtatgaa

SEQ ID NO: 32021 - DNA, 665 bp, Homo sapiens
tttttgagatggagtctcgctctktcccccaggctggagtgcagtggcgcgatctccgctcactgcaagccccgcctcccgggttcacgccattctcctgcctcagcctcccaagcagctgggactacaggcacccgccaccacaccgtataattttttgtatttttagtggaaacggggtttcactgtgttagccaggatggtctcgatctcctgacctcgtgatccgcccacctcggcctcccaaagtgctgggattacaggcgtgagccaccgcgcccggcctctgccattatcttctattaactttgtagtttgaccttttgcttttaggtcttaaagccatttggtgttaagcaccattgttatacgtacttgagtaatgggaaaactgaggcacacagaaggtgagtaatttgaagactatacagttcaacaagtgacagagctagtattcaaaccgaggcagcctggcccctgaaactgtgttccgtagctactgtgtcatgctgcttctccattgaccaggatcggtgattcagaagttgctgtgtgcagagcctttaaatgccaatctttcactctgtcctcccaacagccctgagcagtaaggcctgttattaccagattaaagaactgaggttcccaaaagataaagtggcaaa

SEQ ID NO: 32022 - DNA, 665 bp, Homo sapiens
tttttgagatggagtctcgctctgtcccccaggctggagtgcagtggcgcgatctccgctcactgcaagccccgcctcccgggttcacgccattctcctgcctcagcctcccaagcagctgggactacaggcacccgccaccacaccgtataattttttgtatttttagtggaaacggggtttcactgtgttagccaggatggtctcgatctcctgacctcgtgatcckcccacctcggcctcccaaagtgctgggattacaggcgtgagccaccgcgcccggcctctgccattatcttctattaactttgtagtttgaccttttgcttttaggtcttaaagccatttggtgttaagcaccattgttatacgtacttgagtaatgggaaaactgaggcacacagaaggtgagtaatttgaagactatacagttcaacaagtgacagagctagtattcaaaccgaggcagcctggcccctgaaactgtgttccgtagctactgtgtcatgctgcttctccattgaccaggatcggtgattcagaagttgctgtgtgcagagcctttaaatgccaatctttcactctgtcctcccaacagccctgagcagtaaggcctgttattaccagattaaagaactgaggttcccaaaagataaagtggcaaa

SEQ ID NO: 32023 - DNA, 2383 bp, Homo sapiens
cctgggactcctctgccagagcctgagagctttctcctgcccacaggctaggggtagggcagttggaattgatccatgccttctagctagactgtgggtcccctcagtcttgggcatggtgacagcccagcatcagacagaggtcagtatcaaactagaaaatttaataaatactgtcagatttgtagacccaagaaaatataaactgccaatcacggaggaaaaaaatctctcaatgatcttatctttatatgattcccttgctgcctggagattgacatttccttggggataatctggtcataggattggtgaaggtggaagggaggcaacctccaaaggtggggccctctgctcacctgggacagggagggcctgaggtaggtgtctgtgtgggctggggaggaggatgggagcagtgcttctagatgtttccactttctcctcattagataataacgaatgggtgatttccctagtcactgcagtgtgaggaaatctacaaaattaatttcacaatacgctttacaggataggtggagaaacacatgaagtacaactgcagtgggttataaaaaacggcctttcgagttgagcaataaattcgttcaagcagccattctgaaggacaaactggctctgtatttaagaggggcattccagcacttctctagccactgggttgacaatgactcaccaaagcctctggtagccaccacaggacacccagagcatatgttttaaagctgaacaccaaactgcggacttcgggagtaagtgaactgactggtttttattttgttttactgcttttaacattacagtaactgttacaggttccagcaggctaactgggtggaaatgagtttggtttcacttagtctctctaaagagaaagcaagtcggtagactaatacctaataaaagcaaagctgccaacaattgaaattgcctaggctgctctgtgtgtcccacatgcatgggtgtgggtgccagtgtgtgtgcgtgtgtgcatgcatgtgcatgtgtgttgggatagagtggtaagaaaatgggaaataataagaatgttcagtccatagcccttcattataaaaaggtgagctgtaataaatactagtgccacatttagccaaaactttactccagccaaaggtgatattttcatgataacatcctgtgattgctttgttcttcgtcttttatgttcttcctagatgggctcagaacatacaagaattaagtacacatcttattttccagtgataatgctaccggcaaattctgttgtttgtataaacatcagccatgtttatataactaaactagtgttttgttttgtcaattcagcaagaaattagaccaaatggtggcttaatgctgcattgatttggctatcaatttgttttcacttttctgcaaaataattaatacattattaaattgaattgtgctgatgccacagttgttcttatctcaagtgtcttaaaattcatttaatttgtttttcctttggtttcattattcaaattttaacttcagttctcaagattttatctgatggaagagatggagtccattactaaggactccattgtgctccatcatgccagagttgtaaaatagatcttttaaaggaaatttactgtgattttttttctatttaagagcttcctctccagttgagcatgtaagaaaattataccaggagaatacagtaaactctatgaggcaagctataaacatgtagcattgtgattagggctggttctccttctagagacatggtaggattgcaatttcataccatccttgaagttagagagagccacgtgactcatttagccaatgaactgtgagcagaatgacatgtcacttccagctgaagctttaacaatctgagagacattcatacattttccatgtgctgtagccttatacccaaagcctgggtcccaagtgaccatgacaggcagagctccctgttgagccacagagatttagagaatggctgttaacacagcataatccagcccatcctgactaatctgatattaacatgtataataaagaattctatcaatgctgagggaagatgactagttaaggtcctaggttgcaagtctcaaaacctcttctaaggattgtagacaggaaattaaatgacttctagtccctagagttcccaatctcctaccatcccatcctaatatgacagaagtaattcytgagttgcttctgaaaccagagcttccctcagaacccttagcctgccagatggcttcttggagagccctcactcacttttctccttctgctattgctgctcattcattccagtttttaaaaattcatctttatccaggaacctcgcttctagaaa

SEQ ID NO: 32024 - DNA, 2383 bp, Homo sapiens
cctgggactcctctgccagagcctgagagctttctcctgcccacaggctaggggtagggcagttggaattgatccatgccttctagctagactgtgggtcccctcagtcttgggcatggtgacagcccagcatcagacagaggtcagtatcaaactagaaaatttaataaatactgtcagatttgtagacccaagaaaatataaactgccaatcacggaggaaaaaaatctctcaatgatcttatctttatatgattcccttgctgcctggagattgacatttccttggggataatctggtcataggattggtgaaggtggaagggaggcaacctccaaaggtggggccctctgctcacctgggacagggagggcctgaggtaggtgtctgtgtgggctggggaggaggatgggagcagtgcttctagatgtttccactttctcctcattagataataacgaatgggtgatttccctagtcactgcagtgtgaggaaatctacaaaattaatttcacaatacgctttacaggataggtggagaaacacatgaagtacaactgcagtgggttataaaaaacggcctttcgagttgagcaataaattcgttcaagcagccattctgaaggacaaactggctctgtatttaagaggggcattccagcacttctctagccactgggttgacaatgactcaccaaagcctctggtagccaccacaggacacccagagcatatgttttaaagctgaacaccaaactgcggacttcgggagtaagtgaactgactggtttttattttgttttactgcttttaacattacagtaactgttacaggttccagcaggctaactgggtggaaatgagtttggtttcacttagtctctctaaagagaaagcaagtcggtagactaatacctaataaaagcaaagctgccaacaattgaaattgcctaggctgctctgtgtgtcccacatgcatgggtgtgggtgccagtgtgtgtgcgtgtgtgcatgcatgtgcatgtgtgttgggatagagtggtaagaaaatgggaaataataagaatgttcagtccatagcccttcattataaaaaggtgagctgtaataaatactagtgccacatttagccaaaactttactccagccaaaggtgatattttcatgataacatcctgtgattgctttgttcttcgtcttttatgttcttcctagatgggctcagaacatacaagaattaagtacacatcttattttccagtgataatgctaccggcaaattctgttgtttgtataaacatcagccatgtttatataactaaactagtgttttgttttgtcaattcagcaagaaattagaccaaatggtggcttaatgctgcattgatttggctatcaatttgttttcacttttctgcaaaataattaatacattattaaattgaattgtgctgatgccacagttgttcttatctcaagtgtcttaaaattcatttaatttgtttttcctttggtttcattattcaaattttaacttcagttctcaagattttatctgatggaagagatggagtccattactaaggactccattgtgctccatcatgccagagttgtaaaatagatcttttaaaggaaatttactgtgattttttttctatttaagagcttcctctccagttgagcatgtaagaaaattataccaggagaatacagtaaactctatgaggcaagctataaacatgtagcattgtgattagggctggttctccttctagagacatggtaggattgcaatttcataccatccttgaagttagagagagccacgtgactcatttagccaatgaactgtgagcagaatgacatgtcacttccagctgaagctttaacaatctgagagacattcatacattttccatgtgctgtagccttatacccaaagcctgggtcccaagtgaccatgacaggcagagctccctgttgagccacagagatttagagaatggctgttaacacagcataatccagcccatcctgactaatctgatattaacatgtataataaagaattctatcaatgctgagggaagatgactagttaaggtcctaggttgcaagtctcaaaacctcttctaaggattgtagacaggaaattaaatgacttctagtccctagagttcccaatctcctaccatcccatcctaatatgacagaagtaattcctgagttgcttctgaaaccagagcttccctcagaacccttagcctgccagatggcttcttggagagccctcactcacttttctccttctgctattgctgctcattcattccagyttttaaaaattcatctttatccaggaacctcgcttctagaaa

SEQ ID NO: 32025 - DNA, 480 bp, Homo sapiens
atgtagttactatattttattaaaggaaattagccttatctcttattatattttattaaagaaaattattatattattcctttatatttttattaaaggattttattattattaaaggaaattagccttatctcttattatattttttatgaccttcaaagtagtgtctctgcttaaaagtgtaccctggccgggcgtggtggctcacacctgtaattccagcactttgggaggccgaggcgggtggatcacgaggtcaggagatcgagaccatcctggctaacacggtgaaaccccgtctgtactaaaaatacaaaaaattagcagggcatagtggcgggcgcctgtagtcccagctactcaggaggctcaggcaggagaatggcrtgaacccgggagacggagcttgcggtgagctgagatcgcaccgctgcactccagcctgggcgacagagcaagactccgtctcaaaaaaaaaaa

SEQ ID NO: 32026 - DNA, 538 bp, Homo sapiens
tttttgtttgtttgtctttcggataatatgcattctgactgaagtgagaagaaatctcattgtgtttttgatttgcattttcgtgatggattggggataatgaggaatttttagtgtgtcttctgggcaactgtatgtctcagtttcacaaatgagtcttcgcagccttcgcccatttgttttcatgctattgagttgttgggagttccttatgtactgtgactattcccccatgaacagatgtatggtgatccaatcattgctcccatcctgtaggatgccccttctgtatgttgagttttctatggtgtggtgaagcactttagtttgatatgattccattctctatttttgatggtgtttactgtgttcttgcagtcactttgagaccatcattgcacacacggacgccatggagctkcttccttgtgatctcttctgctatttttatcgtttcacatctgacactggagtttggtgataaataatccacttgtaaaatcctttgtgtggctattcagatttccccaacctagtt

SEQ ID NO: 32027 - DNA, 623 bp, Homo sapiens
tctgcctgagtttggacattaatattaatttctactcacatttagtagataatatttacttccatagcaaaatgtcagatggcctataattacaagacaaaatacagcagccttgttctaataacctcaaagtgacttattactacaattgatccttgctcattggccttactaaagggaaggaagtagtgtcattaatgcaaaagaatagagaactataatcagtcctatcaaatcaaactctacttaaacacaaaatctgtggaaacaacccaaatccagtgtacttctgcattattaagaaaacatttaagaataatagagttcagaataatatatatactggcttaagaaaaaactactyaagataaaaagactatctgtaacatttcatgtttcttcaaactaatattttaataaacacaatattttttaatgttccaaattaatgtctattttacatttattttgactttgaaatgcactctacatgttttgcaacaatgtcgttatcattccctcattttactgcagcttaagagtaaataactggattaaaaatttctttgttctcgttaaaacaaaatataatatttacaatttaaggtgttactctatgaaaa

SEQ ID NO: 32028 - DNA, 736 bp, Homo sapiens
agagatgatgtctcactacgttgccccagtgaggtcttgttacgttgctcaggctggtctcaaactcgtgagctctggcttcccaaagggatggaattacaaatgcaagccactatgcctggccaagattggtcctttcaatgagctcacatcttattttaaaaaagaaaaactaattaaaagataaagtctgagtaacaaatgggttcacgttaatgattattaacttgggtacttctattcttaaaagaaaaattgtttatatatgtgtactgatgtttaaaaaggtacagttaagagtaaacctttctttttttttttttttgagacagtctcactgtcacccaggcttgtgtgtagctgcccaatcacatctcactaaagcctcaccctgccagactcaagggatcctgctatgtcagcatcccaagtagctaggaatacaggcatgcaccatcatgcctcattttttttttttttttatttttagtagccatgtggyctcactatgttgcccaggctgctcttaaactctgacgctcaagtgagcctcctgtcttgtcattccaaaaggatggaattacacaggcttaagccattgtgctcagccaagattttaccttcaattagcacacatcttatttcagaaaaaaataataataaagtctgggaagaaaatgcattgaagtatggataaaacaaacttggcacaggttgttgagcctgggtaacagtt

SEQ ID NO: 32029 - DNA, 802 bp, Homo sapiens
ttttttcaggggggcccaatgtaatcactagggtccttatacacagaagagggaggcggaagatcagagtcagagagaaatttgaagatgcagcgctgctggctttgaagatggaaacaagccaccagccaaggaatacagcctctagaagctgcaagagacaagaaaatggattctcctttataccctccagaaagaaatgcagccctgctagccccttaattttagctcatttagaacttccgacctaaataagtgagactcatttagaacttccgacctccagaactgtaagaaaatacrctaaatgtgtgtctatttgttaaagaagctgcagaaaactaatacaattaatgctcaataaatgttggttgcatcatgaaactacattgaatcagaaggttgcttaatgcatatggaatttgagcaaagcaaggacaaaaatctgcagggttgtgtcctccaggctctgctgagtcagctgaaccatccatggatgccccttctgctcacttcggtagccacgtcagccatgctcggaggtgtagcccatggacggtgctagatcaacagtgccagttcctcgtttgcaaacttctccctttcaggtcttcctgcatatcactcccttctgcaattttgttgctgttgtttgaaaattatagaagtaatatatgcacctatcatttttttcttgcaatttagataaatattatagagtattataaacatgaaaatagatgtcccccatctcctaacccctcatttctgatcttcagaggtaaattactgctctttctgt

SEQ ID NO: 32030 - DNA, 819 bp, Homo sapiens
tgtccctctagtgaaagagggagtcatgcttgccccatgagctggagatagccccacaggtcccaagccacagcctccccctcctgcgtgtgtgctgtgcccccaatgacaggcttctgacccagcccctggttttccagggcctcctaagtcctgaatactgcagctttcttggctgaggccttgcctcccattccctgagatcccccatgcttctctccaggctggctctgattccctgttttcagccattttctgggtctctcaggcccattaaatacattctcagcctgatataaccaggaatgcccctccctgcgccgggccaacttttttggtgtcaacccaygcccagatcaaatgaagtttgcaagattccttgagcctagtttggctggctggcccatctctcaggcccaagtagagtctctgccctaaatcactgcctgacagagtcctcatctgggctcaaagtggaccgaggtaaatgtgtgggattgatgttatgcgggagagttgggaaatgcctttcgcaggagggtaggtaggggctccataaacctatagatctgattctgtagacgagagccagacaatgcccaggagtaaatgctaagctagagcctggactcttccctgcaagaatcactaagcaagagttagggatcaatttcacgaggttgtatgcatgtgtgtgcctgtgtgcattttactggaggcatttccatcacttttattaataacagtatttactcagaacttactatgtgccaggcactgctctaagcactgatgcatttacatatattaactcattta

SEQ ID NO: 32031 - DNA, 705 bp, Homo sapiens
agttgacctacagacctagggtctgaagcaagggcactctagctaatctacagaccggcagcttgaaaataggtgcaactccaaataaacgtaataaatatatactcttcccttacaacagctctagttccactagttgtaccaatcagtgactcctgttttcagctactacatttgtgggggtttggacgtagcatgatttcaggaaaagcttagccaatacagtgagaaatctcttttatgccttataacagctctcaagtccttgggtggaaagacaccttcaaaatccacggatgtgaattcagacttgtaaatacagacagaacaggccccaccctttctctggcattctctgtctcttggtttctctctttcctgaatgcgaaaaggggtggctccaaaacmcacccagagaagagtctctttcctctgatttgctgctgtctccttccaagacccagtgctctcacgttctctcagcagcagtagattcttttcaaaccaccctccaaaatgcagccagagttgtcttctgagaacaaccaaaacacagccagagttgtcttcagagtggttcctgagaccatcctgtctgatcatgtcagtcgtatgcttgcaatccttcagtgtctctccacaagtatttagtgaaagtttccatgtcttaaggcacaaagctcttcatgacctagggcttgccag

SEQ ID NO: 32032 - DNA, 1350 bp, Homo sapiens
tgtcccctttggattggtgtgagaatttccatgtgggattgcaggttcatagggcatatacttctctgcagtgtcgctgcaccagtccccaccccaccagcccaaactccagcaccttctactcyctcactgcctctccagccccattttctgccacccccacctgaagttcccattaactgacatgctcactaattcaatgaaggtgagtgtttttgaaagccatctagcccaatcctcttgttttacagactaggactctagggcccagagaggggacatgagtggcccaacttcccaaagcttagaaaggcttacgtaggggagcctctgtctcttcataaacgctactcaaaagcaaaagttttcttccacttttcagaagcagaaaatagagttccagagacacaaagttagaaactttgggtctcatggaacattagaaggaaaggggaaaattgtggctcatttatccctgaaattgccttcttccctgatgtgtaaggttaagcaagggctgcatgcacctacagggtaagcaagggctggatgctagtgtcagaggaatctggggggttgtgctgcatttgggctcacttcatgtcatgtacagcagcaacatccagggtcagatggcccacaccactgcactcacctggccccagtaccagcctctgaggcctgggtgatctgatgggcctttcgtcagcctgatctttgtgaggattcagctagggatagcatatttagagcaaagtttgtctccatgtagtcgtgaattatccccacaaatcaaagctggtttgggaaacccaaggcaaaacttaagtcaggttaagcttataaaattgtttggggacaacagtaatataaatgagcaggctctttaatacatttaaaatgaagtcattgcatttttcatggggttttcatttcctgttccccctctgcctccagggcatcaatcccacactgagaaaatgtttgggaagcagaggctagagtggagaagaaagtgatattgtggctggcttccccagggcgcctcttcagtcagatctacccacaggggcccctacagtggtccccacactgagtaaaaaaagagaattacccatttggactcaggaccactgggtgcccaccgtcttgcacacctagactgtatcactttccagcttctgcaaggagagccagggcatttgtctcctgtgcggcccatactttatgcaagagcaaccacattccacctccacacctccacctccccttagctccccaaatccactcacaagttacaatttaataggcagatctaatctcaccaagattccaaagtattccagtcaa

SEQ ID NO: 32033 - DNA, 1350 bp, Homo sapiens
tgtcccctttggattggtgtgagaatttccatgtgggattgcaggttcatagggcatatacttctctgcagtgtcgctgcaccagtccccaccccaccagcccaaactccagcaccttctactccctcactgcctctccagccccattttctgccacccccacctgaagttcccattaactgacatgctcactaattcaatgaaggtgagtgtttttgaaagccatctagcccaatcctcttgttttacagactaggactctagggcccagagaggggacatgagtggcccaacttcccaaagcttagaaaggcttacgtaggggagcctctgtctcttcataaacgctactcaaaagcaaaagttttcttccacttttcagaagcagaaaatagagttccagagacacaaagttagaaactttgggtcwcatggaacattagaaggaaaggggaaaattgtggctcatttatccctgaaattgccttcttccctgatgtgtaaggttaagcaagggctgcatgcacctacagggtaagcaagggctggatgctagtgtcagaggaatctggggggttgtgctgcatttgggctcacttcatgtcatgtacagcagcaacatccagggtcagatggcccacaccactgcactcacctggccccagtaccagcctctgaggcctgggtgatctgatgggcctttcgtcagcctgatctttgtgaggattcagctagggatagcatatttagagcaaagtttgtctccatgtagtcgtgaattatccccacaaatcaaagctggtttgggaaacccaaggcaaaacttaagtcaggttaagcttataaaattgtttggggacaacagtaatataaatgagcaggctctttaatacatttaaaatgaagtcattgcatttttcatggggttttcatttcctgttccccctctgcctccagggcatcaatcccacactgagaaaatgtttgggaagcagaggctagagtggagaagaaagtgatattgtggctggcttccccagggcgcctcttcagtcagatctacccacaggggcccctacagtggtccccacactgagtaaaaaaagagaattacccatttggactcaggaccactgggtgcccaccgtcttgcacacctagactgtatcactttccagcttctgcaaggagagccagggcatttgtctcctgtgcggcccatactttatgcaagagcaaccacattccacctccacacctccacctccccttagctccccaaatccactcacaagttacaatttaataggcagatctaatctcaccaagattccaaagtattccagtcaa

SEQ ID NO: 32034 - DNA, 576 bp, Homo sapiens
tctaagtgaagtaacttatgaatggaaaaccaaacagcgtatgttctcactcataagtgggagctaagctatggggatacaaaggcataagaatgacacaatggactttggggactcaggaggaaagagtgggaagggggtaaggtataaaagactataaatagggttcagtgtatactgctcgggtgatgggtgcaccaaaatctcacaaatcaccatgaaagaacttactcatgtaaccaaataccacctgttccccaaaaactatggaaataaaaaatttttaaaaaatctcatttgtcaggaagaaaaaaagaacaagtgttgtggacttaatgtttgtgtccctccaaaattcattatgttttattccttgcccacagtgtaatggtattagtaaatggggcctttgggaggtaattaggtcatgacgctgaggctctcatgaatgaaattagtgctyttataaaaggaatcccagagagctttccctttccgcctatgtgaagatgcaatggggagtttgcagtctgcaatctggaagagggctgtcaccagaaccagaccttactggta

SEQ ID NO: 32035 - DNA, 1315 bp, Homo sapiens
actaatacaacttccaaaaagatatattgaaatattaaccctcaatatctcaaaatrtgatcttgacaatttccaagtaagatctttgcagatttaaccaagttattgatgaggtcattagagtaagccctaatacaatatgattggtgtccttataaaaagtggaaatttggacatagacccacacagagggaagaaaatatgaagatacagaaagaagaaattcaagtgactggagtgatgcatttataaactaaggaatacccagaattgctagaaaacaccttaaaactagaagaggcaagggaagattctcccccagagccatgagagaaagcatggccctgatgacaacttgattgaggatttctaacctccagaactggaaaacaacacatttctgttgttttatgccacctggtttttggtacttcgtcagagcagccctgggaaacagatgtctgtcatactgcctccatccatgtgaggccattgtgaggtcacagctatcttgagcatagctgtcttttagtctgatctcagaagaagaaaactattttcctttctattaacaatggaatggttgcatccataatcccccatggcacaattgattctaggttattaaatttgatgatatgtttctgggggtacaataaaaggcaagtcaacacaaggagtaatttacaaccattgtccaggccaagacctattctagattctttaccagaatcttcatgacccagagaagcttactattttttccagcagcatcccctaacacactccatctgtgagaaaatgactttcacctcacttcagtctaaaacccatctcctgagccttgccctgacctcttaccagaatgactgaaaattaaaatgtttctactctgcagaagaaaccacactcctatcaattcaaagcatgtgatctatccctgtgaccttaacaaaacaaacttgtaaaattgtaatagtacatttttcagtttagattagaaaaaaaatcttgcagtccagtcttacaatttgtcttctggtgatgatgtgaaaatgatcaggatataataaaatgtaaaaccatgttattagtccataatcatcgagttgagatccagtaaagacagaaattgagaagtctggtagtttttatcattaggccagtgaccaattccagaaaaagtgactcaatgactgagcagtgttcttgacagcttcagagtcagggggaagaatttgaatcctggggcccttctttttttgtgattgggaccctgaaagactgcactgctggaataaaggtgcaccagaag

SEQ ID NO: 32036 - DNA, 543 bp, Homo sapiens
attttgttactttaaatggctcccaagggtagtgctgaagtgctgcatagcgttcctaagcacacaaaggctatgttgtgccttatagagaaaatgtgtgtgttagatgagcttcctttaggcatgagttcgagtgctgttggctgtgaattcaatgttaatgagtcaacaatatggtacgttcagaaaaagaaaaatcaccrgtctgtacatgaggccacttaaaaagtgctgatgtaatatctatattgtgtaatgaagctatggaaaagatggaaaatggctacttgtgggttcgtgagataatgacttaaaaagaagcatagtggacaatgtttttgtaggctgaaagctaaagaaatttacagtcatattactcagggtttatgaaaatattaaacccctctagctagtgctggttggcttgaagcttttaaaaggcaatacacctaaaaaatgttaaagtttcaggcaaggcacgttttgcaaatccggaatttacagaagaatttttaaaatacctgcttagtgttataggaaaac

SEQ ID NO: 32037 - DNA, 543 bp, Homo sapiens
attttgttactttaaatggctcccaagggtagtgctgaagtgctgcatagcgttcctaagcacacaaaggctatgttgtgccttatagagaaaatgtgtgtgttagatgagcttcctttaggcatgagttcgagtgctgttggctgtgaattcaatgttaatgagtcaacaatatggtacgttcagaaaaagaaaaatcaccggtctgtacatgaggccacttaaaaagtgctgatgtaatatctatattgtgtaatgaagctatggaaaagatggaaaatggctacttgtgggttcgtgagataatgacttaaaaagaagcatagtggacaatgtttttgtaggctgaaagctaaagaaatttacagtcatattactcagrgtttatgaaaatattaaacccctctagctagtgctggttggcttgaagcttttaaaaggcaatacacctaaaaaatgttaaagtttcaggcaaggcacgttttgcaaatccggaatttacagaagaatttttaaaatacctgcttagtgttataggaaaac

SEQ ID NO: 32038 - DNA, 534 bp, Homo sapiens
ctggaagaggggctagagagagggactgtgaagatggtgccaagccaggtgaggcaatggtgggagggagggagatgggtgacaagattcaattcctgaactgtcaaaggtgaggtctctgctggtctcaggactccattctcggctctaaagacccaggcaagcagatgtcatttgaaggccagaaatttgggaagacataaaatcaatatttattgagcaactactgtgttccaggaaccatcctttatgaatgaggttgctatgctatccccattttacaggtgatgagactgaggctcagagggtggagagcaccaaatcgagcatcaaatccmggtcagaaatctggtgggtttagctccgaagcctgtgctttccacagcaccgactgccctcaggcgtcacattaaggacgcacagagtaaactggactcatgacagctttcatgtgagagcgatctcactgcacttggctttttagtaagaggcaaaagatttatatgatctgaagagaaaccttttttaggaaaa

SEQ ID NO: 32039 - DNA, 1293 bp, Homo sapiens
ggactgtacacttaaaaagggtttacatggtaaattttatgttatgtatgttatcacaataaaaaatcaatttaaaaagtatctgataatttctaatggtctcaggatacaatgtcttttcctcagggagatactcaagggtccgaagaatgtggtttcaggccaggcgcagtgactcatacctgtaatcccagcacttttggaggctgaggaaggagaatcgcttgaggccaggagcttgagaccagcctgggcaacatagcaagacctctgtctctacaaaaataagaaaataaaacaaaatgtaaaactcaatgggttaaaaaaaaactcagaaggttttaaagattggggtaaaggaatgtggtcccaatcttttgttttgttttgtttgagacggagtctcgctcttcgcccaggttggagtgcagtggcgtgatctcagctcactgcaacctccgcctcccaagttcaagtgattctcctgcctcagccttccaagtagctgggattacaggcacccacgaccacgcccggctaattcttgtatttttagtagagatgggggtttcaccatcttggccaggctggtctcgaactcctgacgtcgtgatccacccacctcggcctcccaaagtgctgggattacaagcgtgagccaccgtgcccagccgtgtggtcccaatcttcagcaacaacctcacctcccacctccttgcctgctgcccacatgcacaccatatcccaacaaatctgttccaaaatcgccacgccttctcatgactccttgccctgtacatgctgttccttctctctgggatgcacctctccctctaccaatggctgggaacatcttaagacccatttaaataagtcatctcctctgcaaagccttcacacctccacacacttggcacccgatgtgaccttcttctcaaaggcacaggccatgtctttgtcccctaggtctccccaaggcctagcagacactcagtgaatgtttattaactgtttaatgaatacragttttgtcctcatcctgggggagcttgacaagacctacataaatgaagtaattcatttctaaaaagtgtgatgcaatctagaggtagaatcgcaacttcaacaagagagagatctttgtgggtcacggaggagggcaagtctggggagggataagccttccaggtagggacatcaatgacagcaaagctcccccaaccttttccagagagagaaagatgagatccaggctaaggcttttcccaggctccagcttttgcacactgtcca

SEQ ID NO: 32040 - DNA, 965 bp, Homo sapiens
ttcagtgtccttatgtatcaaacccggacaagaaaatatcttttctttcagtggctctaaagagaagggaaatatatgttctcaaagtatactatgcttacttgtctgagaaaagtttccaaatcagtcttgacttcctggagaaaactacttccaggggcttgggtgactaaatatagaaggcagggagaatgagtccaaagaaagagtagggtgactcctaggtttctgcctagggctactgagtacttttcctaagacagaaaatcgagtaggggagcagaatcaatagtagatcgtgtcaggaaggtaaatttaatttttaaaaaatgagtaggcagggtgcggtggctcatgcctgtaaccccagcactttccgaggccgaggcagacggatcacctcaggttgggagttcgagaccagcctgaccaacatggagaaaccccgtctctattaaagatacaaaattagccgggcatggtggcgcatgcctgtaatcccagctacttggaaagctgaggcagkagaatcgtttgaacccaggaggtggaggttgcagtgagccgagattgcgccgttgcactccagcctgggcaagaagaatgaaactctgtctcaaaaaaaagagtaaagtttaaagttccagtggtccatccagatgttaatatatgtcggaggcacttggtatggtatgtaagagaaagatttgtgtcatgctgtatgacacaattgagggttatgtaccaagcagagtttgtgttaactcatttaatcttcacaacaaccctatgaattaagaactgtcagtaactgttttacagatgaagaaactgagatacaactaggtaaggagcaaatttgtgagttattagcatgtagatattggttaaatcataccagtgaaatggacccatgtcgtcttgtcatttaccttaagatagatactgggctgttgaaatattta

SEQ ID NO: 32041 - DNA, 965 bp, Homo sapiens
ttcagtgtccttatgtatcaaacccggacaagaaaatatcttttctttcagtggctctaaagagaagggaaatatatgttctcaaagtatactatgcttacttgtctgagaaaagtttccaaatcagtcttgacttcctggagaaaactacttccaggggcttgggtgactaaatatagaaggcagggagaatgagtccaaagaaagagtagggtgactcctaggtttctgcctagggctactgagtacttttcctaagacagaaaatcgagtaggggagcagaatcaatagtagatcgtgtcaggaaggtaaatttaatttttaaaaaatgagtaggcagggtgcggtggctcatgcctgtaaccccagcactttccgaggccgaggcagacggatcacctcaggttgggagttcgagaccagcctgaccaacatggagaaaccccgtctctattaaagatacaaaattagccgggcatggtggcgcatgcctgtaatcccagctacttggaaagctgaggcaggagaatcgtttgaacccaggaggtggaggttgcagtgagccgagattgcgccgttgcactccagcctgggcaaraagaatgaaactctgtctcaaaaaaaagagtaaagtttaaagttccagtggtccatccagatgttaatatatgtcggaggcacttggtatggtatgtaagagaaagatttgtgtcatgctgtatgacacaattgagggttatgtaccaagcagagtttgtgttaactcatttaatcttcacaacaaccctatgaattaagaactgtcagtaactgttttacagatgaagaaactgagatacaactaggtaaggagcaaatttgtgagttattagcatgtagatattggttaaatcataccagtgaaatggacccatgtcgtcttgtcatttaccttaagatagatactgggctgttgaaatattta

SEQ ID NO: 32042 - DNA, 965 bp, Homo sapiens
ttcagtgtccttatgtatcaaacccggacaagaaaatatcttttctttcagtggctctaaagagaagggaaatatatgttctcaaagtatactatgcttacttgtctgagaaaagtttccaaatcagtcttgacttcctggagaaaactacttccaggggcttgggtgactaaatatagaaggcagggagaatgagtccaaagaaagagtagggtgactcctaggtttctgcctagggctactgagtacttttcctaagacagaaaatcgagtaggggagcagaatcaatagtagatcgtgtcaggaaggtaaatttaatttttaaaaaatgagtaggcagggtgcggtggctcatgcctgtaaccccagcactttccgaggccgaggcagacggatcacctcaggttgggagttcgagaccagcctgaccaacatggagaaaccccgtctctattaaagatacaaaattagccgggcatggtggcgcatgcctgtaatcccagctacttggaaagctgaggcaggagaatcgtttgaacccaggaggtggaggttgcagtgagccgagattgcgccgttgcactccagcctgggcaagaagaatgaaactctgtctcaraaaaaagagtaaagtttaaagttccagtggtccatccagatgttaatatatgtcggaggcacttggtatggtatgtaagagaaagatttgtgtcatgctgtatgacacaattgagggttatgtaccaagcagagtttgtgttaactcatttaatcttcacaacaaccctatgaattaagaactgtcagtaactgttttacagatgaagaaactgagatacaactaggtaaggagcaaatttgtgagttattagcatgtagatattggttaaatcataccagtgaaatggacccatgtcgtcttgtcatttaccttaagatagatactgggctgttgaaatattta

SEQ ID NO: 32043 - DNA, 965 bp, Homo sapiens
ttcagtgtccttatgtatcaaacccggacaagaaaatatcttttctttcagtggctctaaagagaagggaaatatatgttctcaaagtatactatgcttacttgtctgagaaaagtttccaaatcagtcttgacttcctggagaaaactacttccaggggcttgggtgactaaatatagaaggcagggagaatgagtccaaagaaagagtagggtgactcctaggtttctgcctagggctactgagtacttttcctaagacagaaaatcgagtaggggagcagaatcaatagtagatcgtgtcaggaaggtaaatttaatttttaaaaaatgagtaggcagggtgcggtggctcatgcctgtaaccccagcactttccgaggccgaggcagacggatcacctcaggttgggagttcgagaccagcctgaccaacatggagaaaccccgtctctattaaagatacaaaattagccgggcatggtggcgcatgcctgtaatcccagctacttggaaagctgaggcaggagaatcgtttgaacccaggaggtggaggttgcagtgagccgagattgcgccgttgcactccagcctgggcaagaagaatgaaactctgtctcaaaaaaaagagtaaagtttaaagttccagtggtccatccagatgttaatatatgtcggaggcacttggtatggtatgtaagagaaagatktgtgtcatgctgtatgacacaattgagggttatgtaccaagcagagtttgtgttaactcatttaatcttcacaacaaccctatgaattaagaactgtcagtaactgttttacagatgaagaaactgagatacaactaggtaaggagcaaatttgtgagttattagcatgtagatattggttaaatcataccagtgaaatggacccatgtcgtcttgtcatttaccttaagatagatactgggctgttgaaatattta

SEQ ID NO: 32044 - DNA, 965 bp, Homo sapiens
ttcagtgtccttatgtatcaaacccggacaagaaaatatcttttctttcagtggctctaaagagaagggaaatatatgttctcaaagtatactatgcttacttgtctgagaaaagtttccaaatcagtcttgacttcctggagaaaactacttccaggggcttgggtgactaaatatagaaggcagggagaatgagtccaaagaaagagtagggtgactcctaggtttctgcctagggctactgagtacttttcctaagacagaaaatcgagtaggggagcagaatcaatagtagatcgtgtcaggaaggtaaatttaatttttaaaaaatgagtaggcagggtgcggtggctcatgcctgtaaccccagcactttccgaggccgaggcagacggatcacctcaggttgggagttcgagaccagcctgaccaacatggagaaaccccgtctctattaaagatacaaaattagccgggcatggtggcgcatgcctgtaatcccagctacttggaaagctgaggcaggagaatcgtttgaacccaggaggtggaggttgcagtgagccgagattgcgccgttgcactccagcctgggcaagaagaatgaaactctgtctcaaaaaaaagagtaaagtttaaagttccagtggtccatccagatgttaatatatgtcggaggcacttggtatggtatgtaagagaaagatttgtgtcatgctgtatgacacaattgagggttatgtaccaagcagagtttgtgttaactcatttaatcttcrcaacaaccctatgaattaagaactgtcagtaactgttttacagatgaagaaactgagatacaactaggtaaggagcaaatttgtgagttattagcatgtagatattggttaaatcataccagtgaaatggacccatgtcgtcttgtcatttaccttaagatagatactgggctgttgaaatattta

SEQ ID NO: 32045 - DNA, 965 bp, Homo sapiens
ttcagtgtccttatgtatcaaacccggacaagaaaatatcttttctttcagtggctctaaagagaagggaaatatatgttctcaaagtatactatgcttacttgtctgagaaaagtttccaaatcagtcttgacttcctggagaaaactacttccaggggcttgggtgactaaatatagaaggcagggagaatgagtccaaagaaagagtagggtgactcctaggtttctgcctagggctactgagtacttttcctaagacagaaaatcgagtaggggagcagaatcaatagtagatcgtgtcaggaaggtaaatttaatttttaaaaaatgagtaggcagggtgcggtggctcatgcctgtaaccccagcactttccgaggccgaggcagacggatcacctcaggttgggagttcgagaccagcctgaccaacatggagaaaccccgtctctattaaagatacaaaattagccgggcatggtggcgcatgcctgtaatcccagctacttggaaagctgaggcaggagaatcgtttgaacccaggaggtggaggttgcagtgagccgagattgcgccgttgcactccagcctgggcaagaagaatgaaactctgtctcaaaaaaaagagtaaagtttaaagttccagtggtccatccagatgttaatatatgtcggaggcacttggtatggtatgtaagagaaagatttgtgtcatgctgtatgacacaattgagggttatgtaccaagcagagtttgtgttaactcatttaatcttcacarcaaccctatgaattaagaactgtcagtaactgttttacagatgaagaaactgagatacaactaggtaaggagcaaatttgtgagttattagcatgtagatattggttaaatcataccagtgaaatggacccatgtcgtcttgtcatttaccttaagatagatactgggctgttgaaatattta

SEQ ID NO: 32046 - DNA, 573 bp, Homo sapiens
ttgaaatgttataatggctttactatataataatagctgtacagttgacccttaagcaacatgacttggaaccatgcaggtccacttccaaatggatttttttccacctctgccacccctgaggcagcaagaacaatcttttctcttcctcttcctcctcagygaactcagtgtgatgacaatgaggatgaagacctttatgatgatcaacttcaacttaatgaatagcaaatatattttctctttcttatgattttatcaataaggtttttgccttttcctttgaacaagatagaaaatcattagagaaatctaagcagagcagtgacataatatgccttatgttttactttgatagcaatgtcaggaatacacagcaagagtgaaagctaggagatacattaggaggttattggaataaatgtgacaattttacaataatccagatcgttttaactaggtggtaacagtggaaatgataagaagttgctggatcttggatacatctccaaagccaagctgagataatttgctgataaattagtaagagtagtacataaaaaagggggaggg

SEQ ID NO: 32047 - DNA, 573 bp, Homo sapiens
ttgaaatgttataatggctttactatataataatagctgtacagttgacccttaagcaacatgacttggaaccatgcaggtccacttccaaatggatttttttccacctctgccacccctgaggcagcaagaacaatcttttctcttcctcttcctcctcagtgaactcagtgtgatgacaatgaggatgaagacctttatgatgatcaacttcaacttaatgaatagcaaatatattttctctttcttatgattttatcaataaggtttttgccttttcctttgaacaagatagaaaatcattagagaaatctaagcagagcagtgacataatatgccttatgttttactttgatagcaatgtcaggaatacacagcaagagtgaaagctaggagatacattaggaggttattggaataaatrtgacaattttacaataatccagatcgttttaactaggtggtaacagtggaaatgataagaagttgctggatcttggatacatctccaaagccaagctgagataatttgctgataaattagtaagagtagtacataaaaaagggggaggg

SEQ ID NO: 32048 - DNA, 724 bp, Homo sapiens
gccagcaagggaaatgccagacgcttataaaaccattaggtcttatgagaactcactcactatcatgagaagagcatgagggaaaccacccccatgatcaattcacttcccatgaggtccgtttctcaacatctggggattacaactcaagatgagatttgggcggggacacagccaaaccatatcagtcttgcatgtgatctgattgatttttcatttaattttcagaagtcagtgccttgagtgcttaactttgcacccagggttctagttacttctggatgcttatctttcttttggactataaactcctggaaggcagatgcttatctagcaacccttcaagtttcactcatgcttgcttttgcactagaataaatcagtacactgttgttgacaattctgctcagctatctcactgttggcgtgcagtggcttttttttttttttttttgcatttatctttccaagtgtgccagtttcaggcctcccaaactcaggcacccggcataggcaggtctccaggtagactccaagagttaacaggtgagagccactgcctgctcagcagcaaggttcctgccttcccttttaggtaactcagctgaaacagatctctttcctgaggacactcccagaatgtttattgttctatcamctcctgcatcacagattccacagtaccagcatttcttttgagggaaaagaataaaaacataaggca

SEQ ID NO: 32049 - DNA, 656 bp, Homo sapiens
tgcatgactgtatatatgtgtgtatatatatgcacatgggcagaatacagaatgtaaggatgttaatagtgatgggagattatgggtaattaaaattttctcctttakgcttacctgcaggttcaaattttttctatttaaagcatattaatcgtattttttttaatgaaaacaaaacacaaaaaaggaactgagatgggtatcaggatttggagtacaaagctaggaaatgaaaaaaccagaagtgagaccaagagaaaaataacgaaagaaggcaagggggagagagagcagtcaaggccaagaccccaggcagccagttatctatgactggcttctctgcttacaatgagatgggtgaccacagctgaaaggcatagacaacagttacccaactgaagtactatcttaagaacattaagcatgtgtattgggtgaactggctcaacaattttttataatctgggttaattttttttaagtttctttctttaaaagagtacctaaaatttaaagcttcttttaatttgaatctctttagaactactaaattgagatatttaattcttctaaaggaaatccttttaaaactgcagcttggcttaatttagtaatttcacttatggaataaaggatcagttgcagaacttattttc

SEQ ID NO: 32050 - DNA, 801 bp, Homo sapiens
aaatgtgttgtattaaattcttttagttattagataaaatgcaccatttttyaaaatactaaaagatttggactctcctaagatttctaatatcaatataagaaagctagtaaaaagttccaccttgaagtgcagagggcaagtgatgattgacaaaggtgggaggtgtttgaggaagacgaggctgggagaggtcaagctaattgatatggtttggatttgtgtccctgcccaaatctaatgttgaattgtaatccccaatgttggaagagaggcttggtaggaggtaattggatcataggggtagacttcccccttgctgttcttgtgatagtgagtgagttctcatgggacctggttgtttaaaagtgtgtagcaggggagaaggatcatcatggtacatgggaggcaagactagtttgcagctctggacacagcagcgtgcggaggctcacattgtgaatttaagctccagatcaactgcaagaacaaaccagcaatcctgaaaggacccacagacctctgaaggaagcgggctgctcctgcaggacccaggagacaccccaaatatattctgtgagtgccctaacggtggaggtgggaaagggagacccttgtctccagaacacacaatcccactggagaagctgaaggtctgtttgtgggagacgtttctgaccttgcctggagctgagtcaatttagagagccaagtgaaatacaggggtagaggaagcagcagaaaggccctgggagcttgctgggtctccaggcagcccattcccacctggcaccacaggga

SEQ ID NO: 32051 - DNA, 801 bp, Homo sapiens
aaatgtgttgtattaaattcttttagttattagataaaatgcaccattttttaaaatactaaaagatttggactctcctaagatttctaatatcaatataagaaagctagtaaaaagttccaccttgaagtgcagagggcaagtgatgattgacaaaggtgggaggtgtttgaggaagacgaggctgggagaggtcaagctaattgatatggtttggatttgtgtccctgcccaaatctaatgttgaattgtaatccccaatgttggaagagaggcttggtaggaggtaattggatcatasgggtagacttcccccttgctgttcttgtgatagtgagtgagttctcatgggacctggttgtttaaaagtgtgtagcaggggagaaggatcatcatggtacatgggaggcaagactagtttgcagctctggacacagcagcgtgcggaggctcacattgtgaatttaagctccagatcaactgcaagaacaaaccagcaatcctgaaaggacccacagacctctgaaggaagcgggctgctcctgcaggacccaggagacaccccaaatatattctgtgagtgccctaacggtggaggtgggaaagggagacccttgtctccagaacacacaatcccactggagaagctgaaggtctgtttgtgggagacgtttctgaccttgcctggagctgagtcaatttagagagccaagtgaaatacaggggtagaggaagcagcagaaaggccctgggagcttgctgggtctccaggcagcccattcccacctggcaccacaggga

SEQ ID NO: 32052 - DNA, 1172 bp, Homo sapiens
tgttctttcattttggttatcatgtgtcaggaaaagtaagttctgaaaagagccactctaatttgcatcaagcagtttgaaaatggccttttgtggcactagcattggccacagcatcctgtatcamatgaggtgccctcagtccaggatcccaatgagaaggcagtcagcacaatgcaatgatctgtatagcaaatggaatgttctaaggtttctcaaaatcaagattcctgacaataaaggaaatagtaaatattttcagggcttttttttctgaatgaaataaatattacctgcagtagatgttactattgtgtttttattttaaaatggttaccagggacatatataaattgttctctatataggatgaccagatttcgcaaataaaaatatagaattcctaattaaattgaatttcaaacaatgaataattttaatatgaataggttccagaagtatcaaataatttttaatagcagtatgtcccatgtagtatatgtctcatgctatatatggaacatacttacatccaaaaaaattattcattgttttctccaaaattcaaatttggctgggtatatattttatctggcaaccatatttctgcagttcattaaaagttgtattttgggccaggcgcagtggctcacatctgtaatcccagcactttgggaggctgaggtgggcagatcactttaagccaggagtttgagaccagcctgaccaccatggggaaaccccatctctactaaaaatacaaaaattagctgggtgtggtggcagatgcctgtggtcccagctactcaggaggctgaggagggaggatcgctttagcctgggaggtagaggttgcagtgggctaagatcacgccactgcacttcagcgtggggtgaccaagtgagaccctgtctcaagaaaaaaataaatcgtgtttagttgacatgtagatttaatttacatttcaataatgaaatcagtgttgtcttttttcttctgtcattttcaagtaccaggatttcctgcctaaacaatttgcaatgtgtgtctgtttctctgcccatctcactatgctcttagatgcagagttacaaatatattctagttttatttctggttccaaagaagacagattttacaggtgtaatcagttttgtgctttatattaaaa

SEQ ID NO: 32053 - DNA, 1152 bp, Homo sapiens
actctgggaaactcatttttgacactacatccttgggctgaactgaagaaccctgtagtgtccttcctgccagcaaagctttggaggcatcaacaggcctgttttctaccgtaagatgcctggagagagaaggggagtgggagagaggaagcaggtaggagggcaggagttgagaggtgaggagcagtcatgttctttagtgggatttgagaaaaggggtttctgttgaacccgtggctggcattgaagtctcttccatgaccaatggaggaattgtacctgcctaatgtccacttaaacagagggctttgctctgcagaaagttaagatgcccagctctaaccttgggcaatgcgaaggctcctggcagctgggcaaggcaagagaagccaactgcagatgcccycacccatctctaaaagcggagtcaggctgacacacccaggccctccgcaggcccaccaaggaggaaggtatgcaaccagctacctgttgcttggcagattcatcctggaagcaggtatgctggatgtaataggccccaatggcctggtacttctcatcctgggagctcaggtactgcacagccttggggatggtcagcccactgcactcgatgtcctcactgcagatcctgtgaagaataggcagtgggggtggttacggggtgggctgggagccctgctgagggggctcagaattcctcccagcacactaagctgccacagcctcatctgccctctggagagccagaacaaggcagcccaggcccacttggagaatacccctgggaacagctcctctcctccagaggagggaaggctacacccactggatttgccccatgtgagaatagtgagcccctggtcacagttaatgtcctagcaggtatgttatctctccactgaggaaaaactcctccctattccctgaggggaagcttcccacctaccttgccatctctcttgtttgtgtctggtattaggaaaatggaagacaatggccatgatcctatccatccatccatccatccatccgtccgtccgtccgtccgtccgtccatccgtccgtccgtccgtccgtccgtccgtccgtccgtccatccgtccgtccgtccatccgtccgtccatctgtccatccatccgtccgtc

SEQ ID NO: 32054 - DNA, 1913 bp, Homo sapiens
tggtgacggtattggacgtctggattgttctgtcactaggggttgggtctagggcgggccacgtttggactgcgagcccgggcctgaaaggaatccctctgttgccggcgccaccctgtttaaccctgatgcaatacatcttgccctttgctgtttacctcggggcaaatatttaacctttccattttttgcactgacttaatgagtctcggtgtctaccacagggcttgacacatagcagacatccgatatctgtttgtgaatgctcaagcccgtcagcgtgtctgtctcctaggggagtcgtgttctcagacttgtcagcatttcagcacccagttatgacatgtcatgtgggctactactggtaaaaattgagcatccagatgagtgcatttttcacttttaaaggtaaattgaaatagattgaagattatttccattataatgctgctcactctcttgagtctgatgtgctgtcataaatggaagagaaaagggtggaggttgtagggtacatgttatttggctcttgttctagtaatagcttttgatttcatcttgggggatgacattgggctgataatcaaggtgtcctgaccttcctgccaaggagcaggcttgaggccaacttaggtccaagggactgattctgtcatctggactttgaatgmtgaatagtgacctgagaataagggaaaaatccatcacagccaatgcacccccatggcatgccaggggaggaagctctggtttctgccttcttcaagtcttgttcttcagtcgtttcatagattatatgaatttcccacttctttccaacaaactctttttttttccttaaacggtcagtttctgttgcttaagaccaaagcaccttaactgcaggagtcacagctgaagattgggaatatgtaacaccacctagcttctctgggaagcaattcagtagattgtgttcagcactaaagaatccttagtctacctattattttaaagatgaagaactaaggttccaagaagttcagtgaccaagtcaaggtcacatagccagattcacaggatctcagagttaaaagggaactcagagtcattcatcaaacttttcatctgatatttaatctccctctgaaatagcttcagcaagtgctcatccaaaaaaaaaatgtgtgaacaccctcactgatagcaagaaatttctctgggcaactcatttctcttccacatgacatcccctcagagagccaaagactgctatcaccaccaagatttttcttttccaggacaatgttccatttcctacagctgttcctcatgtggcagggtttgaggcctttaccatacaccatactggccactgtcctctaaatgcattctggtctgtgttccttggagcatgtgtccgtaacatggaacagagcacccagctgtaggctactggtgcagagtgggtggatcaccactacccttattctagagaaaatgagttcttaggtcttaagttcctctaattcagcctgaggtcaaattagcttgtttgttcttgtcagtcacgttacactcgtactattcactaagctatcctcagttacttttacctgtccctctcatatttgtgtaagtgggaaacttagattcagccttcatttcaaccttacagtatctttttggatcctgatattccctgctcctgtaccctcctccccaacccacctctatacctacacacagctttgcagtttccgcaattttctaagcatgtgctctctcctcatctaagttctttacacaaatgtgtgcattctaaaaccctccctctaatcgctttagcccaggagttcagaccagctcgggcaacgtagtgagaccccatctctaaaaaaaaaaaaaaaaaaagtaatataattagctgggca

SEQ ID NO: 32055 - DNA, 1913 bp, Homo sapiens
tggtgacggtattggacgtctggattgttctgtcactaggggttgggtctagggcgggccacgtttggactgcgagcccgggcctgaaaggaatccctctgttgccggcgccaccctgtttaaccctgatgcaatacatcttgccctttgctgtttacctcggggcaaatatttaacctttccattttttgcactgacttaatgagtctcggtgtctaccacagggcttgacacatagcagacatccgatatctgtttgtgaatgctcaagcccgtcagcgtgtctgtctcctaggggagtcgtgttctcagacttgtcagcatttcagcacccagttatgacatgtcatgtgggctactactggtaaaaattgagcatccagatgagtgcatttttcacttttaaaggtaaattgaaatagattgaagattatttccattataatgctgctcactctcttgagtctgatgtgctgtcataaatggaagagaaaagggtggaggttgtagggtacatgttatttggctcttgttctagtaatagcttttgatttcatcttgggggatgacattgggctgataatcaaggtgtcctgaccttcctgccaaggagcaggcttgaggccaacttaggtccaagggactgattctgtcatctggactttgaatgctgaatagtgacctgagaataagggaaaaatccatcacagccaatgcacccccatggcatgccaggggaggaagctctggtttctgccttcttcaagtcttgttcttcagtcgtttcatagattatatgaatttcccacttctttccaacaaactctttttttttccttaaacggtcagtttctgttgcttaagaccaaagcaccttaactgcaggagtcacagctgaagattgggaatatgtaacaccacctagcttctctgggaagcaattcagtagattgtgttcagcactaaagaatccttagtctacctattattttaaagatgaagaactaaggttccaagaagttcagtgaccaagtcaaggtcacatagccagattcacaggatctcagagttaaaagggaactcagagtcattcatcaaacttttcatctgatatttaatctccctctgaaatagcttcagcaagtgctcatccaaaaaaaaaatgtgtgaacaccctcactgatagcaagaaatttctctgggcaactcatttctcttccacatgacatcccctcagagagccaaagactgctatcaccaccaagatttttcttttccaggacaatgttccatttcctacagctgttcctcatgtggcagggtttgaggcctttaccatacaccatactggccactgtcctctaaatgcattctggtctgtgttccttggagcatgtgtccgtaacatggaacagagcacccagctgtaggctactggtgcagagtgggtggatcaccactacccttattctagagaaaatgagttcttaggtcttaagttcctctaattcagcctgaggtcaaattagcttgtttgttcttgtcagtcacgttacactcgtactattcactaagctatcctcagttacttttacctgtccctctcatatttgtgtaagtgggaaacttagattcagccttcatttcaaccttacagtatctttttggatcctgatattccctgctcctgtaccctcctccccaacccacctctatacctacacacagctttgcagtttccgcaattttctaagcatgtgctctctcctcatctaagttctttacacaaatgtgtgcattctaaaaccctccctctaatcgctttagcccaggagttcagaccagctcgggcaacgtartgagaccccatctctaaaaaaaaaaaaaaaaaaagtaatataattagctgggca

SEQ ID NO: 32056 - DNA, 1249 bp, Homo sapiens
tgcattagcacacataactgggaaattaatgtgtagaaccagcttcaggcacaatgagatccaatagagaaatggtatcctgagggctctatcactgtctccatttcttggctcggctttcctctgggaacgtgctttattctcagacaggatcatttcacacagttggaaagatgctgccaatgacctcagccccgcattgttgtggcttatgaacatcaaagaaaaagtgaccctytttatcatagcgtccatgtggccagtctcagggaagactctaattgtctttgcttgcgtcacaagttgatccattaaccgattattgtggccaggttgatgaataactctgattggcagtctccctagggagggtgagataccgtaattaactcatgtcaggcccaattggatgctaagcagggaaaaaacagattgtttgcttgtttttcacaggaatggataaggaaaggacaatgggtaacttgttttttattttacttttccagtaaaatttttctttaatgaggacacatcacattttatcactttttaagagaaaattttatatatatatatatatatatattcattatcatgagggtaatatttaggagagataaaagtccaggatgagctgaagtctgccaaaaattctaagaatactcagaaagggctcttttataaagttatattagtaacttagagatagaagaaggtataggtttgctacctggagccaagggtgtaatgctcatggtgaatacagaaaaaagagaacagaaatgcagataatgttttatgtctatggtttctgccaaagagaattgtcttttaattttctttttctttcttttttttttttgagacagagtcttgctctgtcgccaggctggagtgcaatggcgcgatcttgactcgctacaacctctggctccctggttcaagggatcctcctgcctcagcctcccgagtagctaggattacaggtgtgcgccaccacgcccagctaatttttgtatttttagtagagatggggttcaccatgttggccaggctgatcttgaactcctgacctcgtgatcctcccagctcggcctcccaaagtgctgggattataggcgtgtgccaccgtgcctggccaattgtcctttaattttaaagggtgggaccttgcttagccagaatggcagactgaaatggaggccttgattgtaagcaattgttctccactcatgtcccctgatcactt

SEQ ID NO: 32057 - DNA, 624 bp, Homo sapiens
atagccatgctaattttgtaaaagaaaacccaaaagagggatctaatctatcagacatgaagtcatactaaaaattacaccactatactactgatgtggaaacaggaaatggaccaaataacagaatacagagaccggaaacatacaaaattatataggagaactttctccggtgttaacagaagagactattgaatagcattaggaaaactagatcactaaatggagagaaataaagatagcttctacttcaatccatttatgaaggtgaactacaaacaaattaaagacytaaatgtgaaggtaaaacagctaactgaaggaaatgtagtgggatatctttgtgactttgggttgggaagaatttcttaaacaaaactcccttgcaacacacacatatatacacacacacgcacaaactataaagaaaaagaataatggattttgctacatccaaattaatgatttttgtttactaaaaagcaccataggttaagttaacaaacatgataggttaggagccttctgtttctagcaatataatggaaaaaaatatcctgaaaacccagtgctgcaaaacacctaaaaaatgctagataaaatatttttaaatgtaattttaaa

SEQ ID NO: 32058 - DNA, 629 bp, Homo sapiens
ttcccatcctcccatctgctactggcagtctagctccctgctgtgttgggtagaggtggggctcaagcccagcttacttatggaaatagcaggggcgtgaatactatggagcctccaaaatccctcatggacaggcccaaacccacctctttttcagcaacttccggaagtccatcagctccttcctgaggtctgaaaaaggagcaggaatgaggcctcagtcccaggtgggatgactgagggttgatgcagagcttttctgtgttgtccatgctgacaactgagcctttggaaggggctctcttgaagactggtggtgatccacaaggtgttcatggtrgctcaaccaggcagggaacaccaggaaaggagtagcctatcccccacaggcccccaaggaggtttctgacaaatctgcctaccttcctgcggttccctgtgcctcttccgattcttccgaaagccaactgcaacatccagggaggagaggaaggagtcgatgtggacaagcagggagagaagcaagacatgttgatggtcttcctgagaaactgatggagtcccagagccctgctctccccactgtcctctaaggcgtggacgatcccagcaagagggatggagcaggg

SEQ ID NO: 32059 - DNA, 629 bp, Homo sapiens
ttcccatcctcccatctgctactggcagtctagctccctgctgtgttgggtagaggtggggctcaagcccagcttacttatggaaatagcaggggcgtgaatactatggagcctccaaaatccctcatggacaggcccaaacccacctctttttcagcaacttccggaagtccatcagctccttcctgaggtctgaaaaaggagcaggaatgaggcctcagtcccaggtgggatgactgagggttgatgcagagcttttctgtgttgtccatgctgacaactgagcctttggaaggggctctcttgaagactggtggtgatccacaaggtgttcatggtagctcaaccaggcagggaacaccaggaaaggagtagcctatcccccacaggcccccaaggaggtttctgacaaatctgcctaccttcctgyggttccctgtgcctcttccgattcttccgaaagccaactgcaacatccagggaggagaggaaggagtcgatgtggacaagcagggagagaagcaagacatgttgatggtcttcctgagaaactgatggagtcccagagccctgctctccccactgtcctctaaggcgtggacgatcccagcaagagggatggagcaggg

SEQ ID NO: 32060 - DNA, 528 bp, Homo sapiens
atacaagaggcaggaaaaaagacagatgttgggtaagtaagatcttggctcacttgattggtaacagtgaataaacagtccggagagacttccccaccacccagctcttactgggtcaaatctcgggttcctcaaggagacaagactgtaagagagtttgcagagaagagatgagggtggttttaggtaggaaatgtcagtatggtatggaactggggaacaggattccaggataattccctggtttaaaaataaaggaagtttctgtaatatgttgtacctgataaatctgcctgtgttcttttattttctaaccctcaccctccagaatggccatcaggaaagctgaaccagaaccgagtttaggtccaggttctcgttctggcaaatctttctccttaccttcttcctccacccctccacytatgccatgttttcccttagccactccccagctcggtggaggaaaggcaggcctaactaggtagcgtcttcccgactttgctcaatgatagctgggtgggtcta

SEQ ID NO: 32061 - DNA, 528 bp, Homo sapiens
atacaagaggcaggaaaaaagacagatgttgggtaagtaagatcttggctcacttgattggtaacagtgaataaacagtccggagagacttccccaccacccagctcttactgggtcaaatctcgggttcctcaaggagacaagactgtaagagagtttgcagagaagagatgagggtggttttaggtaggaaatgtcagtatggtatggaactggggaacaggattccaggataattccctggtttaaaaataaaggaagtttctgtaatatgttgtacctgataaatctgcctgtgttcttttattttctaaccctcaccctccagaatggccatcaggaaagctgaaccagaaccgagtttaggtccaggttctcgttctggcaaatctttctccttaccttcttcctccacccctccacttatgccatgttttcccttagccactccccagctcggtggaggaaaggcaggcctractaggtagcgtcttcccgactttgctcaatgatagctgggtgggtcta

SEQ ID NO: 32062 - DNA, 528 bp, Homo sapiens
atacaagaggcaggaaaaaagacagatgttgggtaagtaagatcttggctcacttgattggtaacagtgaataaacagtccggagagacttccccaccacccagctcttactgggtcaaatctcgggttcctcaaggagacaagactgtaagagagtttgcagagaagagatgagggtggttttaggtaggaaatgtcagtatggtatggaactggggaacaggattccaggataattccctggtttaaaaataaaggaagtttctgtaatatgttgtacctgataaatctgcctgtgttcttttattttctaaccctcaccctccagaatggccatcaggaaagctgaaccagaaccgagtttaggtccaggttctcgttctggcaaatctttctccttaccttcttcctccacccctccacttatgccatgttttcccttagccactccccagctcggtggaggaaaggcaggcctaactaggtagcgtcttcccgactttgctcartgatagctgggtgggtcta

SEQ ID NO: 32063 - DNA, 519 bp, Homo sapiens
ttaaataaatagaaatggaaataatatagttattggttgcaggcaaatttagcacatcctatatatgtggaacaaagtctttcaaacaaaatcatcgtgtgtacatacttcaacattttatttcactttgtgtgtgtgtgggtgcggggggtgggtgggtgtgtttgtgtgtgtattgaaaaggtccttttctgacaagttctacattacctagctttcacatgccacattctgatgcataatatacatgttcttgtggcggggggarcttttgaagtgtaaaaagcatttaaagaaatttttttgttttgttttagagataggatttctctctatcacctaggctgaagtatattcgtgcaattatagctcactgcagccttgaacttctggaatcaagtcatccactgaccttggcatcccaagtatctgggactatcagcccgtgtgaccatgcttagctaatatttcaaactgtttttagagatggtaactcgctatattgcgcaacttggtctt

SEQ ID NO: 32064 - DNA, 2490 bp, Homo sapiens
catggagctgtcatttcctatgataacaaggacttgttctaaaacacctcctgaaggacttgcccgaggctattttaaagtgaactttttaacaattatgttgaattactacgcgaaaataacaagacatatagtatagtaaatatataaaccagtaacatgcttctttactatcaagttttatgtaccatacacaactgtgtgtgctatacttttatacaagtggcagtgcagtaagtgtgtttacaccagcatccccacagacacatctgtaaggcattgcactatcaytttacgaaggctacgacatcattgggtgatagaaattttttagctcccttataattttatgggaccactgtggtatgtacggtttgtctttggccaaaacattgttatgccgcacatgattgtatttagaatatagagttgctctccttacacacatttttggctgacataatctcctggattcaaatatatttaatgtttcaatactttataatgattatgcttattgatgctcctatgttgtcctatatttgggcaatgggagcaaatgcaggatagcttttaagtgttcttgacatgacctctaatctttgacaattttcttatttctggtatgaaaatatttgtattatttttatcatataactggaatcagctatttctcctagaaatcttcatccctactagtgagaaaaacaggggacattaatctcactgctattaaattcatcataatttctatcctctttcaggacataaacctaaaaaatacacatatgtatatattttagtgataaaatatatacattcattctgtttttctagatcatatctaagcttctggaattttacttatgtgattttatatttatgtgccattgatacttacaaccttgattaataactgtgttgtcttaattaatggtttgcttcaacgtacgtgccagtttcaggagacaataccagcattactaacaacaatatgattagaaaaaaacaggtttttttggtggtgttgttttgggttttttgttgttgtttgttttttgtttgcttgcttttttgagacagagtttcactcttggttgcccaggctggagtgcagtggcgcgatctcagctcaacacaaccactgcctcccgggaccaagtgattctcctgcctcagcctcccgagtagctgggactacaggcatgtgctgccatgcccggctaattttgtatttttagtatagatgtggcttctccatgttggtcaggctggtctcaaactcctgaccgccttggcctcccaaagtgctgggattacaggcataagccaccaggcccggccaaaacatgttttttttttttttgtaaatgttcttcttccttttaagacatattctatcaatcagattagtgtttcaaaatcactgagataatggctctctattgcactatgcaaacaacttgctacagttaaacttgtattttactccattttttaagatttactcttttaatatattttgttttacaattacggaatgcatgttcatgtgcctaaagttaattccataaaagtccaccttttttttttttttttttttttttgagacagaggacagagtctcgctctgttgcccaggctggaatgcagtggtgcgatcttggctcactgcaacctctgcctctagggttgaaacaattctcaggcctcagcctcccgagtaactgggattactggcacatgccatcgcaccttgctaatttttgtattttttgtagagacggagtttcaccatgttggccaggcctgtctcgaactctctacctcatgtgatcctcccacctcggcctctcaaagtgctgggattaccttcatgagccaccatgcccagcctttttttgtttgtttgttctctttacgctgctttttatttccctttctctctctctgtctcacacacacacaattctatctgaattttgatttatccttttattttgatttgtttgcagatttgtttttaaataaaacacacacacattatacatgtattatctcatccatccatttttgaataaatggaaacacactagtaacaatagtatccatttcactttatactttattccagaaatttgttatgtatatagcttgtcttcattcttttctaaactccagagtattacattgggtgaatatactatagtttattcaattaatctttattaaaggatttttggattttatacagttcttcactattggtttaaagatgttctttcttagttttattcattgtatgtttaatttctttgtattttttgttttattaatctatttgcctgatctatcatttttttcttatagctatgtttgttaacccataaatttgtttcgtttttataattacttccaagacgttctaaaatttcagcctatattttccattatactgaatagtcaatgaataacttggttacaatgttt

SEQ ID NO: 32065 - DNA, 681 bp, Homo sapiens
agtgctgaaattgtaccatgaatatatgtagcttaattatgtgtaaggcccataatgatctcagagtaatataggattatgctttctaaaataaagaatgagaaagaattccatactaattattattttaatgttaattgatagaaatctgtatgcctggaaacataatgcctgtggatacaaaatagcatggtagcttggttatctcgagtaaaaatgcaaccaaatataaaaataatagaaattaaagtgcttatgtataatttctaaacaatattatggaattaatagaagataaaaacattctatttaatatatttatagcatataatcattactcacattaagactatacaattttttggataataattctgcattttagaattatatcatattctccaactttttgggtgggagagtaacatctattgttttatttaataatcactttccttgaatttattaaaacattaattaacttakttgaggatgtatctgttaactaatacattaatggagcataagccctacgagaattactgccccagttagaaataaaaataataattaagaaatattccttgtcttcataagctacttatgaaataatggttaaaatttacaaagtgcttatgagcgttctgcactattctgtgtgctttaacatattaaattatg

SEQ ID NO: 32066 - DNA, 1190 bp, Homo sapiens
tctattcttagagctgaggaaggagacctgatctcttacctgttaagttctgttctgtcacagaaatgatccagttctttctattcttagcactagtctaaataaaatacgttttaattgaccaaggtttaggtaacaatgtcaatggaatggaaaacattgggagtcataatatagagccattgactgtaattgttggttgggtttccaaatctttgtcagcacaggcaatcttcaccagggaaagcagataaacacatgtatatgttgatacatacaacttgaagtaaagagacctagactgagctgattattaaaaaatgtcctaatgacatattttgctcaacatatttttgctaaccccacagaattcactgtgtgaaattgctaatcattcattttaaaacatttctagacgttgactcatgacttctggaatttgctttatcaagacactggaaaactatttgagaggcaacatgaagactgcttggcatactgtgtagtggaagaatgacacaaataaaattagacgtggtttccacaatgagtccttgagatgagggtttcgtactccagtagaattcaacgaaaatattttcactcattttggagtaataaaattaagcactcttttcaacaggagagcccctaactttaattctggcctggcgcagtggctcatgcctataatcccagcactttgggaagccaaggcggtggatcacttgaggccaggagttcgagaccagcctggccaacatggtgaaacccatgtctactaaaaatacaaaagttagcttggcgtggtggcacaggcctgtartcccagctactcaggagggtgaggcacgaaaatcgcttgacccggaggctgaggttgcagtgagccaagatcgtgccattgcctccaacctgagtgacagagctctgtctcaaaaaaaaaaaaaaacacaatttaaaaaaagagaacttaaaatttataaataaataagtaaataaataaatcaaataaattcaagttgccaagctctgataaatgacatccacatgcagggcaatggatttttttactttagaagccaatgtcccagtcccatatgaagatgcttattctgaatatgatacagtagggcacaaaatataataggtacttccacgtactgtcactgacgtttgattacagatgc

SEQ ID NO: 32067 - DNA, 544 bp, Homo sapiens
tcactgtgtcttcccatggtcatccctcgatctttgtgttgtctgtgcccgaatgtttttcataaggacatcagttgtattggattaaggcccacccataggacctcatttttaccttaattacccctgtaggccctttcccaaaatgtaggcatattctgaggcactggtagtttggaaagacacaattcagcccacagcactccagataaccacgcctctactgtaacatttgcatgatttccaagaatcctggacaactgtaagcagcactttgtaaccagcagtttaaagagtcctgcctaaaggttcatgactggctcacttctcattggttggtagtcactttgtgaaaattctaagctcaraaaagaagacaaagaaaatgtgagagagattaatactggccaagaaacaactataaggtagacagttgtttcacattttttgtatatggttgtgggtatgttgtaacaaatcataatttaattcatgtagatgcagaaaatgggctattttagttttcaatggctgtaaaaaaata

SEQ ID NO: 32068 - DNA, 512 bp, Homo sapiens
atttgcattgtgcaattgtttgcaaggctgctatatggaggaagtgtaatattgataatttccctgtaacttgtcaagtgaagtactactcttgttaattgtggcacaatttggcaactgcactattaagtcaagrttccaataaaatagggtggaagcctaagaccagcatcttttaatcacaaactagaatatggtttatatcttaacaggtgtccattgaacctcaaatttcattctaaacactagatggatggatggcttaaattaaactctttccttccatgtgttacatggtcaattttttctgctgatgcttggcctttccattctttggtactgcagtacttactgacttcttctgcagagggtccttgtgctgtttcttatttatgcctcagttatttccaatatcttaagctacattaaattaataaaatgttacttgaagattcataatgtagtaaaatcactcagagaaactaattttctaaatcactcaaaaatagtct

SEQ ID NO: 32069 - DNA, 1067 bp, Homo sapiens
gggtcatccattgaygcttatattttggagtgaggaattatacagttaacatttataactagccaaagttttatgacaaggattttcaaaatttcgtatctctgctttctaagtagaaattatatgctttctattgatattttttaaatatgtatttaatttgcataagtgcattttatattatttcaaaccatagaagctcagcataggctatcatagcctagcattttatagaggtaagacattcatcctcttacacagtaagtgttttttaatatttagtactgtaggttctcattattctttgactaatttgcaaatatatggtagcagccaagatgatttagatcttattaagacataaaacattaaagaagtttaaaaagaagcataagctgataaacaatatcaccaaaaaaataggataaaaaatcctcataagggcatcaatatttgttatttaaagcctactaatttttagttagaatttaaagaagaagaaacagcattaaccaaggtacagtaaaaaatctgagaattttcaaatttgaatagaggaaagagtatactataagaatttgaactaatagaagctgtctacaaaatgtaggctgggcttgaatagattgttttcaatatcaatctccagattaaacagcaacaacaactaaacaagttttagtcattttgtaaaaaggattccagtgaaagaacattatcagaaagaagccagtgtattttattacctgaaacacataggtagtagtaaatgtaggtcagatgttgtggtccataccaaatgggtaaaatgaaatgcagatagtactctttctactacagaagtaaaactgaatgacaaccaagttgtattaggaatgctgccatacaaagaccatttttagaaagtggtgtatttatttttagaaaatcttcaagaaggcgggtgtctttattaaacatacggctaccatcagaaggcaaagatggagataagtgaacaatgcaacaaaaccaaaattgctgtgggtataaaatcttcattgcgggcataaaatagggaagataat

SEQ ID NO: 32070 - DNA, 1067 bp, Homo sapiens
gggtcatccattgatgcttatattttggagtgaggaattatacagttaacatttataactagccaaagttttatgacaaggattttcaaaatttygtatctctgctttctaagtagaaattatatgctttctattgatattttttaaatatgtatttaatttgcataagtgcattttatattatttcaaaccatagaagctcagcataggctatcatagcctagcattttatagaggtaagacattcatcctcttacacagtaagtgttttttaatatttagtactgtaggttctcattattctttgactaatttgcaaatatatggtagcagccaagatgatttagatcttattaagacataaaacattaaagaagtttaaaaagaagcataagctgataaacaatatcaccaaaaaaataggataaaaaatcctcataagggcatcaatatttgttatttaaagcctactaatttttagttagaatttaaagaagaagaaacagcattaaccaaggtacagtaaaaaatctgagaattttcaaatttgaatagaggaaagagtatactataagaatttgaactaatagaagctgtctacaaaatgtaggctgggcttgaatagattgttttcaatatcaatctccagattaaacagcaacaacaactaaacaagttttagtcattttgtaaaaaggattccagtgaaagaacattatcagaaagaagccagtgtattttattacctgaaacacataggtagtagtaaatgtaggtcagatgttgtggtccataccaaatgggtaaaatgaaatgcagatagtactctttctactacagaagtaaaactgaatgacaaccaagttgtattaggaatgctgccatacaaagaccatttttagaaagtggtgtatttatttttagaaaatcttcaagaaggcgggtgtctttattaaacatacggctaccatcagaaggcaaagatggagataagtgaacaatgcaacaaaaccaaaattgctgtgggtataaaatcttcattgcgggcataaaatagggaagataat

SEQ ID NO: 32071 - DNA, 1067 bp, Homo sapiens
gggtcatccattgatgcttatattttggagtgaggaattatacagttaacatttataactagccaaagttttatgacaaggattttcaaaatttcgtatctctgctttctaagtagaaattatatgctttctattgatattttttaaatatgtatttaatttgcataagtgcattttatattatttcaaaccatagaagctcagcataggctatcatagcctagcattttatagaggtaagacattcatcctcttacacagtaagtgttttttaatatttagtactgtaggttctcattattctttgactaatttgcaaatatatggtagcagccaagatgatttagatcttattaagacataaaacattaaagaagtttaaaaagaagcataagctgataaacaatatcaccaaaaaaataggataaaaaatcctcataagggcwtcaatatttgttatttaaagcctactaatttttagttagaatttaaagaagaagaaacagcattaaccaaggtacagtaaaaaatctgagaattttcaaatttgaatagaggaaagagtatactataagaatttgaactaatagaagctgtctacaaaatgtaggctgggcttgaatagattgttttcaatatcaatctccagattaaacagcaacaacaactaaacaagttttagtcattttgtaaaaaggattccagtgaaagaacattatcagaaagaagccagtgtattttattacctgaaacacataggtagtagtaaatgtaggtcagatgttgtggtccataccaaatgggtaaaatgaaatgcagatagtactctttctactacagaagtaaaactgaatgacaaccaagttgtattaggaatgctgccatacaaagaccatttttagaaagtggtgtatttatttttagaaaatcttcaagaaggcgggtgtctttattaaacatacggctaccatcagaaggcaaagatggagataagtgaacaatgcaacaaaaccaaaattgctgtgggtataaaatcttcattgcgggcataaaatagggaagataat

SEQ ID NO: 32072 - DNA, 547 bp, Homo sapiens
aggcacggtggctgacgcctgtaatccctccattttgggaggccaaggcgagcagattatttgaggtcaagagttctagaccagcctgaccaacwtggtgaaaccccatctatattcaaaatacaaaacattaaccaggtatggtggtgcatgccagtaatcccagctacttgggaggctgaggtacgagaatcatttgaaccccaaaggcagaggttgcagtgagccaaaatagcaccactgcccttcagcctgggcatcagaacaagactctgtctcaaaaaagaattaattaattaattaattgtaaataaatccacccttattctttctgcaaaaaataagcaagatctaaagtataaattaaagctttactttcaaagaagagaataatattaaaatcaacagcaatgattcttttaatacttttgctatctaactacataaaagttaatatattgaagatgagtatttcatcacagctttttgtagtagagaaaaataatttaatttaaatatttgttttaaaataatattagcatcctga

SEQ ID NO: 32073 - DNA, 547 bp, Homo sapiens
aggcacggtggctgacgcctgtaatccctccattttgggaggccaaggcgagcagattatttgaggtcaagagttctagaccagcctgaccaacttggtgaaaccccatctatattcaaaatacaaaacattaaccaggtatggtggtgcatgccagtaatcccagctacttgggaggctgaggtacgagaatcatttgaaccccaaaggcagaggttgcagtgagccaaaatagcaccactgcccttcagcctgggcatcagaacaagactctgtctcaaaaaagaattaattaattaattaattrtaaataaatccacccttattctttctgcaaaaaataagcaagatctaaagtataaattaaagctttactttcaaagaagagaataatattaaaatcaacagcaatgattcttttaatacttttgctatctaactacataaaagttaatatattgaagatgagtatttcatcacagctttttgtagtagagaaaaataatttaatttaaatatttgttttaaaataatattagcatcctga

SEQ ID NO: 32074 - DNA, 547 bp, Homo sapiens
aggcacggtggctgacgcctgtaatccctccattttgggaggccaaggcgagcagattatttgaggtcaagagttctagaccagcctgaccaacttggtgaaaccccatctatattcaaaatacaaaacattaaccaggtatggtggtgcatgccagtaatcccagctacttgggaggctgaggtacgagaatcatttgaaccccaaaggcagaggttgcagtgagccaaaatagcaccactgcccttcagcctgggcatcagaacaagactctgtctcaaaaaagaattaattaattaattaattgtaaataaatccacccttattctttctgcaaaaaataagcaagatctaaagtataaattaaagctttactttcaaagaagagaataatattaaaatcaacagcaatgattcttttaatacttttgctatctaactacataaaagttaatatattgaagatgagtatttcatcayagctttttgtagtagagaaaaataatttaatttaaatatttgttttaaaataatattagcatcctga

SEQ ID NO: 32075 - DNA, 525 bp, Homo sapiens
ttaagactgtaaactttttttctgaaaacaattataaaaaagtagtttataagtaggattatttttctttaaaattttccaagatcatattacttgacaaataagtgtcattttgaaatttaaaacatgattttttcctaataaaattattagttattctgacatcttattaacagatcttagttgaattccacttaatttccctggggacagctgagacactgcatttttccaaatagtcttaaaaagttaaagayaggcattatttaaaggagtgtcttacagtgaaaaaaagaaatcattcaaagaaaacatgcaggtttataaatctgcttccaacacaactcaatgtgtttatgcataataaccatcaatatatggcaaagatctgatgtactttatatgtgaatataatttcctacaagggtcagacttctgattcataaggttaataacttggtcataagtgatttaaattacttacatcaagtaattttagaagtctgtgtttaaattttttaaaag

SEQ ID NO: 32076 - DNA, 598 bp, Homo sapiens
gatgaagaacttccagggtaacagggtaaaagaggttttcaataattattcgaagcacagggctctgcccaggtaggactgtgccttcattggaaggacctccagaaagggccaggcttcctgattggacggcactgacagcctgcagtgcagcttgggctcgctatagaacaacccaaaatgagaacttttgattatacagacgcattatatgaatcctaaaatttagttgacataaaacagtatgaagcaatrtagttaagtaaaacaagatttatctactccgtctggagatacatatcctaaatttgtaatcagtcaacagtcaaacacctccctgcataccacaatgacacagtatttttaaaaggtgcttaaatttacttgaagaataaaaacacatggataaaaggagaaaatctggatgtaatttttatttcctaattttttaaagacaatgggggaagaaatatgaaagcaacattaaagactatggcatgggatgtttacacccaaacaagggtagtcaagacaaacttctaaatattctccactaaaagagaccaaggcactctaaaagaatagctgattccagaac

SEQ ID NO: 32077 - DNA, 609 bp, Homo sapiens
gtctaacattaatgtagttaataacagttttattttgaagacaatctcttaacaggttagaatgtgacatttgtattctgcaggaataaggactgagcagataattctctaattttaggcacagaataatgatagagatgcttatcaagtgattagagggcaatttattccaaaagaaatattgagtttttcctgttaccctgtctatatccttagaacaaatataggggtaaaaaaattgagaaggctgggcacagtggctcacccctgtaatcccagtgcttcctactgtaatctgagaagggaggatcgctcgagcmcaagacttcaagactagcctaaggaacaaagtgagacccagtttctacaaaagtaaaaagtaaaaaacttagccaggcacatacctgtagtcccacttacttgggagcctgaggcagaaggaaggcttgagcccaggagtttgaggctgcttcagcctgggcaacacagtgagactctgtctcaaaacaaaacaaaaacagaaagaaaaataaaaaaatagacattatgaatctgctaggaacattagaatcattacttttctggtttctttatactagtagagttgga

SEQ ID NO: 32078 - DNA, 1808 bp, Homo sapiens
tcaattctattccttgcaactcaacacctggtttgataaatcttctattttgattattttctactattgtctgtctccctagtttgtatttagtcattatatctctactatttttccagatttcaaaataatacatgcatcatgtaaagcattcaaataaataaaaatgtatgagatagaatgaaaaagtgccccataattccatgccaacagatatccatcagtatttctaaatttaattttcaaattaaataatgcattcacgtgtgtgtgtgtstgtgtgtgtgtgtctgtgtgtgtgtctgtgtgtgtatctctcttggactggtataccaggccagattcattagctcagcttgattgggttatatagccttcctctttctttctttttgtaacatatatgttttgtagtaaaattattttgtttagctataatatccatctccagccactagaaataaaaatttccatggtctccaatagaaccgagtatcacattcttacagaatgtccattttattattaaaataatttctaaaccactctatgtgctcaaccttctgtttttacactcagatatgggtttgtggaaaggccataagtcaccagctccatgaagtggcaacctggtccttgctttggaaaatcctccaggtatttattcagaaatatatatttctatatataatttcaccctgtctaccatttcccaccaccaccaccactcttacattaatgctatcattaatttattctgtatcctgtccacttctctatgaaaatatgaatttgtattactttccctctctttttaaaatacaaaagatagtataattttcttgcactttatttttgtcacttacattatcttggaaatctggccacatcagtactcagagttccgcctcatttgtttttataactgcatagcattccttggtaccttagtttatttaactaacctctccccattaatggacattagattgtttctaagcatttgtcattacaaacagtgctgcataacaattttgcacatgtgtcatttgctacatgtgcaaatcttaactgtaggatcaattcccggaagtggtactgctgactcaaaaaatatatgcaccaggagagaagaatcagtatgacattgtcaaattgccagtatctaataggcactcccaatgatcataagttttgtaacaatttccattctcaccagcaacgtatgagaatgcttattctctggcagtttcatcaatggagggtgtgtggaagatatggctatgccccacccacaccctgtagacaagtcatctctatactacagctgcaaccctctgccccagggcttttttttttttttttttttttttggctttaggagggaggtttgacctgtacgtgagtgtggggatagggcagaagtgcctgagagttaattttccacaagcagccatcaagcaatgatagataggggagtaggtggataaatacccctgctttgtcattcctagaggggataacactaaagtgtgttctacaacgtctcccacatttccccatctgagctccaggtctccatagtgttaaatggaacacatcctgataacacatccttctggacttctctctctctcctcctcacttccctgctggtgttaggtccaaaatcatctcccaaattaactatttagacaaaatacttggaagaacccagtctaattagtttgtcatcaaacttttggaattttataaatgacatctcagtgtaatttgtgtatttctcttttggatgaggttgggcatat

SEQ ID NO: 32079 - DNA, 1183 bp, Homo sapiens
tgtggacaaatgtggcctagacagtttcaaaatgaaaactaatggccagtgggaccatggaagttaatgttatgacagcaaagcccaagctaccacacgcagcctcaacatgcctgtactcacaaagaggatctggtgcttggcagtcactgctcatttctatctgtgattgggataccttttacattcctttcaacagagacatactgtaaattgctgaaaaattagttctgagaagttggatacaaatcagatttgggggatctctactgggcactggcttggggaaagagaaccaaaatcagcggatgtttctcactcaccctggccagcattactctttctttgtcttggtgtctgctacctttttagtcctgaaatcttgcacatcttacctaagggtaagcaagggtagtgccaccttgtgacaagtttcatttttcttagtctaaaacatttcttttattcttttgtgatctaggcaagagttgaacagagctgttttactcttcacctgtttgctatgtaggatatatagacagggctgggatgctggctgttcgggatagaaacagtagaaaataaaccaatttggcagcacatcagaatcgcggggaacattaagaattcagaatcctaaacaccatgactcagtgattcagttagtctggactgtggctcaactgactccaaagaagcttgggccatggattggtattggggatctactgatcwaggtgaaatagtgccaagttaataaagcttccagacttggttttcttattttaatacaacatcttatttattataagatgtcaagatcttgagaggagaataaaagttcacaggacaggataactaagaaacacacgcagattcacacatgcgcacatacacacacaccggcaaaactgaaggtaggacaaggtcacatttgcagaattgcttcttccccaattgtgtattatgagagatggttgctgtggtgatgggaagagggctaaacacggagggcttgtcacaggggctgtaaactggcaagggcttaacctatagaaatcttgttgaaattatctctgcgaattgggttgagaggctgcctcatctagtctccatcagaggcccgttgcatctcttcaggttctattagtcactcgtattggttgtttctatcatcctgagg

SEQ ID NO: 32080 - DNA, 1188 bp, Homo sapiens
ataacctggtgggtagggagcacctgtttctgggtcccaagctccctgctccttcttatgtgctgtggaaatgtgaagaggtcaccatggcaacctacacagctggagactgctttgggcccaaatctgctggcagatgccggcacccaggggaagttctctcaccctggccttgtatccaggataccttgaagctgtggggaaacctggcacccaaatgaacatagggaggactaaggatgaagacaggaaagctctcagcaggagtgcaacccacacgatgcaatgccagaagacagacaaatggccacagtattctgatccctttggayacccccagaacaccacagatcagcctggtttccaggcaggcaggattgggtgagaggccacagggagacagtacttcaggggaggactctgcatcagataggacaatagagcacccatggaagagtttccctctccttccctttctctccagggtctgggccttgagaagggagaaggtgaaagggcccctggaggctctgaaggcctcatggtacagggttctcacttctccacaagttctttctggataccttttcaaaaccgcaaccctgccacccctgcatcacttccctgtttcagcttcttccatagcattaccatgttctagcaaaaaaatacgatgtgctccctcgtggagcttgtattcagttgtcaatttccccttactagatgcaagctccatgagggaatttttgcctatttttggtactactgtatctcagaagaagttcaataactattaccagcacaggtcaaatgagtaaatccacaaaggcctaggtgggagagacccctgctggtgagaggtcaggaagcttactagggaatggaggctgggagtgggcaggcctgtaggatcatgtgcctgtgtgtgtgtgcacgtgtgtcatacgtgtgtgtgtgtgtgtgtgtagtacaccaggcaaggagcatgcatgtgtgtgtgtgtgtgtgtagtaccccaggcaaggagcatgcatgtgtgtgtgtgtgtgcgtagtaccccaggcaaggagagtgtgtgtgtgtgtgtgtgtgtgtgtgtgtgtgtgtgtgtgtgtgtagtatcctaggcaaggaggcctgcagacacaaagctacatcaggtgtttgcaaggccccacctggctgtca

SEQ ID NO: 32081 - DNA, 1188 bp, Homo sapiens
ataacctggtgggtagggagcacctgtttctgggtcccaagctccctgctccttcttatgtgctgtggaaatgtgaagaggtcaccatggcaacctacacagctggagactgctttgggcccaaatctgctggcagatgccggcacccaggggaagttctctcaccctggccttgtatccaggataccttgaagctgtggggaaacctggcacccaaatgaacatagggaggactaaggatgaagacaggaaagctctcagcaggagtgcaacccacacgatgcaatgccagaagacagacaaatggccacagtattctgatccctttggatacccccagaacaccacagatcagcctggtttccaggcaggcaggattgggtgagaggccacagggagacagtacttcaggggaggactctgcatcagataggacaatagagcacccatggaagagtttccctctccttccctttctctccagggtctgggccttgagaagggagaaggtgaaagggcccctggaggctctgaaggcctcatggtacagggttctcacttctccacaagttctttctggataccttttcaaaacygcaaccctgccacccctgcatcacttccctgtttcagcttcttccatagcattaccatgttctagcaaaaaaatacgatgtgctccctcgtggagcttgtattcagttgtcaatttccccttactagatgcaagctccatgagggaatttttgcctatttttggtactactgtatctcagaagaagttcaataactattaccagcacaggtcaaatgagtaaatccacaaaggcctaggtgggagagacccctgctggtgagaggtcaggaagcttactagggaatggaggctgggagtgggcaggcctgtaggatcatgtgcctgtgtgtgtgtgcacgtgtgtcatacgtgtgtgtgtgtgtgtgtgtagtacaccaggcaaggagcatgcatgtgtgtgtgtgtgtgtgtagtaccccaggcaaggagcatgcatgtgtgtgtgtgtgtgcgtagtaccccaggcaaggagagtgtgtgtgtgtgtgtgtgtgtgtgtgtgtgtgtgtgtgtgtgtgtagtatcctaggcaaggaggcctgcagacacaaagctacatcaggtgtttgcaaggccccacctggctgtca

SEQ ID NO: 32082 - DNA, 1188 bp, Homo sapiens
ataacctggtgggtagggagcacctgtttctgggtcccaagctccctgctccttcttatgtgctgtggaaatgtgaagaggtcaccatggcaacctacacagctggagactgctttgggcccaaatctgctggcagatgccggcacccaggggaagttctctcaccctggccttgtatccaggataccttgaagctgtggggaaacctggcacccaaatgaacatagggaggactaaggatgaagacaggaaagctctcagcaggagtgcaacccacacgatgcaatgccagaagacagacaaatggccacagtattctgatccctttggatacccccagaacaccacagatcagcctggtttccaggcaggcaggattgggtgagaggccacagggagacagtacttcaggggaggactctgcatcagataggacaatagagcacccatggaagagtttccctctccttccctttctctccagggtctgggccttgagaagggagaaggtgaaagggcccctggaggctctgaaggcctcatggtacagggttctcacttctccacaagttctttctggataccttttcaaaaccgcaaccctgccacccctgcatcacttccctgtttcagcttcttccatagcattaccatgttctagcaaaaaaatacgatgtgctccctcgtggagcttgtattcagttgtcaatttccccttactagatgcaagctccatgagggaatttttgcctatttttggtactactgtatctcagaagaagttcaataactattaccagcacagrtcaaatgagtaaatccacaaaggcctaggtgggagagacccctgctggtgagaggtcaggaagcttactagggaatggaggctgggagtgggcaggcctgtaggatcatgtgcctgtgtgtgtgtgcacgtgtgtcatacgtgtgtgtgtgtgtgtgtgtagtacaccaggcaaggagcatgcatgtgtgtgtgtgtgtgtgtagtaccccaggcaaggagcatgcatgtgtgtgtgtgtgtgcgtagtaccccaggcaaggagagtgtgtgtgtgtgtgtgtgtgtgtgtgtgtgtgtgtgtgtgtgtgtagtatcctaggcaaggaggcctgcagacacaaagctacatcaggtgtttgcaaggccccacctggctgtca

SEQ ID NO: 32083 - DNA, 532 bp, Homo sapiens
tgacatgtcttacgttgacaatgtaaaaagacgatcatcttttccttcaaatcttttcaattttatagaaactcattaaaaacatctgttttgtcttcgtgtctttaaatgtaatcaaagtcaatatccaaattactactttctaaaatrtgtgtgtgtgtgtgtgtgtgtgtgtgtatatggaagggatgtgtgtgcaaatgtgtaaccttatgagataataaaaaaattgttcctagagattattttctgaatgaaattatatcagatattctcaaatgacaagagcatataatctaatcacacactaggtttatacctaatgtaattcaaaagcataataatgtaaattatgaaaggacagttgatgatggatgaatacatttacaatatgaatttatttattgaagacctaatgcaaagaagcatctgtaaatatggcagcttcctgcagttaagaaggaataaataaccaaatattatagaaatgcctataaacattatagttaaagtagctagattaatcaaaaca

SEQ ID NO: 32084 - DNA, 532 bp, Homo sapiens
tgacatgtcttacgttgacaatgtaaaaagacgatcatcttttccttcaaatcttttcaattttatagaaactcattaaaaacatctgttttgtcttcgtgtctttaaatgtaatcaaagtcaatatccaaattactactttctaaaatgtgtgtgtgtgtgtgtgtgtgtgtgtgtatrtggaagggatgtgtgtgcaaatgtgtaaccttatgagataataaaaaaattgttcctagagattattttctgaatgaaattatatcagatattctcaaatgacaagagcatataatctaatcacacactaggtttatacctaatgtaattcaaaagcataataatgtaaattatgaaaggacagttgatgatggatgaatacatttacaatatgaatttatttattgaagacctaatgcaaagaagcatctgtaaatatggcagcttcctgcagttaagaaggaataaataaccaaatattatagaaatgcctataaacattatagttaaagtagctagattaatcaaaaca

SEQ ID NO: 32085 - DNA, 703 bp, Homo sapiens
ttaaaaggttacacgcataggacaaatgataatgattattcacaggtgtaaagatcaggactaaataacttggattatatgtggataaagctagtttcaagttckgatctcttcctggtctcttaagaatggtgctgacctgtacgtgtatatttcattgttacctggataaaataatacactaagggataaaggtagattattgtaagaatataaatgtctgcagtatcctaagtgccttcagtgaggtacacttagcttcgttgcacatagcatcttaaagctatgaagctattacatattttatatagtttgtgaggcacaggcatatcaacccaggaacgttcaaaaatactgtttgaagtggagctctaaatattgctgatatacattctgtgtaacctagacagtcccctcccctcaccatttttcttttcttttctcattgcacagatattcatgactgcctatcacgttttaagctctaggttcaccgcatcaacaaaaaatacaacaaatacttattctcatggaacgtatatttcactggggtggcaggggagacagacaataagcaaaggaagattagatagataaatggagagattaatcaataaattgtttaggatatgtatcataccagacaataaatccaattgagagtttggagaaggagtgagagagcggaggttcattctggctg

SEQ ID NO: 32086 - DNA, 614 bp, Homo sapiens
tgcttcatttctttgtcatttttcttaatcaacatgccgtaagtttgctaatagtattaattttagaatattctatataacttattagattaacttattgtttctaaatctatagcttgatttttttgtctgtttgatctatcagttatgaataggggtatgtcaattaaatcttccaccatgctgtagtgaacattttaatctctagaaatgtattttgtcttaaagatagattaatctcatgttaatatagctacatcgattttattttggtcagtatatttctgcttcatttttcccatctattgacttgtaactattttgattccctatgcttttgttgtctcttctaaacagtactgatatacagtctgacaamccttgtcttgtaactgaaaatttaattgagttacagtttttaaaattaattgatatatttccatttatttctatcaccttatttttgtctattttcctttccatttgtttattgctttcatttctttcccttttctaaagattatttttctcattctattttttttccttcaattagtttggcagttgtgcaaacttggtctgttgactattttctttatcactctttattcttt

SEQ ID NO: 32087 - DNA, 549 bp, Homo sapiens
  misc_feature (1)...(549): n = A,T,C or G
gtgtcctattcttatggtgcggagcctgcctctgctgtgtgaggattagggagtgtattgtgatgtgtgtagctcgactcagcttaatgtgtctgtccatgtctgaatgtattgcagaaattgaaaggggaggggaaggcgaagaaaagaaggggaagaagatcaaagaaggaaagaagaaggggaagaaaagaaggggaagaagatcaaaacccaccatgccccaggtgactttcagcaattgtggatgcttaattctgtgttaacacctggaggcaacagattcagggaaaccagastgtgtttgatgtcatgttttcaacgnaaggctgaattactcctactgtcattgctgttggttttcattgcagtagatgtttaggtttccatttcttcctccccttatcatttactaacgtaccataggttgaccatacttcaaaagctgtactctcatggccactgcatcgaattttgagcatattttatggaaaactattgagctcactcttttcatgatcacagtttgctgtgtgtcatgagggcact

SEQ ID NO: 32088 - DNA, 549 bp, Homo sapiens
  misc_feature (1)...(549): n = A,T,C or G
gtgtcctattcttatggtgcggagcctgcctctgctgtgtgaggattagggagtgtattgtgatgtgtgtagctcgactcagcttaatgtgtctgtccatgtctgaatgtattgcagaaattgaaaggggaggggaaggcgaagaaaagaaggggaagaagatcaaagaaggaaagaagaaggggaagaaaagaaggggaagaagatcaaaacccaccatgccccaggtgactttcagcaattgtggatgcttaattctgtgttaacacctggaggcaacagattcagggaaaccagactgtgtttgatgtcatgttttcaacgnaaggctgaattactcctactgtcattgctgttggttttcattgcagtagatgtttaggtttccatttcttcctccccttatcatttmctaacgtaccataggttgaccatacttcaaaagctgtactctcatggccactgcatcgaattttgagcatattttatggaaaactattgagctcactcttttcatgatcacagtttgctgtgtgtcatgagggcact

SEQ ID NO: 32089 - DNA, 811 bp, Homo sapiens
gcttaattctgtgttaacacctggaggcaacagattcagggaaaccagagcgtgtttgatgtcatgttttcaacgaaggctgaattactcctactgtcattgctgttggttttcattgcagtagatgtttaggtttccatttcttcctccccttatcatttactagcgtaccataggttgaccatacttcaaaagctgtactctcatggccactgcatcgaattttgagcatattttatggaaaactattgagctcactcttttcatgatcacagtttgctgtgtgtcatgagggcactaactcagagtgtccttttactcccttaccagtatgtcacctggccaattcactaggtcactttctctctgtctctgtctctgtctctctctctgtctctgtctctctctctctctctctctgtctttctctttcattgttttctacctggccctgttctatcccaacataaaggcaataatttgttacctcattaatggatctgtcctttttcttttcaaactcttccttaacgttagccatgaaatctagctggggctgtgyggtttctgattccccctggcttattctttactttttcccacttttccaggctcagcagggagctgctggatgagaaagggcctgaagtcttgcaggactcactggatagatgttattcaactccttcaggttgtcttgaactgactgactcatgccagccctacagaagtgccttttacatattggagcaacagtgtgttggcttggctgttgacatggatggtgagtacctttctatgaaggtgataa

SEQ ID NO: 32090 - DNA, 811 bp, Homo sapiens
gcttaattctgtgttaacacctggaggcaacagattcagggaaaccagagcgtgtttgatgtcatgttttcaacgaaggctgaattactcctactgtcattgctgttggttttcattgcagtagatgtttaggtttccatttcttcctccccttatcatttactagcgtaccataggttgaccatacttcaaaagctgtactctcatggccactgcatcgaattttgagcatattttatggaaaactattgagctcactcttttcatgatcacagtttgctgtgtgtcatgagggcactaactcagagtgtccttttactcccttaccagtatgtcacctggccaattcactaggtcactttctctctgtctctgtctctgtctctctctctgtctctgtctctctctctctctctctctgtctttctctttcattgttttctacctggccctgttctatcccaacataaaggcaataatttgttacctcattaatggatctgtcctttttcttttcaaactcttccttaacgttagccatgaaatctagctggggctgtgcggtttctgattccccctggcttattctttactttttcccacttttccaggctcagcagggagctgctggatgagaaagggcctgaagtcttgcaggactcactggatagatgttattcaactccttcaggttgtcttgaactgactgactcatgccagccctacagaagtgccttttacrtattggagcaacagtgtgttggcttggctgttgacatggatggtgagtacctttctatgaaggtgataa

SEQ ID NO: 32091 - DNA, 811 bp, Homo sapiens
gcttaattctgtgttaacacctggaggcaacagattcagggaaaccagagcgtgtttgatgtcatgttttcaacgaaggctgaattactcctactgtcattgctgttggttttcattgcagtagatgtttaggtttccatttcttcctccccttatcatttactagcgtaccataggttgaccatacttcaaaagctgtactctcatggccactgcatcgaattttgagcatattttatggaaaactattgagctcactcttttcatgatcacagtttgctgtgtgtcatgagggcactaactcagagtgtccttttactcccttaccagtatgtcacctggccaattcactaggtcactttctctctgtctctgtctctgtctctctctctgtctctgtctctctctctctctctctctgtctttctctttcattgttttctacctggccctgttctatcccaacataaaggcaataatttgttacctcattaatggatctgtcctttttcttttcaaactcttccttaacgttagccatgaaatctagctggggctgtgcggtttctgattccccctggcttattctttactttttcccacttttccaggctcagcagggagctgctggatgagaaagggcctgaagtcttgcaggactcactggatagatgttattcaactccttcaggttgtcttgaactgactgactcatgccagccctacagaagtgccttttacatattggagcaacagygtgttggcttggctgttgacatggatggtgagtacctttctatgaaggtgataa

SEQ ID NO: 32092 - DNA, 598 bp, Homo sapiens
gacagtggactgttatgggtgtaggtgaattggcttattttgtctgtccctgtctgaatgtattgcaggaattaaaaaggaccaagaagaggaagaagaccaaggcccaccatgccccaggtaactgagcaattgtgaacagctacttctgtgttgacatctggagactcctggttcagggaaaacagagcgggctgacattatcgattacatcttttcaagcaagcctgaattattcctactaacattgctgttggttttcattgcagtagatatttaggtttccatttcttcctccccttatcatttactaacctactgtasgtggaccagacttcaaaaactgtattctcatggcgactgcatggaaacttgaacacattttatggaaaattattgagcacagtcttttcatgatcactgtatgctgtgtgtcctgagggcactaactcagagtgtcctgttactccctcatcagtgtgtcacctggacaattcactgagctcgttctctctctctctgtgtgtgtgtctgtgtgtgtgtgtgtgtctatctgtctttctctttcattcttttccatttggccctgttctgtccc

SEQ ID NO: 32093 - DNA, 598 bp, Homo sapiens
gacagtggactgttatgggtgtaggtgaattggcttattttgtctgtccctgtctgaatgtattgcaggaattaaaaaggaccaagaagaggaagaagaccaaggcccaccatgccccaggtaactgagcaattgtgaacagctacttctgtgttgacatctggagactcctggttcagggaaaacagagcgggctgacattatcgattacatcttttcaagcaagcctgaattattcctactaacattgctgttggttttcattgcagtagatatttaggtttccatttcttcctccccttatcatttactaacctactgtacgtggaccagacttcaaaaactgtattctcatggcgactgcatggaaacttgarcacattttatggaaaattattgagcacagtcttttcatgatcactgtatgctgtgtgtcctgagggcactaactcagagtgtcctgttactccctcatcagtgtgtcacctggacaattcactgagctcgttctctctctctctgtgtgtgtgtctgtgtgtgtgtgtgtgtctatctgtctttctctttcattcttttccatttggccctgttctgtccc

SEQ ID NO: 32094 - DNA, 598 bp, Homo sapiens
gacagtggactgttatgggtgtaggtgaattggcttattttgtctgtccctgtctgaatgtattgcaggaattaaaaaggaccaagaagaggaagaagaccaaggcccaccatgccccaggtaactgagcaattgtgaacagctacttctgtgttgacatctggagactcctggttcagggaaaacagagcgggctgacattatcgattacatcttttcaagcaagcctgaattattcctactaacattgctgttggttttcattgcagtagatatttaggtttccatttcttcctccccttatcatttactaacctactgtacgtggaccagacttcaaaaactgtattctcatggcgactgcatggaaacttgaacacattttatggaaaattattgagcacagtcttttcatgatcmctgtatgctgtgtgtcctgagggcactaactcagagtgtcctgttactccctcatcagtgtgtcacctggacaattcactgagctcgttctctctctctctgtgtgtgtgtctgtgtgtgtgtgtgtgtctatctgtctttctctttcattcttttccatttggccctgttctgtccc

SEQ ID NO: 32095 - DNA, 598 bp, Homo sapiens
gacagtggactgttatgggtgtaggtgaattggcttattttgtctgtccctgtctgaatgtattgcaggaattaaaaaggaccaagaagaggaagaagaccaaggcccaccatgccccaggtaactgagcaattgtgaacagctacttctgtgttgacatctggagactcctggttcagggaaaacagagcgggctgacattatcgattacatcttttcaagcaagcctgaattattcctactaacattgctgttggttttcattgcagtagatatttaggtttccatttcttcctccccttatcatttactaacctactgtacgtggaccagacttcaaaaactgtattctcatggcgactgcatggaaacttgaacacattttatggaaaattattgagcacagtcttttcatgatcactgtatgctgtgtgtcctgagggcactaactcagagtgtcctgttactccctcatcagtgtgtcacctggacaattcactgagctcgttctctctctctctstgtgtgtgtctgtgtgtgtgtgtgtgtctatctgtctttctctttcattcttttccatttggccctgttctgtccc

SEQ ID NO: 32096 - DNA, 598 bp, Homo sapiens
gacagtggactgttatgggtgtaggtgaattggcttattttgtctgtccctgtctgaatgtattgcaggaattaaaaaggaccaagaagaggaagaagaccaaggcccaccatgccccaggtaactgagcaattgtgaacagctacttctgtgttgacatctggagactcctggttcagggaaaacagagcgggctgacattatcgattacatcttttcaagcaagcctgaattattcctactaacattgctgttggttttcattgcagtagatatttaggtttccatttcttcctccccttatcatttactaacctactgtacgtggaccagacttcaaaaactgtattctcatggcgactgcatggaaacttgaacacattttatggaaaattattgagcacagtcttttcatgatcactgtatgctgtgtgtcctgagggcactaactcagagtgtcctgttactccctcatcagtgtgtcacctggacaattcactgagctcgttctctctctctctgtgtgtgtgtstgtgtgtgtgtgtgtgtctatctgtctttctctttcattcttttccatttggccctgttctgtccc

SEQ ID NO: 32097 - DNA, 712 bp, Homo sapiens
gccttcaggcctcctgaaatatatctctcacagtgtcctattcttatgctgaggagcctgaggtccctgtgtgaggattagacagtggattgttatgtgtgtaggggaatcagcttaatgtgtctgtccatgtctgaatttattgcagaaattgaaaagaaggggaaggggaagaaaagaaggggaagaagatcaaagaaggaaagaagaaggggaagaaaagaaggggaagaagatcaaaacccaccatgccccaggtgactttcagcaattgtggatgcttaattctgtgttaacacctggaggcaacagattcagggaaaccagagtgtgtttgatgwcatgttttcaacgaaggctgaattactcctactgtcattgctgttggttttcattgcagtagatgtttaggtttccatttcttcctccccttatcatttcctaacgtaccataggttgaccatacttcaaaagctgtactctcatggccactgcatcgaattttgagcatattttatggaaaactattgagctcactcttttcatgatcacagtttgctgtgtgtcatgagggcactaactcagagtgtccttttactcccttaccagtatgtcacctggccaattcactaggtcactttctctctgtctctgtctctgtctctctctctgtctctgtctctctctctctctctctctttctctttcattg

SEQ ID NO: 32098 - DNA, 712 bp, Homo sapiens
gccttcaggcctcctgaaatatatctctcacagtgtcctattcttatgctgaggagcctgaggtccctgtgtgaggattagacagtggattgttatgtgtgtaggggaatcagcttaatgtgtctgtccatgtctgaatttattgcagaaattgaaaagaaggggaaggggaagaaaagaaggggaagaagatcaaagaaggaaagaagaaggggaagaaaagaaggggaagaagatcaaaacccaccatgccccaggtgactttcagcaattgtggatgcttaattctgtgttaacacctggaggcaacagattcagggaaaccagagtgtgtttgatgtcatgttttcarcgaaggctgaattactcctactgtcattgctgttggttttcattgcagtagatgtttaggtttccatttcttcctccccttatcatttcctaacgtaccataggttgaccatacttcaaaagctgtactctcatggccactgcatcgaattttgagcatattttatggaaaactattgagctcactcttttcatgatcacagtttgctgtgtgtcatgagggcactaactcagagtgtccttttactcccttaccagtatgtcacctggccaattcactaggtcactttctctctgtctctgtctctgtctctctctctgtctctgtctctctctctctctctctctttctctttcattg

SEQ ID NO: 32099 - DNA, 712 bp, Homo sapiens
gccttcaggcctcctgaaatatatctctcacagtgtcctattcttatgctgaggagcctgaggtccctgtgtgaggattagacagtggattgttatgtgtgtaggggaatcagcttaatgtgtctgtccatgtctgaatttattgcagaaattgaaaagaaggggaaggggaagaaaagaaggggaagaagatcaaagaaggaaagaagaaggggaagaaaagaaggggaagaagatcaaaacccaccatgccccaggtgactttcagcaattgtggatgcttaattctgtgttaacacctggaggcaacagattcagggaaaccagagtgtgtttgatgtcatgttttcaacgaaggctgaattactcctactgtcattgctgttggttttcattgcagtagatgtttaggtttccatttcttcctccccttatcatttmctaacgtaccataggttgaccatacttcaaaagctgtactctcatggccactgcatcgaattttgagcatattttatggaaaactattgagctcactcttttcatgatcacagtttgctgtgtgtcatgagggcactaactcagagtgtccttttactcccttaccagtatgtcacctggccaattcactaggtcactttctctctgtctctgtctctgtctctctctctgtctctgtctctctctctctctctctctttctctttcattg

SEQ ID NO: 32100 - DNA, 712 bp, Homo sapiens
gccttcaggcctcctgaaatatatctctcacagtgtcctattcttatgctgaggagcctgaggtccctgtgtgaggattagacagtggattgttatgtgtgtaggggaatcagcttaatgtgtctgtccatgtctgaatttattgcagaaattgaaaagaaggggaaggggaagaaaagaaggggaagaagatcaaagaaggaaagaagaaggggaagaaaagaaggggaagaagatcaaaacccaccatgccccaggtgactttcagcaattgtggatgcttaattctgtgttaacacctggaggcaacagattcagggaaaccagagtgtgtttgatgtcatgttttcaacgaaggctgaattactcctactgtcattgctgttggttttcattgcagtagatgtttaggtttccatttcttcctccccttatcatttcctaacgtaccataggttgaccatacttcaaaagctgtactctcatggccactgcatcgaattttgagcatattttatggaaaactattgagctcactcttttcatgatcacagtttgctgtgtgtcatgagggcactaactcasagtgtccttttactcccttaccagtatgtcacctggccaattcactaggtcactttctctctgtctctgtctctgtctctctctctgtctctgtctctctctctctctctctctttctctttcattg

SEQ ID NO: 32101 - DNA, 577 bp, Homo sapiens
gtttcttcactctcccccctcctcacccctgcacacacatacatttctccttcctggggaactccaaagaaaacaaaggccctttagcaatcaagtagattgtctctcttgatggcatcccatgagttatggaattacatactgcaggcccaggtggattagggcccctagaaagtttgcttgatcaacagagtgctgttgattttttcaactgaattaattactcttggagtccaaactctccagtgtgccacagtcctcatcacttcctgtatcttaaatattgcattatctgtcccctaaaagtatttgaacatgtgacccagagaagrggacttacaacttgactaggcaacttctgtcacactggattcatatgaaattccactgcaagtgacatcaccagattggggaccctgaagtgtttgagtatcttctccacatctggtcatttaggctaagaaattccttcttgtctaccaggtcttttagcattcattttgtaagtcattcaacacctacttactgagaaggaatactgggctagacagtgtgctaggggctggggaaaccgcaa

SEQ ID NO: 32102 - DNA, 518 bp, Homo sapiens
ccatgaccacacaaaagagtgtctagtcatataataaagggtgtacatatgcaggcaactcacatcctgccaaatattaaatttctaattttattataatttcwaataaaacattagatttattattatacagagtcatactccttgactgggaaactctcaactcaataaacattctttagtctcatgtcttttctaaaggaaagaaattaatgttatattcttgggtgaaaaaaaatgtgaggtctcaaaagagtataatacaatttggggatgcatatatattttacatgtatatagacacataaaaatctaaaagaataaattttaatatgttaacagaagacagaagtcatgtattttttactttcttctttttggcatatctctttttctaactttttttttttctttttacaaaaaacaattgttatttgtgtacttttaaaacctcacagtaatattttcacactaccttcttggctgaaagttcacactcggaattccagagcagtcca

SEQ ID NO: 32103 - DNA, 518 bp, Homo sapiens
ccatgaccacacaaaagagtgtctagtcatataataaagggtgtacatatgcaggcaactcacatcctgccaaatattaaatttctaattttattataatttcaaataaaacattagatttattattatacagagtcatactccttgactgggaaactctcaacwcaataaacattctttagtctcatgtcttttctaaaggaaagaaattaatgttatattcttgggtgaaaaaaaatgtgaggtctcaaaagagtataatacaatttggggatgcatatatattttacatgtatatagacacataaaaatctaaaagaataaattttaatatgttaacagaagacagaagtcatgtattttttactttcttctttttggcatatctctttttctaactttttttttttctttttacaaaaaacaattgttatttgtgtacttttaaaacctcacagtaatattttcacactaccttcttggctgaaagttcacactcggaattccagagcagtcca

SEQ ID NO: 32104 - DNA, 1037 bp, Homo sapiens
tcccaggttcaagcaattcttctgcctcagccttctgagtagctgggattacaggtgcgtgccaccacacctggctaattttttgtatttttagtagagacggggtttcaccatgttggccaggctggtctcgaactcctgacctcaggtgatccacccgccttggcctcccaaagtgctgggattacaggcatgagccactgctcccggccttatacttgcacactttttaattctaagaccttgctactcagtgagggatcctgggactaataccatcagcttgacttgaggccgtttgaaggcagactcagaatctgcaatttatcaggatccccaggtaatttgtatgtgcagtctagtttggtagatctgctctggcagactggaagactcttctatctgcctcacgtaaggtgcaggtgacataattaggtaatcaagcaaaagatcacatattttaataagaaagagacactggctattattttgagtggcaaaacaggttattcagtcccagtttaaaatggaaatgacagagaccaagatgaagatttttaatttgagatgtgcctgcgatgcaattacatttgctgaatgaaactgcttcagtaattagatgcaggtttcttctctcttctttttgagatgtaaagaagacacaatagactcatggaacttaaagaactagacgccagctaacaaaacatgctatccagactcttcygtttcaccatattgctttcttgaaaacataggacagtgccagtttagcactgaaaaaaatcagttctcctaattctaaaaagaggagacagccaggcgtggtgggtcactaaaaatacaaaaaattagcgggcatggtggtgcatgcctgtaatcccagctacttgggaggctgaggcaaaagaatcacttaaacctgggaggtgaaggttgcagtgtgctgagatagcgccattgcactctcgcctgggcaacaagagcgaaactccgtctcaagaaaaaaaaaaaaagagagagagagagagaaactg

SEQ ID NO: 32105 - DNA, 1037 bp, Homo sapiens
tcccaggttcaagcaattcttctgcctcagccttctgagtagctgggattacaggtgcgtgccaccacacctggctaattttttgtatttttagtagagacggggtttcaccatgttggccaggctggtctcgaactcctgacctcaggtgatccacccgccttggcctcccaaagtgctgggattacaggcatgagccactgctcccggccttatacttgcacactttttaattctaagaccttgctactcagtgagggatcctgggactaataccatcagcttgacttgaggccgtttgaaggcagactcagaatctgcaatttatcaggatccccaggtaatttgtatgtgcagtctagtttggtagatctgctctggcagactggaagactcttctatctgcctcacgtaaggtgcaggtgacataattaggtaatcaagcaaaagatcacatattttaataagaaagagacactggctattattttgagtggcaaaacaggttattcagtcccagtttaaaatggaaatgacagagaccaagatgaagatttttaatttgagatgtgcctgcgatgcaattacatttgctgaatgaaactgcttcagtaattagatgcaggtttcttctctcttctttttgagatgtaaagaagacacaatagactcatggaacttaaagaactagacgccagctaacaaaacatgctatccagactcttctgtttcaccatattgctttcttgaaaacataggacagtgccagtttagcactgaaaaaaatcagttctcctaattctaaaaagaggagacagccaggcgtggtgggtcactaaaaatacaaaaaattagcgggcatggtggtgcatgcctgtaatcccagctacttgggaggctgaggcaaaagaatcacttaaaccygggaggtgaaggttgcagtgtgctgagatagcgccattgcactctcgcctgggcaacaagagcgaaactccgtctcaagaaaaaaaaaaaaagagagagagagagagaaactg

SEQ ID NO: 32106 - DNA, 582 bp, Homo sapiens
cccttgaaaccagggaggcggaggttgcagtgagctgagatcgcgccactgcactccagcctgggtaacagagcaagactccgtctaaaaaaaaaaaaaagaaagtctaytggttctcagaaagaacagtggaagtctgtagtgttttagcattgccccttcacctccagctctgcggttgtggtaaggaagttctatccaggtgggtggggcttgtgggagggaatggcgtggcagcagagggtgactgactttacttccatgcccagggttgttgaaaacaagagttatctcagtgacaatcatggaagaccaaaattgcagctagcttgaggttgcagtactggttaggacaagcaataggccaacaggcctgccaaaaatttaacatggaaatccaggtaatgatacaactaaagagggtcttgaaaagctgccacatgtgtctggtggtctagaaggtatgcacaaggctgcatacacattcacattcaggacagactggagactcataaaaatctggaactttgaatgaattctccaagccacacagagatccactgacaaaaggtaaagccttcg

SEQ ID NO: 32107 - DNA, 520 bp, Homo sapiens
gtgagtgcaaaagcaggaaaaaaaatggattagtaggttttaatcacattaatgtatttttgaaaaaaggaaaaacttagatgtaggatggtatcagagatgaataatagtaacactacaacttctgtttttgaaacttctgaaaagttgtccatgacattgtcaaaatcaatctttgcatattcatggtcagtattcaggggagctatatctactagtccatctttgctcccagttgattgaagaacactttttattaattttaatttcaaaagctgctttcatataaaactagagagacaaaggaaaagccttaaccatcaggattagtttggcagagatttataaaaatcccatttcataataaattccagacattgcaatactgcctaartctttttttctttaatcagttctacagcttaaatatctcctttttagagacattttcactaagacaggctgggtgcagtgattcattactgtaattccagcacttggggaggccaaggtgggagga

SEQ ID NO: 32108 - DNA, 535 bp, Homo sapiens
gagtgcatgctctctggtgtctcttaaggcactaatcccatcatgggagccctacccgcaagacctcattcaatcctgattacctcccgaataccatcatattgaggatgagggcttcaacataagaatttttkggggggttttggggggccagggtacaaagatttagtccagaacaatgatacatatgtaaacagagtctggcacaaagttggtattcagtaaacattagtctccttttttctctcccctctaatgtacttaggagtttggattttggatgatgtttaatatttatttagaatttgagctgtgtctgacatgtatttagtaattttgaatatattcaaaattaagcttgttaaatttgtgaattatttgataattgatttattttgcagtattagaaacttgtaaatttaaaaaaattgccattaaatgtttttccacaagtacttaataatgtggttattcatagaaagacacataaaatagtaacatacattatttaggggtatatacagattggaatgaa

SEQ ID NO: 32109 - DNA, 682 bp, Homo sapiens
gcctcaatcctggctcaccactcacatccaggtcatacctactgagagcccgctggcacctgcagtgagaacccagcttgggggggcacctgctgctacaaggacaatgaccttctcttggagctccarggggaggaacagaattggacctcacagggttcactatgggaagtaggctctttccagagccagttaaggagccacaagcaccccccacaacaaacatccttacatcatgggtcctttcaacacagtcgggtgaagcctgtgaactcctctgaataacgtttttacatgtataatacaaaacatacagaatcacaggggaaatcaattatgttgaaataaatggatcaaaatatttttaaaagtgagccagaataatatacacacttcctcatcgcctcatttaacaatgatttccagctctagatctgataaaaaaaactgccttaactttgcaggcaggactagcttcgccggtatttggagatgtccactgctactacggtgcgatgtgaaaataagtgatttcttttggtgacaaagtcacaagttctactactgtgggtgagggcctcctcccaaaaaactcccatgttaaagtcctcaccaccaatacctcagaatgtgaccttatttggagacaggctccacactaagtttcagtgaggtcattggg

SEQ ID NO: 32110 - DNA, 682 bp, Homo sapiens
gcctcaatcctggctcaccactcacatccaggtcatacctactgagagcccgctggcacctgcagtgagaacccagcttgggggggcacctgctgctacaaggacaatgaccttctcttggagctccagggggaggaacagaattggacctcacagggttcactatgggaagtaggctctttccagagccagttaaggagccacaagcaccccccacaacaaacatccttacatcatgggtcctttcaacacagtcgggtgaagcctgtgaactcctctgaataacgtttttacatgtataatacaaaacatacagaatcacaggggaaatcaattatgttgaaataaatggatcaaaatatttttaaaagtgagccagaataatatacacacttcytcatcgcctcatttaacaatgatttccagctctagatctgataaaaaaaactgccttaactttgcaggcaggactagcttcgccggtatttggagatgtccactgctactacggtgcgatgtgaaaataagtgatttcttttggtgacaaagtcacaagttctactactgtgggtgagggcctcctcccaaaaaactcccatgttaaagtcctcaccaccaatacctcagaatgtgaccttatttggagacaggctccacactaagtttcagtgaggtcattggg

SEQ ID NO: 32111 - DNA, 682 bp, Homo sapiens
gcctcaatcctggctcaccactcacatccaggtcatacctactgagagcccgctggcacctgcagtgagaacccagcttgggggggcacctgctgctacaaggacaatgaccttctcttggagctccagggggaggaacagaattggacctcacagggttcactatgggaagtaggctctttccagagccagttaaggagccacaagcaccccccacaacaaacatccttacatcatgggtcctttcaacacagtcgggtgaagcctgtgaactcctctgaataacgtttttacatgtataatacaaaacatacagaatcacaggggaaatcaattatgttgaaataaatggatcaaaatatttttaaaagtgagccagaataatatacacacttcctcatcgcctcatttaacaatgatttccagctctagatctgataaaaaaaactgccttaactttgcaggcaggactagcttcgccggtatttggagatgtccactgctactacggtgcgatgtgaaaataagtgatttctttyggtgacaaagtcacaagttctactactgtgggtgagggcctcctcccaaaaaactcccatgttaaagtcctcaccaccaatacctcagaatgtgaccttatttggagacaggctccacactaagtttcagtgaggtcattggg

SEQ ID NO: 32112 - DNA, 559 bp, Homo sapiens
cttacrggagaagttctaaaatctttctatttttactcaataacactcatattcaagtcatcagagcacatcacgtactagtaaaatgttccataaaactttttgaacttggatagctcaaatattgatcctttcagtttctggatttggctgagagttgtgaataaatatcagacttagttttcctaggattttgccaaattatagatacttatgtgcatatttattaacggttttcacacatgtttacagtcttcagtctctaaattttcatttacactaaggccttggtaggcagtgtgaactgatggaagcagctaaggcaatatgaatttttagtcaaccaagtttttattttattggatcctacacaatattgattattttattttacagcaagatgttaattgcgactatccagtcaaccatttagaatatattaaattgctgtcaaagtggtaggtaatccagggggcatctatgagaagaattgcaccatgatctcatggataatggagaaataactgcattgtattatcttaataatctcagggcctgt

SEQ ID NO: 32113 - DNA, 478 bp, Homo sapiens
taaagacatcaaaaagataatgaggaaatattataagtggctttatgccatcaactttgtaattaaatagcataatatttttaaaaacataactccaaatataacacaagaagaaataaaaaatctaaatagctacatatttactaaagatactaaatttgtaatagacatttcatggggaagataaaaaattttcatataggtcataaaaactatcagttaaaaaaagtaattaattggaatttattaaggtcaaaatcttctstttttcaaaagtcagtgtaagaacgtgaaaagacaagccatatattggaagataatattcacaatactttctaacaaaggacttacccagaatttatacagaagtacaaattaataattaaaatatttgaaaagcacattaaagaatatatagactacatattatatataatatatattttgacatatatggctaataaacacagggaaaaaa

SEQ ID NO: 32114 - DNA, 527 bp, Homo sapiens
gctggttctagcacctgtgcactccagttcccaccttgtttactcatgcactccttcccatgaggagttgagaggggcaagctaagtaaatgaggcacccctgtcgcaagtcctgtgaaggggtcatggaaatatcctgcattaatagtgtactaacagaaagaaaagtcagaaaaacacatgagagaggtgtcagggaagatttatttgaggatctgattttattttcctgagcttggaatgatgagatgggaaagaggattcctggcacagggcacagcagtggcatgtgctagcagttaaaagggtttggcatgctcatggaccatgaaagtgaccatactgagcaaggcacagagtgagatagcttagatgggaatkctaggtaaaggccagattagtaatatctccttatacctcatattacatgattcagttttattctaagttatagagatattgcatgtgtttgtattctatacaaacacatatataatgtacatactatacacatcaatatattaata

SEQ ID NO: 32115 - DNA, 600 bp, Homo sapiens
ttgaatattttatcctgtagctaatactttgatattctttttttttagggcaatgaattgtttttccttttatattggtcaaattaaacataaaaacatgttatttaaaacatgacatatataaatgtatcaacttttcccccaaattctagaattaaaatgagtaaacctcatctgctgagatttgataaaagctagcctttcatattaaatatatgcactaatgcccactcttgcacctctatttaaaaaraaggtaaaaaagatactttaatgtaataataaacttcttaagcataaagtttcagtactatttatcattgttcatctggataatttggcacactaccaaaaaaatactctatttctcactccctctcctcacaattagtattatgtggacagagccaaaatgttaattttgttctggagaagttaaacatagaatgatgatttcaatattgtttattcatttggttttatctttggctataaaatccacattaggaaaaatctttatatttatccaatctaacataaatagatatactgtgccaatattgcagagtgattttggctatgagtctcaacattctgtgc

SEQ ID NO: 32116 - DNA, 584 bp, Homo sapiens
tcaaagctggtcacaaacttcggggctcaagtgatcctcctgtcttggcctcccaaattgctgggattgtaagcatgagctatggtgcttagccttgggaattccagttcttcttgccattccaggcagtgatgtgagcatgctgggggccaatcccagtttagtcaaattgattgtttcccatcactattgctgtggtccacctgaaactaaaactaaagttgtatatgaataaaaggaagagctgcccggaggtgacaggttcaaacagggctctctgggattttcttcttggcctagagagtccaatttctttcaagttytattcttgccagtgaagaggtgagatatcatccagaactcaaaagggtgtgatgccctcttggccttagaagtttactaaaaacagtagcatggagagaccaagatccaggactttgaacttggactgacctggggcattgctccagcatttcttagctgagtgacctttggcaattacttaacctctccgagctttgtctttctgatctttaataaaaagacaaatacttaaccccctcctggggtctcttgagggtgag

SEQ ID NO: 32117 - DNA, 584 bp, Homo sapiens
tcaaagctggtcacaaacttcggggctcaagtgatcctcctgtcttggcctcccaaattgctgggattgtaagcatgagctatggtgcttagccttgggaattccagttcttcttgccattccaggcagtgatgtgagcatgctgggggccaatcccagtttagtcaaattgattgtttcccatcactattgctgtggtccacctgaaactaaaactaaagttgtatatgaataaaaggaagagctgcccggaggtgacaggttcaaacagggctctctgggattttcttcttggcctagagagtccaatttctttcaagttttattcttgccagtgaagaggtgagatatcatccagaactcaaaagggtgtgatgccctcttggccttagaagtttactaaaaacagtagcatggagagaccaagatccaggactttgaacttggactgacctgkggcattgctccagcatttcttagctgagtgacctttggcaattacttaacctctccgagctttgtctttctgatctttaataaaaagacaaatacttaaccccctcctggggtctcttgagggtgag

SEQ ID NO: 32118 - DNA, 1147 bp, Homo sapiens
ggaattgatttctgcatagttacttgttttagaaaatgctgaacacatgagaaaaatgtttttggatgacagagaaggaggtagatagagatcagtgttttttatcaccacatggaaggatggtgtgtatcttttaatctggccagagaatatcccctgagtccatgccacttaaagcattattcttagctgtggtattttgttgtttatatggagaatttacaagtcttgaggtcattgtttttctggttcccaatartgctgtcttctggttttatccttatactccaacctataagttagtggaaaaggcagagggtgttgtaaacataactgtttacatttattttatttatgtctttgtttttgttgagctagagcttcgctcttgttgcccaggctggagtgcattggtgtgatctcagctcactgcaacctctgcctcctgggttcaagcgattctcctgcctcagccttcaaagtagctgggattacaggcacccaccaccacactggctgatttttatttttttattaattttttattttttagtagagacgaggtttcaccatgttggccaggctggtcttgaactcctatcctcaggtgatccgaccgccttggcctctcaaagtgttgggattacaggtgtgagccaccgtgtttgatacatttaaaagataattatcttcataatctttctctttaaatgtgtaattttcagggggttggggaacagcatgagatcctaatttgactattaaataacaattgtttcctttgcattcacttaaaaaatctagtgatttttttcagtggaaggcgaaaagttgggaggtcatttttaatccagcaatgatttcctgattattgtttttattgcaaggtatacccaagttctgaagactcttgttcagagtctatccttctttgccctgcatgaccataacattccgcccactgccattctttcctccttctcacttattgaacattaaactatgaggagataaagatgaataagttacagtttggggagaaacacatgaataaataacagtgagccaatgtggcaaatgctacaaggtgccataaattatggggaaaatgcaaaagggaacacagagaaaggagtgaaagggaaca

SEQ ID NO: 32119 - DNA, 592 bp, Homo sapiens
tggaatttaaatacagattagtctgtctctgacatctacacttttaactccaggaatatttcggggatctctaagcagggaattaaagaaaacttcgccagctccccccatcttcataagcagaagaacagccaattatagcacagatttcatttggtcactttcattatcaacagagaacattctacgacagagtttgccaacagagctcatcacaacagactgcttctaaggcctgccaaagaacaggactctagacagtctcgctttctttaaccagaaacaagaactctcttcacccctattttatctctgtgtccccaaaaattataccattggcagctgcycttttgcagaccttctaggaagcaaaacaataacattattgaatgctgacatcctcttcctaattaacatgcagaaatatgcaacccataactccaatttgaaatgtcaccctggcactgcacttctatgctgaaggaaaacctttgcaatgctcaaagtgtataatcagcctcttctacccagaggcatttgtaaaacagccatgtctggatccccaccctccactgaatagttcatcccttgt

SEQ ID NO: 32120 - DNA, 592 bp, Homo sapiens
tggaatttaaatacagattagtctgtctctgacatctacacttttaactccaggaatatttcggggatctctaagcagggaattaaagaaaacttcgccagctccccccatcttcataagcagaagaacagccaattatagcacagatttcatttggtcactttcattatcaacagagaacattctacgacagagtttgccaacagagctcatcacaacagactgcttctaaggcctgccaaagaacaggactctagacagtctcgctttctttaaccagaaacaagaactctcttcacccctattttatctctgtgtccccaaaaattataccattggcagctgctyttttgcagaccttctaggaagcaaaacaataacattattgaatgctgacatcctcttcctaattaacatgcagaaatatgcaacccataactccaatttgaaatgtcaccctggcactgcacttctatgctgaaggaaaacctttgcaatgctcaaagtgtataatcagcctcttctacccagaggcatttgtaaaacagccatgtctggatccccaccctccactgaatagttcatcccttgt

SEQ ID NO: 32121 - DNA, 608 bp, Homo sapiens
ggtttgggatgcccaggtaatccccaacactcatgaatctagtgtgcagatggacatccaagaatagtgcctccctgtcaaatagctggtacctaccccagtctcttgcagagaagaaaattcttttctcctgactttccccttcctgctacaggtcacaccactccctgaaactgctattgtatatgcccctgaagcaactttccaacaggcaacagtaaaggcaggcaatgcytctgttaacagaagtggtatcttcatcaccttcaacatcatcctcactcccatcatgaccattacacatcacagcagcccccattatataaagtgcttacaggagtccaagcactgttctaggcctcacaacaaccctttaaaataggcattgttatctttgctttgcaaatgaaaaaaaactgagtctctgagaaactgacaagggagtgagaggaaataaaacacaaagctcactgactattcttatgtgctccctactactaccctggacaagtaaatttctttaattgagtcctatgtctatattttatcttattctctctttttggaaactcacttctggtcctcatttgttcccatcacaagaaaaa

SEQ ID NO: 32122 - DNA, 645 bp, Homo sapiens
agaaacagcattaccacctgtgaatagtagcatcatcgctgctcccatcacggacccttctcagaagttccctcaatacctacctctttctgcagaggataatttaggtcctctacctgaaaactgggagatggcctatactgaaaatggagaagtctattttatagagtaaagtataccattatttctacctaaatctctctctctttcttttcccttccttccctctgtctagcagttgccaatgtaaattacatttaagggattgatcacccactgatggtattttttaataaggtttaataagttttgcataaaaaggtaattaattattaycaacttatcgattctcaacagtttgaggaagcataaggttaatcatttccctaaaggtttagacaactaaattatggtatatagaaattatgacataatattcaaagagcatatttaaccattaaaaataaatatatttttatatatttaaatattttaataaatatttaaatatatttataaatatttaaatatatttaaaaataaatatattaaaaataaatatattgcttttttttcttaattgaactacagtgtccttattgttttaagacttcttcatatattctggatataattcctttatca

SEQ ID NO: 32123 - DNA, 645 bp, Homo sapiens
agaaacagcattaccacctgtgaatagtagcatcatcgctgctcccatcacggacccttctcagaagttccctcaatacctacctctttctgcagaggataatttaggtcctctacctgaaaactgggagatggcctatactgaaaatggagaagtctattttatagagtaaagtataccattatttctacctaaatctctctctctttcttttcccttccttccctctgtctagcagttgccaatgtaaattacatttaagggattgatcacccactgatggtattttttaataaggtttaataagttttgcataaaaaggtaattaattattaccwacttatcgattctcaacagtttgaggaagcataaggttaatcatttccctaaaggtttagacaactaaattatggtatatagaaattatgacataatattcaaagagcatatttaaccattaaaaataaatatatttttatatatttaaatattttaataaatatttaaatatatttataaatatttaaatatatttaaaaataaatatattaaaaataaatatattgcttttttttcttaattgaactacagtgtccttattgttttaagacttcttcatatattctggatataattcctttatca

SEQ ID NO: 32124 - DNA, 545 bp, Homo sapiens
ttccatttggctctcagcttttaagagtcaatataatatactctggtcagttccaaaaacttatgagccatctcggccaggctcggtggctgcacgcctgtaatcccagtactatgggaggtcgatgcaggcggatcacgaagtcatgagatcgagaccatcctggccaacacggtgaaaccctgtctctactaaaatataaaaacttagccgggcacagtggcatgcacctgtagttccagctactcaggaggctgaggcaggagaatcgcttgaacatgggagggggaggktgcagtgagctgagactgcgccactgcactccagcctgggcgacagagcgagactctgtctcaaaaaaaaaaaaaagaaaaaagaaagaaaaattatgagccctctcatatggtaaggaaatttcgctgctaataggccaaaggctgaagaacgctgtacaaatgggttagaactggaaaagattagtcctgtgcctaagaaaattccaattccaaaataactatgcaacattcacaaaggcaccgttttct

SEQ ID NO: 32125 - DNA, 545 bp, Homo sapiens
ttccatttggctctcagcttttaagagtcaatataatatactctggtcagttccaaaaacttatgagccatctcggccaggctcggtggctgcacgcctgtaatcccagtactatgggaggtcgatgcaggcggatcacgaagtcatgagatcgagaccatcctggccaacacggtgaaaccctgtctctactaaaatataaaaacttagccgggcacagtggcatgcacctgtagttccagctactcaggaggctgaggcaggagaatcgcttgaacatgggagggggagggtgcagtgagctgagactgcgccactgcactccagcctgggcgacagagcgagactctgtctcaaaaaaaaaaaaaaraaaaaagaaagaaaaattatgagccctctcatatggtaaggaaatttcgctgctaataggccaaaggctgaagaacgctgtacaaatgggttagaactggaaaagattagtcctgtgcctaagaaaattccaattccaaaataactatgcaacattcacaaaggcaccgttttct

SEQ ID NO: 32126 - DNA, 576 bp, Homo sapiens
cttacaaaatgcagaaaattggacatacacagagacataagggatgtgggcacacagacaggaaagtccatgtgaggacagcgagaaggtggtggtctgcaagccaaagagagtgacctcaggaaaaaaaaatcttgcccatatttcagtcttagacttttagcttccaggactgtgagaaaatgactttctgttgattaaatcatctggttcatgctattttgttatggcagccctaggaaactactacattaatctgaacacaaattggattgttagaacaatagactctaaattatctccctgactctttgaggagaaagggtatgctatggtcgttctctaaggctccaaggtatcacctatctgtgagtcacttgaaaaattcacacaaggcacctttcatccagaagttgctgctgtaccagtgccatgtgagttctgtagcacagcctagacgaggtctgagttctgatcracagccaggaaaaactggcacaatgcgtatgtgtattttttgtggatatcatgattcagttttttctgcacatcataaaggcagctgaggtgtccata

SEQ ID NO: 32127 - DNA, 524 bp, Homo sapiens
tgacagagccttagtaatttcatcaacaagagttttagctccagcaattggaggctacttatattacagatggttttacatttagcttttgataggggattagattattgggaaaagggttaatctcagcaaaagcttgtctcagctggtggaatggataatttgttttcctgctgtaaatcacaaagatagctaagatccacttggatgtgttttgtaccaggtggcacgagatcagcaattctttttttttttttttttttttttttgagacggagtctcgctctgtcacccaggctggagtgcagtggcgcgatcgtggctcagtgcaagctccgcctcccaggttcaccattctcctgcctcagcctcccgagtagctgggactacaggcgcctgccaccacgcctggctaatttttttgtatttttagtaraaacagggtttcaccgtgttagccaggatggtctcgatctcctgacctcgtgatccgcccaccttggcctcccaaagtgctgggatta

SEQ ID NO: 32128 - DNA, 535 bp, Homo sapiens
gaaaaacgtagtctctagatgggcagctgattctcagcgataactcttttcaatggaagggaagcacatagttttagtgatcttacatggtccaccatgtaagtggatcatgaagtgtttcttacatgtccacccaactgggcaaccaatatccatgtgcaaacatctttctaaacacaatacaactgctttctttccgaggagccgtgtaagagtacactatgtaagatggttcctccaatcactacaycgtcaaaatcctagatttctaggtcatgaggctgtctctccaccaggcttgaatgtggctcctcccaagttggcaacatttgacttaaaaggcacctctgaccccctgtcatggaggggcatgaatgggatagctagaagtgtgagaattaatgccttatatgtcaatattatttagataaatattgtggaccacaatttgttgcttgttccagcaaaattttgactaggaaagacaagtctgtaaatcaagaaacaacttcatagtttgcctcaggaaatttcc

SEQ ID NO: 32129 - DNA, 948 bp, Homo sapiens
aaattgcatacattaaatatgaaaagtttttcatatatcgatcacacctcaataaagctatttttaaaatacgctgggcctcaagaaaagagtaggctatcggactctggaggaagaataatcaccagaatcctagaaaaaggaataggttwttcaagcaagcctgccataacagcattattataagcacttcgagaggaagagtgaagacagtggcgttgggggaagtcaggcgtgtcccagctgagaaagtgagcctggagacggaacagcaagacatgggtacatgaaacagggcaagcacataggaggttacctgagaaagtgtctagataaagtcaaagacagcttctaggaagaggaggaactgggaccagggagaccccatcaggactgggacatgagagatggcagaggaacagttatgcacacatgggcagcgagaggcaattcggccacagcctttccatctgtgcagcactctgactttcagcggctcttgcatggtaggcagggcctgatcccatcatgttccacgtgttcggatcagcaggactgctgggaacagttgtgcagattgtacaaagcacggtgctgaggaccagggttcacatcacggggcactgtctgcagccttgcacagtctgatgtacaatgctgcaaatcagagaacccagtgagggcttcaattacagttagtgaccaagaaaagatcagcaatgggagtataagccagtgaaaactttctggaagaaaacatagccataggtgaacaaaaatgttaaacctttggagccagcaattcctctgcctctgggaatttagctttacaaaataaccatggacatgcacagagagttggtacaaaggacagtcgtggctcagtgctccttgtaagaaacaaccttcagatcctaaatctgggtattggttaaaatcattctaaat

SEQ ID NO: 32130 - DNA, 1138 bp, Homo sapiens
gaatttcttggcatttggtagcaacacattcaccttggggaattctattcctatctgtgtaaggagtaacaggtaataaggcttccagctttagggcctagagcaataaaagtcactgcagtagattccagctgcagtccaagctgcctcactattgacacttatgaccaagcagaatgaattatattggatgtgtctgcagcagaaagagatgatagatgggcctctggccacccttattagtagaagcctgaggtcctgsagagaggctatgtgtcctctggcaacaactattctccgtgataaggcattcatgacctgttttagtctgagcacctgataatgggaggtcagatgactgagtatctcaaactgctacttctacctgcaccatggacagtcaatggcagaactgcatgaactagatattttcccatccaccaaaccataaagttgtacatgcacaggagcacttcgataacagaatgcttcacccatcaccataatacccaacacagtatggccacagtccatgctatacatgatgtggcaatgagagggctgccgagtcttgtacccatgaaatttactgatcttctgactgcctagcccccagcagcagctagtgatgtgagaaggcctaaggagggcctgttatgggtcagctagaagctacaccctgcaaggctaggtgcttcctactggattcagtctgtggtttgcctgtgaccaataagtgatgccttctcccccataatcagaagtttgtgaacaaatgagtagaactgggaggaccctcccaccataataccaaataacccatggggataatttgtgctttcagaaccactcccacctctaaacttaggctgagggtctgagctgctcaagagaggaatgctgccagcagagaacatcctcatggatgggatgagccaaaatctgagatagtcccctggtcatttggggagcttaatgctattgaaccaacaggaagagaaagagatcacagaattggtcaggatggttgatcccaattatctaaaggaacttgggttgctgctacacaactgggcaaggaagaccagatgtggatccttcggagctcactgggatgctctcagttctcccctttcca

SEQ ID NO: 32131 - DNA, 931 bp, Homo sapiens
cttcctgggttgtatttcatcttacccctttgccaagtcttggttgatgtggtcctgcctcagtttccaaagggtgctggtgatggaaagcggggtgctgggcagattggggtgaaagctggctgctttggggattgtttgatgagcattatagtagattaagctrcttctccccttccttccctgcccttattgaaaaggcgccaaagccaggaaaaacaaacagccacccataaataaagaggaccatgaaataacaaaatcgaaaaagaaaacttgctttagtggcgggcttggctgacgatagggtagataatgggagaggaaacgcagcctttggagagaaaaagaacggaacgcgttgttcactggaagaatgaatgctgcctgaggaagagctgctaaactggggtgtccgatgagcgagcctgtgttaggggagctggtggtgattaggcttacatgaggcatgagtgtcattccaccaagaacccctgggatgggggacaccttaggcttaagcgggctgtgccaacgggaggccggtgtgccagtctggcctagagccttggctgccatgatcatagagctgctgctcacctcctcaagggctggccaagctgggagctggatgcttgaatctcttagggagcccctagaccttctgtcaaggtatatattttttctggagtgttagggagacaatcccagggaggagaggaggaggccaaagttgtttgctgactgtttgcattcaaggctgtgctcctgtcaacactgcctggtggctttctgggtgaatgaaatttactgacttctcttcctttcttgtaccacttacccatctggatcgtggacccatttctcctgcctctgcaatgagttgggtgcctgaggtgggaaggggagagaaacctttcctgagcccttg

SEQ ID NO: 32132 - DNA, 931 bp, Homo sapiens
cttcctgggttgtatttcatcttacccctttgccaagtcttggttgatgtggtcctgcctcagtttccaaagggtgctggtgatggaaagcggggtgctgggcagattggggtgaaagctggctgctttggggattgtttgatgagcattatagtagattaagctgcttctccccttccttccctgcccttattgaaaaggcgccaaagccaggaaaaacaaacagccacccataaataaagaggaccatgaaataacaaaatcgaaaaagaaaacttgctttagtggcgggcttggctgacgatagggtagataatgggagaggaaacgcagcctttggagagaaaaagaacggaacgcgttgttcactggaagaatgaatgctgcctgaggaagagctgctaaactggggtgtccgatgagcgagcctgtgttaggggagctggtggtgattaggcttacatgaggcatgagtgtcatyccaccaagaacccctgggatgggggacaccttaggcttaagcgggctgtgccaacgggaggccggtgtgccagtctggcctagagccttggctgccatgatcatagagctgctgctcacctcctcaagggctggccaagctgggagctggatgcttgaatctcttagggagcccctagaccttctgtcaaggtatatattttttctggagtgttagggagacaatcccagggaggagaggaggaggccaaagttgtttgctgactgtttgcattcaaggctgtgctcctgtcaacactgcctggtggctttctgggtgaatgaaatttactgacttctcttcctttcttgtaccacttacccatctggatcgtggacccatttctcctgcctctgcaatgagttgggtgcctgaggtgggaaggggagagaaacctttcctgagcccttg

SEQ ID NO: 32133 - DNA, 931 bp, Homo sapiens
cttcctgggttgtatttcatcttacccctttgccaagtcttggttgatgtggtcctgcctcagtttccaaagggtgctggtgatggaaagcggggtgctgggcagattggggtgaaagctggctgctttggggattgtttgatgagcattatagtagattaagctgcttctccccttccttccctgcccttattgaaaaggcgccaaagccaggaaaaacaaacagccacccataaataaagaggaccatgaaataacaaaatcgaaaaagaaaacttgctttagtggcgggcttggctgacgatagggtagataatgggagaggaaacgcagcctttggagagaaaaagaacggaacgcgttgttcactggaagaatgaatgctgcctgaggaagagctgctaaactggggtgtccgatgagcgagcctgtgttaggggagctggtggtgattaggcttacatgaggcatgagtgtcattccaccaagaacccctgggatgggggacaccttaggcttaagcgggctgygccaacgggaggccggtgtgccagtctggcctagagccttggctgccatgatcatagagctgctgctcacctcctcaagggctggccaagctgggagctggatgcttgaatctcttagggagcccctagaccttctgtcaaggtatatattttttctggagtgttagggagacaatcccagggaggagaggaggaggccaaagttgtttgctgactgtttgcattcaaggctgtgctcctgtcaacactgcctggtggctttctgggtgaatgaaatttactgacttctcttcctttcttgtaccacttacccatctggatcgtggacccatttctcctgcctctgcaatgagttgggtgcctgaggtgggaaggggagagaaacctttcctgagcccttg

SEQ ID NO: 32134 - DNA, 586 bp, Homo sapiens
tttccttcacagaaggccccacctccttgctccacgaggcaaagagaacaggcagccccaccaggccagtgctctctgggacccagacaggcagctgtgaaaagatgggagcactggctgggcgtggtggctcacacctgtaatctcagcattttgggaggctgagtcgagcggatcacctgaggtccggagttcgagaccagcatgaccaacatggtgaaaccccayctctactaaaaataccaaaattagccgggcatggtggtacacaactgtaatcccagctactcgggaggctgaggcacgagaatcgcttgaatctgaggggtggaggttgcagtgagccgagatcgcgccattgcactccagcctgggtgacagagtgaaactgtgtctcaaataaataaataaataataaaataataaaacaaaatattttttaagagaagacagagcaccacccccagccagtgcccacccaggtgacctcagggactctcgccatccccgaggcttggccttctcaaatccagagtggagatgacagtttacggacgggcttcatgaactggaaacatgagggaaa

SEQ ID NO: 32135 - DNA, 493 bp, Homo sapiens
tggggtatgctgaatgaattggcgccactatataaatgagtttktccgagctcaacctgggaaaatctcccaataaaaggaagaatgtaagagtcacaactctcagtgggaactggaagggctctgactggctcgcttagctgtgaagcccagggcagtccacgcgaagccctgtagggtcctccggatcagcctctgcccatctcctggttacgagggctgggtctccagagtggcgagaaagacgcccacctcctgctcaggctgctgagaaggccctggggaagacaatacccttagcctcagtgcctgcctccttccctgccactggcctgtcttggatcacgcaatcaagtgctctgcagccaagggagtgacagggcctcagcacgaccatcctgtcccagtgcaatcgcaggcaccaagagtcggggagtatgggccccaaaggaggatgggctgctgtttcccatgtccgccagtgggaaagaag

SEQ ID NO: 32136 - DNA, 493 bp, Homo sapiens
tggggtatgctgaatgaattggcgccactatataaatgagtttttccgagctcaacctgggaaaatctcccaataaaaggaagaatgtaagagtcacaactctcagtgggaactggaagggctctgactggctcgcttagctgtgaagcccagggcagtccacgcgaagccctgtagggtcctccggatcagcctctgcccatctcctggttacgagggctgggtctccagagtggcgagaaagacgcccacctcctgctcaggctgctgagaaggccctggggaagacaatacccttagcctcagtgcctgcctccttccctgccactggcctgtcttggatcacgcaatcaagtgctctgcagccaagggagtgacagggcctcagcrcgaccatcctgtcccagtgcaatcgcaggcaccaagagtcggggagtatgggccccaaaggaggatgggctgctgtttcccatgtccgccagtgggaaagaag

SEQ ID NO: 32137 - DNA, 529 bp, Homo sapiens
tggcccaagcactctgattcaactcaggtcagcattactgagaatacttttaattgtgtacccagggctcagaggagcccagaggaggagagaacacagagtccacctcgaatttgtagtctcctgagccagatcagttcagcacacacaaaacagagggcaagataatgttccattaccaacttcatgggcactggtgggtacaagtcacaagcccacattttctcagtgttgaaaggttggagtagctcagaggttttaacgtctcattccccagggcccctgggcttcagtagggtgggcctcaggggagacagaagagtcaatcggcagggataagatccctcactgcataatttttcaaccagaatggaccgacagctatgattcctttattgggatatgatgtttaattttcttgggaaacaagtgtgggaaccactggattagtggagctctgagttctctgagtctagagttcctatcagagaaagagcatcaratgtgctttgaacataagaaaatttca

SEQ ID NO: 32138 - DNA, 1904 bp, Homo sapiens
tccttccccttcatagtggaagctgggagctgtccctgggacccatctccccacggggacaggggccaggaaacggctgcttctgcccctgggagttgaaggtggcacctgaagcccttggaagtctgggttcccatggagagatcagggcctggtccccatcctgagcccccggcgtggacaggctggggcctggccaggccaagcaggcacagccttcccacagctgccggggaccggctgcctcctccccagcctttgttcttcctcagcccttctctccatccactgcatcaccacctgcctgagggggttttactccagtgggcctgctcagacagctgcctgccacaggggccacagcccggggtggggagtcagggtgcctgttcccaaccatccgtttggtctttcccctttccatgcctcagtttcccagctatgatgcaggggttggacaggatggtttcctcgtgcttctccagctctaaccacctcgggtctgtggcagtgagttggagccagggggcctcccagtcccagctgcctgctcccagccctgcctgtgcccatacctctgtgtgccccgccatgctgctctatccatgctcttcacctgtgtccagggcagctctggccaggccaggaggtgggggaagctgaaatgcagcctccctggccttgcgccctggctcagggcctgtcctcctacaggctgctttggmctgctggcaccatctcagccttgagagtgagcccttgggggcactgacactggcatccctgcacctcaccagcccagctcgctgtggggctaagggaaggcttgggatgggcaaatgacgctgcctctgccctggagttaggatgctcctgcgtctgcccacatggccctcccagaaggggtcagcaagtggctgcggcagggggttccagaactagagtgagagggatcccccaggcttcagggcatcagtcagggcttataaatgtaaagcacagttaaagccgaggagcccaaggccagatccaaggcacagaggccaccatggtcaccacatcaaaccactgggctggggtcagccgagggcagcctaggagccaccaggaccagcagggcagtgggtctcacctcagaggctgtccagacagctacaggcctggggctgggctggctcagaggcccaaagggagagctgagaaagaaatgacacccccctggtcacccctcaaaaaacatccatgagggcatgtcaaggaccttcctctgggtcctccttgcttttggctgcattttccttctaatcctctggaccccagggcccccaacctgaggaacagtgacaggtgcaagcccgaggtttgcaccccatcgcagtgaggcagctatcagtgccggggttccctgccccaggcaggcttaaggcagtgcatgggcggtgggcagcagcctccctccccagaactgagacactacctcagccatgacaccaggacgagcccagccagccccttcccccaaatcttcctcttgtcgccatccagagaggccaagacccccttccccttggagttgggagagtatctcttcccactgggggtccaccaggacagaggaaagcctgatgctatctcgagagggtctgccaggctgccgacgttaggtactctgggacaggagcctcaggcagcctcccaaactgcactgggcccacccagaaccaacttccactggggtctcagagcccctgagcaatggggagtgaccaagttctgagccagtggagcctggttagagtcaggggggcccaaaggccagatggtcccagaaaaggtgacttttgatttgaccccgtagtgttgcccctgccagaggagaactgaggcaaaaggacagggatccc

SEQ ID NO: 32139 - DNA, 578 bp, Homo sapiens
ggcacttgccaccatgcccagctaattttttgtattttagtaaagacggattttcaccatgttgcccagggtggtctggaactcctaagctcagtcaatctgcccaccttgtcctctcaaattgctaccaggattatctttatagctggtttttgtttgttttgagccagatgtcattcaagtttcatgcatttggttgtgatrtttcatggtattttttgagacttcttgatacatacctgtcatgcattgatagagatttatattctaaccaagttttggacatttttatctcaaacaatagcttttgtcattgttgcctgctcataggatcactcttaataatagtctcatttaaaaagttaaaatattcatgaaatttcattcacacatttctttattccttattaagagcctgccatgcactagacatcatttttctaggtgattggagatgaaatggtgaaaaggaaaggcaagaatggaatttcctgctagtggaaaatagaaggagaaagtaagaaaattttttttctttctaagtcaagtcagtgtcatatacaagagaatgctaggtg

SEQ ID NO: 32140 - DNA, 442 bp, Homo sapiens
  misc_feature (1)...(442): n = A,T,C or G
ttnnnnnnnnnnnnnnnnnnnnnnnnnnnnnnnnnnnnnnnnnnnnnnnnnnnnnnnnnnnnnnnnnnnnnnnnnnnnnnnnnnnnnnnnnnnnnnnnnnnntaaaatgacaacatctaaaactaggaaaacatcaagttaccaagtgttgggagttctgttgactaagataaaaattagagcaagaaattcaacatgccggaaaacaatcaattgatttttcayttttttaagaagaaaattatttggtcaagggcagtggctcactcttgtaatcctaataatttgggatgcagaagcaggaggcttacttgagggttggagtttgagaccagtctgggcaacatagtgagaacctgtctacaaaaaaaaaatttaaagaattagccaagtgtcgtggcatgtgcctgttgtcttggctatttgggaggctgatatggga

SEQ ID NO: 32141 - DNA, 817 bp, Homo sapiens
aagatcttacccgttaccctaagcccaggcagaagtcaacataatttctcttgtctgggtccagctatgagrgtcatcaccatgtttgtgagctgggtccagaaatgagtcacaatcttacctgtggtcagatctgcatatgacagtcacaatttcaactgtgaactgtgtccacaaggcaaagtcaggatgtcactagtgggatctgcccacatgtgtgggtgacaattcttactgtcagctggctgtgggtatgagaataagtctcaactttgtattgggctgtgttgacactctctgtaccaccacagggcattatactgtatgtgattttatgttgtatgtgttgtgattttttttgtgacctttgtacaagtagaaaacccagaaccatccccattttcccaagcgtaacaatgagagtgaacgtctcttctgttagcttggttcaagtgtaagagacaacactgtgcctgtgagttagtcaagaaatgacttccctttgacctgtggccaaatccacatacgacagtcacgattccaactgtggtctgcatccatatgtgagatttataacctcaccagtgggctgtgtctaggtttaagggtgacaatcccattgttggctgggtgcacctatgggagtcacaatctcacctgcgtgttggaccgtgttatgacatagcttataccacccaagggctttgtaaaatatttgtgtcataatctcccatgaccttttataagaaaacccagaaccttacctgtgtccctaagtctagccagaagagtaaaaaaatctgttgttttggttgag

SEQ ID NO: 32142 - DNA, 994 bp, Homo sapiens
tgcacccaaatgatgttaccctcctgcctgggccatgccgacagtgggaattgtgacatttctgggcccaacatttaagcgatgtgactatcctcttatgttcgcagcatgtgttgtaacatatcactaagcccagaactcaggtgatgtggctttcctgccatggcactgcacacaaggagaatgctgacatatccctggccctgaattcagatgatatgactgttttacctgatccacactctgaagtgaaattgttacatatacccaggcccagttagcagacatgatgatgactctcatasatagacccagcaaatacaacagattttttactcccctggctagatttagggacacaggtaagggtctgcatttccttataaaaggtcacaggaaatatgacataaatattttataaagtccatgagttttatgagctgtgtcataatgcagtccaacaagcaggagagattgtgactctcataggcacatccagccaacaatgggattatcactcttaaacctagacacagcccactggtgaggttataaatctcacatatggatgcagaccacagttggaatcgtgactgtcgtatgtggatgtggccacaggtcaaaggggaagtcatttcttgactaactcacaggcacagtgttgtctcttatacttggaccaagctaatagaagagacgttgtctcactgttacgcttgggaaaatggggatggttctgggttttctaactgtacaaaggtcacaaaaaaatcacaacactcatgcgtacagtataatgccctattatactgtacgcaactttgtattgggctgtgttgacactctctgtaatactgtaatacctgaccacaggtaagattctgactcatttctgggcccagctcacaaacatggtgatgactctcatacctggacccaggcaagagaaaatgtgttaacttctgcctgggcttagggtaacgggtaagatctt

SEQ ID NO: 32143 - DNA, 529 bp, Homo sapiens
cagaaggtgcaacccgaccagacagatctgcttttcctagaatgcctccgctgctcccctcttggtgcctgaatgtggatctcattggaggggggtttccaaggtaccacaccagtaattgttctgtagatcttttactgtgagtaagctgcagttaacagttgcctcatgacttttaattagggtgaaatcgaatgcagccccgattccagaccttcccacaatatcaccacctctccataatagaggaaaaaactgaatggtacacagggctgctcagccctcatacacatggattttctccagctccttgcagtgatcatcagcccttgggaccttgtggtttgcccatycctccggcttccatctgggtgatgtcatcctgcagtcccccacagctctgagatgcgctggatgatgctattattagcaagcctgagctcaaggccaactggcttgtctgttggctcacactgtcatgaataggcttaattgctcacaccctttcagtgggttttttgaatagaca

SEQ ID NO: 32144 - DNA, 982 bp, Homo sapiens
catctctacaaaacaaaacaagaaaccaaaaacacttttccaggcatggtggcatgtgcctgtggtctcctaatcgggagactgaagtgggggaattgcttgaacccaggagttcaaggctgtaaacagctatgataatgtcactgcactccagcctggatgacagagcagactctgtctctaaaaaaacaaacttaaaatccaaaccaaaaacacaaccacagttttttttttttttgagacggagtctcgctcttcgcccaggccggactgcagtggcactatcttggctcactgcaagctccgcctcctgggttcatgccattctcctgcctcagcctcctgagtaactgggactacaggtgcccaccactgcacctggctaattttttgtatttttagtagagacggggtttcacagtgttagccaggatggtctcgatctcctgaccccctgatccgccygccttggcctcccaaagtgctgggattacaggtgtgagccaccacgcccggccaaccacagttatgttaaagacttctgaatgggctgaagaattactatggacctgtaaccaaaactcataggaggaaggaaactcaactgagccaaatgagaaattttcatggtttcttcaggaagaatttctttctttttttctctttttctccagaggaatttcccatctatagtggtttacagacagctgtgtttctccaaccacatttgtggtctggctggtgaagactgaaggacagatcgtggttacatggttctatgtaaaatgacattgatcacgttgagaataaaactaagtttcttgtaagtggcagatgataatggaagattaggggtttctggactcagaaaatgccagtgaatatgctttcataagtctatactgagacaggaatgttctaatattggtgatgatattatacatgtgaaggcacagggcagatattttgctgttggcttcat

SEQ ID NO: 32145 - DNA, 982 bp, Homo sapiens
catctctacaaaacaaaacaagaaaccaaaaacacttttccaggcatggtggcatgtgcctgtggtctcctaatcgggagactgaagtgggggaattgcttgaacccaggagttcaaggctgtaaacagctatgataatgtcactgcactccagcctggatgacagagcagactctgtctctaaaaaaacaaacttaaaatccaaaccaaaaacacaaccacagttttttttttttttgagacggagtctcgctcttcgcccaggccggactgcagtggcactatcttggctcactgcaagctccgcctcctgggttcatgccattctcctgcctcagcctcctgagtaactgggactacaggtgcccaccactgcacctggctaattttttgtatttttagtagagacggggtttcacagtgttagccaggatggtctcgatctcctgaccccctgatccgcctgccttggcctcccaaagtgctgggattacaggtgtgagccaccacgcccggccaaccacagttatgttaaagacttctgaatgggctgaagaattactatggacctgtaaccaaaactcataggaggaaggaaactcaactgagccaaatgagaaattttcatggtttcttcaggaagaatttctttctttttttctctttttctccagaggaatttcccatctatagtggtttacagacagctgtgtttctccaaccacatttgtggtctggctggtgaagactgaaggacagatcgtggttacatggttctatgtaaaatgacattgatcacgttgagaataaaactaagtttcttgtaagtggcagatgataatggaagattaggggtttctggactcagaaaatgccagtgaatatgctttcataagtctatactgagacaggaatgttctaakattggtgatgatattatacatgtgaaggcacagggcagatattttgctgttggcttcat

SEQ ID NO: 32146 - DNA, 951 bp, Homo sapiens
tgctgaaatcactccacctcaatttattacaaagtgaaccacaccaacgcaattgtttaacctaacccaaacaactagtgttaaataaaggtgggttttgtgccttaaccaagcccaactggaaccaaaaaggcaaacaccttggtggcagggcaagttccctaccaacatttgttagcataatatgtctctatctcttccttctaactaatttgtcttggtctagaccttactgcagacaagcagatgaggaggctgagtcagagcagggcaggctgagagacctgagcctcttagaacctcaacaacctgagwaatttaaagggccagacccagggaggggttaacagaagcgaagccatccctcctcagagaccaaaaccacaaggaggcttgagcttgttctccttccaactgaggggtcaggagattctgtcaacatccagagctgccttctgtcccctttttcttaagtttaaggaagccacatggtagttacccaatcccaactttatatccttaactcagcccaacccagctttgatccacctgactggtgaccagcaacattgaggcagggacaccttagccgtatcattaagctgccacaacaaaatacctggggtacccaaatagcagacatttattgtcacacagttatggaggatggaaatccaagatcaaagtgttggcagggttggttcctttggaggcctctctccttggcttcagaaggccaccttctccctatatcctcacatgaacttttctctatgtgagtgcatccctgatttctctttctcttcttatgacgacaccagtcagattggattagggatccactctggcaagctcattctaacttaatcacctcttgctgtggtttgaatgtatcccccaaagctcatatgttgcaaacctaatgcccaatgcaacaatgttgagaggtgg

SEQ ID NO: 32147 - DNA, 951 bp, Homo sapiens
tgctgaaatcactccacctcaatttattacaaagtgaaccacaccaacgcaattgtttaacctaacccaaacaactagtgttaaataaaggtgggttttgtgccttaaccaagcccaactggaaccaaaaaggcaaacaccttggtggcagggcaagttccctaccaacatttgttagcataatatgtctctatctcttccttctaactaatttgtcttggtctagaccttactgcagacaagcagatgaggaggctgagtcagagcagggcaggctgagagacctgagcctcttagaacctcaacaacctgagtaatttaaagggccagacccagggaggggttaacagaagcgaagccatccctcctcagagaccaaaaccacaaggaggcttgagcttgttctccttccaactgaggggtcaggagattctgtcaacatccagagctgccttctgtcccctttttcttaagtttaaggaagccacatggtagttacccaatcccaactttatatccttaactcagcccaacccagctttgatccacctgactggtgaccagcaacattgaggcagggacaccttagccgtatcattaagctgccacaacaaaatacctggggtacccaaatagcagacatttattgtcacacagttatggaggatggaaatccaagatcaaagtgttggcmgggttggttcctttggaggcctctctccttggcttcagaaggccaccttctccctatatcctcacatgaacttttctctatgtgagtgcatccctgatttctctttctcttcttatgacgacaccagtcagattggattagggatccactctggcaagctcattctaacttaatcacctcttgctgtggtttgaatgtatcccccaaagctcatatgttgcaaacctaatgcccaatgcaacaatgttgagaggtgg

SEQ ID NO: 32148 - DNA, 951 bp, Homo sapiens
tgctgaaatcactccacctcaatttattacaaagtgaaccacaccaacgcaattgtttaacctaacccaaacaactagtgttaaataaaggtgggttttgtgccttaaccaagcccaactggaaccaaaaaggcaaacaccttggtggcagggcaagttccctaccaacatttgttagcataatatgtctctatctcttccttctaactaatttgtcttggtctagaccttactgcagacaagcagatgaggaggctgagtcagagcagggcaggctgagagacctgagcctcttagaacctcaacaacctgagtaatttaaagggccagacccagggaggggttaacagaagcgaagccatccctcctcagagaccaaaaccacaaggaggcttgagcttgttctccttccaactgaggggtcaggagattctgtcaacatccagagctgccttctgtcccctttttcttaagtttaaggaagccacatggtagttacccaatcccaactttatatccttaactcagcccaacccagctttgatccacctgactggtgaccagcaacattgaggcagggacaccttagccgtatcattaagctgccacaacaaaatacctggggtacccaaatagcagacatttattgtcacacagttatggaggatggaaatccaagatcaaagtgttggcagggttggttcctttggaggcctctctccttggcttcagaaggccaccttctccctatatcctcrcatgaacttttctctatgtgagtgcatccctgatttctctttctcttcttatgacgacaccagtcagattggattagggatccactctggcaagctcattctaacttaatcacctcttgctgtggtttgaatgtatcccccaaagctcatatgttgcaaacctaatgcccaatgcaacaatgttgagaggtgg

SEQ ID NO: 32149 - DNA, 1116 bp, Homo sapiens
ttttaatatctatctagagtcctaggtttctgaaaggctatattactttgtaacataaagcagagtggcataaaagagggacagtcagttctgtcttcacagaagtgatttcaaattgactctttgataattcttaagatttttcaaacactgaattacattattttttgccaatgtagtttctctgtccttcagacaagygtccctaacatataataacacaagatataaaactgattttgagtaactcttcacttactgacatgctgtagataattttgacaactctttctgatttatttgcagtagtcaacttaagcagtaggagattttcttgtagtctagcaatatttcatacagggtggtcacaatcctggctgtgaattgcccaatttttaaacaaatggaataactaataagagacttcatttgcaaccacaggaaaccacatttttttcacacaagaggaattgtgttttctctttcatggtgttttggaaccacatttacaaacaatgagttaagcagacccggagtagggtgcatatctttattataatgttctatggttttaacctacttcacctgtcatcaacataataaagtccgacactaatgaacatgcctaacaagaaaacagaaatccactgaacagaatctagcaagaaacaatatgcttaatcctatagcagcacaatttatccactacctttttgacatttgattggagctatttacgggaagcacacttcattccctttatcaagacctccaggtttggatttattctctgagaagataatcctgccgtatgttcagtaattccacagttgaagtatttagtcactgatctgttgcaataatatgataggaataaagcgggtactccttgaaggaatggattttgcattatgaatatgtagtcataggacaaataaagaaggcattgagtgaaaatgtcaacatcctagaattaagtatgtattttatattgaagatttagaatgcatttaacgtgcccatcaggccaaatgcctccaggaatagaagaatggcaatataatatgtatttctgagcaaactcagaaaaagaaccagattttagactaggcagat

SEQ ID NO: 32150 - DNA, 1116 bp, Homo sapiens
ttttaatatctatctagagtcctaggtttctgaaaggctatattactttgtaacataaagcagagtggcataaaagagggacagtcagttctgtcttcacagaagtgatttcaaattgactctttgataattcttaagatttttcaaacactgaattacattattttttgccaatgtagtttctctgtccttcagacaagcgtccctaacatataataacacaagatataaaactgattttgagtaactcttcacttactgacatgctgtagataattttgacaactctttctgatttatttgcagtagtcaacttaagcagtaggagattttcttgtagtctagcaatatttcatacagggtggtcacaatcctggctgtgaattgcccaatttttaaacaaatggaataactaataagagacttcatttgcaaccacaggaaaccacatttttttcacacaagaggaattgtgttttctctttcatggtgttttggaaccacatttacaaacaatgagttaagcagacccggagtagggtgcatatctttattataatgttctatggttttaacctacttcacctgtcatcaacataataaagtccgacactaatgaacatgcctaacaagaaaacagaaatccactgaacagaatctagcaagaaacaatatgcttaatcctatagcagcacaatttatccactacctttttgacatttgattggagctatttacgggaagcacacttcattccctttatcaagacctccaggtttggatttattctctgagaagataatcctgccgtatgttcagtaattccacagttgaagtatttagtcactgatctgttgcaataatatgataggaataaagcgggtactccttgaaggaatggattttgcattatgaatatgtagtcataggacaaataaagaaggcattgagtgaaaatgtcaacatcctagaattaagtatgtattttatattgaagatttagaatgcatttaacrtgcccatcaggccaaatgcctccaggaatagaagaatggcaatataatatgtatttctgagcaaactcagaaaaagaaccagattttagactaggcagat

SEQ ID NO: 32151 - DNA, 556 bp, Homo sapiens
ccatgtccctacaaaagacatgaactcatccttttttatggctgcatagtattcctgaaaactttattacaaataaaaagcagccactgaaagatataaaatgaatattctgtgaaaaattataaaatttgagaatgctattctagcttaatgtataacaataatacatactatatctaccccaaattcaaagtattctgagttctgctattaaaacagaattttgaattttactggtgactaaacaatgtttatgtttccccttgtgaatatatatatctttgaaatagaaaattagaraaacactgaatttttccagtttctagagtttaatcctttgtgggaggtggagaggaaagaagaaagaaacagaaaaactatgttttcagaaggttttatccatccttccgagtaagcctaattcttttggtctttaaaaactttaagtattgtgtaactccatccttgtacgttttctcctttcaacactgggcctttggctgattttcagggacttgtaaaagcgagaagagaggaagcagaaaagaaaatggca

SEQ ID NO: 32152 - DNA, 478 bp, Homo sapiens
cgctcccagccatttccaggtcttgatagaaatttctttaagtgtctcttctctctcagaagtaaagcctcttgtgtcatatggaaacattactgactcactgctcagatttctttaaggtctgagaaataaacaacatgggactttctcaaaaaaaaaaaaaaaagaagaaagaaagaaaacatatccaatgatactaatgatatccttaatttcaccaatatcttgtaattttcactgagaactacaagtgagtgtcatccctgagataaattctctgtatccagctttcaaacttcacttttgtttgccacactcttgacatattttaagtgacaatcactgcattactttgcaggggctctttgagaagtcctgcctcaaaaaaaaaaaaaaaatctgctaaataagccgcttgactaaccactttgagtgctacyttttttcatttaagtgaagaatgaattgtttcatcttt

SEQ ID NO: 32153 - DNA, 802 bp, Homo sapiens
gcgggtaaaatgctttcaaacagtatcacaggctacagagaaaacttttgtgaaaggaaaagtcaattgatgtggcaaacttcattgatgtcttattctaagaaacttcagcaaccaccaccctgatcagtcagcagtcattaacatagagggaagaccctccaccagcaaaaatattacaacatgttaaaggctcagatgatcatcattggcatttattaacaataagattgggtttttttggttttttgtttgtttgttttttgggacagagtctccctctgtcacccaggctggagtgcagtgccacgatctcggctcactgcaacctccacctcccrggttcaagctattctcctgtgtcagcctcctgagtagctgggattacaggtgcacaccaccgtgcctggctaatttttgtatttttagtagaggcggggtttcaccatgttggtcaggctggtcttgaactcctcacctcgtgatccgcccacctgggcctcccatagtgctgggatcacaggcgtgagccaccatgcctggctgcaataaggcatttttaactaaggtatgtacattgtttctttagacagaatgctattgcgcacttaaaagactacggtgtagtagaaatatcatttttgtatccactgagaaaccaaaaagtttgtgcaacttgctatattgcaatcttggctttattagggtcgtctagaattaaacccacaatatctctgagttatgcctgttttgctctaacccacttcagagctctgggtgaccactgaagatccagagggat

SEQ ID NO: 32154 - DNA, 581 bp, Homo sapiens
tctgggtgatgctacgtgaagagcatccccctaacctggtaaggttagagagaagattgggatcacaaaaagaactttaatcaatgtactagtaaatttgaactattttggaagtcaacacagagctacttcccttctaaatcaatattgacttttgaatgggtattctagagaatgtgaaatgacagctttaaagatggctttaaaacaattattcaaaaaaaatgttcaaatcaaaacataatacctctgaagacaractctataatgctttaggccaactcagtctctgaagctcaaatgagcataaatgcaattagccatttgctcccttaaaatgagggtaggtctgtctaatgtagcttgtaatttgccaattgcatgtaaattattttcacttgaaaatcacttaagttatgtaaagggacagtcctttcaacatgttaatcccaaatattgacacttttttccccaagaaatactgttgtttgattttcaagatatactacaaaataatacaaaggcataaaactctttccagttgaattaaatattatcaaaatccttcaggaataattttg

SEQ ID NO: 32155 - DNA, 719 bp, Homo sapiens
ccaactatcatggtaggcactgaagattatagaaatgcttcatttatcaacaagggtaggtacctaaaagataattttaaaaataaaattatgagaaaaaaaaactttctttctccatgtatttctactttcagactcatgcccaatatctaatattgtgtgttgaggatataattaaattgtatttcagagtaatctccttggtctttttttttttttttttgagatggggtctcactctgtcgcccaggctggagtgcagtggtgcaatctcggctcactgcaagctccacctcccgggttcacgccattctcctgcctcggcctcccgagtagctgagactacaggcacctgtgaacacgcccggctaattttttgtgttttcagtagagacagggtttcaccatgttagccagaatggtctcgatttcctgacctcgtgatccgcctgcctcggcctcccaaagtgctgggattacaggtgtgagccaccgcgcccggctatatgttggcaactgctggaggtgtggacaggggctttttttttttttttgagacagagtttcactctgtcgcccaggctggagtgcagtggcacaatctcggttcactgcaagctccgcctyccgggttcacgccattctcctgcctccttggtcttaaacttgatcttttgctagctgataaagaccagtgaaggacagtggattcagacttt

SEQ ID NO: 32156 - DNA, 543 bp, Homo sapiens
attgttaaaaatgctgtcctccaaatgagtacactgctctcttgattccaagagtcaaatcagtttaaatacatctttcccccaggcagttttcaagattaataatattgcatatgttgttttaggaaactgttttttaaacttcagctcagagtaacatttattttgtgagttttgagtaggccagccctccattccccatagacacaatgagtagagagataatgcaacctctgccaggacaagagattgaagtggcggacagaaataatactgtctacattggckgtagggtccaccttccagccagcatgatagagccttcagcaatcttcatcttctataataattcatataagagggaacacaaaaaaaagtcatcaccatttgaaagaaatagataccgttataaaattgacagctattttttgttgttgttgttgttactgcttttagactacagacatggtgctgagccctttcagctctacaatttcttcagtgttatgtgtctgctcgctaaaaatcatgtaatattttagg

SEQ ID NO: 32157 - DNA, 1007 bp, Homo sapiens
acattgatggacctgttgattgagtctgctgggataggcttagagcctgtgtccccaggggccagcttgaagcccagagacaatggggctggcctgttgctgagggctgtctagggcttggaacctttgggaccaactcagtgttgggatgcacctgaagctcagggccactgggccctgcctgctacagarcacacaggcagatgggtaaataaatgatgaaacaggagggatgcaggaggagtttgttattgttttcattttggaagttgaaagaactttttctatatatttgctgatataaagaagtatagattccttctcccagaatagaaaagccagctacattgatatggagtgcctaggaattgggaggtgtcactgagcaggggggaaagccgaagagaggctcatttaactggtgaaaagccagtcatacctactctctgccaggtattctatatacattatgctatttaattattaaagctgttttgttttataaaatactattgtgagccccattgacagattaaacaactaaggcttagagaagtcaagtaatatgttcaaggtcacacagcaactgaagcatgagctgcacgctctttcctgcacatcacactacctcattgggccctgggggaaaccaggaataattaaggagctctaaactgaccactacttttcctacctctggctgccctgccaaggagataatcacatgcatttctcacacttctgtcctctctgattcatttgtttcctctgtttggtcatcataagacagcccaagccatttctcagagttagattcatgctgtgggatgacagggctgactgtctgcatctgctctcaggaggccctcgacatagggctgcagcactgaccaaggccttcatttgtcactgaggccaatgtctcagacttccctgccagctcagaccccaacatgtggggacagagacttgctggcttcaaacccacccctgagccatctggcaga

SEQ ID NO: 32158 - DNA, 2674 bp, Homo sapiens
ccttgacccagcaattccacatctacttgtggaagcttgagaaactcttcaacaagaaagaatattaattgcagtatgtctcgtgatggcaaaataccggaagcaaactaaaagtctgccagggtggaactggttaactcagcaatgtcctccgtccaatagaatggcatgaggcagatctatatgagcccayacatggaatggtcttcaatatacattgcttagtgttgaaagaaaagtgcccagtcaggacagtggtggtgtgctgagatttgtgtgaaaagaaagaacccacatatacatacacatatattcattgtgcaaaagctctctggaaggacacacaagagacttaacagaggctacattcaaggaggggatctggctggctggggagagctgtgagctggagacttactcttttgctgtatctcttttgtgccttcttaatttgtaccatgtgtatgttttacttattccaaaatactcaagtaataaaaaataaaacccttagctcaacacactatctgttccttctgttccttgttttttctctttttttctttcttctttttttatttttttagaggaatgcagtggtatgatcatagctcacctccctgggcccaagcagtcctcccacctgagcctcctgagtagctagaataacaggcacataccatcaaacccagctaattttttttttattagagatgagttctccctatgttgctcaggctggtctcaaactccttgagctcaagcgatcctcctgctttggtctcccgaagtgctggaattacagacataagccaccaagcctggcctggccctatttcaatagtagttatcttttctaccttatgccatcatcatttatacactacttttgcatcctcatctatattttacagtttgtgagggcagaattcatgtcaaataataactaaaatttttgagaatctatcatatgccaagccctgttatcaattctttatgtgcattatctcatttatttctctataatcacctctgatggtagggactgttactatcctcattttactagcagggcattaaaaaaaacttccctaaggccacctagctatgtgctgcagacgctgtctgatcccaaaactgtttgactccatttctggctgacttcaagtttgccttaatcattgtacatagcagctcattcttcctctgatacacacagagtacctgaaatcagtaatgcataagtgaatgggtgcatgagtgagtatatgagtgatgtacccaccacatcaacagttatcctgcctgttgtgcttctaggtcatagcatgctgttcctagatttggggaggacttccttataaataaccacaggtttccattccctgctactgcctggagggaaatatggagatggaatttaccaactaaggaagatgaaggggctggtggtttcacataagagaggatattttttaagcaaaggcgctggggtttagacaagagcctgagggcctattctgtcacttctgcatgaagcatagttcacatctcaaagctctgaaatgtcagagagctgattgtacagtccctggtcatacagagcccaagggttccttccaacagcagggcagcctgtacatgctcatcctgcagtctaagggccgagcaaccatgaatcccatgtgggatagccttgtttgagcatagaaacaaaggtttctagtcctctctaccaaaaaaaaattgctgatgtgttcatgtacctgtttgttttccacactccaaacaaagcccactgtgagcttccataagacaatttgaaccaggccccatgatccttacacacaattctgtctcctcatcttgcatgatttatatggggtttaaataataaattgcatggatgctatagaatttatagtgctccaagtaggtcattaaataaatcactgtataatttatataaatgaacctaaatcatgcagcaggaggacttcattagaaaatcaatcctgtgagtggataaacatgaggactggcaggtgcactgttgtttttgaaaagtccctgcatctgtgaccgcatgtgaaggtgctctgtgctggagggcactcacttctcccaaccccaccctccccctgctcagttgtgggtgctcccaggaagctgggttcaggcttgcagtctccaagaagacctgcttccacctccaagttcccgggctcttctagcgggagtccacacagccgcagggactcaggtcacctcaaaggcagccagcctcttaccatttccatggcagaactgaggataaaagataaggcttggggcattctgagtaaggaaatccacagggctcccgccaactagaagcccagtcttggcttgaacacaggccaagaaagaagtccaaacatctttggctggcaggagtgttcaccttgccgtgggcagatgtctgcctgatgctgctgcctgccagctgtgcttcccccagcctcccatgcagaatacattccagcctccatcaggaacccattcttgaggggacataaaggacagatcggtccaaggggcaggtccgattagggcagcttaaacccctcaattcctctccaggtccattctgggacaggagagccttgggatctccacctggcaaagagaagca

SEQ ID NO: 32159 - DNA, 2674 bp, Homo sapiens
ccttgacccagcaattccacatctacttgtggaagcttgagaaactcttcaacaagaaagaatattaattgcagtatgtctcgtgatggcaaaataccggaagcaaactaaaagtctgccagggtggaactggttaactcagcaatgtcctccgtccaatagaatggcatgaggcagatctatatgagcccatacatggaatggtcttcaatatacattgcttagtgttgaaagaaaagtgcccagtcaggacagtggtggtgtgctgagatttgtgtgaaaagaaagaacccacatatacatacacatatattcattgtgcaaaagctctctggaaggacacacaagagacttaacagaggctacattcaaggaggggatctggctggctggggagagctgtgagctggagacttactcttttgctgtatctcttttgtgccttcttaatttgtaccatgtgtatgttttacttattccaaaatactcaagtaataaaaaataaaacccttagctcaacacactatctgttccttctgttccttgttttttctctttttttctttcttctttttttwtttttttagaggaatgcagtggtatgatcatagctcacctccctgggcccaagcagtcctcccacctgagcctcctgagtagctagaataacaggcacataccatcaaacccagctaattttttttttattagagatgagttctccctatgttgctcaggctggtctcaaactccttgagctcaagcgatcctcctgctttggtctcccgaagtgctggaattacagacataagccaccaagcctggcctggccctatttcaatagtagttatcttttctaccttatgccatcatcatttatacactacttttgcatcctcatctatattttacagtttgtgagggcagaattcatgtcaaataataactaaaatttttgagaatctatcatatgccaagccctgttatcaattctttatgtgcattatctcatttatttctctataatcacctctgatggtagggactgttactatcctcattttactagcagggcattaaaaaaaacttccctaaggccacctagctatgtgctgcagacgctgtctgatcccaaaactgtttgactccatttctggctgacttcaagtttgccttaatcattgtacatagcagctcattcttcctctgatacacacagagtacctgaaatcagtaatgcataagtgaatgggtgcatgagtgagtatatgagtgatgtacccaccacatcaacagttatcctgcctgttgtgcttctaggtcatagcatgctgttcctagatttggggaggacttccttataaataaccacaggtttccattccctgctactgcctggagggaaatatggagatggaatttaccaactaaggaagatgaaggggctggtggtttcacataagagaggatattttttaagcaaaggcgctggggtttagacaagagcctgagggcctattctgtcacttctgcatgaagcatagttcacatctcaaagctctgaaatgtcagagagctgattgtacagtccctggtcatacagagcccaagggttccttccaacagcagggcagcctgtacatgctcatcctgcagtctaagggccgagcaaccatgaatcccatgtgggatagccttgtttgagcatagaaacaaaggtttctagtcctctctaccaaaaaaaaattgctgatgtgttcatgtacctgtttgttttccacactccaaacaaagcccactgtgagcttccataagacaatttgaaccaggccccatgatccttacacacaattctgtctcctcatcttgcatgatttatatggggtttaaataataaattgcatggatgctatagaatttatagtgctccaagtaggtcattaaataaatcactgtataatttatataaatgaacctaaatcatgcagcaggaggacttcattagaaaatcaatcctgtgagtggataaacatgaggactggcaggtgcactgttgtttttgaaaagtccctgcatctgtgaccgcatgtgaaggtgctctgtgctggagggcactcacttctcccaaccccaccctccccctgctcagttgtgggtgctcccaggaagctgggttcaggcttgcagtctccaagaagacctgcttccacctccaagttcccgggctcttctagcgggagtccacacagccgcagggactcaggtcacctcaaaggcagccagcctcttaccatttccatggcagaactgaggataaaagataaggcttggggcattctgagtaaggaaatccacagggctcccgccaactagaagcccagtcttggcttgaacacaggccaagaaagaagtccaaacatctttggctggcaggagtgttcaccttgccgtgggcagatgtctgcctgatgctgctgcctgccagctgtgcttcccccagcctcccatgcagaatacattccagcctccatcaggaacccattcttgaggggacataaaggacagatcggtccaaggggcaggtccgattagggcagcttaaacccctcaattcctctccaggtccattctgggacaggagagccttgggatctccacctggcaaagagaagca

SEQ ID NO: 32160 - DNA, 2674 bp, Homo sapiens
ccttgacccagcaattccacatctacttgtggaagcttgagaaactcttcaacaagaaagaatattaattgcagtatgtctcgtgatggcaaaataccggaagcaaactaaaagtctgccagggtggaactggttaactcagcaatgtcctccgtccaatagaatggcatgaggcagatctatatgagcccatacatggaatggtcttcaatatacattgcttagtgttgaaagaaaagtgcccagtcaggacagtggtggtgtgctgagatttgtgtgaaaagaaagaacccacatatacatacacatatattcattgtgcaaaagctctctggaaggacacacaagagacttaacagaggctacattcaaggaggggatctggctggctggggagagctgtgagctggagacttactcttttgctgtatctcttttgtgccttcttaatttgtaccatgtgtatgttttacttattccaaaatactcaagtaataaaaaataaaacccttagctcaacacactatctgttccttctgttccttgttttttctctttttttctttcttctttttttatttttttagaggaatgcagtggtatgatcatagctcacctccctgggcccaagcagtcctcccacctgagcctcctgagtagctagaataacaggcacataccatcaaacccagctaattttttttttattagagatgagttctccctatgttgctcaggctggtctcaaactccttgagctcaagcgatcctcctgctttggtctcccgaagtgctggaattacagacataagccaccaagcctggcctggccctatttcaatagtagttatcttttctaccttatgccatcatcatttatacactacttttgcatcctcatctatattttacagtttgtgagggcagaattcatgtcaaataataactaaaatttttkagaatctatcatatgccaagccctgttatcaattctttatgtgcattatctcatttatttctctataatcacctctgatggtagggactgttactatcctcattttactagcagggcattaaaaaaaacttccctaaggccacctagctatgtgctgcagacgctgtctgatcccaaaactgtttgactccatttctggctgacttcaagtttgccttaatcattgtacatagcagctcattcttcctctgatacacacagagtacctgaaatcagtaatgcataagtgaatgggtgcatgagtgagtatatgagtgatgtacccaccacatcaacagttatcctgcctgttgtgcttctaggtcatagcatgctgttcctagatttggggaggacttccttataaataaccacaggtttccattccctgctactgcctggagggaaatatggagatggaatttaccaactaaggaagatgaaggggctggtggtttcacataagagaggatattttttaagcaaaggcgctggggtttagacaagagcctgagggcctattctgtcacttctgcatgaagcatagttcacatctcaaagctctgaaatgtcagagagctgattgtacagtccctggtcatacagagcccaagggttccttccaacagcagggcagcctgtacatgctcatcctgcagtctaagggccgagcaaccatgaatcccatgtgggatagccttgtttgagcatagaaacaaaggtttctagtcctctctaccaaaaaaaaattgctgatgtgttcatgtacctgtttgttttccacactccaaacaaagcccactgtgagcttccataagacaatttgaaccaggccccatgatccttacacacaattctgtctcctcatcttgcatgatttatatggggtttaaataataaattgcatggatgctatagaatttatagtgctccaagtaggtcattaaataaatcactgtataatttatataaatgaacctaaatcatgcagcaggaggacttcattagaaaatcaatcctgtgagtggataaacatgaggactggcaggtgcactgttgtttttgaaaagtccctgcatctgtgaccgcatgtgaaggtgctctgtgctggagggcactcacttctcccaaccccaccctccccctgctcagttgtgggtgctcccaggaagctgggttcaggcttgcagtctccaagaagacctgcttccacctccaagttcccgggctcttctagcgggagtccacacagccgcagggactcaggtcacctcaaaggcagccagcctcttaccatttccatggcagaactgaggataaaagataaggcttggggcattctgagtaaggaaatccacagggctcccgccaactagaagcccagtcttggcttgaacacaggccaagaaagaagtccaaacatctttggctggcaggagtgttcaccttgccgtgggcagatgtctgcctgatgctgctgcctgccagctgtgcttcccccagcctcccatgcagaatacattccagcctccatcaggaacccattcttgaggggacataaaggacagatcggtccaaggggcaggtccgattagggcagcttaaacccctcaattcctctccaggtccattctgggacaggagagccttgggatctccacctggcaaagagaagca

SEQ ID NO: 32161 - DNA, 2674 bp, Homo sapiens
ccttgacccagcaattccacatctacttgtggaagcttgagaaactcttcaacaagaaagaatattaattgcagtatgtctcgtgatggcaaaataccggaagcaaactaaaagtctgccagggtggaactggttaactcagcaatgtcctccgtccaatagaatggcatgaggcagatctatatgagcccatacatggaatggtcttcaatatacattgcttagtgttgaaagaaaagtgcccagtcaggacagtggtggtgtgctgagatttgtgtgaaaagaaagaacccacatatacatacacatatattcattgtgcaaaagctctctggaaggacacacaagagacttaacagaggctacattcaaggaggggatctggctggctggggagagctgtgagctggagacttactcttttgctgtatctcttttgtgccttcttaatttgtaccatgtgtatgttttacttattccaaaatactcaagtaataaaaaataaaacccttagctcaacacactatctgttccttctgttccttgttttttctctttttttctttcttctttttttatttttttagaggaatgcagtggtatgatcatagctcacctccctgggcccaagcagtcctcccacctgagcctcctgagtagctagaataacaggcacataccatcaaacccagctaattttttttttattagagatgagttctccctatgttgctcaggctggtctcaaactccttgagctcaagcgatcctcctgctttggtctcccgaagtgctggaattacagacataagccaccaagcctggcctggccctatttcaatagtagttatcttttctaccttatgccatcatcatttatacactacttttgcatcctcatctatattttacagtttgtgagggcagaattcatgtcaaataataactaaaatttttgagaatctatcatatgccaagccctgtyatcaattctttatgtgcattatctcatttatttctctataatcacctctgatggtagggactgttactatcctcattttactagcagggcattaaaaaaaacttccctaaggccacctagctatgtgctgcagacgctgtctgatcccaaaactgtttgactccatttctggctgacttcaagtttgccttaatcattgtacatagcagctcattcttcctctgatacacacagagtacctgaaatcagtaatgcataagtgaatgggtgcatgagtgagtatatgagtgatgtacccaccacatcaacagttatcctgcctgttgtgcttctaggtcatagcatgctgttcctagatttggggaggacttccttataaataaccacaggtttccattccctgctactgcctggagggaaatatggagatggaatttaccaactaaggaagatgaaggggctggtggtttcacataagagaggatattttttaagcaaaggcgctggggtttagacaagagcctgagggcctattctgtcacttctgcatgaagcatagttcacatctcaaagctctgaaatgtcagagagctgattgtacagtccctggtcatacagagcccaagggttccttccaacagcagggcagcctgtacatgctcatcctgcagtctaagggccgagcaaccatgaatcccatgtgggatagccttgtttgagcatagaaacaaaggtttctagtcctctctaccaaaaaaaaattgctgatgtgttcatgtacctgtttgttttccacactccaaacaaagcccactgtgagcttccataagacaatttgaaccaggccccatgatccttacacacaattctgtctcctcatcttgcatgatttatatggggtttaaataataaattgcatggatgctatagaatttatagtgctccaagtaggtcattaaataaatcactgtataatttatataaatgaacctaaatcatgcagcaggaggacttcattagaaaatcaatcctgtgagtggataaacatgaggactggcaggtgcactgttgtttttgaaaagtccctgcatctgtgaccgcatgtgaaggtgctctgtgctggagggcactcacttctcccaaccccaccctccccctgctcagttgtgggtgctcccaggaagctgggttcaggcttgcagtctccaagaagacctgcttccacctccaagttcccgggctcttctagcgggagtccacacagccgcagggactcaggtcacctcaaaggcagccagcctcttaccatttccatggcagaactgaggataaaagataaggcttggggcattctgagtaaggaaatccacagggctcccgccaactagaagcccagtcttggcttgaacacaggccaagaaagaagtccaaacatctttggctggcaggagtgttcaccttgccgtgggcagatgtctgcctgatgctgctgcctgccagctgtgcttcccccagcctcccatgcagaatacattccagcctccatcaggaacccattcttgaggggacataaaggacagatcggtccaaggggcaggtccgattagggcagcttaaacccctcaattcctctccaggtccattctgggacaggagagccttgggatctccacctggcaaagagaagca

SEQ ID NO: 32162 - DNA, 612 bp, Homo sapiens
tgtgtgcaagagaaagaggaaagaggatgcagagatataaaacaaataaaagatatgtcaattctctccctcaggagggcccagagcaaccctttatcaaaccwtactcgttgccattttttttccaaagaaagagtattccagacactcatgttttttatctcatggagacatcccagtctagatacttgtcacttcattccagttacaatacttgagcacactgtataatgatttatttgtttacttgtctgagctcccttgagctctttgaaaacaaggatcatttcttatgtgacttgatatcacatagcccagcagagacctaaatgaatgtttgatgaatgaatgaatgaatgaaaataatcagaattgttgaaagagcctctcaattggtctagcttcctccattctttttgctctattccacacggccaccagtttaaatctgtctaaaagcttcaattagatagacctataggtgctgtgaaattacctccaagatatacagtgaggtgtaaaagtaagatacaaaacaatagacatgtctaattgattttaaaggagagtaggaatatgtacatatataatttagatatccctaaatgtttc

SEQ ID NO: 32163 - DNA, 2207 bp, Homo sapiens
tgcattcatgacatacctttttcttaatttttttggcatttctaggccatgcggctcatctgtgagccttttcaaattgttgtacatttcccccgcaaaaataatcccaatatgttcgttgaacaaaatctgtgtaaaagtggacctatgcagctcaaacccacrtcattcaagggtcaaccatagtaaacaagctgatttcacagaagaggaaacatgctccaaaggggctccagcggcagaagcagcaggaggaggctggctggtgactcctacctggtgcagtttccatcagaacctggacccaccctgattctctgtgctctgatgactcagggccctcccaggactcagagagagtctgcagaaggagcagtcaggtgattctctcccctggacacatggtgagttgagatatttattgaataaatgcagagaagaccagaccagaggggtgcttcttggccctaagagaacatgtattcccccagaaacataaaggggcaccacccaggagaattaattaatccagtactgttcatctctttcaacaggccttcctgggaaggtcattccagactgtttattagttaggctttctttccacactatggtagctttctccccttcccgagatccacgcagatgaatttcctgctaatggcatcctcatcatgccgatacccaaaggttattttgcaaagatgcaattcagaaatagctttacatgtgcacgcatctgaacaaaaaatatactccttgatgcctgcctgatgcttcagctgagggcagctgcttgacaacagcttgacaacagggaagatgagagagagatgcagagaaaggaaaagagagagagagaaagagcctaaggagtgtggataccaatgggagcaacacaatcaatcacttctaaagggcgcatttgccctggagaaaaggtttaaggaaataagcaagcagatttaatgaaaaattctgagtctattgattgaaatctgtttgccttttcttactattcaagaacacgacatttttgcattaggcaattggtttatgacttatgtaaatagaaaacataaaaacttttcaagagatgagaaatttcaggaaagatgtttcattcaattgctctgcagtgctcctgtctccttccctgttgtctttgtgataagactggtccaggccccttcagactgaagcccctctctgctccactgctgataacgatcacaaacaaagacaataaagagctgctctcaatatgcatcacacccacctctctcagaagctgctccctctgcctggaaccccgcttcctctggactctttaccatcctcttgtccaccactgttagcctagaaggcagcattccaacactatctcctgccaggagccttgtctggtgttcccacacagcattaaggggttcctccagtgggttccaatggcgttttgttcccacccattgtgacaatgatcacaccgctgtaactaccaattccaagacacattttcccccacattttcatgttttgataggtcaatgggaccactcctattgtgaaaatgattactctgttcatactgctcaattttaaaacacttttttttcacacttgagtgtttctgaaaccagaatgttttgctaatgtggacactgagtgtggtagtgtttctaactttttttcttctgaaaatctgttagtatattgagagtacattctaagatcaaagagctgtgttacttacttgtgtgtcttgactgagaactcctagggagcagaaactgtgttccagtcatctttgtatctccatcccttagcacaaaacagttaggcagctattgctcagtaaaggttggagggagtgaggaatggggggtggcttctttttgtgttgctataacagaataccacaggctgagtaatttgtaaacagaaatttattgtctcacagttctgaaggctgagaagtctgaggtcaaggcatcagcaggttcgatgtcagatgaagacattctgttcttccacgatggtgccttgcacgttgtgtcctcacatgatggaaggcaggatgagagagagcccactcccagaaaccctttatatggcagcattaatccattcatgaggggagagccctcatgacctaaacacctcccattaggtcccacttcacaacacttgccttggggactatctaa

SEQ ID NO: 32164 - DNA, 2207 bp, Homo sapiens
tgcattcatgacatacctttttcttaatttttttggcatttctaggccatgcggctcatctgtgagccttttcaaattgttgtacatttcccccgcaaaaataatcccaatatgttcgttgaacaaaatctgtgtaaaagtggacctatgcagctcaaacccacatcattcaagggtcaaccatagtaaacaagctgatttcacagaagaggaaacatgctccaaaggggctccagcggcagaagcagcaggaggaggctggctggtgactcctacctggtgcagtttccatcagaacctggacccaccctgattctctgtgctctgatgactcagggccctcccaggactcagagagagtctgcagaaggagcagtcaggtgattctctcccctggacacatggtgagttgagatatttattgaataaatgcagagaagaccagaccagaggggtgcttcttggccctaagagaacatgtattcccccagaaacataaaggggcaccacccaggagaattaattaatccagtactgttcatctctttcaacaggccttcctgggaaggtcattccagactgtttattagttaggctttctttccacactatggtagctttctccccttcccgagatccacgcagatgaatttcctgctaatggcatcctcatcatgccgatacccaaaggttattttgcaaagatgcaattcagaaatagctttacatgtgcacgcatctgaacaaaaaatatactccttgatgcctgcctgatgcttcagctgagggcagctgcttgacaacagcttgacaacagggaagatgagagagagatgcagagaaaggaaaagagagagagagaaagagcctaaggagtgtggataccaatgggagcaacacaatcaatcacttctaaagggcgcatttgccctggagaaaaggtttaaggaaataagcaagcagatttaatgaaaaattctgagtctattgattgaaatctgtttgccttttcttactattcaagaacacgacatttttgcattaggcaattggtttatgacttatgtaaatagaaaacataaaaacttttcaagagatgagaaatttcagsaaagatgtttcattcaattgctctgcagtgctcctgtctccttccctgttgtctttgtgataagactggtccaggccccttcagactgaagcccctctctgctccactgctgataacgatcacaaacaaagacaataaagagctgctctcaatatgcatcacacccacctctctcagaagctgctccctctgcctggaaccccgcttcctctggactctttaccatcctcttgtccaccactgttagcctagaaggcagcattccaacactatctcctgccaggagccttgtctggtgttcccacacagcattaaggggttcctccagtgggttccaatggcgttttgttcccacccattgtgacaatgatcacaccgctgtaactaccaattccaagacacattttcccccacattttcatgttttgataggtcaatgggaccactcctattgtgaaaatgattactctgttcatactgctcaattttaaaacacttttttttcacacttgagtgtttctgaaaccagaatgttttgctaatgtggacactgagtgtggtagtgtttctaactttttttcttctgaaaatctgttagtatattgagagtacattctaagatcaaagagctgtgttacttacttgtgtgtcttgactgagaactcctagggagcagaaactgtgttccagtcatctttgtatctccatcccttagcacaaaacagttaggcagctattgctcagtaaaggttggagggagtgaggaatggggggtggcttctttttgtgttgctataacagaataccacaggctgagtaatttgtaaacagaaatttattgtctcacagttctgaaggctgagaagtctgaggtcaaggcatcagcaggttcgatgtcagatgaagacattctgttcttccacgatggtgccttgcacgttgtgtcctcacatgatggaaggcaggatgagagagagcccactcccagaaaccctttatatggcagcattaatccattcatgaggggagagccctcatgacctaaacacctcccattaggtcccacttcacaacacttgccttggggactatctaa

SEQ ID NO: 32165 - DNA, 2207 bp, Homo sapiens
tgcattcatgacatacctttttcttaatttttttggcatttctaggccatgcggctcatctgtgagccttttcaaattgttgtacatttcccccgcaaaaataatcccaatatgttcgttgaacaaaatctgtgtaaaagtggacctatgcagctcaaacccacatcattcaagggtcaaccatagtaaacaagctgatttcacagaagaggaaacatgctccaaaggggctccagcggcagaagcagcaggaggaggctggctggtgactcctacctggtgcagtttccatcagaacctggacccaccctgattctctgtgctctgatgactcagggccctcccaggactcagagagagtctgcagaaggagcagtcaggtgattctctcccctggacacatggtgagttgagatatttattgaataaatgcagagaagaccagaccagaggggtgcttcttggccctaagagaacatgtattcccccagaaacataaaggggcaccacccaggagaattaattaatccagtactgttcatctctttcaacaggccttcctgggaaggtcattccagactgtttattagttaggctttctttccacactatggtagctttctccccttcccgagatccacgcagatgaatttcctgctaatggcatcctcatcatgccgatacccaaaggttattttgcaaagatgcaattcagaaatagctttacatgtgcacgcatctgaacaaaaaatatactccttgatgcctgcctgatgcttcagctgagggcagctgcttgacaacagcttgacaacagggaagatgagagagagatgcagagaaaggaaaagagagagagagaaagagcctaaggagtgtggataccaatgggagcaacacaatcaatcacttctaaagggcgcatttgccctggagaaaaggtttaaggaaataagcaagcagatttaatgaaaaattctgagtctattgattgaaatctgtttgccttttcttactattcaagaacacgacatttttgcattaggcaattggtttatgacttatgtaaatagaaaacataaaaacttttcaagagatgagaaatttcaggaaagatgtttcattcaattgctctgcagtgctcctgtctccttccctgttgtctttgtgataagactggtccaggccccttcagactgaagcccctctctgctccactgctgataacgatcacaaacaaagacaataaagagctgctctcaatatgcatcacacccacctctctcagaagctgctccctctgcctggaaccccgcttcctctggactctttaccatcctcttgtccaccactgttagcctagaaggcagcattccaacactatctcctgccaggagccttgtctggtgttcccacacagcattaaggggttcctccagtgggttccaatggcgttttgttcccacccattgtgacaatgatcacaccgctgtaactaccaattccaagacacattttcccccacattttcatgttttgataggtcaatgggaccactcctattgtgaaaatgattactctgttcatactgctcaattttaaaacacttttttttcacacttragtgtttctgaaaccagaatgttttgctaatgtggacactgagtgtggtagtgtttctaactttttttcttctgaaaatctgttagtatattgagagtacattctaagatcaaagagctgtgttacttacttgtgtgtcttgactgagaactcctagggagcagaaactgtgttccagtcatctttgtatctccatcccttagcacaaaacagttaggcagctattgctcagtaaaggttggagggagtgaggaatggggggtggcttctttttgtgttgctataacagaataccacaggctgagtaatttgtaaacagaaatttattgtctcacagttctgaaggctgagaagtctgaggtcaaggcatcagcaggttcgatgtcagatgaagacattctgttcttccacgatggtgccttgcacgttgtgtcctcacatgatggaaggcaggatgagagagagcccactcccagaaaccctttatatggcagcattaatccattcatgaggggagagccctcatgacctaaacacctcccattaggtcccacttcacaacacttgccttggggactatctaa

SEQ ID NO: 32166 - DNA, 2207 bp, Homo sapiens
tgcattcatgacatacctttttcttaatttttttggcatttctaggccatgcggctcatctgtgagccttttcaaattgttgtacatttcccccgcaaaaataatcccaatatgttcgttgaacaaaatctgtgtaaaagtggacctatgcagctcaaacccacatcattcaagggtcaaccatagtaaacaagctgatttcacagaagaggaaacatgctccaaaggggctccagcggcagaagcagcaggaggaggctggctggtgactcctacctggtgcagtttccatcagaacctggacccaccctgattctctgtgctctgatgactcagggccctcccaggactcagagagagtctgcagaaggagcagtcaggtgattctctcccctggacacatggtgagttgagatatttattgaataaatgcagagaagaccagaccagaggggtgcttcttggccctaagagaacatgtattcccccagaaacataaaggggcaccacccaggagaattaattaatccagtactgttcatctctttcaacaggccttcctgggaaggtcattccagactgtttattagttaggctttctttccacactatggtagctttctccccttcccgagatccacgcagatgaatttcctgctaatggcatcctcatcatgccgatacccaaaggttattttgcaaagatgcaattcagaaatagctttacatgtgcacgcatctgaacaaaaaatatactccttgatgcctgcctgatgcttcagctgagggcagctgcttgacaacagcttgacaacagggaagatgagagagagatgcagagaaaggaaaagagagagagagaaagagcctaaggagtgtggataccaatgggagcaacacaatcaatcacttctaaagggcgcatttgccctggagaaaaggtttaaggaaataagcaagcagatttaatgaaaaattctgagtctattgattgaaatctgtttgccttttcttactattcaagaacacgacatttttgcattaggcaattggtttatgacttatgtaaatagaaaacataaaaacttttcaagagatgagaaatttcaggaaagatgtttcattcaattgctctgcagtgctcctgtctccttccctgttgtctttgtgataagactggtccaggccccttcagactgaagcccctctctgctccactgctgataacgatcacaaacaaagacaataaagagctgctctcaatatgcatcacacccacctctctcagaagctgctccctctgcctggaaccccgcttcctctggactctttaccatcctcttgtccaccactgttagcctagaaggcagcattccaacactatctcctgccaggagccttgtctggtgttcccacacagcattaaggggttcctccagtgggttccaatggcgttttgttcccacccattgtgacaatgatcacaccgctgtaactaccaattccaagacacattttcccccacattttcatgttttgataggtcaatgggaccactcctattgtgaaaatgattactctgttcatactgctcaattttaaaacacttttttttcacacttgagtgtttctgaaaccagaatgttttgctaatgtggacaytgagtgtggtagtgtttctaactttttttcttctgaaaatctgttagtatattgagagtacattctaagatcaaagagctgtgttacttacttgtgtgtcttgactgagaactcctagggagcagaaactgtgttccagtcatctttgtatctccatcccttagcacaaaacagttaggcagctattgctcagtaaaggttggagggagtgaggaatggggggtggcttctttttgtgttgctataacagaataccacaggctgagtaatttgtaaacagaaatttattgtctcacagttctgaaggctgagaagtctgaggtcaaggcatcagcaggttcgatgtcagatgaagacattctgttcttccacgatggtgccttgcacgttgtgtcctcacatgatggaaggcaggatgagagagagcccactcccagaaaccctttatatggcagcattaatccattcatgaggggagagccctcatgacctaaacacctcccattaggtcccacttcacaacacttgccttggggactatctaa

SEQ ID NO: 32167 - DNA, 2207 bp, Homo sapiens
tgcattcatgacatacctttttcttaatttttttggcatttctaggccatgcggctcatctgtgagccttttcaaattgttgtacatttcccccgcaaaaataatcccaatatgttcgttgaacaaaatctgtgtaaaagtggacctatgcagctcaaacccacatcattcaagggtcaaccatagtaaacaagctgatttcacagaagaggaaacatgctccaaaggggctccagcggcagaagcagcaggaggaggctggctggtgactcctacctggtgcagtttccatcagaacctggacccaccctgattctctgtgctctgatgactcagggccctcccaggactcagagagagtctgcagaaggagcagtcaggtgattctctcccctggacacatggtgagttgagatatttattgaataaatgcagagaagaccagaccagaggggtgcttcttggccctaagagaacatgtattcccccagaaacataaaggggcaccacccaggagaattaattaatccagtactgttcatctctttcaacaggccttcctgggaaggtcattccagactgtttattagttaggctttctttccacactatggtagctttctccccttcccgagatccacgcagatgaatttcctgctaatggcatcctcatcatgccgatacccaaaggttattttgcaaagatgcaattcagaaatagctttacatgtgcacgcatctgaacaaaaaatatactccttgatgcctgcctgatgcttcagctgagggcagctgcttgacaacagcttgacaacagggaagatgagagagagatgcagagaaaggaaaagagagagagagaaagagcctaaggagtgtggataccaatgggagcaacacaatcaatcacttctaaagggcgcatttgccctggagaaaaggtttaaggaaataagcaagcagatttaatgaaaaattctgagtctattgattgaaatctgtttgccttttcttactattcaagaacacgacatttttgcattaggcaattggtttatgacttatgtaaatagaaaacataaaaacttttcaagagatgagaaatttcaggaaagatgtttcattcaattgctctgcagtgctcctgtctccttccctgttgtctttgtgataagactggtccaggccccttcagactgaagcccctctctgctccactgctgataacgatcacaaacaaagacaataaagagctgctctcaatatgcatcacacccacctctctcagaagctgctccctctgcctggaaccccgcttcctctggactctttaccatcctcttgtccaccactgttagcctagaaggcagcattccaacactatctcctgccaggagccttgtctggtgttcccacacagcattaaggggttcctccagtgggttccaatggcgttttgttcccacccattgtgacaatgatcacaccgctgtaactaccaattccaagacacattttcccccacattttcatgttttgataggtcaatgggaccactcctattgtgaaaatgattactctgttcatactgctcaattttaaaacacttttttttcacacttgagtgtttctgaaaccagaatgttttgctaatgtggacactgagtgtggtagtgtttctaactttttttcttctgaaaatctgttagtatattgagagtacattctaagatcaaagagctgtgttacttacttgtgtgtcttgactgagaactcctagggagcagraactgtgttccagtcatctttgtatctccatcccttagcacaaaacagttaggcagctattgctcagtaaaggttggagggagtgaggaatggggggtggcttctttttgtgttgctataacagaataccacaggctgagtaatttgtaaacagaaatttattgtctcacagttctgaaggctgagaagtctgaggtcaaggcatcagcaggttcgatgtcagatgaagacattctgttcttccacgatggtgccttgcacgttgtgtcctcacatgatggaaggcaggatgagagagagcccactcccagaaaccctttatatggcagcattaatccattcatgaggggagagccctcatgacctaaacacctcccattaggtcccacttcacaacacttgccttggggactatctaa

SEQ ID NO: 32168 - DNA, 579 bp, Homo sapiens
ttgtgttgttctaagattcctgaggcagattactccgttcattcccatacctatttcctgagcccctgctacatgcacagctggggccaatgagctgggagrgctggagggaagggacacagcagtacttccccaacacccaatttggtgccatccatggcatgatgccacccaccctggctgagaatgtgtgaatgtcagtgtctgtcacttagaccagtgaggaggcactgaaatggtaaacccattggcatagcagtgctgggtggctgaagggtaacagacttagcctccactccacctctctgcctagaggccttgaggggcggcagctctggatctcagtgttctcatctggaacattcagggataatggtgatggcatgcagtatccgaactcagaagcagagtccccacatgtgcctcatgcattcatactggctgccccagggtaaggggtacaggagctgcaagaagcacaaaggagagaggtgtggacactccaggaactctgagctctgagctcagctctgcccatggccttggatatctcattgaacagcacttgacagacttgct

SEQ ID NO: 32169 - DNA, 579 bp, Homo sapiens
ttgtgttgttctaagattcctgaggcagattactccgttcattcccatacctatttcctgagcccctgctacatgcacagctggggccaatgagctgggagagctggrgggaagggacacagcagtacttccccaacacccaatttggtgccatccatggcatgatgccacccaccctggctgagaatgtgtgaatgtcagtgtctgtcacttagaccagtgaggaggcactgaaatggtaaacccattggcatagcagtgctgggtggctgaagggtaacagacttagcctccactccacctctctgcctagaggccttgaggggcggcagctctggatctcagtgttctcatctggaacattcagggataatggtgatggcatgcagtatccgaactcagaagcagagtccccacatgtgcctcatgcattcatactggctgccccagggtaaggggtacaggagctgcaagaagcacaaaggagagaggtgtggacactccaggaactctgagctctgagctcagctctgcccatggccttggatatctcattgaacagcacttgacagacttgct

SEQ ID NO: 32170 - DNA, 1129 bp, Homo sapiens
cacttggatctgctttggggaaaacccaggctgaggggctggcaagagctctgctctctagggagcgtcaggcaacagagcaatggccgcatcccacactgcctctaggatttaaggctgaggggctgtgagtcaacgctgcctttgccaagagatgcccaagtagtatacgatgtttttagggctagggaggaggtggtggtggcagattcagcctccactcaagctgaagtgtttgcaaacatggccagttggccacacctacctgcccagagggccccctgctggcacctcctctcactgagtccctggctatctcatttggcaagagcacagcagaatccaggcctaaattgcttgttctgtctccttcctgcaacttcctgacataatcatcttgtcaggcatttgtccacatgccgaagaatgagcttgcccaaggccagctccatcaactcactcttttatccatgtagcactcgattcaggctgaaaaataggattatttcactttttagctggtgtacagcctggcagaactgtttttgggaaagtgattggtaatgtaagtggcacatggcagggagaagagcaccagctcaaccacccactaaccctggggccctgggcaagtcacagaaaatctctgagcccccatttctctgaagcacttggaaaggacagataacagaatgctcaggagccgagggacaaattataagcagcagcatagcagatgcatcacccacatcagcagaagtgcacactattggatgcttcaggtgagggcatctcaaaaaacccactgtattaggggcatagcagaataggtggcactcaaattagatcatttgaggagagattaataaaaagattatgtatgaarctgtgagtggggcagaagaccttgggggaatagtgcagtgttctgaagctaataacagccttagcatcctaatagggcagaactgggagcccaggtacagggaggagtgtctacagagaacctgctgggagctgcaaccttcaatggagggatgcagccagacgatgtcgaccccacagagagggaaccaggggaataactaccccagcctctctcccctgactctctccagactcctgccag

SEQ ID NO: 32171 - DNA, 2395 bp, Homo sapiens
aaaatggagctgataatgcctactttatagggttgttgtgatgattaaataatgacatgtatataaagctacttactcagtacctaacacattgtaaacacttaagaaatagtagccattattgttatgggtttttttttacagatattaacaatctagtggagttgaattgttgcaggactatgttttcagtgcatcacttcaccatctctgctgtgtgtaagcaaaaaagcagaaatgtaaaccttatgaattcttgaaaacratcgcttactattcccctctgaaagatgtacaccctcatacccttctctacattttctcagctcctcaccattctcacatactctcccctcactcgctgcacagctcctaaaaagagggtggaggtggggttcctgagctcttcttctggcactgtctattcctgacaagtttcttttatttcctgctgactattgggtggatcctcacgggtgtgctcctgagggtcaactaagagcagagacgctgcttttccaagatccaacagtgaaaaccatgggcatccagcagaggtacatgcaaaactctcatctcacaccctaaacttttatgcaggtgtggcatttgagattcaccagggaagctgcataattacttagaaagagtaccatctgattgttcctttctctgaaaagtgtaatctctcctaataacatcacccaactgaatgcctcctaattctgtcggaatgcattttaattatcgctgcttcttatgttggtgagctgttgctggagtttttgatttgtgatggaaaatagggaagccataaaatattttggtgacagctctctgattaggcagcattgcagaaaaacaagttgtcacaataaaactgattaatcaagttgtcagagtaaaacaaattaatgccacaaaaacctttgctagaaattacctctgtaccttggggtatttgactgatggattcctgctattagcagaaatttccatctcatgagcaagtcttccaagtctgcacttgggatctgagttgggccagtcaccctgtagcagggaagtaactgtgaacccagaaatatatttgcagagggcagtcgctgacttgatttttagagatattttgttcctgcctaactacttgggagactattagtatctgcaatataatctaggagctataaagctttaatgcaaaataaatacaaaagccattactaaagtcctatcagagggtccagatttaatttattaagatgtttaatcacagtactctggcaggaaaggtactctgcaattcttcctgtacattcctctgtctcaaggaaagaccttgatggcaatcacagggcctgtctgtcacagtttattgttacgtagatggtgatgtttggttatacagagccccatctcctcatgaccagagattattggaccagagatggacatgaccaattttcctggtataaaatgatgagctgagctgatgacattccatctttcaagatttaactagaaaatattgatagaacaggccagttagctgtgggagctgaaggtgattgagcaccataaggtaatacagagccattaagggtcttggcaaatcaaagttataagtaagcaaaagctttaagatagagaaaagatggagtgagaaagaaagaagtcagtgggtagcaagaagagaaagagacagaaacctgtgatagagctgggaattggcatcaatcacttgagcagccttcattccagaaaaatctccaggttcaattccaatttgtatacttagaataaaatcctctttatttttttttaagcagggtctctctctgtcacccaggctggagtgcaatggcgtgatcatagctcattatagcctccgtctcctggctcaagcaacccttctgcctcagcctcttgagtagctagggtgggcttttgccaccaagcccagctagtttatttttattttttttagaaacagggtctcactatattacgcagactgatctcaaactcctggcctcaagtgatcctccatccctggcctccccagttgctgggatttcaggcatgagcctccagcaccagccccctctttccttgagaaaactggagtgggtttctttctagcaaatactcttaccaggtgcaggggaaactgacctggcaatagagaagggaaggagtgaaaaggggatccaaaggacagtgagtgatattcaaactcttcatcacaatgaatatcacctgtgtgccatacaaggccatatttcctgcatagcatccttgaacatatgttaactggttccagttcatgggagccccacaacaatgctaggcttcgcaaattaacttggcattggaagaaagggctaaaccccaa

SEQ ID NO: 32172 - DNA, 2395 bp, Homo sapiens
aaaatggagctgataatgcctactttatagggttgttgtgatgattaaataatgacatgtatataaagctacttactcagtacctaacacattgtaaacacttaagaaatagtagccattattgttatgggtttttttttacagatattaacaatctagtggagttgaattgttgcaggactatgttttcagtgcatcacttcaccatctctgctgtgtgtaagcaaaaaagcagaaatgtaaaccttatgaattcttgaaaacaatcgcttactattcccctctgaaagatgtacaccctcatacccttctctacattttctcagctcctcaccattctcacatactctcccctcactcgctgcacagctcctaaaaagagggtggaggtggggttcctgagctcttcttctgscactgtctattcctgacaagtttcttttatttcctgctgactattgggtggatcctcacgggtgtgctcctgagggtcaactaagagcagagacgctgcttttccaagatccaacagtgaaaaccatgggcatccagcagaggtacatgcaaaactctcatctcacaccctaaacttttatgcaggtgtggcatttgagattcaccagggaagctgcataattacttagaaagagtaccatctgattgttcctttctctgaaaagtgtaatctctcctaataacatcacccaactgaatgcctcctaattctgtcggaatgcattttaattatcgctgcttcttatgttggtgagctgttgctggagtttttgatttgtgatggaaaatagggaagccataaaatattttggtgacagctctctgattaggcagcattgcagaaaaacaagttgtcacaataaaactgattaatcaagttgtcagagtaaaacaaattaatgccacaaaaacctttgctagaaattacctctgtaccttggggtatttgactgatggattcctgctattagcagaaatttccatctcatgagcaagtcttccaagtctgcacttgggatctgagttgggccagtcaccctgtagcagggaagtaactgtgaacccagaaatatatttgcagagggcagtcgctgacttgatttttagagatattttgttcctgcctaactacttgggagactattagtatctgcaatataatctaggagctataaagctttaatgcaaaataaatacaaaagccattactaaagtcctatcagagggtccagatttaatttattaagatgtttaatcacagtactctggcaggaaaggtactctgcaattcttcctgtacattcctctgtctcaaggaaagaccttgatggcaatcacagggcctgtctgtcacagtttattgttacgtagatggtgatgtttggttatacagagccccatctcctcatgaccagagattattggaccagagatggacatgaccaattttcctggtataaaatgatgagctgagctgatgacattccatctttcaagatttaactagaaaatattgatagaacaggccagttagctgtgggagctgaaggtgattgagcaccataaggtaatacagagccattaagggtcttggcaaatcaaagttataagtaagcaaaagctttaagatagagaaaagatggagtgagaaagaaagaagtcagtgggtagcaagaagagaaagagacagaaacctgtgatagagctgggaattggcatcaatcacttgagcagccttcattccagaaaaatctccaggttcaattccaatttgtatacttagaataaaatcctctttatttttttttaagcagggtctctctctgtcacccaggctggagtgcaatggcgtgatcatagctcattatagcctccgtctcctggctcaagcaacccttctgcctcagcctcttgagtagctagggtgggcttttgccaccaagcccagctagtttatttttattttttttagaaacagggtctcactatattacgcagactgatctcaaactcctggcctcaagtgatcctccatccctggcctccccagttgctgggatttcaggcatgagcctccagcaccagccccctctttccttgagaaaactggagtgggtttctttctagcaaatactcttaccaggtgcaggggaaactgacctggcaatagagaagggaaggagtgaaaaggggatccaaaggacagtgagtgatattcaaactcttcatcacaatgaatatcacctgtgtgccatacaaggccatatttcctgcatagcatccttgaacatatgttaactggttccagttcatgggagccccacaacaatgctaggcttcgcaaattaacttggcattggaagaaagggctaaaccccaa

SEQ ID NO: 32173 - DNA, 2395 bp, Homo sapiens
aaaatggagctgataatgcctactttatagggttgttgtgatgattaaataatgacatgtatataaagctacttactcagtacctaacacattgtaaacacttaagaaatagtagccattattgttatgggtttttttttacagatattaacaatctagtggagttgaattgttgcaggactatgttttcagtgcatcacttcaccatctctgctgtgtgtaagcaaaaaagcagaaatgtaaaccttatgaattcttgaaaacaatcgcttactattcccctctgaaagatgtacaccctcatacccttctctacattttctcagctcctcaccattctcacatactctcccctcactcgctgcacagctcctaaaaagagggtggaggtggggttcctgagctcttcttctggcactgtctattcctgacaagtttcttttatttcctgctgactattgggtggatcctcacgggtgtgctcctgagggtcaactaagagcagagacgctgcttttccaagatccaacagtgaaaaccatgggcatccagcagaggtacatgcaaaactctcatctcacaccctaaacttttatgcaggtgtggcatttgagattcaccagggaagctgcataattacttagaaagagtaccatctgattgttcctttctctgaaaagtgtaatctctcctaataacatcacccaactgaatgcctcctaattctgtcggaatgcattttaattatcgctgcttcttatgttggtgagctgttgctggagtttttgatttgtgatggaaaatagggaagccataaaatattttggtgacagctctctgattaggcagcattgcagaaaaacaagttgtcacaataaaactgattaatcaagttgtcagagtaaaacaaattaatgccacaaaaacctttgctagaaattacctctgtaccttggggtatttgactgatggattcctgctattagcagaaatttccatctcatgagcaagtcttccaagtctgcacttgggatctgagttgggccagtcaccctgtagcagggaagtaactgtgaacccagaaatatatttgcagagggcagtcgctgacttgatttttagagatattttgttcctgcctaactacttgggagactattagtatctgcaatataatctaggagctataaagctttaatgcaaaataaatacaaaagccattactaaagtcctatcagagggtccagatttaatttattaagatgtttaatcacagtactctggcaggaaaggtactctgcaattcttcctgtacattcctctgtctcaaggaaagaccttgatggcaatcacagggcctgtctgtcacagtttattgttacgtagatggtgatgtttggttatacagagccccatctcctcatgaccagagattattggaccagagatggacatgaccaattttcctggtataaaatgatgagctgagctgatgacattccatctttcaagatttaactagaaaatattgatagaacaggccagttagctgtgggagctgaaggtgattgagcaccataaggtaatacagagccattaagggtcttggcaaatcaaagttataagtaagcaaaagctttaagatagagaaaagatggagtgagaaagaaagaagtcagtgggtagcaagaagagaaagagacagaaacctgtgatagagctgggaattggcatcaatcacttgagcagccttcattccagaaaaatctccaggttcaattccaatttgtatacttagaataaaatcctctttatttttttttaagcagggtctctctctgtcacccaggctggagtgcaatggcgtgatcatagctcattatagcctcygtctcctggctcaagcaacccttctgcctcagcctcttgagtagctagggtgggcttttgccaccaagcccagctagtttatttttattttttttagaaacagggtctcactatattacgcagactgatctcaaactcctggcctcaagtgatcctccatccctggcctccccagttgctgggatttcaggcatgagcctccagcaccagccccctctttccttgagaaaactggagtgggtttctttctagcaaatactcttaccaggtgcaggggaaactgacctggcaatagagaagggaaggagtgaaaaggggatccaaaggacagtgagtgatattcaaactcttcatcacaatgaatatcacctgtgtgccatacaaggccatatttcctgcatagcatccttgaacatatgttaactggttccagttcatgggagccccacaacaatgctaggcttcgcaaattaacttggcattggaagaaagggctaaaccccaa

SEQ ID NO: 32174 - DNA, 545 bp, Homo sapiens
ggatatagctatttttgacagtgtttcttgacctccttcctcaaaagtttgcagatttcagcatatctcctacacatattttgtcaggtttatacctaagtttatacatttttttgatgttaatgcaaatggcattaacttaagaaactttttaaattttgatagtttattgctgtcatacagaaatgaatggattttgtattttaaaatacatgcttttaaggtatatattgaaattaaaatgttgacactataaggaacataaatctcaatttagatttaattaatgtcatctcttatcccttgtgagaaagtaaagtaaaatagcttatattttgtgactttcatctcctgttttgccagttgggtaggaaacgttgtactttratgtatcattaatagttatgattaatggagatagttaaacgtagcagtactaatggagaaagacagtgaagatgggtacttttgtgagtaatgctattgagcttttaattaattgactattacctaaatataagctattcatagaactcgttctcatt

SEQ ID NO: 32175 - DNA, 719 bp, Homo sapiens
acgaagtcaggagactgagaccatcctggccaacatggtgaaaccctgtctctgctaaaaatacaaaaattagctgggtgtggtggcacrtgcctgtaattccagctattcaggaggctgaggcaggagaatcgcttgaaccagggagttggaggttgcagtgagccaagatcgcaccaccgcactccagcctggaagcagagcaaaactccatctcggaaaaaaaaataaaaaggaaaactatgaaagacaacatagaagatgatttaaattaatgagtgttgtaccaataacagacagccaaatcatgagtgaactctcattcacaattgcttcaaagagaataaaatacctaggaatacaacttacaagggatgtgaaggagctctttaaggagaattacaaaccactgctcaacaaaataagaggacacaaacaaatggaagaacattccatgctcgtggatacaaagaatatcatgaaaatggccataccacccaaggtaatttatagattcagtgccatccccatcaaactaccaatgactttcttcacagaattggaaaaaactactttgaagttcatatggaaccaaaaaagagcctgcattgccaagacaatcctaagccaaaagaacaaagctggaggcatcatgctacctgacttcaaactatactataaggctacagtaaccaaaacagcatggtactgataccaaa

SEQ ID NO: 32176 - DNA, 719 bp, Homo sapiens
acgaagtcaggagactgagaccatcctggccaacatggtgaaaccctgtctctgctaaaaatacaaaaattagctgggtgtggtggcacgtgcctgtaattccagctattcaggaggctgaggcaggagaatcgcttgaaccagggagttggaggttgcagtgagccaagatcgcaccaccgcactccagcctggaagcagagcaaaactccatctcggaaaaaaaaataaaaaggaaaactatgaaagacaacatagaagatgatttaaattaatgagtgttgtaccaataacagacagccaaatcatgagtgarctctcattcacaattgcttcaaagagaataaaatacctaggaatacaacttacaagggatgtgaaggagctctttaaggagaattacaaaccactgctcaacaaaataagaggacacaaacaaatggaagaacattccatgctcgtggatacaaagaatatcatgaaaatggccataccacccaaggtaatttatagattcagtgccatccccatcaaactaccaatgactttcttcacagaattggaaaaaactactttgaagttcatatggaaccaaaaaagagcctgcattgccaagacaatcctaagccaaaagaacaaagctggaggcatcatgctacctgacttcaaactatactataaggctacagtaaccaaaacagcatggtactgataccaaa

SEQ ID NO: 32177 - DNA, 533 bp, Homo sapiens
aatatttwaaaaaaatgaaaaccttgtcatctataaaaggatacaggtgacagtggacagaagccaaactatgaattaaatacttttctgattataaaagggcaacaactagaacaaaatttacaatcaaagataaaataatttaaaataatttctcctgaggcttaaaaattatacctatgtagaaaaagagagcttattaaacgttagttgagttaatgaaaagagacaccaggaaaagttatcttaaactttccataataggttaatgaaaataattctatacttacccagatttcctcaaaaaaacaaaaatcaagctgtttttggttttctatttgcagtagattattcctgatctgatagtgtctatagaggtttgagagataattgttagtgtttttcaaattttataataatctacatggttttgatatttgaaagaaaagagaaaaacattctgaaaatgctcaagggctcagaaaccttcctaaacatgcatatgtttggacaaaatggttaaaaaataactc

SEQ ID NO: 32178 - DNA, 1378 bp, Homo sapiens
tcccaagtgccatccagatcaatttttaaatcacacactacatagacacacatgtacccacacacaaaacttcttttatcrtgaggcttcaaactcagtaccctcaattatccagaaggcctagaaacatgagacctgttaccttcacattcccagcatttaatacaaaatcaggaatacaaataaaaaatgtaaacaaagtacaaaaatgcatacattttaacatagtttggactctttgattcttcactttaaactatatattctattagtagctctaaccattcagacttcaaattctaacacatttagtgatctaatttcacagtccttagtaagcacatgaccagagggtggaagagatgacaggattgtgaccagagagaaaggactgacagaaataaaaagctgtcactatgacaaaggtaaagacaaactggacactgtaaaaagcagtcatcataaaattaaaaataatggtgtttggggaacatttaaagaccaacagtccccactaggatcatttcaatcagggccgttctactatacctgattatcaagaccccaggaaaagaccttaactaattattgtgcaaaatattaagttatgaaagtcatttttaaaatcctttttaccatatttaaattaaaataaattattcaggcctatttttaaaataaaacaaagatatatctaagagattagaaaactttttgataaaatcgttaaaactttttgataaaatcattaaatgtttgatctctaattaggtatagcttcagctatctgaaaaattgaatcatgacaaattaaatcatggagtgaattcactccccagtgatgctggataaaatgaagcctgactatacatggatttctgtcgaaacaagcaacatgcctattatgaggagtagcatattggttcaaataagaggaaatctgatcaactaatcattccaacttattagctcaaatacattctttagggaattaagggaagcatctttctaaaaatcttcctcaacatatgtttccctaaaatcaataaatttagtgactccagagcctggttagtttctcattcatattatcacaaaagaaaaatacttattttgagaaaaatggacagtatatatttgcaggcaaacttcacctgttgaagtctcatgttatgactgatgttgatgctgctaattaatacttaaaatcctattctaaaggggtagctgctggcaaatgttttattttaacaacatacttttgcatgacctgccatcacttcccaagttgaagccagtcctgcagcgacaagtccgagttttgtaactgctgctgagtagacagatgtgtgaacagccccctggcattccatatgga

SEQ ID NO: 32179 - DNA, 817 bp, Homo sapiens
tttcatgtttaaagtcctaacccccagaacctcagaatgtgatggtactgtgagatggggcctttaactaggcaattaagctatgaggtcagtagagcgggccctaatccaacctgaccagcatccatataagagaaaatttgaacaaggacacgtatagagaagagactgtgaagacacagagaagacaagcatcttggcaggtctcagaggaaaccaacctgcccacaccttgactcgaacttccagcctccagaattgtgaaaaaaaagaatttctgttgtttaagctgcccagtctgtggtattttctgtgttacagtctgtgttacggwggccttaccaaactactacgacatccttggctggttatttgtctgtcaaccacagaggttatagcctacatgttgcctaagtttagttagttttagaagcactaatacttcttattttacttgacaggcataagaagccaggggcctacctctgccgaaatacttaaatggggtgagagggtgtgagcctctcaataattgaaagtctttggcttctaaatttgacacggcccctttcaaagacagccaggaggcaacaggcattttccatcagaaggttaggactggagtggagtcaggcttttcaagcactggcagcttgtccaacacaaagggacactgtcctaatggagatgagaaactgtggacccagcctggagagagtgatcgggaggtctgtgtgcacgtggacgtgatccatcctggagtaaattcaggagagtttacggacgataataaaattgactaaagcacattgtggat

SEQ ID NO: 32180 - DNA, 617 bp, Homo sapiens
tgcagaggccctggcggccatgcccatcagggtgagggtcagcatgcgacctttccaccctttattctgtaattactagttggcattcaacttgaaggaagtcctttcactttyatttatttgtcactatggactcatgaatcctgtttacccactggtttataatcttttgccatcatcatttatttggctcttcagattgttacgaatttggccagaaagtcctgtggagctcacccttgtctgctgctttccgccccatgtttctgcctctggctgcagacgggccttctgtgcctgtcaccagctggctcctatctgggcatcaggctctgaagccacagggctatatggtggctgggcctgccgcaagccctccctgtacccggcctggaaaagctgagccatgagggaagaggtcctgctccctcacttggcattttctctaccttcagtttcatttggtctctgactggaatgggatgagtttgtaacacagtgcaatattttcatttcaggacattcaacaatatttataatattgtacaattttggcccatgtactactgaaaagttgtttcaaaagttgtttccacagactcaacaaaaatggagat

SEQ ID NO: 32181 - DNA, 1326 bp, Homo sapiens
actcctcccagcttgcaccaggactacgaggcctaataatgtagctgtaataagaagaaaagaacactaaaatttctcagcaggctgcaaacgagccccgagacatccagcaaaggaagtgcttcccgtcgatcctctgcaggggtgagcaggcagtggggagagccacggctccctcaggaggtgactgaactgagccactggtagtggcgtgaggcaatggccttcagctgcagtgctttagtgcttaactgacagaaatcctattttccttgtgcagtgattctgagaagtgagtttgcatggagtgatcagagatagtgcttcctgcctccttttcctctttcctgccattcctcttgataaccaaatcagctctggatggtgtaggggtcaatgaaacaggtggccttcagagcaggtgtttgggacaagcagagccaggtgattctggcttccacacccttctggctatgatacttggacatgttactgggcatgtctgtgccttcctttcctcacttatactatggagataaagcggtgctgctgttgtacaattgcaggaaaaattatgtgacgtcaccctcagtatctgacctacaatcagcrtctaggcgggcactctaaagatggcagcagattctcagcagagtggtagtctacacccaggtgaagatcccttccgttttccttgctattcctgcttctttgctcatcactatctcacagaagcacagtgactcccgcgcctccccctgtagggcagttctcaggaccgaggggcgatccacggctctcctactagctccaggtgagccttctgcaaataggccacatgtctaagccgtcactctctggggatactgcagaatgactctcatgtgacaaattaagactaattccattgatgaggaccccgcccttgatcctgtcaccttgacttatacactgtgatgcctgggggcaaatcagccctgaggggcacctcatagttctcacaatgctgagggaaaatcatatctttgaacctgttttgcacaaagtgaataaacgtgaattgtattttcttgttctcttgggatggtcttgaaatagctcagcaagtttgcagatgatagtagctggattggtttgggggtgacatggggattggcaagggagggtggatatcagccccggatctaaaatgataccttaacagtcttgggaaagggatcctatttaactgaaataaatgcaaagtcttgagatttgctcccaaaatgtttccaacatcacaaatactaagtaaggagaaacagagcaggagccagctcaacaggg

SEQ ID NO: 32182 - DNA, 566 bp, Homo sapiens
tctttggcctttctttttattttcttaaaaacccagagaggctatctatgtgtttttgctgagattatgcagcaagccagcttgattctacttctagcattatttcctctatgcagcactgagggcagttttctctgcagaaacttcactgacaattcagcaaatataccatagatcaggagcttatggatagggagcagactgcrgacaggaatctgtaataactctgttgcttcttaagaaggaattctttggcaatttgctatgtgaggagacttccaggctcaagtgttaattgtaatccctttgtttttaaaatagctgatcgtagaataaataaatcttactttctcttttttttaaaaaaaaacacaggcctcaatttcctaaaatattcactctatacataaacaaatgtaagctttaatagagtgtcaaaagtggctttgcaaaaatgtcaatgggccagttgctatgaatagtagtttatacataagcacagaatgttgctgaattattagaaccccagtcattcaagaccatgacaatggcctcagagttattct

SEQ ID NO: 32183 - DNA, 644 bp, Homo sapiens
caccatttaaaagcctgataaactttgcttagaaatataaaaataaattaccacttactcaaatgcatctttttctgctcaaatgtgtaaattttcgtatgtaatacaatagtttgtcaggcaaattttacatctactggtacagtaaaccttacatatgtagagatacaagcaaaactgctacatgagtgtctatttgtactcatagaaaatatttttttgtatttttttgccaaagagacaaaacttgagaataaaaggaaccatctatagcataatataatcaaattagagagttatatgracttggtgggctccactgcagctggtacacccagcaagcttttcttttcagagggacaaggagaggcaaaaattttcacaaattttgccactcagaaattcgtctagtccttctcattttcccaactgctccttatcagtaggcccatttgcctctgtttcattttatcatactcactgacagtcttctcacaacttcaaacagtcttggactgagaaaaagtcctctgccccttcacaagtgagcttatttctgactctgtggtattcaaatttaacacatttcccttcaggagctgtaaaagacagaagcctgaaggaggtgcgaaggaagaaggagt

SEQ ID NO: 32184 - DNA, 559 bp, Homo sapiens
tgcccaccattctctttaaatgtgaatatgctgagatcaataatgactgagattagttgcttctgtattttatttttgaatacttagtttaattttgttttaaaattaataaatcacaaaattaaaatgaacaagttcatttaactgtcttcccaggtagttattattattattacgttttagttatatgtttaaaagaggagatatttaatatgtcagcctaaytggaaaaatgtgtctttggcataggtgattttcagaacaaaagctcatctttacaagagctttgtcctctgctttgatcttaaaaaacagaacctgggtggagagtgacagagcagaaacatcagatctgtcactgagaaaccaattttctgagaaagactggaatcgatgtaaaaatgcaatccgttttcaaagttggagccagagcaatcgtacttttcttaagaagtagagttctgcttctctctagtctctgctttcactaatagaaaatagccaagttcacagcaagcatacagttgaacatataagttatactgacgacacaactcat

SEQ ID NO: 32185 - DNA, 559 bp, Homo sapiens
tgcccaccattctctttaaatgtgaatatgctgagatcaataatgactgagattagttgcttctgtattttatttttgaatacttagtttaattttgttttaaaattaataaatcacaaaattaaaatgaacaagttcatttaactgtcttcccaggtagttattattattattacgttttagttatatgtttaaaagaggagatatttaatatgtcagcctaattggaaaaatgtgtctttggcatwggtgattttcagaacaaaagctcatctttacaagagctttgtcctctgctttgatcttaaaaaacagaacctgggtggagagtgacagagcagaaacatcagatctgtcactgagaaaccaattttctgagaaagactggaatcgatgtaaaaatgcaatccgttttcaaagttggagccagagcaatcgtacttttcttaagaagtagagttctgcttctctctagtctctgctttcactaatagaaaatagccaagttcacagcaagcatacagttgaacatataagttatactgacgacacaactcat

SEQ ID NO: 32186 - DNA, 559 bp, Homo sapiens
tgcccaccattctctttaaatgtgaatatgctgagatcaataatgactgagattagttgcttctgtattttatttttgaatacttagtttaattttgttttaaaattaataaatcacaaaattaaaatgaacaagttcatttaactgtcttcccaggtagttattattattattacgttttagttatatgtttaaaagaggagatatttaatatgtcagcctaattggaaaaatgtgtctttggcataggtgattytcagaacaaaagctcatctttacaagagctttgtcctctgctttgatcttaaaaaacagaacctgggtggagagtgacagagcagaaacatcagatctgtcactgagaaaccaattttctgagaaagactggaatcgatgtaaaaatgcaatccgttttcaaagttggagccagagcaatcgtacttttcttaagaagtagagttctgcttctctctagtctctgctttcactaatagaaaatagccaagttcacagcaagcatacagttgaacatataagttatactgacgacacaactcat

SEQ ID NO: 32187 - DNA, 925 bp, Homo sapiens
attttagactttacaggcttaaaaaaaaaaaccctgctatatatttgtttattaaatcttcacaacaatccttggcacgagcttggtagataccatgagcttctgaaacaaaatgctagagagcctcaaatattttataccctctgttctttgctgggtatatccattgctgtttaccaacagataaaagggggccsccgcattggccagtgggacaggaaaaacatcaagaagggggagaagaacacaattgtcacctcctacaacaggaacttcacgggccgcaatgacacaaaccccaagaccatgccttcaatcatctccccagagattgtcacagccctggccattgcaagaaccctaagttcaacccagagaccgactgccttatgggcaaggatggcaagaagttcaagctggaggctccagacgcaatatgagcttccccaagcgcagtttgacccagggcaggacacctaccagcaccccccaaaggacagcagcaggcagcatgtggatgtgagctccaccagccagcacctgcagctcgtggagccttttgacaagtgggatggcaaggacctggaggacctgcagatcctcatcaaagtcaaagggaagtgtcccactgaccacatctcggctgctggcccctggctcaagttccacgggcacttggagtacatctccaacaacttgctcattggtgccatgaacattgaaaacagcaaggccaactccgtgcacaatgccctcacccaggagtttggccccatccctgacactgcccgctactacaagaaacatggcatcaggtgggtggtgattagggatgagaactaccgcgaggactcgcacggggagcacacagcactggagcatcacctcctcaggggccgggccatcatcaccaagagctttgcca

SEQ ID NO: 32188 - DNA, 1031 bp, Homo sapiens
tggcatcccaggtggcccccaggcaatcccggccaccaacagcccagaccacagtgaccacaccttgtctgtcagcagtgactccggccactctacagcctctgccaggacggataagacggaagagcgcctggccccaggaaccaggaggggcctgagtgcccaggagaaggcwgagttggaccagctgctcagtggctttggcctggaagatcctggaagctccctcaaggaaatgactgatgctcgaagcaagtacagtgggacccgccacgtggtgccagcccaggttcacgtgaatggagacgctgctctgaaggatcgggagacagacattctggatgacgagatgccccaccacgacctgcacagtgtggacagccttgggaccctgtcctcctcggaagggcctcagtcggccacctgggtcccttcacctgccacaagagcagccagaactcactcctatctgacggttttggcagcaacgttggtgaagatccgcagggcaccctcgttccggacctgggccttggcatggacggcccctatgagcgggagcggacttttgggagtcgagagcccaagcagccccagcccctgctgagaaagccctcagtgtccgcccagatgcaggcctatgggcagagcagctactccacacagacctgggtgcgccagcagcagatggttgtagctcaccagtatagcttcgccccagatggggaggcccggctggtgagccgctgccctgcagacaatcctggcctcgtccaggcccagcccagagtgccactcacccccacccgagggaccagcagtagggtggctgtccagaggggtgtaggcagtgggccacatccccctgacacacagcagccctctcccagcaaagcgttcaaacccaggtttccaggagaccaggttgtgaatggagccggcccagagctgagcacaggcccctccccaggctcgcccaccctggacatcgaccagtccatcgagcagctcaacaggctgatcctggagct

SEQ ID NO: 32189 - DNA, 612 bp, Homo sapiens
gacccccgagttggggggacacagagcctccggcactcctcctgctccccgatcaaagcaggcccacagacaccaccatcagaggcatcaacacccccgatcacacctgggatcccactcaggcaggtgcagctcacctggactccttaggcaagaaatgaacagaaaacaaattctatgtatatttcggagaccaacaatacagatgttttcctgaaatcataccaatgcaaagcctagcgccaattccaaaaccacagagatcatcgtctcagcctcccaagacaggggcaggatctaggggcgtgctcttcagttctacaccaaggtgccggygagctcagccctgggtccacctcctcattgtttttcccgggaaagccccttggccactccacttctttgtctcctgccttttgaagtgagaatagtaacagacagggccagtctcatggagctgtccagggattcactgaggtaattctgtcaatggcttggaatccagcctggcaccgcatggccactgcccgtgctgggcagacctggtcaagtgaagtcccgtggtctccagaccccgcccacccctgacatctgagctgcaccccctgctca

SEQ ID NO: 32190 - DNA, 612 bp, Homo sapiens
gacccccgagttggggggacacagagcctccggcactcctcctgctccccgatcaaagcaggcccacagacaccaccatcagaggcatcaacacccccgatcacacctgggatcccactcaggcaggtgcagctcacctggactccttaggcaagaaatgaacagaaaacaaattctatgtatatttcggagaccaacaatacagatgttttcctgaaatcataccaatgcaaagcctagcgccaattccaaaaccacagagatcatcgtctcagcctcccaagacaggggcaggatctaggggcgtgctcttcagttctacaccaaggtgccggtgagctcagccctgggtccacctcctcattgyttttcccgggaaagccccttggccactccacttctttgtctcctgccttttgaagtgagaatagtaacagacagggccagtctcatggagctgtccagggattcactgaggtaattctgtcaatggcttggaatccagcctggcaccgcatggccactgcccgtgctgggcagacctggtcaagtgaagtcccgtggtctccagaccccgcccacccctgacatctgagctgcaccccctgctca

SEQ ID NO: 32191 - DNA, 949 bp, Homo sapiens
ttctctttccaacccaaccctgctactgaaacgtggctttcccacaaggaggtaagagggttaagaggcactcagaaagtatttcaaaagtcacccaaaaaatggagaagaccaaaaaaatatatgaaaacatcccttccatcccggttgaaaacagattaggcaatgcccaactgtgctccccggcatgctaacaatcagatagccaaagggacagctgatctcacacttcagcaccctccatcatcaatcactcagcaaccaaaaatattcatcactgatgtgtaatccactgaactgtccactggccctgcttccaacagaagttggtttgaagcaaaggaaggacaaatctgatagatttatgaagcgacgtggaacctttcctttttctaggtattgatgctaagaatctcatgttctatttttgtgacaggtgtgcttaaaaagtaactttttcatttcaaaagaactaacagtatcctccctgcaattttttagtttcaaaggagaaactagaaaattcttctccatgaaagttggttagaattgactaagcacttgctatgattgctagtcataaacggggacttaaaagcaataytcagcccagtcctgatgatgtgctggagaatggacaagcccccttggggaacagagagagaaacaagagatggaaagggtggtgggcacatttcacggcatccgaatagacagatcaacagaggcaagggaaagacggagcagtgtgtgagaagaaaggcatccactgatgctgaagcagccaccctcaggtgagccaggtgaggctgcaggaattggcatcttcatcacctgacaaacagagagaattctggaaacacccctctcttacaactcagctgacctcctaaagacaaggccaccgtgcaagctcctcccatgcgcccagcacactgttaggccccag

SEQ ID NO: 32192 - DNA, 627 bp, Homo sapiens
taggtcttataacactgtcattaaactcccaaaaatgtcacctttttttgtgagataattcacctttgaaaacaaaatgtcaaggagtggaataaaaagaactgtggataccccacagtgtaatggtgagcactctggactctaaaaagaactgtggttgttgttttttcctttcttactttgttgtgtggttaagaatayctttgcaattaaaaattttaaattgtttcttcaaatttcaaaagtaaacggtttaatagcatagcccagagcaatattttataaactacaggtcacaatccagtttaaaatcaattcagtagctcatgtccatcattaaactgacgaagtagaacacagtgtaataatcaagagtgcattataggccaggtgcagtggctcacgcctgtaatcccagcactttgggaggccgaggtgggcagatcacttgaggtaggagttcaagaccagcctggccaacatgatgaaaccctgtctctaccaaaaatataaaaaattagctgggtgtggtggcacgtgcctataatcccagctactcgggaggctgaggcaggagaatcacttgaacctggcaggcggaggttgcagtgagctgagatcatgctt

SEQ ID NO: 32193 - DNA, 627 bp, Homo sapiens
taggtcttataacactgtcattaaactcccaaaaatgtcacctttttttgtgagataattcacctttgaaaacaaaatgtcaaggagtggaataaaaagaactgtggataccccacagtgtaatggtgagcactctggactctaaaaagaactgtggttgttgttttttcctttcttactttgttgtgtggttaagaatatctttgcaattaaaaattttaaattgtttcttcaaatttcaaaagtaaacggtttaatagcatagcccagagcaatattttataaactacaggtcacaatccagtttaaaatcaattcagtagctcatgtccatcattaaactgacgaagtagaacacagtgtaataatcaagagtgcattataggccaggtgcagtggctcacgcctgtaatcccagcactttgggaggccgaggtgggcagatcacttgaggtaggagttcaagaccagcctggccaacatgatgaaaccctgtctctaccaaaaatataaaaaattagctgggtgtggtggcrcgtgcctataatcccagctactcgggaggctgaggcaggagaatcacttgaacctggcaggcggaggttgcagtgagctgagatcatgctt

SEQ ID NO: 32194 - DNA, 413 bp, Homo sapiens
atttttgtatttttagtagagatggggtttcaccgtgttagccaggatggtcttgatctcctgacctcgggatccgcccgccttggcctcccaaagtgctgggattacaggtgtgagccaccgcgaaaagtttaaattttcctagtccacttaacatccaaattattccaactcccatcccttagaaaattttaaatcaaaagctagaaatgattaagcttagtgaggaaggtatgctgaaagtccaggagacaggccaaaagctaggcctcttgcaccagttagccaagttgtgaaagcaaaggaaaaattcttgaaggaaattaagactgctactycagcgaacatgggaataagaaagcgaaagagccttactgctgatatggagaaagtctgaatggtctggatacacc

SEQ ID NO: 32195 - DNA, 1366 bp, Homo sapiens
tggtatgtttgtcagcccagggtttctaggtatgagtagccacaagctggatgtaaagaaaaatgaatatggtaactccaagtaaaatgcttctgaagcaaagaggggagcaaggaattgtgcatccttaggataagacacataacttgtttattaggctactaggatctattcaatagacttyctattttagtgtagaatatacctcttggaaaattagataaatattttacaaatactcattgctacagtaacctgaatttctgtagttctcacccacctgtatatacgggtgagtttacataaattaaactaattttaaagttttttttaatgaggttctgatctcatacagaacctcatcctcttgcagtactcctaccttcttgctctgccaccccatcagcatttctgggagcccacagacagtgtcccatgtatttggggataatctcaacttacattcttccattcctggtgcttgcaaagcactggagagaggtccctgtgctatgccgccactgccagtctgtgagaaagacgttcctgttggggtactcctgtctcagtcctccagagctgaatgtctggagggccttggtccgtctttcggggtttatctaagccaaggccacatgtatgctttatagaagctggcaggctagccctgtttctctcacttaggcatgtttttaaaaaatgtttttgggctgggtgcagtggctcacacctgtaatctcagaactttgggaggctgaggcaggcggatcacaaggtcaggagatcaagaccatcctgactaacatggtgaaaccctgtctctactaaaaatacaaaaaattagccaggtgtggtggtgggcgcctgtagtcccagctactcaggaggctgaggcaggagaatcgcttgaaccctggaggcggaggttgcagtgagccaagattgtgccactgcactccaggctgggacgacagagcaagactccatctcaaaaaaacaaaaaaagaaaaaagaaaaaatgttttcttcttatggaagctaaggaacttatgcccctccttgcatctcctgtgaaggcagcatcttcttttttcttgtggcttctctccatctggctcagactggctgctgggatcaagccaggactttctctagtccccaaccttgagctgctacacataagccacctcccacaaggcctcttcctcttatgtaaatcaactcataaaaatatatacccgagggctgcttgcggctgccaatttgtatatacatgaaattaacatcttaactgttccagatatttccatgtgtttttcctgaagcagagttgttaatcttttttttctttttctgatctctttcc

SEQ ID NO: 32196 - DNA, 1366 bp, Homo sapiens
tggtatgtttgtcagcccagggtttctaggtatgagtagccacaagctggatgtaaagaaaaatgaatatggtaactccaagtaaaatgcttctgaagcaaagaggggagcaaggaattgtgcatccttaggataagacacataacttgtttattaggctactaggatctattcaatagacttcctattttagtgtagaatatacctcttggaaaattagataaatattttacaaatactcattgctamagtaacctgaatttctgtagttctcacccacctgtatatacgggtgagtttacataaattaaactaattttaaagttttttttaatgaggttctgatctcatacagaacctcatcctcttgcagtactcctaccttcttgctctgccaccccatcagcatttctgggagcccacagacagtgtcccatgtatttggggataatctcaacttacattcttccattcctggtgcttgcaaagcactggagagaggtccctgtgctatgccgccactgccagtctgtgagaaagacgttcctgttggggtactcctgtctcagtcctccagagctgaatgtctggagggccttggtccgtctttcggggtttatctaagccaaggccacatgtatgctttatagaagctggcaggctagccctgtttctctcacttaggcatgtttttaaaaaatgtttttgggctgggtgcagtggctcacacctgtaatctcagaactttgggaggctgaggcaggcggatcacaaggtcaggagatcaagaccatcctgactaacatggtgaaaccctgtctctactaaaaatacaaaaaattagccaggtgtggtggtgggcgcctgtagtcccagctactcaggaggctgaggcaggagaatcgcttgaaccctggaggcggaggttgcagtgagccaagattgtgccactgcactccaggctgggacgacagagcaagactccatctcaaaaaaacaaaaaaagaaaaaagaaaaaatgttttcttcttatggaagctaaggaacttatgcccctccttgcatctcctgtgaaggcagcatcttcttttttcttgtggcttctctccatctggctcagactggctgctgggatcaagccaggactttctctagtccccaaccttgagctgctacacataagccacctcccacaaggcctcttcctcttatgtaaatcaactcataaaaatatatacccgagggctgcttgcggctgccaatttgtatatacatgaaattaacatcttaactgttccagatatttccatgtgtttttcctgaagcagagttgttaatcttttttttctttttctgatctctttcc

SEQ ID NO: 32197 - DNA, 1366 bp, Homo sapiens
tggtatgtttgtcagcccagggtttctaggtatgagtagccacaagctggatgtaaagaaaaatgaatatggtaactccaagtaaaatgcttctgaagcaaagaggggagcaaggaattgtgcatccttaggataagacacataacttgtttattaggctactaggatctattcaatagacttcctattttagtgtagaatatacctcttggaaaattagataaatattttacaaatactcattgctacagtaacctgaatttctgtagttctcacccacctgtatatacgggtgagtttacataaattaaactaattttaaagttttttttaatgaggttctgatctcatacagaacctcatcctcttgcagtactcctaccttcttgctctgccaccccatcagcatttctgggagcccacagacagtgtcccatgtatttggggataatctcaacttacattcttccattcctggtgcttgcaaagcactggagagaggtccctgtgctatgccgccactgccagtctgtgagaaagacgttcctgttggggtactcctgtctcagtcctccagagctgaatgtctggagggccttggtccgtctttcggggtttatctaagccaaggccacatgtatgctttatagaagctggcaggctagccctgtttctctcacttaggcatgtttttaaaaaatgtttttgggctgggtgcagtggctcacacctgtaatctcagaactttgggaggctgaggcaggcggatcacaaggtcaggagatcaagaccatcctgactaacatggtgaaaccctgtctctactaaaaatacaaaaaattagccaggtgtggtggygggcgcctgtagtcccagctactcaggaggctgaggcaggagaatcgcttgaaccctggaggcggaggttgcagtgagccaagattgtgccactgcactccaggctgggacgacagagcaagactccatctcaaaaaaacaaaaaaagaaaaaagaaaaaatgttttcttcttatggaagctaaggaacttatgcccctccttgcatctcctgtgaaggcagcatcttcttttttcttgtggcttctctccatctggctcagactggctgctgggatcaagccaggactttctctagtccccaaccttgagctgctacacataagccacctcccacaaggcctcttcctcttatgtaaatcaactcataaaaatatatacccgagggctgcttgcggctgccaatttgtatatacatgaaattaacatcttaactgttccagatatttccatgtgtttttcctgaagcagagttgttaatcttttttttctttttctgatctctttcc

SEQ ID NO: 32198 - DNA, 1366 bp, Homo sapiens
tggtatgtttgtcagcccagggtttctaggtatgagtagccacaagctggatgtaaagaaaaatgaatatggtaactccaagtaaaatgcttctgaagcaaagaggggagcaaggaattgtgcatccttaggataagacacataacttgtttattaggctactaggatctattcaatagacttcctattttagtgtagaatatacctcttggaaaattagataaatattttacaaatactcattgctacagtaacctgaatttctgtagttctcacccacctgtatatacgggtgagtttacataaattaaactaattttaaagttttttttaatgaggttctgatctcatacagaacctcatcctcttgcagtactcctaccttcttgctctgccaccccatcagcatttctgggagcccacagacagtgtcccatgtatttggggataatctcaacttacattcttccattcctggtgcttgcaaagcactggagagaggtccctgtgctatgccgccactgccagtctgtgagaaagacgttcctgttggggtactcctgtctcagtcctccagagctgaatgtctggagggccttggtccgtctttcggggtttatctaagccaaggccacatgtatgctttatagaagctggcaggctagccctgtttctctcacttaggcatgtttttaaaaaatgtttttgggctgggtgcagtggctcacacctgtaatctcagaactttgggaggctgaggcaggcggatcacaaggtcaggagatcaagaccatcctgactaacatggtgaaaccctgtctctactaaaaatacaaaaaattagccaggtgtggtggtgggckcctgtagtcccagctactcaggaggctgaggcaggagaatcgcttgaaccctggaggcggaggttgcagtgagccaagattgtgccactgcactccaggctgggacgacagagcaagactccatctcaaaaaaacaaaaaaagaaaaaagaaaaaatgttttcttcttatggaagctaaggaacttatgcccctccttgcatctcctgtgaaggcagcatcttcttttttcttgtggcttctctccatctggctcagactggctgctgggatcaagccaggactttctctagtccccaaccttgagctgctacacataagccacctcccacaaggcctcttcctcttatgtaaatcaactcataaaaatatatacccgagggctgcttgcggctgccaatttgtatatacatgaaattaacatcttaactgttccagatatttccatgtgtttttcctgaagcagagttgttaatcttttttttctttttctgatctctttcc

SEQ ID NO: 32199 - DNA, 1366 bp, Homo sapiens
tggtatgtttgtcagcccagggtttctaggtatgagtagccacaagctggatgtaaagaaaaatgaatatggtaactccaagtaaaatgcttctgaagcaaagaggggagcaaggaattgtgcatccttaggataagacacataacttgtttattaggctactaggatctattcaatagacttcctattttagtgtagaatatacctcttggaaaattagataaatattttacaaatactcattgctacagtaacctgaatttctgtagttctcacccacctgtatatacgggtgagtttacataaattaaactaattttaaagttttttttaatgaggttctgatctcatacagaacctcatcctcttgcagtactcctaccttcttgctctgccaccccatcagcatttctgggagcccacagacagtgtcccatgtatttggggataatctcaacttacattcttccattcctggtgcttgcaaagcactggagagaggtccctgtgctatgccgccactgccagtctgtgagaaagacgttcctgttggggtactcctgtctcagtcctccagagctgaatgtctggagggccttggtccgtctttcggggtttatctaagccaaggccacatgtatgctttatagaagctggcaggctagccctgtttctctcacttaggcatgtttttaaaaaatgtttttgggctgggtgcagtggctcacacctgtaatctcagaactttgggaggctgaggcaggcggatcacaaggtcaggagatcaagaccatcctgactaacatggtgaaaccctgtctctactaaaaatacaaaaaattagccaggtgtggtggtgggcgcctgtagtcccagctactcaggaggctgaggcaggagaatcgcttgaaccctggaggcrgaggttgcagtgagccaagattgtgccactgcactccaggctgggacgacagagcaagactccatctcaaaaaaacaaaaaaagaaaaaagaaaaaatgttttcttcttatggaagctaaggaacttatgcccctccttgcatctcctgtgaaggcagcatcttcttttttcttgtggcttctctccatctggctcagactggctgctgggatcaagccaggactttctctagtccccaaccttgagctgctacacataagccacctcccacaaggcctcttcctcttatgtaaatcaactcataaaaatatatacccgagggctgcttgcggctgccaatttgtatatacatgaaattaacatcttaactgttccagatatttccatgtgtttttcctgaagcagagttgttaatcttttttttctttttctgatctctttcc

SEQ ID NO: 32200 - DNA, 1366 bp, Homo sapiens
tggtatgtttgtcagcccagggtttctaggtatgagtagccacaagctggatgtaaagaaaaatgaatatggtaactccaagtaaaatgcttctgaagcaaagaggggagcaaggaattgtgcatccttaggataagacacataacttgtttattaggctactaggatctattcaatagacttcctattttagtgtagaatatacctcttggaaaattagataaatattttacaaatactcattgctacagtaacctgaatttctgtagttctcacccacctgtatatacgggtgagtttacataaattaaactaattttaaagttttttttaatgaggttctgatctcatacagaacctcatcctcttgcagtactcctaccttcttgctctgccaccccatcagcatttctgggagcccacagacagtgtcccatgtatttggggataatctcaacttacattcttccattcctggtgcttgcaaagcactggagagaggtccctgtgctatgccgccactgccagtctgtgagaaagacgttcctgttggggtactcctgtctcagtcctccagagctgaatgtctggagggccttggtccgtctttcggggtttatctaagccaaggccacatgtatgctttatagaagctggcaggctagccctgtttctctcacttaggcatgtttttaaaaaatgtttttgggctgggtgcagtggctcacacctgtaatctcagaactttgggaggctgaggcaggcggatcacaaggtcaggagatcaagaccatcctgactaacatggtgaaaccctgtctctactaaaaatacaaaaaattagccaggtgtggtggtgggcgcctgtagtcccagctactcaggaggctgaggcaggagaatcgcttgaaccctggaggcggaggttgcagtgagccaagattgtgccactgcactccaggctgggacgacagagcaagactccatctcaaaaaaacaaaaaaagaaaaaagaaaaaatgttttcttcttatggaagctaaggaacttatgcccctccttgcatctcctgtgaaggcagcatcttcttttttcttgtggcttctctccatctggctcagactggctgctgggatcaagccaggactttctctagtccccaaccttgagctgctacacataagycacctcccacaaggcctcttcctcttatgtaaatcaactcataaaaatatatacccgagggctgcttgcggctgccaatttgtatatacatgaaattaacatcttaactgttccagatatttccatgtgtttttcctgaagcagagttgttaatcttttttttctttttctgatctctttcc

SEQ ID NO: 32201 - DNA, 1876 bp, Homo sapiens
ggcgcaatctcagctcactgcaacctccacctcccgggttcaaacgattcttctgcctcagcctcctgagtagctgggactacaggtgcgccccaccacgcctggctaatttttgtatctttagtagagacaggatttcaccatattggccaggctggtctcgaactcctgacctcatgatccacccgcttctgcctcccaaagtgctgggattacaggcgtgagccaccatgcccagccaacactggctgtcttttaaggacctttctggaaactactgcatggtatttctgcttttattttattggtcagaacatttgagatatgatgggtaattttattctgggcagccttagacctagttaaaaaatagaggattctattacttagaaagcaggaagaatggatatgggatatgcaagcagccatttttgctgccatagcacatggatagtttagtgaggcagaatagctctacttcccacacaagcatgagaaacatgcagctttcctggactcgaactctttgccaaagttaaagagatgccaagcaaatactcaagaggagaaaactttgttttctaagctaccatgtgctgaatatctattatgtattaagcacagtgttggattcttaataattatcatctttcttgatcattataacaagcatatgaattaggtagtattttttcccttcttagggttgtagaaagtaaactgacttgcccaggatcccatagataataaacaacagagctgggatttgaactgaggtcggcctgacttcaaatcccatatttaaggctgggtgacttgctagccaggtgggcagaaaacagcagtgacacagggctctaacttttgggggttttcttcaagtgtggagataaccctttactgtttgtgagtctcggctggcactaaacctttgcacagaggacaaataataacatcagaagtgttgacagctattattaggacagtgatagactgccagagaggcaggtagtgataaagaaaatcagagcagcctattactgccataattttatttaccaccgatctagtctttattcgatgtttcagttctggatttgtttatttctgacccctcatttgaagatcaacatggagaatctgaaaatagtagagagggaattttagtaatggctgaaaggtttaaaattcaaacgattaaggattatttagcttggagaagaaaagaagattttttatctaatacatagataatacatgagattaaggtggtggtttctgttttactaggataaagcaagaggaaaggggcataattaattaattaatgtaaaagattgcaattaacaataaagtgggttactgatggagctttctattttgcttattttctctttagctattaaaggaatggatttttttctttgaattagttcaggtctgcttgcacatgaagataatgtattaaaacatgaaaattcttaaaatagcatgcttctttgaagaacttaaattatttgaatgttcagtgttttgaacagtgattctgaaaatacattgtgactcatgagcagtaaaataggattatgttgtaaaggaacatgaaataagaaatcaagtgtacctycatacaaactaatacatcatgtcagcaatcagtgagcacatataaactgccaaggaaaaggttagttgtgggtggacaaggagatgaaaaatcataatatataaaacaaaaagaatcctggcagatttttatgaaaagaatgaatgaatataaatttagttccaaaaaaactcaaaatgtgaggctgtttatgaaaaatactctaaaagatctttcagttttatgagaaaagttcattgacttcagaat

SEQ ID NO: 32202 - DNA, 1876 bp, Homo sapiens
ggcgcaatctcagctcactgcaacctccacctcccgggttcaaacgattcttctgcctcagcctcctgagtagctgggactacaggtgcgccccaccacgcctggctaatttttgtatctttagtagagacaggatttcaccatattggccaggctggtctcgaactcctgacctcatgatccacccgcttctgcctcccaaagtgctgggattacaggcgtgagccaccatgcccagccaacactggctgtcttttaaggacctttctggaaactactgcatggtatttctgcttttattttattggtcagaacatttgagatatgatgggtaattttattctgggcagccttagacctagttaaaaaatagaggattctattacttagaaagcaggaagaatggatatgggatatgcaagcagccatttttgctgccatagcacatggatagtttagtgaggcagaatagctctacttcccacacaagcatgagaaacatgcagctttcctggactcgaactctttgccaaagttaaagagatgccaagcaaatactcaagaggagaaaactttgttttctaagctaccatgtgctgaatatctattatgtattaagcacagtgttggattcttaataattatcatctttcttgatcattataacaagcatatgaattaggtagtattttttcccttcttagggttgtagaaagtaaactgacttgcccaggatcccatagataataaacaacagagctgggatttgaactgaggtcggcctgacttcaaatcccatatttaaggctgggtgacttgctagccaggtgggcagaaaacagcagtgacacagggctctaacttttgggggttttcttcaagtgtggagataaccctttactgtttgtgagtctcggctggcactaaacctttgcacagaggacaaataataacatcagaagtgttgacagctattattaggacagtgatagactgccagagaggcaggtagtgataaagaaaatcagagcagcctattactgccataattttatttaccaccgatctagtctttattcgatgtttcagttctggatttgtttatttctgacccctcatttgaagatcaacatggagaatctgaaaatagtagagagggaattttagtaatggctgaaaggtttaaaattcaaacgattaaggattatttagcttggagaagaaaagaagattttttatctaatacatagataatacatgagattaaggtggtggtttctgttttactaggataaagcaagaggaaaggggcataattaattaattaatgtaaaagattgcaattaacaataaagtgggttactgatggagctttctattttgcttattttctctttagctattaaaggaatggatttttttctttgaattagttcaggtctgcttgcacatgaagataatgtattaaaacatgaaaattcttaaaatagcatgcttctttgaagaacttaaattatttgaatgttcagtgttttgaacagtgattctgaaaatacattgtgactcatgagcagtaaaataggattatgttgtaaaggaacatgaaataagaaatcaagtgtacctccatacaaactaatacatcatgtcagcaatcagtgagcacatataaactgccaaggaaaaggttagttgtgggtggacaaggagatgaaaaatcataatatataaaacaaaaagaatcctggcagatttttatgaaaagaatgaatgaatataaatttagttccaaaaaaaytcaaaatgtgaggctgtttatgaaaaatactctaaaagatctttcagttttatgagaaaagttcattgacttcagaat

SEQ ID NO: 32203 - DNA, 512 bp, Homo sapiens
caaacctcatttgtttgccattctatgatttgcatcccagacactcaaagtccctgtcctttgtcttgtcactgctctaaaaacgcattgctctttgctgaagatgagatataagctgggtttgttaagccatctgtgtgagatacactcattccctgggtacgtcccatgtatatatgaaatacacacattaaaacacttatttgtttttctcttgttaatttgtcttttgttacaggggtctgtcccagctaaaaactccgaggggtaagaggaaaacctatttttctctctcacactatgttcctggttctacagatagcaggtaactttgccctgcatctggaatgttaatttgtacactgttttcttgcttgtattgaattgcaaattctgtttctggggcagcagctctcctctcaatttctatctttcgtctttagctaagcttctttgggtctgttccagacacgcattgttcagaatttgattggatacrtacacagacaaga

SEQ ID NO: 32204 - DNA, 1844 bp, Homo sapiens
attatatggctattaacaaatggaaaaaatataataacattatttaatatccgattttacgaccttcctagcttctggtcctttaagcaggcagcctgagattttaaaacggagttaattctctgaaataaaatgtaagccacatgtgaattttaaatattctagtagccaaacttaaaaaaaaaaggaagaaacaggtggaatttattgtaacaatttcatcgttatatattctagttctagaattcaaatattctaatattcaaaatattattttaatatgtgagcagtatgtaatttttcatgtaatatatattattgtatataataatataaaatatgtataataatatataatattatgtataatattatacatgacctcaagtgatctgcccgccttggcctcccaaagtagtgctaggattacaggcgtgagccaccgcgcccgaagcagcggtgctttttgagaaggagtttcactcgcacaatgtgggctcaccgcaacctccacctccgggttcaagcgattctcccacctcagcctcccgagtagctgagattaccggcatgtgccatcgtgcccggctaattttgtatttttagtagagacggcctttctccatgttggtcaggctggtctcgaactcccaacctcatgtgatccgcccgcctcggcctcccaaagtgctgggattacaagtgcttttaagagaaagagacacatcataggaggatcccatggcagagaaaagaaaagagggtctcacttacggaagaaataatcacctatcatctggaatagcataagacaagcaaaagagatcacgacctgactacatcaatgagaagaaaaaggcaacctggctgaaaggactcattggcatcatggagctacatttaataagctgcagtgaatggtcagcctctgggataccaatagtctaccaagaaggctgaactcattctaataaaatcagcatgtctgcaccattccggtggcatagggttacagtatccgttacagaaaccccataaagaccagtgggtacccttctagaattgaagttattgtgaaaaagcataccagcgccgggcacggtagctcatgcctgtaatcccagcactttgggaggctgaggcaggtagatcacctgaggtcaggagttcgagaccagcctggccaacatggtaaaacctcatctctactaaaaatacaaaaattagccaggtgtgatggcgtgcgcttgtagtcccagcaactcgggaggctaaggtatgagaatcgcttgaactcaggaggcagaggctgcaatgagccgagatggagccactgcactccagcctgggaratagagcaagactctctctacaaaaaaaaaaaaataaataaaggcatactagcttggtgccttggctcatgcctataatcctcgtggcatggaaaactagaacatggacacacacagagttaggttcagagcagaagtttataggcaaaagagaaaagagctctctgtgacagagagtgttcttggagaagtgggttgctggtttcatggtgaaatgcaaggtgttttatagatgatcttgagaaggtaatgtctgatgtacatagggtatgaaagattgattggattaggtgtgccatttgtatacggtgcaaaaaactggttaggactagttgtgctatttgcataggtgtgaaaatctggccgcccccaccctaattttttattatgcagatggattctctgcctggccagcagccatgttgcctatttctttaacgttcaatggtgaggaaagggaggatggagcctccatgttgaacacacctggct

SEQ ID NO: 32205 - DNA, 1844 bp, Homo sapiens
attatatggctattaacaaatggaaaaaatataataacattatttaatatccgattttacgaccttcctagcttctggtcctttaagcaggcagcctgagattttaaaacggagttaattctctgaaataaaatgtaagccacatgtgaattttaaatattctagtagccaaacttaaaaaaaaaaggaagaaacaggtggaatttattgtaacaatttcatcgttatatattctagttctagaattcaaatattctaatattcaaaatattattttaatatgtgagcagtatgtaatttttcatgtaatatatattattgtatataataatataaaatatgtataataatatataatattatgtataatattatacatgacctcaagtgatctgcccgccttggcctcccaaagtagtgctaggattacaggcgtgagccaccgcgcccgaagcagcggtgctttttgagaaggagtttcactcgcacaatgtgggctcaccgcaacctccacctccgggttcaagcgattctcccacctcagcctcccgagtagctgagattaccggcatgtgccatcgtgcccggctaattttgtatttttagtagagacggcctttctccatgttggtcaggctggtctcgaactcccaacctcatgtgatccgcccgcctcggcctcccaaagtgctgggattacaagtgcttttaagagaaagagacacatcataggaggatcccatggcagagaaaagaaaagagggtctcacttacggaagaaataatcacctatcatctggaatagcataagacaagcaaaagagatcacgacctgactacatcaatgagaagaaaaaggcaacctggctgaaaggactcattggcatcatggagctacatttaataagctgcagtgaatggtcagcctctgggataccaatagtctaccaagaaggctgaactcattctaataaaatcagcatgtctgcaccattccggtggcatagggttacagtatccgttacagaaaccccataaagaccagtgggtacccttctagaattgaagttattgtgaaaaagcataccagcgccgggcacggtagctcatgcctgtaatcccagcactttgggaggctgaggcaggtagatcacctgaggtcaggagttcgagaccagcctggccaacatggtaaaacctcatctctactaaaaatacaaaaattagccaggtgtgatggcgtgcgcttgtagtcccagcaactcgggaggctaaggtatgagaatcgcttgaactcaggaggcagaggctgcaatgagccgagatggagccactgcactccagcctgggagatagagcaagactctctctacaaaaaaaaaaaaataaataaaggcatactagcttggtgccttggctcatgcctataatcctcgtggcatggaaaactagaacatggacacacacagagttaggttcagagcagaagtttataggcaaaagagaaaagagctctctgtgacagagagtgttcttggagaagtgggttgctggtttcatggtgaaatgcaaggtgttttatagatgatcttgagaaggtaatgtctgatgtacatagggtatgaaagattgattggattaggtgtgccatttgtatacggtgcaaaaaactggttaggactagttgtgctatttgcataggtgygaaaatctggccgcccccaccctaattttttattatgcagatggattctctgcctggccagcagccatgttgcctatttctttaacgttcaatggtgaggaaagggaggatggagcctccatgttgaacacacctggct

SEQ ID NO: 32206 - DNA, 538 bp, Homo sapiens
tgggattacaggtatacaccaccacacctggctaattcttgtgtttttagtagaaatggggtttcaccatgttggcaaggccggtctgggactcctgacctcaagtgatccactcaccttggcctcccaaaatgtcgggattayaggcgtgagccactgcgcctggcataatatttcctgaaggcataaatagttatgtagatagtttctcttagattaacatgataaaagtaacaaagacaacattttaaatgggataaaattaaccaaaatcacattttttttcaatggcttggcataattgccatgttttctgaaatgacagattactaacaagaagcaaagacaagatttttgctttgctcaattgttaagttttggaccttttgaaatttaaaattctggctaaacaatttgaagggagaattctttaggtggcttcctagggtttccaaggcaatacaagaattttcataggcaggaaaatgcatgttatatacacatattgttcttctctgctttgctttcatgtttaaaa

SEQ ID NO: 32207 - DNA, 538 bp, Homo sapiens
tgggattacaggtatacaccaccacacctggctaattcttgtgtttttagtagaaatggggtttcaccatgttggcaaggccggtctgggactcctgacctcaagtgatccactcaccttggcctcccaaaatgtcgggattacaggcgtgagccactgcgcctggcataatatttcctgaaggcataaatagttatgtagatagtttctcttagattaacatgataaaagtaacaaagacaacattttaaatgggataaaattaaccaaaatcacattttttttcaatggcttggcataattgccatgttttctgaaatgacagattactaacaagaagcaaagacaagatttttgctttgctcaattgttaagttttggaccttttgaaatttaaaattctggctaaacaatttgaagggagaattctttaggtggcttcctagggtttccaaggcaatacaagaattttsataggcaggaaaatgcatgttatatacacatattgttcttctctgctttgctttcatgtttaaaa

SEQ ID NO: 32208 - DNA, 528 bp, Homo sapiens
tccgatcaagagacatacatttaataaagggatttatttaaaaaattgaaaaatcggccaggcacggtggctcatgcctgtaatcccagcactttgggagaccgaggcggtggatcaccttaggtcaggagtttgagaccagcctgaccaacatggtgaaaccccatctcttctaaaaatacaaaaattagccaggcatggtggcrggtgcctgtaatcccagctacttgggaggctgagacaggagaagcgcttgaacctgggaggcggaagttgcagtgagctgagatggtgccactgcactactctagcctgggtgacagaatgagactccccctaaaaaaaaaaaaaaatttgaaaaatccagatccaagttgcctttctacaagactcagcaaagatctaataataaaaagactgaaagtggcaagatggaagtaatattccatgcaaatattaacaaaacgagagcagcagacgtcaaaatagtattacacaagctacatcttaagtaactgtcgtatttta

SEQ ID NO: 32209 - DNA, 1699 bp, Homo sapiens
acaatggtattcgaagagaatgatgaggaaacctataaagtcattattcactgttcatgtaaaaaacaccacacctaactagaagtctacacatttaagagcaagcaaacagaaaaatacattgttagtgataacactttgcagcatataaatgatgggaaatgaataratgttgaaaatgacgtggtgcaaaaaacataaagcaatcatgaattaactttgtaccagcaaaactgaaaataacacctattttatgaaatgaaccaaagtgaaaaggcaaaagaaaagaaactgagattgcttaaataatttgatatattaatatattacaaaaaagaaatagatagatcacatcatctggctcttgcaattcaatttaaaggatcaaaaatatgaggcttattccacagaaaaaataaagtaatcttaattattctatataacattagccagaaactactacaatcaatgcatgtttttcattttatacaggacacttggctggttggtaaaaaataaggtaacatgaagttttcagatgaacaaaaactgaaataacttatttattagaatagaatactaaatacaatagaatagaacactaaaaaatgtaaaaaagtatgtacttcaggcagaaggagcattatcacagatgaaaaattgaagatgcagaaagggatcaaaagaattgtgagactatattgaaatgaacactgtattaaaacaagaacactaacatttttaggatgtagactatacaggtgaaattaaaatatatgacaacgagagcatagaaatcaggaaagggacaaacagaactgaaatgtctgagtgtgcttttgcttcacaggactagagtacaattatcaattaatatttgaattttataaattaagaaggcttattgtaatttctaggaaatactacaggatgactaaaaaaaaaaaaaaacacttcaaaactaccaggaaaaagcattataaaatcataaaattaatcaactaggaaagctccttctagctaggattagacctctacagctacaaaaatcactgattacaactaaaatatctagtaaacaaaagtcaacaattgtggggagagtcaaaacacggaaaagtagcctaaaaggaggtgttttctagttttgttttttctcttttctcttacaacatggatccaaaggcagtcctaatcatagactgttcaacattggtggttaagaattcatggattctgtgtgttaggcctgagaaaccaagaaaagggctcctgaggctaaacgagtgtacatgggagtcccctattttccccattattttttctccaagatatcccctcagggtgtgcctggtcctggaatatagcttagacaactgaatgttctttaacttgcaactgagtaaaaaagctgtggtgcatccaaagttaatgttattggccgatactctttggcaataaaaaggaatggattattattacacacacacacaccatgaatgaatttcaaacacatcgttataactgacagaaaccatgctcaactatgatttgatttatatgacattctggaaaattcaaaattagaggaacacaaacacattggttgttgccagagagtggagatgagataactgagtgcaaatgggcagcgcaggggagagttttgcgatgacgctgccttgtggttacataagtg

SEQ ID NO: 32210 - DNA, 1699 bp, Homo sapiens
acaatggtattcgaagagaatgatgaggaaacctataaagtcattattcactgttcatgtaaaaaacaccacacctaactagaagtctacacatttaagagcaagcaaacagaaaaatacattgttagtgataacactttgcagcatataaatgatgggaaatgaatagatgttgaaaatgacgtggtgcaaaaaacataaagcaatcatgaattaactttgtaccagcaaaactgaaaataacacctattttatgaaatgaaccaaagtgaaaaggcaaaagaaaagaaactgagattgcttaaataatttgatatattaatatattacaaaaaagaaatagatagatcacatcatctggctcttgcaattcaatttaaaggatcaaaaatatgaggcttattccacagaaaaaataaagtaatcttaattattctatataacattagccagaaactactacaatcaatgcatgtttttcattttatacaggacacttggctggttggtaaaaaataaggtaacatgaagttttcagatgaacaaaaactgaaataacttatttattagaatagaatactaaatacaatagaatagaacactaaaaaatgtaaaaaagtatgtacttcaggcagaaggagcattatcacagatgaaaaattgaagatgcagaaagggatcaaaagaattgtgagactatattgaaatgaacactgtattaaaacaagaacactaacatttttaggatgtagactatacaggtgaaattaaaatatatgacaacgagagcatagaaatcaggaaagggacaaayagaactgaaatgtctgagtgtgcttttgcttcacaggactagagtacaattatcaattaatatttgaattttataaattaagaaggcttattgtaatttctaggaaatactacaggatgactaaaaaaaaaaaaaaacacttcaaaactaccaggaaaaagcattataaaatcataaaattaatcaactaggaaagctccttctagctaggattagacctctacagctacaaaaatcactgattacaactaaaatatctagtaaacaaaagtcaacaattgtggggagagtcaaaacacggaaaagtagcctaaaaggaggtgttttctagttttgttttttctcttttctcttacaacatggatccaaaggcagtcctaatcatagactgttcaacattggtggttaagaattcatggattctgtgtgttaggcctgagaaaccaagaaaagggctcctgaggctaaacgagtgtacatgggagtcccctattttccccattattttttctccaagatatcccctcagggtgtgcctggtcctggaatatagcttagacaactgaatgttctttaacttgcaactgagtaaaaaagctgtggtgcatccaaagttaatgttattggccgatactctttggcaataaaaaggaatggattattattacacacacacacaccatgaatgaatttcaaacacatcgttataactgacagaaaccatgctcaactatgatttgatttatatgacattctggaaaattcaaaattagaggaacacaaacacattggttgttgccagagagtggagatgagataactgagtgcaaatgggcagcgcaggggagagttttgcgatgacgctgccttgtggttacataagtg

SEQ ID NO: 32211 - DNA, 1699 bp, Homo sapiens
acaatggtattcgaagagaatgatgaggaaacctataaagtcattattcactgttcatgtaaaaaacaccacacctaactagaagtctacacatttaagagcaagcaaacagaaaaatacattgttagtgataacactttgcagcatataaatgatgggaaatgaatagatgttgaaaatgacgtggtgcaaaaaacataaagcaatcatgaattaactttgtaccagcaaaactgaaaataacacctattttatgaaatgaaccaaagtgaaaaggcaaaagaaaagaaactgagattgcttaaataatttgatatattaatatattacaaaaaagaaatagatagatcacatcatctggctcttgcaattcaatttaaaggatcaaaaatatgaggcttattccacagaaaaaataaagtaatcttaattattctatataacattagccagaaactactacaatcaatgcatgtttttcattttatacaggacacttggctggttggtaaaaaataaggtaacatgaagttttcagatgaacaaaaactgaaataacttatttattagaatagaatactaaatacaatagaatagaacactaaaaaatgtaaaaaagtatgtacttcaggcagaaggagcattatcacagatgaaaaattgaagatgcagaaagggatcaaaagaattgtgagactatattgaaatgaacactgtattaaaacaagaacactaacatttttaggatgtagactatacaggtgaaattaaaatatatgacaacgagagcatagaaatcaggaaagggacaaacagaactraaatgtctgagtgtgcttttgcttcacaggactagagtacaattatcaattaatatttgaattttataaattaagaaggcttattgtaatttctaggaaatactacaggatgactaaaaaaaaaaaaaaacacttcaaaactaccaggaaaaagcattataaaatcataaaattaatcaactaggaaagctccttctagctaggattagacctctacagctacaaaaatcactgattacaactaaaatatctagtaaacaaaagtcaacaattgtggggagagtcaaaacacggaaaagtagcctaaaaggaggtgttttctagttttgttttttctcttttctcttacaacatggatccaaaggcagtcctaatcatagactgttcaacattggtggttaagaattcatggattctgtgtgttaggcctgagaaaccaagaaaagggctcctgaggctaaacgagtgtacatgggagtcccctattttccccattattttttctccaagatatcccctcagggtgtgcctggtcctggaatatagcttagacaactgaatgttctttaacttgcaactgagtaaaaaagctgtggtgcatccaaagttaatgttattggccgatactctttggcaataaaaaggaatggattattattacacacacacacaccatgaatgaatttcaaacacatcgttataactgacagaaaccatgctcaactatgatttgatttatatgacattctggaaaattcaaaattagaggaacacaaacacattggttgttgccagagagtggagatgagataactgagtgcaaatgggcagcgcaggggagagttttgcgatgacgctgccttgtggttacataagtg

SEQ ID NO: 32212 - DNA, 913 bp, Homo sapiens
agctcatgcatttccccctactcactgcagtacggagcactggaagtagtcaggaggtagactttcacttccttggggagcggctctatcttgacaccaccttgttccaccagtcctggaaataaagaagcaaagacagcagagtcctgagaaggctatcttagggtcccacagcacccagccacgtgtttattaattcatgcacccatttattccacggacatctacaccatacacgcactatgtgctgtattctaaggtgagtcctgggatcccagcaactcggtccagtgggcagtaaacacacacataaacggaaatatgcttttcagatcatctgactcattcttggcaggttattataagaaatctgacactaatctgtctctaacttgcaaaaccaatctcctatagtagttgttttcatgacatttatatcccgtgcagtgggagcatggtgaagcaggaagtgtttgacctgaagactagtggatgacaggtggagagagggcattctgggaagagagtatggttaggaccaaggcacacaggtgaggaagcccgatgtacacttggaagtacaagtagttagcaccaccaggtgttcagtgcaagagaaagtgtagtgagagatgaggctgggcagacagtgtgaggtggctgttatgtctgtgggtccatggcatctaggggaaactgacatatgcacaatgaataggaaataatgatgactggttctatcattggaagctaccctactttactattttgtcaagctggtacccatttcactcatataagcastgacaggctgctgcagttgagtggcagccaggggtagcgggaagtgagagagtgcgggagggagagaaaccatttccactgcccaggagtttttcctggagctcttcat

SEQ ID NO: 32213 - DNA, 604 bp, Homo sapiens
cccaggaaaaattgtgaagtgggcagagaatcttcactccccttcagactctttccccttctcaggcagctcccccacctctgcactcattttgccccttggtcactgtagagaccccacccaatgcttcggacatgatctagacttatctgttcgcactgcgtttggttatatctgtccccacttgccaaggtccttcacctttgtgggccttgaggtcattgtctctaccagctggtggcctcaggcaagtgactcctctcagggtatttgagcttggagcccctgaattttcaatactaatgcccaaagaacatgagtctaaaatggggttgtctgacttggagataagagcaaagaaagaatcctttggtctcccaayctacagagctgtggatagaaacatttactaatagacagccatgcttcaaagcagtgtttctcatcattttggctggtatatggacaaccctcctccccattgtcaatgccagcagatggaagtgacacagtccatctgttggcccacttcaggggccggctgtgtcttcttactatatcttccttctaaaatacactttctattggagactgctctagtgaa

SEQ ID NO: 32214 - DNA, 1862 bp, Homo sapiens
cattacctttgcattgagaaataaagagtattctgacccttaggttctggctccaatctgccaatctgcccataaatacaagggtttctattagactattatctggaaagtgacttatataaggcgaaaaattaaatgatattgatttgaaatgaaaaaagctcatttatgtgcattttaggaacctaagtgaatcagctaaatatatgcactgagaaaaataagttaccctctaggtagtatcttgtaataagctggaaacataaaacccattaatagtattagaaattagatgcctaatgaattgtgcccattatggarattttctgtgataacaattccttgaaaaaagctagagactgcccgtatctctgtgacataagagaaaagatacaagtgaaagcatatttcacatgattaaagaaacataggccaagttctggtacttactatgtaaggactatggccactgcatcattcaacacactctctccaaacaagagtgtgtacaggtcagggtcgacgtgcagttcatggaaaatggccagcactgtcactaggaagacacacacaaacatgcaggttagcttggatgcaggcatggagttttccttggctatggtcaccactcaaaaacattaatgaaatgctcatcttctcaaatccaatgactatactaacaccagacctttattcaaaaaatatctgatgcttaagaggcttctcttggctccctactgcttaaagataaaatttgagctccaaagtacaagtaccctacaatctgcaccttgcttaccttctagcctcatctccctctgccccctttgctgcctttctcaagtcacactgaacttgccataatttcccaaacacactgtgtagtttcttaactacctttgcattttgattccttctactatggcagcaattccttcctcgtccacttgctaccatccttgtattccttaaatacacacacacacacacacacacacacacacacacttcttgctaccaaggactcatttttttcattctttaagaacctttcaactgtccccctcccaacccttcaactgcctcagcagaggcctggctcactcctttctggatcccagcatttggatcaaatcactgaacttaccacagaaaggactgggagctccctggaaatggggttcatctttggacacatggtgttagaccatactcagtaactgcttgatgcatgaatgactaaatgaatgagtgaatgaataaatgaataaatgttgttgcaatggcctactcctgtgaagggagacacggttccacctgagtctcattctgtcctgagatcacactcacccgtgaagatggactcaatgatcttaagaacaggacatgaggatttgtttctggttgcctgctgcatggcctgctactatatgccatgttcttgtattgagcctctgtgagtacattagggcagtcaatactcacacactgattatctgtgttcatcaaaactattcaatatcttgatatttaaaacagttaagcagagtgtgaacagcaatcattaggaaaatgatccattgaattaattgccaagggggaaagagggaggttgaaaatgatattgatggcaaatgtctaaggcagaatgggtatttttaattctgtttttcctttcctatttcatgggtggtgaggttagtaactgtgttgtacaaaacagtgctacgaggaaataaaagcaagacagacaagttgaatgtgaaggttttataagtaggattaagaagtttggagcttgttctttcataatagagagtcatgaagggttttaataagagagatgacacaatctgaacttt

SEQ ID NO: 32215 - DNA, 1862 bp, Homo sapiens
cattacctttgcattgagaaataaagagtattctgacccttaggttctggctccaatctgccaatctgcccataaatacaagggtttctattagactattatctggaaagtgacttatataaggcgaaaaattaaatgatattgatttgaaatgaaaaaagctcatttatgtgcattttaggaacctaagtgaatcagctaaatatatgcactgagaaaaataagttaccctctaggtagtatcttgtaataagctggaaacataaaacccattaatagtattagaaattagatgcctaatgaattgtgcccattatggaaattttctgtgataacaattccttgaaaaaagctagagactgcccgtatctctgtgacataagagaaaagatacaagtgaaagcatatttcacatgattaaagaaacataggccaagttctggtacttactatgtaaggactatggccactgcatcattcaacacactctctccaaacaagagtgtgtacaggtcagggtcgacgtgcagttcatggaaaatggccagcactgtcactaggaagacacacacaaacatgcaggttagcttggatgcaggcatggagttttccttggctatggtcaccactcaaaaacattaatgaaatgctcatcttctcaaatccaatgactatactaacaccagacctttattcaaaaaatatctgatgcttaagaggcttctcttggctccctactgcttaaagataaaatttgagctccaaagtacaagtaccctacaatctgcaccttgcttaccttctagcctcatctccctctgccccctttgctgcctttctcaagtcacactgaacttgccataatttcccaaacacactgtgtagtttcttaactacctttgcattttgattccttctactatggcagcaattccttcctcgtccacttgctaccatcctygtattccttaaatacacacacacacacacacacacacacacacacacttcttgctaccaaggactcatttttttcattctttaagaacctttcaactgtccccctcccaacccttcaactgcctcagcagaggcctggctcactcctttctggatcccagcatttggatcaaatcactgaacttaccacagaaaggactgggagctccctggaaatggggttcatctttggacacatggtgttagaccatactcagtaactgcttgatgcatgaatgactaaatgaatgagtgaatgaataaatgaataaatgttgttgcaatggcctactcctgtgaagggagacacggttccacctgagtctcattctgtcctgagatcacactcacccgtgaagatggactcaatgatcttaagaacaggacatgaggatttgtttctggttgcctgctgcatggcctgctactatatgccatgttcttgtattgagcctctgtgagtacattagggcagtcaatactcacacactgattatctgtgttcatcaaaactattcaatatcttgatatttaaaacagttaagcagagtgtgaacagcaatcattaggaaaatgatccattgaattaattgccaagggggaaagagggaggttgaaaatgatattgatggcaaatgtctaaggcagaatgggtatttttaattctgtttttcctttcctatttcatgggtggtgaggttagtaactgtgttgtacaaaacagtgctacgaggaaataaaagcaagacagacaagttgaatgtgaaggttttataagtaggattaagaagtttggagcttgttctttcataatagagagtcatgaagggttttaataagagagatgacacaatctgaacttt

SEQ ID NO: 32216 - DNA, 1862 bp, Homo sapiens
cattacctttgcattgagaaataaagagtattctgacccttaggttctggctccaatctgccaatctgcccataaatacaagggtttctattagactattatctggaaagtgacttatataaggcgaaaaattaaatgatattgatttgaaatgaaaaaagctcatttatgtgcattttaggaacctaagtgaatcagctaaatatatgcactgagaaaaataagttaccctctaggtagtatcttgtaataagctggaaacataaaacccattaatagtattagaaattagatgcctaatgaattgtgcccattatggaaattttctgtgataacaattccttgaaaaaagctagagactgcccgtatctctgtgacataagagaaaagatacaagtgaaagcatatttcacatgattaaagaaacataggccaagttctggtacttactatgtaaggactatggccactgcatcattcaacacactctctccaaacaagagtgtgtacaggtcagggtcgacgtgcagttcatggaaaatggccagcactgtcactaggaagacacacacaaacatgcaggttagcttggatgcaggcatggagttttccttggctatggtcaccactcaaaaacattaatgaaatgctcatcttctcaaatccaatgactatactaacaccagacctttattcaaaaaatatctgatgcttaagaggcttctcttggctccctactgcttaaagataaaatttgagctccaaagtacaagtaccctacaatctgcaccttgcttaccttctagcctcatctccctctgccccctttgctgcctttctcaagtcacactgaacttgccataatttcccaaacacactgtgtagtttcttaactacctttgcattttgattccttctactatggcagcaattccttcctcgtccacttgctaccatccttgtattccttaaatacacacacacacacacacacacacacacacacacttcttgctaccaaggactcatttttttcattctttaagaacctttcaactgtccccctcccaacccttcaactgcctcagcagaggcctggctcactcctttctggatcccagcatttggatcaaatcactgaacttaccacagaaaggactgggagctccctggaaatggggttcatctttggacacatggtgttagaccatactcagtaactgcttgatgcatgaatgactaaatgaatgagtgaatgaataaatgaataaatgttgttgcaatggcctactcctgtgaagggagacacggttccacctgrgtctcattctgtcctgagatcacactcacccgtgaagatggactcaatgatcttaagaacaggacatgaggatttgtttctggttgcctgctgcatggcctgctactatatgccatgttcttgtattgagcctctgtgagtacattagggcagtcaatactcacacactgattatctgtgttcatcaaaactattcaatatcttgatatttaaaacagttaagcagagtgtgaacagcaatcattaggaaaatgatccattgaattaattgccaagggggaaagagggaggttgaaaatgatattgatggcaaatgtctaaggcagaatgggtatttttaattctgtttttcctttcctatttcatgggtggtgaggttagtaactgtgttgtacaaaacagtgctacgaggaaataaaagcaagacagacaagttgaatgtgaaggttttataagtaggattaagaagtttggagcttgttctttcataatagagagtcatgaagggttttaataagagagatgacacaatctgaacttt

SEQ ID NO: 32217 - DNA, 1862 bp, Homo sapiens
cattacctttgcattgagaaataaagagtattctgacccttaggttctggctccaatctgccaatctgcccataaatacaagggtttctattagactattatctggaaagtgacttatataaggcgaaaaattaaatgatattgatttgaaatgaaaaaagctcatttatgtgcattttaggaacctaagtgaatcagctaaatatatgcactgagaaaaataagttaccctctaggtagtatcttgtaataagctggaaacataaaacccattaatagtattagaaattagatgcctaatgaattgtgcccattatggaaattttctgtgataacaattccttgaaaaaagctagagactgcccgtatctctgtgacataagagaaaagatacaagtgaaagcatatttcacatgattaaagaaacataggccaagttctggtacttactatgtaaggactatggccactgcatcattcaacacactctctccaaacaagagtgtgtacaggtcagggtcgacgtgcagttcatggaaaatggccagcactgtcactaggaagacacacacaaacatgcaggttagcttggatgcaggcatggagttttccttggctatggtcaccactcaaaaacattaatgaaatgctcatcttctcaaatccaatgactatactaacaccagacctttattcaaaaaatatctgatgcttaagaggcttctcttggctccctactgcttaaagataaaatttgagctccaaagtacaagtaccctacaatctgcaccttgcttaccttctagcctcatctccctctgccccctttgctgcctttctcaagtcacactgaacttgccataatttcccaaacacactgtgtagtttcttaactacctttgcattttgattccttctactatggcagcaattccttcctcgtccacttgctaccatccttgtattccttaaatacacacacacacacacacacacacacacacacacttcttgctaccaaggactcatttttttcattctttaagaacctttcaactgtccccctcccaacccttcaactgcctcagcagaggcctggctcactcctttctggatcccagcatttggatcaaatcactgaacttaccacagaaaggactgggagctccctggaaatggggttcatctttggacacatggtgttagaccatactcagtaactgcttgatgcatgaatgactaaatgaatgagtgaatgaataaatgaataaatgttgttgcaatggcctactcctgtgaagggagacacggttccacctgagtctcattctgtcctgagatcacactcacccgtgaagatggactcaatgatcttaagaacaggacatgaggatttgtttctggttgcctgctgcatggcctgctactatatgccatgttcttgtattgagcctctgtgagtacattagggcagtcaatamtcacacactgattatctgtgttcatcaaaactattcaatatcttgatatttaaaacagttaagcagagtgtgaacagcaatcattaggaaaatgatccattgaattaattgccaagggggaaagagggaggttgaaaatgatattgatggcaaatgtctaaggcagaatgggtatttttaattctgtttttcctttcctatttcatgggtggtgaggttagtaactgtgttgtacaaaacagtgctacgaggaaataaaagcaagacagacaagttgaatgtgaaggttttataagtaggattaagaagtttggagcttgttctttcataatagagagtcatgaagggttttaataagagagatgacacaatctgaacttt

SEQ ID NO: 32218 - DNA, 972 bp, Homo sapiens
tttagtatgaaaaataaagtttgcccactttgataagcatgacttaaaaaaaaataatgctgtattattcctgtataactcatcatgttccccttttggctttgactgccagaaagctcagagctatatttwttgccaaaccacagcaatgaacagtggcctaattttgcagaaaaattctgtcccagagcacttgagtgtttaccctcaactaaatggtcctgtgatgtgcatggcttatgttatgagttgtcacaaatccaatctggaaataggcaaggattaaataataaacaaacaaacacataagtaatttggactaagcggtcttggtctttggcaatagaaaaatgctcacacctagaatttggtttgtagcaaatgtctgttaggcacattgcctaaatctagtgtactactcgggggtgagtctgcccctcggtacagccatggacacttggatctttctgttactggggttcacacccatattcacccatcccatgatgctggctccttagaaggtggtctgtatggcagctcagtaaggatatcaggttgaaagggtgtgaaagagcaaggatcaagcaaactagcaatttgttcagtttcccatggatcttagcctttaatgtagttgatagaagaagatcttgctgaaatggacaaggaaatagacaatttttacacaaattgacaattcttaggcaatggtgtgtgtgtgtgtgtgtgtgtgtgtgcgcgtgtgtttattataacatccaacagtagattaaaaaatattaggtgagttaagatacttccttacctttctagaaggtcaaatattttttcttattattaatactacttggatcattttataagttaaacttgaatagaatacagaatgtggaagaaagggaactaatgttttttgaatgactgtgatgtaaatgatttgcctacattatttcactgaagggacatggc

SEQ ID NO: 32219 - DNA, 639 bp, Homo sapiens
ttgtggtgacatcatcaagagataaggtaatgtcttaaaaatgtaactgactctaatcagtaaccacacgggggaaccactaaataaataaatggcctgtccacccaaataatttatcaattaatagacaatcataagcttgacagcttgtctgaggtccaaactactgactcaacaagtacatactgagtatctactagtgcagacaactgtgctgaacgaaggtataggttggtgagsaaaacagacattgtccctgctagcatggagtttaaaatatattagggaataatagacaataaatgagtaaacaaaatataattacaaattatgatatgtgctacgattggggcatagtatttagagttgccaatattaaatactaagactttattcattattgatctgaaattcaaatttaactgggtgtcctacatctttatttgctaaatctggtagccctaccagtatatgtgcgtgtgtgtgcgtgtgtgtgtgtgtgtgtgtgtatgtgtgtagtggggggcaagggagagagatctactagctataatagtcgggcaaaattcatgccaagacactccatttaaattgacatttgacagatgagaaagagctgtccaggaaagaaagagggtg

SEQ ID NO: 32220 - DNA, 639 bp, Homo sapiens
ttgtggtgacatcatcaagagataaggtaatgtcttaaaaatgtaactgactctaatcagtaaccacacgggggaaccactaaataaataaatggcctgtccacccaaataatttatcaattaatagacaatcataagcttgacagcttgtctgaggtccaaactactgactcaacaagtacatactgagtatctactagtgcagacaactgtgctgaacgaaggtataggttggtgagcaaaacagacattgtccctgctagcatggagtttaaaatatattagggaataatagacaataaatgagtaaacaaaatataattacaaattatgatawgtgctacgattggggcatagtatttagagttgccaatattaaatactaagactttattcattattgatctgaaattcaaatttaactgggtgtcctacatctttatttgctaaatctggtagccctaccagtatatgtgcgtgtgtgtgcgtgtgtgtgtgtgtgtgtgtgtatgtgtgtagtggggggcaagggagagagatctactagctataatagtcgggcaaaattcatgccaagacactccatttaaattgacatttgacagatgagaaagagctgtccaggaaagaaagagggtg

SEQ ID NO: 32221 - DNA, 644 bp, Homo sapiens
tgcatatatttttctacttttcctaactttttcttataagttatgctaatgaaaaggctaaaagtgaacagctataagaacaataaacaatatctgaaaatttaaatagtcaactgttacataagtaagaattaactctgccaagaagtttttctgagttccataaaaagcaaagtaggygggtgagaatgggaatggggggtaaaaatgaaaaaggataaacctcaaaacacattagggtaagaatttaatttaatggcccaaaatatagcatgctcaccttaatgtcattagatcaaatttgaccatttaactgccattctgaaaataagccatttggcacagactttagaatttgactttcatatatccaatttgaattaattgcctttagaaaaaacagatgaaactacatcatgattctgatattgcaggataatgccaggaagaggggagtctaaattctatgtgagttatttcatctaataatttagtgggcattcactctaacttttgaaatgagaaactcttgctgtgaatccatgaagaacttctaaatggtgaaagaatttcctcctttttccttcaatactgcctgccattctggcaacgggaaaagtgatatatttgaggacccctggggc

SEQ ID NO: 32222 - DNA, 527 bp, Homo sapiens
aagagtaggagttcactaagtgacccaggggaatgtcgtaggcttcccactggcttggctgacccctgaaagataaaacctgacaggtgaacagtgcaagttgagggctctcaaagcagctccccttgcatttgacttgttacagccaatctcttccattcctctcatgaaagtagttgttggacacaattaagaaatgtgacaacggcagctcagagaaaagaagttgaaggtcacatagctactgagtggcaaagccaagattttgattgtcccaaacatttgaaacactcaactgatggaattttttatttttatttattttttattaatatatattgatcagtggagtgtgtcttatyatattgaaattctgactcagcactgggtatgtctaggatttcagccacactgcaatacatagaagagtgcttggtgcataataagtattcagtaaatatctcttgaatgaattaataaatcccaagtttgaaggatcacttagaggcatcctttgtcttttgaat

SEQ ID NO: 32223 - DNA, 683 bp, Homo sapiens
gttttcttttaacctgataaccattgaaaacttttctagtaatccccaataaaactgggcttcagttccgttacctgtacaataagacagactagtggatctcttcaggtctcttycagatctgaaattctgattctatgaagagttcaaggcatttctcagaagtgaccagataatattgataatgccttattgggaatgcaattagcgtcattacctgacctctttatttccctgattgaatataaggaagggagttattgtttatttgccatgggctttgtgccaaaccagagcttgtttcttacctttagtacacttaatgctttaaacataccgtcttaggatcaattggaaacatgctaagtttactttaaaatgacagatagggcactgtcttttggcatgtgaaggcacttctcataatcacagcactggtaggttttctttctgttaaactgagtaaacttatatgttttgaattgaaaggtctataaggtgtggagaactttagggaaagctaaagtcagttttagggtcaccagcataatatgtttataagcattatcttgggaaagcccctagtgcaagtataaagcttactttgatagagaaggaactagtgataaaaggtctttttttaaaaaaagagaaaaacttactggtttaaataggaattttcc

SEQ ID NO: 32224 - DNA, 1318 bp, Homo sapiens
aataaaaaataaaaactgagaatcaggaaaaaagaaattaaaacatttaaaagccactttggaaattattgttgacagaataagaacagaacactgaggaagactacaagtctttgatactacattatagcttcttagattgttaaaatacttggcaatattatatatcctgctttgagtgtttcaaggtttgtaaattgagctataagcttttgaattttaaggcatctagcatgtcttctgcgttatgccaatttgtaagagctagccaaaagctggtgtagaagaaatgatcaacatttatagtaaagcaagttatgttttcttattgcttttgtgtaaggccttgaaaaggatctgatgaggaaaaactgtataaattcaacttttagaaacttttctccccactatgacttactgactcccttattcatttaagaagcacctgtagtgcatctagtggatgccaagactgcagttgggagcagctgtaggaggaaatgtgttcctgtactcaggagcttagagtctggtagaatctagtcagcttcgggcattggcaaactcctgcctgggcctgcaagccaagagtaaatcgacatttttaaagggcaggtaaaaaacagaagaaaaatatgcgacaaaatatttaatttctggctctttgccagaacaattttgccagcccctgcctatgccattttcagtggttcctttcccgtctggagctgcgagtttattatccygccctcctgtgctcttgatgctcactctcttggattgtatctgttgctgccattaggttaataaggacattggaacaattggatggttgggtttttctaaaaattctcttgaaattgttgggaattgttttggggaagccaaaactgtcataatgttatttgtgaatcagtcttgttttatttttaacagtacagtccaagtctcccgtggttaaaacacatgttttccataggctgtttgcttttcactctatagacttagagaaaaacaatacagaagccaatccttttttaaaagcattgaaaggcaatgctttcttaaaaggcagtgaaacaaaatgttgacaaattgtaaaggttaacatcagttaaaattcggaatctgactaattttaatctcagatttatgagaattaggccctgttagcttagaggcatttcatagtctctcaataacacggtatattatatttacatggccttgtggcaaaagctgaatacatgttttacttttttccttaaaaaatttttattgtaaaatatcttacttataatagtatatatgtcacatg

SEQ ID NO: 32225 - DNA, 1318 bp, Homo sapiens
aataaaaaataaaaactgagaatcaggaaaaaagaaattaaaacatttaaaagccactttggaaattattgttgacagaataagaacagaacactgaggaagactacaagtctttgatactacattatagcttcttagattgttaaaatacttggcaatattatatatcctgctttgagtgtttcaaggtttgtaaattgagctataagcttttgaattttaaggcatctagcatgtcttctgcgttatgccaatttgtaagagctagccaaaagctggtgtagaagaaatgatcaacatttatagtaaagcaagttatgttttcttattgcttttgtgtaaggccttgaaaaggatctgatgaggaaaaactgtataaattcaacttttagaaacttttctccccactatgacttactgactcccttattcatttaagaagcacctgtagtgcatctagtggatgccaagactgcagttgggagcagctgtaggaggaaatgtgttcctgtactcaggagcttagagtctggtagaatctagtcagcttcgggcattggcaaactcctgcctgggcctgcaagccaagagtaaatcgacatttttaaagggcaggtaaaaaacagaagaaaaatatgcgacaaaatatttaatttctggctctttgccagaacaattttgccagcccctgcctatgccattttcagtggttcctttcccgtctggagctgcgagtttattatcctgccctcctgtgctcttgatgctcactctcttggattgtatctgttgctgccattaggttaataaggacattggaacaattggatggttgggtttttctaaaaattctcttgaaattgttgggaattgttttggggaagccaaaactgtcrtaatgttatttgtgaatcagtcttgttttatttttaacagtacagtccaagtctcccgtggttaaaacacatgttttccataggctgtttgcttttcactctatagacttagagaaaaacaatacagaagccaatccttttttaaaagcattgaaaggcaatgctttcttaaaaggcagtgaaacaaaatgttgacaaattgtaaaggttaacatcagttaaaattcggaatctgactaattttaatctcagatttatgagaattaggccctgttagcttagaggcatttcatagtctctcaataacacggtatattatatttacatggccttgtggcaaaagctgaatacatgttttacttttttccttaaaaaatttttattgtaaaatatcttacttataatagtatatatgtcacatg

SEQ ID NO: 32226 - DNA, 761 bp, Homo sapiens
  misc_feature (1)...(761): n = A,T,C or G
ggttaaaaaaatgcagtactaagacgctgaaaagctcggcatgttggagtggagggcagtagtggggcctgtgagtgggctgttggcagggctgcattttgactttcatgggcctcaggcatttcgcttcatgggccctaacatgggctgaattgtgtctcctcaaaattcctgcatcgaagttctggtcccaagtatcgcagcatgggactgtagataaagatagggtctctacagaagtaaaatgagattattagggtggccctagttcaatatgactggtgtccttataagaagaggagatgaggacattgacattcacagagaaagacagtgtgaggacacaggaagggacagccatctgtaagccagggagggcctctcaagaagccaattgtgcctacacctcagtctcagactccagcctccagagctgtgaggagatgactgtagtygaacgccatnccagtctgtgggactttggtatgccaggcctaggaaacaaatacaggtctcttcctttaaaaacatgttaagaattatatttttacagctacattggtatagagatgaatgtaattcaggctggattcattataattatagtcatttcttctcctgattttaagagaaattaaaatggaaacattttccttggcccttaagtgtcttacgggcactgggctctgtgcccctcgtgcctggtgggtgagttggccccagtgactgggactgtggaaggcccgagggcgggttgggat

SEQ ID NO: 32227 - DNA, 761 bp, Homo sapiens
  misc_feature (1)...(761): n = A,T,C or G
ggttaaaaaaatgcagtactaagacgctgaaaagctcggcatgttggagtggagggcagtagtggggcctgtgagtgggctgttggcagggctgcattttgactttcatgggcctcaggcatttcgcttcatgggccctaacatgggctgaattgtgtctcctcaaaattcctgcatcgaagttctggtcccaagtatcgcagcatgggactgtagataaagatagggtctctacagaagtaaaatgagattattagggtggccctagttcaatatgactggtgtccttataagaagaggagatgaggacattgacattcacagagaaagacagtgtgaggacacaggaagggacagccatctgtaagccagggagggcctctcaagaagccaattgtgcctacacctcagtctcagactccagcctccagagctgtgaggagatgactgtagttgaacgccatnccagtctgtgggactttggtatgccaggcctaggaaacaaatacaggtctcttcctttaaaaamatgttaagaattatatttttacagctacattggtatagagatgaatgtaattcaggctggattcattataattatagtcatttcttctcctgattttaagagaaattaaaatggaaacattttccttggcccttaagtgtcttacgggcactgggctctgtgcccctcgtgcctggtgggtgagttggccccagtgactgggactgtggaaggcccgagggcgggttgggat

SEQ ID NO: 32228 - DNA, 761 bp, Homo sapiens
  misc_feature (1)...(761): n = A,T,C or G
ggttaaaaaaatgcagtactaagacgctgaaaagctcggcatgttggagtggagggcagtagtggggcctgtgagtgggctgttggcagggctgcattttgactttcatgggcctcaggcatttcgcttcatgggccctaacatgggctgaattgtgtctcctcaaaattcctgcatcgaagttctggtcccaagtatcgcagcatgggactgtagataaagatagggtctctacagaagtaaaatgagattattagggtggccctagttcaatatgactggtgtccttataagaagaggagatgaggacattgacattcacagagaaagacagtgtgaggacacaggaagggacagccatctgtaagccagggagggcctctcaagaagccaattgtgcctacacctcagtctcagactccagcctccagagctgtgaggagatgactgtagttgaacgccatnccagtctgtgggactttggtatgccaggcctaggaaacaaatacaggtctcttcctttaaaaacatgttaagaattatatttttacagctacattggtatagagatgaatgtaattcaggctggattcattataattatagtcatttcttctcctgattttaagagaaattaaaatggaaacattttccttggcccttaagtgtcttacgggcactgggctctgtgcccctcgtgcctggtgggtgagttggccccagtgactgggactgtggaaggcccgagggcrggttgggat

SEQ ID NO: 32229 - DNA, 960 bp, Homo sapiens
ctgggtgaggcccaggcggctgagcgtcctctagcagagggaattaacacacttaattaaaatgtccaatgaagagctttgcatatttcttaattaccatctgagtcttttgggggatggtttgaaatggggtttttcacgtgtttcctcatttagcctacggtgagccagccagcccctcagggctctagtgggagctgccaaagatgcatgcccagtttggggctgccttttggagtccagggtggcagggtagggtgtggagcagatagcccagctaccaagcttacccacctttgaggaagaatagggctggactttgtgtttggtgaaaacagagccaaaggaaacaaggttcagatggatatagctggtgtctctaactgtttcacttgtcaccacagggcctgggggccgtacctcacagtcaggccaggaatggtagactatgagcagaggttacagggatggtgcaggcctcaccccaagggccctgtgcagcagggatgcgggtagcctggcctccttcccagctgcatggcaagggccgagtccctctgcaggtccttcctagcatttataccagcaattcccacttctgttctagaaactgagctgatgggatggctgagtcagcgggtctctgctaggactgggttactggtctgcacaatgaggaagcagacttgccttttcagccctgagcaccaccttctgaaagctgcagacattatctgaaatgggcctggctgctgggggctgtgggccggggatgcagagattcttttcctggctcagggactgatttcctgaaaacacaggcatctgagaggtgggcagcccaccaagatggcttagaaatggcagtgagttatgccacatctgtcctgyctgccctctcctcccggaactcctgggccctaggccctgagcccagctctgtggaccccaggaggatca

SEQ ID NO: 32230 - DNA, 953 bp, Homo sapiens
caaagtagtaattgtaatttacccgattttgttgattttcatttaccttatctttctgagtccctgtttctgctgttataaaaattatggttattcaaaatatttcagtattcttttacattgtttcggtagatgcacagtgtttaacagtatactcattcaacatttttattataaaacgtatccttttgcatagaggaagaaaatatcgtaggaaatagaaacttcaagaagaaagttgacagtaaaggtgaaataatgtttaatcatgtgatttatggaatatgagttagatttttataaattgaaatagttttggccaatatatgggtcaagaatagatttatatgacaggtgatattttacatttataggaagtactttgattacattttctcttttgaaagtatgactcatatctgaactacaaagtcagcctaattaaatgatatttggcttgatttttgttaaaaaaaaaaaaacagtaagacccctaacttttcagaaacccaccttagggtttaaactgatattttgaacatgtttttaaaattcggttctctctacagcagtgcattctcaacaacaaattatgtttccattgtaggaacattttaaaatagcagttattgtgatctcttgatttctttcatcccacagagatctcatcaagacgtaactcgagattaagtctttaaagttttaatgaatttgtttttcttgaacagaagtagaaaaacaatttataggaagtgaggcagtctctgcatttgaggaagcaataggaatattttggaagatctttagaaatgtaagctttgtctcataaaattgtattttaaaaagtcctgggcttactcatatggaaacwcattgcttttattcttggtgagagaataaatttgctctggaaattttgtagatttgctttggaaatatgttaatagtgatca

SEQ ID NO: 32231 - DNA, 1100 bp, Homo sapiens
cccccatactcaaacacctcccaccagacctcacctctaacattggaggtcacatttcaacacgagatttggaggggacaaaacatccaaaccatatgaaatatgttgagattcagacctaattcccattaccacaaacactgtaagatctgaatcatgacaacagctgagtttttcctgcaggtctgaatgtttctctgctctagggcatagaactcttttgagggagaaatctggtatttgctaaagcctattctcttagactgtgagaagtcacttcacttctctggacttcaccaagatgctctgaagacatataaaataagttcaaagcaaccatctaggtggtgaaagagcacagtactaggggtcatacagacctgggtttgtgacccactctgccatttgtcagctatgtgactttagccaagtcatttatctcagatcctagcatagatgaaacattccatggatatttgttaaatggataaatgaatgaatgagtaggtgaatggattatctctcacttatcaataaaatcatacctgttcctggaatgttctatcaaataacagaattatttgcacagtgctttacagttttgaaaatatctgggatgcagtagagctgagtggttcagggcttccatttacatattttcaaatagacaaatctggatttgaatcccagctctgccaatactatgatcttggacaagttacataatccttctaaaccttagttactccatttttaaaatatgagaataatagactgtgctagccaggctcaaagatagcctccattagttcctgctcctgacagttcagttcttatgtagtcttctttgaaaacgaatagggctggactacgcagccgataggatgttgctaccatgatggagtgtgacttctgagatttccataagggacactgcagcctttgcyttactctctcttggatcacttagtctgggggaagccagccactatgtcatgagcatattcaagaaggcctatggagaggtccacatggcaaggaaccgaggcctcctgccaacagccagcaccaacttggcagccatgacacatcttggaagt

SEQ ID NO: 32232 - DNA, 1100 bp, Homo sapiens
cccccatactcaaacacctcccaccagacctcacctctaacattggaggtcacatttcaacacgagatttggaggggacaaaacatccaaaccatatgaaatatgttgagattcagacctaattcccattaccacaaacactgtaagatctgaatcatgacaacagctgagtttttcctgcaggtctgaatgtttctctgctctagggcatagaactcttttgagggagaaatctggtatttgctaaagcctattctcttagactgtgagaagtcacttcacttctctggacttcaccaagatgctctgaagacatataaaataagttcaaagcaaccatctaggtggtgaaagagcacagtactaggggtcatacagacctgggtttgtgacccactctgccatttgtcagctatgtgactttagccaagtcatttatctcagatcctagcatagatgaaacattccatggatatttgttaaatggataaatgaatgaatgagtaggtgaatggattatctctcacttatcaataaaatcatacctgttcctggaatgttctatcaaataacagaattatttgcacagtgctttacagttttgaaaatatctgggatgcagtagagctgagtggttcagggcttccatttacatattttcaaatagacaaatctggatttgaatcccagctctgccaatactatgatcttggacaagttacataatccttctaaaccttagttactccatttttaaaatatgagaataatagactgtgctagccaggctcaaagatagcctccattagttcctgctcctgacagttcagttcttatgtagtcttctttgaaaacgaatagggctggactacgcagccgataggatgttgctaccatgatggagtgtgacttctgagatttccataagggacactgcagcctttgctttactctctcttggatcacttagtctgggggaagccagccactatgtcatgagcatattcaagaaggcctatggagaggtccacatggcaaggaaccgaggcctcctgccaacagccagcrccaacttggcagccatgacacatcttggaagt

SEQ ID NO: 32233 - DNA, 781 bp, Homo sapiens
tgtaaggaagtttgctcattgaatgtgtatgcctccataaaaagatcattttctcttggctgatccatgggttatgataaaataaaaaggagtggtaaatggacctattttaaaaattcaggattctgtcctgaccattcctgagtatgatggttcattctttcttctaatggcaaatccaggtttgcctgatggatgcagttttactgtggcagcccatccaagatgtgtcctaggagagataagcttaattctgacttaggcttctggagtttttagttgggttgacatagtcctttgccataaggctaataatcacttagttgagtacactgctcaccaaagttacccacatggagcaaagtcaggaatataatatatttctgtaattttataaaattgttttcctcttgtatgtgatcaattcaaatgtaaattttgagtgtaaggaagggctgawtgaaaaatatagtatagtcataactattataaagagctgtgcctagattttggtaatggaggagaaataacaacttaggaacctgaggagggagcatctcagatcccggaagctgttggggttgggggaagagacatttataatgtttgcctttcaaaacttctctatgaaccttccttatgaaataaaacactgtgtagctctccaaaactattgaaagcatcttaaatgtagctaggtttctggtcaagaaagggttaacttagaaggcctggatggctcaaaaccttacacattccaaagaaaggcctctgtccaaga

SEQ ID NO: 32234 - DNA, 781 bp, Homo sapiens
tgtaaggaagtttgctcattgaatgtgtatgcctccataaaaagatcattttctcttggctgatccatgggttatgataaaataaaaaggagtggtaaatggacctattttaaaaattcaggattctgtcctgaccattcctgagtatgatggttcattctttcttctaatggcaaatccaggtttgcctgatggatgcagttttactgtggcagcccatccaagatgtgtcctaggagagataagcttaattctgacttaggcttctggagtttttagttgggttgacatagtcctttgccataaggctaataatcacttagttgagtacactgctcaccaaagttacccacatggagcaaagtcaggaatataatatatttctgtaattttataaaattgttttcctcttgtatgtgatcaattcaaatgtaaattttgagtgtaaggaagggctgaatgaaaaatatagtatagtcataactattataaagagctgtgcctagattttggtaatrgaggagaaataacaacttaggaacctgaggagggagcatctcagatcccggaagctgttggggttgggggaagagacatttataatgtttgcctttcaaaacttctctatgaaccttccttatgaaataaaacactgtgtagctctccaaaactattgaaagcatcttaaatgtagctaggtttctggtcaagaaagggttaacttagaaggcctggatggctcaaaaccttacacattccaaagaaaggcctctgtccaaga

SEQ ID NO: 32235 - DNA, 781 bp, Homo sapiens
tgtaaggaagtttgctcattgaatgtgtatgcctccataaaaagatcattttctcttggctgatccatgggttatgataaaataaaaaggagtggtaaatggacctattttaaaaattcaggattctgtcctgaccattcctgagtatgatggttcattctttcttctaatggcaaatccaggtttgcctgatggatgcagttttactgtggcagcccatccaagatgtgtcctaggagagataagcttaattctgacttaggcttctggagtttttagttgggttgacatagtcctttgccataaggctaataatcacttagttgagtacactgctcaccaaagttacccacatggagcaaagtcaggaatataatatatttctgtaattttataaaattgttttcctcttgtatgtgatcaattcaaatgtaaattttgagtgtaaggaagggctgaatgaaaaatatagtatagtcataactattataaagagctgtgcctagattttggtaatggaggagaaataacaacttaggaacctgaggagggagcatctcagatcccggaagctgttggggttgggggaagagacatttataatgtttgcctttcaaaacttctctatgaaccttccttatgaaataaaacactgtgtagctctccaaaactattgaaagcatcttaaatgtagctaggtttctggtcaagaaagggttaacttagaaggcctggatggctcaaawccttacacattccaaagaaaggcctctgtccaaga

SEQ ID NO: 32236 - DNA, 774 bp, Homo sapiens
ggatcctgctgtcacccacctccttagcacctgcctcctactccacgtgcccacgcccatcctgctgccctgcttcctcttgtcctctccttggcaggcatgtgaaagaccgttttcacaaaggtgttaagaacttcccgggttcccccactgagggcacatgcatttgaggaagtgctggggaaagctcattggagtgggaagccagggctttgggtctggctctaccagctgtgtgaccccaacaaatccctctgagcctcactttccttatctgtattatgaggctgcttataggggcctgtgaattttattaggcgggtgcaaaagtaattgtggtttttgccatttaaagtaatgtaataccatgtcagggactcggggactctgtcactgaccagaaaaaggagaggaattctgaaatagcttcagcatgaggagcagggtaagagagcctggtgacagaccctggccagcaccccttccatcccagccagcaagggccgtggccacacttaccatgtgcagcatgtctgaggccggcggggatacctgggcccggtagaggttgtgcagctccaccatcaaacgtttctcctcatctgtgagggctccaacggggcctgtggtggccaccagcagtagcagtagcggcagcagaagcatcaggaaactgcaggagccgtgcatggtggccagccgtytctccttctcccgtccaggggtctggcagctggatttaaagtccttcccacacaagcaccaccctggctg

SEQ ID NO: 32237 - DNA, 656 bp, Homo sapiens
cactatcctgtatctccagagttccctctctgctcttttgcccaaacctcggacttcagaaagtagctgtagtgcacttgggaaaacccctgagcttcagcagcgcaggaggatgatcagcttcccacaatgactccaagacgttgttcttctgctctgtactcaatcaagccccatggatagttgtttgcaggtgcaatcagatgcattctgtgcctgtgaaacttgagattgttatctgtcatgccgtgtcctatacaaccagtaaaactgattaaaattcacacattttccatgttccccatctatagtgaatttttcctcttcccaccactcttagaaggatgaaaagaactgtgagtcgctccccctcactaaccgatcatagcccttcgggtgtgtaagcattaaaggaagccgtaccaacactgtttctttttgcagtgatactggttacaatttagagccaatttcttcaaatctgcacacaatatacaagtatttcccaggacaagatactcagaaaatgtaaataagatgaatggtgcctttattttgatgagataaatccattttcctctgttacacatctgtctttctaacactgctaaaatatccactaccttttcttttccaggaactaatrgtatgttttc

SEQ ID NO: 32238 - DNA, 1224 bp, Homo sapiens
tttctttctttgtttctttgtttctttgtttgtttctttctttctctctctttctttctttctctttccctcccttctttcyttccttccttccttctctctccctgtttccctctctccctctctctctttctctctctctctctcagttgactctttctgattcactctatctaatcccattcatttatatttgtatcattttgcttatttttttgtttccctctatctcagggaatactttcgtaaaaacagaaaccatagtaggtgttttcacagggaatttaatacagaaaattaccttgaaaagtgttgggaaggcaaaaaggcaaccctgaagcaacaaaggcattgtgactgtaggcatcagctcttaactcacatagctgaggggaaaaatggaaaatatagggattaccagaacctgagaaatgatgagccttgcaaaggtaggctcaaacttctgagaagacactgactggatagtggtagaacttttggttcatggaactgagcctcagactgctaagcatgggatgctgtctgagcaatgctaaaggaacgggagagtaaagcatacactgcaacatgtagcccttttttgaatgactctaatattaacattaatgggaaaaaaaagtagcaaagcaaaacaaacaacaaaaaatgagaaagcccagtcttcattattcctcattcataatcaatctctggtaaccccttctgtcaagactttctgtttaaaatacagtagataaaagataaatattgtatgtggatcctcagtcccagcaccacagagcagagaatagaatggtgaattgagacgaggaagacaataggttgattatcagcgtacacctttcctttggttagcctgtatctattcaaacacttgccatagtgaattacaatataataacaattgtaatgttttccttttgcttacaaaaattcaactattttcattactctctcttcaaaacagaacaccaggtactctattttttctaactctaagcaaatatgaggatatctatttctgaattattataattagtccactagttgtgttatgatcaccatatgaatctgaaggttatgtgtaaagttaaccactgatgaacaatttctcttttgtacaataatgaaaacaagaggcaggaaacagaaattgaataatatatccacttgtgtgcatgtgtttgtgtataaaaaataaag

SEQ ID NO: 32239 - DNA, 1224 bp, Homo sapiens
tttctttctttgtttctttgtttctttgtttgtttctttctttctctctctttctttctttctctttccctcccttctttccttccttccttccttctctctccctgtttccctctctccctctctctctttctctctctctctctcagttgactctttctgattcactctatctaatcccattcatttayatttgtatcattttgcttatttttttgtttccctctatctcagggaatactttcgtaaaaacagaaaccatagtaggtgttttcacagggaatttaatacagaaaattaccttgaaaagtgttgggaaggcaaaaaggcaaccctgaagcaacaaaggcattgtgactgtaggcatcagctcttaactcacatagctgaggggaaaaatggaaaatatagggattaccagaacctgagaaatgatgagccttgcaaaggtaggctcaaacttctgagaagacactgactggatagtggtagaacttttggttcatggaactgagcctcagactgctaagcatgggatgctgtctgagcaatgctaaaggaacgggagagtaaagcatacactgcaacatgtagcccttttttgaatgactctaatattaacattaatgggaaaaaaaagtagcaaagcaaaacaaacaacaaaaaatgagaaagcccagtcttcattattcctcattcataatcaatctctggtaaccccttctgtcaagactttctgtttaaaatacagtagataaaagataaatattgtatgtggatcctcagtcccagcaccacagagcagagaatagaatggtgaattgagacgaggaagacaataggttgattatcagcgtacacctttcctttggttagcctgtatctattcaaacacttgccatagtgaattacaatataataacaattgtaatgttttccttttgcttacaaaaattcaactattttcattactctctcttcaaaacagaacaccaggtactctattttttctaactctaagcaaatatgaggatatctatttctgaattattataattagtccactagttgtgttatgatcaccatatgaatctgaaggttatgtgtaaagttaaccactgatgaacaatttctcttttgtacaataatgaaaacaagaggcaggaaacagaaattgaataatatatccacttgtgtgcatgtgtttgtgtataaaaaataaag

SEQ ID NO: 32240 - DNA, 1224 bp, Homo sapiens
tttctttctttgtttctttgtttctttgtttgtttctttctttctctctctttctttctttctctttccctcccttctttccttccttccttccttctctctccctgtttccctctctccctctctctctttctctctctctctctcagttgactctttctgattcactctatctaatcccattcatttatatttgtatcattttgcttatttttttgtttccctctatctcagggaatactttcgtaaaaacagaaaccatagtaggtgttttcacagggaatttaatacagaaaattaccttgaaaagtgttgggaaggcaaaaaggcaaccctgaagcaacaaaggcattgtgactgtaggcatcagctcttaactcacatagctgaggggaaaaatggaaaatatagggattaccagaacctgagaaatgatgagccttgcaaaggtaggctcaaacttctgagaagacactgactggatagtggtagaacttttggttcatggaactgagcctcagactgctaagcatgggatgctgtctgagcaatgctaaaggaacgggagagtaaagcatacactgcaacatgtagcccttttttgaatgactctaatattaacattaatgggaaaaaaaagtagcaaagcaaaacaaacaacaaaaaatgagaaagcccagtcttcattattcctcattcataatcaatctctggtaaccccttctgtcaagactttctgtttaaaatacagtagataaaagataaatattgtatgtggatcctcagtcccagcaccacagagcagagaatagaatggtgaattgagacgaggaagacaataggttgattatcagcgtacacctttcctttggttagcctgtatctattcaaacacttgccatagtgaattacaatataataacaattgtaatgttttccttttgcttacaaaaattcaactattttcattactctctcttcaaaacagaacaccaggtactctattttttctaactctaagcaaatatgaggatatctatttctgaattattrtaattagtccactagttgtgttatgatcaccatatgaatctgaaggttatgtgtaaagttaaccactgatgaacaatttctcttttgtacaataatgaaaacaagaggcaggaaacagaaattgaataatatatccacttgtgtgcatgtgtttgtgtataaaaaataaag

SEQ ID NO: 32241 - DNA, 543 bp, Homo sapiens
ttaaactatattaaacttttatcacattcctacatcactttttgacttgcctgtctaatgctgtttaaaatatgcccaagagtgaacctatttcttagtctaaaatgatacatataatcattatttactcatttcaattccatttttcctggtcctgtctttaaaatcccaattctgaccatcatcacttactagtgcctataatgccaatacaagtcatcattcttctttagttaagatttttgaaattcattttaagtttttatctttactcaattttcccccttgtaaactatkttcataacattatatttcttatgttctgtattatcttttaatttcagctaaaacagaaacaatcttactttggcttaaagaaacttaattatcatgttctggtttcctctctgactttttcgtctgttatttttttttccctttctgctgcacccatactgatctgtgttctgttcattgaatacaacaagcacttctgccttagggcgtttgaatttgccattccctctgactggaatgctttcc

SEQ ID NO: 32242 - DNA, 543 bp, Homo sapiens
ttaaactatattaaacttttatcacattcctacatcactttttgacttgcctgtctaatgctgtttaaaatatgcccaagagtgaacctatttcttagtctaaaatgatacatataatcattatttactcatttcaattccatttttcctggtcctgtctttaaaatcccaattctgaccatcatcacttactagtgcctataatgccaatacaagtcatcattcttctttagttaagatttttgaaattcattttaagtttttatctttactcaattttcccccttgtaaactatgttcataacattatatttcttatgttctgtrttatcttttaatttcagctaaaacagaaacaatcttactttggcttaaagaaacttaattatcatgttctggtttcctctctgactttttcgtctgttatttttttttccctttctgctgcacccatactgatctgtgttctgttcattgaatacaacaagcacttctgccttagggcgtttgaatttgccattccctctgactggaatgctttcc

SEQ ID NO: 32243 - DNA, 1253 bp, Homo sapiens
tgcattaaatgattcacgtcttcaggtcttattttaggtgaaaagtgttggcaactgacagtacaattaatccaggaaaactaggattaaaaaacaacaacaaacagcagcaataaacaaaacagcagcaataaacattactgtaagtataatccaaattagtttattgcaagacttattttaattcaggtaagcaacagctctctgctatcttgtgagacttattatattccctgaaaaattatagatattaatattataaaggctacctctatattaatgtawttttcaacatcttttgtcgtgttgtttaaataatgaacactatgtaaatatttagtcaataaatatttaaagactattaacagttcttttagttacttcgtagcccaccaataatttccttctttgatgagtagtagaaatcacaaaatttccaagttaacttttctaattggtggagagattcacatgacaggtgaaagatttttacagagtatttacagacttttagtgagttattaaaatttttctcttgattagatctaaacccgcttttctttccactttcactgtagaactggaacacttcaaagtacatttctttgtgaccagttgatttttctattaggtttggttttgacaatagtgggtattacagggaggctgccaggtgaaagatggatgaagggaattgctccttttgtttttaatgctgttcttagtcactttgcaagcagccattggttctggtttccagcttgttctcaaatccccagaatgagcttcatggcaccctctctgaataccaacacaagcgggcaaaatcttcctgaagagcccaggctgcagatctgcggctcctcttccaagcttccagcttgtgccaagtgcagccagtcctctttatttccccaacagcatgggtacagctgctccccgtagttagtatttctaccattttgatttttacttttacttttttgtagtctttcaatgtctacttaatcaatttcttctaatatatctccctcttaaaataattaatatggtgttatctctccttgcctggacttagattaatcaagatctactccagtgtagctctagagcccttctgagaatcagtatgtccagtgttaggaacagatgggagcatgagaggtgacttctgtaaaatttttgtaattacagatgcctgaaaaacaaacacatatagtaaatatatagatcttatataagttgaattatgc

SEQ ID NO: 32244 - DNA, 1253 bp, Homo sapiens
tgcattaaatgattcacgtcttcaggtcttattttaggtgaaaagtgttggcaactgacagtacaattaatccaggaaaactaggattaaaaaacaacaacaaacagcagcaataaacaaaacagcagcaataaacattactgtaagtataatccaaattagtttattgcaagacttattttaattcaggtaagcaacagctctctgctatcttgtgagacttattatattccctgaaaaattatagatattaatattataaaggctacctctatattaatgtaattttcaacatcttttgtcgtgttgtttaaataatgaacactatgtaaatatttagtcaataaatatttaaagactattaacagttcttttagttacttcgtagcccaccaataatttccttctttgatgagtagtagaaatcacaaaatttccaagttaacttttctaattggtggagagattcacatgacaggtgaaagatttttacagagtatttacagacttttagtgagttattaaaatttttctcttgattagatctaaacccgcttttctttccactttcactgtagaactggaacacttcaaagtacatttctttgtgaccagttgatttttctattaggtttggttttgacaatagtgggtattacagggaggctgccaggtgaaagatggatgaagggaattgctccttttgtttttaatgctgttcttagtcactttgcaagcagccattggttctggtttccagcttgttctcaaatccccagaatgagcttcatggcaccctctctgaataccaacacaagcgggcaaaatcttcctgaagagcccaggctgcagatctgcggctcctcttccaagcttccagcttgtgccaagtgcagccagtcctctttatttccccaacagcatgggtacagctgctccccgtagttagtatttctaccattttgatttttacttttacttttttgtagtctttcaatgtctacttaatcaatttcttctaatatatctccctcttaaaataattaatatggtgttatctctccttgcctggacttagattaatcaagatctactccagtgtagctctagagcccttctgagaatcagtatgtccagtgttagraacagatgggagcatgagaggtgacttctgtaaaatttttgtaattacagatgcctgaaaaacaaacacatatagtaaatatatagatcttatataagttgaattatgc

SEQ ID NO: 32245 - DNA, 551 bp, Homo sapiens
tcatagagacagaaagtagtatggtggttgtcagaggctagggaagaggggaaaatggagagttttttttgcaggtgagaggttcagttttcaggatgaaaagagttctggagatggattgtggtgacagttgcaccacagtgtgaatgtactgtgtcmcctgtatgttactacaattttacaaatgtatcaaagacactgttttttgtttgttcttttgttttttcggagtcttgctcttgtcacccaggttggagtgcagtgctgcaatctcggctcactacaacctccgcctccttcaagagattctcctgcttcagcctccagagtagctgggaatacaggcaccagccaccatgcctgggtaatttttcgtatttaagtagagatggggttttgccatgttggccaggctggtctcgaacacctgacctcaggtgatctgcccgcctcggcctcccaaagtgctggggttataggcgtgcagccgcgccgggccaaagatggcatttttaaaggaaggaggcttaatgcaacttatgtgaacatgt

SEQ ID NO: 32246 - DNA, 529 bp, Homo sapiens
caaacaaccaatcagtcaatcaatattttttttttaaataatccctgactgaagaaaagccctgtctgtatgtgagtactcccacttgtctgattccaagctaccaatgtaccctcacagagactggagttgggaagcatgctttctgggagccctcagagctggctccagcaacagaggctggctgcacctcttctcaagcatgttccagtatcatttcacgtaactcctctgagccttagtcttactacttttaaaaatgaggaaaatgccagatcattaagtcacttgtttaaggtgacacagaaaatakgtagtgtctggtattagccgctgctcttagcacagtatatcatttacaaaacctcccttggtaaactagtaattgaaatggatgtcaagctgcaaaatgaataaatagtacattttttttccaaataacttattttcgtttcctctggatgcaacacaggttgcttaaaacaggtggcttacacactgcatggatgacaatatgaaacacacactt

SEQ ID NO: 32247 - DNA, 730 bp, Homo sapiens
cttttccatgaatgcttttatgatttgagtaatgctagatcgatgtgattccagacatccagatatttggaacatgaatattggcctaaatgtatacttcttaaagtatttaaatcagattgcatgtaaatgaaataaaactctttgtagttggtctgtgaattttttatattagtcactcttgatcctaagataccaaaattctactctgaatctccaaaggacttattttactattattattattattatttagtattatttactgaaccattatatactaaaaagttattttaaaatgaaattgggagaggaagaataatagttgcatacatttttattatgaaagttttacttgttatttactttacttattatcaacttttattttattttattttatttatttattttgagatggagtctcgttttgttgcccaggctggagtgctgtggcaygatcttggctcactgcaacctccacctcccgggttcaaatgattctcctgcctcagcctcctgagtagttggtattacaggcacgtgccaccgtgcccagctaatttttgtatttttagtagggatggggttcttggtcatgaaatccttgctgaagccaatgtctagacaggtttttccaatgttaccttctagtattttcatagtttcaggtcttagatttaagtccttgttccatcttgagttgatttttgaataaggtgagagataa

SEQ ID NO: 32248 - DNA, 503 bp, Homo sapiens
attttataactcctctcacatatagtgagtatatcgaatttatctataatatgtaatgatacatcrattctaataggagtgtattacaatatccagaattctcaaagcacagagtaataaaaaatgccttccactacacctataatttgaaatgtccaaatataagcaggattatatacataatggaaataaaccttttaaaatactcatatctggtgctttgacaagaaaacttttatattgtcagtggttttggagtgtataattaagtttaaatattgaaactgaaacatgttgatgtaatacctgaatcaacatgagtacaaaataattcagataaaatactatcatagagcattcatataatttctttgctcatatccaaagctagaacaaaactcaaacaacagtagataatcatttgtgaaatagttttctattttatcatatttcttgaacaacccattgtatatgtatcaatattaacctcttaacaacagcaa

SEQ ID NO: 32249 - DNA, 830 bp, Homo sapiens
  misc_feature (1)...(830): n = A,T,C or G
annnnnnnnnnnnnnnnnnnnnnnnnnnnnnnnnnnnnnnnnnnnnnnnnnnnnnnnnnnnnnnnnnnnnnnnnnnnnnnnnnnnnnnnnnnnnnnnnnnntgggagtccttctggccacttctgcagcccccaggctaagtctgggaatttcagactattacctttactgattactggtccgaggataaatatatccacaattgtgtctctcrgagtttaaccccaagacaaaatcattccctgctgcttgcttcctaatccagatcagcttcttataacatgctgtcacatatgtgatctggtcttctgacattcgcatctggatgctgggtatgtccatcttggctccagtcacctaagatctaacacctttggtactggcagccatagtctcaaatgtcatatgcctgcagggtcaactttcatttacctgtttgctggtttatttttgtttgcatggtcattgtagaactctgttaatttacacgagtccagttgtttcttacaagtatgtgataactgggtttggttatgtccacaagtatgcttgtatcatacatatttttttctttttctcagtgtcctttcctggttttggtatcaagattataaaataaattagtagtgatttttttaaataataaaaaagattggaagagtgctctttaaatatttagcaaaaattttctgctagttactatgtacaactgattacatgtctttatgttcatatgtttttcagattttctgtttcttcttgaatcgcatttatgttttctccacgaatttatctctttcccataagacttcaagtatattggtattaag

SEQ ID NO: 32250 - DNA, 830 bp, Homo sapiens
  misc_feature (1)...(830): n = A,T,C or G
annnnnnnnnnnnnnnnnnnnnnnnnnnnnnnnnnnnnnnnnnnnnnnnnnnnnnnnnnnnnnnnnnnnnnnnnnnnnnnnnnnnnnnnnnnnnnnnnnnntgggagtccttctggccacttctgcagcccccaggctaagtctgggaatttcagactattacctttactgattactggtccgaggataaatatatccacaattgtgtctctcggagtttaaccccaagacaaaatcattccctgctgcttgcttcctaatccagatcagcttcttataacatgctgtcacatatgtgatctggtcttctgacattcgcatctggatgctgggtatgtccatcttggctccagtcacctaagatctaacacctttggtactggcagccatagtctcaaatgtcatatgcctgcagggtcaactttcatttacctgtttgctggtttatttttgtttgcatggtcattgtagaactctgttaatttacacgagtccagttgtttcttacaagtatgtgatawctgggtttggttatgtccacaagtatgcttgtatcatacatatttttttctttttctcagtgtcctttcctggttttggtatcaagattataaaataaattagtagtgatttttttaaataataaaaaagattggaagagtgctctttaaatatttagcaaaaattttctgctagttactatgtacaactgattacatgtctttatgttcatatgtttttcagattttctgtttcttcttgaatcgcatttatgttttctccacgaatttatctctttcccataagacttcaagtatattggtattaag

SEQ ID NO: 32251 - DNA, 830 bp, Homo sapiens
  misc_feature (1)...(830): n = A,T,C or G
annnnnnnnnnnnnnnnnnnnnnnnnnnnnnnnnnnnnnnnnnnnnnnnnnnnnnnnnnnnnnnnnnnnnnnnnnnnnnnnnnnnnnnnnnnnnnnnnnnntgggagtccttctggccacttctgcagcccccaggctaagtctgggaatttcagactattacctttactgattactggtccgaggataaatatatccacaattgtgtctctcggagtttaaccccaagacaaaatcattccctgctgcttgcttcctaatccagatcagcttcttataacatgctgtcacatatgtgatctggtcttctgacattcgcatctggatgctgggtatgtccatcttggctccagtcacctaagatctaacacctttggtactggcagccatagtctcaaatgtcatatgcctgcagggtcaactttcatttacctgtttgctggtttatttttgtttgcatggtcattgtagaactctgttaatttacacgagtccagttgtttcttacaagtatgtgataactgggtttggttatgtccacaagtatgcttgtatcatacatatttttttctttttctcagtgtcctttcctggttttggtatcaagattataaaataaattagtagtgatttttttaaataataaaaawgattggaagagtgctctttaaatatttagcaaaaattttctgctagttactatgtacaactgattacatgtctttatgttcatatgtttttcagattttctgtttcttcttgaatcgcatttatgttttctccacgaatttatctctttcccataagacttcaagtatattggtattaag

SEQ ID NO: 32252 - DNA, 1229 bp, Homo sapiens
ataaagtttcagtacagatcctggatgcacagwtgacactagcaaagtcaccaattactactattattgtaaatttaattaagactcagtgacatctctcagtgagtttactgtcaagcaggaaaaaatcaagttttaaacagtgccatggtcacgcaatgccccgaacctcatgcaagaaggacttattgcccagcagcatccagtatgagcccagccagcctcctgctatcagctcctttagggcctgcttcagctgcagagtgctgcctcggccacaatcacacccttcctaggacagccagcatccagaaactgacagaggcagggtatcaagcctactacttaagaccaatgcaagacaactctgaacaagcaatccttgctcctgagccccaactcttcactggatgggcaccaaaatatgacatcttctgtccaaccctgctgccactccatttcttaagactgtctgttcaaatgtattatttgataatcaagtgctgctgtcacaatctggccacaatgtactcttcataaagtatcttaaagaacaaaatagagcatacattctcaagaatacacacacccacacacatatacatatggcgtttatgcctattgcaaagaaaaagaaaatgagaagtaaacagtcatgtgcttaccaccatcaagaagaagaatgttatccaagctcctgaaatttgctgtgtatctgtaactttcagatccccttgtttgctccctcaaattcttaggttttttgttaattagcaccccatgctaccatttaaattttcctctttttaatggataacactatatatataaaattgtataacttgcttttttctcactcaacattatggacctggatttatctatgttggcacatgtagtttagtaaattcttttttattttattattttattttactttattcttttattatactttaagctctgaggtacatgtgcagaatgtgcagaatgtgcaggtttgttacataagtatacatgtgccatgatggtttgctgcacccattaacccatcatctacattaggtgtttctcctaatgctatccctcccctaaccccctacccgccaacaggactcagtgtgtgatgttcccctccctgtgtccttgtgttctcattgttcaacacccacttatgagtgagaacatgtagtgtttggttttctgttcttgtgttagttttatttatg

SEQ ID NO: 32253 - DNA, 1229 bp, Homo sapiens
ataaagtttcagtacagatcctggatgcacagatgacactagcaaagtcaccaattactactattattgtaaatttaattaagactcagtgacatctctcagtgagtttactgtcaagcaggaaaaaatcaagttttaaacagtgccatggtcacgcaatgccccgaacctcatgcaagaaggacttattgcccagcagcatccagtatgagcccagccagcctcctgctatcagctcctttagggcctgcttcagctgcagagtgctgcctcggccacaatcacacccttcctaggacagccagcatccagaaactgacagaggcagggtatcaagcctactacttaagaccaatgcaagacaactctgaacaagcaatccttgctcctgagccccaactcttcactggatgggcaccaaaatatgacatcttctgtccaaccctgctgccactccatttcttaagactgtctgttcaaatgtattatttgataatcaagtgctgctgtcacaatctggccacaatgtactcttcataaagtatcttaaagaacaaaatagagcatacattctcaagaatacacacacccacacacatatacatatggcgtttatgcctattgcaaagaaaaagaaaatgagaagtaaacagtcatgtgcttaccaccatcaagaagaagaatgttatccaagctcctgaaatttgctgtgtatctgtaactttcagatccccttgtttgctccctcaaattcttaggttttttgttaattagcaccccatgctaccatttaaattttcctctttttaatggataacactatatatataaaattgtataacttgcttttttctcactcaacattatggacctggatttatctatgttggcacatgtagtttagtaaattcttttttattttattattttattttactttattcttttattatactttaagctctgwggtacatgtgcagaatgtgcagaatgtgcaggtttgttacataagtatacatgtgccatgatggtttgctgcacccattaacccatcatctacattaggtgtttctcctaatgctatccctcccctaaccccctacccgccaacaggactcagtgtgtgatgttcccctccctgtgtccttgtgttctcattgttcaacacccacttatgagtgagaacatgtagtgtttggttttctgttcttgtgttagttttatttatg

SEQ ID NO: 32254 - DNA, 1229 bp, Homo sapiens
ataaagtttcagtacagatcctggatgcacagatgacactagcaaagtcaccaattactactattattgtaaatttaattaagactcagtgacatctctcagtgagtttactgtcaagcaggaaaaaatcaagttttaaacagtgccatggtcacgcaatgccccgaacctcatgcaagaaggacttattgcccagcagcatccagtatgagcccagccagcctcctgctatcagctcctttagggcctgcttcagctgcagagtgctgcctcggccacaatcacacccttcctaggacagccagcatccagaaactgacagaggcagggtatcaagcctactacttaagaccaatgcaagacaactctgaacaagcaatccttgctcctgagccccaactcttcactggatgggcaccaaaatatgacatcttctgtccaaccctgctgccactccatttcttaagactgtctgttcaaatgtattatttgataatcaagtgctgctgtcacaatctggccacaatgtactcttcataaagtatcttaaagaacaaaatagagcatacattctcaagaatacacacacccacacacatatacatatggcgtttatgcctattgcaaagaaaaagaaaatgagaagtaaacagtcatgtgcttaccaccatcaagaagaagaatgttatccaagctcctgaaatttgctgtgtatctgtaactttcagatccccttgtttgctccctcaaattcttaggttttttgttaattagcaccccatgctaccatttaaattttcctctttttaatggataacactatatatataaaattgtataacttgcttttttctcactcaacattatggacctggatttatctatgttggcacatgtagtttagtaaattcttttttattttattattttattttactttattcttttattatactttaagctctgaggtacatgtgcagaatgtgcagaatgtgcaggtttgttacataagtatacatgtgccatgatggtttgctgcacccattaacccatcatctacattaggtgtttctcctaatgctatccctcccctaaccccctacccsccaacaggactcagtgtgtgatgttcccctccctgtgtccttgtgttctcattgttcaacacccacttatgagtgagaacatgtagtgtttggttttctgttcttgtgttagttttatttatg

SEQ ID NO: 32255 - DNA, 647 bp, Homo sapiens
tggtgtgctgcacccattaactcgtcatttagcattaggtatatctcctaatggtatccctctcccctccccccaccccacaacagtccccggtgtgtgatgttccccttcctgtgtccatgtgttctcattgttcaattcccacctatgagtgagaacatgsagtgtttggttttttgtccttgcgatagtttgctgagaatgatggtttccagcttcatccacgtccctacaaaagacatgaactcatcatttgttatggctgcacagtatcccatggtgtatatgtgccacattttcttaatccagtctatccttgttggacatttgggttggttccaagtctttgctattgtgaatagtgctgtaataaacatacgtgtgcatgtgtctttacagcagcatgatttaaaaattaataagtatctggtaaccgagatgaacatagacttgttgaactgattagtataaaccaccccatcataacatatgtaccttgtgggcaagttcacaaatgaaacttgcagacattaatctaagtgaaagaaacaagacacaaagaccccattttctacaattccatttatactgaatgttttggataggaaatccatagaaacagaatatatattagtcattactagaaa

SEQ ID NO: 32256 - DNA, 647 bp, Homo sapiens
tggtgtgctgcacccattaactcgtcatttagcattaggtatatctcctaatggtatccctctcccctccccccaccccacaacagtccccggtgtgtgatgttccccttcctgtgtccatgtgttctcattgttcaattcccacctatgagtgagaacatggagtgtttggttttttgtccttgygatagtttgctgagaatgatggtttccagcttcatccacgtccctacaaaagacatgaactcatcatttgttatggctgcacagtatcccatggtgtatatgtgccacattttcttaatccagtctatccttgttggacatttgggttggttccaagtctttgctattgtgaatagtgctgtaataaacatacgtgtgcatgtgtctttacagcagcatgatttaaaaattaataagtatctggtaaccgagatgaacatagacttgttgaactgattagtataaaccaccccatcataacatatgtaccttgtgggcaagttcacaaatgaaacttgcagacattaatctaagtgaaagaaacaagacacaaagaccccattttctacaattccatttatactgaatgttttggataggaaatccatagaaacagaatatatattagtcattactagaaa

SEQ ID NO: 32257 - DNA, 765 bp, Homo sapiens
ctggggtctgaaaaacagatggccctaatgaagtgatgcagaatctcatcactgagtgacacagagaccatttctacttaacagtaggaactttcctatgtttgatctctgtgctcaaggctcagcttaccaagaagtctgagttgcttctacaaaggtagagctaatatttcttaatcaccttgctttgacaggtattaactccttttacctgaggcctctgaagtaactgctatgattatccctgctatgattaaaacgaggagataaatgcaaagaagggacaagtaagttgcctaagaacacatgactagcaataaaagcaacatcacgggccgggcacggtggctcacgcctgtaatcccagcactttgggaggccgaggcaggcggatcaygaggtcaggagatcgaaaccatcctggctaacacggtgaaatcccgtctctactaaaaaatacaaaaaaattagccaggcgtggtggtgggtgcctgtagtcccagctactcgggaggctgaggcaggagaatggcgtgaacctgggaggcagagcttgcagtgagccaagatcacgccactgcactccagcctggcaacagagcgagactccgtcttaaaaaaaaaaaaaaaaaagcaacatcacgaaggcttgtttcatacaagcactggtaggaacactctgtatcaactcatttagccctctaatgacccaggaggaggtaagtgctagtattacccccactttacagatagggacacgaaagg

SEQ ID NO: 32258 - DNA, 765 bp, Homo sapiens
ctggggtctgaaaaacagatggccctaatgaagtgatgcagaatctcatcactgagtgacacagagaccatttctacttaacagtaggaactttcctatgtttgatctctgtgctcaaggctcagcttaccaagaagtctgagttgcttctacaaaggtagagctaatatttcttaatcaccttgctttgacaggtattaactccttttacctgaggcctctgaagtaactgctatgattatccctgctatgattaaaacgaggagataaatgcaaagaagggacaagtaagttgcctaagaacacatgactagcaataaaagcaacatcacgggccgggcacggtggctcacgcctgtaatcccagcactttgggaggccgaggcaggcggatcatgaggtcaggagatcgaaaccatcctggctaacacggtgaaatcccgtctctactaaaaaatacaaaaamattagccaggcgtggtggtgggtgcctgtagtcccagctactcgggaggctgaggcaggagaatggcgtgaacctgggaggcagagcttgcagtgagccaagatcacgccactgcactccagcctggcaacagagcgagactccgtcttaaaaaaaaaaaaaaaaaagcaacatcacgaaggcttgtttcatacaagcactggtaggaacactctgtatcaactcatttagccctctaatgacccaggaggaggtaagtgctagtattacccccactttacagatagggacacgaaagg

SEQ ID NO: 32259 - DNA, 833 bp, Homo sapiens
aactacatcagcatcagtgggctgccacctaggactccacaaaattttactgatgcctgactaggggagccaaatcacagtgctgcaggctgtgcacaaaccttcctgctgttttttaagctgcctgaattttaagggaacttgcttatattgggagaaaggaagaaagctccatttgtcctctaaatatttgctgaaaatgaatggacaaaagaaagattaataagagaaaagacaaacaaaattcatttgaagtgcagcagaatatcatagcagggtgattacccagatawctcaatgggatacagttgtttatatttcttttctaaggaagagggaattgagaagcgtaggcaacctggaaagaatagatgagaacagaagtgcatcctcaaaagaacaggtcatagcctgtctggataaagcatcaacttcagtctcttgtattttagattcctcttttgtgttaatattccctgatgtaaaaattctcaggaagaatttttttgacaattggtttccttctggagaatctgctattatgcagataagggacatttaggaaaagtctttttgtgcatttggtgctttctaaatgtctttggttttacataatcatcataccagtgcagcatagtttgagatgttattttctggattcctttacttgcaacccacctgccaagatcctgttccagagagatgcagctacagattgaatgagcagttgacccttgaacaacatggaggtttgggcactgaccatgggtgcagatgaaaacctgtgtaaaacttttgcatttctaactccaggcatcatcttgaaagtggag

SEQ ID NO: 32260 - DNA, 833 bp, Homo sapiens
aactacatcagcatcagtgggctgccacctaggactccacaaaattttactgatgcctgactaggggagccaaatcacagtgctgcaggctgtgcacaaaccttcctgctgttttttaagctgcctgaattttaagggaacttgcttatattgggagaaaggaagaaagctccatttgtcctctaaatatttgctgaaaatgaatggacaaaagaaagattaataagagaaaagacaaacaaaattcatttgaagtgcagcagaatatcatagcagggtgattacccagataactcaatgggatacagttgtttrtatttcttttctaaggaagagggaattgagaagcgtaggcaacctggaaagaatagatgagaacagaagtgcatcctcaaaagaacaggtcatagcctgtctggataaagcatcaacttcagtctcttgtattttagattcctcttttgtgttaatattccctgatgtaaaaattctcaggaagaatttttttgacaattggtttccttctggagaatctgctattatgcagataagggacatttaggaaaagtctttttgtgcatttggtgctttctaaatgtctttggttttacataatcatcataccagtgcagcatagtttgagatgttattttctggattcctttacttgcaacccacctgccaagatcctgttccagagagatgcagctacagattgaatgagcagttgacccttgaacaacatggaggtttgggcactgaccatgggtgcagatgaaaacctgtgtaaaacttttgcatttctaactccaggcatcatcttgaaagtggag

SEQ ID NO: 32261 - DNA, 833 bp, Homo sapiens
aactacatcagcatcagtgggctgccacctaggactccacaaaattttactgatgcctgactaggggagccaaatcacagtgctgcaggctgtgcacaaaccttcctgctgttttttaagctgcctgaattttaagggaacttgcttatattgggagaaaggaagaaagctccatttgtcctctaaatatttgctgaaaatgaatggacaaaagaaagattaataagagaaaagacaaacaaaattcatttgaagtgcagcagaatatcatagcagggtgattacccagataactcaatgggatacagttgtttatatttcttttctaaggaagagggaattgagaagygtaggcaacctggaaagaatagatgagaacagaagtgcatcctcaaaagaacaggtcatagcctgtctggataaagcatcaacttcagtctcttgtattttagattcctcttttgtgttaatattccctgatgtaaaaattctcaggaagaatttttttgacaattggtttccttctggagaatctgctattatgcagataagggacatttaggaaaagtctttttgtgcatttggtgctttctaaatgtctttggttttacataatcatcataccagtgcagcatagtttgagatgttattttctggattcctttacttgcaacccacctgccaagatcctgttccagagagatgcagctacagattgaatgagcagttgacccttgaacaacatggaggtttgggcactgaccatgggtgcagatgaaaacctgtgtaaaacttttgcatttctaactccaggcatcatcttgaaagtggag

SEQ ID NO: 32262 - DNA, 833 bp, Homo sapiens
aactacatcagcatcagtgggctgccacctaggactccacaaaattttactgatgcctgactaggggagccaaatcacagtgctgcaggctgtgcacaaaccttcctgctgttttttaagctgcctgaattttaagggaacttgcttatattgggagaaaggaagaaagctccatttgtcctctaaatatttgctgaaaatgaatggacaaaagaaagattaataagagaaaagacaaacaaaattcatttgaagtgcagcagaatatcatagcagggtgattacccagataactcaatgggatacagttgtttatatttcttttctaaggaagagggaattgagaagcgtaggcaacctggaragaatagatgagaacagaagtgcatcctcaaaagaacaggtcatagcctgtctggataaagcatcaacttcagtctcttgtattttagattcctcttttgtgttaatattccctgatgtaaaaattctcaggaagaatttttttgacaattggtttccttctggagaatctgctattatgcagataagggacatttaggaaaagtctttttgtgcatttggtgctttctaaatgtctttggttttacataatcatcataccagtgcagcatagtttgagatgttattttctggattcctttacttgcaacccacctgccaagatcctgttccagagagatgcagctacagattgaatgagcagttgacccttgaacaacatggaggtttgggcactgaccatgggtgcagatgaaaacctgtgtaaaacttttgcatttctaactccaggcatcatcttgaaagtggag

SEQ ID NO: 32263 - DNA, 383 bp, Homo sapiens
tgaaaagcaaggaaacattgccactcagagatcctcctctcttcaaccaagttatattaggctgagggacacctttggaacaaaaacaaatatgacaaaggcaattcctttaagaacagggccacagaaccacttgacaaataccattcactgttttgaccgtaagtcagcatatgggtttaatcatatataataggaaaaatggctatttctatttctatagctactctatggcagatggaggatcctcttaaagcaaagggctttggtctacrgggcatgtgactggtttacacatataagttatggaatggaaaccaaggagtaggattgctctgtattgggaagggagagaattttgaaggtgggtagggtagtgggag

SEQ ID NO: 32264 - DNA, 588 bp, Homo sapiens
gaaccttcatgtgtctcagaccctgagggattcatagatgttatattttattcagtggaacaacagaacctttgagcaaaactgtcgaagcaaaatctatagaaaatgatgaatccttcattaaagcttaaaacaaacatggaaataaaattacaaagctcctacaaagactgtagaaaagaacaccagggagaaaacggaggggatttttagtaaatgtcatttattctctcgtcaaaaaagaaaacaaagcgggtttctttggttggcttggttttccattgtaaagatatagaccacagaagactgtgtgacctaaactagccatgagaatagttatttgcccaaacatgtgaggcttgaaataaaattttatgtttcatttagcctttcaaatggacagagattttcttttaaaatgtaccttttatatagagaaaatgataamgagtaaaatgtaaatggtccacaattccattggctagataactctgttgatatttttattatattaattaattaatttatttatttttgagacagagtctcgccctgtcacccaggctagagtgcagtggcaccatctcg

SEQ ID NO: 32265 - DNA, 982 bp, Homo sapiens
tatttaagtatagtttcaagagtttaagggaagaacttctaccagaaactcagttgaatactttcaggggccagttaatattgttacaccatcagaaagggctcagaatgcaaggatccccagtaatggatttaaatttaatctaaagcacaaatgactaatatctgcagcagtaatctcccctctygtgctgtggaatagttgccctaccagggcatttccccatcagggaaagtatacgttctcttgagcctaatcaaacgtttctcacataaacttgcagtcatagccttcaatcccaatgactaggtttagcacctggaatgaagatgctgaagatgaaaacctagttatgaccaaggggctcaggtcattcattcatatgtcaggtctgacatacaccatggtttacaagcactctataattatttttgtcatccctcacagccaccttgtgagaaaagccagactgaaagggacagtgtggtctccagaatctagagaaaataataacacttttgttcacaataactctgagactcagggtactgattgccagagcagacaaatcactgttataaaaataaaatacatttatcttggaaaggtgactcactatgaatgctagggaattatctaattaaagtgtttcacaaatagaataagaccatttctcgaatattcaatggaagttggatagctgcttgctgatagcacagagcagagcatctcaacgatggctgaagattagaatcacttgggggatcttttaaaagtctgattccctggggtcatcccagaccaattaatcagagtcactgaggtgggtcttcaggtgatttcaaagtgcagctgaggcacaaagtttctcaatttcagtgtgcattatccttgggcggcttgcctccacctgtccaccaccccaaagaaatttggtttcgtaggtgtgggattttctcacagatctacattcacacatgca

SEQ ID NO: 32266 - DNA, 621 bp, Homo sapiens
agtgatacaatcacagctcactgcawcctctgcctcccagatgtgagagattctcccatctcagcctcccaagtagctgggactacaggcgtgtgccaccacacctggctaaatttcttttgtattttttgtagatatagggtctcaccatgttgcccaggctggtctcaaactcctgggctcaagtgattctcctgcctcggcctcccaaagtgctgagattacacgtgttagctactgtgcctggcctatgtatctctttttatcccttcaacccccttggtgcctaacaagtcacttgagtcttttattcatgatagtgataacatggtatgttaagtttgctctctctaaatgagatagctaccttttttagaaaaataaatgcccaggtagcgtttaataactatttgtgacttcattatgaaaggtattgagccacataatctttaagttggaagggagatgggagatcaccactggctttgcacaactagtccaaaatcacacaatttcttattgacaggtccagatctagaaaccatgtctcctaattttcagttcaaatgctctttataagacacaatactgtttctgcaaaaagtgtaattagcaatctat

SEQ ID NO: 32267 - DNA, 678 bp, Homo sapiens
tcagtcaaaaaaaaaaaaaaaaaaaaaaacttgatgtagaaaacatatatgtgtgacaaatcaccattcaataaaccatcacaaaaacaccgacaatgagtaaaatgcagaattaacaatttgactgagacccaactgacccactcatacttgggaaatgtatccctgacacatacaatccattcactaaacagagaagcaattcattccttttctcctgcaagctaaaactataaatcaagatgttcaagagtaacaaaatgaggtccacaaattaggtaggagaggcttacttttataaaaactggccaaatacccatccattcctatttatactarggaaactctaaatatgggtgacatgccacttaataatacatgtgtatatatgatacatacatacaaatgatgatccacttcaaaatcatatataagaaaaagacatcccatgagagttacaaaggaatggctacctgaagtctgaagcatttcctcctctcgaacaaatgcaacaaaataaaatgggaaagaaaatgttataataactaaattatcacacaagtataaagaattgaacataatcaagaagagcagttacagtcagtccgtgataccgggatcattgcctttacttgaagagaagaaaaagaaaatggattctcttggatctggcaagat

SEQ ID NO: 32268 - DNA, 588 bp, Homo sapiens
tgtcttaacaaaaggaagcagggagtttttatggggctagagagtaagggagggggagtttcagggaaccaagggggaaagtctgtgtttcttcagtctctgataacaccttgagcaatcaggcttctgggcgtcaggrgctggccacaacgaccctgaaggcattccccctgcaacaatttttcatgaccctgaagttatctccttctccttgacaatcaaacagtacatcagcagtatgtaattatattgtgagaacaaggaatattgggcaaaaagcaagtggttaaaacatgcaaacaagcaagggcctgatcagaattttcatttattcagtccttaagaactgcagaatgctgaagtctcaaggggcccggttacaaggctattggaagtttcatcaccctctaaaatgcccttaaatagcttttttgttttgttttttaaaaaattgttggtccggcgcggtggcttacgcctgtaatcccagcattttgggaggctgaggcaggcggatcacctgaagtcaggagttctagaccagcctggccaacatggtgaaaccccgtctctactaaaaatacaaaa

SEQ ID NO: 32269 - DNA, 889 bp, Homo sapiens
tcccaactctgcctgctgagtagctgggaccacaggcatacaccaccgcacctggctaatttttaaaatttttgggccaggtgcggtggctcacgcctgtaatcccagcactttgggaggccaaggtgggtggatcacgaggtcaggagatygagaccatcctggctaacacggtgaaaccccatctctactaaaaatacaaaacattagccgggcgtggtggcaggcgcctgtagtcccagctactcgggaggctgaggcaggagaatggcatgaacctgggaggtggagctgccagtaagctgagatcatgccactgcactccagcctgggcgacagagtgagactccgtctcaaaaaaaaaaaaaaaaaatttgtaggaatggggtctccctatgttgcccaggctggtctcaaactcctgggctcaagcagtcctcccacctcagtctcccaaagttctgggtatacaggcatgagccactgcacctggcctgaactaaagtcttggtaaggctttattctattgtcattcatgtcatttcaacggctttcatttttttgacttaactttgatctcaacgtctctaggaatcgaagtcaactatgaaaatgatttttattgtgggtaatggtaaaaaagagagagaggccgggcacggtggctcatgcctgtaatcctagcactttgggaagctgaggtgggtggatctcttgaggtcaggagttcgagactatcctggccaacatggtgaaaccctgtctactaaaaatatgaaaattagccaggcatggtggcacgtacctgtaatcccagctactcgggaggctgaggcaggagaattggttgaacctgggaggtggaggttgcagtgagccgagatcgcac

SEQ ID NO: 32270 - DNA, 889 bp, Homo sapiens
tcccaactctgcctgctgagtagctgggaccacaggcatacaccaccgcacctggctaatttttaaaatttttgggccaggtgcggtggctcacgcctgtaatcccagcactttgggaggccaaggtgggtggatcacgaggtcaggagattgagaccatcctggctaacacggtgaaaccccatctctactaaaaatacaaaacattagccgggcgtggtggcaggcgcctgtagtcccagctactcgggaggctgaggcaggagaatggcatgaacctgggaggtggagctgccagtaagctgagatcatgccactgcactccagcctgggcgacagagtgagactccgtctcaaaaaaaaaaaaaaaaaatttgtaggaatggggtctccctatgttgcccaggctggtctcaaactcctgggctcaagcagtcctcccacctcagtctcccaaagttctgggtatacaggcatgagccactgcacctggcctgaactaaagtcttggtaaggctttattctattgtcattcatgtcatttcaacggctttcatttttttgacttaactttgatctcaacgtctctaggaatcgaagtcaactatgaaaatgatttttattgtgggtaatggtaaaaaagagagagaggccgggcacggtggctcatgcctgtaatcctagcactttgggaagctgaggtgggtggatcwcttgaggtcaggagttcgagactatcctggccaacatggtgaaaccctgtctactaaaaatatgaaaattagccaggcatggtggcacgtacctgtaatcccagctactcgggaggctgaggcaggagaattggttgaacctgggaggtggaggttgcagtgagccgagatcgcac

SEQ ID NO: 32271 - DNA, 889 bp, Homo sapiens
tcccaactctgcctgctgagtagctgggaccacaggcatacaccaccgcacctggctaatttttaaaatttttgggccaggtgcggtggctcacgcctgtaatcccagcactttgggaggccaaggtgggtggatcacgaggtcaggagattgagaccatcctggctaacacggtgaaaccccatctctactaaaaatacaaaacattagccgggcgtggtggcaggcgcctgtagtcccagctactcgggaggctgaggcaggagaatggcatgaacctgggaggtggagctgccagtaagctgagatcatgccactgcactccagcctgggcgacagagtgagactccgtctcaaaaaaaaaaaaaaaaaatttgtaggaatggggtctccctatgttgcccaggctggtctcaaactcctgggctcaagcagtcctcccacctcagtctcccaaagttctgggtatacaggcatgagccactgcacctggcctgaactaaagtcttggtaaggctttattctattgtcattcatgtcatttcaacggctttcatttttttgacttaactttgatctcaacgtctctaggaatcgaagtcaactatgaaaatgatttttattgtgggtaatggtaaaaaagagagagaggccgggcacggtggctcatgcctgtaatcctagcactttgggaagctgaggtgggtggatctcttgaggtcaggagttcgagaytatcctggccaacatggtgaaaccctgtctactaaaaatatgaaaattagccaggcatggtggcacgtacctgtaatcccagctactcgggaggctgaggcaggagaattggttgaacctgggaggtggaggttgcagtgagccgagatcgcac

SEQ ID NO: 32272 - DNA, 340 bp, Homo sapiens
tgatgaygatgatggataatcacaaggatatgatgaaagcatgagaaacagttgtggcccaacagcgaaacaaattaaaatgtagcataattttgtctttttttttttttttgagatgaagtctcactgttgcccaggttggagtgcaatggcgtgatctcggctcactgtagcctccgcctcctgggttcaagtgattctcctccctcagcctcccaagtagctgggattacaggcatgcacaaccacacccagctaatttttgtatttttagtagagatggggtttcaccatgtcggccaggctggtgtcaaacttctgacctcaagtgatccaccca

SEQ ID NO: 32273 - DNA, 1011 bp, Homo sapiens
aagaagaatttctagaatgtcttgtttttcttccttttagaaacgggctcttgctatgtcctccaggctggcctcaacctcctgagctcaagcgaccctctcacctcagcctctcaagtaactgggtgtgccaccacgcttagccctagaatgtcttctatgtcaggtgtgtgttaagtggagaaaatgcaaaaacaagagcatacagatgccctccaggggttcaggctatgaggggaagcagacagagtttcagtggggagtgctttagaggaaggaatttagaggtgctgggagaagagacaagcatatagctaaaacattccttttctctggactgaatcatggaatgtgagggaggtgakgtgagggagggaaggcattccagacagacgagagtcatgagagaatataatgcacttgagaaagatacatgctgtgcgatgaggctgaggctcacattgtgaaggtcaaactgaagcggcaggtcagggtcagctcacaggttcttctaggtcccgccacctcgcccggctaattttttgtatttttagtagagacggggtttcaccgtgttagccaggatggtctcaatctcctgacctcgtgatctgcccatctcggcctcccagagtgctgggattacaggcgtgagccaccgtgcccggccttttctaggtcttattaaagaatgcatttataataaaatgggaaacttcttctttttttttttgagacagtcttgctctgttgcccagggtggagtgcaatggcgtgatctcagctgactgcaacctccacctcccgggttgaagcaattctcccacctcagcctcccaagtagctgggactacaggcatgtgccaccatgcctggctaatttttgtatttttagtagagacggggtttcaccacgttggccagactgctcttgaactcctgacctcgagtgatccgcccgtctcggcctcccaaagtgctgggattacaggcatgagccaccgcgcccgg

SEQ ID NO: 32274 - DNA, 548 bp, Homo sapiens
tttttgagatgggttctcactccagytgccaaggctggagtgcagtggtgcaatcatggctcactgtagcctcggcttcctgggctcaggtaattcttcaacctcagcctgggactacaggcacgcaccaccaggccaagctaattttcgcatttttagtggagacgggtttcaccgtgttgcccaggctggtttcaaattcctgtgctcaagcagtctgcctgccttggcctcccaaagtgctgggattacaggcataaaccactgcgcccagccttcaatattcttaatagtgatttattaacagccagatcatagggtccaattttaaagcaagttggttatggcaaaaatgcggtcaaaaaggagtttttaaaataatgctttaagttattattactattgttttagatagggtctcactctgtctctcaggctggaatgcagtggcatgatcacagcttactgcagcctcaacctcctgggctccagtgatctgcccacctcagcctcctgagtagctgggactacaggcaagagctaccaca

SEQ ID NO: 32275 - DNA, 548 bp, Homo sapiens
tttttgagatgggttctcactccagttgccaaggctggagtgcagtggtgcaatcatggctcactgtagcctcggcttcctgggctcaggtaattcttcaacctcagcctgggactacaggcacgcaccaccaggccaagctaattttcgcatttttagtggagacgggtttcaccgtgttgcccaggctggtttcaaattcctgtgctcaagcagtctgcctgccttggcctcccaaagtgctgggattacaggcataaaccactgcgcccagccttcaatattcttaatagtgatttattaacagccagatcatagggtccaattttaaagcaagttggttatggcaaaaatgcggtcaaaaaggagtttttaaaayaatgctttaagttattattactattgttttagatagggtctcactctgtctctcaggctggaatgcagtggcatgatcacagcttactgcagcctcaacctcctgggctccagtgatctgcccacctcagcctcctgagtagctgggactacaggcaagagctaccaca

SEQ ID NO: 32276 - DNA, 761 bp, Homo sapiens
gtggatcctcatttcttgttgattctttgctgctggcctcatttcaaagcccactctgatgatccatccccaccactctcgaaaaaaaaccggccaggcgcagtggcctataatttcagcacttcrggaggccgaggcgggcggatcacttgaggtcaggagttcgagaccagcctcgccaacatggtaaaaccccatctctactaaaaatacaaaaattagccgggtgtgatggctcttgcctgtagtctcagctacttgggaggctgaggcaggagaatcgcttgaacctgggaagctgaggttgcagtgagccgagatcacgccactgctctccagcctgtgcgacagagtgagactccttctaaaaacaaacaaacaaaacaaacaaacaaacaaagcatgcatttcccatggagggagttcctggaaccctcctgggcttcaccactaccctctggaagagaccccctccaacatccgctggcgggtagatgaagccacagccactgaaacaaatgagacagttaagctgccccctcctcccaccccaccccccagcaacttccatacatccggctgtttcaaagagcagacaaggccaaggcaggaacaatccctcagatcagattccttggtgtgtgtgtgaatgttagtgtgtgtgtgtatgctcacacccgtgtgtgtggaggcaggtctgggggcaaaaggagaaggaaatccacccacatcagcgtgcattttcccagctgagaagtgcc

SEQ ID NO: 32277 - DNA, 761 bp, Homo sapiens
gtggatcctcatttcttgttgattctttgctgctggcctcatttcaaagcccactctgatgatccatccccaccactctcgaaaaaaaaccggccaggcgcagtggcctataatttcagcacttcgggaggccgaggcgggcggatcacttgaggtcaggagttcgagaccagcctcgccaacatggtaaaaccccatctctactaaaaatacaaaaattagccgggtgtgrtggctcttgcctgtagtctcagctacttgggaggctgaggcaggagaatcgcttgaacctgggaagctgaggttgcagtgagccgagatcacgccactgctctccagcctgtgcgacagagtgagactccttctaaaaacaaacaaacaaaacaaacaaacaaacaaagcatgcatttcccatggagggagttcctggaaccctcctgggcttcaccactaccctctggaagagaccccctccaacatccgctggcgggtagatgaagccacagccactgaaacaaatgagacagttaagctgccccctcctcccaccccaccccccagcaacttccatacatccggctgtttcaaagagcagacaaggccaaggcaggaacaatccctcagatcagattccttggtgtgtgtgtgaatgttagtgtgtgtgtgtatgctcacacccgtgtgtgtggaggcaggtctgggggcaaaaggagaaggaaatccacccacatcagcgtgcattttcccagctgagaagtgcc

SEQ ID NO: 32278 - DNA, 668 bp, Homo sapiens
attttatgcgaaagaaatggtcttagtgttgaaggccattaatacaatgtcctactatttcactatcctctgttgaagatactgatggggttatttgggccaaagtcatggtcaatagatctttgtaaagaatacaggatagaatcctgagaaagttttaaaatataactagcttctacaatttgtataaaagtctttattagtggaagaatattgatatctaaggaatgtgtggttatacacaaccaccatgaackattttctatgatagtcccaagaaagccaagcctcagaccccacaaataaattgttacaaaataaaataacataacataagtatggccctgggttagtactgtttattttcaccaaagattaaatatcaatgtaaataaactaccataatgaaggaaacaaaggtatccacactccaaaccatgtggacgcaagttattgaaactgctaagtgttcagtaaaatctcagggcttaggaacctcagagatgtcatttaaatggcactatttatgacacatgatattactgactaggtcattatattttgtttgttttgttttttttttgttcttattattctatttttaattgacagagaaaattatatgtattctgagtctcaagtcaaggctaaatgaaataaaaattata

SEQ ID NO: 32279 - DNA, 668 bp, Homo sapiens
attttatgcgaaagaaatggtcttagtgttgaaggccattaatacaatgtcctactatttcactatcctctgttgaagatactgatggggttatttgggccaaagtcatggtcaatagatctttgtaaagaatacaggatagaatcctgagaaagttttaaaatataactagcttctacaatttgtataaaagtctttattagtggaagaatattgatatctaaggaatgtgtggttatacacaaccaccatgaactattttctatgatagtcccaagaaagccaagcctcagaccccacaaataaattgttacaaaataaaataacataacrtaagtatggccctgggttagtactgtttattttcaccaaagattaaatatcaatgtaaataaactaccataatgaaggaaacaaaggtatccacactccaaaccatgtggacgcaagttattgaaactgctaagtgttcagtaaaatctcagggcttaggaacctcagagatgtcatttaaatggcactatttatgacacatgatattactgactaggtcattatattttgtttgttttgttttttttttgttcttattattctatttttaattgacagagaaaattatatgtattctgagtctcaagtcaaggctaaatgaaataaaaattata

SEQ ID NO: 32280 - DNA, 668 bp, Homo sapiens
attttatgcgaaagaaatggtcttagtgttgaaggccattaatacaatgtcctactatttcactatcctctgttgaagatactgatggggttatttgggccaaagtcatggtcaatagatctttgtaaagaatacaggatagaatcctgagaaagttttaaaatataactagcttctacaatttgtataaaagtctttattagtggaagaatattgatatctaaggaatgtgtggttatacacaaccaccatgaactattttctatgatagtcccaagaaagccaagcctcagaccccacaaataaattgttacaaaataaaataacataacataagtatggccctgggttagtactgtttattttcaccaaagattaaatatcaatrtaaataaactaccataatgaaggaaacaaaggtatccacactccaaaccatgtggacgcaagttattgaaactgctaagtgttcagtaaaatctcagggcttaggaacctcagagatgtcatttaaatggcactatttatgacacatgatattactgactaggtcattatattttgtttgttttgttttttttttgttcttattattctatttttaattgacagagaaaattatatgtattctgagtctcaagtcaaggctaaatgaaataaaaattata

SEQ ID NO: 32281 - DNA, 668 bp, Homo sapiens
attttatgcgaaagaaatggtcttagtgttgaaggccattaatacaatgtcctactatttcactatcctctgttgaagatactgatggggttatttgggccaaagtcatggtcaatagatctttgtaaagaatacaggatagaatcctgagaaagttttaaaatataactagcttctacaatttgtataaaagtctttattagtggaagaatattgatatctaaggaatgtgtggttatacacaaccaccatgaactattttctatgatagtcccaagaaagccaagcctcagaccccacaaataaattgttacaaaataaaataacataacataagtatggccctgggttagtactgtttattttcaccaaagattaaatatcaatgtaaataaactaccataatgaaggaaacaaaggtatccacactccaaaccatgtggamgcaagttattgaaactgctaagtgttcagtaaaatctcagggcttaggaacctcagagatgtcatttaaatggcactatttatgacacatgatattactgactaggtcattatattttgtttgttttgttttttttttgttcttattattctatttttaattgacagagaaaattatatgtattctgagtctcaagtcaaggctaaatgaaataaaaattata

SEQ ID NO: 32282 - DNA, 668 bp, Homo sapiens
attttatgcgaaagaaatggtcttagtgttgaaggccattaatacaatgtcctactatttcactatcctctgttgaagatactgatggggttatttgggccaaagtcatggtcaatagatctttgtaaagaatacaggatagaatcctgagaaagttttaaaatataactagcttctacaatttgtataaaagtctttattagtggaagaatattgatatctaaggaatgtgtggttatacacaaccaccatgaactattttctatgatagtcccaagaaagccaagcctcagaccccacaaataaattgttacaaaataaaataacataacataagtatggccctgggttagtactgtttattttcaccaaagattaaatatcaatgtaaataaactaccataatgaaggaaacaaaggtatccacactccaaaccatgtggacgcaagttattgaaactgctaagtgttcagtaaaatctcagggcttaggaacctcagagatgtcatttaaatggcactatttatgacacatgatattactgactaggtcattatattttgtttgttttgttttttttttgttcttattattctatttttaattracagagaaaattatatgtattctgagtctcaagtcaaggctaaatgaaataaaaattata

SEQ ID NO: 32283 - DNA, 548 bp, Homo sapiens
gccttaacatttaagagattttagttgcaaaataaagaagaccttttttggatcattgaagatggtcataaataatgtgtttatttaaagggtattggcaaacgaaaggtacaaaataaaagtaagggatgtatgtactatctgtctctagatacataaagagtgtggaaattagaacagaagccttaaaataatatatttaggacaaaatgagacatacatctctgcttgagcactgactgatgaataagatatccagtgaagacgttgaagttatagcatattacttttaaaattacataaattacttttgagaataatgaaacttcctcagaatgctgccaacaaasgaagaaggcagaacggtagatctccaaagatgtccacacctgaattctcaaatcctgtgaatacttaccttacatggtgtgaaccctgaatggttcaatccctcagaatgaatcctgagtggctaaccgtgcttaaattcaaattaaagccaagcagccatttgctgactagaggtcacacatgtactttgaactccc

SEQ ID NO: 32284 - DNA, 868 bp, Homo sapiens
tggttattgctgatgtcactggacatagatctgcttggaaagaattcctagtatgagttttgcttttaggatagatgtcaaaaacatcttttcaaccttaaagatctaaattagaactctgctcccttccccctactccccaccctacaacacacacaacctgctcttcctgccatcttctacatctcaataaacagcaactccaaccttctaggtgctcagtccaaatccttactgccatccttaactcctctttttctcaaataccccatataagcaaggctttgccagttctgtcttaaaaatatacccagaatccatctactttttaccacctccrctaattaaatgatcatcttttccatggatcaaggcaataacctcccaactagtctcctggcctctacccttgctccagcacagtatgttcttctaatttttttgtaactttacttttttgttgtttttgtagatagggtcttgctctgtcacccaggcaggaatgcagtggcaccatcttggcccactgcagccttcaactcctgggctcaagcgatcctcccacctctgactcctgagtagctgggactaaaggcacaggccaccatgcctggctagtttttgtattttgtttgtaaaggcagggtctcactatgttgcccaggctggagtgtggtagcacaatcgtagatcactgtaatcctgaactccgaggcttaagtgatcggcctacagacgtgcgccaccatgcccagctaatagttttattgttaatcatgcctgacttcgtggggtaggaattcctgtctatttaatttgtatcccccatgcccagaacagtgtctggcgtttggacggtgttcaataa

SEQ ID NO: 32285 - DNA, 1060 bp, Homo sapiens
tcctgcattggcctcccaaatgctgggattayaggtgtgagtgaccattactagccactattcactttaaagtcacgggaatacggctttatggcacagccaaccatgaatattgtcacttaactatataaaggggcaaataacataggacaagtgaataggaataaaaattcaatttagttgtagggagggacaaggttttgtaaaaagccagttatggtaatactaaaaatatatacagaggtcaaatattcaaatcatatttgaacgaattatgctaaaggagagaaaaattaacaatttaccactcagcatttcttgctgcctgtttatcagagaatatcacccttgcctggggctgactggtccttgcattggccctgtaaatacacaattgtctgttctggtattagccaggagactccagaatggcagaagggcaacccagagctctttcctcagtcttcattacagggtggggttgtttgtggctagtgtggggagaagctgaaattgaaatattagagaagacactaatttgaaaggtagagaagatctgtaacatcttcacagaaatttccttcttggagttaggctttaaatggacataaactgctcctctggaatcactggacatcattaaataaatatactcttctactattacaaaagccatgctttctctattttattctaggaccctaagtgactatagtttctaaaaagagaatgattcttgaatagttcaggaattttataatgtctgttcttcttgtttgacccctgtccctagtcttgcttttattaaaggtatgtatcattctatttctagatttttaaaaaatactaaggattaataaaattaaacatagacactgtactctggttggcaaatctgcttcttataatagggtatggattagcaattctgaaataactttatgtctataatgaataagtaatatagctaatgaaaaccaaaaagagaagttatagtacacataatcaaaggaagaataatagaatgaacctggtggcattggactggagaaaaaaggat

SEQ ID NO: 32286 - DNA, 1060 bp, Homo sapiens
tcctgcattggcctcccaaatgctgggattataggtgtgagtgaccattactagccactattcactttaaagtcacgggaatacggctttatggcacagccaaccatgaatattgtcacttaactatataaaggggcaaataacataggacaagtgaataggaataaaaattcaatttagttgtagggagggacaaggttttgtaaaaagccagttatggtaatactaaaaatatatacagaggtcaaatattcaaatcatatttgaacgaattatgctaaaggagagaaaaattaacaatttaccactcagcatttcttgctgcctgtttatcagagaatatcacccttgcctggggctgactggtccttgcattggccctgtaaatacacaattgtctgttctggtattagccaggagactccagaatggcagaagggcaacccagagctctttcctcagtcttcattacagggtggggttgtttgtggctagtgtggggagaagctgaaattgaaatattagagaagacactaatttgaaaggtagagaagatctgtaacatcttcacagaaatttccttcttggagttaggctttaaatggacataaactgctcctctggaatcactggacatcattaaataaatatactcttctactattacaaaagccatgctttctctattttattctaggaccctaagtgactatagtttmtaaaaagagaatgattcttgaatagttcaggaattttataatgtctgttcttcttgtttgacccctgtccctagtcttgcttttattaaaggtatgtatcattctatttctagatttttaaaaaatactaaggattaataaaattaaacatagacactgtactctggttggcaaatctgcttcttataatagggtatggattagcaattctgaaataactttatgtctataatgaataagtaatatagctaatgaaaaccaaaaagagaagttatagtacacataatcaaaggaagaataatagaatgaacctggtggcattggactggagaaaaaaggat

SEQ ID NO: 32287 - DNA, 1589 bp, Homo sapiens
tgttgtgaattcataagtgaatttggaacgaatttgtctgtatgatactaaatcctctttatccaagaatcatatgtgtctttatatttattccagtctatatttatatcactgagtaaatatatagaaaagtagatacatacagctgtagttatagatacaaatatagataaaacattttaaatctatatctagcccatataacatatatacatgttatatgtgtgtgtgtatatatatatatgtttatgttattaaagagctcccttaaaattttccttttatttcctatataattttaggtcgagcttgaattttccttgtttagacattgtatcttattttagcattgaatattttcacaattagtataaatattatctaatatttataatgtacctgttaaaaatatttaaaattttacctttgaattattttattgttgaattaaaattcctttaatatgatagtaaatttctatattatgctttctctatgcatatgcaaattaatctatccacttctctatctctatgtagtaacatattaaaatcaggcctctcttcttctaatggacatacacatgtttgcatatagaatatcggactctttatagcatttaaaatctttaaagaaatgaatattgctttttaacaaatatattttagcatgtactgagaatcccctatttatttttaatttgggctaatcaatatgattattaatattattggattaccaaatttggaaacacactttcttccccaaggtggatatttgttttattttttttgccaatttcttgtcttactgtttcaaatattgttggatattatttttattttatttggcattttagtatcaacatttgtaattgatgtactctacatgttttttcttcaatatctggtgggttttataattactgctatattggatttgtagtagacattgacaaatttattcctgtatgttttatagctgtatgaaggaaactaatatattttacccctaaatatatttccttgatatatttcaaaatggatattgagaagggctggaaatgcaaacttagctgcaaagctgtcttggggagatttgcataggtagataatctgccttgatgcagccaggctttctctgaggtctgcccccttgtctggatctaggaaagcttaaatgagagtctgaggtctctaaaggtctgaaagaaacattttctgtctattttctctgaggactgctcccagtgaggttccacctaggtaataagtccactgttgctagccagggtcgttttctyacataaccttatttttttccctgtgatccaagaccccattctttctgtaaacttcatgtggtagataagcttctgcactcatcgtgtgtctgtgtcttcattctaagggctccggtgtacacacattgcagaatcctgtatgccttttctattatttacctgcctcctattagtgattttcagggaaacttcagaaggcaacagggacattctcctttagcccattctcagacaaaaccccccaacatttaactgattcctagtagcttaaaatcactttgaaaaa

SEQ ID NO: 32288 - DNA, 640 bp, Homo sapiens
cacaggaaggggaatgtcacactctggggactgtggtggggttgggggagcggggatggatagcattggaagatatacctaatgctagatgacgagttagtgggtgcagcacrccagcatggcacatgaatacatatgtaactaacctgcacaatgtgcacatgtaccctaaaacttaaattgtaataaaaaaacaggaattaatgaaggtagcacctacttttcaaagagcgcatttttttcacagacctattaaataagacaaataacatttaaactttatttttaaatttgcagaatagtagttttcagcagatggtttattttagcaaattccaccttcacattgtgctatgcttttaagagttccagctgttaacggattatattttaccgctgaaaatatcatgtgtgatataattgctcattatgtgccttaaaacacaaacaatataattattttcaacttgcagcaaattaaagtcttatcagcaatttaaaaactctagagtcgtcttctggttattttaaacttgtatttttctctttatgtttttagtgagttgtcttatcaaggagaagaactcaaggtgattattcttttttttctcttccatccacctcgcacgtgtgttaataa

SEQ ID NO: 32289 - DNA, 578 bp, Homo sapiens
gaaggcagtccatctggtcccagaaccgtaagttttaactcctgtggctaggttcttactattagccgcagatttatttcacatctgaactttcacatattatatgtgggcaaattgccaggaacctaagcttgatttgttggtacaacatcttcyattccaaaatgcccgtagccagccctcctgaatccctcggcctatggggctaaaaagctggtttttttctatggccattcaactattttacattttgtcaacttgtcaaggtatcatacgctattcgtccatagatctccttaatgtccatatcacaccctgtggacttgcagaggttgcacattgaaatatgacttaccctggtaatccacatcttaatttcttaataatacccatctcagccgggcgcggtggctcacgcctgtaatcccaggactttgggaggccgagacgggcggatcacgaggtcaggagatcaagaccatcctggctaacgcggtgaaaccccgtctctactaaaaatacaaaaaattagccaggcgtggtggcgggcgcctgtagtcccagctactcgggaggct

SEQ ID NO: 32290 - DNA, 1049 bp, Homo sapiens
acataaagatgtgctttttttttttttttcttgtttatcttttattttgcttctggtagcagcagttcttaaaactcatggcacacgacactttcattttggcctgggatcttggcctgcttgtacaatagctgcaaaggtttgggattgagattcagctttcaaaagcgactctccatcactgtcttctttcaaggacaggaaatttcaaatcaactttgggctttaccattcagtgtgccaaacattcctgaagtttctacgattgccaataaataagacattccatcatctttaagacatcaaatcttctgataaattgaatttcataaaatattgctctattgatcttagtgctcaactttcaataaggcaagccagcaagagttgctggctggtactttttctgcaatgaggatgtcatctgcttacatggggagagacatttatgaggccagggttcctgactttaaatttcagttcctggcactatatcaagtccacagtgatgacagttamcttctctccattgctgctgctttaactttatagaaaactttgcttatgcttattaaacaatgtggcacaaaccctgtgaggctacactgcaagtcatgtaagctagtacttggcacatagtgggtatgtgatctctgttaaagctctctttccagctaggacaaaggaaaatcaaacttgtctcaaaactcaattttgagagttcatctcgttttcagaaaggaaagggccaatgatgaaaactgatgacatggcaagactgagaagaaaaaaacacagtatttcttctccacacggtttttccagggctgctcttgaaattgtctgcaatgatgtgcatgtattttttttaattttaaaaacaaataacatttttatacttttataatgacaacatgtcttgaatgccatctgttcttgccatttgttaaggcaactcaatgagaaaacagcattcggatgactaatatttagcctgctcatagtttttaaaatggatggacagattcccttgagattacaccccagga

SEQ ID NO: 32291 - DNA, 1049 bp, Homo sapiens
acataaagatgtgctttttttttttttttcttgtttatcttttattttgcttctggtagcagcagttcttaaaactcatggcacacgacactttcattttggcctgggatcttggcctgcttgtacaatagctgcaaaggtttgggattgagattcagctttcaaaagcgactctccatcactgtcttctttcaaggacaggaaatttcaaatcaactttgggctttaccattcagtgtgccaaacattcctgaagtttctacgattgccaataaataagacattccatcatctttaagacatcaaatcttctgataaattgaatttcataaaatattgctctattgatcttagtgctcaactttcaataaggcaagccagcaagagttgctggctggtactttttctgcaatgaggatgtcatctgcttacatggggagagacatttatgaggccagggttcctgactttaaatttcagttcctggcactatatcaagtccacagtgatgacagttaccttctctccattgctgctgctttaactttatagaaaactttgcttatgcttattaaacaatgtggcacaaaccctgtgaggctacactgcaagtcatgtaagctagtacttggcacatagtgggtatgtgatctctgttaaagctctctttccagctaggacaaaggaaaatcaaacttgtctcaaaactcaattttgagagttcatctcgttttcagaaaggaaagggccratgatgaaaactgatgacatggcaagactgagaagaaaaaaacacagtatttcttctccacacggtttttccagggctgctcttgaaattgtctgcaatgatgtgcatgtattttttttaattttaaaaacaaataacatttttatacttttataatgacaacatgtcttgaatgccatctgttcttgccatttgttaaggcaactcaatgagaaaacagcattcggatgactaatatttagcctgctcatagtttttaaaatggatggacagattcccttgagattacaccccagga

SEQ ID NO: 32292 - DNA, 607 bp, Homo sapiens
attcaatttgctaatgtttttttgagaatttttggatcttagttcatgagggactttggtcttttttggtaacatccctgtcaggttttgctcttttttttttgacctgtgggttacttggaaaagggtttttttttttttttttttaaccagataattgggatttttctatgtattttaatgttactgatttccaatctgttgtaaagagaatgtactttgtatgacttctttcctttggaatttgtcaaaaccttgttttatggtcccagcgtaaagtctctcttagggttggcaaagtatgctctgtagactggcagttattgtgtgtgtgtgtgtgtgtgtgtgtgtgtgttactgaatgtactatgcacatttcaagagatgtatacagttagccctccatatctgcaggttatacatttgtgaattcaaccactgtggattgaaaaaaatgttttaaatacaacagtgtaagtaagcaaataaaaatacartataacaactgtttatacagcatttacactgtatttggtattataagtaatctagagatgatttaacataaatgggaggatgtacataggttatatacaaataccacacc

SEQ ID NO: 32293 - DNA, 615 bp, Homo sapiens
tgaatcatgtgtgcttattttctttaatcaaatttattttgtgtatataaaataatgtgtgtcattttgttgggggtattaaaattgttcaagaagacaacttttccaaaaatctgtaagcataatgaacccttaaaattaacagtactagctacttacaaataatttctgtccattcattagggtaagctatttcaaacttacgttaggaagcatttctagagcccayatttgagctaatcttcatatttggaagttaaaaagcttaagatgtaaagtatcttgcaaatatgtactgaacaacttgctatttttaatgtctgaatatcaactttttatctttatattttctaatataaaatgcttattttttatttttaatataagtattaatttgatatgtttaggttatattttgtgatttattttatatatgtatatttttaatttcactattttgctgaaagtaagaaaactcatggtaccaagataagaaatatacccagcctcatcttggtattgtttcagaaagaaatcagatggtttgtgattacttcttgctatgacgtttgcttgcaatatttcattgctctctcctgtgacattggaggacac
